United States Patent Application Publication US 2005/0244851 A1 - sequence listing, part 77

SEQ ID NO: 2996882 - DNA, 25 bp, Homo sapien
cacacgcaccgtctggcagggaggt

SEQ ID NO: 2996883 - DNA, 25 bp, Homo sapien
gggagccaagcggcacacgcaccgt

SEQ ID NO: 2996884 - DNA, 25 bp, Homo sapien
gcacaggtgctgtcgggatggacct

SEQ ID NO: 2996885 - DNA, 25 bp, Homo sapien
cacaggtgctgtcgggatggaccta

SEQ ID NO: 2996886 - DNA, 25 bp, Homo sapien
ggcacaggtgctgtcgggatggacc

SEQ ID NO: 2996887 - DNA, 25 bp, Homo sapien
cggcacaggtgctgtcgggatggac

SEQ ID NO: 2996888 - DNA, 25 bp, Homo sapien
cggcacaggtgctgtcgggatggac

SEQ ID NO: 2996889 - DNA, 25 bp, Homo sapien
agtggaacgatgatgtccgggcccc

SEQ ID NO: 2996890 - DNA, 25 bp, Homo sapien
ctgagtggaacgatgtcagggcctt

SEQ ID NO: 2996891 - DNA, 25 bp, Homo sapien
acagaacgatgatgtcccgggtccc

SEQ ID NO: 2996892 - DNA, 25 bp, Homo sapien
ggccttgagccaagcggcacacgcg

SEQ ID NO: 2996893 - DNA, 25 bp, Homo sapien
agcagaacaatgatgtccagggtcc

SEQ ID NO: 2996894 - DNA, 25 bp, Homo sapien
tgagcagaacaatgatgtccagggt

SEQ ID NO: 2996895 - DNA, 25 bp, Homo sapien
cagaacaatgatgtccagggtccca

SEQ ID NO: 2996896 - DNA, 25 bp, Homo sapien
tgtgctgagcagaacaatgatgtcc

SEQ ID NO: 2996897 - DNA, 25 bp, Homo sapien
gaggctctcgtcactggtgatgttg

SEQ ID NO: 2996898 - DNA, 25 bp, Homo sapien
ccggcaatgtcatcgaggaagagaa

SEQ ID NO: 2996899 - DNA, 25 bp, Homo sapien
gatgcagaatgacgtccagggtccc

SEQ ID NO: 2996900 - DNA, 25 bp, Homo sapien
gcctctggaggaccgaaccatcctt

SEQ ID NO: 2996901 - DNA, 25 bp, Homo sapien
aaatgctgacacggggccagatgcg

SEQ ID NO: 2996902 - DNA, 25 bp, Homo sapien
gacacataccgcagcattgcaaaat

SEQ ID NO: 2996903 - DNA, 25 bp, Homo sapien
aaatctgaaaactacccactactgt

SEQ ID NO: 2996904 - DNA, 25 bp, Homo sapien
aaataaaaagctgacacataccgca

SEQ ID NO: 2996905 - DNA, 25 bp, Homo sapien
cagctgttcccttgaccgaggagtc

SEQ ID NO: 2996906 - DNA, 25 bp, Homo sapien
gctgttcccttgaccgaggagtctc

SEQ ID NO: 2996907 - DNA, 25 bp, Homo sapien
gttcccttgaccgaggagtctcgga

SEQ ID NO: 2996908 - DNA, 25 bp, Homo sapien
cttgaccgaggagtctcggagctgt

SEQ ID NO: 2996909 - DNA, 25 bp, Homo sapien
cccggaggtcctagcgatgttcacg

SEQ ID NO: 2996910 - DNA, 25 bp, Homo sapien
ctagcgatgttcacggctgcccaaa

SEQ ID NO: 2996911 - DNA, 25 bp, Homo sapien
ttcctccccggaggtcctagcgatg

SEQ ID NO: 2996912 - DNA, 25 bp, Homo sapien
cgatgttcacggctgcccaaagaga

SEQ ID NO: 2996913 - DNA, 25 bp, Homo sapien
ataaaaagtggagccacattgcccc

SEQ ID NO: 2996914 - DNA, 25 bp, Homo sapien
aaataaaaagtggagccacattgcc

SEQ ID NO: 2996915 - DNA, 25 bp, Homo sapien
tgagagtcctggatgggagctcagg

SEQ ID NO: 2996916 - DNA, 25 bp, Homo sapien
ccacattgcccccaagatcccaaag

SEQ ID NO: 2996917 - DNA, 25 bp, Homo sapien
ccagcggcccccgtgatgacgtggg

SEQ ID NO: 2996918 - DNA, 25 bp, Homo sapien
cactgggacgccaggtgccgatcgg

SEQ ID NO: 2996919 - DNA, 25 bp, Homo sapien
agaggctgacgtgggggctccgatg

SEQ ID NO: 2996920 - DNA, 25 bp, Homo sapien
tgacgtggggcttgcgcactgggac

SEQ ID NO: 2996921 - DNA, 25 bp, Homo sapien
tctgctcgctcggaagcccctgtcg

SEQ ID NO: 2996922 - DNA, 25 bp, Homo sapien
cgcgggactctgctcgctcggaagc

SEQ ID NO: 2996923 - DNA, 25 bp, Homo sapien
gggcgcgggactctgctcgctcgga

SEQ ID NO: 2996924 - DNA, 25 bp, Homo sapien
ctgctcgctcggaagcccctgtcgg

SEQ ID NO: 2996925 - DNA, 25 bp, Homo sapien
aacactgggcctgcgtccgtgtcgt

SEQ ID NO: 2996926 - DNA, 25 bp, Homo sapien
gtccgtgtcgtaggctcggccctcg

SEQ ID NO: 2996927 - DNA, 25 bp, Homo sapien
gccgaaggcccgcagggtcgcggtg

SEQ ID NO: 2996928 - DNA, 25 bp, Homo sapien
ctgcggttgactttgacgaacactg

SEQ ID NO: 2996929 - DNA, 25 bp, Homo sapien
gaactattttcagcaggagatagaa

SEQ ID NO: 2996930 - DNA, 25 bp, Homo sapien
gcccggccttccatacattcttaaa

SEQ ID NO: 2996931 - DNA, 25 bp, Homo sapien
tagaaatcaggtctaaacacagaca

SEQ ID NO: 2996932 - DNA, 25 bp, Homo sapien
tttcagcaggagatagaaatcaggt

SEQ ID NO: 2996933 - DNA, 25 bp, Homo sapien
tggagctaacttgggcacacacgtc

SEQ ID NO: 2996934 - DNA, 25 bp, Homo sapien
cacgtacagtacacattggttgaaa

SEQ ID NO: 2996935 - DNA, 25 bp, Homo sapien
gaaaacatgcattgacgaacgtggt

SEQ ID NO: 2996936 - DNA, 25 bp, Homo sapien
aacgtggtccatgaataccttggcc

SEQ ID NO: 2996937 - DNA, 25 bp, Homo sapien
tcaaatgctccatcacaaaggcggc

SEQ ID NO: 2996938 - DNA, 25 bp, Homo sapien
caaatgctccatcacaaaggcggcc

SEQ ID NO: 2996939 - DNA, 25 bp, Homo sapien
ctgctctccaagttttgatgcttga

SEQ ID NO: 2996940 - DNA, 25 bp, Homo sapien
tcaacttctccctgagcttctggtt

SEQ ID NO: 2996941 - DNA, 25 bp, Homo sapien
tccctgagcttctggttgtaaagat

SEQ ID NO: 2996942 - DNA, 25 bp, Homo sapien
gcttctggttgtaaagatgcaaatc

SEQ ID NO: 2996943 - DNA, 25 bp, Homo sapien
cgtcaccgtgtggaagccgaacttg

SEQ ID NO: 2996944 - DNA, 25 bp, Homo sapien
ccgaacttgtccacatactgaggct

SEQ ID NO: 2996945 - DNA, 25 bp, Homo sapien
ggaagccgaacttgtccacatactg

SEQ ID NO: 2996946 - DNA, 25 bp, Homo sapien
tgaagccgcagcacgtcaccgtgtg

SEQ ID NO: 2996947 - DNA, 25 bp, Homo sapien
ggctgggaaccctaaatctgcttgg

SEQ ID NO: 2996948 - DNA, 25 bp, Homo sapien
tgtaaagaaacgtgtggcctagcca

SEQ ID NO: 2996949 - DNA, 25 bp, Homo sapien
gtctcggtaaatctggtaagctcca

SEQ ID NO: 2996950 - DNA, 25 bp, Homo sapien
tccatgtgcagttctagcgagccca

SEQ ID NO: 2996951 - DNA, 25 bp, Homo sapien
tattgtcttgtgaccctgacacatc

SEQ ID NO: 2996952 - DNA, 25 bp, Homo sapien
ttgattctttaccttgtctatgatg

SEQ ID NO: 2996953 - DNA, 25 bp, Homo sapien
tctccccactattgtcttgtgaccc

SEQ ID NO: 2996954 - DNA, 25 bp, Homo sapien
tctaaaagcacagcacttgattctt

SEQ ID NO: 2996955 - DNA, 25 bp, Homo sapien
taaacaggctgtgttagatccgtac

SEQ ID NO: 2996956 - DNA, 25 bp, Homo sapien
catgcaacatggatgtgtatcacgg

SEQ ID NO: 2996957 - DNA, 25 bp, Homo sapien
tgatccagaaatccatccacatgtg

SEQ ID NO: 2996958 - DNA, 25 bp, Homo sapien
cacagcggctttatttgtatgagca

SEQ ID NO: 2996959 - DNA, 25 bp, Homo sapien
ggaccagagttctcgtgcctctcgg

SEQ ID NO: 2996960 - DNA, 25 bp, Homo sapien
aaaaaggtcggccagtcatcctgcc

SEQ ID NO: 2996961 - DNA, 25 bp, Homo sapien
atagtccttctcaatgaggtccagc

SEQ ID NO: 2996962 - DNA, 25 bp, Homo sapien
tctcgtgcctctcggtcagcatagt

SEQ ID NO: 2996963 - DNA, 25 bp, Homo sapien
ccgttttacagatgaacccgcacaa

SEQ ID NO: 2996964 - DNA, 25 bp, Homo sapien
tactcactctggattgacatgcaca

SEQ ID NO: 2996965 - DNA, 25 bp, Homo sapien
tacctggtgacctagcagtggagag

SEQ ID NO: 2996966 - DNA, 25 bp, Homo sapien
gcccggccgagagttatgttttgaa

SEQ ID NO: 2996967 - DNA, 25 bp, Homo sapien
tcaaactcggaatggccatagaagg

SEQ ID NO: 2996968 - DNA, 25 bp, Homo sapien
cccaaacatcaaggcgattgccagt

SEQ ID NO: 2996969 - DNA, 25 bp, Homo sapien
cgcccgaagtggttccagtggttca

SEQ ID NO: 2996970 - DNA, 25 bp, Homo sapien
ttgagcagccttcgcatggtgccca

SEQ ID NO: 2996971 - DNA, 25 bp, Homo sapien
cggcgatgggagacggggatggagg

SEQ ID NO: 2996972 - DNA, 25 bp, Homo sapien
agccgagacccgctgcgggctttat

SEQ ID NO: 2996973 - DNA, 25 bp, Homo sapien
gacccgctgcgggctttattggtcc

SEQ ID NO: 2996974 - DNA, 25 bp, Homo sapien
ttattggtccccaggatctgggagg

SEQ ID NO: 2996975 - DNA, 25 bp, Homo sapien
atgaaaaggaggcgcccgctaaggc

SEQ ID NO: 2996976 - DNA, 25 bp, Homo sapien
ccgctagagcgcgaaagccagggat

SEQ ID NO: 2996977 - DNA, 25 bp, Homo sapien
ccgctaaggcggcaaccgacgctgg

SEQ ID NO: 2996978 - DNA, 25 bp, Homo sapien
gtgttcgcagatcccactccgctag

SEQ ID NO: 2996979 - DNA, 25 bp, Homo sapien
cagcgccgcgccaaaggccagtgtc

SEQ ID NO: 2996980 - DNA, 25 bp, Homo sapien
aaggccagtgtctcgtcctccgcct

SEQ ID NO: 2996981 - DNA, 25 bp, Homo sapien
cggccggttcgtcgctcagggccat

SEQ ID NO: 2996982 - DNA, 25 bp, Homo sapien
gcgctctcgccgaacgcttccagcg

SEQ ID NO: 2996983 - DNA, 25 bp, Homo sapien
tgaggctgctcctggtatttgtcca

SEQ ID NO: 2996984 - DNA, 25 bp, Homo sapien
caaggtgcgggtccaacagatgagg

SEQ ID NO: 2996985 - DNA, 25 bp, Homo sapien
aggtgcgggtccaacagatgaggct

SEQ ID NO: 2996986 - DNA, 25 bp, Homo sapien
aaggtgcgggtccaacagatgaggc

SEQ ID NO: 2996987 - DNA, 25 bp, Homo sapien
tcttgcactatgtccaacaacaagt

SEQ ID NO: 2996988 - DNA, 25 bp, Homo sapien
tgatcttgcactatgtccaacaaca

SEQ ID NO: 2996989 - DNA, 25 bp, Homo sapien
gtctgatcttgcactatgtccaaca

SEQ ID NO: 2996990 - DNA, 25 bp, Homo sapien
tgcactatgtccaacaacaagttca

SEQ ID NO: 2996991 - DNA, 25 bp, Homo sapien
cttgtaagaaaagcagactatgagc

SEQ ID NO: 2996992 - DNA, 25 bp, Homo sapien
taagaaaagcagactatgagcacag

SEQ ID NO: 2996993 - DNA, 25 bp, Homo sapien
tgtaagaaaagcagactatgagcac

SEQ ID NO: 2996994 - DNA, 25 bp, Homo sapien
agaaaagcagactatgagcacagac

SEQ ID NO: 2996995 - DNA, 25 bp, Homo sapien
gcagtgtcctctcgctggccaagga

SEQ ID NO: 2996996 - DNA, 25 bp, Homo sapien
ggactttcccgccagacaacagaaa

SEQ ID NO: 2996997 - DNA, 25 bp, Homo sapien
cctgagacggctgtgagtacttcca

SEQ ID NO: 2996998 - DNA, 25 bp, Homo sapien
gtacttccatagtcaaaactgccaa

SEQ ID NO: 2996999 - DNA, 25 bp, Homo sapien
ctctacatcggcaacttcatgagga

SEQ ID NO: 2997000 - DNA, 25 bp, Homo sapien
atctaaaacaggctctacatcggca

SEQ ID NO: 2997001 - DNA, 25 bp, Homo sapien
gaattgtgaccaaatctaaaacagg

SEQ ID NO: 2997002 - DNA, 25 bp, Homo sapien
ccttgggattctgaattgtgaccaa

SEQ ID NO: 2997003 - DNA, 25 bp, Homo sapien
aaaatcaaaagggatcaggcaggtc

SEQ ID NO: 2997004 - DNA, 25 bp, Homo sapien
ctctgctatttggagaatacggtcc

SEQ ID NO: 2997005 - DNA, 25 bp, Homo sapien
caaaagcatgtagcgggtttcccaa

SEQ ID NO: 2997006 - DNA, 25 bp, Homo sapien
cattatggacattcgtgcttgccca

SEQ ID NO: 2997007 - DNA, 25 bp, Homo sapien
tcatttgtaagagaacagttgaata

SEQ ID NO: 2997008 - DNA, 25 bp, Homo sapien
ggcaggctttctaacggcaatcaca

SEQ ID NO: 2997009 - DNA, 25 bp, Homo sapien
atgaaaggatcacaggcactagcca

SEQ ID NO: 2997010 - DNA, 25 bp, Homo sapien
taacggcaatcacagagtgccaagt

SEQ ID NO: 2997011 - DNA, 25 bp, Homo sapien
gctgcatctcgggccttgtcactga

SEQ ID NO: 2997012 - DNA, 25 bp, Homo sapien
ccttgtcactgacaatcaagtagga

SEQ ID NO: 2997013 - DNA, 25 bp, Homo sapien
agcagctgcatctcgggccttgtca

SEQ ID NO: 2997014 - DNA, 25 bp, Homo sapien
tgcatctcgggccttgtcactgaca

SEQ ID NO: 2997015 - DNA, 25 bp, Homo sapien
ccgagtgaaggtgacgctgcatgag

SEQ ID NO: 2997016 - DNA, 25 bp, Homo sapien
ctgcatgaggcactgaccgtattcc

SEQ ID NO: 2997017 - DNA, 25 bp, Homo sapien
gaggcactgaccgtattcccaacca

SEQ ID NO: 2997018 - DNA, 25 bp, Homo sapien
ttttaggaccagctttcgactttca

SEQ ID NO: 2997019 - DNA, 25 bp, Homo sapien
ctgaacaatcctcaccaaaaagggg

SEQ ID NO: 2997020 - DNA, 25 bp, Homo sapien
ctgcaatcagcgacaccatgtttaa

SEQ ID NO: 2997021 - DNA, 25 bp, Homo sapien
gcgacaccatgtttaatccaatttg

SEQ ID NO: 2997022 - DNA, 25 bp, Homo sapien
gaagtccatctctaagggcccatcc

SEQ ID NO: 2997023 - DNA, 25 bp, Homo sapien
gaacccagaagtccatctctaaggg

SEQ ID NO: 2997024 - DNA, 25 bp, Homo sapien
tgtaacacctaaggtgagggcaatc

SEQ ID NO: 2997025 - DNA, 25 bp, Homo sapien
gaagcggagtatgtaacacctaagg

SEQ ID NO: 2997026 - DNA, 25 bp, Homo sapien
tcacgaagcggagtatgtaacacct

SEQ ID NO: 2997027 - DNA, 25 bp, Homo sapien
agtatgtaacacctaaggtgagggc

SEQ ID NO: 2997028 - DNA, 25 bp, Homo sapien
gtgtagccccatgaaagtcttccct

SEQ ID NO: 2997029 - DNA, 25 bp, Homo sapien
ctcgtgtagccccatgaaagtcttc

SEQ ID NO: 2997030 - DNA, 25 bp, Homo sapien
tgccatgcgtcttgtgcacaggcct

SEQ ID NO: 2997031 - DNA, 25 bp, Homo sapien
ttccctgttggactcggcctcgtgt

SEQ ID NO: 2997032 - DNA, 25 bp, Homo sapien
ctttgcttgacatcaggacgtgtga

SEQ ID NO: 2997033 - DNA, 25 bp, Homo sapien
tgcttgacatcaggacgtgtgataa

SEQ ID NO: 2997034 - DNA, 25 bp, Homo sapien
tttgcttgacatcaggacgtgtgat

SEQ ID NO: 2997035 - DNA, 25 bp, Homo sapien
cttgacatcaggacgtgtgataaat

SEQ ID NO: 2997036 - DNA, 25 bp, Homo sapien
ctggaaggaggaacgggccagattg

SEQ ID NO: 2997037 - DNA, 25 bp, Homo sapien
aaggaggaacgggccagattgcaca

SEQ ID NO: 2997038 - DNA, 25 bp, Homo sapien
tggaaggaggaacgggccagattgc

SEQ ID NO: 2997039 - DNA, 25 bp, Homo sapien
gaaggaggaacgggccagattgcac

SEQ ID NO: 2997040 - DNA, 25 bp, Homo sapien
ctgcagcgtcccatccatggtgatg

SEQ ID NO: 2997041 - DNA, 25 bp, Homo sapien
cctgcagcgtcccatccatggtgat

SEQ ID NO: 2997042 - DNA, 25 bp, Homo sapien
ccccggctgcgtggcaccactgccc

SEQ ID NO: 2997043 - DNA, 25 bp, Homo sapien
cccggctgcgtggcaccactgccct

SEQ ID NO: 2997044 - DNA, 25 bp, Homo sapien
acatgaggacgcctctgcggacagg

SEQ ID NO: 2997045 - DNA, 25 bp, Homo sapien
acaggaagacaacgccatggacagg

SEQ ID NO: 2997046 - DNA, 25 bp, Homo sapien
ggataggaagacaatgccgcggata

SEQ ID NO: 2997047 - DNA, 25 bp, Homo sapien
aggccgccatggacaggaagacgac

SEQ ID NO: 2997048 - DNA, 25 bp, Homo sapien
tgccacggccaggacaaaaccgcgg

SEQ ID NO: 2997049 - DNA, 25 bp, Homo sapien
gccaggacaaaaccgcgggcaggaa

SEQ ID NO: 2997050 - DNA, 25 bp, Homo sapien
acggccaggacaaaaccgcgggcag

SEQ ID NO: 2997051 - DNA, 25 bp, Homo sapien
ctgccacggccaggacaaaaccgcg

SEQ ID NO: 2997052 - DNA, 25 bp, Homo sapien
attgaggaggacacttcccaattcc

SEQ ID NO: 2997053 - DNA, 25 bp, Homo sapien
caattccccctcaagaaacgtatgc

SEQ ID NO: 2997054 - DNA, 25 bp, Homo sapien
accccaggctatcactcccacagcc

SEQ ID NO: 2997055 - DNA, 25 bp, Homo sapien
tgaagaccacggcagcatgaccggg

SEQ ID NO: 2997056 - DNA, 25 bp, Homo sapien
gggagctgcggcagttgccacaccc

SEQ ID NO: 2997057 - DNA, 25 bp, Homo sapien
gccaccagccgggtaaggctcatgg

SEQ ID NO: 2997058 - DNA, 25 bp, Homo sapien
cttcttggcagtagcggcccattct

SEQ ID NO: 2997059 - DNA, 25 bp, Homo sapien
tggtcttccacacgcatgtcatact

SEQ ID NO: 2997060 - DNA, 25 bp, Homo sapien
cagtggtcttagtcacagcacgtac

SEQ ID NO: 2997061 - DNA, 25 bp, Homo sapien
gggtccagtggtcttagtcacagca

SEQ ID NO: 2997062 - DNA, 25 bp, Homo sapien
tcttagtcacagcacgtaccccttt

SEQ ID NO: 2997063 - DNA, 25 bp, Homo sapien
tcgggtccagtggtcttagtcacag

SEQ ID NO: 2997064 - DNA, 25 bp, Homo sapien
cgctgcgatgggtcgggtccagtgg

SEQ ID NO: 2997065 - DNA, 25 bp, Homo sapien
ctcccgctgcgatgggtcgggtcca

SEQ ID NO: 2997066 - DNA, 25 bp, Homo sapien
gcgatgggtcgggtccagtggtccc

SEQ ID NO: 2997067 - DNA, 25 bp, Homo sapien
ccctcccgctgcgatgggtcgggtc

SEQ ID NO: 2997068 - DNA, 25 bp, Homo sapien
ctcccgctgcgatgggtgggatcca

SEQ ID NO: 2997069 - DNA, 25 bp, Homo sapien
cgatgggtgggatccagtggtccca

SEQ ID NO: 2997070 - DNA, 25 bp, Homo sapien
cccctcccgctgcgatgggtgggat

SEQ ID NO: 2997071 - DNA, 25 bp, Homo sapien
tgcgatgggtgggatccagtggtcc

SEQ ID NO: 2997072 - DNA, 25 bp, Homo sapien
ctcccgctgcgatgggtgggatcca

SEQ ID NO: 2997073 - DNA, 25 bp, Homo sapien
cgctgcgatgggtcgggtccagtgg

SEQ ID NO: 2997074 - DNA, 25 bp, Homo sapien
ctcccgctgcgatgggtcgggtcca

SEQ ID NO: 2997075 - DNA, 25 bp, Homo sapien
ccctcccgctgcgatgggtgggatc

SEQ ID NO: 2997076 - DNA, 25 bp, Homo sapien
tcaggccaggtggtcccagtcacag

SEQ ID NO: 2997077 - DNA, 25 bp, Homo sapien
aggccaggtggtcccagtcacagca

SEQ ID NO: 2997078 - DNA, 25 bp, Homo sapien
ccaggtggtcccagtcacagcatgg

SEQ ID NO: 2997079 - DNA, 25 bp, Homo sapien
gccaggtggtcccagtcacagcatg

SEQ ID NO: 2997080 - DNA, 25 bp, Homo sapien
cctgctccgacaccaagaaatggta

SEQ ID NO: 2997081 - DNA, 25 bp, Homo sapien
taaccatgccgactctgcagatgag

SEQ ID NO: 2997082 - DNA, 25 bp, Homo sapien
gcagatggctgagaccacgctagct

SEQ ID NO: 2997083 - DNA, 25 bp, Homo sapien
tgggaagcaaccaatcgcatccgtg

SEQ ID NO: 2997084 - DNA, 25 bp, Homo sapien
ggctctggctggtaacacaggcttc

SEQ ID NO: 2997085 - DNA, 25 bp, Homo sapien
gctctggctggtaacacaggcttct

SEQ ID NO: 2997086 - DNA, 25 bp, Homo sapien
ggcactgccaaatctaggccaagaa

SEQ ID NO: 2997087 - DNA, 25 bp, Homo sapien
aaaagcaactccacccgaggccctg

SEQ ID NO: 2997088 - DNA, 25 bp, Homo sapien
caactccacccgaggccctgggaga

SEQ ID NO: 2997089 - DNA, 25 bp, Homo sapien
caagcaggagatgctggtttgaggc

SEQ ID NO: 2997090 - DNA, 25 bp, Homo sapien
caccagctgtggagtacgttgttcc

SEQ ID NO: 2997091 - DNA, 25 bp, Homo sapien
caacaaatgaacctgcgagcggctg

SEQ ID NO: 2997092 - DNA, 25 bp, Homo sapien
tgcgaggccacagaatcgatccacg

SEQ ID NO: 2997093 - DNA, 25 bp, Homo sapien
tcgatccacgcaagagtgcggctgt

SEQ ID NO: 2997094 - DNA, 25 bp, Homo sapien
tggggcacaggcgagctccccgcaa

SEQ ID NO: 2997095 - DNA, 25 bp, Homo sapien
agtgtgcaacgagaagccggaccgc

SEQ ID NO: 2997096 - DNA, 25 bp, Homo sapien
tgggctgacggcctgaagcccacca

SEQ ID NO: 2997097 - DNA, 25 bp, Homo sapien
gccaacacttgctgagcagaaaccg

SEQ ID NO: 2997098 - DNA, 25 bp, Homo sapien
aacactggttctagccctcctgaat

SEQ ID NO: 2997099 - DNA, 25 bp, Homo sapien
aaacactggttctagccctcctgaa

SEQ ID NO: 2997100 - DNA, 25 bp, Homo sapien
tcaatggcatcacaaaacgtgccca

SEQ ID NO: 2997101 - DNA, 25 bp, Homo sapien
ggtttaagttcagggcactactagc

SEQ ID NO: 2997102 - DNA, 25 bp, Homo sapien
cgtgcccaggtttaagttcagggca

SEQ ID NO: 2997103 - DNA, 25 bp, Homo sapien
tccacccctccctcatcaatggcat

SEQ ID NO: 2997104 - DNA, 25 bp, Homo sapien
gggcaaacagtcttcacgttttcca

SEQ ID NO: 2997105 - DNA, 25 bp, Homo sapien
cgttttccatgtttaaatatttgtg

SEQ ID NO: 2997106 - DNA, 25 bp, Homo sapien
catagggcaaacagtcttcacgttt

SEQ ID NO: 2997107 - DNA, 25 bp, Homo sapien
gttttccatgtttaaatatttgtgc

SEQ ID NO: 2997108 - DNA, 25 bp, Homo sapien
atgtcagccccagtcgctgcacaag

SEQ ID NO: 2997109 - DNA, 25 bp, Homo sapien
ctgcagccatcgaggcacctgagga

SEQ ID NO: 2997110 - DNA, 25 bp, Homo sapien
tctcagggagtctgcagccatcgag

SEQ ID NO: 2997111 - DNA, 25 bp, Homo sapien
agcttccgcagcagggtctggttgc

SEQ ID NO: 2997112 - DNA, 25 bp, Homo sapien
gcagccaaagatcggcagccacgct

SEQ ID NO: 2997113 - DNA, 25 bp, Homo sapien
ttgcagccaaagatcggcagccacg

SEQ ID NO: 2997114 - DNA, 25 bp, Homo sapien
tttgcagccaaagatcggcagccac

SEQ ID NO: 2997115 - DNA, 25 bp, Homo sapien
gatttgcagccaaagatcggcagcc

SEQ ID NO: 2997116 - DNA, 25 bp, Homo sapien
catcttcgtcgtcatcttcggtcag

SEQ ID NO: 2997117 - DNA, 25 bp, Homo sapien
cgtcatcttcggtcaggatgagtgg

SEQ ID NO: 2997118 - DNA, 25 bp, Homo sapien
ccctctgggacgtcgtcatcttcgt

SEQ ID NO: 2997119 - DNA, 25 bp, Homo sapien
cgtcgtcatcttcggtcaggatgag

SEQ ID NO: 2997120 - DNA, 25 bp, Homo sapien
tggcaacggtgccacaggcgccctg

SEQ ID NO: 2997121 - DNA, 25 bp, Homo sapien
aagggaagggccggagtggatgctg

SEQ ID NO: 2997122 - DNA, 25 bp, Homo sapien
gggaagggccggagtggatgctggc

SEQ ID NO: 2997123 - DNA, 25 bp, Homo sapien
ggcaacggtgccacaggcgccctga

SEQ ID NO: 2997124 - DNA, 25 bp, Homo sapien
gccttggcggcaggctgaactttta

SEQ ID NO: 2997125 - DNA, 25 bp, Homo sapien
agggaccaggccttggcggcaggct

SEQ ID NO: 2997126 - DNA, 25 bp, Homo sapien
agccagcggctgcacgaagacgtct

SEQ ID NO: 2997127 - DNA, 25 bp, Homo sapien
ctgcacgaagacgtctctcccaggg

SEQ ID NO: 2997128 - DNA, 25 bp, Homo sapien
cgcacgaccgtgtccttgtccttca

SEQ ID NO: 2997129 - DNA, 25 bp, Homo sapien
ttggctgcagaccaccgcacgaccg

SEQ ID NO: 2997130 - DNA, 25 bp, Homo sapien
gaccaccgcacgaccgtgtccttgt

SEQ ID NO: 2997131 - DNA, 25 bp, Homo sapien
cccttggctgcagaccaccgcacga

SEQ ID NO: 2997132 - DNA, 25 bp, Homo sapien
ccacaaaagagggctcttccctgag

SEQ ID NO: 2997133 - DNA, 25 bp, Homo sapien
tccctgagcaccgtcattgtaggag

SEQ ID NO: 2997134 - DNA, 25 bp, Homo sapien
ccgtcattgtaggagccgtgacccc

SEQ ID NO: 2997135 - DNA, 25 bp, Homo sapien
tgagcaccgtcattgtaggagccgt

SEQ ID NO: 2997136 - DNA, 25 bp, Homo sapien
tgcagggtgcatgtcgactcccaca

SEQ ID NO: 2997137 - DNA, 25 bp, Homo sapien
gggtgcagggtgcatgtcgactccc

SEQ ID NO: 2997138 - DNA, 25 bp, Homo sapien
ggtgcagggtgcatgtcgactccca

SEQ ID NO: 2997139 - DNA, 25 bp, Homo sapien
tggggtgcagggtgcatgtcgactc

SEQ ID NO: 2997140 - DNA, 25 bp, Homo sapien
acgtgtatcgctgtccctgcacagc

SEQ ID NO: 2997141 - DNA, 25 bp, Homo sapien
gcccacagggccaccggctcctcca

SEQ ID NO: 2997142 - DNA, 25 bp, Homo sapien
ctgcacagcccgagcccacagggcc

SEQ ID NO: 2997143 - DNA, 25 bp, Homo sapien
tcacgtgtatcgctgtccctgcaca

SEQ ID NO: 2997144 - DNA, 25 bp, Homo sapien
gtccagcacagacccgaccacatca

SEQ ID NO: 2997145 - DNA, 25 bp, Homo sapien
agcacagacccgaccacatcatccg

SEQ ID NO: 2997146 - DNA, 25 bp, Homo sapien
cgaccacatcatccgccagggctct

SEQ ID NO: 2997147 - DNA, 25 bp, Homo sapien
agacccgaccacatcatccgccagg

SEQ ID NO: 2997148 - DNA, 25 bp, Homo sapien
cacgagtcgagacggcagcaacagg

SEQ ID NO: 2997149 - DNA, 25 bp, Homo sapien
tccacgagtcgagacggcagcaaca

SEQ ID NO: 2997150 - DNA, 25 bp, Homo sapien
atcccccatgccacgccttgtcagt

SEQ ID NO: 2997151 - DNA, 25 bp, Homo sapien
catccacgagtcgagacggcagcaa

SEQ ID NO: 2997152 - DNA, 25 bp, Homo sapien
gcgggtggactgcttcagctgagga

SEQ ID NO: 2997153 - DNA, 25 bp, Homo sapien
gctgcttgtacgtcttcgatgaaca

SEQ ID NO: 2997154 - DNA, 25 bp, Homo sapien
gatgaacactgagagcgtgtgctcc

SEQ ID NO: 2997155 - DNA, 25 bp, Homo sapien
gctgcagcaacatcgtcgtaagacg

SEQ ID NO: 2997156 - DNA, 25 bp, Homo sapien
tgagagcgtgtgctccaatgcaact

SEQ ID NO: 2997157 - DNA, 25 bp, Homo sapien
ggcggaaaccgccagcttctcagag

SEQ ID NO: 2997158 - DNA, 25 bp, Homo sapien
tcaatctctcggtgaaggacccctg

SEQ ID NO: 2997159 - DNA, 25 bp, Homo sapien
tcccagcaaggagctaagaaggcga

SEQ ID NO: 2997160 - DNA, 25 bp, Homo sapien
acagccccaggaacatccgggtggg

SEQ ID NO: 2997161 - DNA, 25 bp, Homo sapien
tcagagataaacctggcagccaccc

SEQ ID NO: 2997162 - DNA, 25 bp, Homo sapien
gataaacctggcagccacccacgaa

SEQ ID NO: 2997163 - DNA, 25 bp, Homo sapien
aaatcagagataaacctggcagcca

SEQ ID NO: 2997164 - DNA, 25 bp, Homo sapien
cccctcaacctctccaagaaatcag

SEQ ID NO: 2997165 - DNA, 25 bp, Homo sapien
tttcaggtgctagaggcggcgtttc

SEQ ID NO: 2997166 - DNA, 25 bp, Homo sapien
tgtttcaggcgctagaggtatcagc

SEQ ID NO: 2997167 - DNA, 25 bp, Homo sapien
aaatcctgagggaatcatctgctcc

SEQ ID NO: 2997168 - DNA, 25 bp, Homo sapien
aaatcctgagggaatcatttgctcc

SEQ ID NO: 2997169 - DNA, 25 bp, Homo sapien
tgcgcattagcaaaggccttccagc

SEQ ID NO: 2997170 - DNA, 25 bp, Homo sapien
cgaaactagagttaagagcccctgg

SEQ ID NO: 2997171 - DNA, 25 bp, Homo sapien
tctgtaactcgggatctcctgccga

SEQ ID NO: 2997172 - DNA, 25 bp, Homo sapien
ccagcatttctgaccggagtttcag

SEQ ID NO: 2997173 - DNA, 25 bp, Homo sapien
ctctggtgtaactctgctcatcgcc

SEQ ID NO: 2997174 - DNA, 25 bp, Homo sapien
cctctgggctgggtacctcggccat

SEQ ID NO: 2997175 - DNA, 25 bp, Homo sapien
ggtgtaactctgctcatcgccctct

SEQ ID NO: 2997176 - DNA, 25 bp, Homo sapien
tctggtgtaactctgctcatcgccc

SEQ ID NO: 2997177 - DNA, 25 bp, Homo sapien
aagcctgtgtaccaccatctccgaa

SEQ ID NO: 2997178 - DNA, 25 bp, Homo sapien
catctccgaaatctaggacagtctc

SEQ ID NO: 2997179 - DNA, 25 bp, Homo sapien
gctgcgctctgttcagttaaatcaa

SEQ ID NO: 2997180 - DNA, 25 bp, Homo sapien
catgttagcctgtgtggcccagaga

SEQ ID NO: 2997181 - DNA, 25 bp, Homo sapien
taaggtaaaatgaggccacgcaagt

SEQ ID NO: 2997182 - DNA, 25 bp, Homo sapien
gagctgactaagatgccacacgatg

SEQ ID NO: 2997183 - DNA, 25 bp, Homo sapien
aaatgcggcctccatgtacgtcgtg

SEQ ID NO: 2997184 - DNA, 25 bp, Homo sapien
gatctgctatgaccagtgtccgcct

SEQ ID NO: 2997185 - DNA, 25 bp, Homo sapien
cacaaagggtcacgcattgcagact

SEQ ID NO: 2997186 - DNA, 25 bp, Homo sapien
aatggacaccagagtattttttcgg

SEQ ID NO: 2997187 - DNA, 25 bp, Homo sapien
taaacgtagaggcagaaaacagcct

SEQ ID NO: 2997188 - DNA, 25 bp, Homo sapien
gggagtctacccatacaaagcaata

SEQ ID NO: 2997189 - DNA, 25 bp, Homo sapien
aaccctaaaaagtgtcctgtgtctg

SEQ ID NO: 2997190 - DNA, 25 bp, Homo sapien
gcaaccctaaaaagtgtcctgtgtc

SEQ ID NO: 2997191 - DNA, 25 bp, Homo sapien
aagcaaccctaaaaagtgtcctgtg

SEQ ID NO: 2997192 - DNA, 25 bp, Homo sapien
ccctaaaaagtgtcctgtgtctgtg

SEQ ID NO: 2997193 - DNA, 25 bp, Homo sapien
actcccggcgggcaagccctggcct

SEQ ID NO: 2997194 - DNA, 25 bp, Homo sapien
tgtccacaattctgaactccaacct

SEQ ID NO: 2997195 - DNA, 25 bp, Homo sapien
ggtggctctgaagacactttattca

SEQ ID NO: 2997196 - DNA, 25 bp, Homo sapien
tgggtcactgccatgaacaggcagg

SEQ ID NO: 2997197 - DNA, 25 bp, Homo sapien
ttccacctgtgtctgtccccctcgc

SEQ ID NO: 2997198 - DNA, 25 bp, Homo sapien
cgtggttccttccacctgtgtctgt

SEQ ID NO: 2997199 - DNA, 25 bp, Homo sapien
ccacctgtgtctgtccccctcgctg

SEQ ID NO: 2997200 - DNA, 25 bp, Homo sapien
ccttccacctgtgtctgtccccctc

SEQ ID NO: 2997201 - DNA, 25 bp, Homo sapien
ggccacacacggcagctctgcgttc

SEQ ID NO: 2997202 - DNA, 25 bp, Homo sapien
ccctgcacggccacacacggcagct

SEQ ID NO: 2997203 - DNA, 25 bp, Homo sapien
acacacggcagctctgcgttccctc

SEQ ID NO: 2997204 - DNA, 25 bp, Homo sapien
ggcagctctgcgttccctctctcgg

SEQ ID NO: 2997205 - DNA, 25 bp, Homo sapien
tcctccggtgtggtgcccccgccat

SEQ ID NO: 2997206 - DNA, 25 bp, Homo sapien
gtcctccggtgtggtgcccccgcca

SEQ ID NO: 2997207 - DNA, 25 bp, Homo sapien
cacagaagagctgtcctccggtgtg

SEQ ID NO: 2997208 - DNA, 25 bp, Homo sapien
gcccacagaagagctgtcctccggt

SEQ ID NO: 2997209 - DNA, 25 bp, Homo sapien
ttcacacccaccaatcaagttcact

SEQ ID NO: 2997210 - DNA, 25 bp, Homo sapien
gctccacgcacacgccgtctgtaca

SEQ ID NO: 2997211 - DNA, 25 bp, Homo sapien
acgccgtctgtacacttcacaccca

SEQ ID NO: 2997212 - DNA, 25 bp, Homo sapien
cacccaccaatcaagttcactaaca

SEQ ID NO: 2997213 - DNA, 25 bp, Homo sapien
ccacgcacacgccagggtctcgttc

SEQ ID NO: 2997214 - DNA, 25 bp, Homo sapien
acgcacacgccagggtctcgttcgg

SEQ ID NO: 2997215 - DNA, 25 bp, Homo sapien
ccgctccacgcacacgccagggtct

SEQ ID NO: 2997216 - DNA, 25 bp, Homo sapien
ctgcacacgacccgctccacgcaca

SEQ ID NO: 2997217 - DNA, 25 bp, Homo sapien
aaggcctcattcagggctctgcaca

SEQ ID NO: 2997218 - DNA, 25 bp, Homo sapien
ataggcacgcgcgaaggcccagcac

SEQ ID NO: 2997219 - DNA, 25 bp, Homo sapien
gcacacgtagcaggcggcgtccctg

SEQ ID NO: 2997220 - DNA, 25 bp, Homo sapien
gtccctgacgttggtgcccacgctg

SEQ ID NO: 2997221 - DNA, 25 bp, Homo sapien
tcgagattgcagtcacaaagggctt

SEQ ID NO: 2997222 - DNA, 25 bp, Homo sapien
gacctcgttccgtggtgacaagtcg

SEQ ID NO: 2997223 - DNA, 25 bp, Homo sapien
cgacttgtcaccacggaacgaggtc

SEQ ID NO: 2997224 - DNA, 25 bp, Homo sapien
cggacctctccgtcttctctgctcc

SEQ ID NO: 2997225 - DNA, 25 bp, Homo sapien
ggacctctccgtcttctctgctcca

SEQ ID NO: 2997226 - DNA, 25 bp, Homo sapien
aagccggacctctccgtcttctctg

SEQ ID NO: 2997227 - DNA, 25 bp, Homo sapien
ctaaagccggacctctccgtcttct

SEQ ID NO: 2997228 - DNA, 25 bp, Homo sapien
gtcaaacaccgcagcaatcaccagt

SEQ ID NO: 2997229 - DNA, 25 bp, Homo sapien
tatgtctcggtcaaacaccgcagca

SEQ ID NO: 2997230 - DNA, 25 bp, Homo sapien
ttctgcagtttatgtctcggtcaaa

SEQ ID NO: 2997231 - DNA, 25 bp, Homo sapien
aaacaccgcagcaatcaccagtgca

SEQ ID NO: 2997232 - DNA, 25 bp, Homo sapien
cttcaggaaaggaaatatcaaaatg

SEQ ID NO: 2997233 - DNA, 25 bp, Homo sapien
tcaggaaaggaaatatcaaaatgag

SEQ ID NO: 2997234 - DNA, 25 bp, Homo sapien
aggaaatatcaaaatgagaaaactt

SEQ ID NO: 2997235 - DNA, 25 bp, Homo sapien
gaaatatcaaaatgagaaaacttac

SEQ ID NO: 2997236 - DNA, 25 bp, Homo sapien
taaagactcttatcttgagactggt

SEQ ID NO: 2997237 - DNA, 25 bp, Homo sapien
cctcttaaaacgtgttcagcgtctt

SEQ ID NO: 2997238 - DNA, 25 bp, Homo sapien
cgtctcaactgtccgctctctgtgg

SEQ ID NO: 2997239 - DNA, 25 bp, Homo sapien
gtgttcagcgtcttatctgtatctg

SEQ ID NO: 2997240 - DNA, 25 bp, Homo sapien
cggccagtcttgacatgggagcacc

SEQ ID NO: 2997241 - DNA, 25 bp, Homo sapien
tgactgcctgagtcgccatgctcct

SEQ ID NO: 2997242 - DNA, 25 bp, Homo sapien
caatgcagggcgtctagagttcagg

SEQ ID NO: 2997243 - DNA, 25 bp, Homo sapien
acaaaccatgggatggacgaccgcg

SEQ ID NO: 2997244 - DNA, 25 bp, Homo sapien
cctgggcaaggtgacaaccacacct

SEQ ID NO: 2997245 - DNA, 25 bp, Homo sapien
tgggcaaggtgacaaccacacctcc

SEQ ID NO: 2997246 - DNA, 25 bp, Homo sapien
ggcaaggtgacaaccacacctccct

SEQ ID NO: 2997247 - DNA, 25 bp, Homo sapien
ctgggcaaggtgacaaccacacctc

SEQ ID NO: 2997248 - DNA, 25 bp, Homo sapien
ctgtctccccacattctcctggaag

SEQ ID NO: 2997249 - DNA, 25 bp, Homo sapien
tccccacattctcctggaaggcggc

SEQ ID NO: 2997250 - DNA, 25 bp, Homo sapien
tctccccacattctcctggaaggcg

SEQ ID NO: 2997251 - DNA, 25 bp, Homo sapien
tgtctccccacattctcctggaagg

SEQ ID NO: 2997252 - DNA, 25 bp, Homo sapien
tttggaataaaggtgtttgaaagca

SEQ ID NO: 2997253 - DNA, 25 bp, Homo sapien
tggaataaaggtgtttgaaagcagc

SEQ ID NO: 2997254 - DNA, 25 bp, Homo sapien
gaataaaggtgtttgaaagcagcca

SEQ ID NO: 2997255 - DNA, 25 bp, Homo sapien
taaaggtgtttgaaagcagccatac

SEQ ID NO: 2997256 - DNA, 25 bp, Homo sapien
ggtccgtagcttctgggagctgact

SEQ ID NO: 2997257 - DNA, 25 bp, Homo sapien
acttctgggcccgtctatggtctgg

SEQ ID NO: 2997258 - DNA, 25 bp, Homo sapien
gctgacgtcaacagagccagctcct

SEQ ID NO: 2997259 - DNA, 25 bp, Homo sapien
tctatggtctggatgaggcacaagc

SEQ ID NO: 2997260 - DNA, 25 bp, Homo sapien
gccccccattcacaggcgaagctga

SEQ ID NO: 2997261 - DNA, 25 bp, Homo sapien
tggggccccccattcacaggcgaag

SEQ ID NO: 2997262 - DNA, 25 bp, Homo sapien
ccccccattcacaggcgaagctgac

SEQ ID NO: 2997263 - DNA, 25 bp, Homo sapien
gggccccccattcacaggcgaagct

SEQ ID NO: 2997264 - DNA, 25 bp, Homo sapien
cagaccccggctgcatttgctttgc

SEQ ID NO: 2997265 - DNA, 25 bp, Homo sapien
ttgctttgctgtccgggaactccag

SEQ ID NO: 2997266 - DNA, 25 bp, Homo sapien
ttctcgtgggaactttgctccccgc

SEQ ID NO: 2997267 - DNA, 25 bp, Homo sapien
actccagagccttctcggctgactt

SEQ ID NO: 2997268 - DNA, 25 bp, Homo sapien
taaaggtaacgtggctcaaatccag

SEQ ID NO: 2997269 - DNA, 25 bp, Homo sapien
gtggctccctatgcgactgggctgc

SEQ ID NO: 2997270 - DNA, 25 bp, Homo sapien
ccgtggctccctatgcgactgggct

SEQ ID NO: 2997271 - DNA, 25 bp, Homo sapien
ctgagctgccccgataaaggtaacg

SEQ ID NO: 2997272 - DNA, 25 bp, Homo sapien
ttctggctgcttgcctaaatttaga

SEQ ID NO: 2997273 - DNA, 25 bp, Homo sapien
tgtgccgcttcttccacgaggctcc

SEQ ID NO: 2997274 - DNA, 25 bp, Homo sapien
tgctctgagactcacactgctcagg

SEQ ID NO: 2997275 - DNA, 25 bp, Homo sapien
aggactgaggtgcaagactcccgca

SEQ ID NO: 2997276 - DNA, 25 bp, Homo sapien
gctgatggagataccataaacttct

SEQ ID NO: 2997277 - DNA, 25 bp, Homo sapien
catccttcactgaaccgtgaacagg

SEQ ID NO: 2997278 - DNA, 25 bp, Homo sapien
gaggctgctgcaatcagtgacagca

SEQ ID NO: 2997279 - DNA, 25 bp, Homo sapien
gagaaacctgcacccaggtggagct

SEQ ID NO: 2997280 - DNA, 25 bp, Homo sapien
tcagcagtcccgggcaggcaagacg

SEQ ID NO: 2997281 - DNA, 25 bp, Homo sapien
agaagcatcgaggaccagcagccgc

SEQ ID NO: 2997282 - DNA, 25 bp, Homo sapien
cagtcccgggcaggcaagacgttga

SEQ ID NO: 2997283 - DNA, 25 bp, Homo sapien
cagccggttcttgggggtggtgaca

SEQ ID NO: 2997284 - DNA, 25 bp, Homo sapien
gccacaaagtgccacaaagctggca

SEQ ID NO: 2997285 - DNA, 25 bp, Homo sapien
tgagccccatgccacaaagtgccac

SEQ ID NO: 2997286 - DNA, 25 bp, Homo sapien
aggtcggtgcacaccagagcgagca

SEQ ID NO: 2997287 - DNA, 25 bp, Homo sapien
gcagccgcctgcacggtctacaaag

SEQ ID NO: 2997288 - DNA, 25 bp, Homo sapien
ttcaggtctcaacagtgttacagcc

SEQ ID NO: 2997289 - DNA, 25 bp, Homo sapien
aacatacaccgtaaacggtcttcag

SEQ ID NO: 2997290 - DNA, 25 bp, Homo sapien
caccgtaaacggtcttcaggtctca

SEQ ID NO: 2997291 - DNA, 25 bp, Homo sapien
aaacggtcttcaggtctcaacagtg

SEQ ID NO: 2997292 - DNA, 25 bp, Homo sapien
actcaaacatttccacttcggtacg

SEQ ID NO: 2997293 - DNA, 25 bp, Homo sapien
ttccacttcggtacgtggtaagaga

SEQ ID NO: 2997294 - DNA, 25 bp, Homo sapien
tccacttcggtacgtggtaagagac

SEQ ID NO: 2997295 - DNA, 25 bp, Homo sapien
caaacatttccacttcggtacgtgg

SEQ ID NO: 2997296 - DNA, 25 bp, Homo sapien
tgttaccgacggcaaaatagtcagc

SEQ ID NO: 2997297 - DNA, 25 bp, Homo sapien
cagttggatctgttaccgacggcaa

SEQ ID NO: 2997298 - DNA, 25 bp, Homo sapien
tagtcagctgtggtcaaaatatcaa

SEQ ID NO: 2997299 - DNA, 25 bp, Homo sapien
caggaaacagttggatctgttaccg

SEQ ID NO: 2997300 - DNA, 25 bp, Homo sapien
catgcaccagcttactgggggtcgt

SEQ ID NO: 2997301 - DNA, 25 bp, Homo sapien
cgtctcgccccacagtcttcctggg

SEQ ID NO: 2997302 - DNA, 25 bp, Homo sapien
tgcccgttagttcaattccagtctg

SEQ ID NO: 2997303 - DNA, 25 bp, Homo sapien
tacaccccaacgaggctgtgatgat

SEQ ID NO: 2997304 - DNA, 25 bp, Homo sapien
ccccagcgacaggaggtcagtcagg

SEQ ID NO: 2997305 - DNA, 25 bp, Homo sapien
caggaggtcagtcaggatggcgcct

SEQ ID NO: 2997306 - DNA, 25 bp, Homo sapien
tgcacggattctaaaacgggggagc

SEQ ID NO: 2997307 - DNA, 25 bp, Homo sapien
ctgcacggattctaaaacgggggag

SEQ ID NO: 2997308 - DNA, 25 bp, Homo sapien
actgcggacacgctgaggacactag

SEQ ID NO: 2997309 - DNA, 25 bp, Homo sapien
aggacactagcggaggacacatgca

SEQ ID NO: 2997310 - DNA, 25 bp, Homo sapien
tgaggacgcactgcggacacgcgct

SEQ ID NO: 2997311 - DNA, 25 bp, Homo sapien
gacatgcgctgaggacacatgctga

SEQ ID NO: 2997312 - DNA, 25 bp, Homo sapien
acgcactgcggacacgcactgagga

SEQ ID NO: 2997313 - DNA, 25 bp, Homo sapien
cgaaaagcagctgaggacacgcgtg

SEQ ID NO: 2997314 - DNA, 25 bp, Homo sapien
gctgaggacacgtgcgctgaggacg

SEQ ID NO: 2997315 - DNA, 25 bp, Homo sapien
gaaaagcagctgaggacacgcgtgc

SEQ ID NO: 2997316 - DNA, 25 bp, Homo sapien
ggaattcagcacagttactttcaaa

SEQ ID NO: 2997317 - DNA, 25 bp, Homo sapien
ctgtgggtgggaattcagcacagtt

SEQ ID NO: 2997318 - DNA, 25 bp, Homo sapien
ggtgagacgcggaagaacgagaact

SEQ ID NO: 2997319 - DNA, 25 bp, Homo sapien
gagaggtggtgagacgcggaagaac

SEQ ID NO: 2997320 - DNA, 25 bp, Homo sapien
ggtggtctatcattggctgcgtgta

SEQ ID NO: 2997321 - DNA, 25 bp, Homo sapien
ggtaaccaggtggtctatcattggc

SEQ ID NO: 2997322 - DNA, 25 bp, Homo sapien
cattggctgcgtgtactcaggaaag

SEQ ID NO: 2997323 - DNA, 25 bp, Homo sapien
gtactcaggaaagccggcaataaac

SEQ ID NO: 2997324 - DNA, 25 bp, Homo sapien
ccgccacgtcggacacactggacca

SEQ ID NO: 2997325 - DNA, 25 bp, Homo sapien
atttgcacgggtacaccgccacgtc

SEQ ID NO: 2997326 - DNA, 25 bp, Homo sapien
ggcactccacaacacgccagcgtgg

SEQ ID NO: 2997327 - DNA, 25 bp, Homo sapien
acgccagcgtggacatttgcacggg

SEQ ID NO: 2997328 - DNA, 25 bp, Homo sapien
taacgcgctgtttatgctccagacc

SEQ ID NO: 2997329 - DNA, 25 bp, Homo sapien
gctgtttatgctccagaccgcactt

SEQ ID NO: 2997330 - DNA, 25 bp, Homo sapien
ttatgctccagaccgcacttcactt

SEQ ID NO: 2997331 - DNA, 25 bp, Homo sapien
gcggtcacagcactaacgcgctgtt

SEQ ID NO: 2997332 - DNA, 25 bp, Homo sapien
ggaccaatagtaggcagcaggacca

SEQ ID NO: 2997333 - DNA, 25 bp, Homo sapien
gaccaatagtaggcagcaggaccac

SEQ ID NO: 2997334 - DNA, 25 bp, Homo sapien
aggaccaatagtaggcagcaggacc

SEQ ID NO: 2997335 - DNA, 25 bp, Homo sapien
gaagcaggaccacagtaggcagctg

SEQ ID NO: 2997336 - DNA, 25 bp, Homo sapien
gaccacggcaggtagccgggccgct

SEQ ID NO: 2997337 - DNA, 25 bp, Homo sapien
caggaagcaggaccacagtaggcag

SEQ ID NO: 2997338 - DNA, 25 bp, Homo sapien
caggaccacggcaggtagccgggcc

SEQ ID NO: 2997339 - DNA, 25 bp, Homo sapien
acagcccctctggtgtcggccgagg

SEQ ID NO: 2997340 - DNA, 25 bp, Homo sapien
gtaaacaaagagctcttcgaggcag

SEQ ID NO: 2997341 - DNA, 25 bp, Homo sapien
caggtggcgtctcatgtgccaggac

SEQ ID NO: 2997342 - DNA, 25 bp, Homo sapien
tgtctagaagaccatcgcctgcaac

SEQ ID NO: 2997343 - DNA, 25 bp, Homo sapien
ggcacaatggcagacgcccgcgctg

SEQ ID NO: 2997344 - DNA, 25 bp, Homo sapien
cagacgcccgcgctggcaggaccac

SEQ ID NO: 2997345 - DNA, 25 bp, Homo sapien
gcagacgcccgcgctggcaggacca

SEQ ID NO: 2997346 - DNA, 25 bp, Homo sapien
caatggcagacgcccgcgctggcag

SEQ ID NO: 2997347 - DNA, 25 bp, Homo sapien
acccatggttgaacatgcggaccgc

SEQ ID NO: 2997348 - DNA, 25 bp, Homo sapien
catatccaataactgcctcatcaga

SEQ ID NO: 2997349 - DNA, 25 bp, Homo sapien
aagcacccatggttgaacatgcgga

SEQ ID NO: 2997350 - DNA, 25 bp, Homo sapien
catggttgaacatgcggaccgcgaa

SEQ ID NO: 2997351 - DNA, 25 bp, Homo sapien
cttgcgtggcgctgaactcgggtgc

SEQ ID NO: 2997352 - DNA, 25 bp, Homo sapien
cctcgcagccaactctcggatgacc

SEQ ID NO: 2997353 - DNA, 25 bp, Homo sapien
tggcgctgaactcgggtgcctgctg

SEQ ID NO: 2997354 - DNA, 25 bp, Homo sapien
gccaggttgtgcagcgccctcgcag

SEQ ID NO: 2997355 - DNA, 25 bp, Homo sapien
atggaagccacctagagaccaagga

SEQ ID NO: 2997356 - DNA, 25 bp, Homo sapien
gatggaagccacctagagaccaagg

SEQ ID NO: 2997357 - DNA, 25 bp, Homo sapien
gtgcaagccacctagagaccaggga

SEQ ID NO: 2997358 - DNA, 25 bp, Homo sapien
cagatggaagccacctagagaccaa

SEQ ID NO: 2997359 - DNA, 25 bp, Homo sapien
atccctcagggtcatcaccccagtg

SEQ ID NO: 2997360 - DNA, 25 bp, Homo sapien
gcatccctcagggtcatcaccccag

SEQ ID NO: 2997361 - DNA, 25 bp, Homo sapien
gcccaggacggcacccgtggtgatg

SEQ ID NO: 2997362 - DNA, 25 bp, Homo sapien
ggacggcacccgtggtgatgcagat

SEQ ID NO: 2997363 - DNA, 25 bp, Homo sapien
acgacctgtgggacgcccacacgca

SEQ ID NO: 2997364 - DNA, 25 bp, Homo sapien
gagggcaggcgacggcgtgcacaca

SEQ ID NO: 2997365 - DNA, 25 bp, Homo sapien
ggagggcaggcgacggcgtgcacac

SEQ ID NO: 2997366 - DNA, 25 bp, Homo sapien
cgtgcacacacggacgacctgtggg

SEQ ID NO: 2997367 - DNA, 25 bp, Homo sapien
aagagacagggccgagagggcaggt

SEQ ID NO: 2997368 - DNA, 25 bp, Homo sapien
ctgcaagagacagggccgagagggc

SEQ ID NO: 2997369 - DNA, 25 bp, Homo sapien
gcaagagacagggccgagagggcag

SEQ ID NO: 2997370 - DNA, 25 bp, Homo sapien
tgcaagagacagggccgagagggca

SEQ ID NO: 2997371 - DNA, 25 bp, Homo sapien
tacaaggcgtaagcaacttctgcgc

SEQ ID NO: 2997372 - DNA, 25 bp, Homo sapien
gcctcatgtgaagatctggactcag

SEQ ID NO: 2997373 - DNA, 25 bp, Homo sapien
tcagtgtcatggacagcagcctcgg

SEQ ID NO: 2997374 - DNA, 25 bp, Homo sapien
tgggctgcaagtttgtacaaggcgt

SEQ ID NO: 2997375 - DNA, 25 bp, Homo sapien
tgctcgtccagatggtccgtgacgg

SEQ ID NO: 2997376 - DNA, 25 bp, Homo sapien
ctcgtccagatggtccgtgacgggc

SEQ ID NO: 2997377 - DNA, 25 bp, Homo sapien
tgcctgctcgtccagatggtccgtg

SEQ ID NO: 2997378 - DNA, 25 bp, Homo sapien
cctgctcgtccagatggtccgtgac

SEQ ID NO: 2997379 - DNA, 25 bp, Homo sapien
cccagagtgatcacaccgcaggtcc

SEQ ID NO: 2997380 - DNA, 25 bp, Homo sapien
aagcatgacgccagcagagagcctg

SEQ ID NO: 2997381 - DNA, 25 bp, Homo sapien
tcacaagcatgacgccagcagagag

SEQ ID NO: 2997382 - DNA, 25 bp, Homo sapien
cagagtgatcacaccgcaggtcccc

SEQ ID NO: 2997383 - DNA, 25 bp, Homo sapien
tccccagagaaatccgacagacgca

SEQ ID NO: 2997384 - DNA, 25 bp, Homo sapien
tttgagaatctctcaaagcccagaa

SEQ ID NO: 2997385 - DNA, 25 bp, Homo sapien
cctttgagaatctctcaaagcccag

SEQ ID NO: 2997386 - DNA, 25 bp, Homo sapien
agagaaatccgacagacgcacacac

SEQ ID NO: 2997387 - DNA, 25 bp, Homo sapien
aaaataggataagaatccgagctga

SEQ ID NO: 2997388 - DNA, 25 bp, Homo sapien
caaaaactcaaggagatcggctcta

SEQ ID NO: 2997389 - DNA, 25 bp, Homo sapien
gagatcggctctattactgcttata

SEQ ID NO: 2997390 - DNA, 25 bp, Homo sapien
taaaagccacgttgtgatggccact

SEQ ID NO: 2997391 - DNA, 25 bp, Homo sapien
ttgtctcatgagctgtcctcccaga

SEQ ID NO: 2997392 - DNA, 25 bp, Homo sapien
gcttgtctcatgagctgtcctccca

SEQ ID NO: 2997393 - DNA, 25 bp, Homo sapien
gtctcatgagctgtcctcccagacc

SEQ ID NO: 2997394 - DNA, 25 bp, Homo sapien
cttgtctcatgagctgtcctcccag

SEQ ID NO: 2997395 - DNA, 25 bp, Homo sapien
aggtgacacccctgcaccgtgtgct

SEQ ID NO: 2997396 - DNA, 25 bp, Homo sapien
ccatgggtacgtcggaaaggtgaca

SEQ ID NO: 2997397 - DNA, 25 bp, Homo sapien
gatggtcttgatcccactaaggagg

SEQ ID NO: 2997398 - DNA, 25 bp, Homo sapien
caactccgggcacccatgggtacgt

SEQ ID NO: 2997399 - DNA, 25 bp, Homo sapien
tctccccgctaagtgcaaatgcagc

SEQ ID NO: 2997400 - DNA, 25 bp, Homo sapien
cccatcatgggtaggtggcagcaat

SEQ ID NO: 2997401 - DNA, 25 bp, Homo sapien
tcaactccgtcgttggccaaaggga

SEQ ID NO: 2997402 - DNA, 25 bp, Homo sapien
cccgcttcacggagcaggagggtaa

SEQ ID NO: 2997403 - DNA, 25 bp, Homo sapien
ggcatgtcaccgacatgccggcgtc

SEQ ID NO: 2997404 - DNA, 25 bp, Homo sapien
ctgatgctcctgcgggcggcatgtc

SEQ ID NO: 2997405 - DNA, 25 bp, Homo sapien
ctcgggggtaagggcgccatcctct

SEQ ID NO: 2997406 - DNA, 25 bp, Homo sapien
tgcgggcggcatgtcaccgacatgc

SEQ ID NO: 2997407 - DNA, 25 bp, Homo sapien
ggtaaatccgaatgaactcctgtgt

SEQ ID NO: 2997408 - DNA, 25 bp, Homo sapien
tgcaagagccactgagactaagacg

SEQ ID NO: 2997409 - DNA, 25 bp, Homo sapien
gaagtccattaacagcgtgtccccg

SEQ ID NO: 2997410 - DNA, 25 bp, Homo sapien
tataaacaaacgagagggtgccacc

SEQ ID NO: 2997411 - DNA, 25 bp, Homo sapien
gcaacagatagaaatagccccagtg

SEQ ID NO: 2997412 - DNA, 25 bp, Homo sapien
gaaatgccacgaccatacgagtcga

SEQ ID NO: 2997413 - DNA, 25 bp, Homo sapien
tgctggtcgaacacactctggtaaa

SEQ ID NO: 2997414 - DNA, 25 bp, Homo sapien
ttctagaagggacagactggtggca

SEQ ID NO: 2997415 - DNA, 25 bp, Homo sapien
tgcccacacgtctgctctgccccat

SEQ ID NO: 2997416 - DNA, 25 bp, Homo sapien
aatgcccacacgtctgctctgcccc

SEQ ID NO: 2997417 - DNA, 25 bp, Homo sapien
ctgcatgaaatgcccacacgtctgc

SEQ ID NO: 2997418 - DNA, 25 bp, Homo sapien
gcatgaaatgcccacacgtctgctc

SEQ ID NO: 2997419 - DNA, 25 bp, Homo sapien
cagacaactcctgttccacgagaga

SEQ ID NO: 2997420 - DNA, 25 bp, Homo sapien
ggaaaacggtcctctcgatgtgaag

SEQ ID NO: 2997421 - DNA, 25 bp, Homo sapien
cgcagccgactggaaagaggaaaac

SEQ ID NO: 2997422 - DNA, 25 bp, Homo sapien
taacctggtacttccatgcctccga

SEQ ID NO: 2997423 - DNA, 25 bp, Homo sapien
acttcccatcgtcacagatactgcc

SEQ ID NO: 2997424 - DNA, 25 bp, Homo sapien
ttcccatcgtcacagatactgccac

SEQ ID NO: 2997425 - DNA, 25 bp, Homo sapien
cttcccatcgtcacagatactgcca

SEQ ID NO: 2997426 - DNA, 25 bp, Homo sapien
cggaggccgtcggtccacctggcgt

SEQ ID NO: 2997427 - DNA, 25 bp, Homo sapien
ggaggccgtcggtccacctggcgtc

SEQ ID NO: 2997428 - DNA, 25 bp, Homo sapien
tacagatgcggaggccgtcggtcca

SEQ ID NO: 2997429 - DNA, 25 bp, Homo sapien
cgtgctacagatgcggaggccgtcg

SEQ ID NO: 2997430 - DNA, 25 bp, Homo sapien
caattacggtgtcacctctaaaggg

SEQ ID NO: 2997431 - DNA, 25 bp, Homo sapien
attacggtgtcacctctaaagggca

SEQ ID NO: 2997432 - DNA, 25 bp, Homo sapien
tacggtgtcacctctaaagggcatt

SEQ ID NO: 2997433 - DNA, 25 bp, Homo sapien
ttacggtgtcacctctaaagggcat

SEQ ID NO: 2997434 - DNA, 25 bp, Homo sapien
gggagaagaactgacccagagtgcc

SEQ ID NO: 2997435 - DNA, 25 bp, Homo sapien
aagaactgacccagagtgccgggcc

SEQ ID NO: 2997436 - DNA, 25 bp, Homo sapien
ctgggagaagaactgacccagagtg

SEQ ID NO: 2997437 - DNA, 25 bp, Homo sapien
gagaagaactgacccagagtgccgg

SEQ ID NO: 2997438 - DNA, 25 bp, Homo sapien
ctggtccacgagggcctgggtggct

SEQ ID NO: 2997439 - DNA, 25 bp, Homo sapien
acgctcctggtccacgagggcctgg

SEQ ID NO: 2997440 - DNA, 25 bp, Homo sapien
gtggctgcagctcccgactgtctgc

SEQ ID NO: 2997441 - DNA, 25 bp, Homo sapien
gggtccgtggtgtcggcggccggca

SEQ ID NO: 2997442 - DNA, 25 bp, Homo sapien
ggggctgctgaggaactggagccgc

SEQ ID NO: 2997443 - DNA, 25 bp, Homo sapien
cactgtgctctggcagcccagtgtg

SEQ ID NO: 2997444 - DNA, 25 bp, Homo sapien
ggggggctgctgaggaactggagcc

SEQ ID NO: 2997445 - DNA, 25 bp, Homo sapien
gctgctgaggaactggagccgcctc

SEQ ID NO: 2997446 - DNA, 25 bp, Homo sapien
aaaaagtcctaacttctgaggctgc

SEQ ID NO: 2997447 - DNA, 25 bp, Homo sapien
taacctttgagaggaatctgtggaa

SEQ ID NO: 2997448 - DNA, 25 bp, Homo sapien
aaagccaaagtgaacattctccacg

SEQ ID NO: 2997449 - DNA, 25 bp, Homo sapien
aaaatcaagttagcgtacccaggca

SEQ ID NO: 2997450 - DNA, 25 bp, Homo sapien
cttcatctgctggcgggagtgactt

SEQ ID NO: 2997451 - DNA, 25 bp, Homo sapien
gcagccagggccgagactgctgcat

SEQ ID NO: 2997452 - DNA, 25 bp, Homo sapien
atagagcagccagggccgagactgc

SEQ ID NO: 2997453 - DNA, 25 bp, Homo sapien
ctgcatagagcagccagggccgaga

SEQ ID NO: 2997454 - DNA, 25 bp, Homo sapien
tcactgcatagagcagccagggccg

SEQ ID NO: 2997455 - DNA, 25 bp, Homo sapien
tgaattgcgggatctgcctcccccg

SEQ ID NO: 2997456 - DNA, 25 bp, Homo sapien
attgcgggatctgcctcccccggct

SEQ ID NO: 2997457 - DNA, 25 bp, Homo sapien
cctgaattgcgggatctgcctcccc

SEQ ID NO: 2997458 - DNA, 25 bp, Homo sapien
gaattgcgggatctgcctcccccgg

SEQ ID NO: 2997459 - DNA, 25 bp, Homo sapien
tcagccaggtactgcgtgatcagct

SEQ ID NO: 2997460 - DNA, 25 bp, Homo sapien
cagccaggtactgcgtgatcagctc

SEQ ID NO: 2997461 - DNA, 25 bp, Homo sapien
ctcagccaggtactgcgtgatcagc

SEQ ID NO: 2997462 - DNA, 25 bp, Homo sapien
gccaggtactgcgtgatcagctcct

SEQ ID NO: 2997463 - DNA, 25 bp, Homo sapien
aaggccaacgagaagccacagcgag

SEQ ID NO: 2997464 - DNA, 25 bp, Homo sapien
ccaacgagaagccacagcgagtcat

SEQ ID NO: 2997465 - DNA, 25 bp, Homo sapien
ggccaacgagaagccacagcgagtc

SEQ ID NO: 2997466 - DNA, 25 bp, Homo sapien
aggccaacgagaagccacagcgagt

SEQ ID NO: 2997467 - DNA, 25 bp, Homo sapien
ggagccggcctttcagaaggaagcc

SEQ ID NO: 2997468 - DNA, 25 bp, Homo sapien
agccggcctttcagaaggaagcctg

SEQ ID NO: 2997469 - DNA, 25 bp, Homo sapien
gagccggcctttcagaaggaagcct

SEQ ID NO: 2997470 - DNA, 25 bp, Homo sapien
tggagccggcctttcagaaggaagc

SEQ ID NO: 2997471 - DNA, 25 bp, Homo sapien
atgcacggccgcaaccaaaacagga

SEQ ID NO: 2997472 - DNA, 25 bp, Homo sapien
gacccggctccacaacgcacaaagg

SEQ ID NO: 2997473 - DNA, 25 bp, Homo sapien
caaaggcaactgtgttctcctcact

SEQ ID NO: 2997474 - DNA, 25 bp, Homo sapien
gctgcttctacaaacaacaccttct

SEQ ID NO: 2997475 - DNA, 25 bp, Homo sapien
atgagataggcagctcctggcacca

SEQ ID NO: 2997476 - DNA, 25 bp, Homo sapien
catgagataggcagctcctggcacc

SEQ ID NO: 2997477 - DNA, 25 bp, Homo sapien
gggaagtgtgggtaactgctcttaa

SEQ ID NO: 2997478 - DNA, 25 bp, Homo sapien
gtgtgggtaactgctcttaaacctg

SEQ ID NO: 2997479 - DNA, 25 bp, Homo sapien
ctcgggggaagtgtgggtaactgct

SEQ ID NO: 2997480 - DNA, 25 bp, Homo sapien
gaagtgtgggtaactgctcttaaac

SEQ ID NO: 2997481 - DNA, 25 bp, Homo sapien
tcgcaatggccttcaagccgtctct

SEQ ID NO: 2997482 - DNA, 25 bp, Homo sapien
ctcgcaatggccttcaagccgtctc

SEQ ID NO: 2997483 - DNA, 25 bp, Homo sapien
cgcaatggccttcaagccgtctctc

SEQ ID NO: 2997484 - DNA, 25 bp, Homo sapien
tggtgtagtcgtccatgcagcccag

SEQ ID NO: 2997485 - DNA, 25 bp, Homo sapien
tgctttcacaccaacagtctggcaa

SEQ ID NO: 2997486 - DNA, 25 bp, Homo sapien
cagcagcgcacagtaaatctgggaa

SEQ ID NO: 2997487 - DNA, 25 bp, Homo sapien
gaaacattctctccgcacacagctt

SEQ ID NO: 2997488 - DNA, 25 bp, Homo sapien
cccaacacctgaggacgggctggac

SEQ ID NO: 2997489 - DNA, 25 bp, Homo sapien
gaggacgacacaggcccaacacctg

SEQ ID NO: 2997490 - DNA, 25 bp, Homo sapien
tcacaccctgtcaacgaggacgaca

SEQ ID NO: 2997491 - DNA, 25 bp, Homo sapien
ttgaagacgcgtcctccctcacacc

SEQ ID NO: 2997492 - DNA, 25 bp, Homo sapien
cacacaggcgtttcaggggttatca

SEQ ID NO: 2997493 - DNA, 25 bp, Homo sapien
cccgaggcatcctacacacacaggc

SEQ ID NO: 2997494 - DNA, 25 bp, Homo sapien
ggggttatcaatcccactacagcaa

SEQ ID NO: 2997495 - DNA, 25 bp, Homo sapien
gggccccgaggcatcctacacacac

SEQ ID NO: 2997496 - DNA, 25 bp, Homo sapien
tggctccgagccagcagaagtgtca

SEQ ID NO: 2997497 - DNA, 25 bp, Homo sapien
atcagactggtcatggcggccttgc

SEQ ID NO: 2997498 - DNA, 25 bp, Homo sapien
tatgggcctcgatcagctcaggctg

SEQ ID NO: 2997499 - DNA, 25 bp, Homo sapien
gaagtgtcagatccatcagactggt

SEQ ID NO: 2997500 - DNA, 25 bp, Homo sapien
ctaccccgggaagctggctgtcatc

SEQ ID NO: 2997501 - DNA, 25 bp, Homo sapien
cctaccccgggaagctggctgtcat

SEQ ID NO: 2997502 - DNA, 25 bp, Homo sapien
ctcctcgggacatggtggctgagtt

SEQ ID NO: 2997503 - DNA, 25 bp, Homo sapien
taagagcgggcggtaaactgagcac

SEQ ID NO: 2997504 - DNA, 25 bp, Homo sapien
aaccgagagcaggaggtaaaccaag

SEQ ID NO: 2997505 - DNA, 25 bp, Homo sapien
aagcaccacgaggacatgcgggctc

SEQ ID NO: 2997506 - DNA, 25 bp, Homo sapien
tcaaagtgcaggagcgtcaggaaca

SEQ ID NO: 2997507 - DNA, 25 bp, Homo sapien
cacacagcacatgatgcgctcacag

SEQ ID NO: 2997508 - DNA, 25 bp, Homo sapien
ggcgtgagcacggaaacggtcaatc

SEQ ID NO: 2997509 - DNA, 25 bp, Homo sapien
caggaacacgctggcggcgtgagca

SEQ ID NO: 2997510 - DNA, 25 bp, Homo sapien
agagagtgagtgagacaaggccggg

SEQ ID NO: 2997511 - DNA, 25 bp, Homo sapien
gacaaggccgggctgccaatgatct

SEQ ID NO: 2997512 - DNA, 25 bp, Homo sapien
tgccaatgatctcgccatggctgcg

SEQ ID NO: 2997513 - DNA, 25 bp, Homo sapien
aggccgggctgccaatgatctcgcc

SEQ ID NO: 2997514 - DNA, 25 bp, Homo sapien
gcactccagttcacggaggccacat

SEQ ID NO: 2997515 - DNA, 25 bp, Homo sapien
ccagttcacggaggccacatcggac

SEQ ID NO: 2997516 - DNA, 25 bp, Homo sapien
ctccagttcacggaggccacatcgg

SEQ ID NO: 2997517 - DNA, 25 bp, Homo sapien
tgcactccagttcacggaggccaca

SEQ ID NO: 2997518 - DNA, 25 bp, Homo sapien
caaggagctgggtgatgcgtgggaa

SEQ ID NO: 2997519 - DNA, 25 bp, Homo sapien
gacgtggtagcggtaggtgggcagc

SEQ ID NO: 2997520 - DNA, 25 bp, Homo sapien
agggacacgactagccccagcagga

SEQ ID NO: 2997521 - DNA, 25 bp, Homo sapien
ctagccccagcaggacgtggtagcg

SEQ ID NO: 2997522 - DNA, 25 bp, Homo sapien
cgatctagaacctgatggagcccag

SEQ ID NO: 2997523 - DNA, 25 bp, Homo sapien
taaagcaggtcatgacccaaggtgc

SEQ ID NO: 2997524 - DNA, 25 bp, Homo sapien
cgagtgacaagatgcagagaggcct

SEQ ID NO: 2997525 - DNA, 25 bp, Homo sapien
tggctacagccggtcaagcatctgc

SEQ ID NO: 2997526 - DNA, 25 bp, Homo sapien
tactcaaagaggctctgggtggagt

SEQ ID NO: 2997527 - DNA, 25 bp, Homo sapien
tcaaagaggctctgggtggagtgcc

SEQ ID NO: 2997528 - DNA, 25 bp, Homo sapien
agaggctctgggtggagtgccggat

SEQ ID NO: 2997529 - DNA, 25 bp, Homo sapien
caaagaggctctgggtggagtgccg

SEQ ID NO: 2997530 - DNA, 25 bp, Homo sapien
tcagaaggttgtcctcaaagatctg

SEQ ID NO: 2997531 - DNA, 25 bp, Homo sapien
tttacgtccattgtacacacaacgg

SEQ ID NO: 2997532 - DNA, 25 bp, Homo sapien
acgtccgtgggagcaccaagctgga

SEQ ID NO: 2997533 - DNA, 25 bp, Homo sapien
gggaccaccttgtactcatactacc

SEQ ID NO: 2997534 - DNA, 25 bp, Homo sapien
tggctgatgagcgtccgcaagcacg

SEQ ID NO: 2997535 - DNA, 25 bp, Homo sapien
gctgaggctatggtgacgcaggtca

SEQ ID NO: 2997536 - DNA, 25 bp, Homo sapien
tcagcaaggaggaatgagcgaacgg

SEQ ID NO: 2997537 - DNA, 25 bp, Homo sapien
ggaggaatgagcgaccggcacgcgg

SEQ ID NO: 2997538 - DNA, 25 bp, Homo sapien
atgagcgaccggcacggaggaatga

SEQ ID NO: 2997539 - DNA, 25 bp, Homo sapien
gccccgatgcggcaacaaccaaaat

SEQ ID NO: 2997540 - DNA, 25 bp, Homo sapien
cctgcagctctaccagcaacagccc

SEQ ID NO: 2997541 - DNA, 25 bp, Homo sapien
tctaccagcaacagccccgatgcgg

SEQ ID NO: 2997542 - DNA, 25 bp, Homo sapien
agcaacagccccgatgcggcaacaa

SEQ ID NO: 2997543 - DNA, 25 bp, Homo sapien
tcacatgtgtgacaagggaggatca

SEQ ID NO: 2997544 - DNA, 25 bp, Homo sapien
cgctcggtgcgtgaaaggacaggca

SEQ ID NO: 2997545 - DNA, 25 bp, Homo sapien
gggagatgctgggacgtgaggaaag

SEQ ID NO: 2997546 - DNA, 25 bp, Homo sapien
gatcagaccacaacagtcagggaag

SEQ ID NO: 2997547 - DNA, 25 bp, Homo sapien
cagccgtgggtgagcacgtggtcca

SEQ ID NO: 2997548 - DNA, 25 bp, Homo sapien
agcgtcttcagcagcggcacggaca

SEQ ID NO: 2997549 - DNA, 25 bp, Homo sapien
tgggtgagcacgtggtccagcgtct

SEQ ID NO: 2997550 - DNA, 25 bp, Homo sapien
ccgtggtgaagatgtcgaagcagcc

SEQ ID NO: 2997551 - DNA, 25 bp, Homo sapien
catttcctggaattctgatctctgt

SEQ ID NO: 2997552 - DNA, 25 bp, Homo sapien
tttaatacatgagctacttaggctt

SEQ ID NO: 2997553 - DNA, 25 bp, Homo sapien
gcttaatcggaaaggaagtcatgaa

SEQ ID NO: 2997554 - DNA, 25 bp, Homo sapien
gctacttaggcttaatcggaaagga

SEQ ID NO: 2997555 - DNA, 25 bp, Homo sapien
agtacgaggacgctgtccaaggctg

SEQ ID NO: 2997556 - DNA, 25 bp, Homo sapien
tccaaggctggggacgaaccaccca

SEQ ID NO: 2997557 - DNA, 25 bp, Homo sapien
gacgaaccacccaaaagatggccag

SEQ ID NO: 2997558 - DNA, 25 bp, Homo sapien
ctgagtacgaggacgctgtccaagg

SEQ ID NO: 2997559 - DNA, 25 bp, Homo sapien
caggcagactcagaggtaacactca

SEQ ID NO: 2997560 - DNA, 25 bp, Homo sapien
cgctacaagcagacgtggaaacacg

SEQ ID NO: 2997561 - DNA, 25 bp, Homo sapien
cacgtgagcgtgataatgacagaaa

SEQ ID NO: 2997562 - DNA, 25 bp, Homo sapien
tacacctgaaaagacgcaaaactcc

SEQ ID NO: 2997563 - DNA, 25 bp, Homo sapien
agcggcggccaggatgcccgtgctc

SEQ ID NO: 2997564 - DNA, 25 bp, Homo sapien
aaactgccgacacacagaggacaca

SEQ ID NO: 2997565 - DNA, 25 bp, Homo sapien
ctgaggcttggtgctgacaaaggca

SEQ ID NO: 2997566 - DNA, 25 bp, Homo sapien
gttgttttgagccttcagtggcagc

SEQ ID NO: 2997567 - DNA, 25 bp, Homo sapien
caacacacactttagagatgagctt

SEQ ID NO: 2997568 - DNA, 25 bp, Homo sapien
aacaacacacactttagagatgagc

SEQ ID NO: 2997569 - DNA, 25 bp, Homo sapien
tggaagaacaacacacactttagag

SEQ ID NO: 2997570 - DNA, 25 bp, Homo sapien
agaacaacacacactttagagatga

SEQ ID NO: 2997571 - DNA, 25 bp, Homo sapien
ctgacaggagcttctggatatcttt

SEQ ID NO: 2997572 - DNA, 25 bp, Homo sapien
ctttcttacagagcgcaagcaactt

SEQ ID NO: 2997573 - DNA, 25 bp, Homo sapien
tgacaggagcttctggatatctttt

SEQ ID NO: 2997574 - DNA, 25 bp, Homo sapien
aagcaacttcacagcaaaggggtgg

SEQ ID NO: 2997575 - DNA, 25 bp, Homo sapien
tgggaagtgaggacgcctcacagag

SEQ ID NO: 2997576 - DNA, 25 bp, Homo sapien
tgtgggaagtgaggacgcctcacag

SEQ ID NO: 2997577 - DNA, 25 bp, Homo sapien
gggaagtgaggacgcctcacagagg

SEQ ID NO: 2997578 - DNA, 25 bp, Homo sapien
ctgtgggaagtgaggacgcctcaca

SEQ ID NO: 2997579 - DNA, 25 bp, Homo sapien
tgtgcctacacacacgagtgtcgca

SEQ ID NO: 2997580 - DNA, 25 bp, Homo sapien
cagatccgtgagcacagtgcgggcc

SEQ ID NO: 2997581 - DNA, 25 bp, Homo sapien
tgcgtacatctgcactgtgcctaca

SEQ ID NO: 2997582 - DNA, 25 bp, Homo sapien
cacgagtgtcgcacttggaaagtca

SEQ ID NO: 2997583 - DNA, 25 bp, Homo sapien
cagcgggaaacggtggcagaggagc

SEQ ID NO: 2997584 - DNA, 25 bp, Homo sapien
acacaacagtgccagcgaaggcctt

SEQ ID NO: 2997585 - DNA, 25 bp, Homo sapien
acaacagtgccagcgaaggccttct

SEQ ID NO: 2997586 - DNA, 25 bp, Homo sapien
caacagtgccagcgaaggccttctt

SEQ ID NO: 2997587 - DNA, 25 bp, Homo sapien
caacacaacagtgccagcgaaggcc

SEQ ID NO: 2997588 - DNA, 25 bp, Homo sapien
ggaggacgctgaccctgcatcccat

SEQ ID NO: 2997589 - DNA, 25 bp, Homo sapien
ggctgcaaccaagaggaggtgcctt

SEQ ID NO: 2997590 - DNA, 25 bp, Homo sapien
accccggagagacgacaggacccag

SEQ ID NO: 2997591 - DNA, 25 bp, Homo sapien
tgcatttgccggagggaagcgccac

SEQ ID NO: 2997592 - DNA, 25 bp, Homo sapien
cccacgacgtcactgtaggtgagca

SEQ ID NO: 2997593 - DNA, 25 bp, Homo sapien
gtgagcaatgtctcgtacacctggc

SEQ ID NO: 2997594 - DNA, 25 bp, Homo sapien
cctggctggccgtggtcttccggat

SEQ ID NO: 2997595 - DNA, 25 bp, Homo sapien
tctcgtacacctggctggccgtggt

SEQ ID NO: 2997596 - DNA, 25 bp, Homo sapien
agccttgtggtacaggtgcccgctc

SEQ ID NO: 2997597 - DNA, 25 bp, Homo sapien
ttgtggtacaggtgcccgctcccct

SEQ ID NO: 2997598 - DNA, 25 bp, Homo sapien
gccttgtggtacaggtgcccgctcc

SEQ ID NO: 2997599 - DNA, 25 bp, Homo sapien
ccttgtggtacaggtgcccgctccc

SEQ ID NO: 2997600 - DNA, 25 bp, Homo sapien
ctggattcaacaaggggcgtggacc

SEQ ID NO: 2997601 - DNA, 25 bp, Homo sapien
ttcaacaaggggcgtggaccccaca

SEQ ID NO: 2997602 - DNA, 25 bp, Homo sapien
ctacgtccttgctggattcaacaag

SEQ ID NO: 2997603 - DNA, 25 bp, Homo sapien
caacaaggggcgtggaccccacaga

SEQ ID NO: 2997604 - DNA, 25 bp, Homo sapien
caacgcatgttgagaagacagccca

SEQ ID NO: 2997605 - DNA, 25 bp, Homo sapien
tctccagagcagtagttaagatggc

SEQ ID NO: 2997606 - DNA, 25 bp, Homo sapien
tcattgtaaaaacgggtctccagag

SEQ ID NO: 2997607 - DNA, 25 bp, Homo sapien
gtgcgtgagctctatgggaacccag

SEQ ID NO: 2997608 - DNA, 25 bp, Homo sapien
cgagcctgagccctttccggaatcg

SEQ ID NO: 2997609 - DNA, 25 bp, Homo sapien
ggaatcgcaggaggacggttccttc

SEQ ID NO: 2997610 - DNA, 25 bp, Homo sapien
gggcagaaaagacgtcacaggagca

SEQ ID NO: 2997611 - DNA, 25 bp, Homo sapien
tcgggaaggaccacgcccagcgcag

SEQ ID NO: 2997612 - DNA, 25 bp, Homo sapien
cttccatggccgcagtcagggaaag

SEQ ID NO: 2997613 - DNA, 25 bp, Homo sapien
gcagtcagggaaaggagacctcacc

SEQ ID NO: 2997614 - DNA, 25 bp, Homo sapien
aggtcccgcgtcaagcttccatggc

SEQ ID NO: 2997615 - DNA, 25 bp, Homo sapien
cggaggtcccgcgtcaagcttccat

SEQ ID NO: 2997616 - DNA, 25 bp, Homo sapien
ggcctgggtacgcccagaaggtcac

SEQ ID NO: 2997617 - DNA, 25 bp, Homo sapien
gaaggtcacacagacggttgcgctg

SEQ ID NO: 2997618 - DNA, 25 bp, Homo sapien
gtcacacagacggttgcgctgctct

SEQ ID NO: 2997619 - DNA, 25 bp, Homo sapien
agacggttgcgctgctctctcacca

SEQ ID NO: 2997620 - DNA, 25 bp, Homo sapien
ggtggcactcttggcacttggagca

SEQ ID NO: 2997621 - DNA, 25 bp, Homo sapien
ccctggtaactagagagacagcaca

SEQ ID NO: 2997622 - DNA, 25 bp, Homo sapien
ttactttagaagagtgacgggctgg

SEQ ID NO: 2997623 - DNA, 25 bp, Homo sapien
tcagatataacctcctgccggaagg

SEQ ID NO: 2997624 - DNA, 25 bp, Homo sapien
agcctgagctatgtggctgacaggt

SEQ ID NO: 2997625 - DNA, 25 bp, Homo sapien
ggactgacacggttcctgcaggaaa

SEQ ID NO: 2997626 - DNA, 25 bp, Homo sapien
tgactaacgtgtcctcggaagggca

SEQ ID NO: 2997627 - DNA, 25 bp, Homo sapien
gaaaccatttgtgccgtttcccaca

SEQ ID NO: 2997628 - DNA, 25 bp, Homo sapien
gacaagacaagctcaggctggtcag

SEQ ID NO: 2997629 - DNA, 25 bp, Homo sapien
gctggtcagctccaacacacaccat

SEQ ID NO: 2997630 - DNA, 25 bp, Homo sapien
tggtcagctccaacacacaccattc

SEQ ID NO: 2997631 - DNA, 25 bp, Homo sapien
gagacaagacaagctcaggctggtc

SEQ ID NO: 2997632 - DNA, 25 bp, Homo sapien
caggcaggggtgaggtatgggctcc

SEQ ID NO: 2997633 - DNA, 25 bp, Homo sapien
gcaggggtgaggtatgggctccagg

SEQ ID NO: 2997634 - DNA, 25 bp, Homo sapien
ggggtgaggtatgggctccaggact

SEQ ID NO: 2997635 - DNA, 25 bp, Homo sapien
tgaggtatgggctccaggactggct

SEQ ID NO: 2997636 - DNA, 25 bp, Homo sapien
cggcctccctcaggaacaagacatc

SEQ ID NO: 2997637 - DNA, 25 bp, Homo sapien
gcctccctcaggaacaagacatcct

SEQ ID NO: 2997638 - DNA, 25 bp, Homo sapien
ctccctcaggaacaagacatcctca

SEQ ID NO: 2997639 - DNA, 25 bp, Homo sapien
tccctcaggaacaagacatcctcac

SEQ ID NO: 2997640 - DNA, 25 bp, Homo sapien
caagtcaccagagcgcaggtgcaga

SEQ ID NO: 2997641 - DNA, 25 bp, Homo sapien
ttcaagtgaaggcagaggcgtccac

SEQ ID NO: 2997642 - DNA, 25 bp, Homo sapien
agcgctacccttcaacagctggagg

SEQ ID NO: 2997643 - DNA, 25 bp, Homo sapien
gaaaagctgtcagctagtgccagcc

SEQ ID NO: 2997644 - DNA, 25 bp, Homo sapien
tcaagaatggtatttatttccgaca

SEQ ID NO: 2997645 - DNA, 25 bp, Homo sapien
gactctgacgattccccttgcagca

SEQ ID NO: 2997646 - DNA, 25 bp, Homo sapien
ggtcggcacacccatcaatcagtga

SEQ ID NO: 2997647 - DNA, 25 bp, Homo sapien
ccgacattactgtagaggcacacat

SEQ ID NO: 2997648 - DNA, 25 bp, Homo sapien
tggccgtggttctgcacctcaagcc

SEQ ID NO: 2997649 - DNA, 25 bp, Homo sapien
ccaagcccttgggcctctgagtggc

SEQ ID NO: 2997650 - DNA, 25 bp, Homo sapien
ctgctggccgtggttctgcacctca

SEQ ID NO: 2997651 - DNA, 25 bp, Homo sapien
gggctgctttggtgctgctggccgt

SEQ ID NO: 2997652 - DNA, 25 bp, Homo sapien
tgctaaacacacagcacggactgtc

SEQ ID NO: 2997653 - DNA, 25 bp, Homo sapien
gctaaacacacagcacggactgtca

SEQ ID NO: 2997654 - DNA, 25 bp, Homo sapien
tcacacacatcccgtgaagagctgt

SEQ ID NO: 2997655 - DNA, 25 bp, Homo sapien
gaggagacccctattacacaggttg

SEQ ID NO: 2997656 - DNA, 25 bp, Homo sapien
cagccaatcgggacagttcaaggag

SEQ ID NO: 2997657 - DNA, 25 bp, Homo sapien
tagggtataaagaccattggccacc

SEQ ID NO: 2997658 - DNA, 25 bp, Homo sapien
gactcatgtggccaaggctaggcct

SEQ ID NO: 2997659 - DNA, 25 bp, Homo sapien
ggcgatggtgcgcctgttccacacc

SEQ ID NO: 2997660 - DNA, 25 bp, Homo sapien
gttcatttgctattgtctgccccag

SEQ ID NO: 2997661 - DNA, 25 bp, Homo sapien
tgggctccagaaacggctgctgaaa

SEQ ID NO: 2997662 - DNA, 25 bp, Homo sapien
ggtgggtaatcgacctgcctccatg

SEQ ID NO: 2997663 - DNA, 25 bp, Homo sapien
tagcactcagtgttgcctgccttga

SEQ ID NO: 2997664 - DNA, 25 bp, Homo sapien
tgtgggcacaattcaagcaacttga

SEQ ID NO: 2997665 - DNA, 25 bp, Homo sapien
cactgtggcaggtctaaatgtgaga

SEQ ID NO: 2997666 - DNA, 25 bp, Homo sapien
tgctgaacaccctgcaataaacagg

SEQ ID NO: 2997667 - DNA, 25 bp, Homo sapien
tctcagcataatgaagaccttggtc

SEQ ID NO: 2997668 - DNA, 25 bp, Homo sapien
tgctttagtatcttctaagactgtg

SEQ ID NO: 2997669 - DNA, 25 bp, Homo sapien
ctgttgaactgagcctttaatcatc

SEQ ID NO: 2997670 - DNA, 25 bp, Homo sapien
tgtaggaaagttctatcaatcatct

SEQ ID NO: 2997671 - DNA, 25 bp, Homo sapien
tagtaatctattcctaataacacta

SEQ ID NO: 2997672 - DNA, 25 bp, Homo sapien
ctcccctgcaattccgtttggcggg

SEQ ID NO: 2997673 - DNA, 25 bp, Homo sapien
cgggagcagcttgcgggtctcaggg

SEQ ID NO: 2997674 - DNA, 25 bp, Homo sapien
tctcagggcacctcggtggcactgt

SEQ ID NO: 2997675 - DNA, 25 bp, Homo sapien
cctcggtggcactgttgttgtgcct

SEQ ID NO: 2997676 - DNA, 25 bp, Homo sapien
caagtccaggcagaacaacgtgagc

SEQ ID NO: 2997677 - DNA, 25 bp, Homo sapien
gggcgcccatatgaatcagtgaact

SEQ ID NO: 2997678 - DNA, 25 bp, Homo sapien
cacctgtgacagctagaagcacgcc

SEQ ID NO: 2997679 - DNA, 25 bp, Homo sapien
tgtgttggtctacactgcccggcct

SEQ ID NO: 2997680 - DNA, 25 bp, Homo sapien
ccatgtagttctgcgattttgggtt

SEQ ID NO: 2997681 - DNA, 25 bp, Homo sapien
atgtagttctgcgattttgggtttc

SEQ ID NO: 2997682 - DNA, 25 bp, Homo sapien
tagttctgcgattttgggtttctta

SEQ ID NO: 2997683 - DNA, 25 bp, Homo sapien
tgtagttctgcgattttgggtttct

SEQ ID NO: 2997684 - DNA, 25 bp, Homo sapien
atacatgtgctgaacatgaagattt

SEQ ID NO: 2997685 - DNA, 25 bp, Homo sapien
tgttttctttatcccgtgtatcatt

SEQ ID NO: 2997686 - DNA, 25 bp, Homo sapien
tgggctatatgtgccatgttttctt

SEQ ID NO: 2997687 - DNA, 25 bp, Homo sapien
tccatgggctatatgtgccatgttt

SEQ ID NO: 2997688 - DNA, 25 bp, Homo sapien
cctaaatcacccgtgtgagacagca

SEQ ID NO: 2997689 - DNA, 25 bp, Homo sapien
tcagtgacccctgcgagggtccgtg

SEQ ID NO: 2997690 - DNA, 25 bp, Homo sapien
aaatcacccgtgtgagggtccgtgc

SEQ ID NO: 2997691 - DNA, 25 bp, Homo sapien
ccgtgtgagggtccgtgcccaccag

SEQ ID NO: 2997692 - DNA, 25 bp, Homo sapien
gagtgcacgttcaggcatccatgtc

SEQ ID NO: 2997693 - DNA, 25 bp, Homo sapien
cctccctgtgggagtgcacgttcag

SEQ ID NO: 2997694 - DNA, 25 bp, Homo sapien
gttcaggcatccatgtccccgttct

SEQ ID NO: 2997695 - DNA, 25 bp, Homo sapien
ggtgcacctgcaggcgtccgtgtca

SEQ ID NO: 2997696 - DNA, 25 bp, Homo sapien
tgcaccgtgcacactggtgactggc

SEQ ID NO: 2997697 - DNA, 25 bp, Homo sapien
atctgtgcaccgtgcacactggtga

SEQ ID NO: 2997698 - DNA, 25 bp, Homo sapien
gtgcaccgtgcacactggtgactgg

SEQ ID NO: 2997699 - DNA, 25 bp, Homo sapien
accgtgcacactggtgactggcctc

SEQ ID NO: 2997700 - DNA, 25 bp, Homo sapien
gtttgttttctcaggtcgtcctcac

SEQ ID NO: 2997701 - DNA, 25 bp, Homo sapien
gtcctcaccaccgtgcaaacggcag

SEQ ID NO: 2997702 - DNA, 25 bp, Homo sapien
tgttttctcaggtcgtcctcaccac

SEQ ID NO: 2997703 - DNA, 25 bp, Homo sapien
accaccgtgcaaacggcagaagctc

SEQ ID NO: 2997704 - DNA, 25 bp, Homo sapien
tggtgtggtcagtaccgggtccttc

SEQ ID NO: 2997705 - DNA, 25 bp, Homo sapien
tggtcagtaccgggtccttctggcc

SEQ ID NO: 2997706 - DNA, 25 bp, Homo sapien
gtgtggtcagtaccgggtccttctg

SEQ ID NO: 2997707 - DNA, 25 bp, Homo sapien
gtgtggtgtggtcagtaccgggtcc

SEQ ID NO: 2997708 - DNA, 25 bp, Homo sapien
tgtggtgtggtcggcaccaggtcct

SEQ ID NO: 2997709 - DNA, 25 bp, Homo sapien
tggtgtggtcggcaccaggtccttc

SEQ ID NO: 2997710 - DNA, 25 bp, Homo sapien
gtgtggtgtggtcggcaccaggtcc

SEQ ID NO: 2997711 - DNA, 25 bp, Homo sapien
tggtgtggtgtggtcggcaccaggt

SEQ ID NO: 2997712 - DNA, 25 bp, Homo sapien
ccctgtggtgtggtgtggtcggcac

SEQ ID NO: 2997713 - DNA, 25 bp, Homo sapien
cccctgtggtgtggtgtggtcggca

SEQ ID NO: 2997714 - DNA, 25 bp, Homo sapien
agcccctgtggtgtggtgtggtcgg

SEQ ID NO: 2997715 - DNA, 25 bp, Homo sapien
ctagcccctgtggtgtggtgtggtc

SEQ ID NO: 2997716 - DNA, 25 bp, Homo sapien
taggcttcggttgcaccaggttccc

SEQ ID NO: 2997717 - DNA, 25 bp, Homo sapien
gcaggtaacttcttagccggctccg

SEQ ID NO: 2997718 - DNA, 25 bp, Homo sapien
ttcgtaagattcaagggtgctggct

SEQ ID NO: 2997719 - DNA, 25 bp, Homo sapien
tttgacgcttacaactacacgcagg

SEQ ID NO: 2997720 - DNA, 25 bp, Homo sapien
agggaggaccaggagagtggaagtg

SEQ ID NO: 2997721 - DNA, 25 bp, Homo sapien
gtcagcacgcgttccccaaacctgt

SEQ ID NO: 2997722 - DNA, 25 bp, Homo sapien
ggtcagcttgtcagcgccggccacc

SEQ ID NO: 2997723 - DNA, 25 bp, Homo sapien
cccacgcttggtgctgagggttgat

SEQ ID NO: 2997724 - DNA, 25 bp, Homo sapien
agggggcctgtgtggttgtcacgca

SEQ ID NO: 2997725 - DNA, 25 bp, Homo sapien
gggggcctgtgtggttgtcacgcac

SEQ ID NO: 2997726 - DNA, 25 bp, Homo sapien
acaccctcagccttgatgtggggcc

SEQ ID NO: 2997727 - DNA, 25 bp, Homo sapien
gactggaagggaatgtggcccccca

SEQ ID NO: 2997728 - DNA, 25 bp, Homo sapien
ccccccacaccctcagccttgatgt

SEQ ID NO: 2997729 - DNA, 25 bp, Homo sapien
ccccagggtccagttcagactggaa

SEQ ID NO: 2997730 - DNA, 25 bp, Homo sapien
gtgcctgtctgcgccgtgcagacac

SEQ ID NO: 2997731 - DNA, 25 bp, Homo sapien
gtctgcgccgtgcagacactggttc

SEQ ID NO: 2997732 - DNA, 25 bp, Homo sapien
cctgtctgcgccgtgcagacactgg

SEQ ID NO: 2997733 - DNA, 25 bp, Homo sapien
tgttccaagctgtgggggggaccca

SEQ ID NO: 2997734 - DNA, 25 bp, Homo sapien
taaagtcacggatgcaaacacggtc

SEQ ID NO: 2997735 - DNA, 25 bp, Homo sapien
ggcgccgcagctgtccttattcacg

SEQ ID NO: 2997736 - DNA, 25 bp, Homo sapien
ttcgggcctccgttcatgggtgtcc

SEQ ID NO: 2997737 - DNA, 25 bp, Homo sapien
tattcacgcaggttccgacttcgcg

SEQ ID NO: 2997738 - DNA, 25 bp, Homo sapien
tctctagactcaactggattcgtac

SEQ ID NO: 2997739 - DNA, 25 bp, Homo sapien
ttcgtactgagaagggcattctgag

SEQ ID NO: 2997740 - DNA, 25 bp, Homo sapien
caatggcgtcttcctccttgtctct

SEQ ID NO: 2997741 - DNA, 25 bp, Homo sapien
cccttgacatgtgggagcaatggcg

SEQ ID NO: 2997742 - DNA, 25 bp, Homo sapien
ctctggcagcttgcgatttttgagg

SEQ ID NO: 2997743 - DNA, 25 bp, Homo sapien
agctctggcagcttgcgatttttga

SEQ ID NO: 2997744 - DNA, 25 bp, Homo sapien
gctctggcagcttgcgatttttgag

SEQ ID NO: 2997745 - DNA, 25 bp, Homo sapien
gatcatggatttggcgttttatcca

SEQ ID NO: 2997746 - DNA, 25 bp, Homo sapien
gactctgaccccctgtaattatttc

SEQ ID NO: 2997747 - DNA, 25 bp, Homo sapien
ggctggaactaggatcatggatttg

SEQ ID NO: 2997748 - DNA, 25 bp, Homo sapien
tctgtggctggaactaggatcatgg

SEQ ID NO: 2997749 - DNA, 25 bp, Homo sapien
tgtagatggttctttgcatcacaga

SEQ ID NO: 2997750 - DNA, 25 bp, Homo sapien
gacgtagattcaggtggctccgaac

SEQ ID NO: 2997751 - DNA, 25 bp, Homo sapien
tttatttgggccacgtgtgaggacg

SEQ ID NO: 2997752 - DNA, 25 bp, Homo sapien
tgaagataatgggtgaaggtcacat

SEQ ID NO: 2997753 - DNA, 25 bp, Homo sapien
ccgctcggcccatcaccacagaggt

SEQ ID NO: 2997754 - DNA, 25 bp, Homo sapien
tcggcccatcaccacagaggtgaga

SEQ ID NO: 2997755 - DNA, 25 bp, Homo sapien
ggtgagaaggatggaggctcctcca

SEQ ID NO: 2997756 - DNA, 25 bp, Homo sapien
acagcaagaaccctccttcctcggc

SEQ ID NO: 2997757 - DNA, 25 bp, Homo sapien
ccccacgttgaaagggtgtgcagag

SEQ ID NO: 2997758 - DNA, 25 bp, Homo sapien
tggcccggtgtcaggtttctgagca

SEQ ID NO: 2997759 - DNA, 25 bp, Homo sapien
cctgagctcctggcccggtgtcagg

SEQ ID NO: 2997760 - DNA, 25 bp, Homo sapien
cgttgaaagggtgtgcagagtccct

SEQ ID NO: 2997761 - DNA, 25 bp, Homo sapien
gcagccgagttcacgggcacaaagt

SEQ ID NO: 2997762 - DNA, 25 bp, Homo sapien
ctgcagccgagttcacgggcacaaa

SEQ ID NO: 2997763 - DNA, 25 bp, Homo sapien
agccgagttcacgggcacaaagtca

SEQ ID NO: 2997764 - DNA, 25 bp, Homo sapien
cagccgagttcacgggcacaaagtc

SEQ ID NO: 2997765 - DNA, 25 bp, Homo sapien
tatttcctgtctgcaccggcggcag

SEQ ID NO: 2997766 - DNA, 25 bp, Homo sapien
ggtgcctgccagatgttgacgatta

SEQ ID NO: 2997767 - DNA, 25 bp, Homo sapien
cagatgttgacgattaccaaggaac

SEQ ID NO: 2997768 - DNA, 25 bp, Homo sapien
gattaccaaggaacagaggctgctc

SEQ ID NO: 2997769 - DNA, 25 bp, Homo sapien
cagcccagcttgtgggtatagcctg

SEQ ID NO: 2997770 - DNA, 25 bp, Homo sapien
tgtgggtatagcctgtcctctccca

SEQ ID NO: 2997771 - DNA, 25 bp, Homo sapien
cagcttgtgggtatagcctgtcctc

SEQ ID NO: 2997772 - DNA, 25 bp, Homo sapien
cccagcttgtgggtatagcctgtcc

SEQ ID NO: 2997773 - DNA, 25 bp, Homo sapien
accagctttcaagttctattccata

SEQ ID NO: 2997774 - DNA, 25 bp, Homo sapien
agctttcaagttctattccataaca

SEQ ID NO: 2997775 - DNA, 25 bp, Homo sapien
tcaccagctttcaagttctattcca

SEQ ID NO: 2997776 - DNA, 25 bp, Homo sapien
ctttcaagttctattccataacatc

SEQ ID NO: 2997777 - DNA, 25 bp, Homo sapien
cattacggatttcttgtgatcgcac

SEQ ID NO: 2997778 - DNA, 25 bp, Homo sapien
caggacgtccacctctaatagcgag

SEQ ID NO: 2997779 - DNA, 25 bp, Homo sapien
ccaagaggagaaaggtgctctgcac

SEQ ID NO: 2997780 - DNA, 25 bp, Homo sapien
gtgatcgcaccatgtaatgaaatgc

SEQ ID NO: 2997781 - DNA, 25 bp, Homo sapien
ctgtcaccgagagcgggttccccgg

SEQ ID NO: 2997782 - DNA, 25 bp, Homo sapien
cggtcagagcgctgtcaccgagagc

SEQ ID NO: 2997783 - DNA, 25 bp, Homo sapien
ctccagaccgcggtcagagcgctgt

SEQ ID NO: 2997784 - DNA, 25 bp, Homo sapien
gttcggcgttgccaagctggttctg

SEQ ID NO: 2997785 - DNA, 25 bp, Homo sapien
gttgccacatgggtggcttgtccct

SEQ ID NO: 2997786 - DNA, 25 bp, Homo sapien
ccgttgccacatgggtggcttgtcc

SEQ ID NO: 2997787 - DNA, 25 bp, Homo sapien
gccgttgccacatgggtggcttgtc

SEQ ID NO: 2997788 - DNA, 25 bp, Homo sapien
tggccgttgccacatgggtggcttg

SEQ ID NO: 2997789 - DNA, 25 bp, Homo sapien
acaacagggtgtcctcggcagtgga

SEQ ID NO: 2997790 - DNA, 25 bp, Homo sapien
cgcctcgggtatgactggctgccgt

SEQ ID NO: 2997791 - DNA, 25 bp, Homo sapien
tgtcctcggcagtggactgtgcttc

SEQ ID NO: 2997792 - DNA, 25 bp, Homo sapien
caggctgctgcatgcgatgtggaca

SEQ ID NO: 2997793 - DNA, 25 bp, Homo sapien
agctctgtggttcaccgccgagatg

SEQ ID NO: 2997794 - DNA, 25 bp, Homo sapien
tcgtgcccatcgttgctatgctgtc

SEQ ID NO: 2997795 - DNA, 25 bp, Homo sapien
gctgtccccaagcaaaagcaggcat

SEQ ID NO: 2997796 - DNA, 25 bp, Homo sapien
catatgggccatttgatttgagttc

SEQ ID NO: 2997797 - DNA, 25 bp, Homo sapien
gccacggcgtcgggatagcacagcc

SEQ ID NO: 2997798 - DNA, 25 bp, Homo sapien
acggcgtcgggatagcacagcggct

SEQ ID NO: 2997799 - DNA, 25 bp, Homo sapien
acggcgtcgggatagcacagccacg

SEQ ID NO: 2997800 - DNA, 25 bp, Homo sapien
tcgggatagcacagcggctgccgtt

SEQ ID NO: 2997801 - DNA, 25 bp, Homo sapien
gcaggcacgtcgtgtttgtggagca

SEQ ID NO: 2997802 - DNA, 25 bp, Homo sapien
tgcaggcacgtcgtgtttgtggagc

SEQ ID NO: 2997803 - DNA, 25 bp, Homo sapien
ctgatacaggcgcacggtgttcacg

SEQ ID NO: 2997804 - DNA, 25 bp, Homo sapien
tacaggcgcacggtgttcacggagc

SEQ ID NO: 2997805 - DNA, 25 bp, Homo sapien
acaggcgcacggtgttcacggagca

SEQ ID NO: 2997806 - DNA, 25 bp, Homo sapien
gatacaggcgcacggtgttcacgga

SEQ ID NO: 2997807 - DNA, 25 bp, Homo sapien
tacaggcgcacggtgttcacggagc

SEQ ID NO: 2997808 - DNA, 25 bp, Homo sapien
ctgatacaggcgcacggtgttcacg

SEQ ID NO: 2997809 - DNA, 25 bp, Homo sapien
acaggcgcacggtgttcacggagca

SEQ ID NO: 2997810 - DNA, 25 bp, Homo sapien
gatacaggcgcacggtgttcacgga

SEQ ID NO: 2997811 - DNA, 25 bp, Homo sapien
tacaggcgcacggtgttcacggagc

SEQ ID NO: 2997812 - DNA, 25 bp, Homo sapien
ctgatacaggcgcacggtgttcacg

SEQ ID NO: 2997813 - DNA, 25 bp, Homo sapien
acaggcgcacggtgttcacggagca

SEQ ID NO: 2997814 - DNA, 25 bp, Homo sapien
gatacaggcgcacggtgttcacgga

SEQ ID NO: 2997815 - DNA, 25 bp, Homo sapien
ccacaccatgttcgcggagcatgtg

SEQ ID NO: 2997816 - DNA, 25 bp, Homo sapien
agccacaccatgttcgcggagcatg

SEQ ID NO: 2997817 - DNA, 25 bp, Homo sapien
catgttcgcggagcatgtgtggtac

SEQ ID NO: 2997818 - DNA, 25 bp, Homo sapien
accatgttcgcggagcatgtgtggt

SEQ ID NO: 2997819 - DNA, 25 bp, Homo sapien
acaccgtgtttgtggagcacgtgtg

SEQ ID NO: 2997820 - DNA, 25 bp, Homo sapien
aggcacaccgtgtttgtggagcacg

SEQ ID NO: 2997821 - DNA, 25 bp, Homo sapien
gcacaccgtgtttgtggagcacgtg

SEQ ID NO: 2997822 - DNA, 25 bp, Homo sapien
tacaggcacaccgtgtttgtggagc

SEQ ID NO: 2997823 - DNA, 25 bp, Homo sapien
ttagggatcgttgtacatgttcacg

SEQ ID NO: 2997824 - DNA, 25 bp, Homo sapien
gtgtggtacatgatacagccacacc

SEQ ID NO: 2997825 - DNA, 25 bp, Homo sapien
acgtgtggtacatgatacagccaca

SEQ ID NO: 2997826 - DNA, 25 bp, Homo sapien
tcgttgtacatgttcacggagcacg

SEQ ID NO: 2997827 - DNA, 25 bp, Homo sapien
tctgggcttctccgctccagacctc

SEQ ID NO: 2997828 - DNA, 25 bp, Homo sapien
cttctccgctccagacctcggtctt

SEQ ID NO: 2997829 - DNA, 25 bp, Homo sapien
tccgctccagacctcggtctttggt

SEQ ID NO: 2997830 - DNA, 25 bp, Homo sapien
gggcttctccgctccagacctcggt

SEQ ID NO: 2997831 - DNA, 25 bp, Homo sapien
gcctttaggtccaacaggaaatgtg

SEQ ID NO: 2997832 - DNA, 25 bp, Homo sapien
tctccggtgttagagacacacggtc

SEQ ID NO: 2997833 - DNA, 25 bp, Homo sapien
actgtaccctctggcatctccggtg

SEQ ID NO: 2997834 - DNA, 25 bp, Homo sapien
ggacacaggacctcgtatcaggcga

SEQ ID NO: 2997835 - DNA, 25 bp, Homo sapien
cagcacctctaggagggagtcgatg

SEQ ID NO: 2997836 - DNA, 25 bp, Homo sapien
tctgaaccgccgtgtggtcttggag

SEQ ID NO: 2997837 - DNA, 25 bp, Homo sapien
gtggtctcgcgaactccgtctgaac

SEQ ID NO: 2997838 - DNA, 25 bp, Homo sapien
gaaactattcaggaaaccgtggagc

SEQ ID NO: 2997839 - DNA, 25 bp, Homo sapien
gggcgtgttaacacgcgtggattca

SEQ ID NO: 2997840 - DNA, 25 bp, Homo sapien
ccctgcacagttgccagcttttccc

SEQ ID NO: 2997841 - DNA, 25 bp, Homo sapien
aggaacccgcagcttccgcagtctc

SEQ ID NO: 2997842 - DNA, 25 bp, Homo sapien
cagcttttccctccgcacagagagc

SEQ ID NO: 2997843 - DNA, 25 bp, Homo sapien
gatgttgcgggcatcatgaccctca

SEQ ID NO: 2997844 - DNA, 25 bp, Homo sapien
acagcgtctgcctgtccggctgcag

SEQ ID NO: 2997845 - DNA, 25 bp, Homo sapien
aaggtgaccagggcatgccgatgtt

SEQ ID NO: 2997846 - DNA, 25 bp, Homo sapien
agcgtctgcctgtccggctgcagaa

SEQ ID NO: 2997847 - DNA, 25 bp, Homo sapien
tgtcccatggccaggttcctaaggg

SEQ ID NO: 2997848 - DNA, 25 bp, Homo sapien
tgtggaaggcctcccccgtgactgt

SEQ ID NO: 2997849 - DNA, 25 bp, Homo sapien
gagtcctcgcagagccctgtctaaa

SEQ ID NO: 2997850 - DNA, 25 bp, Homo sapien
cctgtctaaacgtggcgccagtcct

SEQ ID NO: 2997851 - DNA, 25 bp, Homo sapien
cagaggtgccctggaatgtcctgct

SEQ ID NO: 2997852 - DNA, 25 bp, Homo sapien
ccacagggccctcacaaggtctcat

SEQ ID NO: 2997853 - DNA, 25 bp, Homo sapien
caccacagggccctcacaaggtctc

SEQ ID NO: 2997854 - DNA, 25 bp, Homo sapien
accacagggccctcacaaggtctca

SEQ ID NO: 2997855 - DNA, 25 bp, Homo sapien
tgcatcagccgacttgactccactt

SEQ ID NO: 2997856 - DNA, 25 bp, Homo sapien
tgcactgaccgtgtgaagccgcggc

SEQ ID NO: 2997857 - DNA, 25 bp, Homo sapien
agctgtcttccacgtgcgctgcagg

SEQ ID NO: 2997858 - DNA, 25 bp, Homo sapien
ttcacgcactgtccagatgtggctt

SEQ ID NO: 2997859 - DNA, 25 bp, Homo sapien
ggatcccagttcgacatgaggtttg

SEQ ID NO: 2997860 - DNA, 25 bp, Homo sapien
tttgagagacccatttatgaatcca

SEQ ID NO: 2997861 - DNA, 25 bp, Homo sapien
tgagcatctgccgtgtgccagcagt

SEQ ID NO: 2997862 - DNA, 25 bp, Homo sapien
cagaggcttctgaaaccgactggga

SEQ ID NO: 2997863 - DNA, 25 bp, Homo sapien
tgcagggcacccacgcatcccccgg

SEQ ID NO: 2997864 - DNA, 25 bp, Homo sapien
agggcacccacgcatcccccggctg

SEQ ID NO: 2997865 - DNA, 25 bp, Homo sapien
gcacccacgcatcccccggctgcgg

SEQ ID NO: 2997866 - DNA, 25 bp, Homo sapien
gctgcggccgagggctgttcctctg

SEQ ID NO: 2997867 - DNA, 25 bp, Homo sapien
cggcagaaacgcctcggaaggagcc

SEQ ID NO: 2997868 - DNA, 25 bp, Homo sapien
ttctggaggacgctcacggcagaaa

SEQ ID NO: 2997869 - DNA, 25 bp, Homo sapien
agggcctcagcccactcgttctgga

SEQ ID NO: 2997870 - DNA, 25 bp, Homo sapien
tcagcccactcgttctggaggacgc

SEQ ID NO: 2997871 - DNA, 25 bp, Homo sapien
ggcgggcttcgagtccgggtggtca

SEQ ID NO: 2997872 - DNA, 25 bp, Homo sapien
cttcgagtccgggtggtcacgtcgc

SEQ ID NO: 2997873 - DNA, 25 bp, Homo sapien
cccgcgtccgcgacccccggagcag

SEQ ID NO: 2997874 - DNA, 25 bp, Homo sapien
cgggcttcgagtccgggtggtcacg

SEQ ID NO: 2997875 - DNA, 25 bp, Homo sapien
cttccagctgcaccggtcgctggag

SEQ ID NO: 2997876 - DNA, 25 bp, Homo sapien
tgcaccggtcgctggagtactgcgc

SEQ ID NO: 2997877 - DNA, 25 bp, Homo sapien
agctgcaccggtcgctggagtactg

SEQ ID NO: 2997878 - DNA, 25 bp, Homo sapien
accggtcgctggagtactgcgcgcc

SEQ ID NO: 2997879 - DNA, 25 bp, Homo sapien
gcgtttctggcttcggtctgctgga

SEQ ID NO: 2997880 - DNA, 25 bp, Homo sapien
tcggttcggggatgcaccgacccgc

SEQ ID NO: 2997881 - DNA, 25 bp, Homo sapien
cccagaagagccgtcggcctcggag

SEQ ID NO: 2997882 - DNA, 25 bp, Homo sapien
ttctcgacacactcggcctgggtgg

SEQ ID NO: 2997883 - DNA, 25 bp, Homo sapien
tgggatgcaacctgcccagagagca

SEQ ID NO: 2997884 - DNA, 25 bp, Homo sapien
gaggcgaacttcctccacagggtga

SEQ ID NO: 2997885 - DNA, 25 bp, Homo sapien
aagactcaccacaaaagcgaggcga

SEQ ID NO: 2997886 - DNA, 25 bp, Homo sapien
gtagcgtcaaacaccaatctctgcg

SEQ ID NO: 2997887 - DNA, 25 bp, Homo sapien
tgcccgtgaggcaggccggcgccat

SEQ ID NO: 2997888 - DNA, 25 bp, Homo sapien
catctccgcccttcggcacaagggc

SEQ ID NO: 2997889 - DNA, 25 bp, Homo sapien
acacggacccctgcccgtgaggcag

SEQ ID NO: 2997890 - DNA, 25 bp, Homo sapien
ccacaggtgccacacggacccctgc

SEQ ID NO: 2997891 - DNA, 25 bp, Homo sapien
cgcacccacagagagtcagtgagga

SEQ ID NO: 2997892 - DNA, 25 bp, Homo sapien
cacagagagtcagtgaggacgatac

SEQ ID NO: 2997893 - DNA, 25 bp, Homo sapien
cccggagctcccgtcacacacccca

SEQ ID NO: 2997894 - DNA, 25 bp, Homo sapien
acccgcacccacagagagtcagtga

SEQ ID NO: 2997895 - DNA, 25 bp, Homo sapien
gccgcaggttaacgatgagagcacc

SEQ ID NO: 2997896 - DNA, 25 bp, Homo sapien
gagagcacctgttgggtacatccac

SEQ ID NO: 2997897 - DNA, 25 bp, Homo sapien
ggtaccagcagtctcagttctccag

SEQ ID NO: 2997898 - DNA, 25 bp, Homo sapien
tgtgcctcctaaccagctcgtactg

SEQ ID NO: 2997899 - DNA, 25 bp, Homo sapien
caaaacagtcatgtccgaagcacag

SEQ ID NO: 2997900 - DNA, 25 bp, Homo sapien
gtcatgtccgaagcacagacacaga

SEQ ID NO: 2997901 - DNA, 25 bp, Homo sapien
tcaggcaaaacagtcatgtccgaag

SEQ ID NO: 2997902 - DNA, 25 bp, Homo sapien
agacacagaagggttttcaccaagg

SEQ ID NO: 2997903 - DNA, 25 bp, Homo sapien
tcctgagtcagcacaaactggaact

SEQ ID NO: 2997904 - DNA, 25 bp, Homo sapien
cgtccacctcccgtgggtcgtgctg

SEQ ID NO: 2997905 - DNA, 25 bp, Homo sapien
ggctcagcctccgtcggctctcgca

SEQ ID NO: 2997906 - DNA, 25 bp, Homo sapien
ccgtgggtcgtgctgccaggccaaa

SEQ ID NO: 2997907 - DNA, 25 bp, Homo sapien
aacctctgtggccacgattactggg

SEQ ID NO: 2997908 - DNA, 25 bp, Homo sapien
cgctgcttttagaggagccggtgac

SEQ ID NO: 2997909 - DNA, 25 bp, Homo sapien
acagttccgacgggaaacctctgtg

SEQ ID NO: 2997910 - DNA, 25 bp, Homo sapien
gtggccacgattactgggtctccca

SEQ ID NO: 2997911 - DNA, 25 bp, Homo sapien
ctgcccaggtaaggacagccagagg

SEQ ID NO: 2997912 - DNA, 25 bp, Homo sapien
cccaggtaaggacagccagagggac

SEQ ID NO: 2997913 - DNA, 25 bp, Homo sapien
ccaggtaaggacagccagagggact

SEQ ID NO: 2997914 - DNA, 25 bp, Homo sapien
cggtccggcaggactgcccaggtaa

SEQ ID NO: 2997915 - DNA, 25 bp, Homo sapien
tggaatcctggtccatcctcctcgg

SEQ ID NO: 2997916 - DNA, 25 bp, Homo sapien
aatcctggtccatcctcctcggagg

SEQ ID NO: 2997917 - DNA, 25 bp, Homo sapien
atcctggtccatcctcctcggaggg

SEQ ID NO: 2997918 - DNA, 25 bp, Homo sapien
gaatcctggtccatcctcctcggag

SEQ ID NO: 2997919 - DNA, 25 bp, Homo sapien
agtgcctgcagcctcgcctgctaga

SEQ ID NO: 2997920 - DNA, 25 bp, Homo sapien
ctgcagcctcgcctgctagaagcct

SEQ ID NO: 2997921 - DNA, 25 bp, Homo sapien
gggccggggacggtcagtgcctgca

SEQ ID NO: 2997922 - DNA, 25 bp, Homo sapien
tgtggggccggggacggtcagtgcc

SEQ ID NO: 2997923 - DNA, 25 bp, Homo sapien
agcaccctccggctgggcagccatg

SEQ ID NO: 2997924 - DNA, 25 bp, Homo sapien
tgagcagcaccctccggctgggcag

SEQ ID NO: 2997925 - DNA, 25 bp, Homo sapien
gcaccctccggctgggcagccatgg

SEQ ID NO: 2997926 - DNA, 25 bp, Homo sapien
gcagcaccctccggctgggcagcca

SEQ ID NO: 2997927 - DNA, 25 bp, Homo sapien
acagaagcgtggtgaccccagtcca

SEQ ID NO: 2997928 - DNA, 25 bp, Homo sapien
agtggaggtggcctcggctgagaga

SEQ ID NO: 2997929 - DNA, 25 bp, Homo sapien
ctggtcaacgacagaagcgtggtga

SEQ ID NO: 2997930 - DNA, 25 bp, Homo sapien
gagagagctggtcaacgacagaagc

SEQ ID NO: 2997931 - DNA, 25 bp, Homo sapien
gccccaaatggctttcaagccaagc

SEQ ID NO: 2997932 - DNA, 25 bp, Homo sapien
gggcagtgagttccagtcagggcca

SEQ ID NO: 2997933 - DNA, 25 bp, Homo sapien
agtcagggccatcggcccggcccct

SEQ ID NO: 2997934 - DNA, 25 bp, Homo sapien
tccagtcagggccatcggcccggcc

SEQ ID NO: 2997935 - DNA, 25 bp, Homo sapien
cagcagggcagtgagttccagtcag

SEQ ID NO: 2997936 - DNA, 25 bp, Homo sapien
cacggcgccgggaccaccctcattt

SEQ ID NO: 2997937 - DNA, 25 bp, Homo sapien
tccacggcccacggcgccgggacca

SEQ ID NO: 2997938 - DNA, 25 bp, Homo sapien
gcgacggcagcggcacccaaaagga

SEQ ID NO: 2997939 - DNA, 25 bp, Homo sapien
ccacttccctgggtcgcgacggcag

SEQ ID NO: 2997940 - DNA, 25 bp, Homo sapien
agacggctaggagcacctcggtgtc

SEQ ID NO: 2997941 - DNA, 25 bp, Homo sapien
gctaggagcacctcggtgtcactgc

SEQ ID NO: 2997942 - DNA, 25 bp, Homo sapien
tcgctggtgcagacggctaggagca

SEQ ID NO: 2997943 - DNA, 25 bp, Homo sapien
ctcggtgtcactgcagggacggcac

SEQ ID NO: 2997944 - DNA, 25 bp, Homo sapien
cccctgcccccgcatcgatgggcac

SEQ ID NO: 2997945 - DNA, 25 bp, Homo sapien
cctgcccccgcatcgatgggcactg

SEQ ID NO: 2997946 - DNA, 25 bp, Homo sapien
gcactggaacgggcagctgaccccc

SEQ ID NO: 2997947 - DNA, 25 bp, Homo sapien
tccccctgcccccgcatcgatgggc

SEQ ID NO: 2997948 - DNA, 25 bp, Homo sapien
gcaccggctcgaagaccctgctttt

SEQ ID NO: 2997949 - DNA, 25 bp, Homo sapien
tctgctcacgcgcaggtggatggct

SEQ ID NO: 2997950 - DNA, 25 bp, Homo sapien
tttctgccgatagagtctgctcacg

SEQ ID NO: 2997951 - DNA, 25 bp, Homo sapien
cgctcaggctcgtgggtaacttgct

SEQ ID NO: 2997952 - DNA, 25 bp, Homo sapien
agaggaagtcgccatgccccggccg

SEQ ID NO: 2997953 - DNA, 25 bp, Homo sapien
tgaagaggaagtcgccatgccccgg

SEQ ID NO: 2997954 - DNA, 25 bp, Homo sapien
cagtgaagaggaagtcgccatgccc

SEQ ID NO: 2997955 - DNA, 25 bp, Homo sapien
agtgaagaggaagtcgccatgcccc

SEQ ID NO: 2997956 - DNA, 25 bp, Homo sapien
tggaagtccttgaagcgtggggcac

SEQ ID NO: 2997957 - DNA, 25 bp, Homo sapien
tctggaagtccttgaagcgtggggc

SEQ ID NO: 2997958 - DNA, 25 bp, Homo sapien
ctggaagtccttgaagcgtggggca

SEQ ID NO: 2997959 - DNA, 25 bp, Homo sapien
agcatttccaatcggccagggcatc

SEQ ID NO: 2997960 - DNA, 25 bp, Homo sapien
ggccagatgccgtgactcctaacgt

SEQ ID NO: 2997961 - DNA, 25 bp, Homo sapien
tggcgagaacgtccacagcttcggt

SEQ ID NO: 2997962 - DNA, 25 bp, Homo sapien
tagagaacagtatcagacggcacac

SEQ ID NO: 2997963 - DNA, 25 bp, Homo sapien
accggacctggcgaaagacagactc

SEQ ID NO: 2997964 - DNA, 25 bp, Homo sapien
tgtctgccgaggcagggtggcgccc

SEQ ID NO: 2997965 - DNA, 25 bp, Homo sapien
gtcgccgggcggagcaagcgtgtct

SEQ ID NO: 2997966 - DNA, 25 bp, Homo sapien
ggtacgtccagcgaggccctgaaca

SEQ ID NO: 2997967 - DNA, 25 bp, Homo sapien
tgtgggccccaatccagtgaccaat

SEQ ID NO: 2997968 - DNA, 25 bp, Homo sapien
gagaacgaggttgtttcagccccgc

SEQ ID NO: 2997969 - DNA, 25 bp, Homo sapien
gaagatgaagcgttctcccctggag

SEQ ID NO: 2997970 - DNA, 25 bp, Homo sapien
gtctagagactagctgtgggcccct

SEQ ID NO: 2997971 - DNA, 25 bp, Homo sapien
tggggtctggttaactgacactccc

SEQ ID NO: 2997972 - DNA, 25 bp, Homo sapien
tttggcaaggccggcatggtgccca

SEQ ID NO: 2997973 - DNA, 25 bp, Homo sapien
cacgggaggaactgcctgattcatc

SEQ ID NO: 2997974 - DNA, 25 bp, Homo sapien
cctttgctcttagcggctgcacggg

SEQ ID NO: 2997975 - DNA, 25 bp, Homo sapien
gaacatctgagccggtgcacacctg

SEQ ID NO: 2997976 - DNA, 25 bp, Homo sapien
tctgagccggtgcacacctgagcca

SEQ ID NO: 2997977 - DNA, 25 bp, Homo sapien
atctgagccggtgcacacctgagcc

SEQ ID NO: 2997978 - DNA, 25 bp, Homo sapien
acatctgagccggtgcacacctgag

SEQ ID NO: 2997979 - DNA, 25 bp, Homo sapien
aggtcctcgcccagaaacacctgct

SEQ ID NO: 2997980 - DNA, 25 bp, Homo sapien
tcctcgcccagaaacacctgcttct

SEQ ID NO: 2997981 - DNA, 25 bp, Homo sapien
gtgctgtggcgcctgctggcaaagg

SEQ ID NO: 2997982 - DNA, 25 bp, Homo sapien
ggcgcctgctggcaaaggtgtgctg

SEQ ID NO: 2997983 - DNA, 25 bp, Homo sapien
tctctttttcctcgggggacatgtg

SEQ ID NO: 2997984 - DNA, 25 bp, Homo sapien
ttttcctcgggggacatgtggatct

SEQ ID NO: 2997985 - DNA, 25 bp, Homo sapien
gcccgtgtgcatgttcacggccgtg

SEQ ID NO: 2997986 - DNA, 25 bp, Homo sapien
gtggatctgcccgtgtgcatgttca

SEQ ID NO: 2997987 - DNA, 25 bp, Homo sapien
gggatgagttacaccctgagcccca

SEQ ID NO: 2997988 - DNA, 25 bp, Homo sapien
accaggcgttcagcgaggacaatgc

SEQ ID NO: 2997989 - DNA, 25 bp, Homo sapien
agccctgtgacgagctggaaaccga

SEQ ID NO: 2997990 - DNA, 25 bp, Homo sapien
tggtgatgacctagtgaatccaggc

SEQ ID NO: 2997991 - DNA, 25 bp, Homo sapien
ctcccagcagaggaagctcaactca

SEQ ID NO: 2997992 - DNA, 25 bp, Homo sapien
tggagggagtcgaggtcgagggagg

SEQ ID NO: 2997993 - DNA, 25 bp, Homo sapien
atcaattagcgaggtggaagccctc

SEQ ID NO: 2997994 - DNA, 25 bp, Homo sapien
ggaagccctcagtgtcagctgcagt

SEQ ID NO: 2997995 - DNA, 25 bp, Homo sapien
gcaggacccagtgtgcaccggctga

SEQ ID NO: 2997996 - DNA, 25 bp, Homo sapien
ggctgaaccggtgcccactgcaggc

SEQ ID NO: 2997997 - DNA, 25 bp, Homo sapien
aaccaagtgtgaatagcagagccgg

SEQ ID NO: 2997998 - DNA, 25 bp, Homo sapien
gacaccagcagggctgatcaggccc

SEQ ID NO: 2997999 - DNA, 25 bp, Homo sapien
cccagtgttgactccggattcctca

SEQ ID NO: 2998000 - DNA, 25 bp, Homo sapien
tcttgcctctgatcaaactgatggc

SEQ ID NO: 2998001 - DNA, 25 bp, Homo sapien
actgatggctagaaaagtatgtggc

SEQ ID NO: 2998002 - DNA, 25 bp, Homo sapien
gccaagcctccgctgtctttataaa

SEQ ID NO: 2998003 - DNA, 25 bp, Homo sapien
agacagagtctgctccaccgggaaa

SEQ ID NO: 2998004 - DNA, 25 bp, Homo sapien
gaggaagctcaggcgcctgatcgct

SEQ ID NO: 2998005 - DNA, 25 bp, Homo sapien
gctgttccgtggcaaggagcacgcc

SEQ ID NO: 2998006 - DNA, 25 bp, Homo sapien
aggcgccagccgttgggaaatcaga

SEQ ID NO: 2998007 - DNA, 25 bp, Homo sapien
gagtgtccctggacgaggtatccca

SEQ ID NO: 2998008 - DNA, 25 bp, Homo sapien
ctgctggacaggcaccaggccatgg

SEQ ID NO: 2998009 - DNA, 25 bp, Homo sapien
catctgaagtgttctcgccagtgga

SEQ ID NO: 2998010 - DNA, 25 bp, Homo sapien
gtatcccagatgcaccccagtcgtg

SEQ ID NO: 2998011 - DNA, 25 bp, Homo sapien
agctcggcctgtctttgaaaggcca

SEQ ID NO: 2998012 - DNA, 25 bp, Homo sapien
tggcccacagctcggcctgtctttg

SEQ ID NO: 2998013 - DNA, 25 bp, Homo sapien
ccacagctcggcctgtctttgaaag

SEQ ID NO: 2998014 - DNA, 25 bp, Homo sapien
agtggcccacagctcggcctgtctt

SEQ ID NO: 2998015 - DNA, 25 bp, Homo sapien
tgcaggggtccagcagcacccacag

SEQ ID NO: 2998016 - DNA, 25 bp, Homo sapien
gcccacggctggcaggtgggaccca

SEQ ID NO: 2998017 - DNA, 25 bp, Homo sapien
ctggcccacggctggcaggtgggac

SEQ ID NO: 2998018 - DNA, 25 bp, Homo sapien
gtgggacccagctgcaggggtccag

SEQ ID NO: 2998019 - DNA, 25 bp, Homo sapien
caggtgggcgcaccgcacgatgcct

SEQ ID NO: 2998020 - DNA, 25 bp, Homo sapien
cgagtagccgttggcgtccatggcg

SEQ ID NO: 2998021 - DNA, 25 bp, Homo sapien
cacgatgcctaccagcaggccttgc

SEQ ID NO: 2998022 - DNA, 25 bp, Homo sapien
gcggccaggtgggcgcaccgcacga

SEQ ID NO: 2998023 - DNA, 25 bp, Homo sapien
gggacagatggtcccctgtgcgttc

SEQ ID NO: 2998024 - DNA, 25 bp, Homo sapien
actggaggcttgtactagtgaaggc

SEQ ID NO: 2998025 - DNA, 25 bp, Homo sapien
tgtgcgttcaacctcatacaagcaa

SEQ ID NO: 2998026 - DNA, 25 bp, Homo sapien
catctttaatacctcagggctgggc

SEQ ID NO: 2998027 - DNA, 25 bp, Homo sapien
gaatttgtcctcgtcacacacagag

SEQ ID NO: 2998028 - DNA, 25 bp, Homo sapien
gatgaactcattgtgccggaatttg

SEQ ID NO: 2998029 - DNA, 25 bp, Homo sapien
tcttggtgtggttgggtttcagctt

SEQ ID NO: 2998030 - DNA, 25 bp, Homo sapien
acgtgtctccccgatgaactcattg

SEQ ID NO: 2998031 - DNA, 25 bp, Homo sapien
tggaggtgtgcgcaggtagggccag

SEQ ID NO: 2998032 - DNA, 25 bp, Homo sapien
gtgtgcgcaggtagggccagccctg

SEQ ID NO: 2998033 - DNA, 25 bp, Homo sapien
tgcctcagacgcactgggcatggtg

SEQ ID NO: 2998034 - DNA, 25 bp, Homo sapien
cagtgcctcagacgcactgggcatg

SEQ ID NO: 2998035 - DNA, 25 bp, Homo sapien
gggagacgcacaagatgcctgggcc

SEQ ID NO: 2998036 - DNA, 25 bp, Homo sapien
cgtagtaagtgagggtctcgttcca

SEQ ID NO: 2998037 - DNA, 25 bp, Homo sapien
tctgtgatcccgtagtaagtgaggg

SEQ ID NO: 2998038 - DNA, 25 bp, Homo sapien
gtcttgcggatcatgtcttcatctg

SEQ ID NO: 2998039 - DNA, 25 bp, Homo sapien
gtcttcatctgtgatcccgtagtaa

SEQ ID NO: 2998040 - DNA, 25 bp, Homo sapien
cctggtcatactcgccctcggccct

SEQ ID NO: 2998041 - DNA, 25 bp, Homo sapien
tccctgagcccttcttgcagcataa

SEQ ID NO: 2998042 - DNA, 25 bp, Homo sapien
cttgcagcataagggcatcaagacc

SEQ ID NO: 2998043 - DNA, 25 bp, Homo sapien
gagcccttcttgcagcataagggca

SEQ ID NO: 2998044 - DNA, 25 bp, Homo sapien
tcctgtccgagatgcacctgttgtg

SEQ ID NO: 2998045 - DNA, 25 bp, Homo sapien
tgcggagagtcagggaacagcccat

SEQ ID NO: 2998046 - DNA, 25 bp, Homo sapien
cgcttgggtcatccggcgtaggaat

SEQ ID NO: 2998047 - DNA, 25 bp, Homo sapien
tgagcacatgtgtggtcggacgctt

SEQ ID NO: 2998048 - DNA, 25 bp, Homo sapien
cttgacgtaggggtctgccagccca

SEQ ID NO: 2998049 - DNA, 25 bp, Homo sapien
ccagcccattgtggtccattggctt

SEQ ID NO: 2998050 - DNA, 25 bp, Homo sapien
gtctgccagcccattgtggtccatt

SEQ ID NO: 2998051 - DNA, 25 bp, Homo sapien
cattgtggtccattggcttcaggcc

SEQ ID NO: 2998052 - DNA, 25 bp, Homo sapien
gaaatcggggacatggaactgacag

SEQ ID NO: 2998053 - DNA, 25 bp, Homo sapien
aaatcggggacatggaactgacagg

SEQ ID NO: 2998054 - DNA, 25 bp, Homo sapien
tggaaatcggggacatggaactgac

SEQ ID NO: 2998055 - DNA, 25 bp, Homo sapien
actggaaatcggggacatggaactg

SEQ ID NO: 2998056 - DNA, 25 bp, Homo sapien
gaacatggagctgacacatgcttga

SEQ ID NO: 2998057 - DNA, 25 bp, Homo sapien
agaagaattccttcctggccccgca

SEQ ID NO: 2998058 - DNA, 25 bp, Homo sapien
tgacctaggccctcttgaggacccc

SEQ ID NO: 2998059 - DNA, 25 bp, Homo sapien
gtggtctggcctccctgacctaggc

SEQ ID NO: 2998060 - DNA, 25 bp, Homo sapien
cagacatccaaaagcctggacagga

SEQ ID NO: 2998061 - DNA, 25 bp, Homo sapien
tggtcatacagcaggctgaagtcca

SEQ ID NO: 2998062 - DNA, 25 bp, Homo sapien
cgttgttctcctggtcatacagcag

SEQ ID NO: 2998063 - DNA, 25 bp, Homo sapien
ctcctggtcatacagcaggctgaag

SEQ ID NO: 2998064 - DNA, 25 bp, Homo sapien
gttgttctcctggtcatacagcagg

SEQ ID NO: 2998065 - DNA, 25 bp, Homo sapien
ctgcggacagaggagggcacaggtc

SEQ ID NO: 2998066 - DNA, 25 bp, Homo sapien
aggagggcacaggtcccaccctggc

SEQ ID NO: 2998067 - DNA, 25 bp, Homo sapien
agaggagggcacaggtcccaccctg

SEQ ID NO: 2998068 - DNA, 25 bp, Homo sapien
gacagaggagggcacaggtcccacc

SEQ ID NO: 2998069 - DNA, 25 bp, Homo sapien
agaggcttcgcctgcccctgtgaga

SEQ ID NO: 2998070 - DNA, 25 bp, Homo sapien
atggcggctgccaccaaccaagcac

SEQ ID NO: 2998071 - DNA, 25 bp, Homo sapien
caggtgccaccgttccatggcggct

SEQ ID NO: 2998072 - DNA, 25 bp, Homo sapien
ccctgtgagaccagatgagcctggc

SEQ ID NO: 2998073 - DNA, 25 bp, Homo sapien
tgaagaatggactgggcttccacag

SEQ ID NO: 2998074 - DNA, 25 bp, Homo sapien
gaagaatggactgggcttccacagg

SEQ ID NO: 2998075 - DNA, 25 bp, Homo sapien
agctttgaagaatggactgggcttc

SEQ ID NO: 2998076 - DNA, 25 bp, Homo sapien
tttgaagaatggactgggcttccac

SEQ ID NO: 2998077 - DNA, 25 bp, Homo sapien
gccgtaatgaaccatctggcttgaa

SEQ ID NO: 2998078 - DNA, 25 bp, Homo sapien
gctaaagccgtaatgaaccatctgg

SEQ ID NO: 2998079 - DNA, 25 bp, Homo sapien
taaagccgtaatgaaccatctggct

SEQ ID NO: 2998080 - DNA, 25 bp, Homo sapien
ctggctaaagccgtaatgaaccatc

SEQ ID NO: 2998081 - DNA, 25 bp, Homo sapien
agcagagatgccagaaatgggaaca

SEQ ID NO: 2998082 - DNA, 25 bp, Homo sapien
gggcagccaaagcagttacttgggt

SEQ ID NO: 2998083 - DNA, 25 bp, Homo sapien
acaactttcccatccgttcttctgg

SEQ ID NO: 2998084 - DNA, 25 bp, Homo sapien
cacccaggggatcaccaagtccagg

SEQ ID NO: 2998085 - DNA, 25 bp, Homo sapien
gcttgggaaactccaggcccgcagc

SEQ ID NO: 2998086 - DNA, 25 bp, Homo sapien
tgcttgggaaactccaggcccgcag

SEQ ID NO: 2998087 - DNA, 25 bp, Homo sapien
tgcgcaggggaggggcagcaccagc

SEQ ID NO: 2998088 - DNA, 25 bp, Homo sapien
ctgcgcaggggaggggcagcaccag

SEQ ID NO: 2998089 - DNA, 25 bp, Homo sapien
gcgcaggggaggggcagcaccagcc

SEQ ID NO: 2998090 - DNA, 25 bp, Homo sapien
agtcgtccgactcgtagccgtcggc

SEQ ID NO: 2998091 - DNA, 25 bp, Homo sapien
tgcagtcgtccgactcgtagccgtc

SEQ ID NO: 2998092 - DNA, 25 bp, Homo sapien
gcagtcgtccgactcgtagccgtcg

SEQ ID NO: 2998093 - DNA, 25 bp, Homo sapien
tcgtccgactcgtagccgtcggcgt

SEQ ID NO: 2998094 - DNA, 25 bp, Homo sapien
gccgtaggctccgaagagctggtcc

SEQ ID NO: 2998095 - DNA, 25 bp, Homo sapien
ggcccgggctggagccgtaggctcc

SEQ ID NO: 2998096 - DNA, 25 bp, Homo sapien
gctccgaagagctggtccacatcct

SEQ ID NO: 2998097 - DNA, 25 bp, Homo sapien
agagctggtccacatcctcgtcgtc

SEQ ID NO: 2998098 - DNA, 25 bp, Homo sapien
ccggcaccggccacagccgggcgcg

SEQ ID NO: 2998099 - DNA, 25 bp, Homo sapien
ggccggcaccggccacagccgggcg

SEQ ID NO: 2998100 - DNA, 25 bp, Homo sapien
caccggccacagccgggcgcgcggg

SEQ ID NO: 2998101 - DNA, 25 bp, Homo sapien
cggcaccggccacagccgggcgcgc

SEQ ID NO: 2998102 - DNA, 25 bp, Homo sapien
agatctgcttgatgggacggatggg

SEQ ID NO: 2998103 - DNA, 25 bp, Homo sapien
aagcgggggaagtagtcggagatct

SEQ ID NO: 2998104 - DNA, 25 bp, Homo sapien
tctgcttgatgggacggatggggcc

SEQ ID NO: 2998105 - DNA, 25 bp, Homo sapien
cggagatctgcttgatgggacggat

SEQ ID NO: 2998106 - DNA, 25 bp, Homo sapien
gatgctgatggtcgccttctccccg

SEQ ID NO: 2998107 - DNA, 25 bp, Homo sapien
ctggatgctgatggtcgccttctcc

SEQ ID NO: 2998108 - DNA, 25 bp, Homo sapien
ggatgctgatggtcgccttctcccc

SEQ ID NO: 2998109 - DNA, 25 bp, Homo sapien
tggatgctgatggtcgccttctccc

SEQ ID NO: 2998110 - DNA, 25 bp, Homo sapien
gggccgccgggcgccttccgctcat

SEQ ID NO: 2998111 - DNA, 25 bp, Homo sapien
ctttactaaggagctggagggtgtc

SEQ ID NO: 2998112 - DNA, 25 bp, Homo sapien
cgtagagtcaaaagtcaggtgtgcc

SEQ ID NO: 2998113 - DNA, 25 bp, Homo sapien
tacctgtgttcaccgagagctggcc

SEQ ID NO: 2998114 - DNA, 25 bp, Homo sapien
cctccccgagggatagaagtggata

SEQ ID NO: 2998115 - DNA, 25 bp, Homo sapien
tgggctcaatggtgcaaagaaatgt

SEQ ID NO: 2998116 - DNA, 25 bp, Homo sapien
atgtcagatgctctggtgctgcagt

SEQ ID NO: 2998117 - DNA, 25 bp, Homo sapien
gtgatgggctcaatggtgcaaagaa

SEQ ID NO: 2998118 - DNA, 25 bp, Homo sapien
gtcagatgctctggtgctgcagtga

SEQ ID NO: 2998119 - DNA, 25 bp, Homo sapien
tgtggccacgtcgaatccgctgctt

SEQ ID NO: 2998120 - DNA, 25 bp, Homo sapien
tggtctggtgcttccatccccaaag

SEQ ID NO: 2998121 - DNA, 25 bp, Homo sapien
tttctgccccgcgactcctctgagt

SEQ ID NO: 2998122 - DNA, 25 bp, Homo sapien
ctaggcatgatctctggggacttcc

SEQ ID NO: 2998123 - DNA, 25 bp, Homo sapien
tcaggttcgagcctccttagggcac

SEQ ID NO: 2998124 - DNA, 25 bp, Homo sapien
aagaggtctccttacttccacagca

SEQ ID NO: 2998125 - DNA, 25 bp, Homo sapien
aaaatgtctttagagctcggctcag

SEQ ID NO: 2998126 - DNA, 25 bp, Homo sapien
tccacagcaccgagtcatcgaagtt

SEQ ID NO: 2998127 - DNA, 25 bp, Homo sapien
tcacacagctggtatgtgccagagc

SEQ ID NO: 2998128 - DNA, 25 bp, Homo sapien
gggaagagaacgtgcacttgtatga

SEQ ID NO: 2998129 - DNA, 25 bp, Homo sapien
agctgggaagagaacgtgcacttgt

SEQ ID NO: 2998130 - DNA, 25 bp, Homo sapien
cacacagctggtatgtgccagagct

SEQ ID NO: 2998131 - DNA, 25 bp, Homo sapien
tctttccctagacaccagctctgac

SEQ ID NO: 2998132 - DNA, 25 bp, Homo sapien
tctctttccctagacaccagctctg

SEQ ID NO: 2998133 - DNA, 25 bp, Homo sapien
gcttcactgacagcggcgggcacag

SEQ ID NO: 2998134 - DNA, 25 bp, Homo sapien
agctctgaccctccaatttccacca

SEQ ID NO: 2998135 - DNA, 25 bp, Homo sapien
catacgagtggacagtaatgccctg

SEQ ID NO: 2998136 - DNA, 25 bp, Homo sapien
tgaaaattcccgttgcctagtgagg

SEQ ID NO: 2998137 - DNA, 25 bp, Homo sapien
aattccacggtgtcgcagttgctac

SEQ ID NO: 2998138 - DNA, 25 bp, Homo sapien
gaagtatccctgtcgtatcctggtt

SEQ ID NO: 2998139 - DNA, 25 bp, Homo sapien
gctttttccttacagccacctcagg

SEQ ID NO: 2998140 - DNA, 25 bp, Homo sapien
tgtaaacaggtgaacctttctgtgt

SEQ ID NO: 2998141 - DNA, 25 bp, Homo sapien
ttctgcctagtacctccaacagctg

SEQ ID NO: 2998142 - DNA, 25 bp, Homo sapien
ggcctcctacgtattctgtaaacag

SEQ ID NO: 2998143 - DNA, 25 bp, Homo sapien
atgtttcctacggcagctcgatgag

SEQ ID NO: 2998144 - DNA, 25 bp, Homo sapien
ggcgagtgtttcttatggcacctca

SEQ ID NO: 2998145 - DNA, 25 bp, Homo sapien
aatgtttcctacggcagctcgatga

SEQ ID NO: 2998146 - DNA, 25 bp, Homo sapien
cgagtgtttcttatggcacctcaat

SEQ ID NO: 2998147 - DNA, 25 bp, Homo sapien
ccatggtctcgcgataagatgctcc

SEQ ID NO: 2998148 - DNA, 25 bp, Homo sapien
tatcttttgccccagctggtgcggg

SEQ ID NO: 2998149 - DNA, 25 bp, Homo sapien
caggtaccagcagaaagcaggcgtt

SEQ ID NO: 2998150 - DNA, 25 bp, Homo sapien
ttctcatgtgggaaagatgccggcc

SEQ ID NO: 2998151 - DNA, 25 bp, Homo sapien
cttggtatctaaaacctcatgcgga

SEQ ID NO: 2998152 - DNA, 25 bp, Homo sapien
gatctccctgagacacatatgcttc

SEQ ID NO: 2998153 - DNA, 25 bp, Homo sapien
tatcacgatgtagctctcacttacg

SEQ ID NO: 2998154 - DNA, 25 bp, Homo sapien
cagcagtttgatgtgtatttttcca

SEQ ID NO: 2998155 - DNA, 25 bp, Homo sapien
cataagaatgtttggtgtagttcct

SEQ ID NO: 2998156 - DNA, 25 bp, Homo sapien
gtcagcattattggtgagatacaca

SEQ ID NO: 2998157 - DNA, 25 bp, Homo sapien
tctgagggtggtgactcaatttcac

SEQ ID NO: 2998158 - DNA, 25 bp, Homo sapien
cccaagatgtgtcctgagtctgttg

SEQ ID NO: 2998159 - DNA, 25 bp, Homo sapien
catggacgcatctcagaaacacagg

SEQ ID NO: 2998160 - DNA, 25 bp, Homo sapien
tcactgcggcttaggaagggttcca

SEQ ID NO: 2998161 - DNA, 25 bp, Homo sapien
cacaggcaatcgtggtcttcgatca

SEQ ID NO: 2998162 - DNA, 25 bp, Homo sapien
tatccgttcagcatcaggtgtgtga

SEQ ID NO: 2998163 - DNA, 25 bp, Homo sapien
ttaattctgaagcataacgtgccac

SEQ ID NO: 2998164 - DNA, 25 bp, Homo sapien
aattctgaagcataacgtgccacag

SEQ ID NO: 2998165 - DNA, 25 bp, Homo sapien
ttctgaagcataacgtgccacaggg

SEQ ID NO: 2998166 - DNA, 25 bp, Homo sapien
ttttaattctgaagcataacgtgcc

SEQ ID NO: 2998167 - DNA, 25 bp, Homo sapien
tgccaagccaaacctcctgaagaga

SEQ ID NO: 2998168 - DNA, 25 bp, Homo sapien
tgaagacaggctgagcaaaaaccag

SEQ ID NO: 2998169 - DNA, 25 bp, Homo sapien
ttaatatagcaacggagatagcccc

SEQ ID NO: 2998170 - DNA, 25 bp, Homo sapien
ggcaggaatcctccacagggaagtc

SEQ ID NO: 2998171 - DNA, 25 bp, Homo sapien
gggctcgtccaggtgtgtcttttac

SEQ ID NO: 2998172 - DNA, 25 bp, Homo sapien
tggagctgcgtcagcagcgggggct

SEQ ID NO: 2998173 - DNA, 25 bp, Homo sapien
gcagcgggggctcgtccaggtgtgt

SEQ ID NO: 2998174 - DNA, 25 bp, Homo sapien
cgggggctcgtccaggtgtgtcttt

SEQ ID NO: 2998175 - DNA, 25 bp, Homo sapien
ccagcccgggcaacagcatgagatc

SEQ ID NO: 2998176 - DNA, 25 bp, Homo sapien
tggcgggtcagcagagcctgtcccc

SEQ ID NO: 2998177 - DNA, 25 bp, Homo sapien
gcagagcctgtccccgtctcaccac

SEQ ID NO: 2998178 - DNA, 25 bp, Homo sapien
cccctggcgggtcagcagagcctgt

SEQ ID NO: 2998179 - DNA, 25 bp, Homo sapien
ggtccccctggcgggtcagcagagc

SEQ ID NO: 2998180 - DNA, 25 bp, Homo sapien
tgctctggcacccagagaggtggcc

SEQ ID NO: 2998181 - DNA, 25 bp, Homo sapien
gagaggtggcccggcgggtgggtga

SEQ ID NO: 2998182 - DNA, 25 bp, Homo sapien
cggcgggtgggtgaaccccatcctg

SEQ ID NO: 2998183 - DNA, 25 bp, Homo sapien
ggctgctctggcacccagagaggtg

SEQ ID NO: 2998184 - DNA, 25 bp, Homo sapien
cgagacggggtgatctcagtccagt

SEQ ID NO: 2998185 - DNA, 25 bp, Homo sapien
gaaatcacgtgtgggccccgtggat

SEQ ID NO: 2998186 - DNA, 25 bp, Homo sapien
tcctcgtttggaactctagatctct

SEQ ID NO: 2998187 - DNA, 25 bp, Homo sapien
ctagatctctatgggatgtctgccc

SEQ ID NO: 2998188 - DNA, 25 bp, Homo sapien
tctaggctggaggagctaagatccg

SEQ ID NO: 2998189 - DNA, 25 bp, Homo sapien
tggatgggagtctgtcctctaggct

SEQ ID NO: 2998190 - DNA, 25 bp, Homo sapien
accccagtggatgggagtctgtcct

SEQ ID NO: 2998191 - DNA, 25 bp, Homo sapien
aggagctaagatccgagtcactgtc

SEQ ID NO: 2998192 - DNA, 25 bp, Homo sapien
tccactcactgagacaatagaccca

SEQ ID NO: 2998193 - DNA, 25 bp, Homo sapien
cactgagacaatagacccaagcaca

SEQ ID NO: 2998194 - DNA, 25 bp, Homo sapien
caatagacccaagcacaacagctct

SEQ ID NO: 2998195 - DNA, 25 bp, Homo sapien
tgagacaatagacccaagcacaaca

SEQ ID NO: 2998196 - DNA, 25 bp, Homo sapien
cactcactgagacaatagacccaag

SEQ ID NO: 2998197 - DNA, 25 bp, Homo sapien
gacaacagacccaagaacaacagct

SEQ ID NO: 2998198 - DNA, 25 bp, Homo sapien
tcggtgagacaatagacccaagcac

SEQ ID NO: 2998199 - DNA, 25 bp, Homo sapien
gacaatagacccaagcacaacagct

SEQ ID NO: 2998200 - DNA, 25 bp, Homo sapien
gcaaaagcacagatcccagcttcac

SEQ ID NO: 2998201 - DNA, 25 bp, Homo sapien
gccagtttcactcaaatggttctta

SEQ ID NO: 2998202 - DNA, 25 bp, Homo sapien
agtcacttcctcaccattgtcactg

SEQ ID NO: 2998203 - DNA, 25 bp, Homo sapien
cactgccttaactcgaggtgtcagc

SEQ ID NO: 2998204 - DNA, 25 bp, Homo sapien
tcagatggaagatgcgagtacacca

SEQ ID NO: 2998205 - DNA, 25 bp, Homo sapien
atggaagatgcgagtacaccaggga

SEQ ID NO: 2998206 - DNA, 25 bp, Homo sapien
ccagggagaaggctgtcccaacagc

SEQ ID NO: 2998207 - DNA, 25 bp, Homo sapien
gatgcgagtacaccagggagaaggc

SEQ ID NO: 2998208 - DNA, 25 bp, Homo sapien
ttttgggcaaagcggttactcagga

SEQ ID NO: 2998209 - DNA, 25 bp, Homo sapien
ggcaaagcggttactcaggaaatac

SEQ ID NO: 2998210 - DNA, 25 bp, Homo sapien
gcaaagcggttactcaggaaatact

SEQ ID NO: 2998211 - DNA, 25 bp, Homo sapien
tgggcaaagcggttactcaggaaat

SEQ ID NO: 2998212 - DNA, 25 bp, Homo sapien
tggtttggaaactccctgcaggttg

SEQ ID NO: 2998213 - DNA, 25 bp, Homo sapien
tgcagggttgggggaaacacgctct

SEQ ID NO: 2998214 - DNA, 25 bp, Homo sapien
tggaaactccctgcaggttgtgggt

SEQ ID NO: 2998215 - DNA, 25 bp, Homo sapien
ctttggtttggaaactccctgcagg

SEQ ID NO: 2998216 - DNA, 25 bp, Homo sapien
tctgtcacatatcctcagggcactg

SEQ ID NO: 2998217 - DNA, 25 bp, Homo sapien
tgtgttcagagccttctagagtgtt

SEQ ID NO: 2998218 - DNA, 25 bp, Homo sapien
tcttatcttcatttccctccgtatc

SEQ ID NO: 2998219 - DNA, 25 bp, Homo sapien
cctggcctcttgctgatgtttccaa

SEQ ID NO: 2998220 - DNA, 25 bp, Homo sapien
aaattagaggcgacagccatgctcc

SEQ ID NO: 2998221 - DNA, 25 bp, Homo sapien
tcattgggtctcgggcaaattagag

SEQ ID NO: 2998222 - DNA, 25 bp, Homo sapien
gggcaaattagaggcgacagccatg

SEQ ID NO: 2998223 - DNA, 25 bp, Homo sapien
ggtctcgggcaaattagaggcgaca

SEQ ID NO: 2998224 - DNA, 25 bp, Homo sapien
tgatgagggccttctgctcttggaa

SEQ ID NO: 2998225 - DNA, 25 bp, Homo sapien
tccgtggtgtggctgatgagggcct

SEQ ID NO: 2998226 - DNA, 25 bp, Homo sapien
ggccttctgctcttggaaatccacc

SEQ ID NO: 2998227 - DNA, 25 bp, Homo sapien
agggccttctgctcttggaaatcca

SEQ ID NO: 2998228 - DNA, 25 bp, Homo sapien
cagcgaggaggcccacgacaggcag

SEQ ID NO: 2998229 - DNA, 25 bp, Homo sapien
agccagcgaggaggcccacgacagg

SEQ ID NO: 2998230 - DNA, 25 bp, Homo sapien
gcgaggaggcccacgacaggcaggt

SEQ ID NO: 2998231 - DNA, 25 bp, Homo sapien
ctaagccagcgaggaggcccacgac

SEQ ID NO: 2998232 - DNA, 25 bp, Homo sapien
tgtggcaggaaagcaacagcggctc

SEQ ID NO: 2998233 - DNA, 25 bp, Homo sapien
aagcaacagcggctcatttgtgctc

SEQ ID NO: 2998234 - DNA, 25 bp, Homo sapien
aagaggtcgggtgtggcaggaaagc

SEQ ID NO: 2998235 - DNA, 25 bp, Homo sapien
gctcatttgtgctcaggacatctgt

SEQ ID NO: 2998236 - DNA, 25 bp, Homo sapien
ggtcagggttaggagtacagtcaca

SEQ ID NO: 2998237 - DNA, 25 bp, Homo sapien
gtcagggttaggagtacagtcacac

SEQ ID NO: 2998238 - DNA, 25 bp, Homo sapien
atgatcatggcagccactaggggca

SEQ ID NO: 2998239 - DNA, 25 bp, Homo sapien
gatcatggcagccactaggggcagg

SEQ ID NO: 2998240 - DNA, 25 bp, Homo sapien
atctgcagtgtgtttctggatacac

SEQ ID NO: 2998241 - DNA, 25 bp, Homo sapien
ggcctttcgtctccggcttcttcca

SEQ ID NO: 2998242 - DNA, 25 bp, Homo sapien
gatgagatcacacaacacgcggcct

SEQ ID NO: 2998243 - DNA, 25 bp, Homo sapien
tccacttcgcatggtgttttcaagg

SEQ ID NO: 2998244 - DNA, 25 bp, Homo sapien
gatcacacaacacgcggcctttcgt

SEQ ID NO: 2998245 - DNA, 25 bp, Homo sapien
gtggatgtggatgtcagtgtgtgtg

SEQ ID NO: 2998246 - DNA, 25 bp, Homo sapien
gtgtggatgtggatgtcagtgtgtg

SEQ ID NO: 2998247 - DNA, 25 bp, Homo sapien
tggatgtgagtgtgtatgtggatgt

SEQ ID NO: 2998248 - DNA, 25 bp, Homo sapien
atgtgagtgtgtatgtggatgtcag

SEQ ID NO: 2998249 - DNA, 25 bp, Homo sapien
acttggagcagacggggcagtggca

SEQ ID NO: 2998250 - DNA, 25 bp, Homo sapien
tcaatgcggttgtgtttgtgtgcgt

SEQ ID NO: 2998251 - DNA, 25 bp, Homo sapien
taggtgtgagcgtgtgtcaatgcgg

SEQ ID NO: 2998252 - DNA, 25 bp, Homo sapien
tgtttgtgtgcgtggatgtgagtgt

SEQ ID NO: 2998253 - DNA, 25 bp, Homo sapien
tcctgagggactccccgcctgcacg

SEQ ID NO: 2998254 - DNA, 25 bp, Homo sapien
ggaccaggtggaggaccgccacttc

SEQ ID NO: 2998255 - DNA, 25 bp, Homo sapien
agggacatggacagatctcgagggc

SEQ ID NO: 2998256 - DNA, 25 bp, Homo sapien
cgccacttctccagccaatctcggg

SEQ ID NO: 2998257 - DNA, 25 bp, Homo sapien
cagcatccggtaggaccagcgagga

SEQ ID NO: 2998258 - DNA, 25 bp, Homo sapien
actcataggcagcagaggtgtacgc

SEQ ID NO: 2998259 - DNA, 25 bp, Homo sapien
agcagaggtgtacgcagcatccggt

SEQ ID NO: 2998260 - DNA, 25 bp, Homo sapien
caatgtctgtccgtggcagcgatgt

SEQ ID NO: 2998261 - DNA, 25 bp, Homo sapien
caagaaaaaacagcccgaatgacat

SEQ ID NO: 2998262 - DNA, 25 bp, Homo sapien
aactttcacatgttcgtaataaaca

SEQ ID NO: 2998263 - DNA, 25 bp, Homo sapien
ggtcagatgtcaggtcacaaccgaa

SEQ ID NO: 2998264 - DNA, 25 bp, Homo sapien
catacgtcactggacaactttcaca

SEQ ID NO: 2998265 - DNA, 25 bp, Homo sapien
cgccaggtctattgtgatgggtcca

SEQ ID NO: 2998266 - DNA, 25 bp, Homo sapien
agaagcggccgccaggtctattgtg

SEQ ID NO: 2998267 - DNA, 25 bp, Homo sapien
agcggccgccaggtctattgtgatg

SEQ ID NO: 2998268 - DNA, 25 bp, Homo sapien
ctgagaagcggccgccaggtctatt

SEQ ID NO: 2998269 - DNA, 25 bp, Homo sapien
tgagcacttcagagcaaaaggaccc

SEQ ID NO: 2998270 - DNA, 25 bp, Homo sapien
agaccctgagtatttggcagaaacg

SEQ ID NO: 2998271 - DNA, 25 bp, Homo sapien
catcatgaaagctgcggagaacggt

SEQ ID NO: 2998272 - DNA, 25 bp, Homo sapien
gagccgcaggtacacccatctataa

SEQ ID NO: 2998273 - DNA, 25 bp, Homo sapien
ccccagagcagtacttgtatgtgat

SEQ ID NO: 2998274 - DNA, 25 bp, Homo sapien
gaagatgcgtagtgctgctcatggc

SEQ ID NO: 2998275 - DNA, 25 bp, Homo sapien
taattgacgtcccatttctgtgaag

SEQ ID NO: 2998276 - DNA, 25 bp, Homo sapien
acagagcgaacagtcacctgctgga

SEQ ID NO: 2998277 - DNA, 25 bp, Homo sapien
ggacgcatcaccagaatgagcctcg

SEQ ID NO: 2998278 - DNA, 25 bp, Homo sapien
taatgacccaaactttacaggccat

SEQ ID NO: 2998279 - DNA, 25 bp, Homo sapien
gggactggccttgtgcctgcaaact

SEQ ID NO: 2998280 - DNA, 25 bp, Homo sapien
ccgggctggctaatgacccaaactt

SEQ ID NO: 2998281 - DNA, 25 bp, Homo sapien
tgggctctcgctctgccggttccgt

SEQ ID NO: 2998282 - DNA, 25 bp, Homo sapien
ccacgtgtagatgcggctggtctca

SEQ ID NO: 2998283 - DNA, 25 bp, Homo sapien
gatatacttggggagccctttgtag

SEQ ID NO: 2998284 - DNA, 25 bp, Homo sapien
tcttcaggggcaagatatacttggg

SEQ ID NO: 2998285 - DNA, 25 bp, Homo sapien
tccttgcccagatgacgggaggcag

SEQ ID NO: 2998286 - DNA, 25 bp, Homo sapien
cccagatgacgggaggcaggacgcg

SEQ ID NO: 2998287 - DNA, 25 bp, Homo sapien
ctccttgcccagatgacgggaggca

SEQ ID NO: 2998288 - DNA, 25 bp, Homo sapien
gatgacgggaggcaggacgcggaga

SEQ ID NO: 2998289 - DNA, 25 bp, Homo sapien
tacacctgctttaaagacaagccca

SEQ ID NO: 2998290 - DNA, 25 bp, Homo sapien
ctacacctgctttaaagacaagccc

SEQ ID NO: 2998291 - DNA, 25 bp, Homo sapien
acacctgctttaaagacaagcccat

SEQ ID NO: 2998292 - DNA, 25 bp, Homo sapien
tctacacctgctttaaagacaagcc

SEQ ID NO: 2998293 - DNA, 25 bp, Homo sapien
aaactaggctaatgtagatgcaacc

SEQ ID NO: 2998294 - DNA, 25 bp, Homo sapien
taggccacctataacatcactgcac

SEQ ID NO: 2998295 - DNA, 25 bp, Homo sapien
cctgctgaccatggcggtgtgaatt

SEQ ID NO: 2998296 - DNA, 25 bp, Homo sapien
catcagagcagtcgttccgaactca

SEQ ID NO: 2998297 - DNA, 25 bp, Homo sapien
tttgtttccaatcctcgtcctcacg

SEQ ID NO: 2998298 - DNA, 25 bp, Homo sapien
tgtttccaatcctcgtcctcacggg

SEQ ID NO: 2998299 - DNA, 25 bp, Homo sapien
acatttgtttccaatcctcgtcctc

SEQ ID NO: 2998300 - DNA, 25 bp, Homo sapien
catttgtttccaatcctcgtcctca

SEQ ID NO: 2998301 - DNA, 25 bp, Homo sapien
gtggtttgctgtgataaggccggca

SEQ ID NO: 2998302 - DNA, 25 bp, Homo sapien
tgtgataaggccggcaaagcagcca

SEQ ID NO: 2998303 - DNA, 25 bp, Homo sapien
tgataaggccggcaaagcagccagc

SEQ ID NO: 2998304 - DNA, 25 bp, Homo sapien
gtttgctgtgataaggccggcaaag

SEQ ID NO: 2998305 - DNA, 25 bp, Homo sapien
tgtccggcagcagtaaacgctcctg

SEQ ID NO: 2998306 - DNA, 25 bp, Homo sapien
agtaaacgctcctggtaccgctgct

SEQ ID NO: 2998307 - DNA, 25 bp, Homo sapien
gcagtaaacgctcctggtaccgctg

SEQ ID NO: 2998308 - DNA, 25 bp, Homo sapien
ggcagcagtaaacgctcctggtacc

SEQ ID NO: 2998309 - DNA, 25 bp, Homo sapien
aggagcctgctatgttactgaccga

SEQ ID NO: 2998310 - DNA, 25 bp, Homo sapien
tgaccgaccacatgaacaaagaagg

SEQ ID NO: 2998311 - DNA, 25 bp, Homo sapien
gagaaccacgggaaaagacctgtga

SEQ ID NO: 2998312 - DNA, 25 bp, Homo sapien
ccttcaagggagactgcgttctgtc

SEQ ID NO: 2998313 - DNA, 25 bp, Homo sapien
ctcataaggacgctgagtttccctt

SEQ ID NO: 2998314 - DNA, 25 bp, Homo sapien
aacagaaggctccacacgatagatg

SEQ ID NO: 2998315 - DNA, 25 bp, Homo sapien
gaaagggaaaacacaggatcctgga

SEQ ID NO: 2998316 - DNA, 25 bp, Homo sapien
ggaagttcccggaaggcagcgctca

SEQ ID NO: 2998317 - DNA, 25 bp, Homo sapien
aaagccacgattttggccgcgtgcg

SEQ ID NO: 2998318 - DNA, 25 bp, Homo sapien
caaacgtgaggtgtactgaggtaac

SEQ ID NO: 2998319 - DNA, 25 bp, Homo sapien
tagcggacgcgatgctgctttccaa

SEQ ID NO: 2998320 - DNA, 25 bp, Homo sapien
tggacccacaccgatactgaacaag

SEQ ID NO: 2998321 - DNA, 25 bp, Homo sapien
gttgacagcaggattacccttcgga

SEQ ID NO: 2998322 - DNA, 25 bp, Homo sapien
tggatggggactcagaatccgcagc

SEQ ID NO: 2998323 - DNA, 25 bp, Homo sapien
acagcaggattacccttcggagccg

SEQ ID NO: 2998324 - DNA, 25 bp, Homo sapien
caggattacccttcggagccgcgag

SEQ ID NO: 2998325 - DNA, 25 bp, Homo sapien
tgcatggtggttttccgctgatcgg

SEQ ID NO: 2998326 - DNA, 25 bp, Homo sapien
gggactcagaatccgcaccgtgtgt

SEQ ID NO: 2998327 - DNA, 25 bp, Homo sapien
tcttctaagcgtggaggatgaccct

SEQ ID NO: 2998328 - DNA, 25 bp, Homo sapien
ttgtgaccacacaggaccaacgcag

SEQ ID NO: 2998329 - DNA, 25 bp, Homo sapien
caatgttcttgcagacgggaggccg

SEQ ID NO: 2998330 - DNA, 25 bp, Homo sapien
tgtgagtgttcacgcctcgcctttg

SEQ ID NO: 2998331 - DNA, 25 bp, Homo sapien
taagcatctcgtgtacagttctaag

SEQ ID NO: 2998332 - DNA, 25 bp, Homo sapien
aaagcacaagcaagcgatccaagcc

SEQ ID NO: 2998333 - DNA, 25 bp, Homo sapien
ggagaaccctgggacaggtcgccaa

SEQ ID NO: 2998334 - DNA, 25 bp, Homo sapien
tctcacgtcacctgtgatgaggaaa

SEQ ID NO: 2998335 - DNA, 25 bp, Homo sapien
aggaaaggtccctacaagctgctga

SEQ ID NO: 2998336 - DNA, 25 bp, Homo sapien
ggacaggtcgccaagcttcatctct

SEQ ID NO: 2998337 - DNA, 25 bp, Homo sapien
aggagagaaacagcatggagaaaca

SEQ ID NO: 2998338 - DNA, 25 bp, Homo sapien
cagatggcagcttgcggtgagcaca

SEQ ID NO: 2998339 - DNA, 25 bp, Homo sapien
caagtaacagcagaaccaggagaga

SEQ ID NO: 2998340 - DNA, 25 bp, Homo sapien
ccgatgatcctgaccttccgtaggc

SEQ ID NO: 2998341 - DNA, 25 bp, Homo sapien
ccaaccctcctgtcatccctgggag

SEQ ID NO: 2998342 - DNA, 25 bp, Homo sapien
gatacagcttccagaatctagccag

SEQ ID NO: 2998343 - DNA, 25 bp, Homo sapien
cattggggaaggagtatttcctgaa

SEQ ID NO: 2998344 - DNA, 25 bp, Homo sapien
ccagtccggcaatgtgagttgcatt

SEQ ID NO: 2998345 - DNA, 25 bp, Homo sapien
ttcctcttccatggacatgtgcatt

SEQ ID NO: 2998346 - DNA, 25 bp, Homo sapien
tcttccatggacatgtgcattgtca

SEQ ID NO: 2998347 - DNA, 25 bp, Homo sapien
ccatggacatgtgcattgtcaaagg

SEQ ID NO: 2998348 - DNA, 25 bp, Homo sapien
acatgtgcattgtcaaaggggtccc

SEQ ID NO: 2998349 - DNA, 25 bp, Homo sapien
ggaggcctcgatcccacatttggtg

SEQ ID NO: 2998350 - DNA, 25 bp, Homo sapien
gaggcctcgatcccacatttggtgc

SEQ ID NO: 2998351 - DNA, 25 bp, Homo sapien
ggcctcgatcccacatttggtgcag

SEQ ID NO: 2998352 - DNA, 25 bp, Homo sapien
aggcctcgatcccacatttggtgca

SEQ ID NO: 2998353 - DNA, 25 bp, Homo sapien
gcataggctgctgaacgaggcgatg

SEQ ID NO: 2998354 - DNA, 25 bp, Homo sapien
tgcataggctgctgaacgaggcgat

SEQ ID NO: 2998355 - DNA, 25 bp, Homo sapien
gccctgcataggctgctgaacgagg

SEQ ID NO: 2998356 - DNA, 25 bp, Homo sapien
cctgcataggctgctgaacgaggcg

SEQ ID NO: 2998357 - DNA, 25 bp, Homo sapien
ggtccaatcacgtccacattgagtg

SEQ ID NO: 2998358 - DNA, 25 bp, Homo sapien
aggcgtgaaggcactcgctcagcga

SEQ ID NO: 2998359 - DNA, 25 bp, Homo sapien
actcgctcagcgacacgaggcaggg

SEQ ID NO: 2998360 - DNA, 25 bp, Homo sapien
aagacaagctgcacggaggcgtgaa

SEQ ID NO: 2998361 - DNA, 25 bp, Homo sapien
gctcaaacgtcctgtacaaggaggc

SEQ ID NO: 2998362 - DNA, 25 bp, Homo sapien
aaaagggtgaaactgcgctcaaacg

SEQ ID NO: 2998363 - DNA, 25 bp, Homo sapien
cagagagggctgttcatgagcctca

SEQ ID NO: 2998364 - DNA, 25 bp, Homo sapien
tgagcctcactcgaccgaaaagggt

SEQ ID NO: 2998365 - DNA, 25 bp, Homo sapien
tggccaccaccggttgcaccttcac

SEQ ID NO: 2998366 - DNA, 25 bp, Homo sapien
acgagctcgtttccgccgatggctc

SEQ ID NO: 2998367 - DNA, 25 bp, Homo sapien
tcacgagctcgtttccgccgatggc

SEQ ID NO: 2998368 - DNA, 25 bp, Homo sapien
tcgtttccgccgatggctcgccatg

SEQ ID NO: 2998369 - DNA, 25 bp, Homo sapien
gggtgttttcgactttatgctgctg

SEQ ID NO: 2998370 - DNA, 25 bp, Homo sapien
tcgactttatgctgctggcagtagg

SEQ ID NO: 2998371 - DNA, 25 bp, Homo sapien
gaactgagggcctcggataccacgt

SEQ ID NO: 2998372 - DNA, 25 bp, Homo sapien
tgaactgagggcctcggataccacg

SEQ ID NO: 2998373 - DNA, 25 bp, Homo sapien
cgcgcttggcaacggccgctgagtg

SEQ ID NO: 2998374 - DNA, 25 bp, Homo sapien
tgctgccagaggctacactgaccag

SEQ ID NO: 2998375 - DNA, 25 bp, Homo sapien
gagtggatttgccaacgatgcttct

SEQ ID NO: 2998376 - DNA, 25 bp, Homo sapien
acactgaccagacccagggaagacg

SEQ ID NO: 2998377 - DNA, 25 bp, Homo sapien
ttagggtgggctccggggcgtctgc

SEQ ID NO: 2998378 - DNA, 25 bp, Homo sapien
gctccggggcgtctgcaccaccagg

SEQ ID NO: 2998379 - DNA, 25 bp, Homo sapien
cgtctgcaccaccaggcgcacagcc

SEQ ID NO: 2998380 - DNA, 25 bp, Homo sapien
caccaggcgcacagcccaggaggtg

SEQ ID NO: 2998381 - DNA, 25 bp, Homo sapien
aggtccatcccacggcaggtcctcc

SEQ ID NO: 2998382 - DNA, 25 bp, Homo sapien
gcaggtccatcccacggcaggtcct

SEQ ID NO: 2998383 - DNA, 25 bp, Homo sapien
acggcaggtccatcccgcggcaggt

SEQ ID NO: 2998384 - DNA, 25 bp, Homo sapien
caggtcctccccacggcaggtccat

SEQ ID NO: 2998385 - DNA, 25 bp, Homo sapien
gatgttccaagatgccgtgcggtgt

SEQ ID NO: 2998386 - DNA, 25 bp, Homo sapien
tttcaccgcacacccatttgggagg

SEQ ID NO: 2998387 - DNA, 25 bp, Homo sapien
gatgttccgcttgccagactctgag

SEQ ID NO: 2998388 - DNA, 25 bp, Homo sapien
caatggacgggcactgaggattagc

SEQ ID NO: 2998389 - DNA, 25 bp, Homo sapien
ggagaatacttctcagaggttagca

SEQ ID NO: 2998390 - DNA, 25 bp, Homo sapien
tgaacatccaggtgaggtcctcggc

SEQ ID NO: 2998391 - DNA, 25 bp, Homo sapien
gagcagctctctgtaaactggatgg

SEQ ID NO: 2998392 - DNA, 25 bp, Homo sapien
caaagggcacctggttaaactgcag

SEQ ID NO: 2998393 - DNA, 25 bp, Homo sapien
gccctggactgtcccaggggaagtg

SEQ ID NO: 2998394 - DNA, 25 bp, Homo sapien
ctaaccgttgcacagccacaccagc

SEQ ID NO: 2998395 - DNA, 25 bp, Homo sapien
agccacaccagcagcggcctctgca

SEQ ID NO: 2998396 - DNA, 25 bp, Homo sapien
ggccaggatctgtgcctcttcatgg

SEQ ID NO: 2998397 - DNA, 25 bp, Homo sapien
ctggaatatttaccacaggccaggc

SEQ ID NO: 2998398 - DNA, 25 bp, Homo sapien
gccaggctctgtgcctctccacagg

SEQ ID NO: 2998399 - DNA, 25 bp, Homo sapien
gaatatttaccacaggccaggctct

SEQ ID NO: 2998400 - DNA, 25 bp, Homo sapien
aggctctgtgcctctccacaggccc

SEQ ID NO: 2998401 - DNA, 25 bp, Homo sapien
gcaggagtcactgcccgagtcctgc

SEQ ID NO: 2998402 - DNA, 25 bp, Homo sapien
ctggaatattcacagcagctgtggg

SEQ ID NO: 2998403 - DNA, 25 bp, Homo sapien
gaggaggaagcacactgccagctcc

SEQ ID NO: 2998404 - DNA, 25 bp, Homo sapien
tgcccgagtcctgcaagttggccat

SEQ ID NO: 2998405 - DNA, 25 bp, Homo sapien
ctctgtgccccacctccactgacat

SEQ ID NO: 2998406 - DNA, 25 bp, Homo sapien
ccaagtctctgtgccccacctccac

SEQ ID NO: 2998407 - DNA, 25 bp, Homo sapien
gtctctgtgccccacctccactgac

SEQ ID NO: 2998408 - DNA, 25 bp, Homo sapien
tcccaagtctctgtgccccacctcc

SEQ ID NO: 2998409 - DNA, 25 bp, Homo sapien
gctccacctccattgacctgtagtc

SEQ ID NO: 2998410 - DNA, 25 bp, Homo sapien
tccattgacctgtagtctctgtgac

SEQ ID NO: 2998411 - DNA, 25 bp, Homo sapien
tgactccacctccattgacctgtag

SEQ ID NO: 2998412 - DNA, 25 bp, Homo sapien
cactgacctgtagtctctgtgctcc

SEQ ID NO: 2998413 - DNA, 25 bp, Homo sapien
tccattgacctgtagtccctgtgcc

SEQ ID NO: 2998414 - DNA, 25 bp, Homo sapien
gctccacctccattgacctgtagtc

SEQ ID NO: 2998415 - DNA, 25 bp, Homo sapien
acctccattgacctgtagtctctgt

SEQ ID NO: 2998416 - DNA, 25 bp, Homo sapien
cattgacctgtagtctctgtgctcc

SEQ ID NO: 2998417 - DNA, 25 bp, Homo sapien
tccattgacctgtagtccctgtgcc

SEQ ID NO: 2998418 - DNA, 25 bp, Homo sapien
tgactccacctccattgacctgtag

SEQ ID NO: 2998419 - DNA, 25 bp, Homo sapien
cctccattgacctgtagtccctgtg

SEQ ID NO: 2998420 - DNA, 25 bp, Homo sapien
cattgacctgtagtccctgtgactc

SEQ ID NO: 2998421 - DNA, 25 bp, Homo sapien
agtccctgtgctccacctccactga

SEQ ID NO: 2998422 - DNA, 25 bp, Homo sapien
gtagtccctgtgctccacctccact

SEQ ID NO: 2998423 - DNA, 25 bp, Homo sapien
ctccacctccactgacctgtagtcc

SEQ ID NO: 2998424 - DNA, 25 bp, Homo sapien
ctgtagtccctgtgctccacctcca

SEQ ID NO: 2998425 - DNA, 25 bp, Homo sapien
ccccacctccattgacctgtagtcc

SEQ ID NO: 2998426 - DNA, 25 bp, Homo sapien
acctccattgacctgtagtccctgt

SEQ ID NO: 2998427 - DNA, 25 bp, Homo sapien
cattgacctgtagtccctgtgactc

SEQ ID NO: 2998428 - DNA, 25 bp, Homo sapien
tccattgacctgtagtccctgtgac

SEQ ID NO: 2998429 - DNA, 25 bp, Homo sapien
attgacctgtagtctctctgcaccc

SEQ ID NO: 2998430 - DNA, 25 bp, Homo sapien
gctccacctccattgacctgtagtc

SEQ ID NO: 2998431 - DNA, 25 bp, Homo sapien
cctccattgacctgtagtccctgtg

SEQ ID NO: 2998432 - DNA, 25 bp, Homo sapien
cacctccattgacctgtagtccctg

SEQ ID NO: 2998433 - DNA, 25 bp, Homo sapien
tccattgacctgtagtccctgtgct

SEQ ID NO: 2998434 - DNA, 25 bp, Homo sapien
cattgacctgtagtctctgtgctcc

SEQ ID NO: 2998435 - DNA, 25 bp, Homo sapien
tgtgctccacctccagtgacctgta

SEQ ID NO: 2998436 - DNA, 25 bp, Homo sapien
tgacctgtagtctctgtgccccacc

SEQ ID NO: 2998437 - DNA, 25 bp, Homo sapien
cactgacctgtagtctctgtgctcc

SEQ ID NO: 2998438 - DNA, 25 bp, Homo sapien
gccccacctccattgacctgtagtc

SEQ ID NO: 2998439 - DNA, 25 bp, Homo sapien
ctccattgacctgtagtctctgtgc

SEQ ID NO: 2998440 - DNA, 25 bp, Homo sapien
acctccattgacctgtagtctctgt

SEQ ID NO: 2998441 - DNA, 25 bp, Homo sapien
ccacctccattgacctgtagtctct

SEQ ID NO: 2998442 - DNA, 25 bp, Homo sapien
gctccacctccattgacctgtagtc

SEQ ID NO: 2998443 - DNA, 25 bp, Homo sapien
cactgacctgtagtctctgtgctcc

SEQ ID NO: 2998444 - DNA, 25 bp, Homo sapien
tccattgacctgtagtccctgtgct

SEQ ID NO: 2998445 - DNA, 25 bp, Homo sapien
tccactgacctgtagtctctgtgct

SEQ ID NO: 2998446 - DNA, 25 bp, Homo sapien
cattgacctgtagtctctgtgctcc

SEQ ID NO: 2998447 - DNA, 25 bp, Homo sapien
tgtgctccacctccagtgacctgta

SEQ ID NO: 2998448 - DNA, 25 bp, Homo sapien
tgacctgtagtctctgtgccccacc

SEQ ID NO: 2998449 - DNA, 25 bp, Homo sapien
cactgacctgtagtctctgtgctcc

SEQ ID NO: 2998450 - DNA, 25 bp, Homo sapien
tccattgacctgtagtccctgtgcc

SEQ ID NO: 2998451 - DNA, 25 bp, Homo sapien
cctccattgacctgtagtccctgtg

SEQ ID NO: 2998452 - DNA, 25 bp, Homo sapien
ctccattgacctgtagtccctgtgc

SEQ ID NO: 2998453 - DNA, 25 bp, Homo sapien
cacctccattgacctgtagtccctg

SEQ ID NO: 2998454 - DNA, 25 bp, Homo sapien
aggatgcaaagccacagcgcagcgg

SEQ ID NO: 2998455 - DNA, 25 bp, Homo sapien
ataccacatgcccaacgcagacata

SEQ ID NO: 2998456 - DNA, 25 bp, Homo sapien
gacatacacactcctgggagccagg

SEQ ID NO: 2998457 - DNA, 25 bp, Homo sapien
cttcttgccaagatgcagaggatac

SEQ ID NO: 2998458 - DNA, 25 bp, Homo sapien
atcacattccgcctcatggtctcca

SEQ ID NO: 2998459 - DNA, 25 bp, Homo sapien
gggacaggccgttccccatcacatt

SEQ ID NO: 2998460 - DNA, 25 bp, Homo sapien
tccccgcagagcagacactgggaca

SEQ ID NO: 2998461 - DNA, 25 bp, Homo sapien
cagtctttgcagaacaccgacgagc

SEQ ID NO: 2998462 - DNA, 25 bp, Homo sapien
tccgtctggtaggtgtgcacggacc

SEQ ID NO: 2998463 - DNA, 25 bp, Homo sapien
tgctccaggacgtcgagccgctctg

SEQ ID NO: 2998464 - DNA, 25 bp, Homo sapien
ccaggacgtcgagccgctctgccct

SEQ ID NO: 2998465 - DNA, 25 bp, Homo sapien
ctcctctgcttctccgtctggtagg

SEQ ID NO: 2998466 - DNA, 25 bp, Homo sapien
tctcagaggaaacgaggtgcggaac

SEQ ID NO: 2998467 - DNA, 25 bp, Homo sapien
agaccctcagagtcgccctgtaagg

SEQ ID NO: 2998468 - DNA, 25 bp, Homo sapien
tagctagcaggaatctcgggttggc

SEQ ID NO: 2998469 - DNA, 25 bp, Homo sapien
cgagttcgtatccagcagctgctga

SEQ ID NO: 2998470 - DNA, 25 bp, Homo sapien
taagggacttgcagtcctacagctc

SEQ ID NO: 2998471 - DNA, 25 bp, Homo sapien
cacgaggtggtgtgggtcccttaca

SEQ ID NO: 2998472 - DNA, 25 bp, Homo sapien
gggcatccagagatcaaaatctccc

SEQ ID NO: 2998473 - DNA, 25 bp, Homo sapien
tacagcctgttgatagaaaggacac

SEQ ID NO: 2998474 - DNA, 25 bp, Homo sapien
tcgaagggcaagctgccggtcattg

SEQ ID NO: 2998475 - DNA, 25 bp, Homo sapien
cgctgccgaagatggtgtcggccat

SEQ ID NO: 2998476 - DNA, 25 bp, Homo sapien
gctcgaagggcaagctgccggtcat

SEQ ID NO: 2998477 - DNA, 25 bp, Homo sapien
gggcaaacccactgatcattcccgc

SEQ ID NO: 2998478 - DNA, 25 bp, Homo sapien
aagtctgtggctgaccacgttcaca

SEQ ID NO: 2998479 - DNA, 25 bp, Homo sapien
ggcagcgccagggcaggttcatcac

SEQ ID NO: 2998480 - DNA, 25 bp, Homo sapien
ttcatcactgatggcaagtctgtgg

SEQ ID NO: 2998481 - DNA, 25 bp, Homo sapien
acggaaggatgtcgcctccagagct

SEQ ID NO: 2998482 - DNA, 25 bp, Homo sapien
taaaagcagggtcctgaaaactcca

SEQ ID NO: 2998483 - DNA, 25 bp, Homo sapien
cagggtcctgaaaactccagagagc

SEQ ID NO: 2998484 - DNA, 25 bp, Homo sapien
tgcattaaacacagactgcgccctt

SEQ ID NO: 2998485 - DNA, 25 bp, Homo sapien
ccttgtactcaggtatgaccatttg

SEQ ID NO: 2998486 - DNA, 25 bp, Homo sapien
taaccaggctctgcgacttgctgac

SEQ ID NO: 2998487 - DNA, 25 bp, Homo sapien
cagacagctggactctaaccaggct

SEQ ID NO: 2998488 - DNA, 25 bp, Homo sapien
tcaactgtatttcatcagagagatg

SEQ ID NO: 2998489 - DNA, 25 bp, Homo sapien
tcacaggccgtttgtccctcaagat

SEQ ID NO: 2998490 - DNA, 25 bp, Homo sapien
ccagcaggcagatgttccggaaccc

SEQ ID NO: 2998491 - DNA, 25 bp, Homo sapien
gacggctgagctcgctccttgctga

SEQ ID NO: 2998492 - DNA, 25 bp, Homo sapien
tacagggaacggaacaggagttgcc

SEQ ID NO: 2998493 - DNA, 25 bp, Homo sapien
cgccgggcgacacacgctgagcaga

SEQ ID NO: 2998494 - DNA, 25 bp, Homo sapien
ctaggggacagaggctcatcagccc

SEQ ID NO: 2998495 - DNA, 25 bp, Homo sapien
tcttccaggaggatgcaattctctc

SEQ ID NO: 2998496 - DNA, 25 bp, Homo sapien
tctctctctaaagtcgagagctcac

SEQ ID NO: 2998497 - DNA, 25 bp, Homo sapien
ggcaacttcctgagacagatcggta

SEQ ID NO: 2998498 - DNA, 25 bp, Homo sapien
ccccgggcgttcgtcactgcagaca

SEQ ID NO: 2998499 - DNA, 25 bp, Homo sapien
cgggcgttcgtcactgcagacatca

SEQ ID NO: 2998500 - DNA, 25 bp, Homo sapien
caccccgggcgttcgtcactgcaga

SEQ ID NO: 2998501 - DNA, 25 bp, Homo sapien
ccgggcgttcgtcactgcagacatc

SEQ ID NO: 2998502 - DNA, 25 bp, Homo sapien
ccgggcgttcgtcactgcagacatc

SEQ ID NO: 2998503 - DNA, 25 bp, Homo sapien
ccccgggcgttcgtcactgcagaca

SEQ ID NO: 2998504 - DNA, 25 bp, Homo sapien
caccccgggcgttcgtcactgcaga

SEQ ID NO: 2998505 - DNA, 25 bp, Homo sapien
cgggcgttcgtcactgcagacatca

SEQ ID NO: 2998506 - DNA, 25 bp, Homo sapien
caccccgggcgttcgtcactgcaga

SEQ ID NO: 2998507 - DNA, 25 bp, Homo sapien
cccgggcgttcgtcactgcagacat

SEQ ID NO: 2998508 - DNA, 25 bp, Homo sapien
cgggcgttcgtcactgcagacatca

SEQ ID NO: 2998509 - DNA, 25 bp, Homo sapien
gcgttcgtcactgcagacatcactg

SEQ ID NO: 2998510 - DNA, 25 bp, Homo sapien
tatgcagcctcacgtggtcactcct

SEQ ID NO: 2998511 - DNA, 25 bp, Homo sapien
cactcctgggggcggtaggatattt

SEQ ID NO: 2998512 - DNA, 25 bp, Homo sapien
cgtggtcactcctgggggcggtagg

SEQ ID NO: 2998513 - DNA, 25 bp, Homo sapien
gcagcctcacgtggtcactcctggg

SEQ ID NO: 2998514 - DNA, 25 bp, Homo sapien
tcttggtagcctaatctgcggatct

SEQ ID NO: 2998515 - DNA, 25 bp, Homo sapien
ttttccatagtcaggttcacagcca

SEQ ID NO: 2998516 - DNA, 25 bp, Homo sapien
tagatggtttcaataaggcagacga

SEQ ID NO: 2998517 - DNA, 25 bp, Homo sapien
tccaaagtgcacgtacaagtgtcca

SEQ ID NO: 2998518 - DNA, 25 bp, Homo sapien
cccacggtgagcgtgggcagcatac

SEQ ID NO: 2998519 - DNA, 25 bp, Homo sapien
ccagccacagggtccgacccacggt

SEQ ID NO: 2998520 - DNA, 25 bp, Homo sapien
cacagggtccgacccacggtgagcg

SEQ ID NO: 2998521 - DNA, 25 bp, Homo sapien
gacccacggtgagcgtgggcagcat

SEQ ID NO: 2998522 - DNA, 25 bp, Homo sapien
gggacgcattcccaagagcacagcc

SEQ ID NO: 2998523 - DNA, 25 bp, Homo sapien
ctcctgagaccagcagatatgcttg

SEQ ID NO: 2998524 - DNA, 25 bp, Homo sapien
tatgagggtgcaggtgtccgggtga

SEQ ID NO: 2998525 - DNA, 25 bp, Homo sapien
acccccgagcgactgtgacaaaggg

SEQ ID NO: 2998526 - DNA, 25 bp, Homo sapien
acgccagttggtgtcggccacagag

SEQ ID NO: 2998527 - DNA, 25 bp, Homo sapien
ccagcgctgcaggacgccagttggt

SEQ ID NO: 2998528 - DNA, 25 bp, Homo sapien
tctgagccgctgcatcacgatgctt

SEQ ID NO: 2998529 - DNA, 25 bp, Homo sapien
tagaatgaaatgcacggcccggcca

SEQ ID NO: 2998530 - DNA, 25 bp, Homo sapien
tgctaaatctgagctggcgcccaga

SEQ ID NO: 2998531 - DNA, 25 bp, Homo sapien
ctccgtaggaaagcatgctgtgatc

SEQ ID NO: 2998532 - DNA, 25 bp, Homo sapien
gctgcagagtgtgccatcccactgg

SEQ ID NO: 2998533 - DNA, 25 bp, Homo sapien
gagaacggctgcacatttgctgctg

SEQ ID NO: 2998534 - DNA, 25 bp, Homo sapien
ccgcttggaaaaggcccagtcctca

SEQ ID NO: 2998535 - DNA, 25 bp, Homo sapien
cctcaggtgtgctgagggcggtgct

SEQ ID NO: 2998536 - DNA, 25 bp, Homo sapien
caggtgtgctgagggcggtgctcca

SEQ ID NO: 2998537 - DNA, 25 bp, Homo sapien
cggggggcagcgtcccacacccctg

SEQ ID NO: 2998538 - DNA, 25 bp, Homo sapien
ttgcttacagccagcagccaaggcc

SEQ ID NO: 2998539 - DNA, 25 bp, Homo sapien
tttgcttacagccagcagccaaggc

SEQ ID NO: 2998540 - DNA, 25 bp, Homo sapien
ggtttgcttacagccagcagccaag

SEQ ID NO: 2998541 - DNA, 25 bp, Homo sapien
agggtttgcttacagccagcagcca

SEQ ID NO: 2998542 - DNA, 25 bp, Homo sapien
gaagggtcacctccattgtgctggc

SEQ ID NO: 2998543 - DNA, 25 bp, Homo sapien
tcatcaatgcggaagaatcttgcca

SEQ ID NO: 2998544 - DNA, 25 bp, Homo sapien
tgcacagtgcacgagatgaatccaa

SEQ ID NO: 2998545 - DNA, 25 bp, Homo sapien
tgttaatctctggaaggtgcacggg

SEQ ID NO: 2998546 - DNA, 25 bp, Homo sapien
tcgcctgggcaggttagtgactgcc

SEQ ID NO: 2998547 - DNA, 25 bp, Homo sapien
tcagagaactagggtaattgggcag

SEQ ID NO: 2998548 - DNA, 25 bp, Homo sapien
agctcgctggcaccaacttgggcag

SEQ ID NO: 2998549 - DNA, 25 bp, Homo sapien
aactccgaagctgtagaaacagcca

SEQ ID NO: 2998550 - DNA, 25 bp, Homo sapien
ccccggaagttagcaaagttctgtg

SEQ ID NO: 2998551 - DNA, 25 bp, Homo sapien
aacagaggcatcttccaatgtcctt

SEQ ID NO: 2998552 - DNA, 25 bp, Homo sapien
gaaaacccctgcatgaactgggccc

SEQ ID NO: 2998553 - DNA, 25 bp, Homo sapien
ttggagccatgagaccccgaaacac

SEQ ID NO: 2998554 - DNA, 25 bp, Homo sapien
aaacagcccttacaggcagcagtgg

SEQ ID NO: 2998555 - DNA, 25 bp, Homo sapien
caaggcctggattctcctcgtggat

SEQ ID NO: 2998556 - DNA, 25 bp, Homo sapien
aactgaacagatttgggacgcttcc

SEQ ID NO: 2998557 - DNA, 25 bp, Homo sapien
tgacccgaggtgttccagatgagga

SEQ ID NO: 2998558 - DNA, 25 bp, Homo sapien
gattacaagcgtgtgttgccacacc

SEQ ID NO: 2998559 - DNA, 25 bp, Homo sapien
ttacaagcgtgtgttgccacacctg

SEQ ID NO: 2998560 - DNA, 25 bp, Homo sapien
aggattacaagcgtgtgttgccaca

SEQ ID NO: 2998561 - DNA, 25 bp, Homo sapien
acaagcgtgtgttgccacacctggc

SEQ ID NO: 2998562 - DNA, 25 bp, Homo sapien
aggcctgagggtgggaatgcctcca

SEQ ID NO: 2998563 - DNA, 25 bp, Homo sapien
cagagagaaggggaacaagcttccc

SEQ ID NO: 2998564 - DNA, 25 bp, Homo sapien
gggatgtgagatcagccgacagctg

SEQ ID NO: 2998565 - DNA, 25 bp, Homo sapien
tccattgagtgcttgcagggcgccc

SEQ ID NO: 2998566 - DNA, 25 bp, Homo sapien
gaaccaggagagaggcatgcccaga

SEQ ID NO: 2998567 - DNA, 25 bp, Homo sapien
gagaggcatgcccagaagtgacggc

SEQ ID NO: 2998568 - DNA, 25 bp, Homo sapien
aaccaggagagaggcatgcccagaa

SEQ ID NO: 2998569 - DNA, 25 bp, Homo sapien
aggcatgcccagaagtgacggcggg

SEQ ID NO: 2998570 - DNA, 25 bp, Homo sapien
ggagagcgaccgaggcaccacagaa

SEQ ID NO: 2998571 - DNA, 25 bp, Homo sapien
tgggtttagaagtttcagcaaagtg

SEQ ID NO: 2998572 - DNA, 25 bp, Homo sapien
ttagaagtttcagcaaagtggccac

SEQ ID NO: 2998573 - DNA, 25 bp, Homo sapien
acagaagaggcgtgtttggaaacaa

SEQ ID NO: 2998574 - DNA, 25 bp, Homo sapien
cagagccgtcgtcccgagcagtgag

SEQ ID NO: 2998575 - DNA, 25 bp, Homo sapien
ccggaatctccgtggctctgatctc

SEQ ID NO: 2998576 - DNA, 25 bp, Homo sapien
caaaggtgcgcgctgcacagatgta

SEQ ID NO: 2998577 - DNA, 25 bp, Homo sapien
cacagatgtagggtgacagtgacca

SEQ ID NO: 2998578 - DNA, 25 bp, Homo sapien
gacagagtggaaagctggaatcagc

SEQ ID NO: 2998579 - DNA, 25 bp, Homo sapien
ggacagagtggaaagctggaatcag

SEQ ID NO: 2998580 - DNA, 25 bp, Homo sapien
tcgatgactcggaaggacactggtg

SEQ ID NO: 2998581 - DNA, 25 bp, Homo sapien
cagtggtgacgctcgatgactcgga

SEQ ID NO: 2998582 - DNA, 25 bp, Homo sapien
cagtggtgacgttcgatgactcgga

SEQ ID NO: 2998583 - DNA, 25 bp, Homo sapien
acagtggtgacgctcgatgactcgg

SEQ ID NO: 2998584 - DNA, 25 bp, Homo sapien
gtgccagaactacaactgtagtggg

SEQ ID NO: 2998585 - DNA, 25 bp, Homo sapien
ggtgccagaactacaactgtagtgg

SEQ ID NO: 2998586 - DNA, 25 bp, Homo sapien
tgatggcacgatggtgccagaacta

SEQ ID NO: 2998587 - DNA, 25 bp, Homo sapien
tggcacgatggtgccagaactacaa

SEQ ID NO: 2998588 - DNA, 25 bp, Homo sapien
aatgcaaaccccagagagaccgatg

SEQ ID NO: 2998589 - DNA, 25 bp, Homo sapien
cccagagagaccgatggtagctgat

SEQ ID NO: 2998590 - DNA, 25 bp, Homo sapien
ccagagagaccgatggtagctgatc

SEQ ID NO: 2998591 - DNA, 25 bp, Homo sapien
agagagaccgatggtagctgatcat

SEQ ID NO: 2998592 - DNA, 25 bp, Homo sapien
gaaatagagaaccttgcgaatcgga

SEQ ID NO: 2998593 - DNA, 25 bp, Homo sapien
gaatcggatcaacgaaagtctgcgt

SEQ ID NO: 2998594 - DNA, 25 bp, Homo sapien
gatggaattcttgctgacccggagg

SEQ ID NO: 2998595 - DNA, 25 bp, Homo sapien
taagtccttgcaaagagcgtggccc

SEQ ID NO: 2998596 - DNA, 25 bp, Homo sapien
cctacctctcggacaaagatggcag

SEQ ID NO: 2998597 - DNA, 25 bp, Homo sapien
tttgtgcagtgaagacacccgtggc

SEQ ID NO: 2998598 - DNA, 25 bp, Homo sapien
tacaaagaactacgactggctccct

SEQ ID NO: 2998599 - DNA, 25 bp, Homo sapien
cagttcagctttcggcgcagatgga

SEQ ID NO: 2998600 - DNA, 25 bp, Homo sapien
ccaagggttcgaggcgtttctcaga

SEQ ID NO: 2998601 - DNA, 25 bp, Homo sapien
gatgaagtgcctctcggagtcgtac

SEQ ID NO: 2998602 - DNA, 25 bp, Homo sapien
gcacctcggccttgtagttgcgcca

SEQ ID NO: 2998603 - DNA, 25 bp, Homo sapien
agaaacctcctcagcgtcttgcggc

SEQ ID NO: 2998604 - DNA, 25 bp, Homo sapien
ggcagctgcacgtcgtcgatgaagt

SEQ ID NO: 2998605 - DNA, 25 bp, Homo sapien
ctcccaactgatgaacctcgtcttt

SEQ ID NO: 2998606 - DNA, 25 bp, Homo sapien
gggacaaagcctcagcgcacagccg

SEQ ID NO: 2998607 - DNA, 25 bp, Homo sapien
aaagcctcagcgcacagccgggagc

SEQ ID NO: 2998608 - DNA, 25 bp, Homo sapien
aggacaggggacaaagcctcagcgc

SEQ ID NO: 2998609 - DNA, 25 bp, Homo sapien
acaggggacaaagcctcagcgcaca

SEQ ID NO: 2998610 - DNA, 25 bp, Homo sapien
gataccatctgcacctgagcgcagt

SEQ ID NO: 2998611 - DNA, 25 bp, Homo sapien
cattgatgtcctgagagaaccaaga

SEQ ID NO: 2998612 - DNA, 25 bp, Homo sapien
gatagcacggattccaagacttttg

SEQ ID NO: 2998613 - DNA, 25 bp, Homo sapien
tgtgacttcgctacctatccaaagg

SEQ ID NO: 2998614 - DNA, 25 bp, Homo sapien
taaatgtacacctcctttaatctga

SEQ ID NO: 2998615 - DNA, 25 bp, Homo sapien
aatgtgagtacaagcaagcaaagac

SEQ ID NO: 2998616 - DNA, 25 bp, Homo sapien
cagatgatgtgagtctaatgccaaa

SEQ ID NO: 2998617 - DNA, 25 bp, Homo sapien
tgtaaccattttaggataatgtcct

SEQ ID NO: 2998618 - DNA, 25 bp, Homo sapien
gacccctcactaggtacatatcgaa

SEQ ID NO: 2998619 - DNA, 25 bp, Homo sapien
tctctattctgtgcaacccagaagt

SEQ ID NO: 2998620 - DNA, 25 bp, Homo sapien
tacaaaaggcatggatgttggaatg

SEQ ID NO: 2998621 - DNA, 25 bp, Homo sapien
gaagagcctctaccattgcaagaag

SEQ ID NO: 2998622 - DNA, 25 bp, Homo sapien
cctcaccagtcacatatcaaatcct

SEQ ID NO: 2998623 - DNA, 25 bp, Homo sapien
ctcaccagtcacatatcaaatcctg

SEQ ID NO: 2998624 - DNA, 25 bp, Homo sapien
cccttactagtcacatatcaaatcc

SEQ ID NO: 2998625 - DNA, 25 bp, Homo sapien
tactagtcacatatcaaatcctggc

SEQ ID NO: 2998626 - DNA, 25 bp, Homo sapien
cagagcaagtgcatatagcccggtc

SEQ ID NO: 2998627 - DNA, 25 bp, Homo sapien
cacagggcaagtagggttccaagtc

SEQ ID NO: 2998628 - DNA, 25 bp, Homo sapien
gagaaatcacttggccgtcactgga

SEQ ID NO: 2998629 - DNA, 25 bp, Homo sapien
caaagaccagatatgcggagctcgc

SEQ ID NO: 2998630 - DNA, 25 bp, Homo sapien
acttcgagggtccaagaggctattc

SEQ ID NO: 2998631 - DNA, 25 bp, Homo sapien
tgtaggccagcatttcaggtgtcca

SEQ ID NO: 2998632 - DNA, 25 bp, Homo sapien
tatctcccaaaggtgtagaacttcg

SEQ ID NO: 2998633 - DNA, 25 bp, Homo sapien
tcatcgtacccttcatgtaggccag

SEQ ID NO: 2998634 - DNA, 25 bp, Homo sapien
cccatttccagcaggttattccgag

SEQ ID NO: 2998635 - DNA, 25 bp, Homo sapien
ccatttccagcaggttattccgagt

SEQ ID NO: 2998636 - DNA, 25 bp, Homo sapien
tattccgagtgctcttcctagcgaa

SEQ ID NO: 2998637 - DNA, 25 bp, Homo sapien
tccgagtgctcttcctagcgaagga

SEQ ID NO: 2998638 - DNA, 25 bp, Homo sapien
taagagcagagtgaactctttattg

SEQ ID NO: 2998639 - DNA, 25 bp, Homo sapien
tgctttcatccacaggtactccttt

SEQ ID NO: 2998640 - DNA, 25 bp, Homo sapien
taaaggggctacagaaaatggactg

SEQ ID NO: 2998641 - DNA, 25 bp, Homo sapien
gggcacaatatctaggtctagctga

SEQ ID NO: 2998642 - DNA, 25 bp, Homo sapien
gtatgaaaatgcgtggcaggagccc

SEQ ID NO: 2998643 - DNA, 25 bp, Homo sapien
ccagctcaagtgtagtgtcggcgca

SEQ ID NO: 2998644 - DNA, 25 bp, Homo sapien
cttactgactcaaaatctccgggca

SEQ ID NO: 2998645 - DNA, 25 bp, Homo sapien
tcatcagtatggagagagcccaatc

SEQ ID NO: 2998646 - DNA, 25 bp, Homo sapien
agtggttctgatgcacacccccaga

SEQ ID NO: 2998647 - DNA, 25 bp, Homo sapien
gaaacacagcgtctctacacagtac

SEQ ID NO: 2998648 - DNA, 25 bp, Homo sapien
gtactgagtccccatcaaggagaca

SEQ ID NO: 2998649 - DNA, 25 bp, Homo sapien
cgcccggccggcatctgtagatttt

SEQ ID NO: 2998650 - DNA, 25 bp, Homo sapien
cctggaagccgatgaagaaatgaca

SEQ ID NO: 2998651 - DNA, 25 bp, Homo sapien
tgagagtcaaaccagctagcaagga

SEQ ID NO: 2998652 - DNA, 25 bp, Homo sapien
taatagacctcaactgaaggccgca

SEQ ID NO: 2998653 - DNA, 25 bp, Homo sapien
caaacgccaggagtgacaagaacca

SEQ ID NO: 2998654 - DNA, 25 bp, Homo sapien
gcaatctgcccacctcagcctccct

SEQ ID NO: 2998655 - DNA, 25 bp, Homo sapien
ttttggttttgccaggttgcccaga

SEQ ID NO: 2998656 - DNA, 25 bp, Homo sapien
actggtctcaaactcctgagctcaa

SEQ ID NO: 2998657 - DNA, 25 bp, Homo sapien
ctccctagcagttgggactacaggt

SEQ ID NO: 2998658 - DNA, 25 bp, Homo sapien
tcgggagcagtctcttcggcaagcc

SEQ ID NO: 2998659 - DNA, 25 bp, Homo sapien
gccattctctggatgcaggatgaca

SEQ ID NO: 2998660 - DNA, 25 bp, Homo sapien
gagtatggacttcctgggcgttccc

SEQ ID NO: 2998661 - DNA, 25 bp, Homo sapien
tcaagggaaccgagtgaatcagggt

SEQ ID NO: 2998662 - DNA, 25 bp, Homo sapien
cctcttagagcccagcccttactca

SEQ ID NO: 2998663 - DNA, 25 bp, Homo sapien
gccctcttagagcccagcccttact

SEQ ID NO: 2998664 - DNA, 25 bp, Homo sapien
tcttagagcccagcccttactcagc

SEQ ID NO: 2998665 - DNA, 25 bp, Homo sapien
ttagagcccagcccttactcagcgt

SEQ ID NO: 2998666 - DNA, 25 bp, Homo sapien
agagactcagtaacaacccacatgt

SEQ ID NO: 2998667 - DNA, 25 bp, Homo sapien
tgggagagactcagtaacaacccac

SEQ ID NO: 2998668 - DNA, 25 bp, Homo sapien
catgggagagactcagtaacaaccc

SEQ ID NO: 2998669 - DNA, 25 bp, Homo sapien
ggagagactcagtaacaacccacat

SEQ ID NO: 2998670 - DNA, 25 bp, Homo sapien
tctggggaacgggcgctgagggtct

SEQ ID NO: 2998671 - DNA, 25 bp, Homo sapien
ctggggaacgggcgctgagggtctc

SEQ ID NO: 2998672 - DNA, 25 bp, Homo sapien
ggggaacgggcgctgagggtctcca

SEQ ID NO: 2998673 - DNA, 25 bp, Homo sapien
tggggaacgggcgctgagggtctcc

SEQ ID NO: 2998674 - DNA, 25 bp, Homo sapien
tggcgcaggagttccagcatgctgc

SEQ ID NO: 2998675 - DNA, 25 bp, Homo sapien
tcgagcttgcggatgcgtgacgact

SEQ ID NO: 2998676 - DNA, 25 bp, Homo sapien
gacagtgagccggagctttctgccc

SEQ ID NO: 2998677 - DNA, 25 bp, Homo sapien
tgcgtgacgactcttgctctggtgt

SEQ ID NO: 2998678 - DNA, 25 bp, Homo sapien
tctggagacagcatagttactccag

SEQ ID NO: 2998679 - DNA, 25 bp, Homo sapien
cccacgggggacagcgcagtatctg

SEQ ID NO: 2998680 - DNA, 25 bp, Homo sapien
gtcacgaagtctgggccagaatggc

SEQ ID NO: 2998681 - DNA, 25 bp, Homo sapien
agagaaacagaaccgtcacgaagtc

SEQ ID NO: 2998682 - DNA, 25 bp, Homo sapien
gatgagcaggtgtggaccaaatgtc

SEQ ID NO: 2998683 - DNA, 25 bp, Homo sapien
ggatgagcaggtgtggaccaaatgt

SEQ ID NO: 2998684 - DNA, 25 bp, Homo sapien
atgagcaggtgtggaccaaatgtcc

SEQ ID NO: 2998685 - DNA, 25 bp, Homo sapien
aacggttcatgaggggccatcacta

SEQ ID NO: 2998686 - DNA, 25 bp, Homo sapien
agttgtcaacaaacaccaccaacgg

SEQ ID NO: 2998687 - DNA, 25 bp, Homo sapien
tgtcaacaaacaccaccaacggttc

SEQ ID NO: 2998688 - DNA, 25 bp, Homo sapien
aacaaacaccaccaacggttcatga

SEQ ID NO: 2998689 - DNA, 25 bp, Homo sapien
ggaccatcttcagcgagtgggtgtc

SEQ ID NO: 2998690 - DNA, 25 bp, Homo sapien
acaacgatcttggtgtagctggcgg

SEQ ID NO: 2998691 - DNA, 25 bp, Homo sapien
tcaccacctgcgagctgatggaggg

SEQ ID NO: 2998692 - DNA, 25 bp, Homo sapien
ggatcatctcagcccgggtcatgcc

SEQ ID NO: 2998693 - DNA, 25 bp, Homo sapien
ctcatgcaacggacggggttagaca

SEQ ID NO: 2998694 - DNA, 25 bp, Homo sapien
catgcaacggacggggttagacaaa

SEQ ID NO: 2998695 - DNA, 25 bp, Homo sapien
tcatgcaacggacggggttagacaa

SEQ ID NO: 2998696 - DNA, 25 bp, Homo sapien
actgggcaacacggtgagacatttt

SEQ ID NO: 2998697 - DNA, 25 bp, Homo sapien
gatcacccagcaatggaaatctttg

SEQ ID NO: 2998698 - DNA, 25 bp, Homo sapien
caagggtggccagtatgccatgcct

SEQ ID NO: 2998699 - DNA, 25 bp, Homo sapien
gaatgagcctgacagatttggcggc

SEQ ID NO: 2998700 - DNA, 25 bp, Homo sapien
cctggccagtcaccataaaattctg

SEQ ID NO: 2998701 - DNA, 25 bp, Homo sapien
gcatgaatgggtactttattccttt

SEQ ID NO: 2998702 - DNA, 25 bp, Homo sapien
acagaagcagagtcacacaataggt

SEQ ID NO: 2998703 - DNA, 25 bp, Homo sapien
gttgtagcatgaatgggtactttat

SEQ ID NO: 2998704 - DNA, 25 bp, Homo sapien
gcctttgccaaccattaatccactt

SEQ ID NO: 2998705 - DNA, 25 bp, Homo sapien
ttttctgtgtagaagacttgtacat

SEQ ID NO: 2998706 - DNA, 25 bp, Homo sapien
tcaatgaacatgagctatcctgtca

SEQ ID NO: 2998707 - DNA, 25 bp, Homo sapien
tcatttaggcctgggagccatggct

SEQ ID NO: 2998708 - DNA, 25 bp, Homo sapien
taaaggtctttatggattctgtgtc

SEQ ID NO: 2998709 - DNA, 25 bp, Homo sapien
taccctgcacccagaacttagtagg

SEQ ID NO: 2998710 - DNA, 25 bp, Homo sapien
gaaaccttccgggtgagtcattata

SEQ ID NO: 2998711 - DNA, 25 bp, Homo sapien
cagggacctttccatggtgcttgct

SEQ ID NO: 2998712 - DNA, 25 bp, Homo sapien
ggtgcttgctgtgttataccctgca

SEQ ID NO: 2998713 - DNA, 25 bp, Homo sapien
cccaccatgctaattggcttgcact

SEQ ID NO: 2998714 - DNA, 25 bp, Homo sapien
accatgctaattggcttgcacttga

SEQ ID NO: 2998715 - DNA, 25 bp, Homo sapien
ctgctcccaccatgctaattggctt

SEQ ID NO: 2998716 - DNA, 25 bp, Homo sapien
ggtgatgaatttgggaatgaaggag

SEQ ID NO: 2998717 - DNA, 25 bp, Homo sapien
aattaggcttattctctcttgagga

SEQ ID NO: 2998718 - DNA, 25 bp, Homo sapien
caaattaggcttattctctcttgag

SEQ ID NO: 2998719 - DNA, 25 bp, Homo sapien
gacaaattaggcttattctctcttg

SEQ ID NO: 2998720 - DNA, 25 bp, Homo sapien
agtgacaaattaggcttattctctc

SEQ ID NO: 2998721 - DNA, 25 bp, Homo sapien
gacgccgggactggctaagtcaacg

SEQ ID NO: 2998722 - DNA, 25 bp, Homo sapien
gatgctgggactggctaagtcaacc

SEQ ID NO: 2998723 - DNA, 25 bp, Homo sapien
caagcccacctctgttaagcgggat

SEQ ID NO: 2998724 - DNA, 25 bp, Homo sapien
tcatatgactgagctgggagacgcc

SEQ ID NO: 2998725 - DNA, 25 bp, Homo sapien
taattatccaatcctgggcaaggag

SEQ ID NO: 2998726 - DNA, 25 bp, Homo sapien
tgaaatggcggccacacgtcactgt

SEQ ID NO: 2998727 - DNA, 25 bp, Homo sapien
tcaggtacacgggaaatctctgtgc

SEQ ID NO: 2998728 - DNA, 25 bp, Homo sapien
tgtccaaaccgagggaatgtccagc

SEQ ID NO: 2998729 - DNA, 25 bp, Homo sapien
tgaagtacttgcgtgtggaagccag

SEQ ID NO: 2998730 - DNA, 25 bp, Homo sapien
gcaaatttaacgcagaactgagtga

SEQ ID NO: 2998731 - DNA, 25 bp, Homo sapien
tgtgcagaatgacagaggtgacgta

SEQ ID NO: 2998732 - DNA, 25 bp, Homo sapien
tggaagccaggttgtcacggatgat

SEQ ID NO: 2998733 - DNA, 25 bp, Homo sapien
gattcttggactacgtggcacttgg

SEQ ID NO: 2998734 - DNA, 25 bp, Homo sapien
tctctggcaaacactagggtggacc

SEQ ID NO: 2998735 - DNA, 25 bp, Homo sapien
gaagacacctatagcaaactggcgg

SEQ ID NO: 2998736 - DNA, 25 bp, Homo sapien
tggactaagtgacatgcaacctgga

SEQ ID NO: 2998737 - DNA, 25 bp, Homo sapien
gaggccaaaattgacaggtgctgtc

SEQ ID NO: 2998738 - DNA, 25 bp, Homo sapien
gattttaaatgagctcatagggtga

SEQ ID NO: 2998739 - DNA, 25 bp, Homo sapien
gatttgacccatccaaacaatgagc

SEQ ID NO: 2998740 - DNA, 25 bp, Homo sapien
tctgggtagacacagcgaactggga

SEQ ID NO: 2998741 - DNA, 25 bp, Homo sapien
caaaacggtttatcaacaataatct

SEQ ID NO: 2998742 - DNA, 25 bp, Homo sapien
cggtttatcaacaataatctaaaca

SEQ ID NO: 2998743 - DNA, 25 bp, Homo sapien
tcaaaacggtttatcaacaataatc

SEQ ID NO: 2998744 - DNA, 25 bp, Homo sapien
atctcaaaacggtttatcaacaata

SEQ ID NO: 2998745 - DNA, 25 bp, Homo sapien
tctgaagcaagaccaagcaggggcc

SEQ ID NO: 2998746 - DNA, 25 bp, Homo sapien
tgtcaccagttacaaagcagctctg

SEQ ID NO: 2998747 - DNA, 25 bp, Homo sapien
gacagccctccatgaaagaaggtgg

SEQ ID NO: 2998748 - DNA, 25 bp, Homo sapien
caacttcccactggttattccgcat

SEQ ID NO: 2998749 - DNA, 25 bp, Homo sapien
acgcctggcctttaggtacatattg

SEQ ID NO: 2998750 - DNA, 25 bp, Homo sapien
cctggcctttaggtacatattgaag

SEQ ID NO: 2998751 - DNA, 25 bp, Homo sapien
tggcctttaggtacatattgaagag

SEQ ID NO: 2998752 - DNA, 25 bp, Homo sapien
cgcctggcctttaggtacatattga

SEQ ID NO: 2998753 - DNA, 25 bp, Homo sapien
aactgtttaaccagcagcaaaaatg

SEQ ID NO: 2998754 - DNA, 25 bp, Homo sapien
tgaatcaatttgtgaccacttggct

SEQ ID NO: 2998755 - DNA, 25 bp, Homo sapien
acaggatgcaggcatcaagaacaca

SEQ ID NO: 2998756 - DNA, 25 bp, Homo sapien
gcagggtctgaactgaactgtttaa

SEQ ID NO: 2998757 - DNA, 25 bp, Homo sapien
gaggcacggtctctgttcgtatttg

SEQ ID NO: 2998758 - DNA, 25 bp, Homo sapien
ctgctgcgttcccaagtctgtggtt

SEQ ID NO: 2998759 - DNA, 25 bp, Homo sapien
aaaaagtaatggcctcccagctgct

SEQ ID NO: 2998760 - DNA, 25 bp, Homo sapien
tatgatataaacaaaggactctgga

SEQ ID NO: 2998761 - DNA, 25 bp, Homo sapien
agagaatgcttaccagcagcgaggg

SEQ ID NO: 2998762 - DNA, 25 bp, Homo sapien
gctgcattccgatctgaagtgtgtg

SEQ ID NO: 2998763 - DNA, 25 bp, Homo sapien
gctggcacagatcccactcaggatg

SEQ ID NO: 2998764 - DNA, 25 bp, Homo sapien
tggcaaaacgaatcctctaagcaga

SEQ ID NO: 2998765 - DNA, 25 bp, Homo sapien
tctaaaaggacaagcaactgaactg

SEQ ID NO: 2998766 - DNA, 25 bp, Homo sapien
caactgaactgacgcaggtgcgaca

SEQ ID NO: 2998767 - DNA, 25 bp, Homo sapien
gacaagcaactgaactgacgcaggt

SEQ ID NO: 2998768 - DNA, 25 bp, Homo sapien
ctcattctaaaaggacaagcaactg

SEQ ID NO: 2998769 - DNA, 25 bp, Homo sapien
gatcctttacgctccgatgagcctg

SEQ ID NO: 2998770 - DNA, 25 bp, Homo sapien
ggagaagctacagacaagggccagt

SEQ ID NO: 2998771 - DNA, 25 bp, Homo sapien
accttgggctgctctcgttagtttg

SEQ ID NO: 2998772 - DNA, 25 bp, Homo sapien
aagggccagtagaagccaccttggg

SEQ ID NO: 2998773 - DNA, 25 bp, Homo sapien
atcctgaaccagcagctgaatactg

SEQ ID NO: 2998774 - DNA, 25 bp, Homo sapien
tcctgaaccagcagctgaatactgc

SEQ ID NO: 2998775 - DNA, 25 bp, Homo sapien
gatcctgaaccagcagctgaatact

SEQ ID NO: 2998776 - DNA, 25 bp, Homo sapien
cctgaaccagcagctgaatactgct

SEQ ID NO: 2998777 - DNA, 25 bp, Homo sapien
actgtggtcaccctttcaaacaacg

SEQ ID NO: 2998778 - DNA, 25 bp, Homo sapien
tgtggtcaccctttcaaacaacggc

SEQ ID NO: 2998779 - DNA, 25 bp, Homo sapien
atcactgtggtcaccctttcaaaca

SEQ ID NO: 2998780 - DNA, 25 bp, Homo sapien
cctttcaaacaacggccgtctgaat

SEQ ID NO: 2998781 - DNA, 25 bp, Homo sapien
tgacagcggaggaacagcttggctc

SEQ ID NO: 2998782 - DNA, 25 bp, Homo sapien
ttaatgacagcggaggaacagcttg

SEQ ID NO: 2998783 - DNA, 25 bp, Homo sapien
taattaatgacagcggaggaacagc

SEQ ID NO: 2998784 - DNA, 25 bp, Homo sapien
ctttaattaatgacagcggaggaac

SEQ ID NO: 2998785 - DNA, 25 bp, Homo sapien
agaatcccacggtcagtctccctaa

SEQ ID NO: 2998786 - DNA, 25 bp, Homo sapien
gatatagaatcccacggtcagtctc

SEQ ID NO: 2998787 - DNA, 25 bp, Homo sapien
ccagtatccctgttcacatcttcct

SEQ ID NO: 2998788 - DNA, 25 bp, Homo sapien
ccagtcaggatatagaatcccacgg

SEQ ID NO: 2998789 - DNA, 25 bp, Homo sapien
gattgattcgttcaatcagacttac

SEQ ID NO: 2998790 - DNA, 25 bp, Homo sapien
tctccagtcagattgattcgttcaa

SEQ ID NO: 2998791 - DNA, 25 bp, Homo sapien
gttcaatcagacttacatccacttt

SEQ ID NO: 2998792 - DNA, 25 bp, Homo sapien
atctctccagtcagattgattcgtt

SEQ ID NO: 2998793 - DNA, 25 bp, Homo sapien
cctgccttggaggtccttacagata

SEQ ID NO: 2998794 - DNA, 25 bp, Homo sapien
gaccttcgcaactcaacatgaccag

SEQ ID NO: 2998795 - DNA, 25 bp, Homo sapien
gctaaacggactgctctgtggctcc

SEQ ID NO: 2998796 - DNA, 25 bp, Homo sapien
tacagatagtgccatcttacctggg

SEQ ID NO: 2998797 - DNA, 25 bp, Homo sapien
cctccagagtgaacttggctacttc

SEQ ID NO: 2998798 - DNA, 25 bp, Homo sapien
gtggtggccagacagtactctgccg

SEQ ID NO: 2998799 - DNA, 25 bp, Homo sapien
gccgtgctcaggatgttacagatga

SEQ ID NO: 2998800 - DNA, 25 bp, Homo sapien
gagtgaacttggctacttctgagcc

SEQ ID NO: 2998801 - DNA, 25 bp, Homo sapien
tcagtgttgggcttaggtggcccct

SEQ ID NO: 2998802 - DNA, 25 bp, Homo sapien
gagcattgcaccatgcacttcttgt

SEQ ID NO: 2998803 - DNA, 25 bp, Homo sapien
ccaggcgtattctcggaggtacttc

SEQ ID NO: 2998804 - DNA, 25 bp, Homo sapien
tagtagacaaagaggtcggcgcagc

SEQ ID NO: 2998805 - DNA, 25 bp, Homo sapien
gactcaattagtcttctgggttgaa

SEQ ID NO: 2998806 - DNA, 25 bp, Homo sapien
gaaattccagaaagtaattggccaa

SEQ ID NO: 2998807 - DNA, 25 bp, Homo sapien
aaagaaagactcaattagtcttctg

SEQ ID NO: 2998808 - DNA, 25 bp, Homo sapien
aagtaattggccaatcctcttcaaa

SEQ ID NO: 2998809 - DNA, 25 bp, Homo sapien
gagatgaggctcaaaacacttggaa

SEQ ID NO: 2998810 - DNA, 25 bp, Homo sapien
gatgaggctcaaaacacttggaaac

SEQ ID NO: 2998811 - DNA, 25 bp, Homo sapien
ttgtcttgggattcgatatacacgt

SEQ ID NO: 2998812 - DNA, 25 bp, Homo sapien
cgatatacacgtagagatgaggctc

SEQ ID NO: 2998813 - DNA, 25 bp, Homo sapien
tgctttaccccatgtactggtcaga

SEQ ID NO: 2998814 - DNA, 25 bp, Homo sapien
tcacatggtcagtcggttaatggcc

SEQ ID NO: 2998815 - DNA, 25 bp, Homo sapien
gacaagagtccagcattttcccagc

SEQ ID NO: 2998816 - DNA, 25 bp, Homo sapien
gcaggtcttggtccttacaacagta

SEQ ID NO: 2998817 - DNA, 25 bp, Homo sapien
gcagggctagctgcaaagtacatgg

SEQ ID NO: 2998818 - DNA, 25 bp, Homo sapien
ttttcagaaacgcacattgggtagg

SEQ ID NO: 2998819 - DNA, 25 bp, Homo sapien
gatcagcttacactgcatggaggcc

SEQ ID NO: 2998820 - DNA, 25 bp, Homo sapien
caaaggatcgtatctggagcaagca

SEQ ID NO: 2998821 - DNA, 25 bp, Homo sapien
tacccgtggtgacgcaaaccagact

SEQ ID NO: 2998822 - DNA, 25 bp, Homo sapien
aaatctcctttctccgttgccagtt

SEQ ID NO: 2998823 - DNA, 25 bp, Homo sapien
tctcctttctccgttgccagttcct

SEQ ID NO: 2998824 - DNA, 25 bp, Homo sapien
aatctcctttctccgttgccagttc

SEQ ID NO: 2998825 - DNA, 25 bp, Homo sapien
tcctttctccgttgccagttcctcc

SEQ ID NO: 2998826 - DNA, 25 bp, Homo sapien
tcatcttccaggaagggattggtag

SEQ ID NO: 2998827 - DNA, 25 bp, Homo sapien
ctctggtgttggctcatcttccagg

SEQ ID NO: 2998828 - DNA, 25 bp, Homo sapien
atgggggtggagactcaagcttttt

SEQ ID NO: 2998829 - DNA, 25 bp, Homo sapien
ttccaggaagggattggtagatggg

SEQ ID NO: 2998830 - DNA, 25 bp, Homo sapien
aaggaagtcatgcacgctatctgat

SEQ ID NO: 2998831 - DNA, 25 bp, Homo sapien
tatctgataaagaagaactgaggca

SEQ ID NO: 2998832 - DNA, 25 bp, Homo sapien
gtcatgcacgctatctgataaagaa

SEQ ID NO: 2998833 - DNA, 25 bp, Homo sapien
gataaagaagaactgaggcaaccca

SEQ ID NO: 2998834 - DNA, 25 bp, Homo sapien
aagtgccttcccgatccaatttctc

SEQ ID NO: 2998835 - DNA, 25 bp, Homo sapien
agtgccttcccgatccaatttctca

SEQ ID NO: 2998836 - DNA, 25 bp, Homo sapien
ctaagtgccttcccgatccaatttc

SEQ ID NO: 2998837 - DNA, 25 bp, Homo sapien
gtgccttcccgatccaatttctcat

SEQ ID NO: 2998838 - DNA, 25 bp, Homo sapien
gtagctaagaatgcaagtgcacact

SEQ ID NO: 2998839 - DNA, 25 bp, Homo sapien
aggaaacctaggtaagtctctgtag

SEQ ID NO: 2998840 - DNA, 25 bp, Homo sapien
acctaggtaagtctctgtagccttg

SEQ ID NO: 2998841 - DNA, 25 bp, Homo sapien
ggattacgtaacagtttcttggata

SEQ ID NO: 2998842 - DNA, 25 bp, Homo sapien
tagccttggattacgtaacagtttc

SEQ ID NO: 2998843 - DNA, 25 bp, Homo sapien
ctggagaggtttggaatgatacagt

SEQ ID NO: 2998844 - DNA, 25 bp, Homo sapien
ggactggagaggtttggaatgatac

SEQ ID NO: 2998845 - DNA, 25 bp, Homo sapien
gagaggtttggaatgatacagtgaa

SEQ ID NO: 2998846 - DNA, 25 bp, Homo sapien
aggtttggaatgatacagtgaaggc

SEQ ID NO: 2998847 - DNA, 25 bp, Homo sapien
caaagaatagggtaggaggacgaag

SEQ ID NO: 2998848 - DNA, 25 bp, Homo sapien
gaggacgaagttgaattaaagaagc

SEQ ID NO: 2998849 - DNA, 25 bp, Homo sapien
cgaagttgaattaaagaagctgaag

SEQ ID NO: 2998850 - DNA, 25 bp, Homo sapien
taggaggacgaagttgaattaaaga

SEQ ID NO: 2998851 - DNA, 25 bp, Homo sapien
gaagcgttttgcaagaaacccctca

SEQ ID NO: 2998852 - DNA, 25 bp, Homo sapien
tcccatcggtcagggtgcagccgga

SEQ ID NO: 2998853 - DNA, 25 bp, Homo sapien
caaagttagttgttctttgaatagc

SEQ ID NO: 2998854 - DNA, 25 bp, Homo sapien
tctggtacgcataatcttggcaagt

SEQ ID NO: 2998855 - DNA, 25 bp, Homo sapien
aatcctctcagccatgcaccactca

SEQ ID NO: 2998856 - DNA, 25 bp, Homo sapien
catggcaaaattccaccgcaatcct

SEQ ID NO: 2998857 - DNA, 25 bp, Homo sapien
cgcaatcctctcagccatgcaccac

SEQ ID NO: 2998858 - DNA, 25 bp, Homo sapien
tggcaaaattccaccgcaatcctct

SEQ ID NO: 2998859 - DNA, 25 bp, Homo sapien
atagcgtctgtcgattttgtccagc

SEQ ID NO: 2998860 - DNA, 25 bp, Homo sapien
tcctcatagtccacaagctggcgtt

SEQ ID NO: 2998861 - DNA, 25 bp, Homo sapien
ctgtcgattttgtccagccaggcaa

SEQ ID NO: 2998862 - DNA, 25 bp, Homo sapien
cgtctgtcgattttgtccagccagg

SEQ ID NO: 2998863 - DNA, 25 bp, Homo sapien
atctgatcttatttggtcaatactc

SEQ ID NO: 2998864 - DNA, 25 bp, Homo sapien
aaagtaccagatactctgacagatg

SEQ ID NO: 2998865 - DNA, 25 bp, Homo sapien
tcttgaaaaagtaccagatactctg

SEQ ID NO: 2998866 - DNA, 25 bp, Homo sapien
tgaaaaagtaccagatactctgaca

SEQ ID NO: 2998867 - DNA, 25 bp, Homo sapien
ttcttgaaaaagtaccagatactct

SEQ ID NO: 2998868 - DNA, 25 bp, Homo sapien
catctcgtagaacattgctgggtcc

SEQ ID NO: 2998869 - DNA, 25 bp, Homo sapien
cactggaaagataccaggcgctgta

SEQ ID NO: 2998870 - DNA, 25 bp, Homo sapien
gaacactggaaagataccaggcgct

SEQ ID NO: 2998871 - DNA, 25 bp, Homo sapien
gagcgaacactggaaagataccagg

SEQ ID NO: 2998872 - DNA, 25 bp, Homo sapien
ctgagcgaacactggaaagatacca

SEQ ID NO: 2998873 - DNA, 25 bp, Homo sapien
tggtttttatgtcatctgctgaaca

SEQ ID NO: 2998874 - DNA, 25 bp, Homo sapien
ggtttttatgtcatctgctgaacac

SEQ ID NO: 2998875 - DNA, 25 bp, Homo sapien
gagctcggcaaggatggtgatcatc

SEQ ID NO: 2998876 - DNA, 25 bp, Homo sapien
actggggtgagcgtgagctcggcaa

SEQ ID NO: 2998877 - DNA, 25 bp, Homo sapien
caaggatggtgatcatctctaaaga

SEQ ID NO: 2998878 - DNA, 25 bp, Homo sapien
gaatgataaccacatggtgactggg

SEQ ID NO: 2998879 - DNA, 25 bp, Homo sapien
tttgctgtcctaactcagtctgtgc

SEQ ID NO: 2998880 - DNA, 25 bp, Homo sapien
aaatctgccaggatttgctgtccta

SEQ ID NO: 2998881 - DNA, 25 bp, Homo sapien
gaaggaaacgcttcttcaaaatctg

SEQ ID NO: 2998882 - DNA, 25 bp, Homo sapien
taactcagtctgtgcagccttcact

SEQ ID NO: 2998883 - DNA, 25 bp, Homo sapien
ctgaggtcatatgtattaatcttta

SEQ ID NO: 2998884 - DNA, 25 bp, Homo sapien
tttatacagttccactgggggatag

SEQ ID NO: 2998885 - DNA, 25 bp, Homo sapien
tacagttccactgggggatagtcat

SEQ ID NO: 2998886 - DNA, 25 bp, Homo sapien
tctttatacagttccactgggggat

SEQ ID NO: 2998887 - DNA, 25 bp, Homo sapien
tttcatttcacatcacgtccagttc

SEQ ID NO: 2998888 - DNA, 25 bp, Homo sapien
aggaatctgtcttcccgtgtctggc

SEQ ID NO: 2998889 - DNA, 25 bp, Homo sapien
taggcatgacccaaaacaatctgtt

SEQ ID NO: 2998890 - DNA, 25 bp, Homo sapien
tgggagacattccttcagcgtgaac

SEQ ID NO: 2998891 - DNA, 25 bp, Homo sapien
cactcttagaggtgggtttgtagcc

SEQ ID NO: 2998892 - DNA, 25 bp, Homo sapien
gaatcagggccatacgtctagagct

SEQ ID NO: 2998893 - DNA, 25 bp, Homo sapien
cttcatctgtgtccctaaaagggac

SEQ ID NO: 2998894 - DNA, 25 bp, Homo sapien
tcatctgtgtccctaaaagggacat

SEQ ID NO: 2998895 - DNA, 25 bp, Homo sapien
agcttcatctgtgtccctaaaaggg

SEQ ID NO: 2998896 - DNA, 25 bp, Homo sapien
catctgtgtccctaaaagggacatg

SEQ ID NO: 2998897 - DNA, 25 bp, Homo sapien
gcctagaatcttgagtgaccccatg

SEQ ID NO: 2998898 - DNA, 25 bp, Homo sapien
gaaagtccgcctacaactcatagag

SEQ ID NO: 2998899 - DNA, 25 bp, Homo sapien
tatctgtggataaagtagccctgag

SEQ ID NO: 2998900 - DNA, 25 bp, Homo sapien
tgttaccttgtgagtgacagtccca

SEQ ID NO: 2998901 - DNA, 25 bp, Homo sapien
agaatttgtctatgacccctgccct

SEQ ID NO: 2998902 - DNA, 25 bp, Homo sapien
gagatcctgctatgccttgtacagc

SEQ ID NO: 2998903 - DNA, 25 bp, Homo sapien
gtcacgttggtaagatcccacccat

SEQ ID NO: 2998904 - DNA, 25 bp, Homo sapien
tgcttcagcctatcaattcctcttc

SEQ ID NO: 2998905 - DNA, 25 bp, Homo sapien
tagctgctgctcagtaacaacgcct

SEQ ID NO: 2998906 - DNA, 25 bp, Homo sapien
caaagaagcctgtagcattcgggcc

SEQ ID NO: 2998907 - DNA, 25 bp, Homo sapien
aaggcagagtcagaaacgtagctgc

SEQ ID NO: 2998908 - DNA, 25 bp, Homo sapien
cattcgggccttattaagaaggcag

SEQ ID NO: 2998909 - DNA, 25 bp, Homo sapien
ggacattcatcacaccctgaaggag

SEQ ID NO: 2998910 - DNA, 25 bp, Homo sapien
aacttctccgtattgtcttcgcctg

SEQ ID NO: 2998911 - DNA, 25 bp, Homo sapien
ctttcggaaagctgccggatctgcg

SEQ ID NO: 2998912 - DNA, 25 bp, Homo sapien
cccatatacttgtggaagtgctcca

SEQ ID NO: 2998913 - DNA, 25 bp, Homo sapien
tctaattgcttaatatcacgggtga

SEQ ID NO: 2998914 - DNA, 25 bp, Homo sapien
ccagcatgtgcaggtggttcagtgt

SEQ ID NO: 2998915 - DNA, 25 bp, Homo sapien
agtcgacacctcctgccagcatgtg

SEQ ID NO: 2998916 - DNA, 25 bp, Homo sapien
tcaggtggcgtttggcgtgatctaa

SEQ ID NO: 2998917 - DNA, 25 bp, Homo sapien
gaaccacgtcagaagatcccgggta

SEQ ID NO: 2998918 - DNA, 25 bp, Homo sapien
acttgagtgccaaagctgttgccac

SEQ ID NO: 2998919 - DNA, 25 bp, Homo sapien
acgtcagaagatcccgggtacctct

SEQ ID NO: 2998920 - DNA, 25 bp, Homo sapien
gccaatagtgaaaatgttggaaact

SEQ ID NO: 2998921 - DNA, 25 bp, Homo sapien
acgtgatgaaatcggtcatcttgcc

SEQ ID NO: 2998922 - DNA, 25 bp, Homo sapien
tgtcgaacgtgatgaaatcggtcat

SEQ ID NO: 2998923 - DNA, 25 bp, Homo sapien
accatatatggcttgccagtgtcga

SEQ ID NO: 2998924 - DNA, 25 bp, Homo sapien
ggcttgccagtgtcgaacgtgatga

SEQ ID NO: 2998925 - DNA, 25 bp, Homo sapien
tgaggggtcagggtagcggatggtg

SEQ ID NO: 2998926 - DNA, 25 bp, Homo sapien
cttgatgaggggtcagggtagcgga

SEQ ID NO: 2998927 - DNA, 25 bp, Homo sapien
cggatggtgcgagcatcatgagtca

SEQ ID NO: 2998928 - DNA, 25 bp, Homo sapien
ttgtgcccacaaagatttttctcac

SEQ ID NO: 2998929 - DNA, 25 bp, Homo sapien
aaagcaacctttggtgtcacggatc

SEQ ID NO: 2998930 - DNA, 25 bp, Homo sapien
aagcaacctttggtgtcacggatca

SEQ ID NO: 2998931 - DNA, 25 bp, Homo sapien
aacctttggtgtcacggatcagatg

SEQ ID NO: 2998932 - DNA, 25 bp, Homo sapien
gcaacctttggtgtcacggatcaga

SEQ ID NO: 2998933 - DNA, 25 bp, Homo sapien
gaacccagcagggtatgttatatca

SEQ ID NO: 2998934 - DNA, 25 bp, Homo sapien
cccagcagggtatgttatatcagtt

SEQ ID NO: 2998935 - DNA, 25 bp, Homo sapien
catgaacccagcagggtatgttata

SEQ ID NO: 2998936 - DNA, 25 bp, Homo sapien
atccatgaacccagcagggtatgtt

SEQ ID NO: 2998937 - DNA, 25 bp, Homo sapien
acggacgaggagcaaacacaccggt

SEQ ID NO: 2998938 - DNA, 25 bp, Homo sapien
tggtggacggacgaggagcaaacac

SEQ ID NO: 2998939 - DNA, 25 bp, Homo sapien
atgcaaatcttcttaagtctgttcc

SEQ ID NO: 2998940 - DNA, 25 bp, Homo sapien
catgcaaatcttcttaagtctgttc

SEQ ID NO: 2998941 - DNA, 25 bp, Homo sapien
ctgcattaggcaaggaaaagaggac

SEQ ID NO: 2998942 - DNA, 25 bp, Homo sapien
tgcattaggcaaggaaaagaggacc

SEQ ID NO: 2998943 - DNA, 25 bp, Homo sapien
cattaggcaaggaaaagaggacctt

SEQ ID NO: 2998944 - DNA, 25 bp, Homo sapien
gcattaggcaaggaaaagaggacct

SEQ ID NO: 2998945 - DNA, 25 bp, Homo sapien
cacatagcgaaagtttcttaatagc

SEQ ID NO: 2998946 - DNA, 25 bp, Homo sapien
tttggttgcccaggttctgtgatac

SEQ ID NO: 2998947 - DNA, 25 bp, Homo sapien
tcttaatagcaatttggttgcccag

SEQ ID NO: 2998948 - DNA, 25 bp, Homo sapien
cttccggtgcacatagcgaaagttt

SEQ ID NO: 2998949 - DNA, 25 bp, Homo sapien
cagggagttcgtggatagatacatc

SEQ ID NO: 2998950 - DNA, 25 bp, Homo sapien
ttaaagtgagaaactcggcagggag

SEQ ID NO: 2998951 - DNA, 25 bp, Homo sapien
taaagtgagaaactcggccgttgag

SEQ ID NO: 2998952 - DNA, 25 bp, Homo sapien
ctcggccgtgagttcttggatagat

SEQ ID NO: 2998953 - DNA, 25 bp, Homo sapien
gttgttggatagctttctgagcctc

SEQ ID NO: 2998954 - DNA, 25 bp, Homo sapien
tttgccaaagagttgttggatagct

SEQ ID NO: 2998955 - DNA, 25 bp, Homo sapien
tttgattttgccaaagagttgttgg

SEQ ID NO: 2998956 - DNA, 25 bp, Homo sapien
cagctttgtctttgatatctttgat

SEQ ID NO: 2998957 - DNA, 25 bp, Homo sapien
tgtctgtgagcgtgtcagcaggcca

SEQ ID NO: 2998958 - DNA, 25 bp, Homo sapien
agcccacagacgtgtatagaccaca

SEQ ID NO: 2998959 - DNA, 25 bp, Homo sapien
gcagcccacagacgtgtatcgacca

SEQ ID NO: 2998960 - DNA, 25 bp, Homo sapien
cacggatgtgtatagaccacatgca

SEQ ID NO: 2998961 - DNA, 25 bp, Homo sapien
gcaatgggttaattacagaagagga

SEQ ID NO: 2998962 - DNA, 25 bp, Homo sapien
gggcaatgggttaattacagaagag

SEQ ID NO: 2998963 - DNA, 25 bp, Homo sapien
taaacataatgttctggggggggca

SEQ ID NO: 2998964 - DNA, 25 bp, Homo sapien
caatgggttaattacagaagaggac

SEQ ID NO: 2998965 - DNA, 25 bp, Homo sapien
tacagcacctaagcaaggctatggc

SEQ ID NO: 2998966 - DNA, 25 bp, Homo sapien
gtaaaaagtgcaacagaggcctctg

SEQ ID NO: 2998967 - DNA, 25 bp, Homo sapien
gaggctaccgctctgaataagtgcg

SEQ ID NO: 2998968 - DNA, 25 bp, Homo sapien
gattaaaagtatcatggtgcacctg

SEQ ID NO: 2998969 - DNA, 25 bp, Homo sapien
tctttttcgacacagctcacatgga

SEQ ID NO: 2998970 - DNA, 25 bp, Homo sapien
agaaaggactgatctttttcgacac

SEQ ID NO: 2998971 - DNA, 25 bp, Homo sapien
gacacagctcacatggaattctgtg

SEQ ID NO: 2998972 - DNA, 25 bp, Homo sapien
gactgatctttttcgacacagctca

SEQ ID NO: 2998973 - DNA, 25 bp, Homo sapien
tgcagtctgcgccatcagagaatga

SEQ ID NO: 2998974 - DNA, 25 bp, Homo sapien
aaccgagatcccctttgtggccact

SEQ ID NO: 2998975 - DNA, 25 bp, Homo sapien
tgtgagtccgcaggcagcctttcag

SEQ ID NO: 2998976 - DNA, 25 bp, Homo sapien
tcattttccgaagagctggtatggc

SEQ ID NO: 2998977 - DNA, 25 bp, Homo sapien
ccctgaaatagctgcgagtgacgga

SEQ ID NO: 2998978 - DNA, 25 bp, Homo sapien
gacgaggctcggaaacaaattcagc

SEQ ID NO: 2998979 - DNA, 25 bp, Homo sapien
taacttaaaacaagctagccctgaa

SEQ ID NO: 2998980 - DNA, 25 bp, Homo sapien
tgacggatgcgttcatgcagcttcc

SEQ ID NO: 2998981 - DNA, 25 bp, Homo sapien
tttgcctaacatccatattccaggt

SEQ ID NO: 2998982 - DNA, 25 bp, Homo sapien
atattccaggtatcacatacaatac

SEQ ID NO: 2998983 - DNA, 25 bp, Homo sapien
cccctccaaattgggggtcattatg

SEQ ID NO: 2998984 - DNA, 25 bp, Homo sapien
tatgaaagtggcactaatacatttt

SEQ ID NO: 2998985 - DNA, 25 bp, Homo sapien
acatggaaatggtgacggcacaacc

SEQ ID NO: 2998986 - DNA, 25 bp, Homo sapien
tgctctgttggcagtaattccgcaa

SEQ ID NO: 2998987 - DNA, 25 bp, Homo sapien
gacttcttgtatcaaggacctgaaa

SEQ ID NO: 2998988 - DNA, 25 bp, Homo sapien
ggcacaaccacaacgctgaatctgt

SEQ ID NO: 2998989 - DNA, 25 bp, Homo sapien
ccagcgactcgagagattgaggcag

SEQ ID NO: 2998990 - DNA, 25 bp, Homo sapien
ccgaggcgagtgaatcaccgaggtc

SEQ ID NO: 2998991 - DNA, 25 bp, Homo sapien
taatcccagcgactcgagagattga

SEQ ID NO: 2998992 - DNA, 25 bp, Homo sapien
cgaggcgagtgaatcaccgaggtca

SEQ ID NO: 2998993 - DNA, 25 bp, Homo sapien
cccttaggacctggtggatgcatgt

SEQ ID NO: 2998994 - DNA, 25 bp, Homo sapien
taaacaatcgagcagaactagtggg

SEQ ID NO: 2998995 - DNA, 25 bp, Homo sapien
ggacatctgtttgcgactcttgacc

SEQ ID NO: 2998996 - DNA, 25 bp, Homo sapien
tccggctgctcttgaaaaactgata

SEQ ID NO: 2998997 - DNA, 25 bp, Homo sapien
ccaaagcgaaggagtgagcaataca

SEQ ID NO: 2998998 - DNA, 25 bp, Homo sapien
tgtggaccaacaaagtagcaagctc

SEQ ID NO: 2998999 - DNA, 25 bp, Homo sapien
gaactgggtggaagattgtactaca

SEQ ID NO: 2999000 - DNA, 25 bp, Homo sapien
tagggtttgctactctctgggtttc

SEQ ID NO: 2999001 - DNA, 25 bp, Homo sapien
gacttgttctctggtaagtcaaggg

SEQ ID NO: 2999002 - DNA, 25 bp, Homo sapien
cttgttctctggtaagtcaagggag

SEQ ID NO: 2999003 - DNA, 25 bp, Homo sapien
aacatcaaagggatgagacttgttc

SEQ ID NO: 2999004 - DNA, 25 bp, Homo sapien
caaagggatgagacttgttctctgg

SEQ ID NO: 2999005 - DNA, 25 bp, Homo sapien
catcgagggacactggaatccattt

SEQ ID NO: 2999006 - DNA, 25 bp, Homo sapien
tcgagggacactggaatccattttc

SEQ ID NO: 2999007 - DNA, 25 bp, Homo sapien
gacatcgagggacactggaatccat

SEQ ID NO: 2999008 - DNA, 25 bp, Homo sapien
aaaggacatcgagggacactggaat

SEQ ID NO: 2999009 - DNA, 25 bp, Homo sapien
ttttaatgaatcttgagtcacctgc

SEQ ID NO: 2999010 - DNA, 25 bp, Homo sapien
cgaatgcagcaacctcatttagcca

SEQ ID NO: 2999011 - DNA, 25 bp, Homo sapien
aagagatgcccgacacgaaggagaa

SEQ ID NO: 2999012 - DNA, 25 bp, Homo sapien
ctggcaaagcgaggtacgaggaaat

SEQ ID NO: 2999013 - DNA, 25 bp, Homo sapien
ccaacaactcagctgacgaatgcag

SEQ ID NO: 2999014 - DNA, 25 bp, Homo sapien
cacagttcacggtcctggtccaagg

SEQ ID NO: 2999015 - DNA, 25 bp, Homo sapien
ggtgccacagttcacggtcctggtc

SEQ ID NO: 2999016 - DNA, 25 bp, Homo sapien
gtgagcggtgccacagttcacggtc

SEQ ID NO: 2999017 - DNA, 25 bp, Homo sapien
tcgggtgagcggtgccacagttcac

SEQ ID NO: 2999018 - DNA, 25 bp, Homo sapien
tcctgccccacgttcgtctgacctc

SEQ ID NO: 2999019 - DNA, 25 bp, Homo sapien
gtctgacctcttacaacagttcgaa

SEQ ID NO: 2999020 - DNA, 25 bp, Homo sapien
cacgttcgtctgacctcttacaaca

SEQ ID NO: 2999021 - DNA, 25 bp, Homo sapien
agttcgaatattgtcatccagtctc

SEQ ID NO: 2999022 - DNA, 25 bp, Homo sapien
cgacttcgtctatgttcgccagaga

SEQ ID NO: 2999023 - DNA, 25 bp, Homo sapien
tattttcagcctaattttgttcacg

SEQ ID NO: 2999024 - DNA, 25 bp, Homo sapien
tcacgacttcgtctatgttcgccag

SEQ ID NO: 2999025 - DNA, 25 bp, Homo sapien
gttcacgacttcgtctatgttcgcc

SEQ ID NO: 2999026 - DNA, 25 bp, Homo sapien
ccaggacagtatgaccacaatcaga

SEQ ID NO: 2999027 - DNA, 25 bp, Homo sapien
gaaaataggtagtcatctgcacacc

SEQ ID NO: 2999028 - DNA, 25 bp, Homo sapien
aactgggatgataagcaatttggca

SEQ ID NO: 2999029 - DNA, 25 bp, Homo sapien
tgggaatccacattggctgggcaga

SEQ ID NO: 2999030 - DNA, 25 bp, Homo sapien
tctttccgtgcctcgtgattcttac

SEQ ID NO: 2999031 - DNA, 25 bp, Homo sapien
gctatcacatttaagccgagtgtta

SEQ ID NO: 2999032 - DNA, 25 bp, Homo sapien
ttccttcatggcaacgctatcacat

SEQ ID NO: 2999033 - DNA, 25 bp, Homo sapien
taagccgagtgttatctttccgtgc

SEQ ID NO: 2999034 - DNA, 25 bp, Homo sapien
tcaacagcattgaaatctgctcgat

SEQ ID NO: 2999035 - DNA, 25 bp, Homo sapien
gctcgatctagagggtcctggcttg

SEQ ID NO: 2999036 - DNA, 25 bp, Homo sapien
gaacagggtattgatatactcaaca

SEQ ID NO: 2999037 - DNA, 25 bp, Homo sapien
tgaaatctgctcgatctagagggtc

SEQ ID NO: 2999038 - DNA, 25 bp, Homo sapien
gtgagctgcagcacggcttccagct

SEQ ID NO: 2999039 - DNA, 25 bp, Homo sapien
ctgctcgatggccagctgcacctcg

SEQ ID NO: 2999040 - DNA, 25 bp, Homo sapien
tgctcgatggccagctgcacctcgg

SEQ ID NO: 2999041 - DNA, 25 bp, Homo sapien
cgtgagctgcagcacggcttccagc

SEQ ID NO: 2999042 - DNA, 25 bp, Homo sapien
ggtgagcccggctccgtcagccgct

SEQ ID NO: 2999043 - DNA, 25 bp, Homo sapien
gagcccaactcaggcctccagccgc

SEQ ID NO: 2999044 - DNA, 25 bp, Homo sapien
tcgcggcagcgacctggtgagcccg

SEQ ID NO: 2999045 - DNA, 25 bp, Homo sapien
cagcacagcaactccctcgcggcag

SEQ ID NO: 2999046 - DNA, 25 bp, Homo sapien
catcccaccactgaggatcgcttga

SEQ ID NO: 2999047 - DNA, 25 bp, Homo sapien
ggaatgattcctttgcgccactgca

SEQ ID NO: 2999048 - DNA, 25 bp, Homo sapien
ctgaggcagggaattattgactttc

SEQ ID NO: 2999049 - DNA, 25 bp, Homo sapien
tatacattgaacctggtgcagtggc

SEQ ID NO: 2999050 - DNA, 25 bp, Homo sapien
aaatttactcttgcaatttatgatg

SEQ ID NO: 2999051 - DNA, 25 bp, Homo sapien
tgtgtataaacgactgggcatggtg

SEQ ID NO: 2999052 - DNA, 25 bp, Homo sapien
caatctagttataggacaatttcat

SEQ ID NO: 2999053 - DNA, 25 bp, Homo sapien
actactaccacaatctagttatagg

SEQ ID NO: 2999054 - DNA, 25 bp, Homo sapien
ttaggttggtactctggttctctgc

SEQ ID NO: 2999055 - DNA, 25 bp, Homo sapien
tgacattcggatggttctgaaccct

SEQ ID NO: 2999056 - DNA, 25 bp, Homo sapien
tgcatgcccattcttgctaagccgg

SEQ ID NO: 2999057 - DNA, 25 bp, Homo sapien
catgatttccagctagtttcagcag

SEQ ID NO: 2999058 - DNA, 25 bp, Homo sapien
attacaggcatcgcgctcggcctac

SEQ ID NO: 2999059 - DNA, 25 bp, Homo sapien
gctcggcctacttataaagttttca

SEQ ID NO: 2999060 - DNA, 25 bp, Homo sapien
gatcctcgtgcctcatctccgaaag

SEQ ID NO: 2999061 - DNA, 25 bp, Homo sapien
tgtatttctagtttgtatcatttga

SEQ ID NO: 2999062 - DNA, 25 bp, Homo sapien
tctaggacctaacagtctggtggag

SEQ ID NO: 2999063 - DNA, 25 bp, Homo sapien
tattgcaccctcagaatgtgccagc

SEQ ID NO: 2999064 - DNA, 25 bp, Homo sapien
ttggccttaccatttgccgacaggg

SEQ ID NO: 2999065 - DNA, 25 bp, Homo sapien
cataggacctagcaaacagtaagta

SEQ ID NO: 2999066 - DNA, 25 bp, Homo sapien
tgtcagatatcttgggaccaacctg

SEQ ID NO: 2999067 - DNA, 25 bp, Homo sapien
tgtaaccacctgtcactctctggaa

SEQ ID NO: 2999068 - DNA, 25 bp, Homo sapien
cagtggactgcacagagtcgttttc

SEQ ID NO: 2999069 - DNA, 25 bp, Homo sapien
aaacactggcgctggaggtcactgt

SEQ ID NO: 2999070 - DNA, 25 bp, Homo sapien
gctgttccgaagtcctcatacggga

SEQ ID NO: 2999071 - DNA, 25 bp, Homo sapien
taaagagctagtgatccagcctccc

SEQ ID NO: 2999072 - DNA, 25 bp, Homo sapien
tgcatgacggtgatctgaggagacc

SEQ ID NO: 2999073 - DNA, 25 bp, Homo sapien
catttcacggaccagcaaatcgtgg

SEQ ID NO: 2999074 - DNA, 25 bp, Homo sapien
tgtctccggatagatccaaagccga

SEQ ID NO: 2999075 - DNA, 25 bp, Homo sapien
gcaccgggaaaagcatctcggccgt

SEQ ID NO: 2999076 - DNA, 25 bp, Homo sapien
tacgcctctggatggtgtctccgga

SEQ ID NO: 2999077 - DNA, 25 bp, Homo sapien
ccaaagccgagaggcagtaagagcc

SEQ ID NO: 2999078 - DNA, 25 bp, Homo sapien
gtttcctcggtgcacgccgtgctgg

SEQ ID NO: 2999079 - DNA, 25 bp, Homo sapien
ggatcgtcatcattcgctcctgcga

SEQ ID NO: 2999080 - DNA, 25 bp, Homo sapien
gactgcgtgatgatcagcaccaggt

SEQ ID NO: 2999081 - DNA, 25 bp, Homo sapien
gcccgcgctaggctggtttcctcgg

SEQ ID NO: 2999082 - DNA, 25 bp, Homo sapien
tgcagttttgacaggtaagacagac

SEQ ID NO: 2999083 - DNA, 25 bp, Homo sapien
cttcagaggattctactcatgagtc

SEQ ID NO: 2999084 - DNA, 25 bp, Homo sapien
gattataatccagatctcttgctaa

SEQ ID NO: 2999085 - DNA, 25 bp, Homo sapien
ggagaggccagttatatttcagcta

SEQ ID NO: 2999086 - DNA, 25 bp, Homo sapien
gatgtcttgaccgttacttaggagt

SEQ ID NO: 2999087 - DNA, 25 bp, Homo sapien
tagtggaggaacaccattacacatg

SEQ ID NO: 2999088 - DNA, 25 bp, Homo sapien
cttaggagtcgggattgcccctctt

SEQ ID NO: 2999089 - DNA, 25 bp, Homo sapien
gaaacgttcatgatcctccttacca

SEQ ID NO: 2999090 - DNA, 25 bp, Homo sapien
gagtgctttgcctcccgatatgcca

SEQ ID NO: 2999091 - DNA, 25 bp, Homo sapien
gagggcgagctcataaaactacagg

SEQ ID NO: 2999092 - DNA, 25 bp, Homo sapien
aagagatcagcacaacctttgcagg

SEQ ID NO: 2999093 - DNA, 25 bp, Homo sapien
gatatgccagagcttgtggtccaaa

SEQ ID NO: 2999094 - DNA, 25 bp, Homo sapien
cgattattggtcagggagccaagcc

SEQ ID NO: 2999095 - DNA, 25 bp, Homo sapien
cagagttcaagcgtagtggtcacac

SEQ ID NO: 2999096 - DNA, 25 bp, Homo sapien
gagccaagcctactttacctgagga

SEQ ID NO: 2999097 - DNA, 25 bp, Homo sapien
ggagaacctgagtaatgccccattg

SEQ ID NO: 2999098 - DNA, 25 bp, Homo sapien
tgcctagcccactctcaattttttt

SEQ ID NO: 2999099 - DNA, 25 bp, Homo sapien
catgcctagcccactctcaattttt

SEQ ID NO: 2999100 - DNA, 25 bp, Homo sapien
atgcctagcccactctcaatttttt

SEQ ID NO: 2999101 - DNA, 25 bp, Homo sapien
taactgtaaagtccaggctgctcgg

SEQ ID NO: 2999102 - DNA, 25 bp, Homo sapien
tttcgctcccgcacaggtaagaagc

SEQ ID NO: 2999103 - DNA, 25 bp, Homo sapien
cagacctgccatgttgaagcccagc

SEQ ID NO: 2999104 - DNA, 25 bp, Homo sapien
ttgctgaggccgacttagaagagac

SEQ ID NO: 2999105 - DNA, 25 bp, Homo sapien
cagaggagtttgaccacgtggttcc

SEQ ID NO: 2999106 - DNA, 25 bp, Homo sapien
gggtttcacgggactcatcaggcag

SEQ ID NO: 2999107 - DNA, 25 bp, Homo sapien
gacttccgggtgcactatgaccagg

SEQ ID NO: 2999108 - DNA, 25 bp, Homo sapien
gaggtccactcgtcttctgaaagct

SEQ ID NO: 2999109 - DNA, 25 bp, Homo sapien
aagtcagactgtcgcacagccggta

SEQ ID NO: 2999110 - DNA, 25 bp, Homo sapien
gtcgtaacttgtcccctggctgctg

SEQ ID NO: 2999111 - DNA, 25 bp, Homo sapien
cagcccacgaaaatggtctcactgg

SEQ ID NO: 2999112 - DNA, 25 bp, Homo sapien
cggttcaggtagagcgtcgcgttct

SEQ ID NO: 2999113 - DNA, 25 bp, Homo sapien
tgggtgtccgagttccacacagaga

SEQ ID NO: 2999114 - DNA, 25 bp, Homo sapien
cacacagagatcaccgtggccagtt

SEQ ID NO: 2999115 - DNA, 25 bp, Homo sapien
cagatacacggttgcagacacctcc

SEQ ID NO: 2999116 - DNA, 25 bp, Homo sapien
tagggattctgggtgtccgagttcc

SEQ ID NO: 2999117 - DNA, 25 bp, Homo sapien
tgcgggtgacccttgtgcttcatca

SEQ ID NO: 2999118 - DNA, 25 bp, Homo sapien
actctggatctgtgtcagcccgcgg

SEQ ID NO: 2999119 - DNA, 25 bp, Homo sapien
gggcacgcgtctgggtctgacctaa

SEQ ID NO: 2999120 - DNA, 25 bp, Homo sapien
ttatgggccattgcactaaactggg

SEQ ID NO: 2999121 - DNA, 25 bp, Homo sapien
tcttcggcagaagtgtcaacggtca

SEQ ID NO: 2999122 - DNA, 25 bp, Homo sapien
gaaagcgctctagttctgcatggca

SEQ ID NO: 2999123 - DNA, 25 bp, Homo sapien
gttgcccaccgagaagaacaggtct

SEQ ID NO: 2999124 - DNA, 25 bp, Homo sapien
caacggtcacatgttccagaaagcg

SEQ ID NO: 2999125 - DNA, 25 bp, Homo sapien
gacagatgaagggagcatagccaca

SEQ ID NO: 2999126 - DNA, 25 bp, Homo sapien
agggatgactacaagagccactgca

SEQ ID NO: 2999127 - DNA, 25 bp, Homo sapien
gtgattctgagaggtatctgcccag

SEQ ID NO: 2999128 - DNA, 25 bp, Homo sapien
tcagctttggccatcaaggtacaga

SEQ ID NO: 2999129 - DNA, 25 bp, Homo sapien
tcaaaaacaaggtactcatggccct

SEQ ID NO: 2999130 - DNA, 25 bp, Homo sapien
cttccagtcaaaaacaaggtactca

SEQ ID NO: 2999131 - DNA, 25 bp, Homo sapien
tcagggaaacggtccaccccacagc

SEQ ID NO: 2999132 - DNA, 25 bp, Homo sapien
gctccttccagtcaaaaacaaggta

SEQ ID NO: 2999133 - DNA, 25 bp, Homo sapien
aaatgatgtgattctggccaggttc

SEQ ID NO: 2999134 - DNA, 25 bp, Homo sapien
catcttgggatgtttaatcagacat

SEQ ID NO: 2999135 - DNA, 25 bp, Homo sapien
gtttaaatcctagttcagccattta

SEQ ID NO: 2999136 - DNA, 25 bp, Homo sapien
tgatgtgattctggccaggttcagt

SEQ ID NO: 2999137 - DNA, 25 bp, Homo sapien
tgcaaagtcgcccaaaactcagtgg

SEQ ID NO: 2999138 - DNA, 25 bp, Homo sapien
tccccgctctgtcgatgaggaaacg

SEQ ID NO: 2999139 - DNA, 25 bp, Homo sapien
taagacacttggagcgttaagacac

SEQ ID NO: 2999140 - DNA, 25 bp, Homo sapien
acttgctcaagaacgcagctgccgt

SEQ ID NO: 2999141 - DNA, 25 bp, Homo sapien
ctcccctccgagaactcgaacgcgg

SEQ ID NO: 2999142 - DNA, 25 bp, Homo sapien
cgcggcgcgggacgcacggcacgat

SEQ ID NO: 2999143 - DNA, 25 bp, Homo sapien
acggcacgatgggagacgcaggagc

SEQ ID NO: 2999144 - DNA, 25 bp, Homo sapien
ctccgagaactcgaacgcggcgcgg

SEQ ID NO: 2999145 - DNA, 25 bp, Homo sapien
gatcctagacgctttttgacggctg

SEQ ID NO: 2999146 - DNA, 25 bp, Homo sapien
tccccagaaaatgcgccgtgtgagc

SEQ ID NO: 2999147 - DNA, 25 bp, Homo sapien
cccatgtgccaagtggagttcgagc

SEQ ID NO: 2999148 - DNA, 25 bp, Homo sapien
tggtctacggcttgtacaaacaggc

SEQ ID NO: 2999149 - DNA, 25 bp, Homo sapien
gataagctacaagacagaaggccac

SEQ ID NO: 2999150 - DNA, 25 bp, Homo sapien
catcttgctccaaaatgtggtgaca

SEQ ID NO: 2999151 - DNA, 25 bp, Homo sapien
tgagagccacactgtagaacagcag

SEQ ID NO: 2999152 - DNA, 25 bp, Homo sapien
taactgtggaccaggtgagagccac

SEQ ID NO: 2999153 - DNA, 25 bp, Homo sapien
ctgcagaaagccacgatggtgcccc

SEQ ID NO: 2999154 - DNA, 25 bp, Homo sapien
aaacaacagcttgcagcctgaacaa

SEQ ID NO: 2999155 - DNA, 25 bp, Homo sapien
caacgcagtgagacggtcgctacaa

SEQ ID NO: 2999156 - DNA, 25 bp, Homo sapien
caaaagatcaaaacgttggctgggt

SEQ ID NO: 2999157 - DNA, 25 bp, Homo sapien
caatataattccatttcgagtgatt

SEQ ID NO: 2999158 - DNA, 25 bp, Homo sapien
tttattcaatgaatacacaatataa

SEQ ID NO: 2999159 - DNA, 25 bp, Homo sapien
cgagtgattaaaacctatttgttgt

SEQ ID NO: 2999160 - DNA, 25 bp, Homo sapien
tataattccatttcgagtgattaaa

SEQ ID NO: 2999161 - DNA, 25 bp, Homo sapien
tatacacagaaagaagctcgcacag

SEQ ID NO: 2999162 - DNA, 25 bp, Homo sapien
tgggaatggcaccacgacaaggcat

SEQ ID NO: 2999163 - DNA, 25 bp, Homo sapien
caatagaagagcgtatcgtcaggcg

SEQ ID NO: 2999164 - DNA, 25 bp, Homo sapien
tatatacagaatgcgcagtcccagc

SEQ ID NO: 2999165 - DNA, 25 bp, Homo sapien
acgtcaggcctcacaggtgctgggc

SEQ ID NO: 2999166 - DNA, 25 bp, Homo sapien
tgctgggcaggaatcacagaggctt

SEQ ID NO: 2999167 - DNA, 25 bp, Homo sapien
ggcaggaatcacagaggcttgctct

SEQ ID NO: 2999168 - DNA, 25 bp, Homo sapien
ggcttgctctgcatcatgtcttccg

SEQ ID NO: 2999169 - DNA, 25 bp, Homo sapien
tgaagctttgggtttattgtgtttg

SEQ ID NO: 2999170 - DNA, 25 bp, Homo sapien
accactcgtcacttttatctgctgc

SEQ ID NO: 2999171 - DNA, 25 bp, Homo sapien
tttggcaaaccactcgtcactttta

SEQ ID NO: 2999172 - DNA, 25 bp, Homo sapien
gcaaaccactcgtcacttttatctg

SEQ ID NO: 2999173 - DNA, 25 bp, Homo sapien
gcgcccggctgaacctaagaaagct

SEQ ID NO: 2999174 - DNA, 25 bp, Homo sapien
tcagagggtagagaatgtccaaaaa

SEQ ID NO: 2999175 - DNA, 25 bp, Homo sapien
gctaatataaccagttcagtgggac

SEQ ID NO: 2999176 - DNA, 25 bp, Homo sapien
gcttttaagtgttgaaggacaagta

SEQ ID NO: 2999177 - DNA, 25 bp, Homo sapien
tgcagcccgggaacatagattcagg

SEQ ID NO: 2999178 - DNA, 25 bp, Homo sapien
tcaaggtaagagtcacgtaaggctc

SEQ ID NO: 2999179 - DNA, 25 bp, Homo sapien
catctgggccaagcttgaagactgc

SEQ ID NO: 2999180 - DNA, 25 bp, Homo sapien
tactggacctctcgtggacaaacga

SEQ ID NO: 2999181 - DNA, 25 bp, Homo sapien
tgaaggtgccaactcactggagatg

SEQ ID NO: 2999182 - DNA, 25 bp, Homo sapien
aaagccatggtgagtaaaagcagcc

SEQ ID NO: 2999183 - DNA, 25 bp, Homo sapien
tatgaagtccaagaacgaactcacc

SEQ ID NO: 2999184 - DNA, 25 bp, Homo sapien
gaatagcagctgatctgggagatga

SEQ ID NO: 2999185 - DNA, 25 bp, Homo sapien
ggagttcatcaatggttcacatcta

SEQ ID NO: 2999186 - DNA, 25 bp, Homo sapien
aaaaatggcaggatcgctaacagca

SEQ ID NO: 2999187 - DNA, 25 bp, Homo sapien
agcaggagttcatcaatggttcaca

SEQ ID NO: 2999188 - DNA, 25 bp, Homo sapien
caggatcgctaacagcagaggagaa

SEQ ID NO: 2999189 - DNA, 25 bp, Homo sapien
gctgagaggatgacagattctactt

SEQ ID NO: 2999190 - DNA, 25 bp, Homo sapien
caactgtttaaggtcagtcacagag

SEQ ID NO: 2999191 - DNA, 25 bp, Homo sapien
taattaaattaagagcgaggaggaa

SEQ ID NO: 2999192 - DNA, 25 bp, Homo sapien
gaagagtctggcaaatttgtcagct

SEQ ID NO: 2999193 - DNA, 25 bp, Homo sapien
tcttagaaagttctcgaaatgcttc

SEQ ID NO: 2999194 - DNA, 25 bp, Homo sapien
tcatccccgacaaagcaaatttcat

SEQ ID NO: 2999195 - DNA, 25 bp, Homo sapien
tcgaaatgcttcatccccgacaaag

SEQ ID NO: 2999196 - DNA, 25 bp, Homo sapien
aagttctcgaaatgcttcatccccg

SEQ ID NO: 2999197 - DNA, 25 bp, Homo sapien
gaatgaccacctgtactgttgcttt

SEQ ID NO: 2999198 - DNA, 25 bp, Homo sapien
cccttttcatcaagtcttctaagtc

SEQ ID NO: 2999199 - DNA, 25 bp, Homo sapien
gctcaccaggggagtcagaatcttc

SEQ ID NO: 2999200 - DNA, 25 bp, Homo sapien
agggtcggccagaatgaccacctgt

SEQ ID NO: 2999201 - DNA, 25 bp, Homo sapien
aaaacagaggcaacgtgagccaggg

SEQ ID NO: 2999202 - DNA, 25 bp, Homo sapien
caggggtcacacactactcaggaca

SEQ ID NO: 2999203 - DNA, 25 bp, Homo sapien
tactcaggacacggccctcgtcagt

SEQ ID NO: 2999204 - DNA, 25 bp, Homo sapien
ggaaaacagaggcaacgtgagccag

SEQ ID NO: 2999205 - DNA, 25 bp, Homo sapien
gctagtcagaaagctcaaacgatct

SEQ ID NO: 2999206 - DNA, 25 bp, Homo sapien
aactgctgaacttgatactaaagcc

SEQ ID NO: 2999207 - DNA, 25 bp, Homo sapien
tcagataccataaagaaccaaggcg

SEQ ID NO: 2999208 - DNA, 25 bp, Homo sapien
caaacgatctggtatcaagcgttac

SEQ ID NO: 2999209 - DNA, 25 bp, Homo sapien
ggcaagagaaggcaattcttccaaa

SEQ ID NO: 2999210 - DNA, 25 bp, Homo sapien
catggtccaccccacccttgacgcc

SEQ ID NO: 2999211 - DNA, 25 bp, Homo sapien
tctgggggcaagagaaggcaattct

SEQ ID NO: 2999212 - DNA, 25 bp, Homo sapien
tccaaaagctgctgcatggtccacc

SEQ ID NO: 2999213 - DNA, 25 bp, Homo sapien
gaatcactgtgaagaaactatggga

SEQ ID NO: 2999214 - DNA, 25 bp, Homo sapien
gactaaatcgtgctcaaacgctggg

SEQ ID NO: 2999215 - DNA, 25 bp, Homo sapien
tatccttctagaagcactgcacgca

SEQ ID NO: 2999216 - DNA, 25 bp, Homo sapien
ccacttctgaagagatatatcccca

SEQ ID NO: 2999217 - DNA, 25 bp, Homo sapien
tggttatcagcatagcccagcaaag

SEQ ID NO: 2999218 - DNA, 25 bp, Homo sapien
ctggttatcagcatagcccagcaaa

SEQ ID NO: 2999219 - DNA, 25 bp, Homo sapien
ggacttttgaagatcagacactgct

SEQ ID NO: 2999220 - DNA, 25 bp, Homo sapien
tacaccagtagttcaaggacttttg

SEQ ID NO: 2999221 - DNA, 25 bp, Homo sapien
tcccagtagattacaccagtagttc

SEQ ID NO: 2999222 - DNA, 25 bp, Homo sapien
cactgctagagttacttttaataca

SEQ ID NO: 2999223 - DNA, 25 bp, Homo sapien
gatgcctttagacagaggcttttac

SEQ ID NO: 2999224 - DNA, 25 bp, Homo sapien
gcttttactggttctggtataatta

SEQ ID NO: 2999225 - DNA, 25 bp, Homo sapien
tttagacagaggcttttactggttc

SEQ ID NO: 2999226 - DNA, 25 bp, Homo sapien
aaagatgcctttagacagaggcttt

SEQ ID NO: 2999227 - DNA, 25 bp, Homo sapien
actgaggcagactgcgattctgcaa

SEQ ID NO: 2999228 - DNA, 25 bp, Homo sapien
tgcaaatagaacttatatcctcccg

SEQ ID NO: 2999229 - DNA, 25 bp, Homo sapien
tctgcaacttccgtcagtggccact

SEQ ID NO: 2999230 - DNA, 25 bp, Homo sapien
gcctggctagaagcgagcgtgattc

SEQ ID NO: 2999231 - DNA, 25 bp, Homo sapien
tcaggcccaaatcccaccattgttt

SEQ ID NO: 2999232 - DNA, 25 bp, Homo sapien
agtctccgacgccataattgtaagt

SEQ ID NO: 2999233 - DNA, 25 bp, Homo sapien
attgccaagcttgtagtctccgacg

SEQ ID NO: 2999234 - DNA, 25 bp, Homo sapien
tcagttctgcgacaaaatgatcatc

SEQ ID NO: 2999235 - DNA, 25 bp, Homo sapien
tatccagcatctacctgaaggaaag

SEQ ID NO: 2999236 - DNA, 25 bp, Homo sapien
aaaaagatactggaaagccgctgct

SEQ ID NO: 2999237 - DNA, 25 bp, Homo sapien
tgtgggcagtgctcatgggacccta

SEQ ID NO: 2999238 - DNA, 25 bp, Homo sapien
tactaagcttaagagatggacgggc

SEQ ID NO: 2999239 - DNA, 25 bp, Homo sapien
aactgtcttctgttatccgggtgta

SEQ ID NO: 2999240 - DNA, 25 bp, Homo sapien
ctgtcttctgttatccgggtgtagt

SEQ ID NO: 2999241 - DNA, 25 bp, Homo sapien
gtcttctgttatccgggtgtagtca

SEQ ID NO: 2999242 - DNA, 25 bp, Homo sapien
tctgttatccgggtgtagtcagagc

SEQ ID NO: 2999243 - DNA, 25 bp, Homo sapien
ggagattttaagaaacaaggtatca

SEQ ID NO: 2999244 - DNA, 25 bp, Homo sapien
agattttaagaaacaaggtatcata

SEQ ID NO: 2999245 - DNA, 25 bp, Homo sapien
gagattttaagaaacaaggtatcat

SEQ ID NO: 2999246 - DNA, 25 bp, Homo sapien
gattttaagaaacaaggtatcatac

SEQ ID NO: 2999247 - DNA, 25 bp, Homo sapien
cttcttcaaattcctcatgccgcag

SEQ ID NO: 2999248 - DNA, 25 bp, Homo sapien
ccattacaggcagctttgcagcctt

SEQ ID NO: 2999249 - DNA, 25 bp, Homo sapien
agccttcttcaaattcctcatgccg

SEQ ID NO: 2999250 - DNA, 25 bp, Homo sapien
cttcaaattcctcatgccgcagaac

SEQ ID NO: 2999251 - DNA, 25 bp, Homo sapien
tttagaataaattgtgaagtgttgc

SEQ ID NO: 2999252 - DNA, 25 bp, Homo sapien
ctgctcacagcgtctttagcacaga

SEQ ID NO: 2999253 - DNA, 25 bp, Homo sapien
tgttgctagtactgctcacagcgtc

SEQ ID NO: 2999254 - DNA, 25 bp, Homo sapien
gtgaagtgttgctagtactgctcac

SEQ ID NO: 2999255 - DNA, 25 bp, Homo sapien
tctgaatacgctgattttatctaca

SEQ ID NO: 2999256 - DNA, 25 bp, Homo sapien
cagagactgagtatccgaaacggac

SEQ ID NO: 2999257 - DNA, 25 bp, Homo sapien
gcagaactctgaatacgctgatttt

SEQ ID NO: 2999258 - DNA, 25 bp, Homo sapien
cagaccagccttgctagaagcagaa

SEQ ID NO: 2999259 - DNA, 25 bp, Homo sapien
gactaatcgtgttaggcccttctcc

SEQ ID NO: 2999260 - DNA, 25 bp, Homo sapien
tccggtagacggtaagctccacaag

SEQ ID NO: 2999261 - DNA, 25 bp, Homo sapien
ggctcaataaacgtttacgagtggc

SEQ ID NO: 2999262 - DNA, 25 bp, Homo sapien
taaatgaaaggacgtgcgtgggcac

SEQ ID NO: 2999263 - DNA, 25 bp, Homo sapien
ccctccctccgccagggccggctcg

SEQ ID NO: 2999264 - DNA, 25 bp, Homo sapien
ttaggttcacgacacacccattttc

SEQ ID NO: 2999265 - DNA, 25 bp, Homo sapien
gacaccctccggcttaggttcacga

SEQ ID NO: 2999266 - DNA, 25 bp, Homo sapien
cggcttaggttcacgacacacccat

SEQ ID NO: 2999267 - DNA, 25 bp, Homo sapien
ccagcccctgtcggccccggcctgc

SEQ ID NO: 2999268 - DNA, 25 bp, Homo sapien
cagcccctgtcggccccggcctgca

SEQ ID NO: 2999269 - DNA, 25 bp, Homo sapien
agcccctgtcggccccggcctgcac

SEQ ID NO: 2999270 - DNA, 25 bp, Homo sapien
tagaaacgcgccgtctggaagcggt

SEQ ID NO: 2999271 - DNA, 25 bp, Homo sapien
ttcatccccaggacgtcccgataga

SEQ ID NO: 2999272 - DNA, 25 bp, Homo sapien
agtgcagagctctgcgagcagccat

SEQ ID NO: 2999273 - DNA, 25 bp, Homo sapien
gtttcccactttgaatacgaagtgc

SEQ ID NO: 2999274 - DNA, 25 bp, Homo sapien
tgaaagtggtgtttccttccggaga

SEQ ID NO: 2999275 - DNA, 25 bp, Homo sapien
gagaaacaaccgctcgaggagtccg

SEQ ID NO: 2999276 - DNA, 25 bp, Homo sapien
gagtctgggcttcgctacgataaag

SEQ ID NO: 2999277 - DNA, 25 bp, Homo sapien
cagtgcccaggagcaacgagagaaa

SEQ ID NO: 2999278 - DNA, 25 bp, Homo sapien
tcatttcagacgctctcaaggctgg

SEQ ID NO: 2999279 - DNA, 25 bp, Homo sapien
ggctggagctgtgccaaaaatgttc

SEQ ID NO: 2999280 - DNA, 25 bp, Homo sapien
tagccgtctagaatacctaaaggag

SEQ ID NO: 2999281 - DNA, 25 bp, Homo sapien
ccagtcgataagctgaaaggtgtca

SEQ ID NO: 2999282 - DNA, 25 bp, Homo sapien
gaataatgggttagtgattacccag

SEQ ID NO: 2999283 - DNA, 25 bp, Homo sapien
tgaggatatcaaggattggtccgac

SEQ ID NO: 2999284 - DNA, 25 bp, Homo sapien
ggttagtgattacccagtgtatctt

SEQ ID NO: 2999285 - DNA, 25 bp, Homo sapien
tcgtaacgccacaaggaataatggg

SEQ ID NO: 2999286 - DNA, 25 bp, Homo sapien
gacaggagttaccactgaggacgca

SEQ ID NO: 2999287 - DNA, 25 bp, Homo sapien
gaagatgtagaaaccggagccagtc

SEQ ID NO: 2999288 - DNA, 25 bp, Homo sapien
gacaataggtgacccacgtggctct

SEQ ID NO: 2999289 - DNA, 25 bp, Homo sapien
taataaagctagtgaccatggctgg

SEQ ID NO: 2999290 - DNA, 25 bp, Homo sapien
tattgctcaggatgactgaagtctc

SEQ ID NO: 2999291 - DNA, 25 bp, Homo sapien
catgttacattcgagcagctgagac

SEQ ID NO: 2999292 - DNA, 25 bp, Homo sapien
tgaagtctcaactacggaaccatgt

SEQ ID NO: 2999293 - DNA, 25 bp, Homo sapien
tgctccacggctgagagtgacagag

SEQ ID NO: 2999294 - DNA, 25 bp, Homo sapien
ttaaataacgtctcaggaggccgga

SEQ ID NO: 2999295 - DNA, 25 bp, Homo sapien
cagtgtcaacagctcattagcgggt

SEQ ID NO: 2999296 - DNA, 25 bp, Homo sapien
tgaatgaggctaaaacgcttggccg

SEQ ID NO: 2999297 - DNA, 25 bp, Homo sapien
tcaggtcagcccaagtaagaggcca

SEQ ID NO: 2999298 - DNA, 25 bp, Homo sapien
tcaggcaggttggtgtaatctcgca

SEQ ID NO: 2999299 - DNA, 25 bp, Homo sapien
ggaagtcattcacaaaggcctccac

SEQ ID NO: 2999300 - DNA, 25 bp, Homo sapien
tccggtttgagcttctctgctagga

SEQ ID NO: 2999301 - DNA, 25 bp, Homo sapien
taatctcgcagggagtcagtcatgt

SEQ ID NO: 2999302 - DNA, 25 bp, Homo sapien
ccaccgtgccagtctagaaatgtca

SEQ ID NO: 2999303 - DNA, 25 bp, Homo sapien
tgtcatagcctctgattgtttattt

SEQ ID NO: 2999304 - DNA, 25 bp, Homo sapien
caatctggacttcaactctggaatg

SEQ ID NO: 2999305 - DNA, 25 bp, Homo sapien
gtaaccaactgtcaatgatttgcag

SEQ ID NO: 2999306 - DNA, 25 bp, Homo sapien
ccgcaggtataagcagtagccccag

SEQ ID NO: 2999307 - DNA, 25 bp, Homo sapien
ggatccctctgatgagatcggccca

SEQ ID NO: 2999308 - DNA, 25 bp, Homo sapien
ggatcacactttgcagccacggcca

SEQ ID NO: 2999309 - DNA, 25 bp, Homo sapien
cggaggcacgaacccagcattttgt

SEQ ID NO: 2999310 - DNA, 25 bp, Homo sapien
ttggccgcctcggactctccgtcat

SEQ ID NO: 2999311 - DNA, 25 bp, Homo sapien
tacgaagaacagaaggggtgcctcc

SEQ ID NO: 2999312 - DNA, 25 bp, Homo sapien
ctccccggctacgaagaacagaagg

SEQ ID NO: 2999313 - DNA, 25 bp, Homo sapien
gcctcggactctccgtcatcctcag

SEQ ID NO: 2999314 - DNA, 25 bp, Homo sapien
tcgccctgcgggtccagcatgatga

SEQ ID NO: 2999315 - DNA, 25 bp, Homo sapien
cggcagtcctcgtcgttcagcacct

SEQ ID NO: 2999316 - DNA, 25 bp, Homo sapien
cctcgttaagctgcgcggcgttgga

SEQ ID NO: 2999317 - DNA, 25 bp, Homo sapien
agtcggagagctccagcacgggctt

SEQ ID NO: 2999318 - DNA, 25 bp, Homo sapien
atggaaccccctcgggtcagcctgt

SEQ ID NO: 2999319 - DNA, 25 bp, Homo sapien
gtggagcccaccgaggacctggtac

SEQ ID NO: 2999320 - DNA, 25 bp, Homo sapien
caccgaggacctggtacaggctcac

SEQ ID NO: 2999321 - DNA, 25 bp, Homo sapien
tgaagaggccaggtctaaagtcaca

SEQ ID NO: 2999322 - DNA, 25 bp, Homo sapien
accacagggacagctggccgcacag

SEQ ID NO: 2999323 - DNA, 25 bp, Homo sapien
ggaccaccacagggacagctggccg

SEQ ID NO: 2999324 - DNA, 25 bp, Homo sapien
ggccagggaccaccacagggacagc

SEQ ID NO: 2999325 - DNA, 25 bp, Homo sapien
acagggacagctggccgcacaggag

SEQ ID NO: 2999326 - DNA, 25 bp, Homo sapien
aaattgggcaattatgagcactggg

SEQ ID NO: 2999327 - DNA, 25 bp, Homo sapien
tgtgccccggcgtgggatgccgagt

SEQ ID NO: 2999328 - DNA, 25 bp, Homo sapien
tgtttctgaaattgggcaattatga

SEQ ID NO: 2999329 - DNA, 25 bp, Homo sapien
tgagcactggggtaaaccagagccc

SEQ ID NO: 2999330 - DNA, 25 bp, Homo sapien
ctctccgagggcctcctccaagcgg

SEQ ID NO: 2999331 - DNA, 25 bp, Homo sapien
cctccaagcggcctttttcctgact

SEQ ID NO: 2999332 - DNA, 25 bp, Homo sapien
tctccgagggcctcctccaagcggc

SEQ ID NO: 2999333 - DNA, 25 bp, Homo sapien
ccaagcggcctttttcctgactgtg

SEQ ID NO: 2999334 - DNA, 25 bp, Homo sapien
ccgaggaacggctcctcctaagacg

SEQ ID NO: 2999335 - DNA, 25 bp, Homo sapien
gaacggctcctcctaagacgaggtg

SEQ ID NO: 2999336 - DNA, 25 bp, Homo sapien
ctcctaagacgaggtgtgccgggac

SEQ ID NO: 2999337 - DNA, 25 bp, Homo sapien
gacgggccgtgttgggccgcgtgac

SEQ ID NO: 2999338 - DNA, 25 bp, Homo sapien
ggcccaaggaagccactcgtgttcg

SEQ ID NO: 2999339 - DNA, 25 bp, Homo sapien
caaggaagccactcgtgttcggccc

SEQ ID NO: 2999340 - DNA, 25 bp, Homo sapien
ccaaggaagccactcgtgttcggcc

SEQ ID NO: 2999341 - DNA, 25 bp, Homo sapien
gcccaaggaagccactcgtgttcgg

SEQ ID NO: 2999342 - DNA, 25 bp, Homo sapien
agaaggctgagaccacagccaccat

SEQ ID NO: 2999343 - DNA, 25 bp, Homo sapien
gggggagaaggctgagaccacagcc

SEQ ID NO: 2999344 - DNA, 25 bp, Homo sapien
gggagaaggctgagaccacagccac

SEQ ID NO: 2999345 - DNA, 25 bp, Homo sapien
tcctgggggagaaggctgagaccac

SEQ ID NO: 2999346 - DNA, 25 bp, Homo sapien
aagtattggctattattataaacca

SEQ ID NO: 2999347 - DNA, 25 bp, Homo sapien
acacttattagcagagtacctggta

SEQ ID NO: 2999348 - DNA, 25 bp, Homo sapien
cagtgtaaaacacttattagcagag

SEQ ID NO: 2999349 - DNA, 25 bp, Homo sapien
cagagtacctggtatattgatattg

SEQ ID NO: 2999350 - DNA, 25 bp, Homo sapien
aactgattatttggctcgtgagaag

SEQ ID NO: 2999351 - DNA, 25 bp, Homo sapien
gattatttggctcgtgagaaggcag

SEQ ID NO: 2999352 - DNA, 25 bp, Homo sapien
ttggctcgtgagaaggcagacatac

SEQ ID NO: 2999353 - DNA, 25 bp, Homo sapien
tatttggctcgtgagaaggcagaca

SEQ ID NO: 2999354 - DNA, 25 bp, Homo sapien
agtcctccgtgatgggctggaagaa

SEQ ID NO: 2999355 - DNA, 25 bp, Homo sapien
tcaacagagtcctccgtgatgggct

SEQ ID NO: 2999356 - DNA, 25 bp, Homo sapien
gaaaactgggagcttgctctagtga

SEQ ID NO: 2999357 - DNA, 25 bp, Homo sapien
tgctctagtgagatcaacagagtcc

SEQ ID NO: 2999358 - DNA, 25 bp, Homo sapien
ccggccgcccggcacctctagctgc

SEQ ID NO: 2999359 - DNA, 25 bp, Homo sapien
acagccctcaggccgtccgccctcc

SEQ ID NO: 2999360 - DNA, 25 bp, Homo sapien
gcccggcacctctagctgcttccgc

SEQ ID NO: 2999361 - DNA, 25 bp, Homo sapien
ggccgcccggcacctctagctgctt

SEQ ID NO: 2999362 - DNA, 25 bp, Homo sapien
tctaagactagagagaagccagaac

SEQ ID NO: 2999363 - DNA, 25 bp, Homo sapien
tccttcagaggtatttcggcccagc

SEQ ID NO: 2999364 - DNA, 25 bp, Homo sapien
aagaaaggcaaactcccatcaaggg

SEQ ID NO: 2999365 - DNA, 25 bp, Homo sapien
caaagcttatgaacgaatgcacagt

SEQ ID NO: 2999366 - DNA, 25 bp, Homo sapien
caagggcctctggttgcaactggaa

SEQ ID NO: 2999367 - DNA, 25 bp, Homo sapien
ttctgcaagaaaacgtgtcggccgg

SEQ ID NO: 2999368 - DNA, 25 bp, Homo sapien
gttacaatcaggcagtcacgtcgct

SEQ ID NO: 2999369 - DNA, 25 bp, Homo sapien
tagacctatacgctctgcaaagggc

SEQ ID NO: 2999370 - DNA, 25 bp, Homo sapien
aggtttccaggagccacacggagcc

SEQ ID NO: 2999371 - DNA, 25 bp, Homo sapien
aggagccacacggagccggggcctg

SEQ ID NO: 2999372 - DNA, 25 bp, Homo sapien
tcaggtgagcaggtttccaggagcc

SEQ ID NO: 2999373 - DNA, 25 bp, Homo sapien
agcaggtttccaggagccacacgga

SEQ ID NO: 2999374 - DNA, 25 bp, Homo sapien
ccagggcatctcactgaagtactgt

SEQ ID NO: 2999375 - DNA, 25 bp, Homo sapien
agtactgtttgaaggactcctccga

SEQ ID NO: 2999376 - DNA, 25 bp, Homo sapien
cttggattccgtacagccggttgag

SEQ ID NO: 2999377 - DNA, 25 bp, Homo sapien
accgccgggcctcatccgtgtaggg

SEQ ID NO: 2999378 - DNA, 25 bp, Homo sapien
tgatcttccggtaggattccaccag

SEQ ID NO: 2999379 - DNA, 25 bp, Homo sapien
tgtctgcactaacgaagatgatctc

SEQ ID NO: 2999380 - DNA, 25 bp, Homo sapien
tgatctcgaagttctggcctgcctc

SEQ ID NO: 2999381 - DNA, 25 bp, Homo sapien
aggacccgggtgaggcttcggcagg

SEQ ID NO: 2999382 - DNA, 25 bp, Homo sapien
ccaatgtgcggagaaatagacgccc

SEQ ID NO: 2999383 - DNA, 25 bp, Homo sapien
cggagaaatagacgcccacgtgaga

SEQ ID NO: 2999384 - DNA, 25 bp, Homo sapien
aaatagacgcccacgtgagacccct

SEQ ID NO: 2999385 - DNA, 25 bp, Homo sapien
tgtttctaagcaagggccctgcaat

SEQ ID NO: 2999386 - DNA, 25 bp, Homo sapien
aagaggaccatatgcacgggctgag

SEQ ID NO: 2999387 - DNA, 25 bp, Homo sapien
caagcggagcttcttacggcagagt

SEQ ID NO: 2999388 - DNA, 25 bp, Homo sapien
tccaccggtgggacggagattagcc

SEQ ID NO: 2999389 - DNA, 25 bp, Homo sapien
tcagcctgcctctaactgtgaaggg

SEQ ID NO: 2999390 - DNA, 25 bp, Homo sapien
tctgggtcatctcggatcaccagca

SEQ ID NO: 2999391 - DNA, 25 bp, Homo sapien
gcgtcgaggaatattagtgatggaa

SEQ ID NO: 2999392 - DNA, 25 bp, Homo sapien
gatggaatgttggaaattcggtatt

SEQ ID NO: 2999393 - DNA, 25 bp, Homo sapien
gcagcccgttcctgcacacaacctt

SEQ ID NO: 2999394 - DNA, 25 bp, Homo sapien
ccaggtccctgcacttgaaatatca

SEQ ID NO: 2999395 - DNA, 25 bp, Homo sapien
acttgaaatatcacagtcgtcgtta

SEQ ID NO: 2999396 - DNA, 25 bp, Homo sapien
cttgaaatatcacagtcgtcgttac

SEQ ID NO: 2999397 - DNA, 25 bp, Homo sapien
ggtccctgcacttgaaatatcacag

SEQ ID NO: 2999398 - DNA, 25 bp, Homo sapien
cctcggctctcggtgccgcgtaaaa

SEQ ID NO: 2999399 - DNA, 25 bp, Homo sapien
aaacacgcttcagtctactgtcaga

SEQ ID NO: 2999400 - DNA, 25 bp, Homo sapien
tactgtcagattcttgaggttggct

SEQ ID NO: 2999401 - DNA, 25 bp, Homo sapien
ttggctgtgcacacggtcagaggtc

SEQ ID NO: 2999402 - DNA, 25 bp, Homo sapien
gatgtgtaggagatacgctgttgtc

SEQ ID NO: 2999403 - DNA, 25 bp, Homo sapien
tacgctgttgtcagcaccctgtgct

SEQ ID NO: 2999404 - DNA, 25 bp, Homo sapien
gtgctttccccgctatgttttgtaa

SEQ ID NO: 2999405 - DNA, 25 bp, Homo sapien
ctttccccgctatgttttgtaactg

SEQ ID NO: 2999406 - DNA, 25 bp, Homo sapien
gaggctgactgcgaaagtctgagta

SEQ ID NO: 2999407 - DNA, 25 bp, Homo sapien
actgcgaaagtctgagtagatgaga

SEQ ID NO: 2999408 - DNA, 25 bp, Homo sapien
gatgagagaaccaggggcggcggct

SEQ ID NO: 2999409 - DNA, 25 bp, Homo sapien
cccaagagcccgtgtggaggctgac

SEQ ID NO: 2999410 - DNA, 25 bp, Homo sapien
gcaggtccccccgaccacagagcat

SEQ ID NO: 2999411 - DNA, 25 bp, Homo sapien
agcaggtccccccgaccacagagca

SEQ ID NO: 2999412 - DNA, 25 bp, Homo sapien
caggtccccccgaccacagagcatc

SEQ ID NO: 2999413 - DNA, 25 bp, Homo sapien
aggtccccccgaccacagagcatct

SEQ ID NO: 2999414 - DNA, 25 bp, Homo sapien
acagcgcatctcacgccggcgagca

SEQ ID NO: 2999415 - DNA, 25 bp, Homo sapien
gcgcatctcacgccggcgagcaggt

SEQ ID NO: 2999416 - DNA, 25 bp, Homo sapien
tctcacgccggcgagcaggtccacc

SEQ ID NO: 2999417 - DNA, 25 bp, Homo sapien
ctgaccacagcgcatctcacgccgg

SEQ ID NO: 2999418 - DNA, 25 bp, Homo sapien
ctgcagcgtctttgggagatgggcc

SEQ ID NO: 2999419 - DNA, 25 bp, Homo sapien
tgcagcgtctttgggagatgggcca

SEQ ID NO: 2999420 - DNA, 25 bp, Homo sapien
gcagcgtctttgggagatgggccat

SEQ ID NO: 2999421 - DNA, 25 bp, Homo sapien
tcatctcgaaactttccgcagcttc

SEQ ID NO: 2999422 - DNA, 25 bp, Homo sapien
tgaggaatgtgactacgtagcgcct

SEQ ID NO: 2999423 - DNA, 25 bp, Homo sapien
aggaatgtgactacgtagcgcctac

SEQ ID NO: 2999424 - DNA, 25 bp, Homo sapien
agatgaggaatgtgactacgtagcg

SEQ ID NO: 2999425 - DNA, 25 bp, Homo sapien
taaattccaagtcggcagggtgagc

SEQ ID NO: 2999426 - DNA, 25 bp, Homo sapien
cagggtgagcttttccgtgtccgct

SEQ ID NO: 2999427 - DNA, 25 bp, Homo sapien
tattataaattccaagtcggcaggg

SEQ ID NO: 2999428 - DNA, 25 bp, Homo sapien
atgctattataaattccaagtcggc

SEQ ID NO: 2999429 - DNA, 25 bp, Homo sapien
gaagagcaggaagtgtggttggtgg

SEQ ID NO: 2999430 - DNA, 25 bp, Homo sapien
cagaagagcaggaagtgtggttggt

SEQ ID NO: 2999431 - DNA, 25 bp, Homo sapien
agaagagcaggaagtgtggttggtg

SEQ ID NO: 2999432 - DNA, 25 bp, Homo sapien
gaccccccgtgcccacagctggcat

SEQ ID NO: 2999433 - DNA, 25 bp, Homo sapien
cctgggaccccccgtgcccacagct

SEQ ID NO: 2999434 - DNA, 25 bp, Homo sapien
cacaggatccctgggaccccccgtg

SEQ ID NO: 2999435 - DNA, 25 bp, Homo sapien
gggtactctgacttttcataggtga

SEQ ID NO: 2999436 - DNA, 25 bp, Homo sapien
ctccacggggtactctgacttttca

SEQ ID NO: 2999437 - DNA, 25 bp, Homo sapien
cacggggtactctgacttttcatag

SEQ ID NO: 2999438 - DNA, 25 bp, Homo sapien
tccctgtcctccacggggtactctg

SEQ ID NO: 2999439 - DNA, 25 bp, Homo sapien
ggaaacacgttaaccattgctcagt

SEQ ID NO: 2999440 - DNA, 25 bp, Homo sapien
cagtttcggtgaaaggacacagtta

SEQ ID NO: 2999441 - DNA, 25 bp, Homo sapien
gaggtttatgtcaggctcatacagt

SEQ ID NO: 2999442 - DNA, 25 bp, Homo sapien
ctgagtgaggaaacacgttaaccat

SEQ ID NO: 2999443 - DNA, 25 bp, Homo sapien
aagggacacgtctgccattgctcgg

SEQ ID NO: 2999444 - DNA, 25 bp, Homo sapien
tgccattgctcggttccggtgaagg

SEQ ID NO: 2999445 - DNA, 25 bp, Homo sapien
ttccggtgaagggacacgtctgcca

SEQ ID NO: 2999446 - DNA, 25 bp, Homo sapien
tgctgggttccggtgaagggacacg

SEQ ID NO: 2999447 - DNA, 25 bp, Homo sapien
ggctttttaccagactcaccctgag

SEQ ID NO: 2999448 - DNA, 25 bp, Homo sapien
gacaccagcctcaacggtattaggt

SEQ ID NO: 2999449 - DNA, 25 bp, Homo sapien
aacagaatcgaggaacaaagtgggc

SEQ ID NO: 2999450 - DNA, 25 bp, Homo sapien
gataaacatcggtgagaccaacatg

SEQ ID NO: 2999451 - DNA, 25 bp, Homo sapien
caaatgatttgagcatgggtcaggg

SEQ ID NO: 2999452 - DNA, 25 bp, Homo sapien
gactaatctggtttgtgatctgaaa

SEQ ID NO: 2999453 - DNA, 25 bp, Homo sapien
aaatacatattcttagtgaaacaaa

SEQ ID NO: 2999454 - DNA, 25 bp, Homo sapien
ttaaactgctagatgtggactaatc

SEQ ID NO: 2999455 - DNA, 25 bp, Homo sapien
ccagcctcaggctgcgggtcagaac

SEQ ID NO: 2999456 - DNA, 25 bp, Homo sapien
atgtgagtggaaacagttcccagga

SEQ ID NO: 2999457 - DNA, 25 bp, Homo sapien
ctcggggttctccagggaattcttg

SEQ ID NO: 2999458 - DNA, 25 bp, Homo sapien
gcaagttctcggggttctccaggga

SEQ ID NO: 2999459 - DNA, 25 bp, Homo sapien
tcagcaagttctcggggttctccag

SEQ ID NO: 2999460 - DNA, 25 bp, Homo sapien
ggtcagcaagttctcggggttctcc

SEQ ID NO: 2999461 - DNA, 25 bp, Homo sapien
ctgatccaggagccccgacaagcga

SEQ ID NO: 2999462 - DNA, 25 bp, Homo sapien
caggagccccgacaagcgacctgag

SEQ ID NO: 2999463 - DNA, 25 bp, Homo sapien
tccaggagccccgacaagcgacctg

SEQ ID NO: 2999464 - DNA, 25 bp, Homo sapien
tgatccaggagccccgacaagcgac

SEQ ID NO: 2999465 - DNA, 25 bp, Homo sapien
agcgtgtttcatgtacgtctcccca

SEQ ID NO: 2999466 - DNA, 25 bp, Homo sapien
ctaagcgtgtttcatgtacgtctcc

SEQ ID NO: 2999467 - DNA, 25 bp, Homo sapien
taagcgtgtttcatgtacgtctccc

SEQ ID NO: 2999468 - DNA, 25 bp, Homo sapien
aagcgtgtttcatgtacgtctcccc

SEQ ID NO: 2999469 - DNA, 25 bp, Homo sapien
attctcggagattttccaaatcccg

SEQ ID NO: 2999470 - DNA, 25 bp, Homo sapien
cattctcggagattttccaaatccc

SEQ ID NO: 2999471 - DNA, 25 bp, Homo sapien
gctatttctcagttcctgcatatca

SEQ ID NO: 2999472 - DNA, 25 bp, Homo sapien
ttctcagttcctgcatatcacacac

SEQ ID NO: 2999473 - DNA, 25 bp, Homo sapien
gtgacgcctctcctaggaaagtccc

SEQ ID NO: 2999474 - DNA, 25 bp, Homo sapien
cctcctaggcctgttgcagtgacgc

SEQ ID NO: 2999475 - DNA, 25 bp, Homo sapien
aatcacggtgaaggtcctcgggaca

SEQ ID NO: 2999476 - DNA, 25 bp, Homo sapien
taacttcccgtgagatccacgagga

SEQ ID NO: 2999477 - DNA, 25 bp, Homo sapien
tcgggacatctacatcgaggcagaa

SEQ ID NO: 2999478 - DNA, 25 bp, Homo sapien
gatacttcaagtcgaaggcacgaga

SEQ ID NO: 2999479 - DNA, 25 bp, Homo sapien
taaaagcagctaacagttatgacgt

SEQ ID NO: 2999480 - DNA, 25 bp, Homo sapien
taacagttatgacgtgctcacctct

SEQ ID NO: 2999481 - DNA, 25 bp, Homo sapien
catcatttcatcgaccaccctggta

SEQ ID NO: 2999482 - DNA, 25 bp, Homo sapien
cctggtacccacaatattgaacaca

SEQ ID NO: 2999483 - DNA, 25 bp, Homo sapien
ggacgcacacgtcggaaaaagctta

SEQ ID NO: 2999484 - DNA, 25 bp, Homo sapien
tgaataaggccaaactctgtccgta

SEQ ID NO: 2999485 - DNA, 25 bp, Homo sapien
gaaggacaaaaggaaaggacgcaca

SEQ ID NO: 2999486 - DNA, 25 bp, Homo sapien
tcccaggttgtaagcgggccttgct

SEQ ID NO: 2999487 - DNA, 25 bp, Homo sapien
tgtttagcaggtgatttacccacag

SEQ ID NO: 2999488 - DNA, 25 bp, Homo sapien
tgtgcctggtctgaaatacagtaat

SEQ ID NO: 2999489 - DNA, 25 bp, Homo sapien
tacagtaatgtttggtgggcccggc

SEQ ID NO: 2999490 - DNA, 25 bp, Homo sapien
tgggcccggcctggaatatggtaat

SEQ ID NO: 2999491 - DNA, 25 bp, Homo sapien
tacagaacctacgtcgtcctcggaa

SEQ ID NO: 2999492 - DNA, 25 bp, Homo sapien
gaggacgcagtcaaacggctttcta

SEQ ID NO: 2999493 - DNA, 25 bp, Homo sapien
tcaatcttggcggaccacactggta

SEQ ID NO: 2999494 - DNA, 25 bp, Homo sapien
gcagtgcgtggctccagaacaacaa

SEQ ID NO: 2999495 - DNA, 25 bp, Homo sapien
ggaaatgggtggcatgcctcactat

SEQ ID NO: 2999496 - DNA, 25 bp, Homo sapien
taaaagtcatacatgcagactatgg

SEQ ID NO: 2999497 - DNA, 25 bp, Homo sapien
aaaagtcatacatgcagactatggg

SEQ ID NO: 2999498 - DNA, 25 bp, Homo sapien
catgcctcactatgtgatttaaaac

SEQ ID NO: 2999499 - DNA, 25 bp, Homo sapien
cgctgaattggtgacttacagtcaa

SEQ ID NO: 2999500 - DNA, 25 bp, Homo sapien
gacttacagtcaagaaattcccaag

SEQ ID NO: 2999501 - DNA, 25 bp, Homo sapien
ctggaaaagacgctgaattggtgac

SEQ ID NO: 2999502 - DNA, 25 bp, Homo sapien
tctggccaaattccaacccaaattc

SEQ ID NO: 2999503 - DNA, 25 bp, Homo sapien
tggacagagtcctcacttgctgcca

SEQ ID NO: 2999504 - DNA, 25 bp, Homo sapien
caagcggactgtctggacagagtcc

SEQ ID NO: 2999505 - DNA, 25 bp, Homo sapien
agcccagtcccaagcggactgtctg

SEQ ID NO: 2999506 - DNA, 25 bp, Homo sapien
agtcctcacttgctgccactcatta

SEQ ID NO: 2999507 - DNA, 25 bp, Homo sapien
tgctctttaaacagccgcaggactc

SEQ ID NO: 2999508 - DNA, 25 bp, Homo sapien
tgtgctctttaaacagccgcaggac

SEQ ID NO: 2999509 - DNA, 25 bp, Homo sapien
tgctccaattccttcgtatctggga

SEQ ID NO: 2999510 - DNA, 25 bp, Homo sapien
cttcgtatctgggaatcctctggca

SEQ ID NO: 2999511 - DNA, 25 bp, Homo sapien
tgggcaacttccaaacgcaatgtct

SEQ ID NO: 2999512 - DNA, 25 bp, Homo sapien
aattccactgaggtcaaaagcccct

SEQ ID NO: 2999513 - DNA, 25 bp, Homo sapien
ggtacggacggcatgcctcatctca

SEQ ID NO: 2999514 - DNA, 25 bp, Homo sapien
cagcgggctttgcaggacccttaaa

SEQ ID NO: 2999515 - DNA, 25 bp, Homo sapien
cagatcacatctccctggatttcca

SEQ ID NO: 2999516 - DNA, 25 bp, Homo sapien
agccatgaattcagatcacatctcc

SEQ ID NO: 2999517 - DNA, 25 bp, Homo sapien
gcgcagccatgaattcagatcacat

SEQ ID NO: 2999518 - DNA, 25 bp, Homo sapien
tctccctggatttccagtgaaatag

SEQ ID NO: 2999519 - DNA, 25 bp, Homo sapien
agtgaacaagattccagggtgcagc

SEQ ID NO: 2999520 - DNA, 25 bp, Homo sapien
cagggtgcagccatgaactcacatc

SEQ ID NO: 2999521 - DNA, 25 bp, Homo sapien
acagtgaacaagattccagggtgca

SEQ ID NO: 2999522 - DNA, 25 bp, Homo sapien
cagtgaacaagattccagggtgcag

SEQ ID NO: 2999523 - DNA, 25 bp, Homo sapien
cagcgaacaagattccagggcgcag

SEQ ID NO: 2999524 - DNA, 25 bp, Homo sapien
tttacagcgaacaagattccagggc

SEQ ID NO: 2999525 - DNA, 25 bp, Homo sapien
cagtgaacaagattccagggtgcag

SEQ ID NO: 2999526 - DNA, 25 bp, Homo sapien
cagcgaacaagattccagggtgcag

SEQ ID NO: 2999527 - DNA, 25 bp, Homo sapien
agcgaacaagattccagggtgcagc

SEQ ID NO: 2999528 - DNA, 25 bp, Homo sapien
cagtgaacaagattccagggtgcag

SEQ ID NO: 2999529 - DNA, 25 bp, Homo sapien
cagggtgcagccatgaactcacatc

SEQ ID NO: 2999530 - DNA, 25 bp, Homo sapien
ggtgcagccatgaattcaccaaaca

SEQ ID NO: 2999531 - DNA, 25 bp, Homo sapien
gatttacagcgaacaagattccagg

SEQ ID NO: 2999532 - DNA, 25 bp, Homo sapien
tttacagcgaacaagattccagggc

SEQ ID NO: 2999533 - DNA, 25 bp, Homo sapien
tccagtgaacaagattccagggtgc

SEQ ID NO: 2999534 - DNA, 25 bp, Homo sapien
cagcgaacaagattccagggtgcag

SEQ ID NO: 2999535 - DNA, 25 bp, Homo sapien
agtgaacaagattccagggtgcagc

SEQ ID NO: 2999536 - DNA, 25 bp, Homo sapien
cagtgaacaagattccagggtgcag

SEQ ID NO: 2999537 - DNA, 25 bp, Homo sapien
tttacagcgaacaagattccagggc

SEQ ID NO: 2999538 - DNA, 25 bp, Homo sapien
agggcgcagccatgaattcaccaca

SEQ ID NO: 2999539 - DNA, 25 bp, Homo sapien
agtgaacaagattccagggtgcagc

SEQ ID NO: 2999540 - DNA, 25 bp, Homo sapien
tccagtgaacaagattccagggtgc

SEQ ID NO: 2999541 - DNA, 25 bp, Homo sapien
tttacagcgaacaagattccagggc

SEQ ID NO: 2999542 - DNA, 25 bp, Homo sapien
acagtgaacaagattccagggtgca

SEQ ID NO: 2999543 - DNA, 25 bp, Homo sapien
cagtgaacaagattccagggtgcag

SEQ ID NO: 2999544 - DNA, 25 bp, Homo sapien
tttacagcgaacaagattccagggc

SEQ ID NO: 2999545 - DNA, 25 bp, Homo sapien
acagtgaacaagattccagggtgca

SEQ ID NO: 2999546 - DNA, 25 bp, Homo sapien
agggcgcagccatgaactcacatca

SEQ ID NO: 2999547 - DNA, 25 bp, Homo sapien
ggtgcagccatgaactcacatcaca

SEQ ID NO: 2999548 - DNA, 25 bp, Homo sapien
ggtgcagccatgaattcaccaaaca

SEQ ID NO: 2999549 - DNA, 25 bp, Homo sapien
acagtgaacaagattccagggtgca

SEQ ID NO: 2999550 - DNA, 25 bp, Homo sapien
gggtgcagccatgaactcacatcac

SEQ ID NO: 2999551 - DNA, 25 bp, Homo sapien
agtgaacaagattccagggtgcagc

SEQ ID NO: 2999552 - DNA, 25 bp, Homo sapien
acagtgaacaagattccagggtgca

SEQ ID NO: 2999553 - DNA, 25 bp, Homo sapien
cagtgaacaagattccagggtgcag

SEQ ID NO: 2999554 - DNA, 25 bp, Homo sapien
ggtgcagccatgaattcaccaaaca

SEQ ID NO: 2999555 - DNA, 25 bp, Homo sapien
cctgagcttgagttatcatgcccac

SEQ ID NO: 2999556 - DNA, 25 bp, Homo sapien
tgggtgtgctcaagacctgagcttg

SEQ ID NO: 2999557 - DNA, 25 bp, Homo sapien
tccctcttgcaagagtccgtagtgg

SEQ ID NO: 2999558 - DNA, 25 bp, Homo sapien
gttatcatgcccactaacgccctgg

SEQ ID NO: 2999559 - DNA, 25 bp, Homo sapien
caatgagctcggcacactcagtaga

SEQ ID NO: 2999560 - DNA, 25 bp, Homo sapien
acactcagtagacggagggcacccg

SEQ ID NO: 2999561 - DNA, 25 bp, Homo sapien
ggaaagcaatgagctcggcacactc

SEQ ID NO: 2999562 - DNA, 25 bp, Homo sapien
gcgggcagcaggaaccttcacctgg

SEQ ID NO: 2999563 - DNA, 25 bp, Homo sapien
agccactcgaggctttccacatagg

SEQ ID NO: 2999564 - DNA, 25 bp, Homo sapien
gccactcgaggctttccacatagga

SEQ ID NO: 2999565 - DNA, 25 bp, Homo sapien
ttacagccactcgaggctttccaca

SEQ ID NO: 2999566 - DNA, 25 bp, Homo sapien
acagccactcgaggctttccacata

SEQ ID NO: 2999567 - DNA, 25 bp, Homo sapien
aaggcttttcttgcaggaggtggct

SEQ ID NO: 2999568 - DNA, 25 bp, Homo sapien
tcacttgcacattcttctttccaga

SEQ ID NO: 2999569 - DNA, 25 bp, Homo sapien
aggtggctgccagcttgtcccttcc

SEQ ID NO: 2999570 - DNA, 25 bp, Homo sapien
tttccagaaggcttttcttgcagga

SEQ ID NO: 2999571 - DNA, 25 bp, Homo sapien
ttcagccagtacgtgtgtcagcaga

SEQ ID NO: 2999572 - DNA, 25 bp, Homo sapien
tcagccagtacgtgtgtcagcagac

SEQ ID NO: 2999573 - DNA, 25 bp, Homo sapien
gttcagccagtacgtgtgtcagcag

SEQ ID NO: 2999574 - DNA, 25 bp, Homo sapien
cagccagtacgtgtgtcagcagaca

SEQ ID NO: 2999575 - DNA, 25 bp, Homo sapien
tcagaactagagtgttccaccccag

SEQ ID NO: 2999576 - DNA, 25 bp, Homo sapien
aatgccacacttaattagccagcgg

SEQ ID NO: 2999577 - DNA, 25 bp, Homo sapien
agcgggcttcgcatcctgtgtgtga

SEQ ID NO: 2999578 - DNA, 25 bp, Homo sapien
catccaagggttgaagccgggactt

SEQ ID NO: 2999579 - DNA, 25 bp, Homo sapien
tcttgttacccaggccggagcgcag

SEQ ID NO: 2999580 - DNA, 25 bp, Homo sapien
ccggagcgcagtggcacgaatttgg

SEQ ID NO: 2999581 - DNA, 25 bp, Homo sapien
cctccgcttccagggttcaaatgat

SEQ ID NO: 2999582 - DNA, 25 bp, Homo sapien
aacctccgcttccagggttcaaatg

SEQ ID NO: 2999583 - DNA, 25 bp, Homo sapien
acagctacattcacgcctattcggg

SEQ ID NO: 2999584 - DNA, 25 bp, Homo sapien
cctattcggggctccggcggtcaca

SEQ ID NO: 2999585 - DNA, 25 bp, Homo sapien
ggcggtcacactgcgatttttccct

SEQ ID NO: 2999586 - DNA, 25 bp, Homo sapien
attgcacgtggtcccgcccaatctt

SEQ ID NO: 2999587 - DNA, 25 bp, Homo sapien
tcgacaacgatatgagataaaaccg

SEQ ID NO: 2999588 - DNA, 25 bp, Homo sapien
aaaccgtcattcactgtagaaacag

SEQ ID NO: 2999589 - DNA, 25 bp, Homo sapien
gtttggtgactgttcgacaacgata

SEQ ID NO: 2999590 - DNA, 25 bp, Homo sapien
gagataaaaccgtcattcactgtag

SEQ ID NO: 2999591 - DNA, 25 bp, Homo sapien
ctgtaattggtgcctgtactgagac

SEQ ID NO: 2999592 - DNA, 25 bp, Homo sapien
gtaattggtgcctgtactgagacac

SEQ ID NO: 2999593 - DNA, 25 bp, Homo sapien
taattggtgcctgtactgagacacc

SEQ ID NO: 2999594 - DNA, 25 bp, Homo sapien
tgtaattggtgcctgtactgagaca

SEQ ID NO: 2999595 - DNA, 25 bp, Homo sapien
atctgcacctttttgccatcttttc

SEQ ID NO: 2999596 - DNA, 25 bp, Homo sapien
tcaaatctgcacctttttgccatct

SEQ ID NO: 2999597 - DNA, 25 bp, Homo sapien
gcacctttttgccatcttttcccac

SEQ ID NO: 2999598 - DNA, 25 bp, Homo sapien
tctgcacctttttgccatcttttcc

SEQ ID NO: 2999599 - DNA, 25 bp, Homo sapien
tatcccaatgggaagaagtatacgc

SEQ ID NO: 2999600 - DNA, 25 bp, Homo sapien
aaattagcatcattagctcacgggc

SEQ ID NO: 2999601 - DNA, 25 bp, Homo sapien
gcttaacatatacggtcatccccag

SEQ ID NO: 2999602 - DNA, 25 bp, Homo sapien
caagacgtgttcacccatccagtgc

SEQ ID NO: 2999603 - DNA, 25 bp, Homo sapien
tcagaaacccaaactcaactcggca

SEQ ID NO: 2999604 - DNA, 25 bp, Homo sapien
aacccaaactcaactcggcagcaaa

SEQ ID NO: 2999605 - DNA, 25 bp, Homo sapien
agaaacccaaactcaactcggcagc

SEQ ID NO: 2999606 - DNA, 25 bp, Homo sapien
aaacccaaactcaactcggcagcaa

SEQ ID NO: 2999607 - DNA, 25 bp, Homo sapien
acaatgcaaagctccccggtggccg

SEQ ID NO: 2999608 - DNA, 25 bp, Homo sapien
cagacaatgcaaagctccccggtgg

SEQ ID NO: 2999609 - DNA, 25 bp, Homo sapien
gaggaggctggacggccagacaatg

SEQ ID NO: 2999610 - DNA, 25 bp, Homo sapien
tggacggccagacaatgcaaagctc

SEQ ID NO: 2999611 - DNA, 25 bp, Homo sapien
gtccaactttccagggcgggcgcag

SEQ ID NO: 2999612 - DNA, 25 bp, Homo sapien
agcgcagcactcgaaccaaagaggg

SEQ ID NO: 2999613 - DNA, 25 bp, Homo sapien
ggcgcagcgcagcactcgaaccaaa

SEQ ID NO: 2999614 - DNA, 25 bp, Homo sapien
gctcccagcgtgtgcggacggaggg

SEQ ID NO: 2999615 - DNA, 25 bp, Homo sapien
gccagccacggcatgtcccgcacga

SEQ ID NO: 2999616 - DNA, 25 bp, Homo sapien
agccacggcatgtcccgcacgaagt

SEQ ID NO: 2999617 - DNA, 25 bp, Homo sapien
gcacgaagtcctgccactgccgctg

SEQ ID NO: 2999618 - DNA, 25 bp, Homo sapien
gcttctccttgtagggcagcgccag

SEQ ID NO: 2999619 - DNA, 25 bp, Homo sapien
tccgaggacacgaagacgatctcca

SEQ ID NO: 2999620 - DNA, 25 bp, Homo sapien
acacgaagacgatctccaggcgccg

SEQ ID NO: 2999621 - DNA, 25 bp, Homo sapien
aggacacgaagacgatctccaggcg

SEQ ID NO: 2999622 - DNA, 25 bp, Homo sapien
ctggtccgaggacacgaagacgatc

SEQ ID NO: 2999623 - DNA, 25 bp, Homo sapien
gcgctgaggctgcagccgaagtaga

SEQ ID NO: 2999624 - DNA, 25 bp, Homo sapien
agacccagcagcgagatgccgcggg

SEQ ID NO: 2999625 - DNA, 25 bp, Homo sapien
tggcgctgagctgcgcgcagggggc

SEQ ID NO: 2999626 - DNA, 25 bp, Homo sapien
gcaggcgcccgtagaaggcggccag

SEQ ID NO: 2999627 - DNA, 25 bp, Homo sapien
ccgagcagctcctccaggaagcccg

SEQ ID NO: 2999628 - DNA, 25 bp, Homo sapien
cagcttctcgccgagcagctcctcc

SEQ ID NO: 2999629 - DNA, 25 bp, Homo sapien
gcagctcctccaggaagcccgacat

SEQ ID NO: 2999630 - DNA, 25 bp, Homo sapien
gagcagctcctccaggaagcccgac

SEQ ID NO: 2999631 - DNA, 25 bp, Homo sapien
ccccgctccacggtccgcgcggcgg

SEQ ID NO: 2999632 - DNA, 25 bp, Homo sapien
gaccccgctccacggtccgcgcggc

SEQ ID NO: 2999633 - DNA, 25 bp, Homo sapien
accccgctccacggtccgcgcggcg

SEQ ID NO: 2999634 - DNA, 25 bp, Homo sapien
gaagctccgctgcagtacagcctgc

SEQ ID NO: 2999635 - DNA, 25 bp, Homo sapien
gctttcaaggctgcgctggcctgcg

SEQ ID NO: 2999636 - DNA, 25 bp, Homo sapien
tgagacagcgggttccgccgaagct

SEQ ID NO: 2999637 - DNA, 25 bp, Homo sapien
ctggtgggtgacaagcgtcagcccc

SEQ ID NO: 2999638 - DNA, 25 bp, Homo sapien
caaaaatttcgccattgtgggagcc

SEQ ID NO: 2999639 - DNA, 25 bp, Homo sapien
cgtgggctttgaccctaaggatcct

SEQ ID NO: 2999640 - DNA, 25 bp, Homo sapien
tacaccgactgcaaaagaagtgctg

SEQ ID NO: 2999641 - DNA, 25 bp, Homo sapien
tggcatcgataccaacgtgggcttt

SEQ ID NO: 2999642 - DNA, 25 bp, Homo sapien
tattccaaaaatagtgccgggtggc

SEQ ID NO: 2999643 - DNA, 25 bp, Homo sapien
tactggccaagatcagacgtcgctg

SEQ ID NO: 2999644 - DNA, 25 bp, Homo sapien
ggccacatgtgaagggtcctgctgt

SEQ ID NO: 2999645 - DNA, 25 bp, Homo sapien
ccgggtggcccaaagataacatctg

SEQ ID NO: 2999646 - DNA, 25 bp, Homo sapien
gctataagtcgagcccctggagctg

SEQ ID NO: 2999647 - DNA, 25 bp, Homo sapien
cacaggcagccgatggtcagtactt

SEQ ID NO: 2999648 - DNA, 25 bp, Homo sapien
caaaaggctgtatccagaagctggg

SEQ ID NO: 2999649 - DNA, 25 bp, Homo sapien
caatgcgtctgcaagtcgggtccct

SEQ ID NO: 2999650 - DNA, 25 bp, Homo sapien
cggagcatcagacacaactagaggt

SEQ ID NO: 2999651 - DNA, 25 bp, Homo sapien
tcactgatagacaggaggccgaaca

SEQ ID NO: 2999652 - DNA, 25 bp, Homo sapien
aaaattccagaaatgggcgctccag

SEQ ID NO: 2999653 - DNA, 25 bp, Homo sapien
ctttcaaggcgatggagcgaagacc

SEQ ID NO: 2999654 - DNA, 25 bp, Homo sapien
gagaagtacagtgtgttccgcttga

SEQ ID NO: 2999655 - DNA, 25 bp, Homo sapien
gaagtacagtgtgttccgcttgagt

SEQ ID NO: 2999656 - DNA, 25 bp, Homo sapien
gtggagaagtacagtgtgttccgct

SEQ ID NO: 2999657 - DNA, 25 bp, Homo sapien
ggagaagtacagtgtgttccgcttg

SEQ ID NO: 2999658 - DNA, 25 bp, Homo sapien
gctgcaggtagtagaggaggacctg

SEQ ID NO: 2999659 - DNA, 25 bp, Homo sapien
tgcaggtagtagaggaggacctgga

SEQ ID NO: 2999660 - DNA, 25 bp, Homo sapien
tgctgcaggtagtagaggaggacct

SEQ ID NO: 2999661 - DNA, 25 bp, Homo sapien
ggtgctgcaggtagtagaggaggac

SEQ ID NO: 2999662 - DNA, 25 bp, Homo sapien
tgcgccatgacgtcatgggaccaga

SEQ ID NO: 2999663 - DNA, 25 bp, Homo sapien
ccacttctgagggtctcagtaacgt

SEQ ID NO: 2999664 - DNA, 25 bp, Homo sapien
ccaaacacggtagccaggttgtgaa

SEQ ID NO: 2999665 - DNA, 25 bp, Homo sapien
accagatgtccgcagccgaggtgag

SEQ ID NO: 2999666 - DNA, 25 bp, Homo sapien
ggaagaggaaggtgatgaggttggg

SEQ ID NO: 2999667 - DNA, 25 bp, Homo sapien
aggaaggtgatgaggttggggtcgg

SEQ ID NO: 2999668 - DNA, 25 bp, Homo sapien
gcaggaagaggaaggtgatgaggtt

SEQ ID NO: 2999669 - DNA, 25 bp, Homo sapien
cttttcaagtgttccagcaggaaga

SEQ ID NO: 2999670 - DNA, 25 bp, Homo sapien
gcggagcaggtgcatcatgcagttt

SEQ ID NO: 2999671 - DNA, 25 bp, Homo sapien
gcaggtgcatcatgcagttttcctt

SEQ ID NO: 2999672 - DNA, 25 bp, Homo sapien
agcaggtgcatcatgcagttttcct

SEQ ID NO: 2999673 - DNA, 25 bp, Homo sapien
agggagcggagcaggtgcatcatgc

SEQ ID NO: 2999674 - DNA, 25 bp, Homo sapien
gatgccctccatgaaggctgggtag

SEQ ID NO: 2999675 - DNA, 25 bp, Homo sapien
cgatgccctccatgaaggctgggta

SEQ ID NO: 2999676 - DNA, 25 bp, Homo sapien
gcgtcccggcgatggcgttgatgtc

SEQ ID NO: 2999677 - DNA, 25 bp, Homo sapien
agtcggtccgtgaggagcggctcgg

SEQ ID NO: 2999678 - DNA, 25 bp, Homo sapien
agcggctcgggcagttcccggaagt

SEQ ID NO: 2999679 - DNA, 25 bp, Homo sapien
gaagtacagcttgagcgtcccggcg

SEQ ID NO: 2999680 - DNA, 25 bp, Homo sapien
ctggaaggcattgcacacttttcac

SEQ ID NO: 2999681 - DNA, 25 bp, Homo sapien
tgcagcttccttccgactggaacct

SEQ ID NO: 2999682 - DNA, 25 bp, Homo sapien
ttttcacacgtaaaagcatgttccg

SEQ ID NO: 2999683 - DNA, 25 bp, Homo sapien
catgttccgacaaagcctcagcttc

SEQ ID NO: 2999684 - DNA, 25 bp, Homo sapien
cctgggcaagtgagtcggcccttgt

SEQ ID NO: 2999685 - DNA, 25 bp, Homo sapien
catcctgggcaagtgagtcggccct

SEQ ID NO: 2999686 - DNA, 25 bp, Homo sapien
tcctgggcaagtgagtcggcccttg

SEQ ID NO: 2999687 - DNA, 25 bp, Homo sapien
atcctgggcaagtgagtcggccctt

SEQ ID NO: 2999688 - DNA, 25 bp, Homo sapien
gtggccacgcccgatatcctgtaga

SEQ ID NO: 2999689 - DNA, 25 bp, Homo sapien
gatgtccgtggccacgcccgatatc

SEQ ID NO: 2999690 - DNA, 25 bp, Homo sapien
tgtagatgccaacctcctcgatacc

SEQ ID NO: 2999691 - DNA, 25 bp, Homo sapien
aagacggccttgagcgcctggatgt

SEQ ID NO: 2999692 - DNA, 25 bp, Homo sapien
gtagggcaccttggagcgctcccgc

SEQ ID NO: 2999693 - DNA, 25 bp, Homo sapien
tctgaagtgtcctgtgagcgcctct

SEQ ID NO: 2999694 - DNA, 25 bp, Homo sapien
tcacaagagaccttccagcgtttag

SEQ ID NO: 2999695 - DNA, 25 bp, Homo sapien
gccgagactctagggaaagaacgtc

SEQ ID NO: 2999696 - DNA, 25 bp, Homo sapien
cagagcttcccgcttgttacgagga

SEQ ID NO: 2999697 - DNA, 25 bp, Homo sapien
tcatatctcggctggtgaatttcat

SEQ ID NO: 2999698 - DNA, 25 bp, Homo sapien
tcctcttcaggctcatatctcggct

SEQ ID NO: 2999699 - DNA, 25 bp, Homo sapien
aagacgccggtctgctttttggacg

SEQ ID NO: 2999700 - DNA, 25 bp, Homo sapien
accacgctgatcttcacaccgaaga

SEQ ID NO: 2999701 - DNA, 25 bp, Homo sapien
atcacgtccgtgtgccagttcttgg

SEQ ID NO: 2999702 - DNA, 25 bp, Homo sapien
tggtctccacggtttgtgggtccag

SEQ ID NO: 2999703 - DNA, 25 bp, Homo sapien
cgttcatctcaatcacgtccgtgtg

SEQ ID NO: 2999704 - DNA, 25 bp, Homo sapien
tcttggtctccacggtttgtgggtc

SEQ ID NO: 2999705 - DNA, 25 bp, Homo sapien
gagatctccccgtgggtcagcactg

SEQ ID NO: 2999706 - DNA, 25 bp, Homo sapien
agagatctccccgtgggtcagcact

SEQ ID NO: 2999707 - DNA, 25 bp, Homo sapien
gtgccagctcggaggccaagccaga

SEQ ID NO: 2999708 - DNA, 25 bp, Homo sapien
tgtgggtgagagaggtgccagctcg

SEQ ID NO: 2999709 - DNA, 25 bp, Homo sapien
ctccgacggggtctgggtctgcact

SEQ ID NO: 2999710 - DNA, 25 bp, Homo sapien
gcctccgacggggtctgggtctgca

SEQ ID NO: 2999711 - DNA, 25 bp, Homo sapien
acggggtctgggtctgcactgggtt

SEQ ID NO: 2999712 - DNA, 25 bp, Homo sapien
caggtggtacccaagcctccgacgg

SEQ ID NO: 2999713 - DNA, 25 bp, Homo sapien
caccgcactcggcctgtatttattt

SEQ ID NO: 2999714 - DNA, 25 bp, Homo sapien
accgcactcggcctgtatttatttt

SEQ ID NO: 2999715 - DNA, 25 bp, Homo sapien
cggctgactgcaacccgtctcccag

SEQ ID NO: 2999716 - DNA, 25 bp, Homo sapien
agccaccgcactcggcctgtattta

SEQ ID NO: 2999717 - DNA, 25 bp, Homo sapien
ccagcagacaggtgccttccatggg

SEQ ID NO: 2999718 - DNA, 25 bp, Homo sapien
gctggcccctgggacgttggtggat

SEQ ID NO: 2999719 - DNA, 25 bp, Homo sapien
cagcagacaggtgccttccatgggc

SEQ ID NO: 2999720 - DNA, 25 bp, Homo sapien
cctgggacgttggtggatgggacac

SEQ ID NO: 2999721 - DNA, 25 bp, Homo sapien
ggcaggaatcagcaaagtggccccg

SEQ ID NO: 2999722 - DNA, 25 bp, Homo sapien
ggtgagcgtggattctctgccaaga

SEQ ID NO: 2999723 - DNA, 25 bp, Homo sapien
ggaccgaagtgacctcatgtttggg

SEQ ID NO: 2999724 - DNA, 25 bp, Homo sapien
tctgccaagaatcccgtaggtggct

SEQ ID NO: 2999725 - DNA, 25 bp, Homo sapien
acggctggcgctcttctaccctcca

SEQ ID NO: 2999726 - DNA, 25 bp, Homo sapien
ccagaatgcgggagggtttccctca

SEQ ID NO: 2999727 - DNA, 25 bp, Homo sapien
catcctgcctctcacggctggcgct

SEQ ID NO: 2999728 - DNA, 25 bp, Homo sapien
ccggcatcccagaatgcgggagggt

SEQ ID NO: 2999729 - DNA, 25 bp, Homo sapien
tggctgtgccggtcatcggtaccag

SEQ ID NO: 2999730 - DNA, 25 bp, Homo sapien
cgctgtggatgtcacggctctggct

SEQ ID NO: 2999731 - DNA, 25 bp, Homo sapien
gagatccctccagatttcggctcag

SEQ ID NO: 2999732 - DNA, 25 bp, Homo sapien
ggtcacggtccagaaaggagatccc

SEQ ID NO: 2999733 - DNA, 25 bp, Homo sapien
ctgcaggcttgggggctccttccaa

SEQ ID NO: 2999734 - DNA, 25 bp, Homo sapien
caggcttgggggctccttccaaaat

SEQ ID NO: 2999735 - DNA, 25 bp, Homo sapien
ctccttccaaaatgcctggggcagc

SEQ ID NO: 2999736 - DNA, 25 bp, Homo sapien
tccttccaaaatgcctggggcagct

SEQ ID NO: 2999737 - DNA, 25 bp, Homo sapien
gtactacagcaacactgggctcagg

SEQ ID NO: 2999738 - DNA, 25 bp, Homo sapien
ctggctggccaagccgtctgtggcc

SEQ ID NO: 2999739 - DNA, 25 bp, Homo sapien
cattgcctctgggtactacagcaac

SEQ ID NO: 2999740 - DNA, 25 bp, Homo sapien
ccgctggctggccaagccgtctgtg

SEQ ID NO: 2999741 - DNA, 25 bp, Homo sapien
gccggtgtccagcttaagaggagct

SEQ ID NO: 2999742 - DNA, 25 bp, Homo sapien
tgccggtgtccagcttaagaggagc

SEQ ID NO: 2999743 - DNA, 25 bp, Homo sapien
cagtgccggtgtccagcttaagagg

SEQ ID NO: 2999744 - DNA, 25 bp, Homo sapien
agcagtgccggtgtccagcttaaga

SEQ ID NO: 2999745 - DNA, 25 bp, Homo sapien
gtaggggattctcagacccacatgg

SEQ ID NO: 2999746 - DNA, 25 bp, Homo sapien
gaagtaggggattctcagacccaca

SEQ ID NO: 2999747 - DNA, 25 bp, Homo sapien
ttggaagtaggggattctcagaccc

SEQ ID NO: 2999748 - DNA, 25 bp, Homo sapien
ctttggaagtaggggattctcagac

SEQ ID NO: 2999749 - DNA, 25 bp, Homo sapien
agcgctgacccctgcgtccacgaca

SEQ ID NO: 2999750 - DNA, 25 bp, Homo sapien
tgacccctgcgtccacgacacggac

SEQ ID NO: 2999751 - DNA, 25 bp, Homo sapien
ggacacactgtggcagacgtccctc

SEQ ID NO: 2999752 - DNA, 25 bp, Homo sapien
cggacacactgtggcagacgtccct

SEQ ID NO: 2999753 - DNA, 25 bp, Homo sapien
aggtaaactggaagcgccctgtttg

SEQ ID NO: 2999754 - DNA, 25 bp, Homo sapien
ccctgtttggctggcgctggacccg

SEQ ID NO: 2999755 - DNA, 25 bp, Homo sapien
tcctcaaaggggcaggtaaactgga

SEQ ID NO: 2999756 - DNA, 25 bp, Homo sapien
aacctgccaggtcagtttcttgcca

SEQ ID NO: 2999757 - DNA, 25 bp, Homo sapien
ggcagacggtgctgcggtcggcgcc

SEQ ID NO: 2999758 - DNA, 25 bp, Homo sapien
agccagcaaggcccgctggatgcag

SEQ ID NO: 2999759 - DNA, 25 bp, Homo sapien
cagcaaggcccgctggatgcaggga

SEQ ID NO: 2999760 - DNA, 25 bp, Homo sapien
tcggcgcccctcagcaaaggggcag

SEQ ID NO: 2999761 - DNA, 25 bp, Homo sapien
tgggggggcgcttgctccccgactc

SEQ ID NO: 2999762 - DNA, 25 bp, Homo sapien
gccttcgggctgcagtcgggctggg

SEQ ID NO: 2999763 - DNA, 25 bp, Homo sapien
cccagagccgggcgccggtgttggg

SEQ ID NO: 2999764 - DNA, 25 bp, Homo sapien
gtttcggagcagcttgttgcgcacg

SEQ ID NO: 2999765 - DNA, 25 bp, Homo sapien
gagaaggcgcctgtggagcgctcag

SEQ ID NO: 2999766 - DNA, 25 bp, Homo sapien
gtggagcgctcagtcccggctgcca

SEQ ID NO: 2999767 - DNA, 25 bp, Homo sapien
aaggcgcctgtggagcgctcagtcc

SEQ ID NO: 2999768 - DNA, 25 bp, Homo sapien
gcctgtggagcgctcagtcccggct

SEQ ID NO: 2999769 - DNA, 25 bp, Homo sapien
agccaggcaggtgtcgggatttctc

SEQ ID NO: 2999770 - DNA, 25 bp, Homo sapien
caggtgtcgggatttctcctcagag

SEQ ID NO: 2999771 - DNA, 25 bp, Homo sapien
tgtttttgaggaataggtggcttcc

SEQ ID NO: 2999772 - DNA, 25 bp, Homo sapien
ttggtgtttttgaggaataggtggc

SEQ ID NO: 2999773 - DNA, 25 bp, Homo sapien
ctggacggtgcacacggaacttcct

SEQ ID NO: 2999774 - DNA, 25 bp, Homo sapien
caaacctgagctgctaagtgggggc

SEQ ID NO: 2999775 - DNA, 25 bp, Homo sapien
tgcacacggaacttcctcaaacctg

SEQ ID NO: 2999776 - DNA, 25 bp, Homo sapien
acgtcacacgcacccctggacggtg

SEQ ID NO: 2999777 - DNA, 25 bp, Homo sapien
catttgtgcatttggcacgggtcac

SEQ ID NO: 2999778 - DNA, 25 bp, Homo sapien
tggccccactcatgtcactctagag

SEQ ID NO: 2999779 - DNA, 25 bp, Homo sapien
gtgactgagggcctggctgcgtgcc

SEQ ID NO: 2999780 - DNA, 25 bp, Homo sapien
taaggcatcacagagacgaatcaaa

SEQ ID NO: 2999781 - DNA, 25 bp, Homo sapien
ggctgcctcgctcacccttgctggt

SEQ ID NO: 2999782 - DNA, 25 bp, Homo sapien
ctaacaagctctgtgaccgcggctg

SEQ ID NO: 2999783 - DNA, 25 bp, Homo sapien
ttctctccggaaaacaggattggat

SEQ ID NO: 2999784 - DNA, 25 bp, Homo sapien
gctcccagctaagcggacctggatg

SEQ ID NO: 2999785 - DNA, 25 bp, Homo sapien
aaaacaggccctgattaaatctaca

SEQ ID NO: 2999786 - DNA, 25 bp, Homo sapien
ggatggtttctgattaggtttcaag

SEQ ID NO: 2999787 - DNA, 25 bp, Homo sapien
taaactggctgcttcggaggagccg

SEQ ID NO: 2999788 - DNA, 25 bp, Homo sapien
aaacccagggcttccaaatcgctct

SEQ ID NO: 2999789 - DNA, 25 bp, Homo sapien
tcaagaagctcggcgcccagctgcg

SEQ ID NO: 2999790 - DNA, 25 bp, Homo sapien
tccggggccacggtcaagaagctcg

SEQ ID NO: 2999791 - DNA, 25 bp, Homo sapien
cggtcaagaagctcggcgcccagct

SEQ ID NO: 2999792 - DNA, 25 bp, Homo sapien
ggtcaagaagctcggcgcccagctg

SEQ ID NO: 2999793 - DNA, 25 bp, Homo sapien
ggccacggtcaagaagctcggcgcc

SEQ ID NO: 2999794 - DNA, 25 bp, Homo sapien
cacggtcaagaagctcggcgcccag

SEQ ID NO: 2999795 - DNA, 25 bp, Homo sapien
tccggggccacggtcaagaagctcg

SEQ ID NO: 2999796 - DNA, 25 bp, Homo sapien
ggtcaagaagctcggcgcccagctg

SEQ ID NO: 2999797 - DNA, 25 bp, Homo sapien
ggccacggtcaagaagctcggcgcc

SEQ ID NO: 2999798 - DNA, 25 bp, Homo sapien
tgggcttccggggccacaacaggca

SEQ ID NO: 2999799 - DNA, 25 bp, Homo sapien
gggcttccggggccacaacaggcag

SEQ ID NO: 2999800 - DNA, 25 bp, Homo sapien
ctcagcctcgccccggcgccctggc

SEQ ID NO: 2999801 - DNA, 25 bp, Homo sapien
tcagcctcgccccggcgccctggcc

SEQ ID NO: 2999802 - DNA, 25 bp, Homo sapien
cctcgccccggcgccctggcctcac

SEQ ID NO: 2999803 - DNA, 25 bp, Homo sapien
agcctcgccccggcgccctggcctc

SEQ ID NO: 2999804 - DNA, 25 bp, Homo sapien
ttgtcatagcacttctcatagcaca

SEQ ID NO: 2999805 - DNA, 25 bp, Homo sapien
cttggtcttgtcatagcacttctca

SEQ ID NO: 2999806 - DNA, 25 bp, Homo sapien
cttgtccacgatctcattgttgtcc

SEQ ID NO: 2999807 - DNA, 25 bp, Homo sapien
ttgtccacgatctcattgttgtcct

SEQ ID NO: 2999808 - DNA, 25 bp, Homo sapien
atcccacttgggctccgctgtgtcc

SEQ ID NO: 2999809 - DNA, 25 bp, Homo sapien
acttgggctccgctgtgtcccggaa

SEQ ID NO: 2999810 - DNA, 25 bp, Homo sapien
cccacttgggctccgctgtgtcccg

SEQ ID NO: 2999811 - DNA, 25 bp, Homo sapien
tgggctccgctgtgtcccggaacac

SEQ ID NO: 2999812 - DNA, 25 bp, Homo sapien
gccatagagtcctggagactcatcg

SEQ ID NO: 2999813 - DNA, 25 bp, Homo sapien
tcccttggcagagtggacgatgaca

SEQ ID NO: 2999814 - DNA, 25 bp, Homo sapien
gacgatgacatgaaggaagccatag

SEQ ID NO: 2999815 - DNA, 25 bp, Homo sapien
gcttaaatcccttggcagagtggac

SEQ ID NO: 2999816 - DNA, 25 bp, Homo sapien
ttgtgtacagtcctaagcttgaaac

SEQ ID NO: 2999817 - DNA, 25 bp, Homo sapien
tgacaggaatgttgtgtacagtcct

SEQ ID NO: 2999818 - DNA, 25 bp, Homo sapien
ggaatgttgtgtacagtcctaagct

SEQ ID NO: 2999819 - DNA, 25 bp, Homo sapien
cctaagcttgaaacaggatcctgtg

SEQ ID NO: 2999820 - DNA, 25 bp, Homo sapien
gactgcgagggccaaagacgtgata

SEQ ID NO: 2999821 - DNA, 25 bp, Homo sapien
aaaaggcccatcaatgccacggaca

SEQ ID NO: 2999822 - DNA, 25 bp, Homo sapien
tgaaacgcttagaaatacaaaaggc

SEQ ID NO: 2999823 - DNA, 25 bp, Homo sapien
gtgatactggacatgaaacgcttag

SEQ ID NO: 2999824 - DNA, 25 bp, Homo sapien
gacctctcgtagtccgaggacagta

SEQ ID NO: 2999825 - DNA, 25 bp, Homo sapien
tcgtagtccgaggacagtaggaaca

SEQ ID NO: 2999826 - DNA, 25 bp, Homo sapien
cactctgacctctcgtagtccgagg

SEQ ID NO: 2999827 - DNA, 25 bp, Homo sapien
ccgaggacagtaggaacaggtaact

SEQ ID NO: 2999828 - DNA, 25 bp, Homo sapien
cccggctctggcctttgttggcttt

SEQ ID NO: 2999829 - DNA, 25 bp, Homo sapien
cttcttcaggcgctcgatggcccgg

SEQ ID NO: 2999830 - DNA, 25 bp, Homo sapien
gattgtggatcctgaacgggattgt

SEQ ID NO: 2999831 - DNA, 25 bp, Homo sapien
gcaggaactcattctcaaacatctt

SEQ ID NO: 2999832 - DNA, 25 bp, Homo sapien
gactcctcgggggatggaaacacca

SEQ ID NO: 2999833 - DNA, 25 bp, Homo sapien
gggatgtaccacttacagtcatact

SEQ ID NO: 2999834 - DNA, 25 bp, Homo sapien
ctcatggtctgggaaggggtgcacc

SEQ ID NO: 2999835 - DNA, 25 bp, Homo sapien
tggatttcactcttgagggcagaga

SEQ ID NO: 2999836 - DNA, 25 bp, Homo sapien
agaggaagacgtgccgcagcttccg

SEQ ID NO: 2999837 - DNA, 25 bp, Homo sapien
gcacacagtaggacatctgtaaaga

SEQ ID NO: 2999838 - DNA, 25 bp, Homo sapien
aagaggaagacgtgccgcagcttcc

SEQ ID NO: 2999839 - DNA, 25 bp, Homo sapien
acagtaggacatctgtaaagaggaa

SEQ ID NO: 2999840 - DNA, 25 bp, Homo sapien
gggcgttgtcactgcagtccggcgg

SEQ ID NO: 2999841 - DNA, 25 bp, Homo sapien
ggggtggtccacaggtgtgtgcttc

SEQ ID NO: 2999842 - DNA, 25 bp, Homo sapien
ggcgttgtcactgcagtccggcggg

SEQ ID NO: 2999843 - DNA, 25 bp, Homo sapien
tgcagcagcgggtagtcggggtggt

SEQ ID NO: 2999844 - DNA, 25 bp, Homo sapien
tgtaggactagggtgctccgagtga

SEQ ID NO: 2999845 - DNA, 25 bp, Homo sapien
ctagggtgctccgagtgacccggtc

SEQ ID NO: 2999846 - DNA, 25 bp, Homo sapien
agtgacccggtcaatgggcttgtag

SEQ ID NO: 2999847 - DNA, 25 bp, Homo sapien
ggtgctccgagtgacccggtcaatg

SEQ ID NO: 2999848 - DNA, 25 bp, Homo sapien
ctggctcaaggcagatgctctcctg

SEQ ID NO: 2999849 - DNA, 25 bp, Homo sapien
agccctgaatcacacagctccaccc

SEQ ID NO: 2999850 - DNA, 25 bp, Homo sapien
gctcaaggcagatgctctcctggac

SEQ ID NO: 2999851 - DNA, 25 bp, Homo sapien
acgccccgaagagtccagcacacct

SEQ ID NO: 2999852 - DNA, 25 bp, Homo sapien
ctgccacacgcaggaccccagaatc

SEQ ID NO: 2999853 - DNA, 25 bp, Homo sapien
agccacgccccgcagagtctagcac

SEQ ID NO: 2999854 - DNA, 25 bp, Homo sapien
agaatcacacagctccacccagcca

SEQ ID NO: 2999855 - DNA, 25 bp, Homo sapien
ccacacgcaggaccccagaatcaca

SEQ ID NO: 2999856 - DNA, 25 bp, Homo sapien
ccacgccccgtagagtccagcacac

SEQ ID NO: 2999857 - DNA, 25 bp, Homo sapien
cagccacgccccgtagagtccagca

SEQ ID NO: 2999858 - DNA, 25 bp, Homo sapien
agaatcacacagctccacccagcca

SEQ ID NO: 2999859 - DNA, 25 bp, Homo sapien
tgccacacgcaggaccccagaatca

SEQ ID NO: 2999860 - DNA, 25 bp, Homo sapien
gcagagtctagcacacctgccacat

SEQ ID NO: 2999861 - DNA, 25 bp, Homo sapien
cagagtctagcacacctgccacatg

SEQ ID NO: 2999862 - DNA, 25 bp, Homo sapien
cagagtccacctgagtaaggctgtg

SEQ ID NO: 2999863 - DNA, 25 bp, Homo sapien
agtccacctgagtaaggctgtggaa

SEQ ID NO: 2999864 - DNA, 25 bp, Homo sapien
tccagagtccacctgagtaaggctg

SEQ ID NO: 2999865 - DNA, 25 bp, Homo sapien
gagtccacctgagtaaggctgtgga

SEQ ID NO: 2999866 - DNA, 25 bp, Homo sapien
tgactgagaagggtgcagagccgaa

SEQ ID NO: 2999867 - DNA, 25 bp, Homo sapien
ggagataggaaagcaaagtgactga

SEQ ID NO: 2999868 - DNA, 25 bp, Homo sapien
tgagaagggtgcagagccgaaacac

SEQ ID NO: 2999869 - DNA, 25 bp, Homo sapien
aaagcaaagtgactgagaagggtgc

SEQ ID NO: 2999870 - DNA, 25 bp, Homo sapien
ggtgcagttacagcagaagcgaata

SEQ ID NO: 2999871 - DNA, 25 bp, Homo sapien
cataggtgcagttacagcagaagcg

SEQ ID NO: 2999872 - DNA, 25 bp, Homo sapien
gttacagcagaagcgaataatgagg

SEQ ID NO: 2999873 - DNA, 25 bp, Homo sapien
cagcagaagcgaataatgaggagaa

SEQ ID NO: 2999874 - DNA, 25 bp, Homo sapien
ttgctgatgctgccgcacggactcc

SEQ ID NO: 2999875 - DNA, 25 bp, Homo sapien
gagcgtgcagccatcgctccaggct

SEQ ID NO: 2999876 - DNA, 25 bp, Homo sapien
gatgctgccgcacggactccagcat

SEQ ID NO: 2999877 - DNA, 25 bp, Homo sapien
cagcatcgggcagccgctccggagt

SEQ ID NO: 2999878 - DNA, 25 bp, Homo sapien
gacgtgtggctgtccttggagtcct

SEQ ID NO: 2999879 - DNA, 25 bp, Homo sapien
acgtgtggctgtccttggagtcctt

SEQ ID NO: 2999880 - DNA, 25 bp, Homo sapien
agacgtgtggctgtccttggagtcc

SEQ ID NO: 2999881 - DNA, 25 bp, Homo sapien
cttccatggtgacagacgtgtggct

SEQ ID NO: 2999882 - DNA, 25 bp, Homo sapien
agaaagcaaatatcaggctaagtgt

SEQ ID NO: 2999883 - DNA, 25 bp, Homo sapien
ttagagtaaccacttcaccgactgg

SEQ ID NO: 2999884 - DNA, 25 bp, Homo sapien
tccttgtccctcagggtggctatgt

SEQ ID NO: 2999885 - DNA, 25 bp, Homo sapien
ggctaagtgttacccattagagtaa

SEQ ID NO: 2999886 - DNA, 25 bp, Homo sapien
gctttgtacacaccgagctggctgg

SEQ ID NO: 2999887 - DNA, 25 bp, Homo sapien
tcagctgtctccagagcgactttat

SEQ ID NO: 2999888 - DNA, 25 bp, Homo sapien
gacaaacgctttgtacacaccgagc

SEQ ID NO: 2999889 - DNA, 25 bp, Homo sapien
gactttatagttatcgacaaacgct

SEQ ID NO: 2999890 - DNA, 25 bp, Homo sapien
cacgcctggcttagacacattttta

SEQ ID NO: 2999891 - DNA, 25 bp, Homo sapien
gtacacacacctatagccctcgcta

SEQ ID NO: 2999892 - DNA, 25 bp, Homo sapien
gctgggagctgtggtacacacacct

SEQ ID NO: 2999893 - DNA, 25 bp, Homo sapien
atttttaaagtacatgcagctggga

SEQ ID NO: 2999894 - DNA, 25 bp, Homo sapien
ctccttgtggatctcatagatgtcc

SEQ ID NO: 2999895 - DNA, 25 bp, Homo sapien
gctggatggtgagcacgggctggga

SEQ ID NO: 2999896 - DNA, 25 bp, Homo sapien
tggatcttgtagaagatggtctcga

SEQ ID NO: 2999897 - DNA, 25 bp, Homo sapien
tggggcacaggttgtcatagaactc

SEQ ID NO: 2999898 - DNA, 25 bp, Homo sapien
ggtaaacaaaccagagtgtcggcag

SEQ ID NO: 2999899 - DNA, 25 bp, Homo sapien
aaacaaaccagagtgtcggcaggcc

SEQ ID NO: 2999900 - DNA, 25 bp, Homo sapien
gagctttgtatcaaggagccactgc

SEQ ID NO: 2999901 - DNA, 25 bp, Homo sapien
ccaaaggcagggcactgaaacgagc

SEQ ID NO: 2999902 - DNA, 25 bp, Homo sapien
gcaagggaagagtgtccccccaagc

SEQ ID NO: 2999903 - DNA, 25 bp, Homo sapien
caggtccttggagagctgagcaggt

SEQ ID NO: 2999904 - DNA, 25 bp, Homo sapien
cccaggtgggtgagctgaaagcttt

SEQ ID NO: 2999905 - DNA, 25 bp, Homo sapien
gagaggcatgccagacagggaaaca

SEQ ID NO: 2999906 - DNA, 25 bp, Homo sapien
tcgtcgtaagagtttatccttttca

SEQ ID NO: 2999907 - DNA, 25 bp, Homo sapien
caggattgacatcgtcgtaagagtt

SEQ ID NO: 2999908 - DNA, 25 bp, Homo sapien
ctccatgagggacatggaactagct

SEQ ID NO: 2999909 - DNA, 25 bp, Homo sapien
catggaactagcttcaggattgaca

SEQ ID NO: 2999910 - DNA, 25 bp, Homo sapien
gaggagcccgcagagtcgccacaga

SEQ ID NO: 2999911 - DNA, 25 bp, Homo sapien
gagcccgcagagtcgccacagaatc

SEQ ID NO: 2999912 - DNA, 25 bp, Homo sapien
aagaattcttgtccccgccttggcg

SEQ ID NO: 2999913 - DNA, 25 bp, Homo sapien
gaatccccatacccaagaattcttg

SEQ ID NO: 2999914 - DNA, 25 bp, Homo sapien
ctcactacgaccttcgcccccagat

SEQ ID NO: 2999915 - DNA, 25 bp, Homo sapien
acataaatgtcaagtcccctgggac

SEQ ID NO: 2999916 - DNA, 25 bp, Homo sapien
catctcagggttgacgtgtgacaac

SEQ ID NO: 2999917 - DNA, 25 bp, Homo sapien
tacccaaaagaaagattgacacgcc

SEQ ID NO: 2999918 - DNA, 25 bp, Homo sapien
gacaacacctcacgtcatggcaagt

SEQ ID NO: 2999919 - DNA, 25 bp, Homo sapien
ttcgctggccaagaaccccgagaga

SEQ ID NO: 2999920 - DNA, 25 bp, Homo sapien
agaaccccgagagaaccagcttcct

SEQ ID NO: 2999921 - DNA, 25 bp, Homo sapien
ggcttccagctggttaatgtagatc

SEQ ID NO: 2999922 - DNA, 25 bp, Homo sapien
aatgtagatctcttcgctggccaag

SEQ ID NO: 2999923 - DNA, 25 bp, Homo sapien
acaagtaaagattcggccctagact

SEQ ID NO: 2999924 - DNA, 25 bp, Homo sapien
gcaccctgccggaaagacatttaaa

SEQ ID NO: 2999925 - DNA, 25 bp, Homo sapien
gattcggccctagactgggacatgg

SEQ ID NO: 2999926 - DNA, 25 bp, Homo sapien
gggcccaccatatcctttatgagcc

SEQ ID NO: 2999927 - DNA, 25 bp, Homo sapien
ggcttccgatcttttggctcccctg

SEQ ID NO: 2999928 - DNA, 25 bp, Homo sapien
aatgaactcactcccctagagcagg

SEQ ID NO: 2999929 - DNA, 25 bp, Homo sapien
cactaacgacagcagatgaactaaa

SEQ ID NO: 2999930 - DNA, 25 bp, Homo sapien
aggaatgcagagagcctttggaagc

SEQ ID NO: 2999931 - DNA, 25 bp, Homo sapien
gaagcgtcttggaaatgacactgga

SEQ ID NO: 2999932 - DNA, 25 bp, Homo sapien
tgggcctggcacttgggcacatgct

SEQ ID NO: 2999933 - DNA, 25 bp, Homo sapien
caactgctgcttaaggtaagtaccc

SEQ ID NO: 2999934 - DNA, 25 bp, Homo sapien
caggattgatttatgggcctggcac

SEQ ID NO: 2999935 - DNA, 25 bp, Homo sapien
taaagtaatagcaaagagaattgcc

SEQ ID NO: 2999936 - DNA, 25 bp, Homo sapien
aagtaatagcaaagagaattgcctt

SEQ ID NO: 2999937 - DNA, 25 bp, Homo sapien
taatagcaaagagaattgccttgga

SEQ ID NO: 2999938 - DNA, 25 bp, Homo sapien
atagcaaagagaattgccttggatt

SEQ ID NO: 2999939 - DNA, 25 bp, Homo sapien
ctgccccttgctctgaacgccttgt

SEQ ID NO: 2999940 - DNA, 25 bp, Homo sapien
actctattcctactccctgtacctg

SEQ ID NO: 2999941 - DNA, 25 bp, Homo sapien
ccaccctgcctacttccgtactcta

SEQ ID NO: 2999942 - DNA, 25 bp, Homo sapien
tgccccttgctctgaacgccttgtg

SEQ ID NO: 2999943 - DNA, 25 bp, Homo sapien
tgtgacacgtgctcaggctctcttg

SEQ ID NO: 2999944 - DNA, 25 bp, Homo sapien
aggctctcttggcatccgtgggcca

SEQ ID NO: 2999945 - DNA, 25 bp, Homo sapien
tgggccaccgccgtacacagcagga

SEQ ID NO: 2999946 - DNA, 25 bp, Homo sapien
cagcgttttcaggtgtgacacgtgc

SEQ ID NO: 2999947 - DNA, 25 bp, Homo sapien
gcacagccgccggagccctgagctg

SEQ ID NO: 2999948 - DNA, 25 bp, Homo sapien
tgacaggcgcgccaggtgactcctg

SEQ ID NO: 2999949 - DNA, 25 bp, Homo sapien
gctcgggctgacaggcgcgccaggt

SEQ ID NO: 2999950 - DNA, 25 bp, Homo sapien
gcgcgccaggtgactcctggcacag

SEQ ID NO: 2999951 - DNA, 25 bp, Homo sapien
ttcacagccaccaggaagggggacc

SEQ ID NO: 2999952 - DNA, 25 bp, Homo sapien
cttcacagccaccaggaagggggac

SEQ ID NO: 2999953 - DNA, 25 bp, Homo sapien
cacagccaccaggaagggggaccct

SEQ ID NO: 2999954 - DNA, 25 bp, Homo sapien
cagccaccaggaagggggaccctga

SEQ ID NO: 2999955 - DNA, 25 bp, Homo sapien
gggttcccagctcgcactcctccag

SEQ ID NO: 2999956 - DNA, 25 bp, Homo sapien
gaaccttgtccagcaagcctatcgc

SEQ ID NO: 2999957 - DNA, 25 bp, Homo sapien
gagaaacacatcttcgtcctccaga

SEQ ID NO: 2999958 - DNA, 25 bp, Homo sapien
cagctcgcactcctccaggagaaac

SEQ ID NO: 2999959 - DNA, 25 bp, Homo sapien
tcctcccagcgttatccctgagcct

SEQ ID NO: 2999960 - DNA, 25 bp, Homo sapien
gagttcctcccagcgttatccctga

SEQ ID NO: 2999961 - DNA, 25 bp, Homo sapien
gcctgagttcctcccagcgttatcc

SEQ ID NO: 2999962 - DNA, 25 bp, Homo sapien
tgagttcctcccagcgttatccctg

SEQ ID NO: 2999963 - DNA, 25 bp, Homo sapien
gagcctgagttcctcccagcgttat

SEQ ID NO: 2999964 - DNA, 25 bp, Homo sapien
agcctgagttcctcccagcgttatc

SEQ ID NO: 2999965 - DNA, 25 bp, Homo sapien
gagttcctcccagcgttatccctga

SEQ ID NO: 2999966 - DNA, 25 bp, Homo sapien
tgagttcctcccagcgttatccctg

SEQ ID NO: 2999967 - DNA, 25 bp, Homo sapien
gtgtaaacagcaatccctgcagagt

SEQ ID NO: 2999968 - DNA, 25 bp, Homo sapien
ggatgggacctttgcccggacgatc

SEQ ID NO: 2999969 - DNA, 25 bp, Homo sapien
cgatggtgtaaacatcaaccctggg

SEQ ID NO: 2999970 - DNA, 25 bp, Homo sapien
tcaagccaagtgagtccctcgtgag

SEQ ID NO: 2999971 - DNA, 25 bp, Homo sapien
acagccaccccggtgtgtgaagagg

SEQ ID NO: 2999972 - DNA, 25 bp, Homo sapien
aagcccgttgccaaggcccttgttg

SEQ ID NO: 2999973 - DNA, 25 bp, Homo sapien
ccaagtgggaagcccgttgccaagg

SEQ ID NO: 2999974 - DNA, 25 bp, Homo sapien
tgttgccaaaggctataacagccac

SEQ ID NO: 2999975 - DNA, 25 bp, Homo sapien
catggtgggcgactcatcgatgtac

SEQ ID NO: 2999976 - DNA, 25 bp, Homo sapien
gatgtacggcatggtctctgagccc

SEQ ID NO: 2999977 - DNA, 25 bp, Homo sapien
gtactcgtccgtcccgtagctgaag

SEQ ID NO: 2999978 - DNA, 25 bp, Homo sapien
tcgtactcgtccgtcccgtagctga

SEQ ID NO: 2999979 - DNA, 25 bp, Homo sapien
aacaagaaaggccactgagaatcct

SEQ ID NO: 2999980 - DNA, 25 bp, Homo sapien
ctgagacaaggaacaagaaaggcca

SEQ ID NO: 2999981 - DNA, 25 bp, Homo sapien
caaggaacaagaaaggccactgaga

SEQ ID NO: 2999982 - DNA, 25 bp, Homo sapien
actgagaatcctccaccagagctgc

SEQ ID NO: 2999983 - DNA, 25 bp, Homo sapien
ccggccgcaccatccacgcctggcc

SEQ ID NO: 2999984 - DNA, 25 bp, Homo sapien
ggtagcgtagtgggcgccggcggcg

SEQ ID NO: 2999985 - DNA, 25 bp, Homo sapien
cggccgcaccatccacgcctggccc

SEQ ID NO: 2999986 - DNA, 25 bp, Homo sapien
ggccgcaccatccacgcctggcccg

SEQ ID NO: 2999987 - DNA, 25 bp, Homo sapien
gtaaaaattaacagtgggagcaaga

SEQ ID NO: 2999988 - DNA, 25 bp, Homo sapien
ggctctgctgttgctacccgatgaa

SEQ ID NO: 2999989 - DNA, 25 bp, Homo sapien
gaagagcatgtcagccgcgtatttc

SEQ ID NO: 2999990 - DNA, 25 bp, Homo sapien
gtcagccgcgtatttcaagctgctg

SEQ ID NO: 2999991 - DNA, 25 bp, Homo sapien
ggtccggtctgtggtgcccaaaaca

SEQ ID NO: 2999992 - DNA, 25 bp, Homo sapien
tcatagatgaaggttgccgggtccg

SEQ ID NO: 2999993 - DNA, 25 bp, Homo sapien
taaagcgaggtacgcctgcacatga

SEQ ID NO: 2999994 - DNA, 25 bp, Homo sapien
tgctaacatggaggatcgctgatca

SEQ ID NO: 2999995 - DNA, 25 bp, Homo sapien
ggtatgcactagctcagtggatttg

SEQ ID NO: 2999996 - DNA, 25 bp, Homo sapien
tggcttcttaaacagcgttatctta

SEQ ID NO: 2999997 - DNA, 25 bp, Homo sapien
aaagcttagcattgaataaagacag

SEQ ID NO: 2999998 - DNA, 25 bp, Homo sapien
acagttatgcttaggaagccaggga

SEQ ID NO: 2999999 - DNA, 25 bp, Homo sapien
aactggccagcggaagcgaggctgc

SEQ ID NO: 3000000 - DNA, 25 bp, Homo sapien
tgggaggccggcaaccctgaaccag

SEQ ID NO: 3000001 - DNA, 25 bp, Homo sapien
gatctgggaggccggcaaccctgaa

SEQ ID NO: 3000002 - DNA, 25 bp, Homo sapien
cctgtaccagatcagcctgtccggg

SEQ ID NO: 3000003 - DNA, 25 bp, Homo sapien
attcctggggacagctcgctcctgg

SEQ ID NO: 3000004 - DNA, 25 bp, Homo sapien
tcctgggaggaagctcactcctggg

SEQ ID NO: 3000005 - DNA, 25 bp, Homo sapien
cagctcattcctggggggcagctcg

SEQ ID NO: 3000006 - DNA, 25 bp, Homo sapien
ggacagctcattcctgggggacagc

SEQ ID NO: 3000007 - DNA, 25 bp, Homo sapien
tgcggagtctcagtttagccaggtg

SEQ ID NO: 3000008 - DNA, 25 bp, Homo sapien
taggttctcgtaggagcgtgagccc

SEQ ID NO: 3000009 - DNA, 25 bp, Homo sapien
ggatcgcagttccatcccgaaagcg

SEQ ID NO: 3000010 - DNA, 25 bp, Homo sapien
ccactcggatgaggtgcttagagca

SEQ ID NO: 3000011 - DNA, 25 bp, Homo sapien
tcccagtcctagatctgagctcctt

SEQ ID NO: 3000012 - DNA, 25 bp, Homo sapien
gtccactcccagtcctagatctgag

SEQ ID NO: 3000013 - DNA, 25 bp, Homo sapien
cggtacacggtctgtggtaacatcc

SEQ ID NO: 3000014 - DNA, 25 bp, Homo sapien
gaacaatcccggtacacggtctgtg

SEQ ID NO: 3000015 - DNA, 25 bp, Homo sapien
tcccttgctgagctactggtgcgcg

SEQ ID NO: 3000016 - DNA, 25 bp, Homo sapien
tgaggaggtcacgtatgcaacttgc

SEQ ID NO: 3000017 - DNA, 25 bp, Homo sapien
gccggactccctaggttctgcaaac

SEQ ID NO: 3000018 - DNA, 25 bp, Homo sapien
acgaagggaggagcatcacgcacac

SEQ ID NO: 3000019 - DNA, 25 bp, Homo sapien
aaagccgcgttcttccctgcggaga

SEQ ID NO: 3000020 - DNA, 25 bp, Homo sapien
ccaggctaggcttggtcagtgtcca

SEQ ID NO: 3000021 - DNA, 25 bp, Homo sapien
ggatggctgacatcctacagagccc

SEQ ID NO: 3000022 - DNA, 25 bp, Homo sapien
ccagcaagggatggacaagtgtgtt

SEQ ID NO: 3000023 - DNA, 25 bp, Homo sapien
cagcctgtcacacgcatcacatggt

SEQ ID NO: 3000024 - DNA, 25 bp, Homo sapien
tcacatggtgagaaaacctcgcccg

SEQ ID NO: 3000025 - DNA, 25 bp, Homo sapien
atggtgagaaaacctcgcccggcaa

SEQ ID NO: 3000026 - DNA, 25 bp, Homo sapien
tgtcagcctgtcacacgcatcacat

SEQ ID NO: 3000027 - DNA, 25 bp, Homo sapien
ccaggaggagggatctgcagatccc

SEQ ID NO: 3000028 - DNA, 25 bp, Homo sapien
ggaccgtgcctcctgccaggacgct

SEQ ID NO: 3000029 - DNA, 25 bp, Homo sapien
aggcatccacccaatcctggcgggg

SEQ ID NO: 3000030 - DNA, 25 bp, Homo sapien
ggccctctctgtggtcgcctcgatg

SEQ ID NO: 3000031 - DNA, 25 bp, Homo sapien
caggttcaactccaacactgtgatc

SEQ ID NO: 3000032 - DNA, 25 bp, Homo sapien
tcaggagtccaagagaagtaggaat

SEQ ID NO: 3000033 - DNA, 25 bp, Homo sapien
ggaatgcagtactcatacacaagag

SEQ ID NO: 3000034 - DNA, 25 bp, Homo sapien
tcatacacaagagaagaatgcggta

SEQ ID NO: 3000035 - DNA, 25 bp, Homo sapien
gagtccaagagaagtaggaatgcag

SEQ ID NO: 3000036 - DNA, 25 bp, Homo sapien
agaagtaagaatgcggtactcacac

SEQ ID NO: 3000037 - DNA, 25 bp, Homo sapien
actcacacacgggagaagtaggaat

SEQ ID NO: 3000038 - DNA, 25 bp, Homo sapien
acaggagaagtaagaatgcggtact

SEQ ID NO: 3000039 - DNA, 25 bp, Homo sapien
ctcacacacgggagaggtaagaatg

SEQ ID NO: 3000040 - DNA, 25 bp, Homo sapien
cacacacaagggaagtaagaatgca

SEQ ID NO: 3000041 - DNA, 25 bp, Homo sapien
acacacaagggaagtaagaatgcag

SEQ ID NO: 3000042 - DNA, 25 bp, Homo sapien
cacacaagggaagtaagaatgcagt

SEQ ID NO: 3000043 - DNA, 25 bp, Homo sapien
acacaagggaagtaagaatgcagta

SEQ ID NO: 3000044 - DNA, 25 bp, Homo sapien
gtatgcggtactcacacacaggaga

SEQ ID NO: 3000045 - DNA, 25 bp, Homo sapien
caggagaagtaagaatgcggtactc

SEQ ID NO: 3000046 - DNA, 25 bp, Homo sapien
ctcacacacgggagaggtaagaatg

SEQ ID NO: 3000047 - DNA, 25 bp, Homo sapien
ggtactcacacacgggagaagtagg

SEQ ID NO: 3000048 - DNA, 25 bp, Homo sapien
cacacaagggaagtaagaatgcagt

SEQ ID NO: 3000049 - DNA, 25 bp, Homo sapien
cacacacaagggaagtaagaatgca

SEQ ID NO: 3000050 - DNA, 25 bp, Homo sapien
acacaagggaagtaagaatgcagta

SEQ ID NO: 3000051 - DNA, 25 bp, Homo sapien
acacacaagggaagtaagaatgcag

SEQ ID NO: 3000052 - DNA, 25 bp, Homo sapien
cacaagggaagtatgcggtactcac

SEQ ID NO: 3000053 - DNA, 25 bp, Homo sapien
gcacaagggaagtatgcggtactca

SEQ ID NO: 3000054 - DNA, 25 bp, Homo sapien
aagaatgcggtactcacgcacaagg

SEQ ID NO: 3000055 - DNA, 25 bp, Homo sapien
cgtccttggtcgtgggtccacgatg

SEQ ID NO: 3000056 - DNA, 25 bp, Homo sapien
acgtccttggtcgtgggtccacgat

SEQ ID NO: 3000057 - DNA, 25 bp, Homo sapien
ggaggtgccttctggagggaacagg

SEQ ID NO: 3000058 - DNA, 25 bp, Homo sapien
gaactgcaggcctcacacgtgacgc

SEQ ID NO: 3000059 - DNA, 25 bp, Homo sapien
actgcaggcctcacacgtgacgctg

SEQ ID NO: 3000060 - DNA, 25 bp, Homo sapien
gggcctgatctcggcgagggatgag

SEQ ID NO: 3000061 - DNA, 25 bp, Homo sapien
ctgagaggagagggacccacagcag

SEQ ID NO: 3000062 - DNA, 25 bp, Homo sapien
agaggagagggacccacagcaggcc

SEQ ID NO: 3000063 - DNA, 25 bp, Homo sapien
aggagagggacccacagcaggccct

SEQ ID NO: 3000064 - DNA, 25 bp, Homo sapien
tgagaggagagggacccacagcagg

SEQ ID NO: 3000065 - DNA, 25 bp, Homo sapien
ttcaggttaatggaggtgttgccat

SEQ ID NO: 3000066 - DNA, 25 bp, Homo sapien
caggttaatggaggtgttgccattc

SEQ ID NO: 3000067 - DNA, 25 bp, Homo sapien
aggttaatggaggtgttgccattct

SEQ ID NO: 3000068 - DNA, 25 bp, Homo sapien
attcaggttaatggaggtgttgcca

SEQ ID NO: 3000069 - DNA, 25 bp, Homo sapien
gcaggacaggcaagtcgtctgactc

SEQ ID NO: 3000070 - DNA, 25 bp, Homo sapien
caccacacgttcaaagcaggacagg

SEQ ID NO: 3000071 - DNA, 25 bp, Homo sapien
cgtctgactccacgcggctgcaagg

SEQ ID NO: 3000072 - DNA, 25 bp, Homo sapien
gagcccaaggtggagtttcacttcg

SEQ ID NO: 3000073 - DNA, 25 bp, Homo sapien
ttctcggggtgaggcaaagccttga

SEQ ID NO: 3000074 - DNA, 25 bp, Homo sapien
gagagaggccaccagttggatgtct

SEQ ID NO: 3000075 - DNA, 25 bp, Homo sapien
cagtgatttatcttctcggggtgag

SEQ ID NO: 3000076 - DNA, 25 bp, Homo sapien
gttggatgtctccagtatccccttc

SEQ ID NO: 3000077 - DNA, 25 bp, Homo sapien
tcaggagctgccacggggtctgcaa

SEQ ID NO: 3000078 - DNA, 25 bp, Homo sapien
tgcaagacgcttgctggcctcgacc

SEQ ID NO: 3000079 - DNA, 25 bp, Homo sapien
gcctcgaccaagtcaaggtggctgt

SEQ ID NO: 3000080 - DNA, 25 bp, Homo sapien
tcaaggtggctgttccacgcggctg

SEQ ID NO: 3000081 - DNA, 25 bp, Homo sapien
tttctgctccattaacaccaaagct

SEQ ID NO: 3000082 - DNA, 25 bp, Homo sapien
tcgcaaagtaactaccaaggctttc

SEQ ID NO: 3000083 - DNA, 25 bp, Homo sapien
taactaccaaggctttctgctccat

SEQ ID NO: 3000084 - DNA, 25 bp, Homo sapien
tgctccattaacaccaaagctggcc

SEQ ID NO: 3000085 - DNA, 25 bp, Homo sapien
ataccaggcttctctaggcagcacc

SEQ ID NO: 3000086 - DNA, 25 bp, Homo sapien
aacagccccgagtaagcccacagat

SEQ ID NO: 3000087 - DNA, 25 bp, Homo sapien
gatccctgctcaataccaggcttct

SEQ ID NO: 3000088 - DNA, 25 bp, Homo sapien
caatcccacgaaggtaatgatggcc

SEQ ID NO: 3000089 - DNA, 25 bp, Homo sapien
atctccactgctccaaatactttcc

SEQ ID NO: 3000090 - DNA, 25 bp, Homo sapien
cctggcccatagatggggcactgaa

SEQ ID NO: 3000091 - DNA, 25 bp, Homo sapien
ccaaatactttcctggcccatagat

SEQ ID NO: 3000092 - DNA, 25 bp, Homo sapien
tgctccaaatactttcctggcccat

SEQ ID NO: 3000093 - DNA, 25 bp, Homo sapien
ttcatgcagacgcacgtgcacgcac

SEQ ID NO: 3000094 - DNA, 25 bp, Homo sapien
gatgtgtgcccccattcatgcagac

SEQ ID NO: 3000095 - DNA, 25 bp, Homo sapien
gctgatctgcatctgcgctccgaac

SEQ ID NO: 3000096 - DNA, 25 bp, Homo sapien
tctgcgctccgaacagatgtgtgcc

SEQ ID NO: 3000097 - DNA, 25 bp, Homo sapien
ggcacaggacctatgcccaggggat

SEQ ID NO: 3000098 - DNA, 25 bp, Homo sapien
aggagcagatggagcggcggcacct

SEQ ID NO: 3000099 - DNA, 25 bp, Homo sapien
tatgcccaggggatccggctttgcc

SEQ ID NO: 3000100 - DNA, 25 bp, Homo sapien
aagcagaatgaaccatcacaaggac

SEQ ID NO: 3000101 - DNA, 25 bp, Homo sapien
tgcctgggtcccgatcccgatcttg

SEQ ID NO: 3000102 - DNA, 25 bp, Homo sapien
ggtgcctgggtcccgatcccgatct

SEQ ID NO: 3000103 - DNA, 25 bp, Homo sapien
cagcccggtgcctgggtcccgatcc

SEQ ID NO: 3000104 - DNA, 25 bp, Homo sapien
cctgggtcccgatcccgatcttggg

SEQ ID NO: 3000105 - DNA, 25 bp, Homo sapien
tgtcgatccaggacaggcgcggcag

SEQ ID NO: 3000106 - DNA, 25 bp, Homo sapien
gggtgtcgatccaggacaggcgcgg

SEQ ID NO: 3000107 - DNA, 25 bp, Homo sapien
tcgatccaggacaggcgcggcaggc

SEQ ID NO: 3000108 - DNA, 25 bp, Homo sapien
gtgtcgatccaggacaggcgcggca

SEQ ID NO: 3000109 - DNA, 25 bp, Homo sapien
accctcatcgcgcaacaaaggaggg

SEQ ID NO: 3000110 - DNA, 25 bp, Homo sapien
ctcatcgcgcaacaaaggagggaga

SEQ ID NO: 3000111 - DNA, 25 bp, Homo sapien
gcggcggctcggtcagatccgaaac

SEQ ID NO: 3000112 - DNA, 25 bp, Homo sapien
ggctcggtcagatccgaaacccgac

SEQ ID NO: 3000113 - DNA, 25 bp, Homo sapien
gagtccaatggattctctaagtctc

SEQ ID NO: 3000114 - DNA, 25 bp, Homo sapien
gagattcagttcagtggctccaatc

SEQ ID NO: 3000115 - DNA, 25 bp, Homo sapien
tcagaaagacgccagcagaagagtc

SEQ ID NO: 3000116 - DNA, 25 bp, Homo sapien
agaattctgcagacgcatcccaggc

SEQ ID NO: 3000117 - DNA, 25 bp, Homo sapien
caaggcgagggcaaaggaacctcag

SEQ ID NO: 3000118 - DNA, 25 bp, Homo sapien
aaggcgagggcaaaggaacctcaga

SEQ ID NO: 3000119 - DNA, 25 bp, Homo sapien
agcaaggcgagggcaaaggaacctc

SEQ ID NO: 3000120 - DNA, 25 bp, Homo sapien
ggcgagggcaaaggaacctcagagc

SEQ ID NO: 3000121 - DNA, 25 bp, Homo sapien
cccgcaagtgcctggacaaaaatct

SEQ ID NO: 3000122 - DNA, 25 bp, Homo sapien
tgtctctttaaggaccaggcctctt

SEQ ID NO: 3000123 - DNA, 25 bp, Homo sapien
gcgcctgccatcagtggagcctctg

SEQ ID NO: 3000124 - DNA, 25 bp, Homo sapien
tctgcccgtcctgcggcagagagtg

SEQ ID NO: 3000125 - DNA, 25 bp, Homo sapien
gttgacatcgctggcaaaaacgctc

SEQ ID NO: 3000126 - DNA, 25 bp, Homo sapien
aatgaggcagtacaggtgttccacc

SEQ ID NO: 3000127 - DNA, 25 bp, Homo sapien
gcccactaagggaacttcggtctca

SEQ ID NO: 3000128 - DNA, 25 bp, Homo sapien
gagacgtcgcgtcgagaatgaccac

SEQ ID NO: 3000129 - DNA, 25 bp, Homo sapien
gctccggatgcaaagcacaatgctt

SEQ ID NO: 3000130 - DNA, 25 bp, Homo sapien
caatgctttaggtcaggatgtgggt

SEQ ID NO: 3000131 - DNA, 25 bp, Homo sapien
tcagcaatagcttcacggggccggt

SEQ ID NO: 3000132 - DNA, 25 bp, Homo sapien
gctgctgctccggatgcaaagcaca

SEQ ID NO: 3000133 - DNA, 25 bp, Homo sapien
gttggtctgcaaaccagctcaccag

SEQ ID NO: 3000134 - DNA, 25 bp, Homo sapien
taaccagctttcgtttctgggctgc

SEQ ID NO: 3000135 - DNA, 25 bp, Homo sapien
tgggctgcagcttgtttagtgccac

SEQ ID NO: 3000136 - DNA, 25 bp, Homo sapien
gctcaccagatattgggtttcacca

SEQ ID NO: 3000137 - DNA, 25 bp, Homo sapien
taatttctgcgtgctcactgccagc

SEQ ID NO: 3000138 - DNA, 25 bp, Homo sapien
taccaacaagctcggcattcaggaa

SEQ ID NO: 3000139 - DNA, 25 bp, Homo sapien
actgccagcccacaaaggttaccaa

SEQ ID NO: 3000140 - DNA, 25 bp, Homo sapien
tccttcagcccattgatatgaataa

SEQ ID NO: 3000141 - DNA, 25 bp, Homo sapien
cgacctgggcggcaagaggctctcc

SEQ ID NO: 3000142 - DNA, 25 bp, Homo sapien
cgccacgctgcgcagggccatccac

SEQ ID NO: 3000143 - DNA, 25 bp, Homo sapien
gggcgctgcggcacgacctgggcgg

SEQ ID NO: 3000144 - DNA, 25 bp, Homo sapien
ctacaacgaggccttcaacgcgctg

SEQ ID NO: 3000145 - DNA, 25 bp, Homo sapien
gccagccgggtgtgatttgctccag

SEQ ID NO: 3000146 - DNA, 25 bp, Homo sapien
tgtggagtgttgttattggccagcc

SEQ ID NO: 3000147 - DNA, 25 bp, Homo sapien
caggtgttatcagcccgtggggtgt

SEQ ID NO: 3000148 - DNA, 25 bp, Homo sapien
gggtgttgttgtcggcctgtggagt

SEQ ID NO: 3000149 - DNA, 25 bp, Homo sapien
tcatcccccacgagttccccatccc

SEQ ID NO: 3000150 - DNA, 25 bp, Homo sapien
cacgagttgagtttgatgatgtcgt

SEQ ID NO: 3000151 - DNA, 25 bp, Homo sapien
tcgcaggttgggtttgatgatgtca

SEQ ID NO: 3000152 - DNA, 25 bp, Homo sapien
tttgatgatgtcgtgggttgagttt

SEQ ID NO: 3000153 - DNA, 25 bp, Homo sapien
tcacgagttgagtttgatgatgtcg

SEQ ID NO: 3000154 - DNA, 25 bp, Homo sapien
tggaatggaagtgcagggctgggtg

SEQ ID NO: 3000155 - DNA, 25 bp, Homo sapien
cttggaatggaagtgcagggctggg

SEQ ID NO: 3000156 - DNA, 25 bp, Homo sapien
aatggaagtgcagggctgggtgcag

SEQ ID NO: 3000157 - DNA, 25 bp, Homo sapien
gaatggaagtgcagggctgggtgca

SEQ ID NO: 3000158 - DNA, 25 bp, Homo sapien
taaaggaggtaatctaggtacagtc

SEQ ID NO: 3000159 - DNA, 25 bp, Homo sapien
cctcctagggtgattctgaggctaa

SEQ ID NO: 3000160 - DNA, 25 bp, Homo sapien
tacagtccttagcaagctgcctggc

SEQ ID NO: 3000161 - DNA, 25 bp, Homo sapien
gggctgcattgccaacctcctaggg

SEQ ID NO: 3000162 - DNA, 25 bp, Homo sapien
gatacataaaacaaggcccccgtga

SEQ ID NO: 3000163 - DNA, 25 bp, Homo sapien
tgatacataaaacaaggcccccgtg

SEQ ID NO: 3000164 - DNA, 25 bp, Homo sapien
ccccaggcaaccacgaggccattca

SEQ ID NO: 3000165 - DNA, 25 bp, Homo sapien
tccccaggcaaccacgaggccattc

SEQ ID NO: 3000166 - DNA, 25 bp, Homo sapien
cccaggcaaccacgaggccattcat

SEQ ID NO: 3000167 - DNA, 25 bp, Homo sapien
agaaaaatgtgactggttgtgacca

SEQ ID NO: 3000168 - DNA, 25 bp, Homo sapien
aaagaaaaatgtgactggttgtgac

SEQ ID NO: 3000169 - DNA, 25 bp, Homo sapien
aagaaaaatgtgactggttgtgacc

SEQ ID NO: 3000170 - DNA, 25 bp, Homo sapien
gggttctagtgcctcagcatcctca

SEQ ID NO: 3000171 - DNA, 25 bp, Homo sapien
gcattccaaccgacggtgcacaggg

SEQ ID NO: 3000172 - DNA, 25 bp, Homo sapien
tagtgactgcactattgtgcattcc

SEQ ID NO: 3000173 - DNA, 25 bp, Homo sapien
catgggcttgcaaagatctttttga

SEQ ID NO: 3000174 - DNA, 25 bp, Homo sapien
ttccggggtcatcgcctcctgcttc

SEQ ID NO: 3000175 - DNA, 25 bp, Homo sapien
ggtcatcgcctcctgcttccggggt

SEQ ID NO: 3000176 - DNA, 25 bp, Homo sapien
tgcttccggggtcatcgcctcctgc

SEQ ID NO: 3000177 - DNA, 25 bp, Homo sapien
gtcatcgcctcctgcttccggggtc

SEQ ID NO: 3000178 - DNA, 25 bp, Homo sapien
cacacacggtcacaaacaacaggga

SEQ ID NO: 3000179 - DNA, 25 bp, Homo sapien
tgcaccgtgtccttgaagagagtga

SEQ ID NO: 3000180 - DNA, 25 bp, Homo sapien
gatgacaagttgtaagctgctgagg

SEQ ID NO: 3000181 - DNA, 25 bp, Homo sapien
caaacaacagggagctgcaccgtgt

SEQ ID NO: 3000182 - DNA, 25 bp, Homo sapien
agattagaaactcgtatggggccat

SEQ ID NO: 3000183 - DNA, 25 bp, Homo sapien
ccctcgagcaccgagattagaaact

SEQ ID NO: 3000184 - DNA, 25 bp, Homo sapien
tgccttaattccctcgagcaccgag

SEQ ID NO: 3000185 - DNA, 25 bp, Homo sapien
taattccctcgagcaccgagattag

SEQ ID NO: 3000186 - DNA, 25 bp, Homo sapien
tgttacgcagtcagaatgagacaca

SEQ ID NO: 3000187 - DNA, 25 bp, Homo sapien
tggaaagggagactgctatcctgct

SEQ ID NO: 3000188 - DNA, 25 bp, Homo sapien
cacctgcccaaaaggagcaaactgg

SEQ ID NO: 3000189 - DNA, 25 bp, Homo sapien
tcaggtgtacatcaatgttacgcag

SEQ ID NO: 3000190 - DNA, 25 bp, Homo sapien
gttcttcacaaccagactacaggca

SEQ ID NO: 3000191 - DNA, 25 bp, Homo sapien
tcttcacaaccagactacaggcaat

SEQ ID NO: 3000192 - DNA, 25 bp, Homo sapien
ttcacaaccagactacaggcaattt

SEQ ID NO: 3000193 - DNA, 25 bp, Homo sapien
cttcacaaccagactacaggcaatt

SEQ ID NO: 3000194 - DNA, 25 bp, Homo sapien
ttagaagtataaaggatggaggcgc

SEQ ID NO: 3000195 - DNA, 25 bp, Homo sapien
tgtttggactagagattttatttta

SEQ ID NO: 3000196 - DNA, 25 bp, Homo sapien
ttttagaagtataaaggatggaggc

SEQ ID NO: 3000197 - DNA, 25 bp, Homo sapien
tattttagaagtataaaggatggag

SEQ ID NO: 3000198 - DNA, 25 bp, Homo sapien
taagtttaatgttaattccatgctg

SEQ ID NO: 3000199 - DNA, 25 bp, Homo sapien
tcagtaagaacaatacagattctgt

SEQ ID NO: 3000200 - DNA, 25 bp, Homo sapien
cagattctgtatctgtggctccagt

SEQ ID NO: 3000201 - DNA, 25 bp, Homo sapien
gtgtttcagtaagaacaatacagat

SEQ ID NO: 3000202 - DNA, 25 bp, Homo sapien
atccagtagtacaaattagcttcaa

SEQ ID NO: 3000203 - DNA, 25 bp, Homo sapien
tatccagtagtacaaattagcttca

SEQ ID NO: 3000204 - DNA, 25 bp, Homo sapien
gatatccagtagtacaaattagctt

SEQ ID NO: 3000205 - DNA, 25 bp, Homo sapien
cagatatccagtagtacaaattagc

SEQ ID NO: 3000206 - DNA, 25 bp, Homo sapien
acaaaagaggttgagcgagcgaagg

SEQ ID NO: 3000207 - DNA, 25 bp, Homo sapien
ctgaacaaaagaggttgagcgagcg

SEQ ID NO: 3000208 - DNA, 25 bp, Homo sapien
gaacaaaagaggttgagcgagcgaa

SEQ ID NO: 3000209 - DNA, 25 bp, Homo sapien
tgaacaaaagaggttgagcgagcga

SEQ ID NO: 3000210 - DNA, 25 bp, Homo sapien
cacggattgttgaactgttaccagc

SEQ ID NO: 3000211 - DNA, 25 bp, Homo sapien
gccacggattgttgaactgttacca

SEQ ID NO: 3000212 - DNA, 25 bp, Homo sapien
cagccacggattgttgaactgttac

SEQ ID NO: 3000213 - DNA, 25 bp, Homo sapien
gattgttgaactgttaccagcacca

SEQ ID NO: 3000214 - DNA, 25 bp, Homo sapien
atttcagcggagttggaaacatttt

SEQ ID NO: 3000215 - DNA, 25 bp, Homo sapien
aactgataccacttatgcctctata

SEQ ID NO: 3000216 - DNA, 25 bp, Homo sapien
tcagatttggtggttctcagtgaca

SEQ ID NO: 3000217 - DNA, 25 bp, Homo sapien
gcctctatagtgtgattaacctctc

SEQ ID NO: 3000218 - DNA, 25 bp, Homo sapien
aagtcagatttggtggttctcagtg

SEQ ID NO: 3000219 - DNA, 25 bp, Homo sapien
gattttcgtcttccacgtcctgcag

SEQ ID NO: 3000220 - DNA, 25 bp, Homo sapien
tgattttcgtcttccacgtcctgca

SEQ ID NO: 3000221 - DNA, 25 bp, Homo sapien
ctgcagcgcttctttattctgctct

SEQ ID NO: 3000222 - DNA, 25 bp, Homo sapien
tccacgtcctgcagcgcttctttat

SEQ ID NO: 3000223 - DNA, 25 bp, Homo sapien
gtcaattatttcgtattgactacat

SEQ ID NO: 3000224 - DNA, 25 bp, Homo sapien
ttgactacattaggctatggcagcc

SEQ ID NO: 3000225 - DNA, 25 bp, Homo sapien
acattaggctatggcagccacaaac

SEQ ID NO: 3000226 - DNA, 25 bp, Homo sapien
tatttcgtattgactacattaggct

SEQ ID NO: 3000227 - DNA, 25 bp, Homo sapien
ggagtttcaactgcactatgacatg

SEQ ID NO: 3000228 - DNA, 25 bp, Homo sapien
ccacctattggttggagggtcatct

SEQ ID NO: 3000229 - DNA, 25 bp, Homo sapien
cagagtgaaacacagcatgctcaaa

SEQ ID NO: 3000230 - DNA, 25 bp, Homo sapien
tagtatgcattaaacaagtcagcca

SEQ ID NO: 3000231 - DNA, 25 bp, Homo sapien
cagacttggttatgagttggtatca

SEQ ID NO: 3000232 - DNA, 25 bp, Homo sapien
gctacagaagtaatccagacttggt

SEQ ID NO: 3000233 - DNA, 25 bp, Homo sapien
tgtactcgacaaccaagaataagga

SEQ ID NO: 3000234 - DNA, 25 bp, Homo sapien
tgcaccaggccgtattaccctattt

SEQ ID NO: 3000235 - DNA, 25 bp, Homo sapien
ccatagtgtcagattatcacgtaac

SEQ ID NO: 3000236 - DNA, 25 bp, Homo sapien
tagtgtcagattatcacgtaacaac

SEQ ID NO: 3000237 - DNA, 25 bp, Homo sapien
aagtccatagtgtcagattatcacg

SEQ ID NO: 3000238 - DNA, 25 bp, Homo sapien
atcacgtaacaactgcatgataagt

SEQ ID NO: 3000239 - DNA, 25 bp, Homo sapien
gaacaacttccatcctaaaccatca

SEQ ID NO: 3000240 - DNA, 25 bp, Homo sapien
tactatgctttaagcctgctactga

SEQ ID NO: 3000241 - DNA, 25 bp, Homo sapien
gaaatgacatgctagacagcaatct

SEQ ID NO: 3000242 - DNA, 25 bp, Homo sapien
tgtggaacactacttcttactatgc

SEQ ID NO: 3000243 - DNA, 25 bp, Homo sapien
ctgtggcaaattctgccagatacct

SEQ ID NO: 3000244 - DNA, 25 bp, Homo sapien
gtggcaaattctgccagatacctgt

SEQ ID NO: 3000245 - DNA, 25 bp, Homo sapien
tgtggcaaattctgccagatacctg

SEQ ID NO: 3000246 - DNA, 25 bp, Homo sapien
cactgtgaaatgtatgccgtttggg

SEQ ID NO: 3000247 - DNA, 25 bp, Homo sapien
cctacatagaacaaagttatggttc

SEQ ID NO: 3000248 - DNA, 25 bp, Homo sapien
aaggaccaactttcaatcttacatt

SEQ ID NO: 3000249 - DNA, 25 bp, Homo sapien
tatataacactaagcactgtgaaat

SEQ ID NO: 3000250 - DNA, 25 bp, Homo sapien
ttataatagaaaaccttggactcgc

SEQ ID NO: 3000251 - DNA, 25 bp, Homo sapien
cagtacatccagaatgtcacaacag

SEQ ID NO: 3000252 - DNA, 25 bp, Homo sapien
gtacatccagaatgtcacaacagat

SEQ ID NO: 3000253 - DNA, 25 bp, Homo sapien
acatccagaatgtcacaacagatta

SEQ ID NO: 3000254 - DNA, 25 bp, Homo sapien
ccagtacatccagaatgtcacaaca

SEQ ID NO: 3000255 - DNA, 25 bp, Homo sapien
tcacaaggtagcaacgtaaagacat

SEQ ID NO: 3000256 - DNA, 25 bp, Homo sapien
tttcacaaggtagcaacgtaaagac

SEQ ID NO: 3000257 - DNA, 25 bp, Homo sapien
cttctttcacaaggtagcaacgtaa

SEQ ID NO: 3000258 - DNA, 25 bp, Homo sapien
caaggtagcaacgtaaagacattgc

SEQ ID NO: 3000259 - DNA, 25 bp, Homo sapien
ccaagagggatccattgagacctgc

SEQ ID NO: 3000260 - DNA, 25 bp, Homo sapien
ttttgtcctcatgcatagccacggg

SEQ ID NO: 3000261 - DNA, 25 bp, Homo sapien
tctcaaaatcttaagtgtaccgtcc

SEQ ID NO: 3000262 - DNA, 25 bp, Homo sapien
tgtaccgtcctacaggtaactcaaa

SEQ ID NO: 3000263 - DNA, 25 bp, Homo sapien
ccaatcacattcttatatgcaacag

SEQ ID NO: 3000264 - DNA, 25 bp, Homo sapien
cagataggaggtttctttcttcaac

SEQ ID NO: 3000265 - DNA, 25 bp, Homo sapien
gccgatattcccgaatcatttttag

SEQ ID NO: 3000266 - DNA, 25 bp, Homo sapien
catttgccgatattcccgaatcatt

SEQ ID NO: 3000267 - DNA, 25 bp, Homo sapien
cctgctactttcttcattgactcca

SEQ ID NO: 3000268 - DNA, 25 bp, Homo sapien
ccctgctactttcttcattgactcc

SEQ ID NO: 3000269 - DNA, 25 bp, Homo sapien
tgctactttcttcattgactccacc

SEQ ID NO: 3000270 - DNA, 25 bp, Homo sapien
ctactttcttcattgactccaccat

SEQ ID NO: 3000271 - DNA, 25 bp, Homo sapien
gaagatactgcgggttcagttccag

SEQ ID NO: 3000272 - DNA, 25 bp, Homo sapien
cttggaagatactgcgggttcagtt

SEQ ID NO: 3000273 - DNA, 25 bp, Homo sapien
atactgcgggttcagttccagagca

SEQ ID NO: 3000274 - DNA, 25 bp, Homo sapien
gatactgcgggttcagttccagagc

SEQ ID NO: 3000275 - DNA, 25 bp, Homo sapien
ccatgttcaagtgatgctcttgccc

SEQ ID NO: 3000276 - DNA, 25 bp, Homo sapien
gccccagcctccctggtagttagga

SEQ ID NO: 3000277 - DNA, 25 bp, Homo sapien
aggctgaagtgcaatctcactgcaa

SEQ ID NO: 3000278 - DNA, 25 bp, Homo sapien
ttgccccagcctccctggtagttag

SEQ ID NO: 3000279 - DNA, 25 bp, Homo sapien
ctcagcccctaccagaagatgggat

SEQ ID NO: 3000280 - DNA, 25 bp, Homo sapien
ctgtctcagcccctaccagaagatg

SEQ ID NO: 3000281 - DNA, 25 bp, Homo sapien
tgtctcagcccctaccagaagatgg

SEQ ID NO: 3000282 - DNA, 25 bp, Homo sapien
agcccctaccagaagatgggattac

SEQ ID NO: 3000283 - DNA, 25 bp, Homo sapien
tatgtatctatctcaaactgttaac

SEQ ID NO: 3000284 - DNA, 25 bp, Homo sapien
agtgaatcgttactgcatcaatgca

SEQ ID NO: 3000285 - DNA, 25 bp, Homo sapien
gagccataaatgtgacactgcatcc

SEQ ID NO: 3000286 - DNA, 25 bp, Homo sapien
gctacttggcatgctgaggtgccca

SEQ ID NO: 3000287 - DNA, 25 bp, Homo sapien
agcatgatggcccaagtctgtagtc

SEQ ID NO: 3000288 - DNA, 25 bp, Homo sapien
ttaatagcattcactaagacaaagg

SEQ ID NO: 3000289 - DNA, 25 bp, Homo sapien
aaaaaagttgtatgactacatcact

SEQ ID NO: 3000290 - DNA, 25 bp, Homo sapien
tcactaacctaacaacttaatagca

SEQ ID NO: 3000291 - DNA, 25 bp, Homo sapien
taagtgtaccgatctaaaggtcagc

SEQ ID NO: 3000292 - DNA, 25 bp, Homo sapien
gggagtaacgctctacctgcttcaa

SEQ ID NO: 3000293 - DNA, 25 bp, Homo sapien
taaagtttaggccagaagcagtgac

SEQ ID NO: 3000294 - DNA, 25 bp, Homo sapien
acttttgtcaacgtgggctgtgaac

SEQ ID NO: 3000295 - DNA, 25 bp, Homo sapien
tggaataggttaagatcccccacga

SEQ ID NO: 3000296 - DNA, 25 bp, Homo sapien
cgaagtacagaccagcattccgagc

SEQ ID NO: 3000297 - DNA, 25 bp, Homo sapien
gttaagatcccccacgaagtacaga

SEQ ID NO: 3000298 - DNA, 25 bp, Homo sapien
cagccgagcgcctggaataggttaa

SEQ ID NO: 3000299 - DNA, 25 bp, Homo sapien
tctatccatcagaacccacgggtga

SEQ ID NO: 3000300 - DNA, 25 bp, Homo sapien
gaactctcagagtcgtggcctcctg

SEQ ID NO: 3000301 - DNA, 25 bp, Homo sapien
ggctcgggctctacaaaggctcgaa

SEQ ID NO: 3000302 - DNA, 25 bp, Homo sapien
ttcccatttgtcatcacggtgcgca

SEQ ID NO: 3000303 - DNA, 25 bp, Homo sapien
aggaagcccatcgctctcaaaggtc

SEQ ID NO: 3000304 - DNA, 25 bp, Homo sapien
ggtcctcctttgtgagactccacgg

SEQ ID NO: 3000305 - DNA, 25 bp, Homo sapien
ctcaaaggtcctcctttgtgagact

SEQ ID NO: 3000306 - DNA, 25 bp, Homo sapien
aaaggtcctcctttgtgagactcca

SEQ ID NO: 3000307 - DNA, 25 bp, Homo sapien
tcggccagcttcgcctggtacacca

SEQ ID NO: 3000308 - DNA, 25 bp, Homo sapien
agcttcgcctggtacaccagatcct

SEQ ID NO: 3000309 - DNA, 25 bp, Homo sapien
gccagcttcgcctggtacaccagat

SEQ ID NO: 3000310 - DNA, 25 bp, Homo sapien
ggccagcttcgcctggtacaccaga

SEQ ID NO: 3000311 - DNA, 25 bp, Homo sapien
atggaagcggatagtgtctccgact

SEQ ID NO: 3000312 - DNA, 25 bp, Homo sapien
gcggatagtgtctccgactctctca

SEQ ID NO: 3000313 - DNA, 25 bp, Homo sapien
ggcagggtctgcgcgacggatggaa

SEQ ID NO: 3000314 - DNA, 25 bp, Homo sapien
gatagtgtctccgactctctcagcc

SEQ ID NO: 3000315 - DNA, 25 bp, Homo sapien
aatccgggacttccgcctgcgcacg

SEQ ID NO: 3000316 - DNA, 25 bp, Homo sapien
ccgggacttccgcctgcgcacgcgg

SEQ ID NO: 3000317 - DNA, 25 bp, Homo sapien
cgggacttccgcctgcgcacgcgga

SEQ ID NO: 3000318 - DNA, 25 bp, Homo sapien
ctcaatccgggacttccgcctgcgc

SEQ ID NO: 3000319 - DNA, 25 bp, Homo sapien
tgacagccaggttcaggttttgttt

SEQ ID NO: 3000320 - DNA, 25 bp, Homo sapien
gcttcctttggtcttattgtgctaa

SEQ ID NO: 3000321 - DNA, 25 bp, Homo sapien
gactgacaagtgacaatatttaaag

SEQ ID NO: 3000322 - DNA, 25 bp, Homo sapien
ttggatgacagccaggttcaggttt

SEQ ID NO: 3000323 - DNA, 25 bp, Homo sapien
tgaattcacctattttgagcaagaa

SEQ ID NO: 3000324 - DNA, 25 bp, Homo sapien
caatgagttttagtctattacagag

SEQ ID NO: 3000325 - DNA, 25 bp, Homo sapien
ccacaccatgaattcacctattttg

SEQ ID NO: 3000326 - DNA, 25 bp, Homo sapien
tattacagagttatcccgccatcgc

SEQ ID NO: 3000327 - DNA, 25 bp, Homo sapien
ttgctgcgttgcgtaccctgtgccc

SEQ ID NO: 3000328 - DNA, 25 bp, Homo sapien
ctttcatttgaatagcagggccctg

SEQ ID NO: 3000329 - DNA, 25 bp, Homo sapien
tgtagttcctaccaatcacaaggtt

SEQ ID NO: 3000330 - DNA, 25 bp, Homo sapien
gggccctgttggctcataaggaact

SEQ ID NO: 3000331 - DNA, 25 bp, Homo sapien
taactgtcaagaaagtgtatagtgt

SEQ ID NO: 3000332 - DNA, 25 bp, Homo sapien
atttaactgtcaagaaagtgtatag

SEQ ID NO: 3000333 - DNA, 25 bp, Homo sapien
ttaactgtcaagaaagtgtatagtg

SEQ ID NO: 3000334 - DNA, 25 bp, Homo sapien
aaatttaactgtcaagaaagtgtat

SEQ ID NO: 3000335 - DNA, 25 bp, Homo sapien
gcttgcggccatgtacggaatcctg

SEQ ID NO: 3000336 - DNA, 25 bp, Homo sapien
tccttaggacttgagtagcgctgcc

SEQ ID NO: 3000337 - DNA, 25 bp, Homo sapien
tgtcagacagtgtgccggtcactcg

SEQ ID NO: 3000338 - DNA, 25 bp, Homo sapien
tcaacgcgttagtctgcttgcggcc

SEQ ID NO: 3000339 - DNA, 25 bp, Homo sapien
tgtccatcggttttccacagggtga

SEQ ID NO: 3000340 - DNA, 25 bp, Homo sapien
tgtcagaatgagtcacacgctggtc

SEQ ID NO: 3000341 - DNA, 25 bp, Homo sapien
taataggatactggccctctggaga

SEQ ID NO: 3000342 - DNA, 25 bp, Homo sapien
gaataaagtgctcggtacatcctgc

SEQ ID NO: 3000343 - DNA, 25 bp, Homo sapien
gattctgttgatccagcagacggac

SEQ ID NO: 3000344 - DNA, 25 bp, Homo sapien
cattaatcttcgtaacctttaccag

SEQ ID NO: 3000345 - DNA, 25 bp, Homo sapien
tgaagtcctcatcgggattctgttg

SEQ ID NO: 3000346 - DNA, 25 bp, Homo sapien
ggaagtgacctcgtttgccattaca

SEQ ID NO: 3000347 - DNA, 25 bp, Homo sapien
ctgatcattacccaatgaggggtca

SEQ ID NO: 3000348 - DNA, 25 bp, Homo sapien
tgatcattacccaatgaggggtcaa

SEQ ID NO: 3000349 - DNA, 25 bp, Homo sapien
gatcattacccaatgaggggtcaaa

SEQ ID NO: 3000350 - DNA, 25 bp, Homo sapien
atcattacccaatgaggggtcaaaa

SEQ ID NO: 3000351 - DNA, 25 bp, Homo sapien
agcacttggtgagcctgacacaggt

SEQ ID NO: 3000352 - DNA, 25 bp, Homo sapien
ggtggtggctgctcatagaaccagc

SEQ ID NO: 3000353 - DNA, 25 bp, Homo sapien
cttggtgagcctgacacaggtggat

SEQ ID NO: 3000354 - DNA, 25 bp, Homo sapien
tggctgctcatagaaccagctactc

SEQ ID NO: 3000355 - DNA, 25 bp, Homo sapien
cacttcagccatgacctttcaggct

SEQ ID NO: 3000356 - DNA, 25 bp, Homo sapien
cagctcacttcagccatgacctttc

SEQ ID NO: 3000357 - DNA, 25 bp, Homo sapien
tcacttcagccatgacctttcaggc

SEQ ID NO: 3000358 - DNA, 25 bp, Homo sapien
gctcacttcagccatgacctttcag

SEQ ID NO: 3000359 - DNA, 25 bp, Homo sapien
cactcctcggaatgaggacttctgg

SEQ ID NO: 3000360 - DNA, 25 bp, Homo sapien
taacaccatgtaatggctggccaga

SEQ ID NO: 3000361 - DNA, 25 bp, Homo sapien
ccagaaggaagtgggctgccaaaga

SEQ ID NO: 3000362 - DNA, 25 bp, Homo sapien
aatgatttagaaagacccgtgcacc

SEQ ID NO: 3000363 - DNA, 25 bp, Homo sapien
ttctttctacattgtgcacgttatg

SEQ ID NO: 3000364 - DNA, 25 bp, Homo sapien
tttctacattgtgcacgttatgtac

SEQ ID NO: 3000365 - DNA, 25 bp, Homo sapien
tcagcattgctacaaagctctaaga

SEQ ID NO: 3000366 - DNA, 25 bp, Homo sapien
tacaacatcccaatgctgtagtcag

SEQ ID NO: 3000367 - DNA, 25 bp, Homo sapien
tgacgctgggttgggcatagggccc

SEQ ID NO: 3000368 - DNA, 25 bp, Homo sapien
aaggctgtcttgtcgtaggcattgg

SEQ ID NO: 3000369 - DNA, 25 bp, Homo sapien
tatatgggcccattctggaggttag

SEQ ID NO: 3000370 - DNA, 25 bp, Homo sapien
gactcgcttctggataaccctggca

SEQ ID NO: 3000371 - DNA, 25 bp, Homo sapien
caatcagagccgatactgaggcgga

SEQ ID NO: 3000372 - DNA, 25 bp, Homo sapien
cattaaagtcaaagagggctcgcac

SEQ ID NO: 3000373 - DNA, 25 bp, Homo sapien
cactaccctgcctggatctggaaac

SEQ ID NO: 3000374 - DNA, 25 bp, Homo sapien
tacttctcgacgtaagggactggaa

SEQ ID NO: 3000375 - DNA, 25 bp, Homo sapien
gaaactagactgttcgctatgaagc

SEQ ID NO: 3000376 - DNA, 25 bp, Homo sapien
ggtggccctacataccatagttcag

SEQ ID NO: 3000377 - DNA, 25 bp, Homo sapien
taagacacgagtgtgtatggtggcc

SEQ ID NO: 3000378 - DNA, 25 bp, Homo sapien
tacaggcacgctcaaccatatctgg

SEQ ID NO: 3000379 - DNA, 25 bp, Homo sapien
caggacactcaggtagggggatggc

SEQ ID NO: 3000380 - DNA, 25 bp, Homo sapien
ctcaggacactcaggtagggggatg

SEQ ID NO: 3000381 - DNA, 25 bp, Homo sapien
aatgaattttgttgggcgtggtgcc

SEQ ID NO: 3000382 - DNA, 25 bp, Homo sapien
tgaattttgttgggcgtggtgcctc

SEQ ID NO: 3000383 - DNA, 25 bp, Homo sapien
tgcccaggctgcggttttgtttttg

SEQ ID NO: 3000384 - DNA, 25 bp, Homo sapien
cccggcccttcacccagctgatttt

SEQ ID NO: 3000385 - DNA, 25 bp, Homo sapien
ttgctttactgcccaggctgcggtt

SEQ ID NO: 3000386 - DNA, 25 bp, Homo sapien
tgtgcccggcccttcacccagctga

SEQ ID NO: 3000387 - DNA, 25 bp, Homo sapien
caggtgatcccaccgacttcagcct

SEQ ID NO: 3000388 - DNA, 25 bp, Homo sapien
taggcacaagccacccaccaacaca

SEQ ID NO: 3000389 - DNA, 25 bp, Homo sapien
tgatcccaccgacttcagcctctca

SEQ ID NO: 3000390 - DNA, 25 bp, Homo sapien
gcacaatgccttcctagactggaga

SEQ ID NO: 3000391 - DNA, 25 bp, Homo sapien
tgtcctgagatacaacagaatcgcc

SEQ ID NO: 3000392 - DNA, 25 bp, Homo sapien
gaaagcggcacgtcttaggaagaca

SEQ ID NO: 3000393 - DNA, 25 bp, Homo sapien
actgttaccatagcaggccgagcga

SEQ ID NO: 3000394 - DNA, 25 bp, Homo sapien
caacaggtcggatgagcaggtaaca

SEQ ID NO: 3000395 - DNA, 25 bp, Homo sapien
taaccaatctttagggagacatctg

SEQ ID NO: 3000396 - DNA, 25 bp, Homo sapien
agtctcacgctacctccagaagtgg

SEQ ID NO: 3000397 - DNA, 25 bp, Homo sapien
tgtagctcttcactacctcgaggga

SEQ ID NO: 3000398 - DNA, 25 bp, Homo sapien
cgagttctctgagacgctgagcaca

SEQ ID NO: 3000399 - DNA, 25 bp, Homo sapien
gagacgcgcgagttctctgagacgc

SEQ ID NO: 3000400 - DNA, 25 bp, Homo sapien
agacgctgagcacatagtccccggg

SEQ ID NO: 3000401 - DNA, 25 bp, Homo sapien
tactccgctcctccgagtcgaagtt

SEQ ID NO: 3000402 - DNA, 25 bp, Homo sapien
ctggggtgccgccgccgcgcgcgcc

SEQ ID NO: 3000403 - DNA, 25 bp, Homo sapien
gccgccgccgcgcgcgcccctccgg

SEQ ID NO: 3000404 - DNA, 25 bp, Homo sapien
gccgccgcgcgcgcccctccggccc

SEQ ID NO: 3000405 - DNA, 25 bp, Homo sapien
tgccgccgccgcgcgcgcccctccg

SEQ ID NO: 3000406 - DNA, 25 bp, Homo sapien
ccctccggaaatgacgcgctccctg

SEQ ID NO: 3000407 - DNA, 25 bp, Homo sapien
ggctccggtttcagcttcacagcag

SEQ ID NO: 3000408 - DNA, 25 bp, Homo sapien
gcagcgcccgaaatggcggcggcag

SEQ ID NO: 3000409 - DNA, 25 bp, Homo sapien
cggcccgccattgggagaagggcaa

SEQ ID NO: 3000410 - DNA, 25 bp, Homo sapien
gcttcttggaggcatcgttactgct

SEQ ID NO: 3000411 - DNA, 25 bp, Homo sapien
gcattctggtttgctagagaaagga

SEQ ID NO: 3000412 - DNA, 25 bp, Homo sapien
ctgctgataaagtggacgaataatt

SEQ ID NO: 3000413 - DNA, 25 bp, Homo sapien
ctatcttatctatcagcttcttgga

SEQ ID NO: 3000414 - DNA, 25 bp, Homo sapien
tgatgaggacagtaaaagggcgttc

SEQ ID NO: 3000415 - DNA, 25 bp, Homo sapien
agaggcgcttttcccacctggtggc

SEQ ID NO: 3000416 - DNA, 25 bp, Homo sapien
gaaaaggccctacatccttgagtgg

SEQ ID NO: 3000417 - DNA, 25 bp, Homo sapien
gaaagacaaggtgccaagggaatca

SEQ ID NO: 3000418 - DNA, 25 bp, Homo sapien
accgagaattcagccgtggggcgac

SEQ ID NO: 3000419 - DNA, 25 bp, Homo sapien
caccgagaattcagccgtggggcga

SEQ ID NO: 3000420 - DNA, 25 bp, Homo sapien
tcaccgagaattcagccgtggggcg

SEQ ID NO: 3000421 - DNA, 25 bp, Homo sapien
tgccggggccccctgcaaacgtgat

SEQ ID NO: 3000422 - DNA, 25 bp, Homo sapien
gccaggtgcccgttcttggccttgg

SEQ ID NO: 3000423 - DNA, 25 bp, Homo sapien
tggtgatgagcagctccgagccggg

SEQ ID NO: 3000424 - DNA, 25 bp, Homo sapien
caatggtgccatccctgccggggcc

SEQ ID NO: 3000425 - DNA, 25 bp, Homo sapien
gttgatgctgttcacgcggttggca

SEQ ID NO: 3000426 - DNA, 25 bp, Homo sapien
gtcagcgtctcaatcacgtggtcac

SEQ ID NO: 3000427 - DNA, 25 bp, Homo sapien
cgcggttggcactgagggctgtctt

SEQ ID NO: 3000428 - DNA, 25 bp, Homo sapien
gtctcaatcacgtggtcactctgca

SEQ ID NO: 3000429 - DNA, 25 bp, Homo sapien
gggggccaggcaggaggaggggtca

SEQ ID NO: 3000430 - DNA, 25 bp, Homo sapien
ggggccaggcaggaggaggggtcag

SEQ ID NO: 3000431 - DNA, 25 bp, Homo sapien
gccaggcaggaggaggggtcaggcc

SEQ ID NO: 3000432 - DNA, 25 bp, Homo sapien
gggccaggcaggaggaggggtcagg

SEQ ID NO: 3000433 - DNA, 25 bp, Homo sapien
actcctccccatccatgaaaaggca

SEQ ID NO: 3000434 - DNA, 25 bp, Homo sapien
cactcctccccatccatgaaaaggc

SEQ ID NO: 3000435 - DNA, 25 bp, Homo sapien
ctcctccccatccatgaaaaggcac

SEQ ID NO: 3000436 - DNA, 25 bp, Homo sapien
cacgctgtacatgaagcacaaaaag

SEQ ID NO: 3000437 - DNA, 25 bp, Homo sapien
tgtccgcacgctgtacatgaagcac

SEQ ID NO: 3000438 - DNA, 25 bp, Homo sapien
gcacaaaaagactgtcgctcaggct

SEQ ID NO: 3000439 - DNA, 25 bp, Homo sapien
cttttgcttattgtccgcacgctgt

SEQ ID NO: 3000440 - DNA, 25 bp, Homo sapien
tagcccttgcggtcgtatttcacaa

SEQ ID NO: 3000441 - DNA, 25 bp, Homo sapien
cgtatttcacaacaggcaccgcata

SEQ ID NO: 3000442 - DNA, 25 bp, Homo sapien
ggttggcgtaatcaatcctctgctt

SEQ ID NO: 3000443 - DNA, 25 bp, Homo sapien
tgactttggcgtcctccacgatgac

SEQ ID NO: 3000444 - DNA, 25 bp, Homo sapien
agcactcgggggctgatctcatctg

SEQ ID NO: 3000445 - DNA, 25 bp, Homo sapien
gcactcgggggctgatctcatctgt

SEQ ID NO: 3000446 - DNA, 25 bp, Homo sapien
agtcagtggaggcaatgggggacca

SEQ ID NO: 3000447 - DNA, 25 bp, Homo sapien
aaggtctgagtgctggaaagtcagg

SEQ ID NO: 3000448 - DNA, 25 bp, Homo sapien
agatggcggggagggaagtcagtgg

SEQ ID NO: 3000449 - DNA, 25 bp, Homo sapien
accaggatggtgacgaaaggtctga

SEQ ID NO: 3000450 - DNA, 25 bp, Homo sapien
aagatctcactagccacggccttct

SEQ ID NO: 3000451 - DNA, 25 bp, Homo sapien
aagagcctgggtacactctgagggt

SEQ ID NO: 3000452 - DNA, 25 bp, Homo sapien
gggtacactctgagggtaattatcc

SEQ ID NO: 3000453 - DNA, 25 bp, Homo sapien
ttgaagatctcactagccacggcct

SEQ ID NO: 3000454 - DNA, 25 bp, Homo sapien
tttgagcaatgcttgcgactccctg

SEQ ID NO: 3000455 - DNA, 25 bp, Homo sapien
tgagcaatgcttgcgactccctgac

SEQ ID NO: 3000456 - DNA, 25 bp, Homo sapien
agcaatgcttgcgactccctgactc

SEQ ID NO: 3000457 - DNA, 25 bp, Homo sapien
atgcttgcgactccctgactccact

SEQ ID NO: 3000458 - DNA, 25 bp, Homo sapien
ttatgcacaactcccgcagaagctc

SEQ ID NO: 3000459 - DNA, 25 bp, Homo sapien
tctttatgcacaactcccgcagaag

SEQ ID NO: 3000460 - DNA, 25 bp, Homo sapien
ctcagggctgatactccggcagtat

SEQ ID NO: 3000461 - DNA, 25 bp, Homo sapien
cggcagtatttccacaccatgttct

SEQ ID NO: 3000462 - DNA, 25 bp, Homo sapien
gctgccgcctcaggtttagcaaaaa

SEQ ID NO: 3000463 - DNA, 25 bp, Homo sapien
aaagaggtgcgcacatggtccagga

SEQ ID NO: 3000464 - DNA, 25 bp, Homo sapien
tggcgcaggacgaagcctcggatga

SEQ ID NO: 3000465 - DNA, 25 bp, Homo sapien
tagcaaaaaagaggtgcgcacatgg

SEQ ID NO: 3000466 - DNA, 25 bp, Homo sapien
gccggatggtctgtgccgcccactt

SEQ ID NO: 3000467 - DNA, 25 bp, Homo sapien
ggcccagtgttccacgccaccacga

SEQ ID NO: 3000468 - DNA, 25 bp, Homo sapien
tgttccacgccaccacgactggatg

SEQ ID NO: 3000469 - DNA, 25 bp, Homo sapien
cgccaccacgactggatgcagatgg

SEQ ID NO: 3000470 - DNA, 25 bp, Homo sapien
ctcctgaacacccatgggcccgcga

SEQ ID NO: 3000471 - DNA, 25 bp, Homo sapien
tcctgaacacccatgggcccgcgaa

SEQ ID NO: 3000472 - DNA, 25 bp, Homo sapien
cctgaacacccatgggcccgcgaac

SEQ ID NO: 3000473 - DNA, 25 bp, Homo sapien
cctcctgaacacccatgggcccgcg

SEQ ID NO: 3000474 - DNA, 25 bp, Homo sapien
atttctgccgccagtgaaagcccct

SEQ ID NO: 3000475 - DNA, 25 bp, Homo sapien
gaggaatttctgccgccagtgaaag

SEQ ID NO: 3000476 - DNA, 25 bp, Homo sapien
ctgatctcttcacccggaggaattt

SEQ ID NO: 3000477 - DNA, 25 bp, Homo sapien
ctcttcacccggaggaatttctgcc

SEQ ID NO: 3000478 - DNA, 25 bp, Homo sapien
gagcctggtgccgtgtgcgctccac

SEQ ID NO: 3000479 - DNA, 25 bp, Homo sapien
cgtgtgcgctccacgagtggcatga

SEQ ID NO: 3000480 - DNA, 25 bp, Homo sapien
aagaaaggcaattggccagagcgcg

SEQ ID NO: 3000481 - DNA, 25 bp, Homo sapien
ctccacgagtggcatgaatgggaga

SEQ ID NO: 3000482 - DNA, 25 bp, Homo sapien
cctctgtggcaaacagggtcttggg

SEQ ID NO: 3000483 - DNA, 25 bp, Homo sapien
ccaggctctgccgccggacctccag

SEQ ID NO: 3000484 - DNA, 25 bp, Homo sapien
ctgggagagcagtagtgatcagccc

SEQ ID NO: 3000485 - DNA, 25 bp, Homo sapien
ggggttgccactcccattccccgca

SEQ ID NO: 3000486 - DNA, 25 bp, Homo sapien
aggcacccggcacggacactaccca

SEQ ID NO: 3000487 - DNA, 25 bp, Homo sapien
cagtagtgatcagcccggggttgcc

SEQ ID NO: 3000488 - DNA, 25 bp, Homo sapien
ctgcccatcttgtactcttctggct

SEQ ID NO: 3000489 - DNA, 25 bp, Homo sapien
tagcccaggtgtcggaccagcacag

SEQ ID NO: 3000490 - DNA, 25 bp, Homo sapien
tggcttgtagcccaggtgtcggacc

SEQ ID NO: 3000491 - DNA, 25 bp, Homo sapien
tgcccacgtgggccacgtctctggg

SEQ ID NO: 3000492 - DNA, 25 bp, Homo sapien
tgcggcgataggcaaagccggctct

SEQ ID NO: 3000493 - DNA, 25 bp, Homo sapien
acttcacctggtggcggatcagcac

SEQ ID NO: 3000494 - DNA, 25 bp, Homo sapien
aaagcttcgtatttgcggcgatagg

SEQ ID NO: 3000495 - DNA, 25 bp, Homo sapien
tgcgcacgcgcaggttttccaacag

SEQ ID NO: 3000496 - DNA, 25 bp, Homo sapien
agcggacgtaggcgggctccttaga

SEQ ID NO: 3000497 - DNA, 25 bp, Homo sapien
cgtaggcgggctccttagactgcag

SEQ ID NO: 3000498 - DNA, 25 bp, Homo sapien
gacgtaggcgggctccttagactgc

SEQ ID NO: 3000499 - DNA, 25 bp, Homo sapien
taggcgggctccttagactgcagga

SEQ ID NO: 3000500 - DNA, 25 bp, Homo sapien
tcccggtgttccgagagtagcaggt

SEQ ID NO: 3000501 - DNA, 25 bp, Homo sapien
ccggtgttccgagagtagcaggtgt

SEQ ID NO: 3000502 - DNA, 25 bp, Homo sapien
aatcccggtgttccgagagtagcag

SEQ ID NO: 3000503 - DNA, 25 bp, Homo sapien
cggtgttccgagagtagcaggtgta

SEQ ID NO: 3000504 - DNA, 25 bp, Homo sapien
tgtcactgagctcgctccggtcaaa

SEQ ID NO: 3000505 - DNA, 25 bp, Homo sapien
caaagcactggctcataatgggatt

SEQ ID NO: 3000506 - DNA, 25 bp, Homo sapien
tgggattctttgagctacacatggt

SEQ ID NO: 3000507 - DNA, 25 bp, Homo sapien
gtctctggccgcttcttgtcactga

SEQ ID NO: 3000508 - DNA, 25 bp, Homo sapien
aaggttccggaagagaaggtcattg

SEQ ID NO: 3000509 - DNA, 25 bp, Homo sapien
gaagagaaggtcattgtttttgtcc

SEQ ID NO: 3000510 - DNA, 25 bp, Homo sapien
aggttccggaagagaaggtcattgt

SEQ ID NO: 3000511 - DNA, 25 bp, Homo sapien
gagaaggtcattgtttttgtccaga

SEQ ID NO: 3000512 - DNA, 25 bp, Homo sapien
ccccgcatagtgcagaaggcggaat

SEQ ID NO: 3000513 - DNA, 25 bp, Homo sapien
ggcggaattcccctcggcccagaga

SEQ ID NO: 3000514 - DNA, 25 bp, Homo sapien
agagatttcctggtccgctggtcag

SEQ ID NO: 3000515 - DNA, 25 bp, Homo sapien
cggtcacgctgtaggtcacctcccc

SEQ ID NO: 3000516 - DNA, 25 bp, Homo sapien
cttaactcagcaccgtccctggtca

SEQ ID NO: 3000517 - DNA, 25 bp, Homo sapien
cttagtttctggacacatgtgaggg

SEQ ID NO: 3000518 - DNA, 25 bp, Homo sapien
tgtgaggggtccttaactcagcacc

SEQ ID NO: 3000519 - DNA, 25 bp, Homo sapien
tgatggcggagggactcctgcactc

SEQ ID NO: 3000520 - DNA, 25 bp, Homo sapien
gtgtggatggtgcttgacagtatcc

SEQ ID NO: 3000521 - DNA, 25 bp, Homo sapien
tgcttgacagtatcctccagcttct

SEQ ID NO: 3000522 - DNA, 25 bp, Homo sapien
gatggtgcttgacagtatcctccag

SEQ ID NO: 3000523 - DNA, 25 bp, Homo sapien
ggtgcttgacagtatcctccagctt

SEQ ID NO: 3000524 - DNA, 25 bp, Homo sapien
caccagatcacagatgattttgttg

SEQ ID NO: 3000525 - DNA, 25 bp, Homo sapien
gttgttgaaatactggacgggctcc

SEQ ID NO: 3000526 - DNA, 25 bp, Homo sapien
tttgttgttgaaatactggacgggc

SEQ ID NO: 3000527 - DNA, 25 bp, Homo sapien
tccaccagatcacagatgattttgt

SEQ ID NO: 3000528 - DNA, 25 bp, Homo sapien
gagagtgcccccaggctagcacaca

SEQ ID NO: 3000529 - DNA, 25 bp, Homo sapien
gctccccgtggcccacggagagtgc

SEQ ID NO: 3000530 - DNA, 25 bp, Homo sapien
acggagagtgcccccaggctagcac

SEQ ID NO: 3000531 - DNA, 25 bp, Homo sapien
tccccgtggcccacggagagtgccc

SEQ ID NO: 3000532 - DNA, 25 bp, Homo sapien
gtgagctcgatgaagagctgctgca

SEQ ID NO: 3000533 - DNA, 25 bp, Homo sapien
ctgctccgacttgagcgtgagctcg

SEQ ID NO: 3000534 - DNA, 25 bp, Homo sapien
tcctcctgctccgacttgagcgtga

SEQ ID NO: 3000535 - DNA, 25 bp, Homo sapien
tcctgctccgacttgagcgtgagct

SEQ ID NO: 3000536 - DNA, 25 bp, Homo sapien
ttcaaagccataaatatccaggagc

SEQ ID NO: 3000537 - DNA, 25 bp, Homo sapien
tgttatgctgaaacacttcaaagcc

SEQ ID NO: 3000538 - DNA, 25 bp, Homo sapien
agaaccgtggtgctccgccagctgg

SEQ ID NO: 3000539 - DNA, 25 bp, Homo sapien
atccaggagcccgagaaccgtggtg

SEQ ID NO: 3000540 - DNA, 25 bp, Homo sapien
ggaggccagcgacctgttgatcttc

SEQ ID NO: 3000541 - DNA, 25 bp, Homo sapien
gcgtctcgtgcgtacgcggcctgct

SEQ ID NO: 3000542 - DNA, 25 bp, Homo sapien
ttcccgacgagccaggtaaaagtgc

SEQ ID NO: 3000543 - DNA, 25 bp, Homo sapien
gtaaaagtgcggctgtacacagcct

SEQ ID NO: 3000544 - DNA, 25 bp, Homo sapien
gggcttctcgcagcgtcgagccttc

SEQ ID NO: 3000545 - DNA, 25 bp, Homo sapien
ccccttggcgatgatcttcctgtgt

SEQ ID NO: 3000546 - DNA, 25 bp, Homo sapien
tcctgtgtgtcagggcttctcgcag

SEQ ID NO: 3000547 - DNA, 25 bp, Homo sapien
ccttggcgatgatcttcctgtgtgt

SEQ ID NO: 3000548 - DNA, 25 bp, Homo sapien
cttgagctggttctcggtggtgacc

SEQ ID NO: 3000549 - DNA, 25 bp, Homo sapien
atgaaggacgctggccacgatgctc

SEQ ID NO: 3000550 - DNA, 25 bp, Homo sapien
ggtgacctgggcattgctctcctcg

SEQ ID NO: 3000551 - DNA, 25 bp, Homo sapien
gcccaaatgaaggacgctggccacg

SEQ ID NO: 3000552 - DNA, 25 bp, Homo sapien
ccagtcactcttgtcgttgatggag

SEQ ID NO: 3000553 - DNA, 25 bp, Homo sapien
agagccttcctgacgaccttccagt

SEQ ID NO: 3000554 - DNA, 25 bp, Homo sapien
ttcatcctcggtgaaatcaatgact

SEQ ID NO: 3000555 - DNA, 25 bp, Homo sapien
ttgatggaggagactttggcacact

SEQ ID NO: 3000556 - DNA, 25 bp, Homo sapien
ggaggtaactgaggatgtggccacc

SEQ ID NO: 3000557 - DNA, 25 bp, Homo sapien
tggaagttccgctccccatgattct

SEQ ID NO: 3000558 - DNA, 25 bp, Homo sapien
cactcgtgacttttccaggaggtaa

SEQ ID NO: 3000559 - DNA, 25 bp, Homo sapien
catgattctggtgcaccactcgtga

SEQ ID NO: 3000560 - DNA, 25 bp, Homo sapien
ccgaacctgctggagttatcgttcc

SEQ ID NO: 3000561 - DNA, 25 bp, Homo sapien
aacctgctggagttatcgttccgga

SEQ ID NO: 3000562 - DNA, 25 bp, Homo sapien
cctgctggagttatcgttccggagg

SEQ ID NO: 3000563 - DNA, 25 bp, Homo sapien
ttcccgaacctgctggagttatcgt

SEQ ID NO: 3000564 - DNA, 25 bp, Homo sapien
ccgggttgctctgtagcagccggtc

SEQ ID NO: 3000565 - DNA, 25 bp, Homo sapien
cagcaccgggttgctctgtagcagc

SEQ ID NO: 3000566 - DNA, 25 bp, Homo sapien
gcaccgggttgctctgtagcagccg

SEQ ID NO: 3000567 - DNA, 25 bp, Homo sapien
ctccagcaccgggttgctctgtagc

SEQ ID NO: 3000568 - DNA, 25 bp, Homo sapien
ggtacacagtgtccgccacggcaaa

SEQ ID NO: 3000569 - DNA, 25 bp, Homo sapien
tgctcggtacacagtgtccgccacg

SEQ ID NO: 3000570 - DNA, 25 bp, Homo sapien
ctccgtgcgcagtgctcggtacaca

SEQ ID NO: 3000571 - DNA, 25 bp, Homo sapien
gcagtgctcggtacacagtgtccgc

SEQ ID NO: 3000572 - DNA, 25 bp, Homo sapien
atatgctgccggctgtagatctgca

SEQ ID NO: 3000573 - DNA, 25 bp, Homo sapien
gccacggtaacgctccatatgctgc

SEQ ID NO: 3000574 - DNA, 25 bp, Homo sapien
gggcacttcatagaagctgacgcca

SEQ ID NO: 3000575 - DNA, 25 bp, Homo sapien
tcccggtagggattgacagagacca

SEQ ID NO: 3000576 - DNA, 25 bp, Homo sapien
gtagatgagattctcccgaaatcgc

SEQ ID NO: 3000577 - DNA, 25 bp, Homo sapien
cgcaggttctcgatgaaggcggcct

SEQ ID NO: 3000578 - DNA, 25 bp, Homo sapien
aggcggcctcgctggtgaagttctc

SEQ ID NO: 3000579 - DNA, 25 bp, Homo sapien
ttctccagcagcacgaaatcctgca

SEQ ID NO: 3000580 - DNA, 25 bp, Homo sapien
gtcacccgaaccccgtcactgccca

SEQ ID NO: 3000581 - DNA, 25 bp, Homo sapien
ccggtagagcgtcgagcaccaagca

SEQ ID NO: 3000582 - DNA, 25 bp, Homo sapien
aagcaagaggttactcccagactac

SEQ ID NO: 3000583 - DNA, 25 bp, Homo sapien
gttactcccagactacaccagaggg

SEQ ID NO: 3000584 - DNA, 25 bp, Homo sapien
cacccactccagaacgcgggggagg

SEQ ID NO: 3000585 - DNA, 25 bp, Homo sapien
tccacccggaattcctgggccgcgc

SEQ ID NO: 3000586 - DNA, 25 bp, Homo sapien
gaagcggctgccaaatccggccgcg

SEQ ID NO: 3000587 - DNA, 25 bp, Homo sapien
gggtctccgcgttctcaggcgtccc

SEQ ID NO: 3000588 - DNA, 25 bp, Homo sapien
gccccgctccaatcccgcgccgaag

SEQ ID NO: 3000589 - DNA, 25 bp, Homo sapien
gcggcggcgtcagcgagggagggcc

SEQ ID NO: 3000590 - DNA, 25 bp, Homo sapien
ggtggcggcggcgtcagcgagggag

SEQ ID NO: 3000591 - DNA, 25 bp, Homo sapien
cggcgtcagcgagggagggcccgcc

SEQ ID NO: 3000592 - DNA, 25 bp, Homo sapien
tggcggcggcgtcagcgagggaggg

SEQ ID NO: 3000593 - DNA, 25 bp, Homo sapien
accccctctctgctagaaaatacaa

SEQ ID NO: 3000594 - DNA, 25 bp, Homo sapien
cagagcgaagctccgtctccaaaca

SEQ ID NO: 3000595 - DNA, 25 bp, Homo sapien
gcgaaaccccctctctgctagaaaa

SEQ ID NO: 3000596 - DNA, 25 bp, Homo sapien
acagagcgaagctccgtctccaaac

SEQ ID NO: 3000597 - DNA, 25 bp, Homo sapien
ttgtgcggttatcagggctaccagg

SEQ ID NO: 3000598 - DNA, 25 bp, Homo sapien
cctctttgtgcggttatcagggcta

SEQ ID NO: 3000599 - DNA, 25 bp, Homo sapien
ttatcagggctaccagggctgtgac

SEQ ID NO: 3000600 - DNA, 25 bp, Homo sapien
tgagcctctttgtgcggttatcagg

SEQ ID NO: 3000601 - DNA, 25 bp, Homo sapien
cccctgtcggtgtcgtgtgattcta

SEQ ID NO: 3000602 - DNA, 25 bp, Homo sapien
gacataggagacttcttccccaagg

SEQ ID NO: 3000603 - DNA, 25 bp, Homo sapien
tatgtcacatgtgggctttaggagt

SEQ ID NO: 3000604 - DNA, 25 bp, Homo sapien
ttcagtgacaccgttcaggcccctg

SEQ ID NO: 3000605 - DNA, 25 bp, Homo sapien
ctcactgagactcggctcaggtgtc

SEQ ID NO: 3000606 - DNA, 25 bp, Homo sapien
ctacacgcagcgaggcacacggtgg

SEQ ID NO: 3000607 - DNA, 25 bp, Homo sapien
tcccggacccctggatgaatgaatg

SEQ ID NO: 3000608 - DNA, 25 bp, Homo sapien
tcagctgtttccttgtcagtccctc

SEQ ID NO: 3000609 - DNA, 25 bp, Homo sapien
ggcgtggctcttccggcgcgggcgg

SEQ ID NO: 3000610 - DNA, 25 bp, Homo sapien
gcggcccgggcgcactctccccgcc

SEQ ID NO: 3000611 - DNA, 25 bp, Homo sapien
cccgggcgcactctccccgcccagg

SEQ ID NO: 3000612 - DNA, 25 bp, Homo sapien
cgtggcgggcttggggatccgcggc

SEQ ID NO: 3000613 - DNA, 25 bp, Homo sapien
ttctgttctgagtcttgggcggtcc

SEQ ID NO: 3000614 - DNA, 25 bp, Homo sapien
tgttctgagtcttgggcggtcccag

SEQ ID NO: 3000615 - DNA, 25 bp, Homo sapien
tctgttctgagtcttgggcggtccc

SEQ ID NO: 3000616 - DNA, 25 bp, Homo sapien
ttctgagtcttgggcggtcccagcc

SEQ ID NO: 3000617 - DNA, 25 bp, Homo sapien
tggggatgaaccacgcggatgatct

SEQ ID NO: 3000618 - DNA, 25 bp, Homo sapien
atgaaccacgcggatgatctccccg

SEQ ID NO: 3000619 - DNA, 25 bp, Homo sapien
atgatctccccggtgggtaccagct

SEQ ID NO: 3000620 - DNA, 25 bp, Homo sapien
cgcggatgatctccccggtgggtac

SEQ ID NO: 3000621 - DNA, 25 bp, Homo sapien
agagccagcggcctgggcaccgcgg

SEQ ID NO: 3000622 - DNA, 25 bp, Homo sapien
ctgcggagagccagcggcctgggca

SEQ ID NO: 3000623 - DNA, 25 bp, Homo sapien
cggagagccagcggcctgggcaccg

SEQ ID NO: 3000624 - DNA, 25 bp, Homo sapien
tgcggagagccagcggcctgggcac

SEQ ID NO: 3000625 - DNA, 25 bp, Homo sapien
cactggcgggctccgaccactccgg

SEQ ID NO: 3000626 - DNA, 25 bp, Homo sapien
cccactggcgggctccgaccactcc

SEQ ID NO: 3000627 - DNA, 25 bp, Homo sapien
tggcgggctccgaccactccgggac

SEQ ID NO: 3000628 - DNA, 25 bp, Homo sapien
tgcctgcccactggcgggctccgac

SEQ ID NO: 3000629 - DNA, 25 bp, Homo sapien
taacgccgggatggccacttggttc

SEQ ID NO: 3000630 - DNA, 25 bp, Homo sapien
ttggttctgcttcaactgcagcccc

SEQ ID NO: 3000631 - DNA, 25 bp, Homo sapien
cctcttggcccggatggttggagca

SEQ ID NO: 3000632 - DNA, 25 bp, Homo sapien
gagccgtccaggtctgactgggagg

SEQ ID NO: 3000633 - DNA, 25 bp, Homo sapien
caatggctcctgacaagggtggcac

SEQ ID NO: 3000634 - DNA, 25 bp, Homo sapien
cataaccatggcgtaagagcctggc

SEQ ID NO: 3000635 - DNA, 25 bp, Homo sapien
gctaccaacggaagcgaacctggat

SEQ ID NO: 3000636 - DNA, 25 bp, Homo sapien
gaaatgagacgcagaactgtcccca

SEQ ID NO: 3000637 - DNA, 25 bp, Homo sapien
gtggctgtgcttcacccagtgggtc

SEQ ID NO: 3000638 - DNA, 25 bp, Homo sapien
tggctgtgcttcacccagtgggtcc

SEQ ID NO: 3000639 - DNA, 25 bp, Homo sapien
tgtggctgtgcttcacccagtgggt

SEQ ID NO: 3000640 - DNA, 25 bp, Homo sapien
agatctgtggctgtgcttcacccag

SEQ ID NO: 3000641 - DNA, 25 bp, Homo sapien
ctcatgtaccggctggctcccaggc

SEQ ID NO: 3000642 - DNA, 25 bp, Homo sapien
ggagagcgggtcttcctccgtgctt

SEQ ID NO: 3000643 - DNA, 25 bp, Homo sapien
tgcagggataaagcaggtggtggaa

SEQ ID NO: 3000644 - DNA, 25 bp, Homo sapien
tcagggagccagtgatgagctcaag

SEQ ID NO: 3000645 - DNA, 25 bp, Homo sapien
cacagaacgcagactgttgctgtag

SEQ ID NO: 3000646 - DNA, 25 bp, Homo sapien
tcatcttcagtggtagggatattgc

SEQ ID NO: 3000647 - DNA, 25 bp, Homo sapien
ttgctgtagtaacagaggagaaact

SEQ ID NO: 3000648 - DNA, 25 bp, Homo sapien
gggtctgcttatccccaccacagaa

SEQ ID NO: 3000649 - DNA, 25 bp, Homo sapien
agcactctgttccttccacaagaca

SEQ ID NO: 3000650 - DNA, 25 bp, Homo sapien
cagctctgagtgacaagttattcag

SEQ ID NO: 3000651 - DNA, 25 bp, Homo sapien
gctctgagtgacaagttattcagca

SEQ ID NO: 3000652 - DNA, 25 bp, Homo sapien
atggacaggactggggtcagctcca

SEQ ID NO: 3000653 - DNA, 25 bp, Homo sapien
gacacgtagtcattaacgtcccgca

SEQ ID NO: 3000654 - DNA, 25 bp, Homo sapien
acgtagtcattaacgtcccgcagcc

SEQ ID NO: 3000655 - DNA, 25 bp, Homo sapien
cataggacacgtagtcattaacgtc

SEQ ID NO: 3000656 - DNA, 25 bp, Homo sapien
taggacacgtagtcattaacgtccc

SEQ ID NO: 3000657 - DNA, 25 bp, Homo sapien
gacctaaggcaagtcctaaggaaga

SEQ ID NO: 3000658 - DNA, 25 bp, Homo sapien
gagggtgagttcgtcagcatctgcc

SEQ ID NO: 3000659 - DNA, 25 bp, Homo sapien
gctgggcctggctaccgtactgtgt

SEQ ID NO: 3000660 - DNA, 25 bp, Homo sapien
ctttagctacagaagaaccgctggg

SEQ ID NO: 3000661 - DNA, 25 bp, Homo sapien
tcattttccacggtccacaggtcct

SEQ ID NO: 3000662 - DNA, 25 bp, Homo sapien
ttgtacagtccaatccagtcccacg

SEQ ID NO: 3000663 - DNA, 25 bp, Homo sapien
atcaggacgatcagcggagcagaca

SEQ ID NO: 3000664 - DNA, 25 bp, Homo sapien
aagtccgaggttgaagagtagctga

SEQ ID NO: 3000665 - DNA, 25 bp, Homo sapien
tggaactcattagccccaagggaga

SEQ ID NO: 3000666 - DNA, 25 bp, Homo sapien
gatgtggccagcatagctattcctc

SEQ ID NO: 3000667 - DNA, 25 bp, Homo sapien
gacctggcaggaaaggcaatcatgg

SEQ ID NO: 3000668 - DNA, 25 bp, Homo sapien
cctaagaggagctgggatatccgac

SEQ ID NO: 3000669 - DNA, 25 bp, Homo sapien
tgtggtcgctgatgccgtacgtcat

SEQ ID NO: 3000670 - DNA, 25 bp, Homo sapien
ctccaagtcgaacgtgccggagaca

SEQ ID NO: 3000671 - DNA, 25 bp, Homo sapien
caagtcgaacgtgccggagacaggc

SEQ ID NO: 3000672 - DNA, 25 bp, Homo sapien
tcgaacgtgccggagacaggcttgt

SEQ ID NO: 3000673 - DNA, 25 bp, Homo sapien
cagagacaaggagaagtgtgacgcc

SEQ ID NO: 3000674 - DNA, 25 bp, Homo sapien
ctcagagacaaggagaagtgtgacg

SEQ ID NO: 3000675 - DNA, 25 bp, Homo sapien
gtgacgccggcggtatgggagtgtc

SEQ ID NO: 3000676 - DNA, 25 bp, Homo sapien
ggtatgggagtgtcggggccagcac

SEQ ID NO: 3000677 - DNA, 25 bp, Homo sapien
gtccatgcaggcttgcgttttttct

SEQ ID NO: 3000678 - DNA, 25 bp, Homo sapien
ccatgcaggcttgcgttttttctca

SEQ ID NO: 3000679 - DNA, 25 bp, Homo sapien
ccacaggatgcgatcggtccatgca

SEQ ID NO: 3000680 - DNA, 25 bp, Homo sapien
aggatgcgatcggtccatgcaggct

SEQ ID NO: 3000681 - DNA, 25 bp, Homo sapien
gaaaaggtaatacgctccggagaca

SEQ ID NO: 3000682 - DNA, 25 bp, Homo sapien
gcattcctcctctaggtaactgaag

SEQ ID NO: 3000683 - DNA, 25 bp, Homo sapien
cagccttccgaagcaactactgtgg

SEQ ID NO: 3000684 - DNA, 25 bp, Homo sapien
gaagttgaccaaagacgagtctctg

SEQ ID NO: 3000685 - DNA, 25 bp, Homo sapien
attgctgggtttagaggtgtgaccc

SEQ ID NO: 3000686 - DNA, 25 bp, Homo sapien
tttagaggtgtgacccatcacgcct

SEQ ID NO: 3000687 - DNA, 25 bp, Homo sapien
gggtttagaggtgtgacccatcacg

SEQ ID NO: 3000688 - DNA, 25 bp, Homo sapien
aggctgaacctgagctcctgggttc

SEQ ID NO: 3000689 - DNA, 25 bp, Homo sapien
ctcacagtggcaactataacaaaac

SEQ ID NO: 3000690 - DNA, 25 bp, Homo sapien
gctcacagtggcaactataacaaaa

SEQ ID NO: 3000691 - DNA, 25 bp, Homo sapien
gggctcacagtggcaactataacaa

SEQ ID NO: 3000692 - DNA, 25 bp, Homo sapien
ggctcacagtggcaactataacaaa

SEQ ID NO: 3000693 - DNA, 25 bp, Homo sapien
agcagcgggtcatgtttcttggcaa

SEQ ID NO: 3000694 - DNA, 25 bp, Homo sapien
catagtcgttggagttcctatcaaa

SEQ ID NO: 3000695 - DNA, 25 bp, Homo sapien
tgggcgggaagagtaggcggccctc

SEQ ID NO: 3000696 - DNA, 25 bp, Homo sapien
tcctatcaaacttgtaggtgggcgg

SEQ ID NO: 3000697 - DNA, 25 bp, Homo sapien
gcaacccaaagtcctcgatccgaaa

SEQ ID NO: 3000698 - DNA, 25 bp, Homo sapien
tggattcccgaacaaagtgcaaccc

SEQ ID NO: 3000699 - DNA, 25 bp, Homo sapien
caggccaccgtagcaccgattttta

SEQ ID NO: 3000700 - DNA, 25 bp, Homo sapien
cgaaagttcatgtctccaaaccaga

SEQ ID NO: 3000701 - DNA, 25 bp, Homo sapien
ctaagcaagacagacgggctggagg

SEQ ID NO: 3000702 - DNA, 25 bp, Homo sapien
taaaccaccattcaaaccggagaga

SEQ ID NO: 3000703 - DNA, 25 bp, Homo sapien
aaggtccttgacctgttcccaagtg

SEQ ID NO: 3000704 - DNA, 25 bp, Homo sapien
taactggtcacgaggaaaggctgag

SEQ ID NO: 3000705 - DNA, 25 bp, Homo sapien
tgatgctgacatagtagccataaag

SEQ ID NO: 3000706 - DNA, 25 bp, Homo sapien
tttgggatgtctcgcccctcacaat

SEQ ID NO: 3000707 - DNA, 25 bp, Homo sapien
tccaggatgtttgggatgtctcgcc

SEQ ID NO: 3000708 - DNA, 25 bp, Homo sapien
cagccgctggtaattgttggaaatg

SEQ ID NO: 3000709 - DNA, 25 bp, Homo sapien
ggacctgagggcagacagtctcact

SEQ ID NO: 3000710 - DNA, 25 bp, Homo sapien
tgcagggtctcctagggacagtaac

SEQ ID NO: 3000711 - DNA, 25 bp, Homo sapien
gacagtaactaagcttcccagggtg

SEQ ID NO: 3000712 - DNA, 25 bp, Homo sapien
gaagctactcgggttggacacaccc

SEQ ID NO: 3000713 - DNA, 25 bp, Homo sapien
tagggcaaatgctgatacttggcaa

SEQ ID NO: 3000714 - DNA, 25 bp, Homo sapien
tacttggcaaagaccagtaagagga

SEQ ID NO: 3000715 - DNA, 25 bp, Homo sapien
gaggatcccctgcatacggacatgg

SEQ ID NO: 3000716 - DNA, 25 bp, Homo sapien
ggtggatttagtagacagaatctgg

SEQ ID NO: 3000717 - DNA, 25 bp, Homo sapien
aagcacacgtgccaacagggatgga

SEQ ID NO: 3000718 - DNA, 25 bp, Homo sapien
tctatagctggcaaatgcacggagc

SEQ ID NO: 3000719 - DNA, 25 bp, Homo sapien
aagacactggctcgctttgtgaagg

SEQ ID NO: 3000720 - DNA, 25 bp, Homo sapien
ccaatctcagtaggccacatgggta

SEQ ID NO: 3000721 - DNA, 25 bp, Homo sapien
ccagtcagccgagaagcaaggaggc

SEQ ID NO: 3000722 - DNA, 25 bp, Homo sapien
tgccagtcagccgagaagcaaggag

SEQ ID NO: 3000723 - DNA, 25 bp, Homo sapien
gccagtcagccgagaagcaaggagg

SEQ ID NO: 3000724 - DNA, 25 bp, Homo sapien
tgaggataccctatgacaccagcag

SEQ ID NO: 3000725 - DNA, 25 bp, Homo sapien
gaatctgaagtgcacgtcccgtatg

SEQ ID NO: 3000726 - DNA, 25 bp, Homo sapien
caaatcccagatagcgcatgtggct

SEQ ID NO: 3000727 - DNA, 25 bp, Homo sapien
gatctagctccctatctacagaagg

SEQ ID NO: 3000728 - DNA, 25 bp, Homo sapien
tccagctccctcagaaaggcgaagg

SEQ ID NO: 3000729 - DNA, 25 bp, Homo sapien
gtcaagtgccaatgaactggcaagt

SEQ ID NO: 3000730 - DNA, 25 bp, Homo sapien
tgtgaaaacacagttgtcaagtgcc

SEQ ID NO: 3000731 - DNA, 25 bp, Homo sapien
taagaggaacacatcagacccaaca

SEQ ID NO: 3000732 - DNA, 25 bp, Homo sapien
ttgatgaagctcagaggggaaagca

SEQ ID NO: 3000733 - DNA, 25 bp, Homo sapien
tgaagctcagaggggaaagcacatc

SEQ ID NO: 3000734 - DNA, 25 bp, Homo sapien
agctcagaggggaaagcacatccat

SEQ ID NO: 3000735 - DNA, 25 bp, Homo sapien
cttgatgaagctcagaggggaaagc

SEQ ID NO: 3000736 - DNA, 25 bp, Homo sapien
aggaggcttatgatcccagagttca

SEQ ID NO: 3000737 - DNA, 25 bp, Homo sapien
ctgctccacgagtcattaaaggcag

SEQ ID NO: 3000738 - DNA, 25 bp, Homo sapien
ttaaaggcagcatcggaaaggaggc

SEQ ID NO: 3000739 - DNA, 25 bp, Homo sapien
catcggaaaggaggcttatgatccc

SEQ ID NO: 3000740 - DNA, 25 bp, Homo sapien
tatgtcaagattgaggttccggttg

SEQ ID NO: 3000741 - DNA, 25 bp, Homo sapien
cacgttccaagtcacgacgtgtatg

SEQ ID NO: 3000742 - DNA, 25 bp, Homo sapien
gggcgctgccgaagccacgttccaa

SEQ ID NO: 3000743 - DNA, 25 bp, Homo sapien
ggttgttcagctgaagcaggtcact

SEQ ID NO: 3000744 - DNA, 25 bp, Homo sapien
gctgaagcaagaaatccccaccccg

SEQ ID NO: 3000745 - DNA, 25 bp, Homo sapien
tgaagcaagaaatccccaccccgga

SEQ ID NO: 3000746 - DNA, 25 bp, Homo sapien
ctgctgaagcaagaaatccccaccc

SEQ ID NO: 3000747 - DNA, 25 bp, Homo sapien
ttctctgctgaagcaagaaatcccc

SEQ ID NO: 3000748 - DNA, 25 bp, Homo sapien
aggaacagcctagcatgagtcctag

SEQ ID NO: 3000749 - DNA, 25 bp, Homo sapien
tcaagaagcctcagactgtgcggag

SEQ ID NO: 3000750 - DNA, 25 bp, Homo sapien
agagcgggcaggagctacagaccct

SEQ ID NO: 3000751 - DNA, 25 bp, Homo sapien
gtcctaggcacacgatgaggagtac

SEQ ID NO: 3000752 - DNA, 25 bp, Homo sapien
gttcccactctcaaatccgacgatt

SEQ ID NO: 3000753 - DNA, 25 bp, Homo sapien
tccgacgattagcagcaaatccaag

SEQ ID NO: 3000754 - DNA, 25 bp, Homo sapien
atggagagcaaaagtccggatttct

SEQ ID NO: 3000755 - DNA, 25 bp, Homo sapien
tggagagcaaaagtccggatttctt

SEQ ID NO: 3000756 - DNA, 25 bp, Homo sapien
ctcaatctgatttcggattcccggg

SEQ ID NO: 3000757 - DNA, 25 bp, Homo sapien
tgttccccgtgaaagagcaggcaag

SEQ ID NO: 3000758 - DNA, 25 bp, Homo sapien
caggctaagtcacttccctaaagga

SEQ ID NO: 3000759 - DNA, 25 bp, Homo sapien
gatcaggcagacctcctgatgtatg

SEQ ID NO: 3000760 - DNA, 25 bp, Homo sapien
tcggcccgctcagcttccgcgagct

SEQ ID NO: 3000761 - DNA, 25 bp, Homo sapien
gcccgctcagcttccgcgagctcat

SEQ ID NO: 3000762 - DNA, 25 bp, Homo sapien
ctgcctttcggcccgctcagcttcc

SEQ ID NO: 3000763 - DNA, 25 bp, Homo sapien
cctttcggcccgctcagcttccgcg

SEQ ID NO: 3000764 - DNA, 25 bp, Homo sapien
tggtccggcaggttcgcgtctcccg

SEQ ID NO: 3000765 - DNA, 25 bp, Homo sapien
gcggtggtccggcaggttcgcgtct

SEQ ID NO: 3000766 - DNA, 25 bp, Homo sapien
aggttcgcgtctcccggccagcggg

SEQ ID NO: 3000767 - DNA, 25 bp, Homo sapien
cccgcgcggtggtccggcaggttcg

SEQ ID NO: 3000768 - DNA, 25 bp, Homo sapien
ggtctcacgcgcctagctgtcgcgg

SEQ ID NO: 3000769 - DNA, 25 bp, Homo sapien
ggcggccggtctcacgcgcctagct

SEQ ID NO: 3000770 - DNA, 25 bp, Homo sapien
tagctgtcgcggactgtttttcttc

SEQ ID NO: 3000771 - DNA, 25 bp, Homo sapien
ccggcttccgtcagagacgcgccct

SEQ ID NO: 3000772 - DNA, 25 bp, Homo sapien
gagcgaagacgggttcgcggacgta

SEQ ID NO: 3000773 - DNA, 25 bp, Homo sapien
aggcgggactctcccacgagcgcaa

SEQ ID NO: 3000774 - DNA, 25 bp, Homo sapien
gatctgggtggtgcggttcgcagaa

SEQ ID NO: 3000775 - DNA, 25 bp, Homo sapien
cacgagcgcaaagctgcgagaggct

SEQ ID NO: 3000776 - DNA, 25 bp, Homo sapien
tattatatgcagaaatccacgtgca

SEQ ID NO: 3000777 - DNA, 25 bp, Homo sapien
aattttcagacacacctttgtacct

SEQ ID NO: 3000778 - DNA, 25 bp, Homo sapien
acctttgtacctcttcctaatcctg

SEQ ID NO: 3000779 - DNA, 25 bp, Homo sapien
ggtaaaatggcggttatcagtgcaa

SEQ ID NO: 3000780 - DNA, 25 bp, Homo sapien
gatatgtgtgggtctcaagagccaa

SEQ ID NO: 3000781 - DNA, 25 bp, Homo sapien
caagacatctggttccaaagggacc

SEQ ID NO: 3000782 - DNA, 25 bp, Homo sapien
caaagtaagtcagggagtcccagca

SEQ ID NO: 3000783 - DNA, 25 bp, Homo sapien
ggaagctatacacatgcccacgata

SEQ ID NO: 3000784 - DNA, 25 bp, Homo sapien
cagcctactttggtcgggttctgta

SEQ ID NO: 3000785 - DNA, 25 bp, Homo sapien
tactatgatcactacttgctttggg

SEQ ID NO: 3000786 - DNA, 25 bp, Homo sapien
agaactcaacatgggggtaggacga

SEQ ID NO: 3000787 - DNA, 25 bp, Homo sapien
taggacgagctaagttcttgatccc

SEQ ID NO: 3000788 - DNA, 25 bp, Homo sapien
gattattgctgagtggcagcaccag

SEQ ID NO: 3000789 - DNA, 25 bp, Homo sapien
tgtgcagcatgaaagatcaggactc

SEQ ID NO: 3000790 - DNA, 25 bp, Homo sapien
cagtgattgggacagggttactcgt

SEQ ID NO: 3000791 - DNA, 25 bp, Homo sapien
tggacaattccctccaagtggagag

SEQ ID NO: 3000792 - DNA, 25 bp, Homo sapien
taacgatgggttactgggagcagaa

SEQ ID NO: 3000793 - DNA, 25 bp, Homo sapien
ctacagtaaggaatcgaaagttgcc

SEQ ID NO: 3000794 - DNA, 25 bp, Homo sapien
gaacggctgcgtccgaaaatggcct

SEQ ID NO: 3000795 - DNA, 25 bp, Homo sapien
acacgccacgtatctcggaggagca

SEQ ID NO: 3000796 - DNA, 25 bp, Homo sapien
tcctttcactgggtccttttgtctc

SEQ ID NO: 3000797 - DNA, 25 bp, Homo sapien
gctgtcattcctttcactgggtcct

SEQ ID NO: 3000798 - DNA, 25 bp, Homo sapien
tgtcattcctttcactgggtccttt

SEQ ID NO: 3000799 - DNA, 25 bp, Homo sapien
ctttcactgggtccttttgtctcat

SEQ ID NO: 3000800 - DNA, 25 bp, Homo sapien
gctgagactataggtgcccaccaac

SEQ ID NO: 3000801 - DNA, 25 bp, Homo sapien
gagactataggtgcccaccaacacg

SEQ ID NO: 3000802 - DNA, 25 bp, Homo sapien
tgagactataggtgcccaccaacac

SEQ ID NO: 3000803 - DNA, 25 bp, Homo sapien
ctgagactataggtgcccaccaaca

SEQ ID NO: 3000804 - DNA, 25 bp, Homo sapien
gatttaagatgtgcggtcaggagtt

SEQ ID NO: 3000805 - DNA, 25 bp, Homo sapien
gaagatttaagatgtgcggtcagga

SEQ ID NO: 3000806 - DNA, 25 bp, Homo sapien
ggtttgagccactgggtatggccta

SEQ ID NO: 3000807 - DNA, 25 bp, Homo sapien
ggtatggcctaagccccaatttcta

SEQ ID NO: 3000808 - DNA, 25 bp, Homo sapien
caggaaaactgaggagtggcaccag

SEQ ID NO: 3000809 - DNA, 25 bp, Homo sapien
gctctaaaggaatagtctctgggca

SEQ ID NO: 3000810 - DNA, 25 bp, Homo sapien
tcagttactaatgcaaagccaggtc

SEQ ID NO: 3000811 - DNA, 25 bp, Homo sapien
gaaataagatgcaacctcctaccag

SEQ ID NO: 3000812 - DNA, 25 bp, Homo sapien
gtggtgttcctcagatttagccaat

SEQ ID NO: 3000813 - DNA, 25 bp, Homo sapien
agccaatgtaggctatacatacaca

SEQ ID NO: 3000814 - DNA, 25 bp, Homo sapien
cagatttagccaatgtaggctatac

SEQ ID NO: 3000815 - DNA, 25 bp, Homo sapien
taggaaaatagaaacttcaatcctg

SEQ ID NO: 3000816 - DNA, 25 bp, Homo sapien
tggtttcctttagggaatgaggcca

SEQ ID NO: 3000817 - DNA, 25 bp, Homo sapien
tcaaaataaaaggttcggtgcagaa

SEQ ID NO: 3000818 - DNA, 25 bp, Homo sapien
tcagttgaatccaagcgtttcaggc

SEQ ID NO: 3000819 - DNA, 25 bp, Homo sapien
taaagggtacatagatctttccacg

SEQ ID NO: 3000820 - DNA, 25 bp, Homo sapien
gccaccgtgccttaaactgtattta

SEQ ID NO: 3000821 - DNA, 25 bp, Homo sapien
gagccaccgtgccttaaactgtatt

SEQ ID NO: 3000822 - DNA, 25 bp, Homo sapien
tgagccaccgtgccttaaactgtat

SEQ ID NO: 3000823 - DNA, 25 bp, Homo sapien
aaacgtcctcaacttctgtgagcca

SEQ ID NO: 3000824 - DNA, 25 bp, Homo sapien
tcattatctaaagagttaatggcca

SEQ ID NO: 3000825 - DNA, 25 bp, Homo sapien
tggccaaaggccaagaggtacttgt

SEQ ID NO: 3000826 - DNA, 25 bp, Homo sapien
cctgtgttacaggttgccatgaaaa

SEQ ID NO: 3000827 - DNA, 25 bp, Homo sapien
taaaggccctcagaatggtagacgg

SEQ ID NO: 3000828 - DNA, 25 bp, Homo sapien
caattttcgccctagaccagcatgg

SEQ ID NO: 3000829 - DNA, 25 bp, Homo sapien
tgaagactgcagtaggtaaaggccc

SEQ ID NO: 3000830 - DNA, 25 bp, Homo sapien
gaaagaatcagggactgtgccccaa

SEQ ID NO: 3000831 - DNA, 25 bp, Homo sapien
gatagctcaaaatgaccgtagacag

SEQ ID NO: 3000832 - DNA, 25 bp, Homo sapien
tcaaaatgaccgtagacagccgcca

SEQ ID NO: 3000833 - DNA, 25 bp, Homo sapien
agctcaaaatgaccgtagacagccg

SEQ ID NO: 3000834 - DNA, 25 bp, Homo sapien
atgaccgtagacagccgccagctgt

SEQ ID NO: 3000835 - DNA, 25 bp, Homo sapien
gtagcagctgtattacccacttggc

SEQ ID NO: 3000836 - DNA, 25 bp, Homo sapien
ggataccgtccctgtagcagacact

SEQ ID NO: 3000837 - DNA, 25 bp, Homo sapien
tgtcaattcaagagcacaggctgtt

SEQ ID NO: 3000838 - DNA, 25 bp, Homo sapien
tgttttcttccgtatagtgcccacg

SEQ ID NO: 3000839 - DNA, 25 bp, Homo sapien
tacaggatggtgctctcggtgaagc

SEQ ID NO: 3000840 - DNA, 25 bp, Homo sapien
gtttgtttatctaattgagagcccc

SEQ ID NO: 3000841 - DNA, 25 bp, Homo sapien
cagtctccttaatcttcgtttgttt

SEQ ID NO: 3000842 - DNA, 25 bp, Homo sapien
ggtgaagcgccccagcaaaacagtc

SEQ ID NO: 3000843 - DNA, 25 bp, Homo sapien
tccttcgaatgtcgtccatggtcag

SEQ ID NO: 3000844 - DNA, 25 bp, Homo sapien
agtttgtaaacagacgcctctcttg

SEQ ID NO: 3000845 - DNA, 25 bp, Homo sapien
cacttatcgagccaacagaacagct

SEQ ID NO: 3000846 - DNA, 25 bp, Homo sapien
tggtcaggtcaacccacttatcgag

SEQ ID NO: 3000847 - DNA, 25 bp, Homo sapien
tgcacacatatatgggcagtccttc

SEQ ID NO: 3000848 - DNA, 25 bp, Homo sapien
aggccccaccacttgaacttgacgg

SEQ ID NO: 3000849 - DNA, 25 bp, Homo sapien
cacatatatgggcagtccttctggt

SEQ ID NO: 3000850 - DNA, 25 bp, Homo sapien
gacggtcaccagtttgtatgcacac

SEQ ID NO: 3000851 - DNA, 25 bp, Homo sapien
cctcggcctgttttgatagatttaa

SEQ ID NO: 3000852 - DNA, 25 bp, Homo sapien
gactttcaacctggggtgagcatcc

SEQ ID NO: 3000853 - DNA, 25 bp, Homo sapien
gaagacagagactttcaacctgggg

SEQ ID NO: 3000854 - DNA, 25 bp, Homo sapien
cctggggtgagcatccagatcacca

SEQ ID NO: 3000855 - DNA, 25 bp, Homo sapien
caacctggggtgagcatccagatca

SEQ ID NO: 3000856 - DNA, 25 bp, Homo sapien
ctgagcacttggcttcgatctgcaa

SEQ ID NO: 3000857 - DNA, 25 bp, Homo sapien
tgcaatgtctatatatacggcttcc

SEQ ID NO: 3000858 - DNA, 25 bp, Homo sapien
cacttggcttcgatctgcaatgtct

SEQ ID NO: 3000859 - DNA, 25 bp, Homo sapien
tatacggcttccacgtgtttccacg

SEQ ID NO: 3000860 - DNA, 25 bp, Homo sapien
taagataggtctaggcagaggccac

SEQ ID NO: 3000861 - DNA, 25 bp, Homo sapien
caccaatccaagcagtacgagaagg

SEQ ID NO: 3000862 - DNA, 25 bp, Homo sapien
gagacatagcaatcccatgctggta

SEQ ID NO: 3000863 - DNA, 25 bp, Homo sapien
aagttccggagatcacattttgcaa

SEQ ID NO: 3000864 - DNA, 25 bp, Homo sapien
attctcctgcgtgccaagatctggt

SEQ ID NO: 3000865 - DNA, 25 bp, Homo sapien
gcgtgccaagatctggtttgtgcca

SEQ ID NO: 3000866 - DNA, 25 bp, Homo sapien
gatctggtttgtgccaggtttcaat

SEQ ID NO: 3000867 - DNA, 25 bp, Homo sapien
ccaggtttcaattttaatcagaaag

SEQ ID NO: 3000868 - DNA, 25 bp, Homo sapien
tggaagaaggaaaaaaaatacatga

SEQ ID NO: 3000869 - DNA, 25 bp, Homo sapien
ctggaagaaggaaaaaaaatacatg

SEQ ID NO: 3000870 - DNA, 25 bp, Homo sapien
cagaatccatgcatttagccactct

SEQ ID NO: 3000871 - DNA, 25 bp, Homo sapien
caaaacagtttcgtctgacttcaga

SEQ ID NO: 3000872 - DNA, 25 bp, Homo sapien
tcacagagatcacgacagagttggg

SEQ ID NO: 3000873 - DNA, 25 bp, Homo sapien
tgacttcagaatccatgcatttagc

SEQ ID NO: 3000874 - DNA, 25 bp, Homo sapien
ttcacccattaacgcctcagcagga

SEQ ID NO: 3000875 - DNA, 25 bp, Homo sapien
ttctcaaaggaggaacacattcacc

SEQ ID NO: 3000876 - DNA, 25 bp, Homo sapien
tagcctgtggctaaggccttaagtt

SEQ ID NO: 3000877 - DNA, 25 bp, Homo sapien
aaccagtttcccagagacagccagt

SEQ ID NO: 3000878 - DNA, 25 bp, Homo sapien
gggacaaggcactcagatgagtgtg

SEQ ID NO: 3000879 - DNA, 25 bp, Homo sapien
gaatggtgggcgggtgggcaatgac

SEQ ID NO: 3000880 - DNA, 25 bp, Homo sapien
tggtgggcgggtgggcaatgacaga

SEQ ID NO: 3000881 - DNA, 25 bp, Homo sapien
agggacaaggcactcagatgagtgt

SEQ ID NO: 3000882 - DNA, 25 bp, Homo sapien
ctctgcattccagtattccctgttg

SEQ ID NO: 3000883 - DNA, 25 bp, Homo sapien
cctctgcattccagtattccctgtt

SEQ ID NO: 3000884 - DNA, 25 bp, Homo sapien
tctgcattccagtattccctgttgt

SEQ ID NO: 3000885 - DNA, 25 bp, Homo sapien
aaacacctctgcattccagtattcc

SEQ ID NO: 3000886 - DNA, 25 bp, Homo sapien
tagtgatactgtatccagccgagga

SEQ ID NO: 3000887 - DNA, 25 bp, Homo sapien
cgaggactatagttccaggaagaga

SEQ ID NO: 3000888 - DNA, 25 bp, Homo sapien
aaagcatggcttagtgatactgtat

SEQ ID NO: 3000889 - DNA, 25 bp, Homo sapien
tcattcacagaccaactcctatctt

SEQ ID NO: 3000890 - DNA, 25 bp, Homo sapien
ttttcactccgctcagagaaaggaa

SEQ ID NO: 3000891 - DNA, 25 bp, Homo sapien
gctgatcattaccagggtgtcccaa

SEQ ID NO: 3000892 - DNA, 25 bp, Homo sapien
gatgtctgaactaataacctctctc

SEQ ID NO: 3000893 - DNA, 25 bp, Homo sapien
tactgaggccaagctaagatgtctg

SEQ ID NO: 3000894 - DNA, 25 bp, Homo sapien
acgtaaggatcccagactcatcaga

SEQ ID NO: 3000895 - DNA, 25 bp, Homo sapien
cgtaaggatcccagactcatcagac

SEQ ID NO: 3000896 - DNA, 25 bp, Homo sapien
gtaaggatcccagactcatcagact

SEQ ID NO: 3000897 - DNA, 25 bp, Homo sapien
tcacgtaaggatcccagactcatca

SEQ ID NO: 3000898 - DNA, 25 bp, Homo sapien
cctctggggccagcattcgaacaaa

SEQ ID NO: 3000899 - DNA, 25 bp, Homo sapien
ggccagcattcgaacaaacgtgggt

SEQ ID NO: 3000900 - DNA, 25 bp, Homo sapien
cggttctgcagtaggggtaagcatt

SEQ ID NO: 3000901 - DNA, 25 bp, Homo sapien
tctcgtgtatattcagggctccctc

SEQ ID NO: 3000902 - DNA, 25 bp, Homo sapien
ttaaaatgaaaatggtacatatatt

SEQ ID NO: 3000903 - DNA, 25 bp, Homo sapien
atgaaaatggtacatatattccttt

SEQ ID NO: 3000904 - DNA, 25 bp, Homo sapien
aaatgaaaatggtacatatattcct

SEQ ID NO: 3000905 - DNA, 25 bp, Homo sapien
tagaagggactacaggttcccgcca

SEQ ID NO: 3000906 - DNA, 25 bp, Homo sapien
tcagcaggacctgatgggacacgaa

SEQ ID NO: 3000907 - DNA, 25 bp, Homo sapien
tatgtcagacagcacggacttcgtc

SEQ ID NO: 3000908 - DNA, 25 bp, Homo sapien
gcccaggctggctaaaaggtcctat

SEQ ID NO: 3000909 - DNA, 25 bp, Homo sapien
gactgaacacttgaagcggtgcgga

SEQ ID NO: 3000910 - DNA, 25 bp, Homo sapien
tctcgtagggctcattcaccaggac

SEQ ID NO: 3000911 - DNA, 25 bp, Homo sapien
tgtactggcctttctcaccgtcctt

SEQ ID NO: 3000912 - DNA, 25 bp, Homo sapien
cacagaatacagctgccccacttga

SEQ ID NO: 3000913 - DNA, 25 bp, Homo sapien
cgccttcgccaccacccgtttcatt

SEQ ID NO: 3000914 - DNA, 25 bp, Homo sapien
ccaaagcaactgacagtgctgctcc

SEQ ID NO: 3000915 - DNA, 25 bp, Homo sapien
aaagcaactgacagtgctgctccat

SEQ ID NO: 3000916 - DNA, 25 bp, Homo sapien
caaagcaactgacagtgctgctcca

SEQ ID NO: 3000917 - DNA, 25 bp, Homo sapien
cactcagggttagaccaaaggctct

SEQ ID NO: 3000918 - DNA, 25 bp, Homo sapien
tgcacaagctacaagtgaagggcgc

SEQ ID NO: 3000919 - DNA, 25 bp, Homo sapien
taactccgtttcagagaagagccgt

SEQ ID NO: 3000920 - DNA, 25 bp, Homo sapien
cacgttagagttccttttggcacag

SEQ ID NO: 3000921 - DNA, 25 bp, Homo sapien
ttggccccaccataagccatcagtg

SEQ ID NO: 3000922 - DNA, 25 bp, Homo sapien
ggtgggatcatcctgtacagcagag

SEQ ID NO: 3000923 - DNA, 25 bp, Homo sapien
gcagagaggacgtcactggacacct

SEQ ID NO: 3000924 - DNA, 25 bp, Homo sapien
tccccaagagctgagtttgagggca

SEQ ID NO: 3000925 - DNA, 25 bp, Homo sapien
caagcctggatgtctgtctcaacta

SEQ ID NO: 3000926 - DNA, 25 bp, Homo sapien
gaaccccaagatcacggtcaaggcc

SEQ ID NO: 3000927 - DNA, 25 bp, Homo sapien
tcttatcagatatgtagcccacccc

SEQ ID NO: 3000928 - DNA, 25 bp, Homo sapien
gcagtcctctaaagggccagtgtct

SEQ ID NO: 3000929 - DNA, 25 bp, Homo sapien
tacagacacaggcaggattactcga

SEQ ID NO: 3000930 - DNA, 25 bp, Homo sapien
ctcatctacagacacaggcaggatt

SEQ ID NO: 3000931 - DNA, 25 bp, Homo sapien
tctacagacacaggcaggattactc

SEQ ID NO: 3000932 - DNA, 25 bp, Homo sapien
catctacagacacaggcaggattac

SEQ ID NO: 3000933 - DNA, 25 bp, Homo sapien
ggagatgccaccagcaacctattgg

SEQ ID NO: 3000934 - DNA, 25 bp, Homo sapien
cagtttccaagcttagacgttcggt

SEQ ID NO: 3000935 - DNA, 25 bp, Homo sapien
catgtgaaatgcagaccaagagcca

SEQ ID NO: 3000936 - DNA, 25 bp, Homo sapien
gacaccaagcaggaaagtagcagga

SEQ ID NO: 3000937 - DNA, 25 bp, Homo sapien
ccggctgcctgtgcgtcttcgtcgt

SEQ ID NO: 3000938 - DNA, 25 bp, Homo sapien
tgcctgtgcgtcttcgtcgtgctct

SEQ ID NO: 3000939 - DNA, 25 bp, Homo sapien
gcgtcttcgtcgtgctctgctccgt

SEQ ID NO: 3000940 - DNA, 25 bp, Homo sapien
tgtgcgtcttcgtcgtgctctgctc

SEQ ID NO: 3000941 - DNA, 25 bp, Homo sapien
ctccggttccgcagcgccgcgcggg

SEQ ID NO: 3000942 - DNA, 25 bp, Homo sapien
gccgcccggagctccggttccgcag

SEQ ID NO: 3000943 - DNA, 25 bp, Homo sapien
gctccggttccgcagcgccgcgcgg

SEQ ID NO: 3000944 - DNA, 25 bp, Homo sapien
ggagctccggttccgcagcgccgcg

SEQ ID NO: 3000945 - DNA, 25 bp, Homo sapien
gcgtctctgcggcaaccagagcgtc

SEQ ID NO: 3000946 - DNA, 25 bp, Homo sapien
tctgcggcaaccagagcgtcacacg

SEQ ID NO: 3000947 - DNA, 25 bp, Homo sapien
acacgccgcggtgcgcgctgacgtc

SEQ ID NO: 3000948 - DNA, 25 bp, Homo sapien
gcgctgacgtcacgcggggccgagc

SEQ ID NO: 3000949 - DNA, 25 bp, Homo sapien
tctcagcatacatttattgagtgct

SEQ ID NO: 3000950 - DNA, 25 bp, Homo sapien
ctcagcatacatttattgagtgctc

SEQ ID NO: 3000951 - DNA, 25 bp, Homo sapien
tattgagtgctcactgtgtgccagg

SEQ ID NO: 3000952 - DNA, 25 bp, Homo sapien
tacatttattgagtgctcactgtgt

SEQ ID NO: 3000953 - DNA, 25 bp, Homo sapien
tcagagagcggcacacaagaaatct

SEQ ID NO: 3000954 - DNA, 25 bp, Homo sapien
tgtacaggtgctgcctacgtgaccg

SEQ ID NO: 3000955 - DNA, 25 bp, Homo sapien
tatctcgagcagctatttggccaag

SEQ ID NO: 3000956 - DNA, 25 bp, Homo sapien
cacggtcccgcagctgtatgaggat

SEQ ID NO: 3000957 - DNA, 25 bp, Homo sapien
tgcatatcggctcacattcacgcgg

SEQ ID NO: 3000958 - DNA, 25 bp, Homo sapien
tgatggcaccaaagttcaagactcg

SEQ ID NO: 3000959 - DNA, 25 bp, Homo sapien
accattgttaagtgccaggcgtccc

SEQ ID NO: 3000960 - DNA, 25 bp, Homo sapien
gacagtcttatgcacgtgagcccaa

SEQ ID NO: 3000961 - DNA, 25 bp, Homo sapien
caggcgcccaagctgttaatgtgga

SEQ ID NO: 3000962 - DNA, 25 bp, Homo sapien
ccaagctgttaatgtggagcttgaa

SEQ ID NO: 3000963 - DNA, 25 bp, Homo sapien
gttccaggcgcccaagctgttaatg

SEQ ID NO: 3000964 - DNA, 25 bp, Homo sapien
aataaagcctaggagatatgtgttc

SEQ ID NO: 3000965 - DNA, 25 bp, Homo sapien
ttcggcaggagaaaacgcgcgtgtc

SEQ ID NO: 3000966 - DNA, 25 bp, Homo sapien
ggaggtctcaagacacacttctggg

SEQ ID NO: 3000967 - DNA, 25 bp, Homo sapien
cagtgaaaacgtgtccgcggcattg

SEQ ID NO: 3000968 - DNA, 25 bp, Homo sapien
caccgacaacaggaagcgggtcctt

SEQ ID NO: 3000969 - DNA, 25 bp, Homo sapien
tacacgaaggcctcctggttggacg

SEQ ID NO: 3000970 - DNA, 25 bp, Homo sapien
gctggcgccggtagcagatcaggta

SEQ ID NO: 3000971 - DNA, 25 bp, Homo sapien
tggacgagccgttgattttgaggaa

SEQ ID NO: 3000972 - DNA, 25 bp, Homo sapien
tagcagatcaggtagagcgggaggc

SEQ ID NO: 3000973 - DNA, 25 bp, Homo sapien
gaagagcgcgctgatcagagactgc

SEQ ID NO: 3000974 - DNA, 25 bp, Homo sapien
tgaggctgccgaactgggtggaggg

SEQ ID NO: 3000975 - DNA, 25 bp, Homo sapien
gagaggacccatcatggccagaaac

SEQ ID NO: 3000976 - DNA, 25 bp, Homo sapien
ctgcagaagggcgaagagcgcgctg

SEQ ID NO: 3000977 - DNA, 25 bp, Homo sapien
ctcgcacgattgtgtgcaggatgaa

SEQ ID NO: 3000978 - DNA, 25 bp, Homo sapien
tggatgaatcctcgcacgattgtgt

SEQ ID NO: 3000979 - DNA, 25 bp, Homo sapien
cccgacagcggagtggatgaatcct

SEQ ID NO: 3000980 - DNA, 25 bp, Homo sapien
cagcggagtggatgaatcctcgcac

SEQ ID NO: 3000981 - DNA, 25 bp, Homo sapien
ccggagccaattgtgaattttcaga

SEQ ID NO: 3000982 - DNA, 25 bp, Homo sapien
gcaagccagtcgttaacacagtcat

SEQ ID NO: 3000983 - DNA, 25 bp, Homo sapien
gaggaaaaggcgactgtgggcataa

SEQ ID NO: 3000984 - DNA, 25 bp, Homo sapien
gttggatcaaccccatcctccggag

SEQ ID NO: 3000985 - DNA, 25 bp, Homo sapien
accccaaagcccacgagcagcaggt

SEQ ID NO: 3000986 - DNA, 25 bp, Homo sapien
cgcatggcattagtgatcttctgga

SEQ ID NO: 3000987 - DNA, 25 bp, Homo sapien
gcgaaggcccgcatggcattagtga

SEQ ID NO: 3000988 - DNA, 25 bp, Homo sapien
tcttctggatctgccggtcccgctt

SEQ ID NO: 3000989 - DNA, 25 bp, Homo sapien
tagagacggggagtgggggctggcc

SEQ ID NO: 3000990 - DNA, 25 bp, Homo sapien
gtgatcttcctaccccagcctttca

SEQ ID NO: 3000991 - DNA, 25 bp, Homo sapien
gggagtgggggctggccatgtttcc

SEQ ID NO: 3000992 - DNA, 25 bp, Homo sapien
gtgggggctggccatgtttcccagg

SEQ ID NO: 3000993 - DNA, 25 bp, Homo sapien
tctctaagggctccgggagcagctg

SEQ ID NO: 3000994 - DNA, 25 bp, Homo sapien
gctgaatgagtgagtctctctaagg

SEQ ID NO: 3000995 - DNA, 25 bp, Homo sapien
caatttccataaagaggggagcagt

SEQ ID NO: 3000996 - DNA, 25 bp, Homo sapien
tgaaacgcatgctgagctgaatgag

SEQ ID NO: 3000997 - DNA, 25 bp, Homo sapien
gtgcctgacatgcagctctggggtc

SEQ ID NO: 3000998 - DNA, 25 bp, Homo sapien
ccctgtgcctgacatgcagctctgg

SEQ ID NO: 3000999 - DNA, 25 bp, Homo sapien
ctgtgcctgacatgcagctctgggg

SEQ ID NO: 3001000 - DNA, 25 bp, Homo sapien
ccaccctgtgcctgacatgcagctc

SEQ ID NO: 3001001 - DNA, 25 bp, Homo sapien
ggttggcgtctttctcctcgggctc

SEQ ID NO: 3001002 - DNA, 25 bp, Homo sapien
cgggctcctcggaggcgtcttcaca

SEQ ID NO: 3001003 - DNA, 25 bp, Homo sapien
acagcagctggagcacgccgaagat

SEQ ID NO: 3001004 - DNA, 25 bp, Homo sapien
cacgccgaagatggaggtgtagagg

SEQ ID NO: 3001005 - DNA, 25 bp, Homo sapien
tagttagggtttccctgaatccgca

SEQ ID NO: 3001006 - DNA, 25 bp, Homo sapien
gcaactcctgtttgatggcgggtct

SEQ ID NO: 3001007 - DNA, 25 bp, Homo sapien
tttgatggcgggtctcaaacgctgg

SEQ ID NO: 3001008 - DNA, 25 bp, Homo sapien
tgaatccgcaactcctgtttgatgg

SEQ ID NO: 3001009 - DNA, 25 bp, Homo sapien
ggagcctctgccgcgggtggtcgcg

SEQ ID NO: 3001010 - DNA, 25 bp, Homo sapien
gcctggagtctccattcggaaccag

SEQ ID NO: 3001011 - DNA, 25 bp, Homo sapien
tccattcggaaccagcacccgggag

SEQ ID NO: 3001012 - DNA, 25 bp, Homo sapien
gccgtacgcggaggcgatggctctg

SEQ ID NO: 3001013 - DNA, 25 bp, Homo sapien
tcttcacaagtcctagggtatcttc

SEQ ID NO: 3001014 - DNA, 25 bp, Homo sapien
gaaaccatcggaaaaagtggcacac

SEQ ID NO: 3001015 - DNA, 25 bp, Homo sapien
agaactggctgttatctggttccct

SEQ ID NO: 3001016 - DNA, 25 bp, Homo sapien
gactaccattttcacagtagaactg

SEQ ID NO: 3001017 - DNA, 25 bp, Homo sapien
cagggaggctgccaataaaaaggat

SEQ ID NO: 3001018 - DNA, 25 bp, Homo sapien
ggctgccaataaaaaggatttggag

SEQ ID NO: 3001019 - DNA, 25 bp, Homo sapien
tgccaataaaaaggatttggagtgt

SEQ ID NO: 3001020 - DNA, 25 bp, Homo sapien
agggaggctgccaataaaaaggatt

SEQ ID NO: 3001021 - DNA, 25 bp, Homo sapien
tgtagaatcaaaacctctaatcagc

SEQ ID NO: 3001022 - DNA, 25 bp, Homo sapien
agtcctgactttctctgtagaatca

SEQ ID NO: 3001023 - DNA, 25 bp, Homo sapien
gactaaggctgactcagctcaggcc

SEQ ID NO: 3001024 - DNA, 25 bp, Homo sapien
ctggggatgactaaggctgactcag

SEQ ID NO: 3001025 - DNA, 25 bp, Homo sapien
gctgcgtgacgcacatggtgaccag

SEQ ID NO: 3001026 - DNA, 25 bp, Homo sapien
ccccatgtagaagatgagccgcagc

SEQ ID NO: 3001027 - DNA, 25 bp, Homo sapien
ggatgttgttcatagcccccatgta

SEQ ID NO: 3001028 - DNA, 25 bp, Homo sapien
ccgctgaccaggaacttgaggatgt

SEQ ID NO: 3001029 - DNA, 25 bp, Homo sapien
tcgacggtggacaggcacagcttgt

SEQ ID NO: 3001030 - DNA, 25 bp, Homo sapien
tgcggcatccggctggcacttcacc

SEQ ID NO: 3001031 - DNA, 25 bp, Homo sapien
cggcccaccgtggtcacctgcttgt

SEQ ID NO: 3001032 - DNA, 25 bp, Homo sapien
ctgctccttggcactcctcatggag

SEQ ID NO: 3001033 - DNA, 25 bp, Homo sapien
ggccccgggagagtgtctgtgggtg

SEQ ID NO: 3001034 - DNA, 25 bp, Homo sapien
ccccgggagagtgtctgtgggtgct

SEQ ID NO: 3001035 - DNA, 25 bp, Homo sapien
gccccgggagagtgtctgtgggtgc

SEQ ID NO: 3001036 - DNA, 25 bp, Homo sapien
aggagacaccagcatcatagatgag

SEQ ID NO: 3001037 - DNA, 25 bp, Homo sapien
ggctcaaggggccagttaaagaagc

SEQ ID NO: 3001038 - DNA, 25 bp, Homo sapien
agcagccggcccagaccacgaggac

SEQ ID NO: 3001039 - DNA, 25 bp, Homo sapien
aggacgacgatgaaggagacaccag

SEQ ID NO: 3001040 - DNA, 25 bp, Homo sapien
gcgtaggacccaatcatcaaggcaa

SEQ ID NO: 3001041 - DNA, 25 bp, Homo sapien
acgtggaccgaaggtcgccgaacat

SEQ ID NO: 3001042 - DNA, 25 bp, Homo sapien
tggaaaggtgactgccgaggaggcg

SEQ ID NO: 3001043 - DNA, 25 bp, Homo sapien
tcatcaaggcaataaacgtggaccg

SEQ ID NO: 3001044 - DNA, 25 bp, Homo sapien
gttcggcccgagcagttagcatcct

SEQ ID NO: 3001045 - DNA, 25 bp, Homo sapien
ccaagtcgcgagattagagatgccc

SEQ ID NO: 3001046 - DNA, 25 bp, Homo sapien
catcagctcattctgggtacagggc

SEQ ID NO: 3001047 - DNA, 25 bp, Homo sapien
tatcttcccacaggatgttcggccc

SEQ ID NO: 3001048 - DNA, 25 bp, Homo sapien
gactgctgtcaggatgtttatgctt

SEQ ID NO: 3001049 - DNA, 25 bp, Homo sapien
tgttgtgaccacacattgactgctg

SEQ ID NO: 3001050 - DNA, 25 bp, Homo sapien
tcctgtccttgttattctgttgtga

SEQ ID NO: 3001051 - DNA, 25 bp, Homo sapien
tttgacacaaatgctaggtactccc

SEQ ID NO: 3001052 - DNA, 25 bp, Homo sapien
ctacagggggataccacaatgccca

SEQ ID NO: 3001053 - DNA, 25 bp, Homo sapien
tcatcaacacagcacgctattgtgc

SEQ ID NO: 3001054 - DNA, 25 bp, Homo sapien
gcacgctattgtgcagaactcctgg

SEQ ID NO: 3001055 - DNA, 25 bp, Homo sapien
caacacagcacgctattgtgcagaa

SEQ ID NO: 3001056 - DNA, 25 bp, Homo sapien
ccacagcatcggatgggcttgcatt

SEQ ID NO: 3001057 - DNA, 25 bp, Homo sapien
tgctgttgccttcggctgacctccc

SEQ ID NO: 3001058 - DNA, 25 bp, Homo sapien
tccccatggtccagcgccacagcat

SEQ ID NO: 3001059 - DNA, 25 bp, Homo sapien
gcatttgcctgtggactcccgtagg

SEQ ID NO: 3001060 - DNA, 25 bp, Homo sapien
caccggtctcagctgcgcataatgg

SEQ ID NO: 3001061 - DNA, 25 bp, Homo sapien
cgcggtgccggagtgagggctgagc

SEQ ID NO: 3001062 - DNA, 25 bp, Homo sapien
tgcgcataatggctgttcgaagccg

SEQ ID NO: 3001063 - DNA, 25 bp, Homo sapien
aatggctgttcgaagccgcggtgcc

SEQ ID NO: 3001064 - DNA, 25 bp, Homo sapien
tccagccgatgaagcgagtgcaaag

SEQ ID NO: 3001065 - DNA, 25 bp, Homo sapien
gccgtgtttgtgctccagccgatga

SEQ ID NO: 3001066 - DNA, 25 bp, Homo sapien
aaagggctgtacaaacgcgaggcac

SEQ ID NO: 3001067 - DNA, 25 bp, Homo sapien
cactgaacaaacactgagcgtgccg

SEQ ID NO: 3001068 - DNA, 25 bp, Homo sapien
atggagtgacctggcgtccgccctc

SEQ ID NO: 3001069 - DNA, 25 bp, Homo sapien
tccacggatggcacgcgatggccca

SEQ ID NO: 3001070 - DNA, 25 bp, Homo sapien
ctgcccccatggagtgacctggcgt

SEQ ID NO: 3001071 - DNA, 25 bp, Homo sapien
gatccacaccgtggggagtgctctg

SEQ ID NO: 3001072 - DNA, 25 bp, Homo sapien
ccttttggggtctgttctcaaggag

SEQ ID NO: 3001073 - DNA, 25 bp, Homo sapien
agccatatggcctctgtcacgactg

SEQ ID NO: 3001074 - DNA, 25 bp, Homo sapien
tcacgactgcgttgactctgatgag

SEQ ID NO: 3001075 - DNA, 25 bp, Homo sapien
cagtggtctggatttggcctggcaa

SEQ ID NO: 3001076 - DNA, 25 bp, Homo sapien
gacagacctctggtagccaaacgct

SEQ ID NO: 3001077 - DNA, 25 bp, Homo sapien
tgaaggtcatacacatcccaccaaa

SEQ ID NO: 3001078 - DNA, 25 bp, Homo sapien
tagaacttgcctctcaggttggcat

SEQ ID NO: 3001079 - DNA, 25 bp, Homo sapien
tgagtagaggcgtaacaggtgtccc

SEQ ID NO: 3001080 - DNA, 25 bp, Homo sapien
caggtgtcccctctaacttgagcag

SEQ ID NO: 3001081 - DNA, 25 bp, Homo sapien
tggaagttgctcataccctggaagc

SEQ ID NO: 3001082 - DNA, 25 bp, Homo sapien
tacttgctccgtacgcaatcagcaa

SEQ ID NO: 3001083 - DNA, 25 bp, Homo sapien
tgctccgtacgcaatcagcaagcag

SEQ ID NO: 3001084 - DNA, 25 bp, Homo sapien
tttggtttacttgctccgtacgcaa

SEQ ID NO: 3001085 - DNA, 25 bp, Homo sapien
aatcagcaagcaggaaaccgcgaag

SEQ ID NO: 3001086 - DNA, 25 bp, Homo sapien
tttggtttttcttgagacagagcct

SEQ ID NO: 3001087 - DNA, 25 bp, Homo sapien
cttgctctgtcacccgggctggagt

SEQ ID NO: 3001088 - DNA, 25 bp, Homo sapien
ttggtttttcttgagacagagcctt

SEQ ID NO: 3001089 - DNA, 25 bp, Homo sapien
agccttgctctgtcacccgggctgg

SEQ ID NO: 3001090 - DNA, 25 bp, Homo sapien
tataaggtcaaacgggctgtggaaa

SEQ ID NO: 3001091 - DNA, 25 bp, Homo sapien
aggtcaaacgggctgtggaaaccag

SEQ ID NO: 3001092 - DNA, 25 bp, Homo sapien
tcaaacgggctgtggaaaccagtgt

SEQ ID NO: 3001093 - DNA, 25 bp, Homo sapien
gtcaaacgggctgtggaaaccagtg

SEQ ID NO: 3001094 - DNA, 25 bp, Homo sapien
tactgtgccagcttcgtaacaaggt

SEQ ID NO: 3001095 - DNA, 25 bp, Homo sapien
catgtctcacacatgcgagggaaac

SEQ ID NO: 3001096 - DNA, 25 bp, Homo sapien
tcacacatgcgagggaaaccccaat

SEQ ID NO: 3001097 - DNA, 25 bp, Homo sapien
catgcgagggaaaccccaattatca

SEQ ID NO: 3001098 - DNA, 25 bp, Homo sapien
cagtacctgctgattcggtggcgga

SEQ ID NO: 3001099 - DNA, 25 bp, Homo sapien
gctccacagtacacctgatatcagg

SEQ ID NO: 3001100 - DNA, 25 bp, Homo sapien
cacagtacctgctgattcggtggcg

SEQ ID NO: 3001101 - DNA, 25 bp, Homo sapien
tacgaccaggatacccttctgtggg

SEQ ID NO: 3001102 - DNA, 25 bp, Homo sapien
gtccatgacgatacccaggggcagg

SEQ ID NO: 3001103 - DNA, 25 bp, Homo sapien
caaatttagcatctcgtcctgggcc

SEQ ID NO: 3001104 - DNA, 25 bp, Homo sapien
cactgagcagaaaggagcccacagt

SEQ ID NO: 3001105 - DNA, 25 bp, Homo sapien
cctcgggccatacttgtccatgacg

SEQ ID NO: 3001106 - DNA, 25 bp, Homo sapien
cttattttccttgccggggtcacag

SEQ ID NO: 3001107 - DNA, 25 bp, Homo sapien
gccggggtcacagtggtgccatccc

SEQ ID NO: 3001108 - DNA, 25 bp, Homo sapien
tcttattttccttgccggggtcaca

SEQ ID NO: 3001109 - DNA, 25 bp, Homo sapien
ttttccaaaaagaagctctaccaca

SEQ ID NO: 3001110 - DNA, 25 bp, Homo sapien
tccaaaaagaagctctaccacacgg

SEQ ID NO: 3001111 - DNA, 25 bp, Homo sapien
tcggccactttctctcggttttcca

SEQ ID NO: 3001112 - DNA, 25 bp, Homo sapien
ttccaaaaagaagctctaccacacg

SEQ ID NO: 3001113 - DNA, 25 bp, Homo sapien
ctcagagcggtcatgtacaccgcca

SEQ ID NO: 3001114 - DNA, 25 bp, Homo sapien
tcctcgagcccgtcagggtggagct

SEQ ID NO: 3001115 - DNA, 25 bp, Homo sapien
gagcggtcatgtacaccgccacagc

SEQ ID NO: 3001116 - DNA, 25 bp, Homo sapien
caaacacatggcagacggggtcctc

SEQ ID NO: 3001117 - DNA, 25 bp, Homo sapien
ggagctgctttgtgagttggtgttg

SEQ ID NO: 3001118 - DNA, 25 bp, Homo sapien
ggtctctacaaagcaacagccattt

SEQ ID NO: 3001119 - DNA, 25 bp, Homo sapien
tgcacaggggccgtggaataactga

SEQ ID NO: 3001120 - DNA, 25 bp, Homo sapien
cactgcctgagtaaaggcaccaggg

SEQ ID NO: 3001121 - DNA, 25 bp, Homo sapien
gccatttccaggttgacatgcagat

SEQ ID NO: 3001122 - DNA, 25 bp, Homo sapien
caggaggccctgaatatcgcttggt

SEQ ID NO: 3001123 - DNA, 25 bp, Homo sapien
gaccttcatggacaccagaagccag

SEQ ID NO: 3001124 - DNA, 25 bp, Homo sapien
gaacagagccgggaaaaggctgccc

SEQ ID NO: 3001125 - DNA, 25 bp, Homo sapien
tgggactaagactctcccacgaggt

SEQ ID NO: 3001126 - DNA, 25 bp, Homo sapien
ccctggaattatacgggttacacag

SEQ ID NO: 3001127 - DNA, 25 bp, Homo sapien
caggtatgcgtgtgatgacttgttt

SEQ ID NO: 3001128 - DNA, 25 bp, Homo sapien
tcctggcgccctgctttcttggggg

SEQ ID NO: 3001129 - DNA, 25 bp, Homo sapien
catctccgctgctgttctagctcct

SEQ ID NO: 3001130 - DNA, 25 bp, Homo sapien
cctagagactgggacacacaggaat

SEQ ID NO: 3001131 - DNA, 25 bp, Homo sapien
caggaagggtcacgatctctaaggg

SEQ ID NO: 3001132 - DNA, 25 bp, Homo sapien
gaagtaaacactccaacctgtgcct

SEQ ID NO: 3001133 - DNA, 25 bp, Homo sapien
cacaaaggattacacccagcatgag

SEQ ID NO: 3001134 - DNA, 25 bp, Homo sapien
gtaggagtaaaagccctctgacttg

SEQ ID NO: 3001135 - DNA, 25 bp, Homo sapien
ctggctcggtacacaggtaggagta

SEQ ID NO: 3001136 - DNA, 25 bp, Homo sapien
gactgccgagaagaggaggttctcc

SEQ ID NO: 3001137 - DNA, 25 bp, Homo sapien
accagcggcgccgatgggcagtggc

SEQ ID NO: 3001138 - DNA, 25 bp, Homo sapien
gtgcggcgcggcgcggctccggctc

SEQ ID NO: 3001139 - DNA, 25 bp, Homo sapien
tgcggcgcggcgcggctccggctcc

SEQ ID NO: 3001140 - DNA, 25 bp, Homo sapien
cggcgcggcgcggctccggctccgg

SEQ ID NO: 3001141 - DNA, 25 bp, Homo sapien
ggtgcggcgcggcgcggctccggct

SEQ ID NO: 3001142 - DNA, 25 bp, Homo sapien
acaccccgagcccgcggccggctcg

SEQ ID NO: 3001143 - DNA, 25 bp, Homo sapien
caccccgagcccgcggccggctcgt

SEQ ID NO: 3001144 - DNA, 25 bp, Homo sapien
ctgggacaccccgagcccgcggccg

SEQ ID NO: 3001145 - DNA, 25 bp, Homo sapien
gacaccccgagcccgcggccggctc

SEQ ID NO: 3001146 - DNA, 25 bp, Homo sapien
cagctcactccgaggtaaactgagg

SEQ ID NO: 3001147 - DNA, 25 bp, Homo sapien
gccgtggaactagtcctggcctgca

SEQ ID NO: 3001148 - DNA, 25 bp, Homo sapien
ctaacgcatgctcagggccgtggaa

SEQ ID NO: 3001149 - DNA, 25 bp, Homo sapien
tgcagcaggactgacatcgcctggg

SEQ ID NO: 3001150 - DNA, 25 bp, Homo sapien
ggcgtgtgtcgggcccgcccggcgc

SEQ ID NO: 3001151 - DNA, 25 bp, Homo sapien
cgtgtgtcgggcccgcccggcgcct

SEQ ID NO: 3001152 - DNA, 25 bp, Homo sapien
gctcctccggcgtgtgtcgggcccg

SEQ ID NO: 3001153 - DNA, 25 bp, Homo sapien
tcctccggcgtgtgtcgggcccgcc

SEQ ID NO: 3001154 - DNA, 25 bp, Homo sapien
tatgtcattgcttattgtatcaaaa

SEQ ID NO: 3001155 - DNA, 25 bp, Homo sapien
aataaatatggacaaagttgtatac

SEQ ID NO: 3001156 - DNA, 25 bp, Homo sapien
tatggacaaagttgtatactatgtc

SEQ ID NO: 3001157 - DNA, 25 bp, Homo sapien
gtatactatgtcattgcttattgta

SEQ ID NO: 3001158 - DNA, 25 bp, Homo sapien
ttttccctgtggaggcgcagaggct

SEQ ID NO: 3001159 - DNA, 25 bp, Homo sapien
tagcccttatgaggcacacagggtc

SEQ ID NO: 3001160 - DNA, 25 bp, Homo sapien
gcagagcaaaagtccctgcaggcaa

SEQ ID NO: 3001161 - DNA, 25 bp, Homo sapien
ccgggatcattttccagcacacagc

SEQ ID NO: 3001162 - DNA, 25 bp, Homo sapien
ctggcgcggaggcttagggatggcc

SEQ ID NO: 3001163 - DNA, 25 bp, Homo sapien
tctgactgccataggccctgtggcc

SEQ ID NO: 3001164 - DNA, 25 bp, Homo sapien
ggtacaacattctcatactcaggtt

SEQ ID NO: 3001165 - DNA, 25 bp, Homo sapien
ctttttccgattcagggcctggcgc

SEQ ID NO: 3001166 - DNA, 25 bp, Homo sapien
agcttcggcgactctgtggtgcaaa

SEQ ID NO: 3001167 - DNA, 25 bp, Homo sapien
accaaaatggcggaagacagagcgg

SEQ ID NO: 3001168 - DNA, 25 bp, Homo sapien
gcatgtagatcgtggtcacagggcc

SEQ ID NO: 3001169 - DNA, 25 bp, Homo sapien
tggtgcaaacttggtaccttccgcg

SEQ ID NO: 3001170 - DNA, 25 bp, Homo sapien
gcgggatggcgaatggcgtggaggc

SEQ ID NO: 3001171 - DNA, 25 bp, Homo sapien
gaatggcgtggaggcgtcctcaggg

SEQ ID NO: 3001172 - DNA, 25 bp, Homo sapien
ggaggtgcgcgggatggcgaatggc

SEQ ID NO: 3001173 - DNA, 25 bp, Homo sapien
ggctggaggtgcgcgggatggcgaa

SEQ ID NO: 3001174 - DNA, 25 bp, Homo sapien
ctgacgaccctgcctgggccacagg

SEQ ID NO: 3001175 - DNA, 25 bp, Homo sapien
tgacgaccctgcctgggccacaggg

SEQ ID NO: 3001176 - DNA, 25 bp, Homo sapien
gcccggagccaagaacagtgactaa

SEQ ID NO: 3001177 - DNA, 25 bp, Homo sapien
tctgctagactcgactgggatgcca

SEQ ID NO: 3001178 - DNA, 25 bp, Homo sapien
taaaactctttcgatggcacacagc

SEQ ID NO: 3001179 - DNA, 25 bp, Homo sapien
tgttatctcttgcatgcccggagcc

SEQ ID NO: 3001180 - DNA, 25 bp, Homo sapien
gggctatgtgggctgttggggggct

SEQ ID NO: 3001181 - DNA, 25 bp, Homo sapien
tgctcaggggctatgtgggctgttg

SEQ ID NO: 3001182 - DNA, 25 bp, Homo sapien
ctcaggggctatgtgggctgttggg

SEQ ID NO: 3001183 - DNA, 25 bp, Homo sapien
gctatgtgggctgttggggggctac

SEQ ID NO: 3001184 - DNA, 25 bp, Homo sapien
ctcaggatcggatgagaaggagtca

SEQ ID NO: 3001185 - DNA, 25 bp, Homo sapien
tggcccagccggcagagggcggctc

SEQ ID NO: 3001186 - DNA, 25 bp, Homo sapien
gatcggatgagaaggagtcatcagt

SEQ ID NO: 3001187 - DNA, 25 bp, Homo sapien
tctccagactcaggatcggatgaga

SEQ ID NO: 3001188 - DNA, 25 bp, Homo sapien
gggacctccgggtcgtgatgtgaga

SEQ ID NO: 3001189 - DNA, 25 bp, Homo sapien
aaggggacctccgggtcgtgatgtg

SEQ ID NO: 3001190 - DNA, 25 bp, Homo sapien
ggggacctccgggtcgtgatgtgag

SEQ ID NO: 3001191 - DNA, 25 bp, Homo sapien
tgaaggggacctccgggtcgtgatg

SEQ ID NO: 3001192 - DNA, 25 bp, Homo sapien
cagcgtggagcccaagctggtcagt

SEQ ID NO: 3001193 - DNA, 25 bp, Homo sapien
gcagcttcatcctggacacggtagc

SEQ ID NO: 3001194 - DNA, 25 bp, Homo sapien
tgtcacccagggtagcttgtgggag

SEQ ID NO: 3001195 - DNA, 25 bp, Homo sapien
aagctggtcagtgtcccccagacct

SEQ ID NO: 3001196 - DNA, 25 bp, Homo sapien
tgtgaatgccgcacaagcacagagg

SEQ ID NO: 3001197 - DNA, 25 bp, Homo sapien
tcctgtgtgccagtaccaactagat

SEQ ID NO: 3001198 - DNA, 25 bp, Homo sapien
taagagagcaccagacaaagagtcc

SEQ ID NO: 3001199 - DNA, 25 bp, Homo sapien
tgtgctattggactagggcaggaac

SEQ ID NO: 3001200 - DNA, 25 bp, Homo sapien
ccttgaggtctgatcggggggccca

SEQ ID NO: 3001201 - DNA, 25 bp, Homo sapien
tgtccttgaggtctgatcggggggc

SEQ ID NO: 3001202 - DNA, 25 bp, Homo sapien
gcagaggcacaaggctgcccgcgat

SEQ ID NO: 3001203 - DNA, 25 bp, Homo sapien
tgagggcagtgtcccgactgccaga

SEQ ID NO: 3001204 - DNA, 25 bp, Homo sapien
gtttccatggaaaccggctgggcag

SEQ ID NO: 3001205 - DNA, 25 bp, Homo sapien
gctggcaggacccagagacagggtg

SEQ ID NO: 3001206 - DNA, 25 bp, Homo sapien
gggtggcagagtccctctgggcatt

SEQ ID NO: 3001207 - DNA, 25 bp, Homo sapien
gggcattcacaaggaactgagcagt

SEQ ID NO: 3001208 - DNA, 25 bp, Homo sapien
cccagtagccggcactgcagacaca

SEQ ID NO: 3001209 - DNA, 25 bp, Homo sapien
gggcccccagtagccggcactgcag

SEQ ID NO: 3001210 - DNA, 25 bp, Homo sapien
cagtagccggcactgcagacacagt

SEQ ID NO: 3001211 - DNA, 25 bp, Homo sapien
ctgggcccccagtagccggcactgc

SEQ ID NO: 3001212 - DNA, 25 bp, Homo sapien
taccagtggggcaggggtcttcaca

SEQ ID NO: 3001213 - DNA, 25 bp, Homo sapien
ggtggggcaggtagagccacagtct

SEQ ID NO: 3001214 - DNA, 25 bp, Homo sapien
gggcaggtagagccacagtcttccc

SEQ ID NO: 3001215 - DNA, 25 bp, Homo sapien
cagtcttccccaaaggtaccagtgg

SEQ ID NO: 3001216 - DNA, 25 bp, Homo sapien
tgacagactacaagtccccagaggg

SEQ ID NO: 3001217 - DNA, 25 bp, Homo sapien
gaaggtgtaccccaccctgaacaga

SEQ ID NO: 3001218 - DNA, 25 bp, Homo sapien
ctctcggagagagccgctgagctga

SEQ ID NO: 3001219 - DNA, 25 bp, Homo sapien
tcctcagcagtgaagctcaggtgca

SEQ ID NO: 3001220 - DNA, 25 bp, Homo sapien
ctgggccccagccagccagggtcac

SEQ ID NO: 3001221 - DNA, 25 bp, Homo sapien
gctggcactgggtcccgttccagcc

SEQ ID NO: 3001222 - DNA, 25 bp, Homo sapien
agcccggctcgcaggactcacagct

SEQ ID NO: 3001223 - DNA, 25 bp, Homo sapien
tgttcgcagctctcgccaaaggtgc

SEQ ID NO: 3001224 - DNA, 25 bp, Homo sapien
tccccatgtcggcagtgagggcact

SEQ ID NO: 3001225 - DNA, 25 bp, Homo sapien
ttttttgagaggagcaccgcgaagc

SEQ ID NO: 3001226 - DNA, 25 bp, Homo sapien
gttttttgagaggagcaccgcgaag

SEQ ID NO: 3001227 - DNA, 25 bp, Homo sapien
gcaccgcgaagccctgacccctcct

SEQ ID NO: 3001228 - DNA, 25 bp, Homo sapien
ccgccccgcctgctcacttgtgtcc

SEQ ID NO: 3001229 - DNA, 25 bp, Homo sapien
ccccgcctgctcacttgtgtccgcc

SEQ ID NO: 3001230 - DNA, 25 bp, Homo sapien
gccccgcctgctcacttgtgtccgc

SEQ ID NO: 3001231 - DNA, 25 bp, Homo sapien
ccgcctgctcacttgtgtccgcccc

SEQ ID NO: 3001232 - DNA, 25 bp, Homo sapien
ggcgctgcagcggccccgcacacac

SEQ ID NO: 3001233 - DNA, 25 bp, Homo sapien
tgcaccccgtggctgcctgccgggc

SEQ ID NO: 3001234 - DNA, 25 bp, Homo sapien
cgggcgggcaggtgcactcgccgga

SEQ ID NO: 3001235 - DNA, 25 bp, Homo sapien
ggcaggtgcactcgccggaggcggc

SEQ ID NO: 3001236 - DNA, 25 bp, Homo sapien
cactgctgctggcattcgggacccc

SEQ ID NO: 3001237 - DNA, 25 bp, Homo sapien
gcactgctgctggcattcgggaccc

SEQ ID NO: 3001238 - DNA, 25 bp, Homo sapien
ctgctgctggcattcgggaccccac

SEQ ID NO: 3001239 - DNA, 25 bp, Homo sapien
actgctgctggcattcgggacccca

SEQ ID NO: 3001240 - DNA, 25 bp, Homo sapien
tggacgaccaccagccgggttcgca

SEQ ID NO: 3001241 - DNA, 25 bp, Homo sapien
tggctggctcgcactggccgtgcgg

SEQ ID NO: 3001242 - DNA, 25 bp, Homo sapien
ggcgcacgggaactcgcagcgggct

SEQ ID NO: 3001243 - DNA, 25 bp, Homo sapien
tgttgcactggcacgggcggcggca

SEQ ID NO: 3001244 - DNA, 25 bp, Homo sapien
agaatccaggcttgcatcgacagag

SEQ ID NO: 3001245 - DNA, 25 bp, Homo sapien
caggcttgcatcgacagaggcccgg

SEQ ID NO: 3001246 - DNA, 25 bp, Homo sapien
gcccggcttcacacacacctcgtct

SEQ ID NO: 3001247 - DNA, 25 bp, Homo sapien
ttgcatcgacagaggcccggcttca

SEQ ID NO: 3001248 - DNA, 25 bp, Homo sapien
ccagcctgcgcagcactgcagctca

SEQ ID NO: 3001249 - DNA, 25 bp, Homo sapien
cctgcgcagcactgcagctcagcag

SEQ ID NO: 3001250 - DNA, 25 bp, Homo sapien
ggatggtgcattcttgatccttctg

SEQ ID NO: 3001251 - DNA, 25 bp, Homo sapien
tgcgcagcactgcagctcagcagag

SEQ ID NO: 3001252 - DNA, 25 bp, Homo sapien
agctcggacccctgagtcccccgag

SEQ ID NO: 3001253 - DNA, 25 bp, Homo sapien
cagctcggacccctgagtcccccga

SEQ ID NO: 3001254 - DNA, 25 bp, Homo sapien
ggtgggagcgctcgggttcgtctgg

SEQ ID NO: 3001255 - DNA, 25 bp, Homo sapien
tcggtgggagcgctcgggttcgtct

SEQ ID NO: 3001256 - DNA, 25 bp, Homo sapien
ggagcgctcgggttcgtctggcccc

SEQ ID NO: 3001257 - DNA, 25 bp, Homo sapien
cagctcggtgggagcgctcgggttc

SEQ ID NO: 3001258 - DNA, 25 bp, Homo sapien
ttctttattacatgagctcaggccg

SEQ ID NO: 3001259 - DNA, 25 bp, Homo sapien
ctcaggccgtctgcacaaagccctg

SEQ ID NO: 3001260 - DNA, 25 bp, Homo sapien
aaagccctgggagctaggcagtcag

SEQ ID NO: 3001261 - DNA, 25 bp, Homo sapien
gctaggcagtcagctctcatttcat

SEQ ID NO: 3001262 - DNA, 25 bp, Homo sapien
agccctgtcctcatttgaggccaca

SEQ ID NO: 3001263 - DNA, 25 bp, Homo sapien
ggctgtgaaggcgggagccctgtcc

SEQ ID NO: 3001264 - DNA, 25 bp, Homo sapien
ctgccctgatgcaggccaggattgg

SEQ ID NO: 3001265 - DNA, 25 bp, Homo sapien
cccagaggctcggtacagagacgta

SEQ ID NO: 3001266 - DNA, 25 bp, Homo sapien
caaaggtgttcgtggagggcagaac

SEQ ID NO: 3001267 - DNA, 25 bp, Homo sapien
tctccccctagcttgctgggtgcag

SEQ ID NO: 3001268 - DNA, 25 bp, Homo sapien
gcccccagacaaaggtgttcgtgga

SEQ ID NO: 3001269 - DNA, 25 bp, Homo sapien
acagggcggatcaggagctggagac

SEQ ID NO: 3001270 - DNA, 25 bp, Homo sapien
gggatggtctcccttgtcatcggag

SEQ ID NO: 3001271 - DNA, 25 bp, Homo sapien
gatggtctcccttgtcatcggagag

SEQ ID NO: 3001272 - DNA, 25 bp, Homo sapien
cttgtcatcggagagcaggatccat

SEQ ID NO: 3001273 - DNA, 25 bp, Homo sapien
tctcccttgtcatcggagagcagga

SEQ ID NO: 3001274 - DNA, 25 bp, Homo sapien
gaagtgagggccattgatcaaggcc

SEQ ID NO: 3001275 - DNA, 25 bp, Homo sapien
gaggagaagtgagggccattgatca

SEQ ID NO: 3001276 - DNA, 25 bp, Homo sapien
gagagaggagaagtgagggccattg

SEQ ID NO: 3001277 - DNA, 25 bp, Homo sapien
gagaagtgagggccattgatcaagg

SEQ ID NO: 3001278 - DNA, 25 bp, Homo sapien
ttcatggcctcgagcagaaggccgg

SEQ ID NO: 3001279 - DNA, 25 bp, Homo sapien
ggtgtccctaacatcttggccttga

SEQ ID NO: 3001280 - DNA, 25 bp, Homo sapien
gggacccggtggtctgtgagcagct

SEQ ID NO: 3001281 - DNA, 25 bp, Homo sapien
gatcttcttccgctgcttccggaca

SEQ ID NO: 3001282 - DNA, 25 bp, Homo sapien
caaactcctcccgactgaagcggca

SEQ ID NO: 3001283 - DNA, 25 bp, Homo sapien
tttgagttcattccgctcctgaagg

SEQ ID NO: 3001284 - DNA, 25 bp, Homo sapien
tggctttgagttcattccgctcctg

SEQ ID NO: 3001285 - DNA, 25 bp, Homo sapien
gctttgagttcattccgctcctgaa

SEQ ID NO: 3001286 - DNA, 25 bp, Homo sapien
gaggggcgcccgagctgctgcgcgg

SEQ ID NO: 3001287 - DNA, 25 bp, Homo sapien
gggcgcccgagctgctgcgcggcct

SEQ ID NO: 3001288 - DNA, 25 bp, Homo sapien
tccgaggggcgcccgagctgctgcg

SEQ ID NO: 3001289 - DNA, 25 bp, Homo sapien
gcgcccgagctgctgcgcggcctcc

SEQ ID NO: 3001290 - DNA, 25 bp, Homo sapien
agagggtcgcctcggctggcgttcc

SEQ ID NO: 3001291 - DNA, 25 bp, Homo sapien
aggcacagtcagagggtcgcctcgg

SEQ ID NO: 3001292 - DNA, 25 bp, Homo sapien
ccatcatgggaatgctagaggaagt

SEQ ID NO: 3001293 - DNA, 25 bp, Homo sapien
tagaggaagtgacgggccgggagac

SEQ ID NO: 3001294 - DNA, 25 bp, Homo sapien
cgccggcggtcgcccattcgggctc

SEQ ID NO: 3001295 - DNA, 25 bp, Homo sapien
ggcggtcgcccattcgggctcctgt

SEQ ID NO: 3001296 - DNA, 25 bp, Homo sapien
ctgcgccggcggtcgcccattcggg

SEQ ID NO: 3001297 - DNA, 25 bp, Homo sapien
ccggcggtcgcccattcgggctcct

SEQ ID NO: 3001298 - DNA, 25 bp, Homo sapien
agctgggtctgcatggccgccagct

SEQ ID NO: 3001299 - DNA, 25 bp, Homo sapien
ttagcctgcggagtcgcggcttcgc

SEQ ID NO: 3001300 - DNA, 25 bp, Homo sapien
agctcagcgttcaccagcaggaggc

SEQ ID NO: 3001301 - DNA, 25 bp, Homo sapien
cgcgctcgctctttagcctgcggag

SEQ ID NO: 3001302 - DNA, 25 bp, Homo sapien
gtgcgcccggagttcgtcccgctgt

SEQ ID NO: 3001303 - DNA, 25 bp, Homo sapien
agttcgtcccgctgtcggtccgtga

SEQ ID NO: 3001304 - DNA, 25 bp, Homo sapien
gttgtgcgcccggagttcgtcccgc

SEQ ID NO: 3001305 - DNA, 25 bp, Homo sapien
cgcaggtcgcggttgtgcgcccgga

SEQ ID NO: 3001306 - DNA, 25 bp, Homo sapien
agctccctgcggaggcgctcgttct

SEQ ID NO: 3001307 - DNA, 25 bp, Homo sapien
ggaggcgctcgttctcctcccgcag

SEQ ID NO: 3001308 - DNA, 25 bp, Homo sapien
tcctgctccgccggctgcgccgaca

SEQ ID NO: 3001309 - DNA, 25 bp, Homo sapien
cctgcggaggcgctcgttctcctcc

SEQ ID NO: 3001310 - DNA, 25 bp, Homo sapien
ctggggagacccgggtctcaggctt

SEQ ID NO: 3001311 - DNA, 25 bp, Homo sapien
tggggagacccgggtctcaggcttc

SEQ ID NO: 3001312 - DNA, 25 bp, Homo sapien
gagacccgggtctcaggcttcggcc

SEQ ID NO: 3001313 - DNA, 25 bp, Homo sapien
ggagacccgggtctcaggcttcggc

SEQ ID NO: 3001314 - DNA, 25 bp, Homo sapien
ccagggccccggctagatggtacac

SEQ ID NO: 3001315 - DNA, 25 bp, Homo sapien
gaaacggcgcgccagatcctgcagc

SEQ ID NO: 3001316 - DNA, 25 bp, Homo sapien
tggtacacaagctccgcggccgatg

SEQ ID NO: 3001317 - DNA, 25 bp, Homo sapien
agcgcccgcaccactagcggcacca

SEQ ID NO: 3001318 - DNA, 25 bp, Homo sapien
caggcgtccaagagctgaggttcag

SEQ ID NO: 3001319 - DNA, 25 bp, Homo sapien
tctcccagaggcttagggctgcgac

SEQ ID NO: 3001320 - DNA, 25 bp, Homo sapien
agcgaaacagttccgccccaggaag

SEQ ID NO: 3001321 - DNA, 25 bp, Homo sapien
gatagtgccctaggtcgcctgggct

SEQ ID NO: 3001322 - DNA, 25 bp, Homo sapien
tcctgaataaaatataataataaat

SEQ ID NO: 3001323 - DNA, 25 bp, Homo sapien
catcctgaataaaatataataataa

SEQ ID NO: 3001324 - DNA, 25 bp, Homo sapien
ttattattatattttattcaggatg

SEQ ID NO: 3001325 - DNA, 25 bp, Homo sapien
ctctttccctctgtctgtgcttgtg

SEQ ID NO: 3001326 - DNA, 25 bp, Homo sapien
gacaggccgctgacattcagcagtt

SEQ ID NO: 3001327 - DNA, 25 bp, Homo sapien
ccagacaggccgctgacattcagca

SEQ ID NO: 3001328 - DNA, 25 bp, Homo sapien
ttcagcctcccgaggccgaagcctc

SEQ ID NO: 3001329 - DNA, 25 bp, Homo sapien
agtttggcctctttccctctgtctg

SEQ ID NO: 3001330 - DNA, 25 bp, Homo sapien
gctgacattcagcagtttggcctct

SEQ ID NO: 3001331 - DNA, 25 bp, Homo sapien
gctgaagcaggaggcagggaaacgg

SEQ ID NO: 3001332 - DNA, 25 bp, Homo sapien
tgctgaatgtcagcggcctgtctgg

SEQ ID NO: 3001333 - DNA, 25 bp, Homo sapien
cacaagcacagacagagggaaagag

SEQ ID NO: 3001334 - DNA, 25 bp, Homo sapien
cagacagagggaaagaggccaaact

SEQ ID NO: 3001335 - DNA, 25 bp, Homo sapien
gaggcttcggcctcgggaggctgaa

SEQ ID NO: 3001336 - DNA, 25 bp, Homo sapien
gaggccaaactgctgaatgtcagcg

SEQ ID NO: 3001337 - DNA, 25 bp, Homo sapien
tttactctgcggatcgggaggacct

SEQ ID NO: 3001338 - DNA, 25 bp, Homo sapien
gtttactctgcggatcgggaggacc

SEQ ID NO: 3001339 - DNA, 25 bp, Homo sapien
ttactctgcggatcgggaggacctg

SEQ ID NO: 3001340 - DNA, 25 bp, Homo sapien
ggatcgggaggacctgtatgcctga

SEQ ID NO: 3001341 - DNA, 25 bp, Homo sapien
tactctgcggatcgggaggacctgt

SEQ ID NO: 3001342 - DNA, 25 bp, Homo sapien
tctgcggatcgggaggacctgtatg

SEQ ID NO: 3001343 - DNA, 25 bp, Homo sapien
tcaggcatacaggtcctcccgatcc

SEQ ID NO: 3001344 - DNA, 25 bp, Homo sapien
atacaggtcctcccgatccgcagag

SEQ ID NO: 3001345 - DNA, 25 bp, Homo sapien
caggtcctcccgatccgcagagtaa

SEQ ID NO: 3001346 - DNA, 25 bp, Homo sapien
acaggtcctcccgatccgcagagta

SEQ ID NO: 3001347 - DNA, 25 bp, Homo sapien
ggtcctcccgatccgcagagtaaac

SEQ ID NO: 3001348 - DNA, 25 bp, Homo sapien
aggtcctcccgatccgcagagtaaa

SEQ ID NO: 3001349 - DNA, 25 bp, Homo sapien
gtgttcggcatgaccccaacatgaa

SEQ ID NO: 3001350 - DNA, 25 bp, Homo sapien
agttctaccacgaggtgcacaggcc

SEQ ID NO: 3001351 - DNA, 25 bp, Homo sapien
acgaggtgcacaggccctctcactt

SEQ ID NO: 3001352 - DNA, 25 bp, Homo sapien
tgagctacagctggcgaaccccaaa

SEQ ID NO: 3001353 - DNA, 25 bp, Homo sapien
aagagttctaccacgaggtgcacag

SEQ ID NO: 3001354 - DNA, 25 bp, Homo sapien
gctggcgaaccccaaagagttctac

SEQ ID NO: 3001355 - DNA, 25 bp, Homo sapien
aagtgagagggcctgtgcacctcgt

SEQ ID NO: 3001356 - DNA, 25 bp, Homo sapien
cctgtgcacctcgtggtagaactct

SEQ ID NO: 3001357 - DNA, 25 bp, Homo sapien
agggcctgtgcacctcgtggtagaa

SEQ ID NO: 3001358 - DNA, 25 bp, Homo sapien
gtagaactctttggggttcgccagc

SEQ ID NO: 3001359 - DNA, 25 bp, Homo sapien
ttcatgttggggtcatgccgaacac

SEQ ID NO: 3001360 - DNA, 25 bp, Homo sapien
tttggggttcgccagctgtagctca

SEQ ID NO: 3001361 - DNA, 25 bp, Homo sapien
ttccttggcttcttcatggtccctg

SEQ ID NO: 3001362 - DNA, 25 bp, Homo sapien
cagacaagggcaacaaccccaaggg

SEQ ID NO: 3001363 - DNA, 25 bp, Homo sapien
ccttcacactatgagagggtgcaga

SEQ ID NO: 3001364 - DNA, 25 bp, Homo sapien
agaacacagacaagggcaacaaccc

SEQ ID NO: 3001365 - DNA, 25 bp, Homo sapien
cagatgctgctgtcggaccgtttcc

SEQ ID NO: 3001366 - DNA, 25 bp, Homo sapien
agggctacctgccttcacactatga

SEQ ID NO: 3001367 - DNA, 25 bp, Homo sapien
cccagtcctcgtggaactacaactt

SEQ ID NO: 3001368 - DNA, 25 bp, Homo sapien
ccagtcctcgtggaactacaacttc

SEQ ID NO: 3001369 - DNA, 25 bp, Homo sapien
gaagttgtagttccacgaggactgg

SEQ ID NO: 3001370 - DNA, 25 bp, Homo sapien
aagttgtagttccacgaggactggg

SEQ ID NO: 3001371 - DNA, 25 bp, Homo sapien
cttgtctgtgttctggcggccccat

SEQ ID NO: 3001372 - DNA, 25 bp, Homo sapien
tcatagtgtgaaggcaggtagccct

SEQ ID NO: 3001373 - DNA, 25 bp, Homo sapien
cagggaccatgaagaagccaaggaa

SEQ ID NO: 3001374 - DNA, 25 bp, Homo sapien
ggcggccccattcgtagccactggg

SEQ ID NO: 3001375 - DNA, 25 bp, Homo sapien
tctgcaccctctcatagtgtgaagg

SEQ ID NO: 3001376 - DNA, 25 bp, Homo sapien
caaggaaacggtccgacagcagcat

SEQ ID NO: 3001377 - DNA, 25 bp, Homo sapien
ttcacgccaggctcctgtacactga

SEQ ID NO: 3001378 - DNA, 25 bp, Homo sapien
cttcacgccaggctcctgtacactg

SEQ ID NO: 3001379 - DNA, 25 bp, Homo sapien
tcagtgtacaggagcctggcgtgaa

SEQ ID NO: 3001380 - DNA, 25 bp, Homo sapien
cagtgtacaggagcctggcgtgaag

SEQ ID NO: 3001381 - DNA, 25 bp, Homo sapien
ttgggatggcgagaagaccattatc

SEQ ID NO: 3001382 - DNA, 25 bp, Homo sapien
ccatcttgggatggcgagaagacca

SEQ ID NO: 3001383 - DNA, 25 bp, Homo sapien
gatggcgagaagaccattatcatca

SEQ ID NO: 3001384 - DNA, 25 bp, Homo sapien
gggatggcgagaagaccattatcat

SEQ ID NO: 3001385 - DNA, 25 bp, Homo sapien
tcttgggatggcgagaagaccatta

SEQ ID NO: 3001386 - DNA, 25 bp, Homo sapien
aacccatcttgggatggcgagaaga

SEQ ID NO: 3001387 - DNA, 25 bp, Homo sapien
tcttctcgccatcccaagatgggtt

SEQ ID NO: 3001388 - DNA, 25 bp, Homo sapien
taatggtcttctcgccatcccaaga

SEQ ID NO: 3001389 - DNA, 25 bp, Homo sapien
gatgataatggtcttctcgccatcc

SEQ ID NO: 3001390 - DNA, 25 bp, Homo sapien
tggtcttctcgccatcccaagatgg

SEQ ID NO: 3001391 - DNA, 25 bp, Homo sapien
tgatgataatggtcttctcgccatc

SEQ ID NO: 3001392 - DNA, 25 bp, Homo sapien
gataatggtcttctcgccatcccaa

SEQ ID NO: 3001393 - DNA, 25 bp, Homo sapien
atggaacccttaggttggatccaca

SEQ ID NO: 3001394 - DNA, 25 bp, Homo sapien
agcccaatgagtccccgcagttatc

SEQ ID NO: 3001395 - DNA, 25 bp, Homo sapien
tgagtccccgcagttatcaccccag

SEQ ID NO: 3001396 - DNA, 25 bp, Homo sapien
tcagcccaatgagtccccgcagtta

SEQ ID NO: 3001397 - DNA, 25 bp, Homo sapien
gatggaacccttaggttggatccac

SEQ ID NO: 3001398 - DNA, 25 bp, Homo sapien
cagcccaatgagtccccgcagttat

SEQ ID NO: 3001399 - DNA, 25 bp, Homo sapien
gtggatccaacctaagggttccatc

SEQ ID NO: 3001400 - DNA, 25 bp, Homo sapien
taactgcggggactcattgggctga

SEQ ID NO: 3001401 - DNA, 25 bp, Homo sapien
tgtggatccaacctaagggttccat

SEQ ID NO: 3001402 - DNA, 25 bp, Homo sapien
ataactgcggggactcattgggctg

SEQ ID NO: 3001403 - DNA, 25 bp, Homo sapien
gataactgcggggactcattgggct

SEQ ID NO: 3001404 - DNA, 25 bp, Homo sapien
ctggggtgataactgcggggactca

SEQ ID NO: 3001405 - DNA, 25 bp, Homo sapien
cccaggtgaaggagatccgctgcat

SEQ ID NO: 3001406 - DNA, 25 bp, Homo sapien
gaaggagatccgctgcattgtgatg

SEQ ID NO: 3001407 - DNA, 25 bp, Homo sapien
gggcactcaccagaccgtgcacctg

SEQ ID NO: 3001408 - DNA, 25 bp, Homo sapien
agctgccccagcatgagtacctcaa

SEQ ID NO: 3001409 - DNA, 25 bp, Homo sapien
caggatacctatatggggtgagccc

SEQ ID NO: 3001410 - DNA, 25 bp, Homo sapien
tatatggggtgagcccaccagataa

SEQ ID NO: 3001411 - DNA, 25 bp, Homo sapien
gctcaccccatataggtatcctgca

SEQ ID NO: 3001412 - DNA, 25 bp, Homo sapien
tggtgagtgccccactgcggcacca

SEQ ID NO: 3001413 - DNA, 25 bp, Homo sapien
atgcagcggatctccttcacctggg

SEQ ID NO: 3001414 - DNA, 25 bp, Homo sapien
catcacaatgcagcggatctccttc

SEQ ID NO: 3001415 - DNA, 25 bp, Homo sapien
caggcaggtgcacggtctggtgagt

SEQ ID NO: 3001416 - DNA, 25 bp, Homo sapien
tatctggtgggctcaccccatatag

SEQ ID NO: 3001417 - DNA, 25 bp, Homo sapien
aagaaactctgtcctcgttcttggg

SEQ ID NO: 3001418 - DNA, 25 bp, Homo sapien
taagtccgcgatgaggtccatgtct

SEQ ID NO: 3001419 - DNA, 25 bp, Homo sapien
cattttgaacaagcaccccagctga

SEQ ID NO: 3001420 - DNA, 25 bp, Homo sapien
aatacactgagctgcatgtgtgctc

SEQ ID NO: 3001421 - DNA, 25 bp, Homo sapien
tctgacctggtactaagaagagttt

SEQ ID NO: 3001422 - DNA, 25 bp, Homo sapien
gagattctgatgtggtaagtccgcg

SEQ ID NO: 3001423 - DNA, 25 bp, Homo sapien
tgttagacatggacctcatcgcgga

SEQ ID NO: 3001424 - DNA, 25 bp, Homo sapien
caagcaaatgagcacacatgcagct

SEQ ID NO: 3001425 - DNA, 25 bp, Homo sapien
aaactcttcttagtaccaggtcaga

SEQ ID NO: 3001426 - DNA, 25 bp, Homo sapien
ccccaagaacgaggacagagtttct

SEQ ID NO: 3001427 - DNA, 25 bp, Homo sapien
tcatcgcggacttaccacatcagaa

SEQ ID NO: 3001428 - DNA, 25 bp, Homo sapien
taagcatagtattcacaagcaaatg

SEQ ID NO: 3001429 - DNA, 25 bp, Homo sapien
cagctgagagaaggtagtaattgta

SEQ ID NO: 3001430 - DNA, 25 bp, Homo sapien
tggactcagctaggccacagtgtgt

SEQ ID NO: 3001431 - DNA, 25 bp, Homo sapien
tggccccatgagatagcaaaagctg

SEQ ID NO: 3001432 - DNA, 25 bp, Homo sapien
tcagaaacaaattcctgaccaggtg

SEQ ID NO: 3001433 - DNA, 25 bp, Homo sapien
caacgaggtgggttttggccccatg

SEQ ID NO: 3001434 - DNA, 25 bp, Homo sapien
gagaacagatatggtcagaaacaaa

SEQ ID NO: 3001435 - DNA, 25 bp, Homo sapien
caaatactatcaggccaatactaca

SEQ ID NO: 3001436 - DNA, 25 bp, Homo sapien
acacactgtggcctagctgagtcca

SEQ ID NO: 3001437 - DNA, 25 bp, Homo sapien
tacaattactaccttctctcagctg

SEQ ID NO: 3001438 - DNA, 25 bp, Homo sapien
tcttgaaaccagcatctcaagttcc

SEQ ID NO: 3001439 - DNA, 25 bp, Homo sapien
tttgtttctgaccatatctgttctc

SEQ ID NO: 3001440 - DNA, 25 bp, Homo sapien
cacctggtcaggaatttgtttctga

SEQ ID NO: 3001441 - DNA, 25 bp, Homo sapien
tgtgcttaagaagttcatctgcata

SEQ ID NO: 3001442 - DNA, 25 bp, Homo sapien
cacatctatgtttcatctgacgaca

SEQ ID NO: 3001443 - DNA, 25 bp, Homo sapien
tgccaacctgcacctaaggaccaat

SEQ ID NO: 3001444 - DNA, 25 bp, Homo sapien
gagactggctacacctacatccttc

SEQ ID NO: 3001445 - DNA, 25 bp, Homo sapien
catccttcccaagaatgtgcttaag

SEQ ID NO: 3001446 - DNA, 25 bp, Homo sapien
tctgacgacatcaaggagactggct

SEQ ID NO: 3001447 - DNA, 25 bp, Homo sapien
gaaggatgtaggtgtagccagtctc

SEQ ID NO: 3001448 - DNA, 25 bp, Homo sapien
tatgcagatgaacttcttaagcaca

SEQ ID NO: 3001449 - DNA, 25 bp, Homo sapien
tagccagtctccttgatgtcgtcag

SEQ ID NO: 3001450 - DNA, 25 bp, Homo sapien
cttaagcacattcttgggaaggatg

SEQ ID NO: 3001451 - DNA, 25 bp, Homo sapien
tgtcgtcagatgaaacatagatgtg

SEQ ID NO: 3001452 - DNA, 25 bp, Homo sapien
attggtccttaggtgcaggttggca

SEQ ID NO: 3001453 - DNA, 25 bp, Homo sapien
cggctgcactacctaaggtgctggg

SEQ ID NO: 3001454 - DNA, 25 bp, Homo sapien
aaaggccggctgcactacctaaggt

SEQ ID NO: 3001455 - DNA, 25 bp, Homo sapien
tggaaaggccggctgcactacctaa

SEQ ID NO: 3001456 - DNA, 25 bp, Homo sapien
ctgggctgagcgatgctgacactcc

SEQ ID NO: 3001457 - DNA, 25 bp, Homo sapien
ggccggctgcactacctaaggtgct

SEQ ID NO: 3001458 - DNA, 25 bp, Homo sapien
ggctgagcgatgctgacactccctg

SEQ ID NO: 3001459 - DNA, 25 bp, Homo sapien
cagcaccttaggtagtgcagccggc

SEQ ID NO: 3001460 - DNA, 25 bp, Homo sapien
cagggagtgtcagcatcgctcagcc

SEQ ID NO: 3001461 - DNA, 25 bp, Homo sapien
ttaggtagtgcagccggcctttcca

SEQ ID NO: 3001462 - DNA, 25 bp, Homo sapien
ggagtgtcagcatcgctcagcccag

SEQ ID NO: 3001463 - DNA, 25 bp, Homo sapien
cccagcaccttaggtagtgcagccg

SEQ ID NO: 3001464 - DNA, 25 bp, Homo sapien
caccttaggtagtgcagccggcctt

SEQ ID NO: 3001465 - DNA, 25 bp, Homo sapien
gatcgctgagatcgagaagcagacc

SEQ ID NO: 3001466 - DNA, 25 bp, Homo sapien
tgtcaacaagcatggcgatgagatc

SEQ ID NO: 3001467 - DNA, 25 bp, Homo sapien
ggtatggagatctcggcaccgtcac

SEQ ID NO: 3001468 - DNA, 25 bp, Homo sapien
caccagcaactatgagacccagact

SEQ ID NO: 3001469 - DNA, 25 bp, Homo sapien
gaaattcgagacatcatcctgggta

SEQ ID NO: 3001470 - DNA, 25 bp, Homo sapien
gcagaccaaggaacaatcgcagctg

SEQ ID NO: 3001471 - DNA, 25 bp, Homo sapien
tacccaggatgatgtctcgaatttc

SEQ ID NO: 3001472 - DNA, 25 bp, Homo sapien
gacagtgcgagtctgtgttgccgtc

SEQ ID NO: 3001473 - DNA, 25 bp, Homo sapien
tgattgtgtcagtgatgccacgttc

SEQ ID NO: 3001474 - DNA, 25 bp, Homo sapien
tcttggatgagaaagtctgggtctc

SEQ ID NO: 3001475 - DNA, 25 bp, Homo sapien
tgtgacggtgccgagatctccatac

SEQ ID NO: 3001476 - DNA, 25 bp, Homo sapien
gatctcatcgccatgcttgttgaca

SEQ ID NO: 3001477 - DNA, 25 bp, Homo sapien
taaacagtgggaaggtgcacacgca

SEQ ID NO: 3001478 - DNA, 25 bp, Homo sapien
tgagaacagttccatgccagagcat

SEQ ID NO: 3001479 - DNA, 25 bp, Homo sapien
caaaattatccatagggtgacggac

SEQ ID NO: 3001480 - DNA, 25 bp, Homo sapien
tgctgtcccgcttggatctgacgaa

SEQ ID NO: 3001481 - DNA, 25 bp, Homo sapien
gaaattatcttgtcttagccaggct

SEQ ID NO: 3001482 - DNA, 25 bp, Homo sapien
taagtatccgagactgctgccaaca

SEQ ID NO: 3001483 - DNA, 25 bp, Homo sapien
tactagcatgagcactcaagcctgg

SEQ ID NO: 3001484 - DNA, 25 bp, Homo sapien
gattcgtcagatccaagcgggacag

SEQ ID NO: 3001485 - DNA, 25 bp, Homo sapien
ttttggttgccacgatgacagggag

SEQ ID NO: 3001486 - DNA, 25 bp, Homo sapien
tgtgaaacggaggtgcactaacact

SEQ ID NO: 3001487 - DNA, 25 bp, Homo sapien
taatcagaggtggtattgtccgtca

SEQ ID NO: 3001488 - DNA, 25 bp, Homo sapien
gatacttagggtctcggatgttcaa

SEQ ID NO: 3001489 - DNA, 25 bp, Homo sapien
atctggcccactctgactgacgaag

SEQ ID NO: 3001490 - DNA, 25 bp, Homo sapien
tactattacagaaccacaccacatc

SEQ ID NO: 3001491 - DNA, 25 bp, Homo sapien
gcccactctgactgacgaagaatgg

SEQ ID NO: 3001492 - DNA, 25 bp, Homo sapien
tgaagccagacaagactactattac

SEQ ID NO: 3001493 - DNA, 25 bp, Homo sapien
tctgcgtgccctacatgtgaacaac

SEQ ID NO: 3001494 - DNA, 25 bp, Homo sapien
tgtgaacaacgatcgggcaaaagtg

SEQ ID NO: 3001495 - DNA, 25 bp, Homo sapien
cgaggtgcagctcaaggatctgatc

SEQ ID NO: 3001496 - DNA, 25 bp, Homo sapien
ggatcaaggtcgaggtgcagctcaa

SEQ ID NO: 3001497 - DNA, 25 bp, Homo sapien
aagaatggatcaaggtcgaggtgca

SEQ ID NO: 3001498 - DNA, 25 bp, Homo sapien
tctgatcttggctgactacggcaag

SEQ ID NO: 3001499 - DNA, 25 bp, Homo sapien
caaggtcgaggtgcagctcaaggat

SEQ ID NO: 3001500 - DNA, 25 bp, Homo sapien
aaggatctgatcttggctgactacg

SEQ ID NO: 3001501 - DNA, 25 bp, Homo sapien
tcttgccgtagtcagccaagatcag

SEQ ID NO: 3001502 - DNA, 25 bp, Homo sapien
ccttgagctgcacctcgaccttgat

SEQ ID NO: 3001503 - DNA, 25 bp, Homo sapien
tgcacctcgaccttgatccattctt

SEQ ID NO: 3001504 - DNA, 25 bp, Homo sapien
gatcagatccttgagctgcacctcg

SEQ ID NO: 3001505 - DNA, 25 bp, Homo sapien
ccgtagtcagccaagatcagatcct

SEQ ID NO: 3001506 - DNA, 25 bp, Homo sapien
ccaagatcagatccttgagctgcac

SEQ ID NO: 3001507 - DNA, 25 bp, Homo sapien
gttgttcacatgtagggcacgcaga

SEQ ID NO: 3001508 - DNA, 25 bp, Homo sapien
cttcgtcagtcagagtgggccagat

SEQ ID NO: 3001509 - DNA, 25 bp, Homo sapien
ccattcttcgtcagtcagagtgggc

SEQ ID NO: 3001510 - DNA, 25 bp, Homo sapien
gatgtggtgtggttctgtaatagta

SEQ ID NO: 3001511 - DNA, 25 bp, Homo sapien
taatagtagtcttgtctggcttcag

SEQ ID NO: 3001512 - DNA, 25 bp, Homo sapien
cacttttgcccgatcgttgttcaca

SEQ ID NO: 3001513 - DNA, 25 bp, Homo sapien
gtgcacttactggacttccccaata

SEQ ID NO: 3001514 - DNA, 25 bp, Homo sapien
caacctctatgacgactggctcaag

SEQ ID NO: 3001515 - DNA, 25 bp, Homo sapien
gacgactggctcaagactatttcat

SEQ ID NO: 3001516 - DNA, 25 bp, Homo sapien
gacttccccaatattgtcatcaaag

SEQ ID NO: 3001517 - DNA, 25 bp, Homo sapien
tgtcatcaaaggatcggagctccaa

SEQ ID NO: 3001518 - DNA, 25 bp, Homo sapien
ctttccaggcgtgtctcaaggtgga

SEQ ID NO: 3001519 - DNA, 25 bp, Homo sapien
gatgagatccccgaatttttccacc

SEQ ID NO: 3001520 - DNA, 25 bp, Homo sapien
tgagccagtcgtcatagaggttgaa

SEQ ID NO: 3001521 - DNA, 25 bp, Homo sapien
gatgaaatagtcttgagccagtcgt

SEQ ID NO: 3001522 - DNA, 25 bp, Homo sapien
gaaagggagttggagctccgatcct

SEQ ID NO: 3001523 - DNA, 25 bp, Homo sapien
tggagctccgatcctttgatgacaa

SEQ ID NO: 3001524 - DNA, 25 bp, Homo sapien
cttgagacacgcctggaaagggagt

SEQ ID NO: 3001525 - DNA, 25 bp, Homo sapien
cctgatccgatctctgcctgtggag

SEQ ID NO: 3001526 - DNA, 25 bp, Homo sapien
gccctgatccgatctctgcctgtgg

SEQ ID NO: 3001527 - DNA, 25 bp, Homo sapien
ctgatccgatctctgcctgtggagg

SEQ ID NO: 3001528 - DNA, 25 bp, Homo sapien
gatcattgtcaccaggaagggcatg

SEQ ID NO: 3001529 - DNA, 25 bp, Homo sapien
atcattgtcaccaggaagggcatgc

SEQ ID NO: 3001530 - DNA, 25 bp, Homo sapien
cagatcattgtcaccaggaagggca

SEQ ID NO: 3001531 - DNA, 25 bp, Homo sapien
cctccacaggcagagatcggatcag

SEQ ID NO: 3001532 - DNA, 25 bp, Homo sapien
gcatgcccttcctggtgacaatgat

SEQ ID NO: 3001533 - DNA, 25 bp, Homo sapien
ccacaggcagagatcggatcagggc

SEQ ID NO: 3001534 - DNA, 25 bp, Homo sapien
catgcccttcctggtgacaatgatc

SEQ ID NO: 3001535 - DNA, 25 bp, Homo sapien
tgcccttcctggtgacaatgatctg

SEQ ID NO: 3001536 - DNA, 25 bp, Homo sapien
tccacaggcagagatcggatcaggg

SEQ ID NO: 3001537 - DNA, 25 bp, Homo sapien
ttcaacccacgcacagggcagctgt

SEQ ID NO: 3001538 - DNA, 25 bp, Homo sapien
ccgtgtgggcgggacagaagcgttt

SEQ ID NO: 3001539 - DNA, 25 bp, Homo sapien
agcccatcaacggagccatcttcat

SEQ ID NO: 3001540 - DNA, 25 bp, Homo sapien
ggcagctgttcctcaagataatcca

SEQ ID NO: 3001541 - DNA, 25 bp, Homo sapien
tcaagataatccacacgtccgtgtg

SEQ ID NO: 3001542 - DNA, 25 bp, Homo sapien
gaacttgacaaccaagcccatcaac

SEQ ID NO: 3001543 - DNA, 25 bp, Homo sapien
tccgttgatgggcttggttgtcaag

SEQ ID NO: 3001544 - DNA, 25 bp, Homo sapien
tggattatcttgaggaacagctgcc

SEQ ID NO: 3001545 - DNA, 25 bp, Homo sapien
cacacggacgtgtggattatcttga

SEQ ID NO: 3001546 - DNA, 25 bp, Homo sapien
acagctgccctgtgcgtgggttgaa

SEQ ID NO: 3001547 - DNA, 25 bp, Homo sapien
gacgtgtggattatcttgaggaaca

SEQ ID NO: 3001548 - DNA, 25 bp, Homo sapien
atgaagatggctccgttgatgggct

SEQ ID NO: 3001549 - DNA, 25 bp, Homo sapien
ggtttgtggatgacaccaacgtcta

SEQ ID NO: 3001550 - DNA, 25 bp, Homo sapien
atctgaacccactgagccttatttg

SEQ ID NO: 3001551 - DNA, 25 bp, Homo sapien
tatggtgagctcttctccaaccaga

SEQ ID NO: 3001552 - DNA, 25 bp, Homo sapien
caacgtctacagagtgactattcac

SEQ ID NO: 3001553 - DNA, 25 bp, Homo sapien
tatgtgttacgtgaacggatccgca

SEQ ID NO: 3001554 - DNA, 25 bp, Homo sapien
aagcctctcatacaacaggccatgg

SEQ ID NO: 3001555 - DNA, 25 bp, Homo sapien
gccatggcctgttgtatgagaggct

SEQ ID NO: 3001556 - DNA, 25 bp, Homo sapien
tctgtagacgttggtgtcatccaca

SEQ ID NO: 3001557 - DNA, 25 bp, Homo sapien
gttcacgtaacacatacagggcagg

SEQ ID NO: 3001558 - DNA, 25 bp, Homo sapien
tctggttggagaagagctcaccata

SEQ ID NO: 3001559 - DNA, 25 bp, Homo sapien
caaataaggctcagtgggttcagat

SEQ ID NO: 3001560 - DNA, 25 bp, Homo sapien
agctgtagccccttgcggatccgtt

SEQ ID NO: 3001561 - DNA, 25 bp, Homo sapien
accacccagaaatactggattgaca

SEQ ID NO: 3001562 - DNA, 25 bp, Homo sapien
gaaatactggattgacatccagttg

SEQ ID NO: 3001563 - DNA, 25 bp, Homo sapien
ttgcgctggggggactatgattccc

SEQ ID NO: 3001564 - DNA, 25 bp, Homo sapien
ccagaaatactggattgacatccag

SEQ ID NO: 3001565 - DNA, 25 bp, Homo sapien
tactggattgacatccagttgcgct

SEQ ID NO: 3001566 - DNA, 25 bp, Homo sapien
tggattgacatccagttgcgctggg

SEQ ID NO: 3001567 - DNA, 25 bp, Homo sapien
cattgacctggcctataacttgcac

SEQ ID NO: 3001568 - DNA, 25 bp, Homo sapien
gattcccacgacattgagcgctacg

SEQ ID NO: 3001569 - DNA, 25 bp, Homo sapien
aagttcctggactacaccaccgaca

SEQ ID NO: 3001570 - DNA, 25 bp, Homo sapien
cacaggtgtactcatcgccattgac

SEQ ID NO: 3001571 - DNA, 25 bp, Homo sapien
gactacaccaccgacaacatgagta

SEQ ID NO: 3001572 - DNA, 25 bp, Homo sapien
agtatctacccttcgcccacaggtg

SEQ ID NO: 3001573 - DNA, 25 bp, Homo sapien
ctcatgttgtcggtggtgtagtcca

SEQ ID NO: 3001574 - DNA, 25 bp, Homo sapien
cgctcaatgtcgtgggaatcatagt

SEQ ID NO: 3001575 - DNA, 25 bp, Homo sapien
caatggcgatgagtacacctgtggg

SEQ ID NO: 3001576 - DNA, 25 bp, Homo sapien
ttggcccgggcgtagcgctcaatgt

SEQ ID NO: 3001577 - DNA, 25 bp, Homo sapien
tgtgcaagttataggccaggtcaat

SEQ ID NO: 3001578 - DNA, 25 bp, Homo sapien
cctgtgggcgaagggtagatactca

SEQ ID NO: 3001579 - DNA, 25 bp, Homo sapien
ctggatgtcaatccagtatttctgg

SEQ ID NO: 3001580 - DNA, 25 bp, Homo sapien
tgtcaatccagtatttctgggtggt

SEQ ID NO: 3001581 - DNA, 25 bp, Homo sapien
atagtccccccagcgcaactggatg

SEQ ID NO: 3001582 - DNA, 25 bp, Homo sapien
tgggaatcatagtccccccagcgca

SEQ ID NO: 3001583 - DNA, 25 bp, Homo sapien
cccagcgcaactggatgtcaatcca

SEQ ID NO: 3001584 - DNA, 25 bp, Homo sapien
ccagcgcaactggatgtcaatccag

SEQ ID NO: 3001585 - DNA, 25 bp, Homo sapien
ccctgcaactttaggaattgtcctg

SEQ ID NO: 3001586 - DNA, 25 bp, Homo sapien
cgttttcctgttcttctagccctgc

SEQ ID NO: 3001587 - DNA, 25 bp, Homo sapien
cagtgctacgcttggagcctgtcaa

SEQ ID NO: 3001588 - DNA, 25 bp, Homo sapien
catggtttcttagaagcttgaaccc

SEQ ID NO: 3001589 - DNA, 25 bp, Homo sapien
tttgtttcaaacttggagccagtgc

SEQ ID NO: 3001590 - DNA, 25 bp, Homo sapien
ggacattggttatgcccatggtttc

SEQ ID NO: 3001591 - DNA, 25 bp, Homo sapien
gagggttcaagcttctaagaaacca

SEQ ID NO: 3001592 - DNA, 25 bp, Homo sapien
tgttgacaggctccaagcgtagcac

SEQ ID NO: 3001593 - DNA, 25 bp, Homo sapien
gaaaccatgggcataaccaatgtcc

SEQ ID NO: 3001594 - DNA, 25 bp, Homo sapien
caggacaattcctaaagttgcaggg

SEQ ID NO: 3001595 - DNA, 25 bp, Homo sapien
gcactggctccaagtttgaaacaaa

SEQ ID NO: 3001596 - DNA, 25 bp, Homo sapien
gcagggctagaagaacaggaaaacg

SEQ ID NO: 3001597 - DNA, 25 bp, Homo sapien
acttgatgcactggaaattgagaca

SEQ ID NO: 3001598 - DNA, 25 bp, Homo sapien
tataagtggaatgtctcccggccct

SEQ ID NO: 3001599 - DNA, 25 bp, Homo sapien
catataagatgaactcttcctgtgc

SEQ ID NO: 3001600 - DNA, 25 bp, Homo sapien
ggagacaatccatccccgaaagtca

SEQ ID NO: 3001601 - DNA, 25 bp, Homo sapien
ggccctcattgctggctgactccaa

SEQ ID NO: 3001602 - DNA, 25 bp, Homo sapien
cctgctctttgcctcctataagtgg

SEQ ID NO: 3001603 - DNA, 25 bp, Homo sapien
gagttcatcttatatgactttcggg

SEQ ID NO: 3001604 - DNA, 25 bp, Homo sapien
gagggccgggagacattccacttat

SEQ ID NO: 3001605 - DNA, 25 bp, Homo sapien
ttggagtcagccagcaatgagggcc

SEQ ID NO: 3001606 - DNA, 25 bp, Homo sapien
tgcacaggaagagttcatcttatat

SEQ ID NO: 3001607 - DNA, 25 bp, Homo sapien
tgtctcaatttccagtgcatcaagt

SEQ ID NO: 3001608 - DNA, 25 bp, Homo sapien
ccacttataggaggcaaagagcagg

SEQ ID NO: 3001609 - DNA, 25 bp, Homo sapien
cggcaagatccccacgctgaagatc

SEQ ID NO: 3001610 - DNA, 25 bp, Homo sapien
acgctgaagatctctctcatccaga

SEQ ID NO: 3001611 - DNA, 25 bp, Homo sapien
gatcttccgagctcacttgtggcag

SEQ ID NO: 3001612 - DNA, 25 bp, Homo sapien
gacgggtatcttcatgcacggcaag

SEQ ID NO: 3001613 - DNA, 25 bp, Homo sapien
ggtgcagctagacctgacgggtatc

SEQ ID NO: 3001614 - DNA, 25 bp, Homo sapien
ggcagaagatccatgagagcattgt

SEQ ID NO: 3001615 - DNA, 25 bp, Homo sapien
tcttgccgtgcatgaagatacccgt

SEQ ID NO: 3001616 - DNA, 25 bp, Homo sapien
caatgctctcatggatcttctgcca

SEQ ID NO: 3001617 - DNA, 25 bp, Homo sapien
tctggatgagagagatcttcagcgt

SEQ ID NO: 3001618 - DNA, 25 bp, Homo sapien
caagtgagctcggaagatctggatg

SEQ ID NO: 3001619 - DNA, 25 bp, Homo sapien
ttctgccacaagtgagctcggaaga

SEQ ID NO: 3001620 - DNA, 25 bp, Homo sapien
gatacccgtcaggtctagctgcacc

SEQ ID NO: 3001621 - DNA, 25 bp, Homo sapien
gctaaagacagttgctgcttcttgc

SEQ ID NO: 3001622 - DNA, 25 bp, Homo sapien
gaagctaaagacagttgctgcttct

SEQ ID NO: 3001623 - DNA, 25 bp, Homo sapien
ggaagctaaagacagttgctgcttc

SEQ ID NO: 3001624 - DNA, 25 bp, Homo sapien
taaagacagttgctgcttcttgcct

SEQ ID NO: 3001625 - DNA, 25 bp, Homo sapien
agctaaagacagttgctgcttcttg

SEQ ID NO: 3001626 - DNA, 25 bp, Homo sapien
ctaaagacagttgctgcttcttgcc

SEQ ID NO: 3001627 - DNA, 25 bp, Homo sapien
tcccctctccagtgtcaatcacact

SEQ ID NO: 3001628 - DNA, 25 bp, Homo sapien
aggcaagaagcagcaactgtcttta

SEQ ID NO: 3001629 - DNA, 25 bp, Homo sapien
caagaagcagcaactgtctttagct

SEQ ID NO: 3001630 - DNA, 25 bp, Homo sapien
gaagcagcaactgtctttagcttcc

SEQ ID NO: 3001631 - DNA, 25 bp, Homo sapien
gcaagaagcagcaactgtctttagc

SEQ ID NO: 3001632 - DNA, 25 bp, Homo sapien
ggcaagaagcagcaactgtctttag

SEQ ID NO: 3001633 - DNA, 25 bp, Homo sapien
aagctaactaatgctcagcgatcag

SEQ ID NO: 3001634 - DNA, 25 bp, Homo sapien
gtccccgaccattaatcgagccaat

SEQ ID NO: 3001635 - DNA, 25 bp, Homo sapien
gaaccagattcccaatcgtagattc

SEQ ID NO: 3001636 - DNA, 25 bp, Homo sapien
cagcgatcaggactgaaccagattc

SEQ ID NO: 3001637 - DNA, 25 bp, Homo sapien
tggtggtccccgaccattaatcgag

SEQ ID NO: 3001638 - DNA, 25 bp, Homo sapien
tcccaatcgtagattcaccctctgg

SEQ ID NO: 3001639 - DNA, 25 bp, Homo sapien
ccagagggtgaatctacgattggga

SEQ ID NO: 3001640 - DNA, 25 bp, Homo sapien
cctgatcgctgagcattagttagct

SEQ ID NO: 3001641 - DNA, 25 bp, Homo sapien
gaatctggttcagtcctgatcgctg

SEQ ID NO: 3001642 - DNA, 25 bp, Homo sapien
tcgattaatggtcggggaccaccag

SEQ ID NO: 3001643 - DNA, 25 bp, Homo sapien
gaatctacgattgggaatctggttc

SEQ ID NO: 3001644 - DNA, 25 bp, Homo sapien
gggaatctggttcagtcctgatcgc

SEQ ID NO: 3001645 - DNA, 25 bp, Homo sapien
cagaatccgttctggtggacacacc

SEQ ID NO: 3001646 - DNA, 25 bp, Homo sapien
cacaccagcggcatgatgggaagct

SEQ ID NO: 3001647 - DNA, 25 bp, Homo sapien
tggtggacacaccagcggcatgatg

SEQ ID NO: 3001648 - DNA, 25 bp, Homo sapien
tgaacaactaccgtacagacatgat

SEQ ID NO: 3001649 - DNA, 25 bp, Homo sapien
tggaacacacactctttaagggcac

SEQ ID NO: 3001650 - DNA, 25 bp, Homo sapien
gggaagctctggaacctgaacaact

SEQ ID NO: 3001651 - DNA, 25 bp, Homo sapien
ggtgtgtccaccagaacggattctg

SEQ ID NO: 3001652 - DNA, 25 bp, Homo sapien
gatcatgtctgtacggtagttgttc

SEQ ID NO: 3001653 - DNA, 25 bp, Homo sapien
gtgcccttaaagagtgtgtgttcca

SEQ ID NO: 3001654 - DNA, 25 bp, Homo sapien
catcatgccgctggtgtgtccacca

SEQ ID NO: 3001655 - DNA, 25 bp, Homo sapien
tagttgttcaggttccagagcttcc

SEQ ID NO: 3001656 - DNA, 25 bp, Homo sapien
agcttcccatcatgccgctggtgtg

SEQ ID NO: 3001657 - DNA, 25 bp, Homo sapien
gggatcgtggcattcctcgaatcaa

SEQ ID NO: 3001658 - DNA, 25 bp, Homo sapien
acgcctgactttagaagacctagaa

SEQ ID NO: 3001659 - DNA, 25 bp, Homo sapien
aaggaccggcacacactggcttatg

SEQ ID NO: 3001660 - DNA, 25 bp, Homo sapien
cctagaagattcatgggatcgtggc

SEQ ID NO: 3001661 - DNA, 25 bp, Homo sapien
ctcgaatcaataccctcttccagaa

SEQ ID NO: 3001662 - DNA, 25 bp, Homo sapien
cactggcttatgataagggctggcg

SEQ ID NO: 3001663 - DNA, 25 bp, Homo sapien
taagggctggcgtgtcagaactgac

SEQ ID NO: 3001664 - DNA, 25 bp, Homo sapien
ggctggcgtgtcagaactgacttta

SEQ ID NO: 3001665 - DNA, 25 bp, Homo sapien
agggctggcgtgtcagaactgactt

SEQ ID NO: 3001666 - DNA, 25 bp, Homo sapien
ggcgtgtcagaactgactttaagca

SEQ ID NO: 3001667 - DNA, 25 bp, Homo sapien
gctggcgtgtcagaactgactttaa

SEQ ID NO: 3001668 - DNA, 25 bp, Homo sapien
aagggctggcgtgtcagaactgact

SEQ ID NO: 3001669 - DNA, 25 bp, Homo sapien
taaagtcagttctgacacgccagcc

SEQ ID NO: 3001670 - DNA, 25 bp, Homo sapien
agtcagttctgacacgccagccctt

SEQ ID NO: 3001671 - DNA, 25 bp, Homo sapien
tgcttaaagtcagttctgacacgcc

SEQ ID NO: 3001672 - DNA, 25 bp, Homo sapien
gcttaaagtcagttctgacacgcca

SEQ ID NO: 3001673 - DNA, 25 bp, Homo sapien
ttaaagtcagttctgacacgccagc

SEQ ID NO: 3001674 - DNA, 25 bp, Homo sapien
tcagttctgacacgccagcccttat

SEQ ID NO: 3001675 - DNA, 25 bp, Homo sapien
cacgatcccatgaatcttctaggtc

SEQ ID NO: 3001676 - DNA, 25 bp, Homo sapien
ttctaggtcttctaaagtcaggcgt

SEQ ID NO: 3001677 - DNA, 25 bp, Homo sapien
ttctggaagagggtattgattcgag

SEQ ID NO: 3001678 - DNA, 25 bp, Homo sapien
tgattcgaggaatgccacgatccca

SEQ ID NO: 3001679 - DNA, 25 bp, Homo sapien
cagtgtgtgccggtccttctggaag

SEQ ID NO: 3001680 - DNA, 25 bp, Homo sapien
cttatcataagccagtgtgtgccgg

SEQ ID NO: 3001681 - DNA, 25 bp, Homo sapien
tcccaacttgtaccgctacatacag

SEQ ID NO: 3001682 - DNA, 25 bp, Homo sapien
cattcccaacttgtaccgctacata

SEQ ID NO: 3001683 - DNA, 25 bp, Homo sapien
cacactttcgttcaggaatgagcca

SEQ ID NO: 3001684 - DNA, 25 bp, Homo sapien
cacacactttcgttcaggaatgagc

SEQ ID NO: 3001685 - DNA, 25 bp, Homo sapien
tcacacactttcgttcaggaatgag

SEQ ID NO: 3001686 - DNA, 25 bp, Homo sapien
acactttcgttcaggaatgagccat

SEQ ID NO: 3001687 - DNA, 25 bp, Homo sapien
catgggagagcgagttcattgattc

SEQ ID NO: 3001688 - DNA, 25 bp, Homo sapien
tacagccatgggagagcgagttcat

SEQ ID NO: 3001689 - DNA, 25 bp, Homo sapien
tcattgattctcagcgggtctgggc

SEQ ID NO: 3001690 - DNA, 25 bp, Homo sapien
tgagtacgcactcaagaggcaagag

SEQ ID NO: 3001691 - DNA, 25 bp, Homo sapien
cgggtctgggctgagtacgcactca

SEQ ID NO: 3001692 - DNA, 25 bp, Homo sapien
taccgctacatacagccatgggaga

SEQ ID NO: 3001693 - DNA, 25 bp, Homo sapien
ctcttgcctcttgagtgcgtactca

SEQ ID NO: 3001694 - DNA, 25 bp, Homo sapien
aatgaactcgctctcccatggctgt

SEQ ID NO: 3001695 - DNA, 25 bp, Homo sapien
ttgagtgcgtactcagcccagaccc

SEQ ID NO: 3001696 - DNA, 25 bp, Homo sapien
gcccagacccgctgagaatcaatga

SEQ ID NO: 3001697 - DNA, 25 bp, Homo sapien
gacccgctgagaatcaatgaactcg

SEQ ID NO: 3001698 - DNA, 25 bp, Homo sapien
tctcccatggctgtatgtagcggta

SEQ ID NO: 3001699 - DNA, 25 bp, Homo sapien
atggctcattcctgaacgaaagtgt

SEQ ID NO: 3001700 - DNA, 25 bp, Homo sapien
gctcattcctgaacgaaagtgtgtg

SEQ ID NO: 3001701 - DNA, 25 bp, Homo sapien
tatgtagcggtacaagttgggaatg

SEQ ID NO: 3001702 - DNA, 25 bp, Homo sapien
tcattcctgaacgaaagtgtgtgat

SEQ ID NO: 3001703 - DNA, 25 bp, Homo sapien
tggctcattcctgaacgaaagtgtg

SEQ ID NO: 3001704 - DNA, 25 bp, Homo sapien
ctgtatgtagcggtacaagttggga

SEQ ID NO: 3001705 - DNA, 25 bp, Homo sapien
cattggccttatgacatactttcgg

SEQ ID NO: 3001706 - DNA, 25 bp, Homo sapien
gtggaatacagctctcattggcctt

SEQ ID NO: 3001707 - DNA, 25 bp, Homo sapien
gactcggcatgctctcaatgggcca

SEQ ID NO: 3001708 - DNA, 25 bp, Homo sapien
cagacacgtatcaagattggactca

SEQ ID NO: 3001709 - DNA, 25 bp, Homo sapien
agttgggtggactcggcatgctctc

SEQ ID NO: 3001710 - DNA, 25 bp, Homo sapien
tatgacatactttcgggaggctgtg

SEQ ID NO: 3001711 - DNA, 25 bp, Homo sapien
tgtgctcatcccccaatccgacctc

SEQ ID NO: 3001712 - DNA, 25 bp, Homo sapien
tgctcatcccccaatccgacctcag

SEQ ID NO: 3001713 - DNA, 25 bp, Homo sapien
atgtgctcatcccccaatccgacct

SEQ ID NO: 3001714 - DNA, 25 bp, Homo sapien
catgtgctcatcccccaatccgacc

SEQ ID NO: 3001715 - DNA, 25 bp, Homo sapien
gtgctcatcccccaatccgacctca

SEQ ID NO: 3001716 - DNA, 25 bp, Homo sapien
ctgaggtcggattgggggatgagca

SEQ ID NO: 3001717 - DNA, 25 bp, Homo sapien
tgaggtcggattgggggatgagcac

SEQ ID NO: 3001718 - DNA, 25 bp, Homo sapien
aaggccaatgagagctgtattccac

SEQ ID NO: 3001719 - DNA, 25 bp, Homo sapien
gcccattgagagcatgccgagtcca

SEQ ID NO: 3001720 - DNA, 25 bp, Homo sapien
cacagcctcccgaaagtatgtcata

SEQ ID NO: 3001721 - DNA, 25 bp, Homo sapien
tggagttgagtccaatcttgatacg

SEQ ID NO: 3001722 - DNA, 25 bp, Homo sapien
gaaagtatgtcataaggccaatgag

SEQ ID NO: 3001723 - DNA, 25 bp, Homo sapien
gagtccaatcttgatacgtgtctgg

SEQ ID NO: 3001724 - DNA, 25 bp, Homo sapien
tagatgattcactcttgcagctgtg

SEQ ID NO: 3001725 - DNA, 25 bp, Homo sapien
tggagggcatcgcacaccttaggaa

SEQ ID NO: 3001726 - DNA, 25 bp, Homo sapien
tgtatgtgggaatctgtgagagcac

SEQ ID NO: 3001727 - DNA, 25 bp, Homo sapien
cagaagtgtggcgatgtaactagct

SEQ ID NO: 3001728 - DNA, 25 bp, Homo sapien
ggtgctcagaatgttgggactcaga

SEQ ID NO: 3001729 - DNA, 25 bp, Homo sapien
gagggagagcattcctttagccaga

SEQ ID NO: 3001730 - DNA, 25 bp, Homo sapien
tctgagtcccaacattctgagcacc

SEQ ID NO: 3001731 - DNA, 25 bp, Homo sapien
tctggctaaaggaatgctctccctc

SEQ ID NO: 3001732 - DNA, 25 bp, Homo sapien
ttcctaaggtgtgcgatgccctcca

SEQ ID NO: 3001733 - DNA, 25 bp, Homo sapien
tataatccagcattagagaggctaa

SEQ ID NO: 3001734 - DNA, 25 bp, Homo sapien
cacagctgcaagagtgaatcatcta

SEQ ID NO: 3001735 - DNA, 25 bp, Homo sapien
tacacaagctagttacatcgccaca

SEQ ID NO: 3001736 - DNA, 25 bp, Homo sapien
tactaaggagcgcacagctcagtgt

SEQ ID NO: 3001737 - DNA, 25 bp, Homo sapien
caaccgcgtgcgtcagattctcatg

SEQ ID NO: 3001738 - DNA, 25 bp, Homo sapien
aatgcagcgcttccacaaccgcgtg

SEQ ID NO: 3001739 - DNA, 25 bp, Homo sapien
cagctcagtgtttcctgcgtgtgga

SEQ ID NO: 3001740 - DNA, 25 bp, Homo sapien
gacgatgagtcaatgcagcgcttcc

SEQ ID NO: 3001741 - DNA, 25 bp, Homo sapien
tcagattctcatggcctctgggtcc

SEQ ID NO: 3001742 - DNA, 25 bp, Homo sapien
tccacacgcaggaaacactgagctg

SEQ ID NO: 3001743 - DNA, 25 bp, Homo sapien
catgagaatctgacgcacgcggttg

SEQ ID NO: 3001744 - DNA, 25 bp, Homo sapien
ggacccagaggccatgagaatctga

SEQ ID NO: 3001745 - DNA, 25 bp, Homo sapien
gaagcgctgcattgactcatcgtcc

SEQ ID NO: 3001746 - DNA, 25 bp, Homo sapien
cacgcggttgtggaagcgctgcatt

SEQ ID NO: 3001747 - DNA, 25 bp, Homo sapien
acactgagctgtgcgctccttagta

SEQ ID NO: 3001748 - DNA, 25 bp, Homo sapien
gcaccagctatgaggagttcaccca

SEQ ID NO: 3001749 - DNA, 25 bp, Homo sapien
agtgccgcatcctgcctaagtgccg

SEQ ID NO: 3001750 - DNA, 25 bp, Homo sapien
caacatgtgtggcttcgagtgccgc

SEQ ID NO: 3001751 - DNA, 25 bp, Homo sapien
gccgggcggtattctgggacatcaa

SEQ ID NO: 3001752 - DNA, 25 bp, Homo sapien
tgtgtacagtaaggacaaccccaac

SEQ ID NO: 3001753 - DNA, 25 bp, Homo sapien
ggacatcaagaaccgcttgccacgg

SEQ ID NO: 3001754 - DNA, 25 bp, Homo sapien
tgtagtcactgaccgtggcaagcgg

SEQ ID NO: 3001755 - DNA, 25 bp, Homo sapien
tgcggcactcgaagccacacatgtt

SEQ ID NO: 3001756 - DNA, 25 bp, Homo sapien
ggtgaactcctcatagctggtgcgg

SEQ ID NO: 3001757 - DNA, 25 bp, Homo sapien
ggcacttaggcaggatgcggcactc

SEQ ID NO: 3001758 - DNA, 25 bp, Homo sapien
ttgatgtcccagaataccgcccggc

SEQ ID NO: 3001759 - DNA, 25 bp, Homo sapien
tggcaagcggttcttgatgtcccag

SEQ ID NO: 3001760 - DNA, 25 bp, Homo sapien
ggacataagctaagggcccagagag

SEQ ID NO: 3001761 - DNA, 25 bp, Homo sapien
tggctgtgtcaggatgtcatcagtt

SEQ ID NO: 3001762 - DNA, 25 bp, Homo sapien
cgtcctgggtgggagaggcgtggct

SEQ ID NO: 3001763 - DNA, 25 bp, Homo sapien
tgtgagctggaaggacataagctaa

SEQ ID NO: 3001764 - DNA, 25 bp, Homo sapien
ctggaaggacataagctaagggccc

SEQ ID NO: 3001765 - DNA, 25 bp, Homo sapien
tcatcagttggcctttgaagggaag

SEQ ID NO: 3001766 - DNA, 25 bp, Homo sapien
aactgatgacatcctgacacagcca

SEQ ID NO: 3001767 - DNA, 25 bp, Homo sapien
cttcccttcaaaggccaactgatga

SEQ ID NO: 3001768 - DNA, 25 bp, Homo sapien
tctctgggcccttagcttatgtcct

SEQ ID NO: 3001769 - DNA, 25 bp, Homo sapien
gggcccttagcttatgtccttccag

SEQ ID NO: 3001770 - DNA, 25 bp, Homo sapien
ttagcttatgtccttccagctcaca

SEQ ID NO: 3001771 - DNA, 25 bp, Homo sapien
cccttcaaaggccaactgatgacat

SEQ ID NO: 3001772 - DNA, 25 bp, Homo sapien
gaccccaataatgaaaacatcgttg

SEQ ID NO: 3001773 - DNA, 25 bp, Homo sapien
gttcacagcagatgaggctcgggac

SEQ ID NO: 3001774 - DNA, 25 bp, Homo sapien
ggctcgggacctgattcaacgttac

SEQ ID NO: 3001775 - DNA, 25 bp, Homo sapien
taataacaagaagtgctggccccga

SEQ ID NO: 3001776 - DNA, 25 bp, Homo sapien
tcaacgttacctgacagagcaccct

SEQ ID NO: 3001777 - DNA, 25 bp, Homo sapien
agatgcccgcatgcgcctcatgaaa

SEQ ID NO: 3001778 - DNA, 25 bp, Homo sapien
gggtgctctgtcaggtaacgttgaa

SEQ ID NO: 3001779 - DNA, 25 bp, Homo sapien
gttattatagccaacgatgttttca

SEQ ID NO: 3001780 - DNA, 25 bp, Homo sapien
gtcccgagcctcatctgctgtgaac

SEQ ID NO: 3001781 - DNA, 25 bp, Homo sapien
ttcatgaggcgcatgcgggcatctc

SEQ ID NO: 3001782 - DNA, 25 bp, Homo sapien
gggccagcacttcttgttattatag

SEQ ID NO: 3001783 - DNA, 25 bp, Homo sapien
taacgttgaatcaggtcccgagcct

SEQ ID NO: 3001784 - DNA, 25 bp, Homo sapien
gcttgtattgggattgcaccgggcc

SEQ ID NO: 3001785 - DNA, 25 bp, Homo sapien
cattcatcgtgcagtattatggcct

SEQ ID NO: 3001786 - DNA, 25 bp, Homo sapien
ccaggacatagccactgaggctgcc

SEQ ID NO: 3001787 - DNA, 25 bp, Homo sapien
tgcagatacattgatcgcatccata

SEQ ID NO: 3001788 - DNA, 25 bp, Homo sapien
ccatacgaattcatatgggatcatc

SEQ ID NO: 3001789 - DNA, 25 bp, Homo sapien
attgcaccgggccagtgagatggct

SEQ ID NO: 3001790 - DNA, 25 bp, Homo sapien
ggcagcctcagtggctatgtcctgg

SEQ ID NO: 3001791 - DNA, 25 bp, Homo sapien
cataatactgcacgatgaatgaggc

SEQ ID NO: 3001792 - DNA, 25 bp, Homo sapien
gatgatcccatatgaattcgtatgg

SEQ ID NO: 3001793 - DNA, 25 bp, Homo sapien
aatgtatctgcagaagagacggatg

SEQ ID NO: 3001794 - DNA, 25 bp, Homo sapien
tggcccggtgcaatcccaatacaag

SEQ ID NO: 3001795 - DNA, 25 bp, Homo sapien
tatggatgcgatcaatgtatctgca

SEQ ID NO: 3001796 - DNA, 25 bp, Homo sapien
acgagtgaaggcgagtgcaatgtca

SEQ ID NO: 3001797 - DNA, 25 bp, Homo sapien
agtgaaggcgagtgcaatgtcatgc

SEQ ID NO: 3001798 - DNA, 25 bp, Homo sapien
ggcgagtgcaatgtcatgctggaat

SEQ ID NO: 3001799 - DNA, 25 bp, Homo sapien
tgaaggcgagtgcaatgtcatgctg

SEQ ID NO: 3001800 - DNA, 25 bp, Homo sapien
agtgcaatgtcatgctggaatcccg

SEQ ID NO: 3001801 - DNA, 25 bp, Homo sapien
gcaatgtcatgctggaatcccgctt

SEQ ID NO: 3001802 - DNA, 25 bp, Homo sapien
tcgtggaccacaacatagccgacta

SEQ ID NO: 3001803 - DNA, 25 bp, Homo sapien
gctggaatcccgctttgagaagatg

SEQ ID NO: 3001804 - DNA, 25 bp, Homo sapien
gaacaacgtcgtcatcaactataag

SEQ ID NO: 3001805 - DNA, 25 bp, Homo sapien
tgactctgctcaacaggctgctgcg

SEQ ID NO: 3001806 - DNA, 25 bp, Homo sapien
gagaagatcgacttgactctgctca

SEQ ID NO: 3001807 - DNA, 25 bp, Homo sapien
catgacagccaagaacaacgtcgtc

SEQ ID NO: 3001808 - DNA, 25 bp, Homo sapien
tgagcagagtcaagtcgatcttctc

SEQ ID NO: 3001809 - DNA, 25 bp, Homo sapien
cttatagttgatgacgacgttgttc

SEQ ID NO: 3001810 - DNA, 25 bp, Homo sapien
gacgacgttgttcttggctgtcatg

SEQ ID NO: 3001811 - DNA, 25 bp, Homo sapien
cgcagcagcctgttgagcagagtca

SEQ ID NO: 3001812 - DNA, 25 bp, Homo sapien
tgtagtcggctatgttgtggtccac

SEQ ID NO: 3001813 - DNA, 25 bp, Homo sapien
catcttctcaaagcgggattccagc

SEQ ID NO: 3001814 - DNA, 25 bp, Homo sapien
aagcgggattccagcatgacattgc

SEQ ID NO: 3001815 - DNA, 25 bp, Homo sapien
cagcatgacattgcactcgccttca

SEQ ID NO: 3001816 - DNA, 25 bp, Homo sapien
gattccagcatgacattgcactcgc

SEQ ID NO: 3001817 - DNA, 25 bp, Homo sapien
gcgggattccagcatgacattgcac

SEQ ID NO: 3001818 - DNA, 25 bp, Homo sapien
tgacattgcactcgccttcactcgt

SEQ ID NO: 3001819 - DNA, 25 bp, Homo sapien
gcatgacattgcactcgccttcact

SEQ ID NO: 3001820 - DNA, 25 bp, Homo sapien
tgttcccaccctggattaagcctgc

SEQ ID NO: 3001821 - DNA, 25 bp, Homo sapien
gcccctggagaagataactgatgct

SEQ ID NO: 3001822 - DNA, 25 bp, Homo sapien
ctgtggtatgaagccgacaagcgcc

SEQ ID NO: 3001823 - DNA, 25 bp, Homo sapien
gataactgatgcttacctggaccag

SEQ ID NO: 3001824 - DNA, 25 bp, Homo sapien
cgttccagtatatgatgttgagccc

SEQ ID NO: 3001825 - DNA, 25 bp, Homo sapien
gatctgtatagccacctcgttccag

SEQ ID NO: 3001826 - DNA, 25 bp, Homo sapien
cttgtaaacaagcagcggaggtggt

SEQ ID NO: 3001827 - DNA, 25 bp, Homo sapien
taagcatcagttatcttctccaggg

SEQ ID NO: 3001828 - DNA, 25 bp, Homo sapien
ggcgcttgtcggcttcataccacag

SEQ ID NO: 3001829 - DNA, 25 bp, Homo sapien
tctgcaggcttaatccagggtggga

SEQ ID NO: 3001830 - DNA, 25 bp, Homo sapien
tatacagatccatgaactcaatgcc

SEQ ID NO: 3001831 - DNA, 25 bp, Homo sapien
catcatatactggaacgaggtggct

SEQ ID NO: 3001832 - DNA, 25 bp, Homo sapien
taggtctgatcgagcaggcctacga

SEQ ID NO: 3001833 - DNA, 25 bp, Homo sapien
gatcgagcaggcctacgataacccc

SEQ ID NO: 3001834 - DNA, 25 bp, Homo sapien
tgtgaagtctcggttgaaccagtct

SEQ ID NO: 3001835 - DNA, 25 bp, Homo sapien
acgaggcgctgtcccgcatcaagcg

SEQ ID NO: 3001836 - DNA, 25 bp, Homo sapien
ctcggttgaaccagtctcagaggga

SEQ ID NO: 3001837 - DNA, 25 bp, Homo sapien
gagctaggtctgatcgagcaggcct

SEQ ID NO: 3001838 - DNA, 25 bp, Homo sapien
tcctcacacagagagccttcaaaga

SEQ ID NO: 3001839 - DNA, 25 bp, Homo sapien
cctcacacagagagccttcaaagag

SEQ ID NO: 3001840 - DNA, 25 bp, Homo sapien
ctctttgaaggctctctgtgtgagg

SEQ ID NO: 3001841 - DNA, 25 bp, Homo sapien
tctttgaaggctctctgtgtgagga

SEQ ID NO: 3001842 - DNA, 25 bp, Homo sapien
gagactggttcaaccgagacttcac

SEQ ID NO: 3001843 - DNA, 25 bp, Homo sapien
taggcctgctcgatcagacctagct

SEQ ID NO: 3001844 - DNA, 25 bp, Homo sapien
tccctctgagactggttcaaccgag

SEQ ID NO: 3001845 - DNA, 25 bp, Homo sapien
cgcttgatgcgggacagcgcctcgt

SEQ ID NO: 3001846 - DNA, 25 bp, Homo sapien
gaggtgacgcttgatgcgggacagc

SEQ ID NO: 3001847 - DNA, 25 bp, Homo sapien
gttatcgtaggcctgctcgatcaga

SEQ ID NO: 3001848 - DNA, 25 bp, Homo sapien
tcatcttggcattggagcggctcaa

SEQ ID NO: 3001849 - DNA, 25 bp, Homo sapien
cattggttggaaagccgcaggtttt

SEQ ID NO: 3001850 - DNA, 25 bp, Homo sapien
cattggagcggctcaaggaagctta

SEQ ID NO: 3001851 - DNA, 25 bp, Homo sapien
tggcagtatataccaccacagtgca

SEQ ID NO: 3001852 - DNA, 25 bp, Homo sapien
cacagtgcattggttggaaagccgc

SEQ ID NO: 3001853 - DNA, 25 bp, Homo sapien
cgggccttacatcacagcggaggaa

SEQ ID NO: 3001854 - DNA, 25 bp, Homo sapien
tgagccgctccaatgccaagatgag

SEQ ID NO: 3001855 - DNA, 25 bp, Homo sapien
taagcttccttgagccgctccaatg

SEQ ID NO: 3001856 - DNA, 25 bp, Homo sapien
aaaacctgcggctttccaaccaatg

SEQ ID NO: 3001857 - DNA, 25 bp, Homo sapien
tcctccgctgtgatgtaaggcccgt

SEQ ID NO: 3001858 - DNA, 25 bp, Homo sapien
gcggctttccaaccaatgcactgtg

SEQ ID NO: 3001859 - DNA, 25 bp, Homo sapien
tgcactgtggtggtatatactgcca

SEQ ID NO: 3001860 - DNA, 25 bp, Homo sapien
gatccttcgatacgtgaaggccaag

SEQ ID NO: 3001861 - DNA, 25 bp, Homo sapien
ggctgactggtggaccaacactgcc

SEQ ID NO: 3001862 - DNA, 25 bp, Homo sapien
ctcacccggctctatctgaaggcag

SEQ ID NO: 3001863 - DNA, 25 bp, Homo sapien
ctgcccactacaaccgagaacggat

SEQ ID NO: 3001864 - DNA, 25 bp, Homo sapien
aggagcggcagcacaactacctgaa

SEQ ID NO: 3001865 - DNA, 25 bp, Homo sapien
gctgccgacgcccatagagaatatg

SEQ ID NO: 3001866 - DNA, 25 bp, Homo sapien
ctgccttcagatagagccgggtgag

SEQ ID NO: 3001867 - DNA, 25 bp, Homo sapien
ggtagttgtgctgccgctcctgttc

SEQ ID NO: 3001868 - DNA, 25 bp, Homo sapien
gcagtgttggtccaccagtcagcct

SEQ ID NO: 3001869 - DNA, 25 bp, Homo sapien
gatccgttctcggttgtagtgggca

SEQ ID NO: 3001870 - DNA, 25 bp, Homo sapien
gccttggccttcacgtatcgaagga

SEQ ID NO: 3001871 - DNA, 25 bp, Homo sapien
catattctctatgggcgtcggcagc

SEQ ID NO: 3001872 - DNA, 25 bp, Homo sapien
tctggacatgatgcctgaggggatc

SEQ ID NO: 3001873 - DNA, 25 bp, Homo sapien
gctgtgatgcatgatattctggaca

SEQ ID NO: 3001874 - DNA, 25 bp, Homo sapien
cactcaaagggggtggcaaagacag

SEQ ID NO: 3001875 - DNA, 25 bp, Homo sapien
tggagtcacattttgaccttgagct

SEQ ID NO: 3001876 - DNA, 25 bp, Homo sapien
gaacaaggcccggacaatcctgcag

SEQ ID NO: 3001877 - DNA, 25 bp, Homo sapien
cgggcagctgtgatgcatgatattc

SEQ ID NO: 3001878 - DNA, 25 bp, Homo sapien
ctggcgctgctggaaagccaacatt

SEQ ID NO: 3001879 - DNA, 25 bp, Homo sapien
aatgttggctttccagcagcgccag

SEQ ID NO: 3001880 - DNA, 25 bp, Homo sapien
tgtccagaatatcatgcatcacagc

SEQ ID NO: 3001881 - DNA, 25 bp, Homo sapien
gctgcaggattgtccgggccttgtt

SEQ ID NO: 3001882 - DNA, 25 bp, Homo sapien
tttgccaccccctttgagtgtcgac

SEQ ID NO: 3001883 - DNA, 25 bp, Homo sapien
gatcccctcaggcatcatgtccaga

SEQ ID NO: 3001884 - DNA, 25 bp, Homo sapien
gaatatcatgcatcacagctgcccg

SEQ ID NO: 3001885 - DNA, 25 bp, Homo sapien
agctcaaggtcaaaatgtgactcca

SEQ ID NO: 3001886 - DNA, 25 bp, Homo sapien
tctttttcatgcgtggcattacccc

SEQ ID NO: 3001887 - DNA, 25 bp, Homo sapien
tgggctgccggttggcgagtctggc

SEQ ID NO: 3001888 - DNA, 25 bp, Homo sapien
tggctctttttcatgcgtggcatta

SEQ ID NO: 3001889 - DNA, 25 bp, Homo sapien
gtctggctctttttcatgcgtggca

SEQ ID NO: 3001890 - DNA, 25 bp, Homo sapien
tttttcatgcgtggcattacccctt

SEQ ID NO: 3001891 - DNA, 25 bp, Homo sapien
ggcgagtctggctctttttcatgcg

SEQ ID NO: 3001892 - DNA, 25 bp, Homo sapien
gagcgatggcttggcaacctcctgg

SEQ ID NO: 3001893 - DNA, 25 bp, Homo sapien
tggcattacccctttattagagcga

SEQ ID NO: 3001894 - DNA, 25 bp, Homo sapien
ttagagcgatggcttggcaacctcc

SEQ ID NO: 3001895 - DNA, 25 bp, Homo sapien
attacccctttattagagcgatggc

SEQ ID NO: 3001896 - DNA, 25 bp, Homo sapien
ccctttattagagcgatggcttggc

SEQ ID NO: 3001897 - DNA, 25 bp, Homo sapien
ttattagagcgatggcttggcaacc

SEQ ID NO: 3001898 - DNA, 25 bp, Homo sapien
ggaggttgccaagccatcgctctaa

SEQ ID NO: 3001899 - DNA, 25 bp, Homo sapien
ttgccaagccatcgctctaataaag

SEQ ID NO: 3001900 - DNA, 25 bp, Homo sapien
ccaggaggttgccaagccatcgctc

SEQ ID NO: 3001901 - DNA, 25 bp, Homo sapien
aggaggttgccaagccatcgctcta

SEQ ID NO: 3001902 - DNA, 25 bp, Homo sapien
ggttgccaagccatcgctctaataa

SEQ ID NO: 3001903 - DNA, 25 bp, Homo sapien
gccaagccatcgctctaataaaggg

SEQ ID NO: 3001904 - DNA, 25 bp, Homo sapien
taatgccacgcatgaaaaagagcca

SEQ ID NO: 3001905 - DNA, 25 bp, Homo sapien
tgccacgcatgaaaaagagccagac

SEQ ID NO: 3001906 - DNA, 25 bp, Homo sapien
cacgcatgaaaaagagccagactcg

SEQ ID NO: 3001907 - DNA, 25 bp, Homo sapien
aatgccacgcatgaaaaagagccag

SEQ ID NO: 3001908 - DNA, 25 bp, Homo sapien
gcatgaaaaagagccagactcgcca

SEQ ID NO: 3001909 - DNA, 25 bp, Homo sapien
ggtaatgccacgcatgaaaaagagc

SEQ ID NO: 3001910 - DNA, 25 bp, Homo sapien
cgacagattcgcatgtgcaaggacc

SEQ ID NO: 3001911 - DNA, 25 bp, Homo sapien
cgatacaaatacaagctgatgcgac

SEQ ID NO: 3001912 - DNA, 25 bp, Homo sapien
gacgggcatgtatcgatacaaatac

SEQ ID NO: 3001913 - DNA, 25 bp, Homo sapien
gacctgaagcatctcatctattatc

SEQ ID NO: 3001914 - DNA, 25 bp, Homo sapien
tctcatctattatcgtttcaacacg

SEQ ID NO: 3001915 - DNA, 25 bp, Homo sapien
aatacaagctgatgcgacagattcg

SEQ ID NO: 3001916 - DNA, 25 bp, Homo sapien
gataatagatgagatgcttcaggtc

SEQ ID NO: 3001917 - DNA, 25 bp, Homo sapien
gtcgcatcagcttgtatttgtatcg

SEQ ID NO: 3001918 - DNA, 25 bp, Homo sapien
cgtgttgaaacgataatagatgaga

SEQ ID NO: 3001919 - DNA, 25 bp, Homo sapien
ggtccttgcacatgcgaatctgtcg

SEQ ID NO: 3001920 - DNA, 25 bp, Homo sapien
tatttgtatcgatacatgcccgtca

SEQ ID NO: 3001921 - DNA, 25 bp, Homo sapien
gcgaatctgtcgcatcagcttgtat

SEQ ID NO: 3001922 - DNA, 25 bp, Homo sapien
gggaatgctttccacctgtgtcggg

SEQ ID NO: 3001923 - DNA, 25 bp, Homo sapien
tcgggaagttctgcgtttgactaag

SEQ ID NO: 3001924 - DNA, 25 bp, Homo sapien
gaagttctgcgtttgactaagctgg

SEQ ID NO: 3001925 - DNA, 25 bp, Homo sapien
tgtgtcgggaagttctgcgtttgac

SEQ ID NO: 3001926 - DNA, 25 bp, Homo sapien
ggaatgctttccacctgtgtcggga

SEQ ID NO: 3001927 - DNA, 25 bp, Homo sapien
actaagctggtggtggatagtcacg

SEQ ID NO: 3001928 - DNA, 25 bp, Homo sapien
gctgggcaatgtggatgccttccag

SEQ ID NO: 3001929 - DNA, 25 bp, Homo sapien
tagtcacgtgcagtatcggctgggc

SEQ ID NO: 3001930 - DNA, 25 bp, Homo sapien
tcggctgggcaatgtggatgccttc

SEQ ID NO: 3001931 - DNA, 25 bp, Homo sapien
tatcggctgggcaatgtggatgcct

SEQ ID NO: 3001932 - DNA, 25 bp, Homo sapien
atagtcacgtgcagtatcggctggg

SEQ ID NO: 3001933 - DNA, 25 bp, Homo sapien
ggctgggcaatgtggatgccttcca

SEQ ID NO: 3001934 - DNA, 25 bp, Homo sapien
aaggcatccacattgcccagccgat

SEQ ID NO: 3001935 - DNA, 25 bp, Homo sapien
gcccagccgatactgcacgtgacta

SEQ ID NO: 3001936 - DNA, 25 bp, Homo sapien
aggcatccacattgcccagccgata

SEQ ID NO: 3001937 - DNA, 25 bp, Homo sapien
tggaaggcatccacattgcccagcc

SEQ ID NO: 3001938 - DNA, 25 bp, Homo sapien
cccagccgatactgcacgtgactat

SEQ ID NO: 3001939 - DNA, 25 bp, Homo sapien
ctggaaggcatccacattgcccagc

SEQ ID NO: 3001940 - DNA, 25 bp, Homo sapien
cttagtcaaacgcagaacttcccga

SEQ ID NO: 3001941 - DNA, 25 bp, Homo sapien
tcccgacacaggtggaaagcattcc

SEQ ID NO: 3001942 - DNA, 25 bp, Homo sapien
accagcttagtcaaacgcagaactt

SEQ ID NO: 3001943 - DNA, 25 bp, Homo sapien
cccgacacaggtggaaagcattccc

SEQ ID NO: 3001944 - DNA, 25 bp, Homo sapien
acgtgactatccaccaccagcttag

SEQ ID NO: 3001945 - DNA, 25 bp, Homo sapien
gtcaaacgcagaacttcccgacaca

SEQ ID NO: 3001946 - DNA, 25 bp, Homo sapien
tatttgttccgctccttcaaagcca

SEQ ID NO: 3001947 - DNA, 25 bp, Homo sapien
ggtttgccgccagggctacaacatg

SEQ ID NO: 3001948 - DNA, 25 bp, Homo sapien
caacttcaacctcaagcctgtgaaa

SEQ ID NO: 3001949 - DNA, 25 bp, Homo sapien
agtccacaaagctggactgggtgga

SEQ ID NO: 3001950 - DNA, 25 bp, Homo sapien
tcaaccttctcattcaccgcaaaaa

SEQ ID NO: 3001951 - DNA, 25 bp, Homo sapien
tcaagcctgtgaaaacgctcaccac

SEQ ID NO: 3001952 - DNA, 25 bp, Homo sapien
tggtgagcgttttcacaggcttgag

SEQ ID NO: 3001953 - DNA, 25 bp, Homo sapien
tttttgcggtgaatgagaaggttga

SEQ ID NO: 3001954 - DNA, 25 bp, Homo sapien
tccacccagtccagctttgtggact

SEQ ID NO: 3001955 - DNA, 25 bp, Homo sapien
ttgagcatgttgtagccctggcggc

SEQ ID NO: 3001956 - DNA, 25 bp, Homo sapien
tgttgtagccctggcggcaaacctg

SEQ ID NO: 3001957 - DNA, 25 bp, Homo sapien
ggctttgaaggagcggaacaaatac

SEQ ID NO: 3001958 - DNA, 25 bp, Homo sapien
atgccctgaagcatcggccccctaa

SEQ ID NO: 3001959 - DNA, 25 bp, Homo sapien
catcggccccctaaggctcaaaaga

SEQ ID NO: 3001960 - DNA, 25 bp, Homo sapien
aatgccctgaagcatcggcccccta

SEQ ID NO: 3001961 - DNA, 25 bp, Homo sapien
gaatgccctgaagcatcggccccct

SEQ ID NO: 3001962 - DNA, 25 bp, Homo sapien
agcatcggccccctaaggctcaaaa

SEQ ID NO: 3001963 - DNA, 25 bp, Homo sapien
gcatcggccccctaaggctcaaaag

SEQ ID NO: 3001964 - DNA, 25 bp, Homo sapien
cttttgagccttagggggccgatgc

SEQ ID NO: 3001965 - DNA, 25 bp, Homo sapien
tagggggccgatgcttcagggcatt

SEQ ID NO: 3001966 - DNA, 25 bp, Homo sapien
ccttagggggccgatgcttcagggc

SEQ ID NO: 3001967 - DNA, 25 bp, Homo sapien
tcttttgagccttagggggccgatg

SEQ ID NO: 3001968 - DNA, 25 bp, Homo sapien
ttttgagccttagggggccgatgct

SEQ ID NO: 3001969 - DNA, 25 bp, Homo sapien
cttagggggccgatgcttcagggca

SEQ ID NO: 3001970 - DNA, 25 bp, Homo sapien
cagcctgtgaaagtgagggtctcct

SEQ ID NO: 3001971 - DNA, 25 bp, Homo sapien
tatcgggagcattgtcctgccgggc

SEQ ID NO: 3001972 - DNA, 25 bp, Homo sapien
catcggccccctaaggctcaaaaga

SEQ ID NO: 3001973 - DNA, 25 bp, Homo sapien
taagtactatgtgctgaatgccctg

SEQ ID NO: 3001974 - DNA, 25 bp, Homo sapien
gagggtctcctaccagaagctgctt

SEQ ID NO: 3001975 - DNA, 25 bp, Homo sapien
tgctgaatgccctgaagcatcggcc

SEQ ID NO: 3001976 - DNA, 25 bp, Homo sapien
taagcagcttctggtaggagaccct

SEQ ID NO: 3001977 - DNA, 25 bp, Homo sapien
tcagggcattcagcacatagtactt

SEQ ID NO: 3001978 - DNA, 25 bp, Homo sapien
taggagaccctcactttcacaggct

SEQ ID NO: 3001979 - DNA, 25 bp, Homo sapien
cacatagtacttaagcagcttctgg

SEQ ID NO: 3001980 - DNA, 25 bp, Homo sapien
ggccgatgcttcagggcattcagca

SEQ ID NO: 3001981 - DNA, 25 bp, Homo sapien
aggctgcccggcaggacaatgctcc

SEQ ID NO: 3001982 - DNA, 25 bp, Homo sapien
ggccctggacataccccttgtcaag

SEQ ID NO: 3001983 - DNA, 25 bp, Homo sapien
tggacataccccttgtcaagaactg

SEQ ID NO: 3001984 - DNA, 25 bp, Homo sapien
ggacacacccctctatacagacaat

SEQ ID NO: 3001985 - DNA, 25 bp, Homo sapien
tacagacaatacagccaatggcatt

SEQ ID NO: 3001986 - DNA, 25 bp, Homo sapien
tttgagctcccggagtttgtggagc

SEQ ID NO: 3001987 - DNA, 25 bp, Homo sapien
gatgaggaatttgagctcccggagt

SEQ ID NO: 3001988 - DNA, 25 bp, Homo sapien
gacgggtgcgaccagagcgtaggtt

SEQ ID NO: 3001989 - DNA, 25 bp, Homo sapien
ctcatcatcatccggcaatggttcc

SEQ ID NO: 3001990 - DNA, 25 bp, Homo sapien
aaactccgggagctcaaattcctca

SEQ ID NO: 3001991 - DNA, 25 bp, Homo sapien
aatgccattggctgtattgtctgta

SEQ ID NO: 3001992 - DNA, 25 bp, Homo sapien
gctccacaaactccgggagctcaaa

SEQ ID NO: 3001993 - DNA, 25 bp, Homo sapien
ccagagcgtaggttgaagggccgcg

SEQ ID NO: 3001994 - DNA, 25 bp, Homo sapien
ccattgggaggctttctggtggtca

SEQ ID NO: 3001995 - DNA, 25 bp, Homo sapien
tgttccgttgtgtccaagcccagtg

SEQ ID NO: 3001996 - DNA, 25 bp, Homo sapien
tgattgcaatgttgacctcctgtga

SEQ ID NO: 3001997 - DNA, 25 bp, Homo sapien
tgagaagtgacgcttgctttcctgg

SEQ ID NO: 3001998 - DNA, 25 bp, Homo sapien
gatacaggctttgtgcttggcccca

SEQ ID NO: 3001999 - DNA, 25 bp, Homo sapien
cagtgactggcttcttaagcttacc

SEQ ID NO: 3002000 - DNA, 25 bp, Homo sapien
gagccccaacatcacaggaggtcaa

SEQ ID NO: 3002001 - DNA, 25 bp, Homo sapien
cacaacggaacacagatgagcatca

SEQ ID NO: 3002002 - DNA, 25 bp, Homo sapien
ggtaagcttaagaagccagtcactg

SEQ ID NO: 3002003 - DNA, 25 bp, Homo sapien
gaactaggcacagacttaagatgag

SEQ ID NO: 3002004 - DNA, 25 bp, Homo sapien
ccaggaaagcaagcgtcacttctca

SEQ ID NO: 3002005 - DNA, 25 bp, Homo sapien
aacactgggcttggacacaacggaa

SEQ ID NO: 3002006 - DNA, 25 bp, Homo sapien
tccgtcttgctaagtgttccccttg

SEQ ID NO: 3002007 - DNA, 25 bp, Homo sapien
tgaggttggctgatgttactaaacg

SEQ ID NO: 3002008 - DNA, 25 bp, Homo sapien
tgttactaaacgctcaggtggaggg

SEQ ID NO: 3002009 - DNA, 25 bp, Homo sapien
gagctataagcgaatatgagaattc

SEQ ID NO: 3002010 - DNA, 25 bp, Homo sapien
agtgttccccttgagctataagcga

SEQ ID NO: 3002011 - DNA, 25 bp, Homo sapien
gagggagatgtgttttccgtcttgc

SEQ ID NO: 3002012 - DNA, 25 bp, Homo sapien
tgtgattatccttttggactttacg

SEQ ID NO: 3002013 - DNA, 25 bp, Homo sapien
cgtaaagtccaaaaggataatcaca

SEQ ID NO: 3002014 - DNA, 25 bp, Homo sapien
aattctcatattcgcttatagctca

SEQ ID NO: 3002015 - DNA, 25 bp, Homo sapien
tagcaagacggaaaacacatctccc

SEQ ID NO: 3002016 - DNA, 25 bp, Homo sapien
cagaaaacaggattataccaatgac

SEQ ID NO: 3002017 - DNA, 25 bp, Homo sapien
cgtttagtaacatcagccaacctca

SEQ ID NO: 3002018 - DNA, 25 bp, Homo sapien
ggaacacttagcaagacggaaaaca

SEQ ID NO: 3002019 - DNA, 25 bp, Homo sapien
ccctccacctgagcgtttagtaaca

SEQ ID NO: 3002020 - DNA, 25 bp, Homo sapien
tactcccaatgttgtattcatcaaa

SEQ ID NO: 3002021 - DNA, 25 bp, Homo sapien
tactttgaccctttgatcaacccaa

SEQ ID NO: 3002022 - DNA, 25 bp, Homo sapien
actgaggatcctgacttgccagctt

SEQ ID NO: 3002023 - DNA, 25 bp, Homo sapien
tgatcaacccaatctcccataggca

SEQ ID NO: 3002024 - DNA, 25 bp, Homo sapien
ccagctttctactttgaccctttga

SEQ ID NO: 3002025 - DNA, 25 bp, Homo sapien
gaggatcctgacttgccagctttct

SEQ ID NO: 3002026 - DNA, 25 bp, Homo sapien
tttgatgaatacaacattgggagta

SEQ ID NO: 3002027 - DNA, 25 bp, Homo sapien
gggttgatcaaagggtcaaagtaga

SEQ ID NO: 3002028 - DNA, 25 bp, Homo sapien
gaaagctggcaagtcaggatcctca

SEQ ID NO: 3002029 - DNA, 25 bp, Homo sapien
tcaaagggtcaaagtagaaagctgg

SEQ ID NO: 3002030 - DNA, 25 bp, Homo sapien
gaatacaacattgggagtatggtac

SEQ ID NO: 3002031 - DNA, 25 bp, Homo sapien
gcctatgggagattgggttgatcaa

SEQ ID NO: 3002032 - DNA, 25 bp, Homo sapien
caagattatcatccggcagcctatc

SEQ ID NO: 3002033 - DNA, 25 bp, Homo sapien
gcagcctatccgcactgagtacaag

SEQ ID NO: 3002034 - DNA, 25 bp, Homo sapien
ttgtacaacaatcttccacaccatg

SEQ ID NO: 3002035 - DNA, 25 bp, Homo sapien
tattaacaagattatcatccggcag

SEQ ID NO: 3002036 - DNA, 25 bp, Homo sapien
tgagtacaagattgcttttccttac

SEQ ID NO: 3002037 - DNA, 25 bp, Homo sapien
tatccgcactgagtacaagattgct

SEQ ID NO: 3002038 - DNA, 25 bp, Homo sapien
aatcttgtactcagtgcggataggc

SEQ ID NO: 3002039 - DNA, 25 bp, Homo sapien
taggctgccggatgataatcttgtt

SEQ ID NO: 3002040 - DNA, 25 bp, Homo sapien
taaggaaaagcaatcttgtactcag

SEQ ID NO: 3002041 - DNA, 25 bp, Homo sapien
aaagcaatcttgtactcagtgcgga

SEQ ID NO: 3002042 - DNA, 25 bp, Homo sapien
catggtgtggaagattgttgtacaa

SEQ ID NO: 3002043 - DNA, 25 bp, Homo sapien
tactcagtgcggataggctgccgga

SEQ ID NO: 3002044 - DNA, 25 bp, Homo sapien
gaacctcttgttcgagacatcaacc

SEQ ID NO: 3002045 - DNA, 25 bp, Homo sapien
gacttggtggatgacaactacttct

SEQ ID NO: 3002046 - DNA, 25 bp, Homo sapien
tcagctcctgacagacttggtggat

SEQ ID NO: 3002047 - DNA, 25 bp, Homo sapien
cgtccaaggcactcaatatggccat

SEQ ID NO: 3002048 - DNA, 25 bp, Homo sapien
gaaggccttctttacgtccaaggca

SEQ ID NO: 3002049 - DNA, 25 bp, Homo sapien
cctggctaatcagctcctgacagac

SEQ ID NO: 3002050 - DNA, 25 bp, Homo sapien
gtctgtcaggagctgattagccagg

SEQ ID NO: 3002051 - DNA, 25 bp, Homo sapien
agaagtagttgtcatccaccaagtc

SEQ ID NO: 3002052 - DNA, 25 bp, Homo sapien
tccaccaagtctgtcaggagctgat

SEQ ID NO: 3002053 - DNA, 25 bp, Homo sapien
gaatggccatattgagtgccttgga

SEQ ID NO: 3002054 - DNA, 25 bp, Homo sapien
gccttggacgtaaagaaggccttca

SEQ ID NO: 3002055 - DNA, 25 bp, Homo sapien
ggttgatgtctcgaacaagaggttc

SEQ ID NO: 3002056 - DNA, 25 bp, Homo sapien
gctccacttaccagcgctggcagtt

SEQ ID NO: 3002057 - DNA, 25 bp, Homo sapien
acttaccagcgctggcagttcacac

SEQ ID NO: 3002058 - DNA, 25 bp, Homo sapien
atggctccacttaccagcgctggca

SEQ ID NO: 3002059 - DNA, 25 bp, Homo sapien
aaatggctccacttaccagcgctgg

SEQ ID NO: 3002060 - DNA, 25 bp, Homo sapien
gtatgtaaatggctccacttaccag

SEQ ID NO: 3002061 - DNA, 25 bp, Homo sapien
taaatggctccacttaccagcgctg

SEQ ID NO: 3002062 - DNA, 25 bp, Homo sapien
gtgtgaactgccagcgctggtaagt

SEQ ID NO: 3002063 - DNA, 25 bp, Homo sapien
ctggtaagtggagccatttacatac

SEQ ID NO: 3002064 - DNA, 25 bp, Homo sapien
tgccagcgctggtaagtggagccat

SEQ ID NO: 3002065 - DNA, 25 bp, Homo sapien
aactgccagcgctggtaagtggagc

SEQ ID NO: 3002066 - DNA, 25 bp, Homo sapien
tgtgaactgccagcgctggtaagtg

SEQ ID NO: 3002067 - DNA, 25 bp, Homo sapien
cagcgctggtaagtggagccattta

SEQ ID NO: 3002068 - DNA, 25 bp, Homo sapien
tgtggattatgatgcgccgagaaaa

SEQ ID NO: 3002069 - DNA, 25 bp, Homo sapien
cccctgtgttggactggttctatga

SEQ ID NO: 3002070 - DNA, 25 bp, Homo sapien
ggaggccattcagctagagctggac

SEQ ID NO: 3002071 - DNA, 25 bp, Homo sapien
tgaggagccgcccttggactatgct

SEQ ID NO: 3002072 - DNA, 25 bp, Homo sapien
aacatcctagatgttgagccactgg

SEQ ID NO: 3002073 - DNA, 25 bp, Homo sapien
tctatgaccaccagccgttgaggga

SEQ ID NO: 3002074 - DNA, 25 bp, Homo sapien
ccagtggctcaacatctaggatgtt

SEQ ID NO: 3002075 - DNA, 25 bp, Homo sapien
cctcaacggctggtggtcatagaac

SEQ ID NO: 3002076 - DNA, 25 bp, Homo sapien
ttttctcggcgcatcataatccaca

SEQ ID NO: 3002077 - DNA, 25 bp, Homo sapien
gtccagctctagctgaatggcctcc

SEQ ID NO: 3002078 - DNA, 25 bp, Homo sapien
gtcatagaaccagtccaacacaggg

SEQ ID NO: 3002079 - DNA, 25 bp, Homo sapien
tcagcatagtccaagggcggctcct

SEQ ID NO: 3002080 - DNA, 25 bp, Homo sapien
gagaacatgcctatgccttgggagc

SEQ ID NO: 3002081 - DNA, 25 bp, Homo sapien
ttcgtcaatgagattccctgggtca

SEQ ID NO: 3002082 - DNA, 25 bp, Homo sapien
tcattgaacctgtctacatctccca

SEQ ID NO: 3002083 - DNA, 25 bp, Homo sapien
gctgtaccacatcactggagccatt

SEQ ID NO: 3002084 - DNA, 25 bp, Homo sapien
ccctgggtcattgaacctgtctaca

SEQ ID NO: 3002085 - DNA, 25 bp, Homo sapien
tggagccatttccttcgtcaatgag

SEQ ID NO: 3002086 - DNA, 25 bp, Homo sapien
tctcattgacgaaggaaatggctcc

SEQ ID NO: 3002087 - DNA, 25 bp, Homo sapien
gacccagggaatctcattgacgaag

SEQ ID NO: 3002088 - DNA, 25 bp, Homo sapien
aatggctccagtgatgtggtacagc

SEQ ID NO: 3002089 - DNA, 25 bp, Homo sapien
ggagatgtagacaggttcaatgacc

SEQ ID NO: 3002090 - DNA, 25 bp, Homo sapien
tgctcccaaggcataggcatgttct

SEQ ID NO: 3002091 - DNA, 25 bp, Homo sapien
tagacaggttcaatgacccagggaa

SEQ ID NO: 3002092 - DNA, 25 bp, Homo sapien
gatattataagatgtccctggccag

SEQ ID NO: 3002093 - DNA, 25 bp, Homo sapien
taatttctacatcttccacttttgc

SEQ ID NO: 3002094 - DNA, 25 bp, Homo sapien
ccgatctgggactggtgctttaatt

SEQ ID NO: 3002095 - DNA, 25 bp, Homo sapien
gacagctcatcttggtggatataag

SEQ ID NO: 3002096 - DNA, 25 bp, Homo sapien
gagtctctgataatttctacatctt

SEQ ID NO: 3002097 - DNA, 25 bp, Homo sapien
ccacagtcttggattgatgctttga

SEQ ID NO: 3002098 - DNA, 25 bp, Homo sapien
tcaaagcatcaatccaagactgtgg

SEQ ID NO: 3002099 - DNA, 25 bp, Homo sapien
gcaaaagtggaagatgtagaaatta

SEQ ID NO: 3002100 - DNA, 25 bp, Homo sapien
aagatgtagaaattatcagagactc

SEQ ID NO: 3002101 - DNA, 25 bp, Homo sapien
aattaaagcaccagtcccagatcgg

SEQ ID NO: 3002102 - DNA, 25 bp, Homo sapien
ctggccagggacatcttataatatc

SEQ ID NO: 3002103 - DNA, 25 bp, Homo sapien
cttatatccaccaagatgagctgtc

SEQ ID NO: 3002104 - DNA, 25 bp, Homo sapien
aagatcattcgagaccatggagaca

SEQ ID NO: 3002105 - DNA, 25 bp, Homo sapien
gcaggccaagcgctatgcagaaaag

SEQ ID NO: 3002106 - DNA, 25 bp, Homo sapien
gcggaagtttgggtttgtggatgcc

SEQ ID NO: 3002107 - DNA, 25 bp, Homo sapien
ggaagatcattcgagaccatggaga

SEQ ID NO: 3002108 - DNA, 25 bp, Homo sapien
ccaacaggaagttccgccatgacaa

SEQ ID NO: 3002109 - DNA, 25 bp, Homo sapien
caagcgctatgcagaaaagcggaag

SEQ ID NO: 3002110 - DNA, 25 bp, Homo sapien
acttccgcttttctgcatagcgctt

SEQ ID NO: 3002111 - DNA, 25 bp, Homo sapien
tctccatggtctcgaatgatcttcc

SEQ ID NO: 3002112 - DNA, 25 bp, Homo sapien
gcttttctgcatagcgcttggcctg

SEQ ID NO: 3002113 - DNA, 25 bp, Homo sapien
tgggcatccacaaacccaaacttcc

SEQ ID NO: 3002114 - DNA, 25 bp, Homo sapien
tgtctccatggtctcgaatgatctt

SEQ ID NO: 3002115 - DNA, 25 bp, Homo sapien
ttgtcatggcggaacttcctgttgg

SEQ ID NO: 3002116 - DNA, 25 bp, Homo sapien
ggtttaaattacagcgggagagaca

SEQ ID NO: 3002117 - DNA, 25 bp, Homo sapien
gaataacaaaaccttgaagctctgt

SEQ ID NO: 3002118 - DNA, 25 bp, Homo sapien
taagcgcgtattatttgcaagcgct

SEQ ID NO: 3002119 - DNA, 25 bp, Homo sapien
gtttaaattacagcgggagagacag

SEQ ID NO: 3002120 - DNA, 25 bp, Homo sapien
caagcgctgatccagcgggggtaca

SEQ ID NO: 3002121 - DNA, 25 bp, Homo sapien
tattatttgcaagcgctgatccagc

SEQ ID NO: 3002122 - DNA, 25 bp, Homo sapien
gctggatcagcgcttgcaaataata

SEQ ID NO: 3002123 - DNA, 25 bp, Homo sapien
gatcagcgcttgcaaataatacgcg

SEQ ID NO: 3002124 - DNA, 25 bp, Homo sapien
tgtacccccgctggatcagcgcttg

SEQ ID NO: 3002125 - DNA, 25 bp, Homo sapien
tgtctctcccgctgtaatttaaacc

SEQ ID NO: 3002126 - DNA, 25 bp, Homo sapien
acagagcttcaaggttttgttattc

SEQ ID NO: 3002127 - DNA, 25 bp, Homo sapien
tttgtctccgtcactactgtacccc

SEQ ID NO: 3002128 - DNA, 25 bp, Homo sapien
cggagtgtttccttatcgagggccg

SEQ ID NO: 3002129 - DNA, 25 bp, Homo sapien
gtaacccggtgcctggccctctagc

SEQ ID NO: 3002130 - DNA, 25 bp, Homo sapien
cggactacatgtcggaggagaagct

SEQ ID NO: 3002131 - DNA, 25 bp, Homo sapien
taccggactacatgtcggaggagaa

SEQ ID NO: 3002132 - DNA, 25 bp, Homo sapien
atggccggagtgtttccttatcgag

SEQ ID NO: 3002133 - DNA, 25 bp, Homo sapien
cccgctaccggactacatgtcggag

SEQ ID NO: 3002134 - DNA, 25 bp, Homo sapien
ctcgataaggaaacactccggccat

SEQ ID NO: 3002135 - DNA, 25 bp, Homo sapien
tctcctccgacatgtagtccggtag

SEQ ID NO: 3002136 - DNA, 25 bp, Homo sapien
ctccgacatgtagtccggtagcggg

SEQ ID NO: 3002137 - DNA, 25 bp, Homo sapien
ggctagagggccaggcaccgggtta

SEQ ID NO: 3002138 - DNA, 25 bp, Homo sapien
agcttctcctccgacatgtagtccg

SEQ ID NO: 3002139 - DNA, 25 bp, Homo sapien
cggccctcgataaggaaacactccg

SEQ ID NO: 3002140 - DNA, 25 bp, Homo sapien
ctttctgctgcgcttcttgtgggcc

SEQ ID NO: 3002141 - DNA, 25 bp, Homo sapien
ttagtgaatttttctatcccgccgc

SEQ ID NO: 3002142 - DNA, 25 bp, Homo sapien
gtgaatttttctatcccgccgctcc

SEQ ID NO: 3002143 - DNA, 25 bp, Homo sapien
ctgcgcttcttgtgggcccgggcct

SEQ ID NO: 3002144 - DNA, 25 bp, Homo sapien
tctgctgcgcttcttgtgggcccgg

SEQ ID NO: 3002145 - DNA, 25 bp, Homo sapien
cgtggcaggcgtttaaggccgggct

SEQ ID NO: 3002146 - DNA, 25 bp, Homo sapien
gcggcgggatagaaaaattcactaa

SEQ ID NO: 3002147 - DNA, 25 bp, Homo sapien
cgggcccacaagaagcgcagcagaa

SEQ ID NO: 3002148 - DNA, 25 bp, Homo sapien
ggagcggcgggatagaaaaattcac

SEQ ID NO: 3002149 - DNA, 25 bp, Homo sapien
aggcccgggcccacaagaagcgcag

SEQ ID NO: 3002150 - DNA, 25 bp, Homo sapien
gcagcccggccttaaacgcctgcca

SEQ ID NO: 3002151 - DNA, 25 bp, Homo sapien
ggcccacaagaagcgcagcagaaag

SEQ ID NO: 3002152 - DNA, 25 bp, Homo sapien
agcggacgcagtctggccgccattg

SEQ ID NO: 3002153 - DNA, 25 bp, Homo sapien
cagtctggccgccattgcgctgcgg

SEQ ID NO: 3002154 - DNA, 25 bp, Homo sapien
aaagcggcctcttgtgtgagggcct

SEQ ID NO: 3002155 - DNA, 25 bp, Homo sapien
ggcctcttgtgtgagggcctgtggg

SEQ ID NO: 3002156 - DNA, 25 bp, Homo sapien
cggacgcagtctggccgccattgcg

SEQ ID NO: 3002157 - DNA, 25 bp, Homo sapien
gagcggacgcagtctggccgccatt

SEQ ID NO: 3002158 - DNA, 25 bp, Homo sapien
ccacaggccctcacacaagaggccg

SEQ ID NO: 3002159 - DNA, 25 bp, Homo sapien
cgcaatggcggccagactgcgtccg

SEQ ID NO: 3002160 - DNA, 25 bp, Homo sapien
aggccctcacacaagaggccgcttt

SEQ ID NO: 3002161 - DNA, 25 bp, Homo sapien
aatggcggccagactgcgtccgctc

SEQ ID NO: 3002162 - DNA, 25 bp, Homo sapien
ccgcagcgcaatggcggccagactg

SEQ ID NO: 3002163 - DNA, 25 bp, Homo sapien
aggccgctttccccgcagcgcaatg

SEQ ID NO: 3002164 - DNA, 25 bp, Homo sapien
cacggtaaagtctggcgaagcacca

SEQ ID NO: 3002165 - DNA, 25 bp, Homo sapien
tgggcagccttcatagacactatct

SEQ ID NO: 3002166 - DNA, 25 bp, Homo sapien
tcaagtttcactggctcaccatggt

SEQ ID NO: 3002167 - DNA, 25 bp, Homo sapien
gtagcaattcgtgtgtggtcccaaa

SEQ ID NO: 3002168 - DNA, 25 bp, Homo sapien
tccatatttctgctagggcctgtct

SEQ ID NO: 3002169 - DNA, 25 bp, Homo sapien
tgtctttagggtttgcgctgcagct

SEQ ID NO: 3002170 - DNA, 25 bp, Homo sapien
tgccgaccggttactgtcagcctgt

SEQ ID NO: 3002171 - DNA, 25 bp, Homo sapien
tctgtacctccgcttcttagcaagg

SEQ ID NO: 3002172 - DNA, 25 bp, Homo sapien
tcacctcgatgttctgggaaggaag

SEQ ID NO: 3002173 - DNA, 25 bp, Homo sapien
gatggctaagggttgcctctctcag

SEQ ID NO: 3002174 - DNA, 25 bp, Homo sapien
gcagacttaatctgctgggcacttc

SEQ ID NO: 3002175 - DNA, 25 bp, Homo sapien
cctctctcagtccattgtttagtgg

SEQ ID NO: 3002176 - DNA, 25 bp, Homo sapien
tctgctgctacagatagcacctcct

SEQ ID NO: 3002177 - DNA, 25 bp, Homo sapien
ggttataggtgagatctcttttctc

SEQ ID NO: 3002178 - DNA, 25 bp, Homo sapien
ccactgccagaatttggttataggt

SEQ ID NO: 3002179 - DNA, 25 bp, Homo sapien
tgtctcttggcaactatcacgtcca

SEQ ID NO: 3002180 - DNA, 25 bp, Homo sapien
tgacggatttcagtgaacagaaacc

SEQ ID NO: 3002181 - DNA, 25 bp, Homo sapien
atttcttcttagatccgaggaaggg

SEQ ID NO: 3002182 - DNA, 25 bp, Homo sapien
tgccaccctttactgatagctctag

SEQ ID NO: 3002183 - DNA, 25 bp, Homo sapien
tctctgatcctagtgggacttcacc

SEQ ID NO: 3002184 - DNA, 25 bp, Homo sapien
cgagactgtaggacatcattgacca

SEQ ID NO: 3002185 - DNA, 25 bp, Homo sapien
tcattgaccagaatacggatcccca

SEQ ID NO: 3002186 - DNA, 25 bp, Homo sapien
ttcaggctgagagtcgaactgttgc

SEQ ID NO: 3002187 - DNA, 25 bp, Homo sapien
acaggtccattgtcacgacgtgtcc

SEQ ID NO: 3002188 - DNA, 25 bp, Homo sapien
tggtcacgctgaaggccagggatgg

SEQ ID NO: 3002189 - DNA, 25 bp, Homo sapien
tgaccagagcaagaggaacctggtg

SEQ ID NO: 3002190 - DNA, 25 bp, Homo sapien
gacaccatggagaagcccacgtagt

SEQ ID NO: 3002191 - DNA, 25 bp, Homo sapien
aacctggtggtgctgccggaacagc

SEQ ID NO: 3002192 - DNA, 25 bp, Homo sapien
ccacagcaggtcagctccgtctgcc

SEQ ID NO: 3002193 - DNA, 25 bp, Homo sapien
cacagcaggtcagctccgtctgcca

SEQ ID NO: 3002194 - DNA, 25 bp, Homo sapien
agagaagatcccaggtcttgcccaa

SEQ ID NO: 3002195 - DNA, 25 bp, Homo sapien
ctgtgggcatgggggtaggggttag

SEQ ID NO: 3002196 - DNA, 25 bp, Homo sapien
gagcccagcgcgggtggccatggat

SEQ ID NO: 3002197 - DNA, 25 bp, Homo sapien
agcccagcgcgggtggccatggatg

SEQ ID NO: 3002198 - DNA, 25 bp, Homo sapien
cagagcccagcgcgggtggccatgg

SEQ ID NO: 3002199 - DNA, 25 bp, Homo sapien
cccagcgcgggtggccatggatggg

SEQ ID NO: 3002200 - DNA, 25 bp, Homo sapien
gagcggccgattccggcgtgggcag

SEQ ID NO: 3002201 - DNA, 25 bp, Homo sapien
agggagacgcagaggttccaccact

SEQ ID NO: 3002202 - DNA, 25 bp, Homo sapien
cccgagagcaggctgtgcgccaggg

SEQ ID NO: 3002203 - DNA, 25 bp, Homo sapien
cagcggtcccgagcggccgattccg

SEQ ID NO: 3002204 - DNA, 25 bp, Homo sapien
gtcggtcccctcggcgcccgcgctc

SEQ ID NO: 3002205 - DNA, 25 bp, Homo sapien
ggtcccctcggcgcccgcgctctcg

SEQ ID NO: 3002206 - DNA, 25 bp, Homo sapien
gtcccctcggcgcccgcgctctcgg

SEQ ID NO: 3002207 - DNA, 25 bp, Homo sapien
tcggcgcccgcgctctcggccggga

SEQ ID NO: 3002208 - DNA, 25 bp, Homo sapien
acaaagataaccactcaacattttt

SEQ ID NO: 3002209 - DNA, 25 bp, Homo sapien
tacagtgactttgttccaccataca

SEQ ID NO: 3002210 - DNA, 25 bp, Homo sapien
tatgccttccgtcttttttatctgc

SEQ ID NO: 3002211 - DNA, 25 bp, Homo sapien
tttatctgctctacgtatacaagca

SEQ ID NO: 3002212 - DNA, 25 bp, Homo sapien
tggaggcttttaggccacatgacac

SEQ ID NO: 3002213 - DNA, 25 bp, Homo sapien
caggaagcctgcaccgatgtatact

SEQ ID NO: 3002214 - DNA, 25 bp, Homo sapien
tatactcccacacgcaatgtatggg

SEQ ID NO: 3002215 - DNA, 25 bp, Homo sapien
cttttaatgtctgcgcggtactcca

SEQ ID NO: 3002216 - DNA, 25 bp, Homo sapien
tggaggctcgccgtcaatggaggct

SEQ ID NO: 3002217 - DNA, 25 bp, Homo sapien
gagagggctggaggctcgccgtcaa

SEQ ID NO: 3002218 - DNA, 25 bp, Homo sapien
gggctggaggctcgccgtcaatgga

SEQ ID NO: 3002219 - DNA, 25 bp, Homo sapien
tcgccgtcaatggaggctggctgcc

SEQ ID NO: 3002220 - DNA, 25 bp, Homo sapien
gatgcccaggtaggaccctgtgctc

SEQ ID NO: 3002221 - DNA, 25 bp, Homo sapien
gctggatgcccaggtaggaccctgt

SEQ ID NO: 3002222 - DNA, 25 bp, Homo sapien
ctgctggatgcccaggtaggaccct

SEQ ID NO: 3002223 - DNA, 25 bp, Homo sapien
tggatgcccaggtaggaccctgtgc

SEQ ID NO: 3002224 - DNA, 25 bp, Homo sapien
cagaagagcagggttccacggtcta

SEQ ID NO: 3002225 - DNA, 25 bp, Homo sapien
gggacagagtcacctttgttgcagc

SEQ ID NO: 3002226 - DNA, 25 bp, Homo sapien
tgagtttttcacaagcggaggacaa

SEQ ID NO: 3002227 - DNA, 25 bp, Homo sapien
tgaagatggcagaggcacatagcga

SEQ ID NO: 3002228 - DNA, 25 bp, Homo sapien
gaagtcacggagaggcgagctctta

SEQ ID NO: 3002229 - DNA, 25 bp, Homo sapien
gatgactcctcacgcctgggtttag

SEQ ID NO: 3002230 - DNA, 25 bp, Homo sapien
tagcagcagttagaatcccaccaag

SEQ ID NO: 3002231 - DNA, 25 bp, Homo sapien
caggaatctagagtctgggccagcc

SEQ ID NO: 3002232 - DNA, 25 bp, Homo sapien
gtatcatccaccctgctgttcggac

SEQ ID NO: 3002233 - DNA, 25 bp, Homo sapien
ccagccagtgtctctaatctaaaac

SEQ ID NO: 3002234 - DNA, 25 bp, Homo sapien
caacttgcccaaaacgtatcatcca

SEQ ID NO: 3002235 - DNA, 25 bp, Homo sapien
aatctaaaaccgctccttgctgggc

SEQ ID NO: 3002236 - DNA, 25 bp, Homo sapien
gcagctcctcctcctcctcgaagcc

SEQ ID NO: 3002237 - DNA, 25 bp, Homo sapien
cagatgatggggaaagcagctcctc

SEQ ID NO: 3002238 - DNA, 25 bp, Homo sapien
agctcctcctcctcctcgaagccag

SEQ ID NO: 3002239 - DNA, 25 bp, Homo sapien
cttccagatgatggggaaagcagct

SEQ ID NO: 3002240 - DNA, 25 bp, Homo sapien
tttagctgggtcaggacataaagct

SEQ ID NO: 3002241 - DNA, 25 bp, Homo sapien
tagctgggtcaggacataaagcttg

SEQ ID NO: 3002242 - DNA, 25 bp, Homo sapien
ttagctgggtcaggacataaagctt

SEQ ID NO: 3002243 - DNA, 25 bp, Homo sapien
ctttagctgggtcaggacataaagc

SEQ ID NO: 3002244 - DNA, 25 bp, Homo sapien
gtgagggcgtgagaggaacaggctc

SEQ ID NO: 3002245 - DNA, 25 bp, Homo sapien
ggtgagggcgtgagaggaacaggct

SEQ ID NO: 3002246 - DNA, 25 bp, Homo sapien
aggtgagggcgtgagaggaacaggc

SEQ ID NO: 3002247 - DNA, 25 bp, Homo sapien
gatcagcccaactgacttgttccca

SEQ ID NO: 3002248 - DNA, 25 bp, Homo sapien
gcccaactgacttgttcccagggag

SEQ ID NO: 3002249 - DNA, 25 bp, Homo sapien
gagttcagtgatcagcccaactgac

SEQ ID NO: 3002250 - DNA, 25 bp, Homo sapien
cagtgatcagcccaactgacttgtt

SEQ ID NO: 3002251 - DNA, 25 bp, Homo sapien
tctgacagctcctagcccaatctga

SEQ ID NO: 3002252 - DNA, 25 bp, Homo sapien
ccatcaaccctctggcactctgaca

SEQ ID NO: 3002253 - DNA, 25 bp, Homo sapien
ccctctggcactctgacagctccta

SEQ ID NO: 3002254 - DNA, 25 bp, Homo sapien
tcaaccctctggcactctgacagct

SEQ ID NO: 3002255 - DNA, 25 bp, Homo sapien
ggccggcggcgctgtctcttctcgg

SEQ ID NO: 3002256 - DNA, 25 bp, Homo sapien
tgacgcacgagctgcgaatgcacgg

SEQ ID NO: 3002257 - DNA, 25 bp, Homo sapien
ctccgatcagctggcggcgtcgtga

SEQ ID NO: 3002258 - DNA, 25 bp, Homo sapien
gggagcaaatcactgcgtccgctcc

SEQ ID NO: 3002259 - DNA, 25 bp, Homo sapien
gagtcgtgagtgcttcttttagaca

SEQ ID NO: 3002260 - DNA, 25 bp, Homo sapien
cttaaagggcgacagcccctccttg

SEQ ID NO: 3002261 - DNA, 25 bp, Homo sapien
gcatttttaaactgagctcggaatc

SEQ ID NO: 3002262 - DNA, 25 bp, Homo sapien
ttaaactgagctcggaatccagccc

SEQ ID NO: 3002263 - DNA, 25 bp, Homo sapien
aaagaggaacatgtggactgaaatc

SEQ ID NO: 3002264 - DNA, 25 bp, Homo sapien
gaacatgtggactgaaatccatgcc

SEQ ID NO: 3002265 - DNA, 25 bp, Homo sapien
tcagctccaaataggggctgagggt

SEQ ID NO: 3002266 - DNA, 25 bp, Homo sapien
tggactgaaatccatgccttttcct

SEQ ID NO: 3002267 - DNA, 25 bp, Homo sapien
ccccttatccactcccatgggtggt

SEQ ID NO: 3002268 - DNA, 25 bp, Homo sapien
ttatccactcccatgggtggtgaag

SEQ ID NO: 3002269 - DNA, 25 bp, Homo sapien
gggggatgtgattgtatgatctttc

SEQ ID NO: 3002270 - DNA, 25 bp, Homo sapien
gggatgtgattgtatgatctttctt

SEQ ID NO: 3002271 - DNA, 25 bp, Homo sapien
ggcacccacgtggtggccctagtgc

SEQ ID NO: 3002272 - DNA, 25 bp, Homo sapien
ctgtgcaaaggctgcctgccggctg

SEQ ID NO: 3002273 - DNA, 25 bp, Homo sapien
gagggacctgagcatcgatcccagg

SEQ ID NO: 3002274 - DNA, 25 bp, Homo sapien
gctgcggaagcggagactgtcctac

SEQ ID NO: 3002275 - DNA, 25 bp, Homo sapien
tcatgcagctgaatcggttggcagg

SEQ ID NO: 3002276 - DNA, 25 bp, Homo sapien
gagacctgcgcaagtccaagttccg

SEQ ID NO: 3002277 - DNA, 25 bp, Homo sapien
aggaacttcggagcctcgtgctaga

SEQ ID NO: 3002278 - DNA, 25 bp, Homo sapien
ccctgggtggtggacttcactacgc

SEQ ID NO: 3002279 - DNA, 25 bp, Homo sapien
aaattccgtgccaggctgtctcagg

SEQ ID NO: 3002280 - DNA, 25 bp, Homo sapien
cctgggtattgatccccgggccaga

SEQ ID NO: 3002281 - DNA, 25 bp, Homo sapien
ttgttagcttcccaaggcaagtgtg

SEQ ID NO: 3002282 - DNA, 25 bp, Homo sapien
tctagcctaaatgtggtccccttgg

SEQ ID NO: 3002283 - DNA, 25 bp, Homo sapien
caagacctcgcattgcaaggagagt

SEQ ID NO: 3002284 - DNA, 25 bp, Homo sapien
ggtagtatgactccaccccactgtg

SEQ ID NO: 3002285 - DNA, 25 bp, Homo sapien
tgtctgccttaggagcacctgctgg

SEQ ID NO: 3002286 - DNA, 25 bp, Homo sapien
aaagcatctcattcggttacgtgtc

SEQ ID NO: 3002287 - DNA, 25 bp, Homo sapien
cttaaaacttgtgccccccatggag

SEQ ID NO: 3002288 - DNA, 25 bp, Homo sapien
gaggattacccccagtttggcagcc

SEQ ID NO: 3002289 - DNA, 25 bp, Homo sapien
cccatggaggaggattacccccagt

SEQ ID NO: 3002290 - DNA, 25 bp, Homo sapien
gagacaagcttttcggccctgactt

SEQ ID NO: 3002291 - DNA, 25 bp, Homo sapien
ggtgcttctagttctgccaggagac

SEQ ID NO: 3002292 - DNA, 25 bp, Homo sapien
cgtggaactcgtgtctggcacagcc

SEQ ID NO: 3002293 - DNA, 25 bp, Homo sapien
tgtggcctaacctgccgagagtcca

SEQ ID NO: 3002294 - DNA, 25 bp, Homo sapien
tcagctgggacaccccgacttttgt

SEQ ID NO: 3002295 - DNA, 25 bp, Homo sapien
tgcctgtactagctgaggaactctg

SEQ ID NO: 3002296 - DNA, 25 bp, Homo sapien
cactgcgctggccaaatcagacaag

SEQ ID NO: 3002297 - DNA, 25 bp, Homo sapien
ctttaacgtgaggataatatatcta

SEQ ID NO: 3002298 - DNA, 25 bp, Homo sapien
tctgggcctacgttctcacctttaa

SEQ ID NO: 3002299 - DNA, 25 bp, Homo sapien
cgctatggcttggattcagatctca

SEQ ID NO: 3002300 - DNA, 25 bp, Homo sapien
tacttggatgaagagaggaccgtga

SEQ ID NO: 3002301 - DNA, 25 bp, Homo sapien
gaccgtgagggtccccatgatgtcg

SEQ ID NO: 3002302 - DNA, 25 bp, Homo sapien
cctaaggctgttttacgctatggct

SEQ ID NO: 3002303 - DNA, 25 bp, Homo sapien
tgggccacggctatcacacggatct

SEQ ID NO: 3002304 - DNA, 25 bp, Homo sapien
cacgcttggccaatcgttggcattc

SEQ ID NO: 3002305 - DNA, 25 bp, Homo sapien
agtctgtaactgttaacctttcttg

SEQ ID NO: 3002306 - DNA, 25 bp, Homo sapien
aatcgttggcattctaaggctttca

SEQ ID NO: 3002307 - DNA, 25 bp, Homo sapien
cccttgaccggaagcatgagtatca

SEQ ID NO: 3002308 - DNA, 25 bp, Homo sapien
tagaggagagcctcacctccgagtt

SEQ ID NO: 3002309 - DNA, 25 bp, Homo sapien
ttatgaaggcgaagtcaccaagtcc

SEQ ID NO: 3002310 - DNA, 25 bp, Homo sapien
gacatagaccgagaactgaagaccg

SEQ ID NO: 3002311 - DNA, 25 bp, Homo sapien
caagctgactcaggtggaacaccgg

SEQ ID NO: 3002312 - DNA, 25 bp, Homo sapien
gattccacaggacacgaaggctgcc

SEQ ID NO: 3002313 - DNA, 25 bp, Homo sapien
tgctaagcagaacgcaagggctcca

SEQ ID NO: 3002314 - DNA, 25 bp, Homo sapien
tctaaacactgcaggaagtcaccgt

SEQ ID NO: 3002315 - DNA, 25 bp, Homo sapien
gcaaccagggttccgacctagagaa

SEQ ID NO: 3002316 - DNA, 25 bp, Homo sapien
ggctgtcgctacacatcctggtgga

SEQ ID NO: 3002317 - DNA, 25 bp, Homo sapien
caactacttggcaccagtggtaaca

SEQ ID NO: 3002318 - DNA, 25 bp, Homo sapien
gagaatcccgtaaccttctgactgg

SEQ ID NO: 3002319 - DNA, 25 bp, Homo sapien
gactatcatcactgagcgaggtgga

SEQ ID NO: 3002320 - DNA, 25 bp, Homo sapien
tactgtaagtggaacggtgtgtctc

SEQ ID NO: 3002321 - DNA, 25 bp, Homo sapien
aataggtgtctctctgactgcaacg

SEQ ID NO: 3002322 - DNA, 25 bp, Homo sapien
tgacagccgtcatccctggaggaaa

SEQ ID NO: 3002323 - DNA, 25 bp, Homo sapien
atgggccacagtgcagcgacagaac

SEQ ID NO: 3002324 - DNA, 25 bp, Homo sapien
tcagctttctgtattgtgctcaggg

SEQ ID NO: 3002325 - DNA, 25 bp, Homo sapien
tgtgctcagggcttcgggtactgca

SEQ ID NO: 3002326 - DNA, 25 bp, Homo sapien
ggatttcatcgtcccatgggccaca

SEQ ID NO: 3002327 - DNA, 25 bp, Homo sapien
tacaccaagggcagctttaccaggg

SEQ ID NO: 3002328 - DNA, 25 bp, Homo sapien
aaagtaatacccagaagagcctagg

SEQ ID NO: 3002329 - DNA, 25 bp, Homo sapien
tgtacccgggaggatgcttagcagc

SEQ ID NO: 3002330 - DNA, 25 bp, Homo sapien
ttagggtgaccatcttagggctgac

SEQ ID NO: 3002331 - DNA, 25 bp, Homo sapien
tggacggcccgtggcgaacctccac

SEQ ID NO: 3002332 - DNA, 25 bp, Homo sapien
atctgggccaatttgaagagctcat

SEQ ID NO: 3002333 - DNA, 25 bp, Homo sapien
ggcgaacctccaccacgtagagact

SEQ ID NO: 3002334 - DNA, 25 bp, Homo sapien
tgggccaatttgaagagctcatggc

SEQ ID NO: 3002335 - DNA, 25 bp, Homo sapien
tagatgggtggctgacttttgccag

SEQ ID NO: 3002336 - DNA, 25 bp, Homo sapien
gtagatgggtggctgacttttgcca

SEQ ID NO: 3002337 - DNA, 25 bp, Homo sapien
ctgtagatgggtggctgacttttgc

SEQ ID NO: 3002338 - DNA, 25 bp, Homo sapien
gatgggtggctgacttttgccagtc

SEQ ID NO: 3002339 - DNA, 25 bp, Homo sapien
gaagctctcggcgtcacgctggcac

SEQ ID NO: 3002340 - DNA, 25 bp, Homo sapien
aggccatccgcgatctctcccacca

SEQ ID NO: 3002341 - DNA, 25 bp, Homo sapien
ccacggcgtgctctgcccacaggaa

SEQ ID NO: 3002342 - DNA, 25 bp, Homo sapien
tggcaccccgacagccgctgaacag

SEQ ID NO: 3002343 - DNA, 25 bp, Homo sapien
tgtcaatgcagaggaaagacgtctc

SEQ ID NO: 3002344 - DNA, 25 bp, Homo sapien
gtcaatgcagaggaaagacgtctca

SEQ ID NO: 3002345 - DNA, 25 bp, Homo sapien
ctgtcaatgcagaggaaagacgtct

SEQ ID NO: 3002346 - DNA, 25 bp, Homo sapien
ctagttcaccatctctgagaagctt

SEQ ID NO: 3002347 - DNA, 25 bp, Homo sapien
aagcttctgggccactctgacctgc

SEQ ID NO: 3002348 - DNA, 25 bp, Homo sapien
ttcaccatctctgagaagcttctgg

SEQ ID NO: 3002349 - DNA, 25 bp, Homo sapien
ttctgggccactctgacctgctgct

SEQ ID NO: 3002350 - DNA, 25 bp, Homo sapien
gtggtccctgctgacggcggattct

SEQ ID NO: 3002351 - DNA, 25 bp, Homo sapien
gctgacggcggattctgcacaagat

SEQ ID NO: 3002352 - DNA, 25 bp, Homo sapien
ctgtaaccgagagaccaggtggtcc

SEQ ID NO: 3002353 - DNA, 25 bp, Homo sapien
ctgctgacggcggattctgcacaag

SEQ ID NO: 3002354 - DNA, 25 bp, Homo sapien
ctgccacagcgcagcacgtcatctc

SEQ ID NO: 3002355 - DNA, 25 bp, Homo sapien
ctgctgccacagcgcagcacgtcat

SEQ ID NO: 3002356 - DNA, 25 bp, Homo sapien
tgccacagcgcagcacgtcatctcc

SEQ ID NO: 3002357 - DNA, 25 bp, Homo sapien
gctgccacagcgcagcacgtcatct

SEQ ID NO: 3002358 - DNA, 25 bp, Homo sapien
agcttctgctgcctttcggcaaccc

SEQ ID NO: 3002359 - DNA, 25 bp, Homo sapien
ctgcatgggcgctccgcaactgttg

SEQ ID NO: 3002360 - DNA, 25 bp, Homo sapien
ttgacaagctggacaggcgcagtca

SEQ ID NO: 3002361 - DNA, 25 bp, Homo sapien
tcaaagaaatactgagacctcagct

SEQ ID NO: 3002362 - DNA, 25 bp, Homo sapien
ttgtggaactggatactaaaataag

SEQ ID NO: 3002363 - DNA, 25 bp, Homo sapien
tatttgtggaactggatactaaaat

SEQ ID NO: 3002364 - DNA, 25 bp, Homo sapien
caaatatttgtggaactggatacta

SEQ ID NO: 3002365 - DNA, 25 bp, Homo sapien
tgtggaactggatactaaaataagc

SEQ ID NO: 3002366 - DNA, 25 bp, Homo sapien
tgctaatgaaggacacgctggtgtt

SEQ ID NO: 3002367 - DNA, 25 bp, Homo sapien
tcttgcccctttctaatccgctgtg

SEQ ID NO: 3002368 - DNA, 25 bp, Homo sapien
ggaggctgataacagggaagatgcc

SEQ ID NO: 3002369 - DNA, 25 bp, Homo sapien
taatccgctgtgacgcccggatggt

SEQ ID NO: 3002370 - DNA, 25 bp, Homo sapien
tgcctgctgtcggtaacgatgctcc

SEQ ID NO: 3002371 - DNA, 25 bp, Homo sapien
ctgcctgctgtcggtaacgatgctc

SEQ ID NO: 3002372 - DNA, 25 bp, Homo sapien
ctgctgtcggtaacgatgctccctt

SEQ ID NO: 3002373 - DNA, 25 bp, Homo sapien
cctgctgtcggtaacgatgctccct

SEQ ID NO: 3002374 - DNA, 25 bp, Homo sapien
taaacatgcacaccaaaataggctg

SEQ ID NO: 3002375 - DNA, 25 bp, Homo sapien
tttagtagtatcatgggaccaggcc

SEQ ID NO: 3002376 - DNA, 25 bp, Homo sapien
gatgttccacgagcttcaggatggg

SEQ ID NO: 3002377 - DNA, 25 bp, Homo sapien
tcacactggagatgtcaagctggat

SEQ ID NO: 3002378 - DNA, 25 bp, Homo sapien
cattaatatcgcatccaggaattgg

SEQ ID NO: 3002379 - DNA, 25 bp, Homo sapien
ggagttcacaatcctctcagttggg

SEQ ID NO: 3002380 - DNA, 25 bp, Homo sapien
tagtcacgtcaggacacaattcagg

SEQ ID NO: 3002381 - DNA, 25 bp, Homo sapien
tatggtggtcatcgcctgagcgtta

SEQ ID NO: 3002382 - DNA, 25 bp, Homo sapien
caaacatcggtgacaatagaggtcc

SEQ ID NO: 3002383 - DNA, 25 bp, Homo sapien
gagtcaacctcagggcaatgtggca

SEQ ID NO: 3002384 - DNA, 25 bp, Homo sapien
tttgtggcaacgagacagcgacctt

SEQ ID NO: 3002385 - DNA, 25 bp, Homo sapien
cattctgtcctgtggtagagctccc

SEQ ID NO: 3002386 - DNA, 25 bp, Homo sapien
gctggtgtggctgtgaagttccttt

SEQ ID NO: 3002387 - DNA, 25 bp, Homo sapien
gatggtctggcttgcctcctgcagt

SEQ ID NO: 3002388 - DNA, 25 bp, Homo sapien
taatcttgggttgcaacctttctgg

SEQ ID NO: 3002389 - DNA, 25 bp, Homo sapien
gacattctgctttacgtaacataat

SEQ ID NO: 3002390 - DNA, 25 bp, Homo sapien
caaccaatagcagcatgacatgatt

SEQ ID NO: 3002391 - DNA, 25 bp, Homo sapien
agtaagaagccctccggatcctgtc

SEQ ID NO: 3002392 - DNA, 25 bp, Homo sapien
gcagagatgaaggtctagtcctcca

SEQ ID NO: 3002393 - DNA, 25 bp, Homo sapien
aatgagcgcccagtccgactttagg

SEQ ID NO: 3002394 - DNA, 25 bp, Homo sapien
aagagggctgccgagcggttagcat

SEQ ID NO: 3002395 - DNA, 25 bp, Homo sapien
tgccgagcggttagcatgacacagt

SEQ ID NO: 3002396 - DNA, 25 bp, Homo sapien
catactgacccaggtggaagagggc

SEQ ID NO: 3002397 - DNA, 25 bp, Homo sapien
atactgacccaggtggaagagggct

SEQ ID NO: 3002398 - DNA, 25 bp, Homo sapien
cagtgttaggccttgaatgtgacac

SEQ ID NO: 3002399 - DNA, 25 bp, Homo sapien
gtcctcagtgttaggccttgaatgt

SEQ ID NO: 3002400 - DNA, 25 bp, Homo sapien
tcctcagtgttaggccttgaatgtg

SEQ ID NO: 3002401 - DNA, 25 bp, Homo sapien
tgttaggccttgaatgtgacactcc

SEQ ID NO: 3002402 - DNA, 25 bp, Homo sapien
ccttcttctctgtagaaaagaggag

SEQ ID NO: 3002403 - DNA, 25 bp, Homo sapien
tctctgtagaaaagaggagcgtccg

SEQ ID NO: 3002404 - DNA, 25 bp, Homo sapien
agaggagcgtccgagtcctttccca

SEQ ID NO: 3002405 - DNA, 25 bp, Homo sapien
tagaaaagaggagcgtccgagtcct

SEQ ID NO: 3002406 - DNA, 25 bp, Homo sapien
ttgcatgtagcttgtcattaggata

SEQ ID NO: 3002407 - DNA, 25 bp, Homo sapien
aaagttgtttacaatcttagctctt

SEQ ID NO: 3002408 - DNA, 25 bp, Homo sapien
catgtagcttgtcattaggatacag

SEQ ID NO: 3002409 - DNA, 25 bp, Homo sapien
gttgtttacaatcttagctcttaac

SEQ ID NO: 3002410 - DNA, 25 bp, Homo sapien
tgctgtagaaattgtgacctgaaca

SEQ ID NO: 3002411 - DNA, 25 bp, Homo sapien
aacagacgtcgggagtgaagcccac

SEQ ID NO: 3002412 - DNA, 25 bp, Homo sapien
tgaagaaagatatccctcaaggtct

SEQ ID NO: 3002413 - DNA, 25 bp, Homo sapien
cacttttgaagcagatatgatttcc

SEQ ID NO: 3002414 - DNA, 25 bp, Homo sapien
tcttcgactcggctcaaatggcacc

SEQ ID NO: 3002415 - DNA, 25 bp, Homo sapien
cctggcttatggagtccacctggaa

SEQ ID NO: 3002416 - DNA, 25 bp, Homo sapien
aaattcccacacgttcttcgactcg

SEQ ID NO: 3002417 - DNA, 25 bp, Homo sapien
cctcctccgggacggcgtccctgat

SEQ ID NO: 3002418 - DNA, 25 bp, Homo sapien
tgcgactctatttagcagcggaggt

SEQ ID NO: 3002419 - DNA, 25 bp, Homo sapien
agtcagccccgcgttgctggacgaa

SEQ ID NO: 3002420 - DNA, 25 bp, Homo sapien
gaatcgggtcactactgcgactcta

SEQ ID NO: 3002421 - DNA, 25 bp, Homo sapien
gcagcggaggtctcaaggaacagct

SEQ ID NO: 3002422 - DNA, 25 bp, Homo sapien
gagaaccgctcagacgcgcccggaa

SEQ ID NO: 3002423 - DNA, 25 bp, Homo sapien
agaacgcctcgagaaccgctcagac

SEQ ID NO: 3002424 - DNA, 25 bp, Homo sapien
cgtgcactcgccagagaccgaggcg

SEQ ID NO: 3002425 - DNA, 25 bp, Homo sapien
agagaccgaggcgagaacgcctcga

SEQ ID NO: 3002426 - DNA, 25 bp, Homo sapien
ccaggcctcgcttgggaccatgggt

SEQ ID NO: 3002427 - DNA, 25 bp, Homo sapien
ccatggtcggccaactgagcgaggg

SEQ ID NO: 3002428 - DNA, 25 bp, Homo sapien
caataactgcgcagcgcgcgggacc

SEQ ID NO: 3002429 - DNA, 25 bp, Homo sapien
agcggtgcgcgcaacttctcgggcc

SEQ ID NO: 3002430 - DNA, 25 bp, Homo sapien
tatctttctaagtctgggcctcttg

SEQ ID NO: 3002431 - DNA, 25 bp, Homo sapien
tccagtccctcacgaagtgaagtgt

SEQ ID NO: 3002432 - DNA, 25 bp, Homo sapien
tgcttattccatgcttcagagggtt

SEQ ID NO: 3002433 - DNA, 25 bp, Homo sapien
tattgtccattacctgggcatccag

SEQ ID NO: 3002434 - DNA, 25 bp, Homo sapien
tgcctgagctgctgacttccactca

SEQ ID NO: 3002435 - DNA, 25 bp, Homo sapien
ctgctgacttccactcagcatacgt

SEQ ID NO: 3002436 - DNA, 25 bp, Homo sapien
tgacttccactcagcatacgttcct

SEQ ID NO: 3002437 - DNA, 25 bp, Homo sapien
ctcagcatacgttcctgccaccatt

SEQ ID NO: 3002438 - DNA, 25 bp, Homo sapien
catacatgcacgtggttttaaaatc

SEQ ID NO: 3002439 - DNA, 25 bp, Homo sapien
gtacctcaaactaggtcttgttcag

SEQ ID NO: 3002440 - DNA, 25 bp, Homo sapien
tctaactcttggtctccaaacagtt

SEQ ID NO: 3002441 - DNA, 25 bp, Homo sapien
tttctttggagcatcgtccccatat

SEQ ID NO: 3002442 - DNA, 25 bp, Homo sapien
ctctgattaatttccctaaggatga

SEQ ID NO: 3002443 - DNA, 25 bp, Homo sapien
tattgacatcgactgagtgcgaggg

SEQ ID NO: 3002444 - DNA, 25 bp, Homo sapien
ggatgatattgacatcgactgagtg

SEQ ID NO: 3002445 - DNA, 25 bp, Homo sapien
cgaggggtcagctgccctatacttt

SEQ ID NO: 3002446 - DNA, 25 bp, Homo sapien
aatggcctgggctctcaccaatgaa

SEQ ID NO: 3002447 - DNA, 25 bp, Homo sapien
ggtactctactgctccaaggagatc

SEQ ID NO: 3002448 - DNA, 25 bp, Homo sapien
tctaggccgagagtaggcaagctgt

SEQ ID NO: 3002449 - DNA, 25 bp, Homo sapien
gaagagaattgtcctttaagccagc

SEQ ID NO: 3002450 - DNA, 25 bp, Homo sapien
actcaaagcaataccagtgccacgg

SEQ ID NO: 3002451 - DNA, 25 bp, Homo sapien
aataccagtgccacggtggcagatg

SEQ ID NO: 3002452 - DNA, 25 bp, Homo sapien
ctgcactcaaagcaataccagtgcc

SEQ ID NO: 3002453 - DNA, 25 bp, Homo sapien
aagcaataccagtgccacggtggca

SEQ ID NO: 3002454 - DNA, 25 bp, Homo sapien
cgtgtctcagcaacagcgcagccat

SEQ ID NO: 3002455 - DNA, 25 bp, Homo sapien
tcggaggcaatgacgaccaacgtgt

SEQ ID NO: 3002456 - DNA, 25 bp, Homo sapien
atgacgaccaacgtgtctcagcaac

SEQ ID NO: 3002457 - DNA, 25 bp, Homo sapien
cgaccaacgtgtctcagcaacagcg

SEQ ID NO: 3002458 - DNA, 25 bp, Homo sapien
gatcatgcttacgagtatcacggga

SEQ ID NO: 3002459 - DNA, 25 bp, Homo sapien
tagcaagtggtcgagctaacgtcca

SEQ ID NO: 3002460 - DNA, 25 bp, Homo sapien
gagacacgggcattcagagaacaag

SEQ ID NO: 3002461 - DNA, 25 bp, Homo sapien
aaacagtattgagcatggtctgcca

SEQ ID NO: 3002462 - DNA, 25 bp, Homo sapien
gctgagaagcggtcatgagcacctg

SEQ ID NO: 3002463 - DNA, 25 bp, Homo sapien
tgaggaccgctgataagcattgact

SEQ ID NO: 3002464 - DNA, 25 bp, Homo sapien
cacaacttgggttcttctcagcggg

SEQ ID NO: 3002465 - DNA, 25 bp, Homo sapien
tgtgtcaggcctacggagtcagcca

SEQ ID NO: 3002466 - DNA, 25 bp, Homo sapien
gcagtctaacaccaaccacgctttg

SEQ ID NO: 3002467 - DNA, 25 bp, Homo sapien
ttacgcagcagtctaacaccaacca

SEQ ID NO: 3002468 - DNA, 25 bp, Homo sapien
ttattgatgtttacgcagcagtcta

SEQ ID NO: 3002469 - DNA, 25 bp, Homo sapien
taacaccaaccacgctttgaaatgt

SEQ ID NO: 3002470 - DNA, 25 bp, Homo sapien
ttatctatccggtggctgcaacaca

SEQ ID NO: 3002471 - DNA, 25 bp, Homo sapien
tatctatccggtggctgcaacacac

SEQ ID NO: 3002472 - DNA, 25 bp, Homo sapien
gccagccctagacgggatgacttcc

SEQ ID NO: 3002473 - DNA, 25 bp, Homo sapien
ccctcggtgtctgccgttgacatag

SEQ ID NO: 3002474 - DNA, 25 bp, Homo sapien
gaggacctgctgttcatcactgcac

SEQ ID NO: 3002475 - DNA, 25 bp, Homo sapien
attggccgcacatctcgccgtcgta

SEQ ID NO: 3002476 - DNA, 25 bp, Homo sapien
gggaactgcagctttgtgctcttca

SEQ ID NO: 3002477 - DNA, 25 bp, Homo sapien
cctgttaaagaggagggcttgccgc

SEQ ID NO: 3002478 - DNA, 25 bp, Homo sapien
gcagctttgtgctcttcaatgccca

SEQ ID NO: 3002479 - DNA, 25 bp, Homo sapien
cagcttcctttcaacggccaggtaa

SEQ ID NO: 3002480 - DNA, 25 bp, Homo sapien
aagaggcgctgcctgagtgtcgatt

SEQ ID NO: 3002481 - DNA, 25 bp, Homo sapien
ttgcagtgggggcacgcgcaggctc

SEQ ID NO: 3002482 - DNA, 25 bp, Homo sapien
aggcgctgcctgagtgtcgatttgc

SEQ ID NO: 3002483 - DNA, 25 bp, Homo sapien
cgctgcctgagtgtcgatttgcagt

SEQ ID NO: 3002484 - DNA, 25 bp, Homo sapien
tacacgagaagatagagccggagca

SEQ ID NO: 3002485 - DNA, 25 bp, Homo sapien
catttccttggagcttaagacttaa

SEQ ID NO: 3002486 - DNA, 25 bp, Homo sapien
cactaattgatctttcagctgctca

SEQ ID NO: 3002487 - DNA, 25 bp, Homo sapien
ttaagccctgtggaatgtaagtcct

SEQ ID NO: 3002488 - DNA, 25 bp, Homo sapien
tcccgcaagcgggaagaacattcca

SEQ ID NO: 3002489 - DNA, 25 bp, Homo sapien
ggctttagggataccatagctcctc

SEQ ID NO: 3002490 - DNA, 25 bp, Homo sapien
tgtccctgacagaagctgtaatcgg

SEQ ID NO: 3002491 - DNA, 25 bp, Homo sapien
tgggccaacaccgtcattgctgagg

SEQ ID NO: 3002492 - DNA, 25 bp, Homo sapien
ttgagtttcaggagagtgtggatct

SEQ ID NO: 3002493 - DNA, 25 bp, Homo sapien
taactgtcggccaagtgtccggagg

SEQ ID NO: 3002494 - DNA, 25 bp, Homo sapien
ttatacaggtggaatcacaaggctt

SEQ ID NO: 3002495 - DNA, 25 bp, Homo sapien
tctgaaatggtttgatcatgaagta

SEQ ID NO: 3002496 - DNA, 25 bp, Homo sapien
agttgccggcggagctctgtcatgt

SEQ ID NO: 3002497 - DNA, 25 bp, Homo sapien
tgtgggttaccaaggagcaagagaa

SEQ ID NO: 3002498 - DNA, 25 bp, Homo sapien
ggcagtacgtcctccgcagtgtgct

SEQ ID NO: 3002499 - DNA, 25 bp, Homo sapien
caagagaatagaggaagctgccttc

SEQ ID NO: 3002500 - DNA, 25 bp, Homo sapien
tagggacagtggcagtaggcaggcc

SEQ ID NO: 3002501 - DNA, 25 bp, Homo sapien
gggacagtggcagtaggcggttagc

SEQ ID NO: 3002502 - DNA, 25 bp, Homo sapien
tagggacagtggcagtaggcggtta

SEQ ID NO: 3002503 - DNA, 25 bp, Homo sapien
gggacagtggcagtaggcgggccct

SEQ ID NO: 3002504 - DNA, 25 bp, Homo sapien
tgccagctgagtccggggctgcggc

SEQ ID NO: 3002505 - DNA, 25 bp, Homo sapien
gggcgccccaaactctgcgccacag

SEQ ID NO: 3002506 - DNA, 25 bp, Homo sapien
actctgcgccacagcctcacacatg

SEQ ID NO: 3002507 - DNA, 25 bp, Homo sapien
ggctgcggcccatctcatggagagc

SEQ ID NO: 3002508 - DNA, 25 bp, Homo sapien
ttggcccacaatgagtgactcaagt

SEQ ID NO: 3002509 - DNA, 25 bp, Homo sapien
caggtaaggcccaaattgtaaagag

SEQ ID NO: 3002510 - DNA, 25 bp, Homo sapien
atttctgtaagcctagatcctgcct

SEQ ID NO: 3002511 - DNA, 25 bp, Homo sapien
gactcaagtacacatagtcaccagg

SEQ ID NO: 3002512 - DNA, 25 bp, Homo sapien
gcccacgataaagcttttatgagca

SEQ ID NO: 3002513 - DNA, 25 bp, Homo sapien
gatagatgctactgttccgtctggg

SEQ ID NO: 3002514 - DNA, 25 bp, Homo sapien
tgggtcagccttcgcccacgataaa

SEQ ID NO: 3002515 - DNA, 25 bp, Homo sapien
aagcaattagctctggaggtcccca

SEQ ID NO: 3002516 - DNA, 25 bp, Homo sapien
cagagatggaagagtttaatacatc

SEQ ID NO: 3002517 - DNA, 25 bp, Homo sapien
ctgggaaatggtgcttacagagatg

SEQ ID NO: 3002518 - DNA, 25 bp, Homo sapien
cttccttagagtcggtctcctggga

SEQ ID NO: 3002519 - DNA, 25 bp, Homo sapien
tctcttttccgaggccctcagaggg

SEQ ID NO: 3002520 - DNA, 25 bp, Homo sapien
cagaaaccacgtgcctatggacagg

SEQ ID NO: 3002521 - DNA, 25 bp, Homo sapien
cgcaggccgtggaatgcttcccaag

SEQ ID NO: 3002522 - DNA, 25 bp, Homo sapien
ccaggaggcaagtttccaccatgaa

SEQ ID NO: 3002523 - DNA, 25 bp, Homo sapien
tgaaacccactgttgaagaaccgcg

SEQ ID NO: 3002524 - DNA, 25 bp, Homo sapien
ggaatctgcatctccatgccctgaa

SEQ ID NO: 3002525 - DNA, 25 bp, Homo sapien
caggaatctgcatctccatgccctg

SEQ ID NO: 3002526 - DNA, 25 bp, Homo sapien
gaatctgcatctccatgccctgaac

SEQ ID NO: 3002527 - DNA, 25 bp, Homo sapien
cacaggaatctgcatctccatgccc

SEQ ID NO: 3002528 - DNA, 25 bp, Homo sapien
gggctggagctggcgaatagagaag

SEQ ID NO: 3002529 - DNA, 25 bp, Homo sapien
gctggagctggcgaatagagaagct

SEQ ID NO: 3002530 - DNA, 25 bp, Homo sapien
tggagctggcgaatagagaagcttt

SEQ ID NO: 3002531 - DNA, 25 bp, Homo sapien
agagaagcttttgcctcgcccctga

SEQ ID NO: 3002532 - DNA, 25 bp, Homo sapien
gggcgatggtgtcatcataactgcg

SEQ ID NO: 3002533 - DNA, 25 bp, Homo sapien
tgatgtcgtctgcaacagagctgcc

SEQ ID NO: 3002534 - DNA, 25 bp, Homo sapien
tgtcatcataactgcgtagcatgag

SEQ ID NO: 3002535 - DNA, 25 bp, Homo sapien
ctgagtgacaactgatgtcgtctgc

SEQ ID NO: 3002536 - DNA, 25 bp, Homo sapien
cttgtccaagatcatttattgttat

SEQ ID NO: 3002537 - DNA, 25 bp, Homo sapien
ttctctcttaattggattcagcgtt

SEQ ID NO: 3002538 - DNA, 25 bp, Homo sapien
gggattcaggtttgtgcaaagcaca

SEQ ID NO: 3002539 - DNA, 25 bp, Homo sapien
ttggattcagcgtttctggctcctc

SEQ ID NO: 3002540 - DNA, 25 bp, Homo sapien
acggccggctttgatcggagcccct

SEQ ID NO: 3002541 - DNA, 25 bp, Homo sapien
gccggctttgatcggagcccctctt

SEQ ID NO: 3002542 - DNA, 25 bp, Homo sapien
agcagcacggccggctttgatcgga

SEQ ID NO: 3002543 - DNA, 25 bp, Homo sapien
tgacccctgagtccggcctcccgag

SEQ ID NO: 3002544 - DNA, 25 bp, Homo sapien
tccgtgatgcagaagtgcctgagat

SEQ ID NO: 3002545 - DNA, 25 bp, Homo sapien
tgatgcagaagtgcctgagatggtt

SEQ ID NO: 3002546 - DNA, 25 bp, Homo sapien
gccaggtcttccgtgatgcagaagt

SEQ ID NO: 3002547 - DNA, 25 bp, Homo sapien
tcttccgtgatgcagaagtgcctga

SEQ ID NO: 3002548 - DNA, 25 bp, Homo sapien
taatccacatggcagggtccagacg

SEQ ID NO: 3002549 - DNA, 25 bp, Homo sapien
ggtaattggttcttggaccccagca

SEQ ID NO: 3002550 - DNA, 25 bp, Homo sapien
gactaacactgtggatgctgcctgg

SEQ ID NO: 3002551 - DNA, 25 bp, Homo sapien
tgagaacctcattgcccgggatgaa

SEQ ID NO: 3002552 - DNA, 25 bp, Homo sapien
tcgtggaacgccttgtggtggaccc

SEQ ID NO: 3002553 - DNA, 25 bp, Homo sapien
cggcgcccgccttagagatctgatt

SEQ ID NO: 3002554 - DNA, 25 bp, Homo sapien
tctcgtgcagcaaaagacggtccag

SEQ ID NO: 3002555 - DNA, 25 bp, Homo sapien
tgttcgagtagatccacagggtgac

SEQ ID NO: 3002556 - DNA, 25 bp, Homo sapien
cgccgaggacgcatcctcgtcttgg

SEQ ID NO: 3002557 - DNA, 25 bp, Homo sapien
tcgtcttggctgagctccgtgagag

SEQ ID NO: 3002558 - DNA, 25 bp, Homo sapien
ccaagcctggaacccgtcggggatg

SEQ ID NO: 3002559 - DNA, 25 bp, Homo sapien
gccagggtcaaggcccaagcctgga

SEQ ID NO: 3002560 - DNA, 25 bp, Homo sapien
gccaggcaggcgcgccgaggttggg

SEQ ID NO: 3002561 - DNA, 25 bp, Homo sapien
ggccaggcaggcgcgccgaggttgg

SEQ ID NO: 3002562 - DNA, 25 bp, Homo sapien
ggcaggcgcgccgaggttggggggc

SEQ ID NO: 3002563 - DNA, 25 bp, Homo sapien
caggcaggcgcgccgaggttggggg

SEQ ID NO: 3002564 - DNA, 25 bp, Homo sapien
acttggaggctcagatctggcttcc

SEQ ID NO: 3002565 - DNA, 25 bp, Homo sapien
aggctcagatctggcttccagcccc

SEQ ID NO: 3002566 - DNA, 25 bp, Homo sapien
gatgtgcctacaagttgtcctgtga

SEQ ID NO: 3002567 - DNA, 25 bp, Homo sapien
cagatgtgcctacaagttgtcctgt

SEQ ID NO: 3002568 - DNA, 25 bp, Homo sapien
ccccagatgtgcctacaagttgtcc

SEQ ID NO: 3002569 - DNA, 25 bp, Homo sapien
ccagatgtgcctacaagttgtcctg

SEQ ID NO: 3002570 - DNA, 25 bp, Homo sapien
ggcagggcgtcctccacgaagggct

SEQ ID NO: 3002571 - DNA, 25 bp, Homo sapien
ctccacgaagggctggttggccctc

SEQ ID NO: 3002572 - DNA, 25 bp, Homo sapien
ccacgaagggctggttggccctcat

SEQ ID NO: 3002573 - DNA, 25 bp, Homo sapien
ggtgggcagggcgtcctccacgaag

SEQ ID NO: 3002574 - DNA, 25 bp, Homo sapien
tgccagcaccgaagggactgcccct

SEQ ID NO: 3002575 - DNA, 25 bp, Homo sapien
ccccagagcctcgagctgctcaccc

SEQ ID NO: 3002576 - DNA, 25 bp, Homo sapien
gctgctcaccccaacttgccagcac

SEQ ID NO: 3002577 - DNA, 25 bp, Homo sapien
ccccaacttgccagcaccgaaggga

SEQ ID NO: 3002578 - DNA, 25 bp, Homo sapien
aaaatgtgtcccgttatgcaaattt

SEQ ID NO: 3002579 - DNA, 25 bp, Homo sapien
tgtgtcccgttatgcaaatttgctc

SEQ ID NO: 3002580 - DNA, 25 bp, Homo sapien
cagggcccgtggcctctatttccac

SEQ ID NO: 3002581 - DNA, 25 bp, Homo sapien
tgtcccgttatgcaaatttgctccc

SEQ ID NO: 3002582 - DNA, 25 bp, Homo sapien
ggcgacgagaccgtcctcggtggca

SEQ ID NO: 3002583 - DNA, 25 bp, Homo sapien
ccgtggcgacgagaccgtcctcggt

SEQ ID NO: 3002584 - DNA, 25 bp, Homo sapien
ctccgtggcgacgagaccgtcctcg

SEQ ID NO: 3002585 - DNA, 25 bp, Homo sapien
gtggcgacgagaccgtcctcggtgg

SEQ ID NO: 3002586 - DNA, 25 bp, Homo sapien
accagccacgagcccctgccagtct

SEQ ID NO: 3002587 - DNA, 25 bp, Homo sapien
ccaggaggttgagcccaggtagcat

SEQ ID NO: 3002588 - DNA, 25 bp, Homo sapien
ctctcaccagccacgagcccctgcc

SEQ ID NO: 3002589 - DNA, 25 bp, Homo sapien
agccacgagcccctgccagtctgtg

SEQ ID NO: 3002590 - DNA, 25 bp, Homo sapien
taacaggcacgatgtttagagactg

SEQ ID NO: 3002591 - DNA, 25 bp, Homo sapien
gcagagtatcccactgcatggacag

SEQ ID NO: 3002592 - DNA, 25 bp, Homo sapien
gacagcctcggagagtcatcagtgg

SEQ ID NO: 3002593 - DNA, 25 bp, Homo sapien
gaaattggtaacagttgcctcctgg

SEQ ID NO: 3002594 - DNA, 25 bp, Homo sapien
caaattcaattgtgggcgaggtagg

SEQ ID NO: 3002595 - DNA, 25 bp, Homo sapien
cctctgggcgtagagctgtctgtga

SEQ ID NO: 3002596 - DNA, 25 bp, Homo sapien
ttctcttgattgaatcaggcctggc

SEQ ID NO: 3002597 - DNA, 25 bp, Homo sapien
caagggcaaattcaattgtgggcga

SEQ ID NO: 3002598 - DNA, 25 bp, Homo sapien
aacagaagaggctaaagtgggcagg

SEQ ID NO: 3002599 - DNA, 25 bp, Homo sapien
tttcagaggccacgcaggaaacaga

SEQ ID NO: 3002600 - DNA, 25 bp, Homo sapien
agaggccacgcaggaaacagaagag

SEQ ID NO: 3002601 - DNA, 25 bp, Homo sapien
gtacaggtggcaacccaggagccag

SEQ ID NO: 3002602 - DNA, 25 bp, Homo sapien
aagcgaacagcctccagtcagggca

SEQ ID NO: 3002603 - DNA, 25 bp, Homo sapien
tctaacttcagaccaaccagagaga

SEQ ID NO: 3002604 - DNA, 25 bp, Homo sapien
tcccctagccgatcacagtggatga

SEQ ID NO: 3002605 - DNA, 25 bp, Homo sapien
caaacaatccgagaagccaaacaag

SEQ ID NO: 3002606 - DNA, 25 bp, Homo sapien
gaaaggatcttctctctgcatgagg

SEQ ID NO: 3002607 - DNA, 25 bp, Homo sapien
tacagtgcttagctagtgcctggct

SEQ ID NO: 3002608 - DNA, 25 bp, Homo sapien
gagatcaaatgagccagtccaggta

SEQ ID NO: 3002609 - DNA, 25 bp, Homo sapien
gtggaactcggctgggactcaactt

SEQ ID NO: 3002610 - DNA, 25 bp, Homo sapien
tcttggaatttacaagtagttccat

SEQ ID NO: 3002611 - DNA, 25 bp, Homo sapien
tatcctcccagggattggatctgcc

SEQ ID NO: 3002612 - DNA, 25 bp, Homo sapien
tgaaggcctccgatacctgatcctg

SEQ ID NO: 3002613 - DNA, 25 bp, Homo sapien
aaggcagcctacgagagtcctgaag

SEQ ID NO: 3002614 - DNA, 25 bp, Homo sapien
agggattggatctgcctgccgaatg

SEQ ID NO: 3002615 - DNA, 25 bp, Homo sapien
ttatggctcctaaaacagggaaggc

SEQ ID NO: 3002616 - DNA, 25 bp, Homo sapien
tttgttatggctcctaaaacaggga

SEQ ID NO: 3002617 - DNA, 25 bp, Homo sapien
tgttatggctcctaaaacagggaag

SEQ ID NO: 3002618 - DNA, 25 bp, Homo sapien
tatggctcctaaaacagggaaggca

SEQ ID NO: 3002619 - DNA, 25 bp, Homo sapien
tctgtaacacggtccgacaggagtc

SEQ ID NO: 3002620 - DNA, 25 bp, Homo sapien
ggtgatcatggtctgtaacacggtc

SEQ ID NO: 3002621 - DNA, 25 bp, Homo sapien
gaactggtcggtgatcatggtctgt

SEQ ID NO: 3002622 - DNA, 25 bp, Homo sapien
aggagtcatgacacggctggctcca

SEQ ID NO: 3002623 - DNA, 25 bp, Homo sapien
cccctttggctggtgcattctcttg

SEQ ID NO: 3002624 - DNA, 25 bp, Homo sapien
agcatagcccaagaagttcccgagc

SEQ ID NO: 3002625 - DNA, 25 bp, Homo sapien
gcaggcctgagcaacgcccctggag

SEQ ID NO: 3002626 - DNA, 25 bp, Homo sapien
gattctttttaaaccgcaggcctga

SEQ ID NO: 3002627 - DNA, 25 bp, Homo sapien
gacgcagcgtgtggcatgcggcaca

SEQ ID NO: 3002628 - DNA, 25 bp, Homo sapien
tctggcagcgtgtgatgagagacag

SEQ ID NO: 3002629 - DNA, 25 bp, Homo sapien
tgtggcatgcggcacatgccagcga

SEQ ID NO: 3002630 - DNA, 25 bp, Homo sapien
ggctgcagcgccagagcatagccat

SEQ ID NO: 3002631 - DNA, 25 bp, Homo sapien
tgttccggggctgtgctagcaagtc

SEQ ID NO: 3002632 - DNA, 25 bp, Homo sapien
gcaagaggggcaggtataggtggtg

SEQ ID NO: 3002633 - DNA, 25 bp, Homo sapien
tataggtggtggagccagtgtgttc

SEQ ID NO: 3002634 - DNA, 25 bp, Homo sapien
ttccggggctgtgctagcaagtcca

SEQ ID NO: 3002635 - DNA, 25 bp, Homo sapien
ctccaggtccgcaagctgaggcgga

SEQ ID NO: 3002636 - DNA, 25 bp, Homo sapien
agagccatgtaaccgcccagagggc

SEQ ID NO: 3002637 - DNA, 25 bp, Homo sapien
ggtctccatcaacagagccatgtaa

SEQ ID NO: 3002638 - DNA, 25 bp, Homo sapien
atcaacagagccatgtaaccgccca

SEQ ID NO: 3002639 - DNA, 25 bp, Homo sapien
ggctcgtgctgggagtttgggtcat

SEQ ID NO: 3002640 - DNA, 25 bp, Homo sapien
cgagggctcgtgctgggagtttggg

SEQ ID NO: 3002641 - DNA, 25 bp, Homo sapien
gaggaacgagggctcgtgctgggag

SEQ ID NO: 3002642 - DNA, 25 bp, Homo sapien
gaacgagggctcgtgctgggagttt

SEQ ID NO: 3002643 - DNA, 25 bp, Homo sapien
gctttgggcgcctacctagaatcca

SEQ ID NO: 3002644 - DNA, 25 bp, Homo sapien
gagaatctgagtgtcctatacaggt

SEQ ID NO: 3002645 - DNA, 25 bp, Homo sapien
ggcctcctgtatcattttcgcttgg

SEQ ID NO: 3002646 - DNA, 25 bp, Homo sapien
tccctgggcattagcctcaggcatg

SEQ ID NO: 3002647 - DNA, 25 bp, Homo sapien
caggcccaagtttctcagacccggg

SEQ ID NO: 3002648 - DNA, 25 bp, Homo sapien
ggtgtgtctgcgaagcggtttctcc

SEQ ID NO: 3002649 - DNA, 25 bp, Homo sapien
cactgctcggttgctgaaaggactt

SEQ ID NO: 3002650 - DNA, 25 bp, Homo sapien
gggcaagtttgcacgctccaggccc

SEQ ID NO: 3002651 - DNA, 25 bp, Homo sapien
cgcctcagccgctcccgcagggccg

SEQ ID NO: 3002652 - DNA, 25 bp, Homo sapien
agggccggggcagccagccgcaggc

SEQ ID NO: 3002653 - DNA, 25 bp, Homo sapien
gcaggcgccgcggcttctcagcctc

SEQ ID NO: 3002654 - DNA, 25 bp, Homo sapien
ggcggggcgccacagcctgctcggg

SEQ ID NO: 3002655 - DNA, 25 bp, Homo sapien
acactggcggcacggctttcgcgtc

SEQ ID NO: 3002656 - DNA, 25 bp, Homo sapien
cgtctagctacggtggtcgcgaagc

SEQ ID NO: 3002657 - DNA, 25 bp, Homo sapien
tccgctcccagcataatgaaagttt

SEQ ID NO: 3002658 - DNA, 25 bp, Homo sapien
aagccagctgtcctcaagttgagct

SEQ ID NO: 3002659 - DNA, 25 bp, Homo sapien
cggagcacttcgcaggcggttttga

SEQ ID NO: 3002660 - DNA, 25 bp, Homo sapien
cgcgcgtttgcaggaccgagcgatc

SEQ ID NO: 3002661 - DNA, 25 bp, Homo sapien
gattcaaatccctgggcgccagctg

SEQ ID NO: 3002662 - DNA, 25 bp, Homo sapien
agctgcagctaatccgagcgcgtcg

SEQ ID NO: 3002663 - DNA, 25 bp, Homo sapien
gagtctgtctcgatttctccagcgg

SEQ ID NO: 3002664 - DNA, 25 bp, Homo sapien
tacccgatggacttctacgctggca

SEQ ID NO: 3002665 - DNA, 25 bp, Homo sapien
tgaggtaacaccaagctctgggaga

SEQ ID NO: 3002666 - DNA, 25 bp, Homo sapien
caggccgtcgtgaggactgaattca

SEQ ID NO: 3002667 - DNA, 25 bp, Homo sapien
gcgccgagctcgtgtgcctcagcgg

SEQ ID NO: 3002668 - DNA, 25 bp, Homo sapien
gccgagctcgtgtgcctcagcggcc

SEQ ID NO: 3002669 - DNA, 25 bp, Homo sapien
gtcgcgccgagctcgtgtgcctcag

SEQ ID NO: 3002670 - DNA, 25 bp, Homo sapien
agctcgtgtgcctcagcggcccgca

SEQ ID NO: 3002671 - DNA, 25 bp, Homo sapien
agcctcgaggctggtggttttcaga

SEQ ID NO: 3002672 - DNA, 25 bp, Homo sapien
cttgccacggtttatcctcttggtg

SEQ ID NO: 3002673 - DNA, 25 bp, Homo sapien
ttttctccgcattggaagagcccgc

SEQ ID NO: 3002674 - DNA, 25 bp, Homo sapien
gcaggaggccgacgttttctccgca

SEQ ID NO: 3002675 - DNA, 25 bp, Homo sapien
ggagcacaaggccttaatggacatt

SEQ ID NO: 3002676 - DNA, 25 bp, Homo sapien
gcgtcaggcctacctcaagttcttg

SEQ ID NO: 3002677 - DNA, 25 bp, Homo sapien
catgaatatggttggagagccctgg

SEQ ID NO: 3002678 - DNA, 25 bp, Homo sapien
gtgcgcctcaccagaaccagttaag

SEQ ID NO: 3002679 - DNA, 25 bp, Homo sapien
acaaaacagaattatccgcccagag

SEQ ID NO: 3002680 - DNA, 25 bp, Homo sapien
gactaatatcccttacattaccgaa

SEQ ID NO: 3002681 - DNA, 25 bp, Homo sapien
cccagagacctagttactgggtgtg

SEQ ID NO: 3002682 - DNA, 25 bp, Homo sapien
tgggttcctcactacagagattagc

SEQ ID NO: 3002683 - DNA, 25 bp, Homo sapien
gaagagattattatcccgttttaca

SEQ ID NO: 3002684 - DNA, 25 bp, Homo sapien
gataatgccaggttggacctctggc

SEQ ID NO: 3002685 - DNA, 25 bp, Homo sapien
ggccccttaaccaccagttgctgat

SEQ ID NO: 3002686 - DNA, 25 bp, Homo sapien
acacccagcagtccactgcagtcca

SEQ ID NO: 3002687 - DNA, 25 bp, Homo sapien
cacgagtgtcttagaagtacttcac

SEQ ID NO: 3002688 - DNA, 25 bp, Homo sapien
tgtgggtgttgattaactgggaaac

SEQ ID NO: 3002689 - DNA, 25 bp, Homo sapien
ctgggaaaccggcacgagtgtctta

SEQ ID NO: 3002690 - DNA, 25 bp, Homo sapien
gaggtgggatggctagcatgtgggt

SEQ ID NO: 3002691 - DNA, 25 bp, Homo sapien
aagagtttactcttcgcccaatgcc

SEQ ID NO: 3002692 - DNA, 25 bp, Homo sapien
tgttcagacgcttcgcggaccaggt

SEQ ID NO: 3002693 - DNA, 25 bp, Homo sapien
tccagcacctagagataggctgagg

SEQ ID NO: 3002694 - DNA, 25 bp, Homo sapien
gaaactgtctcagattggaatccag

SEQ ID NO: 3002695 - DNA, 25 bp, Homo sapien
ccttctctcgccgagccctggctgg

SEQ ID NO: 3002696 - DNA, 25 bp, Homo sapien
tctctcgccgagccctggctgggat

SEQ ID NO: 3002697 - DNA, 25 bp, Homo sapien
ttctctcgccgagccctggctggga

SEQ ID NO: 3002698 - DNA, 25 bp, Homo sapien
tctcgccgagccctggctgggatac

SEQ ID NO: 3002699 - DNA, 25 bp, Homo sapien
aggacgcgcgcgctcgagcctcggt

SEQ ID NO: 3002700 - DNA, 25 bp, Homo sapien
gagcctcggtggactcagccgccgg

SEQ ID NO: 3002701 - DNA, 25 bp, Homo sapien
cacccgcgcgggcacgtgggatctt

SEQ ID NO: 3002702 - DNA, 25 bp, Homo sapien
agacgcactccgcaggacgcgcgcg

SEQ ID NO: 3002703 - DNA, 25 bp, Homo sapien
gcgcgtgggcgtgctgcggggcgac

SEQ ID NO: 3002704 - DNA, 25 bp, Homo sapien
cgcgtgggcgtgctgcggggcgacc

SEQ ID NO: 3002705 - DNA, 25 bp, Homo sapien
gcgtgggcgtgctgcggggcgacca

SEQ ID NO: 3002706 - DNA, 25 bp, Homo sapien
cgtgggcgtgctgcggggcgaccat

SEQ ID NO: 3002707 - DNA, 25 bp, Homo sapien
taacaatcgaaagccacggttgccc

SEQ ID NO: 3002708 - DNA, 25 bp, Homo sapien
aatcgaaagccacggttgccctgga

SEQ ID NO: 3002709 - DNA, 25 bp, Homo sapien
ccacagtaacaatcgaaagccacgg

SEQ ID NO: 3002710 - DNA, 25 bp, Homo sapien
ctccagttcccacagtaacaatcga

SEQ ID NO: 3002711 - DNA, 25 bp, Homo sapien
ccgtgactggagactgttactgagg

SEQ ID NO: 3002712 - DNA, 25 bp, Homo sapien
cggcccgggcagtaagcagtctaga

SEQ ID NO: 3002713 - DNA, 25 bp, Homo sapien
ccaggcgtcggtggccgtgactgga

SEQ ID NO: 3002714 - DNA, 25 bp, Homo sapien
tctagagccaaggtgccggcgcgct

SEQ ID NO: 3002715 - DNA, 25 bp, Homo sapien
cgcggctcctacacactgacgcgct

SEQ ID NO: 3002716 - DNA, 25 bp, Homo sapien
tcgtgcggcggctcattcatgcggc

SEQ ID NO: 3002717 - DNA, 25 bp, Homo sapien
ttataggcgcgcgtagtactcgtgc

SEQ ID NO: 3002718 - DNA, 25 bp, Homo sapien
cgcgtagtactcgtgcggcggctca

SEQ ID NO: 3002719 - DNA, 25 bp, Homo sapien
ggaatcaggcggactcgtttggacc

SEQ ID NO: 3002720 - DNA, 25 bp, Homo sapien
cgtgaagtcgcctgcgcagcaaagg

SEQ ID NO: 3002721 - DNA, 25 bp, Homo sapien
gtttggaccgaagcctccgccaggc

SEQ ID NO: 3002722 - DNA, 25 bp, Homo sapien
gccaggcaccgaagccgtgaagtcg

SEQ ID NO: 3002723 - DNA, 25 bp, Homo sapien
tggcgttcagggctccgggtgtcgt

SEQ ID NO: 3002724 - DNA, 25 bp, Homo sapien
gggctttcgacatgccccccaggtg

SEQ ID NO: 3002725 - DNA, 25 bp, Homo sapien
ggccgcctcgggtgcatcttctggc

SEQ ID NO: 3002726 - DNA, 25 bp, Homo sapien
ggtgtcgtccctttcggactcagga

SEQ ID NO: 3002727 - DNA, 25 bp, Homo sapien
cttccgacccatttcgcggcggcag

SEQ ID NO: 3002728 - DNA, 25 bp, Homo sapien
tagtctcctctatcgctggatgaag

SEQ ID NO: 3002729 - DNA, 25 bp, Homo sapien
gacggcgacgactacaagagcagca

SEQ ID NO: 3002730 - DNA, 25 bp, Homo sapien
tagctatggcgacgagctgggccgg

SEQ ID NO: 3002731 - DNA, 25 bp, Homo sapien
tcactgcttcgtgccttagctcggg

SEQ ID NO: 3002732 - DNA, 25 bp, Homo sapien
aggtgctgagccagggcgctcacct

SEQ ID NO: 3002733 - DNA, 25 bp, Homo sapien
gcgctggagagcctctacccgctgg

SEQ ID NO: 3002734 - DNA, 25 bp, Homo sapien
tatttttgatatcagctttgaccaa

SEQ ID NO: 3002735 - DNA, 25 bp, Homo sapien
aaggaaacaaaaccagtgctgcaaa

SEQ ID NO: 3002736 - DNA, 25 bp, Homo sapien
tattaaggaaacaaaaccagtgctg

SEQ ID NO: 3002737 - DNA, 25 bp, Homo sapien
attaaggaaacaaaaccagtgctgc

SEQ ID NO: 3002738 - DNA, 25 bp, Homo sapien
ttaaggaaacaaaaccagtgctgca

SEQ ID NO: 3002739 - DNA, 25 bp, Homo sapien
tggtaaggaagcctccccactgagg

SEQ ID NO: 3002740 - DNA, 25 bp, Homo sapien
tgagaacccctatgacgaggaaccg

SEQ ID NO: 3002741 - DNA, 25 bp, Homo sapien
tagaaaccaggttaggcgacggtgc

SEQ ID NO: 3002742 - DNA, 25 bp, Homo sapien
tggtcccattaagatttgcccctgg

SEQ ID NO: 3002743 - DNA, 25 bp, Homo sapien
gacatgctgtctagaagccgacttg

SEQ ID NO: 3002744 - DNA, 25 bp, Homo sapien
tgtgatttcactgcatctgacggaa

SEQ ID NO: 3002745 - DNA, 25 bp, Homo sapien
tccctcagccttggaatgagacggg

SEQ ID NO: 3002746 - DNA, 25 bp, Homo sapien
tgggcatcttccgtgctacactggg

SEQ ID NO: 3002747 - DNA, 25 bp, Homo sapien
aaggctgggatgtcccgtacaggaa

SEQ ID NO: 3002748 - DNA, 25 bp, Homo sapien
ggaacattccttgtgagcgccttca

SEQ ID NO: 3002749 - DNA, 25 bp, Homo sapien
aggttccggtcatccgtcaacagca

SEQ ID NO: 3002750 - DNA, 25 bp, Homo sapien
agcgccttcacacgcaggttccggt

SEQ ID NO: 3002751 - DNA, 25 bp, Homo sapien
tgggcatgagagagcagaaggctgt

SEQ ID NO: 3002752 - DNA, 25 bp, Homo sapien
tgtgggcatgagagagcagaaggct

SEQ ID NO: 3002753 - DNA, 25 bp, Homo sapien
ggcatgagagagcagaaggctgtca

SEQ ID NO: 3002754 - DNA, 25 bp, Homo sapien
ctgtgggcatgagagagcagaaggc

SEQ ID NO: 3002755 - DNA, 25 bp, Homo sapien
taatccatgtatacaggcgaaagtc

SEQ ID NO: 3002756 - DNA, 25 bp, Homo sapien
gatcatattagccacactttcagag

SEQ ID NO: 3002757 - DNA, 25 bp, Homo sapien
gaagctttacgcatccagaggcaga

SEQ ID NO: 3002758 - DNA, 25 bp, Homo sapien
tctccgtcttgtaccccagggaaga

SEQ ID NO: 3002759 - DNA, 25 bp, Homo sapien
gcttgggtggcaggtctactcgtca

SEQ ID NO: 3002760 - DNA, 25 bp, Homo sapien
gagagaatttaagccagggacaagc

SEQ ID NO: 3002761 - DNA, 25 bp, Homo sapien
aagtgacatccctaccctgacaggc

SEQ ID NO: 3002762 - DNA, 25 bp, Homo sapien
tgggcatttcctgacagaggtccag

SEQ ID NO: 3002763 - DNA, 25 bp, Homo sapien
caaatatccatgtcggacctgagca

SEQ ID NO: 3002764 - DNA, 25 bp, Homo sapien
tccatgtcggacctgagcagtctca

SEQ ID NO: 3002765 - DNA, 25 bp, Homo sapien
gggctgcaaatatccatgtcggacc

SEQ ID NO: 3002766 - DNA, 25 bp, Homo sapien
tcggacctgagcagtctcaggcttg

SEQ ID NO: 3002767 - DNA, 25 bp, Homo sapien
tactcagagactactcagctgcctg

SEQ ID NO: 3002768 - DNA, 25 bp, Homo sapien
ggtgaggggatactcagagactact

SEQ ID NO: 3002769 - DNA, 25 bp, Homo sapien
gggatactcagagactactcagctg

SEQ ID NO: 3002770 - DNA, 25 bp, Homo sapien
ggcccctctgcagataagtgtggct

SEQ ID NO: 3002771 - DNA, 25 bp, Homo sapien
tgtcattctgataggggcggtcccc

SEQ ID NO: 3002772 - DNA, 25 bp, Homo sapien
gactagtaggaccaaagccaaaatg

SEQ ID NO: 3002773 - DNA, 25 bp, Homo sapien
gggaggactagtaggaccaaagcca

SEQ ID NO: 3002774 - DNA, 25 bp, Homo sapien
tggcaatgggttcctgtaggctgtt

SEQ ID NO: 3002775 - DNA, 25 bp, Homo sapien
caggacaggatgagatcatcgttgt

SEQ ID NO: 3002776 - DNA, 25 bp, Homo sapien
gctggcgggcatgaagtccttagcc

SEQ ID NO: 3002777 - DNA, 25 bp, Homo sapien
gtccttagccttgtctttgcagtag

SEQ ID NO: 3002778 - DNA, 25 bp, Homo sapien
tagccttgtctttgcagtagtggag

SEQ ID NO: 3002779 - DNA, 25 bp, Homo sapien
tggaggaagacgtgtgtgagaagca

SEQ ID NO: 3002780 - DNA, 25 bp, Homo sapien
ggaggaagacgtgtgtgagaagcac

SEQ ID NO: 3002781 - DNA, 25 bp, Homo sapien
aggaagacgtgtgtgagaagcacca

SEQ ID NO: 3002782 - DNA, 25 bp, Homo sapien
gaggaagacgtgtgtgagaagcacc

SEQ ID NO: 3002783 - DNA, 25 bp, Homo sapien
atctgactgtgctacgagtgactta

SEQ ID NO: 3002784 - DNA, 25 bp, Homo sapien
cccatgcatgcgctggccctgcctg

SEQ ID NO: 3002785 - DNA, 25 bp, Homo sapien
gaggaggagggatcctctgcctcgg

SEQ ID NO: 3002786 - DNA, 25 bp, Homo sapien
tgactgtgctacgagtgacttaggg

SEQ ID NO: 3002787 - DNA, 25 bp, Homo sapien
gcccaggctgatgggcctccttcag

SEQ ID NO: 3002788 - DNA, 25 bp, Homo sapien
ggctgtgggctttcccttcctgcca

SEQ ID NO: 3002789 - DNA, 25 bp, Homo sapien
gagaccttgttctggaagctggctg

SEQ ID NO: 3002790 - DNA, 25 bp, Homo sapien
ctccatggtggctggccctcagctg

SEQ ID NO: 3002791 - DNA, 25 bp, Homo sapien
ctcactgcggaaggcgatggattcg

SEQ ID NO: 3002792 - DNA, 25 bp, Homo sapien
ttctcttgtaccacacgggcgtagc

SEQ ID NO: 3002793 - DNA, 25 bp, Homo sapien
gagtcccgactctcgaatcgctgct

SEQ ID NO: 3002794 - DNA, 25 bp, Homo sapien
gattcgagttcattgccacggctgg

SEQ ID NO: 3002795 - DNA, 25 bp, Homo sapien
agcagcactgccgttatctgccagg

SEQ ID NO: 3002796 - DNA, 25 bp, Homo sapien
gaccaaaggcatctaaccacttcaa

SEQ ID NO: 3002797 - DNA, 25 bp, Homo sapien
tacaagacaatcagaccaaaggcat

SEQ ID NO: 3002798 - DNA, 25 bp, Homo sapien
gccgttatctgccagggctgagtgt

SEQ ID NO: 3002799 - DNA, 25 bp, Homo sapien
caatgaagccgttggtgtctggtac

SEQ ID NO: 3002800 - DNA, 25 bp, Homo sapien
tgtctggtacgaggaacaaaggtct

SEQ ID NO: 3002801 - DNA, 25 bp, Homo sapien
gcctcatctgactgtggtcctccag

SEQ ID NO: 3002802 - DNA, 25 bp, Homo sapien
ggcaccaccaggatgtacttcctgc

SEQ ID NO: 3002803 - DNA, 25 bp, Homo sapien
cagggaagttcccgagagatgcaca

SEQ ID NO: 3002804 - DNA, 25 bp, Homo sapien
aagcacgtggcccagcgcttgcctt

SEQ ID NO: 3002805 - DNA, 25 bp, Homo sapien
ttctcagggaagttcccgagagatg

SEQ ID NO: 3002806 - DNA, 25 bp, Homo sapien
catttctcagggaagttcccgagag

SEQ ID NO: 3002807 - DNA, 25 bp, Homo sapien
acgtgtggcagcggcccttcgagac

SEQ ID NO: 3002808 - DNA, 25 bp, Homo sapien
ggcccttcgagaccggctctgggta

SEQ ID NO: 3002809 - DNA, 25 bp, Homo sapien
gagaccggctctgggtatgtctgcc

SEQ ID NO: 3002810 - DNA, 25 bp, Homo sapien
tggcagcggcccttcgagaccggct

SEQ ID NO: 3002811 - DNA, 25 bp, Homo sapien
catggccactactgcactgcttcct

SEQ ID NO: 3002812 - DNA, 25 bp, Homo sapien
catggccaagaatcgaactgatctg

SEQ ID NO: 3002813 - DNA, 25 bp, Homo sapien
ggaccatggccaagaatcgaactga

SEQ ID NO: 3002814 - DNA, 25 bp, Homo sapien
caagaatcgaactgatctgctggca

SEQ ID NO: 3002815 - DNA, 25 bp, Homo sapien
tggccaagaatcgaactgatctgct

SEQ ID NO: 3002816 - DNA, 25 bp, Homo sapien
gggaggtggagggcacccacacaaa

SEQ ID NO: 3002817 - DNA, 25 bp, Homo sapien
agtagggaggtggagggcacccaca

SEQ ID NO: 3002818 - DNA, 25 bp, Homo sapien
ggaggtggagggcacccacacaaac

SEQ ID NO: 3002819 - DNA, 25 bp, Homo sapien
ctgagtagggaggtggagggcaccc

SEQ ID NO: 3002820 - DNA, 25 bp, Homo sapien
ggcagctgtgcacggcgcctgtgcc

SEQ ID NO: 3002821 - DNA, 25 bp, Homo sapien
tgccggccgtcacgtcccattccga

SEQ ID NO: 3002822 - DNA, 25 bp, Homo sapien
tcacgtcccattccgatctctgggt

SEQ ID NO: 3002823 - DNA, 25 bp, Homo sapien
tgtgcacggcgcctgtgccggccgt

SEQ ID NO: 3002824 - DNA, 25 bp, Homo sapien
agtccccactcgcagccatgggaca

SEQ ID NO: 3002825 - DNA, 25 bp, Homo sapien
cacaggatgcgcagggagtgaaaaa

SEQ ID NO: 3002826 - DNA, 25 bp, Homo sapien
gccaagtccccactcgcagccatgg

SEQ ID NO: 3002827 - DNA, 25 bp, Homo sapien
agtgaaaaagtgatgtcggtgggga

SEQ ID NO: 3002828 - DNA, 25 bp, Homo sapien
cttggggagcaggggaagcatgccg

SEQ ID NO: 3002829 - DNA, 25 bp, Homo sapien
cacagaagagcttaggcggcccagg

SEQ ID NO: 3002830 - DNA, 25 bp, Homo sapien
cagaagagcttaggcggcccagggg

SEQ ID NO: 3002831 - DNA, 25 bp, Homo sapien
gctcacagaagagcttaggcggccc

SEQ ID NO: 3002832 - DNA, 25 bp, Homo sapien
ctcacagaagagcttaggcggccca

SEQ ID NO: 3002833 - DNA, 25 bp, Homo sapien
tcttttcctggcgacgctgctgctc

SEQ ID NO: 3002834 - DNA, 25 bp, Homo sapien
ggcgacgctgctgctcagctatctt

SEQ ID NO: 3002835 - DNA, 25 bp, Homo sapien
tcctggcgacgctgctgctcagcta

SEQ ID NO: 3002836 - DNA, 25 bp, Homo sapien
ctggatcttttcctggcgacgctgc

SEQ ID NO: 3002837 - DNA, 25 bp, Homo sapien
tcttcctggtacacactcacaaagt

SEQ ID NO: 3002838 - DNA, 25 bp, Homo sapien
cactcacaaagtcaaactttaggcc

SEQ ID NO: 3002839 - DNA, 25 bp, Homo sapien
ctggtacacactcacaaagtcaaac

SEQ ID NO: 3002840 - DNA, 25 bp, Homo sapien
tgtgttcttcctggtacacactcac

SEQ ID NO: 3002841 - DNA, 25 bp, Homo sapien
gcctggtgtgggtcacaacctttgt

SEQ ID NO: 3002842 - DNA, 25 bp, Homo sapien
gggtcacaacctttgtctggtcaat

SEQ ID NO: 3002843 - DNA, 25 bp, Homo sapien
ggtgtgggtcacaacctttgtctgg

SEQ ID NO: 3002844 - DNA, 25 bp, Homo sapien
caggagactcgtgggaaaaggaaga

SEQ ID NO: 3002845 - DNA, 25 bp, Homo sapien
aaaagctgaagccacgagcagaatg

SEQ ID NO: 3002846 - DNA, 25 bp, Homo sapien
acagcgggctcttcccgcatagtac

SEQ ID NO: 3002847 - DNA, 25 bp, Homo sapien
tgccacagcgggctcttcccgcata

SEQ ID NO: 3002848 - DNA, 25 bp, Homo sapien
aagctgaagccacgagcagaatggg

SEQ ID NO: 3002849 - DNA, 25 bp, Homo sapien
tccacccttgaatgccagcagaggc

SEQ ID NO: 3002850 - DNA, 25 bp, Homo sapien
tcatcttccagtcgtgttccctctt

SEQ ID NO: 3002851 - DNA, 25 bp, Homo sapien
agtcgtgttccctcttggcttccca

SEQ ID NO: 3002852 - DNA, 25 bp, Homo sapien
actgacacatactttccacccttga

SEQ ID NO: 3002853 - DNA, 25 bp, Homo sapien
tgtgacccttttgcagtcagctgca

SEQ ID NO: 3002854 - DNA, 25 bp, Homo sapien
cttcagcactgtgacccttttgcag

SEQ ID NO: 3002855 - DNA, 25 bp, Homo sapien
agcactgtgacccttttgcagtcag

SEQ ID NO: 3002856 - DNA, 25 bp, Homo sapien
actgtgacccttttgcagtcagctg

SEQ ID NO: 3002857 - DNA, 25 bp, Homo sapien
gagagggagagaagaaaaacagcat

SEQ ID NO: 3002858 - DNA, 25 bp, Homo sapien
tgagagggagagaagaaaaacagca

SEQ ID NO: 3002859 - DNA, 25 bp, Homo sapien
gtgagagggagagaagaaaaacagc

SEQ ID NO: 3002860 - DNA, 25 bp, Homo sapien
gggtgagagggagagaagaaaaaca

SEQ ID NO: 3002861 - DNA, 25 bp, Homo sapien
ctctcctccacacccgtttgcttgg

SEQ ID NO: 3002862 - DNA, 25 bp, Homo sapien
ctcctccacacccgtttgcttggct

SEQ ID NO: 3002863 - DNA, 25 bp, Homo sapien
tctcctccacacccgtttgcttggc

SEQ ID NO: 3002864 - DNA, 25 bp, Homo sapien
cgaaatgagtaatagcctggcaggc

SEQ ID NO: 3002865 - DNA, 25 bp, Homo sapien
cagtaggctcacagtaaagacggac

SEQ ID NO: 3002866 - DNA, 25 bp, Homo sapien
ggaaataaatgagcaccgctgtgca

SEQ ID NO: 3002867 - DNA, 25 bp, Homo sapien
gagcagatgaagcaggcatgaccca

SEQ ID NO: 3002868 - DNA, 25 bp, Homo sapien
actgcttgcactatggagaattatg

SEQ ID NO: 3002869 - DNA, 25 bp, Homo sapien
tgcttgcactatggagaattatgta

SEQ ID NO: 3002870 - DNA, 25 bp, Homo sapien
agctactgcttgcactatggagaat

SEQ ID NO: 3002871 - DNA, 25 bp, Homo sapien
cactatggagaattatgtaatgggt

SEQ ID NO: 3002872 - DNA, 25 bp, Homo sapien
aagaggacagaggaaaagcttgcaa

SEQ ID NO: 3002873 - DNA, 25 bp, Homo sapien
gggagctaaggagtgagaagaggac

SEQ ID NO: 3002874 - DNA, 25 bp, Homo sapien
acagaggaaaagcttgcaattgtcc

SEQ ID NO: 3002875 - DNA, 25 bp, Homo sapien
aaaagcttgcaattgtccttggcct

SEQ ID NO: 3002876 - DNA, 25 bp, Homo sapien
ctggacgatgagaggtacactggca

SEQ ID NO: 3002877 - DNA, 25 bp, Homo sapien
gacgatgagaggtacactggcaccc

SEQ ID NO: 3002878 - DNA, 25 bp, Homo sapien
cccctgctaagtgtgcagaggaaac

SEQ ID NO: 3002879 - DNA, 25 bp, Homo sapien
gatgagaggtacactggcacccctg

SEQ ID NO: 3002880 - DNA, 25 bp, Homo sapien
tattccatggacacaagcaacgagg

SEQ ID NO: 3002881 - DNA, 25 bp, Homo sapien
gctacatggtatgctgcgtggctaa

SEQ ID NO: 3002882 - DNA, 25 bp, Homo sapien
aaagcatggtttctggccgacaggg

SEQ ID NO: 3002883 - DNA, 25 bp, Homo sapien
gtcctttgcaatccaagcagcaggg

SEQ ID NO: 3002884 - DNA, 25 bp, Homo sapien
gttttctccaaacaggcttcttgga

SEQ ID NO: 3002885 - DNA, 25 bp, Homo sapien
caggcttcttggaaggcacaaccat

SEQ ID NO: 3002886 - DNA, 25 bp, Homo sapien
ccgttttctccaaacaggcttcttg

SEQ ID NO: 3002887 - DNA, 25 bp, Homo sapien
caaacaggcttcttggaaggcacaa

SEQ ID NO: 3002888 - DNA, 25 bp, Homo sapien
gaactagcctatccatagctcggga

SEQ ID NO: 3002889 - DNA, 25 bp, Homo sapien
ctatccatagctcgggataacgtgt

SEQ ID NO: 3002890 - DNA, 25 bp, Homo sapien
taacgaaaacgaactagcctatcca

SEQ ID NO: 3002891 - DNA, 25 bp, Homo sapien
gctcaatcagtgtcagttctccctt

SEQ ID NO: 3002892 - DNA, 25 bp, Homo sapien
tccaggtacttatgaacactgagtt

SEQ ID NO: 3002893 - DNA, 25 bp, Homo sapien
ttttcaaaggtgcaaacactactac

SEQ ID NO: 3002894 - DNA, 25 bp, Homo sapien
tgtgtaagtgttccaggtacttatg

SEQ ID NO: 3002895 - DNA, 25 bp, Homo sapien
aattactgctttaaaggatggaagg

SEQ ID NO: 3002896 - DNA, 25 bp, Homo sapien
agtgccatcggccttccgggacgta

SEQ ID NO: 3002897 - DNA, 25 bp, Homo sapien
gccatcggccttccgggacgtaata

SEQ ID NO: 3002898 - DNA, 25 bp, Homo sapien
tggaagagtgccatcggccttccgg

SEQ ID NO: 3002899 - DNA, 25 bp, Homo sapien
gaagagtgccatcggccttccggga

SEQ ID NO: 3002900 - DNA, 25 bp, Homo sapien
cagttgtgagtgaccacgtctgacc

SEQ ID NO: 3002901 - DNA, 25 bp, Homo sapien
tttctcccatggaactgacgctttg

SEQ ID NO: 3002902 - DNA, 25 bp, Homo sapien
ggaaaggatcgttctgccactgagc

SEQ ID NO: 3002903 - DNA, 25 bp, Homo sapien
tctgggcagtcatcttggaaaggag

SEQ ID NO: 3002904 - DNA, 25 bp, Homo sapien
aaattctgggatcttctctctaggc

SEQ ID NO: 3002905 - DNA, 25 bp, Homo sapien
gcagggatctagacctctcgggagt

SEQ ID NO: 3002906 - DNA, 25 bp, Homo sapien
tcttcccatgggtgtgctgacagct

SEQ ID NO: 3002907 - DNA, 25 bp, Homo sapien
gcccagactctatgcaggattccta

SEQ ID NO: 3002908 - DNA, 25 bp, Homo sapien
gacatggcatcattgcagttcagtg

SEQ ID NO: 3002909 - DNA, 25 bp, Homo sapien
ggcacaagcagagataaatagacct

SEQ ID NO: 3002910 - DNA, 25 bp, Homo sapien
aaatttaatagtaatggcacaagca

SEQ ID NO: 3002911 - DNA, 25 bp, Homo sapien
gaaccacagacccaagtgtgaatgg

SEQ ID NO: 3002912 - DNA, 25 bp, Homo sapien
cataaggattctagcgtttgtcgta

SEQ ID NO: 3002913 - DNA, 25 bp, Homo sapien
gtaccaaagcaatccagcagaggca

SEQ ID NO: 3002914 - DNA, 25 bp, Homo sapien
aaagaacagaaagcatgacacccct

SEQ ID NO: 3002915 - DNA, 25 bp, Homo sapien
taatttgaagaccaggcacactggc

SEQ ID NO: 3002916 - DNA, 25 bp, Homo sapien
acactgcagccttgccgtgcacggc

SEQ ID NO: 3002917 - DNA, 25 bp, Homo sapien
tgcagccttgccgtgcacggctgca

SEQ ID NO: 3002918 - DNA, 25 bp, Homo sapien
tgccgtgcacggctgcaagtagctg

SEQ ID NO: 3002919 - DNA, 25 bp, Homo sapien
ccttgccgtgcacggctgcaagtag

SEQ ID NO: 3002920 - DNA, 25 bp, Homo sapien
aaaggcagtacgacggaaagaggca

SEQ ID NO: 3002921 - DNA, 25 bp, Homo sapien
aaggcagtacgacggaaagaggcag

SEQ ID NO: 3002922 - DNA, 25 bp, Homo sapien
tcctccgcagagagtcgtaacagag

SEQ ID NO: 3002923 - DNA, 25 bp, Homo sapien
gggcaggccagggaacaaagttcca

SEQ ID NO: 3002924 - DNA, 25 bp, Homo sapien
cattttggtagtgcggtgacagatc

SEQ ID NO: 3002925 - DNA, 25 bp, Homo sapien
tgaaggccagacattaccagcactc

SEQ ID NO: 3002926 - DNA, 25 bp, Homo sapien
caaggcctctgaagacgtcactacg

SEQ ID NO: 3002927 - DNA, 25 bp, Homo sapien
tggaatctagctggatgcaatggct

SEQ ID NO: 3002928 - DNA, 25 bp, Homo sapien
taagggaccccatacagccaaatta

SEQ ID NO: 3002929 - DNA, 25 bp, Homo sapien
gatgattcagatactacaaggcctc

SEQ ID NO: 3002930 - DNA, 25 bp, Homo sapien
gataaaatcccagagctactgttag

SEQ ID NO: 3002931 - DNA, 25 bp, Homo sapien
ccagagctactgttaggcacgtaaa

SEQ ID NO: 3002932 - DNA, 25 bp, Homo sapien
aatcccagagctactgttaggcacg

SEQ ID NO: 3002933 - DNA, 25 bp, Homo sapien
tactgttaggcacgtaaatatagac

SEQ ID NO: 3002934 - DNA, 25 bp, Homo sapien
ctctctgggtgacggcccaatcttg

SEQ ID NO: 3002935 - DNA, 25 bp, Homo sapien
cttcctatctctctgggtgacggcc

SEQ ID NO: 3002936 - DNA, 25 bp, Homo sapien
tatctctctgggtgacggcccaatc

SEQ ID NO: 3002937 - DNA, 25 bp, Homo sapien
ttcctatctctctgggtgacggccc

SEQ ID NO: 3002938 - DNA, 25 bp, Homo sapien
catccattacttgttttaactgatg

SEQ ID NO: 3002939 - DNA, 25 bp, Homo sapien
ccattacttgttttaactgatgtag

SEQ ID NO: 3002940 - DNA, 25 bp, Homo sapien
gagttttattttctcacgttctgct

SEQ ID NO: 3002941 - DNA, 25 bp, Homo sapien
cttgttttaactgatgtagtttgag

SEQ ID NO: 3002942 - DNA, 25 bp, Homo sapien
tcttctccaaagtaatcatatcgtt

SEQ ID NO: 3002943 - DNA, 25 bp, Homo sapien
taatcatatcgtttttcacattcac

SEQ ID NO: 3002944 - DNA, 25 bp, Homo sapien
aaagtaatcatatcgtttttcacat

SEQ ID NO: 3002945 - DNA, 25 bp, Homo sapien
tccaaagtaatcatatcgtttttca

SEQ ID NO: 3002946 - DNA, 25 bp, Homo sapien
ccagtacctggaccaatgcagacac

SEQ ID NO: 3002947 - DNA, 25 bp, Homo sapien
gctgaagagcgatctcctgcttcat

SEQ ID NO: 3002948 - DNA, 25 bp, Homo sapien
cctccagtacctggaccaatgcaga

SEQ ID NO: 3002949 - DNA, 25 bp, Homo sapien
tgctgaagagcgatctcctgcttca

SEQ ID NO: 3002950 - DNA, 25 bp, Homo sapien
caaaggagagcttcctactcccaga

SEQ ID NO: 3002951 - DNA, 25 bp, Homo sapien
gagctgaaatctctcctgtgctcca

SEQ ID NO: 3002952 - DNA, 25 bp, Homo sapien
cagaaagcacactaaggaacgagtg

SEQ ID NO: 3002953 - DNA, 25 bp, Homo sapien
gaacgagtgtcaaaggagagcttcc

SEQ ID NO: 3002954 - DNA, 25 bp, Homo sapien
caggaagtgagtataggcaccatgc

SEQ ID NO: 3002955 - DNA, 25 bp, Homo sapien
tgcaggaagtgagtataggcaccat

SEQ ID NO: 3002956 - DNA, 25 bp, Homo sapien
gaagtgagtataggcaccatgctga

SEQ ID NO: 3002957 - DNA, 25 bp, Homo sapien
ctgcaggaagtgagtataggcacca

SEQ ID NO: 3002958 - DNA, 25 bp, Homo sapien
cggcatacccaaggcacgagtgctc

SEQ ID NO: 3002959 - DNA, 25 bp, Homo sapien
agtggggcggcatacccaaggcacg

SEQ ID NO: 3002960 - DNA, 25 bp, Homo sapien
caggcacatccacgcgccgctttgt

SEQ ID NO: 3002961 - DNA, 25 bp, Homo sapien
cacaggcacatccacgcgccgcttt

SEQ ID NO: 3002962 - DNA, 25 bp, Homo sapien
cggagcagcggcggtcaagtgcagg

SEQ ID NO: 3002963 - DNA, 25 bp, Homo sapien
acggagcagcggcggtcaagtgcag

SEQ ID NO: 3002964 - DNA, 25 bp, Homo sapien
ttacaggtacgtgctaacacatgtg

SEQ ID NO: 3002965 - DNA, 25 bp, Homo sapien
cagggatgggatacggtggcatgat

SEQ ID NO: 3002966 - DNA, 25 bp, Homo sapien
ttttagctaagagtatgagtgcatg

SEQ ID NO: 3002967 - DNA, 25 bp, Homo sapien
gtggctaatagctggatacatttct

SEQ ID NO: 3002968 - DNA, 25 bp, Homo sapien
aacaggcatgttctgctcctgaaag

SEQ ID NO: 3002969 - DNA, 25 bp, Homo sapien
caccagaatttcaattatccttctt

SEQ ID NO: 3002970 - DNA, 25 bp, Homo sapien
ccttcttggtaagtccttacataag

SEQ ID NO: 3002971 - DNA, 25 bp, Homo sapien
taagtccttacataagtttagtatg

SEQ ID NO: 3002972 - DNA, 25 bp, Homo sapien
catgagcaccacactagacacttgg

SEQ ID NO: 3002973 - DNA, 25 bp, Homo sapien
tcataagacatgagcaccacactag

SEQ ID NO: 3002974 - DNA, 25 bp, Homo sapien
gctcacaatcgaattgtccagtgtg

SEQ ID NO: 3002975 - DNA, 25 bp, Homo sapien
gttggagagtagtatcacggagctc

SEQ ID NO: 3002976 - DNA, 25 bp, Homo sapien
tgtagcctcttgggatctaaagcaa

SEQ ID NO: 3002977 - DNA, 25 bp, Homo sapien
atgtagcctcttgggatctaaagca

SEQ ID NO: 3002978 - DNA, 25 bp, Homo sapien
tatgtagcctcttgggatctaaagc

SEQ ID NO: 3002979 - DNA, 25 bp, Homo sapien
tgtatgtagcctcttgggatctaaa

SEQ ID NO: 3002980 - DNA, 25 bp, Homo sapien
aactgctggagatgtgtagcgtggc

SEQ ID NO: 3002981 - DNA, 25 bp, Homo sapien
tatgacatctggctcaaggccagca

SEQ ID NO: 3002982 - DNA, 25 bp, Homo sapien
gatgtgtagcgtggcactgcctgaa

SEQ ID NO: 3002983 - DNA, 25 bp, Homo sapien
tggcactgcctgaagttatgacatc

SEQ ID NO: 3002984 - DNA, 25 bp, Homo sapien
ggaagaacaggtgaaagctaccagt

SEQ ID NO: 3002985 - DNA, 25 bp, Homo sapien
ttctggtagttgacattttgcagct

SEQ ID NO: 3002986 - DNA, 25 bp, Homo sapien
tcttgcctcttctggtagttgacat

SEQ ID NO: 3002987 - DNA, 25 bp, Homo sapien
gtgaacgaagggctgtcccgtgacc

SEQ ID NO: 3002988 - DNA, 25 bp, Homo sapien
caaaaagcaatctaggcagggcttg

SEQ ID NO: 3002989 - DNA, 25 bp, Homo sapien
ctggcaaggccaaatattgtcctca

SEQ ID NO: 3002990 - DNA, 25 bp, Homo sapien
tgtaggcactccttgacatcgtggt

SEQ ID NO: 3002991 - DNA, 25 bp, Homo sapien
tgacatcgtggtctgactggcaagg

SEQ ID NO: 3002992 - DNA, 25 bp, Homo sapien
catctgtttcctatggcgtgctgcc

SEQ ID NO: 3002993 - DNA, 25 bp, Homo sapien
attacaggaacgctggaccgaggcc

SEQ ID NO: 3002994 - DNA, 25 bp, Homo sapien
ctcaagtaagatgggtgaggcttct

SEQ ID NO: 3002995 - DNA, 25 bp, Homo sapien
gaccgaggccaacataagctggcac

SEQ ID NO: 3002996 - DNA, 25 bp, Homo sapien
ccagatgggatcatttcccttagat

SEQ ID NO: 3002997 - DNA, 25 bp, Homo sapien
tgcagatttattgcagaacttttta

SEQ ID NO: 3002998 - DNA, 25 bp, Homo sapien
cagccatagcaccactagcagggtt

SEQ ID NO: 3002999 - DNA, 25 bp, Homo sapien
ggatcatttcccttagattccacat

SEQ ID NO: 3003000 - DNA, 25 bp, Homo sapien
catgtagagtgtgacggtgactggg

SEQ ID NO: 3003001 - DNA, 25 bp, Homo sapien
atgcatgtagagtgtgacggtgact

SEQ ID NO: 3003002 - DNA, 25 bp, Homo sapien
aacctggggatgcacgtagagtgtg

SEQ ID NO: 3003003 - DNA, 25 bp, Homo sapien
gatgcatgtagagtgtgacggtgac

SEQ ID NO: 3003004 - DNA, 25 bp, Homo sapien
tagagtgtgacggtgacgggggaac

SEQ ID NO: 3003005 - DNA, 25 bp, Homo sapien
gtagagtgtgacggtgacgggggaa

SEQ ID NO: 3003006 - DNA, 25 bp, Homo sapien
caataaaatgatgaggatagccacc

SEQ ID NO: 3003007 - DNA, 25 bp, Homo sapien
tgtgttacagcagtacccagaaagc

SEQ ID NO: 3003008 - DNA, 25 bp, Homo sapien
gtgagccacggcgaatgaaccaaga

SEQ ID NO: 3003009 - DNA, 25 bp, Homo sapien
tcttataatgaggttacatgaccat

SEQ ID NO: 3003010 - DNA, 25 bp, Homo sapien
attagatagagctcaggccgggtgc

SEQ ID NO: 3003011 - DNA, 25 bp, Homo sapien
cacattggtagggtaccttcttggg

SEQ ID NO: 3003012 - DNA, 25 bp, Homo sapien
tcttattcaccagccaaaaacctga

SEQ ID NO: 3003013 - DNA, 25 bp, Homo sapien
tttcaggggcactcagattagatag

SEQ ID NO: 3003014 - DNA, 25 bp, Homo sapien
cagtgactagtgctggtagggaaca

SEQ ID NO: 3003015 - DNA, 25 bp, Homo sapien
actgtttgtgctagagaccctccct

SEQ ID NO: 3003016 - DNA, 25 bp, Homo sapien
agtcttactccagactgcacacggg

SEQ ID NO: 3003017 - DNA, 25 bp, Homo sapien
tagggaacagactgacagacaaagc

SEQ ID NO: 3003018 - DNA, 25 bp, Homo sapien
atcatgttggccagactgttctcaa

SEQ ID NO: 3003019 - DNA, 25 bp, Homo sapien
tgcctcggcctctcaaagtgctagg

SEQ ID NO: 3003020 - DNA, 25 bp, Homo sapien
tcccgacctcaggttgatcagcctg

SEQ ID NO: 3003021 - DNA, 25 bp, Homo sapien
actgttctcaaactcccgacctcag

SEQ ID NO: 3003022 - DNA, 25 bp, Homo sapien
tgaatggaactggtaactcaccgcc

SEQ ID NO: 3003023 - DNA, 25 bp, Homo sapien
aatgcttcagcagttcagagaggtc

SEQ ID NO: 3003024 - DNA, 25 bp, Homo sapien
gctcatgaggtagacacagaccacc

SEQ ID NO: 3003025 - DNA, 25 bp, Homo sapien
acaaacaaaatggacgggcgcggtg

SEQ ID NO: 3003026 - DNA, 25 bp, Homo sapien
cccaggctgtgttggcaatacgtgt

SEQ ID NO: 3003027 - DNA, 25 bp, Homo sapien
ctgccttatgtgtctggatctccca

SEQ ID NO: 3003028 - DNA, 25 bp, Homo sapien
gttggcaatacgtgtttcgtaagta

SEQ ID NO: 3003029 - DNA, 25 bp, Homo sapien
gccttatgtgtctggatctcccagg

SEQ ID NO: 3003030 - DNA, 25 bp, Homo sapien
aaatgtgaagccgactggactaccc

SEQ ID NO: 3003031 - DNA, 25 bp, Homo sapien
acttcgctcccaagctcggtggcta

SEQ ID NO: 3003032 - DNA, 25 bp, Homo sapien
gatgtgatcctcactactctgcaga

SEQ ID NO: 3003033 - DNA, 25 bp, Homo sapien
gaagacatttgtggagcctccccaa

SEQ ID NO: 3003034 - DNA, 25 bp, Homo sapien
cagtctccaacagcgcaacagggaa

SEQ ID NO: 3003035 - DNA, 25 bp, Homo sapien
ctaagaactccacagtctccaacag

SEQ ID NO: 3003036 - DNA, 25 bp, Homo sapien
cagcgcaacagggaatcggctttgt

SEQ ID NO: 3003037 - DNA, 25 bp, Homo sapien
ccaacagcgcaacagggaatcggct

SEQ ID NO: 3003038 - DNA, 25 bp, Homo sapien
cgttcaggttaaaacgcagtcctca

SEQ ID NO: 3003039 - DNA, 25 bp, Homo sapien
tttctaagttaacacatggtgtctg

SEQ ID NO: 3003040 - DNA, 25 bp, Homo sapien
tctagtcacctatttatcactctcc

SEQ ID NO: 3003041 - DNA, 25 bp, Homo sapien
ataaacagacaggcaagaaaaacgt

SEQ ID NO: 3003042 - DNA, 25 bp, Homo sapien
agagctggatgtcagcggctaaaag

SEQ ID NO: 3003043 - DNA, 25 bp, Homo sapien
ccttctcaatgacttaatcatgttc

SEQ ID NO: 3003044 - DNA, 25 bp, Homo sapien
atgacttaatcatgttccatttgca

SEQ ID NO: 3003045 - DNA, 25 bp, Homo sapien
cagcggctaaaaggtcgatattttc

SEQ ID NO: 3003046 - DNA, 25 bp, Homo sapien
gggagggatgtttggcctggggctg

SEQ ID NO: 3003047 - DNA, 25 bp, Homo sapien
ggagggatgtttggcctggggctga

SEQ ID NO: 3003048 - DNA, 25 bp, Homo sapien
ctggagaattaagaggaggggcgaa

SEQ ID NO: 3003049 - DNA, 25 bp, Homo sapien
gaggaggggcgaatggggagggatg

SEQ ID NO: 3003050 - DNA, 25 bp, Homo sapien
catccgggtccttgtacagtggcac

SEQ ID NO: 3003051 - DNA, 25 bp, Homo sapien
agaaatcagccagcgtcgaccatac

SEQ ID NO: 3003052 - DNA, 25 bp, Homo sapien
taagaagggtgaggtcatcatccgg

SEQ ID NO: 3003053 - DNA, 25 bp, Homo sapien
tccgaggttttctccacgtagcagg

SEQ ID NO: 3003054 - DNA, 25 bp, Homo sapien
cacacagacagcaactgagcaccag

SEQ ID NO: 3003055 - DNA, 25 bp, Homo sapien
gctcccagaattccccactgctgtc

SEQ ID NO: 3003056 - DNA, 25 bp, Homo sapien
tcaaacactctagacacccagtgct

SEQ ID NO: 3003057 - DNA, 25 bp, Homo sapien
caaacactctagacacccagtgctt

SEQ ID NO: 3003058 - DNA, 25 bp, Homo sapien
tcagggccgcctccgaggttagtgc

SEQ ID NO: 3003059 - DNA, 25 bp, Homo sapien
caccggatgtgatagggctgctcag

SEQ ID NO: 3003060 - DNA, 25 bp, Homo sapien
tgatagtttatcctccggtcccggc

SEQ ID NO: 3003061 - DNA, 25 bp, Homo sapien
aacaggcactgctcggctgcagagc

SEQ ID NO: 3003062 - DNA, 25 bp, Homo sapien
cttcatagggaaggagtcaggcagg

SEQ ID NO: 3003063 - DNA, 25 bp, Homo sapien
gtctgccagcttcatagggaaggag

SEQ ID NO: 3003064 - DNA, 25 bp, Homo sapien
tgccagcttcatagggaaggagtca

SEQ ID NO: 3003065 - DNA, 25 bp, Homo sapien
agcttcatagggaaggagtcaggca

SEQ ID NO: 3003066 - DNA, 25 bp, Homo sapien
aagcctccaagaccaggacctgggt

SEQ ID NO: 3003067 - DNA, 25 bp, Homo sapien
aatgcatccgagctacaattaggaa

SEQ ID NO: 3003068 - DNA, 25 bp, Homo sapien
tcagaatgcgaaggtctgggcagcc

SEQ ID NO: 3003069 - DNA, 25 bp, Homo sapien
tgggttcaagtaccagctgaaagca

SEQ ID NO: 3003070 - DNA, 25 bp, Homo sapien
gatgtcgtcttggtcatcctggtcc

SEQ ID NO: 3003071 - DNA, 25 bp, Homo sapien
ccaggtgtccgggtagccgagcatc

SEQ ID NO: 3003072 - DNA, 25 bp, Homo sapien
caaaggaagacaccttgatgtcgtc

SEQ ID NO: 3003073 - DNA, 25 bp, Homo sapien
aatctgaccagactttgacactggg

SEQ ID NO: 3003074 - DNA, 25 bp, Homo sapien
cagcggcggaccagtagagaaaaca

SEQ ID NO: 3003075 - DNA, 25 bp, Homo sapien
gagcggcactcctccgagaagcagt

SEQ ID NO: 3003076 - DNA, 25 bp, Homo sapien
gagctgcggcttgttcctggatcac

SEQ ID NO: 3003077 - DNA, 25 bp, Homo sapien
ccttaagtaagcaggtgcagcggcg

SEQ ID NO: 3003078 - DNA, 25 bp, Homo sapien
agtatgattggagtacacaaagcca

SEQ ID NO: 3003079 - DNA, 25 bp, Homo sapien
ccacttctgaaagtactgggtgtaa

SEQ ID NO: 3003080 - DNA, 25 bp, Homo sapien
caaacgaatagcatccagggtagta

SEQ ID NO: 3003081 - DNA, 25 bp, Homo sapien
tttgccccaggagcaagtatgattg

SEQ ID NO: 3003082 - DNA, 25 bp, Homo sapien
gcactgtcagtaccgcccagctcag

SEQ ID NO: 3003083 - DNA, 25 bp, Homo sapien
agcagcactgtcagtaccgcccagc

SEQ ID NO: 3003084 - DNA, 25 bp, Homo sapien
gtcagtaccgcccagctcagtccag

SEQ ID NO: 3003085 - DNA, 25 bp, Homo sapien
gcagcactgtcagtaccgcccagct

SEQ ID NO: 3003086 - DNA, 25 bp, Homo sapien
tctcccaccagtatgtgtgcgacgg

SEQ ID NO: 3003087 - DNA, 25 bp, Homo sapien
aaagcaaagctgtgcctgacagctc

SEQ ID NO: 3003088 - DNA, 25 bp, Homo sapien
cccaccagtatgtgtgcgacggtgc

SEQ ID NO: 3003089 - DNA, 25 bp, Homo sapien
caaagctgtgcctgacagctccagg

SEQ ID NO: 3003090 - DNA, 25 bp, Homo sapien
agtgagagtatctttcaactgctgc

SEQ ID NO: 3003091 - DNA, 25 bp, Homo sapien
ttgtctacaggaagtgggcagtgag

SEQ ID NO: 3003092 - DNA, 25 bp, Homo sapien
gctggcacagttcctaagcagccca

SEQ ID NO: 3003093 - DNA, 25 bp, Homo sapien
caaggctggcacagttcctaagcag

SEQ ID NO: 3003094 - DNA, 25 bp, Homo sapien
cgaatgagtcagcagaatcaggcac

SEQ ID NO: 3003095 - DNA, 25 bp, Homo sapien
taaactgatacagccaagtgacatg

SEQ ID NO: 3003096 - DNA, 25 bp, Homo sapien
cacttgagtgcccaattgtggagga

SEQ ID NO: 3003097 - DNA, 25 bp, Homo sapien
ggaaaccatttcagctagcatgtaa

SEQ ID NO: 3003098 - DNA, 25 bp, Homo sapien
aattcttgtacgagtacagctccag

SEQ ID NO: 3003099 - DNA, 25 bp, Homo sapien
tgtacgagtacagctccaggctgtg

SEQ ID NO: 3003100 - DNA, 25 bp, Homo sapien
ctctgacgtaatcaggaagcagctg

SEQ ID NO: 3003101 - DNA, 25 bp, Homo sapien
gctcctctctgacgtaatcaggaag

SEQ ID NO: 3003102 - DNA, 25 bp, Homo sapien
gagatgcccagttgcggctcctcac

SEQ ID NO: 3003103 - DNA, 25 bp, Homo sapien
atgcccagttgcggctcctcaccag

SEQ ID NO: 3003104 - DNA, 25 bp, Homo sapien
ggagatgcccagttgcggctcctca

SEQ ID NO: 3003105 - DNA, 25 bp, Homo sapien
agatgcccagttgcggctcctcacc

SEQ ID NO: 3003106 - DNA, 25 bp, Homo sapien
ccaacctcagtcaaaccgatggact

SEQ ID NO: 3003107 - DNA, 25 bp, Homo sapien
acctcagtcaaaccgatggactttc

SEQ ID NO: 3003108 - DNA, 25 bp, Homo sapien
ctcagtcaaaccgatggactttcaa

SEQ ID NO: 3003109 - DNA, 25 bp, Homo sapien
cagtcaaaccgatggactttcaaat

SEQ ID NO: 3003110 - DNA, 25 bp, Homo sapien
cacagagttggctttacgttcggca

SEQ ID NO: 3003111 - DNA, 25 bp, Homo sapien
gatcaatcgatcaggactgcagtgc

SEQ ID NO: 3003112 - DNA, 25 bp, Homo sapien
cgttcggcacttgcgaactgctgac

SEQ ID NO: 3003113 - DNA, 25 bp, Homo sapien
gatggagttttgtctggcagttgct

SEQ ID NO: 3003114 - DNA, 25 bp, Homo sapien
catcattcttgagggtgtaataacc

SEQ ID NO: 3003115 - DNA, 25 bp, Homo sapien
ggtaaaacaccctcaaggatgggca

SEQ ID NO: 3003116 - DNA, 25 bp, Homo sapien
tgtaataaccatgggctgtagcaca

SEQ ID NO: 3003117 - DNA, 25 bp, Homo sapien
gcttatcaagctgagagagagcaga

SEQ ID NO: 3003118 - DNA, 25 bp, Homo sapien
tgtgttagaattacagcccattacc

SEQ ID NO: 3003119 - DNA, 25 bp, Homo sapien
tcactagcaggaacataaggcccag

SEQ ID NO: 3003120 - DNA, 25 bp, Homo sapien
gataagtctcagaacccatgcccaa

SEQ ID NO: 3003121 - DNA, 25 bp, Homo sapien
taacgggcccactgcctctggtaaa

SEQ ID NO: 3003122 - DNA, 25 bp, Homo sapien
gagaactgcaatccaagtcagacag

SEQ ID NO: 3003123 - DNA, 25 bp, Homo sapien
ttgggaggcctgtcacgagttacac

SEQ ID NO: 3003124 - DNA, 25 bp, Homo sapien
gtcagacagatcctgcctggactct

SEQ ID NO: 3003125 - DNA, 25 bp, Homo sapien
ttgttctcaacagctccacgaggat

SEQ ID NO: 3003126 - DNA, 25 bp, Homo sapien
tcattgataagaggaaacgagacag

SEQ ID NO: 3003127 - DNA, 25 bp, Homo sapien
gagtggctgctgatgcacaaaggca

SEQ ID NO: 3003128 - DNA, 25 bp, Homo sapien
ccttttgcgatggtcagagtagaga

SEQ ID NO: 3003129 - DNA, 25 bp, Homo sapien
tacagtcccggctgatacatcatgg

SEQ ID NO: 3003130 - DNA, 25 bp, Homo sapien
tgatcagcgtgctgaaaaactccac

SEQ ID NO: 3003131 - DNA, 25 bp, Homo sapien
gtctattagggtgaagccgcagcag

SEQ ID NO: 3003132 - DNA, 25 bp, Homo sapien
gtcaactgcatcaacatatgaagtc

SEQ ID NO: 3003133 - DNA, 25 bp, Homo sapien
gtttgatactgatgtcaactgcatc

SEQ ID NO: 3003134 - DNA, 25 bp, Homo sapien
taaacccctatagacagcagcgcct

SEQ ID NO: 3003135 - DNA, 25 bp, Homo sapien
agacagaagtaaacccctatagaca

SEQ ID NO: 3003136 - DNA, 25 bp, Homo sapien
agtaaacccctatagacagcagcgc

SEQ ID NO: 3003137 - DNA, 25 bp, Homo sapien
agaagtaaacccctatagacagcag

SEQ ID NO: 3003138 - DNA, 25 bp, Homo sapien
atatgccactgcgcccagctaactt

SEQ ID NO: 3003139 - DNA, 25 bp, Homo sapien
gcatatgccactgcgcccagctaac

SEQ ID NO: 3003140 - DNA, 25 bp, Homo sapien
tatgccactgcgcccagctaacttt

SEQ ID NO: 3003141 - DNA, 25 bp, Homo sapien
catatgccactgcgcccagctaact

SEQ ID NO: 3003142 - DNA, 25 bp, Homo sapien
aaataatgtggcattactcaactta

SEQ ID NO: 3003143 - DNA, 25 bp, Homo sapien
tgtggcattactcaacttatttcgc

SEQ ID NO: 3003144 - DNA, 25 bp, Homo sapien
taatgtggcattactcaacttattt

SEQ ID NO: 3003145 - DNA, 25 bp, Homo sapien
taaataatgtggcattactcaactt

SEQ ID NO: 3003146 - DNA, 25 bp, Homo sapien
gaaactgacatatgcagccacccac

SEQ ID NO: 3003147 - DNA, 25 bp, Homo sapien
tcacttctgcttccggctggaatgc

SEQ ID NO: 3003148 - DNA, 25 bp, Homo sapien
tctccacagagtccggaaactgaca

SEQ ID NO: 3003149 - DNA, 25 bp, Homo sapien
acccacccagaaggacatgtccaag

SEQ ID NO: 3003150 - DNA, 25 bp, Homo sapien
tataatagctaaattctgggactgg

SEQ ID NO: 3003151 - DNA, 25 bp, Homo sapien
tctcggttcttactccctggcaggc

SEQ ID NO: 3003152 - DNA, 25 bp, Homo sapien
gtcaccaaagctcatcaattctcgg

SEQ ID NO: 3003153 - DNA, 25 bp, Homo sapien
gaacaaacagggtacatgagtccag

SEQ ID NO: 3003154 - DNA, 25 bp, Homo sapien
tggtcataagctgcagcatgcgggt

SEQ ID NO: 3003155 - DNA, 25 bp, Homo sapien
tgcaaacatattgatggtcataagc

SEQ ID NO: 3003156 - DNA, 25 bp, Homo sapien
aaacatattgatggtcataagctgc

SEQ ID NO: 3003157 - DNA, 25 bp, Homo sapien
gcagcatgcgggtacttccaatggg

SEQ ID NO: 3003158 - DNA, 25 bp, Homo sapien
tccttgaggaccttctcagccactg

SEQ ID NO: 3003159 - DNA, 25 bp, Homo sapien
agtaacacctggaactccttgagga

SEQ ID NO: 3003160 - DNA, 25 bp, Homo sapien
ttgaggaccttctcagccactgcag

SEQ ID NO: 3003161 - DNA, 25 bp, Homo sapien
gggctgtgctgcagtaacacctgga

SEQ ID NO: 3003162 - DNA, 25 bp, Homo sapien
tctgaggtactatcacactgactgt

SEQ ID NO: 3003163 - DNA, 25 bp, Homo sapien
agacatagttctgctattgtcttct

SEQ ID NO: 3003164 - DNA, 25 bp, Homo sapien
tgctattgtcttctgaggtactatc

SEQ ID NO: 3003165 - DNA, 25 bp, Homo sapien
tgactgttccgcctaacgatcccaa

SEQ ID NO: 3003166 - DNA, 25 bp, Homo sapien
ctcagttcttcgtgtgttgccgtcc

SEQ ID NO: 3003167 - DNA, 25 bp, Homo sapien
ttcttcgtgtgttgccgtcctcctc

SEQ ID NO: 3003168 - DNA, 25 bp, Homo sapien
aagcccccagtcatctgtctcagtt

SEQ ID NO: 3003169 - DNA, 25 bp, Homo sapien
cagtcatctgtctcagttcttcgtg

SEQ ID NO: 3003170 - DNA, 25 bp, Homo sapien
ttcgaagctgtgtctgaggaagcct

SEQ ID NO: 3003171 - DNA, 25 bp, Homo sapien
ccatgtgtctccgtgttgaaaggca

SEQ ID NO: 3003172 - DNA, 25 bp, Homo sapien
tctcgttacgagaatagcagcgttc

SEQ ID NO: 3003173 - DNA, 25 bp, Homo sapien
tcacgtgggacagttttgcttcgaa

SEQ ID NO: 3003174 - DNA, 25 bp, Homo sapien
cagatccattaacactctctgggtc

SEQ ID NO: 3003175 - DNA, 25 bp, Homo sapien
gactgaagtcttgaacgagcaccag

SEQ ID NO: 3003176 - DNA, 25 bp, Homo sapien
aaacagatccattaacactctctgg

SEQ ID NO: 3003177 - DNA, 25 bp, Homo sapien
cgagcaccaggtcaaatgtccacat

SEQ ID NO: 3003178 - DNA, 25 bp, Homo sapien
tctgctgacgcagtgtggagcacca

SEQ ID NO: 3003179 - DNA, 25 bp, Homo sapien
cagcgtccgagcttttccgaaaggg

SEQ ID NO: 3003180 - DNA, 25 bp, Homo sapien
ccttccagaataaatatggcgctca

SEQ ID NO: 3003181 - DNA, 25 bp, Homo sapien
tgaacctctcgtcagctagtgctgg

SEQ ID NO: 3003182 - DNA, 25 bp, Homo sapien
atgagcacagtaggacagaagatga

SEQ ID NO: 3003183 - DNA, 25 bp, Homo sapien
gaaggtggaggcctctaagaattca

SEQ ID NO: 3003184 - DNA, 25 bp, Homo sapien
ggaggcctctaagaattcacaccct

SEQ ID NO: 3003185 - DNA, 25 bp, Homo sapien
cacagtaggacagaagatgaaggga

SEQ ID NO: 3003186 - DNA, 25 bp, Homo sapien
tccgggtaaacagcttcccatgggc

SEQ ID NO: 3003187 - DNA, 25 bp, Homo sapien
ccaatccgggtaaacagcttcccat

SEQ ID NO: 3003188 - DNA, 25 bp, Homo sapien
taaacagcttcccatgggcatggag

SEQ ID NO: 3003189 - DNA, 25 bp, Homo sapien
gcttcccatgggcatggagaaaact

SEQ ID NO: 3003190 - DNA, 25 bp, Homo sapien
gaatcagaatcctcaaggacgagag

SEQ ID NO: 3003191 - DNA, 25 bp, Homo sapien
tccaggtcactgtgaaagatagcca

SEQ ID NO: 3003192 - DNA, 25 bp, Homo sapien
cactgggctatatcagacactggca

SEQ ID NO: 3003193 - DNA, 25 bp, Homo sapien
ctatggccatgggtcaaatgtagcc

SEQ ID NO: 3003194 - DNA, 25 bp, Homo sapien
ggctggtcttgaacttctggcctca

SEQ ID NO: 3003195 - DNA, 25 bp, Homo sapien
tgccaccaagcccggccaatttttg

SEQ ID NO: 3003196 - DNA, 25 bp, Homo sapien
caagcaacaatcgtgcctcagcttc

SEQ ID NO: 3003197 - DNA, 25 bp, Homo sapien
gggactagaagcacgtgccaccaag

SEQ ID NO: 3003198 - DNA, 25 bp, Homo sapien
gaagacttcctcacacatggaccca

SEQ ID NO: 3003199 - DNA, 25 bp, Homo sapien
caacaggttgacacagcgtaagagg

SEQ ID NO: 3003200 - DNA, 25 bp, Homo sapien
cacgtcctggtgtgtcttaagcaaa

SEQ ID NO: 3003201 - DNA, 25 bp, Homo sapien
tgagataccgtgctcggccatcaaa

SEQ ID NO: 3003202 - DNA, 25 bp, Homo sapien
tctgttcaccatgcgtgccactcaa

SEQ ID NO: 3003203 - DNA, 25 bp, Homo sapien
cctcttcaggatctagtactttctg

SEQ ID NO: 3003204 - DNA, 25 bp, Homo sapien
actcaaagtcttttacaattattgc

SEQ ID NO: 3003205 - DNA, 25 bp, Homo sapien
acatcttctaaaatgtctaaaccaa

SEQ ID NO: 3003206 - DNA, 25 bp, Homo sapien
tagtctacttaagcactgagcccag

SEQ ID NO: 3003207 - DNA, 25 bp, Homo sapien
ccatggctactttggtggtacaaca

SEQ ID NO: 3003208 - DNA, 25 bp, Homo sapien
tttacaatcctagcacaaaactggc

SEQ ID NO: 3003209 - DNA, 25 bp, Homo sapien
gaagttggcaaactaggcccacagg

SEQ ID NO: 3003210 - DNA, 25 bp, Homo sapien
cattaaattctccagacctgaacaa

SEQ ID NO: 3003211 - DNA, 25 bp, Homo sapien
ttaaattctccagacctgaacaagt

SEQ ID NO: 3003212 - DNA, 25 bp, Homo sapien
attaaattctccagacctgaacaag

SEQ ID NO: 3003213 - DNA, 25 bp, Homo sapien
taatgatatgtaacagaaggaagaa

SEQ ID NO: 3003214 - DNA, 25 bp, Homo sapien
ataatgatatgtaacagaaggaaga

SEQ ID NO: 3003215 - DNA, 25 bp, Homo sapien
gataatgatatgtaacagaaggaag

SEQ ID NO: 3003216 - DNA, 25 bp, Homo sapien
accgcgtcaggccagaaactgcaga

SEQ ID NO: 3003217 - DNA, 25 bp, Homo sapien
actgcagatttcttcgagggctggt

SEQ ID NO: 3003218 - DNA, 25 bp, Homo sapien
cgagggctggtagcctaaaatgaaa

SEQ ID NO: 3003219 - DNA, 25 bp, Homo sapien
cagatttcttcgagggctggtagcc

SEQ ID NO: 3003220 - DNA, 25 bp, Homo sapien
ccaacatgccggaaagtagacttct

SEQ ID NO: 3003221 - DNA, 25 bp, Homo sapien
gtcagggctcaggtcaaattcctca

SEQ ID NO: 3003222 - DNA, 25 bp, Homo sapien
tttcctttccgccactggtcagggc

SEQ ID NO: 3003223 - DNA, 25 bp, Homo sapien
agatctccaggcgagtggtgtcatc

SEQ ID NO: 3003224 - DNA, 25 bp, Homo sapien
aggatagggttgctggcagctaaac

SEQ ID NO: 3003225 - DNA, 25 bp, Homo sapien
gctaaactgcgcatatagtaataga

SEQ ID NO: 3003226 - DNA, 25 bp, Homo sapien
ttcaaacaagctcatgagactctcc

SEQ ID NO: 3003227 - DNA, 25 bp, Homo sapien
taatagacagcgtcaagcttcctcc

SEQ ID NO: 3003228 - DNA, 25 bp, Homo sapien
caactggttataggggcgcccattc

SEQ ID NO: 3003229 - DNA, 25 bp, Homo sapien
gggcgcccattcttgggagcaatgt

SEQ ID NO: 3003230 - DNA, 25 bp, Homo sapien
tgccagcaaagccaactggttatag

SEQ ID NO: 3003231 - DNA, 25 bp, Homo sapien
ttgggagcaatgtgctgggccttca

SEQ ID NO: 3003232 - DNA, 25 bp, Homo sapien
tggcatatcatgcatcgctgggcac

SEQ ID NO: 3003233 - DNA, 25 bp, Homo sapien
gctttcccataattcgctgtatcac

SEQ ID NO: 3003234 - DNA, 25 bp, Homo sapien
tgctcccggtacctagcaatatctc

SEQ ID NO: 3003235 - DNA, 25 bp, Homo sapien
tcgctgggcactgatcaaggcatat

SEQ ID NO: 3003236 - DNA, 25 bp, Homo sapien
taatggcttgctgcgaatggcaaga

SEQ ID NO: 3003237 - DNA, 25 bp, Homo sapien
catccatgtagtcttccagtttgaa

SEQ ID NO: 3003238 - DNA, 25 bp, Homo sapien
tgtcttgcgtaatggcttgctgcga

SEQ ID NO: 3003239 - DNA, 25 bp, Homo sapien
ttgaacttgtaagtaacctgcagct

SEQ ID NO: 3003240 - DNA, 25 bp, Homo sapien
caatcacctgatagaaagcattctt

SEQ ID NO: 3003241 - DNA, 25 bp, Homo sapien
gcgctcatatagctgcagcagttca

SEQ ID NO: 3003242 - DNA, 25 bp, Homo sapien
ggatccttgacaagttgcctgaact

SEQ ID NO: 3003243 - DNA, 25 bp, Homo sapien
gctccaaaagtctgttccgaatctg

SEQ ID NO: 3003244 - DNA, 25 bp, Homo sapien
cctccagccagaatagaccacatca

SEQ ID NO: 3003245 - DNA, 25 bp, Homo sapien
ctccggctgatccccatttccctcc

SEQ ID NO: 3003246 - DNA, 25 bp, Homo sapien
catttccctccagccagaatagacc

SEQ ID NO: 3003247 - DNA, 25 bp, Homo sapien
ccagccagaatagaccacatcatac

SEQ ID NO: 3003248 - DNA, 25 bp, Homo sapien
catactgtcctgacggagtcgggta

SEQ ID NO: 3003249 - DNA, 25 bp, Homo sapien
tacctcctcgggactcatggtgctg

SEQ ID NO: 3003250 - DNA, 25 bp, Homo sapien
tggcgtgagtcaccccaagatgtag

SEQ ID NO: 3003251 - DNA, 25 bp, Homo sapien
gatcaggattgtttgggtcccacaa

SEQ ID NO: 3003252 - DNA, 25 bp, Homo sapien
aaggccaggcttatagatttccaga

SEQ ID NO: 3003253 - DNA, 25 bp, Homo sapien
tgttccttagccgagaaaggccagg

SEQ ID NO: 3003254 - DNA, 25 bp, Homo sapien
taacagtctgcaaacgtcgtccagg

SEQ ID NO: 3003255 - DNA, 25 bp, Homo sapien
tcggttgaggacacagacacttgct

SEQ ID NO: 3003256 - DNA, 25 bp, Homo sapien
tgttcaacaattcacaaggctaagg

SEQ ID NO: 3003257 - DNA, 25 bp, Homo sapien
gggaaacccatctccttatgtgtca

SEQ ID NO: 3003258 - DNA, 25 bp, Homo sapien
tattgtcagaacaaaagacctctct

SEQ ID NO: 3003259 - DNA, 25 bp, Homo sapien
tactggtaggcaaagaaggacattt

SEQ ID NO: 3003260 - DNA, 25 bp, Homo sapien
tataaatggaaacaagcccaaaaca

SEQ ID NO: 3003261 - DNA, 25 bp, Homo sapien
ttttaatcctagtattgctctctaa

SEQ ID NO: 3003262 - DNA, 25 bp, Homo sapien
aaaacaggaatcatatgctccagca

SEQ ID NO: 3003263 - DNA, 25 bp, Homo sapien
taatcctagtattgctctctaaata

SEQ ID NO: 3003264 - DNA, 25 bp, Homo sapien
tagagcagcgggagaaaatagcctt

SEQ ID NO: 3003265 - DNA, 25 bp, Homo sapien
agactggccgcaaacctagagaagg

SEQ ID NO: 3003266 - DNA, 25 bp, Homo sapien
tctattgcctaacgcaggagaggtg

SEQ ID NO: 3003267 - DNA, 25 bp, Homo sapien
tcaccctcggcagtctgtaacttgg

SEQ ID NO: 3003268 - DNA, 25 bp, Homo sapien
tgccagggccaaacccgagtagtct

SEQ ID NO: 3003269 - DNA, 25 bp, Homo sapien
aaaggaacagtcaccttcgcggcga

SEQ ID NO: 3003270 - DNA, 25 bp, Homo sapien
cctgacgtggctggagacttgaaat

SEQ ID NO: 3003271 - DNA, 25 bp, Homo sapien
aaaagttcagcaacgaagtcgcagg

SEQ ID NO: 3003272 - DNA, 25 bp, Homo sapien
gatcccgcgcagctccgacgcggag

SEQ ID NO: 3003273 - DNA, 25 bp, Homo sapien
gcgcagctccgacgcggagatccgc

SEQ ID NO: 3003274 - DNA, 25 bp, Homo sapien
agctccgacgcggagatccgcacac

SEQ ID NO: 3003275 - DNA, 25 bp, Homo sapien
tccgacgcggagatccgcacacgct

SEQ ID NO: 3003276 - DNA, 25 bp, Homo sapien
tacagccgtagcggctccgccaccg

SEQ ID NO: 3003277 - DNA, 25 bp, Homo sapien
acagccgtagcggctccgccaccgc

SEQ ID NO: 3003278 - DNA, 25 bp, Homo sapien
ctacagccgtagcggctccgccacc

SEQ ID NO: 3003279 - DNA, 25 bp, Homo sapien
ctagatacgatatagttggaatcgt

SEQ ID NO: 3003280 - DNA, 25 bp, Homo sapien
gatacgatatagttggaatcgtgtg

SEQ ID NO: 3003281 - DNA, 25 bp, Homo sapien
tagatacgatatagttggaatcgtg

SEQ ID NO: 3003282 - DNA, 25 bp, Homo sapien
atcgtgtggaaggaagtacatcagg

SEQ ID NO: 3003283 - DNA, 25 bp, Homo sapien
cctttggtggatgcactggtggtac

SEQ ID NO: 3003284 - DNA, 25 bp, Homo sapien
gacaattgccctggaagtgctgaac

SEQ ID NO: 3003285 - DNA, 25 bp, Homo sapien
cagaaggcatcatggtacatcccaa

SEQ ID NO: 3003286 - DNA, 25 bp, Homo sapien
tacaatataacgtgcttgagggcag

SEQ ID NO: 3003287 - DNA, 25 bp, Homo sapien
gatgaaattaaggtgaggctccagc

SEQ ID NO: 3003288 - DNA, 25 bp, Homo sapien
tatcaacagtgtgcaacccagctgg

SEQ ID NO: 3003289 - DNA, 25 bp, Homo sapien
tagcaagtgacccacgggaacctga

SEQ ID NO: 3003290 - DNA, 25 bp, Homo sapien
acttcatgacatgggagggtaccct

SEQ ID NO: 3003291 - DNA, 25 bp, Homo sapien
tccctggagtactgactggcaccgg

SEQ ID NO: 3003292 - DNA, 25 bp, Homo sapien
aactttgcccaatcacaacttgtgc

SEQ ID NO: 3003293 - DNA, 25 bp, Homo sapien
tggactgacaggctgacatagaaaa

SEQ ID NO: 3003294 - DNA, 25 bp, Homo sapien
ctggcaccggtaagacagaatctct

SEQ ID NO: 3003295 - DNA, 25 bp, Homo sapien
catgcccccttgaggcactgttgaa

SEQ ID NO: 3003296 - DNA, 25 bp, Homo sapien
gggaagactcgtttatacaggttca

SEQ ID NO: 3003297 - DNA, 25 bp, Homo sapien
ggttcatcagtactgtgtcttgaga

SEQ ID NO: 3003298 - DNA, 25 bp, Homo sapien
tactggttctggtacatatggatca

SEQ ID NO: 3003299 - DNA, 25 bp, Homo sapien
cccacttcgttctcagttccactgg

SEQ ID NO: 3003300 - DNA, 25 bp, Homo sapien
aaggttccttgatatgtcctctccg

SEQ ID NO: 3003301 - DNA, 25 bp, Homo sapien
tctccggccccacttcgttctcagt

SEQ ID NO: 3003302 - DNA, 25 bp, Homo sapien
ctaaaggttccttgatatgtcctct

SEQ ID NO: 3003303 - DNA, 25 bp, Homo sapien
tttgaaaggatgaccactcagaaca

SEQ ID NO: 3003304 - DNA, 25 bp, Homo sapien
ttttgaaaggatgaccactcagaac

SEQ ID NO: 3003305 - DNA, 25 bp, Homo sapien
tctggatctactgacataagatggc

SEQ ID NO: 3003306 - DNA, 25 bp, Homo sapien
tggatctactgacataagatggcct

SEQ ID NO: 3003307 - DNA, 25 bp, Homo sapien
gaagctatttaggaatttacaggcc

SEQ ID NO: 3003308 - DNA, 25 bp, Homo sapien
cactgtttcacgtaaaagttggagt

SEQ ID NO: 3003309 - DNA, 25 bp, Homo sapien
gcagttatttgaggactggctatac

SEQ ID NO: 3003310 - DNA, 25 bp, Homo sapien
tgccctagcccaatctgaggctaag

SEQ ID NO: 3003311 - DNA, 25 bp, Homo sapien
ggaaaagtgattggcgcatagactg

SEQ ID NO: 3003312 - DNA, 25 bp, Homo sapien
caggaggaaaagtgattggcgcata

SEQ ID NO: 3003313 - DNA, 25 bp, Homo sapien
ggcgcatagactgtcgccaccaggg

SEQ ID NO: 3003314 - DNA, 25 bp, Homo sapien
aagtgattggcgcatagactgtcgc

SEQ ID NO: 3003315 - DNA, 25 bp, Homo sapien
gtcagcagtcaggaatctctgcaat

SEQ ID NO: 3003316 - DNA, 25 bp, Homo sapien
cagtcaggaatctctgcaatttatg

SEQ ID NO: 3003317 - DNA, 25 bp, Homo sapien
agcagtcaggaatctctgcaattta

SEQ ID NO: 3003318 - DNA, 25 bp, Homo sapien
tcaggaatctctgcaatttatgttt

SEQ ID NO: 3003319 - DNA, 25 bp, Homo sapien
cacaggttcagtgttgccagggtca

SEQ ID NO: 3003320 - DNA, 25 bp, Homo sapien
ctcggaagcgcctgaatccacagtg

SEQ ID NO: 3003321 - DNA, 25 bp, Homo sapien
gttcagtgttgccagggtcacgcct

SEQ ID NO: 3003322 - DNA, 25 bp, Homo sapien
gtgaggctcggaagcgcctgaatcc

SEQ ID NO: 3003323 - DNA, 25 bp, Homo sapien
ccgccgcgcccagccaaacctttat

SEQ ID NO: 3003324 - DNA, 25 bp, Homo sapien
gccgccgcgcccagccaaaccttta

SEQ ID NO: 3003325 - DNA, 25 bp, Homo sapien
taaggctgccaacccttattcaaaa

SEQ ID NO: 3003326 - DNA, 25 bp, Homo sapien
ttttaaggctgccaacccttattca

SEQ ID NO: 3003327 - DNA, 25 bp, Homo sapien
ctgaagcactcgaccactgagacgg

SEQ ID NO: 3003328 - DNA, 25 bp, Homo sapien
cttgcctgaagcactcgaccactga

SEQ ID NO: 3003329 - DNA, 25 bp, Homo sapien
catgaagtgtgacataccagccaac

SEQ ID NO: 3003330 - DNA, 25 bp, Homo sapien
tgagacggggacttcagagacatga

SEQ ID NO: 3003331 - DNA, 25 bp, Homo sapien
tattcgagcataatcttgaggaagg

SEQ ID NO: 3003332 - DNA, 25 bp, Homo sapien
gagatgtccggaagctcttaaggcc

SEQ ID NO: 3003333 - DNA, 25 bp, Homo sapien
tcctagtgttagtaaagttctgaaa

SEQ ID NO: 3003334 - DNA, 25 bp, Homo sapien
tccttaggatcccatggagatgtcc

SEQ ID NO: 3003335 - DNA, 25 bp, Homo sapien
cacagctctgagccaagtttttaaa

SEQ ID NO: 3003336 - DNA, 25 bp, Homo sapien
gactccccaatagtcatagtttcat

SEQ ID NO: 3003337 - DNA, 25 bp, Homo sapien
cggggcgtgtccacttcatctggaa

SEQ ID NO: 3003338 - DNA, 25 bp, Homo sapien
ttcgagcagccacatcacggggcgt

SEQ ID NO: 3003339 - DNA, 25 bp, Homo sapien
gcacagactccccaatagtcatagt

SEQ ID NO: 3003340 - DNA, 25 bp, Homo sapien
cctcatgttccatatcatcatattc

SEQ ID NO: 3003341 - DNA, 25 bp, Homo sapien
catattcatattcatctccttcccc

SEQ ID NO: 3003342 - DNA, 25 bp, Homo sapien
catgttccatatcatcatattcata

SEQ ID NO: 3003343 - DNA, 25 bp, Homo sapien
taaaatcctcatgttccatatcatc

SEQ ID NO: 3003344 - DNA, 25 bp, Homo sapien
agcttggtaactggatgttcctttg

SEQ ID NO: 3003345 - DNA, 25 bp, Homo sapien
gggccctcacttggaacagctacag

SEQ ID NO: 3003346 - DNA, 25 bp, Homo sapien
agggtgaggagagactttcaactat

SEQ ID NO: 3003347 - DNA, 25 bp, Homo sapien
cagatgaattacagacaagtttacc

SEQ ID NO: 3003348 - DNA, 25 bp, Homo sapien
cccactctatcctatagggccctca

SEQ ID NO: 3003349 - DNA, 25 bp, Homo sapien
tttgctctccctccattggatctgg

SEQ ID NO: 3003350 - DNA, 25 bp, Homo sapien
gcaaggattcctgtctaccagggtc

SEQ ID NO: 3003351 - DNA, 25 bp, Homo sapien
tcatctacagcatccgtagcacaaa

SEQ ID NO: 3003352 - DNA, 25 bp, Homo sapien
cattggatctgggataacctctgct

SEQ ID NO: 3003353 - DNA, 25 bp, Homo sapien
tcaagtctgatctcttatgtgaagc

SEQ ID NO: 3003354 - DNA, 25 bp, Homo sapien
cactgtgcctaggttcattctgtct

SEQ ID NO: 3003355 - DNA, 25 bp, Homo sapien
gaagcttgctagtctactttctcaa

SEQ ID NO: 3003356 - DNA, 25 bp, Homo sapien
ataaaccctttgatccaccactgtg

SEQ ID NO: 3003357 - DNA, 25 bp, Homo sapien
tttgtcatgcggaaagcgcttctcc

SEQ ID NO: 3003358 - DNA, 25 bp, Homo sapien
catatccaacgatatgcagcaacct

SEQ ID NO: 3003359 - DNA, 25 bp, Homo sapien
aatcaccatatccaacgatatgcag

SEQ ID NO: 3003360 - DNA, 25 bp, Homo sapien
tctccgggggcatctatctgtttca

SEQ ID NO: 3003361 - DNA, 25 bp, Homo sapien
ggccagaaatcccctggacagctag

SEQ ID NO: 3003362 - DNA, 25 bp, Homo sapien
gccagaaatcccctggacagctagt

SEQ ID NO: 3003363 - DNA, 25 bp, Homo sapien
caaagaggcaggaaagacagtaatc

SEQ ID NO: 3003364 - DNA, 25 bp, Homo sapien
tataggtcggaaggccctgagcaaa

SEQ ID NO: 3003365 - DNA, 25 bp, Homo sapien
tgagcaaagaggcaggaaagacagt

SEQ ID NO: 3003366 - DNA, 25 bp, Homo sapien
aagaggcaggaaagacagtaatcac

SEQ ID NO: 3003367 - DNA, 25 bp, Homo sapien
tgctgtcccagccttctagtggatc

SEQ ID NO: 3003368 - DNA, 25 bp, Homo sapien
ctagtggatcaaggaggaacaggat

SEQ ID NO: 3003369 - DNA, 25 bp, Homo sapien
ctgtcccagccttctagtggatcaa

SEQ ID NO: 3003370 - DNA, 25 bp, Homo sapien
ttctagtggatcaaggaggaacagg

SEQ ID NO: 3003371 - DNA, 25 bp, Homo sapien
tacctgatgaggagggccatccttg

SEQ ID NO: 3003372 - DNA, 25 bp, Homo sapien
tgtttcccaattcattcaagtgtac

SEQ ID NO: 3003373 - DNA, 25 bp, Homo sapien
agtgtccctatcttgaagcagctgc

SEQ ID NO: 3003374 - DNA, 25 bp, Homo sapien
caagtgtactgttccagtgtcccta

SEQ ID NO: 3003375 - DNA, 25 bp, Homo sapien
ttctgctttcggagctggctggcgc

SEQ ID NO: 3003376 - DNA, 25 bp, Homo sapien
tggcgcgatgcctctggtcgactct

SEQ ID NO: 3003377 - DNA, 25 bp, Homo sapien
gcgcgatgcctctggtcgactctgc

SEQ ID NO: 3003378 - DNA, 25 bp, Homo sapien
ggctggcgcgatgcctctggtcgac

SEQ ID NO: 3003379 - DNA, 25 bp, Homo sapien
cttagggttttcagtgccagacggc

SEQ ID NO: 3003380 - DNA, 25 bp, Homo sapien
ttcttgcttagggttttcagtgcca

SEQ ID NO: 3003381 - DNA, 25 bp, Homo sapien
tgcttagggttttcagtgccagacg

SEQ ID NO: 3003382 - DNA, 25 bp, Homo sapien
cttgcttagggttttcagtgccaga

SEQ ID NO: 3003383 - DNA, 25 bp, Homo sapien
gaaagggcctttcgcgtggagccca

SEQ ID NO: 3003384 - DNA, 25 bp, Homo sapien
gtgtgatcggccccacaaggtcaag

SEQ ID NO: 3003385 - DNA, 25 bp, Homo sapien
ggccaaatagcccttattccttcta

SEQ ID NO: 3003386 - DNA, 25 bp, Homo sapien
cagacgggagacagaagctcagtct

SEQ ID NO: 3003387 - DNA, 25 bp, Homo sapien
tttattctgctgcttgagcgggccg

SEQ ID NO: 3003388 - DNA, 25 bp, Homo sapien
gaccccgatgccgtccgcctttatg

SEQ ID NO: 3003389 - DNA, 25 bp, Homo sapien
gccgtccgcctttatgagctttatt

SEQ ID NO: 3003390 - DNA, 25 bp, Homo sapien
ttattctgctgcttgagcgggccgg

SEQ ID NO: 3003391 - DNA, 25 bp, Homo sapien
cagggagcgggactccctgcgccct

SEQ ID NO: 3003392 - DNA, 25 bp, Homo sapien
gccctctcgcgaaggtcttttccag

SEQ ID NO: 3003393 - DNA, 25 bp, Homo sapien
agcgcgcgtgtacggagtcagcact

SEQ ID NO: 3003394 - DNA, 25 bp, Homo sapien
tttccagcagctcgtgagagcgccg

SEQ ID NO: 3003395 - DNA, 25 bp, Homo sapien
tgtcacctagattcgggcacgttgc

SEQ ID NO: 3003396 - DNA, 25 bp, Homo sapien
tggaaggctccattcgtgccgaaaa

SEQ ID NO: 3003397 - DNA, 25 bp, Homo sapien
agaaacttgacaactgcacggcgac

SEQ ID NO: 3003398 - DNA, 25 bp, Homo sapien
cttgggaatcgcgtggaagacactt

SEQ ID NO: 3003399 - DNA, 25 bp, Homo sapien
tgcctcccctcttcgatctttgcca

SEQ ID NO: 3003400 - DNA, 25 bp, Homo sapien
tgttgcttggtttagcttctccagt

SEQ ID NO: 3003401 - DNA, 25 bp, Homo sapien
tggcacttagtctcaggctgttgct

SEQ ID NO: 3003402 - DNA, 25 bp, Homo sapien
acctcgccaagggcaagccagggca

SEQ ID NO: 3003403 - DNA, 25 bp, Homo sapien
gcaaacctttgccgcatgtgttggg

SEQ ID NO: 3003404 - DNA, 25 bp, Homo sapien
cctctttagataatgtgtattcttg

SEQ ID NO: 3003405 - DNA, 25 bp, Homo sapien
tgtgtattcttgttactttactaaa

SEQ ID NO: 3003406 - DNA, 25 bp, Homo sapien
gaagtaagttaaatataactggctg

SEQ ID NO: 3003407 - DNA, 25 bp, Homo sapien
tatctcagtggatgatctggaaccc

SEQ ID NO: 3003408 - DNA, 25 bp, Homo sapien
tctcgcaattactccgtggcctcgg

SEQ ID NO: 3003409 - DNA, 25 bp, Homo sapien
tcaagcagggctgaagacgtgtctt

SEQ ID NO: 3003410 - DNA, 25 bp, Homo sapien
aaactggccattgagcgttcagccc

SEQ ID NO: 3003411 - DNA, 25 bp, Homo sapien
tcagctacgtgtgggagcacctgga

SEQ ID NO: 3003412 - DNA, 25 bp, Homo sapien
agcacctggacgtgggctatgtgca

SEQ ID NO: 3003413 - DNA, 25 bp, Homo sapien
tcctggtcaccctcgacaatggtga

SEQ ID NO: 3003414 - DNA, 25 bp, Homo sapien
gcatgtgcgatctgctggcgcctct

SEQ ID NO: 3003415 - DNA, 25 bp, Homo sapien
taaaaataatgcagctcagagagat

SEQ ID NO: 3003416 - DNA, 25 bp, Homo sapien
catgaaagttctggcgaacagtagg

SEQ ID NO: 3003417 - DNA, 25 bp, Homo sapien
tgtgtgaatgctcgtgcccatgaaa

SEQ ID NO: 3003418 - DNA, 25 bp, Homo sapien
catggtttcagcgttagaaattgag

SEQ ID NO: 3003419 - DNA, 25 bp, Homo sapien
gatcatccgtgacaacaacatggac

SEQ ID NO: 3003420 - DNA, 25 bp, Homo sapien
catggacttcactgacatcatcaag

SEQ ID NO: 3003421 - DNA, 25 bp, Homo sapien
tacgagctggtccagccatccaggc

SEQ ID NO: 3003422 - DNA, 25 bp, Homo sapien
gtttttcaatggtacgagctggtcc

SEQ ID NO: 3003423 - DNA, 25 bp, Homo sapien
caggctaggccttgccctggaacat

SEQ ID NO: 3003424 - DNA, 25 bp, Homo sapien
tccttgttgtccgtgagtccttggc

SEQ ID NO: 3003425 - DNA, 25 bp, Homo sapien
tgtgcctgccttagtgactccgtgg

SEQ ID NO: 3003426 - DNA, 25 bp, Homo sapien
gagaaacatgacaaagggccccgca

SEQ ID NO: 3003427 - DNA, 25 bp, Homo sapien
catcgctgtcacaatgggaatagca

SEQ ID NO: 3003428 - DNA, 25 bp, Homo sapien
caatctggacatagtcattcggcac

SEQ ID NO: 3003429 - DNA, 25 bp, Homo sapien
taaagtcttggagcatgaacagcca

SEQ ID NO: 3003430 - DNA, 25 bp, Homo sapien
caaaaggtaaaacacgcatgagagg

SEQ ID NO: 3003431 - DNA, 25 bp, Homo sapien
aatctattcaagacctttgctgacc

SEQ ID NO: 3003432 - DNA, 25 bp, Homo sapien
catctaaggattctttatttccaga

SEQ ID NO: 3003433 - DNA, 25 bp, Homo sapien
ggcttcctcccgctacactgaaagg

SEQ ID NO: 3003434 - DNA, 25 bp, Homo sapien
ccagcccatcagtgtgagcttcaca

SEQ ID NO: 3003435 - DNA, 25 bp, Homo sapien
cctgatgtctcaacgatgtggcttc

SEQ ID NO: 3003436 - DNA, 25 bp, Homo sapien
catacaaggaaaggccaaagcaggc

SEQ ID NO: 3003437 - DNA, 25 bp, Homo sapien
agctctggccctctgttctgtatag

SEQ ID NO: 3003438 - DNA, 25 bp, Homo sapien
agaaagccgcatcctaacacagagc

SEQ ID NO: 3003439 - DNA, 25 bp, Homo sapien
gccacttcctatgatctgtcacctg

SEQ ID NO: 3003440 - DNA, 25 bp, Homo sapien
cagtgactgcaaccgggtcagagag

SEQ ID NO: 3003441 - DNA, 25 bp, Homo sapien
tacggtaacgaatcacagtgactgc

SEQ ID NO: 3003442 - DNA, 25 bp, Homo sapien
tcattttaagtagtatctacggtaa

SEQ ID NO: 3003443 - DNA, 25 bp, Homo sapien
tcgcactgatttccgagggtaggga

SEQ ID NO: 3003444 - DNA, 25 bp, Homo sapien
gcgtgacgtccacatcgcactgatt

SEQ ID NO: 3003445 - DNA, 25 bp, Homo sapien
agaagtcagggagcgtgacgtccac

SEQ ID NO: 3003446 - DNA, 25 bp, Homo sapien
gtccacatcgcactgatttccgagg

SEQ ID NO: 3003447 - DNA, 25 bp, Homo sapien
gagtctcgcattttctcagagtcat

SEQ ID NO: 3003448 - DNA, 25 bp, Homo sapien
tcagagtcatcttaccaagtcctag

SEQ ID NO: 3003449 - DNA, 25 bp, Homo sapien
ccaagtcctagtgcagcagggtggc

SEQ ID NO: 3003450 - DNA, 25 bp, Homo sapien
atcagagtctcgcattttctcagag

SEQ ID NO: 3003451 - DNA, 25 bp, Homo sapien
ccgtgccgttgacttgctggtgcga

SEQ ID NO: 3003452 - DNA, 25 bp, Homo sapien
tggcccctgcagaacgtggttcaca

SEQ ID NO: 3003453 - DNA, 25 bp, Homo sapien
catggtcacagggttgagcacggtc

SEQ ID NO: 3003454 - DNA, 25 bp, Homo sapien
ccagcttgagtgtgctgactgggaa

SEQ ID NO: 3003455 - DNA, 25 bp, Homo sapien
ccacccccagccgtcgccaccagat

SEQ ID NO: 3003456 - DNA, 25 bp, Homo sapien
ctgtgtgggcgatgaccgtggagcc

SEQ ID NO: 3003457 - DNA, 25 bp, Homo sapien
acccccagccgtcgccaccagatgg

SEQ ID NO: 3003458 - DNA, 25 bp, Homo sapien
tgtgggcgatgaccgtggagccacc

SEQ ID NO: 3003459 - DNA, 25 bp, Homo sapien
ggaggggctggcagaggggtcttct

SEQ ID NO: 3003460 - DNA, 25 bp, Homo sapien
gctggcagaggggtcttctgctgtg

SEQ ID NO: 3003461 - DNA, 25 bp, Homo sapien
ggggctggcagaggggtcttctgct

SEQ ID NO: 3003462 - DNA, 25 bp, Homo sapien
aggggctggcagaggggtcttctgc

SEQ ID NO: 3003463 - DNA, 25 bp, Homo sapien
ctcagcttaggtgggcccaggcccg

SEQ ID NO: 3003464 - DNA, 25 bp, Homo sapien
gggacgatggctcagcttaggtggg

SEQ ID NO: 3003465 - DNA, 25 bp, Homo sapien
gctcagcttaggtgggcccaggccc

SEQ ID NO: 3003466 - DNA, 25 bp, Homo sapien
cgatggctcagcttaggtgggccca

SEQ ID NO: 3003467 - DNA, 25 bp, Homo sapien
cagaagggcggggaagcaagtggct

SEQ ID NO: 3003468 - DNA, 25 bp, Homo sapien
tggctggaggcgtagatgctcgtgg

SEQ ID NO: 3003469 - DNA, 25 bp, Homo sapien
agcaggtcagaagggcggggaagca

SEQ ID NO: 3003470 - DNA, 25 bp, Homo sapien
ggaagcaagtggctggaggcgtaga

SEQ ID NO: 3003471 - DNA, 25 bp, Homo sapien
tcgtgcttgagctctgccagccgct

SEQ ID NO: 3003472 - DNA, 25 bp, Homo sapien
agtacgtccatccactggctcagct

SEQ ID NO: 3003473 - DNA, 25 bp, Homo sapien
gtctgccgcagcacgcggtcaatct

SEQ ID NO: 3003474 - DNA, 25 bp, Homo sapien
ccagccgctgctgcgtggcaatctt

SEQ ID NO: 3003475 - DNA, 25 bp, Homo sapien
acaaacctctccctatcagctggcc

SEQ ID NO: 3003476 - DNA, 25 bp, Homo sapien
cacagaggcaagtccgtggcaacca

SEQ ID NO: 3003477 - DNA, 25 bp, Homo sapien
gaggcccagcgtcccaaggagtgtg

SEQ ID NO: 3003478 - DNA, 25 bp, Homo sapien
agtccgtggcaaccagcgggcccag

SEQ ID NO: 3003479 - DNA, 25 bp, Homo sapien
taaggaacctgatcctgcgcttcca

SEQ ID NO: 3003480 - DNA, 25 bp, Homo sapien
aacatcaacatccttgcacgatgag

SEQ ID NO: 3003481 - DNA, 25 bp, Homo sapien
ttgcacacttctgccgcgagctacc

SEQ ID NO: 3003482 - DNA, 25 bp, Homo sapien
gagccactaggcagtgacacgccct

SEQ ID NO: 3003483 - DNA, 25 bp, Homo sapien
catagtccgtttagatcccagagcc

SEQ ID NO: 3003484 - DNA, 25 bp, Homo sapien
tcaggaaccggctcatacaaagtct

SEQ ID NO: 3003485 - DNA, 25 bp, Homo sapien
gaaccgtgctctgtactggcctgaa

SEQ ID NO: 3003486 - DNA, 25 bp, Homo sapien
tccctgtccgagctgtgaatgaaag

SEQ ID NO: 3003487 - DNA, 25 bp, Homo sapien
gtgccacccagacttatcctgcagg

SEQ ID NO: 3003488 - DNA, 25 bp, Homo sapien
tgttcttagagacggaggtcgcact

SEQ ID NO: 3003489 - DNA, 25 bp, Homo sapien
cctggatgcacggtttggtacctat

SEQ ID NO: 3003490 - DNA, 25 bp, Homo sapien
agtgacatgggtcaaaagcttcttc

SEQ ID NO: 3003491 - DNA, 25 bp, Homo sapien
ccgcagcacgctcagattggacgtc

SEQ ID NO: 3003492 - DNA, 25 bp, Homo sapien
tggatgtaccgcagcgccgtccgca

SEQ ID NO: 3003493 - DNA, 25 bp, Homo sapien
gggatgttccgcttcagggtctcaa

SEQ ID NO: 3003494 - DNA, 25 bp, Homo sapien
cagattggacgtcttcttgtcatcc

SEQ ID NO: 3003495 - DNA, 25 bp, Homo sapien
ttgttgtggacttctctggttccga

SEQ ID NO: 3003496 - DNA, 25 bp, Homo sapien
ttctccaatttgttgtggacttctc

SEQ ID NO: 3003497 - DNA, 25 bp, Homo sapien
caatttgttgtggacttctctggtt

SEQ ID NO: 3003498 - DNA, 25 bp, Homo sapien
gttcttctccaatttgttgtggact

SEQ ID NO: 3003499 - DNA, 25 bp, Homo sapien
ttcttcagctggtgccaacttcagg

SEQ ID NO: 3003500 - DNA, 25 bp, Homo sapien
ctggtgccaacttcagggtccccag

SEQ ID NO: 3003501 - DNA, 25 bp, Homo sapien
cttctgttcactggatttgacttct

SEQ ID NO: 3003502 - DNA, 25 bp, Homo sapien
cttcttctgttcactggatttgact

SEQ ID NO: 3003503 - DNA, 25 bp, Homo sapien
tggaatggtggccttcgagtccggc

SEQ ID NO: 3003504 - DNA, 25 bp, Homo sapien
gggctgccattgggtggaatggtgg

SEQ ID NO: 3003505 - DNA, 25 bp, Homo sapien
tatggtcaggacaggcgtggggagg

SEQ ID NO: 3003506 - DNA, 25 bp, Homo sapien
atggtggccttcgagtccggcagta

SEQ ID NO: 3003507 - DNA, 25 bp, Homo sapien
ccttaatgctgagtccgggggcgcc

SEQ ID NO: 3003508 - DNA, 25 bp, Homo sapien
atgctgagtccgggggcgccaacca

SEQ ID NO: 3003509 - DNA, 25 bp, Homo sapien
tccttaatgctgagtccgggggcgc

SEQ ID NO: 3003510 - DNA, 25 bp, Homo sapien
ttaatgctgagtccgggggcgccaa

SEQ ID NO: 3003511 - DNA, 25 bp, Homo sapien
gacgaggcgccaggggcagaggctg

SEQ ID NO: 3003512 - DNA, 25 bp, Homo sapien
cgaggcgccaggggcagaggctggg

SEQ ID NO: 3003513 - DNA, 25 bp, Homo sapien
tgacgaggcgccaggggcagaggct

SEQ ID NO: 3003514 - DNA, 25 bp, Homo sapien
ctgacgaggcgccaggggcagaggc

SEQ ID NO: 3003515 - DNA, 25 bp, Homo sapien
gagttggtcaccacagggataggga

SEQ ID NO: 3003516 - DNA, 25 bp, Homo sapien
tggccaggctattggccttcttctg

SEQ ID NO: 3003517 - DNA, 25 bp, Homo sapien
tggcgcctccatgcggggttcctcc

SEQ ID NO: 3003518 - DNA, 25 bp, Homo sapien
tgctccaagcgaagccgctcctgct

SEQ ID NO: 3003519 - DNA, 25 bp, Homo sapien
tcaggcctaaagcatcctctgacat

SEQ ID NO: 3003520 - DNA, 25 bp, Homo sapien
acatcctcagtgacaccccgctcag

SEQ ID NO: 3003521 - DNA, 25 bp, Homo sapien
gtccttcaggcctaaagcatcctct

SEQ ID NO: 3003522 - DNA, 25 bp, Homo sapien
tgacatcctcagtgacaccccgctc

SEQ ID NO: 3003523 - DNA, 25 bp, Homo sapien
ggcaccggggaaagtgcacctgcct

SEQ ID NO: 3003524 - DNA, 25 bp, Homo sapien
gagacaatacaaatacccaaccact

SEQ ID NO: 3003525 - DNA, 25 bp, Homo sapien
ccggggaaagtgcacctgcctggtt

SEQ ID NO: 3003526 - DNA, 25 bp, Homo sapien
ccaggcaccggggaaagtgcacctg

SEQ ID NO: 3003527 - DNA, 25 bp, Homo sapien
tggcggcagcaggtgacttaatctc

SEQ ID NO: 3003528 - DNA, 25 bp, Homo sapien
tgcgtactcgaactgcaacgtgttg

SEQ ID NO: 3003529 - DNA, 25 bp, Homo sapien
tgtgcccaaacgtaggacattcttg

SEQ ID NO: 3003530 - DNA, 25 bp, Homo sapien
taatctctccgaaccttgtgcacgg

SEQ ID NO: 3003531 - DNA, 25 bp, Homo sapien
cagccggggagtgtgggcgatgtcc

SEQ ID NO: 3003532 - DNA, 25 bp, Homo sapien
gaccatcaaggcaacagccggggag

SEQ ID NO: 3003533 - DNA, 25 bp, Homo sapien
ggaccatcaaggcaacagccgggga

SEQ ID NO: 3003534 - DNA, 25 bp, Homo sapien
catcaaggcaacagccggggagtgt

SEQ ID NO: 3003535 - DNA, 25 bp, Homo sapien
taaccaacgggctcggaacgcaggc

SEQ ID NO: 3003536 - DNA, 25 bp, Homo sapien
cacgcaacattccaggcgagagcgg

SEQ ID NO: 3003537 - DNA, 25 bp, Homo sapien
cgagagcgggtttggaacgcgcaga

SEQ ID NO: 3003538 - DNA, 25 bp, Homo sapien
ttggaacgcgcagacacgccacatt

SEQ ID NO: 3003539 - DNA, 25 bp, Homo sapien
cacacatcctcagtgccaccgaggg

SEQ ID NO: 3003540 - DNA, 25 bp, Homo sapien
cacatcctcagtgccaccgagggct

SEQ ID NO: 3003541 - DNA, 25 bp, Homo sapien
acacatcctcagtgccaccgagggc

SEQ ID NO: 3003542 - DNA, 25 bp, Homo sapien
acatcctcagtgccaccgagggctc

SEQ ID NO: 3003543 - DNA, 25 bp, Homo sapien
tgttgctgcgcttgccattccagga

SEQ ID NO: 3003544 - DNA, 25 bp, Homo sapien
attccaggaagcgggccgcctccag

SEQ ID NO: 3003545 - DNA, 25 bp, Homo sapien
tctctgttgttgctgcgcttgccat

SEQ ID NO: 3003546 - DNA, 25 bp, Homo sapien
gcctccagtagcgtctctatgctca

SEQ ID NO: 3003547 - DNA, 25 bp, Homo sapien
gccgaggctgcggcccgcgagccgg

SEQ ID NO: 3003548 - DNA, 25 bp, Homo sapien
ggcccgcgagccgggcacaggtcag

SEQ ID NO: 3003549 - DNA, 25 bp, Homo sapien
cgcgccgagagctgccgggggcgcg

SEQ ID NO: 3003550 - DNA, 25 bp, Homo sapien
tgcggcccgcgagccgggcacaggt

SEQ ID NO: 3003551 - DNA, 25 bp, Homo sapien
gacaagaaagggctttgcaacaaga

SEQ ID NO: 3003552 - DNA, 25 bp, Homo sapien
aagatggcgaggaggcaccgacaca

SEQ ID NO: 3003553 - DNA, 25 bp, Homo sapien
ttgcaacaagatggcgaggaggcac

SEQ ID NO: 3003554 - DNA, 25 bp, Homo sapien
ccgacacacacaacaagggaaggag

SEQ ID NO: 3003555 - DNA, 25 bp, Homo sapien
ctggtacagcggcagcgatagaccc

SEQ ID NO: 3003556 - DNA, 25 bp, Homo sapien
cgatagaccccaggcggctgaaagc

SEQ ID NO: 3003557 - DNA, 25 bp, Homo sapien
aagcttatttggagcgtcccggagc

SEQ ID NO: 3003558 - DNA, 25 bp, Homo sapien
tgagacccaactccgctgttctgct

SEQ ID NO: 3003559 - DNA, 25 bp, Homo sapien
cggattagaacggaacagcccagtt

SEQ ID NO: 3003560 - DNA, 25 bp, Homo sapien
tgtttgccagtactagtctacagag

SEQ ID NO: 3003561 - DNA, 25 bp, Homo sapien
accagtatggttgggcctggcccat

SEQ ID NO: 3003562 - DNA, 25 bp, Homo sapien
aatcaagaacttcgtgaaccagagg

SEQ ID NO: 3003563 - DNA, 25 bp, Homo sapien
ggcgtgaagccgaaagtacagatgt

SEQ ID NO: 3003564 - DNA, 25 bp, Homo sapien
tccaagagctatgaaaatcagtgcc

SEQ ID NO: 3003565 - DNA, 25 bp, Homo sapien
tagtacactcaagacataccagaga

SEQ ID NO: 3003566 - DNA, 25 bp, Homo sapien
cagagacatccccttagtggaactg

SEQ ID NO: 3003567 - DNA, 25 bp, Homo sapien
catggacaggtattcagggaggctc

SEQ ID NO: 3003568 - DNA, 25 bp, Homo sapien
catggaggcaactaaccgtggatca

SEQ ID NO: 3003569 - DNA, 25 bp, Homo sapien
ccccaagtgagttgtcagaggacct

SEQ ID NO: 3003570 - DNA, 25 bp, Homo sapien
gaattcctttgacagaggtggaccc

SEQ ID NO: 3003571 - DNA, 25 bp, Homo sapien
caggtctgaacgtcgaagtctgtgc

SEQ ID NO: 3003572 - DNA, 25 bp, Homo sapien
gaacccaggtctgaacgtcgaagtc

SEQ ID NO: 3003573 - DNA, 25 bp, Homo sapien
gcaaggaatggaactggacgggaac

SEQ ID NO: 3003574 - DNA, 25 bp, Homo sapien
tctgaacgtcgaagtctgtgctctt

SEQ ID NO: 3003575 - DNA, 25 bp, Homo sapien
ctatgtgcacaactgctgggcggcc

SEQ ID NO: 3003576 - DNA, 25 bp, Homo sapien
cagaaacgccccttgtgagaagcaa

SEQ ID NO: 3003577 - DNA, 25 bp, Homo sapien
gaaaaactggatccaaaggactggc

SEQ ID NO: 3003578 - DNA, 25 bp, Homo sapien
cacgacatgcatggtagccagccaa

SEQ ID NO: 3003579 - DNA, 25 bp, Homo sapien
gccaagggtgccctcgtgtggccac

SEQ ID NO: 3003580 - DNA, 25 bp, Homo sapien
tatttcaagaaaacaccgtggacag

SEQ ID NO: 3003581 - DNA, 25 bp, Homo sapien
aaatacaaatctgggtagcaactgg

SEQ ID NO: 3003582 - DNA, 25 bp, Homo sapien
gaagtgaaggcgctttgataaaagg

SEQ ID NO: 3003583 - DNA, 25 bp, Homo sapien
caaaaggcctcggatttcccacagg

SEQ ID NO: 3003584 - DNA, 25 bp, Homo sapien
caacttagaagttcgagtgctcaca

SEQ ID NO: 3003585 - DNA, 25 bp, Homo sapien
gttatcaggagaccagaagccgatt

SEQ ID NO: 3003586 - DNA, 25 bp, Homo sapien
tgaaagggtactgccaaaacgcggc

SEQ ID NO: 3003587 - DNA, 25 bp, Homo sapien
tcggctccagactgaaagctggcct

SEQ ID NO: 3003588 - DNA, 25 bp, Homo sapien
tctggacaccgggagagtaacactc

SEQ ID NO: 3003589 - DNA, 25 bp, Homo sapien
aaatgcacagaaggcactcggctcc

SEQ ID NO: 3003590 - DNA, 25 bp, Homo sapien
taccaaccccgcaacatgaatgtga

SEQ ID NO: 3003591 - DNA, 25 bp, Homo sapien
tgggcccagcaaatgactcaaatgt

SEQ ID NO: 3003592 - DNA, 25 bp, Homo sapien
tagaaaggaacacgccaatgccaag

SEQ ID NO: 3003593 - DNA, 25 bp, Homo sapien
tctggaaatccctacgacacaggct

SEQ ID NO: 3003594 - DNA, 25 bp, Homo sapien
tacgcagcatgaggacaaccaaagt

SEQ ID NO: 3003595 - DNA, 25 bp, Homo sapien
gagcttttagaagtaactctaggag

SEQ ID NO: 3003596 - DNA, 25 bp, Homo sapien
ctcacagagcttttagaagtaactc

SEQ ID NO: 3003597 - DNA, 25 bp, Homo sapien
tggaggtccacggaccaggttaaga

SEQ ID NO: 3003598 - DNA, 25 bp, Homo sapien
ggttaagaacactggtcagaggctg

SEQ ID NO: 3003599 - DNA, 25 bp, Homo sapien
ctagacaacaagagtaaaactccac

SEQ ID NO: 3003600 - DNA, 25 bp, Homo sapien
tgtttcaaggacacagttactccgg

SEQ ID NO: 3003601 - DNA, 25 bp, Homo sapien
cagaaccctaggctgctgatgcaac

SEQ ID NO: 3003602 - DNA, 25 bp, Homo sapien
gggacggctactgaaccctggcatt

SEQ ID NO: 3003603 - DNA, 25 bp, Homo sapien
caagttaaggcacagcagttccgct

SEQ ID NO: 3003604 - DNA, 25 bp, Homo sapien
gattgatgcaaggtaggccccatct

SEQ ID NO: 3003605 - DNA, 25 bp, Homo sapien
ccccaggattcaaataggaccgctg

SEQ ID NO: 3003606 - DNA, 25 bp, Homo sapien
gactttcttaagctacctacggcac

SEQ ID NO: 3003607 - DNA, 25 bp, Homo sapien
gaatgtgccatttaccgggtggtcc

SEQ ID NO: 3003608 - DNA, 25 bp, Homo sapien
tccacatcgtgctactaatgggccg

SEQ ID NO: 3003609 - DNA, 25 bp, Homo sapien
ttgagccagcttgcaatccctcggg

SEQ ID NO: 3003610 - DNA, 25 bp, Homo sapien
tatcaacacgtttccaactgtgcag

SEQ ID NO: 3003611 - DNA, 25 bp, Homo sapien
taatgggccgctggtaggattcctc

SEQ ID NO: 3003612 - DNA, 25 bp, Homo sapien
tgcatctccactaaggcatcgtcca

SEQ ID NO: 3003613 - DNA, 25 bp, Homo sapien
cacttaaacaggtactgtccggcca

SEQ ID NO: 3003614 - DNA, 25 bp, Homo sapien
atcagatccctgttctggccctcaa

SEQ ID NO: 3003615 - DNA, 25 bp, Homo sapien
tatgtaggtgcaaagctggttcatc

SEQ ID NO: 3003616 - DNA, 25 bp, Homo sapien
tgaatgacgtcctcaggagctcggg

SEQ ID NO: 3003617 - DNA, 25 bp, Homo sapien
tgggctccgttgctagagccttgac

SEQ ID NO: 3003618 - DNA, 25 bp, Homo sapien
gaatccaggagttttctatggccgt

SEQ ID NO: 3003619 - DNA, 25 bp, Homo sapien
ggcccctggccagttcttggctatt

SEQ ID NO: 3003620 - DNA, 25 bp, Homo sapien
cttttccacagggaactcgtttatg

SEQ ID NO: 3003621 - DNA, 25 bp, Homo sapien
tccacagggaactcgtttatgctgg

SEQ ID NO: 3003622 - DNA, 25 bp, Homo sapien
cacagggaactcgtttatgctggac

SEQ ID NO: 3003623 - DNA, 25 bp, Homo sapien
tttccacagggaactcgtttatgct

SEQ ID NO: 3003624 - DNA, 25 bp, Homo sapien
ggacgccagcaccacgaatgttatg

SEQ ID NO: 3003625 - DNA, 25 bp, Homo sapien
tgacaacgactatgccttccgccgt

SEQ ID NO: 3003626 - DNA, 25 bp, Homo sapien
cgtctccgagcgcagaggtgatgct

SEQ ID NO: 3003627 - DNA, 25 bp, Homo sapien
gataattccttcatcacggacgcca

SEQ ID NO: 3003628 - DNA, 25 bp, Homo sapien
ctccaaaagtaaggacgggcttcat

SEQ ID NO: 3003629 - DNA, 25 bp, Homo sapien
tctccaaaagtaaggacgggcttca

SEQ ID NO: 3003630 - DNA, 25 bp, Homo sapien
ccacgcccagcttaaatgtgactca

SEQ ID NO: 3003631 - DNA, 25 bp, Homo sapien
ccagcttaaatgtgactcaatgtta

SEQ ID NO: 3003632 - DNA, 25 bp, Homo sapien
cgcccagcttaaatgtgactcaatg

SEQ ID NO: 3003633 - DNA, 25 bp, Homo sapien
gcccagcttaaatgtgactcaatgt

SEQ ID NO: 3003634 - DNA, 25 bp, Homo sapien
gtcaggacagatctgggaggcccaa

SEQ ID NO: 3003635 - DNA, 25 bp, Homo sapien
tctatgtaaagccagacagggacca

SEQ ID NO: 3003636 - DNA, 25 bp, Homo sapien
gatgagaaactgctaggatggtcca

SEQ ID NO: 3003637 - DNA, 25 bp, Homo sapien
tcaatgcagttaagtccagaggaag

SEQ ID NO: 3003638 - DNA, 25 bp, Homo sapien
gatggctaaataaaaacctcgtgag

SEQ ID NO: 3003639 - DNA, 25 bp, Homo sapien
tgcgtctaacagaacacttgggagt

SEQ ID NO: 3003640 - DNA, 25 bp, Homo sapien
tgccctttactacgtggacctgaca

SEQ ID NO: 3003641 - DNA, 25 bp, Homo sapien
cctgtagcggctgaagtgcgtctaa

SEQ ID NO: 3003642 - DNA, 25 bp, Homo sapien
ggtgtggagtgccagggtgctttat

SEQ ID NO: 3003643 - DNA, 25 bp, Homo sapien
agctggtgtggagtgccagggtgct

SEQ ID NO: 3003644 - DNA, 25 bp, Homo sapien
tgtggagtgccagggtgctttatct

SEQ ID NO: 3003645 - DNA, 25 bp, Homo sapien
gcccggaggactcggtctcggagct

SEQ ID NO: 3003646 - DNA, 25 bp, Homo sapien
gggataactcagagcattactaatg

SEQ ID NO: 3003647 - DNA, 25 bp, Homo sapien
gctgcagctgttagtgtctccacgg

SEQ ID NO: 3003648 - DNA, 25 bp, Homo sapien
gcacttgaaaacaggtgcagttcca

SEQ ID NO: 3003649 - DNA, 25 bp, Homo sapien
taaccatgtggtgtgagggccctga

SEQ ID NO: 3003650 - DNA, 25 bp, Homo sapien
aactccaagctaaggcccatctcat

SEQ ID NO: 3003651 - DNA, 25 bp, Homo sapien
taaaaactccaagctaaggcccatc

SEQ ID NO: 3003652 - DNA, 25 bp, Homo sapien
cataaaaactccaagctaaggccca

SEQ ID NO: 3003653 - DNA, 25 bp, Homo sapien
ggtactgtgacatcatcataaaaac

SEQ ID NO: 3003654 - DNA, 25 bp, Homo sapien
cttctgaaacaggagcacggggctc

SEQ ID NO: 3003655 - DNA, 25 bp, Homo sapien
cgacctgccttctgaaacaggagca

SEQ ID NO: 3003656 - DNA, 25 bp, Homo sapien
tctgaaacaggagcacggggctctg

SEQ ID NO: 3003657 - DNA, 25 bp, Homo sapien
ttgcgacctgccttctgaaacagga

SEQ ID NO: 3003658 - DNA, 25 bp, Homo sapien
cccttgtatgcgaagctcctccttc

SEQ ID NO: 3003659 - DNA, 25 bp, Homo sapien
cttcagaggcgccaggctgcatttc

SEQ ID NO: 3003660 - DNA, 25 bp, Homo sapien
ttctttcccagcatgcagctatacc

SEQ ID NO: 3003661 - DNA, 25 bp, Homo sapien
tcctccttcagaggcgccaggctgc

SEQ ID NO: 3003662 - DNA, 25 bp, Homo sapien
gcttcagcccatgaaagattagtta

SEQ ID NO: 3003663 - DNA, 25 bp, Homo sapien
tgtaaaggacctttgcttcagccca

SEQ ID NO: 3003664 - DNA, 25 bp, Homo sapien
gattagttactatgggaattgccct

SEQ ID NO: 3003665 - DNA, 25 bp, Homo sapien
gggaattgcccttccaccataaaca

SEQ ID NO: 3003666 - DNA, 25 bp, Homo sapien
cccatggtattcaataccatgctgt

SEQ ID NO: 3003667 - DNA, 25 bp, Homo sapien
gcccatggtattcaataccatgctg

SEQ ID NO: 3003668 - DNA, 25 bp, Homo sapien
catttctggcgtgaagagcacggag

SEQ ID NO: 3003669 - DNA, 25 bp, Homo sapien
acatttctggcgtgaagagcacgga

SEQ ID NO: 3003670 - DNA, 25 bp, Homo sapien
gtccttccaggtgcgtcacatcagg

SEQ ID NO: 3003671 - DNA, 25 bp, Homo sapien
agcacggaggcgctgcttgtccttc

SEQ ID NO: 3003672 - DNA, 25 bp, Homo sapien
aatcaacaaggctgccatatcaatc

SEQ ID NO: 3003673 - DNA, 25 bp, Homo sapien
agagcagacaccaatcaacaaggct

SEQ ID NO: 3003674 - DNA, 25 bp, Homo sapien
agctgctggatccaatcttttctcc

SEQ ID NO: 3003675 - DNA, 25 bp, Homo sapien
cgtggcgcaagctgctggatccaat

SEQ ID NO: 3003676 - DNA, 25 bp, Homo sapien
tgagatcacaccattgcactccagc

SEQ ID NO: 3003677 - DNA, 25 bp, Homo sapien
agctgagatcacaccattgcactcc

SEQ ID NO: 3003678 - DNA, 25 bp, Homo sapien
cgcttgaatccaggaagcgggggtt

SEQ ID NO: 3003679 - DNA, 25 bp, Homo sapien
gcagtgagctgagatcacaccattg

SEQ ID NO: 3003680 - DNA, 25 bp, Homo sapien
catggatgatccttttaacaaactc

SEQ ID NO: 3003681 - DNA, 25 bp, Homo sapien
gtcatggatgatccttttaacaaac

SEQ ID NO: 3003682 - DNA, 25 bp, Homo sapien
agttgtagactgtcatggatgatcc

SEQ ID NO: 3003683 - DNA, 25 bp, Homo sapien
tttaagttgtagactgtcatggatg

SEQ ID NO: 3003684 - DNA, 25 bp, Homo sapien
gaggtcttcgaggatttcgtgagtt

SEQ ID NO: 3003685 - DNA, 25 bp, Homo sapien
ctaggcggaggtcttcgaggatttc

SEQ ID NO: 3003686 - DNA, 25 bp, Homo sapien
gtattaacagaactaggcggaggtc

SEQ ID NO: 3003687 - DNA, 25 bp, Homo sapien
ttcgaggatttcgtgagtttactcc

SEQ ID NO: 3003688 - DNA, 25 bp, Homo sapien
ctttttataaagcccaatctgtcac

SEQ ID NO: 3003689 - DNA, 25 bp, Homo sapien
tttataaagcccaatctgtcacttt

SEQ ID NO: 3003690 - DNA, 25 bp, Homo sapien
ttttataaagcccaatctgtcactt

SEQ ID NO: 3003691 - DNA, 25 bp, Homo sapien
tttttataaagcccaatctgtcact

SEQ ID NO: 3003692 - DNA, 25 bp, Homo sapien
aaagtcatagattatctcagattct

SEQ ID NO: 3003693 - DNA, 25 bp, Homo sapien
ctttaagagcatccatcaggagtgt

SEQ ID NO: 3003694 - DNA, 25 bp, Homo sapien
ttaagagcatccatcaggagtgtct

SEQ ID NO: 3003695 - DNA, 25 bp, Homo sapien
aagtcatagattatctcagattctt

SEQ ID NO: 3003696 - DNA, 25 bp, Homo sapien
cattcaaggttgctccaagtaaggg

SEQ ID NO: 3003697 - DNA, 25 bp, Homo sapien
ttgaaacacatatcatccacttctg

SEQ ID NO: 3003698 - DNA, 25 bp, Homo sapien
gatcagataagttattctgttccac

SEQ ID NO: 3003699 - DNA, 25 bp, Homo sapien
cgaggaaataccagccattcaaggt

SEQ ID NO: 3003700 - DNA, 25 bp, Homo sapien
gatgatggccgcaacatttaagctc

SEQ ID NO: 3003701 - DNA, 25 bp, Homo sapien
taagctctccgacggtcacggtgaa

SEQ ID NO: 3003702 - DNA, 25 bp, Homo sapien
tcacggtgaacgctgcattgcctac

SEQ ID NO: 3003703 - DNA, 25 bp, Homo sapien
gaggaaatccagactcgtcatactg

SEQ ID NO: 3003704 - DNA, 25 bp, Homo sapien
tggccccagtgctactggacaagca

SEQ ID NO: 3003705 - DNA, 25 bp, Homo sapien
actggacaagcacgtccttggatac

SEQ ID NO: 3003706 - DNA, 25 bp, Homo sapien
cgagggtatcctggccccagtgcta

SEQ ID NO: 3003707 - DNA, 25 bp, Homo sapien
catttttgcccgagggtatcctggc

SEQ ID NO: 3003708 - DNA, 25 bp, Homo sapien
acacatcagtgctcaaaggttgcag

SEQ ID NO: 3003709 - DNA, 25 bp, Homo sapien
tctggaacgctccaacgcacattgc

SEQ ID NO: 3003710 - DNA, 25 bp, Homo sapien
tatctgtagccagcttcttttgtac

SEQ ID NO: 3003711 - DNA, 25 bp, Homo sapien
caacaacaaatacccagtagaaaag

SEQ ID NO: 3003712 - DNA, 25 bp, Homo sapien
gaccgatcagatcttctacccagtg

SEQ ID NO: 3003713 - DNA, 25 bp, Homo sapien
ccttaggagagtacacgtcagagct

SEQ ID NO: 3003714 - DNA, 25 bp, Homo sapien
tgtcagaatcctggtgaccgatcag

SEQ ID NO: 3003715 - DNA, 25 bp, Homo sapien
ctcaagggaactgtgggaattagtc

SEQ ID NO: 3003716 - DNA, 25 bp, Homo sapien
cactagtctgagtgtcaaaaatact

SEQ ID NO: 3003717 - DNA, 25 bp, Homo sapien
gtacaagacattaagctgaggctag

SEQ ID NO: 3003718 - DNA, 25 bp, Homo sapien
ccaatgaagagctgattgttagact

SEQ ID NO: 3003719 - DNA, 25 bp, Homo sapien
tctgaaaagatccagacactagtct

SEQ ID NO: 3003720 - DNA, 25 bp, Homo sapien
ctagcgtgtgactgtggcagtgaca

SEQ ID NO: 3003721 - DNA, 25 bp, Homo sapien
taaggctttcctagaactgagcaca

SEQ ID NO: 3003722 - DNA, 25 bp, Homo sapien
tagctgattaagtacaatagtaagt

SEQ ID NO: 3003723 - DNA, 25 bp, Homo sapien
ccactagtgtataaactagcgtgtg

SEQ ID NO: 3003724 - DNA, 25 bp, Homo sapien
tgcatgcattgatttactcagagcc

SEQ ID NO: 3003725 - DNA, 25 bp, Homo sapien
tgtatctatttcttgcatgcattga

SEQ ID NO: 3003726 - DNA, 25 bp, Homo sapien
tggatgccagatatgcaaagtcagg

SEQ ID NO: 3003727 - DNA, 25 bp, Homo sapien
aagtcaggaggtttgtccttgtatc

SEQ ID NO: 3003728 - DNA, 25 bp, Homo sapien
cactagcccaaaactcaagaatgag

SEQ ID NO: 3003729 - DNA, 25 bp, Homo sapien
gacccatgatagtaaatctgcgtga

SEQ ID NO: 3003730 - DNA, 25 bp, Homo sapien
tgatccacgggttaagtgacccatg

SEQ ID NO: 3003731 - DNA, 25 bp, Homo sapien
caagaatgaggaacccgtgtgatcc

SEQ ID NO: 3003732 - DNA, 25 bp, Homo sapien
aatcttaaagcagccgcatagcgaa

SEQ ID NO: 3003733 - DNA, 25 bp, Homo sapien
gcatagcgaagctcctagaaacgca

SEQ ID NO: 3003734 - DNA, 25 bp, Homo sapien
tagaaacgcagatgatacgctccca

SEQ ID NO: 3003735 - DNA, 25 bp, Homo sapien
gaggttcctgccagacgtcgtgtct

SEQ ID NO: 3003736 - DNA, 25 bp, Homo sapien
ctatgatccacatagccacagtctg

SEQ ID NO: 3003737 - DNA, 25 bp, Homo sapien
agccatcctccatgtgacgattcta

SEQ ID NO: 3003738 - DNA, 25 bp, Homo sapien
gtgacgattctatgatccacatagc

SEQ ID NO: 3003739 - DNA, 25 bp, Homo sapien
tccatgtgacgattctatgatccac

SEQ ID NO: 3003740 - DNA, 25 bp, Homo sapien
catgtcaacatgggcttccaggacc

SEQ ID NO: 3003741 - DNA, 25 bp, Homo sapien
atgtcaacatgggcttccaggaccc

SEQ ID NO: 3003742 - DNA, 25 bp, Homo sapien
cattgcataacttgacaagttgagg

SEQ ID NO: 3003743 - DNA, 25 bp, Homo sapien
gcataacttgacaagttgaggccag

SEQ ID NO: 3003744 - DNA, 25 bp, Homo sapien
ccattgcataacttgacaagttgag

SEQ ID NO: 3003745 - DNA, 25 bp, Homo sapien
attgcataacttgacaagttgaggc

SEQ ID NO: 3003746 - DNA, 25 bp, Homo sapien
ggtccagtttggacttgccgtgtac

SEQ ID NO: 3003747 - DNA, 25 bp, Homo sapien
ctgaggtccagtttggacttgccgt

SEQ ID NO: 3003748 - DNA, 25 bp, Homo sapien
tccagtttggacttgccgtgtacgc

SEQ ID NO: 3003749 - DNA, 25 bp, Homo sapien
cagtttggacttgccgtgtacgctt

SEQ ID NO: 3003750 - DNA, 25 bp, Homo sapien
ggatgatactaaacggggcctgcat

SEQ ID NO: 3003751 - DNA, 25 bp, Homo sapien
gaggaaggagacaactgatgactga

SEQ ID NO: 3003752 - DNA, 25 bp, Homo sapien
ctgactgagcaggatgatactaaac

SEQ ID NO: 3003753 - DNA, 25 bp, Homo sapien
gagacaactgatgactgactgagca

SEQ ID NO: 3003754 - DNA, 25 bp, Homo sapien
agtggctgttcacaggtgtgatccc

SEQ ID NO: 3003755 - DNA, 25 bp, Homo sapien
tggctgttcacaggtgtgatcccac

SEQ ID NO: 3003756 - DNA, 25 bp, Homo sapien
cactactgatcagtacaggagtttt

SEQ ID NO: 3003757 - DNA, 25 bp, Homo sapien
gctgttcacaggtgtgatcccacta

SEQ ID NO: 3003758 - DNA, 25 bp, Homo sapien
tggacacctgattggcccagtgcac

SEQ ID NO: 3003759 - DNA, 25 bp, Homo sapien
cgggactataggcaggcattaccat

SEQ ID NO: 3003760 - DNA, 25 bp, Homo sapien
ttctgacctgggcctgttacccctc

SEQ ID NO: 3003761 - DNA, 25 bp, Homo sapien
cctgattggcccagtgcactacagc

SEQ ID NO: 3003762 - DNA, 25 bp, Homo sapien
cttttcccttgccaatagtggtatt

SEQ ID NO: 3003763 - DNA, 25 bp, Homo sapien
tgcagcttgggcctcactctcagac

SEQ ID NO: 3003764 - DNA, 25 bp, Homo sapien
cccttgccaatagtggtattttcca

SEQ ID NO: 3003765 - DNA, 25 bp, Homo sapien
ggcctcactctcagactttcagtaa

SEQ ID NO: 3003766 - DNA, 25 bp, Homo sapien
tcttctgtcaccatgctaatagcca

SEQ ID NO: 3003767 - DNA, 25 bp, Homo sapien
tctgtcaccatgctaatagccacac

SEQ ID NO: 3003768 - DNA, 25 bp, Homo sapien
ttctgtcaccatgctaatagccaca

SEQ ID NO: 3003769 - DNA, 25 bp, Homo sapien
cttcttctgtcaccatgctaatagc

SEQ ID NO: 3003770 - DNA, 25 bp, Homo sapien
tggtgggaaggtcatagtcgatgag

SEQ ID NO: 3003771 - DNA, 25 bp, Homo sapien
ccaattctgtggatatagttttctc

SEQ ID NO: 3003772 - DNA, 25 bp, Homo sapien
aactgtccacctcgaccaattctgt

SEQ ID NO: 3003773 - DNA, 25 bp, Homo sapien
gggaaggtcatagtcgatgagtaaa

SEQ ID NO: 3003774 - DNA, 25 bp, Homo sapien
ggtcagtggtaatcaaaactctgct

SEQ ID NO: 3003775 - DNA, 25 bp, Homo sapien
tagagccagaacaaaactccctcat

SEQ ID NO: 3003776 - DNA, 25 bp, Homo sapien
aactctgctagagccagaacaaaac

SEQ ID NO: 3003777 - DNA, 25 bp, Homo sapien
tgcagcacagcaatgcctctggcca

SEQ ID NO: 3003778 - DNA, 25 bp, Homo sapien
tacccccaattatatggggagcttc

SEQ ID NO: 3003779 - DNA, 25 bp, Homo sapien
ctcagcacacacgtgggtgccccct

SEQ ID NO: 3003780 - DNA, 25 bp, Homo sapien
caaacaggatgttgttgttgagctt

SEQ ID NO: 3003781 - DNA, 25 bp, Homo sapien
ctccagttaagcatatcacacacag

SEQ ID NO: 3003782 - DNA, 25 bp, Homo sapien
gctcgctgctggacggcaaaggctt

SEQ ID NO: 3003783 - DNA, 25 bp, Homo sapien
ttccagttactctctatgacgtctc

SEQ ID NO: 3003784 - DNA, 25 bp, Homo sapien
tctctatgacgtctccaggctccat

SEQ ID NO: 3003785 - DNA, 25 bp, Homo sapien
cataggcgtagacgccacggagaag

SEQ ID NO: 3003786 - DNA, 25 bp, Homo sapien
gttactctctatgacgtctccaggc

SEQ ID NO: 3003787 - DNA, 25 bp, Homo sapien
cgacacgggagtctagggagcgaga

SEQ ID NO: 3003788 - DNA, 25 bp, Homo sapien
actcgagccccggaacggctgagga

SEQ ID NO: 3003789 - DNA, 25 bp, Homo sapien
gagagaaaccgcgagcgccgagctt

SEQ ID NO: 3003790 - DNA, 25 bp, Homo sapien
ctcctgtgacagacggagctggagc

SEQ ID NO: 3003791 - DNA, 25 bp, Homo sapien
tgcagcgctccggtaaggcggcgcg

SEQ ID NO: 3003792 - DNA, 25 bp, Homo sapien
gcgggtctgcgccctcccctctgtc

SEQ ID NO: 3003793 - DNA, 25 bp, Homo sapien
ggcggtgcagcgctccggtaaggcg

SEQ ID NO: 3003794 - DNA, 25 bp, Homo sapien
gcgctccggtaaggcggcgcgggtc

SEQ ID NO: 3003795 - DNA, 25 bp, Homo sapien
tcctccctcggtgacttagcaagaa

SEQ ID NO: 3003796 - DNA, 25 bp, Homo sapien
tccccaagaagggatcgccctcctc

SEQ ID NO: 3003797 - DNA, 25 bp, Homo sapien
ctcagttatcggctcggggaccggc

SEQ ID NO: 3003798 - DNA, 25 bp, Homo sapien
tcttggggaaaaggatcggccctgc

SEQ ID NO: 3003799 - DNA, 25 bp, Homo sapien
catagggccttccaggcattccgtc

SEQ ID NO: 3003800 - DNA, 25 bp, Homo sapien
tccacccaccgaatctggcaggatt

SEQ ID NO: 3003801 - DNA, 25 bp, Homo sapien
taacattcagcttcgaggctccctg

SEQ ID NO: 3003802 - DNA, 25 bp, Homo sapien
cgtccccgactggtccttaagatgg

SEQ ID NO: 3003803 - DNA, 25 bp, Homo sapien
gcatctgttaccctgcccagtgaag

SEQ ID NO: 3003804 - DNA, 25 bp, Homo sapien
ttatgggtgaggaaaggctatacat

SEQ ID NO: 3003805 - DNA, 25 bp, Homo sapien
gctgttgactaaactcatacatgaa

SEQ ID NO: 3003806 - DNA, 25 bp, Homo sapien
tgaggaaaggctatacatttagcat

SEQ ID NO: 3003807 - DNA, 25 bp, Homo sapien
agcttcaaccccgtggtggtcagcg

SEQ ID NO: 3003808 - DNA, 25 bp, Homo sapien
cagacatcatccatggtccacttgc

SEQ ID NO: 3003809 - DNA, 25 bp, Homo sapien
gctggccatgtagaagatgtggccc

SEQ ID NO: 3003810 - DNA, 25 bp, Homo sapien
gacctgagtatactctccacagcca

SEQ ID NO: 3003811 - DNA, 25 bp, Homo sapien
tgagggcactcccagaaaggggggc

SEQ ID NO: 3003812 - DNA, 25 bp, Homo sapien
gaggtgagggcactcccagaaaggg

SEQ ID NO: 3003813 - DNA, 25 bp, Homo sapien
aggtgagggcactcccagaaagggg

SEQ ID NO: 3003814 - DNA, 25 bp, Homo sapien
ggcccagggtgatgtgaggggcatt

SEQ ID NO: 3003815 - DNA, 25 bp, Homo sapien
aatgggggcccagggtgatgtgagg

SEQ ID NO: 3003816 - DNA, 25 bp, Homo sapien
gaaatgggggcccagggtgatgtga

SEQ ID NO: 3003817 - DNA, 25 bp, Homo sapien
ctgaaatgggggcccagggtgatgt

SEQ ID NO: 3003818 - DNA, 25 bp, Homo sapien
gaggaggccgaagataaggccctaa

SEQ ID NO: 3003819 - DNA, 25 bp, Homo sapien
tgtagctttccttcatacacgatgc

SEQ ID NO: 3003820 - DNA, 25 bp, Homo sapien
catacacgatgcttggtttcactgg

SEQ ID NO: 3003821 - DNA, 25 bp, Homo sapien
gaggccgaagataaggccctaatcc

SEQ ID NO: 3003822 - DNA, 25 bp, Homo sapien
gaatgtctcattctacgacagtaca

SEQ ID NO: 3003823 - DNA, 25 bp, Homo sapien
tatagagtgcctacagcttgtgagg

SEQ ID NO: 3003824 - DNA, 25 bp, Homo sapien
gcccttgagtgtataacaagtggta

SEQ ID NO: 3003825 - DNA, 25 bp, Homo sapien
gcttgtgaggtaagcaacacatttg

SEQ ID NO: 3003826 - DNA, 25 bp, Homo sapien
cactaaaatgtgctcgtagacaagt

SEQ ID NO: 3003827 - DNA, 25 bp, Homo sapien
gaactcatttgtgcacttagaagga

SEQ ID NO: 3003828 - DNA, 25 bp, Homo sapien
gaaggaaagaatacatggagccatt

SEQ ID NO: 3003829 - DNA, 25 bp, Homo sapien
gagttgctgactgggttcaatctgc

SEQ ID NO: 3003830 - DNA, 25 bp, Homo sapien
agcagacttaacgggaggctgaagc

SEQ ID NO: 3003831 - DNA, 25 bp, Homo sapien
gcagacttaacgggaggctgaagca

SEQ ID NO: 3003832 - DNA, 25 bp, Homo sapien
gatgataccatggttaccccattga

SEQ ID NO: 3003833 - DNA, 25 bp, Homo sapien
tacgttgtctagaagtaccataggg

SEQ ID NO: 3003834 - DNA, 25 bp, Homo sapien
tcctctggatgcactctgatgatac

SEQ ID NO: 3003835 - DNA, 25 bp, Homo sapien
tcgtcactggcagcgtagatcaaac

SEQ ID NO: 3003836 - DNA, 25 bp, Homo sapien
ctgctatctgttggtgcctgacttg

SEQ ID NO: 3003837 - DNA, 25 bp, Homo sapien
gttgaatcaattgaactagggcact

SEQ ID NO: 3003838 - DNA, 25 bp, Homo sapien
gttgacagtgtcattttatgttgga

SEQ ID NO: 3003839 - DNA, 25 bp, Homo sapien
taaactgaatagttgacagtgtcat

SEQ ID NO: 3003840 - DNA, 25 bp, Homo sapien
gttttggcagcctatcacgcagagg

SEQ ID NO: 3003841 - DNA, 25 bp, Homo sapien
gaatgccatgctttagaacaaaccc

SEQ ID NO: 3003842 - DNA, 25 bp, Homo sapien
caacctccatgtccttagtcctggg

SEQ ID NO: 3003843 - DNA, 25 bp, Homo sapien
taatctccccattgagtgtgtcatg

SEQ ID NO: 3003844 - DNA, 25 bp, Homo sapien
aacaatgagataacagtgacagttt

SEQ ID NO: 3003845 - DNA, 25 bp, Homo sapien
cagaacaatgagataacagtgacag

SEQ ID NO: 3003846 - DNA, 25 bp, Homo sapien
agaacaatgagataacagtgacagt

SEQ ID NO: 3003847 - DNA, 25 bp, Homo sapien
aacagaacaatgagataacagtgac

SEQ ID NO: 3003848 - DNA, 25 bp, Homo sapien
ggccgtatattaactagaagcagct

SEQ ID NO: 3003849 - DNA, 25 bp, Homo sapien
tacacacagagactaggccgtatat

SEQ ID NO: 3003850 - DNA, 25 bp, Homo sapien
gaactaatggctatttttgaggaca

SEQ ID NO: 3003851 - DNA, 25 bp, Homo sapien
gagagttagcgtcctgtagatacac

SEQ ID NO: 3003852 - DNA, 25 bp, Homo sapien
caataaaggagaatggtaccgatgc

SEQ ID NO: 3003853 - DNA, 25 bp, Homo sapien
acacagcgacttgcgttgacaaagg

SEQ ID NO: 3003854 - DNA, 25 bp, Homo sapien
taagggtaagccacaacatctagaa

SEQ ID NO: 3003855 - DNA, 25 bp, Homo sapien
taccgatgcaggaggaagcaagcgt

SEQ ID NO: 3003856 - DNA, 25 bp, Homo sapien
catcctccatgtgagaagcagcgaa

SEQ ID NO: 3003857 - DNA, 25 bp, Homo sapien
cagcgaacattgaatctcagggatg

SEQ ID NO: 3003858 - DNA, 25 bp, Homo sapien
gagaagcagcgaacattgaatctca

SEQ ID NO: 3003859 - DNA, 25 bp, Homo sapien
ccatgtgagaagcagcgaacattga

SEQ ID NO: 3003860 - DNA, 25 bp, Homo sapien
taacgtgcccaagaaatcctagctg

SEQ ID NO: 3003861 - DNA, 25 bp, Homo sapien
tagacaccgcgtggagcctagttgc

SEQ ID NO: 3003862 - DNA, 25 bp, Homo sapien
tagtgttagcaagtcgtcccgggct

SEQ ID NO: 3003863 - DNA, 25 bp, Homo sapien
cgctcttgagagtgcatgccatgga

SEQ ID NO: 3003864 - DNA, 25 bp, Homo sapien
taaagttgatcctgacactgacatg

SEQ ID NO: 3003865 - DNA, 25 bp, Homo sapien
cacggctggactgaatgggcctttt

SEQ ID NO: 3003866 - DNA, 25 bp, Homo sapien
ctcctggtagagaagcgacatgtaa

SEQ ID NO: 3003867 - DNA, 25 bp, Homo sapien
cagttccccagattgttaagagttc

SEQ ID NO: 3003868 - DNA, 25 bp, Homo sapien
ccgcagctcaggtctggatcccgat

SEQ ID NO: 3003869 - DNA, 25 bp, Homo sapien
tgggcacatcactggtctcttggcc

SEQ ID NO: 3003870 - DNA, 25 bp, Homo sapien
tcactggtctcttggccccgcagct

SEQ ID NO: 3003871 - DNA, 25 bp, Homo sapien
cagctcaggtctggatcccgatctt

SEQ ID NO: 3003872 - DNA, 25 bp, Homo sapien
tcaggactggctcgggctatgtaca

SEQ ID NO: 3003873 - DNA, 25 bp, Homo sapien
aaacaaggtgtctggacggaccaca

SEQ ID NO: 3003874 - DNA, 25 bp, Homo sapien
gaaaaagttcttgctcagcggtggg

SEQ ID NO: 3003875 - DNA, 25 bp, Homo sapien
gagaggaacggtcaacactcacagc

SEQ ID NO: 3003876 - DNA, 25 bp, Homo sapien
cggagaagggtccttggcagccggg

SEQ ID NO: 3003877 - DNA, 25 bp, Homo sapien
ggtagccatgggctcctcggctcta

SEQ ID NO: 3003878 - DNA, 25 bp, Homo sapien
gctcggtagccatgggctcctcggc

SEQ ID NO: 3003879 - DNA, 25 bp, Homo sapien
tagccatgggctcctcggctctatc

SEQ ID NO: 3003880 - DNA, 25 bp, Homo sapien
caaggtcttcactcgcggaatgcga

SEQ ID NO: 3003881 - DNA, 25 bp, Homo sapien
caggctctgcgctctattcagtggg

SEQ ID NO: 3003882 - DNA, 25 bp, Homo sapien
ctcctgaaggcggaaggtccctgaa

SEQ ID NO: 3003883 - DNA, 25 bp, Homo sapien
gaatgtgtgtgaacaagcgcttccc

SEQ ID NO: 3003884 - DNA, 25 bp, Homo sapien
ccgttaatgacgttcagctgctcca

SEQ ID NO: 3003885 - DNA, 25 bp, Homo sapien
aatgacgttcagctgctccaagacg

SEQ ID NO: 3003886 - DNA, 25 bp, Homo sapien
gaggatgccgttaatgacgttcagc

SEQ ID NO: 3003887 - DNA, 25 bp, Homo sapien
aatgaagaggatgccgttaatgacg

SEQ ID NO: 3003888 - DNA, 25 bp, Homo sapien
gttgcggtagatctcgttcatggtg

SEQ ID NO: 3003889 - DNA, 25 bp, Homo sapien
gtagatctcgttcatggtgcgctgc

SEQ ID NO: 3003890 - DNA, 25 bp, Homo sapien
cggtagatctcgttcatggtgcgct

SEQ ID NO: 3003891 - DNA, 25 bp, Homo sapien
tgcggtagatctcgttcatggtgcg

SEQ ID NO: 3003892 - DNA, 25 bp, Homo sapien
tcagctttgctctcgtagactcggg

SEQ ID NO: 3003893 - DNA, 25 bp, Homo sapien
ctgcgtcttgtagatggtgtaaccc

SEQ ID NO: 3003894 - DNA, 25 bp, Homo sapien
gatggtgtaaccctccttctcgtgc

SEQ ID NO: 3003895 - DNA, 25 bp, Homo sapien
ctctcgtagactcgggcgacaaggt

SEQ ID NO: 3003896 - DNA, 25 bp, Homo sapien
gcgagggaagggcataagtgggctg

SEQ ID NO: 3003897 - DNA, 25 bp, Homo sapien
cgagggaagggcataagtgggctgg

SEQ ID NO: 3003898 - DNA, 25 bp, Homo sapien
gagggaagggcataagtgggctggg

SEQ ID NO: 3003899 - DNA, 25 bp, Homo sapien
agggaagggcataagtgggctgggt

SEQ ID NO: 3003900 - DNA, 25 bp, Homo sapien
ccttgggcccgtggtacttggtgct

SEQ ID NO: 3003901 - DNA, 25 bp, Homo sapien
tccaggaagcgcagcgacaggtcgt

SEQ ID NO: 3003902 - DNA, 25 bp, Homo sapien
ttggtgctgacggccagcgcgttct

SEQ ID NO: 3003903 - DNA, 25 bp, Homo sapien
cgtgcagcaccagcccgatgttgtt

SEQ ID NO: 3003904 - DNA, 25 bp, Homo sapien
gcagcgccatctcggggtggtcttc

SEQ ID NO: 3003905 - DNA, 25 bp, Homo sapien
gtagcgggcgcggtacagcaggctc

SEQ ID NO: 3003906 - DNA, 25 bp, Homo sapien
cagctggctgctggcgaagcagtac

SEQ ID NO: 3003907 - DNA, 25 bp, Homo sapien
cccgaacaccagcagcatgaggtag

SEQ ID NO: 3003908 - DNA, 25 bp, Homo sapien
tgttggggtgctcggtgcccatcac

SEQ ID NO: 3003909 - DNA, 25 bp, Homo sapien
gctcgctcatcagcaccgccttctg

SEQ ID NO: 3003910 - DNA, 25 bp, Homo sapien
cagcaccgccttctgctggttactc

SEQ ID NO: 3003911 - DNA, 25 bp, Homo sapien
cggtgcccatcacccgctcgctcat

SEQ ID NO: 3003912 - DNA, 25 bp, Homo sapien
tgttaaacaggttcagggcctcatt

SEQ ID NO: 3003913 - DNA, 25 bp, Homo sapien
tgcgtagtcgcccatgatgtagtgg

SEQ ID NO: 3003914 - DNA, 25 bp, Homo sapien
catggctccgtagacgttgttaaac

SEQ ID NO: 3003915 - DNA, 25 bp, Homo sapien
agggcctcattgatgagctcacagc

SEQ ID NO: 3003916 - DNA, 25 bp, Homo sapien
gaaatggaaggcatccgaggccttg

SEQ ID NO: 3003917 - DNA, 25 bp, Homo sapien
tcctcctcggtgaacgcgggcttgt

SEQ ID NO: 3003918 - DNA, 25 bp, Homo sapien
aagatgttgagcacgtcctcctcgg

SEQ ID NO: 3003919 - DNA, 25 bp, Homo sapien
gactgtcgaagctgtactccttcag

SEQ ID NO: 3003920 - DNA, 25 bp, Homo sapien
tgttttcagcgagatctcccgcagg

SEQ ID NO: 3003921 - DNA, 25 bp, Homo sapien
ctgcaggccgtaggtctccacagcc

SEQ ID NO: 3003922 - DNA, 25 bp, Homo sapien
gagatctcccgcaggagcgttatct

SEQ ID NO: 3003923 - DNA, 25 bp, Homo sapien
tggatccctgttttcagcgagatct

SEQ ID NO: 3003924 - DNA, 25 bp, Homo sapien
cctggcagatgttcttccagagctc

SEQ ID NO: 3003925 - DNA, 25 bp, Homo sapien
ggtcgaagtcaaagtagttcttggc

SEQ ID NO: 3003926 - DNA, 25 bp, Homo sapien
ttcttggagaccagctcgtcggcgg

SEQ ID NO: 3003927 - DNA, 25 bp, Homo sapien
gggtttgggtaggagctcaggaagc

SEQ ID NO: 3003928 - DNA, 25 bp, Homo sapien
ctgtgttatctgcagcccccggggg

SEQ ID NO: 3003929 - DNA, 25 bp, Homo sapien
tcctcctcttattccgcttcttgga

SEQ ID NO: 3003930 - DNA, 25 bp, Homo sapien
tcttgaagatgtgcttggccgagcg

SEQ ID NO: 3003931 - DNA, 25 bp, Homo sapien
tgatgagttctccaatgccgatttt

SEQ ID NO: 3003932 - DNA, 25 bp, Homo sapien
ctgtaagtacgtcttgaagatgtgc

SEQ ID NO: 3003933 - DNA, 25 bp, Homo sapien
tggccgagcgggtgatgagttctcc

SEQ ID NO: 3003934 - DNA, 25 bp, Homo sapien
cttggtcaggcccccggcctccatc

SEQ ID NO: 3003935 - DNA, 25 bp, Homo sapien
gtcccacagctcccgttccgcccca

SEQ ID NO: 3003936 - DNA, 25 bp, Homo sapien
tcccacagctcccgttccgccccac

SEQ ID NO: 3003937 - DNA, 25 bp, Homo sapien
ttggtcaggcccccggcctccatcc

SEQ ID NO: 3003938 - DNA, 25 bp, Homo sapien
ggcaggaccgcgtgctccatgcagt

SEQ ID NO: 3003939 - DNA, 25 bp, Homo sapien
agcgttgccccgtccacgggcagga

SEQ ID NO: 3003940 - DNA, 25 bp, Homo sapien
caggtagcgcatgttgatgccccgc

SEQ ID NO: 3003941 - DNA, 25 bp, Homo sapien
agcaccttgcccaggtagcgcatgt

SEQ ID NO: 3003942 - DNA, 25 bp, Homo sapien
ctctgcctccacccaactgagtcct

SEQ ID NO: 3003943 - DNA, 25 bp, Homo sapien
tctgcctccacccaactgagtcctt

SEQ ID NO: 3003944 - DNA, 25 bp, Homo sapien
gagaaggaccccgaaggctccagct

SEQ ID NO: 3003945 - DNA, 25 bp, Homo sapien
agcctctggcaggagcgcaggccaa

SEQ ID NO: 3003946 - DNA, 25 bp, Homo sapien
tcccagtcaggatgtcagaatgtgc

SEQ ID NO: 3003947 - DNA, 25 bp, Homo sapien
tccagctcccagtcaggatgtcaga

SEQ ID NO: 3003948 - DNA, 25 bp, Homo sapien
ggtcaggctccccatctgtcaaacg

SEQ ID NO: 3003949 - DNA, 25 bp, Homo sapien
gaaagctgaaaaagtcactcctgcg

SEQ ID NO: 3003950 - DNA, 25 bp, Homo sapien
agggcctgtgcccttgacctctggg

SEQ ID NO: 3003951 - DNA, 25 bp, Homo sapien
ttcatgggcctccaagtcggagaca

SEQ ID NO: 3003952 - DNA, 25 bp, Homo sapien
aagccagggatctggcaggagagca

SEQ ID NO: 3003953 - DNA, 25 bp, Homo sapien
ttctggtcccgaacttcatcctggc

SEQ ID NO: 3003954 - DNA, 25 bp, Homo sapien
gcttctggtcccgaacttcatcctg

SEQ ID NO: 3003955 - DNA, 25 bp, Homo sapien
agctgcttctggtcccgaacttcat

SEQ ID NO: 3003956 - DNA, 25 bp, Homo sapien
ctggagggctcctgcgctggccggc

SEQ ID NO: 3003957 - DNA, 25 bp, Homo sapien
cctggagggctcctgcgctggccgg

SEQ ID NO: 3003958 - DNA, 25 bp, Homo sapien
tgtcgaaggcggtgctgctgatgga

SEQ ID NO: 3003959 - DNA, 25 bp, Homo sapien
gccttgcacgcgttgcggatcacct

SEQ ID NO: 3003960 - DNA, 25 bp, Homo sapien
gctgctgatggagccgaccgccttg

SEQ ID NO: 3003961 - DNA, 25 bp, Homo sapien
caggattgaagcgaatgtcgaaggc

SEQ ID NO: 3003962 - DNA, 25 bp, Homo sapien
tggctccatgagacacgggtcccct

SEQ ID NO: 3003963 - DNA, 25 bp, Homo sapien
gtggagacatggctccatgagacac

SEQ ID NO: 3003964 - DNA, 25 bp, Homo sapien
acatggctccatgagacacgggtcc

SEQ ID NO: 3003965 - DNA, 25 bp, Homo sapien
tgggggtcataagccaccctggcag

SEQ ID NO: 3003966 - DNA, 25 bp, Homo sapien
tggaggatcctcagacttggactcc

SEQ ID NO: 3003967 - DNA, 25 bp, Homo sapien
tctgcggcgatggtctctgccagct

SEQ ID NO: 3003968 - DNA, 25 bp, Homo sapien
tgtgccgtcgtctgcggcgatggtc

SEQ ID NO: 3003969 - DNA, 25 bp, Homo sapien
cctggaggatcctcagacttggact

SEQ ID NO: 3003970 - DNA, 25 bp, Homo sapien
tcacggtcgttgagcacctggtgcc

SEQ ID NO: 3003971 - DNA, 25 bp, Homo sapien
ggtgtgacaccacggtcttgccgaa

SEQ ID NO: 3003972 - DNA, 25 bp, Homo sapien
tgtacgtgcggacgccattcaggtc

SEQ ID NO: 3003973 - DNA, 25 bp, Homo sapien
gatggccatcacgttgccgtcaatg

SEQ ID NO: 3003974 - DNA, 25 bp, Homo sapien
cagggttagaggccgcgcccacaag

SEQ ID NO: 3003975 - DNA, 25 bp, Homo sapien
tagaggccgcgcccacaagagcctg

SEQ ID NO: 3003976 - DNA, 25 bp, Homo sapien
ctggcgggggtcgaggagggcaggg

SEQ ID NO: 3003977 - DNA, 25 bp, Homo sapien
ggttagaggccgcgcccacaagagc

SEQ ID NO: 3003978 - DNA, 25 bp, Homo sapien
gggcctcagactgccggtcagcaga

SEQ ID NO: 3003979 - DNA, 25 bp, Homo sapien
aaacccgtcagcaggtggacagcgg

SEQ ID NO: 3003980 - DNA, 25 bp, Homo sapien
gacagcgggcctcagactgccggtc

SEQ ID NO: 3003981 - DNA, 25 bp, Homo sapien
gagaaaacccgtcagcaggtggaca

SEQ ID NO: 3003982 - DNA, 25 bp, Homo sapien
gcagctcctcattccagtctcgggt

SEQ ID NO: 3003983 - DNA, 25 bp, Homo sapien
tgaatatggccctttctcggagcag

SEQ ID NO: 3003984 - DNA, 25 bp, Homo sapien
gaggcagctccctcgtcgtctgcag

SEQ ID NO: 3003985 - DNA, 25 bp, Homo sapien
agccgctcaggcaggttcttgcgag

SEQ ID NO: 3003986 - DNA, 25 bp, Homo sapien
aatgtgctcctcatagcccagcctc

SEQ ID NO: 3003987 - DNA, 25 bp, Homo sapien
tctgcacgcacgcaatccatggcat

SEQ ID NO: 3003988 - DNA, 25 bp, Homo sapien
gcgatcctctcgaacgggtggcgct

SEQ ID NO: 3003989 - DNA, 25 bp, Homo sapien
gaggtgtaggcgtcctctgcacgca

SEQ ID NO: 3003990 - DNA, 25 bp, Homo sapien
cttcttgaaggtcgggctgatctgg

SEQ ID NO: 3003991 - DNA, 25 bp, Homo sapien
agttcttcttgaaggtcgggctgat

SEQ ID NO: 3003992 - DNA, 25 bp, Homo sapien
cagcacagcgaagttcttcttgaag

SEQ ID NO: 3003993 - DNA, 25 bp, Homo sapien
tcttctgcagcacagcgaagttctt

SEQ ID NO: 3003994 - DNA, 25 bp, Homo sapien
tgaggtccccgtgcatcttccggtt

SEQ ID NO: 3003995 - DNA, 25 bp, Homo sapien
acgcggtgatgctgacttgccggtc

SEQ ID NO: 3003996 - DNA, 25 bp, Homo sapien
tgattcaggtaaaagccccgtgtgg

SEQ ID NO: 3003997 - DNA, 25 bp, Homo sapien
ggcgggttccatccgctcatggtga

SEQ ID NO: 3003998 - DNA, 25 bp, Homo sapien
ggacacagtggccgctcccggctcc

SEQ ID NO: 3003999 - DNA, 25 bp, Homo sapien
gggacacagtggccgctcccggctc

SEQ ID NO: 3004000 - DNA, 25 bp, Homo sapien
cttccagtcacggttttggggctgc

SEQ ID NO: 3004001 - DNA, 25 bp, Homo sapien
aggggacacagtggccgctcccggc

SEQ ID NO: 3004002 - DNA, 25 bp, Homo sapien
gctcttgagcaggtctcggacatgg

SEQ ID NO: 3004003 - DNA, 25 bp, Homo sapien
gacaaggagttgcagtcaaccccgt

SEQ ID NO: 3004004 - DNA, 25 bp, Homo sapien
ccgttgaaggcatcggatgggtcca

SEQ ID NO: 3004005 - DNA, 25 bp, Homo sapien
ccaggtcgccgtcggtgaagacact

SEQ ID NO: 3004006 - DNA, 25 bp, Homo sapien
cgacgctgcgcagctccgagaagtg

SEQ ID NO: 3004007 - DNA, 25 bp, Homo sapien
ctcgacgctgcgcagctccgagaag

SEQ ID NO: 3004008 - DNA, 25 bp, Homo sapien
gacacgtgtcctcccggtccatgag

SEQ ID NO: 3004009 - DNA, 25 bp, Homo sapien
caggtgcggtgacacgtgtcctccc

SEQ ID NO: 3004010 - DNA, 25 bp, Homo sapien
tctgggcagtccccgtttaagagca

SEQ ID NO: 3004011 - DNA, 25 bp, Homo sapien
gaaaagcccgtgtcctgaatgacaa

SEQ ID NO: 3004012 - DNA, 25 bp, Homo sapien
cattttccctgggtggctcggccgc

SEQ ID NO: 3004013 - DNA, 25 bp, Homo sapien
gacaatgacttcctggccggtggtc

SEQ ID NO: 3004014 - DNA, 25 bp, Homo sapien
tacccaggcaccagtggaacaaagg

SEQ ID NO: 3004015 - DNA, 25 bp, Homo sapien
cagaactgtgtggtcccaatccgga

SEQ ID NO: 3004016 - DNA, 25 bp, Homo sapien
gaagttcaacggtcccaactctgag

SEQ ID NO: 3004017 - DNA, 25 bp, Homo sapien
tgttccgctgaggagccaaggatcg

SEQ ID NO: 3004018 - DNA, 25 bp, Homo sapien
gcggtggtcggtcagcttgcaaaca

SEQ ID NO: 3004019 - DNA, 25 bp, Homo sapien
gggcggtggtcggtcagcttgcaaa

SEQ ID NO: 3004020 - DNA, 25 bp, Homo sapien
cggggcggtggtcggtcagcttgca

SEQ ID NO: 3004021 - DNA, 25 bp, Homo sapien
ggcggtggtcggtcagcttgcaaac

SEQ ID NO: 3004022 - DNA, 25 bp, Homo sapien
gatggccgtggcagcaaggcagcca

SEQ ID NO: 3004023 - DNA, 25 bp, Homo sapien
ctcaggatggccgtggcagcaaggc

SEQ ID NO: 3004024 - DNA, 25 bp, Homo sapien
gagtctcaggatggccgtggcagca

SEQ ID NO: 3004025 - DNA, 25 bp, Homo sapien
tcccctcggctctggagtctcagga

SEQ ID NO: 3004026 - DNA, 25 bp, Homo sapien
ctccggctggcttcgggtttcagtg

SEQ ID NO: 3004027 - DNA, 25 bp, Homo sapien
tgcccgggttccttgttccagcctc

SEQ ID NO: 3004028 - DNA, 25 bp, Homo sapien
tgccgctacccttgccctaatgcag

SEQ ID NO: 3004029 - DNA, 25 bp, Homo sapien
cttgccctaatgcagccagtcggcc

SEQ ID NO: 3004030 - DNA, 25 bp, Homo sapien
ggggagctgctatcagcactcaggc

SEQ ID NO: 3004031 - DNA, 25 bp, Homo sapien
acctccctatgccccctagagaggg

SEQ ID NO: 3004032 - DNA, 25 bp, Homo sapien
agggggagctgctatcagcactcag

SEQ ID NO: 3004033 - DNA, 25 bp, Homo sapien
ccagggggagctgctatcagcactc

SEQ ID NO: 3004034 - DNA, 25 bp, Homo sapien
gctgccgccaacagctggcacagac

SEQ ID NO: 3004035 - DNA, 25 bp, Homo sapien
cctcaagattgagggcctaggagac

SEQ ID NO: 3004036 - DNA, 25 bp, Homo sapien
ctggacccctcaagattgagggcct

SEQ ID NO: 3004037 - DNA, 25 bp, Homo sapien
tcccatcccagtgggggtgaacagg

SEQ ID NO: 3004038 - DNA, 25 bp, Homo sapien
ttgggccaatactccctcctctcat

SEQ ID NO: 3004039 - DNA, 25 bp, Homo sapien
gggccaatactccctcctctcatag

SEQ ID NO: 3004040 - DNA, 25 bp, Homo sapien
ccttgggccaatactccctcctctc

SEQ ID NO: 3004041 - DNA, 25 bp, Homo sapien
tgggccaatactccctcctctcata

SEQ ID NO: 3004042 - DNA, 25 bp, Homo sapien
gaagcctcgagcggagcttcactcc

SEQ ID NO: 3004043 - DNA, 25 bp, Homo sapien
cacaaaccaagcctgggaagcctcg

SEQ ID NO: 3004044 - DNA, 25 bp, Homo sapien
ggatgcctgggaggccgccgcggag

SEQ ID NO: 3004045 - DNA, 25 bp, Homo sapien
tgcagccctgcgcacaggggatgcc

SEQ ID NO: 3004046 - DNA, 25 bp, Homo sapien
gccggcaactcgtccgtcttgataa

SEQ ID NO: 3004047 - DNA, 25 bp, Homo sapien
cgtcttgataaccatggtggcggga

SEQ ID NO: 3004048 - DNA, 25 bp, Homo sapien
cccggcctgcgagccgtgttcccgg

SEQ ID NO: 3004049 - DNA, 25 bp, Homo sapien
gggagcgggcgtccgcctcggctgt

SEQ ID NO: 3004050 - DNA, 25 bp, Homo sapien
gcgagggacaaaacgcgccgcgcct

SEQ ID NO: 3004051 - DNA, 25 bp, Homo sapien
ctgctgagggaaggacggagtcacc

SEQ ID NO: 3004052 - DNA, 25 bp, Homo sapien
tggtgcgcgccgtggcctttgaccc

SEQ ID NO: 3004053 - DNA, 25 bp, Homo sapien
ccacggacgcggtgactttccagaa

SEQ ID NO: 3004054 - DNA, 25 bp, Homo sapien
gatcccctgttttctcttgcagatt

SEQ ID NO: 3004055 - DNA, 25 bp, Homo sapien
tcttgcagatttgctaaatgaccgc

SEQ ID NO: 3004056 - DNA, 25 bp, Homo sapien
cagtctgtcatctgcggtgttcgcg

SEQ ID NO: 3004057 - DNA, 25 bp, Homo sapien
ccgtcgggcgggcactgtgaccttg

SEQ ID NO: 3004058 - DNA, 25 bp, Homo sapien
ctcctggtctcatcgtaccccctgg

SEQ ID NO: 3004059 - DNA, 25 bp, Homo sapien
cagctcctggtctcatcgtaccccc

SEQ ID NO: 3004060 - DNA, 25 bp, Homo sapien
atcgtaccccctggctgaccctgaa

SEQ ID NO: 3004061 - DNA, 25 bp, Homo sapien
tggtctcatcgtaccccctggctga

SEQ ID NO: 3004062 - DNA, 25 bp, Homo sapien
tcttagtcaccaagatattccaggg

SEQ ID NO: 3004063 - DNA, 25 bp, Homo sapien
ccaggtgggtttgaagccctgcaca

SEQ ID NO: 3004064 - DNA, 25 bp, Homo sapien
aagcattggatacaaaagcgcagcc

SEQ ID NO: 3004065 - DNA, 25 bp, Homo sapien
gaataaggcatatgacagtcacccc

SEQ ID NO: 3004066 - DNA, 25 bp, Homo sapien
gggcccctagctggacaccctggat

SEQ ID NO: 3004067 - DNA, 25 bp, Homo sapien
gaggccaggcggacggagctatggc

SEQ ID NO: 3004068 - DNA, 25 bp, Homo sapien
gtgggcagatagagtacttcaccat

SEQ ID NO: 3004069 - DNA, 25 bp, Homo sapien
tctctgcagaagaatcgacctaaca

SEQ ID NO: 3004070 - DNA, 25 bp, Homo sapien
aaaagtgtggtcgtgggagatgagg

SEQ ID NO: 3004071 - DNA, 25 bp, Homo sapien
cctctgggcacctccgagagaggag

SEQ ID NO: 3004072 - DNA, 25 bp, Homo sapien
ctctgggcacctccgagagaggagt

SEQ ID NO: 3004073 - DNA, 25 bp, Homo sapien
cccaaaagtgtggtcgtgggagatg

SEQ ID NO: 3004074 - DNA, 25 bp, Homo sapien
cagaccaggcgtggttattgctcag

SEQ ID NO: 3004075 - DNA, 25 bp, Homo sapien
caggcgcaaccacaggactagtaga

SEQ ID NO: 3004076 - DNA, 25 bp, Homo sapien
ctgggagagccgcacattgcttggc

SEQ ID NO: 3004077 - DNA, 25 bp, Homo sapien
gactggagagcactgtcccaagggt

SEQ ID NO: 3004078 - DNA, 25 bp, Homo sapien
gtgacagaatgtgtggcctcagcca

SEQ ID NO: 3004079 - DNA, 25 bp, Homo sapien
tcccagacccctgcgtgacagaatg

SEQ ID NO: 3004080 - DNA, 25 bp, Homo sapien
gacccctgcgtgacagaatgtgtgg

SEQ ID NO: 3004081 - DNA, 25 bp, Homo sapien
cctgcgtgacagaatgtgtggcctc

SEQ ID NO: 3004082 - DNA, 25 bp, Homo sapien
ttaggcttccatcaggcgcactttt

SEQ ID NO: 3004083 - DNA, 25 bp, Homo sapien
ccatcaggcgcacttttcccaccag

SEQ ID NO: 3004084 - DNA, 25 bp, Homo sapien
gtcttctaaagtgttccgtgctcac

SEQ ID NO: 3004085 - DNA, 25 bp, Homo sapien
aggcttccatcaggcgcacttttcc

SEQ ID NO: 3004086 - DNA, 25 bp, Homo sapien
ccgggtccccgggcgcgctgggctg

SEQ ID NO: 3004087 - DNA, 25 bp, Homo sapien
tgggctggctgggcgcgggctgcgg

SEQ ID NO: 3004088 - DNA, 25 bp, Homo sapien
gggtccccgggcgcgctgggctggc

SEQ ID NO: 3004089 - DNA, 25 bp, Homo sapien
cgggctgcgggccggctcggtccgg

SEQ ID NO: 3004090 - DNA, 25 bp, Homo sapien
gaagcggcgctcctcggtgcgcagg

SEQ ID NO: 3004091 - DNA, 25 bp, Homo sapien
ggcgctcctcggtgcgcaggctgca

SEQ ID NO: 3004092 - DNA, 25 bp, Homo sapien
aggaagcggcgctcctcggtgcgca

SEQ ID NO: 3004093 - DNA, 25 bp, Homo sapien
ggaagcggcgctcctcggtgcgcag

SEQ ID NO: 3004094 - DNA, 25 bp, Homo sapien
ccagcgcgcggcacttgctctccag

SEQ ID NO: 3004095 - DNA, 25 bp, Homo sapien
gctgcgactccagcgcgcggcactt

SEQ ID NO: 3004096 - DNA, 25 bp, Homo sapien
gcagctccgcgttggccgcagcacg

SEQ ID NO: 3004097 - DNA, 25 bp, Homo sapien
ttggccgcagcacgcgcctccagct

SEQ ID NO: 3004098 - DNA, 25 bp, Homo sapien
tgagattgggcctctctcatttcca

SEQ ID NO: 3004099 - DNA, 25 bp, Homo sapien
ctcatttccaggtcatgggtcagtt

SEQ ID NO: 3004100 - DNA, 25 bp, Homo sapien
cttgctggtgagattgggcctctct

SEQ ID NO: 3004101 - DNA, 25 bp, Homo sapien
tctctcatttccaggtcatgggtca

SEQ ID NO: 3004102 - DNA, 25 bp, Homo sapien
tcaaggccttgtgatgtagcccagg

SEQ ID NO: 3004103 - DNA, 25 bp, Homo sapien
gccttctgctgttaccagagtctga

SEQ ID NO: 3004104 - DNA, 25 bp, Homo sapien
tgaacctgttccctgaggcacctgt

SEQ ID NO: 3004105 - DNA, 25 bp, Homo sapien
gactctgatgcttctacctccaggg

SEQ ID NO: 3004106 - DNA, 25 bp, Homo sapien
agctgatgtggcgttgcacgctctg

SEQ ID NO: 3004107 - DNA, 25 bp, Homo sapien
tgatgtggcgttgcacgctctggat

SEQ ID NO: 3004108 - DNA, 25 bp, Homo sapien
ggcgttgcacgctctggatctgatg

SEQ ID NO: 3004109 - DNA, 25 bp, Homo sapien
ttgcacgctctggatctgatgctcc

SEQ ID NO: 3004110 - DNA, 25 bp, Homo sapien
ctggcttccgtgcaaagccataagt

SEQ ID NO: 3004111 - DNA, 25 bp, Homo sapien
ggcttccgtgcaaagccataagtct

SEQ ID NO: 3004112 - DNA, 25 bp, Homo sapien
cttccgtgcaaagccataagtcttc

SEQ ID NO: 3004113 - DNA, 25 bp, Homo sapien
tccgtgcaaagccataagtcttcat

SEQ ID NO: 3004114 - DNA, 25 bp, Homo sapien
tgtacgtgccacatccctttgaggg

SEQ ID NO: 3004115 - DNA, 25 bp, Homo sapien
tgtgtgtgtacatgcgaatgcccct

SEQ ID NO: 3004116 - DNA, 25 bp, Homo sapien
tctgagtatgtggatgagtgcctgc

SEQ ID NO: 3004117 - DNA, 25 bp, Homo sapien
gcatgcagagatgaggacgaaccct

SEQ ID NO: 3004118 - DNA, 25 bp, Homo sapien
catctgggtgttaggaggtaggtcc

SEQ ID NO: 3004119 - DNA, 25 bp, Homo sapien
ccttttccttgggtgtggttgagag

SEQ ID NO: 3004120 - DNA, 25 bp, Homo sapien
tgtgttggtgcatctggcactggcg

SEQ ID NO: 3004121 - DNA, 25 bp, Homo sapien
ttgagaggactgtgcgcagaccgcc

SEQ ID NO: 3004122 - DNA, 25 bp, Homo sapien
tctgaaaggcggtgccaggtactgg

SEQ ID NO: 3004123 - DNA, 25 bp, Homo sapien
ggtgccaggtactgggtccttccgc

SEQ ID NO: 3004124 - DNA, 25 bp, Homo sapien
tgtggcgtgcaagcctcaaccctct

SEQ ID NO: 3004125 - DNA, 25 bp, Homo sapien
cgcccatgttatctagtttcctcca

SEQ ID NO: 3004126 - DNA, 25 bp, Homo sapien
acaggaagtcggcagggttctgatt

SEQ ID NO: 3004127 - DNA, 25 bp, Homo sapien
attgacatcacgtactgcaggcccc

SEQ ID NO: 3004128 - DNA, 25 bp, Homo sapien
gttctgattgacatcacgtactgca

SEQ ID NO: 3004129 - DNA, 25 bp, Homo sapien
tccctgaacaggaagtcggcagggt

SEQ ID NO: 3004130 - DNA, 25 bp, Homo sapien
aactggtattccaagcgcccgccac

SEQ ID NO: 3004131 - DNA, 25 bp, Homo sapien
gagtaactggtattccaagcgcccg

SEQ ID NO: 3004132 - DNA, 25 bp, Homo sapien
gtaactggtattccaagcgcccgcc

SEQ ID NO: 3004133 - DNA, 25 bp, Homo sapien
agtaactggtattccaagcgcccgc

SEQ ID NO: 3004134 - DNA, 25 bp, Homo sapien
gccatctaactgaagcggtccatca

SEQ ID NO: 3004135 - DNA, 25 bp, Homo sapien
taaaatacacccaacgctaggatag

SEQ ID NO: 3004136 - DNA, 25 bp, Homo sapien
tcagctaacctgtgggtcctcgggt

SEQ ID NO: 3004137 - DNA, 25 bp, Homo sapien
ggatcaggccttccgttgaggtgca

SEQ ID NO: 3004138 - DNA, 25 bp, Homo sapien
ccctgtggcgctctcctaggaggct

SEQ ID NO: 3004139 - DNA, 25 bp, Homo sapien
gagggcttgagttttgtgaccacaa

SEQ ID NO: 3004140 - DNA, 25 bp, Homo sapien
ctggcctgctttgagatgggcagca

SEQ ID NO: 3004141 - DNA, 25 bp, Homo sapien
tccgggccacgtgagtggagggctt

SEQ ID NO: 3004142 - DNA, 25 bp, Homo sapien
gagatgtcgcatgagaagagcagaa

SEQ ID NO: 3004143 - DNA, 25 bp, Homo sapien
gagaatatcgccgtgtctgtggata

SEQ ID NO: 3004144 - DNA, 25 bp, Homo sapien
ctggaaatgattcggcaggaaggcc

SEQ ID NO: 3004145 - DNA, 25 bp, Homo sapien
gaaatgccggccttttctcagccct

SEQ ID NO: 3004146 - DNA, 25 bp, Homo sapien
catgggaccccttattacacagtgt

SEQ ID NO: 3004147 - DNA, 25 bp, Homo sapien
cacagtcttagagcggagtggagca

SEQ ID NO: 3004148 - DNA, 25 bp, Homo sapien
gatggtttaacacgcctctgtgctg

SEQ ID NO: 3004149 - DNA, 25 bp, Homo sapien
tgccgggaattcagccaacacatgg

SEQ ID NO: 3004150 - DNA, 25 bp, Homo sapien
cataagatgaatgcgcctttcctcg

SEQ ID NO: 3004151 - DNA, 25 bp, Homo sapien
ccatccaggtgaagggcgtttacgg

SEQ ID NO: 3004152 - DNA, 25 bp, Homo sapien
tggtcagtctgacaggttcatcctg

SEQ ID NO: 3004153 - DNA, 25 bp, Homo sapien
ggaactttcttggtcggctatttga

SEQ ID NO: 3004154 - DNA, 25 bp, Homo sapien
tcagcttttcgaatagctggaacta

SEQ ID NO: 3004155 - DNA, 25 bp, Homo sapien
cacctggctgatttttttgtatttt

SEQ ID NO: 3004156 - DNA, 25 bp, Homo sapien
tgcctcagcttttcgaatagctgga

SEQ ID NO: 3004157 - DNA, 25 bp, Homo sapien
caggtgcctgccaccacacctggct

SEQ ID NO: 3004158 - DNA, 25 bp, Homo sapien
cagttccgtggtctggagagctggg

SEQ ID NO: 3004159 - DNA, 25 bp, Homo sapien
tcagttccgtggtctggagagctgg

SEQ ID NO: 3004160 - DNA, 25 bp, Homo sapien
gggcagcgcccacgtcctcttcaca

SEQ ID NO: 3004161 - DNA, 25 bp, Homo sapien
gcccacgtcctcttcacacggcatg

SEQ ID NO: 3004162 - DNA, 25 bp, Homo sapien
agcgcccacgtcctcttcacacggc

SEQ ID NO: 3004163 - DNA, 25 bp, Homo sapien
gcatgatctctacaacccatctggc

SEQ ID NO: 3004164 - DNA, 25 bp, Homo sapien
tggtagcgaagaccccgggactgcc

SEQ ID NO: 3004165 - DNA, 25 bp, Homo sapien
tgtgtcaaggccaggttatgcccct

SEQ ID NO: 3004166 - DNA, 25 bp, Homo sapien
aggcagtgggctcttttcctgggta

SEQ ID NO: 3004167 - DNA, 25 bp, Homo sapien
tgcccgctccacgaaggcagtgggc

SEQ ID NO: 3004168 - DNA, 25 bp, Homo sapien
acagggtcacccgtctttggtcaca

SEQ ID NO: 3004169 - DNA, 25 bp, Homo sapien
cacagggtcacccgtctttggtcac

SEQ ID NO: 3004170 - DNA, 25 bp, Homo sapien
cagggtcacccgtctttggtcacag

SEQ ID NO: 3004171 - DNA, 25 bp, Homo sapien
tcagcgtggactaacagcttcgggc

SEQ ID NO: 3004172 - DNA, 25 bp, Homo sapien
ttcgggcggacacccgagtcctgta

SEQ ID NO: 3004173 - DNA, 25 bp, Homo sapien
cctgtagttccttgtttgatctgaa

SEQ ID NO: 3004174 - DNA, 25 bp, Homo sapien
aggaagttgtccagcgtcagcagca

SEQ ID NO: 3004175 - DNA, 25 bp, Homo sapien
gcgggagatggatttcttaaagtac

SEQ ID NO: 3004176 - DNA, 25 bp, Homo sapien
gcagggccccgactctcgggaccca

SEQ ID NO: 3004177 - DNA, 25 bp, Homo sapien
ggcgggagatggatttcttaaagta

SEQ ID NO: 3004178 - DNA, 25 bp, Homo sapien
ctggcgggagatggatttcttaaag

SEQ ID NO: 3004179 - DNA, 25 bp, Homo sapien
gctgtgcataggtgggagttgccat

SEQ ID NO: 3004180 - DNA, 25 bp, Homo sapien
agggaacccactgccagccaaaggc

SEQ ID NO: 3004181 - DNA, 25 bp, Homo sapien
gggcccgagggaacccactgccagc

SEQ ID NO: 3004182 - DNA, 25 bp, Homo sapien
gaaggcttctcggctccctgccggg

SEQ ID NO: 3004183 - DNA, 25 bp, Homo sapien
ttttccttggtcatgtcttccctct

SEQ ID NO: 3004184 - DNA, 25 bp, Homo sapien
atgtagccttgtcccctccgtgtgt

SEQ ID NO: 3004185 - DNA, 25 bp, Homo sapien
gatgagaaactcactctgacctgtt

SEQ ID NO: 3004186 - DNA, 25 bp, Homo sapien
tccatccttgtcttctggtaatgtt

SEQ ID NO: 3004187 - DNA, 25 bp, Homo sapien
gaaagtgcagcaagtcgctgagaag

SEQ ID NO: 3004188 - DNA, 25 bp, Homo sapien
ccaactgtcccattggaaagtgcag

SEQ ID NO: 3004189 - DNA, 25 bp, Homo sapien
gcagcaagtcgctgagaagtggggc

SEQ ID NO: 3004190 - DNA, 25 bp, Homo sapien
aagtgcagcaagtcgctgagaagtg

SEQ ID NO: 3004191 - DNA, 25 bp, Homo sapien
atacggtgactaagacccctccctg

SEQ ID NO: 3004192 - DNA, 25 bp, Homo sapien
aatactactactctcaggctggatg

SEQ ID NO: 3004193 - DNA, 25 bp, Homo sapien
tcaaagccctatgctggtctctggg

SEQ ID NO: 3004194 - DNA, 25 bp, Homo sapien
gagcctcacctaactctcgtgtttg

SEQ ID NO: 3004195 - DNA, 25 bp, Homo sapien
ccagattctgttgcctgttgaaggc

SEQ ID NO: 3004196 - DNA, 25 bp, Homo sapien
gagtgtctttgtatcatctgccgct

SEQ ID NO: 3004197 - DNA, 25 bp, Homo sapien
tctcttgaagtgattgggtaggcta

SEQ ID NO: 3004198 - DNA, 25 bp, Homo sapien
cagtatcatgaaatgaaggtaattc

SEQ ID NO: 3004199 - DNA, 25 bp, Homo sapien
tagtgtataaccacttgagattggc

SEQ ID NO: 3004200 - DNA, 25 bp, Homo sapien
gagtagtactctgtggtattataac

SEQ ID NO: 3004201 - DNA, 25 bp, Homo sapien
ccaagttcttgggtgtatcaatact

SEQ ID NO: 3004202 - DNA, 25 bp, Homo sapien
ggatgtggacatcaatctcccagct

SEQ ID NO: 3004203 - DNA, 25 bp, Homo sapien
agatacgcaagcacctgggtctgaa

SEQ ID NO: 3004204 - DNA, 25 bp, Homo sapien
tggcctggctgttttggacaaatga

SEQ ID NO: 3004205 - DNA, 25 bp, Homo sapien
ggacaaatgatggatcttaatttaa

SEQ ID NO: 3004206 - DNA, 25 bp, Homo sapien
cgatagaagggtgctaacgaaggaa

SEQ ID NO: 3004207 - DNA, 25 bp, Homo sapien
ggctctggacgaacatctggatgga

SEQ ID NO: 3004208 - DNA, 25 bp, Homo sapien
ggacaaccttcacgatgagctccac

SEQ ID NO: 3004209 - DNA, 25 bp, Homo sapien
ggccgggctgggattcactcttcct

SEQ ID NO: 3004210 - DNA, 25 bp, Homo sapien
cagtaggtccacaccgttgctgggc

SEQ ID NO: 3004211 - DNA, 25 bp, Homo sapien
catccaccagttgaattgtattttc

SEQ ID NO: 3004212 - DNA, 25 bp, Homo sapien
agggacccttttatctggagcccag

SEQ ID NO: 3004213 - DNA, 25 bp, Homo sapien
ccttcagtcatccaccagttgaatt

SEQ ID NO: 3004214 - DNA, 25 bp, Homo sapien
gagccttgaaaattcgtggtttcta

SEQ ID NO: 3004215 - DNA, 25 bp, Homo sapien
aaagaggcctgtacgttctggacgc

SEQ ID NO: 3004216 - DNA, 25 bp, Homo sapien
tttatgaagagtcaccgtagcagcc

SEQ ID NO: 3004217 - DNA, 25 bp, Homo sapien
ccacgtgtgtgggaatgattgagtc

SEQ ID NO: 3004218 - DNA, 25 bp, Homo sapien
tcctgtttgcaagctggagaggagc

SEQ ID NO: 3004219 - DNA, 25 bp, Homo sapien
gaggaggtgattcgtagatcccaac

SEQ ID NO: 3004220 - DNA, 25 bp, Homo sapien
gaagtgatgctccatgtgacgacga

SEQ ID NO: 3004221 - DNA, 25 bp, Homo sapien
gatcccaactgcctatgtaatgtaa

SEQ ID NO: 3004222 - DNA, 25 bp, Homo sapien
gaacctaagaactgtggcttggaag

SEQ ID NO: 3004223 - DNA, 25 bp, Homo sapien
gaggtagtggatctctcgaggccca

SEQ ID NO: 3004224 - DNA, 25 bp, Homo sapien
tagtggatctctcgaggcccacaga

SEQ ID NO: 3004225 - DNA, 25 bp, Homo sapien
tggatctctcgaggcccacagaagg

SEQ ID NO: 3004226 - DNA, 25 bp, Homo sapien
agaggtagtggatctctcgaggccc

SEQ ID NO: 3004227 - DNA, 25 bp, Homo sapien
gccctcatttgaataaggacacgaa

SEQ ID NO: 3004228 - DNA, 25 bp, Homo sapien
ggacacgaagataagcaaaatcaac

SEQ ID NO: 3004229 - DNA, 25 bp, Homo sapien
tttgaataaggacacgaagataagc

SEQ ID NO: 3004230 - DNA, 25 bp, Homo sapien
tattaagtgccctcatttgaataag

SEQ ID NO: 3004231 - DNA, 25 bp, Homo sapien
ctacgtgacctgagcatgaaaagca

SEQ ID NO: 3004232 - DNA, 25 bp, Homo sapien
acactcgcccaccacctctgtttct

SEQ ID NO: 3004233 - DNA, 25 bp, Homo sapien
tccttcccgccttctgggtgggaca

SEQ ID NO: 3004234 - DNA, 25 bp, Homo sapien
tctgccatggagagaaacggcttcc

SEQ ID NO: 3004235 - DNA, 25 bp, Homo sapien
tgctctcagagttcactggttcggc

SEQ ID NO: 3004236 - DNA, 25 bp, Homo sapien
agagttcactggttcggctgcctcc

SEQ ID NO: 3004237 - DNA, 25 bp, Homo sapien
tgtgctgctctcagagttcactggt

SEQ ID NO: 3004238 - DNA, 25 bp, Homo sapien
ctcagagttcactggttcggctgcc

SEQ ID NO: 3004239 - DNA, 25 bp, Homo sapien
tttatctaggagtcttcccagagcc

SEQ ID NO: 3004240 - DNA, 25 bp, Homo sapien
ggccatagaggacggataggaccca

SEQ ID NO: 3004241 - DNA, 25 bp, Homo sapien
gatgtagtggatttttcgtgaccca

SEQ ID NO: 3004242 - DNA, 25 bp, Homo sapien
tagaagagggagactgcacccaaat

SEQ ID NO: 3004243 - DNA, 25 bp, Homo sapien
gagctgtgtcagacaccctgcatag

SEQ ID NO: 3004244 - DNA, 25 bp, Homo sapien
atcttggggattgtgttggtgacaa

SEQ ID NO: 3004245 - DNA, 25 bp, Homo sapien
gtagagctgtgtcagacaccctgca

SEQ ID NO: 3004246 - DNA, 25 bp, Homo sapien
tcttggggattgtgttggtgacaaa

SEQ ID NO: 3004247 - DNA, 25 bp, Homo sapien
actctgaaccttcactctggttgcc

SEQ ID NO: 3004248 - DNA, 25 bp, Homo sapien
gaaccttcactctggttgcctccat

SEQ ID NO: 3004249 - DNA, 25 bp, Homo sapien
tgaaccttcactctggttgcctcca

SEQ ID NO: 3004250 - DNA, 25 bp, Homo sapien
tctgaaccttcactctggttgcctc

SEQ ID NO: 3004251 - DNA, 25 bp, Homo sapien
tcactggttcagcttcctccacgtt

SEQ ID NO: 3004252 - DNA, 25 bp, Homo sapien
gttcagcttcctccacgttcctgtt

SEQ ID NO: 3004253 - DNA, 25 bp, Homo sapien
agttcactggttcagcttcctccac

SEQ ID NO: 3004254 - DNA, 25 bp, Homo sapien
tgtgctgctctcagagttcactggt

SEQ ID NO: 3004255 - DNA, 25 bp, Homo sapien
catcatgtcctgtgcaagaatcgtc

SEQ ID NO: 3004256 - DNA, 25 bp, Homo sapien
gtgcaagaatcgtctccaccatcct

SEQ ID NO: 3004257 - DNA, 25 bp, Homo sapien
tcctgtgcaagaatcgtctccacca

SEQ ID NO: 3004258 - DNA, 25 bp, Homo sapien
catgtcctgtgcaagaatcgtctcc

SEQ ID NO: 3004259 - DNA, 25 bp, Homo sapien
tctcttctatgggacaattattggt

SEQ ID NO: 3004260 - DNA, 25 bp, Homo sapien
gcccattgacgaatcataacactgt

SEQ ID NO: 3004261 - DNA, 25 bp, Homo sapien
aattattggtctctacttgtgccca

SEQ ID NO: 3004262 - DNA, 25 bp, Homo sapien
tgtcatggctgtgatgtacactggg

SEQ ID NO: 3004263 - DNA, 25 bp, Homo sapien
gaatgaattttccgaacccagatta

SEQ ID NO: 3004264 - DNA, 25 bp, Homo sapien
taagagataatcaggcaaagcacac

SEQ ID NO: 3004265 - DNA, 25 bp, Homo sapien
gatcttcaggatggtcgagaaaacg

SEQ ID NO: 3004266 - DNA, 25 bp, Homo sapien
aactgtgtccttctgggccgagtgg

SEQ ID NO: 3004267 - DNA, 25 bp, Homo sapien
acacaaatgagtcctgtgagacccc

SEQ ID NO: 3004268 - DNA, 25 bp, Homo sapien
aaggacaggctgttcatcagaagtg

SEQ ID NO: 3004269 - DNA, 25 bp, Homo sapien
catggtttgcgcagaaggacaggct

SEQ ID NO: 3004270 - DNA, 25 bp, Homo sapien
tcatcagaagtgtgtgtagaaggga

SEQ ID NO: 3004271 - DNA, 25 bp, Homo sapien
gaagaagtgtgggatctcatggttt

SEQ ID NO: 3004272 - DNA, 25 bp, Homo sapien
gcccagggctcatgatcagaatgta

SEQ ID NO: 3004273 - DNA, 25 bp, Homo sapien
ctgtagtagacaccctgagtaggag

SEQ ID NO: 3004274 - DNA, 25 bp, Homo sapien
ccaggatgcagacacgaggaagatg

SEQ ID NO: 3004275 - DNA, 25 bp, Homo sapien
catcttagggactgtggtggacaca

SEQ ID NO: 3004276 - DNA, 25 bp, Homo sapien
attctgagatgctggtcagattttt

SEQ ID NO: 3004277 - DNA, 25 bp, Homo sapien
tgggtgacgttggtaagccctggat

SEQ ID NO: 3004278 - DNA, 25 bp, Homo sapien
aattgggtgacgttggtaagccctg

SEQ ID NO: 3004279 - DNA, 25 bp, Homo sapien
tgacgttggtaagccctggattgtg

SEQ ID NO: 3004280 - DNA, 25 bp, Homo sapien
tatgcaatattccagtgttgatctt

SEQ ID NO: 3004281 - DNA, 25 bp, Homo sapien
cgtgttcttggccaaaatgtggtca

SEQ ID NO: 3004282 - DNA, 25 bp, Homo sapien
aggtctcccccttgcgtgttcttgg

SEQ ID NO: 3004283 - DNA, 25 bp, Homo sapien
tagtaggtgatgtttcccttactcc

SEQ ID NO: 3004284 - DNA, 25 bp, Homo sapien
gccaaaatgtggtcatagtaggtga

SEQ ID NO: 3004285 - DNA, 25 bp, Homo sapien
gagatggaaacctcagcccgtttcc

SEQ ID NO: 3004286 - DNA, 25 bp, Homo sapien
cagagatggaaacctcagcccgttt

SEQ ID NO: 3004287 - DNA, 25 bp, Homo sapien
agagatggaaacctcagcccgtttc

SEQ ID NO: 3004288 - DNA, 25 bp, Homo sapien
tcgttctcgccagttcccaggctgt

SEQ ID NO: 3004289 - DNA, 25 bp, Homo sapien
ccgatcgttctcgccagttcccagg

SEQ ID NO: 3004290 - DNA, 25 bp, Homo sapien
gatcgttctcgccagttcccaggct

SEQ ID NO: 3004291 - DNA, 25 bp, Homo sapien
tcagaattctccctgcttcacctgc

SEQ ID NO: 3004292 - DNA, 25 bp, Homo sapien
ccttttgtctcacaggattagagaa

SEQ ID NO: 3004293 - DNA, 25 bp, Homo sapien
tccttttgtctcacaggattagaga

SEQ ID NO: 3004294 - DNA, 25 bp, Homo sapien
acaggattagagaacctcttatctt

SEQ ID NO: 3004295 - DNA, 25 bp, Homo sapien
tggaatgcttactggtgcagctgaa

SEQ ID NO: 3004296 - DNA, 25 bp, Homo sapien
catggcttagctgtggtatttgatg

SEQ ID NO: 3004297 - DNA, 25 bp, Homo sapien
tctgtcttccagacacatgacatgg

SEQ ID NO: 3004298 - DNA, 25 bp, Homo sapien
ggaagagagcaatgcaggtcttgga

SEQ ID NO: 3004299 - DNA, 25 bp, Homo sapien
tggccctgtgagaaggagaccctgc

SEQ ID NO: 3004300 - DNA, 25 bp, Homo sapien
ggccctgtgagaaggagaccctgcc

SEQ ID NO: 3004301 - DNA, 25 bp, Homo sapien
ccctgtgagaaggagaccctgccct

SEQ ID NO: 3004302 - DNA, 25 bp, Homo sapien
ctgtgagaaggagaccctgcccttg

SEQ ID NO: 3004303 - DNA, 25 bp, Homo sapien
caacaacgaggtgagagtcgcaggt

SEQ ID NO: 3004304 - DNA, 25 bp, Homo sapien
cactgtgtacatgacagcagccgct

SEQ ID NO: 3004305 - DNA, 25 bp, Homo sapien
ctgaggatggctgaaacaatgcgga

SEQ ID NO: 3004306 - DNA, 25 bp, Homo sapien
gagcacaagctcattgacctgggcg

SEQ ID NO: 3004307 - DNA, 25 bp, Homo sapien
agcggtcccaaatcacagaagaagc

SEQ ID NO: 3004308 - DNA, 25 bp, Homo sapien
cagcggtcccaaatcacagaagaag

SEQ ID NO: 3004309 - DNA, 25 bp, Homo sapien
tcccaaatcacagaagaagccagga

SEQ ID NO: 3004310 - DNA, 25 bp, Homo sapien
ggtcccaaatcacagaagaagccag

SEQ ID NO: 3004311 - DNA, 25 bp, Homo sapien
tatgaggaaggtgcgagtcatggcg

SEQ ID NO: 3004312 - DNA, 25 bp, Homo sapien
ggtgcgagtcatggcgagaagactt

SEQ ID NO: 3004313 - DNA, 25 bp, Homo sapien
gccggaatatgaggaaggtgcgagt

SEQ ID NO: 3004314 - DNA, 25 bp, Homo sapien
ctaagagcacaaggaaagccggaat

SEQ ID NO: 3004315 - DNA, 25 bp, Homo sapien
cattgtagccgggagaaagatgtcc

SEQ ID NO: 3004316 - DNA, 25 bp, Homo sapien
gctgtgccaaacaccctgcgtagga

SEQ ID NO: 3004317 - DNA, 25 bp, Homo sapien
catcatatagtggagcaggtggcaa

SEQ ID NO: 3004318 - DNA, 25 bp, Homo sapien
gatatctgcacacgacaagctggca

SEQ ID NO: 3004319 - DNA, 25 bp, Homo sapien
agtgagccccattagaattctataa

SEQ ID NO: 3004320 - DNA, 25 bp, Homo sapien
caggagctcagaggtcggaggaaaa

SEQ ID NO: 3004321 - DNA, 25 bp, Homo sapien
gctcagaggtcggaggaaaaaaatc

SEQ ID NO: 3004322 - DNA, 25 bp, Homo sapien
tgagccccattagaattctataaaa

SEQ ID NO: 3004323 - DNA, 25 bp, Homo sapien
tcttgccagagatccgctttgaggg

SEQ ID NO: 3004324 - DNA, 25 bp, Homo sapien
gcctcttgccagagatccgctttga

SEQ ID NO: 3004325 - DNA, 25 bp, Homo sapien
gccagagatccgctttgagggtaaa

SEQ ID NO: 3004326 - DNA, 25 bp, Homo sapien
cttgccagagatccgctttgagggt

SEQ ID NO: 3004327 - DNA, 25 bp, Homo sapien
ctgcttgagaactcggaggctgtcc

SEQ ID NO: 3004328 - DNA, 25 bp, Homo sapien
ccctgtggcgcgatgaacacggcca

SEQ ID NO: 3004329 - DNA, 25 bp, Homo sapien
tgcttgagaactcggaggctgtccc

SEQ ID NO: 3004330 - DNA, 25 bp, Homo sapien
gatgaacacggccaggttccccttc

SEQ ID NO: 3004331 - DNA, 25 bp, Homo sapien
gagctcagatccagaaccatgtcca

SEQ ID NO: 3004332 - DNA, 25 bp, Homo sapien
gatccccagtgaacatgagctccag

SEQ ID NO: 3004333 - DNA, 25 bp, Homo sapien
tgcagatccccagtgaacatgagct

SEQ ID NO: 3004334 - DNA, 25 bp, Homo sapien
cagctgctgcaattgtgattagagc

SEQ ID NO: 3004335 - DNA, 25 bp, Homo sapien
gtggccacaaacttgattgctcttc

SEQ ID NO: 3004336 - DNA, 25 bp, Homo sapien
tggccacaaacttgattgctcttcc

SEQ ID NO: 3004337 - DNA, 25 bp, Homo sapien
agaggcttggatctttactttctta

SEQ ID NO: 3004338 - DNA, 25 bp, Homo sapien
cagaggcttggatctttactttctt

SEQ ID NO: 3004339 - DNA, 25 bp, Homo sapien
gaggcttggatctttactttcttac

SEQ ID NO: 3004340 - DNA, 25 bp, Homo sapien
cccagactcttcagagatgaacagc

SEQ ID NO: 3004341 - DNA, 25 bp, Homo sapien
cagactcttcagagatgaacagcat

SEQ ID NO: 3004342 - DNA, 25 bp, Homo sapien
ctaacccagactcttcagagatgaa

SEQ ID NO: 3004343 - DNA, 25 bp, Homo sapien
aacccagactcttcagagatgaaca

SEQ ID NO: 3004344 - DNA, 25 bp, Homo sapien
tacagtctgagaaatcgggacatga

SEQ ID NO: 3004345 - DNA, 25 bp, Homo sapien
ctacagtctgagaaatcgggacatg

SEQ ID NO: 3004346 - DNA, 25 bp, Homo sapien
tctgagaaatcgggacatgaaggct

SEQ ID NO: 3004347 - DNA, 25 bp, Homo sapien
actgcaccctgctgaagctattttt

SEQ ID NO: 3004348 - DNA, 25 bp, Homo sapien
ctcatgactataatcaaaccacttt

SEQ ID NO: 3004349 - DNA, 25 bp, Homo sapien
ataatcaaaccactttgggaagaca

SEQ ID NO: 3004350 - DNA, 25 bp, Homo sapien
aaaaagaattccaaggccaggctca

SEQ ID NO: 3004351 - DNA, 25 bp, Homo sapien
cctggccgtgatggcgtatgatcgc

SEQ ID NO: 3004352 - DNA, 25 bp, Homo sapien
tttgtcaccaacacaatccccaaga

SEQ ID NO: 3004353 - DNA, 25 bp, Homo sapien
tggacaacctcatcctggccgtgat

SEQ ID NO: 3004354 - DNA, 25 bp, Homo sapien
ttcctggccaacctctccttcactg

SEQ ID NO: 3004355 - DNA, 25 bp, Homo sapien
cttgtcattttcagtggagcccagg

SEQ ID NO: 3004356 - DNA, 25 bp, Homo sapien
gaccgtggagtgaaacaacttgtca

SEQ ID NO: 3004357 - DNA, 25 bp, Homo sapien
ttgtcattttcagtggagcccaggc

SEQ ID NO: 3004358 - DNA, 25 bp, Homo sapien
gcagagaccgtggagtgaaacaact

SEQ ID NO: 3004359 - DNA, 25 bp, Homo sapien
caccaatgccttggaagactgtcca

SEQ ID NO: 3004360 - DNA, 25 bp, Homo sapien
gactgtccagatcatagaggtactc

SEQ ID NO: 3004361 - DNA, 25 bp, Homo sapien
gatcttcaagcatcaggagatagga

SEQ ID NO: 3004362 - DNA, 25 bp, Homo sapien
cctggttactgtcttcatgggaaat

SEQ ID NO: 3004363 - DNA, 25 bp, Homo sapien
gaacggattcgtagaactgcagctg

SEQ ID NO: 3004364 - DNA, 25 bp, Homo sapien
tgatgaaacccacagcaaagagcag

SEQ ID NO: 3004365 - DNA, 25 bp, Homo sapien
gctgtaggcagtgatgatgagaacc

SEQ ID NO: 3004366 - DNA, 25 bp, Homo sapien
tatccttgtctgaagcctcctctga

SEQ ID NO: 3004367 - DNA, 25 bp, Homo sapien
ggacatgtcccagcaggggaggtat

SEQ ID NO: 3004368 - DNA, 25 bp, Homo sapien
tgtaaggacatgtcccagcagggga

SEQ ID NO: 3004369 - DNA, 25 bp, Homo sapien
ctgtaaggacatgtcccagcagggg

SEQ ID NO: 3004370 - DNA, 25 bp, Homo sapien
aaggacatgtcccagcaggggaggt

SEQ ID NO: 3004371 - DNA, 25 bp, Homo sapien
atcctctgctagctgaaaaggtcag

SEQ ID NO: 3004372 - DNA, 25 bp, Homo sapien
ttattcaaggtcaagcgtgtcgtga

SEQ ID NO: 3004373 - DNA, 25 bp, Homo sapien
agactcactctttgtgtccctgaag

SEQ ID NO: 3004374 - DNA, 25 bp, Homo sapien
cctgtgtctattgacgccgtcagcc

SEQ ID NO: 3004375 - DNA, 25 bp, Homo sapien
caggtcttccccaacggtcttcttg

SEQ ID NO: 3004376 - DNA, 25 bp, Homo sapien
gaaagcttggttgaacccagtcgca

SEQ ID NO: 3004377 - DNA, 25 bp, Homo sapien
gcagctgccacgtggatataggaga

SEQ ID NO: 3004378 - DNA, 25 bp, Homo sapien
tcctgccctctacagagcgaattcg

SEQ ID NO: 3004379 - DNA, 25 bp, Homo sapien
cccagtcgcatatagttaaagatac

SEQ ID NO: 3004380 - DNA, 25 bp, Homo sapien
agcagcagctcattgagttgggtgc

SEQ ID NO: 3004381 - DNA, 25 bp, Homo sapien
tgggaggtcacagtagaagtgattg

SEQ ID NO: 3004382 - DNA, 25 bp, Homo sapien
gaggtcacagtagaagtgattgatc

SEQ ID NO: 3004383 - DNA, 25 bp, Homo sapien
ggaggtcacagtagaagtgattgat

SEQ ID NO: 3004384 - DNA, 25 bp, Homo sapien
ctgtgggaggtcacagtagaagtga

SEQ ID NO: 3004385 - DNA, 25 bp, Homo sapien
ttgagcgtggacatggccacagtgt

SEQ ID NO: 3004386 - DNA, 25 bp, Homo sapien
ggccacagaagttgagcgtggacat

SEQ ID NO: 3004387 - DNA, 25 bp, Homo sapien
tctggactgtctgactcatgcgggt

SEQ ID NO: 3004388 - DNA, 25 bp, Homo sapien
ctctggactgtctgactcatgcggg

SEQ ID NO: 3004389 - DNA, 25 bp, Homo sapien
ttgcgggacaggagacgactcaaca

SEQ ID NO: 3004390 - DNA, 25 bp, Homo sapien
gatggaacagtgacgctgatgcacc

SEQ ID NO: 3004391 - DNA, 25 bp, Homo sapien
acagggaactgcacgcttgcgggac

SEQ ID NO: 3004392 - DNA, 25 bp, Homo sapien
ggttgcccctgaccgtgaccaggta

SEQ ID NO: 3004393 - DNA, 25 bp, Homo sapien
tagagactcacctggattaccactc

SEQ ID NO: 3004394 - DNA, 25 bp, Homo sapien
agagactcacctggattaccactct

SEQ ID NO: 3004395 - DNA, 25 bp, Homo sapien
gagactcacctggattaccactctc

SEQ ID NO: 3004396 - DNA, 25 bp, Homo sapien
ctcgttgtggatacagaggccagca

SEQ ID NO: 3004397 - DNA, 25 bp, Homo sapien
ttgtggatacagaggccagcaaggt

SEQ ID NO: 3004398 - DNA, 25 bp, Homo sapien
cgttgtggatacagaggccagcaag

SEQ ID NO: 3004399 - DNA, 25 bp, Homo sapien
tgtggatacagaggccagcaaggtt

SEQ ID NO: 3004400 - DNA, 25 bp, Homo sapien
ggtctcgtcaaagtgcctggtatct

SEQ ID NO: 3004401 - DNA, 25 bp, Homo sapien
aggatgttgaccgactgggaaaggg

SEQ ID NO: 3004402 - DNA, 25 bp, Homo sapien
gatgttgaccgactgggaaagggct

SEQ ID NO: 3004403 - DNA, 25 bp, Homo sapien
tcgtcaaagtgcctggtatctgtca

SEQ ID NO: 3004404 - DNA, 25 bp, Homo sapien
ttttctgaaatgtccggaccaaatc

SEQ ID NO: 3004405 - DNA, 25 bp, Homo sapien
tggaaaatctaaaaggctggtagtc

SEQ ID NO: 3004406 - DNA, 25 bp, Homo sapien
accagctatggagctggaaatgtcc

SEQ ID NO: 3004407 - DNA, 25 bp, Homo sapien
gatgtttcctcgtttagtttcactg

SEQ ID NO: 3004408 - DNA, 25 bp, Homo sapien
tagtaaatactcaagcccagacagg

SEQ ID NO: 3004409 - DNA, 25 bp, Homo sapien
gactatgagctattaaacggacagg

SEQ ID NO: 3004410 - DNA, 25 bp, Homo sapien
gttgagtaccggtgcataaacccag

SEQ ID NO: 3004411 - DNA, 25 bp, Homo sapien
gactgcagggattaagagactatga

SEQ ID NO: 3004412 - DNA, 25 bp, Homo sapien
gagatgccagaattggaggtggtaa

SEQ ID NO: 3004413 - DNA, 25 bp, Homo sapien
tggagagatgccagaattggaggtg

SEQ ID NO: 3004414 - DNA, 25 bp, Homo sapien
atgccagaattggaggtggtaacag

SEQ ID NO: 3004415 - DNA, 25 bp, Homo sapien
gagagatgccagaattggaggtggt

SEQ ID NO: 3004416 - DNA, 25 bp, Homo sapien
tccacgtgaataaatgcatctgctt

SEQ ID NO: 3004417 - DNA, 25 bp, Homo sapien
tttttagttccacgtgaataaatgc

SEQ ID NO: 3004418 - DNA, 25 bp, Homo sapien
atggctacatcatttgacaactgca

SEQ ID NO: 3004419 - DNA, 25 bp, Homo sapien
tcagtgtttgcaatggctacatcat

SEQ ID NO: 3004420 - DNA, 25 bp, Homo sapien
cttgccaacgctgcctatcttcatt

SEQ ID NO: 3004421 - DNA, 25 bp, Homo sapien
tcagaaactctccttgccaacgctg

SEQ ID NO: 3004422 - DNA, 25 bp, Homo sapien
gccggaacacgcagagccctccagt

SEQ ID NO: 3004423 - DNA, 25 bp, Homo sapien
cgctgcctatcttcattcaacattt

SEQ ID NO: 3004424 - DNA, 25 bp, Homo sapien
agattgtctatttgttctttcggat

SEQ ID NO: 3004425 - DNA, 25 bp, Homo sapien
gtttggatttcatttaattctgctc

SEQ ID NO: 3004426 - DNA, 25 bp, Homo sapien
attgtctatttgttctttcggattt

SEQ ID NO: 3004427 - DNA, 25 bp, Homo sapien
agttccttaaggtgtgaacttagat

SEQ ID NO: 3004428 - DNA, 25 bp, Homo sapien
ggaagttgacagcagtttgccttgg

SEQ ID NO: 3004429 - DNA, 25 bp, Homo sapien
ttgccttggagtttgtccatcaccc

SEQ ID NO: 3004430 - DNA, 25 bp, Homo sapien
cttcacggtcccttcacctctgttt

SEQ ID NO: 3004431 - DNA, 25 bp, Homo sapien
atcaccctctccttcacggtccctt

SEQ ID NO: 3004432 - DNA, 25 bp, Homo sapien
tgagcctcgtggacgtctgctttac

SEQ ID NO: 3004433 - DNA, 25 bp, Homo sapien
gatgtacttcttcgtggctctgggc

SEQ ID NO: 3004434 - DNA, 25 bp, Homo sapien
ccaggcgtgctttgccgagatgtac

SEQ ID NO: 3004435 - DNA, 25 bp, Homo sapien
gagagctacctcctggcggccatgt

SEQ ID NO: 3004436 - DNA, 25 bp, Homo sapien
tatgtacgatgccatttcaacaaaa

SEQ ID NO: 3004437 - DNA, 25 bp, Homo sapien
ggataaactatgtaatagctccaag

SEQ ID NO: 3004438 - DNA, 25 bp, Homo sapien
aagacaaacaggaagtcttagccag

SEQ ID NO: 3004439 - DNA, 25 bp, Homo sapien
agttcaactactcagctatgcttca

SEQ ID NO: 3004440 - DNA, 25 bp, Homo sapien
gagagaagaaagttttcttctgatg

SEQ ID NO: 3004441 - DNA, 25 bp, Homo sapien
gaagaaagttttcttctgatgaatg

SEQ ID NO: 3004442 - DNA, 25 bp, Homo sapien
aagaaagttttcttctgatgaatga

SEQ ID NO: 3004443 - DNA, 25 bp, Homo sapien
gagaagaaagttttcttctgatgaa

SEQ ID NO: 3004444 - DNA, 25 bp, Homo sapien
ggaagctctccaggtctccaaataa

SEQ ID NO: 3004445 - DNA, 25 bp, Homo sapien
caacttgggaatggtcacggaagag

SEQ ID NO: 3004446 - DNA, 25 bp, Homo sapien
acttgggaatggtcacggaagagaa

SEQ ID NO: 3004447 - DNA, 25 bp, Homo sapien
gaggaagctctccaggtctccaaat

SEQ ID NO: 3004448 - DNA, 25 bp, Homo sapien
tgacatcctgctccattttatccat

SEQ ID NO: 3004449 - DNA, 25 bp, Homo sapien
tccttgtgagaaagtctaaatacca

SEQ ID NO: 3004450 - DNA, 25 bp, Homo sapien
agccagggctagaggcaaagccttc

SEQ ID NO: 3004451 - DNA, 25 bp, Homo sapien
gacatcatctgccgtaacaacctgc

SEQ ID NO: 3004452 - DNA, 25 bp, Homo sapien
catcgttgccatgagtatgaagggc

SEQ ID NO: 3004453 - DNA, 25 bp, Homo sapien
tcgctccagcgaagtccttgagcct

SEQ ID NO: 3004454 - DNA, 25 bp, Homo sapien
cagcgaagtccttgagcctcgtcat

SEQ ID NO: 3004455 - DNA, 25 bp, Homo sapien
agcggggaaccctcgctccagcgaa

SEQ ID NO: 3004456 - DNA, 25 bp, Homo sapien
cactgcatcaggcagcggggaaccc

SEQ ID NO: 3004457 - DNA, 25 bp, Homo sapien
gaagctctctagatccgaaaaatac

SEQ ID NO: 3004458 - DNA, 25 bp, Homo sapien
ctctagatccgaaaaatacaagaag

SEQ ID NO: 3004459 - DNA, 25 bp, Homo sapien
aagctctctagatccgaaaaataca

SEQ ID NO: 3004460 - DNA, 25 bp, Homo sapien
agctctctagatccgaaaaatacaa

SEQ ID NO: 3004461 - DNA, 25 bp, Homo sapien
agggcatagcacaggttttgctgct

SEQ ID NO: 3004462 - DNA, 25 bp, Homo sapien
gagatgctggtttgattttgtccca

SEQ ID NO: 3004463 - DNA, 25 bp, Homo sapien
tctgagatgctggtttgattttgtc

SEQ ID NO: 3004464 - DNA, 25 bp, Homo sapien
tgctggtttgattttgtcccatcat

SEQ ID NO: 3004465 - DNA, 25 bp, Homo sapien
agtctgagatgctggtttgattttg

SEQ ID NO: 3004466 - DNA, 25 bp, Homo sapien
gtgaaatacaatagtagctataaaa

SEQ ID NO: 3004467 - DNA, 25 bp, Homo sapien
gcaataacagaaaactgctataatt

SEQ ID NO: 3004468 - DNA, 25 bp, Homo sapien
caatagtagctataaaactatggag

SEQ ID NO: 3004469 - DNA, 25 bp, Homo sapien
tatgctaaacttccttttatcacta

SEQ ID NO: 3004470 - DNA, 25 bp, Homo sapien
gaactcggcctctaatcagtctcgg

SEQ ID NO: 3004471 - DNA, 25 bp, Homo sapien
ttgttcagaaacagacgccggtctg

SEQ ID NO: 3004472 - DNA, 25 bp, Homo sapien
tctgacagaaacacattggaaaatg

SEQ ID NO: 3004473 - DNA, 25 bp, Homo sapien
gttgccaacacatctatgaactcgg

SEQ ID NO: 3004474 - DNA, 25 bp, Homo sapien
caaaatgctataattccttcacgtg

SEQ ID NO: 3004475 - DNA, 25 bp, Homo sapien
gatcaactaaacatgtgccacctca

SEQ ID NO: 3004476 - DNA, 25 bp, Homo sapien
tataattccttcacgtgagtcaggg

SEQ ID NO: 3004477 - DNA, 25 bp, Homo sapien
agggccccactgctaacaagacaat

SEQ ID NO: 3004478 - DNA, 25 bp, Homo sapien
ccatccctcataagaaaagtcttcg

SEQ ID NO: 3004479 - DNA, 25 bp, Homo sapien
gggccaggtgtaacagctgaatcaa

SEQ ID NO: 3004480 - DNA, 25 bp, Homo sapien
gaaaagtcttcgaataatatgggcc

SEQ ID NO: 3004481 - DNA, 25 bp, Homo sapien
aagacacaaggcagagtatttttcc

SEQ ID NO: 3004482 - DNA, 25 bp, Homo sapien
actgtaactgatacaatgaggtttc

SEQ ID NO: 3004483 - DNA, 25 bp, Homo sapien
tgttcacgccaatacttcatgcttt

SEQ ID NO: 3004484 - DNA, 25 bp, Homo sapien
taaactgtaactgatacaatgaggt

SEQ ID NO: 3004485 - DNA, 25 bp, Homo sapien
ttctgtgcatgttcacgccaatact

SEQ ID NO: 3004486 - DNA, 25 bp, Homo sapien
aaattgggcttaagtgtctgtagtg

SEQ ID NO: 3004487 - DNA, 25 bp, Homo sapien
gcactgtttttgtctagccctctca

SEQ ID NO: 3004488 - DNA, 25 bp, Homo sapien
gcttaagtgtctgtagtgcactgtt

SEQ ID NO: 3004489 - DNA, 25 bp, Homo sapien
ttgggcttaagtgtctgtagtgcac

SEQ ID NO: 3004490 - DNA, 25 bp, Homo sapien
gaatgtgtttgtctgagtagctcgg

SEQ ID NO: 3004491 - DNA, 25 bp, Homo sapien
taagtttgttcgtttacattgaggc

SEQ ID NO: 3004492 - DNA, 25 bp, Homo sapien
cgagataagttaggaggttcaggta

SEQ ID NO: 3004493 - DNA, 25 bp, Homo sapien
tgttgttgagctcccgaactcactg

SEQ ID NO: 3004494 - DNA, 25 bp, Homo sapien
tgcacagcttaaaagccctataatg

SEQ ID NO: 3004495 - DNA, 25 bp, Homo sapien
aatcacaaggagaatacatataagc

SEQ ID NO: 3004496 - DNA, 25 bp, Homo sapien
taagtgtgttatatcagctgaccag

SEQ ID NO: 3004497 - DNA, 25 bp, Homo sapien
tatgctagatgctaatgaggccaaa

SEQ ID NO: 3004498 - DNA, 25 bp, Homo sapien
tcaatgttatacaccacagtagcag

SEQ ID NO: 3004499 - DNA, 25 bp, Homo sapien
acttcatgggtgaggtgacaggatc

SEQ ID NO: 3004500 - DNA, 25 bp, Homo sapien
tacaggctgggcattctaaatctga

SEQ ID NO: 3004501 - DNA, 25 bp, Homo sapien
ttcaaagatccagtacgacgcaagg

SEQ ID NO: 3004502 - DNA, 25 bp, Homo sapien
taatactgccatagttgttatttat

SEQ ID NO: 3004503 - DNA, 25 bp, Homo sapien
ataattaatactgccatagttgtta

SEQ ID NO: 3004504 - DNA, 25 bp, Homo sapien
tgtctgagaaacaacgaagtgaagg

SEQ ID NO: 3004505 - DNA, 25 bp, Homo sapien
tctgagaaacaacgaagtgaaggag

SEQ ID NO: 3004506 - DNA, 25 bp, Homo sapien
tcttccagtatttgattgaatagag

SEQ ID NO: 3004507 - DNA, 25 bp, Homo sapien
taaagacagaatcttgacttctcag

SEQ ID NO: 3004508 - DNA, 25 bp, Homo sapien
cagaggacgagaaactgaatgtggt

SEQ ID NO: 3004509 - DNA, 25 bp, Homo sapien
ttgaatagagttaaagacagaatct

SEQ ID NO: 3004510 - DNA, 25 bp, Homo sapien
tagtaacagacacacatccaatggt

SEQ ID NO: 3004511 - DNA, 25 bp, Homo sapien
ttaagatatacgtagaagaacaaca

SEQ ID NO: 3004512 - DNA, 25 bp, Homo sapien
cgtagaagaacaacatcagttagta

SEQ ID NO: 3004513 - DNA, 25 bp, Homo sapien
ctttcaagggaatatgtcttgttaa

SEQ ID NO: 3004514 - DNA, 25 bp, Homo sapien
tccactgttttcattacaggagcca

SEQ ID NO: 3004515 - DNA, 25 bp, Homo sapien
ggatttcttcaacagtacttgttgg

SEQ ID NO: 3004516 - DNA, 25 bp, Homo sapien
catgaatttcatctaatccaatgtt

SEQ ID NO: 3004517 - DNA, 25 bp, Homo sapien
ttttctacaatcagttctagtatag

SEQ ID NO: 3004518 - DNA, 25 bp, Homo sapien
tatagatgtctttcttatccattgt

SEQ ID NO: 3004519 - DNA, 25 bp, Homo sapien
cataattgtcagaaggggtactgat

SEQ ID NO: 3004520 - DNA, 25 bp, Homo sapien
tcataattgtcagaaggggtactga

SEQ ID NO: 3004521 - DNA, 25 bp, Homo sapien
atcataattgtcagaaggggtactg

SEQ ID NO: 3004522 - DNA, 25 bp, Homo sapien
taattgtcagaaggggtactgatac

SEQ ID NO: 3004523 - DNA, 25 bp, Homo sapien
aagtggattagaagttaatggctgt

SEQ ID NO: 3004524 - DNA, 25 bp, Homo sapien
tctttaagtggattagaagttaatg

SEQ ID NO: 3004525 - DNA, 25 bp, Homo sapien
taagtggattagaagttaatggctg

SEQ ID NO: 3004526 - DNA, 25 bp, Homo sapien
tttaagtggattagaagttaatggc

SEQ ID NO: 3004527 - DNA, 25 bp, Homo sapien
ttgaacaacggaacaggcaaacagc

SEQ ID NO: 3004528 - DNA, 25 bp, Homo sapien
ctgattgaacaacggaacaggcaaa

SEQ ID NO: 3004529 - DNA, 25 bp, Homo sapien
gattgaacaacggaacaggcaaaca

SEQ ID NO: 3004530 - DNA, 25 bp, Homo sapien
attgaacaacggaacaggcaaacag

SEQ ID NO: 3004531 - DNA, 25 bp, Homo sapien
tcattatgcatcatcattcccctgg

SEQ ID NO: 3004532 - DNA, 25 bp, Homo sapien
tatgcatcatcattcccctggttct

SEQ ID NO: 3004533 - DNA, 25 bp, Homo sapien
tattatcttcattatgcatcatcat

SEQ ID NO: 3004534 - DNA, 25 bp, Homo sapien
tcatcattcccctggttctcatcat

SEQ ID NO: 3004535 - DNA, 25 bp, Homo sapien
ctgctgtacttcgagctgaattttc

SEQ ID NO: 3004536 - DNA, 25 bp, Homo sapien
tgctgtacttcgagctgaattttca

SEQ ID NO: 3004537 - DNA, 25 bp, Homo sapien
ctgtacttcgagctgaattttcatt

SEQ ID NO: 3004538 - DNA, 25 bp, Homo sapien
gctgtacttcgagctgaattttcat

SEQ ID NO: 3004539 - DNA, 25 bp, Homo sapien
tataattttctattcagcattccaa

SEQ ID NO: 3004540 - DNA, 25 bp, Homo sapien
atttataatatgacattgtcccact

SEQ ID NO: 3004541 - DNA, 25 bp, Homo sapien
tccttcaatatcaaaatctataatt

SEQ ID NO: 3004542 - DNA, 25 bp, Homo sapien
ataatatgacattgtcccactagac

SEQ ID NO: 3004543 - DNA, 25 bp, Homo sapien
gaagaggctccagtccgagttgaga

SEQ ID NO: 3004544 - DNA, 25 bp, Homo sapien
ggctccagtccgagttgagacgctc

SEQ ID NO: 3004545 - DNA, 25 bp, Homo sapien
tgggggcagtttggtatcaacgcac

SEQ ID NO: 3004546 - DNA, 25 bp, Homo sapien
ggcctctcctgacccgcccacggag

SEQ ID NO: 3004547 - DNA, 25 bp, Homo sapien
gccctcctgccaacacgacacacaa

SEQ ID NO: 3004548 - DNA, 25 bp, Homo sapien
ccctcctgccaacacgacacacaac

SEQ ID NO: 3004549 - DNA, 25 bp, Homo sapien
ctccgtcaaccgtcgtccaggcggc

SEQ ID NO: 3004550 - DNA, 25 bp, Homo sapien
aggcggccccgtcagcaaccgccgc

SEQ ID NO: 3004551 - DNA, 25 bp, Homo sapien
gcaggcgccgtggaccgcgcaggcg

SEQ ID NO: 3004552 - DNA, 25 bp, Homo sapien
tcccgcccgcgaagaaagcgcggga

SEQ ID NO: 3004553 - DNA, 25 bp, Homo sapien
tggcccttagggtccagacatccgt

SEQ ID NO: 3004554 - DNA, 25 bp, Homo sapien
cacccgaggtgtctggctcaatttc

SEQ ID NO: 3004555 - DNA, 25 bp, Homo sapien
agattgactcgaaggccacccgagg

SEQ ID NO: 3004556 - DNA, 25 bp, Homo sapien
tcaatttctgggtcggatcagggtc

SEQ ID NO: 3004557 - DNA, 25 bp, Homo sapien
caaatgttaattacacgtttcaatt

SEQ ID NO: 3004558 - DNA, 25 bp, Homo sapien
cttaagagctaacacagctggtgac

SEQ ID NO: 3004559 - DNA, 25 bp, Homo sapien
gccaaagctcattaactgtttcaaa

SEQ ID NO: 3004560 - DNA, 25 bp, Homo sapien
gctacactaaacaacggatcttcag

SEQ ID NO: 3004561 - DNA, 25 bp, Homo sapien
gctaaaatcattgacaaagatggct

SEQ ID NO: 3004562 - DNA, 25 bp, Homo sapien
gcagtgtctttttcgatgtctacaa

SEQ ID NO: 3004563 - DNA, 25 bp, Homo sapien
cagtgtctttttcgatgtctacaat

SEQ ID NO: 3004564 - DNA, 25 bp, Homo sapien
agcagtgtctttttcgatgtctaca

SEQ ID NO: 3004565 - DNA, 25 bp, Homo sapien
aatcaatgcagaaatcaagtacggc

SEQ ID NO: 3004566 - DNA, 25 bp, Homo sapien
gacgattctgtgtttggaaccaaga

SEQ ID NO: 3004567 - DNA, 25 bp, Homo sapien
caaggatccggcacattcaagggag

SEQ ID NO: 3004568 - DNA, 25 bp, Homo sapien
tgaacatagagtttcgcacacacat

SEQ ID NO: 3004569 - DNA, 25 bp, Homo sapien
ggcccggatgacggcccatctacct

SEQ ID NO: 3004570 - DNA, 25 bp, Homo sapien
cggatgacggcccatctacctgggc

SEQ ID NO: 3004571 - DNA, 25 bp, Homo sapien
cccggatgacggcccatctacctgg

SEQ ID NO: 3004572 - DNA, 25 bp, Homo sapien
aggcccggatgacggcccatctacc

SEQ ID NO: 3004573 - DNA, 25 bp, Homo sapien
tcctttcaccagataacggcggcag

SEQ ID NO: 3004574 - DNA, 25 bp, Homo sapien
ttagagcacgcgattactccctggg

SEQ ID NO: 3004575 - DNA, 25 bp, Homo sapien
taggatgtcctgatagacccacggg

SEQ ID NO: 3004576 - DNA, 25 bp, Homo sapien
tacttcgtaccaaagcagttgaggc

SEQ ID NO: 3004577 - DNA, 25 bp, Homo sapien
attcctcgacttcttcaaatgcatt

SEQ ID NO: 3004578 - DNA, 25 bp, Homo sapien
ttcctcgacttcttcaaatgcattg

SEQ ID NO: 3004579 - DNA, 25 bp, Homo sapien
ctggaagaatcttggattttgttga

SEQ ID NO: 3004580 - DNA, 25 bp, Homo sapien
gaagaatcttggattttgttgaaat

SEQ ID NO: 3004581 - DNA, 25 bp, Homo sapien
tggaagaatcttggattttgttgaa

SEQ ID NO: 3004582 - DNA, 25 bp, Homo sapien
ggaagaatcttggattttgttgaaa

SEQ ID NO: 3004583 - DNA, 25 bp, Homo sapien
tcaggacccttagacttgatctgcc

SEQ ID NO: 3004584 - DNA, 25 bp, Homo sapien
tgccaactagggttctaaaagtcag

SEQ ID NO: 3004585 - DNA, 25 bp, Homo sapien
gatctgcccaaggttacatggtctg

SEQ ID NO: 3004586 - DNA, 25 bp, Homo sapien
gcccggcctgcatgatgtgtttcta

SEQ ID NO: 3004587 - DNA, 25 bp, Homo sapien
gacgtgcgtcttccattcagtccac

SEQ ID NO: 3004588 - DNA, 25 bp, Homo sapien
aggaaggagacgtgcgtcttccatt

SEQ ID NO: 3004589 - DNA, 25 bp, Homo sapien
gagacgtgcgtcttccattcagtcc

SEQ ID NO: 3004590 - DNA, 25 bp, Homo sapien
aaggagacgtgcgtcttccattcag

SEQ ID NO: 3004591 - DNA, 25 bp, Homo sapien
ttttctcaaactccaagatggtcct

SEQ ID NO: 3004592 - DNA, 25 bp, Homo sapien
cgcaaacacagtcggaaatcatcct

SEQ ID NO: 3004593 - DNA, 25 bp, Homo sapien
ggaaatcatcctcggccactttgca

SEQ ID NO: 3004594 - DNA, 25 bp, Homo sapien
caaactccaagatggtcctggctct

SEQ ID NO: 3004595 - DNA, 25 bp, Homo sapien
gatgttcaggtcacccaggcctatg

SEQ ID NO: 3004596 - DNA, 25 bp, Homo sapien
tctttgggacacttctcgatcagcg

SEQ ID NO: 3004597 - DNA, 25 bp, Homo sapien
gaagagttccagcactgcgtcgctg

SEQ ID NO: 3004598 - DNA, 25 bp, Homo sapien
agatgcgttcgctctccttggagac

SEQ ID NO: 3004599 - DNA, 25 bp, Homo sapien
caaatccaagcaaaaacacgatata

SEQ ID NO: 3004600 - DNA, 25 bp, Homo sapien
aatccaagcaaaaacacgatatata

SEQ ID NO: 3004601 - DNA, 25 bp, Homo sapien
ctccaaatccaagcaaaaacacgat

SEQ ID NO: 3004602 - DNA, 25 bp, Homo sapien
tccaagcaaaaacacgatatataca

SEQ ID NO: 3004603 - DNA, 25 bp, Homo sapien
ggaaaccccgcgtatagtagagcat

SEQ ID NO: 3004604 - DNA, 25 bp, Homo sapien
tacatgcccatggactggaaacccc

SEQ ID NO: 3004605 - DNA, 25 bp, Homo sapien
tatagtagagcatgttcgcccagcc

SEQ ID NO: 3004606 - DNA, 25 bp, Homo sapien
tggatcatgacgctgtacatgccca

SEQ ID NO: 3004607 - DNA, 25 bp, Homo sapien
agacagtatcacaagcacagcttgg

SEQ ID NO: 3004608 - DNA, 25 bp, Homo sapien
gacagacagtatcacaagcacagct

SEQ ID NO: 3004609 - DNA, 25 bp, Homo sapien
cagacagtatcacaagcacagcttg

SEQ ID NO: 3004610 - DNA, 25 bp, Homo sapien
gaagacagacagtatcacaagcaca

SEQ ID NO: 3004611 - DNA, 25 bp, Homo sapien
gttcaggagacacaggagacacggg

SEQ ID NO: 3004612 - DNA, 25 bp, Homo sapien
ttcaggagacacaggagacacgggc

SEQ ID NO: 3004613 - DNA, 25 bp, Homo sapien
ctgttcaggagacacaggagacacg

SEQ ID NO: 3004614 - DNA, 25 bp, Homo sapien
tgttcaggagacacaggagacacgg

SEQ ID NO: 3004615 - DNA, 25 bp, Homo sapien
atccgagggtctcagcaggaagatg

SEQ ID NO: 3004616 - DNA, 25 bp, Homo sapien
atggactgcagatccgagggtctca

SEQ ID NO: 3004617 - DNA, 25 bp, Homo sapien
gactgcagatccgagggtctcagca

SEQ ID NO: 3004618 - DNA, 25 bp, Homo sapien
gatccgagggtctcagcaggaagat

SEQ ID NO: 3004619 - DNA, 25 bp, Homo sapien
agagatgcacatggcccagatgagc

SEQ ID NO: 3004620 - DNA, 25 bp, Homo sapien
ccatcttgtgcgtcagggccaaggg

SEQ ID NO: 3004621 - DNA, 25 bp, Homo sapien
caaacatcctccctaggagctgcag

SEQ ID NO: 3004622 - DNA, 25 bp, Homo sapien
catggcccagatgagcacaaacatc

SEQ ID NO: 3004623 - DNA, 25 bp, Homo sapien
gggcggtagtacgagacgagggtca

SEQ ID NO: 3004624 - DNA, 25 bp, Homo sapien
gacagaaagaacatgtgcttggcaa

SEQ ID NO: 3004625 - DNA, 25 bp, Homo sapien
ccacttcatatgcagcagcgtgtgc

SEQ ID NO: 3004626 - DNA, 25 bp, Homo sapien
tacgagacgagggtcagggtgatgt

SEQ ID NO: 3004627 - DNA, 25 bp, Homo sapien
ccttgatctcacgactgaggatgta

SEQ ID NO: 3004628 - DNA, 25 bp, Homo sapien
aacttcctggacaggctccggagcc

SEQ ID NO: 3004629 - DNA, 25 bp, Homo sapien
tccgtacgcccagtcggtgaacttc

SEQ ID NO: 3004630 - DNA, 25 bp, Homo sapien
actgagttgtccgtggtggtgtcca

SEQ ID NO: 3004631 - DNA, 25 bp, Homo sapien
caatctcgggctggttggtgcatgc

SEQ ID NO: 3004632 - DNA, 25 bp, Homo sapien
catcgttgttgcgagtggtctccag

SEQ ID NO: 3004633 - DNA, 25 bp, Homo sapien
tgagtcccgcgaggtgatgtccgtc

SEQ ID NO: 3004634 - DNA, 25 bp, Homo sapien
cactccgcagtaggatcatgtcgta

SEQ ID NO: 3004635 - DNA, 25 bp, Homo sapien
cttggcgtgcgcgttgacgtcggcg

SEQ ID NO: 3004636 - DNA, 25 bp, Homo sapien
tagaagccttcgtgttggtacttgg

SEQ ID NO: 3004637 - DNA, 25 bp, Homo sapien
cgctcgatggcgatgttcagcgccg

SEQ ID NO: 3004638 - DNA, 25 bp, Homo sapien
cgatgagcagggctgcgatgtcccc

SEQ ID NO: 3004639 - DNA, 25 bp, Homo sapien
tgtactcggcgttgatgaacctgcc

SEQ ID NO: 3004640 - DNA, 25 bp, Homo sapien
tgtcggaggccgtcagcttgtgcat

SEQ ID NO: 3004641 - DNA, 25 bp, Homo sapien
ccaggatgtcgttctcttcagcaaa

SEQ ID NO: 3004642 - DNA, 25 bp, Homo sapien
tcataggcctcctctgtgtactcgg

SEQ ID NO: 3004643 - DNA, 25 bp, Homo sapien
tccaccagcaactctaccaactcct

SEQ ID NO: 3004644 - DNA, 25 bp, Homo sapien
gacacggctgcaaagatgcgcttct

SEQ ID NO: 3004645 - DNA, 25 bp, Homo sapien
caggcacatcctcatcatggcgccg

SEQ ID NO: 3004646 - DNA, 25 bp, Homo sapien
tcatcatggcgccgcctgcaaagct

SEQ ID NO: 3004647 - DNA, 25 bp, Homo sapien
tggatggggtctctgtcacatcatc

SEQ ID NO: 3004648 - DNA, 25 bp, Homo sapien
gactggggggagtccatgtcatcac

SEQ ID NO: 3004649 - DNA, 25 bp, Homo sapien
agactggggggagtccatgtcatca

SEQ ID NO: 3004650 - DNA, 25 bp, Homo sapien
gtcacatcatcctgaggagactggg

SEQ ID NO: 3004651 - DNA, 25 bp, Homo sapien
gacaggaggagaggtcttggcaact

SEQ ID NO: 3004652 - DNA, 25 bp, Homo sapien
caagagcttgaataacccggctggg

SEQ ID NO: 3004653 - DNA, 25 bp, Homo sapien
gattatagctccaactaacagaggg

SEQ ID NO: 3004654 - DNA, 25 bp, Homo sapien
aatgccaacacatgctgagcgctga

SEQ ID NO: 3004655 - DNA, 25 bp, Homo sapien
tgtgtgtgtggaaaacgtgcccaac

SEQ ID NO: 3004656 - DNA, 25 bp, Homo sapien
ttgcccatgagaggcaccatctcct

SEQ ID NO: 3004657 - DNA, 25 bp, Homo sapien
ctgggggcagcaactctcttgccca

SEQ ID NO: 3004658 - DNA, 25 bp, Homo sapien
ttctttgtgggggtgatctccgccg

SEQ ID NO: 3004659 - DNA, 25 bp, Homo sapien
ctcttgcccatgagaggcaccatct

SEQ ID NO: 3004660 - DNA, 25 bp, Homo sapien
ctggaatacaaccacagggcagatg

SEQ ID NO: 3004661 - DNA, 25 bp, Homo sapien
tggaatacaaccacagggcagatgc

SEQ ID NO: 3004662 - DNA, 25 bp, Homo sapien
cacataggtgggggcaggaagacgg

SEQ ID NO: 3004663 - DNA, 25 bp, Homo sapien
cataggtgggggcaggaagacggat

SEQ ID NO: 3004664 - DNA, 25 bp, Homo sapien
gacacataggtgggggcaggaagac

SEQ ID NO: 3004665 - DNA, 25 bp, Homo sapien
cgacacataggtgggggcaggaaga

SEQ ID NO: 3004666 - DNA, 25 bp, Homo sapien
tgccctgagatcaccgcatgtctgg

SEQ ID NO: 3004667 - DNA, 25 bp, Homo sapien
tgaggcggcgggaagctctcattgc

SEQ ID NO: 3004668 - DNA, 25 bp, Homo sapien
gcggcgggaagctctcattgcaggc

SEQ ID NO: 3004669 - DNA, 25 bp, Homo sapien
tctgggtggtcgtggcaacccttgc

SEQ ID NO: 3004670 - DNA, 25 bp, Homo sapien
cgcaggtgccaagatcgaagttgtg

SEQ ID NO: 3004671 - DNA, 25 bp, Homo sapien
aatgaggcgtcagaggcagaactgg

SEQ ID NO: 3004672 - DNA, 25 bp, Homo sapien
gcccacccacgtggcccgtgtgagt

SEQ ID NO: 3004673 - DNA, 25 bp, Homo sapien
ctggaatgaggcgtcagaggcagaa

SEQ ID NO: 3004674 - DNA, 25 bp, Homo sapien
tcctaaggcccagtgttgacagtgc

SEQ ID NO: 3004675 - DNA, 25 bp, Homo sapien
aaaacaagggcctaacatgtcccag

SEQ ID NO: 3004676 - DNA, 25 bp, Homo sapien
gagactgaccatccaaactgtttag

SEQ ID NO: 3004677 - DNA, 25 bp, Homo sapien
cagagcactggtgttccctcagcag

SEQ ID NO: 3004678 - DNA, 25 bp, Homo sapien
cagataaacttcctcgggctgagca

SEQ ID NO: 3004679 - DNA, 25 bp, Homo sapien
tgagcagactgcctatctcgagcac

SEQ ID NO: 3004680 - DNA, 25 bp, Homo sapien
tcagagaccctgaaaactgtcgcag

SEQ ID NO: 3004681 - DNA, 25 bp, Homo sapien
caggactcttgaagacctcagcgtc

SEQ ID NO: 3004682 - DNA, 25 bp, Homo sapien
caataagcattattacaggatgcag

SEQ ID NO: 3004683 - DNA, 25 bp, Homo sapien
actgacaaagagatcatcaataagc

SEQ ID NO: 3004684 - DNA, 25 bp, Homo sapien
gaaaaactactcaaatcacacgcaa

SEQ ID NO: 3004685 - DNA, 25 bp, Homo sapien
caatagctctctggcaaagttagac

SEQ ID NO: 3004686 - DNA, 25 bp, Homo sapien
tgctcaaggcatcccctttcttctt

SEQ ID NO: 3004687 - DNA, 25 bp, Homo sapien
gtttttctgctcaaggcatcccctt

SEQ ID NO: 3004688 - DNA, 25 bp, Homo sapien
gggtttttctgctcaaggcatcccc

SEQ ID NO: 3004689 - DNA, 25 bp, Homo sapien
ttctgctcaaggcatcccctttctt

SEQ ID NO: 3004690 - DNA, 25 bp, Homo sapien
ctctcagagctaggacgtcgcatgc

SEQ ID NO: 3004691 - DNA, 25 bp, Homo sapien
tgtccatgagtgacaagtgttcccg

SEQ ID NO: 3004692 - DNA, 25 bp, Homo sapien
tttgtgtccgcacagcctctcagag

SEQ ID NO: 3004693 - DNA, 25 bp, Homo sapien
tgcacacgtgcagagtgaggaacag

SEQ ID NO: 3004694 - DNA, 25 bp, Homo sapien
tcagccgtgacagcatgagtgaggt

SEQ ID NO: 3004695 - DNA, 25 bp, Homo sapien
acgggcccagtgagccgtcagccat

SEQ ID NO: 3004696 - DNA, 25 bp, Homo sapien
tgaggtgctcaagtcagcccgtgac

SEQ ID NO: 3004697 - DNA, 25 bp, Homo sapien
tgctcatggccgacgtcaggagctg

SEQ ID NO: 3004698 - DNA, 25 bp, Homo sapien
cagttgcccgggtcttcgttgatga

SEQ ID NO: 3004699 - DNA, 25 bp, Homo sapien
tcagggtgcgcttgacgccctcaca

SEQ ID NO: 3004700 - DNA, 25 bp, Homo sapien
tctgcttgaccgcagggagaagctc

SEQ ID NO: 3004701 - DNA, 25 bp, Homo sapien
gatgcccacgttggtgttccaggtg

SEQ ID NO: 3004702 - DNA, 25 bp, Homo sapien
gaaggccttcctcatgcacttaagg

SEQ ID NO: 3004703 - DNA, 25 bp, Homo sapien
catcaggtgtgtaccccacctgcag

SEQ ID NO: 3004704 - DNA, 25 bp, Homo sapien
ctcatgcacttaaggaagctcttct

SEQ ID NO: 3004705 - DNA, 25 bp, Homo sapien
gaagcaccaccggtagtcgtccttg

SEQ ID NO: 3004706 - DNA, 25 bp, Homo sapien
gctctcctgtgcgatcttgttgaca

SEQ ID NO: 3004707 - DNA, 25 bp, Homo sapien
gttgacagtctcacccatgagggcg

SEQ ID NO: 3004708 - DNA, 25 bp, Homo sapien
cttccagatgttcttgctctcctgt

SEQ ID NO: 3004709 - DNA, 25 bp, Homo sapien
caggaggatgtaggtgagaattaca

SEQ ID NO: 3004710 - DNA, 25 bp, Homo sapien
gacggcagggagtcattcttcccgt

SEQ ID NO: 3004711 - DNA, 25 bp, Homo sapien
ggactcagacggcagggagtcattc

SEQ ID NO: 3004712 - DNA, 25 bp, Homo sapien
agggagtcattcttcccgtcttcaa

SEQ ID NO: 3004713 - DNA, 25 bp, Homo sapien
ccgtcttcaatcagcgtcaccaccg

SEQ ID NO: 3004714 - DNA, 25 bp, Homo sapien
cccgaacaagaagacgatgtagaca

SEQ ID NO: 3004715 - DNA, 25 bp, Homo sapien
cgatgtagacaaacatgaaacggca

SEQ ID NO: 3004716 - DNA, 25 bp, Homo sapien
aaacccgaacaagaagacgatgtag

SEQ ID NO: 3004717 - DNA, 25 bp, Homo sapien
tgaaacggcacaggtctctcaggat

SEQ ID NO: 3004718 - DNA, 25 bp, Homo sapien
gaagccacatactccttgaggtggc

SEQ ID NO: 3004719 - DNA, 25 bp, Homo sapien
caccacggtggccagcatgaacagt

SEQ ID NO: 3004720 - DNA, 25 bp, Homo sapien
aaaccgcgggtgtagtagagcatgt

SEQ ID NO: 3004721 - DNA, 25 bp, Homo sapien
tgacggcatagatgcccatctgctg

SEQ ID NO: 3004722 - DNA, 25 bp, Homo sapien
acaggccgctcagaggtccagactg

SEQ ID NO: 3004723 - DNA, 25 bp, Homo sapien
aacaaaaggtcacaggccgctcaga

SEQ ID NO: 3004724 - DNA, 25 bp, Homo sapien
tggaggggcagaaagctccgtctac

SEQ ID NO: 3004725 - DNA, 25 bp, Homo sapien
gcagaaagctccgtctacgggaacc

SEQ ID NO: 3004726 - DNA, 25 bp, Homo sapien
cggccgcctctgcaggaaatactga

SEQ ID NO: 3004727 - DNA, 25 bp, Homo sapien
aaacagggtcttcatcgacggccgc

SEQ ID NO: 3004728 - DNA, 25 bp, Homo sapien
tcactgtagctgtccacaaacaggg

SEQ ID NO: 3004729 - DNA, 25 bp, Homo sapien
atcgacggccgcctctgcaggaaat

SEQ ID NO: 3004730 - DNA, 25 bp, Homo sapien
agacaggatctctccagtaactcgg

SEQ ID NO: 3004731 - DNA, 25 bp, Homo sapien
cagtaactcggaaatagtctccagt

SEQ ID NO: 3004732 - DNA, 25 bp, Homo sapien
gaagtagactcctcctaacacagac

SEQ ID NO: 3004733 - DNA, 25 bp, Homo sapien
aaagaagtagactcctcctaacaca

SEQ ID NO: 3004734 - DNA, 25 bp, Homo sapien
ctcgcccacgaggcctgagcctctg

SEQ ID NO: 3004735 - DNA, 25 bp, Homo sapien
acgaggcctgagcctctggccgcac

SEQ ID NO: 3004736 - DNA, 25 bp, Homo sapien
cctcgcccacgaggcctgagcctct

SEQ ID NO: 3004737 - DNA, 25 bp, Homo sapien
cccacgaggcctgagcctctggccg

SEQ ID NO: 3004738 - DNA, 25 bp, Homo sapien
gatgcgcttgacgaatctgtcccac

SEQ ID NO: 3004739 - DNA, 25 bp, Homo sapien
gttcagcggctccaccaagagcatg

SEQ ID NO: 3004740 - DNA, 25 bp, Homo sapien
tccacgggcctgtagtaggcagcca

SEQ ID NO: 3004741 - DNA, 25 bp, Homo sapien
tgtcccacttgtcctgcaggagtcg

SEQ ID NO: 3004742 - DNA, 25 bp, Homo sapien
aggcgatcacctccagcaccgagtt

SEQ ID NO: 3004743 - DNA, 25 bp, Homo sapien
tcctggacaggtgcctgcactcggg

SEQ ID NO: 3004744 - DNA, 25 bp, Homo sapien
cgatgcaggacaggtcgtacagcga

SEQ ID NO: 3004745 - DNA, 25 bp, Homo sapien
ccgagttcttctcgcaggtgtcgat

SEQ ID NO: 3004746 - DNA, 25 bp, Homo sapien
gctgccagagccagcggcgtcattc

SEQ ID NO: 3004747 - DNA, 25 bp, Homo sapien
cccttcttgttggtgagctcctcca

SEQ ID NO: 3004748 - DNA, 25 bp, Homo sapien
gccagcggcgtcattcccttcttgt

SEQ ID NO: 3004749 - DNA, 25 bp, Homo sapien
cgatcttcccggtcccagctgccag

SEQ ID NO: 3004750 - DNA, 25 bp, Homo sapien
tcagcgtcgggtgcagtttggcccc

SEQ ID NO: 3004751 - DNA, 25 bp, Homo sapien
ccccagcatcagaatctcattgtac

SEQ ID NO: 3004752 - DNA, 25 bp, Homo sapien
cttcagcgtcgggtgcagtttggcc

SEQ ID NO: 3004753 - DNA, 25 bp, Homo sapien
gcccccagcatcagaatctcattgt

SEQ ID NO: 3004754 - DNA, 25 bp, Homo sapien
cttcgtgttgtcggccgtgttgtcg

SEQ ID NO: 3004755 - DNA, 25 bp, Homo sapien
tgttgtcggccgtgttgtcggccac

SEQ ID NO: 3004756 - DNA, 25 bp, Homo sapien
tcgtgttgtcggccgtgttgtcggc

SEQ ID NO: 3004757 - DNA, 25 bp, Homo sapien
gtgttgtcggccgtgttgtcggcca

SEQ ID NO: 3004758 - DNA, 25 bp, Homo sapien
agggcgtgcagcaccgtgttgccca

SEQ ID NO: 3004759 - DNA, 25 bp, Homo sapien
ctggttggtgcacgcggccagggac

SEQ ID NO: 3004760 - DNA, 25 bp, Homo sapien
accgagtccctggcgctgatgtcgg

SEQ ID NO: 3004761 - DNA, 25 bp, Homo sapien
ctgatgtcggccgtctgccaggagt

SEQ ID NO: 3004762 - DNA, 25 bp, Homo sapien
ggagtgagatccagctggcccctga

SEQ ID NO: 3004763 - DNA, 25 bp, Homo sapien
ctcaggagtgagatccagctggccc

SEQ ID NO: 3004764 - DNA, 25 bp, Homo sapien
gcctcaggagtgagatccagctggc

SEQ ID NO: 3004765 - DNA, 25 bp, Homo sapien
tgggcctcaggagtgagatccagct

SEQ ID NO: 3004766 - DNA, 25 bp, Homo sapien
aagtagaatccaggccgccctttgg

SEQ ID NO: 3004767 - DNA, 25 bp, Homo sapien
gcgtctctcgatggcgatgtgcagt

SEQ ID NO: 3004768 - DNA, 25 bp, Homo sapien
tcttaaagaagtccccatgggccgc

SEQ ID NO: 3004769 - DNA, 25 bp, Homo sapien
tggacgtctgctccgttctccacca

SEQ ID NO: 3004770 - DNA, 25 bp, Homo sapien
ttggcttcgtggtcacggtcctgtg

SEQ ID NO: 3004771 - DNA, 25 bp, Homo sapien
ctacagaggacgcgcacggttggct

SEQ ID NO: 3004772 - DNA, 25 bp, Homo sapien
cacggttggcttcgtggtcacggtc

SEQ ID NO: 3004773 - DNA, 25 bp, Homo sapien
acgcgcacggttggcttcgtggtca

SEQ ID NO: 3004774 - DNA, 25 bp, Homo sapien
gctggcgttgacaagctccttcagg

SEQ ID NO: 3004775 - DNA, 25 bp, Homo sapien
ccttgtagtagctgtccgtgtagct

SEQ ID NO: 3004776 - DNA, 25 bp, Homo sapien
tctgtccgtcgtgcaggttgagcat

SEQ ID NO: 3004777 - DNA, 25 bp, Homo sapien
ttcaggctgtccgtttgccgcgcga

SEQ ID NO: 3004778 - DNA, 25 bp, Homo sapien
tcttctcggtgctggcggcgacaga

SEQ ID NO: 3004779 - DNA, 25 bp, Homo sapien
tttgaactcgttgtctgtgaggtgc

SEQ ID NO: 3004780 - DNA, 25 bp, Homo sapien
tgcgatcatagagcctgagggtctt

SEQ ID NO: 3004781 - DNA, 25 bp, Homo sapien
tctgagcaacggcttcaaagatact

SEQ ID NO: 3004782 - DNA, 25 bp, Homo sapien
ggagtccagctcaccttcctcgtga

SEQ ID NO: 3004783 - DNA, 25 bp, Homo sapien
tgagggcaatccaccgggaaagcct

SEQ ID NO: 3004784 - DNA, 25 bp, Homo sapien
tctggatggtgataacagggctgac

SEQ ID NO: 3004785 - DNA, 25 bp, Homo sapien
cacccttcccaaagagccgggtgcg

SEQ ID NO: 3004786 - DNA, 25 bp, Homo sapien
gtccttttggagtgggtccgcagct

SEQ ID NO: 3004787 - DNA, 25 bp, Homo sapien
ggtgtccttttggagtgggtccgca

SEQ ID NO: 3004788 - DNA, 25 bp, Homo sapien
gtgtccttttggagtgggtccgcag

SEQ ID NO: 3004789 - DNA, 25 bp, Homo sapien
tgtccttttggagtgggtccgcagc

SEQ ID NO: 3004790 - DNA, 25 bp, Homo sapien
ccttgctggatcctctgtggcccag

SEQ ID NO: 3004791 - DNA, 25 bp, Homo sapien
tgctggatcctctgtggcccagtgt

SEQ ID NO: 3004792 - DNA, 25 bp, Homo sapien
gatcctctgtggcccagtgtgcaac

SEQ ID NO: 3004793 - DNA, 25 bp, Homo sapien
tggatcctctgtggcccagtgtgca

SEQ ID NO: 3004794 - DNA, 25 bp, Homo sapien
ctgtgaagcagggtaccccaaaact

SEQ ID NO: 3004795 - DNA, 25 bp, Homo sapien
tgaggttgataaccaccgcgctgcc

SEQ ID NO: 3004796 - DNA, 25 bp, Homo sapien
tgactcccaaagtaaggactgcttg

SEQ ID NO: 3004797 - DNA, 25 bp, Homo sapien
agtgtttccaggactgaacctctca

SEQ ID NO: 3004798 - DNA, 25 bp, Homo sapien
tatataatcaggcaatctcccaagc

SEQ ID NO: 3004799 - DNA, 25 bp, Homo sapien
cacaactgggccatggctgtaaacc

SEQ ID NO: 3004800 - DNA, 25 bp, Homo sapien
tgaaactccagagcacacaactggg

SEQ ID NO: 3004801 - DNA, 25 bp, Homo sapien
gctgtaaaccagctacgttctgaat

SEQ ID NO: 3004802 - DNA, 25 bp, Homo sapien
ggctgtgaacaggacggacggctgg

SEQ ID NO: 3004803 - DNA, 25 bp, Homo sapien
aggctgtgaacaggacggacggctg

SEQ ID NO: 3004804 - DNA, 25 bp, Homo sapien
gctgtgaacaggacggacggctggc

SEQ ID NO: 3004805 - DNA, 25 bp, Homo sapien
ctgtgaacaggacggacggctggct

SEQ ID NO: 3004806 - DNA, 25 bp, Homo sapien
tcagagatggaacccggacttgacc

SEQ ID NO: 3004807 - DNA, 25 bp, Homo sapien
tcaaggaccgttcacagtgcggaca

SEQ ID NO: 3004808 - DNA, 25 bp, Homo sapien
aatacttcaccgatgaggagaccga

SEQ ID NO: 3004809 - DNA, 25 bp, Homo sapien
tgcagtgtgaataagacccaggtca

SEQ ID NO: 3004810 - DNA, 25 bp, Homo sapien
ggagcctcccatgaacctttcggca

SEQ ID NO: 3004811 - DNA, 25 bp, Homo sapien
gacaaacgctgaatctatactgcac

SEQ ID NO: 3004812 - DNA, 25 bp, Homo sapien
cggcgttgccttttcctctgacggg

SEQ ID NO: 3004813 - DNA, 25 bp, Homo sapien
acctaagcccgtggtgatgcacctg

SEQ ID NO: 3004814 - DNA, 25 bp, Homo sapien
cttgaaggcggttgctactcgaagg

SEQ ID NO: 3004815 - DNA, 25 bp, Homo sapien
tgggagaagagtggtctccccgcct

SEQ ID NO: 3004816 - DNA, 25 bp, Homo sapien
caggcccacgggtgcttgtgagctt

SEQ ID NO: 3004817 - DNA, 25 bp, Homo sapien
gccctgcactagcaggagtcgctgt

SEQ ID NO: 3004818 - DNA, 25 bp, Homo sapien
acattttgctcatccattcaccagc

SEQ ID NO: 3004819 - DNA, 25 bp, Homo sapien
cattttgctcatccattcaccagct

SEQ ID NO: 3004820 - DNA, 25 bp, Homo sapien
ggggcgtgggatggatggaccacat

SEQ ID NO: 3004821 - DNA, 25 bp, Homo sapien
agtaatattccactggggcgtggga

SEQ ID NO: 3004822 - DNA, 25 bp, Homo sapien
tccagggtgagatacatacggctct

SEQ ID NO: 3004823 - DNA, 25 bp, Homo sapien
caatgcgcttcctatggcaacgggc

SEQ ID NO: 3004824 - DNA, 25 bp, Homo sapien
ctaaaactctcgacatggtggcggg

SEQ ID NO: 3004825 - DNA, 25 bp, Homo sapien
cctgccgaaggacagtgacagctct

SEQ ID NO: 3004826 - DNA, 25 bp, Homo sapien
gcgggcatgcaagacccttcacagt

SEQ ID NO: 3004827 - DNA, 25 bp, Homo sapien
ctatgaccaagttacaccaatttgt

SEQ ID NO: 3004828 - DNA, 25 bp, Homo sapien
acaggagacagtccaatcccctcag

SEQ ID NO: 3004829 - DNA, 25 bp, Homo sapien
gagaacatgaaagccacatacacat

SEQ ID NO: 3004830 - DNA, 25 bp, Homo sapien
tagatcagatcccagtacacagcag

SEQ ID NO: 3004831 - DNA, 25 bp, Homo sapien
tctagattaaatgaggcctggcatg

SEQ ID NO: 3004832 - DNA, 25 bp, Homo sapien
taaccatggatggaaacccttggag

SEQ ID NO: 3004833 - DNA, 25 bp, Homo sapien
tactactgggcgctcagaaaatgtg

SEQ ID NO: 3004834 - DNA, 25 bp, Homo sapien
ccagcatcactaccagcatcactac

SEQ ID NO: 3004835 - DNA, 25 bp, Homo sapien
cagcatcactaccagcatcactact

SEQ ID NO: 3004836 - DNA, 25 bp, Homo sapien
tttgcatcccagatggcacggcaga

SEQ ID NO: 3004837 - DNA, 25 bp, Homo sapien
gggaacacagggacggtttgcatcc

SEQ ID NO: 3004838 - DNA, 25 bp, Homo sapien
actgtgataccaggacgggcgatct

SEQ ID NO: 3004839 - DNA, 25 bp, Homo sapien
tgacgactaagtgactgaccggcgg

SEQ ID NO: 3004840 - DNA, 25 bp, Homo sapien
gatgatctacgaattctccccagag

SEQ ID NO: 3004841 - DNA, 25 bp, Homo sapien
ccatggaaagtgacaccgtggataa

SEQ ID NO: 3004842 - DNA, 25 bp, Homo sapien
caagactctggaagaatgggctttg

SEQ ID NO: 3004843 - DNA, 25 bp, Homo sapien
tcagaccgtggttgaccgcagataa

SEQ ID NO: 3004844 - DNA, 25 bp, Homo sapien
taaaattcacagcagtcgtttggcg

SEQ ID NO: 3004845 - DNA, 25 bp, Homo sapien
catttgggatctggctgacggctcc

SEQ ID NO: 3004846 - DNA, 25 bp, Homo sapien
aaagctgtccactgaacggtccagg

SEQ ID NO: 3004847 - DNA, 25 bp, Homo sapien
caaactcgtggttgccagcgtgact

SEQ ID NO: 3004848 - DNA, 25 bp, Homo sapien
ttctggttgaggtgtctccggagca

SEQ ID NO: 3004849 - DNA, 25 bp, Homo sapien
tctggttgaggtgtctccggagcat

SEQ ID NO: 3004850 - DNA, 25 bp, Homo sapien
ggttctgaacaatgcctcggcacag

SEQ ID NO: 3004851 - DNA, 25 bp, Homo sapien
tgaatcatgcgtgaatacacagtgg

SEQ ID NO: 3004852 - DNA, 25 bp, Homo sapien
gagattctggtcactgaggccagct

SEQ ID NO: 3004853 - DNA, 25 bp, Homo sapien
gaagcatggagtgcaggttctgaac

SEQ ID NO: 3004854 - DNA, 25 bp, Homo sapien
catgcacagcgccaaaaaaggttgg

SEQ ID NO: 3004855 - DNA, 25 bp, Homo sapien
tacctgaaggaaggtgcataccagc

SEQ ID NO: 3004856 - DNA, 25 bp, Homo sapien
tcctctctgggaaatacttgggcca

SEQ ID NO: 3004857 - DNA, 25 bp, Homo sapien
cgaatggaggcgaaagctgctatga

SEQ ID NO: 3004858 - DNA, 25 bp, Homo sapien
acattgcccccgttgagtgacgcgg

SEQ ID NO: 3004859 - DNA, 25 bp, Homo sapien
gtggacgaacgtggccagcacattg

SEQ ID NO: 3004860 - DNA, 25 bp, Homo sapien
cccaggtaggtcctgttgaagtatg

SEQ ID NO: 3004861 - DNA, 25 bp, Homo sapien
agctgaaccgaggtgctgatgttga

SEQ ID NO: 3004862 - DNA, 25 bp, Homo sapien
caactcgggacataaagccaaatgc

SEQ ID NO: 3004863 - DNA, 25 bp, Homo sapien
agggcaactcgggacataaagccaa

SEQ ID NO: 3004864 - DNA, 25 bp, Homo sapien
ttctctgcttgtagggcaactcggg

SEQ ID NO: 3004865 - DNA, 25 bp, Homo sapien
gcaactcgggacataaagccaaatg

SEQ ID NO: 3004866 - DNA, 25 bp, Homo sapien
tagacagaggcctgtaaatcaccca

SEQ ID NO: 3004867 - DNA, 25 bp, Homo sapien
caaaccacatgtgggaagttctgcc

SEQ ID NO: 3004868 - DNA, 25 bp, Homo sapien
ccaggctcggcgatgtctgggagca

SEQ ID NO: 3004869 - DNA, 25 bp, Homo sapien
cacctgcgtcccctttgggatttca

SEQ ID NO: 3004870 - DNA, 25 bp, Homo sapien
catagtcgtggatggtaccggctgc

SEQ ID NO: 3004871 - DNA, 25 bp, Homo sapien
tggcagcattctggtcggacatcag

SEQ ID NO: 3004872 - DNA, 25 bp, Homo sapien
cgtgttgaaatagccccagctggca

SEQ ID NO: 3004873 - DNA, 25 bp, Homo sapien
taccggctgcgtcgtaggacttcag

SEQ ID NO: 3004874 - DNA, 25 bp, Homo sapien
aacaaccaacacggtataacatgaa

SEQ ID NO: 3004875 - DNA, 25 bp, Homo sapien
aaacaaccaacacggtataacatga

SEQ ID NO: 3004876 - DNA, 25 bp, Homo sapien
aaaacaaccaacacggtataacatg

SEQ ID NO: 3004877 - DNA, 25 bp, Homo sapien
aaagccagaagatggttgcacagcc

SEQ ID NO: 3004878 - DNA, 25 bp, Homo sapien
caggaattcgctgctacatcggcca

SEQ ID NO: 3004879 - DNA, 25 bp, Homo sapien
gttgcacagccgaagcccgtggcca

SEQ ID NO: 3004880 - DNA, 25 bp, Homo sapien
cacactgagatgagacttcggctgg

SEQ ID NO: 3004881 - DNA, 25 bp, Homo sapien
tgaagaaaagagcaaatgactaggc

SEQ ID NO: 3004882 - DNA, 25 bp, Homo sapien
tggaacaaaagagatgaccaaaaat

SEQ ID NO: 3004883 - DNA, 25 bp, Homo sapien
aagaaaagagcaaatgactaggcat

SEQ ID NO: 3004884 - DNA, 25 bp, Homo sapien
aacaaaagagatgaccaaaaatgaa

SEQ ID NO: 3004885 - DNA, 25 bp, Homo sapien
atgcccacgacgctccggagctggg

SEQ ID NO: 3004886 - DNA, 25 bp, Homo sapien
gcctgttttccaaaacacgactcca

SEQ ID NO: 3004887 - DNA, 25 bp, Homo sapien
agggcttggaggattctactcacat

SEQ ID NO: 3004888 - DNA, 25 bp, Homo sapien
gcagcaaggcactcgtgtagggctt

SEQ ID NO: 3004889 - DNA, 25 bp, Homo sapien
gaatcctcgcgctttagacttgcac

SEQ ID NO: 3004890 - DNA, 25 bp, Homo sapien
gagctagtttaaagagtcctcccag

SEQ ID NO: 3004891 - DNA, 25 bp, Homo sapien
cagaactgccctcgaaaaccttgta

SEQ ID NO: 3004892 - DNA, 25 bp, Homo sapien
tatcagttggtctacatccacgtcg

SEQ ID NO: 3004893 - DNA, 25 bp, Homo sapien
tatagactaactcacagcagtgctg

SEQ ID NO: 3004894 - DNA, 25 bp, Homo sapien
tgggtgagcctgtaagcacagaaca

SEQ ID NO: 3004895 - DNA, 25 bp, Homo sapien
gggttaatgactggcctccgctaag

SEQ ID NO: 3004896 - DNA, 25 bp, Homo sapien
tatagatcactggttcctactcggg

SEQ ID NO: 3004897 - DNA, 25 bp, Homo sapien
gccgcctctgcccgcgcagcacggg

SEQ ID NO: 3004898 - DNA, 25 bp, Homo sapien
accgcgctctcgaccgccgcctctg

SEQ ID NO: 3004899 - DNA, 25 bp, Homo sapien
ctggggcccggccaccgcgctctcg

SEQ ID NO: 3004900 - DNA, 25 bp, Homo sapien
cctctgcccgcgcagcacgggcaca

SEQ ID NO: 3004901 - DNA, 25 bp, Homo sapien
tgcccaggtcaatgccgagggtgat

SEQ ID NO: 3004902 - DNA, 25 bp, Homo sapien
tcgggcgcggccctcagcagagctg

SEQ ID NO: 3004903 - DNA, 25 bp, Homo sapien
gcactgcgaacccggatgggtcgtc

SEQ ID NO: 3004904 - DNA, 25 bp, Homo sapien
tgccgagggtgatcggccgcgcagc

SEQ ID NO: 3004905 - DNA, 25 bp, Homo sapien
ggccccacaagtccgcgctcttcgc

SEQ ID NO: 3004906 - DNA, 25 bp, Homo sapien
cacaagtccgcgctcttcgcccagg

SEQ ID NO: 3004907 - DNA, 25 bp, Homo sapien
ccagcggccccacaagtccgcgctc

SEQ ID NO: 3004908 - DNA, 25 bp, Homo sapien
aagtccgcgctcttcgcccaggggg

SEQ ID NO: 3004909 - DNA, 25 bp, Homo sapien
ctccttccctcagagataagccagg

SEQ ID NO: 3004910 - DNA, 25 bp, Homo sapien
tccagtaagaggacgagagccatcc

SEQ ID NO: 3004911 - DNA, 25 bp, Homo sapien
gagatcagagcttgaataacttgcc

SEQ ID NO: 3004912 - DNA, 25 bp, Homo sapien
tgcccaaggtgacatgtccagtaag

SEQ ID NO: 3004913 - DNA, 25 bp, Homo sapien
gagggcagtccatcgtgaatctcct

SEQ ID NO: 3004914 - DNA, 25 bp, Homo sapien
ctcggtctttgggacgaagctgtcc

SEQ ID NO: 3004915 - DNA, 25 bp, Homo sapien
gcgtcaagtcctgtagtctcggtct

SEQ ID NO: 3004916 - DNA, 25 bp, Homo sapien
ccctggaggattgcggcgtcaagtc

SEQ ID NO: 3004917 - DNA, 25 bp, Homo sapien
aaaggtcaccgtgtccttggagcca

SEQ ID NO: 3004918 - DNA, 25 bp, Homo sapien
cattggcaacgtgctcctggacttc

SEQ ID NO: 3004919 - DNA, 25 bp, Homo sapien
tccagtcctacaacaacggtgagtc

SEQ ID NO: 3004920 - DNA, 25 bp, Homo sapien
cagtggacgctgatcttcggagacc

SEQ ID NO: 3004921 - DNA, 25 bp, Homo sapien
tttttattgagcgcaccacatcggg

SEQ ID NO: 3004922 - DNA, 25 bp, Homo sapien
gaaaatgacaatcctgagagctgcc

SEQ ID NO: 3004923 - DNA, 25 bp, Homo sapien
gctgccctgataggtgagcctcgaa

SEQ ID NO: 3004924 - DNA, 25 bp, Homo sapien
cagccaggcaaaagcgggaaaggcc

SEQ ID NO: 3004925 - DNA, 25 bp, Homo sapien
tgggcaaagcttcgtagcgcctctg

SEQ ID NO: 3004926 - DNA, 25 bp, Homo sapien
accatggtcatgtcccagccgttca

SEQ ID NO: 3004927 - DNA, 25 bp, Homo sapien
tcctccgagcgcttggtgagccgct

SEQ ID NO: 3004928 - DNA, 25 bp, Homo sapien
ccgcttgcgggcctggtcgtgtgtg

SEQ ID NO: 3004929 - DNA, 25 bp, Homo sapien
tccgagcgcttggtgagccgcttgc

SEQ ID NO: 3004930 - DNA, 25 bp, Homo sapien
gaaagccagcgtcctctggggcaat

SEQ ID NO: 3004931 - DNA, 25 bp, Homo sapien
tgcagtgagtctctcccagctggga

SEQ ID NO: 3004932 - DNA, 25 bp, Homo sapien
gtcattcaagtaggcccccagccta

SEQ ID NO: 3004933 - DNA, 25 bp, Homo sapien
ggggcaatgccagtatgggttccca

SEQ ID NO: 3004934 - DNA, 25 bp, Homo sapien
ttctcctcctttgggacacctgtta

SEQ ID NO: 3004935 - DNA, 25 bp, Homo sapien
tgtttctcctcctttgggacacctg

SEQ ID NO: 3004936 - DNA, 25 bp, Homo sapien
tctcctcctttgggacacctgttac

SEQ ID NO: 3004937 - DNA, 25 bp, Homo sapien
ctccttcagacacccgtgtgacata

SEQ ID NO: 3004938 - DNA, 25 bp, Homo sapien
agcccagcgatttcagcagggcctc

SEQ ID NO: 3004939 - DNA, 25 bp, Homo sapien
atctgcagcccagcgatttcagcag

SEQ ID NO: 3004940 - DNA, 25 bp, Homo sapien
cagacacccgtgtgacataaatacc

SEQ ID NO: 3004941 - DNA, 25 bp, Homo sapien
ggtcacttccgatgccttcttagag

SEQ ID NO: 3004942 - DNA, 25 bp, Homo sapien
tgtggtcactggactggccccttat

SEQ ID NO: 3004943 - DNA, 25 bp, Homo sapien
cagcccaagtcaagccctgtggtca

SEQ ID NO: 3004944 - DNA, 25 bp, Homo sapien
tctcccagcacatatggtcagtgag

SEQ ID NO: 3004945 - DNA, 25 bp, Homo sapien
ggatcctggtcgattccacctccaa

SEQ ID NO: 3004946 - DNA, 25 bp, Homo sapien
tgggaaggatcctggtcgattccac

SEQ ID NO: 3004947 - DNA, 25 bp, Homo sapien
gggaaggatcctggtcgattccacc

SEQ ID NO: 3004948 - DNA, 25 bp, Homo sapien
atcctggtcgattccacctccaatg

SEQ ID NO: 3004949 - DNA, 25 bp, Homo sapien
ttgacgcagcttgtgaatttcaact

SEQ ID NO: 3004950 - DNA, 25 bp, Homo sapien
ctcaccttgacgcagcttgtgaatt

SEQ ID NO: 3004951 - DNA, 25 bp, Homo sapien
aggattaagttctcaccttgacgca

SEQ ID NO: 3004952 - DNA, 25 bp, Homo sapien
caggattaagttctcaccttgacgc

SEQ ID NO: 3004953 - DNA, 25 bp, Homo sapien
gagatcaaacttgcatagaaaggag

SEQ ID NO: 3004954 - DNA, 25 bp, Homo sapien
caaacttgcatagaaaggagaggaa

SEQ ID NO: 3004955 - DNA, 25 bp, Homo sapien
tgctctggaaaagcagagatcaaac

SEQ ID NO: 3004956 - DNA, 25 bp, Homo sapien
ctggaaaagcagagatcaaacttgc

SEQ ID NO: 3004957 - DNA, 25 bp, Homo sapien
aaagcactctaagagccgagatagc

SEQ ID NO: 3004958 - DNA, 25 bp, Homo sapien
gcgtattgagcacataaagcactct

SEQ ID NO: 3004959 - DNA, 25 bp, Homo sapien
cataaagcactctaagagccgagat

SEQ ID NO: 3004960 - DNA, 25 bp, Homo sapien
cgtattgagcacataaagcactcta

SEQ ID NO: 3004961 - DNA, 25 bp, Homo sapien
tctcaggaacggagtagggtagggc

SEQ ID NO: 3004962 - DNA, 25 bp, Homo sapien
tcaggaacggagtagggtagggcat

SEQ ID NO: 3004963 - DNA, 25 bp, Homo sapien
ctcaggaacggagtagggtagggca

SEQ ID NO: 3004964 - DNA, 25 bp, Homo sapien
cacctaaaacaagccagagggcggc

SEQ ID NO: 3004965 - DNA, 25 bp, Homo sapien
tgacaccggcgtctgagtctaacgt

SEQ ID NO: 3004966 - DNA, 25 bp, Homo sapien
cccggagggtctactcaggactcaa

SEQ ID NO: 3004967 - DNA, 25 bp, Homo sapien
gaagaggaaacgctcatcgcagcta

SEQ ID NO: 3004968 - DNA, 25 bp, Homo sapien
attccagaggctgcgactcatggac

SEQ ID NO: 3004969 - DNA, 25 bp, Homo sapien
cattccagaggctgcgactcatgga

SEQ ID NO: 3004970 - DNA, 25 bp, Homo sapien
tcattccagaggctgcgactcatgg

SEQ ID NO: 3004971 - DNA, 25 bp, Homo sapien
cggccatccctgtttcgtggctggg

SEQ ID NO: 3004972 - DNA, 25 bp, Homo sapien
gttcgatgctctgtcaacctgcttg

SEQ ID NO: 3004973 - DNA, 25 bp, Homo sapien
gggtgtccgtttcccgctctgcgag

SEQ ID NO: 3004974 - DNA, 25 bp, Homo sapien
agcccttgccgccggttcgcaggag

SEQ ID NO: 3004975 - DNA, 25 bp, Homo sapien
caccacggcggtgaccggctggccc

SEQ ID NO: 3004976 - DNA, 25 bp, Homo sapien
ccggctggcccgggatgtaggacat

SEQ ID NO: 3004977 - DNA, 25 bp, Homo sapien
cggtgaccggctggcccgggatgta

SEQ ID NO: 3004978 - DNA, 25 bp, Homo sapien
cggcggtgaccggctggcccgggat

SEQ ID NO: 3004979 - DNA, 25 bp, Homo sapien
ggcccgccccctcatgaatagttaa

SEQ ID NO: 3004980 - DNA, 25 bp, Homo sapien
gtcgcgccctcgctgcttaacaaag

SEQ ID NO: 3004981 - DNA, 25 bp, Homo sapien
aagccggcagcagagtacccgcggt

SEQ ID NO: 3004982 - DNA, 25 bp, Homo sapien
tccgctttcggaagtccctgcgcgt

SEQ ID NO: 3004983 - DNA, 25 bp, Homo sapien
tctgggacccagacctgttaaattc

SEQ ID NO: 3004984 - DNA, 25 bp, Homo sapien
gaagctgaggccatagcgttgcccc

SEQ ID NO: 3004985 - DNA, 25 bp, Homo sapien
gctggaatgggaagatcaagatcac

SEQ ID NO: 3004986 - DNA, 25 bp, Homo sapien
cattcctggtgtaagggagaagcag

SEQ ID NO: 3004987 - DNA, 25 bp, Homo sapien
aatggagcccttttccggacacgca

SEQ ID NO: 3004988 - DNA, 25 bp, Homo sapien
taattctgtgtactggcctaagggc

SEQ ID NO: 3004989 - DNA, 25 bp, Homo sapien
gaatacatatcttgggcaggtccca

SEQ ID NO: 3004990 - DNA, 25 bp, Homo sapien
tctaggaactctacagggcactgcg

SEQ ID NO: 3004991 - DNA, 25 bp, Homo sapien
aaagagctacagttcatgcttcact

SEQ ID NO: 3004992 - DNA, 25 bp, Homo sapien
agttcatgcttcacttctccccatt

SEQ ID NO: 3004993 - DNA, 25 bp, Homo sapien
tgagaggctggcactctcatcttcc

SEQ ID NO: 3004994 - DNA, 25 bp, Homo sapien
taaaagccagtttccggccaggcgc

SEQ ID NO: 3004995 - DNA, 25 bp, Homo sapien
catttggtaagggttcaatgcccca

SEQ ID NO: 3004996 - DNA, 25 bp, Homo sapien
tgccccattagactggaaaccctcg

SEQ ID NO: 3004997 - DNA, 25 bp, Homo sapien
ggcttggccggccttgaagaaacaa

SEQ ID NO: 3004998 - DNA, 25 bp, Homo sapien
gggcaaccttgcagctaaagaccgt

SEQ ID NO: 3004999 - DNA, 25 bp, Homo sapien
taagcgccagcgtcaggagaagttc

SEQ ID NO: 3005000 - DNA, 25 bp, Homo sapien
taggagaagagagctagtcagctcc

SEQ ID NO: 3005001 - DNA, 25 bp, Homo sapien
catcgaaacgtacttcatgtccatt

SEQ ID NO: 3005002 - DNA, 25 bp, Homo sapien
gggagacaactcacatacaacgggg

SEQ ID NO: 3005003 - DNA, 25 bp, Homo sapien
gaagcctcttggtctctaggcagca

SEQ ID NO: 3005004 - DNA, 25 bp, Homo sapien
gacggaggttgcttttcactgacta

SEQ ID NO: 3005005 - DNA, 25 bp, Homo sapien
gttttcggcaaaatcagggagcctc

SEQ ID NO: 3005006 - DNA, 25 bp, Homo sapien
ggagcctcctgcattagtaacactg

SEQ ID NO: 3005007 - DNA, 25 bp, Homo sapien
cagggtcaaggcgactgtatctccc

SEQ ID NO: 3005008 - DNA, 25 bp, Homo sapien
ggcgactgtatctcccatctgggca

SEQ ID NO: 3005009 - DNA, 25 bp, Homo sapien
ctgggcaggtccatattccccgggc

SEQ ID NO: 3005010 - DNA, 25 bp, Homo sapien
gatctcattagcacttcaggcccag

SEQ ID NO: 3005011 - DNA, 25 bp, Homo sapien
catatgaatgagtgaaggtgcagcc

SEQ ID NO: 3005012 - DNA, 25 bp, Homo sapien
tccgagcccctctgaccattgggag

SEQ ID NO: 3005013 - DNA, 25 bp, Homo sapien
ggatttcggaaaccctgctagaggc

SEQ ID NO: 3005014 - DNA, 25 bp, Homo sapien
catcattctcggcagggatttcgga

SEQ ID NO: 3005015 - DNA, 25 bp, Homo sapien
gacactgctggtagccagcagccct

SEQ ID NO: 3005016 - DNA, 25 bp, Homo sapien
tctgcagctgctccaaattcacctg

SEQ ID NO: 3005017 - DNA, 25 bp, Homo sapien
ctggctacatctccactgtctgcag

SEQ ID NO: 3005018 - DNA, 25 bp, Homo sapien
gctgctccaaattcacctgtgcatt

SEQ ID NO: 3005019 - DNA, 25 bp, Homo sapien
cgggagccggtgggtgggccagcct

SEQ ID NO: 3005020 - DNA, 25 bp, Homo sapien
gtcgggagccggtgggtgggccagc

SEQ ID NO: 3005021 - DNA, 25 bp, Homo sapien
ctgtcgggagccggtgggtgggcca

SEQ ID NO: 3005022 - DNA, 25 bp, Homo sapien
gactgtcgggagccggtgggtgggc

SEQ ID NO: 3005023 - DNA, 25 bp, Homo sapien
cagaggcagcaacgctcctggcagc

SEQ ID NO: 3005024 - DNA, 25 bp, Homo sapien
agaggcagcaacgctcctggcagca

SEQ ID NO: 3005025 - DNA, 25 bp, Homo sapien
gtgtggtttgcaagagagtcacaga

SEQ ID NO: 3005026 - DNA, 25 bp, Homo sapien
ctggggtgtggtttgcaagagagtc

SEQ ID NO: 3005027 - DNA, 25 bp, Homo sapien
aagagagtcacagaaccccagtctg

SEQ ID NO: 3005028 - DNA, 25 bp, Homo sapien
gggtgtggtttgcaagagagtcaca

SEQ ID NO: 3005029 - DNA, 25 bp, Homo sapien
agatccgttccccttctgactgctg

SEQ ID NO: 3005030 - DNA, 25 bp, Homo sapien
tgcttccacgcttcgcctcgggtgg

SEQ ID NO: 3005031 - DNA, 25 bp, Homo sapien
cagccccgatgcctcgtcctcggcc

SEQ ID NO: 3005032 - DNA, 25 bp, Homo sapien
agctcctgctgctccggcatcccca

SEQ ID NO: 3005033 - DNA, 25 bp, Homo sapien
caccctgcgtcctccacccagcgtc

SEQ ID NO: 3005034 - DNA, 25 bp, Homo sapien
ccagcgtcctccaccctgcatcctc

SEQ ID NO: 3005035 - DNA, 25 bp, Homo sapien
ccagtgtcctccaccctgcatcctc

SEQ ID NO: 3005036 - DNA, 25 bp, Homo sapien
tgcatcctccaccctgcgtcctcca

SEQ ID NO: 3005037 - DNA, 25 bp, Homo sapien
aagccacgggggtgctccacagggc

SEQ ID NO: 3005038 - DNA, 25 bp, Homo sapien
tcgaagccacgggggtgctccacag

SEQ ID NO: 3005039 - DNA, 25 bp, Homo sapien
aaggctcgaagccacgggggtgctc

SEQ ID NO: 3005040 - DNA, 25 bp, Homo sapien
acgggggtgctccacagggctgccc

SEQ ID NO: 3005041 - DNA, 25 bp, Homo sapien
tgaggtagatgagtaccaggtcgca

SEQ ID NO: 3005042 - DNA, 25 bp, Homo sapien
tcttgtcacggtaaaactctctctt

SEQ ID NO: 3005043 - DNA, 25 bp, Homo sapien
cacttcctcgtacttcttgtcacgg

SEQ ID NO: 3005044 - DNA, 25 bp, Homo sapien
gtaccaggtcgcagaagaaagcacc

SEQ ID NO: 3005045 - DNA, 25 bp, Homo sapien
gccagtgtctgcaccgaagtacgga

SEQ ID NO: 3005046 - DNA, 25 bp, Homo sapien
cattacggagggaggaacaagcctg

SEQ ID NO: 3005047 - DNA, 25 bp, Homo sapien
ggttctaaccaacaaggacgctatg

SEQ ID NO: 3005048 - DNA, 25 bp, Homo sapien
tcatcctttaggtgaggcggaggca

SEQ ID NO: 3005049 - DNA, 25 bp, Homo sapien
tcttcctgcgccattacttccagtt

SEQ ID NO: 3005050 - DNA, 25 bp, Homo sapien
ctgcgccattacttccagttcacag

SEQ ID NO: 3005051 - DNA, 25 bp, Homo sapien
ttcctgcgccattacttccagttca

SEQ ID NO: 3005052 - DNA, 25 bp, Homo sapien
ctcttcctgcgccattacttccagt

SEQ ID NO: 3005053 - DNA, 25 bp, Homo sapien
tggaaagagactcgggctgtcactg

SEQ ID NO: 3005054 - DNA, 25 bp, Homo sapien
gactttagaagttcagggactcacc

SEQ ID NO: 3005055 - DNA, 25 bp, Homo sapien
gctgcagagctaccagcacatgcct

SEQ ID NO: 3005056 - DNA, 25 bp, Homo sapien
gggactgacctaaacccatgcacag

SEQ ID NO: 3005057 - DNA, 25 bp, Homo sapien
gatgatggtgggaatgatgctgaac

SEQ ID NO: 3005058 - DNA, 25 bp, Homo sapien
gttgatgatggtgggaatgatgctg

SEQ ID NO: 3005059 - DNA, 25 bp, Homo sapien
gatggtgggaatgatgctgaacttc

SEQ ID NO: 3005060 - DNA, 25 bp, Homo sapien
tgggaatgatgctgaacttccctgc

SEQ ID NO: 3005061 - DNA, 25 bp, Homo sapien
tgccgttcaccatcacgtcaaagcg

SEQ ID NO: 3005062 - DNA, 25 bp, Homo sapien
gctgcgtctcggtaatatctggcaa

SEQ ID NO: 3005063 - DNA, 25 bp, Homo sapien
gctttcatcagggtgcggaactcca

SEQ ID NO: 3005064 - DNA, 25 bp, Homo sapien
gcggatcccgtaggctttcatcagg

SEQ ID NO: 3005065 - DNA, 25 bp, Homo sapien
ccactgatcatggtcaggtcacaag

SEQ ID NO: 3005066 - DNA, 25 bp, Homo sapien
gtgagtgccactgatcatggtcagg

SEQ ID NO: 3005067 - DNA, 25 bp, Homo sapien
acaagtgggcacaaggcagcggtta

SEQ ID NO: 3005068 - DNA, 25 bp, Homo sapien
catggtcaggtcacaagtgggcaca

SEQ ID NO: 3005069 - DNA, 25 bp, Homo sapien
ctgaagttgtacccggaggagacag

SEQ ID NO: 3005070 - DNA, 25 bp, Homo sapien
ctttgaaagtttattgtccagacgg

SEQ ID NO: 3005071 - DNA, 25 bp, Homo sapien
agttgtacccggaggagacagactt

SEQ ID NO: 3005072 - DNA, 25 bp, Homo sapien
cccggaggagacagactttgaaagt

SEQ ID NO: 3005073 - DNA, 25 bp, Homo sapien
ggcagctttatcaagatcacagttc

SEQ ID NO: 3005074 - DNA, 25 bp, Homo sapien
gcagctttatcaagatcacagttcc

SEQ ID NO: 3005075 - DNA, 25 bp, Homo sapien
cagctttatcaagatcacagttcca

SEQ ID NO: 3005076 - DNA, 25 bp, Homo sapien
aggcagctttatcaagatcacagtt

SEQ ID NO: 3005077 - DNA, 25 bp, Homo sapien
aaggactcagaaccgcacagcaggt

SEQ ID NO: 3005078 - DNA, 25 bp, Homo sapien
ttcaccggcactggacaataggagg

SEQ ID NO: 3005079 - DNA, 25 bp, Homo sapien
atggagcggctgagaacactgcgtc

SEQ ID NO: 3005080 - DNA, 25 bp, Homo sapien
agcacacacagctttccggagacgg

SEQ ID NO: 3005081 - DNA, 25 bp, Homo sapien
gctatatcctggaagtcgctcccgg

SEQ ID NO: 3005082 - DNA, 25 bp, Homo sapien
gatttcaggaaagatctgtccttga

SEQ ID NO: 3005083 - DNA, 25 bp, Homo sapien
tctgtccttgacgtccatcacattg

SEQ ID NO: 3005084 - DNA, 25 bp, Homo sapien
agggctatatcctggaagtcgctcc

SEQ ID NO: 3005085 - DNA, 25 bp, Homo sapien
ccgtggcccccagtagccaagccca

SEQ ID NO: 3005086 - DNA, 25 bp, Homo sapien
ggcccccagtagccaagcccacgta

SEQ ID NO: 3005087 - DNA, 25 bp, Homo sapien
gtggcccccagtagccaagcccacg

SEQ ID NO: 3005088 - DNA, 25 bp, Homo sapien
tggcccccagtagccaagcccacgt

SEQ ID NO: 3005089 - DNA, 25 bp, Homo sapien
ttcggcctccttcaggaatggctcc

SEQ ID NO: 3005090 - DNA, 25 bp, Homo sapien
gaaacggatgtggttctttatgaaa

SEQ ID NO: 3005091 - DNA, 25 bp, Homo sapien
tctttatgaaaatggtgaagtcttc

SEQ ID NO: 3005092 - DNA, 25 bp, Homo sapien
aatggtgaagtcttcggcctccttc

SEQ ID NO: 3005093 - DNA, 25 bp, Homo sapien
ggacagttaatttgctcatgctggg

SEQ ID NO: 3005094 - DNA, 25 bp, Homo sapien
gaaaaccaacccagaacagcctgtc

SEQ ID NO: 3005095 - DNA, 25 bp, Homo sapien
aggccgtcgggcctcgctgggacag

SEQ ID NO: 3005096 - DNA, 25 bp, Homo sapien
cctctgcccaggacagttaatttgc

SEQ ID NO: 3005097 - DNA, 25 bp, Homo sapien
caacgggcaccaggcaaagatctca

SEQ ID NO: 3005098 - DNA, 25 bp, Homo sapien
gcttgtctccaacgggcaccaggca

SEQ ID NO: 3005099 - DNA, 25 bp, Homo sapien
tggagcttgtctccaacgggcacca

SEQ ID NO: 3005100 - DNA, 25 bp, Homo sapien
tctccaacgggcaccaggcaaagat

SEQ ID NO: 3005101 - DNA, 25 bp, Homo sapien
agtcgctgtccttggagcacgcgcc

SEQ ID NO: 3005102 - DNA, 25 bp, Homo sapien
agctgtaaccgcttccccagcgtgg

SEQ ID NO: 3005103 - DNA, 25 bp, Homo sapien
cacgcgccatcaggaatgccttcat

SEQ ID NO: 3005104 - DNA, 25 bp, Homo sapien
cccagcgtggcagtcgctgtccttg

SEQ ID NO: 3005105 - DNA, 25 bp, Homo sapien
cacagacgttctgccgctggttggg

SEQ ID NO: 3005106 - DNA, 25 bp, Homo sapien
ctcagcacagacgttctgccgctgg

SEQ ID NO: 3005107 - DNA, 25 bp, Homo sapien
gttgggggtcacaatcaggttggtg

SEQ ID NO: 3005108 - DNA, 25 bp, Homo sapien
agcacagacgttctgccgctggttg

SEQ ID NO: 3005109 - DNA, 25 bp, Homo sapien
gcccttgactttggtgatgacagca

SEQ ID NO: 3005110 - DNA, 25 bp, Homo sapien
tccgctgcccaagatccgaggtgtt

SEQ ID NO: 3005111 - DNA, 25 bp, Homo sapien
tggaatgacgtagtcggcgacatcc

SEQ ID NO: 3005112 - DNA, 25 bp, Homo sapien
cactctgcagggaggtgtcgacgtc

SEQ ID NO: 3005113 - DNA, 25 bp, Homo sapien
catacttctcggtcttgtagtcgaa

SEQ ID NO: 3005114 - DNA, 25 bp, Homo sapien
tagtcgaacagcgacaggcagagcc

SEQ ID NO: 3005115 - DNA, 25 bp, Homo sapien
tcttggcgatgacatacttctcggt

SEQ ID NO: 3005116 - DNA, 25 bp, Homo sapien
cttcttgttcttggcgatgacatac

SEQ ID NO: 3005117 - DNA, 25 bp, Homo sapien
tcatggggagcactcggtccctcgg

SEQ ID NO: 3005118 - DNA, 25 bp, Homo sapien
ggcggccttttattgacgcggttga

SEQ ID NO: 3005119 - DNA, 25 bp, Homo sapien
gaccttgccgctacctcttcttcct

SEQ ID NO: 3005120 - DNA, 25 bp, Homo sapien
accggaacctcagaccgcgaccttg

SEQ ID NO: 3005121 - DNA, 25 bp, Homo sapien
acattgggactatatgcgtgagcca

SEQ ID NO: 3005122 - DNA, 25 bp, Homo sapien
ggatccacactaccttgataagctg

SEQ ID NO: 3005123 - DNA, 25 bp, Homo sapien
cttgctcctaagacttgccagcatt

SEQ ID NO: 3005124 - DNA, 25 bp, Homo sapien
cctaagacttgccagcattttaaag

SEQ ID NO: 3005125 - DNA, 25 bp, Homo sapien
tgtgtgaactttctcacacgcatcc

SEQ ID NO: 3005126 - DNA, 25 bp, Homo sapien
gtgaactttctcacacgcatccgct

SEQ ID NO: 3005127 - DNA, 25 bp, Homo sapien
cacacgcatccgctcctctccactc

SEQ ID NO: 3005128 - DNA, 25 bp, Homo sapien
acacgcatccgctcctctccactcc

SEQ ID NO: 3005129 - DNA, 25 bp, Homo sapien
tcttcatggcttcgagggtcagctt

SEQ ID NO: 3005130 - DNA, 25 bp, Homo sapien
tgtccacacgataggatctgtacca

SEQ ID NO: 3005131 - DNA, 25 bp, Homo sapien
gtaccatttagagaattcattgctt

SEQ ID NO: 3005132 - DNA, 25 bp, Homo sapien
ggtcagcttacaggtgtctctctcc

SEQ ID NO: 3005133 - DNA, 25 bp, Homo sapien
acacacactgatctcataattagca

SEQ ID NO: 3005134 - DNA, 25 bp, Homo sapien
gggtgcggctcccacatcaccacca

SEQ ID NO: 3005135 - DNA, 25 bp, Homo sapien
gcagcccattgacaaagtgtaacca

SEQ ID NO: 3005136 - DNA, 25 bp, Homo sapien
ctgagtgcagcccattgacaaagtg

SEQ ID NO: 3005137 - DNA, 25 bp, Homo sapien
catgtactttacaaaatttgctccc

SEQ ID NO: 3005138 - DNA, 25 bp, Homo sapien
ctattactcatgtactttacaaaat

SEQ ID NO: 3005139 - DNA, 25 bp, Homo sapien
ttactcatgtactttacaaaatttg

SEQ ID NO: 3005140 - DNA, 25 bp, Homo sapien
ctcatgtactttacaaaatttgctc

SEQ ID NO: 3005141 - DNA, 25 bp, Homo sapien
tcaagtgaccgatagcacagacgga

SEQ ID NO: 3005142 - DNA, 25 bp, Homo sapien
gatggtgcccaacagcctagtgatg

SEQ ID NO: 3005143 - DNA, 25 bp, Homo sapien
caatatcatcaagtgaccgatagca

SEQ ID NO: 3005144 - DNA, 25 bp, Homo sapien
gacggatttctgaacgaaatgaaga

SEQ ID NO: 3005145 - DNA, 25 bp, Homo sapien
tgtatttccagattaaaggcactac

SEQ ID NO: 3005146 - DNA, 25 bp, Homo sapien
gcaaaatgtactgcaaatcctaagt

SEQ ID NO: 3005147 - DNA, 25 bp, Homo sapien
ctgtatttccagattaaaggcacta

SEQ ID NO: 3005148 - DNA, 25 bp, Homo sapien
tgaaaacttgccctatcaggcaaaa

SEQ ID NO: 3005149 - DNA, 25 bp, Homo sapien
gcacagacacttttgggacaatgta

SEQ ID NO: 3005150 - DNA, 25 bp, Homo sapien
gatagcctctcccagtggatagcag

SEQ ID NO: 3005151 - DNA, 25 bp, Homo sapien
ccatgctgctctagatcatcctgaa

SEQ ID NO: 3005152 - DNA, 25 bp, Homo sapien
aaaggatgctgggtctccaagtccc

SEQ ID NO: 3005153 - DNA, 25 bp, Homo sapien
tttcagctgggccttcctgatgctc

SEQ ID NO: 3005154 - DNA, 25 bp, Homo sapien
ttcagctgggccttcctgatgctct

SEQ ID NO: 3005155 - DNA, 25 bp, Homo sapien
cagaagtccaccaacgctgccttta

SEQ ID NO: 3005156 - DNA, 25 bp, Homo sapien
tgaacaggatgaccagaatcacgat

SEQ ID NO: 3005157 - DNA, 25 bp, Homo sapien
gaatcacgatcaacaccagaagtcc

SEQ ID NO: 3005158 - DNA, 25 bp, Homo sapien
ttaatgatgataggcaaagaatggt

SEQ ID NO: 3005159 - DNA, 25 bp, Homo sapien
gacagcttgaaagagggtcccacgg

SEQ ID NO: 3005160 - DNA, 25 bp, Homo sapien
gattcccaaaagtgccccaaagatg

SEQ ID NO: 3005161 - DNA, 25 bp, Homo sapien
gaggacttggcaacaacccgtgtat

SEQ ID NO: 3005162 - DNA, 25 bp, Homo sapien
tcaggaatcatcgttggtctcaggt

SEQ ID NO: 3005163 - DNA, 25 bp, Homo sapien
aacttaatagtaactcctccctgct

SEQ ID NO: 3005164 - DNA, 25 bp, Homo sapien
tccttgggcactactcagaagccag

SEQ ID NO: 3005165 - DNA, 25 bp, Homo sapien
cagattccagcctagttatttcaac

SEQ ID NO: 3005166 - DNA, 25 bp, Homo sapien
taagaagctgactcactcaaaggtc

SEQ ID NO: 3005167 - DNA, 25 bp, Homo sapien
gctcaaaggttaggcacaattttcc

SEQ ID NO: 3005168 - DNA, 25 bp, Homo sapien
agatatttcaccaaggatctgcagt

SEQ ID NO: 3005169 - DNA, 25 bp, Homo sapien
aaacatattttagacatgaactcac

SEQ ID NO: 3005170 - DNA, 25 bp, Homo sapien
aggaatgagggaaacaaaacatatt

SEQ ID NO: 3005171 - DNA, 25 bp, Homo sapien
tagaagatggggaaaggaatgaggg

SEQ ID NO: 3005172 - DNA, 25 bp, Homo sapien
acaaaacatattttagacatgaact

SEQ ID NO: 3005173 - DNA, 25 bp, Homo sapien
aggtattcctgggcttagttaatgg

SEQ ID NO: 3005174 - DNA, 25 bp, Homo sapien
aaggtattcctgggcttagttaatg

SEQ ID NO: 3005175 - DNA, 25 bp, Homo sapien
gtattcctgggcttagttaatggcc

SEQ ID NO: 3005176 - DNA, 25 bp, Homo sapien
ggtattcctgggcttagttaatggc

SEQ ID NO: 3005177 - DNA, 25 bp, Homo sapien
agttacccaaacaagacatctgcag

SEQ ID NO: 3005178 - DNA, 25 bp, Homo sapien
cataaagttacccaaacaagacatc

SEQ ID NO: 3005179 - DNA, 25 bp, Homo sapien
tacccaaacaagacatctgcagtta

SEQ ID NO: 3005180 - DNA, 25 bp, Homo sapien
tacataaagttacccaaacaagaca

SEQ ID NO: 3005181 - DNA, 25 bp, Homo sapien
ttactcgggccggaatggagtggct

SEQ ID NO: 3005182 - DNA, 25 bp, Homo sapien
cactctgttactcgggccggaatgg

SEQ ID NO: 3005183 - DNA, 25 bp, Homo sapien
tcgggccggaatggagtggctcaat

SEQ ID NO: 3005184 - DNA, 25 bp, Homo sapien
ctcactctgttactcgggccggaat

SEQ ID NO: 3005185 - DNA, 25 bp, Homo sapien
cttcagttgagacctcacaaatgtc

SEQ ID NO: 3005186 - DNA, 25 bp, Homo sapien
tgctacttcttcagttgagacctca

SEQ ID NO: 3005187 - DNA, 25 bp, Homo sapien
gatcacttgatcactagttcccact

SEQ ID NO: 3005188 - DNA, 25 bp, Homo sapien
aacattaaacttgatcacttgatca

SEQ ID NO: 3005189 - DNA, 25 bp, Homo sapien
gaagagcagtgtcaagcaaaggaac

SEQ ID NO: 3005190 - DNA, 25 bp, Homo sapien
cagaataatgctgtactggcgagct

SEQ ID NO: 3005191 - DNA, 25 bp, Homo sapien
tagaagaataggacagaataacccg

SEQ ID NO: 3005192 - DNA, 25 bp, Homo sapien
taagaagaaaccacctacgtcagga

SEQ ID NO: 3005193 - DNA, 25 bp, Homo sapien
cagagtgatcccaggagatctctgc

SEQ ID NO: 3005194 - DNA, 25 bp, Homo sapien
ctttatctgaagcgatgacacagct

SEQ ID NO: 3005195 - DNA, 25 bp, Homo sapien
tttatctgaagcgatgacacagctc

SEQ ID NO: 3005196 - DNA, 25 bp, Homo sapien
gcacaagcgcgctcctgactccagg

SEQ ID NO: 3005197 - DNA, 25 bp, Homo sapien
actgtacgcacaagcgcgctcctga

SEQ ID NO: 3005198 - DNA, 25 bp, Homo sapien
cgaactgtacgcacaagcgcgctcc

SEQ ID NO: 3005199 - DNA, 25 bp, Homo sapien
ctgaaccgaactgtacgcacaagcg

SEQ ID NO: 3005200 - DNA, 25 bp, Homo sapien
gaccgcgacgcgctgaacaaaccaa

SEQ ID NO: 3005201 - DNA, 25 bp, Homo sapien
gcgctgaacaaaccaagccgccagt

SEQ ID NO: 3005202 - DNA, 25 bp, Homo sapien
gcgacgcgctgaacaaaccaagccg

SEQ ID NO: 3005203 - DNA, 25 bp, Homo sapien
tgaacaaaccaagccgccagttttc

SEQ ID NO: 3005204 - DNA, 25 bp, Homo sapien
ggcatcagtgcctccctgttcagct

SEQ ID NO: 3005205 - DNA, 25 bp, Homo sapien
ccaacgccaagggacagtgtcatct

SEQ ID NO: 3005206 - DNA, 25 bp, Homo sapien
tttggccttatgaactcaggaaccc

SEQ ID NO: 3005207 - DNA, 25 bp, Homo sapien
ctgaggattctgagtttcgggcaga

SEQ ID NO: 3005208 - DNA, 25 bp, Homo sapien
gagctgagtgattgagagtccttct

SEQ ID NO: 3005209 - DNA, 25 bp, Homo sapien
aaactgacaggttgctttaagagct

SEQ ID NO: 3005210 - DNA, 25 bp, Homo sapien
ttcctcaaagggaggaaaactgaca

SEQ ID NO: 3005211 - DNA, 25 bp, Homo sapien
caggttgctttaagagctgagtgat

SEQ ID NO: 3005212 - DNA, 25 bp, Homo sapien
tgactgataaagaactgcctttaaa

SEQ ID NO: 3005213 - DNA, 25 bp, Homo sapien
tgtgactgataaagaactgccttta

SEQ ID NO: 3005214 - DNA, 25 bp, Homo sapien
gtgactgataaagaactgcctttaa

SEQ ID NO: 3005215 - DNA, 25 bp, Homo sapien
agcttcttcactgctacaacctgga

SEQ ID NO: 3005216 - DNA, 25 bp, Homo sapien
ctcgtaatttggttgggacgcaaat

SEQ ID NO: 3005217 - DNA, 25 bp, Homo sapien
gcaaatttgcaactggtattctgct

SEQ ID NO: 3005218 - DNA, 25 bp, Homo sapien
tctgctccaaagaggttctccccat

SEQ ID NO: 3005219 - DNA, 25 bp, Homo sapien
agctggtattgctttgccatctaca

SEQ ID NO: 3005220 - DNA, 25 bp, Homo sapien
gctttgccatctacagctttacaat

SEQ ID NO: 3005221 - DNA, 25 bp, Homo sapien
tggtattgctttgccatctacagct

SEQ ID NO: 3005222 - DNA, 25 bp, Homo sapien
tattgctttgccatctacagcttta

SEQ ID NO: 3005223 - DNA, 25 bp, Homo sapien
ctgtgttcacgtacattatggatgg

SEQ ID NO: 3005224 - DNA, 25 bp, Homo sapien
cctggcctgtgttcacgtacattat

SEQ ID NO: 3005225 - DNA, 25 bp, Homo sapien
ggcctgtgttcacgtacattatgga

SEQ ID NO: 3005226 - DNA, 25 bp, Homo sapien
tggcctgtgttcacgtacattatgg

SEQ ID NO: 3005227 - DNA, 25 bp, Homo sapien
tctcgttggccaaagaccgtctttc

SEQ ID NO: 3005228 - DNA, 25 bp, Homo sapien
ggccaaagaccgtctttcattggaa

SEQ ID NO: 3005229 - DNA, 25 bp, Homo sapien
gcctgaattgaagggtgtgggtctc

SEQ ID NO: 3005230 - DNA, 25 bp, Homo sapien
attgaagggtgtgggtctcgttggc

SEQ ID NO: 3005231 - DNA, 25 bp, Homo sapien
cacagtgatgtctgctgtcctgttt

SEQ ID NO: 3005232 - DNA, 25 bp, Homo sapien
tgtcctgtttggaaaggcattctcc

SEQ ID NO: 3005233 - DNA, 25 bp, Homo sapien
aaaggcattctcctctagctgccaa

SEQ ID NO: 3005234 - DNA, 25 bp, Homo sapien
gcattctcctctagctgccaaacga

SEQ ID NO: 3005235 - DNA, 25 bp, Homo sapien
aggacagaagcaaccggctgagggt

SEQ ID NO: 3005236 - DNA, 25 bp, Homo sapien
cggggtgaccaatcctgcagttcat

SEQ ID NO: 3005237 - DNA, 25 bp, Homo sapien
tcacactgaatgtttggagagggag

SEQ ID NO: 3005238 - DNA, 25 bp, Homo sapien
cggctgagggtcatcacactgaatg

SEQ ID NO: 3005239 - DNA, 25 bp, Homo sapien
ctgtttccacagccaccgtcacagt

SEQ ID NO: 3005240 - DNA, 25 bp, Homo sapien
gtttccacagccaccgtcacagtca

SEQ ID NO: 3005241 - DNA, 25 bp, Homo sapien
tttccacagccaccgtcacagtcac

SEQ ID NO: 3005242 - DNA, 25 bp, Homo sapien
tgtttccacagccaccgtcacagtc

SEQ ID NO: 3005243 - DNA, 25 bp, Homo sapien
agctcctttgtgagacccaccacca

SEQ ID NO: 3005244 - DNA, 25 bp, Homo sapien
cggagttagttaggttaatgttcag

SEQ ID NO: 3005245 - DNA, 25 bp, Homo sapien
tttctggggtaattcaaggccatgc

SEQ ID NO: 3005246 - DNA, 25 bp, Homo sapien
tcaaggccatgcttgtcatgtagga

SEQ ID NO: 3005247 - DNA, 25 bp, Homo sapien
tctcagctaagcagcaagaaggatc

SEQ ID NO: 3005248 - DNA, 25 bp, Homo sapien
ctcttctcagctaagcagcaagaag

SEQ ID NO: 3005249 - DNA, 25 bp, Homo sapien
ttctcagctaagcagcaagaaggat

SEQ ID NO: 3005250 - DNA, 25 bp, Homo sapien
tcttctcagctaagcagcaagaagg

SEQ ID NO: 3005251 - DNA, 25 bp, Homo sapien
ggccaactgtaattctgcgacacaa

SEQ ID NO: 3005252 - DNA, 25 bp, Homo sapien
aattctgcgacacaaaacagcttat

SEQ ID NO: 3005253 - DNA, 25 bp, Homo sapien
caactgtaattctgcgacacaaaac

SEQ ID NO: 3005254 - DNA, 25 bp, Homo sapien
tgtaattctgcgacacaaaacagct

SEQ ID NO: 3005255 - DNA, 25 bp, Homo sapien
ctgtctgcaggtctgttcccacggc

SEQ ID NO: 3005256 - DNA, 25 bp, Homo sapien
cagctgtctgcaggtctgttcccac

SEQ ID NO: 3005257 - DNA, 25 bp, Homo sapien
tcggcagctgtctgcaggtctgttc

SEQ ID NO: 3005258 - DNA, 25 bp, Homo sapien
ctcggcagctgtctgcaggtctgtt

SEQ ID NO: 3005259 - DNA, 25 bp, Homo sapien
tggtagctgactttgacactggcat

SEQ ID NO: 3005260 - DNA, 25 bp, Homo sapien
gggatggtccgtctgtccctcaggg

SEQ ID NO: 3005261 - DNA, 25 bp, Homo sapien
ctggcattggagaagcagtcctcct

SEQ ID NO: 3005262 - DNA, 25 bp, Homo sapien
tggagctggtagctgactttgacac

SEQ ID NO: 3005263 - DNA, 25 bp, Homo sapien
aggcagcccagacagcttcttacgt

SEQ ID NO: 3005264 - DNA, 25 bp, Homo sapien
cttcttacgtctgaacactgcagcc

SEQ ID NO: 3005265 - DNA, 25 bp, Homo sapien
tacgtctgaacactgcagccgtctc

SEQ ID NO: 3005266 - DNA, 25 bp, Homo sapien
aaagctgggatccgctgctccactc

SEQ ID NO: 3005267 - DNA, 25 bp, Homo sapien
ttcaaaacataaacggacattcacg

SEQ ID NO: 3005268 - DNA, 25 bp, Homo sapien
acgacgccgttgaagccgatgggca

SEQ ID NO: 3005269 - DNA, 25 bp, Homo sapien
tgaaggccatggagaccttcaggcg

SEQ ID NO: 3005270 - DNA, 25 bp, Homo sapien
cttcaggcgaaccacaggccgggag

SEQ ID NO: 3005271 - DNA, 25 bp, Homo sapien
atcaaagccaccagccatggacatg

SEQ ID NO: 3005272 - DNA, 25 bp, Homo sapien
agagtgcccacggtgatgtcggcaa

SEQ ID NO: 3005273 - DNA, 25 bp, Homo sapien
aaggccgtcgccactaatatcaaag

SEQ ID NO: 3005274 - DNA, 25 bp, Homo sapien
catggacatgccgaagtactggagt

SEQ ID NO: 3005275 - DNA, 25 bp, Homo sapien
cacttaggactgaagccgacttggg

SEQ ID NO: 3005276 - DNA, 25 bp, Homo sapien
gggcttgggtcatcatatctgagag

SEQ ID NO: 3005277 - DNA, 25 bp, Homo sapien
cagcacttaggactgaagccgactt

SEQ ID NO: 3005278 - DNA, 25 bp, Homo sapien
ggtcatcatatctgagagaggtcag

SEQ ID NO: 3005279 - DNA, 25 bp, Homo sapien
tggcaaagccaaagcgggcattggt

SEQ ID NO: 3005280 - DNA, 25 bp, Homo sapien
ggccacatctgtgagcttatcctga

SEQ ID NO: 3005281 - DNA, 25 bp, Homo sapien
cactcagtatgcgtgccaaggagaa

SEQ ID NO: 3005282 - DNA, 25 bp, Homo sapien
ccaaagcgggcattggtgaacccgg

SEQ ID NO: 3005283 - DNA, 25 bp, Homo sapien
aagtccgtgcttccatccatgtcaa

SEQ ID NO: 3005284 - DNA, 25 bp, Homo sapien
tccatgaacgtggtaaaatggagca

SEQ ID NO: 3005285 - DNA, 25 bp, Homo sapien
cagctcagagccaaaataggacccc

SEQ ID NO: 3005286 - DNA, 25 bp, Homo sapien
tgctcgctgagacggtacacgtaga

SEQ ID NO: 3005287 - DNA, 25 bp, Homo sapien
aaacacggccccatgatgtttgtac

SEQ ID NO: 3005288 - DNA, 25 bp, Homo sapien
tttgtaccgtggagcccccgcgatg

SEQ ID NO: 3005289 - DNA, 25 bp, Homo sapien
ggagctcaaacacggccccatgatg

SEQ ID NO: 3005290 - DNA, 25 bp, Homo sapien
ccccgcgatgtaggagaggctgcag

SEQ ID NO: 3005291 - DNA, 25 bp, Homo sapien
gtgtggctgtgaacacaccgtgtgc

SEQ ID NO: 3005292 - DNA, 25 bp, Homo sapien
gctgtgaacacaccgtgtgctccca

SEQ ID NO: 3005293 - DNA, 25 bp, Homo sapien
gtggctgtgaacacaccgtgtgctc

SEQ ID NO: 3005294 - DNA, 25 bp, Homo sapien
ggtggtgtggctgtgaacacaccgt

SEQ ID NO: 3005295 - DNA, 25 bp, Homo sapien
gctgcgtgtgtcgtagagcaacgcc

SEQ ID NO: 3005296 - DNA, 25 bp, Homo sapien
cccggcggctgcgtgtgtcgtagag

SEQ ID NO: 3005297 - DNA, 25 bp, Homo sapien
cgacggcgccgagcagcacctgccg

SEQ ID NO: 3005298 - DNA, 25 bp, Homo sapien
tgtcgtagagcaacgcccctccgga

SEQ ID NO: 3005299 - DNA, 25 bp, Homo sapien
tagtgaagggcgtctccaaccgtgc

SEQ ID NO: 3005300 - DNA, 25 bp, Homo sapien
cactgaagccaatctgtgccagctg

SEQ ID NO: 3005301 - DNA, 25 bp, Homo sapien
gagcactgaagccaatctgtgccag

SEQ ID NO: 3005302 - DNA, 25 bp, Homo sapien
agctggtagtgaagggcgtctccaa

SEQ ID NO: 3005303 - DNA, 25 bp, Homo sapien
gatgttgtaccgcagtttgctcagc

SEQ ID NO: 3005304 - DNA, 25 bp, Homo sapien
gaaagcatgggtctcatccgggtct

SEQ ID NO: 3005305 - DNA, 25 bp, Homo sapien
ccatccagcgccatgtagttggtca

SEQ ID NO: 3005306 - DNA, 25 bp, Homo sapien
atccgggtctgaggcgatcaggttc

SEQ ID NO: 3005307 - DNA, 25 bp, Homo sapien
gagttgatgactgtcgtaaggttga

SEQ ID NO: 3005308 - DNA, 25 bp, Homo sapien
gggtcctcgaatatgccaccatcgg

SEQ ID NO: 3005309 - DNA, 25 bp, Homo sapien
gcaccaccatgaccttggatgcctt

SEQ ID NO: 3005310 - DNA, 25 bp, Homo sapien
gcaaagcgctcaacaccctgcattt

SEQ ID NO: 3005311 - DNA, 25 bp, Homo sapien
ggtgacactccccacttgagtgatg

SEQ ID NO: 3005312 - DNA, 25 bp, Homo sapien
tcaaactcagtctggatcactcctc

SEQ ID NO: 3005313 - DNA, 25 bp, Homo sapien
catcctggctgtcccgaaggtcaaa

SEQ ID NO: 3005314 - DNA, 25 bp, Homo sapien
tgttctggactctggcgagggaggc

SEQ ID NO: 3005315 - DNA, 25 bp, Homo sapien
gcttcctgagccatccaggatgatg

SEQ ID NO: 3005316 - DNA, 25 bp, Homo sapien
tcctgagccatccaggatgatggca

SEQ ID NO: 3005317 - DNA, 25 bp, Homo sapien
cttcctgagccatccaggatgatgg

SEQ ID NO: 3005318 - DNA, 25 bp, Homo sapien
ttcctgagccatccaggatgatggc

SEQ ID NO: 3005319 - DNA, 25 bp, Homo sapien
ggctgtgttcacatcgtcttctcca

SEQ ID NO: 3005320 - DNA, 25 bp, Homo sapien
gctgtgttcacatcgtcttctccac

SEQ ID NO: 3005321 - DNA, 25 bp, Homo sapien
ctggctgtgttcacatcgtcttctc

SEQ ID NO: 3005322 - DNA, 25 bp, Homo sapien
tggctgtgttcacatcgtcttctcc

SEQ ID NO: 3005323 - DNA, 25 bp, Homo sapien
ttgctgtagcagtctccagtgtcca

SEQ ID NO: 3005324 - DNA, 25 bp, Homo sapien
ctccagtgtccacacgtgcatctgg

SEQ ID NO: 3005325 - DNA, 25 bp, Homo sapien
cgtgcatctggatccaggagatttt

SEQ ID NO: 3005326 - DNA, 25 bp, Homo sapien
acacgtgcatctggatccaggagat

SEQ ID NO: 3005327 - DNA, 25 bp, Homo sapien
ctacaggtgcctgtgagttctgagc

SEQ ID NO: 3005328 - DNA, 25 bp, Homo sapien
gctacaggtgcctgtgagttctgag

SEQ ID NO: 3005329 - DNA, 25 bp, Homo sapien
caaggtcgaagaagttggcctgagc

SEQ ID NO: 3005330 - DNA, 25 bp, Homo sapien
gccggaccagcacttgaatgcatat

SEQ ID NO: 3005331 - DNA, 25 bp, Homo sapien
aggccgccggaccagcacttgaatg

SEQ ID NO: 3005332 - DNA, 25 bp, Homo sapien
gtgaggccgccggaccagcacttga

SEQ ID NO: 3005333 - DNA, 25 bp, Homo sapien
gccgccggaccagcacttgaatgca

SEQ ID NO: 3005334 - DNA, 25 bp, Homo sapien
gtgtaggagtcagtgttggcatcaa

SEQ ID NO: 3005335 - DNA, 25 bp, Homo sapien
tgttggcatcaaggccgaggccgac

SEQ ID NO: 3005336 - DNA, 25 bp, Homo sapien
ccgaggccgacacctgcaggagtgt

SEQ ID NO: 3005337 - DNA, 25 bp, Homo sapien
aaggccgaggccgacacctgcagga

SEQ ID NO: 3005338 - DNA, 25 bp, Homo sapien
caccgtggtggctccggacaacggt

SEQ ID NO: 3005339 - DNA, 25 bp, Homo sapien
ggtggctccggacaacggtcactcc

SEQ ID NO: 3005340 - DNA, 25 bp, Homo sapien
caaaacaccgtggtggctccggaca

SEQ ID NO: 3005341 - DNA, 25 bp, Homo sapien
gtggtggctccggacaacggtcact

SEQ ID NO: 3005342 - DNA, 25 bp, Homo sapien
ctgaaaaagttaagcccaggtgagg

SEQ ID NO: 3005343 - DNA, 25 bp, Homo sapien
tgaaaaagttaagcccaggtgagga

SEQ ID NO: 3005344 - DNA, 25 bp, Homo sapien
tcatcctggacaagggaacatcgat

SEQ ID NO: 3005345 - DNA, 25 bp, Homo sapien
aggatttcatcctggacaagggaac

SEQ ID NO: 3005346 - DNA, 25 bp, Homo sapien
cctggacaagggaacatcgatggag

SEQ ID NO: 3005347 - DNA, 25 bp, Homo sapien
tttcatcctggacaagggaacatcg

SEQ ID NO: 3005348 - DNA, 25 bp, Homo sapien
cacacgtcattctcaagcaggagca

SEQ ID NO: 3005349 - DNA, 25 bp, Homo sapien
ttctaggcccgagttggccagccag

SEQ ID NO: 3005350 - DNA, 25 bp, Homo sapien
tgcctttttctaggcccgagttggc

SEQ ID NO: 3005351 - DNA, 25 bp, Homo sapien
ctgtggcaaccaaaacccatgatgc

SEQ ID NO: 3005352 - DNA, 25 bp, Homo sapien
gggcacctcccttgggcgtgagcca

SEQ ID NO: 3005353 - DNA, 25 bp, Homo sapien
agctgagcacgaaaggggcacctcc

SEQ ID NO: 3005354 - DNA, 25 bp, Homo sapien
atccacattgaaagcggccagcagg

SEQ ID NO: 3005355 - DNA, 25 bp, Homo sapien
cagaagggagctgagcacgaaaggg

SEQ ID NO: 3005356 - DNA, 25 bp, Homo sapien
cctacatagactctcaaaggttcca

SEQ ID NO: 3005357 - DNA, 25 bp, Homo sapien
catagactctcaaaggttccagatc

SEQ ID NO: 3005358 - DNA, 25 bp, Homo sapien
tacatagactctcaaaggttccaga

SEQ ID NO: 3005359 - DNA, 25 bp, Homo sapien
agcctacatagactctcaaaggttc

SEQ ID NO: 3005360 - DNA, 25 bp, Homo sapien
gaaggccgtactgttcccgctgctc

SEQ ID NO: 3005361 - DNA, 25 bp, Homo sapien
tcccgctgctcccccacgaatccag

SEQ ID NO: 3005362 - DNA, 25 bp, Homo sapien
gaagaaggccgtactgttcccgctg

SEQ ID NO: 3005363 - DNA, 25 bp, Homo sapien
aagaaggccgtactgttcccgctgc

SEQ ID NO: 3005364 - DNA, 25 bp, Homo sapien
tgagataaaggacgcccagtaggga

SEQ ID NO: 3005365 - DNA, 25 bp, Homo sapien
ggcccacgtcacgttgagccctgtg

SEQ ID NO: 3005366 - DNA, 25 bp, Homo sapien
tgcgagctgccaacatgttacgagg

SEQ ID NO: 3005367 - DNA, 25 bp, Homo sapien
tcagcaaactgcctagaggagaatt

SEQ ID NO: 3005368 - DNA, 25 bp, Homo sapien
attctgtcgccatcctggtcaagac

SEQ ID NO: 3005369 - DNA, 25 bp, Homo sapien
aattctgtcgccatcctggtcaaga

SEQ ID NO: 3005370 - DNA, 25 bp, Homo sapien
ggatgcccgcattcctccacttata

SEQ ID NO: 3005371 - DNA, 25 bp, Homo sapien
caccgtgggcctctcgggactggat

SEQ ID NO: 3005372 - DNA, 25 bp, Homo sapien
actggatgcccgcattcctccactt

SEQ ID NO: 3005373 - DNA, 25 bp, Homo sapien
ggccggcactcaggtccccacgttc

SEQ ID NO: 3005374 - DNA, 25 bp, Homo sapien
ggactcatggcttggcttgcccaga

SEQ ID NO: 3005375 - DNA, 25 bp, Homo sapien
ctgaccgtgctgtctcatcacaggg

SEQ ID NO: 3005376 - DNA, 25 bp, Homo sapien
gaggcttccatgggacagttaaagg

SEQ ID NO: 3005377 - DNA, 25 bp, Homo sapien
cagggggcccccgaaaggactcatg

SEQ ID NO: 3005378 - DNA, 25 bp, Homo sapien
cagagtgtggaagagccacatcctt

SEQ ID NO: 3005379 - DNA, 25 bp, Homo sapien
gagtgtggaagagccacatccttgc

SEQ ID NO: 3005380 - DNA, 25 bp, Homo sapien
agagtgtggaagagccacatccttg

SEQ ID NO: 3005381 - DNA, 25 bp, Homo sapien
gcgagtgcgacacatgggccgtggc

SEQ ID NO: 3005382 - DNA, 25 bp, Homo sapien
cgaggcgagtgcgacacatgggccg

SEQ ID NO: 3005383 - DNA, 25 bp, Homo sapien
agccgaggcgagtgcgacacatggg

SEQ ID NO: 3005384 - DNA, 25 bp, Homo sapien
gaggcgagtgcgacacatgggccgt

SEQ ID NO: 3005385 - DNA, 25 bp, Homo sapien
tgtgaatgtgttaacccagggtgga

SEQ ID NO: 3005386 - DNA, 25 bp, Homo sapien
caaggctctctaacacgagtgtctg

SEQ ID NO: 3005387 - DNA, 25 bp, Homo sapien
tctcgcattgaaaggctgcttggct

SEQ ID NO: 3005388 - DNA, 25 bp, Homo sapien
taaggttctgtgaagatccgatgac

SEQ ID NO: 3005389 - DNA, 25 bp, Homo sapien
gcctctagtcatgagacacacaggg

SEQ ID NO: 3005390 - DNA, 25 bp, Homo sapien
tgtatttatccaagcgtcactgcct

SEQ ID NO: 3005391 - DNA, 25 bp, Homo sapien
tgttgaacctcgtcccaggcaggat

SEQ ID NO: 3005392 - DNA, 25 bp, Homo sapien
cctgctagggcagggctagaaccca

SEQ ID NO: 3005393 - DNA, 25 bp, Homo sapien
ctaaaggcagcgcttgatcctggat

SEQ ID NO: 3005394 - DNA, 25 bp, Homo sapien
tgttgtacccttcaaactgctgtga

SEQ ID NO: 3005395 - DNA, 25 bp, Homo sapien
gaactacaaattagcaactcctggg

SEQ ID NO: 3005396 - DNA, 25 bp, Homo sapien
gatcctggaccagaaaaacaacggc

SEQ ID NO: 3005397 - DNA, 25 bp, Homo sapien
gttggcatcctccggcctcagatct

SEQ ID NO: 3005398 - DNA, 25 bp, Homo sapien
gcatcctccggcctcagatctgtgg

SEQ ID NO: 3005399 - DNA, 25 bp, Homo sapien
cctccggcctcagatctgtggggga

SEQ ID NO: 3005400 - DNA, 25 bp, Homo sapien
catcctccggcctcagatctgtggg

SEQ ID NO: 3005401 - DNA, 25 bp, Homo sapien
ccctgaggagaagatggccacatca

SEQ ID NO: 3005402 - DNA, 25 bp, Homo sapien
caggatcgaacactaccacaaaact

SEQ ID NO: 3005403 - DNA, 25 bp, Homo sapien
gccctgaggagaagatggccacatc

SEQ ID NO: 3005404 - DNA, 25 bp, Homo sapien
tggccacatcacaggatcgaacact

SEQ ID NO: 3005405 - DNA, 25 bp, Homo sapien
ctaagatttattttataaacatgta

SEQ ID NO: 3005406 - DNA, 25 bp, Homo sapien
tccatgagcatagacaagagggcgg

SEQ ID NO: 3005407 - DNA, 25 bp, Homo sapien
tctatcccgggacagatgaatgctt

SEQ ID NO: 3005408 - DNA, 25 bp, Homo sapien
gaagcactacttactctgggctggc

SEQ ID NO: 3005409 - DNA, 25 bp, Homo sapien
taaagcgtgtgttagcatctcaccg

SEQ ID NO: 3005410 - DNA, 25 bp, Homo sapien
ccttccttagatttctaagaggaat

SEQ ID NO: 3005411 - DNA, 25 bp, Homo sapien
actcttctgtggcagtaccatggga

SEQ ID NO: 3005412 - DNA, 25 bp, Homo sapien
ggagagagctgagactcttctgtgg

SEQ ID NO: 3005413 - DNA, 25 bp, Homo sapien
gacacatagaagtagcctataccct

SEQ ID NO: 3005414 - DNA, 25 bp, Homo sapien
taccatgggacacatagaagtagcc

SEQ ID NO: 3005415 - DNA, 25 bp, Homo sapien
catgtgaaaaggtgcccgacatcat

SEQ ID NO: 3005416 - DNA, 25 bp, Homo sapien
gatacatttagggaactggtgagca

SEQ ID NO: 3005417 - DNA, 25 bp, Homo sapien
cataacatgctatcaaaaagggtgg

SEQ ID NO: 3005418 - DNA, 25 bp, Homo sapien
gatactgccagaggatagaccttgg

SEQ ID NO: 3005419 - DNA, 25 bp, Homo sapien
cattcaggacacactcaagatgttg

SEQ ID NO: 3005420 - DNA, 25 bp, Homo sapien
tgaggacgccacaaattatcctggg

SEQ ID NO: 3005421 - DNA, 25 bp, Homo sapien
taataaggccagtaactccgagaag

SEQ ID NO: 3005422 - DNA, 25 bp, Homo sapien
gagtgtccagggtaaaatcacgccc

SEQ ID NO: 3005423 - DNA, 25 bp, Homo sapien
gagcatattctaaaccctgcagagg

SEQ ID NO: 3005424 - DNA, 25 bp, Homo sapien
ccaaaaggaaagtctgtgaaggagc

SEQ ID NO: 3005425 - DNA, 25 bp, Homo sapien
tgctgaaaggccgtggaacaaatgg

SEQ ID NO: 3005426 - DNA, 25 bp, Homo sapien
tcgctgatctgtagcaggagactgc

SEQ ID NO: 3005427 - DNA, 25 bp, Homo sapien
gccacagtgtaatcaactatcaatg

SEQ ID NO: 3005428 - DNA, 25 bp, Homo sapien
tctgcattaattcgtgccacagtgt

SEQ ID NO: 3005429 - DNA, 25 bp, Homo sapien
cattagctccgccacaagtaaagat

SEQ ID NO: 3005430 - DNA, 25 bp, Homo sapien
taaagatcgacaggatccaggctgc

SEQ ID NO: 3005431 - DNA, 25 bp, Homo sapien
agctgacagcacgtaagaggcccat

SEQ ID NO: 3005432 - DNA, 25 bp, Homo sapien
atgccatgagcaatccccgagggaa

SEQ ID NO: 3005433 - DNA, 25 bp, Homo sapien
tcttatctacctgggcggcactggt

SEQ ID NO: 3005434 - DNA, 25 bp, Homo sapien
gaggtcaggtccgtgagattcgccc

SEQ ID NO: 3005435 - DNA, 25 bp, Homo sapien
cttgggaaaagggtgctggtaacag

SEQ ID NO: 3005436 - DNA, 25 bp, Homo sapien
tcttgggaaaagggtgctggtaaca

SEQ ID NO: 3005437 - DNA, 25 bp, Homo sapien
gggccaaggcaatagtgagaagttc

SEQ ID NO: 3005438 - DNA, 25 bp, Homo sapien
ggccaaggcaatagtgagaagttca

SEQ ID NO: 3005439 - DNA, 25 bp, Homo sapien
agggccaaggcaatagtgagaagtt

SEQ ID NO: 3005440 - DNA, 25 bp, Homo sapien
aatgtcaggctttagggcagctgcc

SEQ ID NO: 3005441 - DNA, 25 bp, Homo sapien
gccccaccctgtgcaagaatgtcag

SEQ ID NO: 3005442 - DNA, 25 bp, Homo sapien
tgtctacaaaatctggagggctgcc

SEQ ID NO: 3005443 - DNA, 25 bp, Homo sapien
tctgcagcgaaagatagagatgccc

SEQ ID NO: 3005444 - DNA, 25 bp, Homo sapien
caatctggagagatggtaagttatc

SEQ ID NO: 3005445 - DNA, 25 bp, Homo sapien
agctgctttcccgactaacttcaat

SEQ ID NO: 3005446 - DNA, 25 bp, Homo sapien
tcccgactaacttcaatctggagag

SEQ ID NO: 3005447 - DNA, 25 bp, Homo sapien
ctggagagatggtaagttatctaac

SEQ ID NO: 3005448 - DNA, 25 bp, Homo sapien
cggctcttcttttggcgagactgct

SEQ ID NO: 3005449 - DNA, 25 bp, Homo sapien
ctgtgatccactttcttcgtattct

SEQ ID NO: 3005450 - DNA, 25 bp, Homo sapien
tttctttggtcttgggtgcagatcc

SEQ ID NO: 3005451 - DNA, 25 bp, Homo sapien
cttgggtgcagatcctaggcgagtc

SEQ ID NO: 3005452 - DNA, 25 bp, Homo sapien
ctgtttggatgagatggcatttcac

SEQ ID NO: 3005453 - DNA, 25 bp, Homo sapien
tggcatttcactttcgcagtcagcg

SEQ ID NO: 3005454 - DNA, 25 bp, Homo sapien
gatggcatttcactttcgcagtcag

SEQ ID NO: 3005455 - DNA, 25 bp, Homo sapien
gagatggcatttcactttcgcagtc

SEQ ID NO: 3005456 - DNA, 25 bp, Homo sapien
tgcccgcaaacggaagggtctggac

SEQ ID NO: 3005457 - DNA, 25 bp, Homo sapien
ggcaaaatctcatttcccgggccgc

SEQ ID NO: 3005458 - DNA, 25 bp, Homo sapien
gctgtgcaggaaacgccagcagtct

SEQ ID NO: 3005459 - DNA, 25 bp, Homo sapien
ggtctggacccagcacgggattctc

SEQ ID NO: 3005460 - DNA, 25 bp, Homo sapien
tgtggtctttttcctaaccgctggc

SEQ ID NO: 3005461 - DNA, 25 bp, Homo sapien
tactatcctgcctgggaacacctag

SEQ ID NO: 3005462 - DNA, 25 bp, Homo sapien
ccgagtatcggcgtagaggccttta

SEQ ID NO: 3005463 - DNA, 25 bp, Homo sapien
tcagaagagggctctctccgaacga

SEQ ID NO: 3005464 - DNA, 25 bp, Homo sapien
cagaaatcggcctgtcctcttgagt

SEQ ID NO: 3005465 - DNA, 25 bp, Homo sapien
gaaacacattcgttggtgaggccct

SEQ ID NO: 3005466 - DNA, 25 bp, Homo sapien
aagtttcagcgaacaaaaaatcctg

SEQ ID NO: 3005467 - DNA, 25 bp, Homo sapien
tggaaggcacaatctttgaacatac

SEQ ID NO: 3005468 - DNA, 25 bp, Homo sapien
tcacacatcgcatgttttactcagg

SEQ ID NO: 3005469 - DNA, 25 bp, Homo sapien
ttagtactgctgactggtggccgtg

SEQ ID NO: 3005470 - DNA, 25 bp, Homo sapien
gggagtgctgacgtttctcatctaa

SEQ ID NO: 3005471 - DNA, 25 bp, Homo sapien
gaagatacactatctgccctcatgg

SEQ ID NO: 3005472 - DNA, 25 bp, Homo sapien
gatgtcggacatctgcaaatttctc

SEQ ID NO: 3005473 - DNA, 25 bp, Homo sapien
cacttcgtcagcatacatagtcatt

SEQ ID NO: 3005474 - DNA, 25 bp, Homo sapien
gggagctcctcgtggtactctacca

SEQ ID NO: 3005475 - DNA, 25 bp, Homo sapien
ctggcactggatcgtctagacgcgc

SEQ ID NO: 3005476 - DNA, 25 bp, Homo sapien
ttctttggtgaaggcgtggaaatca

SEQ ID NO: 3005477 - DNA, 25 bp, Homo sapien
ctcttcaatgggttcctcgggaaca

SEQ ID NO: 3005478 - DNA, 25 bp, Homo sapien
ggttcctcgggaacattcactagcc

SEQ ID NO: 3005479 - DNA, 25 bp, Homo sapien
tgggttcctcgggaacattcactag

SEQ ID NO: 3005480 - DNA, 25 bp, Homo sapien
caatgggttcctcgggaacattcac

SEQ ID NO: 3005481 - DNA, 25 bp, Homo sapien
ggaagagaggatgataaagtttgga

SEQ ID NO: 3005482 - DNA, 25 bp, Homo sapien
gaagagaggatgataaagtttggaa

SEQ ID NO: 3005483 - DNA, 25 bp, Homo sapien
taaaagattgcattaagaataaaaa

SEQ ID NO: 3005484 - DNA, 25 bp, Homo sapien
gatttcaggagccaaacatgtgtct

SEQ ID NO: 3005485 - DNA, 25 bp, Homo sapien
tttcaggagccaaacatgtgtctac

SEQ ID NO: 3005486 - DNA, 25 bp, Homo sapien
atatgatttcaggagccaaacatgt

SEQ ID NO: 3005487 - DNA, 25 bp, Homo sapien
tgtcgatgtttatacgacgtcaagc

SEQ ID NO: 3005488 - DNA, 25 bp, Homo sapien
atgtttatacgacgtcaagccaacg

SEQ ID NO: 3005489 - DNA, 25 bp, Homo sapien
cagaatgtcgatgtttatacgacgt

SEQ ID NO: 3005490 - DNA, 25 bp, Homo sapien
cgatgtttatacgacgtcaagccaa

SEQ ID NO: 3005491 - DNA, 25 bp, Homo sapien
acgacgggaatgatatcttcgcttc

SEQ ID NO: 3005492 - DNA, 25 bp, Homo sapien
cgctgaatacgacgggaatgatatc

SEQ ID NO: 3005493 - DNA, 25 bp, Homo sapien
gatcacgtcccgctgaatacgacgg

SEQ ID NO: 3005494 - DNA, 25 bp, Homo sapien
tcttcttgatcacgtcccgctgaat

SEQ ID NO: 3005495 - DNA, 25 bp, Homo sapien
atgcctccataatttggattcccat

SEQ ID NO: 3005496 - DNA, 25 bp, Homo sapien
tgcctccataatttggattcccata

SEQ ID NO: 3005497 - DNA, 25 bp, Homo sapien
atactgacttcttctggctgctcca

SEQ ID NO: 3005498 - DNA, 25 bp, Homo sapien
ttcttctggctgctccaagttcctt

SEQ ID NO: 3005499 - DNA, 25 bp, Homo sapien
gtaatactgacttcttctggctgct

SEQ ID NO: 3005500 - DNA, 25 bp, Homo sapien
ctgacttcttctggctgctccaagt

SEQ ID NO: 3005501 - DNA, 25 bp, Homo sapien
atgacaatagttacctaggatttcc

SEQ ID NO: 3005502 - DNA, 25 bp, Homo sapien
tacctaggatttcctgtgagtgtaa

SEQ ID NO: 3005503 - DNA, 25 bp, Homo sapien
taggatttcctgtgagtgtaaagac

SEQ ID NO: 3005504 - DNA, 25 bp, Homo sapien
caatagttacctaggatttcctgtg

SEQ ID NO: 3005505 - DNA, 25 bp, Homo sapien
tgagtgcccactacagcaatgcagt

SEQ ID NO: 3005506 - DNA, 25 bp, Homo sapien
gctttaggtcattacaggtacccag

SEQ ID NO: 3005507 - DNA, 25 bp, Homo sapien
ttttgccaccccatgaaagatgata

SEQ ID NO: 3005508 - DNA, 25 bp, Homo sapien
tggaatcagatcagcgcaatttgcc

SEQ ID NO: 3005509 - DNA, 25 bp, Homo sapien
agaaaggtggtcagtcatcataaat

SEQ ID NO: 3005510 - DNA, 25 bp, Homo sapien
aacacaaaccagtatgtatagcccc

SEQ ID NO: 3005511 - DNA, 25 bp, Homo sapien
tccagggctgtaggtaaacgtgaca

SEQ ID NO: 3005512 - DNA, 25 bp, Homo sapien
cagttcttggacactctgactgtaa

SEQ ID NO: 3005513 - DNA, 25 bp, Homo sapien
gaatcatggagtatgtcaaaacagc

SEQ ID NO: 3005514 - DNA, 25 bp, Homo sapien
gccataaagaaagaaagtgcttaaa

SEQ ID NO: 3005515 - DNA, 25 bp, Homo sapien
gaaaagcaagatgttttgttgtgcc

SEQ ID NO: 3005516 - DNA, 25 bp, Homo sapien
aaaatactgatattaggctgggcgc

SEQ ID NO: 3005517 - DNA, 25 bp, Homo sapien
tgtaaccagccagcccaccaatttt

SEQ ID NO: 3005518 - DNA, 25 bp, Homo sapien
agtggaaaaacctagtgatgattac

SEQ ID NO: 3005519 - DNA, 25 bp, Homo sapien
aaattacaaatggaagaatagcaac

SEQ ID NO: 3005520 - DNA, 25 bp, Homo sapien
ttacaaatggaagaatagcaacttt

SEQ ID NO: 3005521 - DNA, 25 bp, Homo sapien
aataaagtgaacgtccctaggactg

SEQ ID NO: 3005522 - DNA, 25 bp, Homo sapien
gacatgacatcgcttctgtggcacg

SEQ ID NO: 3005523 - DNA, 25 bp, Homo sapien
agggcctcctgacatgatgctctgg

SEQ ID NO: 3005524 - DNA, 25 bp, Homo sapien
cctaggactgggacgagtaagtatc

SEQ ID NO: 3005525 - DNA, 25 bp, Homo sapien
acactcagtcctggatggatcctag

SEQ ID NO: 3005526 - DNA, 25 bp, Homo sapien
tcagtcctggatggatcctagacct

SEQ ID NO: 3005527 - DNA, 25 bp, Homo sapien
gtcctggatggatcctagacctggg

SEQ ID NO: 3005528 - DNA, 25 bp, Homo sapien
cactcagtcctggatggatcctaga

SEQ ID NO: 3005529 - DNA, 25 bp, Homo sapien
tcgactacggattaggtaacagtac

SEQ ID NO: 3005530 - DNA, 25 bp, Homo sapien
gaattagaaccgaatggtacactgg

SEQ ID NO: 3005531 - DNA, 25 bp, Homo sapien
ggtacactggcaatgttcaggagga

SEQ ID NO: 3005532 - DNA, 25 bp, Homo sapien
ttccaactcaggtggcaagcaatta

SEQ ID NO: 3005533 - DNA, 25 bp, Homo sapien
tagcaaatctcatgaataacctatt

SEQ ID NO: 3005534 - DNA, 25 bp, Homo sapien
tatttcctttagcaagtttgttagc

SEQ ID NO: 3005535 - DNA, 25 bp, Homo sapien
gatcgtttcttaacaaagactcctc

SEQ ID NO: 3005536 - DNA, 25 bp, Homo sapien
caagtttgttagctggacgaagatc

SEQ ID NO: 3005537 - DNA, 25 bp, Homo sapien
tgagttctcatcttcaacctctcct

SEQ ID NO: 3005538 - DNA, 25 bp, Homo sapien
ctctacatcacttgagttctcatct

SEQ ID NO: 3005539 - DNA, 25 bp, Homo sapien
tcatctgaactgtcttcctgcttgt

SEQ ID NO: 3005540 - DNA, 25 bp, Homo sapien
acatcacttgagttctcatcttcaa

SEQ ID NO: 3005541 - DNA, 25 bp, Homo sapien
ccctgcttctgatcttatcctgtgc

SEQ ID NO: 3005542 - DNA, 25 bp, Homo sapien
aggcagggagctcatattgataagt

SEQ ID NO: 3005543 - DNA, 25 bp, Homo sapien
ttctgatcttatcctgtgcaggcag

SEQ ID NO: 3005544 - DNA, 25 bp, Homo sapien
taagtgctcgtgtggctgtcatttc

SEQ ID NO: 3005545 - DNA, 25 bp, Homo sapien
tctcctggactaacagcagaagttc

SEQ ID NO: 3005546 - DNA, 25 bp, Homo sapien
ctcagctgacgtgggacactatggg

SEQ ID NO: 3005547 - DNA, 25 bp, Homo sapien
catgctgcgtttcactgctcgacaa

SEQ ID NO: 3005548 - DNA, 25 bp, Homo sapien
gcagaagttcggcataaacaagtag

SEQ ID NO: 3005549 - DNA, 25 bp, Homo sapien
gcaaatatagattgtctccagtctc

SEQ ID NO: 3005550 - DNA, 25 bp, Homo sapien
tcatctactccgcaaatatagattg

SEQ ID NO: 3005551 - DNA, 25 bp, Homo sapien
cgatgtgagctggaggatattcttt

SEQ ID NO: 3005552 - DNA, 25 bp, Homo sapien
ggaggtatcatccaaccattcgatg

SEQ ID NO: 3005553 - DNA, 25 bp, Homo sapien
tcttttagtgtgaagtgctggcagt

SEQ ID NO: 3005554 - DNA, 25 bp, Homo sapien
atcttttagtgtgaagtgctggcag

SEQ ID NO: 3005555 - DNA, 25 bp, Homo sapien
cttttagtgtgaagtgctggcagta

SEQ ID NO: 3005556 - DNA, 25 bp, Homo sapien
tctgttcactattgcactgccggtc

SEQ ID NO: 3005557 - DNA, 25 bp, Homo sapien
tatccgcatttaggcctctgttcac

SEQ ID NO: 3005558 - DNA, 25 bp, Homo sapien
tcaataaaccttatccgcatttagg

SEQ ID NO: 3005559 - DNA, 25 bp, Homo sapien
tgcactgccggtcactaataaggat

SEQ ID NO: 3005560 - DNA, 25 bp, Homo sapien
caaggaatgctctcgggaccagagg

SEQ ID NO: 3005561 - DNA, 25 bp, Homo sapien
tgtgataaagctatgacgccctcgc

SEQ ID NO: 3005562 - DNA, 25 bp, Homo sapien
gaccagaggtcgacaggtgtgataa

SEQ ID NO: 3005563 - DNA, 25 bp, Homo sapien
acgccctcgcggtagagttgtgaga

SEQ ID NO: 3005564 - DNA, 25 bp, Homo sapien
agcacaggttcgaatctcagctctg

SEQ ID NO: 3005565 - DNA, 25 bp, Homo sapien
tgctttagaaaactgcggcagatta

SEQ ID NO: 3005566 - DNA, 25 bp, Homo sapien
gctttctctgacaacaggatgttac

SEQ ID NO: 3005567 - DNA, 25 bp, Homo sapien
aagtccaactgtaagcgcaggctta

SEQ ID NO: 3005568 - DNA, 25 bp, Homo sapien
gcaagatttacttccgatcgaaaat

SEQ ID NO: 3005569 - DNA, 25 bp, Homo sapien
tcttcatcatgtctcggtccaaggc

SEQ ID NO: 3005570 - DNA, 25 bp, Homo sapien
gtccaaggctacatttctttgggca

SEQ ID NO: 3005571 - DNA, 25 bp, Homo sapien
gaagcgcttggctcgctgctctttc

SEQ ID NO: 3005572 - DNA, 25 bp, Homo sapien
gatgaagctgccagccttgttttca

SEQ ID NO: 3005573 - DNA, 25 bp, Homo sapien
ggtgacatcaattccagtgatgaag

SEQ ID NO: 3005574 - DNA, 25 bp, Homo sapien
ttggaggtgacatcaattccagtga

SEQ ID NO: 3005575 - DNA, 25 bp, Homo sapien
gctgccagccttgttttcatatctt

SEQ ID NO: 3005576 - DNA, 25 bp, Homo sapien
gtcaacaccggactccgcctcaggg

SEQ ID NO: 3005577 - DNA, 25 bp, Homo sapien
tccgccttcaccgacacccgcaggc

SEQ ID NO: 3005578 - DNA, 25 bp, Homo sapien
atgggctccggctcgccacggtcaa

SEQ ID NO: 3005579 - DNA, 25 bp, Homo sapien
acaggcacgatttccagctcgccct

SEQ ID NO: 3005580 - DNA, 25 bp, Homo sapien
ctgagggcatggagaatctcgtcct

SEQ ID NO: 3005581 - DNA, 25 bp, Homo sapien
ttaaaggagcgggagcgcctgaggg

SEQ ID NO: 3005582 - DNA, 25 bp, Homo sapien
agtgccttaggcacggtccctcttg

SEQ ID NO: 3005583 - DNA, 25 bp, Homo sapien
ccttgtgaaagctccagtgccttag

SEQ ID NO: 3005584 - DNA, 25 bp, Homo sapien
ctggtgaccatttcaatgaacccac

SEQ ID NO: 3005585 - DNA, 25 bp, Homo sapien
tctggtgaccatttcaatgaaccca

SEQ ID NO: 3005586 - DNA, 25 bp, Homo sapien
aatctggtgaccatttcaatgaacc

SEQ ID NO: 3005587 - DNA, 25 bp, Homo sapien
tcaatctggtgaccatttcaatgaa

SEQ ID NO: 3005588 - DNA, 25 bp, Homo sapien
caagcttgacaagcaggggcaggga

SEQ ID NO: 3005589 - DNA, 25 bp, Homo sapien
gcagtgtcccgccggaatggctggg

SEQ ID NO: 3005590 - DNA, 25 bp, Homo sapien
cagtgtcccgccggaatggctgggc

SEQ ID NO: 3005591 - DNA, 25 bp, Homo sapien
ttggagggcggggtcaagcttgaca

SEQ ID NO: 3005592 - DNA, 25 bp, Homo sapien
actttttaagcttcgggccacactg

SEQ ID NO: 3005593 - DNA, 25 bp, Homo sapien
tccaagggtgggtccgatcaaagtg

SEQ ID NO: 3005594 - DNA, 25 bp, Homo sapien
ccctcagtgacagggtgagcatccc

SEQ ID NO: 3005595 - DNA, 25 bp, Homo sapien
tgtaccagtgcaggacatacgagtg

SEQ ID NO: 3005596 - DNA, 25 bp, Homo sapien
agtgtccgagtcctgcgtgaccctg

SEQ ID NO: 3005597 - DNA, 25 bp, Homo sapien
gggtcaacctctatgagcattcggt

SEQ ID NO: 3005598 - DNA, 25 bp, Homo sapien
aagagctgtgtctgcacgcgctcca

SEQ ID NO: 3005599 - DNA, 25 bp, Homo sapien
ttcggtcagcaaatgccacgtcggc

SEQ ID NO: 3005600 - DNA, 25 bp, Homo sapien
ccaggttctgtgtctcgtgatccct

SEQ ID NO: 3005601 - DNA, 25 bp, Homo sapien
ggttctgtgtctcgtgatccctccg

SEQ ID NO: 3005602 - DNA, 25 bp, Homo sapien
ttctgtgtctcgtgatccctccgac

SEQ ID NO: 3005603 - DNA, 25 bp, Homo sapien
caggttctgtgtctcgtgatccctc

SEQ ID NO: 3005604 - DNA, 25 bp, Homo sapien
gtccatggccctcggtcaaagtcag

SEQ ID NO: 3005605 - DNA, 25 bp, Homo sapien
gatgtggtgcttccgcttcaggcct

SEQ ID NO: 3005606 - DNA, 25 bp, Homo sapien
ccagttatttcagcatgcgcagggc

SEQ ID NO: 3005607 - DNA, 25 bp, Homo sapien
gataacgccgaatgcgaaacacagt

SEQ ID NO: 3005608 - DNA, 25 bp, Homo sapien
tccccacagaatgggtcaggccaag

SEQ ID NO: 3005609 - DNA, 25 bp, Homo sapien
aaccagccgggtggcatttctgagg

SEQ ID NO: 3005610 - DNA, 25 bp, Homo sapien
tcgtgagatgttcccaagcagggcc

SEQ ID NO: 3005611 - DNA, 25 bp, Homo sapien
tcttccgttgtggtaagcctggcct

SEQ ID NO: 3005612 - DNA, 25 bp, Homo sapien
ggacgtgcgtgcgtggaggtcatgc

SEQ ID NO: 3005613 - DNA, 25 bp, Homo sapien
tgcgtgcgtggaggtcatgcagcac

SEQ ID NO: 3005614 - DNA, 25 bp, Homo sapien
cgtggaggtcatgcagcacgatggg

SEQ ID NO: 3005615 - DNA, 25 bp, Homo sapien
cctgcgggggcggctgttgcatgag

SEQ ID NO: 3005616 - DNA, 25 bp, Homo sapien
ctggaggcgcgggatgagtgtgctg

SEQ ID NO: 3005617 - DNA, 25 bp, Homo sapien
gggatgagtgtgctgccgggtggcc

SEQ ID NO: 3005618 - DNA, 25 bp, Homo sapien
cgcgggatgagtgtgctgccgggtg

SEQ ID NO: 3005619 - DNA, 25 bp, Homo sapien
gaggcgcgggatgagtgtgctgccg

SEQ ID NO: 3005620 - DNA, 25 bp, Homo sapien
caggatgcagcctcgtcttcctgga

SEQ ID NO: 3005621 - DNA, 25 bp, Homo sapien
tgcagcctcgtcttcctggacgccg

SEQ ID NO: 3005622 - DNA, 25 bp, Homo sapien
gatgcagcctcgtcttcctggacgc

SEQ ID NO: 3005623 - DNA, 25 bp, Homo sapien
ggatgcagcctcgtcttcctggacg

SEQ ID NO: 3005624 - DNA, 25 bp, Homo sapien
gcctgagggccttctgtgttgacct

SEQ ID NO: 3005625 - DNA, 25 bp, Homo sapien
cggcctgagggccttctgtgttgac

SEQ ID NO: 3005626 - DNA, 25 bp, Homo sapien
tgcccggcctgagggccttctgtgt

SEQ ID NO: 3005627 - DNA, 25 bp, Homo sapien
tgagggccttctgtgttgacctcag

SEQ ID NO: 3005628 - DNA, 25 bp, Homo sapien
gccttggcccaacgacagtgagagt

SEQ ID NO: 3005629 - DNA, 25 bp, Homo sapien
ctggacccagtgagagagtgacatc

SEQ ID NO: 3005630 - DNA, 25 bp, Homo sapien
acaggcgtggctcaccatagggagc

SEQ ID NO: 3005631 - DNA, 25 bp, Homo sapien
aggaagccaacatcagcctgtctgc

SEQ ID NO: 3005632 - DNA, 25 bp, Homo sapien
gttcccaaaggaacgcttcctcagc

SEQ ID NO: 3005633 - DNA, 25 bp, Homo sapien
tccctccgtgcttggggctcaaacg

SEQ ID NO: 3005634 - DNA, 25 bp, Homo sapien
ttcccaaaggaacgcttcctcagca

SEQ ID NO: 3005635 - DNA, 25 bp, Homo sapien
atggatcgctcttccctccgtgctt

SEQ ID NO: 3005636 - DNA, 25 bp, Homo sapien
cagtgcgggtcccatctcaatcagc

SEQ ID NO: 3005637 - DNA, 25 bp, Homo sapien
agcatgaaatggcagaggcaagaac

SEQ ID NO: 3005638 - DNA, 25 bp, Homo sapien
tgaaatggcagaggcaagaacacgg

SEQ ID NO: 3005639 - DNA, 25 bp, Homo sapien
tgctccgattccccgagagcagctg

SEQ ID NO: 3005640 - DNA, 25 bp, Homo sapien
ctggaatggtgaggagccggatgcc

SEQ ID NO: 3005641 - DNA, 25 bp, Homo sapien
tggaatggtgaggagccggatgcca

SEQ ID NO: 3005642 - DNA, 25 bp, Homo sapien
ccgggaccagcccatgaagggtccg

SEQ ID NO: 3005643 - DNA, 25 bp, Homo sapien
ggaccagcccatgaagggtccgcaa

SEQ ID NO: 3005644 - DNA, 25 bp, Homo sapien
cccatgaagggtccgcaaggccagg

SEQ ID NO: 3005645 - DNA, 25 bp, Homo sapien
accagcccatgaagggtccgcaagg

SEQ ID NO: 3005646 - DNA, 25 bp, Homo sapien
gggagaagcaggcgccgtctaactg

SEQ ID NO: 3005647 - DNA, 25 bp, Homo sapien
tgggggagaagcaggcgccgtctaa

SEQ ID NO: 3005648 - DNA, 25 bp, Homo sapien
gagaagcaggcgccgtctaactgat

SEQ ID NO: 3005649 - DNA, 25 bp, Homo sapien
gaagcaggcgccgtctaactgatac

SEQ ID NO: 3005650 - DNA, 25 bp, Homo sapien
caggcactgcctgattgatacgcgg

SEQ ID NO: 3005651 - DNA, 25 bp, Homo sapien
gcaggcaccgtctaactgatacaca

SEQ ID NO: 3005652 - DNA, 25 bp, Homo sapien
gcgccgtctaactgatacgtgggca

SEQ ID NO: 3005653 - DNA, 25 bp, Homo sapien
gcactgcctgattgatacgcgggcg

SEQ ID NO: 3005654 - DNA, 25 bp, Homo sapien
tgggcctccagcagaatggcggctc

SEQ ID NO: 3005655 - DNA, 25 bp, Homo sapien
tcctggtctcccgaccacaagacct

SEQ ID NO: 3005656 - DNA, 25 bp, Homo sapien
tccaggacaagggagcatctacccc

SEQ ID NO: 3005657 - DNA, 25 bp, Homo sapien
tctttaaatcagtcactctcctcac

SEQ ID NO: 3005658 - DNA, 25 bp, Homo sapien
cagtgctcctcctccgaaggaaggg

SEQ ID NO: 3005659 - DNA, 25 bp, Homo sapien
gagttcttaacctcctcctctgtca

SEQ ID NO: 3005660 - DNA, 25 bp, Homo sapien
gcagtgctcctcctccgaaggaagg

SEQ ID NO: 3005661 - DNA, 25 bp, Homo sapien
gactgagttcttaacctcctcctct

SEQ ID NO: 3005662 - DNA, 25 bp, Homo sapien
ggggagaggtcaggccattaccaga

SEQ ID NO: 3005663 - DNA, 25 bp, Homo sapien
agagggggagaggtcaggccattac

SEQ ID NO: 3005664 - DNA, 25 bp, Homo sapien
agggggagaggtcaggccattacca

SEQ ID NO: 3005665 - DNA, 25 bp, Homo sapien
gggagaggtcaggccattaccagaa

SEQ ID NO: 3005666 - DNA, 25 bp, Homo sapien
agggaaagtgactcctgttttctgt

SEQ ID NO: 3005667 - DNA, 25 bp, Homo sapien
gcaccccaattctcgtctcgggatt

SEQ ID NO: 3005668 - DNA, 25 bp, Homo sapien
cttgatgtctggcaccccaattctc

SEQ ID NO: 3005669 - DNA, 25 bp, Homo sapien
tctcgtctcgggattcttgtctaac

SEQ ID NO: 3005670 - DNA, 25 bp, Homo sapien
caattctcgtctcgggattcttgtc

SEQ ID NO: 3005671 - DNA, 25 bp, Homo sapien
aatttcacaacaagggcttggagag

SEQ ID NO: 3005672 - DNA, 25 bp, Homo sapien
agactgagttccggacagcaggcag

SEQ ID NO: 3005673 - DNA, 25 bp, Homo sapien
cttcgtccctcggatgggaagactg

SEQ ID NO: 3005674 - DNA, 25 bp, Homo sapien
ctgtccacctctcttcccgaaacct

SEQ ID NO: 3005675 - DNA, 25 bp, Homo sapien
accccaatgggtggcaaagatggtg

SEQ ID NO: 3005676 - DNA, 25 bp, Homo sapien
gagtcgctttatgggacaccagagg

SEQ ID NO: 3005677 - DNA, 25 bp, Homo sapien
cacctcgtccttttctacacccaga

SEQ ID NO: 3005678 - DNA, 25 bp, Homo sapien
agcgccacatcagctccaactctct

SEQ ID NO: 3005679 - DNA, 25 bp, Homo sapien
tccatttcactcctgaaatccactg

SEQ ID NO: 3005680 - DNA, 25 bp, Homo sapien
ttcactcctgaaatccactgctgaa

SEQ ID NO: 3005681 - DNA, 25 bp, Homo sapien
ccacggtggccgtcatgaggcgaac

SEQ ID NO: 3005682 - DNA, 25 bp, Homo sapien
cgtcatgaggcgaaccatgcatgag

SEQ ID NO: 3005683 - DNA, 25 bp, Homo sapien
cctcaggaaacaccacgggctcatt

SEQ ID NO: 3005684 - DNA, 25 bp, Homo sapien
ggatgaaatcgtcgatgaatgggca

SEQ ID NO: 3005685 - DNA, 25 bp, Homo sapien
agggccaggatgaaatcgtcgatga

SEQ ID NO: 3005686 - DNA, 25 bp, Homo sapien
cacgggctcattcttgatcttcctg

SEQ ID NO: 3005687 - DNA, 25 bp, Homo sapien
agcagtacaacgtgacgccagtggc

SEQ ID NO: 3005688 - DNA, 25 bp, Homo sapien
acaacgtgacgccagtggcccatac

SEQ ID NO: 3005689 - DNA, 25 bp, Homo sapien
acgccagtggcccatacatccaagg

SEQ ID NO: 3005690 - DNA, 25 bp, Homo sapien
gacaaagcagtacaacgtgacgcca

SEQ ID NO: 3005691 - DNA, 25 bp, Homo sapien
cctgtcacttaggagaaagcccaaa

SEQ ID NO: 3005692 - DNA, 25 bp, Homo sapien
gaggcaaatatgtcactccctagac

SEQ ID NO: 3005693 - DNA, 25 bp, Homo sapien
gggccactgcggcaagctattacgc

SEQ ID NO: 3005694 - DNA, 25 bp, Homo sapien
tggcaccctcaggttagaaactggg

SEQ ID NO: 3005695 - DNA, 25 bp, Homo sapien
gcgtcgttcccctcaaactggttgc

SEQ ID NO: 3005696 - DNA, 25 bp, Homo sapien
aactggttgctgacgccaaagtcgg

SEQ ID NO: 3005697 - DNA, 25 bp, Homo sapien
aagctctggccggaatcagaaatgg

SEQ ID NO: 3005698 - DNA, 25 bp, Homo sapien
aaagtcggcgatcttcacgtgccca

SEQ ID NO: 3005699 - DNA, 25 bp, Homo sapien
gatggcttgatgtccctgtggacga

SEQ ID NO: 3005700 - DNA, 25 bp, Homo sapien
ggatggcttgatgtccctgtggacg

SEQ ID NO: 3005701 - DNA, 25 bp, Homo sapien
cttgatgtccctgtggacgatcttc

SEQ ID NO: 3005702 - DNA, 25 bp, Homo sapien
tggcttgatgtccctgtggacgatc

SEQ ID NO: 3005703 - DNA, 25 bp, Homo sapien
ctgcagagaaggggagcttgagctg

SEQ ID NO: 3005704 - DNA, 25 bp, Homo sapien
cgtccttgcacagccagggacgccg

SEQ ID NO: 3005705 - DNA, 25 bp, Homo sapien
tgcagagaaggggagcttgagctga

SEQ ID NO: 3005706 - DNA, 25 bp, Homo sapien
tccttgcacagccagggacgccggc

SEQ ID NO: 3005707 - DNA, 25 bp, Homo sapien
caagtaccttcatctggaccaacgg

SEQ ID NO: 3005708 - DNA, 25 bp, Homo sapien
caagctgacatgactggtaaggtcc

SEQ ID NO: 3005709 - DNA, 25 bp, Homo sapien
cttgggacaagcaggatgacacagc

SEQ ID NO: 3005710 - DNA, 25 bp, Homo sapien
ttcagagagatggatggcaccccag

SEQ ID NO: 3005711 - DNA, 25 bp, Homo sapien
tgcaatgcctaccaccaacaaaatc

SEQ ID NO: 3005712 - DNA, 25 bp, Homo sapien
ggcagctaggcatcgatatatgtct

SEQ ID NO: 3005713 - DNA, 25 bp, Homo sapien
tcttggtagataactaggcagctag

SEQ ID NO: 3005714 - DNA, 25 bp, Homo sapien
gaacacagtgcaataacatgtctaa

SEQ ID NO: 3005715 - DNA, 25 bp, Homo sapien
ccttggcaggcaccacgctgtatta

SEQ ID NO: 3005716 - DNA, 25 bp, Homo sapien
ggacccgaatcataagtagcctctt

SEQ ID NO: 3005717 - DNA, 25 bp, Homo sapien
actcagagtacacgcctatgccagg

SEQ ID NO: 3005718 - DNA, 25 bp, Homo sapien
gacacgacgaaggatctggcacatg

SEQ ID NO: 3005719 - DNA, 25 bp, Homo sapien
gagctgctcagagtctgctcagcct

SEQ ID NO: 3005720 - DNA, 25 bp, Homo sapien
cgcctgccagatcccctagccccag

SEQ ID NO: 3005721 - DNA, 25 bp, Homo sapien
agtgggcaagctgccccgcactcac

SEQ ID NO: 3005722 - DNA, 25 bp, Homo sapien
gggctctgccgcctgccagatcccc

SEQ ID NO: 3005723 - DNA, 25 bp, Homo sapien
gtactcgaggcccaggatgacgtcc

SEQ ID NO: 3005724 - DNA, 25 bp, Homo sapien
gctcctccgagaagggcttgtcaca

SEQ ID NO: 3005725 - DNA, 25 bp, Homo sapien
gcaggtagaggcgagcttgctcctc

SEQ ID NO: 3005726 - DNA, 25 bp, Homo sapien
gagaagggcttgtcacagggcactt

SEQ ID NO: 3005727 - DNA, 25 bp, Homo sapien
gaataccggtaagagttgagtccca

SEQ ID NO: 3005728 - DNA, 25 bp, Homo sapien
ttcaaaccgtggatccagacccaag

SEQ ID NO: 3005729 - DNA, 25 bp, Homo sapien
agattggtctgtagggagccgccca

SEQ ID NO: 3005730 - DNA, 25 bp, Homo sapien
tgagcaagccacgtaccttctctgg

SEQ ID NO: 3005731 - DNA, 25 bp, Homo sapien
ggcaaagcagccgatgccaaggtcc

SEQ ID NO: 3005732 - DNA, 25 bp, Homo sapien
aaagacaagaaggtaaggtgtagct

SEQ ID NO: 3005733 - DNA, 25 bp, Homo sapien
aagacaagaaggtaaggtgtagctg

SEQ ID NO: 3005734 - DNA, 25 bp, Homo sapien
aaagcagccgatgccaaggtccctc

SEQ ID NO: 3005735 - DNA, 25 bp, Homo sapien
catgcaggcatactcgaggcaggga

SEQ ID NO: 3005736 - DNA, 25 bp, Homo sapien
gggaccctgggatatgagagcaaat

SEQ ID NO: 3005737 - DNA, 25 bp, Homo sapien
tcaggtgccaggtgagaaccatcag

SEQ ID NO: 3005738 - DNA, 25 bp, Homo sapien
tcatagcagacaggcaggtagggta

SEQ ID NO: 3005739 - DNA, 25 bp, Homo sapien
tgaatctaactggatattctgggcc

SEQ ID NO: 3005740 - DNA, 25 bp, Homo sapien
ggcttggcgatatttgttgaatcta

SEQ ID NO: 3005741 - DNA, 25 bp, Homo sapien
gggcttggcgatatttgttgaatct

SEQ ID NO: 3005742 - DNA, 25 bp, Homo sapien
ttgttgaatctaactggatattctg

SEQ ID NO: 3005743 - DNA, 25 bp, Homo sapien
cagggcttcagaacgtgtgtttttc

SEQ ID NO: 3005744 - DNA, 25 bp, Homo sapien
aatccagggcttcagaacgtgtgtt

SEQ ID NO: 3005745 - DNA, 25 bp, Homo sapien
tccagggcttcagaacgtgtgtttt

SEQ ID NO: 3005746 - DNA, 25 bp, Homo sapien
gggaatccagggcttcagaacgtgt

SEQ ID NO: 3005747 - DNA, 25 bp, Homo sapien
gctgtgggaatgagccaggtcactc

SEQ ID NO: 3005748 - DNA, 25 bp, Homo sapien
caggaggtcagtgcatttacaccgc

SEQ ID NO: 3005749 - DNA, 25 bp, Homo sapien
tttacaccgcccacctgaaggtcat

SEQ ID NO: 3005750 - DNA, 25 bp, Homo sapien
aaggtcatacatgtcccaagggagc

SEQ ID NO: 3005751 - DNA, 25 bp, Homo sapien
atagaggttgtcctcagctgggtca

SEQ ID NO: 3005752 - DNA, 25 bp, Homo sapien
aatagaggttgtcctcagctgggtc

SEQ ID NO: 3005753 - DNA, 25 bp, Homo sapien
ccaaatagaggttgtcctcagctgg

SEQ ID NO: 3005754 - DNA, 25 bp, Homo sapien
caaatagaggttgtcctcagctggg

SEQ ID NO: 3005755 - DNA, 25 bp, Homo sapien
tttgaccacattcacgtggtccagc

SEQ ID NO: 3005756 - DNA, 25 bp, Homo sapien
ttgaccacattcacgtggtccagct

SEQ ID NO: 3005757 - DNA, 25 bp, Homo sapien
gtttgaccacattcacgtggtccag

SEQ ID NO: 3005758 - DNA, 25 bp, Homo sapien
actgcttcagtaacttctttttgga

SEQ ID NO: 3005759 - DNA, 25 bp, Homo sapien
tctttttggaaaggactttcattgc

SEQ ID NO: 3005760 - DNA, 25 bp, Homo sapien
gaaagccatactgcttcagtaactt

SEQ ID NO: 3005761 - DNA, 25 bp, Homo sapien
gtggaaagccatactgcttcagtaa

SEQ ID NO: 3005762 - DNA, 25 bp, Homo sapien
tcactttcgttgtaggccagcctca

SEQ ID NO: 3005763 - DNA, 25 bp, Homo sapien
cttcactttcgttgtaggccagcct

SEQ ID NO: 3005764 - DNA, 25 bp, Homo sapien
actttcgttgtaggccagcctcacc

SEQ ID NO: 3005765 - DNA, 25 bp, Homo sapien
tttcgttgtaggccagcctcaccac

SEQ ID NO: 3005766 - DNA, 25 bp, Homo sapien
tgcagataggcatcagtcagcccca

SEQ ID NO: 3005767 - DNA, 25 bp, Homo sapien
gcagataggcatcagtcagccccac

SEQ ID NO: 3005768 - DNA, 25 bp, Homo sapien
ctgcagataggcatcagtcagcccc

SEQ ID NO: 3005769 - DNA, 25 bp, Homo sapien
agcttgtactggttcagctgcacgc

SEQ ID NO: 3005770 - DNA, 25 bp, Homo sapien
cttgtactggttcagctgcacgcag

SEQ ID NO: 3005771 - DNA, 25 bp, Homo sapien
gcttgtactggttcagctgcacgca

SEQ ID NO: 3005772 - DNA, 25 bp, Homo sapien
gaagtactgccagggatcacagagg

SEQ ID NO: 3005773 - DNA, 25 bp, Homo sapien
caagtgagtcacatcgatggctgcc

SEQ ID NO: 3005774 - DNA, 25 bp, Homo sapien
gctggccgctcctgtagggaaagct

SEQ ID NO: 3005775 - DNA, 25 bp, Homo sapien
cacaccgtttctagtaggctctggg

SEQ ID NO: 3005776 - DNA, 25 bp, Homo sapien
ggggttcttctgcgtagccttgttg

SEQ ID NO: 3005777 - DNA, 25 bp, Homo sapien
caagggggttcttctgcgtagcctt

SEQ ID NO: 3005778 - DNA, 25 bp, Homo sapien
agggggttcttctgcgtagccttgt

SEQ ID NO: 3005779 - DNA, 25 bp, Homo sapien
ggttcttctgcgtagccttgttggg

SEQ ID NO: 3005780 - DNA, 25 bp, Homo sapien
catggagatgaaaacctcggtgtga

SEQ ID NO: 3005781 - DNA, 25 bp, Homo sapien
caaattcaggtgactaagcgcgtct

SEQ ID NO: 3005782 - DNA, 25 bp, Homo sapien
ggtctccgtgtacctatgcccaggg

SEQ ID NO: 3005783 - DNA, 25 bp, Homo sapien
acacaggagcgcactgcatggagat

SEQ ID NO: 3005784 - DNA, 25 bp, Homo sapien
agcttcccaaattgcatactctgtt

SEQ ID NO: 3005785 - DNA, 25 bp, Homo sapien
cttcccaaattgcatactctgttct

SEQ ID NO: 3005786 - DNA, 25 bp, Homo sapien
ctgggcgccgggcgacagtgtccgc

SEQ ID NO: 3005787 - DNA, 25 bp, Homo sapien
gggcgacagtgtccgcggcccggcg

SEQ ID NO: 3005788 - DNA, 25 bp, Homo sapien
cgggcgacagtgtccgcggcccggc

SEQ ID NO: 3005789 - DNA, 25 bp, Homo sapien
ggcgccgggcgacagtgtccgcggc

SEQ ID NO: 3005790 - DNA, 25 bp, Homo sapien
ggttcaggataccagctagagctcc

SEQ ID NO: 3005791 - DNA, 25 bp, Homo sapien
ttgctaccgggagaacagatatccg

SEQ ID NO: 3005792 - DNA, 25 bp, Homo sapien
aaaagctattattgtccgggtgcag

SEQ ID NO: 3005793 - DNA, 25 bp, Homo sapien
tacttaacatgaccagacccagctg

SEQ ID NO: 3005794 - DNA, 25 bp, Homo sapien
ccaacccgaggtagctgagtaagga

SEQ ID NO: 3005795 - DNA, 25 bp, Homo sapien
tatggaggtgacatggcacggacca

SEQ ID NO: 3005796 - DNA, 25 bp, Homo sapien
tagatggttgtgtttgcagggccca

SEQ ID NO: 3005797 - DNA, 25 bp, Homo sapien
tacactgggttgtgtgcatgagaca

SEQ ID NO: 3005798 - DNA, 25 bp, Homo sapien
gaaggtgtttgagaccctgttcagt

SEQ ID NO: 3005799 - DNA, 25 bp, Homo sapien
atgctgaaggtgtttgagaccctgt

SEQ ID NO: 3005800 - DNA, 25 bp, Homo sapien
gtgtttgagaccctgttcagtgtct

SEQ ID NO: 3005801 - DNA, 25 bp, Homo sapien
ttgagaccctgttcagtgtctgcac

SEQ ID NO: 3005802 - DNA, 25 bp, Homo sapien
tatggttactgactgccacatcgga

SEQ ID NO: 3005803 - DNA, 25 bp, Homo sapien
gagccggagctcagatttgcacagg

SEQ ID NO: 3005804 - DNA, 25 bp, Homo sapien
gcattgtcgataagttccccaggga

SEQ ID NO: 3005805 - DNA, 25 bp, Homo sapien
tcagaaagttcgaggacggcacttc

SEQ ID NO: 3005806 - DNA, 25 bp, Homo sapien
cagggtggagctggtagctgcgagg

SEQ ID NO: 3005807 - DNA, 25 bp, Homo sapien
gtggagctggtagctgcgaggtcac

SEQ ID NO: 3005808 - DNA, 25 bp, Homo sapien
gggtggagctggtagctgcgaggtc

SEQ ID NO: 3005809 - DNA, 25 bp, Homo sapien
ggtggagctggtagctgcgaggtca

SEQ ID NO: 3005810 - DNA, 25 bp, Homo sapien
ctgtgtacgtggtgcaagggttggg

SEQ ID NO: 3005811 - DNA, 25 bp, Homo sapien
aacacagacacaagcgccggaggcc

SEQ ID NO: 3005812 - DNA, 25 bp, Homo sapien
ttgggggatacaagtcagtgctggg

SEQ ID NO: 3005813 - DNA, 25 bp, Homo sapien
gaggccttcgaagggcctggctcgg

SEQ ID NO: 3005814 - DNA, 25 bp, Homo sapien
tgtcctcagcgtatttgaacttctt

SEQ ID NO: 3005815 - DNA, 25 bp, Homo sapien
catgtcctcagcgtatttgaacttc

SEQ ID NO: 3005816 - DNA, 25 bp, Homo sapien
gtagtgcctcttaggcaggatgtga

SEQ ID NO: 3005817 - DNA, 25 bp, Homo sapien
ttcttctgcttgtagtagtgcctct

SEQ ID NO: 3005818 - DNA, 25 bp, Homo sapien
caaagatgccaattccagagccgat

SEQ ID NO: 3005819 - DNA, 25 bp, Homo sapien
aattccagagccgatggtggtcatt

SEQ ID NO: 3005820 - DNA, 25 bp, Homo sapien
ccagagccgatggtggtcattgtag

SEQ ID NO: 3005821 - DNA, 25 bp, Homo sapien
gatgccaattccagagccgatggtg

SEQ ID NO: 3005822 - DNA, 25 bp, Homo sapien
ccaccaggatgtcaaagcgaatccc

SEQ ID NO: 3005823 - DNA, 25 bp, Homo sapien
tgacggtagttggtcccgttctcca

SEQ ID NO: 3005824 - DNA, 25 bp, Homo sapien
aaagcgaatcccaaacaccttgaag

SEQ ID NO: 3005825 - DNA, 25 bp, Homo sapien
caccttgaagaggtgacggtagttg

SEQ ID NO: 3005826 - DNA, 25 bp, Homo sapien
gaactcatagatgggtctgcagtgc

SEQ ID NO: 3005827 - DNA, 25 bp, Homo sapien
agtgccgtacgtgccagtccaggtc

SEQ ID NO: 3005828 - DNA, 25 bp, Homo sapien
gatttttctcttcgtacagcccatg

SEQ ID NO: 3005829 - DNA, 25 bp, Homo sapien
cacagtgccagtcgatggtgatgcc

SEQ ID NO: 3005830 - DNA, 25 bp, Homo sapien
ggtgcagggtcttgtgaaagaggca

SEQ ID NO: 3005831 - DNA, 25 bp, Homo sapien
tggcctgactcttgcaccacgtagc

SEQ ID NO: 3005832 - DNA, 25 bp, Homo sapien
gggtgctgaagttctggcctgactc

SEQ ID NO: 3005833 - DNA, 25 bp, Homo sapien
cacgtagccaagctggaagactggg

SEQ ID NO: 3005834 - DNA, 25 bp, Homo sapien
gggggtggaaggtgttgacagctgc

SEQ ID NO: 3005835 - DNA, 25 bp, Homo sapien
gtgtgtcatccgggagggtgcccac

SEQ ID NO: 3005836 - DNA, 25 bp, Homo sapien
tgctgtgtgtcatccgggagggtgc

SEQ ID NO: 3005837 - DNA, 25 bp, Homo sapien
gctgtgtgtcatccgggagggtgcc

SEQ ID NO: 3005838 - DNA, 25 bp, Homo sapien
gaaaagagtgaagttctcggcctct

SEQ ID NO: 3005839 - DNA, 25 bp, Homo sapien
ctgttgaccttgaagcgtggaaagc

SEQ ID NO: 3005840 - DNA, 25 bp, Homo sapien
gcgtggaaagctgatgctgttcttg

SEQ ID NO: 3005841 - DNA, 25 bp, Homo sapien
aaaagagtgaagttctcggcctctc

SEQ ID NO: 3005842 - DNA, 25 bp, Homo sapien
tgggtgtgctctagcgtggccagga

SEQ ID NO: 3005843 - DNA, 25 bp, Homo sapien
tcttcagcctaggttgcgcggatgg

SEQ ID NO: 3005844 - DNA, 25 bp, Homo sapien
caggacccaggggaatcttcagcct

SEQ ID NO: 3005845 - DNA, 25 bp, Homo sapien
ccacacagagcttggcacagcaggg

SEQ ID NO: 3005846 - DNA, 25 bp, Homo sapien
ggccacacacttgcccgtgcggatg

SEQ ID NO: 3005847 - DNA, 25 bp, Homo sapien
aaagatctcacacgtcttcacagtg

SEQ ID NO: 3005848 - DNA, 25 bp, Homo sapien
tccacggggcaccagccaaagatct

SEQ ID NO: 3005849 - DNA, 25 bp, Homo sapien
cacagtgtcgttgaaggccacacac

SEQ ID NO: 3005850 - DNA, 25 bp, Homo sapien
agccactgtcttccttgcatatgcc

SEQ ID NO: 3005851 - DNA, 25 bp, Homo sapien
tcctcttggccttcccaggggtaca

SEQ ID NO: 3005852 - DNA, 25 bp, Homo sapien
ccttgcatatgcccccttctgggtg

SEQ ID NO: 3005853 - DNA, 25 bp, Homo sapien
tcccaggggtacagccactgtcttc

SEQ ID NO: 3005854 - DNA, 25 bp, Homo sapien
gtacaccgtgtgctgggcgggaagg

SEQ ID NO: 3005855 - DNA, 25 bp, Homo sapien
ccccacactgctctgccgaggcgcc

SEQ ID NO: 3005856 - DNA, 25 bp, Homo sapien
ggtgggcacgaagtctcggcaccct

SEQ ID NO: 3005857 - DNA, 25 bp, Homo sapien
ccctgcctggtacaccgtgtgctgg

SEQ ID NO: 3005858 - DNA, 25 bp, Homo sapien
ttgagtctgcttcggggtcacgatg

SEQ ID NO: 3005859 - DNA, 25 bp, Homo sapien
tcatgaccacgaaggagttgtcccc

SEQ ID NO: 3005860 - DNA, 25 bp, Homo sapien
gggtcacgatgaaattggtcatgac

SEQ ID NO: 3005861 - DNA, 25 bp, Homo sapien
ctctgcgcagtagccttgagtctgc

SEQ ID NO: 3005862 - DNA, 25 bp, Homo sapien
ctgctgatgaggccgctcgaggtct

SEQ ID NO: 3005863 - DNA, 25 bp, Homo sapien
ccgctcgaggtctggtagcccttct

SEQ ID NO: 3005864 - DNA, 25 bp, Homo sapien
ggaagacgtagtcagccacatccca

SEQ ID NO: 3005865 - DNA, 25 bp, Homo sapien
acatcccagacctgggggccgaggc

SEQ ID NO: 3005866 - DNA, 25 bp, Homo sapien
tacgtgctgcggcaacaatgggcag

SEQ ID NO: 3005867 - DNA, 25 bp, Homo sapien
aaggagccactcttgtgcctcggga

SEQ ID NO: 3005868 - DNA, 25 bp, Homo sapien
tctcttgagacgtcggaagctctgg

SEQ ID NO: 3005869 - DNA, 25 bp, Homo sapien
ttttgagaaccaagactggacccgc

SEQ ID NO: 3005870 - DNA, 25 bp, Homo sapien
gaaccaaaggagtctggctaattca

SEQ ID NO: 3005871 - DNA, 25 bp, Homo sapien
tgtttgattagacttttctcacagg

SEQ ID NO: 3005872 - DNA, 25 bp, Homo sapien
ggaaccaaaggagtctggctaattc

SEQ ID NO: 3005873 - DNA, 25 bp, Homo sapien
gtttgattagacttttctcacagga

SEQ ID NO: 3005874 - DNA, 25 bp, Homo sapien
cctgattggtgcactctgatctcca

SEQ ID NO: 3005875 - DNA, 25 bp, Homo sapien
cctggatgtgtttctccccccaata

SEQ ID NO: 3005876 - DNA, 25 bp, Homo sapien
tgatctccacttggagatctcagaa

SEQ ID NO: 3005877 - DNA, 25 bp, Homo sapien
gaaacggtccctggatgtgtttctc

SEQ ID NO: 3005878 - DNA, 25 bp, Homo sapien
ggagccatgcaggtgggttcaaatc

SEQ ID NO: 3005879 - DNA, 25 bp, Homo sapien
ggttagtctcttactaagctgtgag

SEQ ID NO: 3005880 - DNA, 25 bp, Homo sapien
gatcctggctaatccctgtggtcct

SEQ ID NO: 3005881 - DNA, 25 bp, Homo sapien
cagtactgagcagtggccagacgag

SEQ ID NO: 3005882 - DNA, 25 bp, Homo sapien
gaaaggaactatcatccctgggacc

SEQ ID NO: 3005883 - DNA, 25 bp, Homo sapien
gggcctcaaacgtccctggatgtcc

SEQ ID NO: 3005884 - DNA, 25 bp, Homo sapien
tccgcctgacatgccaacatgaagg

SEQ ID NO: 3005885 - DNA, 25 bp, Homo sapien
tggctcccgagacaaccatactgca

SEQ ID NO: 3005886 - DNA, 25 bp, Homo sapien
ttattacgcaccagcaccatgcggg

SEQ ID NO: 3005887 - DNA, 25 bp, Homo sapien
gataacgcccaccttcttattacgc

SEQ ID NO: 3005888 - DNA, 25 bp, Homo sapien
atgacgtagaccaggaccaccagct

SEQ ID NO: 3005889 - DNA, 25 bp, Homo sapien
accagctggatcagtcggaagataa

SEQ ID NO: 3005890 - DNA, 25 bp, Homo sapien
gtgccaccacccacgtcgatggtag

SEQ ID NO: 3005891 - DNA, 25 bp, Homo sapien
caccacccacgtcgatggtagagct

SEQ ID NO: 3005892 - DNA, 25 bp, Homo sapien
gccaccacccacgtcgatggtagag

SEQ ID NO: 3005893 - DNA, 25 bp, Homo sapien
agggtgagccgggtgccaccaccca

SEQ ID NO: 3005894 - DNA, 25 bp, Homo sapien
aacaggagttgttggcaggaaacca

SEQ ID NO: 3005895 - DNA, 25 bp, Homo sapien
gataaagctctcagtcgactcctca

SEQ ID NO: 3005896 - DNA, 25 bp, Homo sapien
ttggcccctggaaggcaacagactg

SEQ ID NO: 3005897 - DNA, 25 bp, Homo sapien
ccagcctcgcccatggacaaataaa

SEQ ID NO: 3005898 - DNA, 25 bp, Homo sapien
atagccccttagaccctgactggag

SEQ ID NO: 3005899 - DNA, 25 bp, Homo sapien
cagtcaaaccgtgatgccatctggg

SEQ ID NO: 3005900 - DNA, 25 bp, Homo sapien
gagattcctctaatgccacatagcc

SEQ ID NO: 3005901 - DNA, 25 bp, Homo sapien
gggcccgaggatgccgcaaccatac

SEQ ID NO: 3005902 - DNA, 25 bp, Homo sapien
tcatggatatctgaggcctgtgctg

SEQ ID NO: 3005903 - DNA, 25 bp, Homo sapien
actcgggggcctttgtgcgcatgtc

SEQ ID NO: 3005904 - DNA, 25 bp, Homo sapien
ccgctgtggacactcgggggccttt

SEQ ID NO: 3005905 - DNA, 25 bp, Homo sapien
ctgctgtgattttgtgcctccattt

SEQ ID NO: 3005906 - DNA, 25 bp, Homo sapien
gaaaaattctgtccatcagaggcca

SEQ ID NO: 3005907 - DNA, 25 bp, Homo sapien
tagtgacatcctttcggctcatggg

SEQ ID NO: 3005908 - DNA, 25 bp, Homo sapien
tgatatgacgtgttcctccagcagg

SEQ ID NO: 3005909 - DNA, 25 bp, Homo sapien
taggagtggccaagacatagggaca

SEQ ID NO: 3005910 - DNA, 25 bp, Homo sapien
cagggacgcgggtggcaagttggac

SEQ ID NO: 3005911 - DNA, 25 bp, Homo sapien
aagggcgccacggtcaggaacctga

SEQ ID NO: 3005912 - DNA, 25 bp, Homo sapien
aggatgtcggtggtctcaggtacca

SEQ ID NO: 3005913 - DNA, 25 bp, Homo sapien
tgggctgggtagaagggcgccacgg

SEQ ID NO: 3005914 - DNA, 25 bp, Homo sapien
tgaacatctcccgagctcaggacgg

SEQ ID NO: 3005915 - DNA, 25 bp, Homo sapien
tgcgtggcagaccgggcggcagtgt

SEQ ID NO: 3005916 - DNA, 25 bp, Homo sapien
agaccgggcggcagtgtgactctga

SEQ ID NO: 3005917 - DNA, 25 bp, Homo sapien
tggcagaccgggcggcagtgtgact

SEQ ID NO: 3005918 - DNA, 25 bp, Homo sapien
ggctccttgtgtccgtctctctgac

SEQ ID NO: 3005919 - DNA, 25 bp, Homo sapien
cctgccggctccttgtgtccgtctc

SEQ ID NO: 3005920 - DNA, 25 bp, Homo sapien
ctgaggcagtccagccaggctttcc

SEQ ID NO: 3005921 - DNA, 25 bp, Homo sapien
ggaaaggacatcctcgctccgccct

SEQ ID NO: 3005922 - DNA, 25 bp, Homo sapien
ctctcgggagccgactttgtggaag

SEQ ID NO: 3005923 - DNA, 25 bp, Homo sapien
agaagcagcctcgagctctcgggag

SEQ ID NO: 3005924 - DNA, 25 bp, Homo sapien
ctcgggagccgactttgtggaagca

SEQ ID NO: 3005925 - DNA, 25 bp, Homo sapien
aacagaagcagcctcgagctctcgg

SEQ ID NO: 3005926 - DNA, 25 bp, Homo sapien
accaggcacgaagagagaggtcaga

SEQ ID NO: 3005927 - DNA, 25 bp, Homo sapien
cctccgtcagtgcagaggcaccagt

SEQ ID NO: 3005928 - DNA, 25 bp, Homo sapien
tccagcttccgaacaagggggagca

SEQ ID NO: 3005929 - DNA, 25 bp, Homo sapien
ccccggatctctgggtatgctgcca

SEQ ID NO: 3005930 - DNA, 25 bp, Homo sapien
ctgcagagcagggaacttcccagga

SEQ ID NO: 3005931 - DNA, 25 bp, Homo sapien
cctgtcatttatccggcgggacccg

SEQ ID NO: 3005932 - DNA, 25 bp, Homo sapien
gggatggccattctgacctcgggcc

SEQ ID NO: 3005933 - DNA, 25 bp, Homo sapien
gacaggaattacagacctcccaggc

SEQ ID NO: 3005934 - DNA, 25 bp, Homo sapien
cggagactccactctgttcccagcg

SEQ ID NO: 3005935 - DNA, 25 bp, Homo sapien
ggagactccactctgttcccagcgc

SEQ ID NO: 3005936 - DNA, 25 bp, Homo sapien
tagtccagacctcagtctaccccag

SEQ ID NO: 3005937 - DNA, 25 bp, Homo sapien
aaaaacccaagagcgcgttaagatg

SEQ ID NO: 3005938 - DNA, 25 bp, Homo sapien
aggcctcccttagtccagacctcag

SEQ ID NO: 3005939 - DNA, 25 bp, Homo sapien
gatgtatgtgtaagggcacacatcc

SEQ ID NO: 3005940 - DNA, 25 bp, Homo sapien
cagggatgccttgggcccccatgga

SEQ ID NO: 3005941 - DNA, 25 bp, Homo sapien
ctggaggatttcctggcggaccggc

SEQ ID NO: 3005942 - DNA, 25 bp, Homo sapien
tcaaggacggcccagaggcctggct

SEQ ID NO: 3005943 - DNA, 25 bp, Homo sapien
ccccatggatgggagtttccagtgt

SEQ ID NO: 3005944 - DNA, 25 bp, Homo sapien
aatgacagacgcgtgatctatttat

SEQ ID NO: 3005945 - DNA, 25 bp, Homo sapien
gcgtgatctatttatagtccctcca

SEQ ID NO: 3005946 - DNA, 25 bp, Homo sapien
gatctatttatagtccctccaccca

SEQ ID NO: 3005947 - DNA, 25 bp, Homo sapien
cagacgcgtgatctatttatagtcc

SEQ ID NO: 3005948 - DNA, 25 bp, Homo sapien
gagcagctctgacagcgagacgatg

SEQ ID NO: 3005949 - DNA, 25 bp, Homo sapien
gcagctctgacagcgagacgatgct

SEQ ID NO: 3005950 - DNA, 25 bp, Homo sapien
gcgagacgatgctgtgtccctggcc

SEQ ID NO: 3005951 - DNA, 25 bp, Homo sapien
tctgacagcgagacgatgctgtgtc

SEQ ID NO: 3005952 - DNA, 25 bp, Homo sapien
cagcccgacacctgccatcctgtcc

SEQ ID NO: 3005953 - DNA, 25 bp, Homo sapien
tcctctccactccggggttaaggca

SEQ ID NO: 3005954 - DNA, 25 bp, Homo sapien
ctgtcctctccactccggggttaag

SEQ ID NO: 3005955 - DNA, 25 bp, Homo sapien
tctccactccggggttaaggcagac

SEQ ID NO: 3005956 - DNA, 25 bp, Homo sapien
tgtggtctggggtccaagaggtggt

SEQ ID NO: 3005957 - DNA, 25 bp, Homo sapien
ctactccaggcctgcgagactgtcc

SEQ ID NO: 3005958 - DNA, 25 bp, Homo sapien
ccaggcctgcgagactgtcctgaga

SEQ ID NO: 3005959 - DNA, 25 bp, Homo sapien
gtggtcagcggctgcctactccagg

SEQ ID NO: 3005960 - DNA, 25 bp, Homo sapien
cccgatgtgcagacagagaggctct

SEQ ID NO: 3005961 - DNA, 25 bp, Homo sapien
cacacagtgccctggccatgtaggg

SEQ ID NO: 3005962 - DNA, 25 bp, Homo sapien
agtgcaagaccctgcggacaccttg

SEQ ID NO: 3005963 - DNA, 25 bp, Homo sapien
tggcccaagaggtgctcccgttgct

SEQ ID NO: 3005964 - DNA, 25 bp, Homo sapien
tgacaggcagagatatctggagcac

SEQ ID NO: 3005965 - DNA, 25 bp, Homo sapien
cacccactggcgcccgctcagtggg

SEQ ID NO: 3005966 - DNA, 25 bp, Homo sapien
ctcagtggggtcacctggaaaatga

SEQ ID NO: 3005967 - DNA, 25 bp, Homo sapien
gacaggtacttgagggcctcatcca

SEQ ID NO: 3005968 - DNA, 25 bp, Homo sapien
cctgtgatgtccagggaccagggca

SEQ ID NO: 3005969 - DNA, 25 bp, Homo sapien
ggccagagaggtccagtgaccagcc

SEQ ID NO: 3005970 - DNA, 25 bp, Homo sapien
tccaggtagtttccattgcaggggg

SEQ ID NO: 3005971 - DNA, 25 bp, Homo sapien
cctctcctccaggtagtttccattg

SEQ ID NO: 3005972 - DNA, 25 bp, Homo sapien
cagcagcgactggttctccgagacg

SEQ ID NO: 3005973 - DNA, 25 bp, Homo sapien
ggttcatccagggcggcatccgcag

SEQ ID NO: 3005974 - DNA, 25 bp, Homo sapien
ccgcagcagcgactggttctccgag

SEQ ID NO: 3005975 - DNA, 25 bp, Homo sapien
aggggcggcacgagcaggatgagga

SEQ ID NO: 3005976 - DNA, 25 bp, Homo sapien
cctcacagtcgatgccggcaaagag

SEQ ID NO: 3005977 - DNA, 25 bp, Homo sapien
catttcaatggtcacgagcacggac

SEQ ID NO: 3005978 - DNA, 25 bp, Homo sapien
ggttgtcttcggagcacttcaggaa

SEQ ID NO: 3005979 - DNA, 25 bp, Homo sapien
ggaagcgtgactcgaacacctcaca

SEQ ID NO: 3005980 - DNA, 25 bp, Homo sapien
cacagcgtgggaaaggcagacgttc

SEQ ID NO: 3005981 - DNA, 25 bp, Homo sapien
cgggagcctggagatcactgaatag

SEQ ID NO: 3005982 - DNA, 25 bp, Homo sapien
tatagaagatgaaggctacgcaggc

SEQ ID NO: 3005983 - DNA, 25 bp, Homo sapien
aaaccatgcgggagtggaattcacc

SEQ ID NO: 3005984 - DNA, 25 bp, Homo sapien
tgatctcctcagtttgaccctctgc

SEQ ID NO: 3005985 - DNA, 25 bp, Homo sapien
cctccattcttgatctcctcagttt

SEQ ID NO: 3005986 - DNA, 25 bp, Homo sapien
gtttgaccctctgcctaaagtccca

SEQ ID NO: 3005987 - DNA, 25 bp, Homo sapien
tcctcagtttgaccctctgcctaaa

SEQ ID NO: 3005988 - DNA, 25 bp, Homo sapien
gaactccaacaactcgagctgtaag

SEQ ID NO: 3005989 - DNA, 25 bp, Homo sapien
gtttcccgtgggctctgagctcggc

SEQ ID NO: 3005990 - DNA, 25 bp, Homo sapien
agctgtaagttcaacaggctccctg

SEQ ID NO: 3005991 - DNA, 25 bp, Homo sapien
ggtccccgctaactgactgggatgg

SEQ ID NO: 3005992 - DNA, 25 bp, Homo sapien
cacaaaccaccaggtggcggcagcc

SEQ ID NO: 3005993 - DNA, 25 bp, Homo sapien
tgtgaggtccctcggcgtcatacac

SEQ ID NO: 3005994 - DNA, 25 bp, Homo sapien
tgatgtgaggtccctcggcgtcata

SEQ ID NO: 3005995 - DNA, 25 bp, Homo sapien
aggtccctcggcgtcatacacaaac

SEQ ID NO: 3005996 - DNA, 25 bp, Homo sapien
catactaccgggagagcagcatgat

SEQ ID NO: 3005997 - DNA, 25 bp, Homo sapien
cctgatacaaggctcttaggaagct

SEQ ID NO: 3005998 - DNA, 25 bp, Homo sapien
cagcccaggcctgagattcttatca

SEQ ID NO: 3005999 - DNA, 25 bp, Homo sapien
tcatacagtttctactggcacaagc

SEQ ID NO: 3006000 - DNA, 25 bp, Homo sapien
gcaggcccagaattgccgtgaggaa

SEQ ID NO: 3006001 - DNA, 25 bp, Homo sapien
ccgtggcaggtaggccgtctgtcac

SEQ ID NO: 3006002 - DNA, 25 bp, Homo sapien
agccaggtatcggaagaagagccag

SEQ ID NO: 3006003 - DNA, 25 bp, Homo sapien
gcacagggatcagggcttcgggcag

SEQ ID NO: 3006004 - DNA, 25 bp, Homo sapien
tgtactcacgctcaaaatgcaccag

SEQ ID NO: 3006005 - DNA, 25 bp, Homo sapien
acacacacgactgcctaaaggtggg

SEQ ID NO: 3006006 - DNA, 25 bp, Homo sapien
aagggtgtgtgtacacagctctgcc

SEQ ID NO: 3006007 - DNA, 25 bp, Homo sapien
agtcatgagctctagccccggtagg

SEQ ID NO: 3006008 - DNA, 25 bp, Homo sapien
tggagggctgacaggcgactcttca

SEQ ID NO: 3006009 - DNA, 25 bp, Homo sapien
catgatccataggtcaccagggcct

SEQ ID NO: 3006010 - DNA, 25 bp, Homo sapien
gcagcgcatccgaggaacaggcgtt

SEQ ID NO: 3006011 - DNA, 25 bp, Homo sapien
gactcttcaggcacctccgtgggtg

SEQ ID NO: 3006012 - DNA, 25 bp, Homo sapien
gacgacctcgccaacattggaggag

SEQ ID NO: 3006013 - DNA, 25 bp, Homo sapien
tgcctgagcccatggcgatgccgat

SEQ ID NO: 3006014 - DNA, 25 bp, Homo sapien
cagggctggtgcgtcgttcactcca

SEQ ID NO: 3006015 - DNA, 25 bp, Homo sapien
gcaaagttgtcatctgacagcacca

SEQ ID NO: 3006016 - DNA, 25 bp, Homo sapien
acggaacttcatgggttgatggtaa

SEQ ID NO: 3006017 - DNA, 25 bp, Homo sapien
cggaacttcatgggttgatggtaat

SEQ ID NO: 3006018 - DNA, 25 bp, Homo sapien
gtggccccactcatcaccccctcct

SEQ ID NO: 3006019 - DNA, 25 bp, Homo sapien
cccgtggccccactcatcaccccct

SEQ ID NO: 3006020 - DNA, 25 bp, Homo sapien
gccccactcatcaccccctcctggg

SEQ ID NO: 3006021 - DNA, 25 bp, Homo sapien
tggccccactcatcaccccctcctg

SEQ ID NO: 3006022 - DNA, 25 bp, Homo sapien
ccgcctggtagcagcgtgtgatgca

SEQ ID NO: 3006023 - DNA, 25 bp, Homo sapien
ggctgaggtcatcaaactcgcggcc

SEQ ID NO: 3006024 - DNA, 25 bp, Homo sapien
catagcagtgatctcgttaaaggac

SEQ ID NO: 3006025 - DNA, 25 bp, Homo sapien
gcaggttctccacgatgcgggactt

SEQ ID NO: 3006026 - DNA, 25 bp, Homo sapien
ggcagcgcagcgtgtctgagcctga

SEQ ID NO: 3006027 - DNA, 25 bp, Homo sapien
tgagctacagcgctcgatcacactc

SEQ ID NO: 3006028 - DNA, 25 bp, Homo sapien
gcacaaacttgctgcagtcgtccag

SEQ ID NO: 3006029 - DNA, 25 bp, Homo sapien
cccggatctttgccaggatctgctc

SEQ ID NO: 3006030 - DNA, 25 bp, Homo sapien
catggatttccggtctcgggagaac

SEQ ID NO: 3006031 - DNA, 25 bp, Homo sapien
tccagggtgaactccttccgcatca

SEQ ID NO: 3006032 - DNA, 25 bp, Homo sapien
tgctgccctggccagtagggtgagg

SEQ ID NO: 3006033 - DNA, 25 bp, Homo sapien
ggcgtgcagtacacggacatggatt

SEQ ID NO: 3006034 - DNA, 25 bp, Homo sapien
agagcctgcaggtcggtgtcgaaca

SEQ ID NO: 3006035 - DNA, 25 bp, Homo sapien
gtgttacaggcgccagctcgctcca

SEQ ID NO: 3006036 - DNA, 25 bp, Homo sapien
ggtgtcgaacacgttcatcttctcc

SEQ ID NO: 3006037 - DNA, 25 bp, Homo sapien
caagtcagagctgtctccgtggcct

SEQ ID NO: 3006038 - DNA, 25 bp, Homo sapien
cgtcgaactggccgcagcgcacagg

SEQ ID NO: 3006039 - DNA, 25 bp, Homo sapien
tccagagccgagtcgttgcacaggg

SEQ ID NO: 3006040 - DNA, 25 bp, Homo sapien
ctcgttgtagtccagagccgagtcg

SEQ ID NO: 3006041 - DNA, 25 bp, Homo sapien
ttgtagtccagagccgagtcgttgc

SEQ ID NO: 3006042 - DNA, 25 bp, Homo sapien
gatggtgaactcgtgcaaaaggcag

SEQ ID NO: 3006043 - DNA, 25 bp, Homo sapien
catcggcctcggctaccacgaacat

SEQ ID NO: 3006044 - DNA, 25 bp, Homo sapien
aaaaggcaggagcccgcatcggcct

SEQ ID NO: 3006045 - DNA, 25 bp, Homo sapien
gtatacgtggtacccgagatggtga

SEQ ID NO: 3006046 - DNA, 25 bp, Homo sapien
gctccggtttgtcccaatgtcctgg

SEQ ID NO: 3006047 - DNA, 25 bp, Homo sapien
cctggacttctgagggatttatggc

SEQ ID NO: 3006048 - DNA, 25 bp, Homo sapien
gctctgccagatgtgtccggctccg

SEQ ID NO: 3006049 - DNA, 25 bp, Homo sapien
ctgaggcagggaccgtctgctctgc

SEQ ID NO: 3006050 - DNA, 25 bp, Homo sapien
agcccagcgcccagtagatgcataa

SEQ ID NO: 3006051 - DNA, 25 bp, Homo sapien
attctcaagcaaatggccagcccag

SEQ ID NO: 3006052 - DNA, 25 bp, Homo sapien
gcccagtagatgcataagtgtccct

SEQ ID NO: 3006053 - DNA, 25 bp, Homo sapien
gcttcgtggacatggcctcaccgca

SEQ ID NO: 3006054 - DNA, 25 bp, Homo sapien
aaggaggtgggggagagacccagag

SEQ ID NO: 3006055 - DNA, 25 bp, Homo sapien
gacccagagagggagcccagcctgc

SEQ ID NO: 3006056 - DNA, 25 bp, Homo sapien
agggagcccagcctgctctgcaacg

SEQ ID NO: 3006057 - DNA, 25 bp, Homo sapien
gagcccagcctgctctgcaacgcac

SEQ ID NO: 3006058 - DNA, 25 bp, Homo sapien
gcaacaccaagctggccgtcactca

SEQ ID NO: 3006059 - DNA, 25 bp, Homo sapien
agcaacaccaagctggccgtcactc

SEQ ID NO: 3006060 - DNA, 25 bp, Homo sapien
caacaccaagctggccgtcactcac

SEQ ID NO: 3006061 - DNA, 25 bp, Homo sapien
cttgaagtagtagacagcgccacgc

SEQ ID NO: 3006062 - DNA, 25 bp, Homo sapien
cgaagtggccgatgttgatgaccca

SEQ ID NO: 3006063 - DNA, 25 bp, Homo sapien
cagtgccaggcatgtagtgatgaca

SEQ ID NO: 3006064 - DNA, 25 bp, Homo sapien
cagggccacggcgatcttgaagtag

SEQ ID NO: 3006065 - DNA, 25 bp, Homo sapien
gggacaaggaaaaagctgctcagca

SEQ ID NO: 3006066 - DNA, 25 bp, Homo sapien
gaaaaagctgctcagcagccaacca

SEQ ID NO: 3006067 - DNA, 25 bp, Homo sapien
gggagggacaaggaaaaagctgctc

SEQ ID NO: 3006068 - DNA, 25 bp, Homo sapien
aggaaaaagctgctcagcagccaac

SEQ ID NO: 3006069 - DNA, 25 bp, Homo sapien
ctgtgtgcttggtcacggacacaga

SEQ ID NO: 3006070 - DNA, 25 bp, Homo sapien
gtgtgcttggtcacggacacagatt

SEQ ID NO: 3006071 - DNA, 25 bp, Homo sapien
gtgcttggtcacggacacagattca

SEQ ID NO: 3006072 - DNA, 25 bp, Homo sapien
tgtgcttggtcacggacacagattc

SEQ ID NO: 3006073 - DNA, 25 bp, Homo sapien
tgaggcggaggtcagcaggcacttt

SEQ ID NO: 3006074 - DNA, 25 bp, Homo sapien
ctggtccactcgcagcgtggtggac

SEQ ID NO: 3006075 - DNA, 25 bp, Homo sapien
acttgatctcgatgaggcggaggtc

SEQ ID NO: 3006076 - DNA, 25 bp, Homo sapien
cgcagcgtggtggacttgatctcga

SEQ ID NO: 3006077 - DNA, 25 bp, Homo sapien
ctgtgcggggagaatggcttggctg

SEQ ID NO: 3006078 - DNA, 25 bp, Homo sapien
ttggctgagggtggctttgggcacc

SEQ ID NO: 3006079 - DNA, 25 bp, Homo sapien
ctgagggtggctttgggcaccacca

SEQ ID NO: 3006080 - DNA, 25 bp, Homo sapien
ggctgagggtggctttgggcaccac

SEQ ID NO: 3006081 - DNA, 25 bp, Homo sapien
acgcccttgcggtccgagcggatca

SEQ ID NO: 3006082 - DNA, 25 bp, Homo sapien
agcggatcaccttgcccatctcagg

SEQ ID NO: 3006083 - DNA, 25 bp, Homo sapien
cgatgtcccgggcacggatcctctg

SEQ ID NO: 3006084 - DNA, 25 bp, Homo sapien
tcgatggcactctcggcgttgcgtt

SEQ ID NO: 3006085 - DNA, 25 bp, Homo sapien
gcccacaatggcgttggccacgagg

SEQ ID NO: 3006086 - DNA, 25 bp, Homo sapien
aaggcggtcgtggtctcctcgccct

SEQ ID NO: 3006087 - DNA, 25 bp, Homo sapien
tccacgaaggcggtcgtggtctcct

SEQ ID NO: 3006088 - DNA, 25 bp, Homo sapien
gccacgaggatcagcatgatgacca

SEQ ID NO: 3006089 - DNA, 25 bp, Homo sapien
cagggctaccgactaccacaggatg

SEQ ID NO: 3006090 - DNA, 25 bp, Homo sapien
ccagggctaccgactaccacaggat

SEQ ID NO: 3006091 - DNA, 25 bp, Homo sapien
agggctaccgactaccacaggatgg

SEQ ID NO: 3006092 - DNA, 25 bp, Homo sapien
aggatgcgcaccaggaggtcctcaa

SEQ ID NO: 3006093 - DNA, 25 bp, Homo sapien
cagcaggatgcgcaccaggaggtcc

SEQ ID NO: 3006094 - DNA, 25 bp, Homo sapien
ctgcccactcagagctgggatggcc

SEQ ID NO: 3006095 - DNA, 25 bp, Homo sapien
actcagagctgggatggcccgggag

SEQ ID NO: 3006096 - DNA, 25 bp, Homo sapien
cagagctgggatggcccgggagacc

SEQ ID NO: 3006097 - DNA, 25 bp, Homo sapien
cccactcagagctgggatggcccgg

SEQ ID NO: 3006098 - DNA, 25 bp, Homo sapien
acaggaccaggaggtgccgctctct

SEQ ID NO: 3006099 - DNA, 25 bp, Homo sapien
gccagactgagagggcctgtgttca

SEQ ID NO: 3006100 - DNA, 25 bp, Homo sapien
ctgtgttcacggaggcccagcgtgc

SEQ ID NO: 3006101 - DNA, 25 bp, Homo sapien
attctaatctgagcctccgccacgg

SEQ ID NO: 3006102 - DNA, 25 bp, Homo sapien
tgagatgccaaggtgctagccaccg

SEQ ID NO: 3006103 - DNA, 25 bp, Homo sapien
gctgtgcccttctctgaccagttgt

SEQ ID NO: 3006104 - DNA, 25 bp, Homo sapien
gaccagttgtcagtattagggtccc

SEQ ID NO: 3006105 - DNA, 25 bp, Homo sapien
gcagcatcctatctcctcatataaa

SEQ ID NO: 3006106 - DNA, 25 bp, Homo sapien
gggtccctggctagcgtgctcactg

SEQ ID NO: 3006107 - DNA, 25 bp, Homo sapien
tcactgactgcgctgccgaggctcc

SEQ ID NO: 3006108 - DNA, 25 bp, Homo sapien
tccctgttgggggttacggcagatg

SEQ ID NO: 3006109 - DNA, 25 bp, Homo sapien
tttatgtgtgagtggagggggtccc

SEQ ID NO: 3006110 - DNA, 25 bp, Homo sapien
gctagctgataagcggcaccttcct

SEQ ID NO: 3006111 - DNA, 25 bp, Homo sapien
cagccacatccgcttcgggttgcag

SEQ ID NO: 3006112 - DNA, 25 bp, Homo sapien
ccgcttcgggttgcagaaagaggaa

SEQ ID NO: 3006113 - DNA, 25 bp, Homo sapien
gggccccaaggctgctagctgataa

SEQ ID NO: 3006114 - DNA, 25 bp, Homo sapien
gtggaataacgcttccagggtggac

SEQ ID NO: 3006115 - DNA, 25 bp, Homo sapien
tgggaagtccgggaggaccgcgcag

SEQ ID NO: 3006116 - DNA, 25 bp, Homo sapien
gtgccccaggagcatccgaagaggt

SEQ ID NO: 3006117 - DNA, 25 bp, Homo sapien
cagagggtgccaggcgtccggtctc

SEQ ID NO: 3006118 - DNA, 25 bp, Homo sapien
tcggctgtcaccgagaagtggcgca

SEQ ID NO: 3006119 - DNA, 25 bp, Homo sapien
gcgccggtcacctgcgccgggctca

SEQ ID NO: 3006120 - DNA, 25 bp, Homo sapien
gtcaccgagaagtggcgcagcacgt

SEQ ID NO: 3006121 - DNA, 25 bp, Homo sapien
cgccctcggctgtcaccgagaagtg

SEQ ID NO: 3006122 - DNA, 25 bp, Homo sapien
tgcgccgtccgcaccgtcgaggccg

SEQ ID NO: 3006123 - DNA, 25 bp, Homo sapien
gtccgcaccgtcgaggccgcctctc

SEQ ID NO: 3006124 - DNA, 25 bp, Homo sapien
gccgtctgcgccgtccgcaccgtcg

SEQ ID NO: 3006125 - DNA, 25 bp, Homo sapien
cgcccggccgtctgcgccgtccgca

SEQ ID NO: 3006126 - DNA, 25 bp, Homo sapien
gccgcgcgaggccatgtccgtgctg

SEQ ID NO: 3006127 - DNA, 25 bp, Homo sapien
gctgggaccttacccgacggcagtg

SEQ ID NO: 3006128 - DNA, 25 bp, Homo sapien
catgtccgtgctgggaccttacccg

SEQ ID NO: 3006129 - DNA, 25 bp, Homo sapien
gaggccatgtccgtgctgggacctt

SEQ ID NO: 3006130 - DNA, 25 bp, Homo sapien
tacatagtgccagtcttgtgctgca

SEQ ID NO: 3006131 - DNA, 25 bp, Homo sapien
agtgtcgggcacaaatacatagtgc

SEQ ID NO: 3006132 - DNA, 25 bp, Homo sapien
cacacagtaggttgggctctccctg

SEQ ID NO: 3006133 - DNA, 25 bp, Homo sapien
gggatttgccgatgccacacagtag

SEQ ID NO: 3006134 - DNA, 25 bp, Homo sapien
gcagggcaggtgagcgtggtcattc

SEQ ID NO: 3006135 - DNA, 25 bp, Homo sapien
ctgggagttgctgggcctcgagctg

SEQ ID NO: 3006136 - DNA, 25 bp, Homo sapien
ggcaggtgagcgtggtcattcccag

SEQ ID NO: 3006137 - DNA, 25 bp, Homo sapien
tcccagagtggctattgggtgctgg

SEQ ID NO: 3006138 - DNA, 25 bp, Homo sapien
gaggtttcaagggtaattctgcgca

SEQ ID NO: 3006139 - DNA, 25 bp, Homo sapien
gggcctcatgctgcgactctggagt

SEQ ID NO: 3006140 - DNA, 25 bp, Homo sapien
aaggaacacagcttggtgtcgtgtt

SEQ ID NO: 3006141 - DNA, 25 bp, Homo sapien
attctgcgcattcccgggcctcatg

SEQ ID NO: 3006142 - DNA, 25 bp, Homo sapien
aggggctgaccccacgccagaggtt

SEQ ID NO: 3006143 - DNA, 25 bp, Homo sapien
ctgaccccacgccagaggtttctca

SEQ ID NO: 3006144 - DNA, 25 bp, Homo sapien
gggctgaccccacgccagaggtttc

SEQ ID NO: 3006145 - DNA, 25 bp, Homo sapien
ggctgaccccacgccagaggtttct

SEQ ID NO: 3006146 - DNA, 25 bp, Homo sapien
gttggtgaaaaacgcgtcgctccag

SEQ ID NO: 3006147 - DNA, 25 bp, Homo sapien
tcctaagcgccagtgatgtagctct

SEQ ID NO: 3006148 - DNA, 25 bp, Homo sapien
tctgcgctcatgcacggaaaggcac

SEQ ID NO: 3006149 - DNA, 25 bp, Homo sapien
gctccaggcgtcctaagcgccagtg

SEQ ID NO: 3006150 - DNA, 25 bp, Homo sapien
tggcctcctcaagggctgccgggaa

SEQ ID NO: 3006151 - DNA, 25 bp, Homo sapien
tcaagggctgccgggaacgccagga

SEQ ID NO: 3006152 - DNA, 25 bp, Homo sapien
ctgccgggaacgccaggacccctgg

SEQ ID NO: 3006153 - DNA, 25 bp, Homo sapien
tcctcaagggctgccgggaacgcca

SEQ ID NO: 3006154 - DNA, 25 bp, Homo sapien
ctttttctggtcttaagatcagttg

SEQ ID NO: 3006155 - DNA, 25 bp, Homo sapien
tctggtcttaagatcagttgtttta

SEQ ID NO: 3006156 - DNA, 25 bp, Homo sapien
cacctttttctggtcttaagatcag

SEQ ID NO: 3006157 - DNA, 25 bp, Homo sapien
tcacctttttctggtcttaagatca

SEQ ID NO: 3006158 - DNA, 25 bp, Homo sapien
gggtacttctgccattgtcatggat

SEQ ID NO: 3006159 - DNA, 25 bp, Homo sapien
tcatggatgctgtgttgctcagcaa

SEQ ID NO: 3006160 - DNA, 25 bp, Homo sapien
catcttgcctggccgagtggttgag

SEQ ID NO: 3006161 - DNA, 25 bp, Homo sapien
tccagctgatgtgttgacgaggctc

SEQ ID NO: 3006162 - DNA, 25 bp, Homo sapien
gtgcctggcctatttcttgattata

SEQ ID NO: 3006163 - DNA, 25 bp, Homo sapien
cgtgcctggcctatttcttgattat

SEQ ID NO: 3006164 - DNA, 25 bp, Homo sapien
ccgtgcctggcctatttcttgatta

SEQ ID NO: 3006165 - DNA, 25 bp, Homo sapien
aaatacgtcactcctctcgttagga

SEQ ID NO: 3006166 - DNA, 25 bp, Homo sapien
taaaaacggtgatgaaaatacgtca

SEQ ID NO: 3006167 - DNA, 25 bp, Homo sapien
gtctgtttgtacaacaggtatgctc

SEQ ID NO: 3006168 - DNA, 25 bp, Homo sapien
tattttacccacagcttaacatcct

SEQ ID NO: 3006169 - DNA, 25 bp, Homo sapien
ttacagcgtaggcacgtgtttccac

SEQ ID NO: 3006170 - DNA, 25 bp, Homo sapien
tgtttcccgtgaactgcagcgaaga

SEQ ID NO: 3006171 - DNA, 25 bp, Homo sapien
tgcgagcggactcaggcttgtttcc

SEQ ID NO: 3006172 - DNA, 25 bp, Homo sapien
gggagcccagcgtttatttacagct

SEQ ID NO: 3006173 - DNA, 25 bp, Homo sapien
gaagatcccagaacagcaagggcag

SEQ ID NO: 3006174 - DNA, 25 bp, Homo sapien
gcttagctgagaacccaattgtagg

SEQ ID NO: 3006175 - DNA, 25 bp, Homo sapien
ggcgctatctcgtctaccttccagg

SEQ ID NO: 3006176 - DNA, 25 bp, Homo sapien
taccgcccgctttactcggagtctg

SEQ ID NO: 3006177 - DNA, 25 bp, Homo sapien
caggcagctcccaaagcaaggtagg

SEQ ID NO: 3006178 - DNA, 25 bp, Homo sapien
gaccctgcacagagggatcttcaga

SEQ ID NO: 3006179 - DNA, 25 bp, Homo sapien
tgggcccttgcaatccagatccctg

SEQ ID NO: 3006180 - DNA, 25 bp, Homo sapien
ccagaaggcgaaagtgctcttatag

SEQ ID NO: 3006181 - DNA, 25 bp, Homo sapien
cgaaagtgctcttataggaagatgc

SEQ ID NO: 3006182 - DNA, 25 bp, Homo sapien
cagacactgcccctaaaggcatgct

SEQ ID NO: 3006183 - DNA, 25 bp, Homo sapien
gggtcccactaaggccggcacgcag

SEQ ID NO: 3006184 - DNA, 25 bp, Homo sapien
ggcatgctccaaccccacgggtccc

SEQ ID NO: 3006185 - DNA, 25 bp, Homo sapien
agcccacacgccagacttgcttcat

SEQ ID NO: 3006186 - DNA, 25 bp, Homo sapien
tttcacagaatggtcagtccccggt

SEQ ID NO: 3006187 - DNA, 25 bp, Homo sapien
cccagaggtgggtatgacagactac

SEQ ID NO: 3006188 - DNA, 25 bp, Homo sapien
gagaatcatcatcggcactccaggg

SEQ ID NO: 3006189 - DNA, 25 bp, Homo sapien
cagaaaccagttgagagaggccgct

SEQ ID NO: 3006190 - DNA, 25 bp, Homo sapien
cattccagaggcgggtggccttgtt

SEQ ID NO: 3006191 - DNA, 25 bp, Homo sapien
tccagaggcgggtggccttgtttgg

SEQ ID NO: 3006192 - DNA, 25 bp, Homo sapien
ccagaggcgggtggccttgtttggg

SEQ ID NO: 3006193 - DNA, 25 bp, Homo sapien
ccacattccagaggcgggtggcctt

SEQ ID NO: 3006194 - DNA, 25 bp, Homo sapien
tacaggtctcgggtgaattcacaca

SEQ ID NO: 3006195 - DNA, 25 bp, Homo sapien
gggcatttccacttccgagcgtaca

SEQ ID NO: 3006196 - DNA, 25 bp, Homo sapien
tggtgcagtacactcaacaggctgt

SEQ ID NO: 3006197 - DNA, 25 bp, Homo sapien
gagttgtcgccaatgtcgggagcca

SEQ ID NO: 3006198 - DNA, 25 bp, Homo sapien
tgaaaagtgtgaagcgtcctgagac

SEQ ID NO: 3006199 - DNA, 25 bp, Homo sapien
gaacaagctctgtgtaagctccggg

SEQ ID NO: 3006200 - DNA, 25 bp, Homo sapien
gaggagttccgctaccagagaagca

SEQ ID NO: 3006201 - DNA, 25 bp, Homo sapien
aagctccgggtggattctgtcctac

SEQ ID NO: 3006202 - DNA, 25 bp, Homo sapien
aggtaatcctgcagcacgccaagct

SEQ ID NO: 3006203 - DNA, 25 bp, Homo sapien
ctgtgccgcacagcggagaaggtgg

SEQ ID NO: 3006204 - DNA, 25 bp, Homo sapien
tggtcgtccgtggttagggccagca

SEQ ID NO: 3006205 - DNA, 25 bp, Homo sapien
cgcacagcggagaaggtggtcgtcc

SEQ ID NO: 3006206 - DNA, 25 bp, Homo sapien
ctgtgagtgacagcgccagatgcgc

SEQ ID NO: 3006207 - DNA, 25 bp, Homo sapien
gggacacctgcttgcgaaagcagaa

SEQ ID NO: 3006208 - DNA, 25 bp, Homo sapien
gaagcagaaataacccatcgtttta

SEQ ID NO: 3006209 - DNA, 25 bp, Homo sapien
agaagcctctcatgggcggacgcta

SEQ ID NO: 3006210 - DNA, 25 bp, Homo sapien
tcaagggctgatcccgggcagtttc

SEQ ID NO: 3006211 - DNA, 25 bp, Homo sapien
tgttgtcaagggctgatcccgggca

SEQ ID NO: 3006212 - DNA, 25 bp, Homo sapien
tgtcaagggctgatcccgggcagtt

SEQ ID NO: 3006213 - DNA, 25 bp, Homo sapien
cccccattggctctaggcctgacaa

SEQ ID NO: 3006214 - DNA, 25 bp, Homo sapien
cactcaggctcggatgaggcagcag

SEQ ID NO: 3006215 - DNA, 25 bp, Homo sapien
agcaaacgcacatggaggcaccggg

SEQ ID NO: 3006216 - DNA, 25 bp, Homo sapien
gtggcctgtcgagaccctggccact

SEQ ID NO: 3006217 - DNA, 25 bp, Homo sapien
ggagaggcgagagcctcagactctc

SEQ ID NO: 3006218 - DNA, 25 bp, Homo sapien
tctcggtgacgaagaagagctcagt

SEQ ID NO: 3006219 - DNA, 25 bp, Homo sapien
aggatgccgggctgcgtcacgtcct

SEQ ID NO: 3006220 - DNA, 25 bp, Homo sapien
gcacggttctcggtgacgaagaaga

SEQ ID NO: 3006221 - DNA, 25 bp, Homo sapien
ctcaaacaggccgtactccatgtgg

SEQ ID NO: 3006222 - DNA, 25 bp, Homo sapien
cttcaacagcgcaaggtcacacagg

SEQ ID NO: 3006223 - DNA, 25 bp, Homo sapien
ttcaacagcgcaaggtcacacaggt

SEQ ID NO: 3006224 - DNA, 25 bp, Homo sapien
gcagcatcgcacaatcctcagaagt

SEQ ID NO: 3006225 - DNA, 25 bp, Homo sapien
tgggagatgaggcacgaccctttct

SEQ ID NO: 3006226 - DNA, 25 bp, Homo sapien
ttaatcgttgatggccagtctggcg

SEQ ID NO: 3006227 - DNA, 25 bp, Homo sapien
ccaaatttttgccaatgggagatga

SEQ ID NO: 3006228 - DNA, 25 bp, Homo sapien
gtgaagcggtaatacagagtgtctc

SEQ ID NO: 3006229 - DNA, 25 bp, Homo sapien
aggtgtccggccgtcacggtgaatc

SEQ ID NO: 3006230 - DNA, 25 bp, Homo sapien
atgtcggaggtgaagcggtaataca

SEQ ID NO: 3006231 - DNA, 25 bp, Homo sapien
cccactcggtgttgctcatgtcgga

SEQ ID NO: 3006232 - DNA, 25 bp, Homo sapien
ggcacacaaggatcagaggcccatc

SEQ ID NO: 3006233 - DNA, 25 bp, Homo sapien
ctaggcacacaaggatcagaggccc

SEQ ID NO: 3006234 - DNA, 25 bp, Homo sapien
acaaggatcagaggcccatcaggaa

SEQ ID NO: 3006235 - DNA, 25 bp, Homo sapien
acacaaggatcagaggcccatcagg

SEQ ID NO: 3006236 - DNA, 25 bp, Homo sapien
tgtcggtcttgctggaagtcactgc

SEQ ID NO: 3006237 - DNA, 25 bp, Homo sapien
tgagacccgctgaagctgtgtcggt

SEQ ID NO: 3006238 - DNA, 25 bp, Homo sapien
tgctggacatggctaactcgtcaca

SEQ ID NO: 3006239 - DNA, 25 bp, Homo sapien
tttgattgagaggtagatggcacca

SEQ ID NO: 3006240 - DNA, 25 bp, Homo sapien
tgttgttgttatacgggtgtttcga

SEQ ID NO: 3006241 - DNA, 25 bp, Homo sapien
tatacgggtgtttcgactccctcac

SEQ ID NO: 3006242 - DNA, 25 bp, Homo sapien
ctcgaagttggtgttgttgttatac

SEQ ID NO: 3006243 - DNA, 25 bp, Homo sapien
catggtccccagcatgtcctctcgg

SEQ ID NO: 3006244 - DNA, 25 bp, Homo sapien
ttcagctggaaatcgcgctcagggc

SEQ ID NO: 3006245 - DNA, 25 bp, Homo sapien
tcaaaaaggagctaccgaatgtgcc

SEQ ID NO: 3006246 - DNA, 25 bp, Homo sapien
tgttctcagatggacaaagcaaggc

SEQ ID NO: 3006247 - DNA, 25 bp, Homo sapien
tagacctaggacgagcctctgtgac

SEQ ID NO: 3006248 - DNA, 25 bp, Homo sapien
ggaagaacctggtgggtgagcacaa

SEQ ID NO: 3006249 - DNA, 25 bp, Homo sapien
gcacaagctcagtctgcataactac

SEQ ID NO: 3006250 - DNA, 25 bp, Homo sapien
gaacctggtgggtgagcacaagctc

SEQ ID NO: 3006251 - DNA, 25 bp, Homo sapien
tgagcacaagctcagtctgcataac

SEQ ID NO: 3006252 - DNA, 25 bp, Homo sapien
aatgtaggtcatatgggcagggcca

SEQ ID NO: 3006253 - DNA, 25 bp, Homo sapien
cgttcactcggaagaggtagtcccg

SEQ ID NO: 3006254 - DNA, 25 bp, Homo sapien
tacggcgctgcttggcatagctctg

SEQ ID NO: 3006255 - DNA, 25 bp, Homo sapien
cagcttctgggtcacagggttcgat

SEQ ID NO: 3006256 - DNA, 25 bp, Homo sapien
gcatggcaggataatcatgtctgta

SEQ ID NO: 3006257 - DNA, 25 bp, Homo sapien
tgtatccacagctttggcgctctgt

SEQ ID NO: 3006258 - DNA, 25 bp, Homo sapien
cctttcatctgtggtgagctcatca

SEQ ID NO: 3006259 - DNA, 25 bp, Homo sapien
gctgagccagggaccgtatcctttc

SEQ ID NO: 3006260 - DNA, 25 bp, Homo sapien
tatatggcccggagaatgtgcagag

SEQ ID NO: 3006261 - DNA, 25 bp, Homo sapien
gaaataatcggtctttttcatctgc

SEQ ID NO: 3006262 - DNA, 25 bp, Homo sapien
ttcatctgcagttcgtatatggccc

SEQ ID NO: 3006263 - DNA, 25 bp, Homo sapien
ctccaggaagaaataatcggtcttt

SEQ ID NO: 3006264 - DNA, 25 bp, Homo sapien
gccaaagcgttgatctccttttttg

SEQ ID NO: 3006265 - DNA, 25 bp, Homo sapien
ccagctctaggtctccgtgctcagc

SEQ ID NO: 3006266 - DNA, 25 bp, Homo sapien
agaaacatattctggtgggctcatc

SEQ ID NO: 3006267 - DNA, 25 bp, Homo sapien
tgggctcatccaggccctcaagggg

SEQ ID NO: 3006268 - DNA, 25 bp, Homo sapien
tccctcctatgtggcggcagccttt

SEQ ID NO: 3006269 - DNA, 25 bp, Homo sapien
tttcctgggccgaaagttggcactg

SEQ ID NO: 3006270 - DNA, 25 bp, Homo sapien
gaaccacagtagttccgctaagaaa

SEQ ID NO: 3006271 - DNA, 25 bp, Homo sapien
tcctcttctggcaattgagagctgt

SEQ ID NO: 3006272 - DNA, 25 bp, Homo sapien
gtcataatccctatttccaacaggg

SEQ ID NO: 3006273 - DNA, 25 bp, Homo sapien
ttttcaacactgtactaaaggagtg

SEQ ID NO: 3006274 - DNA, 25 bp, Homo sapien
gaactcggtgatgcttctaactcct

SEQ ID NO: 3006275 - DNA, 25 bp, Homo sapien
tataatggttaatcatgtgtttcca

SEQ ID NO: 3006276 - DNA, 25 bp, Homo sapien
aagaggagcaggagtccctctcgtc

SEQ ID NO: 3006277 - DNA, 25 bp, Homo sapien
gaggagcaggagtccctctcgtctc

SEQ ID NO: 3006278 - DNA, 25 bp, Homo sapien
agcaggagtccctctcgtctcttac

SEQ ID NO: 3006279 - DNA, 25 bp, Homo sapien
ggagcaggagtccctctcgtctctt

SEQ ID NO: 3006280 - DNA, 25 bp, Homo sapien
cagcaacttcagcaaatcggtctga

SEQ ID NO: 3006281 - DNA, 25 bp, Homo sapien
gcacggatctcctcaaaaccgtgag

SEQ ID NO: 3006282 - DNA, 25 bp, Homo sapien
tgaaggaaagtagcacggatctcct

SEQ ID NO: 3006283 - DNA, 25 bp, Homo sapien
gcaaatcggtctgaaggaaagtagc

SEQ ID NO: 3006284 - DNA, 25 bp, Homo sapien
gctttgcagaaggtgactggcgata

SEQ ID NO: 3006285 - DNA, 25 bp, Homo sapien
caagttgcttctactgcctcgggac

SEQ ID NO: 3006286 - DNA, 25 bp, Homo sapien
actggcgataaaggcaaagtgctgg

SEQ ID NO: 3006287 - DNA, 25 bp, Homo sapien
tgttttatacaatcctttcagggcc

SEQ ID NO: 3006288 - DNA, 25 bp, Homo sapien
tgcttcaagatgatcacattatggg

SEQ ID NO: 3006289 - DNA, 25 bp, Homo sapien
cagccctgttcttctcagtaaagtg

SEQ ID NO: 3006290 - DNA, 25 bp, Homo sapien
cgagttttgacatcaacaatcacag

SEQ ID NO: 3006291 - DNA, 25 bp, Homo sapien
ttatccatataaacgcagcgggttc

SEQ ID NO: 3006292 - DNA, 25 bp, Homo sapien
tggcagctgcttgatgcagtggtct

SEQ ID NO: 3006293 - DNA, 25 bp, Homo sapien
tggcaatgacatcacgccacagtgg

SEQ ID NO: 3006294 - DNA, 25 bp, Homo sapien
cacagtggggcactgttgagtgacc

SEQ ID NO: 3006295 - DNA, 25 bp, Homo sapien
ttgagtgaccgcaggatctctgcca

SEQ ID NO: 3006296 - DNA, 25 bp, Homo sapien
tcagcagccagtgtcgagactgctc

SEQ ID NO: 3006297 - DNA, 25 bp, Homo sapien
cacagttttaatgtgggttgacagc

SEQ ID NO: 3006298 - DNA, 25 bp, Homo sapien
gtagcacaccgaaattaatcaacag

SEQ ID NO: 3006299 - DNA, 25 bp, Homo sapien
ttagaggagcgaggaccaaggctac

SEQ ID NO: 3006300 - DNA, 25 bp, Homo sapien
tgaaacatgagtggaaggacgtgct

SEQ ID NO: 3006301 - DNA, 25 bp, Homo sapien
cctgcgtttgagatgacaacctgaa

SEQ ID NO: 3006302 - DNA, 25 bp, Homo sapien
aggacgtgctccaggtctatcaggg

SEQ ID NO: 3006303 - DNA, 25 bp, Homo sapien
ctctgctggcaaaagacggataatt

SEQ ID NO: 3006304 - DNA, 25 bp, Homo sapien
gggtgtcacagtccaagaactcaga

SEQ ID NO: 3006305 - DNA, 25 bp, Homo sapien
gaaggcgtctttctgacatggcagc

SEQ ID NO: 3006306 - DNA, 25 bp, Homo sapien
cccaagcagggtatggaatttccat

SEQ ID NO: 3006307 - DNA, 25 bp, Homo sapien
gaactcagaaggcatctaggcaggg

SEQ ID NO: 3006308 - DNA, 25 bp, Homo sapien
gcaaccttggctccctatgacttcg

SEQ ID NO: 3006309 - DNA, 25 bp, Homo sapien
caaactagtgaaacttgagtaggga

SEQ ID NO: 3006310 - DNA, 25 bp, Homo sapien
cattaattctgatcctcctgccata

SEQ ID NO: 3006311 - DNA, 25 bp, Homo sapien
tagggagtaagcattagatggcagc

SEQ ID NO: 3006312 - DNA, 25 bp, Homo sapien
cgactttaagggaggtaacatggct

SEQ ID NO: 3006313 - DNA, 25 bp, Homo sapien
taagggaggtaacatggctgctagt

SEQ ID NO: 3006314 - DNA, 25 bp, Homo sapien
gactttaagggaggtaacatggctg

SEQ ID NO: 3006315 - DNA, 25 bp, Homo sapien
agtaatcccaaaatcctcttctggg

SEQ ID NO: 3006316 - DNA, 25 bp, Homo sapien
ctgagatgacacttctgaatcttca

SEQ ID NO: 3006317 - DNA, 25 bp, Homo sapien
tgagatgacacttctgaatcttcag

SEQ ID NO: 3006318 - DNA, 25 bp, Homo sapien
gatgacacttctgaatcttcagcat

SEQ ID NO: 3006319 - DNA, 25 bp, Homo sapien
gagatgacacttctgaatcttcagc

SEQ ID NO: 3006320 - DNA, 25 bp, Homo sapien
aacaaactttcagaatttgcctgca

SEQ ID NO: 3006321 - DNA, 25 bp, Homo sapien
acaaactttcagaatttgcctgcat

SEQ ID NO: 3006322 - DNA, 25 bp, Homo sapien
aaacaaactttcagaatttgcctgc

SEQ ID NO: 3006323 - DNA, 25 bp, Homo sapien
aaaacaaactttcagaatttgcctg

SEQ ID NO: 3006324 - DNA, 25 bp, Homo sapien
aaccactgcactgtcccctgtgctg

SEQ ID NO: 3006325 - DNA, 25 bp, Homo sapien
aagtaaaccactgcactgtcccctg

SEQ ID NO: 3006326 - DNA, 25 bp, Homo sapien
gaggcaagtaaaccactgcactgtc

SEQ ID NO: 3006327 - DNA, 25 bp, Homo sapien
ctccacatgtatgaagaggcaagta

SEQ ID NO: 3006328 - DNA, 25 bp, Homo sapien
gatttcctcatgaacagctctcttt

SEQ ID NO: 3006329 - DNA, 25 bp, Homo sapien
cttgaaatctacaggtctgatttcc

SEQ ID NO: 3006330 - DNA, 25 bp, Homo sapien
gaaggatccttcgataatgatacac

SEQ ID NO: 3006331 - DNA, 25 bp, Homo sapien
gaagtcctgtaggtgggctagcatc

SEQ ID NO: 3006332 - DNA, 25 bp, Homo sapien
tgtgtagtaaagaatcgtcatttac

SEQ ID NO: 3006333 - DNA, 25 bp, Homo sapien
ttctgtgtagtaaagaatcgtcatt

SEQ ID NO: 3006334 - DNA, 25 bp, Homo sapien
gattctgtgtagtaaagaatcgtca

SEQ ID NO: 3006335 - DNA, 25 bp, Homo sapien
tctgtgtagtaaagaatcgtcattt

SEQ ID NO: 3006336 - DNA, 25 bp, Homo sapien
tgacgctccggtgggcacagtgact

SEQ ID NO: 3006337 - DNA, 25 bp, Homo sapien
gctcgagtccccatctggcaataca

SEQ ID NO: 3006338 - DNA, 25 bp, Homo sapien
tagggcctgatcttctaggctcgag

SEQ ID NO: 3006339 - DNA, 25 bp, Homo sapien
cacagtgactggtagggcctgatct

SEQ ID NO: 3006340 - DNA, 25 bp, Homo sapien
cagcaactgagggctggttttggtt

SEQ ID NO: 3006341 - DNA, 25 bp, Homo sapien
caactgagggctggttttggtttct

SEQ ID NO: 3006342 - DNA, 25 bp, Homo sapien
tggtttctgtgcattgggaagtcac

SEQ ID NO: 3006343 - DNA, 25 bp, Homo sapien
tttggtttctgtgcattgggaagtc

SEQ ID NO: 3006344 - DNA, 25 bp, Homo sapien
agtccccgacgagctgcatgcactg

SEQ ID NO: 3006345 - DNA, 25 bp, Homo sapien
gccaggtgggcgctatagagagcca

SEQ ID NO: 3006346 - DNA, 25 bp, Homo sapien
cagccaggagtagttatggatatat

SEQ ID NO: 3006347 - DNA, 25 bp, Homo sapien
tggatgagcctctgccggtcactga

SEQ ID NO: 3006348 - DNA, 25 bp, Homo sapien
gcagtggtcacaggtaaactccatg

SEQ ID NO: 3006349 - DNA, 25 bp, Homo sapien
aggagtatttcttcgctgcatagca

SEQ ID NO: 3006350 - DNA, 25 bp, Homo sapien
tatgatcaaaccctggcagtggtca

SEQ ID NO: 3006351 - DNA, 25 bp, Homo sapien
gcaaacattgcagttcatcctccgg

SEQ ID NO: 3006352 - DNA, 25 bp, Homo sapien
tgcagacagcggtatcgatgccagg

SEQ ID NO: 3006353 - DNA, 25 bp, Homo sapien
gtccacatttaacaggtcacagtag

SEQ ID NO: 3006354 - DNA, 25 bp, Homo sapien
caagttttgcagagatccatgtcgc

SEQ ID NO: 3006355 - DNA, 25 bp, Homo sapien
cagtagcgagcaatgaacatgtgca

SEQ ID NO: 3006356 - DNA, 25 bp, Homo sapien
tgggctattttttcataccaggcct

SEQ ID NO: 3006357 - DNA, 25 bp, Homo sapien
cctgggctattttttcataccaggc

SEQ ID NO: 3006358 - DNA, 25 bp, Homo sapien
ttcctgggctattttttcataccag

SEQ ID NO: 3006359 - DNA, 25 bp, Homo sapien
gggctattttttcataccaggcctc

SEQ ID NO: 3006360 - DNA, 25 bp, Homo sapien
gctgtctgaacacaggataaggcag

SEQ ID NO: 3006361 - DNA, 25 bp, Homo sapien
catggacacttatattctcctgtga

SEQ ID NO: 3006362 - DNA, 25 bp, Homo sapien
aaggcgagatcattgggttcccagc

SEQ ID NO: 3006363 - DNA, 25 bp, Homo sapien
ctgaacacaggataaggcagggagc

SEQ ID NO: 3006364 - DNA, 25 bp, Homo sapien
gttgatagtaagtgtctcgaatttc

SEQ ID NO: 3006365 - DNA, 25 bp, Homo sapien
taggctactaaatcctttaactgct

SEQ ID NO: 3006366 - DNA, 25 bp, Homo sapien
aagtgtctcgaatttctttgtgtag

SEQ ID NO: 3006367 - DNA, 25 bp, Homo sapien
ctgtcatttaggctactaaatcctt

SEQ ID NO: 3006368 - DNA, 25 bp, Homo sapien
tttccttctggacctgtcctttgta

SEQ ID NO: 3006369 - DNA, 25 bp, Homo sapien
ttctggacctgtcctttgtacttac

SEQ ID NO: 3006370 - DNA, 25 bp, Homo sapien
atttacaatgatctttgctgttttc

SEQ ID NO: 3006371 - DNA, 25 bp, Homo sapien
ttatttacaatgatctttgctgttt

SEQ ID NO: 3006372 - DNA, 25 bp, Homo sapien
caacaggaaaagtatgaaaggtgga

SEQ ID NO: 3006373 - DNA, 25 bp, Homo sapien
gcccaagggattctgcacagtgctg

SEQ ID NO: 3006374 - DNA, 25 bp, Homo sapien
cacagtgctgagttatcttcaggac

SEQ ID NO: 3006375 - DNA, 25 bp, Homo sapien
tctgacaggtcagaagttccaacag

SEQ ID NO: 3006376 - DNA, 25 bp, Homo sapien
acacaatgcaagtcaggaacaccca

SEQ ID NO: 3006377 - DNA, 25 bp, Homo sapien
ggaacacccagaaaactcttgagct

SEQ ID NO: 3006378 - DNA, 25 bp, Homo sapien
gggcagacggaaaatatccccgcca

SEQ ID NO: 3006379 - DNA, 25 bp, Homo sapien
gccctgatgccatatatcaaagagg

SEQ ID NO: 3006380 - DNA, 25 bp, Homo sapien
cataatcttgacttactgtagcctc

SEQ ID NO: 3006381 - DNA, 25 bp, Homo sapien
gccttccaactttgagcaattctcc

SEQ ID NO: 3006382 - DNA, 25 bp, Homo sapien
gagttaagtggcataatcttgactt

SEQ ID NO: 3006383 - DNA, 25 bp, Homo sapien
cctctgccttccaactttgagcaat

SEQ ID NO: 3006384 - DNA, 25 bp, Homo sapien
cgagagcgactgatccttaatgaag

SEQ ID NO: 3006385 - DNA, 25 bp, Homo sapien
gacgtccttcagcacagggtatttc

SEQ ID NO: 3006386 - DNA, 25 bp, Homo sapien
tcttttgaacttatgcccgtgggca

SEQ ID NO: 3006387 - DNA, 25 bp, Homo sapien
gagcttgtcctctgacgcttgttga

SEQ ID NO: 3006388 - DNA, 25 bp, Homo sapien
cagtagcttctgaactatgtttttc

SEQ ID NO: 3006389 - DNA, 25 bp, Homo sapien
tcagggttcacctcagtagcttctg

SEQ ID NO: 3006390 - DNA, 25 bp, Homo sapien
ctctcagggttcacctcagtagctt

SEQ ID NO: 3006391 - DNA, 25 bp, Homo sapien
tagcttctgaactatgtttttcttc

SEQ ID NO: 3006392 - DNA, 25 bp, Homo sapien
ccatattcgaatcccatctgccaag

SEQ ID NO: 3006393 - DNA, 25 bp, Homo sapien
caaggaataaacctgggcaaactct

SEQ ID NO: 3006394 - DNA, 25 bp, Homo sapien
cagggctattttgcccccactgttg

SEQ ID NO: 3006395 - DNA, 25 bp, Homo sapien
taaacctgggcaaactcttcactca

SEQ ID NO: 3006396 - DNA, 25 bp, Homo sapien
gcaaaggtggcgttcacagcttgat

SEQ ID NO: 3006397 - DNA, 25 bp, Homo sapien
aaaagttctgaatatggcccacaga

SEQ ID NO: 3006398 - DNA, 25 bp, Homo sapien
tagtggaaccagcaactatatctgt

SEQ ID NO: 3006399 - DNA, 25 bp, Homo sapien
tgcgatacaccagagcagcaaaggt

SEQ ID NO: 3006400 - DNA, 25 bp, Homo sapien
tgggaactagagtcagataggtaag

SEQ ID NO: 3006401 - DNA, 25 bp, Homo sapien
ctgtcacattgaggagttagacttc

SEQ ID NO: 3006402 - DNA, 25 bp, Homo sapien
cagataggtaaggtgaaaggagact

SEQ ID NO: 3006403 - DNA, 25 bp, Homo sapien
tcacattgaggagttagacttcacc

SEQ ID NO: 3006404 - DNA, 25 bp, Homo sapien
ctccttactattccggtgtgggtga

SEQ ID NO: 3006405 - DNA, 25 bp, Homo sapien
cctgaagacaggtttccacagtggg

SEQ ID NO: 3006406 - DNA, 25 bp, Homo sapien
catttttgcctgaggtactaccatg

SEQ ID NO: 3006407 - DNA, 25 bp, Homo sapien
ccacagtggggagcttaggactaat

SEQ ID NO: 3006408 - DNA, 25 bp, Homo sapien
gcttaggactaatgccatttttgcc

SEQ ID NO: 3006409 - DNA, 25 bp, Homo sapien
cgggagacgaggagctgtaaatcca

SEQ ID NO: 3006410 - DNA, 25 bp, Homo sapien
gccccattcgttgtgactgctgtca

SEQ ID NO: 3006411 - DNA, 25 bp, Homo sapien
gacttgagcgccatgcactgggaag

SEQ ID NO: 3006412 - DNA, 25 bp, Homo sapien
tgaaagaggaactgcaaccgaggac

SEQ ID NO: 3006413 - DNA, 25 bp, Homo sapien
tgccaacttttgtgtcatagcgtgt

SEQ ID NO: 3006414 - DNA, 25 bp, Homo sapien
tgtgtcatagcgtgttttccgacct

SEQ ID NO: 3006415 - DNA, 25 bp, Homo sapien
tatcagtgccaacttttgtgtcata

SEQ ID NO: 3006416 - DNA, 25 bp, Homo sapien
cttgggccatttatcagtgccaact

SEQ ID NO: 3006417 - DNA, 25 bp, Homo sapien
gtcggtaaattccagataatcatac

SEQ ID NO: 3006418 - DNA, 25 bp, Homo sapien
tagcgtcggtaaattccagataatc

SEQ ID NO: 3006419 - DNA, 25 bp, Homo sapien
gcgtcggtaaattccagataatcat

SEQ ID NO: 3006420 - DNA, 25 bp, Homo sapien
ctagcgtcggtaaattccagataat

SEQ ID NO: 3006421 - DNA, 25 bp, Homo sapien
tcgtccacgtatgtaacaccacagg

SEQ ID NO: 3006422 - DNA, 25 bp, Homo sapien
attttcatagttgtgggcagattcc

SEQ ID NO: 3006423 - DNA, 25 bp, Homo sapien
tgcccctgggctaacaaagacggat

SEQ ID NO: 3006424 - DNA, 25 bp, Homo sapien
ggctgttcctgttgccaggtctcaa

SEQ ID NO: 3006425 - DNA, 25 bp, Homo sapien
gcggctcaagtgctgactcgagtta

SEQ ID NO: 3006426 - DNA, 25 bp, Homo sapien
gacttggactgacattcacccttgt

SEQ ID NO: 3006427 - DNA, 25 bp, Homo sapien
tgtgtcccatcactcctgagagaga

SEQ ID NO: 3006428 - DNA, 25 bp, Homo sapien
gctgaccaggccacatcgacttgga

SEQ ID NO: 3006429 - DNA, 25 bp, Homo sapien
ctctctcaagagcacgcagtgtggg

SEQ ID NO: 3006430 - DNA, 25 bp, Homo sapien
tgtgaggacgctgaactctctcaag

SEQ ID NO: 3006431 - DNA, 25 bp, Homo sapien
cagtgtgggatgtctaaagtgcaga

SEQ ID NO: 3006432 - DNA, 25 bp, Homo sapien
gggccactacagagcttcttcagga

SEQ ID NO: 3006433 - DNA, 25 bp, Homo sapien
gagaaaagggattccaaaatcgctc

SEQ ID NO: 3006434 - DNA, 25 bp, Homo sapien
gctctcatgcttgccagaaactggc

SEQ ID NO: 3006435 - DNA, 25 bp, Homo sapien
cagttgacgagctgccattgaaaac

SEQ ID NO: 3006436 - DNA, 25 bp, Homo sapien
ctatggtttttccactgtactgtga

SEQ ID NO: 3006437 - DNA, 25 bp, Homo sapien
ttggctccagagtccgtgctcttca

SEQ ID NO: 3006438 - DNA, 25 bp, Homo sapien
ccttggacggaccagaacagggaga

SEQ ID NO: 3006439 - DNA, 25 bp, Homo sapien
ggccccactgagcattaacagctcg

SEQ ID NO: 3006440 - DNA, 25 bp, Homo sapien
tccacggcaagatctttggctccag

SEQ ID NO: 3006441 - DNA, 25 bp, Homo sapien
aagaaggccgcctggatccttgtca

SEQ ID NO: 3006442 - DNA, 25 bp, Homo sapien
agacgagagtgtccatgaccgccag

SEQ ID NO: 3006443 - DNA, 25 bp, Homo sapien
tctcgagcagcaacagagacgagag

SEQ ID NO: 3006444 - DNA, 25 bp, Homo sapien
atcttggccaggtcgttcttctcag

SEQ ID NO: 3006445 - DNA, 25 bp, Homo sapien
gcttgtgctcctgctcggtgacatt

SEQ ID NO: 3006446 - DNA, 25 bp, Homo sapien
aaaatgctgtatctagtttcctttg

SEQ ID NO: 3006447 - DNA, 25 bp, Homo sapien
gcctttgtgcatcccatagaccact

SEQ ID NO: 3006448 - DNA, 25 bp, Homo sapien
cattggctgttgcattagaaacgcc

SEQ ID NO: 3006449 - DNA, 25 bp, Homo sapien
ataattctattagttgcttgactac

SEQ ID NO: 3006450 - DNA, 25 bp, Homo sapien
ccccattgagaagggtattcctgac

SEQ ID NO: 3006451 - DNA, 25 bp, Homo sapien
ttcctgacttcttgttttagtatct

SEQ ID NO: 3006452 - DNA, 25 bp, Homo sapien
catggtgaagagatggttccgtcgg

SEQ ID NO: 3006453 - DNA, 25 bp, Homo sapien
ccgtcgggtctgtcgattaggaaag

SEQ ID NO: 3006454 - DNA, 25 bp, Homo sapien
acagagtctccatccaccttgtcca

SEQ ID NO: 3006455 - DNA, 25 bp, Homo sapien
cacagagtctccatccaccttgtcc

SEQ ID NO: 3006456 - DNA, 25 bp, Homo sapien
gagtctccatccaccttgtccacca

SEQ ID NO: 3006457 - DNA, 25 bp, Homo sapien
gggcacagagtctccatccaccttg

SEQ ID NO: 3006458 - DNA, 25 bp, Homo sapien
tcctcagaagcagccagtacatctc

SEQ ID NO: 3006459 - DNA, 25 bp, Homo sapien
ggcagcctctactcctttagggctt

SEQ ID NO: 3006460 - DNA, 25 bp, Homo sapien
ctcctcagaagcagccagtacatct

SEQ ID NO: 3006461 - DNA, 25 bp, Homo sapien
cttggcagcctctactcctttaggg

SEQ ID NO: 3006462 - DNA, 25 bp, Homo sapien
ctgcagcacagagaagcagctctgg

SEQ ID NO: 3006463 - DNA, 25 bp, Homo sapien
cagcacagagaagcagctctggagt

SEQ ID NO: 3006464 - DNA, 25 bp, Homo sapien
gcacagagaagcagctctggagtag

SEQ ID NO: 3006465 - DNA, 25 bp, Homo sapien
tgcagcacagagaagcagctctgga

SEQ ID NO: 3006466 - DNA, 25 bp, Homo sapien
gggcagagacgcattcttccctcgg

SEQ ID NO: 3006467 - DNA, 25 bp, Homo sapien
ggcagagacgcattcttccctcggg

SEQ ID NO: 3006468 - DNA, 25 bp, Homo sapien
aagcagggtttgggcagagacgcat

SEQ ID NO: 3006469 - DNA, 25 bp, Homo sapien
cccgcgaagtccagaaaagatttat

SEQ ID NO: 3006470 - DNA, 25 bp, Homo sapien
tctgcaaatcaagacccgcgaagtc

SEQ ID NO: 3006471 - DNA, 25 bp, Homo sapien
tccagaaaagatttatattttaagc

SEQ ID NO: 3006472 - DNA, 25 bp, Homo sapien
tcaagacccgcgaagtccagaaaag

SEQ ID NO: 3006473 - DNA, 25 bp, Homo sapien
ggcaggttttatcagttggtgttca

SEQ ID NO: 3006474 - DNA, 25 bp, Homo sapien
gaatgccgtctaacaactgaggaag

SEQ ID NO: 3006475 - DNA, 25 bp, Homo sapien
gcccatcctattggcttccgcaggg

SEQ ID NO: 3006476 - DNA, 25 bp, Homo sapien
cagtacaatgcccatcctattggct

SEQ ID NO: 3006477 - DNA, 25 bp, Homo sapien
caggtcatgggcgagctgctggata

SEQ ID NO: 3006478 - DNA, 25 bp, Homo sapien
gatggtcaagccttgcactcccaag

SEQ ID NO: 3006479 - DNA, 25 bp, Homo sapien
tgcagtgtgcacaggtgacgctctg

SEQ ID NO: 3006480 - DNA, 25 bp, Homo sapien
ttctgctcttgcaggccggaggtac

SEQ ID NO: 3006481 - DNA, 25 bp, Homo sapien
ctgacgggtgcagaggaacttcacc

SEQ ID NO: 3006482 - DNA, 25 bp, Homo sapien
tgacgggtgcagaggaacttcacca

SEQ ID NO: 3006483 - DNA, 25 bp, Homo sapien
gacgggtgcagaggaacttcaccat

SEQ ID NO: 3006484 - DNA, 25 bp, Homo sapien
tcaaaccagccaataggatcatcct

SEQ ID NO: 3006485 - DNA, 25 bp, Homo sapien
cagttcaaaccagccaataggatca

SEQ ID NO: 3006486 - DNA, 25 bp, Homo sapien
tggcaactctgcactgttgcagctt

SEQ ID NO: 3006487 - DNA, 25 bp, Homo sapien
ttggcaactctgcactgttgcagct

SEQ ID NO: 3006488 - DNA, 25 bp, Homo sapien
aaggtcatcagatgagcaaccaatc

SEQ ID NO: 3006489 - DNA, 25 bp, Homo sapien
ccaaggtcatcagatgagcaaccaa

SEQ ID NO: 3006490 - DNA, 25 bp, Homo sapien
tccaaggtcatcagatgagcaacca

SEQ ID NO: 3006491 - DNA, 25 bp, Homo sapien
ctccaaggtcatcagatgagcaacc

SEQ ID NO: 3006492 - DNA, 25 bp, Homo sapien
tgttcttccgcacaaaatttatctg

SEQ ID NO: 3006493 - DNA, 25 bp, Homo sapien
tccgcacaaaatttatctgaagatg

SEQ ID NO: 3006494 - DNA, 25 bp, Homo sapien
tttatctgaagatgagttataggca

SEQ ID NO: 3006495 - DNA, 25 bp, Homo sapien
tgagttataggcaaacaccaaccca

SEQ ID NO: 3006496 - DNA, 25 bp, Homo sapien
ttcttatctgtgtaacttggaaggc

SEQ ID NO: 3006497 - DNA, 25 bp, Homo sapien
cataattcttatctgtgtaacttgg

SEQ ID NO: 3006498 - DNA, 25 bp, Homo sapien
aacttggaaggcagattcagttccg

SEQ ID NO: 3006499 - DNA, 25 bp, Homo sapien
tcagttccggtagaaaaaatagtgc

SEQ ID NO: 3006500 - DNA, 25 bp, Homo sapien
tagaacactggtagtgatgcacatg

SEQ ID NO: 3006501 - DNA, 25 bp, Homo sapien
aacataccctttcggtcgtctctgc

SEQ ID NO: 3006502 - DNA, 25 bp, Homo sapien
gaatcactgggtgtcctagccaaca

SEQ ID NO: 3006503 - DNA, 25 bp, Homo sapien
cctactggcttagtggctgagaaag

SEQ ID NO: 3006504 - DNA, 25 bp, Homo sapien
tgaagagtcaactggagaggtttac

SEQ ID NO: 3006505 - DNA, 25 bp, Homo sapien
catcacatgcctgaagagtcaactg

SEQ ID NO: 3006506 - DNA, 25 bp, Homo sapien
catcccttgtccacggttcaacaag

SEQ ID NO: 3006507 - DNA, 25 bp, Homo sapien
cttgtccacggttcaacaaggaggt

SEQ ID NO: 3006508 - DNA, 25 bp, Homo sapien
tgaggcatcatactgcgtgtccaga

SEQ ID NO: 3006509 - DNA, 25 bp, Homo sapien
tatttgaggagcaggttctgtctga

SEQ ID NO: 3006510 - DNA, 25 bp, Homo sapien
tgatggtgcatagagagctcatgac

SEQ ID NO: 3006511 - DNA, 25 bp, Homo sapien
ctgacgccatggacaagatgaggga

SEQ ID NO: 3006512 - DNA, 25 bp, Homo sapien
aaaagccagaagagtcagttctacc

SEQ ID NO: 3006513 - DNA, 25 bp, Homo sapien
gcaaaagccagaagagtcagttcta

SEQ ID NO: 3006514 - DNA, 25 bp, Homo sapien
gccagaagagtcagttctacctctg

SEQ ID NO: 3006515 - DNA, 25 bp, Homo sapien
cagaagagtcagttctacctctggg

SEQ ID NO: 3006516 - DNA, 25 bp, Homo sapien
taagcaaagagcaaaaacttttcac

SEQ ID NO: 3006517 - DNA, 25 bp, Homo sapien
ctataagcaaagagcaaaaactttt

SEQ ID NO: 3006518 - DNA, 25 bp, Homo sapien
tataagcaaagagcaaaaacttttc

SEQ ID NO: 3006519 - DNA, 25 bp, Homo sapien
agcaaagagcaaaaacttttcactt

SEQ ID NO: 3006520 - DNA, 25 bp, Homo sapien
tggaggcatgtgccgcagcgccttc

SEQ ID NO: 3006521 - DNA, 25 bp, Homo sapien
gagtggaggcatgtgccgcagcgcc

SEQ ID NO: 3006522 - DNA, 25 bp, Homo sapien
ggaaagttgagaaatctgtagatcc

SEQ ID NO: 3006523 - DNA, 25 bp, Homo sapien
tcttccagcacattaggggagagga

SEQ ID NO: 3006524 - DNA, 25 bp, Homo sapien
tgaattctagtgtcgcagccatcgc

SEQ ID NO: 3006525 - DNA, 25 bp, Homo sapien
ggatttgtctccatagaagccgtca

SEQ ID NO: 3006526 - DNA, 25 bp, Homo sapien
tgcagcactgtctggacaaaggcgg

SEQ ID NO: 3006527 - DNA, 25 bp, Homo sapien
aagccgtcaccagagatgtcagcag

SEQ ID NO: 3006528 - DNA, 25 bp, Homo sapien
gtggcatgtagctctggtcagtggc

SEQ ID NO: 3006529 - DNA, 25 bp, Homo sapien
ctgaagatcgctggcattcctccct

SEQ ID NO: 3006530 - DNA, 25 bp, Homo sapien
gtgcacatctcggacttcctgaaga

SEQ ID NO: 3006531 - DNA, 25 bp, Homo sapien
gagctgactgacgttggcattttcc

SEQ ID NO: 3006532 - DNA, 25 bp, Homo sapien
gctactgacttgagtttatccatct

SEQ ID NO: 3006533 - DNA, 25 bp, Homo sapien
tctatataagcatagcactttgcta

SEQ ID NO: 3006534 - DNA, 25 bp, Homo sapien
tctgccgagttggaggatgtttcta

SEQ ID NO: 3006535 - DNA, 25 bp, Homo sapien
ggacttctagttagatctccagggc

SEQ ID NO: 3006536 - DNA, 25 bp, Homo sapien
cagtgctccagcatcgggtagggca

SEQ ID NO: 3006537 - DNA, 25 bp, Homo sapien
ccttttgtaccagctgatccagaga

SEQ ID NO: 3006538 - DNA, 25 bp, Homo sapien
caggaagcgcagtatcattgacgag

SEQ ID NO: 3006539 - DNA, 25 bp, Homo sapien
tgacgagtgaatatcaaggccctcc

SEQ ID NO: 3006540 - DNA, 25 bp, Homo sapien
tttggggaagccacagtagtttcca

SEQ ID NO: 3006541 - DNA, 25 bp, Homo sapien
tggtgttttggggaagccacagtag

SEQ ID NO: 3006542 - DNA, 25 bp, Homo sapien
gaagccacagtagtttccacatccc

SEQ ID NO: 3006543 - DNA, 25 bp, Homo sapien
ttggtgttttggggaagccacagta

SEQ ID NO: 3006544 - DNA, 25 bp, Homo sapien
cattgctgccctagtgaccctaagt

SEQ ID NO: 3006545 - DNA, 25 bp, Homo sapien
tagctcaatacgtcactcagcagtg

SEQ ID NO: 3006546 - DNA, 25 bp, Homo sapien
cctaagtattatgacaccaagtgca

SEQ ID NO: 3006547 - DNA, 25 bp, Homo sapien
taagctagagggtcaagagcaatca

SEQ ID NO: 3006548 - DNA, 25 bp, Homo sapien
tccccctgaagattagctccactgg

SEQ ID NO: 3006549 - DNA, 25 bp, Homo sapien
gagagcaggcctgtagttgtctgat

SEQ ID NO: 3006550 - DNA, 25 bp, Homo sapien
tgttctcggcatcaactgtcccatc

SEQ ID NO: 3006551 - DNA, 25 bp, Homo sapien
gctcagctccccctgaagattagct

SEQ ID NO: 3006552 - DNA, 25 bp, Homo sapien
ctttaattgtaatctagcttgtctc

SEQ ID NO: 3006553 - DNA, 25 bp, Homo sapien
taattgtaatctagcttgtctcttg

SEQ ID NO: 3006554 - DNA, 25 bp, Homo sapien
aattgtaatctagcttgtctcttgc

SEQ ID NO: 3006555 - DNA, 25 bp, Homo sapien
tttaattgtaatctagcttgtctct

SEQ ID NO: 3006556 - DNA, 25 bp, Homo sapien
gcccagctctaaatgatcttaagga

SEQ ID NO: 3006557 - DNA, 25 bp, Homo sapien
gattataggcaagttacgatgccca

SEQ ID NO: 3006558 - DNA, 25 bp, Homo sapien
aaagggcgacagcagtgttgcatgt

SEQ ID NO: 3006559 - DNA, 25 bp, Homo sapien
gatatgatgtcaagattcacttcaa

SEQ ID NO: 3006560 - DNA, 25 bp, Homo sapien
tcatacccttcaggcaaatgactgg

SEQ ID NO: 3006561 - DNA, 25 bp, Homo sapien
caggccaccgggacatttgagtaaa

SEQ ID NO: 3006562 - DNA, 25 bp, Homo sapien
tgagtccaccagttgacaagccaga

SEQ ID NO: 3006563 - DNA, 25 bp, Homo sapien
tcagaaaaagcaactaggagaggcc

SEQ ID NO: 3006564 - DNA, 25 bp, Homo sapien
tgtgcctttcatacggcaaatccct

SEQ ID NO: 3006565 - DNA, 25 bp, Homo sapien
aactccatgctgctggtaactgctt

SEQ ID NO: 3006566 - DNA, 25 bp, Homo sapien
cctttgccaggcgaattcttccagc

SEQ ID NO: 3006567 - DNA, 25 bp, Homo sapien
gccttgttgtgatgaagcctttctc

SEQ ID NO: 3006568 - DNA, 25 bp, Homo sapien
ccagccatcccttaccaaagacctc

SEQ ID NO: 3006569 - DNA, 25 bp, Homo sapien
gccagccatcccttaccaaagacct

SEQ ID NO: 3006570 - DNA, 25 bp, Homo sapien
ctgtgtacaatggtagtgcaggcag

SEQ ID NO: 3006571 - DNA, 25 bp, Homo sapien
tgtacaatggtagtgcaggcaggtg

SEQ ID NO: 3006572 - DNA, 25 bp, Homo sapien
aggcaggtggctggcggcctcacag

SEQ ID NO: 3006573 - DNA, 25 bp, Homo sapien
gtgcaggcaggtggctggcggcctc

SEQ ID NO: 3006574 - DNA, 25 bp, Homo sapien
tctctccaaactgttcgagaatctg

SEQ ID NO: 3006575 - DNA, 25 bp, Homo sapien
gagtagcgtcaatcaactgcacaaa

SEQ ID NO: 3006576 - DNA, 25 bp, Homo sapien
tgttcgagaatctgatagaagatct

SEQ ID NO: 3006577 - DNA, 25 bp, Homo sapien
aagatctccagagtagcgtcaatca

SEQ ID NO: 3006578 - DNA, 25 bp, Homo sapien
agagagacatatgggcttgtccagc

SEQ ID NO: 3006579 - DNA, 25 bp, Homo sapien
tcttcagagcaaggacggcctgatg

SEQ ID NO: 3006580 - DNA, 25 bp, Homo sapien
gctcttcagagcaaggacggcctga

SEQ ID NO: 3006581 - DNA, 25 bp, Homo sapien
ctgcattacaacatacagagagaga

SEQ ID NO: 3006582 - DNA, 25 bp, Homo sapien
cccgcagtcgcctgccggccctgac

SEQ ID NO: 3006583 - DNA, 25 bp, Homo sapien
cccatccccgcagtcgcctgccggc

SEQ ID NO: 3006584 - DNA, 25 bp, Homo sapien
tccccgcagtcgcctgccggccctg

SEQ ID NO: 3006585 - DNA, 25 bp, Homo sapien
catccccgcagtcgcctgccggccc

SEQ ID NO: 3006586 - DNA, 25 bp, Homo sapien
tcactgctgtgactcggagcgttcc

SEQ ID NO: 3006587 - DNA, 25 bp, Homo sapien
agagtgacagactcttcgccgcggc

SEQ ID NO: 3006588 - DNA, 25 bp, Homo sapien
tcccggaactgctccagagtgacag

SEQ ID NO: 3006589 - DNA, 25 bp, Homo sapien
gctgccgcttcgtcttcactgctgt

SEQ ID NO: 3006590 - DNA, 25 bp, Homo sapien
ggtctccgtcttgggcgcctggctc

SEQ ID NO: 3006591 - DNA, 25 bp, Homo sapien
ggggtctccgtcttgggcgcctggc

SEQ ID NO: 3006592 - DNA, 25 bp, Homo sapien
gtctccgtcttgggcgcctggctct

SEQ ID NO: 3006593 - DNA, 25 bp, Homo sapien
cgtcttgggcgcctggctctgcagc

SEQ ID NO: 3006594 - DNA, 25 bp, Homo sapien
cgcggaggagacgacggcggcccct

SEQ ID NO: 3006595 - DNA, 25 bp, Homo sapien
ggacgcggaggagacgacggcggcc

SEQ ID NO: 3006596 - DNA, 25 bp, Homo sapien
cggaggagacgacggcggcccctgc

SEQ ID NO: 3006597 - DNA, 25 bp, Homo sapien
gaggagacgacggcggcccctgcgg

SEQ ID NO: 3006598 - DNA, 25 bp, Homo sapien
cgccatctttgttggggctgacaac

SEQ ID NO: 3006599 - DNA, 25 bp, Homo sapien
tgccgccatctttgttggggctgac

SEQ ID NO: 3006600 - DNA, 25 bp, Homo sapien
gctgccgccatctttgttggggctg

SEQ ID NO: 3006601 - DNA, 25 bp, Homo sapien
gtcattccgtagcctccgctgccgc

SEQ ID NO: 3006602 - DNA, 25 bp, Homo sapien
tggaaaaagtcgcagacagcgagct

SEQ ID NO: 3006603 - DNA, 25 bp, Homo sapien
gccaggaatacagataaaacgagag

SEQ ID NO: 3006604 - DNA, 25 bp, Homo sapien
gatgacgtcacgctcggcgtctcgg

SEQ ID NO: 3006605 - DNA, 25 bp, Homo sapien
gagcttttcgccagtgccaggaata

SEQ ID NO: 3006606 - DNA, 25 bp, Homo sapien
gtggctcatgccccttaccgtggct

SEQ ID NO: 3006607 - DNA, 25 bp, Homo sapien
cacctgcccagtactggtcagcttt

SEQ ID NO: 3006608 - DNA, 25 bp, Homo sapien
ccttaccgtggctcggcgttgtggt

SEQ ID NO: 3006609 - DNA, 25 bp, Homo sapien
ggtcagcttttcaacactattccct

SEQ ID NO: 3006610 - DNA, 25 bp, Homo sapien
caataacaaattagtgtgggttgat

SEQ ID NO: 3006611 - DNA, 25 bp, Homo sapien
caaccaaaagcctgctgagttgatt

SEQ ID NO: 3006612 - DNA, 25 bp, Homo sapien
gggccaatacagtacgaggcaataa

SEQ ID NO: 3006613 - DNA, 25 bp, Homo sapien
gaaaagcttttgcttgtatggatac

SEQ ID NO: 3006614 - DNA, 25 bp, Homo sapien
tcggtgccattttcactcctccata

SEQ ID NO: 3006615 - DNA, 25 bp, Homo sapien
gattcggtgccattttcactcctcc

SEQ ID NO: 3006616 - DNA, 25 bp, Homo sapien
ctgattcggtgccattttcactcct

SEQ ID NO: 3006617 - DNA, 25 bp, Homo sapien
gccattttcactcctccatatttct

SEQ ID NO: 3006618 - DNA, 25 bp, Homo sapien
ctgactgatgcaagagccctgcgtg

SEQ ID NO: 3006619 - DNA, 25 bp, Homo sapien
tgatctctgactgatgcaagagccc

SEQ ID NO: 3006620 - DNA, 25 bp, Homo sapien
gctctgttccttgctcagttgagaa

SEQ ID NO: 3006621 - DNA, 25 bp, Homo sapien
ggacagacttggctggcttcagcag

SEQ ID NO: 3006622 - DNA, 25 bp, Homo sapien
tagccttgagagtacttcctactgc

SEQ ID NO: 3006623 - DNA, 25 bp, Homo sapien
ctagccttgagagtacttcctactg

SEQ ID NO: 3006624 - DNA, 25 bp, Homo sapien
gatttcttccggtggcagcagatac

SEQ ID NO: 3006625 - DNA, 25 bp, Homo sapien
cagatttcttccggtggcagcagat

SEQ ID NO: 3006626 - DNA, 25 bp, Homo sapien
ttttaatgcttattggtacttctgc

SEQ ID NO: 3006627 - DNA, 25 bp, Homo sapien
cttattggtacttctgcattagaag

SEQ ID NO: 3006628 - DNA, 25 bp, Homo sapien
caaatgtcttattaaagtttccact

SEQ ID NO: 3006629 - DNA, 25 bp, Homo sapien
cattagaagtaactacaaatgtctt

SEQ ID NO: 3006630 - DNA, 25 bp, Homo sapien
taatcgttccagtctattgccgcag

SEQ ID NO: 3006631 - DNA, 25 bp, Homo sapien
gaaacaatgctgataagcgccgtgg

SEQ ID NO: 3006632 - DNA, 25 bp, Homo sapien
gacttccaaagtaaggtggcgcaca

SEQ ID NO: 3006633 - DNA, 25 bp, Homo sapien
cattcagggacaagagtgaggacac

SEQ ID NO: 3006634 - DNA, 25 bp, Homo sapien
ccgcacaggcttgttcagatcaaac

SEQ ID NO: 3006635 - DNA, 25 bp, Homo sapien
gaaaccccacccagagtcagtacat

SEQ ID NO: 3006636 - DNA, 25 bp, Homo sapien
cacccagagtcagtacatcaaaaca

SEQ ID NO: 3006637 - DNA, 25 bp, Homo sapien
aacaaatgttgcaaacccgcacagg

SEQ ID NO: 3006638 - DNA, 25 bp, Homo sapien
tataataggaatctccttggtcgag

SEQ ID NO: 3006639 - DNA, 25 bp, Homo sapien
tcgagcatttatggcaaagaagacg

SEQ ID NO: 3006640 - DNA, 25 bp, Homo sapien
tggcaaagaagacgtccgcagtgac

SEQ ID NO: 3006641 - DNA, 25 bp, Homo sapien
tctccttggtcgagcatttatggca

SEQ ID NO: 3006642 - DNA, 25 bp, Homo sapien
ttggaagatcaagagcagctcaggc

SEQ ID NO: 3006643 - DNA, 25 bp, Homo sapien
ggcgcccgcaatgctactctggcaa

SEQ ID NO: 3006644 - DNA, 25 bp, Homo sapien
ggagcgccaacgacagactctgctt

SEQ ID NO: 3006645 - DNA, 25 bp, Homo sapien
ttcctggcacgtgaggacaaccgca

SEQ ID NO: 3006646 - DNA, 25 bp, Homo sapien
gcgcatcacttgagggcacgggttt

SEQ ID NO: 3006647 - DNA, 25 bp, Homo sapien
cgcatcacttgagggcacgggtttc

SEQ ID NO: 3006648 - DNA, 25 bp, Homo sapien
catcacttgagggcacgggtttcaa

SEQ ID NO: 3006649 - DNA, 25 bp, Homo sapien
cacttgagggcacgggtttcaagat

SEQ ID NO: 3006650 - DNA, 25 bp, Homo sapien
agccccttagttctcggcaaagcgg

SEQ ID NO: 3006651 - DNA, 25 bp, Homo sapien
tcattttaatgggaacagcccctta

SEQ ID NO: 3006652 - DNA, 25 bp, Homo sapien
gctcatctcagctttggtgcaggca

SEQ ID NO: 3006653 - DNA, 25 bp, Homo sapien
ggcacaccatgagggcagtagctca

SEQ ID NO: 3006654 - DNA, 25 bp, Homo sapien
atctctgttcctcagtaggatcctt

SEQ ID NO: 3006655 - DNA, 25 bp, Homo sapien
tggtcaaggtttgcccatcaatgtg

SEQ ID NO: 3006656 - DNA, 25 bp, Homo sapien
taggatccttgggtgtgctcatctc

SEQ ID NO: 3006657 - DNA, 25 bp, Homo sapien
catttggtcaaggtttgcccatcaa

SEQ ID NO: 3006658 - DNA, 25 bp, Homo sapien
agcggcagtcccctcgctccttgcc

SEQ ID NO: 3006659 - DNA, 25 bp, Homo sapien
ctccttgccagtgacgctggggtct

SEQ ID NO: 3006660 - DNA, 25 bp, Homo sapien
ccttgccagtgacgctggggtctta

SEQ ID NO: 3006661 - DNA, 25 bp, Homo sapien
gcaatgacatcagcggcagtcccct

SEQ ID NO: 3006662 - DNA, 25 bp, Homo sapien
ctcatagcagtaggagccgtcacac

SEQ ID NO: 3006663 - DNA, 25 bp, Homo sapien
tgtttgcgagtggtgactccgaacc

SEQ ID NO: 3006664 - DNA, 25 bp, Homo sapien
cacggaggctccttggacagcatat

SEQ ID NO: 3006665 - DNA, 25 bp, Homo sapien
gaacctggcagtgcactcatagcag

SEQ ID NO: 3006666 - DNA, 25 bp, Homo sapien
gataggttctaagtggttcagggcc

SEQ ID NO: 3006667 - DNA, 25 bp, Homo sapien
cgctgccacatgacataggtgacga

SEQ ID NO: 3006668 - DNA, 25 bp, Homo sapien
caggaacacagacccgtaagtgagg

SEQ ID NO: 3006669 - DNA, 25 bp, Homo sapien
tgacgaaggagcgataggttctaag

SEQ ID NO: 3006670 - DNA, 25 bp, Homo sapien
ccgaccggacgatggcgcggcacaa

SEQ ID NO: 3006671 - DNA, 25 bp, Homo sapien
caagttggcgttccctttcatgtat

SEQ ID NO: 3006672 - DNA, 25 bp, Homo sapien
gaagatgttgactccctggttgtta

SEQ ID NO: 3006673 - DNA, 25 bp, Homo sapien
ggttgttattcaccccgaggcgagc

SEQ ID NO: 3006674 - DNA, 25 bp, Homo sapien
cttgtccagaggataccccggcatg

SEQ ID NO: 3006675 - DNA, 25 bp, Homo sapien
cggcatgcattctaggaagagatca

SEQ ID NO: 3006676 - DNA, 25 bp, Homo sapien
gaagagatcaaagatggccgctgca

SEQ ID NO: 3006677 - DNA, 25 bp, Homo sapien
tgccgtctgcatccggcttgtccag

SEQ ID NO: 3006678 - DNA, 25 bp, Homo sapien
gaatgtatctgccatggccatcaca

SEQ ID NO: 3006679 - DNA, 25 bp, Homo sapien
taggaatgtatctgccatggccatc

SEQ ID NO: 3006680 - DNA, 25 bp, Homo sapien
atctgccatggccatcacacacaaa

SEQ ID NO: 3006681 - DNA, 25 bp, Homo sapien
tgtatctgccatggccatcacacac

SEQ ID NO: 3006682 - DNA, 25 bp, Homo sapien
aaaggcttcggcgtccactgtgcac

SEQ ID NO: 3006683 - DNA, 25 bp, Homo sapien
aaggcttcggcgtccactgtgcact

SEQ ID NO: 3006684 - DNA, 25 bp, Homo sapien
tgagattaaaggcttcggcgtccac

SEQ ID NO: 3006685 - DNA, 25 bp, Homo sapien
gattaaaggcttcggcgtccactgt

SEQ ID NO: 3006686 - DNA, 25 bp, Homo sapien
agaacccggatgttgttgagccggc

SEQ ID NO: 3006687 - DNA, 25 bp, Homo sapien
ccgtgcatgacagcaagatgaagag

SEQ ID NO: 3006688 - DNA, 25 bp, Homo sapien
aacccggatgttgttgagccggccg

SEQ ID NO: 3006689 - DNA, 25 bp, Homo sapien
gttgagccggccgtgcatgacagca

SEQ ID NO: 3006690 - DNA, 25 bp, Homo sapien
ggcagtctggcgatgcttggttaat

SEQ ID NO: 3006691 - DNA, 25 bp, Homo sapien
acggcagcaaagtccacgccattct

SEQ ID NO: 3006692 - DNA, 25 bp, Homo sapien
cgttcactttggctcccgcaagaag

SEQ ID NO: 3006693 - DNA, 25 bp, Homo sapien
cacgccattctctaggaggactgag

SEQ ID NO: 3006694 - DNA, 25 bp, Homo sapien
ttgaagttcattacatgaacagtca

SEQ ID NO: 3006695 - DNA, 25 bp, Homo sapien
gaaacagtgacaccaaggcgccaaa

SEQ ID NO: 3006696 - DNA, 25 bp, Homo sapien
ttagcggccagttctgcggcatgtg

SEQ ID NO: 3006697 - DNA, 25 bp, Homo sapien
caggagggaccagcgacagccagct

SEQ ID NO: 3006698 - DNA, 25 bp, Homo sapien
tgcctcagctcaaacacaatcaggt

SEQ ID NO: 3006699 - DNA, 25 bp, Homo sapien
tgatcaggaacagcacactttcaat

SEQ ID NO: 3006700 - DNA, 25 bp, Homo sapien
gaattcacattagcgtggacactga

SEQ ID NO: 3006701 - DNA, 25 bp, Homo sapien
tgcggacaataatttctgagcctgc

SEQ ID NO: 3006702 - DNA, 25 bp, Homo sapien
tcctggactcttgaattcacattag

SEQ ID NO: 3006703 - DNA, 25 bp, Homo sapien
tgtctgtctcgtacattcaaatgga

SEQ ID NO: 3006704 - DNA, 25 bp, Homo sapien
cctcggctgacttgttgttcttgaa

SEQ ID NO: 3006705 - DNA, 25 bp, Homo sapien
tctcgtttgagaatggcctcggctg

SEQ ID NO: 3006706 - DNA, 25 bp, Homo sapien
acaccgtgttggctgctgatggcca

SEQ ID NO: 3006707 - DNA, 25 bp, Homo sapien
tgtgcgttcacgttggcaccaaact

SEQ ID NO: 3006708 - DNA, 25 bp, Homo sapien
ctccagaagacactgtactgtctct

SEQ ID NO: 3006709 - DNA, 25 bp, Homo sapien
tctgggactgttcacgtcacagcca

SEQ ID NO: 3006710 - DNA, 25 bp, Homo sapien
cattggcgcctggttgtctgggact

SEQ ID NO: 3006711 - DNA, 25 bp, Homo sapien
tgtggagagatactggggactctca

SEQ ID NO: 3006712 - DNA, 25 bp, Homo sapien
taaaaagctgtggagagatactggg

SEQ ID NO: 3006713 - DNA, 25 bp, Homo sapien
tggagagatactggggactctcaga

SEQ ID NO: 3006714 - DNA, 25 bp, Homo sapien
aaagctgtggagagatactggggac

SEQ ID NO: 3006715 - DNA, 25 bp, Homo sapien
accccagcatgtggcatcacagcca

SEQ ID NO: 3006716 - DNA, 25 bp, Homo sapien
caggcggtgggctcgttgttttcat

SEQ ID NO: 3006717 - DNA, 25 bp, Homo sapien
tgtgcaggagcgtctgaaggcaccc

SEQ ID NO: 3006718 - DNA, 25 bp, Homo sapien
tttcatcaatggctctgtgcaggag

SEQ ID NO: 3006719 - DNA, 25 bp, Homo sapien
tccagattgtttgccaatgcaagcc

SEQ ID NO: 3006720 - DNA, 25 bp, Homo sapien
acagacatgtcagctcctcgggtgc

SEQ ID NO: 3006721 - DNA, 25 bp, Homo sapien
tgcatatggcatcaactacgagtgg

SEQ ID NO: 3006722 - DNA, 25 bp, Homo sapien
caactacgagtggaagctggtttct

SEQ ID NO: 3006723 - DNA, 25 bp, Homo sapien
gaagagtgcgctcttgctgtcctgc

SEQ ID NO: 3006724 - DNA, 25 bp, Homo sapien
cgacatggtgtcattgatggcggct

SEQ ID NO: 3006725 - DNA, 25 bp, Homo sapien
tagcgtctgcccatccgacatggtg

SEQ ID NO: 3006726 - DNA, 25 bp, Homo sapien
tgtatggccatgtgcagtagcgtct

SEQ ID NO: 3006727 - DNA, 25 bp, Homo sapien
tgtctgcagacatcagcggccccgg

SEQ ID NO: 3006728 - DNA, 25 bp, Homo sapien
cttcggacagctgtctgtctgcaga

SEQ ID NO: 3006729 - DNA, 25 bp, Homo sapien
cccacttcggacagctgtctgtctg

SEQ ID NO: 3006730 - DNA, 25 bp, Homo sapien
ccggccccacttcggacagctgtct

SEQ ID NO: 3006731 - DNA, 25 bp, Homo sapien
tctggtctcgggaatctttgaggct

SEQ ID NO: 3006732 - DNA, 25 bp, Homo sapien
ccggaatgatctgcaagttgttggt

SEQ ID NO: 3006733 - DNA, 25 bp, Homo sapien
gctgaagtccggaatgatctgcaag

SEQ ID NO: 3006734 - DNA, 25 bp, Homo sapien
cagcacagtctggtctcgggaatct

SEQ ID NO: 3006735 - DNA, 25 bp, Homo sapien
gatgacagacaccacatccggatgg

SEQ ID NO: 3006736 - DNA, 25 bp, Homo sapien
tccggatggttataggcgatcgcca

SEQ ID NO: 3006737 - DNA, 25 bp, Homo sapien
gctggtcagggatgcggcctccttt

SEQ ID NO: 3006738 - DNA, 25 bp, Homo sapien
tctgcagatggacgctgtccgccaa

SEQ ID NO: 3006739 - DNA, 25 bp, Homo sapien
ttgacatgggcaccgttggttgcca

SEQ ID NO: 3006740 - DNA, 25 bp, Homo sapien
accgttggttgccaggaaaagagct

SEQ ID NO: 3006741 - DNA, 25 bp, Homo sapien
catgggcaccgttggttgccaggaa

SEQ ID NO: 3006742 - DNA, 25 bp, Homo sapien
gtttctgtggttgacatgggcaccg

SEQ ID NO: 3006743 - DNA, 25 bp, Homo sapien
tccgactcctagttgatggttgctc

SEQ ID NO: 3006744 - DNA, 25 bp, Homo sapien
atactggagactcctagttgatggc

SEQ ID NO: 3006745 - DNA, 25 bp, Homo sapien
tgatggctgctctaatctggagact

SEQ ID NO: 3006746 - DNA, 25 bp, Homo sapien
ggctgctctaatctggagactccta

SEQ ID NO: 3006747 - DNA, 25 bp, Homo sapien
tgagctaccatgctttgggattaca

SEQ ID NO: 3006748 - DNA, 25 bp, Homo sapien
tttttcagtagcgacaggtttcagt

SEQ ID NO: 3006749 - DNA, 25 bp, Homo sapien
ttttcagtagcgacaggtttcagtc

SEQ ID NO: 3006750 - DNA, 25 bp, Homo sapien
aaaatgacaacccaggcttttactg

SEQ ID NO: 3006751 - DNA, 25 bp, Homo sapien
gcgagtcgccgcattaaataaatgg

SEQ ID NO: 3006752 - DNA, 25 bp, Homo sapien
gagtccaaagagtctgcgagtcgcc

SEQ ID NO: 3006753 - DNA, 25 bp, Homo sapien
tcagtttcagggacttgatgtctgc

SEQ ID NO: 3006754 - DNA, 25 bp, Homo sapien
tcgccccttcgggaggcacgtgctt

SEQ ID NO: 3006755 - DNA, 25 bp, Homo sapien
cagaccccagcgtcgccccttcggg

SEQ ID NO: 3006756 - DNA, 25 bp, Homo sapien
ccagcgtcgccccttcgggaggcac

SEQ ID NO: 3006757 - DNA, 25 bp, Homo sapien
agcgtcgccccttcgggaggcacgt

SEQ ID NO: 3006758 - DNA, 25 bp, Homo sapien
ctgtcgccgtgtcaggtgcgtctgt

SEQ ID NO: 3006759 - DNA, 25 bp, Homo sapien
gcaaagctgttctcatcaaatgaag

SEQ ID NO: 3006760 - DNA, 25 bp, Homo sapien
gccctcgtggtctttgagttctaaa

SEQ ID NO: 3006761 - DNA, 25 bp, Homo sapien
gacactgtgatatgctgcactgcca

SEQ ID NO: 3006762 - DNA, 25 bp, Homo sapien
aaccgccttctcacttgtgcgtgtc

SEQ ID NO: 3006763 - DNA, 25 bp, Homo sapien
tctcacttgtgcgtgtctccctacg

SEQ ID NO: 3006764 - DNA, 25 bp, Homo sapien
cacttgtgcgtgtctccctacgtac

SEQ ID NO: 3006765 - DNA, 25 bp, Homo sapien
tcacaaccgccttctcacttgtgcg

SEQ ID NO: 3006766 - DNA, 25 bp, Homo sapien
ctgcagcagctgactgaacacatat

SEQ ID NO: 3006767 - DNA, 25 bp, Homo sapien
cacatattcattcccggccatgatg

SEQ ID NO: 3006768 - DNA, 25 bp, Homo sapien
gcagcagctgactgaacacatattc

SEQ ID NO: 3006769 - DNA, 25 bp, Homo sapien
ctgaacacatattcattcccggcca

SEQ ID NO: 3006770 - DNA, 25 bp, Homo sapien
ggccccattcttaatgaggaaagtg

SEQ ID NO: 3006771 - DNA, 25 bp, Homo sapien
tagcagcgttgacaaaggccccatt

SEQ ID NO: 3006772 - DNA, 25 bp, Homo sapien
agacatcacatctgctgagtgtttc

SEQ ID NO: 3006773 - DNA, 25 bp, Homo sapien
gaagggcctctgcaatctgcgccat

SEQ ID NO: 3006774 - DNA, 25 bp, Homo sapien
gaaggttgcaatctttcccagtatc

SEQ ID NO: 3006775 - DNA, 25 bp, Homo sapien
tcattcttctgctcccgttttgggt

SEQ ID NO: 3006776 - DNA, 25 bp, Homo sapien
gactggttagggctattgggttcta

SEQ ID NO: 3006777 - DNA, 25 bp, Homo sapien
ggcagtaaagcactgcaggcagcag

SEQ ID NO: 3006778 - DNA, 25 bp, Homo sapien
tcgtgagagggctagatctaatgcc

SEQ ID NO: 3006779 - DNA, 25 bp, Homo sapien
taatgccagatctccgttatgatcc

SEQ ID NO: 3006780 - DNA, 25 bp, Homo sapien
gactaaccagcgtggtggcaatact

SEQ ID NO: 3006781 - DNA, 25 bp, Homo sapien
ggcaatactctccagtcgtcgtgag

SEQ ID NO: 3006782 - DNA, 25 bp, Homo sapien
agaaggtgggaatggccctcggctg

SEQ ID NO: 3006783 - DNA, 25 bp, Homo sapien
gagggcccgatctatctaaccacac

SEQ ID NO: 3006784 - DNA, 25 bp, Homo sapien
tctatctaaccacacaagtccttca

SEQ ID NO: 3006785 - DNA, 25 bp, Homo sapien
aagccgggggctatgagctaaggaa

SEQ ID NO: 3006786 - DNA, 25 bp, Homo sapien
cagcctgccgacatcctgattttgg

SEQ ID NO: 3006787 - DNA, 25 bp, Homo sapien
catcctgattttgggccagtgattc

SEQ ID NO: 3006788 - DNA, 25 bp, Homo sapien
tttgggccagtgattcctgtcctag

SEQ ID NO: 3006789 - DNA, 25 bp, Homo sapien
aagaagcacagcctgccgacatcct

SEQ ID NO: 3006790 - DNA, 25 bp, Homo sapien
ggatttgatcattttgtataacaac

SEQ ID NO: 3006791 - DNA, 25 bp, Homo sapien
tcaatcagatacaggaagaccacgt

SEQ ID NO: 3006792 - DNA, 25 bp, Homo sapien
tgtagcgggtactctgtcttggatt

SEQ ID NO: 3006793 - DNA, 25 bp, Homo sapien
ctgagcgctcatgctgctgaaatcc

SEQ ID NO: 3006794 - DNA, 25 bp, Homo sapien
gctagagtgctttgttgacaccctc

SEQ ID NO: 3006795 - DNA, 25 bp, Homo sapien
caggtgccagagaggtcactttcca

SEQ ID NO: 3006796 - DNA, 25 bp, Homo sapien
actttccatggaactacgtccccag

SEQ ID NO: 3006797 - DNA, 25 bp, Homo sapien
gtaacaagagaaaaccaggtgccag

SEQ ID NO: 3006798 - DNA, 25 bp, Homo sapien
cattcactagagacataacaccctt

SEQ ID NO: 3006799 - DNA, 25 bp, Homo sapien
tagaagcgaatacagttcctgacat

SEQ ID NO: 3006800 - DNA, 25 bp, Homo sapien
ggcattcagctcctctgccgtctgg

SEQ ID NO: 3006801 - DNA, 25 bp, Homo sapien
tagttcatcagtgtgctggcattca

SEQ ID NO: 3006802 - DNA, 25 bp, Homo sapien
gtatggtttcacgagatttcctgac

SEQ ID NO: 3006803 - DNA, 25 bp, Homo sapien
gacgactagtatggtttcacgagat

SEQ ID NO: 3006804 - DNA, 25 bp, Homo sapien
cacagacgactagtatggtttcacg

SEQ ID NO: 3006805 - DNA, 25 bp, Homo sapien
cagtcacagacgactagtatggttt

SEQ ID NO: 3006806 - DNA, 25 bp, Homo sapien
gacagacagactttcacccgaaggg

SEQ ID NO: 3006807 - DNA, 25 bp, Homo sapien
tgacatgatttacgcaaccaaggaa

SEQ ID NO: 3006808 - DNA, 25 bp, Homo sapien
taggatctccagagtgccatttgcc

SEQ ID NO: 3006809 - DNA, 25 bp, Homo sapien
ccaggcagcctaatacacagtatga

SEQ ID NO: 3006810 - DNA, 25 bp, Homo sapien
aaacgtcccacaaactgctgtatag

SEQ ID NO: 3006811 - DNA, 25 bp, Homo sapien
tcatatcactcttgagtggatgtgg

SEQ ID NO: 3006812 - DNA, 25 bp, Homo sapien
ccaaatatcatacaccgaacatgta

SEQ ID NO: 3006813 - DNA, 25 bp, Homo sapien
gacttttaaagtataacatcaagca

SEQ ID NO: 3006814 - DNA, 25 bp, Homo sapien
ggtgcttgaatatatctgctgtgac

SEQ ID NO: 3006815 - DNA, 25 bp, Homo sapien
gaggtgcttgaatatatctgctgtg

SEQ ID NO: 3006816 - DNA, 25 bp, Homo sapien
tctgaggtgcttgaatatatctgct

SEQ ID NO: 3006817 - DNA, 25 bp, Homo sapien
catctgaggtgcttgaatatatctg

SEQ ID NO: 3006818 - DNA, 25 bp, Homo sapien
ctccctgaggagctgtagctgaaac

SEQ ID NO: 3006819 - DNA, 25 bp, Homo sapien
ctctccctgaggagctgtagctgaa

SEQ ID NO: 3006820 - DNA, 25 bp, Homo sapien
tctccctgaggagctgtagctgaaa

SEQ ID NO: 3006821 - DNA, 25 bp, Homo sapien
catctgtatagatccagcgaagcat

SEQ ID NO: 3006822 - DNA, 25 bp, Homo sapien
gaactccagctcatctgtatagatc

SEQ ID NO: 3006823 - DNA, 25 bp, Homo sapien
gtttcatcagttcagtcaggaacac

SEQ ID NO: 3006824 - DNA, 25 bp, Homo sapien
cagttcagtcaggaacacatcatcc

SEQ ID NO: 3006825 - DNA, 25 bp, Homo sapien
aatagattattttgagctctgagag

SEQ ID NO: 3006826 - DNA, 25 bp, Homo sapien
taaaccaaatctgcaataagccaac

SEQ ID NO: 3006827 - DNA, 25 bp, Homo sapien
acccaaaagcagtatgaggattaag

SEQ ID NO: 3006828 - DNA, 25 bp, Homo sapien
gaatctttgggcatgggactcagct

SEQ ID NO: 3006829 - DNA, 25 bp, Homo sapien
cgatgtttcgtttttgccactctca

SEQ ID NO: 3006830 - DNA, 25 bp, Homo sapien
aactgaggaacattaacactgtctg

SEQ ID NO: 3006831 - DNA, 25 bp, Homo sapien
tcagagagcagcgatgtttcgtttt

SEQ ID NO: 3006832 - DNA, 25 bp, Homo sapien
cattttggtggcagtcgatatttca

SEQ ID NO: 3006833 - DNA, 25 bp, Homo sapien
ctgtcactgcgggctgccaggacaa

SEQ ID NO: 3006834 - DNA, 25 bp, Homo sapien
caggtccaactctttagtggaagac

SEQ ID NO: 3006835 - DNA, 25 bp, Homo sapien
gtggaagacaagttagccagactcc

SEQ ID NO: 3006836 - DNA, 25 bp, Homo sapien
agacaagttagccagactccagctg

SEQ ID NO: 3006837 - DNA, 25 bp, Homo sapien
taatcttcttaaaacgccaccctga

SEQ ID NO: 3006838 - DNA, 25 bp, Homo sapien
tacttcctagaagaccaagtccaaa

SEQ ID NO: 3006839 - DNA, 25 bp, Homo sapien
tgattatgacagtccccaaactgga

SEQ ID NO: 3006840 - DNA, 25 bp, Homo sapien
aacacacagctttacttcctagaag

SEQ ID NO: 3006841 - DNA, 25 bp, Homo sapien
agagcgcagcgcttctctgtctccg

SEQ ID NO: 3006842 - DNA, 25 bp, Homo sapien
gacggctgatgaaggactcgctgct

SEQ ID NO: 3006843 - DNA, 25 bp, Homo sapien
tcgtagaggtctgccacgatggcca

SEQ ID NO: 3006844 - DNA, 25 bp, Homo sapien
gtttgcctgcgcagccaagagagcg

SEQ ID NO: 3006845 - DNA, 25 bp, Homo sapien
tgtaaaggctgtgataacattctat

SEQ ID NO: 3006846 - DNA, 25 bp, Homo sapien
gactttatacctattctgctttaac

SEQ ID NO: 3006847 - DNA, 25 bp, Homo sapien
gaaatgattgtaaaggctgtgataa

SEQ ID NO: 3006848 - DNA, 25 bp, Homo sapien
tgctttaactatgtccattagataa

SEQ ID NO: 3006849 - DNA, 25 bp, Homo sapien
tagcttgcacctaccgtgaaatacg

SEQ ID NO: 3006850 - DNA, 25 bp, Homo sapien
tacagttggtggcatgacttacaca

SEQ ID NO: 3006851 - DNA, 25 bp, Homo sapien
ccgtgtatagcagtgacaattgggc

SEQ ID NO: 3006852 - DNA, 25 bp, Homo sapien
tctttcaaaagctcaccgtgtatag

SEQ ID NO: 3006853 - DNA, 25 bp, Homo sapien
cggcatcgcgggagggacgttgtca

SEQ ID NO: 3006854 - DNA, 25 bp, Homo sapien
ccggcaatcaagagcctcccgtgct

SEQ ID NO: 3006855 - DNA, 25 bp, Homo sapien
ggcccgagaagctccggagaggcta

SEQ ID NO: 3006856 - DNA, 25 bp, Homo sapien
gttgtcataggaaccgcgctccgga

SEQ ID NO: 3006857 - DNA, 25 bp, Homo sapien
gccatgtctggcccggcactgcctg

SEQ ID NO: 3006858 - DNA, 25 bp, Homo sapien
cgccatgtctggcccggcactgcct

SEQ ID NO: 3006859 - DNA, 25 bp, Homo sapien
tcgggtatttgcactctagaaataa

SEQ ID NO: 3006860 - DNA, 25 bp, Homo sapien
tatcgggtatttgcactctagaaat

SEQ ID NO: 3006861 - DNA, 25 bp, Homo sapien
tatttatcgggtatttgcactctag

SEQ ID NO: 3006862 - DNA, 25 bp, Homo sapien
tatatttatcgggtatttgcactct

SEQ ID NO: 3006863 - DNA, 25 bp, Homo sapien
ctccgagtttgtaaggaagagccct

SEQ ID NO: 3006864 - DNA, 25 bp, Homo sapien
aactccgtatgaactatttgtaagg

SEQ ID NO: 3006865 - DNA, 25 bp, Homo sapien
ttagctgaataagaggtctgactcc

SEQ ID NO: 3006866 - DNA, 25 bp, Homo sapien
gaagagcccttaatagtcgctagtg

SEQ ID NO: 3006867 - DNA, 25 bp, Homo sapien
ggtattggcgcattttcccgtctgt

SEQ ID NO: 3006868 - DNA, 25 bp, Homo sapien
cctgggcaggtattggcgcattttc

SEQ ID NO: 3006869 - DNA, 25 bp, Homo sapien
taacttactaaatgacccctgggca

SEQ ID NO: 3006870 - DNA, 25 bp, Homo sapien
tcccgtctgtttagaggacagaggt

SEQ ID NO: 3006871 - DNA, 25 bp, Homo sapien
ctctgagttaaaacggtgcatggcc

SEQ ID NO: 3006872 - DNA, 25 bp, Homo sapien
ccacgtactggaaatctaaagagca

SEQ ID NO: 3006873 - DNA, 25 bp, Homo sapien
taatgttctaataagtgctcactcg

SEQ ID NO: 3006874 - DNA, 25 bp, Homo sapien
gctcactcgaaggttataaatcaca

SEQ ID NO: 3006875 - DNA, 25 bp, Homo sapien
taacgcttcagagtagaggacaggg

SEQ ID NO: 3006876 - DNA, 25 bp, Homo sapien
gatgacatctccgacagaggaaggg

SEQ ID NO: 3006877 - DNA, 25 bp, Homo sapien
tgtggagacgcactcatgcctggct

SEQ ID NO: 3006878 - DNA, 25 bp, Homo sapien
gattgtattccaagtccctggaggg

SEQ ID NO: 3006879 - DNA, 25 bp, Homo sapien
ttaataccaggcaactgaagaggga

SEQ ID NO: 3006880 - DNA, 25 bp, Homo sapien
tagaaagcctgtagctgtgcatgct

SEQ ID NO: 3006881 - DNA, 25 bp, Homo sapien
taatgactgggatcaagagctcaca

SEQ ID NO: 3006882 - DNA, 25 bp, Homo sapien
cacagagcagagatgcacgaattct

SEQ ID NO: 3006883 - DNA, 25 bp, Homo sapien
caagtaattgctcattaagtatttc

SEQ ID NO: 3006884 - DNA, 25 bp, Homo sapien
tgactccttcgaagtcatcattaaa

SEQ ID NO: 3006885 - DNA, 25 bp, Homo sapien
ttctggcaggtaagagataaaagca

SEQ ID NO: 3006886 - DNA, 25 bp, Homo sapien
aaggacaaagcacctagtgatgact

SEQ ID NO: 3006887 - DNA, 25 bp, Homo sapien
tacacgattcttattctactacaag

SEQ ID NO: 3006888 - DNA, 25 bp, Homo sapien
caagaaagcattatttggtacaagg

SEQ ID NO: 3006889 - DNA, 25 bp, Homo sapien
ccggatcatgttgtgctatgtacag

SEQ ID NO: 3006890 - DNA, 25 bp, Homo sapien
tcatctgacatgcttaaaggaatcc

SEQ ID NO: 3006891 - DNA, 25 bp, Homo sapien
tgataactggcatgttttattgcag

SEQ ID NO: 3006892 - DNA, 25 bp, Homo sapien
cagaagtccagcaataggtgggtag

SEQ ID NO: 3006893 - DNA, 25 bp, Homo sapien
ataactggcatgttttattgcagcc

SEQ ID NO: 3006894 - DNA, 25 bp, Homo sapien
tccagcaataggtgggtagagtgca

SEQ ID NO: 3006895 - DNA, 25 bp, Homo sapien
tacactgaaacccaagagatggcca

SEQ ID NO: 3006896 - DNA, 25 bp, Homo sapien
tgtaaatggcccttagcaaagcatg

SEQ ID NO: 3006897 - DNA, 25 bp, Homo sapien
gatcctgagaggtagaacgactgct

SEQ ID NO: 3006898 - DNA, 25 bp, Homo sapien
gacaacctccctacaagatcctgag

SEQ ID NO: 3006899 - DNA, 25 bp, Homo sapien
gccccacatctgcaactaagtaagg

SEQ ID NO: 3006900 - DNA, 25 bp, Homo sapien
ggcaaacagtctttacaggtcagta

SEQ ID NO: 3006901 - DNA, 25 bp, Homo sapien
taggaaacggattctgaggcagaga

SEQ ID NO: 3006902 - DNA, 25 bp, Homo sapien
tgtgctgagttacgcaatccgtagt

SEQ ID NO: 3006903 - DNA, 25 bp, Homo sapien
ttgaactcccatcatcaggtaatcc

SEQ ID NO: 3006904 - DNA, 25 bp, Homo sapien
aagtgtgagccgcggcacctgggct

SEQ ID NO: 3006905 - DNA, 25 bp, Homo sapien
tgagccgcggcacctgggctttttt

SEQ ID NO: 3006906 - DNA, 25 bp, Homo sapien
tgcctcagctcccacaagtgctagg

SEQ ID NO: 3006907 - DNA, 25 bp, Homo sapien
acaccttcagaaaacttctatagta

SEQ ID NO: 3006908 - DNA, 25 bp, Homo sapien
caccttcagaaaacttctatagtaa

SEQ ID NO: 3006909 - DNA, 25 bp, Homo sapien
gtgaagttactagctgctaaataaa

SEQ ID NO: 3006910 - DNA, 25 bp, Homo sapien
taagtgaagttactagctgctaaat

SEQ ID NO: 3006911 - DNA, 25 bp, Homo sapien
aataagtgaagttactagctgctaa

SEQ ID NO: 3006912 - DNA, 25 bp, Homo sapien
aagtgaagttactagctgctaaata

SEQ ID NO: 3006913 - DNA, 25 bp, Homo sapien
gctttttcttacacagcgggcaact

SEQ ID NO: 3006914 - DNA, 25 bp, Homo sapien
ctttttcttacacagcgggcaactt

SEQ ID NO: 3006915 - DNA, 25 bp, Homo sapien
tcttacacagcgggcaacttttctt

SEQ ID NO: 3006916 - DNA, 25 bp, Homo sapien
tttcttacacagcgggcaacttttc

SEQ ID NO: 3006917 - DNA, 25 bp, Homo sapien
gtagctttgtcatccaaatagccat

SEQ ID NO: 3006918 - DNA, 25 bp, Homo sapien
tagtagctttgtcatccaaatagcc

SEQ ID NO: 3006919 - DNA, 25 bp, Homo sapien
ttagtagctttgtcatccaaatagc

SEQ ID NO: 3006920 - DNA, 25 bp, Homo sapien
agctttgtcatccaaatagccatat

SEQ ID NO: 3006921 - DNA, 25 bp, Homo sapien
ctcagcctccgaagcgtctaggaca

SEQ ID NO: 3006922 - DNA, 25 bp, Homo sapien
agcctccgaagcgtctaggacaaca

SEQ ID NO: 3006923 - DNA, 25 bp, Homo sapien
tccgaagcgtctaggacaacatgtg

SEQ ID NO: 3006924 - DNA, 25 bp, Homo sapien
cctccgaagcgtctaggacaacatg

SEQ ID NO: 3006925 - DNA, 25 bp, Homo sapien
ccctggctttggtatatagtactaa

SEQ ID NO: 3006926 - DNA, 25 bp, Homo sapien
gctgatagttgagcatgaaccatat

SEQ ID NO: 3006927 - DNA, 25 bp, Homo sapien
catataaacattcatcaggtctctc

SEQ ID NO: 3006928 - DNA, 25 bp, Homo sapien
tcttttaatgcagctatcacccctt

SEQ ID NO: 3006929 - DNA, 25 bp, Homo sapien
tcataaccatacttatcttccccag

SEQ ID NO: 3006930 - DNA, 25 bp, Homo sapien
tgacactaatcatgatggtttccac

SEQ ID NO: 3006931 - DNA, 25 bp, Homo sapien
gagtctccattagggtctgccagca

SEQ ID NO: 3006932 - DNA, 25 bp, Homo sapien
tgaagaatagaaatgcacacatcac

SEQ ID NO: 3006933 - DNA, 25 bp, Homo sapien
ctgcaaaattcaagaagaggcttgt

SEQ ID NO: 3006934 - DNA, 25 bp, Homo sapien
tcaagaagaggcttgtttcatatat

SEQ ID NO: 3006935 - DNA, 25 bp, Homo sapien
ttcaagaagaggcttgtttcatata

SEQ ID NO: 3006936 - DNA, 25 bp, Homo sapien
tacatcatataaataatccctattg

SEQ ID NO: 3006937 - DNA, 25 bp, Homo sapien
tctgctgttatgaactctgggtaat

SEQ ID NO: 3006938 - DNA, 25 bp, Homo sapien
gaatcaaagtttgtatctaccaatc

SEQ ID NO: 3006939 - DNA, 25 bp, Homo sapien
tccctattgtgaaactaatctttta

SEQ ID NO: 3006940 - DNA, 25 bp, Homo sapien
tgcgctggccgacaaatactttttc

SEQ ID NO: 3006941 - DNA, 25 bp, Homo sapien
tcagggccagaataacaccgagggc

SEQ ID NO: 3006942 - DNA, 25 bp, Homo sapien
tgaatatatgacaggcaaggcccgt

SEQ ID NO: 3006943 - DNA, 25 bp, Homo sapien
tttactaaaatagaatcagggccag

SEQ ID NO: 3006944 - DNA, 25 bp, Homo sapien
tgtaataaggattttttccaagtca

SEQ ID NO: 3006945 - DNA, 25 bp, Homo sapien
tctaccaccactatataagatccat

SEQ ID NO: 3006946 - DNA, 25 bp, Homo sapien
tacctattatcaaaccatattttaa

SEQ ID NO: 3006947 - DNA, 25 bp, Homo sapien
ttagaatgagaagatttttaggctt

SEQ ID NO: 3006948 - DNA, 25 bp, Homo sapien
catgctattaaatatgtgtacagaa

SEQ ID NO: 3006949 - DNA, 25 bp, Homo sapien
tcactacgtgcacagccatactaga

SEQ ID NO: 3006950 - DNA, 25 bp, Homo sapien
ccatactagatgctttccaggctta

SEQ ID NO: 3006951 - DNA, 25 bp, Homo sapien
gaactgccaccgtgtggatttgaag

SEQ ID NO: 3006952 - DNA, 25 bp, Homo sapien
catgccctctggtttaaaacacgag

SEQ ID NO: 3006953 - DNA, 25 bp, Homo sapien
taagatgagccttaaaaacaccacc

SEQ ID NO: 3006954 - DNA, 25 bp, Homo sapien
aagatgagccttaaaaacaccacct

SEQ ID NO: 3006955 - DNA, 25 bp, Homo sapien
agtaagatgagccttaaaaacacca

SEQ ID NO: 3006956 - DNA, 25 bp, Homo sapien
tgaatttcattttaggaggtcggag

SEQ ID NO: 3006957 - DNA, 25 bp, Homo sapien
ggagtgggtgacacgatcccggctc

SEQ ID NO: 3006958 - DNA, 25 bp, Homo sapien
tggagtgggtgacacgatcccggct

SEQ ID NO: 3006959 - DNA, 25 bp, Homo sapien
gagtgggtgacacgatcccggctca

SEQ ID NO: 3006960 - DNA, 25 bp, Homo sapien
ggatattgaatacagccatttctcc

SEQ ID NO: 3006961 - DNA, 25 bp, Homo sapien
taatttcatgtcagtttgccaaaat

SEQ ID NO: 3006962 - DNA, 25 bp, Homo sapien
gaagatgtcagttccattatactta

SEQ ID NO: 3006963 - DNA, 25 bp, Homo sapien
ccagcctgccaaaatagtttttaat

SEQ ID NO: 3006964 - DNA, 25 bp, Homo sapien
taataaggacttcccatcggtagag

SEQ ID NO: 3006965 - DNA, 25 bp, Homo sapien
tcattgtcatctattaaacctgcag

SEQ ID NO: 3006966 - DNA, 25 bp, Homo sapien
taaagtgtatctggagggccaataa

SEQ ID NO: 3006967 - DNA, 25 bp, Homo sapien
tcccatcggtagagatcattgtcat

SEQ ID NO: 3006968 - DNA, 25 bp, Homo sapien
atacatttaagcacataatttgcat

SEQ ID NO: 3006969 - DNA, 25 bp, Homo sapien
taatcaatacatttaagcacataat

SEQ ID NO: 3006970 - DNA, 25 bp, Homo sapien
catttaagcacataatttgcatcca

SEQ ID NO: 3006971 - DNA, 25 bp, Homo sapien
atttaagcacataatttgcatccag

SEQ ID NO: 3006972 - DNA, 25 bp, Homo sapien
caagttcttgaaatcttttgcccat

SEQ ID NO: 3006973 - DNA, 25 bp, Homo sapien
ccaagttcttgaaatcttttgccca

SEQ ID NO: 3006974 - DNA, 25 bp, Homo sapien
cccattttggcccatgtgcagtgca

SEQ ID NO: 3006975 - DNA, 25 bp, Homo sapien
cttctgcaggaaccctttctccttt

SEQ ID NO: 3006976 - DNA, 25 bp, Homo sapien
tctcctgtgaaaggcccattttggc

SEQ ID NO: 3006977 - DNA, 25 bp, Homo sapien
gcaagtagaccgatactctcagtct

SEQ ID NO: 3006978 - DNA, 25 bp, Homo sapien
tatcaccagtagcagttcctaatcg

SEQ ID NO: 3006979 - DNA, 25 bp, Homo sapien
tgacaattcatgactcaccaggaga

SEQ ID NO: 3006980 - DNA, 25 bp, Homo sapien
gccatgagtcatgcatctacgaagt

SEQ ID NO: 3006981 - DNA, 25 bp, Homo sapien
ccaggagaaagcttaagtatcgtgc

SEQ ID NO: 3006982 - DNA, 25 bp, Homo sapien
ccagagaggcgccagttcagtgacc

SEQ ID NO: 3006983 - DNA, 25 bp, Homo sapien
ggcgccagttcagtgaccgtcgtac

SEQ ID NO: 3006984 - DNA, 25 bp, Homo sapien
agcgaaggaggaaggctaatcttct

SEQ ID NO: 3006985 - DNA, 25 bp, Homo sapien
gcgaaggaggaaggctaatcttctg

SEQ ID NO: 3006986 - DNA, 25 bp, Homo sapien
gagggagatcagtagtgagaagtgg

SEQ ID NO: 3006987 - DNA, 25 bp, Homo sapien
agggagatcagtagtgagaagtggg

SEQ ID NO: 3006988 - DNA, 25 bp, Homo sapien
gggagatcagtagtgagaagtggga

SEQ ID NO: 3006989 - DNA, 25 bp, Homo sapien
tggcttaaaggccacagcattctgg

SEQ ID NO: 3006990 - DNA, 25 bp, Homo sapien
gcttaaaggccacagcattctggtt

SEQ ID NO: 3006991 - DNA, 25 bp, Homo sapien
ggcttaaaggccacagcattctggt

SEQ ID NO: 3006992 - DNA, 25 bp, Homo sapien
ttggcttaaaggccacagcattctg

SEQ ID NO: 3006993 - DNA, 25 bp, Homo sapien
tattgcttccccaatagccatgcca

SEQ ID NO: 3006994 - DNA, 25 bp, Homo sapien
ccatatggcttagaggctgaagagg

SEQ ID NO: 3006995 - DNA, 25 bp, Homo sapien
tataaaccaaactggataacgagaa

SEQ ID NO: 3006996 - DNA, 25 bp, Homo sapien
tagcaggcaacacaataccctcgtc

SEQ ID NO: 3006997 - DNA, 25 bp, Homo sapien
atgtgatttgcctcacaagcaactg

SEQ ID NO: 3006998 - DNA, 25 bp, Homo sapien
gtgatttgcctcacaagcaactggg

SEQ ID NO: 3006999 - DNA, 25 bp, Homo sapien
gatttgcctcacaagcaactgggac

SEQ ID NO: 3007000 - DNA, 25 bp, Homo sapien
caaaacaaagatttgatgtgatttg

SEQ ID NO: 3007001 - DNA, 25 bp, Homo sapien
taaatgtagcacctcaaggtaggga

SEQ ID NO: 3007002 - DNA, 25 bp, Homo sapien
gcgttcccgcagcatctcaatacaa

SEQ ID NO: 3007003 - DNA, 25 bp, Homo sapien
tcaatacaacggcatataagggctc

SEQ ID NO: 3007004 - DNA, 25 bp, Homo sapien
cttgaacatgttaatagagcaacca

SEQ ID NO: 3007005 - DNA, 25 bp, Homo sapien
ttgtttccataagcccacacttcct

SEQ ID NO: 3007006 - DNA, 25 bp, Homo sapien
gccagatttgtttccataagcccac

SEQ ID NO: 3007007 - DNA, 25 bp, Homo sapien
cttgccagatttgtttccataagcc

SEQ ID NO: 3007008 - DNA, 25 bp, Homo sapien
gatttgtttccataagcccacactt

SEQ ID NO: 3007009 - DNA, 25 bp, Homo sapien
taacgaacacctcaaactcttagta

SEQ ID NO: 3007010 - DNA, 25 bp, Homo sapien
tttccttaagaagccataaaggtga

SEQ ID NO: 3007011 - DNA, 25 bp, Homo sapien
agatttcatcactccagtctttggc

SEQ ID NO: 3007012 - DNA, 25 bp, Homo sapien
gccataaaggtgatttaacgaacac

SEQ ID NO: 3007013 - DNA, 25 bp, Homo sapien
gccccggcagcacctgaacccggga

SEQ ID NO: 3007014 - DNA, 25 bp, Homo sapien
tcagacaccgagccggggactcgca

SEQ ID NO: 3007015 - DNA, 25 bp, Homo sapien
cttccgcccgccctcagacaccgag

SEQ ID NO: 3007016 - DNA, 25 bp, Homo sapien
gccgcactgggtccggacgctccag

SEQ ID NO: 3007017 - DNA, 25 bp, Homo sapien
tggggacccgcacacagcccctccc

SEQ ID NO: 3007018 - DNA, 25 bp, Homo sapien
ccgcacacagcccctcccccgcaac

SEQ ID NO: 3007019 - DNA, 25 bp, Homo sapien
cacacagcccctcccccgcaacgtc

SEQ ID NO: 3007020 - DNA, 25 bp, Homo sapien
ctggggacccgcacacagcccctcc

SEQ ID NO: 3007021 - DNA, 25 bp, Homo sapien
tgtcttcgcagtagcagtgccgact

SEQ ID NO: 3007022 - DNA, 25 bp, Homo sapien
tcttcgcagtagcagtgccgactgc

SEQ ID NO: 3007023 - DNA, 25 bp, Homo sapien
agctgtcttcgcagtagcagtgccg

SEQ ID NO: 3007024 - DNA, 25 bp, Homo sapien
cgcagtagcagtgccgactgcagct

SEQ ID NO: 3007025 - DNA, 25 bp, Homo sapien
tggagcggggtgtgccgaggaaccc

SEQ ID NO: 3007026 - DNA, 25 bp, Homo sapien
gccggtgcgagtccgctcgcttcag

SEQ ID NO: 3007027 - DNA, 25 bp, Homo sapien
ctcgctgccggtgcgagtccgctcg

SEQ ID NO: 3007028 - DNA, 25 bp, Homo sapien
ctggcgccggggcttccgaagggct

SEQ ID NO: 3007029 - DNA, 25 bp, Homo sapien
ctcactgcgcgcagggccgctcggc

SEQ ID NO: 3007030 - DNA, 25 bp, Homo sapien
ccgcggcgcgcactgggacttcgct

SEQ ID NO: 3007031 - DNA, 25 bp, Homo sapien
tgggacttcgctcgcccgcttccct

SEQ ID NO: 3007032 - DNA, 25 bp, Homo sapien
gctgccgcggcgcgcactgggactt

SEQ ID NO: 3007033 - DNA, 25 bp, Homo sapien
taggaggtggcatcaacaggcccat

SEQ ID NO: 3007034 - DNA, 25 bp, Homo sapien
gttcccagttttggcccactgctca

SEQ ID NO: 3007035 - DNA, 25 bp, Homo sapien
tgctcaccaaagctaggtccctaat

SEQ ID NO: 3007036 - DNA, 25 bp, Homo sapien
tccctaataactgtgggtccctata

SEQ ID NO: 3007037 - DNA, 25 bp, Homo sapien
gttttattcatgggattgtccactt

SEQ ID NO: 3007038 - DNA, 25 bp, Homo sapien
ttaacatccccccagcatagctggt

SEQ ID NO: 3007039 - DNA, 25 bp, Homo sapien
tttattcatgggattgtccactttt

SEQ ID NO: 3007040 - DNA, 25 bp, Homo sapien
tctgaggtggtccaaacagagctgc

SEQ ID NO: 3007041 - DNA, 25 bp, Homo sapien
taagaatgattaacctggcagagcc

SEQ ID NO: 3007042 - DNA, 25 bp, Homo sapien
ccagccacaatgctttgcaccacca

SEQ ID NO: 3007043 - DNA, 25 bp, Homo sapien
ccagcgtctgcatttgtaagaatga

SEQ ID NO: 3007044 - DNA, 25 bp, Homo sapien
tgacagccccacagatatgtgaagg

SEQ ID NO: 3007045 - DNA, 25 bp, Homo sapien
ctttgggcggccaagaaagccacga

SEQ ID NO: 3007046 - DNA, 25 bp, Homo sapien
tagagcacgctttgagaacactggt

SEQ ID NO: 3007047 - DNA, 25 bp, Homo sapien
gatcctgccgtagcattccgtagag

SEQ ID NO: 3007048 - DNA, 25 bp, Homo sapien
tccagtaggtagagcggtggcaacc

SEQ ID NO: 3007049 - DNA, 25 bp, Homo sapien
aactgtgggggtcccagcagcccca

SEQ ID NO: 3007050 - DNA, 25 bp, Homo sapien
ctggacctaactgtgggggtcccag

SEQ ID NO: 3007051 - DNA, 25 bp, Homo sapien
cctaactgtgggggtcccagcagcc

SEQ ID NO: 3007052 - DNA, 25 bp, Homo sapien
tggacctaactgtgggggtcccagc

SEQ ID NO: 3007053 - DNA, 25 bp, Homo sapien
ggagtatagtggtgccacctcggct

SEQ ID NO: 3007054 - DNA, 25 bp, Homo sapien
gtggtgccacctcggctcactagaa

SEQ ID NO: 3007055 - DNA, 25 bp, Homo sapien
gccacctcggctcactagaacctcc

SEQ ID NO: 3007056 - DNA, 25 bp, Homo sapien
ggtgccacctcggctcactagaacc

SEQ ID NO: 3007057 - DNA, 25 bp, Homo sapien
tctcacaggacttgtaagacgtgtc

SEQ ID NO: 3007058 - DNA, 25 bp, Homo sapien
acggcagaggcacttcagatcacgg

SEQ ID NO: 3007059 - DNA, 25 bp, Homo sapien
agatctctagtgtcctgcgggccag

SEQ ID NO: 3007060 - DNA, 25 bp, Homo sapien
tgctgtgcctatgttttgcagtctg

SEQ ID NO: 3007061 - DNA, 25 bp, Homo sapien
ctcgaaggcgccaagaaacaccagc

SEQ ID NO: 3007062 - DNA, 25 bp, Homo sapien
gcttggggattaactctgctcacaa

SEQ ID NO: 3007063 - DNA, 25 bp, Homo sapien
tttaaaatacacctcgaaggcgcca

SEQ ID NO: 3007064 - DNA, 25 bp, Homo sapien
aaacaccagcttggggattaactct

SEQ ID NO: 3007065 - DNA, 25 bp, Homo sapien
catgactcactgtggccgaaagctt

SEQ ID NO: 3007066 - DNA, 25 bp, Homo sapien
cactgtggccgaaagcttcaccaga

SEQ ID NO: 3007067 - DNA, 25 bp, Homo sapien
gtggccgaaagcttcaccagatgca

SEQ ID NO: 3007068 - DNA, 25 bp, Homo sapien
ctcactgtggccgaaagcttcacca

SEQ ID NO: 3007069 - DNA, 25 bp, Homo sapien
gcctgttcgtaatgggtcacgtccg

SEQ ID NO: 3007070 - DNA, 25 bp, Homo sapien
ttcgtaatgggtcacgtccgtgccc

SEQ ID NO: 3007071 - DNA, 25 bp, Homo sapien
aatgggtcacgtccgtgccctggga

SEQ ID NO: 3007072 - DNA, 25 bp, Homo sapien
cttcactgcctgttcgtaatgggtc

SEQ ID NO: 3007073 - DNA, 25 bp, Homo sapien
gggccaagggatagaggagtcccca

SEQ ID NO: 3007074 - DNA, 25 bp, Homo sapien
ttccttccggaagccaaactgctcc

SEQ ID NO: 3007075 - DNA, 25 bp, Homo sapien
tccttccggaagccaaactgctcct

SEQ ID NO: 3007076 - DNA, 25 bp, Homo sapien
gagctgctgattgtgaatctcagag

SEQ ID NO: 3007077 - DNA, 25 bp, Homo sapien
agctgctgattgtgaatctcagagt

SEQ ID NO: 3007078 - DNA, 25 bp, Homo sapien
gccaaatatattcctcttgtaaatg

SEQ ID NO: 3007079 - DNA, 25 bp, Homo sapien
ctatttaaatcaccccctggtggct

SEQ ID NO: 3007080 - DNA, 25 bp, Homo sapien
gagaagccaaatatattcctcttgt

SEQ ID NO: 3007081 - DNA, 25 bp, Homo sapien
cttaagagagaagccaaatatattc

SEQ ID NO: 3007082 - DNA, 25 bp, Homo sapien
aaaaataggcgtctcaggcagatgg

SEQ ID NO: 3007083 - DNA, 25 bp, Homo sapien
gcacgagagatggtcacacctgcct

SEQ ID NO: 3007084 - DNA, 25 bp, Homo sapien
tgtgcttgccagagcaggatgcccg

SEQ ID NO: 3007085 - DNA, 25 bp, Homo sapien
cagtggcagcgccttagaaacagct

SEQ ID NO: 3007086 - DNA, 25 bp, Homo sapien
ctgggactcctgatgaccaaagaca

SEQ ID NO: 3007087 - DNA, 25 bp, Homo sapien
cagcgcggacagtggtgatttgccc

SEQ ID NO: 3007088 - DNA, 25 bp, Homo sapien
ttttccgtgccagcgcggacagtgg

SEQ ID NO: 3007089 - DNA, 25 bp, Homo sapien
agccttgcctttttccgtgccagcg

SEQ ID NO: 3007090 - DNA, 25 bp, Homo sapien
catcctctgacttgcgtttcttgcg

SEQ ID NO: 3007091 - DNA, 25 bp, Homo sapien
gcctgggctgggaccttagcctttg

SEQ ID NO: 3007092 - DNA, 25 bp, Homo sapien
ctggactcttggtggttggcgtccc

SEQ ID NO: 3007093 - DNA, 25 bp, Homo sapien
tgcgcttcttcgtctctggcaagaa

SEQ ID NO: 3007094 - DNA, 25 bp, Homo sapien
aggagcaccgtcaggtccaaggtca

SEQ ID NO: 3007095 - DNA, 25 bp, Homo sapien
cggctggagccggtggagtgtgccc

SEQ ID NO: 3007096 - DNA, 25 bp, Homo sapien
ttcatggcctgccagtagaggtcgt

SEQ ID NO: 3007097 - DNA, 25 bp, Homo sapien
cagtagaggtcgtgcaggcggctgg

SEQ ID NO: 3007098 - DNA, 25 bp, Homo sapien
caggtcctgaagagaacgttgagca

SEQ ID NO: 3007099 - DNA, 25 bp, Homo sapien
catgtttgcaggtcctgaagagaac

SEQ ID NO: 3007100 - DNA, 25 bp, Homo sapien
ctgaagagaacgttgagcagctcca

SEQ ID NO: 3007101 - DNA, 25 bp, Homo sapien
gctgcgccttggtctgcgcctcccc

SEQ ID NO: 3007102 - DNA, 25 bp, Homo sapien
tcggtctcccggagaactgattctg

SEQ ID NO: 3007103 - DNA, 25 bp, Homo sapien
ccagagatcggtctcccggagaact

SEQ ID NO: 3007104 - DNA, 25 bp, Homo sapien
tctttcccagagatcggtctcccgg

SEQ ID NO: 3007105 - DNA, 25 bp, Homo sapien
ggtctcccggagaactgattctgag

SEQ ID NO: 3007106 - DNA, 25 bp, Homo sapien
tcacctcccgcatggacagggtctt

SEQ ID NO: 3007107 - DNA, 25 bp, Homo sapien
tccactcggggtcctcaaagcacga

SEQ ID NO: 3007108 - DNA, 25 bp, Homo sapien
cttccactcggggtcctcaaagcac

SEQ ID NO: 3007109 - DNA, 25 bp, Homo sapien
cctcccgcatggacagggtcttctg

SEQ ID NO: 3007110 - DNA, 25 bp, Homo sapien
gggacaattcctgcccattattggc

SEQ ID NO: 3007111 - DNA, 25 bp, Homo sapien
gggcctcacaatatccagtcagaag

SEQ ID NO: 3007112 - DNA, 25 bp, Homo sapien
gagccttggcacgttgggtgctcac

SEQ ID NO: 3007113 - DNA, 25 bp, Homo sapien
tgctcacggctcagggatgcatgag

SEQ ID NO: 3007114 - DNA, 25 bp, Homo sapien
ggcccgtgatatgctggaccaggat

SEQ ID NO: 3007115 - DNA, 25 bp, Homo sapien
accgggcccgtgatatgctggacca

SEQ ID NO: 3007116 - DNA, 25 bp, Homo sapien
cccgtgatatgctggaccaggatgg

SEQ ID NO: 3007117 - DNA, 25 bp, Homo sapien
cgcaccgggcccgtgatatgctgga

SEQ ID NO: 3007118 - DNA, 25 bp, Homo sapien
tggtggggagtgacaagggctgtga

SEQ ID NO: 3007119 - DNA, 25 bp, Homo sapien
gtgacaagggctgtgaggtgcaggc

SEQ ID NO: 3007120 - DNA, 25 bp, Homo sapien
acaagggctgtgaggtgcaggctgg

SEQ ID NO: 3007121 - DNA, 25 bp, Homo sapien
ctggtggggagtgacaagggctgtg

SEQ ID NO: 3007122 - DNA, 25 bp, Homo sapien
ctgttgcgcttggtcaggaaggagc

SEQ ID NO: 3007123 - DNA, 25 bp, Homo sapien
gtgctgtcgagtacacccgggtcac

SEQ ID NO: 3007124 - DNA, 25 bp, Homo sapien
gagctcagtgctgtcgagtacaccc

SEQ ID NO: 3007125 - DNA, 25 bp, Homo sapien
tcagtgctgtcgagtacacccgggt

SEQ ID NO: 3007126 - DNA, 25 bp, Homo sapien
cctcagcagtgttgcccttcaagac

SEQ ID NO: 3007127 - DNA, 25 bp, Homo sapien
tgtgtctcatgcacgcagccctcag

SEQ ID NO: 3007128 - DNA, 25 bp, Homo sapien
agccctcagcagtgttgcccttcaa

SEQ ID NO: 3007129 - DNA, 25 bp, Homo sapien
cgcagccctcagcagtgttgccctt

SEQ ID NO: 3007130 - DNA, 25 bp, Homo sapien
agtagcgccgggcacggcacaggtg

SEQ ID NO: 3007131 - DNA, 25 bp, Homo sapien
cacccaagtcgtggcagtagcgccg

SEQ ID NO: 3007132 - DNA, 25 bp, Homo sapien
tgcaccaaccgctccacctgggcgt

SEQ ID NO: 3007133 - DNA, 25 bp, Homo sapien
ccggagcaggtagagagaggcgttg

SEQ ID NO: 3007134 - DNA, 25 bp, Homo sapien
tccgccaagcagagccaacccaagt

SEQ ID NO: 3007135 - DNA, 25 bp, Homo sapien
gtcagaacattctcggtccaccctg

SEQ ID NO: 3007136 - DNA, 25 bp, Homo sapien
gacctagaagacgacagaggcgacc

SEQ ID NO: 3007137 - DNA, 25 bp, Homo sapien
gggaaacagacctagaagacgacag

SEQ ID NO: 3007138 - DNA, 25 bp, Homo sapien
cattctcgggctgcttggtcactag

SEQ ID NO: 3007139 - DNA, 25 bp, Homo sapien
aaggtcctgctcctgtttggagctg

SEQ ID NO: 3007140 - DNA, 25 bp, Homo sapien
aagatgcgcgccgtcttgtgcagaa

SEQ ID NO: 3007141 - DNA, 25 bp, Homo sapien
caggctgcgccggatgatgctcagc

SEQ ID NO: 3007142 - DNA, 25 bp, Homo sapien
cctggatacgcagcttctgctcggc

SEQ ID NO: 3007143 - DNA, 25 bp, Homo sapien
tctcgccgggcctggatacgcagct

SEQ ID NO: 3007144 - DNA, 25 bp, Homo sapien
agcttgttcttctcgtctcgccggg

SEQ ID NO: 3007145 - DNA, 25 bp, Homo sapien
ccggatctggaagtcgcgccgcaga

SEQ ID NO: 3007146 - DNA, 25 bp, Homo sapien
tcccagcctgcagcacggtcatcag

SEQ ID NO: 3007147 - DNA, 25 bp, Homo sapien
ttcccagcctgcagcacggtcatca

SEQ ID NO: 3007148 - DNA, 25 bp, Homo sapien
ctgatccacgtccccgtcgcgctcc

SEQ ID NO: 3007149 - DNA, 25 bp, Homo sapien
tgatccacgtccccgtcgcgctcct

SEQ ID NO: 3007150 - DNA, 25 bp, Homo sapien
gatccacgtccccgtcgcgctcctc

SEQ ID NO: 3007151 - DNA, 25 bp, Homo sapien
atccacgtccccgtcgcgctcctcc

SEQ ID NO: 3007152 - DNA, 25 bp, Homo sapien
tgttgtcctcaccttcctcgctctt

SEQ ID NO: 3007153 - DNA, 25 bp, Homo sapien
ctgagcttctgttgtcctcaccttc

SEQ ID NO: 3007154 - DNA, 25 bp, Homo sapien
gagcttctgttgtcctcaccttcct

SEQ ID NO: 3007155 - DNA, 25 bp, Homo sapien
tgtcctcaccttcctcgctcttgtc

SEQ ID NO: 3007156 - DNA, 25 bp, Homo sapien
acacacctccccgatcgtcccactc

SEQ ID NO: 3007157 - DNA, 25 bp, Homo sapien
caggcgcgtcacacacctccccgat

SEQ ID NO: 3007158 - DNA, 25 bp, Homo sapien
ctgtgtggtagaggcaggcgcgtca

SEQ ID NO: 3007159 - DNA, 25 bp, Homo sapien
gcgtcacacacctccccgatcgtcc

SEQ ID NO: 3007160 - DNA, 25 bp, Homo sapien
cgccgctcatcagaatcgtccgtca

SEQ ID NO: 3007161 - DNA, 25 bp, Homo sapien
ctgcacccttcagccgccgctcatc

SEQ ID NO: 3007162 - DNA, 25 bp, Homo sapien
gccgctcatcagaatcgtccgtcac

SEQ ID NO: 3007163 - DNA, 25 bp, Homo sapien
agccgccgctcatcagaatcgtccg

SEQ ID NO: 3007164 - DNA, 25 bp, Homo sapien
tcatcctcactggtctcggggttca

SEQ ID NO: 3007165 - DNA, 25 bp, Homo sapien
tctcatcctcactggtctcggggtt

SEQ ID NO: 3007166 - DNA, 25 bp, Homo sapien
catcctcactggtctcggggttcag

SEQ ID NO: 3007167 - DNA, 25 bp, Homo sapien
ctcatcctcactggtctcggggttc

SEQ ID NO: 3007168 - DNA, 25 bp, Homo sapien
cactgacccatttgcagcccccgcc

SEQ ID NO: 3007169 - DNA, 25 bp, Homo sapien
tgaccaaagacctccatttcccaga

SEQ ID NO: 3007170 - DNA, 25 bp, Homo sapien
actgacccatttgcagcccccgccc

SEQ ID NO: 3007171 - DNA, 25 bp, Homo sapien
ctgacccatttgcagcccccgccct

SEQ ID NO: 3007172 - DNA, 25 bp, Homo sapien
ccagaattagctgcagggcacgcgg

SEQ ID NO: 3007173 - DNA, 25 bp, Homo sapien
ttagctgcagggcacgcggggtcag

SEQ ID NO: 3007174 - DNA, 25 bp, Homo sapien
agctgcagggcacgcggggtcaggt

SEQ ID NO: 3007175 - DNA, 25 bp, Homo sapien
atccagaattagctgcagggcacgc

SEQ ID NO: 3007176 - DNA, 25 bp, Homo sapien
gggccacctggcgcatgaggtggct

SEQ ID NO: 3007177 - DNA, 25 bp, Homo sapien
ctccgggccacctggcgcatgaggt

SEQ ID NO: 3007178 - DNA, 25 bp, Homo sapien
gctccgggccacctggcgcatgagg

SEQ ID NO: 3007179 - DNA, 25 bp, Homo sapien
ccacctggcgcatgaggtggctggg

SEQ ID NO: 3007180 - DNA, 25 bp, Homo sapien
cgatggtcttggtgcggctccggcg

SEQ ID NO: 3007181 - DNA, 25 bp, Homo sapien
cagggctgcaccttttatctaaggc

SEQ ID NO: 3007182 - DNA, 25 bp, Homo sapien
agcctcctctgtccaagtcaagttc

SEQ ID NO: 3007183 - DNA, 25 bp, Homo sapien
caagttcggagatcccaaggctggg

SEQ ID NO: 3007184 - DNA, 25 bp, Homo sapien
gctgcaccttttatctaaggctctg

SEQ ID NO: 3007185 - DNA, 25 bp, Homo sapien
ggcccattgtgccatagaaccccag

SEQ ID NO: 3007186 - DNA, 25 bp, Homo sapien
acagccctcaaaagcctctcggtag

SEQ ID NO: 3007187 - DNA, 25 bp, Homo sapien
taagtggccggagggatgtttccac

SEQ ID NO: 3007188 - DNA, 25 bp, Homo sapien
gctgtggggattacgagatcctgca

SEQ ID NO: 3007189 - DNA, 25 bp, Homo sapien
ggatgcccacgaggagcagaaggtg

SEQ ID NO: 3007190 - DNA, 25 bp, Homo sapien
gtggatgcccacgaggagcagaagg

SEQ ID NO: 3007191 - DNA, 25 bp, Homo sapien
gaggtggatgcccacgaggagcaga

SEQ ID NO: 3007192 - DNA, 25 bp, Homo sapien
aggtggatgcccacgaggagcagaa

SEQ ID NO: 3007193 - DNA, 25 bp, Homo sapien
cagctccttcagagtctgcagcatc

SEQ ID NO: 3007194 - DNA, 25 bp, Homo sapien
ccagctccttcagagtctgcagcat

SEQ ID NO: 3007195 - DNA, 25 bp, Homo sapien
tccagctccttcagagtctgcagca

SEQ ID NO: 3007196 - DNA, 25 bp, Homo sapien
aggtctgcgaactgcaccaggtggt

SEQ ID NO: 3007197 - DNA, 25 bp, Homo sapien
tcacgttgtggctgtgattcaacag

SEQ ID NO: 3007198 - DNA, 25 bp, Homo sapien
cgctgctgcgcagtgaagggtgtca

SEQ ID NO: 3007199 - DNA, 25 bp, Homo sapien
cctgcttgaactgcgtgctgagggt

SEQ ID NO: 3007200 - DNA, 25 bp, Homo sapien
gaaggcactgctgacagcctctcgg

SEQ ID NO: 3007201 - DNA, 25 bp, Homo sapien
gaaggagaacgggtgctttgtctca

SEQ ID NO: 3007202 - DNA, 25 bp, Homo sapien
gacaaagaacgagtggaacaaacaa

SEQ ID NO: 3007203 - DNA, 25 bp, Homo sapien
gctgacagcctctcgggcctggttt

SEQ ID NO: 3007204 - DNA, 25 bp, Homo sapien
ctgtccacaatgctcaccaatcgaa

SEQ ID NO: 3007205 - DNA, 25 bp, Homo sapien
atttcctcagccggaacacagctcg

SEQ ID NO: 3007206 - DNA, 25 bp, Homo sapien
gctcaccaatcgaaagatgatccat

SEQ ID NO: 3007207 - DNA, 25 bp, Homo sapien
tcagccggaacacagctcgctcagg

SEQ ID NO: 3007208 - DNA, 25 bp, Homo sapien
taaactgaggcctcatatgagagct

SEQ ID NO: 3007209 - DNA, 25 bp, Homo sapien
catatgagagctaaggctcttcccc

SEQ ID NO: 3007210 - DNA, 25 bp, Homo sapien
tctcagagacaacactccaagatct

SEQ ID NO: 3007211 - DNA, 25 bp, Homo sapien
cgctcctctcatggtttagagccag

SEQ ID NO: 3007212 - DNA, 25 bp, Homo sapien
gatgagaaggccactagcacggcca

SEQ ID NO: 3007213 - DNA, 25 bp, Homo sapien
gacccgccagaaagtaggcgtgaca

SEQ ID NO: 3007214 - DNA, 25 bp, Homo sapien
tgtggagcgatgaatcctgggcttt

SEQ ID NO: 3007215 - DNA, 25 bp, Homo sapien
ggaaggtgcccacgtaatcgtccat

SEQ ID NO: 3007216 - DNA, 25 bp, Homo sapien
ggggcaaacttgaactgctttggga

SEQ ID NO: 3007217 - DNA, 25 bp, Homo sapien
gggcaaacttgaactgctttgggag

SEQ ID NO: 3007218 - DNA, 25 bp, Homo sapien
ctggggcaaacttgaactgctttgg

SEQ ID NO: 3007219 - DNA, 25 bp, Homo sapien
tggggcaaacttgaactgctttggg

SEQ ID NO: 3007220 - DNA, 25 bp, Homo sapien
ccgtaatggcggatcacgtctccct

SEQ ID NO: 3007221 - DNA, 25 bp, Homo sapien
tgctccccgtaatggcggatcacgt

SEQ ID NO: 3007222 - DNA, 25 bp, Homo sapien
tggcggatcacgtctccctgcatca

SEQ ID NO: 3007223 - DNA, 25 bp, Homo sapien
cacgtgctccccgtaatggcggatc

SEQ ID NO: 3007224 - DNA, 25 bp, Homo sapien
ctggctggccagaactgcatcttca

SEQ ID NO: 3007225 - DNA, 25 bp, Homo sapien
gcatcttcagcagcccttgttccac

SEQ ID NO: 3007226 - DNA, 25 bp, Homo sapien
tcttcagcagcccttgttccaccac

SEQ ID NO: 3007227 - DNA, 25 bp, Homo sapien
tgcatcttcagcagcccttgttcca

SEQ ID NO: 3007228 - DNA, 25 bp, Homo sapien
atggcgggcagcttgcggtccttct

SEQ ID NO: 3007229 - DNA, 25 bp, Homo sapien
ggtccagagcaatggcgggcagctt

SEQ ID NO: 3007230 - DNA, 25 bp, Homo sapien
tcttccttgagtgccaggcggagca

SEQ ID NO: 3007231 - DNA, 25 bp, Homo sapien
cagaaccgtgggaacttgtcttcct

SEQ ID NO: 3007232 - DNA, 25 bp, Homo sapien
tcaagtcggctttgaggacctccgg

SEQ ID NO: 3007233 - DNA, 25 bp, Homo sapien
cagcttcttgagcttggagggcacc

SEQ ID NO: 3007234 - DNA, 25 bp, Homo sapien
aggaggaagagctctagctgttcag

SEQ ID NO: 3007235 - DNA, 25 bp, Homo sapien
tctgagaataggttcacggatccca

SEQ ID NO: 3007236 - DNA, 25 bp, Homo sapien
ttcaccgacttcatcagtgcctcct

SEQ ID NO: 3007237 - DNA, 25 bp, Homo sapien
agcttcaccgacttcatcagtgcct

SEQ ID NO: 3007238 - DNA, 25 bp, Homo sapien
accgacttcatcagtgcctcctggt

SEQ ID NO: 3007239 - DNA, 25 bp, Homo sapien
gcagcttcaccgacttcatcagtgc

SEQ ID NO: 3007240 - DNA, 25 bp, Homo sapien
gagggcgagcactccaaacaggttt

SEQ ID NO: 3007241 - DNA, 25 bp, Homo sapien
cctgactgaaagagggcgagcactc

SEQ ID NO: 3007242 - DNA, 25 bp, Homo sapien
ttcaccagccgacctgactgaaaga

SEQ ID NO: 3007243 - DNA, 25 bp, Homo sapien
cactccaaacaggtttgcaaagaga

SEQ ID NO: 3007244 - DNA, 25 bp, Homo sapien
tgcacaaggggaggtcttcaaaaga

SEQ ID NO: 3007245 - DNA, 25 bp, Homo sapien
gattagacgcttcagggcatatttc

SEQ ID NO: 3007246 - DNA, 25 bp, Homo sapien
gagtcccgtgattagacgcttcagg

SEQ ID NO: 3007247 - DNA, 25 bp, Homo sapien
gccagggccaaactgtagcagggcc

SEQ ID NO: 3007248 - DNA, 25 bp, Homo sapien
accccgagtcccgtgattagacgct

SEQ ID NO: 3007249 - DNA, 25 bp, Homo sapien
caggcttcgcaatgtcccagaagaa

SEQ ID NO: 3007250 - DNA, 25 bp, Homo sapien
cttcggcctgccacgcagatactcc

SEQ ID NO: 3007251 - DNA, 25 bp, Homo sapien
gtggccgcaagtcgcgtctcctgct

SEQ ID NO: 3007252 - DNA, 25 bp, Homo sapien
gaagaagtccaagaactcgcgactg

SEQ ID NO: 3007253 - DNA, 25 bp, Homo sapien
tcaataggccatagcggtcggcagg

SEQ ID NO: 3007254 - DNA, 25 bp, Homo sapien
ttctccaggcgacatcggctgggcg

SEQ ID NO: 3007255 - DNA, 25 bp, Homo sapien
cttcaataggccatagcggtcggca

SEQ ID NO: 3007256 - DNA, 25 bp, Homo sapien
ggccgggcgccactctgcgtcgctt

SEQ ID NO: 3007257 - DNA, 25 bp, Homo sapien
cgaaacacgaaacacgtgtgctccg

SEQ ID NO: 3007258 - DNA, 25 bp, Homo sapien
cactcaccgaaacacgaaacacgtg

SEQ ID NO: 3007259 - DNA, 25 bp, Homo sapien
tcaccgaaacacgaaacacgtgtgc

SEQ ID NO: 3007260 - DNA, 25 bp, Homo sapien
acactcaccgaaacacgaaacacgt

SEQ ID NO: 3007261 - DNA, 25 bp, Homo sapien
aacaggtcagatttgggctgatgtg

SEQ ID NO: 3007262 - DNA, 25 bp, Homo sapien
cagatttgggctgatgtggagcagg

SEQ ID NO: 3007263 - DNA, 25 bp, Homo sapien
gggaaaatgagaacaggtcagattt

SEQ ID NO: 3007264 - DNA, 25 bp, Homo sapien
aatgagaacaggtcagatttgggct

SEQ ID NO: 3007265 - DNA, 25 bp, Homo sapien
gactgaaataactgggtacattgtg

SEQ ID NO: 3007266 - DNA, 25 bp, Homo sapien
aaataactgggtacattgtggtgcc

SEQ ID NO: 3007267 - DNA, 25 bp, Homo sapien
tgtggtgccattacggagaagaatt

SEQ ID NO: 3007268 - DNA, 25 bp, Homo sapien
ggtacattgtggtgccattacggag

SEQ ID NO: 3007269 - DNA, 25 bp, Homo sapien
gatctgaactcagtgctagccccag

SEQ ID NO: 3007270 - DNA, 25 bp, Homo sapien
gaatgattgttagctctggatgcca

SEQ ID NO: 3007271 - DNA, 25 bp, Homo sapien
taaaatagctagagattccatccgg

SEQ ID NO: 3007272 - DNA, 25 bp, Homo sapien
gatgccaacagtaccctgggctctg

SEQ ID NO: 3007273 - DNA, 25 bp, Homo sapien
gggacactggagacatgggcgtgct

SEQ ID NO: 3007274 - DNA, 25 bp, Homo sapien
gacactggagacatgggcgtgctct

SEQ ID NO: 3007275 - DNA, 25 bp, Homo sapien
cactggagacatgggcgtgctctgt

SEQ ID NO: 3007276 - DNA, 25 bp, Homo sapien
gggggacactggagacatgggcgtg

SEQ ID NO: 3007277 - DNA, 25 bp, Homo sapien
tgctctgttggttcttgctgaccct

SEQ ID NO: 3007278 - DNA, 25 bp, Homo sapien
gctgccagatgcctgagtagggtgt

SEQ ID NO: 3007279 - DNA, 25 bp, Homo sapien
tgctgggatgctctgttggttcttg

SEQ ID NO: 3007280 - DNA, 25 bp, Homo sapien
ttggttcttgctgaccctgatgctg

SEQ ID NO: 3007281 - DNA, 25 bp, Homo sapien
ctagtggtagacttggccaccaggt

SEQ ID NO: 3007282 - DNA, 25 bp, Homo sapien
ccaaaggagcagttgagcgaggagg

SEQ ID NO: 3007283 - DNA, 25 bp, Homo sapien
aggcccaggcactagtggtagactt

SEQ ID NO: 3007284 - DNA, 25 bp, Homo sapien
tgtcatccaggctgccacggaggat

SEQ ID NO: 3007285 - DNA, 25 bp, Homo sapien
gtagagcatccccagcaaggtctga

SEQ ID NO: 3007286 - DNA, 25 bp, Homo sapien
catcagcatggcaaagtagtggaca

SEQ ID NO: 3007287 - DNA, 25 bp, Homo sapien
tctcccgccagtagactcagtagag

SEQ ID NO: 3007288 - DNA, 25 bp, Homo sapien
tatcgtggaagaggccccaaaacat

SEQ ID NO: 3007289 - DNA, 25 bp, Homo sapien
tccagcatccacgacgttgcccccg

SEQ ID NO: 3007290 - DNA, 25 bp, Homo sapien
agccccgtggcatgaggatgcacca

SEQ ID NO: 3007291 - DNA, 25 bp, Homo sapien
ctagccccgtggcatgaggatgcac

SEQ ID NO: 3007292 - DNA, 25 bp, Homo sapien
gttgcccccggcaacaagcagctct

SEQ ID NO: 3007293 - DNA, 25 bp, Homo sapien
tacgccagggccgtgggagtgtccg

SEQ ID NO: 3007294 - DNA, 25 bp, Homo sapien
ccgtgggagtgtccgccgggtggag

SEQ ID NO: 3007295 - DNA, 25 bp, Homo sapien
ggctgccactacacgggcccaggtt

SEQ ID NO: 3007296 - DNA, 25 bp, Homo sapien
tggcaccgtggtggtatacgccagg

SEQ ID NO: 3007297 - DNA, 25 bp, Homo sapien
gggtttagaaccagcgcctctgatg

SEQ ID NO: 3007298 - DNA, 25 bp, Homo sapien
ttcctcctccgactccaagcttggc

SEQ ID NO: 3007299 - DNA, 25 bp, Homo sapien
agcagcttctgatagaccacgggct

SEQ ID NO: 3007300 - DNA, 25 bp, Homo sapien
ttctgatagaccacgggctcttctg

SEQ ID NO: 3007301 - DNA, 25 bp, Homo sapien
agcctttccggctgtgtctcagagg

SEQ ID NO: 3007302 - DNA, 25 bp, Homo sapien
cctttccggctgtgtctcagaggcc

SEQ ID NO: 3007303 - DNA, 25 bp, Homo sapien
gcctttccggctgtgtctcagaggc

SEQ ID NO: 3007304 - DNA, 25 bp, Homo sapien
cagcctttccggctgtgtctcagag

SEQ ID NO: 3007305 - DNA, 25 bp, Homo sapien
gctcggcatctacaccgtggcccat

SEQ ID NO: 3007306 - DNA, 25 bp, Homo sapien
tgctcggcatctacaccgtggccca

SEQ ID NO: 3007307 - DNA, 25 bp, Homo sapien
cccagtcctgctcggcatctacacc

SEQ ID NO: 3007308 - DNA, 25 bp, Homo sapien
gtcctgctcggcatctacaccgtgg

SEQ ID NO: 3007309 - DNA, 25 bp, Homo sapien
ctgccccgcacctcggaggcgcagg

SEQ ID NO: 3007310 - DNA, 25 bp, Homo sapien
ctggtgaggtcgcagacgctgcccc

SEQ ID NO: 3007311 - DNA, 25 bp, Homo sapien
ggcgcaggcccggaaagcattgttt

SEQ ID NO: 3007312 - DNA, 25 bp, Homo sapien
aaagcattgtttgagaagtgggagc

SEQ ID NO: 3007313 - DNA, 25 bp, Homo sapien
tgctcgagtggtgccgcagcaagac

SEQ ID NO: 3007314 - DNA, 25 bp, Homo sapien
ccagcagcatcaagcagatcctgct

SEQ ID NO: 3007315 - DNA, 25 bp, Homo sapien
caggctgaagcggtcgcagagcttc

SEQ ID NO: 3007316 - DNA, 25 bp, Homo sapien
gtgccgcagcaagacgctgggctac

SEQ ID NO: 3007317 - DNA, 25 bp, Homo sapien
ctggagcgacggcatggccttctgc

SEQ ID NO: 3007318 - DNA, 25 bp, Homo sapien
gcatggccttctgcgccctggtaca

SEQ ID NO: 3007319 - DNA, 25 bp, Homo sapien
tctgcgccctggtacactccttctt

SEQ ID NO: 3007320 - DNA, 25 bp, Homo sapien
gacggcatggccttctgcgccctgg

SEQ ID NO: 3007321 - DNA, 25 bp, Homo sapien
tcctctggatgtagaccgcagtgtt

SEQ ID NO: 3007322 - DNA, 25 bp, Homo sapien
cctgcacttaaatcactggcctgga

SEQ ID NO: 3007323 - DNA, 25 bp, Homo sapien
tgagattctatagagctccagccat

SEQ ID NO: 3007324 - DNA, 25 bp, Homo sapien
gaaggagcgtcaacagaaagttccc

SEQ ID NO: 3007325 - DNA, 25 bp, Homo sapien
attcccctccgtcactagcacgaga

SEQ ID NO: 3007326 - DNA, 25 bp, Homo sapien
tcattcccctccgtcactagcacga

SEQ ID NO: 3007327 - DNA, 25 bp, Homo sapien
cattcccctccgtcactagcacgag

SEQ ID NO: 3007328 - DNA, 25 bp, Homo sapien
tctgttgctttagccagcaggctta

SEQ ID NO: 3007329 - DNA, 25 bp, Homo sapien
gttgctttagccagcaggcttaccc

SEQ ID NO: 3007330 - DNA, 25 bp, Homo sapien
tgttgctttagccagcaggcttacc

SEQ ID NO: 3007331 - DNA, 25 bp, Homo sapien
ttgctttagccagcaggcttaccct

SEQ ID NO: 3007332 - DNA, 25 bp, Homo sapien
tcggcatcattccaattctagcata

SEQ ID NO: 3007333 - DNA, 25 bp, Homo sapien
attcacgtatcacctttgctcaggg

SEQ ID NO: 3007334 - DNA, 25 bp, Homo sapien
tcatgaattcacgtatcacctttgc

SEQ ID NO: 3007335 - DNA, 25 bp, Homo sapien
taatctcggcatcattccaattcta

SEQ ID NO: 3007336 - DNA, 25 bp, Homo sapien
gatatttgtgggactctctcatcca

SEQ ID NO: 3007337 - DNA, 25 bp, Homo sapien
aatgtgtcaaatctcctactggcag

SEQ ID NO: 3007338 - DNA, 25 bp, Homo sapien
catgcttactcagaagtgggctgca

SEQ ID NO: 3007339 - DNA, 25 bp, Homo sapien
agccaggtagtgatccccagctctg

SEQ ID NO: 3007340 - DNA, 25 bp, Homo sapien
aagacaagacaccaaccacacgaga

SEQ ID NO: 3007341 - DNA, 25 bp, Homo sapien
tgtacccgacaaatggcaaaagaca

SEQ ID NO: 3007342 - DNA, 25 bp, Homo sapien
accacacgagatcccagtgcgcaca

SEQ ID NO: 3007343 - DNA, 25 bp, Homo sapien
tgctgtacccgacaaatggcaaaag

SEQ ID NO: 3007344 - DNA, 25 bp, Homo sapien
aaatactcacagatgatcacattaa

SEQ ID NO: 3007345 - DNA, 25 bp, Homo sapien
taccacatcaagcatatgaacccag

SEQ ID NO: 3007346 - DNA, 25 bp, Homo sapien
tctttaccacatcaagcatatgaac

SEQ ID NO: 3007347 - DNA, 25 bp, Homo sapien
ttttaattctttaccacatcaagca

SEQ ID NO: 3007348 - DNA, 25 bp, Homo sapien
cacatcaagcatatgaacccagaaa

SEQ ID NO: 3007349 - DNA, 25 bp, Homo sapien
atttgccatatagatctgaatgaag

SEQ ID NO: 3007350 - DNA, 25 bp, Homo sapien
cccctattctagtcttgaaatgatt

SEQ ID NO: 3007351 - DNA, 25 bp, Homo sapien
accatgaaaaggtgcccctctaggg

SEQ ID NO: 3007352 - DNA, 25 bp, Homo sapien
tgaggccccgtctccacgaaaataa

SEQ ID NO: 3007353 - DNA, 25 bp, Homo sapien
caggtactcgtagggcatgtccagc

SEQ ID NO: 3007354 - DNA, 25 bp, Homo sapien
tgcattccggatctcaatttcctta

SEQ ID NO: 3007355 - DNA, 25 bp, Homo sapien
cagctttgcattccggatctcaatt

SEQ ID NO: 3007356 - DNA, 25 bp, Homo sapien
tgtccagctttgcattccggatctc

SEQ ID NO: 3007357 - DNA, 25 bp, Homo sapien
gagagaagcctggtggaagttgggc

SEQ ID NO: 3007358 - DNA, 25 bp, Homo sapien
tggaagttgggcagtgtcgccatca

SEQ ID NO: 3007359 - DNA, 25 bp, Homo sapien
ggggcagccgcatcgtgcagggtgc

SEQ ID NO: 3007360 - DNA, 25 bp, Homo sapien
gcattaggcacccaagagtaccagt

SEQ ID NO: 3007361 - DNA, 25 bp, Homo sapien
ccaggtgcacagaggcgtgttggcc

SEQ ID NO: 3007362 - DNA, 25 bp, Homo sapien
aagtggcaaacctggtcccgagcct

SEQ ID NO: 3007363 - DNA, 25 bp, Homo sapien
cggtgcaggtgaagatacacatggt

SEQ ID NO: 3007364 - DNA, 25 bp, Homo sapien
ttggccggtgcaggtgaagatacac

SEQ ID NO: 3007365 - DNA, 25 bp, Homo sapien
tgcagcccgatttcagtgatctctc

SEQ ID NO: 3007366 - DNA, 25 bp, Homo sapien
gggccccttgcagcccgatttcagt

SEQ ID NO: 3007367 - DNA, 25 bp, Homo sapien
cccttgcagcccgatttcagtgatc

SEQ ID NO: 3007368 - DNA, 25 bp, Homo sapien
tgggccccttgcagcccgatttcag

SEQ ID NO: 3007369 - DNA, 25 bp, Homo sapien
agagccgcagcgcatcttgggcata

SEQ ID NO: 3007370 - DNA, 25 bp, Homo sapien
aggagcccccggtcggccaagtcat

SEQ ID NO: 3007371 - DNA, 25 bp, Homo sapien
cttgcttgagcagctgcacgtggcc

SEQ ID NO: 3007372 - DNA, 25 bp, Homo sapien
gcagcgcatcttgggcatagaagga

SEQ ID NO: 3007373 - DNA, 25 bp, Homo sapien
tgagcagggtcaggcgaatcgacct

SEQ ID NO: 3007374 - DNA, 25 bp, Homo sapien
gcagggtcaggcgaatcgacctgcc

SEQ ID NO: 3007375 - DNA, 25 bp, Homo sapien
ggtgagcagggtcaggcgaatcgac

SEQ ID NO: 3007376 - DNA, 25 bp, Homo sapien
tgagaagtgagggtgagcagggtca

SEQ ID NO: 3007377 - DNA, 25 bp, Homo sapien
ctggtcgaaaattcccatgtcagag

SEQ ID NO: 3007378 - DNA, 25 bp, Homo sapien
cgttaatttccagggtgtatcgcag

SEQ ID NO: 3007379 - DNA, 25 bp, Homo sapien
gacgttaatttccagggtgtatcgc

SEQ ID NO: 3007380 - DNA, 25 bp, Homo sapien
aaaattcccatgtcagagaccagcc

SEQ ID NO: 3007381 - DNA, 25 bp, Homo sapien
atcgacggcaggcacctcatggtgg

SEQ ID NO: 3007382 - DNA, 25 bp, Homo sapien
cttgaagataggatgtatcgacggc

SEQ ID NO: 3007383 - DNA, 25 bp, Homo sapien
atgtatcgacggcaggcacctcatg

SEQ ID NO: 3007384 - DNA, 25 bp, Homo sapien
taggatgtatcgacggcaggcacct

SEQ ID NO: 3007385 - DNA, 25 bp, Homo sapien
gatgaccatgggcaagagtttccca

SEQ ID NO: 3007386 - DNA, 25 bp, Homo sapien
tgttgttccatatcgcctcctgatg

SEQ ID NO: 3007387 - DNA, 25 bp, Homo sapien
gcctatctgcccttaatcccatgaa

SEQ ID NO: 3007388 - DNA, 25 bp, Homo sapien
cagcagcatcattggcactaggcca

SEQ ID NO: 3007389 - DNA, 25 bp, Homo sapien
tactctcgtgtaggaaggaggccga

SEQ ID NO: 3007390 - DNA, 25 bp, Homo sapien
tccatgcctggagggaacactaggc

SEQ ID NO: 3007391 - DNA, 25 bp, Homo sapien
agcaccacggggttggcgccattaa

SEQ ID NO: 3007392 - DNA, 25 bp, Homo sapien
cctggagggaacactaggcgagcag

SEQ ID NO: 3007393 - DNA, 25 bp, Homo sapien
caccacggggttggcgccattaaga

SEQ ID NO: 3007394 - DNA, 25 bp, Homo sapien
gagtctttgatagcgaggtcggcca

SEQ ID NO: 3007395 - DNA, 25 bp, Homo sapien
gaccacaccagaaaatccggttgaa

SEQ ID NO: 3007396 - DNA, 25 bp, Homo sapien
tagagagtctttgatagcgaggtcg

SEQ ID NO: 3007397 - DNA, 25 bp, Homo sapien
tttagagagtctttgatagcgaggt

SEQ ID NO: 3007398 - DNA, 25 bp, Homo sapien
ccagaaatcgctcatccacagggag

SEQ ID NO: 3007399 - DNA, 25 bp, Homo sapien
cacagggaggtcatatagtttggcc

SEQ ID NO: 3007400 - DNA, 25 bp, Homo sapien
cttggccagcgaaacctcaaagtca

SEQ ID NO: 3007401 - DNA, 25 bp, Homo sapien
tattcagaattaacccgtccttcca

SEQ ID NO: 3007402 - DNA, 25 bp, Homo sapien
tccagctcttcttcccggtgtttct

SEQ ID NO: 3007403 - DNA, 25 bp, Homo sapien
aggccctgagggtcctcgcccacag

SEQ ID NO: 3007404 - DNA, 25 bp, Homo sapien
cttcttcccggtgtttctggaacag

SEQ ID NO: 3007405 - DNA, 25 bp, Homo sapien
tgtttctggaacaggccctgagggt

SEQ ID NO: 3007406 - DNA, 25 bp, Homo sapien
cacccagcggtaacaagggaacctg

SEQ ID NO: 3007407 - DNA, 25 bp, Homo sapien
cagcggtaacaagggaacctgacct

SEQ ID NO: 3007408 - DNA, 25 bp, Homo sapien
tcgtccttaaggaggtgccgtttgc

SEQ ID NO: 3007409 - DNA, 25 bp, Homo sapien
ccttaaggaggtgccgtttgcgcag

SEQ ID NO: 3007410 - DNA, 25 bp, Homo sapien
cagaaccaggcgtcgtccttaagga

SEQ ID NO: 3007411 - DNA, 25 bp, Homo sapien
caggcgtcgtccttaaggaggtgcc

SEQ ID NO: 3007412 - DNA, 25 bp, Homo sapien
gctgcacctggttgttggaaccggc

SEQ ID NO: 3007413 - DNA, 25 bp, Homo sapien
ctggttgttggaaccggcatagagc

SEQ ID NO: 3007414 - DNA, 25 bp, Homo sapien
gtgcgggccacagtcgcttcccgag

SEQ ID NO: 3007415 - DNA, 25 bp, Homo sapien
aaccggcatagagcgaggccccagt

SEQ ID NO: 3007416 - DNA, 25 bp, Homo sapien
gctttaaggcagtgtcttcattaga

SEQ ID NO: 3007417 - DNA, 25 bp, Homo sapien
ccagctttaaggcagtgtcttcatt

SEQ ID NO: 3007418 - DNA, 25 bp, Homo sapien
cagctttaaggcagtgtcttcatta

SEQ ID NO: 3007419 - DNA, 25 bp, Homo sapien
agctttaaggcagtgtcttcattag

SEQ ID NO: 3007420 - DNA, 25 bp, Homo sapien
gcattgcgaaggcactttacttacg

SEQ ID NO: 3007421 - DNA, 25 bp, Homo sapien
tctacagcttactttcacgtggtcc

SEQ ID NO: 3007422 - DNA, 25 bp, Homo sapien
cacgtggtcccatgaaaaaagaaat

SEQ ID NO: 3007423 - DNA, 25 bp, Homo sapien
tggtatcaggattgtgcagaaaaac

SEQ ID NO: 3007424 - DNA, 25 bp, Homo sapien
gacataactttattggaaacaaaga

SEQ ID NO: 3007425 - DNA, 25 bp, Homo sapien
catcagggggacaatcgatgaagtc

SEQ ID NO: 3007426 - DNA, 25 bp, Homo sapien
caatcgatgaagtcggccagcatgg

SEQ ID NO: 3007427 - DNA, 25 bp, Homo sapien
gggacaatcgatgaagtcggccagc

SEQ ID NO: 3007428 - DNA, 25 bp, Homo sapien
gaggtggtggcttctcatcatcagg

SEQ ID NO: 3007429 - DNA, 25 bp, Homo sapien
ttaggcacaaagatacaagattcag

SEQ ID NO: 3007430 - DNA, 25 bp, Homo sapien
cttctcgcccaaggaaccttccctg

SEQ ID NO: 3007431 - DNA, 25 bp, Homo sapien
caagattcagaatagtcacacacac

SEQ ID NO: 3007432 - DNA, 25 bp, Homo sapien
ggctgggcaaacctctcctaagaga

SEQ ID NO: 3007433 - DNA, 25 bp, Homo sapien
caaaagcagcccgggttcaggttcg

SEQ ID NO: 3007434 - DNA, 25 bp, Homo sapien
gggctgcaccttgtcactcccatcc

SEQ ID NO: 3007435 - DNA, 25 bp, Homo sapien
ggctcttcttcaacaagctcctggg

SEQ ID NO: 3007436 - DNA, 25 bp, Homo sapien
gccctgccgcagggctttccccttc

SEQ ID NO: 3007437 - DNA, 25 bp, Homo sapien
tttgggggagactcagggggaggca

SEQ ID NO: 3007438 - DNA, 25 bp, Homo sapien
gggggagactcagggggaggcagag

SEQ ID NO: 3007439 - DNA, 25 bp, Homo sapien
tgggggagactcagggggaggcaga

SEQ ID NO: 3007440 - DNA, 25 bp, Homo sapien
aggcagggttgggggtggaggtgca

SEQ ID NO: 3007441 - DNA, 25 bp, Homo sapien
gaggcagggttgggggtggaggtgc

SEQ ID NO: 3007442 - DNA, 25 bp, Homo sapien
ggcagggttgggggtggaggtgcac

SEQ ID NO: 3007443 - DNA, 25 bp, Homo sapien
ctgctgtgccaaactccaggtcttc

SEQ ID NO: 3007444 - DNA, 25 bp, Homo sapien
tcctgctgtgccaaactccaggtct

SEQ ID NO: 3007445 - DNA, 25 bp, Homo sapien
gctgtgccaaactccaggtcttcca

SEQ ID NO: 3007446 - DNA, 25 bp, Homo sapien
cttcttctacctcccctcctgctgt

SEQ ID NO: 3007447 - DNA, 25 bp, Homo sapien
tcttcttcctctaactcaccttctt

SEQ ID NO: 3007448 - DNA, 25 bp, Homo sapien
cttcctcttcaaaatattcctcttc

SEQ ID NO: 3007449 - DNA, 25 bp, Homo sapien
cttcttcttcctctaactcaccttc

SEQ ID NO: 3007450 - DNA, 25 bp, Homo sapien
tcctcttcaaaatattcctcttcat

SEQ ID NO: 3007451 - DNA, 25 bp, Homo sapien
gatattaataactgtcaaatcctct

SEQ ID NO: 3007452 - DNA, 25 bp, Homo sapien
tattaataactgtcaaatcctcttc

SEQ ID NO: 3007453 - DNA, 25 bp, Homo sapien
gttgatattaataactgtcaaatcc

SEQ ID NO: 3007454 - DNA, 25 bp, Homo sapien
tgctgttgatattaataactgtcaa

SEQ ID NO: 3007455 - DNA, 25 bp, Homo sapien
agcctgcccggtggttctcagggcc

SEQ ID NO: 3007456 - DNA, 25 bp, Homo sapien
tcagagtcactttccaaggagatct

SEQ ID NO: 3007457 - DNA, 25 bp, Homo sapien
ggacaaaggctggtctgggcactct

SEQ ID NO: 3007458 - DNA, 25 bp, Homo sapien
tcgggcacgatcaccacgctgtcat

SEQ ID NO: 3007459 - DNA, 25 bp, Homo sapien
gaacccgggggtgggtcagagcagc

SEQ ID NO: 3007460 - DNA, 25 bp, Homo sapien
agagcagcacaggtcaccagtgctt

SEQ ID NO: 3007461 - DNA, 25 bp, Homo sapien
gtgggtcagagcagcacaggtcacc

SEQ ID NO: 3007462 - DNA, 25 bp, Homo sapien
acccgggggtgggtcagagcagcac

SEQ ID NO: 3007463 - DNA, 25 bp, Homo sapien
aaggctatcttctcgctggccgagg

SEQ ID NO: 3007464 - DNA, 25 bp, Homo sapien
cgctggccgagggagaaggcttgca

SEQ ID NO: 3007465 - DNA, 25 bp, Homo sapien
tatcttctcgctggccgagggagaa

SEQ ID NO: 3007466 - DNA, 25 bp, Homo sapien
ctcaaggctatcttctcgctggccg

SEQ ID NO: 3007467 - DNA, 25 bp, Homo sapien
acctcaccctgctgtacacccatga

SEQ ID NO: 3007468 - DNA, 25 bp, Homo sapien
gggagctgcctaggacctcaccctg

SEQ ID NO: 3007469 - DNA, 25 bp, Homo sapien
cagcgggagctcgtgtacggggagc

SEQ ID NO: 3007470 - DNA, 25 bp, Homo sapien
ggcagtagagttcacggcggcagcg

SEQ ID NO: 3007471 - DNA, 25 bp, Homo sapien
ccaagaccacccaacccttctccag

SEQ ID NO: 3007472 - DNA, 25 bp, Homo sapien
ctgaaaaggacagagcacacctgga

SEQ ID NO: 3007473 - DNA, 25 bp, Homo sapien
gagcacacctggaaacatccccaag

SEQ ID NO: 3007474 - DNA, 25 bp, Homo sapien
aagaccacccaacccttctccagag

SEQ ID NO: 3007475 - DNA, 25 bp, Homo sapien
cacacatgaggatggtccggctgag

SEQ ID NO: 3007476 - DNA, 25 bp, Homo sapien
gagaggcccacacatgaggatggtc

SEQ ID NO: 3007477 - DNA, 25 bp, Homo sapien
gaggcccacacatgaggatggtccg

SEQ ID NO: 3007478 - DNA, 25 bp, Homo sapien
gcccacacatgaggatggtccggct

SEQ ID NO: 3007479 - DNA, 25 bp, Homo sapien
cacacacgtcgctgttggcattgct

SEQ ID NO: 3007480 - DNA, 25 bp, Homo sapien
gctgttggcattgctatcccctttc

SEQ ID NO: 3007481 - DNA, 25 bp, Homo sapien
tgagtgcagccgcacacacgtcgct

SEQ ID NO: 3007482 - DNA, 25 bp, Homo sapien
tgcagccgcacacacgtcgctgttg

SEQ ID NO: 3007483 - DNA, 25 bp, Homo sapien
ggggcgctaggcttcccagtctgca

SEQ ID NO: 3007484 - DNA, 25 bp, Homo sapien
cagtctgcaaactcccatcagggct

SEQ ID NO: 3007485 - DNA, 25 bp, Homo sapien
ttcccccacatccagctttagcttc

SEQ ID NO: 3007486 - DNA, 25 bp, Homo sapien
ctttagcttcttgggggcgctaggc

SEQ ID NO: 3007487 - DNA, 25 bp, Homo sapien
cgcatacaccttggtccgaaccgtg

SEQ ID NO: 3007488 - DNA, 25 bp, Homo sapien
gctctaatatcgcatacaccttggt

SEQ ID NO: 3007489 - DNA, 25 bp, Homo sapien
tcctccctgaagcattcccgccgag

SEQ ID NO: 3007490 - DNA, 25 bp, Homo sapien
aaacctgcacccacagctctaatat

SEQ ID NO: 3007491 - DNA, 25 bp, Homo sapien
ggagagagggaatctctaccgatgc

SEQ ID NO: 3007492 - DNA, 25 bp, Homo sapien
ccgatgctccaggaattgaggacct

SEQ ID NO: 3007493 - DNA, 25 bp, Homo sapien
caaagcgcaagagccggcttccaca

SEQ ID NO: 3007494 - DNA, 25 bp, Homo sapien
aagcaggcggccgatcaggatccca

SEQ ID NO: 3007495 - DNA, 25 bp, Homo sapien
aatggtgaccctcgtttctggcacg

SEQ ID NO: 3007496 - DNA, 25 bp, Homo sapien
tggtgaccctcgtttctggcacgcc

SEQ ID NO: 3007497 - DNA, 25 bp, Homo sapien
tctggcacgccctatcccttcacca

SEQ ID NO: 3007498 - DNA, 25 bp, Homo sapien
ggaatggtgaccctcgtttctggca

SEQ ID NO: 3007499 - DNA, 25 bp, Homo sapien
acagcaggtccaaggcctcaaggtg

SEQ ID NO: 3007500 - DNA, 25 bp, Homo sapien
gcaggggaccatctccatgcaagct

SEQ ID NO: 3007501 - DNA, 25 bp, Homo sapien
cctcaaggtggatagagggcagcag

SEQ ID NO: 3007502 - DNA, 25 bp, Homo sapien
gcgaggatgagtgcagacagcaggt

SEQ ID NO: 3007503 - DNA, 25 bp, Homo sapien
aaagtaggaagctctctgggacgac

SEQ ID NO: 3007504 - DNA, 25 bp, Homo sapien
ggagactcaggtccccagtactttc

SEQ ID NO: 3007505 - DNA, 25 bp, Homo sapien
tgggacgactccaggatgacactgt

SEQ ID NO: 3007506 - DNA, 25 bp, Homo sapien
cctctaaaatagaccctggatggaa

SEQ ID NO: 3007507 - DNA, 25 bp, Homo sapien
ctgagggtccggcagatgaaatcca

SEQ ID NO: 3007508 - DNA, 25 bp, Homo sapien
tgagggtccggcagatgaaatccag

SEQ ID NO: 3007509 - DNA, 25 bp, Homo sapien
ggacacgggagctccaaactcagag

SEQ ID NO: 3007510 - DNA, 25 bp, Homo sapien
cacagggacggacacgggagctcca

SEQ ID NO: 3007511 - DNA, 25 bp, Homo sapien
cagggacggacacgggagctccaaa

SEQ ID NO: 3007512 - DNA, 25 bp, Homo sapien
ggacggacacgggagctccaaactc

SEQ ID NO: 3007513 - DNA, 25 bp, Homo sapien
cccgaaaacctctgccgaagctgga

SEQ ID NO: 3007514 - DNA, 25 bp, Homo sapien
acctctgccgaagctggagaaggac

SEQ ID NO: 3007515 - DNA, 25 bp, Homo sapien
agcatgagccctaggcagcgggcca

SEQ ID NO: 3007516 - DNA, 25 bp, Homo sapien
agcgggccagtcccgaaaacctctg

SEQ ID NO: 3007517 - DNA, 25 bp, Homo sapien
aactaccctgtacactgtctttctt

SEQ ID NO: 3007518 - DNA, 25 bp, Homo sapien
ctaccctgtacactgtctttcttcc

SEQ ID NO: 3007519 - DNA, 25 bp, Homo sapien
caactaccctgtacactgtctttct

SEQ ID NO: 3007520 - DNA, 25 bp, Homo sapien
cacaactaccctgtacactgtcttt

SEQ ID NO: 3007521 - DNA, 25 bp, Homo sapien
ctaaagagggcagccgggaataaca

SEQ ID NO: 3007522 - DNA, 25 bp, Homo sapien
agtctctgctccctcgtacagggcc

SEQ ID NO: 3007523 - DNA, 25 bp, Homo sapien
gctctcggtgtgcttcaggccttgg

SEQ ID NO: 3007524 - DNA, 25 bp, Homo sapien
gtgaggccagcagactgtgtagctc

SEQ ID NO: 3007525 - DNA, 25 bp, Homo sapien
tccaccctagacagaaaaaatgagg

SEQ ID NO: 3007526 - DNA, 25 bp, Homo sapien
caccctagacagaaaaaatgaggcc

SEQ ID NO: 3007527 - DNA, 25 bp, Homo sapien
ggcatccaccctagacagaaaaaat

SEQ ID NO: 3007528 - DNA, 25 bp, Homo sapien
tcaaggcatccaccctagacagaaa

SEQ ID NO: 3007529 - DNA, 25 bp, Homo sapien
ggcagatggcacttgattcttaggg

SEQ ID NO: 3007530 - DNA, 25 bp, Homo sapien
gtttggaaagggtactcaaaatgca

SEQ ID NO: 3007531 - DNA, 25 bp, Homo sapien
caaaatgcaggccttaagttcaact

SEQ ID NO: 3007532 - DNA, 25 bp, Homo sapien
ggccttaagttcaactgtctgacaa

SEQ ID NO: 3007533 - DNA, 25 bp, Homo sapien
gggaaataggtcatacaagccttca

SEQ ID NO: 3007534 - DNA, 25 bp, Homo sapien
ccgagggaaataggtcatacaagcc

SEQ ID NO: 3007535 - DNA, 25 bp, Homo sapien
aagcccgagggaaataggtcataca

SEQ ID NO: 3007536 - DNA, 25 bp, Homo sapien
taggtcatacaagccttcattcctt

SEQ ID NO: 3007537 - DNA, 25 bp, Homo sapien
ggaagggtccagggagacatctcac

SEQ ID NO: 3007538 - DNA, 25 bp, Homo sapien
agtgtgtgaaggtgaggactgcggg

SEQ ID NO: 3007539 - DNA, 25 bp, Homo sapien
gaaggtgaggactgcggggggccat

SEQ ID NO: 3007540 - DNA, 25 bp, Homo sapien
gccatggggaagggtccagggagac

SEQ ID NO: 3007541 - DNA, 25 bp, Homo sapien
gcagctgggctgcatatcggaggag

SEQ ID NO: 3007542 - DNA, 25 bp, Homo sapien
tcatggagatgtcccggaacagtgc

SEQ ID NO: 3007543 - DNA, 25 bp, Homo sapien
gctgcatatcggaggaggtccctca

SEQ ID NO: 3007544 - DNA, 25 bp, Homo sapien
gtccctcaggacagccacggccagc

SEQ ID NO: 3007545 - DNA, 25 bp, Homo sapien
ctgaatgctccgaagccaagacaca

SEQ ID NO: 3007546 - DNA, 25 bp, Homo sapien
tgaatgctccgaagccaagacacac

SEQ ID NO: 3007547 - DNA, 25 bp, Homo sapien
gaatgctccgaagccaagacacaca

SEQ ID NO: 3007548 - DNA, 25 bp, Homo sapien
aatgctccgaagccaagacacacag

SEQ ID NO: 3007549 - DNA, 25 bp, Homo sapien
aagaagagagtcatgttaagtgggc

SEQ ID NO: 3007550 - DNA, 25 bp, Homo sapien
ttaagtgggcggaggctagacttca

SEQ ID NO: 3007551 - DNA, 25 bp, Homo sapien
ctgaaatacttggaatgaggtggaa

SEQ ID NO: 3007552 - DNA, 25 bp, Homo sapien
tcactaggctacagcaagacttcat

SEQ ID NO: 3007553 - DNA, 25 bp, Homo sapien
gaactgagacgtgcattactgagac

SEQ ID NO: 3007554 - DNA, 25 bp, Homo sapien
ctgagactcaccaatgccccaagag

SEQ ID NO: 3007555 - DNA, 25 bp, Homo sapien
agttttgatggaactgagacgtgca

SEQ ID NO: 3007556 - DNA, 25 bp, Homo sapien
ttactgagactcaccaatgccccaa

SEQ ID NO: 3007557 - DNA, 25 bp, Homo sapien
gaatgaagttttagccgggcacaat

SEQ ID NO: 3007558 - DNA, 25 bp, Homo sapien
gggactattgcataaaaggccataa

SEQ ID NO: 3007559 - DNA, 25 bp, Homo sapien
gaccacggttgaccacaggtaagta

SEQ ID NO: 3007560 - DNA, 25 bp, Homo sapien
cacttgactaatcctgagagtttga

SEQ ID NO: 3007561 - DNA, 25 bp, Homo sapien
tggctaaattgtatggtttgtgaat

SEQ ID NO: 3007562 - DNA, 25 bp, Homo sapien
ggcacggtggcctataatcccaaaa

SEQ ID NO: 3007563 - DNA, 25 bp, Homo sapien
aaaatggctaaattgtatggtttgt

SEQ ID NO: 3007564 - DNA, 25 bp, Homo sapien
taaataaaatggctaaattgtatgg

SEQ ID NO: 3007565 - DNA, 25 bp, Homo sapien
gcaccgtaatcccggcgcacaggtg

SEQ ID NO: 3007566 - DNA, 25 bp, Homo sapien
gtaatcccggcgcacaggtgccgcg

SEQ ID NO: 3007567 - DNA, 25 bp, Homo sapien
actgcaccgtaatcccggcgcacag

SEQ ID NO: 3007568 - DNA, 25 bp, Homo sapien
ttgcactgcaccgtaatcccggcgc

SEQ ID NO: 3007569 - DNA, 25 bp, Homo sapien
gaccccgttcgaggttgcagcaaac

SEQ ID NO: 3007570 - DNA, 25 bp, Homo sapien
agccgcaataggcacatgagcccgg

SEQ ID NO: 3007571 - DNA, 25 bp, Homo sapien
ggatgcaccggagcaacggcagacc

SEQ ID NO: 3007572 - DNA, 25 bp, Homo sapien
agagggcccactcagaacggctgcc

SEQ ID NO: 3007573 - DNA, 25 bp, Homo sapien
tcttgcgcactgagtgaaggcaggc

SEQ ID NO: 3007574 - DNA, 25 bp, Homo sapien
tccgaggcggtcctgtgatgttaaa

SEQ ID NO: 3007575 - DNA, 25 bp, Homo sapien
tgatgttaaaggtacacgtggtccg

SEQ ID NO: 3007576 - DNA, 25 bp, Homo sapien
tggcgtggcgcgatgacgcaaacac

SEQ ID NO: 3007577 - DNA, 25 bp, Homo sapien
tttcaagtactcttcgatgtcatcc

SEQ ID NO: 3007578 - DNA, 25 bp, Homo sapien
ttcaagtactcttcgatgtcatcct

SEQ ID NO: 3007579 - DNA, 25 bp, Homo sapien
catttcaagtactcttcgatgtcat

SEQ ID NO: 3007580 - DNA, 25 bp, Homo sapien
tgcatttcaagtactcttcgatgtc

SEQ ID NO: 3007581 - DNA, 25 bp, Homo sapien
tgtcgatttttacagagccctaccc

SEQ ID NO: 3007582 - DNA, 25 bp, Homo sapien
gatttttacagagccctacccattc

SEQ ID NO: 3007583 - DNA, 25 bp, Homo sapien
tcgatttttacagagccctacccat

SEQ ID NO: 3007584 - DNA, 25 bp, Homo sapien
ctctgtcgatttttacagagcccta

SEQ ID NO: 3007585 - DNA, 25 bp, Homo sapien
ttgatttggtgttcagcacaaaggc

SEQ ID NO: 3007586 - DNA, 25 bp, Homo sapien
gatttggtgttcagcacaaaggcct

SEQ ID NO: 3007587 - DNA, 25 bp, Homo sapien
aaaggcctccaccaacttgacatac

SEQ ID NO: 3007588 - DNA, 25 bp, Homo sapien
tttggtgttcagcacaaaggcctcc

SEQ ID NO: 3007589 - DNA, 25 bp, Homo sapien
agtaggctcatcatagttggatgca

SEQ ID NO: 3007590 - DNA, 25 bp, Homo sapien
tcatggtggatgagagcggtcttca

SEQ ID NO: 3007591 - DNA, 25 bp, Homo sapien
ggtcatggtggatgagagcggtctt

SEQ ID NO: 3007592 - DNA, 25 bp, Homo sapien
atagtaggctcatcatagttggatg

SEQ ID NO: 3007593 - DNA, 25 bp, Homo sapien
ctccagcagcaatgccttcctcggc

SEQ ID NO: 3007594 - DNA, 25 bp, Homo sapien
acccctccagcagcaatgccttcct

SEQ ID NO: 3007595 - DNA, 25 bp, Homo sapien
ccctccagcagcaatgccttcctcg

SEQ ID NO: 3007596 - DNA, 25 bp, Homo sapien
tacccctccagcagcaatgccttcc

SEQ ID NO: 3007597 - DNA, 25 bp, Homo sapien
gtggacaccaacctcattgaatttg

SEQ ID NO: 3007598 - DNA, 25 bp, Homo sapien
tacttgaccctcttgggacaaagat

SEQ ID NO: 3007599 - DNA, 25 bp, Homo sapien
tggaggaaaactggcccttccagca

SEQ ID NO: 3007600 - DNA, 25 bp, Homo sapien
gaatttgataccaagtaagaaactc

SEQ ID NO: 3007601 - DNA, 25 bp, Homo sapien
gagggctccagctactcttcgagga

SEQ ID NO: 3007602 - DNA, 25 bp, Homo sapien
tgagacgagacctgatgcctggttg

SEQ ID NO: 3007603 - DNA, 25 bp, Homo sapien
tgaagcgagtggactatgcccgcct

SEQ ID NO: 3007604 - DNA, 25 bp, Homo sapien
caagctcagtgatgtggctcgaacc

SEQ ID NO: 3007605 - DNA, 25 bp, Homo sapien
cagcacggcacctgctaaggaggga

SEQ ID NO: 3007606 - DNA, 25 bp, Homo sapien
aacaactggtgtactgggagagaga

SEQ ID NO: 3007607 - DNA, 25 bp, Homo sapien
tgaggaggtgaaaccaacccgtatg

SEQ ID NO: 3007608 - DNA, 25 bp, Homo sapien
gaatcacagtaagggcgcaagggct

SEQ ID NO: 3007609 - DNA, 25 bp, Homo sapien
tataatcctcgcaccttcagaggcc

SEQ ID NO: 3007610 - DNA, 25 bp, Homo sapien
tattaacaaatacgtgtaggctgga

SEQ ID NO: 3007611 - DNA, 25 bp, Homo sapien
cagtggctggttagtcctatgttag

SEQ ID NO: 3007612 - DNA, 25 bp, Homo sapien
ttgactcaggagttccataacagcc

SEQ ID NO: 3007613 - DNA, 25 bp, Homo sapien
ttttgtaagaataagccacagttta

SEQ ID NO: 3007614 - DNA, 25 bp, Homo sapien
tttgtaagaataagccacagtttac

SEQ ID NO: 3007615 - DNA, 25 bp, Homo sapien
cacaggtatataatgaaccggcaga

SEQ ID NO: 3007616 - DNA, 25 bp, Homo sapien
tgccacaggtatataatgaaccggc

SEQ ID NO: 3007617 - DNA, 25 bp, Homo sapien
acaggtatataatgaaccggcagat

SEQ ID NO: 3007618 - DNA, 25 bp, Homo sapien
tcaggtattagagtcaggtgccaca

SEQ ID NO: 3007619 - DNA, 25 bp, Homo sapien
cgagtgagctctttgtccgaggaca

SEQ ID NO: 3007620 - DNA, 25 bp, Homo sapien
tccgaggacagtgatcctactggga

SEQ ID NO: 3007621 - DNA, 25 bp, Homo sapien
cacagcacataggaaagggctgcgg

SEQ ID NO: 3007622 - DNA, 25 bp, Homo sapien
aatccccgagtaagcatgtccacat

SEQ ID NO: 3007623 - DNA, 25 bp, Homo sapien
ctttgagatcaagacagctcatcaa

SEQ ID NO: 3007624 - DNA, 25 bp, Homo sapien
ttgttgcccccacacacgctccagg

SEQ ID NO: 3007625 - DNA, 25 bp, Homo sapien
tgagatcaagacagctcatcaattc

SEQ ID NO: 3007626 - DNA, 25 bp, Homo sapien
catcaattcctgaacccatgggtcc

SEQ ID NO: 3007627 - DNA, 25 bp, Homo sapien
aggagagacctgggcttagctgcgg

SEQ ID NO: 3007628 - DNA, 25 bp, Homo sapien
gaggagagacctgggcttagctgcg

SEQ ID NO: 3007629 - DNA, 25 bp, Homo sapien
ctgcggaggagagacctgggcttag

SEQ ID NO: 3007630 - DNA, 25 bp, Homo sapien
cggaggagagacctgggcttagctg

SEQ ID NO: 3007631 - DNA, 25 bp, Homo sapien
agctctcaggtgtttccggagacga

SEQ ID NO: 3007632 - DNA, 25 bp, Homo sapien
tagacaccgatggtaagctctcagg

SEQ ID NO: 3007633 - DNA, 25 bp, Homo sapien
attcatgaactgaaccgatggcggg

SEQ ID NO: 3007634 - DNA, 25 bp, Homo sapien
caataacaacttccagtgacgctgc

SEQ ID NO: 3007635 - DNA, 25 bp, Homo sapien
ctggctgagtcaggtacaccagcag

SEQ ID NO: 3007636 - DNA, 25 bp, Homo sapien
tccgcggactctgcggggatggagc

SEQ ID NO: 3007637 - DNA, 25 bp, Homo sapien
gggctccgcggactctgcggggatg

SEQ ID NO: 3007638 - DNA, 25 bp, Homo sapien
cggactctgcggggatggagccacc

SEQ ID NO: 3007639 - DNA, 25 bp, Homo sapien
ctcggggctccgcggactctgcggg

SEQ ID NO: 3007640 - DNA, 25 bp, Homo sapien
gacgtccagctggtgtctcaatggc

SEQ ID NO: 3007641 - DNA, 25 bp, Homo sapien
cgaggagccgattcggttcggttca

SEQ ID NO: 3007642 - DNA, 25 bp, Homo sapien
ccgtcgagggaaggccaggaatctt

SEQ ID NO: 3007643 - DNA, 25 bp, Homo sapien
tgccagcctctggacgcagggaaag

SEQ ID NO: 3007644 - DNA, 25 bp, Homo sapien
acgcctggctggtttacttgtctat

SEQ ID NO: 3007645 - DNA, 25 bp, Homo sapien
tttgagacaaggtcgagcagctgag

SEQ ID NO: 3007646 - DNA, 25 bp, Homo sapien
caaacaagtaagcaaaaagcctcag

SEQ ID NO: 3007647 - DNA, 25 bp, Homo sapien
ccagtatgtggaacaatgcccggta

SEQ ID NO: 3007648 - DNA, 25 bp, Homo sapien
gtacctaatggggagacctcctgga

SEQ ID NO: 3007649 - DNA, 25 bp, Homo sapien
cctcctggaccaacaccaaccatct

SEQ ID NO: 3007650 - DNA, 25 bp, Homo sapien
cctgctggtacctaatggggagacc

SEQ ID NO: 3007651 - DNA, 25 bp, Homo sapien
gagacctcctggaccaacaccaacc

SEQ ID NO: 3007652 - DNA, 25 bp, Homo sapien
ccggggattgcagccgttcgggcag

SEQ ID NO: 3007653 - DNA, 25 bp, Homo sapien
ctgtgtccggggattgcagccgttc

SEQ ID NO: 3007654 - DNA, 25 bp, Homo sapien
tactgtgtccggggattgcagccgt

SEQ ID NO: 3007655 - DNA, 25 bp, Homo sapien
attgcagccgttcgggcagggggca

SEQ ID NO: 3007656 - DNA, 25 bp, Homo sapien
taccacttcgaagacaccgcgtaag

SEQ ID NO: 3007657 - DNA, 25 bp, Homo sapien
tggagctgggctccgaaatggaccc

SEQ ID NO: 3007658 - DNA, 25 bp, Homo sapien
tacctgggccttagcaaatcccctg

SEQ ID NO: 3007659 - DNA, 25 bp, Homo sapien
tggtgccatctactgcctctcggtg

SEQ ID NO: 3007660 - DNA, 25 bp, Homo sapien
caactcagagaagctttaatagcaa

SEQ ID NO: 3007661 - DNA, 25 bp, Homo sapien
taatagcaagaggtgggactagcct

SEQ ID NO: 3007662 - DNA, 25 bp, Homo sapien
aagaggtgggactagcctcctggcc

SEQ ID NO: 3007663 - DNA, 25 bp, Homo sapien
gctttaatagcaagaggtgggacta

SEQ ID NO: 3007664 - DNA, 25 bp, Homo sapien
tcaactgcggcagcagaataagcgc

SEQ ID NO: 3007665 - DNA, 25 bp, Homo sapien
gaataagcgcgcgtcgttcagcgca

SEQ ID NO: 3007666 - DNA, 25 bp, Homo sapien
ttcagcgcagtgtcatcgccgaggc

SEQ ID NO: 3007667 - DNA, 25 bp, Homo sapien
cgcgaagcgagaaagccactaggta

SEQ ID NO: 3007668 - DNA, 25 bp, Homo sapien
gcaaagggagatgcgttgcctctgc

SEQ ID NO: 3007669 - DNA, 25 bp, Homo sapien
aagggagatgcgttgcctctgcggg

SEQ ID NO: 3007670 - DNA, 25 bp, Homo sapien
aggcaaagggagatgcgttgcctct

SEQ ID NO: 3007671 - DNA, 25 bp, Homo sapien
gagatgcgttgcctctgcgggcccc

SEQ ID NO: 3007672 - DNA, 25 bp, Homo sapien
caagggatcctcgacccctgcgccc

SEQ ID NO: 3007673 - DNA, 25 bp, Homo sapien
cccaagggatcctcgacccctgcgc

SEQ ID NO: 3007674 - DNA, 25 bp, Homo sapien
caccccaagggatcctcgacccctg

SEQ ID NO: 3007675 - DNA, 25 bp, Homo sapien
ccccaagggatcctcgacccctgcg

SEQ ID NO: 3007676 - DNA, 25 bp, Homo sapien
cacgtgcgtattgcctaggacgttc

SEQ ID NO: 3007677 - DNA, 25 bp, Homo sapien
gtattgcctaggacgttcccgcgcg

SEQ ID NO: 3007678 - DNA, 25 bp, Homo sapien
tgcagcctgatcccattcagtgcag

SEQ ID NO: 3007679 - DNA, 25 bp, Homo sapien
tcagtgcagtgtcgtcgccaggaat

SEQ ID NO: 3007680 - DNA, 25 bp, Homo sapien
ctctccaggacctacgcctgagccc

SEQ ID NO: 3007681 - DNA, 25 bp, Homo sapien
ggcaagggcgagtcacggaattatc

SEQ ID NO: 3007682 - DNA, 25 bp, Homo sapien
tcatccttggctctatggtcccacg

SEQ ID NO: 3007683 - DNA, 25 bp, Homo sapien
ggcgagtcacggaattatcatcctt

SEQ ID NO: 3007684 - DNA, 25 bp, Homo sapien
ccgtgtagccgttccggccatctgt

SEQ ID NO: 3007685 - DNA, 25 bp, Homo sapien
tcacttcgatgaccgccgtgtagcc

SEQ ID NO: 3007686 - DNA, 25 bp, Homo sapien
gcgaagaatccatcgggacacatct

SEQ ID NO: 3007687 - DNA, 25 bp, Homo sapien
gaacccgctggcgaagaatccatcg

SEQ ID NO: 3007688 - DNA, 25 bp, Homo sapien
tgtgcacatgtgaaaccagtcgccc

SEQ ID NO: 3007689 - DNA, 25 bp, Homo sapien
gtgcacatgtgaaaccagtcgcccg

SEQ ID NO: 3007690 - DNA, 25 bp, Homo sapien
gcacatgtgaaaccagtcgcccgca

SEQ ID NO: 3007691 - DNA, 25 bp, Homo sapien
acatgtgaaaccagtcgcccgcaga

SEQ ID NO: 3007692 - DNA, 25 bp, Homo sapien
tgagggctccgattgcggaagggcc

SEQ ID NO: 3007693 - DNA, 25 bp, Homo sapien
caggcctcctaagcagatttatatc

SEQ ID NO: 3007694 - DNA, 25 bp, Homo sapien
tcagtttggcctctgtgagggctcc

SEQ ID NO: 3007695 - DNA, 25 bp, Homo sapien
tgtagcgtctgtgaatcaggcctcc

SEQ ID NO: 3007696 - DNA, 25 bp, Homo sapien
ggcgcgcgccaagacgccgccccgc

SEQ ID NO: 3007697 - DNA, 25 bp, Homo sapien
tgtcgcccagtggcggcatcgcagt

SEQ ID NO: 3007698 - DNA, 25 bp, Homo sapien
acaggcgcgcgccaagacgccgccc

SEQ ID NO: 3007699 - DNA, 25 bp, Homo sapien
tcgcccagtggcggcatcgcagtgg

SEQ ID NO: 3007700 - DNA, 25 bp, Homo sapien
tggctaaatttgttaggggccacaa

SEQ ID NO: 3007701 - DNA, 25 bp, Homo sapien
ctggctaaatttgttaggggccaca

SEQ ID NO: 3007702 - DNA, 25 bp, Homo sapien
ctggcctaaaaatgcctggctaaat

SEQ ID NO: 3007703 - DNA, 25 bp, Homo sapien
caataatatgttttggcttaagcaa

SEQ ID NO: 3007704 - DNA, 25 bp, Homo sapien
gcaatattccacttgctgtaagcaa

SEQ ID NO: 3007705 - DNA, 25 bp, Homo sapien
tgtaagcaagaataacaaggcccct

SEQ ID NO: 3007706 - DNA, 25 bp, Homo sapien
tcatcagaggtcacattccagtggg

SEQ ID NO: 3007707 - DNA, 25 bp, Homo sapien
ttacagtggagggaactcaagccca

SEQ ID NO: 3007708 - DNA, 25 bp, Homo sapien
tattaatcctttgcgcctcagggca

SEQ ID NO: 3007709 - DNA, 25 bp, Homo sapien
tcagtgttcggagcctaggtgagct

SEQ ID NO: 3007710 - DNA, 25 bp, Homo sapien
aagagccgccagctaaaccttcgga

SEQ ID NO: 3007711 - DNA, 25 bp, Homo sapien
ggcgggatggagggcactcgtcgag

SEQ ID NO: 3007712 - DNA, 25 bp, Homo sapien
gcgggatggagggcactcgtcgagt

SEQ ID NO: 3007713 - DNA, 25 bp, Homo sapien
ctcccctcggctccgtcttcgcctt

SEQ ID NO: 3007714 - DNA, 25 bp, Homo sapien
cccctcggctccgtcttcgccttcg

SEQ ID NO: 3007715 - DNA, 25 bp, Homo sapien
ctcggctccgtcttcgccttcgcca

SEQ ID NO: 3007716 - DNA, 25 bp, Homo sapien
gactcccctcggctccgtcttcgcc

SEQ ID NO: 3007717 - DNA, 25 bp, Homo sapien
ttcggttgccaaacacacgctgagt

SEQ ID NO: 3007718 - DNA, 25 bp, Homo sapien
gatgtgtcatctctgttctcggcag

SEQ ID NO: 3007719 - DNA, 25 bp, Homo sapien
ttggaggatgtctacaaccgcaccc

SEQ ID NO: 3007720 - DNA, 25 bp, Homo sapien
caatatttggcagcgtcgacgtagg

SEQ ID NO: 3007721 - DNA, 25 bp, Homo sapien
ttaggatcgctgagaaatctgggga

SEQ ID NO: 3007722 - DNA, 25 bp, Homo sapien
taggatcgctgagaaatctggggaa

SEQ ID NO: 3007723 - DNA, 25 bp, Homo sapien
gaaggaagcttgctaagccttcctg

SEQ ID NO: 3007724 - DNA, 25 bp, Homo sapien
cattaggatcgctgagaaatctggg

SEQ ID NO: 3007725 - DNA, 25 bp, Homo sapien
gcaccaggccctggcgagggtaccc

SEQ ID NO: 3007726 - DNA, 25 bp, Homo sapien
ctcagccatggtgggggctatagct

SEQ ID NO: 3007727 - DNA, 25 bp, Homo sapien
gagtcattggccgatgctatgtcat

SEQ ID NO: 3007728 - DNA, 25 bp, Homo sapien
catgcagctggtggcggaaggagag

SEQ ID NO: 3007729 - DNA, 25 bp, Homo sapien
ggatctggaggggcagcaggactca

SEQ ID NO: 3007730 - DNA, 25 bp, Homo sapien
ctgggatctggaggggcagcaggac

SEQ ID NO: 3007731 - DNA, 25 bp, Homo sapien
gatctggaggggcagcaggactcag

SEQ ID NO: 3007732 - DNA, 25 bp, Homo sapien
tctggaggggcagcaggactcaggc

SEQ ID NO: 3007733 - DNA, 25 bp, Homo sapien
acgctgggaccgacggcgcgggacg

SEQ ID NO: 3007734 - DNA, 25 bp, Homo sapien
agcccgagggatgcgcgcagcgcgg

SEQ ID NO: 3007735 - DNA, 25 bp, Homo sapien
ccgacgccgggcagcacttacccgc

SEQ ID NO: 3007736 - DNA, 25 bp, Homo sapien
gccgcaccgagagagctacgcggcc

SEQ ID NO: 3007737 - DNA, 25 bp, Homo sapien
catgaaccaccgcccctggccaaaa

SEQ ID NO: 3007738 - DNA, 25 bp, Homo sapien
gcaggctccgccgcccagggttcat

SEQ ID NO: 3007739 - DNA, 25 bp, Homo sapien
tcctgacctcaggcttcagcctccc

SEQ ID NO: 3007740 - DNA, 25 bp, Homo sapien
ggctccgccgcccagggttcatgcc

SEQ ID NO: 3007741 - DNA, 25 bp, Homo sapien
ggaaaaggcggtcagccacacaggt

SEQ ID NO: 3007742 - DNA, 25 bp, Homo sapien
gaaaaggcggtcagccacacaggtg

SEQ ID NO: 3007743 - DNA, 25 bp, Homo sapien
ctaggttcgcttctctggaggcccc

SEQ ID NO: 3007744 - DNA, 25 bp, Homo sapien
tcaagcagctagtgtggtcatctct

SEQ ID NO: 3007745 - DNA, 25 bp, Homo sapien
tcagagagctgtggcactgtcaagc

SEQ ID NO: 3007746 - DNA, 25 bp, Homo sapien
catctcttgtgctattcctgtctgt

SEQ ID NO: 3007747 - DNA, 25 bp, Homo sapien
tcttgtgctattcctgtctgttttc

SEQ ID NO: 3007748 - DNA, 25 bp, Homo sapien
ctgctactgcccggatctcctgtcc

SEQ ID NO: 3007749 - DNA, 25 bp, Homo sapien
ctactgcccggatctcctgtcctgg

SEQ ID NO: 3007750 - DNA, 25 bp, Homo sapien
tgctactgcccggatctcctgtcct

SEQ ID NO: 3007751 - DNA, 25 bp, Homo sapien
gctactgcccggatctcctgtcctg

SEQ ID NO: 3007752 - DNA, 25 bp, Homo sapien
gaacacgaggacactgtacacttag

SEQ ID NO: 3007753 - DNA, 25 bp, Homo sapien
gaagatcaactactgagggccagct

SEQ ID NO: 3007754 - DNA, 25 bp, Homo sapien
agctgcccagcacatgcgtgtcagg

SEQ ID NO: 3007755 - DNA, 25 bp, Homo sapien
tggccaacagacgatgaacacgagg

SEQ ID NO: 3007756 - DNA, 25 bp, Homo sapien
gggcagtgccacacttgccagtgtc

SEQ ID NO: 3007757 - DNA, 25 bp, Homo sapien
ggatcagtatcatgcctacaaatag

SEQ ID NO: 3007758 - DNA, 25 bp, Homo sapien
atgaggatcagtatcatgcctacaa

SEQ ID NO: 3007759 - DNA, 25 bp, Homo sapien
ggcaaagatgaggatcagtatcatg

SEQ ID NO: 3007760 - DNA, 25 bp, Homo sapien
actgttgtcatcattcagggagttg

SEQ ID NO: 3007761 - DNA, 25 bp, Homo sapien
gcccagctggaggaaactgctatag

SEQ ID NO: 3007762 - DNA, 25 bp, Homo sapien
ccagcgcccagctggaggaaactgc

SEQ ID NO: 3007763 - DNA, 25 bp, Homo sapien
ggaaactgctatagagactgttgtc

SEQ ID NO: 3007764 - DNA, 25 bp, Homo sapien
cagacatggccatgatgccggtgcc

SEQ ID NO: 3007765 - DNA, 25 bp, Homo sapien
tggacttcatgtggatcagctctgg

SEQ ID NO: 3007766 - DNA, 25 bp, Homo sapien
tgccggtgccattcttggccatgcc

SEQ ID NO: 3007767 - DNA, 25 bp, Homo sapien
acttcatgtggatcagctctggcca

SEQ ID NO: 3007768 - DNA, 25 bp, Homo sapien
tagcacccgagatggtgaaaaccaa

SEQ ID NO: 3007769 - DNA, 25 bp, Homo sapien
gtggccatagcacccgagatggtga

SEQ ID NO: 3007770 - DNA, 25 bp, Homo sapien
gccatagcacccgagatggtgaaaa

SEQ ID NO: 3007771 - DNA, 25 bp, Homo sapien
cccgagatggtgaaaaccaaagcat

SEQ ID NO: 3007772 - DNA, 25 bp, Homo sapien
cttccttgtctccactgggctgttt

SEQ ID NO: 3007773 - DNA, 25 bp, Homo sapien
ctgggctcgaagcacaggagagacc

SEQ ID NO: 3007774 - DNA, 25 bp, Homo sapien
gggcatatctgagtgaataatcatt

SEQ ID NO: 3007775 - DNA, 25 bp, Homo sapien
tgaataatcattgctgggctcgaag

SEQ ID NO: 3007776 - DNA, 25 bp, Homo sapien
gtaggaactactttccgcatgcgga

SEQ ID NO: 3007777 - DNA, 25 bp, Homo sapien
tcaaagggtttcatctacatgcaaa

SEQ ID NO: 3007778 - DNA, 25 bp, Homo sapien
acaccgtaggaactactttccgcat

SEQ ID NO: 3007779 - DNA, 25 bp, Homo sapien
tcatctacatgcaaaaccaacaccg

SEQ ID NO: 3007780 - DNA, 25 bp, Homo sapien
ctccagccttgactctccatgcact

SEQ ID NO: 3007781 - DNA, 25 bp, Homo sapien
tccagccttgactctccatgcactc

SEQ ID NO: 3007782 - DNA, 25 bp, Homo sapien
tctggctgctctgccgcattcgagg

SEQ ID NO: 3007783 - DNA, 25 bp, Homo sapien
gctgctctgccgcattcgaggccat

SEQ ID NO: 3007784 - DNA, 25 bp, Homo sapien
ccagtggtttccgagctgctgaagt

SEQ ID NO: 3007785 - DNA, 25 bp, Homo sapien
gtggtttccgagctgctgaagtcag

SEQ ID NO: 3007786 - DNA, 25 bp, Homo sapien
ctctcacttctgccacccgcttccc

SEQ ID NO: 3007787 - DNA, 25 bp, Homo sapien
tctcacttctgccacccgcttccct

SEQ ID NO: 3007788 - DNA, 25 bp, Homo sapien
ctcacttctgccacccgcttccctg

SEQ ID NO: 3007789 - DNA, 25 bp, Homo sapien
caggaattgagtgggcctagcccct

SEQ ID NO: 3007790 - DNA, 25 bp, Homo sapien
gacccctgatgctttcgtgatcacg

SEQ ID NO: 3007791 - DNA, 25 bp, Homo sapien
aacatgtcctcttcccaaaactgtg

SEQ ID NO: 3007792 - DNA, 25 bp, Homo sapien
tcgtgatcacgtgaccatcctcttc

SEQ ID NO: 3007793 - DNA, 25 bp, Homo sapien
tagtgtgagcagcaagtaacccttc

SEQ ID NO: 3007794 - DNA, 25 bp, Homo sapien
gggaacgggcacacaccattcttgt

SEQ ID NO: 3007795 - DNA, 25 bp, Homo sapien
tgagagcctatgtgaaccctttcct

SEQ ID NO: 3007796 - DNA, 25 bp, Homo sapien
cagccttaaacctgtgggcctgagg

SEQ ID NO: 3007797 - DNA, 25 bp, Homo sapien
cccacgctgaagagcaccagagcgg

SEQ ID NO: 3007798 - DNA, 25 bp, Homo sapien
ttgtcaagggcattccccatgcgca

SEQ ID NO: 3007799 - DNA, 25 bp, Homo sapien
gagatcaggcactcggttgaagtag

SEQ ID NO: 3007800 - DNA, 25 bp, Homo sapien
cagaagcagatgttgtcaagggcat

SEQ ID NO: 3007801 - DNA, 25 bp, Homo sapien
acacagcagcggacctcgggggcgg

SEQ ID NO: 3007802 - DNA, 25 bp, Homo sapien
tggcctcctgatctctcgtgctctc

SEQ ID NO: 3007803 - DNA, 25 bp, Homo sapien
tgatctctcgtgctctcggccacga

SEQ ID NO: 3007804 - DNA, 25 bp, Homo sapien
tctctcgtgctctcggccacgaagt

SEQ ID NO: 3007805 - DNA, 25 bp, Homo sapien
ccctcaaacacgagctcgctccgtg

SEQ ID NO: 3007806 - DNA, 25 bp, Homo sapien
ctcgctccgtggctttttcagtatc

SEQ ID NO: 3007807 - DNA, 25 bp, Homo sapien
cctctgcccctcaaacacgagctcg

SEQ ID NO: 3007808 - DNA, 25 bp, Homo sapien
gagctcgctccgtggctttttcagt

SEQ ID NO: 3007809 - DNA, 25 bp, Homo sapien
cgcggagcaataagcccaccgacga

SEQ ID NO: 3007810 - DNA, 25 bp, Homo sapien
ctccgcgcggagcaataagcccacc

SEQ ID NO: 3007811 - DNA, 25 bp, Homo sapien
cgcgcggagcaataagcccaccgac

SEQ ID NO: 3007812 - DNA, 25 bp, Homo sapien
gcggagcaataagcccaccgacgac

SEQ ID NO: 3007813 - DNA, 25 bp, Homo sapien
aggaggcgcggcagcagctccagga

SEQ ID NO: 3007814 - DNA, 25 bp, Homo sapien
ggcggggagcccaggaggcgcggca

SEQ ID NO: 3007815 - DNA, 25 bp, Homo sapien
ggggagcccaggaggcgcggcagca

SEQ ID NO: 3007816 - DNA, 25 bp, Homo sapien
ggcggcggggagcccaggaggcgcg

SEQ ID NO: 3007817 - DNA, 25 bp, Homo sapien
cgggctgcaccgccccctccgcgct

SEQ ID NO: 3007818 - DNA, 25 bp, Homo sapien
gctgcaccgccccctccgcgcttac

SEQ ID NO: 3007819 - DNA, 25 bp, Homo sapien
gggctgcaccgccccctccgcgctt

SEQ ID NO: 3007820 - DNA, 25 bp, Homo sapien
cccgggctgcaccgccccctccgcg

SEQ ID NO: 3007821 - DNA, 25 bp, Homo sapien
ggtgggcgtccgctgggacacgttg

SEQ ID NO: 3007822 - DNA, 25 bp, Homo sapien
tcatgacaatgagcgtggcgaccac

SEQ ID NO: 3007823 - DNA, 25 bp, Homo sapien
gaccaccatgacgaaaataaggaac

SEQ ID NO: 3007824 - DNA, 25 bp, Homo sapien
acgttgagcacgatgacgcaattca

SEQ ID NO: 3007825 - DNA, 25 bp, Homo sapien
ggagcggcacgctcagagaagtctc

SEQ ID NO: 3007826 - DNA, 25 bp, Homo sapien
tgaggaacaagaagacggtctgggc

SEQ ID NO: 3007827 - DNA, 25 bp, Homo sapien
gaagtctctgggattttctgggcaa

SEQ ID NO: 3007828 - DNA, 25 bp, Homo sapien
gatggagaccgtgcatttctggccg

SEQ ID NO: 3007829 - DNA, 25 bp, Homo sapien
taatgacgtagaagagcggcttccg

SEQ ID NO: 3007830 - DNA, 25 bp, Homo sapien
gtagatgacgtcagtctcccctggg

SEQ ID NO: 3007831 - DNA, 25 bp, Homo sapien
cacacagggcacgatgatgttaatg

SEQ ID NO: 3007832 - DNA, 25 bp, Homo sapien
cccgggcagaagtcgatggcccact

SEQ ID NO: 3007833 - DNA, 25 bp, Homo sapien
tcgttgagggtatggaaagccagaa

SEQ ID NO: 3007834 - DNA, 25 bp, Homo sapien
gaaaagggcattctcgttgagggta

SEQ ID NO: 3007835 - DNA, 25 bp, Homo sapien
gatgggggcaattacggacagaaaa

SEQ ID NO: 3007836 - DNA, 25 bp, Homo sapien
cattctcgttgagggtatggaaagc

SEQ ID NO: 3007837 - DNA, 25 bp, Homo sapien
ccgtctagaagcgggtttttctgag

SEQ ID NO: 3007838 - DNA, 25 bp, Homo sapien
gtctagaagcgggtttttctgagca

SEQ ID NO: 3007839 - DNA, 25 bp, Homo sapien
tctagaagcgggtttttctgagcag

SEQ ID NO: 3007840 - DNA, 25 bp, Homo sapien
cgtctagaagcgggtttttctgagc

SEQ ID NO: 3007841 - DNA, 25 bp, Homo sapien
caaaagtgaactccacctcttcggc

SEQ ID NO: 3007842 - DNA, 25 bp, Homo sapien
atggtcttgccgtcgttgtctacgg

SEQ ID NO: 3007843 - DNA, 25 bp, Homo sapien
gtataggcctctgtgtcgatgtcga

SEQ ID NO: 3007844 - DNA, 25 bp, Homo sapien
cagtataggcctctgtgtcgatgtc

SEQ ID NO: 3007845 - DNA, 25 bp, Homo sapien
cagtgcctacgcctggctccgcctc

SEQ ID NO: 3007846 - DNA, 25 bp, Homo sapien
ccaacaataatcgtccgggcctcgg

SEQ ID NO: 3007847 - DNA, 25 bp, Homo sapien
aatcgtccgggcctcggagtagctc

SEQ ID NO: 3007848 - DNA, 25 bp, Homo sapien
gtccgggcctcggagtagctcttcc

SEQ ID NO: 3007849 - DNA, 25 bp, Homo sapien
tccactgcgcagacgctgcggtaga

SEQ ID NO: 3007850 - DNA, 25 bp, Homo sapien
tagatggccggaggcagccacgtca

SEQ ID NO: 3007851 - DNA, 25 bp, Homo sapien
gcgaacagttctgccaatcgaaggg

SEQ ID NO: 3007852 - DNA, 25 bp, Homo sapien
gagcacgttggcgtcgtaggccact

SEQ ID NO: 3007853 - DNA, 25 bp, Homo sapien
ctggcagccacacgagttctgaagg

SEQ ID NO: 3007854 - DNA, 25 bp, Homo sapien
tatacccccaaagtcgtccttgctg

SEQ ID NO: 3007855 - DNA, 25 bp, Homo sapien
agttgagtcggtaatcctgccaatc

SEQ ID NO: 3007856 - DNA, 25 bp, Homo sapien
gaagggactcgcagggtttctatac

SEQ ID NO: 3007857 - DNA, 25 bp, Homo sapien
ccaatccagacgctagtggtgagag

SEQ ID NO: 3007858 - DNA, 25 bp, Homo sapien
cagacgctagtggtgagagtctcct

SEQ ID NO: 3007859 - DNA, 25 bp, Homo sapien
tccagacgctagtggtgagagtctc

SEQ ID NO: 3007860 - DNA, 25 bp, Homo sapien
gattccaatccagacgctagtggtg

SEQ ID NO: 3007861 - DNA, 25 bp, Homo sapien
actggccggcttcctgggtcatagt

SEQ ID NO: 3007862 - DNA, 25 bp, Homo sapien
tgagatgagattcgtcagggtgacc

SEQ ID NO: 3007863 - DNA, 25 bp, Homo sapien
gaagagatggtgataaagacgcagt

SEQ ID NO: 3007864 - DNA, 25 bp, Homo sapien
tggtgacagtatcctcaggctcccg

SEQ ID NO: 3007865 - DNA, 25 bp, Homo sapien
agcaggaccccaagcggagcccttg

SEQ ID NO: 3007866 - DNA, 25 bp, Homo sapien
gaggagcaggaccccaagcggagcc

SEQ ID NO: 3007867 - DNA, 25 bp, Homo sapien
caagaggagcaggaccccaagcgga

SEQ ID NO: 3007868 - DNA, 25 bp, Homo sapien
ggagcaggaccccaagcggagccct

SEQ ID NO: 3007869 - DNA, 25 bp, Homo sapien
ttctccttgtctatccctgctgcca

SEQ ID NO: 3007870 - DNA, 25 bp, Homo sapien
caacctgatcgccaggtttgcccat

SEQ ID NO: 3007871 - DNA, 25 bp, Homo sapien
ccttgtggtcacagatgatagtacc

SEQ ID NO: 3007872 - DNA, 25 bp, Homo sapien
tgatagtaccgtcttcccatcctac

SEQ ID NO: 3007873 - DNA, 25 bp, Homo sapien
gctgcaacttgtgagtgaccagtgc

SEQ ID NO: 3007874 - DNA, 25 bp, Homo sapien
gcaacttgtgagtgaccagtgcatc

SEQ ID NO: 3007875 - DNA, 25 bp, Homo sapien
acttgtgagtgaccagtgcatccca

SEQ ID NO: 3007876 - DNA, 25 bp, Homo sapien
gctggagctgcaacttgtgagtgac

SEQ ID NO: 3007877 - DNA, 25 bp, Homo sapien
agtacaggaaggagagtccataccg

SEQ ID NO: 3007878 - DNA, 25 bp, Homo sapien
caggaaggagagtccataccgttca

SEQ ID NO: 3007879 - DNA, 25 bp, Homo sapien
tacaggaaggagagtccataccgtt

SEQ ID NO: 3007880 - DNA, 25 bp, Homo sapien
cagtacaggaaggagagtccatacc

SEQ ID NO: 3007881 - DNA, 25 bp, Homo sapien
gacaactgctgggacttacctggca

SEQ ID NO: 3007882 - DNA, 25 bp, Homo sapien
cagcagcctgcagtactaggggcaa

SEQ ID NO: 3007883 - DNA, 25 bp, Homo sapien
gactgaatagtcttgggtttcctgc

SEQ ID NO: 3007884 - DNA, 25 bp, Homo sapien
cagcaggacagcaaggggtggaccc

SEQ ID NO: 3007885 - DNA, 25 bp, Homo sapien
gcatttgcaaaaaaccagcggctgc

SEQ ID NO: 3007886 - DNA, 25 bp, Homo sapien
ggcatgacagatttatacagcattt

SEQ ID NO: 3007887 - DNA, 25 bp, Homo sapien
gctgctgtggcatgacagatttata

SEQ ID NO: 3007888 - DNA, 25 bp, Homo sapien
catttgcaaaaaaccagcggctgct

SEQ ID NO: 3007889 - DNA, 25 bp, Homo sapien
tagccaaggacagagaaatcacagg

SEQ ID NO: 3007890 - DNA, 25 bp, Homo sapien
caagtcctttaccgcagaggaagaa

SEQ ID NO: 3007891 - DNA, 25 bp, Homo sapien
tgtgtgccctgaaactaaaacccag

SEQ ID NO: 3007892 - DNA, 25 bp, Homo sapien
tcacaggatcaggacgagcagggca

SEQ ID NO: 3007893 - DNA, 25 bp, Homo sapien
caggcgggcatagtacggcgtgaag

SEQ ID NO: 3007894 - DNA, 25 bp, Homo sapien
catagtacggcgtgaagcccttcca

SEQ ID NO: 3007895 - DNA, 25 bp, Homo sapien
tagcggacaactttgaacagcacgt

SEQ ID NO: 3007896 - DNA, 25 bp, Homo sapien
aagatgaaggtgaggacggtgtggg

SEQ ID NO: 3007897 - DNA, 25 bp, Homo sapien
cagcccgttcttgtattccggcttc

SEQ ID NO: 3007898 - DNA, 25 bp, Homo sapien
atcaatcatccgcatgttctggatt

SEQ ID NO: 3007899 - DNA, 25 bp, Homo sapien
tgtattccggcttcccatcaatcat

SEQ ID NO: 3007900 - DNA, 25 bp, Homo sapien
ggcttcccatcaatcatccgcatgt

SEQ ID NO: 3007901 - DNA, 25 bp, Homo sapien
tggcacagaagtggcacaagatgtt

SEQ ID NO: 3007902 - DNA, 25 bp, Homo sapien
aggcagcagtggtgacaagaccgct

SEQ ID NO: 3007903 - DNA, 25 bp, Homo sapien
gacaagaccgctgatcatgctggca

SEQ ID NO: 3007904 - DNA, 25 bp, Homo sapien
gcacagaagtggcacaagatgttgt

SEQ ID NO: 3007905 - DNA, 25 bp, Homo sapien
ggctgggaactaagggcccagctct

SEQ ID NO: 3007906 - DNA, 25 bp, Homo sapien
aggctgggaactaagggcccagctc

SEQ ID NO: 3007907 - DNA, 25 bp, Homo sapien
gctgggaactaagggcccagctctg

SEQ ID NO: 3007908 - DNA, 25 bp, Homo sapien
cccgagccatggtagggatgcagcc

SEQ ID NO: 3007909 - DNA, 25 bp, Homo sapien
cgagctgggcagcattgacgacgac

SEQ ID NO: 3007910 - DNA, 25 bp, Homo sapien
cattgacgacgacggcccgagccat

SEQ ID NO: 3007911 - DNA, 25 bp, Homo sapien
cttggattgggagtaggaggcgagc

SEQ ID NO: 3007912 - DNA, 25 bp, Homo sapien
tgattcgaatcagggcgttaaacac

SEQ ID NO: 3007913 - DNA, 25 bp, Homo sapien
cctcttcccgggtgattcgaatcag

SEQ ID NO: 3007914 - DNA, 25 bp, Homo sapien
catttttgtagccacggcgctggtc

SEQ ID NO: 3007915 - DNA, 25 bp, Homo sapien
cagggcgttaaacacatttttgtag

SEQ ID NO: 3007916 - DNA, 25 bp, Homo sapien
cacggtatagatgccaaggcgggta

SEQ ID NO: 3007917 - DNA, 25 bp, Homo sapien
gtcatgcggataagagccacttcgg

SEQ ID NO: 3007918 - DNA, 25 bp, Homo sapien
gcacctgcggtcatgccaatcacag

SEQ ID NO: 3007919 - DNA, 25 bp, Homo sapien
gaaagccagggggagtaccatcagc

SEQ ID NO: 3007920 - DNA, 25 bp, Homo sapien
tatcaggccaaggtctagagctgcc

SEQ ID NO: 3007921 - DNA, 25 bp, Homo sapien
gccaaggtctagagctgccaaccca

SEQ ID NO: 3007922 - DNA, 25 bp, Homo sapien
agcatatcaggccaaggtctagagc

SEQ ID NO: 3007923 - DNA, 25 bp, Homo sapien
gtcagcatatcaggccaaggtctag

SEQ ID NO: 3007924 - DNA, 25 bp, Homo sapien
gtctaccctccatcctgaggcccca

SEQ ID NO: 3007925 - DNA, 25 bp, Homo sapien
accctccatcctgaggccccaatac

SEQ ID NO: 3007926 - DNA, 25 bp, Homo sapien
agtctaccctccatcctgaggcccc

SEQ ID NO: 3007927 - DNA, 25 bp, Homo sapien
ctaccctccatcctgaggccccaat

SEQ ID NO: 3007928 - DNA, 25 bp, Homo sapien
ctggttttgtactctcgagtcttgg

SEQ ID NO: 3007929 - DNA, 25 bp, Homo sapien
gctcaactgcatccggttcttcacc

SEQ ID NO: 3007930 - DNA, 25 bp, Homo sapien
ccagtgtaaatgcccctcaggcctt

SEQ ID NO: 3007931 - DNA, 25 bp, Homo sapien
ttctgccttcaggatactggtgagg

SEQ ID NO: 3007932 - DNA, 25 bp, Homo sapien
ttagcaatgcgctgggaaactcagc

SEQ ID NO: 3007933 - DNA, 25 bp, Homo sapien
tatatgtacaccaagtgcaacgggt

SEQ ID NO: 3007934 - DNA, 25 bp, Homo sapien
tccaagcagcttcatgacagtcaag

SEQ ID NO: 3007935 - DNA, 25 bp, Homo sapien
ggttgtgcaacgaccctgcatgcag

SEQ ID NO: 3007936 - DNA, 25 bp, Homo sapien
caaacaggaacttgacggacttagg

SEQ ID NO: 3007937 - DNA, 25 bp, Homo sapien
caggaacttgacggacttaggggag

SEQ ID NO: 3007938 - DNA, 25 bp, Homo sapien
ggagcttgatggaagcgtgcgagaa

SEQ ID NO: 3007939 - DNA, 25 bp, Homo sapien
aggcggccgggagtaaggcggagct

SEQ ID NO: 3007940 - DNA, 25 bp, Homo sapien
acaccgcgcgcgcaacagagcgagg

SEQ ID NO: 3007941 - DNA, 25 bp, Homo sapien
tctcaggtccgacacccgctggaag

SEQ ID NO: 3007942 - DNA, 25 bp, Homo sapien
tacacctctggtgacctatttgcac

SEQ ID NO: 3007943 - DNA, 25 bp, Homo sapien
ttttcctgggccttcaacagatccc

SEQ ID NO: 3007944 - DNA, 25 bp, Homo sapien
tcttctgagggataggggacattcc

SEQ ID NO: 3007945 - DNA, 25 bp, Homo sapien
tcttcccctgttatcctggtctaat

SEQ ID NO: 3007946 - DNA, 25 bp, Homo sapien
tttccaaccacacacgggagggata

SEQ ID NO: 3007947 - DNA, 25 bp, Homo sapien
accacacacgggagggatatgggta

SEQ ID NO: 3007948 - DNA, 25 bp, Homo sapien
tccaaccacacacgggagggatatg

SEQ ID NO: 3007949 - DNA, 25 bp, Homo sapien
caaccacacacgggagggatatggg

SEQ ID NO: 3007950 - DNA, 25 bp, Homo sapien
gatcaaaccaccgtggacaccttct

SEQ ID NO: 3007951 - DNA, 25 bp, Homo sapien
ttgttgatcaaaccaccgtggacac

SEQ ID NO: 3007952 - DNA, 25 bp, Homo sapien
caaaccaccgtggacaccttctttg

SEQ ID NO: 3007953 - DNA, 25 bp, Homo sapien
acatttcttgttgatcaaaccaccg

SEQ ID NO: 3007954 - DNA, 25 bp, Homo sapien
gaaaggaggctaggatccaggtgtc

SEQ ID NO: 3007955 - DNA, 25 bp, Homo sapien
aaggaggctaggatccaggtgtcac

SEQ ID NO: 3007956 - DNA, 25 bp, Homo sapien
gatccaggtgtcacaattccacccc

SEQ ID NO: 3007957 - DNA, 25 bp, Homo sapien
agagaaaggaggctaggatccaggt

SEQ ID NO: 3007958 - DNA, 25 bp, Homo sapien
gtttctaatccgagctcaaggcagt

SEQ ID NO: 3007959 - DNA, 25 bp, Homo sapien
gaacacaatactggtctgactccct

SEQ ID NO: 3007960 - DNA, 25 bp, Homo sapien
tgagacagaatggagggactatccc

SEQ ID NO: 3007961 - DNA, 25 bp, Homo sapien
cttaaacgctggagaggaacagact

SEQ ID NO: 3007962 - DNA, 25 bp, Homo sapien
cttggtacgaagatccatgctaaat

SEQ ID NO: 3007963 - DNA, 25 bp, Homo sapien
accggtgctcttggtacgaagatcc

SEQ ID NO: 3007964 - DNA, 25 bp, Homo sapien
ggccccaccggtgctcttggtacga

SEQ ID NO: 3007965 - DNA, 25 bp, Homo sapien
ggtacgaagatccatgctaaattcc

SEQ ID NO: 3007966 - DNA, 25 bp, Homo sapien
gcataggacctacgggcaactgagg

SEQ ID NO: 3007967 - DNA, 25 bp, Homo sapien
accaagcgcccatcaagttagtcag

SEQ ID NO: 3007968 - DNA, 25 bp, Homo sapien
gttagtcagtgcaccaagattccca

SEQ ID NO: 3007969 - DNA, 25 bp, Homo sapien
gcctgggtctccaagtaacctagag

SEQ ID NO: 3007970 - DNA, 25 bp, Homo sapien
tccaaaccggagcagtgccccggac

SEQ ID NO: 3007971 - DNA, 25 bp, Homo sapien
gtccaaaccggagcagtgccccgga

SEQ ID NO: 3007972 - DNA, 25 bp, Homo sapien
tcagggtccaaaccggagcagtgcc

SEQ ID NO: 3007973 - DNA, 25 bp, Homo sapien
cagggtccaaaccggagcagtgccc

SEQ ID NO: 3007974 - DNA, 25 bp, Homo sapien
cgtgatgttgacgaacgttttcccg

SEQ ID NO: 3007975 - DNA, 25 bp, Homo sapien
cgctgctactggggctgctctcggc

SEQ ID NO: 3007976 - DNA, 25 bp, Homo sapien
ctgctactggggctgctctcggcgc

SEQ ID NO: 3007977 - DNA, 25 bp, Homo sapien
ggcgctgctactggggctgctctcg

SEQ ID NO: 3007978 - DNA, 25 bp, Homo sapien
tgctactggggctgctctcggcgct

SEQ ID NO: 3007979 - DNA, 25 bp, Homo sapien
tggggccgcggactgggctcgagct

SEQ ID NO: 3007980 - DNA, 25 bp, Homo sapien
cgctgccgtccggaccgcggctccg

SEQ ID NO: 3007981 - DNA, 25 bp, Homo sapien
agggtagggtttgctccaatttgca

SEQ ID NO: 3007982 - DNA, 25 bp, Homo sapien
gcaaaatttgcagagttcgatggaa

SEQ ID NO: 3007983 - DNA, 25 bp, Homo sapien
gaaagcaggaggaattagcaagctg

SEQ ID NO: 3007984 - DNA, 25 bp, Homo sapien
aatttgcactgaatataaaccagac

SEQ ID NO: 3007985 - DNA, 25 bp, Homo sapien
ggagccggctgcacgggagcgcgcc

SEQ ID NO: 3007986 - DNA, 25 bp, Homo sapien
ccggagccggctgcacgggagcgcg

SEQ ID NO: 3007987 - DNA, 25 bp, Homo sapien
agccggctgcacgggagcgcgcccg

SEQ ID NO: 3007988 - DNA, 25 bp, Homo sapien
cggagccggctgcacgggagcgcgc

SEQ ID NO: 3007989 - DNA, 25 bp, Homo sapien
ggtcgtgcaggttgggttcaccagg

SEQ ID NO: 3007990 - DNA, 25 bp, Homo sapien
cccagcgtcttctcgggtcgtgcag

SEQ ID NO: 3007991 - DNA, 25 bp, Homo sapien
tctcgggtcgtgcaggttgggttca

SEQ ID NO: 3007992 - DNA, 25 bp, Homo sapien
tcttctcgggtcgtgcaggttgggt

SEQ ID NO: 3007993 - DNA, 25 bp, Homo sapien
tgttcctcgacagccgcgcggctga

SEQ ID NO: 3007994 - DNA, 25 bp, Homo sapien
gcgcggctgagtcactggcgggctc

SEQ ID NO: 3007995 - DNA, 25 bp, Homo sapien
gcatccctggcgtccacgccgaatc

SEQ ID NO: 3007996 - DNA, 25 bp, Homo sapien
cgacgcccctcgagtccgtgttcct

SEQ ID NO: 3007997 - DNA, 25 bp, Homo sapien
atctgtattattccccgttcttgga

SEQ ID NO: 3007998 - DNA, 25 bp, Homo sapien
caggtgggtatttaatctgtattat

SEQ ID NO: 3007999 - DNA, 25 bp, Homo sapien
ggctggggtactttacattcaataa

SEQ ID NO: 3008000 - DNA, 25 bp, Homo sapien
gtgtgaatgcacaggtgggtattta

SEQ ID NO: 3008001 - DNA, 25 bp, Homo sapien
gcacaggtgggtatttaatctgtat

SEQ ID NO: 3008002 - DNA, 25 bp, Homo sapien
gaatgcacaggtgggtatttaatct

SEQ ID NO: 3008003 - DNA, 25 bp, Homo sapien
taatacagattaaatacccacctgt

SEQ ID NO: 3008004 - DNA, 25 bp, Homo sapien
tgaatgtaaagtaccccagccccat

SEQ ID NO: 3008005 - DNA, 25 bp, Homo sapien
tccaagaacggggaataatacagat

SEQ ID NO: 3008006 - DNA, 25 bp, Homo sapien
tatttattgaatgtaaagtacccca

SEQ ID NO: 3008007 - DNA, 25 bp, Homo sapien
ttattgaatgtaaagtaccccagcc

SEQ ID NO: 3008008 - DNA, 25 bp, Homo sapien
gattaaatacccacctgtgcattca

SEQ ID NO: 3008009 - DNA, 25 bp, Homo sapien
tgctgctattagagcccatcctgga

SEQ ID NO: 3008010 - DNA, 25 bp, Homo sapien
gacaaggctgctgctattagagccc

SEQ ID NO: 3008011 - DNA, 25 bp, Homo sapien
tgatttgtcaccgttggagcttgga

SEQ ID NO: 3008012 - DNA, 25 bp, Homo sapien
tggatatgtgcgtggcatgtgtgtg

SEQ ID NO: 3008013 - DNA, 25 bp, Homo sapien
aacaggtgtttgatttgtcaccgtt

SEQ ID NO: 3008014 - DNA, 25 bp, Homo sapien
caccgttggagcttggatatgtgcg

SEQ ID NO: 3008015 - DNA, 25 bp, Homo sapien
caacggtgacaaatcaaacacctgt

SEQ ID NO: 3008016 - DNA, 25 bp, Homo sapien
tccaggatgggctctaatagcagca

SEQ ID NO: 3008017 - DNA, 25 bp, Homo sapien
gggctctaatagcagcagccttgtc

SEQ ID NO: 3008018 - DNA, 25 bp, Homo sapien
cgcacatatccaagctccaacggtg

SEQ ID NO: 3008019 - DNA, 25 bp, Homo sapien
caagctccaacggtgacaaatcaaa

SEQ ID NO: 3008020 - DNA, 25 bp, Homo sapien
catatccaagctccaacggtgacaa

SEQ ID NO: 3008021 - DNA, 25 bp, Homo sapien
tgcccgtggccaataagagggacac

SEQ ID NO: 3008022 - DNA, 25 bp, Homo sapien
tgaatgagatcagagccaagaagcg

SEQ ID NO: 3008023 - DNA, 25 bp, Homo sapien
cattgaagaggctatgaatgagatc

SEQ ID NO: 3008024 - DNA, 25 bp, Homo sapien
gacacacgctccattgaagaggcta

SEQ ID NO: 3008025 - DNA, 25 bp, Homo sapien
tggccaataagagggacacacgctc

SEQ ID NO: 3008026 - DNA, 25 bp, Homo sapien
ggaagagttgccgccaacctcctag

SEQ ID NO: 3008027 - DNA, 25 bp, Homo sapien
cgcttcttggctctgatctcattca

SEQ ID NO: 3008028 - DNA, 25 bp, Homo sapien
ggaggttggcggcaactcttcccca

SEQ ID NO: 3008029 - DNA, 25 bp, Homo sapien
cattcatagcctcttcaatggagcg

SEQ ID NO: 3008030 - DNA, 25 bp, Homo sapien
gagcgtgtgtccctcttattggcca

SEQ ID NO: 3008031 - DNA, 25 bp, Homo sapien
gtgtccctcttattggccacgggca

SEQ ID NO: 3008032 - DNA, 25 bp, Homo sapien
tagcctcttcaatggagcgtgtgtc

SEQ ID NO: 3008033 - DNA, 25 bp, Homo sapien
ctgggagaggagcataggatgcggc

SEQ ID NO: 3008034 - DNA, 25 bp, Homo sapien
ggctgaggtacggatttctaggccc

SEQ ID NO: 3008035 - DNA, 25 bp, Homo sapien
tgaggtacggatttctaggcccgcc

SEQ ID NO: 3008036 - DNA, 25 bp, Homo sapien
gctgaggtacggatttctaggcccg

SEQ ID NO: 3008037 - DNA, 25 bp, Homo sapien
cataggatgcggcaggagggcagtg

SEQ ID NO: 3008038 - DNA, 25 bp, Homo sapien
gagaggagcataggatgcggcagga

SEQ ID NO: 3008039 - DNA, 25 bp, Homo sapien
cgggcctagaaatccgtacctcagc

SEQ ID NO: 3008040 - DNA, 25 bp, Homo sapien
cactgccctcctgccgcatcctatg

SEQ ID NO: 3008041 - DNA, 25 bp, Homo sapien
gggcctagaaatccgtacctcagcc

SEQ ID NO: 3008042 - DNA, 25 bp, Homo sapien
gcgggcctagaaatccgtacctcag

SEQ ID NO: 3008043 - DNA, 25 bp, Homo sapien
gccgcatcctatgctcctctcccag

SEQ ID NO: 3008044 - DNA, 25 bp, Homo sapien
ggcgggcctagaaatccgtacctca

SEQ ID NO: 3008045 - DNA, 25 bp, Homo sapien
gactacaaggacaagtacagccacc

SEQ ID NO: 3008046 - DNA, 25 bp, Homo sapien
gcccacatgctacaggccaataaga

SEQ ID NO: 3008047 - DNA, 25 bp, Homo sapien
tgagccctgccagcgactacaagga

SEQ ID NO: 3008048 - DNA, 25 bp, Homo sapien
caggccaataagacctacggctgtg

SEQ ID NO: 3008049 - DNA, 25 bp, Homo sapien
agtacagccacctcatcggcaaggg

SEQ ID NO: 3008050 - DNA, 25 bp, Homo sapien
agccaaagacgcagcccacatgcta

SEQ ID NO: 3008051 - DNA, 25 bp, Homo sapien
catgtgggctgcgtctttggctgct

SEQ ID NO: 3008052 - DNA, 25 bp, Homo sapien
cccttgccgatgaggtggctgtact

SEQ ID NO: 3008053 - DNA, 25 bp, Homo sapien
tcttattggcctgtagcatgtgggc

SEQ ID NO: 3008054 - DNA, 25 bp, Homo sapien
cacagccgtaggtcttattggcctg

SEQ ID NO: 3008055 - DNA, 25 bp, Homo sapien
tggctgtacttgtccttgtagtcgc

SEQ ID NO: 3008056 - DNA, 25 bp, Homo sapien
tccttgtagtcgctggcagggctca

SEQ ID NO: 3008057 - DNA, 25 bp, Homo sapien
gagctagactcttaccgtcgtggag

SEQ ID NO: 3008058 - DNA, 25 bp, Homo sapien
tagactcttaccgtcgtggagagga

SEQ ID NO: 3008059 - DNA, 25 bp, Homo sapien
gactcttaccgtcgtggagaggaat

SEQ ID NO: 3008060 - DNA, 25 bp, Homo sapien
gaagagctagactcttaccgtcgtg

SEQ ID NO: 3008061 - DNA, 25 bp, Homo sapien
tcagatgaagagctagactcttacc

SEQ ID NO: 3008062 - DNA, 25 bp, Homo sapien
ctcttaccgtcgtggagaggaatgg

SEQ ID NO: 3008063 - DNA, 25 bp, Homo sapien
tcctctccacgacggtaagagtcta

SEQ ID NO: 3008064 - DNA, 25 bp, Homo sapien
ccattcctctccacgacggtaagag

SEQ ID NO: 3008065 - DNA, 25 bp, Homo sapien
tctccacgacggtaagagtctagct

SEQ ID NO: 3008066 - DNA, 25 bp, Homo sapien
gacggtaagagtctagctcttcatc

SEQ ID NO: 3008067 - DNA, 25 bp, Homo sapien
tccacgacggtaagagtctagctct

SEQ ID NO: 3008068 - DNA, 25 bp, Homo sapien
gtaagagtctagctcttcatctgag

SEQ ID NO: 3008069 - DNA, 25 bp, Homo sapien
ccctccccgaccaaggaatgaaatg

SEQ ID NO: 3008070 - DNA, 25 bp, Homo sapien
catttcattccttggtcggggaggg

SEQ ID NO: 3008071 - DNA, 25 bp, Homo sapien
ccctccccgaccaaggaatgaaatg

SEQ ID NO: 3008072 - DNA, 25 bp, Homo sapien
tgaaacatttgtatggactctgacc

SEQ ID NO: 3008073 - DNA, 25 bp, Homo sapien
cccgaccaaggaatgaaatgaaaca

SEQ ID NO: 3008074 - DNA, 25 bp, Homo sapien
tatggactctgaccccatcattctg

SEQ ID NO: 3008075 - DNA, 25 bp, Homo sapien
gaccccatcattctgctcttctcca

SEQ ID NO: 3008076 - DNA, 25 bp, Homo sapien
aacatttgtatggactctgacccca

SEQ ID NO: 3008077 - DNA, 25 bp, Homo sapien
catttcattccttggtcggggaggg

SEQ ID NO: 3008078 - DNA, 25 bp, Homo sapien
gaatgatggggtcagagtccataca

SEQ ID NO: 3008079 - DNA, 25 bp, Homo sapien
gggtcagagtccatacaaatgtttc

SEQ ID NO: 3008080 - DNA, 25 bp, Homo sapien
aatgtttcatttcattccttggtcg

SEQ ID NO: 3008081 - DNA, 25 bp, Homo sapien
ggtcagagtccatacaaatgtttca

SEQ ID NO: 3008082 - DNA, 25 bp, Homo sapien
tgtttcatttcattccttggtcggg

SEQ ID NO: 3008083 - DNA, 25 bp, Homo sapien
gggcctgaattcctcattctctcct

SEQ ID NO: 3008084 - DNA, 25 bp, Homo sapien
aaagggcctgaattcctcattctct

SEQ ID NO: 3008085 - DNA, 25 bp, Homo sapien
taaagggcctgaattcctcattctc

SEQ ID NO: 3008086 - DNA, 25 bp, Homo sapien
agggcctgaattcctcattctctcc

SEQ ID NO: 3008087 - DNA, 25 bp, Homo sapien
aagggcctgaattcctcattctctc

SEQ ID NO: 3008088 - DNA, 25 bp, Homo sapien
gtaaagggcctgaattcctcattct

SEQ ID NO: 3008089 - DNA, 25 bp, Homo sapien
agagaatgaggaattcaggcccttt

SEQ ID NO: 3008090 - DNA, 25 bp, Homo sapien
gagagaatgaggaattcaggccctt

SEQ ID NO: 3008091 - DNA, 25 bp, Homo sapien
agaatgaggaattcaggccctttac

SEQ ID NO: 3008092 - DNA, 25 bp, Homo sapien
gagaatgaggaattcaggcccttta

SEQ ID NO: 3008093 - DNA, 25 bp, Homo sapien
ggagagaatgaggaattcaggccct

SEQ ID NO: 3008094 - DNA, 25 bp, Homo sapien
aggagagaatgaggaattcaggccc

SEQ ID NO: 3008095 - DNA, 25 bp, Homo sapien
gactgtcgctatgtcatgatcttca

SEQ ID NO: 3008096 - DNA, 25 bp, Homo sapien
tgatgactgtcgctatgtcatgatc

SEQ ID NO: 3008097 - DNA, 25 bp, Homo sapien
tgtcgctatgtcatgatcttcaaaa

SEQ ID NO: 3008098 - DNA, 25 bp, Homo sapien
aagatgatgactgtcgctatgtcat

SEQ ID NO: 3008099 - DNA, 25 bp, Homo sapien
gatgatgactgtcgctatgtcatga

SEQ ID NO: 3008100 - DNA, 25 bp, Homo sapien
actgtcgctatgtcatgatcttcaa

SEQ ID NO: 3008101 - DNA, 25 bp, Homo sapien
tttgaagatcatgacatagcgacag

SEQ ID NO: 3008102 - DNA, 25 bp, Homo sapien
ttttgaagatcatgacatagcgaca

SEQ ID NO: 3008103 - DNA, 25 bp, Homo sapien
gatcatgacatagcgacagtcatca

SEQ ID NO: 3008104 - DNA, 25 bp, Homo sapien
tgaagatcatgacatagcgacagtc

SEQ ID NO: 3008105 - DNA, 25 bp, Homo sapien
gaagatcatgacatagcgacagtca

SEQ ID NO: 3008106 - DNA, 25 bp, Homo sapien
catgacatagcgacagtcatcatct

SEQ ID NO: 3008107 - DNA, 25 bp, Homo sapien
agcggggcatgaaagggccagcggg

SEQ ID NO: 3008108 - DNA, 25 bp, Homo sapien
gaggaaggaaatgggtggctagcgg

SEQ ID NO: 3008109 - DNA, 25 bp, Homo sapien
cgctcctggctcaagatgctctttc

SEQ ID NO: 3008110 - DNA, 25 bp, Homo sapien
gctagcggggcatgaaagggccagc

SEQ ID NO: 3008111 - DNA, 25 bp, Homo sapien
ccgctcctggctcaagatgctcttt

SEQ ID NO: 3008112 - DNA, 25 bp, Homo sapien
aaatgggtggctagcggggcatgaa

SEQ ID NO: 3008113 - DNA, 25 bp, Homo sapien
aaagagcatcttgagccaggagcgg

SEQ ID NO: 3008114 - DNA, 25 bp, Homo sapien
ttcatgccccgctagccacccattt

SEQ ID NO: 3008115 - DNA, 25 bp, Homo sapien
gaaagagcatcttgagccaggagcg

SEQ ID NO: 3008116 - DNA, 25 bp, Homo sapien
tggccctttcatgccccgctagcca

SEQ ID NO: 3008117 - DNA, 25 bp, Homo sapien
ccgctagccacccatttccttcctc

SEQ ID NO: 3008118 - DNA, 25 bp, Homo sapien
cgctggccctttcatgccccgctag

SEQ ID NO: 3008119 - DNA, 25 bp, Homo sapien
tcattcaagacagtgggcagatcaa

SEQ ID NO: 3008120 - DNA, 25 bp, Homo sapien
aagtttcagccaatgaacaagatcg

SEQ ID NO: 3008121 - DNA, 25 bp, Homo sapien
ttcagccaatgaacaagatcgagag

SEQ ID NO: 3008122 - DNA, 25 bp, Homo sapien
gtttcagccaatgaacaagatcgag

SEQ ID NO: 3008123 - DNA, 25 bp, Homo sapien
ttcattcaagacagtgggcagatca

SEQ ID NO: 3008124 - DNA, 25 bp, Homo sapien
tcagccaatgaacaagatcgagagg

SEQ ID NO: 3008125 - DNA, 25 bp, Homo sapien
gatcttgttcattggctgaaacttt

SEQ ID NO: 3008126 - DNA, 25 bp, Homo sapien
cctctcgatcttgttcattggctga

SEQ ID NO: 3008127 - DNA, 25 bp, Homo sapien
tcgatcttgttcattggctgaaact

SEQ ID NO: 3008128 - DNA, 25 bp, Homo sapien
tgatctgcccactgtcttgaatgaa

SEQ ID NO: 3008129 - DNA, 25 bp, Homo sapien
tctcgatcttgttcattggctgaaa

SEQ ID NO: 3008130 - DNA, 25 bp, Homo sapien
ttgatctgcccactgtcttgaatga

SEQ ID NO: 3008131 - DNA, 25 bp, Homo sapien
attgtctcatatctgcttcctttcc

SEQ ID NO: 3008132 - DNA, 25 bp, Homo sapien
cattgtctcatatctgcttcctttc

SEQ ID NO: 3008133 - DNA, 25 bp, Homo sapien
ccattgtctcatatctgcttccttt

SEQ ID NO: 3008134 - DNA, 25 bp, Homo sapien
ctcatatctgcttcctttcccctct

SEQ ID NO: 3008135 - DNA, 25 bp, Homo sapien
gccattgtctcatatctgcttcctt

SEQ ID NO: 3008136 - DNA, 25 bp, Homo sapien
ttgtctcatatctgcttcctttccc

SEQ ID NO: 3008137 - DNA, 25 bp, Homo sapien
gaaaggaagcagatatgagacaatg

SEQ ID NO: 3008138 - DNA, 25 bp, Homo sapien
agaggggaaaggaagcagatatgag

SEQ ID NO: 3008139 - DNA, 25 bp, Homo sapien
aaaggaagcagatatgagacaatgg

SEQ ID NO: 3008140 - DNA, 25 bp, Homo sapien
ggaaaggaagcagatatgagacaat

SEQ ID NO: 3008141 - DNA, 25 bp, Homo sapien
aaggaagcagatatgagacaatggc

SEQ ID NO: 3008142 - DNA, 25 bp, Homo sapien
gggaaaggaagcagatatgagacaa

SEQ ID NO: 3008143 - DNA, 25 bp, Homo sapien
gggtggagccattgtctcatatctg

SEQ ID NO: 3008144 - DNA, 25 bp, Homo sapien
cattgtctcatatctgcttcctttc

SEQ ID NO: 3008145 - DNA, 25 bp, Homo sapien
ctcatatctgcttcctttcccctct

SEQ ID NO: 3008146 - DNA, 25 bp, Homo sapien
cttgggtggagccattgtctcatat

SEQ ID NO: 3008147 - DNA, 25 bp, Homo sapien
gccattgtctcatatctgcttcctt

SEQ ID NO: 3008148 - DNA, 25 bp, Homo sapien
ttgtctcatatctgcttcctttccc

SEQ ID NO: 3008149 - DNA, 25 bp, Homo sapien
gatatgagacaatggctccacccaa

SEQ ID NO: 3008150 - DNA, 25 bp, Homo sapien
gaaaggaagcagatatgagacaatg

SEQ ID NO: 3008151 - DNA, 25 bp, Homo sapien
aaaggaagcagatatgagacaatgg

SEQ ID NO: 3008152 - DNA, 25 bp, Homo sapien
ggaaaggaagcagatatgagacaat

SEQ ID NO: 3008153 - DNA, 25 bp, Homo sapien
aaggaagcagatatgagacaatggc

SEQ ID NO: 3008154 - DNA, 25 bp, Homo sapien
gggaaaggaagcagatatgagacaa

SEQ ID NO: 3008155 - DNA, 25 bp, Homo sapien
acaggccgcccgcctgaagaaacta

SEQ ID NO: 3008156 - DNA, 25 bp, Homo sapien
gccgcccgcctgaagaaactacaag

SEQ ID NO: 3008157 - DNA, 25 bp, Homo sapien
tagtttcttcaggcgggcggcctgt

SEQ ID NO: 3008158 - DNA, 25 bp, Homo sapien
cttgtagtttcttcaggcgggcggc

SEQ ID NO: 3008159 - DNA, 25 bp, Homo sapien
cgcctgaagaaactacaagagcaag

SEQ ID NO: 3008160 - DNA, 25 bp, Homo sapien
cgcccgcctgaagaaactacaagag

SEQ ID NO: 3008161 - DNA, 25 bp, Homo sapien
agaaacaacagaaagtggagtttcg

SEQ ID NO: 3008162 - DNA, 25 bp, Homo sapien
actacaagagcaagagaaacaacag

SEQ ID NO: 3008163 - DNA, 25 bp, Homo sapien
gccgcccgcctgaagaaactacaag

SEQ ID NO: 3008164 - DNA, 25 bp, Homo sapien
cccgcctgaagaaactacaagagca

SEQ ID NO: 3008165 - DNA, 25 bp, Homo sapien
ctgttgtttctcttgctcttgtagt

SEQ ID NO: 3008166 - DNA, 25 bp, Homo sapien
cgaaactccactttctgttgtttct

SEQ ID NO: 3008167 - DNA, 25 bp, Homo sapien
tgctcttgtagtttcttcaggcggg

SEQ ID NO: 3008168 - DNA, 25 bp, Homo sapien
cttgctcttgtagtttcttcaggcg

SEQ ID NO: 3008169 - DNA, 25 bp, Homo sapien
cttgtagtttcttcaggcgggcggc

SEQ ID NO: 3008170 - DNA, 25 bp, Homo sapien
ctcttgtagtttcttcaggcgggcg

SEQ ID NO: 3008171 - DNA, 25 bp, Homo sapien
ttgcctgcactggtctggagctcct

SEQ ID NO: 3008172 - DNA, 25 bp, Homo sapien
ctgcactggtctggagctcctggcc

SEQ ID NO: 3008173 - DNA, 25 bp, Homo sapien
gcctgcactggtctggagctcctgg

SEQ ID NO: 3008174 - DNA, 25 bp, Homo sapien
actatattgcctgcactggtctgga

SEQ ID NO: 3008175 - DNA, 25 bp, Homo sapien
tattgcctgcactggtctggagctc

SEQ ID NO: 3008176 - DNA, 25 bp, Homo sapien
tatattgcctgcactggtctggagc

SEQ ID NO: 3008177 - DNA, 25 bp, Homo sapien
gctccagaccagtgcaggcaatata

SEQ ID NO: 3008178 - DNA, 25 bp, Homo sapien
tccagaccagtgcaggcaatatagt

SEQ ID NO: 3008179 - DNA, 25 bp, Homo sapien
gagctccagaccagtgcaggcaata

SEQ ID NO: 3008180 - DNA, 25 bp, Homo sapien
aggagctccagaccagtgcaggcaa

SEQ ID NO: 3008181 - DNA, 25 bp, Homo sapien
ccaggagctccagaccagtgcaggc

SEQ ID NO: 3008182 - DNA, 25 bp, Homo sapien
ggccaggagctccagaccagtgcag

SEQ ID NO: 3008183 - DNA, 25 bp, Homo sapien
ccaacatggagaagaaagcccatct

SEQ ID NO: 3008184 - DNA, 25 bp, Homo sapien
gagaagaaagcccatctctactaaa

SEQ ID NO: 3008185 - DNA, 25 bp, Homo sapien
acatggagaagaaagcccatctcta

SEQ ID NO: 3008186 - DNA, 25 bp, Homo sapien
catggcgaaacatcgtctctacgaa

SEQ ID NO: 3008187 - DNA, 25 bp, Homo sapien
ggcaaagagagcgaaactccatctc

SEQ ID NO: 3008188 - DNA, 25 bp, Homo sapien
gaccaacatggagaagaaagcccat

SEQ ID NO: 3008189 - DNA, 25 bp, Homo sapien
gatgggctttcttctccatgttggt

SEQ ID NO: 3008190 - DNA, 25 bp, Homo sapien
tagagatgggctttcttctccatgt

SEQ ID NO: 3008191 - DNA, 25 bp, Homo sapien
ttttcgtagagacgatgtttcgcca

SEQ ID NO: 3008192 - DNA, 25 bp, Homo sapien
tttagtagagatgggctttcttctc

SEQ ID NO: 3008193 - DNA, 25 bp, Homo sapien
gagatggagtttcgctctctttgcc

SEQ ID NO: 3008194 - DNA, 25 bp, Homo sapien
ttcgtagagacgatgtttcgccatg

SEQ ID NO: 3008195 - DNA, 25 bp, Homo sapien
atgcagagaagactcgaaaaccagt

SEQ ID NO: 3008196 - DNA, 25 bp, Homo sapien
cagtcagtggggcccggccttgtag

SEQ ID NO: 3008197 - DNA, 25 bp, Homo sapien
gcccggccttgtagctcacaccttt

SEQ ID NO: 3008198 - DNA, 25 bp, Homo sapien
cagagaagactcgaaaaccagttaa

SEQ ID NO: 3008199 - DNA, 25 bp, Homo sapien
ctacaaggccgggccccactgactg

SEQ ID NO: 3008200 - DNA, 25 bp, Homo sapien
aaaggtgtgagctacaaggccgggc

SEQ ID NO: 3008201 - DNA, 25 bp, Homo sapien
actggttttcgagtcttctctgcat

SEQ ID NO: 3008202 - DNA, 25 bp, Homo sapien
ttaactggttttcgagtcttctctg

SEQ ID NO: 3008203 - DNA, 25 bp, Homo sapien
atgcagagaagactcgaaaaccagt

SEQ ID NO: 3008204 - DNA, 25 bp, Homo sapien
ccggccttgtagctcacacctttaa

SEQ ID NO: 3008205 - DNA, 25 bp, Homo sapien
tgtagctcacacctttaataccacc

SEQ ID NO: 3008206 - DNA, 25 bp, Homo sapien
cagagaagactcgaaaaccagttaa

SEQ ID NO: 3008207 - DNA, 25 bp, Homo sapien
taaagaacagtcagtggggcccggc

SEQ ID NO: 3008208 - DNA, 25 bp, Homo sapien
aaaccagttaaagaacagtcagtgg

SEQ ID NO: 3008209 - DNA, 25 bp, Homo sapien
ggtggtattaaaggtgtgagctaca

SEQ ID NO: 3008210 - DNA, 25 bp, Homo sapien
ggccccactgactgttctttaactg

SEQ ID NO: 3008211 - DNA, 25 bp, Homo sapien
actggttttcgagtcttctctgcat

SEQ ID NO: 3008212 - DNA, 25 bp, Homo sapien
ttaaaggtgtgagctacaaggccgg

SEQ ID NO: 3008213 - DNA, 25 bp, Homo sapien
aaggccgggccccactgactgttct

SEQ ID NO: 3008214 - DNA, 25 bp, Homo sapien
ttaactggttttcgagtcttctctg

SEQ ID NO: 3008215 - DNA, 25 bp, Homo sapien
gggatcacccggcattgacagactg

SEQ ID NO: 3008216 - DNA, 25 bp, Homo sapien
taaatgagtcactcgcctgaggtca

SEQ ID NO: 3008217 - DNA, 25 bp, Homo sapien
aaataactgtgagagcggccacctg

SEQ ID NO: 3008218 - DNA, 25 bp, Homo sapien
gccgagatcagaacaggtaattccg

SEQ ID NO: 3008219 - DNA, 25 bp, Homo sapien
cgttacaggcagaagagtctatttg

SEQ ID NO: 3008220 - DNA, 25 bp, Homo sapien
gaattctctaatgctccgatgactg

SEQ ID NO: 3008221 - DNA, 25 bp, Homo sapien
gaattacctgttctgatctcggctc

SEQ ID NO: 3008222 - DNA, 25 bp, Homo sapien
cagtcatcggagcattagagaattc

SEQ ID NO: 3008223 - DNA, 25 bp, Homo sapien
catgtgacctcaggcgagtgactca

SEQ ID NO: 3008224 - DNA, 25 bp, Homo sapien
cagtctgtcaatgccgggtgatccc

SEQ ID NO: 3008225 - DNA, 25 bp, Homo sapien
caggtggccgctctcacagttattt

SEQ ID NO: 3008226 - DNA, 25 bp, Homo sapien
caaatagactcttctgcctgtaacg

SEQ ID NO: 3008227 - DNA, 25 bp, Homo sapien
gggctggggcgctcattgatgcagt

SEQ ID NO: 3008228 - DNA, 25 bp, Homo sapien
ggctggggcgctcattgatgcagtg

SEQ ID NO: 3008229 - DNA, 25 bp, Homo sapien
cggggctggggcgctcattgatgca

SEQ ID NO: 3008230 - DNA, 25 bp, Homo sapien
ggggctggggcgctcattgatgcag

SEQ ID NO: 3008231 - DNA, 25 bp, Homo sapien
gctggggcgctcattgatgcagtga

SEQ ID NO: 3008232 - DNA, 25 bp, Homo sapien
actgcatcaatgagcgccccagccc

SEQ ID NO: 3008233 - DNA, 25 bp, Homo sapien
ctgcatcaatgagcgccccagcccc

SEQ ID NO: 3008234 - DNA, 25 bp, Homo sapien
tcactgcatcaatgagcgccccagc

SEQ ID NO: 3008235 - DNA, 25 bp, Homo sapien
cactgcatcaatgagcgccccagcc

SEQ ID NO: 3008236 - DNA, 25 bp, Homo sapien
tgcatcaatgagcgccccagccccg

SEQ ID NO: 3008237 - DNA, 25 bp, Homo sapien
cacagtccggggctggggcgctcat

SEQ ID NO: 3008238 - DNA, 25 bp, Homo sapien
gcgctcattgatgcagtgatcacac

SEQ ID NO: 3008239 - DNA, 25 bp, Homo sapien
gggcgctcattgatgcagtgatcac

SEQ ID NO: 3008240 - DNA, 25 bp, Homo sapien
ggcgctcattgatgcagtgatcaca

SEQ ID NO: 3008241 - DNA, 25 bp, Homo sapien
ggaggccacagtccggggctggggc

SEQ ID NO: 3008242 - DNA, 25 bp, Homo sapien
gaggccacagtccggggctggggcg

SEQ ID NO: 3008243 - DNA, 25 bp, Homo sapien
tgatcactgcatcaatgagcgcccc

SEQ ID NO: 3008244 - DNA, 25 bp, Homo sapien
atcactgcatcaatgagcgccccag

SEQ ID NO: 3008245 - DNA, 25 bp, Homo sapien
gtgtgatcactgcatcaatgagcgc

SEQ ID NO: 3008246 - DNA, 25 bp, Homo sapien
gccccagccccggactgtggcctcc

SEQ ID NO: 3008247 - DNA, 25 bp, Homo sapien
gtgatcactgcatcaatgagcgccc

SEQ ID NO: 3008248 - DNA, 25 bp, Homo sapien
tgtgatcactgcatcaatgagcgcc

SEQ ID NO: 3008249 - DNA, 25 bp, Homo sapien
cctggtctgattggtagggtgcctc

SEQ ID NO: 3008250 - DNA, 25 bp, Homo sapien
tagccttaaattcccgagctgcccg

SEQ ID NO: 3008251 - DNA, 25 bp, Homo sapien
gcaggacgccttccaagtattcaag

SEQ ID NO: 3008252 - DNA, 25 bp, Homo sapien
cttgggatgatactggcggaacgca

SEQ ID NO: 3008253 - DNA, 25 bp, Homo sapien
tccctaaaagggctgctgacacgcc

SEQ ID NO: 3008254 - DNA, 25 bp, Homo sapien
gattggatttaggacacgccatcta

SEQ ID NO: 3008255 - DNA, 25 bp, Homo sapien
aagctactccgagaacgcaggcgga

SEQ ID NO: 3008256 - DNA, 25 bp, Homo sapien
tgcaaccaatgggaattcgcaggct

SEQ ID NO: 3008257 - DNA, 25 bp, Homo sapien
ggcgtgtcagcagcccttttaggga

SEQ ID NO: 3008258 - DNA, 25 bp, Homo sapien
tgaatacttggaaggcgtcctgcct

SEQ ID NO: 3008259 - DNA, 25 bp, Homo sapien
cagtagatggcgtgtcctaaatcca

SEQ ID NO: 3008260 - DNA, 25 bp, Homo sapien
gtatcatcccaagctgcaacacgag

SEQ ID NO: 3008261 - DNA, 25 bp, Homo sapien
tgaccaggagactcggcgcaaggcc

SEQ ID NO: 3008262 - DNA, 25 bp, Homo sapien
ggtgaccaggagactcggcgcaagg

SEQ ID NO: 3008263 - DNA, 25 bp, Homo sapien
cggtgaccaggagactcggcgcaag

SEQ ID NO: 3008264 - DNA, 25 bp, Homo sapien
tcggtgaccaggagactcggcgcaa

SEQ ID NO: 3008265 - DNA, 25 bp, Homo sapien
gaccaggagactcggcgcaaggccc

SEQ ID NO: 3008266 - DNA, 25 bp, Homo sapien
ctcggtgaccaggagactcggcgca

SEQ ID NO: 3008267 - DNA, 25 bp, Homo sapien
ccttgcgccgagtctcctggtcacc

SEQ ID NO: 3008268 - DNA, 25 bp, Homo sapien
ggccttgcgccgagtctcctggtca

SEQ ID NO: 3008269 - DNA, 25 bp, Homo sapien
gggccttgcgccgagtctcctggtc

SEQ ID NO: 3008270 - DNA, 25 bp, Homo sapien
cttgcgccgagtctcctggtcaccg

SEQ ID NO: 3008271 - DNA, 25 bp, Homo sapien
ttgcgccgagtctcctggtcaccga

SEQ ID NO: 3008272 - DNA, 25 bp, Homo sapien
tgcgccgagtctcctggtcaccgag

SEQ ID NO: 3008273 - DNA, 25 bp, Homo sapien
tgaccaggagactcggcgcaaggcc

SEQ ID NO: 3008274 - DNA, 25 bp, Homo sapien
tactgggctccatcctgagctccat

SEQ ID NO: 3008275 - DNA, 25 bp, Homo sapien
atggcggacctactgggctccatcc

SEQ ID NO: 3008276 - DNA, 25 bp, Homo sapien
tccatcctgagctccatggagaagc

SEQ ID NO: 3008277 - DNA, 25 bp, Homo sapien
atggagaagccacccagcctcggtg

SEQ ID NO: 3008278 - DNA, 25 bp, Homo sapien
ctcggtgaccaggagactcggcgca

SEQ ID NO: 3008279 - DNA, 25 bp, Homo sapien
ggatggagcccagtaggtccgccat

SEQ ID NO: 3008280 - DNA, 25 bp, Homo sapien
gggccttgcgccgagtctcctggtc

SEQ ID NO: 3008281 - DNA, 25 bp, Homo sapien
agtctcctggtcaccgaggctgggt

SEQ ID NO: 3008282 - DNA, 25 bp, Homo sapien
caccgaggctgggtggcttctccat

SEQ ID NO: 3008283 - DNA, 25 bp, Homo sapien
catggagctcaggatggagcccagt

SEQ ID NO: 3008284 - DNA, 25 bp, Homo sapien
ttgcgccgagtctcctggtcaccga

SEQ ID NO: 3008285 - DNA, 25 bp, Homo sapien
caccgccccctctcagtcactccca

SEQ ID NO: 3008286 - DNA, 25 bp, Homo sapien
ccgccccctctcagtcactcccaag

SEQ ID NO: 3008287 - DNA, 25 bp, Homo sapien
acgcaccgccccctctcagtcactc

SEQ ID NO: 3008288 - DNA, 25 bp, Homo sapien
cgcaccgccccctctcagtcactcc

SEQ ID NO: 3008289 - DNA, 25 bp, Homo sapien
accgccccctctcagtcactcccaa

SEQ ID NO: 3008290 - DNA, 25 bp, Homo sapien
gcaccgccccctctcagtcactccc

SEQ ID NO: 3008291 - DNA, 25 bp, Homo sapien
ttgggagtgactgagagggggcggt

SEQ ID NO: 3008292 - DNA, 25 bp, Homo sapien
cttgggagtgactgagagggggcgg

SEQ ID NO: 3008293 - DNA, 25 bp, Homo sapien
tgggagtgactgagagggggcggtg

SEQ ID NO: 3008294 - DNA, 25 bp, Homo sapien
ggagtgactgagagggggcggtgcg

SEQ ID NO: 3008295 - DNA, 25 bp, Homo sapien
gagtgactgagagggggcggtgcgt

SEQ ID NO: 3008296 - DNA, 25 bp, Homo sapien
ccgccccctctcagtcactcccaag

SEQ ID NO: 3008297 - DNA, 25 bp, Homo sapien
acgcaccgccccctctcagtcactc

SEQ ID NO: 3008298 - DNA, 25 bp, Homo sapien
cgcaccgccccctctcagtcactcc

SEQ ID NO: 3008299 - DNA, 25 bp, Homo sapien
ctttaagacgcaccgccccctctca

SEQ ID NO: 3008300 - DNA, 25 bp, Homo sapien
accgccccctctcagtcactcccaa

SEQ ID NO: 3008301 - DNA, 25 bp, Homo sapien
gcaccgccccctctcagtcactccc

SEQ ID NO: 3008302 - DNA, 25 bp, Homo sapien
ttgggagtgactgagagggggcggt

SEQ ID NO: 3008303 - DNA, 25 bp, Homo sapien
cttgggagtgactgagagggggcgg

SEQ ID NO: 3008304 - DNA, 25 bp, Homo sapien
tgggagtgactgagagggggcggtg

SEQ ID NO: 3008305 - DNA, 25 bp, Homo sapien
ggagtgactgagagggggcggtgcg

SEQ ID NO: 3008306 - DNA, 25 bp, Homo sapien
gagtgactgagagggggcggtgcgt

SEQ ID NO: 3008307 - DNA, 25 bp, Homo sapien
tgagagggggcggtgcgtcttaaag

SEQ ID NO: 3008308 - DNA, 25 bp, Homo sapien
cccgcggcgccttaaatagattctt

SEQ ID NO: 3008309 - DNA, 25 bp, Homo sapien
aaccgaggcggatacattcagagac

SEQ ID NO: 3008310 - DNA, 25 bp, Homo sapien
cacaagtagaaagtgcccgtggagc

SEQ ID NO: 3008311 - DNA, 25 bp, Homo sapien
tctccctgttaagactgcacgaggc

SEQ ID NO: 3008312 - DNA, 25 bp, Homo sapien
tcatgtggccagtcccggctgggga

SEQ ID NO: 3008313 - DNA, 25 bp, Homo sapien
catgtggccagtcccggctggggaa

SEQ ID NO: 3008314 - DNA, 25 bp, Homo sapien
tcccggctggggaagcccttccagc

SEQ ID NO: 3008315 - DNA, 25 bp, Homo sapien
tggggaagcccttccagctcctggt

SEQ ID NO: 3008316 - DNA, 25 bp, Homo sapien
ctgtgtcggcagcgccgcaggaatc

SEQ ID NO: 3008317 - DNA, 25 bp, Homo sapien
tctcatgatcttccgggctgcctgg

SEQ ID NO: 3008318 - DNA, 25 bp, Homo sapien
cagcgccgcaggaatctcatgatct

SEQ ID NO: 3008319 - DNA, 25 bp, Homo sapien
atctcatgatcttccgggctgcctg

SEQ ID NO: 3008320 - DNA, 25 bp, Homo sapien
tggacctcacagaaggcatcgcatg

SEQ ID NO: 3008321 - DNA, 25 bp, Homo sapien
ccccaggaaccctaggcagggaatg

SEQ ID NO: 3008322 - DNA, 25 bp, Homo sapien
gaaggcatcgcatgccttcggcccc

SEQ ID NO: 3008323 - DNA, 25 bp, Homo sapien
aaagaaacaaaagatggacctcaca

SEQ ID NO: 3008324 - DNA, 25 bp, Homo sapien
ttgttgcgggcaggcagggtggccg

SEQ ID NO: 3008325 - DNA, 25 bp, Homo sapien
taggagcggtagtgctgctggatga

SEQ ID NO: 3008326 - DNA, 25 bp, Homo sapien
tcggcggctctgctgaaatcgcttc

SEQ ID NO: 3008327 - DNA, 25 bp, Homo sapien
ggccgcctgggtcatcttcttatag

SEQ ID NO: 3008328 - DNA, 25 bp, Homo sapien
tcacccaagttaggctgatgcaaga

SEQ ID NO: 3008329 - DNA, 25 bp, Homo sapien
agagggacggagacccaaagccctg

SEQ ID NO: 3008330 - DNA, 25 bp, Homo sapien
gaggctcacccaagttaggctgatg

SEQ ID NO: 3008331 - DNA, 25 bp, Homo sapien
cccaagttaggctgatgcaagactc

SEQ ID NO: 3008332 - DNA, 25 bp, Homo sapien
tcacactcagagctcatgcctaata

SEQ ID NO: 3008333 - DNA, 25 bp, Homo sapien
cacactcagagctcatgcctaatac

SEQ ID NO: 3008334 - DNA, 25 bp, Homo sapien
ctcacactcagagctcatgcctaat

SEQ ID NO: 3008335 - DNA, 25 bp, Homo sapien
cctcacactcagagctcatgcctaa

SEQ ID NO: 3008336 - DNA, 25 bp, Homo sapien
cattctggaatggttaggcgtgggt

SEQ ID NO: 3008337 - DNA, 25 bp, Homo sapien
tgggttggtgggttgctggttacac

SEQ ID NO: 3008338 - DNA, 25 bp, Homo sapien
aatggttaggcgtgggtgtgggttg

SEQ ID NO: 3008339 - DNA, 25 bp, Homo sapien
agttagggctctggcaacattctgg

SEQ ID NO: 3008340 - DNA, 25 bp, Homo sapien
ctgcttgtacttccggtaacagcgc

SEQ ID NO: 3008341 - DNA, 25 bp, Homo sapien
taacagcgctggattacagctgctg

SEQ ID NO: 3008342 - DNA, 25 bp, Homo sapien
ccggtaacagcgctggattacagct

SEQ ID NO: 3008343 - DNA, 25 bp, Homo sapien
tacttccggtaacagcgctggatta

SEQ ID NO: 3008344 - DNA, 25 bp, Homo sapien
tgtcagcagggcaaaatcactttcc

SEQ ID NO: 3008345 - DNA, 25 bp, Homo sapien
tgtactttcggaaggccgtctggat

SEQ ID NO: 3008346 - DNA, 25 bp, Homo sapien
ggcgacctcgctcaaagggcagttc

SEQ ID NO: 3008347 - DNA, 25 bp, Homo sapien
gttcccgctgctcgtgatctgatag

SEQ ID NO: 3008348 - DNA, 25 bp, Homo sapien
ttgagctggggaaatggtccacatt

SEQ ID NO: 3008349 - DNA, 25 bp, Homo sapien
gggttgagctggggaaatggtccac

SEQ ID NO: 3008350 - DNA, 25 bp, Homo sapien
gaggggttgagctggggaaatggtc

SEQ ID NO: 3008351 - DNA, 25 bp, Homo sapien
ccacattctccaggtagctggccag

SEQ ID NO: 3008352 - DNA, 25 bp, Homo sapien
cacgaagtcctctcgtttaatccgc

SEQ ID NO: 3008353 - DNA, 25 bp, Homo sapien
ctccggtgtggcttcgatgatctgc

SEQ ID NO: 3008354 - DNA, 25 bp, Homo sapien
tgtccgctcccgcattgaggctcca

SEQ ID NO: 3008355 - DNA, 25 bp, Homo sapien
taatccgctccggtgtggcttcgat

SEQ ID NO: 3008356 - DNA, 25 bp, Homo sapien
acacaactcccagctgccctccgtc

SEQ ID NO: 3008357 - DNA, 25 bp, Homo sapien
ccacacaactcccagctgccctccg

SEQ ID NO: 3008358 - DNA, 25 bp, Homo sapien
ctccacacaactcccagctgccctc

SEQ ID NO: 3008359 - DNA, 25 bp, Homo sapien
ctctccacacaactcccagctgccc

SEQ ID NO: 3008360 - DNA, 25 bp, Homo sapien
gctaccttgcctgtcccaaaatgaa

SEQ ID NO: 3008361 - DNA, 25 bp, Homo sapien
tgcttcatggaagtcggcctcaccc

SEQ ID NO: 3008362 - DNA, 25 bp, Homo sapien
catggtctaaaaggagctaagcaaa

SEQ ID NO: 3008363 - DNA, 25 bp, Homo sapien
catctgtattgtgggaccagccaga

SEQ ID NO: 3008364 - DNA, 25 bp, Homo sapien
ataactccatcaatataagcagtac

SEQ ID NO: 3008365 - DNA, 25 bp, Homo sapien
ccataactccatcaatataagcagt

SEQ ID NO: 3008366 - DNA, 25 bp, Homo sapien
ccccataactccatcaatataagca

SEQ ID NO: 3008367 - DNA, 25 bp, Homo sapien
tagcccccataactccatcaatata

SEQ ID NO: 3008368 - DNA, 25 bp, Homo sapien
gccccttggagttggtagcctcata

SEQ ID NO: 3008369 - DNA, 25 bp, Homo sapien
cgggatcacatccacagcctgtggg

SEQ ID NO: 3008370 - DNA, 25 bp, Homo sapien
cccatcatctgaagctggtgggagg

SEQ ID NO: 3008371 - DNA, 25 bp, Homo sapien
cttctgggacaccagaggaaagctg

SEQ ID NO: 3008372 - DNA, 25 bp, Homo sapien
ctgacgtgacggaaaaggtgccatc

SEQ ID NO: 3008373 - DNA, 25 bp, Homo sapien
gtgccatccgacagctccgagggcg

SEQ ID NO: 3008374 - DNA, 25 bp, Homo sapien
ccatctggggcactagaataggctg

SEQ ID NO: 3008375 - DNA, 25 bp, Homo sapien
ctccgagggcgaggagacgctgctc

SEQ ID NO: 3008376 - DNA, 25 bp, Homo sapien
cagtgcctgtcggttccaacggaaa

SEQ ID NO: 3008377 - DNA, 25 bp, Homo sapien
cggcccagagagtcgggaatgctca

SEQ ID NO: 3008378 - DNA, 25 bp, Homo sapien
caaggcgcacatgaccccgggaatg

SEQ ID NO: 3008379 - DNA, 25 bp, Homo sapien
tctgtagttcctcaaggcagcgggc

SEQ ID NO: 3008380 - DNA, 25 bp, Homo sapien
aagggctgttcccattgctccctgc

SEQ ID NO: 3008381 - DNA, 25 bp, Homo sapien
tgctccctgccccatatgcgctcag

SEQ ID NO: 3008382 - DNA, 25 bp, Homo sapien
tcaagggctgttcccattgctccct

SEQ ID NO: 3008383 - DNA, 25 bp, Homo sapien
tgcgctcaggaatccgtcatcctca

SEQ ID NO: 3008384 - DNA, 25 bp, Homo sapien
gcgggtcaacctcctgctctaagtc

SEQ ID NO: 3008385 - DNA, 25 bp, Homo sapien
tctaagtccaagcttccagtctcca

SEQ ID NO: 3008386 - DNA, 25 bp, Homo sapien
caagagaaatgatccacgttgagcg

SEQ ID NO: 3008387 - DNA, 25 bp, Homo sapien
cacgttgagcgggtcaacctcctgc

SEQ ID NO: 3008388 - DNA, 25 bp, Homo sapien
agacagcagagcccaatgagggaaa

SEQ ID NO: 3008389 - DNA, 25 bp, Homo sapien
cagcagagcccaatgagggaaaaag

SEQ ID NO: 3008390 - DNA, 25 bp, Homo sapien
cagagcccaatgagggaaaaagtgg

SEQ ID NO: 3008391 - DNA, 25 bp, Homo sapien
gacagcagagcccaatgagggaaaa

SEQ ID NO: 3008392 - DNA, 25 bp, Homo sapien
gaagtcaaagtgttgtaagtcagga

SEQ ID NO: 3008393 - DNA, 25 bp, Homo sapien
gcagtcaaggacactagcttaagga

SEQ ID NO: 3008394 - DNA, 25 bp, Homo sapien
ggacactagcttaaggaggtcaaga

SEQ ID NO: 3008395 - DNA, 25 bp, Homo sapien
gcttaaggaggtcaagaagtcaaag

SEQ ID NO: 3008396 - DNA, 25 bp, Homo sapien
accaagaccactacccgtgcttcga

SEQ ID NO: 3008397 - DNA, 25 bp, Homo sapien
gggatcatgctttctaccaagacca

SEQ ID NO: 3008398 - DNA, 25 bp, Homo sapien
tcagggtctcgatgaggcgggcata

SEQ ID NO: 3008399 - DNA, 25 bp, Homo sapien
atgggccagacgttcaggacccttc

SEQ ID NO: 3008400 - DNA, 25 bp, Homo sapien
tagtatggacatccggaactggttg

SEQ ID NO: 3008401 - DNA, 25 bp, Homo sapien
tgctccagtcgctctagtatggaca

SEQ ID NO: 3008402 - DNA, 25 bp, Homo sapien
gctgctgcgatctctgccatccgct

SEQ ID NO: 3008403 - DNA, 25 bp, Homo sapien
actggaggagcatcaggaccctggc

SEQ ID NO: 3008404 - DNA, 25 bp, Homo sapien
gacagccagtcaagttgagtactag

SEQ ID NO: 3008405 - DNA, 25 bp, Homo sapien
cgatactcaaagagcacagaagcag

SEQ ID NO: 3008406 - DNA, 25 bp, Homo sapien
agacaggaatcggcgggctcgatac

SEQ ID NO: 3008407 - DNA, 25 bp, Homo sapien
agttgagtactaggcagagacagga

SEQ ID NO: 3008408 - DNA, 25 bp, Homo sapien
gcaaagacaccagccctacctcatg

SEQ ID NO: 3008409 - DNA, 25 bp, Homo sapien
aaagacaccagccctacctcatggg

SEQ ID NO: 3008410 - DNA, 25 bp, Homo sapien
tgcaaagacaccagccctacctcat

SEQ ID NO: 3008411 - DNA, 25 bp, Homo sapien
ctgcaaagacaccagccctacctca

SEQ ID NO: 3008412 - DNA, 25 bp, Homo sapien
ccttgaggtcccctagtaaggctga

SEQ ID NO: 3008413 - DNA, 25 bp, Homo sapien
gaacacactcgtagacagcaaagct

SEQ ID NO: 3008414 - DNA, 25 bp, Homo sapien
aagctgccaacctgtcactttggtg

SEQ ID NO: 3008415 - DNA, 25 bp, Homo sapien
aggctgatttttgagtgtagggtaa

SEQ ID NO: 3008416 - DNA, 25 bp, Homo sapien
ggcttcggtccaaggacctgtgatg

SEQ ID NO: 3008417 - DNA, 25 bp, Homo sapien
aagacacaggagtaatgctcggcgg

SEQ ID NO: 3008418 - DNA, 25 bp, Homo sapien
gaggctggcactgcgatgtgatcaa

SEQ ID NO: 3008419 - DNA, 25 bp, Homo sapien
cagtagcagcgtaagacaccaggct

SEQ ID NO: 3008420 - DNA, 25 bp, Homo sapien
gatggtgctaagagcaggagacagc

SEQ ID NO: 3008421 - DNA, 25 bp, Homo sapien
ggatgcttggagcttcgtcactgat

SEQ ID NO: 3008422 - DNA, 25 bp, Homo sapien
gatgcttggagcttcgtcactgatg

SEQ ID NO: 3008423 - DNA, 25 bp, Homo sapien
gggagaagtctgtgatggtgctaag

SEQ ID NO: 3008424 - DNA, 25 bp, Homo sapien
ctccagttcactggccccaacaggt

SEQ ID NO: 3008425 - DNA, 25 bp, Homo sapien
ctcttcctaccctgcttgacggctc

SEQ ID NO: 3008426 - DNA, 25 bp, Homo sapien
ctaccctgcttgacggctccaaggg

SEQ ID NO: 3008427 - DNA, 25 bp, Homo sapien
gtcctccaaacaaggcctctcctct

SEQ ID NO: 3008428 - DNA, 25 bp, Homo sapien
gtcatcatcttggatgaagaagcag

SEQ ID NO: 3008429 - DNA, 25 bp, Homo sapien
catcatcttggatgaagaagcagtt

SEQ ID NO: 3008430 - DNA, 25 bp, Homo sapien
tccccactgtcatcatcttggatga

SEQ ID NO: 3008431 - DNA, 25 bp, Homo sapien
tcatcttggatgaagaagcagtttc

SEQ ID NO: 3008432 - DNA, 25 bp, Homo sapien
tgcctggtgggcgtcaagcctccag

SEQ ID NO: 3008433 - DNA, 25 bp, Homo sapien
agcagcaggctctagggcagaacag

SEQ ID NO: 3008434 - DNA, 25 bp, Homo sapien
ccaaactcatggaaggcctaggatc

SEQ ID NO: 3008435 - DNA, 25 bp, Homo sapien
tccagtcctgtcaggaggaggatag

SEQ ID NO: 3008436 - DNA, 25 bp, Homo sapien
atgatgcggtgtttcgtgctgctgc

SEQ ID NO: 3008437 - DNA, 25 bp, Homo sapien
tcagggttaaagctcggggctccac

SEQ ID NO: 3008438 - DNA, 25 bp, Homo sapien
ggatagaggtcagggttaaagctcg

SEQ ID NO: 3008439 - DNA, 25 bp, Homo sapien
gcatttgtgggtaaggctcccagaa

SEQ ID NO: 3008440 - DNA, 25 bp, Homo sapien
ctcttctgttccattcccgcagctc

SEQ ID NO: 3008441 - DNA, 25 bp, Homo sapien
ttgggtgggtgtccaaaatctgctg

SEQ ID NO: 3008442 - DNA, 25 bp, Homo sapien
attcccgcagctccacttgatgcca

SEQ ID NO: 3008443 - DNA, 25 bp, Homo sapien
tgcaccaggtgttctacagagaact

SEQ ID NO: 3008444 - DNA, 25 bp, Homo sapien
acttcagccactctcgacggtcgct

SEQ ID NO: 3008445 - DNA, 25 bp, Homo sapien
cttcagctgtcccaacaactcctcc

SEQ ID NO: 3008446 - DNA, 25 bp, Homo sapien
gtcgctgctgatggaacaaaagatg

SEQ ID NO: 3008447 - DNA, 25 bp, Homo sapien
tctcgacggtcgctgctgatggaac

SEQ ID NO: 3008448 - DNA, 25 bp, Homo sapien
gatggaagagtgaacgtagcagcca

SEQ ID NO: 3008449 - DNA, 25 bp, Homo sapien
gcagccagtagcagcgccgatggaa

SEQ ID NO: 3008450 - DNA, 25 bp, Homo sapien
gggacgatggaagagtgaacgtagc

SEQ ID NO: 3008451 - DNA, 25 bp, Homo sapien
cagccagtagcagcgccgatggaat

SEQ ID NO: 3008452 - DNA, 25 bp, Homo sapien
ggggagggctagtctgctccccaac

SEQ ID NO: 3008453 - DNA, 25 bp, Homo sapien
ggagggctagtctgctccccaactc

SEQ ID NO: 3008454 - DNA, 25 bp, Homo sapien
ggggggagggctagtctgctcccca

SEQ ID NO: 3008455 - DNA, 25 bp, Homo sapien
agggctagtctgctccccaactctt

SEQ ID NO: 3008456 - DNA, 25 bp, Homo sapien
aggcatggcctacggcctggatagt

SEQ ID NO: 3008457 - DNA, 25 bp, Homo sapien
tacggcctggatagttgagtcacgg

SEQ ID NO: 3008458 - DNA, 25 bp, Homo sapien
agagaaacctgtgctgagagcatca

SEQ ID NO: 3008459 - DNA, 25 bp, Homo sapien
gtggccaaagcaatgtcagccgacc

SEQ ID NO: 3008460 - DNA, 25 bp, Homo sapien
ggtcctctcgggtggtcttcccatc

SEQ ID NO: 3008461 - DNA, 25 bp, Homo sapien
atatttcaccttcttgcgattgtag

SEQ ID NO: 3008462 - DNA, 25 bp, Homo sapien
ttccagaggtaaccatccttccgat

SEQ ID NO: 3008463 - DNA, 25 bp, Homo sapien
ccttcttgcgattgtagaggatgat

SEQ ID NO: 3008464 - DNA, 25 bp, Homo sapien
aggtgatcaggtaggatgcaatctc

SEQ ID NO: 3008465 - DNA, 25 bp, Homo sapien
aagacagccactcatcatgcttctc

SEQ ID NO: 3008466 - DNA, 25 bp, Homo sapien
aaggtgatcaggtaggatgcaatct

SEQ ID NO: 3008467 - DNA, 25 bp, Homo sapien
caagacagccactcatcatgcttct

SEQ ID NO: 3008468 - DNA, 25 bp, Homo sapien
ggatgcttctaggtatctggaccca

SEQ ID NO: 3008469 - DNA, 25 bp, Homo sapien
tgtcctaagacaaaagtctaacatt

SEQ ID NO: 3008470 - DNA, 25 bp, Homo sapien
tcagcctggcctcttggtcatcctg

SEQ ID NO: 3008471 - DNA, 25 bp, Homo sapien
ggcagctagtggaggatgcttctag

SEQ ID NO: 3008472 - DNA, 25 bp, Homo sapien
ttgccaccgtgcccagctaattttt

SEQ ID NO: 3008473 - DNA, 25 bp, Homo sapien
ctgcgattacaggcacttgccaccg

SEQ ID NO: 3008474 - DNA, 25 bp, Homo sapien
ccccaggatcaagcaattctcttac

SEQ ID NO: 3008475 - DNA, 25 bp, Homo sapien
acctcagcctccagagtagctgcga

SEQ ID NO: 3008476 - DNA, 25 bp, Homo sapien
tagttacctcctgcatgttagtgcc

SEQ ID NO: 3008477 - DNA, 25 bp, Homo sapien
tttcagatgctccatgaagccctgc

SEQ ID NO: 3008478 - DNA, 25 bp, Homo sapien
tagtgccctacaaggcaggtaccat

SEQ ID NO: 3008479 - DNA, 25 bp, Homo sapien
catacacgcatcgttttactgacag

SEQ ID NO: 3008480 - DNA, 25 bp, Homo sapien
gcagcgaggaagacactccagcagc

SEQ ID NO: 3008481 - DNA, 25 bp, Homo sapien
cgaggaagacactccagcagcttct

SEQ ID NO: 3008482 - DNA, 25 bp, Homo sapien
gcgaggaagacactccagcagcttc

SEQ ID NO: 3008483 - DNA, 25 bp, Homo sapien
agcgaggaagacactccagcagctt

SEQ ID NO: 3008484 - DNA, 25 bp, Homo sapien
caacctcggtggtgtccttggtatt

SEQ ID NO: 3008485 - DNA, 25 bp, Homo sapien
agcaacctcggtggtgtccttggta

SEQ ID NO: 3008486 - DNA, 25 bp, Homo sapien
cagcaacctcggtggtgtccttggt

SEQ ID NO: 3008487 - DNA, 25 bp, Homo sapien
gcaacctcggtggtgtccttggtat

SEQ ID NO: 3008488 - DNA, 25 bp, Homo sapien
gtgagggctccagggggcaaggtca

SEQ ID NO: 3008489 - DNA, 25 bp, Homo sapien
tgacagccctctctacgtagctccc

SEQ ID NO: 3008490 - DNA, 25 bp, Homo sapien
gacctgatagaatctgggccagaca

SEQ ID NO: 3008491 - DNA, 25 bp, Homo sapien
tctctcctccaggttggttaggacc

SEQ ID NO: 3008492 - DNA, 25 bp, Homo sapien
gataactgaacctaacctattctct

SEQ ID NO: 3008493 - DNA, 25 bp, Homo sapien
ggtcccgcccgcatagagggatgtt

SEQ ID NO: 3008494 - DNA, 25 bp, Homo sapien
acgggctccgccaggtgtccaggat

SEQ ID NO: 3008495 - DNA, 25 bp, Homo sapien
cgccggatcggacgcttggcactct

SEQ ID NO: 3008496 - DNA, 25 bp, Homo sapien
cgtcgggctcggctatgtgcagtga

SEQ ID NO: 3008497 - DNA, 25 bp, Homo sapien
gcgggtgacggcggcagcggccatt

SEQ ID NO: 3008498 - DNA, 25 bp, Homo sapien
gggtcccgcgggtgacggcggcagc

SEQ ID NO: 3008499 - DNA, 25 bp, Homo sapien
gggtgacggcggcagcggccattct

SEQ ID NO: 3008500 - DNA, 25 bp, Homo sapien
gtgacggcggcagcggccattctac

SEQ ID NO: 3008501 - DNA, 25 bp, Homo sapien
agcggcgtctaacgtcactgcgcac

SEQ ID NO: 3008502 - DNA, 25 bp, Homo sapien
ggcgtctaacgtcactgcgcacggg

SEQ ID NO: 3008503 - DNA, 25 bp, Homo sapien
cggcgtctaacgtcactgcgcacgg

SEQ ID NO: 3008504 - DNA, 25 bp, Homo sapien
acagcggcgtctaacgtcactgcgc

SEQ ID NO: 3008505 - DNA, 25 bp, Homo sapien
ctctccatcgctgcatcccaagaag

SEQ ID NO: 3008506 - DNA, 25 bp, Homo sapien
ctcgagaaagcgaaaggagccctcc

SEQ ID NO: 3008507 - DNA, 25 bp, Homo sapien
ccagcccgacttcattgtagctggg

SEQ ID NO: 3008508 - DNA, 25 bp, Homo sapien
ttctcgcctcggacaagactccttg

SEQ ID NO: 3008509 - DNA, 25 bp, Homo sapien
taatgcctagttcagaggatgggaa

SEQ ID NO: 3008510 - DNA, 25 bp, Homo sapien
aacagagcagagagaatacaaggcc

SEQ ID NO: 3008511 - DNA, 25 bp, Homo sapien
tgacggaactagtcttgggtccctg

SEQ ID NO: 3008512 - DNA, 25 bp, Homo sapien
gagggtgactctagtgacggaacta

SEQ ID NO: 3008513 - DNA, 25 bp, Homo sapien
acagtgctgaacgaggccagagagt

SEQ ID NO: 3008514 - DNA, 25 bp, Homo sapien
catcccccagggattgtgaaggggg

SEQ ID NO: 3008515 - DNA, 25 bp, Homo sapien
gcctggaggcacaagcctcctcctg

SEQ ID NO: 3008516 - DNA, 25 bp, Homo sapien
tgtgacagtgctgaacgaggccaga

SEQ ID NO: 3008517 - DNA, 25 bp, Homo sapien
ccacccagttccactccaacaatac

SEQ ID NO: 3008518 - DNA, 25 bp, Homo sapien
tccacccagttccactccaacaata

SEQ ID NO: 3008519 - DNA, 25 bp, Homo sapien
tcctgtggataggttgctctctcct

SEQ ID NO: 3008520 - DNA, 25 bp, Homo sapien
tgagaaaacggtcctcttcctgtgg

SEQ ID NO: 3008521 - DNA, 25 bp, Homo sapien
tcgccaagcaccactggctcagatg

SEQ ID NO: 3008522 - DNA, 25 bp, Homo sapien
tgccaggagtgagaaaacggtcctc

SEQ ID NO: 3008523 - DNA, 25 bp, Homo sapien
tcgttgatgatgctctgacgccttc

SEQ ID NO: 3008524 - DNA, 25 bp, Homo sapien
tcttaggtcctccaggtggtaagtg

SEQ ID NO: 3008525 - DNA, 25 bp, Homo sapien
cgttgatgatgctctgacgccttct

SEQ ID NO: 3008526 - DNA, 25 bp, Homo sapien
aagtgacagccctcacccgggcggg

SEQ ID NO: 3008527 - DNA, 25 bp, Homo sapien
ttcttctccaaagcatttcaggggg

SEQ ID NO: 3008528 - DNA, 25 bp, Homo sapien
tccttccaaacatggcctcctcttc

SEQ ID NO: 3008529 - DNA, 25 bp, Homo sapien
ctccaaagcatttcagggggtggga

SEQ ID NO: 3008530 - DNA, 25 bp, Homo sapien
ttctccaaagcatttcagggggtgg

SEQ ID NO: 3008531 - DNA, 25 bp, Homo sapien
tcaggaggatacagaccaagctggg

SEQ ID NO: 3008532 - DNA, 25 bp, Homo sapien
gctcaggaggatacagaccaagctg

SEQ ID NO: 3008533 - DNA, 25 bp, Homo sapien
tgctcaggaggatacagaccaagct

SEQ ID NO: 3008534 - DNA, 25 bp, Homo sapien
catgggtggaatgtgctgctcctcc

SEQ ID NO: 3008535 - DNA, 25 bp, Homo sapien
tgtgctgctcctccagccaagtggg

SEQ ID NO: 3008536 - DNA, 25 bp, Homo sapien
cagcatgggtggaatgtgctgctcc

SEQ ID NO: 3008537 - DNA, 25 bp, Homo sapien
gtgctgctcctccagccaagtgggg

SEQ ID NO: 3008538 - DNA, 25 bp, Homo sapien
accttgggggtggagatcggctgac

SEQ ID NO: 3008539 - DNA, 25 bp, Homo sapien
ctctgggaaggcaaccttgggggtg

SEQ ID NO: 3008540 - DNA, 25 bp, Homo sapien
gaagacatctccataacgctggggc

SEQ ID NO: 3008541 - DNA, 25 bp, Homo sapien
tctccataacgctggggcatgggtc

SEQ ID NO: 3008542 - DNA, 25 bp, Homo sapien
gatgaggttgactccatcatcctgc

SEQ ID NO: 3008543 - DNA, 25 bp, Homo sapien
caaaggggatgaggttgactccatc

SEQ ID NO: 3008544 - DNA, 25 bp, Homo sapien
gggatgaggttgactccatcatcct

SEQ ID NO: 3008545 - DNA, 25 bp, Homo sapien
ttggcaaaggggatgaggttgactc

SEQ ID NO: 3008546 - DNA, 25 bp, Homo sapien
tggacggggctgggtagttagtctc

SEQ ID NO: 3008547 - DNA, 25 bp, Homo sapien
ctggacggggctgggtagttagtct

SEQ ID NO: 3008548 - DNA, 25 bp, Homo sapien
tctaaaggggatgtcctgactcgga

SEQ ID NO: 3008549 - DNA, 25 bp, Homo sapien
tcagcagaacgcgagggagcagcgg

SEQ ID NO: 3008550 - DNA, 25 bp, Homo sapien
gcctcagatagttgggtccaagcgg

SEQ ID NO: 3008551 - DNA, 25 bp, Homo sapien
ctgcggggcattcgggcctcagata

SEQ ID NO: 3008552 - DNA, 25 bp, Homo sapien
tccacagttgacttcggggtagcca

SEQ ID NO: 3008553 - DNA, 25 bp, Homo sapien
ggatgaggacccgagggtccggctg

SEQ ID NO: 3008554 - DNA, 25 bp, Homo sapien
cacagttgacttcggggtagccacg

SEQ ID NO: 3008555 - DNA, 25 bp, Homo sapien
cctgcgcctgcgagggtggatgagg

SEQ ID NO: 3008556 - DNA, 25 bp, Homo sapien
cgaattctagaactcggcggggcgg

SEQ ID NO: 3008557 - DNA, 25 bp, Homo sapien
agagagacggcgattcgagccgcgg

SEQ ID NO: 3008558 - DNA, 25 bp, Homo sapien
cggcgggcggtgctcgtctgagggc

SEQ ID NO: 3008559 - DNA, 25 bp, Homo sapien
ctgaagcagctgcgcggcgaattct

SEQ ID NO: 3008560 - DNA, 25 bp, Homo sapien
gaaattcaaggttgatgaaaggtgg

SEQ ID NO: 3008561 - DNA, 25 bp, Homo sapien
tgatgggacctgagacagaggaata

SEQ ID NO: 3008562 - DNA, 25 bp, Homo sapien
gagcctggtgggtcgaggtgcttct

SEQ ID NO: 3008563 - DNA, 25 bp, Homo sapien
gtaattcatgtgtgtaggaaattca

SEQ ID NO: 3008564 - DNA, 25 bp, Homo sapien
catgtcagctgtggcttgagaagat

SEQ ID NO: 3008565 - DNA, 25 bp, Homo sapien
agatgagtcaggtggcagtttgcaa

SEQ ID NO: 3008566 - DNA, 25 bp, Homo sapien
taccagggttcctctgcggcaatgg

SEQ ID NO: 3008567 - DNA, 25 bp, Homo sapien
cagggagctgcctcgtgcatcttcg

SEQ ID NO: 3008568 - DNA, 25 bp, Homo sapien
aaggagctgagacatatgtgaatgg

SEQ ID NO: 3008569 - DNA, 25 bp, Homo sapien
aagcttgtgacggagccgctggtgc

SEQ ID NO: 3008570 - DNA, 25 bp, Homo sapien
ggaagcttgtgacggagccgctggt

SEQ ID NO: 3008571 - DNA, 25 bp, Homo sapien
atgggaagcttgtgacggagccgct

SEQ ID NO: 3008572 - DNA, 25 bp, Homo sapien
catccccgcaggaactccctggatg

SEQ ID NO: 3008573 - DNA, 25 bp, Homo sapien
agcgttctgcccctgacctcaagga

SEQ ID NO: 3008574 - DNA, 25 bp, Homo sapien
ctgcacagcctgaaccccagcactt

SEQ ID NO: 3008575 - DNA, 25 bp, Homo sapien
aaaaagcacaactcttatccccagc

SEQ ID NO: 3008576 - DNA, 25 bp, Homo sapien
caacactttggaatattagggtggg

SEQ ID NO: 3008577 - DNA, 25 bp, Homo sapien
tactgtgggcaaactttacttagat

SEQ ID NO: 3008578 - DNA, 25 bp, Homo sapien
tctttaataatgtgcacgggccagg

SEQ ID NO: 3008579 - DNA, 25 bp, Homo sapien
tgtgctacctgtgccggcattccat

SEQ ID NO: 3008580 - DNA, 25 bp, Homo sapien
gtggcagcctcacgatgaagacagg

SEQ ID NO: 3008581 - DNA, 25 bp, Homo sapien
tattgcacaaatcccacaaaggtct

SEQ ID NO: 3008582 - DNA, 25 bp, Homo sapien
acatgccaacgtcttctgtggagtg

SEQ ID NO: 3008583 - DNA, 25 bp, Homo sapien
tgcaggtgtccatgagcgttcctgt

SEQ ID NO: 3008584 - DNA, 25 bp, Homo sapien
ctttgaaacacgtggtagatgctgg

SEQ ID NO: 3008585 - DNA, 25 bp, Homo sapien
agggagcccacttggatggccacac

SEQ ID NO: 3008586 - DNA, 25 bp, Homo sapien
tgcagccaccttcacatatgagaac

SEQ ID NO: 3008587 - DNA, 25 bp, Homo sapien
gagggaacatggcaccggcaccaag

SEQ ID NO: 3008588 - DNA, 25 bp, Homo sapien
aaggaccacccctgcagtggtgccc

SEQ ID NO: 3008589 - DNA, 25 bp, Homo sapien
ggaccacccctgcagtggtgcccac

SEQ ID NO: 3008590 - DNA, 25 bp, Homo sapien
cacaaggaccacccctgcagtggtg

SEQ ID NO: 3008591 - DNA, 25 bp, Homo sapien
acaaggaccacccctgcagtggtgc

SEQ ID NO: 3008592 - DNA, 25 bp, Homo sapien
tgccatcaggtaggccccaaagagc

SEQ ID NO: 3008593 - DNA, 25 bp, Homo sapien
ccatcaggtaggccccaaagagcat

SEQ ID NO: 3008594 - DNA, 25 bp, Homo sapien
aggattgccagtgccatcaggtagg

SEQ ID NO: 3008595 - DNA, 25 bp, Homo sapien
gccatcaggtaggccccaaagagca

SEQ ID NO: 3008596 - DNA, 25 bp, Homo sapien
gcccagcagagaaagaccaaccagc

SEQ ID NO: 3008597 - DNA, 25 bp, Homo sapien
agaaagaccaaccagccctgccagg

SEQ ID NO: 3008598 - DNA, 25 bp, Homo sapien
agagaaagaccaaccagccctgcca

SEQ ID NO: 3008599 - DNA, 25 bp, Homo sapien
agcagagaaagaccaaccagccctg

SEQ ID NO: 3008600 - DNA, 25 bp, Homo sapien
ggatgagcagagactcagggctggc

SEQ ID NO: 3008601 - DNA, 25 bp, Homo sapien
gagactcagggctggctgttctggg

SEQ ID NO: 3008602 - DNA, 25 bp, Homo sapien
ccttaagttccacccaccaagcctg

SEQ ID NO: 3008603 - DNA, 25 bp, Homo sapien
tgttggggatgagcagagactcagg

SEQ ID NO: 3008604 - DNA, 25 bp, Homo sapien
gcacgccattggtcacggcactggt

SEQ ID NO: 3008605 - DNA, 25 bp, Homo sapien
caggcgcccatagggcaaacaggaa

SEQ ID NO: 3008606 - DNA, 25 bp, Homo sapien
cacggcactggtgaaggccatcagg

SEQ ID NO: 3008607 - DNA, 25 bp, Homo sapien
aggccaggcgcccatagggcaaaca

SEQ ID NO: 3008608 - DNA, 25 bp, Homo sapien
tacagagggtagtgatggcaacagc

SEQ ID NO: 3008609 - DNA, 25 bp, Homo sapien
caacaggccattgccaacaccaagg

SEQ ID NO: 3008610 - DNA, 25 bp, Homo sapien
gggatcccagttgaagttcaggccc

SEQ ID NO: 3008611 - DNA, 25 bp, Homo sapien
caggaaagtgacattagaggtacaa

SEQ ID NO: 3008612 - DNA, 25 bp, Homo sapien
tcagcacctgtaccacctggatggg

SEQ ID NO: 3008613 - DNA, 25 bp, Homo sapien
accagcagacccaggtttcccagcg

SEQ ID NO: 3008614 - DNA, 25 bp, Homo sapien
acagagtggagctgccctgccactg

SEQ ID NO: 3008615 - DNA, 25 bp, Homo sapien
agggctgtgcccactacactcagca

SEQ ID NO: 3008616 - DNA, 25 bp, Homo sapien
gcacagtggctaagggacaaagagc

SEQ ID NO: 3008617 - DNA, 25 bp, Homo sapien
gagcacagtggctaagggacaaaga

SEQ ID NO: 3008618 - DNA, 25 bp, Homo sapien
ggagcacagtggctaagggacaaag

SEQ ID NO: 3008619 - DNA, 25 bp, Homo sapien
cctttctgggcatacctgccccacg

SEQ ID NO: 3008620 - DNA, 25 bp, Homo sapien
cagatcccgttcacagcagcccagg

SEQ ID NO: 3008621 - DNA, 25 bp, Homo sapien
ctggaaggtcttttaccaccacagg

SEQ ID NO: 3008622 - DNA, 25 bp, Homo sapien
ccaggagcccatgccaaaaagggcc

SEQ ID NO: 3008623 - DNA, 25 bp, Homo sapien
gtcagcaccagacggcccagcgtgg

SEQ ID NO: 3008624 - DNA, 25 bp, Homo sapien
gcaggtccttccctaggtaggtcca

SEQ ID NO: 3008625 - DNA, 25 bp, Homo sapien
ttccctaggtaggtccaaagatgct

SEQ ID NO: 3008626 - DNA, 25 bp, Homo sapien
aaggtcacaggcaggtccttcccta

SEQ ID NO: 3008627 - DNA, 25 bp, Homo sapien
gtccaaagatgctttggttcttctg

SEQ ID NO: 3008628 - DNA, 25 bp, Homo sapien
gaaacagacaggctggcaggtaata

SEQ ID NO: 3008629 - DNA, 25 bp, Homo sapien
aacagacaggctggcaggtaatagg

SEQ ID NO: 3008630 - DNA, 25 bp, Homo sapien
ctggagggaaacagacaggctggca

SEQ ID NO: 3008631 - DNA, 25 bp, Homo sapien
gggaaacagacaggctggcaggtaa

SEQ ID NO: 3008632 - DNA, 25 bp, Homo sapien
ttgggtacagcgacccagcagtgcc

SEQ ID NO: 3008633 - DNA, 25 bp, Homo sapien
gcgcttttgcgacactcaggacttg

SEQ ID NO: 3008634 - DNA, 25 bp, Homo sapien
gtgccacttgcaaccctagcgcttt

SEQ ID NO: 3008635 - DNA, 25 bp, Homo sapien
gggtccaagttgtcaaaacagctca

SEQ ID NO: 3008636 - DNA, 25 bp, Homo sapien
agtgaaagaatctcaaaccctgctg

SEQ ID NO: 3008637 - DNA, 25 bp, Homo sapien
gccactccagtaagcacagacaagt

SEQ ID NO: 3008638 - DNA, 25 bp, Homo sapien
gatacaggttaatcccaggcatagt

SEQ ID NO: 3008639 - DNA, 25 bp, Homo sapien
ggtaggtaaaagcaacaagggctca

SEQ ID NO: 3008640 - DNA, 25 bp, Homo sapien
ccagtagtaccctgactttccagtc

SEQ ID NO: 3008641 - DNA, 25 bp, Homo sapien
agtagtaccctgactttccagtcat

SEQ ID NO: 3008642 - DNA, 25 bp, Homo sapien
ctgccagtagtaccctgactttcca

SEQ ID NO: 3008643 - DNA, 25 bp, Homo sapien
gccagtagtaccctgactttccagt

SEQ ID NO: 3008644 - DNA, 25 bp, Homo sapien
ccattagtgctggaaatgggcccag

SEQ ID NO: 3008645 - DNA, 25 bp, Homo sapien
gactttcaacaattgcccattagtg

SEQ ID NO: 3008646 - DNA, 25 bp, Homo sapien
gctgcttttacccttgtgggatctg

SEQ ID NO: 3008647 - DNA, 25 bp, Homo sapien
tttggacatgtttgtccatctctgc

SEQ ID NO: 3008648 - DNA, 25 bp, Homo sapien
catccttcaccctctctgtaacctc

SEQ ID NO: 3008649 - DNA, 25 bp, Homo sapien
gaaggtgctcatcacatccttcacc

SEQ ID NO: 3008650 - DNA, 25 bp, Homo sapien
gagcacaaagaaggtgctcatcaca

SEQ ID NO: 3008651 - DNA, 25 bp, Homo sapien
ttcccttggagcacaaagaaggtgc

SEQ ID NO: 3008652 - DNA, 25 bp, Homo sapien
gcaggcactaatgaggcacttttat

SEQ ID NO: 3008653 - DNA, 25 bp, Homo sapien
tcagtgtgctaagttaaatcataaa

SEQ ID NO: 3008654 - DNA, 25 bp, Homo sapien
cattgagaggtttcagtgtgctaag

SEQ ID NO: 3008655 - DNA, 25 bp, Homo sapien
ccccagtggatcacataacaaacat

SEQ ID NO: 3008656 - DNA, 25 bp, Homo sapien
tagtaagagcgacagccaagactcc

SEQ ID NO: 3008657 - DNA, 25 bp, Homo sapien
caaattgaattgtgcccagaccgta

SEQ ID NO: 3008658 - DNA, 25 bp, Homo sapien
tgattacaagtgaagtgcgccgtct

SEQ ID NO: 3008659 - DNA, 25 bp, Homo sapien
taaccactgtgctatgccgcaggta

SEQ ID NO: 3008660 - DNA, 25 bp, Homo sapien
acttataacttttatgggatccagt

SEQ ID NO: 3008661 - DNA, 25 bp, Homo sapien
tagattagaccgatgtagaattctg

SEQ ID NO: 3008662 - DNA, 25 bp, Homo sapien
tccagtcctaaagtagattagaccg

SEQ ID NO: 3008663 - DNA, 25 bp, Homo sapien
tatgggatccagtcctaaagtagat

SEQ ID NO: 3008664 - DNA, 25 bp, Homo sapien
tgctgaacaagatgagcaccccatc

SEQ ID NO: 3008665 - DNA, 25 bp, Homo sapien
cgatgtctaatgagctctgagcacc

SEQ ID NO: 3008666 - DNA, 25 bp, Homo sapien
ccctcagaggtagcttcaaatgtag

SEQ ID NO: 3008667 - DNA, 25 bp, Homo sapien
tctgctgcagttctaaggtaccctc

SEQ ID NO: 3008668 - DNA, 25 bp, Homo sapien
ggttgtggcaatgatcctttgtcct

SEQ ID NO: 3008669 - DNA, 25 bp, Homo sapien
gtggcaatgatcctttgtccttggg

SEQ ID NO: 3008670 - DNA, 25 bp, Homo sapien
ggtggttgtggcaatgatcctttgt

SEQ ID NO: 3008671 - DNA, 25 bp, Homo sapien
gattccacttcagtaatgggtggtt

SEQ ID NO: 3008672 - DNA, 25 bp, Homo sapien
cttggtgatgggactatacagagga

SEQ ID NO: 3008673 - DNA, 25 bp, Homo sapien
tatttactggatattgccaacagtt

SEQ ID NO: 3008674 - DNA, 25 bp, Homo sapien
cagttatctcttggtgatgggacta

SEQ ID NO: 3008675 - DNA, 25 bp, Homo sapien
caaacattcgaagaatatttactgg

SEQ ID NO: 3008676 - DNA, 25 bp, Homo sapien
ggcagagttattatagactaggagt

SEQ ID NO: 3008677 - DNA, 25 bp, Homo sapien
ccaagttgagcttaatcctcagagc

SEQ ID NO: 3008678 - DNA, 25 bp, Homo sapien
tggccaggctttatatccagataag

SEQ ID NO: 3008679 - DNA, 25 bp, Homo sapien
tcctggtcctgatttagggctctct

SEQ ID NO: 3008680 - DNA, 25 bp, Homo sapien
tactgtgccctttatagtccctctt

SEQ ID NO: 3008681 - DNA, 25 bp, Homo sapien
ggtactgtgccctttatagtccctc

SEQ ID NO: 3008682 - DNA, 25 bp, Homo sapien
ctgtgccctttatagtccctctttc

SEQ ID NO: 3008683 - DNA, 25 bp, Homo sapien
gtgccctttatagtccctctttctc

SEQ ID NO: 3008684 - DNA, 25 bp, Homo sapien
ggtctccttaggctggagctggatg

SEQ ID NO: 3008685 - DNA, 25 bp, Homo sapien
tgggtctccttaggctggagctgga

SEQ ID NO: 3008686 - DNA, 25 bp, Homo sapien
cttctcccatggctcttcctgtgca

SEQ ID NO: 3008687 - DNA, 25 bp, Homo sapien
aggctgggtctccttaggctggagc

SEQ ID NO: 3008688 - DNA, 25 bp, Homo sapien
gcctggacacttgcagatgtgaccc

SEQ ID NO: 3008689 - DNA, 25 bp, Homo sapien
caggcaccactcagtttaaattttc

SEQ ID NO: 3008690 - DNA, 25 bp, Homo sapien
cagaaacacatactaactgctctac

SEQ ID NO: 3008691 - DNA, 25 bp, Homo sapien
tgtgaccctccttggaccaaagctt

SEQ ID NO: 3008692 - DNA, 25 bp, Homo sapien
gagaggtttgaacttggcacctccc

SEQ ID NO: 3008693 - DNA, 25 bp, Homo sapien
ctggcccaagagaggtttgaacttg

SEQ ID NO: 3008694 - DNA, 25 bp, Homo sapien
ctgaaggtcatcaatctggctccca

SEQ ID NO: 3008695 - DNA, 25 bp, Homo sapien
tctggctcccataacagaccaaatc

SEQ ID NO: 3008696 - DNA, 25 bp, Homo sapien
tctccactcttagggtgatgtcccc

SEQ ID NO: 3008697 - DNA, 25 bp, Homo sapien
cctctccactcttagggtgatgtcc

SEQ ID NO: 3008698 - DNA, 25 bp, Homo sapien
ctcctctccactcttagggtgatgt

SEQ ID NO: 3008699 - DNA, 25 bp, Homo sapien
tcctctccactcttagggtgatgtc

SEQ ID NO: 3008700 - DNA, 25 bp, Homo sapien
caggagtctcctggtagcggagatg

SEQ ID NO: 3008701 - DNA, 25 bp, Homo sapien
cagcagagtactcgtagttggctca

SEQ ID NO: 3008702 - DNA, 25 bp, Homo sapien
ccactcacagcagagtactcgtagt

SEQ ID NO: 3008703 - DNA, 25 bp, Homo sapien
gagtactcgtagttggctcaaggcc

SEQ ID NO: 3008704 - DNA, 25 bp, Homo sapien
gaagcgttggcggaagatctcttga

SEQ ID NO: 3008705 - DNA, 25 bp, Homo sapien
ctggtagagtggttcccaggtagcc

SEQ ID NO: 3008706 - DNA, 25 bp, Homo sapien
ggcggaagatctcttgactggtaga

SEQ ID NO: 3008707 - DNA, 25 bp, Homo sapien
ccaggtagcctggtctcatactcac

SEQ ID NO: 3008708 - DNA, 25 bp, Homo sapien
tcatcttctcttgtccctgtgtacc

SEQ ID NO: 3008709 - DNA, 25 bp, Homo sapien
catcatcatcttctcttgtccctgt

SEQ ID NO: 3008710 - DNA, 25 bp, Homo sapien
gactgttcctcttcctttggtccca

SEQ ID NO: 3008711 - DNA, 25 bp, Homo sapien
tcttcctttggtcccatcatcatca

SEQ ID NO: 3008712 - DNA, 25 bp, Homo sapien
cagctgctgttagtgatacagccat

SEQ ID NO: 3008713 - DNA, 25 bp, Homo sapien
tcagctgctgttagtgatacagcca

SEQ ID NO: 3008714 - DNA, 25 bp, Homo sapien
cagaaggctcataccagctggaatc

SEQ ID NO: 3008715 - DNA, 25 bp, Homo sapien
taccagctggaatcttgcaagggcc

SEQ ID NO: 3008716 - DNA, 25 bp, Homo sapien
ggctcataccagctggaatcttgca

SEQ ID NO: 3008717 - DNA, 25 bp, Homo sapien
tcataccagctggaatcttgcaagg

SEQ ID NO: 3008718 - DNA, 25 bp, Homo sapien
tgggtggaggaacgatttctagtct

SEQ ID NO: 3008719 - DNA, 25 bp, Homo sapien
ttgtccggtgaagctcggctgttcg

SEQ ID NO: 3008720 - DNA, 25 bp, Homo sapien
cctgggggcatatgttgctttctat

SEQ ID NO: 3008721 - DNA, 25 bp, Homo sapien
ttcgtttccattgccagggtgaggg

SEQ ID NO: 3008722 - DNA, 25 bp, Homo sapien
caggtttgcgcctgcgcaggtcgca

SEQ ID NO: 3008723 - DNA, 25 bp, Homo sapien
tcctggacttgagcggagcgagaaa

SEQ ID NO: 3008724 - DNA, 25 bp, Homo sapien
aattgcagtccttgcgcaggtggag

SEQ ID NO: 3008725 - DNA, 25 bp, Homo sapien
gagcccttgtaagcgggtgacttca

SEQ ID NO: 3008726 - DNA, 25 bp, Homo sapien
tgtcagggaaattctggccttgtcc

SEQ ID NO: 3008727 - DNA, 25 bp, Homo sapien
tgctggcggacagatgtcagggaaa

SEQ ID NO: 3008728 - DNA, 25 bp, Homo sapien
aagggcggtgctggcggacagatgt

SEQ ID NO: 3008729 - DNA, 25 bp, Homo sapien
tcagggaaattctggccttgtccat

SEQ ID NO: 3008730 - DNA, 25 bp, Homo sapien
agagggccacagctaaggaagacgg

SEQ ID NO: 3008731 - DNA, 25 bp, Homo sapien
ggccacagctaaggaagacggtccc

SEQ ID NO: 3008732 - DNA, 25 bp, Homo sapien
ctcttcccagacctgatgagagggc

SEQ ID NO: 3008733 - DNA, 25 bp, Homo sapien
tctattttccaattacctcttccca

SEQ ID NO: 3008734 - DNA, 25 bp, Homo sapien
tttggtgctgcattagacctgagct

SEQ ID NO: 3008735 - DNA, 25 bp, Homo sapien
gatgcctcacaaggtctgagctcca

SEQ ID NO: 3008736 - DNA, 25 bp, Homo sapien
gatgtcgaataaagtgtgagctctg

SEQ ID NO: 3008737 - DNA, 25 bp, Homo sapien
taagttgtgagctccccttcaaatc

SEQ ID NO: 3008738 - DNA, 25 bp, Homo sapien
tctgatgttctgtaaggactgagtt

SEQ ID NO: 3008739 - DNA, 25 bp, Homo sapien
ttctctgatgttctgtaaggactga

SEQ ID NO: 3008740 - DNA, 25 bp, Homo sapien
tctctgatgttctgtaaggactgag

SEQ ID NO: 3008741 - DNA, 25 bp, Homo sapien
gattctctgatgttctgtaaggact

SEQ ID NO: 3008742 - DNA, 25 bp, Homo sapien
ggcgggtggatcagctgggctcagg

SEQ ID NO: 3008743 - DNA, 25 bp, Homo sapien
tgggctcaggagttcgagaccagcc

SEQ ID NO: 3008744 - DNA, 25 bp, Homo sapien
gaggcgggtggatcagctgggctca

SEQ ID NO: 3008745 - DNA, 25 bp, Homo sapien
ggctcaggagttcgagaccagcctg

SEQ ID NO: 3008746 - DNA, 25 bp, Homo sapien
ccgtggcccgtggaggcactagacc

SEQ ID NO: 3008747 - DNA, 25 bp, Homo sapien
ggcccgtggaggcactagaccctca

SEQ ID NO: 3008748 - DNA, 25 bp, Homo sapien
tggaggcactagaccctcaccaggg

SEQ ID NO: 3008749 - DNA, 25 bp, Homo sapien
gatggccgtggcccgtggaggcact

SEQ ID NO: 3008750 - DNA, 25 bp, Homo sapien
caagcgaggctggggcccagaaacc

SEQ ID NO: 3008751 - DNA, 25 bp, Homo sapien
agcaagcgaggctggggcccagaaa

SEQ ID NO: 3008752 - DNA, 25 bp, Homo sapien
ccagaaaccccctgggctgggccat

SEQ ID NO: 3008753 - DNA, 25 bp, Homo sapien
ctggaagcaagcgaggctggggccc

SEQ ID NO: 3008754 - DNA, 25 bp, Homo sapien
tccaaggtccaacgtgggtgcagag

SEQ ID NO: 3008755 - DNA, 25 bp, Homo sapien
gagtacatacgcatacccttggcaa

SEQ ID NO: 3008756 - DNA, 25 bp, Homo sapien
ccagctcagcaaggtagggcctctg

SEQ ID NO: 3008757 - DNA, 25 bp, Homo sapien
caagcacaggctgagtgtctccagt

SEQ ID NO: 3008758 - DNA, 25 bp, Homo sapien
gtagggcgcggagagcgcactgagc

SEQ ID NO: 3008759 - DNA, 25 bp, Homo sapien
ggtgggtagggcgcggagagcgcac

SEQ ID NO: 3008760 - DNA, 25 bp, Homo sapien
gggtagggcgcggagagcgcactga

SEQ ID NO: 3008761 - DNA, 25 bp, Homo sapien
agggcgcggagagcgcactgagctc

SEQ ID NO: 3008762 - DNA, 25 bp, Homo sapien
agggaccgagagcaccccgaagccg

SEQ ID NO: 3008763 - DNA, 25 bp, Homo sapien
gagggaccgagagcaccccgaagcc

SEQ ID NO: 3008764 - DNA, 25 bp, Homo sapien
cggctcgtcttctggcagcttggtg

SEQ ID NO: 3008765 - DNA, 25 bp, Homo sapien
tgggcgtccggctcgtcttctggca

SEQ ID NO: 3008766 - DNA, 25 bp, Homo sapien
tgcaatcgtcctctcgtagccttgg

SEQ ID NO: 3008767 - DNA, 25 bp, Homo sapien
tcctctcgtagccttgggcgtccgg

SEQ ID NO: 3008768 - DNA, 25 bp, Homo sapien
gccccatccttgtcgtcgtcgcggg

SEQ ID NO: 3008769 - DNA, 25 bp, Homo sapien
ctgggctggatccttaggctccgaa

SEQ ID NO: 3008770 - DNA, 25 bp, Homo sapien
gatccttaggctccgaagagatggg

SEQ ID NO: 3008771 - DNA, 25 bp, Homo sapien
ttaggctccgaagagatgggcccca

SEQ ID NO: 3008772 - DNA, 25 bp, Homo sapien
atgaggaactgggtgcacacatgag

SEQ ID NO: 3008773 - DNA, 25 bp, Homo sapien
aggcatgttgacgcctcaggcagcg

SEQ ID NO: 3008774 - DNA, 25 bp, Homo sapien
cactcctatgtgtatcccaggacca

SEQ ID NO: 3008775 - DNA, 25 bp, Homo sapien
catgttgacgcctcaggcagcggag

SEQ ID NO: 3008776 - DNA, 25 bp, Homo sapien
ccgggatgtggtgtttgcaatgagc

SEQ ID NO: 3008777 - DNA, 25 bp, Homo sapien
agctgcctcatccagcctaatttaa

SEQ ID NO: 3008778 - DNA, 25 bp, Homo sapien
ttcaaaggcgaacagaaggaaaaga

SEQ ID NO: 3008779 - DNA, 25 bp, Homo sapien
ggttactgtattggacggtgtcttc

SEQ ID NO: 3008780 - DNA, 25 bp, Homo sapien
ctcaagggttctgctacttcagccc

SEQ ID NO: 3008781 - DNA, 25 bp, Homo sapien
taaatgttaggcaactcactgccag

SEQ ID NO: 3008782 - DNA, 25 bp, Homo sapien
gaatgttcaccctaactaccaatgg

SEQ ID NO: 3008783 - DNA, 25 bp, Homo sapien
tgcagtccaccgaaaaatggttagt

SEQ ID NO: 3008784 - DNA, 25 bp, Homo sapien
caaacactgttgtgccatgtggaac

SEQ ID NO: 3008785 - DNA, 25 bp, Homo sapien
tgagacacaaccagtcattggtggc

SEQ ID NO: 3008786 - DNA, 25 bp, Homo sapien
tctcttaagagctatgtgccttcca

SEQ ID NO: 3008787 - DNA, 25 bp, Homo sapien
gtgccttccaaccagagggagaccc

SEQ ID NO: 3008788 - DNA, 25 bp, Homo sapien
cagtggaggcatcttacatttaggc

SEQ ID NO: 3008789 - DNA, 25 bp, Homo sapien
ggagttcataagtatatttaatgaa

SEQ ID NO: 3008790 - DNA, 25 bp, Homo sapien
aggagttcataagtatatttaatga

SEQ ID NO: 3008791 - DNA, 25 bp, Homo sapien
acaatgcactgactttagaaagatg

SEQ ID NO: 3008792 - DNA, 25 bp, Homo sapien
actacattcaccttgtaaattactg

SEQ ID NO: 3008793 - DNA, 25 bp, Homo sapien
gatgttaatgtacataaatagagtg

SEQ ID NO: 3008794 - DNA, 25 bp, Homo sapien
tcaccttgtaaattactgtataaaa

SEQ ID NO: 3008795 - DNA, 25 bp, Homo sapien
tacattggtacctacagtgggtcct

SEQ ID NO: 3008796 - DNA, 25 bp, Homo sapien
gcagggaagcaagtagagagcaggt

SEQ ID NO: 3008797 - DNA, 25 bp, Homo sapien
cctacagtgggtcctacagtcattt

SEQ ID NO: 3008798 - DNA, 25 bp, Homo sapien
gaggattggtgcctacattggtacc

SEQ ID NO: 3008799 - DNA, 25 bp, Homo sapien
tataggtgttattatatgtggctga

SEQ ID NO: 3008800 - DNA, 25 bp, Homo sapien
cctgttccctggaatcagaaccaga

SEQ ID NO: 3008801 - DNA, 25 bp, Homo sapien
cagaaccagacacaccgtgttcagg

SEQ ID NO: 3008802 - DNA, 25 bp, Homo sapien
tgtggctgacactaactacataagt

SEQ ID NO: 3008803 - DNA, 25 bp, Homo sapien
tatgagttacctgatgtccgatgag

SEQ ID NO: 3008804 - DNA, 25 bp, Homo sapien
tctggtgcttaagaaaagctgtcca

SEQ ID NO: 3008805 - DNA, 25 bp, Homo sapien
tggctgggcatagtaactcctcatg

SEQ ID NO: 3008806 - DNA, 25 bp, Homo sapien
gaattttagtacctaggtctgccta

SEQ ID NO: 3008807 - DNA, 25 bp, Homo sapien
ataaggagtgaacgccgcctgaagg

SEQ ID NO: 3008808 - DNA, 25 bp, Homo sapien
ttgaataaggagtgaacgccgcctg

SEQ ID NO: 3008809 - DNA, 25 bp, Homo sapien
gaataaggagtgaacgccgcctgaa

SEQ ID NO: 3008810 - DNA, 25 bp, Homo sapien
ggagtgaacgccgcctgaaggcttt

SEQ ID NO: 3008811 - DNA, 25 bp, Homo sapien
tatggtttctctcttgtatgagtta

SEQ ID NO: 3008812 - DNA, 25 bp, Homo sapien
atggtttctctcttgtatgagttac

SEQ ID NO: 3008813 - DNA, 25 bp, Homo sapien
catatggtttctctcttgtatgagt

SEQ ID NO: 3008814 - DNA, 25 bp, Homo sapien
acactgattacaccaataaactttc

SEQ ID NO: 3008815 - DNA, 25 bp, Homo sapien
tgccctggaaggtcctactacactg

SEQ ID NO: 3008816 - DNA, 25 bp, Homo sapien
gaaggtcctactacactgattacac

SEQ ID NO: 3008817 - DNA, 25 bp, Homo sapien
cctggaaggtcctactacactgatt

SEQ ID NO: 3008818 - DNA, 25 bp, Homo sapien
cgtgtgccacatgaagagtttccca

SEQ ID NO: 3008819 - DNA, 25 bp, Homo sapien
agtctctgatgtttgaggaaagccg

SEQ ID NO: 3008820 - DNA, 25 bp, Homo sapien
atgtttgaggaaagccgtgtgccac

SEQ ID NO: 3008821 - DNA, 25 bp, Homo sapien
tgatgtttgaggaaagccgtgtgcc

SEQ ID NO: 3008822 - DNA, 25 bp, Homo sapien
gctgtgcgccaaatgaagagcttcc

SEQ ID NO: 3008823 - DNA, 25 bp, Homo sapien
gaaagctgtgcgccaaatgaagagc

SEQ ID NO: 3008824 - DNA, 25 bp, Homo sapien
atggattttctggtgtgtagcaagg

SEQ ID NO: 3008825 - DNA, 25 bp, Homo sapien
aaagctgtgcgccaaatgaagagct

SEQ ID NO: 3008826 - DNA, 25 bp, Homo sapien
cagtaaggtgagaatgctgcctgaa

SEQ ID NO: 3008827 - DNA, 25 bp, Homo sapien
tgcttatgtctcaccagattggagc

SEQ ID NO: 3008828 - DNA, 25 bp, Homo sapien
gaactttgactgaacatctgtccac

SEQ ID NO: 3008829 - DNA, 25 bp, Homo sapien
tctggtgcaggacaaggtttgagct

SEQ ID NO: 3008830 - DNA, 25 bp, Homo sapien
ccctgataccgctctcttgggaagg

SEQ ID NO: 3008831 - DNA, 25 bp, Homo sapien
ctgataccgctctcttgggaaggga

SEQ ID NO: 3008832 - DNA, 25 bp, Homo sapien
ttccctgataccgctctcttgggaa

SEQ ID NO: 3008833 - DNA, 25 bp, Homo sapien
tgataccgctctcttgggaagggag

SEQ ID NO: 3008834 - DNA, 25 bp, Homo sapien
tcaactaactcacattcctgggtga

SEQ ID NO: 3008835 - DNA, 25 bp, Homo sapien
attcctgggtgatttgtctttggag

SEQ ID NO: 3008836 - DNA, 25 bp, Homo sapien
gagtttttcggatgcagcccttgct

SEQ ID NO: 3008837 - DNA, 25 bp, Homo sapien
tctgtcctcagaattactggtttca

SEQ ID NO: 3008838 - DNA, 25 bp, Homo sapien
cagtgccctagcttcgtcatctata

SEQ ID NO: 3008839 - DNA, 25 bp, Homo sapien
taagtaatgtgtccatagaacagac

SEQ ID NO: 3008840 - DNA, 25 bp, Homo sapien
cctgctgatagggactctagtcatt

SEQ ID NO: 3008841 - DNA, 25 bp, Homo sapien
tagaacagacctccatatccaggct

SEQ ID NO: 3008842 - DNA, 25 bp, Homo sapien
cagaagctgaaggaaggtatgcctc

SEQ ID NO: 3008843 - DNA, 25 bp, Homo sapien
aagtgcctgggctcaatttcctctg

SEQ ID NO: 3008844 - DNA, 25 bp, Homo sapien
caaaaaacttgtgatctgaagggct

SEQ ID NO: 3008845 - DNA, 25 bp, Homo sapien
tactgaagtcttgaaagccagaagc

SEQ ID NO: 3008846 - DNA, 25 bp, Homo sapien
caaatgtgattacagagaaaaccag

SEQ ID NO: 3008847 - DNA, 25 bp, Homo sapien
tcagcctgacaccataggcacacca

SEQ ID NO: 3008848 - DNA, 25 bp, Homo sapien
tagtgagaagtgatttgacaatgct

SEQ ID NO: 3008849 - DNA, 25 bp, Homo sapien
caaaaataatcactacaaggtcaca

SEQ ID NO: 3008850 - DNA, 25 bp, Homo sapien
gaagatgccgttagcggtacccaca

SEQ ID NO: 3008851 - DNA, 25 bp, Homo sapien
taatcaatttatgcctgacggtgga

SEQ ID NO: 3008852 - DNA, 25 bp, Homo sapien
ccataggcatatgagctctgctcca

SEQ ID NO: 3008853 - DNA, 25 bp, Homo sapien
cagatgtgggcgaggaataatcaat

SEQ ID NO: 3008854 - DNA, 25 bp, Homo sapien
caccatcttggaccccgcgcctggg

SEQ ID NO: 3008855 - DNA, 25 bp, Homo sapien
ctccacggccgctatcactgggtcg

SEQ ID NO: 3008856 - DNA, 25 bp, Homo sapien
ctatcactgggtcgcggctcctagc

SEQ ID NO: 3008857 - DNA, 25 bp, Homo sapien
tcgcggctcctagcgccaccatctt

SEQ ID NO: 3008858 - DNA, 25 bp, Homo sapien
gggtctgcctagatcgaccaggctg

SEQ ID NO: 3008859 - DNA, 25 bp, Homo sapien
aatcctgtcaccttagactcccaga

SEQ ID NO: 3008860 - DNA, 25 bp, Homo sapien
tgcctagatcgaccaggctgttctg

SEQ ID NO: 3008861 - DNA, 25 bp, Homo sapien
catgagccaaacctgccaccactcc

SEQ ID NO: 3008862 - DNA, 25 bp, Homo sapien
gaacatgttattggaaactggcaga

SEQ ID NO: 3008863 - DNA, 25 bp, Homo sapien
aaatgatcctgattatctggcaaag

SEQ ID NO: 3008864 - DNA, 25 bp, Homo sapien
gagagtgcggcaaagcttctcttga

SEQ ID NO: 3008865 - DNA, 25 bp, Homo sapien
gaggttgtaccagaaggctagtaga

SEQ ID NO: 3008866 - DNA, 25 bp, Homo sapien
catgaggaaagggtagccaagatga

SEQ ID NO: 3008867 - DNA, 25 bp, Homo sapien
ccaagatgaaatgggaaggatccaa

SEQ ID NO: 3008868 - DNA, 25 bp, Homo sapien
tacagaggaatagcgctgtgcacag

SEQ ID NO: 3008869 - DNA, 25 bp, Homo sapien
gagcatctacaatgtacctgggcac

SEQ ID NO: 3008870 - DNA, 25 bp, Homo sapien
tctgacctcagaacagtgacggaga

SEQ ID NO: 3008871 - DNA, 25 bp, Homo sapien
tgatattctcctggcaagcgctggc

SEQ ID NO: 3008872 - DNA, 25 bp, Homo sapien
actgggtgccatgtagaaagtggac

SEQ ID NO: 3008873 - DNA, 25 bp, Homo sapien
cattggagaaccacgtgggaggcac

SEQ ID NO: 3008874 - DNA, 25 bp, Homo sapien
cactacactccagcgtgagtgacag

SEQ ID NO: 3008875 - DNA, 25 bp, Homo sapien
tacactccagcgtgagtgacagaat

SEQ ID NO: 3008876 - DNA, 25 bp, Homo sapien
gccactacactccagcgtgagtgac

SEQ ID NO: 3008877 - DNA, 25 bp, Homo sapien
ctacactccagcgtgagtgacagaa

SEQ ID NO: 3008878 - DNA, 25 bp, Homo sapien
taactactggcctaacataaggagg

SEQ ID NO: 3008879 - DNA, 25 bp, Homo sapien
tagggctctggcgatcagctagaag

SEQ ID NO: 3008880 - DNA, 25 bp, Homo sapien
cagagtcccataaggccatagttag

SEQ ID NO: 3008881 - DNA, 25 bp, Homo sapien
gagcctataaagctgactcgggcct

SEQ ID NO: 3008882 - DNA, 25 bp, Homo sapien
tcacgagaacaaaaggtactccctg

SEQ ID NO: 3008883 - DNA, 25 bp, Homo sapien
tgagagggtaaagaccagcatgctt

SEQ ID NO: 3008884 - DNA, 25 bp, Homo sapien
tgcccttgcaaactcgcgagatgtg

SEQ ID NO: 3008885 - DNA, 25 bp, Homo sapien
ggcacgagagcactcagctgtaact

SEQ ID NO: 3008886 - DNA, 25 bp, Homo sapien
tggctgcagtcatccgatcgcaggg

SEQ ID NO: 3008887 - DNA, 25 bp, Homo sapien
aataagttgtgtgaaccctcttcag

SEQ ID NO: 3008888 - DNA, 25 bp, Homo sapien
actcagaaccatgcaaaccaaaggg

SEQ ID NO: 3008889 - DNA, 25 bp, Homo sapien
ggctgacccctctaagtcctcagag

SEQ ID NO: 3008890 - DNA, 25 bp, Homo sapien
tttaccagtgagtatgtagcgggcg

SEQ ID NO: 3008891 - DNA, 25 bp, Homo sapien
agggatttcaacatcgtcatagtca

SEQ ID NO: 3008892 - DNA, 25 bp, Homo sapien
aatgatgctttttcagtatttgcag

SEQ ID NO: 3008893 - DNA, 25 bp, Homo sapien
tcttcaggctcaatgtagcttggga

SEQ ID NO: 3008894 - DNA, 25 bp, Homo sapien
gaagtgaaaggcctagtgacacccc

SEQ ID NO: 3008895 - DNA, 25 bp, Homo sapien
tcaggctattgggtgcgtcggtact

SEQ ID NO: 3008896 - DNA, 25 bp, Homo sapien
gttgtgtaagcaccccagtctatgg

SEQ ID NO: 3008897 - DNA, 25 bp, Homo sapien
gggcttccagcttcagaacaacgag

SEQ ID NO: 3008898 - DNA, 25 bp, Homo sapien
agagaaggccaattcctcggtggca

SEQ ID NO: 3008899 - DNA, 25 bp, Homo sapien
agaaggccaattcctcggtggcaga

SEQ ID NO: 3008900 - DNA, 25 bp, Homo sapien
tggcagaggcggtaattgaactggc

SEQ ID NO: 3008901 - DNA, 25 bp, Homo sapien
ttgaactggcgactcattaagaaca

SEQ ID NO: 3008902 - DNA, 25 bp, Homo sapien
aagagagagaatcagtgtttggttt

SEQ ID NO: 3008903 - DNA, 25 bp, Homo sapien
agagaatcagtgtttggtttgggcc

SEQ ID NO: 3008904 - DNA, 25 bp, Homo sapien
aatcagtgtttggtttgggccatgc

SEQ ID NO: 3008905 - DNA, 25 bp, Homo sapien
gagaatcagtgtttggtttgggcca

SEQ ID NO: 3008906 - DNA, 25 bp, Homo sapien
ttcttcatctacttgcttgtgtttc

SEQ ID NO: 3008907 - DNA, 25 bp, Homo sapien
tttcttcatctacttgcttgtgttt

SEQ ID NO: 3008908 - DNA, 25 bp, Homo sapien
tcttcatctacttgcttgtgtttca

SEQ ID NO: 3008909 - DNA, 25 bp, Homo sapien
gtgtttcaggggcttggcaatttcc

SEQ ID NO: 3008910 - DNA, 25 bp, Homo sapien
gccacagctaagatgatccagaaat

SEQ ID NO: 3008911 - DNA, 25 bp, Homo sapien
agacccacagagacaacgatgatgg

SEQ ID NO: 3008912 - DNA, 25 bp, Homo sapien
cccacagagacaacgatgatggcca

SEQ ID NO: 3008913 - DNA, 25 bp, Homo sapien
cgatgatggccacagctaagatgat

SEQ ID NO: 3008914 - DNA, 25 bp, Homo sapien
tatgaaagctggatcctacctgtgc

SEQ ID NO: 3008915 - DNA, 25 bp, Homo sapien
aatggctgcatgaccgagttcaggc

SEQ ID NO: 3008916 - DNA, 25 bp, Homo sapien
gagttgttgccacagagggccgata

SEQ ID NO: 3008917 - DNA, 25 bp, Homo sapien
ccaccaggctggtttaatggccaag

SEQ ID NO: 3008918 - DNA, 25 bp, Homo sapien
gagctagactccttctccaaacaaa

SEQ ID NO: 3008919 - DNA, 25 bp, Homo sapien
aaaatgaaaaataagttgggcatgg

SEQ ID NO: 3008920 - DNA, 25 bp, Homo sapien
acagagctagactccttctccaaac

SEQ ID NO: 3008921 - DNA, 25 bp, Homo sapien
ggctgtagtgagctgcagtcacgcc

SEQ ID NO: 3008922 - DNA, 25 bp, Homo sapien
caccaagcatgaggcattattaagg

SEQ ID NO: 3008923 - DNA, 25 bp, Homo sapien
gatgcttaacgtctccttgcaggct

SEQ ID NO: 3008924 - DNA, 25 bp, Homo sapien
tgttcccacttagctgttgcacttg

SEQ ID NO: 3008925 - DNA, 25 bp, Homo sapien
tctgtgtgcagaagatcaccaagca

SEQ ID NO: 3008926 - DNA, 25 bp, Homo sapien
caacttggtctgtgtgagtgtccag

SEQ ID NO: 3008927 - DNA, 25 bp, Homo sapien
tctaaaccccatcttcgaggaagtg

SEQ ID NO: 3008928 - DNA, 25 bp, Homo sapien
gacgtttgatgtcagagcgccaaaa

SEQ ID NO: 3008929 - DNA, 25 bp, Homo sapien
tgactaggcttgcacagattgccga

SEQ ID NO: 3008930 - DNA, 25 bp, Homo sapien
gctggtgagaggcattcctcactca

SEQ ID NO: 3008931 - DNA, 25 bp, Homo sapien
gcacagctggtgagaggcattcctc

SEQ ID NO: 3008932 - DNA, 25 bp, Homo sapien
acagctggtgagaggcattcctcac

SEQ ID NO: 3008933 - DNA, 25 bp, Homo sapien
gctggagtgctgcagctcaggcaca

SEQ ID NO: 3008934 - DNA, 25 bp, Homo sapien
tgtgagtggcgaccttgagaaatgt

SEQ ID NO: 3008935 - DNA, 25 bp, Homo sapien
attttgactgagttgggtcccctcg

SEQ ID NO: 3008936 - DNA, 25 bp, Homo sapien
ttctaaaggcgtgtgagtggcgacc

SEQ ID NO: 3008937 - DNA, 25 bp, Homo sapien
gaaagctcctgtgcaccttggaact

SEQ ID NO: 3008938 - DNA, 25 bp, Homo sapien
gtgagacagaactcccagcgaggcc

SEQ ID NO: 3008939 - DNA, 25 bp, Homo sapien
gacagaactcccagcgaggcccacg

SEQ ID NO: 3008940 - DNA, 25 bp, Homo sapien
ctgtgagacagaactcccagcgagg

SEQ ID NO: 3008941 - DNA, 25 bp, Homo sapien
aactcccagcgaggcccacggcctc

SEQ ID NO: 3008942 - DNA, 25 bp, Homo sapien
taccccatggtcgagccattgtgac

SEQ ID NO: 3008943 - DNA, 25 bp, Homo sapien
ttgtgacccctgtgacccacacgtt

SEQ ID NO: 3008944 - DNA, 25 bp, Homo sapien
taatgattaaccgaccttgcaacag

SEQ ID NO: 3008945 - DNA, 25 bp, Homo sapien
gaaccactaaagaagacggaacagc

SEQ ID NO: 3008946 - DNA, 25 bp, Homo sapien
cccaactaatccatccaccactgtg

SEQ ID NO: 3008947 - DNA, 25 bp, Homo sapien
caccactgtgatatgttcctgccct

SEQ ID NO: 3008948 - DNA, 25 bp, Homo sapien
cactgtgatatgttcctgcccttcc

SEQ ID NO: 3008949 - DNA, 25 bp, Homo sapien
ccttccccaactaatccatccacca

SEQ ID NO: 3008950 - DNA, 25 bp, Homo sapien
tcattgtttgttgttcggttgagaa

SEQ ID NO: 3008951 - DNA, 25 bp, Homo sapien
tcacagtcattgtttgttgttcggt

SEQ ID NO: 3008952 - DNA, 25 bp, Homo sapien
acaacaatagcaagtctccttccat

SEQ ID NO: 3008953 - DNA, 25 bp, Homo sapien
tgaggtcacagtcattgtttgttgt

SEQ ID NO: 3008954 - DNA, 25 bp, Homo sapien
caggagcagtttgtagaccaagaac

SEQ ID NO: 3008955 - DNA, 25 bp, Homo sapien
cctgctgaatttggcaatgaacctc

SEQ ID NO: 3008956 - DNA, 25 bp, Homo sapien
gcctggccaggtcagtagaacttct

SEQ ID NO: 3008957 - DNA, 25 bp, Homo sapien
tagatctcagggcttgcgtcaggga

SEQ ID NO: 3008958 - DNA, 25 bp, Homo sapien
cgccccatccccctgcgcctgcgca

SEQ ID NO: 3008959 - DNA, 25 bp, Homo sapien
cccatccccctgcgcctgcgcactg

SEQ ID NO: 3008960 - DNA, 25 bp, Homo sapien
gccgccccatccccctgcgcctgcg

SEQ ID NO: 3008961 - DNA, 25 bp, Homo sapien
gtgccgccccatccccctgcgcctg

SEQ ID NO: 3008962 - DNA, 25 bp, Homo sapien
ggcggcggctcggttgacgcctcct

SEQ ID NO: 3008963 - DNA, 25 bp, Homo sapien
gccggcggatccagccttagcggtt

SEQ ID NO: 3008964 - DNA, 25 bp, Homo sapien
cttagcggtttctctctgggcggcg

SEQ ID NO: 3008965 - DNA, 25 bp, Homo sapien
gtcggcggtcgggtccgtctctgcc

SEQ ID NO: 3008966 - DNA, 25 bp, Homo sapien
tctcagtgtattgcaggatccaggc

SEQ ID NO: 3008967 - DNA, 25 bp, Homo sapien
tttagatcaaaagcgcaattgccgg

SEQ ID NO: 3008968 - DNA, 25 bp, Homo sapien
tcaggagcatttagacagcacccgt

SEQ ID NO: 3008969 - DNA, 25 bp, Homo sapien
gagagtgcctatgtgtcccctagtg

SEQ ID NO: 3008970 - DNA, 25 bp, Homo sapien
ctgcacaggtctgcccaactcttaa

SEQ ID NO: 3008971 - DNA, 25 bp, Homo sapien
tgcccaactcttaaagggacactac

SEQ ID NO: 3008972 - DNA, 25 bp, Homo sapien
gctcggccaggactctgtttttgta

SEQ ID NO: 3008973 - DNA, 25 bp, Homo sapien
gacactacctaatctcttccaccct

SEQ ID NO: 3008974 - DNA, 25 bp, Homo sapien
gaaaatgaagccatacgttctgtgt

SEQ ID NO: 3008975 - DNA, 25 bp, Homo sapien
caatagaatattagctggtacccca

SEQ ID NO: 3008976 - DNA, 25 bp, Homo sapien
tactattcctactcgtgatgcacgg

SEQ ID NO: 3008977 - DNA, 25 bp, Homo sapien
taaatgccaggaggttctgattctc

SEQ ID NO: 3008978 - DNA, 25 bp, Homo sapien
gtagtagctgcacaataaacatcgt

SEQ ID NO: 3008979 - DNA, 25 bp, Homo sapien
cagtacccaatctctgtcatagcag

SEQ ID NO: 3008980 - DNA, 25 bp, Homo sapien
tatgtgtgcccttaaggtaagtgac

SEQ ID NO: 3008981 - DNA, 25 bp, Homo sapien
aaaacacgtggcatagagtagtagc

SEQ ID NO: 3008982 - DNA, 25 bp, Homo sapien
tctgaattggtgactgctgtcatca

SEQ ID NO: 3008983 - DNA, 25 bp, Homo sapien
tatcgtctcagctcatgttacaggc

SEQ ID NO: 3008984 - DNA, 25 bp, Homo sapien
gctgtcatcaaaagaaggtatcggg

SEQ ID NO: 3008985 - DNA, 25 bp, Homo sapien
accagttgcctatcttgccattagc

SEQ ID NO: 3008986 - DNA, 25 bp, Homo sapien
aattctcgacctcaaggaatccgcc

SEQ ID NO: 3008987 - DNA, 25 bp, Homo sapien
tgtttcttgaatccaggcactgcgg

SEQ ID NO: 3008988 - DNA, 25 bp, Homo sapien
cattaatgtgcggacagcagcagac

SEQ ID NO: 3008989 - DNA, 25 bp, Homo sapien
gcagatccaagcagaacagtgttta

SEQ ID NO: 3008990 - DNA, 25 bp, Homo sapien
gcagcagaccacgtagaagaaaagc

SEQ ID NO: 3008991 - DNA, 25 bp, Homo sapien
taggattctcagtacttgaacccag

SEQ ID NO: 3008992 - DNA, 25 bp, Homo sapien
aaaaatagttaaggcatgggccctg

SEQ ID NO: 3008993 - DNA, 25 bp, Homo sapien
tgcatggatcctgcttttccctgag

SEQ ID NO: 3008994 - DNA, 25 bp, Homo sapien
tactatgctgcacccaacgaataaa

SEQ ID NO: 3008995 - DNA, 25 bp, Homo sapien
tgccagatgggcctccagtgttcct

SEQ ID NO: 3008996 - DNA, 25 bp, Homo sapien
tggtgacactgcatgctcaagctgc

SEQ ID NO: 3008997 - DNA, 25 bp, Homo sapien
gctgatgccacgagacttggtgaca

SEQ ID NO: 3008998 - DNA, 25 bp, Homo sapien
gctactgggctcctcaattacaggt

SEQ ID NO: 3008999 - DNA, 25 bp, Homo sapien
tcagggccattgaccaagcctgggc

SEQ ID NO: 3009000 - DNA, 25 bp, Homo sapien
tgcgtcataggctagcttcagatag

SEQ ID NO: 3009001 - DNA, 25 bp, Homo sapien
aacgaattgatctattccagctggg

SEQ ID NO: 3009002 - DNA, 25 bp, Homo sapien
tcagatagtaggcagtcagggccat

SEQ ID NO: 3009003 - DNA, 25 bp, Homo sapien
gccaattttgcctccttatgagtaa

SEQ ID NO: 3009004 - DNA, 25 bp, Homo sapien
tggtgtgttcttcacacttggccca

SEQ ID NO: 3009005 - DNA, 25 bp, Homo sapien
tctgtctggtaagcatcctcatctc

SEQ ID NO: 3009006 - DNA, 25 bp, Homo sapien
catgtaagactcttcccaaccaggc

SEQ ID NO: 3009007 - DNA, 25 bp, Homo sapien
gattacaagtacacaccaccaagcc

SEQ ID NO: 3009008 - DNA, 25 bp, Homo sapien
ggattacaagtacacaccaccaagc

SEQ ID NO: 3009009 - DNA, 25 bp, Homo sapien
gcctgtgcctcctggattccagcga

SEQ ID NO: 3009010 - DNA, 25 bp, Homo sapien
gcagcctgtgcctcctggattccag

SEQ ID NO: 3009011 - DNA, 25 bp, Homo sapien
tactctggtgagttaatctgctaca

SEQ ID NO: 3009012 - DNA, 25 bp, Homo sapien
tgtttctccaggtgcagttagagcg

SEQ ID NO: 3009013 - DNA, 25 bp, Homo sapien
ccctttgaagtgactagtactctgg

SEQ ID NO: 3009014 - DNA, 25 bp, Homo sapien
cagtccgttacacggtagctttggg

SEQ ID NO: 3009015 - DNA, 25 bp, Homo sapien
tgcagcccagagaccttcaaatgcg

SEQ ID NO: 3009016 - DNA, 25 bp, Homo sapien
tccaacaggcgtgggatcagatttg

SEQ ID NO: 3009017 - DNA, 25 bp, Homo sapien
gaaatgcttacttctagagggagaa

SEQ ID NO: 3009018 - DNA, 25 bp, Homo sapien
aatgcgaacactataaactccaggc

SEQ ID NO: 3009019 - DNA, 25 bp, Homo sapien
agagctcatcagtaacagtattcag

SEQ ID NO: 3009020 - DNA, 25 bp, Homo sapien
cagtattcagttagcagacagaagt

SEQ ID NO: 3009021 - DNA, 25 bp, Homo sapien
ggaggaccttaaatgctactgaaac

SEQ ID NO: 3009022 - DNA, 25 bp, Homo sapien
ttacctgagaaccataggactgtgg

SEQ ID NO: 3009023 - DNA, 25 bp, Homo sapien
taacagcagggtacctgaaagagcc

SEQ ID NO: 3009024 - DNA, 25 bp, Homo sapien
ttgagactggttgcataacagcagg

SEQ ID NO: 3009025 - DNA, 25 bp, Homo sapien
tgaagaaagcctcagtgaaacaggt

SEQ ID NO: 3009026 - DNA, 25 bp, Homo sapien
tcatccaggaggttcaaaagtaaga

SEQ ID NO: 3009027 - DNA, 25 bp, Homo sapien
ctttataaagagtgctacatggttt

SEQ ID NO: 3009028 - DNA, 25 bp, Homo sapien
ccctttataaagagtgctacatggt

SEQ ID NO: 3009029 - DNA, 25 bp, Homo sapien
taaagagtgctacatggtttagata

SEQ ID NO: 3009030 - DNA, 25 bp, Homo sapien
tataaagagtgctacatggtttaga

SEQ ID NO: 3009031 - DNA, 25 bp, Homo sapien
caattagggaatggttagtggtctc

SEQ ID NO: 3009032 - DNA, 25 bp, Homo sapien
gaactgactgaactagagcttgcag

SEQ ID NO: 3009033 - DNA, 25 bp, Homo sapien
caggatttagcccttctaggcaaaa

SEQ ID NO: 3009034 - DNA, 25 bp, Homo sapien
ggataagccccaagcgaatttgtct

SEQ ID NO: 3009035 - DNA, 25 bp, Homo sapien
gtgtgaaataatcctgagtccttgc

SEQ ID NO: 3009036 - DNA, 25 bp, Homo sapien
gagaaaactcaatagggttcaggga

SEQ ID NO: 3009037 - DNA, 25 bp, Homo sapien
ctgtaggcttgagttataaagcaca

SEQ ID NO: 3009038 - DNA, 25 bp, Homo sapien
gagtccttgctgaacacaactgtag

SEQ ID NO: 3009039 - DNA, 25 bp, Homo sapien
ttcagttcaggtgtgagtcagctcc

SEQ ID NO: 3009040 - DNA, 25 bp, Homo sapien
tgttcagttcaggtgtgagtcagct

SEQ ID NO: 3009041 - DNA, 25 bp, Homo sapien
ggtgttcagttcaggtgtgagtcag

SEQ ID NO: 3009042 - DNA, 25 bp, Homo sapien
tttacaatatgggtttaagccttca

SEQ ID NO: 3009043 - DNA, 25 bp, Homo sapien
tacatgattgcggatatcattgatt

SEQ ID NO: 3009044 - DNA, 25 bp, Homo sapien
gtttacatgattgcggatatcattg

SEQ ID NO: 3009045 - DNA, 25 bp, Homo sapien
ttacatgattgcggatatcattgat

SEQ ID NO: 3009046 - DNA, 25 bp, Homo sapien
tttacatgattgcggatatcattga

SEQ ID NO: 3009047 - DNA, 25 bp, Homo sapien
tcacttttggaattataataaacca

SEQ ID NO: 3009048 - DNA, 25 bp, Homo sapien
ccatttatatggattcttaagaatt

SEQ ID NO: 3009049 - DNA, 25 bp, Homo sapien
aaccatttatatggattcttaagaa

SEQ ID NO: 3009050 - DNA, 25 bp, Homo sapien
agtcactcacttttggaattataat

SEQ ID NO: 3009051 - DNA, 25 bp, Homo sapien
gcactttcgctggtaggcactgaga

SEQ ID NO: 3009052 - DNA, 25 bp, Homo sapien
tcctctttcaggatggactgaatgc

SEQ ID NO: 3009053 - DNA, 25 bp, Homo sapien
aatgcactttcgctggtaggcactg

SEQ ID NO: 3009054 - DNA, 25 bp, Homo sapien
caggatggactgaatgcactttcgc

SEQ ID NO: 3009055 - DNA, 25 bp, Homo sapien
gcccaaatgtcgaagttgatcaggt

SEQ ID NO: 3009056 - DNA, 25 bp, Homo sapien
tgtcgaagttgatcaggtatcagct

SEQ ID NO: 3009057 - DNA, 25 bp, Homo sapien
ggcattgcccaaatgtcgaagttga

SEQ ID NO: 3009058 - DNA, 25 bp, Homo sapien
gttgatcaggtatcagctgtaattc

SEQ ID NO: 3009059 - DNA, 25 bp, Homo sapien
ctgggagctcagagtgaaaactgtg

SEQ ID NO: 3009060 - DNA, 25 bp, Homo sapien
gggagctcagagtgaaaactgtgaa

SEQ ID NO: 3009061 - DNA, 25 bp, Homo sapien
tcagagagaactgggagctcagagt

SEQ ID NO: 3009062 - DNA, 25 bp, Homo sapien
gaactgggagctcagagtgaaaact

SEQ ID NO: 3009063 - DNA, 25 bp, Homo sapien
ggtaactaaatgttatacagcccac

SEQ ID NO: 3009064 - DNA, 25 bp, Homo sapien
taactaaatgttatacagcccactg

SEQ ID NO: 3009065 - DNA, 25 bp, Homo sapien
ctaggtaactaaatgttatacagcc

SEQ ID NO: 3009066 - DNA, 25 bp, Homo sapien
taggtaactaaatgttatacagccc

SEQ ID NO: 3009067 - DNA, 25 bp, Homo sapien
tatttgtcagctaaacgctcagcca

SEQ ID NO: 3009068 - DNA, 25 bp, Homo sapien
ttcctcatatttgtcagctaaacgc

SEQ ID NO: 3009069 - DNA, 25 bp, Homo sapien
tgttcatgatatcctcttgtttttc

SEQ ID NO: 3009070 - DNA, 25 bp, Homo sapien
taaacgctcagccatttcccgcaga

SEQ ID NO: 3009071 - DNA, 25 bp, Homo sapien
ctcgacaataactgagatcttctag

SEQ ID NO: 3009072 - DNA, 25 bp, Homo sapien
ctctcttctcgacaataactgagat

SEQ ID NO: 3009073 - DNA, 25 bp, Homo sapien
cttctcgacaataactgagatcttc

SEQ ID NO: 3009074 - DNA, 25 bp, Homo sapien
tcttctcgacaataactgagatctt

SEQ ID NO: 3009075 - DNA, 25 bp, Homo sapien
cctgtttgagaatgtactgctctct

SEQ ID NO: 3009076 - DNA, 25 bp, Homo sapien
aggaggaggggctatgtccttttca

SEQ ID NO: 3009077 - DNA, 25 bp, Homo sapien
ctgtttgagaatgtactgctctctg

SEQ ID NO: 3009078 - DNA, 25 bp, Homo sapien
tgtttgagaatgtactgctctctga

SEQ ID NO: 3009079 - DNA, 25 bp, Homo sapien
ttctacctttattttccttagctga

SEQ ID NO: 3009080 - DNA, 25 bp, Homo sapien
tattttccttagctgagtaaaacaa

SEQ ID NO: 3009081 - DNA, 25 bp, Homo sapien
tacctttattttccttagctgagta

SEQ ID NO: 3009082 - DNA, 25 bp, Homo sapien
ttattttccttagctgagtaaaaca

SEQ ID NO: 3009083 - DNA, 25 bp, Homo sapien
ccagcctaacttgagacgagtctca

SEQ ID NO: 3009084 - DNA, 25 bp, Homo sapien
gaggacagaaaggatgcacagtaat

SEQ ID NO: 3009085 - DNA, 25 bp, Homo sapien
cagaaaggatgcacagtaattctga

SEQ ID NO: 3009086 - DNA, 25 bp, Homo sapien
taaaaccgctatgcccaaggttgca

SEQ ID NO: 3009087 - DNA, 25 bp, Homo sapien
gacagaagagaacccattcataaaa

SEQ ID NO: 3009088 - DNA, 25 bp, Homo sapien
acatcttctcgagtacaaagcaggg

SEQ ID NO: 3009089 - DNA, 25 bp, Homo sapien
tcaaaaatgctggattggcaacact

SEQ ID NO: 3009090 - DNA, 25 bp, Homo sapien
gggagactctgccacttcaacatct

SEQ ID NO: 3009091 - DNA, 25 bp, Homo sapien
tggcaacactacgttgcaaaatgct

SEQ ID NO: 3009092 - DNA, 25 bp, Homo sapien
gcagtgcgggtacgtggcttacttc

SEQ ID NO: 3009093 - DNA, 25 bp, Homo sapien
cagctttattccagtttacatagtc

SEQ ID NO: 3009094 - DNA, 25 bp, Homo sapien
tacatagtctacagtgtccctcagg

SEQ ID NO: 3009095 - DNA, 25 bp, Homo sapien
aatgagacctgcatctgtatcccag

SEQ ID NO: 3009096 - DNA, 25 bp, Homo sapien
attaacaagagctgtgtggagaata

SEQ ID NO: 3009097 - DNA, 25 bp, Homo sapien
agctgtgtggagaatataaaatggg

SEQ ID NO: 3009098 - DNA, 25 bp, Homo sapien
caagagctgtgtggagaatataaaa

SEQ ID NO: 3009099 - DNA, 25 bp, Homo sapien
taacaagagctgtgtggagaatata

SEQ ID NO: 3009100 - DNA, 25 bp, Homo sapien
tgtcaggtacaatccaaaatcctcg

SEQ ID NO: 3009101 - DNA, 25 bp, Homo sapien
tcgtgggtcccagaatgtcaggtac

SEQ ID NO: 3009102 - DNA, 25 bp, Homo sapien
aaatcctcgaattggagctggctgc

SEQ ID NO: 3009103 - DNA, 25 bp, Homo sapien
cattcataggtactggtgatgcaga

SEQ ID NO: 3009104 - DNA, 25 bp, Homo sapien
gaagttgcttgggacatcctatcag

SEQ ID NO: 3009105 - DNA, 25 bp, Homo sapien
gaaacctttaatgcagctccacact

SEQ ID NO: 3009106 - DNA, 25 bp, Homo sapien
tctagagcccatgtgactaagtcac

SEQ ID NO: 3009107 - DNA, 25 bp, Homo sapien
aaagacatgacaggtccgcggcctt

SEQ ID NO: 3009108 - DNA, 25 bp, Homo sapien
cctgtaaactatccttatcttcttc

SEQ ID NO: 3009109 - DNA, 25 bp, Homo sapien
tcgtacaaaggatgtgttcaacaaa

SEQ ID NO: 3009110 - DNA, 25 bp, Homo sapien
tctgttctgtagagagttcctgtaa

SEQ ID NO: 3009111 - DNA, 25 bp, Homo sapien
agggcaatggcttcgtacaaaggat

SEQ ID NO: 3009112 - DNA, 25 bp, Homo sapien
aagtttatgaatccaagttagccca

SEQ ID NO: 3009113 - DNA, 25 bp, Homo sapien
caagttagcccaacactatgtacac

SEQ ID NO: 3009114 - DNA, 25 bp, Homo sapien
catgagtacagtgatatcttgaagg

SEQ ID NO: 3009115 - DNA, 25 bp, Homo sapien
ctgatccaagaaatttgtgaagttt

SEQ ID NO: 3009116 - DNA, 25 bp, Homo sapien
ttcaaagcaagctccaactcaacac

SEQ ID NO: 3009117 - DNA, 25 bp, Homo sapien
tcaaagcaagctccaactcaacaca

SEQ ID NO: 3009118 - DNA, 25 bp, Homo sapien
ttctagcacgacacagtgatacagc

SEQ ID NO: 3009119 - DNA, 25 bp, Homo sapien
ggtaagcagagtacagcacacgcat

SEQ ID NO: 3009120 - DNA, 25 bp, Homo sapien
tatcttcagccgcaggatgcatggg

SEQ ID NO: 3009121 - DNA, 25 bp, Homo sapien
catgggcaatggacccaacagcttt

SEQ ID NO: 3009122 - DNA, 25 bp, Homo sapien
gatgtatgtcaggaaagtctctcca

SEQ ID NO: 3009123 - DNA, 25 bp, Homo sapien
aaatagagtctttgggactgctgcc

SEQ ID NO: 3009124 - DNA, 25 bp, Homo sapien
aatgcaactgctgtctctcctagag

SEQ ID NO: 3009125 - DNA, 25 bp, Homo sapien
tctcctagagatgcggtatacgccc

SEQ ID NO: 3009126 - DNA, 25 bp, Homo sapien
gagtactagactttcctcttcggct

SEQ ID NO: 3009127 - DNA, 25 bp, Homo sapien
gaaagtattatcacgttagtgggtg

SEQ ID NO: 3009128 - DNA, 25 bp, Homo sapien
tctgcggctcacgtagtgagtaaat

SEQ ID NO: 3009129 - DNA, 25 bp, Homo sapien
cctttattgagtactagactttcct

SEQ ID NO: 3009130 - DNA, 25 bp, Homo sapien
tgttaacagcactacgtggggatcc

SEQ ID NO: 3009131 - DNA, 25 bp, Homo sapien
gagaggtggaactggtgaaaaatct

SEQ ID NO: 3009132 - DNA, 25 bp, Homo sapien
tcacttggataccatgcagcatgct

SEQ ID NO: 3009133 - DNA, 25 bp, Homo sapien
tggtgaaaaatctctccgcaactgg

SEQ ID NO: 3009134 - DNA, 25 bp, Homo sapien
tattcctataagtgctacatgatgt

SEQ ID NO: 3009135 - DNA, 25 bp, Homo sapien
tacaattcactgttgattttccacc

SEQ ID NO: 3009136 - DNA, 25 bp, Homo sapien
taggtaattctaataccataagtcc

SEQ ID NO: 3009137 - DNA, 25 bp, Homo sapien
tacatgatgttgtgttgggcttaac

SEQ ID NO: 3009138 - DNA, 25 bp, Homo sapien
gaagaatcgcttgaaactggaaggt

SEQ ID NO: 3009139 - DNA, 25 bp, Homo sapien
gaaggtggaggttgcggtgagccga

SEQ ID NO: 3009140 - DNA, 25 bp, Homo sapien
gatggcgccattgcactccagcctg

SEQ ID NO: 3009141 - DNA, 25 bp, Homo sapien
ccagctactcgcggggggggctgag

SEQ ID NO: 3009142 - DNA, 25 bp, Homo sapien
cgtcggagtcaatccgctggaacgc

SEQ ID NO: 3009143 - DNA, 25 bp, Homo sapien
ccgtaagcatcgagagagcctgagt

SEQ ID NO: 3009144 - DNA, 25 bp, Homo sapien
tgagtccccgcgaccgcgtatggca

SEQ ID NO: 3009145 - DNA, 25 bp, Homo sapien
ggcctccaggccgtaagcatcgaga

SEQ ID NO: 3009146 - DNA, 25 bp, Homo sapien
cgtttctcgtcagcaactgcggcgg

SEQ ID NO: 3009147 - DNA, 25 bp, Homo sapien
cgaaggcgaacgactaagaaggagc

SEQ ID NO: 3009148 - DNA, 25 bp, Homo sapien
cgacgaaggcaacgacgaagaagct

SEQ ID NO: 3009149 - DNA, 25 bp, Homo sapien
gaacacgacgtggttaggaagccag

SEQ ID NO: 3009150 - DNA, 25 bp, Homo sapien
gaatacgctgcgatccattcgcggt

SEQ ID NO: 3009151 - DNA, 25 bp, Homo sapien
tcgcggtctgcacccggaaagtaca

SEQ ID NO: 3009152 - DNA, 25 bp, Homo sapien
tgctgctggaaatctagcacctggg

SEQ ID NO: 3009153 - DNA, 25 bp, Homo sapien
gctggcctcacgcatttcgcttgga

SEQ ID NO: 3009154 - DNA, 25 bp, Homo sapien
gaaaattgtctcctcggcccttagc

SEQ ID NO: 3009155 - DNA, 25 bp, Homo sapien
ccagcctgagagagcataaaaacca

SEQ ID NO: 3009156 - DNA, 25 bp, Homo sapien
ccaaatctttccctcgtgtgaagga

SEQ ID NO: 3009157 - DNA, 25 bp, Homo sapien
gctgaagcatggtgaagccctccaa

SEQ ID NO: 3009158 - DNA, 25 bp, Homo sapien
cacagattataatggtagcagagct

SEQ ID NO: 3009159 - DNA, 25 bp, Homo sapien
cacctgtaacagtgttgtagttacc

SEQ ID NO: 3009160 - DNA, 25 bp, Homo sapien
ttcttagtaaggtgaacagtgagtc

SEQ ID NO: 3009161 - DNA, 25 bp, Homo sapien
gctttcaccgtacctcatgccatgt

SEQ ID NO: 3009162 - DNA, 25 bp, Homo sapien
gcttggactcacatcattctatggg

SEQ ID NO: 3009163 - DNA, 25 bp, Homo sapien
ggttgaagacaactcattccctctg

SEQ ID NO: 3009164 - DNA, 25 bp, Homo sapien
ctagagccagcttggactcacatca

SEQ ID NO: 3009165 - DNA, 25 bp, Homo sapien
gaagacaactcattccctctgagga

SEQ ID NO: 3009166 - DNA, 25 bp, Homo sapien
gcacatgtctagcttcagagtagga

SEQ ID NO: 3009167 - DNA, 25 bp, Homo sapien
gaaactatggctttcagcatctgtc

SEQ ID NO: 3009168 - DNA, 25 bp, Homo sapien
tggccaaagcctgccatgaaactat

SEQ ID NO: 3009169 - DNA, 25 bp, Homo sapien
caaactgccttggaggagataaacc

SEQ ID NO: 3009170 - DNA, 25 bp, Homo sapien
caagaaaagtaatgtactcctggtg

SEQ ID NO: 3009171 - DNA, 25 bp, Homo sapien
aagtaatgtactcctggtgctccag

SEQ ID NO: 3009172 - DNA, 25 bp, Homo sapien
atctgcaaaagtgttgtccacccct

SEQ ID NO: 3009173 - DNA, 25 bp, Homo sapien
gtcggcaaggaaatccattaggtgg

SEQ ID NO: 3009174 - DNA, 25 bp, Homo sapien
ttcccccaccttatcaagcactcac

SEQ ID NO: 3009175 - DNA, 25 bp, Homo sapien
ggttcccccaccttatcaagcactc

SEQ ID NO: 3009176 - DNA, 25 bp, Homo sapien
aggttcccccaccttatcaagcact

SEQ ID NO: 3009177 - DNA, 25 bp, Homo sapien
gttcccccaccttatcaagcactca

SEQ ID NO: 3009178 - DNA, 25 bp, Homo sapien
tccattcagactcgccagtggactg

SEQ ID NO: 3009179 - DNA, 25 bp, Homo sapien
gtatccttccattcagactcgccag

SEQ ID NO: 3009180 - DNA, 25 bp, Homo sapien
gtcactctcagcctcgtcttcttgt

SEQ ID NO: 3009181 - DNA, 25 bp, Homo sapien
attcagactcgccagtggactgaaa

SEQ ID NO: 3009182 - DNA, 25 bp, Homo sapien
tctccaggacaagctagactcaggg

SEQ ID NO: 3009183 - DNA, 25 bp, Homo sapien
ctgctgggctggtctaagctagaaa

SEQ ID NO: 3009184 - DNA, 25 bp, Homo sapien
cactgacagcatgaaactcatcagg

SEQ ID NO: 3009185 - DNA, 25 bp, Homo sapien
tgccaagaggctagcactccatcct

SEQ ID NO: 3009186 - DNA, 25 bp, Homo sapien
tataacttcaaccacgaaattggga

SEQ ID NO: 3009187 - DNA, 25 bp, Homo sapien
aaattgggagttgatgtcagttcag

SEQ ID NO: 3009188 - DNA, 25 bp, Homo sapien
tcattctttataacttcaaccacga

SEQ ID NO: 3009189 - DNA, 25 bp, Homo sapien
ataatgacagtccaacacaagggcc

SEQ ID NO: 3009190 - DNA, 25 bp, Homo sapien
gaaatgtggataccagcctcagcta

SEQ ID NO: 3009191 - DNA, 25 bp, Homo sapien
caagaagtcaatacatgctgctgct

SEQ ID NO: 3009192 - DNA, 25 bp, Homo sapien
tcagagtgtctgatggccaccacta

SEQ ID NO: 3009193 - DNA, 25 bp, Homo sapien
ggcaccctgcttggttaaataacac

SEQ ID NO: 3009194 - DNA, 25 bp, Homo sapien
cctcaccatcaaatgttggtgggat

SEQ ID NO: 3009195 - DNA, 25 bp, Homo sapien
cctcctcaccatcaaatgttggtgg

SEQ ID NO: 3009196 - DNA, 25 bp, Homo sapien
accatcaaatgttggtgggatgctg

SEQ ID NO: 3009197 - DNA, 25 bp, Homo sapien
ggttcctcctcaccatcaaatgttg

SEQ ID NO: 3009198 - DNA, 25 bp, Homo sapien
cacgccactgctctccagcctggag

SEQ ID NO: 3009199 - DNA, 25 bp, Homo sapien
gcaggagaattgcttgaacctggga

SEQ ID NO: 3009200 - DNA, 25 bp, Homo sapien
tctccagcctggagacacagcaaga

SEQ ID NO: 3009201 - DNA, 25 bp, Homo sapien
ttgcttgaacctgggaggtggaggt

SEQ ID NO: 3009202 - DNA, 25 bp, Homo sapien
caactgtgctgactaagctgagctc

SEQ ID NO: 3009203 - DNA, 25 bp, Homo sapien
gaagtgccgccctccacttgtgcta

SEQ ID NO: 3009204 - DNA, 25 bp, Homo sapien
ggcaaaaacacactatgcaacaggc

SEQ ID NO: 3009205 - DNA, 25 bp, Homo sapien
caattgacctgtgtagggcaaaaac

SEQ ID NO: 3009206 - DNA, 25 bp, Homo sapien
ggcaactttccgcactaatttcgct

SEQ ID NO: 3009207 - DNA, 25 bp, Homo sapien
cttagggagggttttatgcttctga

SEQ ID NO: 3009208 - DNA, 25 bp, Homo sapien
acctccagacatcttagggagggtt

SEQ ID NO: 3009209 - DNA, 25 bp, Homo sapien
taatttcgcttctgtcccattcagt

SEQ ID NO: 3009210 - DNA, 25 bp, Homo sapien
gaccatgggccttcccaaaggtcca

SEQ ID NO: 3009211 - DNA, 25 bp, Homo sapien
cactttccgctataaaccaggagaa

SEQ ID NO: 3009212 - DNA, 25 bp, Homo sapien
aaaggtccactttcgatagaataag

SEQ ID NO: 3009213 - DNA, 25 bp, Homo sapien
tgctattttcaaccacgaccatggg

SEQ ID NO: 3009214 - DNA, 25 bp, Homo sapien
tgggtttagcccgctggttgccaat

SEQ ID NO: 3009215 - DNA, 25 bp, Homo sapien
gggtttagcccgctggttgccaatc

SEQ ID NO: 3009216 - DNA, 25 bp, Homo sapien
gtgggtttagcccgctggttgccaa

SEQ ID NO: 3009217 - DNA, 25 bp, Homo sapien
ggtttagcccgctggttgccaatca

SEQ ID NO: 3009218 - DNA, 25 bp, Homo sapien
cgtcggtgtgcagcgagccgcagcc

SEQ ID NO: 3009219 - DNA, 25 bp, Homo sapien
acagccacaggcgcagggtccgcga

SEQ ID NO: 3009220 - DNA, 25 bp, Homo sapien
ggccgccgctcggaacctgcgcgca

SEQ ID NO: 3009221 - DNA, 25 bp, Homo sapien
gccacaggcgcagggtccgcgaggc

SEQ ID NO: 3009222 - DNA, 25 bp, Homo sapien
cagcgcggaggccggcgacggagga

SEQ ID NO: 3009223 - DNA, 25 bp, Homo sapien
ggcacgcagcgcagcagaggcagca

SEQ ID NO: 3009224 - DNA, 25 bp, Homo sapien
cacagccggggtgccggctgcagga

SEQ ID NO: 3009225 - DNA, 25 bp, Homo sapien
ggccgggtgcacagccggggtgccg

SEQ ID NO: 3009226 - DNA, 25 bp, Homo sapien
cccgcgacctgaggcgccgccggaa

SEQ ID NO: 3009227 - DNA, 25 bp, Homo sapien
acgtgcagatgcaaaggacaaccca

SEQ ID NO: 3009228 - DNA, 25 bp, Homo sapien
gcggaaacgactgcgaacacgtgca

SEQ ID NO: 3009229 - DNA, 25 bp, Homo sapien
gcagatgcaaaggacaacccaggcc

SEQ ID NO: 3009230 - DNA, 25 bp, Homo sapien
gcaaagatgctttcacgctcctgga

SEQ ID NO: 3009231 - DNA, 25 bp, Homo sapien
tcccaggaggtacgagataacagca

SEQ ID NO: 3009232 - DNA, 25 bp, Homo sapien
taaatcacggcttcttctagggcaa

SEQ ID NO: 3009233 - DNA, 25 bp, Homo sapien
cacaagcgttcagtagggatcgcca

SEQ ID NO: 3009234 - DNA, 25 bp, Homo sapien
tgtgcatctatgacgcagaggtccc

SEQ ID NO: 3009235 - DNA, 25 bp, Homo sapien
tccacgtctcctcgggatgatgcga

SEQ ID NO: 3009236 - DNA, 25 bp, Homo sapien
tagagcagctcagtgtacacgacgc

SEQ ID NO: 3009237 - DNA, 25 bp, Homo sapien
cagaggtcccgcatgtagcacttgt

SEQ ID NO: 3009238 - DNA, 25 bp, Homo sapien
tcacccacagaacactaggaccaga

SEQ ID NO: 3009239 - DNA, 25 bp, Homo sapien
acagaacactaggaccagacgatac

SEQ ID NO: 3009240 - DNA, 25 bp, Homo sapien
cccacagaacactaggaccagacga

SEQ ID NO: 3009241 - DNA, 25 bp, Homo sapien
gtcacccacagaacactaggaccag

SEQ ID NO: 3009242 - DNA, 25 bp, Homo sapien
ttgacaaaattctctttgcaccaat

SEQ ID NO: 3009243 - DNA, 25 bp, Homo sapien
tgacttctgctaccagcgtcatatt

SEQ ID NO: 3009244 - DNA, 25 bp, Homo sapien
gctaccagcgtcatattcttgctgt

SEQ ID NO: 3009245 - DNA, 25 bp, Homo sapien
cagctgtgctctgacttctgctacc

SEQ ID NO: 3009246 - DNA, 25 bp, Homo sapien
tcaactgcacgaagcttcgtttcca

SEQ ID NO: 3009247 - DNA, 25 bp, Homo sapien
aagtttttcaactgcacgaagcttc

SEQ ID NO: 3009248 - DNA, 25 bp, Homo sapien
tgcacgaagcttcgtttccatgact

SEQ ID NO: 3009249 - DNA, 25 bp, Homo sapien
gaagcttcgtttccatgactacatg

SEQ ID NO: 3009250 - DNA, 25 bp, Homo sapien
tctcctctgtacagtggaatttggg

SEQ ID NO: 3009251 - DNA, 25 bp, Homo sapien
gatatgaacttcttgcggacccctt

SEQ ID NO: 3009252 - DNA, 25 bp, Homo sapien
cagcagggagacaatggtcaggatc

SEQ ID NO: 3009253 - DNA, 25 bp, Homo sapien
gaaggtccgatagatattgagcagg

SEQ ID NO: 3009254 - DNA, 25 bp, Homo sapien
cagttgggcaatggccgcctgaatg

SEQ ID NO: 3009255 - DNA, 25 bp, Homo sapien
agggtaagctggtcatccttatgtt

SEQ ID NO: 3009256 - DNA, 25 bp, Homo sapien
catccttatgttcaagagcacctaa

SEQ ID NO: 3009257 - DNA, 25 bp, Homo sapien
aagagcacctaacaggtccagttgg

SEQ ID NO: 3009258 - DNA, 25 bp, Homo sapien
ctgaagcatcacactggccaggtta

SEQ ID NO: 3009259 - DNA, 25 bp, Homo sapien
gtgagcacatttgggactttcattg

SEQ ID NO: 3009260 - DNA, 25 bp, Homo sapien
agaagctgaagcatcacactggcca

SEQ ID NO: 3009261 - DNA, 25 bp, Homo sapien
aagctgaagcatcacactggccagg

SEQ ID NO: 3009262 - DNA, 25 bp, Homo sapien
tctcaaactcgtcctccgtgtagag

SEQ ID NO: 3009263 - DNA, 25 bp, Homo sapien
agccggtagcagatgccactgtcct

SEQ ID NO: 3009264 - DNA, 25 bp, Homo sapien
tctggcacggtcatcttatcaaact

SEQ ID NO: 3009265 - DNA, 25 bp, Homo sapien
ttcgatacccgctgcactgctaaca

SEQ ID NO: 3009266 - DNA, 25 bp, Homo sapien
gagagtgagccccattagtgcttca

SEQ ID NO: 3009267 - DNA, 25 bp, Homo sapien
tgagccccattagtgcttcatcaca

SEQ ID NO: 3009268 - DNA, 25 bp, Homo sapien
ccattagtgcttcatcacatgaaca

SEQ ID NO: 3009269 - DNA, 25 bp, Homo sapien
tagtgcttcatcacatgaacaaact

SEQ ID NO: 3009270 - DNA, 25 bp, Homo sapien
ttcagcgatgttggttgaaatgatc

SEQ ID NO: 3009271 - DNA, 25 bp, Homo sapien
tttgctttaaccatgcccgtgtcaa

SEQ ID NO: 3009272 - DNA, 25 bp, Homo sapien
ttgaaatgatcactttgcgatagcc

SEQ ID NO: 3009273 - DNA, 25 bp, Homo sapien
tattttattcctgtaatggttatgg

SEQ ID NO: 3009274 - DNA, 25 bp, Homo sapien
tcggagctgctgtgcatagggcagg

SEQ ID NO: 3009275 - DNA, 25 bp, Homo sapien
tgctcatggcttcgatctcctcctg

SEQ ID NO: 3009276 - DNA, 25 bp, Homo sapien
gcagggaggcgtacagaggaaggac

SEQ ID NO: 3009277 - DNA, 25 bp, Homo sapien
caatgtctcggcacgtcttgctcat

SEQ ID NO: 3009278 - DNA, 25 bp, Homo sapien
acttttcaggaatttgcccccagca

SEQ ID NO: 3009279 - DNA, 25 bp, Homo sapien
tttcaggaatttgcccccagcacca

SEQ ID NO: 3009280 - DNA, 25 bp, Homo sapien
gacacaactcacaaagttgttttat

SEQ ID NO: 3009281 - DNA, 25 bp, Homo sapien
cacaactcacaaagttgttttattc

SEQ ID NO: 3009282 - DNA, 25 bp, Homo sapien
ggatgctgccgaccctctaggtaga

SEQ ID NO: 3009283 - DNA, 25 bp, Homo sapien
gggcgccattgaaatactgagagaa

SEQ ID NO: 3009284 - DNA, 25 bp, Homo sapien
caagcgcggcgtgcaggtaatcatt

SEQ ID NO: 3009285 - DNA, 25 bp, Homo sapien
taaaacacctggatcggatgctgcc

SEQ ID NO: 3009286 - DNA, 25 bp, Homo sapien
gaccagaaacaaatagtgggaaggc

SEQ ID NO: 3009287 - DNA, 25 bp, Homo sapien
acgaagaggaggaccagaaacaaat

SEQ ID NO: 3009288 - DNA, 25 bp, Homo sapien
cagaaacaaatagtgggaaggcctt

SEQ ID NO: 3009289 - DNA, 25 bp, Homo sapien
aagagaacgaagaggaggaccagaa

SEQ ID NO: 3009290 - DNA, 25 bp, Homo sapien
gatggagtttcaccgggcacggtgg

SEQ ID NO: 3009291 - DNA, 25 bp, Homo sapien
accctgctagagcacacaggtctgt

SEQ ID NO: 3009292 - DNA, 25 bp, Homo sapien
gcagatgattgaggcctgtgccacc

SEQ ID NO: 3009293 - DNA, 25 bp, Homo sapien
gaggaaaacaccctgctagagcaca

SEQ ID NO: 3009294 - DNA, 25 bp, Homo sapien
ctgtgtgttacgcatactttcaggg

SEQ ID NO: 3009295 - DNA, 25 bp, Homo sapien
ttctgtgtgttacgcatactttcag

SEQ ID NO: 3009296 - DNA, 25 bp, Homo sapien
tccttctgtgtgttacgcatacttt

SEQ ID NO: 3009297 - DNA, 25 bp, Homo sapien
ccttctgtgtgttacgcatactttc

SEQ ID NO: 3009298 - DNA, 25 bp, Homo sapien
ttctcctcttctgtgcagctttcac

SEQ ID NO: 3009299 - DNA, 25 bp, Homo sapien
cctttctcctcttctgtgcagcttt

SEQ ID NO: 3009300 - DNA, 25 bp, Homo sapien
tcccgagttcctttctcctcttctg

SEQ ID NO: 3009301 - DNA, 25 bp, Homo sapien
tcctttctcctcttctgtgcagctt

SEQ ID NO: 3009302 - DNA, 25 bp, Homo sapien
tgtatttccgaagcaaagagtctga

SEQ ID NO: 3009303 - DNA, 25 bp, Homo sapien
gagtctgaaattgcttcacgcagaa

SEQ ID NO: 3009304 - DNA, 25 bp, Homo sapien
tagtccgttcgtgagcttcatccaa

SEQ ID NO: 3009305 - DNA, 25 bp, Homo sapien
tctgaggtgacatcatcaaagcgca

SEQ ID NO: 3009306 - DNA, 25 bp, Homo sapien
atatacactggcataatgcttacaa

SEQ ID NO: 3009307 - DNA, 25 bp, Homo sapien
gatccctccttcatacaggtactga

SEQ ID NO: 3009308 - DNA, 25 bp, Homo sapien
agactctagtagcaagagagatggc

SEQ ID NO: 3009309 - DNA, 25 bp, Homo sapien
caatgatgccctggcggctgatccc

SEQ ID NO: 3009310 - DNA, 25 bp, Homo sapien
gagatggcagctactcgacgaggct

SEQ ID NO: 3009311 - DNA, 25 bp, Homo sapien
gactagcagcactcatgggtctcct

SEQ ID NO: 3009312 - DNA, 25 bp, Homo sapien
tcagtatctcctctaacacgttggg

SEQ ID NO: 3009313 - DNA, 25 bp, Homo sapien
tcacatccaagtccagtataaccgg

SEQ ID NO: 3009314 - DNA, 25 bp, Homo sapien
gtataaccggacttgactgctgcat

SEQ ID NO: 3009315 - DNA, 25 bp, Homo sapien
tgccggactcttcttcgaggcccct

SEQ ID NO: 3009316 - DNA, 25 bp, Homo sapien
cggactcttcttcgaggcccctctc

SEQ ID NO: 3009317 - DNA, 25 bp, Homo sapien
actcttcttcgaggcccctctccag

SEQ ID NO: 3009318 - DNA, 25 bp, Homo sapien
ccggactcttcttcgaggcccctct

SEQ ID NO: 3009319 - DNA, 25 bp, Homo sapien
atcaccacttgcctcccgggaggga

SEQ ID NO: 3009320 - DNA, 25 bp, Homo sapien
ccgcgcttggaagatgggcagactc

SEQ ID NO: 3009321 - DNA, 25 bp, Homo sapien
caggtttcggagctgggccaacagt

SEQ ID NO: 3009322 - DNA, 25 bp, Homo sapien
agagcctggccggaatctcttggcc

SEQ ID NO: 3009323 - DNA, 25 bp, Homo sapien
gcgggaggcgcaagcgccgagagct

SEQ ID NO: 3009324 - DNA, 25 bp, Homo sapien
gcgaccaccgatgacctcacggccg

SEQ ID NO: 3009325 - DNA, 25 bp, Homo sapien
tcacggccgccccagtctttagaaa

SEQ ID NO: 3009326 - DNA, 25 bp, Homo sapien
cttcctcgccgccacgtgctggcgg

SEQ ID NO: 3009327 - DNA, 25 bp, Homo sapien
gcttttccgaccaccaaattactgc

SEQ ID NO: 3009328 - DNA, 25 bp, Homo sapien
tgcttttccgaccaccaaattactg

SEQ ID NO: 3009329 - DNA, 25 bp, Homo sapien
gacctgtgcctacatgccgttaatg

SEQ ID NO: 3009330 - DNA, 25 bp, Homo sapien
taatgttaactagccaaagaccctg

SEQ ID NO: 3009331 - DNA, 25 bp, Homo sapien
gatgacaatagttctaggaagccca

SEQ ID NO: 3009332 - DNA, 25 bp, Homo sapien
gaacttgcaccctataaaatcggag

SEQ ID NO: 3009333 - DNA, 25 bp, Homo sapien
gccaagctgtcaaaagtgtccacac

SEQ ID NO: 3009334 - DNA, 25 bp, Homo sapien
cagtaccagtgtagtgaggaaccac

SEQ ID NO: 3009335 - DNA, 25 bp, Homo sapien
aggaaccactggcaaactgttggaa

SEQ ID NO: 3009336 - DNA, 25 bp, Homo sapien
taaaagatcccagtgggtatcaccg

SEQ ID NO: 3009337 - DNA, 25 bp, Homo sapien
taacctccaagccgctggccctcac

SEQ ID NO: 3009338 - DNA, 25 bp, Homo sapien
ttaacctccaagccgctggccctca

SEQ ID NO: 3009339 - DNA, 25 bp, Homo sapien
caggcgaagcctcctggccgttcct

SEQ ID NO: 3009340 - DNA, 25 bp, Homo sapien
ccgttcctcaggtagtggattgtaa

SEQ ID NO: 3009341 - DNA, 25 bp, Homo sapien
agcctcctggccgttcctcaggtag

SEQ ID NO: 3009342 - DNA, 25 bp, Homo sapien
tcctggccgttcctcaggtagtgga

SEQ ID NO: 3009343 - DNA, 25 bp, Homo sapien
taggtgtgcaataagaatagggaac

SEQ ID NO: 3009344 - DNA, 25 bp, Homo sapien
ttacagaatctatgtggtggctaca

SEQ ID NO: 3009345 - DNA, 25 bp, Homo sapien
gaaaaaagctagaatgaaccatgag

SEQ ID NO: 3009346 - DNA, 25 bp, Homo sapien
ggtggctacatgaagctcactccaa

SEQ ID NO: 3009347 - DNA, 25 bp, Homo sapien
gaatagcaacactccaatagcaatg

SEQ ID NO: 3009348 - DNA, 25 bp, Homo sapien
tataattccattgctctgttcactg

SEQ ID NO: 3009349 - DNA, 25 bp, Homo sapien
agaggatctgggaatagcaacactc

SEQ ID NO: 3009350 - DNA, 25 bp, Homo sapien
aacactccaatagcaatgagcacat

SEQ ID NO: 3009351 - DNA, 25 bp, Homo sapien
gacatcatcctacaactattcaact

SEQ ID NO: 3009352 - DNA, 25 bp, Homo sapien
tccattctggaaggcgtttggcaac

SEQ ID NO: 3009353 - DNA, 25 bp, Homo sapien
ccttccttgtttgattaggatgtgg

SEQ ID NO: 3009354 - DNA, 25 bp, Homo sapien
gctagttgaaatgtaaacctgaaca

SEQ ID NO: 3009355 - DNA, 25 bp, Homo sapien
attccaccaggttgattgggaaata

SEQ ID NO: 3009356 - DNA, 25 bp, Homo sapien
aaatatatgtgtccaactgcaatac

SEQ ID NO: 3009357 - DNA, 25 bp, Homo sapien
aaaatatatgtgtccaactgcaata

SEQ ID NO: 3009358 - DNA, 25 bp, Homo sapien
caccaggttgattgggaaatacatc

SEQ ID NO: 3009359 - DNA, 25 bp, Homo sapien
caggtagacctaccaacacaaattg

SEQ ID NO: 3009360 - DNA, 25 bp, Homo sapien
taggatgaatgtcaacataattatt

SEQ ID NO: 3009361 - DNA, 25 bp, Homo sapien
aaaatttagattgcaggtagaccta

SEQ ID NO: 3009362 - DNA, 25 bp, Homo sapien
ccaacacaaattgcctatatttagg

SEQ ID NO: 3009363 - DNA, 25 bp, Homo sapien
cctggaagttgagaaggccgaagaa

SEQ ID NO: 3009364 - DNA, 25 bp, Homo sapien
gggttccttcggctccacacataga

SEQ ID NO: 3009365 - DNA, 25 bp, Homo sapien
cgaagaagttcatgcggacataggg

SEQ ID NO: 3009366 - DNA, 25 bp, Homo sapien
ccaaaaggtccacaatgattgagtt

SEQ ID NO: 3009367 - DNA, 25 bp, Homo sapien
ctaagctcacaaacagaccaaaaag

SEQ ID NO: 3009368 - DNA, 25 bp, Homo sapien
taaagcttgctcacgattagcacct

SEQ ID NO: 3009369 - DNA, 25 bp, Homo sapien
taaagctagctggaacaaaaccatc

SEQ ID NO: 3009370 - DNA, 25 bp, Homo sapien
ttaaaagtgaagtacgccaagcagt

SEQ ID NO: 3009371 - DNA, 25 bp, Homo sapien
caatcaggcaaaaatctgcttaggc

SEQ ID NO: 3009372 - DNA, 25 bp, Homo sapien
ttgacttgctcatcctgtccgactg

SEQ ID NO: 3009373 - DNA, 25 bp, Homo sapien
cctttgacttgctcatcctgtccga

SEQ ID NO: 3009374 - DNA, 25 bp, Homo sapien
aagttcctttgacttgctcatcctg

SEQ ID NO: 3009375 - DNA, 25 bp, Homo sapien
gttaaaagttcctttgacttgctca

SEQ ID NO: 3009376 - DNA, 25 bp, Homo sapien
taggtttggaaacttgtcacagaaa

SEQ ID NO: 3009377 - DNA, 25 bp, Homo sapien
gtttggaaacttgtcacagaaaatg

SEQ ID NO: 3009378 - DNA, 25 bp, Homo sapien
ctaggtttggaaacttgtcacagaa

SEQ ID NO: 3009379 - DNA, 25 bp, Homo sapien
ttggaaacttgtcacagaaaatgtg

SEQ ID NO: 3009380 - DNA, 25 bp, Homo sapien
gatagtgccctgaagctaagatcta

SEQ ID NO: 3009381 - DNA, 25 bp, Homo sapien
tagtgccctgaagctaagatctaga

SEQ ID NO: 3009382 - DNA, 25 bp, Homo sapien
tgccctgaagctaagatctagagaa

SEQ ID NO: 3009383 - DNA, 25 bp, Homo sapien
aatgatagtgccctgaagctaagat

SEQ ID NO: 3009384 - DNA, 25 bp, Homo sapien
tcccgtgttgtttgttgaaggatac

SEQ ID NO: 3009385 - DNA, 25 bp, Homo sapien
gacaagctttaggaagagccagggt

SEQ ID NO: 3009386 - DNA, 25 bp, Homo sapien
cagatgacaagctttaggaagagcc

SEQ ID NO: 3009387 - DNA, 25 bp, Homo sapien
cttcaacattttcccgtgttgtttg

SEQ ID NO: 3009388 - DNA, 25 bp, Homo sapien
acaaagtctgctgtccgacctcgga

SEQ ID NO: 3009389 - DNA, 25 bp, Homo sapien
aaagagccttcttctagcattcgac

SEQ ID NO: 3009390 - DNA, 25 bp, Homo sapien
tctgctgtccgacctcggaaagagc

SEQ ID NO: 3009391 - DNA, 25 bp, Homo sapien
ttcttctagcattcgacagtaacga

SEQ ID NO: 3009392 - DNA, 25 bp, Homo sapien
caattaccattggatcagagctggg

SEQ ID NO: 3009393 - DNA, 25 bp, Homo sapien
cattcaggttgttttacggcttcga

SEQ ID NO: 3009394 - DNA, 25 bp, Homo sapien
agtagttccagcaaccaggacccaa

SEQ ID NO: 3009395 - DNA, 25 bp, Homo sapien
gacccaaggagatctcaggttccca

SEQ ID NO: 3009396 - DNA, 25 bp, Homo sapien
attgaatccaactggcccaaaaaat

SEQ ID NO: 3009397 - DNA, 25 bp, Homo sapien
taaaaaattgaatccaactggccca

SEQ ID NO: 3009398 - DNA, 25 bp, Homo sapien
taattcaggattgaagtacaactga

SEQ ID NO: 3009399 - DNA, 25 bp, Homo sapien
attcaggattgaagtacaactgaaa

SEQ ID NO: 3009400 - DNA, 25 bp, Homo sapien
aattcaggattgaagtacaactgaa

SEQ ID NO: 3009401 - DNA, 25 bp, Homo sapien
ttcaggattgaagtacaactgaaaa

SEQ ID NO: 3009402 - DNA, 25 bp, Homo sapien
ggtctagcaatttccaactctcggt

SEQ ID NO: 3009403 - DNA, 25 bp, Homo sapien
aacaaagaattagtaggtctagcaa

SEQ ID NO: 3009404 - DNA, 25 bp, Homo sapien
gaagaggttggtaaagaattctcta

SEQ ID NO: 3009405 - DNA, 25 bp, Homo sapien
cacttagacgtgatttcctttaagc

SEQ ID NO: 3009406 - DNA, 25 bp, Homo sapien
ctggccattggcagagctctcggac

SEQ ID NO: 3009407 - DNA, 25 bp, Homo sapien
caccgttagggctgggtacctccag

SEQ ID NO: 3009408 - DNA, 25 bp, Homo sapien
tgaaataacggagactggagaccct

SEQ ID NO: 3009409 - DNA, 25 bp, Homo sapien
taggtccggcgctcatctcttagaa

SEQ ID NO: 3009410 - DNA, 25 bp, Homo sapien
ttggcgccaactcgaaccccagagt

SEQ ID NO: 3009411 - DNA, 25 bp, Homo sapien
tctcgcgtcactggataagcattct

SEQ ID NO: 3009412 - DNA, 25 bp, Homo sapien
ttcctgaagacccagtcatatccag

SEQ ID NO: 3009413 - DNA, 25 bp, Homo sapien
gaaccccagagtaatccctgtacgc

SEQ ID NO: 3009414 - DNA, 25 bp, Homo sapien
cggctgaccggtgggatctgcaggt

SEQ ID NO: 3009415 - DNA, 25 bp, Homo sapien
ccagccgcaagctctggtacgccat

SEQ ID NO: 3009416 - DNA, 25 bp, Homo sapien
tccagccgcaagctctggtacgcca

SEQ ID NO: 3009417 - DNA, 25 bp, Homo sapien
gtgtaggcgcggctgaccggtggga

SEQ ID NO: 3009418 - DNA, 25 bp, Homo sapien
cctcatggtcgctccggtaagtgct

SEQ ID NO: 3009419 - DNA, 25 bp, Homo sapien
taattgaggtgtccacaaccagcca

SEQ ID NO: 3009420 - DNA, 25 bp, Homo sapien
cataagcgtcttcgcgagggagcaa

SEQ ID NO: 3009421 - DNA, 25 bp, Homo sapien
aatcaggaacgcgagagtatcccgc

SEQ ID NO: 3009422 - DNA, 25 bp, Homo sapien
tcccctgacaaaaaacctggtgatg

SEQ ID NO: 3009423 - DNA, 25 bp, Homo sapien
gcggaacagccaacatagagtactt

SEQ ID NO: 3009424 - DNA, 25 bp, Homo sapien
tattaaccagtcattacactgcgga

SEQ ID NO: 3009425 - DNA, 25 bp, Homo sapien
gagtacttgctctcgtcctgtgaat

SEQ ID NO: 3009426 - DNA, 25 bp, Homo sapien
taaataatatgcagggttagagcgc

SEQ ID NO: 3009427 - DNA, 25 bp, Homo sapien
ggatcaggtggttttcccgcacgaa

SEQ ID NO: 3009428 - DNA, 25 bp, Homo sapien
gatggccggtgggtaaatatcttgc

SEQ ID NO: 3009429 - DNA, 25 bp, Homo sapien
tcatgagtaaacagagatggccggt

SEQ ID NO: 3009430 - DNA, 25 bp, Homo sapien
agtcccggacacttccaggacgtgg

SEQ ID NO: 3009431 - DNA, 25 bp, Homo sapien
ctcctccgggcagcgacaacaaagt

SEQ ID NO: 3009432 - DNA, 25 bp, Homo sapien
tgcagccacaggtcccgcgagtccc

SEQ ID NO: 3009433 - DNA, 25 bp, Homo sapien
cgggtaccagtctcgactcctccgg

SEQ ID NO: 3009434 - DNA, 25 bp, Homo sapien
cagtcgtggtcagccggagcccctg

SEQ ID NO: 3009435 - DNA, 25 bp, Homo sapien
ctgggggcgcagcacgacaccccga

SEQ ID NO: 3009436 - DNA, 25 bp, Homo sapien
acacagtcgtggtcagccggagccc

SEQ ID NO: 3009437 - DNA, 25 bp, Homo sapien
cacgacaccccgacgaacgccactt

SEQ ID NO: 3009438 - DNA, 25 bp, Homo sapien
agcttcgcctgctgcgcgctcttgt

SEQ ID NO: 3009439 - DNA, 25 bp, Homo sapien
ttgtcctctctcggccgcgccaact

SEQ ID NO: 3009440 - DNA, 25 bp, Homo sapien
gagtcccgccctccagcttcgcctg

SEQ ID NO: 3009441 - DNA, 25 bp, Homo sapien
cgcgccaactctggggcacagctgg

SEQ ID NO: 3009442 - DNA, 25 bp, Homo sapien
aagattgggcgcactctgagctccc

SEQ ID NO: 3009443 - DNA, 25 bp, Homo sapien
accctctctagaaggccgcgggtct

SEQ ID NO: 3009444 - DNA, 25 bp, Homo sapien
atgatgggatccctgcgcgtgcccc

SEQ ID NO: 3009445 - DNA, 25 bp, Homo sapien
ggtctggctcatcccttaaagattc

SEQ ID NO: 3009446 - DNA, 25 bp, Homo sapien
gctcaatcacaccccaaaattctaa

SEQ ID NO: 3009447 - DNA, 25 bp, Homo sapien
taattataaacggggctcaatcaca

SEQ ID NO: 3009448 - DNA, 25 bp, Homo sapien
tctaattataaacggggctcaatca

SEQ ID NO: 3009449 - DNA, 25 bp, Homo sapien
gggctcaatcacaccccaaaattct

SEQ ID NO: 3009450 - DNA, 25 bp, Homo sapien
tgcaggtgcaaacagcacccctatt

SEQ ID NO: 3009451 - DNA, 25 bp, Homo sapien
ccctatttcattgccggcagctact

SEQ ID NO: 3009452 - DNA, 25 bp, Homo sapien
aacagcacccctatttcattgccgg

SEQ ID NO: 3009453 - DNA, 25 bp, Homo sapien
cattgccggcagctactttgtactt

SEQ ID NO: 3009454 - DNA, 25 bp, Homo sapien
ggtgcagcgctgttctaaaacacaa

SEQ ID NO: 3009455 - DNA, 25 bp, Homo sapien
caaagacggaaagaaacaagcatcg

SEQ ID NO: 3009456 - DNA, 25 bp, Homo sapien
ctgatagacaaagatagtgacaaca

SEQ ID NO: 3009457 - DNA, 25 bp, Homo sapien
caagcatcgaaagctacatgaaggg

SEQ ID NO: 3009458 - DNA, 25 bp, Homo sapien
tagcagccctcgtccagtggaggcg

SEQ ID NO: 3009459 - DNA, 25 bp, Homo sapien
ggagaaggcgatggctgcgtagatg

SEQ ID NO: 3009460 - DNA, 25 bp, Homo sapien
aatggtcgagatagcagccctcgtc

SEQ ID NO: 3009461 - DNA, 25 bp, Homo sapien
tggagaggtgcggaaaatggtcgag

SEQ ID NO: 3009462 - DNA, 25 bp, Homo sapien
ccccctgcgccctcccgcccgcgcg

SEQ ID NO: 3009463 - DNA, 25 bp, Homo sapien
tgcgccctcccgcccgcgcgccgac

SEQ ID NO: 3009464 - DNA, 25 bp, Homo sapien
gggctgcccggcgcggcccccctgc

SEQ ID NO: 3009465 - DNA, 25 bp, Homo sapien
gctgcccggcgcggcccccctgcgc

SEQ ID NO: 3009466 - DNA, 25 bp, Homo sapien
tccgggggaggcttgtcaaacaggc

SEQ ID NO: 3009467 - DNA, 25 bp, Homo sapien
gaggcttgtcaaacaggccttcgga

SEQ ID NO: 3009468 - DNA, 25 bp, Homo sapien
ggggaggcttgtcaaacaggccttc

SEQ ID NO: 3009469 - DNA, 25 bp, Homo sapien
ttgcccgcggccgacgccgacctgg

SEQ ID NO: 3009470 - DNA, 25 bp, Homo sapien
aatctgctcgagaccccagggtctg

SEQ ID NO: 3009471 - DNA, 25 bp, Homo sapien
agaccccagggtctgcgccgaaaga

SEQ ID NO: 3009472 - DNA, 25 bp, Homo sapien
tgcgccgaaagagcccgtcagccat

SEQ ID NO: 3009473 - DNA, 25 bp, Homo sapien
ggtccgggcgaatctgctcgagacc

SEQ ID NO: 3009474 - DNA, 25 bp, Homo sapien
cggtgggcggggctacggctgtatt

SEQ ID NO: 3009475 - DNA, 25 bp, Homo sapien
tcagagcgcagtgggcggtgggcgg

SEQ ID NO: 3009476 - DNA, 25 bp, Homo sapien
gtgggtcagccgggtctgggtcaga

SEQ ID NO: 3009477 - DNA, 25 bp, Homo sapien
gcaggatcgcgggtaggtgggtcag

SEQ ID NO: 3009478 - DNA, 25 bp, Homo sapien
agggtccgccggtcctctcagctga

SEQ ID NO: 3009479 - DNA, 25 bp, Homo sapien
ccatggcaaccagactggcggcgca

SEQ ID NO: 3009480 - DNA, 25 bp, Homo sapien
tgcagaggctggctcgccgggttcc

SEQ ID NO: 3009481 - DNA, 25 bp, Homo sapien
gcagtctctgcgcagcaaggtttgt

SEQ ID NO: 3009482 - DNA, 25 bp, Homo sapien
cccggggcactagtaggcttggcac

SEQ ID NO: 3009483 - DNA, 25 bp, Homo sapien
aaacgcgagccgctggctgggaccc

SEQ ID NO: 3009484 - DNA, 25 bp, Homo sapien
ccccggggcactagtaggcttggca

SEQ ID NO: 3009485 - DNA, 25 bp, Homo sapien
agggggaggaaacgcgagccgctgg

SEQ ID NO: 3009486 - DNA, 25 bp, Homo sapien
tctcagctgcgtggggagcttcccc

SEQ ID NO: 3009487 - DNA, 25 bp, Homo sapien
ctctcagctgcgtggggagcttccc

SEQ ID NO: 3009488 - DNA, 25 bp, Homo sapien
ctaagaagccgaaatgcaaccagcc

SEQ ID NO: 3009489 - DNA, 25 bp, Homo sapien
cagccttttgagcatctcgcatatg

SEQ ID NO: 3009490 - DNA, 25 bp, Homo sapien
cagtagtaaaataaagcctcccaca

SEQ ID NO: 3009491 - DNA, 25 bp, Homo sapien
tcttaatgcgtgaaaaagctaacac

SEQ ID NO: 3009492 - DNA, 25 bp, Homo sapien
ttcacccacaaaagcaggcatccag

SEQ ID NO: 3009493 - DNA, 25 bp, Homo sapien
ttcattggtactgccgcaggctgct

SEQ ID NO: 3009494 - DNA, 25 bp, Homo sapien
gcggtctactcaggcctccttgtca

SEQ ID NO: 3009495 - DNA, 25 bp, Homo sapien
ctgcggtctactcaggcctccttgt

SEQ ID NO: 3009496 - DNA, 25 bp, Homo sapien
ctctctggcttcattggtactgccg

SEQ ID NO: 3009497 - DNA, 25 bp, Homo sapien
ctagtatctcctggcgtctctgttg

SEQ ID NO: 3009498 - DNA, 25 bp, Homo sapien
ctgaggttccacggctggctggtgt

SEQ ID NO: 3009499 - DNA, 25 bp, Homo sapien
ttccacggctggctggtgttccttc

SEQ ID NO: 3009500 - DNA, 25 bp, Homo sapien
ggttccacggctggctggtgttcct

SEQ ID NO: 3009501 - DNA, 25 bp, Homo sapien
gaggttccacggctggctggtgttc

SEQ ID NO: 3009502 - DNA, 25 bp, Homo sapien
gatgctgaaacgctgtaaccagggt

SEQ ID NO: 3009503 - DNA, 25 bp, Homo sapien
gaaaaacctcatgagtccagggcct

SEQ ID NO: 3009504 - DNA, 25 bp, Homo sapien
gctaaatccggagctcagacagcag

SEQ ID NO: 3009505 - DNA, 25 bp, Homo sapien
tcagtaaccaagagggtctcgggca

SEQ ID NO: 3009506 - DNA, 25 bp, Homo sapien
ctagggggatcttttctccggtgct

SEQ ID NO: 3009507 - DNA, 25 bp, Homo sapien
cggtgctatactttgataggtttcc

SEQ ID NO: 3009508 - DNA, 25 bp, Homo sapien
gggatcttttctccggtgctatact

SEQ ID NO: 3009509 - DNA, 25 bp, Homo sapien
tctccggtgctatactttgataggt

SEQ ID NO: 3009510 - DNA, 25 bp, Homo sapien
taatttatatgcgtgccctggctgg

SEQ ID NO: 3009511 - DNA, 25 bp, Homo sapien
ggatgtgcctggataagcctagtca

SEQ ID NO: 3009512 - DNA, 25 bp, Homo sapien
gaagctaagaacctgtctgggcgct

SEQ ID NO: 3009513 - DNA, 25 bp, Homo sapien
ggcttgctcaccatcaaagactgtg

SEQ ID NO: 3009514 - DNA, 25 bp, Homo sapien
ctacatatgatcttcctcagagaga

SEQ ID NO: 3009515 - DNA, 25 bp, Homo sapien
acacagacctctgctctctacatat

SEQ ID NO: 3009516 - DNA, 25 bp, Homo sapien
tcatcctcttccccgttttctttca

SEQ ID NO: 3009517 - DNA, 25 bp, Homo sapien
cagacctctgctctctacatatgat

SEQ ID NO: 3009518 - DNA, 25 bp, Homo sapien
gagccatgaagttggcaaccactac

SEQ ID NO: 3009519 - DNA, 25 bp, Homo sapien
ttctgcaaaaggacattcgccaaga

SEQ ID NO: 3009520 - DNA, 25 bp, Homo sapien
cggcagggcaatccgcaattccacg

SEQ ID NO: 3009521 - DNA, 25 bp, Homo sapien
ccaactgtggccattcgatctgaat

SEQ ID NO: 3009522 - DNA, 25 bp, Homo sapien
atcttcttacttcccattgactgtc

SEQ ID NO: 3009523 - DNA, 25 bp, Homo sapien
ttaaatcttcttacttcccattgac

SEQ ID NO: 3009524 - DNA, 25 bp, Homo sapien
aaatcttcttacttcccattgactg

SEQ ID NO: 3009525 - DNA, 25 bp, Homo sapien
tgcatttttctttgccccttgtctt

SEQ ID NO: 3009526 - DNA, 25 bp, Homo sapien
gaggaagggttgtgtggagagtgga

SEQ ID NO: 3009527 - DNA, 25 bp, Homo sapien
ttggaggaagggttgtgtggagagt

SEQ ID NO: 3009528 - DNA, 25 bp, Homo sapien
tggaggaagggttgtgtggagagtg

SEQ ID NO: 3009529 - DNA, 25 bp, Homo sapien
ggaagggttgtgtggagagtggagg

SEQ ID NO: 3009530 - DNA, 25 bp, Homo sapien
ctgtgtcacccccagcttagagatc

SEQ ID NO: 3009531 - DNA, 25 bp, Homo sapien
gtgtcacccccagcttagagatctg

SEQ ID NO: 3009532 - DNA, 25 bp, Homo sapien
tgtgtcacccccagcttagagatct

SEQ ID NO: 3009533 - DNA, 25 bp, Homo sapien
gatggagtccctataagtcattcga

SEQ ID NO: 3009534 - DNA, 25 bp, Homo sapien
tcatcaggtgttcggacggttcaag

SEQ ID NO: 3009535 - DNA, 25 bp, Homo sapien
aaaataattagtccagtgttccagc

SEQ ID NO: 3009536 - DNA, 25 bp, Homo sapien
gtcttccaggctacaacagtttcag

SEQ ID NO: 3009537 - DNA, 25 bp, Homo sapien
aaactggaaagcctgctagacaaat

SEQ ID NO: 3009538 - DNA, 25 bp, Homo sapien
taaaaactggaaagcctgctagaca

SEQ ID NO: 3009539 - DNA, 25 bp, Homo sapien
ttctggtaaaaactggaaagcctgc

SEQ ID NO: 3009540 - DNA, 25 bp, Homo sapien
tctggtaaaaactggaaagcctgct

SEQ ID NO: 3009541 - DNA, 25 bp, Homo sapien
tactttagtgctggaaggcaaacca

SEQ ID NO: 3009542 - DNA, 25 bp, Homo sapien
aaagccaggactcaagggtcaaggg

SEQ ID NO: 3009543 - DNA, 25 bp, Homo sapien
tggacacataatgcccagcaaaggc

SEQ ID NO: 3009544 - DNA, 25 bp, Homo sapien
tgtacaaagccaagaatccacgtgg

SEQ ID NO: 3009545 - DNA, 25 bp, Homo sapien
ggcttggtagagtccatctttgcac

SEQ ID NO: 3009546 - DNA, 25 bp, Homo sapien
gggcttggtagagtccatctttgca

SEQ ID NO: 3009547 - DNA, 25 bp, Homo sapien
agggcttggtagagtccatctttgc

SEQ ID NO: 3009548 - DNA, 25 bp, Homo sapien
tcccaggactggctcaagctgaaca

SEQ ID NO: 3009549 - DNA, 25 bp, Homo sapien
gaacagcttccgcatctggctgggc

SEQ ID NO: 3009550 - DNA, 25 bp, Homo sapien
tgggcctcgtgttctcagccagcac

SEQ ID NO: 3009551 - DNA, 25 bp, Homo sapien
ttccggtcccaggactggctcaagc

SEQ ID NO: 3009552 - DNA, 25 bp, Homo sapien
agacaacctccaccgatgtcactcg

SEQ ID NO: 3009553 - DNA, 25 bp, Homo sapien
tccaccgatgtcactcgggctatca

SEQ ID NO: 3009554 - DNA, 25 bp, Homo sapien
tgtcactcgggctatcagctgctct

SEQ ID NO: 3009555 - DNA, 25 bp, Homo sapien
ctcgggctatcagctgctctcgata

SEQ ID NO: 3009556 - DNA, 25 bp, Homo sapien
tgcggggcatccagaggtgaaggta

SEQ ID NO: 3009557 - DNA, 25 bp, Homo sapien
cggggcatccagaggtgaaggtacg

SEQ ID NO: 3009558 - DNA, 25 bp, Homo sapien
ggggcatccagaggtgaaggtacgg

SEQ ID NO: 3009559 - DNA, 25 bp, Homo sapien
ctgcggggcatccagaggtgaaggt

SEQ ID NO: 3009560 - DNA, 25 bp, Homo sapien
ggatcagagtagttgcaggcatgag

SEQ ID NO: 3009561 - DNA, 25 bp, Homo sapien
atcagagtagttgcaggcatgagat

SEQ ID NO: 3009562 - DNA, 25 bp, Homo sapien
gatcagagtagttgcaggcatgaga

SEQ ID NO: 3009563 - DNA, 25 bp, Homo sapien
tgagttctctggaattgtcctggat

SEQ ID NO: 3009564 - DNA, 25 bp, Homo sapien
agttctctggaattgtcctggattt

SEQ ID NO: 3009565 - DNA, 25 bp, Homo sapien
ctctgagttctctggaattgtcctg

SEQ ID NO: 3009566 - DNA, 25 bp, Homo sapien
ttctctggaattgtcctggatttac

SEQ ID NO: 3009567 - DNA, 25 bp, Homo sapien
gtggccaacgtagaactccgagaac

SEQ ID NO: 3009568 - DNA, 25 bp, Homo sapien
tagaactccgagaacagctggtctt

SEQ ID NO: 3009569 - DNA, 25 bp, Homo sapien
caacgtagaactccgagaacagctg

SEQ ID NO: 3009570 - DNA, 25 bp, Homo sapien
cgtagaactccgagaacagctggtc

SEQ ID NO: 3009571 - DNA, 25 bp, Homo sapien
tgcaggctccaaactcggaatcatg

SEQ ID NO: 3009572 - DNA, 25 bp, Homo sapien
tacacaggcaatccagcaggtcctg

SEQ ID NO: 3009573 - DNA, 25 bp, Homo sapien
ggcttgtccttaaacgtagtgctca

SEQ ID NO: 3009574 - DNA, 25 bp, Homo sapien
gacactctgatgatccctgtactga

SEQ ID NO: 3009575 - DNA, 25 bp, Homo sapien
cacactggagtgcagggggggtgat

SEQ ID NO: 3009576 - DNA, 25 bp, Homo sapien
tacaggtgcctctcaccatgcccca

SEQ ID NO: 3009577 - DNA, 25 bp, Homo sapien
caggtgcctctcaccatgccccact

SEQ ID NO: 3009578 - DNA, 25 bp, Homo sapien
tgcgcctggcccataatggcctttt

SEQ ID NO: 3009579 - DNA, 25 bp, Homo sapien
atctgcccacctcggtacccaaaat

SEQ ID NO: 3009580 - DNA, 25 bp, Homo sapien
ctgcccacctcggtacccaaaatgc

SEQ ID NO: 3009581 - DNA, 25 bp, Homo sapien
gtgatctgcccacctcggtacccaa

SEQ ID NO: 3009582 - DNA, 25 bp, Homo sapien
tgatctgcccacctcggtacccaaa

SEQ ID NO: 3009583 - DNA, 25 bp, Homo sapien
cacagtgtaacgacagcccatataa

SEQ ID NO: 3009584 - DNA, 25 bp, Homo sapien
atttccagcatccctgaaccagacc

SEQ ID NO: 3009585 - DNA, 25 bp, Homo sapien
acccagacacagtgtaacgacagcc

SEQ ID NO: 3009586 - DNA, 25 bp, Homo sapien
gtaacgacagcccatataaagtggg

SEQ ID NO: 3009587 - DNA, 25 bp, Homo sapien
cgtcaacccaccgtggcccagcctt

SEQ ID NO: 3009588 - DNA, 25 bp, Homo sapien
caccgtggcccagcctttctggctc

SEQ ID NO: 3009589 - DNA, 25 bp, Homo sapien
cagcctttctggctcttagtgtcac

SEQ ID NO: 3009590 - DNA, 25 bp, Homo sapien
gcccagcctttctggctcttagtgt

SEQ ID NO: 3009591 - DNA, 25 bp, Homo sapien
taaagtgggccatttggaacaggga

SEQ ID NO: 3009592 - DNA, 25 bp, Homo sapien
tcctcaggatggacgcggtggtaaa

SEQ ID NO: 3009593 - DNA, 25 bp, Homo sapien
ttttccagaactatgtgatgcagct

SEQ ID NO: 3009594 - DNA, 25 bp, Homo sapien
gagcagtcacttgggatcaggtaga

SEQ ID NO: 3009595 - DNA, 25 bp, Homo sapien
gccccccactcaggatgctactact

SEQ ID NO: 3009596 - DNA, 25 bp, Homo sapien
tcttctttttaggaagagcctcctc

SEQ ID NO: 3009597 - DNA, 25 bp, Homo sapien
cttggcaggaggcaagccaagcccc

SEQ ID NO: 3009598 - DNA, 25 bp, Homo sapien
tccagcactgtgtgggtcttggcag

SEQ ID NO: 3009599 - DNA, 25 bp, Homo sapien
tatgatccctgctagtggatgcacc

SEQ ID NO: 3009600 - DNA, 25 bp, Homo sapien
cgcgcctggccacagtataactatt

SEQ ID NO: 3009601 - DNA, 25 bp, Homo sapien
tataactattcttagcatgggacgc

SEQ ID NO: 3009602 - DNA, 25 bp, Homo sapien
taacttgctgcaaggatgtcagacc

SEQ ID NO: 3009603 - DNA, 25 bp, Homo sapien
gaattcaatctcaacggtcaccgct

SEQ ID NO: 3009604 - DNA, 25 bp, Homo sapien
caccgcttctctcatcacaaagcag

SEQ ID NO: 3009605 - DNA, 25 bp, Homo sapien
cttggagagccacaaagtgagggag

SEQ ID NO: 3009606 - DNA, 25 bp, Homo sapien
aagtgagggaggtgcacagcttcca

SEQ ID NO: 3009607 - DNA, 25 bp, Homo sapien
aagtgacttaatgcatgctcacagc

SEQ ID NO: 3009608 - DNA, 25 bp, Homo sapien
cctagttacgagaataagtgactta

SEQ ID NO: 3009609 - DNA, 25 bp, Homo sapien
cacagcttagtacacgcctgggagc

SEQ ID NO: 3009610 - DNA, 25 bp, Homo sapien
gcctgggagctgtgaactgtttcta

SEQ ID NO: 3009611 - DNA, 25 bp, Homo sapien
tacaagttcttttctttgtcaacta

SEQ ID NO: 3009612 - DNA, 25 bp, Homo sapien
tcgtcagtccccaaaggcttcgtat

SEQ ID NO: 3009613 - DNA, 25 bp, Homo sapien
agaagtcatcgtcagtccccaaagg

SEQ ID NO: 3009614 - DNA, 25 bp, Homo sapien
cccaaaggcttcgtatgcaggtccc

SEQ ID NO: 3009615 - DNA, 25 bp, Homo sapien
gggccccagaagtcatcgtcagtcc

SEQ ID NO: 3009616 - DNA, 25 bp, Homo sapien
cacaagagttccaccggtactacct

SEQ ID NO: 3009617 - DNA, 25 bp, Homo sapien
cgcacaagagttccaccggtactac

SEQ ID NO: 3009618 - DNA, 25 bp, Homo sapien
agagttccaccggtactacctctgg

SEQ ID NO: 3009619 - DNA, 25 bp, Homo sapien
ggcacgcacaagagttccaccggta

SEQ ID NO: 3009620 - DNA, 25 bp, Homo sapien
ggaagatcttgctcacgtccaggag

SEQ ID NO: 3009621 - DNA, 25 bp, Homo sapien
aagatcttgctcacgtccaggagtt

SEQ ID NO: 3009622 - DNA, 25 bp, Homo sapien
tcttgctcacgtccaggagtttgag

SEQ ID NO: 3009623 - DNA, 25 bp, Homo sapien
gatcttgctcacgtccaggagtttg

SEQ ID NO: 3009624 - DNA, 25 bp, Homo sapien
tcggagagagggtaacggaaatcca

SEQ ID NO: 3009625 - DNA, 25 bp, Homo sapien
cccggttcagggtttgatacatgcc

SEQ ID NO: 3009626 - DNA, 25 bp, Homo sapien
gccaagaatggaagaggccggaccc

SEQ ID NO: 3009627 - DNA, 25 bp, Homo sapien
gatacatgccatagacgttctggag

SEQ ID NO: 3009628 - DNA, 25 bp, Homo sapien
tcagtaggggtcatcacacttggtt

SEQ ID NO: 3009629 - DNA, 25 bp, Homo sapien
attactcatctctcccgtatccagg

SEQ ID NO: 3009630 - DNA, 25 bp, Homo sapien
tgatccgagtctctgccgcttgagt

SEQ ID NO: 3009631 - DNA, 25 bp, Homo sapien
tgagtgaggatgtgctattactcat

SEQ ID NO: 3009632 - DNA, 25 bp, Homo sapien
ccaggctagagctggggtgtcatcc

SEQ ID NO: 3009633 - DNA, 25 bp, Homo sapien
agagctgatcaccttgacaacacct

SEQ ID NO: 3009634 - DNA, 25 bp, Homo sapien
tccgaatttgaactcaatcctgtgg

SEQ ID NO: 3009635 - DNA, 25 bp, Homo sapien
cttcctcgcccaccctaagagctga

SEQ ID NO: 3009636 - DNA, 25 bp, Homo sapien
tgtggtgtctgggtttctccctggc

SEQ ID NO: 3009637 - DNA, 25 bp, Homo sapien
gattctacttgcactgacaagtgca

SEQ ID NO: 3009638 - DNA, 25 bp, Homo sapien
tgacaagtgcacctcactctggctg

SEQ ID NO: 3009639 - DNA, 25 bp, Homo sapien
tctaacgttaagagttgaagcaagg

SEQ ID NO: 3009640 - DNA, 25 bp, Homo sapien
ctgctgaagatgagcagctgaggtt

SEQ ID NO: 3009641 - DNA, 25 bp, Homo sapien
agatgagcagctgaggtttctcctg

SEQ ID NO: 3009642 - DNA, 25 bp, Homo sapien
agggccctcagttcctgcctcatct

SEQ ID NO: 3009643 - DNA, 25 bp, Homo sapien
ctcagttcctgcctcatctcatcac

SEQ ID NO: 3009644 - DNA, 25 bp, Homo sapien
caaggaggcggtgaaaagaccctgt

SEQ ID NO: 3009645 - DNA, 25 bp, Homo sapien
cagcataagggaggtagtgatagcc

SEQ ID NO: 3009646 - DNA, 25 bp, Homo sapien
tggaaacctactcgggactctagag

SEQ ID NO: 3009647 - DNA, 25 bp, Homo sapien
cagtgtcagctacaggagaacccaa

SEQ ID NO: 3009648 - DNA, 25 bp, Homo sapien
tcacagagcagtcgcacgccaacgt

SEQ ID NO: 3009649 - DNA, 25 bp, Homo sapien
cccaggcgtatgagtttgcaggcag

SEQ ID NO: 3009650 - DNA, 25 bp, Homo sapien
tctgctgcaggtctagctccttcag

SEQ ID NO: 3009651 - DNA, 25 bp, Homo sapien
gtcgcacgccaacgtcatccaggtt

SEQ ID NO: 3009652 - DNA, 25 bp, Homo sapien
gcaggaaagatacacgccagcccag

SEQ ID NO: 3009653 - DNA, 25 bp, Homo sapien
aggaaagatacacgccagcccaggt

SEQ ID NO: 3009654 - DNA, 25 bp, Homo sapien
aaagatacacgccagcccaggtcat

SEQ ID NO: 3009655 - DNA, 25 bp, Homo sapien
ctgcaggaaagatacacgccagccc

SEQ ID NO: 3009656 - DNA, 25 bp, Homo sapien
caaacactggagacaatctggctgc

SEQ ID NO: 3009657 - DNA, 25 bp, Homo sapien
tctggctgctcataataggcgatgg

SEQ ID NO: 3009658 - DNA, 25 bp, Homo sapien
tagcaacatatcgttttcccagcag

SEQ ID NO: 3009659 - DNA, 25 bp, Homo sapien
ccatttttcggaagttaagctacag

SEQ ID NO: 3009660 - DNA, 25 bp, Homo sapien
taagaggacctgttactaggcagat

SEQ ID NO: 3009661 - DNA, 25 bp, Homo sapien
tcccctcggatgagatagtaaatcg

SEQ ID NO: 3009662 - DNA, 25 bp, Homo sapien
cagatcacagctcgtgggaacagga

SEQ ID NO: 3009663 - DNA, 25 bp, Homo sapien
taaatcgaactaagtggacaccagt

SEQ ID NO: 3009664 - DNA, 25 bp, Homo sapien
tccagctcggtcagggtctggttgg

SEQ ID NO: 3009665 - DNA, 25 bp, Homo sapien
gtctggttggctctcagcccaaagg

SEQ ID NO: 3009666 - DNA, 25 bp, Homo sapien
cgtgagcacattgaagctcaggtcc

SEQ ID NO: 3009667 - DNA, 25 bp, Homo sapien
catccgtgagcacattgaagctcag

SEQ ID NO: 3009668 - DNA, 25 bp, Homo sapien
gcatctgtgactgggacccacctga

SEQ ID NO: 3009669 - DNA, 25 bp, Homo sapien
ccttgaggacggagaagagaatctg

SEQ ID NO: 3009670 - DNA, 25 bp, Homo sapien
ggcgtctcagggtcttacaaagact

SEQ ID NO: 3009671 - DNA, 25 bp, Homo sapien
cagcgagtttccacttaggtccagc

SEQ ID NO: 3009672 - DNA, 25 bp, Homo sapien
taacaggcccaataggaaacgtgtg

SEQ ID NO: 3009673 - DNA, 25 bp, Homo sapien
gaaatgggccatcacttgtgtcagg

SEQ ID NO: 3009674 - DNA, 25 bp, Homo sapien
tcacgtggcggctgaatttaatgca

SEQ ID NO: 3009675 - DNA, 25 bp, Homo sapien
tcgtacaagcagtggagggactcca

SEQ ID NO: 3009676 - DNA, 25 bp, Homo sapien
ttcatctgtgaaatatctgtagaaa

SEQ ID NO: 3009677 - DNA, 25 bp, Homo sapien
taaaggctctaattgcttgcctttc

SEQ ID NO: 3009678 - DNA, 25 bp, Homo sapien
taattgcttgcctttcatctgtgaa

SEQ ID NO: 3009679 - DNA, 25 bp, Homo sapien
tcctgctggactcagagaaccccag

SEQ ID NO: 3009680 - DNA, 25 bp, Homo sapien
ggctcatctacaccatcgaggatga

SEQ ID NO: 3009681 - DNA, 25 bp, Homo sapien
ctggctccagtgcagacagagctca

SEQ ID NO: 3009682 - DNA, 25 bp, Homo sapien
gagctcagaactcggctcctgcaag

SEQ ID NO: 3009683 - DNA, 25 bp, Homo sapien
gatgcctcgggaagtatagttttcc

SEQ ID NO: 3009684 - DNA, 25 bp, Homo sapien
gctcagcgagactcaccaccttgga

SEQ ID NO: 3009685 - DNA, 25 bp, Homo sapien
tgtcccatcttttccgatgagctca

SEQ ID NO: 3009686 - DNA, 25 bp, Homo sapien
gaagacatgctggaagcggtcccca

SEQ ID NO: 3009687 - DNA, 25 bp, Homo sapien
gctggaagcggtccccatacagctg

SEQ ID NO: 3009688 - DNA, 25 bp, Homo sapien
ctgatctcaattaaatgtcctcgat

SEQ ID NO: 3009689 - DNA, 25 bp, Homo sapien
aggcctgggccaaataagtctctga

SEQ ID NO: 3009690 - DNA, 25 bp, Homo sapien
tctcaattaaatgtcctcgattctc

SEQ ID NO: 3009691 - DNA, 25 bp, Homo sapien
taaatgtcctcgattctcctccaca

SEQ ID NO: 3009692 - DNA, 25 bp, Homo sapien
tctctcacagaaggctcccatgggt

SEQ ID NO: 3009693 - DNA, 25 bp, Homo sapien
tggggctgtaggctggtgtgcgcct

SEQ ID NO: 3009694 - DNA, 25 bp, Homo sapien
tggtggggctgtaggctggtgtgcg

SEQ ID NO: 3009695 - DNA, 25 bp, Homo sapien
gcgttcctaccaccgctgcccatgg

SEQ ID NO: 3009696 - DNA, 25 bp, Homo sapien
tgaaacatgaagaaccacgcagcag

SEQ ID NO: 3009697 - DNA, 25 bp, Homo sapien
taagcactgcctactggatggcggc

SEQ ID NO: 3009698 - DNA, 25 bp, Homo sapien
cttctagagttagagcaggcagctc

SEQ ID NO: 3009699 - DNA, 25 bp, Homo sapien
gaagggtcttgtctaaggcccagga

SEQ ID NO: 3009700 - DNA, 25 bp, Homo sapien
accagggcctgtcgtggggttggag

SEQ ID NO: 3009701 - DNA, 25 bp, Homo sapien
cgcagggacaaacaaccaaacaccg

SEQ ID NO: 3009702 - DNA, 25 bp, Homo sapien
caccagggcctgtcgtggggttgga

SEQ ID NO: 3009703 - DNA, 25 bp, Homo sapien
agggcctgtcgtggggttggaggag

SEQ ID NO: 3009704 - DNA, 25 bp, Homo sapien
gatgtgggggcgttgggtgactcct

SEQ ID NO: 3009705 - DNA, 25 bp, Homo sapien
tcatccagaggccattgggtcccag

SEQ ID NO: 3009706 - DNA, 25 bp, Homo sapien
gacgtttcatccagaggccattggg

SEQ ID NO: 3009707 - DNA, 25 bp, Homo sapien
ttcctgacgtttcatccagaggcca

SEQ ID NO: 3009708 - DNA, 25 bp, Homo sapien
cccgccggcaattcatggatccagg

SEQ ID NO: 3009709 - DNA, 25 bp, Homo sapien
tgtcaggcagctgtctcaaaaccct

SEQ ID NO: 3009710 - DNA, 25 bp, Homo sapien
tccagggcattagcactgcggtgga

SEQ ID NO: 3009711 - DNA, 25 bp, Homo sapien
tccagcggcgtccagatgtgtcagg

SEQ ID NO: 3009712 - DNA, 25 bp, Homo sapien
ccatactgagccaccaggtacgagg

SEQ ID NO: 3009713 - DNA, 25 bp, Homo sapien
cctggagtgcgctttattggcgagc

SEQ ID NO: 3009714 - DNA, 25 bp, Homo sapien
tctcacccgaagagctcctggagtg

SEQ ID NO: 3009715 - DNA, 25 bp, Homo sapien
tcccaggtatggagggctaggtccc

SEQ ID NO: 3009716 - DNA, 25 bp, Homo sapien
taaatcccagggcacctacagatag

SEQ ID NO: 3009717 - DNA, 25 bp, Homo sapien
ctgtcccggagttaagagggtgtct

SEQ ID NO: 3009718 - DNA, 25 bp, Homo sapien
cagcattcggaacccagttttataa

SEQ ID NO: 3009719 - DNA, 25 bp, Homo sapien
ggcaggcagagaacagtgctgtcct

SEQ ID NO: 3009720 - DNA, 25 bp, Homo sapien
agaagtcagctgatagggaggtcct

SEQ ID NO: 3009721 - DNA, 25 bp, Homo sapien
aagtcagctgatagggaggtcctgg

SEQ ID NO: 3009722 - DNA, 25 bp, Homo sapien
tcagctgatagggaggtcctgggat

SEQ ID NO: 3009723 - DNA, 25 bp, Homo sapien
gaagaagtcagctgatagggaggtc

SEQ ID NO: 3009724 - DNA, 25 bp, Homo sapien
gagatcaacccttgagctgcaaggc

SEQ ID NO: 3009725 - DNA, 25 bp, Homo sapien
agggaatgggctttcagaacccaga

SEQ ID NO: 3009726 - DNA, 25 bp, Homo sapien
ctgagatcaacccttgagctgcaag

SEQ ID NO: 3009727 - DNA, 25 bp, Homo sapien
gcagggaatgggctttcagaaccca

SEQ ID NO: 3009728 - DNA, 25 bp, Homo sapien
tattaacttaatgagtttggctgct

SEQ ID NO: 3009729 - DNA, 25 bp, Homo sapien
tttttcgggaatgtatgtgaaggag

SEQ ID NO: 3009730 - DNA, 25 bp, Homo sapien
gtgaaggaggcatctctatacagct

SEQ ID NO: 3009731 - DNA, 25 bp, Homo sapien
ctgctgagttgtgagagtgagggtt

SEQ ID NO: 3009732 - DNA, 25 bp, Homo sapien
tgaaacccactctaggtaacaggga

SEQ ID NO: 3009733 - DNA, 25 bp, Homo sapien
ttgagggtcccacacaatttagaag

SEQ ID NO: 3009734 - DNA, 25 bp, Homo sapien
atgaaaagtgtgtcgctggacgcca

SEQ ID NO: 3009735 - DNA, 25 bp, Homo sapien
cctgatgacgctcgccatgatggca

SEQ ID NO: 3009736 - DNA, 25 bp, Homo sapien
cagcaattccaataggtttgaactt

SEQ ID NO: 3009737 - DNA, 25 bp, Homo sapien
tgaacttaacaatggcagagggcaa

SEQ ID NO: 3009738 - DNA, 25 bp, Homo sapien
gaagctgccagaggactcaatctcc

SEQ ID NO: 3009739 - DNA, 25 bp, Homo sapien
ggcaacattggcatatttgctgaga

SEQ ID NO: 3009740 - DNA, 25 bp, Homo sapien
tcttcttcacccttgattcccattc

SEQ ID NO: 3009741 - DNA, 25 bp, Homo sapien
agaatgaacatccttcttcttcacc

SEQ ID NO: 3009742 - DNA, 25 bp, Homo sapien
ttcttcacccttgattcccattcat

SEQ ID NO: 3009743 - DNA, 25 bp, Homo sapien
cttcttcttcacccttgattcccat

SEQ ID NO: 3009744 - DNA, 25 bp, Homo sapien
tcctgggaacctcctgtttgtgctg

SEQ ID NO: 3009745 - DNA, 25 bp, Homo sapien
cagggggatgtattccccgtcctgg

SEQ ID NO: 3009746 - DNA, 25 bp, Homo sapien
agccagacattcagtgcacgccagg

SEQ ID NO: 3009747 - DNA, 25 bp, Homo sapien
acgcctgcaggggtctgatttccag

SEQ ID NO: 3009748 - DNA, 25 bp, Homo sapien
cagggaccaggcttctctatgtgga

SEQ ID NO: 3009749 - DNA, 25 bp, Homo sapien
ggcctggcccatcaatagccctgaa

SEQ ID NO: 3009750 - DNA, 25 bp, Homo sapien
aaggactcatctttcattacttcag

SEQ ID NO: 3009751 - DNA, 25 bp, Homo sapien
tcaatagccctgaaaatatgatcat

SEQ ID NO: 3009752 - DNA, 25 bp, Homo sapien
ttgcttgacccgctcagatgtgaca

SEQ ID NO: 3009753 - DNA, 25 bp, Homo sapien
tcactgcgttggttggttgctgtca

SEQ ID NO: 3009754 - DNA, 25 bp, Homo sapien
caccttttgcttgacccgctcagat

SEQ ID NO: 3009755 - DNA, 25 bp, Homo sapien
tgacccgctcagatgtgacagacag

SEQ ID NO: 3009756 - DNA, 25 bp, Homo sapien
ttctacgagtggctcgacccaggtc

SEQ ID NO: 3009757 - DNA, 25 bp, Homo sapien
gaaattctacgagtggctcgaccca

SEQ ID NO: 3009758 - DNA, 25 bp, Homo sapien
catcggaaattctacgagtggctcg

SEQ ID NO: 3009759 - DNA, 25 bp, Homo sapien
cgagtggctcgacccaggtcaggct

SEQ ID NO: 3009760 - DNA, 25 bp, Homo sapien
ctgtgggggacaaatggatgctgag

SEQ ID NO: 3009761 - DNA, 25 bp, Homo sapien
gggacaaatggatgctgagctcgct

SEQ ID NO: 3009762 - DNA, 25 bp, Homo sapien
acaaatggatgctgagctcgctggt

SEQ ID NO: 3009763 - DNA, 25 bp, Homo sapien
tgggggacaaatggatgctgagctc

SEQ ID NO: 3009764 - DNA, 25 bp, Homo sapien
agaagaatcattggtgcagaaatca

SEQ ID NO: 3009765 - DNA, 25 bp, Homo sapien
ctgctctggtagctgcagaagaatc

SEQ ID NO: 3009766 - DNA, 25 bp, Homo sapien
cagaagaatcattggtgcagaaatc

SEQ ID NO: 3009767 - DNA, 25 bp, Homo sapien
ctctggtagctgcagaagaatcatt

SEQ ID NO: 3009768 - DNA, 25 bp, Homo sapien
caacttcataggacgggctgcaggt

SEQ ID NO: 3009769 - DNA, 25 bp, Homo sapien
tgagaccccagaacagtagaggcat

SEQ ID NO: 3009770 - DNA, 25 bp, Homo sapien
caatgcctagtagtaccaaggtgga

SEQ ID NO: 3009771 - DNA, 25 bp, Homo sapien
tcaagacgatggaagaatgaacccc

SEQ ID NO: 3009772 - DNA, 25 bp, Homo sapien
ctgattgagaacaggcgaaagggct

SEQ ID NO: 3009773 - DNA, 25 bp, Homo sapien
agaacaggcgaaagggctgtgctcc

SEQ ID NO: 3009774 - DNA, 25 bp, Homo sapien
gaacaggcgaaagggctgtgctcct

SEQ ID NO: 3009775 - DNA, 25 bp, Homo sapien
gtgagaactgattgagaacaggcga

SEQ ID NO: 3009776 - DNA, 25 bp, Homo sapien
tccagtggaaaacatgcagtagcca

SEQ ID NO: 3009777 - DNA, 25 bp, Homo sapien
ctaactgttcggtaggtgtcagttc

SEQ ID NO: 3009778 - DNA, 25 bp, Homo sapien
ctgggtgacgggttcctccagtgga

SEQ ID NO: 3009779 - DNA, 25 bp, Homo sapien
tcctgaggggctaactgttcggtag

SEQ ID NO: 3009780 - DNA, 25 bp, Homo sapien
ccatgagtgatgtgaagtctttgtc

SEQ ID NO: 3009781 - DNA, 25 bp, Homo sapien
agcctttgaaactgtcgatttatat

SEQ ID NO: 3009782 - DNA, 25 bp, Homo sapien
tcgatttatatccatgagtgatgtg

SEQ ID NO: 3009783 - DNA, 25 bp, Homo sapien
tatgggtttgcagtaagtgtggaag

SEQ ID NO: 3009784 - DNA, 25 bp, Homo sapien
tttccataggtgtggccgtgaggct

SEQ ID NO: 3009785 - DNA, 25 bp, Homo sapien
aacttcaccaggacaatcatgtcca

SEQ ID NO: 3009786 - DNA, 25 bp, Homo sapien
tcattttccataggtgtggccgtga

SEQ ID NO: 3009787 - DNA, 25 bp, Homo sapien
ggctgcactggcactaggccaaact

SEQ ID NO: 3009788 - DNA, 25 bp, Homo sapien
gtcttctgtgctcaatcttatccct

SEQ ID NO: 3009789 - DNA, 25 bp, Homo sapien
aggaactgcattggcacccgaggct

SEQ ID NO: 3009790 - DNA, 25 bp, Homo sapien
atccctctgaggagcgcccggttat

SEQ ID NO: 3009791 - DNA, 25 bp, Homo sapien
cgaggctcttgcaagtggcaattta

SEQ ID NO: 3009792 - DNA, 25 bp, Homo sapien
agatgtgcctttcacatggcagtag

SEQ ID NO: 3009793 - DNA, 25 bp, Homo sapien
gtagggagccactgttagccacagc

SEQ ID NO: 3009794 - DNA, 25 bp, Homo sapien
tggcgctcagagcccagcaggtcat

SEQ ID NO: 3009795 - DNA, 25 bp, Homo sapien
cacatggcagtagggagccactgtt

SEQ ID NO: 3009796 - DNA, 25 bp, Homo sapien
tgctgcacttttccacatgctgact

SEQ ID NO: 3009797 - DNA, 25 bp, Homo sapien
gctgcctctgtcttctagctctttc

SEQ ID NO: 3009798 - DNA, 25 bp, Homo sapien
tccttttttgctgcacttttccaca

SEQ ID NO: 3009799 - DNA, 25 bp, Homo sapien
acatgctgactttcccccagacttg

SEQ ID NO: 3009800 - DNA, 25 bp, Homo sapien
tccactctggagacctccaacttgt

SEQ ID NO: 3009801 - DNA, 25 bp, Homo sapien
ctctggagacctccaacttgtcttc

SEQ ID NO: 3009802 - DNA, 25 bp, Homo sapien
cactctggagacctccaacttgtct

SEQ ID NO: 3009803 - DNA, 25 bp, Homo sapien
cttccactctggagacctccaactt

SEQ ID NO: 3009804 - DNA, 25 bp, Homo sapien
cctcctacctgcttctttgctgcct

SEQ ID NO: 3009805 - DNA, 25 bp, Homo sapien
atctggtgccttggtttgtttcctc

SEQ ID NO: 3009806 - DNA, 25 bp, Homo sapien
tcctcctacctgcttctttgctgcc

SEQ ID NO: 3009807 - DNA, 25 bp, Homo sapien
tggtgccttggtttgtttcctccta

SEQ ID NO: 3009808 - DNA, 25 bp, Homo sapien
gaagagttcatggatgccccaaaca

SEQ ID NO: 3009809 - DNA, 25 bp, Homo sapien
caatggacatcctgctgcgaagagt

SEQ ID NO: 3009810 - DNA, 25 bp, Homo sapien
gtaaacaagcaactccactccaagg

SEQ ID NO: 3009811 - DNA, 25 bp, Homo sapien
gttactgcagcgtttcccaagcttg

SEQ ID NO: 3009812 - DNA, 25 bp, Homo sapien
cctgatccaacatggcttcgtggct

SEQ ID NO: 3009813 - DNA, 25 bp, Homo sapien
tccctgatccaacatggcttcgtgg

SEQ ID NO: 3009814 - DNA, 25 bp, Homo sapien
cttccctgatccaacatggcttcgt

SEQ ID NO: 3009815 - DNA, 25 bp, Homo sapien
ctgatccaacatggcttcgtggctg

SEQ ID NO: 3009816 - DNA, 25 bp, Homo sapien
ttgtccaggagacaccaattgctcc

SEQ ID NO: 3009817 - DNA, 25 bp, Homo sapien
tggaatgagccatagcccagcgtgg

SEQ ID NO: 3009818 - DNA, 25 bp, Homo sapien
gttgtccaggagacaccaattgctc

SEQ ID NO: 3009819 - DNA, 25 bp, Homo sapien
agcttctggaatgagccatagccca

SEQ ID NO: 3009820 - DNA, 25 bp, Homo sapien
ttccctttggcaataaagggctctc

SEQ ID NO: 3009821 - DNA, 25 bp, Homo sapien
acatctaattgtgcagactccattc

SEQ ID NO: 3009822 - DNA, 25 bp, Homo sapien
ctttggcaataaagggctctctgga

SEQ ID NO: 3009823 - DNA, 25 bp, Homo sapien
gactccattcgtcttgtttcttcca

SEQ ID NO: 3009824 - DNA, 25 bp, Homo sapien
tgagcccaggtgcttgtagcaggac

SEQ ID NO: 3009825 - DNA, 25 bp, Homo sapien
ggacacagtcatcagagactggaat

SEQ ID NO: 3009826 - DNA, 25 bp, Homo sapien
tgcttgtagcaggacacagtcatca

SEQ ID NO: 3009827 - DNA, 25 bp, Homo sapien
caggtgcttgtagcaggacacagtc

SEQ ID NO: 3009828 - DNA, 25 bp, Homo sapien
cagtgatacagatgtttatggtgtc

SEQ ID NO: 3009829 - DNA, 25 bp, Homo sapien
gaaagcagtgatacagatgtttatg

SEQ ID NO: 3009830 - DNA, 25 bp, Homo sapien
gaggagaaagcagtgatacagatgt

SEQ ID NO: 3009831 - DNA, 25 bp, Homo sapien
cagatgtttatggtgtctggctcca

SEQ ID NO: 3009832 - DNA, 25 bp, Homo sapien
tttaaagaccacaccgtgggtggca

SEQ ID NO: 3009833 - DNA, 25 bp, Homo sapien
cacaccgtgggtggcattcgcgaag

SEQ ID NO: 3009834 - DNA, 25 bp, Homo sapien
ttgagagaatatggggacagaagat

SEQ ID NO: 3009835 - DNA, 25 bp, Homo sapien
attcgcgaaggggtattgaatggct

SEQ ID NO: 3009836 - DNA, 25 bp, Homo sapien
gtaagaagggccctcgcaagcagag

SEQ ID NO: 3009837 - DNA, 25 bp, Homo sapien
gcagagcacgtgagtagcttctgaa

SEQ ID NO: 3009838 - DNA, 25 bp, Homo sapien
agggccctcgcaagcagagcacgtg

SEQ ID NO: 3009839 - DNA, 25 bp, Homo sapien
gtagcttctgaaccccgagttgccc

SEQ ID NO: 3009840 - DNA, 25 bp, Homo sapien
caccttcttcccgtaggaattcttg

SEQ ID NO: 3009841 - DNA, 25 bp, Homo sapien
agtgtgtgccgtccgagagtctcca

SEQ ID NO: 3009842 - DNA, 25 bp, Homo sapien
cgtccgagagtctccacactgaaat

SEQ ID NO: 3009843 - DNA, 25 bp, Homo sapien
aatgttctttaatccagggcctctt

SEQ ID NO: 3009844 - DNA, 25 bp, Homo sapien
cgtgggcggtgtcagattggatcca

SEQ ID NO: 3009845 - DNA, 25 bp, Homo sapien
agatatagaagtaagccgcggtggt

SEQ ID NO: 3009846 - DNA, 25 bp, Homo sapien
gatccagacgtgaggagaaaggcaa

SEQ ID NO: 3009847 - DNA, 25 bp, Homo sapien
gcaaggtagagtggctttagagata

SEQ ID NO: 3009848 - DNA, 25 bp, Homo sapien
ttatccacgacacggggagaagctg

SEQ ID NO: 3009849 - DNA, 25 bp, Homo sapien
cctggcatggtcccgttgggtaact

SEQ ID NO: 3009850 - DNA, 25 bp, Homo sapien
gtatcttttatccacgacacgggga

SEQ ID NO: 3009851 - DNA, 25 bp, Homo sapien
catggtcccgttgggtaactggtat

SEQ ID NO: 3009852 - DNA, 25 bp, Homo sapien
gcctccataggggacagtctactgg

SEQ ID NO: 3009853 - DNA, 25 bp, Homo sapien
taggggacagtctactggtggcctc

SEQ ID NO: 3009854 - DNA, 25 bp, Homo sapien
tggaaagttccatggttcagcagtt

SEQ ID NO: 3009855 - DNA, 25 bp, Homo sapien
gaaagttccatggttcagcagttct

SEQ ID NO: 3009856 - DNA, 25 bp, Homo sapien
cacatagtgctgtagtgactcgtgt

SEQ ID NO: 3009857 - DNA, 25 bp, Homo sapien
gtgactcgtgtgtttatctgtttct

SEQ ID NO: 3009858 - DNA, 25 bp, Homo sapien
ccttccaagctgtgagcaactgcag

SEQ ID NO: 3009859 - DNA, 25 bp, Homo sapien
tccttccaagctgtgagcaactgca

SEQ ID NO: 3009860 - DNA, 25 bp, Homo sapien
tggtggtaaagccaaggtccagaag

SEQ ID NO: 3009861 - DNA, 25 bp, Homo sapien
gccaaggtccagaagaagcgagcag

SEQ ID NO: 3009862 - DNA, 25 bp, Homo sapien
cagcagttgactgcctcaggcaacc

SEQ ID NO: 3009863 - DNA, 25 bp, Homo sapien
ccagaagaagcgagcagcagttgac

SEQ ID NO: 3009864 - DNA, 25 bp, Homo sapien
tttcctcattatttatatgacgctt

SEQ ID NO: 3009865 - DNA, 25 bp, Homo sapien
gggtttgaggcatcacatggtccaa

SEQ ID NO: 3009866 - DNA, 25 bp, Homo sapien
cacatggtccaatttcctcattatt

SEQ ID NO: 3009867 - DNA, 25 bp, Homo sapien
ggcatcacatggtccaatttcctca

SEQ ID NO: 3009868 - DNA, 25 bp, Homo sapien
cttccgcaatggattgttagcgcat

SEQ ID NO: 3009869 - DNA, 25 bp, Homo sapien
tctgccgtaattggaccttcactct

SEQ ID NO: 3009870 - DNA, 25 bp, Homo sapien
aatggattgttagcgcatttgagcc

SEQ ID NO: 3009871 - DNA, 25 bp, Homo sapien
gaccttcactctgttgcgcttcctg

SEQ ID NO: 3009872 - DNA, 25 bp, Homo sapien
caacactactagattttagaaagcc

SEQ ID NO: 3009873 - DNA, 25 bp, Homo sapien
tgaggttttccaccggcaacactac

SEQ ID NO: 3009874 - DNA, 25 bp, Homo sapien
ttccaccggcaacactactagattt

SEQ ID NO: 3009875 - DNA, 25 bp, Homo sapien
gaatgaggttttccaccggcaacac

SEQ ID NO: 3009876 - DNA, 25 bp, Homo sapien
gccacaggccacatgatgaagcctg

SEQ ID NO: 3009877 - DNA, 25 bp, Homo sapien
ggaaggaatcttcagcatggccgaa

SEQ ID NO: 3009878 - DNA, 25 bp, Homo sapien
tcttcagcatggccgaagtctgctg

SEQ ID NO: 3009879 - DNA, 25 bp, Homo sapien
gaggatgacactcttctctggccac

SEQ ID NO: 3009880 - DNA, 25 bp, Homo sapien
tgagctgcccttgatttgctggagt

SEQ ID NO: 3009881 - DNA, 25 bp, Homo sapien
agggggctaggagagcccccagcaa

SEQ ID NO: 3009882 - DNA, 25 bp, Homo sapien
ggcatgagctgcccttgatttgctg

SEQ ID NO: 3009883 - DNA, 25 bp, Homo sapien
caaggggcatgagctgcccttgatt

SEQ ID NO: 3009884 - DNA, 25 bp, Homo sapien
gattggtcccctatgttggaacaag

SEQ ID NO: 3009885 - DNA, 25 bp, Homo sapien
aaggaagtgtaggataaagtaagca

SEQ ID NO: 3009886 - DNA, 25 bp, Homo sapien
tattgattcgctcttaatgacattg

SEQ ID NO: 3009887 - DNA, 25 bp, Homo sapien
tcataaatggtctgtatcaggttca

SEQ ID NO: 3009888 - DNA, 25 bp, Homo sapien
tcgtcttactgcaccctctacttcc

SEQ ID NO: 3009889 - DNA, 25 bp, Homo sapien
tctcgtcttactgcaccctctactt

SEQ ID NO: 3009890 - DNA, 25 bp, Homo sapien
aatctcgtcttactgcaccctctac

SEQ ID NO: 3009891 - DNA, 25 bp, Homo sapien
caatctcgtcttactgcaccctcta

SEQ ID NO: 3009892 - DNA, 25 bp, Homo sapien
ctttggaatttcgaatgtgattact

SEQ ID NO: 3009893 - DNA, 25 bp, Homo sapien
tggaattagcgttgtcaagtttaac

SEQ ID NO: 3009894 - DNA, 25 bp, Homo sapien
gcgcgtgtaggtcggtttaaagcaa

SEQ ID NO: 3009895 - DNA, 25 bp, Homo sapien
gaggtgtggatctacctttagttcc

SEQ ID NO: 3009896 - DNA, 25 bp, Homo sapien
cactcaggagtgacggcttgatcgg

SEQ ID NO: 3009897 - DNA, 25 bp, Homo sapien
tcgttttcctgagcgtgccatcctt

SEQ ID NO: 3009898 - DNA, 25 bp, Homo sapien
tctgtgcattgagcgtgattcctct

SEQ ID NO: 3009899 - DNA, 25 bp, Homo sapien
cttcctcgtggtcagtgtggtccga

SEQ ID NO: 3009900 - DNA, 25 bp, Homo sapien
ctgagatgttttgggcccaacactg

SEQ ID NO: 3009901 - DNA, 25 bp, Homo sapien
cttttgctgagatgttttgggccca

SEQ ID NO: 3009902 - DNA, 25 bp, Homo sapien
ttgctgagatgttttgggcccaaca

SEQ ID NO: 3009903 - DNA, 25 bp, Homo sapien
tttgctgagatgttttgggcccaac

SEQ ID NO: 3009904 - DNA, 25 bp, Homo sapien
ggctgtctgtgaacctgagaatcat

SEQ ID NO: 3009905 - DNA, 25 bp, Homo sapien
ggggctgtctgtgaacctgagaatc

SEQ ID NO: 3009906 - DNA, 25 bp, Homo sapien
gggctgtctgtgaacctgagaatca

SEQ ID NO: 3009907 - DNA, 25 bp, Homo sapien
ggcttggaagagaccttttgtcctg

SEQ ID NO: 3009908 - DNA, 25 bp, Homo sapien
gcttggaagagaccttttgtcctga

SEQ ID NO: 3009909 - DNA, 25 bp, Homo sapien
cttggaagagaccttttgtcctgat

SEQ ID NO: 3009910 - DNA, 25 bp, Homo sapien
cttttgtcctgatgagtccccagca

SEQ ID NO: 3009911 - DNA, 25 bp, Homo sapien
cattctttccgagtgttcttggatc

SEQ ID NO: 3009912 - DNA, 25 bp, Homo sapien
ggccagtgaactggagtcttgcatc

SEQ ID NO: 3009913 - DNA, 25 bp, Homo sapien
tgagggcgatggagtgtcccaagat

SEQ ID NO: 3009914 - DNA, 25 bp, Homo sapien
tcttgcatcccgtgaccatgagaga

SEQ ID NO: 3009915 - DNA, 25 bp, Homo sapien
aaagccatcaggatacaaggctgcc

SEQ ID NO: 3009916 - DNA, 25 bp, Homo sapien
ggaaagccatcaggatacaaggctg

SEQ ID NO: 3009917 - DNA, 25 bp, Homo sapien
agccatcaggatacaaggctgccat

SEQ ID NO: 3009918 - DNA, 25 bp, Homo sapien
gcaggaaagccatcaggatacaagg

SEQ ID NO: 3009919 - DNA, 25 bp, Homo sapien
ttgtgttcacaacagaaggctgacc

SEQ ID NO: 3009920 - DNA, 25 bp, Homo sapien
ttttacaccaagacgaccataaatc

SEQ ID NO: 3009921 - DNA, 25 bp, Homo sapien
ctaatacccagtaggcagacatggg

SEQ ID NO: 3009922 - DNA, 25 bp, Homo sapien
gctgaccagaggagtttattaaatc

SEQ ID NO: 3009923 - DNA, 25 bp, Homo sapien
caaaggaccattccgctattctgca

SEQ ID NO: 3009924 - DNA, 25 bp, Homo sapien
cacacggatgattattgggagggtc

SEQ ID NO: 3009925 - DNA, 25 bp, Homo sapien
gaccaatcatctagaagaggaaggg

SEQ ID NO: 3009926 - DNA, 25 bp, Homo sapien
tctttccagtgagacggttaaggct

SEQ ID NO: 3009927 - DNA, 25 bp, Homo sapien
caacagatctatgggcagttgagag

SEQ ID NO: 3009928 - DNA, 25 bp, Homo sapien
tgaatattgagaggccactgcggag

SEQ ID NO: 3009929 - DNA, 25 bp, Homo sapien
tctcatcgcttttgtgtgtcatgct

SEQ ID NO: 3009930 - DNA, 25 bp, Homo sapien
agcacagcgatggtgtgaatattga

SEQ ID NO: 3009931 - DNA, 25 bp, Homo sapien
tgttccatctgtgagtcctcaaagt

SEQ ID NO: 3009932 - DNA, 25 bp, Homo sapien
ctgtgacataaacctccctgaaggt

SEQ ID NO: 3009933 - DNA, 25 bp, Homo sapien
ctgttccatctgtgagtcctcaaag

SEQ ID NO: 3009934 - DNA, 25 bp, Homo sapien
gatccagaaccctgtcagtgacaag

SEQ ID NO: 3009935 - DNA, 25 bp, Homo sapien
tgggacaggaaaccccggctgtctc

SEQ ID NO: 3009936 - DNA, 25 bp, Homo sapien
ggaagacttcctgtgatggattggg

SEQ ID NO: 3009937 - DNA, 25 bp, Homo sapien
cccaggcttggatccagaaccctgt

SEQ ID NO: 3009938 - DNA, 25 bp, Homo sapien
atgtcagccagcaaagctaacaaaa

SEQ ID NO: 3009939 - DNA, 25 bp, Homo sapien
gccagcaaagctaacaaaacagcat

SEQ ID NO: 3009940 - DNA, 25 bp, Homo sapien
acaaaacagcattctcttccagacc

SEQ ID NO: 3009941 - DNA, 25 bp, Homo sapien
aaacagcattctcttccagaccaag

SEQ ID NO: 3009942 - DNA, 25 bp, Homo sapien
gacatggcctgaattctccgagact

SEQ ID NO: 3009943 - DNA, 25 bp, Homo sapien
tcagattgcttattcctcctgcagc

SEQ ID NO: 3009944 - DNA, 25 bp, Homo sapien
gggcaagacgtctgcatggcctctg

SEQ ID NO: 3009945 - DNA, 25 bp, Homo sapien
caccggctgtcagggcaagacgtct

SEQ ID NO: 3009946 - DNA, 25 bp, Homo sapien
tcagaaggtgtgaatatctacagtt

SEQ ID NO: 3009947 - DNA, 25 bp, Homo sapien
gctactagacgtccacggtaggaaa

SEQ ID NO: 3009948 - DNA, 25 bp, Homo sapien
catattgcccgttgctttctaggag

SEQ ID NO: 3009949 - DNA, 25 bp, Homo sapien
ggtaggaaaggacctttctcacagc

SEQ ID NO: 3009950 - DNA, 25 bp, Homo sapien
cctttgtaggtcttcagtgttttgg

SEQ ID NO: 3009951 - DNA, 25 bp, Homo sapien
tgtaggtcttcagtgttttggccat

SEQ ID NO: 3009952 - DNA, 25 bp, Homo sapien
tttgtaggtcttcagtgttttggcc

SEQ ID NO: 3009953 - DNA, 25 bp, Homo sapien
ttgtaggtcttcagtgttttggcca

SEQ ID NO: 3009954 - DNA, 25 bp, Homo sapien
gagtggcttgctggtaagggttggg

SEQ ID NO: 3009955 - DNA, 25 bp, Homo sapien
ctcctttttcagagtggcttgctgg

SEQ ID NO: 3009956 - DNA, 25 bp, Homo sapien
gcttgctggtaagggttgggtggag

SEQ ID NO: 3009957 - DNA, 25 bp, Homo sapien
tcctttttcagagtggcttgctggt

SEQ ID NO: 3009958 - DNA, 25 bp, Homo sapien
gggatctctagtgacattggtgggt

SEQ ID NO: 3009959 - DNA, 25 bp, Homo sapien
gaagcacatccacaatggagtgtcc

SEQ ID NO: 3009960 - DNA, 25 bp, Homo sapien
tgtgtccaggggatctctagtgaca

SEQ ID NO: 3009961 - DNA, 25 bp, Homo sapien
aagagaagcacatccacaatggagt

SEQ ID NO: 3009962 - DNA, 25 bp, Homo sapien
atgtgctgagtccaatgtgtccgcc

SEQ ID NO: 3009963 - DNA, 25 bp, Homo sapien
tgggttcatgtgctgagtccaatgt

SEQ ID NO: 3009964 - DNA, 25 bp, Homo sapien
gcagtttgggttcatgtgctgagtc

SEQ ID NO: 3009965 - DNA, 25 bp, Homo sapien
tgtgctgagtccaatgtgtccgcct

SEQ ID NO: 3009966 - DNA, 25 bp, Homo sapien
tagcttctatgtcgggatttgccag

SEQ ID NO: 3009967 - DNA, 25 bp, Homo sapien
cagttttagcttctatgtcgggatt

SEQ ID NO: 3009968 - DNA, 25 bp, Homo sapien
ggctgccgctggaatgaaaaactca

SEQ ID NO: 3009969 - DNA, 25 bp, Homo sapien
gctgccgctggaatgaaaaactcag

SEQ ID NO: 3009970 - DNA, 25 bp, Homo sapien
ttcctgggtgcagattggttgaggg

SEQ ID NO: 3009971 - DNA, 25 bp, Homo sapien
ctgggtgcagattggttgagggaga

SEQ ID NO: 3009972 - DNA, 25 bp, Homo sapien
tcctgggtgcagattggttgaggga

SEQ ID NO: 3009973 - DNA, 25 bp, Homo sapien
ggctctgcttgtcattacaggtgca

SEQ ID NO: 3009974 - DNA, 25 bp, Homo sapien
ttcttggcatttggagcagtgtgga

SEQ ID NO: 3009975 - DNA, 25 bp, Homo sapien
tgtcattacaggtgcagagcctcgc

SEQ ID NO: 3009976 - DNA, 25 bp, Homo sapien
gcttcttggcatttggagcagtgtg

SEQ ID NO: 3009977 - DNA, 25 bp, Homo sapien
cttggtgtggcggtcccagcctcat

SEQ ID NO: 3009978 - DNA, 25 bp, Homo sapien
cagcctcatgttgatgaaccagaca

SEQ ID NO: 3009979 - DNA, 25 bp, Homo sapien
gatgaaccagacaaagttccaggga

SEQ ID NO: 3009980 - DNA, 25 bp, Homo sapien
gaaaggctggcctgagtgttgtcct

SEQ ID NO: 3009981 - DNA, 25 bp, Homo sapien
taaagtttgcgcattctcacagagg

SEQ ID NO: 3009982 - DNA, 25 bp, Homo sapien
cagaggtgttgtccttgacaaggcc

SEQ ID NO: 3009983 - DNA, 25 bp, Homo sapien
tccccttgggatgtgaactgtaact

SEQ ID NO: 3009984 - DNA, 25 bp, Homo sapien
tgacaaggccccacatcaataaatt

SEQ ID NO: 3009985 - DNA, 25 bp, Homo sapien
gagtcataaaccattattgtctctg

SEQ ID NO: 3009986 - DNA, 25 bp, Homo sapien
ttagtagctcattctctccatctga

SEQ ID NO: 3009987 - DNA, 25 bp, Homo sapien
ggtgcctccgtctgaattagtagct

SEQ ID NO: 3009988 - DNA, 25 bp, Homo sapien
cttccggcgagttcagagtcataaa

SEQ ID NO: 3009989 - DNA, 25 bp, Homo sapien
gagagtttacacttccctgtgtgag

SEQ ID NO: 3009990 - DNA, 25 bp, Homo sapien
ggccaggaatgagagagtttacact

SEQ ID NO: 3009991 - DNA, 25 bp, Homo sapien
gaatgagagagtttacacttccctg

SEQ ID NO: 3009992 - DNA, 25 bp, Homo sapien
acttccctgtgtgagcctgctcttg

SEQ ID NO: 3009993 - DNA, 25 bp, Homo sapien
atccaaagatgattccccattctca

SEQ ID NO: 3009994 - DNA, 25 bp, Homo sapien
catccaaagatgattccccattctc

SEQ ID NO: 3009995 - DNA, 25 bp, Homo sapien
tccaaagatgattccccattctcat

SEQ ID NO: 3009996 - DNA, 25 bp, Homo sapien
cactagggaagtctgctgtgtggct

SEQ ID NO: 3009997 - DNA, 25 bp, Homo sapien
tagttttctgatcattagactaaag

SEQ ID NO: 3009998 - DNA, 25 bp, Homo sapien
actagggaagtctgctgtgtggctc

SEQ ID NO: 3009999 - DNA, 25 bp, Homo sapien
gatcattagactaaaggtccagggc

SEQ ID NO: 3010000 - DNA, 25 bp, Homo sapien
ggtgggagagtcagcttcattcatc

SEQ ID NO: 3010001 - DNA, 25 bp, Homo sapien
ttcattcatcgacaggctcctcatc

SEQ ID NO: 3010002 - DNA, 25 bp, Homo sapien
gagtcagcttcattcatcgacaggc

SEQ ID NO: 3010003 - DNA, 25 bp, Homo sapien
gcttcattcatcgacaggctcctca

SEQ ID NO: 3010004 - DNA, 25 bp, Homo sapien
tctgcaaagcgcagctgtgctggat

SEQ ID NO: 3010005 - DNA, 25 bp, Homo sapien
atctgcaaagcgcagctgtgctgga

SEQ ID NO: 3010006 - DNA, 25 bp, Homo sapien
ctaaagatctgcaaagcgcagctgt

SEQ ID NO: 3010007 - DNA, 25 bp, Homo sapien
aagatctgcaaagcgcagctgtgct

SEQ ID NO: 3010008 - DNA, 25 bp, Homo sapien
gctggcttaactgggttaacactaa

SEQ ID NO: 3010009 - DNA, 25 bp, Homo sapien
acactaatgaaaatcacgggacagc

SEQ ID NO: 3010010 - DNA, 25 bp, Homo sapien
taatttttgacacctgataaatgcc

SEQ ID NO: 3010011 - DNA, 25 bp, Homo sapien
taaatgccaaacatcaatggatttt

SEQ ID NO: 3010012 - DNA, 25 bp, Homo sapien
gggcccaacttctccattgttatgc

SEQ ID NO: 3010013 - DNA, 25 bp, Homo sapien
gggtggattgcagaaggattgggcc

SEQ ID NO: 3010014 - DNA, 25 bp, Homo sapien
tgcagaaggattgggcccaacttct

SEQ ID NO: 3010015 - DNA, 25 bp, Homo sapien
ggcccaacttctccattgttatgca

SEQ ID NO: 3010016 - DNA, 25 bp, Homo sapien
tctcctgcgtgggtgccctcgtatg

SEQ ID NO: 3010017 - DNA, 25 bp, Homo sapien
taagaatgtctcctgcgtgggtgcc

SEQ ID NO: 3010018 - DNA, 25 bp, Homo sapien
aaggcagctctaagaatgtctcctg

SEQ ID NO: 3010019 - DNA, 25 bp, Homo sapien
gctctaagaatgtctcctgcgtggg

SEQ ID NO: 3010020 - DNA, 25 bp, Homo sapien
gaaggcatggttctctgattctgga

SEQ ID NO: 3010021 - DNA, 25 bp, Homo sapien
agtcttggaccaggaggaaggcatg

SEQ ID NO: 3010022 - DNA, 25 bp, Homo sapien
aggaaggcatggttctctgattctg

SEQ ID NO: 3010023 - DNA, 25 bp, Homo sapien
ccaggaggaaggcatggttctctga

SEQ ID NO: 3010024 - DNA, 25 bp, Homo sapien
catgacggggcatggcagtctcgct

SEQ ID NO: 3010025 - DNA, 25 bp, Homo sapien
ctcgctgcaggaccggatgccatga

SEQ ID NO: 3010026 - DNA, 25 bp, Homo sapien
ggcatggcagtctcgctgcaggacc

SEQ ID NO: 3010027 - DNA, 25 bp, Homo sapien
tgcaggaccggatgccatgacacct

SEQ ID NO: 3010028 - DNA, 25 bp, Homo sapien
ggccaactcttgagacaccgagaac

SEQ ID NO: 3010029 - DNA, 25 bp, Homo sapien
tcaggttcagtccttcagtgagggc

SEQ ID NO: 3010030 - DNA, 25 bp, Homo sapien
tgggcgaaggtgctaaatgcatctc

SEQ ID NO: 3010031 - DNA, 25 bp, Homo sapien
ccttcagggagtgtctatgggcgaa

SEQ ID NO: 3010032 - DNA, 25 bp, Homo sapien
caagagcagcattaatgcagctggt

SEQ ID NO: 3010033 - DNA, 25 bp, Homo sapien
aatgcagctggtcatgaaagtcaca

SEQ ID NO: 3010034 - DNA, 25 bp, Homo sapien
gcagcattaatgcagctggtcatga

SEQ ID NO: 3010035 - DNA, 25 bp, Homo sapien
gcattaatgcagctggtcatgaaag

SEQ ID NO: 3010036 - DNA, 25 bp, Homo sapien
ctgtctctgtgtttgctggaaaccg

SEQ ID NO: 3010037 - DNA, 25 bp, Homo sapien
tagctccttggagcgcagcaacaca

SEQ ID NO: 3010038 - DNA, 25 bp, Homo sapien
tccaggtcgaatgcctctgtctctg

SEQ ID NO: 3010039 - DNA, 25 bp, Homo sapien
ctggaaaccgtccagcaccgtctgg

SEQ ID NO: 3010040 - DNA, 25 bp, Homo sapien
gacccaggagacgaaactggtcatc

SEQ ID NO: 3010041 - DNA, 25 bp, Homo sapien
aactggtcatccatagcaagaagac

SEQ ID NO: 3010042 - DNA, 25 bp, Homo sapien
acatggacttcccagatgatattca

SEQ ID NO: 3010043 - DNA, 25 bp, Homo sapien
gtggagcagcttagagaagacccag

SEQ ID NO: 3010044 - DNA, 25 bp, Homo sapien
ctgagggtgtagattctgtcgagtg

SEQ ID NO: 3010045 - DNA, 25 bp, Homo sapien
gggtgtagattctgtcgagtgagca

SEQ ID NO: 3010046 - DNA, 25 bp, Homo sapien
tagattctgtcgagtgagcagggtc

SEQ ID NO: 3010047 - DNA, 25 bp, Homo sapien
attctgtcgagtgagcagggtccat

SEQ ID NO: 3010048 - DNA, 25 bp, Homo sapien
tcttgctgccccagtacccgtgcac

SEQ ID NO: 3010049 - DNA, 25 bp, Homo sapien
cccgtgcaccttccagtggatggct

SEQ ID NO: 3010050 - DNA, 25 bp, Homo sapien
caacttctgcaatctgtggtccctc

SEQ ID NO: 3010051 - DNA, 25 bp, Homo sapien
tggatggctgatcccacaggctctg

SEQ ID NO: 3010052 - DNA, 25 bp, Homo sapien
gaagctttctgggtaccaatggccc

SEQ ID NO: 3010053 - DNA, 25 bp, Homo sapien
aagctttctgggtaccaatggccca

SEQ ID NO: 3010054 - DNA, 25 bp, Homo sapien
ctgaagctttctgggtaccaatggc

SEQ ID NO: 3010055 - DNA, 25 bp, Homo sapien
agctttctgggtaccaatggcccat

SEQ ID NO: 3010056 - DNA, 25 bp, Homo sapien
tataaagctggcttgccctgcgctg

SEQ ID NO: 3010057 - DNA, 25 bp, Homo sapien
cacacacttagattggccctcagga

SEQ ID NO: 3010058 - DNA, 25 bp, Homo sapien
gaatgaggtttgtctctctcaatca

SEQ ID NO: 3010059 - DNA, 25 bp, Homo sapien
gaaagttacaggagatataaagctg

SEQ ID NO: 3010060 - DNA, 25 bp, Homo sapien
tgagcatcgaaggatgtccagtcca

SEQ ID NO: 3010061 - DNA, 25 bp, Homo sapien
gtccagcaggcacttattttcaggg

SEQ ID NO: 3010062 - DNA, 25 bp, Homo sapien
ttaggcctgtcagtaatggcagcat

SEQ ID NO: 3010063 - DNA, 25 bp, Homo sapien
gatttttgtttagtgggtctcttgc

SEQ ID NO: 3010064 - DNA, 25 bp, Homo sapien
tagtatcaggagcaattgagacccc

SEQ ID NO: 3010065 - DNA, 25 bp, Homo sapien
cacactgctgtggacgggatagcca

SEQ ID NO: 3010066 - DNA, 25 bp, Homo sapien
gatagcttcggcatccaatctgcga

SEQ ID NO: 3010067 - DNA, 25 bp, Homo sapien
ccttgaaagcaatgtcaggcgtggc

SEQ ID NO: 3010068 - DNA, 25 bp, Homo sapien
taagtacaggatcaagccttgcttg

SEQ ID NO: 3010069 - DNA, 25 bp, Homo sapien
ttgggccttgggatcatgaccagga

SEQ ID NO: 3010070 - DNA, 25 bp, Homo sapien
cttgagattggccttacctctggac

SEQ ID NO: 3010071 - DNA, 25 bp, Homo sapien
gaatcacgtgaagctgacaccactg

SEQ ID NO: 3010072 - DNA, 25 bp, Homo sapien
caagggcgagaatgcagagacacag

SEQ ID NO: 3010073 - DNA, 25 bp, Homo sapien
tattaaccacccatctatcgtaggc

SEQ ID NO: 3010074 - DNA, 25 bp, Homo sapien
tccttgtgttagttacccgctgcca

SEQ ID NO: 3010075 - DNA, 25 bp, Homo sapien
ggtctgcctactggtcaacctgagg

SEQ ID NO: 3010076 - DNA, 25 bp, Homo sapien
cattatgagttcagttatgggagcc

SEQ ID NO: 3010077 - DNA, 25 bp, Homo sapien
caaccacgccatgtgataatgggcc

SEQ ID NO: 3010078 - DNA, 25 bp, Homo sapien
tagacattaagacccaacaaggcat

SEQ ID NO: 3010079 - DNA, 25 bp, Homo sapien
gacgcagcctgtcgttcagagaact

SEQ ID NO: 3010080 - DNA, 25 bp, Homo sapien
taaaggaatgtctttgcgagggcag

SEQ ID NO: 3010081 - DNA, 25 bp, Homo sapien
taaaacatacatggccaggacgagg

SEQ ID NO: 3010082 - DNA, 25 bp, Homo sapien
ttcatggctgcaaagaccccaaatc

SEQ ID NO: 3010083 - DNA, 25 bp, Homo sapien
gacggccgccatcaagtaaaacata

SEQ ID NO: 3010084 - DNA, 25 bp, Homo sapien
aaaggttcccgaaagctgcagctct

SEQ ID NO: 3010085 - DNA, 25 bp, Homo sapien
aggttcccgaaagctgcagctctcc

SEQ ID NO: 3010086 - DNA, 25 bp, Homo sapien
ctcccacggcctgaaatgatggtat

SEQ ID NO: 3010087 - DNA, 25 bp, Homo sapien
aaggttcccgaaagctgcagctctc

SEQ ID NO: 3010088 - DNA, 25 bp, Homo sapien
gttcccagaattggttgcctgttgt

SEQ ID NO: 3010089 - DNA, 25 bp, Homo sapien
gatcaggcatttggcagtaatgttg

SEQ ID NO: 3010090 - DNA, 25 bp, Homo sapien
agagatcaggcatttggcagtaatg

SEQ ID NO: 3010091 - DNA, 25 bp, Homo sapien
gagatcaggcatttggcagtaatgt

SEQ ID NO: 3010092 - DNA, 25 bp, Homo sapien
caggcatttggcagtaatgttgaaa

SEQ ID NO: 3010093 - DNA, 25 bp, Homo sapien
ggttccctgaaggtgcctataccac

SEQ ID NO: 3010094 - DNA, 25 bp, Homo sapien
tgtggattgtgcccaagtggatgct

SEQ ID NO: 3010095 - DNA, 25 bp, Homo sapien
ctgttggtcaaaggttcaccccctg

SEQ ID NO: 3010096 - DNA, 25 bp, Homo sapien
gggcatccatactcccacagctgtg

SEQ ID NO: 3010097 - DNA, 25 bp, Homo sapien
ggattgtgcccaagtggatgctggg

SEQ ID NO: 3010098 - DNA, 25 bp, Homo sapien
taaagctcaggtctaaagaggtctc

SEQ ID NO: 3010099 - DNA, 25 bp, Homo sapien
cagaactagtagaacgggcatcgtg

SEQ ID NO: 3010100 - DNA, 25 bp, Homo sapien
taagtgctcctagcctcagagatgg

SEQ ID NO: 3010101 - DNA, 25 bp, Homo sapien
ccctgtgggaccagagtaaagctca

SEQ ID NO: 3010102 - DNA, 25 bp, Homo sapien
tggatacattcatatgaacttctgt

SEQ ID NO: 3010103 - DNA, 25 bp, Homo sapien
ttggatacattcatatgaacttctg

SEQ ID NO: 3010104 - DNA, 25 bp, Homo sapien
caccgctgtctcttgaagccctttg

SEQ ID NO: 3010105 - DNA, 25 bp, Homo sapien
ccttgcaccgctgtctcttgaagcc

SEQ ID NO: 3010106 - DNA, 25 bp, Homo sapien
cctgtctcactccacagcgaagtga

SEQ ID NO: 3010107 - DNA, 25 bp, Homo sapien
tccacagcgaagtgattcaggcact

SEQ ID NO: 3010108 - DNA, 25 bp, Homo sapien
tctccctggcgagcccttcaggcct

SEQ ID NO: 3010109 - DNA, 25 bp, Homo sapien
ctggtagcacgtctccctggcgagc

SEQ ID NO: 3010110 - DNA, 25 bp, Homo sapien
ggcaaccgtggcaagggtgcagaga

SEQ ID NO: 3010111 - DNA, 25 bp, Homo sapien
agccattaggagggcaaccgtggca

SEQ ID NO: 3010112 - DNA, 25 bp, Homo sapien
attaggagggcaaccgtggcaaggg

SEQ ID NO: 3010113 - DNA, 25 bp, Homo sapien
gggcaaccgtggcaagggtgcagag

SEQ ID NO: 3010114 - DNA, 25 bp, Homo sapien
cttgctgcagcggtagttactctgg

SEQ ID NO: 3010115 - DNA, 25 bp, Homo sapien
tgcttgctcggtgcacttgctgcag

SEQ ID NO: 3010116 - DNA, 25 bp, Homo sapien
tctggaagacgacagctgtggacct

SEQ ID NO: 3010117 - DNA, 25 bp, Homo sapien
taggatgcttgctcggtgcacttgc

SEQ ID NO: 3010118 - DNA, 25 bp, Homo sapien
tccccagtttcacctatgcttgtca

SEQ ID NO: 3010119 - DNA, 25 bp, Homo sapien
gttcagctgtgtggtgccttttgtc

SEQ ID NO: 3010120 - DNA, 25 bp, Homo sapien
gtcacatagagtccagagcccttag

SEQ ID NO: 3010121 - DNA, 25 bp, Homo sapien
ctaaactcagtgttcagctgtgtgg

SEQ ID NO: 3010122 - DNA, 25 bp, Homo sapien
tgtgaaatatcatggctggcagcgc

SEQ ID NO: 3010123 - DNA, 25 bp, Homo sapien
ggcagcgcgtggctcgagctgcctg

SEQ ID NO: 3010124 - DNA, 25 bp, Homo sapien
cagcgcgtggctcgagctgcctgca

SEQ ID NO: 3010125 - DNA, 25 bp, Homo sapien
ctgtgaaatatcatggctggcagcg

SEQ ID NO: 3010126 - DNA, 25 bp, Homo sapien
tgccgagttcggtcagtgactccca

SEQ ID NO: 3010127 - DNA, 25 bp, Homo sapien
cctgtgtgctacaccccacagtatc

SEQ ID NO: 3010128 - DNA, 25 bp, Homo sapien
tgagactctgatcgggttgtccagg

SEQ ID NO: 3010129 - DNA, 25 bp, Homo sapien
cctgcagatgagactctgatcgggt

SEQ ID NO: 3010130 - DNA, 25 bp, Homo sapien
ccagcaaagatcctttggtgacatc

SEQ ID NO: 3010131 - DNA, 25 bp, Homo sapien
ggcacatgggtctcctttttcctga

SEQ ID NO: 3010132 - DNA, 25 bp, Homo sapien
tccatactccagcaaagatcctttg

SEQ ID NO: 3010133 - DNA, 25 bp, Homo sapien
gatggcacatgggtctcctttttcc

SEQ ID NO: 3010134 - DNA, 25 bp, Homo sapien
gaataggcatgtttacaatagaaat

SEQ ID NO: 3010135 - DNA, 25 bp, Homo sapien
catgtttacaatagaaatatgtggg

SEQ ID NO: 3010136 - DNA, 25 bp, Homo sapien
tagaataggcatgtttacaatagaa

SEQ ID NO: 3010137 - DNA, 25 bp, Homo sapien
taggcatgtttacaatagaaatatg

SEQ ID NO: 3010138 - DNA, 25 bp, Homo sapien
tctttgccttcaaaacgcagttcaa

SEQ ID NO: 3010139 - DNA, 25 bp, Homo sapien
ttctagggtacatgacttggaagac

SEQ ID NO: 3010140 - DNA, 25 bp, Homo sapien
catgacttggaagactacattttaa

SEQ ID NO: 3010141 - DNA, 25 bp, Homo sapien
ttcctgctacctggagtgccttttc

SEQ ID NO: 3010142 - DNA, 25 bp, Homo sapien
aatgccaggtgaaatcagtctgagc

SEQ ID NO: 3010143 - DNA, 25 bp, Homo sapien
ccactgttctcaggacaggacctgg

SEQ ID NO: 3010144 - DNA, 25 bp, Homo sapien
gacacacagggagggccagaactca

SEQ ID NO: 3010145 - DNA, 25 bp, Homo sapien
acctggcatggacaggttggatgca

SEQ ID NO: 3010146 - DNA, 25 bp, Homo sapien
tggagatgcttgtgtcagggttcaa

SEQ ID NO: 3010147 - DNA, 25 bp, Homo sapien
gatgcttgtgtcagggttcaaatgc

SEQ ID NO: 3010148 - DNA, 25 bp, Homo sapien
tttctgggggtgtgcactaaggcaa

SEQ ID NO: 3010149 - DNA, 25 bp, Homo sapien
ggtgtgcactaaggcaagtcactta

SEQ ID NO: 3010150 - DNA, 25 bp, Homo sapien
cctatccagctgatctactcactct

SEQ ID NO: 3010151 - DNA, 25 bp, Homo sapien
ctcctatccagctgatctactcact

SEQ ID NO: 3010152 - DNA, 25 bp, Homo sapien
tcctatccagctgatctactcactc

SEQ ID NO: 3010153 - DNA, 25 bp, Homo sapien
atcagtgacctccccgagggccagg

SEQ ID NO: 3010154 - DNA, 25 bp, Homo sapien
tcagggcagtgcaaactggtgatac

SEQ ID NO: 3010155 - DNA, 25 bp, Homo sapien
aacgctcctcttaccctgctcccag

SEQ ID NO: 3010156 - DNA, 25 bp, Homo sapien
gagggccaggactccaacgctcctc

SEQ ID NO: 3010157 - DNA, 25 bp, Homo sapien
tgtccccacagtaaataccataatc

SEQ ID NO: 3010158 - DNA, 25 bp, Homo sapien
ggtttagagaatgtaactgccatgc

SEQ ID NO: 3010159 - DNA, 25 bp, Homo sapien
tttctgggcgagaatcaatcttact

SEQ ID NO: 3010160 - DNA, 25 bp, Homo sapien
gagaatcaatcttactgtccccaca

SEQ ID NO: 3010161 - DNA, 25 bp, Homo sapien
gagttcagggagctctcaatgggac

SEQ ID NO: 3010162 - DNA, 25 bp, Homo sapien
ccacgtgcttttaaacaggagttca

SEQ ID NO: 3010163 - DNA, 25 bp, Homo sapien
agggagctctcaatgggactggcac

SEQ ID NO: 3010164 - DNA, 25 bp, Homo sapien
aacgaatgggggagtccacgtgctt

SEQ ID NO: 3010165 - DNA, 25 bp, Homo sapien
ggacaccagaatgaccactctttag

SEQ ID NO: 3010166 - DNA, 25 bp, Homo sapien
agcaggacaccagaatgaccactct

SEQ ID NO: 3010167 - DNA, 25 bp, Homo sapien
catgtggtgggccaccagaaccaag

SEQ ID NO: 3010168 - DNA, 25 bp, Homo sapien
gtggtgggccaccagaaccaaggac

SEQ ID NO: 3010169 - DNA, 25 bp, Homo sapien
tagttgtccgagtggataagggaga

SEQ ID NO: 3010170 - DNA, 25 bp, Homo sapien
ggaaattgtgagtgtgtagttgtcc

SEQ ID NO: 3010171 - DNA, 25 bp, Homo sapien
agtgtgtagttgtccgagtggataa

SEQ ID NO: 3010172 - DNA, 25 bp, Homo sapien
aattgtgagtgtgtagttgtccgag

SEQ ID NO: 3010173 - DNA, 25 bp, Homo sapien
attgtgatggggtagaaacctgtga

SEQ ID NO: 3010174 - DNA, 25 bp, Homo sapien
cctgtgaacatcgtgaatattctcc

SEQ ID NO: 3010175 - DNA, 25 bp, Homo sapien
aaacctgtgaacatcgtgaatattc

SEQ ID NO: 3010176 - DNA, 25 bp, Homo sapien
tgtgatggggtagaaacctgtgaac

SEQ ID NO: 3010177 - DNA, 25 bp, Homo sapien
ctgaggaggggatatgactaagcaa

SEQ ID NO: 3010178 - DNA, 25 bp, Homo sapien
gggatatgactaagcaagttgtcga

SEQ ID NO: 3010179 - DNA, 25 bp, Homo sapien
tatgactaagcaagttgtcgattct

SEQ ID NO: 3010180 - DNA, 25 bp, Homo sapien
tgactaagcaagttgtcgattctac

SEQ ID NO: 3010181 - DNA, 25 bp, Homo sapien
tgttccggtgcagaggacctggagt

SEQ ID NO: 3010182 - DNA, 25 bp, Homo sapien
tttctcgtttgagcacctagctggg

SEQ ID NO: 3010183 - DNA, 25 bp, Homo sapien
tcccagcatcaggtttctcgtttga

SEQ ID NO: 3010184 - DNA, 25 bp, Homo sapien
gctgagagctgacagcatcccagca

SEQ ID NO: 3010185 - DNA, 25 bp, Homo sapien
tctccctgccggctgatccatgcat

SEQ ID NO: 3010186 - DNA, 25 bp, Homo sapien
aaagcagcggagctccttccccggt

SEQ ID NO: 3010187 - DNA, 25 bp, Homo sapien
gtccctccgggcttgctgtccgctc

SEQ ID NO: 3010188 - DNA, 25 bp, Homo sapien
cagccgccaccgcaaagcagcggag

SEQ ID NO: 3010189 - DNA, 25 bp, Homo sapien
ccccgtcggtgctttctctcctgga

SEQ ID NO: 3010190 - DNA, 25 bp, Homo sapien
cagaacagttactgcttctgtggga

SEQ ID NO: 3010191 - DNA, 25 bp, Homo sapien
tccggcaaaagcgatgttcaggcgc

SEQ ID NO: 3010192 - DNA, 25 bp, Homo sapien
tgggattcaagctgaaaacagagcc

SEQ ID NO: 3010193 - DNA, 25 bp, Homo sapien
gggagctcagtgaccttctcgctcc

SEQ ID NO: 3010194 - DNA, 25 bp, Homo sapien
ctgcgagcagcacccgtggggagct

SEQ ID NO: 3010195 - DNA, 25 bp, Homo sapien
agctcagtgaccttctcgctcccat

SEQ ID NO: 3010196 - DNA, 25 bp, Homo sapien
gagcagcacccgtggggagctcagt

SEQ ID NO: 3010197 - DNA, 25 bp, Homo sapien
agtggaatcgaatgagctcaggatg

SEQ ID NO: 3010198 - DNA, 25 bp, Homo sapien
caagtggaatcgaatgagctcagga

SEQ ID NO: 3010199 - DNA, 25 bp, Homo sapien
aagtggaatcgaatgagctcaggat

SEQ ID NO: 3010200 - DNA, 25 bp, Homo sapien
gctcaggatgaacgggagagatgaa

SEQ ID NO: 3010201 - DNA, 25 bp, Homo sapien
tagagtggctgttgtcacttgtcac

SEQ ID NO: 3010202 - DNA, 25 bp, Homo sapien
ggctgttgtcacttgtcacctgctg

SEQ ID NO: 3010203 - DNA, 25 bp, Homo sapien
gtggctgttgtcacttgtcacctgc

SEQ ID NO: 3010204 - DNA, 25 bp, Homo sapien
gatagagtggctgttgtcacttgtc

SEQ ID NO: 3010205 - DNA, 25 bp, Homo sapien
gtctgactcctcagtagggtagcca

SEQ ID NO: 3010206 - DNA, 25 bp, Homo sapien
cctcagtagggtagccaagcctcat

SEQ ID NO: 3010207 - DNA, 25 bp, Homo sapien
tcctcagtagggtagccaagcctca

SEQ ID NO: 3010208 - DNA, 25 bp, Homo sapien
gactcctcagtagggtagccaagcc

SEQ ID NO: 3010209 - DNA, 25 bp, Homo sapien
ttgtcatccaccgtgaggccttcca

SEQ ID NO: 3010210 - DNA, 25 bp, Homo sapien
cgtgaggccttccactgtagcttcc

SEQ ID NO: 3010211 - DNA, 25 bp, Homo sapien
cccttgtcatccaccgtgaggcctt

SEQ ID NO: 3010212 - DNA, 25 bp, Homo sapien
ctgtagcttcctggcaagaatgagc

SEQ ID NO: 3010213 - DNA, 25 bp, Homo sapien
catcaagctggagaaaacttccttc

SEQ ID NO: 3010214 - DNA, 25 bp, Homo sapien
tcaagctggagaaaacttccttctt

SEQ ID NO: 3010215 - DNA, 25 bp, Homo sapien
aagctggagaaaacttccttcttca

SEQ ID NO: 3010216 - DNA, 25 bp, Homo sapien
gctggagaaaacttccttcttcaat

SEQ ID NO: 3010217 - DNA, 25 bp, Homo sapien
taggggttgaactgataggcctggc

SEQ ID NO: 3010218 - DNA, 25 bp, Homo sapien
gaactgataggcctggcagtggtcc

SEQ ID NO: 3010219 - DNA, 25 bp, Homo sapien
actgataggcctggcagtggtccca

SEQ ID NO: 3010220 - DNA, 25 bp, Homo sapien
gttgaactgataggcctggcagtgg

SEQ ID NO: 3010221 - DNA, 25 bp, Homo sapien
ggaaacaaatacatgcgaggatgtc

SEQ ID NO: 3010222 - DNA, 25 bp, Homo sapien
cgaggatgtcggctcttcttccatt

SEQ ID NO: 3010223 - DNA, 25 bp, Homo sapien
tacatgcgaggatgtcggctcttct

SEQ ID NO: 3010224 - DNA, 25 bp, Homo sapien
caaatacatgcgaggatgtcggctc

SEQ ID NO: 3010225 - DNA, 25 bp, Homo sapien
aaagttcttccgtggcattagaatg

SEQ ID NO: 3010226 - DNA, 25 bp, Homo sapien
gcagaaggcagactgatcagaaagt

SEQ ID NO: 3010227 - DNA, 25 bp, Homo sapien
cagtgtcaggtcagtgttgggaagt

SEQ ID NO: 3010228 - DNA, 25 bp, Homo sapien
aatggagagacttaggcatgctaaa

SEQ ID NO: 3010229 - DNA, 25 bp, Homo sapien
tgtcccactgggctaaaacggaagc

SEQ ID NO: 3010230 - DNA, 25 bp, Homo sapien
acatatctttggtggtggtcgtggc

SEQ ID NO: 3010231 - DNA, 25 bp, Homo sapien
tgtcgtaaggactcccacacaggaa

SEQ ID NO: 3010232 - DNA, 25 bp, Homo sapien
caatggatatggcagcatgtaccct

SEQ ID NO: 3010233 - DNA, 25 bp, Homo sapien
gcttcttgtaatcacagccttcgat

SEQ ID NO: 3010234 - DNA, 25 bp, Homo sapien
tggcttcttgtaatcacagccttcg

SEQ ID NO: 3010235 - DNA, 25 bp, Homo sapien
cttctggcttcttgtaatcacagcc

SEQ ID NO: 3010236 - DNA, 25 bp, Homo sapien
tcttgtaatcacagccttcgatttt

SEQ ID NO: 3010237 - DNA, 25 bp, Homo sapien
agcttcacctccttccgcacccact

SEQ ID NO: 3010238 - DNA, 25 bp, Homo sapien
ccagcttcacctccttccgcaccca

SEQ ID NO: 3010239 - DNA, 25 bp, Homo sapien
tccttccgcacccactccattctct

SEQ ID NO: 3010240 - DNA, 25 bp, Homo sapien
cacctccttccgcacccactccatt

SEQ ID NO: 3010241 - DNA, 25 bp, Homo sapien
tcaggtgaacgtttgttggaatgaa

SEQ ID NO: 3010242 - DNA, 25 bp, Homo sapien
cccaggtggtcttgatgtgcacttc

SEQ ID NO: 3010243 - DNA, 25 bp, Homo sapien
aatatctgaccttcatcacacttgg

SEQ ID NO: 3010244 - DNA, 25 bp, Homo sapien
tgtgcacttcatggagaggcccttc

SEQ ID NO: 3010245 - DNA, 25 bp, Homo sapien
catgatgcaggatacttaaggattg

SEQ ID NO: 3010246 - DNA, 25 bp, Homo sapien
gagtcactcaaggacattctgcatc

SEQ ID NO: 3010247 - DNA, 25 bp, Homo sapien
agtcctcagggctgaacgacgcaca

SEQ ID NO: 3010248 - DNA, 25 bp, Homo sapien
tgagtctcaggtctcatgcattggg

SEQ ID NO: 3010249 - DNA, 25 bp, Homo sapien
ccatcaagctggtgaccattcacca

SEQ ID NO: 3010250 - DNA, 25 bp, Homo sapien
catcaagctggtgaccattcaccat

SEQ ID NO: 3010251 - DNA, 25 bp, Homo sapien
aagtcagacatatcaccggtgttca

SEQ ID NO: 3010252 - DNA, 25 bp, Homo sapien
catatcaccggtgttcactgctcca

SEQ ID NO: 3010253 - DNA, 25 bp, Homo sapien
ctgcttccaagttcgatggtgccag

SEQ ID NO: 3010254 - DNA, 25 bp, Homo sapien
ggtggttggcctatatcctggccca

SEQ ID NO: 3010255 - DNA, 25 bp, Homo sapien
cagaactccgggtggtcatcacggt

SEQ ID NO: 3010256 - DNA, 25 bp, Homo sapien
ggccatccttcacagccaaatacat

SEQ ID NO: 3010257 - DNA, 25 bp, Homo sapien
tgttgtatttcccacgagaggatca

SEQ ID NO: 3010258 - DNA, 25 bp, Homo sapien
gatcatgagcgctcaactcttccca

SEQ ID NO: 3010259 - DNA, 25 bp, Homo sapien
tatttcccacgagaggatcatgagc

SEQ ID NO: 3010260 - DNA, 25 bp, Homo sapien
cacgagaggatcatgagcgctcaac

SEQ ID NO: 3010261 - DNA, 25 bp, Homo sapien
cattgtgcgtccatcgttccgagaa

SEQ ID NO: 3010262 - DNA, 25 bp, Homo sapien
catgttcactggaaacttgcctgag

SEQ ID NO: 3010263 - DNA, 25 bp, Homo sapien
gccagggtgttgctctccgaatgcc

SEQ ID NO: 3010264 - DNA, 25 bp, Homo sapien
gaaaccatctgaggacgtcattgtg

SEQ ID NO: 3010265 - DNA, 25 bp, Homo sapien
atgcagccacgcccaagagattttt

SEQ ID NO: 3010266 - DNA, 25 bp, Homo sapien
cctaaattatctaccccagggagtg

SEQ ID NO: 3010267 - DNA, 25 bp, Homo sapien
atttctctctatccctgatgccagc

SEQ ID NO: 3010268 - DNA, 25 bp, Homo sapien
tgtcccctacgagaagaagatatgg

SEQ ID NO: 3010269 - DNA, 25 bp, Homo sapien
agtccaccttactatgtgcctctac

SEQ ID NO: 3010270 - DNA, 25 bp, Homo sapien
gtccaccttactatgtgcctctacc

SEQ ID NO: 3010271 - DNA, 25 bp, Homo sapien
cagtccaccttactatgtgcctcta

SEQ ID NO: 3010272 - DNA, 25 bp, Homo sapien
tcagtccaccttactatgtgcctct

SEQ ID NO: 3010273 - DNA, 25 bp, Homo sapien
ccgggaagtgttgcttcatccgaga

SEQ ID NO: 3010274 - DNA, 25 bp, Homo sapien
acagggccagatacaccttcccggg

SEQ ID NO: 3010275 - DNA, 25 bp, Homo sapien
ctctctgggtgacttcgggtaagtt

SEQ ID NO: 3010276 - DNA, 25 bp, Homo sapien
tctgggtgacttcgggtaagttcag

SEQ ID NO: 3010277 - DNA, 25 bp, Homo sapien
tgcttcgagtacgtcctctgcagag

SEQ ID NO: 3010278 - DNA, 25 bp, Homo sapien
gcacctctagctcacccagaatctg

SEQ ID NO: 3010279 - DNA, 25 bp, Homo sapien
tctgccgtcacgcagggagggaagc

SEQ ID NO: 3010280 - DNA, 25 bp, Homo sapien
aagctgggtagccagttccccacga

SEQ ID NO: 3010281 - DNA, 25 bp, Homo sapien
ttcagaggagaaaaccatgagggcg

SEQ ID NO: 3010282 - DNA, 25 bp, Homo sapien
ggctggacgtgagggctcagtaatg

SEQ ID NO: 3010283 - DNA, 25 bp, Homo sapien
gaagcacaagaaagcatcaggttgc

SEQ ID NO: 3010284 - DNA, 25 bp, Homo sapien
tacctccagcgacggggagctcatt

SEQ ID NO: 3010285 - DNA, 25 bp, Homo sapien
gaagttcattcccgaaagaagtaca

SEQ ID NO: 3010286 - DNA, 25 bp, Homo sapien
cctttcttccattacatgctgattg

SEQ ID NO: 3010287 - DNA, 25 bp, Homo sapien
cattctgtctttggtctgaagctaa

SEQ ID NO: 3010288 - DNA, 25 bp, Homo sapien
tctttggtctgaagctaagctccag

SEQ ID NO: 3010289 - DNA, 25 bp, Homo sapien
tggtctgaagctaagctccagatcc

SEQ ID NO: 3010290 - DNA, 25 bp, Homo sapien
ctgtctttggtctgaagctaagctc

SEQ ID NO: 3010291 - DNA, 25 bp, Homo sapien
aagtcccggagatgggggcttctga

SEQ ID NO: 3010292 - DNA, 25 bp, Homo sapien
gggccgtttgcaagtcccggagatg

SEQ ID NO: 3010293 - DNA, 25 bp, Homo sapien
ggccccaggaactgactgggcagcc

SEQ ID NO: 3010294 - DNA, 25 bp, Homo sapien
tcagatctgaactcggggccgtttg

SEQ ID NO: 3010295 - DNA, 25 bp, Homo sapien
gcagctcaagcagcacgagagtggc

SEQ ID NO: 3010296 - DNA, 25 bp, Homo sapien
tgttttcagacatccagaggcatca

SEQ ID NO: 3010297 - DNA, 25 bp, Homo sapien
gagactgggaagtctgcgagccaca

SEQ ID NO: 3010298 - DNA, 25 bp, Homo sapien
gtttctgagccacactcgactctgg

SEQ ID NO: 3010299 - DNA, 25 bp, Homo sapien
gagcataggctgcattcgggcctct

SEQ ID NO: 3010300 - DNA, 25 bp, Homo sapien
aaagcacagaagatttagttttgct

SEQ ID NO: 3010301 - DNA, 25 bp, Homo sapien
tacatcagaactttagggatacagt

SEQ ID NO: 3010302 - DNA, 25 bp, Homo sapien
acagttagcgctgggggaacccctg

SEQ ID NO: 3010303 - DNA, 25 bp, Homo sapien
ggtagatgttaacaacaaggaagat

SEQ ID NO: 3010304 - DNA, 25 bp, Homo sapien
gccctgggctggatacttcgtcgcc

SEQ ID NO: 3010305 - DNA, 25 bp, Homo sapien
gtggccctgggctggatacttcgtc

SEQ ID NO: 3010306 - DNA, 25 bp, Homo sapien
ggcagttgactacgtggccctgggc

SEQ ID NO: 3010307 - DNA, 25 bp, Homo sapien
gcagttgactacgtggccctgggct

SEQ ID NO: 3010308 - DNA, 25 bp, Homo sapien
ggtggtgctagaggatgtcgctggc

SEQ ID NO: 3010309 - DNA, 25 bp, Homo sapien
gatgtcgctggcgtgatagcccctc

SEQ ID NO: 3010310 - DNA, 25 bp, Homo sapien
tagaggatgtcgctggcgtgatagc

SEQ ID NO: 3010311 - DNA, 25 bp, Homo sapien
gctggcgtgatagcccctcctcgta

SEQ ID NO: 3010312 - DNA, 25 bp, Homo sapien
taaagtcagtgggattctagagagc

SEQ ID NO: 3010313 - DNA, 25 bp, Homo sapien
ggaagcggctttccctaaggcatga

SEQ ID NO: 3010314 - DNA, 25 bp, Homo sapien
gagagctctaagtgtcctgcgtaaa

SEQ ID NO: 3010315 - DNA, 25 bp, Homo sapien
tcaattaaaaccatggcacggaagg

SEQ ID NO: 3010316 - DNA, 25 bp, Homo sapien
cctggtcaatcgaaccagaagtgac

SEQ ID NO: 3010317 - DNA, 25 bp, Homo sapien
ttaaaaagtgacaccacgatcctgg

SEQ ID NO: 3010318 - DNA, 25 bp, Homo sapien
gacaccacgatcctggtcaatcgaa

SEQ ID NO: 3010319 - DNA, 25 bp, Homo sapien
tcgaaccagaagtgaccaggccact

SEQ ID NO: 3010320 - DNA, 25 bp, Homo sapien
gtggctctgcgggaggctgcgtggc

SEQ ID NO: 3010321 - DNA, 25 bp, Homo sapien
gtggatgactgtgcgggtggctctg

SEQ ID NO: 3010322 - DNA, 25 bp, Homo sapien
ctgtggatgactgtgcgggtggctc

SEQ ID NO: 3010323 - DNA, 25 bp, Homo sapien
ggctctgcgggaggctgcgtggcac

SEQ ID NO: 3010324 - DNA, 25 bp, Homo sapien
cagcatgttccggcagcgcagccgc

SEQ ID NO: 3010325 - DNA, 25 bp, Homo sapien
tcctgcttctccgccatgcggttct

SEQ ID NO: 3010326 - DNA, 25 bp, Homo sapien
tcagcatgttccggcagcgcagccg

SEQ ID NO: 3010327 - DNA, 25 bp, Homo sapien
tgcttctccgccatgcggttctcca

SEQ ID NO: 3010328 - DNA, 25 bp, Homo sapien
cgtgagcccgggcacgcacgtagta

SEQ ID NO: 3010329 - DNA, 25 bp, Homo sapien
cgccttctgcatggacggctccagc

SEQ ID NO: 3010330 - DNA, 25 bp, Homo sapien
acgcacgtagtaggccttcacgatg

SEQ ID NO: 3010331 - DNA, 25 bp, Homo sapien
acacctctgcgtgagcccgggcacg

SEQ ID NO: 3010332 - DNA, 25 bp, Homo sapien
tgatcataatagcagtacctcctcc

SEQ ID NO: 3010333 - DNA, 25 bp, Homo sapien
caatactagtactgacggtgccata

SEQ ID NO: 3010334 - DNA, 25 bp, Homo sapien
tttttactgtgagcacgattcgagc

SEQ ID NO: 3010335 - DNA, 25 bp, Homo sapien
taataaacgcagacgacgtgtgcct

SEQ ID NO: 3010336 - DNA, 25 bp, Homo sapien
ggtggagacaaggtttggtgccctg

SEQ ID NO: 3010337 - DNA, 25 bp, Homo sapien
gagacaaggtttggtgccctggtgg

SEQ ID NO: 3010338 - DNA, 25 bp, Homo sapien
aaaagtccaggaaggctatggcagg

SEQ ID NO: 3010339 - DNA, 25 bp, Homo sapien
caggaaggctatggcaggtgtctcc

SEQ ID NO: 3010340 - DNA, 25 bp, Homo sapien
tccagcacctcatagtactcctcct

SEQ ID NO: 3010341 - DNA, 25 bp, Homo sapien
cagtagttgaggatcagagtattga

SEQ ID NO: 3010342 - DNA, 25 bp, Homo sapien
gaatatcactggtgtgctccagcac

SEQ ID NO: 3010343 - DNA, 25 bp, Homo sapien
tggtgccggagaatatcactggtgt

SEQ ID NO: 3010344 - DNA, 25 bp, Homo sapien
ggttccttaggcagatgatggcctc

SEQ ID NO: 3010345 - DNA, 25 bp, Homo sapien
tctcatgattgctcaggttccaggt

SEQ ID NO: 3010346 - DNA, 25 bp, Homo sapien
ttggaagaggcctcctcgtagcggc

SEQ ID NO: 3010347 - DNA, 25 bp, Homo sapien
aggtctccctctggtaatcactcgg

SEQ ID NO: 3010348 - DNA, 25 bp, Homo sapien
cctcgtagcccagcgtgtggtaggc

SEQ ID NO: 3010349 - DNA, 25 bp, Homo sapien
acgtgtgcacgtgccactctgtggg

SEQ ID NO: 3010350 - DNA, 25 bp, Homo sapien
tctgcctcaggctccgggataggat

SEQ ID NO: 3010351 - DNA, 25 bp, Homo sapien
tgtggtaggcgaacatgttggccag

SEQ ID NO: 3010352 - DNA, 25 bp, Homo sapien
cgagcttgaacatgtttccgatgat

SEQ ID NO: 3010353 - DNA, 25 bp, Homo sapien
gcatggaggtaagcaggatctccca

SEQ ID NO: 3010354 - DNA, 25 bp, Homo sapien
ggatctcccagacctcgagcttgaa

SEQ ID NO: 3010355 - DNA, 25 bp, Homo sapien
atgatgatgtgcatgggctggccca

SEQ ID NO: 3010356 - DNA, 25 bp, Homo sapien
ttcatggtgcggaaatgaaagatca

SEQ ID NO: 3010357 - DNA, 25 bp, Homo sapien
atcacatttcatggtgcggaaatga

SEQ ID NO: 3010358 - DNA, 25 bp, Homo sapien
ctcatcacatttcatggtgcggaaa

SEQ ID NO: 3010359 - DNA, 25 bp, Homo sapien
tcatggtgcggaaatgaaagatcac

SEQ ID NO: 3010360 - DNA, 25 bp, Homo sapien
caaagcccgaattctgtagccacag

SEQ ID NO: 3010361 - DNA, 25 bp, Homo sapien
gggacaaataccaagactcctcgga

SEQ ID NO: 3010362 - DNA, 25 bp, Homo sapien
tcactcaacatttagggccccagaa

SEQ ID NO: 3010363 - DNA, 25 bp, Homo sapien
tgaatgggtaaacgctgggagctcc

SEQ ID NO: 3010364 - DNA, 25 bp, Homo sapien
cccgtgcccccgtgcagaatggttt

SEQ ID NO: 3010365 - DNA, 25 bp, Homo sapien
gaagtttgggagctcgcccgtgccc

SEQ ID NO: 3010366 - DNA, 25 bp, Homo sapien
gtgatgaagtttgggagctcgcccg

SEQ ID NO: 3010367 - DNA, 25 bp, Homo sapien
tcttgaccccttccacgttcaggag

SEQ ID NO: 3010368 - DNA, 25 bp, Homo sapien
ggtgtccagcacaggcggagataat

SEQ ID NO: 3010369 - DNA, 25 bp, Homo sapien
ggaagacacttaggcggctgagact

SEQ ID NO: 3010370 - DNA, 25 bp, Homo sapien
acacttaggcggctgagactctggg

SEQ ID NO: 3010371 - DNA, 25 bp, Homo sapien
aggcggagataatctcacctccggg

SEQ ID NO: 3010372 - DNA, 25 bp, Homo sapien
gaggacaagagcacgcacatcagct

SEQ ID NO: 3010373 - DNA, 25 bp, Homo sapien
tggtttccctgctgagaagaatgag

SEQ ID NO: 3010374 - DNA, 25 bp, Homo sapien
tgaggattcactcctggtctgtgcc

SEQ ID NO: 3010375 - DNA, 25 bp, Homo sapien
gaactgatagatgtagcctgtagct

SEQ ID NO: 3010376 - DNA, 25 bp, Homo sapien
tctttgaagtcctttgagccctttc

SEQ ID NO: 3010377 - DNA, 25 bp, Homo sapien
gctttccataatagctttgtccaca

SEQ ID NO: 3010378 - DNA, 25 bp, Homo sapien
agtaaacatccatgtggccaccacc

SEQ ID NO: 3010379 - DNA, 25 bp, Homo sapien
gacttaagttacaccatctggctac

SEQ ID NO: 3010380 - DNA, 25 bp, Homo sapien
cttgggcttcgctccaaacactggg

SEQ ID NO: 3010381 - DNA, 25 bp, Homo sapien
actgggctctggcttgtcaaggcaa

SEQ ID NO: 3010382 - DNA, 25 bp, Homo sapien
cagaagccattaggatgaacagacc

SEQ ID NO: 3010383 - DNA, 25 bp, Homo sapien
tgcatctttaaacccagagctggag

SEQ ID NO: 3010384 - DNA, 25 bp, Homo sapien
tatttaagtgacaacatttgagagc

SEQ ID NO: 3010385 - DNA, 25 bp, Homo sapien
tgccaccaccaagtaaacaactaga

SEQ ID NO: 3010386 - DNA, 25 bp, Homo sapien
ggaacagtcagaccacagacaaggt

SEQ ID NO: 3010387 - DNA, 25 bp, Homo sapien
taacggattttgtacaaggcagcca

SEQ ID NO: 3010388 - DNA, 25 bp, Homo sapien
tacacagttgccgtgaaagcagtac

SEQ ID NO: 3010389 - DNA, 25 bp, Homo sapien
taaaaaccgtgagatccagcctcgc

SEQ ID NO: 3010390 - DNA, 25 bp, Homo sapien
gagggccgttcatcccaatgcatga

SEQ ID NO: 3010391 - DNA, 25 bp, Homo sapien
gatcgggaagaacaaacatgccacg

SEQ ID NO: 3010392 - DNA, 25 bp, Homo sapien
cccccgctccctgctctgagcacag

SEQ ID NO: 3010393 - DNA, 25 bp, Homo sapien
gctccctgctctgagcacagcccac

SEQ ID NO: 3010394 - DNA, 25 bp, Homo sapien
cgctccctgctctgagcacagccca

SEQ ID NO: 3010395 - DNA, 25 bp, Homo sapien
cccgctccctgctctgagcacagcc

SEQ ID NO: 3010396 - DNA, 25 bp, Homo sapien
tgcactgacatggttctgcgcaggt

SEQ ID NO: 3010397 - DNA, 25 bp, Homo sapien
tgcccttgcgcaggatcatgcgcga

SEQ ID NO: 3010398 - DNA, 25 bp, Homo sapien
caggtggttgcgcttccgcaggaac

SEQ ID NO: 3010399 - DNA, 25 bp, Homo sapien
tcgtggtctttgtccgactcgggct

SEQ ID NO: 3010400 - DNA, 25 bp, Homo sapien
ggcaggcccagcacgctgtagacag

SEQ ID NO: 3010401 - DNA, 25 bp, Homo sapien
cataggccgcactgattttgatgaa

SEQ ID NO: 3010402 - DNA, 25 bp, Homo sapien
acagagatgtccttcgtggagccat

SEQ ID NO: 3010403 - DNA, 25 bp, Homo sapien
cactgggtttggtacttcttggtgg

SEQ ID NO: 3010404 - DNA, 25 bp, Homo sapien
ccgagtttccgagtttcctggtgct

SEQ ID NO: 3010405 - DNA, 25 bp, Homo sapien
gaggcagggcagataatttgcactt

SEQ ID NO: 3010406 - DNA, 25 bp, Homo sapien
cctggtgctgctagtgggaaccata

SEQ ID NO: 3010407 - DNA, 25 bp, Homo sapien
tatgtcaacgcctcttctgctctag

SEQ ID NO: 3010408 - DNA, 25 bp, Homo sapien
catgtccggccgtcccgtgatgtaa

SEQ ID NO: 3010409 - DNA, 25 bp, Homo sapien
gaagaagatcatgccctgtgggaag

SEQ ID NO: 3010410 - DNA, 25 bp, Homo sapien
cgtgatgtaaaggatcatgtagccc

SEQ ID NO: 3010411 - DNA, 25 bp, Homo sapien
gcaccagcccatcggagaagaagat

SEQ ID NO: 3010412 - DNA, 25 bp, Homo sapien
catggtgattcctgtacatcgcaaa

SEQ ID NO: 3010413 - DNA, 25 bp, Homo sapien
tcaggtaagcccagacctggttggg

SEQ ID NO: 3010414 - DNA, 25 bp, Homo sapien
tctcacagtgcagtgggatagctct

SEQ ID NO: 3010415 - DNA, 25 bp, Homo sapien
ggttgggcacctttatggcacctgc

SEQ ID NO: 3010416 - DNA, 25 bp, Homo sapien
caccgtgaggtagctcatggcacag

SEQ ID NO: 3010417 - DNA, 25 bp, Homo sapien
ccgcgaaggacccatcaatgctgaa

SEQ ID NO: 3010418 - DNA, 25 bp, Homo sapien
aatgctgaacactacacactccatg

SEQ ID NO: 3010419 - DNA, 25 bp, Homo sapien
atgatagacacgctggccgcgaagg

SEQ ID NO: 3010420 - DNA, 25 bp, Homo sapien
gcggcctgaggatggctctgccatt

SEQ ID NO: 3010421 - DNA, 25 bp, Homo sapien
tctgtgtccaggtgtacccagcggc

SEQ ID NO: 3010422 - DNA, 25 bp, Homo sapien
tatgtgatgcgaccactgctgttgg

SEQ ID NO: 3010423 - DNA, 25 bp, Homo sapien
tgacgaccatcttcacaggatagac

SEQ ID NO: 3010424 - DNA, 25 bp, Homo sapien
ccaccatgtcgaggggcccgtacat

SEQ ID NO: 3010425 - DNA, 25 bp, Homo sapien
tggcccggtgattagccgtgacatt

SEQ ID NO: 3010426 - DNA, 25 bp, Homo sapien
gcaatcacatcattggcccggtgat

SEQ ID NO: 3010427 - DNA, 25 bp, Homo sapien
cagcagcaatcacatcattggcccg

SEQ ID NO: 3010428 - DNA, 25 bp, Homo sapien
gcttatcttccagatccccgggctg

SEQ ID NO: 3010429 - DNA, 25 bp, Homo sapien
accgtgcctggcccgttctctgttt

SEQ ID NO: 3010430 - DNA, 25 bp, Homo sapien
tgttttgactctgctcggccctgag

SEQ ID NO: 3010431 - DNA, 25 bp, Homo sapien
ggcctcacagcctgtgcttatcttc

SEQ ID NO: 3010432 - DNA, 25 bp, Homo sapien
tgagtccgcttacgaagccacttct

SEQ ID NO: 3010433 - DNA, 25 bp, Homo sapien
tgatgttcacgctctcatagcgcat

SEQ ID NO: 3010434 - DNA, 25 bp, Homo sapien
cctcagcttgacctgagtccgctta

SEQ ID NO: 3010435 - DNA, 25 bp, Homo sapien
ttctcccgggggttggcaggactca

SEQ ID NO: 3010436 - DNA, 25 bp, Homo sapien
ggcatagtcgatcctcttgcttccc

SEQ ID NO: 3010437 - DNA, 25 bp, Homo sapien
gggcatagtcgatcctcttgcttcc

SEQ ID NO: 3010438 - DNA, 25 bp, Homo sapien
agggcatagtcgatcctcttgcttc

SEQ ID NO: 3010439 - DNA, 25 bp, Homo sapien
cagggcatagtcgatcctcttgctt

SEQ ID NO: 3010440 - DNA, 25 bp, Homo sapien
gtgccatgctgtccgaggactccga

SEQ ID NO: 3010441 - DNA, 25 bp, Homo sapien
cgaggactccgagctctcgctgtgg

SEQ ID NO: 3010442 - DNA, 25 bp, Homo sapien
acccacgggtgccatgctgtccgag

SEQ ID NO: 3010443 - DNA, 25 bp, Homo sapien
tcatcctccgtcctgggcgctggaa

SEQ ID NO: 3010444 - DNA, 25 bp, Homo sapien
gcagtggctcgagccgtgaggcaga

SEQ ID NO: 3010445 - DNA, 25 bp, Homo sapien
ggaagaagctgtagacctggctgca

SEQ ID NO: 3010446 - DNA, 25 bp, Homo sapien
cctctggtagcgaggcacgctgaca

SEQ ID NO: 3010447 - DNA, 25 bp, Homo sapien
gggactgcccatcgcccagtgggaa

SEQ ID NO: 3010448 - DNA, 25 bp, Homo sapien
accgtcctccgcatggccaggacca

SEQ ID NO: 3010449 - DNA, 25 bp, Homo sapien
ccgaagaggaagaagtcggacacat

SEQ ID NO: 3010450 - DNA, 25 bp, Homo sapien
tcggacacatcgaagtcaaagcggc

SEQ ID NO: 3010451 - DNA, 25 bp, Homo sapien
atcgaagtcaaagcggcccaggctg

SEQ ID NO: 3010452 - DNA, 25 bp, Homo sapien
tgtttccgcggcaacggcctcttgg

SEQ ID NO: 3010453 - DNA, 25 bp, Homo sapien
ctgggtgatggcctcgcagtcatag

SEQ ID NO: 3010454 - DNA, 25 bp, Homo sapien
cactggagatgtcaatgttgctttt

SEQ ID NO: 3010455 - DNA, 25 bp, Homo sapien
tcataggtggaggagtcgctctgtt

SEQ ID NO: 3010456 - DNA, 25 bp, Homo sapien
ctcccgcggtcctgtcccccggctg

SEQ ID NO: 3010457 - DNA, 25 bp, Homo sapien
ccgcactgtagcagatggcatcgaa

SEQ ID NO: 3010458 - DNA, 25 bp, Homo sapien
tgctgatgctccccttccggctgct

SEQ ID NO: 3010459 - DNA, 25 bp, Homo sapien
ctgagggccccgcactgtagcagat

SEQ ID NO: 3010460 - DNA, 25 bp, Homo sapien
gggccccgcactgtagcagatggca

SEQ ID NO: 3010461 - DNA, 25 bp, Homo sapien
cactgaagccaatcccatcagagga

SEQ ID NO: 3010462 - DNA, 25 bp, Homo sapien
ggcggccagagggacgtggtcctgg

SEQ ID NO: 3010463 - DNA, 25 bp, Homo sapien
cgctcgatgacggtggcgacagcat

SEQ ID NO: 3010464 - DNA, 25 bp, Homo sapien
tctctgtagacctggttggctcgct

SEQ ID NO: 3010465 - DNA, 25 bp, Homo sapien
gccaggatcgggcaggttggcaggt

SEQ ID NO: 3010466 - DNA, 25 bp, Homo sapien
gcccagccaggatcgggcaggttgg

SEQ ID NO: 3010467 - DNA, 25 bp, Homo sapien
gctccagggacccttcaggaagacc

SEQ ID NO: 3010468 - DNA, 25 bp, Homo sapien
cagccaggatcgggcaggttggcag

SEQ ID NO: 3010469 - DNA, 25 bp, Homo sapien
cccagctccggagccccggggtatg

SEQ ID NO: 3010470 - DNA, 25 bp, Homo sapien
gcagccccaagtctctggcgaggtc

SEQ ID NO: 3010471 - DNA, 25 bp, Homo sapien
ccccggggtatgagggctctgcctg

SEQ ID NO: 3010472 - DNA, 25 bp, Homo sapien
tgcagcagccccaagtctctggcga

SEQ ID NO: 3010473 - DNA, 25 bp, Homo sapien
tcaggcttgttgaacactggaagtg

SEQ ID NO: 3010474 - DNA, 25 bp, Homo sapien
tggaagtggatcaagatttcatggg

SEQ ID NO: 3010475 - DNA, 25 bp, Homo sapien
cccggccaacactcagtgtctttat

SEQ ID NO: 3010476 - DNA, 25 bp, Homo sapien
tctgggccaaacagatcaggcttgt

SEQ ID NO: 3010477 - DNA, 25 bp, Homo sapien
ggcaggacaggggacgaacttgatg

SEQ ID NO: 3010478 - DNA, 25 bp, Homo sapien
aaagcctcagagcagatggcaggac

SEQ ID NO: 3010479 - DNA, 25 bp, Homo sapien
gacaggggacgaacttgatgaggat

SEQ ID NO: 3010480 - DNA, 25 bp, Homo sapien
tgagagacaagcgagaaagcctcag

SEQ ID NO: 3010481 - DNA, 25 bp, Homo sapien
tgtcttgcaggagcgctgcgggcag

SEQ ID NO: 3010482 - DNA, 25 bp, Homo sapien
gatgtttcccccatgcaggaccagc

SEQ ID NO: 3010483 - DNA, 25 bp, Homo sapien
gcaggaggacatgtgtcttgcagga

SEQ ID NO: 3010484 - DNA, 25 bp, Homo sapien
gctgaaggtgtggatgtcggctgcc

SEQ ID NO: 3010485 - DNA, 25 bp, Homo sapien
ggctgggaacctctgtcttctcaag

SEQ ID NO: 3010486 - DNA, 25 bp, Homo sapien
tgtcttctcaaggaaacccggtaca

SEQ ID NO: 3010487 - DNA, 25 bp, Homo sapien
tgtcttcgtggatctcgatgcttcc

SEQ ID NO: 3010488 - DNA, 25 bp, Homo sapien
ctcgctgtcttcgtggatctcgatg

SEQ ID NO: 3010489 - DNA, 25 bp, Homo sapien
atgctgagggcccactggctaaagc

SEQ ID NO: 3010490 - DNA, 25 bp, Homo sapien
actggctaaagccaaacactcagtc

SEQ ID NO: 3010491 - DNA, 25 bp, Homo sapien
tggctaaagccaaacactcagtctc

SEQ ID NO: 3010492 - DNA, 25 bp, Homo sapien
gctgagggcccactggctaaagcca

SEQ ID NO: 3010493 - DNA, 25 bp, Homo sapien
tctgctctaatgtgtggacgtggct

SEQ ID NO: 3010494 - DNA, 25 bp, Homo sapien
actagggttgggactctgtggacca

SEQ ID NO: 3010495 - DNA, 25 bp, Homo sapien
ttcaagggccacaatagacaggtct

SEQ ID NO: 3010496 - DNA, 25 bp, Homo sapien
acaggcagggtccaacttcaagggc

SEQ ID NO: 3010497 - DNA, 25 bp, Homo sapien
cccctgaagggctttgtctatgaaa

SEQ ID NO: 3010498 - DNA, 25 bp, Homo sapien
tgaagggctttgtctatgaaattgc

SEQ ID NO: 3010499 - DNA, 25 bp, Homo sapien
cagcccctgaagggctttgtctatg

SEQ ID NO: 3010500 - DNA, 25 bp, Homo sapien
aagggctttgtctatgaaattgcca

SEQ ID NO: 3010501 - DNA, 25 bp, Homo sapien
atgctggatgtgcacggcgcggtcc

SEQ ID NO: 3010502 - DNA, 25 bp, Homo sapien
ggatgtgcacggcgcggtcccttct

SEQ ID NO: 3010503 - DNA, 25 bp, Homo sapien
ggaggatgctggatgtgcacggcgc

SEQ ID NO: 3010504 - DNA, 25 bp, Homo sapien
aggatgctggatgtgcacggcgcgg

SEQ ID NO: 3010505 - DNA, 25 bp, Homo sapien
tccagtctaagaacctcctccatct

SEQ ID NO: 3010506 - DNA, 25 bp, Homo sapien
tctcacatgaaacttctccaggtgt

SEQ ID NO: 3010507 - DNA, 25 bp, Homo sapien
cagggcctggtagatgactcctctc

SEQ ID NO: 3010508 - DNA, 25 bp, Homo sapien
gattcattagaatccatcaccctgt

SEQ ID NO: 3010509 - DNA, 25 bp, Homo sapien
tctattttagaagtgtcgtggtagg

SEQ ID NO: 3010510 - DNA, 25 bp, Homo sapien
caatttcgtggcagaatgataggac

SEQ ID NO: 3010511 - DNA, 25 bp, Homo sapien
atggtaaactgactacacgatctag

SEQ ID NO: 3010512 - DNA, 25 bp, Homo sapien
ctgactacacgatctagtctttttc

SEQ ID NO: 3010513 - DNA, 25 bp, Homo sapien
caaagacctggcagtccaaggagct

SEQ ID NO: 3010514 - DNA, 25 bp, Homo sapien
cagtccaaggagcttggacccaggc

SEQ ID NO: 3010515 - DNA, 25 bp, Homo sapien
gattccaataccaaagacctggcag

SEQ ID NO: 3010516 - DNA, 25 bp, Homo sapien
tcagcagattccaataccaaagacc

SEQ ID NO: 3010517 - DNA, 25 bp, Homo sapien
taggctggagcttttatgccacaga

SEQ ID NO: 3010518 - DNA, 25 bp, Homo sapien
aaaaccccacagaagtccccatgag

SEQ ID NO: 3010519 - DNA, 25 bp, Homo sapien
ccatgagagttcctgtaagtggcaa

SEQ ID NO: 3010520 - DNA, 25 bp, Homo sapien
cactggggtagtcattctgtggaca

SEQ ID NO: 3010521 - DNA, 25 bp, Homo sapien
ttgatgctcgtccagtttccccatg

SEQ ID NO: 3010522 - DNA, 25 bp, Homo sapien
tcgatctgctccacgaggtcattgg

SEQ ID NO: 3010523 - DNA, 25 bp, Homo sapien
gagttccactggctcatcccaatga

SEQ ID NO: 3010524 - DNA, 25 bp, Homo sapien
gctccacgaggtcattggagttcca

SEQ ID NO: 3010525 - DNA, 25 bp, Homo sapien
tcactgaggacatttcgaaggtgcc

SEQ ID NO: 3010526 - DNA, 25 bp, Homo sapien
actgaggacatttcgaaggtgccag

SEQ ID NO: 3010527 - DNA, 25 bp, Homo sapien
cactgaggacatttcgaaggtgcca

SEQ ID NO: 3010528 - DNA, 25 bp, Homo sapien
ttcatggcttggagcccagtaagaa

SEQ ID NO: 3010529 - DNA, 25 bp, Homo sapien
tggcttggagcccagtaagaagcac

SEQ ID NO: 3010530 - DNA, 25 bp, Homo sapien
catggcttggagcccagtaagaagc

SEQ ID NO: 3010531 - DNA, 25 bp, Homo sapien
tcatggcttggagcccagtaagaag

SEQ ID NO: 3010532 - DNA, 25 bp, Homo sapien
gatggacaggcgtctcctatgtgtg

SEQ ID NO: 3010533 - DNA, 25 bp, Homo sapien
tctccctagcatgggtgcagccaaa

SEQ ID NO: 3010534 - DNA, 25 bp, Homo sapien
cccactcagggacataggactaggt

SEQ ID NO: 3010535 - DNA, 25 bp, Homo sapien
agaaacaaatgacccttcaccccag

SEQ ID NO: 3010536 - DNA, 25 bp, Homo sapien
caaaggctggaaatgcttgcccctg

SEQ ID NO: 3010537 - DNA, 25 bp, Homo sapien
tacatagtgtcgcagtgaggattac

SEQ ID NO: 3010538 - DNA, 25 bp, Homo sapien
tccatcagtgctataaaagggcgtg

SEQ ID NO: 3010539 - DNA, 25 bp, Homo sapien
tccgtggcaacttccaagggcagac

SEQ ID NO: 3010540 - DNA, 25 bp, Homo sapien
tcagctccccatggaatgactgacc

SEQ ID NO: 3010541 - DNA, 25 bp, Homo sapien
aggaggcacgtgctctccacgtcca

SEQ ID NO: 3010542 - DNA, 25 bp, Homo sapien
tcctggctgcagacctggtgatggc

SEQ ID NO: 3010543 - DNA, 25 bp, Homo sapien
cccatggaatgactgaccctcaagt

SEQ ID NO: 3010544 - DNA, 25 bp, Homo sapien
tgagagctgctataggatctgagcc

SEQ ID NO: 3010545 - DNA, 25 bp, Homo sapien
cgttagacaagttagctcccaggaa

SEQ ID NO: 3010546 - DNA, 25 bp, Homo sapien
caaatgggtcccagcatgcgaactc

SEQ ID NO: 3010547 - DNA, 25 bp, Homo sapien
gaataacattggctctacctcagag

SEQ ID NO: 3010548 - DNA, 25 bp, Homo sapien
gacacacagcccgatggtattcaca

SEQ ID NO: 3010549 - DNA, 25 bp, Homo sapien
cctgcacagggagacgggtccgcag

SEQ ID NO: 3010550 - DNA, 25 bp, Homo sapien
cttgggggtggattgacacacagcc

SEQ ID NO: 3010551 - DNA, 25 bp, Homo sapien
ggtattcacacccattccttcactg

SEQ ID NO: 3010552 - DNA, 25 bp, Homo sapien
cggcgctacgcgcgctcctcgcgct

SEQ ID NO: 3010553 - DNA, 25 bp, Homo sapien
cccgaacggactccgagcgccgcgc

SEQ ID NO: 3010554 - DNA, 25 bp, Homo sapien
acgcgcgctcctcgcgcttcccggg

SEQ ID NO: 3010555 - DNA, 25 bp, Homo sapien
gccccgaacggactccgagcgccgc

SEQ ID NO: 3010556 - DNA, 25 bp, Homo sapien
ccaccaccgtcttatgtgtgatttc

SEQ ID NO: 3010557 - DNA, 25 bp, Homo sapien
cttcaccctcaaggcagatgctgta

SEQ ID NO: 3010558 - DNA, 25 bp, Homo sapien
tggccaccaccgtcttatgtgtgat

SEQ ID NO: 3010559 - DNA, 25 bp, Homo sapien
gatcccgtgggatcacctggatcca

SEQ ID NO: 3010560 - DNA, 25 bp, Homo sapien
ggctgtgctatccaggtcccagaga

SEQ ID NO: 3010561 - DNA, 25 bp, Homo sapien
agctgtggctgtgctatccaggtcc

SEQ ID NO: 3010562 - DNA, 25 bp, Homo sapien
aaaccaacatggcagtgtcagaaga

SEQ ID NO: 3010563 - DNA, 25 bp, Homo sapien
caaataatccactatagtcatatca

SEQ ID NO: 3010564 - DNA, 25 bp, Homo sapien
taaaagtattctcagtggtttctgt

SEQ ID NO: 3010565 - DNA, 25 bp, Homo sapien
ccactatagtcatatcacatataaa

SEQ ID NO: 3010566 - DNA, 25 bp, Homo sapien
tataaaagtattctcagtggtttct

SEQ ID NO: 3010567 - DNA, 25 bp, Homo sapien
gagatgtaagttatttaaaataggc

SEQ ID NO: 3010568 - DNA, 25 bp, Homo sapien
aggagatgtaagttatttaaaatag

SEQ ID NO: 3010569 - DNA, 25 bp, Homo sapien
atgtaagttatttaaaataggcaca

SEQ ID NO: 3010570 - DNA, 25 bp, Homo sapien
ctgtgggaaaaaaaggagatgtaag

SEQ ID NO: 3010571 - DNA, 25 bp, Homo sapien
taaaaactcagcacagtacaaactg

SEQ ID NO: 3010572 - DNA, 25 bp, Homo sapien
aagtgtacacatttaactccccagg

SEQ ID NO: 3010573 - DNA, 25 bp, Homo sapien
ttatactagcaacaaccggtgctcc

SEQ ID NO: 3010574 - DNA, 25 bp, Homo sapien
cggtgctcctattaattcaagtgta

SEQ ID NO: 3010575 - DNA, 25 bp, Homo sapien
tcaatgccagcaagggttcaacagc

SEQ ID NO: 3010576 - DNA, 25 bp, Homo sapien
gagacacttctgacctcatcggaga

SEQ ID NO: 3010577 - DNA, 25 bp, Homo sapien
tacagcctagtagggccagaggtcc

SEQ ID NO: 3010578 - DNA, 25 bp, Homo sapien
tttcatcaccaaactgagccagagg

SEQ ID NO: 3010579 - DNA, 25 bp, Homo sapien
gcataatcttcgcacatatcctgaa

SEQ ID NO: 3010580 - DNA, 25 bp, Homo sapien
ttatgtagcagcctctaagaattct

SEQ ID NO: 3010581 - DNA, 25 bp, Homo sapien
cagcacccagagcttcatctaccag

SEQ ID NO: 3010582 - DNA, 25 bp, Homo sapien
taatcttcgcacatatcctgaagtt

SEQ ID NO: 3010583 - DNA, 25 bp, Homo sapien
actaaaggtatgtacaaggccaggc

SEQ ID NO: 3010584 - DNA, 25 bp, Homo sapien
caacacaactaaaggtatgtacaag

SEQ ID NO: 3010585 - DNA, 25 bp, Homo sapien
cacaactaaaggtatgtacaaggcc

SEQ ID NO: 3010586 - DNA, 25 bp, Homo sapien
agacaaacaacacaactaaaggtat

SEQ ID NO: 3010587 - DNA, 25 bp, Homo sapien
gaaggatggtggtgcttagatccca

SEQ ID NO: 3010588 - DNA, 25 bp, Homo sapien
tgtttgaaaccagaggcgaccagaa

SEQ ID NO: 3010589 - DNA, 25 bp, Homo sapien
tagatcccaaagtcctgctagaggg

SEQ ID NO: 3010590 - DNA, 25 bp, Homo sapien
agaaaaacaaggtgagaggccctgc

SEQ ID NO: 3010591 - DNA, 25 bp, Homo sapien
tacacacgcatccataaaacatcag

SEQ ID NO: 3010592 - DNA, 25 bp, Homo sapien
taattggcatgtaaggtcctttttc

SEQ ID NO: 3010593 - DNA, 25 bp, Homo sapien
tgcaagaaccttagaatacgaactc

SEQ ID NO: 3010594 - DNA, 25 bp, Homo sapien
agtatccatgacttgacgtctaaca

SEQ ID NO: 3010595 - DNA, 25 bp, Homo sapien
tccacggtagagtctaagtttacta

SEQ ID NO: 3010596 - DNA, 25 bp, Homo sapien
gctctttcccactactctaatctgg

SEQ ID NO: 3010597 - DNA, 25 bp, Homo sapien
gtggaaccatccctgctggagtgct

SEQ ID NO: 3010598 - DNA, 25 bp, Homo sapien
cttgcattggtaatctagatcttcc

SEQ ID NO: 3010599 - DNA, 25 bp, Homo sapien
ttttaccctctggaatcttttgtca

SEQ ID NO: 3010600 - DNA, 25 bp, Homo sapien
tctagcttctggtgttattaaaaac

SEQ ID NO: 3010601 - DNA, 25 bp, Homo sapien
gagcacatgctaggttaaattttgg

SEQ ID NO: 3010602 - DNA, 25 bp, Homo sapien
ggaagtaggctctaatatcttctag

SEQ ID NO: 3010603 - DNA, 25 bp, Homo sapien
gcctgtgctgttttacggttccctg

SEQ ID NO: 3010604 - DNA, 25 bp, Homo sapien
gaggtccctcaatgggatcagtgcc

SEQ ID NO: 3010605 - DNA, 25 bp, Homo sapien
taagtcacgcagtcgatggtattct

SEQ ID NO: 3010606 - DNA, 25 bp, Homo sapien
tgcagagcacccctgtggatggcac

SEQ ID NO: 3010607 - DNA, 25 bp, Homo sapien
aaggtactgctcaaaacgactacag

SEQ ID NO: 3010608 - DNA, 25 bp, Homo sapien
tcagctatcagccacgggttgaagg

SEQ ID NO: 3010609 - DNA, 25 bp, Homo sapien
gctgtgctgcatacccggtgggaca

SEQ ID NO: 3010610 - DNA, 25 bp, Homo sapien
cagcctcatgagatatgatccgaag

SEQ ID NO: 3010611 - DNA, 25 bp, Homo sapien
ttgagaatcttcggctagggagaga

SEQ ID NO: 3010612 - DNA, 25 bp, Homo sapien
ctgttgagaatcttcggctagggag

SEQ ID NO: 3010613 - DNA, 25 bp, Homo sapien
agaatcttcggctagggagagaaga

SEQ ID NO: 3010614 - DNA, 25 bp, Homo sapien
tgttgagaatcttcggctagggaga

SEQ ID NO: 3010615 - DNA, 25 bp, Homo sapien
cttgcgatccactgtcttcgtgatt

SEQ ID NO: 3010616 - DNA, 25 bp, Homo sapien
ggatccttgcgatccactgtcttcg

SEQ ID NO: 3010617 - DNA, 25 bp, Homo sapien
ttgccattacagggcctttctaaca

SEQ ID NO: 3010618 - DNA, 25 bp, Homo sapien
taacatgatgttcacggctggatcc

SEQ ID NO: 3010619 - DNA, 25 bp, Homo sapien
ggatgaggagatagaggcttttcac

SEQ ID NO: 3010620 - DNA, 25 bp, Homo sapien
tgaggagatagaggcttttcactta

SEQ ID NO: 3010621 - DNA, 25 bp, Homo sapien
ttggatgaggagatagaggcttttc

SEQ ID NO: 3010622 - DNA, 25 bp, Homo sapien
ggagatagaggcttttcacttattg

SEQ ID NO: 3010623 - DNA, 25 bp, Homo sapien
tattatatctttgacgaacagactc

SEQ ID NO: 3010624 - DNA, 25 bp, Homo sapien
tctttgacgaacagactcctggtat

SEQ ID NO: 3010625 - DNA, 25 bp, Homo sapien
cgaggatcagcatatgcgattttat

SEQ ID NO: 3010626 - DNA, 25 bp, Homo sapien
catccaaagtcgaggatcagcatat

SEQ ID NO: 3010627 - DNA, 25 bp, Homo sapien
tgtcctcaacggtggctaaggtttc

SEQ ID NO: 3010628 - DNA, 25 bp, Homo sapien
tcaacggtggctaaggtttcagacc

SEQ ID NO: 3010629 - DNA, 25 bp, Homo sapien
catctcttccattcggcgcatcatg

SEQ ID NO: 3010630 - DNA, 25 bp, Homo sapien
tcggcgcatcatgatctccagatct

SEQ ID NO: 3010631 - DNA, 25 bp, Homo sapien
gaatgttgttggattcaaaatcaac

SEQ ID NO: 3010632 - DNA, 25 bp, Homo sapien
ccaaaaaatcatcaagctgacgaat

SEQ ID NO: 3010633 - DNA, 25 bp, Homo sapien
caagctgacgaatgttgttggattc

SEQ ID NO: 3010634 - DNA, 25 bp, Homo sapien
tcatcaagctgacgaatgttgttgg

SEQ ID NO: 3010635 - DNA, 25 bp, Homo sapien
tgcccctaaggtcactgggccaatg

SEQ ID NO: 3010636 - DNA, 25 bp, Homo sapien
ctgggccaatggagcttcattccaa

SEQ ID NO: 3010637 - DNA, 25 bp, Homo sapien
ggtcactgggccaatggagcttcat

SEQ ID NO: 3010638 - DNA, 25 bp, Homo sapien
cctaaggtcactgggccaatggagc

SEQ ID NO: 3010639 - DNA, 25 bp, Homo sapien
tgtgtttactgacgagccatctttc

SEQ ID NO: 3010640 - DNA, 25 bp, Homo sapien
ctttcgctgtgtttactgacgagcc

SEQ ID NO: 3010641 - DNA, 25 bp, Homo sapien
tgacgagccatctttcaaatgaata

SEQ ID NO: 3010642 - DNA, 25 bp, Homo sapien
caggctgggctttcgctgtgtttac

SEQ ID NO: 3010643 - DNA, 25 bp, Homo sapien
aaacgatccagaactgcctcctcta

SEQ ID NO: 3010644 - DNA, 25 bp, Homo sapien
caagagaggcttcaaacgatccaga

SEQ ID NO: 3010645 - DNA, 25 bp, Homo sapien
tgtctgctaagtgggtggcagaaac

SEQ ID NO: 3010646 - DNA, 25 bp, Homo sapien
gccttgaccaagagaggcttcaaac

SEQ ID NO: 3010647 - DNA, 25 bp, Homo sapien
cacattcagggtggtatggccgtag

SEQ ID NO: 3010648 - DNA, 25 bp, Homo sapien
agacgagatcgggcacattcagggt

SEQ ID NO: 3010649 - DNA, 25 bp, Homo sapien
ggcacattcagggtggtatggccgt

SEQ ID NO: 3010650 - DNA, 25 bp, Homo sapien
cattcagggtggtatggccgtagac

SEQ ID NO: 3010651 - DNA, 25 bp, Homo sapien
cagctttgagctcattcagttcctt

SEQ ID NO: 3010652 - DNA, 25 bp, Homo sapien
ttcagctttgagctcattcagttcc

SEQ ID NO: 3010653 - DNA, 25 bp, Homo sapien
ctcaattgttggagtctatacattt

SEQ ID NO: 3010654 - DNA, 25 bp, Homo sapien
gttggagtctatacatttcttcagc

SEQ ID NO: 3010655 - DNA, 25 bp, Homo sapien
ggaagtttcagcatcaagccaagcg

SEQ ID NO: 3010656 - DNA, 25 bp, Homo sapien
ctgtttttgcatgctgtcaatttcc

SEQ ID NO: 3010657 - DNA, 25 bp, Homo sapien
tgcatgctgtcaatttccttggctt

SEQ ID NO: 3010658 - DNA, 25 bp, Homo sapien
gcttttaactcttctagttccttca

SEQ ID NO: 3010659 - DNA, 25 bp, Homo sapien
catctctggggctagttttcacctt

SEQ ID NO: 3010660 - DNA, 25 bp, Homo sapien
gctggagaggctcttttgtggcatc

SEQ ID NO: 3010661 - DNA, 25 bp, Homo sapien
gcttcatgctcaacagcacctgtca

SEQ ID NO: 3010662 - DNA, 25 bp, Homo sapien
ggagaggctcttttgtggcatctct

SEQ ID NO: 3010663 - DNA, 25 bp, Homo sapien
ctggatgaaactgttgtctgctgca

SEQ ID NO: 3010664 - DNA, 25 bp, Homo sapien
tccatggtgccttgcggtctttcac

SEQ ID NO: 3010665 - DNA, 25 bp, Homo sapien
tactgtgaggttggctttgtctacc

SEQ ID NO: 3010666 - DNA, 25 bp, Homo sapien
caggctgccggttcatttttaatct

SEQ ID NO: 3010667 - DNA, 25 bp, Homo sapien
taaacggcacattctcagtcacagg

SEQ ID NO: 3010668 - DNA, 25 bp, Homo sapien
taacacctcgtctttgaagcttgca

SEQ ID NO: 3010669 - DNA, 25 bp, Homo sapien
tgctggcgccagagtatctttcttc

SEQ ID NO: 3010670 - DNA, 25 bp, Homo sapien
ccggaagctccgtatcgggctgata

SEQ ID NO: 3010671 - DNA, 25 bp, Homo sapien
ccttgacctggatagtagttataca

SEQ ID NO: 3010672 - DNA, 25 bp, Homo sapien
gataaacattggaaggggtaactca

SEQ ID NO: 3010673 - DNA, 25 bp, Homo sapien
ggtaatttcttagatgccggtaata

SEQ ID NO: 3010674 - DNA, 25 bp, Homo sapien
gttttctggtaattaattcagctat

SEQ ID NO: 3010675 - DNA, 25 bp, Homo sapien
gaaggtcgacttgtttcctgtggga

SEQ ID NO: 3010676 - DNA, 25 bp, Homo sapien
aatctgctccgaatttcactgaaac

SEQ ID NO: 3010677 - DNA, 25 bp, Homo sapien
gaagctgctttgctacagaaggtcg

SEQ ID NO: 3010678 - DNA, 25 bp, Homo sapien
tggctaccgataggaaatctgctcc

SEQ ID NO: 3010679 - DNA, 25 bp, Homo sapien
gaaatacgataatacagactacact

SEQ ID NO: 3010680 - DNA, 25 bp, Homo sapien
taatggctttgtcttgtattctcca

SEQ ID NO: 3010681 - DNA, 25 bp, Homo sapien
tctgcaaagctttaattcactaggt

SEQ ID NO: 3010682 - DNA, 25 bp, Homo sapien
caagttaccaattttcgaagcagtg

SEQ ID NO: 3010683 - DNA, 25 bp, Homo sapien
gaagggtctgcatccagcttgacag

SEQ ID NO: 3010684 - DNA, 25 bp, Homo sapien
taaggcccgaatggctcctcgatgg

SEQ ID NO: 3010685 - DNA, 25 bp, Homo sapien
tggatgctcccctcggtcagtaaac

SEQ ID NO: 3010686 - DNA, 25 bp, Homo sapien
tgaaagctggcgaataaggctgccc

SEQ ID NO: 3010687 - DNA, 25 bp, Homo sapien
tcactaacaggtttctgcaagtact

SEQ ID NO: 3010688 - DNA, 25 bp, Homo sapien
cagaatatgtaaggtgctcactccc

SEQ ID NO: 3010689 - DNA, 25 bp, Homo sapien
ccttagaaggcaaccatattcagaa

SEQ ID NO: 3010690 - DNA, 25 bp, Homo sapien
aaaataacattagtgcagagggccc

SEQ ID NO: 3010691 - DNA, 25 bp, Homo sapien
gtggactcaatttatccaattcttc

SEQ ID NO: 3010692 - DNA, 25 bp, Homo sapien
tttatgtggactcaatttatccaat

SEQ ID NO: 3010693 - DNA, 25 bp, Homo sapien
tcttagtgtgtttaattttatgtgg

SEQ ID NO: 3010694 - DNA, 25 bp, Homo sapien
attttatgtggactcaatttatcca

SEQ ID NO: 3010695 - DNA, 25 bp, Homo sapien
gatgcatcgatatatctcctcttgt

SEQ ID NO: 3010696 - DNA, 25 bp, Homo sapien
gaaaaggatgcatcgatatatctcc

SEQ ID NO: 3010697 - DNA, 25 bp, Homo sapien
gtagaaaaggatgcatcgatatatc

SEQ ID NO: 3010698 - DNA, 25 bp, Homo sapien
tttttgtagaaaaggatgcatcgat

SEQ ID NO: 3010699 - DNA, 25 bp, Homo sapien
ctggaggacgtagagcattcgggca

SEQ ID NO: 3010700 - DNA, 25 bp, Homo sapien
tcgggcagagcgagcagcttgctcc

SEQ ID NO: 3010701 - DNA, 25 bp, Homo sapien
gctcctgtctcctgatacggattcg

SEQ ID NO: 3010702 - DNA, 25 bp, Homo sapien
gatacggattcgacgttcttcatct

SEQ ID NO: 3010703 - DNA, 25 bp, Homo sapien
tactttcatctcgtttgggctgcat

SEQ ID NO: 3010704 - DNA, 25 bp, Homo sapien
tgaacataaatggaacgggcttagg

SEQ ID NO: 3010705 - DNA, 25 bp, Homo sapien
atacagatgcagtctcaagagaccc

SEQ ID NO: 3010706 - DNA, 25 bp, Homo sapien
gcactgggaagcacaaatgggcctt

SEQ ID NO: 3010707 - DNA, 25 bp, Homo sapien
caactgctcagttctttctggagtc

SEQ ID NO: 3010708 - DNA, 25 bp, Homo sapien
acctcttcaattttgtggatacaac

SEQ ID NO: 3010709 - DNA, 25 bp, Homo sapien
tggagtcgctggacttctagcaggc

SEQ ID NO: 3010710 - DNA, 25 bp, Homo sapien
gcaggcttttctgttcacttatgtt

SEQ ID NO: 3010711 - DNA, 25 bp, Homo sapien
catgtgggcaagaatatcggatcgc

SEQ ID NO: 3010712 - DNA, 25 bp, Homo sapien
tggctggtggctacactgacaggct

SEQ ID NO: 3010713 - DNA, 25 bp, Homo sapien
taaaggtatactttggcaccagagc

SEQ ID NO: 3010714 - DNA, 25 bp, Homo sapien
taagtctctcttgggatatgacgga

SEQ ID NO: 3010715 - DNA, 25 bp, Homo sapien
aatgaacctgtcaaagaccggtcaa

SEQ ID NO: 3010716 - DNA, 25 bp, Homo sapien
tgtcaaagaccggtcaatagcctga

SEQ ID NO: 3010717 - DNA, 25 bp, Homo sapien
caaagaccggtcaatagcctgagga

SEQ ID NO: 3010718 - DNA, 25 bp, Homo sapien
ccggtcaatagcctgaggagaatcc

SEQ ID NO: 3010719 - DNA, 25 bp, Homo sapien
tctgaagtactttggggtcgctcct

SEQ ID NO: 3010720 - DNA, 25 bp, Homo sapien
ctcctcccatcaagttgggtcctag

SEQ ID NO: 3010721 - DNA, 25 bp, Homo sapien
tcccatcaagttgggtcctaggtgc

SEQ ID NO: 3010722 - DNA, 25 bp, Homo sapien
tcaagttgggtcctaggtgctagat

SEQ ID NO: 3010723 - DNA, 25 bp, Homo sapien
tgacagccttgtcatccggcaacag

SEQ ID NO: 3010724 - DNA, 25 bp, Homo sapien
cggcaacagtcttccctaaaaccat

SEQ ID NO: 3010725 - DNA, 25 bp, Homo sapien
gtcaggtagtacagaacaatagtga

SEQ ID NO: 3010726 - DNA, 25 bp, Homo sapien
caggtagtacagaacaatagtgaca

SEQ ID NO: 3010727 - DNA, 25 bp, Homo sapien
acgggatggagctcgactctacttc

SEQ ID NO: 3010728 - DNA, 25 bp, Homo sapien
ggccctgtaagaccgccgcggcttg

SEQ ID NO: 3010729 - DNA, 25 bp, Homo sapien
gcggcttgtctctacccaggaagct

SEQ ID NO: 3010730 - DNA, 25 bp, Homo sapien
tcatggcccagagatcccgggcgac

SEQ ID NO: 3010731 - DNA, 25 bp, Homo sapien
tgctgggccccacgcagcgacccgg

SEQ ID NO: 3010732 - DNA, 25 bp, Homo sapien
ctccgagggcttcgcccggcgcctt

SEQ ID NO: 3010733 - DNA, 25 bp, Homo sapien
gtctcccactccgagggcttcgccc

SEQ ID NO: 3010734 - DNA, 25 bp, Homo sapien
cgggacgtccctgcgccccgtctct

SEQ ID NO: 3010735 - DNA, 25 bp, Homo sapien
ggtgaggcgcggctactgggaggcg

SEQ ID NO: 3010736 - DNA, 25 bp, Homo sapien
cggctactgggaggcgggcaacggg

SEQ ID NO: 3010737 - DNA, 25 bp, Homo sapien
agggtgaggcgcggctactgggagg

SEQ ID NO: 3010738 - DNA, 25 bp, Homo sapien
aggcgcggctactgggaggcgggca

SEQ ID NO: 3010739 - DNA, 25 bp, Homo sapien
agtaagggcatctcttctagttcag

SEQ ID NO: 3010740 - DNA, 25 bp, Homo sapien
cctgttttagtctgtggagcttcct

SEQ ID NO: 3010741 - DNA, 25 bp, Homo sapien
gggtttaagtctcttgagccaagta

SEQ ID NO: 3010742 - DNA, 25 bp, Homo sapien
tatgttagtgattcatcttacagca

SEQ ID NO: 3010743 - DNA, 25 bp, Homo sapien
ttcagtatacttggtggcccacccc

SEQ ID NO: 3010744 - DNA, 25 bp, Homo sapien
tagcacctggtttgtggtacctccc

SEQ ID NO: 3010745 - DNA, 25 bp, Homo sapien
catgactaggtcaagtgaggccaca

SEQ ID NO: 3010746 - DNA, 25 bp, Homo sapien
gaaagactctataacccagttctgg

SEQ ID NO: 3010747 - DNA, 25 bp, Homo sapien
catcaataaatttcgcacactgagc

SEQ ID NO: 3010748 - DNA, 25 bp, Homo sapien
tcggaagtgttcatattggagcagc

SEQ ID NO: 3010749 - DNA, 25 bp, Homo sapien
ccgcttccgggaatagtgctgccaa

SEQ ID NO: 3010750 - DNA, 25 bp, Homo sapien
aaggcttgctgaaggcgcatccgct

SEQ ID NO: 3010751 - DNA, 25 bp, Homo sapien
ggtataattcagttattctcttaaa

SEQ ID NO: 3010752 - DNA, 25 bp, Homo sapien
taagtttgtaagtgaatgaacaaca

SEQ ID NO: 3010753 - DNA, 25 bp, Homo sapien
ttctcttaaaaacgatcttgtagcc

SEQ ID NO: 3010754 - DNA, 25 bp, Homo sapien
gtagcctaccatttctataacagta

SEQ ID NO: 3010755 - DNA, 25 bp, Homo sapien
tacatacagcacaccagcagaacaa

SEQ ID NO: 3010756 - DNA, 25 bp, Homo sapien
caaaatttacgtcaccagtagtggg

SEQ ID NO: 3010757 - DNA, 25 bp, Homo sapien
tatggagaaacctagacggtaccac

SEQ ID NO: 3010758 - DNA, 25 bp, Homo sapien
catacgggcctagactggatcctgc

SEQ ID NO: 3010759 - DNA, 25 bp, Homo sapien
tcgcctcgccaagacagtaaaaata

SEQ ID NO: 3010760 - DNA, 25 bp, Homo sapien
gcactggtgcgggtcctcgcatgct

SEQ ID NO: 3010761 - DNA, 25 bp, Homo sapien
cagattgttcctgtgtctacgtaga

SEQ ID NO: 3010762 - DNA, 25 bp, Homo sapien
tcttagtgtaaagtcgaccattccc

SEQ ID NO: 3010763 - DNA, 25 bp, Homo sapien
tagggagaacccaacagcatgatga

SEQ ID NO: 3010764 - DNA, 25 bp, Homo sapien
aaaagaaaggacctctggcccactg

SEQ ID NO: 3010765 - DNA, 25 bp, Homo sapien
gcagattgaatccttaggcctggag

SEQ ID NO: 3010766 - DNA, 25 bp, Homo sapien
gatgttatgttccagccaggtggcc

SEQ ID NO: 3010767 - DNA, 25 bp, Homo sapien
gtaacacgggctcaatggaaacctc

SEQ ID NO: 3010768 - DNA, 25 bp, Homo sapien
caggccaagtggtagaaagtgtctc

SEQ ID NO: 3010769 - DNA, 25 bp, Homo sapien
catctctcggcaacgttgtgggtaa

SEQ ID NO: 3010770 - DNA, 25 bp, Homo sapien
ccagaaaaggtgcaaacggtcctgc

SEQ ID NO: 3010771 - DNA, 25 bp, Homo sapien
tctaagactcaggtaagatcacctc

SEQ ID NO: 3010772 - DNA, 25 bp, Homo sapien
aaggcagggccagatcgtataaggc

SEQ ID NO: 3010773 - DNA, 25 bp, Homo sapien
gaaagtgtctgctgaacgacctgaa

SEQ ID NO: 3010774 - DNA, 25 bp, Homo sapien
tgtgagttcttagggaccagaaacc

SEQ ID NO: 3010775 - DNA, 25 bp, Homo sapien
ttccagtaaagcaagtatttaagat

SEQ ID NO: 3010776 - DNA, 25 bp, Homo sapien
ctttccagtaaagcaagtatttaag

SEQ ID NO: 3010777 - DNA, 25 bp, Homo sapien
gtctttccagtaaagcaagtattta

SEQ ID NO: 3010778 - DNA, 25 bp, Homo sapien
ccagtaaagcaagtatttaagataa

SEQ ID NO: 3010779 - DNA, 25 bp, Homo sapien
caagtcccagtacgcaattatatct

SEQ ID NO: 3010780 - DNA, 25 bp, Homo sapien
cagcataagtgtaatgtcattcaac

SEQ ID NO: 3010781 - DNA, 25 bp, Homo sapien
tgttacccctaatataaaggatcta

SEQ ID NO: 3010782 - DNA, 25 bp, Homo sapien
tttaatgaggtgcttaacaacttac

SEQ ID NO: 3010783 - DNA, 25 bp, Homo sapien
atttgggttggctaaacattgcaca

SEQ ID NO: 3010784 - DNA, 25 bp, Homo sapien
aaccgaagtcgatttccagcatcat

SEQ ID NO: 3010785 - DNA, 25 bp, Homo sapien
gcacaaattccaactccaactgaaa

SEQ ID NO: 3010786 - DNA, 25 bp, Homo sapien
tgaaaccgaagtcgatttccagcat

SEQ ID NO: 3010787 - DNA, 25 bp, Homo sapien
gaatgatacacaagtctggcgacga

SEQ ID NO: 3010788 - DNA, 25 bp, Homo sapien
ggagaattcctaccactcgtgggcc

SEQ ID NO: 3010789 - DNA, 25 bp, Homo sapien
caatcaaggaggacacggtttaaca

SEQ ID NO: 3010790 - DNA, 25 bp, Homo sapien
gaaatctaagaaaagcggagccctg

SEQ ID NO: 3010791 - DNA, 25 bp, Homo sapien
tagtctttctagacgctacaagagc

SEQ ID NO: 3010792 - DNA, 25 bp, Homo sapien
cttagtctttctagacgctacaaga

SEQ ID NO: 3010793 - DNA, 25 bp, Homo sapien
ttctagacgctacaagagccttctc

SEQ ID NO: 3010794 - DNA, 25 bp, Homo sapien
tctttctagacgctacaagagcctt

SEQ ID NO: 3010795 - DNA, 25 bp, Homo sapien
gagagttccatctgcgaagactcca

SEQ ID NO: 3010796 - DNA, 25 bp, Homo sapien
agactccaagatcagagagctactc

SEQ ID NO: 3010797 - DNA, 25 bp, Homo sapien
tgcgaagactccaagatcagagagc

SEQ ID NO: 3010798 - DNA, 25 bp, Homo sapien
ctgggtcaaggagagttccatctgc

SEQ ID NO: 3010799 - DNA, 25 bp, Homo sapien
ctgtctccatagcgacagcagcggc

SEQ ID NO: 3010800 - DNA, 25 bp, Homo sapien
aacgaagacaccaaaacgccaccag

SEQ ID NO: 3010801 - DNA, 25 bp, Homo sapien
agcaaaagcccagagacgcgggcga

SEQ ID NO: 3010802 - DNA, 25 bp, Homo sapien
aaagcccagagacgcgggcgaagtt

SEQ ID NO: 3010803 - DNA, 25 bp, Homo sapien
aaaagcccagagacgcgggcgaagt

SEQ ID NO: 3010804 - DNA, 25 bp, Homo sapien
ggatatatggcaacctctagagaca

SEQ ID NO: 3010805 - DNA, 25 bp, Homo sapien
tgggacagcgcaccactttaaggaa

SEQ ID NO: 3010806 - DNA, 25 bp, Homo sapien
tagagcatggtctactgggacagcg

SEQ ID NO: 3010807 - DNA, 25 bp, Homo sapien
tatatagacatggaagcagaacgga

SEQ ID NO: 3010808 - DNA, 25 bp, Homo sapien
gtctccagggcgacggcagcggcca

SEQ ID NO: 3010809 - DNA, 25 bp, Homo sapien
ctgtctccagggcgacggcagcggc

SEQ ID NO: 3010810 - DNA, 25 bp, Homo sapien
tgtctccagggcgacggcagcggcc

SEQ ID NO: 3010811 - DNA, 25 bp, Homo sapien
tctccagggcgacggcagcggccat

SEQ ID NO: 3010812 - DNA, 25 bp, Homo sapien
tgcctaacagaggaaaagcccggag

SEQ ID NO: 3010813 - DNA, 25 bp, Homo sapien
gaatcgccacctgcctaacagagga

SEQ ID NO: 3010814 - DNA, 25 bp, Homo sapien
ggcaaagacagcgaatcgccacctg

SEQ ID NO: 3010815 - DNA, 25 bp, Homo sapien
acaggcaaagacagcgaatcgccac

SEQ ID NO: 3010816 - DNA, 25 bp, Homo sapien
ctggagtacggtgcccagcgtctgc

SEQ ID NO: 3010817 - DNA, 25 bp, Homo sapien
caatttagttatgacccagtgtcaa

SEQ ID NO: 3010818 - DNA, 25 bp, Homo sapien
aaagactggcgaaatcaatttaggg

SEQ ID NO: 3010819 - DNA, 25 bp, Homo sapien
cgcctggccaggtttggacaattta

SEQ ID NO: 3010820 - DNA, 25 bp, Homo sapien
gcttagtgccattcctgcagaattg

SEQ ID NO: 3010821 - DNA, 25 bp, Homo sapien
tggctgaggcccaaaaaactcgttg

SEQ ID NO: 3010822 - DNA, 25 bp, Homo sapien
tcctaaggcctgtgaattgttcaag

SEQ ID NO: 3010823 - DNA, 25 bp, Homo sapien
tgttcaagggcctacaaaaatggct

SEQ ID NO: 3010824 - DNA, 25 bp, Homo sapien
gagaagcttaggtgacttacccagc

SEQ ID NO: 3010825 - DNA, 25 bp, Homo sapien
aaccctggaggccatcagaagagca

SEQ ID NO: 3010826 - DNA, 25 bp, Homo sapien
cctggcctggcactttaatatcgta

SEQ ID NO: 3010827 - DNA, 25 bp, Homo sapien
cagcagccgctgttggtacaagagg

SEQ ID NO: 3010828 - DNA, 25 bp, Homo sapien
tcatccacctccctgggctccccac

SEQ ID NO: 3010829 - DNA, 25 bp, Homo sapien
catccacctccctgggctccccaca

SEQ ID NO: 3010830 - DNA, 25 bp, Homo sapien
tcattcatccacctccctgggctcc

SEQ ID NO: 3010831 - DNA, 25 bp, Homo sapien
attcatccacctccctgggctcccc

SEQ ID NO: 3010832 - DNA, 25 bp, Homo sapien
ggagacagagcatttaatgagagca

SEQ ID NO: 3010833 - DNA, 25 bp, Homo sapien
gcgggagacagagcatttaatgaga

SEQ ID NO: 3010834 - DNA, 25 bp, Homo sapien
cgggagacagagcatttaatgagag

SEQ ID NO: 3010835 - DNA, 25 bp, Homo sapien
agacagagcatttaatgagagcaag

SEQ ID NO: 3010836 - DNA, 25 bp, Homo sapien
caaacgctggcatgaaagactctga

SEQ ID NO: 3010837 - DNA, 25 bp, Homo sapien
taacttcaagtagattggcccacgg

SEQ ID NO: 3010838 - DNA, 25 bp, Homo sapien
gacagtgtggtcaggaatcgtccca

SEQ ID NO: 3010839 - DNA, 25 bp, Homo sapien
cgaagcgagtgaaaaccagagccct

SEQ ID NO: 3010840 - DNA, 25 bp, Homo sapien
tgtggacatcgttgggtcattttgg

SEQ ID NO: 3010841 - DNA, 25 bp, Homo sapien
tacaaggtgtgccagaaggttcggt

SEQ ID NO: 3010842 - DNA, 25 bp, Homo sapien
gtgtgtggacatcgttgggtcattt

SEQ ID NO: 3010843 - DNA, 25 bp, Homo sapien
aactctgtacaaggtgtgccagaag

SEQ ID NO: 3010844 - DNA, 25 bp, Homo sapien
tgtgtgtgtggtcttgtggctcttc

SEQ ID NO: 3010845 - DNA, 25 bp, Homo sapien
gctgtgtgtgtggtcttgtggctct

SEQ ID NO: 3010846 - DNA, 25 bp, Homo sapien
ctgaggagggtaagggctgtgtgtg

SEQ ID NO: 3010847 - DNA, 25 bp, Homo sapien
gggctgtgtgtgtggtcttgtggct

SEQ ID NO: 3010848 - DNA, 25 bp, Homo sapien
cagtcagggaaatgatccaagtcaa

SEQ ID NO: 3010849 - DNA, 25 bp, Homo sapien
ccaattatgttcattatgactcctg

SEQ ID NO: 3010850 - DNA, 25 bp, Homo sapien
caagtcaaatatggcccgtccccag

SEQ ID NO: 3010851 - DNA, 25 bp, Homo sapien
tctcaatatgtgtcacattagccca

SEQ ID NO: 3010852 - DNA, 25 bp, Homo sapien
cattcagggaaacggtcacagagcc

SEQ ID NO: 3010853 - DNA, 25 bp, Homo sapien
gatgggttctctatgcccgtgcgca

SEQ ID NO: 3010854 - DNA, 25 bp, Homo sapien
ggagagtctataacccacctcagag

SEQ ID NO: 3010855 - DNA, 25 bp, Homo sapien
gaggctctgagataacgaacacccg

SEQ ID NO: 3010856 - DNA, 25 bp, Homo sapien
ggagtaaataaaaacagctgtgtta

SEQ ID NO: 3010857 - DNA, 25 bp, Homo sapien
gagtaaataaaaacagctgtgttac

SEQ ID NO: 3010858 - DNA, 25 bp, Homo sapien
tgatgtacagcggattgaggccgat

SEQ ID NO: 3010859 - DNA, 25 bp, Homo sapien
caaccttgaggtgcccataggtgaa

SEQ ID NO: 3010860 - DNA, 25 bp, Homo sapien
taggtgaacacgatggcatttggag

SEQ ID NO: 3010861 - DNA, 25 bp, Homo sapien
tacagggcagcatgatgtacagcgg

SEQ ID NO: 3010862 - DNA, 25 bp, Homo sapien
taaacagccctctgaaaggactgcg

SEQ ID NO: 3010863 - DNA, 25 bp, Homo sapien
gattctctgaatgtgccgggtacgt

SEQ ID NO: 3010864 - DNA, 25 bp, Homo sapien
tttttatacatgcagacgcccaggc

SEQ ID NO: 3010865 - DNA, 25 bp, Homo sapien
tggagatgacaaagccacggcctgt

SEQ ID NO: 3010866 - DNA, 25 bp, Homo sapien
gggcactgcgtgcaagggctccatc

SEQ ID NO: 3010867 - DNA, 25 bp, Homo sapien
cacgttgcttgtgcactcagtgaac

SEQ ID NO: 3010868 - DNA, 25 bp, Homo sapien
ggcaacgagcaaggacaagatcaag

SEQ ID NO: 3010869 - DNA, 25 bp, Homo sapien
cagtgaacacggcaacgagcaagga

SEQ ID NO: 3010870 - DNA, 25 bp, Homo sapien
ccctagtagcagcacgatgccccag

SEQ ID NO: 3010871 - DNA, 25 bp, Homo sapien
aaatccgccccctagtagcagcacg

SEQ ID NO: 3010872 - DNA, 25 bp, Homo sapien
gccccctagtagcagcacgatgccc

SEQ ID NO: 3010873 - DNA, 25 bp, Homo sapien
tccgccccctagtagcagcacgatg

SEQ ID NO: 3010874 - DNA, 25 bp, Homo sapien
agcaggggagggggataaaatggag

SEQ ID NO: 3010875 - DNA, 25 bp, Homo sapien
tccaatccagcaggggagggggata

SEQ ID NO: 3010876 - DNA, 25 bp, Homo sapien
cttccaatccagcaggggaggggga

SEQ ID NO: 3010877 - DNA, 25 bp, Homo sapien
ccagcaggggagggggataaaatgg

SEQ ID NO: 3010878 - DNA, 25 bp, Homo sapien
ggcttctgtgaaggcacaatgaata

SEQ ID NO: 3010879 - DNA, 25 bp, Homo sapien
gtctggctgcggaagttaaacttgg

SEQ ID NO: 3010880 - DNA, 25 bp, Homo sapien
cttcctcagtctggctgcggaagtt

SEQ ID NO: 3010881 - DNA, 25 bp, Homo sapien
gctgcggaagttaaacttgggcttc

SEQ ID NO: 3010882 - DNA, 25 bp, Homo sapien
ggccacagtggcatcggagacatac

SEQ ID NO: 3010883 - DNA, 25 bp, Homo sapien
ggtctcgggagaaccacaggatgac

SEQ ID NO: 3010884 - DNA, 25 bp, Homo sapien
gggagaaccacaggatgaccagcag

SEQ ID NO: 3010885 - DNA, 25 bp, Homo sapien
gatctccgcgaaggacaagggcccc

SEQ ID NO: 3010886 - DNA, 25 bp, Homo sapien
tcagcacgttgatctccgcgaagga

SEQ ID NO: 3010887 - DNA, 25 bp, Homo sapien
cttgctctctagcccgcagccccag

SEQ ID NO: 3010888 - DNA, 25 bp, Homo sapien
ttcttgctctctagcccgcagcccc

SEQ ID NO: 3010889 - DNA, 25 bp, Homo sapien
tcttgctctctagcccgcagcccca

SEQ ID NO: 3010890 - DNA, 25 bp, Homo sapien
tggagccacagccaggcgaacagca

SEQ ID NO: 3010891 - DNA, 25 bp, Homo sapien
ccaggaagcaaagttcacgaggtcc

SEQ ID NO: 3010892 - DNA, 25 bp, Homo sapien
ggaagcaaagttcacgaggtccttg

SEQ ID NO: 3010893 - DNA, 25 bp, Homo sapien
aaccaggaagcaaagttcacgaggt

SEQ ID NO: 3010894 - DNA, 25 bp, Homo sapien
gccgcgtagcagatgcacagggtca

SEQ ID NO: 3010895 - DNA, 25 bp, Homo sapien
gagtggggccttcaaaaatcacttg

SEQ ID NO: 3010896 - DNA, 25 bp, Homo sapien
gatgctggccgcgtagcagatgcac

SEQ ID NO: 3010897 - DNA, 25 bp, Homo sapien
tagcagatgcacagggtcatggcct

SEQ ID NO: 3010898 - DNA, 25 bp, Homo sapien
gccggcctcggtggctgcgcttgtg

SEQ ID NO: 3010899 - DNA, 25 bp, Homo sapien
ttccatctgctgcaatatggcctcc

SEQ ID NO: 3010900 - DNA, 25 bp, Homo sapien
tctgctgcaatatggcctccacgat

SEQ ID NO: 3010901 - DNA, 25 bp, Homo sapien
catcatggccgtggttgccgtgtta

SEQ ID NO: 3010902 - DNA, 25 bp, Homo sapien
gctgtgacgcccatgaagcccagca

SEQ ID NO: 3010903 - DNA, 25 bp, Homo sapien
gggctgtgacgcccatgaagcccag

SEQ ID NO: 3010904 - DNA, 25 bp, Homo sapien
ggctgtgacgcccatgaagcccagc

SEQ ID NO: 3010905 - DNA, 25 bp, Homo sapien
tccagtcgtggttctaaggagcacc

SEQ ID NO: 3010906 - DNA, 25 bp, Homo sapien
tagggatgacggttttagagcctcc

SEQ ID NO: 3010907 - DNA, 25 bp, Homo sapien
tggaatacccctatgtgcaggcagc

SEQ ID NO: 3010908 - DNA, 25 bp, Homo sapien
cagatggtgccaactcaatatgagc

SEQ ID NO: 3010909 - DNA, 25 bp, Homo sapien
cgtgcgcagggcgatcctcttgtgc

SEQ ID NO: 3010910 - DNA, 25 bp, Homo sapien
ttgtgcaggttccagcgctccacag

SEQ ID NO: 3010911 - DNA, 25 bp, Homo sapien
caggaacagcatgttggtgtccttc

SEQ ID NO: 3010912 - DNA, 25 bp, Homo sapien
acagccacggccacgatgaggccgc

SEQ ID NO: 3010913 - DNA, 25 bp, Homo sapien
ccatgaggatgatgacgtaggcaca

SEQ ID NO: 3010914 - DNA, 25 bp, Homo sapien
ggatgatgacgtaggcacacctgac

SEQ ID NO: 3010915 - DNA, 25 bp, Homo sapien
tgatgacgtaggcacacctgacaaa

SEQ ID NO: 3010916 - DNA, 25 bp, Homo sapien
gtaaatggccatgaggatgatgacg

SEQ ID NO: 3010917 - DNA, 25 bp, Homo sapien
gaaatgatattgaatgaatcaacat

SEQ ID NO: 3010918 - DNA, 25 bp, Homo sapien
caacattataatgaaatgatattga

SEQ ID NO: 3010919 - DNA, 25 bp, Homo sapien
ctccctcatcaacattataatgaaa

SEQ ID NO: 3010920 - DNA, 25 bp, Homo sapien
tttttccctccctcatcaacattat

SEQ ID NO: 3010921 - DNA, 25 bp, Homo sapien
ttggagacatagctcagcgccgagg

SEQ ID NO: 3010922 - DNA, 25 bp, Homo sapien
acgaacaagatcacgaaggacttga

SEQ ID NO: 3010923 - DNA, 25 bp, Homo sapien
cagaatgacgagtggcagcagcagg

SEQ ID NO: 3010924 - DNA, 25 bp, Homo sapien
cttggcgggcatcagaatgacgagt

SEQ ID NO: 3010925 - DNA, 25 bp, Homo sapien
gcgcgggagggagactggcgggcga

SEQ ID NO: 3010926 - DNA, 25 bp, Homo sapien
cgcgcgggagggagactggcgggcg

SEQ ID NO: 3010927 - DNA, 25 bp, Homo sapien
tagatggctccttccagaagtttga

SEQ ID NO: 3010928 - DNA, 25 bp, Homo sapien
ttagatggctccttccagaagtttg

SEQ ID NO: 3010929 - DNA, 25 bp, Homo sapien
tgtggccgcagtcaacaccctgatc

SEQ ID NO: 3010930 - DNA, 25 bp, Homo sapien
tgggcctgcttgtcatcactccaga

SEQ ID NO: 3010931 - DNA, 25 bp, Homo sapien
ttggcagacgccacgggaattctct

SEQ ID NO: 3010932 - DNA, 25 bp, Homo sapien
gaggatacacaccagattgggtctg

SEQ ID NO: 3010933 - DNA, 25 bp, Homo sapien
gagcctccctggacgctgtttgcaa

SEQ ID NO: 3010934 - DNA, 25 bp, Homo sapien
gaaatgatgtgggtgattcggccaa

SEQ ID NO: 3010935 - DNA, 25 bp, Homo sapien
cacagagtctgaaaactggtgcaat

SEQ ID NO: 3010936 - DNA, 25 bp, Homo sapien
gttggcatccgtggctacagctcca

SEQ ID NO: 3010937 - DNA, 25 bp, Homo sapien
ccagcatggctggacgtcaacagaa

SEQ ID NO: 3010938 - DNA, 25 bp, Homo sapien
gaaaggaagtcgaagtatctctgtt

SEQ ID NO: 3010939 - DNA, 25 bp, Homo sapien
ggcacttcagtcctattcaacatag

SEQ ID NO: 3010940 - DNA, 25 bp, Homo sapien
ttatacaccaacgacatccaagctg

SEQ ID NO: 3010941 - DNA, 25 bp, Homo sapien
ttcagctaactttcaggagacaaaa

SEQ ID NO: 3010942 - DNA, 25 bp, Homo sapien
tacaaggcctcagaatcggttcgga

SEQ ID NO: 3010943 - DNA, 25 bp, Homo sapien
aaatgtggagcctcttttgcaagag

SEQ ID NO: 3010944 - DNA, 25 bp, Homo sapien
tcggttcggatgcaggaactgtgtt

SEQ ID NO: 3010945 - DNA, 25 bp, Homo sapien
gaactgtgtttgacgtttatgtcga

SEQ ID NO: 3010946 - DNA, 25 bp, Homo sapien
gattagccagcaggtctaagcagct

SEQ ID NO: 3010947 - DNA, 25 bp, Homo sapien
gagactgttgactgtatggccacca

SEQ ID NO: 3010948 - DNA, 25 bp, Homo sapien
tagaggactgtttgcgcaagagacc

SEQ ID NO: 3010949 - DNA, 25 bp, Homo sapien
acttaaagtgagatcgtgggagcca

SEQ ID NO: 3010950 - DNA, 25 bp, Homo sapien
tacggaacagggtggccttcatcag

SEQ ID NO: 3010951 - DNA, 25 bp, Homo sapien
ggattacagacacgttcaactttgg

SEQ ID NO: 3010952 - DNA, 25 bp, Homo sapien
caaaggcttttgcaaccgtgggcta

SEQ ID NO: 3010953 - DNA, 25 bp, Homo sapien
ttcatgaaacacaggctaagaccag

SEQ ID NO: 3010954 - DNA, 25 bp, Homo sapien
caccgtatgtgcagctagacagcca

SEQ ID NO: 3010955 - DNA, 25 bp, Homo sapien
tagcagcagcttcacacatgggagg

SEQ ID NO: 3010956 - DNA, 25 bp, Homo sapien
gaatgccagccaagaggttgcagca

SEQ ID NO: 3010957 - DNA, 25 bp, Homo sapien
tacagattaggcaactgaagctcgg

SEQ ID NO: 3010958 - DNA, 25 bp, Homo sapien
taatgagaattggaactagccctac

SEQ ID NO: 3010959 - DNA, 25 bp, Homo sapien
aatgagaattggaactagccctact

SEQ ID NO: 3010960 - DNA, 25 bp, Homo sapien
atgagaattggaactagccctacta

SEQ ID NO: 3010961 - DNA, 25 bp, Homo sapien
gacagcatcagggcggaggccccca

SEQ ID NO: 3010962 - DNA, 25 bp, Homo sapien
cttcgtcgatataaatggtgttctc

SEQ ID NO: 3010963 - DNA, 25 bp, Homo sapien
ggcaagctgtctgcgatgcagccct

SEQ ID NO: 3010964 - DNA, 25 bp, Homo sapien
tctgcatacacagcacttcgtcgat

SEQ ID NO: 3010965 - DNA, 25 bp, Homo sapien
tccccatcccgaagtgggatggatt

SEQ ID NO: 3010966 - DNA, 25 bp, Homo sapien
tatattgtgcgacatcacgacacag

SEQ ID NO: 3010967 - DNA, 25 bp, Homo sapien
caagcgcgtatgagccaccttggct

SEQ ID NO: 3010968 - DNA, 25 bp, Homo sapien
acagctccacgttcggccggtgtgt

SEQ ID NO: 3010969 - DNA, 25 bp, Homo sapien
cgacattgtgggtgatctcttgaac

SEQ ID NO: 3010970 - DNA, 25 bp, Homo sapien
ccattcttgaatgccgtgtccacca

SEQ ID NO: 3010971 - DNA, 25 bp, Homo sapien
acactgcttgcgcagatcattggct

SEQ ID NO: 3010972 - DNA, 25 bp, Homo sapien
gcatcagggagttgttccgctgctt

SEQ ID NO: 3010973 - DNA, 25 bp, Homo sapien
gctgtctgggacaggattcgatcca

SEQ ID NO: 3010974 - DNA, 25 bp, Homo sapien
ctggagaagtccaaccagtcttcca

SEQ ID NO: 3010975 - DNA, 25 bp, Homo sapien
agaagtccaaccagtcttccagact

SEQ ID NO: 3010976 - DNA, 25 bp, Homo sapien
caaccagtcttccagactcacggag

SEQ ID NO: 3010977 - DNA, 25 bp, Homo sapien
ggagaagtccaaccagtcttccaga

SEQ ID NO: 3010978 - DNA, 25 bp, Homo sapien
ggtcttgcctatctgagaagcactg

SEQ ID NO: 3010979 - DNA, 25 bp, Homo sapien
tagtgagcctaacctggagaatcag

SEQ ID NO: 3010980 - DNA, 25 bp, Homo sapien
ctgggcccaatgtcaaggtcaccat

SEQ ID NO: 3010981 - DNA, 25 bp, Homo sapien
aaggacgagccgctaggtcttgcct

SEQ ID NO: 3010982 - DNA, 25 bp, Homo sapien
tggctcaatcctcacggcgttctca

SEQ ID NO: 3010983 - DNA, 25 bp, Homo sapien
gatatcatctatggtcagggccaca

SEQ ID NO: 3010984 - DNA, 25 bp, Homo sapien
aagattgtacttggcagagcggttc

SEQ ID NO: 3010985 - DNA, 25 bp, Homo sapien
cagggccacaaacttgtccttcaaa

SEQ ID NO: 3010986 - DNA, 25 bp, Homo sapien
tcagcctcctttatcagctcatgct

SEQ ID NO: 3010987 - DNA, 25 bp, Homo sapien
gccataatgccctggatgatctcag

SEQ ID NO: 3010988 - DNA, 25 bp, Homo sapien
catgctccactgtgtcgtgcaccag

SEQ ID NO: 3010989 - DNA, 25 bp, Homo sapien
tcctccaaggtacgggtcagcagag

SEQ ID NO: 3010990 - DNA, 25 bp, Homo sapien
tggctaatggctgcacactcagaac

SEQ ID NO: 3010991 - DNA, 25 bp, Homo sapien
cagccaacacgtgcaacatgaggtg

SEQ ID NO: 3010992 - DNA, 25 bp, Homo sapien
ccatccgatgacacagtgggtgaca

SEQ ID NO: 3010993 - DNA, 25 bp, Homo sapien
gaactatctgcacgactgatttgag

SEQ ID NO: 3010994 - DNA, 25 bp, Homo sapien
gatcatcagttacattcacaagctg

SEQ ID NO: 3010995 - DNA, 25 bp, Homo sapien
caagctgctcaagtttgtcatctaa

SEQ ID NO: 3010996 - DNA, 25 bp, Homo sapien
tatgccaggcatgtctcagtgatgt

SEQ ID NO: 3010997 - DNA, 25 bp, Homo sapien
tcagtgatgtgcaagggctctttca

SEQ ID NO: 3010998 - DNA, 25 bp, Homo sapien
ctgaagcacacggggaagttacacc

SEQ ID NO: 3010999 - DNA, 25 bp, Homo sapien
tgaagcacacggggaagttacacca

SEQ ID NO: 3011000 - DNA, 25 bp, Homo sapien
aagcacacggggaagttacaccagg

SEQ ID NO: 3011001 - DNA, 25 bp, Homo sapien
gaagcacacggggaagttacaccag

SEQ ID NO: 3011002 - DNA, 25 bp, Homo sapien
ctagtttcttgttcacatcgctttg

SEQ ID NO: 3011003 - DNA, 25 bp, Homo sapien
tttcatccacaagcctctggctttc

SEQ ID NO: 3011004 - DNA, 25 bp, Homo sapien
ttcaatttcatccacaagcctctgg

SEQ ID NO: 3011005 - DNA, 25 bp, Homo sapien
tgttcacatcgctttgagattttct

SEQ ID NO: 3011006 - DNA, 25 bp, Homo sapien
tctgtggtactggttcttgttagca

SEQ ID NO: 3011007 - DNA, 25 bp, Homo sapien
gtggaggttgtaatagtttagccat

SEQ ID NO: 3011008 - DNA, 25 bp, Homo sapien
tcttgttagcaatgtgccactctga

SEQ ID NO: 3011009 - DNA, 25 bp, Homo sapien
gatcgggacctttgagcgtctgctc

SEQ ID NO: 3011010 - DNA, 25 bp, Homo sapien
acacagaaccactacgcaagctcgg

SEQ ID NO: 3011011 - DNA, 25 bp, Homo sapien
ctcagcgccacacagaaccactacg

SEQ ID NO: 3011012 - DNA, 25 bp, Homo sapien
gaaccactacgcaagctcgggatgg

SEQ ID NO: 3011013 - DNA, 25 bp, Homo sapien
agcgccacacagaaccactacgcaa

SEQ ID NO: 3011014 - DNA, 25 bp, Homo sapien
cacggacaagcctcaggtttcccat

SEQ ID NO: 3011015 - DNA, 25 bp, Homo sapien
tgtcccggcacagttcacaagcaag

SEQ ID NO: 3011016 - DNA, 25 bp, Homo sapien
ccggcacagttcacaagcaaggctc

SEQ ID NO: 3011017 - DNA, 25 bp, Homo sapien
acagttcacaagcaaggctccattc

SEQ ID NO: 3011018 - DNA, 25 bp, Homo sapien
aggatgtcccggcacagttcacaag

SEQ ID NO: 3011019 - DNA, 25 bp, Homo sapien
aaacaaaggcgttacaggaactgca

SEQ ID NO: 3011020 - DNA, 25 bp, Homo sapien
cactgcctagctttcagggttcagg

SEQ ID NO: 3011021 - DNA, 25 bp, Homo sapien
aatatgtctgttgatcctgtagcca

SEQ ID NO: 3011022 - DNA, 25 bp, Homo sapien
tagggatgcggaaccttttgtcaag

SEQ ID NO: 3011023 - DNA, 25 bp, Homo sapien
ttaagaacatctaatagtttccaca

SEQ ID NO: 3011024 - DNA, 25 bp, Homo sapien
attaagaacatctaatagtttccac

SEQ ID NO: 3011025 - DNA, 25 bp, Homo sapien
taactgtgtcagagtgattgcatcc

SEQ ID NO: 3011026 - DNA, 25 bp, Homo sapien
ctgaggggacacttgattgctgagg

SEQ ID NO: 3011027 - DNA, 25 bp, Homo sapien
tgtggctacaatgagaagcttgcct

SEQ ID NO: 3011028 - DNA, 25 bp, Homo sapien
ggtccggagctctgatttccagctg

SEQ ID NO: 3011029 - DNA, 25 bp, Homo sapien
ggctacaatgagaagcttgcctagc

SEQ ID NO: 3011030 - DNA, 25 bp, Homo sapien
gttctccatgcctagctttgtgcca

SEQ ID NO: 3011031 - DNA, 25 bp, Homo sapien
gcaccatggtaaggtgaatgctcct

SEQ ID NO: 3011032 - DNA, 25 bp, Homo sapien
tgctccttggctgcggcaggatgct

SEQ ID NO: 3011033 - DNA, 25 bp, Homo sapien
cttgggcggcacaagggtcttctgc

SEQ ID NO: 3011034 - DNA, 25 bp, Homo sapien
gataacatgtaaaggagctctgatt

SEQ ID NO: 3011035 - DNA, 25 bp, Homo sapien
aagaagacaataacatgataacatg

SEQ ID NO: 3011036 - DNA, 25 bp, Homo sapien
cactctcaagggtcaagaacaaaga

SEQ ID NO: 3011037 - DNA, 25 bp, Homo sapien
gcatataataatcgcactctcaagg

SEQ ID NO: 3011038 - DNA, 25 bp, Homo sapien
tattttcctgaagcccaagtgctcc

SEQ ID NO: 3011039 - DNA, 25 bp, Homo sapien
agcctctattttcctgaagcccaag

SEQ ID NO: 3011040 - DNA, 25 bp, Homo sapien
ctctattttcctgaagcccaagtgc

SEQ ID NO: 3011041 - DNA, 25 bp, Homo sapien
gactacgggtatgagctaccaagcc

SEQ ID NO: 3011042 - DNA, 25 bp, Homo sapien
ggatctatcctataagaaacgctag

SEQ ID NO: 3011043 - DNA, 25 bp, Homo sapien
gaaactgacaaggttgatcatcagc

SEQ ID NO: 3011044 - DNA, 25 bp, Homo sapien
tatccaagaaactatccatgaaaca

SEQ ID NO: 3011045 - DNA, 25 bp, Homo sapien
cagtcatgaatactatatccaagaa

SEQ ID NO: 3011046 - DNA, 25 bp, Homo sapien
aaccagacagcttgctcccaaaagg

SEQ ID NO: 3011047 - DNA, 25 bp, Homo sapien
aaatccaacacgagggctcagtcac

SEQ ID NO: 3011048 - DNA, 25 bp, Homo sapien
cccaaaaggaggcatcaggagattc

SEQ ID NO: 3011049 - DNA, 25 bp, Homo sapien
ggttgtctatacatttgtcgcccca

SEQ ID NO: 3011050 - DNA, 25 bp, Homo sapien
ccaggattctagtcttaggcaaatt

SEQ ID NO: 3011051 - DNA, 25 bp, Homo sapien
caggcccggccagtatagaaactat

SEQ ID NO: 3011052 - DNA, 25 bp, Homo sapien
ggaacaaagactaatgccacgtgca

SEQ ID NO: 3011053 - DNA, 25 bp, Homo sapien
tgttacagagcttagcctatacctt

SEQ ID NO: 3011054 - DNA, 25 bp, Homo sapien
gaggcgctgtggatcaagtcagcca

SEQ ID NO: 3011055 - DNA, 25 bp, Homo sapien
gctgtgatgccacaaccctgtgatc

SEQ ID NO: 3011056 - DNA, 25 bp, Homo sapien
tttatgttaagaagtagatggccca

SEQ ID NO: 3011057 - DNA, 25 bp, Homo sapien
cgattataccaaacagaaccaagat

SEQ ID NO: 3011058 - DNA, 25 bp, Homo sapien
ggaccagcaaatggccgacctgcag

SEQ ID NO: 3011059 - DNA, 25 bp, Homo sapien
tggggaccagcaaatggccgacctg

SEQ ID NO: 3011060 - DNA, 25 bp, Homo sapien
gggaccagcaaatggccgacctgca

SEQ ID NO: 3011061 - DNA, 25 bp, Homo sapien
accagcaaatggccgacctgcagtc

SEQ ID NO: 3011062 - DNA, 25 bp, Homo sapien
tcacttacctctaccaacaactagg

SEQ ID NO: 3011063 - DNA, 25 bp, Homo sapien
tgagatagagtctgatctggaggct

SEQ ID NO: 3011064 - DNA, 25 bp, Homo sapien
ggactggctcaagaaagcagattta

SEQ ID NO: 3011065 - DNA, 25 bp, Homo sapien
actaggccaccaagtcatttctgag

SEQ ID NO: 3011066 - DNA, 25 bp, Homo sapien
gaccccagcgcccagatatttgaaa

SEQ ID NO: 3011067 - DNA, 25 bp, Homo sapien
tcaagatctagacagggacgcgtgc

SEQ ID NO: 3011068 - DNA, 25 bp, Homo sapien
taatctggaacctactggagcggaa

SEQ ID NO: 3011069 - DNA, 25 bp, Homo sapien
aacattgtctgtacccgcttcggag

SEQ ID NO: 3011070 - DNA, 25 bp, Homo sapien
cccctccgtttggaagatggactca

SEQ ID NO: 3011071 - DNA, 25 bp, Homo sapien
tggctcgggcccctttatcatcctg

SEQ ID NO: 3011072 - DNA, 25 bp, Homo sapien
aagacctggagacctcgggaagtgt

SEQ ID NO: 3011073 - DNA, 25 bp, Homo sapien
tctgctcgcaggtttgggctagtct

SEQ ID NO: 3011074 - DNA, 25 bp, Homo sapien
gaaggctgcagtactgcattgcccc

SEQ ID NO: 3011075 - DNA, 25 bp, Homo sapien
ggatgatgagttgttcagctaccag

SEQ ID NO: 3011076 - DNA, 25 bp, Homo sapien
aaccccatgctgttgagacgctcga

SEQ ID NO: 3011077 - DNA, 25 bp, Homo sapien
aaagagaaggttcgccagtgctggc

SEQ ID NO: 3011078 - DNA, 25 bp, Homo sapien
tgaaccctcgccatctcttgaatat

SEQ ID NO: 3011079 - DNA, 25 bp, Homo sapien
tgcagcccatggtcatccaggtaag

SEQ ID NO: 3011080 - DNA, 25 bp, Homo sapien
cacctgaatgcctgttgaaatgcag

SEQ ID NO: 3011081 - DNA, 25 bp, Homo sapien
caacgttgcactctgttcacctcaa

SEQ ID NO: 3011082 - DNA, 25 bp, Homo sapien
tatcacttgctgaacactcacctgg

SEQ ID NO: 3011083 - DNA, 25 bp, Homo sapien
gaggaacagccccatatcaaaagat

SEQ ID NO: 3011084 - DNA, 25 bp, Homo sapien
agatttccaactgcacgagatccag

SEQ ID NO: 3011085 - DNA, 25 bp, Homo sapien
tcctggcaaagtcctgggtccgaaa

SEQ ID NO: 3011086 - DNA, 25 bp, Homo sapien
tgatgcccataagaaccaaccagag

SEQ ID NO: 3011087 - DNA, 25 bp, Homo sapien
tcatacctgcccaacagtaaggtgg

SEQ ID NO: 3011088 - DNA, 25 bp, Homo sapien
tctagcagtgcgctcacagtagggc

SEQ ID NO: 3011089 - DNA, 25 bp, Homo sapien
gagtttgaaatcacaagggacagcc

SEQ ID NO: 3011090 - DNA, 25 bp, Homo sapien
tttgggtggccaaagcagtatgatt

SEQ ID NO: 3011091 - DNA, 25 bp, Homo sapien
gtggccaaagcagtatgattgctta

SEQ ID NO: 3011092 - DNA, 25 bp, Homo sapien
aaagcagtatgattgcttaagacca

SEQ ID NO: 3011093 - DNA, 25 bp, Homo sapien
tactgtggttttaagagctgggtgt

SEQ ID NO: 3011094 - DNA, 25 bp, Homo sapien
cagtatagctgtgccgcctctggaa

SEQ ID NO: 3011095 - DNA, 25 bp, Homo sapien
tgtcttaacagtggcctatgcaggc

SEQ ID NO: 3011096 - DNA, 25 bp, Homo sapien
tctgctccacacgaacaagtgaagc

SEQ ID NO: 3011097 - DNA, 25 bp, Homo sapien
tggcagatgcacacaagggtcaagc

SEQ ID NO: 3011098 - DNA, 25 bp, Homo sapien
gtcttcacgtgcactgcccagcatg

SEQ ID NO: 3011099 - DNA, 25 bp, Homo sapien
tgcgtcttcacgtgcactgcccagc

SEQ ID NO: 3011100 - DNA, 25 bp, Homo sapien
agcatgccgccatcaaccagggcca

SEQ ID NO: 3011101 - DNA, 25 bp, Homo sapien
cgccatcaaccagggccaggtatgg

SEQ ID NO: 3011102 - DNA, 25 bp, Homo sapien
tgatgtccggcaggcctgtcttcaa

SEQ ID NO: 3011103 - DNA, 25 bp, Homo sapien
ctgatgtccggcaggcctgtcttca

SEQ ID NO: 3011104 - DNA, 25 bp, Homo sapien
catggcatctgagtcgccgccagcc

SEQ ID NO: 3011105 - DNA, 25 bp, Homo sapien
tcatggcatctgagtcgccgccagc

SEQ ID NO: 3011106 - DNA, 25 bp, Homo sapien
gaggtcactgtcctcactagagtgg

SEQ ID NO: 3011107 - DNA, 25 bp, Homo sapien
gatagaaacgctctctgttggtgaa

SEQ ID NO: 3011108 - DNA, 25 bp, Homo sapien
gagttacagtatttcacgtgcgatg

SEQ ID NO: 3011109 - DNA, 25 bp, Homo sapien
cctggatttggcaccgagagttaca

SEQ ID NO: 3011110 - DNA, 25 bp, Homo sapien
gatggctccaatcctccgatactaa

SEQ ID NO: 3011111 - DNA, 25 bp, Homo sapien
aatactcacgccctagctacagagg

SEQ ID NO: 3011112 - DNA, 25 bp, Homo sapien
tgacaggcttggtcacgtgacatac

SEQ ID NO: 3011113 - DNA, 25 bp, Homo sapien
taaggctagttcctcgtcacgtgac

SEQ ID NO: 3011114 - DNA, 25 bp, Homo sapien
ctgggaggcgaggaaactctgggcc

SEQ ID NO: 3011115 - DNA, 25 bp, Homo sapien
ccccggagaaggagacagactgaaa

SEQ ID NO: 3011116 - DNA, 25 bp, Homo sapien
tgaaaaatgggaactgttcgagacc

SEQ ID NO: 3011117 - DNA, 25 bp, Homo sapien
ctctgggccgcaggcaggccggagg

SEQ ID NO: 3011118 - DNA, 25 bp, Homo sapien
tgaggacgttcccttcacggagaaa

SEQ ID NO: 3011119 - DNA, 25 bp, Homo sapien
tcccttcacggagaaagattttgag

SEQ ID NO: 3011120 - DNA, 25 bp, Homo sapien
gtccattccgctgtgttgattgagg

SEQ ID NO: 3011121 - DNA, 25 bp, Homo sapien
ccagataatgctcggaatatttttc

SEQ ID NO: 3011122 - DNA, 25 bp, Homo sapien
aggaatacatggtgcgctagggccc

SEQ ID NO: 3011123 - DNA, 25 bp, Homo sapien
tatacaacctttacgagcaagtcag

SEQ ID NO: 3011124 - DNA, 25 bp, Homo sapien
tcccgggcgagagactgaatccctt

SEQ ID NO: 3011125 - DNA, 25 bp, Homo sapien
caagttcggctcaataagcgcaagg

SEQ ID NO: 3011126 - DNA, 25 bp, Homo sapien
tcttaatcacatcagctgtgtcatc

SEQ ID NO: 3011127 - DNA, 25 bp, Homo sapien
gtcatcaaggaacggacagtgtgag

SEQ ID NO: 3011128 - DNA, 25 bp, Homo sapien
ggcgggtgggcagccttcttcctcc

SEQ ID NO: 3011129 - DNA, 25 bp, Homo sapien
tacccaaggttccatcgtcctcaga

SEQ ID NO: 3011130 - DNA, 25 bp, Homo sapien
tatggtgaccctgaactagttgatc

SEQ ID NO: 3011131 - DNA, 25 bp, Homo sapien
ggattcttatgaagggactcccaga

SEQ ID NO: 3011132 - DNA, 25 bp, Homo sapien
gagaaagtgagaaccctaccaatgg

SEQ ID NO: 3011133 - DNA, 25 bp, Homo sapien
tgtatttgatgatggaagtcccctg

SEQ ID NO: 3011134 - DNA, 25 bp, Homo sapien
gctctcatacacagcgcagggcatt

SEQ ID NO: 3011135 - DNA, 25 bp, Homo sapien
ctcactgttcatgccggacctgtgg

SEQ ID NO: 3011136 - DNA, 25 bp, Homo sapien
tcagtacgtagcagggtgtttcagg

SEQ ID NO: 3011137 - DNA, 25 bp, Homo sapien
catgccggacctgtggatctcctgg

SEQ ID NO: 3011138 - DNA, 25 bp, Homo sapien
tccctgtgccaatatttctgtgctg

SEQ ID NO: 3011139 - DNA, 25 bp, Homo sapien
cacagccaatattggcagactcgct

SEQ ID NO: 3011140 - DNA, 25 bp, Homo sapien
gcagactcgcttccctgtgccaata

SEQ ID NO: 3011141 - DNA, 25 bp, Homo sapien
atatttctgtgctgctagagccagg

SEQ ID NO: 3011142 - DNA, 25 bp, Homo sapien
ggcccatatgcttgggttggccgaa

SEQ ID NO: 3011143 - DNA, 25 bp, Homo sapien
gagctggggcccatatgcttgggtt

SEQ ID NO: 3011144 - DNA, 25 bp, Homo sapien
ttgggttggccgaatggagtcatgc

SEQ ID NO: 3011145 - DNA, 25 bp, Homo sapien
catatgcttgggttggccgaatgga

SEQ ID NO: 3011146 - DNA, 25 bp, Homo sapien
tattgggggaggggctcaaacaaga

SEQ ID NO: 3011147 - DNA, 25 bp, Homo sapien
agcgccctgggcaaccctatgtaga

SEQ ID NO: 3011148 - DNA, 25 bp, Homo sapien
cctatgtagatgaagctgccggaga

SEQ ID NO: 3011149 - DNA, 25 bp, Homo sapien
atcaaagaaccagacaggaggaaag

SEQ ID NO: 3011150 - DNA, 25 bp, Homo sapien
gaaagaggcggtgaagtctcctgtc

SEQ ID NO: 3011151 - DNA, 25 bp, Homo sapien
tgaggagatgggtaagggcatttag

SEQ ID NO: 3011152 - DNA, 25 bp, Homo sapien
aggatagttgtaggcagatctgtga

SEQ ID NO: 3011153 - DNA, 25 bp, Homo sapien
gcatttagaagcctcgaaccccagg

SEQ ID NO: 3011154 - DNA, 25 bp, Homo sapien
gcagaggatagttgtaggcagatct

SEQ ID NO: 3011155 - DNA, 25 bp, Homo sapien
ccgaaagtatcgagaagaagctgca

SEQ ID NO: 3011156 - DNA, 25 bp, Homo sapien
agtcagagccccgaatacggccagc

SEQ ID NO: 3011157 - DNA, 25 bp, Homo sapien
tgcacgtaaggaacgaagtacccgc

SEQ ID NO: 3011158 - DNA, 25 bp, Homo sapien
caaagattgagaaggcccggcgtgt

SEQ ID NO: 3011159 - DNA, 25 bp, Homo sapien
tggcgaaagccgagaagacgaagcc

SEQ ID NO: 3011160 - DNA, 25 bp, Homo sapien
gagatgcagcagatcgctggcgaaa

SEQ ID NO: 3011161 - DNA, 25 bp, Homo sapien
cccaggccgaggtagagatgcagca

SEQ ID NO: 3011162 - DNA, 25 bp, Homo sapien
agacgaagcccagcgaggcgaggac

SEQ ID NO: 3011163 - DNA, 25 bp, Homo sapien
caaagtgctcggcaaggtcagggaa

SEQ ID NO: 3011164 - DNA, 25 bp, Homo sapien
gccagggcgctgatccacgcagtgt

SEQ ID NO: 3011165 - DNA, 25 bp, Homo sapien
tcctgggcgcttcggtcaaagtgct

SEQ ID NO: 3011166 - DNA, 25 bp, Homo sapien
taggacagcccgtttatcgcgaagg

SEQ ID NO: 3011167 - DNA, 25 bp, Homo sapien
aaacatctgtgagagaagcctccac

SEQ ID NO: 3011168 - DNA, 25 bp, Homo sapien
aacatctgtgagagaagcctccacg

SEQ ID NO: 3011169 - DNA, 25 bp, Homo sapien
gagaagcctccacgcctgtgcttcc

SEQ ID NO: 3011170 - DNA, 25 bp, Homo sapien
ccgtcactccgagcgcgatggcgcg

SEQ ID NO: 3011171 - DNA, 25 bp, Homo sapien
ggcagcgatggagcccaacttggac

SEQ ID NO: 3011172 - DNA, 25 bp, Homo sapien
cttggacgggctctctcggtaaaca

SEQ ID NO: 3011173 - DNA, 25 bp, Homo sapien
ggctgggcccggctttctctctgct

SEQ ID NO: 3011174 - DNA, 25 bp, Homo sapien
gataggttgacattctttacctcag

SEQ ID NO: 3011175 - DNA, 25 bp, Homo sapien
gcaacttaagtttggagcatgcatc

SEQ ID NO: 3011176 - DNA, 25 bp, Homo sapien
taaaaaatcaggtcattgaagccag

SEQ ID NO: 3011177 - DNA, 25 bp, Homo sapien
taaacaatatgatagaacattcagc

SEQ ID NO: 3011178 - DNA, 25 bp, Homo sapien
tcagcgtagatctaaagcccacacc

SEQ ID NO: 3011179 - DNA, 25 bp, Homo sapien
cagcgtagatctaaagcccacacca

SEQ ID NO: 3011180 - DNA, 25 bp, Homo sapien
agcgtagatctaaagcccacaccag

SEQ ID NO: 3011181 - DNA, 25 bp, Homo sapien
aaggacacaaaggtcagggtttgtg

SEQ ID NO: 3011182 - DNA, 25 bp, Homo sapien
caagtctgcttggacgaccatatca

SEQ ID NO: 3011183 - DNA, 25 bp, Homo sapien
gtagcacgtcgctgagatgctctga

SEQ ID NO: 3011184 - DNA, 25 bp, Homo sapien
gggctccttgtgtatcgggaacaag

SEQ ID NO: 3011185 - DNA, 25 bp, Homo sapien
tgcttgcagttcccgttcatgtttc

SEQ ID NO: 3011186 - DNA, 25 bp, Homo sapien
gcttgcagttcccgttcatgtttct

SEQ ID NO: 3011187 - DNA, 25 bp, Homo sapien
ctgcttgcagttcccgttcatgttt

SEQ ID NO: 3011188 - DNA, 25 bp, Homo sapien
cttgcagttcccgttcatgtttctg

SEQ ID NO: 3011189 - DNA, 25 bp, Homo sapien
gcaaggatggtggcatctgcttggc

SEQ ID NO: 3011190 - DNA, 25 bp, Homo sapien
gggaaatatgacatcttacatggcc

SEQ ID NO: 3011191 - DNA, 25 bp, Homo sapien
ttggcttctcgagacacctcaggaa

SEQ ID NO: 3011192 - DNA, 25 bp, Homo sapien
taaaggggaaatatgacatcttaca

SEQ ID NO: 3011193 - DNA, 25 bp, Homo sapien
ggcagtcccagagtgcagatgctgc

SEQ ID NO: 3011194 - DNA, 25 bp, Homo sapien
aggcagtcccagagtgcagatgctg

SEQ ID NO: 3011195 - DNA, 25 bp, Homo sapien
gcagtcccagagtgcagatgctgca

SEQ ID NO: 3011196 - DNA, 25 bp, Homo sapien
ggtagtcacctaggcatgcatattt

SEQ ID NO: 3011197 - DNA, 25 bp, Homo sapien
agttctcacgagagtatatattcac

SEQ ID NO: 3011198 - DNA, 25 bp, Homo sapien
tagaagctctagaagaggcaaggcc

SEQ ID NO: 3011199 - DNA, 25 bp, Homo sapien
tattgcgatcggagtggtagtcacc

SEQ ID NO: 3011200 - DNA, 25 bp, Homo sapien
aattataccttcatgaagttgactt

SEQ ID NO: 3011201 - DNA, 25 bp, Homo sapien
caccgccatttctgtggccgggtgg

SEQ ID NO: 3011202 - DNA, 25 bp, Homo sapien
taaaagcttaagaacactataccat

SEQ ID NO: 3011203 - DNA, 25 bp, Homo sapien
cagtgcttatttctctcccagagcg

SEQ ID NO: 3011204 - DNA, 25 bp, Homo sapien
cagtgactctcctggctggtctgac

SEQ ID NO: 3011205 - DNA, 25 bp, Homo sapien
tcagtgactctcctggctggtctga

SEQ ID NO: 3011206 - DNA, 25 bp, Homo sapien
tgccgtctggatggaagtgagcaca

SEQ ID NO: 3011207 - DNA, 25 bp, Homo sapien
gatggaagtgagcacagtcctcgcc

SEQ ID NO: 3011208 - DNA, 25 bp, Homo sapien
tggcagacgtcgtcattccacctgc

SEQ ID NO: 3011209 - DNA, 25 bp, Homo sapien
tccacctgccgtctggatggaagtg

SEQ ID NO: 3011210 - DNA, 25 bp, Homo sapien
agatggagtagaattcagttcaggg

SEQ ID NO: 3011211 - DNA, 25 bp, Homo sapien
ggtagatggagtagaattcagttca

SEQ ID NO: 3011212 - DNA, 25 bp, Homo sapien
aaacgctgacggaggacattggcac

SEQ ID NO: 3011213 - DNA, 25 bp, Homo sapien
tgccagtcagatccctgggggaaac

SEQ ID NO: 3011214 - DNA, 25 bp, Homo sapien
catccaggtgtatgcggagcctaga

SEQ ID NO: 3011215 - DNA, 25 bp, Homo sapien
caggtgtatgcggagcctagatatt

SEQ ID NO: 3011216 - DNA, 25 bp, Homo sapien
ggcccatccaggtgtatgcggagcc

SEQ ID NO: 3011217 - DNA, 25 bp, Homo sapien
gtatgcggagcctagatatttctgg

SEQ ID NO: 3011218 - DNA, 25 bp, Homo sapien
ccagccaactccttaaactagtgat

SEQ ID NO: 3011219 - DNA, 25 bp, Homo sapien
gtgacagaagggcagtggtgacttc

SEQ ID NO: 3011220 - DNA, 25 bp, Homo sapien
ctccttaaactagtgattctcaact

SEQ ID NO: 3011221 - DNA, 25 bp, Homo sapien
gccaactccttaaactagtgattct

SEQ ID NO: 3011222 - DNA, 25 bp, Homo sapien
ccaatgtgcggccaagcttaagaac

SEQ ID NO: 3011223 - DNA, 25 bp, Homo sapien
ttaggaactgagtaccagaagccct

SEQ ID NO: 3011224 - DNA, 25 bp, Homo sapien
tattaaatctctgagggtgtggcac

SEQ ID NO: 3011225 - DNA, 25 bp, Homo sapien
gatgacagtcattctggaagctccc

SEQ ID NO: 3011226 - DNA, 25 bp, Homo sapien
caggacatcccagagtgagagaacc

SEQ ID NO: 3011227 - DNA, 25 bp, Homo sapien
tccctggagttgatgaccaccaggt

SEQ ID NO: 3011228 - DNA, 25 bp, Homo sapien
gagagaaccagtagcagctgtcttg

SEQ ID NO: 3011229 - DNA, 25 bp, Homo sapien
agctgtcttggtgctccacccagtt

SEQ ID NO: 3011230 - DNA, 25 bp, Homo sapien
gcaccagctgctggactcgcaggag

SEQ ID NO: 3011231 - DNA, 25 bp, Homo sapien
tgttgttgagagtagccacctggca

SEQ ID NO: 3011232 - DNA, 25 bp, Homo sapien
cattgttgttgagagtagccacctg

SEQ ID NO: 3011233 - DNA, 25 bp, Homo sapien
ttgttgttgagagtagccacctggc

SEQ ID NO: 3011234 - DNA, 25 bp, Homo sapien
ggacagtggcctaggtgtgccttct

SEQ ID NO: 3011235 - DNA, 25 bp, Homo sapien
gtggcctaggtgtgccttctgcgta

SEQ ID NO: 3011236 - DNA, 25 bp, Homo sapien
ccttctgcgtagtgtgttcctggag

SEQ ID NO: 3011237 - DNA, 25 bp, Homo sapien
taggtgtgccttctgcgtagtgtgt

SEQ ID NO: 3011238 - DNA, 25 bp, Homo sapien
ctgcctgccgttcctgcttgaaacc

SEQ ID NO: 3011239 - DNA, 25 bp, Homo sapien
ctttcagagatgctatcgtttcttc

SEQ ID NO: 3011240 - DNA, 25 bp, Homo sapien
tttcagagatgctatcgtttcttcc

SEQ ID NO: 3011241 - DNA, 25 bp, Homo sapien
gaagttgctaaaatctgttctcagg

SEQ ID NO: 3011242 - DNA, 25 bp, Homo sapien
cctgggaagtcagtgcctggatctc

SEQ ID NO: 3011243 - DNA, 25 bp, Homo sapien
cacagtgtttgaggtgaagttgcta

SEQ ID NO: 3011244 - DNA, 25 bp, Homo sapien
ctggatctccgccacagtgtttgag

SEQ ID NO: 3011245 - DNA, 25 bp, Homo sapien
ggacagcaggagatggcagggccca

SEQ ID NO: 3011246 - DNA, 25 bp, Homo sapien
cccagagcagagacgctgcaggagg

SEQ ID NO: 3011247 - DNA, 25 bp, Homo sapien
tttggaatccaaccacacagatgat

SEQ ID NO: 3011248 - DNA, 25 bp, Homo sapien
ccacacagatgatgaccagcagcag

SEQ ID NO: 3011249 - DNA, 25 bp, Homo sapien
tactggaagttttcatacgtccttg

SEQ ID NO: 3011250 - DNA, 25 bp, Homo sapien
ggaagttttcatacgtccttgtcat

SEQ ID NO: 3011251 - DNA, 25 bp, Homo sapien
agtactggaagttttcatacgtcct

SEQ ID NO: 3011252 - DNA, 25 bp, Homo sapien
ctggaagttttcatacgtccttgtc

SEQ ID NO: 3011253 - DNA, 25 bp, Homo sapien
acacggctctgaggttgtcacagct

SEQ ID NO: 3011254 - DNA, 25 bp, Homo sapien
gcttgggccaacacggctctgaggt

SEQ ID NO: 3011255 - DNA, 25 bp, Homo sapien
cttgggccaacacggctctgaggtt

SEQ ID NO: 3011256 - DNA, 25 bp, Homo sapien
ggccaacacggctctgaggttgtca

SEQ ID NO: 3011257 - DNA, 25 bp, Homo sapien
gtctggagggtgtgattcccacgtt

SEQ ID NO: 3011258 - DNA, 25 bp, Homo sapien
tctggagggtgtgattcccacgttg

SEQ ID NO: 3011259 - DNA, 25 bp, Homo sapien
ctggagggtgtgattcccacgttgg

SEQ ID NO: 3011260 - DNA, 25 bp, Homo sapien
ggtctggagggtgtgattcccacgt

SEQ ID NO: 3011261 - DNA, 25 bp, Homo sapien
tatcatctgggacatcccatctcct

SEQ ID NO: 3011262 - DNA, 25 bp, Homo sapien
tctcctcaactttagacagtaaatg

SEQ ID NO: 3011263 - DNA, 25 bp, Homo sapien
aaatcccaggagccctatcatctgg

SEQ ID NO: 3011264 - DNA, 25 bp, Homo sapien
caaggaccagaggtgggacgtcact

SEQ ID NO: 3011265 - DNA, 25 bp, Homo sapien
cttccacaaccattccccccaagca

SEQ ID NO: 3011266 - DNA, 25 bp, Homo sapien
cagagacgtcatctgaaactggata

SEQ ID NO: 3011267 - DNA, 25 bp, Homo sapien
gatctcactattgttccccagccta

SEQ ID NO: 3011268 - DNA, 25 bp, Homo sapien
gattcttccagaccatacagaaaga

SEQ ID NO: 3011269 - DNA, 25 bp, Homo sapien
caagtgattggaacatatgaaggtt

SEQ ID NO: 3011270 - DNA, 25 bp, Homo sapien
cactgtaaagctgttgatgagctcc

SEQ ID NO: 3011271 - DNA, 25 bp, Homo sapien
taaactcacgaacaaactaccgctc

SEQ ID NO: 3011272 - DNA, 25 bp, Homo sapien
taccagggagaccatgaagatatgt

SEQ ID NO: 3011273 - DNA, 25 bp, Homo sapien
gagccgtgattgtaaggatctcacc

SEQ ID NO: 3011274 - DNA, 25 bp, Homo sapien
tcctcgtcgtgaccattttccttga

SEQ ID NO: 3011275 - DNA, 25 bp, Homo sapien
gctggggtatgccctgcgacccggt

SEQ ID NO: 3011276 - DNA, 25 bp, Homo sapien
cctcctcctcgtcgtgaccattttc

SEQ ID NO: 3011277 - DNA, 25 bp, Homo sapien
tttccttgaaggctgagagtggagc

SEQ ID NO: 3011278 - DNA, 25 bp, Homo sapien
ctcttatctggcctgattggtgcgt

SEQ ID NO: 3011279 - DNA, 25 bp, Homo sapien
agctaggcacaaaggttctcgactt

SEQ ID NO: 3011280 - DNA, 25 bp, Homo sapien
aaggttctcgacttcccgaccagag

SEQ ID NO: 3011281 - DNA, 25 bp, Homo sapien
tctcgacttcccgaccagagtagct

SEQ ID NO: 3011282 - DNA, 25 bp, Homo sapien
tccagggtcagggactcttaaacta

SEQ ID NO: 3011283 - DNA, 25 bp, Homo sapien
tgtttcttctttcctacgccattga

SEQ ID NO: 3011284 - DNA, 25 bp, Homo sapien
aaggaggtgggatctcagtcctcca

SEQ ID NO: 3011285 - DNA, 25 bp, Homo sapien
tgaagaggctgacgattataataat

SEQ ID NO: 3011286 - DNA, 25 bp, Homo sapien
cctcgccggtggcattccgcctttt

SEQ ID NO: 3011287 - DNA, 25 bp, Homo sapien
tcgccggtggcattccgccttttct

SEQ ID NO: 3011288 - DNA, 25 bp, Homo sapien
ccggtggcattccgccttttctcac

SEQ ID NO: 3011289 - DNA, 25 bp, Homo sapien
gccggtggcattccgccttttctca

SEQ ID NO: 3011290 - DNA, 25 bp, Homo sapien
gccatccggctggacttcaacacag

SEQ ID NO: 3011291 - DNA, 25 bp, Homo sapien
tggacttcaacacagtcttcacttc

SEQ ID NO: 3011292 - DNA, 25 bp, Homo sapien
agaagtcatcgttccagcggccatc

SEQ ID NO: 3011293 - DNA, 25 bp, Homo sapien
cagctcgtgcccgtgccaattatct

SEQ ID NO: 3011294 - DNA, 25 bp, Homo sapien
aaggaggcaagagaaaactcggact

SEQ ID NO: 3011295 - DNA, 25 bp, Homo sapien
ctaaggaggcaagagaaaactcgga

SEQ ID NO: 3011296 - DNA, 25 bp, Homo sapien
taaggaggcaagagaaaactcggac

SEQ ID NO: 3011297 - DNA, 25 bp, Homo sapien
tttccttgaaggccgagagtggagc

SEQ ID NO: 3011298 - DNA, 25 bp, Homo sapien
gagctggggtgtgccctgctaccca

SEQ ID NO: 3011299 - DNA, 25 bp, Homo sapien
cctcttcatgaccattttccttgaa

SEQ ID NO: 3011300 - DNA, 25 bp, Homo sapien
gctggggtgtgccctgctacccagt

SEQ ID NO: 3011301 - DNA, 25 bp, Homo sapien
agagcacagctttggaggggttgga

SEQ ID NO: 3011302 - DNA, 25 bp, Homo sapien
gaggagaggattggggaatttggtc

SEQ ID NO: 3011303 - DNA, 25 bp, Homo sapien
cacagctttggaggggttggagtct

SEQ ID NO: 3011304 - DNA, 25 bp, Homo sapien
cccagaagagcacagctttggaggg

SEQ ID NO: 3011305 - DNA, 25 bp, Homo sapien
ttgtagttgtgcctatagtctgtgc

SEQ ID NO: 3011306 - DNA, 25 bp, Homo sapien
tagttgtgcctatagtctgtgccat

SEQ ID NO: 3011307 - DNA, 25 bp, Homo sapien
gttgtgcctatagtctgtgccatcc

SEQ ID NO: 3011308 - DNA, 25 bp, Homo sapien
gtgcctatagtctgtgccatccacc

SEQ ID NO: 3011309 - DNA, 25 bp, Homo sapien
tattgaaggggttcgtgtgttgtac

SEQ ID NO: 3011310 - DNA, 25 bp, Homo sapien
tatccaggtattgaaggggttcgtg

SEQ ID NO: 3011311 - DNA, 25 bp, Homo sapien
ctatccaggtattgaaggggttcgt

SEQ ID NO: 3011312 - DNA, 25 bp, Homo sapien
ggttcgtgtgttgtacaatgaattt

SEQ ID NO: 3011313 - DNA, 25 bp, Homo sapien
tgttggcgcatgcctgtaatcccag

SEQ ID NO: 3011314 - DNA, 25 bp, Homo sapien
caacacggagaaacctcatctccac

SEQ ID NO: 3011315 - DNA, 25 bp, Homo sapien
ctacttgggaggctgaggcaggaga

SEQ ID NO: 3011316 - DNA, 25 bp, Homo sapien
ctaaaaatacaaaattagccaggcg

SEQ ID NO: 3011317 - DNA, 25 bp, Homo sapien
aaataccttaagcttagctgccctg

SEQ ID NO: 3011318 - DNA, 25 bp, Homo sapien
ggaaagactcagacacatgggaata

SEQ ID NO: 3011319 - DNA, 25 bp, Homo sapien
gggaataagaggtatcctggtctcc

SEQ ID NO: 3011320 - DNA, 25 bp, Homo sapien
gaacacctctcacatagcaattgta

SEQ ID NO: 3011321 - DNA, 25 bp, Homo sapien
cgagatccaggagtcgatatatttt

SEQ ID NO: 3011322 - DNA, 25 bp, Homo sapien
atttttaagggcgagatccaggagt

SEQ ID NO: 3011323 - DNA, 25 bp, Homo sapien
gaagagattgcaatgtacagtcaag

SEQ ID NO: 3011324 - DNA, 25 bp, Homo sapien
gattgcaatgtacagtcaagactga

SEQ ID NO: 3011325 - DNA, 25 bp, Homo sapien
gagttgatgaccaccaggtgtgcgt

SEQ ID NO: 3011326 - DNA, 25 bp, Homo sapien
gagagaaccagtagcagctgccttg

SEQ ID NO: 3011327 - DNA, 25 bp, Homo sapien
cttggtgctccacccagttgacggg

SEQ ID NO: 3011328 - DNA, 25 bp, Homo sapien
agctggcagtacttctccgcctcag

SEQ ID NO: 3011329 - DNA, 25 bp, Homo sapien
gggagatgagatccagccggagggg

SEQ ID NO: 3011330 - DNA, 25 bp, Homo sapien
agggagatgagatccagccggaggg

SEQ ID NO: 3011331 - DNA, 25 bp, Homo sapien
ggagatgagatccagccggaggggc

SEQ ID NO: 3011332 - DNA, 25 bp, Homo sapien
cttcagatggaagagcagggcatcg

SEQ ID NO: 3011333 - DNA, 25 bp, Homo sapien
aggtccacggggaagtgcttcagat

SEQ ID NO: 3011334 - DNA, 25 bp, Homo sapien
gctccatctggcaggccacgaagcg

SEQ ID NO: 3011335 - DNA, 25 bp, Homo sapien
ggaagtgcttcagatggaagagcag

SEQ ID NO: 3011336 - DNA, 25 bp, Homo sapien
gggatgtgatcttgtcacccacgct

SEQ ID NO: 3011337 - DNA, 25 bp, Homo sapien
tccagcttggctcctagggatgtga

SEQ ID NO: 3011338 - DNA, 25 bp, Homo sapien
tcctagggatgtgatcttgtcaccc

SEQ ID NO: 3011339 - DNA, 25 bp, Homo sapien
gcttggctcctagggatgtgatctt

SEQ ID NO: 3011340 - DNA, 25 bp, Homo sapien
tgggtgctgattgcctggacctccg

SEQ ID NO: 3011341 - DNA, 25 bp, Homo sapien
tgattgcctggacctccgtcagggt

SEQ ID NO: 3011342 - DNA, 25 bp, Homo sapien
cctccgtcagggtgctcgaggagaa

SEQ ID NO: 3011343 - DNA, 25 bp, Homo sapien
cctggacctccgtcagggtgctcga

SEQ ID NO: 3011344 - DNA, 25 bp, Homo sapien
agcagactgaagcagaccatggagc

SEQ ID NO: 3011345 - DNA, 25 bp, Homo sapien
gcagactgaagcagaccatggagca

SEQ ID NO: 3011346 - DNA, 25 bp, Homo sapien
tgccaggggctgggcaggaggtggc

SEQ ID NO: 3011347 - DNA, 25 bp, Homo sapien
gccaggggctgggcaggaggtggcc

SEQ ID NO: 3011348 - DNA, 25 bp, Homo sapien
tgtgccaggggctgggcaggaggtg

SEQ ID NO: 3011349 - DNA, 25 bp, Homo sapien
ctgtgccaggggctgggcaggaggt

SEQ ID NO: 3011350 - DNA, 25 bp, Homo sapien
tcctgggattcagcctgcgagtgcc

SEQ ID NO: 3011351 - DNA, 25 bp, Homo sapien
tctcctgggattcagcctgcgagtg

SEQ ID NO: 3011352 - DNA, 25 bp, Homo sapien
cctctcctgggattcagcctgcgag

SEQ ID NO: 3011353 - DNA, 25 bp, Homo sapien
ttcctctcctgggattcagcctgcg

SEQ ID NO: 3011354 - DNA, 25 bp, Homo sapien
ctggatatcttgaaagtccttggcc

SEQ ID NO: 3011355 - DNA, 25 bp, Homo sapien
gatggtcattttcctccgagctcag

SEQ ID NO: 3011356 - DNA, 25 bp, Homo sapien
aggatggtcattttcctccgagctc

SEQ ID NO: 3011357 - DNA, 25 bp, Homo sapien
gctcagctgctggatatcttgaaag

SEQ ID NO: 3011358 - DNA, 25 bp, Homo sapien
tgggctgggctgaggttgctctgag

SEQ ID NO: 3011359 - DNA, 25 bp, Homo sapien
ggctgggctgaggttgctctgaggg

SEQ ID NO: 3011360 - DNA, 25 bp, Homo sapien
ctgggctgaggttgctctgagggct

SEQ ID NO: 3011361 - DNA, 25 bp, Homo sapien
ggctgaggttgctctgagggctggg

SEQ ID NO: 3011362 - DNA, 25 bp, Homo sapien
ggtgcagattcacgtggaggttgat

SEQ ID NO: 3011363 - DNA, 25 bp, Homo sapien
tgcagattcacgtggaggttgatgg

SEQ ID NO: 3011364 - DNA, 25 bp, Homo sapien
gcagattcacgtggaggttgatggt

SEQ ID NO: 3011365 - DNA, 25 bp, Homo sapien
agaggtgcagattcacgtggaggtt

SEQ ID NO: 3011366 - DNA, 25 bp, Homo sapien
ctgagtgtccaagctctaacctggc

SEQ ID NO: 3011367 - DNA, 25 bp, Homo sapien
tgtgaaaggtgtggagagcggacac

SEQ ID NO: 3011368 - DNA, 25 bp, Homo sapien
ctcccgcaggcaaccctggccttgg

SEQ ID NO: 3011369 - DNA, 25 bp, Homo sapien
agagcggacacctggctcccgcagg

SEQ ID NO: 3011370 - DNA, 25 bp, Homo sapien
cactcattgcaccatttggaagggg

SEQ ID NO: 3011371 - DNA, 25 bp, Homo sapien
actcattgcaccatttggaaggggt

SEQ ID NO: 3011372 - DNA, 25 bp, Homo sapien
agttctctactcttgcccaatccgg

SEQ ID NO: 3011373 - DNA, 25 bp, Homo sapien
cagctctcctcgcaggaggaatcca

SEQ ID NO: 3011374 - DNA, 25 bp, Homo sapien
tgtctccaaatatccctgaccagga

SEQ ID NO: 3011375 - DNA, 25 bp, Homo sapien
gaccaggatcacagcgaccagttct

SEQ ID NO: 3011376 - DNA, 25 bp, Homo sapien
gggagtcaacagctcaagcctgtaa

SEQ ID NO: 3011377 - DNA, 25 bp, Homo sapien
agagggagtcaacagctcaagcctg

SEQ ID NO: 3011378 - DNA, 25 bp, Homo sapien
cccaaaattagaggctcagcccagg

SEQ ID NO: 3011379 - DNA, 25 bp, Homo sapien
gggcgaccccaaaattagaggctca

SEQ ID NO: 3011380 - DNA, 25 bp, Homo sapien
caggcttggtgccacacaccatggt

SEQ ID NO: 3011381 - DNA, 25 bp, Homo sapien
taaagtaacatttggatggtcaggc

SEQ ID NO: 3011382 - DNA, 25 bp, Homo sapien
gtggctcatacctgggtggccaaag

SEQ ID NO: 3011383 - DNA, 25 bp, Homo sapien
gatgctcagcgtcatatgtcattag

SEQ ID NO: 3011384 - DNA, 25 bp, Homo sapien
aaaatcctagatgaaaattcccgag

SEQ ID NO: 3011385 - DNA, 25 bp, Homo sapien
agatgggcggattcccaatcccgga

SEQ ID NO: 3011386 - DNA, 25 bp, Homo sapien
gggtttcaagctcctcaccttcgga

SEQ ID NO: 3011387 - DNA, 25 bp, Homo sapien
tgcagaaagcgccacgggtttcaag

SEQ ID NO: 3011388 - DNA, 25 bp, Homo sapien
cctggctggccttgtccagctctgt

SEQ ID NO: 3011389 - DNA, 25 bp, Homo sapien
gccttgtccagctctgtctcgcaga

SEQ ID NO: 3011390 - DNA, 25 bp, Homo sapien
ttaaaggagaggtggctcctggctg

SEQ ID NO: 3011391 - DNA, 25 bp, Homo sapien
ctggccttgtccagctctgtctcgc

SEQ ID NO: 3011392 - DNA, 25 bp, Homo sapien
tggccgtaccagtcgtccggctgct

SEQ ID NO: 3011393 - DNA, 25 bp, Homo sapien
ccgtcgtcggtgaagtgggcacagt

SEQ ID NO: 3011394 - DNA, 25 bp, Homo sapien
ctggcagacgtcgtcgttccagcgg

SEQ ID NO: 3011395 - DNA, 25 bp, Homo sapien
tcctccgagcccgtggccgtaccag

SEQ ID NO: 3011396 - DNA, 25 bp, Homo sapien
caggccgagggagggcgcgcactca

SEQ ID NO: 3011397 - DNA, 25 bp, Homo sapien
atccgcaggcgggtcgctccagact

SEQ ID NO: 3011398 - DNA, 25 bp, Homo sapien
cgaaggcggccggacccaggccgag

SEQ ID NO: 3011399 - DNA, 25 bp, Homo sapien
tgtgggccccaggaggtcggatccg

SEQ ID NO: 3011400 - DNA, 25 bp, Homo sapien
ttgaagcccgtctcgtagtccgtcc

SEQ ID NO: 3011401 - DNA, 25 bp, Homo sapien
ggcctatgtggtgctggacaaattt

SEQ ID NO: 3011402 - DNA, 25 bp, Homo sapien
cgttttggtcgtggaggcccatcca

SEQ ID NO: 3011403 - DNA, 25 bp, Homo sapien
ccaggtgttcacagggcctatgtgg

SEQ ID NO: 3011404 - DNA, 25 bp, Homo sapien
gtggtgatctctccgaggccagcca

SEQ ID NO: 3011405 - DNA, 25 bp, Homo sapien
gaaggcgggtggtgatctctccgag

SEQ ID NO: 3011406 - DNA, 25 bp, Homo sapien
gcgggtggtgatctctccgaggcca

SEQ ID NO: 3011407 - DNA, 25 bp, Homo sapien
gggtggtgatctctccgaggccagc

SEQ ID NO: 3011408 - DNA, 25 bp, Homo sapien
caggacgtgaccaccaccaggtgcg

SEQ ID NO: 3011409 - DNA, 25 bp, Homo sapien
agttgtcggcgtcagcccaggcctt

SEQ ID NO: 3011410 - DNA, 25 bp, Homo sapien
ggcagtagttgtcggcgtcagccca

SEQ ID NO: 3011411 - DNA, 25 bp, Homo sapien
tcctccagccggcagtagttgtcgg

SEQ ID NO: 3011412 - DNA, 25 bp, Homo sapien
ggggcgcaggggctaagcgctgccc

SEQ ID NO: 3011413 - DNA, 25 bp, Homo sapien
ctgagcgggagaaacggggcgcagg

SEQ ID NO: 3011414 - DNA, 25 bp, Homo sapien
tgagcgggagaaacggggcgcaggg

SEQ ID NO: 3011415 - DNA, 25 bp, Homo sapien
gagaaacggggcgcaggggctaagc

SEQ ID NO: 3011416 - DNA, 25 bp, Homo sapien
ctcaggctccgcaggtcagacacga

SEQ ID NO: 3011417 - DNA, 25 bp, Homo sapien
tccgcaggtcagacacgaactgctt

SEQ ID NO: 3011418 - DNA, 25 bp, Homo sapien
ggtcagacacgaactgcttcacgtg

SEQ ID NO: 3011419 - DNA, 25 bp, Homo sapien
attgccctggagcgccgccatctga

SEQ ID NO: 3011420 - DNA, 25 bp, Homo sapien
cacacacacctcattatcacactca

SEQ ID NO: 3011421 - DNA, 25 bp, Homo sapien
acacactccgtcattctcacactct

SEQ ID NO: 3011422 - DNA, 25 bp, Homo sapien
cacctcattatcacactcacagaca

SEQ ID NO: 3011423 - DNA, 25 bp, Homo sapien
cacacctcattatcacactcacaga

SEQ ID NO: 3011424 - DNA, 25 bp, Homo sapien
ctcattctcacatccacacaaggct

SEQ ID NO: 3011425 - DNA, 25 bp, Homo sapien
tcattctcacatccacacaaggctc

SEQ ID NO: 3011426 - DNA, 25 bp, Homo sapien
ttctccagctgggactctagcgact

SEQ ID NO: 3011427 - DNA, 25 bp, Homo sapien
tccagctgggactctagcgacttca

SEQ ID NO: 3011428 - DNA, 25 bp, Homo sapien
ccagctgggactctagcgacttcat

SEQ ID NO: 3011429 - DNA, 25 bp, Homo sapien
cttcactcaggtccttctgctgttt

SEQ ID NO: 3011430 - DNA, 25 bp, Homo sapien
cctccgtgctcgctgtgaagttgct

SEQ ID NO: 3011431 - DNA, 25 bp, Homo sapien
acctgggcctccgtgctcgctgtga

SEQ ID NO: 3011432 - DNA, 25 bp, Homo sapien
ttgacctgggcctccgtgctcgctg

SEQ ID NO: 3011433 - DNA, 25 bp, Homo sapien
gggcctccgtgctcgctgtgaagtt

SEQ ID NO: 3011434 - DNA, 25 bp, Homo sapien
aaaacgggatcgctgtgtccgccac

SEQ ID NO: 3011435 - DNA, 25 bp, Homo sapien
agaagaaaacgggatcgctgtgtcc

SEQ ID NO: 3011436 - DNA, 25 bp, Homo sapien
gcacccaccactcccttgccacggt

SEQ ID NO: 3011437 - DNA, 25 bp, Homo sapien
gggatcgctgtgtccgccaccactg

SEQ ID NO: 3011438 - DNA, 25 bp, Homo sapien
tttgggatccgatcacacagacaac

SEQ ID NO: 3011439 - DNA, 25 bp, Homo sapien
tgggatccgatcacacagacaacca

SEQ ID NO: 3011440 - DNA, 25 bp, Homo sapien
aggcgaggtccggagcagagacgct

SEQ ID NO: 3011441 - DNA, 25 bp, Homo sapien
atccgatcacacagacaaccacaag

SEQ ID NO: 3011442 - DNA, 25 bp, Homo sapien
taaacaattccctgctcggaggaca

SEQ ID NO: 3011443 - DNA, 25 bp, Homo sapien
ggaagagacacgttagccctgtgcc

SEQ ID NO: 3011444 - DNA, 25 bp, Homo sapien
cttgaaacgcaattgagtggcccgc

SEQ ID NO: 3011445 - DNA, 25 bp, Homo sapien
cacagctccagggtcctaaaagggt

SEQ ID NO: 3011446 - DNA, 25 bp, Homo sapien
tctcctgagagaggcagttccgaca

SEQ ID NO: 3011447 - DNA, 25 bp, Homo sapien
tcataggaagccgacagtgacctca

SEQ ID NO: 3011448 - DNA, 25 bp, Homo sapien
ccgccaaattctcgccttgcagagg

SEQ ID NO: 3011449 - DNA, 25 bp, Homo sapien
ggcagttccgacacctttcccagtg

SEQ ID NO: 3011450 - DNA, 25 bp, Homo sapien
ctgagctgatggtggtcactctcct

SEQ ID NO: 3011451 - DNA, 25 bp, Homo sapien
ctcctcattgtccagatgctgaagg

SEQ ID NO: 3011452 - DNA, 25 bp, Homo sapien
tgctgaaggtcttgatactccttgg

SEQ ID NO: 3011453 - DNA, 25 bp, Homo sapien
gctgatggtggtcactctcctcatt

SEQ ID NO: 3011454 - DNA, 25 bp, Homo sapien
catctctttactcccatctgattga

SEQ ID NO: 3011455 - DNA, 25 bp, Homo sapien
gctccatcatggagacctttcttct

SEQ ID NO: 3011456 - DNA, 25 bp, Homo sapien
gaatgaggggcccatctctttactc

SEQ ID NO: 3011457 - DNA, 25 bp, Homo sapien
tcccatctgattgacggctccatca

SEQ ID NO: 3011458 - DNA, 25 bp, Homo sapien
cccctcccaggcctgacatccagaa

SEQ ID NO: 3011459 - DNA, 25 bp, Homo sapien
tttcctccatcccctcccaggcctg

SEQ ID NO: 3011460 - DNA, 25 bp, Homo sapien
catcccctcccaggcctgacatcca

SEQ ID NO: 3011461 - DNA, 25 bp, Homo sapien
ttctttcctccatcccctcccaggc

SEQ ID NO: 3011462 - DNA, 25 bp, Homo sapien
ccccagggaggagaatcgtgttgcc

SEQ ID NO: 3011463 - DNA, 25 bp, Homo sapien
cagggtctcagggtctgattcccag

SEQ ID NO: 3011464 - DNA, 25 bp, Homo sapien
tgtgtgtccaagcacgccaaacgtg

SEQ ID NO: 3011465 - DNA, 25 bp, Homo sapien
tgcccgggactttggacagtaaaca

SEQ ID NO: 3011466 - DNA, 25 bp, Homo sapien
gcaattcagtccagaccaagggccc

SEQ ID NO: 3011467 - DNA, 25 bp, Homo sapien
tgcaaaccggcaaagaaaaatggtg

SEQ ID NO: 3011468 - DNA, 25 bp, Homo sapien
cagaaggcggcagcatttccagtct

SEQ ID NO: 3011469 - DNA, 25 bp, Homo sapien
gaccccaggttcctggcgttcagga

SEQ ID NO: 3011470 - DNA, 25 bp, Homo sapien
gatgacacgcttcaccttgtggtag

SEQ ID NO: 3011471 - DNA, 25 bp, Homo sapien
gagaggtcctcgatgacacgcttca

SEQ ID NO: 3011472 - DNA, 25 bp, Homo sapien
cttgtggtagatctcctcaaagctg

SEQ ID NO: 3011473 - DNA, 25 bp, Homo sapien
gcctgagaggtcctcgatgacacgc

SEQ ID NO: 3011474 - DNA, 25 bp, Homo sapien
ttggtggctctgtcgaaggctttgc

SEQ ID NO: 3011475 - DNA, 25 bp, Homo sapien
gctcctctgtgatccgcttgttaat

SEQ ID NO: 3011476 - DNA, 25 bp, Homo sapien
tttgcgggcttgctcctctgtgatc

SEQ ID NO: 3011477 - DNA, 25 bp, Homo sapien
gtcgaaggctttgcgggcttgctcc

SEQ ID NO: 3011478 - DNA, 25 bp, Homo sapien
gaacgcagacgccttgtgaggccca

SEQ ID NO: 3011479 - DNA, 25 bp, Homo sapien
ccagagatgggattcggactccaat

SEQ ID NO: 3011480 - DNA, 25 bp, Homo sapien
aatgtagtcctgtctagccaaggca

SEQ ID NO: 3011481 - DNA, 25 bp, Homo sapien
tccagggacatctacggagcttcat

SEQ ID NO: 3011482 - DNA, 25 bp, Homo sapien
cattggccgagacatcgaggatgca

SEQ ID NO: 3011483 - DNA, 25 bp, Homo sapien
acggcattggccgagacatcgagga

SEQ ID NO: 3011484 - DNA, 25 bp, Homo sapien
ccgagacatcgaggatgcagtgctt

SEQ ID NO: 3011485 - DNA, 25 bp, Homo sapien
cgccgcacggcattggccgagacat

SEQ ID NO: 3011486 - DNA, 25 bp, Homo sapien
aagcgggtatggacagagtaaaaga

SEQ ID NO: 3011487 - DNA, 25 bp, Homo sapien
tgacacaggcgggaaggaaagccaa

SEQ ID NO: 3011488 - DNA, 25 bp, Homo sapien
ggcaggcagggacccaagagatggt

SEQ ID NO: 3011489 - DNA, 25 bp, Homo sapien
cagatggagaaaggaaccgtggagg

SEQ ID NO: 3011490 - DNA, 25 bp, Homo sapien
gagggccagcggggagtcaggaaaa

SEQ ID NO: 3011491 - DNA, 25 bp, Homo sapien
gacagagttgcccaagaggagaagg

SEQ ID NO: 3011492 - DNA, 25 bp, Homo sapien
agagagcaggcagtcagacagagtt

SEQ ID NO: 3011493 - DNA, 25 bp, Homo sapien
gggaaggccaagccaccaaagacaa

SEQ ID NO: 3011494 - DNA, 25 bp, Homo sapien
atactcccgcttgggccgtgtcgta

SEQ ID NO: 3011495 - DNA, 25 bp, Homo sapien
tactggccggcctcaatgaacttgt

SEQ ID NO: 3011496 - DNA, 25 bp, Homo sapien
tcccatagaggtggctgttgtactg

SEQ ID NO: 3011497 - DNA, 25 bp, Homo sapien
tctcccgggacgacacaaagtggta

SEQ ID NO: 3011498 - DNA, 25 bp, Homo sapien
tgccaggaagtcaccccacccccca

SEQ ID NO: 3011499 - DNA, 25 bp, Homo sapien
aagatcatcgttggcgcggtccttg

SEQ ID NO: 3011500 - DNA, 25 bp, Homo sapien
cacaggatccaaacttgtcggggaa

SEQ ID NO: 3011501 - DNA, 25 bp, Homo sapien
ccttggtgggcccaaggatgatgat

SEQ ID NO: 3011502 - DNA, 25 bp, Homo sapien
ggaactcggagagaagatcatcgtt

SEQ ID NO: 3011503 - DNA, 25 bp, Homo sapien
ttccatctgcgtcactgtctcgtag

SEQ ID NO: 3011504 - DNA, 25 bp, Homo sapien
cactgtctcgtagctcagaaccgag

SEQ ID NO: 3011505 - DNA, 25 bp, Homo sapien
tagctcagaaccgagtcttctcgac

SEQ ID NO: 3011506 - DNA, 25 bp, Homo sapien
tctgcgtcactgtctcgtagctcag

SEQ ID NO: 3011507 - DNA, 25 bp, Homo sapien
gtgggaggtggggcatctgcaaggg

SEQ ID NO: 3011508 - DNA, 25 bp, Homo sapien
gggaggtggggcatctgcaaggggc

SEQ ID NO: 3011509 - DNA, 25 bp, Homo sapien
tggtgggaggtggggcatctgcaag

SEQ ID NO: 3011510 - DNA, 25 bp, Homo sapien
ggaggtggggcatctgcaaggggct

SEQ ID NO: 3011511 - DNA, 25 bp, Homo sapien
cctgcgatccagagctggagcccca

SEQ ID NO: 3011512 - DNA, 25 bp, Homo sapien
ctgcgatccagagctggagccccag

SEQ ID NO: 3011513 - DNA, 25 bp, Homo sapien
tgcgatccagagctggagccccagt

SEQ ID NO: 3011514 - DNA, 25 bp, Homo sapien
gcgatccagagctggagccccagtc

SEQ ID NO: 3011515 - DNA, 25 bp, Homo sapien
cttggcctttaaccttgaccactct

SEQ ID NO: 3011516 - DNA, 25 bp, Homo sapien
tttaaccttgaccactctcgtcgct

SEQ ID NO: 3011517 - DNA, 25 bp, Homo sapien
cctttaaccttgaccactctcgtcg

SEQ ID NO: 3011518 - DNA, 25 bp, Homo sapien
tggcctttaaccttgaccactctcg

SEQ ID NO: 3011519 - DNA, 25 bp, Homo sapien
tgtcagagtggacccgccgtgcctg

SEQ ID NO: 3011520 - DNA, 25 bp, Homo sapien
cgatgacatgcagcacatccccaaa

SEQ ID NO: 3011521 - DNA, 25 bp, Homo sapien
tgtcgtcggtctcactgtcagagtg

SEQ ID NO: 3011522 - DNA, 25 bp, Homo sapien
cactcctcatcactagcatcgatga

SEQ ID NO: 3011523 - DNA, 25 bp, Homo sapien
ggatcttggcctcgaatcggctgta

SEQ ID NO: 3011524 - DNA, 25 bp, Homo sapien
ctgctgttcatgagctgttcccgaa

SEQ ID NO: 3011525 - DNA, 25 bp, Homo sapien
ggttgctccgcagggacgcagtccc

SEQ ID NO: 3011526 - DNA, 25 bp, Homo sapien
ttcccgaaggtcgtggatcttggcc

SEQ ID NO: 3011527 - DNA, 25 bp, Homo sapien
ttctggtttatactgagcgatgatc

SEQ ID NO: 3011528 - DNA, 25 bp, Homo sapien
catggctggcatttcggaggtccac

SEQ ID NO: 3011529 - DNA, 25 bp, Homo sapien
catttcggaggtccacaccgttgac

SEQ ID NO: 3011530 - DNA, 25 bp, Homo sapien
gtgaccgtctgacccgcattcttca

SEQ ID NO: 3011531 - DNA, 25 bp, Homo sapien
cgtggagccccggtggatcacaatt

SEQ ID NO: 3011532 - DNA, 25 bp, Homo sapien
atcacaattcgcctcggttctcggg

SEQ ID NO: 3011533 - DNA, 25 bp, Homo sapien
tccccgagcaggtccttggccactg

SEQ ID NO: 3011534 - DNA, 25 bp, Homo sapien
atgaagatgccttcaccgtcctcgc

SEQ ID NO: 3011535 - DNA, 25 bp, Homo sapien
aacaacagcaaggatcagaggttgt

SEQ ID NO: 3011536 - DNA, 25 bp, Homo sapien
caacagcaaggatcagaggttgtgg

SEQ ID NO: 3011537 - DNA, 25 bp, Homo sapien
caacaacagcaaggatcagaggttg

SEQ ID NO: 3011538 - DNA, 25 bp, Homo sapien
ccaacaacagcaaggatcagaggtt

SEQ ID NO: 3011539 - DNA, 25 bp, Homo sapien
ctatttcatagggaatatctgaaga

SEQ ID NO: 3011540 - DNA, 25 bp, Homo sapien
tcatgggttaaacgggatgggtcat

SEQ ID NO: 3011541 - DNA, 25 bp, Homo sapien
ggaatatctgaagagggacagctac

SEQ ID NO: 3011542 - DNA, 25 bp, Homo sapien
gggatgtcgtgggactgcatgtcat

SEQ ID NO: 3011543 - DNA, 25 bp, Homo sapien
gccacctttaggtagacaacatcat

SEQ ID NO: 3011544 - DNA, 25 bp, Homo sapien
taggtagacaacatcatacgtgttc

SEQ ID NO: 3011545 - DNA, 25 bp, Homo sapien
tcttcatgcatgacgtcctctagcc

SEQ ID NO: 3011546 - DNA, 25 bp, Homo sapien
cactcaggtaggcattgctgggctt

SEQ ID NO: 3011547 - DNA, 25 bp, Homo sapien
tgtctccaatctgcaacctcccatc

SEQ ID NO: 3011548 - DNA, 25 bp, Homo sapien
tacgccccctgcgatgctgaagcca

SEQ ID NO: 3011549 - DNA, 25 bp, Homo sapien
ccccttcgatgatctttgttacata

SEQ ID NO: 3011550 - DNA, 25 bp, Homo sapien
ggatgtgctggttccctacgccccc

SEQ ID NO: 3011551 - DNA, 25 bp, Homo sapien
tacaaacaggatgctgtcgttgacc

SEQ ID NO: 3011552 - DNA, 25 bp, Homo sapien
catagaggcgaacgatggagcctgc

SEQ ID NO: 3011553 - DNA, 25 bp, Homo sapien
ggcttccggcgcatgacatagaggc

SEQ ID NO: 3011554 - DNA, 25 bp, Homo sapien
taggccccttgatgagcttgatctc

SEQ ID NO: 3011555 - DNA, 25 bp, Homo sapien
tcgtcaccgatgtgtgggttgtcag

SEQ ID NO: 3011556 - DNA, 25 bp, Homo sapien
ggttgtcagtgccacctgcgatgct

SEQ ID NO: 3011557 - DNA, 25 bp, Homo sapien
cagccccaccaggaatgatcttggt

SEQ ID NO: 3011558 - DNA, 25 bp, Homo sapien
gaaaatggatgggtcgtcaccgatg

SEQ ID NO: 3011559 - DNA, 25 bp, Homo sapien
gtgatttcctcgtattccatctccc

SEQ ID NO: 3011560 - DNA, 25 bp, Homo sapien
tgtgatttcctcgtattccatctcc

SEQ ID NO: 3011561 - DNA, 25 bp, Homo sapien
ttccaatgtgatttcctcgtattcc

SEQ ID NO: 3011562 - DNA, 25 bp, Homo sapien
caatgtgatttcctcgtattccatc

SEQ ID NO: 3011563 - DNA, 25 bp, Homo sapien
cagcacgggacagaaacacaaaagc

SEQ ID NO: 3011564 - DNA, 25 bp, Homo sapien
aacacaaaagcagtgagacagacat

SEQ ID NO: 3011565 - DNA, 25 bp, Homo sapien
gaaacacaaaagcagtgagacagac

SEQ ID NO: 3011566 - DNA, 25 bp, Homo sapien
cagaaacacaaaagcagtgagacag

SEQ ID NO: 3011567 - DNA, 25 bp, Homo sapien
tgacaatcactgggggagaattggc

SEQ ID NO: 3011568 - DNA, 25 bp, Homo sapien
atatcctggggcttctagggtatct

SEQ ID NO: 3011569 - DNA, 25 bp, Homo sapien
tatcctggggcttctagggtatctg

SEQ ID NO: 3011570 - DNA, 25 bp, Homo sapien
atcctggggcttctagggtatctgt

SEQ ID NO: 3011571 - DNA, 25 bp, Homo sapien
gagtttatcaccattctcccttacc

SEQ ID NO: 3011572 - DNA, 25 bp, Homo sapien
aacaatcttacacttctcaatcaac

SEQ ID NO: 3011573 - DNA, 25 bp, Homo sapien
tcataccctcaagattattctcaag

SEQ ID NO: 3011574 - DNA, 25 bp, Homo sapien
tgaaaattggggcttctcctgttcc

SEQ ID NO: 3011575 - DNA, 25 bp, Homo sapien
taccggcccttagggattgctgcag

SEQ ID NO: 3011576 - DNA, 25 bp, Homo sapien
cctaccggcccttagggattgctgc

SEQ ID NO: 3011577 - DNA, 25 bp, Homo sapien
ggcccttagggattgctgcagctcc

SEQ ID NO: 3011578 - DNA, 25 bp, Homo sapien
cttagggattgctgcagctccgagg

SEQ ID NO: 3011579 - DNA, 25 bp, Homo sapien
gggacaagttcctctccgccacgtg

SEQ ID NO: 3011580 - DNA, 25 bp, Homo sapien
gcccacgaccccgtggccagcctcg

SEQ ID NO: 3011581 - DNA, 25 bp, Homo sapien
cgtgcaccagctcgggggcgtttac

SEQ ID NO: 3011582 - DNA, 25 bp, Homo sapien
gaccccgtggccagcctcgaggtgg

SEQ ID NO: 3011583 - DNA, 25 bp, Homo sapien
cagagggggcgtgtcttcatcttgg

SEQ ID NO: 3011584 - DNA, 25 bp, Homo sapien
agaaggaagagcgacagcgcttgaa

SEQ ID NO: 3011585 - DNA, 25 bp, Homo sapien
aagcttgcaccctgatatttgcggg

SEQ ID NO: 3011586 - DNA, 25 bp, Homo sapien
gccggagcccataccgcggcacgta

SEQ ID NO: 3011587 - DNA, 25 bp, Homo sapien
gcgcttgaagcttgcaccctgatat

SEQ ID NO: 3011588 - DNA, 25 bp, Homo sapien
gagacacatggaggcgaatctgttc

SEQ ID NO: 3011589 - DNA, 25 bp, Homo sapien
catggaggcgaatctgttccgagcc

SEQ ID NO: 3011590 - DNA, 25 bp, Homo sapien
cacgcagagacacatggaggcgaat

SEQ ID NO: 3011591 - DNA, 25 bp, Homo sapien
gaggcgaatctgttccgagccgaca

SEQ ID NO: 3011592 - DNA, 25 bp, Homo sapien
ttggttgtcactatacagagacagt

SEQ ID NO: 3011593 - DNA, 25 bp, Homo sapien
cttggttgtcactatacagagacag

SEQ ID NO: 3011594 - DNA, 25 bp, Homo sapien
tggttgtcactatacagagacagtc

SEQ ID NO: 3011595 - DNA, 25 bp, Homo sapien
cgcggcggcgggtaaggggctctga

SEQ ID NO: 3011596 - DNA, 25 bp, Homo sapien
cggcggcgggtaaggggctctgact

SEQ ID NO: 3011597 - DNA, 25 bp, Homo sapien
ccgcggcggcgggtaaggggctctg

SEQ ID NO: 3011598 - DNA, 25 bp, Homo sapien
ctccgcaccccacttttgcaggggg

SEQ ID NO: 3011599 - DNA, 25 bp, Homo sapien
gaagcctcataatagtccaggatgt

SEQ ID NO: 3011600 - DNA, 25 bp, Homo sapien
gggtgcccaccgcagcagtgggggt

SEQ ID NO: 3011601 - DNA, 25 bp, Homo sapien
gtcgctatgcagcactgtgaggagt

SEQ ID NO: 3011602 - DNA, 25 bp, Homo sapien
gcctggaagaggtcgctatgcagca

SEQ ID NO: 3011603 - DNA, 25 bp, Homo sapien
aagaggtcgctatgcagcactgtga

SEQ ID NO: 3011604 - DNA, 25 bp, Homo sapien
tccaagagttagtgaatggcctaca

SEQ ID NO: 3011605 - DNA, 25 bp, Homo sapien
cgggaggaatccatctgcctgggca

SEQ ID NO: 3011606 - DNA, 25 bp, Homo sapien
taaagtaggccgtctctgagccgac

SEQ ID NO: 3011607 - DNA, 25 bp, Homo sapien
tgggcacatggtctctggaaggaac

SEQ ID NO: 3011608 - DNA, 25 bp, Homo sapien
tcgggggcattacccagtgagtgaa

SEQ ID NO: 3011609 - DNA, 25 bp, Homo sapien
cagatggctgttgcaagtcaccctg

SEQ ID NO: 3011610 - DNA, 25 bp, Homo sapien
gcttcgggggcattacccagtgagt

SEQ ID NO: 3011611 - DNA, 25 bp, Homo sapien
gtcaccctggggacgtgtgcaaaag

SEQ ID NO: 3011612 - DNA, 25 bp, Homo sapien
tgccactaatcgtacccagtttggg

SEQ ID NO: 3011613 - DNA, 25 bp, Homo sapien
ttgctaaggcggtgagtaccctgcc

SEQ ID NO: 3011614 - DNA, 25 bp, Homo sapien
tacgggtgccatcggagaacgtgct

SEQ ID NO: 3011615 - DNA, 25 bp, Homo sapien
ttgtatgcaaaacccatccctctgg

SEQ ID NO: 3011616 - DNA, 25 bp, Homo sapien
gcttcatgaaggtacaggacggtct

SEQ ID NO: 3011617 - DNA, 25 bp, Homo sapien
ggcacatctcagcacgggcatataa

SEQ ID NO: 3011618 - DNA, 25 bp, Homo sapien
taggtcagcccttatcttggagatc

SEQ ID NO: 3011619 - DNA, 25 bp, Homo sapien
caaaatctttggctcggtgaggtcc

SEQ ID NO: 3011620 - DNA, 25 bp, Homo sapien
tgtccacccggagttgagtcggagt

SEQ ID NO: 3011621 - DNA, 25 bp, Homo sapien
gggactgcagccgatggcccctctg

SEQ ID NO: 3011622 - DNA, 25 bp, Homo sapien
tgagtctcagcggacttgtccaccc

SEQ ID NO: 3011623 - DNA, 25 bp, Homo sapien
tcggagtggcgagctggtaagtggc

SEQ ID NO: 3011624 - DNA, 25 bp, Homo sapien
cacctggtgtatcgaggtgagactc

SEQ ID NO: 3011625 - DNA, 25 bp, Homo sapien
ggcttctgaatactcccggccaggg

SEQ ID NO: 3011626 - DNA, 25 bp, Homo sapien
catcgacctctatgccatggtggtg

SEQ ID NO: 3011627 - DNA, 25 bp, Homo sapien
cagggcctgtcccagttatgtgcct

SEQ ID NO: 3011628 - DNA, 25 bp, Homo sapien
gctgtctaggatgcctaaccccggg

SEQ ID NO: 3011629 - DNA, 25 bp, Homo sapien
caaaggcagctacatggcccaaatc

SEQ ID NO: 3011630 - DNA, 25 bp, Homo sapien
gcccaggcactgtaagagcaagcac

SEQ ID NO: 3011631 - DNA, 25 bp, Homo sapien
gccacaatctcctgtatggcagcag

SEQ ID NO: 3011632 - DNA, 25 bp, Homo sapien
tgggattgcccatggccatgtggaa

SEQ ID NO: 3011633 - DNA, 25 bp, Homo sapien
catgtggaagctttggcggctggct

SEQ ID NO: 3011634 - DNA, 25 bp, Homo sapien
aactcgctgggattgcccatggcca

SEQ ID NO: 3011635 - DNA, 25 bp, Homo sapien
atccacaaagaactcgctgggattg

SEQ ID NO: 3011636 - DNA, 25 bp, Homo sapien
ggggcatcatgaccaccatcatggg

SEQ ID NO: 3011637 - DNA, 25 bp, Homo sapien
tcggctggagggctcagactcactg

SEQ ID NO: 3011638 - DNA, 25 bp, Homo sapien
actgccactgccggacttggactcg

SEQ ID NO: 3011639 - DNA, 25 bp, Homo sapien
ccagttgagcctctggatggaggag

SEQ ID NO: 3011640 - DNA, 25 bp, Homo sapien
accataggtgtaagatgaaagctca

SEQ ID NO: 3011641 - DNA, 25 bp, Homo sapien
ccagggtatcctggtctgaagcccc

SEQ ID NO: 3011642 - DNA, 25 bp, Homo sapien
cactggagccatcgttgtcattgag

SEQ ID NO: 3011643 - DNA, 25 bp, Homo sapien
tcattgagagacaggttgactaggt

SEQ ID NO: 3011644 - DNA, 25 bp, Homo sapien
tccgaagacgtaatagcactgctca

SEQ ID NO: 3011645 - DNA, 25 bp, Homo sapien
caccactgaggtctccgaagacgta

SEQ ID NO: 3011646 - DNA, 25 bp, Homo sapien
cctccacgtgatggtagagccagtc

SEQ ID NO: 3011647 - DNA, 25 bp, Homo sapien
acggtgtgtcggatcaggcctgctt

SEQ ID NO: 3011648 - DNA, 25 bp, Homo sapien
tgtccgtatggacggagagaccccg

SEQ ID NO: 3011649 - DNA, 25 bp, Homo sapien
tggccttggtcaccgatgccatgtc

SEQ ID NO: 3011650 - DNA, 25 bp, Homo sapien
ccagaaaggcattagggatggtgat

SEQ ID NO: 3011651 - DNA, 25 bp, Homo sapien
gccacatgcggtcccggacttccag

SEQ ID NO: 3011652 - DNA, 25 bp, Homo sapien
gcaaagacgatccagatgtaatggt

SEQ ID NO: 3011653 - DNA, 25 bp, Homo sapien
aaggtgccagtcagagccgcggaat

SEQ ID NO: 3011654 - DNA, 25 bp, Homo sapien
tggaggaggaacctggataggctgg

SEQ ID NO: 3011655 - DNA, 25 bp, Homo sapien
agcagggtcaattggctggatgggc

SEQ ID NO: 3011656 - DNA, 25 bp, Homo sapien
cacttggccacagtcagcacaatgg

SEQ ID NO: 3011657 - DNA, 25 bp, Homo sapien
ggggagagtgaaataggcctgagga

SEQ ID NO: 3011658 - DNA, 25 bp, Homo sapien
ttcgggggagagtgaaataggcctg

SEQ ID NO: 3011659 - DNA, 25 bp, Homo sapien
acttggccacagtcagcacaatggg

SEQ ID NO: 3011660 - DNA, 25 bp, Homo sapien
aagcaagcacatcgcggctgggcta

SEQ ID NO: 3011661 - DNA, 25 bp, Homo sapien
aagagaagtccagtcaagggcgcag

SEQ ID NO: 3011662 - DNA, 25 bp, Homo sapien
tgagacaagagagtacacgctgtac

SEQ ID NO: 3011663 - DNA, 25 bp, Homo sapien
cagtgttcaaggatacgtgcaaggg

SEQ ID NO: 3011664 - DNA, 25 bp, Homo sapien
gaccggcaacctgcttggcaactca

SEQ ID NO: 3011665 - DNA, 25 bp, Homo sapien
gcccggctgtcttagtacttattaa

SEQ ID NO: 3011666 - DNA, 25 bp, Homo sapien
aaagaggactgaggaccggcaacct

SEQ ID NO: 3011667 - DNA, 25 bp, Homo sapien
cacgcccggctgtcttagtacttat

SEQ ID NO: 3011668 - DNA, 25 bp, Homo sapien
tgtgcacaatgtccctcagcacccg

SEQ ID NO: 3011669 - DNA, 25 bp, Homo sapien
cacagcgtcatcgttgctcatgttc

SEQ ID NO: 3011670 - DNA, 25 bp, Homo sapien
ccgcacagcgtcatcgttgctcatg

SEQ ID NO: 3011671 - DNA, 25 bp, Homo sapien
agcacccgcacagcgtcatcgttgc

SEQ ID NO: 3011672 - DNA, 25 bp, Homo sapien
atgtagatgcctccgtctccccgct

SEQ ID NO: 3011673 - DNA, 25 bp, Homo sapien
atgcctccgtctccccgctcattgc

SEQ ID NO: 3011674 - DNA, 25 bp, Homo sapien
ccctggctcaatgcgcccgtcggcc

SEQ ID NO: 3011675 - DNA, 25 bp, Homo sapien
tcccctggctcaatgcgcccgtcgg

SEQ ID NO: 3011676 - DNA, 25 bp, Homo sapien
gactgtgatgatattgagagacatt

SEQ ID NO: 3011677 - DNA, 25 bp, Homo sapien
cattgtggaatctgtgacgctgctg

SEQ ID NO: 3011678 - DNA, 25 bp, Homo sapien
ccatgtttagcgtgactgtgatgat

SEQ ID NO: 3011679 - DNA, 25 bp, Homo sapien
gatgatattgagagacattgtggaa

SEQ ID NO: 3011680 - DNA, 25 bp, Homo sapien
ccttcgccgccggtggcgcttaagg

SEQ ID NO: 3011681 - DNA, 25 bp, Homo sapien
cttcgccgccggtggcgcttaagga

SEQ ID NO: 3011682 - DNA, 25 bp, Homo sapien
ccggtggcgcttaaggaggcgggag

SEQ ID NO: 3011683 - DNA, 25 bp, Homo sapien
ccgccggtggcgcttaaggaggcgg

SEQ ID NO: 3011684 - DNA, 25 bp, Homo sapien
gagctctcgtatccggccaggtggc

SEQ ID NO: 3011685 - DNA, 25 bp, Homo sapien
tactctccagctcgctggtcatgag

SEQ ID NO: 3011686 - DNA, 25 bp, Homo sapien
caggctggtactctccagctcgctg

SEQ ID NO: 3011687 - DNA, 25 bp, Homo sapien
ggtagaggagctctcgtatccggcc

SEQ ID NO: 3011688 - DNA, 25 bp, Homo sapien
cttgaggggccaccagtcctgtggc

SEQ ID NO: 3011689 - DNA, 25 bp, Homo sapien
gggccaccagtcctgtggcccccag

SEQ ID NO: 3011690 - DNA, 25 bp, Homo sapien
ttgaggggccaccagtcctgtggcc

SEQ ID NO: 3011691 - DNA, 25 bp, Homo sapien
gaggggccaccagtcctgtggcccc

SEQ ID NO: 3011692 - DNA, 25 bp, Homo sapien
cgcctcagtgacactactgactcgg

SEQ ID NO: 3011693 - DNA, 25 bp, Homo sapien
tcagtgacactactgactcggtttc

SEQ ID NO: 3011694 - DNA, 25 bp, Homo sapien
cgctcccgcctcagtgacactactg

SEQ ID NO: 3011695 - DNA, 25 bp, Homo sapien
gacactactgactcggtttctgtct

SEQ ID NO: 3011696 - DNA, 25 bp, Homo sapien
ggttggggattatctgaggacacca

SEQ ID NO: 3011697 - DNA, 25 bp, Homo sapien
tcctctcgggtggcaaaggaggtaa

SEQ ID NO: 3011698 - DNA, 25 bp, Homo sapien
tctgcccgaggctcatggactggag

SEQ ID NO: 3011699 - DNA, 25 bp, Homo sapien
ggctggaggcgccagttctgcccga

SEQ ID NO: 3011700 - DNA, 25 bp, Homo sapien
aggataccacccttccgttgaagca

SEQ ID NO: 3011701 - DNA, 25 bp, Homo sapien
ataccacccttccgttgaagcaggg

SEQ ID NO: 3011702 - DNA, 25 bp, Homo sapien
caggataccacccttccgttgaagc

SEQ ID NO: 3011703 - DNA, 25 bp, Homo sapien
gcccaaagtagacgtgtgcccctcc

SEQ ID NO: 3011704 - DNA, 25 bp, Homo sapien
atgtcgcccaatccactctagcaaa

SEQ ID NO: 3011705 - DNA, 25 bp, Homo sapien
aagtagacgtgtgcccctccatgtc

SEQ ID NO: 3011706 - DNA, 25 bp, Homo sapien
tgtcgcccaatccactctagcaaag

SEQ ID NO: 3011707 - DNA, 25 bp, Homo sapien
cttgaaaaagtacttggcgcccgcg

SEQ ID NO: 3011708 - DNA, 25 bp, Homo sapien
tgcaggacgctcttgaaatcgccga

SEQ ID NO: 3011709 - DNA, 25 bp, Homo sapien
tgaaatcgccgagggtgatgcgctc

SEQ ID NO: 3011710 - DNA, 25 bp, Homo sapien
tggtaaatcaccttcgtctccccaa

SEQ ID NO: 3011711 - DNA, 25 bp, Homo sapien
ccaccgcccacccaaagggctaatg

SEQ ID NO: 3011712 - DNA, 25 bp, Homo sapien
caccgcccacccaaagggctaatgg

SEQ ID NO: 3011713 - DNA, 25 bp, Homo sapien
caaaccgacgcgcgagcgcggacag

SEQ ID NO: 3011714 - DNA, 25 bp, Homo sapien
tgcgcacacccgcaaaccgacgcgc

SEQ ID NO: 3011715 - DNA, 25 bp, Homo sapien
gacgccgcgagcttcctccaggtac

SEQ ID NO: 3011716 - DNA, 25 bp, Homo sapien
aaggggaaaaagcacggatctgcga

SEQ ID NO: 3011717 - DNA, 25 bp, Homo sapien
gcacggatctgcgagggtggcggcg

SEQ ID NO: 3011718 - DNA, 25 bp, Homo sapien
acccagtacgggagagaagcaaagg

SEQ ID NO: 3011719 - DNA, 25 bp, Homo sapien
ttatttacaacacgcaggctgtctg

SEQ ID NO: 3011720 - DNA, 25 bp, Homo sapien
caggctctagtactccacctttgag

SEQ ID NO: 3011721 - DNA, 25 bp, Homo sapien
tgtctgtacaaacagcggccgatat

SEQ ID NO: 3011722 - DNA, 25 bp, Homo sapien
caaaagaggtgagtgagaatcgtca

SEQ ID NO: 3011723 - DNA, 25 bp, Homo sapien
gaagtgcagacagtatccaagctcc

SEQ ID NO: 3011724 - DNA, 25 bp, Homo sapien
gacagagattatgtgtcgggacaca

SEQ ID NO: 3011725 - DNA, 25 bp, Homo sapien
tcaaacaagtctcccttgagaattc

SEQ ID NO: 3011726 - DNA, 25 bp, Homo sapien
gaagttccaggctaaagttggtgcc

SEQ ID NO: 3011727 - DNA, 25 bp, Homo sapien
gctctccagatttgggaggcccccc

SEQ ID NO: 3011728 - DNA, 25 bp, Homo sapien
tctccagatttgggaggccccccta

SEQ ID NO: 3011729 - DNA, 25 bp, Homo sapien
ctctccagatttgggaggcccccct

SEQ ID NO: 3011730 - DNA, 25 bp, Homo sapien
agaggtggatccacgtcccacacag

SEQ ID NO: 3011731 - DNA, 25 bp, Homo sapien
acacaggctgcactcaatcatgggc

SEQ ID NO: 3011732 - DNA, 25 bp, Homo sapien
tcatgggccgccctgcaaagggctt

SEQ ID NO: 3011733 - DNA, 25 bp, Homo sapien
ggtcttcttaatcttagcacaggag

SEQ ID NO: 3011734 - DNA, 25 bp, Homo sapien
tgatgtcctcgtccatgacccgcat

SEQ ID NO: 3011735 - DNA, 25 bp, Homo sapien
ctgattctaccatgatgtcctcgtc

SEQ ID NO: 3011736 - DNA, 25 bp, Homo sapien
tctaccatgatgtcctcgtccatga

SEQ ID NO: 3011737 - DNA, 25 bp, Homo sapien
tgacccgcatctcgccttcactgga

SEQ ID NO: 3011738 - DNA, 25 bp, Homo sapien
gtcagcaggagggactccttcaggg

SEQ ID NO: 3011739 - DNA, 25 bp, Homo sapien
gagggactccttcagggtgcactgt

SEQ ID NO: 3011740 - DNA, 25 bp, Homo sapien
gactccttcagggtgcactgtggca

SEQ ID NO: 3011741 - DNA, 25 bp, Homo sapien
caggagggactccttcagggtgcac

SEQ ID NO: 3011742 - DNA, 25 bp, Homo sapien
tcagggggtgttggcagcacaggga

SEQ ID NO: 3011743 - DNA, 25 bp, Homo sapien
tcctcctcttcagagtctgtatcac

SEQ ID NO: 3011744 - DNA, 25 bp, Homo sapien
cctcctcctcttcagagtctgtatc

SEQ ID NO: 3011745 - DNA, 25 bp, Homo sapien
ctcctcctcttcagagtctgtatca

SEQ ID NO: 3011746 - DNA, 25 bp, Homo sapien
tcctcctcctcttcagagtctgtat

SEQ ID NO: 3011747 - DNA, 25 bp, Homo sapien
gtgggagtctatccccccgttctgc

SEQ ID NO: 3011748 - DNA, 25 bp, Homo sapien
tgggagtctatccccccgttctgcc

SEQ ID NO: 3011749 - DNA, 25 bp, Homo sapien
tccttctttcgaggaggatgggaga

SEQ ID NO: 3011750 - DNA, 25 bp, Homo sapien
ccaggagttggccgaggcctccgaa

SEQ ID NO: 3011751 - DNA, 25 bp, Homo sapien
aggcctccgaagcaccccaaagcca

SEQ ID NO: 3011752 - DNA, 25 bp, Homo sapien
cttgctcttcttgattcgagatctc

SEQ ID NO: 3011753 - DNA, 25 bp, Homo sapien
tctcaagcaaggtagcactgtcggg

SEQ ID NO: 3011754 - DNA, 25 bp, Homo sapien
tctcctcgcaatggagagctggagc

SEQ ID NO: 3011755 - DNA, 25 bp, Homo sapien
cccatccagatcaaagagagagtcc

SEQ ID NO: 3011756 - DNA, 25 bp, Homo sapien
cctgcagacgagagaaagtggacct

SEQ ID NO: 3011757 - DNA, 25 bp, Homo sapien
tgttgaaatcctcaattgttctccg

SEQ ID NO: 3011758 - DNA, 25 bp, Homo sapien
gaatgtaaccagcatatgccaaaac

SEQ ID NO: 3011759 - DNA, 25 bp, Homo sapien
gggaatgtaaccagcatatgccaaa

SEQ ID NO: 3011760 - DNA, 25 bp, Homo sapien
ttgttctccgccgtttctctggtgg

SEQ ID NO: 3011761 - DNA, 25 bp, Homo sapien
ctctggcttaagggtcggaggtgga

SEQ ID NO: 3011762 - DNA, 25 bp, Homo sapien
tctggcttaagggtcggaggtggat

SEQ ID NO: 3011763 - DNA, 25 bp, Homo sapien
tctctggcttaagggtcggaggtgg

SEQ ID NO: 3011764 - DNA, 25 bp, Homo sapien
tccaggatgaccacgccgaaccgct

SEQ ID NO: 3011765 - DNA, 25 bp, Homo sapien
ccgcctcgggccctccgagaccgca

SEQ ID NO: 3011766 - DNA, 25 bp, Homo sapien
cgagaccgcacacgccgcccgccag

SEQ ID NO: 3011767 - DNA, 25 bp, Homo sapien
gatgaccacgccgaaccgctccccg

SEQ ID NO: 3011768 - DNA, 25 bp, Homo sapien
atccaacgctacttcacggccggga

SEQ ID NO: 3011769 - DNA, 25 bp, Homo sapien
aacgctacttcacggccgggacaga

SEQ ID NO: 3011770 - DNA, 25 bp, Homo sapien
acacgcatccaacgctacttcacgg

SEQ ID NO: 3011771 - DNA, 25 bp, Homo sapien
aggcacacgcatccaacgctacttc

SEQ ID NO: 3011772 - DNA, 25 bp, Homo sapien
cccagttactaggctatggacccct

SEQ ID NO: 3011773 - DNA, 25 bp, Homo sapien
gctatggacccctcaactctggccc

SEQ ID NO: 3011774 - DNA, 25 bp, Homo sapien
cacccagttactaggctatggaccc

SEQ ID NO: 3011775 - DNA, 25 bp, Homo sapien
ccagttactaggctatggacccctc

SEQ ID NO: 3011776 - DNA, 25 bp, Homo sapien
acaatcaccgggcattctccggcgg

SEQ ID NO: 3011777 - DNA, 25 bp, Homo sapien
gcaactactcggagctccggtacca

SEQ ID NO: 3011778 - DNA, 25 bp, Homo sapien
actcagcctcttctacgtcctccct

SEQ ID NO: 3011779 - DNA, 25 bp, Homo sapien
tctccggcggcaactactcggagct

SEQ ID NO: 3011780 - DNA, 25 bp, Homo sapien
cttcgggactgggctccgccatggc

SEQ ID NO: 3011781 - DNA, 25 bp, Homo sapien
ttgagactcgagtccgctagccgct

SEQ ID NO: 3011782 - DNA, 25 bp, Homo sapien
tgcttcgctccacagaagtgtccgc

SEQ ID NO: 3011783 - DNA, 25 bp, Homo sapien
ggtgccgcctctagtgctcgatgct

SEQ ID NO: 3011784 - DNA, 25 bp, Homo sapien
agtgctcgatgctcccactgcttcg

SEQ ID NO: 3011785 - DNA, 25 bp, Homo sapien
gaacagcggaaaagggaccgcatga

SEQ ID NO: 3011786 - DNA, 25 bp, Homo sapien
gaccgcatgaacctccggaactttg

SEQ ID NO: 3011787 - DNA, 25 bp, Homo sapien
tgaacctccggaactttgattccca

SEQ ID NO: 3011788 - DNA, 25 bp, Homo sapien
tgtagtccgtccgggaacagcggaa

SEQ ID NO: 3011789 - DNA, 25 bp, Homo sapien
gaagaagggattagaactctcggcc

SEQ ID NO: 3011790 - DNA, 25 bp, Homo sapien
ggagagcggaagtgcgcgcgcaggc

SEQ ID NO: 3011791 - DNA, 25 bp, Homo sapien
gattagaactctcggccaccatact

SEQ ID NO: 3011792 - DNA, 25 bp, Homo sapien
accatactgcctcgttctgcagctt

SEQ ID NO: 3011793 - DNA, 25 bp, Homo sapien
gggaaaagcccaacatgaacagaat

SEQ ID NO: 3011794 - DNA, 25 bp, Homo sapien
aagacttaaaatcagcgggacgagg

SEQ ID NO: 3011795 - DNA, 25 bp, Homo sapien
tgttcacctaaagcaggtacttcgg

SEQ ID NO: 3011796 - DNA, 25 bp, Homo sapien
aatatacttctatccctccagcttg

SEQ ID NO: 3011797 - DNA, 25 bp, Homo sapien
accattacccctcctaagagaggct

SEQ ID NO: 3011798 - DNA, 25 bp, Homo sapien
cattacccctcctaagagaggctgg

SEQ ID NO: 3011799 - DNA, 25 bp, Homo sapien
agaagtgccggtcctgaataaggga

SEQ ID NO: 3011800 - DNA, 25 bp, Homo sapien
aaacattaagaagtgccggtcctga

SEQ ID NO: 3011801 - DNA, 25 bp, Homo sapien
agacactttcgtcactgtaggcaat

SEQ ID NO: 3011802 - DNA, 25 bp, Homo sapien
gagaaagaagtcttcttcatggtgt

SEQ ID NO: 3011803 - DNA, 25 bp, Homo sapien
cgtagacactttcgtcactgtaggc

SEQ ID NO: 3011804 - DNA, 25 bp, Homo sapien
gaaagaagtcttcttcatggtgttc

SEQ ID NO: 3011805 - DNA, 25 bp, Homo sapien
caagccaggaagctagtccaaaact

SEQ ID NO: 3011806 - DNA, 25 bp, Homo sapien
cgacccagacacgttcttctagaac

SEQ ID NO: 3011807 - DNA, 25 bp, Homo sapien
gagtcccgaacagatagtttctcta

SEQ ID NO: 3011808 - DNA, 25 bp, Homo sapien
caaggcctaccacacgagcagtata

SEQ ID NO: 3011809 - DNA, 25 bp, Homo sapien
tggaatgacattgttgacaaagaaa

SEQ ID NO: 3011810 - DNA, 25 bp, Homo sapien
tggtacagctgacccattgtggcac

SEQ ID NO: 3011811 - DNA, 25 bp, Homo sapien
cactggtgggtggaatgacattgtt

SEQ ID NO: 3011812 - DNA, 25 bp, Homo sapien
aaacaaggcatcctcagctcggaga

SEQ ID NO: 3011813 - DNA, 25 bp, Homo sapien
cttccggatcaagaagtagaactga

SEQ ID NO: 3011814 - DNA, 25 bp, Homo sapien
tccggatcaagaagtagaactgacc

SEQ ID NO: 3011815 - DNA, 25 bp, Homo sapien
ttccggatcaagaagtagaactgac

SEQ ID NO: 3011816 - DNA, 25 bp, Homo sapien
cggatcaagaagtagaactgaccaa

SEQ ID NO: 3011817 - DNA, 25 bp, Homo sapien
caggtctcctatccgagctttggga

SEQ ID NO: 3011818 - DNA, 25 bp, Homo sapien
gtctcctatccgagctttgggagcc

SEQ ID NO: 3011819 - DNA, 25 bp, Homo sapien
gtccaggtctcctatccgagctttg

SEQ ID NO: 3011820 - DNA, 25 bp, Homo sapien
ccaggtctcctatccgagctttggg

SEQ ID NO: 3011821 - DNA, 25 bp, Homo sapien
gaagctgcacctgtcaagaactcaa

SEQ ID NO: 3011822 - DNA, 25 bp, Homo sapien
ccgaagctgcacctgtcaagaactc

SEQ ID NO: 3011823 - DNA, 25 bp, Homo sapien
agaaggaatgcagccccgaagctgc

SEQ ID NO: 3011824 - DNA, 25 bp, Homo sapien
gctgcacctgtcaagaactcaagaa

SEQ ID NO: 3011825 - DNA, 25 bp, Homo sapien
gagatcctgacctcactgactggag

SEQ ID NO: 3011826 - DNA, 25 bp, Homo sapien
gattcaatctcgcaaccttagctag

SEQ ID NO: 3011827 - DNA, 25 bp, Homo sapien
tctttgtctttgtacacgcggtgca

SEQ ID NO: 3011828 - DNA, 25 bp, Homo sapien
gatgaccatttgaagctcaggctgt

SEQ ID NO: 3011829 - DNA, 25 bp, Homo sapien
ggcgcttctcgaacggatgctcttc

SEQ ID NO: 3011830 - DNA, 25 bp, Homo sapien
ctcagagcggcgcttctcgaacgga

SEQ ID NO: 3011831 - DNA, 25 bp, Homo sapien
cgggtatttctttcggatcttctcg

SEQ ID NO: 3011832 - DNA, 25 bp, Homo sapien
tttcggatcttctcgccctcagagc

SEQ ID NO: 3011833 - DNA, 25 bp, Homo sapien
ccgggaaccgggctggacagggctg

SEQ ID NO: 3011834 - DNA, 25 bp, Homo sapien
cgggaaccgggctggacagggctgg

SEQ ID NO: 3011835 - DNA, 25 bp, Homo sapien
gcgacgtagcaaagacggttggctt

SEQ ID NO: 3011836 - DNA, 25 bp, Homo sapien
tcagcggagcgatccacgaatttgc

SEQ ID NO: 3011837 - DNA, 25 bp, Homo sapien
tcaatttgtgggctacgcaggcgac

SEQ ID NO: 3011838 - DNA, 25 bp, Homo sapien
gctaagatacgccactacctcagcg

SEQ ID NO: 3011839 - DNA, 25 bp, Homo sapien
gtttctccagctctacgccctttgg

SEQ ID NO: 3011840 - DNA, 25 bp, Homo sapien
tctcctttcgtgcttccatagcctg

SEQ ID NO: 3011841 - DNA, 25 bp, Homo sapien
ccatagcctgcttctccgaaggtgt

SEQ ID NO: 3011842 - DNA, 25 bp, Homo sapien
tctcctttcgtgcttccatagccgg

SEQ ID NO: 3011843 - DNA, 25 bp, Homo sapien
tgtttgtgaagaggcaggactggcc

SEQ ID NO: 3011844 - DNA, 25 bp, Homo sapien
gtacaaaactgatctaattcttcac

SEQ ID NO: 3011845 - DNA, 25 bp, Homo sapien
gacctgtaaccagctttgtgtcttt

SEQ ID NO: 3011846 - DNA, 25 bp, Homo sapien
aactgatctaattcttcactcctgc

SEQ ID NO: 3011847 - DNA, 25 bp, Homo sapien
tcagtgtttgtgaagaggcaggact

SEQ ID NO: 3011848 - DNA, 25 bp, Homo sapien
tactgggattttgggccactggatt

SEQ ID NO: 3011849 - DNA, 25 bp, Homo sapien
aagacacaaagctggttacaggtct

SEQ ID NO: 3011850 - DNA, 25 bp, Homo sapien
agtcctgcctcttcacaaacactga

SEQ ID NO: 3011851 - DNA, 25 bp, Homo sapien
aaaagacacaaagctggttacaggt

SEQ ID NO: 3011852 - DNA, 25 bp, Homo sapien
gtgaagaattagatcagttttgtac

SEQ ID NO: 3011853 - DNA, 25 bp, Homo sapien
aatccagtggcccaaaatcccagta

SEQ ID NO: 3011854 - DNA, 25 bp, Homo sapien
gcaggagtgaagaattagatcagtt

SEQ ID NO: 3011855 - DNA, 25 bp, Homo sapien
tgttcacactccatggaaaccccag

SEQ ID NO: 3011856 - DNA, 25 bp, Homo sapien
tgggagccctacactccacttggag

SEQ ID NO: 3011857 - DNA, 25 bp, Homo sapien
gagcccttgggatgccgtctgatgc

SEQ ID NO: 3011858 - DNA, 25 bp, Homo sapien
cgtctgatgccctgtccaatgtgag

SEQ ID NO: 3011859 - DNA, 25 bp, Homo sapien
aagcagcctcactcttaacttcgtg

SEQ ID NO: 3011860 - DNA, 25 bp, Homo sapien
ccacttggagtctggatggacacat

SEQ ID NO: 3011861 - DNA, 25 bp, Homo sapien
aacacgaagttaagagtgaggctgc

SEQ ID NO: 3011862 - DNA, 25 bp, Homo sapien
atcagacggcatcccaagggctcgc

SEQ ID NO: 3011863 - DNA, 25 bp, Homo sapien
gcttcagagcccctggcccatgtgt

SEQ ID NO: 3011864 - DNA, 25 bp, Homo sapien
gtgaggctgcttcagagcccctggc

SEQ ID NO: 3011865 - DNA, 25 bp, Homo sapien
tcacattggacagggcatcagacgg

SEQ ID NO: 3011866 - DNA, 25 bp, Homo sapien
ggtttccatggagtgtgaacacgaa

SEQ ID NO: 3011867 - DNA, 25 bp, Homo sapien
gctgatgttcgttccgtgctgagcc

SEQ ID NO: 3011868 - DNA, 25 bp, Homo sapien
accgctgatgttcgttccgtgctga

SEQ ID NO: 3011869 - DNA, 25 bp, Homo sapien
gttcaccgctgatgttcgttccgtg

SEQ ID NO: 3011870 - DNA, 25 bp, Homo sapien
ctgatgttcgttccgtgctgagccg

SEQ ID NO: 3011871 - DNA, 25 bp, Homo sapien
tcaccgctgatgttcgttccgtgct

SEQ ID NO: 3011872 - DNA, 25 bp, Homo sapien
ccgctgatgttcgttccgtgctgag

SEQ ID NO: 3011873 - DNA, 25 bp, Homo sapien
ggctcagcacggaacgaacatcagc

SEQ ID NO: 3011874 - DNA, 25 bp, Homo sapien
cacggaacgaacatcagcggtgaac

SEQ ID NO: 3011875 - DNA, 25 bp, Homo sapien
gctcagcacggaacgaacatcagcg

SEQ ID NO: 3011876 - DNA, 25 bp, Homo sapien
tcagcacggaacgaacatcagcggt

SEQ ID NO: 3011877 - DNA, 25 bp, Homo sapien
agcacggaacgaacatcagcggtga

SEQ ID NO: 3011878 - DNA, 25 bp, Homo sapien
cggctcagcacggaacgaacatcag

SEQ ID NO: 3011879 - DNA, 25 bp, Homo sapien
tcctggttcagtgaccccagcgaca

SEQ ID NO: 3011880 - DNA, 25 bp, Homo sapien
aaatcctggttcagtgaccccagcg

SEQ ID NO: 3011881 - DNA, 25 bp, Homo sapien
catccccatcaaatcctggttcagt

SEQ ID NO: 3011882 - DNA, 25 bp, Homo sapien
tcaacctgctcccaatgctggatgc

SEQ ID NO: 3011883 - DNA, 25 bp, Homo sapien
tgctcccaatgctggatgccctcag

SEQ ID NO: 3011884 - DNA, 25 bp, Homo sapien
ttctcaacctgctcccaatgctgga

SEQ ID NO: 3011885 - DNA, 25 bp, Homo sapien
ggttgagaagggctgtgtcgctggg

SEQ ID NO: 3011886 - DNA, 25 bp, Homo sapien
ctgagggcatccagcattgggagca

SEQ ID NO: 3011887 - DNA, 25 bp, Homo sapien
gcatccagcattgggagcaggttga

SEQ ID NO: 3011888 - DNA, 25 bp, Homo sapien
ggtcactgaaccaggatttgatggg

SEQ ID NO: 3011889 - DNA, 25 bp, Homo sapien
tgtcgctggggtcactgaaccagga

SEQ ID NO: 3011890 - DNA, 25 bp, Homo sapien
tccagcattgggagcaggttgagaa

SEQ ID NO: 3011891 - DNA, 25 bp, Homo sapien
cttaggttgttgacttccggtagtg

SEQ ID NO: 3011892 - DNA, 25 bp, Homo sapien
tgacttccggtagtgggaggcatat

SEQ ID NO: 3011893 - DNA, 25 bp, Homo sapien
aacttagtttcggagcataaaccag

SEQ ID NO: 3011894 - DNA, 25 bp, Homo sapien
acttccggtagtgggaggcatatat

SEQ ID NO: 3011895 - DNA, 25 bp, Homo sapien
cttagtttcggagcataaaccagga

SEQ ID NO: 3011896 - DNA, 25 bp, Homo sapien
tagtttcggagcataaaccaggaaa

SEQ ID NO: 3011897 - DNA, 25 bp, Homo sapien
tatgcctcccactaccggaagtcaa

SEQ ID NO: 3011898 - DNA, 25 bp, Homo sapien
cactaccggaagtcaacaacctaag

SEQ ID NO: 3011899 - DNA, 25 bp, Homo sapien
tttcctggtttatgctccgaaacta

SEQ ID NO: 3011900 - DNA, 25 bp, Homo sapien
cctggtttatgctccgaaactaagt

SEQ ID NO: 3011901 - DNA, 25 bp, Homo sapien
tatatgcctcccactaccggaagtc

SEQ ID NO: 3011902 - DNA, 25 bp, Homo sapien
atatatgcctcccactaccggaagt

SEQ ID NO: 3011903 - DNA, 25 bp, Homo sapien
cattgtgatcctggataactcccca

SEQ ID NO: 3011904 - DNA, 25 bp, Homo sapien
tgcactttggagttgggcagctaca

SEQ ID NO: 3011905 - DNA, 25 bp, Homo sapien
cagtgacctctccagcattgtgatc

SEQ ID NO: 3011906 - DNA, 25 bp, Homo sapien
gataactccccaggggcttacagga

SEQ ID NO: 3011907 - DNA, 25 bp, Homo sapien
aaggacctctctgtggtccacagtg

SEQ ID NO: 3011908 - DNA, 25 bp, Homo sapien
ggcagctacatcaaggacctctctg

SEQ ID NO: 3011909 - DNA, 25 bp, Homo sapien
gatgtagctgcccaactccaaagtg

SEQ ID NO: 3011910 - DNA, 25 bp, Homo sapien
tatccaggatcacaatgctggagag

SEQ ID NO: 3011911 - DNA, 25 bp, Homo sapien
gctggagaggtcactgtggaccaca

SEQ ID NO: 3011912 - DNA, 25 bp, Homo sapien
cagagaggtccttgatgtagctgcc

SEQ ID NO: 3011913 - DNA, 25 bp, Homo sapien
tggatggctcctgtaagcccctggg

SEQ ID NO: 3011914 - DNA, 25 bp, Homo sapien
taagcccctggggagttatccagga

SEQ ID NO: 3011915 - DNA, 25 bp, Homo sapien
gccagtggtacgagctggtggtgtt

SEQ ID NO: 3011916 - DNA, 25 bp, Homo sapien
tgagccagtggtacgagctggtggt

SEQ ID NO: 3011917 - DNA, 25 bp, Homo sapien
accaccagctcgtaccactggctca

SEQ ID NO: 3011918 - DNA, 25 bp, Homo sapien
aacaccaccagctcgtaccactggc

SEQ ID NO: 3011919 - DNA, 25 bp, Homo sapien
gctctgctgtggcagataaactgga

SEQ ID NO: 3011920 - DNA, 25 bp, Homo sapien
tacagcaagcatggagatctatggc

SEQ ID NO: 3011921 - DNA, 25 bp, Homo sapien
gagatctatggctctgctgtggcag

SEQ ID NO: 3011922 - DNA, 25 bp, Homo sapien
tacgagctggtggtgtttacagcaa

SEQ ID NO: 3011923 - DNA, 25 bp, Homo sapien
gtggtgtttacagcaagcatggaga

SEQ ID NO: 3011924 - DNA, 25 bp, Homo sapien
gataaactggacaatagcagaagca

SEQ ID NO: 3011925 - DNA, 25 bp, Homo sapien
tccagtttatctgccacagcagagc

SEQ ID NO: 3011926 - DNA, 25 bp, Homo sapien
tgccacagcagagccatagatctcc

SEQ ID NO: 3011927 - DNA, 25 bp, Homo sapien
agaatgcttctgctattgtccagtt

SEQ ID NO: 3011928 - DNA, 25 bp, Homo sapien
gagccatagatctccatgcttgctg

SEQ ID NO: 3011929 - DNA, 25 bp, Homo sapien
tctccatgcttgctgtaaacaccac

SEQ ID NO: 3011930 - DNA, 25 bp, Homo sapien
tgctgtaaacaccaccagctcgtac

SEQ ID NO: 3011931 - DNA, 25 bp, Homo sapien
gaatcatcaccttgtatggcatcgc

SEQ ID NO: 3011932 - DNA, 25 bp, Homo sapien
atcaccttgtatggcatcgccctct

SEQ ID NO: 3011933 - DNA, 25 bp, Homo sapien
ggaatcatcaccttgtatggcatcg

SEQ ID NO: 3011934 - DNA, 25 bp, Homo sapien
tcatcaccttgtatggcatcgccct

SEQ ID NO: 3011935 - DNA, 25 bp, Homo sapien
accttgtatggcatcgccctctccc

SEQ ID NO: 3011936 - DNA, 25 bp, Homo sapien
aatcatcaccttgtatggcatcgcc

SEQ ID NO: 3011937 - DNA, 25 bp, Homo sapien
cgatgccatacaaggtgatgattcc

SEQ ID NO: 3011938 - DNA, 25 bp, Homo sapien
gggagagggcgatgccatacaaggt

SEQ ID NO: 3011939 - DNA, 25 bp, Homo sapien
ggcgatgccatacaaggtgatgatt

SEQ ID NO: 3011940 - DNA, 25 bp, Homo sapien
agagggcgatgccatacaaggtgat

SEQ ID NO: 3011941 - DNA, 25 bp, Homo sapien
gatgccatacaaggtgatgattcct

SEQ ID NO: 3011942 - DNA, 25 bp, Homo sapien
agggcgatgccatacaaggtgatga

SEQ ID NO: 3011943 - DNA, 25 bp, Homo sapien
taggatgcctaacactgagtttgga

SEQ ID NO: 3011944 - DNA, 25 bp, Homo sapien
tgtaattcttttccgctggcatctt

SEQ ID NO: 3011945 - DNA, 25 bp, Homo sapien
cataagagtgtaggatgcctaacac

SEQ ID NO: 3011946 - DNA, 25 bp, Homo sapien
gctgatgtaattcttttccgctggc

SEQ ID NO: 3011947 - DNA, 25 bp, Homo sapien
catttctgaatcataagagtgtagg

SEQ ID NO: 3011948 - DNA, 25 bp, Homo sapien
gggggttcagaatttcgtgtcctca

SEQ ID NO: 3011949 - DNA, 25 bp, Homo sapien
cggaaaagaattacatcagcacaac

SEQ ID NO: 3011950 - DNA, 25 bp, Homo sapien
tgaaccccaagtactgaaagccact

SEQ ID NO: 3011951 - DNA, 25 bp, Homo sapien
caaactcagtgttaggcatcctaca

SEQ ID NO: 3011952 - DNA, 25 bp, Homo sapien
aagatgccagcggaaaagaattaca

SEQ ID NO: 3011953 - DNA, 25 bp, Homo sapien
ctgaggacacgaaattctgaacccc

SEQ ID NO: 3011954 - DNA, 25 bp, Homo sapien
ggcatcctacactcttatgattcag

SEQ ID NO: 3011955 - DNA, 25 bp, Homo sapien
taatagacaaacatcctgtccggtt

SEQ ID NO: 3011956 - DNA, 25 bp, Homo sapien
aggccccatgtggatttcttcctgg

SEQ ID NO: 3011957 - DNA, 25 bp, Homo sapien
catcctgtccggttttttgtacata

SEQ ID NO: 3011958 - DNA, 25 bp, Homo sapien
ttttgtacataagaggccccatgtg

SEQ ID NO: 3011959 - DNA, 25 bp, Homo sapien
ttttttgtacataagaggccccatg

SEQ ID NO: 3011960 - DNA, 25 bp, Homo sapien
ggtaatagacaaacatcctgtccgg

SEQ ID NO: 3011961 - DNA, 25 bp, Homo sapien
cacatggggcctcttatgtacaaaa

SEQ ID NO: 3011962 - DNA, 25 bp, Homo sapien
cacttccaggaagaaatccacatgg

SEQ ID NO: 3011963 - DNA, 25 bp, Homo sapien
aaaaccggacaggatgtttgtctat

SEQ ID NO: 3011964 - DNA, 25 bp, Homo sapien
ctcttatgtacaaaaaaccggacag

SEQ ID NO: 3011965 - DNA, 25 bp, Homo sapien
tatgtacaaaaaaccggacaggatg

SEQ ID NO: 3011966 - DNA, 25 bp, Homo sapien
ggacaggatgtttgtctattaccac

SEQ ID NO: 3011967 - DNA, 25 bp, Homo sapien
tcactcccaccatgatggggtcctg

SEQ ID NO: 3011968 - DNA, 25 bp, Homo sapien
ttattcactcccaccatgatggggt

SEQ ID NO: 3011969 - DNA, 25 bp, Homo sapien
ttcactcccaccatgatggggtcct

SEQ ID NO: 3011970 - DNA, 25 bp, Homo sapien
acttattcactcccaccatgatggg

SEQ ID NO: 3011971 - DNA, 25 bp, Homo sapien
cttattcactcccaccatgatgggg

SEQ ID NO: 3011972 - DNA, 25 bp, Homo sapien
tattcactcccaccatgatggggtc

SEQ ID NO: 3011973 - DNA, 25 bp, Homo sapien
caggaccccatcatggtgggagtga

SEQ ID NO: 3011974 - DNA, 25 bp, Homo sapien
aggaccccatcatggtgggagtgaa

SEQ ID NO: 3011975 - DNA, 25 bp, Homo sapien
ggaccccatcatggtgggagtgaat

SEQ ID NO: 3011976 - DNA, 25 bp, Homo sapien
accccatcatggtgggagtgaataa

SEQ ID NO: 3011977 - DNA, 25 bp, Homo sapien
gaccccatcatggtgggagtgaata

SEQ ID NO: 3011978 - DNA, 25 bp, Homo sapien
ccccatcatggtgggagtgaataag

SEQ ID NO: 3011979 - DNA, 25 bp, Homo sapien
ggcctggtacgcctcctgacttcat

SEQ ID NO: 3011980 - DNA, 25 bp, Homo sapien
aagaggaagatcctggtgctggatc

SEQ ID NO: 3011981 - DNA, 25 bp, Homo sapien
tgaggcccacagtccggcctggtac

SEQ ID NO: 3011982 - DNA, 25 bp, Homo sapien
cacttattcactcccaccatgatgg

SEQ ID NO: 3011983 - DNA, 25 bp, Homo sapien
gctggatctggatgagacacttatt

SEQ ID NO: 3011984 - DNA, 25 bp, Homo sapien
gaggcccacagtccggcctggtacg

SEQ ID NO: 3011985 - DNA, 25 bp, Homo sapien
atatgatatcctccccttatctcct

SEQ ID NO: 3011986 - DNA, 25 bp, Homo sapien
gttcgatatgatatcctccccttat

SEQ ID NO: 3011987 - DNA, 25 bp, Homo sapien
ccaaactgttcgatatgatatcctc

SEQ ID NO: 3011988 - DNA, 25 bp, Homo sapien
aactgttcgatatgatatcctcccc

SEQ ID NO: 3011989 - DNA, 25 bp, Homo sapien
taccaaactgttcgatatgatatcc

SEQ ID NO: 3011990 - DNA, 25 bp, Homo sapien
cagtaccaaactgttcgatatgata

SEQ ID NO: 3011991 - DNA, 25 bp, Homo sapien
gggaggatatcatatcgaacagttt

SEQ ID NO: 3011992 - DNA, 25 bp, Homo sapien
ggatatcatatcgaacagtttggta

SEQ ID NO: 3011993 - DNA, 25 bp, Homo sapien
gaggatatcatatcgaacagtttgg

SEQ ID NO: 3011994 - DNA, 25 bp, Homo sapien
gatatcatatcgaacagtttggtac

SEQ ID NO: 3011995 - DNA, 25 bp, Homo sapien
tatcatatcgaacagtttggtactg

SEQ ID NO: 3011996 - DNA, 25 bp, Homo sapien
gataaggggaggatatcatatcgaa

SEQ ID NO: 3011997 - DNA, 25 bp, Homo sapien
taccttctgcggaggcagatccgca

SEQ ID NO: 3011998 - DNA, 25 bp, Homo sapien
tcgccgccaagctctggagcttctt

SEQ ID NO: 3011999 - DNA, 25 bp, Homo sapien
gcttcttcatttaccttctgcggag

SEQ ID NO: 3012000 - DNA, 25 bp, Homo sapien
ggagcttcttcatttaccttctgcg

SEQ ID NO: 3012001 - DNA, 25 bp, Homo sapien
ggctgcgcacgttcgtggccttcgc

SEQ ID NO: 3012002 - DNA, 25 bp, Homo sapien
ttcatttaccttctgcggaggcaga

SEQ ID NO: 3012003 - DNA, 25 bp, Homo sapien
tgcggatctgcctccgcagaaggta

SEQ ID NO: 3012004 - DNA, 25 bp, Homo sapien
aagaagctccagagcttggcggcga

SEQ ID NO: 3012005 - DNA, 25 bp, Homo sapien
gcgaaggccacgaacgtgcgcagcc

SEQ ID NO: 3012006 - DNA, 25 bp, Homo sapien
cagaaggtaaatgaagaagctccag

SEQ ID NO: 3012007 - DNA, 25 bp, Homo sapien
tctgcctccgcagaaggtaaatgaa

SEQ ID NO: 3012008 - DNA, 25 bp, Homo sapien
tccgcagaaggtaaatgaagaagct

SEQ ID NO: 3012009 - DNA, 25 bp, Homo sapien
tggcggagctgggccgcgggggccc

SEQ ID NO: 3012010 - DNA, 25 bp, Homo sapien
gctggcggagctgggccgcgggggc

SEQ ID NO: 3012011 - DNA, 25 bp, Homo sapien
gctgcccccggggggctggcggagc

SEQ ID NO: 3012012 - DNA, 25 bp, Homo sapien
ctggcggagctgggccgcgggggcc

SEQ ID NO: 3012013 - DNA, 25 bp, Homo sapien
ctctcctgccactcggggcccccgt

SEQ ID NO: 3012014 - DNA, 25 bp, Homo sapien
ggctggcggagctgggccgcggggg

SEQ ID NO: 3012015 - DNA, 25 bp, Homo sapien
gggcccccgcggcccagctccgcca

SEQ ID NO: 3012016 - DNA, 25 bp, Homo sapien
agctccgccagccccccgggggcag

SEQ ID NO: 3012017 - DNA, 25 bp, Homo sapien
cgggggccccgagtggcaggagagg

SEQ ID NO: 3012018 - DNA, 25 bp, Homo sapien
acgggggccccgagtggcaggagag

SEQ ID NO: 3012019 - DNA, 25 bp, Homo sapien
gcccccgcggcccagctccgccagc

SEQ ID NO: 3012020 - DNA, 25 bp, Homo sapien
gctccgccagccccccgggggcagc

SEQ ID NO: 3012021 - DNA, 25 bp, Homo sapien
gggtggctttctgagccgcccgctc

SEQ ID NO: 3012022 - DNA, 25 bp, Homo sapien
ccatcctagccctacctgtctcggc

SEQ ID NO: 3012023 - DNA, 25 bp, Homo sapien
gttccgctgggctttaccctcgcca

SEQ ID NO: 3012024 - DNA, 25 bp, Homo sapien
gtcggtgccactcccagcccatgtg

SEQ ID NO: 3012025 - DNA, 25 bp, Homo sapien
aggaccccatcctagccctacctgt

SEQ ID NO: 3012026 - DNA, 25 bp, Homo sapien
cgcaacctccccgaagccgtcggtg

SEQ ID NO: 3012027 - DNA, 25 bp, Homo sapien
gggcggctcagaaagccacccctgg

SEQ ID NO: 3012028 - DNA, 25 bp, Homo sapien
ccgagacaggtagggctaggatggg

SEQ ID NO: 3012029 - DNA, 25 bp, Homo sapien
ctggcgagggtaaagcccagcggaa

SEQ ID NO: 3012030 - DNA, 25 bp, Homo sapien
cacatgggctgggagtggcaccgac

SEQ ID NO: 3012031 - DNA, 25 bp, Homo sapien
ctgggagtggcaccgacggcttcgg

SEQ ID NO: 3012032 - DNA, 25 bp, Homo sapien
gagcgggcggctcagaaagccaccc

SEQ ID NO: 3012033 - DNA, 25 bp, Homo sapien
caattatccttccccttccctccag

SEQ ID NO: 3012034 - DNA, 25 bp, Homo sapien
cactgccccctcccccaattatcct

SEQ ID NO: 3012035 - DNA, 25 bp, Homo sapien
aggataattgggggagggggcagtg

SEQ ID NO: 3012036 - DNA, 25 bp, Homo sapien
ctggagggaaggggaaggataattg

SEQ ID NO: 3012037 - DNA, 25 bp, Homo sapien
cgcagagcgctgggccggagcggcc

SEQ ID NO: 3012038 - DNA, 25 bp, Homo sapien
gcagagcgctgggccggagcggcct

SEQ ID NO: 3012039 - DNA, 25 bp, Homo sapien
cagagcgctgggccggagcggcctc

SEQ ID NO: 3012040 - DNA, 25 bp, Homo sapien
agctcgggggtcctttagccgctgg

SEQ ID NO: 3012041 - DNA, 25 bp, Homo sapien
ccctttgacactacttccggtggtg

SEQ ID NO: 3012042 - DNA, 25 bp, Homo sapien
ccggtggtgacgtgtattcgcttca

SEQ ID NO: 3012043 - DNA, 25 bp, Homo sapien
ttgacactacttccggtggtgacgt

SEQ ID NO: 3012044 - DNA, 25 bp, Homo sapien
tgtattcgcttcaccgggactaagt

SEQ ID NO: 3012045 - DNA, 25 bp, Homo sapien
gcgcagaaggtggccgcggggcggg

SEQ ID NO: 3012046 - DNA, 25 bp, Homo sapien
gcagaaggtggccgcggggcggggc

SEQ ID NO: 3012047 - DNA, 25 bp, Homo sapien
cgcagaaggtggccgcggggcgggg

SEQ ID NO: 3012048 - DNA, 25 bp, Homo sapien
ctatgttaggtcttaatggtgggag

SEQ ID NO: 3012049 - DNA, 25 bp, Homo sapien
tccagactatgttaggtcttaatgg

SEQ ID NO: 3012050 - DNA, 25 bp, Homo sapien
taggtcttaatggtgggaggacgcc

SEQ ID NO: 3012051 - DNA, 25 bp, Homo sapien
ctctcattccagactatgttaggtc

SEQ ID NO: 3012052 - DNA, 25 bp, Homo sapien
gcttggagatcaggctgtcagacac

SEQ ID NO: 3012053 - DNA, 25 bp, Homo sapien
tttcaccaatgaggcaactcttaga

SEQ ID NO: 3012054 - DNA, 25 bp, Homo sapien
tagaggttggcatctcatttcacca

SEQ ID NO: 3012055 - DNA, 25 bp, Homo sapien
gaccttgggcaagtagcaaagccaa

SEQ ID NO: 3012056 - DNA, 25 bp, Homo sapien
cttaaagaagggcactcttggccgg

SEQ ID NO: 3012057 - DNA, 25 bp, Homo sapien
ggagctcgaagtcccataaaagatg

SEQ ID NO: 3012058 - DNA, 25 bp, Homo sapien
aatatatacaatgtgtcaggtacaa

SEQ ID NO: 3012059 - DNA, 25 bp, Homo sapien
ttgccttccaggagctcgaagtccc

SEQ ID NO: 3012060 - DNA, 25 bp, Homo sapien
taacctgactttatagggactgaag

SEQ ID NO: 3012061 - DNA, 25 bp, Homo sapien
agtggcagcatcctttgtacctaca

SEQ ID NO: 3012062 - DNA, 25 bp, Homo sapien
gacctgggtacgtggatccctgagt

SEQ ID NO: 3012063 - DNA, 25 bp, Homo sapien
tagtttagtatctggtcacgggaga

SEQ ID NO: 3012064 - DNA, 25 bp, Homo sapien
gatgcttatgatgacctggaccaag

SEQ ID NO: 3012065 - DNA, 25 bp, Homo sapien
taaaatgacatggaggcctaacagg

SEQ ID NO: 3012066 - DNA, 25 bp, Homo sapien
tgacgacctggatatttgactggcc

SEQ ID NO: 3012067 - DNA, 25 bp, Homo sapien
gaagcagcgtctcatcaggacagaa

SEQ ID NO: 3012068 - DNA, 25 bp, Homo sapien
actgaagtaggtgcactaaggttcc

SEQ ID NO: 3012069 - DNA, 25 bp, Homo sapien
taaggttccaagctccctgcaagga

SEQ ID NO: 3012070 - DNA, 25 bp, Homo sapien
gaatgtcgagatacgagcacctgca

SEQ ID NO: 3012071 - DNA, 25 bp, Homo sapien
cttttagtcaattgtcagtggagtc

SEQ ID NO: 3012072 - DNA, 25 bp, Homo sapien
ccaggccctttcaggcatctagaca

SEQ ID NO: 3012073 - DNA, 25 bp, Homo sapien
ggcatctagacactcccatagcctg

SEQ ID NO: 3012074 - DNA, 25 bp, Homo sapien
tgtacaaaaagcacactctccctct

SEQ ID NO: 3012075 - DNA, 25 bp, Homo sapien
aggaggcctttgtccggcaccctgc

SEQ ID NO: 3012076 - DNA, 25 bp, Homo sapien
ggagagcagtgcacctcccaggatg

SEQ ID NO: 3012077 - DNA, 25 bp, Homo sapien
agcagtgcacctcccaggatgacta

SEQ ID NO: 3012078 - DNA, 25 bp, Homo sapien
tgcacctcccaggatgactagggca

SEQ ID NO: 3012079 - DNA, 25 bp, Homo sapien
gggtacacggtacccagccttgctc

SEQ ID NO: 3012080 - DNA, 25 bp, Homo sapien
gagcaagctaccaaggcggcaagac

SEQ ID NO: 3012081 - DNA, 25 bp, Homo sapien
ccataccaggagcaagctaccaagg

SEQ ID NO: 3012082 - DNA, 25 bp, Homo sapien
tgttggtagggatcaaagggttata

SEQ ID NO: 3012083 - DNA, 25 bp, Homo sapien
agggttataaaagtctgtgacaatc

SEQ ID NO: 3012084 - DNA, 25 bp, Homo sapien
gcgtgcacttcatgcccatcgtggc

SEQ ID NO: 3012085 - DNA, 25 bp, Homo sapien
gatgaaaattatgcctccacccatg

SEQ ID NO: 3012086 - DNA, 25 bp, Homo sapien
cacccatggctatacgggccttctt

SEQ ID NO: 3012087 - DNA, 25 bp, Homo sapien
accattagggctcgagtggcctgca

SEQ ID NO: 3012088 - DNA, 25 bp, Homo sapien
cgcgcccactaaccgctggacctct

SEQ ID NO: 3012089 - DNA, 25 bp, Homo sapien
gaaagggcgccgtcattgctggaaa

SEQ ID NO: 3012090 - DNA, 25 bp, Homo sapien
tggacctcttctgtccggcgccgtg

SEQ ID NO: 3012091 - DNA, 25 bp, Homo sapien
gcgcccaggtgtccaagacctgggc

SEQ ID NO: 3012092 - DNA, 25 bp, Homo sapien
gcaccgagtcgtacattttgcagct

SEQ ID NO: 3012093 - DNA, 25 bp, Homo sapien
tgggccgtgatgatgttgtcacccg

SEQ ID NO: 3012094 - DNA, 25 bp, Homo sapien
tgctctgcgtgacgcagtccatcca

SEQ ID NO: 3012095 - DNA, 25 bp, Homo sapien
ttttgcagctcatcatccccgtgct

SEQ ID NO: 3012096 - DNA, 25 bp, Homo sapien
cagcaactgcaggcccgaattggcc

SEQ ID NO: 3012097 - DNA, 25 bp, Homo sapien
cccagcaactgcaggcccgaattgg

SEQ ID NO: 3012098 - DNA, 25 bp, Homo sapien
ggagaagcccagcaactgcaggccc

SEQ ID NO: 3012099 - DNA, 25 bp, Homo sapien
gcaactgcaggcccgaattggccat

SEQ ID NO: 3012100 - DNA, 25 bp, Homo sapien
tccgccctcagaaaacactgggggc

SEQ ID NO: 3012101 - DNA, 25 bp, Homo sapien
cgccctcagaaaacactgggggcgc

SEQ ID NO: 3012102 - DNA, 25 bp, Homo sapien
cctcagaaaacactgggggcgccgg

SEQ ID NO: 3012103 - DNA, 25 bp, Homo sapien
ccctcagaaaacactgggggcgccg

SEQ ID NO: 3012104 - DNA, 25 bp, Homo sapien
cagacaaaattggtggtccccgaag

SEQ ID NO: 3012105 - DNA, 25 bp, Homo sapien
tcgacccctccagtgaagcgatggc

SEQ ID NO: 3012106 - DNA, 25 bp, Homo sapien
ctacagtaaaacaaacgacacttgg

SEQ ID NO: 3012107 - DNA, 25 bp, Homo sapien
tgtcaccaaactacacacaaatcga

SEQ ID NO: 3012108 - DNA, 25 bp, Homo sapien
tatcctgggctgtaggtccgaggct

SEQ ID NO: 3012109 - DNA, 25 bp, Homo sapien
gcgcgtttctgagcgccggcaagtc

SEQ ID NO: 3012110 - DNA, 25 bp, Homo sapien
cacctgagtatatgtagggcgtcgg

SEQ ID NO: 3012111 - DNA, 25 bp, Homo sapien
gcgccggcaagtcccaaagtatcct

SEQ ID NO: 3012112 - DNA, 25 bp, Homo sapien
ggctctgctacagacacccggctta

SEQ ID NO: 3012113 - DNA, 25 bp, Homo sapien
tttcttcccaacaggtgcgcctggg

SEQ ID NO: 3012114 - DNA, 25 bp, Homo sapien
tccggactggatttccctcgaacac

SEQ ID NO: 3012115 - DNA, 25 bp, Homo sapien
tctgtccaaagtgctctctcctcgg

SEQ ID NO: 3012116 - DNA, 25 bp, Homo sapien
cctccggcatcaaggctcctaactg

SEQ ID NO: 3012117 - DNA, 25 bp, Homo sapien
ggcatcaaggctcctaactggagga

SEQ ID NO: 3012118 - DNA, 25 bp, Homo sapien
tgtcccctccggcatcaaggctcct

SEQ ID NO: 3012119 - DNA, 25 bp, Homo sapien
ccggcatcaaggctcctaactggag

SEQ ID NO: 3012120 - DNA, 25 bp, Homo sapien
ctttgcgccttgtctccagtctcct

SEQ ID NO: 3012121 - DNA, 25 bp, Homo sapien
tagtcagatgcagtagtgagaaagc

SEQ ID NO: 3012122 - DNA, 25 bp, Homo sapien
tgagagtggaaaaagaagttccgtc

SEQ ID NO: 3012123 - DNA, 25 bp, Homo sapien
gcagtgagagtggaaaaagaagttc

SEQ ID NO: 3012124 - DNA, 25 bp, Homo sapien
gcagtagtgagaaagcagtgagagt

SEQ ID NO: 3012125 - DNA, 25 bp, Homo sapien
ccagcactgtcaaggatattgttaa

SEQ ID NO: 3012126 - DNA, 25 bp, Homo sapien
tgtgcaattcctaatatggcccagt

SEQ ID NO: 3012127 - DNA, 25 bp, Homo sapien
tgggtggagcccagtatcttcaggc

SEQ ID NO: 3012128 - DNA, 25 bp, Homo sapien
tcacagataggtaggcaaggcaggc

SEQ ID NO: 3012129 - DNA, 25 bp, Homo sapien
tgatgtcatgaattatgggaaaggg

SEQ ID NO: 3012130 - DNA, 25 bp, Homo sapien
gaaaagcaaccaggaggaggtaaga

SEQ ID NO: 3012131 - DNA, 25 bp, Homo sapien
aaagcaaccaggaggaggtaagagc

SEQ ID NO: 3012132 - DNA, 25 bp, Homo sapien
aagcaaccaggaggaggtaagagct

SEQ ID NO: 3012133 - DNA, 25 bp, Homo sapien
ctctgggtgtcctctgagttgagtt

SEQ ID NO: 3012134 - DNA, 25 bp, Homo sapien
agctctgggtgtcctctgagttgag

SEQ ID NO: 3012135 - DNA, 25 bp, Homo sapien
gggtgtcctctgagttgagttggaa

SEQ ID NO: 3012136 - DNA, 25 bp, Homo sapien
ctgggtgtcctctgagttgagttgg

SEQ ID NO: 3012137 - DNA, 25 bp, Homo sapien
gggtccccactgttgacaggggctg

SEQ ID NO: 3012138 - DNA, 25 bp, Homo sapien
gggcatggccatcatgggcaatcat

SEQ ID NO: 3012139 - DNA, 25 bp, Homo sapien
tctacaagctggtaggatggctcca

SEQ ID NO: 3012140 - DNA, 25 bp, Homo sapien
acatctacaagctggtaggatggct

SEQ ID NO: 3012141 - DNA, 25 bp, Homo sapien
catgggcaatcatgggcttgattgc

SEQ ID NO: 3012142 - DNA, 25 bp, Homo sapien
ttctgtggtaggctgctggcgtggc

SEQ ID NO: 3012143 - DNA, 25 bp, Homo sapien
ctgctgccgtctccgctggaagtag

SEQ ID NO: 3012144 - DNA, 25 bp, Homo sapien
atccccaccttctgtggtaggctgc

SEQ ID NO: 3012145 - DNA, 25 bp, Homo sapien
cgggaaccatcagcgggaccttggc

SEQ ID NO: 3012146 - DNA, 25 bp, Homo sapien
ggcggggggactcgctcatctccct

SEQ ID NO: 3012147 - DNA, 25 bp, Homo sapien
ctgctgttggtgcccctccaatggg

SEQ ID NO: 3012148 - DNA, 25 bp, Homo sapien
cttcggtacctgggccggaatctgg

SEQ ID NO: 3012149 - DNA, 25 bp, Homo sapien
cggaatctgggcggggggactcgct

SEQ ID NO: 3012150 - DNA, 25 bp, Homo sapien
ctgggaacatgcaaaggccccggtg

SEQ ID NO: 3012151 - DNA, 25 bp, Homo sapien
tgggaacatgcaaaggccccggtga

SEQ ID NO: 3012152 - DNA, 25 bp, Homo sapien
gggaacatgcaaaggccccggtgag

SEQ ID NO: 3012153 - DNA, 25 bp, Homo sapien
cttggggaactggctcccatattcc

SEQ ID NO: 3012154 - DNA, 25 bp, Homo sapien
ggcaccatcgtcggggccgttgccc

SEQ ID NO: 3012155 - DNA, 25 bp, Homo sapien
ggggcaccatcgtcggggccgttgc

SEQ ID NO: 3012156 - DNA, 25 bp, Homo sapien
gggcaccatcgtcggggccgttgcc

SEQ ID NO: 3012157 - DNA, 25 bp, Homo sapien
gcaccatcgtcggggccgttgccca

SEQ ID NO: 3012158 - DNA, 25 bp, Homo sapien
caggtcctgtccccgccgaggggat

SEQ ID NO: 3012159 - DNA, 25 bp, Homo sapien
gtcctgtccccgccgaggggatctc

SEQ ID NO: 3012160 - DNA, 25 bp, Homo sapien
tgagggaggccgggggatgaatcgg

SEQ ID NO: 3012161 - DNA, 25 bp, Homo sapien
ctgagggaggccgggggatgaatcg

SEQ ID NO: 3012162 - DNA, 25 bp, Homo sapien
gaggccgggggatgaatcggcggga

SEQ ID NO: 3012163 - DNA, 25 bp, Homo sapien
agggaggccgggggatgaatcggcg

SEQ ID NO: 3012164 - DNA, 25 bp, Homo sapien
ctgcccttcacgggtactcccccag

SEQ ID NO: 3012165 - DNA, 25 bp, Homo sapien
gctgcccttcacgggtactccccca

SEQ ID NO: 3012166 - DNA, 25 bp, Homo sapien
ataacggctgcccttcacgggtact

SEQ ID NO: 3012167 - DNA, 25 bp, Homo sapien
taacggctgcccttcacgggtactc

SEQ ID NO: 3012168 - DNA, 25 bp, Homo sapien
tctccttccacgacatcaaattcca

SEQ ID NO: 3012169 - DNA, 25 bp, Homo sapien
ttctctccttccacgacatcaaatt

SEQ ID NO: 3012170 - DNA, 25 bp, Homo sapien
tctctccttccacgacatcaaattc

SEQ ID NO: 3012171 - DNA, 25 bp, Homo sapien
ctccttccacgacatcaaattccac

SEQ ID NO: 3012172 - DNA, 25 bp, Homo sapien
tcgttaaaccgattgtggagcccca

SEQ ID NO: 3012173 - DNA, 25 bp, Homo sapien
gacgtttagtaacccagcacaagtg

SEQ ID NO: 3012174 - DNA, 25 bp, Homo sapien
gcggagcgcactgctaaggattaca

SEQ ID NO: 3012175 - DNA, 25 bp, Homo sapien
tacagcaaaggccttcaaagacggc

SEQ ID NO: 3012176 - DNA, 25 bp, Homo sapien
ctggtgaacaaagacatcttccttg

SEQ ID NO: 3012177 - DNA, 25 bp, Homo sapien
aacaaagacatcttccttggtgtca

SEQ ID NO: 3012178 - DNA, 25 bp, Homo sapien
gaacaaagacatcttccttggtgtc

SEQ ID NO: 3012179 - DNA, 25 bp, Homo sapien
aaagacatcttccttggtgtcattc

SEQ ID NO: 3012180 - DNA, 25 bp, Homo sapien
ctgcagaacaggatgggtcgttaag

SEQ ID NO: 3012181 - DNA, 25 bp, Homo sapien
tgcagaacaggatgggtcgttaagg

SEQ ID NO: 3012182 - DNA, 25 bp, Homo sapien
cagaacaggatgggtcgttaaggaa

SEQ ID NO: 3012183 - DNA, 25 bp, Homo sapien
agaacaggatgggtcgttaaggaag

SEQ ID NO: 3012184 - DNA, 25 bp, Homo sapien
agtcttcttccttctatagtcaagg

SEQ ID NO: 3012185 - DNA, 25 bp, Homo sapien
ccttctatagtcaaggaggcagaaa

SEQ ID NO: 3012186 - DNA, 25 bp, Homo sapien
tcaggaacttgctctaaacagctgc

SEQ ID NO: 3012187 - DNA, 25 bp, Homo sapien
gagaagggaacaatgtgtcaggaac

SEQ ID NO: 3012188 - DNA, 25 bp, Homo sapien
tggacattgcaaccatgtgcctccg

SEQ ID NO: 3012189 - DNA, 25 bp, Homo sapien
tcttgtcacgaagcacacatttgtg

SEQ ID NO: 3012190 - DNA, 25 bp, Homo sapien
gccccaaaggcatgtcagagtaaaa

SEQ ID NO: 3012191 - DNA, 25 bp, Homo sapien
taatcctccgctacccttgaagatg

SEQ ID NO: 3012192 - DNA, 25 bp, Homo sapien
ttccggacgttgaaccatttgacag

SEQ ID NO: 3012193 - DNA, 25 bp, Homo sapien
gttgatgaatccgtaaccattccgg

SEQ ID NO: 3012194 - DNA, 25 bp, Homo sapien
ttgacagtgcccaggacttggattg

SEQ ID NO: 3012195 - DNA, 25 bp, Homo sapien
catttgacagtgcccaggacttgga

SEQ ID NO: 3012196 - DNA, 25 bp, Homo sapien
ctgccaggcagagatgcagtgggga

SEQ ID NO: 3012197 - DNA, 25 bp, Homo sapien
aggcagagatgcagtggggacagtg

SEQ ID NO: 3012198 - DNA, 25 bp, Homo sapien
tgccaggcagagatgcagtggggac

SEQ ID NO: 3012199 - DNA, 25 bp, Homo sapien
ccaggcagagatgcagtggggacag

SEQ ID NO: 3012200 - DNA, 25 bp, Homo sapien
tagtagcttcaaggtattcctaccc

SEQ ID NO: 3012201 - DNA, 25 bp, Homo sapien
tcaggttaccttcaagccaaccagg

SEQ ID NO: 3012202 - DNA, 25 bp, Homo sapien
taccctagtccaccaaatgaaatca

SEQ ID NO: 3012203 - DNA, 25 bp, Homo sapien
aaagccttccaactctaagtcacgt

SEQ ID NO: 3012204 - DNA, 25 bp, Homo sapien
cagtcaactaggcactgtgtcccgc

SEQ ID NO: 3012205 - DNA, 25 bp, Homo sapien
ggctcagaggtttgcctagttctaa

SEQ ID NO: 3012206 - DNA, 25 bp, Homo sapien
tcataactgagggtttttctagccc

SEQ ID NO: 3012207 - DNA, 25 bp, Homo sapien
tctctcccaggaaggtacggcagga

SEQ ID NO: 3012208 - DNA, 25 bp, Homo sapien
cttgtccgcctgactccgggccggg

SEQ ID NO: 3012209 - DNA, 25 bp, Homo sapien
gagaccgccgtcgccggattgccag

SEQ ID NO: 3012210 - DNA, 25 bp, Homo sapien
cggcttgtccgcctgactccgggcc

SEQ ID NO: 3012211 - DNA, 25 bp, Homo sapien
ggattgccaggggtgcgggagcccg

SEQ ID NO: 3012212 - DNA, 25 bp, Homo sapien
ctttctgcggctcccctgcgggcac

SEQ ID NO: 3012213 - DNA, 25 bp, Homo sapien
ggcaccggtaccaccaccgctacca

SEQ ID NO: 3012214 - DNA, 25 bp, Homo sapien
gtcgcgggcaccgtcgccgcgggga

SEQ ID NO: 3012215 - DNA, 25 bp, Homo sapien
tcccctgcgggcaccggtaccacca

SEQ ID NO: 3012216 - DNA, 25 bp, Homo sapien
gtccagtaccggccacagccgccac

SEQ ID NO: 3012217 - DNA, 25 bp, Homo sapien
cgggtccagtaccggccacagccgc

SEQ ID NO: 3012218 - DNA, 25 bp, Homo sapien
ggtccagtaccggccacagccgcca

SEQ ID NO: 3012219 - DNA, 25 bp, Homo sapien
gggtccagtaccggccacagccgcc

SEQ ID NO: 3012220 - DNA, 25 bp, Homo sapien
ccgcctcccggacttcgcaccgcgg

SEQ ID NO: 3012221 - DNA, 25 bp, Homo sapien
agccgaggccaatggcagcccgctg

SEQ ID NO: 3012222 - DNA, 25 bp, Homo sapien
ccctgctcggtcctcgcgccccgag

SEQ ID NO: 3012223 - DNA, 25 bp, Homo sapien
acgggccaatcccagcccagcagca

SEQ ID NO: 3012224 - DNA, 25 bp, Homo sapien
cgccccctggccgccacgtgacggc

SEQ ID NO: 3012225 - DNA, 25 bp, Homo sapien
ctggccgccacgtgacggcccccgg

SEQ ID NO: 3012226 - DNA, 25 bp, Homo sapien
cctggccgccacgtgacggcccccg

SEQ ID NO: 3012227 - DNA, 25 bp, Homo sapien
gccccctggccgccacgtgacggcc

SEQ ID NO: 3012228 - DNA, 25 bp, Homo sapien
gggctggcgtcctccgcgtctcctt

SEQ ID NO: 3012229 - DNA, 25 bp, Homo sapien
tcctcgctgaccctccacttgctat

SEQ ID NO: 3012230 - DNA, 25 bp, Homo sapien
acgtgcgcttcccaagggctggcgt

SEQ ID NO: 3012231 - DNA, 25 bp, Homo sapien
cggaggccgccggattccgcttcct

SEQ ID NO: 3012232 - DNA, 25 bp, Homo sapien
tcacagttccactgaggagcaccca

SEQ ID NO: 3012233 - DNA, 25 bp, Homo sapien
cacagttccactgaggagcacccat

SEQ ID NO: 3012234 - DNA, 25 bp, Homo sapien
ctgctcacagttccactgaggagca

SEQ ID NO: 3012235 - DNA, 25 bp, Homo sapien
gctcacagttccactgaggagcacc

SEQ ID NO: 3012236 - DNA, 25 bp, Homo sapien
ggaccgctctatcttctcgggtgaa

SEQ ID NO: 3012237 - DNA, 25 bp, Homo sapien
tttaggattccgaacacgcatgcgt

SEQ ID NO: 3012238 - DNA, 25 bp, Homo sapien
tttaaagaagatggtgtccgccgca

SEQ ID NO: 3012239 - DNA, 25 bp, Homo sapien
gacgcatgcgttctagacgagacaa

SEQ ID NO: 3012240 - DNA, 25 bp, Homo sapien
cctgagattttgaggagtggaagcc

SEQ ID NO: 3012241 - DNA, 25 bp, Homo sapien
gcaggcatatgttagcgcttcccaa

SEQ ID NO: 3012242 - DNA, 25 bp, Homo sapien
taagtggcaccccttcgagctggga

SEQ ID NO: 3012243 - DNA, 25 bp, Homo sapien
aaaaccctcctgtgaagtgtggcgg

SEQ ID NO: 3012244 - DNA, 25 bp, Homo sapien
cacggccacgccaaggttagaattt

SEQ ID NO: 3012245 - DNA, 25 bp, Homo sapien
caaaggccggccatgtaagatcgtc

SEQ ID NO: 3012246 - DNA, 25 bp, Homo sapien
taagatcgtcgagatgtctacttcg

SEQ ID NO: 3012247 - DNA, 25 bp, Homo sapien
ggcagatgacttggacttcgagaca

SEQ ID NO: 3012248 - DNA, 25 bp, Homo sapien
ccttccttattccccagtttctcag

SEQ ID NO: 3012249 - DNA, 25 bp, Homo sapien
ttctcagctccttctcctggtgtcc

SEQ ID NO: 3012250 - DNA, 25 bp, Homo sapien
ctcagctccttctcctggtgtccgg

SEQ ID NO: 3012251 - DNA, 25 bp, Homo sapien
ttccttattccccagtttctcagct

SEQ ID NO: 3012252 - DNA, 25 bp, Homo sapien
tcatcaggcaaggtcaatttgagcc

SEQ ID NO: 3012253 - DNA, 25 bp, Homo sapien
agaggaccttcgtctccctgaggga

SEQ ID NO: 3012254 - DNA, 25 bp, Homo sapien
gatgggtacctatcactgctccagg

SEQ ID NO: 3012255 - DNA, 25 bp, Homo sapien
aagagatcctggtatggtgcctccc

SEQ ID NO: 3012256 - DNA, 25 bp, Homo sapien
ctcccttggccaggagcgagcgaag

SEQ ID NO: 3012257 - DNA, 25 bp, Homo sapien
ggtgggtgctgcttgtggtttagtc

SEQ ID NO: 3012258 - DNA, 25 bp, Homo sapien
ctgcccttcacctagctcccttggc

SEQ ID NO: 3012259 - DNA, 25 bp, Homo sapien
cccctcaatctgtcggggagcccct

SEQ ID NO: 3012260 - DNA, 25 bp, Homo sapien
cacaggggataccctcacccacgat

SEQ ID NO: 3012261 - DNA, 25 bp, Homo sapien
tgggacacacaggggataccctcac

SEQ ID NO: 3012262 - DNA, 25 bp, Homo sapien
ggacacacaggggataccctcaccc

SEQ ID NO: 3012263 - DNA, 25 bp, Homo sapien
cacacaggggataccctcacccacg

SEQ ID NO: 3012264 - DNA, 25 bp, Homo sapien
cttgtggtagaatcgcgggttctgg

SEQ ID NO: 3012265 - DNA, 25 bp, Homo sapien
tggtagaatcgcgggttctggctgt

SEQ ID NO: 3012266 - DNA, 25 bp, Homo sapien
ttgtggtagaatcgcgggttctggc

SEQ ID NO: 3012267 - DNA, 25 bp, Homo sapien
tagaatcgcgggttctggctgtgtt

SEQ ID NO: 3012268 - DNA, 25 bp, Homo sapien
ggctttgtcactgggcatactctcc

SEQ ID NO: 3012269 - DNA, 25 bp, Homo sapien
tactgataaccacccccaaagagga

SEQ ID NO: 3012270 - DNA, 25 bp, Homo sapien
tgcttttccggatccctagtgtagg

SEQ ID NO: 3012271 - DNA, 25 bp, Homo sapien
tgtcctacctaatcctgcttttccg

SEQ ID NO: 3012272 - DNA, 25 bp, Homo sapien
ctttcctgctggctgcatctgcaca

SEQ ID NO: 3012273 - DNA, 25 bp, Homo sapien
ttcctgctggctgcatctgcacagg

SEQ ID NO: 3012274 - DNA, 25 bp, Homo sapien
ctgctggctgcatctgcacagggag

SEQ ID NO: 3012275 - DNA, 25 bp, Homo sapien
cctgctggctgcatctgcacaggga

SEQ ID NO: 3012276 - DNA, 25 bp, Homo sapien
ctggggggaagcaaggagtccaggg

SEQ ID NO: 3012277 - DNA, 25 bp, Homo sapien
ggggaagcaaggagtccaggggctg

SEQ ID NO: 3012278 - DNA, 25 bp, Homo sapien
caaggagtccaggggctggatgcag

SEQ ID NO: 3012279 - DNA, 25 bp, Homo sapien
ggagtccaggggctggatgcagagc

SEQ ID NO: 3012280 - DNA, 25 bp, Homo sapien
gggggtgcatggggcgcagagagga

SEQ ID NO: 3012281 - DNA, 25 bp, Homo sapien
ctgggggtgcatggggcgcagagag

SEQ ID NO: 3012282 - DNA, 25 bp, Homo sapien
tgggggtgcatggggcgcagagagg

SEQ ID NO: 3012283 - DNA, 25 bp, Homo sapien
gaagctccccttaacatatccctaa

SEQ ID NO: 3012284 - DNA, 25 bp, Homo sapien
gtcagggcctgaggcatactgaagc

SEQ ID NO: 3012285 - DNA, 25 bp, Homo sapien
ggcatactgaagctccccttaacat

SEQ ID NO: 3012286 - DNA, 25 bp, Homo sapien
gcctgaggcatactgaagctcccct

SEQ ID NO: 3012287 - DNA, 25 bp, Homo sapien
agtctgctggttagcatgttccatc

SEQ ID NO: 3012288 - DNA, 25 bp, Homo sapien
tctgctggttagcatgttccatctg

SEQ ID NO: 3012289 - DNA, 25 bp, Homo sapien
gtctgctggttagcatgttccatct

SEQ ID NO: 3012290 - DNA, 25 bp, Homo sapien
gagctcctgcatgggatgttatcac

SEQ ID NO: 3012291 - DNA, 25 bp, Homo sapien
gctagagctcctgcatgggatgtta

SEQ ID NO: 3012292 - DNA, 25 bp, Homo sapien
ggaggacctgagagctagagctcct

SEQ ID NO: 3012293 - DNA, 25 bp, Homo sapien
tgagagctagagctcctgcatggga

SEQ ID NO: 3012294 - DNA, 25 bp, Homo sapien
tgggctgaaagtggccatgcacagc

SEQ ID NO: 3012295 - DNA, 25 bp, Homo sapien
ggccatgcacagcatagggctgtgg

SEQ ID NO: 3012296 - DNA, 25 bp, Homo sapien
gggctgaaagtggccatgcacagca

SEQ ID NO: 3012297 - DNA, 25 bp, Homo sapien
ttgaggaaggccaagccccatccct

SEQ ID NO: 3012298 - DNA, 25 bp, Homo sapien
cttgaggaaggccaagccccatccc

SEQ ID NO: 3012299 - DNA, 25 bp, Homo sapien
gactaggactataagctggctgtgt

SEQ ID NO: 3012300 - DNA, 25 bp, Homo sapien
tgctgactaggactataagctggct

SEQ ID NO: 3012301 - DNA, 25 bp, Homo sapien
tgactaggactataagctggctgtg

SEQ ID NO: 3012302 - DNA, 25 bp, Homo sapien
caggactgccttggaattgtccatg

SEQ ID NO: 3012303 - DNA, 25 bp, Homo sapien
gtgtatctgtatgccccgtttcccc

SEQ ID NO: 3012304 - DNA, 25 bp, Homo sapien
ggagaatgagaactcgcctacaaac

SEQ ID NO: 3012305 - DNA, 25 bp, Homo sapien
tgtttgtgacttgaatactggtggc

SEQ ID NO: 3012306 - DNA, 25 bp, Homo sapien
actccttgaaagctgaaacccagtg

SEQ ID NO: 3012307 - DNA, 25 bp, Homo sapien
gtgcctgggcgattgtgtcctccag

SEQ ID NO: 3012308 - DNA, 25 bp, Homo sapien
catgagggtgcctgggcgattgtgt

SEQ ID NO: 3012309 - DNA, 25 bp, Homo sapien
gctgccatgagggtgcctgggcgat

SEQ ID NO: 3012310 - DNA, 25 bp, Homo sapien
gggtgcctgggcgattgtgtcctcc

SEQ ID NO: 3012311 - DNA, 25 bp, Homo sapien
aggccggttccatctggtggtttct

SEQ ID NO: 3012312 - DNA, 25 bp, Homo sapien
gaggagatgagttcctgtgtgaaca

SEQ ID NO: 3012313 - DNA, 25 bp, Homo sapien
tgaggagatgagttcctgtgtgaac

SEQ ID NO: 3012314 - DNA, 25 bp, Homo sapien
ctgaggagatgagttcctgtgtgaa

SEQ ID NO: 3012315 - DNA, 25 bp, Homo sapien
ttcgcctccgtttttcttcctcatg

SEQ ID NO: 3012316 - DNA, 25 bp, Homo sapien
tgggaaagttcaagggactgcttac

SEQ ID NO: 3012317 - DNA, 25 bp, Homo sapien
tcttctgttccatcatcttatccac

SEQ ID NO: 3012318 - DNA, 25 bp, Homo sapien
ttctgttccatcatcttatccacct

SEQ ID NO: 3012319 - DNA, 25 bp, Homo sapien
ctaatgacattctctcttccatctc

SEQ ID NO: 3012320 - DNA, 25 bp, Homo sapien
tgttccatcatcttatccacctctt

SEQ ID NO: 3012321 - DNA, 25 bp, Homo sapien
caacgttacagattgaagaccagca

SEQ ID NO: 3012322 - DNA, 25 bp, Homo sapien
ccatctcaagggttctggagcgtgg

SEQ ID NO: 3012323 - DNA, 25 bp, Homo sapien
cggaaaggctttatcaggtgctctc

SEQ ID NO: 3012324 - DNA, 25 bp, Homo sapien
ccatcgcggcaatagggaacggaaa

SEQ ID NO: 3012325 - DNA, 25 bp, Homo sapien
tgcgctcccgctccatcataatgtg

SEQ ID NO: 3012326 - DNA, 25 bp, Homo sapien
tgtgccggtgcagcgccctggccat

SEQ ID NO: 3012327 - DNA, 25 bp, Homo sapien
tccatcataatgtgccggtgcagcg

SEQ ID NO: 3012328 - DNA, 25 bp, Homo sapien
cctggccatggcgttggaaagcttg

SEQ ID NO: 3012329 - DNA, 25 bp, Homo sapien
ctgccgtgggcgctcgggccgtggg

SEQ ID NO: 3012330 - DNA, 25 bp, Homo sapien
gcgctcgggccgtgggcgcccggct

SEQ ID NO: 3012331 - DNA, 25 bp, Homo sapien
tgctgccgtgggcgctcgggccgtg

SEQ ID NO: 3012332 - DNA, 25 bp, Homo sapien
gtgggcgctcgggccgtgggcgccc

SEQ ID NO: 3012333 - DNA, 25 bp, Homo sapien
ctcgccgccccggtcacgtgtccca

SEQ ID NO: 3012334 - DNA, 25 bp, Homo sapien
ccgccccggtcacgtgtcccaggag

SEQ ID NO: 3012335 - DNA, 25 bp, Homo sapien
cccgctcgccgccccggtcacgtgt

SEQ ID NO: 3012336 - DNA, 25 bp, Homo sapien
gccgccccggtcacgtgtcccagga

SEQ ID NO: 3012337 - DNA, 25 bp, Homo sapien
agccagcgcggacgactgcccttcc

SEQ ID NO: 3012338 - DNA, 25 bp, Homo sapien
gccagcgcggacgactgcccttcct

SEQ ID NO: 3012339 - DNA, 25 bp, Homo sapien
ccagcgcggacgactgcccttccta

SEQ ID NO: 3012340 - DNA, 25 bp, Homo sapien
tctctgcgctttctcagcggctccg

SEQ ID NO: 3012341 - DNA, 25 bp, Homo sapien
ctggcccctgcgtcacatccggcgg

SEQ ID NO: 3012342 - DNA, 25 bp, Homo sapien
cgagtccttccggagtcacggcggc

SEQ ID NO: 3012343 - DNA, 25 bp, Homo sapien
tttctcagcggctccgacgcgccct

SEQ ID NO: 3012344 - DNA, 25 bp, Homo sapien
gctgcgacgggtgcccgcggcgtac

SEQ ID NO: 3012345 - DNA, 25 bp, Homo sapien
cggaagcgcgctgcgacgggtgccc

SEQ ID NO: 3012346 - DNA, 25 bp, Homo sapien
aagcgcgctgcgacgggtgcccgcg

SEQ ID NO: 3012347 - DNA, 25 bp, Homo sapien
aaggcggaagcgcgctgcgacgggt

SEQ ID NO: 3012348 - DNA, 25 bp, Homo sapien
aacgtgagcgacgacggctgcagac

SEQ ID NO: 3012349 - DNA, 25 bp, Homo sapien
gcgacgacggctgcagactggcctt

SEQ ID NO: 3012350 - DNA, 25 bp, Homo sapien
gctctctttaatttcgcgggcccac

SEQ ID NO: 3012351 - DNA, 25 bp, Homo sapien
ccgtcgccgggaacgtgagcgacga

SEQ ID NO: 3012352 - DNA, 25 bp, Homo sapien
gggcgcgcgagagagaggccgaggc

SEQ ID NO: 3012353 - DNA, 25 bp, Homo sapien
ggggcgcgcgagagagaggccgagg

SEQ ID NO: 3012354 - DNA, 25 bp, Homo sapien
aggggcgcgcgagagagaggccgag

SEQ ID NO: 3012355 - DNA, 25 bp, Homo sapien
ggcgcgcgagagagaggccgaggcg

SEQ ID NO: 3012356 - DNA, 25 bp, Homo sapien
tcagtaacaactgtacagaggcccc

SEQ ID NO: 3012357 - DNA, 25 bp, Homo sapien
cagagtcagtaacaactgtacagag

SEQ ID NO: 3012358 - DNA, 25 bp, Homo sapien
atcagagtcagtaacaactgtacag

SEQ ID NO: 3012359 - DNA, 25 bp, Homo sapien
gagtcagtaacaactgtacagaggc

SEQ ID NO: 3012360 - DNA, 25 bp, Homo sapien
ccgcggcccgactgtgcttgtagta

SEQ ID NO: 3012361 - DNA, 25 bp, Homo sapien
catgccacgagtcacgggaatgagg

SEQ ID NO: 3012362 - DNA, 25 bp, Homo sapien
gccacttgccacctacatctgagag

SEQ ID NO: 3012363 - DNA, 25 bp, Homo sapien
tcccatcagacggagtgctgggcct

SEQ ID NO: 3012364 - DNA, 25 bp, Homo sapien
acagaggagtgtggcccccttctcc

SEQ ID NO: 3012365 - DNA, 25 bp, Homo sapien
tcaagttcggctggactgaagtgag

SEQ ID NO: 3012366 - DNA, 25 bp, Homo sapien
ttctccttagtgacccactcaagtt

SEQ ID NO: 3012367 - DNA, 25 bp, Homo sapien
tagtgacccactcaagttcggctgg

SEQ ID NO: 3012368 - DNA, 25 bp, Homo sapien
cctgagcctggtgcgtccgctggga

SEQ ID NO: 3012369 - DNA, 25 bp, Homo sapien
tgagcctggtgcgtccgctgggatt

SEQ ID NO: 3012370 - DNA, 25 bp, Homo sapien
cctggtgcgtccgctgggatttggg

SEQ ID NO: 3012371 - DNA, 25 bp, Homo sapien
agcctggtgcgtccgctgggatttg

SEQ ID NO: 3012372 - DNA, 25 bp, Homo sapien
ttcaaaggacggcagctcaggatgg

SEQ ID NO: 3012373 - DNA, 25 bp, Homo sapien
ggtctccgccccagcatattgaagg

SEQ ID NO: 3012374 - DNA, 25 bp, Homo sapien
aggaggtgcacagttctcgccaggc

SEQ ID NO: 3012375 - DNA, 25 bp, Homo sapien
tcctcccgaggaggtgcacagttct

SEQ ID NO: 3012376 - DNA, 25 bp, Homo sapien
cacttcttggttagtgtcccagcct

SEQ ID NO: 3012377 - DNA, 25 bp, Homo sapien
gcactctccgtacagcggcaacatt

SEQ ID NO: 3012378 - DNA, 25 bp, Homo sapien
cccgtgatatgccatgtgccacttc

SEQ ID NO: 3012379 - DNA, 25 bp, Homo sapien
gtacagcggcaacattgctcccgtg

SEQ ID NO: 3012380 - DNA, 25 bp, Homo sapien
cccagtggaggagcttcacgaggct

SEQ ID NO: 3012381 - DNA, 25 bp, Homo sapien
ggagcttcacgaggctcttccttag

SEQ ID NO: 3012382 - DNA, 25 bp, Homo sapien
gcagatacaacgaaggccactgact

SEQ ID NO: 3012383 - DNA, 25 bp, Homo sapien
gacaagcggggcagatacaacgaag

SEQ ID NO: 3012384 - DNA, 25 bp, Homo sapien
tgtgggcctcgtctcctcgcagctt

SEQ ID NO: 3012385 - DNA, 25 bp, Homo sapien
ccaaagggcagtgcatattcccggg

SEQ ID NO: 3012386 - DNA, 25 bp, Homo sapien
agtagcacaggcttcgctttggcgg

SEQ ID NO: 3012387 - DNA, 25 bp, Homo sapien
cagcttccggcaagactcacagtag

SEQ ID NO: 3012388 - DNA, 25 bp, Homo sapien
ggagttcttggaagcgagagcaaag

SEQ ID NO: 3012389 - DNA, 25 bp, Homo sapien
gcaaagggcatggtactcgcagctc

SEQ ID NO: 3012390 - DNA, 25 bp, Homo sapien
ctctttagaggactagcggcaggtg

SEQ ID NO: 3012391 - DNA, 25 bp, Homo sapien
gcaggtggtggaccccagcacacac

SEQ ID NO: 3012392 - DNA, 25 bp, Homo sapien
gcacaggtcacaggagctgggctag

SEQ ID NO: 3012393 - DNA, 25 bp, Homo sapien
acaggtcacaggagctgggctagaa

SEQ ID NO: 3012394 - DNA, 25 bp, Homo sapien
gaggggcacaggtcacaggagctgg

SEQ ID NO: 3012395 - DNA, 25 bp, Homo sapien
cacaggtcacaggagctgggctaga

SEQ ID NO: 3012396 - DNA, 25 bp, Homo sapien
ccctggctcagggttcacgattgtc

SEQ ID NO: 3012397 - DNA, 25 bp, Homo sapien
cctggctcagggttcacgattgtca

SEQ ID NO: 3012398 - DNA, 25 bp, Homo sapien
ctggctcagggttcacgattgtcac

SEQ ID NO: 3012399 - DNA, 25 bp, Homo sapien
gcccctggctcagggttcacgattg

SEQ ID NO: 3012400 - DNA, 25 bp, Homo sapien
tggacagcgcagactctcaggcacc

SEQ ID NO: 3012401 - DNA, 25 bp, Homo sapien
tcctggacagcgcagactctcaggc

SEQ ID NO: 3012402 - DNA, 25 bp, Homo sapien
acagcgcagactctcaggcacccct

SEQ ID NO: 3012403 - DNA, 25 bp, Homo sapien
cagcgcagactctcaggcacccctc

SEQ ID NO: 3012404 - DNA, 25 bp, Homo sapien
tgccttcagggcacgtgtccagatt

SEQ ID NO: 3012405 - DNA, 25 bp, Homo sapien
tgcccatagaggtccacaagcgcat

SEQ ID NO: 3012406 - DNA, 25 bp, Homo sapien
gattgggcccaaacttctcgcagat

SEQ ID NO: 3012407 - DNA, 25 bp, Homo sapien
tggtccaccccattaacatgaagat

SEQ ID NO: 3012408 - DNA, 25 bp, Homo sapien
attctcaatggcagggacaccgcag

SEQ ID NO: 3012409 - DNA, 25 bp, Homo sapien
aggcaatgctactcgcccttgcctg

SEQ ID NO: 3012410 - DNA, 25 bp, Homo sapien
agcagcaggcctaagactgaccagg

SEQ ID NO: 3012411 - DNA, 25 bp, Homo sapien
cctgtggtcctacctccaaggctag

SEQ ID NO: 3012412 - DNA, 25 bp, Homo sapien
ctctcaggcgcgcaggtgatgactc

SEQ ID NO: 3012413 - DNA, 25 bp, Homo sapien
gccaggctgcccgtttgagggcaca

SEQ ID NO: 3012414 - DNA, 25 bp, Homo sapien
cttgagaccgttgtggaagacccca

SEQ ID NO: 3012415 - DNA, 25 bp, Homo sapien
cagaagcagggaagttgagcctctc

SEQ ID NO: 3012416 - DNA, 25 bp, Homo sapien
ccactgtcggtttaggaaatctatc

SEQ ID NO: 3012417 - DNA, 25 bp, Homo sapien
cactgtcggtttaggaaatctatcc

SEQ ID NO: 3012418 - DNA, 25 bp, Homo sapien
tgtccactgtcggtttaggaaatct

SEQ ID NO: 3012419 - DNA, 25 bp, Homo sapien
gtcggtttaggaaatctatccgcac

SEQ ID NO: 3012420 - DNA, 25 bp, Homo sapien
ttgtagctggccacccgtgtggccg

SEQ ID NO: 3012421 - DNA, 25 bp, Homo sapien
tggttgatgacaacgatgccctgat

SEQ ID NO: 3012422 - DNA, 25 bp, Homo sapien
tggccgtacggttcccattagacaa

SEQ ID NO: 3012423 - DNA, 25 bp, Homo sapien
cgtgtggccgtacggttcccattag

SEQ ID NO: 3012424 - DNA, 25 bp, Homo sapien
gaactcgagggtggtgggtataata

SEQ ID NO: 3012425 - DNA, 25 bp, Homo sapien
ggtggtgggtataatacccacttca

SEQ ID NO: 3012426 - DNA, 25 bp, Homo sapien
tctccaggaactcgagggtggtggg

SEQ ID NO: 3012427 - DNA, 25 bp, Homo sapien
atggttctccaggaactcgagggtg

SEQ ID NO: 3012428 - DNA, 25 bp, Homo sapien
tggcccgtagagatccaacacagcc

SEQ ID NO: 3012429 - DNA, 25 bp, Homo sapien
ccctcactgccggtgtctgaactgg

SEQ ID NO: 3012430 - DNA, 25 bp, Homo sapien
aactgacaattgacacaccgcggac

SEQ ID NO: 3012431 - DNA, 25 bp, Homo sapien
aggccatgctcctcgccctcgtcat

SEQ ID NO: 3012432 - DNA, 25 bp, Homo sapien
caccaggatgtgcatcgtgtcatct

SEQ ID NO: 3012433 - DNA, 25 bp, Homo sapien
catccaccaggatgtgcatcgtgtc

SEQ ID NO: 3012434 - DNA, 25 bp, Homo sapien
tccaccaggatgtgcatcgtgtcat

SEQ ID NO: 3012435 - DNA, 25 bp, Homo sapien
aggatgtgcatcgtgtcatctgccc

SEQ ID NO: 3012436 - DNA, 25 bp, Homo sapien
ccccagcctctctaggttccggcca

SEQ ID NO: 3012437 - DNA, 25 bp, Homo sapien
cagcctctctaggttccggccatag

SEQ ID NO: 3012438 - DNA, 25 bp, Homo sapien
ctctggagctgcccatcacgcctca

SEQ ID NO: 3012439 - DNA, 25 bp, Homo sapien
ccggccatagttcatcctctggagc

SEQ ID NO: 3012440 - DNA, 25 bp, Homo sapien
agtggtcttcgtccggagctctggc

SEQ ID NO: 3012441 - DNA, 25 bp, Homo sapien
gctggataccatccaagtggtcttc

SEQ ID NO: 3012442 - DNA, 25 bp, Homo sapien
catctcccccggtgctagtgtggtc

SEQ ID NO: 3012443 - DNA, 25 bp, Homo sapien
tccaagtggtcttcgtccggagctc

SEQ ID NO: 3012444 - DNA, 25 bp, Homo sapien
gccccagccgcagggaacctgccca

SEQ ID NO: 3012445 - DNA, 25 bp, Homo sapien
ttctcatctagctcttccactttca

SEQ ID NO: 3012446 - DNA, 25 bp, Homo sapien
agggaacctgcccacttctcatcta

SEQ ID NO: 3012447 - DNA, 25 bp, Homo sapien
gcccacttctcatctagctcttcca

SEQ ID NO: 3012448 - DNA, 25 bp, Homo sapien
aaaacataagctggccctgtcgtga

SEQ ID NO: 3012449 - DNA, 25 bp, Homo sapien
taagctggccctgtcgtgatgggcc

SEQ ID NO: 3012450 - DNA, 25 bp, Homo sapien
gccctgtcgtgatgggcctcgcagc

SEQ ID NO: 3012451 - DNA, 25 bp, Homo sapien
cctctgtcacatcactacggcctac

SEQ ID NO: 3012452 - DNA, 25 bp, Homo sapien
gccatcctcctctagagtgacgttc

SEQ ID NO: 3012453 - DNA, 25 bp, Homo sapien
tagagtgacgttcttgccgcaagta

SEQ ID NO: 3012454 - DNA, 25 bp, Homo sapien
gcaagtactgtggaatcggtgagcc

SEQ ID NO: 3012455 - DNA, 25 bp, Homo sapien
gccctcagctccttggtactgaaga

SEQ ID NO: 3012456 - DNA, 25 bp, Homo sapien
cagtgggaaggacttctcggtggca

SEQ ID NO: 3012457 - DNA, 25 bp, Homo sapien
cactggccatagagatcgactaccg

SEQ ID NO: 3012458 - DNA, 25 bp, Homo sapien
tagagatcgactaccgcatacacct

SEQ ID NO: 3012459 - DNA, 25 bp, Homo sapien
cacttggacacactggccatagaga

SEQ ID NO: 3012460 - DNA, 25 bp, Homo sapien
aattgttgcgcatcgtgttaccgtc

SEQ ID NO: 3012461 - DNA, 25 bp, Homo sapien
gtcgcccttggcagttcgcatcatg

SEQ ID NO: 3012462 - DNA, 25 bp, Homo sapien
gatgaagtagtgcaggtcgcccttg

SEQ ID NO: 3012463 - DNA, 25 bp, Homo sapien
ttggtcctggccgttgatgaagtag

SEQ ID NO: 3012464 - DNA, 25 bp, Homo sapien
tcttcaggccgaatagcagtcactc

SEQ ID NO: 3012465 - DNA, 25 bp, Homo sapien
ctcagcatccatgtgtcatagtcaa

SEQ ID NO: 3012466 - DNA, 25 bp, Homo sapien
ccaggtcttcaggccgaatagcagt

SEQ ID NO: 3012467 - DNA, 25 bp, Homo sapien
tagtcaatgtctgtcatggtgttgg

SEQ ID NO: 3012468 - DNA, 25 bp, Homo sapien
cctcaatggagcctgaccagcggtc

SEQ ID NO: 3012469 - DNA, 25 bp, Homo sapien
aaacagctctccatcccgcagggcc

SEQ ID NO: 3012470 - DNA, 25 bp, Homo sapien
tcaatggagcctgaccagcggtcca

SEQ ID NO: 3012471 - DNA, 25 bp, Homo sapien
cagcctcaatggagcctgaccagcg

SEQ ID NO: 3012472 - DNA, 25 bp, Homo sapien
aactcgctgcgacagttgtggcgga

SEQ ID NO: 3012473 - DNA, 25 bp, Homo sapien
ccccgttagtgatgactgcgttact

SEQ ID NO: 3012474 - DNA, 25 bp, Homo sapien
tgcgttactgccgtgcagctgatgg

SEQ ID NO: 3012475 - DNA, 25 bp, Homo sapien
tgacgatggcgtcattaaactcgct

SEQ ID NO: 3012476 - DNA, 25 bp, Homo sapien
gagacacctggttgttcccctcagg

SEQ ID NO: 3012477 - DNA, 25 bp, Homo sapien
gacacctggttgttcccctcaggga

SEQ ID NO: 3012478 - DNA, 25 bp, Homo sapien
cacctggttgttcccctcagggagt

SEQ ID NO: 3012479 - DNA, 25 bp, Homo sapien
ggagacacctggttgttcccctcag

SEQ ID NO: 3012480 - DNA, 25 bp, Homo sapien
agagatcgacgacagcatagacgcc

SEQ ID NO: 3012481 - DNA, 25 bp, Homo sapien
gcctgggccgcctggccatagagat

SEQ ID NO: 3012482 - DNA, 25 bp, Homo sapien
caaagaagtggagagtcccgtcctc

SEQ ID NO: 3012483 - DNA, 25 bp, Homo sapien
gccctgagtcatcccattgacaaag

SEQ ID NO: 3012484 - DNA, 25 bp, Homo sapien
cagagttcctgccggggctggtcct

SEQ ID NO: 3012485 - DNA, 25 bp, Homo sapien
cctgccggggctggtcctgcatcag

SEQ ID NO: 3012486 - DNA, 25 bp, Homo sapien
aggcagagttcctgccggggctggt

SEQ ID NO: 3012487 - DNA, 25 bp, Homo sapien
gtcctgcatcagccccgcggtgttt

SEQ ID NO: 3012488 - DNA, 25 bp, Homo sapien
ttgaggcggtccagattgtgcccgt

SEQ ID NO: 3012489 - DNA, 25 bp, Homo sapien
ttgtgcccgtattcatccaggatgg

SEQ ID NO: 3012490 - DNA, 25 bp, Homo sapien
gatggtcgtcccattgtgcatcacc

SEQ ID NO: 3012491 - DNA, 25 bp, Homo sapien
tccaggatggtcgtcccattgtgca

SEQ ID NO: 3012492 - DNA, 25 bp, Homo sapien
tggagggcaactggaggtaggcagg

SEQ ID NO: 3012493 - DNA, 25 bp, Homo sapien
catggtggagggcaactggaggtag

SEQ ID NO: 3012494 - DNA, 25 bp, Homo sapien
cagggttgtgggtggtgacaccaat

SEQ ID NO: 3012495 - DNA, 25 bp, Homo sapien
agggcaactggaggtaggcagggtt

SEQ ID NO: 3012496 - DNA, 25 bp, Homo sapien
cagcaccacgccgtgattgaagtca

SEQ ID NO: 3012497 - DNA, 25 bp, Homo sapien
gctcagcaccacgccgtgattgaag

SEQ ID NO: 3012498 - DNA, 25 bp, Homo sapien
gcaccacgccgtgattgaagtcatc

SEQ ID NO: 3012499 - DNA, 25 bp, Homo sapien
caccacgccgtgattgaagtcatcg

SEQ ID NO: 3012500 - DNA, 25 bp, Homo sapien
ggacgatggtcaccttcactgccat

SEQ ID NO: 3012501 - DNA, 25 bp, Homo sapien
ttgtttcggcggagacggtcactgt

SEQ ID NO: 3012502 - DNA, 25 bp, Homo sapien
cactgtggttgttattgtggacgat

SEQ ID NO: 3012503 - DNA, 25 bp, Homo sapien
gcctcagggcagtgcgtccctcgtg

SEQ ID NO: 3012504 - DNA, 25 bp, Homo sapien
cctgatcgataccattaatgaagaa

SEQ ID NO: 3012505 - DNA, 25 bp, Homo sapien
aatgaagaagtgtagggcagagttg

SEQ ID NO: 3012506 - DNA, 25 bp, Homo sapien
gtgtagggcagagttggacttcctt

SEQ ID NO: 3012507 - DNA, 25 bp, Homo sapien
gcagagttggacttccttgtgaggc

SEQ ID NO: 3012508 - DNA, 25 bp, Homo sapien
tgaattcgcagtactcccggcgggt

SEQ ID NO: 3012509 - DNA, 25 bp, Homo sapien
tcatccagactgaattcgcagtact

SEQ ID NO: 3012510 - DNA, 25 bp, Homo sapien
caggattccacagccgctcatcatg

SEQ ID NO: 3012511 - DNA, 25 bp, Homo sapien
ctgcaactcatccagactgaattcg

SEQ ID NO: 3012512 - DNA, 25 bp, Homo sapien
ctgggtgatagtggacacttgggtt

SEQ ID NO: 3012513 - DNA, 25 bp, Homo sapien
tccttcccctcagcaacaccaggcc

SEQ ID NO: 3012514 - DNA, 25 bp, Homo sapien
gatagtggacacttgggttcgggta

SEQ ID NO: 3012515 - DNA, 25 bp, Homo sapien
ttcccctcagcaacaccaggcctgc

SEQ ID NO: 3012516 - DNA, 25 bp, Homo sapien
tatcaacaagcttgtcgatacggat

SEQ ID NO: 3012517 - DNA, 25 bp, Homo sapien
ggtgaccccaatctcaatggagcct

SEQ ID NO: 3012518 - DNA, 25 bp, Homo sapien
ggagcctgaccacttatcaacaagc

SEQ ID NO: 3012519 - DNA, 25 bp, Homo sapien
tggctgggtactccaaactgttggg

SEQ ID NO: 3012520 - DNA, 25 bp, Homo sapien
ggcgctcagccgtcttattattgtt

SEQ ID NO: 3012521 - DNA, 25 bp, Homo sapien
tcccgcacttttcatgaaagagcag

SEQ ID NO: 3012522 - DNA, 25 bp, Homo sapien
gaggtggcagcaccgctagatccca

SEQ ID NO: 3012523 - DNA, 25 bp, Homo sapien
gggcgattggtcatgacaaccccat

SEQ ID NO: 3012524 - DNA, 25 bp, Homo sapien
gccctccattgtaggcagacaggat

SEQ ID NO: 3012525 - DNA, 25 bp, Homo sapien
aggttcacattcaggagccctccat

SEQ ID NO: 3012526 - DNA, 25 bp, Homo sapien
gatggtgttgctcaccacctcagac

SEQ ID NO: 3012527 - DNA, 25 bp, Homo sapien
cagacaggatggtgttgctcaccac

SEQ ID NO: 3012528 - DNA, 25 bp, Homo sapien
ttatgcgactcaaggctgttaggaa

SEQ ID NO: 3012529 - DNA, 25 bp, Homo sapien
cattatgcgactcaaggctgttagg

SEQ ID NO: 3012530 - DNA, 25 bp, Homo sapien
attatgcgactcaaggctgttagga

SEQ ID NO: 3012531 - DNA, 25 bp, Homo sapien
caggcccgtggcactgcttggaaag

SEQ ID NO: 3012532 - DNA, 25 bp, Homo sapien
gtcccctgttcagccaaggcagagt

SEQ ID NO: 3012533 - DNA, 25 bp, Homo sapien
ttgccataaaggtccacgacggccc

SEQ ID NO: 3012534 - DNA, 25 bp, Homo sapien
ggtgatctgggtgcacttgccataa

SEQ ID NO: 3012535 - DNA, 25 bp, Homo sapien
tccacatctctgttccgcggtacca

SEQ ID NO: 3012536 - DNA, 25 bp, Homo sapien
tctgttccgcggtaccagcgctgca

SEQ ID NO: 3012537 - DNA, 25 bp, Homo sapien
acatctctgttccgcggtaccagcg

SEQ ID NO: 3012538 - DNA, 25 bp, Homo sapien
atctctgttccgcggtaccagcgct

SEQ ID NO: 3012539 - DNA, 25 bp, Homo sapien
tgcggacggtgaagacgcgtccatc

SEQ ID NO: 3012540 - DNA, 25 bp, Homo sapien
caccagcccgtggttaaactcctgg

SEQ ID NO: 3012541 - DNA, 25 bp, Homo sapien
gtccatcgcgcaagggttctcggct

SEQ ID NO: 3012542 - DNA, 25 bp, Homo sapien
gaagacgcgtccatcgcgcaagggt

SEQ ID NO: 3012543 - DNA, 25 bp, Homo sapien
ccgcgccgtacgcccacaggccgac

SEQ ID NO: 3012544 - DNA, 25 bp, Homo sapien
gccgctgcccagacccccgttggac

SEQ ID NO: 3012545 - DNA, 25 bp, Homo sapien
gttggaccccggtcctgagccgctc

SEQ ID NO: 3012546 - DNA, 25 bp, Homo sapien
tcaccaagcgcccagtgcgcgggtg

SEQ ID NO: 3012547 - DNA, 25 bp, Homo sapien
gcgggtgcagttccccgccgctgcc

SEQ ID NO: 3012548 - DNA, 25 bp, Homo sapien
ctgccgggcaatgaagcagcccgcg

SEQ ID NO: 3012549 - DNA, 25 bp, Homo sapien
aaccgcgtcgggcagacagtccgag

SEQ ID NO: 3012550 - DNA, 25 bp, Homo sapien
aggtatgctttacggcactgccggg

SEQ ID NO: 3012551 - DNA, 25 bp, Homo sapien
cttggcggcaccgtggcaaccgcgt

SEQ ID NO: 3012552 - DNA, 25 bp, Homo sapien
gactaactgaaaggacatgagggct

SEQ ID NO: 3012553 - DNA, 25 bp, Homo sapien
ggtgtcctgacttccgtcccaggga

SEQ ID NO: 3012554 - DNA, 25 bp, Homo sapien
tgggtttcccacgttgcagagacta

SEQ ID NO: 3012555 - DNA, 25 bp, Homo sapien
ccccagtgacggagttgtgagattg

SEQ ID NO: 3012556 - DNA, 25 bp, Homo sapien
tcttgaattcagcacgagagaagag

SEQ ID NO: 3012557 - DNA, 25 bp, Homo sapien
tggtcttgaattcagcacgagagaa

SEQ ID NO: 3012558 - DNA, 25 bp, Homo sapien
cagttgcaccagctggtcttgaatt

SEQ ID NO: 3012559 - DNA, 25 bp, Homo sapien
ggtcttgaattcagcacgagagaag

SEQ ID NO: 3012560 - DNA, 25 bp, Homo sapien
tgtacctggcccccaagattctttc

SEQ ID NO: 3012561 - DNA, 25 bp, Homo sapien
tttgatggagcctcgctatgttgcg

SEQ ID NO: 3012562 - DNA, 25 bp, Homo sapien
caggtgtgagcccagcctaaatagt

SEQ ID NO: 3012563 - DNA, 25 bp, Homo sapien
tcgggtgatccaccacccccatcag

SEQ ID NO: 3012564 - DNA, 25 bp, Homo sapien
gaatgtctcgtggaacagtcagccc

SEQ ID NO: 3012565 - DNA, 25 bp, Homo sapien
aagttcctgaccaagctgcctgaga

SEQ ID NO: 3012566 - DNA, 25 bp, Homo sapien
tcaaccagatctatgaggcccgcgt

SEQ ID NO: 3012567 - DNA, 25 bp, Homo sapien
gcagagaaacggtcatgaggcctta

SEQ ID NO: 3012568 - DNA, 25 bp, Homo sapien
tcaggctacgactggcaaagatgag

SEQ ID NO: 3012569 - DNA, 25 bp, Homo sapien
gcccggccaaagatagtgtcgttca

SEQ ID NO: 3012570 - DNA, 25 bp, Homo sapien
tatttaacaaatgcgtattgggcgc

SEQ ID NO: 3012571 - DNA, 25 bp, Homo sapien
gagacgtatcttgacatcttccgcg

SEQ ID NO: 3012572 - DNA, 25 bp, Homo sapien
gaactggatccctctccgacagaga

SEQ ID NO: 3012573 - DNA, 25 bp, Homo sapien
aagcatagatgggtgaggacctgaa

SEQ ID NO: 3012574 - DNA, 25 bp, Homo sapien
aaggcaaatctttgggatgcgcccc

SEQ ID NO: 3012575 - DNA, 25 bp, Homo sapien
gaatggtcgcaccttcaaagtgggc

SEQ ID NO: 3012576 - DNA, 25 bp, Homo sapien
gccaagaaggatctagtctgcccac

SEQ ID NO: 3012577 - DNA, 25 bp, Homo sapien
tgagctcagcttctgcgggcacaga

SEQ ID NO: 3012578 - DNA, 25 bp, Homo sapien
tctacgcgctagagaggatcaaggg

SEQ ID NO: 3012579 - DNA, 25 bp, Homo sapien
gcatgaaaagcctaggcccctgagg

SEQ ID NO: 3012580 - DNA, 25 bp, Homo sapien
tacataaggcacaggaatcgcagca

SEQ ID NO: 3012581 - DNA, 25 bp, Homo sapien
tttttcccataccaactgcttctac

SEQ ID NO: 3012582 - DNA, 25 bp, Homo sapien
gatgcagcctttttcctagggcaag

SEQ ID NO: 3012583 - DNA, 25 bp, Homo sapien
tctttcaatgtccaaaaagttacaa

SEQ ID NO: 3012584 - DNA, 25 bp, Homo sapien
gaagttggcactggggtccccctgc

SEQ ID NO: 3012585 - DNA, 25 bp, Homo sapien
gggagaggaagttggcactggggtc

SEQ ID NO: 3012586 - DNA, 25 bp, Homo sapien
gagaggaagttggcactggggtccc

SEQ ID NO: 3012587 - DNA, 25 bp, Homo sapien
ctagtgggagaggaagttggcactg

SEQ ID NO: 3012588 - DNA, 25 bp, Homo sapien
gggcggtggctatatccaccgtctt

SEQ ID NO: 3012589 - DNA, 25 bp, Homo sapien
tatccaccgtctttggtgcagcttg

SEQ ID NO: 3012590 - DNA, 25 bp, Homo sapien
gaactaattggccaagcagatgcta

SEQ ID NO: 3012591 - DNA, 25 bp, Homo sapien
tagagaccccctcaaagtgccatgg

SEQ ID NO: 3012592 - DNA, 25 bp, Homo sapien
gaaagtgtgaaagctgatatgcctg

SEQ ID NO: 3012593 - DNA, 25 bp, Homo sapien
agttctggtcgaggtgatggtctcc

SEQ ID NO: 3012594 - DNA, 25 bp, Homo sapien
ggagagcggctctcatacatacccc

SEQ ID NO: 3012595 - DNA, 25 bp, Homo sapien
tctgtcccctgcagtgtacatggag

SEQ ID NO: 3012596 - DNA, 25 bp, Homo sapien
ctcgcttctcaaagaacatgtagtc

SEQ ID NO: 3012597 - DNA, 25 bp, Homo sapien
ctcctcgcttctcaaagaacatgta

SEQ ID NO: 3012598 - DNA, 25 bp, Homo sapien
tcctcgcttctcaaagaacatgtag

SEQ ID NO: 3012599 - DNA, 25 bp, Homo sapien
cctcgcttctcaaagaacatgtagt

SEQ ID NO: 3012600 - DNA, 25 bp, Homo sapien
aatgaggaatgtggctcccagcagc

SEQ ID NO: 3012601 - DNA, 25 bp, Homo sapien
gcagcacagccttcaccctcacatc

SEQ ID NO: 3012602 - DNA, 25 bp, Homo sapien
ccttcaccctcacatccaggtccag

SEQ ID NO: 3012603 - DNA, 25 bp, Homo sapien
acagccttcaccctcacatccaggt

SEQ ID NO: 3012604 - DNA, 25 bp, Homo sapien
cttgctgatgcggcccacactgcgg

SEQ ID NO: 3012605 - DNA, 25 bp, Homo sapien
atctgtgagggcttctcggaccagg

SEQ ID NO: 3012606 - DNA, 25 bp, Homo sapien
tgcgggattcatcccgagtcttcac

SEQ ID NO: 3012607 - DNA, 25 bp, Homo sapien
tctgtgagggcttctcggaccaggc

SEQ ID NO: 3012608 - DNA, 25 bp, Homo sapien
actggtgacaggaatgcacagtgag

SEQ ID NO: 3012609 - DNA, 25 bp, Homo sapien
gagaaggatatactggatttcggaa

SEQ ID NO: 3012610 - DNA, 25 bp, Homo sapien
aattcttgccacttgggatctctag

SEQ ID NO: 3012611 - DNA, 25 bp, Homo sapien
gccacttgggatctctagcttccag

SEQ ID NO: 3012612 - DNA, 25 bp, Homo sapien
tcccaagagcctctagtattcctga

SEQ ID NO: 3012613 - DNA, 25 bp, Homo sapien
gaaggtcccaagagcctctagtatt

SEQ ID NO: 3012614 - DNA, 25 bp, Homo sapien
caagagcctctagtattcctgatac

SEQ ID NO: 3012615 - DNA, 25 bp, Homo sapien
ggtcccaagagcctctagtattcct

SEQ ID NO: 3012616 - DNA, 25 bp, Homo sapien
caccactcgcaagactgtctggcga

SEQ ID NO: 3012617 - DNA, 25 bp, Homo sapien
agactgtctggcgatcggcatcctg

SEQ ID NO: 3012618 - DNA, 25 bp, Homo sapien
tctggcgatcggcatcctggatgga

SEQ ID NO: 3012619 - DNA, 25 bp, Homo sapien
tcgcaagactgtctggcgatcggca

SEQ ID NO: 3012620 - DNA, 25 bp, Homo sapien
gatgccaggtctgtagcacgtggcc

SEQ ID NO: 3012621 - DNA, 25 bp, Homo sapien
tagcacgtggccaatggtggtgcct

SEQ ID NO: 3012622 - DNA, 25 bp, Homo sapien
ccaggtctgtagcacgtggccaatg

SEQ ID NO: 3012623 - DNA, 25 bp, Homo sapien
tctgtagcacgtggccaatggtggt

SEQ ID NO: 3012624 - DNA, 25 bp, Homo sapien
tgggagtgggaagcagacagggtca

SEQ ID NO: 3012625 - DNA, 25 bp, Homo sapien
ctgggagtgggaagcagacagggtc

SEQ ID NO: 3012626 - DNA, 25 bp, Homo sapien
agttcataccgattacaggtctccc

SEQ ID NO: 3012627 - DNA, 25 bp, Homo sapien
cccagagcgcagttcataccgatta

SEQ ID NO: 3012628 - DNA, 25 bp, Homo sapien
ggagcaaacgcagcacctcacggtc

SEQ ID NO: 3012629 - DNA, 25 bp, Homo sapien
cacagacgggcgcagcagttgctct

SEQ ID NO: 3012630 - DNA, 25 bp, Homo sapien
cacggggagactcgtagagcctcgc

SEQ ID NO: 3012631 - DNA, 25 bp, Homo sapien
atccgggccaccatcatgaggtcca

SEQ ID NO: 3012632 - DNA, 25 bp, Homo sapien
tgcccgaggtgacacggggagactc

SEQ ID NO: 3012633 - DNA, 25 bp, Homo sapien
gggccaccatcatgaggtccaacct

SEQ ID NO: 3012634 - DNA, 25 bp, Homo sapien
cagccttctggtgaatcaaaatctg

SEQ ID NO: 3012635 - DNA, 25 bp, Homo sapien
tcgctcagccttctggtgaatcaaa

SEQ ID NO: 3012636 - DNA, 25 bp, Homo sapien
tttccactcgctcagccttctggtg

SEQ ID NO: 3012637 - DNA, 25 bp, Homo sapien
ccactcgctcagccttctggtgaat

SEQ ID NO: 3012638 - DNA, 25 bp, Homo sapien
ttcgaggccagaaggcacccctggc

SEQ ID NO: 3012639 - DNA, 25 bp, Homo sapien
ggaattcgaggccagaaggcacccc

SEQ ID NO: 3012640 - DNA, 25 bp, Homo sapien
tgtagcgccggctccgggtacccag

SEQ ID NO: 3012641 - DNA, 25 bp, Homo sapien
tgcccgggcccaggatgtagcgccg

SEQ ID NO: 3012642 - DNA, 25 bp, Homo sapien
gcaggatagattagaaagggactca

SEQ ID NO: 3012643 - DNA, 25 bp, Homo sapien
aggatgtgttcaaacccggctccca

SEQ ID NO: 3012644 - DNA, 25 bp, Homo sapien
ggataacggagacccccagacttgc

SEQ ID NO: 3012645 - DNA, 25 bp, Homo sapien
agccagtccgagcacattccgggag

SEQ ID NO: 3012646 - DNA, 25 bp, Homo sapien
ggctggggttttcgagatgatggtg

SEQ ID NO: 3012647 - DNA, 25 bp, Homo sapien
ctggggttttcgagatgatggtgtc

SEQ ID NO: 3012648 - DNA, 25 bp, Homo sapien
aagggctggggttttcgagatgatg

SEQ ID NO: 3012649 - DNA, 25 bp, Homo sapien
agggctggggttttcgagatgatgg

SEQ ID NO: 3012650 - DNA, 25 bp, Homo sapien
agacagacacaaagacggagaggca

SEQ ID NO: 3012651 - DNA, 25 bp, Homo sapien
ggcccagggtctcttgggcggcgcc

SEQ ID NO: 3012652 - DNA, 25 bp, Homo sapien
agcggaggcaaactcggagatagcc

SEQ ID NO: 3012653 - DNA, 25 bp, Homo sapien
caaactcggagatagccagacagac

SEQ ID NO: 3012654 - DNA, 25 bp, Homo sapien
gttctcccatcctgcggaggaggct

SEQ ID NO: 3012655 - DNA, 25 bp, Homo sapien
aggacagatggacccgcggtcagac

SEQ ID NO: 3012656 - DNA, 25 bp, Homo sapien
gctgtgggccgacggcaggacagat

SEQ ID NO: 3012657 - DNA, 25 bp, Homo sapien
cccaagtgtcagtgggcgggaccgg

SEQ ID NO: 3012658 - DNA, 25 bp, Homo sapien
cgggtgcctagcactcggcagctca

SEQ ID NO: 3012659 - DNA, 25 bp, Homo sapien
cctagcactcggcagctcacaggag

SEQ ID NO: 3012660 - DNA, 25 bp, Homo sapien
cccagaagagcccgggtgcctagca

SEQ ID NO: 3012661 - DNA, 25 bp, Homo sapien
gagcccgggtgcctagcactcggca

SEQ ID NO: 3012662 - DNA, 25 bp, Homo sapien
cgtttgcgccgggaggaaggcagcc

SEQ ID NO: 3012663 - DNA, 25 bp, Homo sapien
ggaagccgatcgtgggctttgctcc

SEQ ID NO: 3012664 - DNA, 25 bp, Homo sapien
gggcggtgcgtttgcgccgggagga

SEQ ID NO: 3012665 - DNA, 25 bp, Homo sapien
tcctcggcgtcgccgacgttcccgc

SEQ ID NO: 3012666 - DNA, 25 bp, Homo sapien
gcgaacgccgccaggccggcggcgt

SEQ ID NO: 3012667 - DNA, 25 bp, Homo sapien
ggccggcggcgtgcgtgctcagcgc

SEQ ID NO: 3012668 - DNA, 25 bp, Homo sapien
ggcggcgtgcgtgctcagcgccctg

SEQ ID NO: 3012669 - DNA, 25 bp, Homo sapien
gccaggccggcggcgtgcgtgctca

SEQ ID NO: 3012670 - DNA, 25 bp, Homo sapien
tcgccttctgcctcccaggggcgac

SEQ ID NO: 3012671 - DNA, 25 bp, Homo sapien
ggactggctcctggctcgccttctg

SEQ ID NO: 3012672 - DNA, 25 bp, Homo sapien
tcattggcttccaggactggctcct

SEQ ID NO: 3012673 - DNA, 25 bp, Homo sapien
ccaggactggctcctggctcgcctt

SEQ ID NO: 3012674 - DNA, 25 bp, Homo sapien
ggcacagcggtgacccacacgggca

SEQ ID NO: 3012675 - DNA, 25 bp, Homo sapien
cgggcacctcgcagcgacagcagtt

SEQ ID NO: 3012676 - DNA, 25 bp, Homo sapien
tggcacagcggtgacccacacgggc

SEQ ID NO: 3012677 - DNA, 25 bp, Homo sapien
cacacgggcacctcgcagcgacagc

SEQ ID NO: 3012678 - DNA, 25 bp, Homo sapien
caggccgccaaacggtgtcagtgag

SEQ ID NO: 3012679 - DNA, 25 bp, Homo sapien
ccaaacggtgtcagtgagcgtgctc

SEQ ID NO: 3012680 - DNA, 25 bp, Homo sapien
gccacgcgggtgacaggccgccaaa

SEQ ID NO: 3012681 - DNA, 25 bp, Homo sapien
gtgacaggccgccaaacggtgtcag

SEQ ID NO: 3012682 - DNA, 25 bp, Homo sapien
tatgctttatatagtacaatctgta

SEQ ID NO: 3012683 - DNA, 25 bp, Homo sapien
atattgaaggcatacttaatttttc

SEQ ID NO: 3012684 - DNA, 25 bp, Homo sapien
cacaggcttgatcttagcacactag

SEQ ID NO: 3012685 - DNA, 25 bp, Homo sapien
caatctgtataatatattgaaggca

SEQ ID NO: 3012686 - DNA, 25 bp, Homo sapien
ccatttccactactagatgggaaac

SEQ ID NO: 3012687 - DNA, 25 bp, Homo sapien
taaatgtttagttatttcaggtcca

SEQ ID NO: 3012688 - DNA, 25 bp, Homo sapien
gacgcatgatcaacactggtttaat

SEQ ID NO: 3012689 - DNA, 25 bp, Homo sapien
gatcttccttgtaacgtgtctgacg

SEQ ID NO: 3012690 - DNA, 25 bp, Homo sapien
tttaatcctcttcttactccaactc

SEQ ID NO: 3012691 - DNA, 25 bp, Homo sapien
ctgcccagaaaacccagtaattaag

SEQ ID NO: 3012692 - DNA, 25 bp, Homo sapien
atcctcttcttactccaactcttta

SEQ ID NO: 3012693 - DNA, 25 bp, Homo sapien
gcccagaaaacccagtaattaagca

SEQ ID NO: 3012694 - DNA, 25 bp, Homo sapien
gttccggaagctagcaataacccag

SEQ ID NO: 3012695 - DNA, 25 bp, Homo sapien
gcctggtagtaaaagctggtgcaga

SEQ ID NO: 3012696 - DNA, 25 bp, Homo sapien
tgcagaataaggtcgttccggaagc

SEQ ID NO: 3012697 - DNA, 25 bp, Homo sapien
caagccagcccaagagtagcagggt

SEQ ID NO: 3012698 - DNA, 25 bp, Homo sapien
aaacaggattgttaagaacagggca

SEQ ID NO: 3012699 - DNA, 25 bp, Homo sapien
acaggattgttaagaacagggcagg

SEQ ID NO: 3012700 - DNA, 25 bp, Homo sapien
cagggttaggcgcagggaaagatta

SEQ ID NO: 3012701 - DNA, 25 bp, Homo sapien
ggcttggtcagggttaggcgcaggg

SEQ ID NO: 3012702 - DNA, 25 bp, Homo sapien
cagagtggctttctgcaatggggca

SEQ ID NO: 3012703 - DNA, 25 bp, Homo sapien
agagtggctttctgcaatggggcac

SEQ ID NO: 3012704 - DNA, 25 bp, Homo sapien
ccagagtggctttctgcaatggggc

SEQ ID NO: 3012705 - DNA, 25 bp, Homo sapien
gtggtgtttgttggccttgtcaaac

SEQ ID NO: 3012706 - DNA, 25 bp, Homo sapien
ccaggctgtgtaagaagtggtgttt

SEQ ID NO: 3012707 - DNA, 25 bp, Homo sapien
tgtaagaagtggtgtttgttggcct

SEQ ID NO: 3012708 - DNA, 25 bp, Homo sapien
ctaacagggccaggctgtgtaagaa

SEQ ID NO: 3012709 - DNA, 25 bp, Homo sapien
tactgagatcccctgatgacacaag

SEQ ID NO: 3012710 - DNA, 25 bp, Homo sapien
taggcaatacaggtactgagatccc

SEQ ID NO: 3012711 - DNA, 25 bp, Homo sapien
cagaaacgaagggatgtcgtaggca

SEQ ID NO: 3012712 - DNA, 25 bp, Homo sapien
cgaagggatgtcgtaggcaatacag

SEQ ID NO: 3012713 - DNA, 25 bp, Homo sapien
accccacccttgaagtcccagcttg

SEQ ID NO: 3012714 - DNA, 25 bp, Homo sapien
tgctgctccagagatccgcggctcg

SEQ ID NO: 3012715 - DNA, 25 bp, Homo sapien
ttgctgctccagagatccgcggctc

SEQ ID NO: 3012716 - DNA, 25 bp, Homo sapien
cacccttgaagtcccagcttgatcc

SEQ ID NO: 3012717 - DNA, 25 bp, Homo sapien
cagactttgtgccttcgtagaccca

SEQ ID NO: 3012718 - DNA, 25 bp, Homo sapien
ggaccccagactttgtgccttcgta

SEQ ID NO: 3012719 - DNA, 25 bp, Homo sapien
cccagactttgtgccttcgtagacc

SEQ ID NO: 3012720 - DNA, 25 bp, Homo sapien
accccagactttgtgccttcgtaga

SEQ ID NO: 3012721 - DNA, 25 bp, Homo sapien
tcccgtaggcatctgggaattgggc

SEQ ID NO: 3012722 - DNA, 25 bp, Homo sapien
ccttcccgtaggcatctgggaattg

SEQ ID NO: 3012723 - DNA, 25 bp, Homo sapien
ttcccgtaggcatctgggaattggg

SEQ ID NO: 3012724 - DNA, 25 bp, Homo sapien
ctccttcccgtaggcatctgggaat

SEQ ID NO: 3012725 - DNA, 25 bp, Homo sapien
gaagcaaaggttagcggtcctagtg

SEQ ID NO: 3012726 - DNA, 25 bp, Homo sapien
caaaggttagcggtcctagtgccag

SEQ ID NO: 3012727 - DNA, 25 bp, Homo sapien
ttagcggtcctagtgccagccctga

SEQ ID NO: 3012728 - DNA, 25 bp, Homo sapien
aggttagcggtcctagtgccagccc

SEQ ID NO: 3012729 - DNA, 25 bp, Homo sapien
aggtttagggctccgcggactgtct

SEQ ID NO: 3012730 - DNA, 25 bp, Homo sapien
gtctgataaacgagaggccgggcac

SEQ ID NO: 3012731 - DNA, 25 bp, Homo sapien
aacacgctcgggcagtactgggaac

SEQ ID NO: 3012732 - DNA, 25 bp, Homo sapien
cttccgattggtgggaacacgctcg

SEQ ID NO: 3012733 - DNA, 25 bp, Homo sapien
aagtacagtcccatcttcgtcccca

SEQ ID NO: 3012734 - DNA, 25 bp, Homo sapien
agaggacgccccaagtacagtccca

SEQ ID NO: 3012735 - DNA, 25 bp, Homo sapien
taggttacgcccttgcagcagaccc

SEQ ID NO: 3012736 - DNA, 25 bp, Homo sapien
tcccataggttacgcccttgcagca

SEQ ID NO: 3012737 - DNA, 25 bp, Homo sapien
taaggccgcagctccggacaaggcg

SEQ ID NO: 3012738 - DNA, 25 bp, Homo sapien
gaagcgaagcctaaggccgcagctc

SEQ ID NO: 3012739 - DNA, 25 bp, Homo sapien
cgtgcgccccgtaggaagcgaagcc

SEQ ID NO: 3012740 - DNA, 25 bp, Homo sapien
cgccccgtaggaagcgaagcctaag

SEQ ID NO: 3012741 - DNA, 25 bp, Homo sapien
ctgtagaacaggacgcaccggacca

SEQ ID NO: 3012742 - DNA, 25 bp, Homo sapien
agggctgagccaggtaggacctaag

SEQ ID NO: 3012743 - DNA, 25 bp, Homo sapien
tgagccaggtaggacctaagccggg

SEQ ID NO: 3012744 - DNA, 25 bp, Homo sapien
gctgagccaggtaggacctaagccg

SEQ ID NO: 3012745 - DNA, 25 bp, Homo sapien
ggctgagccaggtaggacctaagcc

SEQ ID NO: 3012746 - DNA, 25 bp, Homo sapien
tctccagtccatgaatgatcctttg

SEQ ID NO: 3012747 - DNA, 25 bp, Homo sapien
tcgccgtgtctctgcgtcttggtct

SEQ ID NO: 3012748 - DNA, 25 bp, Homo sapien
tgctctgtctgcgtgtctccgccta

SEQ ID NO: 3012749 - DNA, 25 bp, Homo sapien
tgtctccgcctagggatgctctcgc

SEQ ID NO: 3012750 - DNA, 25 bp, Homo sapien
tctgcccgcatttctggctgtctct

SEQ ID NO: 3012751 - DNA, 25 bp, Homo sapien
ctggctgtccctcccgtgtctttga

SEQ ID NO: 3012752 - DNA, 25 bp, Homo sapien
tccctatttgcctatttgcctgaag

SEQ ID NO: 3012753 - DNA, 25 bp, Homo sapien
gctgactgctcaggtgtgtgtgtct

SEQ ID NO: 3012754 - DNA, 25 bp, Homo sapien
tgattcgatccaccgaacggagagc

SEQ ID NO: 3012755 - DNA, 25 bp, Homo sapien
agtcccaggagcacgtgattcgatc

SEQ ID NO: 3012756 - DNA, 25 bp, Homo sapien
cctcccagagatggtgtgcggaacc

SEQ ID NO: 3012757 - DNA, 25 bp, Homo sapien
tgaactgcaactggacctggaatcc

SEQ ID NO: 3012758 - DNA, 25 bp, Homo sapien
tgaggagtacataggctgctggatc

SEQ ID NO: 3012759 - DNA, 25 bp, Homo sapien
gatttggcaggagtgtgccccaaaa

SEQ ID NO: 3012760 - DNA, 25 bp, Homo sapien
cacaccctgtagattacaagagtgg

SEQ ID NO: 3012761 - DNA, 25 bp, Homo sapien
tcaataggaggcaaaactcgagggt

SEQ ID NO: 3012762 - DNA, 25 bp, Homo sapien
ctaccctgagggagcctaggggctg

SEQ ID NO: 3012763 - DNA, 25 bp, Homo sapien
tctaccctgagggagcctaggggct

SEQ ID NO: 3012764 - DNA, 25 bp, Homo sapien
aggtcccactaggtgctctaccctg

SEQ ID NO: 3012765 - DNA, 25 bp, Homo sapien
caggtcccactaggtgctctaccct

SEQ ID NO: 3012766 - DNA, 25 bp, Homo sapien
gagaccacaagcacccacaatcatg

SEQ ID NO: 3012767 - DNA, 25 bp, Homo sapien
aactgagaccacaagcacccacaat

SEQ ID NO: 3012768 - DNA, 25 bp, Homo sapien
cctgtgtaactgagaccacaagcac

SEQ ID NO: 3012769 - DNA, 25 bp, Homo sapien
tgaactcaagcgatctgttcgcctc

SEQ ID NO: 3012770 - DNA, 25 bp, Homo sapien
gtggaagaatatgcacgcacatact

SEQ ID NO: 3012771 - DNA, 25 bp, Homo sapien
tctggtctgaaagcatgaaagcccc

SEQ ID NO: 3012772 - DNA, 25 bp, Homo sapien
cgcacatactcacgcgcgggaatgg

SEQ ID NO: 3012773 - DNA, 25 bp, Homo sapien
ggcccaacccactaaagagctctta

SEQ ID NO: 3012774 - DNA, 25 bp, Homo sapien
ttgtcttgttggtttattggcctac

SEQ ID NO: 3012775 - DNA, 25 bp, Homo sapien
tcatttgtcttgttggtttattggc

SEQ ID NO: 3012776 - DNA, 25 bp, Homo sapien
tcttgttggtttattggcctacaga

SEQ ID NO: 3012777 - DNA, 25 bp, Homo sapien
catttgtcttgttggtttattggcc

SEQ ID NO: 3012778 - DNA, 25 bp, Homo sapien
gggtcctcactacgtatagagctag

SEQ ID NO: 3012779 - DNA, 25 bp, Homo sapien
tctaaattttgcgtgctgcggcaca

SEQ ID NO: 3012780 - DNA, 25 bp, Homo sapien
gagggcacgaactgacaagacttga

SEQ ID NO: 3012781 - DNA, 25 bp, Homo sapien
tgcggcacagaaccagtggccttct

SEQ ID NO: 3012782 - DNA, 25 bp, Homo sapien
caaatttccaacatctgaaactcac

SEQ ID NO: 3012783 - DNA, 25 bp, Homo sapien
aactcacaatattcaaattccccag

SEQ ID NO: 3012784 - DNA, 25 bp, Homo sapien
tctgaaactcacaatattcaaattc

SEQ ID NO: 3012785 - DNA, 25 bp, Homo sapien
caaaatcccaaatttccaacatctg

SEQ ID NO: 3012786 - DNA, 25 bp, Homo sapien
ctcagaggagtatgggttaaggata

SEQ ID NO: 3012787 - DNA, 25 bp, Homo sapien
tattttaatctccacgtcgccacaa

SEQ ID NO: 3012788 - DNA, 25 bp, Homo sapien
tgaagttccaattctccggtccatc

SEQ ID NO: 3012789 - DNA, 25 bp, Homo sapien
gaattttgacctattctgaagttcc

SEQ ID NO: 3012790 - DNA, 25 bp, Homo sapien
acaagatttgtgggaatttttagtg

SEQ ID NO: 3012791 - DNA, 25 bp, Homo sapien
attcagtaggaaattcgtcactcag

SEQ ID NO: 3012792 - DNA, 25 bp, Homo sapien
caagatttgtgggaatttttagtga

SEQ ID NO: 3012793 - DNA, 25 bp, Homo sapien
agatttgtgggaatttttagtgatt

SEQ ID NO: 3012794 - DNA, 25 bp, Homo sapien
tgactcctctgtggttaacattcag

SEQ ID NO: 3012795 - DNA, 25 bp, Homo sapien
gtgactcctctgtggttaacattca

SEQ ID NO: 3012796 - DNA, 25 bp, Homo sapien
agtgactcctctgtggttaacattc

SEQ ID NO: 3012797 - DNA, 25 bp, Homo sapien
gaaagcttcagaacaaggcgggtca

SEQ ID NO: 3012798 - DNA, 25 bp, Homo sapien
gcagggaggcccagttttcaaagag

SEQ ID NO: 3012799 - DNA, 25 bp, Homo sapien
tatattgctcagttgccccaagggc

SEQ ID NO: 3012800 - DNA, 25 bp, Homo sapien
cctgaccagggttaactagtgcaaa

SEQ ID NO: 3012801 - DNA, 25 bp, Homo sapien
gcgtagccaaagacccctggtagga

SEQ ID NO: 3012802 - DNA, 25 bp, Homo sapien
ctgcttgaggattcactgcgtagcc

SEQ ID NO: 3012803 - DNA, 25 bp, Homo sapien
ggattcactgcgtagccaaagaccc

SEQ ID NO: 3012804 - DNA, 25 bp, Homo sapien
ccttctgggttctctcaacccctgc

SEQ ID NO: 3012805 - DNA, 25 bp, Homo sapien
ggcggtctcggaagcttcctcagca

SEQ ID NO: 3012806 - DNA, 25 bp, Homo sapien
ggtcttgcacaccttggcgcagtgg

SEQ ID NO: 3012807 - DNA, 25 bp, Homo sapien
caggtaggaccatgttgagagcaac

SEQ ID NO: 3012808 - DNA, 25 bp, Homo sapien
cacaggtgggtatacatagctgccc

SEQ ID NO: 3012809 - DNA, 25 bp, Homo sapien
tggtgaaggtctgggcacagtcccc

SEQ ID NO: 3012810 - DNA, 25 bp, Homo sapien
gcacagtccccgcatcggtgcctcc

SEQ ID NO: 3012811 - DNA, 25 bp, Homo sapien
agctttctcagggtggtgaaggtct

SEQ ID NO: 3012812 - DNA, 25 bp, Homo sapien
cctcttggtgcttccgcagctttct

SEQ ID NO: 3012813 - DNA, 25 bp, Homo sapien
gcttctgcctccaacgtggtggccg

SEQ ID NO: 3012814 - DNA, 25 bp, Homo sapien
ttctgcctccaacgtggtggccggc

SEQ ID NO: 3012815 - DNA, 25 bp, Homo sapien
gcacgtcccgctgggctctcggccg

SEQ ID NO: 3012816 - DNA, 25 bp, Homo sapien
ctgtgcgggcacgtcccgctgggct

SEQ ID NO: 3012817 - DNA, 25 bp, Homo sapien
cagccttgcgcttaggcttgtagga

SEQ ID NO: 3012818 - DNA, 25 bp, Homo sapien
cagctccagccttgcgcttaggctt

SEQ ID NO: 3012819 - DNA, 25 bp, Homo sapien
ccagccttgcgcttaggcttgtagg

SEQ ID NO: 3012820 - DNA, 25 bp, Homo sapien
ctccagccttgcgcttaggcttgta

SEQ ID NO: 3012821 - DNA, 25 bp, Homo sapien
tcagtctctgagatgcggcgcttga

SEQ ID NO: 3012822 - DNA, 25 bp, Homo sapien
agctccccaggacgcaggtcagtct

SEQ ID NO: 3012823 - DNA, 25 bp, Homo sapien
tccccaggacgcaggtcagtctctg

SEQ ID NO: 3012824 - DNA, 25 bp, Homo sapien
atgcggcgcttgacgatggcctcct

SEQ ID NO: 3012825 - DNA, 25 bp, Homo sapien
agcctgcagctgagaggggccccgg

SEQ ID NO: 3012826 - DNA, 25 bp, Homo sapien
agtgatctgacacagtggaggtgga

SEQ ID NO: 3012827 - DNA, 25 bp, Homo sapien
gagcctgcagctgagaggggccccg

SEQ ID NO: 3012828 - DNA, 25 bp, Homo sapien
atctgacacagtggaggtggagcct

SEQ ID NO: 3012829 - DNA, 25 bp, Homo sapien
gagcagtgtaagtgataaccgaggc

SEQ ID NO: 3012830 - DNA, 25 bp, Homo sapien
tattctcgtttcttgggtggcctcg

SEQ ID NO: 3012831 - DNA, 25 bp, Homo sapien
tgacaaaggtctcccaacagaagat

SEQ ID NO: 3012832 - DNA, 25 bp, Homo sapien
ctaatgccgtggaaggctcgctggt

SEQ ID NO: 3012833 - DNA, 25 bp, Homo sapien
tccgccacgagtgtacattgctgtg

SEQ ID NO: 3012834 - DNA, 25 bp, Homo sapien
acagggtcacgtaggaacgctcgca

SEQ ID NO: 3012835 - DNA, 25 bp, Homo sapien
acttcatgcttcgtgcggtactccg

SEQ ID NO: 3012836 - DNA, 25 bp, Homo sapien
ggtactccgccagagcaaacacttt

SEQ ID NO: 3012837 - DNA, 25 bp, Homo sapien
gctccaatctctgctacagctgccc

SEQ ID NO: 3012838 - DNA, 25 bp, Homo sapien
tctgcagccgtttgggatggatgaa

SEQ ID NO: 3012839 - DNA, 25 bp, Homo sapien
ccctgaaggcgggagatgcccagac

SEQ ID NO: 3012840 - DNA, 25 bp, Homo sapien
ctggcccctcgtcggcactgggcct

SEQ ID NO: 3012841 - DNA, 25 bp, Homo sapien
gaggacatcagaaaacgcagctgct

SEQ ID NO: 3012842 - DNA, 25 bp, Homo sapien
tcagaaaacgcagctgctgggactc

SEQ ID NO: 3012843 - DNA, 25 bp, Homo sapien
ggacatcagaaaacgcagctgctgg

SEQ ID NO: 3012844 - DNA, 25 bp, Homo sapien
catcagaaaacgcagctgctgggac

SEQ ID NO: 3012845 - DNA, 25 bp, Homo sapien
agcagggcctctctgaagaagggac

SEQ ID NO: 3012846 - DNA, 25 bp, Homo sapien
gcagggttgggtgcggcgcccccag

SEQ ID NO: 3012847 - DNA, 25 bp, Homo sapien
ccccagtagctggtggaaggggtag

SEQ ID NO: 3012848 - DNA, 25 bp, Homo sapien
ggctgaagtgagcagggcctctctg

SEQ ID NO: 3012849 - DNA, 25 bp, Homo sapien
tctccggctatgagggtgacgtcac

SEQ ID NO: 3012850 - DNA, 25 bp, Homo sapien
catgggacgggtccgtcacctctgc

SEQ ID NO: 3012851 - DNA, 25 bp, Homo sapien
gcagggaacttggtgtctccggcta

SEQ ID NO: 3012852 - DNA, 25 bp, Homo sapien
cgtcacagaagaggccacggagccg

SEQ ID NO: 3012853 - DNA, 25 bp, Homo sapien
acagccaacatggagtggggcgggg

SEQ ID NO: 3012854 - DNA, 25 bp, Homo sapien
cacagccaacatggagtggggcggg

SEQ ID NO: 3012855 - DNA, 25 bp, Homo sapien
gagagcacagccaacatggagtggg

SEQ ID NO: 3012856 - DNA, 25 bp, Homo sapien
gagcacagccaacatggagtggggc

SEQ ID NO: 3012857 - DNA, 25 bp, Homo sapien
gagtcccttctgctgggcctcttcc

SEQ ID NO: 3012858 - DNA, 25 bp, Homo sapien
gtcccttctgctgggcctcttcctt

SEQ ID NO: 3012859 - DNA, 25 bp, Homo sapien
gcgagtcccttctgctgggcctctt

SEQ ID NO: 3012860 - DNA, 25 bp, Homo sapien
tcagcgagtcccttctgctgggcct

SEQ ID NO: 3012861 - DNA, 25 bp, Homo sapien
ccgcctctgcctctccaagtgccag

SEQ ID NO: 3012862 - DNA, 25 bp, Homo sapien
ctgttcttgaaatcccaacctcgtg

SEQ ID NO: 3012863 - DNA, 25 bp, Homo sapien
ggctgttcttgaaatcccaacctcg

SEQ ID NO: 3012864 - DNA, 25 bp, Homo sapien
ctgcctctccaagtgccaggattat

SEQ ID NO: 3012865 - DNA, 25 bp, Homo sapien
gcgcccagctcctatttcttattta

SEQ ID NO: 3012866 - DNA, 25 bp, Homo sapien
gccaagggtagggaattttgtctgc

SEQ ID NO: 3012867 - DNA, 25 bp, Homo sapien
cagcgcccggccaagggtagggaat

SEQ ID NO: 3012868 - DNA, 25 bp, Homo sapien
agggtagggaattttgtctgctttg

SEQ ID NO: 3012869 - DNA, 25 bp, Homo sapien
aagcaattcaccgccttggacaccc

SEQ ID NO: 3012870 - DNA, 25 bp, Homo sapien
caggctcctacaaacaacgtcacaa

SEQ ID NO: 3012871 - DNA, 25 bp, Homo sapien
gatctgagttctagacgcgcagccc

SEQ ID NO: 3012872 - DNA, 25 bp, Homo sapien
tgatcccataaacacaactggcgca

SEQ ID NO: 3012873 - DNA, 25 bp, Homo sapien
gagaatgttgcaaacacacaacctt

SEQ ID NO: 3012874 - DNA, 25 bp, Homo sapien
aggcccggctcatcaccgtggccgc

SEQ ID NO: 3012875 - DNA, 25 bp, Homo sapien
ctccggttttgcccgcctccagctc

SEQ ID NO: 3012876 - DNA, 25 bp, Homo sapien
ctgactgcgatggcgccgcgtccgc

SEQ ID NO: 3012877 - DNA, 25 bp, Homo sapien
cgatggcgccgcgtccgccaggccc

SEQ ID NO: 3012878 - DNA, 25 bp, Homo sapien
aaagaatcagacaaactttggagtc

SEQ ID NO: 3012879 - DNA, 25 bp, Homo sapien
tgtaaagccacagagctagccataa

SEQ ID NO: 3012880 - DNA, 25 bp, Homo sapien
cagacaaactttggagtcatggaga

SEQ ID NO: 3012881 - DNA, 25 bp, Homo sapien
caaactttggagtcatggagacata

SEQ ID NO: 3012882 - DNA, 25 bp, Homo sapien
ttgctgaagatgaaaccgttgtcca

SEQ ID NO: 3012883 - DNA, 25 bp, Homo sapien
caaactagaatgaaagcggcccaat

SEQ ID NO: 3012884 - DNA, 25 bp, Homo sapien
cctcgagtcttcaaaccttaagcct

SEQ ID NO: 3012885 - DNA, 25 bp, Homo sapien
tcttcaaaccttaagcctcagtgca

SEQ ID NO: 3012886 - DNA, 25 bp, Homo sapien
gcagccagtcgtcgaagccatagtt

SEQ ID NO: 3012887 - DNA, 25 bp, Homo sapien
cagctatgtcaggagtcagaacgtc

SEQ ID NO: 3012888 - DNA, 25 bp, Homo sapien
tttggatggcgagagcttttccggc

SEQ ID NO: 3012889 - DNA, 25 bp, Homo sapien
ccttgtggcgctaagtagaggagcc

SEQ ID NO: 3012890 - DNA, 25 bp, Homo sapien
ttcaacattagatggtgccaaatcc

SEQ ID NO: 3012891 - DNA, 25 bp, Homo sapien
tccaaggtttgagaggtgcagtgcc

SEQ ID NO: 3012892 - DNA, 25 bp, Homo sapien
tacaatgtaatagaggaacttccca

SEQ ID NO: 3012893 - DNA, 25 bp, Homo sapien
tagcagttgctaagtacaggcaaaa

SEQ ID NO: 3012894 - DNA, 25 bp, Homo sapien
ggttgcgatcagccgagatagtgcc

SEQ ID NO: 3012895 - DNA, 25 bp, Homo sapien
aaataaaaaaacaggctgggcgcag

SEQ ID NO: 3012896 - DNA, 25 bp, Homo sapien
tggaggttgcgatcagccgagatag

SEQ ID NO: 3012897 - DNA, 25 bp, Homo sapien
attgcactccagcgtgggcaacaag

SEQ ID NO: 3012898 - DNA, 25 bp, Homo sapien
caggccaggtttgtttcctccacag

SEQ ID NO: 3012899 - DNA, 25 bp, Homo sapien
tgggtgagtctgtccattgctcatc

SEQ ID NO: 3012900 - DNA, 25 bp, Homo sapien
tgagttgtcgccatctgtcaggcca

SEQ ID NO: 3012901 - DNA, 25 bp, Homo sapien
cctacatcccttcaccaggtgagtt

SEQ ID NO: 3012902 - DNA, 25 bp, Homo sapien
tctcccagctactcgccaacttcac

SEQ ID NO: 3012903 - DNA, 25 bp, Homo sapien
ctcccagctactcgccaacttcacc

SEQ ID NO: 3012904 - DNA, 25 bp, Homo sapien
ttctcccagctactcacctacctct

SEQ ID NO: 3012905 - DNA, 25 bp, Homo sapien
acttctcccagctactcacctacct

SEQ ID NO: 3012906 - DNA, 25 bp, Homo sapien
agcccacgatacacaccacagtctc

SEQ ID NO: 3012907 - DNA, 25 bp, Homo sapien
gtctccaacctataccccaagctca

SEQ ID NO: 3012908 - DNA, 25 bp, Homo sapien
caagtacaccccaaccagtccttct

SEQ ID NO: 3012909 - DNA, 25 bp, Homo sapien
ccagctccccagagtataccccaac

SEQ ID NO: 3012910 - DNA, 25 bp, Homo sapien
cctactagccccacttactcgccca

SEQ ID NO: 3012911 - DNA, 25 bp, Homo sapien
tactcacctactagccccacttact

SEQ ID NO: 3012912 - DNA, 25 bp, Homo sapien
caagtactcacctactagccccact

SEQ ID NO: 3012913 - DNA, 25 bp, Homo sapien
tctcccaagtactcacctactagcc

SEQ ID NO: 3012914 - DNA, 25 bp, Homo sapien
cttcccccaagtactcgcccaccag

SEQ ID NO: 3012915 - DNA, 25 bp, Homo sapien
gaacttctggatcccgtttctgatg

SEQ ID NO: 3012916 - DNA, 25 bp, Homo sapien
gtggttacagctgatcctcgggaag

SEQ ID NO: 3012917 - DNA, 25 bp, Homo sapien
tgctgttagaactcactggcccagt

SEQ ID NO: 3012918 - DNA, 25 bp, Homo sapien
tatcagcccggatgacagtgacgag

SEQ ID NO: 3012919 - DNA, 25 bp, Homo sapien
gttgtaaacaccaatgcactcagac

SEQ ID NO: 3012920 - DNA, 25 bp, Homo sapien
taaggctggtcagtgaagcagtggg

SEQ ID NO: 3012921 - DNA, 25 bp, Homo sapien
gtaaacaccaatgcactcagaccag

SEQ ID NO: 3012922 - DNA, 25 bp, Homo sapien
agtggagaaggtacaaagaaatctg

SEQ ID NO: 3012923 - DNA, 25 bp, Homo sapien
cagaatgagagtgggaaacaatcgt

SEQ ID NO: 3012924 - DNA, 25 bp, Homo sapien
gtctatttgtgataccaagcttggt

SEQ ID NO: 3012925 - DNA, 25 bp, Homo sapien
ctagaaggcagaatggtaagaggcc

SEQ ID NO: 3012926 - DNA, 25 bp, Homo sapien
aagatgagggccaaggtgtatctgc

SEQ ID NO: 3012927 - DNA, 25 bp, Homo sapien
gcgagaggctcggagtttgatcaca

SEQ ID NO: 3012928 - DNA, 25 bp, Homo sapien
actccgttcgctgcgcgcacagcgc

SEQ ID NO: 3012929 - DNA, 25 bp, Homo sapien
ctcagaggtcgggtgggcgcccact

SEQ ID NO: 3012930 - DNA, 25 bp, Homo sapien
gagtttgatcacacacagcgtccgg

SEQ ID NO: 3012931 - DNA, 25 bp, Homo sapien
tggcacgatctcggctgaccgtaac

SEQ ID NO: 3012932 - DNA, 25 bp, Homo sapien
ggctggatccagtgcaatggcacga

SEQ ID NO: 3012933 - DNA, 25 bp, Homo sapien
gcacgatctcggctgaccgtaacct

SEQ ID NO: 3012934 - DNA, 25 bp, Homo sapien
acgatctcggctgaccgtaacctcc

SEQ ID NO: 3012935 - DNA, 25 bp, Homo sapien
gaactccgggatgatgttcaggctt

SEQ ID NO: 3012936 - DNA, 25 bp, Homo sapien
tggcctcggacattcagcaggtgct

SEQ ID NO: 3012937 - DNA, 25 bp, Homo sapien
ggtaggaaggcacactgcccaggaa

SEQ ID NO: 3012938 - DNA, 25 bp, Homo sapien
aaggtacagcagaagcggcctcctt

SEQ ID NO: 3012939 - DNA, 25 bp, Homo sapien
caggcattgtccagacctggtcggg

SEQ ID NO: 3012940 - DNA, 25 bp, Homo sapien
ttacggatatcttgcttctgttccc

SEQ ID NO: 3012941 - DNA, 25 bp, Homo sapien
tccccatggagctccgaattcttgc

SEQ ID NO: 3012942 - DNA, 25 bp, Homo sapien
ctccgaattcttgcgtgtgtgtaga

SEQ ID NO: 3012943 - DNA, 25 bp, Homo sapien
cagagatgtagctattatgcgcccg

SEQ ID NO: 3012944 - DNA, 25 bp, Homo sapien
cgaagccgccctctgctagggaaaa

SEQ ID NO: 3012945 - DNA, 25 bp, Homo sapien
cgatgacggtgccttcgcagtcaaa

SEQ ID NO: 3012946 - DNA, 25 bp, Homo sapien
aggagcctcgggtgtatcgtacgcc

SEQ ID NO: 3012947 - DNA, 25 bp, Homo sapien
tctgttgatgtgaggcgacgcacca

SEQ ID NO: 3012948 - DNA, 25 bp, Homo sapien
cctgggagtctccatgtgaagggcc

SEQ ID NO: 3012949 - DNA, 25 bp, Homo sapien
tacaaggagctgtgtcactgcaaac

SEQ ID NO: 3012950 - DNA, 25 bp, Homo sapien
caagtatctacaggcagaggcggta

SEQ ID NO: 3012951 - DNA, 25 bp, Homo sapien
gttgatacgtaagtggtggtcttcc

SEQ ID NO: 3012952 - DNA, 25 bp, Homo sapien
gggcttcaaattagtggatatgctt

SEQ ID NO: 3012953 - DNA, 25 bp, Homo sapien
gagactaaagggttcagctttccat

SEQ ID NO: 3012954 - DNA, 25 bp, Homo sapien
tggatatgcttagctcagaccttcc

SEQ ID NO: 3012955 - DNA, 25 bp, Homo sapien
tgatagtaccccaaagccctttaca

SEQ ID NO: 3012956 - DNA, 25 bp, Homo sapien
gggaatcctcccatccctacgatat

SEQ ID NO: 3012957 - DNA, 25 bp, Homo sapien
accaggattcatgatagtaccccaa

SEQ ID NO: 3012958 - DNA, 25 bp, Homo sapien
tagataagcctcaagaataagggca

SEQ ID NO: 3012959 - DNA, 25 bp, Homo sapien
taaggatcatgtctgcgagccagga

SEQ ID NO: 3012960 - DNA, 25 bp, Homo sapien
tatgtcacttccgtaccggcgagaa

SEQ ID NO: 3012961 - DNA, 25 bp, Homo sapien
taagttgtcgataggcgggcactcc

SEQ ID NO: 3012962 - DNA, 25 bp, Homo sapien
agttatccaatggtgcctgcgggcc

SEQ ID NO: 3012963 - DNA, 25 bp, Homo sapien
tatgggagggcgacgctacttcgcg

SEQ ID NO: 3012964 - DNA, 25 bp, Homo sapien
gcttctaagtgttgtgcaatctccc

SEQ ID NO: 3012965 - DNA, 25 bp, Homo sapien
ctagctcggcttgggctcattgtgc

SEQ ID NO: 3012966 - DNA, 25 bp, Homo sapien
tcgagggagcgagcacatggtggcc

SEQ ID NO: 3012967 - DNA, 25 bp, Homo sapien
gttttctcagagtgaacatgcctcg

SEQ ID NO: 3012968 - DNA, 25 bp, Homo sapien
tacagcagagctccattctaaggca

SEQ ID NO: 3012969 - DNA, 25 bp, Homo sapien
tttttcctgggtcatgctgcaacac

SEQ ID NO: 3012970 - DNA, 25 bp, Homo sapien
cactatgggctaagagatcccttgg

SEQ ID NO: 3012971 - DNA, 25 bp, Homo sapien
taagtgtcttccctccgggatagag

SEQ ID NO: 3012972 - DNA, 25 bp, Homo sapien
gagtgtcctccgtgcacatgctgaa

SEQ ID NO: 3012973 - DNA, 25 bp, Homo sapien
tcagtgcctctcaggaaagtagcag

SEQ ID NO: 3012974 - DNA, 25 bp, Homo sapien
aatagaatctggcatgcctaaggcc

SEQ ID NO: 3012975 - DNA, 25 bp, Homo sapien
taacctagtaacctccagatcccag

SEQ ID NO: 3012976 - DNA, 25 bp, Homo sapien
gaggactcttcgagacattgagacc

SEQ ID NO: 3012977 - DNA, 25 bp, Homo sapien
gattcaagggactatgtcactcagc

SEQ ID NO: 3012978 - DNA, 25 bp, Homo sapien
tgttttccagaatcggtcgaggtgg

SEQ ID NO: 3012979 - DNA, 25 bp, Homo sapien
gagaccattggagactacacgtgga

SEQ ID NO: 3012980 - DNA, 25 bp, Homo sapien
tacacgtggaccaatggttcccagc

SEQ ID NO: 3012981 - DNA, 25 bp, Homo sapien
acagtcctgccaccactagtcatgg

SEQ ID NO: 3012982 - DNA, 25 bp, Homo sapien
gaaatgccacggttcatccaacaag

SEQ ID NO: 3012983 - DNA, 25 bp, Homo sapien
tcatcgcgccactaagccaagatcg

SEQ ID NO: 3012984 - DNA, 25 bp, Homo sapien
gagccgtcatcgcgccactaagcca

SEQ ID NO: 3012985 - DNA, 25 bp, Homo sapien
ccgtcatcgcgccactaagccaaga

SEQ ID NO: 3012986 - DNA, 25 bp, Homo sapien
acaaaaagaaagccgggcatgacgg

SEQ ID NO: 3012987 - DNA, 25 bp, Homo sapien
agaattttattaaatgtgacgaact

SEQ ID NO: 3012988 - DNA, 25 bp, Homo sapien
gattaaaagccatgagtttcttgtc

SEQ ID NO: 3012989 - DNA, 25 bp, Homo sapien
tatgcaaatctttgacggggttttc

SEQ ID NO: 3012990 - DNA, 25 bp, Homo sapien
attttattaaatgtgacgaactgcc

SEQ ID NO: 3012991 - DNA, 25 bp, Homo sapien
tgtgacgatgcctcatgggttcacc

SEQ ID NO: 3012992 - DNA, 25 bp, Homo sapien
gaagagcccgattaaaccctcgcag

SEQ ID NO: 3012993 - DNA, 25 bp, Homo sapien
tcaaatgcagcagacagccaaagca

SEQ ID NO: 3012994 - DNA, 25 bp, Homo sapien
ggcaagccggtagagccattcatcc

SEQ ID NO: 3012995 - DNA, 25 bp, Homo sapien
cattacagctggctacggcgcaatc

SEQ ID NO: 3012996 - DNA, 25 bp, Homo sapien
cagtcccacccattacagctggcta

SEQ ID NO: 3012997 - DNA, 25 bp, Homo sapien
caccagcagtgagcgccagtcccac

SEQ ID NO: 3012998 - DNA, 25 bp, Homo sapien
ctacggcgcaatccctgggagccag

SEQ ID NO: 3012999 - DNA, 25 bp, Homo sapien
caacgaaagtcaatggcggtctgga

SEQ ID NO: 3013000 - DNA, 25 bp, Homo sapien
tgatccacagcggaatgacgcacgg

SEQ ID NO: 3013001 - DNA, 25 bp, Homo sapien
tccaaactggaagcgtcaacaaagg

SEQ ID NO: 3013002 - DNA, 25 bp, Homo sapien
tcaacaaaggcgtgggaggtctaac

SEQ ID NO: 3013003 - DNA, 25 bp, Homo sapien
gagttttattcagcatccgatccaa

SEQ ID NO: 3013004 - DNA, 25 bp, Homo sapien
gtccaagccttgatcggcgactaag

SEQ ID NO: 3013005 - DNA, 25 bp, Homo sapien
caacttttcgttcagtgggacttgc

SEQ ID NO: 3013006 - DNA, 25 bp, Homo sapien
caagtcctactcgagtgaccgtggg

SEQ ID NO: 3013007 - DNA, 25 bp, Homo sapien
tgtgtaacactatcctgggcaaatg

SEQ ID NO: 3013008 - DNA, 25 bp, Homo sapien
tagagtctcccaagccaaaattttg

SEQ ID NO: 3013009 - DNA, 25 bp, Homo sapien
taattcagtcattcagccaagcctc

SEQ ID NO: 3013010 - DNA, 25 bp, Homo sapien
cagaaaaaggcgcagtagagccagc

SEQ ID NO: 3013011 - DNA, 25 bp, Homo sapien
ctgctggattaaaaaaggaggatga

SEQ ID NO: 3013012 - DNA, 25 bp, Homo sapien
tctgaactgtagtccaacaggagaa

SEQ ID NO: 3013013 - DNA, 25 bp, Homo sapien
gtcccgtgaggtctgcgtccatgag

SEQ ID NO: 3013014 - DNA, 25 bp, Homo sapien
taattgtatgttgtgcggctctccc

SEQ ID NO: 3013015 - DNA, 25 bp, Homo sapien
agggttgtatggagtgggagagcca

SEQ ID NO: 3013016 - DNA, 25 bp, Homo sapien
ctctgagggagggagcacggtgagg

SEQ ID NO: 3013017 - DNA, 25 bp, Homo sapien
ggcaggtagtgggtataggtgggca

SEQ ID NO: 3013018 - DNA, 25 bp, Homo sapien
caggtagtgggtataggtgggcagc

SEQ ID NO: 3013019 - DNA, 25 bp, Homo sapien
accttggccgcgagtggcctctgct

SEQ ID NO: 3013020 - DNA, 25 bp, Homo sapien
gatggaaacgccctctgggagaacc

SEQ ID NO: 3013021 - DNA, 25 bp, Homo sapien
cacaggccccggaggtactgggcct

SEQ ID NO: 3013022 - DNA, 25 bp, Homo sapien
gggcgcatgggcctccgtcttcggc

SEQ ID NO: 3013023 - DNA, 25 bp, Homo sapien
ttccctgtccgcagcgggaaggtcc

SEQ ID NO: 3013024 - DNA, 25 bp, Homo sapien
aaagcctctgctcggttgggtggtc

SEQ ID NO: 3013025 - DNA, 25 bp, Homo sapien
ggagctccacaccatgaacgcgttc

SEQ ID NO: 3013026 - DNA, 25 bp, Homo sapien
ggagatctcggagttgtgcatcttg

SEQ ID NO: 3013027 - DNA, 25 bp, Homo sapien
ctggggtcccgaagatgaggaggca

SEQ ID NO: 3013028 - DNA, 25 bp, Homo sapien
cgtggcagccggaggctccaggctc

SEQ ID NO: 3013029 - DNA, 25 bp, Homo sapien
ggggtcccgaagatgaggaggcagc

SEQ ID NO: 3013030 - DNA, 25 bp, Homo sapien
gtggcagccggaggctccaggctcc

SEQ ID NO: 3013031 - DNA, 25 bp, Homo sapien
cttaagagggcgtcctgaatgccct

SEQ ID NO: 3013032 - DNA, 25 bp, Homo sapien
tgaatgccctcccctcaacgtgaag

SEQ ID NO: 3013033 - DNA, 25 bp, Homo sapien
ctcccctcaacgtgaagcgtcgatc

SEQ ID NO: 3013034 - DNA, 25 bp, Homo sapien
taagagggcgtcctgaatgccctcc

SEQ ID NO: 3013035 - DNA, 25 bp, Homo sapien
ccagagcttaaaccggagcctttgc

SEQ ID NO: 3013036 - DNA, 25 bp, Homo sapien
ccccggcactgaagaggtgttctga

SEQ ID NO: 3013037 - DNA, 25 bp, Homo sapien
gagagtcgaatgcaaaatccgctgt

SEQ ID NO: 3013038 - DNA, 25 bp, Homo sapien
cagtctggagtcgttgccgaggaac

SEQ ID NO: 3013039 - DNA, 25 bp, Homo sapien
tgccaggcgcggataggccagacct

SEQ ID NO: 3013040 - DNA, 25 bp, Homo sapien
taagactgcacctccttaagggcgc

SEQ ID NO: 3013041 - DNA, 25 bp, Homo sapien
ttgtggtctccggagttccgacagc

SEQ ID NO: 3013042 - DNA, 25 bp, Homo sapien
ctcagcccgtaggtaaacccaggtg

SEQ ID NO: 3013043 - DNA, 25 bp, Homo sapien
tatccccgtcttccacagtgatgag

SEQ ID NO: 3013044 - DNA, 25 bp, Homo sapien
gctccagcgcaggtcagttgggcct

SEQ ID NO: 3013045 - DNA, 25 bp, Homo sapien
tctcatccaccagacaaggttggtc

SEQ ID NO: 3013046 - DNA, 25 bp, Homo sapien
ccctgaacggtcaaatctgggtggg

SEQ ID NO: 3013047 - DNA, 25 bp, Homo sapien
tccgaggggcccttaggaagcttgc

SEQ ID NO: 3013048 - DNA, 25 bp, Homo sapien
tccaagggggcggagagctccccat

SEQ ID NO: 3013049 - DNA, 25 bp, Homo sapien
cccttaggaagcttgctgacagagt

SEQ ID NO: 3013050 - DNA, 25 bp, Homo sapien
aagggggcggagagctccccattct

SEQ ID NO: 3013051 - DNA, 25 bp, Homo sapien
ttctctatcctattcaaagtttaca

SEQ ID NO: 3013052 - DNA, 25 bp, Homo sapien
tcaaagtttacactggtctaaactc

SEQ ID NO: 3013053 - DNA, 25 bp, Homo sapien
acactggtctaaactccatcagaca

SEQ ID NO: 3013054 - DNA, 25 bp, Homo sapien
tttcttctctatcctattcaaagtt

SEQ ID NO: 3013055 - DNA, 25 bp, Homo sapien
agagagtcttctgagggtttagtgc

SEQ ID NO: 3013056 - DNA, 25 bp, Homo sapien
tcttctgagggtttagtgcgttcca

SEQ ID NO: 3013057 - DNA, 25 bp, Homo sapien
ggcctctggcggctctgagactctg

SEQ ID NO: 3013058 - DNA, 25 bp, Homo sapien
tgctcgtgagatatagtcagccaca

SEQ ID NO: 3013059 - DNA, 25 bp, Homo sapien
agctctgaggaaggattctggtgtc

SEQ ID NO: 3013060 - DNA, 25 bp, Homo sapien
ctctgaggaaggattctggtgtcca

SEQ ID NO: 3013061 - DNA, 25 bp, Homo sapien
tctcagctctgaggaaggattctgg

SEQ ID NO: 3013062 - DNA, 25 bp, Homo sapien
tcagctctgaggaaggattctggtg

SEQ ID NO: 3013063 - DNA, 25 bp, Homo sapien
cagtccgattaccacggttacggcg

SEQ ID NO: 3013064 - DNA, 25 bp, Homo sapien
cggctgcgattacgacgttgaggtc

SEQ ID NO: 3013065 - DNA, 25 bp, Homo sapien
gattacgacgttgaggtcttgattc

SEQ ID NO: 3013066 - DNA, 25 bp, Homo sapien
ggcggtctccactgatagagccatc

SEQ ID NO: 3013067 - DNA, 25 bp, Homo sapien
catgttgggcccatctgattccagg

SEQ ID NO: 3013068 - DNA, 25 bp, Homo sapien
ccaataggctgtagggattactgtc

SEQ ID NO: 3013069 - DNA, 25 bp, Homo sapien
gacggtcctgtcttcatcagtgcgg

SEQ ID NO: 3013070 - DNA, 25 bp, Homo sapien
tctggttcagacgtgtccaataggc

SEQ ID NO: 3013071 - DNA, 25 bp, Homo sapien
gaagaattgtatctcgaagtgggcc

SEQ ID NO: 3013072 - DNA, 25 bp, Homo sapien
gtatctcgaagtgggccggggggca

SEQ ID NO: 3013073 - DNA, 25 bp, Homo sapien
ctgagctaatagatgaagaattgta

SEQ ID NO: 3013074 - DNA, 25 bp, Homo sapien
aatagatgaagaattgtatctcgaa

SEQ ID NO: 3013075 - DNA, 25 bp, Homo sapien
aggcccagctcggttgggctcctct

SEQ ID NO: 3013076 - DNA, 25 bp, Homo sapien
caggcccagctcggttgggctcctc

SEQ ID NO: 3013077 - DNA, 25 bp, Homo sapien
ggcccagctcggttgggctcctctc

SEQ ID NO: 3013078 - DNA, 25 bp, Homo sapien
tctgccgaagctgctcatcaatttg

SEQ ID NO: 3013079 - DNA, 25 bp, Homo sapien
tgtagcctctccaagcgaagctgct

SEQ ID NO: 3013080 - DNA, 25 bp, Homo sapien
ccccataggttcgagtcgcatggag

SEQ ID NO: 3013081 - DNA, 25 bp, Homo sapien
gctatatccagccttgtcgctgcca

SEQ ID NO: 3013082 - DNA, 25 bp, Homo sapien
ctctcgggtgccaacaaaaatgaag

SEQ ID NO: 3013083 - DNA, 25 bp, Homo sapien
cattgctgatgttctctcgggtgcc

SEQ ID NO: 3013084 - DNA, 25 bp, Homo sapien
tgcaggtaggagaggtgatactcca

SEQ ID NO: 3013085 - DNA, 25 bp, Homo sapien
aggagaggtgatactccagcaaagc

SEQ ID NO: 3013086 - DNA, 25 bp, Homo sapien
aaatggaaggattaacgccgcccag

SEQ ID NO: 3013087 - DNA, 25 bp, Homo sapien
tctaaatctactagtgttaaacaac

SEQ ID NO: 3013088 - DNA, 25 bp, Homo sapien
gcagaaacgatggatcagaaaggaa

SEQ ID NO: 3013089 - DNA, 25 bp, Homo sapien
agtgggatcattctgggctctaaat

SEQ ID NO: 3013090 - DNA, 25 bp, Homo sapien
tcttcttgtcattatcaccttccac

SEQ ID NO: 3013091 - DNA, 25 bp, Homo sapien
ccacaccagatttatccacaatctc

SEQ ID NO: 3013092 - DNA, 25 bp, Homo sapien
accttccactcgaaccctcaccaca

SEQ ID NO: 3013093 - DNA, 25 bp, Homo sapien
tcctggatcactttcccgttctttc

SEQ ID NO: 3013094 - DNA, 25 bp, Homo sapien
ggacaaaatgttacaatccctagaa

SEQ ID NO: 3013095 - DNA, 25 bp, Homo sapien
tgtccttgtgaaactgggagtccac

SEQ ID NO: 3013096 - DNA, 25 bp, Homo sapien
cagggaggtgccaatcctggataaa

SEQ ID NO: 3013097 - DNA, 25 bp, Homo sapien
tcagaatcactgtagagaatcttga

SEQ ID NO: 3013098 - DNA, 25 bp, Homo sapien
cttcgggcctgtcggcaagcctcgg

SEQ ID NO: 3013099 - DNA, 25 bp, Homo sapien
caaccaggttcctgggcacttgcac

SEQ ID NO: 3013100 - DNA, 25 bp, Homo sapien
aaactcaaggtagcttcgggcctgt

SEQ ID NO: 3013101 - DNA, 25 bp, Homo sapien
gggcacttgcactgagtcctcagaa

SEQ ID NO: 3013102 - DNA, 25 bp, Homo sapien
catagatgcggaaagtgcaggtctc

SEQ ID NO: 3013103 - DNA, 25 bp, Homo sapien
gtcccaattgccagtcccatcaggt

SEQ ID NO: 3013104 - DNA, 25 bp, Homo sapien
catcaggtcctctcgcactgtgaac

SEQ ID NO: 3013105 - DNA, 25 bp, Homo sapien
actgtgaactcctcttggaaggctg

SEQ ID NO: 3013106 - DNA, 25 bp, Homo sapien
tggtagaatctcacagtcccaggca

SEQ ID NO: 3013107 - DNA, 25 bp, Homo sapien
gtccgcggaccacgaggacctgtgt

SEQ ID NO: 3013108 - DNA, 25 bp, Homo sapien
ggaaaagtcactgtaggaatcatgg

SEQ ID NO: 3013109 - DNA, 25 bp, Homo sapien
tagaaccactctggagtccgcggac

SEQ ID NO: 3013110 - DNA, 25 bp, Homo sapien
cagcagagatgctcgcttcacaggg

SEQ ID NO: 3013111 - DNA, 25 bp, Homo sapien
tcttcattgcgggacataagtagca

SEQ ID NO: 3013112 - DNA, 25 bp, Homo sapien
ggaaatgcatatcacccagcagaga

SEQ ID NO: 3013113 - DNA, 25 bp, Homo sapien
aagtagcagtttggtgcgcaggctt

SEQ ID NO: 3013114 - DNA, 25 bp, Homo sapien
taagcacatttaagcccttctcttt

SEQ ID NO: 3013115 - DNA, 25 bp, Homo sapien
ggcctgtaggagtcaggagcaataa

SEQ ID NO: 3013116 - DNA, 25 bp, Homo sapien
tataagcacatttaagcccttctct

SEQ ID NO: 3013117 - DNA, 25 bp, Homo sapien
ggagcaataaagtcctcttgacaaa

SEQ ID NO: 3013118 - DNA, 25 bp, Homo sapien
tttgtgatgttgagaaagatgcagt

SEQ ID NO: 3013119 - DNA, 25 bp, Homo sapien
ggctcccagggctttcttgaactct

SEQ ID NO: 3013120 - DNA, 25 bp, Homo sapien
gagctcactgtttgtgatgttgaga

SEQ ID NO: 3013121 - DNA, 25 bp, Homo sapien
tctttatggacgttttcattggagc

SEQ ID NO: 3013122 - DNA, 25 bp, Homo sapien
ccatggtaaccttgaagaagctgcc

SEQ ID NO: 3013123 - DNA, 25 bp, Homo sapien
agtcgctccagggtaacaatttcat

SEQ ID NO: 3013124 - DNA, 25 bp, Homo sapien
taggtggcatcacaggcagcatatt

SEQ ID NO: 3013125 - DNA, 25 bp, Homo sapien
gcttctctcagatcctcgggcacag

SEQ ID NO: 3013126 - DNA, 25 bp, Homo sapien
gaagttgtggatgacctgagcaact

SEQ ID NO: 3013127 - DNA, 25 bp, Homo sapien
agaagttgtggatgacctgagcaac

SEQ ID NO: 3013128 - DNA, 25 bp, Homo sapien
gagaagttgtggatgacctgagcaa

SEQ ID NO: 3013129 - DNA, 25 bp, Homo sapien
aagttgtggatgacctgagcaactt

SEQ ID NO: 3013130 - DNA, 25 bp, Homo sapien
ccacaaggttcctgttcattggctc

SEQ ID NO: 3013131 - DNA, 25 bp, Homo sapien
atctcccttcatcatccgcacccgg

SEQ ID NO: 3013132 - DNA, 25 bp, Homo sapien
aaggttcctgttcattggctcgaga

SEQ ID NO: 3013133 - DNA, 25 bp, Homo sapien
cctgttcattggctcgagaataaac

SEQ ID NO: 3013134 - DNA, 25 bp, Homo sapien
cagctggaggtggtagccggacatc

SEQ ID NO: 3013135 - DNA, 25 bp, Homo sapien
agctggaggtggtagccggacatcc

SEQ ID NO: 3013136 - DNA, 25 bp, Homo sapien
ttctgtgatctccttattatagtca

SEQ ID NO: 3013137 - DNA, 25 bp, Homo sapien
ctgtgatctccttattatagtcagc

SEQ ID NO: 3013138 - DNA, 25 bp, Homo sapien
agaagatggtgacagagtcttcatg

SEQ ID NO: 3013139 - DNA, 25 bp, Homo sapien
gaagatggtgacagagtcttcatgg

SEQ ID NO: 3013140 - DNA, 25 bp, Homo sapien
ccggctccacatcccccccagaggc

SEQ ID NO: 3013141 - DNA, 25 bp, Homo sapien
gtcccggctccacatcccccccaga

SEQ ID NO: 3013142 - DNA, 25 bp, Homo sapien
cgcgcacctcgacgggcagtcccgg

SEQ ID NO: 3013143 - DNA, 25 bp, Homo sapien
gtagaaggccccgttggagccgcgc

SEQ ID NO: 3013144 - DNA, 25 bp, Homo sapien
agtctgagtgcgggccgggccaggc

SEQ ID NO: 3013145 - DNA, 25 bp, Homo sapien
agcagtctgagtgcgggccgggcca

SEQ ID NO: 3013146 - DNA, 25 bp, Homo sapien
ctgcagcagcagtctgagtgcgggc

SEQ ID NO: 3013147 - DNA, 25 bp, Homo sapien
gcagcagcagtctgagtgcgggccg

SEQ ID NO: 3013148 - DNA, 25 bp, Homo sapien
gaggaggagccggagggggagccgc

SEQ ID NO: 3013149 - DNA, 25 bp, Homo sapien
aggaggagccggagggggagccgcg

SEQ ID NO: 3013150 - DNA, 25 bp, Homo sapien
ctgccacagccaacgagcagggggc

SEQ ID NO: 3013151 - DNA, 25 bp, Homo sapien
gccacagccaacgagcagggggccg

SEQ ID NO: 3013152 - DNA, 25 bp, Homo sapien
cacagccaacgagcagggggccggg

SEQ ID NO: 3013153 - DNA, 25 bp, Homo sapien
acagccaacgagcagggggccgggg

SEQ ID NO: 3013154 - DNA, 25 bp, Homo sapien
gccttcgtcacctcagcttccgccc

SEQ ID NO: 3013155 - DNA, 25 bp, Homo sapien
tgccttcgtcacctcagcttccgcc

SEQ ID NO: 3013156 - DNA, 25 bp, Homo sapien
tcgtcacctcagcttccgcccgccg

SEQ ID NO: 3013157 - DNA, 25 bp, Homo sapien
cttcgtcacctcagcttccgcccgc

SEQ ID NO: 3013158 - DNA, 25 bp, Homo sapien
cagtgtctgtggacgtagtctctga

SEQ ID NO: 3013159 - DNA, 25 bp, Homo sapien
tctgtggacgtagtctctgaagagt

SEQ ID NO: 3013160 - DNA, 25 bp, Homo sapien
cttccaatacttgaggataggcacc

SEQ ID NO: 3013161 - DNA, 25 bp, Homo sapien
ctcaagacagagatcctcctaggga

SEQ ID NO: 3013162 - DNA, 25 bp, Homo sapien
ccaggcggaattgggagcagccctt

SEQ ID NO: 3013163 - DNA, 25 bp, Homo sapien
aagtccatggccctctggttccagt

SEQ ID NO: 3013164 - DNA, 25 bp, Homo sapien
tgaaagcagaagaagtgccagccct

SEQ ID NO: 3013165 - DNA, 25 bp, Homo sapien
tcagatcttgggctcctagggcctt

SEQ ID NO: 3013166 - DNA, 25 bp, Homo sapien
ggagaagacaacactaacttttctg

SEQ ID NO: 3013167 - DNA, 25 bp, Homo sapien
ctgtgggagaagacaacactaactt

SEQ ID NO: 3013168 - DNA, 25 bp, Homo sapien
tgggagaagacaacactaacttttc

SEQ ID NO: 3013169 - DNA, 25 bp, Homo sapien
agaagacaacactaacttttctggg

SEQ ID NO: 3013170 - DNA, 25 bp, Homo sapien
tcacttgtcgccccacccatctcct

SEQ ID NO: 3013171 - DNA, 25 bp, Homo sapien
ctcacttgtcgccccacccatctcc

SEQ ID NO: 3013172 - DNA, 25 bp, Homo sapien
ggtcctcacttgtcgccccacccat

SEQ ID NO: 3013173 - DNA, 25 bp, Homo sapien
tcctcacttgtcgccccacccatct

SEQ ID NO: 3013174 - DNA, 25 bp, Homo sapien
cagccacctttttgattattttgga

SEQ ID NO: 3013175 - DNA, 25 bp, Homo sapien
gattattttggaaccaatcccttga

SEQ ID NO: 3013176 - DNA, 25 bp, Homo sapien
tgattattttggaaccaatcccttg

SEQ ID NO: 3013177 - DNA, 25 bp, Homo sapien
ctcagccacctttttgattattttg

SEQ ID NO: 3013178 - DNA, 25 bp, Homo sapien
gggatcagaaaatgacaccggctgg

SEQ ID NO: 3013179 - DNA, 25 bp, Homo sapien
aaatagctattgtttgagctgaagg

SEQ ID NO: 3013180 - DNA, 25 bp, Homo sapien
cagaaaatgacaccggctgggctct

SEQ ID NO: 3013181 - DNA, 25 bp, Homo sapien
aatagctattgtttgagctgaaggg

SEQ ID NO: 3013182 - DNA, 25 bp, Homo sapien
atagtatatcccatagcccaccacg

SEQ ID NO: 3013183 - DNA, 25 bp, Homo sapien
ccgatattccggcatcacatagata

SEQ ID NO: 3013184 - DNA, 25 bp, Homo sapien
ctccagataaatggtgcgtcccttc

SEQ ID NO: 3013185 - DNA, 25 bp, Homo sapien
ccatgtactgtagatgaaatagtat

SEQ ID NO: 3013186 - DNA, 25 bp, Homo sapien
gccggctggagaggtggacttctaa

SEQ ID NO: 3013187 - DNA, 25 bp, Homo sapien
gctggagaggtggacttctaagggc

SEQ ID NO: 3013188 - DNA, 25 bp, Homo sapien
ctctgaggccggctggagaggtgga

SEQ ID NO: 3013189 - DNA, 25 bp, Homo sapien
tgaggccggctggagaggtggactt

SEQ ID NO: 3013190 - DNA, 25 bp, Homo sapien
ccagtagcttcccgggcgctggaag

SEQ ID NO: 3013191 - DNA, 25 bp, Homo sapien
tagcttcccgggcgctggaagaatc

SEQ ID NO: 3013192 - DNA, 25 bp, Homo sapien
ttcccgggcgctggaagaatctctg

SEQ ID NO: 3013193 - DNA, 25 bp, Homo sapien
gcttcccgggcgctggaagaatctc

SEQ ID NO: 3013194 - DNA, 25 bp, Homo sapien
gaaagaggacgtgggtgtatgccca

SEQ ID NO: 3013195 - DNA, 25 bp, Homo sapien
gagatagagaaagaggacgtgggtg

SEQ ID NO: 3013196 - DNA, 25 bp, Homo sapien
tggagctgtcgcctggggaacccat

SEQ ID NO: 3013197 - DNA, 25 bp, Homo sapien
tccgccagaacctgggcgctgagcc

SEQ ID NO: 3013198 - DNA, 25 bp, Homo sapien
tcttcactgatcttcacctgatccg

SEQ ID NO: 3013199 - DNA, 25 bp, Homo sapien
tcttcacctgatccgagagtttttc

SEQ ID NO: 3013200 - DNA, 25 bp, Homo sapien
cactgatcttcacctgatccgagag

SEQ ID NO: 3013201 - DNA, 25 bp, Homo sapien
cacctgatccgagagtttttcgaat

SEQ ID NO: 3013202 - DNA, 25 bp, Homo sapien
gcaggttcccaaggcgagcccctcc

SEQ ID NO: 3013203 - DNA, 25 bp, Homo sapien
tgggtacggaagctagattagagca

SEQ ID NO: 3013204 - DNA, 25 bp, Homo sapien
ctacgaccccgctctggccgcgcca

SEQ ID NO: 3013205 - DNA, 25 bp, Homo sapien
gctgctccccgagcaggttcccaag

SEQ ID NO: 3013206 - DNA, 25 bp, Homo sapien
cttggcctctcggatccgcacggaa

SEQ ID NO: 3013207 - DNA, 25 bp, Homo sapien
cagcctcaggatatctccacagtct

SEQ ID NO: 3013208 - DNA, 25 bp, Homo sapien
ctccttggcctctcggatccgcacg

SEQ ID NO: 3013209 - DNA, 25 bp, Homo sapien
tggcctctcggatccgcacggaagc

SEQ ID NO: 3013210 - DNA, 25 bp, Homo sapien
tcgcaaacggcaactagacccctta

SEQ ID NO: 3013211 - DNA, 25 bp, Homo sapien
gatccccgctgtctgggaccaaagt

SEQ ID NO: 3013212 - DNA, 25 bp, Homo sapien
aaagggcctacggacttggatcctg

SEQ ID NO: 3013213 - DNA, 25 bp, Homo sapien
ccagggcctcgcaaacggcaactag

SEQ ID NO: 3013214 - DNA, 25 bp, Homo sapien
tagccgcggcctggtaagtggagct

SEQ ID NO: 3013215 - DNA, 25 bp, Homo sapien
gtggagctgggattccggcgccgta

SEQ ID NO: 3013216 - DNA, 25 bp, Homo sapien
ccgtacgggaggagagagtaggcca

SEQ ID NO: 3013217 - DNA, 25 bp, Homo sapien
gagtaggccagcgaggcgatcctct

SEQ ID NO: 3013218 - DNA, 25 bp, Homo sapien
cttcagcaatggagagggcatccac

SEQ ID NO: 3013219 - DNA, 25 bp, Homo sapien
gccccttgttgacgttcagggctaa

SEQ ID NO: 3013220 - DNA, 25 bp, Homo sapien
ttgaccctatagaccctctcaggat

SEQ ID NO: 3013221 - DNA, 25 bp, Homo sapien
gccagcagtgttggtagtggagtct

SEQ ID NO: 3013222 - DNA, 25 bp, Homo sapien
ggttgacctaggctgaatatccact

SEQ ID NO: 3013223 - DNA, 25 bp, Homo sapien
tggctttgggactattccacctcct

SEQ ID NO: 3013224 - DNA, 25 bp, Homo sapien
accttggaaacatcggctggctttg

SEQ ID NO: 3013225 - DNA, 25 bp, Homo sapien
agtttcttcctaggccgttctgtca

SEQ ID NO: 3013226 - DNA, 25 bp, Homo sapien
tctctctgcagttatttaatgcctg

SEQ ID NO: 3013227 - DNA, 25 bp, Homo sapien
tctctagctggatctgtgtttcttc

SEQ ID NO: 3013228 - DNA, 25 bp, Homo sapien
tgtcagatctactgtaaaaagagga

SEQ ID NO: 3013229 - DNA, 25 bp, Homo sapien
gccctaccatggtctctctctgcag

SEQ ID NO: 3013230 - DNA, 25 bp, Homo sapien
tacaggcttacactaccatagctgg

SEQ ID NO: 3013231 - DNA, 25 bp, Homo sapien
cattttctttggatcttggcttacg

SEQ ID NO: 3013232 - DNA, 25 bp, Homo sapien
ttgaatgcactaaaaccagagtagg

SEQ ID NO: 3013233 - DNA, 25 bp, Homo sapien
tgtggtcttctgcatacaggctctg

SEQ ID NO: 3013234 - DNA, 25 bp, Homo sapien
aaaagtctctgaaagaggcgggtct

SEQ ID NO: 3013235 - DNA, 25 bp, Homo sapien
aaagtctctgaaagaggcgggtctg

SEQ ID NO: 3013236 - DNA, 25 bp, Homo sapien
taaaagtctctgaaagaggcgggtc

SEQ ID NO: 3013237 - DNA, 25 bp, Homo sapien
gaagtgggcccctacctagaatgtg

SEQ ID NO: 3013238 - DNA, 25 bp, Homo sapien
acagcttccctggttagtacggtga

SEQ ID NO: 3013239 - DNA, 25 bp, Homo sapien
agatgttgacccttccagctggacg

SEQ ID NO: 3013240 - DNA, 25 bp, Homo sapien
gacgcacacctattgcaagcaaggg

SEQ ID NO: 3013241 - DNA, 25 bp, Homo sapien
gtcttgaacatgagttttttatggc

SEQ ID NO: 3013242 - DNA, 25 bp, Homo sapien
catgagttttttatggcgggaggta

SEQ ID NO: 3013243 - DNA, 25 bp, Homo sapien
tttttatggcgggaggtagactgac

SEQ ID NO: 3013244 - DNA, 25 bp, Homo sapien
tgaacatgagttttttatggcggga

SEQ ID NO: 3013245 - DNA, 25 bp, Homo sapien
gaccaatgctttgaagggcctaagg

SEQ ID NO: 3013246 - DNA, 25 bp, Homo sapien
cctgaccaatgctttgaagggccta

SEQ ID NO: 3013247 - DNA, 25 bp, Homo sapien
ctgtgccccttttccctgaccaatg

SEQ ID NO: 3013248 - DNA, 25 bp, Homo sapien
tccctgaccaatgctttgaagggcc

SEQ ID NO: 3013249 - DNA, 25 bp, Homo sapien
tcacctaggacctgccggtgcatgg

SEQ ID NO: 3013250 - DNA, 25 bp, Homo sapien
cagggctgagtatatgacctgaaac

SEQ ID NO: 3013251 - DNA, 25 bp, Homo sapien
gcacctcagagtattagtgtgtatt

SEQ ID NO: 3013252 - DNA, 25 bp, Homo sapien
tgtgtattagtctcgtaatcttccc

SEQ ID NO: 3013253 - DNA, 25 bp, Homo sapien
tcagctctcggaacatctcgaagcg

SEQ ID NO: 3013254 - DNA, 25 bp, Homo sapien
ctcggaacatctcgaagcgctcacg

SEQ ID NO: 3013255 - DNA, 25 bp, Homo sapien
tcattcagctctcggaacatctcga

SEQ ID NO: 3013256 - DNA, 25 bp, Homo sapien
gcctcattcagctctcggaacatct

SEQ ID NO: 3013257 - DNA, 25 bp, Homo sapien
aataaaagtaggctaggcaggccgg

SEQ ID NO: 3013258 - DNA, 25 bp, Homo sapien
ataaaagtaggctaggcaggccggg

SEQ ID NO: 3013259 - DNA, 25 bp, Homo sapien
aaataaaagtaggctaggcaggccg

SEQ ID NO: 3013260 - DNA, 25 bp, Homo sapien
aaaagtaggctaggcaggccgggtg

SEQ ID NO: 3013261 - DNA, 25 bp, Homo sapien
ctgaagggtgaaatattctccatcc

SEQ ID NO: 3013262 - DNA, 25 bp, Homo sapien
ttctccatccagtggtttcttcttt

SEQ ID NO: 3013263 - DNA, 25 bp, Homo sapien
catccagtggtttcttctttggctg

SEQ ID NO: 3013264 - DNA, 25 bp, Homo sapien
aatattctccatccagtggtttctt

SEQ ID NO: 3013265 - DNA, 25 bp, Homo sapien
aaaggtgataaaagtgaatctgagg

SEQ ID NO: 3013266 - DNA, 25 bp, Homo sapien
ttggtctcctccaccgcttcttgtc

SEQ ID NO: 3013267 - DNA, 25 bp, Homo sapien
ggcataactgcacccttggtctcct

SEQ ID NO: 3013268 - DNA, 25 bp, Homo sapien
atctgaggcataactgcacccttgg

SEQ ID NO: 3013269 - DNA, 25 bp, Homo sapien
ctctgtgcgccggtctctcccagga

SEQ ID NO: 3013270 - DNA, 25 bp, Homo sapien
tctcttcctctgtgcgccggtctct

SEQ ID NO: 3013271 - DNA, 25 bp, Homo sapien
ggtgaggctcccctttcttgcggag

SEQ ID NO: 3013272 - DNA, 25 bp, Homo sapien
gcacaaacacgcacctcaaagctgt

SEQ ID NO: 3013273 - DNA, 25 bp, Homo sapien
ggagaagccacaggttaagaggtcc

SEQ ID NO: 3013274 - DNA, 25 bp, Homo sapien
ggaaatcaggtcctacctgtcccat

SEQ ID NO: 3013275 - DNA, 25 bp, Homo sapien
cagtaaggaaatcaggtcctacctg

SEQ ID NO: 3013276 - DNA, 25 bp, Homo sapien
cacccttgtcctttctggagcctaa

SEQ ID NO: 3013277 - DNA, 25 bp, Homo sapien
atgggcctccggttcatgccgccca

SEQ ID NO: 3013278 - DNA, 25 bp, Homo sapien
gagtcttccagtgtgatgatggtga

SEQ ID NO: 3013279 - DNA, 25 bp, Homo sapien
ccgcccatgcaggaactgttacaca

SEQ ID NO: 3013280 - DNA, 25 bp, Homo sapien
gttcatgccgcccatgcaggaactg

SEQ ID NO: 3013281 - DNA, 25 bp, Homo sapien
gtagttgtagtggatggtggtacag

SEQ ID NO: 3013282 - DNA, 25 bp, Homo sapien
tggatggtggtacagtcagagccaa

SEQ ID NO: 3013283 - DNA, 25 bp, Homo sapien
tagtggatggtggtacagtcagagc

SEQ ID NO: 3013284 - DNA, 25 bp, Homo sapien
ggatggtggtacagtcagagccaac

SEQ ID NO: 3013285 - DNA, 25 bp, Homo sapien
tagttaaacccatttactttgcaca

SEQ ID NO: 3013286 - DNA, 25 bp, Homo sapien
ccatttactttgcacatctcatggg

SEQ ID NO: 3013287 - DNA, 25 bp, Homo sapien
tgtgcaatagttaaacccatttact

SEQ ID NO: 3013288 - DNA, 25 bp, Homo sapien
tttcaactgtgcaatagttaaaccc

SEQ ID NO: 3013289 - DNA, 25 bp, Homo sapien
caccaccacactatgtcgaaaagtg

SEQ ID NO: 3013290 - DNA, 25 bp, Homo sapien
tccaaatactccacacgcaaatttc

SEQ ID NO: 3013291 - DNA, 25 bp, Homo sapien
cactatgtcgaaaagtgtttctgtc

SEQ ID NO: 3013292 - DNA, 25 bp, Homo sapien
gtttctgtcatccaaatactccaca

SEQ ID NO: 3013293 - DNA, 25 bp, Homo sapien
tgctgtgactgcttgtagatggcca

SEQ ID NO: 3013294 - DNA, 25 bp, Homo sapien
gcaaaacatcttgttgagggcaggg

SEQ ID NO: 3013295 - DNA, 25 bp, Homo sapien
gctatctgagcagcgctcatggtgg

SEQ ID NO: 3013296 - DNA, 25 bp, Homo sapien
caacctccgtcatgtgctgtgactg

SEQ ID NO: 3013297 - DNA, 25 bp, Homo sapien
gccaaagggtgaagaggaatcccaa

SEQ ID NO: 3013298 - DNA, 25 bp, Homo sapien
gatgggatggataaaagcccaaatt

SEQ ID NO: 3013299 - DNA, 25 bp, Homo sapien
ggagtcagagatcacacattaagtg

SEQ ID NO: 3013300 - DNA, 25 bp, Homo sapien
aagccaaggaatacacgtggatgaa

SEQ ID NO: 3013301 - DNA, 25 bp, Homo sapien
caagaagcccagacggaaaccgtag

SEQ ID NO: 3013302 - DNA, 25 bp, Homo sapien
cagacggaaaccgtagctgccctgg

SEQ ID NO: 3013303 - DNA, 25 bp, Homo sapien
gaatgcaagaagcccagacggaaac

SEQ ID NO: 3013304 - DNA, 25 bp, Homo sapien
agcccagacggaaaccgtagctgcc

SEQ ID NO: 3013305 - DNA, 25 bp, Homo sapien
gaagggacagaagatgacaggggcc

SEQ ID NO: 3013306 - DNA, 25 bp, Homo sapien
ggaagggacagaagatgacaggggc

SEQ ID NO: 3013307 - DNA, 25 bp, Homo sapien
ggacagaagatgacaggggccagga

SEQ ID NO: 3013308 - DNA, 25 bp, Homo sapien
agggacagaagatgacaggggccag

SEQ ID NO: 3013309 - DNA, 25 bp, Homo sapien
tcagtgaaccattgttcaatatcgt

SEQ ID NO: 3013310 - DNA, 25 bp, Homo sapien
catccattgcttgggacggcaaggg

SEQ ID NO: 3013311 - DNA, 25 bp, Homo sapien
gacagcatcaaatcatccattgctt

SEQ ID NO: 3013312 - DNA, 25 bp, Homo sapien
tatcgtccggggacagcatcaaatc

SEQ ID NO: 3013313 - DNA, 25 bp, Homo sapien
cgacgctaggatctgactgcggctc

SEQ ID NO: 3013314 - DNA, 25 bp, Homo sapien
gctcgacgctaggatctgactgcgg

SEQ ID NO: 3013315 - DNA, 25 bp, Homo sapien
gggctcgacgctaggatctgactgc

SEQ ID NO: 3013316 - DNA, 25 bp, Homo sapien
cctgactcagagggggctcgacgct

SEQ ID NO: 3013317 - DNA, 25 bp, Homo sapien
ggcagtgacccggaaggcagtctgg

SEQ ID NO: 3013318 - DNA, 25 bp, Homo sapien
gaaaagtggggatccagcatgagac

SEQ ID NO: 3013319 - DNA, 25 bp, Homo sapien
ggatccagcatgagacacttccaac

SEQ ID NO: 3013320 - DNA, 25 bp, Homo sapien
tgggcctgcagagaaggaaccccct

SEQ ID NO: 3013321 - DNA, 25 bp, Homo sapien
gtggggatccagcatgagacacttc

SEQ ID NO: 3013322 - DNA, 25 bp, Homo sapien
gaagaacaactgtctcaccgctcac

SEQ ID NO: 3013323 - DNA, 25 bp, Homo sapien
tggaagaacaactgtctcaccgctc

SEQ ID NO: 3013324 - DNA, 25 bp, Homo sapien
tctggaagaacaactgtctcaccgc

SEQ ID NO: 3013325 - DNA, 25 bp, Homo sapien
ttctggaagaacaactgtctcaccg

SEQ ID NO: 3013326 - DNA, 25 bp, Homo sapien
caactggtggttccttggctagcca

SEQ ID NO: 3013327 - DNA, 25 bp, Homo sapien
cacgaatggcccgtctcggcttctt

SEQ ID NO: 3013328 - DNA, 25 bp, Homo sapien
gctctagctagactggctgcccttc

SEQ ID NO: 3013329 - DNA, 25 bp, Homo sapien
ggctccttcccgtgcagactttaag

SEQ ID NO: 3013330 - DNA, 25 bp, Homo sapien
cagatttgctaagaaacatgcctac

SEQ ID NO: 3013331 - DNA, 25 bp, Homo sapien
tttgcactgacaaaacatcccctac

SEQ ID NO: 3013332 - DNA, 25 bp, Homo sapien
gcctactgtaagtgtttgttacact

SEQ ID NO: 3013333 - DNA, 25 bp, Homo sapien
ctttatgccaaatttgtcatcagat

SEQ ID NO: 3013334 - DNA, 25 bp, Homo sapien
tttcagcatgctagtcaggacagtc

SEQ ID NO: 3013335 - DNA, 25 bp, Homo sapien
tgtggacgccctgttatcaaactag

SEQ ID NO: 3013336 - DNA, 25 bp, Homo sapien
tagtggaactccgactgtggacgcc

SEQ ID NO: 3013337 - DNA, 25 bp, Homo sapien
ccattatgtatgctgctagtggaac

SEQ ID NO: 3013338 - DNA, 25 bp, Homo sapien
gacagtacattgaaggacagaagcc

SEQ ID NO: 3013339 - DNA, 25 bp, Homo sapien
gacagaagcccgacaaaaatgagca

SEQ ID NO: 3013340 - DNA, 25 bp, Homo sapien
gctttatttcataaccgcaaatggg

SEQ ID NO: 3013341 - DNA, 25 bp, Homo sapien
tcaaaaggacggatatacaatcgat

SEQ ID NO: 3013342 - DNA, 25 bp, Homo sapien
aaaagggtctgtgacttggtaggca

SEQ ID NO: 3013343 - DNA, 25 bp, Homo sapien
ttctgggacgatgaaaagggtctgt

SEQ ID NO: 3013344 - DNA, 25 bp, Homo sapien
cgtgatgaaacgtttctgggacgat

SEQ ID NO: 3013345 - DNA, 25 bp, Homo sapien
aatcgactgggaagagacgtgatga

SEQ ID NO: 3013346 - DNA, 25 bp, Homo sapien
catcgggtgaatagtgagctgctcc

SEQ ID NO: 3013347 - DNA, 25 bp, Homo sapien
ttcttgaaaatacctccgggcttgc

SEQ ID NO: 3013348 - DNA, 25 bp, Homo sapien
tctgccaagtaagaggaaccggcct

SEQ ID NO: 3013349 - DNA, 25 bp, Homo sapien
gaaatgaattcgagttccgcctcct

SEQ ID NO: 3013350 - DNA, 25 bp, Homo sapien
gattttctccatctagcggagccgg

SEQ ID NO: 3013351 - DNA, 25 bp, Homo sapien
gaagtacgctttaggccggctcaag

SEQ ID NO: 3013352 - DNA, 25 bp, Homo sapien
tgaaaatacacggagccgagagccc

SEQ ID NO: 3013353 - DNA, 25 bp, Homo sapien
gatcatttcggaatggagccccagt

SEQ ID NO: 3013354 - DNA, 25 bp, Homo sapien
aacttttagcgccagtcttgagcac

SEQ ID NO: 3013355 - DNA, 25 bp, Homo sapien
gacaagtaagggcaagtaatccgcc

SEQ ID NO: 3013356 - DNA, 25 bp, Homo sapien
ggtgcagagtcaggattctcgccga

SEQ ID NO: 3013357 - DNA, 25 bp, Homo sapien
cgacctggtgccgtagatactaaca

SEQ ID NO: 3013358 - DNA, 25 bp, Homo sapien
gaccgtgtgagactgtgcagacagt

SEQ ID NO: 3013359 - DNA, 25 bp, Homo sapien
gggaaacctgtttgaaatctcactc

SEQ ID NO: 3013360 - DNA, 25 bp, Homo sapien
gcgcggcgagggtcttattcattca

SEQ ID NO: 3013361 - DNA, 25 bp, Homo sapien
gacaacccagttgccagagtcaagg

SEQ ID NO: 3013362 - DNA, 25 bp, Homo sapien
gctcttacacccgaaaaggcaactc

SEQ ID NO: 3013363 - DNA, 25 bp, Homo sapien
gagggagaggaatgtcacccctgcc

SEQ ID NO: 3013364 - DNA, 25 bp, Homo sapien
taattggaaacagcccttcctgcgc

SEQ ID NO: 3013365 - DNA, 25 bp, Homo sapien
ttttggacctcacaatcaaagggaa

SEQ ID NO: 3013366 - DNA, 25 bp, Homo sapien
ccagccaagatggttgctttgtcca

SEQ ID NO: 3013367 - DNA, 25 bp, Homo sapien
tagtgaccaaaatggtggcctactg

SEQ ID NO: 3013368 - DNA, 25 bp, Homo sapien
ggcctactggctggtctagctgaca

SEQ ID NO: 3013369 - DNA, 25 bp, Homo sapien
tgacagtggtacttagcaaaggcca

SEQ ID NO: 3013370 - DNA, 25 bp, Homo sapien
taggcactattgatggaaacaggga

SEQ ID NO: 3013371 - DNA, 25 bp, Homo sapien
tgctgtcagcaacaggagtctggct

SEQ ID NO: 3013372 - DNA, 25 bp, Homo sapien
cacgacgcagcctttgttcctatgg

SEQ ID NO: 3013373 - DNA, 25 bp, Homo sapien
acttgctcttcaggagtaccaggga

SEQ ID NO: 3013374 - DNA, 25 bp, Homo sapien
cctactcacctactactaagctccg

SEQ ID NO: 3013375 - DNA, 25 bp, Homo sapien
gaatcgcctgttccatcttttcacg

SEQ ID NO: 3013376 - DNA, 25 bp, Homo sapien
caagggagttggatcatctcaccta

SEQ ID NO: 3013377 - DNA, 25 bp, Homo sapien
aacctgaatgccagcagttttccca

SEQ ID NO: 3013378 - DNA, 25 bp, Homo sapien
acttcgcccgctgggaagatggcaa

SEQ ID NO: 3013379 - DNA, 25 bp, Homo sapien
ttagacatttgaagctaaaccaaat

SEQ ID NO: 3013380 - DNA, 25 bp, Homo sapien
gactgtcagtatcacttcgcccgct

SEQ ID NO: 3013381 - DNA, 25 bp, Homo sapien
gggccacagataacacggaacttgc

SEQ ID NO: 3013382 - DNA, 25 bp, Homo sapien
taaggccgggccctttgcacaaatg

SEQ ID NO: 3013383 - DNA, 25 bp, Homo sapien
aaattggtggatgccacagtccgcc

SEQ ID NO: 3013384 - DNA, 25 bp, Homo sapien
tgctgacctggtaagggaaactctg

SEQ ID NO: 3013385 - DNA, 25 bp, Homo sapien
tgtgaaaggactgaggcagccatct

SEQ ID NO: 3013386 - DNA, 25 bp, Homo sapien
aaaattagagaaagctgtatagaaa

SEQ ID NO: 3013387 - DNA, 25 bp, Homo sapien
tttatacctgtatgttctcccttcc

SEQ ID NO: 3013388 - DNA, 25 bp, Homo sapien
gtctcctttatacctgtatgttctc

SEQ ID NO: 3013389 - DNA, 25 bp, Homo sapien
ttagagaaagctgtatagaaataca

SEQ ID NO: 3013390 - DNA, 25 bp, Homo sapien
gatccaatggtaactcaaagaagct

SEQ ID NO: 3013391 - DNA, 25 bp, Homo sapien
cctactatgtgtctgtcaggtgcgg

SEQ ID NO: 3013392 - DNA, 25 bp, Homo sapien
ggctgagctctgctaaacctatgac

SEQ ID NO: 3013393 - DNA, 25 bp, Homo sapien
aagctgctgttttgactagactcca

SEQ ID NO: 3013394 - DNA, 25 bp, Homo sapien
catccacgggcaacatgctgagcca

SEQ ID NO: 3013395 - DNA, 25 bp, Homo sapien
agtttggcaccaacatcgacttgtc

SEQ ID NO: 3013396 - DNA, 25 bp, Homo sapien
cgacttgtctgatgctaagcggtca

SEQ ID NO: 3013397 - DNA, 25 bp, Homo sapien
gccttcatgcgggtaacatccacgg

SEQ ID NO: 3013398 - DNA, 25 bp, Homo sapien
gccgtgtcaaggacgagccagccta

SEQ ID NO: 3013399 - DNA, 25 bp, Homo sapien
agcctactactgcaacgagtgcgat

SEQ ID NO: 3013400 - DNA, 25 bp, Homo sapien
aaggacgagccagcctactactgca

SEQ ID NO: 3013401 - DNA, 25 bp, Homo sapien
gagccagcctactactgcaacgagt

SEQ ID NO: 3013402 - DNA, 25 bp, Homo sapien
tacgacgccttcacgctggtgaggg

SEQ ID NO: 3013403 - DNA, 25 bp, Homo sapien
tacatagacgttacggcagccgagg

SEQ ID NO: 3013404 - DNA, 25 bp, Homo sapien
cagccgggttctcatggtgctcaaa

SEQ ID NO: 3013405 - DNA, 25 bp, Homo sapien
caatgctagctgtgacccctgtaca

SEQ ID NO: 3013406 - DNA, 25 bp, Homo sapien
taatgaagtctgaaaggtaagcgcc

SEQ ID NO: 3013407 - DNA, 25 bp, Homo sapien
tgaagtctgaaaggtaagcgccatc

SEQ ID NO: 3013408 - DNA, 25 bp, Homo sapien
tttaatgaagtctgaaaggtaagcg

SEQ ID NO: 3013409 - DNA, 25 bp, Homo sapien
gtctgaaaggtaagcgccatcgtgg

SEQ ID NO: 3013410 - DNA, 25 bp, Homo sapien
cctcaatggaaacgatgtggtgtcc

SEQ ID NO: 3013411 - DNA, 25 bp, Homo sapien
tctgcacctcaatggaaacgatgtg

SEQ ID NO: 3013412 - DNA, 25 bp, Homo sapien
tcagagatacggaggcccggtcaga

SEQ ID NO: 3013413 - DNA, 25 bp, Homo sapien
gaaacgatgtggtgtccgggtacca

SEQ ID NO: 3013414 - DNA, 25 bp, Homo sapien
aaagtaggccagaatcagtcccgcc

SEQ ID NO: 3013415 - DNA, 25 bp, Homo sapien
gaaatgccttgcgtaaggttccgcc

SEQ ID NO: 3013416 - DNA, 25 bp, Homo sapien
cccagaaaacaagggttgcagccag

SEQ ID NO: 3013417 - DNA, 25 bp, Homo sapien
tgagccacgaaaacgagccccagaa

SEQ ID NO: 3013418 - DNA, 25 bp, Homo sapien
ggcgggtgtgcattccccgggcact

SEQ ID NO: 3013419 - DNA, 25 bp, Homo sapien
aggcgggtgtgcattccccgggcac

SEQ ID NO: 3013420 - DNA, 25 bp, Homo sapien
caggcgggtgtgcattccccgggca

SEQ ID NO: 3013421 - DNA, 25 bp, Homo sapien
caggatgacattgcagtcacggtca

SEQ ID NO: 3013422 - DNA, 25 bp, Homo sapien
gacggcttgaggaactcctgcgccg

SEQ ID NO: 3013423 - DNA, 25 bp, Homo sapien
gcatagtcttgttgagcagcgcctc

SEQ ID NO: 3013424 - DNA, 25 bp, Homo sapien
cgtccatctgtcatgcgaatgcgca

SEQ ID NO: 3013425 - DNA, 25 bp, Homo sapien
tgtaacaagcgctcagaccgcgcag

SEQ ID NO: 3013426 - DNA, 25 bp, Homo sapien
ctgcgcggggtgtaacaagcgctca

SEQ ID NO: 3013427 - DNA, 25 bp, Homo sapien
cggggtgtaacaagcgctcagaccg

SEQ ID NO: 3013428 - DNA, 25 bp, Homo sapien
tgcccgcccgcggaaccacagctcc

SEQ ID NO: 3013429 - DNA, 25 bp, Homo sapien
gtcccagaaccagagcccgtgctaa

SEQ ID NO: 3013430 - DNA, 25 bp, Homo sapien
gcttgactgcccctcagtcccagaa

SEQ ID NO: 3013431 - DNA, 25 bp, Homo sapien
cagtcccagaaccagagcccgtgct

SEQ ID NO: 3013432 - DNA, 25 bp, Homo sapien
tcttgctgcttgactgcccctcagt

SEQ ID NO: 3013433 - DNA, 25 bp, Homo sapien
ctctgacgccgactgcaacagccat

SEQ ID NO: 3013434 - DNA, 25 bp, Homo sapien
tgctctgacgccgactgcaacagcc

SEQ ID NO: 3013435 - DNA, 25 bp, Homo sapien
gctctgacgccgactgcaacagcca

SEQ ID NO: 3013436 - DNA, 25 bp, Homo sapien
gctgctctgacgccgactgcaacag

SEQ ID NO: 3013437 - DNA, 25 bp, Homo sapien
tctcttctcgtagcagcatggtcgg

SEQ ID NO: 3013438 - DNA, 25 bp, Homo sapien
gcatggtcggtccagctccggccat

SEQ ID NO: 3013439 - DNA, 25 bp, Homo sapien
tctcgtagcagcatggtcggtccag

SEQ ID NO: 3013440 - DNA, 25 bp, Homo sapien
tcgtagcagcatggtcggtccagct

SEQ ID NO: 3013441 - DNA, 25 bp, Homo sapien
tatcttacctgggacgcgtgtacga

SEQ ID NO: 3013442 - DNA, 25 bp, Homo sapien
tatttatctcagtggacggtggccg

SEQ ID NO: 3013443 - DNA, 25 bp, Homo sapien
gagtaaccaagagatccagtgaccg

SEQ ID NO: 3013444 - DNA, 25 bp, Homo sapien
gatatcgcgagacctttacctctgg

SEQ ID NO: 3013445 - DNA, 25 bp, Homo sapien
tatgggaaatcctacaccgctatct

SEQ ID NO: 3013446 - DNA, 25 bp, Homo sapien
gaacatggattttaccctggaagag

SEQ ID NO: 3013447 - DNA, 25 bp, Homo sapien
ggaggcactttgatcccagcgtgtg

SEQ ID NO: 3013448 - DNA, 25 bp, Homo sapien
gactatctcagtatggacggtacac

SEQ ID NO: 3013449 - DNA, 25 bp, Homo sapien
tcaagacaactaccccataaggtgg

SEQ ID NO: 3013450 - DNA, 25 bp, Homo sapien
cactgctctcagcaagtatttggga

SEQ ID NO: 3013451 - DNA, 25 bp, Homo sapien
gatgtggctttgtcctaggatccct

SEQ ID NO: 3013452 - DNA, 25 bp, Homo sapien
ttaatagctcaaagccacactaggt

SEQ ID NO: 3013453 - DNA, 25 bp, Homo sapien
tgacagacagttgaacttcctggca

SEQ ID NO: 3013454 - DNA, 25 bp, Homo sapien
gggtaatggctagatttggtctcct

SEQ ID NO: 3013455 - DNA, 25 bp, Homo sapien
agaaaactctcctggtgaccaaaag

SEQ ID NO: 3013456 - DNA, 25 bp, Homo sapien
tgtaaacagagatgctaactaagtc

SEQ ID NO: 3013457 - DNA, 25 bp, Homo sapien
gaaacattgctgttggcttcggcag

SEQ ID NO: 3013458 - DNA, 25 bp, Homo sapien
taaatctaaccccatggaatgcagg

SEQ ID NO: 3013459 - DNA, 25 bp, Homo sapien
gatactggtgggctatataggcatt

SEQ ID NO: 3013460 - DNA, 25 bp, Homo sapien
ggaggcatgaacaaaggtggaaaca

SEQ ID NO: 3013461 - DNA, 25 bp, Homo sapien
ttcatgggctagaacaaaaaggagg

SEQ ID NO: 3013462 - DNA, 25 bp, Homo sapien
caaagtatggagctgacaaagggat

SEQ ID NO: 3013463 - DNA, 25 bp, Homo sapien
tctcacaagcacatggcaggaaagg

SEQ ID NO: 3013464 - DNA, 25 bp, Homo sapien
gaacatgagtgtagggtccaagtcc

SEQ ID NO: 3013465 - DNA, 25 bp, Homo sapien
ttcaaaggcaacctacttctcttaa

SEQ ID NO: 3013466 - DNA, 25 bp, Homo sapien
tcaaaggcaacctacttctcttaag

SEQ ID NO: 3013467 - DNA, 25 bp, Homo sapien
cttcaaaggcaacctacttctctta

SEQ ID NO: 3013468 - DNA, 25 bp, Homo sapien
caaaggcaacctacttctcttaaga

SEQ ID NO: 3013469 - DNA, 25 bp, Homo sapien
ggctcttctttgtctcccacgttgg

SEQ ID NO: 3013470 - DNA, 25 bp, Homo sapien
aaggtaagatttggctctttcaggc

SEQ ID NO: 3013471 - DNA, 25 bp, Homo sapien
tgtctcccacgttggcctttcagtt

SEQ ID NO: 3013472 - DNA, 25 bp, Homo sapien
ctctttcaggctcttctttgtctcc

SEQ ID NO: 3013473 - DNA, 25 bp, Homo sapien
cttttatagtgtacagagttaagtg

SEQ ID NO: 3013474 - DNA, 25 bp, Homo sapien
cccttttatagtgtacagagttaag

SEQ ID NO: 3013475 - DNA, 25 bp, Homo sapien
tagtgtacagagttaagtgttttat

SEQ ID NO: 3013476 - DNA, 25 bp, Homo sapien
tatagtgtacagagttaagtgtttt

SEQ ID NO: 3013477 - DNA, 25 bp, Homo sapien
tgtagccagtcaaggatcagatccc

SEQ ID NO: 3013478 - DNA, 25 bp, Homo sapien
tcagatccccttaaggacgaagtgc

SEQ ID NO: 3013479 - DNA, 25 bp, Homo sapien
tcagcaaacagcaggtcatggtggc

SEQ ID NO: 3013480 - DNA, 25 bp, Homo sapien
cacgtaagatgaagacctgagcgac

SEQ ID NO: 3013481 - DNA, 25 bp, Homo sapien
cctgctgtaatacaatactggagta

SEQ ID NO: 3013482 - DNA, 25 bp, Homo sapien
ggcataaatgcccacctctcaatag

SEQ ID NO: 3013483 - DNA, 25 bp, Homo sapien
tcaagaatacaaacactagctcgct

SEQ ID NO: 3013484 - DNA, 25 bp, Homo sapien
taagtacttagttcctggatgcaga

SEQ ID NO: 3013485 - DNA, 25 bp, Homo sapien
cacagtgcggtaaggtggcagctaa

SEQ ID NO: 3013486 - DNA, 25 bp, Homo sapien
tggaagccgcatatgaacccagacc

SEQ ID NO: 3013487 - DNA, 25 bp, Homo sapien
ccattagtccctgagaaggtggcag

SEQ ID NO: 3013488 - DNA, 25 bp, Homo sapien
caacaggtatttccagggtgcctaa

SEQ ID NO: 3013489 - DNA, 25 bp, Homo sapien
accctccataagtaatattttaatg

SEQ ID NO: 3013490 - DNA, 25 bp, Homo sapien
caatctttaattgatatttaacttc

SEQ ID NO: 3013491 - DNA, 25 bp, Homo sapien
cctccataagtaatattttaatggt

SEQ ID NO: 3013492 - DNA, 25 bp, Homo sapien
attttaatggtttctcacaatcttt

SEQ ID NO: 3013493 - DNA, 25 bp, Homo sapien
gaaattcagatagaattaatatacc

SEQ ID NO: 3013494 - DNA, 25 bp, Homo sapien
cactgtattggctggtttgtattaa

SEQ ID NO: 3013495 - DNA, 25 bp, Homo sapien
tagaattaatataccttattcacca

SEQ ID NO: 3013496 - DNA, 25 bp, Homo sapien
tattggctggtttgtattaaaaaga

SEQ ID NO: 3013497 - DNA, 25 bp, Homo sapien
taaaactctaggacatctcattgac

SEQ ID NO: 3013498 - DNA, 25 bp, Homo sapien
gaacatgtgccccagtaactccttt

SEQ ID NO: 3013499 - DNA, 25 bp, Homo sapien
ttttaatggcctgcgacacagcccc

SEQ ID NO: 3013500 - DNA, 25 bp, Homo sapien
tgaatagctctgtaatgtcacccta

SEQ ID NO: 3013501 - DNA, 25 bp, Homo sapien
caagcagctagacagtgagacacac

SEQ ID NO: 3013502 - DNA, 25 bp, Homo sapien
gagagatgcaagaactgagcagaca

SEQ ID NO: 3013503 - DNA, 25 bp, Homo sapien
gcagagactgatgccccacaatgaa

SEQ ID NO: 3013504 - DNA, 25 bp, Homo sapien
gcctaacgacagagagactacacag

SEQ ID NO: 3013505 - DNA, 25 bp, Homo sapien
tatcggatagtgttggagatcatgg

SEQ ID NO: 3013506 - DNA, 25 bp, Homo sapien
tctttcacggtacctcagttgcttc

SEQ ID NO: 3013507 - DNA, 25 bp, Homo sapien
gcttctactttatcggatagtgttg

SEQ ID NO: 3013508 - DNA, 25 bp, Homo sapien
tcctttctctttcacggtacctcag

SEQ ID NO: 3013509 - DNA, 25 bp, Homo sapien
gcttcccctctgagggacgaggagg

SEQ ID NO: 3013510 - DNA, 25 bp, Homo sapien
aggacgacgacgagggagtactcgg

SEQ ID NO: 3013511 - DNA, 25 bp, Homo sapien
gacgagggagtactcgggcgcgggc

SEQ ID NO: 3013512 - DNA, 25 bp, Homo sapien
gtggaggcggccgacgaggacgatg

SEQ ID NO: 3013513 - DNA, 25 bp, Homo sapien
aatccggagcgcgaatccggggctc

SEQ ID NO: 3013514 - DNA, 25 bp, Homo sapien
gccgaggcgaatccggagcgcgaat

SEQ ID NO: 3013515 - DNA, 25 bp, Homo sapien
gcggccgagccgaggcgaatccgga

SEQ ID NO: 3013516 - DNA, 25 bp, Homo sapien
ggcgaatccggagcgcgaatccggg

SEQ ID NO: 3013517 - DNA, 25 bp, Homo sapien
tgtgactctcacgtggctgccattc

SEQ ID NO: 3013518 - DNA, 25 bp, Homo sapien
agtccacgcagaccacttcctggaa

SEQ ID NO: 3013519 - DNA, 25 bp, Homo sapien
tctgggctcttttgtgtcaagtgcg

SEQ ID NO: 3013520 - DNA, 25 bp, Homo sapien
gcggagacttaggtgcccgccaact

SEQ ID NO: 3013521 - DNA, 25 bp, Homo sapien
cagcattgggtgtgaagaagagaaa

SEQ ID NO: 3013522 - DNA, 25 bp, Homo sapien
taaggatgacattcggctgctgccg

SEQ ID NO: 3013523 - DNA, 25 bp, Homo sapien
agagaaaacgaggacccaagaagca

SEQ ID NO: 3013524 - DNA, 25 bp, Homo sapien
aaaacgaggacccaagaagcagaag

SEQ ID NO: 3013525 - DNA, 25 bp, Homo sapien
gatgagtaccgggagaagtcagaga

SEQ ID NO: 3013526 - DNA, 25 bp, Homo sapien
aggaatttggttctgagcgagatga

SEQ ID NO: 3013527 - DNA, 25 bp, Homo sapien
gaaacgaagaaggaagcaccgagaa

SEQ ID NO: 3013528 - DNA, 25 bp, Homo sapien
cagtgaatatggaaccggaccgggt

SEQ ID NO: 3013529 - DNA, 25 bp, Homo sapien
agttcacaaggctattatattaaaa

SEQ ID NO: 3013530 - DNA, 25 bp, Homo sapien
gttcacaaggctattatattaaaaa

SEQ ID NO: 3013531 - DNA, 25 bp, Homo sapien
cagtagcgctagtgtgttcccgtga

SEQ ID NO: 3013532 - DNA, 25 bp, Homo sapien
tacaacgtgcaacgggtcaggtggc

SEQ ID NO: 3013533 - DNA, 25 bp, Homo sapien
tgtccttgatctccgcacagtagag

SEQ ID NO: 3013534 - DNA, 25 bp, Homo sapien
ggaatttctgatacctgccctagca

SEQ ID NO: 3013535 - DNA, 25 bp, Homo sapien
tcgctgctttccttggccgggttcc

SEQ ID NO: 3013536 - DNA, 25 bp, Homo sapien
tcgttcgcacttggcccgcgctttt

SEQ ID NO: 3013537 - DNA, 25 bp, Homo sapien
tttttcctccaatcgcgaccacaag

SEQ ID NO: 3013538 - DNA, 25 bp, Homo sapien
gtcaagagccatctccgtgaggccg

SEQ ID NO: 3013539 - DNA, 25 bp, Homo sapien
tagcagatgttgcagtccagctcgc

SEQ ID NO: 3013540 - DNA, 25 bp, Homo sapien
gctccggaagagagggtaccctcac

SEQ ID NO: 3013541 - DNA, 25 bp, Homo sapien
gtgcagatcgtgtggccgcagcggg

SEQ ID NO: 3013542 - DNA, 25 bp, Homo sapien
gcgcggcacccgaggttgaaaggac

SEQ ID NO: 3013543 - DNA, 25 bp, Homo sapien
cgccgcggactcgaggacgtcgcta

SEQ ID NO: 3013544 - DNA, 25 bp, Homo sapien
gtgaacagaacgagcacactctcct

SEQ ID NO: 3013545 - DNA, 25 bp, Homo sapien
gctccgtgaacagaacgagcacact

SEQ ID NO: 3013546 - DNA, 25 bp, Homo sapien
gaggacgtcgctaacgcggccagct

SEQ ID NO: 3013547 - DNA, 25 bp, Homo sapien
aggccatgccaggaccggagccctg

SEQ ID NO: 3013548 - DNA, 25 bp, Homo sapien
gcttgaggccgggaatgacagcaat

SEQ ID NO: 3013549 - DNA, 25 bp, Homo sapien
taagtgaggccccacccttcggagc

SEQ ID NO: 3013550 - DNA, 25 bp, Homo sapien
agcgtcacgccttgatcgggccgct

SEQ ID NO: 3013551 - DNA, 25 bp, Homo sapien
gggtatctggtgtcttggtccttga

SEQ ID NO: 3013552 - DNA, 25 bp, Homo sapien
ggtccttgatgagaacagtgactag

SEQ ID NO: 3013553 - DNA, 25 bp, Homo sapien
tcaccaaggtgaatgagcaatggag

SEQ ID NO: 3013554 - DNA, 25 bp, Homo sapien
ggccagacaagtgagactgtgaccc

SEQ ID NO: 3013555 - DNA, 25 bp, Homo sapien
tcattattgctttaggtttattgcc

SEQ ID NO: 3013556 - DNA, 25 bp, Homo sapien
cagttacctgggaagtcttacagag

SEQ ID NO: 3013557 - DNA, 25 bp, Homo sapien
gctcaaggctcaaaagtctataccc

SEQ ID NO: 3013558 - DNA, 25 bp, Homo sapien
attgctttaggtttattgccaggag

SEQ ID NO: 3013559 - DNA, 25 bp, Homo sapien
tgcgtatcactactcgaagccggga

SEQ ID NO: 3013560 - DNA, 25 bp, Homo sapien
tcatgcccgggatttgcaagaaggg

SEQ ID NO: 3013561 - DNA, 25 bp, Homo sapien
tcgaccccactgcaaaaggatatgg

SEQ ID NO: 3013562 - DNA, 25 bp, Homo sapien
caagggccccttttgaggtacactg

SEQ ID NO: 3013563 - DNA, 25 bp, Homo sapien
ccaggagcccgtctatttccatcac

SEQ ID NO: 3013564 - DNA, 25 bp, Homo sapien
tggaatgcggcttgtttcccaggag

SEQ ID NO: 3013565 - DNA, 25 bp, Homo sapien
tacttcttggaatgcggcttgtttc

SEQ ID NO: 3013566 - DNA, 25 bp, Homo sapien
tttcccaggagcccgtctatttcca

SEQ ID NO: 3013567 - DNA, 25 bp, Homo sapien
gggtgacctgatagagccatcctgg

SEQ ID NO: 3013568 - DNA, 25 bp, Homo sapien
ggactttgtagtgggtgacctgata

SEQ ID NO: 3013569 - DNA, 25 bp, Homo sapien
catcctgggttggatagcgtggctt

SEQ ID NO: 3013570 - DNA, 25 bp, Homo sapien
ccatcctgggttggatagcgtggct

SEQ ID NO: 3013571 - DNA, 25 bp, Homo sapien
tgttctatcaactgctccgcactcg

SEQ ID NO: 3013572 - DNA, 25 bp, Homo sapien
agagctgacaccctcactgcggaga

SEQ ID NO: 3013573 - DNA, 25 bp, Homo sapien
ctgtagcgcgcccaggtgttctatc

SEQ ID NO: 3013574 - DNA, 25 bp, Homo sapien
agctgacaccctcactgcggagaca

SEQ ID NO: 3013575 - DNA, 25 bp, Homo sapien
agcgtcctccctagggacaaaccag

SEQ ID NO: 3013576 - DNA, 25 bp, Homo sapien
ggactgatggggaacagtgaccaca

SEQ ID NO: 3013577 - DNA, 25 bp, Homo sapien
tctctgaagacaagcgtcctcccta

SEQ ID NO: 3013578 - DNA, 25 bp, Homo sapien
cttgggagcatgtcaggaggagaca

SEQ ID NO: 3013579 - DNA, 25 bp, Homo sapien
aaggtccatgactttggcttgttgc

SEQ ID NO: 3013580 - DNA, 25 bp, Homo sapien
cccagctggtgagcgacaggaagaa

SEQ ID NO: 3013581 - DNA, 25 bp, Homo sapien
ttcactctgcactttgtccttgagc

SEQ ID NO: 3013582 - DNA, 25 bp, Homo sapien
caatagcaagctgggccacggtgca

SEQ ID NO: 3013583 - DNA, 25 bp, Homo sapien
gggactcgcccatcatacttgctag

SEQ ID NO: 3013584 - DNA, 25 bp, Homo sapien
cttgctagtaatgagaccacaggct

SEQ ID NO: 3013585 - DNA, 25 bp, Homo sapien
ctagagggtaccaagtgactgatcc

SEQ ID NO: 3013586 - DNA, 25 bp, Homo sapien
tgatggaggccctgcaagtatctgg

SEQ ID NO: 3013587 - DNA, 25 bp, Homo sapien
ttctccctctgaaacagatggtgct

SEQ ID NO: 3013588 - DNA, 25 bp, Homo sapien
cacacactggaggaatcagattgaa

SEQ ID NO: 3013589 - DNA, 25 bp, Homo sapien
gaatcagattgaactgtctggccat

SEQ ID NO: 3013590 - DNA, 25 bp, Homo sapien
ggtgctccgcttgttcacacactgg

SEQ ID NO: 3013591 - DNA, 25 bp, Homo sapien
gatgtcccccagtatagggccaggc

SEQ ID NO: 3013592 - DNA, 25 bp, Homo sapien
ccatcgggatgtcccccagtatagg

SEQ ID NO: 3013593 - DNA, 25 bp, Homo sapien
gacataggtcatggctcgcacaatc

SEQ ID NO: 3013594 - DNA, 25 bp, Homo sapien
tggttgatgacataggtcatggctc

SEQ ID NO: 3013595 - DNA, 25 bp, Homo sapien
cctccataggacagttggggtctga

SEQ ID NO: 3013596 - DNA, 25 bp, Homo sapien
aggcgttccagggatcctcgcaagc

SEQ ID NO: 3013597 - DNA, 25 bp, Homo sapien
gacaatgtccacgtatcccagctgg

SEQ ID NO: 3013598 - DNA, 25 bp, Homo sapien
gggtctgagcgattggcaaagacaa

SEQ ID NO: 3013599 - DNA, 25 bp, Homo sapien
agaagaaaataagcacctcagcttc

SEQ ID NO: 3013600 - DNA, 25 bp, Homo sapien
cctcagcttcagtgtactaagaatg

SEQ ID NO: 3013601 - DNA, 25 bp, Homo sapien
cacctcagcttcagtgtactaagaa

SEQ ID NO: 3013602 - DNA, 25 bp, Homo sapien
gaaaataagcacctcagcttcagtg

SEQ ID NO: 3013603 - DNA, 25 bp, Homo sapien
atgtgctttcggcttaaacctcgct

SEQ ID NO: 3013604 - DNA, 25 bp, Homo sapien
tcaatgatgtgctttcggcttaaac

SEQ ID NO: 3013605 - DNA, 25 bp, Homo sapien
tgctttcggcttaaacctcgctcgg

SEQ ID NO: 3013606 - DNA, 25 bp, Homo sapien
gcttaaacctcgctcggtttctgcc

SEQ ID NO: 3013607 - DNA, 25 bp, Homo sapien
ctccccaaaaaatcttggtagtgat

SEQ ID NO: 3013608 - DNA, 25 bp, Homo sapien
aaatcttggtagtgatgacatagct

SEQ ID NO: 3013609 - DNA, 25 bp, Homo sapien
caaaaaatcttggtagtgatgacat

SEQ ID NO: 3013610 - DNA, 25 bp, Homo sapien
cccaaaaaatcttggtagtgatgac

SEQ ID NO: 3013611 - DNA, 25 bp, Homo sapien
cttgaggatgttccctagggttctt

SEQ ID NO: 3013612 - DNA, 25 bp, Homo sapien
ggatgttccctagggttctttcagc

SEQ ID NO: 3013613 - DNA, 25 bp, Homo sapien
gatgttccctagggttctttcagcc

SEQ ID NO: 3013614 - DNA, 25 bp, Homo sapien
gaggatgttccctagggttctttca

SEQ ID NO: 3013615 - DNA, 25 bp, Homo sapien
gctcctagtgtgaaacggcatgatg

SEQ ID NO: 3013616 - DNA, 25 bp, Homo sapien
gcccattgacttctaagccagagag

SEQ ID NO: 3013617 - DNA, 25 bp, Homo sapien
gcggacactcgggtcaagtcttgaa

SEQ ID NO: 3013618 - DNA, 25 bp, Homo sapien
tgtagctgcacagtacgcccattga

SEQ ID NO: 3013619 - DNA, 25 bp, Homo sapien
tttcctgctgcgtacacttcggcgg

SEQ ID NO: 3013620 - DNA, 25 bp, Homo sapien
ttcggcggtgtcaaacaggtttaca

SEQ ID NO: 3013621 - DNA, 25 bp, Homo sapien
caccatgctcataggctacagtcag

SEQ ID NO: 3013622 - DNA, 25 bp, Homo sapien
caggtttacaccatgctcataggct

SEQ ID NO: 3013623 - DNA, 25 bp, Homo sapien
gatctgagaaccaaatgtgacccag

SEQ ID NO: 3013624 - DNA, 25 bp, Homo sapien
caagacaggatacccgaagaccaga

SEQ ID NO: 3013625 - DNA, 25 bp, Homo sapien
atacccgaagaccagacttccctag

SEQ ID NO: 3013626 - DNA, 25 bp, Homo sapien
caggatacccgaagaccagacttcc

SEQ ID NO: 3013627 - DNA, 25 bp, Homo sapien
gacaggatacccgaagaccagactt

SEQ ID NO: 3013628 - DNA, 25 bp, Homo sapien
cagagcagaggtcctaggaattttc

SEQ ID NO: 3013629 - DNA, 25 bp, Homo sapien
ccagtgggcctataagattgggcaa

SEQ ID NO: 3013630 - DNA, 25 bp, Homo sapien
ttttctcaaaaggacaagtgaacca

SEQ ID NO: 3013631 - DNA, 25 bp, Homo sapien
cattatggacttagattatcagccc

SEQ ID NO: 3013632 - DNA, 25 bp, Homo sapien
ccggggtccacacagacggtcctca

SEQ ID NO: 3013633 - DNA, 25 bp, Homo sapien
tgtatttcatgccagtgcctcggcc

SEQ ID NO: 3013634 - DNA, 25 bp, Homo sapien
ctcggccggtgctctctcggagggc

SEQ ID NO: 3013635 - DNA, 25 bp, Homo sapien
gaaccagtgcagctcgggccttggg

SEQ ID NO: 3013636 - DNA, 25 bp, Homo sapien
gaaggttctgctcggtacacgcgat

SEQ ID NO: 3013637 - DNA, 25 bp, Homo sapien
ccggctgcgaaggttctgctcggta

SEQ ID NO: 3013638 - DNA, 25 bp, Homo sapien
cggtacacgcgatagacacctgcat

SEQ ID NO: 3013639 - DNA, 25 bp, Homo sapien
tctgctcggtacacgcgatagacac

SEQ ID NO: 3013640 - DNA, 25 bp, Homo sapien
aaccccggcagagcgggaaggctga

SEQ ID NO: 3013641 - DNA, 25 bp, Homo sapien
cgagggctgacgaccgggggcgtag

SEQ ID NO: 3013642 - DNA, 25 bp, Homo sapien
gcgtagtggggcgaaccccggcaga

SEQ ID NO: 3013643 - DNA, 25 bp, Homo sapien
gcgaaccccggcagagcgggaaggc

SEQ ID NO: 3013644 - DNA, 25 bp, Homo sapien
aaggtctcggaggataaggacccag

SEQ ID NO: 3013645 - DNA, 25 bp, Homo sapien
ccaggagtggagatattcagttacg

SEQ ID NO: 3013646 - DNA, 25 bp, Homo sapien
gatgccacttcagcgcgaaccgctg

SEQ ID NO: 3013647 - DNA, 25 bp, Homo sapien
atgaggtaaaggtctcggaggataa

SEQ ID NO: 3013648 - DNA, 25 bp, Homo sapien
gtgcttctcgcagcattaggcaggg

SEQ ID NO: 3013649 - DNA, 25 bp, Homo sapien
tttattctgtgcttctcgcagcatt

SEQ ID NO: 3013650 - DNA, 25 bp, Homo sapien
ctgtgcttctcgcagcattaggcag

SEQ ID NO: 3013651 - DNA, 25 bp, Homo sapien
tattctgtgcttctcgcagcattag

SEQ ID NO: 3013652 - DNA, 25 bp, Homo sapien
ggcccttagttggcacaggttcgga

SEQ ID NO: 3013653 - DNA, 25 bp, Homo sapien
ggcctttaggctgttgctctgggca

SEQ ID NO: 3013654 - DNA, 25 bp, Homo sapien
tctcctgagacttgaggtaggttgc

SEQ ID NO: 3013655 - DNA, 25 bp, Homo sapien
cacaggttcggaagggccccaggca

SEQ ID NO: 3013656 - DNA, 25 bp, Homo sapien
cagcccgggcggagaagaagggcag

SEQ ID NO: 3013657 - DNA, 25 bp, Homo sapien
cgaacataggagtccagtcgggagc

SEQ ID NO: 3013658 - DNA, 25 bp, Homo sapien
gtccagtcgggagcgaaagagctca

SEQ ID NO: 3013659 - DNA, 25 bp, Homo sapien
ggcagagagcgaacataggagtcca

SEQ ID NO: 3013660 - DNA, 25 bp, Homo sapien
tttgcacagtttggcccagcgggca

SEQ ID NO: 3013661 - DNA, 25 bp, Homo sapien
cagcgggcacaggggattcttcacc

SEQ ID NO: 3013662 - DNA, 25 bp, Homo sapien
gcgggcacaggggattcttcaccac

SEQ ID NO: 3013663 - DNA, 25 bp, Homo sapien
tgcacagtttggcccagcgggcaca

SEQ ID NO: 3013664 - DNA, 25 bp, Homo sapien
tgtaacggctagtttggaaggccag

SEQ ID NO: 3013665 - DNA, 25 bp, Homo sapien
ggtcccacgcccaagtcagtattca

SEQ ID NO: 3013666 - DNA, 25 bp, Homo sapien
tgacaactttgatcccagtgggcgt

SEQ ID NO: 3013667 - DNA, 25 bp, Homo sapien
tgcagcacatctcggatgggtccca

SEQ ID NO: 3013668 - DNA, 25 bp, Homo sapien
ttcccaaggctagccctcctcccaa

SEQ ID NO: 3013669 - DNA, 25 bp, Homo sapien
gactcagcctctcttaagtaccctt

SEQ ID NO: 3013670 - DNA, 25 bp, Homo sapien
tccggactcagcctctcttaagtac

SEQ ID NO: 3013671 - DNA, 25 bp, Homo sapien
agctccagcactctcgctccggact

SEQ ID NO: 3013672 - DNA, 25 bp, Homo sapien
gagcatcccgtacatcagcttatac

SEQ ID NO: 3013673 - DNA, 25 bp, Homo sapien
gaagagcatcccgtacatcagctta

SEQ ID NO: 3013674 - DNA, 25 bp, Homo sapien
gctgacaaacgagcggatagagaag

SEQ ID NO: 3013675 - DNA, 25 bp, Homo sapien
tctagcggggacatcttgctgacaa

SEQ ID NO: 3013676 - DNA, 25 bp, Homo sapien
cagagttagctctcggttgatgcgg

SEQ ID NO: 3013677 - DNA, 25 bp, Homo sapien
ttagctctcggttgatgcgggagat

SEQ ID NO: 3013678 - DNA, 25 bp, Homo sapien
gagaggggcagagttagctctcggt

SEQ ID NO: 3013679 - DNA, 25 bp, Homo sapien
gggcagagttagctctcggttgatg

SEQ ID NO: 3013680 - DNA, 25 bp, Homo sapien
gagatgagaggtcgcccgggctgca

SEQ ID NO: 3013681 - DNA, 25 bp, Homo sapien
gtttggagatgagaggtcgcccggg

SEQ ID NO: 3013682 - DNA, 25 bp, Homo sapien
tggagatgagaggtcgcccgggctg

SEQ ID NO: 3013683 - DNA, 25 bp, Homo sapien
tttggagatgagaggtcgcccgggc

SEQ ID NO: 3013684 - DNA, 25 bp, Homo sapien
ctcctccttgggaatccctgcttgc

SEQ ID NO: 3013685 - DNA, 25 bp, Homo sapien
ctccattccggtcaaacaggtacag

SEQ ID NO: 3013686 - DNA, 25 bp, Homo sapien
ttcgctgtagtgcagacacactcca

SEQ ID NO: 3013687 - DNA, 25 bp, Homo sapien
tcttgcggtgccattcgctgtagtg

SEQ ID NO: 3013688 - DNA, 25 bp, Homo sapien
tagtgcagacacactccattccggt

SEQ ID NO: 3013689 - DNA, 25 bp, Homo sapien
gagcctcgctccggggccgccccca

SEQ ID NO: 3013690 - DNA, 25 bp, Homo sapien
cagggagtgtgagcctcgctccggg

SEQ ID NO: 3013691 - DNA, 25 bp, Homo sapien
tcccggacccacagccttccaacca

SEQ ID NO: 3013692 - DNA, 25 bp, Homo sapien
ggcagggagtgtgagcctcgctccg

SEQ ID NO: 3013693 - DNA, 25 bp, Homo sapien
agtgctgcttgtcagactccgcctc

SEQ ID NO: 3013694 - DNA, 25 bp, Homo sapien
tgggcattaactccgctccagtgct

SEQ ID NO: 3013695 - DNA, 25 bp, Homo sapien
ctcagccaatctgtggccaccggag

SEQ ID NO: 3013696 - DNA, 25 bp, Homo sapien
gagtgcccgtcaagagttacttccg

SEQ ID NO: 3013697 - DNA, 25 bp, Homo sapien
gagaaagcccctcctctgtgtaaaa

SEQ ID NO: 3013698 - DNA, 25 bp, Homo sapien
ggcaacgcctgagtatcactgagga

SEQ ID NO: 3013699 - DNA, 25 bp, Homo sapien
gctcagagcagatgcaagccccatt

SEQ ID NO: 3013700 - DNA, 25 bp, Homo sapien
ggattcattgctgacctcacggcgg

SEQ ID NO: 3013701 - DNA, 25 bp, Homo sapien
cgagcctgcgtttttaggtgtacca

SEQ ID NO: 3013702 - DNA, 25 bp, Homo sapien
tgaaagacccgcgtatccattggcc

SEQ ID NO: 3013703 - DNA, 25 bp, Homo sapien
tatcaggcccgagtctgcgtttttt

SEQ ID NO: 3013704 - DNA, 25 bp, Homo sapien
taccatgcagcatacacgaaaggga

SEQ ID NO: 3013705 - DNA, 25 bp, Homo sapien
aattaaggaccctaatcagcttggg

SEQ ID NO: 3013706 - DNA, 25 bp, Homo sapien
gattaagggctctggccggctgtac

SEQ ID NO: 3013707 - DNA, 25 bp, Homo sapien
ttccctgtaaatgtcagaggcccct

SEQ ID NO: 3013708 - DNA, 25 bp, Homo sapien
tccgctgggatagggtcggtctgag

SEQ ID NO: 3013709 - DNA, 25 bp, Homo sapien
tcacaggtaggctcccttgcagggt

SEQ ID NO: 3013710 - DNA, 25 bp, Homo sapien
gaatcatcccatgggttactcgggc

SEQ ID NO: 3013711 - DNA, 25 bp, Homo sapien
tgtgttcgcagaagccggcaatgac

SEQ ID NO: 3013712 - DNA, 25 bp, Homo sapien
caatctgcagcaggtagacggtccc

SEQ ID NO: 3013713 - DNA, 25 bp, Homo sapien
gtcgatcaagtctgggtgcccgcag

SEQ ID NO: 3013714 - DNA, 25 bp, Homo sapien
caacattggtgtctatgaggtgagc

SEQ ID NO: 3013715 - DNA, 25 bp, Homo sapien
gaaaggtcatggatccctcaaaggg

SEQ ID NO: 3013716 - DNA, 25 bp, Homo sapien
ggctcctcaaaagctaaccacagtg

SEQ ID NO: 3013717 - DNA, 25 bp, Homo sapien
tgaaccttcactacaccaagtgtgg

SEQ ID NO: 3013718 - DNA, 25 bp, Homo sapien
gagacatcattgaccagggatacga

SEQ ID NO: 3013719 - DNA, 25 bp, Homo sapien
cagaccctggaagaagtttgcagca

SEQ ID NO: 3013720 - DNA, 25 bp, Homo sapien
gatacgacagtgagagggaattccg

SEQ ID NO: 3013721 - DNA, 25 bp, Homo sapien
tgcattccagagcgagactgtcaca

SEQ ID NO: 3013722 - DNA, 25 bp, Homo sapien
gcattccagagcgagactgtcacaa

SEQ ID NO: 3013723 - DNA, 25 bp, Homo sapien
ctgcattccagagcgagactgtcac

SEQ ID NO: 3013724 - DNA, 25 bp, Homo sapien
tttttggctgactctccaatatcta

SEQ ID NO: 3013725 - DNA, 25 bp, Homo sapien
tttggctgactctccaatatctaaa

SEQ ID NO: 3013726 - DNA, 25 bp, Homo sapien
cctttttggctgactctccaatatc

SEQ ID NO: 3013727 - DNA, 25 bp, Homo sapien
tcctttttggctgactctccaatat

SEQ ID NO: 3013728 - DNA, 25 bp, Homo sapien
tgacggtgctcaggcgttgaccact

SEQ ID NO: 3013729 - DNA, 25 bp, Homo sapien
aggaagtctgcggagcctctgagca

SEQ ID NO: 3013730 - DNA, 25 bp, Homo sapien
cattacccgggagggtactgcagga

SEQ ID NO: 3013731 - DNA, 25 bp, Homo sapien
caataagagaatcaggcggtgagct

SEQ ID NO: 3013732 - DNA, 25 bp, Homo sapien
gagatgagttaatttcttttgagga

SEQ ID NO: 3013733 - DNA, 25 bp, Homo sapien
ctggagatgagttaatttcttttga

SEQ ID NO: 3013734 - DNA, 25 bp, Homo sapien
gatgagttaatttcttttgaggagc

SEQ ID NO: 3013735 - DNA, 25 bp, Homo sapien
ggagatgagttaatttcttttgagg

SEQ ID NO: 3013736 - DNA, 25 bp, Homo sapien
tgtttggtgttttggtctctgaggt

SEQ ID NO: 3013737 - DNA, 25 bp, Homo sapien
tgttttgttgaaaatagtagggcac

SEQ ID NO: 3013738 - DNA, 25 bp, Homo sapien
ttgaaaatagtagggcacagaatgg

SEQ ID NO: 3013739 - DNA, 25 bp, Homo sapien
ggagaggagagacgggaagcgcgct

SEQ ID NO: 3013740 - DNA, 25 bp, Homo sapien
gcctcctccacgaagtgaatgtccg

SEQ ID NO: 3013741 - DNA, 25 bp, Homo sapien
cagcaccgggtccaggtagtagtag

SEQ ID NO: 3013742 - DNA, 25 bp, Homo sapien
ctgttctcaatcagcaccgggtcca

SEQ ID NO: 3013743 - DNA, 25 bp, Homo sapien
tcgtgtgagatctggttcaggcgct

SEQ ID NO: 3013744 - DNA, 25 bp, Homo sapien
cagagagctcgacagctgggaccag

SEQ ID NO: 3013745 - DNA, 25 bp, Homo sapien
gcagagagctcgacagctgggacca

SEQ ID NO: 3013746 - DNA, 25 bp, Homo sapien
tcttgacgccgctagttatcctccc

SEQ ID NO: 3013747 - DNA, 25 bp, Homo sapien
ctgctcccctcttgacgccgctagt

SEQ ID NO: 3013748 - DNA, 25 bp, Homo sapien
gttgggcatccaggcggtgaactcc

SEQ ID NO: 3013749 - DNA, 25 bp, Homo sapien
tccggcaacgtgtccatgaaggtct

SEQ ID NO: 3013750 - DNA, 25 bp, Homo sapien
gatgcacgtggtcttcacatccggc

SEQ ID NO: 3013751 - DNA, 25 bp, Homo sapien
gaatcggtggattccgcatggacgc

SEQ ID NO: 3013752 - DNA, 25 bp, Homo sapien
gatgactatagtgacatatcggatc

SEQ ID NO: 3013753 - DNA, 25 bp, Homo sapien
tgtagatgactatagtgacatatcg

SEQ ID NO: 3013754 - DNA, 25 bp, Homo sapien
catatcggatcagctcaggcacggt

SEQ ID NO: 3013755 - DNA, 25 bp, Homo sapien
agagcaggtgtagatgactatagtg

SEQ ID NO: 3013756 - DNA, 25 bp, Homo sapien
aagcttcaagctgccgcatccgtac

SEQ ID NO: 3013757 - DNA, 25 bp, Homo sapien
caaaagcttcaagctgccgcatccg

SEQ ID NO: 3013758 - DNA, 25 bp, Homo sapien
aaagcttcaagctgccgcatccgta

SEQ ID NO: 3013759 - DNA, 25 bp, Homo sapien
tgcaaaagcttcaagctgccgcatc

SEQ ID NO: 3013760 - DNA, 25 bp, Homo sapien
caagactgcaattccggatcaccct

SEQ ID NO: 3013761 - DNA, 25 bp, Homo sapien
tccacggctgcgtcactcgggtaat

SEQ ID NO: 3013762 - DNA, 25 bp, Homo sapien
tgcgtcactcgggtaataataggtg

SEQ ID NO: 3013763 - DNA, 25 bp, Homo sapien
taataggtgatgatctccgtcacat

SEQ ID NO: 3013764 - DNA, 25 bp, Homo sapien
tcatcgcggtagtaatatccaggca

SEQ ID NO: 3013765 - DNA, 25 bp, Homo sapien
tcataggtgagctccgacagagccc

SEQ ID NO: 3013766 - DNA, 25 bp, Homo sapien
gccaagctgtcatcgcggtagtaat

SEQ ID NO: 3013767 - DNA, 25 bp, Homo sapien
agtgcattccacaccgccaagctgt

SEQ ID NO: 3013768 - DNA, 25 bp, Homo sapien
caatgctgttgatctggacggtgta

SEQ ID NO: 3013769 - DNA, 25 bp, Homo sapien
ttgatctggacggtgtatcgggtat

SEQ ID NO: 3013770 - DNA, 25 bp, Homo sapien
cccctcattgaggagaacggcccgg

SEQ ID NO: 3013771 - DNA, 25 bp, Homo sapien
gaacggcccggccaatgctgttgat

SEQ ID NO: 3013772 - DNA, 25 bp, Homo sapien
catagcgtacccacgtcttggctag

SEQ ID NO: 3013773 - DNA, 25 bp, Homo sapien
tggctgtagaactccgcatagcgta

SEQ ID NO: 3013774 - DNA, 25 bp, Homo sapien
tcagcaatgaggtgtgtctccagca

SEQ ID NO: 3013775 - DNA, 25 bp, Homo sapien
tctccagcaggtgggcgatggcctc

SEQ ID NO: 3013776 - DNA, 25 bp, Homo sapien
gaggagcattcgcgcacacagaggc

SEQ ID NO: 3013777 - DNA, 25 bp, Homo sapien
attcgcgcacacagaggctcagcgg

SEQ ID NO: 3013778 - DNA, 25 bp, Homo sapien
cgcacacagaggctcagcggcagcg

SEQ ID NO: 3013779 - DNA, 25 bp, Homo sapien
gcacactcggaggagcattcgcgca

SEQ ID NO: 3013780 - DNA, 25 bp, Homo sapien
gcggtagtcggccaggtaaatgttc

SEQ ID NO: 3013781 - DNA, 25 bp, Homo sapien
ctggatggcgatgggcatcatcttg

SEQ ID NO: 3013782 - DNA, 25 bp, Homo sapien
gggatgccctccatgatgcggtagt

SEQ ID NO: 3013783 - DNA, 25 bp, Homo sapien
ttgccctcgggtccaaagtgcagca

SEQ ID NO: 3013784 - DNA, 25 bp, Homo sapien
gacgccgttgaggtactggtaccca

SEQ ID NO: 3013785 - DNA, 25 bp, Homo sapien
gagccaccatgtcgtctgtgacggg

SEQ ID NO: 3013786 - DNA, 25 bp, Homo sapien
gaacttgtctgggatccgcgtgcag

SEQ ID NO: 3013787 - DNA, 25 bp, Homo sapien
ggtacccaaagaaggtgtcctctgc

SEQ ID NO: 3013788 - DNA, 25 bp, Homo sapien
cgcgagggcgtcacaaggaggcccg

SEQ ID NO: 3013789 - DNA, 25 bp, Homo sapien
gacagaagaagactatgggcaccga

SEQ ID NO: 3013790 - DNA, 25 bp, Homo sapien
cgaggacggcgcgagggcgtcacaa

SEQ ID NO: 3013791 - DNA, 25 bp, Homo sapien
ctcggggacggagaggcatgggaca

SEQ ID NO: 3013792 - DNA, 25 bp, Homo sapien
gccgcggactttgaaagccagtgcc

SEQ ID NO: 3013793 - DNA, 25 bp, Homo sapien
aaattttcctaatgtccttcagcct

SEQ ID NO: 3013794 - DNA, 25 bp, Homo sapien
ctcttccacgaatgtttgcagtcca

SEQ ID NO: 3013795 - DNA, 25 bp, Homo sapien
tgcagtccaacaggccgcggacttt

SEQ ID NO: 3013796 - DNA, 25 bp, Homo sapien
gccttaaagttgatgagaattggga

SEQ ID NO: 3013797 - DNA, 25 bp, Homo sapien
aaggagtagcggagatttaagttca

SEQ ID NO: 3013798 - DNA, 25 bp, Homo sapien
cggacgaagaaggaggccgtcttga

SEQ ID NO: 3013799 - DNA, 25 bp, Homo sapien
gaatcccggaatatagccattccac

SEQ ID NO: 3013800 - DNA, 25 bp, Homo sapien
ctgggaatgtgcacatagctgggca

SEQ ID NO: 3013801 - DNA, 25 bp, Homo sapien
ctccgcaccggagggcggtaactgg

SEQ ID NO: 3013802 - DNA, 25 bp, Homo sapien
cggagggcggtaactgggaatgtgc

SEQ ID NO: 3013803 - DNA, 25 bp, Homo sapien
ttggggttgcgatgcctccgcaccg

SEQ ID NO: 3013804 - DNA, 25 bp, Homo sapien
cggggagcgagtcatctgctgttgt

SEQ ID NO: 3013805 - DNA, 25 bp, Homo sapien
gacggggagcgagtcatctgctgtt

SEQ ID NO: 3013806 - DNA, 25 bp, Homo sapien
aggaggacggggagcgagtcatctg

SEQ ID NO: 3013807 - DNA, 25 bp, Homo sapien
aggacggggagcgagtcatctgctg

SEQ ID NO: 3013808 - DNA, 25 bp, Homo sapien
tcctgagggcactgcacggtgtact

SEQ ID NO: 3013809 - DNA, 25 bp, Homo sapien
tctgcacatagttgcagtaccaagg

SEQ ID NO: 3013810 - DNA, 25 bp, Homo sapien
cggagtgccagggtctcgtagccat

SEQ ID NO: 3013811 - DNA, 25 bp, Homo sapien
gctctttgtgcaggcggatgatgat

SEQ ID NO: 3013812 - DNA, 25 bp, Homo sapien
ccaccctgactttgtaggtggccat

SEQ ID NO: 3013813 - DNA, 25 bp, Homo sapien
agatggagtcccgtgttcccgacaa

SEQ ID NO: 3013814 - DNA, 25 bp, Homo sapien
tcccgacaagaggtcggtgcctgtg

SEQ ID NO: 3013815 - DNA, 25 bp, Homo sapien
ttgtgtccccacaatggtcagtgag

SEQ ID NO: 3013816 - DNA, 25 bp, Homo sapien
gctggcctccgaggtgcagtggtga

SEQ ID NO: 3013817 - DNA, 25 bp, Homo sapien
aggggccacacgaaggcccaaggca

SEQ ID NO: 3013818 - DNA, 25 bp, Homo sapien
ggtgactaggcctgccagccaaatt

SEQ ID NO: 3013819 - DNA, 25 bp, Homo sapien
gcactcagtcccagacaccgtggag

SEQ ID NO: 3013820 - DNA, 25 bp, Homo sapien
aagctgggcattccaagaggctgga

SEQ ID NO: 3013821 - DNA, 25 bp, Homo sapien
tccatgtgcagaagagaaggttcag

SEQ ID NO: 3013822 - DNA, 25 bp, Homo sapien
ggaccacatgttagacccaggcaca

SEQ ID NO: 3013823 - DNA, 25 bp, Homo sapien
ggcttttaacctggacgctgctgtg

SEQ ID NO: 3013824 - DNA, 25 bp, Homo sapien
gatggagacgctgttctcaatgagg

SEQ ID NO: 3013825 - DNA, 25 bp, Homo sapien
cctggatgtcccttgagatctgggc

SEQ ID NO: 3013826 - DNA, 25 bp, Homo sapien
tgaagtgctcatctgggtaggtgcc

SEQ ID NO: 3013827 - DNA, 25 bp, Homo sapien
ggcagtgccagaccctggttccgct

SEQ ID NO: 3013828 - DNA, 25 bp, Homo sapien
tgtctaggtaagtcttcagggtggt

SEQ ID NO: 3013829 - DNA, 25 bp, Homo sapien
ggctgcctcatggatgatggagcat

SEQ ID NO: 3013830 - DNA, 25 bp, Homo sapien
atggagcattgggcatccaggcccc

SEQ ID NO: 3013831 - DNA, 25 bp, Homo sapien
gttcttggctaaccaaccagaagag

SEQ ID NO: 3013832 - DNA, 25 bp, Homo sapien
tggccagaaggggagtatcacctcc

SEQ ID NO: 3013833 - DNA, 25 bp, Homo sapien
ctgtggagacccccatcccagttgg

SEQ ID NO: 3013834 - DNA, 25 bp, Homo sapien
tcagttggccagaaggggagtatca

SEQ ID NO: 3013835 - DNA, 25 bp, Homo sapien
aaggggagtatcacctccctcttca

SEQ ID NO: 3013836 - DNA, 25 bp, Homo sapien
atctctcctggggtgcacagccggc

SEQ ID NO: 3013837 - DNA, 25 bp, Homo sapien
gatgattgcagtgaggaacttcacc

SEQ ID NO: 3013838 - DNA, 25 bp, Homo sapien
tctcctggggtgcacagccggcttg

SEQ ID NO: 3013839 - DNA, 25 bp, Homo sapien
gctgggcagagcaattgaagatgat

SEQ ID NO: 3013840 - DNA, 25 bp, Homo sapien
gaatcctgctgcacagatgcgtcac

SEQ ID NO: 3013841 - DNA, 25 bp, Homo sapien
caggaacgcctgagcaaaaatctcg

SEQ ID NO: 3013842 - DNA, 25 bp, Homo sapien
tcactgggataatagtagcccacga

SEQ ID NO: 3013843 - DNA, 25 bp, Homo sapien
gagcaaaaatctcgccagtccaggc

SEQ ID NO: 3013844 - DNA, 25 bp, Homo sapien
cactggagtaaccacgggctcagtc

SEQ ID NO: 3013845 - DNA, 25 bp, Homo sapien
taccactggagtaaccacgggctca

SEQ ID NO: 3013846 - DNA, 25 bp, Homo sapien
gaaagagatgctggtaccactggag

SEQ ID NO: 3013847 - DNA, 25 bp, Homo sapien
tgctggtaccactggagtaaccacg

SEQ ID NO: 3013848 - DNA, 25 bp, Homo sapien
gcaggctgtccggaaggcagaaatt

SEQ ID NO: 3013849 - DNA, 25 bp, Homo sapien
tcaatggccgcccagatcttcaggc

SEQ ID NO: 3013850 - DNA, 25 bp, Homo sapien
tgaggccttgcctcccgatggacgt

SEQ ID NO: 3013851 - DNA, 25 bp, Homo sapien
caggcccgtgctcatgaggtagatg

SEQ ID NO: 3013852 - DNA, 25 bp, Homo sapien
gcttgggcgcagaacagggcttggg

SEQ ID NO: 3013853 - DNA, 25 bp, Homo sapien
cgggtagcggggcaaagcgtcttcg

SEQ ID NO: 3013854 - DNA, 25 bp, Homo sapien
gcaaagcgtcttcgggggcggagat

SEQ ID NO: 3013855 - DNA, 25 bp, Homo sapien
cggagatcagtgacccggcagggag

SEQ ID NO: 3013856 - DNA, 25 bp, Homo sapien
tccacgaggccctcggggttgagca

SEQ ID NO: 3013857 - DNA, 25 bp, Homo sapien
cagcgtggccctcgcgatggtgttc

SEQ ID NO: 3013858 - DNA, 25 bp, Homo sapien
ccctcgcgatggtgttcacctgcag

SEQ ID NO: 3013859 - DNA, 25 bp, Homo sapien
cacctgcagcgtgtatcgagtgtgg

SEQ ID NO: 3013860 - DNA, 25 bp, Homo sapien
gcagccagtcccattcggagtcagt

SEQ ID NO: 3013861 - DNA, 25 bp, Homo sapien
gcaccaggaactcagagttgcgcac

SEQ ID NO: 3013862 - DNA, 25 bp, Homo sapien
gcgtgttgttttcgtgcaccaggaa

SEQ ID NO: 3013863 - DNA, 25 bp, Homo sapien
tgcgtgcacagaaagtgcgtgttgt

SEQ ID NO: 3013864 - DNA, 25 bp, Homo sapien
gtagtccgctaggaagatgttcccc

SEQ ID NO: 3013865 - DNA, 25 bp, Homo sapien
caggatccagtagtccgctaggaag

SEQ ID NO: 3013866 - DNA, 25 bp, Homo sapien
gggcctccgccaggatccagtagtc

SEQ ID NO: 3013867 - DNA, 25 bp, Homo sapien
ccacgtactgctggcggccgtttag

SEQ ID NO: 3013868 - DNA, 25 bp, Homo sapien
ctcccacctatcaggcccactgccc

SEQ ID NO: 3013869 - DNA, 25 bp, Homo sapien
atcaggcccactgcccagatcctta

SEQ ID NO: 3013870 - DNA, 25 bp, Homo sapien
tcccacctatcaggcccactgccca

SEQ ID NO: 3013871 - DNA, 25 bp, Homo sapien
acctatcaggcccactgcccagatc

SEQ ID NO: 3013872 - DNA, 25 bp, Homo sapien
tggtacccaaagaagtgatcttcac

SEQ ID NO: 3013873 - DNA, 25 bp, Homo sapien
tcattggtgacaggcagcttgctgg

SEQ ID NO: 3013874 - DNA, 25 bp, Homo sapien
gacaccattcaggtactggtaccca

SEQ ID NO: 3013875 - DNA, 25 bp, Homo sapien
ggagcatgacgggattgacaccatt

SEQ ID NO: 3013876 - DNA, 25 bp, Homo sapien
ggtcttatggcaccagaagatgttc

SEQ ID NO: 3013877 - DNA, 25 bp, Homo sapien
tgtcgtgaaggtcttatggcaccag

SEQ ID NO: 3013878 - DNA, 25 bp, Homo sapien
ttccaggagcccttgcgatccaaca

SEQ ID NO: 3013879 - DNA, 25 bp, Homo sapien
gatccaacagccctcgaagcttcat

SEQ ID NO: 3013880 - DNA, 25 bp, Homo sapien
gaagccgggcaggtaccgattccca

SEQ ID NO: 3013881 - DNA, 25 bp, Homo sapien
gctgagtatcgaacattgggctcca

SEQ ID NO: 3013882 - DNA, 25 bp, Homo sapien
gatggcattgaagagcagcgagatc

SEQ ID NO: 3013883 - DNA, 25 bp, Homo sapien
ccatgtacatcagggatgggatgtc

SEQ ID NO: 3013884 - DNA, 25 bp, Homo sapien
tggtctacacaagttgtcgtctttg

SEQ ID NO: 3013885 - DNA, 25 bp, Homo sapien
ctgtcaccctggtctacacaagttg

SEQ ID NO: 3013886 - DNA, 25 bp, Homo sapien
tcaccctggtctacacaagttgtcg

SEQ ID NO: 3013887 - DNA, 25 bp, Homo sapien
acacaagttgtcgtctttgtcaagg

SEQ ID NO: 3013888 - DNA, 25 bp, Homo sapien
ccatgcaggggaagccaggggcata

SEQ ID NO: 3013889 - DNA, 25 bp, Homo sapien
gaagccaggggcatagatcttccag

SEQ ID NO: 3013890 - DNA, 25 bp, Homo sapien
ggggaagccaggggcatagatcttc

SEQ ID NO: 3013891 - DNA, 25 bp, Homo sapien
caggggaagccaggggcatagatct

SEQ ID NO: 3013892 - DNA, 25 bp, Homo sapien
cggtagcattcttgtcgggcccgga

SEQ ID NO: 3013893 - DNA, 25 bp, Homo sapien
gtagcattcttgtcgggcccggagc

SEQ ID NO: 3013894 - DNA, 25 bp, Homo sapien
agcattcttgtcgggcccggagctc

SEQ ID NO: 3013895 - DNA, 25 bp, Homo sapien
tagcattcttgtcgggcccggagct

SEQ ID NO: 3013896 - DNA, 25 bp, Homo sapien
agagagtcctgacaaatagttcttg

SEQ ID NO: 3013897 - DNA, 25 bp, Homo sapien
gaggggaagagagtcctgacaaata

SEQ ID NO: 3013898 - DNA, 25 bp, Homo sapien
ggaagagagtcctgacaaatagttc

SEQ ID NO: 3013899 - DNA, 25 bp, Homo sapien
ctgtgatccaggaggaggggaagag

SEQ ID NO: 3013900 - DNA, 25 bp, Homo sapien
gcagtacagtgtagtcctcgtctct

SEQ ID NO: 3013901 - DNA, 25 bp, Homo sapien
gtacagtgtagtcctcgtctctggc

SEQ ID NO: 3013902 - DNA, 25 bp, Homo sapien
tacagtgtagtcctcgtctctggcc

SEQ ID NO: 3013903 - DNA, 25 bp, Homo sapien
agtacagtgtagtcctcgtctctgg

SEQ ID NO: 3013904 - DNA, 25 bp, Homo sapien
gatacactaccatccggttcggtga

SEQ ID NO: 3013905 - DNA, 25 bp, Homo sapien
gttcggtgacacagatgcggctaca

SEQ ID NO: 3013906 - DNA, 25 bp, Homo sapien
gcggctacagtaccaagagtccttg

SEQ ID NO: 3013907 - DNA, 25 bp, Homo sapien
ccttgcggaagaaagcgtagcgctc

SEQ ID NO: 3013908 - DNA, 25 bp, Homo sapien
tcacacacaggcggtacactgccat

SEQ ID NO: 3013909 - DNA, 25 bp, Homo sapien
gaagtccctgcccattcgatctagc

SEQ ID NO: 3013910 - DNA, 25 bp, Homo sapien
caccagtgtgacagagatgttgtcc

SEQ ID NO: 3013911 - DNA, 25 bp, Homo sapien
tgccggccctcaggtagggaccagt

SEQ ID NO: 3013912 - DNA, 25 bp, Homo sapien
gggatgccccggcaacgctggccgc

SEQ ID NO: 3013913 - DNA, 25 bp, Homo sapien
ggatgccccggcaacgctggccgca

SEQ ID NO: 3013914 - DNA, 25 bp, Homo sapien
gcggcacgccggacagggctgggtt

SEQ ID NO: 3013915 - DNA, 25 bp, Homo sapien
tgcctctgacacagccggtccctct

SEQ ID NO: 3013916 - DNA, 25 bp, Homo sapien
ttctctctccgaagctccctgctgg

SEQ ID NO: 3013917 - DNA, 25 bp, Homo sapien
gcccacagtcttgcactctaatact

SEQ ID NO: 3013918 - DNA, 25 bp, Homo sapien
ccagatggatatcaggagcctgggt

SEQ ID NO: 3013919 - DNA, 25 bp, Homo sapien
agatggatatcaggagcctgggttc

SEQ ID NO: 3013920 - DNA, 25 bp, Homo sapien
atggatatcaggagcctgggttcca

SEQ ID NO: 3013921 - DNA, 25 bp, Homo sapien
cagatggatatcaggagcctgggtt

SEQ ID NO: 3013922 - DNA, 25 bp, Homo sapien
gtcagcggcccggactgatgccctg

SEQ ID NO: 3013923 - DNA, 25 bp, Homo sapien
gcctgtataattgggacactgccct

SEQ ID NO: 3013924 - DNA, 25 bp, Homo sapien
tggagaaaaggaggtaacgcctgta

SEQ ID NO: 3013925 - DNA, 25 bp, Homo sapien
gatgccctggagtgcttgtccgccc

SEQ ID NO: 3013926 - DNA, 25 bp, Homo sapien
cagggtctgaatgccccgcgtggca

SEQ ID NO: 3013927 - DNA, 25 bp, Homo sapien
atacagcgccggcaaacagggtctg

SEQ ID NO: 3013928 - DNA, 25 bp, Homo sapien
gcaggtcaggaaagcgaaatacagc

SEQ ID NO: 3013929 - DNA, 25 bp, Homo sapien
gaaagcgaaatacagcgccggcaaa

SEQ ID NO: 3013930 - DNA, 25 bp, Homo sapien
ggtgtccgggatctgggccactagg

SEQ ID NO: 3013931 - DNA, 25 bp, Homo sapien
aggtgtccgggatctgggccactag

SEQ ID NO: 3013932 - DNA, 25 bp, Homo sapien
caggtgtccgggatctgggccacta

SEQ ID NO: 3013933 - DNA, 25 bp, Homo sapien
cacgcctccgaagagactggagcct

SEQ ID NO: 3013934 - DNA, 25 bp, Homo sapien
gaacccacgcctccgaagagactgg

SEQ ID NO: 3013935 - DNA, 25 bp, Homo sapien
cctccgaagagactggagcctaaat

SEQ ID NO: 3013936 - DNA, 25 bp, Homo sapien
agcctaaatccagcgccttagaccg

SEQ ID NO: 3013937 - DNA, 25 bp, Homo sapien
gtttcaatttcgatctcagttcccg

SEQ ID NO: 3013938 - DNA, 25 bp, Homo sapien
tagtacccgtaagctacaagacgcc

SEQ ID NO: 3013939 - DNA, 25 bp, Homo sapien
tctcacctggctaacatgctttgcg

SEQ ID NO: 3013940 - DNA, 25 bp, Homo sapien
cctgttttttcgacccatgtgcgcc

SEQ ID NO: 3013941 - DNA, 25 bp, Homo sapien
ctgtctgccccggggcttgggccat

SEQ ID NO: 3013942 - DNA, 25 bp, Homo sapien
tctgccccggggcttgggccatgga

SEQ ID NO: 3013943 - DNA, 25 bp, Homo sapien
cccggggcttgggccatggagagca

SEQ ID NO: 3013944 - DNA, 25 bp, Homo sapien
tgccccggggcttgggccatggaga

SEQ ID NO: 3013945 - DNA, 25 bp, Homo sapien
taatatagaccacatctcacccgcg

SEQ ID NO: 3013946 - DNA, 25 bp, Homo sapien
taaccactttattccatgcactagg

SEQ ID NO: 3013947 - DNA, 25 bp, Homo sapien
gagtacaatcctagacgcaagggag

SEQ ID NO: 3013948 - DNA, 25 bp, Homo sapien
tggacgtcgagataaaggcaggccc

SEQ ID NO: 3013949 - DNA, 25 bp, Homo sapien
ccaaggtctccagaaagcgggcggc

SEQ ID NO: 3013950 - DNA, 25 bp, Homo sapien
cagcgcgggctagggtggccctggt

SEQ ID NO: 3013951 - DNA, 25 bp, Homo sapien
ttgggcgccccgtcttgtctgtgag

SEQ ID NO: 3013952 - DNA, 25 bp, Homo sapien
cgcggcgctggaggcctcggatcta

SEQ ID NO: 3013953 - DNA, 25 bp, Homo sapien
gggctggcgtcgtgcgcgaaggccg

SEQ ID NO: 3013954 - DNA, 25 bp, Homo sapien
ggaaaccggacaagtagcagctggc

SEQ ID NO: 3013955 - DNA, 25 bp, Homo sapien
aagcgaagcaggcactcgcggaaac

SEQ ID NO: 3013956 - DNA, 25 bp, Homo sapien
cgaaggccgccaagcgaagcaggca

SEQ ID NO: 3013957 - DNA, 25 bp, Homo sapien
gctttctccagcttcgggttccgga

SEQ ID NO: 3013958 - DNA, 25 bp, Homo sapien
ccaatatctccgctttctccagctt

SEQ ID NO: 3013959 - DNA, 25 bp, Homo sapien
cggcttcgctccctcaagtagccca

SEQ ID NO: 3013960 - DNA, 25 bp, Homo sapien
tagcccacggcgaactccaatatct

SEQ ID NO: 3013961 - DNA, 25 bp, Homo sapien
gacataacagaggctggctcatcag

SEQ ID NO: 3013962 - DNA, 25 bp, Homo sapien
ccgacataacagaggctggctcatc

SEQ ID NO: 3013963 - DNA, 25 bp, Homo sapien
cgacataacagaggctggctcatca

SEQ ID NO: 3013964 - DNA, 25 bp, Homo sapien
gggtggcgaagaagatcgcgttctg

SEQ ID NO: 3013965 - DNA, 25 bp, Homo sapien
tggcgaagaagatcgcgttctgaga

SEQ ID NO: 3013966 - DNA, 25 bp, Homo sapien
gacccgaggggtggcgaagaagatc

SEQ ID NO: 3013967 - DNA, 25 bp, Homo sapien
agaagatcgcgttctgagagcgagt

SEQ ID NO: 3013968 - DNA, 25 bp, Homo sapien
ttccaggctgcggttgatgcggtcc

SEQ ID NO: 3013969 - DNA, 25 bp, Homo sapien
gcggttgatgcggtcccggcgccgc

SEQ ID NO: 3013970 - DNA, 25 bp, Homo sapien
ggcgccgcttctccacaagcggctt

SEQ ID NO: 3013971 - DNA, 25 bp, Homo sapien
gcttctccacaagcggcttgagcat

SEQ ID NO: 3013972 - DNA, 25 bp, Homo sapien
accagaccgagactcagtgcggccg

SEQ ID NO: 3013973 - DNA, 25 bp, Homo sapien
cgaccagaccgagactcagtgcggc

SEQ ID NO: 3013974 - DNA, 25 bp, Homo sapien
agagcgggccgaccagaccgagact

SEQ ID NO: 3013975 - DNA, 25 bp, Homo sapien
gggccgaccagaccgagactcagtg

SEQ ID NO: 3013976 - DNA, 25 bp, Homo sapien
agggccggccccattcgatccctct

SEQ ID NO: 3013977 - DNA, 25 bp, Homo sapien
tcccaatgcccctagatcagtttct

SEQ ID NO: 3013978 - DNA, 25 bp, Homo sapien
aagaccccagattgcctagggccgg

SEQ ID NO: 3013979 - DNA, 25 bp, Homo sapien
tgcccctagatcagtttctgtagct

SEQ ID NO: 3013980 - DNA, 25 bp, Homo sapien
tctcagtggagaactttggggactc

SEQ ID NO: 3013981 - DNA, 25 bp, Homo sapien
aactttggggactctctgcgcgcac

SEQ ID NO: 3013982 - DNA, 25 bp, Homo sapien
tacgtctccgtctggtgcagtttct

SEQ ID NO: 3013983 - DNA, 25 bp, Homo sapien
cacggtgccgggctcagacctggcg

SEQ ID NO: 3013984 - DNA, 25 bp, Homo sapien
tatagaaagggagatacctagcgcg

SEQ ID NO: 3013985 - DNA, 25 bp, Homo sapien
cgggaccttctgtacaagaccgcct

SEQ ID NO: 3013986 - DNA, 25 bp, Homo sapien
tcctaaaatcttccaccagtctggg

SEQ ID NO: 3013987 - DNA, 25 bp, Homo sapien
gagtggagcaagtgcctatcctctt

SEQ ID NO: 3013988 - DNA, 25 bp, Homo sapien
ctattctcagctcgatcccgggtga

SEQ ID NO: 3013989 - DNA, 25 bp, Homo sapien
attctcagctcgatcccgggtgacc

SEQ ID NO: 3013990 - DNA, 25 bp, Homo sapien
cctattctcagctcgatcccgggtg

SEQ ID NO: 3013991 - DNA, 25 bp, Homo sapien
tctcagctcgatcccgggtgaccat

SEQ ID NO: 3013992 - DNA, 25 bp, Homo sapien
taggacacctcacgcaagtgtgccc

SEQ ID NO: 3013993 - DNA, 25 bp, Homo sapien
caaaactagtcataggagattcagg

SEQ ID NO: 3013994 - DNA, 25 bp, Homo sapien
gagattcaggagtgtggctgatagg

SEQ ID NO: 3013995 - DNA, 25 bp, Homo sapien
actgtagggtagcagggagcaggca

SEQ ID NO: 3013996 - DNA, 25 bp, Homo sapien
ccggctgttcgcacccgggtgtggg

SEQ ID NO: 3013997 - DNA, 25 bp, Homo sapien
agaccccattggatttcgagtccaa

SEQ ID NO: 3013998 - DNA, 25 bp, Homo sapien
attggatttcgagtccaacgcctta

SEQ ID NO: 3013999 - DNA, 25 bp, Homo sapien
ttggatttcgagtccaacgccttaa

SEQ ID NO: 3014000 - DNA, 25 bp, Homo sapien
cccattggatttcgagtccaacgcc

SEQ ID NO: 3014001 - DNA, 25 bp, Homo sapien
gctttaaccagctaagccacggcgc

SEQ ID NO: 3014002 - DNA, 25 bp, Homo sapien
ctagacaggcgctttaaccagctaa

SEQ ID NO: 3014003 - DNA, 25 bp, Homo sapien
ggcgctttaaccagctaagccacgg

SEQ ID NO: 3014004 - DNA, 25 bp, Homo sapien
actagacaggcgctttaaccagcta

SEQ ID NO: 3014005 - DNA, 25 bp, Homo sapien
tgccatcggcagagggtacagctga

SEQ ID NO: 3014006 - DNA, 25 bp, Homo sapien
ggtctagccacatctgagttctgag

SEQ ID NO: 3014007 - DNA, 25 bp, Homo sapien
tggaatatggagaggccacttcagc

SEQ ID NO: 3014008 - DNA, 25 bp, Homo sapien
tgtctccccgcaataaataagtgca

SEQ ID NO: 3014009 - DNA, 25 bp, Homo sapien
ctcctccatagccaagtcctgagag

SEQ ID NO: 3014010 - DNA, 25 bp, Homo sapien
tcctgagagcttgaagccttggccc

SEQ ID NO: 3014011 - DNA, 25 bp, Homo sapien
tgagagcttgaagccttggccccgc

SEQ ID NO: 3014012 - DNA, 25 bp, Homo sapien
tgtaggtaaggctggactggatgag

SEQ ID NO: 3014013 - DNA, 25 bp, Homo sapien
tccagctctgagaagagtgggtcat

SEQ ID NO: 3014014 - DNA, 25 bp, Homo sapien
catccagctctgagaagagtgggtc

SEQ ID NO: 3014015 - DNA, 25 bp, Homo sapien
ccagctctgagaagagtgggtcatc

SEQ ID NO: 3014016 - DNA, 25 bp, Homo sapien
atccagctctgagaagagtgggtca

SEQ ID NO: 3014017 - DNA, 25 bp, Homo sapien
tgcacctgcggtccaacaaggttgg

SEQ ID NO: 3014018 - DNA, 25 bp, Homo sapien
gtgcttcccgaaatgtactcccaag

SEQ ID NO: 3014019 - DNA, 25 bp, Homo sapien
ttgtgccctctacccagatgccgtt

SEQ ID NO: 3014020 - DNA, 25 bp, Homo sapien
tctgcaaagactcacgcggcttaat

SEQ ID NO: 3014021 - DNA, 25 bp, Homo sapien
gaacttgagctcaattcttttttct

SEQ ID NO: 3014022 - DNA, 25 bp, Homo sapien
ttttctcccccttgaacttgagctc

SEQ ID NO: 3014023 - DNA, 25 bp, Homo sapien
tctccccgtcccaggcttctctcac

SEQ ID NO: 3014024 - DNA, 25 bp, Homo sapien
tgagctcaattcttttttctccccg

SEQ ID NO: 3014025 - DNA, 25 bp, Homo sapien
atcaagagcccgaggcagttggccc

SEQ ID NO: 3014026 - DNA, 25 bp, Homo sapien
ttggcccttccggacccaggagtgc

SEQ ID NO: 3014027 - DNA, 25 bp, Homo sapien
gctggtcctcagaaaaccgaggctg

SEQ ID NO: 3014028 - DNA, 25 bp, Homo sapien
ttctgcatggctcggagccgctccc

SEQ ID NO: 3014029 - DNA, 25 bp, Homo sapien
cccggaccaggacccatgaagctgg

SEQ ID NO: 3014030 - DNA, 25 bp, Homo sapien
gctcctcccctaaactagtgctatg

SEQ ID NO: 3014031 - DNA, 25 bp, Homo sapien
cccaagaaggggttcagaaggcaga

SEQ ID NO: 3014032 - DNA, 25 bp, Homo sapien
tgctatgcgaggtcaaggcttccaa

SEQ ID NO: 3014033 - DNA, 25 bp, Homo sapien
cgcgctggtcagcattggccatgag

SEQ ID NO: 3014034 - DNA, 25 bp, Homo sapien
tggagggcacctggtaggtcatcat

SEQ ID NO: 3014035 - DNA, 25 bp, Homo sapien
catgagcagccaaatgggatcctgg

SEQ ID NO: 3014036 - DNA, 25 bp, Homo sapien
ggatcctggagcacgtacttaatca

SEQ ID NO: 3014037 - DNA, 25 bp, Homo sapien
agcctcggaagagtcgatgctgcca

SEQ ID NO: 3014038 - DNA, 25 bp, Homo sapien
cctcagcctcggaagagtcgatgct

SEQ ID NO: 3014039 - DNA, 25 bp, Homo sapien
cctcggaagagtcgatgctgccaaa

SEQ ID NO: 3014040 - DNA, 25 bp, Homo sapien
ggaagagtcgatgctgccaaagtat

SEQ ID NO: 3014041 - DNA, 25 bp, Homo sapien
ttgcagcagaagttcgagcaggtca

SEQ ID NO: 3014042 - DNA, 25 bp, Homo sapien
ccggagcgcgagtcctcttgcagca

SEQ ID NO: 3014043 - DNA, 25 bp, Homo sapien
caggtcactggagccggaaagtgcg

SEQ ID NO: 3014044 - DNA, 25 bp, Homo sapien
gaaagtgcgtcctgattggaggact

SEQ ID NO: 3014045 - DNA, 25 bp, Homo sapien
atggaggggtcagcacctaggcctc

SEQ ID NO: 3014046 - DNA, 25 bp, Homo sapien
ttcaactgctcttactggttgtggg

SEQ ID NO: 3014047 - DNA, 25 bp, Homo sapien
ctcccttcaactgctcttactggtt

SEQ ID NO: 3014048 - DNA, 25 bp, Homo sapien
ggtcagcacctaggcctcccttcaa

SEQ ID NO: 3014049 - DNA, 25 bp, Homo sapien
ctggcaggcagacgcaggggtcagt

SEQ ID NO: 3014050 - DNA, 25 bp, Homo sapien
gaggaggtagccaatttctgcctca

SEQ ID NO: 3014051 - DNA, 25 bp, Homo sapien
gagaagaaagctggcgaagagtggg

SEQ ID NO: 3014052 - DNA, 25 bp, Homo sapien
cagatgctctctcagaagttattga

SEQ ID NO: 3014053 - DNA, 25 bp, Homo sapien
ccctcagcacgggggagctcctcca

SEQ ID NO: 3014054 - DNA, 25 bp, Homo sapien
gccccctcagcacgggggagctcct

SEQ ID NO: 3014055 - DNA, 25 bp, Homo sapien
cagcagccccctcagcacgggggag

SEQ ID NO: 3014056 - DNA, 25 bp, Homo sapien
gcagccccctcagcacgggggagct

SEQ ID NO: 3014057 - DNA, 25 bp, Homo sapien
ctcgagttgaacagtggagagtccg

SEQ ID NO: 3014058 - DNA, 25 bp, Homo sapien
tggagagctgcatctcgagttgaac

SEQ ID NO: 3014059 - DNA, 25 bp, Homo sapien
tctggagtgccccataaggatagct

SEQ ID NO: 3014060 - DNA, 25 bp, Homo sapien
cagatagttagggagcaccaaggcc

SEQ ID NO: 3014061 - DNA, 25 bp, Homo sapien
gtgtgagacatagcagggcgcttca

SEQ ID NO: 3014062 - DNA, 25 bp, Homo sapien
gtagggctggacaaccgctgggaag

SEQ ID NO: 3014063 - DNA, 25 bp, Homo sapien
atcggcagtggtgtcggcggcttgg

SEQ ID NO: 3014064 - DNA, 25 bp, Homo sapien
gagcgcttggctttggatcggcagt

SEQ ID NO: 3014065 - DNA, 25 bp, Homo sapien
ctgacacgctgaccagggagaggac

SEQ ID NO: 3014066 - DNA, 25 bp, Homo sapien
gagagactagggttagcaaggacct

SEQ ID NO: 3014067 - DNA, 25 bp, Homo sapien
gttagtacccctgctacccacactg

SEQ ID NO: 3014068 - DNA, 25 bp, Homo sapien
tagggttagcaaggacctcaacctg

SEQ ID NO: 3014069 - DNA, 25 bp, Homo sapien
gaagcagggtgagtccatggacaca

SEQ ID NO: 3014070 - DNA, 25 bp, Homo sapien
gacagatggctctggtccgccaaac

SEQ ID NO: 3014071 - DNA, 25 bp, Homo sapien
ggtgtgcggaagatggaggcatgct

SEQ ID NO: 3014072 - DNA, 25 bp, Homo sapien
tcctgcccatcgaggccgtattctg

SEQ ID NO: 3014073 - DNA, 25 bp, Homo sapien
tgacaactgactcctaagtgggcat

SEQ ID NO: 3014074 - DNA, 25 bp, Homo sapien
gaagtcgcttacctggagacagcac

SEQ ID NO: 3014075 - DNA, 25 bp, Homo sapien
tggagcagaaacacctcccttaaga

SEQ ID NO: 3014076 - DNA, 25 bp, Homo sapien
ccagagttggcccagaatctatgca

SEQ ID NO: 3014077 - DNA, 25 bp, Homo sapien
aatccagtcctagactgggcagagg

SEQ ID NO: 3014078 - DNA, 25 bp, Homo sapien
cccaacaatccagtcctagactggg

SEQ ID NO: 3014079 - DNA, 25 bp, Homo sapien
caatccagtcctagactgggcagag

SEQ ID NO: 3014080 - DNA, 25 bp, Homo sapien
caacaatccagtcctagactgggca

SEQ ID NO: 3014081 - DNA, 25 bp, Homo sapien
gctgtggaagagctgtcgagtccac

SEQ ID NO: 3014082 - DNA, 25 bp, Homo sapien
gggacagcacggccttggtcagccc

SEQ ID NO: 3014083 - DNA, 25 bp, Homo sapien
gacagcacggccttggtcagcccca

SEQ ID NO: 3014084 - DNA, 25 bp, Homo sapien
gcagcctgcccaggtctcggaagcg

SEQ ID NO: 3014085 - DNA, 25 bp, Homo sapien
tctcggaagcggctgaggaaggctt

SEQ ID NO: 3014086 - DNA, 25 bp, Homo sapien
ctggggctaggccaggcaggtcctc

SEQ ID NO: 3014087 - DNA, 25 bp, Homo sapien
acggtaggcgtctggggctgggtca

SEQ ID NO: 3014088 - DNA, 25 bp, Homo sapien
ctggacggtaggcgtctggggctgg

SEQ ID NO: 3014089 - DNA, 25 bp, Homo sapien
caggcaggtcctccatcatgatgat

SEQ ID NO: 3014090 - DNA, 25 bp, Homo sapien
caagcctggtctccatgtacgtttc

SEQ ID NO: 3014091 - DNA, 25 bp, Homo sapien
tgatagcctagccaacccctggcag

SEQ ID NO: 3014092 - DNA, 25 bp, Homo sapien
gagagtgagatagggaaaggtcatc

SEQ ID NO: 3014093 - DNA, 25 bp, Homo sapien
aaaggtcatcagaaccacttcaggg

SEQ ID NO: 3014094 - DNA, 25 bp, Homo sapien
catgattttcaaggtcaatatccaa

SEQ ID NO: 3014095 - DNA, 25 bp, Homo sapien
gattttcaaggtcaatatccaaaga

SEQ ID NO: 3014096 - DNA, 25 bp, Homo sapien
cccctcatgattttcaaggtcaata

SEQ ID NO: 3014097 - DNA, 25 bp, Homo sapien
cctcatgattttcaaggtcaatatc

SEQ ID NO: 3014098 - DNA, 25 bp, Homo sapien
attggccagggcgagcgggctcagg

SEQ ID NO: 3014099 - DNA, 25 bp, Homo sapien
tgactggtgacggacaccacactct

SEQ ID NO: 3014100 - DNA, 25 bp, Homo sapien
cactggctccttccgtggggtggcc

SEQ ID NO: 3014101 - DNA, 25 bp, Homo sapien
gacgatggtggagctgaagctacac

SEQ ID NO: 3014102 - DNA, 25 bp, Homo sapien
gaggaggcacatttacgcttagtgg

SEQ ID NO: 3014103 - DNA, 25 bp, Homo sapien
ttggtccccacagagactggacctg

SEQ ID NO: 3014104 - DNA, 25 bp, Homo sapien
cacatttacgcttagtggtgctggg

SEQ ID NO: 3014105 - DNA, 25 bp, Homo sapien
tctgcctgtcgtcgtcagaggctga

SEQ ID NO: 3014106 - DNA, 25 bp, Homo sapien
tgctgtccaggcagttgatctgctg

SEQ ID NO: 3014107 - DNA, 25 bp, Homo sapien
gtccaggcagttgatctgctggtag

SEQ ID NO: 3014108 - DNA, 25 bp, Homo sapien
gctgtccaggcagttgatctgctgg

SEQ ID NO: 3014109 - DNA, 25 bp, Homo sapien
gctggaggcttctttcctctcggcc

SEQ ID NO: 3014110 - DNA, 25 bp, Homo sapien
ggacgggagcagaacccgcctccag

SEQ ID NO: 3014111 - DNA, 25 bp, Homo sapien
tggacgggagcagaacccgcctcca

SEQ ID NO: 3014112 - DNA, 25 bp, Homo sapien
gcctggacgggagcagaacccgcct

SEQ ID NO: 3014113 - DNA, 25 bp, Homo sapien
tggggcctggacgggagcagaaccc

SEQ ID NO: 3014114 - DNA, 25 bp, Homo sapien
gaggccgggcccgagactcaataaa

SEQ ID NO: 3014115 - DNA, 25 bp, Homo sapien
catccttacagatctgctggaaagt

SEQ ID NO: 3014116 - DNA, 25 bp, Homo sapien
gcccgagactcaataaaaagctgct

SEQ ID NO: 3014117 - DNA, 25 bp, Homo sapien
cagatgcacatccttacagatctgc

SEQ ID NO: 3014118 - DNA, 25 bp, Homo sapien
gggaggcacagacgccttgatggga

SEQ ID NO: 3014119 - DNA, 25 bp, Homo sapien
cagacgccttgatgggagcaggaca

SEQ ID NO: 3014120 - DNA, 25 bp, Homo sapien
gaaagggcgattagagggtgaggta

SEQ ID NO: 3014121 - DNA, 25 bp, Homo sapien
gcaaaggaggatcgggcaagactct

SEQ ID NO: 3014122 - DNA, 25 bp, Homo sapien
cgccgactccacagagtcccgtggg

SEQ ID NO: 3014123 - DNA, 25 bp, Homo sapien
ccccgttgctatcactggaggaccc

SEQ ID NO: 3014124 - DNA, 25 bp, Homo sapien
cccgttgctatcactggaggaccca

SEQ ID NO: 3014125 - DNA, 25 bp, Homo sapien
ggatgtcacggcgccgactccacag

SEQ ID NO: 3014126 - DNA, 25 bp, Homo sapien
tctgacagctcctggatatcagtgt

SEQ ID NO: 3014127 - DNA, 25 bp, Homo sapien
ggccgggggagtgaacacgtcctca

SEQ ID NO: 3014128 - DNA, 25 bp, Homo sapien
ggatatcagtgtccagggagggagc

SEQ ID NO: 3014129 - DNA, 25 bp, Homo sapien
tgacagctcctggatatcagtgtcc

SEQ ID NO: 3014130 - DNA, 25 bp, Homo sapien
catactccccgttgcgggcacagaa

SEQ ID NO: 3014131 - DNA, 25 bp, Homo sapien
tttgtggcggcccaacacgaaggct

SEQ ID NO: 3014132 - DNA, 25 bp, Homo sapien
tggtgtccatggtgacatactcccc

SEQ ID NO: 3014133 - DNA, 25 bp, Homo sapien
acgaaggctaccttgcggctccagg

SEQ ID NO: 3014134 - DNA, 25 bp, Homo sapien
ccatgccactagagatccaggagac

SEQ ID NO: 3014135 - DNA, 25 bp, Homo sapien
agtgggaagggcgagcagggcgaga

SEQ ID NO: 3014136 - DNA, 25 bp, Homo sapien
ctgagtaagagggaggccatgccac

SEQ ID NO: 3014137 - DNA, 25 bp, Homo sapien
taagagggaggccatgccactagag

SEQ ID NO: 3014138 - DNA, 25 bp, Homo sapien
tgtggatagccagcatgaggggtcg

SEQ ID NO: 3014139 - DNA, 25 bp, Homo sapien
cttgtggatagccagcatgaggggt

SEQ ID NO: 3014140 - DNA, 25 bp, Homo sapien
ttgtggatagccagcatgaggggtc

SEQ ID NO: 3014141 - DNA, 25 bp, Homo sapien
tggatagccagcatgaggggtcggt

SEQ ID NO: 3014142 - DNA, 25 bp, Homo sapien
ctgaacgggaaggaggcatcagagt

SEQ ID NO: 3014143 - DNA, 25 bp, Homo sapien
atcctcttgtcagggggtatccggg

SEQ ID NO: 3014144 - DNA, 25 bp, Homo sapien
aaatcctcttgtcagggggtatccg

SEQ ID NO: 3014145 - DNA, 25 bp, Homo sapien
agctgggtgtgtgccgcgtagtgaa

SEQ ID NO: 3014146 - DNA, 25 bp, Homo sapien
gtgtgtgccgcgtagtgaaaatcct

SEQ ID NO: 3014147 - DNA, 25 bp, Homo sapien
tcactgggtttcgtccagaatgccc

SEQ ID NO: 3014148 - DNA, 25 bp, Homo sapien
cactatgggcccaaagatggtctgg

SEQ ID NO: 3014149 - DNA, 25 bp, Homo sapien
tggtctgggccaatcctatgccctg

SEQ ID NO: 3014150 - DNA, 25 bp, Homo sapien
taacatgactgagagcaagcaaggc

SEQ ID NO: 3014151 - DNA, 25 bp, Homo sapien
taacccgaatggatgcgctctgcaa

SEQ ID NO: 3014152 - DNA, 25 bp, Homo sapien
atggctggtaccgaggccctggatc

SEQ ID NO: 3014153 - DNA, 25 bp, Homo sapien
ccccatctgagacccggatcttggt

SEQ ID NO: 3014154 - DNA, 25 bp, Homo sapien
tcttggtcacatacggggttaggcg

SEQ ID NO: 3014155 - DNA, 25 bp, Homo sapien
gactttcaacagagagccacccact

SEQ ID NO: 3014156 - DNA, 25 bp, Homo sapien
tccaacaataaggtcacagcagaca

SEQ ID NO: 3014157 - DNA, 25 bp, Homo sapien
cctccaacaataaggtcacagcaga

SEQ ID NO: 3014158 - DNA, 25 bp, Homo sapien
ctagcaaaggagagaggagcattag

SEQ ID NO: 3014159 - DNA, 25 bp, Homo sapien
gaggaggcagaggtaggccgggcac

SEQ ID NO: 3014160 - DNA, 25 bp, Homo sapien
ggtggctcacgcctttaatcccagc

SEQ ID NO: 3014161 - DNA, 25 bp, Homo sapien
ggaggaggcagaggtaggccgggca

SEQ ID NO: 3014162 - DNA, 25 bp, Homo sapien
gatacggcagaagacggacttctcc

SEQ ID NO: 3014163 - DNA, 25 bp, Homo sapien
ctgatacggcagaagacggacttct

SEQ ID NO: 3014164 - DNA, 25 bp, Homo sapien
cagaagacggacttctcctgggtaa

SEQ ID NO: 3014165 - DNA, 25 bp, Homo sapien
cggcagaagacggacttctcctggg

SEQ ID NO: 3014166 - DNA, 25 bp, Homo sapien
aagaatccactaagggaaagtctgg

SEQ ID NO: 3014167 - DNA, 25 bp, Homo sapien
gccccttccctaggctgcgaagaat

SEQ ID NO: 3014168 - DNA, 25 bp, Homo sapien
cctaggctgcgaagaatccactaag

SEQ ID NO: 3014169 - DNA, 25 bp, Homo sapien
agaatccactaagggaaagtctggg

SEQ ID NO: 3014170 - DNA, 25 bp, Homo sapien
tcatgcctccccacagcgcttgggc

SEQ ID NO: 3014171 - DNA, 25 bp, Homo sapien
ctccccacagcgcttgggcacctca

SEQ ID NO: 3014172 - DNA, 25 bp, Homo sapien
tccccacagcgcttgggcacctcac

SEQ ID NO: 3014173 - DNA, 25 bp, Homo sapien
cctccccacagcgcttgggcacctc

SEQ ID NO: 3014174 - DNA, 25 bp, Homo sapien
gagatggagcagtggaaccatagaa

SEQ ID NO: 3014175 - DNA, 25 bp, Homo sapien
ccatagaagactcccacatcctggg

SEQ ID NO: 3014176 - DNA, 25 bp, Homo sapien
cagcaggacggctgcctgctccgaa

SEQ ID NO: 3014177 - DNA, 25 bp, Homo sapien
aatgtagacgattcggcccgtcagg

SEQ ID NO: 3014178 - DNA, 25 bp, Homo sapien
gggagagcaagagcagattcaagag

SEQ ID NO: 3014179 - DNA, 25 bp, Homo sapien
ggggagagcaagagcagattcaaga

SEQ ID NO: 3014180 - DNA, 25 bp, Homo sapien
caggagggggagagcaagagcagat

SEQ ID NO: 3014181 - DNA, 25 bp, Homo sapien
gagggggagagcaagagcagattca

SEQ ID NO: 3014182 - DNA, 25 bp, Homo sapien
tgtactcagacgtgatgtgctccag

SEQ ID NO: 3014183 - DNA, 25 bp, Homo sapien
taggtggacatgtccatggagcaag

SEQ ID NO: 3014184 - DNA, 25 bp, Homo sapien
cctccagggtataggtggacatgtc

SEQ ID NO: 3014185 - DNA, 25 bp, Homo sapien
gctccactgctggtagtattcctgg

SEQ ID NO: 3014186 - DNA, 25 bp, Homo sapien
tgcacctgcttgacacaggccagtg

SEQ ID NO: 3014187 - DNA, 25 bp, Homo sapien
gccagtgcgtactgcagcgtggcca

SEQ ID NO: 3014188 - DNA, 25 bp, Homo sapien
agcttgagctctcgaagtgctgtca

SEQ ID NO: 3014189 - DNA, 25 bp, Homo sapien
tctggcggcagtcgaagcttgagct

SEQ ID NO: 3014190 - DNA, 25 bp, Homo sapien
actggtggacgggttgtcctgctct

SEQ ID NO: 3014191 - DNA, 25 bp, Homo sapien
agccactggtggacgggttgtcctg

SEQ ID NO: 3014192 - DNA, 25 bp, Homo sapien
ctgcagccactggtggacgggttgt

SEQ ID NO: 3014193 - DNA, 25 bp, Homo sapien
ccactggtggacgggttgtcctgct

SEQ ID NO: 3014194 - DNA, 25 bp, Homo sapien
tgagtccttgccgttgcctgaggag

SEQ ID NO: 3014195 - DNA, 25 bp, Homo sapien
tgaaccattgctgttggcatcggtg

SEQ ID NO: 3014196 - DNA, 25 bp, Homo sapien
gactcatgcccgttggactcattgc

SEQ ID NO: 3014197 - DNA, 25 bp, Homo sapien
tgagctccgctgagatgcgcctcta

SEQ ID NO: 3014198 - DNA, 25 bp, Homo sapien
gacgcccccaggacaaaatgattcc

SEQ ID NO: 3014199 - DNA, 25 bp, Homo sapien
ccaggacaaaatgattccccaggcc

SEQ ID NO: 3014200 - DNA, 25 bp, Homo sapien
catcagccccttctagggggccact

SEQ ID NO: 3014201 - DNA, 25 bp, Homo sapien
cagccccttctagggggccactcat

SEQ ID NO: 3014202 - DNA, 25 bp, Homo sapien
cacggatgcacgagggggcctggag

SEQ ID NO: 3014203 - DNA, 25 bp, Homo sapien
ccaccacggatgcacgagggggcct

SEQ ID NO: 3014204 - DNA, 25 bp, Homo sapien
gcagagaggccaccacggatgcacg

SEQ ID NO: 3014205 - DNA, 25 bp, Homo sapien
agagaggccaccacggatgcacgag

SEQ ID NO: 3014206 - DNA, 25 bp, Homo sapien
gttgagaagttcgatcacagccagt

SEQ ID NO: 3014207 - DNA, 25 bp, Homo sapien
aggtggaagatctaagtctctgagg

SEQ ID NO: 3014208 - DNA, 25 bp, Homo sapien
tgagggagtgaggtggaagatctaa

SEQ ID NO: 3014209 - DNA, 25 bp, Homo sapien
tgagaagttcgatcacagccagtac

SEQ ID NO: 3014210 - DNA, 25 bp, Homo sapien
ggcttgcagaaagctggtttaactc

SEQ ID NO: 3014211 - DNA, 25 bp, Homo sapien
aggcctggggcttccaatggggagt

SEQ ID NO: 3014212 - DNA, 25 bp, Homo sapien
gcacctgctggcttcactcagacct

SEQ ID NO: 3014213 - DNA, 25 bp, Homo sapien
ttgcagaaagctggtttaactccag

SEQ ID NO: 3014214 - DNA, 25 bp, Homo sapien
ccttagggggactgccagcgggaga

SEQ ID NO: 3014215 - DNA, 25 bp, Homo sapien
agggggactgccagcgggagaaggt

SEQ ID NO: 3014216 - DNA, 25 bp, Homo sapien
cttagggggactgccagcgggagaa

SEQ ID NO: 3014217 - DNA, 25 bp, Homo sapien
gggactgccagcgggagaaggttct

SEQ ID NO: 3014218 - DNA, 25 bp, Homo sapien
gagcagtcaatgagaaccacggctg

SEQ ID NO: 3014219 - DNA, 25 bp, Homo sapien
cctgagcagtcaatgagaaccacgg

SEQ ID NO: 3014220 - DNA, 25 bp, Homo sapien
tgagcagtcaatgagaaccacggct

SEQ ID NO: 3014221 - DNA, 25 bp, Homo sapien
ctgagcagtcaatgagaaccacggc

SEQ ID NO: 3014222 - DNA, 25 bp, Homo sapien
tcgagtaacgagcaagaagaccggg

SEQ ID NO: 3014223 - DNA, 25 bp, Homo sapien
tctagtccgaagtgggctgacatca

SEQ ID NO: 3014224 - DNA, 25 bp, Homo sapien
aaccagcgctgggaacgggatgttc

SEQ ID NO: 3014225 - DNA, 25 bp, Homo sapien
tgaaagcctaatagggtcctggtac

SEQ ID NO: 3014226 - DNA, 25 bp, Homo sapien
agtggaagctccaccgggcgggcgg

SEQ ID NO: 3014227 - DNA, 25 bp, Homo sapien
ctggtcgcaggagtgtcctccgcac

SEQ ID NO: 3014228 - DNA, 25 bp, Homo sapien
agccgagtggaagctccaccgggcg

SEQ ID NO: 3014229 - DNA, 25 bp, Homo sapien
ggtcgcaggagtgtcctccgcacgc

SEQ ID NO: 3014230 - DNA, 25 bp, Homo sapien
gctgccccaaaagtgggggccagga

SEQ ID NO: 3014231 - DNA, 25 bp, Homo sapien
gacgcagccacccacagttaaagct

SEQ ID NO: 3014232 - DNA, 25 bp, Homo sapien
acgcagccacccacagttaaagctg

SEQ ID NO: 3014233 - DNA, 25 bp, Homo sapien
gatgagtagttcctcgcagggctcc

SEQ ID NO: 3014234 - DNA, 25 bp, Homo sapien
tagtagatgaacaggcctccaagca

SEQ ID NO: 3014235 - DNA, 25 bp, Homo sapien
gctcaggagagctgcagttacacag

SEQ ID NO: 3014236 - DNA, 25 bp, Homo sapien
tgtcacgtggcctaagctttcctga

SEQ ID NO: 3014237 - DNA, 25 bp, Homo sapien
gccctgctgccgtcaatggaggcga

SEQ ID NO: 3014238 - DNA, 25 bp, Homo sapien
cggcggccagcgcacttgggaacat

SEQ ID NO: 3014239 - DNA, 25 bp, Homo sapien
gccgtcctgtcccaaagccagggat

SEQ ID NO: 3014240 - DNA, 25 bp, Homo sapien
gacagcagtgacgtcaaagcggaag

SEQ ID NO: 3014241 - DNA, 25 bp, Homo sapien
gcctgatccgaagccactgtttgca

SEQ ID NO: 3014242 - DNA, 25 bp, Homo sapien
cacaaagtgcttgagatcacccaag

SEQ ID NO: 3014243 - DNA, 25 bp, Homo sapien
ggtgttaaccaacctgtaagctgca

SEQ ID NO: 3014244 - DNA, 25 bp, Homo sapien
caattctaagtttggtgccaggaac

SEQ ID NO: 3014245 - DNA, 25 bp, Homo sapien
ggcgcgcacgcacactccaaatttc

SEQ ID NO: 3014246 - DNA, 25 bp, Homo sapien
cgcgcacgcacactccaaatttctt

SEQ ID NO: 3014247 - DNA, 25 bp, Homo sapien
gcacgcacactccaaatttcttcta

SEQ ID NO: 3014248 - DNA, 25 bp, Homo sapien
gctcggcgcgcacgcacactccaaa

SEQ ID NO: 3014249 - DNA, 25 bp, Homo sapien
ctggggattttccttgacgacactc

SEQ ID NO: 3014250 - DNA, 25 bp, Homo sapien
gctggggattttccttgacgacact

SEQ ID NO: 3014251 - DNA, 25 bp, Homo sapien
gcaacttgtttacccagaagctggg

SEQ ID NO: 3014252 - DNA, 25 bp, Homo sapien
gcggcaacttgtttacccagaagct

SEQ ID NO: 3014253 - DNA, 25 bp, Homo sapien
gcgtataaggcgcactttgtacaga

SEQ ID NO: 3014254 - DNA, 25 bp, Homo sapien
gcaggcgcagccgtgagcggtggca

SEQ ID NO: 3014255 - DNA, 25 bp, Homo sapien
cgggcgtgactagggcgcctctggc

SEQ ID NO: 3014256 - DNA, 25 bp, Homo sapien
tttgtacagagacccgggcgtgact

SEQ ID NO: 3014257 - DNA, 25 bp, Homo sapien
tctctctgggctcaatagtcctgga

SEQ ID NO: 3014258 - DNA, 25 bp, Homo sapien
caagcatccccgttttccagcaagt

SEQ ID NO: 3014259 - DNA, 25 bp, Homo sapien
tacattttcacaatctggatgcgcc

SEQ ID NO: 3014260 - DNA, 25 bp, Homo sapien
tcaatcagttcacccaatgagagga

SEQ ID NO: 3014261 - DNA, 25 bp, Homo sapien
tcaagacacttacataccagctggg

SEQ ID NO: 3014262 - DNA, 25 bp, Homo sapien
cccgaagtggcagaattattggtcc

SEQ ID NO: 3014263 - DNA, 25 bp, Homo sapien
gttgagtaccccacatgaaaactgg

SEQ ID NO: 3014264 - DNA, 25 bp, Homo sapien
gctaattaacatgctggacgctccc

SEQ ID NO: 3014265 - DNA, 25 bp, Homo sapien
tcagactgggctcttaggcctaaag

SEQ ID NO: 3014266 - DNA, 25 bp, Homo sapien
cctaaagggtcctcaatggatacac

SEQ ID NO: 3014267 - DNA, 25 bp, Homo sapien
aggtcccttccgctccatggtatgg

SEQ ID NO: 3014268 - DNA, 25 bp, Homo sapien
ctagacaggtaggttctgaggtccc

SEQ ID NO: 3014269 - DNA, 25 bp, Homo sapien
gatgatggcgcaaatcactcccaag

SEQ ID NO: 3014270 - DNA, 25 bp, Homo sapien
gatgaggatgatggcgcaaatcact

SEQ ID NO: 3014271 - DNA, 25 bp, Homo sapien
tgatggcgcaaatcactcccaagat

SEQ ID NO: 3014272 - DNA, 25 bp, Homo sapien
aggatgatggcgcaaatcactccca

SEQ ID NO: 3014273 - DNA, 25 bp, Homo sapien
tccaccagtatttgcgcttgagctt

SEQ ID NO: 3014274 - DNA, 25 bp, Homo sapien
ttgtccacgttcaccctcatgatgt

SEQ ID NO: 3014275 - DNA, 25 bp, Homo sapien
gcgcttgtttcaaactgggaggccc

SEQ ID NO: 3014276 - DNA, 25 bp, Homo sapien
gagtgcatctgcacggtcgtccagc

SEQ ID NO: 3014277 - DNA, 25 bp, Homo sapien
cctgttactggtgaggtttggaggg

SEQ ID NO: 3014278 - DNA, 25 bp, Homo sapien
tctgctgcagtctcctgttactggt

SEQ ID NO: 3014279 - DNA, 25 bp, Homo sapien
ctgcagtctcctgttactggtgagg

SEQ ID NO: 3014280 - DNA, 25 bp, Homo sapien
gggtctgctgcagtctcctgttact

SEQ ID NO: 3014281 - DNA, 25 bp, Homo sapien
cagtttccccgcctgtcaactgagg

SEQ ID NO: 3014282 - DNA, 25 bp, Homo sapien
gatgtaagccctggtctcggtccag

SEQ ID NO: 3014283 - DNA, 25 bp, Homo sapien
ggaggaaggccacccgatgtaagcc

SEQ ID NO: 3014284 - DNA, 25 bp, Homo sapien
agccctgccgccgatgagctgcgtg

SEQ ID NO: 3014285 - DNA, 25 bp, Homo sapien
ctcacagatgcgatccgggtcgacc

SEQ ID NO: 3014286 - DNA, 25 bp, Homo sapien
tcgacccgaaaagacaggcggccgc

SEQ ID NO: 3014287 - DNA, 25 bp, Homo sapien
gatgcgatccgggtcgacccgaaaa

SEQ ID NO: 3014288 - DNA, 25 bp, Homo sapien
tgcgatccgggtcgacccgaaaaga

SEQ ID NO: 3014289 - DNA, 25 bp, Homo sapien
cgacggccggttgccaagggcggcg

SEQ ID NO: 3014290 - DNA, 25 bp, Homo sapien
cgcccgcgcgcagtcaccggcttgg

SEQ ID NO: 3014291 - DNA, 25 bp, Homo sapien
caggagagaccccgggcactcccga

SEQ ID NO: 3014292 - DNA, 25 bp, Homo sapien
cagggaagcgcggtgagggtggcgg

SEQ ID NO: 3014293 - DNA, 25 bp, Homo sapien
ggaggacttggcagcggcagtgatg

SEQ ID NO: 3014294 - DNA, 25 bp, Homo sapien
ctcgcgctggctccgactggcgctg

SEQ ID NO: 3014295 - DNA, 25 bp, Homo sapien
ggccgcgcgtcacccgcatccgggc

SEQ ID NO: 3014296 - DNA, 25 bp, Homo sapien
ctggctgcccgggacggaaagatgg

SEQ ID NO: 3014297 - DNA, 25 bp, Homo sapien
tgggggagattggtcccaacccatc

SEQ ID NO: 3014298 - DNA, 25 bp, Homo sapien
aacccatcaccgctggtggatgtct

SEQ ID NO: 3014299 - DNA, 25 bp, Homo sapien
ggagattggtcccaacccatcaccg

SEQ ID NO: 3014300 - DNA, 25 bp, Homo sapien
tcaccgctggtggatgtctcagagg

SEQ ID NO: 3014301 - DNA, 25 bp, Homo sapien
ttatgcttgaaccaatcaccgcgcc

SEQ ID NO: 3014302 - DNA, 25 bp, Homo sapien
tcctaaccacgcagactaagaataa

SEQ ID NO: 3014303 - DNA, 25 bp, Homo sapien
ccaaaagttccagcaatagtcctgt

SEQ ID NO: 3014304 - DNA, 25 bp, Homo sapien
gaatgagcctagagaggaatggtag

SEQ ID NO: 3014305 - DNA, 25 bp, Homo sapien
agagatggatgaagtcacccgaaga

SEQ ID NO: 3014306 - DNA, 25 bp, Homo sapien
gtcacccgaagagcagtgatcacca

SEQ ID NO: 3014307 - DNA, 25 bp, Homo sapien
tatgtccccagtaactgacacactg

SEQ ID NO: 3014308 - DNA, 25 bp, Homo sapien
aagagacaacccagtattatgtccc

SEQ ID NO: 3014309 - DNA, 25 bp, Homo sapien
caccatgtgcacaagactgcagata

SEQ ID NO: 3014310 - DNA, 25 bp, Homo sapien
taatagtaggcaaaccaggtgaacc

SEQ ID NO: 3014311 - DNA, 25 bp, Homo sapien
tattgaataccatcctgagggcaac

SEQ ID NO: 3014312 - DNA, 25 bp, Homo sapien
catgtatatacatctgcgccgtgca

SEQ ID NO: 3014313 - DNA, 25 bp, Homo sapien
tacgcagagacgttaatcacgtttc

SEQ ID NO: 3014314 - DNA, 25 bp, Homo sapien
cgcagagacgttaatcacgtttcat

SEQ ID NO: 3014315 - DNA, 25 bp, Homo sapien
attacgcagagacgttaatcacgtt

SEQ ID NO: 3014316 - DNA, 25 bp, Homo sapien
ttacgcagagacgttaatcacgttt

SEQ ID NO: 3014317 - DNA, 25 bp, Homo sapien
cataacgcgctggtatgagcaatcc

SEQ ID NO: 3014318 - DNA, 25 bp, Homo sapien
gaatgctccgatcagttacgtgccg

SEQ ID NO: 3014319 - DNA, 25 bp, Homo sapien
agattccgttacaagctagggtgag

SEQ ID NO: 3014320 - DNA, 25 bp, Homo sapien
ccaagtatcttacggtctgcaggac

SEQ ID NO: 3014321 - DNA, 25 bp, Homo sapien
ctaaaactgtatataagtcttaatg

SEQ ID NO: 3014322 - DNA, 25 bp, Homo sapien
gcactaaatacaatgcggataatcc

SEQ ID NO: 3014323 - DNA, 25 bp, Homo sapien
tcgtccttaggttcccgtcatgaag

SEQ ID NO: 3014324 - DNA, 25 bp, Homo sapien
ttccaggaatacgaagcggcccttg

SEQ ID NO: 3014325 - DNA, 25 bp, Homo sapien
ccagactcaagacgtaattattcca

SEQ ID NO: 3014326 - DNA, 25 bp, Homo sapien
caaagacggtgacgaataaagccat

SEQ ID NO: 3014327 - DNA, 25 bp, Homo sapien
agacggtgacgaataaagccatttc

SEQ ID NO: 3014328 - DNA, 25 bp, Homo sapien
gcccaaagacggtgacgaataaagc

SEQ ID NO: 3014329 - DNA, 25 bp, Homo sapien
ccaaagacggtgacgaataaagcca

SEQ ID NO: 3014330 - DNA, 25 bp, Homo sapien
ggtagattcagaaaccctttcagta

SEQ ID NO: 3014331 - DNA, 25 bp, Homo sapien
tgagtggatctggtatctcacacat

SEQ ID NO: 3014332 - DNA, 25 bp, Homo sapien
taaaagcctacaggatgttgagtgg

SEQ ID NO: 3014333 - DNA, 25 bp, Homo sapien
tcagtataaatacccaaatctccaa

SEQ ID NO: 3014334 - DNA, 25 bp, Homo sapien
gatgcactacagtgagccccaatgg

SEQ ID NO: 3014335 - DNA, 25 bp, Homo sapien
caatacgtagtgcactcccaacgct

SEQ ID NO: 3014336 - DNA, 25 bp, Homo sapien
agggccacggatgcactacagtgag

SEQ ID NO: 3014337 - DNA, 25 bp, Homo sapien
aatatgaagaaggacagggccacgg

SEQ ID NO: 3014338 - DNA, 25 bp, Homo sapien
tgggaaggcacgagattaaggaaag

SEQ ID NO: 3014339 - DNA, 25 bp, Homo sapien
ttgggaaggcacgagattaaggaaa

SEQ ID NO: 3014340 - DNA, 25 bp, Homo sapien
gtgactgcacagatcggacctcagg

SEQ ID NO: 3014341 - DNA, 25 bp, Homo sapien
tgtttcaagggctagagtcagcagc

SEQ ID NO: 3014342 - DNA, 25 bp, Homo sapien
cagtgatgggtcagaaaaggccagt

SEQ ID NO: 3014343 - DNA, 25 bp, Homo sapien
tatgccacaaaggagtgctgacagc

SEQ ID NO: 3014344 - DNA, 25 bp, Homo sapien
gctgaagggagtcctgatagaagtg

SEQ ID NO: 3014345 - DNA, 25 bp, Homo sapien
ctgaagggagtcctgatagaagtgg

SEQ ID NO: 3014346 - DNA, 25 bp, Homo sapien
ggctgaagggagtcctgatagaagt

SEQ ID NO: 3014347 - DNA, 25 bp, Homo sapien
gtggctgaagggagtcctgatagaa

SEQ ID NO: 3014348 - DNA, 25 bp, Homo sapien
ggtgctgttgaacatggagactcct

SEQ ID NO: 3014349 - DNA, 25 bp, Homo sapien
tctgggtgctgttgaacatggagac

SEQ ID NO: 3014350 - DNA, 25 bp, Homo sapien
tgggtgctgttgaacatggagactc

SEQ ID NO: 3014351 - DNA, 25 bp, Homo sapien
gctgttgaacatggagactcctgag

SEQ ID NO: 3014352 - DNA, 25 bp, Homo sapien
ccagggtgacagagagcgcggccac

SEQ ID NO: 3014353 - DNA, 25 bp, Homo sapien
gccagctccactgcaaagaggccca

SEQ ID NO: 3014354 - DNA, 25 bp, Homo sapien
agggtgacagagagcgcggccacca

SEQ ID NO: 3014355 - DNA, 25 bp, Homo sapien
ggccagctccactgcaaagaggccc

SEQ ID NO: 3014356 - DNA, 25 bp, Homo sapien
tcccaccacctcttcgttctggcca

SEQ ID NO: 3014357 - DNA, 25 bp, Homo sapien
caggcctttggacttattctaagac

SEQ ID NO: 3014358 - DNA, 25 bp, Homo sapien
tggacttattctaagacccctccac

SEQ ID NO: 3014359 - DNA, 25 bp, Homo sapien
cacctcttcgttctggccaccccgt

SEQ ID NO: 3014360 - DNA, 25 bp, Homo sapien
tgaatgtcctgcttgtcatactcct

SEQ ID NO: 3014361 - DNA, 25 bp, Homo sapien
tgtcctgcttgtcatactcctcggg

SEQ ID NO: 3014362 - DNA, 25 bp, Homo sapien
gcaggcaggcctgtatgttgctgtc

SEQ ID NO: 3014363 - DNA, 25 bp, Homo sapien
cgggggtgaacgtgagaggcaggca

SEQ ID NO: 3014364 - DNA, 25 bp, Homo sapien
ctgggagcagggcacaggaagagaa

SEQ ID NO: 3014365 - DNA, 25 bp, Homo sapien
aaaaggggcaggctgcagggcaggc

SEQ ID NO: 3014366 - DNA, 25 bp, Homo sapien
gaaaaaggggcaggctgcagggcag

SEQ ID NO: 3014367 - DNA, 25 bp, Homo sapien
tgaaaaaggggcaggctgcagggca

SEQ ID NO: 3014368 - DNA, 25 bp, Homo sapien
gtgaaaaaggggcaggctgcagggc

SEQ ID NO: 3014369 - DNA, 25 bp, Homo sapien
gattgagtgcagccgtgggtcttac

SEQ ID NO: 3014370 - DNA, 25 bp, Homo sapien
acccaagagggtaagacactgggag

SEQ ID NO: 3014371 - DNA, 25 bp, Homo sapien
taggaccactcagagatgggaatgg

SEQ ID NO: 3014372 - DNA, 25 bp, Homo sapien
gaatggggacggattgagtgcagcc

SEQ ID NO: 3014373 - DNA, 25 bp, Homo sapien
ccgggaccagaataaggtgatgacg

SEQ ID NO: 3014374 - DNA, 25 bp, Homo sapien
ggtgatgacgaccaccagatgcgcc

SEQ ID NO: 3014375 - DNA, 25 bp, Homo sapien
agatgcgccaggagcgtcaggaagc

SEQ ID NO: 3014376 - DNA, 25 bp, Homo sapien
aagcgagagggcacaagccctgaga

SEQ ID NO: 3014377 - DNA, 25 bp, Homo sapien
gagacagcgactcctgaagtctccc

SEQ ID NO: 3014378 - DNA, 25 bp, Homo sapien
gaagtctccccgcaagccgacaaat

SEQ ID NO: 3014379 - DNA, 25 bp, Homo sapien
gaagttcagagacagcgactcctga

SEQ ID NO: 3014380 - DNA, 25 bp, Homo sapien
gacaaatctagacgaacgcctcctt

SEQ ID NO: 3014381 - DNA, 25 bp, Homo sapien
gtcacagattgtcacggagcccctg

SEQ ID NO: 3014382 - DNA, 25 bp, Homo sapien
cttccttgaggaagactgatttctt

SEQ ID NO: 3014383 - DNA, 25 bp, Homo sapien
cccagctacgctgcccagttgtgga

SEQ ID NO: 3014384 - DNA, 25 bp, Homo sapien
gcagggcggatgaacggaaacccac

SEQ ID NO: 3014385 - DNA, 25 bp, Homo sapien
gagcagttctagacctctcagcaga

SEQ ID NO: 3014386 - DNA, 25 bp, Homo sapien
cagtgccgagcggattccttccaaa

SEQ ID NO: 3014387 - DNA, 25 bp, Homo sapien
ggtcgggccatcacgcatggaagaa

SEQ ID NO: 3014388 - DNA, 25 bp, Homo sapien
aatgtgcagccttcacgacgtaggc

SEQ ID NO: 3014389 - DNA, 25 bp, Homo sapien
gccacacgctgttgggtttttgctc

SEQ ID NO: 3014390 - DNA, 25 bp, Homo sapien
gggtttttgctcttcgtgcacatgg

SEQ ID NO: 3014391 - DNA, 25 bp, Homo sapien
tgcatctgccacacgctgttgggtt

SEQ ID NO: 3014392 - DNA, 25 bp, Homo sapien
gtgcacatggtacttgcgcctcgac

SEQ ID NO: 3014393 - DNA, 25 bp, Homo sapien
ttcaagcagacctaaagccccgtgt

SEQ ID NO: 3014394 - DNA, 25 bp, Homo sapien
gattagaacactccacaacaggtga

SEQ ID NO: 3014395 - DNA, 25 bp, Homo sapien
tgaaccctgagagcagtgagacgcc

SEQ ID NO: 3014396 - DNA, 25 bp, Homo sapien
tacatgtgggagtcacgtcctcacc

SEQ ID NO: 3014397 - DNA, 25 bp, Homo sapien
tacgtcggatatcccggacttggcg

SEQ ID NO: 3014398 - DNA, 25 bp, Homo sapien
gagtccacagcatcgcggtaggtct

SEQ ID NO: 3014399 - DNA, 25 bp, Homo sapien
tcctgaagacggctggagaacgagc

SEQ ID NO: 3014400 - DNA, 25 bp, Homo sapien
catgtccacggcttcacctaaggag

SEQ ID NO: 3014401 - DNA, 25 bp, Homo sapien
ctcctcgtcgttgtcttcctcctcc

SEQ ID NO: 3014402 - DNA, 25 bp, Homo sapien
cgtcgttgtcttcctcctcctgctg

SEQ ID NO: 3014403 - DNA, 25 bp, Homo sapien
tcgtcgttgtcttcctcctcctgct

SEQ ID NO: 3014404 - DNA, 25 bp, Homo sapien
cctcgtcgttgtcttcctcctcctg

SEQ ID NO: 3014405 - DNA, 25 bp, Homo sapien
tgttccgctacagccagaaggtccg

SEQ ID NO: 3014406 - DNA, 25 bp, Homo sapien
tggacgacgccgcagcttgacgtct

SEQ ID NO: 3014407 - DNA, 25 bp, Homo sapien
cagtccctcccggaggagggcttgc

SEQ ID NO: 3014408 - DNA, 25 bp, Homo sapien
gacagggaaggttcgtgctctgcac

SEQ ID NO: 3014409 - DNA, 25 bp, Homo sapien
gggcgttggtagaggcgagccgatt

SEQ ID NO: 3014410 - DNA, 25 bp, Homo sapien
gccgcaacggaggaattggttcgcc

SEQ ID NO: 3014411 - DNA, 25 bp, Homo sapien
ggctgacaatggtaaggacaggaaa

SEQ ID NO: 3014412 - DNA, 25 bp, Homo sapien
cgagccgattggcagcggctgacaa

SEQ ID NO: 3014413 - DNA, 25 bp, Homo sapien
ccccttggaggatggcgtgtgattt

SEQ ID NO: 3014414 - DNA, 25 bp, Homo sapien
tctgggctttcctatgcgtttgtca

SEQ ID NO: 3014415 - DNA, 25 bp, Homo sapien
taagagacctaaccactgaactgct

SEQ ID NO: 3014416 - DNA, 25 bp, Homo sapien
gaactgctcagagcgacccactgtg

SEQ ID NO: 3014417 - DNA, 25 bp, Homo sapien
ccttagctgacaaaggatgtggttg

SEQ ID NO: 3014418 - DNA, 25 bp, Homo sapien
tcttgaggcagtgtcatgccagcat

SEQ ID NO: 3014419 - DNA, 25 bp, Homo sapien
gccaaccctaatgatagtagctcaa

SEQ ID NO: 3014420 - DNA, 25 bp, Homo sapien
gcattcagaagtgcaactccccaga

SEQ ID NO: 3014421 - DNA, 25 bp, Homo sapien
cctgcagcttgacaaaacctgtcat

SEQ ID NO: 3014422 - DNA, 25 bp, Homo sapien
gcagcttgacaaaacctgtcattcc

SEQ ID NO: 3014423 - DNA, 25 bp, Homo sapien
caattgtcagctgtctgtatcttat

SEQ ID NO: 3014424 - DNA, 25 bp, Homo sapien
cctgaggagtccacaattgtcagct

SEQ ID NO: 3014425 - DNA, 25 bp, Homo sapien
gaggcggttccaagtaccaggtgat

SEQ ID NO: 3014426 - DNA, 25 bp, Homo sapien
tagctcagcctagcacgatgtggat

SEQ ID NO: 3014427 - DNA, 25 bp, Homo sapien
tgtttgcaagggagacggtagacca

SEQ ID NO: 3014428 - DNA, 25 bp, Homo sapien
tccctgatgtgttggtgcaatgaca

SEQ ID NO: 3014429 - DNA, 25 bp, Homo sapien
ctttggacctttctccaggatttct

SEQ ID NO: 3014430 - DNA, 25 bp, Homo sapien
ccctggaactgtgcagtcaacagta

SEQ ID NO: 3014431 - DNA, 25 bp, Homo sapien
ctgtgcagtcaacagtaatcttttc

SEQ ID NO: 3014432 - DNA, 25 bp, Homo sapien
tggaactgtgcagtcaacagtaatc

SEQ ID NO: 3014433 - DNA, 25 bp, Homo sapien
cctgtgtcagtctgtcgtcactctt

SEQ ID NO: 3014434 - DNA, 25 bp, Homo sapien
ctgacagtgcatctagttttggaaa

SEQ ID NO: 3014435 - DNA, 25 bp, Homo sapien
gtcagtctgtcgtcactcttctcca

SEQ ID NO: 3014436 - DNA, 25 bp, Homo sapien
gatctgacagtgcatctagttttgg

SEQ ID NO: 3014437 - DNA, 25 bp, Homo sapien
gatgctggtactctccattgccatg

SEQ ID NO: 3014438 - DNA, 25 bp, Homo sapien
cagcattaccacgtctttctctaga

SEQ ID NO: 3014439 - DNA, 25 bp, Homo sapien
ctgcgtgtacccagcattaccacgt

SEQ ID NO: 3014440 - DNA, 25 bp, Homo sapien
cacgtctttctctagatgctggtac

SEQ ID NO: 3014441 - DNA, 25 bp, Homo sapien
tacaaacacacgcacccgagtgaat

SEQ ID NO: 3014442 - DNA, 25 bp, Homo sapien
cacacgcacccgagtgaatgacagg

SEQ ID NO: 3014443 - DNA, 25 bp, Homo sapien
gcacccgagtgaatgacagggacca

SEQ ID NO: 3014444 - DNA, 25 bp, Homo sapien
gacatacaaacacacgcacccgagt

SEQ ID NO: 3014445 - DNA, 25 bp, Homo sapien
attgaagggcagagggaggcagcac

SEQ ID NO: 3014446 - DNA, 25 bp, Homo sapien
agattgaagggcagagggaggcagc

SEQ ID NO: 3014447 - DNA, 25 bp, Homo sapien
cgacagattgaagggcagagggagg

SEQ ID NO: 3014448 - DNA, 25 bp, Homo sapien
acagattgaagggcagagggaggca

SEQ ID NO: 3014449 - DNA, 25 bp, Homo sapien
tggcccggacccaagggtgggctga

SEQ ID NO: 3014450 - DNA, 25 bp, Homo sapien
cccatgggcacggaagcggggaact

SEQ ID NO: 3014451 - DNA, 25 bp, Homo sapien
catgggcacggaagcggggaacttt

SEQ ID NO: 3014452 - DNA, 25 bp, Homo sapien
ctcccatgggcacggaagcggggaa

SEQ ID NO: 3014453 - DNA, 25 bp, Homo sapien
gggctcccatgggcacggaagcggg

SEQ ID NO: 3014454 - DNA, 25 bp, Homo sapien
tctcattgtgcatgcgcccctcaat

SEQ ID NO: 3014455 - DNA, 25 bp, Homo sapien
gtgatgcactctcaaagggtgggtt

SEQ ID NO: 3014456 - DNA, 25 bp, Homo sapien
tgacgatgcggcgataggtctcgtt

SEQ ID NO: 3014457 - DNA, 25 bp, Homo sapien
cgataggtctcgttgtgtgatgcac

SEQ ID NO: 3014458 - DNA, 25 bp, Homo sapien
agattttctggctttatgtctctgt

SEQ ID NO: 3014459 - DNA, 25 bp, Homo sapien
ggaggggcaacgacaggcaatcaga

SEQ ID NO: 3014460 - DNA, 25 bp, Homo sapien
gaggggcaacgacaggcaatcagac

SEQ ID NO: 3014461 - DNA, 25 bp, Homo sapien
gacaggcaatcagacaaggatggac

SEQ ID NO: 3014462 - DNA, 25 bp, Homo sapien
gcaacgacaggcaatcagacaagga

SEQ ID NO: 3014463 - DNA, 25 bp, Homo sapien
actctagaatcaagtagatcctcct

SEQ ID NO: 3014464 - DNA, 25 bp, Homo sapien
ccccgcggggggcatactctagaat

SEQ ID NO: 3014465 - DNA, 25 bp, Homo sapien
cgtggctgttcgctgctcgtcaaat

SEQ ID NO: 3014466 - DNA, 25 bp, Homo sapien
gctcgtcaaatgtgcagctcttctg

SEQ ID NO: 3014467 - DNA, 25 bp, Homo sapien
gcctcaggccaaaggcataaaagag

SEQ ID NO: 3014468 - DNA, 25 bp, Homo sapien
agaggaggcctcaggccaaaggcat

SEQ ID NO: 3014469 - DNA, 25 bp, Homo sapien
gaggcctcaggccaaaggcataaaa

SEQ ID NO: 3014470 - DNA, 25 bp, Homo sapien
aggaggcctcaggccaaaggcataa

SEQ ID NO: 3014471 - DNA, 25 bp, Homo sapien
gaaaagatgataggagcaaactggg

SEQ ID NO: 3014472 - DNA, 25 bp, Homo sapien
cagagaaagcaatctggatgaagtg

SEQ ID NO: 3014473 - DNA, 25 bp, Homo sapien
caaactggggtcagacgtggcccag

SEQ ID NO: 3014474 - DNA, 25 bp, Homo sapien
gatttctggattcaaggcttgccag

SEQ ID NO: 3014475 - DNA, 25 bp, Homo sapien
ttcgatctctctgcgcagctgatgc

SEQ ID NO: 3014476 - DNA, 25 bp, Homo sapien
gcaggtgggcctggatttcgatctc

SEQ ID NO: 3014477 - DNA, 25 bp, Homo sapien
ggcttttcttctcccgagccaagta

SEQ ID NO: 3014478 - DNA, 25 bp, Homo sapien
ttctcccgagccaagtacacgtttc

SEQ ID NO: 3014479 - DNA, 25 bp, Homo sapien
ccagaggacgcccaatctcaaagtc

SEQ ID NO: 3014480 - DNA, 25 bp, Homo sapien
aaagtcatcaattgtgaagtgccgc

SEQ ID NO: 3014481 - DNA, 25 bp, Homo sapien
ggacgcccaatctcaaagtcatcaa

SEQ ID NO: 3014482 - DNA, 25 bp, Homo sapien
tcaaagtcatcaattgtgaagtgcc

SEQ ID NO: 3014483 - DNA, 25 bp, Homo sapien
taagatgtcgggtgtcccactgcta

SEQ ID NO: 3014484 - DNA, 25 bp, Homo sapien
gttaagatgtcgggtgtcccactgc

SEQ ID NO: 3014485 - DNA, 25 bp, Homo sapien
ctccatcaccttctggccaggggca

SEQ ID NO: 3014486 - DNA, 25 bp, Homo sapien
agatgtcgggtgtcccactgctatt

SEQ ID NO: 3014487 - DNA, 25 bp, Homo sapien
aggctctttccggaggactcgctgg

SEQ ID NO: 3014488 - DNA, 25 bp, Homo sapien
ctgtgggctggacattggagcggct

SEQ ID NO: 3014489 - DNA, 25 bp, Homo sapien
ggctggacattggagcggctcatga

SEQ ID NO: 3014490 - DNA, 25 bp, Homo sapien
tgcagatggggtgacaggctctttc

SEQ ID NO: 3014491 - DNA, 25 bp, Homo sapien
gcctttgtctgatgaccggggtgga

SEQ ID NO: 3014492 - DNA, 25 bp, Homo sapien
gagggtgcctttgtctgatgaccgg

SEQ ID NO: 3014493 - DNA, 25 bp, Homo sapien
ctttgtctgatgaccggggtggaat

SEQ ID NO: 3014494 - DNA, 25 bp, Homo sapien
agaaggagcagggggtagctctgag

SEQ ID NO: 3014495 - DNA, 25 bp, Homo sapien
catagtcccatattaaaatgggtta

SEQ ID NO: 3014496 - DNA, 25 bp, Homo sapien
tttcagccccttgctaaagagccac

SEQ ID NO: 3014497 - DNA, 25 bp, Homo sapien
caaagagaaacactgatgtgacagt

SEQ ID NO: 3014498 - DNA, 25 bp, Homo sapien
cagtggctcccgcagtcaggagttc

SEQ ID NO: 3014499 - DNA, 25 bp, Homo sapien
gattgggaatcatggcctgaaggcc

SEQ ID NO: 3014500 - DNA, 25 bp, Homo sapien
gtgacgagccctgcagaggtcctca

SEQ ID NO: 3014501 - DNA, 25 bp, Homo sapien
tatgtgacgagccctgcagaggtcc

SEQ ID NO: 3014502 - DNA, 25 bp, Homo sapien
ggattgggaatcatggcctgaaggc

SEQ ID NO: 3014503 - DNA, 25 bp, Homo sapien
tctgtcgtcaaacttgggacccgta

SEQ ID NO: 3014504 - DNA, 25 bp, Homo sapien
cacgttggcagcacctgacaggatg

SEQ ID NO: 3014505 - DNA, 25 bp, Homo sapien
ctggctggtcagattcacgttggca

SEQ ID NO: 3014506 - DNA, 25 bp, Homo sapien
gatgtggctacaaatgaccagagcg

SEQ ID NO: 3014507 - DNA, 25 bp, Homo sapien
gattgctcattgcaggatctcaagt

SEQ ID NO: 3014508 - DNA, 25 bp, Homo sapien
ttcccagcaggaactcgccatgcgg

SEQ ID NO: 3014509 - DNA, 25 bp, Homo sapien
agaaagtgcttaaaggattgctcat

SEQ ID NO: 3014510 - DNA, 25 bp, Homo sapien
ctttggagcataacggggaagaaag

SEQ ID NO: 3014511 - DNA, 25 bp, Homo sapien
tctgtcggccgtagggccaggggta

SEQ ID NO: 3014512 - DNA, 25 bp, Homo sapien
ctgtcggccgtagggccaggggtag

SEQ ID NO: 3014513 - DNA, 25 bp, Homo sapien
cgtctgtcggccgtagggccagggg

SEQ ID NO: 3014514 - DNA, 25 bp, Homo sapien
ccttagagagaaagggggaggagag

SEQ ID NO: 3014515 - DNA, 25 bp, Homo sapien
gaggggttggaccgatcgagccgga

SEQ ID NO: 3014516 - DNA, 25 bp, Homo sapien
gagaagggaaacagccgtgagaagc

SEQ ID NO: 3014517 - DNA, 25 bp, Homo sapien
gggttggaccgatcgagccggaagc

SEQ ID NO: 3014518 - DNA, 25 bp, Homo sapien
aagggaaacagccgtgagaagcaga

SEQ ID NO: 3014519 - DNA, 25 bp, Homo sapien
aggtcagcacactagccccaatctg

SEQ ID NO: 3014520 - DNA, 25 bp, Homo sapien
tgatctacctgatcatctgcccact

SEQ ID NO: 3014521 - DNA, 25 bp, Homo sapien
aggccagcccaacggaccctctgat

SEQ ID NO: 3014522 - DNA, 25 bp, Homo sapien
gccctgctatcgtccctacctcctt

SEQ ID NO: 3014523 - DNA, 25 bp, Homo sapien
caaggcactgctactctcccggccg

SEQ ID NO: 3014524 - DNA, 25 bp, Homo sapien
aaacaactgaatctgccacgccgcg

SEQ ID NO: 3014525 - DNA, 25 bp, Homo sapien
aaggcactgctactctcccggccgc

SEQ ID NO: 3014526 - DNA, 25 bp, Homo sapien
cccggccgcccgcaaacaactgaat

SEQ ID NO: 3014527 - DNA, 25 bp, Homo sapien
ctgccggcacatcaacgtagtgaaa

SEQ ID NO: 3014528 - DNA, 25 bp, Homo sapien
actgccggcacatcaacgtagtgaa

SEQ ID NO: 3014529 - DNA, 25 bp, Homo sapien
catgtatttgcattgccattgtctc

SEQ ID NO: 3014530 - DNA, 25 bp, Homo sapien
atgtatttgcattgccattgtctct

SEQ ID NO: 3014531 - DNA, 25 bp, Homo sapien
tcatgtatttgcattgccattgtct

SEQ ID NO: 3014532 - DNA, 25 bp, Homo sapien
tgtatttgcattgccattgtctctt

SEQ ID NO: 3014533 - DNA, 25 bp, Homo sapien
taatatccttgtgttcagtgttaag

SEQ ID NO: 3014534 - DNA, 25 bp, Homo sapien
gcagccaaaatgcacgtggtcctgg

SEQ ID NO: 3014535 - DNA, 25 bp, Homo sapien
cctgggcttctagtgactgctggga

SEQ ID NO: 3014536 - DNA, 25 bp, Homo sapien
caaaatgcacgtggtcctgggcttc

SEQ ID NO: 3014537 - DNA, 25 bp, Homo sapien
gcacccaacttctgaataacgttca

SEQ ID NO: 3014538 - DNA, 25 bp, Homo sapien
agttttgccacagggatatatcaca

SEQ ID NO: 3014539 - DNA, 25 bp, Homo sapien
tagaccttagggatacatgcgcagt

SEQ ID NO: 3014540 - DNA, 25 bp, Homo sapien
tatcctgaaaaatgtcaccgtaggt

SEQ ID NO: 3014541 - DNA, 25 bp, Homo sapien
tgaccccgacgtgatttgaacacgc

SEQ ID NO: 3014542 - DNA, 25 bp, Homo sapien
gatctggagtcagacgcgctaccgt

SEQ ID NO: 3014543 - DNA, 25 bp, Homo sapien
cgacgtgatttgaacacgcaacctt

SEQ ID NO: 3014544 - DNA, 25 bp, Homo sapien
acgcgctaccgttgcgccacgaggc

SEQ ID NO: 3014545 - DNA, 25 bp, Homo sapien
aacgggcggacttttgtcatgaagc

SEQ ID NO: 3014546 - DNA, 25 bp, Homo sapien
tgtccaacagcgtgacttgatgggt

SEQ ID NO: 3014547 - DNA, 25 bp, Homo sapien
tgacttgatgggtctgttgagcagc

SEQ ID NO: 3014548 - DNA, 25 bp, Homo sapien
tctgttgagcagcaataacgggcgg

SEQ ID NO: 3014549 - DNA, 25 bp, Homo sapien
catgtacgtaggaattaaattcatc

SEQ ID NO: 3014550 - DNA, 25 bp, Homo sapien
tgtcagcgcatttctctgaggcacc

SEQ ID NO: 3014551 - DNA, 25 bp, Homo sapien
agatgtgggcgcatgtacgtaggaa

SEQ ID NO: 3014552 - DNA, 25 bp, Homo sapien
ttgtcagcgcatttctctgaggcac

SEQ ID NO: 3014553 - DNA, 25 bp, Homo sapien
gatgataaatcatggtgtcgctgca

SEQ ID NO: 3014554 - DNA, 25 bp, Homo sapien
gacaaatcttagacgtaatcccagc

SEQ ID NO: 3014555 - DNA, 25 bp, Homo sapien
tagactgggcataaccctacaggtt

SEQ ID NO: 3014556 - DNA, 25 bp, Homo sapien
tggaatcacattgagctcgttgagc

SEQ ID NO: 3014557 - DNA, 25 bp, Homo sapien
ttttacctcgatcgctgttttcctg

SEQ ID NO: 3014558 - DNA, 25 bp, Homo sapien
gacggcagccattacttttacctcg

SEQ ID NO: 3014559 - DNA, 25 bp, Homo sapien
cgctgggcagacgacggcagccatt

SEQ ID NO: 3014560 - DNA, 25 bp, Homo sapien
tgttttcctggatccgcacgggtcc

SEQ ID NO: 3014561 - DNA, 25 bp, Homo sapien
ggtctcccgcgtgacaggcggggat

SEQ ID NO: 3014562 - DNA, 25 bp, Homo sapien
tcgaaccccggtctcccgcgtgaca

SEQ ID NO: 3014563 - DNA, 25 bp, Homo sapien
cgaaccccggtctcccgcgtgacag

SEQ ID NO: 3014564 - DNA, 25 bp, Homo sapien
tcccgcgtgacaggcggggatactc

SEQ ID NO: 3014565 - DNA, 25 bp, Homo sapien
aaacgctgaccagaaaccgtaggtg

SEQ ID NO: 3014566 - DNA, 25 bp, Homo sapien
tcttccaaccactgataaacgctga

SEQ ID NO: 3014567 - DNA, 25 bp, Homo sapien
gactttacactctgcgtgctgacag

SEQ ID NO: 3014568 - DNA, 25 bp, Homo sapien
gatctgagactttacactctgcgtg

SEQ ID NO: 3014569 - DNA, 25 bp, Homo sapien
tcagatggagtgaccgaaagagaca

SEQ ID NO: 3014570 - DNA, 25 bp, Homo sapien
caatcgtcagatggagtgaccgaaa

SEQ ID NO: 3014571 - DNA, 25 bp, Homo sapien
tcaggcaccaatcgtcagatggagt

SEQ ID NO: 3014572 - DNA, 25 bp, Homo sapien
atggagtgaccgaaagagacagagt

SEQ ID NO: 3014573 - DNA, 25 bp, Homo sapien
gagatgctttctgctaccgcggtgc

SEQ ID NO: 3014574 - DNA, 25 bp, Homo sapien
gcgtgtcaatcaaagcgaaaccagg

SEQ ID NO: 3014575 - DNA, 25 bp, Homo sapien
ccgcggtgccacaaaagagcttact

SEQ ID NO: 3014576 - DNA, 25 bp, Homo sapien
gcagcgctggtcaggtaacctattc

SEQ ID NO: 3014577 - DNA, 25 bp, Homo sapien
ggacctctcgcacccgaagcgagaa

SEQ ID NO: 3014578 - DNA, 25 bp, Homo sapien
ctctcgcacccgaagcgagaatcat

SEQ ID NO: 3014579 - DNA, 25 bp, Homo sapien
tgaacccgggacctctcgcacccga

SEQ ID NO: 3014580 - DNA, 25 bp, Homo sapien
cccgggacctctcgcacccgaagcg

SEQ ID NO: 3014581 - DNA, 25 bp, Homo sapien
tccactatgcatggcggaacggtcc

SEQ ID NO: 3014582 - DNA, 25 bp, Homo sapien
cgactgccttgaacacccgggttgt

SEQ ID NO: 3014583 - DNA, 25 bp, Homo sapien
gacttggtgccattccgtaacctgg

SEQ ID NO: 3014584 - DNA, 25 bp, Homo sapien
caggcttgctgtagtgctgggtcca

SEQ ID NO: 3014585 - DNA, 25 bp, Homo sapien
gggccaggccgttcctaatgcccaa

SEQ ID NO: 3014586 - DNA, 25 bp, Homo sapien
gctcttactccggagctgcccagag

SEQ ID NO: 3014587 - DNA, 25 bp, Homo sapien
cattttgttctacaccccagttgtg

SEQ ID NO: 3014588 - DNA, 25 bp, Homo sapien
gggtcggtagcagaccacgtgtcct

SEQ ID NO: 3014589 - DNA, 25 bp, Homo sapien
gcatccctggcttgacctggaggta

SEQ ID NO: 3014590 - DNA, 25 bp, Homo sapien
gcttggcacaaacgtggtctcggca

SEQ ID NO: 3014591 - DNA, 25 bp, Homo sapien
tacagtgccgttagtgctgaaaggg

SEQ ID NO: 3014592 - DNA, 25 bp, Homo sapien
catcttacattggttcgtgggccat

SEQ ID NO: 3014593 - DNA, 25 bp, Homo sapien
tgacatcccgctggtggagagggat

SEQ ID NO: 3014594 - DNA, 25 bp, Homo sapien
cctgacatcccgctggtggagaggg

SEQ ID NO: 3014595 - DNA, 25 bp, Homo sapien
catcccgctggtggagagggatgga

SEQ ID NO: 3014596 - DNA, 25 bp, Homo sapien
gacatcccgctggtggagagggatg

SEQ ID NO: 3014597 - DNA, 25 bp, Homo sapien
gcatcagttaagcaaaggaccctta

SEQ ID NO: 3014598 - DNA, 25 bp, Homo sapien
catgaaaggatgtggatttagccgc

SEQ ID NO: 3014599 - DNA, 25 bp, Homo sapien
ggacccttaggcctatgcaacattt

SEQ ID NO: 3014600 - DNA, 25 bp, Homo sapien
tagagaaccaccttttagagtggcg

SEQ ID NO: 3014601 - DNA, 25 bp, Homo sapien
aaggcaccgctgggattcgaaccca

SEQ ID NO: 3014602 - DNA, 25 bp, Homo sapien
gcgctttaaccaactaagccacggc

SEQ ID NO: 3014603 - DNA, 25 bp, Homo sapien
caggcgctttaaccaactaagccac

SEQ ID NO: 3014604 - DNA, 25 bp, Homo sapien
gctttaaccaactaagccacggcgc

SEQ ID NO: 3014605 - DNA, 25 bp, Homo sapien
aatatagagctaggaacccggaccg

SEQ ID NO: 3014606 - DNA, 25 bp, Homo sapien
acccggaccgagctttttcagatct

SEQ ID NO: 3014607 - DNA, 25 bp, Homo sapien
aactggctcttgcatcacttgtcca

SEQ ID NO: 3014608 - DNA, 25 bp, Homo sapien
aattcatctacaagaatatagagct

SEQ ID NO: 3014609 - DNA, 25 bp, Homo sapien
atggatttctagtccatcgccttaa

SEQ ID NO: 3014610 - DNA, 25 bp, Homo sapien
cccaatggatttctagtccatcgcc

SEQ ID NO: 3014611 - DNA, 25 bp, Homo sapien
agaccccaatggatttctagtccat

SEQ ID NO: 3014612 - DNA, 25 bp, Homo sapien
acgtagtcggcaggattcgaacctg

SEQ ID NO: 3014613 - DNA, 25 bp, Homo sapien
aggcaactggctccgggtagaaact

SEQ ID NO: 3014614 - DNA, 25 bp, Homo sapien
cttccggataacagcagagggtcag

SEQ ID NO: 3014615 - DNA, 25 bp, Homo sapien
ttctgttaccagaaggcaactggct

SEQ ID NO: 3014616 - DNA, 25 bp, Homo sapien
gggtagaaacttccggataacagca

SEQ ID NO: 3014617 - DNA, 25 bp, Homo sapien
cgctctaaccaactgagctaaccgg

SEQ ID NO: 3014618 - DNA, 25 bp, Homo sapien
acccgcgaccttggcgttattagca

SEQ ID NO: 3014619 - DNA, 25 bp, Homo sapien
cacgctctaaccaactgagctaacc

SEQ ID NO: 3014620 - DNA, 25 bp, Homo sapien
tggcgttattagcaccacgctctaa

SEQ ID NO: 3014621 - DNA, 25 bp, Homo sapien
gatcaaggatctgccttaggccagg

SEQ ID NO: 3014622 - DNA, 25 bp, Homo sapien
taacagccaggaagaaatggcctcc

SEQ ID NO: 3014623 - DNA, 25 bp, Homo sapien
cagtagctctgaaagatgtgcctca

SEQ ID NO: 3014624 - DNA, 25 bp, Homo sapien
tatcagtccccagtaaagaaatgca

SEQ ID NO: 3014625 - DNA, 25 bp, Homo sapien
gccctggcggcaaagggctgaaatg

SEQ ID NO: 3014626 - DNA, 25 bp, Homo sapien
ttggccctggcggcaaagggctgaa

SEQ ID NO: 3014627 - DNA, 25 bp, Homo sapien
tggccctggcggcaaagggctgaaa

SEQ ID NO: 3014628 - DNA, 25 bp, Homo sapien
cctggcggcaaagggctgaaatgat

SEQ ID NO: 3014629 - DNA, 25 bp, Homo sapien
tcaggttttcagcaaggaaggactc

SEQ ID NO: 3014630 - DNA, 25 bp, Homo sapien
tgcgacaaagtcagaacccaggtgc

SEQ ID NO: 3014631 - DNA, 25 bp, Homo sapien
caccagagggcttcattgcaggtca

SEQ ID NO: 3014632 - DNA, 25 bp, Homo sapien
gaccccagagatgagtaccagtgag

SEQ ID NO: 3014633 - DNA, 25 bp, Homo sapien
tagaaaggcaggacaatcggagcct

SEQ ID NO: 3014634 - DNA, 25 bp, Homo sapien
gagctggagtactctgactctcgga

SEQ ID NO: 3014635 - DNA, 25 bp, Homo sapien
gaggaagcaaggatccccagagagc

SEQ ID NO: 3014636 - DNA, 25 bp, Homo sapien
cactggaatcgctgtagccgaggag

SEQ ID NO: 3014637 - DNA, 25 bp, Homo sapien
taatgggacgatcttcgacggtttc

SEQ ID NO: 3014638 - DNA, 25 bp, Homo sapien
cagaggggctagtacaaagtgtcca

SEQ ID NO: 3014639 - DNA, 25 bp, Homo sapien
atggtcatgggctcgtcaaccctgg

SEQ ID NO: 3014640 - DNA, 25 bp, Homo sapien
aaagcacaataggacggaggacaga

SEQ ID NO: 3014641 - DNA, 25 bp, Homo sapien
aaactgcaagaccactctgcctggc

SEQ ID NO: 3014642 - DNA, 25 bp, Homo sapien
gcacttggacgaaatctaggaggga

SEQ ID NO: 3014643 - DNA, 25 bp, Homo sapien
cctggcacttggacgaaatctagga

SEQ ID NO: 3014644 - DNA, 25 bp, Homo sapien
aggagggaggcccactctctaggac

SEQ ID NO: 3014645 - DNA, 25 bp, Homo sapien
ggcagtcccatcctccaccaggagc

SEQ ID NO: 3014646 - DNA, 25 bp, Homo sapien
ggcttcggcagtcccatcctccacc

SEQ ID NO: 3014647 - DNA, 25 bp, Homo sapien
cttcggcagtcccatcctccaccag

SEQ ID NO: 3014648 - DNA, 25 bp, Homo sapien
cacggcttcggcagtcccatcctcc

SEQ ID NO: 3014649 - DNA, 25 bp, Homo sapien
ctgatgatggcctggcttatagctg

SEQ ID NO: 3014650 - DNA, 25 bp, Homo sapien
tgatgatggcctggcttatagctgt

SEQ ID NO: 3014651 - DNA, 25 bp, Homo sapien
agtggagcccaggcgagtgcacttt

SEQ ID NO: 3014652 - DNA, 25 bp, Homo sapien
tggagcccaggcgagtgcactttcc

SEQ ID NO: 3014653 - DNA, 25 bp, Homo sapien
gtggagcccaggcgagtgcactttc

SEQ ID NO: 3014654 - DNA, 25 bp, Homo sapien
aagtggagcccaggcgagtgcactt

SEQ ID NO: 3014655 - DNA, 25 bp, Homo sapien
ctgggatgaagacagtggttggaaa

SEQ ID NO: 3014656 - DNA, 25 bp, Homo sapien
tccctctggcactccatactcagtt

SEQ ID NO: 3014657 - DNA, 25 bp, Homo sapien
ggatgaagacagtggttggaaaagt

SEQ ID NO: 3014658 - DNA, 25 bp, Homo sapien
atcacatccctctggcactccatac

SEQ ID NO: 3014659 - DNA, 25 bp, Homo sapien
acgatatggcaagaggcagtggcct

SEQ ID NO: 3014660 - DNA, 25 bp, Homo sapien
aggctgaagacagagacgatatggc

SEQ ID NO: 3014661 - DNA, 25 bp, Homo sapien
gaccaccctgcagaagttcagccag

SEQ ID NO: 3014662 - DNA, 25 bp, Homo sapien
agacagagacgatatggcaagaggc

SEQ ID NO: 3014663 - DNA, 25 bp, Homo sapien
agtgggttccatgcgctcctagaag

SEQ ID NO: 3014664 - DNA, 25 bp, Homo sapien
caggggtcaagataacagaacaggc

SEQ ID NO: 3014665 - DNA, 25 bp, Homo sapien
tcctgatctctgatagtcattggtt

SEQ ID NO: 3014666 - DNA, 25 bp, Homo sapien
tagaaggacttagagggcatcagga

SEQ ID NO: 3014667 - DNA, 25 bp, Homo sapien
gattggagaagactgtaatgatggc

SEQ ID NO: 3014668 - DNA, 25 bp, Homo sapien
ctctgactcaacacatcttgttggg

SEQ ID NO: 3014669 - DNA, 25 bp, Homo sapien
gactcaacacatcttgttgggattg

SEQ ID NO: 3014670 - DNA, 25 bp, Homo sapien
tcagaaccagggacatgtgggagat

SEQ ID NO: 3014671 - DNA, 25 bp, Homo sapien
gcacataagtggatgaccggaaaca

SEQ ID NO: 3014672 - DNA, 25 bp, Homo sapien
cataagtggatgaccggaaacaaca

SEQ ID NO: 3014673 - DNA, 25 bp, Homo sapien
agtggatgaccggaaacaacaataa

SEQ ID NO: 3014674 - DNA, 25 bp, Homo sapien
tggatgaccggaaacaacaataaac

SEQ ID NO: 3014675 - DNA, 25 bp, Homo sapien
tagtgagtgaccaggaagacaaggc

SEQ ID NO: 3014676 - DNA, 25 bp, Homo sapien
tccagagagccacatcagtagcaag

SEQ ID NO: 3014677 - DNA, 25 bp, Homo sapien
cagcctgcaacacctcgtgagggta

SEQ ID NO: 3014678 - DNA, 25 bp, Homo sapien
agccatggctctaccaaagctaggg

SEQ ID NO: 3014679 - DNA, 25 bp, Homo sapien
tccaactggctgaagtggacccggg

SEQ ID NO: 3014680 - DNA, 25 bp, Homo sapien
caagagcgactgttagcttcacaca

SEQ ID NO: 3014681 - DNA, 25 bp, Homo sapien
ggaggcaagtgtgggtcttctatat

SEQ ID NO: 3014682 - DNA, 25 bp, Homo sapien
ccgggctcctggaagtagtcctagt

SEQ ID NO: 3014683 - DNA, 25 bp, Homo sapien
tgacaaaatctcagcggagaaagac

SEQ ID NO: 3014684 - DNA, 25 bp, Homo sapien
cagcggagaaagacaccaaggaatc

SEQ ID NO: 3014685 - DNA, 25 bp, Homo sapien
gtttcatccagagagacgccacaag

SEQ ID NO: 3014686 - DNA, 25 bp, Homo sapien
cgccacaaggggttcacatagtgtc

SEQ ID NO: 3014687 - DNA, 25 bp, Homo sapien
gagctttcaagctccagagtccagt

SEQ ID NO: 3014688 - DNA, 25 bp, Homo sapien
cagaggacgccgagatatgcaggat

SEQ ID NO: 3014689 - DNA, 25 bp, Homo sapien
ttgtcactgagcaggtcggtcagtg

SEQ ID NO: 3014690 - DNA, 25 bp, Homo sapien
ggattcaggcaatgacttgtttgca

SEQ ID NO: 3014691 - DNA, 25 bp, Homo sapien
ccagcggactgaagagccaaagaaa

SEQ ID NO: 3014692 - DNA, 25 bp, Homo sapien
gggtgcaagaactcaaaccagcgga

SEQ ID NO: 3014693 - DNA, 25 bp, Homo sapien
ggagctatgagtcggtacacctgtc

SEQ ID NO: 3014694 - DNA, 25 bp, Homo sapien
tcggtacacctgtcccgggtgcaag

SEQ ID NO: 3014695 - DNA, 25 bp, Homo sapien
acacatagaaactgagggcgggctt

SEQ ID NO: 3014696 - DNA, 25 bp, Homo sapien
cacatagaaactgagggcgggcttg

SEQ ID NO: 3014697 - DNA, 25 bp, Homo sapien
cttcctctgggtgcccccaagccag

SEQ ID NO: 3014698 - DNA, 25 bp, Homo sapien
catagaaactgagggcgggcttggg

SEQ ID NO: 3014699 - DNA, 25 bp, Homo sapien
tcatgagggcctccttgtggcagag

SEQ ID NO: 3014700 - DNA, 25 bp, Homo sapien
gggacacaaaaattacgcttcatga

SEQ ID NO: 3014701 - DNA, 25 bp, Homo sapien
tggcagagcaagaagagccggctct

SEQ ID NO: 3014702 - DNA, 25 bp, Homo sapien
ctctgggccggtgggatctgtctga

SEQ ID NO: 3014703 - DNA, 25 bp, Homo sapien
tgggcacaggcaggatcagggcatc

SEQ ID NO: 3014704 - DNA, 25 bp, Homo sapien
acaggcaggatcagggcatcagcca

SEQ ID NO: 3014705 - DNA, 25 bp, Homo sapien
atcagggcatcagccagaaagaact

SEQ ID NO: 3014706 - DNA, 25 bp, Homo sapien
agccagaaagaactggacatagact

SEQ ID NO: 3014707 - DNA, 25 bp, Homo sapien
ggcctgctgcttctggatgaagcct

SEQ ID NO: 3014708 - DNA, 25 bp, Homo sapien
ctgctgcttctggatgaagcctggc

SEQ ID NO: 3014709 - DNA, 25 bp, Homo sapien
gctgcttctggatgaagcctggcat

SEQ ID NO: 3014710 - DNA, 25 bp, Homo sapien
gcctgctgcttctggatgaagcctg

SEQ ID NO: 3014711 - DNA, 25 bp, Homo sapien
aagctgcttctcacgtccctctcta

SEQ ID NO: 3014712 - DNA, 25 bp, Homo sapien
tgcttctcacgtccctctctacgat

SEQ ID NO: 3014713 - DNA, 25 bp, Homo sapien
tcacgtccctctctacgatcaactg

SEQ ID NO: 3014714 - DNA, 25 bp, Homo sapien
gtccctctctacgatcaactgaaac

SEQ ID NO: 3014715 - DNA, 25 bp, Homo sapien
gtggggtgggttgcaaggcaaacca

SEQ ID NO: 3014716 - DNA, 25 bp, Homo sapien
tcttctttccacatctgaactccaa

SEQ ID NO: 3014717 - DNA, 25 bp, Homo sapien
ttctttccacatctgaactccaaac

SEQ ID NO: 3014718 - DNA, 25 bp, Homo sapien
catcttctttccacatctgaactcc

SEQ ID NO: 3014719 - DNA, 25 bp, Homo sapien
cttctttccacatctgaactccaaa

SEQ ID NO: 3014720 - DNA, 25 bp, Homo sapien
gaaccactttggtcccgaagttgca

SEQ ID NO: 3014721 - DNA, 25 bp, Homo sapien
gttgcagacaacctttatgagatga

SEQ ID NO: 3014722 - DNA, 25 bp, Homo sapien
aacctttatgagatgaagccaccag

SEQ ID NO: 3014723 - DNA, 25 bp, Homo sapien
tggtcccgaagttgcagacaacctt

SEQ ID NO: 3014724 - DNA, 25 bp, Homo sapien
ggcagaaggcagagggcagcagaca

SEQ ID NO: 3014725 - DNA, 25 bp, Homo sapien
ctgggctgggcagaaggcagagggc

SEQ ID NO: 3014726 - DNA, 25 bp, Homo sapien
agaaggcagagggcagcagacagag

SEQ ID NO: 3014727 - DNA, 25 bp, Homo sapien
tgggctgggcagaaggcagagggca

SEQ ID NO: 3014728 - DNA, 25 bp, Homo sapien
gcagaagggccttagggtcaaagga

SEQ ID NO: 3014729 - DNA, 25 bp, Homo sapien
aagccaggcggcgattgagttggca

SEQ ID NO: 3014730 - DNA, 25 bp, Homo sapien
cggcgattgagttggcagctgggca

SEQ ID NO: 3014731 - DNA, 25 bp, Homo sapien
aggaccaagccaggcggcgattgag

SEQ ID NO: 3014732 - DNA, 25 bp, Homo sapien
agggaagagaaatcgggtgtgtgtc

SEQ ID NO: 3014733 - DNA, 25 bp, Homo sapien
gaagagaaatcgggtgtgtgtccca

SEQ ID NO: 3014734 - DNA, 25 bp, Homo sapien
ggagggaagagaaatcgggtgtgtg

SEQ ID NO: 3014735 - DNA, 25 bp, Homo sapien
aagagaaatcgggtgtgtgtcccat

SEQ ID NO: 3014736 - DNA, 25 bp, Homo sapien
gaactggtggtgtctcagcacatgg

SEQ ID NO: 3014737 - DNA, 25 bp, Homo sapien
tgtgtgcattccgaacagggctgcc

SEQ ID NO: 3014738 - DNA, 25 bp, Homo sapien
acagtgatgtggctcttcaaggatc

SEQ ID NO: 3014739 - DNA, 25 bp, Homo sapien
gctagaagatccagggtaggagcca

SEQ ID NO: 3014740 - DNA, 25 bp, Homo sapien
gaagtcctaactgacgttcccacac

SEQ ID NO: 3014741 - DNA, 25 bp, Homo sapien
gggccttggtagcccacaggtagag

SEQ ID NO: 3014742 - DNA, 25 bp, Homo sapien
ccagggccttggtagcccacaggta

SEQ ID NO: 3014743 - DNA, 25 bp, Homo sapien
ggaagtcctaactgacgttcccaca

SEQ ID NO: 3014744 - DNA, 25 bp, Homo sapien
gcttgacgggatgagtgagccccag

SEQ ID NO: 3014745 - DNA, 25 bp, Homo sapien
gggcgagcactggccttcttgtccc

SEQ ID NO: 3014746 - DNA, 25 bp, Homo sapien
ctcgtacagggaggccccgtaggct

SEQ ID NO: 3014747 - DNA, 25 bp, Homo sapien
tttgaagcagaacggcgccacggag

SEQ ID NO: 3014748 - DNA, 25 bp, Homo sapien
agctgcccatccagctcatagaggc

SEQ ID NO: 3014749 - DNA, 25 bp, Homo sapien
actgctggtaggcaaggcagagccc

SEQ ID NO: 3014750 - DNA, 25 bp, Homo sapien
cgcctaaggccacggaactgctggt

SEQ ID NO: 3014751 - DNA, 25 bp, Homo sapien
tgcagacacactccaggtcgcatca

SEQ ID NO: 3014752 - DNA, 25 bp, Homo sapien
cagcctctaagaggggtccttccag

SEQ ID NO: 3014753 - DNA, 25 bp, Homo sapien
agctcctgcacacattctggtttca

SEQ ID NO: 3014754 - DNA, 25 bp, Homo sapien
atccttcttgtcctccgagttgctg

SEQ ID NO: 3014755 - DNA, 25 bp, Homo sapien
ggataggagtctagaataccggaca

SEQ ID NO: 3014756 - DNA, 25 bp, Homo sapien
atgctggcgctgaccacggatcttg

SEQ ID NO: 3014757 - DNA, 25 bp, Homo sapien
ggatcttggacactcgcagttctgt

SEQ ID NO: 3014758 - DNA, 25 bp, Homo sapien
gctgaccacggatcttggacactcg

SEQ ID NO: 3014759 - DNA, 25 bp, Homo sapien
cacggatcttggacactcgcagttc

SEQ ID NO: 3014760 - DNA, 25 bp, Homo sapien
caggccgaagggctctgtgccacac

SEQ ID NO: 3014761 - DNA, 25 bp, Homo sapien
gccgaagggctctgtgccacaccag

SEQ ID NO: 3014762 - DNA, 25 bp, Homo sapien
tgtaccaggccgaagggctctgtgc

SEQ ID NO: 3014763 - DNA, 25 bp, Homo sapien
gtaccaggccgaagggctctgtgcc

SEQ ID NO: 3014764 - DNA, 25 bp, Homo sapien
ctgcacgatgatggacacgtgggtg

SEQ ID NO: 3014765 - DNA, 25 bp, Homo sapien
acgatgatggacacgtgggtgacag

SEQ ID NO: 3014766 - DNA, 25 bp, Homo sapien
cacgatgatggacacgtgggtgaca

SEQ ID NO: 3014767 - DNA, 25 bp, Homo sapien
gcacgatgatggacacgtgggtgac

SEQ ID NO: 3014768 - DNA, 25 bp, Homo sapien
ggtttcgctgcacacctctgagctt

SEQ ID NO: 3014769 - DNA, 25 bp, Homo sapien
caccagagcactcaatcgaactaga

SEQ ID NO: 3014770 - DNA, 25 bp, Homo sapien
gacaggatgaagtaagctttctgtt

SEQ ID NO: 3014771 - DNA, 25 bp, Homo sapien
tagactcccagccaggtttcgctgc

SEQ ID NO: 3014772 - DNA, 25 bp, Homo sapien
ttctctttcccttaggtaaggcaca

SEQ ID NO: 3014773 - DNA, 25 bp, Homo sapien
ttcagttttacagcgcccctgccat

SEQ ID NO: 3014774 - DNA, 25 bp, Homo sapien
ccaaagcaagctatgctaaaaacct

SEQ ID NO: 3014775 - DNA, 25 bp, Homo sapien
gatacaaaatgtccatagcccaaag

SEQ ID NO: 3014776 - DNA, 25 bp, Homo sapien
ggactgatggtcaaaggaaacactg

SEQ ID NO: 3014777 - DNA, 25 bp, Homo sapien
aggacagggataggcgtgacggggc

SEQ ID NO: 3014778 - DNA, 25 bp, Homo sapien
ggataggcgtgacggggccaggact

SEQ ID NO: 3014779 - DNA, 25 bp, Homo sapien
ccaggactgatggtcaaaggaaaca

SEQ ID NO: 3014780 - DNA, 25 bp, Homo sapien
aacagaaaaagatggcccaaccaag

SEQ ID NO: 3014781 - DNA, 25 bp, Homo sapien
cagaaaaagatggcccaaccaagaa

SEQ ID NO: 3014782 - DNA, 25 bp, Homo sapien
ggaacagaaaaagatggcccaacca

SEQ ID NO: 3014783 - DNA, 25 bp, Homo sapien
gaacagaaaaagatggcccaaccaa

SEQ ID NO: 3014784 - DNA, 25 bp, Homo sapien
tgcactactgctccacgacaggtgg

SEQ ID NO: 3014785 - DNA, 25 bp, Homo sapien
ccaagtctgccgataggtctgttag

SEQ ID NO: 3014786 - DNA, 25 bp, Homo sapien
ggcccaggcctggtatgcactactg

SEQ ID NO: 3014787 - DNA, 25 bp, Homo sapien
tcttgaggtcctgtactgagacgaa

SEQ ID NO: 3014788 - DNA, 25 bp, Homo sapien
ctgggacaaccagacagtcttcaca

SEQ ID NO: 3014789 - DNA, 25 bp, Homo sapien
gagtcaactggacattaggctcctt

SEQ ID NO: 3014790 - DNA, 25 bp, Homo sapien
gacacagggtcttttggatgaagac

SEQ ID NO: 3014791 - DNA, 25 bp, Homo sapien
cagacagtcttcacacaatcaatta

SEQ ID NO: 3014792 - DNA, 25 bp, Homo sapien
ctggccatccagctttggtcttgcc

SEQ ID NO: 3014793 - DNA, 25 bp, Homo sapien
cgtagacagctggccatccagcttt

SEQ ID NO: 3014794 - DNA, 25 bp, Homo sapien
cttgcccctttctctaacaaacttg

SEQ ID NO: 3014795 - DNA, 25 bp, Homo sapien
tgcccctttctctaacaaacttgta

SEQ ID NO: 3014796 - DNA, 25 bp, Homo sapien
ggacctgggcccggccagccgccat

SEQ ID NO: 3014797 - DNA, 25 bp, Homo sapien
gggacctgggcccggccagccgcca

SEQ ID NO: 3014798 - DNA, 25 bp, Homo sapien
tattgcaaagcactgtcaccggcct

SEQ ID NO: 3014799 - DNA, 25 bp, Homo sapien
tagctcaagccacgcatgtgtgagg

SEQ ID NO: 3014800 - DNA, 25 bp, Homo sapien
cctcagggagtttatgtgtaataga

SEQ ID NO: 3014801 - DNA, 25 bp, Homo sapien
ctaaccctttagtatgctggaattc

SEQ ID NO: 3014802 - DNA, 25 bp, Homo sapien
gctgggtcaatagcgctgctcaaat

SEQ ID NO: 3014803 - DNA, 25 bp, Homo sapien
catgaacccagggtcatgatgacct

SEQ ID NO: 3014804 - DNA, 25 bp, Homo sapien
aagttcatcattaaccacgtatggg

SEQ ID NO: 3014805 - DNA, 25 bp, Homo sapien
gagaggttatttcagtagcaccaca

SEQ ID NO: 3014806 - DNA, 25 bp, Homo sapien
cacttgaaaaggacgaggaggccag

SEQ ID NO: 3014807 - DNA, 25 bp, Homo sapien
tcaagagaccctacctagacgtggg

SEQ ID NO: 3014808 - DNA, 25 bp, Homo sapien
cccagcagcagatctatgaattagc

SEQ ID NO: 3014809 - DNA, 25 bp, Homo sapien
gaggcccagaacaccgtgaaactat

SEQ ID NO: 3014810 - DNA, 25 bp, Homo sapien
ccattgacgtaaggtgagaaggccg

SEQ ID NO: 3014811 - DNA, 25 bp, Homo sapien
caaatcttaaaggatccgggagcta

SEQ ID NO: 3014812 - DNA, 25 bp, Homo sapien
tcttggcgccgattggccaacgaga

SEQ ID NO: 3014813 - DNA, 25 bp, Homo sapien
gatgccacgtgacccaatgtggact

SEQ ID NO: 3014814 - DNA, 25 bp, Homo sapien
aagttttctgccatcccgtgacgga

SEQ ID NO: 3014815 - DNA, 25 bp, Homo sapien
cagtttggagaacctggccctgagg

SEQ ID NO: 3014816 - DNA, 25 bp, Homo sapien
gatagtggaacttctcgagctgcag

SEQ ID NO: 3014817 - DNA, 25 bp, Homo sapien
cccgagagtgtgtaatgtcctggaa

SEQ ID NO: 3014818 - DNA, 25 bp, Homo sapien
tcaatcagcccccgtaaggaggaag

SEQ ID NO: 3014819 - DNA, 25 bp, Homo sapien
ttcaatcagcccccgtaaggaggaa

SEQ ID NO: 3014820 - DNA, 25 bp, Homo sapien
cttcaatcagcccccgtaaggagga

SEQ ID NO: 3014821 - DNA, 25 bp, Homo sapien
caatcagcccccgtaaggaggaagg

SEQ ID NO: 3014822 - DNA, 25 bp, Homo sapien
catgactgggttcccaggagaatcg

SEQ ID NO: 3014823 - DNA, 25 bp, Homo sapien
atgactgggttcccaggagaatcgg

SEQ ID NO: 3014824 - DNA, 25 bp, Homo sapien
tcatgactgggttcccaggagaatc

SEQ ID NO: 3014825 - DNA, 25 bp, Homo sapien
tgactgggttcccaggagaatcggg

SEQ ID NO: 3014826 - DNA, 25 bp, Homo sapien
cagggagactcactggtgggatcct

SEQ ID NO: 3014827 - DNA, 25 bp, Homo sapien
tctcttggccccgaaaatctgtcac

SEQ ID NO: 3014828 - DNA, 25 bp, Homo sapien
gggtaactgatacccaggtcctctg

SEQ ID NO: 3014829 - DNA, 25 bp, Homo sapien
cctggatgatgttctgtctccatct

SEQ ID NO: 3014830 - DNA, 25 bp, Homo sapien
cctgggtgactttgaacagctggtg

SEQ ID NO: 3014831 - DNA, 25 bp, Homo sapien
tggtccccagtaaaggcgctgaagc

SEQ ID NO: 3014832 - DNA, 25 bp, Homo sapien
ctgaagcactgcatgatgttgctga

SEQ ID NO: 3014833 - DNA, 25 bp, Homo sapien
ctaacatctttggtccccagtaaag

SEQ ID NO: 3014834 - DNA, 25 bp, Homo sapien
tgcatgatgttgctgagaacttggg

SEQ ID NO: 3014835 - DNA, 25 bp, Homo sapien
ctttgaatctaacaggacacctggg

SEQ ID NO: 3014836 - DNA, 25 bp, Homo sapien
cacaagtggccaaggagtgctcatt

SEQ ID NO: 3014837 - DNA, 25 bp, Homo sapien
gagtttaaaactgtgcatgggagca

SEQ ID NO: 3014838 - DNA, 25 bp, Homo sapien
tacactttgggatgactcgttcagc

SEQ ID NO: 3014839 - DNA, 25 bp, Homo sapien
gaggcacctatacccttgtacatgc

SEQ ID NO: 3014840 - DNA, 25 bp, Homo sapien
gggagcgcagctggtcccagaagaa

SEQ ID NO: 3014841 - DNA, 25 bp, Homo sapien
gggccgaggcggaagtaggaggcac

SEQ ID NO: 3014842 - DNA, 25 bp, Homo sapien
gaagtaggaggcacctatacccttg

SEQ ID NO: 3014843 - DNA, 25 bp, Homo sapien
ctcggtccgagctgtctgcagcaga

SEQ ID NO: 3014844 - DNA, 25 bp, Homo sapien
caaaaatgccctcggtccgagctgt

SEQ ID NO: 3014845 - DNA, 25 bp, Homo sapien
gtctgcagcagagcgtccagtatcc

SEQ ID NO: 3014846 - DNA, 25 bp, Homo sapien
agcgtccagtatcccccggtacatg

SEQ ID NO: 3014847 - DNA, 25 bp, Homo sapien
tgcaggccacatcaaagggtgccat

SEQ ID NO: 3014848 - DNA, 25 bp, Homo sapien
gcaggccacatcaaagggtgccatg

SEQ ID NO: 3014849 - DNA, 25 bp, Homo sapien
atctgtgggctggttgtagagcctt

SEQ ID NO: 3014850 - DNA, 25 bp, Homo sapien
tgtgcaggccacatcaaagggtgcc

SEQ ID NO: 3014851 - DNA, 25 bp, Homo sapien
caatctcggttagcgcctgaaacat

SEQ ID NO: 3014852 - DNA, 25 bp, Homo sapien
tgggtggaggaaccgacgataactc

SEQ ID NO: 3014853 - DNA, 25 bp, Homo sapien
caccagaccatgtttctggccaatc

SEQ ID NO: 3014854 - DNA, 25 bp, Homo sapien
tgagaaggtgcacagctgggtggag

SEQ ID NO: 3014855 - DNA, 25 bp, Homo sapien
tgccctacagcaatttctgaggctg

SEQ ID NO: 3014856 - DNA, 25 bp, Homo sapien
gccctacagcaatttctgaggctgc

SEQ ID NO: 3014857 - DNA, 25 bp, Homo sapien
ttatactggtgccctacagcaattt

SEQ ID NO: 3014858 - DNA, 25 bp, Homo sapien
catcaggaactggtacaagagggcg

SEQ ID NO: 3014859 - DNA, 25 bp, Homo sapien
tgatgaaggcatggaagacatttcg

SEQ ID NO: 3014860 - DNA, 25 bp, Homo sapien
tcggtagtgccgctggtatgtgcca

SEQ ID NO: 3014861 - DNA, 25 bp, Homo sapien
cataggtgcccagtcggatgccatt

SEQ ID NO: 3014862 - DNA, 25 bp, Homo sapien
tgtcaagtggtcaaacgtcagctgg

SEQ ID NO: 3014863 - DNA, 25 bp, Homo sapien
ggtgatttcctcgagccagcaacga

SEQ ID NO: 3014864 - DNA, 25 bp, Homo sapien
tgcagtcaagggtgtcagggtcaaa

SEQ ID NO: 3014865 - DNA, 25 bp, Homo sapien
gaagcttaaggcaggaccctctgag

SEQ ID NO: 3014866 - DNA, 25 bp, Homo sapien
cagggtgaaggacctcaataaccat

SEQ ID NO: 3014867 - DNA, 25 bp, Homo sapien
tcttaggtactgttgtcttcccagg

SEQ ID NO: 3014868 - DNA, 25 bp, Homo sapien
taggtactgttgtcttcccagggtg

SEQ ID NO: 3014869 - DNA, 25 bp, Homo sapien
ttcccagggtgaaggacctcaataa

SEQ ID NO: 3014870 - DNA, 25 bp, Homo sapien
gggctaagcataggaaccacctcat

SEQ ID NO: 3014871 - DNA, 25 bp, Homo sapien
aaaatctgtagccttcctgggtctc

SEQ ID NO: 3014872 - DNA, 25 bp, Homo sapien
taagcagcccttgtttcgaatccca

SEQ ID NO: 3014873 - DNA, 25 bp, Homo sapien
tctgtgatcttatagaaggccgggc

SEQ ID NO: 3014874 - DNA, 25 bp, Homo sapien
aatatcctgcgccagacagaagagg

SEQ ID NO: 3014875 - DNA, 25 bp, Homo sapien
taacaggacttgctcagggttctgc

SEQ ID NO: 3014876 - DNA, 25 bp, Homo sapien
tgaggtctgtcagccttgttgaaac

SEQ ID NO: 3014877 - DNA, 25 bp, Homo sapien
gatatgctaggtgggtattagcccc

SEQ ID NO: 3014878 - DNA, 25 bp, Homo sapien
acaaagtcaaggtacatcgctgccc

SEQ ID NO: 3014879 - DNA, 25 bp, Homo sapien
tgaagagctgatccggctcacccaa

SEQ ID NO: 3014880 - DNA, 25 bp, Homo sapien
tgatccggctcacccaaaggctgcg

SEQ ID NO: 3014881 - DNA, 25 bp, Homo sapien
agatcatcgagcgttgcagcgctga

SEQ ID NO: 3014882 - DNA, 25 bp, Homo sapien
gcaccaagttctgtccattcatctg

SEQ ID NO: 3014883 - DNA, 25 bp, Homo sapien
tgattctgagccaccccagtggtgc

SEQ ID NO: 3014884 - DNA, 25 bp, Homo sapien
ggctcagtagaagaatctccaaggg

SEQ ID NO: 3014885 - DNA, 25 bp, Homo sapien
tgcagcagcagtttcggctcagtag

SEQ ID NO: 3014886 - DNA, 25 bp, Homo sapien
gggatgaatagctagctagagtaca

SEQ ID NO: 3014887 - DNA, 25 bp, Homo sapien
ctgaagtagaccatgactgcgccac

SEQ ID NO: 3014888 - DNA, 25 bp, Homo sapien
gatactttaatggtagctacatgta

SEQ ID NO: 3014889 - DNA, 25 bp, Homo sapien
gggatagtgcaactattctgtatga

SEQ ID NO: 3014890 - DNA, 25 bp, Homo sapien
tacgtactcaccctgtaatgtcgcg

SEQ ID NO: 3014891 - DNA, 25 bp, Homo sapien
tgttgagcgagatcctaatggtccc

SEQ ID NO: 3014892 - DNA, 25 bp, Homo sapien
gagtgagccatctgtgtgaatccca

SEQ ID NO: 3014893 - DNA, 25 bp, Homo sapien
cagaggaaaggctcacaagcactca

SEQ ID NO: 3014894 - DNA, 25 bp, Homo sapien
gaggacagtcttcatactacacagg

SEQ ID NO: 3014895 - DNA, 25 bp, Homo sapien
catgtgcctagacctgatgccttaa

SEQ ID NO: 3014896 - DNA, 25 bp, Homo sapien
gctggtgtcgaaccctgtggctcaa

SEQ ID NO: 3014897 - DNA, 25 bp, Homo sapien
tatcctgtgagtgaggaaccactgc

SEQ ID NO: 3014898 - DNA, 25 bp, Homo sapien
agttggacctcccagacctgttagg

SEQ ID NO: 3014899 - DNA, 25 bp, Homo sapien
gagaaagccccttcacatgcagaat

SEQ ID NO: 3014900 - DNA, 25 bp, Homo sapien
taataatgtggcttccgtggaaacc

SEQ ID NO: 3014901 - DNA, 25 bp, Homo sapien
gcagaatctcgctggtctctcagga

SEQ ID NO: 3014902 - DNA, 25 bp, Homo sapien
tacaacttgacctgagagtgcagcc

SEQ ID NO: 3014903 - DNA, 25 bp, Homo sapien
gactatgctcagagagacacctgtg

SEQ ID NO: 3014904 - DNA, 25 bp, Homo sapien
tatggcagccctaagaataaataca

SEQ ID NO: 3014905 - DNA, 25 bp, Homo sapien
tggcaacagttctcagatgactatg

SEQ ID NO: 3014906 - DNA, 25 bp, Homo sapien
tgtcagagtctaacacactgggtgt

SEQ ID NO: 3014907 - DNA, 25 bp, Homo sapien
tgaactcaccatcggcactggactg

SEQ ID NO: 3014908 - DNA, 25 bp, Homo sapien
tgcatgaatcggaggcctttggccc

SEQ ID NO: 3014909 - DNA, 25 bp, Homo sapien
tgctgcaaggaaacgtcgaaagcct

SEQ ID NO: 3014910 - DNA, 25 bp, Homo sapien
tcctgaaacaacattggctgctgcc

SEQ ID NO: 3014911 - DNA, 25 bp, Homo sapien
cctgtgggaccgtgttctcataact

SEQ ID NO: 3014912 - DNA, 25 bp, Homo sapien
tgctgccacagggaccatatagtct

SEQ ID NO: 3014913 - DNA, 25 bp, Homo sapien
tctgtagcaatccttttgagagcct

SEQ ID NO: 3014914 - DNA, 25 bp, Homo sapien
gacaagagagggcaccaggaatgaa

SEQ ID NO: 3014915 - DNA, 25 bp, Homo sapien
gagagggcaccaggaatgaaggcat

SEQ ID NO: 3014916 - DNA, 25 bp, Homo sapien
agagagggcaccaggaatgaaggca

SEQ ID NO: 3014917 - DNA, 25 bp, Homo sapien
aagagacaagagagggcaccaggaa

SEQ ID NO: 3014918 - DNA, 25 bp, Homo sapien
aacgagttggtcagagaaaactgga

SEQ ID NO: 3014919 - DNA, 25 bp, Homo sapien
gaaatgtgaccgtaaatcaatcagc

SEQ ID NO: 3014920 - DNA, 25 bp, Homo sapien
tgtgatctatgtgacggctaggtga

SEQ ID NO: 3014921 - DNA, 25 bp, Homo sapien
tatgttgcccgaggcttcagtatct

SEQ ID NO: 3014922 - DNA, 25 bp, Homo sapien
gagggcccacgaatacagagctgag

SEQ ID NO: 3014923 - DNA, 25 bp, Homo sapien
caaaaatgtcgcttacaggtaggtc

SEQ ID NO: 3014924 - DNA, 25 bp, Homo sapien
tattagcaaggtagagcagcggtac

SEQ ID NO: 3014925 - DNA, 25 bp, Homo sapien
tacggccgagtctacgcttgggaat

SEQ ID NO: 3014926 - DNA, 25 bp, Homo sapien
cgggcacgcccgcttattcctgagg

SEQ ID NO: 3014927 - DNA, 25 bp, Homo sapien
tcgcctcctttgtgtagccttccta

SEQ ID NO: 3014928 - DNA, 25 bp, Homo sapien
gatgtcgcctcctttgtgtagcctt

SEQ ID NO: 3014929 - DNA, 25 bp, Homo sapien
cttattcctgaggaccgggctggga

SEQ ID NO: 3014930 - DNA, 25 bp, Homo sapien
tgacttcgcagactgctcccaccgc

SEQ ID NO: 3014931 - DNA, 25 bp, Homo sapien
cttcgcagactgctcccaccgcctg

SEQ ID NO: 3014932 - DNA, 25 bp, Homo sapien
acttcgcagactgctcccaccgcct

SEQ ID NO: 3014933 - DNA, 25 bp, Homo sapien
cctgacttcgcagactgctcccacc

SEQ ID NO: 3014934 - DNA, 25 bp, Homo sapien
tcagggctgaacggctgaggcgggc

SEQ ID NO: 3014935 - DNA, 25 bp, Homo sapien
cgggcgcgcggtggagaaaagagct

SEQ ID NO: 3014936 - DNA, 25 bp, Homo sapien
ggcgggcgcgcggtggagaaaagag

SEQ ID NO: 3014937 - DNA, 25 bp, Homo sapien
gctgaggcgggcgcgcggtggagaa

SEQ ID NO: 3014938 - DNA, 25 bp, Homo sapien
gacgcggcgtctgaatccccctcca

SEQ ID NO: 3014939 - DNA, 25 bp, Homo sapien
cgccggaagccggtcagcgccagcc

SEQ ID NO: 3014940 - DNA, 25 bp, Homo sapien
ccgctccgccggaagccggtcagcg

SEQ ID NO: 3014941 - DNA, 25 bp, Homo sapien
cagacgcggcgtctgaatccccctc

SEQ ID NO: 3014942 - DNA, 25 bp, Homo sapien
ttaatcaaagcttgtatataagatt

SEQ ID NO: 3014943 - DNA, 25 bp, Homo sapien
taatcaaagcttgtatataagatta

SEQ ID NO: 3014944 - DNA, 25 bp, Homo sapien
aatcaaagcttgtatataagattac

SEQ ID NO: 3014945 - DNA, 25 bp, Homo sapien
atcaaagcttgtatataagattact

SEQ ID NO: 3014946 - DNA, 25 bp, Homo sapien
ttcctgcatcttctcaatggtttct

SEQ ID NO: 3014947 - DNA, 25 bp, Homo sapien
catcttctcaatggtttcttccttg

SEQ ID NO: 3014948 - DNA, 25 bp, Homo sapien
cttctcaatggtttcttccttgtat

SEQ ID NO: 3014949 - DNA, 25 bp, Homo sapien
cctgcatcttctcaatggtttcttc

SEQ ID NO: 3014950 - DNA, 25 bp, Homo sapien
tttgcggtctttgtccagttttagc

SEQ ID NO: 3014951 - DNA, 25 bp, Homo sapien
ctttccgttcgaggatctttttgcg

SEQ ID NO: 3014952 - DNA, 25 bp, Homo sapien
ccagttttagcctagtgataaccac

SEQ ID NO: 3014953 - DNA, 25 bp, Homo sapien
agatttggctttccgttcgaggatc

SEQ ID NO: 3014954 - DNA, 25 bp, Homo sapien
gcctgggcgatcaatcgagactcca

SEQ ID NO: 3014955 - DNA, 25 bp, Homo sapien
gatggtatcagtaattcttaaagcc

SEQ ID NO: 3014956 - DNA, 25 bp, Homo sapien
gggaaagcccaacattcaataccat

SEQ ID NO: 3014957 - DNA, 25 bp, Homo sapien
aacaagtaacaaaacagcagggtgt

SEQ ID NO: 3014958 - DNA, 25 bp, Homo sapien
gaattttcaatacaagtgcagtagt

SEQ ID NO: 3014959 - DNA, 25 bp, Homo sapien
aaaatcaaggactatttctatggcc

SEQ ID NO: 3014960 - DNA, 25 bp, Homo sapien
gcatgtagtcacagctacactcagg

SEQ ID NO: 3014961 - DNA, 25 bp, Homo sapien
gcaacctccgcccaatatacataat

SEQ ID NO: 3014962 - DNA, 25 bp, Homo sapien
cccgctgcacccgttcaatgtagat

SEQ ID NO: 3014963 - DNA, 25 bp, Homo sapien
gctgcacccgttcaatgtagataac

SEQ ID NO: 3014964 - DNA, 25 bp, Homo sapien
tgctgacctttatagtgtccacgta

SEQ ID NO: 3014965 - DNA, 25 bp, Homo sapien
ttgctgacctttatagtgtccacgt

SEQ ID NO: 3014966 - DNA, 25 bp, Homo sapien
ggtctctcgttctggctctgcatga

SEQ ID NO: 3014967 - DNA, 25 bp, Homo sapien
aatcggctctatctggacagcaggc

SEQ ID NO: 3014968 - DNA, 25 bp, Homo sapien
caaaatgagcctgttgggtagtcac

SEQ ID NO: 3014969 - DNA, 25 bp, Homo sapien
cacatcatctgacgtttgaggaaac

SEQ ID NO: 3014970 - DNA, 25 bp, Homo sapien
tttgcgattcttgcttcggtcggaa

SEQ ID NO: 3014971 - DNA, 25 bp, Homo sapien
cttttgcgattcttgcttcggtcgg

SEQ ID NO: 3014972 - DNA, 25 bp, Homo sapien
tgcgattcttgcttcggtcggaagt

SEQ ID NO: 3014973 - DNA, 25 bp, Homo sapien
cgattcttgcttcggtcggaagtca

SEQ ID NO: 3014974 - DNA, 25 bp, Homo sapien
ctggaaaagcctgcacacgtctcgg

SEQ ID NO: 3014975 - DNA, 25 bp, Homo sapien
gcaagtgtggtctggaaattccgtg

SEQ ID NO: 3014976 - DNA, 25 bp, Homo sapien
cacacgtctcgggtcctaaaagcct

SEQ ID NO: 3014977 - DNA, 25 bp, Homo sapien
gtgtggtctggaaattccgtgaaga

SEQ ID NO: 3014978 - DNA, 25 bp, Homo sapien
gttacttcgagaccattctctagga

SEQ ID NO: 3014979 - DNA, 25 bp, Homo sapien
ttcgagaccattctctaggaaacga

SEQ ID NO: 3014980 - DNA, 25 bp, Homo sapien
cgagaagttacttcgagaccattct

SEQ ID NO: 3014981 - DNA, 25 bp, Homo sapien
gaccattctctaggaaacgacacta

SEQ ID NO: 3014982 - DNA, 25 bp, Homo sapien
tgattacacccgcttgcccgccgaa

SEQ ID NO: 3014983 - DNA, 25 bp, Homo sapien
ccaagaacggatggctgctgattac

SEQ ID NO: 3014984 - DNA, 25 bp, Homo sapien
tgctactcggccgacaagagactct

SEQ ID NO: 3014985 - DNA, 25 bp, Homo sapien
caccatgcccaagaacggatggctg

SEQ ID NO: 3014986 - DNA, 25 bp, Homo sapien
tgcttccggttctgtaagtttacca

SEQ ID NO: 3014987 - DNA, 25 bp, Homo sapien
gctcccgcttcggtgatggccgcaa

SEQ ID NO: 3014988 - DNA, 25 bp, Homo sapien
gggaagagaactacacgctgcttcc

SEQ ID NO: 3014989 - DNA, 25 bp, Homo sapien
aagtttaccaaagatctcgcgagac

SEQ ID NO: 3014990 - DNA, 25 bp, Homo sapien
gcacagcagggcccgccagagattc

SEQ ID NO: 3014991 - DNA, 25 bp, Homo sapien
ctgggcgtctgctgaccgcacagca

SEQ ID NO: 3014992 - DNA, 25 bp, Homo sapien
gagattcagttctgggtggtgaggg

SEQ ID NO: 3014993 - DNA, 25 bp, Homo sapien
tgaggggccttgcgaggaccagggc

SEQ ID NO: 3014994 - DNA, 25 bp, Homo sapien
gaaggcttggaggtgtgaagcagcg

SEQ ID NO: 3014995 - DNA, 25 bp, Homo sapien
tccacaaggcagtaggaattgcttg

SEQ ID NO: 3014996 - DNA, 25 bp, Homo sapien
gaatgttagcattcgctccacaagg

SEQ ID NO: 3014997 - DNA, 25 bp, Homo sapien
tgaagcagcgtgactcgtgttttcc

SEQ ID NO: 3014998 - DNA, 25 bp, Homo sapien
tctcttaacgtgtctgttgggtgtc

SEQ ID NO: 3014999 - DNA, 25 bp, Homo sapien
cccctttctcttaacgtgtctgttg

SEQ ID NO: 3015000 - DNA, 25 bp, Homo sapien
cctttctcttaacgtgtctgttggg

SEQ ID NO: 3015001 - DNA, 25 bp, Homo sapien
tcttaacgtgtctgttgggtgtctt

SEQ ID NO: 3015002 - DNA, 25 bp, Homo sapien
cttttggcaaatacgacagaatctg

SEQ ID NO: 3015003 - DNA, 25 bp, Homo sapien
tacaggtcaccattgaacatacaaa

SEQ ID NO: 3015004 - DNA, 25 bp, Homo sapien
aacagcctggctgaggttaaaagag

SEQ ID NO: 3015005 - DNA, 25 bp, Homo sapien
taaaaggagttgcagctacaggtca

SEQ ID NO: 3015006 - DNA, 25 bp, Homo sapien
ggtccccaaatgaccagcactgcag

SEQ ID NO: 3015007 - DNA, 25 bp, Homo sapien
ccaagacagcaaattgcccagaggg

SEQ ID NO: 3015008 - DNA, 25 bp, Homo sapien
gcagaccaccacttagttgagataa

SEQ ID NO: 3015009 - DNA, 25 bp, Homo sapien
aagcagccctctctatgtcccaaat

SEQ ID NO: 3015010 - DNA, 25 bp, Homo sapien
tagttctcagctgactcaaggctcg

SEQ ID NO: 3015011 - DNA, 25 bp, Homo sapien
aatccacctaggaaactggcccagc

SEQ ID NO: 3015012 - DNA, 25 bp, Homo sapien
ttctcggttgagatggcggcgtccc

SEQ ID NO: 3015013 - DNA, 25 bp, Homo sapien
gcaaagagaccttgaggagcagctg

SEQ ID NO: 3015014 - DNA, 25 bp, Homo sapien
atcccgtggcggctgatgacaaaga

SEQ ID NO: 3015015 - DNA, 25 bp, Homo sapien
ggccaccacagcgatgagcgtgatg

SEQ ID NO: 3015016 - DNA, 25 bp, Homo sapien
cgcgatcggcagcagaaggcgcggg

SEQ ID NO: 3015017 - DNA, 25 bp, Homo sapien
atgacaaagatctgtgactcccggg

SEQ ID NO: 3015018 - DNA, 25 bp, Homo sapien
ccgggctgcctggcggcctggcctg

SEQ ID NO: 3015019 - DNA, 25 bp, Homo sapien
ggcccgggctgcctggcggcctggc

SEQ ID NO: 3015020 - DNA, 25 bp, Homo sapien
ctctggcccgggctgcctggcggcc

SEQ ID NO: 3015021 - DNA, 25 bp, Homo sapien
tggcccgggctgcctggcggcctgg

SEQ ID NO: 3015022 - DNA, 25 bp, Homo sapien
gaggtggcctccaggcaggggagga

SEQ ID NO: 3015023 - DNA, 25 bp, Homo sapien
aggaggcggccagggggtttgtgtg

SEQ ID NO: 3015024 - DNA, 25 bp, Homo sapien
gcggccagggggtttgtgtggccca

SEQ ID NO: 3015025 - DNA, 25 bp, Homo sapien
caggctgtccagtgggggcacggag

SEQ ID NO: 3015026 - DNA, 25 bp, Homo sapien
tggacctgcccatccacgcgggtgg

SEQ ID NO: 3015027 - DNA, 25 bp, Homo sapien
tcttcttgctgaggaatgtgacgta

SEQ ID NO: 3015028 - DNA, 25 bp, Homo sapien
gacagcaggtacttgaccaggcagt

SEQ ID NO: 3015029 - DNA, 25 bp, Homo sapien
agggccagcgggagctcttcttgct

SEQ ID NO: 3015030 - DNA, 25 bp, Homo sapien
ggccactgggagatggcacgctcag

SEQ ID NO: 3015031 - DNA, 25 bp, Homo sapien
ttaaccgtgatggagacagaatttc

SEQ ID NO: 3015032 - DNA, 25 bp, Homo sapien
catcctttgagaatatgtctgatac

SEQ ID NO: 3015033 - DNA, 25 bp, Homo sapien
tgtctgatactttggaaatgcccag

SEQ ID NO: 3015034 - DNA, 25 bp, Homo sapien
aaatgcccagaagtcactggtagcc

SEQ ID NO: 3015035 - DNA, 25 bp, Homo sapien
gtgtgaccgccaccgccgaggcaat

SEQ ID NO: 3015036 - DNA, 25 bp, Homo sapien
ttgctgttagtgtgaccgccaccgc

SEQ ID NO: 3015037 - DNA, 25 bp, Homo sapien
tcctgttgctgttagtgtgaccgcc

SEQ ID NO: 3015038 - DNA, 25 bp, Homo sapien
cctcctgttgctgttagtgtgaccg

SEQ ID NO: 3015039 - DNA, 25 bp, Homo sapien
ttccatgtttgttgctgggtcagag

SEQ ID NO: 3015040 - DNA, 25 bp, Homo sapien
tcacagtgaaactgacgagggccag

SEQ ID NO: 3015041 - DNA, 25 bp, Homo sapien
tgggaccctcattagatacctccac

SEQ ID NO: 3015042 - DNA, 25 bp, Homo sapien
gcagatcacccgagaaataatagct

SEQ ID NO: 3015043 - DNA, 25 bp, Homo sapien
tggtaaaggctgtcatgaagctcag

SEQ ID NO: 3015044 - DNA, 25 bp, Homo sapien
taactccctctgctaggatatcagc

SEQ ID NO: 3015045 - DNA, 25 bp, Homo sapien
ggatatcagcactaaacatcgtggg

SEQ ID NO: 3015046 - DNA, 25 bp, Homo sapien
gcatccattgactagccaagtccag

SEQ ID NO: 3015047 - DNA, 25 bp, Homo sapien
gcagtaaacggctttgaccccgctc

SEQ ID NO: 3015048 - DNA, 25 bp, Homo sapien
tcccacagggcagtaaacggctttg

SEQ ID NO: 3015049 - DNA, 25 bp, Homo sapien
cccacagggcagtaaacggctttga

SEQ ID NO: 3015050 - DNA, 25 bp, Homo sapien
cacagggcagtaaacggctttgacc

SEQ ID NO: 3015051 - DNA, 25 bp, Homo sapien
acttaagcagctaccattccatgga

SEQ ID NO: 3015052 - DNA, 25 bp, Homo sapien
gtcttatgtgcggagcaggcgtcct

SEQ ID NO: 3015053 - DNA, 25 bp, Homo sapien
ctctgggcagctgtataggatcatc

SEQ ID NO: 3015054 - DNA, 25 bp, Homo sapien
tctgccatcccatgagaggagagct

SEQ ID NO: 3015055 - DNA, 25 bp, Homo sapien
ccccggagatgccactagtgcgcat

SEQ ID NO: 3015056 - DNA, 25 bp, Homo sapien
cctgtgcccgctgcgcatgctgact

SEQ ID NO: 3015057 - DNA, 25 bp, Homo sapien
gccactagtgcgcatctcctgagag

SEQ ID NO: 3015058 - DNA, 25 bp, Homo sapien
cagctgccccggagatgccactagt

SEQ ID NO: 3015059 - DNA, 25 bp, Homo sapien
tagttggcccgcactagagaggctg

SEQ ID NO: 3015060 - DNA, 25 bp, Homo sapien
cacacgtttctactgctgccaagaa

SEQ ID NO: 3015061 - DNA, 25 bp, Homo sapien
ggcacttcggcccatttcacacgtt

SEQ ID NO: 3015062 - DNA, 25 bp, Homo sapien
ccagaaccagtctaaccggagaata

SEQ ID NO: 3015063 - DNA, 25 bp, Homo sapien
cacagatgggaaatcgagaacagaa

SEQ ID NO: 3015064 - DNA, 25 bp, Homo sapien
agatgggaaatcgagaacagaaggt

SEQ ID NO: 3015065 - DNA, 25 bp, Homo sapien
cagatgggaaatcgagaacagaagg

SEQ ID NO: 3015066 - DNA, 25 bp, Homo sapien
tcacagatgggaaatcgagaacaga

SEQ ID NO: 3015067 - DNA, 25 bp, Homo sapien
tctctttattctccacgggtgcttt

SEQ ID NO: 3015068 - DNA, 25 bp, Homo sapien
tttcttcaagtaaacagagcaggcg

SEQ ID NO: 3015069 - DNA, 25 bp, Homo sapien
ttcaagtaaacagagcaggcgcaaa

SEQ ID NO: 3015070 - DNA, 25 bp, Homo sapien
tgaggtctctttattctccacgggt

SEQ ID NO: 3015071 - DNA, 25 bp, Homo sapien
aaatcattgtctagaaatatgggaa

SEQ ID NO: 3015072 - DNA, 25 bp, Homo sapien
aatatgggaatacaagaaaagatat

SEQ ID NO: 3015073 - DNA, 25 bp, Homo sapien
caaaaatcattgtctagaaatatgg

SEQ ID NO: 3015074 - DNA, 25 bp, Homo sapien
agaaaagatatttgcggtcaggtgt

SEQ ID NO: 3015075 - DNA, 25 bp, Homo sapien
aaatgggtgttgcttccgatccagc

SEQ ID NO: 3015076 - DNA, 25 bp, Homo sapien
tcacatgagtagatgcgggacacca

SEQ ID NO: 3015077 - DNA, 25 bp, Homo sapien
tcaagcacattgcagaggatcaagg

SEQ ID NO: 3015078 - DNA, 25 bp, Homo sapien
catgcagagcgactgagtgacgacc

SEQ ID NO: 3015079 - DNA, 25 bp, Homo sapien
gatctttcaggaaggaatcccgtag

SEQ ID NO: 3015080 - DNA, 25 bp, Homo sapien
ggagagccttaagacacagttgatc

SEQ ID NO: 3015081 - DNA, 25 bp, Homo sapien
aatttccgaaatctgcaggaggccc

SEQ ID NO: 3015082 - DNA, 25 bp, Homo sapien
caattgtacctaagtctgaagcagg

SEQ ID NO: 3015083 - DNA, 25 bp, Homo sapien
gggtggctgcgtctcgttgacatca

SEQ ID NO: 3015084 - DNA, 25 bp, Homo sapien
tgactggggtggctgcgtctcgttg

SEQ ID NO: 3015085 - DNA, 25 bp, Homo sapien
gtggctgcgtctcgttgacatcact

SEQ ID NO: 3015086 - DNA, 25 bp, Homo sapien
tgcgtctcgttgacatcactggtct

SEQ ID NO: 3015087 - DNA, 25 bp, Homo sapien
ggccagatcggctggaagagaagct

SEQ ID NO: 3015088 - DNA, 25 bp, Homo sapien
tgtcatcgtcggagagctccaggga

SEQ ID NO: 3015089 - DNA, 25 bp, Homo sapien
ctggcgccggccagatcggctggaa

SEQ ID NO: 3015090 - DNA, 25 bp, Homo sapien
tttctgtgtcatcgtcggagagctc

SEQ ID NO: 3015091 - DNA, 25 bp, Homo sapien
cagttcccgctggagtttacgccga

SEQ ID NO: 3015092 - DNA, 25 bp, Homo sapien
tggcctcggtggcatcatccagttc

SEQ ID NO: 3015093 - DNA, 25 bp, Homo sapien
taagctgcttcatccgagcgttggc

SEQ ID NO: 3015094 - DNA, 25 bp, Homo sapien
tttacgccgagatgcgttggcacgc

SEQ ID NO: 3015095 - DNA, 25 bp, Homo sapien
tacacggatgtacacgcgtgcctgg

SEQ ID NO: 3015096 - DNA, 25 bp, Homo sapien
tctgtaccccgagcgtggcagtgtg

SEQ ID NO: 3015097 - DNA, 25 bp, Homo sapien
tgcctgttacccttgtgagcacgcg

SEQ ID NO: 3015098 - DNA, 25 bp, Homo sapien
tggtgaatccagtgtcggcctctct

SEQ ID NO: 3015099 - DNA, 25 bp, Homo sapien
gactaatttgttggcggctgctcgt

SEQ ID NO: 3015100 - DNA, 25 bp, Homo sapien
gctctttatactggtccgcgtgtcg

SEQ ID NO: 3015101 - DNA, 25 bp, Homo sapien
gcttcttctcagtgcgacggactaa

SEQ ID NO: 3015102 - DNA, 25 bp, Homo sapien
tcctcaacctgcatgaagatttctt

SEQ ID NO: 3015103 - DNA, 25 bp, Homo sapien
gcaccctcgagttcctgcagcttgg

SEQ ID NO: 3015104 - DNA, 25 bp, Homo sapien
tgcattgtcactcttctgggcggcg

SEQ ID NO: 3015105 - DNA, 25 bp, Homo sapien
tgaacttagacttgacagcaccctc

SEQ ID NO: 3015106 - DNA, 25 bp, Homo sapien
gctagctcggcgttcagtgtgtcca

SEQ ID NO: 3015107 - DNA, 25 bp, Homo sapien
tgtgcgatccgagcttccagacgcc

SEQ ID NO: 3015108 - DNA, 25 bp, Homo sapien
tggtcttgcggaagcggtcgttgag

SEQ ID NO: 3015109 - DNA, 25 bp, Homo sapien
ctgtagagtggtcttgcggaagcgg

SEQ ID NO: 3015110 - DNA, 25 bp, Homo sapien
tccagctgtgcgatccgagcttcca

SEQ ID NO: 3015111 - DNA, 25 bp, Homo sapien
ttgccagaggcgctgttggtgatct

SEQ ID NO: 3015112 - DNA, 25 bp, Homo sapien
cgctgttggtgatctcgtccgccag

SEQ ID NO: 3015113 - DNA, 25 bp, Homo sapien
atctctctcctgctcggcgtgtcgg

SEQ ID NO: 3015114 - DNA, 25 bp, Homo sapien
cgggctcgctcagatgaggcaagtt

SEQ ID NO: 3015115 - DNA, 25 bp, Homo sapien
cctgccttacatgagtgtaggctga

SEQ ID NO: 3015116 - DNA, 25 bp, Homo sapien
gggctgcacgggagctcctctgtct

SEQ ID NO: 3015117 - DNA, 25 bp, Homo sapien
tgtaggctgaaggtcctctgacagg

SEQ ID NO: 3015118 - DNA, 25 bp, Homo sapien
gcacgtgcacctgccttacatgagt

SEQ ID NO: 3015119 - DNA, 25 bp, Homo sapien
ttttcactctctttggattgagcaa

SEQ ID NO: 3015120 - DNA, 25 bp, Homo sapien
ctctctttggattgagcaaaaatct

SEQ ID NO: 3015121 - DNA, 25 bp, Homo sapien
tcttctaattcacgttggtaatcct

SEQ ID NO: 3015122 - DNA, 25 bp, Homo sapien
cacgttggtaatccttcatctgagc

SEQ ID NO: 3015123 - DNA, 25 bp, Homo sapien
cacccactaagatggttacaatcaa

SEQ ID NO: 3015124 - DNA, 25 bp, Homo sapien
gcagaaattaagctaaggcaggtgt

SEQ ID NO: 3015125 - DNA, 25 bp, Homo sapien
catacatagctggtaggaacgtaaa

SEQ ID NO: 3015126 - DNA, 25 bp, Homo sapien
ggatagacgagtaaaatgtggtaga

SEQ ID NO: 3015127 - DNA, 25 bp, Homo sapien
gaagctacagcaagcgcccgctgtt

SEQ ID NO: 3015128 - DNA, 25 bp, Homo sapien
gctttgttcgcagcctcgatttggg

SEQ ID NO: 3015129 - DNA, 25 bp, Homo sapien
gatttgggcttcgaggtccttcagg

SEQ ID NO: 3015130 - DNA, 25 bp, Homo sapien
tgcggagctgcttaatcacctcatc

SEQ ID NO: 3015131 - DNA, 25 bp, Homo sapien
gacgaagcttggcatcttccgtggc

SEQ ID NO: 3015132 - DNA, 25 bp, Homo sapien
tccgtggcctggagttcgtcttcca

SEQ ID NO: 3015133 - DNA, 25 bp, Homo sapien
tgcatgttgacctccagacgaagct

SEQ ID NO: 3015134 - DNA, 25 bp, Homo sapien
tgcaggtctctctcgaactgcgcct

SEQ ID NO: 3015135 - DNA, 25 bp, Homo sapien
tgacggcagaaccatgaaacctttt

SEQ ID NO: 3015136 - DNA, 25 bp, Homo sapien
cagaaccatgaaaccttttgttgaa

SEQ ID NO: 3015137 - DNA, 25 bp, Homo sapien
cggcagaaccatgaaaccttttgtt

SEQ ID NO: 3015138 - DNA, 25 bp, Homo sapien
gacggcagaaccatgaaaccttttg

SEQ ID NO: 3015139 - DNA, 25 bp, Homo sapien
cggtcccgctcttcggcatagcgag

SEQ ID NO: 3015140 - DNA, 25 bp, Homo sapien
catagcgagcagagatgctcttctc

SEQ ID NO: 3015141 - DNA, 25 bp, Homo sapien
tctgctcggagctgcttgttctgcc

SEQ ID NO: 3015142 - DNA, 25 bp, Homo sapien
catgtctgctcggagctgcttgttc

SEQ ID NO: 3015143 - DNA, 25 bp, Homo sapien
ccaggaggaaacgacacgtggccga

SEQ ID NO: 3015144 - DNA, 25 bp, Homo sapien
tgccaggaggaaacgacacgtggcc

SEQ ID NO: 3015145 - DNA, 25 bp, Homo sapien
caggaggaaacgacacgtggccgac

SEQ ID NO: 3015146 - DNA, 25 bp, Homo sapien
gaggaaacgacacgtggccgaccca

SEQ ID NO: 3015147 - DNA, 25 bp, Homo sapien
ctccaagttggaggcgacctggcgc

SEQ ID NO: 3015148 - DNA, 25 bp, Homo sapien
tctccagtttgtcatacgccagtgc

SEQ ID NO: 3015149 - DNA, 25 bp, Homo sapien
caattgttcccaggtcgtcatctac

SEQ ID NO: 3015150 - DNA, 25 bp, Homo sapien
gggcctccgcgtccttcagaagctt

SEQ ID NO: 3015151 - DNA, 25 bp, Homo sapien
ggtttagtttctggcgtgtctcctc

SEQ ID NO: 3015152 - DNA, 25 bp, Homo sapien
gactgctcaggtttagtttctggcg

SEQ ID NO: 3015153 - DNA, 25 bp, Homo sapien
gctcctgaagactgttcttctcctc

SEQ ID NO: 3015154 - DNA, 25 bp, Homo sapien
cagctgccggatccgactgctcagg

SEQ ID NO: 3015155 - DNA, 25 bp, Homo sapien
taaagggcaacacttccattacatt

SEQ ID NO: 3015156 - DNA, 25 bp, Homo sapien
ttacatttatcaccaaaacaaatac

SEQ ID NO: 3015157 - DNA, 25 bp, Homo sapien
agggcaacacttccattacatttat

SEQ ID NO: 3015158 - DNA, 25 bp, Homo sapien
tttaaagggcaacacttccattaca

SEQ ID NO: 3015159 - DNA, 25 bp, Homo sapien
tcttcagaggcattggttgtgtgga

SEQ ID NO: 3015160 - DNA, 25 bp, Homo sapien
tttcagactgcaaagtcttcagagg

SEQ ID NO: 3015161 - DNA, 25 bp, Homo sapien
cattggttgtgtggagcagaatttc

SEQ ID NO: 3015162 - DNA, 25 bp, Homo sapien
agactgcaaagtcttcagaggcatt

SEQ ID NO: 3015163 - DNA, 25 bp, Homo sapien
ttcaccagcttatatattacagaaa

SEQ ID NO: 3015164 - DNA, 25 bp, Homo sapien
accagcttatatattacagaaatgt

SEQ ID NO: 3015165 - DNA, 25 bp, Homo sapien
tagttattataaagaccccttgctc

SEQ ID NO: 3015166 - DNA, 25 bp, Homo sapien
caccagcttatatattacagaaatg

SEQ ID NO: 3015167 - DNA, 25 bp, Homo sapien
ctgtgtatcctgtagttgagactca

SEQ ID NO: 3015168 - DNA, 25 bp, Homo sapien
gactagctgcatccttagcaaattt

SEQ ID NO: 3015169 - DNA, 25 bp, Homo sapien
cagaagggtggagacattatctagc

SEQ ID NO: 3015170 - DNA, 25 bp, Homo sapien
tagcaaatttaatacccttcttctc

SEQ ID NO: 3015171 - DNA, 25 bp, Homo sapien
gctgcaggaccttcacctcacacgc

SEQ ID NO: 3015172 - DNA, 25 bp, Homo sapien
tcttgtgctcagactcagccttgac

SEQ ID NO: 3015173 - DNA, 25 bp, Homo sapien
gcagcttacttgctttctccgccag

SEQ ID NO: 3015174 - DNA, 25 bp, Homo sapien
tgcgcgtcgagcttcttcctcttgt

SEQ ID NO: 3015175 - DNA, 25 bp, Homo sapien
tctcatgtcctggatttgagcttca

SEQ ID NO: 3015176 - DNA, 25 bp, Homo sapien
tgtctttgtctcatgtcctggattt

SEQ ID NO: 3015177 - DNA, 25 bp, Homo sapien
tctgccacttcttgttcacgttttg

SEQ ID NO: 3015178 - DNA, 25 bp, Homo sapien
tccagggctgttgcgtgtctttgtc

SEQ ID NO: 3015179 - DNA, 25 bp, Homo sapien
caatttgggcttgtagctctcgcac

SEQ ID NO: 3015180 - DNA, 25 bp, Homo sapien
gctgccgtggtgtccagcgtgtcct

SEQ ID NO: 3015181 - DNA, 25 bp, Homo sapien
gccttgttccgtgaagccttctcgg

SEQ ID NO: 3015182 - DNA, 25 bp, Homo sapien
ggcattgttcttatggagtgtttca

SEQ ID NO: 3015183 - DNA, 25 bp, Homo sapien
acaaattctgtacgcctgggctttt

SEQ ID NO: 3015184 - DNA, 25 bp, Homo sapien
gaatgctcccgaacataacaaagtc

SEQ ID NO: 3015185 - DNA, 25 bp, Homo sapien
cactttctcaggtcacaccaaacag

SEQ ID NO: 3015186 - DNA, 25 bp, Homo sapien
catgggctcccgtgcagcgcagctg

SEQ ID NO: 3015187 - DNA, 25 bp, Homo sapien
gcagctctgcgatctggtcctgcag

SEQ ID NO: 3015188 - DNA, 25 bp, Homo sapien
tgagctcatcaatctgcgcctgcag

SEQ ID NO: 3015189 - DNA, 25 bp, Homo sapien
tttccagttcctgacgagtcttttc

SEQ ID NO: 3015190 - DNA, 25 bp, Homo sapien
caggtcggtcgtctccccgtcgagt

SEQ ID NO: 3015191 - DNA, 25 bp, Homo sapien
tgggaacccctgttctgaaccaaga

SEQ ID NO: 3015192 - DNA, 25 bp, Homo sapien
ttccatgggaacccctgttctgaac

SEQ ID NO: 3015193 - DNA, 25 bp, Homo sapien
gggcagcaatcgtagctgcctgtca

SEQ ID NO: 3015194 - DNA, 25 bp, Homo sapien
catgggaacccctgttctgaaccaa

SEQ ID NO: 3015195 - DNA, 25 bp, Homo sapien
ttctaaatctgagatcatcacttct

SEQ ID NO: 3015196 - DNA, 25 bp, Homo sapien
ctaaatctgagatcatcacttcttg

SEQ ID NO: 3015197 - DNA, 25 bp, Homo sapien
taaatctgagatcatcacttcttgc

SEQ ID NO: 3015198 - DNA, 25 bp, Homo sapien
ggaacactcagcaatgcgatcttcc

SEQ ID NO: 3015199 - DNA, 25 bp, Homo sapien
tcctcgagaagcagaatctcctctt

SEQ ID NO: 3015200 - DNA, 25 bp, Homo sapien
acttggaattttggtcctcgagaag

SEQ ID NO: 3015201 - DNA, 25 bp, Homo sapien
ttggaattttggtcctcgagaagca

SEQ ID NO: 3015202 - DNA, 25 bp, Homo sapien
gtcctcgagaagcagaatctcctct

SEQ ID NO: 3015203 - DNA, 25 bp, Homo sapien
atttcaggaaattgtcacagatgca

SEQ ID NO: 3015204 - DNA, 25 bp, Homo sapien
aatagacatttgtatccgctacagg

SEQ ID NO: 3015205 - DNA, 25 bp, Homo sapien
caaactgggtcaatccttctagaag

SEQ ID NO: 3015206 - DNA, 25 bp, Homo sapien
gctacaggctaaagtacaaactggg

SEQ ID NO: 3015207 - DNA, 25 bp, Homo sapien
aagagtggcttctcataacccagaa

SEQ ID NO: 3015208 - DNA, 25 bp, Homo sapien
cagaatgctatagatcctgggaggt

SEQ ID NO: 3015209 - DNA, 25 bp, Homo sapien
cctgggaggtttgcgactgtgaatc

SEQ ID NO: 3015210 - DNA, 25 bp, Homo sapien
ctaatgaatggagtgagcaacagaa

SEQ ID NO: 3015211 - DNA, 25 bp, Homo sapien
gtagttgttctgcaaggatattctt

SEQ ID NO: 3015212 - DNA, 25 bp, Homo sapien
gcagcaagtcttgccctcatctctt

SEQ ID NO: 3015213 - DNA, 25 bp, Homo sapien
ttgtagttgttctgcaaggatattc

SEQ ID NO: 3015214 - DNA, 25 bp, Homo sapien
tgcttgtagttgttctgcaaggata

SEQ ID NO: 3015215 - DNA, 25 bp, Homo sapien
gcccctattacatacgtacacagta

SEQ ID NO: 3015216 - DNA, 25 bp, Homo sapien
tgcaatcacaataaagtgtctgtga

SEQ ID NO: 3015217 - DNA, 25 bp, Homo sapien
cgtacacagtatatattcgccgtga

SEQ ID NO: 3015218 - DNA, 25 bp, Homo sapien
tgtgatttgcccctattacatacgt

SEQ ID NO: 3015219 - DNA, 25 bp, Homo sapien
ttcctcctggcgagtcacttgtaga

SEQ ID NO: 3015220 - DNA, 25 bp, Homo sapien
tcctggcgagtcacttgtagaagcg

SEQ ID NO: 3015221 - DNA, 25 bp, Homo sapien
gagtcacttgtagaagcggcttcac

SEQ ID NO: 3015222 - DNA, 25 bp, Homo sapien
tgaagttcttcctcctggcgagtca

SEQ ID NO: 3015223 - DNA, 25 bp, Homo sapien
accactgccagtgccgtaatttcag

SEQ ID NO: 3015224 - DNA, 25 bp, Homo sapien
tacgcggcacagttccgctgcaaga

SEQ ID NO: 3015225 - DNA, 25 bp, Homo sapien
taatttcaggtacgcggcacagttc

SEQ ID NO: 3015226 - DNA, 25 bp, Homo sapien
ctttgtgaagactcgccaccactgc

SEQ ID NO: 3015227 - DNA, 25 bp, Homo sapien
tggccaggtaacctctgcaaacggc

SEQ ID NO: 3015228 - DNA, 25 bp, Homo sapien
ctggccaggtaacctctgcaaacgg

SEQ ID NO: 3015229 - DNA, 25 bp, Homo sapien
tctggccaggtaacctctgcaaacg

SEQ ID NO: 3015230 - DNA, 25 bp, Homo sapien
tttctggccaggtaacctctgcaaa

SEQ ID NO: 3015231 - DNA, 25 bp, Homo sapien
ggaagaagataatgatatcggtgat

SEQ ID NO: 3015232 - DNA, 25 bp, Homo sapien
caattctgtacaagtttgggtccaa

SEQ ID NO: 3015233 - DNA, 25 bp, Homo sapien
ctctaagtgtgccagaactccagct

SEQ ID NO: 3015234 - DNA, 25 bp, Homo sapien
taatgatatcggtgatttttaaatc

SEQ ID NO: 3015235 - DNA, 25 bp, Homo sapien
cctttaggaatagcatttggagtta

SEQ ID NO: 3015236 - DNA, 25 bp, Homo sapien
tcacaggcctgtttaccatccataa

SEQ ID NO: 3015237 - DNA, 25 bp, Homo sapien
cataaaacctttaggaatagcattt

SEQ ID NO: 3015238 - DNA, 25 bp, Homo sapien
tagcatttggagttaggatctcata

SEQ ID NO: 3015239 - DNA, 25 bp, Homo sapien
gatggaaagaagtaccccaacatgt

SEQ ID NO: 3015240 - DNA, 25 bp, Homo sapien
aagactgtaattgcacgcatgtgtg

SEQ ID NO: 3015241 - DNA, 25 bp, Homo sapien
ctaaaagactgtaattgcacgcatg

SEQ ID NO: 3015242 - DNA, 25 bp, Homo sapien
ctttccctatgttagctaaaagact

SEQ ID NO: 3015243 - DNA, 25 bp, Homo sapien
tggcatgtttctttgcagcgcccat

SEQ ID NO: 3015244 - DNA, 25 bp, Homo sapien
tagtaaggattgtcccttttccaga

SEQ ID NO: 3015245 - DNA, 25 bp, Homo sapien
ccagaacctcactatatgtttgcta

SEQ ID NO: 3015246 - DNA, 25 bp, Homo sapien
tagcagttcctagcacactcccttt

SEQ ID NO: 3015247 - DNA, 25 bp, Homo sapien
ctaggactaggtgtggatccaattt

SEQ ID NO: 3015248 - DNA, 25 bp, Homo sapien
caggacaccgttacagcgaagctga

SEQ ID NO: 3015249 - DNA, 25 bp, Homo sapien
gccctggcgacagattcggatccct

SEQ ID NO: 3015250 - DNA, 25 bp, Homo sapien
acagattcggatcccttccaggaca

SEQ ID NO: 3015251 - DNA, 25 bp, Homo sapien
caagcaaacaatagtttcatggttt

SEQ ID NO: 3015252 - DNA, 25 bp, Homo sapien
catggtttaatctttagcatctgac

SEQ ID NO: 3015253 - DNA, 25 bp, Homo sapien
tctttagcatctgacctagatcagt

SEQ ID NO: 3015254 - DNA, 25 bp, Homo sapien
taatcaagcaaacaatagtttcatg

SEQ ID NO: 3015255 - DNA, 25 bp, Homo sapien
tttcggagagttgccatcagcttgg

SEQ ID NO: 3015256 - DNA, 25 bp, Homo sapien
gttgcccaacggtacgaaacatgcc

SEQ ID NO: 3015257 - DNA, 25 bp, Homo sapien
tatgcggagccaaaagctgtctcag

SEQ ID NO: 3015258 - DNA, 25 bp, Homo sapien
tgagagattctttgtagagttgccc

SEQ ID NO: 3015259 - DNA, 25 bp, Homo sapien
gagaagaaaggagaaaacaaatata

SEQ ID NO: 3015260 - DNA, 25 bp, Homo sapien
gaaaacaaatataagccaaacctca

SEQ ID NO: 3015261 - DNA, 25 bp, Homo sapien
gaaaggagaaaacaaatataagcca

SEQ ID NO: 3015262 - DNA, 25 bp, Homo sapien
cacacacttatatggcaggatactg

SEQ ID NO: 3015263 - DNA, 25 bp, Homo sapien
taggcactgcacaagccgggaacta

SEQ ID NO: 3015264 - DNA, 25 bp, Homo sapien
caaatgacaggagatgccatatagg

SEQ ID NO: 3015265 - DNA, 25 bp, Homo sapien
ccatataggtaaggcagtcagcata

SEQ ID NO: 3015266 - DNA, 25 bp, Homo sapien
tttggatcaggtctaaagcctttga

SEQ ID NO: 3015267 - DNA, 25 bp, Homo sapien
gatagtctcaattaccctattaccc

SEQ ID NO: 3015268 - DNA, 25 bp, Homo sapien
ctccaacatgctttggatcaggtct

SEQ ID NO: 3015269 - DNA, 25 bp, Homo sapien
ggtctaaagcctttgatagtctcaa

SEQ ID NO: 3015270 - DNA, 25 bp, Homo sapien
agcacgtcacaggcaatcacaattt

SEQ ID NO: 3015271 - DNA, 25 bp, Homo sapien
cacaatttggatccctagaaactcc

SEQ ID NO: 3015272 - DNA, 25 bp, Homo sapien
gcaatcacaatttggatccctagaa

SEQ ID NO: 3015273 - DNA, 25 bp, Homo sapien
gcacgtcacaggcaatcacaatttg

SEQ ID NO: 3015274 - DNA, 25 bp, Homo sapien
agagatctcttcctttggagttccg

SEQ ID NO: 3015275 - DNA, 25 bp, Homo sapien
cgccaaagaggactgaatttagaga

SEQ ID NO: 3015276 - DNA, 25 bp, Homo sapien
tttcaacactgtcagcattccccaa

SEQ ID NO: 3015277 - DNA, 25 bp, Homo sapien
tggagttccgtagaattttcattcc

SEQ ID NO: 3015278 - DNA, 25 bp, Homo sapien
ggtggctcatgaagaccagaaacac

SEQ ID NO: 3015279 - DNA, 25 bp, Homo sapien
ctggtggctcatgaagaccagaaac

SEQ ID NO: 3015280 - DNA, 25 bp, Homo sapien
gaaacactgtcatagaaagaagctc

SEQ ID NO: 3015281 - DNA, 25 bp, Homo sapien
cagaaacactgtcatagaaagaagc

SEQ ID NO: 3015282 - DNA, 25 bp, Homo sapien
aaaattgctccccttatcctgcgat

SEQ ID NO: 3015283 - DNA, 25 bp, Homo sapien
tctctctatccagagtgagcagtga

SEQ ID NO: 3015284 - DNA, 25 bp, Homo sapien
taggtgttgcaccttcacaggcaaa

SEQ ID NO: 3015285 - DNA, 25 bp, Homo sapien
tgagcagtgataaatcctccacctt

SEQ ID NO: 3015286 - DNA, 25 bp, Homo sapien
attccgatataacggcagccctgct

SEQ ID NO: 3015287 - DNA, 25 bp, Homo sapien
gataaattccgatataacggcagcc

SEQ ID NO: 3015288 - DNA, 25 bp, Homo sapien
cggataaattccgatataacggcag

SEQ ID NO: 3015289 - DNA, 25 bp, Homo sapien
taaattccgatataacggcagccct

SEQ ID NO: 3015290 - DNA, 25 bp, Homo sapien
tttccaaagctctgccacaaatctg

SEQ ID NO: 3015291 - DNA, 25 bp, Homo sapien
gtgcaaaagggtggccacgttgtca

SEQ ID NO: 3015292 - DNA, 25 bp, Homo sapien
agccactcatctgccttatagtcca

SEQ ID NO: 3015293 - DNA, 25 bp, Homo sapien
tgatgactggtgcaaaagggtggcc

SEQ ID NO: 3015294 - DNA, 25 bp, Homo sapien
ttatctgtggctttagggaaccagc

SEQ ID NO: 3015295 - DNA, 25 bp, Homo sapien
tcttttaattgtcgaggtttctgaa

SEQ ID NO: 3015296 - DNA, 25 bp, Homo sapien
tgggaaccttgctcttgaaccagtt

SEQ ID NO: 3015297 - DNA, 25 bp, Homo sapien
cttccctgcataatgtataatgcaa

SEQ ID NO: 3015298 - DNA, 25 bp, Homo sapien
accacacctggtccaataaattgct

SEQ ID NO: 3015299 - DNA, 25 bp, Homo sapien
ccacaatatttacacataaggcctg

SEQ ID NO: 3015300 - DNA, 25 bp, Homo sapien
gtggtgtgaccgtatcactgtagcc

SEQ ID NO: 3015301 - DNA, 25 bp, Homo sapien
gctatctggatcttattctaccacc

SEQ ID NO: 3015302 - DNA, 25 bp, Homo sapien
gatactgacctagcaaattttatgg

SEQ ID NO: 3015303 - DNA, 25 bp, Homo sapien
tgggttctcgtccatcctaaaataa

SEQ ID NO: 3015304 - DNA, 25 bp, Homo sapien
taggacttccagtgtcatatggacg

SEQ ID NO: 3015305 - DNA, 25 bp, Homo sapien
tctttaggcaacaaagcagtgatga

SEQ ID NO: 3015306 - DNA, 25 bp, Homo sapien
aaagacagcgagcaagtgagcactc

SEQ ID NO: 3015307 - DNA, 25 bp, Homo sapien
aaatgaaagacagcgagcaagtgag

SEQ ID NO: 3015308 - DNA, 25 bp, Homo sapien
aatgaaagacagcgagcaagtgagc

SEQ ID NO: 3015309 - DNA, 25 bp, Homo sapien
tctattaggtcgatgcatggctgca

SEQ ID NO: 3015310 - DNA, 25 bp, Homo sapien
ggtgtagttgatgcaaagttgttca

SEQ ID NO: 3015311 - DNA, 25 bp, Homo sapien
cagatccagcccgaaatcgatgaag

SEQ ID NO: 3015312 - DNA, 25 bp, Homo sapien
gttctaggataaacatggtgtggtt

SEQ ID NO: 3015313 - DNA, 25 bp, Homo sapien
aagcctcatatttacagactgccgg

SEQ ID NO: 3015314 - DNA, 25 bp, Homo sapien
gaggatttaacccatctccaaggag

SEQ ID NO: 3015315 - DNA, 25 bp, Homo sapien
gaactttgctttgcctcaggatgat

SEQ ID NO: 3015316 - DNA, 25 bp, Homo sapien
tgtatttctggcacgcatgacaagc

SEQ ID NO: 3015317 - DNA, 25 bp, Homo sapien
cataggtagcttttgccaatgcttc

SEQ ID NO: 3015318 - DNA, 25 bp, Homo sapien
cgagccagcgaaagagccgctcata

SEQ ID NO: 3015319 - DNA, 25 bp, Homo sapien
tattgatgcgatgaacgagccagcg

SEQ ID NO: 3015320 - DNA, 25 bp, Homo sapien
gatgctccctgacgtttggtcctat

SEQ ID NO: 3015321 - DNA, 25 bp, Homo sapien
tagtctcggccgaccttgatccggg

SEQ ID NO: 3015322 - DNA, 25 bp, Homo sapien
cacatagtctcggccgaccttgatc

SEQ ID NO: 3015323 - DNA, 25 bp, Homo sapien
tcaggatggcccgagtaaactccat

SEQ ID NO: 3015324 - DNA, 25 bp, Homo sapien
gggagtcaggatggcccgagtaaac

SEQ ID NO: 3015325 - DNA, 25 bp, Homo sapien
caagaagatggcagagcttctgcgc

SEQ ID NO: 3015326 - DNA, 25 bp, Homo sapien
cccaagaagatggcagagcttctgc

SEQ ID NO: 3015327 - DNA, 25 bp, Homo sapien
aagaagatggcagagcttctgcgca

SEQ ID NO: 3015328 - DNA, 25 bp, Homo sapien
agaagatggcagagcttctgcgcaa

SEQ ID NO: 3015329 - DNA, 25 bp, Homo sapien
catagtgtagacaaccgacgggcat

SEQ ID NO: 3015330 - DNA, 25 bp, Homo sapien
tgctgaacatagtgtagacaaccga

SEQ ID NO: 3015331 - DNA, 25 bp, Homo sapien
acgggcatagcacgacagcctagaa

SEQ ID NO: 3015332 - DNA, 25 bp, Homo sapien
gtagacaaccgacgggcatagcacg

SEQ ID NO: 3015333 - DNA, 25 bp, Homo sapien
aaactgtagcactgaagatactact

SEQ ID NO: 3015334 - DNA, 25 bp, Homo sapien
tccaaactgtagcactgaagatact

SEQ ID NO: 3015335 - DNA, 25 bp, Homo sapien
atttccaaactgtagcactgaagat

SEQ ID NO: 3015336 - DNA, 25 bp, Homo sapien
tatttccaaactgtagcactgaaga

SEQ ID NO: 3015337 - DNA, 25 bp, Homo sapien
gaatctcttcatgggagaagcccat

SEQ ID NO: 3015338 - DNA, 25 bp, Homo sapien
gctgtcccggaataggaatatagcc

SEQ ID NO: 3015339 - DNA, 25 bp, Homo sapien
cctggaaattatctttgtcttgctg

SEQ ID NO: 3015340 - DNA, 25 bp, Homo sapien
gccattggagagaaacctgtagtta

SEQ ID NO: 3015341 - DNA, 25 bp, Homo sapien
ctgcccagtgcctgcgattgaaagc

SEQ ID NO: 3015342 - DNA, 25 bp, Homo sapien
tgcctgcgattgaaagctcgcgccg

SEQ ID NO: 3015343 - DNA, 25 bp, Homo sapien
cagtgcctgcgattgaaagctcgcg

SEQ ID NO: 3015344 - DNA, 25 bp, Homo sapien
gcgattgaaagctcgcgccgccacg

SEQ ID NO: 3015345 - DNA, 25 bp, Homo sapien
gacgaacagcacgagacttttccag

SEQ ID NO: 3015346 - DNA, 25 bp, Homo sapien
acagcacgagacttttccagaaggt

SEQ ID NO: 3015347 - DNA, 25 bp, Homo sapien
tttgcttgacgaacagcacgagact

SEQ ID NO: 3015348 - DNA, 25 bp, Homo sapien
catcttttgcttgacgaacagcacg

SEQ ID NO: 3015349 - DNA, 25 bp, Homo sapien
ctacgcctgctgctacccaccctgc

SEQ ID NO: 3015350 - DNA, 25 bp, Homo sapien
tacgcctgctgctacccaccctgcc

SEQ ID NO: 3015351 - DNA, 25 bp, Homo sapien
ctgtgagtccatttggaggcataaa

SEQ ID NO: 3015352 - DNA, 25 bp, Homo sapien
tggctgtgagtccatttggaggcat

SEQ ID NO: 3015353 - DNA, 25 bp, Homo sapien
ctatatgaagaaagctgaactgcag

SEQ ID NO: 3015354 - DNA, 25 bp, Homo sapien
ggctgtgagtccatttggaggcata

SEQ ID NO: 3015355 - DNA, 25 bp, Homo sapien
caatgttggccccaacgatatagcc

SEQ ID NO: 3015356 - DNA, 25 bp, Homo sapien
tatagccagttacatcaaagttgat

SEQ ID NO: 3015357 - DNA, 25 bp, Homo sapien
tacatcaaagttgatccgaataaat

SEQ ID NO: 3015358 - DNA, 25 bp, Homo sapien
ggccccaacgatatagccagttaca

SEQ ID NO: 3015359 - DNA, 25 bp, Homo sapien
tcaaaaaagtagcaacagaataggc

SEQ ID NO: 3015360 - DNA, 25 bp, Homo sapien
ggatatgaacactaataaactaaga

SEQ ID NO: 3015361 - DNA, 25 bp, Homo sapien
cagaataggctattttcctggacta

SEQ ID NO: 3015362 - DNA, 25 bp, Homo sapien
caataatggatcttatatattgcct

SEQ ID NO: 3015363 - DNA, 25 bp, Homo sapien
gccatcaaatttactgaggtaatga

SEQ ID NO: 3015364 - DNA, 25 bp, Homo sapien
ctgcaatgccctctagcctagatac

SEQ ID NO: 3015365 - DNA, 25 bp, Homo sapien
ccatcaaatttactgaggtaatgat

SEQ ID NO: 3015366 - DNA, 25 bp, Homo sapien
caatgccctctagcctagatactga

SEQ ID NO: 3015367 - DNA, 25 bp, Homo sapien
gctttgtagtcatcgctgccacctg

SEQ ID NO: 3015368 - DNA, 25 bp, Homo sapien
ctaccttcacgggacattaaaatag

SEQ ID NO: 3015369 - DNA, 25 bp, Homo sapien
ggtcaacgccactgtgttcttttga

SEQ ID NO: 3015370 - DNA, 25 bp, Homo sapien
ctttatttgggcaatatgataacat

SEQ ID NO: 3015371 - DNA, 25 bp, Homo sapien
gtggaaaactttcgtgcactgagca

SEQ ID NO: 3015372 - DNA, 25 bp, Homo sapien
ggtaactcctttggcccatgcagct

SEQ ID NO: 3015373 - DNA, 25 bp, Homo sapien
tcattgttgatggtaactcctttgg

SEQ ID NO: 3015374 - DNA, 25 bp, Homo sapien
aaacagtggaaaactttcgtgcact

SEQ ID NO: 3015375 - DNA, 25 bp, Homo sapien
ttcacacaccataataatgccagtc

SEQ ID NO: 3015376 - DNA, 25 bp, Homo sapien
accataataatgccagtccatctac

SEQ ID NO: 3015377 - DNA, 25 bp, Homo sapien
tcacacaccataataatgccagtcc

SEQ ID NO: 3015378 - DNA, 25 bp, Homo sapien
cacctgtgtggccaagactgagtgg

SEQ ID NO: 3015379 - DNA, 25 bp, Homo sapien
tggtgagactggcaagaagatcacc

SEQ ID NO: 3015380 - DNA, 25 bp, Homo sapien
gctggatggcaagcacaaggtcttt

SEQ ID NO: 3015381 - DNA, 25 bp, Homo sapien
atgctggcccgacacaaatggttcc

SEQ ID NO: 3015382 - DNA, 25 bp, Homo sapien
agcagtcaggggcattctgaagcaa

SEQ ID NO: 3015383 - DNA, 25 bp, Homo sapien
tctcctctccggtccgtgcctccaa

SEQ ID NO: 3015384 - DNA, 25 bp, Homo sapien
tcctctccggtccgtgcctccaaga

SEQ ID NO: 3015385 - DNA, 25 bp, Homo sapien
caaaggtcgtgctgaaaagggccgc

SEQ ID NO: 3015386 - DNA, 25 bp, Homo sapien
attaaaagcttctggtgctttgaaa

SEQ ID NO: 3015387 - DNA, 25 bp, Homo sapien
ctagaaatctaaggaattaaaagct

SEQ ID NO: 3015388 - DNA, 25 bp, Homo sapien
aagcttctggtgctttgaaacttac

SEQ ID NO: 3015389 - DNA, 25 bp, Homo sapien
taaaagcttctggtgctttgaaact

SEQ ID NO: 3015390 - DNA, 25 bp, Homo sapien
tgcttgcaaaagctgccgttcaagt

SEQ ID NO: 3015391 - DNA, 25 bp, Homo sapien
tccagaattggatttgcttgcaaaa

SEQ ID NO: 3015392 - DNA, 25 bp, Homo sapien
aattggatttgcttgcaaaagctgc

SEQ ID NO: 3015393 - DNA, 25 bp, Homo sapien
ccaaatgattccagaattggatttg

SEQ ID NO: 3015394 - DNA, 25 bp, Homo sapien
caagaagatttatgggtcctcagag

SEQ ID NO: 3015395 - DNA, 25 bp, Homo sapien
catggtaatggtggactcaggcact

SEQ ID NO: 3015396 - DNA, 25 bp, Homo sapien
agtaacctggttgtatcccctgtgc

SEQ ID NO: 3015397 - DNA, 25 bp, Homo sapien
taatcagaggttccacgggtgtcca

SEQ ID NO: 3015398 - DNA, 25 bp, Homo sapien
tctgaaattgcactatgttgaggct

SEQ ID NO: 3015399 - DNA, 25 bp, Homo sapien
tgttgaggctttgtgaactctgtgc

SEQ ID NO: 3015400 - DNA, 25 bp, Homo sapien
actttgagggtctctaagagcaacc

SEQ ID NO: 3015401 - DNA, 25 bp, Homo sapien
gggatatagccaaataagaccttta

SEQ ID NO: 3015402 - DNA, 25 bp, Homo sapien
aatgtttaacagaattaccgtatga

SEQ ID NO: 3015403 - DNA, 25 bp, Homo sapien
aatgccaagtgccaatgaggatatg

SEQ ID NO: 3015404 - DNA, 25 bp, Homo sapien
tttaaataccctacaggataatgac

SEQ ID NO: 3015405 - DNA, 25 bp, Homo sapien
tttagcaagtacctctaaagcataa

SEQ ID NO: 3015406 - DNA, 25 bp, Homo sapien
cattatttcaatagcgacacaagta

SEQ ID NO: 3015407 - DNA, 25 bp, Homo sapien
gatttatgtgttccacagggaattt

SEQ ID NO: 3015408 - DNA, 25 bp, Homo sapien
tagggcacaaagctaggtttccatg

SEQ ID NO: 3015409 - DNA, 25 bp, Homo sapien
tagtggcatttgattctagcagaga

SEQ ID NO: 3015410 - DNA, 25 bp, Homo sapien
tagcagagactcaatctacagacag

SEQ ID NO: 3015411 - DNA, 25 bp, Homo sapien
aaacggcatgcgcttctcaagaaag

SEQ ID NO: 3015412 - DNA, 25 bp, Homo sapien
gtgtttcactggtttaggcgattcc

SEQ ID NO: 3015413 - DNA, 25 bp, Homo sapien
tgtttcactggtttaggcgattcct

SEQ ID NO: 3015414 - DNA, 25 bp, Homo sapien
ggtgtttcactggtttaggcgattc

SEQ ID NO: 3015415 - DNA, 25 bp, Homo sapien
ctggtgtttcactggtttaggcgat

SEQ ID NO: 3015416 - DNA, 25 bp, Homo sapien
tcttcctttatgtgaagaagcaaca

SEQ ID NO: 3015417 - DNA, 25 bp, Homo sapien
tgggcaaggtactgaataactttct

SEQ ID NO: 3015418 - DNA, 25 bp, Homo sapien
tgaagaagcaacatgggcaaggtac

SEQ ID NO: 3015419 - DNA, 25 bp, Homo sapien
catgggcaaggtactgaataacttt

SEQ ID NO: 3015420 - DNA, 25 bp, Homo sapien
tagtgtgtcaatagagtccatgtcc

SEQ ID NO: 3015421 - DNA, 25 bp, Homo sapien
tctacctggctactattggcacata

SEQ ID NO: 3015422 - DNA, 25 bp, Homo sapien
taagttcaaaacaagcaaggatcat

SEQ ID NO: 3015423 - DNA, 25 bp, Homo sapien
gcctggcagagttaagtgcttgata

SEQ ID NO: 3015424 - DNA, 25 bp, Homo sapien
aatgggcctcttttttagactgatg

SEQ ID NO: 3015425 - DNA, 25 bp, Homo sapien
gctaaccgcctcaatggacatgctt

SEQ ID NO: 3015426 - DNA, 25 bp, Homo sapien
gacatgcttcaacgtgtccttaaag

SEQ ID NO: 3015427 - DNA, 25 bp, Homo sapien
tgcctgtcacacttaggcagccata

SEQ ID NO: 3015428 - DNA, 25 bp, Homo sapien
tggctggctggctatcattacttaa

SEQ ID NO: 3015429 - DNA, 25 bp, Homo sapien
catatggcaatagggttcagagagg

SEQ ID NO: 3015430 - DNA, 25 bp, Homo sapien
taacgcatgttattcctagcaggaa

SEQ ID NO: 3015431 - DNA, 25 bp, Homo sapien
gagttctatctgaccacacaatgtt

SEQ ID NO: 3015432 - DNA, 25 bp, Homo sapien
taagtttatgaagaccccagtcaca

SEQ ID NO: 3015433 - DNA, 25 bp, Homo sapien
gagtgactgcccctaaatagttatc

SEQ ID NO: 3015434 - DNA, 25 bp, Homo sapien
tagctacatatggaaagtttgtgaa

SEQ ID NO: 3015435 - DNA, 25 bp, Homo sapien
aacttaattagcttggcggtggact

SEQ ID NO: 3015436 - DNA, 25 bp, Homo sapien
gtgcaaagaattgactggtcctcac

SEQ ID NO: 3015437 - DNA, 25 bp, Homo sapien
tgcaaagaattgactggtcctcacg

SEQ ID NO: 3015438 - DNA, 25 bp, Homo sapien
caaagaattgactggtcctcacgat

SEQ ID NO: 3015439 - DNA, 25 bp, Homo sapien
gcaaagaattgactggtcctcacga

SEQ ID NO: 3015440 - DNA, 25 bp, Homo sapien
tcaacttgctttctcaaggttcaca

SEQ ID NO: 3015441 - DNA, 25 bp, Homo sapien
ttgctttctcaaggttcacattttg

SEQ ID NO: 3015442 - DNA, 25 bp, Homo sapien
gaaacttgtatccagtttcgaagtc

SEQ ID NO: 3015443 - DNA, 25 bp, Homo sapien
cagtttcgaagtccttcaacttgct

SEQ ID NO: 3015444 - DNA, 25 bp, Homo sapien
tagattacgtaagggcaaaggcaag

SEQ ID NO: 3015445 - DNA, 25 bp, Homo sapien
caagcacgaactggaggaggataac

SEQ ID NO: 3015446 - DNA, 25 bp, Homo sapien
ggtgattgcaaaactaccctagtcc

SEQ ID NO: 3015447 - DNA, 25 bp, Homo sapien
tccagaatagttagggtatctccag

SEQ ID NO: 3015448 - DNA, 25 bp, Homo sapien
tgtgagctttaccagcaatgctgca

SEQ ID NO: 3015449 - DNA, 25 bp, Homo sapien
cctagattgattggcattggtagcc

SEQ ID NO: 3015450 - DNA, 25 bp, Homo sapien
gctaatgtctgactagccctgcaga

SEQ ID NO: 3015451 - DNA, 25 bp, Homo sapien
tccacacggtccttggtcaggctac

SEQ ID NO: 3015452 - DNA, 25 bp, Homo sapien
aatttatgaggtattgttttagagc

SEQ ID NO: 3015453 - DNA, 25 bp, Homo sapien
ttatcatacttacagaaaatggctg

SEQ ID NO: 3015454 - DNA, 25 bp, Homo sapien
tataatgagctttggttagaccgcc

SEQ ID NO: 3015455 - DNA, 25 bp, Homo sapien
tgggaatcaaatgtatatgaaaact

SEQ ID NO: 3015456 - DNA, 25 bp, Homo sapien
ttttgtagaatacattgagacatta

SEQ ID NO: 3015457 - DNA, 25 bp, Homo sapien
agaatacattgagacattaaaaaac

SEQ ID NO: 3015458 - DNA, 25 bp, Homo sapien
tgtagaatacattgagacattaaaa

SEQ ID NO: 3015459 - DNA, 25 bp, Homo sapien
aatacattgagacattaaaaaacag

SEQ ID NO: 3015460 - DNA, 25 bp, Homo sapien
tttaagaaattctgagcatttagta

SEQ ID NO: 3015461 - DNA, 25 bp, Homo sapien
tctgagcatttagtattcaaatatt

SEQ ID NO: 3015462 - DNA, 25 bp, Homo sapien
aagaaattctgagcatttagtattc

SEQ ID NO: 3015463 - DNA, 25 bp, Homo sapien
aaattctgagcatttagtattcaaa

SEQ ID NO: 3015464 - DNA, 25 bp, Homo sapien
gtttataactacacagaagagtcca

SEQ ID NO: 3015465 - DNA, 25 bp, Homo sapien
tctgtaagcagattcagatatagca

SEQ ID NO: 3015466 - DNA, 25 bp, Homo sapien
gatatagcatagatgtgtggaggca

SEQ ID NO: 3015467 - DNA, 25 bp, Homo sapien
tcatgacgcttcttccctctgtaca

SEQ ID NO: 3015468 - DNA, 25 bp, Homo sapien
cacagtggatctgcacaatgcccat

SEQ ID NO: 3015469 - DNA, 25 bp, Homo sapien
ccacagtggatctgcacaatgccca

SEQ ID NO: 3015470 - DNA, 25 bp, Homo sapien
gccacagtggatctgcacaatgccc

SEQ ID NO: 3015471 - DNA, 25 bp, Homo sapien
aacttgtagaatacagctacagcag

SEQ ID NO: 3015472 - DNA, 25 bp, Homo sapien
gtagaatacagctacagcagtactt

SEQ ID NO: 3015473 - DNA, 25 bp, Homo sapien
acagctacagcagtacttagaatga

SEQ ID NO: 3015474 - DNA, 25 bp, Homo sapien
gctacagcagtacttagaatgaaat

SEQ ID NO: 3015475 - DNA, 25 bp, Homo sapien
gattagtcctgaatagtagcgatcc

SEQ ID NO: 3015476 - DNA, 25 bp, Homo sapien
gatggaatccacactagctttttag

SEQ ID NO: 3015477 - DNA, 25 bp, Homo sapien
gatactagctgcctcaaaaccatgg

SEQ ID NO: 3015478 - DNA, 25 bp, Homo sapien
ggatcctcgagtccagttctctgcg

SEQ ID NO: 3015479 - DNA, 25 bp, Homo sapien
tgtaaatggaacgatccaaaagcaa

SEQ ID NO: 3015480 - DNA, 25 bp, Homo sapien
gtaaatggaacgatccaaaagcaat

SEQ ID NO: 3015481 - DNA, 25 bp, Homo sapien
taaatggaacgatccaaaagcaatt

SEQ ID NO: 3015482 - DNA, 25 bp, Homo sapien
gaacaaataataggatacacactcc

SEQ ID NO: 3015483 - DNA, 25 bp, Homo sapien
caaggtgggaaacatcacaggtaaa

SEQ ID NO: 3015484 - DNA, 25 bp, Homo sapien
tggcttcaaggtgggaaacatcaca

SEQ ID NO: 3015485 - DNA, 25 bp, Homo sapien
taataggatacacactccacctttc

SEQ ID NO: 3015486 - DNA, 25 bp, Homo sapien
caatatttacgtgaatggtcccaac

SEQ ID NO: 3015487 - DNA, 25 bp, Homo sapien
tgagcattttgtctagtccctggta

SEQ ID NO: 3015488 - DNA, 25 bp, Homo sapien
cctgcgttgtaccagagggctttgc

SEQ ID NO: 3015489 - DNA, 25 bp, Homo sapien
actatgaggagagtcatctgttcca

SEQ ID NO: 3015490 - DNA, 25 bp, Homo sapien
taggcttaaccaatgaatcatctgg

SEQ ID NO: 3015491 - DNA, 25 bp, Homo sapien
tcaattttatgaacggcctgcacat

SEQ ID NO: 3015492 - DNA, 25 bp, Homo sapien
tcacttccaatgaaatgtcacccag

SEQ ID NO: 3015493 - DNA, 25 bp, Homo sapien
cacctactatgagtgtggacagagg

SEQ ID NO: 3015494 - DNA, 25 bp, Homo sapien
actggttggtttgcgcgcccatctc

SEQ ID NO: 3015495 - DNA, 25 bp, Homo sapien
cccagacccactggttggtttgcgc

SEQ ID NO: 3015496 - DNA, 25 bp, Homo sapien
tcattgggccagctccacgcccatc

SEQ ID NO: 3015497 - DNA, 25 bp, Homo sapien
gcgaccacagatccagcgcctcagt

SEQ ID NO: 3015498 - DNA, 25 bp, Homo sapien
gggccgttttcagatttgtgcagct

SEQ ID NO: 3015499 - DNA, 25 bp, Homo sapien
gcattaggctcatctaagtccttga

SEQ ID NO: 3015500 - DNA, 25 bp, Homo sapien
aggctggaacgccacactggacttt

SEQ ID NO: 3015501 - DNA, 25 bp, Homo sapien
agtttcttgacccaatcgtgcagca

SEQ ID NO: 3015502 - DNA, 25 bp, Homo sapien
agcctgaacactccctttttctgaa

SEQ ID NO: 3015503 - DNA, 25 bp, Homo sapien
ttcataagatcttccgggcaccgta

SEQ ID NO: 3015504 - DNA, 25 bp, Homo sapien
ctcaaaatccagcttagatccactt

SEQ ID NO: 3015505 - DNA, 25 bp, Homo sapien
aaatccagcttagatccacttccac

SEQ ID NO: 3015506 - DNA, 25 bp, Homo sapien
tagatgggacagctttgaaatgctc

SEQ ID NO: 3015507 - DNA, 25 bp, Homo sapien
tgaaatgctctaaagggctaagaag

SEQ ID NO: 3015508 - DNA, 25 bp, Homo sapien
attggccgctctggcctcaagggtc

SEQ ID NO: 3015509 - DNA, 25 bp, Homo sapien
tggtctctcgcatcctttagatggg

SEQ ID NO: 3015510 - DNA, 25 bp, Homo sapien
ggctacctcaagctcttgcaaaatg

SEQ ID NO: 3015511 - DNA, 25 bp, Homo sapien
ctggctacctcaagctcttgcaaaa

SEQ ID NO: 3015512 - DNA, 25 bp, Homo sapien
acctcaagctcttgcaaaatggggg

SEQ ID NO: 3015513 - DNA, 25 bp, Homo sapien
gctacctcaagctcttgcaaaatgg

SEQ ID NO: 3015514 - DNA, 25 bp, Homo sapien
tcccctgcatgcaggaacgataagc

SEQ ID NO: 3015515 - DNA, 25 bp, Homo sapien
tatttgctttgttcgaaatctgcag

SEQ ID NO: 3015516 - DNA, 25 bp, Homo sapien
tgccaacatacaaacagtttcctaa

SEQ ID NO: 3015517 - DNA, 25 bp, Homo sapien
aatatgtctgtctgcggaggtgcgc

SEQ ID NO: 3015518 - DNA, 25 bp, Homo sapien
tcggttggaacatcaggagtgtgaa

SEQ ID NO: 3015519 - DNA, 25 bp, Homo sapien
gaacatcaggagtgtgaattccaag

SEQ ID NO: 3015520 - DNA, 25 bp, Homo sapien
tgagcgctcggttggaacatcagga

SEQ ID NO: 3015521 - DNA, 25 bp, Homo sapien
ggtgcagcacgtgagcgctcggttg

SEQ ID NO: 3015522 - DNA, 25 bp, Homo sapien
gcctcagtagacatcagcagcctct

SEQ ID NO: 3015523 - DNA, 25 bp, Homo sapien
ttgaactccaatctctcaagtccaa

SEQ ID NO: 3015524 - DNA, 25 bp, Homo sapien
gttgtgacaaaagtcccactggtgg

SEQ ID NO: 3015525 - DNA, 25 bp, Homo sapien
taactgcagtcggactgtcccagcg

SEQ ID NO: 3015526 - DNA, 25 bp, Homo sapien
gtgcaggaaagagcgggggcgttgg

SEQ ID NO: 3015527 - DNA, 25 bp, Homo sapien
tttgttctgggctggtatgtagctc

SEQ ID NO: 3015528 - DNA, 25 bp, Homo sapien
atgaaggaccacccgttggggactg

SEQ ID NO: 3015529 - DNA, 25 bp, Homo sapien
agaaacatgaaggaccacccgttgg

SEQ ID NO: 3015530 - DNA, 25 bp, Homo sapien
catgaaggaccacccgttggggact

SEQ ID NO: 3015531 - DNA, 25 bp, Homo sapien
tctttcacgatctctgtctcaggac

SEQ ID NO: 3015532 - DNA, 25 bp, Homo sapien
agctggactgactggaccgcaggct

SEQ ID NO: 3015533 - DNA, 25 bp, Homo sapien
gcaggcatcggtcccgagctggact

SEQ ID NO: 3015534 - DNA, 25 bp, Homo sapien
ggctcacgacttcttctttcacgat

SEQ ID NO: 3015535 - DNA, 25 bp, Homo sapien
tttttcacctctgcccagatgtccg

SEQ ID NO: 3015536 - DNA, 25 bp, Homo sapien
tccggactcgctgttgttccttctt

SEQ ID NO: 3015537 - DNA, 25 bp, Homo sapien
gaccggtcttggataaattgctgga

SEQ ID NO: 3015538 - DNA, 25 bp, Homo sapien
ttaaatccggactcgctgttgttcc

SEQ ID NO: 3015539 - DNA, 25 bp, Homo sapien
actgcccctgtctaagacccttaag

SEQ ID NO: 3015540 - DNA, 25 bp, Homo sapien
tgcccctgtctaagacccttaagaa

SEQ ID NO: 3015541 - DNA, 25 bp, Homo sapien
ctgcccctgtctaagacccttaaga

SEQ ID NO: 3015542 - DNA, 25 bp, Homo sapien
gaaccaagggcagtctgtatttctc

SEQ ID NO: 3015543 - DNA, 25 bp, Homo sapien
tttaaatctgtaggcgactcggtcg

SEQ ID NO: 3015544 - DNA, 25 bp, Homo sapien
caggtccttaagtttaaatctgtag

SEQ ID NO: 3015545 - DNA, 25 bp, Homo sapien
gtatttccgtgagtaggttcatctc

SEQ ID NO: 3015546 - DNA, 25 bp, Homo sapien
taggcgactcggtcgtgtatttccg

SEQ ID NO: 3015547 - DNA, 25 bp, Homo sapien
caagcaggagggtcttcttggctgc

SEQ ID NO: 3015548 - DNA, 25 bp, Homo sapien
ttcagcgtggccatcttaatggtgc

SEQ ID NO: 3015549 - DNA, 25 bp, Homo sapien
ttcttggctgcggtgttctggatgt

SEQ ID NO: 3015550 - DNA, 25 bp, Homo sapien
caggtgcttgctcacgatctggaag

SEQ ID NO: 3015551 - DNA, 25 bp, Homo sapien
agaagatgacattgctgcgggcacg

SEQ ID NO: 3015552 - DNA, 25 bp, Homo sapien
cagactgcatgaggtcgtggcgcat

SEQ ID NO: 3015553 - DNA, 25 bp, Homo sapien
tgcgggcacggtcaaagcgcatctg

SEQ ID NO: 3015554 - DNA, 25 bp, Homo sapien
ccagcgtcttgtagcgtgcaatcac

SEQ ID NO: 3015555 - DNA, 25 bp, Homo sapien
tcaggggctcaggtcaatgcacagc

SEQ ID NO: 3015556 - DNA, 25 bp, Homo sapien
ggctttcttcatggcgcggatccgt

SEQ ID NO: 3015557 - DNA, 25 bp, Homo sapien
catctcctgcttgcgcttggtcagc

SEQ ID NO: 3015558 - DNA, 25 bp, Homo sapien
ccaccttctctaggtacttgttgaa

SEQ ID NO: 3015559 - DNA, 25 bp, Homo sapien
tgctggcacttgagttctcgctcct

SEQ ID NO: 3015560 - DNA, 25 bp, Homo sapien
tttttaagacgattaaagtgctcca

SEQ ID NO: 3015561 - DNA, 25 bp, Homo sapien
gacgattaaagtgctccactaaaga

SEQ ID NO: 3015562 - DNA, 25 bp, Homo sapien
atctggatttttaagacgattaaag

SEQ ID NO: 3015563 - DNA, 25 bp, Homo sapien
gagtgggtctggataaatctggatt

SEQ ID NO: 3015564 - DNA, 25 bp, Homo sapien
agggtttccattctgcgctgaaaca

SEQ ID NO: 3015565 - DNA, 25 bp, Homo sapien
gagccttcagttgggcttccttaac

SEQ ID NO: 3015566 - DNA, 25 bp, Homo sapien
tgctcagacttctggatgtgagcct

SEQ ID NO: 3015567 - DNA, 25 bp, Homo sapien
gggtttccattctgcgctgaaacat

SEQ ID NO: 3015568 - DNA, 25 bp, Homo sapien
catagtttgatgcatgatttctgtc

SEQ ID NO: 3015569 - DNA, 25 bp, Homo sapien
gcaccatagtttgatgcatgatttc

SEQ ID NO: 3015570 - DNA, 25 bp, Homo sapien
agtttgatgcatgatttctgtctcc

SEQ ID NO: 3015571 - DNA, 25 bp, Homo sapien
caccatagtttgatgcatgatttct

SEQ ID NO: 3015572 - DNA, 25 bp, Homo sapien
agccggaagtactcggccaggtctt

SEQ ID NO: 3015573 - DNA, 25 bp, Homo sapien
cagccggaagtactcggccaggtct

SEQ ID NO: 3015574 - DNA, 25 bp, Homo sapien
gccggaagtactcggccaggtcttc

SEQ ID NO: 3015575 - DNA, 25 bp, Homo sapien
ggagtttgagactccacagaaggtg

SEQ ID NO: 3015576 - DNA, 25 bp, Homo sapien
cttcggcctacagggtcccacagat

SEQ ID NO: 3015577 - DNA, 25 bp, Homo sapien
cagtgaaattgtgggtagcagagcc

SEQ ID NO: 3015578 - DNA, 25 bp, Homo sapien
gttgggcggctcaggacgatgtgct

SEQ ID NO: 3015579 - DNA, 25 bp, Homo sapien
tgagagggaatgtccactgccagac

SEQ ID NO: 3015580 - DNA, 25 bp, Homo sapien
taaaacagcatgttgctagtgccac

SEQ ID NO: 3015581 - DNA, 25 bp, Homo sapien
tgctctaagggcttgggcaagtacc

SEQ ID NO: 3015582 - DNA, 25 bp, Homo sapien
taagatagccctgactttgtgagct

SEQ ID NO: 3015583 - DNA, 25 bp, Homo sapien
tgctgtgaactgaatctgtgtgccc

SEQ ID NO: 3015584 - DNA, 25 bp, Homo sapien
cgcaagtcatatgtgagtctctgaa

SEQ ID NO: 3015585 - DNA, 25 bp, Homo sapien
ttttgccaatggtgagagacctgcc

SEQ ID NO: 3015586 - DNA, 25 bp, Homo sapien
ttccaacccaaagcgtagagagtct

SEQ ID NO: 3015587 - DNA, 25 bp, Homo sapien
cctggtgtctggcattagcgtcgcg

SEQ ID NO: 3015588 - DNA, 25 bp, Homo sapien
cattagcgtcgcgataaacttcctg

SEQ ID NO: 3015589 - DNA, 25 bp, Homo sapien
gcgtcgcgataaacttcctgctgaa

SEQ ID NO: 3015590 - DNA, 25 bp, Homo sapien
tctggcattagcgtcgcgataaact

SEQ ID NO: 3015591 - DNA, 25 bp, Homo sapien
ccacacccagtgctctgggtcataa

SEQ ID NO: 3015592 - DNA, 25 bp, Homo sapien
agaggagctggtatcgaagcttatg

SEQ ID NO: 3015593 - DNA, 25 bp, Homo sapien
tcgaagcttatggaacaagggtcgc

SEQ ID NO: 3015594 - DNA, 25 bp, Homo sapien
ccacgtcctccagcgcatggaacag

SEQ ID NO: 3015595 - DNA, 25 bp, Homo sapien
gctgggagtagttcttcccgtagag

SEQ ID NO: 3015596 - DNA, 25 bp, Homo sapien
gtcccagggtgttggatattgacag

SEQ ID NO: 3015597 - DNA, 25 bp, Homo sapien
aaatagatggaaggttggaatccca

SEQ ID NO: 3015598 - DNA, 25 bp, Homo sapien
cagagtaaagaggagaagtagggta

SEQ ID NO: 3015599 - DNA, 25 bp, Homo sapien
ggttggaatcccacttcgtccactg

SEQ ID NO: 3015600 - DNA, 25 bp, Homo sapien
tgccacgagaagaggccggcacggc

SEQ ID NO: 3015601 - DNA, 25 bp, Homo sapien
tattgccacgagaagaggccggcac

SEQ ID NO: 3015602 - DNA, 25 bp, Homo sapien
cacgagaagaggccggcacggctaa

SEQ ID NO: 3015603 - DNA, 25 bp, Homo sapien
attgccacgagaagaggccggcacg

SEQ ID NO: 3015604 - DNA, 25 bp, Homo sapien
gagagagagaaaggttggtcacatc

SEQ ID NO: 3015605 - DNA, 25 bp, Homo sapien
agagaagggagtagagagagagaaa

SEQ ID NO: 3015606 - DNA, 25 bp, Homo sapien
ctgatggagagaagggagtagagag

SEQ ID NO: 3015607 - DNA, 25 bp, Homo sapien
agaagggagtagagagagagaaagg

SEQ ID NO: 3015608 - DNA, 25 bp, Homo sapien
caggccaggaatttttgaacgacag

SEQ ID NO: 3015609 - DNA, 25 bp, Homo sapien
tcccaggccaggaatttttgaacga

SEQ ID NO: 3015610 - DNA, 25 bp, Homo sapien
ccaggccaggaatttttgaacgaca

SEQ ID NO: 3015611 - DNA, 25 bp, Homo sapien
gccaggaatttttgaacgacaggat

SEQ ID NO: 3015612 - DNA, 25 bp, Homo sapien
acggaggatgctcgctttcgcttca

SEQ ID NO: 3015613 - DNA, 25 bp, Homo sapien
gaggatgctcgctttcgcttcagct

SEQ ID NO: 3015614 - DNA, 25 bp, Homo sapien
gatgctcgctttcgcttcagcttca

SEQ ID NO: 3015615 - DNA, 25 bp, Homo sapien
gagcacggaggatgctcgctttcgc

SEQ ID NO: 3015616 - DNA, 25 bp, Homo sapien
ctcggattcgtctgaccattcgctc

SEQ ID NO: 3015617 - DNA, 25 bp, Homo sapien
gctgggggctgggatctatccaagg

SEQ ID NO: 3015618 - DNA, 25 bp, Homo sapien
cgtctgaccattcgctcttcctttt

SEQ ID NO: 3015619 - DNA, 25 bp, Homo sapien
gattcgtctgaccattcgctcttcc

SEQ ID NO: 3015620 - DNA, 25 bp, Homo sapien
ttctgtccacaaaacctagtccctg

SEQ ID NO: 3015621 - DNA, 25 bp, Homo sapien
aagccttcttccagactccgttagg

SEQ ID NO: 3015622 - DNA, 25 bp, Homo sapien
tccgttaggacccagaagagtgcgt

SEQ ID NO: 3015623 - DNA, 25 bp, Homo sapien
gggcgcgcttgaccactggccataa

SEQ ID NO: 3015624 - DNA, 25 bp, Homo sapien
catctcctggtgatggtggagggaa

SEQ ID NO: 3015625 - DNA, 25 bp, Homo sapien
ctcctggtgatggtggagggaagga

SEQ ID NO: 3015626 - DNA, 25 bp, Homo sapien
cctggtgatggtggagggaaggaca

SEQ ID NO: 3015627 - DNA, 25 bp, Homo sapien
ctggtgatggtggagggaaggacat

SEQ ID NO: 3015628 - DNA, 25 bp, Homo sapien
tgaggtacacgagatgctttgatat

SEQ ID NO: 3015629 - DNA, 25 bp, Homo sapien
aggtacacgagatgctttgatatag

SEQ ID NO: 3015630 - DNA, 25 bp, Homo sapien
gtgcctagccaaggcctgttttaat

SEQ ID NO: 3015631 - DNA, 25 bp, Homo sapien
gaggtacacgagatgctttgatata

SEQ ID NO: 3015632 - DNA, 25 bp, Homo sapien
tgatgtaatttgccaagaacaatag

SEQ ID NO: 3015633 - DNA, 25 bp, Homo sapien
ccttcctggaagtgtcatctctttt

SEQ ID NO: 3015634 - DNA, 25 bp, Homo sapien
cttcctggaagtgtcatctcttttc

SEQ ID NO: 3015635 - DNA, 25 bp, Homo sapien
ggtgactcatgatgggaccttacac

SEQ ID NO: 3015636 - DNA, 25 bp, Homo sapien
gaattttccaagtcgaagagtgtct

SEQ ID NO: 3015637 - DNA, 25 bp, Homo sapien
gttggcctgtcaaccacacttgagt

SEQ ID NO: 3015638 - DNA, 25 bp, Homo sapien
tgctaatggaatgactcaagatggg

SEQ ID NO: 3015639 - DNA, 25 bp, Homo sapien
tttgttcagtccattcgttccttgc

SEQ ID NO: 3015640 - DNA, 25 bp, Homo sapien
tccttgctggatcagcacactctgg

SEQ ID NO: 3015641 - DNA, 25 bp, Homo sapien
gatgatcctgttgggccttcagcac

SEQ ID NO: 3015642 - DNA, 25 bp, Homo sapien
caatgagatgatcctgttgggcctt

SEQ ID NO: 3015643 - DNA, 25 bp, Homo sapien
agtgttcctccctcatggccttcac

SEQ ID NO: 3015644 - DNA, 25 bp, Homo sapien
ctgagtgttcctccctcatggcctt

SEQ ID NO: 3015645 - DNA, 25 bp, Homo sapien
cagtcctgttctgtcccctgctcag

SEQ ID NO: 3015646 - DNA, 25 bp, Homo sapien
gagtgttcctccctcatggccttca

SEQ ID NO: 3015647 - DNA, 25 bp, Homo sapien
gaaaggcaatgctcaccagtaaggc

SEQ ID NO: 3015648 - DNA, 25 bp, Homo sapien
taatggcactcaagatctgaatggg

SEQ ID NO: 3015649 - DNA, 25 bp, Homo sapien
cactgctgacagatgggaatgggaa

SEQ ID NO: 3015650 - DNA, 25 bp, Homo sapien
gatggctcctaccaaaacagtggtg

SEQ ID NO: 3015651 - DNA, 25 bp, Homo sapien
tgacaaattggctggattcccgggc

SEQ ID NO: 3015652 - DNA, 25 bp, Homo sapien
tccttcaacggagggcgctaagtag

SEQ ID NO: 3015653 - DNA, 25 bp, Homo sapien
tgatgttcacaggtagcgtgacccc

SEQ ID NO: 3015654 - DNA, 25 bp, Homo sapien
ggatgatctttcagccccgaagtga

SEQ ID NO: 3015655 - DNA, 25 bp, Homo sapien
gaagtgcacccgatttttgtctacc

SEQ ID NO: 3015656 - DNA, 25 bp, Homo sapien
ttgtctaccggtgggaccaggacca

SEQ ID NO: 3015657 - DNA, 25 bp, Homo sapien
tgcttggttcccattagggtgccca

SEQ ID NO: 3015658 - DNA, 25 bp, Homo sapien
tgcctcaggtaaagggtcaggaacg

SEQ ID NO: 3015659 - DNA, 25 bp, Homo sapien
gcgagtgggactgcgcccccggtct

SEQ ID NO: 3015660 - DNA, 25 bp, Homo sapien
caggcctgggccgacggagggcgga

SEQ ID NO: 3015661 - DNA, 25 bp, Homo sapien
aggcctgggccgacggagggcggag

SEQ ID NO: 3015662 - DNA, 25 bp, Homo sapien
ggctcggagcgagtgggactgcgcc

SEQ ID NO: 3015663 - DNA, 25 bp, Homo sapien
gcgaaggtgggggcggggccagcgc

SEQ ID NO: 3015664 - DNA, 25 bp, Homo sapien
caggtcctgccgttggaccgaaagg

SEQ ID NO: 3015665 - DNA, 25 bp, Homo sapien
gaaggtgggggcggggccagcgcac

SEQ ID NO: 3015666 - DNA, 25 bp, Homo sapien
ccaggtcctgccgttggaccgaaag

SEQ ID NO: 3015667 - DNA, 25 bp, Homo sapien
tagacatttgtatgagaagctgggc

SEQ ID NO: 3015668 - DNA, 25 bp, Homo sapien
ctgatagagacacctgcctgggctg

SEQ ID NO: 3015669 - DNA, 25 bp, Homo sapien
gaattgaagctaaatgaaggagtag

SEQ ID NO: 3015670 - DNA, 25 bp, Homo sapien
gggctctggccaagacagcagcttt

SEQ ID NO: 3015671 - DNA, 25 bp, Homo sapien
ggccatccgtagacctccatgtggg

SEQ ID NO: 3015672 - DNA, 25 bp, Homo sapien
agcgacagcattgcctgggccatcc

SEQ ID NO: 3015673 - DNA, 25 bp, Homo sapien
attgcctgggccatccgtagacctc

SEQ ID NO: 3015674 - DNA, 25 bp, Homo sapien
tcaagcagcgacagcattgcctggg

SEQ ID NO: 3015675 - DNA, 25 bp, Homo sapien
tcacagtccccagggtaggctccct

SEQ ID NO: 3015676 - DNA, 25 bp, Homo sapien
gtccccagggtaggctccctgtgct

SEQ ID NO: 3015677 - DNA, 25 bp, Homo sapien
acagtccccagggtaggctccctgt

SEQ ID NO: 3015678 - DNA, 25 bp, Homo sapien
cagtccccagggtaggctccctgtg

SEQ ID NO: 3015679 - DNA, 25 bp, Homo sapien
ctggtcaaggccaaagctgccgtgt

SEQ ID NO: 3015680 - DNA, 25 bp, Homo sapien
aaggccaaagctgccgtgtggagcc

SEQ ID NO: 3015681 - DNA, 25 bp, Homo sapien
gtcaaggccaaagctgccgtgtgga

SEQ ID NO: 3015682 - DNA, 25 bp, Homo sapien
tgttggtgtgagtgtttggagttgg

SEQ ID NO: 3015683 - DNA, 25 bp, Homo sapien
tgcccatgcaaattgagccacggtg

SEQ ID NO: 3015684 - DNA, 25 bp, Homo sapien
gcccatgcaaattgagccacggtgc

SEQ ID NO: 3015685 - DNA, 25 bp, Homo sapien
gagccacggtgccttggacttctgg

SEQ ID NO: 3015686 - DNA, 25 bp, Homo sapien
gttgcccatgcaaattgagccacgg

SEQ ID NO: 3015687 - DNA, 25 bp, Homo sapien
gattgcctagggcatttgaaaggca

SEQ ID NO: 3015688 - DNA, 25 bp, Homo sapien
tcagattgcctagggcatttgaaag

SEQ ID NO: 3015689 - DNA, 25 bp, Homo sapien
catctgagggatcagattgcctagg

SEQ ID NO: 3015690 - DNA, 25 bp, Homo sapien
acccatctgagggatcagattgcct

SEQ ID NO: 3015691 - DNA, 25 bp, Homo sapien
gggaagccagtaagggtcagctaac

SEQ ID NO: 3015692 - DNA, 25 bp, Homo sapien
gccagtaagggtcagctaactggaa

SEQ ID NO: 3015693 - DNA, 25 bp, Homo sapien
agtaagggtcagctaactggaacac

SEQ ID NO: 3015694 - DNA, 25 bp, Homo sapien
cagcctgtgtgggaggggcccgtgc

SEQ ID NO: 3015695 - DNA, 25 bp, Homo sapien
tctacctccgatgaggtgccttgag

SEQ ID NO: 3015696 - DNA, 25 bp, Homo sapien
caggatctacctccgatgaggtgcc

SEQ ID NO: 3015697 - DNA, 25 bp, Homo sapien
ctggccacaggatctacctccgatg

SEQ ID NO: 3015698 - DNA, 25 bp, Homo sapien
gccacaggatctacctccgatgagg

SEQ ID NO: 3015699 - DNA, 25 bp, Homo sapien
ggctctggatctggatattgttcgt

SEQ ID NO: 3015700 - DNA, 25 bp, Homo sapien
gcagcctctggtcccggctctggat

SEQ ID NO: 3015701 - DNA, 25 bp, Homo sapien
gttgatcgtccttgtccagcgacag

SEQ ID NO: 3015702 - DNA, 25 bp, Homo sapien
catccctgaaagtgcgttgatcgtc

SEQ ID NO: 3015703 - DNA, 25 bp, Homo sapien
gaactcgagtgttgatttcttcaac

SEQ ID NO: 3015704 - DNA, 25 bp, Homo sapien
cttcaacattttccgagcacctcct

SEQ ID NO: 3015705 - DNA, 25 bp, Homo sapien
aactcgagtgttgatttcttcaaca

SEQ ID NO: 3015706 - DNA, 25 bp, Homo sapien
ctgaactcgagtgttgatttcttca

SEQ ID NO: 3015707 - DNA, 25 bp, Homo sapien
agagaggtcgcctcccattgggcag

SEQ ID NO: 3015708 - DNA, 25 bp, Homo sapien
caagctcagaccaagccgaaggaaa

SEQ ID NO: 3015709 - DNA, 25 bp, Homo sapien
gcatagaattgagcccaggtacggg

SEQ ID NO: 3015710 - DNA, 25 bp, Homo sapien
gaccccggttctcagcattaaatca

SEQ ID NO: 3015711 - DNA, 25 bp, Homo sapien
tgatcccaaggatccgcgtgagcgg

SEQ ID NO: 3015712 - DNA, 25 bp, Homo sapien
ggcatacagactaagcaggtggctt

SEQ ID NO: 3015713 - DNA, 25 bp, Homo sapien
cctgagcatgtgtaggctaagcgga

SEQ ID NO: 3015714 - DNA, 25 bp, Homo sapien
caggtggcttgacctaaatcggtgc

SEQ ID NO: 3015715 - DNA, 25 bp, Homo sapien
cttgacaacctctgtcacgttgaca

SEQ ID NO: 3015716 - DNA, 25 bp, Homo sapien
cagggggcaatggctagaccctgaa

SEQ ID NO: 3015717 - DNA, 25 bp, Homo sapien
agggggcaatggctagaccctgaaa

SEQ ID NO: 3015718 - DNA, 25 bp, Homo sapien
ctggttctgatagggtctagagtag

SEQ ID NO: 3015719 - DNA, 25 bp, Homo sapien
atcagactggttctgatagggtcta

SEQ ID NO: 3015720 - DNA, 25 bp, Homo sapien
cagactggttctgatagggtctaga

SEQ ID NO: 3015721 - DNA, 25 bp, Homo sapien
gactggttctgatagggtctagagt

SEQ ID NO: 3015722 - DNA, 25 bp, Homo sapien
cttctgtgtcgctggctggaatggc

SEQ ID NO: 3015723 - DNA, 25 bp, Homo sapien
cccagtggcccgcaggaaacggtga

SEQ ID NO: 3015724 - DNA, 25 bp, Homo sapien
ccagtggcccgcaggaaacggtgac

SEQ ID NO: 3015725 - DNA, 25 bp, Homo sapien
tcctagagagtatgttcagccttcc

SEQ ID NO: 3015726 - DNA, 25 bp, Homo sapien
taaggtcccataagtgctagcagat

SEQ ID NO: 3015727 - DNA, 25 bp, Homo sapien
tactgaccacgtccatgcacactga

SEQ ID NO: 3015728 - DNA, 25 bp, Homo sapien
gcctctggtcagctagcaaggaaga

SEQ ID NO: 3015729 - DNA, 25 bp, Homo sapien
ggtagcatagggagagctctgcccc

SEQ ID NO: 3015730 - DNA, 25 bp, Homo sapien
tggtagcatagggagagctctgccc

SEQ ID NO: 3015731 - DNA, 25 bp, Homo sapien
cttctggtagcatagggagagctct

SEQ ID NO: 3015732 - DNA, 25 bp, Homo sapien
tctggtagcatagggagagctctgc

SEQ ID NO: 3015733 - DNA, 25 bp, Homo sapien
agctgctgggtttacccatccatcc

SEQ ID NO: 3015734 - DNA, 25 bp, Homo sapien
gctgctgggtttacccatccatcca

SEQ ID NO: 3015735 - DNA, 25 bp, Homo sapien
ctcagtagggtcttggctcaggtca

SEQ ID NO: 3015736 - DNA, 25 bp, Homo sapien
ggaaatagatgggttgggtgcccat

SEQ ID NO: 3015737 - DNA, 25 bp, Homo sapien
ctaggatgaaggggtccacagtccg

SEQ ID NO: 3015738 - DNA, 25 bp, Homo sapien
gtccacagtccgggatgtgtccagg

SEQ ID NO: 3015739 - DNA, 25 bp, Homo sapien
aaatagatgggttgggtgcccatgc

SEQ ID NO: 3015740 - DNA, 25 bp, Homo sapien
gtgatggagacagggaatgtcttca

SEQ ID NO: 3015741 - DNA, 25 bp, Homo sapien
gtcttcaccaactcccccaaggcca

SEQ ID NO: 3015742 - DNA, 25 bp, Homo sapien
ctgtgatggagacagggaatgtctt

SEQ ID NO: 3015743 - DNA, 25 bp, Homo sapien
gatggagacagggaatgtcttcacc

SEQ ID NO: 3015744 - DNA, 25 bp, Homo sapien
gcggcccaggaacgtagccagctct

SEQ ID NO: 3015745 - DNA, 25 bp, Homo sapien
gctctggtaccacgggtctacgcgg

SEQ ID NO: 3015746 - DNA, 25 bp, Homo sapien
gggcacagcgtgttgacgttgctct

SEQ ID NO: 3015747 - DNA, 25 bp, Homo sapien
gtctacgcggcccaggaacgtagcc

SEQ ID NO: 3015748 - DNA, 25 bp, Homo sapien
gatgtagtagagctgcaggctgagt

SEQ ID NO: 3015749 - DNA, 25 bp, Homo sapien
gggagtgaggcagaacttctgggtc

SEQ ID NO: 3015750 - DNA, 25 bp, Homo sapien
gaggcagaacttctgggtctcccgt

SEQ ID NO: 3015751 - DNA, 25 bp, Homo sapien
ctgggagtgaggcagaacttctggg

SEQ ID NO: 3015752 - DNA, 25 bp, Homo sapien
gcagaacttctgggtctcccgtttc

SEQ ID NO: 3015753 - DNA, 25 bp, Homo sapien
ccctgaccagcgcccacccccagcc

SEQ ID NO: 3015754 - DNA, 25 bp, Homo sapien
cccctgaccagcgcccacccccagc

SEQ ID NO: 3015755 - DNA, 25 bp, Homo sapien
cctgaccagcgcccacccccagccc

SEQ ID NO: 3015756 - DNA, 25 bp, Homo sapien
gcgccccagcatcctgtcatctccg

SEQ ID NO: 3015757 - DNA, 25 bp, Homo sapien
cccagcatcctgtcatctccgagca

SEQ ID NO: 3015758 - DNA, 25 bp, Homo sapien
gccccagcatcctgtcatctccgag

SEQ ID NO: 3015759 - DNA, 25 bp, Homo sapien
agcatcctgtcatctccgagcacaa

SEQ ID NO: 3015760 - DNA, 25 bp, Homo sapien
gtcccagctgccaggcatcaagaag

SEQ ID NO: 3015761 - DNA, 25 bp, Homo sapien
aggtcccgctcaatgccgctgtcag

SEQ ID NO: 3015762 - DNA, 25 bp, Homo sapien
tgcagatccaagacctccaagtcag

SEQ ID NO: 3015763 - DNA, 25 bp, Homo sapien
agcactgaggcgcagctgggatctt

SEQ ID NO: 3015764 - DNA, 25 bp, Homo sapien
caggggaatgcttggtggccgctct

SEQ ID NO: 3015765 - DNA, 25 bp, Homo sapien
ctgggcaggggaatgcttggtggcc

SEQ ID NO: 3015766 - DNA, 25 bp, Homo sapien
ggtggccgctcttggacaaggtcac

SEQ ID NO: 3015767 - DNA, 25 bp, Homo sapien
cggtccacaagtggaaggtgatgta

SEQ ID NO: 3015768 - DNA, 25 bp, Homo sapien
aaatagtgctccagggtgcggcgag

SEQ ID NO: 3015769 - DNA, 25 bp, Homo sapien
acccagcagcgagcagtaaatctcc

SEQ ID NO: 3015770 - DNA, 25 bp, Homo sapien
ctacgtgtccctcccggctcgggct

SEQ ID NO: 3015771 - DNA, 25 bp, Homo sapien
aaggcggccaccacggcgtggaaat

SEQ ID NO: 3015772 - DNA, 25 bp, Homo sapien
tgcagagcgcctgcgtgacaggcct

SEQ ID NO: 3015773 - DNA, 25 bp, Homo sapien
ctcaggatccacgaagaggaacact

SEQ ID NO: 3015774 - DNA, 25 bp, Homo sapien
gaccacgtggcgcatgcaggtctct

SEQ ID NO: 3015775 - DNA, 25 bp, Homo sapien
agcttcctgtgcagagcgcctgcgt

SEQ ID NO: 3015776 - DNA, 25 bp, Homo sapien
gttctgttcggcaatgaccatcctt

SEQ ID NO: 3015777 - DNA, 25 bp, Homo sapien
tcattcgtcaagttctgttcggcaa

SEQ ID NO: 3015778 - DNA, 25 bp, Homo sapien
tcctggtagggatacagctcattcg

SEQ ID NO: 3015779 - DNA, 25 bp, Homo sapien
gggatacagctcattcgtcaagttc

SEQ ID NO: 3015780 - DNA, 25 bp, Homo sapien
tgtggaggcttttgagctccccggt

SEQ ID NO: 3015781 - DNA, 25 bp, Homo sapien
ggtgtggaggcttttgagctccccg

SEQ ID NO: 3015782 - DNA, 25 bp, Homo sapien
ggaggcttttgagctccccggtatc

SEQ ID NO: 3015783 - DNA, 25 bp, Homo sapien
tggaggcttttgagctccccggtat

SEQ ID NO: 3015784 - DNA, 25 bp, Homo sapien
aaaggcatagattctctggtagagc

SEQ ID NO: 3015785 - DNA, 25 bp, Homo sapien
tgggcagggtcagtaaccttgtgca

SEQ ID NO: 3015786 - DNA, 25 bp, Homo sapien
gttttcagccttatcgcgcagtcca

SEQ ID NO: 3015787 - DNA, 25 bp, Homo sapien
tgggacagccatctccgttttcagc

SEQ ID NO: 3015788 - DNA, 25 bp, Homo sapien
aatgatgacatgccggaggtcctgg

SEQ ID NO: 3015789 - DNA, 25 bp, Homo sapien
gaatgatgacatgccggaggtcctg

SEQ ID NO: 3015790 - DNA, 25 bp, Homo sapien
tccatttgtggtcgcgttatagtgc

SEQ ID NO: 3015791 - DNA, 25 bp, Homo sapien
catgcaggcaaccaaagcttatgag

SEQ ID NO: 3015792 - DNA, 25 bp, Homo sapien
agcttatgagatatagcgctgccag

SEQ ID NO: 3015793 - DNA, 25 bp, Homo sapien
tctgacaagtgatgcgggttttcca

SEQ ID NO: 3015794 - DNA, 25 bp, Homo sapien
agcactgggctcttaccgggatctc

SEQ ID NO: 3015795 - DNA, 25 bp, Homo sapien
agaagaatgcggaccagcactgggc

SEQ ID NO: 3015796 - DNA, 25 bp, Homo sapien
gttctctgagaagaatgcggaccag

SEQ ID NO: 3015797 - DNA, 25 bp, Homo sapien
ggatctcgctcgaccttcttgtgca

SEQ ID NO: 3015798 - DNA, 25 bp, Homo sapien
cagcagtgcttgcaggtgtgtgctc

SEQ ID NO: 3015799 - DNA, 25 bp, Homo sapien
tccgagccacattctggaagtcctg

SEQ ID NO: 3015800 - DNA, 25 bp, Homo sapien
tgtatgcgtgtggaccacagagcag

SEQ ID NO: 3015801 - DNA, 25 bp, Homo sapien
ttgcaggtgtgtgctccgagccaca

SEQ ID NO: 3015802 - DNA, 25 bp, Homo sapien
ctgagctcccggagcacagcctgca

SEQ ID NO: 3015803 - DNA, 25 bp, Homo sapien
aaggtcagatgaaggccgctaagca

SEQ ID NO: 3015804 - DNA, 25 bp, Homo sapien
gatgaaggccgctaagcactgagcc

SEQ ID NO: 3015805 - DNA, 25 bp, Homo sapien
tgagccctgtgcctctgatgccaca

SEQ ID NO: 3015806 - DNA, 25 bp, Homo sapien
cagtggcggcaaaggtcagatgaag

SEQ ID NO: 3015807 - DNA, 25 bp, Homo sapien
tttatccactggatctgggaatcat

SEQ ID NO: 3015808 - DNA, 25 bp, Homo sapien
actggatctgggaatcatctgccac

SEQ ID NO: 3015809 - DNA, 25 bp, Homo sapien
tccttttatccactggatctgggaa

SEQ ID NO: 3015810 - DNA, 25 bp, Homo sapien
tccactggatctgggaatcatctgc

SEQ ID NO: 3015811 - DNA, 25 bp, Homo sapien
ctctccatgggagcctttgggtgta

SEQ ID NO: 3015812 - DNA, 25 bp, Homo sapien
gaggatgtggttgtctcgggcagca

SEQ ID NO: 3015813 - DNA, 25 bp, Homo sapien
cagaatagagaacaaggtggttgct

SEQ ID NO: 3015814 - DNA, 25 bp, Homo sapien
tgagctctccatgggagcctttggg

SEQ ID NO: 3015815 - DNA, 25 bp, Homo sapien
tgcccccatgaggtctacttctcag

SEQ ID NO: 3015816 - DNA, 25 bp, Homo sapien
caaggacaggcctgtttcctcagct

SEQ ID NO: 3015817 - DNA, 25 bp, Homo sapien
gaggtctacttctcagattcccaag

SEQ ID NO: 3015818 - DNA, 25 bp, Homo sapien
acaaggacaggcctgtttcctcagc

SEQ ID NO: 3015819 - DNA, 25 bp, Homo sapien
cagctgtgttcagaccctctttgca

SEQ ID NO: 3015820 - DNA, 25 bp, Homo sapien
tgaaggttctgagttggtcactcgc

SEQ ID NO: 3015821 - DNA, 25 bp, Homo sapien
agaccctctttgcaagcagtcagcc

SEQ ID NO: 3015822 - DNA, 25 bp, Homo sapien
tcctggctcgctgaggaccctgaag

SEQ ID NO: 3015823 - DNA, 25 bp, Homo sapien
agcctccacgggtgtctgtggtctt

SEQ ID NO: 3015824 - DNA, 25 bp, Homo sapien
gatgtcttgggggagcctccacggg

SEQ ID NO: 3015825 - DNA, 25 bp, Homo sapien
aagtccttcagccaactccccacgg

SEQ ID NO: 3015826 - DNA, 25 bp, Homo sapien
agccaactccccacggtcctgagcg

SEQ ID NO: 3015827 - DNA, 25 bp, Homo sapien
ccacactcagagtctccggggctgt

SEQ ID NO: 3015828 - DNA, 25 bp, Homo sapien
agggagcccacactcagagtctccg

SEQ ID NO: 3015829 - DNA, 25 bp, Homo sapien
gcccacactcagagtctccggggct

SEQ ID NO: 3015830 - DNA, 25 bp, Homo sapien
ggagcccacactcagagtctccggg

SEQ ID NO: 3015831 - DNA, 25 bp, Homo sapien
tccacacagcatctcgggtgtgcct

SEQ ID NO: 3015832 - DNA, 25 bp, Homo sapien
ttctgctttgggcagacagggggct

SEQ ID NO: 3015833 - DNA, 25 bp, Homo sapien
atgccagggacttcaaggagaggtc

SEQ ID NO: 3015834 - DNA, 25 bp, Homo sapien
gggtggcagtgtggcaatgcgggag

SEQ ID NO: 3015835 - DNA, 25 bp, Homo sapien
ttaatttacgggtcttcataagatg

SEQ ID NO: 3015836 - DNA, 25 bp, Homo sapien
tcataagatgtactgtacaatgctc

SEQ ID NO: 3015837 - DNA, 25 bp, Homo sapien
caatgctcaattgttatgtcattta

SEQ ID NO: 3015838 - DNA, 25 bp, Homo sapien
gatgtactgtacaatgctcaattgt

SEQ ID NO: 3015839 - DNA, 25 bp, Homo sapien
tcagacaattctgggtgtgtgattc

SEQ ID NO: 3015840 - DNA, 25 bp, Homo sapien
gcccgaccgctgcagtttataagtt

SEQ ID NO: 3015841 - DNA, 25 bp, Homo sapien
tgtgattccaggttagtaggtttgt

SEQ ID NO: 3015842 - DNA, 25 bp, Homo sapien
tatatttaaagtgtgtcccttgtga

SEQ ID NO: 3015843 - DNA, 25 bp, Homo sapien
gatacagttcatgcttccgtggcta

SEQ ID NO: 3015844 - DNA, 25 bp, Homo sapien
tctgggctggaatttcacgtaaggc

SEQ ID NO: 3015845 - DNA, 25 bp, Homo sapien
tatcctaggctgaccatttcccatg

SEQ ID NO: 3015846 - DNA, 25 bp, Homo sapien
caggtgccagaagagtgccagtgaa

SEQ ID NO: 3015847 - DNA, 25 bp, Homo sapien
gaaggagtgaggaacatcccaacgg

SEQ ID NO: 3015848 - DNA, 25 bp, Homo sapien
aacggcaatgagagtatcccagtga

SEQ ID NO: 3015849 - DNA, 25 bp, Homo sapien
tcagccacgaactgggaaggagtga

SEQ ID NO: 3015850 - DNA, 25 bp, Homo sapien
gcctcagccacgaactgggaaggag

SEQ ID NO: 3015851 - DNA, 25 bp, Homo sapien
tctactgccaggaatctaagaggct

SEQ ID NO: 3015852 - DNA, 25 bp, Homo sapien
tctgtgccgggttctgagagtagac

SEQ ID NO: 3015853 - DNA, 25 bp, Homo sapien
ggactgaactccagacatacagggt

SEQ ID NO: 3015854 - DNA, 25 bp, Homo sapien
atacagggtcctcaagtctttggca

SEQ ID NO: 3015855 - DNA, 25 bp, Homo sapien
ggcagagctccactgaaagtcatga

SEQ ID NO: 3015856 - DNA, 25 bp, Homo sapien
ctgggccggcaggtcaggaggcgtc

SEQ ID NO: 3015857 - DNA, 25 bp, Homo sapien
gcttgtagcacggtgagacctcaca

SEQ ID NO: 3015858 - DNA, 25 bp, Homo sapien
gaggagaggtcgctcttctctggct

SEQ ID NO: 3015859 - DNA, 25 bp, Homo sapien
gcaccttgtccactttgatctgcga

SEQ ID NO: 3015860 - DNA, 25 bp, Homo sapien
ggatctttctctcatcctggtccag

SEQ ID NO: 3015861 - DNA, 25 bp, Homo sapien
gctgttggagccgatgatctgcacc

SEQ ID NO: 3015862 - DNA, 25 bp, Homo sapien
ctgactacactctgcaggatctttc

SEQ ID NO: 3015863 - DNA, 25 bp, Homo sapien
gtcaggtttagcgtcagggcctcca

SEQ ID NO: 3015864 - DNA, 25 bp, Homo sapien
ctgtcaggtttagcgtcagggcctc

SEQ ID NO: 3015865 - DNA, 25 bp, Homo sapien
caggtttagcgtcagggcctccatg

SEQ ID NO: 3015866 - DNA, 25 bp, Homo sapien
tctgtcaggtttagcgtcagggcct

SEQ ID NO: 3015867 - DNA, 25 bp, Homo sapien
cacctccctactgcacaccccacac

SEQ ID NO: 3015868 - DNA, 25 bp, Homo sapien
tccagcgacttcgtccactgatggc

SEQ ID NO: 3015869 - DNA, 25 bp, Homo sapien
ttgaggttcacggaggtacagacct

SEQ ID NO: 3015870 - DNA, 25 bp, Homo sapien
caggttgctccagcgacttcgtcca

SEQ ID NO: 3015871 - DNA, 25 bp, Homo sapien
tcctgcttccggcaggccttgttga

SEQ ID NO: 3015872 - DNA, 25 bp, Homo sapien
tgtagccagaccctctgagtccaga

SEQ ID NO: 3015873 - DNA, 25 bp, Homo sapien
tgaaaggtacaagagctgagagcac

SEQ ID NO: 3015874 - DNA, 25 bp, Homo sapien
cagggaagagctcacgtcactggct

SEQ ID NO: 3015875 - DNA, 25 bp, Homo sapien
tagttagcatatccccagaaagccc

SEQ ID NO: 3015876 - DNA, 25 bp, Homo sapien
tgtaccaccctggatagacctggat

SEQ ID NO: 3015877 - DNA, 25 bp, Homo sapien
tctgtagtgttagaggaacagcctc

SEQ ID NO: 3015878 - DNA, 25 bp, Homo sapien
aaataatctgtagtgttagaggaac

SEQ ID NO: 3015879 - DNA, 25 bp, Homo sapien
gccatcgatgcccagccgcttgctg

SEQ ID NO: 3015880 - DNA, 25 bp, Homo sapien
tgttagaggaacagcctcccggtcg

SEQ ID NO: 3015881 - DNA, 25 bp, Homo sapien
aggagtggatgaagatctctgtcgt

SEQ ID NO: 3015882 - DNA, 25 bp, Homo sapien
tgtggcagcggagtgacccagctcc

SEQ ID NO: 3015883 - DNA, 25 bp, Homo sapien
tggcagcggagtgacccagctccaa

SEQ ID NO: 3015884 - DNA, 25 bp, Homo sapien
tgaagatctctgtcgtcttctcccc

SEQ ID NO: 3015885 - DNA, 25 bp, Homo sapien
ctcggtctgatagacttgcagcagc

SEQ ID NO: 3015886 - DNA, 25 bp, Homo sapien
gcggcaaagcggcagtagtagagta

SEQ ID NO: 3015887 - DNA, 25 bp, Homo sapien
gtagtagagtagcatgtcagccagg

SEQ ID NO: 3015888 - DNA, 25 bp, Homo sapien
agcagcaccggtctggcggcaaagc

SEQ ID NO: 3015889 - DNA, 25 bp, Homo sapien
gagatgtcattggtgctctcctccc

SEQ ID NO: 3015890 - DNA, 25 bp, Homo sapien
ataccaggggtccagcatgccgagg

SEQ ID NO: 3015891 - DNA, 25 bp, Homo sapien
tgcatgaggcccagtacattgcgct

SEQ ID NO: 3015892 - DNA, 25 bp, Homo sapien
catgccgaggtagtgggagatgtca

SEQ ID NO: 3015893 - DNA, 25 bp, Homo sapien
gggcaaagaacaagagtcatcatcc

SEQ ID NO: 3015894 - DNA, 25 bp, Homo sapien
tagggcaaagaacaagagtcatcat

SEQ ID NO: 3015895 - DNA, 25 bp, Homo sapien
ggcaaagaacaagagtcatcatccc

SEQ ID NO: 3015896 - DNA, 25 bp, Homo sapien
ctagggcaaagaacaagagtcatca

SEQ ID NO: 3015897 - DNA, 25 bp, Homo sapien
ccaatcggcttccttcaggtagcca

SEQ ID NO: 3015898 - DNA, 25 bp, Homo sapien
acttccaatcggcttccttcaggta

SEQ ID NO: 3015899 - DNA, 25 bp, Homo sapien
tctactttccccgaccattggccca

SEQ ID NO: 3015900 - DNA, 25 bp, Homo sapien
ttccaatcggcttccttcaggtagc

SEQ ID NO: 3015901 - DNA, 25 bp, Homo sapien
gggtgagggcgtctggctccgaggg

SEQ ID NO: 3015902 - DNA, 25 bp, Homo sapien
tccagggctggcgtgcctaggggag

SEQ ID NO: 3015903 - DNA, 25 bp, Homo sapien
cagggctggcgtgcctaggggagtc

SEQ ID NO: 3015904 - DNA, 25 bp, Homo sapien
ctggcgtgcctaggggagtctgtcg

SEQ ID NO: 3015905 - DNA, 25 bp, Homo sapien
tgaagtttgaagaaccgtgtgagga

SEQ ID NO: 3015906 - DNA, 25 bp, Homo sapien
catgacttcgcttcacaggcacgta

SEQ ID NO: 3015907 - DNA, 25 bp, Homo sapien
aggagtgggcgattgttctccagcc

SEQ ID NO: 3015908 - DNA, 25 bp, Homo sapien
gacttcgcttcacaggcacgtagaa

SEQ ID NO: 3015909 - DNA, 25 bp, Homo sapien
ggatgctccgcattacggctcttac

SEQ ID NO: 3015910 - DNA, 25 bp, Homo sapien
agggcagagggatgctccgcattac

SEQ ID NO: 3015911 - DNA, 25 bp, Homo sapien
cagagggatgctccgcattacggct

SEQ ID NO: 3015912 - DNA, 25 bp, Homo sapien
agcacaacaaccctgttacccaggg

SEQ ID NO: 3015913 - DNA, 25 bp, Homo sapien
cgaaggttgctgtacgcccgagcca

SEQ ID NO: 3015914 - DNA, 25 bp, Homo sapien
caaagaccacaacacgtagcgtgga

SEQ ID NO: 3015915 - DNA, 25 bp, Homo sapien
cgtggaagccttgggatcctcatct

SEQ ID NO: 3015916 - DNA, 25 bp, Homo sapien
gaaatccgatcggagccaaagacca

SEQ ID NO: 3015917 - DNA, 25 bp, Homo sapien
ggcacagtgcccgtcagtttccaag

SEQ ID NO: 3015918 - DNA, 25 bp, Homo sapien
gcagggaatctctctcggcacagtg

SEQ ID NO: 3015919 - DNA, 25 bp, Homo sapien
cctgggaggatgcaagggacaaggt

SEQ ID NO: 3015920 - DNA, 25 bp, Homo sapien
tggagtcatgggacgccaaagagct

SEQ ID NO: 3015921 - DNA, 25 bp, Homo sapien
ccagctgtaggtgtagcacctggcg

SEQ ID NO: 3015922 - DNA, 25 bp, Homo sapien
ggtgtagcacctggcgacagggatg

SEQ ID NO: 3015923 - DNA, 25 bp, Homo sapien
gctgtaggtgtagcacctggcgaca

SEQ ID NO: 3015924 - DNA, 25 bp, Homo sapien
ctgtaggtgtagcacctggcgacag

SEQ ID NO: 3015925 - DNA, 25 bp, Homo sapien
cctctgcggtctccgtgaagatgtc

SEQ ID NO: 3015926 - DNA, 25 bp, Homo sapien
tctccgtgaagatgtcctcaagctc

SEQ ID NO: 3015927 - DNA, 25 bp, Homo sapien
tctgcagcatccccgatgccagatg

SEQ ID NO: 3015928 - DNA, 25 bp, Homo sapien
agccagctttttctcccaccgcctg

SEQ ID NO: 3015929 - DNA, 25 bp, Homo sapien
cgggacgtcacagtgggccccaaag

SEQ ID NO: 3015930 - DNA, 25 bp, Homo sapien
tgtaggcactgtgaggcgagtgtcc

SEQ ID NO: 3015931 - DNA, 25 bp, Homo sapien
gagtgtccgggcgtactcagcttat

SEQ ID NO: 3015932 - DNA, 25 bp, Homo sapien
tcagcttattggctacagcaaggaa

SEQ ID NO: 3015933 - DNA, 25 bp, Homo sapien
taagaatctggtgaaagaccgtcag

SEQ ID NO: 3015934 - DNA, 25 bp, Homo sapien
gaaagaccgtcagcctagaaaaaca

SEQ ID NO: 3015935 - DNA, 25 bp, Homo sapien
tctggtgaaagaccgtcagcctaga

SEQ ID NO: 3015936 - DNA, 25 bp, Homo sapien
gaatctggtgaaagaccgtcagcct

SEQ ID NO: 3015937 - DNA, 25 bp, Homo sapien
cacaaaatatcaccagcagtgccag

SEQ ID NO: 3015938 - DNA, 25 bp, Homo sapien
tccctggaagcctgtttgttgctgg

SEQ ID NO: 3015939 - DNA, 25 bp, Homo sapien
ctggacacaaaatatcaccagcagt

SEQ ID NO: 3015940 - DNA, 25 bp, Homo sapien
gacacaaaatatcaccagcagtgcc

SEQ ID NO: 3015941 - DNA, 25 bp, Homo sapien
gtggagctgcggtgactcctgatgg

SEQ ID NO: 3015942 - DNA, 25 bp, Homo sapien
gctgcggtgactcctgatgggcagg

SEQ ID NO: 3015943 - DNA, 25 bp, Homo sapien
agccctcaccagtctctggtaggag

SEQ ID NO: 3015944 - DNA, 25 bp, Homo sapien
gagctgcggtgactcctgatgggca

SEQ ID NO: 3015945 - DNA, 25 bp, Homo sapien
cctccagggtgcctagcagtttgct

SEQ ID NO: 3015946 - DNA, 25 bp, Homo sapien
cagtttgcttctatgcgtcctttta

SEQ ID NO: 3015947 - DNA, 25 bp, Homo sapien
ttttacacctcacgagtcatatccc

SEQ ID NO: 3015948 - DNA, 25 bp, Homo sapien
tatgcgtccttttacacctcacgag

SEQ ID NO: 3015949 - DNA, 25 bp, Homo sapien
gagttcagcatcaatgaaggtgagc

SEQ ID NO: 3015950 - DNA, 25 bp, Homo sapien
cttgagttcagcatcaatgaaggtg

SEQ ID NO: 3015951 - DNA, 25 bp, Homo sapien
tggggccttgagttcagcatcaatg

SEQ ID NO: 3015952 - DNA, 25 bp, Homo sapien
gggccttgagttcagcatcaatgaa

SEQ ID NO: 3015953 - DNA, 25 bp, Homo sapien
caggaaccggtggtaggtgctggct

SEQ ID NO: 3015954 - DNA, 25 bp, Homo sapien
gatccgagtctggtgggaagtgtgg

SEQ ID NO: 3015955 - DNA, 25 bp, Homo sapien
ttcagaaggagatccgagtctggtg

SEQ ID NO: 3015956 - DNA, 25 bp, Homo sapien
ctgccttcagaaggagatccgagtc

SEQ ID NO: 3015957 - DNA, 25 bp, Homo sapien
tccagcatcctggcccacgtggact

SEQ ID NO: 3015958 - DNA, 25 bp, Homo sapien
ctccagcatcctggcccacgtggac

SEQ ID NO: 3015959 - DNA, 25 bp, Homo sapien
agcatcctggcccacgtggacttac

SEQ ID NO: 3015960 - DNA, 25 bp, Homo sapien
cagcatcctggcccacgtggactta

SEQ ID NO: 3015961 - DNA, 25 bp, Homo sapien
aagaacagtggaatagaagagcagg

SEQ ID NO: 3015962 - DNA, 25 bp, Homo sapien
caggtcgtaggtgcccttctcctgg

SEQ ID NO: 3015963 - DNA, 25 bp, Homo sapien
gggtgagcaggtcgtaggtgccctt

SEQ ID NO: 3015964 - DNA, 25 bp, Homo sapien
acaaagaacagtggaatagaagagc

SEQ ID NO: 3015965 - DNA, 25 bp, Homo sapien
aagtggcccgggtccctgctgacca

SEQ ID NO: 3015966 - DNA, 25 bp, Homo sapien
cgtgcatgtcgtggcccctggctgc

SEQ ID NO: 3015967 - DNA, 25 bp, Homo sapien
tgcggtcctccgtgcatgtcgtggc

SEQ ID NO: 3015968 - DNA, 25 bp, Homo sapien
gctggatgcggtcctccgtgcatgt

SEQ ID NO: 3015969 - DNA, 25 bp, Homo sapien
tccgtgcatgtcgtggcccctggct

SEQ ID NO: 3015970 - DNA, 25 bp, Homo sapien
gtccagtaaagacaacaggtgctca

SEQ ID NO: 3015971 - DNA, 25 bp, Homo sapien
ggacagacgccggtcagcttgtcga

SEQ ID NO: 3015972 - DNA, 25 bp, Homo sapien
ttgtcgagctcctttcccagagagc

SEQ ID NO: 3015973 - DNA, 25 bp, Homo sapien
aggtgctcacagtgcagcgcgatca

SEQ ID NO: 3015974 - DNA, 25 bp, Homo sapien
taaaatgctgtagcagatgcgctga

SEQ ID NO: 3015975 - DNA, 25 bp, Homo sapien
gctgtagcagatgcgctgagtaagc

SEQ ID NO: 3015976 - DNA, 25 bp, Homo sapien
ggaagataaaatgctgtagcagatg

SEQ ID NO: 3015977 - DNA, 25 bp, Homo sapien
aatgctgtagcagatgcgctgagta

SEQ ID NO: 3015978 - DNA, 25 bp, Homo sapien
gcagaccccttcactggccagtcag

SEQ ID NO: 3015979 - DNA, 25 bp, Homo sapien
tcaggccaggccatagagggatgct

SEQ ID NO: 3015980 - DNA, 25 bp, Homo sapien
cagaccccttcactggccagtcagg

SEQ ID NO: 3015981 - DNA, 25 bp, Homo sapien
tggccagtcaggccaggccatagag

SEQ ID NO: 3015982 - DNA, 25 bp, Homo sapien
gagctcgccccaagttcttctcaga

SEQ ID NO: 3015983 - DNA, 25 bp, Homo sapien
cctcaggcactggtggaattctggt

SEQ ID NO: 3015984 - DNA, 25 bp, Homo sapien
ataggactgctgctagcacaccgca

SEQ ID NO: 3015985 - DNA, 25 bp, Homo sapien
tcccacactgtaatggatgcaaaca

SEQ ID NO: 3015986 - DNA, 25 bp, Homo sapien
atcagctgtttcttatgacttgtca

SEQ ID NO: 3015987 - DNA, 25 bp, Homo sapien
ctgtttcttatgacttgtcagcaga

SEQ ID NO: 3015988 - DNA, 25 bp, Homo sapien
cctttgacacgctcatttccgtctg

SEQ ID NO: 3015989 - DNA, 25 bp, Homo sapien
ctttgacacgctcatttccgtctga

SEQ ID NO: 3015990 - DNA, 25 bp, Homo sapien
tgaaatatccaacaacagggccttc

SEQ ID NO: 3015991 - DNA, 25 bp, Homo sapien
ccagcatgacgccttttttcaaaag

SEQ ID NO: 3015992 - DNA, 25 bp, Homo sapien
ttcccatgttgacaggatgccatga

SEQ ID NO: 3015993 - DNA, 25 bp, Homo sapien
gatgccatgatgtggagggctcatc

SEQ ID NO: 3015994 - DNA, 25 bp, Homo sapien
tagcgcaaggctggctgcctcaaaa

SEQ ID NO: 3015995 - DNA, 25 bp, Homo sapien
gaagttcctaaactggggctgagaa

SEQ ID NO: 3015996 - DNA, 25 bp, Homo sapien
gagcttcttgaacattgctatttct

SEQ ID NO: 3015997 - DNA, 25 bp, Homo sapien
ttctgtagtcacagtggactagcgc

SEQ ID NO: 3015998 - DNA, 25 bp, Homo sapien
gaagccaagtagatagccaggtctt

SEQ ID NO: 3015999 - DNA, 25 bp, Homo sapien
ctggccaggccgtaatgaggttccc

SEQ ID NO: 3016000 - DNA, 25 bp, Homo sapien
cagggaaaattgtggtgccacctcc

SEQ ID NO: 3016001 - DNA, 25 bp, Homo sapien
ttaatcggcttagacttccaccctg

SEQ ID NO: 3016002 - DNA, 25 bp, Homo sapien
tgttgaacgagtcgtttttggccac

SEQ ID NO: 3016003 - DNA, 25 bp, Homo sapien
cgagtcgtttttggccacccacagt

SEQ ID NO: 3016004 - DNA, 25 bp, Homo sapien
aggttgcctgggagacctgcttcct

SEQ ID NO: 3016005 - DNA, 25 bp, Homo sapien
gtcttcagaggtgttgaacgagtcg

SEQ ID NO: 3016006 - DNA, 25 bp, Homo sapien
gaatcagccttgtatatccagaata

SEQ ID NO: 3016007 - DNA, 25 bp, Homo sapien
gaataaatccctcttagctgtgatc

SEQ ID NO: 3016008 - DNA, 25 bp, Homo sapien
tctttgccttggtcccagtcttagg

SEQ ID NO: 3016009 - DNA, 25 bp, Homo sapien
tttgctttacgtaggacttccagta

SEQ ID NO: 3016010 - DNA, 25 bp, Homo sapien
taagtgagagcatgtattttgtctt

SEQ ID NO: 3016011 - DNA, 25 bp, Homo sapien
tctgctctcaagtaagccccagtgt

SEQ ID NO: 3016012 - DNA, 25 bp, Homo sapien
tttgctaagaataacagacatcctg

SEQ ID NO: 3016013 - DNA, 25 bp, Homo sapien
acagacatcctgttattctattatg

SEQ ID NO: 3016014 - DNA, 25 bp, Homo sapien
ctttccagatacttttactgaggcc

SEQ ID NO: 3016015 - DNA, 25 bp, Homo sapien
agatacttttactgaggcccaagag

SEQ ID NO: 3016016 - DNA, 25 bp, Homo sapien
cccaagagacaacaagggctctgga

SEQ ID NO: 3016017 - DNA, 25 bp, Homo sapien
gggctctggacacaagctcgtgttt

SEQ ID NO: 3016018 - DNA, 25 bp, Homo sapien
ctgtgagagccatggcaatggttcc

SEQ ID NO: 3016019 - DNA, 25 bp, Homo sapien
gccatggcaatggttccaggttggc

SEQ ID NO: 3016020 - DNA, 25 bp, Homo sapien
gtgtgtgtcctagggctgccacagt

SEQ ID NO: 3016021 - DNA, 25 bp, Homo sapien
gttggcaggtgtgtgtcctagggct

SEQ ID NO: 3016022 - DNA, 25 bp, Homo sapien
cagtgagtcgctaccagtgtcctct

SEQ ID NO: 3016023 - DNA, 25 bp, Homo sapien
tcgctaccagtgtcctctacacagt

SEQ ID NO: 3016024 - DNA, 25 bp, Homo sapien
accagtgtcctctacacagttttca

SEQ ID NO: 3016025 - DNA, 25 bp, Homo sapien
tctgacaacagcttcctcccacagg

SEQ ID NO: 3016026 - DNA, 25 bp, Homo sapien
ctagaacaggagttattaacctggg

SEQ ID NO: 3016027 - DNA, 25 bp, Homo sapien
aagtcatgttttctagaacaggagt

SEQ ID NO: 3016028 - DNA, 25 bp, Homo sapien
cacagaaagtcatgttttctagaac

SEQ ID NO: 3016029 - DNA, 25 bp, Homo sapien
ctggggataatccaaagaaatcagc

SEQ ID NO: 3016030 - DNA, 25 bp, Homo sapien
taatgaggctcagcacacaaagacc

SEQ ID NO: 3016031 - DNA, 25 bp, Homo sapien
tctttgtcttccacgggtccacagg

SEQ ID NO: 3016032 - DNA, 25 bp, Homo sapien
cagtcctggtttgtgaggcttcaaa

SEQ ID NO: 3016033 - DNA, 25 bp, Homo sapien
gaatcatccctctcgtaagctagag

SEQ ID NO: 3016034 - DNA, 25 bp, Homo sapien
ctgatgcccacgctcacggacagtt

SEQ ID NO: 3016035 - DNA, 25 bp, Homo sapien
tctgacggcacaagagccctgatgc

SEQ ID NO: 3016036 - DNA, 25 bp, Homo sapien
tcacggacagttccccgctggagcg

SEQ ID NO: 3016037 - DNA, 25 bp, Homo sapien
gggcacttccatgactcccaggttc

SEQ ID NO: 3016038 - DNA, 25 bp, Homo sapien
tgaccgtcgggaccaccgcgcccca

SEQ ID NO: 3016039 - DNA, 25 bp, Homo sapien
cggcgactccctgcgattcgggtga

SEQ ID NO: 3016040 - DNA, 25 bp, Homo sapien
agcggcgactccctgcgattcgggt

SEQ ID NO: 3016041 - DNA, 25 bp, Homo sapien
ctccctgcgattcgggtgaccgtcg

SEQ ID NO: 3016042 - DNA, 25 bp, Homo sapien
gccgcaaggcgtctgagaagcagcc

SEQ ID NO: 3016043 - DNA, 25 bp, Homo sapien
ccccgaggccgcaaggcgtctgaga

SEQ ID NO: 3016044 - DNA, 25 bp, Homo sapien
catcctctgggtcacgcccccgagg

SEQ ID NO: 3016045 - DNA, 25 bp, Homo sapien
ccagccctcggaagaagcagaccct

SEQ ID NO: 3016046 - DNA, 25 bp, Homo sapien
cgaagaaagctgaatgtgtgaccca

SEQ ID NO: 3016047 - DNA, 25 bp, Homo sapien
gattcagactttcaacagaacggaa

SEQ ID NO: 3016048 - DNA, 25 bp, Homo sapien
cagaagattgggaaccgaagaaagc

SEQ ID NO: 3016049 - DNA, 25 bp, Homo sapien
taacagtaattccacaaggagagag

SEQ ID NO: 3016050 - DNA, 25 bp, Homo sapien
aatgaaattcccctaatgagcaaac

SEQ ID NO: 3016051 - DNA, 25 bp, Homo sapien
gtcagagattgttagattgaagaaa

SEQ ID NO: 3016052 - DNA, 25 bp, Homo sapien
tgaagccaaaagtctgggaactagc

SEQ ID NO: 3016053 - DNA, 25 bp, Homo sapien
tgacccattaacagtcagagattgt

SEQ ID NO: 3016054 - DNA, 25 bp, Homo sapien
gagtctgggagggaattcttgagga

SEQ ID NO: 3016055 - DNA, 25 bp, Homo sapien
tcttgaggatcaaaatccatgttgt

SEQ ID NO: 3016056 - DNA, 25 bp, Homo sapien
gatcaaaatccatgttgtagatgac

SEQ ID NO: 3016057 - DNA, 25 bp, Homo sapien
tgaggatcaaaatccatgttgtaga

SEQ ID NO: 3016058 - DNA, 25 bp, Homo sapien
tgccattcgccgagcgctcaaaggg

SEQ ID NO: 3016059 - DNA, 25 bp, Homo sapien
tgtcactcccagaataaatcgccgc

SEQ ID NO: 3016060 - DNA, 25 bp, Homo sapien
aatgccattcgccgagcgctcaaag

SEQ ID NO: 3016061 - DNA, 25 bp, Homo sapien
aaaatgccattcgccgagcgctcaa

SEQ ID NO: 3016062 - DNA, 25 bp, Homo sapien
tttgggttttcagacagggctggca

SEQ ID NO: 3016063 - DNA, 25 bp, Homo sapien
cagatggaggatttttccgcttcaa

SEQ ID NO: 3016064 - DNA, 25 bp, Homo sapien
gccacagtaaccatttccgagctgg

SEQ ID NO: 3016065 - DNA, 25 bp, Homo sapien
tggaggatttttccgcttcaattat

SEQ ID NO: 3016066 - DNA, 25 bp, Homo sapien
tgggtgctttcggactctcagggcc

SEQ ID NO: 3016067 - DNA, 25 bp, Homo sapien
cttgaacgtgatgggtgctttcgga

SEQ ID NO: 3016068 - DNA, 25 bp, Homo sapien
gggtgctttcggactctcagggccc

SEQ ID NO: 3016069 - DNA, 25 bp, Homo sapien
acgtgatgggtgctttcggactctc

SEQ ID NO: 3016070 - DNA, 25 bp, Homo sapien
caaagcttttcgttcgcagccgcag

SEQ ID NO: 3016071 - DNA, 25 bp, Homo sapien
gagacaaagcttttcgttcgcagcc

SEQ ID NO: 3016072 - DNA, 25 bp, Homo sapien
gacaaagcttttcgttcgcagccgc

SEQ ID NO: 3016073 - DNA, 25 bp, Homo sapien
aaagcttttcgttcgcagccgcagc

SEQ ID NO: 3016074 - DNA, 25 bp, Homo sapien
accgagggcccggtaaggcacattg

SEQ ID NO: 3016075 - DNA, 25 bp, Homo sapien
tggacacgggtgtccccatccacac

SEQ ID NO: 3016076 - DNA, 25 bp, Homo sapien
acaccgagggcccggtaaggcacat

SEQ ID NO: 3016077 - DNA, 25 bp, Homo sapien
gagggcccggtaaggcacattgtcc

SEQ ID NO: 3016078 - DNA, 25 bp, Homo sapien
cagaggctccggactggaacgtgga

SEQ ID NO: 3016079 - DNA, 25 bp, Homo sapien
agaggctccggactggaacgtggac

SEQ ID NO: 3016080 - DNA, 25 bp, Homo sapien
aggctccggactggaacgtggacgg

SEQ ID NO: 3016081 - DNA, 25 bp, Homo sapien
ggcagaggctccggactggaacgtg

SEQ ID NO: 3016082 - DNA, 25 bp, Homo sapien
ggtctgtttgccgccagcctctttg

SEQ ID NO: 3016083 - DNA, 25 bp, Homo sapien
ttaatcctgcccgtggtcctgatcc

SEQ ID NO: 3016084 - DNA, 25 bp, Homo sapien
cagggaccacgtccatcagttggtc

SEQ ID NO: 3016085 - DNA, 25 bp, Homo sapien
cacgaaatgccctctccggtctgtt

SEQ ID NO: 3016086 - DNA, 25 bp, Homo sapien
tggtcatcagtcctgttggccacgc

SEQ ID NO: 3016087 - DNA, 25 bp, Homo sapien
ttggccacgcccctctgatggttcc

SEQ ID NO: 3016088 - DNA, 25 bp, Homo sapien
tctctctgaaagacccaggtggtca

SEQ ID NO: 3016089 - DNA, 25 bp, Homo sapien
tgggaaggctcccatacctccactt

SEQ ID NO: 3016090 - DNA, 25 bp, Homo sapien
ctaaataaatagcataccaaatgga

SEQ ID NO: 3016091 - DNA, 25 bp, Homo sapien
aaataactctcaagtatttttatga

SEQ ID NO: 3016092 - DNA, 25 bp, Homo sapien
ataaatagcataccaaatggagcag

SEQ ID NO: 3016093 - DNA, 25 bp, Homo sapien
ccatcacaggcccctgcggttgaac

SEQ ID NO: 3016094 - DNA, 25 bp, Homo sapien
gtgggtcatgtcccaactgggttct

SEQ ID NO: 3016095 - DNA, 25 bp, Homo sapien
tgggtcatgtcccaactgggttctt

SEQ ID NO: 3016096 - DNA, 25 bp, Homo sapien
gtcatgtcccaactgggttcttttc

SEQ ID NO: 3016097 - DNA, 25 bp, Homo sapien
atgtcccaactgggttcttttccat

SEQ ID NO: 3016098 - DNA, 25 bp, Homo sapien
tttgcacaggatccccaggtgacca

SEQ ID NO: 3016099 - DNA, 25 bp, Homo sapien
gcagcgctggcagaatatcccgtct

SEQ ID NO: 3016100 - DNA, 25 bp, Homo sapien
tctggtcaccgttgaaaacagtgca

SEQ ID NO: 3016101 - DNA, 25 bp, Homo sapien
aggtccagaagaacggcctccttga

SEQ ID NO: 3016102 - DNA, 25 bp, Homo sapien
ttgtgcctcgttagcaactgctggg

SEQ ID NO: 3016103 - DNA, 25 bp, Homo sapien
cccaccaggaaaggacggcagattg

SEQ ID NO: 3016104 - DNA, 25 bp, Homo sapien
cagattggcctgagttacatccaga

SEQ ID NO: 3016105 - DNA, 25 bp, Homo sapien
taactgggcaagctgcgctacaagg

SEQ ID NO: 3016106 - DNA, 25 bp, Homo sapien
tccagtgtcacctctagtgagggtc

SEQ ID NO: 3016107 - DNA, 25 bp, Homo sapien
tgtcacctctagtgagggtcccacc

SEQ ID NO: 3016108 - DNA, 25 bp, Homo sapien
taggtccgctccattccagaatgcc

SEQ ID NO: 3016109 - DNA, 25 bp, Homo sapien
ggaagaaatgggtgcttggacacct

SEQ ID NO: 3016110 - DNA, 25 bp, Homo sapien
tcatgttgaaccaaagagtgggccc

SEQ ID NO: 3016111 - DNA, 25 bp, Homo sapien
cagtgggactttagagggagacctc

SEQ ID NO: 3016112 - DNA, 25 bp, Homo sapien
tcttacctgtctgaaagcgcgtggg

SEQ ID NO: 3016113 - DNA, 25 bp, Homo sapien
tgtcacgcgcatttcagagggctgt

SEQ ID NO: 3016114 - DNA, 25 bp, Homo sapien
gcatcaggggcttcgaagacagtag

SEQ ID NO: 3016115 - DNA, 25 bp, Homo sapien
cggccgacttagaggcactgcccat

SEQ ID NO: 3016116 - DNA, 25 bp, Homo sapien
gctgtggccctttgcattcgcacgg

SEQ ID NO: 3016117 - DNA, 25 bp, Homo sapien
gcttcgaagacagtaggagcctgtg

SEQ ID NO: 3016118 - DNA, 25 bp, Homo sapien
gacgaatttaagagaccatagggaa

SEQ ID NO: 3016119 - DNA, 25 bp, Homo sapien
tctcccttcctaccatggacgaatt

SEQ ID NO: 3016120 - DNA, 25 bp, Homo sapien
catgggccgtcaaggctggatcttt

SEQ ID NO: 3016121 - DNA, 25 bp, Homo sapien
ctgcacgtctccatgggccgtcaag

SEQ ID NO: 3016122 - DNA, 25 bp, Homo sapien
ctctgtggagccgtagttgctggct

SEQ ID NO: 3016123 - DNA, 25 bp, Homo sapien
ttcttgggacacagcgacagagcct

SEQ ID NO: 3016124 - DNA, 25 bp, Homo sapien
cagagcctccgtgaagcatgacagg

SEQ ID NO: 3016125 - DNA, 25 bp, Homo sapien
tggcttgagaatcccgggccttgct

SEQ ID NO: 3016126 - DNA, 25 bp, Homo sapien
gcaacttcttgaatgtggcccactt

SEQ ID NO: 3016127 - DNA, 25 bp, Homo sapien
gaaggctgtgaacaccactttatct

SEQ ID NO: 3016128 - DNA, 25 bp, Homo sapien
aacttcttgaatgtggcccacttcc

SEQ ID NO: 3016129 - DNA, 25 bp, Homo sapien
ggctgtgaacaccactttatctcct

SEQ ID NO: 3016130 - DNA, 25 bp, Homo sapien
tgacttcgcggtagaagcaatttcc

SEQ ID NO: 3016131 - DNA, 25 bp, Homo sapien
acttcgcggtagaagcaatttcctc

SEQ ID NO: 3016132 - DNA, 25 bp, Homo sapien
tcgcggtagaagcaatttcctcagc

SEQ ID NO: 3016133 - DNA, 25 bp, Homo sapien
ggtgacttcgcggtagaagcaattt

SEQ ID NO: 3016134 - DNA, 25 bp, Homo sapien
tggccacggtgagctgcaagggaat

SEQ ID NO: 3016135 - DNA, 25 bp, Homo sapien
ttctagattggagacattagggttt

SEQ ID NO: 3016136 - DNA, 25 bp, Homo sapien
agtattctagattggagacattagg

SEQ ID NO: 3016137 - DNA, 25 bp, Homo sapien
gtcctggggccagaagtagattcat

SEQ ID NO: 3016138 - DNA, 25 bp, Homo sapien
tctctgcccggggaggacagaccat

SEQ ID NO: 3016139 - DNA, 25 bp, Homo sapien
ttctctgcccggggaggacagacca

SEQ ID NO: 3016140 - DNA, 25 bp, Homo sapien
caggtttctctgcccggggaggaca

SEQ ID NO: 3016141 - DNA, 25 bp, Homo sapien
tccaggtttctctgcccggggagga

SEQ ID NO: 3016142 - DNA, 25 bp, Homo sapien
caggcctcgcagaccttgccctcgt

SEQ ID NO: 3016143 - DNA, 25 bp, Homo sapien
tcccgtgttctctcgggcacacgct

SEQ ID NO: 3016144 - DNA, 25 bp, Homo sapien
tcgggcacacgcttacagagagcca

SEQ ID NO: 3016145 - DNA, 25 bp, Homo sapien
ggcgccggccctgtcccgtgttctc

SEQ ID NO: 3016146 - DNA, 25 bp, Homo sapien
tagaacactcaagaactgggacccc

SEQ ID NO: 3016147 - DNA, 25 bp, Homo sapien
tcttcatgggcaaacaggcgggagc

SEQ ID NO: 3016148 - DNA, 25 bp, Homo sapien
ggccactgactctggatgagccttg

SEQ ID NO: 3016149 - DNA, 25 bp, Homo sapien
agaccacagagacatcttcatgggc

SEQ ID NO: 3016150 - DNA, 25 bp, Homo sapien
tgcctttgttcagggagctggttgg

SEQ ID NO: 3016151 - DNA, 25 bp, Homo sapien
cgatgcctttgttcagggagctggt

SEQ ID NO: 3016152 - DNA, 25 bp, Homo sapien
cctttgttcagggagctggttggct

SEQ ID NO: 3016153 - DNA, 25 bp, Homo sapien
gctccagccagcctcggagcactgg

SEQ ID NO: 3016154 - DNA, 25 bp, Homo sapien
gagcatcactgagaccaagccttgg

SEQ ID NO: 3016155 - DNA, 25 bp, Homo sapien
gcagctgcagctcgtgacacgcttt

SEQ ID NO: 3016156 - DNA, 25 bp, Homo sapien
cagccagctctacgttgggtgtcct

SEQ ID NO: 3016157 - DNA, 25 bp, Homo sapien
gacacgctttccacagcgggagatt

SEQ ID NO: 3016158 - DNA, 25 bp, Homo sapien
ccaccttctcgtgtccttacagggt

SEQ ID NO: 3016159 - DNA, 25 bp, Homo sapien
ctcttacaaggacacaggtcatagg

SEQ ID NO: 3016160 - DNA, 25 bp, Homo sapien
gtgtcggtagggttgctttcctcca

SEQ ID NO: 3016161 - DNA, 25 bp, Homo sapien
ggccaccttctcgtgtccttacagg

SEQ ID NO: 3016162 - DNA, 25 bp, Homo sapien
tgacaaaaacatggaaacggttgcc

SEQ ID NO: 3016163 - DNA, 25 bp, Homo sapien
tgtctgcacagtcaaatacactcgg

SEQ ID NO: 3016164 - DNA, 25 bp, Homo sapien
tcacactgagtgttgagtcccttgg

SEQ ID NO: 3016165 - DNA, 25 bp, Homo sapien
gatgctcggagcctgggatcaaagc

SEQ ID NO: 3016166 - DNA, 25 bp, Homo sapien
gtggatggcgcggagacgtggacgg

SEQ ID NO: 3016167 - DNA, 25 bp, Homo sapien
cgtggacgggaggagaactgtgaat

SEQ ID NO: 3016168 - DNA, 25 bp, Homo sapien
tgtgaattctcaagcccgtagtgtg

SEQ ID NO: 3016169 - DNA, 25 bp, Homo sapien
gcgggcgcagaatcgcacaactggg

SEQ ID NO: 3016170 - DNA, 25 bp, Homo sapien
tgctacctgctgagtgggtcctact

SEQ ID NO: 3016171 - DNA, 25 bp, Homo sapien
cactgctacctgctgagtgggtcct

SEQ ID NO: 3016172 - DNA, 25 bp, Homo sapien
tacctgctgagtgggtcctactggg

SEQ ID NO: 3016173 - DNA, 25 bp, Homo sapien
ggcttggggtcggtgagtggttcac

SEQ ID NO: 3016174 - DNA, 25 bp, Homo sapien
agaggagaggaagcccctgctgctg

SEQ ID NO: 3016175 - DNA, 25 bp, Homo sapien
aggaagcccctgctgctgcctgtct

SEQ ID NO: 3016176 - DNA, 25 bp, Homo sapien
gctgctgcctgtctctgcccctgcc

SEQ ID NO: 3016177 - DNA, 25 bp, Homo sapien
gagaggaagcccctgctgctgcctg

SEQ ID NO: 3016178 - DNA, 25 bp, Homo sapien
gagtgcctgctttacggacacgcag

SEQ ID NO: 3016179 - DNA, 25 bp, Homo sapien
cgcagtaatgccgaagatttgcggg

SEQ ID NO: 3016180 - DNA, 25 bp, Homo sapien
gacatagggctgtccccgggattca

SEQ ID NO: 3016181 - DNA, 25 bp, Homo sapien
gggtggtctggtgcccctgacagct

SEQ ID NO: 3016182 - DNA, 25 bp, Homo sapien
ggcaggaggcagcatccccaggggc

SEQ ID NO: 3016183 - DNA, 25 bp, Homo sapien
cttggaaagcagggcaggaggcagc

SEQ ID NO: 3016184 - DNA, 25 bp, Homo sapien
cagggcaggaggcagcatccccagg

SEQ ID NO: 3016185 - DNA, 25 bp, Homo sapien
caggaggcagcatccccaggggcct

SEQ ID NO: 3016186 - DNA, 25 bp, Homo sapien
tggtccgtggacaagacattcctgt

SEQ ID NO: 3016187 - DNA, 25 bp, Homo sapien
tggacagactagacccattgatggg

SEQ ID NO: 3016188 - DNA, 25 bp, Homo sapien
gaaagacgcttaggctgtcaacact

SEQ ID NO: 3016189 - DNA, 25 bp, Homo sapien
ggaactctgcctcagtcgcggcatg

SEQ ID NO: 3016190 - DNA, 25 bp, Homo sapien
tgtgggccccacatgatagaactaa

SEQ ID NO: 3016191 - DNA, 25 bp, Homo sapien
cagatggaacttgtaatgtgggccc

SEQ ID NO: 3016192 - DNA, 25 bp, Homo sapien
gacgtattgtttgggtcaatgtccc

SEQ ID NO: 3016193 - DNA, 25 bp, Homo sapien
gagttgtaatggacccagatggaac

SEQ ID NO: 3016194 - DNA, 25 bp, Homo sapien
caaagtggggccgatcatcactagg

SEQ ID NO: 3016195 - DNA, 25 bp, Homo sapien
agcaacgcaggctcaacaggccctt

SEQ ID NO: 3016196 - DNA, 25 bp, Homo sapien
atgggccccgtctagcccctcagca

SEQ ID NO: 3016197 - DNA, 25 bp, Homo sapien
gaacatattgtgttgccacgcaaag

SEQ ID NO: 3016198 - DNA, 25 bp, Homo sapien
caaagacgccccacgagttgccggg

SEQ ID NO: 3016199 - DNA, 25 bp, Homo sapien
gccaggactccgtggctctggttca

SEQ ID NO: 3016200 - DNA, 25 bp, Homo sapien
ccaggactccgtggctctggttcaa

SEQ ID NO: 3016201 - DNA, 25 bp, Homo sapien
tggctctggttcaaagacgccccac

SEQ ID NO: 3016202 - DNA, 25 bp, Homo sapien
tcattagggccgttcactgcatatt

SEQ ID NO: 3016203 - DNA, 25 bp, Homo sapien
tttcagcggagccaagcagggcgct

SEQ ID NO: 3016204 - DNA, 25 bp, Homo sapien
ccctgtgaataggaaggacacctca

SEQ ID NO: 3016205 - DNA, 25 bp, Homo sapien
tcctggtcccctcgtggtgaagcag

SEQ ID NO: 3016206 - DNA, 25 bp, Homo sapien
gggaatttattgagagcaggttttg

SEQ ID NO: 3016207 - DNA, 25 bp, Homo sapien
aatttattgagagcaggttttgcgt

SEQ ID NO: 3016208 - DNA, 25 bp, Homo sapien
tttattgagagcaggttttgcgtac

SEQ ID NO: 3016209 - DNA, 25 bp, Homo sapien
gaatttattgagagcaggttttgcg

SEQ ID NO: 3016210 - DNA, 25 bp, Homo sapien
caaaagggtgttgggcttgcatctg

SEQ ID NO: 3016211 - DNA, 25 bp, Homo sapien
tgtcactgctggtggtctctttact

SEQ ID NO: 3016212 - DNA, 25 bp, Homo sapien
tcactgctggtggtctctttactgc

SEQ ID NO: 3016213 - DNA, 25 bp, Homo sapien
actgctggtggtctctttactgcca

SEQ ID NO: 3016214 - DNA, 25 bp, Homo sapien
tcattggcaggtgtcactgctggtg

SEQ ID NO: 3016215 - DNA, 25 bp, Homo sapien
caacaaccacgatagccacaagcag

SEQ ID NO: 3016216 - DNA, 25 bp, Homo sapien
accacgatagccacaagcagcagta

SEQ ID NO: 3016217 - DNA, 25 bp, Homo sapien
aaccacgatagccacaagcagcagt

SEQ ID NO: 3016218 - DNA, 25 bp, Homo sapien
acaaccacgatagccacaagcagca

SEQ ID NO: 3016219 - DNA, 25 bp, Homo sapien
gatgtagttccctctgagccttcag

SEQ ID NO: 3016220 - DNA, 25 bp, Homo sapien
ttcagtttgtacgaagtggagagag

SEQ ID NO: 3016221 - DNA, 25 bp, Homo sapien
gagactcagagggatgtagttccct

SEQ ID NO: 3016222 - DNA, 25 bp, Homo sapien
ctgagccttcagtttgtacgaagtg

SEQ ID NO: 3016223 - DNA, 25 bp, Homo sapien
acttagtgcaatgagctcactgtct

SEQ ID NO: 3016224 - DNA, 25 bp, Homo sapien
cacttagtgcaatgagctcactgtc

SEQ ID NO: 3016225 - DNA, 25 bp, Homo sapien
tcacttagtgcaatgagctcactgt

SEQ ID NO: 3016226 - DNA, 25 bp, Homo sapien
cgacaccagggtattactaccaaag

SEQ ID NO: 3016227 - DNA, 25 bp, Homo sapien
cagggcgacaccagggtattactac

SEQ ID NO: 3016228 - DNA, 25 bp, Homo sapien
ctggcagggcgacaccagggtatta

SEQ ID NO: 3016229 - DNA, 25 bp, Homo sapien
ggcgacaccagggtattactaccaa

SEQ ID NO: 3016230 - DNA, 25 bp, Homo sapien
gatagaaagcgctatgacccttccc

SEQ ID NO: 3016231 - DNA, 25 bp, Homo sapien
cctgatctccaatctttggatagaa

SEQ ID NO: 3016232 - DNA, 25 bp, Homo sapien
aattgttcttgctaccaacgtggca

SEQ ID NO: 3016233 - DNA, 25 bp, Homo sapien
tgctaccaacgtggcattcctgatc

SEQ ID NO: 3016234 - DNA, 25 bp, Homo sapien
tcacatcaggctgacacagatggcc

SEQ ID NO: 3016235 - DNA, 25 bp, Homo sapien
ccttggccactaaggacgctgcctt

SEQ ID NO: 3016236 - DNA, 25 bp, Homo sapien
caggctgacacagatggccttggcc

SEQ ID NO: 3016237 - DNA, 25 bp, Homo sapien
ttcctcacagaagcccgaggaaatg

SEQ ID NO: 3016238 - DNA, 25 bp, Homo sapien
tccctgagcgccagtctttgctaat

SEQ ID NO: 3016239 - DNA, 25 bp, Homo sapien
actccgagtgcctcgaacgagagca

SEQ ID NO: 3016240 - DNA, 25 bp, Homo sapien
gataaatgagatacgtgggaagcac

SEQ ID NO: 3016241 - DNA, 25 bp, Homo sapien
aacgagagcaactggagcccaattc

SEQ ID NO: 3016242 - DNA, 25 bp, Homo sapien
tgagtgattttggtccagtacatgc

SEQ ID NO: 3016243 - DNA, 25 bp, Homo sapien
tgcaactgagctggataaggattat

SEQ ID NO: 3016244 - DNA, 25 bp, Homo sapien
cagcccctgagtgattttggtccag

SEQ ID NO: 3016245 - DNA, 25 bp, Homo sapien
tgagctggataaggattattttctc

SEQ ID NO: 3016246 - DNA, 25 bp, Homo sapien
tatttcaaatctagagtttacagcg

SEQ ID NO: 3016247 - DNA, 25 bp, Homo sapien
ttacagcgtcagtaggtttaatgcg

SEQ ID NO: 3016248 - DNA, 25 bp, Homo sapien
tctagagtttacagcgtcagtaggt

SEQ ID NO: 3016249 - DNA, 25 bp, Homo sapien
tcagtaggtttaatgcggatgaaca

SEQ ID NO: 3016250 - DNA, 25 bp, Homo sapien
gacaccagcataggttgggtagaaa

SEQ ID NO: 3016251 - DNA, 25 bp, Homo sapien
aagtagacatctaaagacaccagca

SEQ ID NO: 3016252 - DNA, 25 bp, Homo sapien
catgtatgtcctctaacaagtagac

SEQ ID NO: 3016253 - DNA, 25 bp, Homo sapien
tagaacctagatagggattccaggg

SEQ ID NO: 3016254 - DNA, 25 bp, Homo sapien
gaaaagtctgatggaaattgtaacc

SEQ ID NO: 3016255 - DNA, 25 bp, Homo sapien
gcaattacagtactggaaaaggctg

SEQ ID NO: 3016256 - DNA, 25 bp, Homo sapien
cctgaatcatattcgaggattttct

SEQ ID NO: 3016257 - DNA, 25 bp, Homo sapien
tactgtggtgtatttcctcgggaga

SEQ ID NO: 3016258 - DNA, 25 bp, Homo sapien
caaaggggaaaatccatcctggcta

SEQ ID NO: 3016259 - DNA, 25 bp, Homo sapien
gggaaaatccatcctggctaacatg

SEQ ID NO: 3016260 - DNA, 25 bp, Homo sapien
tataatagacaaaggggaaaatcca

SEQ ID NO: 3016261 - DNA, 25 bp, Homo sapien
caagaattataatagacaaagggga

SEQ ID NO: 3016262 - DNA, 25 bp, Homo sapien
aagagacagcttctagaattgcaag

SEQ ID NO: 3016263 - DNA, 25 bp, Homo sapien
gtagtttaactctgttggtagcaca

SEQ ID NO: 3016264 - DNA, 25 bp, Homo sapien
tgtgggcggacaatgaaagaactaa

SEQ ID NO: 3016265 - DNA, 25 bp, Homo sapien
gcaaatcgagtcatgtcagtacaag

SEQ ID NO: 3016266 - DNA, 25 bp, Homo sapien
tcttgtcggtgttttgcgagccctc

SEQ ID NO: 3016267 - DNA, 25 bp, Homo sapien
tgtcggtgttttgcgagccctctct

SEQ ID NO: 3016268 - DNA, 25 bp, Homo sapien
tttctcttgtcggtgttttgcgagc

SEQ ID NO: 3016269 - DNA, 25 bp, Homo sapien
ggtgttttgcgagccctctctcact

SEQ ID NO: 3016270 - DNA, 25 bp, Homo sapien
tccctttggcctaggagtttgcagt

SEQ ID NO: 3016271 - DNA, 25 bp, Homo sapien
ccctttggcctaggagtttgcagtc

SEQ ID NO: 3016272 - DNA, 25 bp, Homo sapien
ttccctttggcctaggagtttgcag

SEQ ID NO: 3016273 - DNA, 25 bp, Homo sapien
cctttggcctaggagtttgcagtct

SEQ ID NO: 3016274 - DNA, 25 bp, Homo sapien
tgagcagaagcggtgtggcccactt

SEQ ID NO: 3016275 - DNA, 25 bp, Homo sapien
tagccataaggtgcccatgacctgg

SEQ ID NO: 3016276 - DNA, 25 bp, Homo sapien
catgacctggctttgaccaaggaga

SEQ ID NO: 3016277 - DNA, 25 bp, Homo sapien
tccaggcatggacacataagcagca

SEQ ID NO: 3016278 - DNA, 25 bp, Homo sapien
tttatacgtctagatacataaatat

SEQ ID NO: 3016279 - DNA, 25 bp, Homo sapien
tactatttatacgtctagatacata

SEQ ID NO: 3016280 - DNA, 25 bp, Homo sapien
ttatactatttatacgtctagatac

SEQ ID NO: 3016281 - DNA, 25 bp, Homo sapien
ctatttatacgtctagatacataaa

SEQ ID NO: 3016282 - DNA, 25 bp, Homo sapien
tataaatggcgggttagcggtcatc

SEQ ID NO: 3016283 - DNA, 25 bp, Homo sapien
cagcagtacacaagtcctcagcagt

SEQ ID NO: 3016284 - DNA, 25 bp, Homo sapien
tcagcagtacccagatgacatgcca

SEQ ID NO: 3016285 - DNA, 25 bp, Homo sapien
tacccagatgacatgccacagggca

SEQ ID NO: 3016286 - DNA, 25 bp, Homo sapien
tcactgccggaataaccctgggtct

SEQ ID NO: 3016287 - DNA, 25 bp, Homo sapien
caatcagaagaacggtgggatcacg

SEQ ID NO: 3016288 - DNA, 25 bp, Homo sapien
ggtgggatcaccgaatgcctctctg

SEQ ID NO: 3016289 - DNA, 25 bp, Homo sapien
cactaggaacagctcaaggatttgc

SEQ ID NO: 3016290 - DNA, 25 bp, Homo sapien
gaatgctctagacaacactgtgaag

SEQ ID NO: 3016291 - DNA, 25 bp, Homo sapien
cattcaaggagttaggcccaaacgg

SEQ ID NO: 3016292 - DNA, 25 bp, Homo sapien
gattgcgttactccagaatgctcta

SEQ ID NO: 3016293 - DNA, 25 bp, Homo sapien
cagagtccatatgctgggcattcaa

SEQ ID NO: 3016294 - DNA, 25 bp, Homo sapien
ggtcctatttgtggatctgacatca

SEQ ID NO: 3016295 - DNA, 25 bp, Homo sapien
gaggcatcggtcctatttgtggatc

SEQ ID NO: 3016296 - DNA, 25 bp, Homo sapien
catcggtcctatttgtggatctgac

SEQ ID NO: 3016297 - DNA, 25 bp, Homo sapien
gcggagaggcatcggtcctatttgt

SEQ ID NO: 3016298 - DNA, 25 bp, Homo sapien
tttttaattaaggaactagagcatg

SEQ ID NO: 3016299 - DNA, 25 bp, Homo sapien
atttgaaattgagtgagtggtcttt

SEQ ID NO: 3016300 - DNA, 25 bp, Homo sapien
caactctggagggtgatacctagag

SEQ ID NO: 3016301 - DNA, 25 bp, Homo sapien
gagcatgatggtcatccaggtacca

SEQ ID NO: 3016302 - DNA, 25 bp, Homo sapien
cagcatcacagctccactcttattt

SEQ ID NO: 3016303 - DNA, 25 bp, Homo sapien
tcacagctccactcttatttggcct

SEQ ID NO: 3016304 - DNA, 25 bp, Homo sapien
gcatcacagctccactcttatttgg

SEQ ID NO: 3016305 - DNA, 25 bp, Homo sapien
cagctccactcttatttggcctcag

SEQ ID NO: 3016306 - DNA, 25 bp, Homo sapien
tctatggacttgtggccctgttaag

SEQ ID NO: 3016307 - DNA, 25 bp, Homo sapien
tcttgataatttccgaacaaggggc

SEQ ID NO: 3016308 - DNA, 25 bp, Homo sapien
cagctttatgggtgtgtgaccctca

SEQ ID NO: 3016309 - DNA, 25 bp, Homo sapien
tgttaaggtaaagctagggccagct

SEQ ID NO: 3016310 - DNA, 25 bp, Homo sapien
caggtgcaataactctggagtgtgc

SEQ ID NO: 3016311 - DNA, 25 bp, Homo sapien
caccatacgggtcttggcaagaggc

SEQ ID NO: 3016312 - DNA, 25 bp, Homo sapien
tcccagtagactggaagtttgcagt

SEQ ID NO: 3016313 - DNA, 25 bp, Homo sapien
ttcctaccagctagagcgtggccag

SEQ ID NO: 3016314 - DNA, 25 bp, Homo sapien
ctttggtgatggcagcagtggcatc

SEQ ID NO: 3016315 - DNA, 25 bp, Homo sapien
ggtgatggcagcagtggcatcaatt

SEQ ID NO: 3016316 - DNA, 25 bp, Homo sapien
aaattcactttggtgatggcagcag

SEQ ID NO: 3016317 - DNA, 25 bp, Homo sapien
ttggtgatggcagcagtggcatcaa

SEQ ID NO: 3016318 - DNA, 25 bp, Homo sapien
ccagctatggtctctggtgtccagc

SEQ ID NO: 3016319 - DNA, 25 bp, Homo sapien
gtctctggtgtccagcgctagccat

SEQ ID NO: 3016320 - DNA, 25 bp, Homo sapien
ccccagctatggtctctggtgtcca

SEQ ID NO: 3016321 - DNA, 25 bp, Homo sapien
agctatggtctctggtgtccagcgc

SEQ ID NO: 3016322 - DNA, 25 bp, Homo sapien
tgatcacgggtgacaaacgctgagg

SEQ ID NO: 3016323 - DNA, 25 bp, Homo sapien
tacactttgggtcatcgttttccga

SEQ ID NO: 3016324 - DNA, 25 bp, Homo sapien
tgtaattaagatggtggctgaggcc

SEQ ID NO: 3016325 - DNA, 25 bp, Homo sapien
gaggttggccagctcccagttgtac

SEQ ID NO: 3016326 - DNA, 25 bp, Homo sapien
caatcaatggcaacaatattctaca

SEQ ID NO: 3016327 - DNA, 25 bp, Homo sapien
tcacctccttttataggcatgttca

SEQ ID NO: 3016328 - DNA, 25 bp, Homo sapien
tttataggcatgttcaatcaatggc

SEQ ID NO: 3016329 - DNA, 25 bp, Homo sapien
ataggcatgttcaatcaatggcaac

SEQ ID NO: 3016330 - DNA, 25 bp, Homo sapien
aggcagaaaagcttcggtgccaaat

SEQ ID NO: 3016331 - DNA, 25 bp, Homo sapien
aggatgcagagccacttcgagtccc

SEQ ID NO: 3016332 - DNA, 25 bp, Homo sapien
gcagaaaagcttcggtgccaaatgg

SEQ ID NO: 3016333 - DNA, 25 bp, Homo sapien
atcggaccactcaggccgttgcagc

SEQ ID NO: 3016334 - DNA, 25 bp, Homo sapien
gaaacaaagggacttcttgtgtgtc

SEQ ID NO: 3016335 - DNA, 25 bp, Homo sapien
agagggcctgcatttcattccggcc

SEQ ID NO: 3016336 - DNA, 25 bp, Homo sapien
aagggacttcttgtgtgtcggagaa

SEQ ID NO: 3016337 - DNA, 25 bp, Homo sapien
accatttccatgaggtatcaaagga

SEQ ID NO: 3016338 - DNA, 25 bp, Homo sapien
gcagcagtaagtcaccaggagtatg

SEQ ID NO: 3016339 - DNA, 25 bp, Homo sapien
tgcagcagtaagtcaccaggagtat

SEQ ID NO: 3016340 - DNA, 25 bp, Homo sapien
cagcagtaagtcaccaggagtatga

SEQ ID NO: 3016341 - DNA, 25 bp, Homo sapien
agcagtaagtcaccaggagtatgaa

SEQ ID NO: 3016342 - DNA, 25 bp, Homo sapien
tgggttgcgaggtggctgcagtaat

SEQ ID NO: 3016343 - DNA, 25 bp, Homo sapien
gctgcagtaatgaagctgggatgaa

SEQ ID NO: 3016344 - DNA, 25 bp, Homo sapien
ccagggtgggttgcgaggtggctgc

SEQ ID NO: 3016345 - DNA, 25 bp, Homo sapien
tgcagtaatgaagctgggatgaata

SEQ ID NO: 3016346 - DNA, 25 bp, Homo sapien
ggagaataatggcgatattagctga

SEQ ID NO: 3016347 - DNA, 25 bp, Homo sapien
aggagaataatggcgatattagctg

SEQ ID NO: 3016348 - DNA, 25 bp, Homo sapien
gagaataatggcgatattagctgac

SEQ ID NO: 3016349 - DNA, 25 bp, Homo sapien
aataaaccaggccttaagcagtctt

SEQ ID NO: 3016350 - DNA, 25 bp, Homo sapien
tagcatttcccaggcaatacaagag

SEQ ID NO: 3016351 - DNA, 25 bp, Homo sapien
tgttgtttcttcagtcctgactgct

SEQ ID NO: 3016352 - DNA, 25 bp, Homo sapien
tacaagagccagtttattaggtaaa

SEQ ID NO: 3016353 - DNA, 25 bp, Homo sapien
cctatacagtaacacagagggcatt

SEQ ID NO: 3016354 - DNA, 25 bp, Homo sapien
ggccggcccctgactattaagacca

SEQ ID NO: 3016355 - DNA, 25 bp, Homo sapien
tacaggaaagcagatcctatacagt

SEQ ID NO: 3016356 - DNA, 25 bp, Homo sapien
ttaagaccaggaagagtaatcatgg

SEQ ID NO: 3016357 - DNA, 25 bp, Homo sapien
agacctagaaagaaatttcatcagg

SEQ ID NO: 3016358 - DNA, 25 bp, Homo sapien
tcttcctatctttcaggatgagata

SEQ ID NO: 3016359 - DNA, 25 bp, Homo sapien
ctgattagtagcagacctagaaaga

SEQ ID NO: 3016360 - DNA, 25 bp, Homo sapien
tcctatctttcaggatgagatataa

SEQ ID NO: 3016361 - DNA, 25 bp, Homo sapien
tttggtagagacggggtctgactat

SEQ ID NO: 3016362 - DNA, 25 bp, Homo sapien
tggtagagacggggtctgactatgt

SEQ ID NO: 3016363 - DNA, 25 bp, Homo sapien
caccacaccaggctagtttttaaat

SEQ ID NO: 3016364 - DNA, 25 bp, Homo sapien
tctttggtagagacggggtctgact

SEQ ID NO: 3016365 - DNA, 25 bp, Homo sapien
gagatgcatgcctgactgagtcacg

SEQ ID NO: 3016366 - DNA, 25 bp, Homo sapien
ccttcgtgttcagactcatgggcag

SEQ ID NO: 3016367 - DNA, 25 bp, Homo sapien
tccagagctgcagaaagtaacccag

SEQ ID NO: 3016368 - DNA, 25 bp, Homo sapien
aacatttggaggctgctcggtagac

SEQ ID NO: 3016369 - DNA, 25 bp, Homo sapien
gagtctctggactgcaggcgttgct

SEQ ID NO: 3016370 - DNA, 25 bp, Homo sapien
catgtgcagcttcaagtgggcgtct

SEQ ID NO: 3016371 - DNA, 25 bp, Homo sapien
gagctgctctcttcacatgggtacc

SEQ ID NO: 3016372 - DNA, 25 bp, Homo sapien
tagggatttactcacggacagaaca

SEQ ID NO: 3016373 - DNA, 25 bp, Homo sapien
aaggaaaggcatcaaatctgtaccc

SEQ ID NO: 3016374 - DNA, 25 bp, Homo sapien
tcttaaacagagtggcaagcaccag

SEQ ID NO: 3016375 - DNA, 25 bp, Homo sapien
tctgagcacgcaccaataactggca

SEQ ID NO: 3016376 - DNA, 25 bp, Homo sapien
tcttgtaagcaacgttagatgtcac

SEQ ID NO: 3016377 - DNA, 25 bp, Homo sapien
tcagagttagaacaaacaggcctgg

SEQ ID NO: 3016378 - DNA, 25 bp, Homo sapien
ttagtaaaaatctgccgttgacggc

SEQ ID NO: 3016379 - DNA, 25 bp, Homo sapien
tgacggctctagtttgccactggag

SEQ ID NO: 3016380 - DNA, 25 bp, Homo sapien
gactacctaattgggacaaagagcc

SEQ ID NO: 3016381 - DNA, 25 bp, Homo sapien
gaggatgtcaaagccaccagattct

SEQ ID NO: 3016382 - DNA, 25 bp, Homo sapien
ttgaggatgtcaaagccaccagatt

SEQ ID NO: 3016383 - DNA, 25 bp, Homo sapien
ggatgtcaaagccaccagattcttc

SEQ ID NO: 3016384 - DNA, 25 bp, Homo sapien
tgaggatgtcaaagccaccagattc

SEQ ID NO: 3016385 - DNA, 25 bp, Homo sapien
tagaaaagtagttaccaagggctga

SEQ ID NO: 3016386 - DNA, 25 bp, Homo sapien
gatcccgcttacaataggtacctag

SEQ ID NO: 3016387 - DNA, 25 bp, Homo sapien
gacttgagcagctatttgtacagca

SEQ ID NO: 3016388 - DNA, 25 bp, Homo sapien
caaaaggtggaacaacctgtgtcca

SEQ ID NO: 3016389 - DNA, 25 bp, Homo sapien
ttttgccaagagttgctagacctac

SEQ ID NO: 3016390 - DNA, 25 bp, Homo sapien
gagttgctagacctactcagtaagt

SEQ ID NO: 3016391 - DNA, 25 bp, Homo sapien
gccaagagttgctagacctactcag

SEQ ID NO: 3016392 - DNA, 25 bp, Homo sapien
tgctagacctactcagtaagttcca

SEQ ID NO: 3016393 - DNA, 25 bp, Homo sapien
tccacaagctatgacagaaacagag

SEQ ID NO: 3016394 - DNA, 25 bp, Homo sapien
tattttaagcaagccctccaagcga

SEQ ID NO: 3016395 - DNA, 25 bp, Homo sapien
ttaagacggcacaaaagcaagtgag

SEQ ID NO: 3016396 - DNA, 25 bp, Homo sapien
gaatttctgcagaacaagcacctgc

SEQ ID NO: 3016397 - DNA, 25 bp, Homo sapien
gctgactttctgtccaccatgttta

SEQ ID NO: 3016398 - DNA, 25 bp, Homo sapien
caagaggctgactttctgtccacca

SEQ ID NO: 3016399 - DNA, 25 bp, Homo sapien
cacaagaggctgactttctgtccac

SEQ ID NO: 3016400 - DNA, 25 bp, Homo sapien
gaggctgactttctgtccaccatgt

SEQ ID NO: 3016401 - DNA, 25 bp, Homo sapien
taggttggcaaggtcgtcaattatc

SEQ ID NO: 3016402 - DNA, 25 bp, Homo sapien
ccactaggttggcaaggtcgtcaat

SEQ ID NO: 3016403 - DNA, 25 bp, Homo sapien
cgcctggtttcattgcgaagttttt

SEQ ID NO: 3016404 - DNA, 25 bp, Homo sapien
ccgcctggtttcattgcgaagtttt

SEQ ID NO: 3016405 - DNA, 25 bp, Homo sapien
gtcagttatgacctcagaagatttc

SEQ ID NO: 3016406 - DNA, 25 bp, Homo sapien
gatgggattcattccacttgtcagt

SEQ ID NO: 3016407 - DNA, 25 bp, Homo sapien
ttttaatagacttatactgccactg

SEQ ID NO: 3016408 - DNA, 25 bp, Homo sapien
tatactgccactgttggtttgatgg

SEQ ID NO: 3016409 - DNA, 25 bp, Homo sapien
agatcgagccattgcactccatcca

SEQ ID NO: 3016410 - DNA, 25 bp, Homo sapien
gcctgggcaacaagagtgaaacacc

SEQ ID NO: 3016411 - DNA, 25 bp, Homo sapien
atcgagccattgcactccatccagc

SEQ ID NO: 3016412 - DNA, 25 bp, Homo sapien
ctgggcaacaagagtgaaacaccat

SEQ ID NO: 3016413 - DNA, 25 bp, Homo sapien
tttaatgtccctgaggccgccttcg

SEQ ID NO: 3016414 - DNA, 25 bp, Homo sapien
tagtaatgtaatgcaggcaaaaacc

SEQ ID NO: 3016415 - DNA, 25 bp, Homo sapien
tctggaatgagataatagatcccta

SEQ ID NO: 3016416 - DNA, 25 bp, Homo sapien
gccgccttcgctccagatgtgttca

SEQ ID NO: 3016417 - DNA, 25 bp, Homo sapien
tctcactatgttgagatcgcccaag

SEQ ID NO: 3016418 - DNA, 25 bp, Homo sapien
tggtccagaactcttggccccgagt

SEQ ID NO: 3016419 - DNA, 25 bp, Homo sapien
ctatgttgagatcgcccaaggtgat

SEQ ID NO: 3016420 - DNA, 25 bp, Homo sapien
ggtccagaactcttggccccgagtg

SEQ ID NO: 3016421 - DNA, 25 bp, Homo sapien
tgcttatgcctttacatggtgaccc

SEQ ID NO: 3016422 - DNA, 25 bp, Homo sapien
ggcatttagtacatctgcaacactg

SEQ ID NO: 3016423 - DNA, 25 bp, Homo sapien
aaggaaacccataccacttaagcag

SEQ ID NO: 3016424 - DNA, 25 bp, Homo sapien
tccccatggccgcatgacatggttt

SEQ ID NO: 3016425 - DNA, 25 bp, Homo sapien
tggctgaattctagaaggtagtcct

SEQ ID NO: 3016426 - DNA, 25 bp, Homo sapien
ttgctgagcatctcattgggtagca

SEQ ID NO: 3016427 - DNA, 25 bp, Homo sapien
tctcattgggtagcagggtttttgt

SEQ ID NO: 3016428 - DNA, 25 bp, Homo sapien
tgagcatctcattgggtagcagggt

SEQ ID NO: 3016429 - DNA, 25 bp, Homo sapien
caggcaagcaatcacaaaatactct

SEQ ID NO: 3016430 - DNA, 25 bp, Homo sapien
tgggcaagatattgactcacatttt

SEQ ID NO: 3016431 - DNA, 25 bp, Homo sapien
agccaagctgattttaggacaggca

SEQ ID NO: 3016432 - DNA, 25 bp, Homo sapien
cagagctgaggtcagaattcttagg

SEQ ID NO: 3016433 - DNA, 25 bp, Homo sapien
ttcccagtctcttagacgcctctgt

SEQ ID NO: 3016434 - DNA, 25 bp, Homo sapien
gtttgcggccattgcagtgattcca

SEQ ID NO: 3016435 - DNA, 25 bp, Homo sapien
tctcttagacgcctctgtttgcggc

SEQ ID NO: 3016436 - DNA, 25 bp, Homo sapien
gacgcctctgtttgcggccattgca

SEQ ID NO: 3016437 - DNA, 25 bp, Homo sapien
caatttctttaggatactggctgta

SEQ ID NO: 3016438 - DNA, 25 bp, Homo sapien
aatagctggttgtgcaaagggagac

SEQ ID NO: 3016439 - DNA, 25 bp, Homo sapien
tttgcacggattgttcaatagctgg

SEQ ID NO: 3016440 - DNA, 25 bp, Homo sapien
ggctgtaaatatttgcacggattgt

SEQ ID NO: 3016441 - DNA, 25 bp, Homo sapien
tttgtagaagcaaacatgttgccgt

SEQ ID NO: 3016442 - DNA, 25 bp, Homo sapien
ccgtctaacacagattgatcaccag

SEQ ID NO: 3016443 - DNA, 25 bp, Homo sapien
tctttctttcaaaagttggcagaga

SEQ ID NO: 3016444 - DNA, 25 bp, Homo sapien
catgttgccgtctaacacagattga

SEQ ID NO: 3016445 - DNA, 25 bp, Homo sapien
attattcatgcactctctgcccaga

SEQ ID NO: 3016446 - DNA, 25 bp, Homo sapien
cagattgatgtgtagttcgagtgga

SEQ ID NO: 3016447 - DNA, 25 bp, Homo sapien
ggaagcaagtcattccaccgtaggt

SEQ ID NO: 3016448 - DNA, 25 bp, Homo sapien
gagcaggttgcaagtgtattattca

SEQ ID NO: 3016449 - DNA, 25 bp, Homo sapien
agaaccgttagggactgagtttgct

SEQ ID NO: 3016450 - DNA, 25 bp, Homo sapien
gagaaccgttagggactgagtttgc

SEQ ID NO: 3016451 - DNA, 25 bp, Homo sapien
accgttagggactgagtttgctttg

SEQ ID NO: 3016452 - DNA, 25 bp, Homo sapien
atccacaaagagaacgaccaaggaa

SEQ ID NO: 3016453 - DNA, 25 bp, Homo sapien
caaagagaacgaccaaggaacattt

SEQ ID NO: 3016454 - DNA, 25 bp, Homo sapien
ttggcactccaatgaaatgccaaaa

SEQ ID NO: 3016455 - DNA, 25 bp, Homo sapien
ctattggcactccaatgaaatgcca

SEQ ID NO: 3016456 - DNA, 25 bp, Homo sapien
tgaagtgtgtgcacaatacgttaga

SEQ ID NO: 3016457 - DNA, 25 bp, Homo sapien
cacaatacgttagaatggtgcacaa

SEQ ID NO: 3016458 - DNA, 25 bp, Homo sapien
tagaatggtgcacaagagtttttaa

SEQ ID NO: 3016459 - DNA, 25 bp, Homo sapien
tgtgtgcacaatacgttagaatggt

SEQ ID NO: 3016460 - DNA, 25 bp, Homo sapien
ctgacagcttcttggtggagcccat

SEQ ID NO: 3016461 - DNA, 25 bp, Homo sapien
gcctctctgatctgaaactgggctg

SEQ ID NO: 3016462 - DNA, 25 bp, Homo sapien
tttgcttcaagccagtaccagggct

SEQ ID NO: 3016463 - DNA, 25 bp, Homo sapien
accactttcatagttgtcagcaaca

SEQ ID NO: 3016464 - DNA, 25 bp, Homo sapien
gccactgaacagctgtccggtgata

SEQ ID NO: 3016465 - DNA, 25 bp, Homo sapien
agctgtccggtgataaccactttca

SEQ ID NO: 3016466 - DNA, 25 bp, Homo sapien
ggatgttactatcactcccattcct

SEQ ID NO: 3016467 - DNA, 25 bp, Homo sapien
atgttactatcactcccattccttt

SEQ ID NO: 3016468 - DNA, 25 bp, Homo sapien
cttggatgttactatcactcccatt

SEQ ID NO: 3016469 - DNA, 25 bp, Homo sapien
tggatgttactatcactcccattcc

SEQ ID NO: 3016470 - DNA, 25 bp, Homo sapien
tcctggaacagagtgagcacccaat

SEQ ID NO: 3016471 - DNA, 25 bp, Homo sapien
gtaatgttattaccgctcacaggga

SEQ ID NO: 3016472 - DNA, 25 bp, Homo sapien
aaagtaaagcaagagctccctggtc

SEQ ID NO: 3016473 - DNA, 25 bp, Homo sapien
gaacgactaaagaaatggactggcc

SEQ ID NO: 3016474 - DNA, 25 bp, Homo sapien
ggtgaaagcagtacccagcttcagg

SEQ ID NO: 3016475 - DNA, 25 bp, Homo sapien
tgtgataactgaggcgtacagaagt

SEQ ID NO: 3016476 - DNA, 25 bp, Homo sapien
ctaaggctatgctgtagggtctgga

SEQ ID NO: 3016477 - DNA, 25 bp, Homo sapien
tgccaaatcctagaggcttccagag

SEQ ID NO: 3016478 - DNA, 25 bp, Homo sapien
catcccttggtatcttgcgggattg

SEQ ID NO: 3016479 - DNA, 25 bp, Homo sapien
attcaaagactctggtttccttgct

SEQ ID NO: 3016480 - DNA, 25 bp, Homo sapien
ccatccacccgcagacactgcagct

SEQ ID NO: 3016481 - DNA, 25 bp, Homo sapien
catccacccgcagacactgcagctt

SEQ ID NO: 3016482 - DNA, 25 bp, Homo sapien
tctggtcaatcccagacttattctt

SEQ ID NO: 3016483 - DNA, 25 bp, Homo sapien
caaatctggtcaatcccagacttat

SEQ ID NO: 3016484 - DNA, 25 bp, Homo sapien
aatctggtcaatcccagacttattc

SEQ ID NO: 3016485 - DNA, 25 bp, Homo sapien
gcaaatctggtcaatcccagactta

SEQ ID NO: 3016486 - DNA, 25 bp, Homo sapien
ggcgacttatgatagaggaaagggc

SEQ ID NO: 3016487 - DNA, 25 bp, Homo sapien
ttggcgacttatgatagaggaaagg

SEQ ID NO: 3016488 - DNA, 25 bp, Homo sapien
cgacttatgatagaggaaagggcat

SEQ ID NO: 3016489 - DNA, 25 bp, Homo sapien
tttggcgacttatgatagaggaaag

SEQ ID NO: 3016490 - DNA, 25 bp, Homo sapien
tgtgaagctgagtgtaatgactctt

SEQ ID NO: 3016491 - DNA, 25 bp, Homo sapien
cacgccgcatgaaggtaacattgta

SEQ ID NO: 3016492 - DNA, 25 bp, Homo sapien
taaactcaagttactcacgatcctt

SEQ ID NO: 3016493 - DNA, 25 bp, Homo sapien
ttgttcaccacggaacacgccgcat

SEQ ID NO: 3016494 - DNA, 25 bp, Homo sapien
gggacatccctaagagctgcaacta

SEQ ID NO: 3016495 - DNA, 25 bp, Homo sapien
taacaatacaacagagggacatccc

SEQ ID NO: 3016496 - DNA, 25 bp, Homo sapien
cagatctgagcccagctagtggcac

SEQ ID NO: 3016497 - DNA, 25 bp, Homo sapien
taacatacagaaggagctctccctc

SEQ ID NO: 3016498 - DNA, 25 bp, Homo sapien
tgccggatttcatcaaaacccaagc

SEQ ID NO: 3016499 - DNA, 25 bp, Homo sapien
tcctcaaagagccaagggttgggtg

SEQ ID NO: 3016500 - DNA, 25 bp, Homo sapien
ctgctgttgccggatttcatcaaaa

SEQ ID NO: 3016501 - DNA, 25 bp, Homo sapien
ctcgcttagcctcttcactcatcag

SEQ ID NO: 3016502 - DNA, 25 bp, Homo sapien
ttttggaaatgacaagtaagaggca

SEQ ID NO: 3016503 - DNA, 25 bp, Homo sapien
tttggaaatgacaagtaagaggcat

SEQ ID NO: 3016504 - DNA, 25 bp, Homo sapien
ttggaaatgacaagtaagaggcatt

SEQ ID NO: 3016505 - DNA, 25 bp, Homo sapien
ggaaatgacaagtaagaggcatttt

SEQ ID NO: 3016506 - DNA, 25 bp, Homo sapien
gagtcctggtagggtaaacagatct

SEQ ID NO: 3016507 - DNA, 25 bp, Homo sapien
cgagtcctggtagggtaaacagatc

SEQ ID NO: 3016508 - DNA, 25 bp, Homo sapien
agcgagtcctggtagggtaaacaga

SEQ ID NO: 3016509 - DNA, 25 bp, Homo sapien
aagcgagtcctggtagggtaaacag

SEQ ID NO: 3016510 - DNA, 25 bp, Homo sapien
acttcttgctggtcctcgataggtc

SEQ ID NO: 3016511 - DNA, 25 bp, Homo sapien
ttcttgctggtcctcgataggtcca

SEQ ID NO: 3016512 - DNA, 25 bp, Homo sapien
tgctggtcctcgataggtccacatg

SEQ ID NO: 3016513 - DNA, 25 bp, Homo sapien
ctggtcctcgataggtccacatggt

SEQ ID NO: 3016514 - DNA, 25 bp, Homo sapien
tctgaaccatcctagacttctggtc

SEQ ID NO: 3016515 - DNA, 25 bp, Homo sapien
agtcatttctccttgacagtactta

SEQ ID NO: 3016516 - DNA, 25 bp, Homo sapien
attctgaaccatcctagacttctgg

SEQ ID NO: 3016517 - DNA, 25 bp, Homo sapien
tctccttgacagtacttacattatt

SEQ ID NO: 3016518 - DNA, 25 bp, Homo sapien
caagatcatccaagaggttctgtct

SEQ ID NO: 3016519 - DNA, 25 bp, Homo sapien
gcaccctcattcttaaaggatgcca

SEQ ID NO: 3016520 - DNA, 25 bp, Homo sapien
gattagatctggttcggcaccctca

SEQ ID NO: 3016521 - DNA, 25 bp, Homo sapien
gaagtagtctctctcgagttacaag

SEQ ID NO: 3016522 - DNA, 25 bp, Homo sapien
tgcaagtactattttaataccatca

SEQ ID NO: 3016523 - DNA, 25 bp, Homo sapien
agtactattttaataccatcattgt

SEQ ID NO: 3016524 - DNA, 25 bp, Homo sapien
gcaagtactattttaataccatcat

SEQ ID NO: 3016525 - DNA, 25 bp, Homo sapien
tttgcaagtactattttaataccat

SEQ ID NO: 3016526 - DNA, 25 bp, Homo sapien
agtgcctgggatgagaaaatttatt

SEQ ID NO: 3016527 - DNA, 25 bp, Homo sapien
gataagtttcatgtgaagccaactc

SEQ ID NO: 3016528 - DNA, 25 bp, Homo sapien
gctggtaagacaattatagttccta

SEQ ID NO: 3016529 - DNA, 25 bp, Homo sapien
gctgcctcctgtgaaatgccaacaa

SEQ ID NO: 3016530 - DNA, 25 bp, Homo sapien
gaattctagttgaagacatgccagg

SEQ ID NO: 3016531 - DNA, 25 bp, Homo sapien
aagcatttgcacaggacttttctgg

SEQ ID NO: 3016532 - DNA, 25 bp, Homo sapien
tggcaactcctagtgttctttggac

SEQ ID NO: 3016533 - DNA, 25 bp, Homo sapien
tcctgggtaatgactaaagctctcc

SEQ ID NO: 3016534 - DNA, 25 bp, Homo sapien
ctgatgtgttgacacagctcttagc

SEQ ID NO: 3016535 - DNA, 25 bp, Homo sapien
tctgatgtgttgacacagctcttag

SEQ ID NO: 3016536 - DNA, 25 bp, Homo sapien
tgatgtgttgacacagctcttagca

SEQ ID NO: 3016537 - DNA, 25 bp, Homo sapien
ttcaaaagggcgatcttttccttca

SEQ ID NO: 3016538 - DNA, 25 bp, Homo sapien
tgatttcgttgttgaattttctcag

SEQ ID NO: 3016539 - DNA, 25 bp, Homo sapien
tttcttgggcaatttgacaagtaga

SEQ ID NO: 3016540 - DNA, 25 bp, Homo sapien
acaagtagaatcgtatgtggagaac

SEQ ID NO: 3016541 - DNA, 25 bp, Homo sapien
ttcgttgttgaattttctcagcaat

SEQ ID NO: 3016542 - DNA, 25 bp, Homo sapien
tcccaatagccccttatgttttgct

SEQ ID NO: 3016543 - DNA, 25 bp, Homo sapien
aataagcttctagttgtcattcagc

SEQ ID NO: 3016544 - DNA, 25 bp, Homo sapien
gacatctgagcttgccagaattctc

SEQ ID NO: 3016545 - DNA, 25 bp, Homo sapien
cattcagcagcgttggaggctttga

SEQ ID NO: 3016546 - DNA, 25 bp, Homo sapien
tagctagggcctcagaactataatc

SEQ ID NO: 3016547 - DNA, 25 bp, Homo sapien
cctggagtttgcaaagtgagtagct

SEQ ID NO: 3016548 - DNA, 25 bp, Homo sapien
gcagttcgtcccgtgcgcgaccgga

SEQ ID NO: 3016549 - DNA, 25 bp, Homo sapien
cttagcagctgactacggcggcccg

SEQ ID NO: 3016550 - DNA, 25 bp, Homo sapien
caaaacactagattgcggtgagact

SEQ ID NO: 3016551 - DNA, 25 bp, Homo sapien
tgggagcgctgcaagacctctctgt

SEQ ID NO: 3016552 - DNA, 25 bp, Homo sapien
tatagcagccttcctatcagtcctg

SEQ ID NO: 3016553 - DNA, 25 bp, Homo sapien
cggtgagacttgcacgctgcgtaaa

SEQ ID NO: 3016554 - DNA, 25 bp, Homo sapien
gagcgcatgcgctcgtccgttacca

SEQ ID NO: 3016555 - DNA, 25 bp, Homo sapien
tgcgctcgtccgttaccataacgac

SEQ ID NO: 3016556 - DNA, 25 bp, Homo sapien
ccgttaccataacgaccagaagacg

SEQ ID NO: 3016557 - DNA, 25 bp, Homo sapien
agctggagcgcatgcgctcgtccgt

SEQ ID NO: 3016558 - DNA, 25 bp, Homo sapien
agaccttgccaaacttcccctggtg

SEQ ID NO: 3016559 - DNA, 25 bp, Homo sapien
gtggcaaaattacccctagctgaga

SEQ ID NO: 3016560 - DNA, 25 bp, Homo sapien
tgggctctacccatcagacgcgagt

SEQ ID NO: 3016561 - DNA, 25 bp, Homo sapien
taggccagacctcttactactgatg

SEQ ID NO: 3016562 - DNA, 25 bp, Homo sapien
aacatgacctgccacggcatcgact

SEQ ID NO: 3016563 - DNA, 25 bp, Homo sapien
tgcaacctgtgccaagaaggatatc

SEQ ID NO: 3016564 - DNA, 25 bp, Homo sapien
gacttcatgagggacggcaaaagca

SEQ ID NO: 3016565 - DNA, 25 bp, Homo sapien
ctgcggatcaccgtgcccaacatga

SEQ ID NO: 3016566 - DNA, 25 bp, Homo sapien
gaatctactttccaggcgtctcagg

SEQ ID NO: 3016567 - DNA, 25 bp, Homo sapien
taggccaaccggagtacacagaagt

SEQ ID NO: 3016568 - DNA, 25 bp, Homo sapien
ttctcagactgtagggagctccact

SEQ ID NO: 3016569 - DNA, 25 bp, Homo sapien
tcaggactcaagtacattgtgtggg

SEQ ID NO: 3016570 - DNA, 25 bp, Homo sapien
ggccatatcaccttccagtgtcttc

SEQ ID NO: 3016571 - DNA, 25 bp, Homo sapien
ctttggaaaggccatatcaccttcc

SEQ ID NO: 3016572 - DNA, 25 bp, Homo sapien
gagtcaaaccaccttgtttccaatg

SEQ ID NO: 3016573 - DNA, 25 bp, Homo sapien
ccaatggtggtctgtcatcaatcag

SEQ ID NO: 3016574 - DNA, 25 bp, Homo sapien
tgttgtttccccacgtgtccatctc

SEQ ID NO: 3016575 - DNA, 25 bp, Homo sapien
cacgtgtccatctcttttcatcctt

SEQ ID NO: 3016576 - DNA, 25 bp, Homo sapien
ggtgccccagagtgtgttgtttccc

SEQ ID NO: 3016577 - DNA, 25 bp, Homo sapien
cccgacaggtgccccagagtgtgtt

SEQ ID NO: 3016578 - DNA, 25 bp, Homo sapien
ggaagtacccatatacctcctgaag

SEQ ID NO: 3016579 - DNA, 25 bp, Homo sapien
gagccattttgcgatggaagtaccc

SEQ ID NO: 3016580 - DNA, 25 bp, Homo sapien
tgttagtgtaagtgccgatggagcc

SEQ ID NO: 3016581 - DNA, 25 bp, Homo sapien
cacgcatccgcataagtccaggaaa

SEQ ID NO: 3016582 - DNA, 25 bp, Homo sapien
gaatgttcatttctccgtaatttcc

SEQ ID NO: 3016583 - DNA, 25 bp, Homo sapien
atttactaggcgctttcagaatgtt

SEQ ID NO: 3016584 - DNA, 25 bp, Homo sapien
taatttccactgcttgaaggctgct

SEQ ID NO: 3016585 - DNA, 25 bp, Homo sapien
tactaggcgctttcagaatgttcat

SEQ ID NO: 3016586 - DNA, 25 bp, Homo sapien
ctttccgcggagttcaaggtaggca

SEQ ID NO: 3016587 - DNA, 25 bp, Homo sapien
taaatgccgttgaccagttcagccc

SEQ ID NO: 3016588 - DNA, 25 bp, Homo sapien
cctgtttcatgaacgcggtggtgca

SEQ ID NO: 3016589 - DNA, 25 bp, Homo sapien
tacaattgccatagacccgaaggag

SEQ ID NO: 3016590 - DNA, 25 bp, Homo sapien
aatttaaatatgagatctatgtaca

SEQ ID NO: 3016591 - DNA, 25 bp, Homo sapien
tggtaaggcaagattctagcaaaga

SEQ ID NO: 3016592 - DNA, 25 bp, Homo sapien
ctgagagttcaggtgaatatttaat

SEQ ID NO: 3016593 - DNA, 25 bp, Homo sapien
ttctgggataagcattaaagatgcc

SEQ ID NO: 3016594 - DNA, 25 bp, Homo sapien
ggtagcgccaaaagctccaagggcc

SEQ ID NO: 3016595 - DNA, 25 bp, Homo sapien
gctgggcagtcatacaggtagcgcc

SEQ ID NO: 3016596 - DNA, 25 bp, Homo sapien
cagactcgggctgggcagtcataca

SEQ ID NO: 3016597 - DNA, 25 bp, Homo sapien
ggaaggaaggtcttgcaagtccaga

SEQ ID NO: 3016598 - DNA, 25 bp, Homo sapien
gggtggcccatttggcctcctgcag

SEQ ID NO: 3016599 - DNA, 25 bp, Homo sapien
ggggtggcccatttggcctcctgca

SEQ ID NO: 3016600 - DNA, 25 bp, Homo sapien
tccaaggggtggcccatttggcctc

SEQ ID NO: 3016601 - DNA, 25 bp, Homo sapien
cacctctactgggtgcacgccgtag

SEQ ID NO: 3016602 - DNA, 25 bp, Homo sapien
gggttggccataaacacctcttgct

SEQ ID NO: 3016603 - DNA, 25 bp, Homo sapien
tcctccgggacattgagcttctcct

SEQ ID NO: 3016604 - DNA, 25 bp, Homo sapien
gaagaaggtgcggacgtacacggcg

SEQ ID NO: 3016605 - DNA, 25 bp, Homo sapien
atttccaaatggaagcttcccagtt

SEQ ID NO: 3016606 - DNA, 25 bp, Homo sapien
agtttccttgctctggatacacgtg

SEQ ID NO: 3016607 - DNA, 25 bp, Homo sapien
tccttgctctggatacacgtggtac

SEQ ID NO: 3016608 - DNA, 25 bp, Homo sapien
tttccttgctctggatacacgtggt

SEQ ID NO: 3016609 - DNA, 25 bp, Homo sapien
accggatgaaagtcgggctcacggt

SEQ ID NO: 3016610 - DNA, 25 bp, Homo sapien
tcgtattcctccacttcggctcgga

SEQ ID NO: 3016611 - DNA, 25 bp, Homo sapien
tcggctcggaggcagtcaaagaagc

SEQ ID NO: 3016612 - DNA, 25 bp, Homo sapien
gtgctgatgacaacatcgtattcct

SEQ ID NO: 3016613 - DNA, 25 bp, Homo sapien
aggggcattggagctacgactgtgc

SEQ ID NO: 3016614 - DNA, 25 bp, Homo sapien
aggaaggggcattggagctacgact

SEQ ID NO: 3016615 - DNA, 25 bp, Homo sapien
attttgtgatgtgcacccacccttc

SEQ ID NO: 3016616 - DNA, 25 bp, Homo sapien
cccaatggtaatcttccttgacttt

SEQ ID NO: 3016617 - DNA, 25 bp, Homo sapien
acacgatttggcctgttctccggga

SEQ ID NO: 3016618 - DNA, 25 bp, Homo sapien
ctccgggagatcatgttgggaagca

SEQ ID NO: 3016619 - DNA, 25 bp, Homo sapien
tattattcactaacacgatttggcc

SEQ ID NO: 3016620 - DNA, 25 bp, Homo sapien
ttggatattattcactaacacgatt

SEQ ID NO: 3016621 - DNA, 25 bp, Homo sapien
tagtctggtgataagccctttttct

SEQ ID NO: 3016622 - DNA, 25 bp, Homo sapien
aagggagacagcctcctgcctttcc

SEQ ID NO: 3016623 - DNA, 25 bp, Homo sapien
ttcatttctgaggacagaatcttta

SEQ ID NO: 3016624 - DNA, 25 bp, Homo sapien
gggttgacagaatactgggtctctt

SEQ ID NO: 3016625 - DNA, 25 bp, Homo sapien
gtggcccagatacccatgggaaagt

SEQ ID NO: 3016626 - DNA, 25 bp, Homo sapien
tggtggcccagatacccatgggaaa

SEQ ID NO: 3016627 - DNA, 25 bp, Homo sapien
cccagatacccatgggaaagtcaaa

SEQ ID NO: 3016628 - DNA, 25 bp, Homo sapien
ggcccagatacccatgggaaagtca

SEQ ID NO: 3016629 - DNA, 25 bp, Homo sapien
cagagaaatcttatgggcaggcccc

SEQ ID NO: 3016630 - DNA, 25 bp, Homo sapien
gatgtctgagaggtccaacaggacc

SEQ ID NO: 3016631 - DNA, 25 bp, Homo sapien
gatctttttgtcgagctccagagaa

SEQ ID NO: 3016632 - DNA, 25 bp, Homo sapien
ggatgtccacacagccatagcaatc

SEQ ID NO: 3016633 - DNA, 25 bp, Homo sapien
cttgcagaccttgggagccctcgat

SEQ ID NO: 3016634 - DNA, 25 bp, Homo sapien
gaaccaatgagagagtcagggtatg

SEQ ID NO: 3016635 - DNA, 25 bp, Homo sapien
tcctccctcttgcagaccttgggag

SEQ ID NO: 3016636 - DNA, 25 bp, Homo sapien
ggtatgtgtgagatctcctccctct

SEQ ID NO: 3016637 - DNA, 25 bp, Homo sapien
gggtcagccacgctgatcaaggcat

SEQ ID NO: 3016638 - DNA, 25 bp, Homo sapien
tctcccagttctttccacacagcac

SEQ ID NO: 3016639 - DNA, 25 bp, Homo sapien
cctgtgtggaacacccgagcacact

SEQ ID NO: 3016640 - DNA, 25 bp, Homo sapien
tataggttctctagcctctcccagt

SEQ ID NO: 3016641 - DNA, 25 bp, Homo sapien
cagcctggacacctcttggtaaatg

SEQ ID NO: 3016642 - DNA, 25 bp, Homo sapien
agtcctgagatggcatcggtgatca

SEQ ID NO: 3016643 - DNA, 25 bp, Homo sapien
gaggaggccgctgattcccagcagc

SEQ ID NO: 3016644 - DNA, 25 bp, Homo sapien
aatgaagaggaggccgctgattccc

SEQ ID NO: 3016645 - DNA, 25 bp, Homo sapien
tgtctccgaaagcagaccgaatcca

SEQ ID NO: 3016646 - DNA, 25 bp, Homo sapien
agtgtctccgaaagcagaccgaatc

SEQ ID NO: 3016647 - DNA, 25 bp, Homo sapien
ctccgaaagcagaccgaatccaggg

SEQ ID NO: 3016648 - DNA, 25 bp, Homo sapien
tctccgaaagcagaccgaatccagg

SEQ ID NO: 3016649 - DNA, 25 bp, Homo sapien
tccttggtcccaagcagaaccactc

SEQ ID NO: 3016650 - DNA, 25 bp, Homo sapien
tctccccataaaatgccccaggccc

SEQ ID NO: 3016651 - DNA, 25 bp, Homo sapien
gcagatcttgaaggctcggcacctg

SEQ ID NO: 3016652 - DNA, 25 bp, Homo sapien
tcctagcttcaaattgcagatcttg

SEQ ID NO: 3016653 - DNA, 25 bp, Homo sapien
gtttttcacaacagcgaattcagcg

SEQ ID NO: 3016654 - DNA, 25 bp, Homo sapien
tgctctaggtgagcacatggcccag

SEQ ID NO: 3016655 - DNA, 25 bp, Homo sapien
gaggcttgtgggtacaaactctcct

SEQ ID NO: 3016656 - DNA, 25 bp, Homo sapien
gagactttgacctgatatcgtgaca

SEQ ID NO: 3016657 - DNA, 25 bp, Homo sapien
gaagcctcgggttccaggaagctgt

SEQ ID NO: 3016658 - DNA, 25 bp, Homo sapien
tgcctggggcgcctggtgggaggtg

SEQ ID NO: 3016659 - DNA, 25 bp, Homo sapien
gctctccgaagcctcgggttccagg

SEQ ID NO: 3016660 - DNA, 25 bp, Homo sapien
cattcctgaaggcttgttcagcagg

SEQ ID NO: 3016661 - DNA, 25 bp, Homo sapien
cttctcggtgaattccaggcgggct

SEQ ID NO: 3016662 - DNA, 25 bp, Homo sapien
ttctcggtgaattccaggcgggctg

SEQ ID NO: 3016663 - DNA, 25 bp, Homo sapien
gcttctcggtgaattccaggcgggc

SEQ ID NO: 3016664 - DNA, 25 bp, Homo sapien
tgcttctcggtgaattccaggcggg

SEQ ID NO: 3016665 - DNA, 25 bp, Homo sapien
gcagagggcgaaagaaccccaggca

SEQ ID NO: 3016666 - DNA, 25 bp, Homo sapien
cagagggcgaaagaaccccaggcaa

SEQ ID NO: 3016667 - DNA, 25 bp, Homo sapien
agagggcgaaagaaccccaggcaag

SEQ ID NO: 3016668 - DNA, 25 bp, Homo sapien
cagaaggcaccgttaggaaagggct

SEQ ID NO: 3016669 - DNA, 25 bp, Homo sapien
cttcctgttttctccagactggggg

SEQ ID NO: 3016670 - DNA, 25 bp, Homo sapien
caacagaaggcaccgttaggaaagg

SEQ ID NO: 3016671 - DNA, 25 bp, Homo sapien
tgttttctccagactgggggtcaat

SEQ ID NO: 3016672 - DNA, 25 bp, Homo sapien
gaggcttccaatcttctggtccaag

SEQ ID NO: 3016673 - DNA, 25 bp, Homo sapien
gtcccaggtctgaggcttccaatct

SEQ ID NO: 3016674 - DNA, 25 bp, Homo sapien
caatcttctggtccaaggttcacag

SEQ ID NO: 3016675 - DNA, 25 bp, Homo sapien
ctggtccaaggttcacagtgatttg

SEQ ID NO: 3016676 - DNA, 25 bp, Homo sapien
gatggaagaactctacgcggtgtga

SEQ ID NO: 3016677 - DNA, 25 bp, Homo sapien
gagacatccggaaagacacaatcgg

SEQ ID NO: 3016678 - DNA, 25 bp, Homo sapien
gctgtaaggagctctctagcattca

SEQ ID NO: 3016679 - DNA, 25 bp, Homo sapien
aacctgggtaggagtctccatggcc

SEQ ID NO: 3016680 - DNA, 25 bp, Homo sapien
aggaggatggcgcttgtcagtatca

SEQ ID NO: 3016681 - DNA, 25 bp, Homo sapien
tatcagaacgatatccaggacctcg

SEQ ID NO: 3016682 - DNA, 25 bp, Homo sapien
catgaagatggctaccaaggcatcc

SEQ ID NO: 3016683 - DNA, 25 bp, Homo sapien
gggctgcgacaactcactctggagc

SEQ ID NO: 3016684 - DNA, 25 bp, Homo sapien
tcttcagctggcactacactccgga

SEQ ID NO: 3016685 - DNA, 25 bp, Homo sapien
tggcactacactccggaaactccta

SEQ ID NO: 3016686 - DNA, 25 bp, Homo sapien
agctggcactacactccggaaactc

SEQ ID NO: 3016687 - DNA, 25 bp, Homo sapien
cttgttcttcagctggcactacact

SEQ ID NO: 3016688 - DNA, 25 bp, Homo sapien
cattgctgctgttgtcccgtttgaa

SEQ ID NO: 3016689 - DNA, 25 bp, Homo sapien
acagtggcttcaccacccgtcgggt

SEQ ID NO: 3016690 - DNA, 25 bp, Homo sapien
tattgttgtccatcctgccattgct

SEQ ID NO: 3016691 - DNA, 25 bp, Homo sapien
tcccggctggtcctggcacagtggc

SEQ ID NO: 3016692 - DNA, 25 bp, Homo sapien
tgatgcgaggtacaggcaggctacc

SEQ ID NO: 3016693 - DNA, 25 bp, Homo sapien
catctatactttgccgctggccgag

SEQ ID NO: 3016694 - DNA, 25 bp, Homo sapien
gcatgtatcccacttggctgcaggg

SEQ ID NO: 3016695 - DNA, 25 bp, Homo sapien
tactaagttccatcgctagagggca

SEQ ID NO: 3016696 - DNA, 25 bp, Homo sapien
tgtccatctccatcgagtcctccat

SEQ ID NO: 3016697 - DNA, 25 bp, Homo sapien
atcattgtccgccttaaagggatcg

SEQ ID NO: 3016698 - DNA, 25 bp, Homo sapien
tgcaatcatgctttgcaccagccct

SEQ ID NO: 3016699 - DNA, 25 bp, Homo sapien
cgccttaaagggatcgtctttgtcg

SEQ ID NO: 3016700 - DNA, 25 bp, Homo sapien
gccaattagctcctagaaagctggg

SEQ ID NO: 3016701 - DNA, 25 bp, Homo sapien
cagtgccggttcagagcaggtgctc

SEQ ID NO: 3016702 - DNA, 25 bp, Homo sapien
ggtcatctcgtattcccagcaagta

SEQ ID NO: 3016703 - DNA, 25 bp, Homo sapien
tgatccaggaccttaccgctaagag

SEQ ID NO: 3016704 - DNA, 25 bp, Homo sapien
cagggacctgggtgctccaatatct

SEQ ID NO: 3016705 - DNA, 25 bp, Homo sapien
cattggtcactcagcttgcctgttg

SEQ ID NO: 3016706 - DNA, 25 bp, Homo sapien
gagtgtctccccttttatagaccac

SEQ ID NO: 3016707 - DNA, 25 bp, Homo sapien
aaaagaatggaaggagagtgtctcc

SEQ ID NO: 3016708 - DNA, 25 bp, Homo sapien
cttgaggctggagaataaatgggcc

SEQ ID NO: 3016709 - DNA, 25 bp, Homo sapien
gatggcattgctattcacccactgc

SEQ ID NO: 3016710 - DNA, 25 bp, Homo sapien
caggtcagtcaagaatccagggtat

SEQ ID NO: 3016711 - DNA, 25 bp, Homo sapien
cctcaagaggttgcagacaggtcag

SEQ ID NO: 3016712 - DNA, 25 bp, Homo sapien
taatcctgggattagcacagggcca

SEQ ID NO: 3016713 - DNA, 25 bp, Homo sapien
gggtgacacttaggactcctatggc

SEQ ID NO: 3016714 - DNA, 25 bp, Homo sapien
gcacaggcgctcacgggtgtcatgt

SEQ ID NO: 3016715 - DNA, 25 bp, Homo sapien
aggaaccagtgggtcactacagatg

SEQ ID NO: 3016716 - DNA, 25 bp, Homo sapien
cactttttgaggctcaaactggatc

SEQ ID NO: 3016717 - DNA, 25 bp, Homo sapien
ttccttattggccagtgtcccctca

SEQ ID NO: 3016718 - DNA, 25 bp, Homo sapien
ctcaaactggatcagtcgcagaatt

SEQ ID NO: 3016719 - DNA, 25 bp, Homo sapien
cagtcgcagaatttccttattggcc

SEQ ID NO: 3016720 - DNA, 25 bp, Homo sapien
cctttcccatgacccttggagctcc

SEQ ID NO: 3016721 - DNA, 25 bp, Homo sapien
ctcctttcccatgacccttggagct

SEQ ID NO: 3016722 - DNA, 25 bp, Homo sapien
tcctttcccatgacccttggagctc

SEQ ID NO: 3016723 - DNA, 25 bp, Homo sapien
agatcttctcggctcgcttttccgg

SEQ ID NO: 3016724 - DNA, 25 bp, Homo sapien
acgtcctcgggagtgatcattttga

SEQ ID NO: 3016725 - DNA, 25 bp, Homo sapien
cgtgttttcatcgtctggaaggagc

SEQ ID NO: 3016726 - DNA, 25 bp, Homo sapien
gaaggagcttcacgtcctcgggagt

SEQ ID NO: 3016727 - DNA, 25 bp, Homo sapien
catgtgcagggcgatgacgtactcc

SEQ ID NO: 3016728 - DNA, 25 bp, Homo sapien
tcgaagctgcggaacacatgctggg

SEQ ID NO: 3016729 - DNA, 25 bp, Homo sapien
taccgtccacgtcgtagagggagaa

SEQ ID NO: 3016730 - DNA, 25 bp, Homo sapien
gaacttggcgtagatgctctggaac

SEQ ID NO: 3016731 - DNA, 25 bp, Homo sapien
tgggacgtgcgtggtcccctggccg

SEQ ID NO: 3016732 - DNA, 25 bp, Homo sapien
ctgaagaccgagatgctggtggctt

SEQ ID NO: 3016733 - DNA, 25 bp, Homo sapien
gttcttcgcaatccttgaagggagg

SEQ ID NO: 3016734 - DNA, 25 bp, Homo sapien
tggcttaggaggatttgcgaccagt

SEQ ID NO: 3016735 - DNA, 25 bp, Homo sapien
ctgtatatagcaaacgccttcaaaa

SEQ ID NO: 3016736 - DNA, 25 bp, Homo sapien
taataatgcaggacaactgtatata

SEQ ID NO: 3016737 - DNA, 25 bp, Homo sapien
ttataataatgcaggacaactgtat

SEQ ID NO: 3016738 - DNA, 25 bp, Homo sapien
gacaactgtatatagcaaacgcctt

SEQ ID NO: 3016739 - DNA, 25 bp, Homo sapien
aatacacacaaatgcggtaacaggg

SEQ ID NO: 3016740 - DNA, 25 bp, Homo sapien
tactgatctaggcagccagagggtg

SEQ ID NO: 3016741 - DNA, 25 bp, Homo sapien
gggatcagggtttcaacagtgttac

SEQ ID NO: 3016742 - DNA, 25 bp, Homo sapien
gaaggatatacaatgtggaggaaac

SEQ ID NO: 3016743 - DNA, 25 bp, Homo sapien
aattccactttcatagggtttgccg

SEQ ID NO: 3016744 - DNA, 25 bp, Homo sapien
ttcatagggtttgccgatgtgctcg

SEQ ID NO: 3016745 - DNA, 25 bp, Homo sapien
tccactttcatagggtttgccgatg

SEQ ID NO: 3016746 - DNA, 25 bp, Homo sapien
actttcatagggtttgccgatgtgc

SEQ ID NO: 3016747 - DNA, 25 bp, Homo sapien
tgtgaaggggttgcttccggtcatc

SEQ ID NO: 3016748 - DNA, 25 bp, Homo sapien
tctgtgaaggggttgcttccggtca

SEQ ID NO: 3016749 - DNA, 25 bp, Homo sapien
gtctgtgaaggggttgcttccggtc

SEQ ID NO: 3016750 - DNA, 25 bp, Homo sapien
ctgtgaaggggttgcttccggtcat

SEQ ID NO: 3016751 - DNA, 25 bp, Homo sapien
ggatgctaagttggggcccctgtca

SEQ ID NO: 3016752 - DNA, 25 bp, Homo sapien
ctaaggatggctggcgtccctttga

SEQ ID NO: 3016753 - DNA, 25 bp, Homo sapien
aagggatgctaagttggggcccctg

SEQ ID NO: 3016754 - DNA, 25 bp, Homo sapien
cactaaggatggctggcgtcccttt

SEQ ID NO: 3016755 - DNA, 25 bp, Homo sapien
cacagctgcctggaacccacgactc

SEQ ID NO: 3016756 - DNA, 25 bp, Homo sapien
agctgcctggaacccacgactcccg

SEQ ID NO: 3016757 - DNA, 25 bp, Homo sapien
ctgcctggaacccacgactcccgag

SEQ ID NO: 3016758 - DNA, 25 bp, Homo sapien
gcctggaacccacgactcccgagag

SEQ ID NO: 3016759 - DNA, 25 bp, Homo sapien
tgtgatcaccagctaggcaaggctc

SEQ ID NO: 3016760 - DNA, 25 bp, Homo sapien
tctggttcgcatagagaggtaccca

SEQ ID NO: 3016761 - DNA, 25 bp, Homo sapien
gccttaactgggtgtggtcctgtcc

SEQ ID NO: 3016762 - DNA, 25 bp, Homo sapien
tgacagatgagtgcacggaggtccc

SEQ ID NO: 3016763 - DNA, 25 bp, Homo sapien
gacgaatgagatccaaacggtcatt

SEQ ID NO: 3016764 - DNA, 25 bp, Homo sapien
gatccaaacggtcattacttgcact

SEQ ID NO: 3016765 - DNA, 25 bp, Homo sapien
cgaatgagatccaaacggtcattac

SEQ ID NO: 3016766 - DNA, 25 bp, Homo sapien
atgagatccaaacggtcattacttg

SEQ ID NO: 3016767 - DNA, 25 bp, Homo sapien
cattcttaacagctcataaaactct

SEQ ID NO: 3016768 - DNA, 25 bp, Homo sapien
tcttaattttagctccatttgaatc

SEQ ID NO: 3016769 - DNA, 25 bp, Homo sapien
taggagaaactacctcattcttaac

SEQ ID NO: 3016770 - DNA, 25 bp, Homo sapien
tttagctccatttgaatctaaatgg

SEQ ID NO: 3016771 - DNA, 25 bp, Homo sapien
cttgaggcaattctatgcacgattg

SEQ ID NO: 3016772 - DNA, 25 bp, Homo sapien
gcaattctatgcacgattgtgcaga

SEQ ID NO: 3016773 - DNA, 25 bp, Homo sapien
ctatgcacgattgtgcagatgagag

SEQ ID NO: 3016774 - DNA, 25 bp, Homo sapien
caggacttgaggcaattctatgcac

SEQ ID NO: 3016775 - DNA, 25 bp, Homo sapien
gcaatgaaatacttcccggcaagga

SEQ ID NO: 3016776 - DNA, 25 bp, Homo sapien
tctcatgggacacgattcagcgctc

SEQ ID NO: 3016777 - DNA, 25 bp, Homo sapien
tatcaatgccaaggttgctgaccgg

SEQ ID NO: 3016778 - DNA, 25 bp, Homo sapien
caagctggaagtggtcgtgcaaaca

SEQ ID NO: 3016779 - DNA, 25 bp, Homo sapien
ccacttttcgaagcagctgatccac

SEQ ID NO: 3016780 - DNA, 25 bp, Homo sapien
gggtccacttttcgaagcagctgat

SEQ ID NO: 3016781 - DNA, 25 bp, Homo sapien
gcagctgatccacgggctcgactgt

SEQ ID NO: 3016782 - DNA, 25 bp, Homo sapien
ttggccgggtccacttttcgaagca

SEQ ID NO: 3016783 - DNA, 25 bp, Homo sapien
tggcacaggtgctgccggatcatct

SEQ ID NO: 3016784 - DNA, 25 bp, Homo sapien
tgtttcatgccgcagctgcgtgtac

SEQ ID NO: 3016785 - DNA, 25 bp, Homo sapien
ggtgctgccggatcatctctaccct

SEQ ID NO: 3016786 - DNA, 25 bp, Homo sapien
agctgcgtgtactggcacaggtgct

SEQ ID NO: 3016787 - DNA, 25 bp, Homo sapien
cattctgtcccatctgactctctgg

SEQ ID NO: 3016788 - DNA, 25 bp, Homo sapien
agtcactggctgtggacattctgtc

SEQ ID NO: 3016789 - DNA, 25 bp, Homo sapien
caccaagaccacaaaacgcaagtca

SEQ ID NO: 3016790 - DNA, 25 bp, Homo sapien
gccagagaactctgagcacgtcccc

SEQ ID NO: 3016791 - DNA, 25 bp, Homo sapien
ttggactgggcctggttgtagagat

SEQ ID NO: 3016792 - DNA, 25 bp, Homo sapien
atccacacagcgcatgaggtcgtct

SEQ ID NO: 3016793 - DNA, 25 bp, Homo sapien
ggcctggttgtagagatccacacag

SEQ ID NO: 3016794 - DNA, 25 bp, Homo sapien
agagatccacacagcgcatgaggtc

SEQ ID NO: 3016795 - DNA, 25 bp, Homo sapien
catgcacggctttgtctcagcgtag

SEQ ID NO: 3016796 - DNA, 25 bp, Homo sapien
aatcacagtctgtgggccagtggca

SEQ ID NO: 3016797 - DNA, 25 bp, Homo sapien
tatgtcatcacagaaagatccgagg

SEQ ID NO: 3016798 - DNA, 25 bp, Homo sapien
tactaagcgtaccagcaccttggaa

SEQ ID NO: 3016799 - DNA, 25 bp, Homo sapien
aaggaattgtaacaggttcaccaga

SEQ ID NO: 3016800 - DNA, 25 bp, Homo sapien
gaaggaattgtaacaggttcaccag

SEQ ID NO: 3016801 - DNA, 25 bp, Homo sapien
atgaaggaattgtaacaggttcacc

SEQ ID NO: 3016802 - DNA, 25 bp, Homo sapien
aggaattgtaacaggttcaccagaa

SEQ ID NO: 3016803 - DNA, 25 bp, Homo sapien
ccaggtctctctgccgctctgtgag

SEQ ID NO: 3016804 - DNA, 25 bp, Homo sapien
gtgtggactttctccgcgccttctt

SEQ ID NO: 3016805 - DNA, 25 bp, Homo sapien
tgtggactttctccgcgccttcttg

SEQ ID NO: 3016806 - DNA, 25 bp, Homo sapien
tctgccgctctgtgagggctttccg

SEQ ID NO: 3016807 - DNA, 25 bp, Homo sapien
tctccaccgaggcatagcggctggc

SEQ ID NO: 3016808 - DNA, 25 bp, Homo sapien
tccaccgaggcatagcggctggcga

SEQ ID NO: 3016809 - DNA, 25 bp, Homo sapien
gctggcgagctgcttgcgaaggtcg

SEQ ID NO: 3016810 - DNA, 25 bp, Homo sapien
agctgcttgcgaaggtcggcaatgt

SEQ ID NO: 3016811 - DNA, 25 bp, Homo sapien
aagttctcacggaagttcatcaggg

SEQ ID NO: 3016812 - DNA, 25 bp, Homo sapien
cttgaagttctcacggaagttcatc

SEQ ID NO: 3016813 - DNA, 25 bp, Homo sapien
gaagttctcacggaagttcatcagg

SEQ ID NO: 3016814 - DNA, 25 bp, Homo sapien
ctttcttgaagttctcacggaagtt

SEQ ID NO: 3016815 - DNA, 25 bp, Homo sapien
cacgtggctgcctatcaggtctcag

SEQ ID NO: 3016816 - DNA, 25 bp, Homo sapien
ccccaggcaagtgaggatgagtctg

SEQ ID NO: 3016817 - DNA, 25 bp, Homo sapien
tgttgggagagtagagacgcacact

SEQ ID NO: 3016818 - DNA, 25 bp, Homo sapien
caggtctcagcttaggcaggtcacc

SEQ ID NO: 3016819 - DNA, 25 bp, Homo sapien
ggaaaagcccatgaacctgccaata

SEQ ID NO: 3016820 - DNA, 25 bp, Homo sapien
tctctaaggacatggaaagcaagtg

SEQ ID NO: 3016821 - DNA, 25 bp, Homo sapien
gagcagctgtacgactccgggaatc

SEQ ID NO: 3016822 - DNA, 25 bp, Homo sapien
tctgggagagttagctcagcctgct

SEQ ID NO: 3016823 - DNA, 25 bp, Homo sapien
gatatttttcagacggtgtgcggcc

SEQ ID NO: 3016824 - DNA, 25 bp, Homo sapien
gaaatcgatttaatgggccaggacc

SEQ ID NO: 3016825 - DNA, 25 bp, Homo sapien
gccactgtgcccgacgatattaagt

SEQ ID NO: 3016826 - DNA, 25 bp, Homo sapien
tatcggagtggatacctacagacag

SEQ ID NO: 3016827 - DNA, 25 bp, Homo sapien
tacactttagagtggattacttcac

SEQ ID NO: 3016828 - DNA, 25 bp, Homo sapien
tgggtagccccaccaatcatgtaca

SEQ ID NO: 3016829 - DNA, 25 bp, Homo sapien
aaaggcaagcctgttaatgggtagc

SEQ ID NO: 3016830 - DNA, 25 bp, Homo sapien
ggattacttcactgagagatttagt

SEQ ID NO: 3016831 - DNA, 25 bp, Homo sapien
gtgaacttctgcttcgtccgccagg

SEQ ID NO: 3016832 - DNA, 25 bp, Homo sapien
ctgggcccacgcctctcccaaggag

SEQ ID NO: 3016833 - DNA, 25 bp, Homo sapien
ttgaggtgaacttctgcttcgtccg

SEQ ID NO: 3016834 - DNA, 25 bp, Homo sapien
cagagaacttgaggtgaacttctgc

SEQ ID NO: 3016835 - DNA, 25 bp, Homo sapien
gagagcttagctaagttcttcgcat

SEQ ID NO: 3016836 - DNA, 25 bp, Homo sapien
aagttcttcgcatagtcttcttcaa

SEQ ID NO: 3016837 - DNA, 25 bp, Homo sapien
tagctaagttcttcgcatagtcttc

SEQ ID NO: 3016838 - DNA, 25 bp, Homo sapien
ggagttctgagagagcttagctaag

SEQ ID NO: 3016839 - DNA, 25 bp, Homo sapien
catttgtttgcccttcagctgtttc

SEQ ID NO: 3016840 - DNA, 25 bp, Homo sapien
tgcatttgtttgcccttcagctgtt

SEQ ID NO: 3016841 - DNA, 25 bp, Homo sapien
ttcccggatgaattctgacatttcc

SEQ ID NO: 3016842 - DNA, 25 bp, Homo sapien
ctttcccggatgaattctgacattt

SEQ ID NO: 3016843 - DNA, 25 bp, Homo sapien
cagtagttcaaacccagccacggtg

SEQ ID NO: 3016844 - DNA, 25 bp, Homo sapien
ttcaaacccagccacggtgccgttg

SEQ ID NO: 3016845 - DNA, 25 bp, Homo sapien
ttgccttgggggtccttcttatcag

SEQ ID NO: 3016846 - DNA, 25 bp, Homo sapien
gttgccttgggggtccttcttatca

SEQ ID NO: 3016847 - DNA, 25 bp, Homo sapien
ctgttccggcatcgtgtctgggtga

SEQ ID NO: 3016848 - DNA, 25 bp, Homo sapien
agctccactcggttggtttcagcag

SEQ ID NO: 3016849 - DNA, 25 bp, Homo sapien
tagtcgcagtagctccactcggttg

SEQ ID NO: 3016850 - DNA, 25 bp, Homo sapien
tctgggtgagggaacgtcacacagt

SEQ ID NO: 3016851 - DNA, 25 bp, Homo sapien
ctcagagtgaggatgccaccgtgca

SEQ ID NO: 3016852 - DNA, 25 bp, Homo sapien
agagtgaggatgccaccgtgcaccc

SEQ ID NO: 3016853 - DNA, 25 bp, Homo sapien
cctcagagtgaggatgccaccgtgc

SEQ ID NO: 3016854 - DNA, 25 bp, Homo sapien
gtgaggatgccaccgtgcaccccag

SEQ ID NO: 3016855 - DNA, 25 bp, Homo sapien
tttgctcttgtcaccaaggttggag

SEQ ID NO: 3016856 - DNA, 25 bp, Homo sapien
ccaccttggcctcccaaagtgttgg

SEQ ID NO: 3016857 - DNA, 25 bp, Homo sapien
catgatctcagctcactgcaacctc

SEQ ID NO: 3016858 - DNA, 25 bp, Homo sapien
tgcaatggcatgatctcagctcact

SEQ ID NO: 3016859 - DNA, 25 bp, Homo sapien
taacaattaatcaggctgttgtctg

SEQ ID NO: 3016860 - DNA, 25 bp, Homo sapien
cctgcaggagagtaacaattaatca

SEQ ID NO: 3016861 - DNA, 25 bp, Homo sapien
caggagagtaacaattaatcaggct

SEQ ID NO: 3016862 - DNA, 25 bp, Homo sapien
gagtaacaattaatcaggctgttgt

SEQ ID NO: 3016863 - DNA, 25 bp, Homo sapien
tacagcatagaggatgcactggagg

SEQ ID NO: 3016864 - DNA, 25 bp, Homo sapien
gcatagaggatgcactggagggaga

SEQ ID NO: 3016865 - DNA, 25 bp, Homo sapien
gaacgtgactgtggccatcagggca

SEQ ID NO: 3016866 - DNA, 25 bp, Homo sapien
tgcactggagggagaacgtgactgt

SEQ ID NO: 3016867 - DNA, 25 bp, Homo sapien
tcaaagtcaaggctcctaggtccct

SEQ ID NO: 3016868 - DNA, 25 bp, Homo sapien
actggagcctcgatgtttatttgca

SEQ ID NO: 3016869 - DNA, 25 bp, Homo sapien
gaaggtgggacaggactttccgcat

SEQ ID NO: 3016870 - DNA, 25 bp, Homo sapien
gatggttaataccagggtccagcta

SEQ ID NO: 3016871 - DNA, 25 bp, Homo sapien
tgctctgctttttgcttggcgatga

SEQ ID NO: 3016872 - DNA, 25 bp, Homo sapien
tgctttttgcttggcgatgaggatc

SEQ ID NO: 3016873 - DNA, 25 bp, Homo sapien
tccttgctctgctttttgcttggcg

SEQ ID NO: 3016874 - DNA, 25 bp, Homo sapien
tgcttggcgatgaggatcccaggtt

SEQ ID NO: 3016875 - DNA, 25 bp, Homo sapien
ggcaagaaacatcgtcaaagctgtt

SEQ ID NO: 3016876 - DNA, 25 bp, Homo sapien
agaggcaagaaacatcgtcaaagct

SEQ ID NO: 3016877 - DNA, 25 bp, Homo sapien
gtcaaagctgttctccatattggac

SEQ ID NO: 3016878 - DNA, 25 bp, Homo sapien
caagaaacatcgtcaaagctgttct

SEQ ID NO: 3016879 - DNA, 25 bp, Homo sapien
gggtctccctgaccccacgctgttc

SEQ ID NO: 3016880 - DNA, 25 bp, Homo sapien
tcagggatgctcagtctgaatccta

SEQ ID NO: 3016881 - DNA, 25 bp, Homo sapien
aattaaggaagcctcctgcacaggc

SEQ ID NO: 3016882 - DNA, 25 bp, Homo sapien
cagctctcgggctgaaggcgaatta

SEQ ID NO: 3016883 - DNA, 25 bp, Homo sapien
gagaagagagttaaggccaccacct

SEQ ID NO: 3016884 - DNA, 25 bp, Homo sapien
ttgctgcctgaagccgcggaatcca

SEQ ID NO: 3016885 - DNA, 25 bp, Homo sapien
ttccgcgtgccgcttgctgcctgaa

SEQ ID NO: 3016886 - DNA, 25 bp, Homo sapien
ccctctgctggtgaacgttccgcgt

SEQ ID NO: 3016887 - DNA, 25 bp, Homo sapien
gaagtggctgtcactttatagataa

SEQ ID NO: 3016888 - DNA, 25 bp, Homo sapien
agtctggccttactcttccttggta

SEQ ID NO: 3016889 - DNA, 25 bp, Homo sapien
gtagaatgtaaggaagtggctgtca

SEQ ID NO: 3016890 - DNA, 25 bp, Homo sapien
tatagataaaggccagaaaaaggat

SEQ ID NO: 3016891 - DNA, 25 bp, Homo sapien
acttatggcaactcctctagtgacc

SEQ ID NO: 3016892 - DNA, 25 bp, Homo sapien
catggatctgatctacactgtggtt

SEQ ID NO: 3016893 - DNA, 25 bp, Homo sapien
cactgaggtacctctacttatggca

SEQ ID NO: 3016894 - DNA, 25 bp, Homo sapien
cctcaagctttgaggtgcatcagaa

SEQ ID NO: 3016895 - DNA, 25 bp, Homo sapien
taaccgagagtgcaaactgagcctc

SEQ ID NO: 3016896 - DNA, 25 bp, Homo sapien
tggcagtcagcaccttaaccgagag

SEQ ID NO: 3016897 - DNA, 25 bp, Homo sapien
tgagcctcatgagtagggtgccaac

SEQ ID NO: 3016898 - DNA, 25 bp, Homo sapien
cagggtcttacactggcacctcaca

SEQ ID NO: 3016899 - DNA, 25 bp, Homo sapien
agacacagcaaccagtgtatctgtg

SEQ ID NO: 3016900 - DNA, 25 bp, Homo sapien
tctggagtgtatatattaggcggca

SEQ ID NO: 3016901 - DNA, 25 bp, Homo sapien
tcctttgcctgtgattccagagaac

SEQ ID NO: 3016902 - DNA, 25 bp, Homo sapien
taaaacaagattggacaaaggcagg

SEQ ID NO: 3016903 - DNA, 25 bp, Homo sapien
gcaggtaatcgttgggcttaacaga

SEQ ID NO: 3016904 - DNA, 25 bp, Homo sapien
tccccaggcgtgacaatccaaacgt

SEQ ID NO: 3016905 - DNA, 25 bp, Homo sapien
catgatctcagacgcagacagagcc

SEQ ID NO: 3016906 - DNA, 25 bp, Homo sapien
gagatactcagcgtcatccctggtg

SEQ ID NO: 3016907 - DNA, 25 bp, Homo sapien
caaaagtcccaattgatagccatga

SEQ ID NO: 3016908 - DNA, 25 bp, Homo sapien
agtgaccgctatacctccctcaaca

SEQ ID NO: 3016909 - DNA, 25 bp, Homo sapien
ctgcagaagcagtgaccgctatacc

SEQ ID NO: 3016910 - DNA, 25 bp, Homo sapien
gcagtgaccgctatacctccctcaa

SEQ ID NO: 3016911 - DNA, 25 bp, Homo sapien
cagaagcagtgaccgctatacctcc

SEQ ID NO: 3016912 - DNA, 25 bp, Homo sapien
tgggaatcaccggtggattttcgga

SEQ ID NO: 3016913 - DNA, 25 bp, Homo sapien
cggacactcatgtgggcagtctctg

SEQ ID NO: 3016914 - DNA, 25 bp, Homo sapien
ggattttcggacactcatgtgggca

SEQ ID NO: 3016915 - DNA, 25 bp, Homo sapien
ggtccctgatgcgtggtatccattc

SEQ ID NO: 3016916 - DNA, 25 bp, Homo sapien
cagggacagagacacggctcagatg

SEQ ID NO: 3016917 - DNA, 25 bp, Homo sapien
gcagggacagagacacggctcagat

SEQ ID NO: 3016918 - DNA, 25 bp, Homo sapien
cagccccctttaggggcccagcaca

SEQ ID NO: 3016919 - DNA, 25 bp, Homo sapien
agcacacagtgcagcgctggacaga

SEQ ID NO: 3016920 - DNA, 25 bp, Homo sapien
ctttaggggcccagcacacagtgca

SEQ ID NO: 3016921 - DNA, 25 bp, Homo sapien
tgcagcgctggacagagagaggctc

SEQ ID NO: 3016922 - DNA, 25 bp, Homo sapien
gctggaatcccaggagaactgctgg

SEQ ID NO: 3016923 - DNA, 25 bp, Homo sapien
tggaatcccaggagaactgctggga

SEQ ID NO: 3016924 - DNA, 25 bp, Homo sapien
gaatcccaggagaactgctgggacg

SEQ ID NO: 3016925 - DNA, 25 bp, Homo sapien
ggctggaatcccaggagaactgctg

SEQ ID NO: 3016926 - DNA, 25 bp, Homo sapien
gccacggctggttcgccctctcaaa

SEQ ID NO: 3016927 - DNA, 25 bp, Homo sapien
tccttgagggtcgaagccacggctg

SEQ ID NO: 3016928 - DNA, 25 bp, Homo sapien
ttatctccttgagggtcgaagccac

SEQ ID NO: 3016929 - DNA, 25 bp, Homo sapien
tggttcgccctctcaaatacggcac

SEQ ID NO: 3016930 - DNA, 25 bp, Homo sapien
cagatgggccaacagaaagacggac

SEQ ID NO: 3016931 - DNA, 25 bp, Homo sapien
agatgggccaacagaaagacggaca

SEQ ID NO: 3016932 - DNA, 25 bp, Homo sapien
ggacagatgggccaacagaaagacg

SEQ ID NO: 3016933 - DNA, 25 bp, Homo sapien
acagatgggccaacagaaagacgga

SEQ ID NO: 3016934 - DNA, 25 bp, Homo sapien
tttcttggcttgtgccggctctctg

SEQ ID NO: 3016935 - DNA, 25 bp, Homo sapien
ctgctggggctcgtccacttttctt

SEQ ID NO: 3016936 - DNA, 25 bp, Homo sapien
ctggggctcgtccacttttcttggc

SEQ ID NO: 3016937 - DNA, 25 bp, Homo sapien
ttcttggcttgtgccggctctctgc

SEQ ID NO: 3016938 - DNA, 25 bp, Homo sapien
cctccatctctggtttttcaatgcc

SEQ ID NO: 3016939 - DNA, 25 bp, Homo sapien
catctctggtttttcaatgccttcc

SEQ ID NO: 3016940 - DNA, 25 bp, Homo sapien
tccatctctggtttttcaatgcctt

SEQ ID NO: 3016941 - DNA, 25 bp, Homo sapien
ttcctccatctctggtttttcaatg

SEQ ID NO: 3016942 - DNA, 25 bp, Homo sapien
gacttggggtggtcctcttccacga

SEQ ID NO: 3016943 - DNA, 25 bp, Homo sapien
tcttccacgatgagtggccacttct

SEQ ID NO: 3016944 - DNA, 25 bp, Homo sapien
ctgccaagagttgtatagaacagga

SEQ ID NO: 3016945 - DNA, 25 bp, Homo sapien
gccaagagttgtatagaacaggact

SEQ ID NO: 3016946 - DNA, 25 bp, Homo sapien
tcttgacttgaaagcaccctctgcc

SEQ ID NO: 3016947 - DNA, 25 bp, Homo sapien
tcctccaaacgggtggtaatgatga

SEQ ID NO: 3016948 - DNA, 25 bp, Homo sapien
ttgacttgaaagcaccctctgcctg

SEQ ID NO: 3016949 - DNA, 25 bp, Homo sapien
tccaaacgggtggtaatgatgaaaa

SEQ ID NO: 3016950 - DNA, 25 bp, Homo sapien
ggcagaagcttcatgccacagaaat

SEQ ID NO: 3016951 - DNA, 25 bp, Homo sapien
tcacagaagcgactcttttggggct

SEQ ID NO: 3016952 - DNA, 25 bp, Homo sapien
gggcacgcagataggcattaaccac

SEQ ID NO: 3016953 - DNA, 25 bp, Homo sapien
ggtatctttgggcacgcagataggc

SEQ ID NO: 3016954 - DNA, 25 bp, Homo sapien
ctcttttcatcgggcccaaactcag

SEQ ID NO: 3016955 - DNA, 25 bp, Homo sapien
acttgatgtaaaatcaccaggcacc

SEQ ID NO: 3016956 - DNA, 25 bp, Homo sapien
tttcatcgggcccaaactcagacac

SEQ ID NO: 3016957 - DNA, 25 bp, Homo sapien
tgtaaaatcaccaggcaccctcttt

SEQ ID NO: 3016958 - DNA, 25 bp, Homo sapien
ctagcagtgtgactgactttaagcc

SEQ ID NO: 3016959 - DNA, 25 bp, Homo sapien
cttcaacttcatactagcagtgtga

SEQ ID NO: 3016960 - DNA, 25 bp, Homo sapien
acttggcatttgccacaaatgggag

SEQ ID NO: 3016961 - DNA, 25 bp, Homo sapien
aatgggagattattggccttaaaca

SEQ ID NO: 3016962 - DNA, 25 bp, Homo sapien
tcgtgttgacatagtaccgccggcc

SEQ ID NO: 3016963 - DNA, 25 bp, Homo sapien
tgaggcgacaggtagctctgccagc

SEQ ID NO: 3016964 - DNA, 25 bp, Homo sapien
accgccggccctgaggcgacaggta

SEQ ID NO: 3016965 - DNA, 25 bp, Homo sapien
gtggaaggatgaccgtctggctttc

SEQ ID NO: 3016966 - DNA, 25 bp, Homo sapien
tctgtttccaatactacccgacttg

SEQ ID NO: 3016967 - DNA, 25 bp, Homo sapien
acttgaacggcaaacacctgctggg

SEQ ID NO: 3016968 - DNA, 25 bp, Homo sapien
cctgctggggaggttaacagcctga

SEQ ID NO: 3016969 - DNA, 25 bp, Homo sapien
caatactacccgacttgaacggcaa

SEQ ID NO: 3016970 - DNA, 25 bp, Homo sapien
tcccttctccgcaaggcactgatga

SEQ ID NO: 3016971 - DNA, 25 bp, Homo sapien
cgaggtctcccgcaacgaggaaatt

SEQ ID NO: 3016972 - DNA, 25 bp, Homo sapien
ccttacagaaggtgggaggcaccct

SEQ ID NO: 3016973 - DNA, 25 bp, Homo sapien
gagcaataatgatgccgtcccttct

SEQ ID NO: 3016974 - DNA, 25 bp, Homo sapien
tatcctaaagccgtgagcaaacgct

SEQ ID NO: 3016975 - DNA, 25 bp, Homo sapien
gtcagacactcgctttagcagccag

SEQ ID NO: 3016976 - DNA, 25 bp, Homo sapien
gatcagacggttttaaggtctccca

SEQ ID NO: 3016977 - DNA, 25 bp, Homo sapien
tactcgctggtgttaatgggtggtc

SEQ ID NO: 3016978 - DNA, 25 bp, Homo sapien
cagaagcaataggagctctaaagaa

SEQ ID NO: 3016979 - DNA, 25 bp, Homo sapien
taggagctctaaagaaaagcatatc

SEQ ID NO: 3016980 - DNA, 25 bp, Homo sapien
ccaaacccagaagcaataggagctc

SEQ ID NO: 3016981 - DNA, 25 bp, Homo sapien
agaaaagcatatccacagggcccca

SEQ ID NO: 3016982 - DNA, 25 bp, Homo sapien
tctgaagttgtcagcctaacgagcc

SEQ ID NO: 3016983 - DNA, 25 bp, Homo sapien
tctggcagacccgttgctatggcaa

SEQ ID NO: 3016984 - DNA, 25 bp, Homo sapien
taatgagcccagtgccgtgattggc

SEQ ID NO: 3016985 - DNA, 25 bp, Homo sapien
tatggcaatgcttgctaatgagccc

SEQ ID NO: 3016986 - DNA, 25 bp, Homo sapien
cctctcaggtttaaacaattctctt

SEQ ID NO: 3016987 - DNA, 25 bp, Homo sapien
caccttggcctcctaaagtgctggg

SEQ ID NO: 3016988 - DNA, 25 bp, Homo sapien
ttgttttgttctgctttttagtaga

SEQ ID NO: 3016989 - DNA, 25 bp, Homo sapien
gcctctcaggtttaaacaattctct

SEQ ID NO: 3016990 - DNA, 25 bp, Homo sapien
tcctagaaactgacaggttctcaac

SEQ ID NO: 3016991 - DNA, 25 bp, Homo sapien
tccaaaagtgactcgcttgggctcc

SEQ ID NO: 3016992 - DNA, 25 bp, Homo sapien
cagcctccttggacgaatccaaaag

SEQ ID NO: 3016993 - DNA, 25 bp, Homo sapien
cagtcgccatggagtgtccggcata

SEQ ID NO: 3016994 - DNA, 25 bp, Homo sapien
accaggttgcaactccagtcgccat

SEQ ID NO: 3016995 - DNA, 25 bp, Homo sapien
cagaaaggatcttcaagcacaagcg

SEQ ID NO: 3016996 - DNA, 25 bp, Homo sapien
ggatcttcaagcacaagcgacacag

SEQ ID NO: 3016997 - DNA, 25 bp, Homo sapien
aagcacaagcgacacagctgctgcc

SEQ ID NO: 3016998 - DNA, 25 bp, Homo sapien
tcttcaagcacaagcgacacagctg

SEQ ID NO: 3016999 - DNA, 25 bp, Homo sapien
ggctttgtggccaccagttgctggc

SEQ ID NO: 3017000 - DNA, 25 bp, Homo sapien
ctgcgatccagctggcctggctttg

SEQ ID NO: 3017001 - DNA, 25 bp, Homo sapien
tttgtggccaccagttgctggctgg

SEQ ID NO: 3017002 - DNA, 25 bp, Homo sapien
tgcgatccagctggcctggctttgt

SEQ ID NO: 3017003 - DNA, 25 bp, Homo sapien
ctgaaggaaaatggaagcagctcat

SEQ ID NO: 3017004 - DNA, 25 bp, Homo sapien
catggcagcctctccgggaaatggg

SEQ ID NO: 3017005 - DNA, 25 bp, Homo sapien
aagtcgctagcccagggccagtgtt

SEQ ID NO: 3017006 - DNA, 25 bp, Homo sapien
tacctcagaggagagtcttgggtcc

SEQ ID NO: 3017007 - DNA, 25 bp, Homo sapien
agttccttccaaatccgctccagtg

SEQ ID NO: 3017008 - DNA, 25 bp, Homo sapien
tacccggcgtgtgactgaatctctg

SEQ ID NO: 3017009 - DNA, 25 bp, Homo sapien
cacggatccttagttggaaactcag

SEQ ID NO: 3017010 - DNA, 25 bp, Homo sapien
cactgaaatgtagtctggccctaag

SEQ ID NO: 3017011 - DNA, 25 bp, Homo sapien
gggacttccctgtaagaagcatctg

SEQ ID NO: 3017012 - DNA, 25 bp, Homo sapien
ggttgaagttacagtcgaagccatg

SEQ ID NO: 3017013 - DNA, 25 bp, Homo sapien
cctctgcggcgtctaggaatccaat

SEQ ID NO: 3017014 - DNA, 25 bp, Homo sapien
gaatccaatatccaaaggcaaatac

SEQ ID NO: 3017015 - DNA, 25 bp, Homo sapien
tatccaaaggcaaatactccagggt

SEQ ID NO: 3017016 - DNA, 25 bp, Homo sapien
ccatctctccagaacagttgaaggc

SEQ ID NO: 3017017 - DNA, 25 bp, Homo sapien
ggtctcttcatcgatgtggcatctg

SEQ ID NO: 3017018 - DNA, 25 bp, Homo sapien
gcccacagatgcaagtgctgaatcg

SEQ ID NO: 3017019 - DNA, 25 bp, Homo sapien
aacagttgaaggcaccaggtctctt

SEQ ID NO: 3017020 - DNA, 25 bp, Homo sapien
aaggaaatcagcagccatctcccgg

SEQ ID NO: 3017021 - DNA, 25 bp, Homo sapien
tgccacacataacgcgctctgatat

SEQ ID NO: 3017022 - DNA, 25 bp, Homo sapien
caaaatgacgttgcatcctgatccc

SEQ ID NO: 3017023 - DNA, 25 bp, Homo sapien
gaaggaaggttggatccatgcctcg

SEQ ID NO: 3017024 - DNA, 25 bp, Homo sapien
tccttatgcaaatctgacacgctgg

SEQ ID NO: 3017025 - DNA, 25 bp, Homo sapien
gcaaatctgacacgctggtcatttt

SEQ ID NO: 3017026 - DNA, 25 bp, Homo sapien
tgtccttatgcaaatctgacacgct

SEQ ID NO: 3017027 - DNA, 25 bp, Homo sapien
tatgcaaatctgacacgctggtcat

SEQ ID NO: 3017028 - DNA, 25 bp, Homo sapien
cacacaagcaccgacaggaatgcgg

SEQ ID NO: 3017029 - DNA, 25 bp, Homo sapien
acaggaatgcggtgtcgttaatgac

SEQ ID NO: 3017030 - DNA, 25 bp, Homo sapien
aatgacagtgtgacagctctggagc

SEQ ID NO: 3017031 - DNA, 25 bp, Homo sapien
gcttcgtccaaagatgcacacaagc

SEQ ID NO: 3017032 - DNA, 25 bp, Homo sapien
gggcctcccagattgacgttttcat

SEQ ID NO: 3017033 - DNA, 25 bp, Homo sapien
tgagtctgcttttcacacgtgggag

SEQ ID NO: 3017034 - DNA, 25 bp, Homo sapien
gatttgtaaacacgaagtcccagca

SEQ ID NO: 3017035 - DNA, 25 bp, Homo sapien
tccacgacacgcagggactgtgagt

SEQ ID NO: 3017036 - DNA, 25 bp, Homo sapien
caaccacggtactagttcacgaagg

SEQ ID NO: 3017037 - DNA, 25 bp, Homo sapien
gacaactcgcagaagtctcactgag

SEQ ID NO: 3017038 - DNA, 25 bp, Homo sapien
gatagagaaacatcagactgctgac

SEQ ID NO: 3017039 - DNA, 25 bp, Homo sapien
tatgacaagatgcaagcctgaagct

SEQ ID NO: 3017040 - DNA, 25 bp, Homo sapien
ctctggggccaactgtgccagtcac

SEQ ID NO: 3017041 - DNA, 25 bp, Homo sapien
ctggggccaactgtgccagtcacat

SEQ ID NO: 3017042 - DNA, 25 bp, Homo sapien
tctggggccaactgtgccagtcaca

SEQ ID NO: 3017043 - DNA, 25 bp, Homo sapien
tcttcatgcagacaagtgtcccact

SEQ ID NO: 3017044 - DNA, 25 bp, Homo sapien
ggcaagtgatagctccttctcccag

SEQ ID NO: 3017045 - DNA, 25 bp, Homo sapien
tgagttaataatgtacacaaagcat

SEQ ID NO: 3017046 - DNA, 25 bp, Homo sapien
acactgcaggcaagtgatagctcct

SEQ ID NO: 3017047 - DNA, 25 bp, Homo sapien
aatcagtgaagggacacagaacctg

SEQ ID NO: 3017048 - DNA, 25 bp, Homo sapien
gagctggtcatgtaggcatcccctg

SEQ ID NO: 3017049 - DNA, 25 bp, Homo sapien
gaacagtttagagaacagccaccct

SEQ ID NO: 3017050 - DNA, 25 bp, Homo sapien
aaaccaggcgcaagttcaggagtcc

SEQ ID NO: 3017051 - DNA, 25 bp, Homo sapien
gatgaatacatgttcgtgttcccat

SEQ ID NO: 3017052 - DNA, 25 bp, Homo sapien
tctgcattgagatgaatacatgttc

SEQ ID NO: 3017053 - DNA, 25 bp, Homo sapien
cattgagatgaatacatgttcgtgt

SEQ ID NO: 3017054 - DNA, 25 bp, Homo sapien
tgagatgaatacatgttcgtgttcc

SEQ ID NO: 3017055 - DNA, 25 bp, Homo sapien
tgtgcactagggtgctacacaattt

SEQ ID NO: 3017056 - DNA, 25 bp, Homo sapien
ctcaaatgtgcactagggtgctaca

SEQ ID NO: 3017057 - DNA, 25 bp, Homo sapien
ctagggtgctacacaatttcagtaa

SEQ ID NO: 3017058 - DNA, 25 bp, Homo sapien
gcactagggtgctacacaatttcag

SEQ ID NO: 3017059 - DNA, 25 bp, Homo sapien
tgttaggggtaccactgggacaggc

SEQ ID NO: 3017060 - DNA, 25 bp, Homo sapien
gctctgttaggggtaccactgggac

SEQ ID NO: 3017061 - DNA, 25 bp, Homo sapien
tctgttaggggtaccactgggacag

SEQ ID NO: 3017062 - DNA, 25 bp, Homo sapien
ggctctgttaggggtaccactggga

SEQ ID NO: 3017063 - DNA, 25 bp, Homo sapien
tgtcttccacgctgtcctgtagtgg

SEQ ID NO: 3017064 - DNA, 25 bp, Homo sapien
gtagtggctgcttttgcccagatct

SEQ ID NO: 3017065 - DNA, 25 bp, Homo sapien
tgctgtcttccacgctgtcctgtag

SEQ ID NO: 3017066 - DNA, 25 bp, Homo sapien
cctgtagtggctgcttttgcccaga

SEQ ID NO: 3017067 - DNA, 25 bp, Homo sapien
tgtcatccagacaacagtttaagcg

SEQ ID NO: 3017068 - DNA, 25 bp, Homo sapien
gacaacagtttaagcgtcaccgctc

SEQ ID NO: 3017069 - DNA, 25 bp, Homo sapien
agtttaagcgtcaccgctccagaga

SEQ ID NO: 3017070 - DNA, 25 bp, Homo sapien
gcttcttgtcatccagacaacagtt

SEQ ID NO: 3017071 - DNA, 25 bp, Homo sapien
agtaggaaaagataataggagtagc

SEQ ID NO: 3017072 - DNA, 25 bp, Homo sapien
taggaaaagataataggagtagcat

SEQ ID NO: 3017073 - DNA, 25 bp, Homo sapien
tttcactgaaaagactctatctttg

SEQ ID NO: 3017074 - DNA, 25 bp, Homo sapien
aaagactctatctttggaaagggag

SEQ ID NO: 3017075 - DNA, 25 bp, Homo sapien
ttctttagaagcaccaagttcaacg

SEQ ID NO: 3017076 - DNA, 25 bp, Homo sapien
caagcacctgctgggcgagtttggt

SEQ ID NO: 3017077 - DNA, 25 bp, Homo sapien
aagttcaacgagtgggtccttcagg

SEQ ID NO: 3017078 - DNA, 25 bp, Homo sapien
tgcctgactattctcacgcccagag

SEQ ID NO: 3017079 - DNA, 25 bp, Homo sapien
gtagaagacacagctaccaacagaa

SEQ ID NO: 3017080 - DNA, 25 bp, Homo sapien
ccaggccccagtagaagacacagct

SEQ ID NO: 3017081 - DNA, 25 bp, Homo sapien
gctaccaacagaaggtacggccacc

SEQ ID NO: 3017082 - DNA, 25 bp, Homo sapien
caacagaaggtacggccaccaggag

SEQ ID NO: 3017083 - DNA, 25 bp, Homo sapien
tcctcctcgtacagtgtgacctgca

SEQ ID NO: 3017084 - DNA, 25 bp, Homo sapien
cctcctcgtacagtgtgacctgcat

SEQ ID NO: 3017085 - DNA, 25 bp, Homo sapien
gtctcatgtattcctgggcagggtg

SEQ ID NO: 3017086 - DNA, 25 bp, Homo sapien
gccaaggccacgactactttctgaa

SEQ ID NO: 3017087 - DNA, 25 bp, Homo sapien
gattgcacaactccatgaatgtact

SEQ ID NO: 3017088 - DNA, 25 bp, Homo sapien
tatatctagacctcgaagagcagcg

SEQ ID NO: 3017089 - DNA, 25 bp, Homo sapien
caatttgataaacaggcatcagagt

SEQ ID NO: 3017090 - DNA, 25 bp, Homo sapien
cactcccaaggagaactccaatttg

SEQ ID NO: 3017091 - DNA, 25 bp, Homo sapien
gagaactccaatttgataaacaggc

SEQ ID NO: 3017092 - DNA, 25 bp, Homo sapien
ccaggtgactttccacaccagctcc

SEQ ID NO: 3017093 - DNA, 25 bp, Homo sapien
gcccaggttgatggactctaacttc

SEQ ID NO: 3017094 - DNA, 25 bp, Homo sapien
cctggcctctcactacatcatgttg

SEQ ID NO: 3017095 - DNA, 25 bp, Homo sapien
ctggcctctcactacatcatgttgc

SEQ ID NO: 3017096 - DNA, 25 bp, Homo sapien
ggttgatggactctaacttctgggc

SEQ ID NO: 3017097 - DNA, 25 bp, Homo sapien
gcttgagtaataggaaagaccacct

SEQ ID NO: 3017098 - DNA, 25 bp, Homo sapien
caggtcttcgggtaacaaatgagga

SEQ ID NO: 3017099 - DNA, 25 bp, Homo sapien
caaaaggaatctacagtgcttgagt

SEQ ID NO: 3017100 - DNA, 25 bp, Homo sapien
tgaggaacacatcaatttagcagga

SEQ ID NO: 3017101 - DNA, 25 bp, Homo sapien
gcatttagcatcacataacactggg

SEQ ID NO: 3017102 - DNA, 25 bp, Homo sapien
gccattaggcacctccgagagcaaa

SEQ ID NO: 3017103 - DNA, 25 bp, Homo sapien
taggtcagcactggcgccattaggc

SEQ ID NO: 3017104 - DNA, 25 bp, Homo sapien
agactaataataaagcagaccagcc

SEQ ID NO: 3017105 - DNA, 25 bp, Homo sapien
gccgagatcgatcgttccattgcac

SEQ ID NO: 3017106 - DNA, 25 bp, Homo sapien
agatcgatcgttccattgcactcca

SEQ ID NO: 3017107 - DNA, 25 bp, Homo sapien
tgagccgagatcgatcgttccattg

SEQ ID NO: 3017108 - DNA, 25 bp, Homo sapien
gtgagccgagatcgatcgttccatt

SEQ ID NO: 3017109 - DNA, 25 bp, Homo sapien
tggatgcaatctgttgcagaaaact

SEQ ID NO: 3017110 - DNA, 25 bp, Homo sapien
cttataccaagcagggagatatttc

SEQ ID NO: 3017111 - DNA, 25 bp, Homo sapien
agaaaactccgtgtttccaagctgg

SEQ ID NO: 3017112 - DNA, 25 bp, Homo sapien
gagaggagagtattttcccttatac

SEQ ID NO: 3017113 - DNA, 25 bp, Homo sapien
cgctgtttggcatagttgagcccgg

SEQ ID NO: 3017114 - DNA, 25 bp, Homo sapien
ttcgctcacacgctgtttggcatag

SEQ ID NO: 3017115 - DNA, 25 bp, Homo sapien
gacccttcgctcacacgctgtttgg

SEQ ID NO: 3017116 - DNA, 25 bp, Homo sapien
catggatccagacccttcgctcaca

SEQ ID NO: 3017117 - DNA, 25 bp, Homo sapien
gccaggccagaaccccaggaacaag

SEQ ID NO: 3017118 - DNA, 25 bp, Homo sapien
tagacaataaacagccagccgcctt

SEQ ID NO: 3017119 - DNA, 25 bp, Homo sapien
aacaagccactttcgggttctgagc

SEQ ID NO: 3017120 - DNA, 25 bp, Homo sapien
ttcgggttctgagccttagcctcgg

SEQ ID NO: 3017121 - DNA, 25 bp, Homo sapien
ggggtgctacggcaccccaggatca

SEQ ID NO: 3017122 - DNA, 25 bp, Homo sapien
ggtgctacggcaccccaggatcaag

SEQ ID NO: 3017123 - DNA, 25 bp, Homo sapien
ggcagtggcggggggtgctacggca

SEQ ID NO: 3017124 - DNA, 25 bp, Homo sapien
cagcaagtgggtggtcccgaggcgg

SEQ ID NO: 3017125 - DNA, 25 bp, Homo sapien
tccacgggtcatcaggctctagact

SEQ ID NO: 3017126 - DNA, 25 bp, Homo sapien
actcacacaggcaacaagttctcgc

SEQ ID NO: 3017127 - DNA, 25 bp, Homo sapien
ggaccgagtcggtgccactttctcg

SEQ ID NO: 3017128 - DNA, 25 bp, Homo sapien
gcatccccggaacgggcaacaggta

SEQ ID NO: 3017129 - DNA, 25 bp, Homo sapien
agcagcgtgatcagctcgcccgcgg

SEQ ID NO: 3017130 - DNA, 25 bp, Homo sapien
agctcgccgggaaccagccacggag

SEQ ID NO: 3017131 - DNA, 25 bp, Homo sapien
agaaggggtacagggtccggcagcg

SEQ ID NO: 3017132 - DNA, 25 bp, Homo sapien
cagcaactgcacgtagctcgccggg

SEQ ID NO: 3017133 - DNA, 25 bp, Homo sapien
agcgcagcctgcattcccgccgagc

SEQ ID NO: 3017134 - DNA, 25 bp, Homo sapien
acagcgcagcctgcattcccgccga

SEQ ID NO: 3017135 - DNA, 25 bp, Homo sapien
ttggcgcccgggttcacagcgcagc

SEQ ID NO: 3017136 - DNA, 25 bp, Homo sapien
ggccttggcgcccgggttcacagcg

SEQ ID NO: 3017137 - DNA, 25 bp, Homo sapien
cccgcgctctgggcgcgcgccgtct

SEQ ID NO: 3017138 - DNA, 25 bp, Homo sapien
ctcccgcgctctgggcgcgcgccgt

SEQ ID NO: 3017139 - DNA, 25 bp, Homo sapien
tcccgcgctctgggcgcgcgccgtc

SEQ ID NO: 3017140 - DNA, 25 bp, Homo sapien
ctggggtgcgcgggggtcctcaggc

SEQ ID NO: 3017141 - DNA, 25 bp, Homo sapien
tggggtgcgcgggggtcctcaggca

SEQ ID NO: 3017142 - DNA, 25 bp, Homo sapien
cgcgggaatggaaacgcccctctgt

SEQ ID NO: 3017143 - DNA, 25 bp, Homo sapien
ttcttcgaggtgtctgcgagggatc

SEQ ID NO: 3017144 - DNA, 25 bp, Homo sapien
tgcctgctttgtaggcctggcggcc

SEQ ID NO: 3017145 - DNA, 25 bp, Homo sapien
ggcccgtggcgtgcgggcggcttct

SEQ ID NO: 3017146 - DNA, 25 bp, Homo sapien
ttgaacctggggttgaacttgtctc

SEQ ID NO: 3017147 - DNA, 25 bp, Homo sapien
acctggggttgaacttgtctcaccg

SEQ ID NO: 3017148 - DNA, 25 bp, Homo sapien
gaacctggggttgaacttgtctcac

SEQ ID NO: 3017149 - DNA, 25 bp, Homo sapien
ctggggttgaacttgtctcaccgga

SEQ ID NO: 3017150 - DNA, 25 bp, Homo sapien
tccctgtcagacaaaggaggatttc

SEQ ID NO: 3017151 - DNA, 25 bp, Homo sapien
ctgtcagacaaaggaggatttccca

SEQ ID NO: 3017152 - DNA, 25 bp, Homo sapien
gatctccctgtcagacaaaggagga

SEQ ID NO: 3017153 - DNA, 25 bp, Homo sapien
tctccctgtcagacaaaggaggatt

SEQ ID NO: 3017154 - DNA, 25 bp, Homo sapien
tagcctgagccattttttctggaac

SEQ ID NO: 3017155 - DNA, 25 bp, Homo sapien
ctgtagcctgagccattttttctgg

SEQ ID NO: 3017156 - DNA, 25 bp, Homo sapien
tttctggaactgatgggtctccttc

SEQ ID NO: 3017157 - DNA, 25 bp, Homo sapien
ttctggaactgatgggtctccttca

SEQ ID NO: 3017158 - DNA, 25 bp, Homo sapien
aattcttcatggttagcgtgtggtt

SEQ ID NO: 3017159 - DNA, 25 bp, Homo sapien
gttagcgtgtggttctgcaatccca

SEQ ID NO: 3017160 - DNA, 25 bp, Homo sapien
tgtggttctgcaatcccacggtgtc

SEQ ID NO: 3017161 - DNA, 25 bp, Homo sapien
ttctgcaatcccacggtgtcactca

SEQ ID NO: 3017162 - DNA, 25 bp, Homo sapien
gttctggctcctggatcttgacaac

SEQ ID NO: 3017163 - DNA, 25 bp, Homo sapien
agggtgtttagatcacaaacccctg

SEQ ID NO: 3017164 - DNA, 25 bp, Homo sapien
agcttcactttggatgtactgcaga

SEQ ID NO: 3017165 - DNA, 25 bp, Homo sapien
ggatcttgacaacagtcatcacata

SEQ ID NO: 3017166 - DNA, 25 bp, Homo sapien
cctcatcataaattcaagttgaagg

SEQ ID NO: 3017167 - DNA, 25 bp, Homo sapien
aaacctcatcataaattcaagttga

SEQ ID NO: 3017168 - DNA, 25 bp, Homo sapien
tcaaaacctcatcataaattcaagt

SEQ ID NO: 3017169 - DNA, 25 bp, Homo sapien
acctcatcataaattcaagttgaag

SEQ ID NO: 3017170 - DNA, 25 bp, Homo sapien
ttgaagtgcggatggggaatataaa

SEQ ID NO: 3017171 - DNA, 25 bp, Homo sapien
tgaagtgcggatggggaatataaat

SEQ ID NO: 3017172 - DNA, 25 bp, Homo sapien
agtgcggatggggaatataaattct

SEQ ID NO: 3017173 - DNA, 25 bp, Homo sapien
gcggatggggaatataaattctctg

SEQ ID NO: 3017174 - DNA, 25 bp, Homo sapien
atcaggactgatttgtgcccatcac

SEQ ID NO: 3017175 - DNA, 25 bp, Homo sapien
tatcaggactgatttgtgcccatca

SEQ ID NO: 3017176 - DNA, 25 bp, Homo sapien
caaggttgaaccgttggatacgata

SEQ ID NO: 3017177 - DNA, 25 bp, Homo sapien
ggaagacaaccaccctcaaggttga

SEQ ID NO: 3017178 - DNA, 25 bp, Homo sapien
cataaggtggttgagaatggaaaaa

SEQ ID NO: 3017179 - DNA, 25 bp, Homo sapien
tacagcaagccactttgacggacat

SEQ ID NO: 3017180 - DNA, 25 bp, Homo sapien
tgagtttcagggacaaccacaattt

SEQ ID NO: 3017181 - DNA, 25 bp, Homo sapien
tcctcttttgtccttcgtggcagta

SEQ ID NO: 3017182 - DNA, 25 bp, Homo sapien
attttttggtacaggatgaagtcca

SEQ ID NO: 3017183 - DNA, 25 bp, Homo sapien
gaagtccaggagcaaaccttgaagt

SEQ ID NO: 3017184 - DNA, 25 bp, Homo sapien
ctggggtaataattgccaggagttg

SEQ ID NO: 3017185 - DNA, 25 bp, Homo sapien
ggggtaataattgccaggagttgtg

SEQ ID NO: 3017186 - DNA, 25 bp, Homo sapien
gggtaataattgccaggagttgtgc

SEQ ID NO: 3017187 - DNA, 25 bp, Homo sapien
tggggtaataattgccaggagttgt

SEQ ID NO: 3017188 - DNA, 25 bp, Homo sapien
aattttggcagcttttgtcagatgc

SEQ ID NO: 3017189 - DNA, 25 bp, Homo sapien
attttggcagcttttgtcagatgcc

SEQ ID NO: 3017190 - DNA, 25 bp, Homo sapien
gacaatgccaagataatctgagaag

SEQ ID NO: 3017191 - DNA, 25 bp, Homo sapien
tgagaagagaatgattacaatcagc

SEQ ID NO: 3017192 - DNA, 25 bp, Homo sapien
acctttatcctttctggtagccatg

SEQ ID NO: 3017193 - DNA, 25 bp, Homo sapien
tgtaaggattgccttgtctactaga

SEQ ID NO: 3017194 - DNA, 25 bp, Homo sapien
tcctgcgaagggcaggaggctattt

SEQ ID NO: 3017195 - DNA, 25 bp, Homo sapien
ggctatttgtgtagatatactgctt

SEQ ID NO: 3017196 - DNA, 25 bp, Homo sapien
ggcaggaggctatttgtgtagatat

SEQ ID NO: 3017197 - DNA, 25 bp, Homo sapien
tcccctgggaccaacacttctcttc

SEQ ID NO: 3017198 - DNA, 25 bp, Homo sapien
cccatggcaacgagcatcaggtgag

SEQ ID NO: 3017199 - DNA, 25 bp, Homo sapien
tccactctctcggaggtgtcccatg

SEQ ID NO: 3017200 - DNA, 25 bp, Homo sapien
cctccactctctcggaggtgtccca

SEQ ID NO: 3017201 - DNA, 25 bp, Homo sapien
catggcaacgagcatcaggtgagcc

SEQ ID NO: 3017202 - DNA, 25 bp, Homo sapien
ctctagctcatgctggactctccgg

SEQ ID NO: 3017203 - DNA, 25 bp, Homo sapien
ggacagctgcgtgttggcctgctcc

SEQ ID NO: 3017204 - DNA, 25 bp, Homo sapien
tggctgcccacgtctcggctcttgg

SEQ ID NO: 3017205 - DNA, 25 bp, Homo sapien
ggactctccggcatctggacagctg

SEQ ID NO: 3017206 - DNA, 25 bp, Homo sapien
gggtatgacgctgtagagcctctca

SEQ ID NO: 3017207 - DNA, 25 bp, Homo sapien
tatgaggtgccctgtctctgaaggc

SEQ ID NO: 3017208 - DNA, 25 bp, Homo sapien
gtagagcctctcagtccgattatga

SEQ ID NO: 3017209 - DNA, 25 bp, Homo sapien
tgaggagttaagcaaccagggccct

SEQ ID NO: 3017210 - DNA, 25 bp, Homo sapien
caaccaggatggcggggacacccag

SEQ ID NO: 3017211 - DNA, 25 bp, Homo sapien
caggatgccccagggactgtctgtc

SEQ ID NO: 3017212 - DNA, 25 bp, Homo sapien
tgccccagggactgtctgtctgtgg

SEQ ID NO: 3017213 - DNA, 25 bp, Homo sapien
ccaggatggcggggacacccaggat

SEQ ID NO: 3017214 - DNA, 25 bp, Homo sapien
tcttgtaagacttcactttggcctg

SEQ ID NO: 3017215 - DNA, 25 bp, Homo sapien
agcctgcctcttgtaagacttcact

SEQ ID NO: 3017216 - DNA, 25 bp, Homo sapien
tcctggagcctaaggatattcttgt

SEQ ID NO: 3017217 - DNA, 25 bp, Homo sapien
cctaaggatattcttgtggtcctcc

SEQ ID NO: 3017218 - DNA, 25 bp, Homo sapien
cattcactgaggaggtttttgggac

SEQ ID NO: 3017219 - DNA, 25 bp, Homo sapien
gcattcactgaggaggtttttggga

SEQ ID NO: 3017220 - DNA, 25 bp, Homo sapien
agcattcactgaggaggtttttggg

SEQ ID NO: 3017221 - DNA, 25 bp, Homo sapien
tgcgttcgtacttgtgggctccctt

SEQ ID NO: 3017222 - DNA, 25 bp, Homo sapien
gactttgcgttcgtacttgtgggct

SEQ ID NO: 3017223 - DNA, 25 bp, Homo sapien
gttcgtacttgtgggctcccttcag

SEQ ID NO: 3017224 - DNA, 25 bp, Homo sapien
tttgcgttcgtacttgtgggctccc

SEQ ID NO: 3017225 - DNA, 25 bp, Homo sapien
agagtaacagtcctctcaaaaactc

SEQ ID NO: 3017226 - DNA, 25 bp, Homo sapien
agcgccagttgttcagcctcatcta

SEQ ID NO: 3017227 - DNA, 25 bp, Homo sapien
ttcagcctcatctagacggtgctgc

SEQ ID NO: 3017228 - DNA, 25 bp, Homo sapien
cagttgttcagcctcatctagacgg

SEQ ID NO: 3017229 - DNA, 25 bp, Homo sapien
gttgttcagcctcatctagacggtg

SEQ ID NO: 3017230 - DNA, 25 bp, Homo sapien
gcactgagctatgtcagcctccagt

SEQ ID NO: 3017231 - DNA, 25 bp, Homo sapien
tcctggactcctggatcgagttctc

SEQ ID NO: 3017232 - DNA, 25 bp, Homo sapien
tcctggatcgagttctccacctctg

SEQ ID NO: 3017233 - DNA, 25 bp, Homo sapien
tcttggtatttatcaggcttgtgtt

SEQ ID NO: 3017234 - DNA, 25 bp, Homo sapien
tgctctgacagcctgcgggtccgct

SEQ ID NO: 3017235 - DNA, 25 bp, Homo sapien
gaggccattcctgcgctccacgatg

SEQ ID NO: 3017236 - DNA, 25 bp, Homo sapien
agctgcacgcggtcgctggcgtcca

SEQ ID NO: 3017237 - DNA, 25 bp, Homo sapien
tcctcagggcgtcatcgagatgcag

SEQ ID NO: 3017238 - DNA, 25 bp, Homo sapien
gcaggggagacccagagtgaggcca

SEQ ID NO: 3017239 - DNA, 25 bp, Homo sapien
tagctgcacgcgcaagatcttgctc

SEQ ID NO: 3017240 - DNA, 25 bp, Homo sapien
ctggaccgtgcgcagatgcttctgg

SEQ ID NO: 3017241 - DNA, 25 bp, Homo sapien
tccggctgcggatttcagcatccag

SEQ ID NO: 3017242 - DNA, 25 bp, Homo sapien
tctttagcctcagggcgtcgttccg

SEQ ID NO: 3017243 - DNA, 25 bp, Homo sapien
agtgccgtggacatccaccttcatg

SEQ ID NO: 3017244 - DNA, 25 bp, Homo sapien
ctgacgaaagcaaaggagtgattga

SEQ ID NO: 3017245 - DNA, 25 bp, Homo sapien
agtgattgagagtgccgtggacatc

SEQ ID NO: 3017246 - DNA, 25 bp, Homo sapien
attgagagtgccgtggacatccacc

SEQ ID NO: 3017247 - DNA, 25 bp, Homo sapien
tcttggtcttttccgcttcctgaag

SEQ ID NO: 3017248 - DNA, 25 bp, Homo sapien
tcctgctccactagcttcttggtct

SEQ ID NO: 3017249 - DNA, 25 bp, Homo sapien
tctaaggcgacctgcagatctgact

SEQ ID NO: 3017250 - DNA, 25 bp, Homo sapien
aatctgctcagttaagtcggaaatc

SEQ ID NO: 3017251 - DNA, 25 bp, Homo sapien
ctgcaaaggacaggcttgatttagg

SEQ ID NO: 3017252 - DNA, 25 bp, Homo sapien
tcctcatcttgaagagttcagtgct

SEQ ID NO: 3017253 - DNA, 25 bp, Homo sapien
ttcagtgctgagtgacctggactcc

SEQ ID NO: 3017254 - DNA, 25 bp, Homo sapien
tcagcctggctttcgtccagctttt

SEQ ID NO: 3017255 - DNA, 25 bp, Homo sapien
gatttttgttctctcgcctcagtgt

SEQ ID NO: 3017256 - DNA, 25 bp, Homo sapien
gagttcgccgtctccgtgttctcct

SEQ ID NO: 3017257 - DNA, 25 bp, Homo sapien
aacgatgcgcacttggagttcgccg

SEQ ID NO: 3017258 - DNA, 25 bp, Homo sapien
tccagatcccgcatcagatcctcca

SEQ ID NO: 3017259 - DNA, 25 bp, Homo sapien
ccagtgtggcacaggcggtgtggga

SEQ ID NO: 3017260 - DNA, 25 bp, Homo sapien
atactgttcccgcagcaggtcacag

SEQ ID NO: 3017261 - DNA, 25 bp, Homo sapien
ctccactgggcaacctcactgttgg

SEQ ID NO: 3017262 - DNA, 25 bp, Homo sapien
cactgggcaacctcactgttggcct

SEQ ID NO: 3017263 - DNA, 25 bp, Homo sapien
caggtcacagtcgtggcgggaggac

SEQ ID NO: 3017264 - DNA, 25 bp, Homo sapien
tgtgaaatcagagactccttctctt

SEQ ID NO: 3017265 - DNA, 25 bp, Homo sapien
ttctcttccactcggtggctcagct

SEQ ID NO: 3017266 - DNA, 25 bp, Homo sapien
gcttgcttttggtcagctgtgaaat

SEQ ID NO: 3017267 - DNA, 25 bp, Homo sapien
tttgcctcttaagctcctccagctg

SEQ ID NO: 3017268 - DNA, 25 bp, Homo sapien
ggacccagagccctgcccattctca

SEQ ID NO: 3017269 - DNA, 25 bp, Homo sapien
gctggacccagagccctgcccattc

SEQ ID NO: 3017270 - DNA, 25 bp, Homo sapien
caccctctcccatggcccggctgga

SEQ ID NO: 3017271 - DNA, 25 bp, Homo sapien
atggcccggctggacccagagccct

SEQ ID NO: 3017272 - DNA, 25 bp, Homo sapien
aattgatcttctaccgtccggcacg

SEQ ID NO: 3017273 - DNA, 25 bp, Homo sapien
tctgcatgttcagatcatggatcaa

SEQ ID NO: 3017274 - DNA, 25 bp, Homo sapien
actgtgtctgttgctcgtccttggc

SEQ ID NO: 3017275 - DNA, 25 bp, Homo sapien
ggctttgatttcactaaattgatct

SEQ ID NO: 3017276 - DNA, 25 bp, Homo sapien
gtggccgtcggctgccttgcattct

SEQ ID NO: 3017277 - DNA, 25 bp, Homo sapien
caggtggccgtcggctgccttgcat

SEQ ID NO: 3017278 - DNA, 25 bp, Homo sapien
ggtggccgtcggctgccttgcattc

SEQ ID NO: 3017279 - DNA, 25 bp, Homo sapien
gggcaggtggccgtcggctgccttg

SEQ ID NO: 3017280 - DNA, 25 bp, Homo sapien
cttggagagagcctcgatgttgctg

SEQ ID NO: 3017281 - DNA, 25 bp, Homo sapien
caatcttggctctgagcgtgtgttc

SEQ ID NO: 3017282 - DNA, 25 bp, Homo sapien
gatgttgctggccatgtcgtcaatc

SEQ ID NO: 3017283 - DNA, 25 bp, Homo sapien
ctgagcgctgcttctcaatcttggc

SEQ ID NO: 3017284 - DNA, 25 bp, Homo sapien
aactgtggacttgttcgtcatctat

SEQ ID NO: 3017285 - DNA, 25 bp, Homo sapien
gtggacttgttcgtcatctattttg

SEQ ID NO: 3017286 - DNA, 25 bp, Homo sapien
caaactgtggacttgttcgtcatct

SEQ ID NO: 3017287 - DNA, 25 bp, Homo sapien
ggacttgttcgtcatctattttggc

SEQ ID NO: 3017288 - DNA, 25 bp, Homo sapien
caagtccgcccgcagtttcttctcc

SEQ ID NO: 3017289 - DNA, 25 bp, Homo sapien
tcctcttcgccctttccaagtccgc

SEQ ID NO: 3017290 - DNA, 25 bp, Homo sapien
ttcgccctttccaagtccgcccgca

SEQ ID NO: 3017291 - DNA, 25 bp, Homo sapien
tccagcttcctcttcgccctttcca

SEQ ID NO: 3017292 - DNA, 25 bp, Homo sapien
ataaatgctaaagcatagtagtaaa

SEQ ID NO: 3017293 - DNA, 25 bp, Homo sapien
aatgctaaagcatagtagtaaaata

SEQ ID NO: 3017294 - DNA, 25 bp, Homo sapien
ctagttagactgtctcttgtctgtg

SEQ ID NO: 3017295 - DNA, 25 bp, Homo sapien
agttagactgtctcttgtctgtgct

SEQ ID NO: 3017296 - DNA, 25 bp, Homo sapien
cacctgaagatcatccagtgtttgc

SEQ ID NO: 3017297 - DNA, 25 bp, Homo sapien
atgggcctcctgtagagatttcttt

SEQ ID NO: 3017298 - DNA, 25 bp, Homo sapien
caagtgctgtcatttcttcggaaag

SEQ ID NO: 3017299 - DNA, 25 bp, Homo sapien
ctgtttgctgttcaagcttggcatt

SEQ ID NO: 3017300 - DNA, 25 bp, Homo sapien
ctgggacaatattaacaccgattta

SEQ ID NO: 3017301 - DNA, 25 bp, Homo sapien
acgattatgccagaagcttccatca

SEQ ID NO: 3017302 - DNA, 25 bp, Homo sapien
tccatcaacaaaagctattgcttct

SEQ ID NO: 3017303 - DNA, 25 bp, Homo sapien
taacaccgatttaatatggaaacga

SEQ ID NO: 3017304 - DNA, 25 bp, Homo sapien
agagagtgaagcctgttaagacact

SEQ ID NO: 3017305 - DNA, 25 bp, Homo sapien
gagtgaagcctgttaagacactgtg

SEQ ID NO: 3017306 - DNA, 25 bp, Homo sapien
gaagcctgttaagacactgtgggag

SEQ ID NO: 3017307 - DNA, 25 bp, Homo sapien
gcctgttaagacactgtgggagtcc

SEQ ID NO: 3017308 - DNA, 25 bp, Homo sapien
gacttttgcttccagtaggatcttg

SEQ ID NO: 3017309 - DNA, 25 bp, Homo sapien
tttgatgagtccttcacaccgttcc

SEQ ID NO: 3017310 - DNA, 25 bp, Homo sapien
cttgagagaggagcatttatcttcc

SEQ ID NO: 3017311 - DNA, 25 bp, Homo sapien
tttcaactttcgtcaaggtcagctc

SEQ ID NO: 3017312 - DNA, 25 bp, Homo sapien
tttatgttttgattggcctctttga

SEQ ID NO: 3017313 - DNA, 25 bp, Homo sapien
atgttttgattggcctctttgaaaa

SEQ ID NO: 3017314 - DNA, 25 bp, Homo sapien
tatgttttgattggcctctttgaaa

SEQ ID NO: 3017315 - DNA, 25 bp, Homo sapien
ttatgttttgattggcctctttgaa

SEQ ID NO: 3017316 - DNA, 25 bp, Homo sapien
agactggacctgcaattggaggtca

SEQ ID NO: 3017317 - DNA, 25 bp, Homo sapien
tccttggtcctctcaaagtcttcct

SEQ ID NO: 3017318 - DNA, 25 bp, Homo sapien
gcgagcctcagatcgggccagttct

SEQ ID NO: 3017319 - DNA, 25 bp, Homo sapien
tgcttgacgttcataaaagagcgga

SEQ ID NO: 3017320 - DNA, 25 bp, Homo sapien
tcttgaactccacccgcatcaggta

SEQ ID NO: 3017321 - DNA, 25 bp, Homo sapien
tgcacaccgcctgcgtgcttgtcat

SEQ ID NO: 3017322 - DNA, 25 bp, Homo sapien
tgcttgtcatcagcgtcaccagctt

SEQ ID NO: 3017323 - DNA, 25 bp, Homo sapien
tcctccaaaagtcccaggagcccag

SEQ ID NO: 3017324 - DNA, 25 bp, Homo sapien
gaactgcccttcagggatagcactg

SEQ ID NO: 3017325 - DNA, 25 bp, Homo sapien
tggtgttgccgaacctgaactgctc

SEQ ID NO: 3017326 - DNA, 25 bp, Homo sapien
tagcactggcattgaggatccggta

SEQ ID NO: 3017327 - DNA, 25 bp, Homo sapien
ccacatcgatggagttgaggagctt

SEQ ID NO: 3017328 - DNA, 25 bp, Homo sapien
cttcctgcaaatccggatgccctcg

SEQ ID NO: 3017329 - DNA, 25 bp, Homo sapien
ctgcaaatccggatgccctcgagga

SEQ ID NO: 3017330 - DNA, 25 bp, Homo sapien
tcgaggaccccgttacagcgcagct

SEQ ID NO: 3017331 - DNA, 25 bp, Homo sapien
aagtcagcatagaggatccggctgg

SEQ ID NO: 3017332 - DNA, 25 bp, Homo sapien
gctttaaccatgtggctgaggcctc

SEQ ID NO: 3017333 - DNA, 25 bp, Homo sapien
tgcaaagctgtagcagagccgagac

SEQ ID NO: 3017334 - DNA, 25 bp, Homo sapien
tttcttcttaagcaccgggagcaga

SEQ ID NO: 3017335 - DNA, 25 bp, Homo sapien
taattcccgcagaggcatcctatgg

SEQ ID NO: 3017336 - DNA, 25 bp, Homo sapien
tggtctcattgggaatcagacatcg

SEQ ID NO: 3017337 - DNA, 25 bp, Homo sapien
gggtgggtgctccttaagttagtca

SEQ ID NO: 3017338 - DNA, 25 bp, Homo sapien
cagacatcgtacaaagtgagggtgg

SEQ ID NO: 3017339 - DNA, 25 bp, Homo sapien
gggtgctccttaagttagtcatcaa

SEQ ID NO: 3017340 - DNA, 25 bp, Homo sapien
acacggccgacacggtctggaaaga

SEQ ID NO: 3017341 - DNA, 25 bp, Homo sapien
tgaacacggccgacacggtctggaa

SEQ ID NO: 3017342 - DNA, 25 bp, Homo sapien
cctgaacacggccgacacggtctgg

SEQ ID NO: 3017343 - DNA, 25 bp, Homo sapien
aacacggccgacacggtctggaaag

SEQ ID NO: 3017344 - DNA, 25 bp, Homo sapien
atagaacgtcccacagagggaaaga

SEQ ID NO: 3017345 - DNA, 25 bp, Homo sapien
gagggaaagaaatgatagaatttta

SEQ ID NO: 3017346 - DNA, 25 bp, Homo sapien
acagagggaaagaaatgatagaatt

SEQ ID NO: 3017347 - DNA, 25 bp, Homo sapien
tagaacgtcccacagagggaaagaa

SEQ ID NO: 3017348 - DNA, 25 bp, Homo sapien
aagcttcagcgaagacttctggtac

SEQ ID NO: 3017349 - DNA, 25 bp, Homo sapien
cacggtgccggcatagtgcaccagc

SEQ ID NO: 3017350 - DNA, 25 bp, Homo sapien
ccggcatagtgcaccagcgagaagt

SEQ ID NO: 3017351 - DNA, 25 bp, Homo sapien
ggagagaagcttcagcgaagacttc

SEQ ID NO: 3017352 - DNA, 25 bp, Homo sapien
aagtcaatgaactcccactcgatgc

SEQ ID NO: 3017353 - DNA, 25 bp, Homo sapien
gccagagcacccaccgaattggtca

SEQ ID NO: 3017354 - DNA, 25 bp, Homo sapien
ccagagcacccaccgaattggtcac

SEQ ID NO: 3017355 - DNA, 25 bp, Homo sapien
cccatcaggtatccggctttgtcag

SEQ ID NO: 3017356 - DNA, 25 bp, Homo sapien
tctgcagaattcagtcccatcaggt

SEQ ID NO: 3017357 - DNA, 25 bp, Homo sapien
attgccaaccttcacccttggacag

SEQ ID NO: 3017358 - DNA, 25 bp, Homo sapien
gccctttagtgacatattcattgcc

SEQ ID NO: 3017359 - DNA, 25 bp, Homo sapien
ggcctcgcccgcacatgaacataga

SEQ ID NO: 3017360 - DNA, 25 bp, Homo sapien
tgaacatagatggacccaatcgcat

SEQ ID NO: 3017361 - DNA, 25 bp, Homo sapien
tagatggacccaatcgcatcccttt

SEQ ID NO: 3017362 - DNA, 25 bp, Homo sapien
gcccgcacatgaacatagatggacc

SEQ ID NO: 3017363 - DNA, 25 bp, Homo sapien
tcagtttgtagatcccgactttctc

SEQ ID NO: 3017364 - DNA, 25 bp, Homo sapien
tgcatcacggctcccgtcagtttgt

SEQ ID NO: 3017365 - DNA, 25 bp, Homo sapien
gctcccgtcagtttgtagatcccga

SEQ ID NO: 3017366 - DNA, 25 bp, Homo sapien
tagatcccgactttctcctctgagc

SEQ ID NO: 3017367 - DNA, 25 bp, Homo sapien
atctgtcgccagcagttcttcactg

SEQ ID NO: 3017368 - DNA, 25 bp, Homo sapien
tactggctaccgtgacctctccttg

SEQ ID NO: 3017369 - DNA, 25 bp, Homo sapien
tccttggctcacgaaggggaagtcg

SEQ ID NO: 3017370 - DNA, 25 bp, Homo sapien
ttcttcactgtcatcgatactggct

SEQ ID NO: 3017371 - DNA, 25 bp, Homo sapien
aacgtcactctggatttttctaaca

SEQ ID NO: 3017372 - DNA, 25 bp, Homo sapien
gaaaatatgatagcttctctcactg

SEQ ID NO: 3017373 - DNA, 25 bp, Homo sapien
tctctcactggataattgaaacgtc

SEQ ID NO: 3017374 - DNA, 25 bp, Homo sapien
tcttgtttgacataatttggtagaa

SEQ ID NO: 3017375 - DNA, 25 bp, Homo sapien
aagtttcgatgtctgccgatgccag

SEQ ID NO: 3017376 - DNA, 25 bp, Homo sapien
tttcgatgtctgccgatgccagctt

SEQ ID NO: 3017377 - DNA, 25 bp, Homo sapien
tcgatgtctgccgatgccagctttc

SEQ ID NO: 3017378 - DNA, 25 bp, Homo sapien
agtttcgatgtctgccgatgccagc

SEQ ID NO: 3017379 - DNA, 25 bp, Homo sapien
tccaaaatgaatccgaatgaacttc

SEQ ID NO: 3017380 - DNA, 25 bp, Homo sapien
gctccaaaatgaatccgaatgaact

SEQ ID NO: 3017381 - DNA, 25 bp, Homo sapien
tggctccaaaatgaatccgaatgaa

SEQ ID NO: 3017382 - DNA, 25 bp, Homo sapien
ggctccaaaatgaatccgaatgaac

SEQ ID NO: 3017383 - DNA, 25 bp, Homo sapien
aatgttacggttatttgatttatat

SEQ ID NO: 3017384 - DNA, 25 bp, Homo sapien
ctgtccaataacaggtggacaaatg

SEQ ID NO: 3017385 - DNA, 25 bp, Homo sapien
ttttgtggctggccttagataggtg

SEQ ID NO: 3017386 - DNA, 25 bp, Homo sapien
tatggttttgtggctggccttagat

SEQ ID NO: 3017387 - DNA, 25 bp, Homo sapien
cttccacaaggaagaggagtttatt

SEQ ID NO: 3017388 - DNA, 25 bp, Homo sapien
caaggaagaggagtttatttgggca

SEQ ID NO: 3017389 - DNA, 25 bp, Homo sapien
gtaacatgtgcccagatcttccaca

SEQ ID NO: 3017390 - DNA, 25 bp, Homo sapien
catgtaacatgtgcccagatcttcc

SEQ ID NO: 3017391 - DNA, 25 bp, Homo sapien
tatggggcagtttttcatatccagc

SEQ ID NO: 3017392 - DNA, 25 bp, Homo sapien
gcatttcaggagagggtatgctttt

SEQ ID NO: 3017393 - DNA, 25 bp, Homo sapien
aaggcccccatatattccagtttat

SEQ ID NO: 3017394 - DNA, 25 bp, Homo sapien
agagggtatgcttttgggaggatac

SEQ ID NO: 3017395 - DNA, 25 bp, Homo sapien
aatcttgaggagttgtcattcctca

SEQ ID NO: 3017396 - DNA, 25 bp, Homo sapien
aaatcttgaggagttgtcattcctc

SEQ ID NO: 3017397 - DNA, 25 bp, Homo sapien
atcttgaggagttgtcattcctcac

SEQ ID NO: 3017398 - DNA, 25 bp, Homo sapien
ggatgatctgatcctctagggttcc

SEQ ID NO: 3017399 - DNA, 25 bp, Homo sapien
gcctggatgatctgatcctctaggg

SEQ ID NO: 3017400 - DNA, 25 bp, Homo sapien
gcagtgggttggcctggatgatctg

SEQ ID NO: 3017401 - DNA, 25 bp, Homo sapien
aaggcctccagcagtgggttggcct

SEQ ID NO: 3017402 - DNA, 25 bp, Homo sapien
tgcaattgttgcaaaatactggatg

SEQ ID NO: 3017403 - DNA, 25 bp, Homo sapien
ttcttgtccccggtaactgcaattg

SEQ ID NO: 3017404 - DNA, 25 bp, Homo sapien
ttgtccccggtaactgcaattgttg

SEQ ID NO: 3017405 - DNA, 25 bp, Homo sapien
ctgcattttgcctggctgtgtctcc

SEQ ID NO: 3017406 - DNA, 25 bp, Homo sapien
gttcacagtcttcccagccccggat

SEQ ID NO: 3017407 - DNA, 25 bp, Homo sapien
cacagtcttcccagccccggattct

SEQ ID NO: 3017408 - DNA, 25 bp, Homo sapien
acgcttggtgttcacagtcttccca

SEQ ID NO: 3017409 - DNA, 25 bp, Homo sapien
tgttcacagtcttcccagccccgga

SEQ ID NO: 3017410 - DNA, 25 bp, Homo sapien
atgaggatagactggttgtctcgat

SEQ ID NO: 3017411 - DNA, 25 bp, Homo sapien
tgatgaggatagactggttgtctcg

SEQ ID NO: 3017412 - DNA, 25 bp, Homo sapien
gatgaggatagactggttgtctcga

SEQ ID NO: 3017413 - DNA, 25 bp, Homo sapien
gtgatgaggatagactggttgtctc

SEQ ID NO: 3017414 - DNA, 25 bp, Homo sapien
ggcctcctggcgctttttgcctctg

SEQ ID NO: 3017415 - DNA, 25 bp, Homo sapien
aactgataggcattgtcagagatgg

SEQ ID NO: 3017416 - DNA, 25 bp, Homo sapien
agcatgaactgataggcattgtcag

SEQ ID NO: 3017417 - DNA, 25 bp, Homo sapien
ggcgctttttgcctctgtaggcagc

SEQ ID NO: 3017418 - DNA, 25 bp, Homo sapien
cctggtcattgttcagagtgagcat

SEQ ID NO: 3017419 - DNA, 25 bp, Homo sapien
agcgctctttgaggttgtacagaac

SEQ ID NO: 3017420 - DNA, 25 bp, Homo sapien
acctggtcattgttcagagtgagca

SEQ ID NO: 3017421 - DNA, 25 bp, Homo sapien
tagcgctctttgaggttgtacagaa

SEQ ID NO: 3017422 - DNA, 25 bp, Homo sapien
aaagcaggtaataaattggtgagcc

SEQ ID NO: 3017423 - DNA, 25 bp, Homo sapien
gctgctttcctctaaagcaaacacc

SEQ ID NO: 3017424 - DNA, 25 bp, Homo sapien
gctttcctctaaagcaaacaccaca

SEQ ID NO: 3017425 - DNA, 25 bp, Homo sapien
ctgctgctttcctctaaagcaaaca

SEQ ID NO: 3017426 - DNA, 25 bp, Homo sapien
tcctctaaagcaaacaccacaaaac

SEQ ID NO: 3017427 - DNA, 25 bp, Homo sapien
cctagtctggatcatgcctttcaca

SEQ ID NO: 3017428 - DNA, 25 bp, Homo sapien
aaatggccatttctgcgtcagagct

SEQ ID NO: 3017429 - DNA, 25 bp, Homo sapien
cgaatggacgattttgagcctcgat

SEQ ID NO: 3017430 - DNA, 25 bp, Homo sapien
cttattatccgctacaaagcaggct

SEQ ID NO: 3017431 - DNA, 25 bp, Homo sapien
ctgggaagaccagagggactgctga

SEQ ID NO: 3017432 - DNA, 25 bp, Homo sapien
ccagagggactgctgagtcttgtgc

SEQ ID NO: 3017433 - DNA, 25 bp, Homo sapien
tgctgagtcttgtgcttgggtgact

SEQ ID NO: 3017434 - DNA, 25 bp, Homo sapien
aagctgcagggcccctacccttatt

SEQ ID NO: 3017435 - DNA, 25 bp, Homo sapien
tggttcccaagtgacagtcagtgtc

SEQ ID NO: 3017436 - DNA, 25 bp, Homo sapien
tctttgagacttagagagtcctagg

SEQ ID NO: 3017437 - DNA, 25 bp, Homo sapien
gacgttggacacagatctttgagac

SEQ ID NO: 3017438 - DNA, 25 bp, Homo sapien
tgcatagggattttgacgttggaca

SEQ ID NO: 3017439 - DNA, 25 bp, Homo sapien
ttggataaatgaccagtggaggctg

SEQ ID NO: 3017440 - DNA, 25 bp, Homo sapien
tttgggagccaagtcaatgtctcca

SEQ ID NO: 3017441 - DNA, 25 bp, Homo sapien
ttgggagccaagtcaatgtctccaa

SEQ ID NO: 3017442 - DNA, 25 bp, Homo sapien
tgggagccaagtcaatgtctccaat

SEQ ID NO: 3017443 - DNA, 25 bp, Homo sapien
tgcgatgacggttcctagggacacc

SEQ ID NO: 3017444 - DNA, 25 bp, Homo sapien
atctgcccacggctgattcttcagc

SEQ ID NO: 3017445 - DNA, 25 bp, Homo sapien
caccgatatgtggaacatgtgccca

SEQ ID NO: 3017446 - DNA, 25 bp, Homo sapien
gaaaatgtgaccgatggagtctgcg

SEQ ID NO: 3017447 - DNA, 25 bp, Homo sapien
tacacaattgagatatcagtctgca

SEQ ID NO: 3017448 - DNA, 25 bp, Homo sapien
aacacatacacaattgagatatcag

SEQ ID NO: 3017449 - DNA, 25 bp, Homo sapien
tgagatatcagtctgcaagcactgt

SEQ ID NO: 3017450 - DNA, 25 bp, Homo sapien
tctgcaagcactgttttgtattctg

SEQ ID NO: 3017451 - DNA, 25 bp, Homo sapien
acaggaaaataaacgtcataaagca

SEQ ID NO: 3017452 - DNA, 25 bp, Homo sapien
gcctcttgatagcatcaggcaggtg

SEQ ID NO: 3017453 - DNA, 25 bp, Homo sapien
cagcctcttgatagcatcaggcagg

SEQ ID NO: 3017454 - DNA, 25 bp, Homo sapien
aaataaacgtcataaagcaagtgac

SEQ ID NO: 3017455 - DNA, 25 bp, Homo sapien
tctcggctcttcactcgcaatttgt

SEQ ID NO: 3017456 - DNA, 25 bp, Homo sapien
tcggctcttcactcgcaatttgttg

SEQ ID NO: 3017457 - DNA, 25 bp, Homo sapien
ggctcttcactcgcaatttgttgac

SEQ ID NO: 3017458 - DNA, 25 bp, Homo sapien
ctctcggctcttcactcgcaatttg

SEQ ID NO: 3017459 - DNA, 25 bp, Homo sapien
cggaatttagatagattagcattgg

SEQ ID NO: 3017460 - DNA, 25 bp, Homo sapien
gtttgcggaatttagatagattagc

SEQ ID NO: 3017461 - DNA, 25 bp, Homo sapien
atttagatagattagcattggattg

SEQ ID NO: 3017462 - DNA, 25 bp, Homo sapien
gagtttgcggaatttagatagatta

SEQ ID NO: 3017463 - DNA, 25 bp, Homo sapien
acactagtggtgagtgaagaagtca

SEQ ID NO: 3017464 - DNA, 25 bp, Homo sapien
gatgggactagacagaaagtctcct

SEQ ID NO: 3017465 - DNA, 25 bp, Homo sapien
tgtagctatcaagtaagtgagctgt

SEQ ID NO: 3017466 - DNA, 25 bp, Homo sapien
tacctatcacatgtgtctggaagag

SEQ ID NO: 3017467 - DNA, 25 bp, Homo sapien
tgtaatttatctaccaagtcctgca

SEQ ID NO: 3017468 - DNA, 25 bp, Homo sapien
gaacattcttgcgatcttcttcagt

SEQ ID NO: 3017469 - DNA, 25 bp, Homo sapien
gtatgatttcaccttcgcctgtaat

SEQ ID NO: 3017470 - DNA, 25 bp, Homo sapien
cagcctgagaacattcttgcgatct

SEQ ID NO: 3017471 - DNA, 25 bp, Homo sapien
taacagcctctgcattacgtttctg

SEQ ID NO: 3017472 - DNA, 25 bp, Homo sapien
tcgtcgctcatgtttccgtaaacct

SEQ ID NO: 3017473 - DNA, 25 bp, Homo sapien
taggtgagttcttttactcgtcgct

SEQ ID NO: 3017474 - DNA, 25 bp, Homo sapien
ctttaacagcctctgcattacgttt

SEQ ID NO: 3017475 - DNA, 25 bp, Homo sapien
gctcggcctcatctagacgatgctg

SEQ ID NO: 3017476 - DNA, 25 bp, Homo sapien
tcggcctcatctagacgatgctgca

SEQ ID NO: 3017477 - DNA, 25 bp, Homo sapien
gctgctcggcctcatctagacgatg

SEQ ID NO: 3017478 - DNA, 25 bp, Homo sapien
cagctgctcggcctcatctagacga

SEQ ID NO: 3017479 - DNA, 25 bp, Homo sapien
tctcttctgcattgcgtgattcttg

SEQ ID NO: 3017480 - DNA, 25 bp, Homo sapien
gattcttggattacttcttccactt

SEQ ID NO: 3017481 - DNA, 25 bp, Homo sapien
tcactttggagttgggaaacgtcat

SEQ ID NO: 3017482 - DNA, 25 bp, Homo sapien
tggagttgggaaacgtcattttcta

SEQ ID NO: 3017483 - DNA, 25 bp, Homo sapien
agcatttgtttgatgtgagggtctc

SEQ ID NO: 3017484 - DNA, 25 bp, Homo sapien
catttgtttgatgtgagggtctcac

SEQ ID NO: 3017485 - DNA, 25 bp, Homo sapien
gcatttgtttgatgtgagggtctca

SEQ ID NO: 3017486 - DNA, 25 bp, Homo sapien
atccaggagctcctgttcggcgatt

SEQ ID NO: 3017487 - DNA, 25 bp, Homo sapien
tccaggagctcctgttcggcgattt

SEQ ID NO: 3017488 - DNA, 25 bp, Homo sapien
tgggaggcgaatgtggacccgttta

SEQ ID NO: 3017489 - DNA, 25 bp, Homo sapien
ggaagacaggtactttccctgcttc

SEQ ID NO: 3017490 - DNA, 25 bp, Homo sapien
tccctgcttcatctgggaggcgaat

SEQ ID NO: 3017491 - DNA, 25 bp, Homo sapien
tgtttgggaaatggaagacaggtac

SEQ ID NO: 3017492 - DNA, 25 bp, Homo sapien
tctaatctctgcatccagcgtgctc

SEQ ID NO: 3017493 - DNA, 25 bp, Homo sapien
tgtagttccttaaactctctgcagc

SEQ ID NO: 3017494 - DNA, 25 bp, Homo sapien
gcattgtctccacgactctagtgtg

SEQ ID NO: 3017495 - DNA, 25 bp, Homo sapien
gcagctaagcgattggcatggttca

SEQ ID NO: 3017496 - DNA, 25 bp, Homo sapien
aagaacctgagtatttggagtatat

SEQ ID NO: 3017497 - DNA, 25 bp, Homo sapien
tattccctcgtgagccaaactcttg

SEQ ID NO: 3017498 - DNA, 25 bp, Homo sapien
ctcgtgagccaaactcttgtcaata

SEQ ID NO: 3017499 - DNA, 25 bp, Homo sapien
tatttggagtatattccctcgtgag

SEQ ID NO: 3017500 - DNA, 25 bp, Homo sapien
taacataatacaaggtaatatgtac

SEQ ID NO: 3017501 - DNA, 25 bp, Homo sapien
tgtttttccataacataatacaagg

SEQ ID NO: 3017502 - DNA, 25 bp, Homo sapien
ttttccataacataatacaaggtaa

SEQ ID NO: 3017503 - DNA, 25 bp, Homo sapien
ccataacataatacaaggtaatatg

SEQ ID NO: 3017504 - DNA, 25 bp, Homo sapien
catttctcttgttctacttgcttct

SEQ ID NO: 3017505 - DNA, 25 bp, Homo sapien
ctctaaagcagcctgaatttcacat

SEQ ID NO: 3017506 - DNA, 25 bp, Homo sapien
tccctctgcaatctgctcagtgagg

SEQ ID NO: 3017507 - DNA, 25 bp, Homo sapien
ccaattcatgaatttgctttcctcc

SEQ ID NO: 3017508 - DNA, 25 bp, Homo sapien
cgtttcgagttgatccagggattcc

SEQ ID NO: 3017509 - DNA, 25 bp, Homo sapien
tttctcttcttagcgtttcgagttg

SEQ ID NO: 3017510 - DNA, 25 bp, Homo sapien
ttcaccttgaacagctcagtgctaa

SEQ ID NO: 3017511 - DNA, 25 bp, Homo sapien
tcttcttagcgtttcgagttgatcc

SEQ ID NO: 3017512 - DNA, 25 bp, Homo sapien
tgcttcttatcaagggctgcacagg

SEQ ID NO: 3017513 - DNA, 25 bp, Homo sapien
ttatcaagggctgcacaggctgcat

SEQ ID NO: 3017514 - DNA, 25 bp, Homo sapien
cagcttctacatgttcctcagcttc

SEQ ID NO: 3017515 - DNA, 25 bp, Homo sapien
cacaggctgcattagacctttccac

SEQ ID NO: 3017516 - DNA, 25 bp, Homo sapien
ctccactgggcaacctcactgttgg

SEQ ID NO: 3017517 - DNA, 25 bp, Homo sapien
tccgtctcgtatttggttctccact

SEQ ID NO: 3017518 - DNA, 25 bp, Homo sapien
tctcgtatttggttctccactgggc

SEQ ID NO: 3017519 - DNA, 25 bp, Homo sapien
cactgggcaacctcactgttggcct

SEQ ID NO: 3017520 - DNA, 25 bp, Homo sapien
tcatctaattgtcgagaatattcac

SEQ ID NO: 3017521 - DNA, 25 bp, Homo sapien
gctgagtagatgcttgcttgctcct

SEQ ID NO: 3017522 - DNA, 25 bp, Homo sapien
ctctagttgatgtttcagctcttca

SEQ ID NO: 3017523 - DNA, 25 bp, Homo sapien
ctccttgaaagctgagagactaaag

SEQ ID NO: 3017524 - DNA, 25 bp, Homo sapien
ccgcttctgtctgcaggcgcgctct

SEQ ID NO: 3017525 - DNA, 25 bp, Homo sapien
cttccttggtcttaagctcactcac

SEQ ID NO: 3017526 - DNA, 25 bp, Homo sapien
ggtcttaagctcactcacttgatct

SEQ ID NO: 3017527 - DNA, 25 bp, Homo sapien
ttaagctcactcacttgatcttcta

SEQ ID NO: 3017528 - DNA, 25 bp, Homo sapien
gccaccatagcttcatgctgcaggg

SEQ ID NO: 3017529 - DNA, 25 bp, Homo sapien
aattccacctgagcagaagttgccc

SEQ ID NO: 3017530 - DNA, 25 bp, Homo sapien
ttcttccgaagagcagccaccatag

SEQ ID NO: 3017531 - DNA, 25 bp, Homo sapien
aatggcctctgcgttactgctgagg

SEQ ID NO: 3017532 - DNA, 25 bp, Homo sapien
ttctacagcttgctcatcttcaatt

SEQ ID NO: 3017533 - DNA, 25 bp, Homo sapien
tcttctgtagttgaatttctacagc

SEQ ID NO: 3017534 - DNA, 25 bp, Homo sapien
tgaatttctacagcttgctcatctt

SEQ ID NO: 3017535 - DNA, 25 bp, Homo sapien
ctttctagatccattcgaagcttct

SEQ ID NO: 3017536 - DNA, 25 bp, Homo sapien
tctagatccattcgaagcttctttt

SEQ ID NO: 3017537 - DNA, 25 bp, Homo sapien
tagatccattcgaagcttcttttct

SEQ ID NO: 3017538 - DNA, 25 bp, Homo sapien
agcttttcatcaagttgctgtttgt

SEQ ID NO: 3017539 - DNA, 25 bp, Homo sapien
tcatccacttgctgttctagcttgg

SEQ ID NO: 3017540 - DNA, 25 bp, Homo sapien
gttttgcaatggtttcatccaggcc

SEQ ID NO: 3017541 - DNA, 25 bp, Homo sapien
gggtctcttggagagccttcttctc

SEQ ID NO: 3017542 - DNA, 25 bp, Homo sapien
gcttggttttagctttggtcaggat

SEQ ID NO: 3017543 - DNA, 25 bp, Homo sapien
gtttttaatcagttgctcacacctt

SEQ ID NO: 3017544 - DNA, 25 bp, Homo sapien
tgtttttaatcagttgctcacacct

SEQ ID NO: 3017545 - DNA, 25 bp, Homo sapien
ttttaatcagttgctcacacctttc

SEQ ID NO: 3017546 - DNA, 25 bp, Homo sapien
ttgtttttaatcagttgctcacacc

SEQ ID NO: 3017547 - DNA, 25 bp, Homo sapien
ttggctttaagctacttccttcatg

SEQ ID NO: 3017548 - DNA, 25 bp, Homo sapien
caaaggggtaaaatatttgactgag

SEQ ID NO: 3017549 - DNA, 25 bp, Homo sapien
tgggctaaagtagcccaggcaaagg

SEQ ID NO: 3017550 - DNA, 25 bp, Homo sapien
tgactgagacttgggggattggctt

SEQ ID NO: 3017551 - DNA, 25 bp, Homo sapien
tccccatagaatactaaaagataaa

SEQ ID NO: 3017552 - DNA, 25 bp, Homo sapien
tcaagtagagatcatttgtaaatcc

SEQ ID NO: 3017553 - DNA, 25 bp, Homo sapien
gcttcagtaacatggtgcattcaga

SEQ ID NO: 3017554 - DNA, 25 bp, Homo sapien
tgcattcagaatatggagtactcac

SEQ ID NO: 3017555 - DNA, 25 bp, Homo sapien
gacattatactggatgcagaaaagt

SEQ ID NO: 3017556 - DNA, 25 bp, Homo sapien
tttcctctagctccttccgttttgc

SEQ ID NO: 3017557 - DNA, 25 bp, Homo sapien
catgaaggcacggacattatactgg

SEQ ID NO: 3017558 - DNA, 25 bp, Homo sapien
gacgttcatgaaggcacggacatta

SEQ ID NO: 3017559 - DNA, 25 bp, Homo sapien
taccctcattaggaatcccctacag

SEQ ID NO: 3017560 - DNA, 25 bp, Homo sapien
ctcattaggaatcccctacagacag

SEQ ID NO: 3017561 - DNA, 25 bp, Homo sapien
tattctaccctcattaggaatcccc

SEQ ID NO: 3017562 - DNA, 25 bp, Homo sapien
tcttctgatattctaccctcattag

SEQ ID NO: 3017563 - DNA, 25 bp, Homo sapien
tggagaaagagagagtcacaaatca

SEQ ID NO: 3017564 - DNA, 25 bp, Homo sapien
ctggagaaagagagagtcacaaatc

SEQ ID NO: 3017565 - DNA, 25 bp, Homo sapien
ggagaaagagagagtcacaaatcat

SEQ ID NO: 3017566 - DNA, 25 bp, Homo sapien
cttggatcaggtgtaaataaataac

SEQ ID NO: 3017567 - DNA, 25 bp, Homo sapien
atggcagaaggtacttggatcaggt

SEQ ID NO: 3017568 - DNA, 25 bp, Homo sapien
cagaaggtacttggatcaggtgtaa

SEQ ID NO: 3017569 - DNA, 25 bp, Homo sapien
caggtgtaaataaataacgatatac

SEQ ID NO: 3017570 - DNA, 25 bp, Homo sapien
tccaaatttatattgagtatgatca

SEQ ID NO: 3017571 - DNA, 25 bp, Homo sapien
tggaatagcacttgcatttaaaacc

SEQ ID NO: 3017572 - DNA, 25 bp, Homo sapien
gagtatgatcaatatcaatagatgc

SEQ ID NO: 3017573 - DNA, 25 bp, Homo sapien
caatagatgcaagaagtttctcaga

SEQ ID NO: 3017574 - DNA, 25 bp, Homo sapien
ctttgtttgaaatcaccatataaga

SEQ ID NO: 3017575 - DNA, 25 bp, Homo sapien
caccatataagattctgcttgggaa

SEQ ID NO: 3017576 - DNA, 25 bp, Homo sapien
acctcagctggtgcaacacaagttc

SEQ ID NO: 3017577 - DNA, 25 bp, Homo sapien
cagctggtgcaacacaagttcatgt

SEQ ID NO: 3017578 - DNA, 25 bp, Homo sapien
gtgctcctcagattcgtcatcaatt

SEQ ID NO: 3017579 - DNA, 25 bp, Homo sapien
tgatacaccgtacgaagtgagggtg

SEQ ID NO: 3017580 - DNA, 25 bp, Homo sapien
aagtgagggtgtgtgctcctcagat

SEQ ID NO: 3017581 - DNA, 25 bp, Homo sapien
gttttggtttcattgggaatgatac

SEQ ID NO: 3017582 - DNA, 25 bp, Homo sapien
tcttagcacctttcttcgcgctgct

SEQ ID NO: 3017583 - DNA, 25 bp, Homo sapien
tttcttagcacctttcttcgcgctg

SEQ ID NO: 3017584 - DNA, 25 bp, Homo sapien
ttagcacctttcttcgcgctgctat

SEQ ID NO: 3017585 - DNA, 25 bp, Homo sapien
ttcttagcacctttcttcgcgctgc

SEQ ID NO: 3017586 - DNA, 25 bp, Homo sapien
ttaatttagattaaggacacagaaa

SEQ ID NO: 3017587 - DNA, 25 bp, Homo sapien
ctgcttcagcactagcatacgtgga

SEQ ID NO: 3017588 - DNA, 25 bp, Homo sapien
gcttcagcactagcatacgtggaaa

SEQ ID NO: 3017589 - DNA, 25 bp, Homo sapien
cttcagcactagcatacgtggaaaa

SEQ ID NO: 3017590 - DNA, 25 bp, Homo sapien
ggaaaagagactggctagagtcttc

SEQ ID NO: 3017591 - DNA, 25 bp, Homo sapien
aaactgttgcagtttctcgttggtg

SEQ ID NO: 3017592 - DNA, 25 bp, Homo sapien
cgtagacggctttggccagagcacc

SEQ ID NO: 3017593 - DNA, 25 bp, Homo sapien
ccgatgaagtactgcctgggctgct

SEQ ID NO: 3017594 - DNA, 25 bp, Homo sapien
acaggaacatcttctcgtagacggc

SEQ ID NO: 3017595 - DNA, 25 bp, Homo sapien
cagcaatgtccaagaccccgatgaa

SEQ ID NO: 3017596 - DNA, 25 bp, Homo sapien
tcacagatagagtaatgtttgttgg

SEQ ID NO: 3017597 - DNA, 25 bp, Homo sapien
cagatagagtaatgtttgttggtat

SEQ ID NO: 3017598 - DNA, 25 bp, Homo sapien
gatagagtaatgtttgttggtattg

SEQ ID NO: 3017599 - DNA, 25 bp, Homo sapien
attgttaaagacatgccatgaaggc

SEQ ID NO: 3017600 - DNA, 25 bp, Homo sapien
accttgaccctagggtagcagaggg

SEQ ID NO: 3017601 - DNA, 25 bp, Homo sapien
tggcctttggtgacatactcattgc

SEQ ID NO: 3017602 - DNA, 25 bp, Homo sapien
tgaccctagggtagcagagggcttt

SEQ ID NO: 3017603 - DNA, 25 bp, Homo sapien
accctagggtagcagagggctttga

SEQ ID NO: 3017604 - DNA, 25 bp, Homo sapien
gagacacagttcaggacatgttgtt

SEQ ID NO: 3017605 - DNA, 25 bp, Homo sapien
tgaagcccaggatgtcaatggcact

SEQ ID NO: 3017606 - DNA, 25 bp, Homo sapien
ccctgactgacgaaggcatagtcat

SEQ ID NO: 3017607 - DNA, 25 bp, Homo sapien
ctgactgacgaaggcatagtcatat

SEQ ID NO: 3017608 - DNA, 25 bp, Homo sapien
cctgactgacgaaggcatagtcata

SEQ ID NO: 3017609 - DNA, 25 bp, Homo sapien
cccctgactgacgaaggcatagtca

SEQ ID NO: 3017610 - DNA, 25 bp, Homo sapien
tgatctgataaaaaatatggtagct

SEQ ID NO: 3017611 - DNA, 25 bp, Homo sapien
agtgatctgataaaaaatatggtag

SEQ ID NO: 3017612 - DNA, 25 bp, Homo sapien
atctgataaaaaatatggtagcttc

SEQ ID NO: 3017613 - DNA, 25 bp, Homo sapien
aagtgatctgataaaaaatatggta

SEQ ID NO: 3017614 - DNA, 25 bp, Homo sapien
gcttccctgtagtaccaaagtggat

SEQ ID NO: 3017615 - DNA, 25 bp, Homo sapien
tgtagtaccaaagtggattctaatg

SEQ ID NO: 3017616 - DNA, 25 bp, Homo sapien
tgccagcttccctgtagtaccaaag

SEQ ID NO: 3017617 - DNA, 25 bp, Homo sapien
cagatgccagcttccctgtagtacc

SEQ ID NO: 3017618 - DNA, 25 bp, Homo sapien
ttaggggttgagaccaagagactca

SEQ ID NO: 3017619 - DNA, 25 bp, Homo sapien
gttaggggttgagaccaagagactc

SEQ ID NO: 3017620 - DNA, 25 bp, Homo sapien
taggggttgagaccaagagactcac

SEQ ID NO: 3017621 - DNA, 25 bp, Homo sapien
agttaggggttgagaccaagagact

SEQ ID NO: 3017622 - DNA, 25 bp, Homo sapien
aaaggcctccagtaggggattggcg

SEQ ID NO: 3017623 - DNA, 25 bp, Homo sapien
cctcacagttttggcattgccaaag

SEQ ID NO: 3017624 - DNA, 25 bp, Homo sapien
gcgagaggagttgtcattcctcaca

SEQ ID NO: 3017625 - DNA, 25 bp, Homo sapien
ggattggcgctgatgatttgatctt

SEQ ID NO: 3017626 - DNA, 25 bp, Homo sapien
atgacacgcttggtgttcacagtct

SEQ ID NO: 3017627 - DNA, 25 bp, Homo sapien
tgacacgcttggtgttcacagtctt

SEQ ID NO: 3017628 - DNA, 25 bp, Homo sapien
tgatcaggatggactgattctctcg

SEQ ID NO: 3017629 - DNA, 25 bp, Homo sapien
gatcaggatggactgattctctcga

SEQ ID NO: 3017630 - DNA, 25 bp, Homo sapien
gtgatcaggatggactgattctctc

SEQ ID NO: 3017631 - DNA, 25 bp, Homo sapien
atcaggatggactgattctctcgat

SEQ ID NO: 3017632 - DNA, 25 bp, Homo sapien
taagtaaccttgaatttggagcagc

SEQ ID NO: 3017633 - DNA, 25 bp, Homo sapien
tcatgtttgggagccataagtaacc

SEQ ID NO: 3017634 - DNA, 25 bp, Homo sapien
tcagggaagtcgatgcagattttgc

SEQ ID NO: 3017635 - DNA, 25 bp, Homo sapien
cctctgaaatgagccagcgtttgga

SEQ ID NO: 3017636 - DNA, 25 bp, Homo sapien
caaagctggttgtttatgccttgat

SEQ ID NO: 3017637 - DNA, 25 bp, Homo sapien
gaattgatggccaatttgtaatggg

SEQ ID NO: 3017638 - DNA, 25 bp, Homo sapien
ggcctataatgcgtatcaaagctgg

SEQ ID NO: 3017639 - DNA, 25 bp, Homo sapien
gttttaatgctgtatttgggcctat

SEQ ID NO: 3017640 - DNA, 25 bp, Homo sapien
cagctgtggctgataactcttttcg

SEQ ID NO: 3017641 - DNA, 25 bp, Homo sapien
tagtaattgtttcagctaggcttcc

SEQ ID NO: 3017642 - DNA, 25 bp, Homo sapien
ctatctgtgttagcttgggaaggac

SEQ ID NO: 3017643 - DNA, 25 bp, Homo sapien
cccttaaaggctggcaatattagct

SEQ ID NO: 3017644 - DNA, 25 bp, Homo sapien
ggcctcctggcgctttttgcctctg

SEQ ID NO: 3017645 - DNA, 25 bp, Homo sapien
gcgctttttgcctctgtaggcagcc

SEQ ID NO: 3017646 - DNA, 25 bp, Homo sapien
gcggggcctcctggcgctttttgcc

SEQ ID NO: 3017647 - DNA, 25 bp, Homo sapien
tcctggcgctttttgcctctgtagg

SEQ ID NO: 3017648 - DNA, 25 bp, Homo sapien
tttgtcatatttcggagggttcata

SEQ ID NO: 3017649 - DNA, 25 bp, Homo sapien
tgtctcaacactgactagaagggtg

SEQ ID NO: 3017650 - DNA, 25 bp, Homo sapien
aatggtgaaggccatacatagtggg

SEQ ID NO: 3017651 - DNA, 25 bp, Homo sapien
gcaacaggcttggagattcccagta

SEQ ID NO: 3017652 - DNA, 25 bp, Homo sapien
caagtttggacattcagactaggaa

SEQ ID NO: 3017653 - DNA, 25 bp, Homo sapien
gatgttttagcatcaaacggcttgt

SEQ ID NO: 3017654 - DNA, 25 bp, Homo sapien
tctgattttcgaaggtagggagcag

SEQ ID NO: 3017655 - DNA, 25 bp, Homo sapien
tttctgattttcgaaggtagggagc

SEQ ID NO: 3017656 - DNA, 25 bp, Homo sapien
acggcttgttttgggcctcaatccg

SEQ ID NO: 3017657 - DNA, 25 bp, Homo sapien
tgcgatttatttagcaaaggattct

SEQ ID NO: 3017658 - DNA, 25 bp, Homo sapien
gcgatttatttagcaaaggattctg

SEQ ID NO: 3017659 - DNA, 25 bp, Homo sapien
ctgcgatttatttagcaaaggattc

SEQ ID NO: 3017660 - DNA, 25 bp, Homo sapien
cgatttatttagcaaaggattctgc

SEQ ID NO: 3017661 - DNA, 25 bp, Homo sapien
gataaaaatgcaggttcagaagtgt

SEQ ID NO: 3017662 - DNA, 25 bp, Homo sapien
ataaaaatgcaggttcagaagtgtt

SEQ ID NO: 3017663 - DNA, 25 bp, Homo sapien
agataaaaatgcaggttcagaagtg

SEQ ID NO: 3017664 - DNA, 25 bp, Homo sapien
catttaaatctgttgtctaccttga

SEQ ID NO: 3017665 - DNA, 25 bp, Homo sapien
tccatacagatgtctaattgatcca

SEQ ID NO: 3017666 - DNA, 25 bp, Homo sapien
taagaaattttgcacgagattacaa

SEQ ID NO: 3017667 - DNA, 25 bp, Homo sapien
cattagcaacttagtaaaaagtcca

SEQ ID NO: 3017668 - DNA, 25 bp, Homo sapien
agaacttcacatttcgtgcatttct

SEQ ID NO: 3017669 - DNA, 25 bp, Homo sapien
ttccttgatatacaggacagtgaca

SEQ ID NO: 3017670 - DNA, 25 bp, Homo sapien
ccttgatatacaggacagtgacaaa

SEQ ID NO: 3017671 - DNA, 25 bp, Homo sapien
ttgatatacaggacagtgacaaaga

SEQ ID NO: 3017672 - DNA, 25 bp, Homo sapien
tcttcacttatgacttttgtgtgaa

SEQ ID NO: 3017673 - DNA, 25 bp, Homo sapien
ttactcttcacttatgacttttgtg

SEQ ID NO: 3017674 - DNA, 25 bp, Homo sapien
actcttcacttatgacttttgtgtg

SEQ ID NO: 3017675 - DNA, 25 bp, Homo sapien
cttcacttatgacttttgtgtgaac

SEQ ID NO: 3017676 - DNA, 25 bp, Homo sapien
actcagcaatgtcagcccgttcctt

SEQ ID NO: 3017677 - DNA, 25 bp, Homo sapien
cgtgctggagcttgcggaacttggc

SEQ ID NO: 3017678 - DNA, 25 bp, Homo sapien
tggcaaggttgacattggattgttc

SEQ ID NO: 3017679 - DNA, 25 bp, Homo sapien
tcagcaatgtcagcccgttccttgg

SEQ ID NO: 3017680 - DNA, 25 bp, Homo sapien
ggacatttcctgattgttattgctt

SEQ ID NO: 3017681 - DNA, 25 bp, Homo sapien
gatgcatttgagataacaagaaaat

SEQ ID NO: 3017682 - DNA, 25 bp, Homo sapien
aattggacatttcctgattgttatt

SEQ ID NO: 3017683 - DNA, 25 bp, Homo sapien
cagagatgcatttgagataacaaga

SEQ ID NO: 3017684 - DNA, 25 bp, Homo sapien
tcatttccactgtggagatactcac

SEQ ID NO: 3017685 - DNA, 25 bp, Homo sapien
ctttcatttccactgtggagatact

SEQ ID NO: 3017686 - DNA, 25 bp, Homo sapien
ttcatttccactgtggagatactca

SEQ ID NO: 3017687 - DNA, 25 bp, Homo sapien
tttcatttccactgtggagatactc

SEQ ID NO: 3017688 - DNA, 25 bp, Homo sapien
gagaatattcttgcggtcctcctca

SEQ ID NO: 3017689 - DNA, 25 bp, Homo sapien
cagcttgtctcttgtaagctttgac

SEQ ID NO: 3017690 - DNA, 25 bp, Homo sapien
gtttgcaatttgtccaccaagtcct

SEQ ID NO: 3017691 - DNA, 25 bp, Homo sapien
actttggtttgcaatttgtccacca

SEQ ID NO: 3017692 - DNA, 25 bp, Homo sapien
tgacagcctcaacattgtgcttctg

SEQ ID NO: 3017693 - DNA, 25 bp, Homo sapien
tggtaagtgagttccttcactcttc

SEQ ID NO: 3017694 - DNA, 25 bp, Homo sapien
gtgcttctgttcactttccacctca

SEQ ID NO: 3017695 - DNA, 25 bp, Homo sapien
tgtttgcgaagacccttgacagcct

SEQ ID NO: 3017696 - DNA, 25 bp, Homo sapien
acaaagacgtttaccagtttggctg

SEQ ID NO: 3017697 - DNA, 25 bp, Homo sapien
caaagacgtttaccagtttggctgt

SEQ ID NO: 3017698 - DNA, 25 bp, Homo sapien
agtttctggatctgcttcttcccac

SEQ ID NO: 3017699 - DNA, 25 bp, Homo sapien
tggcctccagtttctggatctgctt

SEQ ID NO: 3017700 - DNA, 25 bp, Homo sapien
gcctccagtttctggatctgcttct

SEQ ID NO: 3017701 - DNA, 25 bp, Homo sapien
cctggcctccagtttctggatctgc

SEQ ID NO: 3017702 - DNA, 25 bp, Homo sapien
agctgcagatccttcacggtctgct

SEQ ID NO: 3017703 - DNA, 25 bp, Homo sapien
gcctcatccagacggagctgcagat

SEQ ID NO: 3017704 - DNA, 25 bp, Homo sapien
gatccttcacggtctgctccatgtt

SEQ ID NO: 3017705 - DNA, 25 bp, Homo sapien
agcctcatccagacggagctgcaga

SEQ ID NO: 3017706 - DNA, 25 bp, Homo sapien
ctctccctggatttgggaaatgtct

SEQ ID NO: 3017707 - DNA, 25 bp, Homo sapien
tctccctggatttgggaaatgtctg

SEQ ID NO: 3017708 - DNA, 25 bp, Homo sapien
cagaagttgcacacgttcactggca

SEQ ID NO: 3017709 - DNA, 25 bp, Homo sapien
tggcatcatccaaatgtagctgagt

SEQ ID NO: 3017710 - DNA, 25 bp, Homo sapien
tctctcagtccgttccagggatgcc

SEQ ID NO: 3017711 - DNA, 25 bp, Homo sapien
gcatcaggttagctctgcgctcaac

SEQ ID NO: 3017712 - DNA, 25 bp, Homo sapien
cagtgtactctgcattgactccaca

SEQ ID NO: 3017713 - DNA, 25 bp, Homo sapien
caagttgaatgcgaagaattttgcc

SEQ ID NO: 3017714 - DNA, 25 bp, Homo sapien
tcagcaatttttcggtcaatctcag

SEQ ID NO: 3017715 - DNA, 25 bp, Homo sapien
taagattccttagtgcctcagcagc

SEQ ID NO: 3017716 - DNA, 25 bp, Homo sapien
tcatggatatgctttccaccctctg

SEQ ID NO: 3017717 - DNA, 25 bp, Homo sapien
tttccaccctctgcaatttgctctg

SEQ ID NO: 3017718 - DNA, 25 bp, Homo sapien
gggaagtctgtagttcactcttctc

SEQ ID NO: 3017719 - DNA, 25 bp, Homo sapien
gcttcctctagggaagtctgtagtt

SEQ ID NO: 3017720 - DNA, 25 bp, Homo sapien
agtagaaagaaaaattgaaaagatg

SEQ ID NO: 3017721 - DNA, 25 bp, Homo sapien
gaaagaaaaattgaaaagatgtctc

SEQ ID NO: 3017722 - DNA, 25 bp, Homo sapien
tcagttaagtagaaagaaaaattga

SEQ ID NO: 3017723 - DNA, 25 bp, Homo sapien
tgtaataataaagtaccaaatttca

SEQ ID NO: 3017724 - DNA, 25 bp, Homo sapien
gtaagttcttattctctcgctttag

SEQ ID NO: 3017725 - DNA, 25 bp, Homo sapien
tctctcgctttagagtttcaagatg

SEQ ID NO: 3017726 - DNA, 25 bp, Homo sapien
tagagtttcaagatgatccagggat

SEQ ID NO: 3017727 - DNA, 25 bp, Homo sapien
aagttcttattctctcgctttagag

SEQ ID NO: 3017728 - DNA, 25 bp, Homo sapien
taagcctttgaaaccaagaatgatg

SEQ ID NO: 3017729 - DNA, 25 bp, Homo sapien
aataagcctttgaaaccaagaatga

SEQ ID NO: 3017730 - DNA, 25 bp, Homo sapien
aaataagcctttgaaaccaagaatg

SEQ ID NO: 3017731 - DNA, 25 bp, Homo sapien
agcctttgaaaccaagaatgatgtc

SEQ ID NO: 3017732 - DNA, 25 bp, Homo sapien
tcttatcgagagctatgcaggcagc

SEQ ID NO: 3017733 - DNA, 25 bp, Homo sapien
acatcaatcatgaggtcctctactt

SEQ ID NO: 3017734 - DNA, 25 bp, Homo sapien
tgcatcctgcagacgctgggctagc

SEQ ID NO: 3017735 - DNA, 25 bp, Homo sapien
ggcagcattagatcgttccacatca

SEQ ID NO: 3017736 - DNA, 25 bp, Homo sapien
ctgaaaattgggtcagtatgagtga

SEQ ID NO: 3017737 - DNA, 25 bp, Homo sapien
tcagtatgagtgaccaagagcagac

SEQ ID NO: 3017738 - DNA, 25 bp, Homo sapien
tgggtcagtatgagtgaccaagagc

SEQ ID NO: 3017739 - DNA, 25 bp, Homo sapien
gagtcaccacagtgccctttataaa

SEQ ID NO: 3017740 - DNA, 25 bp, Homo sapien
ctgtgcgctggatggcgtccgtctc

SEQ ID NO: 3017741 - DNA, 25 bp, Homo sapien
atactgttcccgcagcaggtcacag

SEQ ID NO: 3017742 - DNA, 25 bp, Homo sapien
ctccactgggcaacctcactgttgg

SEQ ID NO: 3017743 - DNA, 25 bp, Homo sapien
cactgggcaacctcactgttggcct

SEQ ID NO: 3017744 - DNA, 25 bp, Homo sapien
cagggcatgggccagagtgctcttg

SEQ ID NO: 3017745 - DNA, 25 bp, Homo sapien
tgcagggcatgggccagagtgctct

SEQ ID NO: 3017746 - DNA, 25 bp, Homo sapien
gggcatgggccagagtgctcttggc

SEQ ID NO: 3017747 - DNA, 25 bp, Homo sapien
ctgcagggcatgggccagagtgctc

SEQ ID NO: 3017748 - DNA, 25 bp, Homo sapien
gcttgtttgcctcgggatagctgag

SEQ ID NO: 3017749 - DNA, 25 bp, Homo sapien
ttgcctcgggatagctgagaaacca

SEQ ID NO: 3017750 - DNA, 25 bp, Homo sapien
gatagctgagaaaccatagcatctt

SEQ ID NO: 3017751 - DNA, 25 bp, Homo sapien
tgtgtaaatgcttgtttgcctcggg

SEQ ID NO: 3017752 - DNA, 25 bp, Homo sapien
gccttctgggctgacaactcattta

SEQ ID NO: 3017753 - DNA, 25 bp, Homo sapien
catttattaagcgttgttgctcttc

SEQ ID NO: 3017754 - DNA, 25 bp, Homo sapien
tctgtgtgtaaacgtgccttctggg

SEQ ID NO: 3017755 - DNA, 25 bp, Homo sapien
ttatttcactaagctggtcctctag

SEQ ID NO: 3017756 - DNA, 25 bp, Homo sapien
cttggctttggagacagtctccatg

SEQ ID NO: 3017757 - DNA, 25 bp, Homo sapien
ggctttggagacagtctccatgtta

SEQ ID NO: 3017758 - DNA, 25 bp, Homo sapien
gctttggagacagtctccatgttac

SEQ ID NO: 3017759 - DNA, 25 bp, Homo sapien
ttggctttggagacagtctccatgt

SEQ ID NO: 3017760 - DNA, 25 bp, Homo sapien
agcagctgccgtggcttcgtgctgc

SEQ ID NO: 3017761 - DNA, 25 bp, Homo sapien
tgcgtgcttcttccgaagagcagct

SEQ ID NO: 3017762 - DNA, 25 bp, Homo sapien
agagcagctgccgtggcttcgtgct

SEQ ID NO: 3017763 - DNA, 25 bp, Homo sapien
gaagagcagctgccgtggcttcgtg

SEQ ID NO: 3017764 - DNA, 25 bp, Homo sapien
ctgggctgaagtggccccaccggct

SEQ ID NO: 3017765 - DNA, 25 bp, Homo sapien
gaggtcagagcgctgcttctctgct

SEQ ID NO: 3017766 - DNA, 25 bp, Homo sapien
cgctgcttctctgctttggcccggg

SEQ ID NO: 3017767 - DNA, 25 bp, Homo sapien
cgggaggcccgctctgcctcgattt

SEQ ID NO: 3017768 - DNA, 25 bp, Homo sapien
cttttgtagctgtattgcaagggct

SEQ ID NO: 3017769 - DNA, 25 bp, Homo sapien
tttgtagctgtattgcaagggcttg

SEQ ID NO: 3017770 - DNA, 25 bp, Homo sapien
tcttttgtagctgtattgcaagggc

SEQ ID NO: 3017771 - DNA, 25 bp, Homo sapien
tgtagctgtattgcaagggcttgtt

SEQ ID NO: 3017772 - DNA, 25 bp, Homo sapien
atccattgtggattcttgggccaat

SEQ ID NO: 3017773 - DNA, 25 bp, Homo sapien
tccattgtggattcttgggccaatt

SEQ ID NO: 3017774 - DNA, 25 bp, Homo sapien
tatccattgtggattcttgggccaa

SEQ ID NO: 3017775 - DNA, 25 bp, Homo sapien
ttagctttggtcagggtgttgactt

SEQ ID NO: 3017776 - DNA, 25 bp, Homo sapien
ttttagctttggtcagggtgttgac

SEQ ID NO: 3017777 - DNA, 25 bp, Homo sapien
caatggtttcatccagacctgccat

SEQ ID NO: 3017778 - DNA, 25 bp, Homo sapien
ggtttcatccagacctgccatctct

SEQ ID NO: 3017779 - DNA, 25 bp, Homo sapien
ctttgattttggcctcaagttggat

SEQ ID NO: 3017780 - DNA, 25 bp, Homo sapien
tttgattttggcctcaagttggatt

SEQ ID NO: 3017781 - DNA, 25 bp, Homo sapien
ctctttgattttggcctcaagttgg

SEQ ID NO: 3017782 - DNA, 25 bp, Homo sapien
tctttgattttggcctcaagttgga

SEQ ID NO: 3017783 - DNA, 25 bp, Homo sapien
ctgaactgcaatgtataatacttac

SEQ ID NO: 3017784 - DNA, 25 bp, Homo sapien
ggctgaactgcaatgtataatactt

SEQ ID NO: 3017785 - DNA, 25 bp, Homo sapien
tggctgaactgcaatgtataatact

SEQ ID NO: 3017786 - DNA, 25 bp, Homo sapien
gctgaactgcaatgtataatactta

SEQ ID NO: 3017787 - DNA, 25 bp, Homo sapien
tcacattcatgaaagcacggatgtt

SEQ ID NO: 3017788 - DNA, 25 bp, Homo sapien
cttcacattcatgaaagcacggatg

SEQ ID NO: 3017789 - DNA, 25 bp, Homo sapien
ttttctcttgcattagcgtcaccat

SEQ ID NO: 3017790 - DNA, 25 bp, Homo sapien
agcacggatgttgtactgaatgcag

SEQ ID NO: 3017791 - DNA, 25 bp, Homo sapien
gcttgagtgcgcgtgatgagttgag

SEQ ID NO: 3017792 - DNA, 25 bp, Homo sapien
agttgagctagcttttcatctcgca

SEQ ID NO: 3017793 - DNA, 25 bp, Homo sapien
gaaccctctgcatatggcttgagtg

SEQ ID NO: 3017794 - DNA, 25 bp, Homo sapien
atctttctgaactccactctcatca

SEQ ID NO: 3017795 - DNA, 25 bp, Homo sapien
tatgaaagaacaagttaaatatgtt

SEQ ID NO: 3017796 - DNA, 25 bp, Homo sapien
gaacaagttaaatatgttatttcca

SEQ ID NO: 3017797 - DNA, 25 bp, Homo sapien
tgaaagaacaagttaaatatgttat

SEQ ID NO: 3017798 - DNA, 25 bp, Homo sapien
cttatgaaagaacaagttaaatatg

SEQ ID NO: 3017799 - DNA, 25 bp, Homo sapien
tgatagaattatgacagatagaaat

SEQ ID NO: 3017800 - DNA, 25 bp, Homo sapien
gatagaattatgacagatagaaatt

SEQ ID NO: 3017801 - DNA, 25 bp, Homo sapien
tagaattatgacagatagaaatttg

SEQ ID NO: 3017802 - DNA, 25 bp, Homo sapien
gaattatgacagatagaaatttgga

SEQ ID NO: 3017803 - DNA, 25 bp, Homo sapien
aactgaccctctgggatagcactcg

SEQ ID NO: 3017804 - DNA, 25 bp, Homo sapien
gatagcactcgcatttagaaccttg

SEQ ID NO: 3017805 - DNA, 25 bp, Homo sapien
tatgaccgaatttgtactgggtgtg

SEQ ID NO: 3017806 - DNA, 25 bp, Homo sapien
tttcaatagaccctagaagtttctc

SEQ ID NO: 3017807 - DNA, 25 bp, Homo sapien
gttacacctcagctgatgcaggaca

SEQ ID NO: 3017808 - DNA, 25 bp, Homo sapien
gatgcaggacaagctcatgctccat

SEQ ID NO: 3017809 - DNA, 25 bp, Homo sapien
tttgaagtctgcataaaggattctg

SEQ ID NO: 3017810 - DNA, 25 bp, Homo sapien
gatgccttccagcacaccgttacac

SEQ ID NO: 3017811 - DNA, 25 bp, Homo sapien
tgccatacttcgtggtctatcgcac

SEQ ID NO: 3017812 - DNA, 25 bp, Homo sapien
catacttcgtggtctatcgcacaca

SEQ ID NO: 3017813 - DNA, 25 bp, Homo sapien
gccatacttcgtggtctatcgcaca

SEQ ID NO: 3017814 - DNA, 25 bp, Homo sapien
acatgccatacttcgtggtctatcg

SEQ ID NO: 3017815 - DNA, 25 bp, Homo sapien
atgatgcaccgcacaaagtgggggt

SEQ ID NO: 3017816 - DNA, 25 bp, Homo sapien
gatgatgcaccgcacaaagtggggg

SEQ ID NO: 3017817 - DNA, 25 bp, Homo sapien
ctgaaaagagctgacactgtctgga

SEQ ID NO: 3017818 - DNA, 25 bp, Homo sapien
ctgtctggaaagaagaacccttctt

SEQ ID NO: 3017819 - DNA, 25 bp, Homo sapien
gaaaagagctgacactgtctggaaa

SEQ ID NO: 3017820 - DNA, 25 bp, Homo sapien
aagagctgacactgtctggaaagaa

SEQ ID NO: 3017821 - DNA, 25 bp, Homo sapien
cagagtcttcattgcagacttctgg

SEQ ID NO: 3017822 - DNA, 25 bp, Homo sapien
ttgcagacttctggtacagccccac

SEQ ID NO: 3017823 - DNA, 25 bp, Homo sapien
ccagagtcttcattgcagacttctg

SEQ ID NO: 3017824 - DNA, 25 bp, Homo sapien
cttcattgcagacttctggtacagc

SEQ ID NO: 3017825 - DNA, 25 bp, Homo sapien
cacggtgccggcatagtgcaccagt

SEQ ID NO: 3017826 - DNA, 25 bp, Homo sapien
ccggcatagtgcaccagtgagaagt

SEQ ID NO: 3017827 - DNA, 25 bp, Homo sapien
tgccggcatagtgcaccagtgagaa

SEQ ID NO: 3017828 - DNA, 25 bp, Homo sapien
cggtgccggcatagtgcaccagtga

SEQ ID NO: 3017829 - DNA, 25 bp, Homo sapien
aagtcaatgaactcccactcgatgc

SEQ ID NO: 3017830 - DNA, 25 bp, Homo sapien
caggtccatcccgaagtcaatgaac

SEQ ID NO: 3017831 - DNA, 25 bp, Homo sapien
aaactgttgcagtttctcgttggtg

SEQ ID NO: 3017832 - DNA, 25 bp, Homo sapien
agccaggtccatcccgaagtcaatg

SEQ ID NO: 3017833 - DNA, 25 bp, Homo sapien
ccacaggaacatcttctcgtagatg

SEQ ID NO: 3017834 - DNA, 25 bp, Homo sapien
acaggaacatcttctcgtagatggc

SEQ ID NO: 3017835 - DNA, 25 bp, Homo sapien
ggaacatcttctcgtagatggcttt

SEQ ID NO: 3017836 - DNA, 25 bp, Homo sapien
caggaacatcttctcgtagatggct

SEQ ID NO: 3017837 - DNA, 25 bp, Homo sapien
gacttgtcagataagcagctttgtc

SEQ ID NO: 3017838 - DNA, 25 bp, Homo sapien
gaactcattgccgaccttgactctg

SEQ ID NO: 3017839 - DNA, 25 bp, Homo sapien
gatttgagcaggtcagcagagttca

SEQ ID NO: 3017840 - DNA, 25 bp, Homo sapien
cacagtctggcctttggttacgaac

SEQ ID NO: 3017841 - DNA, 25 bp, Homo sapien
ctgtgtgaacaaggtgagaatggtg

SEQ ID NO: 3017842 - DNA, 25 bp, Homo sapien
tgtgaacaaggtgagaatggtgaaa

SEQ ID NO: 3017843 - DNA, 25 bp, Homo sapien
tgtgtgaacaaggtgagaatggtga

SEQ ID NO: 3017844 - DNA, 25 bp, Homo sapien
gtgtgaacaaggtgagaatggtgaa

SEQ ID NO: 3017845 - DNA, 25 bp, Homo sapien
tttgtcaagtggaagataccaacag

SEQ ID NO: 3017846 - DNA, 25 bp, Homo sapien
tgtcaagtggaagataccaacaggg

SEQ ID NO: 3017847 - DNA, 25 bp, Homo sapien
gctttgtcaagtggaagataccaac

SEQ ID NO: 3017848 - DNA, 25 bp, Homo sapien
cagctttgtcaagtggaagatacca

SEQ ID NO: 3017849 - DNA, 25 bp, Homo sapien
gttcccataatgcatcacggctcca

SEQ ID NO: 3017850 - DNA, 25 bp, Homo sapien
agtgaaacccaggatgtccacagca

SEQ ID NO: 3017851 - DNA, 25 bp, Homo sapien
tgaaacccaggatgtccacagcact

SEQ ID NO: 3017852 - DNA, 25 bp, Homo sapien
gagcttgtaaatggccaccttttca

SEQ ID NO: 3017853 - DNA, 25 bp, Homo sapien
acaaatgcgaagtcatatgggttgg

SEQ ID NO: 3017854 - DNA, 25 bp, Homo sapien
cttggctgacaaatgcgaagtcata

SEQ ID NO: 3017855 - DNA, 25 bp, Homo sapien
gtcatatgggttggtggtgatcaga

SEQ ID NO: 3017856 - DNA, 25 bp, Homo sapien
atcaatgctgggcacagtaatttcc

SEQ ID NO: 3017857 - DNA, 25 bp, Homo sapien
tggtttcttattggacaggatttga

SEQ ID NO: 3017858 - DNA, 25 bp, Homo sapien
gctgaaaagtaactcgggacttctc

SEQ ID NO: 3017859 - DNA, 25 bp, Homo sapien
agcctttagctgaaaagtaactcgg

SEQ ID NO: 3017860 - DNA, 25 bp, Homo sapien
ttcttattggacaggatttgataaa

SEQ ID NO: 3017861 - DNA, 25 bp, Homo sapien
agccagtttgcctgtggcaccaaaa

SEQ ID NO: 3017862 - DNA, 25 bp, Homo sapien
tttgcctgtggcaccaaaatggatc

SEQ ID NO: 3017863 - DNA, 25 bp, Homo sapien
gtttcaatatctgcagaagccagtt

SEQ ID NO: 3017864 - DNA, 25 bp, Homo sapien
ccaaaatggatcctgatgaatttac

SEQ ID NO: 3017865 - DNA, 25 bp, Homo sapien
attcctcacggtcttggcattgccg

SEQ ID NO: 3017866 - DNA, 25 bp, Homo sapien
ttccagtagggggttagcactgatg

SEQ ID NO: 3017867 - DNA, 25 bp, Homo sapien
cttggcattgccgaaggcttccagt

SEQ ID NO: 3017868 - DNA, 25 bp, Homo sapien
agcactgatgatttgatcttcaagg

SEQ ID NO: 3017869 - DNA, 25 bp, Homo sapien
tgcaattgttgcaaagtactggatg

SEQ ID NO: 3017870 - DNA, 25 bp, Homo sapien
aactgcaattgttgcaaagtactgg

SEQ ID NO: 3017871 - DNA, 25 bp, Homo sapien
aatcaagattgactggttttcacga

SEQ ID NO: 3017872 - DNA, 25 bp, Homo sapien
taatcaagattgactggttttcacg

SEQ ID NO: 3017873 - DNA, 25 bp, Homo sapien
gtaatcaagattgactggttttcac

SEQ ID NO: 3017874 - DNA, 25 bp, Homo sapien
ccatgagaataatctatcaatatca

SEQ ID NO: 3017875 - DNA, 25 bp, Homo sapien
tgtatagactatgtaatgcatcatt

SEQ ID NO: 3017876 - DNA, 25 bp, Homo sapien
tgagaataatctatcaatatcagat

SEQ ID NO: 3017877 - DNA, 25 bp, Homo sapien
ctttctaatgtatagactatgtaat

SEQ ID NO: 3017878 - DNA, 25 bp, Homo sapien
aactgataggcattgtcagagatgg

SEQ ID NO: 3017879 - DNA, 25 bp, Homo sapien
agcatgaactgataggcattgtcag

SEQ ID NO: 3017880 - DNA, 25 bp, Homo sapien
ttttgcctcggtaggctgtcaccac

SEQ ID NO: 3017881 - DNA, 25 bp, Homo sapien
ggcctcctggcgctttttgcctcgg

SEQ ID NO: 3017882 - DNA, 25 bp, Homo sapien
agaagacttggtcttctttcacagt

SEQ ID NO: 3017883 - DNA, 25 bp, Homo sapien
agctccagcttcggtcttggctgtc

SEQ ID NO: 3017884 - DNA, 25 bp, Homo sapien
gcactattgctttcacgtaggactc

SEQ ID NO: 3017885 - DNA, 25 bp, Homo sapien
cactattgctttcacgtaggactcc

SEQ ID NO: 3017886 - DNA, 25 bp, Homo sapien
aaatggccatctcagagtcagaact

SEQ ID NO: 3017887 - DNA, 25 bp, Homo sapien
caaaaatggccatctcagagtcaga

SEQ ID NO: 3017888 - DNA, 25 bp, Homo sapien
tttcggaggaaaggagcagcctccc

SEQ ID NO: 3017889 - DNA, 25 bp, Homo sapien
ctttcggaggaaaggagcagcctcc

SEQ ID NO: 3017890 - DNA, 25 bp, Homo sapien
gatggcagtactggactaggtatac

SEQ ID NO: 3017891 - DNA, 25 bp, Homo sapien
tgcaggttattgatggcagtactgg

SEQ ID NO: 3017892 - DNA, 25 bp, Homo sapien
tattgatggcagtactggactaggt

SEQ ID NO: 3017893 - DNA, 25 bp, Homo sapien
caggttattgatggcagtactggac

SEQ ID NO: 3017894 - DNA, 25 bp, Homo sapien
cttgtattatcagatgaagaaggtg

SEQ ID NO: 3017895 - DNA, 25 bp, Homo sapien
tgaagaaggtggcaggctcaaagca

SEQ ID NO: 3017896 - DNA, 25 bp, Homo sapien
ctcttgtattatcagatgaagaagg

SEQ ID NO: 3017897 - DNA, 25 bp, Homo sapien
aagaaggtggcaggctcaaagcaga

SEQ ID NO: 3017898 - DNA, 25 bp, Homo sapien
caaaagtcataagtacaaaatggag

SEQ ID NO: 3017899 - DNA, 25 bp, Homo sapien
ctccaaaagtcataagtacaaaatg

SEQ ID NO: 3017900 - DNA, 25 bp, Homo sapien
ccaaaagtcataagtacaaaatgga

SEQ ID NO: 3017901 - DNA, 25 bp, Homo sapien
tccaaaagtcataagtacaaaatgg

SEQ ID NO: 3017902 - DNA, 25 bp, Homo sapien
gatttttgtgtgaacctccctgctc

SEQ ID NO: 3017903 - DNA, 25 bp, Homo sapien
ttgtgtgaacctccctgctcttcac

SEQ ID NO: 3017904 - DNA, 25 bp, Homo sapien
ttttgtgtgaacctccctgctcttc

SEQ ID NO: 3017905 - DNA, 25 bp, Homo sapien
tatgatttttgtgtgaacctccctg

SEQ ID NO: 3017906 - DNA, 25 bp, Homo sapien
caatgtcagcccgttcctcggcctc

SEQ ID NO: 3017907 - DNA, 25 bp, Homo sapien
ggactcagcaatgtcagcccgttcc

SEQ ID NO: 3017908 - DNA, 25 bp, Homo sapien
aatgtcagcccgttcctcggcctcc

SEQ ID NO: 3017909 - DNA, 25 bp, Homo sapien
tcagcaatgtcagcccgttcctcgg

SEQ ID NO: 3017910 - DNA, 25 bp, Homo sapien
atttggagaggttgacgttggattg

SEQ ID NO: 3017911 - DNA, 25 bp, Homo sapien
tttggagaggttgacgttggattgt

SEQ ID NO: 3017912 - DNA, 25 bp, Homo sapien
ttggagaggttgacgttggattgtt

SEQ ID NO: 3017913 - DNA, 25 bp, Homo sapien
tttaactaaactggcctggtcatgt

SEQ ID NO: 3017914 - DNA, 25 bp, Homo sapien
cactttaactaaactggcctggtca

SEQ ID NO: 3017915 - DNA, 25 bp, Homo sapien
tcaccccaaggggttgtgaactcac

SEQ ID NO: 3017916 - DNA, 25 bp, Homo sapien
tcactttaactaaactggcctggtc

SEQ ID NO: 3017917 - DNA, 25 bp, Homo sapien
tctcttgtaggatttcacctttgct

SEQ ID NO: 3017918 - DNA, 25 bp, Homo sapien
cctgagaatattcttgcggtcttcc

SEQ ID NO: 3017919 - DNA, 25 bp, Homo sapien
cctttgcttgcagtttgtccaccag

SEQ ID NO: 3017920 - DNA, 25 bp, Homo sapien
tgagaatattcttgcggtcttcctc

SEQ ID NO: 3017921 - DNA, 25 bp, Homo sapien
ctgaaataatgttttcaagagtaag

SEQ ID NO: 3017922 - DNA, 25 bp, Homo sapien
tgaaataatgttttcaagagtaagt

SEQ ID NO: 3017923 - DNA, 25 bp, Homo sapien
ttaatcccatgtggactaaagtgaa

SEQ ID NO: 3017924 - DNA, 25 bp, Homo sapien
tgtcatacatatgacttttaatccc

SEQ ID NO: 3017925 - DNA, 25 bp, Homo sapien
gacttttaatcccatgtggactaaa

SEQ ID NO: 3017926 - DNA, 25 bp, Homo sapien
catatgacttttaatcccatgtgga

SEQ ID NO: 3017927 - DNA, 25 bp, Homo sapien
ttgcgcttctgttcactttcaactt

SEQ ID NO: 3017928 - DNA, 25 bp, Homo sapien
attgcgcttctgttcactttcaact

SEQ ID NO: 3017929 - DNA, 25 bp, Homo sapien
ccttcaccgtctgttccaggttctt

SEQ ID NO: 3017930 - DNA, 25 bp, Homo sapien
cttcaccgtctgttccaggttcttc

SEQ ID NO: 3017931 - DNA, 25 bp, Homo sapien
ctctccctggatttgggaaatgtct

SEQ ID NO: 3017932 - DNA, 25 bp, Homo sapien
tctccctggatttgggaaatgtctg

SEQ ID NO: 3017933 - DNA, 25 bp, Homo sapien
gctccggagagcatcatccaggtgg

SEQ ID NO: 3017934 - DNA, 25 bp, Homo sapien
ccaggagctcctgttctgcgatttt

SEQ ID NO: 3017935 - DNA, 25 bp, Homo sapien
cctggctccggagagcatcatccag

SEQ ID NO: 3017936 - DNA, 25 bp, Homo sapien
tctgtctgttccagagtggcccgca

SEQ ID NO: 3017937 - DNA, 25 bp, Homo sapien
agcctaatggcatcattcctgctcc

SEQ ID NO: 3017938 - DNA, 25 bp, Homo sapien
tgagcctaatggcatcattcctgct

SEQ ID NO: 3017939 - DNA, 25 bp, Homo sapien
gagcctaatggcatcattcctgctc

SEQ ID NO: 3017940 - DNA, 25 bp, Homo sapien
cttgagcctaatggcatcattcctg

SEQ ID NO: 3017941 - DNA, 25 bp, Homo sapien
gaggtgacattagtagagtaatgga

SEQ ID NO: 3017942 - DNA, 25 bp, Homo sapien
cattagtagagtaatggaagtgtgt

SEQ ID NO: 3017943 - DNA, 25 bp, Homo sapien
gtagagtaatggaagtgtgtagtat

SEQ ID NO: 3017944 - DNA, 25 bp, Homo sapien
tgacattagtagagtaatggaagtg

SEQ ID NO: 3017945 - DNA, 25 bp, Homo sapien
cttctaattgttttagagtatgcaa

SEQ ID NO: 3017946 - DNA, 25 bp, Homo sapien
ccaattcctcttctaattgttttag

SEQ ID NO: 3017947 - DNA, 25 bp, Homo sapien
gttttagagtatgcaataaaatgct

SEQ ID NO: 3017948 - DNA, 25 bp, Homo sapien
tgttttagagtatgcaataaaatgc

SEQ ID NO: 3017949 - DNA, 25 bp, Homo sapien
tgcctcctctaaggcagcctgaagt

SEQ ID NO: 3017950 - DNA, 25 bp, Homo sapien
tccagttcatggatgcgctttcctc

SEQ ID NO: 3017951 - DNA, 25 bp, Homo sapien
tcatggatgcgctttcctccttctg

SEQ ID NO: 3017952 - DNA, 25 bp, Homo sapien
ttcagacttttcttgctcaacttgc

SEQ ID NO: 3017953 - DNA, 25 bp, Homo sapien
tgagtgagcgggattccttttgaga

SEQ ID NO: 3017954 - DNA, 25 bp, Homo sapien
ttaaatagttctgtgctgagtgagc

SEQ ID NO: 3017955 - DNA, 25 bp, Homo sapien
cttcaagttcagcatgagtttcttc

SEQ ID NO: 3017956 - DNA, 25 bp, Homo sapien
tcaaggtttcaagttggtctaaaga

SEQ ID NO: 3017957 - DNA, 25 bp, Homo sapien
tgttaattctgtgttgaaagttgaa

SEQ ID NO: 3017958 - DNA, 25 bp, Homo sapien
gctattgttaattctgtgttgaaag

SEQ ID NO: 3017959 - DNA, 25 bp, Homo sapien
gcaggctattgttaattctgtgttg

SEQ ID NO: 3017960 - DNA, 25 bp, Homo sapien
ttaattctgtgttgaaagttgaagc

SEQ ID NO: 3017961 - DNA, 25 bp, Homo sapien
cagcatttgtcctctcaacatcaat

SEQ ID NO: 3017962 - DNA, 25 bp, Homo sapien
ctcaagggaagcacatttggcattc

SEQ ID NO: 3017963 - DNA, 25 bp, Homo sapien
ttctcaagggaagcacatttggcat

SEQ ID NO: 3017964 - DNA, 25 bp, Homo sapien
ctcaacatcaatcatgaggtcctca

SEQ ID NO: 3017965 - DNA, 25 bp, Homo sapien
tccactgggcaacctcactgttggc

SEQ ID NO: 3017966 - DNA, 25 bp, Homo sapien
cctccactgggcaacctcactgttg

SEQ ID NO: 3017967 - DNA, 25 bp, Homo sapien
gtcctccactgggcaacctcactgt

SEQ ID NO: 3017968 - DNA, 25 bp, Homo sapien
cactgggcaacctcactgttggcct

SEQ ID NO: 3017969 - DNA, 25 bp, Homo sapien
atactgttcccgcagcaggtcacag

SEQ ID NO: 3017970 - DNA, 25 bp, Homo sapien
tcatactgttcccgcagcaggtcac

SEQ ID NO: 3017971 - DNA, 25 bp, Homo sapien
ctcatactgttcccgcagcaggtca

SEQ ID NO: 3017972 - DNA, 25 bp, Homo sapien
catactgttcccgcagcaggtcaca

SEQ ID NO: 3017973 - DNA, 25 bp, Homo sapien
tgattcctgatctcctataggccac

SEQ ID NO: 3017974 - DNA, 25 bp, Homo sapien
tatttaaagtgatgtttgattcctg

SEQ ID NO: 3017975 - DNA, 25 bp, Homo sapien
ctcctataggccaccagaagaaagt

SEQ ID NO: 3017976 - DNA, 25 bp, Homo sapien
ctgagaacatagagattgatgactt

SEQ ID NO: 3017977 - DNA, 25 bp, Homo sapien
gtgtaaaggcttgtttgcccctcga

SEQ ID NO: 3017978 - DNA, 25 bp, Homo sapien
cttttcatctagctggcgtgaatat

SEQ ID NO: 3017979 - DNA, 25 bp, Homo sapien
gcccctcgagagctgtgaaactagt

SEQ ID NO: 3017980 - DNA, 25 bp, Homo sapien
gaaactagtgtgtccttttcatcta

SEQ ID NO: 3017981 - DNA, 25 bp, Homo sapien
tccttggtcttaatttcactcagtt

SEQ ID NO: 3017982 - DNA, 25 bp, Homo sapien
ttcactcagttgatcttctagagcg

SEQ ID NO: 3017983 - DNA, 25 bp, Homo sapien
cttccttggtcttaatttcactcag

SEQ ID NO: 3017984 - DNA, 25 bp, Homo sapien
cttggtcttaatttcactcagttga

SEQ ID NO: 3017985 - DNA, 25 bp, Homo sapien
ttcatctcaatctgggctgaggtgg

SEQ ID NO: 3017986 - DNA, 25 bp, Homo sapien
ctccatgttactagcaaggtcatcg

SEQ ID NO: 3017987 - DNA, 25 bp, Homo sapien
gttcatctcaatctgggctgaggtg

SEQ ID NO: 3017988 - DNA, 25 bp, Homo sapien
tgttactagcaaggtcatcgatctc

SEQ ID NO: 3017989 - DNA, 25 bp, Homo sapien
tttgcagaccgctcatttcaaactc

SEQ ID NO: 3017990 - DNA, 25 bp, Homo sapien
ctttgcagaccgctcatttcaaact

SEQ ID NO: 3017991 - DNA, 25 bp, Homo sapien
tgcagctgcataccaagggcttgtt

SEQ ID NO: 3017992 - DNA, 25 bp, Homo sapien
agctgcataccaagggcttgttcat

SEQ ID NO: 3017993 - DNA, 25 bp, Homo sapien
tgagccaattttaggtctccctcta

SEQ ID NO: 3017994 - DNA, 25 bp, Homo sapien
agccaattttaggtctccctctagt

SEQ ID NO: 3017995 - DNA, 25 bp, Homo sapien
gagccaattttaggtctccctctag

SEQ ID NO: 3017996 - DNA, 25 bp, Homo sapien
cttgttgttcaagtttgattttagc

SEQ ID NO: 3017997 - DNA, 25 bp, Homo sapien
ttagctttggtcagggtgttgactt

SEQ ID NO: 3017998 - DNA, 25 bp, Homo sapien
cacttgttgttcaagtttgatttta

SEQ ID NO: 3017999 - DNA, 25 bp, Homo sapien
tgattttagctttggtcagggtgtt

SEQ ID NO: 3018000 - DNA, 25 bp, Homo sapien
ggttttgattagctggtcacacctt

SEQ ID NO: 3018001 - DNA, 25 bp, Homo sapien
tggttttgattagctggtcacacct

SEQ ID NO: 3018002 - DNA, 25 bp, Homo sapien
ttggttttgattagctggtcacacc

SEQ ID NO: 3018003 - DNA, 25 bp, Homo sapien
ttttggttttgattagctggtcaca

SEQ ID NO: 3018004 - DNA, 25 bp, Homo sapien
gagaagaggcaatagatattttaga

SEQ ID NO: 3018005 - DNA, 25 bp, Homo sapien
tagggagcaaagctcactttatttc

SEQ ID NO: 3018006 - DNA, 25 bp, Homo sapien
ataatcctactctttcaggtactaa

SEQ ID NO: 3018007 - DNA, 25 bp, Homo sapien
tttcaagttaatgtgttttcatcaa

SEQ ID NO: 3018008 - DNA, 25 bp, Homo sapien
tgctcggggattgtagatacaaaac

SEQ ID NO: 3018009 - DNA, 25 bp, Homo sapien
caggaaatgacttcgggatactcac

SEQ ID NO: 3018010 - DNA, 25 bp, Homo sapien
gcaggaaatgacttcgggatactca

SEQ ID NO: 3018011 - DNA, 25 bp, Homo sapien
gattgcaggaaatgacttcgggata

SEQ ID NO: 3018012 - DNA, 25 bp, Homo sapien
ttgcaggaaatgacttcgggatact

SEQ ID NO: 3018013 - DNA, 25 bp, Homo sapien
catgaaggcacggacattgtactgg

SEQ ID NO: 3018014 - DNA, 25 bp, Homo sapien
cttgcatcagagtaaccattttttc

SEQ ID NO: 3018015 - DNA, 25 bp, Homo sapien
cacattcatgaaggcacggacattg

SEQ ID NO: 3018016 - DNA, 25 bp, Homo sapien
tttcttgcatcagagtaaccatttt

SEQ ID NO: 3018017 - DNA, 25 bp, Homo sapien
tgggttcgggtaatcagctgggcca

SEQ ID NO: 3018018 - DNA, 25 bp, Homo sapien
tggcctgggttcgggtaatcagctg

SEQ ID NO: 3018019 - DNA, 25 bp, Homo sapien
gttcgggtaatcagctgggccagct

SEQ ID NO: 3018020 - DNA, 25 bp, Homo sapien
cctgggttcgggtaatcagctgggc

SEQ ID NO: 3018021 - DNA, 25 bp, Homo sapien
tgaagccttcttgctatcgatgaat

SEQ ID NO: 3018022 - DNA, 25 bp, Homo sapien
atactgggtgtggtcaatgtcaatg

SEQ ID NO: 3018023 - DNA, 25 bp, Homo sapien
cgatgaattgtccttcagggatagc

SEQ ID NO: 3018024 - DNA, 25 bp, Homo sapien
ctctgaagccttcttgctatcgatg

SEQ ID NO: 3018025 - DNA, 25 bp, Homo sapien
ctgtttaagccagacaaaaaaatga

SEQ ID NO: 3018026 - DNA, 25 bp, Homo sapien
gtttaagccagacaaaaaaatgata

SEQ ID NO: 3018027 - DNA, 25 bp, Homo sapien
ttaagccagacaaaaaaatgatatg

SEQ ID NO: 3018028 - DNA, 25 bp, Homo sapien
taagccagacaaaaaaatgatatgg

SEQ ID NO: 3018029 - DNA, 25 bp, Homo sapien
gcacaccgttacacctcagctgatg

SEQ ID NO: 3018030 - DNA, 25 bp, Homo sapien
ttacacctcagctgatgcaggacaa

SEQ ID NO: 3018031 - DNA, 25 bp, Homo sapien
tttgaagtctgcataaaggattctg

SEQ ID NO: 3018032 - DNA, 25 bp, Homo sapien
gatgccttccagcacaccgttacac

SEQ ID NO: 3018033 - DNA, 25 bp, Homo sapien
acatgccatacttcgtggtctatca

SEQ ID NO: 3018034 - DNA, 25 bp, Homo sapien
tgccatacttcgtggtctatcacac

SEQ ID NO: 3018035 - DNA, 25 bp, Homo sapien
catgccatacttcgtggtctatcac

SEQ ID NO: 3018036 - DNA, 25 bp, Homo sapien
ccatacttcgtggtctatcacacac

SEQ ID NO: 3018037 - DNA, 25 bp, Homo sapien
atgatgcaccgcacaaagtgggggt

SEQ ID NO: 3018038 - DNA, 25 bp, Homo sapien
gatgatgcaccgcacaaagtggggg

SEQ ID NO: 3018039 - DNA, 25 bp, Homo sapien
tgtgtattccttgccatagatatag

SEQ ID NO: 3018040 - DNA, 25 bp, Homo sapien
tgtctatcaaatgtgtattccttgc

SEQ ID NO: 3018041 - DNA, 25 bp, Homo sapien
tcaaatgtgtattccttgccataga

SEQ ID NO: 3018042 - DNA, 25 bp, Homo sapien
gtattccttgccatagatatagagc

SEQ ID NO: 3018043 - DNA, 25 bp, Homo sapien
cagacacagtctggaaagaagaacc

SEQ ID NO: 3018044 - DNA, 25 bp, Homo sapien
gcagacacagtctggaaagaagaac

SEQ ID NO: 3018045 - DNA, 25 bp, Homo sapien
gacacagtctggaaagaagaaccct

SEQ ID NO: 3018046 - DNA, 25 bp, Homo sapien
cacagtctggaaagaagaacccttc

SEQ ID NO: 3018047 - DNA, 25 bp, Homo sapien
ctcccgttgccccaacaaagaggag

SEQ ID NO: 3018048 - DNA, 25 bp, Homo sapien
cttgtcaagccagccggcaatgttg

SEQ ID NO: 3018049 - DNA, 25 bp, Homo sapien
cttgttcttgtcaagccagccggca

SEQ ID NO: 3018050 - DNA, 25 bp, Homo sapien
cgttgccccaacaaagaggagagcc

SEQ ID NO: 3018051 - DNA, 25 bp, Homo sapien
tggtggttgaaaaactgttgcagtt

SEQ ID NO: 3018052 - DNA, 25 bp, Homo sapien
tgaacgtccactcaatgccttcctt

SEQ ID NO: 3018053 - DNA, 25 bp, Homo sapien
caggtccatcccaaagtcaatgaac

SEQ ID NO: 3018054 - DNA, 25 bp, Homo sapien
ttctcgatgagctcgatgcaggcag

SEQ ID NO: 3018055 - DNA, 25 bp, Homo sapien
cagcaatgtccaagaccccaatgaa

SEQ ID NO: 3018056 - DNA, 25 bp, Homo sapien
ccagcaatgtccaagaccccaatga

SEQ ID NO: 3018057 - DNA, 25 bp, Homo sapien
aagaacatcttatcgtagacagctt

SEQ ID NO: 3018058 - DNA, 25 bp, Homo sapien
agaacatcttatcgtagacagcttt

SEQ ID NO: 3018059 - DNA, 25 bp, Homo sapien
caagaacatcttatcgtagacagct

SEQ ID NO: 3018060 - DNA, 25 bp, Homo sapien
gacatactcattgccgaccttgacc

SEQ ID NO: 3018061 - DNA, 25 bp, Homo sapien
accttgaccctagggtagcagaggg

SEQ ID NO: 3018062 - DNA, 25 bp, Homo sapien
tgaccctagggtagcagagggcttt

SEQ ID NO: 3018063 - DNA, 25 bp, Homo sapien
accctagggtagcagagggctttga

SEQ ID NO: 3018064 - DNA, 25 bp, Homo sapien
tgtgagcttatagatggacactctt

SEQ ID NO: 3018065 - DNA, 25 bp, Homo sapien
gagcttatagatggacactctttca

SEQ ID NO: 3018066 - DNA, 25 bp, Homo sapien
tttcatctgaagtaaagcccagaat

SEQ ID NO: 3018067 - DNA, 25 bp, Homo sapien
gatggacactctttcatctgaagta

SEQ ID NO: 3018068 - DNA, 25 bp, Homo sapien
ccttgactgacgaaggcataatcgt

SEQ ID NO: 3018069 - DNA, 25 bp, Homo sapien
cttgactgacgaaggcataatcgta

SEQ ID NO: 3018070 - DNA, 25 bp, Homo sapien
cccttgactgacgaaggcataatcg

SEQ ID NO: 3018071 - DNA, 25 bp, Homo sapien
ttgactgacgaaggcataatcgtat

SEQ ID NO: 3018072 - DNA, 25 bp, Homo sapien
tggcttcttgttagacatgatctga

SEQ ID NO: 3018073 - DNA, 25 bp, Homo sapien
ggaaagtaactctagacttctccag

SEQ ID NO: 3018074 - DNA, 25 bp, Homo sapien
gacatgatctgataaaaaatatgat

SEQ ID NO: 3018075 - DNA, 25 bp, Homo sapien
tggaaagtaactctagacttctcca

SEQ ID NO: 3018076 - DNA, 25 bp, Homo sapien
gtggtaccgaagtggatcctgatga

SEQ ID NO: 3018077 - DNA, 25 bp, Homo sapien
tggtaccgaagtggatcctgatgaa

SEQ ID NO: 3018078 - DNA, 25 bp, Homo sapien
ggtaccgaagtggatcctgatgaat

SEQ ID NO: 3018079 - DNA, 25 bp, Homo sapien
tgtaagtaaaaaaaatgatgttata

SEQ ID NO: 3018080 - DNA, 25 bp, Homo sapien
tctctggcatctaaaggcagagaag

SEQ ID NO: 3018081 - DNA, 25 bp, Homo sapien
aagaccctttggcaaccaagagact

SEQ ID NO: 3018082 - DNA, 25 bp, Homo sapien
gcagagaagaccctttggcaaccaa

SEQ ID NO: 3018083 - DNA, 25 bp, Homo sapien
cttgaagtacgtagtggggatgcca

SEQ ID NO: 3018084 - DNA, 25 bp, Homo sapien
aagcgagaggagttgtcattcctca

SEQ ID NO: 3018085 - DNA, 25 bp, Homo sapien
aaagcgagaggagttgtcattcctc

SEQ ID NO: 3018086 - DNA, 25 bp, Homo sapien
agcgagaggagttgtcattcctcac

SEQ ID NO: 3018087 - DNA, 25 bp, Homo sapien
cctccagtagggggttggcactgat

SEQ ID NO: 3018088 - DNA, 25 bp, Homo sapien
tagggggttggcactgatgatttga

SEQ ID NO: 3018089 - DNA, 25 bp, Homo sapien
tccagtagggggttggcactgatga

SEQ ID NO: 3018090 - DNA, 25 bp, Homo sapien
cagtagggggttggcactgatgatt

SEQ ID NO: 3018091 - DNA, 25 bp, Homo sapien
catctggggcttgggaatttcctac

SEQ ID NO: 3018092 - DNA, 25 bp, Homo sapien
ttgcatctggggcttgggaatttcc

SEQ ID NO: 3018093 - DNA, 25 bp, Homo sapien
ctgcaaaggcaagagcagtccttgc

SEQ ID NO: 3018094 - DNA, 25 bp, Homo sapien
gcaaaggcaagagcagtccttgcat

SEQ ID NO: 3018095 - DNA, 25 bp, Homo sapien
tgcaattgttgcaaagtactggatg

SEQ ID NO: 3018096 - DNA, 25 bp, Homo sapien
aactgcaattgttgcaaagtactgg

SEQ ID NO: 3018097 - DNA, 25 bp, Homo sapien
atcaagatagactgattctcccgat

SEQ ID NO: 3018098 - DNA, 25 bp, Homo sapien
gatcaagatagactgattctcccga

SEQ ID NO: 3018099 - DNA, 25 bp, Homo sapien
tgatcaagatagactgattctcccg

SEQ ID NO: 3018100 - DNA, 25 bp, Homo sapien
gtgatcaagatagactgattctccc

SEQ ID NO: 3018101 - DNA, 25 bp, Homo sapien
accacctctgcattatacactggca

SEQ ID NO: 3018102 - DNA, 25 bp, Homo sapien
tcaccacctctgcattatacactgg

SEQ ID NO: 3018103 - DNA, 25 bp, Homo sapien
ccacctctgcattatacactggcaa

SEQ ID NO: 3018104 - DNA, 25 bp, Homo sapien
cacctctgcattatacactggcaac

SEQ ID NO: 3018105 - DNA, 25 bp, Homo sapien
gctcgtgtagatgagtcatcatggc

SEQ ID NO: 3018106 - DNA, 25 bp, Homo sapien
agcgctctttgaggttgtacagcac

SEQ ID NO: 3018107 - DNA, 25 bp, Homo sapien
caggctcgtgtagatgagtcatcat

SEQ ID NO: 3018108 - DNA, 25 bp, Homo sapien
tgtcatatttgggagggttcatggg

SEQ ID NO: 3018109 - DNA, 25 bp, Homo sapien
aaaatggccatctcagagtcggaac

SEQ ID NO: 3018110 - DNA, 25 bp, Homo sapien
atggccatctcagagtcggaactca

SEQ ID NO: 3018111 - DNA, 25 bp, Homo sapien
agctccagcttcggtcttagctgtc

SEQ ID NO: 3018112 - DNA, 25 bp, Homo sapien
aatggccatctcagagtcggaactc

SEQ ID NO: 3018113 - DNA, 25 bp, Homo sapien
aggttattgatggtagcccagttaa

SEQ ID NO: 3018114 - DNA, 25 bp, Homo sapien
caggttattgatggtagcccagtta

SEQ ID NO: 3018115 - DNA, 25 bp, Homo sapien
tgcaggttattgatggtagcccagt

SEQ ID NO: 3018116 - DNA, 25 bp, Homo sapien
gcaggttattgatggtagcccagtt

SEQ ID NO: 3018117 - DNA, 25 bp, Homo sapien
gagatgcgaccttaaagtggatcag

SEQ ID NO: 3018118 - DNA, 25 bp, Homo sapien
tagagatgcgaccttaaagtggatc

SEQ ID NO: 3018119 - DNA, 25 bp, Homo sapien
cgtagagatgcgaccttaaagtgga

SEQ ID NO: 3018120 - DNA, 25 bp, Homo sapien
gatgcgaccttaaagtggatcagaa

SEQ ID NO: 3018121 - DNA, 25 bp, Homo sapien
ctttgcaacagggtagaatacacaa

SEQ ID NO: 3018122 - DNA, 25 bp, Homo sapien
gggtagaatacacaataattacaga

SEQ ID NO: 3018123 - DNA, 25 bp, Homo sapien
caataattacagagggaaatgacca

SEQ ID NO: 3018124 - DNA, 25 bp, Homo sapien
gcaaactaccctatgctttatttcc

SEQ ID NO: 3018125 - DNA, 25 bp, Homo sapien
atttagctagattggtgttggattg

SEQ ID NO: 3018126 - DNA, 25 bp, Homo sapien
ctagattggtgttggattgttcctc

SEQ ID NO: 3018127 - DNA, 25 bp, Homo sapien
tcccggctcttcacccgcagtttgt

SEQ ID NO: 3018128 - DNA, 25 bp, Homo sapien
ccgcagtttgttcacctgggactca

SEQ ID NO: 3018129 - DNA, 25 bp, Homo sapien
tctaccaaatcttgaagcctgagaa

SEQ ID NO: 3018130 - DNA, 25 bp, Homo sapien
ccaaatcttgaagcctgagaatatt

SEQ ID NO: 3018131 - DNA, 25 bp, Homo sapien
taccaaatcttgaagcctgagaata

SEQ ID NO: 3018132 - DNA, 25 bp, Homo sapien
ctaccaaatcttgaagcctgagaat

SEQ ID NO: 3018133 - DNA, 25 bp, Homo sapien
tcagcattacgcttttgctcactct

SEQ ID NO: 3018134 - DNA, 25 bp, Homo sapien
cctctcatgtttgcgcagacctttg

SEQ ID NO: 3018135 - DNA, 25 bp, Homo sapien
gacagcctcagcattacgcttttgc

SEQ ID NO: 3018136 - DNA, 25 bp, Homo sapien
ttcactcgcctctcatgtttgcgca

SEQ ID NO: 3018137 - DNA, 25 bp, Homo sapien
agctgcagatccttcacggtctgct

SEQ ID NO: 3018138 - DNA, 25 bp, Homo sapien
gcctcatccagacggagctgcagat

SEQ ID NO: 3018139 - DNA, 25 bp, Homo sapien
gatccttcacggtctgctccatgtt

SEQ ID NO: 3018140 - DNA, 25 bp, Homo sapien
agcctcatccagacggagctgcaga

SEQ ID NO: 3018141 - DNA, 25 bp, Homo sapien
ccttgcatttgggaaatatctgtct

SEQ ID NO: 3018142 - DNA, 25 bp, Homo sapien
catctctccttgcatttgggaaata

SEQ ID NO: 3018143 - DNA, 25 bp, Homo sapien
tctccttgcatttgggaaatatctg

SEQ ID NO: 3018144 - DNA, 25 bp, Homo sapien
ttgcatttgggaaatatctgtctcc

SEQ ID NO: 3018145 - DNA, 25 bp, Homo sapien
aaggagagttctttgtgctgaatcc

SEQ ID NO: 3018146 - DNA, 25 bp, Homo sapien
gagagttctttgtgctgaatcccac

SEQ ID NO: 3018147 - DNA, 25 bp, Homo sapien
ggagagttctttgtgctgaatccca

SEQ ID NO: 3018148 - DNA, 25 bp, Homo sapien
ctaaggagagttctttgtgctgaat

SEQ ID NO: 3018149 - DNA, 25 bp, Homo sapien
gagcatcatccaggtggatctgggt

SEQ ID NO: 3018150 - DNA, 25 bp, Homo sapien
cttgagcctaatggcatcattccta

SEQ ID NO: 3018151 - DNA, 25 bp, Homo sapien
gcctaatggcatcattcctactcct

SEQ ID NO: 3018152 - DNA, 25 bp, Homo sapien
ctaatggcatcattcctactcctga

SEQ ID NO: 3018153 - DNA, 25 bp, Homo sapien
tgagcctaatggcatcattcctact

SEQ ID NO: 3018154 - DNA, 25 bp, Homo sapien
gcaaggaaccaaaagctttatgaag

SEQ ID NO: 3018155 - DNA, 25 bp, Homo sapien
tagcaaggaaccaaaagctttatga

SEQ ID NO: 3018156 - DNA, 25 bp, Homo sapien
agcaaggaaccaaaagctttatgaa

SEQ ID NO: 3018157 - DNA, 25 bp, Homo sapien
ttcatggatacgtttccctccttct

SEQ ID NO: 3018158 - DNA, 25 bp, Homo sapien
cagttcatggatacgtttccctcct

SEQ ID NO: 3018159 - DNA, 25 bp, Homo sapien
tccagttcatggatacgtttccctc

SEQ ID NO: 3018160 - DNA, 25 bp, Homo sapien
ttctccagttcatggatacgtttcc

SEQ ID NO: 3018161 - DNA, 25 bp, Homo sapien
gtttctagctgatccaaagattcct

SEQ ID NO: 3018162 - DNA, 25 bp, Homo sapien
tcagtgccaagggaacgggcctcct

SEQ ID NO: 3018163 - DNA, 25 bp, Homo sapien
ctcataggcattctttatcttgaac

SEQ ID NO: 3018164 - DNA, 25 bp, Homo sapien
aggcctcaagctcagcatgcgtttc

SEQ ID NO: 3018165 - DNA, 25 bp, Homo sapien
tgcagccgctgcttcgtcttttcga

SEQ ID NO: 3018166 - DNA, 25 bp, Homo sapien
cagccgctgcttcgtcttttcgagg

SEQ ID NO: 3018167 - DNA, 25 bp, Homo sapien
atcaagcatgaggtcctcgacctca

SEQ ID NO: 3018168 - DNA, 25 bp, Homo sapien
gaggtcctcgacctcattctgcagc

SEQ ID NO: 3018169 - DNA, 25 bp, Homo sapien
tggtcctccattgggcaacctcggt

SEQ ID NO: 3018170 - DNA, 25 bp, Homo sapien
ccattgggcaacctcggtgttggcc

SEQ ID NO: 3018171 - DNA, 25 bp, Homo sapien
tcctccattgggcaacctcggtgtt

SEQ ID NO: 3018172 - DNA, 25 bp, Homo sapien
ttggtcctccattgggcaacctcgg

SEQ ID NO: 3018173 - DNA, 25 bp, Homo sapien
gtttgcctcttgataactgagacac

SEQ ID NO: 3018174 - DNA, 25 bp, Homo sapien
tttgcctcttgataactgagacacc

SEQ ID NO: 3018175 - DNA, 25 bp, Homo sapien
tgtttgcctcttgataactgagaca

SEQ ID NO: 3018176 - DNA, 25 bp, Homo sapien
ccctgaagctgcacagaagagggga

SEQ ID NO: 3018177 - DNA, 25 bp, Homo sapien
tgaagctgcacagaagaggggagag

SEQ ID NO: 3018178 - DNA, 25 bp, Homo sapien
ccaccctgaagctgcacagaagagg

SEQ ID NO: 3018179 - DNA, 25 bp, Homo sapien
tctccaccctgaagctgcacagaag

SEQ ID NO: 3018180 - DNA, 25 bp, Homo sapien
tctgcgcagtcaggtcattgatcag

SEQ ID NO: 3018181 - DNA, 25 bp, Homo sapien
gatttcagttcactcagttggtcct

SEQ ID NO: 3018182 - DNA, 25 bp, Homo sapien
ctcagttggtcctctagagtccggc

SEQ ID NO: 3018183 - DNA, 25 bp, Homo sapien
gagtccggcacattttctctaggtt

SEQ ID NO: 3018184 - DNA, 25 bp, Homo sapien
ataacaatttcccagaatttgtagt

SEQ ID NO: 3018185 - DNA, 25 bp, Homo sapien
taacaatttcccagaatttgtagta

SEQ ID NO: 3018186 - DNA, 25 bp, Homo sapien
tcaataacaatttcccagaatttgt

SEQ ID NO: 3018187 - DNA, 25 bp, Homo sapien
caataacaatttcccagaatttgta

SEQ ID NO: 3018188 - DNA, 25 bp, Homo sapien
cattactagcaaggtcatcaatctc

SEQ ID NO: 3018189 - DNA, 25 bp, Homo sapien
cttggctttggagaccgtttctaca

SEQ ID NO: 3018190 - DNA, 25 bp, Homo sapien
tggagaccgtttctacattactagc

SEQ ID NO: 3018191 - DNA, 25 bp, Homo sapien
gaccgtttctacattactagcaagg

SEQ ID NO: 3018192 - DNA, 25 bp, Homo sapien
tcaatcttgctttgcagattgctga

SEQ ID NO: 3018193 - DNA, 25 bp, Homo sapien
tgaatgccaagtgcctgttcatctt

SEQ ID NO: 3018194 - DNA, 25 bp, Homo sapien
tttcttctgcaattgaatgccaagt

SEQ ID NO: 3018195 - DNA, 25 bp, Homo sapien
gctttgcagattgctgatttcaaac

SEQ ID NO: 3018196 - DNA, 25 bp, Homo sapien
gattcttgggccaacttcaagtcac

SEQ ID NO: 3018197 - DNA, 25 bp, Homo sapien
ttcctcttagccctttctaggtcca

SEQ ID NO: 3018198 - DNA, 25 bp, Homo sapien
cctttctaggtccatgcgaagtttc

SEQ ID NO: 3018199 - DNA, 25 bp, Homo sapien
ggattcttgggccaacttcaagtca

SEQ ID NO: 3018200 - DNA, 25 bp, Homo sapien
cttgttgttcaagtttgattttagc

SEQ ID NO: 3018201 - DNA, 25 bp, Homo sapien
caatggtttcatccagacctgccat

SEQ ID NO: 3018202 - DNA, 25 bp, Homo sapien
ttagctttggtcagggtgttgactt

SEQ ID NO: 3018203 - DNA, 25 bp, Homo sapien
tgattttagctttggtcagggtgtt

SEQ ID NO: 3018204 - DNA, 25 bp, Homo sapien
ggttttgattagctggtcacacctt

SEQ ID NO: 3018205 - DNA, 25 bp, Homo sapien
ttttggttttgattagctggtcaca

SEQ ID NO: 3018206 - DNA, 25 bp, Homo sapien
tggttttgattagctggtcacacct

SEQ ID NO: 3018207 - DNA, 25 bp, Homo sapien
ttggttttgattagctggtcacacc

SEQ ID NO: 3018208 - DNA, 25 bp, Homo sapien
ctgcatcagccaagccttcggcttc

SEQ ID NO: 3018209 - DNA, 25 bp, Homo sapien
ccttccaatgagtgtctcccttgca

SEQ ID NO: 3018210 - DNA, 25 bp, Homo sapien
ttttccttccaatgagtgtctccct

SEQ ID NO: 3018211 - DNA, 25 bp, Homo sapien
cttccaatgagtgtctcccttgcaa

SEQ ID NO: 3018212 - DNA, 25 bp, Homo sapien
ttccttccaatgagtgtctcccttg

SEQ ID NO: 3018213 - DNA, 25 bp, Homo sapien
ccacaatggccaaagttctagcacc

SEQ ID NO: 3018214 - DNA, 25 bp, Homo sapien
tgcatcctggttagtgataccaagg

SEQ ID NO: 3018215 - DNA, 25 bp, Homo sapien
cacaatggccaaagttctagcacct

SEQ ID NO: 3018216 - DNA, 25 bp, Homo sapien
gtgataccaagggtgatattccaac

SEQ ID NO: 3018217 - DNA, 25 bp, Homo sapien
agcctgaacttggagctgcaagtca

SEQ ID NO: 3018218 - DNA, 25 bp, Homo sapien
ctgacttggcaagttcgtctttaat

SEQ ID NO: 3018219 - DNA, 25 bp, Homo sapien
gaaggatctgatattgtactggata

SEQ ID NO: 3018220 - DNA, 25 bp, Homo sapien
ttttctttcaacagcgtcaccatct

SEQ ID NO: 3018221 - DNA, 25 bp, Homo sapien
tcctctggtactccactcttgccaa

SEQ ID NO: 3018222 - DNA, 25 bp, Homo sapien
accatcctctggtactccactcttg

SEQ ID NO: 3018223 - DNA, 25 bp, Homo sapien
tggtactccactcttgccaagaacc

SEQ ID NO: 3018224 - DNA, 25 bp, Homo sapien
ctctggtactccactcttgccaaga

SEQ ID NO: 3018225 - DNA, 25 bp, Homo sapien
cctgggttcgggtaatcagctgggc

SEQ ID NO: 3018226 - DNA, 25 bp, Homo sapien
tggcctgggttcgggtaatcagctg

SEQ ID NO: 3018227 - DNA, 25 bp, Homo sapien
tgggttcgggtaatcagctgggcca

SEQ ID NO: 3018228 - DNA, 25 bp, Homo sapien
gttcgggtaatcagctgggccagct

SEQ ID NO: 3018229 - DNA, 25 bp, Homo sapien
tatactgggtgtggtcaatgtcgat

SEQ ID NO: 3018230 - DNA, 25 bp, Homo sapien
aatgtcgatggatgcaaggagcttc

SEQ ID NO: 3018231 - DNA, 25 bp, Homo sapien
gtgtggtcaatgtcgatggatgcaa

SEQ ID NO: 3018232 - DNA, 25 bp, Homo sapien
tttatactgggtgtggtcaatgtcg

SEQ ID NO: 3018233 - DNA, 25 bp, Homo sapien
gaagtacatatagcttttaacaact

SEQ ID NO: 3018234 - DNA, 25 bp, Homo sapien
tgccttccagcacaccgttacacct

SEQ ID NO: 3018235 - DNA, 25 bp, Homo sapien
tttgaagtctgcataaaggattctg

SEQ ID NO: 3018236 - DNA, 25 bp, Homo sapien
ccagcacaccgttacacctcagctg

SEQ ID NO: 3018237 - DNA, 25 bp, Homo sapien
gatgccttccagcacaccgttacac

SEQ ID NO: 3018238 - DNA, 25 bp, Homo sapien
tgatacacctcacaaagtgaggatg

SEQ ID NO: 3018239 - DNA, 25 bp, Homo sapien
aggatgggtactcctgaggttggtc

SEQ ID NO: 3018240 - DNA, 25 bp, Homo sapien
gatgggtactcctgaggttggtcat

SEQ ID NO: 3018241 - DNA, 25 bp, Homo sapien
ctcattggggatgatacacctcaca

SEQ ID NO: 3018242 - DNA, 25 bp, Homo sapien
aggaaaaatcctgtcattttaggct

SEQ ID NO: 3018243 - DNA, 25 bp, Homo sapien
caggaaaaatcctgtcattttaggc

SEQ ID NO: 3018244 - DNA, 25 bp, Homo sapien
tgtaaaaccaggaaaaatcctgtca

SEQ ID NO: 3018245 - DNA, 25 bp, Homo sapien
accaggaaaaatcctgtcattttag

SEQ ID NO: 3018246 - DNA, 25 bp, Homo sapien
ctagacatggatatgagcagtcatt

SEQ ID NO: 3018247 - DNA, 25 bp, Homo sapien
gacatggatatgagcagtcattggt

SEQ ID NO: 3018248 - DNA, 25 bp, Homo sapien
atggatatgagcagtcattggtgtc

SEQ ID NO: 3018249 - DNA, 25 bp, Homo sapien
tagacatggatatgagcagtcattg

SEQ ID NO: 3018250 - DNA, 25 bp, Homo sapien
aaaagggcagacactgtctggaaag

SEQ ID NO: 3018251 - DNA, 25 bp, Homo sapien
tgaaaagggcagacactgtctggaa

SEQ ID NO: 3018252 - DNA, 25 bp, Homo sapien
aagggcagacactgtctggaaagaa

SEQ ID NO: 3018253 - DNA, 25 bp, Homo sapien
tctgaaaagggcagacactgtctgg

SEQ ID NO: 3018254 - DNA, 25 bp, Homo sapien
ttcttggcccctccaccagctccct

SEQ ID NO: 3018255 - DNA, 25 bp, Homo sapien
acctttcttggcccctccaccagct

SEQ ID NO: 3018256 - DNA, 25 bp, Homo sapien
ctttcttggcccctccaccagctcc

SEQ ID NO: 3018257 - DNA, 25 bp, Homo sapien
cacctttcttggcccctccaccagc

SEQ ID NO: 3018258 - DNA, 25 bp, Homo sapien
aatacctagagagtattattaacat

SEQ ID NO: 3018259 - DNA, 25 bp, Homo sapien
cattttgtaatacctagagagtatt

SEQ ID NO: 3018260 - DNA, 25 bp, Homo sapien
gtaatacctagagagtattattaac

SEQ ID NO: 3018261 - DNA, 25 bp, Homo sapien
ttgtaatacctagagagtattatta

SEQ ID NO: 3018262 - DNA, 25 bp, Homo sapien
tgtagtccacaacaccagcatagtg

SEQ ID NO: 3018263 - DNA, 25 bp, Homo sapien
cagccagtaatgttgtagtccacaa

SEQ ID NO: 3018264 - DNA, 25 bp, Homo sapien
ggtacagtccaaccacggtctcatt

SEQ ID NO: 3018265 - DNA, 25 bp, Homo sapien
tcattgcagacttctggtacagtcc

SEQ ID NO: 3018266 - DNA, 25 bp, Homo sapien
tctcgatgagctcgatgcaggcagc

SEQ ID NO: 3018267 - DNA, 25 bp, Homo sapien
agccaggtccatcccgaagtcgatg

SEQ ID NO: 3018268 - DNA, 25 bp, Homo sapien
cccgaagtcgatgaacgtccactcg

SEQ ID NO: 3018269 - DNA, 25 bp, Homo sapien
ggtccatcccgaagtcgatgaacgt

SEQ ID NO: 3018270 - DNA, 25 bp, Homo sapien
gccagagcacctactgcgttggaca

SEQ ID NO: 3018271 - DNA, 25 bp, Homo sapien
ttggccagagcacctactgcgttgg

SEQ ID NO: 3018272 - DNA, 25 bp, Homo sapien
ccagagcacctactgcgttggacac

SEQ ID NO: 3018273 - DNA, 25 bp, Homo sapien
tggccagagcacctactgcgttgga

SEQ ID NO: 3018274 - DNA, 25 bp, Homo sapien
tctgcagagttcagactctggaggt

SEQ ID NO: 3018275 - DNA, 25 bp, Homo sapien
ctgcagagttcagactctggaggta

SEQ ID NO: 3018276 - DNA, 25 bp, Homo sapien
cataatgcatcacagcccccgtgag

SEQ ID NO: 3018277 - DNA, 25 bp, Homo sapien
cagcccccgtgagcttgtaaatgga

SEQ ID NO: 3018278 - DNA, 25 bp, Homo sapien
ctcctcacgctgcttttgcttaaat

SEQ ID NO: 3018279 - DNA, 25 bp, Homo sapien
cgtgagcttgtaaatggagaccttt

SEQ ID NO: 3018280 - DNA, 25 bp, Homo sapien
tccaattttcttgtgttctacttac

SEQ ID NO: 3018281 - DNA, 25 bp, Homo sapien
taattccaattttcttgtgttctac

SEQ ID NO: 3018282 - DNA, 25 bp, Homo sapien
cataataattccaattttcttgtgt

SEQ ID NO: 3018283 - DNA, 25 bp, Homo sapien
aattccaattttcttgtgttctact

SEQ ID NO: 3018284 - DNA, 25 bp, Homo sapien
gtaatcatatgggttcgtggtaatc

SEQ ID NO: 3018285 - DNA, 25 bp, Homo sapien
cacactgatctccccttgactgaca

SEQ ID NO: 3018286 - DNA, 25 bp, Homo sapien
atcatatgggttcgtggtaatcaga

SEQ ID NO: 3018287 - DNA, 25 bp, Homo sapien
taatcatatgggttcgtggtaatca

SEQ ID NO: 3018288 - DNA, 25 bp, Homo sapien
gccttaagctggaaaacaactctag

SEQ ID NO: 3018289 - DNA, 25 bp, Homo sapien
tatgataacttctctcagccttaag

SEQ ID NO: 3018290 - DNA, 25 bp, Homo sapien
cgatgtaatctggtaaaaaatatga

SEQ ID NO: 3018291 - DNA, 25 bp, Homo sapien
tggtttcttattcgatgtaatctgg

SEQ ID NO: 3018292 - DNA, 25 bp, Homo sapien
ccagtagtgccaaagtggattctga

SEQ ID NO: 3018293 - DNA, 25 bp, Homo sapien
agtagtgccaaagtggattctgatg

SEQ ID NO: 3018294 - DNA, 25 bp, Homo sapien
cagtagtgccaaagtggattctgat

SEQ ID NO: 3018295 - DNA, 25 bp, Homo sapien
tccagtagtgccaaagtggattctg

SEQ ID NO: 3018296 - DNA, 25 bp, Homo sapien
aagcgagaggagttgtcattcctca

SEQ ID NO: 3018297 - DNA, 25 bp, Homo sapien
aaagcgagaggagttgtcattcctc

SEQ ID NO: 3018298 - DNA, 25 bp, Homo sapien
agcgagaggagttgtcattcctcac

SEQ ID NO: 3018299 - DNA, 25 bp, Homo sapien
cagtagggggttggcactgatgatt

SEQ ID NO: 3018300 - DNA, 25 bp, Homo sapien
cctccagtagggggttggcactgat

SEQ ID NO: 3018301 - DNA, 25 bp, Homo sapien
tagggggttggcactgatgatttga

SEQ ID NO: 3018302 - DNA, 25 bp, Homo sapien
tccagtagggggttggcactgatga

SEQ ID NO: 3018303 - DNA, 25 bp, Homo sapien
catctggggcttgggaatttcctac

SEQ ID NO: 3018304 - DNA, 25 bp, Homo sapien
ttgcatctggggcttgggaatttcc

SEQ ID NO: 3018305 - DNA, 25 bp, Homo sapien
ctgcaaaggcaagagcagtccttgc

SEQ ID NO: 3018306 - DNA, 25 bp, Homo sapien
gcaaaggcaagagcagtccttgcat

SEQ ID NO: 3018307 - DNA, 25 bp, Homo sapien
ctgagagtcccgacagagtctggat

SEQ ID NO: 3018308 - DNA, 25 bp, Homo sapien
gagagtcccgacagagtctggattc

SEQ ID NO: 3018309 - DNA, 25 bp, Homo sapien
agagtcccgacagagtctggattct

SEQ ID NO: 3018310 - DNA, 25 bp, Homo sapien
tgagagtcccgacagagtctggatt

SEQ ID NO: 3018311 - DNA, 25 bp, Homo sapien
aactgcaattgttgcaaagtactgg

SEQ ID NO: 3018312 - DNA, 25 bp, Homo sapien
tgcaattgttgcaaagtactggatg

SEQ ID NO: 3018313 - DNA, 25 bp, Homo sapien
atcaggattgactgattctctcggt

SEQ ID NO: 3018314 - DNA, 25 bp, Homo sapien
tgatcaggattgactgattctctcg

SEQ ID NO: 3018315 - DNA, 25 bp, Homo sapien
gtgatcaggattgactgattctctc

SEQ ID NO: 3018316 - DNA, 25 bp, Homo sapien
gatcaggattgactgattctctcgg

SEQ ID NO: 3018317 - DNA, 25 bp, Homo sapien
cgctttttgcctcggtaggctgtca

SEQ ID NO: 3018318 - DNA, 25 bp, Homo sapien
tcctggcgctttttgcctcggtagg

SEQ ID NO: 3018319 - DNA, 25 bp, Homo sapien
ttttgcctcggtaggctgtcaccac

SEQ ID NO: 3018320 - DNA, 25 bp, Homo sapien
ggcctcctggcgctttttgcctcgg

SEQ ID NO: 3018321 - DNA, 25 bp, Homo sapien
cagtaagggaatggttaggtgaact

SEQ ID NO: 3018322 - DNA, 25 bp, Homo sapien
ggacataagctaagtggccaacagt

SEQ ID NO: 3018323 - DNA, 25 bp, Homo sapien
gaaagtatacagcaacactcaggaa

SEQ ID NO: 3018324 - DNA, 25 bp, Homo sapien
taagttataaggaaacaggacacga

SEQ ID NO: 3018325 - DNA, 25 bp, Homo sapien
tgacaattggttcaagacaagcacc

SEQ ID NO: 3018326 - DNA, 25 bp, Homo sapien
tgaggaatccccagtctatgtagga

SEQ ID NO: 3018327 - DNA, 25 bp, Homo sapien
tatgtgcagacctttaccagacagt

SEQ ID NO: 3018328 - DNA, 25 bp, Homo sapien
gacattccagatagaagggaccaga

SEQ ID NO: 3018329 - DNA, 25 bp, Homo sapien
cactctggatgattctgcggctgga

SEQ ID NO: 3018330 - DNA, 25 bp, Homo sapien
gaggatgattatacagagcactggc

SEQ ID NO: 3018331 - DNA, 25 bp, Homo sapien
tataagtagtaactgctcaaatgcc

SEQ ID NO: 3018332 - DNA, 25 bp, Homo sapien
ctagtcaacatggacagcggccttc

SEQ ID NO: 3018333 - DNA, 25 bp, Homo sapien
ggctcatgcagatgagtcatcatgg

SEQ ID NO: 3018334 - DNA, 25 bp, Homo sapien
gaagacctgatcatccttcactgtc

SEQ ID NO: 3018335 - DNA, 25 bp, Homo sapien
cgttctttgaggttgtacagcacag

SEQ ID NO: 3018336 - DNA, 25 bp, Homo sapien
catggccatatcctcgatcttgtca

SEQ ID NO: 3018337 - DNA, 25 bp, Homo sapien
aaacagccaattctgagtctgaact

SEQ ID NO: 3018338 - DNA, 25 bp, Homo sapien
acagccaattctgagtctgaactca

SEQ ID NO: 3018339 - DNA, 25 bp, Homo sapien
gacaaaggattctttgggctccgcc

SEQ ID NO: 3018340 - DNA, 25 bp, Homo sapien
tggatggtccctttgacaaaggatt

SEQ ID NO: 3018341 - DNA, 25 bp, Homo sapien
aagatgtagcctgggagtgagacag

SEQ ID NO: 3018342 - DNA, 25 bp, Homo sapien
gaagatgtagcctgggagtgagaca

SEQ ID NO: 3018343 - DNA, 25 bp, Homo sapien
caaaattcatagaggtaaaacgtgc

SEQ ID NO: 3018344 - DNA, 25 bp, Homo sapien
cacttgattagttgaccaaaaagag

SEQ ID NO: 3018345 - DNA, 25 bp, Homo sapien
ggtaaaacgtgcagttccagaagga

SEQ ID NO: 3018346 - DNA, 25 bp, Homo sapien
tatggcatggcttgctattgtaaac

SEQ ID NO: 3018347 - DNA, 25 bp, Homo sapien
gacactgggcggtgtgaccagtgtc

SEQ ID NO: 3018348 - DNA, 25 bp, Homo sapien
gctgacactgggcggtgtgaccagt

SEQ ID NO: 3018349 - DNA, 25 bp, Homo sapien
tgctgacactgggcggtgtgaccag

SEQ ID NO: 3018350 - DNA, 25 bp, Homo sapien
tgacactgggcggtgtgaccagtgt

SEQ ID NO: 3018351 - DNA, 25 bp, Homo sapien
ctttttaaagcaggacgagtcagcc

SEQ ID NO: 3018352 - DNA, 25 bp, Homo sapien
tttttaaagcaggacgagtcagcct

SEQ ID NO: 3018353 - DNA, 25 bp, Homo sapien
ttttaaagcaggacgagtcagcctc

SEQ ID NO: 3018354 - DNA, 25 bp, Homo sapien
ctggcattttatagcctgtaaagtg

SEQ ID NO: 3018355 - DNA, 25 bp, Homo sapien
gtacggatagcacagataaattctc

SEQ ID NO: 3018356 - DNA, 25 bp, Homo sapien
gtaaagtgagcctctttcaacagct

SEQ ID NO: 3018357 - DNA, 25 bp, Homo sapien
aacagctctgaagtacggatagcac

SEQ ID NO: 3018358 - DNA, 25 bp, Homo sapien
tgtagagtactggccatcaaatagc

SEQ ID NO: 3018359 - DNA, 25 bp, Homo sapien
ctgtagagtactggccatcaaatag

SEQ ID NO: 3018360 - DNA, 25 bp, Homo sapien
tagagtactggccatcaaatagctc

SEQ ID NO: 3018361 - DNA, 25 bp, Homo sapien
gagtactggccatcaaatagctccc

SEQ ID NO: 3018362 - DNA, 25 bp, Homo sapien
taaacagggtgattcctcccccaga

SEQ ID NO: 3018363 - DNA, 25 bp, Homo sapien
acagggtgattcctcccccagaaat

SEQ ID NO: 3018364 - DNA, 25 bp, Homo sapien
cttgtaaatttgagctggggacaca

SEQ ID NO: 3018365 - DNA, 25 bp, Homo sapien
tctggaacttgtaaatttgagctgg

SEQ ID NO: 3018366 - DNA, 25 bp, Homo sapien
gaggagtgagtgaatatagcatatg

SEQ ID NO: 3018367 - DNA, 25 bp, Homo sapien
tttcgctgacatcttaatacttgga

SEQ ID NO: 3018368 - DNA, 25 bp, Homo sapien
caccagaaggtagattttcgctgac

SEQ ID NO: 3018369 - DNA, 25 bp, Homo sapien
tgaatatagcatatggtttgctgag

SEQ ID NO: 3018370 - DNA, 25 bp, Homo sapien
caatttcagcgtgtttggaccagca

SEQ ID NO: 3018371 - DNA, 25 bp, Homo sapien
tgagtgctgccgaggactgacagac

SEQ ID NO: 3018372 - DNA, 25 bp, Homo sapien
taaaatgaatcctccggttgtcacc

SEQ ID NO: 3018373 - DNA, 25 bp, Homo sapien
gggtgacctgtagcctttccagaag

SEQ ID NO: 3018374 - DNA, 25 bp, Homo sapien
caacagtgattttcttgacagcacc

SEQ ID NO: 3018375 - DNA, 25 bp, Homo sapien
ctttacagttgattggaagccaatc

SEQ ID NO: 3018376 - DNA, 25 bp, Homo sapien
gcttagccactgtacgcagatttgg

SEQ ID NO: 3018377 - DNA, 25 bp, Homo sapien
tgaagcggaaccttgtgattatgtc

SEQ ID NO: 3018378 - DNA, 25 bp, Homo sapien
tggaagcttccatcggtgcgtgtcg

SEQ ID NO: 3018379 - DNA, 25 bp, Homo sapien
ttccatcggtgcgtgtcggccgcaa

SEQ ID NO: 3018380 - DNA, 25 bp, Homo sapien
gtgtcggccgcaatcctccaagtac

SEQ ID NO: 3018381 - DNA, 25 bp, Homo sapien
atcggtgcgtgtcggccgcaatcct

SEQ ID NO: 3018382 - DNA, 25 bp, Homo sapien
tccaccgcccgcatagtataacttg

SEQ ID NO: 3018383 - DNA, 25 bp, Homo sapien
ccgcccgcatagtataacttgaggg

SEQ ID NO: 3018384 - DNA, 25 bp, Homo sapien
tgtcttccaccgcccgcatagtata

SEQ ID NO: 3018385 - DNA, 25 bp, Homo sapien
cgcatagtataacttgagggcttcc

SEQ ID NO: 3018386 - DNA, 25 bp, Homo sapien
tgtggcacagcacggctctggactt

SEQ ID NO: 3018387 - DNA, 25 bp, Homo sapien
ggtgttcctgcctttatgagcctaa

SEQ ID NO: 3018388 - DNA, 25 bp, Homo sapien
tcaaggttagtgcaaaaaacaccca

SEQ ID NO: 3018389 - DNA, 25 bp, Homo sapien
tatttttcacccacaccttgcagga

SEQ ID NO: 3018390 - DNA, 25 bp, Homo sapien
gctgctatggatgctcgtcttgccc

SEQ ID NO: 3018391 - DNA, 25 bp, Homo sapien
aggcccaaaataggcacagctgcta

SEQ ID NO: 3018392 - DNA, 25 bp, Homo sapien
ctatggatgctcgtcttgccctcct

SEQ ID NO: 3018393 - DNA, 25 bp, Homo sapien
caggcccaaaataggcacagctgct

SEQ ID NO: 3018394 - DNA, 25 bp, Homo sapien
agcagtgtgaattgcaaacagccat

SEQ ID NO: 3018395 - DNA, 25 bp, Homo sapien
ggcctttgccaggacgctcgatcct

SEQ ID NO: 3018396 - DNA, 25 bp, Homo sapien
gacgctcgatcctctcttcgggctt

SEQ ID NO: 3018397 - DNA, 25 bp, Homo sapien
tttgccaggacgctcgatcctctct

SEQ ID NO: 3018398 - DNA, 25 bp, Homo sapien
caaagtttattgcatgtgaaaaaga

SEQ ID NO: 3018399 - DNA, 25 bp, Homo sapien
tcaatggtcaggaatcaagaaaata

SEQ ID NO: 3018400 - DNA, 25 bp, Homo sapien
ttaagtatcaatggtcaggaatcaa

SEQ ID NO: 3018401 - DNA, 25 bp, Homo sapien
aagcaaagtttattgcatgtgaaaa

SEQ ID NO: 3018402 - DNA, 25 bp, Homo sapien
cactcttcactctcgtggaccacca

SEQ ID NO: 3018403 - DNA, 25 bp, Homo sapien
actcttcactctcgtggaccaccat

SEQ ID NO: 3018404 - DNA, 25 bp, Homo sapien
tcactcttcactctcgtggaccacc

SEQ ID NO: 3018405 - DNA, 25 bp, Homo sapien
gacttgagattctgcgatatccgca

SEQ ID NO: 3018406 - DNA, 25 bp, Homo sapien
tgaagtctcgagtcttagcgcggag

SEQ ID NO: 3018407 - DNA, 25 bp, Homo sapien
tagcgcggagcttgttgacttgaga

SEQ ID NO: 3018408 - DNA, 25 bp, Homo sapien
gagcctttcggaatttggtgagatg

SEQ ID NO: 3018409 - DNA, 25 bp, Homo sapien
gttatatcagcacgcgcctctctca

SEQ ID NO: 3018410 - DNA, 25 bp, Homo sapien
caggcaggttatatcagcacgcgcc

SEQ ID NO: 3018411 - DNA, 25 bp, Homo sapien
aggttatatcagcacgcgcctctct

SEQ ID NO: 3018412 - DNA, 25 bp, Homo sapien
gcaggttatatcagcacgcgcctct

SEQ ID NO: 3018413 - DNA, 25 bp, Homo sapien
aaacagcacggtctgcctgccgcag

SEQ ID NO: 3018414 - DNA, 25 bp, Homo sapien
tgccgcagtcagcacctatctcact

SEQ ID NO: 3018415 - DNA, 25 bp, Homo sapien
cgcagtcagcacctatctcacttac

SEQ ID NO: 3018416 - DNA, 25 bp, Homo sapien
tgcctgccgcagtcagcacctatct

SEQ ID NO: 3018417 - DNA, 25 bp, Homo sapien
tatccaccagatcctgcaatctcag

SEQ ID NO: 3018418 - DNA, 25 bp, Homo sapien
ttgtaggacttgactttcacttgca

SEQ ID NO: 3018419 - DNA, 25 bp, Homo sapien
tccgcctgcctcttgtaggacttga

SEQ ID NO: 3018420 - DNA, 25 bp, Homo sapien
ttgcagtttatccaccagatcctgc

SEQ ID NO: 3018421 - DNA, 25 bp, Homo sapien
atttgcacacggcatgggcagcttt

SEQ ID NO: 3018422 - DNA, 25 bp, Homo sapien
cagatttgcacacggcatgggcagc

SEQ ID NO: 3018423 - DNA, 25 bp, Homo sapien
atgagaaagtgggaatgtcactgga

SEQ ID NO: 3018424 - DNA, 25 bp, Homo sapien
gggcagatttgcacacggcatgggc

SEQ ID NO: 3018425 - DNA, 25 bp, Homo sapien
agctccttgaccctccgctcatact

SEQ ID NO: 3018426 - DNA, 25 bp, Homo sapien
tccgctcatacttcctcaggccctt

SEQ ID NO: 3018427 - DNA, 25 bp, Homo sapien
tcctcaggcccttaacagactctgt

SEQ ID NO: 3018428 - DNA, 25 bp, Homo sapien
caggcccttaacagactctgtgttc

SEQ ID NO: 3018429 - DNA, 25 bp, Homo sapien
ccttcaccgtctgttccaggttctt

SEQ ID NO: 3018430 - DNA, 25 bp, Homo sapien
tcggcctcatctagacgatgctgca

SEQ ID NO: 3018431 - DNA, 25 bp, Homo sapien
cagctgctcggcctcatctagacga

SEQ ID NO: 3018432 - DNA, 25 bp, Homo sapien
cttcaccgtctgttccaggttcttc

SEQ ID NO: 3018433 - DNA, 25 bp, Homo sapien
ctgctggcatcttctacctcactct

SEQ ID NO: 3018434 - DNA, 25 bp, Homo sapien
cctcagcgttccttgcatccctgct

SEQ ID NO: 3018435 - DNA, 25 bp, Homo sapien
ttctcctcagcgttccttgcatccc

SEQ ID NO: 3018436 - DNA, 25 bp, Homo sapien
ggccttctcctcagcgttccttgca

SEQ ID NO: 3018437 - DNA, 25 bp, Homo sapien
agcagctgcaccctctcgttggagt

SEQ ID NO: 3018438 - DNA, 25 bp, Homo sapien
aggagctcctgttccgccagtttcc

SEQ ID NO: 3018439 - DNA, 25 bp, Homo sapien
cgtctgctccagagtagcccgcagc

SEQ ID NO: 3018440 - DNA, 25 bp, Homo sapien
cctctcgttggagtccaggagctcc

SEQ ID NO: 3018441 - DNA, 25 bp, Homo sapien
tgtcaattcaagctggattcggagg

SEQ ID NO: 3018442 - DNA, 25 bp, Homo sapien
gtggctcagctggatctcgatttca

SEQ ID NO: 3018443 - DNA, 25 bp, Homo sapien
tcctgaggtgtttgagggtctccgc

SEQ ID NO: 3018444 - DNA, 25 bp, Homo sapien
tccagggcgctctgcatggtttcca

SEQ ID NO: 3018445 - DNA, 25 bp, Homo sapien
tctgcttcctcgagagccagctgga

SEQ ID NO: 3018446 - DNA, 25 bp, Homo sapien
cctcgagagccagctggatatcagc

SEQ ID NO: 3018447 - DNA, 25 bp, Homo sapien
tctccagttcatggatggttttgcc

SEQ ID NO: 3018448 - DNA, 25 bp, Homo sapien
tttcagcaatttgttctgtgagatc

SEQ ID NO: 3018449 - DNA, 25 bp, Homo sapien
tcacagtttcaagttgatctaaggc

SEQ ID NO: 3018450 - DNA, 25 bp, Homo sapien
taaggcttcctcgtaggcatttttc

SEQ ID NO: 3018451 - DNA, 25 bp, Homo sapien
gggactccttcagggatgcctccag

SEQ ID NO: 3018452 - DNA, 25 bp, Homo sapien
gctcagtgctcaaggagcgggactc

SEQ ID NO: 3018453 - DNA, 25 bp, Homo sapien
tgaaacaccggacggaagttctctc

SEQ ID NO: 3018454 - DNA, 25 bp, Homo sapien
cggaagttctctccgtttctgagct

SEQ ID NO: 3018455 - DNA, 25 bp, Homo sapien
cggacggaagttctctccgtttctg

SEQ ID NO: 3018456 - DNA, 25 bp, Homo sapien
ctgaaacaccggacggaagttctct

SEQ ID NO: 3018457 - DNA, 25 bp, Homo sapien
gctctttcaacatcaaccatcagat

SEQ ID NO: 3018458 - DNA, 25 bp, Homo sapien
tcttgaaggcgctgagcaagttttt

SEQ ID NO: 3018459 - DNA, 25 bp, Homo sapien
ttcttgtccagagcggcggccaagg

SEQ ID NO: 3018460 - DNA, 25 bp, Homo sapien
caacctgttcctcggaatcttgaag

SEQ ID NO: 3018461 - DNA, 25 bp, Homo sapien
gaagcagctgttatttcagtttcca

SEQ ID NO: 3018462 - DNA, 25 bp, Homo sapien
agagaagcagctgttatttcagttt

SEQ ID NO: 3018463 - DNA, 25 bp, Homo sapien
cagctgttatttcagtttccatcca

SEQ ID NO: 3018464 - DNA, 25 bp, Homo sapien
agcagctgttatttcagtttccatc

SEQ ID NO: 3018465 - DNA, 25 bp, Homo sapien
cgtctcgtatttggttctccactgg

SEQ ID NO: 3018466 - DNA, 25 bp, Homo sapien
ctgtgcgctggatggcgtccgtctc

SEQ ID NO: 3018467 - DNA, 25 bp, Homo sapien
tccgtctcgtatttggttctccact

SEQ ID NO: 3018468 - DNA, 25 bp, Homo sapien
tctcgtatttggttctccactgggc

SEQ ID NO: 3018469 - DNA, 25 bp, Homo sapien
atactgttcccgcagcaggtcacag

SEQ ID NO: 3018470 - DNA, 25 bp, Homo sapien
ctcatactgttcccgcagcaggtca

SEQ ID NO: 3018471 - DNA, 25 bp, Homo sapien
caggtcacagtcgtggcgggaggac

SEQ ID NO: 3018472 - DNA, 25 bp, Homo sapien
cgcagcaggtcacagtcgtggcggg

SEQ ID NO: 3018473 - DNA, 25 bp, Homo sapien
tcttctgtttgctgggtaaaggctt

SEQ ID NO: 3018474 - DNA, 25 bp, Homo sapien
agttgggatactatgctttcttttt

SEQ ID NO: 3018475 - DNA, 25 bp, Homo sapien
tctgtttgctgggtaaaggcttgct

SEQ ID NO: 3018476 - DNA, 25 bp, Homo sapien
tgctcctggaaagttgggatactat

SEQ ID NO: 3018477 - DNA, 25 bp, Homo sapien
cattcttgcccctggcctcacttaa

SEQ ID NO: 3018478 - DNA, 25 bp, Homo sapien
cagggttcggcagattttttccaga

SEQ ID NO: 3018479 - DNA, 25 bp, Homo sapien
ggcctcacttaactgatcctccagg

SEQ ID NO: 3018480 - DNA, 25 bp, Homo sapien
tctgcaaacgagacttctgtgtggt

SEQ ID NO: 3018481 - DNA, 25 bp, Homo sapien
cttagatttcgacacactctccatg

SEQ ID NO: 3018482 - DNA, 25 bp, Homo sapien
tgtttctctgtcttcgcgcgggtgg

SEQ ID NO: 3018483 - DNA, 25 bp, Homo sapien
cgggcatagtcgctgcgctgtttct

SEQ ID NO: 3018484 - DNA, 25 bp, Homo sapien
atgctgctggagaggtcatcgatct

SEQ ID NO: 3018485 - DNA, 25 bp, Homo sapien
ctttgctttgaagttgacaatattc

SEQ ID NO: 3018486 - DNA, 25 bp, Homo sapien
agtgtctgctcatcttccactttgc

SEQ ID NO: 3018487 - DNA, 25 bp, Homo sapien
ttctgaaactggaggcccagtgtct

SEQ ID NO: 3018488 - DNA, 25 bp, Homo sapien
cttccactttgctttgaagttgaca

SEQ ID NO: 3018489 - DNA, 25 bp, Homo sapien
gactcttgagcaagcttcaagtctc

SEQ ID NO: 3018490 - DNA, 25 bp, Homo sapien
caggtctactcggagcttcttttct

SEQ ID NO: 3018491 - DNA, 25 bp, Homo sapien
tcttgagcctttcgtccagctgttg

SEQ ID NO: 3018492 - DNA, 25 bp, Homo sapien
ttgtcattctccagatctaatatgg

SEQ ID NO: 3018493 - DNA, 25 bp, Homo sapien
gcaattgtttcatctaacccagaga

SEQ ID NO: 3018494 - DNA, 25 bp, Homo sapien
ttctctctggttaactttgcaattg

SEQ ID NO: 3018495 - DNA, 25 bp, Homo sapien
ttcagcttggaggtcatccaaggcc

SEQ ID NO: 3018496 - DNA, 25 bp, Homo sapien
caaggcctgctggtgcgcctcttgg

SEQ ID NO: 3018497 - DNA, 25 bp, Homo sapien
ttcctcagcatccaacaaattttcg

SEQ ID NO: 3018498 - DNA, 25 bp, Homo sapien
cgagctggaatttggctttgatcag

SEQ ID NO: 3018499 - DNA, 25 bp, Homo sapien
gctttgatcagctgatcgcatcttt

SEQ ID NO: 3018500 - DNA, 25 bp, Homo sapien
ttgatcttggcctcgagctggaatt

SEQ ID NO: 3018501 - DNA, 25 bp, Homo sapien
gacgttcatgaatgagcgaatgttg

SEQ ID NO: 3018502 - DNA, 25 bp, Homo sapien
gcttgacgttcatgaatgagcgaat

SEQ ID NO: 3018503 - DNA, 25 bp, Homo sapien
tcatgaatgagcgaatgttgtactg

SEQ ID NO: 3018504 - DNA, 25 bp, Homo sapien
tgaatgagcgaatgttgtactggat

SEQ ID NO: 3018505 - DNA, 25 bp, Homo sapien
aaaaacaagacattgcttatttctg

SEQ ID NO: 3018506 - DNA, 25 bp, Homo sapien
ctaaaaacaagacattgcttatttc

SEQ ID NO: 3018507 - DNA, 25 bp, Homo sapien
aacaagacattgcttatttctgaga

SEQ ID NO: 3018508 - DNA, 25 bp, Homo sapien
aaacaagacattgcttatttctgag

SEQ ID NO: 3018509 - DNA, 25 bp, Homo sapien
ttctggaattccacacgcatgagga

SEQ ID NO: 3018510 - DNA, 25 bp, Homo sapien
cacacagcttgtgtccgggtgatta

SEQ ID NO: 3018511 - DNA, 25 bp, Homo sapien
tgtgtccgggtgattagtttggcca

SEQ ID NO: 3018512 - DNA, 25 bp, Homo sapien
tggccaggcggtcatcccgcatctc

SEQ ID NO: 3018513 - DNA, 25 bp, Homo sapien
tcagggattgcactggcattcagca

SEQ ID NO: 3018514 - DNA, 25 bp, Homo sapien
ggtcaatatcaatggatgccagaag

SEQ ID NO: 3018515 - DNA, 25 bp, Homo sapien
gaattgtccctcagggattgcactg

SEQ ID NO: 3018516 - DNA, 25 bp, Homo sapien
tcaatggatgccagaagcttttcac

SEQ ID NO: 3018517 - DNA, 25 bp, Homo sapien
ctcatccccaagcatatagaacatg

SEQ ID NO: 3018518 - DNA, 25 bp, Homo sapien
atctcatccccaagcatatagaaca

SEQ ID NO: 3018519 - DNA, 25 bp, Homo sapien
tcatccccaagcatatagaacatgt

SEQ ID NO: 3018520 - DNA, 25 bp, Homo sapien
gtttaaaatcgccatagagaatcct

SEQ ID NO: 3018521 - DNA, 25 bp, Homo sapien
cgccatagagaatcctgtttgggaa

SEQ ID NO: 3018522 - DNA, 25 bp, Homo sapien
accgttacaccgcagctggtgcaga

SEQ ID NO: 3018523 - DNA, 25 bp, Homo sapien
cgttacaccgcagctggtgcagaac

SEQ ID NO: 3018524 - DNA, 25 bp, Homo sapien
tacaacgcacaaaatgagggtgagt

SEQ ID NO: 3018525 - DNA, 25 bp, Homo sapien
taaatttgacatcagcttgttcagg

SEQ ID NO: 3018526 - DNA, 25 bp, Homo sapien
ttgacatcagcttgttcaggttttc

SEQ ID NO: 3018527 - DNA, 25 bp, Homo sapien
tcattgggaattatacaacgcacaa

SEQ ID NO: 3018528 - DNA, 25 bp, Homo sapien
gaaggaagaacccttcttcttggca

SEQ ID NO: 3018529 - DNA, 25 bp, Homo sapien
catccgccgtggcaaacgtggcata

SEQ ID NO: 3018530 - DNA, 25 bp, Homo sapien
tcagtgagaagtgagcctcggccct

SEQ ID NO: 3018531 - DNA, 25 bp, Homo sapien
agacactgtagtccacggtgcccgc

SEQ ID NO: 3018532 - DNA, 25 bp, Homo sapien
gtgcccgcatagtggatcagtgaga

SEQ ID NO: 3018533 - DNA, 25 bp, Homo sapien
caaagtgcagagaggtaaatatgag

SEQ ID NO: 3018534 - DNA, 25 bp, Homo sapien
ctggattgaaggcaaggcaaagtgc

SEQ ID NO: 3018535 - DNA, 25 bp, Homo sapien
aggcaaagtgcagagaggtaaatat

SEQ ID NO: 3018536 - DNA, 25 bp, Homo sapien
aaggcaaggcaaagtgcagagaggt

SEQ ID NO: 3018537 - DNA, 25 bp, Homo sapien
gcagtaatgagcagaagagtctatg

SEQ ID NO: 3018538 - DNA, 25 bp, Homo sapien
aatgagcagaagagtctatgagaag

SEQ ID NO: 3018539 - DNA, 25 bp, Homo sapien
ctgcagtaatgagcagaagagtcta

SEQ ID NO: 3018540 - DNA, 25 bp, Homo sapien
tgagcagaagagtctatgagaagag

SEQ ID NO: 3018541 - DNA, 25 bp, Homo sapien
ccaggtccatcccgaagtcaatgaa

SEQ ID NO: 3018542 - DNA, 25 bp, Homo sapien
agccaggtccatcccgaagtcaatg

SEQ ID NO: 3018543 - DNA, 25 bp, Homo sapien
caggtccatcccgaagtcaatgaac

SEQ ID NO: 3018544 - DNA, 25 bp, Homo sapien
gccaggtccatcccgaagtcaatga

SEQ ID NO: 3018545 - DNA, 25 bp, Homo sapien
ttgctggttaatgcgagtgaccatc

SEQ ID NO: 3018546 - DNA, 25 bp, Homo sapien
ggaagcttcgtatccagttgctggt

SEQ ID NO: 3018547 - DNA, 25 bp, Homo sapien
tcaaagcctgcaatgtccaaaacac

SEQ ID NO: 3018548 - DNA, 25 bp, Homo sapien
ttgaaagagcattcacagcatggtg

SEQ ID NO: 3018549 - DNA, 25 bp, Homo sapien
taggaggtccgaagagttcaggccc

SEQ ID NO: 3018550 - DNA, 25 bp, Homo sapien
gttcaggcccatcagataggctgtt

SEQ ID NO: 3018551 - DNA, 25 bp, Homo sapien
tcattcccaactttcactctaggaa

SEQ ID NO: 3018552 - DNA, 25 bp, Homo sapien
tgacctttggtaacgtactcattcc

SEQ ID NO: 3018553 - DNA, 25 bp, Homo sapien
gtgaagcccaggatgtcaatggcgc

SEQ ID NO: 3018554 - DNA, 25 bp, Homo sapien
ccgtcagcttgtagagcccagattt

SEQ ID NO: 3018555 - DNA, 25 bp, Homo sapien
cttctgtgccatccggctcggcctg

SEQ ID NO: 3018556 - DNA, 25 bp, Homo sapien
tcagcttgtagagcccagatttctc

SEQ ID NO: 3018557 - DNA, 25 bp, Homo sapien
ggatctccccctggctaatgaacgg

SEQ ID NO: 3018558 - DNA, 25 bp, Homo sapien
gggttggtcgtaataagcagcagct

SEQ ID NO: 3018559 - DNA, 25 bp, Homo sapien
cctggctaatgaacgggtagtcgta

SEQ ID NO: 3018560 - DNA, 25 bp, Homo sapien
ctctgcatcatctatgctggccacc

SEQ ID NO: 3018561 - DNA, 25 bp, Homo sapien
ttcagctggaaagtgactcttgatt

SEQ ID NO: 3018562 - DNA, 25 bp, Homo sapien
ccttcagctggaaagtgactcttga

SEQ ID NO: 3018563 - DNA, 25 bp, Homo sapien
agccttcagctggaaagtgactctt

SEQ ID NO: 3018564 - DNA, 25 bp, Homo sapien
gccttcagctggaaagtgactcttg

SEQ ID NO: 3018565 - DNA, 25 bp, Homo sapien
ccaaaatggattcggatgaacttgc

SEQ ID NO: 3018566 - DNA, 25 bp, Homo sapien
agtttcaatatctgcagaggccagc

SEQ ID NO: 3018567 - DNA, 25 bp, Homo sapien
ccagtggttccaaaatggattcgga

SEQ ID NO: 3018568 - DNA, 25 bp, Homo sapien
ttcaatatctgcagaggccagcttc

SEQ ID NO: 3018569 - DNA, 25 bp, Homo sapien
gggattggcactgatgatttgatct

SEQ ID NO: 3018570 - DNA, 25 bp, Homo sapien
cctcacagtcttggcgttcccaaag

SEQ ID NO: 3018571 - DNA, 25 bp, Homo sapien
cagcaggggattggcactgatgatt

SEQ ID NO: 3018572 - DNA, 25 bp, Homo sapien
tgtcattcctcacagtcttggcgtt

SEQ ID NO: 3018573 - DNA, 25 bp, Homo sapien
tgcaattgttgcaaagtactggatg

SEQ ID NO: 3018574 - DNA, 25 bp, Homo sapien
gtgatcagaatggactggttttcac

SEQ ID NO: 3018575 - DNA, 25 bp, Homo sapien
atcagaatggactggttttcacgat

SEQ ID NO: 3018576 - DNA, 25 bp, Homo sapien
tgatcagaatggactggttttcacg

SEQ ID NO: 3018577 - DNA, 25 bp, Homo sapien
gatcagaatggactggttttcacga

SEQ ID NO: 3018578 - DNA, 25 bp, Homo sapien
ctggcgctttttgcctcggtagcct

SEQ ID NO: 3018579 - DNA, 25 bp, Homo sapien
ggcgctttttgcctcggtagccttc

SEQ ID NO: 3018580 - DNA, 25 bp, Homo sapien
tttttgcctcggtagccttccacca

SEQ ID NO: 3018581 - DNA, 25 bp, Homo sapien
cgctttttgcctcggtagccttcca

SEQ ID NO: 3018582 - DNA, 25 bp, Homo sapien
tatgtgcatatggaaaaccccttgc

SEQ ID NO: 3018583 - DNA, 25 bp, Homo sapien
ggaggaaaaacatatacgtgcgtat

SEQ ID NO: 3018584 - DNA, 25 bp, Homo sapien
gtgggaggaaaaacatatacgtgcg

SEQ ID NO: 3018585 - DNA, 25 bp, Homo sapien
gtatgtgcatatggaaaaccccttg

SEQ ID NO: 3018586 - DNA, 25 bp, Homo sapien
attttagtagagatggggcttcacc

SEQ ID NO: 3018587 - DNA, 25 bp, Homo sapien
tattttagtagagatggggcttcac

SEQ ID NO: 3018588 - DNA, 25 bp, Homo sapien
tacaggtacatgccatcacgcccgg

SEQ ID NO: 3018589 - DNA, 25 bp, Homo sapien
ctacaggtacatgccatcacgcccg

SEQ ID NO: 3018590 - DNA, 25 bp, Homo sapien
ccctgcccgcatatctaatgcccca

SEQ ID NO: 3018591 - DNA, 25 bp, Homo sapien
tgcccgcatatctaatgccccaggg

SEQ ID NO: 3018592 - DNA, 25 bp, Homo sapien
ctcccctgcccgcatatctaatgcc

SEQ ID NO: 3018593 - DNA, 25 bp, Homo sapien
ctgcccgcatatctaatgccccagg

SEQ ID NO: 3018594 - DNA, 25 bp, Homo sapien
atagatcatccaagatgtgtaacgg

SEQ ID NO: 3018595 - DNA, 25 bp, Homo sapien
agatcatccaagatgtgtaacggtc

SEQ ID NO: 3018596 - DNA, 25 bp, Homo sapien
tagatcatccaagatgtgtaacggt

SEQ ID NO: 3018597 - DNA, 25 bp, Homo sapien
catggccatgtcttcgatcctgtcg

SEQ ID NO: 3018598 - DNA, 25 bp, Homo sapien
gctcattcaggtgcgtcagcatggc

SEQ ID NO: 3018599 - DNA, 25 bp, Homo sapien
ggttcatggcgtacacatcctctgg

SEQ ID NO: 3018600 - DNA, 25 bp, Homo sapien
agcacggctggctcattcaggtgcg

SEQ ID NO: 3018601 - DNA, 25 bp, Homo sapien
gggacaaatctaggctaccaaagga

SEQ ID NO: 3018602 - DNA, 25 bp, Homo sapien
cttgggccagaatgtaatgggctgc

SEQ ID NO: 3018603 - DNA, 25 bp, Homo sapien
tcatccccttcatgatacaaggagg

SEQ ID NO: 3018604 - DNA, 25 bp, Homo sapien
tagtgagctccagaattcctcgcag

SEQ ID NO: 3018605 - DNA, 25 bp, Homo sapien
cttcctttgagtccaccacgaagca

SEQ ID NO: 3018606 - DNA, 25 bp, Homo sapien
aaggagcagctatgccgaacacttc

SEQ ID NO: 3018607 - DNA, 25 bp, Homo sapien
tccaccacgaagcaatacgtcttgg

SEQ ID NO: 3018608 - DNA, 25 bp, Homo sapien
aagcaatacgtcttggcatcaaagg

SEQ ID NO: 3018609 - DNA, 25 bp, Homo sapien
cacttggggtggctgcgtccatgta

SEQ ID NO: 3018610 - DNA, 25 bp, Homo sapien
gtagaatcggcttctgacgagttaa

SEQ ID NO: 3018611 - DNA, 25 bp, Homo sapien
tatgcacatacacaacttagcggca

SEQ ID NO: 3018612 - DNA, 25 bp, Homo sapien
catacacaacttagcggcacttggg

SEQ ID NO: 3018613 - DNA, 25 bp, Homo sapien
acaagcgagccacagagggctggct

SEQ ID NO: 3018614 - DNA, 25 bp, Homo sapien
tgctccccggggcttttataggcca

SEQ ID NO: 3018615 - DNA, 25 bp, Homo sapien
gctgctccccggggcttttataggc

SEQ ID NO: 3018616 - DNA, 25 bp, Homo sapien
ctccgcccacaagcgagccacagag

SEQ ID NO: 3018617 - DNA, 25 bp, Homo sapien
gcaaaggcacgtgtatgaaacatcc

SEQ ID NO: 3018618 - DNA, 25 bp, Homo sapien
gaagcgcctgttccgtgaatgccag

SEQ ID NO: 3018619 - DNA, 25 bp, Homo sapien
ttacacacagtgcttcgagaagacg

SEQ ID NO: 3018620 - DNA, 25 bp, Homo sapien
ccagtggccgccaatggagtcagtt

SEQ ID NO: 3018621 - DNA, 25 bp, Homo sapien
cagccactgagcgttgcccccaccc

SEQ ID NO: 3018622 - DNA, 25 bp, Homo sapien
gccactgagcgttgcccccacccac

SEQ ID NO: 3018623 - DNA, 25 bp, Homo sapien
accagccactgagcgttgcccccac

SEQ ID NO: 3018624 - DNA, 25 bp, Homo sapien
caccagccactgagcgttgccccca

SEQ ID NO: 3018625 - DNA, 25 bp, Homo sapien
ccttgggagtattggtcaggacagc

SEQ ID NO: 3018626 - DNA, 25 bp, Homo sapien
catccaaggagagggtaaccgtcac

SEQ ID NO: 3018627 - DNA, 25 bp, Homo sapien
gagcagcggtgttaacaaggtccgt

SEQ ID NO: 3018628 - DNA, 25 bp, Homo sapien
tccatgtcgtaaagggagtggtccc

SEQ ID NO: 3018629 - DNA, 25 bp, Homo sapien
aagtgcgcagttcagtgagttttca

SEQ ID NO: 3018630 - DNA, 25 bp, Homo sapien
tcttcccctggatctgagtcattat

SEQ ID NO: 3018631 - DNA, 25 bp, Homo sapien
tatggctcagcaatatagattacta

SEQ ID NO: 3018632 - DNA, 25 bp, Homo sapien
agttgtgcagcgaccactaccaaga

SEQ ID NO: 3018633 - DNA, 25 bp, Homo sapien
catgacctcagctcagtgcaatctc

SEQ ID NO: 3018634 - DNA, 25 bp, Homo sapien
atgacctcagctcagtgcaatctct

SEQ ID NO: 3018635 - DNA, 25 bp, Homo sapien
ttgtgtttcatgggagcgaaattaa

SEQ ID NO: 3018636 - DNA, 25 bp, Homo sapien
tattgggggttgaggagaatccatg

SEQ ID NO: 3018637 - DNA, 25 bp, Homo sapien
ggagaatccatgtgcctaagactga

SEQ ID NO: 3018638 - DNA, 25 bp, Homo sapien
tccatgtgcctaagactgaggtggg

SEQ ID NO: 3018639 - DNA, 25 bp, Homo sapien
agtggtgtgacactgccggaccaca

SEQ ID NO: 3018640 - DNA, 25 bp, Homo sapien
aaaaacagactgtgattgaggagag

SEQ ID NO: 3018641 - DNA, 25 bp, Homo sapien
catttctgctaagtaccccagtggt

SEQ ID NO: 3018642 - DNA, 25 bp, Homo sapien
gctgcatttctgctaagtaccccag

SEQ ID NO: 3018643 - DNA, 25 bp, Homo sapien
accgtgcccagccaactgtggttgt

SEQ ID NO: 3018644 - DNA, 25 bp, Homo sapien
tcccagattcacacgattctcctac

SEQ ID NO: 3018645 - DNA, 25 bp, Homo sapien
gccaccgtgcccagccaactgtggt

SEQ ID NO: 3018646 - DNA, 25 bp, Homo sapien
cccagattcacacgattctcctacc

SEQ ID NO: 3018647 - DNA, 25 bp, Homo sapien
ggctaaagaggctattacttgaatc

SEQ ID NO: 3018648 - DNA, 25 bp, Homo sapien
acacagtaatataacccctaactgg

SEQ ID NO: 3018649 - DNA, 25 bp, Homo sapien
tataattacggaagaagagccaaca

SEQ ID NO: 3018650 - DNA, 25 bp, Homo sapien
taatgaatagaaataaccgtccatt

SEQ ID NO: 3018651 - DNA, 25 bp, Homo sapien
taattgggtaacaaatgctcgcatg

SEQ ID NO: 3018652 - DNA, 25 bp, Homo sapien
ttttaaaggatcttatgcagacgca

SEQ ID NO: 3018653 - DNA, 25 bp, Homo sapien
gctcgcatgggtgactgctctttta

SEQ ID NO: 3018654 - DNA, 25 bp, Homo sapien
gaacagccagacacatgaatacatt

SEQ ID NO: 3018655 - DNA, 25 bp, Homo sapien
aaacttgctgcaaagggatccacac

SEQ ID NO: 3018656 - DNA, 25 bp, Homo sapien
gagactgtccccttgtgcataaaca

SEQ ID NO: 3018657 - DNA, 25 bp, Homo sapien
tctggaagacgtcacctctaaggtc

SEQ ID NO: 3018658 - DNA, 25 bp, Homo sapien
tctaaaccaactgcttccgagctgg

SEQ ID NO: 3018659 - DNA, 25 bp, Homo sapien
tttaactatctctctaaagacccta

SEQ ID NO: 3018660 - DNA, 25 bp, Homo sapien
gggacattattcaacctataactag

SEQ ID NO: 3018661 - DNA, 25 bp, Homo sapien
ggccaacctagcagcctcattttaa

SEQ ID NO: 3018662 - DNA, 25 bp, Homo sapien
ccaaaagacctctatcatgtgcgtg

SEQ ID NO: 3018663 - DNA, 25 bp, Homo sapien
aaagatcacgcttgtctgaacagca

SEQ ID NO: 3018664 - DNA, 25 bp, Homo sapien
tggttgaacgcaagggtaacatccc

SEQ ID NO: 3018665 - DNA, 25 bp, Homo sapien
tgtccgcaggcaggaatgcactggc

SEQ ID NO: 3018666 - DNA, 25 bp, Homo sapien
gctatttgagcaagggcccaagacg

SEQ ID NO: 3018667 - DNA, 25 bp, Homo sapien
tataggctcctatgcgagacagttt

SEQ ID NO: 3018668 - DNA, 25 bp, Homo sapien
ctgtagagtgcacgtatatatgttt

SEQ ID NO: 3018669 - DNA, 25 bp, Homo sapien
ctcctatgcgagacagtttccttcc

SEQ ID NO: 3018670 - DNA, 25 bp, Homo sapien
tttatatttatataggctcctatgc

SEQ ID NO: 3018671 - DNA, 25 bp, Homo sapien
ctgtatggcctcatgtgtgtggcaa

SEQ ID NO: 3018672 - DNA, 25 bp, Homo sapien
tcaagtacattattattgtgtgatc

SEQ ID NO: 3018673 - DNA, 25 bp, Homo sapien
catctggtccaatcaagtacattat

SEQ ID NO: 3018674 - DNA, 25 bp, Homo sapien
atctggtccaatcaagtacattatt

SEQ ID NO: 3018675 - DNA, 25 bp, Homo sapien
agtacattattattgtgtgatccac

SEQ ID NO: 3018676 - DNA, 25 bp, Homo sapien
caagtttccctaattctacgaggca

SEQ ID NO: 3018677 - DNA, 25 bp, Homo sapien
tttccctaattctacgaggcaccac

SEQ ID NO: 3018678 - DNA, 25 bp, Homo sapien
gtttccctaattctacgaggcacca

SEQ ID NO: 3018679 - DNA, 25 bp, Homo sapien
atccaagtttccctaattctacgag

SEQ ID NO: 3018680 - DNA, 25 bp, Homo sapien
agtaaaaaacatgcttctattatcc

SEQ ID NO: 3018681 - DNA, 25 bp, Homo sapien
gtaaaaaacatgcttctattatcct

SEQ ID NO: 3018682 - DNA, 25 bp, Homo sapien
ggccagggctgtaatacactctgta

SEQ ID NO: 3018683 - DNA, 25 bp, Homo sapien
tcatcttcgtccttggggccagggc

SEQ ID NO: 3018684 - DNA, 25 bp, Homo sapien
ctcgtgccagtcaagccaaccagtt

SEQ ID NO: 3018685 - DNA, 25 bp, Homo sapien
cacttgatcgacctcttctctcgtg

SEQ ID NO: 3018686 - DNA, 25 bp, Homo sapien
tggagttagatctggcagagttgta

SEQ ID NO: 3018687 - DNA, 25 bp, Homo sapien
tagatctggcagagttgtaatgcta

SEQ ID NO: 3018688 - DNA, 25 bp, Homo sapien
ataatttgcgatggcttcttttgtg

SEQ ID NO: 3018689 - DNA, 25 bp, Homo sapien
tttcacataatttgcgatggcttct

SEQ ID NO: 3018690 - DNA, 25 bp, Homo sapien
ggacagacatcagggcaatgagtga

SEQ ID NO: 3018691 - DNA, 25 bp, Homo sapien
ctatttcatccacgacttgaatcat

SEQ ID NO: 3018692 - DNA, 25 bp, Homo sapien
ctggacagacatcagggcaatgagt

SEQ ID NO: 3018693 - DNA, 25 bp, Homo sapien
tttcatccacgacttgaatcatctt

SEQ ID NO: 3018694 - DNA, 25 bp, Homo sapien
gtgtcgctgccgttccttctctaac

SEQ ID NO: 3018695 - DNA, 25 bp, Homo sapien
gtcagttttacgctccccagtatga

SEQ ID NO: 3018696 - DNA, 25 bp, Homo sapien
tatgagttgtgagggaaaacggtcc

SEQ ID NO: 3018697 - DNA, 25 bp, Homo sapien
taaaggcttgccgatgtgtcgctgc

SEQ ID NO: 3018698 - DNA, 25 bp, Homo sapien
tgacgggaccttagttacacacagg

SEQ ID NO: 3018699 - DNA, 25 bp, Homo sapien
gaaagagagctaggctgaaccctgc

SEQ ID NO: 3018700 - DNA, 25 bp, Homo sapien
tggcctggcatagggagtctgatcc

SEQ ID NO: 3018701 - DNA, 25 bp, Homo sapien
tgcagtggcctagagctgaatgtct

SEQ ID NO: 3018702 - DNA, 25 bp, Homo sapien
ctttcttgacgtgcttcattccagc

SEQ ID NO: 3018703 - DNA, 25 bp, Homo sapien
attccagccagtaaagctcctccaa

SEQ ID NO: 3018704 - DNA, 25 bp, Homo sapien
gctcctccaatagcaaatgtgattg

SEQ ID NO: 3018705 - DNA, 25 bp, Homo sapien
tttctttcttgacgtgcttcattcc

SEQ ID NO: 3018706 - DNA, 25 bp, Homo sapien
ggagagggtgtaaagtctcaagttc

SEQ ID NO: 3018707 - DNA, 25 bp, Homo sapien
ccaagtcggggcatccagccacgtg

SEQ ID NO: 3018708 - DNA, 25 bp, Homo sapien
ataaaatccaagtcggggcatccag

SEQ ID NO: 3018709 - DNA, 25 bp, Homo sapien
tggagagggtgtaaagtctcaagtt

SEQ ID NO: 3018710 - DNA, 25 bp, Homo sapien
gtaaggcgcgcaagctaaggacaac

SEQ ID NO: 3018711 - DNA, 25 bp, Homo sapien
caaggcacgggaaatgtaggatgaa

SEQ ID NO: 3018712 - DNA, 25 bp, Homo sapien
taggatgaaattccatgacccaggt

SEQ ID NO: 3018713 - DNA, 25 bp, Homo sapien
atgacccaggtaaggcgcgcaagct

SEQ ID NO: 3018714 - DNA, 25 bp, Homo sapien
cgacagccgcgacgagcaccagaag

SEQ ID NO: 3018715 - DNA, 25 bp, Homo sapien
acagccgcgacgagcaccagaaggg

SEQ ID NO: 3018716 - DNA, 25 bp, Homo sapien
gccgacagccgcgacgagcaccaga

SEQ ID NO: 3018717 - DNA, 25 bp, Homo sapien
agccgcgacgagcaccagaagggtt

SEQ ID NO: 3018718 - DNA, 25 bp, Homo sapien
tcgaggggcgcgtggagtctccggg

SEQ ID NO: 3018719 - DNA, 25 bp, Homo sapien
cttctgcgaccacgggggtggcggc

SEQ ID NO: 3018720 - DNA, 25 bp, Homo sapien
gggcttcgaggggcgcgtggagtct

SEQ ID NO: 3018721 - DNA, 25 bp, Homo sapien
gtctccggggcccttctgcgaccac

SEQ ID NO: 3018722 - DNA, 25 bp, Homo sapien
caggcaatagccagggcgccccgag

SEQ ID NO: 3018723 - DNA, 25 bp, Homo sapien
agaggccgcataactcgtccgggta

SEQ ID NO: 3018724 - DNA, 25 bp, Homo sapien
ccgcgaggcaagaagcgccaaagtt

SEQ ID NO: 3018725 - DNA, 25 bp, Homo sapien
tgggccccaaaactcgagtccgcga

SEQ ID NO: 3018726 - DNA, 25 bp, Homo sapien
aaggagtcgctctgtccgtcccgct

SEQ ID NO: 3018727 - DNA, 25 bp, Homo sapien
ccgcgatttccggtagcgttccgct

SEQ ID NO: 3018728 - DNA, 25 bp, Homo sapien
tagcgttccgcttcctccggaagtc

SEQ ID NO: 3018729 - DNA, 25 bp, Homo sapien
ctccggaagtcggaaggagtcgctc

SEQ ID NO: 3018730 - DNA, 25 bp, Homo sapien
gaggaagtgccagaatgttgactcc

SEQ ID NO: 3018731 - DNA, 25 bp, Homo sapien
cgtcctgccggccaagaggaagtgc

SEQ ID NO: 3018732 - DNA, 25 bp, Homo sapien
tgtctggccgactttgtcaacctcg

SEQ ID NO: 3018733 - DNA, 25 bp, Homo sapien
catctttgaaatagaaaccgaccca

SEQ ID NO: 3018734 - DNA, 25 bp, Homo sapien
tttgctaaagtgcttcttttagtag

SEQ ID NO: 3018735 - DNA, 25 bp, Homo sapien
ttgctaaagtgcttcttttagtagc

SEQ ID NO: 3018736 - DNA, 25 bp, Homo sapien
tgctaaagtgcttcttttagtagca

SEQ ID NO: 3018737 - DNA, 25 bp, Homo sapien
taatttccaaggaaccaggcggcga

SEQ ID NO: 3018738 - DNA, 25 bp, Homo sapien
tagtcttcttcacttacagggtgcc

SEQ ID NO: 3018739 - DNA, 25 bp, Homo sapien
gaagccctaagtgacagttcagagc

SEQ ID NO: 3018740 - DNA, 25 bp, Homo sapien
gatgataaacccaatcctgaagccc

SEQ ID NO: 3018741 - DNA, 25 bp, Homo sapien
gtattcagcttgcataacaaaatgt

SEQ ID NO: 3018742 - DNA, 25 bp, Homo sapien
aaatcctctgtctcattgtttagta

SEQ ID NO: 3018743 - DNA, 25 bp, Homo sapien
tagtttcagtgtgtgatggttgata

SEQ ID NO: 3018744 - DNA, 25 bp, Homo sapien
ctcagaaatgttattttggatcatg

SEQ ID NO: 3018745 - DNA, 25 bp, Homo sapien
caaagtcagacatggcaagtcatgc

SEQ ID NO: 3018746 - DNA, 25 bp, Homo sapien
cattgaaggatatgccaaagtcaga

SEQ ID NO: 3018747 - DNA, 25 bp, Homo sapien
tatggagagccttgaatgatgagcc

SEQ ID NO: 3018748 - DNA, 25 bp, Homo sapien
gacgattcaccagaaaggtgccggg

SEQ ID NO: 3018749 - DNA, 25 bp, Homo sapien
gagaggcatacatgatgaaagcaca

SEQ ID NO: 3018750 - DNA, 25 bp, Homo sapien
tatgcttaactgaagatgcgaaaga

SEQ ID NO: 3018751 - DNA, 25 bp, Homo sapien
taacctgtggaaggcactactcgtt

SEQ ID NO: 3018752 - DNA, 25 bp, Homo sapien
catgacttggtcaatggatagagcc

SEQ ID NO: 3018753 - DNA, 25 bp, Homo sapien
tttagttcactgcactatgccagct

SEQ ID NO: 3018754 - DNA, 25 bp, Homo sapien
ttctttccaagacatgcctgctcat

SEQ ID NO: 3018755 - DNA, 25 bp, Homo sapien
catttagaatgtagttatagtccct

SEQ ID NO: 3018756 - DNA, 25 bp, Homo sapien
gccagctctggataagattagttta

SEQ ID NO: 3018757 - DNA, 25 bp, Homo sapien
tgacacaagaccctgcagaaagtcg

SEQ ID NO: 3018758 - DNA, 25 bp, Homo sapien
aaactcctggcttgttcccctaatg

SEQ ID NO: 3018759 - DNA, 25 bp, Homo sapien
tattttaatcatgggcagccctccg

SEQ ID NO: 3018760 - DNA, 25 bp, Homo sapien
ctgtgtaagtaagtagatctggcat

SEQ ID NO: 3018761 - DNA, 25 bp, Homo sapien
caattgaattcttccaccaactgga

SEQ ID NO: 3018762 - DNA, 25 bp, Homo sapien
agtgtgattacaatggcaatagcca

SEQ ID NO: 3018763 - DNA, 25 bp, Homo sapien
tgagttggccaagaggaccgcattt

SEQ ID NO: 3018764 - DNA, 25 bp, Homo sapien
tatgtagacccatgagataaatggg

SEQ ID NO: 3018765 - DNA, 25 bp, Homo sapien
tgtcccatttgatgtcttttgagga

SEQ ID NO: 3018766 - DNA, 25 bp, Homo sapien
gacaatgttaaagttgatcttttcc

SEQ ID NO: 3018767 - DNA, 25 bp, Homo sapien
tactgccctgacacaaaatgttctt

SEQ ID NO: 3018768 - DNA, 25 bp, Homo sapien
tatgtgttacaaataccttgtccca

SEQ ID NO: 3018769 - DNA, 25 bp, Homo sapien
tgggaggaggccataacgcatcatc

SEQ ID NO: 3018770 - DNA, 25 bp, Homo sapien
tgccggccctctcggttgggaggag

SEQ ID NO: 3018771 - DNA, 25 bp, Homo sapien
gggaggaggccataacgcatcatcc

SEQ ID NO: 3018772 - DNA, 25 bp, Homo sapien
cctgccggccctctcggttgggagg

SEQ ID NO: 3018773 - DNA, 25 bp, Homo sapien
acttttatgtacataagcctctttt

SEQ ID NO: 3018774 - DNA, 25 bp, Homo sapien
tacttttatgtacataagcctcttt

SEQ ID NO: 3018775 - DNA, 25 bp, Homo sapien
atacttttatgtacataagcctctt

SEQ ID NO: 3018776 - DNA, 25 bp, Homo sapien
catacttttatgtacataagcctct

SEQ ID NO: 3018777 - DNA, 25 bp, Homo sapien
tgtgttggcttatcttaatttcccg

SEQ ID NO: 3018778 - DNA, 25 bp, Homo sapien
ctgtgttggcttatcttaatttccc

SEQ ID NO: 3018779 - DNA, 25 bp, Homo sapien
tgttggcttatcttaatttcccgtc

SEQ ID NO: 3018780 - DNA, 25 bp, Homo sapien
tagcgcagataaaagtcactcttca

SEQ ID NO: 3018781 - DNA, 25 bp, Homo sapien
gaaactcgtggctgaacttgccctt

SEQ ID NO: 3018782 - DNA, 25 bp, Homo sapien
gtgccccacgtagtagcgcagataa

SEQ ID NO: 3018783 - DNA, 25 bp, Homo sapien
tccagaaactcgtggctgaacttgc

SEQ ID NO: 3018784 - DNA, 25 bp, Homo sapien
caggttaaacctacattgctcagag

SEQ ID NO: 3018785 - DNA, 25 bp, Homo sapien
tagccatggctggttgggatgcaaa

SEQ ID NO: 3018786 - DNA, 25 bp, Homo sapien
aactggttgattaagctatggagcc

SEQ ID NO: 3018787 - DNA, 25 bp, Homo sapien
gaagaccagcaaccttagaatcagg

SEQ ID NO: 3018788 - DNA, 25 bp, Homo sapien
tttgactcttaactgaaatctttac

SEQ ID NO: 3018789 - DNA, 25 bp, Homo sapien
aaatctatatcttaacacatgcttc

SEQ ID NO: 3018790 - DNA, 25 bp, Homo sapien
aacacatgcttcctatttgtcctat

SEQ ID NO: 3018791 - DNA, 25 bp, Homo sapien
tgggtttaaatctatatcttaacac

SEQ ID NO: 3018792 - DNA, 25 bp, Homo sapien
ggaactgtggcacaggataatccat

SEQ ID NO: 3018793 - DNA, 25 bp, Homo sapien
cacaggataatccatgctgtaataa

SEQ ID NO: 3018794 - DNA, 25 bp, Homo sapien
gtaataatcaccagaccagacagct

SEQ ID NO: 3018795 - DNA, 25 bp, Homo sapien
tgtaataatcaccagaccagacagc

SEQ ID NO: 3018796 - DNA, 25 bp, Homo sapien
ctccctcaagatctatggcatcgat

SEQ ID NO: 3018797 - DNA, 25 bp, Homo sapien
tctccatgaccacctgatagcgcat

SEQ ID NO: 3018798 - DNA, 25 bp, Homo sapien
gcgcattctgattgagtgactgact

SEQ ID NO: 3018799 - DNA, 25 bp, Homo sapien
caagtgagatgcatatcatcacatt

SEQ ID NO: 3018800 - DNA, 25 bp, Homo sapien
taagatgttctgttgtgtacgatgc

SEQ ID NO: 3018801 - DNA, 25 bp, Homo sapien
gcccacaccgtacaaaagagtatgt

SEQ ID NO: 3018802 - DNA, 25 bp, Homo sapien
tgtacgatgcaagaggtaggacgcc

SEQ ID NO: 3018803 - DNA, 25 bp, Homo sapien
gagtatgtgtattgcagagatactt

SEQ ID NO: 3018804 - DNA, 25 bp, Homo sapien
caagcaatcagagccagcaactgca

SEQ ID NO: 3018805 - DNA, 25 bp, Homo sapien
tgatttggatcagcacaaacggaca

SEQ ID NO: 3018806 - DNA, 25 bp, Homo sapien
cactggacgtggcatcgtgaagatg

SEQ ID NO: 3018807 - DNA, 25 bp, Homo sapien
tttggtagagtgaagaaacacagtc

SEQ ID NO: 3018808 - DNA, 25 bp, Homo sapien
ttatagcagatccttctgacgtttt

SEQ ID NO: 3018809 - DNA, 25 bp, Homo sapien
tatagcagatccttctgacgttttc

SEQ ID NO: 3018810 - DNA, 25 bp, Homo sapien
aacaagcagggtcagtactgcaggg

SEQ ID NO: 3018811 - DNA, 25 bp, Homo sapien
tgtgacttcagggttaagtccaaca

SEQ ID NO: 3018812 - DNA, 25 bp, Homo sapien
cagggttaagtccaacaagcagggt

SEQ ID NO: 3018813 - DNA, 25 bp, Homo sapien
caacaagcagggtcagtactgcagg

SEQ ID NO: 3018814 - DNA, 25 bp, Homo sapien
catgagttaagatgtatgcccaata

SEQ ID NO: 3018815 - DNA, 25 bp, Homo sapien
gttaagatgtatgcccaatatatga

SEQ ID NO: 3018816 - DNA, 25 bp, Homo sapien
aagatgtatgcccaatatatgagat

SEQ ID NO: 3018817 - DNA, 25 bp, Homo sapien
tgagttaagatgtatgcccaatata

SEQ ID NO: 3018818 - DNA, 25 bp, Homo sapien
tcagaagatgttaaggcaggtgcca

SEQ ID NO: 3018819 - DNA, 25 bp, Homo sapien
gaagactagccctaaagaggcccta

SEQ ID NO: 3018820 - DNA, 25 bp, Homo sapien
tacacaatcagctgtgcccagtaat

SEQ ID NO: 3018821 - DNA, 25 bp, Homo sapien
gcccagtaataaggtcaggctcttc

SEQ ID NO: 3018822 - DNA, 25 bp, Homo sapien
aagacataaaaccgtgtgttttgtg

SEQ ID NO: 3018823 - DNA, 25 bp, Homo sapien
aaagcctggaagcggctcatactca

SEQ ID NO: 3018824 - DNA, 25 bp, Homo sapien
tcttccaaacggaggaaagcctgga

SEQ ID NO: 3018825 - DNA, 25 bp, Homo sapien
cgtgtgttttgtgccgttccccaat

SEQ ID NO: 3018826 - DNA, 25 bp, Homo sapien
acacctctgcatctgggtcatttac

SEQ ID NO: 3018827 - DNA, 25 bp, Homo sapien
cccacacctctgcatctgggtcatt

SEQ ID NO: 3018828 - DNA, 25 bp, Homo sapien
cacacctctgcatctgggtcattta

SEQ ID NO: 3018829 - DNA, 25 bp, Homo sapien
cacccacacctctgcatctgggtca

SEQ ID NO: 3018830 - DNA, 25 bp, Homo sapien
aataccaaggtgttagcagacatcc

SEQ ID NO: 3018831 - DNA, 25 bp, Homo sapien
gatgtttttaacaggcagccacaca

SEQ ID NO: 3018832 - DNA, 25 bp, Homo sapien
atatgttcagtgtcgtccgcgggcc

SEQ ID NO: 3018833 - DNA, 25 bp, Homo sapien
gcatcgagggtacaaaatctgaaca

SEQ ID NO: 3018834 - DNA, 25 bp, Homo sapien
tgagtccgttgcaggcccgccacag

SEQ ID NO: 3018835 - DNA, 25 bp, Homo sapien
ggccatgagtccgttgcaggcccgc

SEQ ID NO: 3018836 - DNA, 25 bp, Homo sapien
cagcgcgaagaaggcggccatgagt

SEQ ID NO: 3018837 - DNA, 25 bp, Homo sapien
ggcggccatgagtccgttgcaggcc

SEQ ID NO: 3018838 - DNA, 25 bp, Homo sapien
ggtgagtcctgccacgtacggtccg

SEQ ID NO: 3018839 - DNA, 25 bp, Homo sapien
tgggaaagcgagtccctcagggagc

SEQ ID NO: 3018840 - DNA, 25 bp, Homo sapien
tggtggacggaagtcgaatttgaac

SEQ ID NO: 3018841 - DNA, 25 bp, Homo sapien
tgaacccgtataggttcaactccaa

SEQ ID NO: 3018842 - DNA, 25 bp, Homo sapien
gctaaatcagccctgggattggaaa

SEQ ID NO: 3018843 - DNA, 25 bp, Homo sapien
aagaacgttgtctgctctgtgcctg

SEQ ID NO: 3018844 - DNA, 25 bp, Homo sapien
ggtgggcacccgtgtttgcagaggt

SEQ ID NO: 3018845 - DNA, 25 bp, Homo sapien
gattggaaacaagcgaagactattc

SEQ ID NO: 3018846 - DNA, 25 bp, Homo sapien
gagacgtgggcactctaatctgatc

SEQ ID NO: 3018847 - DNA, 25 bp, Homo sapien
tcttgcccggatggtcgatgtgatg

SEQ ID NO: 3018848 - DNA, 25 bp, Homo sapien
gggtgcatcactgaacctcctctgg

SEQ ID NO: 3018849 - DNA, 25 bp, Homo sapien
gtgaaatcaagcctgcgcccttggg

SEQ ID NO: 3018850 - DNA, 25 bp, Homo sapien
ccacagtaatttcgctccaagtggc

SEQ ID NO: 3018851 - DNA, 25 bp, Homo sapien
cagtaatttcgctccaagtggctgg

SEQ ID NO: 3018852 - DNA, 25 bp, Homo sapien
cataaacactccagtgccacaatca

SEQ ID NO: 3018853 - DNA, 25 bp, Homo sapien
tgccacagtaatttcgctccaagtg

SEQ ID NO: 3018854 - DNA, 25 bp, Homo sapien
ccaagggttcgaccttgaggatgac

SEQ ID NO: 3018855 - DNA, 25 bp, Homo sapien
tgaggatgacggtcttccccgtaaa

SEQ ID NO: 3018856 - DNA, 25 bp, Homo sapien
aaagatccgcctttgctgatcaaga

SEQ ID NO: 3018857 - DNA, 25 bp, Homo sapien
aagatccgcctttgctgatcaagag

SEQ ID NO: 3018858 - DNA, 25 bp, Homo sapien
tggttactggaagcacaaagccctt

SEQ ID NO: 3018859 - DNA, 25 bp, Homo sapien
tggagagctggttactggaagcaca

SEQ ID NO: 3018860 - DNA, 25 bp, Homo sapien
attgctcagaatgagcattaatgtc

SEQ ID NO: 3018861 - DNA, 25 bp, Homo sapien
ccattgcaaatacagtaattgctca

SEQ ID NO: 3018862 - DNA, 25 bp, Homo sapien
cccggcactttggctgtttccagga

SEQ ID NO: 3018863 - DNA, 25 bp, Homo sapien
caactgtgcagatcccggcactttg

SEQ ID NO: 3018864 - DNA, 25 bp, Homo sapien
aggcaactgtgcagatcccggcact

SEQ ID NO: 3018865 - DNA, 25 bp, Homo sapien
tcccggcactttggctgtttccagg

SEQ ID NO: 3018866 - DNA, 25 bp, Homo sapien
tggagtcccctgtgaagtccctcac

SEQ ID NO: 3018867 - DNA, 25 bp, Homo sapien
gagtggttatcttggagtcccctgt

SEQ ID NO: 3018868 - DNA, 25 bp, Homo sapien
tccctcacgaagaaaagacttatac

SEQ ID NO: 3018869 - DNA, 25 bp, Homo sapien
ggagaagaacaggagtggttatctt

SEQ ID NO: 3018870 - DNA, 25 bp, Homo sapien
tagtcaagtagctttcccaaaggca

SEQ ID NO: 3018871 - DNA, 25 bp, Homo sapien
gagagaccccttagtactgattgct

SEQ ID NO: 3018872 - DNA, 25 bp, Homo sapien
ggactgctagagactcaaagccctc

SEQ ID NO: 3018873 - DNA, 25 bp, Homo sapien
gaaataggctcagggtagtcaagta

SEQ ID NO: 3018874 - DNA, 25 bp, Homo sapien
gcaggcacgccagcttgaatctcag

SEQ ID NO: 3018875 - DNA, 25 bp, Homo sapien
gctgtcccagcttatgctgagtgag

SEQ ID NO: 3018876 - DNA, 25 bp, Homo sapien
cagcatcaaccaccagatgcgtgag

SEQ ID NO: 3018877 - DNA, 25 bp, Homo sapien
gagagagccttcacatgacttcagg

SEQ ID NO: 3018878 - DNA, 25 bp, Homo sapien
ggagtaccaggccccgaatccatct

SEQ ID NO: 3018879 - DNA, 25 bp, Homo sapien
cagcaaacgtgggtcactgccagga

SEQ ID NO: 3018880 - DNA, 25 bp, Homo sapien
gatcagcaaacgtgggtcactgcca

SEQ ID NO: 3018881 - DNA, 25 bp, Homo sapien
tggggatcagcaaacgtgggtcact

SEQ ID NO: 3018882 - DNA, 25 bp, Homo sapien
cggtcagcttgtgatccagccagga

SEQ ID NO: 3018883 - DNA, 25 bp, Homo sapien
ggaggctctccgatcctttatgcaa

SEQ ID NO: 3018884 - DNA, 25 bp, Homo sapien
tgaagtttctgctactaggccaagc

SEQ ID NO: 3018885 - DNA, 25 bp, Homo sapien
tgtctaccaggaacaaacacaagtg

SEQ ID NO: 3018886 - DNA, 25 bp, Homo sapien
tagatacagtggaaccctccaggag

SEQ ID NO: 3018887 - DNA, 25 bp, Homo sapien
cattaatagtgcacggtgtggcccc

SEQ ID NO: 3018888 - DNA, 25 bp, Homo sapien
tgtgctcgcaggagatcccattagg

SEQ ID NO: 3018889 - DNA, 25 bp, Homo sapien
taccatgaaagatcggaggcagctt

SEQ ID NO: 3018890 - DNA, 25 bp, Homo sapien
tgaaagcctcagtattgcagcctct

SEQ ID NO: 3018891 - DNA, 25 bp, Homo sapien
tgtgatggagtctggaacctgccag

SEQ ID NO: 3018892 - DNA, 25 bp, Homo sapien
ccagaagcctggcatcacagccatt

SEQ ID NO: 3018893 - DNA, 25 bp, Homo sapien
ggacatcctcgtgagtactttgaaa

SEQ ID NO: 3018894 - DNA, 25 bp, Homo sapien
gctgaatggccttgctgtctctctg

SEQ ID NO: 3018895 - DNA, 25 bp, Homo sapien
ttgctgaatggccttgctgtctctc

SEQ ID NO: 3018896 - DNA, 25 bp, Homo sapien
tgctcagttactcttctacaggcaa

SEQ ID NO: 3018897 - DNA, 25 bp, Homo sapien
cacacgatgctcagttactcttcta

SEQ ID NO: 3018898 - DNA, 25 bp, Homo sapien
cctgttggaaaaagtcgaagtggag

SEQ ID NO: 3018899 - DNA, 25 bp, Homo sapien
aggctgcctgttggaaaaagtcgaa

SEQ ID NO: 3018900 - DNA, 25 bp, Homo sapien
tgcctgttggaaaaagtcgaagtgg

SEQ ID NO: 3018901 - DNA, 25 bp, Homo sapien
tggaaaaagtcgaagtggaggaaca

SEQ ID NO: 3018902 - DNA, 25 bp, Homo sapien
ccagccctcagtggattcttattgt

SEQ ID NO: 3018903 - DNA, 25 bp, Homo sapien
ctctattgaatattcttgtggcagg

SEQ ID NO: 3018904 - DNA, 25 bp, Homo sapien
ccttcaatctccctgtcgtctttta

SEQ ID NO: 3018905 - DNA, 25 bp, Homo sapien
tttccctgactccatcttctgagtc

SEQ ID NO: 3018906 - DNA, 25 bp, Homo sapien
tatggctgcccaatggaccgtggct

SEQ ID NO: 3018907 - DNA, 25 bp, Homo sapien
taattcagggttgtaaggaccagac

SEQ ID NO: 3018908 - DNA, 25 bp, Homo sapien
cctgatgcaaagtgtgagttgaccc

SEQ ID NO: 3018909 - DNA, 25 bp, Homo sapien
tggttgcacgcgatagactgagctg

SEQ ID NO: 3018910 - DNA, 25 bp, Homo sapien
ctgggcacatgtgttggctgcgtgt

SEQ ID NO: 3018911 - DNA, 25 bp, Homo sapien
tgaaatccatgaagccaaactgtct

SEQ ID NO: 3018912 - DNA, 25 bp, Homo sapien
cacatgtgttggctgcgtgtgagtg

SEQ ID NO: 3018913 - DNA, 25 bp, Homo sapien
gaaatccatgaagccaaactgtctt

SEQ ID NO: 3018914 - DNA, 25 bp, Homo sapien
gaggaggtgtgtgcactgagtgggc

SEQ ID NO: 3018915 - DNA, 25 bp, Homo sapien
agtgggcatggaggcgagtagtccc

SEQ ID NO: 3018916 - DNA, 25 bp, Homo sapien
gggcatggaggcgagtagtccctac

SEQ ID NO: 3018917 - DNA, 25 bp, Homo sapien
ggaggtgtgtgcactgagtgggcat

SEQ ID NO: 3018918 - DNA, 25 bp, Homo sapien
gctatttgcttatgcagcctcagga

SEQ ID NO: 3018919 - DNA, 25 bp, Homo sapien
cagcagagattcttcccaacagaga

SEQ ID NO: 3018920 - DNA, 25 bp, Homo sapien
tatgcaagggcacaagagtcattgg

SEQ ID NO: 3018921 - DNA, 25 bp, Homo sapien
ggataacttcccattgtgcccagaa

SEQ ID NO: 3018922 - DNA, 25 bp, Homo sapien
tcacagacatgtctgcatacagcac

SEQ ID NO: 3018923 - DNA, 25 bp, Homo sapien
taggtggaagctgcaacgtgttgct

SEQ ID NO: 3018924 - DNA, 25 bp, Homo sapien
catacagcacctgcgtctcttctcc

SEQ ID NO: 3018925 - DNA, 25 bp, Homo sapien
tggtcccggcgtggcttgctaggtg

SEQ ID NO: 3018926 - DNA, 25 bp, Homo sapien
cacctcaatgttgagggaataccag

SEQ ID NO: 3018927 - DNA, 25 bp, Homo sapien
caatgttgagggaataccagatgat

SEQ ID NO: 3018928 - DNA, 25 bp, Homo sapien
tgagggaataccagatgatccagag

SEQ ID NO: 3018929 - DNA, 25 bp, Homo sapien
gttgagggaataccagatgatccag

SEQ ID NO: 3018930 - DNA, 25 bp, Homo sapien
aggccgaccgcgtccagcaggaggg

SEQ ID NO: 3018931 - DNA, 25 bp, Homo sapien
agcagcaaaaggaccaggccgaccg

SEQ ID NO: 3018932 - DNA, 25 bp, Homo sapien
cgcacagcgccctggatggcatctt

SEQ ID NO: 3018933 - DNA, 25 bp, Homo sapien
gaggatgaggaagagcgcacagcgc

SEQ ID NO: 3018934 - DNA, 25 bp, Homo sapien
cccaggaggagcgggaggagcccag

SEQ ID NO: 3018935 - DNA, 25 bp, Homo sapien
gcccaggaggagcgggaggagccca

SEQ ID NO: 3018936 - DNA, 25 bp, Homo sapien
tgcccaggaggagcgggaggagccc

SEQ ID NO: 3018937 - DNA, 25 bp, Homo sapien
tgatttgcatgggagggtggcggtc

SEQ ID NO: 3018938 - DNA, 25 bp, Homo sapien
ctgcactcccgggggtgatttgcat

SEQ ID NO: 3018939 - DNA, 25 bp, Homo sapien
ccgggggtgatttgcatgggagggt

SEQ ID NO: 3018940 - DNA, 25 bp, Homo sapien
cactcccgggggtgatttgcatggg

SEQ ID NO: 3018941 - DNA, 25 bp, Homo sapien
gatctggacccaaacagtctgacat

SEQ ID NO: 3018942 - DNA, 25 bp, Homo sapien
gacccaaacagtctgacatcactgt

SEQ ID NO: 3018943 - DNA, 25 bp, Homo sapien
ctggacccaaacagtctgacatcac

SEQ ID NO: 3018944 - DNA, 25 bp, Homo sapien
catcactgttaattgggctgctcat

SEQ ID NO: 3018945 - DNA, 25 bp, Homo sapien
tcatgatttgtcatccgtgatgtca

SEQ ID NO: 3018946 - DNA, 25 bp, Homo sapien
catgatttgtcatccgtgatgtcac

SEQ ID NO: 3018947 - DNA, 25 bp, Homo sapien
atttgtcatccgtgatgtcaccaga

SEQ ID NO: 3018948 - DNA, 25 bp, Homo sapien
tgtcatccgtgatgtcaccagatga

SEQ ID NO: 3018949 - DNA, 25 bp, Homo sapien
cattcttcgatgggtacaaatcctt

SEQ ID NO: 3018950 - DNA, 25 bp, Homo sapien
aattgcttccacgataataccttga

SEQ ID NO: 3018951 - DNA, 25 bp, Homo sapien
ctcccatcaaagcaaattgcttcca

SEQ ID NO: 3018952 - DNA, 25 bp, Homo sapien
tccacgataataccttgaagtccca

SEQ ID NO: 3018953 - DNA, 25 bp, Homo sapien
caaagcaaattgcttccacgataat

SEQ ID NO: 3018954 - DNA, 25 bp, Homo sapien
acattgataggctgaccctggagca

SEQ ID NO: 3018955 - DNA, 25 bp, Homo sapien
tggattgagccagctagtgcaagca

SEQ ID NO: 3018956 - DNA, 25 bp, Homo sapien
gccttgccccaaaacactgattcat

SEQ ID NO: 3018957 - DNA, 25 bp, Homo sapien
gaagccaagtgtaagagagtcagga

SEQ ID NO: 3018958 - DNA, 25 bp, Homo sapien
ggcttcgggttagatcaaattctcc

SEQ ID NO: 3018959 - DNA, 25 bp, Homo sapien
catttccagatcaggtgcatccgta

SEQ ID NO: 3018960 - DNA, 25 bp, Homo sapien
tctgcaaagtgagtccagaacctgg

SEQ ID NO: 3018961 - DNA, 25 bp, Homo sapien
tgagcctaaaacacggaagctggtt

SEQ ID NO: 3018962 - DNA, 25 bp, Homo sapien
gacacaagtgctttcctccatggat

SEQ ID NO: 3018963 - DNA, 25 bp, Homo sapien
agttccccaaactctgactccgtgg

SEQ ID NO: 3018964 - DNA, 25 bp, Homo sapien
tgggtgagcctcaacggccatgagt

SEQ ID NO: 3018965 - DNA, 25 bp, Homo sapien
tagaggtgagctagagacatggcca

SEQ ID NO: 3018966 - DNA, 25 bp, Homo sapien
tctctaccatagacaccaggaggcc

SEQ ID NO: 3018967 - DNA, 25 bp, Homo sapien
tgttctttcacctacgggcctcttg

SEQ ID NO: 3018968 - DNA, 25 bp, Homo sapien
gacaaatggccgtgcagtttcctaa

SEQ ID NO: 3018969 - DNA, 25 bp, Homo sapien
gaagctgcgctaggcacttggtgaa

SEQ ID NO: 3018970 - DNA, 25 bp, Homo sapien
cagccagggcttatcccagaatgcg

SEQ ID NO: 3018971 - DNA, 25 bp, Homo sapien
ccacatttcgccagttggcttggct

SEQ ID NO: 3018972 - DNA, 25 bp, Homo sapien
ctcgggaagcaagaagacatcaggg

SEQ ID NO: 3018973 - DNA, 25 bp, Homo sapien
caagtctagggtagacaccgcctgt

SEQ ID NO: 3018974 - DNA, 25 bp, Homo sapien
tcaatgagaaagataaggtcaagcg

SEQ ID NO: 3018975 - DNA, 25 bp, Homo sapien
ggaaagaaattagggcaacatgcat

SEQ ID NO: 3018976 - DNA, 25 bp, Homo sapien
ccaatgggtcagagctcagccatcc

SEQ ID NO: 3018977 - DNA, 25 bp, Homo sapien
tctgctaagggagctagggctgtca

SEQ ID NO: 3018978 - DNA, 25 bp, Homo sapien
caacattcccggctgcatggagggt

SEQ ID NO: 3018979 - DNA, 25 bp, Homo sapien
taaacatgaggttctcccttgggca

SEQ ID NO: 3018980 - DNA, 25 bp, Homo sapien
tcagttttatggcaccccacagagg

SEQ ID NO: 3018981 - DNA, 25 bp, Homo sapien
tagagtgaccaaagggaaggccaca

SEQ ID NO: 3018982 - DNA, 25 bp, Homo sapien
gaaattcgacttctgtctgtgcttc

SEQ ID NO: 3018983 - DNA, 25 bp, Homo sapien
tttgatgatgggcacccacaccagc

SEQ ID NO: 3018984 - DNA, 25 bp, Homo sapien
ggacttgaggctgcgtaagaaattc

SEQ ID NO: 3018985 - DNA, 25 bp, Homo sapien
ctttttgatgatgggcacccacacc

SEQ ID NO: 3018986 - DNA, 25 bp, Homo sapien
tcaaggtgtaggccaagcaggtgat

SEQ ID NO: 3018987 - DNA, 25 bp, Homo sapien
gcttcaaggtgtaggccaagcaggt

SEQ ID NO: 3018988 - DNA, 25 bp, Homo sapien
cttcaaggtgtaggccaagcaggtg

SEQ ID NO: 3018989 - DNA, 25 bp, Homo sapien
agcttcaaggtgtaggccaagcagg

SEQ ID NO: 3018990 - DNA, 25 bp, Homo sapien
aaagcaggatggcaccgcccactga

SEQ ID NO: 3018991 - DNA, 25 bp, Homo sapien
actgacatgataacgatgggcttgc

SEQ ID NO: 3018992 - DNA, 25 bp, Homo sapien
gccgaaaagcaggatggcaccgccc

SEQ ID NO: 3018993 - DNA, 25 bp, Homo sapien
catgataacgatgggcttgcggtag

SEQ ID NO: 3018994 - DNA, 25 bp, Homo sapien
ggtggtggtccagacagactcgctc

SEQ ID NO: 3018995 - DNA, 25 bp, Homo sapien
tggagacttctcatcgacctctaga

SEQ ID NO: 3018996 - DNA, 25 bp, Homo sapien
tccagacagactcgctcctggagct

SEQ ID NO: 3018997 - DNA, 25 bp, Homo sapien
tctcatcgacctctagaaccttggg

SEQ ID NO: 3018998 - DNA, 25 bp, Homo sapien
tcctgtactcagcatccatctctag

SEQ ID NO: 3018999 - DNA, 25 bp, Homo sapien
aggactgggcgcctaggaccagcaa

SEQ ID NO: 3019000 - DNA, 25 bp, Homo sapien
atggttgctcaggactgggcgccta

SEQ ID NO: 3019001 - DNA, 25 bp, Homo sapien
tgggcgcctaggaccagcaatagtt

SEQ ID NO: 3019002 - DNA, 25 bp, Homo sapien
tcagtagtcatttcgatcccgtttc

SEQ ID NO: 3019003 - DNA, 25 bp, Homo sapien
catggggcgatatgatggctgtttc

SEQ ID NO: 3019004 - DNA, 25 bp, Homo sapien
catttcgatcccgtttccgtgaaga

SEQ ID NO: 3019005 - DNA, 25 bp, Homo sapien
gatcccgtttccgtgaagacatggg

SEQ ID NO: 3019006 - DNA, 25 bp, Homo sapien
tgggctgttctggaagttgcaagag

SEQ ID NO: 3019007 - DNA, 25 bp, Homo sapien
ctgggctgttctggaagttgcaaga

SEQ ID NO: 3019008 - DNA, 25 bp, Homo sapien
gggaatcacttggtgctcgtgcaag

SEQ ID NO: 3019009 - DNA, 25 bp, Homo sapien
caatgagtttctgctcaagtccatg

SEQ ID NO: 3019010 - DNA, 25 bp, Homo sapien
cacttggtgctcgtgcaaggaggaa

SEQ ID NO: 3019011 - DNA, 25 bp, Homo sapien
aaggaggaagccggcaatgagtttc

SEQ ID NO: 3019012 - DNA, 25 bp, Homo sapien
ttgtgaatcccagcaactgagcagg

SEQ ID NO: 3019013 - DNA, 25 bp, Homo sapien
tcttcaagtttcatggaggcgtgcg

SEQ ID NO: 3019014 - DNA, 25 bp, Homo sapien
gggtcctcggactgtggctttctca

SEQ ID NO: 3019015 - DNA, 25 bp, Homo sapien
ttgccaaagagtggatcagaccctc

SEQ ID NO: 3019016 - DNA, 25 bp, Homo sapien
aaaagagcttgttccccatcgctct

SEQ ID NO: 3019017 - DNA, 25 bp, Homo sapien
ctgacatctcaaatagaggcaaaag

SEQ ID NO: 3019018 - DNA, 25 bp, Homo sapien
ccatcgctcttccaatcattcctca

SEQ ID NO: 3019019 - DNA, 25 bp, Homo sapien
catctcaaatagaggcaaaagagct

SEQ ID NO: 3019020 - DNA, 25 bp, Homo sapien
cctgttgctttttatgggatgcctg

SEQ ID NO: 3019021 - DNA, 25 bp, Homo sapien
tgccctgttgctttttatgggatgc

SEQ ID NO: 3019022 - DNA, 25 bp, Homo sapien
gccctgttgctttttatgggatgcc

SEQ ID NO: 3019023 - DNA, 25 bp, Homo sapien
ggtgccctgttgctttttatgggat

SEQ ID NO: 3019024 - DNA, 25 bp, Homo sapien
gcaggtatgagactctcccatattt

SEQ ID NO: 3019025 - DNA, 25 bp, Homo sapien
tgtcaaggcaggtatgagactctcc

SEQ ID NO: 3019026 - DNA, 25 bp, Homo sapien
tgagaacgtgggcagctgttgttcc

SEQ ID NO: 3019027 - DNA, 25 bp, Homo sapien
agggctttcctaggagccatccaag

SEQ ID NO: 3019028 - DNA, 25 bp, Homo sapien
gtgcaatgagcaggagattctgagc

SEQ ID NO: 3019029 - DNA, 25 bp, Homo sapien
gcctagaaggctctgtagaggttgc

SEQ ID NO: 3019030 - DNA, 25 bp, Homo sapien
cctagaaggctctgtagaggttgct

SEQ ID NO: 3019031 - DNA, 25 bp, Homo sapien
gaagaaacctacatacaaactgcat

SEQ ID NO: 3019032 - DNA, 25 bp, Homo sapien
gacttgtgacgatttgaagaaacct

SEQ ID NO: 3019033 - DNA, 25 bp, Homo sapien
cacgtgcgcacgttacctaatgaac

SEQ ID NO: 3019034 - DNA, 25 bp, Homo sapien
gagatagggtctgcctgtcttccag

SEQ ID NO: 3019035 - DNA, 25 bp, Homo sapien
agggctttggcccacatgccgttcg

SEQ ID NO: 3019036 - DNA, 25 bp, Homo sapien
gccgttcggccaggagctacatttt

SEQ ID NO: 3019037 - DNA, 25 bp, Homo sapien
actggttactgagccaaaagactct

SEQ ID NO: 3019038 - DNA, 25 bp, Homo sapien
tgagccaaaagactctgaatgccat

SEQ ID NO: 3019039 - DNA, 25 bp, Homo sapien
gacagttctcaagatgtccttcggg

SEQ ID NO: 3019040 - DNA, 25 bp, Homo sapien
gagccgggagcgctaaagcgagggc

SEQ ID NO: 3019041 - DNA, 25 bp, Homo sapien
gcgctaaagcgagggcaattgtgta

SEQ ID NO: 3019042 - DNA, 25 bp, Homo sapien
taattgagcagtgacgtgggagaca

SEQ ID NO: 3019043 - DNA, 25 bp, Homo sapien
gttttttgttatccgtgcactgagg

SEQ ID NO: 3019044 - DNA, 25 bp, Homo sapien
caagttttttgttatccgtgcactg

SEQ ID NO: 3019045 - DNA, 25 bp, Homo sapien
ttttgttatccgtgcactgaggcca

SEQ ID NO: 3019046 - DNA, 25 bp, Homo sapien
tgttatccgtgcactgaggccatgc

SEQ ID NO: 3019047 - DNA, 25 bp, Homo sapien
tttccaccaccatggcgcacgtgaa

SEQ ID NO: 3019048 - DNA, 25 bp, Homo sapien
catggcgcacgtgaatcctatatat

SEQ ID NO: 3019049 - DNA, 25 bp, Homo sapien
accaccatggcgcacgtgaatccta

SEQ ID NO: 3019050 - DNA, 25 bp, Homo sapien
caccatggcgcacgtgaatcctata

SEQ ID NO: 3019051 - DNA, 25 bp, Homo sapien
cttcttcctccgtggctcctggaga

SEQ ID NO: 3019052 - DNA, 25 bp, Homo sapien
ttcttcctccgtggctcctggagat

SEQ ID NO: 3019053 - DNA, 25 bp, Homo sapien
tcttcctccgtggctcctggagatc

SEQ ID NO: 3019054 - DNA, 25 bp, Homo sapien
ggcatgttcaggatggtatgtcctt

SEQ ID NO: 3019055 - DNA, 25 bp, Homo sapien
atcaggcatgttcaggatggtatgt

SEQ ID NO: 3019056 - DNA, 25 bp, Homo sapien
tgagatcaggcatgttcaggatggt

SEQ ID NO: 3019057 - DNA, 25 bp, Homo sapien
caggcatgttcaggatggtatgtcc

SEQ ID NO: 3019058 - DNA, 25 bp, Homo sapien
tcctttgcgatatccaagttttcat

SEQ ID NO: 3019059 - DNA, 25 bp, Homo sapien
tctgcatctctaccacatcctcact

SEQ ID NO: 3019060 - DNA, 25 bp, Homo sapien
ttgctgacctcctttgcgatatcca

SEQ ID NO: 3019061 - DNA, 25 bp, Homo sapien
tggccatcacgtcttctcttctgca

SEQ ID NO: 3019062 - DNA, 25 bp, Homo sapien
tggagaagacaagctgagtgttgtc

SEQ ID NO: 3019063 - DNA, 25 bp, Homo sapien
ggagaagacaagctgagtgttgtcc

SEQ ID NO: 3019064 - DNA, 25 bp, Homo sapien
gagaagacaagctgagtgttgtcca

SEQ ID NO: 3019065 - DNA, 25 bp, Homo sapien
agaagacaagctgagtgttgtccat

SEQ ID NO: 3019066 - DNA, 25 bp, Homo sapien
tattgttcggtacaggataactctc

SEQ ID NO: 3019067 - DNA, 25 bp, Homo sapien
tattttgtggctctctattgttcgg

SEQ ID NO: 3019068 - DNA, 25 bp, Homo sapien
gtgacgttcctaccagagcaaacag

SEQ ID NO: 3019069 - DNA, 25 bp, Homo sapien
gggattttaaagacctctgactgca

SEQ ID NO: 3019070 - DNA, 25 bp, Homo sapien
cagatacacgtgctggtacagcagc

SEQ ID NO: 3019071 - DNA, 25 bp, Homo sapien
cactcgggcacgtgtgttggagcac

SEQ ID NO: 3019072 - DNA, 25 bp, Homo sapien
gtacatggtagaatgcagatacacg

SEQ ID NO: 3019073 - DNA, 25 bp, Homo sapien
cacacactcgggcacgtgtgttgga

SEQ ID NO: 3019074 - DNA, 25 bp, Homo sapien
cgcaaattcttagacccatcttcac

SEQ ID NO: 3019075 - DNA, 25 bp, Homo sapien
gcacatgttctgactcgcaaattct

SEQ ID NO: 3019076 - DNA, 25 bp, Homo sapien
aattccacggctgcacatgttctga

SEQ ID NO: 3019077 - DNA, 25 bp, Homo sapien
gggccagaattccacggctgcacat

SEQ ID NO: 3019078 - DNA, 25 bp, Homo sapien
tgcaaccagaacttctgatccagaa

SEQ ID NO: 3019079 - DNA, 25 bp, Homo sapien
gcaaccagaacttctgatccagaaa

SEQ ID NO: 3019080 - DNA, 25 bp, Homo sapien
tctgatccagaaacacatcttctat

SEQ ID NO: 3019081 - DNA, 25 bp, Homo sapien
cttgcaaccagaacttctgatccag

SEQ ID NO: 3019082 - DNA, 25 bp, Homo sapien
gagcgttcacagaagtgattcttga

SEQ ID NO: 3019083 - DNA, 25 bp, Homo sapien
aatgtggctgcattaatgatgatgc

SEQ ID NO: 3019084 - DNA, 25 bp, Homo sapien
gattcttgactcttttaattgcacc

SEQ ID NO: 3019085 - DNA, 25 bp, Homo sapien
ggctgtaaacgggaccttgtgcaat

SEQ ID NO: 3019086 - DNA, 25 bp, Homo sapien
tgtgtgcctggctgcgcataagatt

SEQ ID NO: 3019087 - DNA, 25 bp, Homo sapien
tggcatctctcatgacacacagagt

SEQ ID NO: 3019088 - DNA, 25 bp, Homo sapien
gatggtcttgtttgtgtcacagtgc

SEQ ID NO: 3019089 - DNA, 25 bp, Homo sapien
tgcaagagtttgaggtgacaccaga

SEQ ID NO: 3019090 - DNA, 25 bp, Homo sapien
atgagacatgggtttggggggttgg

SEQ ID NO: 3019091 - DNA, 25 bp, Homo sapien
tgtgagggtgaagggcaatcagctg

SEQ ID NO: 3019092 - DNA, 25 bp, Homo sapien
ggatgctgacattgtgagggtgaag

SEQ ID NO: 3019093 - DNA, 25 bp, Homo sapien
acattgtgagggtgaagggcaatca

SEQ ID NO: 3019094 - DNA, 25 bp, Homo sapien
tcacaaggcagaagcagccatgggg

SEQ ID NO: 3019095 - DNA, 25 bp, Homo sapien
cagtgcgaatttgaagagaaacaag

SEQ ID NO: 3019096 - DNA, 25 bp, Homo sapien
tcagtgcgaatttgaagagaaacaa

SEQ ID NO: 3019097 - DNA, 25 bp, Homo sapien
ctggtctttaatcgggggagaactg

SEQ ID NO: 3019098 - DNA, 25 bp, Homo sapien
tgaactttaaggcttcacatgtgtc

SEQ ID NO: 3019099 - DNA, 25 bp, Homo sapien
tccagtgtactttagtggcaaaact

SEQ ID NO: 3019100 - DNA, 25 bp, Homo sapien
tatgctcttagttcccacagtttag

SEQ ID NO: 3019101 - DNA, 25 bp, Homo sapien
aaacacaagtaataagcatcttcat

SEQ ID NO: 3019102 - DNA, 25 bp, Homo sapien
tccccggtggctgttcccaatttgc

SEQ ID NO: 3019103 - DNA, 25 bp, Homo sapien
taactgaattgtcctgagagtgagg

SEQ ID NO: 3019104 - DNA, 25 bp, Homo sapien
tctctgagctgatccatgcatgtag

SEQ ID NO: 3019105 - DNA, 25 bp, Homo sapien
tgtgattcttagcatggcctttggc

SEQ ID NO: 3019106 - DNA, 25 bp, Homo sapien
aatgaggcagtgcatgcgaggaaac

SEQ ID NO: 3019107 - DNA, 25 bp, Homo sapien
caaaaagctgtgattttgtaggagt

SEQ ID NO: 3019108 - DNA, 25 bp, Homo sapien
tttgtctgagctccagtacgatttg

SEQ ID NO: 3019109 - DNA, 25 bp, Homo sapien
tctcctccaccaattctgtcaccag

SEQ ID NO: 3019110 - DNA, 25 bp, Homo sapien
ctgtcaccagacagacatcttgatt

SEQ ID NO: 3019111 - DNA, 25 bp, Homo sapien
caaattgtttcgataggaagtggca

SEQ ID NO: 3019112 - DNA, 25 bp, Homo sapien
tattagcaccaaattgtttcgatag

SEQ ID NO: 3019113 - DNA, 25 bp, Homo sapien
taggaagtggcatcagcaataaaaa

SEQ ID NO: 3019114 - DNA, 25 bp, Homo sapien
tattataggggcttattagcaccaa

SEQ ID NO: 3019115 - DNA, 25 bp, Homo sapien
aataattggtgctgactggcccaca

SEQ ID NO: 3019116 - DNA, 25 bp, Homo sapien
gcaaacttctgagaaacggttggat

SEQ ID NO: 3019117 - DNA, 25 bp, Homo sapien
tctggctccgtggagatacagctgc

SEQ ID NO: 3019118 - DNA, 25 bp, Homo sapien
tttaataattggtgctgactggccc

SEQ ID NO: 3019119 - DNA, 25 bp, Homo sapien
tctgagttaatcgttccaagacagg

SEQ ID NO: 3019120 - DNA, 25 bp, Homo sapien
tccagcgagcgttcaggcactaatg

SEQ ID NO: 3019121 - DNA, 25 bp, Homo sapien
tcagagccacatgaggattccagcg

SEQ ID NO: 3019122 - DNA, 25 bp, Homo sapien
catgcacagattgcacgtgggagga

SEQ ID NO: 3019123 - DNA, 25 bp, Homo sapien
catgcacagtggttggctggcacca

SEQ ID NO: 3019124 - DNA, 25 bp, Homo sapien
gcaccaagcgtggttagtaccattc

SEQ ID NO: 3019125 - DNA, 25 bp, Homo sapien
gaaagttgcacagccttctcaggca

SEQ ID NO: 3019126 - DNA, 25 bp, Homo sapien
ctttacccagaagtaagcatgcaca

SEQ ID NO: 3019127 - DNA, 25 bp, Homo sapien
tgcctggcccgccaatgctgtttga

SEQ ID NO: 3019128 - DNA, 25 bp, Homo sapien
tccaagcctggtctctaaaaatctc

SEQ ID NO: 3019129 - DNA, 25 bp, Homo sapien
ggcagacaagcaagtaacctcggaa

SEQ ID NO: 3019130 - DNA, 25 bp, Homo sapien
gtcacaacatggaacaaacctgggt

SEQ ID NO: 3019131 - DNA, 25 bp, Homo sapien
aagggcagagcctccgtaactacca

SEQ ID NO: 3019132 - DNA, 25 bp, Homo sapien
aagcctaaagggatggacaagggca

SEQ ID NO: 3019133 - DNA, 25 bp, Homo sapien
tagagtccagcatttctatccgctg

SEQ ID NO: 3019134 - DNA, 25 bp, Homo sapien
tatccgctgacctttaaagcctaaa

SEQ ID NO: 3019135 - DNA, 25 bp, Homo sapien
agttcttaaacattgcacgtccgga

SEQ ID NO: 3019136 - DNA, 25 bp, Homo sapien
tcataaaagcggtgagtccagagtt

SEQ ID NO: 3019137 - DNA, 25 bp, Homo sapien
tgtcacagcgggaagaaaagaggtc

SEQ ID NO: 3019138 - DNA, 25 bp, Homo sapien
cacgtgttcagaagcgtccagagtt

SEQ ID NO: 3019139 - DNA, 25 bp, Homo sapien
tggctgaactgggagatagcgtgct

SEQ ID NO: 3019140 - DNA, 25 bp, Homo sapien
gctgtactgtcttgagggcgctgca

SEQ ID NO: 3019141 - DNA, 25 bp, Homo sapien
cacatgctgagatcaatgccacggg

SEQ ID NO: 3019142 - DNA, 25 bp, Homo sapien
aactgggagatagcgtgctgggagc

SEQ ID NO: 3019143 - DNA, 25 bp, Homo sapien
tccaggttgagctcggcagctggaa

SEQ ID NO: 3019144 - DNA, 25 bp, Homo sapien
ccaggttgagctcggcagctggaag

SEQ ID NO: 3019145 - DNA, 25 bp, Homo sapien
gtccaggttgagctcggcagctgga

SEQ ID NO: 3019146 - DNA, 25 bp, Homo sapien
ggaaatgaacggttctcaccactta

SEQ ID NO: 3019147 - DNA, 25 bp, Homo sapien
ctggaaatgaacggttctcaccact

SEQ ID NO: 3019148 - DNA, 25 bp, Homo sapien
aatgaacggttctcaccacttaaag

SEQ ID NO: 3019149 - DNA, 25 bp, Homo sapien
atgaacggttctcaccacttaaagt

SEQ ID NO: 3019150 - DNA, 25 bp, Homo sapien
tacaagcgcctgattcttggaagaa

SEQ ID NO: 3019151 - DNA, 25 bp, Homo sapien
tttacaagcgcctgattcttggaag

SEQ ID NO: 3019152 - DNA, 25 bp, Homo sapien
ttacaagcgcctgattcttggaaga

SEQ ID NO: 3019153 - DNA, 25 bp, Homo sapien
ctttacaagcgcctgattcttggaa

SEQ ID NO: 3019154 - DNA, 25 bp, Homo sapien
acacatacagttgtcagtaattttc

SEQ ID NO: 3019155 - DNA, 25 bp, Homo sapien
caagtcgatttctgaatcactttac

SEQ ID NO: 3019156 - DNA, 25 bp, Homo sapien
cttaagacaagtcgatttctgaatc

SEQ ID NO: 3019157 - DNA, 25 bp, Homo sapien
tttacacatacagttgtcagtaatt

SEQ ID NO: 3019158 - DNA, 25 bp, Homo sapien
accaggtcgcggttgccctccagag

SEQ ID NO: 3019159 - DNA, 25 bp, Homo sapien
caggtcgcggttgccctccagagac

SEQ ID NO: 3019160 - DNA, 25 bp, Homo sapien
tgagcaccaggtcgcggttgccctc

SEQ ID NO: 3019161 - DNA, 25 bp, Homo sapien
gcaccaggtcgcggttgccctccag

SEQ ID NO: 3019162 - DNA, 25 bp, Homo sapien
ctttcaggactctagttttgttcat

SEQ ID NO: 3019163 - DNA, 25 bp, Homo sapien
gctgtgcactttcaggactctagtt

SEQ ID NO: 3019164 - DNA, 25 bp, Homo sapien
attccccagactcgctgtgcacttt

SEQ ID NO: 3019165 - DNA, 25 bp, Homo sapien
cagactcgctgtgcactttcaggac

SEQ ID NO: 3019166 - DNA, 25 bp, Homo sapien
tgacaggacggatgcttaactctag

SEQ ID NO: 3019167 - DNA, 25 bp, Homo sapien
aagggcccactgatacggcctttca

SEQ ID NO: 3019168 - DNA, 25 bp, Homo sapien
cggcctttcaaatgcaattcctcaa

SEQ ID NO: 3019169 - DNA, 25 bp, Homo sapien
gatgatctctcggtccattcttgca

SEQ ID NO: 3019170 - DNA, 25 bp, Homo sapien
cttcttctccgtgcctgggatctgg

SEQ ID NO: 3019171 - DNA, 25 bp, Homo sapien
gctctcaagggggttgtttctccaa

SEQ ID NO: 3019172 - DNA, 25 bp, Homo sapien
agagctgtagtccaagcccaggagt

SEQ ID NO: 3019173 - DNA, 25 bp, Homo sapien
gatctgggaaggctctcaagggggt

SEQ ID NO: 3019174 - DNA, 25 bp, Homo sapien
gccgccaaccggaccctgagtgcag

SEQ ID NO: 3019175 - DNA, 25 bp, Homo sapien
cggccgcgccgccaaccggaccctg

SEQ ID NO: 3019176 - DNA, 25 bp, Homo sapien
ggcgccctggcacggggcggccgcg

SEQ ID NO: 3019177 - DNA, 25 bp, Homo sapien
gaccctgagtgcaggcggcgctgcc

SEQ ID NO: 3019178 - DNA, 25 bp, Homo sapien
actgctgttggacggctttgactga

SEQ ID NO: 3019179 - DNA, 25 bp, Homo sapien
gaaggtgagactcctcttaatccat

SEQ ID NO: 3019180 - DNA, 25 bp, Homo sapien
tccctgttggactcatagttagctg

SEQ ID NO: 3019181 - DNA, 25 bp, Homo sapien
gcatgtggctggctcaaaagctgag

SEQ ID NO: 3019182 - DNA, 25 bp, Homo sapien
gcatacgccactcagataagaatgt

SEQ ID NO: 3019183 - DNA, 25 bp, Homo sapien
cagataagaatgttgtctgcaagtg

SEQ ID NO: 3019184 - DNA, 25 bp, Homo sapien
gtgggaggagatgtattttccttgc

SEQ ID NO: 3019185 - DNA, 25 bp, Homo sapien
tgggaggagatgtattttccttgca

SEQ ID NO: 3019186 - DNA, 25 bp, Homo sapien
aaatggttgcaagtcctggcacacg

SEQ ID NO: 3019187 - DNA, 25 bp, Homo sapien
taatttccagagattcggcagtgcc

SEQ ID NO: 3019188 - DNA, 25 bp, Homo sapien
tctgtcttgaggattcaaccgggtc

SEQ ID NO: 3019189 - DNA, 25 bp, Homo sapien
ggctttgagcacaccagctgtatga

SEQ ID NO: 3019190 - DNA, 25 bp, Homo sapien
ttttcaagcccgcacactaggatag

SEQ ID NO: 3019191 - DNA, 25 bp, Homo sapien
tactaagtctcaggcccatgatgga

SEQ ID NO: 3019192 - DNA, 25 bp, Homo sapien
gggacagtcctagcaagccattttg

SEQ ID NO: 3019193 - DNA, 25 bp, Homo sapien
taataggcaggtatccggtacagtg

SEQ ID NO: 3019194 - DNA, 25 bp, Homo sapien
tccagcatacagaggacaagggagc

SEQ ID NO: 3019195 - DNA, 25 bp, Homo sapien
ctgtaggagagccacacagaaaaag

SEQ ID NO: 3019196 - DNA, 25 bp, Homo sapien
gccatctccagcatacagaggacaa

SEQ ID NO: 3019197 - DNA, 25 bp, Homo sapien
gcatacagaggacaagggagccatc

SEQ ID NO: 3019198 - DNA, 25 bp, Homo sapien
ggtcataataaaagctcgttgtaag

SEQ ID NO: 3019199 - DNA, 25 bp, Homo sapien
aagctcgttgtaaggatgactcctc

SEQ ID NO: 3019200 - DNA, 25 bp, Homo sapien
cacaaaaggtcataataaaagctcg

SEQ ID NO: 3019201 - DNA, 25 bp, Homo sapien
ctgcagcacaaaaggtcataataaa

SEQ ID NO: 3019202 - DNA, 25 bp, Homo sapien
ggctcaggctgcaaccaatacttga

SEQ ID NO: 3019203 - DNA, 25 bp, Homo sapien
tctcacagctgatctttgcccaggg

SEQ ID NO: 3019204 - DNA, 25 bp, Homo sapien
tctttaataaagaaactctgcgatc

SEQ ID NO: 3019205 - DNA, 25 bp, Homo sapien
caagctgatccaaaaagcaatcaag

SEQ ID NO: 3019206 - DNA, 25 bp, Homo sapien
tattgaggcattgtcctcagctgca

SEQ ID NO: 3019207 - DNA, 25 bp, Homo sapien
gctgcatggccaaagctgaactgca

SEQ ID NO: 3019208 - DNA, 25 bp, Homo sapien
cagctgcatggccaaagctgaactg

SEQ ID NO: 3019209 - DNA, 25 bp, Homo sapien
catggccaaagctgaactgcagcat

SEQ ID NO: 3019210 - DNA, 25 bp, Homo sapien
tatttcacggaagtgacaacccaca

SEQ ID NO: 3019211 - DNA, 25 bp, Homo sapien
tcacggaagtgacaacccacaaagg

SEQ ID NO: 3019212 - DNA, 25 bp, Homo sapien
tatgcacccctatttcacggaagtg

SEQ ID NO: 3019213 - DNA, 25 bp, Homo sapien
ccagcggtatatgcacccctatttc

SEQ ID NO: 3019214 - DNA, 25 bp, Homo sapien
caacctttaggtgaaagcgagcttt

SEQ ID NO: 3019215 - DNA, 25 bp, Homo sapien
ggcactgacaacctttaggtgaaag

SEQ ID NO: 3019216 - DNA, 25 bp, Homo sapien
gcgagctttacaacaccaaatggaa

SEQ ID NO: 3019217 - DNA, 25 bp, Homo sapien
taggtgaaagcgagctttacaacac

SEQ ID NO: 3019218 - DNA, 25 bp, Homo sapien
ccgcagcaacgtaggacttcaggga

SEQ ID NO: 3019219 - DNA, 25 bp, Homo sapien
cacatccgcagcaacgtaggacttc

SEQ ID NO: 3019220 - DNA, 25 bp, Homo sapien
cttcagggaaacttctaagacaatg

SEQ ID NO: 3019221 - DNA, 25 bp, Homo sapien
gggaaacttctaagacaatgcgatt

SEQ ID NO: 3019222 - DNA, 25 bp, Homo sapien
tagcaaatgaggtagtacaaaggac

SEQ ID NO: 3019223 - DNA, 25 bp, Homo sapien
ctgaaatagcaaatgaggtagtaca

SEQ ID NO: 3019224 - DNA, 25 bp, Homo sapien
gcaaatgaggtagtacaaaggacat

SEQ ID NO: 3019225 - DNA, 25 bp, Homo sapien
aatagcaaatgaggtagtacaaagg

SEQ ID NO: 3019226 - DNA, 25 bp, Homo sapien
tgttatctcggagactgtccgtgga

SEQ ID NO: 3019227 - DNA, 25 bp, Homo sapien
catagtttccagataactgggcatt

SEQ ID NO: 3019228 - DNA, 25 bp, Homo sapien
tagtttccagataactgggcattca

SEQ ID NO: 3019229 - DNA, 25 bp, Homo sapien
ctgtccgtggataagcatagtttcc

SEQ ID NO: 3019230 - DNA, 25 bp, Homo sapien
tcaaactgccagtgcggcatctaga

SEQ ID NO: 3019231 - DNA, 25 bp, Homo sapien
tgtccagatgagatggtgatccagg

SEQ ID NO: 3019232 - DNA, 25 bp, Homo sapien
ttggtgtcattgtctctcgggtggt

SEQ ID NO: 3019233 - DNA, 25 bp, Homo sapien
gcatctagagaagtctgtgtccaga

SEQ ID NO: 3019234 - DNA, 25 bp, Homo sapien
gggatgtgacgtggatgatttggat

SEQ ID NO: 3019235 - DNA, 25 bp, Homo sapien
cagatagcggtgcaggggatgtgac

SEQ ID NO: 3019236 - DNA, 25 bp, Homo sapien
tgcaggggatgtgacgtggatgatt

SEQ ID NO: 3019237 - DNA, 25 bp, Homo sapien
atgtgacgtggatgatttggattag

SEQ ID NO: 3019238 - DNA, 25 bp, Homo sapien
tctggctgagatgcacccactctca

SEQ ID NO: 3019239 - DNA, 25 bp, Homo sapien
agaaaagttctgttggtcaatctct

SEQ ID NO: 3019240 - DNA, 25 bp, Homo sapien
ttgagtttgtctcacgactcacagt

SEQ ID NO: 3019241 - DNA, 25 bp, Homo sapien
gtttgtctcacgactcacagttcca

SEQ ID NO: 3019242 - DNA, 25 bp, Homo sapien
gatgtaatgaattgttctttgaagg

SEQ ID NO: 3019243 - DNA, 25 bp, Homo sapien
tgaattgttctttgaaggacaatgg

SEQ ID NO: 3019244 - DNA, 25 bp, Homo sapien
taatgaattgttctttgaaggacaa

SEQ ID NO: 3019245 - DNA, 25 bp, Homo sapien
tgtatcatttgatgtaatgaattgt

SEQ ID NO: 3019246 - DNA, 25 bp, Homo sapien
ctagcagaaccatttgacgattggg

SEQ ID NO: 3019247 - DNA, 25 bp, Homo sapien
cccgaagtaactgagcagggcttaa

SEQ ID NO: 3019248 - DNA, 25 bp, Homo sapien
tgtcccctcgtggtatcacatgcta

SEQ ID NO: 3019249 - DNA, 25 bp, Homo sapien
gctgttccatcaaactgaagtcgta

SEQ ID NO: 3019250 - DNA, 25 bp, Homo sapien
ttggcgaggtcaggggtgaacaacc

SEQ ID NO: 3019251 - DNA, 25 bp, Homo sapien
ggtcaggggtgaacaacccagcact

SEQ ID NO: 3019252 - DNA, 25 bp, Homo sapien
gcactcactcccatttgctgttgct

SEQ ID NO: 3019253 - DNA, 25 bp, Homo sapien
agcactcactcccatttgctgttgc

SEQ ID NO: 3019254 - DNA, 25 bp, Homo sapien
ccactggcggttttgctgagtgaat

SEQ ID NO: 3019255 - DNA, 25 bp, Homo sapien
tcaccactggcggttttgctgagtg

SEQ ID NO: 3019256 - DNA, 25 bp, Homo sapien
ctggcggttttgctgagtgaatgca

SEQ ID NO: 3019257 - DNA, 25 bp, Homo sapien
caccactggcggttttgctgagtga

SEQ ID NO: 3019258 - DNA, 25 bp, Homo sapien
ctgaggatggaccatgccaacacaa

SEQ ID NO: 3019259 - DNA, 25 bp, Homo sapien
tggtcccctttgtttccgccagcag

SEQ ID NO: 3019260 - DNA, 25 bp, Homo sapien
gggtgcccagagtatttgccaacag

SEQ ID NO: 3019261 - DNA, 25 bp, Homo sapien
gagatctttggggtgcccagagtat

SEQ ID NO: 3019262 - DNA, 25 bp, Homo sapien
tgggctaggcacttagcaatggtcc

SEQ ID NO: 3019263 - DNA, 25 bp, Homo sapien
tcagccgtatcacacactccaggag

SEQ ID NO: 3019264 - DNA, 25 bp, Homo sapien
acagagaaactttccctccacttgc

SEQ ID NO: 3019265 - DNA, 25 bp, Homo sapien
cagagaaactttccctccacttgct

SEQ ID NO: 3019266 - DNA, 25 bp, Homo sapien
ttatcagagtcagccgtatcacaca

SEQ ID NO: 3019267 - DNA, 25 bp, Homo sapien
tactgtggtatctaagccggtgtgc

SEQ ID NO: 3019268 - DNA, 25 bp, Homo sapien
caaggtcctacgagtgttgtgagca

SEQ ID NO: 3019269 - DNA, 25 bp, Homo sapien
gcctcaagatgaaagctaacctaga

SEQ ID NO: 3019270 - DNA, 25 bp, Homo sapien
gagagtttcagcatcctaagtgtgt

SEQ ID NO: 3019271 - DNA, 25 bp, Homo sapien
catcagcgggggctcttccacttca

SEQ ID NO: 3019272 - DNA, 25 bp, Homo sapien
agaagcaccgtctagcatcagcggg

SEQ ID NO: 3019273 - DNA, 25 bp, Homo sapien
ttttttataggctctagaggcagct

SEQ ID NO: 3019274 - DNA, 25 bp, Homo sapien
tttataggctctagaggcagcttgg

SEQ ID NO: 3019275 - DNA, 25 bp, Homo sapien
ggtgatgatgcgagttactgcctgc

SEQ ID NO: 3019276 - DNA, 25 bp, Homo sapien
gatgcgagttactgcctgccctcct

SEQ ID NO: 3019277 - DNA, 25 bp, Homo sapien
catggaggtgatgatgcgagttact

SEQ ID NO: 3019278 - DNA, 25 bp, Homo sapien
gaatgtgacatacaggtccccatgg

SEQ ID NO: 3019279 - DNA, 25 bp, Homo sapien
cacagaacaaccctgaacagatctc

SEQ ID NO: 3019280 - DNA, 25 bp, Homo sapien
ctggtttgggtatggccatcctgct

SEQ ID NO: 3019281 - DNA, 25 bp, Homo sapien
cgtcatcccatccaaataatgctgt

SEQ ID NO: 3019282 - DNA, 25 bp, Homo sapien
gctgcccagacaggcactccatggg

SEQ ID NO: 3019283 - DNA, 25 bp, Homo sapien
cataagccaactgtagagggtgggc

SEQ ID NO: 3019284 - DNA, 25 bp, Homo sapien
gaccataagccaactgtagagggtg

SEQ ID NO: 3019285 - DNA, 25 bp, Homo sapien
ctgtagagggtagagcagaaaagtc

SEQ ID NO: 3019286 - DNA, 25 bp, Homo sapien
gggaccataagccaactgtagaggg

SEQ ID NO: 3019287 - DNA, 25 bp, Homo sapien
aaggtaatgagaaagcgatggggct

SEQ ID NO: 3019288 - DNA, 25 bp, Homo sapien
ggtaatgagaaagcgatggggctat

SEQ ID NO: 3019289 - DNA, 25 bp, Homo sapien
taatgagaaagcgatggggctatag

SEQ ID NO: 3019290 - DNA, 25 bp, Homo sapien
gaaggtaatgagaaagcgatggggc

SEQ ID NO: 3019291 - DNA, 25 bp, Homo sapien
ttatggatttcgtgctccccagaga

SEQ ID NO: 3019292 - DNA, 25 bp, Homo sapien
tctactcttctcagcacgactgtcc

SEQ ID NO: 3019293 - DNA, 25 bp, Homo sapien
gaattgtggtgcagctcagactgca

SEQ ID NO: 3019294 - DNA, 25 bp, Homo sapien
cgactgtccccgtttgtgtgaattg

SEQ ID NO: 3019295 - DNA, 25 bp, Homo sapien
ggttttgctaggacatcagagttga

SEQ ID NO: 3019296 - DNA, 25 bp, Homo sapien
catatccaagggagattagagcccc

SEQ ID NO: 3019297 - DNA, 25 bp, Homo sapien
aactacaaatgtgtccttaaggctg

SEQ ID NO: 3019298 - DNA, 25 bp, Homo sapien
tctttcgtcttacaggatgccacta

SEQ ID NO: 3019299 - DNA, 25 bp, Homo sapien
cagtaataaagctttttagcagaga

SEQ ID NO: 3019300 - DNA, 25 bp, Homo sapien
ctccagtaataaagctttttagcag

SEQ ID NO: 3019301 - DNA, 25 bp, Homo sapien
agccctgacctttttgctgaactcc

SEQ ID NO: 3019302 - DNA, 25 bp, Homo sapien
cctgacctttttgctgaactccagt

SEQ ID NO: 3019303 - DNA, 25 bp, Homo sapien
ctgaggcaggcctcagcgagggaac

SEQ ID NO: 3019304 - DNA, 25 bp, Homo sapien
tggaaccttctgcaatggctgcctc

SEQ ID NO: 3019305 - DNA, 25 bp, Homo sapien
gctgaagcgatggtaattgcacact

SEQ ID NO: 3019306 - DNA, 25 bp, Homo sapien
taattctggtgctcttcgtggaacc

SEQ ID NO: 3019307 - DNA, 25 bp, Homo sapien
ggtaccctgaagcacctttgtcatg

SEQ ID NO: 3019308 - DNA, 25 bp, Homo sapien
tgctcaactccaaacccaaccacag

SEQ ID NO: 3019309 - DNA, 25 bp, Homo sapien
tttccagacagctagacagtacata

SEQ ID NO: 3019310 - DNA, 25 bp, Homo sapien
ttttcatcatagaagagctcattga

SEQ ID NO: 3019311 - DNA, 25 bp, Homo sapien
agacagctagacagtacatattttc

SEQ ID NO: 3019312 - DNA, 25 bp, Homo sapien
gcatatgtttttccagacagctaga

SEQ ID NO: 3019313 - DNA, 25 bp, Homo sapien
tcatggggctcttgtccagtgttgt

SEQ ID NO: 3019314 - DNA, 25 bp, Homo sapien
catcaaactcagaaggaagcaatat

SEQ ID NO: 3019315 - DNA, 25 bp, Homo sapien
aataaaatagaaggtcatcaaactc

SEQ ID NO: 3019316 - DNA, 25 bp, Homo sapien
gcaatattctagttcatggggctct

SEQ ID NO: 3019317 - DNA, 25 bp, Homo sapien
gacctaacatgttgcttctgataca

SEQ ID NO: 3019318 - DNA, 25 bp, Homo sapien
ccattggtatgacctaacatgttgc

SEQ ID NO: 3019319 - DNA, 25 bp, Homo sapien
accaaaatttacctggtgagaccat

SEQ ID NO: 3019320 - DNA, 25 bp, Homo sapien
tacctggtgagaccattggtatgac

SEQ ID NO: 3019321 - DNA, 25 bp, Homo sapien
ggcatgcatgcaataagtaggtaga

SEQ ID NO: 3019322 - DNA, 25 bp, Homo sapien
gattatggcttaagtggaagtcact

SEQ ID NO: 3019323 - DNA, 25 bp, Homo sapien
tagtgaagaggctgcattgtaatga

SEQ ID NO: 3019324 - DNA, 25 bp, Homo sapien
caggcttccaaggaacaatctggga

SEQ ID NO: 3019325 - DNA, 25 bp, Homo sapien
ccaactgtaagagcccataggctgt

SEQ ID NO: 3019326 - DNA, 25 bp, Homo sapien
tcccaactgtaagagcccataggct

SEQ ID NO: 3019327 - DNA, 25 bp, Homo sapien
cccaactgtaagagcccataggctg

SEQ ID NO: 3019328 - DNA, 25 bp, Homo sapien
tgagtgaaagcatgtacttggattc

SEQ ID NO: 3019329 - DNA, 25 bp, Homo sapien
tggcttcctccacacacagatctgt

SEQ ID NO: 3019330 - DNA, 25 bp, Homo sapien
cactatctccttccggcatgtcatt

SEQ ID NO: 3019331 - DNA, 25 bp, Homo sapien
gattccataaatcccaggacactat

SEQ ID NO: 3019332 - DNA, 25 bp, Homo sapien
ttattaccacccgataaccagctag

SEQ ID NO: 3019333 - DNA, 25 bp, Homo sapien
tttgtatggggagcacgtggcctca

SEQ ID NO: 3019334 - DNA, 25 bp, Homo sapien
gggttctgacaatcacagtggacat

SEQ ID NO: 3019335 - DNA, 25 bp, Homo sapien
ccagctagatggtgttttgtatggg

SEQ ID NO: 3019336 - DNA, 25 bp, Homo sapien
gcattggcgtaagcatattcctgga

SEQ ID NO: 3019337 - DNA, 25 bp, Homo sapien
catattcctggataagactgtccgt

SEQ ID NO: 3019338 - DNA, 25 bp, Homo sapien
tattcctggataagactgtccgtca

SEQ ID NO: 3019339 - DNA, 25 bp, Homo sapien
cttccctgcattggcgtaagcatat

SEQ ID NO: 3019340 - DNA, 25 bp, Homo sapien
acaacatcacgttgccatcctgtct

SEQ ID NO: 3019341 - DNA, 25 bp, Homo sapien
aacaataacaacatcacgttgccat

SEQ ID NO: 3019342 - DNA, 25 bp, Homo sapien
caataacaacatcacgttgccatcc

SEQ ID NO: 3019343 - DNA, 25 bp, Homo sapien
taacaacatcacgttgccatcctgt

SEQ ID NO: 3019344 - DNA, 25 bp, Homo sapien
gccactgaggattgtacttcctcgc

SEQ ID NO: 3019345 - DNA, 25 bp, Homo sapien
gactgtccagaattcctaggtggat

SEQ ID NO: 3019346 - DNA, 25 bp, Homo sapien
gaggattgtacttcctcgctgctgc

SEQ ID NO: 3019347 - DNA, 25 bp, Homo sapien
cagtccccttggtagacagctgcac

SEQ ID NO: 3019348 - DNA, 25 bp, Homo sapien
gaagagctgccctttatggctctgt

SEQ ID NO: 3019349 - DNA, 25 bp, Homo sapien
cattagcagagtgctcttcaggtac

SEQ ID NO: 3019350 - DNA, 25 bp, Homo sapien
tttggcttccacctatgatagcact

SEQ ID NO: 3019351 - DNA, 25 bp, Homo sapien
gaagaattggttctgttgctaagaa

SEQ ID NO: 3019352 - DNA, 25 bp, Homo sapien
gatagcacttgaagaattggttctg

SEQ ID NO: 3019353 - DNA, 25 bp, Homo sapien
gctgtccttggcatgatctccccag

SEQ ID NO: 3019354 - DNA, 25 bp, Homo sapien
cgcctggctggcaacactttttcta

SEQ ID NO: 3019355 - DNA, 25 bp, Homo sapien
caagaggtgcaactaagtttagaca

SEQ ID NO: 3019356 - DNA, 25 bp, Homo sapien
agtggtgtctaataccagtgcacgc

SEQ ID NO: 3019357 - DNA, 25 bp, Homo sapien
caacatgcaccatcgctttacctga

SEQ ID NO: 3019358 - DNA, 25 bp, Homo sapien
catcgctttacctgatggatggctt

SEQ ID NO: 3019359 - DNA, 25 bp, Homo sapien
catgcaccatcgctttacctgatgg

SEQ ID NO: 3019360 - DNA, 25 bp, Homo sapien
gctttacctgatggatggctttctt

SEQ ID NO: 3019361 - DNA, 25 bp, Homo sapien
aggaccattcactttcagacttcca

SEQ ID NO: 3019362 - DNA, 25 bp, Homo sapien
gatcacgggtcagcataagcctaca

SEQ ID NO: 3019363 - DNA, 25 bp, Homo sapien
gttgctgagaattgccccaggacca

SEQ ID NO: 3019364 - DNA, 25 bp, Homo sapien
cacagaacattctcgaagtggatca

SEQ ID NO: 3019365 - DNA, 25 bp, Homo sapien
tgctttcacctttgaccttgctcct

SEQ ID NO: 3019366 - DNA, 25 bp, Homo sapien
tgtagagacgagctggactctctga

SEQ ID NO: 3019367 - DNA, 25 bp, Homo sapien
gggcagtgggtacgggcactccgtg

SEQ ID NO: 3019368 - DNA, 25 bp, Homo sapien
gacagtcgatcgtgactcacccagg

SEQ ID NO: 3019369 - DNA, 25 bp, Homo sapien
ggtggagttcctcgccgccaactgt

SEQ ID NO: 3019370 - DNA, 25 bp, Homo sapien
ctcttcctataaggacatgaatcaa

SEQ ID NO: 3019371 - DNA, 25 bp, Homo sapien
cagccggatctcttcctataaggac

SEQ ID NO: 3019372 - DNA, 25 bp, Homo sapien
atgcccagccggatctcttcctata

SEQ ID NO: 3019373 - DNA, 25 bp, Homo sapien
cggatctcttcctataaggacatga

SEQ ID NO: 3019374 - DNA, 25 bp, Homo sapien
ctctgttacttgatatggatggtca

SEQ ID NO: 3019375 - DNA, 25 bp, Homo sapien
tgctctgcaccgaggcacctggtgg

SEQ ID NO: 3019376 - DNA, 25 bp, Homo sapien
gaggcactcagtgtgccgacagtca

SEQ ID NO: 3019377 - DNA, 25 bp, Homo sapien
tggtcataccggttgtgctctgcac

SEQ ID NO: 3019378 - DNA, 25 bp, Homo sapien
caaggctgagcttcatacatggtca

SEQ ID NO: 3019379 - DNA, 25 bp, Homo sapien
tatctccccggctctggaagacaca

SEQ ID NO: 3019380 - DNA, 25 bp, Homo sapien
agccgtggcgaacgcagtctccagg

SEQ ID NO: 3019381 - DNA, 25 bp, Homo sapien
tgcagtgcccttgagaaggacacat

SEQ ID NO: 3019382 - DNA, 25 bp, Homo sapien
gcacacaatcactgctcaaagtgcc

SEQ ID NO: 3019383 - DNA, 25 bp, Homo sapien
cacacaatcactgctcaaagtgcct

SEQ ID NO: 3019384 - DNA, 25 bp, Homo sapien
ctgttgtcaagtcaagaatgttggg

SEQ ID NO: 3019385 - DNA, 25 bp, Homo sapien
ttgaggctgcttgtgcttaggatcc

SEQ ID NO: 3019386 - DNA, 25 bp, Homo sapien
gcttgtgcttaggatccactgacag

SEQ ID NO: 3019387 - DNA, 25 bp, Homo sapien
tgttgtcaagtcaagaatgttgggt

SEQ ID NO: 3019388 - DNA, 25 bp, Homo sapien
ggcacttttttctgaactttgaggc

SEQ ID NO: 3019389 - DNA, 25 bp, Homo sapien
taggcacttttttctgaactttgag

SEQ ID NO: 3019390 - DNA, 25 bp, Homo sapien
cacttttttctgaactttgaggctt

SEQ ID NO: 3019391 - DNA, 25 bp, Homo sapien
tgtaggcacttttttctgaactttg

SEQ ID NO: 3019392 - DNA, 25 bp, Homo sapien
tctgagagtttagcacagccaaaca

SEQ ID NO: 3019393 - DNA, 25 bp, Homo sapien
tatccctgttctgagagtttagcac

SEQ ID NO: 3019394 - DNA, 25 bp, Homo sapien
atacataagggattaaagggcctct

SEQ ID NO: 3019395 - DNA, 25 bp, Homo sapien
cataagggattaaagggcctcttct

SEQ ID NO: 3019396 - DNA, 25 bp, Homo sapien
gaagttgctaaacattgccccagag

SEQ ID NO: 3019397 - DNA, 25 bp, Homo sapien
gacctacgagaacatgaggattgga

SEQ ID NO: 3019398 - DNA, 25 bp, Homo sapien
aattgttacaatcacgacctacgag

SEQ ID NO: 3019399 - DNA, 25 bp, Homo sapien
tcccaggatatgctggacatcccag

SEQ ID NO: 3019400 - DNA, 25 bp, Homo sapien
gtttttcattcaggctggatgtgct

SEQ ID NO: 3019401 - DNA, 25 bp, Homo sapien
ggcatttttattttgctccatttcc

SEQ ID NO: 3019402 - DNA, 25 bp, Homo sapien
gactctggatttgtgtttttcattc

SEQ ID NO: 3019403 - DNA, 25 bp, Homo sapien
caggctggatgtgctgaggcatttt

SEQ ID NO: 3019404 - DNA, 25 bp, Homo sapien
ccatcccagcgctgttgatttctgt

SEQ ID NO: 3019405 - DNA, 25 bp, Homo sapien
catcccagcgctgttgatttctgtc

SEQ ID NO: 3019406 - DNA, 25 bp, Homo sapien
tccatcccagcgctgttgatttctg

SEQ ID NO: 3019407 - DNA, 25 bp, Homo sapien
tcttcaggttgggagataatgagat

SEQ ID NO: 3019408 - DNA, 25 bp, Homo sapien
tgggccgctcttcatttctacaaat

SEQ ID NO: 3019409 - DNA, 25 bp, Homo sapien
cctcctaatttatgatcttgttaac

SEQ ID NO: 3019410 - DNA, 25 bp, Homo sapien
tgcccgcatgccagatggtcctgtt

SEQ ID NO: 3019411 - DNA, 25 bp, Homo sapien
tctgagcccacatgcgctactacgt

SEQ ID NO: 3019412 - DNA, 25 bp, Homo sapien
tgcagccggtggtgacttcggatcc

SEQ ID NO: 3019413 - DNA, 25 bp, Homo sapien
tacgttctggagaagtgcagccggt

SEQ ID NO: 3019414 - DNA, 25 bp, Homo sapien
tgctccagcggtctctgagcccaca

SEQ ID NO: 3019415 - DNA, 25 bp, Homo sapien
ttcctggggttcatagactaagctg

SEQ ID NO: 3019416 - DNA, 25 bp, Homo sapien
cctggggttcatagactaagctgca

SEQ ID NO: 3019417 - DNA, 25 bp, Homo sapien
ggttcatagactaagctgcatttgt

SEQ ID NO: 3019418 - DNA, 25 bp, Homo sapien
tgggctgtgttctctagcatggggg

SEQ ID NO: 3019419 - DNA, 25 bp, Homo sapien
agattcagtttgcatgctgcctccc

SEQ ID NO: 3019420 - DNA, 25 bp, Homo sapien
cagattcagtttgcatgctgcctcc

SEQ ID NO: 3019421 - DNA, 25 bp, Homo sapien
ctgcctcccataagtttggacactg

SEQ ID NO: 3019422 - DNA, 25 bp, Homo sapien
ccataagtttggacactgagctaca

SEQ ID NO: 3019423 - DNA, 25 bp, Homo sapien
cccctgtagattctctcctgaggac

SEQ ID NO: 3019424 - DNA, 25 bp, Homo sapien
gaaccatgtcctgggcccctgtaga

SEQ ID NO: 3019425 - DNA, 25 bp, Homo sapien
tgctaggagacaccctgaagccttg

SEQ ID NO: 3019426 - DNA, 25 bp, Homo sapien
tctcctgaggaccagctctgctagg

SEQ ID NO: 3019427 - DNA, 25 bp, Homo sapien
tacgacatccattcctcaatactgg

SEQ ID NO: 3019428 - DNA, 25 bp, Homo sapien
ggcttgcagagcactccatttgagt

SEQ ID NO: 3019429 - DNA, 25 bp, Homo sapien
ttctctgtctctcgcatcctacgac

SEQ ID NO: 3019430 - DNA, 25 bp, Homo sapien
tgagttgttaaagcccattcctctc

SEQ ID NO: 3019431 - DNA, 25 bp, Homo sapien
cgaagcaaaaacaggctccccttcg

SEQ ID NO: 3019432 - DNA, 25 bp, Homo sapien
ggtgacgtcctttgcctattatctg

SEQ ID NO: 3019433 - DNA, 25 bp, Homo sapien
tatctgcctgcgaaaacttagccac

SEQ ID NO: 3019434 - DNA, 25 bp, Homo sapien
caggctccccttcggtcatttgcaa

SEQ ID NO: 3019435 - DNA, 25 bp, Homo sapien
tgaaaaatgctgtcccattgtccat

SEQ ID NO: 3019436 - DNA, 25 bp, Homo sapien
ttgagaaatgctctttcatcatgag

SEQ ID NO: 3019437 - DNA, 25 bp, Homo sapien
ctctttcatcatgaggaggaggtga

SEQ ID NO: 3019438 - DNA, 25 bp, Homo sapien
gaaatgctctttcatcatgaggagg

SEQ ID NO: 3019439 - DNA, 25 bp, Homo sapien
aatgctctttcatcatgaggaggag

SEQ ID NO: 3019440 - DNA, 25 bp, Homo sapien
gaacatcagggtcaactcagcaggg

SEQ ID NO: 3019441 - DNA, 25 bp, Homo sapien
ggaacatcagggtcaactcagcagg

SEQ ID NO: 3019442 - DNA, 25 bp, Homo sapien
ctgtctgccaagtaaactgagtgcc

SEQ ID NO: 3019443 - DNA, 25 bp, Homo sapien
taaactgagtgcctgagtggtcctg

SEQ ID NO: 3019444 - DNA, 25 bp, Homo sapien
caagtaaactgagtgcctgagtggt

SEQ ID NO: 3019445 - DNA, 25 bp, Homo sapien
tctgccaagtaaactgagtgcctga

SEQ ID NO: 3019446 - DNA, 25 bp, Homo sapien
taaaggcacgttctagggctgagca

SEQ ID NO: 3019447 - DNA, 25 bp, Homo sapien
tctgtgggaggattagagtctgcaa

SEQ ID NO: 3019448 - DNA, 25 bp, Homo sapien
gatttgctgctgtagtttcactgta

SEQ ID NO: 3019449 - DNA, 25 bp, Homo sapien
cgttggctccgatcggatttgctgc

SEQ ID NO: 3019450 - DNA, 25 bp, Homo sapien
ccaacagccagccagagaaatggaa

SEQ ID NO: 3019451 - DNA, 25 bp, Homo sapien
aatcttctcagttatacgattcatc

SEQ ID NO: 3019452 - DNA, 25 bp, Homo sapien
cattccaacagccagccagagaaat

SEQ ID NO: 3019453 - DNA, 25 bp, Homo sapien
tcttctcagttatacgattcatcat

SEQ ID NO: 3019454 - DNA, 25 bp, Homo sapien
agccgatggctctgaactgcggtgt

SEQ ID NO: 3019455 - DNA, 25 bp, Homo sapien
ttgaccagcgccagccgatggctct

SEQ ID NO: 3019456 - DNA, 25 bp, Homo sapien
gaagaaataggcaccgggatcttcc

SEQ ID NO: 3019457 - DNA, 25 bp, Homo sapien
tgcggtgtaagtggtgcaagaatta

SEQ ID NO: 3019458 - DNA, 25 bp, Homo sapien
acagcaggcagatcaagccacgtat

SEQ ID NO: 3019459 - DNA, 25 bp, Homo sapien
gcaggcagatcaagccacgtatacc

SEQ ID NO: 3019460 - DNA, 25 bp, Homo sapien
gcagatcaagccacgtataccatat

SEQ ID NO: 3019461 - DNA, 25 bp, Homo sapien
caagccacgtataccatattccact

SEQ ID NO: 3019462 - DNA, 25 bp, Homo sapien
caagtgcccggcataatggccatat

SEQ ID NO: 3019463 - DNA, 25 bp, Homo sapien
gagaaagctgccatggataaggtgt

SEQ ID NO: 3019464 - DNA, 25 bp, Homo sapien
caatgtagaaagtggtaagcacccc

SEQ ID NO: 3019465 - DNA, 25 bp, Homo sapien
caagttgcactgtgtcagatctgcc

SEQ ID NO: 3019466 - DNA, 25 bp, Homo sapien
gaagaaggaagctcagataagcaat

SEQ ID NO: 3019467 - DNA, 25 bp, Homo sapien
tggctacaggcccagaatatctgcc

SEQ ID NO: 3019468 - DNA, 25 bp, Homo sapien
gaagctcagataagcaatccagtat

SEQ ID NO: 3019469 - DNA, 25 bp, Homo sapien
tacaggcccagaatatctgccactt

SEQ ID NO: 3019470 - DNA, 25 bp, Homo sapien
cttctccccatccgggggactcagc

SEQ ID NO: 3019471 - DNA, 25 bp, Homo sapien
ctccccatccgggggactcagctgc

SEQ ID NO: 3019472 - DNA, 25 bp, Homo sapien
tccttctccccatccgggggactca

SEQ ID NO: 3019473 - DNA, 25 bp, Homo sapien
tctccccatccgggggactcagctg

SEQ ID NO: 3019474 - DNA, 25 bp, Homo sapien
gacctgaccatgactgccactcagg

SEQ ID NO: 3019475 - DNA, 25 bp, Homo sapien
gcctccccattggtgggaactccac

SEQ ID NO: 3019476 - DNA, 25 bp, Homo sapien
ttttggctgtagccttcgcagaggg

SEQ ID NO: 3019477 - DNA, 25 bp, Homo sapien
gccctgaggatttcacccttgagtt

SEQ ID NO: 3019478 - DNA, 25 bp, Homo sapien
cgtgcctcctctggatcaaagggac

SEQ ID NO: 3019479 - DNA, 25 bp, Homo sapien
tattcctcctagctgatccttcaga

SEQ ID NO: 3019480 - DNA, 25 bp, Homo sapien
tgctcagttcagagatcactcctac

SEQ ID NO: 3019481 - DNA, 25 bp, Homo sapien
gttcagagatcactcctactgcctg

SEQ ID NO: 3019482 - DNA, 25 bp, Homo sapien
gtttgcctcactggtgtatccttca

SEQ ID NO: 3019483 - DNA, 25 bp, Homo sapien
ccccagtgcacggagccaagggctt

SEQ ID NO: 3019484 - DNA, 25 bp, Homo sapien
atcagagctctcaatgaaaacaatg

SEQ ID NO: 3019485 - DNA, 25 bp, Homo sapien
tgcccctgtgagttgataccccagt

SEQ ID NO: 3019486 - DNA, 25 bp, Homo sapien
tttcctgtcatcctgtccgaatctg

SEQ ID NO: 3019487 - DNA, 25 bp, Homo sapien
cctgtccgaatctgggaaattttgc

SEQ ID NO: 3019488 - DNA, 25 bp, Homo sapien
gtcatcctgtccgaatctgggaaat

SEQ ID NO: 3019489 - DNA, 25 bp, Homo sapien
gaatctgggaaattttgctctggag

SEQ ID NO: 3019490 - DNA, 25 bp, Homo sapien
tcaccacggcaatcatggagaagat

SEQ ID NO: 3019491 - DNA, 25 bp, Homo sapien
tgtttcaccacggcaatcatggaga

SEQ ID NO: 3019492 - DNA, 25 bp, Homo sapien
ctacataaggcagggggtccgtaca

SEQ ID NO: 3019493 - DNA, 25 bp, Homo sapien
tttcaccacggcaatcatggagaag

SEQ ID NO: 3019494 - DNA, 25 bp, Homo sapien
caaccagcttcagtgacaagattag

SEQ ID NO: 3019495 - DNA, 25 bp, Homo sapien
caccccagactttcctaatcagaat

SEQ ID NO: 3019496 - DNA, 25 bp, Homo sapien
tagcctgacgattttaggcaaccag

SEQ ID NO: 3019497 - DNA, 25 bp, Homo sapien
tagccttggtctatgtagcctgacg

SEQ ID NO: 3019498 - DNA, 25 bp, Homo sapien
gacctacgtggccatgagcctgcgg

SEQ ID NO: 3019499 - DNA, 25 bp, Homo sapien
gacgactgcgactcctggggaccta

SEQ ID NO: 3019500 - DNA, 25 bp, Homo sapien
tcgctagggaaaccgatgcagctgg

SEQ ID NO: 3019501 - DNA, 25 bp, Homo sapien
tccgtgcccaataggaagggagcag

SEQ ID NO: 3019502 - DNA, 25 bp, Homo sapien
tggttcagaagccacaccagctgct

SEQ ID NO: 3019503 - DNA, 25 bp, Homo sapien
tttgaagctgcgcaacacaaggtca

SEQ ID NO: 3019504 - DNA, 25 bp, Homo sapien
gcccctggatagtagatagacactg

SEQ ID NO: 3019505 - DNA, 25 bp, Homo sapien
ttattcacacggcaatccaggctgg

SEQ ID NO: 3019506 - DNA, 25 bp, Homo sapien
gtgagccccacgcaaaccagcagag

SEQ ID NO: 3019507 - DNA, 25 bp, Homo sapien
gatctgtttggccagcgtcctggct

SEQ ID NO: 3019508 - DNA, 25 bp, Homo sapien
gcaaaccagcagagcttgatctgtt

SEQ ID NO: 3019509 - DNA, 25 bp, Homo sapien
taacttgcagggtgatgaaggctgc

SEQ ID NO: 3019510 - DNA, 25 bp, Homo sapien
gctgaggctcattcaaaaccttgca

SEQ ID NO: 3019511 - DNA, 25 bp, Homo sapien
tgtgggctagcctgaaagtgtgtcc

SEQ ID NO: 3019512 - DNA, 25 bp, Homo sapien
ttgggttttgcttccgagaacctga

SEQ ID NO: 3019513 - DNA, 25 bp, Homo sapien
ttttgcttccgagaacctgagaggc

SEQ ID NO: 3019514 - DNA, 25 bp, Homo sapien
tgcccagggtaagagcagatgaacc

SEQ ID NO: 3019515 - DNA, 25 bp, Homo sapien
tgtgcactgatcatcaaacccaggc

SEQ ID NO: 3019516 - DNA, 25 bp, Homo sapien
tgtataagaactagagtggctgccc

SEQ ID NO: 3019517 - DNA, 25 bp, Homo sapien
gcaagtccccactctaatttagagg

SEQ ID NO: 3019518 - DNA, 25 bp, Homo sapien
gccgaccgcatgtccgtggagaatg

SEQ ID NO: 3019519 - DNA, 25 bp, Homo sapien
cattctcatcaactgtgagcgctgg

SEQ ID NO: 3019520 - DNA, 25 bp, Homo sapien
tggcagaacgagggcctcccagccg

SEQ ID NO: 3019521 - DNA, 25 bp, Homo sapien
aactgtgagcgctggccactcatgg

SEQ ID NO: 3019522 - DNA, 25 bp, Homo sapien
ccaggcttcagtggcttgggccttg

SEQ ID NO: 3019523 - DNA, 25 bp, Homo sapien
caccaggcttcagtggcttgggcct

SEQ ID NO: 3019524 - DNA, 25 bp, Homo sapien
ttaccacgtgaagggacttgaatgg

SEQ ID NO: 3019525 - DNA, 25 bp, Homo sapien
ctgtgggaaagttaccacgtgaagg

SEQ ID NO: 3019526 - DNA, 25 bp, Homo sapien
tgggttctgctagactctggaagac

SEQ ID NO: 3019527 - DNA, 25 bp, Homo sapien
gttctgccactagagcctgcagtgt

SEQ ID NO: 3019528 - DNA, 25 bp, Homo sapien
cctggaggaccagttgctggccgct

SEQ ID NO: 3019529 - DNA, 25 bp, Homo sapien
ctgatcaacttcaccgtgaccaggg

SEQ ID NO: 3019530 - DNA, 25 bp, Homo sapien
tagataagatctagagagtattacc

SEQ ID NO: 3019531 - DNA, 25 bp, Homo sapien
ggactgcactgaatatgtagataag

SEQ ID NO: 3019532 - DNA, 25 bp, Homo sapien
tcagtgaacatggattgtcttgcca

SEQ ID NO: 3019533 - DNA, 25 bp, Homo sapien
gcttgaatttcagtaaggactgcac

SEQ ID NO: 3019534 - DNA, 25 bp, Homo sapien
cctgtaatgtaaggccaaggacaat

SEQ ID NO: 3019535 - DNA, 25 bp, Homo sapien
caaggacaatggataaggatttgcc

SEQ ID NO: 3019536 - DNA, 25 bp, Homo sapien
tatcaggtagtttccccataaagca

SEQ ID NO: 3019537 - DNA, 25 bp, Homo sapien
tttggtagataccaggcctcactgt

SEQ ID NO: 3019538 - DNA, 25 bp, Homo sapien
atttattaaaagacgcaaatggaat

SEQ ID NO: 3019539 - DNA, 25 bp, Homo sapien
cagaggattcacagctgagtaggca

SEQ ID NO: 3019540 - DNA, 25 bp, Homo sapien
tatttattaaaagacgcaaatggaa

SEQ ID NO: 3019541 - DNA, 25 bp, Homo sapien
acttgtaacaaaggtaccgctctgg

SEQ ID NO: 3019542 - DNA, 25 bp, Homo sapien
tatactaaaatggtggatacgtggc

SEQ ID NO: 3019543 - DNA, 25 bp, Homo sapien
tacggtaaactacggactctgagtg

SEQ ID NO: 3019544 - DNA, 25 bp, Homo sapien
catagaatgtacaacgcaaagggca

SEQ ID NO: 3019545 - DNA, 25 bp, Homo sapien
cagtcaaacacacagtgaacaaaca

SEQ ID NO: 3019546 - DNA, 25 bp, Homo sapien
tgctacattatgaacttgaggttta

SEQ ID NO: 3019547 - DNA, 25 bp, Homo sapien
cgatcgtctgaacattagcctagga

SEQ ID NO: 3019548 - DNA, 25 bp, Homo sapien
caactgcctagggtcttctatgaaa

SEQ ID NO: 3019549 - DNA, 25 bp, Homo sapien
cctatgacaaagaacacacgtgagc

SEQ ID NO: 3019550 - DNA, 25 bp, Homo sapien
ggaacagaagacctgctctagaact

SEQ ID NO: 3019551 - DNA, 25 bp, Homo sapien
tatgcttctccccttctggaacaga

SEQ ID NO: 3019552 - DNA, 25 bp, Homo sapien
tgaggttcttcccataagcagtgac

SEQ ID NO: 3019553 - DNA, 25 bp, Homo sapien
gatgtttgtcaaggctcgagctcca

SEQ ID NO: 3019554 - DNA, 25 bp, Homo sapien
caatcctgagaagtcactaaagcct

SEQ ID NO: 3019555 - DNA, 25 bp, Homo sapien
tggattttctcgtggtggcgcaatc

SEQ ID NO: 3019556 - DNA, 25 bp, Homo sapien
tctgaactccgcagaaaggcttttt

SEQ ID NO: 3019557 - DNA, 25 bp, Homo sapien
tgccccttctgggaggtctctctct

SEQ ID NO: 3019558 - DNA, 25 bp, Homo sapien
gccccttctgggaggtctctctctt

SEQ ID NO: 3019559 - DNA, 25 bp, Homo sapien
cttctgggccatgggggctcttggc

SEQ ID NO: 3019560 - DNA, 25 bp, Homo sapien
ccacactccctgcaggtggggagct

SEQ ID NO: 3019561 - DNA, 25 bp, Homo sapien
aagaagcccctcaaggaagcctgag

SEQ ID NO: 3019562 - DNA, 25 bp, Homo sapien
ttgacaggaagcatgcaggagctcc

SEQ ID NO: 3019563 - DNA, 25 bp, Homo sapien
gcaaatgctgacctagttgtttctc

SEQ ID NO: 3019564 - DNA, 25 bp, Homo sapien
gtggacatttctcctgaatgaggat

SEQ ID NO: 3019565 - DNA, 25 bp, Homo sapien
gatcttctcattgacatgaaggtat

SEQ ID NO: 3019566 - DNA, 25 bp, Homo sapien
ttctcattgacatgaaggtatattc

SEQ ID NO: 3019567 - DNA, 25 bp, Homo sapien
gggatcttctcattgacatgaaggt

SEQ ID NO: 3019568 - DNA, 25 bp, Homo sapien
caggtgggtcttgggatcttctcat

SEQ ID NO: 3019569 - DNA, 25 bp, Homo sapien
gaattagtcaggtcagatttgggat

SEQ ID NO: 3019570 - DNA, 25 bp, Homo sapien
attgaattagtcaggtcagatttgg

SEQ ID NO: 3019571 - DNA, 25 bp, Homo sapien
attagtcaggtcagatttgggatgg

SEQ ID NO: 3019572 - DNA, 25 bp, Homo sapien
tgaattagtcaggtcagatttggga

SEQ ID NO: 3019573 - DNA, 25 bp, Homo sapien
tatagagagaaagatgtatggtggg

SEQ ID NO: 3019574 - DNA, 25 bp, Homo sapien
ctatagagagaaagatgtatggtgg

SEQ ID NO: 3019575 - DNA, 25 bp, Homo sapien
atagagagaaagatgtatggtgggc

SEQ ID NO: 3019576 - DNA, 25 bp, Homo sapien
tggaatccagttgtctccactgttc

SEQ ID NO: 3019577 - DNA, 25 bp, Homo sapien
ccagcatgagatcccagtattgctc

SEQ ID NO: 3019578 - DNA, 25 bp, Homo sapien
catgagatcccagtattgctccttt

SEQ ID NO: 3019579 - DNA, 25 bp, Homo sapien
agcatgagatcccagtattgctcct

SEQ ID NO: 3019580 - DNA, 25 bp, Homo sapien
cctatgaaacgacagactggagact

SEQ ID NO: 3019581 - DNA, 25 bp, Homo sapien
gcaaggtgtcccaatctccaaaaga

SEQ ID NO: 3019582 - DNA, 25 bp, Homo sapien
gaaaactggtaggttctctggagca

SEQ ID NO: 3019583 - DNA, 25 bp, Homo sapien
ttgtatagcaaagggattagcagcc

SEQ ID NO: 3019584 - DNA, 25 bp, Homo sapien
tcaccccaagggtttgcagagagaa

SEQ ID NO: 3019585 - DNA, 25 bp, Homo sapien
tgaataagataacatccgatggctt

SEQ ID NO: 3019586 - DNA, 25 bp, Homo sapien
ttcagaaaccgcaaagtggatagac

SEQ ID NO: 3019587 - DNA, 25 bp, Homo sapien
taaagcccttagcaaacaggtcctc

SEQ ID NO: 3019588 - DNA, 25 bp, Homo sapien
cacagtaatatctgcctggctgcct

SEQ ID NO: 3019589 - DNA, 25 bp, Homo sapien
ggatctattccatgaacaccagaac

SEQ ID NO: 3019590 - DNA, 25 bp, Homo sapien
gcttcagtgctagcagagaaaagga

SEQ ID NO: 3019591 - DNA, 25 bp, Homo sapien
caggagttctcagtctttgtggtca

SEQ ID NO: 3019592 - DNA, 25 bp, Homo sapien
tgaggctccgaggtcctggtctctg

SEQ ID NO: 3019593 - DNA, 25 bp, Homo sapien
gtgaggctccgaggtcctggtctct

SEQ ID NO: 3019594 - DNA, 25 bp, Homo sapien
agtgaggctccgaggtcctggtctc

SEQ ID NO: 3019595 - DNA, 25 bp, Homo sapien
gaggctccgaggtcctggtctctga

SEQ ID NO: 3019596 - DNA, 25 bp, Homo sapien
tccaagagaacaccacacagcacca

SEQ ID NO: 3019597 - DNA, 25 bp, Homo sapien
caatcccaaaatctctccaagagaa

SEQ ID NO: 3019598 - DNA, 25 bp, Homo sapien
caaaatctctccaagagaacaccac

SEQ ID NO: 3019599 - DNA, 25 bp, Homo sapien
agaacaccacacagcaccatcctca

SEQ ID NO: 3019600 - DNA, 25 bp, Homo sapien
ctttcacgatgtggctcagaagctc

SEQ ID NO: 3019601 - DNA, 25 bp, Homo sapien
tgtcagattcctctttcacgatgtg

SEQ ID NO: 3019602 - DNA, 25 bp, Homo sapien
gattcctctttcacgatgtggctca

SEQ ID NO: 3019603 - DNA, 25 bp, Homo sapien
tcctctttcacgatgtggctcagaa

SEQ ID NO: 3019604 - DNA, 25 bp, Homo sapien
tcttctctgataagatgtcctgtcc

SEQ ID NO: 3019605 - DNA, 25 bp, Homo sapien
cctgtcctagaacctggatactgat

SEQ ID NO: 3019606 - DNA, 25 bp, Homo sapien
gatgtcctgtcctagaacctggata

SEQ ID NO: 3019607 - DNA, 25 bp, Homo sapien
cttctctgataagatgtcctgtcct

SEQ ID NO: 3019608 - DNA, 25 bp, Homo sapien
gtgtttcactcgcagatcataatac

SEQ ID NO: 3019609 - DNA, 25 bp, Homo sapien
cctgtgtttcactcgcagatcataa

SEQ ID NO: 3019610 - DNA, 25 bp, Homo sapien
gccctgtgtttcactcgcagatcat

SEQ ID NO: 3019611 - DNA, 25 bp, Homo sapien
tgtttcactcgcagatcataatacc

SEQ ID NO: 3019612 - DNA, 25 bp, Homo sapien
aactgcctgaaaagctggcgtgcgg

SEQ ID NO: 3019613 - DNA, 25 bp, Homo sapien
tctgagaactgggagtcctcggcct

SEQ ID NO: 3019614 - DNA, 25 bp, Homo sapien
tcaagctttccacaagggtcactgc

SEQ ID NO: 3019615 - DNA, 25 bp, Homo sapien
catcacctggtaacggaactgcctg

SEQ ID NO: 3019616 - DNA, 25 bp, Homo sapien
aagtaaagtgcttctgcagtggaat

SEQ ID NO: 3019617 - DNA, 25 bp, Homo sapien
tgtctccggcaagaactaggtcttc

SEQ ID NO: 3019618 - DNA, 25 bp, Homo sapien
caagaactaggtcttcaccaggaca

SEQ ID NO: 3019619 - DNA, 25 bp, Homo sapien
cagtggaattgtctccggcaagaac

SEQ ID NO: 3019620 - DNA, 25 bp, Homo sapien
ctaaaaagggaatgagattgagtgc

SEQ ID NO: 3019621 - DNA, 25 bp, Homo sapien
aattcacatgccctacccgagaagc

SEQ ID NO: 3019622 - DNA, 25 bp, Homo sapien
tgaaattgctcaatggatacacgat

SEQ ID NO: 3019623 - DNA, 25 bp, Homo sapien
ccgagaagccatggggtcaactatg

SEQ ID NO: 3019624 - DNA, 25 bp, Homo sapien
gaaacttccaagagaggtcttttga

SEQ ID NO: 3019625 - DNA, 25 bp, Homo sapien
aaaagatattaatgccctaggaata

SEQ ID NO: 3019626 - DNA, 25 bp, Homo sapien
tgccatattaaaataggtctatttg

SEQ ID NO: 3019627 - DNA, 25 bp, Homo sapien
agctaatgcctacatgcttctgtaa

SEQ ID NO: 3019628 - DNA, 25 bp, Homo sapien
gaggcggaagttgcagtgagtcaag

SEQ ID NO: 3019629 - DNA, 25 bp, Homo sapien
caagatcgtaccactgcactccagc

SEQ ID NO: 3019630 - DNA, 25 bp, Homo sapien
cctgggcgacagagggagactccat

SEQ ID NO: 3019631 - DNA, 25 bp, Homo sapien
ctgaggtaggagaacagcctgaacc

SEQ ID NO: 3019632 - DNA, 25 bp, Homo sapien
taatagagtttatattccgataacc

SEQ ID NO: 3019633 - DNA, 25 bp, Homo sapien
cgataacctcatgaggaactgcccc

SEQ ID NO: 3019634 - DNA, 25 bp, Homo sapien
aggaactgcccccattagttatgaa

SEQ ID NO: 3019635 - DNA, 25 bp, Homo sapien
tatattccgataacctcatgaggaa

SEQ ID NO: 3019636 - DNA, 25 bp, Homo sapien
gggagaactgccaacgtctggtgat

SEQ ID NO: 3019637 - DNA, 25 bp, Homo sapien
gggcgttttctggttgtcacaagca

SEQ ID NO: 3019638 - DNA, 25 bp, Homo sapien
ggtgtacagatcaggaacctccgag

SEQ ID NO: 3019639 - DNA, 25 bp, Homo sapien
caagtggcagccagattaacccagg

SEQ ID NO: 3019640 - DNA, 25 bp, Homo sapien
cccgcacccacggtccactcccagc

SEQ ID NO: 3019641 - DNA, 25 bp, Homo sapien
acccacggtccactcccagccatgg

SEQ ID NO: 3019642 - DNA, 25 bp, Homo sapien
ccacggtccactcccagccatggct

SEQ ID NO: 3019643 - DNA, 25 bp, Homo sapien
gcacccacggtccactcccagccat

SEQ ID NO: 3019644 - DNA, 25 bp, Homo sapien
tgcggacgcagatagcgcaaggcct

SEQ ID NO: 3019645 - DNA, 25 bp, Homo sapien
agggagcccgctggcccctccgtag

SEQ ID NO: 3019646 - DNA, 25 bp, Homo sapien
gctgagtcaggtgcggacgcagata

SEQ ID NO: 3019647 - DNA, 25 bp, Homo sapien
cgctcccagacgcatgggcaaggga

SEQ ID NO: 3019648 - DNA, 25 bp, Homo sapien
ctcaggcggcaggcgaacgacgtgc

SEQ ID NO: 3019649 - DNA, 25 bp, Homo sapien
ggcgaacgacgtgcggcaccgggcg

SEQ ID NO: 3019650 - DNA, 25 bp, Homo sapien
ggcggcaggcgaacgacgtgcggca

SEQ ID NO: 3019651 - DNA, 25 bp, Homo sapien
caggcggcaggcgaacgacgtgcgg

SEQ ID NO: 3019652 - DNA, 25 bp, Homo sapien
ccagtgttgccggtttccaggccat

SEQ ID NO: 3019653 - DNA, 25 bp, Homo sapien
tttccccagcgtccagtgttgccgg

SEQ ID NO: 3019654 - DNA, 25 bp, Homo sapien
gcgtccagtgttgccggtttccagg

SEQ ID NO: 3019655 - DNA, 25 bp, Homo sapien
cccagcgtccagtgttgccggtttc

SEQ ID NO: 3019656 - DNA, 25 bp, Homo sapien
ctttgcccttgctgggtctgtgaca

SEQ ID NO: 3019657 - DNA, 25 bp, Homo sapien
ggactgatggccctgctgactttgg

SEQ ID NO: 3019658 - DNA, 25 bp, Homo sapien
ctccttcacattcaggtgcctgact

SEQ ID NO: 3019659 - DNA, 25 bp, Homo sapien
tcacttgatgctgcccgtggcctcc

SEQ ID NO: 3019660 - DNA, 25 bp, Homo sapien
tggtttttcagactgaacctttctc

SEQ ID NO: 3019661 - DNA, 25 bp, Homo sapien
gaaggtctcacagatcaattttaaa

SEQ ID NO: 3019662 - DNA, 25 bp, Homo sapien
acgtctgtcactgctaattagcaca

SEQ ID NO: 3019663 - DNA, 25 bp, Homo sapien
aacagcaagattggtgacacgtctg

SEQ ID NO: 3019664 - DNA, 25 bp, Homo sapien
ttgagcaagtttgcgctcaaatatt

SEQ ID NO: 3019665 - DNA, 25 bp, Homo sapien
cagagtctgagctgtagagcctgct

SEQ ID NO: 3019666 - DNA, 25 bp, Homo sapien
cagaaggcagaggagtcaaggttaa

SEQ ID NO: 3019667 - DNA, 25 bp, Homo sapien
ccatctggaccctgaaggtatttga

SEQ ID NO: 3019668 - DNA, 25 bp, Homo sapien
atagggaatatgttccagcacctca

SEQ ID NO: 3019669 - DNA, 25 bp, Homo sapien
gaatatgttccagcacctcaggctt

SEQ ID NO: 3019670 - DNA, 25 bp, Homo sapien
tagggaatatgttccagcacctcag

SEQ ID NO: 3019671 - DNA, 25 bp, Homo sapien
gggaatatgttccagcacctcaggc

SEQ ID NO: 3019672 - DNA, 25 bp, Homo sapien
aagtgtgcttttctgggcagtgcag

SEQ ID NO: 3019673 - DNA, 25 bp, Homo sapien
gaagtgtgcttttctgggcagtgca

SEQ ID NO: 3019674 - DNA, 25 bp, Homo sapien
ctggcacttcagttgaaccccaggt

SEQ ID NO: 3019675 - DNA, 25 bp, Homo sapien
tggcacttcagttgaaccccaggta

SEQ ID NO: 3019676 - DNA, 25 bp, Homo sapien
ggcacttcagttgaaccccaggtac

SEQ ID NO: 3019677 - DNA, 25 bp, Homo sapien
tcacgtgcttaacatgcccaataca

SEQ ID NO: 3019678 - DNA, 25 bp, Homo sapien
tggctcttcacgtgcttaacatgcc

SEQ ID NO: 3019679 - DNA, 25 bp, Homo sapien
tcttcacgtgcttaacatgcccaat

SEQ ID NO: 3019680 - DNA, 25 bp, Homo sapien
cgtgcttaacatgcccaatacacac

SEQ ID NO: 3019681 - DNA, 25 bp, Homo sapien
gaagaggcaacatccgtcactgggt

SEQ ID NO: 3019682 - DNA, 25 bp, Homo sapien
caatttgagggtgggcgttttgctc

SEQ ID NO: 3019683 - DNA, 25 bp, Homo sapien
aattcagtgctcgaatgacatccag

SEQ ID NO: 3019684 - DNA, 25 bp, Homo sapien
tgactgttccatccaaatagaggtg

SEQ ID NO: 3019685 - DNA, 25 bp, Homo sapien
ttctttccgcacaaatgcaggccca

SEQ ID NO: 3019686 - DNA, 25 bp, Homo sapien
cgcagccctggtccaagacagctgt

SEQ ID NO: 3019687 - DNA, 25 bp, Homo sapien
agacagctgtctgcttcacaggtcg

SEQ ID NO: 3019688 - DNA, 25 bp, Homo sapien
attctgcaaaccactttaggccccg

SEQ ID NO: 3019689 - DNA, 25 bp, Homo sapien
tcagcagcatgcagggtaaggaacg

SEQ ID NO: 3019690 - DNA, 25 bp, Homo sapien
taaggaacgcggccgcgccgagatc

SEQ ID NO: 3019691 - DNA, 25 bp, Homo sapien
cctagcgcggcaacccgcgtcgtcg

SEQ ID NO: 3019692 - DNA, 25 bp, Homo sapien
tgggccctaccgggctctcagcagg

SEQ ID NO: 3019693 - DNA, 25 bp, Homo sapien
ggatctccagggctgtttggagtcc

SEQ ID NO: 3019694 - DNA, 25 bp, Homo sapien
gaagggttgtggcagaggtgtagag

SEQ ID NO: 3019695 - DNA, 25 bp, Homo sapien
tgtggatctccagggctgtttggag

SEQ ID NO: 3019696 - DNA, 25 bp, Homo sapien
ggtgtggatctccagggctgtttgg

SEQ ID NO: 3019697 - DNA, 25 bp, Homo sapien
tcctcatgaagagcagttgagttgc

SEQ ID NO: 3019698 - DNA, 25 bp, Homo sapien
agttgagttgcccaatgtgtgccac

SEQ ID NO: 3019699 - DNA, 25 bp, Homo sapien
gaagagcagttgagttgcccaatgt

SEQ ID NO: 3019700 - DNA, 25 bp, Homo sapien
gttgattcctcatgaagagcagttg

SEQ ID NO: 3019701 - DNA, 25 bp, Homo sapien
caaagccagaagatgtctgactaat

SEQ ID NO: 3019702 - DNA, 25 bp, Homo sapien
ttggtggagtatacaaaagatcgcc

SEQ ID NO: 3019703 - DNA, 25 bp, Homo sapien
tgcagtgctgaaatggaaagttggt

SEQ ID NO: 3019704 - DNA, 25 bp, Homo sapien
gatcgccacgtcttatgactcatgg

SEQ ID NO: 3019705 - DNA, 25 bp, Homo sapien
ttggtcagttggacaaggtagtcag

SEQ ID NO: 3019706 - DNA, 25 bp, Homo sapien
ggagagaagtcagcttggaataaaa

SEQ ID NO: 3019707 - DNA, 25 bp, Homo sapien
aactgtgattcactatggagtcgaa

SEQ ID NO: 3019708 - DNA, 25 bp, Homo sapien
ctaagctcgggaggtgaaagccgca

SEQ ID NO: 3019709 - DNA, 25 bp, Homo sapien
gggccactcactagagctctgtgtc

SEQ ID NO: 3019710 - DNA, 25 bp, Homo sapien
gccactcactagagctctgtgtcat

SEQ ID NO: 3019711 - DNA, 25 bp, Homo sapien
tggggccactcactagagctctgtg

SEQ ID NO: 3019712 - DNA, 25 bp, Homo sapien
gcctggggccactcactagagctct

SEQ ID NO: 3019713 - DNA, 25 bp, Homo sapien
gctcccctctctgcgatgtgatgtt

SEQ ID NO: 3019714 - DNA, 25 bp, Homo sapien
ccaggtttctctttattgtgtggtg

SEQ ID NO: 3019715 - DNA, 25 bp, Homo sapien
tctatgaatgacttgtacactgcag

SEQ ID NO: 3019716 - DNA, 25 bp, Homo sapien
ttgtgtggtggttctagggaatacc

SEQ ID NO: 3019717 - DNA, 25 bp, Homo sapien
taaacaagggctatcaaatatggtg

SEQ ID NO: 3019718 - DNA, 25 bp, Homo sapien
gtagagacggtttccattcttacag

SEQ ID NO: 3019719 - DNA, 25 bp, Homo sapien
cagtggtcttcattaccatgaacaa

SEQ ID NO: 3019720 - DNA, 25 bp, Homo sapien
tctgattctgaccatacaggtaaca

SEQ ID NO: 3019721 - DNA, 25 bp, Homo sapien
cctcaaaactgcctttcaagttcat

SEQ ID NO: 3019722 - DNA, 25 bp, Homo sapien
ttcctcctcaaaactgcctttcaag

SEQ ID NO: 3019723 - DNA, 25 bp, Homo sapien
ttttcctcctcaaaactgcctttca

SEQ ID NO: 3019724 - DNA, 25 bp, Homo sapien
cctcctcaaaactgcctttcaagtt

SEQ ID NO: 3019725 - DNA, 25 bp, Homo sapien
tgagacccagcaaggtaacttgatc

SEQ ID NO: 3019726 - DNA, 25 bp, Homo sapien
actgatcagcatttgaagagttggg

SEQ ID NO: 3019727 - DNA, 25 bp, Homo sapien
gggtacacagatgagacccagcaag

SEQ ID NO: 3019728 - DNA, 25 bp, Homo sapien
gagttggggtacacagatgagaccc

SEQ ID NO: 3019729 - DNA, 25 bp, Homo sapien
tctgctctcaatttaggcattgaat

SEQ ID NO: 3019730 - DNA, 25 bp, Homo sapien
tatcctggtgttgtcgttatctctg

SEQ ID NO: 3019731 - DNA, 25 bp, Homo sapien
cattgaattagaatagcgacataca

SEQ ID NO: 3019732 - DNA, 25 bp, Homo sapien
gttgtcgttatctctgtgtccttga

SEQ ID NO: 3019733 - DNA, 25 bp, Homo sapien
tgtatagaccagtgaacctgagatt

SEQ ID NO: 3019734 - DNA, 25 bp, Homo sapien
caatgtatagaccagtgaacctgag

SEQ ID NO: 3019735 - DNA, 25 bp, Homo sapien
gaccagtgaacctgagatttggctt

SEQ ID NO: 3019736 - DNA, 25 bp, Homo sapien
ttggcttttgttgagagcctttttg

SEQ ID NO: 3019737 - DNA, 25 bp, Homo sapien
gaaacttctctagtaatgaactata

SEQ ID NO: 3019738 - DNA, 25 bp, Homo sapien
atcttaggtgctctgcatgttcaga

SEQ ID NO: 3019739 - DNA, 25 bp, Homo sapien
ctagtaatgaactatagaaatgacc

SEQ ID NO: 3019740 - DNA, 25 bp, Homo sapien
agaaatgacccctgaaagtatagtc

SEQ ID NO: 3019741 - DNA, 25 bp, Homo sapien
gctagagttgcccttaagtgtataa

SEQ ID NO: 3019742 - DNA, 25 bp, Homo sapien
tgctaaactcaaattccagtagctt

SEQ ID NO: 3019743 - DNA, 25 bp, Homo sapien
gggagcattgatatcttaacagtat

SEQ ID NO: 3019744 - DNA, 25 bp, Homo sapien
cctgccttcagatttactacataga

SEQ ID NO: 3019745 - DNA, 25 bp, Homo sapien
ttttgatgtatgaagaacgtgccgt

SEQ ID NO: 3019746 - DNA, 25 bp, Homo sapien
gtttttattgctcgcccagacacca

SEQ ID NO: 3019747 - DNA, 25 bp, Homo sapien
aacgtgccgttgaggtcgcatgcta

SEQ ID NO: 3019748 - DNA, 25 bp, Homo sapien
tatcgctgctacatcagactctaga

SEQ ID NO: 3019749 - DNA, 25 bp, Homo sapien
gaaacggcagcctttacgttcatca

SEQ ID NO: 3019750 - DNA, 25 bp, Homo sapien
gttcatcacctgctagaacctctcg

SEQ ID NO: 3019751 - DNA, 25 bp, Homo sapien
accagatgaggatccgaaacggcag

SEQ ID NO: 3019752 - DNA, 25 bp, Homo sapien
ctagagacacattggaccagatgag

SEQ ID NO: 3019753 - DNA, 25 bp, Homo sapien
tagccaggttctcattaggttttgc

SEQ ID NO: 3019754 - DNA, 25 bp, Homo sapien
cagcactgtgagtggttcaagcaca

SEQ ID NO: 3019755 - DNA, 25 bp, Homo sapien
gcctccctggcactgaaccttaggc

SEQ ID NO: 3019756 - DNA, 25 bp, Homo sapien
gaaccttaggctttgtatgacagtg

SEQ ID NO: 3019757 - DNA, 25 bp, Homo sapien
tcaaaaagctaatgtgcagggatat

SEQ ID NO: 3019758 - DNA, 25 bp, Homo sapien
gaccgttctattgtgtggatgacca

SEQ ID NO: 3019759 - DNA, 25 bp, Homo sapien
gactgtccaggagctaatctgaccg

SEQ ID NO: 3019760 - DNA, 25 bp, Homo sapien
gctcagcatagggtcactttgccat

SEQ ID NO: 3019761 - DNA, 25 bp, Homo sapien
tagctttgcttgaacaggtgtcaca

SEQ ID NO: 3019762 - DNA, 25 bp, Homo sapien
ttgcttatccttcttgaaaccacag

SEQ ID NO: 3019763 - DNA, 25 bp, Homo sapien
ttcccatggctaccctttttgctta

SEQ ID NO: 3019764 - DNA, 25 bp, Homo sapien
tcttaatgctaaaggaagtgggtac

SEQ ID NO: 3019765 - DNA, 25 bp, Homo sapien
agagattatgtgtctccatctcttg

SEQ ID NO: 3019766 - DNA, 25 bp, Homo sapien
tcttggcagtgtgtagagattatgt

SEQ ID NO: 3019767 - DNA, 25 bp, Homo sapien
tgtagagattatgtgtctccatctc

SEQ ID NO: 3019768 - DNA, 25 bp, Homo sapien
cagtgtgtagagattatgtgtctcc

SEQ ID NO: 3019769 - DNA, 25 bp, Homo sapien
cctttccaggaagaccaggaattat

SEQ ID NO: 3019770 - DNA, 25 bp, Homo sapien
tcacagagctcctttccaggaagac

SEQ ID NO: 3019771 - DNA, 25 bp, Homo sapien
tcctttccaggaagaccaggaatta

SEQ ID NO: 3019772 - DNA, 25 bp, Homo sapien
cagagctcctttccaggaagaccag

SEQ ID NO: 3019773 - DNA, 25 bp, Homo sapien
gcagcccatagaattctctgtaagg

SEQ ID NO: 3019774 - DNA, 25 bp, Homo sapien
atgcaggagatgcatgttctgtttc

SEQ ID NO: 3019775 - DNA, 25 bp, Homo sapien
tgacatcccatgtcagaactgagcc

SEQ ID NO: 3019776 - DNA, 25 bp, Homo sapien
ctctgtaaggttttacccccagatg

SEQ ID NO: 3019777 - DNA, 25 bp, Homo sapien
tcttccctgtgagctggccccatcc

SEQ ID NO: 3019778 - DNA, 25 bp, Homo sapien
tcctgtcttccctgtgagctggccc

SEQ ID NO: 3019779 - DNA, 25 bp, Homo sapien
tgtcttccctgtgagctggccccat

SEQ ID NO: 3019780 - DNA, 25 bp, Homo sapien
ttagaagcatctcctgtcttccctg

SEQ ID NO: 3019781 - DNA, 25 bp, Homo sapien
tgtgggtggacatgtctaccacttc

SEQ ID NO: 3019782 - DNA, 25 bp, Homo sapien
ctgatgtgggtggacatgtctacca

SEQ ID NO: 3019783 - DNA, 25 bp, Homo sapien
tgccactgatgtgggtggacatgtc

SEQ ID NO: 3019784 - DNA, 25 bp, Homo sapien
cactgatgtgggtggacatgtctac

SEQ ID NO: 3019785 - DNA, 25 bp, Homo sapien
tcaacccactgaaggttgtcctctg

SEQ ID NO: 3019786 - DNA, 25 bp, Homo sapien
gcctcatgggctctcttggttttgg

SEQ ID NO: 3019787 - DNA, 25 bp, Homo sapien
ctggatttccacacaaagctcatct

SEQ ID NO: 3019788 - DNA, 25 bp, Homo sapien
taaacactctaagcatgcattgctg

SEQ ID NO: 3019789 - DNA, 25 bp, Homo sapien
tttctccttccatagacccctcatc

SEQ ID NO: 3019790 - DNA, 25 bp, Homo sapien
ttccttccatagaaaccctgggatc

SEQ ID NO: 3019791 - DNA, 25 bp, Homo sapien
tagaaaccctgggatccaaacagga

SEQ ID NO: 3019792 - DNA, 25 bp, Homo sapien
acaggactgggaggttctttctcct

SEQ ID NO: 3019793 - DNA, 25 bp, Homo sapien
ttattgcagatgtccgtagcctttg

SEQ ID NO: 3019794 - DNA, 25 bp, Homo sapien
tgcagatgtccgtagcctttgtggg

SEQ ID NO: 3019795 - DNA, 25 bp, Homo sapien
tctattattgcagatgtccgtagcc

SEQ ID NO: 3019796 - DNA, 25 bp, Homo sapien
tctctctctattattgcagatgtcc

SEQ ID NO: 3019797 - DNA, 25 bp, Homo sapien
agtctagatgtttgcaccgggtaga

SEQ ID NO: 3019798 - DNA, 25 bp, Homo sapien
tgcaccgggtagacaaaatattgaa

SEQ ID NO: 3019799 - DNA, 25 bp, Homo sapien
tgtttggcagaattgctcaattgtc

SEQ ID NO: 3019800 - DNA, 25 bp, Homo sapien
tggcagaattgctcaattgtccttt

SEQ ID NO: 3019801 - DNA, 25 bp, Homo sapien
ccatagacacgttggttttagctgt

SEQ ID NO: 3019802 - DNA, 25 bp, Homo sapien
cagcaccatagacacgttggtttta

SEQ ID NO: 3019803 - DNA, 25 bp, Homo sapien
gcaccatagacacgttggttttagc

SEQ ID NO: 3019804 - DNA, 25 bp, Homo sapien
catagacacgttggttttagctgtt

SEQ ID NO: 3019805 - DNA, 25 bp, Homo sapien
aattcaggctaaacggagattccct

SEQ ID NO: 3019806 - DNA, 25 bp, Homo sapien
tcggctgctgcgtgctgtctcagac

SEQ ID NO: 3019807 - DNA, 25 bp, Homo sapien
ttgaagcaggatccacattcttggc

SEQ ID NO: 3019808 - DNA, 25 bp, Homo sapien
gccaagggctgggatacttgccagt

SEQ ID NO: 3019809 - DNA, 25 bp, Homo sapien
tttgtgtagaacacatacaaacccg

SEQ ID NO: 3019810 - DNA, 25 bp, Homo sapien
ttccctccactttgtgtagaacaca

SEQ ID NO: 3019811 - DNA, 25 bp, Homo sapien
agggtaagctgactccaggctcaga

SEQ ID NO: 3019812 - DNA, 25 bp, Homo sapien
tgatggagcagggtaagctgactcc

SEQ ID NO: 3019813 - DNA, 25 bp, Homo sapien
caatttctgggttgaacaaattcac

SEQ ID NO: 3019814 - DNA, 25 bp, Homo sapien
ccaatttctgggttgaacaaattca

SEQ ID NO: 3019815 - DNA, 25 bp, Homo sapien
catcctctctgtaagtcacagtgac

SEQ ID NO: 3019816 - DNA, 25 bp, Homo sapien
ggtaccacatctacccttctgtttc

SEQ ID NO: 3019817 - DNA, 25 bp, Homo sapien
gccatcctctctgtaagtcacagtg

SEQ ID NO: 3019818 - DNA, 25 bp, Homo sapien
tctggtaccacatctacccttctgt

SEQ ID NO: 3019819 - DNA, 25 bp, Homo sapien
gcttctctggcggacactgcctggc

SEQ ID NO: 3019820 - DNA, 25 bp, Homo sapien
gatgtccgttcttcgtcagctccat

SEQ ID NO: 3019821 - DNA, 25 bp, Homo sapien
tcagctgggcccatttacaatcccc

SEQ ID NO: 3019822 - DNA, 25 bp, Homo sapien
gggtactgcttgagttctttggaag

SEQ ID NO: 3019823 - DNA, 25 bp, Homo sapien
cacataccttacaatacccacaaaa

SEQ ID NO: 3019824 - DNA, 25 bp, Homo sapien
ataactgggcagctgacagctgaag

SEQ ID NO: 3019825 - DNA, 25 bp, Homo sapien
caaatagttggaacaggttggagct

SEQ ID NO: 3019826 - DNA, 25 bp, Homo sapien
cagctgaaggctgtcatcaaacctt

SEQ ID NO: 3019827 - DNA, 25 bp, Homo sapien
actcctccagaaagtagtgcaaata

SEQ ID NO: 3019828 - DNA, 25 bp, Homo sapien
tccagaaagtagtgcaaatatgatt

SEQ ID NO: 3019829 - DNA, 25 bp, Homo sapien
gattctgaaagtaacaaggaacatt

SEQ ID NO: 3019830 - DNA, 25 bp, Homo sapien
gagttctatgtacattttctactcc

SEQ ID NO: 3019831 - DNA, 25 bp, Homo sapien
tggggaaggtgtctttgagttcagc

SEQ ID NO: 3019832 - DNA, 25 bp, Homo sapien
cttggggaaggtgtctttgagttca

SEQ ID NO: 3019833 - DNA, 25 bp, Homo sapien
gggaaggtgtctttgagttcagctg

SEQ ID NO: 3019834 - DNA, 25 bp, Homo sapien
ggaaggtgtctttgagttcagctgc

SEQ ID NO: 3019835 - DNA, 25 bp, Homo sapien
tggaaccctccttgtgttaaggcca

SEQ ID NO: 3019836 - DNA, 25 bp, Homo sapien
ctccccctgtccagttggggtgcat

SEQ ID NO: 3019837 - DNA, 25 bp, Homo sapien
atctccccctgtccagttggggtgc

SEQ ID NO: 3019838 - DNA, 25 bp, Homo sapien
tctccccctgtccagttggggtgca

SEQ ID NO: 3019839 - DNA, 25 bp, Homo sapien
tcttatccataagaaattttgggct

SEQ ID NO: 3019840 - DNA, 25 bp, Homo sapien
taagttcctctgaagcacattgtgc

SEQ ID NO: 3019841 - DNA, 25 bp, Homo sapien
gtattcccacttggtattccaggat

SEQ ID NO: 3019842 - DNA, 25 bp, Homo sapien
tgtgctaaacctgccgattttatag

SEQ ID NO: 3019843 - DNA, 25 bp, Homo sapien
cttctgaaggtttggagcttataaa

SEQ ID NO: 3019844 - DNA, 25 bp, Homo sapien
gctgtctttattgctcacaacttta

SEQ ID NO: 3019845 - DNA, 25 bp, Homo sapien
gcttgtgcgggagaccatttgtggg

SEQ ID NO: 3019846 - DNA, 25 bp, Homo sapien
catactgatggtctctgtgcaacct

SEQ ID NO: 3019847 - DNA, 25 bp, Homo sapien
ctggaagtcccaaggctggcttttg

SEQ ID NO: 3019848 - DNA, 25 bp, Homo sapien
tcccaaggctggcttttgctgagtg

SEQ ID NO: 3019849 - DNA, 25 bp, Homo sapien
aagtcccaaggctggcttttgctga

SEQ ID NO: 3019850 - DNA, 25 bp, Homo sapien
ccaaggctggcttttgctgagtggc

SEQ ID NO: 3019851 - DNA, 25 bp, Homo sapien
ttgtcactgcctgttagacacagca

SEQ ID NO: 3019852 - DNA, 25 bp, Homo sapien
caagcccttgtcactgcctgttaga

SEQ ID NO: 3019853 - DNA, 25 bp, Homo sapien
gacacagcatgtcaagctgcaccag

SEQ ID NO: 3019854 - DNA, 25 bp, Homo sapien
tgcctgttagacacagcatgtcaag

SEQ ID NO: 3019855 - DNA, 25 bp, Homo sapien
aagaaaaggaaacaccgcgatgcct

SEQ ID NO: 3019856 - DNA, 25 bp, Homo sapien
tgccaggctccgaataacaacatct

SEQ ID NO: 3019857 - DNA, 25 bp, Homo sapien
taaacacaatgagctggcaatggag

SEQ ID NO: 3019858 - DNA, 25 bp, Homo sapien
ggtttttggcacatcgttttaatca

SEQ ID NO: 3019859 - DNA, 25 bp, Homo sapien
tcaaacccaagatacgccagaatct

SEQ ID NO: 3019860 - DNA, 25 bp, Homo sapien
caagatacgccagaatcttggccat

SEQ ID NO: 3019861 - DNA, 25 bp, Homo sapien
cccaagatacgccagaatcttggcc

SEQ ID NO: 3019862 - DNA, 25 bp, Homo sapien
attcaaacccaagatacgccagaat

SEQ ID NO: 3019863 - DNA, 25 bp, Homo sapien
cagatccatgatcttagaggtagag

SEQ ID NO: 3019864 - DNA, 25 bp, Homo sapien
ggtagagaggactttggcaactgat

SEQ ID NO: 3019865 - DNA, 25 bp, Homo sapien
gatcttagaggtagagaggactttg

SEQ ID NO: 3019866 - DNA, 25 bp, Homo sapien
gtagagaggactttggcaactgatc

SEQ ID NO: 3019867 - DNA, 25 bp, Homo sapien
tatgacccttttggtcccatcccca

SEQ ID NO: 3019868 - DNA, 25 bp, Homo sapien
acaaaggtctatccatcactctgtg

SEQ ID NO: 3019869 - DNA, 25 bp, Homo sapien
gccttcgtctctggtctgctgtata

SEQ ID NO: 3019870 - DNA, 25 bp, Homo sapien
accaggtgaagaaagaagccgcctg

SEQ ID NO: 3019871 - DNA, 25 bp, Homo sapien
gattctgttctaggtccccagcaag

SEQ ID NO: 3019872 - DNA, 25 bp, Homo sapien
aataggactgttctgtaaaatctga

SEQ ID NO: 3019873 - DNA, 25 bp, Homo sapien
gggtaatttataattgactcacagt

SEQ ID NO: 3019874 - DNA, 25 bp, Homo sapien
ggaaacctcacctatgattcaatta

SEQ ID NO: 3019875 - DNA, 25 bp, Homo sapien
caaaaaggcttgtgcaggagaactc

SEQ ID NO: 3019876 - DNA, 25 bp, Homo sapien
aattgtatttgtctgttcttatgct

SEQ ID NO: 3019877 - DNA, 25 bp, Homo sapien
ttgctaagactttccgtagcatttc

SEQ ID NO: 3019878 - DNA, 25 bp, Homo sapien
tcagattcttttgccccactaactg

SEQ ID NO: 3019879 - DNA, 25 bp, Homo sapien
ctttccgtagcatttcacatttcta

SEQ ID NO: 3019880 - DNA, 25 bp, Homo sapien
taaaagtgtgcccaaaagttcctga

SEQ ID NO: 3019881 - DNA, 25 bp, Homo sapien
cgtcgattgcctcttgcagaaggag

SEQ ID NO: 3019882 - DNA, 25 bp, Homo sapien
agcccactgtgatgttcgtcgattg

SEQ ID NO: 3019883 - DNA, 25 bp, Homo sapien
cataaatagtttacttagtgtgtta

SEQ ID NO: 3019884 - DNA, 25 bp, Homo sapien
gcataatgcgtccttggcaccacag

SEQ ID NO: 3019885 - DNA, 25 bp, Homo sapien
tctaatagccacaggatttcttgcc

SEQ ID NO: 3019886 - DNA, 25 bp, Homo sapien
taatagccacaggatttcttgcctt

SEQ ID NO: 3019887 - DNA, 25 bp, Homo sapien
atttctaatagccacaggatttctt

SEQ ID NO: 3019888 - DNA, 25 bp, Homo sapien
gccttttcttgatatccaagcttct

SEQ ID NO: 3019889 - DNA, 25 bp, Homo sapien
cagtgggttcttgtgtccgggacat

SEQ ID NO: 3019890 - DNA, 25 bp, Homo sapien
gaggggcaattgtggcagtcaccct

SEQ ID NO: 3019891 - DNA, 25 bp, Homo sapien
agactgggagttctgttctgggcca

SEQ ID NO: 3019892 - DNA, 25 bp, Homo sapien
ggtctgagcagtgggttcttgtgtc

SEQ ID NO: 3019893 - DNA, 25 bp, Homo sapien
ttctggaccacaaatccacccctct

SEQ ID NO: 3019894 - DNA, 25 bp, Homo sapien
tctcttccaggtttcgactgtctct

SEQ ID NO: 3019895 - DNA, 25 bp, Homo sapien
gcctcgggtggcttcattctttctt

SEQ ID NO: 3019896 - DNA, 25 bp, Homo sapien
ctgtctctctgtggtagtctaaata

SEQ ID NO: 3019897 - DNA, 25 bp, Homo sapien
tgctgcattccccgtggcccgtttc

SEQ ID NO: 3019898 - DNA, 25 bp, Homo sapien
ttgctgcattccccgtggcccgttt

SEQ ID NO: 3019899 - DNA, 25 bp, Homo sapien
ctgcattccccgtggcccgtttcat

SEQ ID NO: 3019900 - DNA, 25 bp, Homo sapien
gctgcattccccgtggcccgtttca

SEQ ID NO: 3019901 - DNA, 25 bp, Homo sapien
tcctcaattgtatctgcattatcac

SEQ ID NO: 3019902 - DNA, 25 bp, Homo sapien
atcacatgtgcccacttttgaagtg

SEQ ID NO: 3019903 - DNA, 25 bp, Homo sapien
attgtatctgcattatcacatgtgc

SEQ ID NO: 3019904 - DNA, 25 bp, Homo sapien
tctgcattatcacatgtgcccactt

SEQ ID NO: 3019905 - DNA, 25 bp, Homo sapien
ccagagcgagttactactgagagga

SEQ ID NO: 3019906 - DNA, 25 bp, Homo sapien
tgttggaaatactcttctaccttgg

SEQ ID NO: 3019907 - DNA, 25 bp, Homo sapien
tttccatgtaacaacttcccacagg

SEQ ID NO: 3019908 - DNA, 25 bp, Homo sapien
tcgagtcaatggacaaagtgtgggc

SEQ ID NO: 3019909 - DNA, 25 bp, Homo sapien
gggaagacgaatttgcgattggtct

SEQ ID NO: 3019910 - DNA, 25 bp, Homo sapien
cagggtcatcataggggaagacgaa

SEQ ID NO: 3019911 - DNA, 25 bp, Homo sapien
agaagttctatagttagaagtggcc

SEQ ID NO: 3019912 - DNA, 25 bp, Homo sapien
cgattggtcttgaagttagggtaga

SEQ ID NO: 3019913 - DNA, 25 bp, Homo sapien
ttctttctttctggttgatctctac

SEQ ID NO: 3019914 - DNA, 25 bp, Homo sapien
tttctttctttctggttgatctcta

SEQ ID NO: 3019915 - DNA, 25 bp, Homo sapien
ctttagcattcgttccttccagggc

SEQ ID NO: 3019916 - DNA, 25 bp, Homo sapien
aaaccctggacgtctcttttggctg

SEQ ID NO: 3019917 - DNA, 25 bp, Homo sapien
agatggctttgctctcgtcctgaga

SEQ ID NO: 3019918 - DNA, 25 bp, Homo sapien
tggctcttgctccaaagagggcatc

SEQ ID NO: 3019919 - DNA, 25 bp, Homo sapien
ctgtggaactctttcaggcagtctt

SEQ ID NO: 3019920 - DNA, 25 bp, Homo sapien
ctagtgcaggatttaaaatagctct

SEQ ID NO: 3019921 - DNA, 25 bp, Homo sapien
gtgcaggatttaaaatagctctagg

SEQ ID NO: 3019922 - DNA, 25 bp, Homo sapien
gatttaaaatagctctaggacagca

SEQ ID NO: 3019923 - DNA, 25 bp, Homo sapien
caggatttaaaatagctctaggaca

SEQ ID NO: 3019924 - DNA, 25 bp, Homo sapien
tccacagattgaagtccagaatggc

SEQ ID NO: 3019925 - DNA, 25 bp, Homo sapien
tgatccacagattgaagtccagaat

SEQ ID NO: 3019926 - DNA, 25 bp, Homo sapien
gaatggcttggtgctttgggggcat

SEQ ID NO: 3019927 - DNA, 25 bp, Homo sapien
agaatggcttggtgctttgggggca

SEQ ID NO: 3019928 - DNA, 25 bp, Homo sapien
gctgaaatccgggccccagtgaaag

SEQ ID NO: 3019929 - DNA, 25 bp, Homo sapien
tggctgaaatccgggccccagtgaa

SEQ ID NO: 3019930 - DNA, 25 bp, Homo sapien
ctgaaatccgggccccagtgaaagc

SEQ ID NO: 3019931 - DNA, 25 bp, Homo sapien
cctggctgaaatccgggccccagtg

SEQ ID NO: 3019932 - DNA, 25 bp, Homo sapien
tggccgtctgccacagtgcagcatg

SEQ ID NO: 3019933 - DNA, 25 bp, Homo sapien
tatgtgtgtgcgcttgctcgtgtgt

SEQ ID NO: 3019934 - DNA, 25 bp, Homo sapien
gagtgtacttgtgtgcacggatcca

SEQ ID NO: 3019935 - DNA, 25 bp, Homo sapien
tgcagtgcaggtctctggccgtctg

SEQ ID NO: 3019936 - DNA, 25 bp, Homo sapien
gtagaaacgctacaaactctactca

SEQ ID NO: 3019937 - DNA, 25 bp, Homo sapien
aacgctacaaactctactcatcatc

SEQ ID NO: 3019938 - DNA, 25 bp, Homo sapien
ccattcagtagaaacgctacaaact

SEQ ID NO: 3019939 - DNA, 25 bp, Homo sapien
tcagtagaaacgctacaaactctac

SEQ ID NO: 3019940 - DNA, 25 bp, Homo sapien
caaatgcagcatgttggtagggctc

SEQ ID NO: 3019941 - DNA, 25 bp, Homo sapien
tgctgggttcacaatcaatttggtg

SEQ ID NO: 3019942 - DNA, 25 bp, Homo sapien
tggttctcgtgtattgactgcagga

SEQ ID NO: 3019943 - DNA, 25 bp, Homo sapien
gtgacaagcgtcacaggcacatctt

SEQ ID NO: 3019944 - DNA, 25 bp, Homo sapien
tctctgagagaggtagatgacacca

SEQ ID NO: 3019945 - DNA, 25 bp, Homo sapien
tgggaagaagatgtccccaagcccc

SEQ ID NO: 3019946 - DNA, 25 bp, Homo sapien
gggaagatccacgtacgttctctga

SEQ ID NO: 3019947 - DNA, 25 bp, Homo sapien
accatccgtaccagcacttctggaa

SEQ ID NO: 3019948 - DNA, 25 bp, Homo sapien
tgctttttccttccccatattgtca

SEQ ID NO: 3019949 - DNA, 25 bp, Homo sapien
ttttccttccccatattgtcacaca

SEQ ID NO: 3019950 - DNA, 25 bp, Homo sapien
tttttccttccccatattgtcacac

SEQ ID NO: 3019951 - DNA, 25 bp, Homo sapien
ctagagaaataccaggtgggttttg

SEQ ID NO: 3019952 - DNA, 25 bp, Homo sapien
ttcatcctctcccacacaattccct

SEQ ID NO: 3019953 - DNA, 25 bp, Homo sapien
gtggtgcctcttccatacctccacc

SEQ ID NO: 3019954 - DNA, 25 bp, Homo sapien
cctctcccacacaattccctcccat

SEQ ID NO: 3019955 - DNA, 25 bp, Homo sapien
tcttccatacctccaccttcttcat

SEQ ID NO: 3019956 - DNA, 25 bp, Homo sapien
agatgttaacggcttctcactgttg

SEQ ID NO: 3019957 - DNA, 25 bp, Homo sapien
tggtcaagagatgttaacggcttct

SEQ ID NO: 3019958 - DNA, 25 bp, Homo sapien
tttggtcaagagatgttaacggctt

SEQ ID NO: 3019959 - DNA, 25 bp, Homo sapien
tcaagagatgttaacggcttctcac

SEQ ID NO: 3019960 - DNA, 25 bp, Homo sapien
ttgcagagaagctactggcaaactg

SEQ ID NO: 3019961 - DNA, 25 bp, Homo sapien
cctccagcacgttgcagagaagcta

SEQ ID NO: 3019962 - DNA, 25 bp, Homo sapien
tgaaaccgaatgttgggccttgaaa

SEQ ID NO: 3019963 - DNA, 25 bp, Homo sapien
tagggggtagagtttgcttccctga

SEQ ID NO: 3019964 - DNA, 25 bp, Homo sapien
ctgttttagccgaatccagatgggg

SEQ ID NO: 3019965 - DNA, 25 bp, Homo sapien
tgagtgaacacttgtgttatatttt

SEQ ID NO: 3019966 - DNA, 25 bp, Homo sapien
atgagtgaacacttgtgttatattt

SEQ ID NO: 3019967 - DNA, 25 bp, Homo sapien
ttagccgaatccagatggggttttc

SEQ ID NO: 3019968 - DNA, 25 bp, Homo sapien
tgtcccttgtccaagaggcctgcta

SEQ ID NO: 3019969 - DNA, 25 bp, Homo sapien
ttctccgaggtcatctcctggtgtc

SEQ ID NO: 3019970 - DNA, 25 bp, Homo sapien
gaggcctgctaatctgttgacccat

SEQ ID NO: 3019971 - DNA, 25 bp, Homo sapien
gtggatatcttctccgaggtcatct

SEQ ID NO: 3019972 - DNA, 25 bp, Homo sapien
tctgagctgtggaatccttttcata

SEQ ID NO: 3019973 - DNA, 25 bp, Homo sapien
ttctgcttatccatatcagcacttg

SEQ ID NO: 3019974 - DNA, 25 bp, Homo sapien
catatcagcacttgtattctgagct

SEQ ID NO: 3019975 - DNA, 25 bp, Homo sapien
tatccatatcagcacttgtattctg

SEQ ID NO: 3019976 - DNA, 25 bp, Homo sapien
gaaaaaagcatgtttggaccaagta

SEQ ID NO: 3019977 - DNA, 25 bp, Homo sapien
aaatatactgtagtgctcaacaggt

SEQ ID NO: 3019978 - DNA, 25 bp, Homo sapien
caacaggtcctgttctccctttcat

SEQ ID NO: 3019979 - DNA, 25 bp, Homo sapien
cctttcatcaaccatattgctcttc

SEQ ID NO: 3019980 - DNA, 25 bp, Homo sapien
tccgagttgattttgattttgaccc

SEQ ID NO: 3019981 - DNA, 25 bp, Homo sapien
cttccgagttgattttgattttgac

SEQ ID NO: 3019982 - DNA, 25 bp, Homo sapien
gagttgattttgattttgaccctca

SEQ ID NO: 3019983 - DNA, 25 bp, Homo sapien
ccgagttgattttgattttgaccct

SEQ ID NO: 3019984 - DNA, 25 bp, Homo sapien
aactgctaaactcagaatgaccctg

SEQ ID NO: 3019985 - DNA, 25 bp, Homo sapien
cagacaaactgctaaactcagaatg

SEQ ID NO: 3019986 - DNA, 25 bp, Homo sapien
gtgacagacaaactgctaaactcag

SEQ ID NO: 3019987 - DNA, 25 bp, Homo sapien
ttggctgagtgacagacaaactgct

SEQ ID NO: 3019988 - DNA, 25 bp, Homo sapien
taaaactcaacagggtgccgatctc

SEQ ID NO: 3019989 - DNA, 25 bp, Homo sapien
taattggcaagaaactgcgggtgcg

SEQ ID NO: 3019990 - DNA, 25 bp, Homo sapien
cagtcatgcagccacaggagattaa

SEQ ID NO: 3019991 - DNA, 25 bp, Homo sapien
tgtcagcgcctaagatctcagagca

SEQ ID NO: 3019992 - DNA, 25 bp, Homo sapien
ttttcttttgttgcgtcagctcagg

SEQ ID NO: 3019993 - DNA, 25 bp, Homo sapien
cagctcaggggtagtagcaaatttc

SEQ ID NO: 3019994 - DNA, 25 bp, Homo sapien
gtcagctcaggggtagtagcaaatt

SEQ ID NO: 3019995 - DNA, 25 bp, Homo sapien
gcgtcagctcaggggtagtagcaaa

SEQ ID NO: 3019996 - DNA, 25 bp, Homo sapien
agtatccttgaaagaatgcggctgt

SEQ ID NO: 3019997 - DNA, 25 bp, Homo sapien
tgacggtaggcagtatccttgaaag

SEQ ID NO: 3019998 - DNA, 25 bp, Homo sapien
aggtccctgacggtaggcagtatcc

SEQ ID NO: 3019999 - DNA, 25 bp, Homo sapien
ccttgaaagaatgcggctgtccctg

SEQ ID NO: 3020000 - DNA, 25 bp, Homo sapien
taacccagtccgctttttgcttgtg

SEQ ID NO: 3020001 - DNA, 25 bp, Homo sapien
tctgtgttccccaaggtatatgaag

SEQ ID NO: 3020002 - DNA, 25 bp, Homo sapien
gcgacgcattcaaacctaacccagt

SEQ ID NO: 3020003 - DNA, 25 bp, Homo sapien
taccgtgcagtagcttgtatgagca

SEQ ID NO: 3020004 - DNA, 25 bp, Homo sapien
gacttgagcgagtgaaacagtgcag

SEQ ID NO: 3020005 - DNA, 25 bp, Homo sapien
tgtatttttagagccgtgaatgact

SEQ ID NO: 3020006 - DNA, 25 bp, Homo sapien
ggacttctcagcttaatcgccctag

SEQ ID NO: 3020007 - DNA, 25 bp, Homo sapien
ggacattgctcggtagccttggact

SEQ ID NO: 3020008 - DNA, 25 bp, Homo sapien
tgtgggcgtcatctttgtaaactgt

SEQ ID NO: 3020009 - DNA, 25 bp, Homo sapien
aacattgtctggtactctgggcgag

SEQ ID NO: 3020010 - DNA, 25 bp, Homo sapien
gaggcagggctgtgtattaccaaac

SEQ ID NO: 3020011 - DNA, 25 bp, Homo sapien
tccatagtttccacataaggtaagt

SEQ ID NO: 3020012 - DNA, 25 bp, Homo sapien
agtcaccatctgctgaaatgcgata

SEQ ID NO: 3020013 - DNA, 25 bp, Homo sapien
tgtgaaaagccagtgctctgtatgg

SEQ ID NO: 3020014 - DNA, 25 bp, Homo sapien
cactaaatcccgttccgtaagtatg

SEQ ID NO: 3020015 - DNA, 25 bp, Homo sapien
ccagtgctctgtatggcaaggtaga

SEQ ID NO: 3020016 - DNA, 25 bp, Homo sapien
ttgacaggaaggaacacagagagat

SEQ ID NO: 3020017 - DNA, 25 bp, Homo sapien
agttgacaggaaggaacacagagag

SEQ ID NO: 3020018 - DNA, 25 bp, Homo sapien
actgtgagttgacaggaaggaacac

SEQ ID NO: 3020019 - DNA, 25 bp, Homo sapien
tcactgtgagttgacaggaaggaac

SEQ ID NO: 3020020 - DNA, 25 bp, Homo sapien
ttaggcaatgcctgatgccaagcaa

SEQ ID NO: 3020021 - DNA, 25 bp, Homo sapien
gagactcagcggctcacagcccttt

SEQ ID NO: 3020022 - DNA, 25 bp, Homo sapien
ctctcgagggccatatttccaaatg

SEQ ID NO: 3020023 - DNA, 25 bp, Homo sapien
caaatgcatttctgcgagtctgaga

SEQ ID NO: 3020024 - DNA, 25 bp, Homo sapien
agggccttcctcacagacacagtgg

SEQ ID NO: 3020025 - DNA, 25 bp, Homo sapien
tggttccaggcacaggtatctcttc

SEQ ID NO: 3020026 - DNA, 25 bp, Homo sapien
gttccaggcacaggtatctcttcat

SEQ ID NO: 3020027 - DNA, 25 bp, Homo sapien
ctgctggttccaggcacaggtatct

SEQ ID NO: 3020028 - DNA, 25 bp, Homo sapien
gctggttccaggcacaggtatctct

SEQ ID NO: 3020029 - DNA, 25 bp, Homo sapien
tatgctcatagcaaagagactgtgg

SEQ ID NO: 3020030 - DNA, 25 bp, Homo sapien
ctgtggcacatcctgttgtacagta

SEQ ID NO: 3020031 - DNA, 25 bp, Homo sapien
caaagagactgtggcacatcctgtt

SEQ ID NO: 3020032 - DNA, 25 bp, Homo sapien
tcactctatgctcatagcaaagaga

SEQ ID NO: 3020033 - DNA, 25 bp, Homo sapien
tgtgagcgttgagtatatcattgtg

SEQ ID NO: 3020034 - DNA, 25 bp, Homo sapien
attgagtatatcattgtgagcattg

SEQ ID NO: 3020035 - DNA, 25 bp, Homo sapien
gtgagcgttgagtatatcattgtga

SEQ ID NO: 3020036 - DNA, 25 bp, Homo sapien
tgagtatatcattgtgagcattgag

SEQ ID NO: 3020037 - DNA, 25 bp, Homo sapien
tcgttggagcaaaacatgagattcc

SEQ ID NO: 3020038 - DNA, 25 bp, Homo sapien
gataatgccaccttgcagaccgatg

SEQ ID NO: 3020039 - DNA, 25 bp, Homo sapien
tgatgtgcaccagtaaagagaaacg

SEQ ID NO: 3020040 - DNA, 25 bp, Homo sapien
tcctggaaatgggatcgtaaacatc

SEQ ID NO: 3020041 - DNA, 25 bp, Homo sapien
gctgacaccttcgacagtgatatga

SEQ ID NO: 3020042 - DNA, 25 bp, Homo sapien
tctctcggcagttttctggacagct

SEQ ID NO: 3020043 - DNA, 25 bp, Homo sapien
aagtaggctcccaaacagcgctgtc

SEQ ID NO: 3020044 - DNA, 25 bp, Homo sapien
gagtccactcagagaagtcgagcaa

SEQ ID NO: 3020045 - DNA, 25 bp, Homo sapien
gtgtgtacgctgctgaataatctca

SEQ ID NO: 3020046 - DNA, 25 bp, Homo sapien
gctgaataatctcagtcagggacag

SEQ ID NO: 3020047 - DNA, 25 bp, Homo sapien
aataatctcagtcagggacagaaag

SEQ ID NO: 3020048 - DNA, 25 bp, Homo sapien
agttagacagaggtgtgtacgctgc

SEQ ID NO: 3020049 - DNA, 25 bp, Homo sapien
tatggaagtccctgccgtacccaca

SEQ ID NO: 3020050 - DNA, 25 bp, Homo sapien
gaaggtcaagggacaaatgctccca

SEQ ID NO: 3020051 - DNA, 25 bp, Homo sapien
tcccaactccgtgcatatggaagtc

SEQ ID NO: 3020052 - DNA, 25 bp, Homo sapien
gctgaaaggtgtctcaagtgggcct

SEQ ID NO: 3020053 - DNA, 25 bp, Homo sapien
atgaatggccaacatcgtattgtaa

SEQ ID NO: 3020054 - DNA, 25 bp, Homo sapien
catcgtattgtaagtcacagcccaa

SEQ ID NO: 3020055 - DNA, 25 bp, Homo sapien
tattgtaagtcacagcccaaactac

SEQ ID NO: 3020056 - DNA, 25 bp, Homo sapien
tggccaacatcgtattgtaagtcac

SEQ ID NO: 3020057 - DNA, 25 bp, Homo sapien
gaacaaatgcatagaagaagaaccg

SEQ ID NO: 3020058 - DNA, 25 bp, Homo sapien
aggagaacaaatgcatagaagaaga

SEQ ID NO: 3020059 - DNA, 25 bp, Homo sapien
cagccaggagaacaaatgcatagaa

SEQ ID NO: 3020060 - DNA, 25 bp, Homo sapien
aaatgcatagaagaagaaccgtgcg

SEQ ID NO: 3020061 - DNA, 25 bp, Homo sapien
aatggacctggatacatcatactcc

SEQ ID NO: 3020062 - DNA, 25 bp, Homo sapien
ctttctaataacagggagctggcat

SEQ ID NO: 3020063 - DNA, 25 bp, Homo sapien
caaaagcctgcgagtcctttgtccc

SEQ ID NO: 3020064 - DNA, 25 bp, Homo sapien
tctatggccaacaccaactggcctg

SEQ ID NO: 3020065 - DNA, 25 bp, Homo sapien
aatggagccgtcaccaatgtcttca

SEQ ID NO: 3020066 - DNA, 25 bp, Homo sapien
tgcaaactcccgtctttcctgattg

SEQ ID NO: 3020067 - DNA, 25 bp, Homo sapien
tcctgattgggtccatctgaatgga

SEQ ID NO: 3020068 - DNA, 25 bp, Homo sapien
tccatctgaatggagccgtcaccaa

SEQ ID NO: 3020069 - DNA, 25 bp, Homo sapien
ttccattaacatttctatttctgtc

SEQ ID NO: 3020070 - DNA, 25 bp, Homo sapien
tccattaacatttctatttctgtcc

SEQ ID NO: 3020071 - DNA, 25 bp, Homo sapien
cattaacatttctatttctgtccat

SEQ ID NO: 3020072 - DNA, 25 bp, Homo sapien
ccattaacatttctatttctgtcca

SEQ ID NO: 3020073 - DNA, 25 bp, Homo sapien
acagcattcatcagcagagatccta

SEQ ID NO: 3020074 - DNA, 25 bp, Homo sapien
ttcatcagcagagatcctaaggtct

SEQ ID NO: 3020075 - DNA, 25 bp, Homo sapien
gcagagatcctaaggtctccataat

SEQ ID NO: 3020076 - DNA, 25 bp, Homo sapien
tcagcagagatcctaaggtctccat

SEQ ID NO: 3020077 - DNA, 25 bp, Homo sapien
cagcggatacgtgtggggtggagtt

SEQ ID NO: 3020078 - DNA, 25 bp, Homo sapien
agcggatacgtgtggggtggagttg

SEQ ID NO: 3020079 - DNA, 25 bp, Homo sapien
tgaattcagacactccttgtctcat

SEQ ID NO: 3020080 - DNA, 25 bp, Homo sapien
tgaatgaattcagacactccttgtc

SEQ ID NO: 3020081 - DNA, 25 bp, Homo sapien
tcacagaaaccctggtttgattccc

SEQ ID NO: 3020082 - DNA, 25 bp, Homo sapien
cataaatgagataggaattacccca

SEQ ID NO: 3020083 - DNA, 25 bp, Homo sapien
ttgattccccgagtgagtacctgag

SEQ ID NO: 3020084 - DNA, 25 bp, Homo sapien
tacctgagcaaatgggtccagggtc

SEQ ID NO: 3020085 - DNA, 25 bp, Homo sapien
atgcgtgggcttcggtccgtcggaa

SEQ ID NO: 3020086 - DNA, 25 bp, Homo sapien
gggcccgccgcaaagagttaagagc

SEQ ID NO: 3020087 - DNA, 25 bp, Homo sapien
tttcctccgggcatccgctctttag

SEQ ID NO: 3020088 - DNA, 25 bp, Homo sapien
aaattgccccgcgtgaactgtcccg

SEQ ID NO: 3020089 - DNA, 25 bp, Homo sapien
ccatctgggactccgtggtcttggg

SEQ ID NO: 3020090 - DNA, 25 bp, Homo sapien
ggcttcccgagcatctaatgaatgg

SEQ ID NO: 3020091 - DNA, 25 bp, Homo sapien
ggccaagtcacagtgggagcccatc

SEQ ID NO: 3020092 - DNA, 25 bp, Homo sapien
tcatctaattagcaaggcttcccga

SEQ ID NO: 3020093 - DNA, 25 bp, Homo sapien
ctgtgtggaaatggataactggatc

SEQ ID NO: 3020094 - DNA, 25 bp, Homo sapien
gcttatgcgtggagtagttaaaagt

SEQ ID NO: 3020095 - DNA, 25 bp, Homo sapien
aaagttttcgatgaacacaaatagg

SEQ ID NO: 3020096 - DNA, 25 bp, Homo sapien
taagagttcttgcttatgcgtggag

SEQ ID NO: 3020097 - DNA, 25 bp, Homo sapien
gatctggtcttttgatgcctctgaa

SEQ ID NO: 3020098 - DNA, 25 bp, Homo sapien
tgggtctcagcaagatcattacatg

SEQ ID NO: 3020099 - DNA, 25 bp, Homo sapien
cttgtctgggtctcagcaagatcat

SEQ ID NO: 3020100 - DNA, 25 bp, Homo sapien
tgaagacagtgccaagccttgtctg

SEQ ID NO: 3020101 - DNA, 25 bp, Homo sapien
agcactagatgctggcctgaattca

SEQ ID NO: 3020102 - DNA, 25 bp, Homo sapien
tcactgcatggtaattctgagaccg

SEQ ID NO: 3020103 - DNA, 25 bp, Homo sapien
gtaattctgagaccgagccttttgg

SEQ ID NO: 3020104 - DNA, 25 bp, Homo sapien
ttggttttgactcgccaaatgccca

SEQ ID NO: 3020105 - DNA, 25 bp, Homo sapien
cttgttccttgagaccatcgagggc

SEQ ID NO: 3020106 - DNA, 25 bp, Homo sapien
tccttgagaccatcgagggctacct

SEQ ID NO: 3020107 - DNA, 25 bp, Homo sapien
ccatcgagggctacctcagtgacct

SEQ ID NO: 3020108 - DNA, 25 bp, Homo sapien
tgagaccatcgagggctacctcagt

SEQ ID NO: 3020109 - DNA, 25 bp, Homo sapien
gctagggaacagttatcattggtac

SEQ ID NO: 3020110 - DNA, 25 bp, Homo sapien
caggcctatgttattcttggtcagt

SEQ ID NO: 3020111 - DNA, 25 bp, Homo sapien
agcagacagtcaggcctatgttatt

SEQ ID NO: 3020112 - DNA, 25 bp, Homo sapien
cagcatgcagggcaacatttggcta

SEQ ID NO: 3020113 - DNA, 25 bp, Homo sapien
ggaaattcgatgcttctgtacccca

SEQ ID NO: 3020114 - DNA, 25 bp, Homo sapien
aagaggaacatgtcagacccacaga

SEQ ID NO: 3020115 - DNA, 25 bp, Homo sapien
caaagaggaacatgtcagacccaca

SEQ ID NO: 3020116 - DNA, 25 bp, Homo sapien
tctctttaccgggaaattcgatgct

SEQ ID NO: 3020117 - DNA, 25 bp, Homo sapien
atagctttctgccaccacgggatgc

SEQ ID NO: 3020118 - DNA, 25 bp, Homo sapien
ccaccacgggatgcccctcttcaac

SEQ ID NO: 3020119 - DNA, 25 bp, Homo sapien
tgctgatagctttctgccaccacgg

SEQ ID NO: 3020120 - DNA, 25 bp, Homo sapien
tgatagctttctgccaccacgggat

SEQ ID NO: 3020121 - DNA, 25 bp, Homo sapien
gatgaaatgatagctcttgtagttg

SEQ ID NO: 3020122 - DNA, 25 bp, Homo sapien
acagtctagaggcatgggagtacaa

SEQ ID NO: 3020123 - DNA, 25 bp, Homo sapien
cagcatcatgggtctgatgaaatga

SEQ ID NO: 3020124 - DNA, 25 bp, Homo sapien
tagctcttgtagttgccaagggcac

SEQ ID NO: 3020125 - DNA, 25 bp, Homo sapien
aagcttcgaaggacccagatgggtt

SEQ ID NO: 3020126 - DNA, 25 bp, Homo sapien
caccatctgctgatggaaagggaag

SEQ ID NO: 3020127 - DNA, 25 bp, Homo sapien
ttcagtatcctgcaagaaagcttcg

SEQ ID NO: 3020128 - DNA, 25 bp, Homo sapien
tgagagctttccagtgctctggagc

SEQ ID NO: 3020129 - DNA, 25 bp, Homo sapien
cgctaacatcgtgcccttgcagata

SEQ ID NO: 3020130 - DNA, 25 bp, Homo sapien
tcatactgctgatactcctcccaga

SEQ ID NO: 3020131 - DNA, 25 bp, Homo sapien
tgatactcctcccagattaggcgat

SEQ ID NO: 3020132 - DNA, 25 bp, Homo sapien
gattaggcgattcttgattgtacgc

SEQ ID NO: 3020133 - DNA, 25 bp, Homo sapien
tgcaaaaccttgtaaccttctcagc

SEQ ID NO: 3020134 - DNA, 25 bp, Homo sapien
aaccttgtaaccttctcagcttctc

SEQ ID NO: 3020135 - DNA, 25 bp, Homo sapien
aaaccttgtaaccttctcagcttct

SEQ ID NO: 3020136 - DNA, 25 bp, Homo sapien
taagtcatgggtaaagctgctctag

SEQ ID NO: 3020137 - DNA, 25 bp, Homo sapien
tatattgaagcgctatgacccatgg

SEQ ID NO: 3020138 - DNA, 25 bp, Homo sapien
tctagaaggtggagtggcaatacca

SEQ ID NO: 3020139 - DNA, 25 bp, Homo sapien
tgttgaattactggccacgaactgg

SEQ ID NO: 3020140 - DNA, 25 bp, Homo sapien
ctgcaacctttccgtaagcccaagt

SEQ ID NO: 3020141 - DNA, 25 bp, Homo sapien
ggaaaggcaagtggagcaaatggac

SEQ ID NO: 3020142 - DNA, 25 bp, Homo sapien
agcccaagttgtacacatctgattt

SEQ ID NO: 3020143 - DNA, 25 bp, Homo sapien
ctgatttaaagttggactcatgtgc

SEQ ID NO: 3020144 - DNA, 25 bp, Homo sapien
gaagttgactggacaaagtctctct

SEQ ID NO: 3020145 - DNA, 25 bp, Homo sapien
cacatgcagcttcacgatagttttg

SEQ ID NO: 3020146 - DNA, 25 bp, Homo sapien
cttggtaaatccctgaattttgtgg

SEQ ID NO: 3020147 - DNA, 25 bp, Homo sapien
acttctgaatagcaagaagaatgac

SEQ ID NO: 3020148 - DNA, 25 bp, Homo sapien
gtctgcagggacaatagccagcaca

SEQ ID NO: 3020149 - DNA, 25 bp, Homo sapien
tagcttctattgcagtggaccgggc

SEQ ID NO: 3020150 - DNA, 25 bp, Homo sapien
tcagtctcttccaggatgtcaggag

SEQ ID NO: 3020151 - DNA, 25 bp, Homo sapien
gaccgggccagctcacaggttgata

SEQ ID NO: 3020152 - DNA, 25 bp, Homo sapien
gctgctggccatgtaatttgtcact

SEQ ID NO: 3020153 - DNA, 25 bp, Homo sapien
tccatggcgggaatagtagaactta

SEQ ID NO: 3020154 - DNA, 25 bp, Homo sapien
tgtagagtcttgaacacccatccgg

SEQ ID NO: 3020155 - DNA, 25 bp, Homo sapien
tgtcacgttaaaaagtagagggcca

SEQ ID NO: 3020156 - DNA, 25 bp, Homo sapien
tgaactctaaggaatgaactctcgg

SEQ ID NO: 3020157 - DNA, 25 bp, Homo sapien
taaaaattgggagcgaagagcctca

SEQ ID NO: 3020158 - DNA, 25 bp, Homo sapien
tcagagacggaggtagcaaaggact

SEQ ID NO: 3020159 - DNA, 25 bp, Homo sapien
gaactcctggacgtgcttattgaaa

SEQ ID NO: 3020160 - DNA, 25 bp, Homo sapien
gttccaaagactagagatgaccaca

SEQ ID NO: 3020161 - DNA, 25 bp, Homo sapien
tctgtgctgataagtacgtgtccta

SEQ ID NO: 3020162 - DNA, 25 bp, Homo sapien
gtagaagtatatctcgaggcacagg

SEQ ID NO: 3020163 - DNA, 25 bp, Homo sapien
cccaccagggataattcagacagga

SEQ ID NO: 3020164 - DNA, 25 bp, Homo sapien
tcattacctctcgtggctttggctg

SEQ ID NO: 3020165 - DNA, 25 bp, Homo sapien
ttggtccatcagtcacgaagttctt

SEQ ID NO: 3020166 - DNA, 25 bp, Homo sapien
tctccacacgcacagtttgctgcaa

SEQ ID NO: 3020167 - DNA, 25 bp, Homo sapien
acagaattgcgcattgaaaacgatg

SEQ ID NO: 3020168 - DNA, 25 bp, Homo sapien
cagttggaacagaggacagtcgcac

SEQ ID NO: 3020169 - DNA, 25 bp, Homo sapien
gttggaacagaggacagtcgcacag

SEQ ID NO: 3020170 - DNA, 25 bp, Homo sapien
agttggaacagaggacagtcgcaca

SEQ ID NO: 3020171 - DNA, 25 bp, Homo sapien
tccgcacaggcgcacggggaccgcc

SEQ ID NO: 3020172 - DNA, 25 bp, Homo sapien
atgcacggcgttctccgcacaggcg

SEQ ID NO: 3020173 - DNA, 25 bp, Homo sapien
aagtcccggcatgcacggcgttctc

SEQ ID NO: 3020174 - DNA, 25 bp, Homo sapien
ggcatgcacggcgttctccgcacag

SEQ ID NO: 3020175 - DNA, 25 bp, Homo sapien
cggtgccgaggacggccccaggcat

SEQ ID NO: 3020176 - DNA, 25 bp, Homo sapien
gccgaggacggccccaggcattgct

SEQ ID NO: 3020177 - DNA, 25 bp, Homo sapien
ggcggagcgggccggtgccgaggac

SEQ ID NO: 3020178 - DNA, 25 bp, Homo sapien
gagcgggccggtgccgaggacggcc

SEQ ID NO: 3020179 - DNA, 25 bp, Homo sapien
gctcccgggctagcgcggcagcggg

SEQ ID NO: 3020180 - DNA, 25 bp, Homo sapien
agttcaatcgcatgcgccagctggc

SEQ ID NO: 3020181 - DNA, 25 bp, Homo sapien
cagctggccaaccagacggtgggca

SEQ ID NO: 3020182 - DNA, 25 bp, Homo sapien
gggccacgatgaagaagcagttcaa

SEQ ID NO: 3020183 - DNA, 25 bp, Homo sapien
gcgggcaccgctgtcggtgcgcgcc

SEQ ID NO: 3020184 - DNA, 25 bp, Homo sapien
ccgcgggcaccgctgtcggtgcgcg

SEQ ID NO: 3020185 - DNA, 25 bp, Homo sapien
gggcaccgctgtcggtgcgcgcccg

SEQ ID NO: 3020186 - DNA, 25 bp, Homo sapien
cgcgggcaccgctgtcggtgcgcgc

SEQ ID NO: 3020187 - DNA, 25 bp, Homo sapien
tgccccttcgcttcgtcctccctgc

SEQ ID NO: 3020188 - DNA, 25 bp, Homo sapien
cccggctgccccttcgcttcgtcct

SEQ ID NO: 3020189 - DNA, 25 bp, Homo sapien
cttcgcttcgtcctccctgcctttc

SEQ ID NO: 3020190 - DNA, 25 bp, Homo sapien
cggctgccccttcgcttcgtcctcc

SEQ ID NO: 3020191 - DNA, 25 bp, Homo sapien
aatggttgaggtggttcgttgtcac

SEQ ID NO: 3020192 - DNA, 25 bp, Homo sapien
cactgaagtcctcaacaaatggttg

SEQ ID NO: 3020193 - DNA, 25 bp, Homo sapien
gttgtcactgaacacccattcaagt

SEQ ID NO: 3020194 - DNA, 25 bp, Homo sapien
ggtccactgaagtcctcaacaaatg

SEQ ID NO: 3020195 - DNA, 25 bp, Homo sapien
caacttgaaattgatacccatttgt

SEQ ID NO: 3020196 - DNA, 25 bp, Homo sapien
acttgaaattgatacccatttgtct

SEQ ID NO: 3020197 - DNA, 25 bp, Homo sapien
tgaaattgatacccatttgtctcct

SEQ ID NO: 3020198 - DNA, 25 bp, Homo sapien
tacaacttgaaattgatacccattt

SEQ ID NO: 3020199 - DNA, 25 bp, Homo sapien
ctagatcagatttgtggccatgagg

SEQ ID NO: 3020200 - DNA, 25 bp, Homo sapien
gtcatctagatcagatttgtggcca

SEQ ID NO: 3020201 - DNA, 25 bp, Homo sapien
aaagggtgcttgtgccagtcactga

SEQ ID NO: 3020202 - DNA, 25 bp, Homo sapien
ataaaggccatggtggaacttgcgg

SEQ ID NO: 3020203 - DNA, 25 bp, Homo sapien
ttagagctgctttgcaccgtcctgc

SEQ ID NO: 3020204 - DNA, 25 bp, Homo sapien
ccttagagctgctttgcaccgtcct

SEQ ID NO: 3020205 - DNA, 25 bp, Homo sapien
agctgctttgcaccgtcctgcccac

SEQ ID NO: 3020206 - DNA, 25 bp, Homo sapien
tagagctgctttgcaccgtcctgcc

SEQ ID NO: 3020207 - DNA, 25 bp, Homo sapien
ggacacacgtagtccaactgtctgc

SEQ ID NO: 3020208 - DNA, 25 bp, Homo sapien
gtagtccaactgtctgccgtcgtga

SEQ ID NO: 3020209 - DNA, 25 bp, Homo sapien
cacgtagtccaactgtctgccgtcg

SEQ ID NO: 3020210 - DNA, 25 bp, Homo sapien
gtccaactgtctgccgtcgtgactc

SEQ ID NO: 3020211 - DNA, 25 bp, Homo sapien
gattttgaacaaagatgccagggca

SEQ ID NO: 3020212 - DNA, 25 bp, Homo sapien
taccgtgagctagagagccattgca

SEQ ID NO: 3020213 - DNA, 25 bp, Homo sapien
tacctcagggagttcaatgccaaga

SEQ ID NO: 3020214 - DNA, 25 bp, Homo sapien
tgagtctcggaagaacaacctttgt

SEQ ID NO: 3020215 - DNA, 25 bp, Homo sapien
tccccgacgatagctattctctgtt

SEQ ID NO: 3020216 - DNA, 25 bp, Homo sapien
ttccttccccgacgatagctattct

SEQ ID NO: 3020217 - DNA, 25 bp, Homo sapien
cttccccgacgatagctattctctg

SEQ ID NO: 3020218 - DNA, 25 bp, Homo sapien
cttttccttccccgacgatagctat

SEQ ID NO: 3020219 - DNA, 25 bp, Homo sapien
tctaataggagcacccaatgtctgg

SEQ ID NO: 3020220 - DNA, 25 bp, Homo sapien
ccttaggactatgcttctggcttgg

SEQ ID NO: 3020221 - DNA, 25 bp, Homo sapien
tattgaggtcaaaacatccttagga

SEQ ID NO: 3020222 - DNA, 25 bp, Homo sapien
tagggagccacagtcaaataagcca

SEQ ID NO: 3020223 - DNA, 25 bp, Homo sapien
cctgagacggcacaagtagacaagc

SEQ ID NO: 3020224 - DNA, 25 bp, Homo sapien
tcaaggtgccccatgtaaagagcgg

SEQ ID NO: 3020225 - DNA, 25 bp, Homo sapien
gtaaagagcggagattcatgtcata

SEQ ID NO: 3020226 - DNA, 25 bp, Homo sapien
tagacataaattaacctgagacggc

SEQ ID NO: 3020227 - DNA, 25 bp, Homo sapien
tgatgaccgcgatgtgaacacacca

SEQ ID NO: 3020228 - DNA, 25 bp, Homo sapien
tgtttgtgcacagtggtaccctgac

SEQ ID NO: 3020229 - DNA, 25 bp, Homo sapien
tgattaacgtgcaccgtcttccgtg

SEQ ID NO: 3020230 - DNA, 25 bp, Homo sapien
tggcctggtaccctcatagtgtgtg

SEQ ID NO: 3020231 - DNA, 25 bp, Homo sapien
tcctcaatacctagtctttggaggg

SEQ ID NO: 3020232 - DNA, 25 bp, Homo sapien
aactaggaaatggattaccaatgcc

SEQ ID NO: 3020233 - DNA, 25 bp, Homo sapien
acatcctgggccaacagcaacctgt

SEQ ID NO: 3020234 - DNA, 25 bp, Homo sapien
gaaattcacctcgagagtgagggcc

SEQ ID NO: 3020235 - DNA, 25 bp, Homo sapien
tcagacgtagcagtgtttattcccc

SEQ ID NO: 3020236 - DNA, 25 bp, Homo sapien
tttattccccgggtcctgcctgtca

SEQ ID NO: 3020237 - DNA, 25 bp, Homo sapien
atgtggcctgcccacgtaaaggctg

SEQ ID NO: 3020238 - DNA, 25 bp, Homo sapien
tggcctgcccacgtaaaggctggca

SEQ ID NO: 3020239 - DNA, 25 bp, Homo sapien
gttggcccagtctctgtccgttgga

SEQ ID NO: 3020240 - DNA, 25 bp, Homo sapien
taataggaacatcccaaactgtaca

SEQ ID NO: 3020241 - DNA, 25 bp, Homo sapien
tggaattagcttgagttggttataa

SEQ ID NO: 3020242 - DNA, 25 bp, Homo sapien
tggttataataggaacatcccaaac

SEQ ID NO: 3020243 - DNA, 25 bp, Homo sapien
cttatttcctgttgattccttctca

SEQ ID NO: 3020244 - DNA, 25 bp, Homo sapien
attccttctcagctgtagcaggcat

SEQ ID NO: 3020245 - DNA, 25 bp, Homo sapien
tgattccttctcagctgtagcaggc

SEQ ID NO: 3020246 - DNA, 25 bp, Homo sapien
gttgattccttctcagctgtagcag

SEQ ID NO: 3020247 - DNA, 25 bp, Homo sapien
gagcagggtgcctccagccctatag

SEQ ID NO: 3020248 - DNA, 25 bp, Homo sapien
gcagggtgcctccagccctatagct

SEQ ID NO: 3020249 - DNA, 25 bp, Homo sapien
agcagggtgcctccagccctatagc

SEQ ID NO: 3020250 - DNA, 25 bp, Homo sapien
cagtggccggtcttgtcctgttgat

SEQ ID NO: 3020251 - DNA, 25 bp, Homo sapien
tccaaaagtccgatcaacctcatgt

SEQ ID NO: 3020252 - DNA, 25 bp, Homo sapien
tcctgttgatcttgaccttcgttca

SEQ ID NO: 3020253 - DNA, 25 bp, Homo sapien
cactttgcagaacagttgcctggct

SEQ ID NO: 3020254 - DNA, 25 bp, Homo sapien
gtcccccttgggcacagttttctgc

SEQ ID NO: 3020255 - DNA, 25 bp, Homo sapien
ccttgggcacagttttctgctccac

SEQ ID NO: 3020256 - DNA, 25 bp, Homo sapien
tcccccttgggcacagttttctgct

SEQ ID NO: 3020257 - DNA, 25 bp, Homo sapien
tgggcacagttttctgctccactca

SEQ ID NO: 3020258 - DNA, 25 bp, Homo sapien
cacccacagcctcgactgccttcat

SEQ ID NO: 3020259 - DNA, 25 bp, Homo sapien
cccacccacagcctcgactgccttc

SEQ ID NO: 3020260 - DNA, 25 bp, Homo sapien
ttccccacccacagcctcgactgcc

SEQ ID NO: 3020261 - DNA, 25 bp, Homo sapien
tccccacccacagcctcgactgcct

SEQ ID NO: 3020262 - DNA, 25 bp, Homo sapien
tgcctcaggtctgtgtcagacatga

SEQ ID NO: 3020263 - DNA, 25 bp, Homo sapien
gacatgactgcgtggctcccttcat

SEQ ID NO: 3020264 - DNA, 25 bp, Homo sapien
tccttcagctgtccattttgcctca

SEQ ID NO: 3020265 - DNA, 25 bp, Homo sapien
tctgtatcctagatgcagccatagc

SEQ ID NO: 3020266 - DNA, 25 bp, Homo sapien
gaagtaaagagggatgtggttgagc

SEQ ID NO: 3020267 - DNA, 25 bp, Homo sapien
aagtaaagagggatgtggttgagcc

SEQ ID NO: 3020268 - DNA, 25 bp, Homo sapien
tggaagtaaagagggatgtggttga

SEQ ID NO: 3020269 - DNA, 25 bp, Homo sapien
ctggaagtaaagagggatgtggttg

SEQ ID NO: 3020270 - DNA, 25 bp, Homo sapien
agagagcagtcaagtacctgtaggg

SEQ ID NO: 3020271 - DNA, 25 bp, Homo sapien
tgagtcctttcagagagcagtcaag

SEQ ID NO: 3020272 - DNA, 25 bp, Homo sapien
cagtcaagtacctgtagggctgttc

SEQ ID NO: 3020273 - DNA, 25 bp, Homo sapien
acccatcttccagagtccaccagaa

SEQ ID NO: 3020274 - DNA, 25 bp, Homo sapien
tccccaaaccctcagtccacctgaa

SEQ ID NO: 3020275 - DNA, 25 bp, Homo sapien
cccaaaccctcagtccacctgaatg

SEQ ID NO: 3020276 - DNA, 25 bp, Homo sapien
ccccaaaccctcagtccacctgaat

SEQ ID NO: 3020277 - DNA, 25 bp, Homo sapien
cagaacctggcagtcccctttttga

SEQ ID NO: 3020278 - DNA, 25 bp, Homo sapien
cctggcagtcccctttttgaccaca

SEQ ID NO: 3020279 - DNA, 25 bp, Homo sapien
gagaagctgacctacatgggagctg

SEQ ID NO: 3020280 - DNA, 25 bp, Homo sapien
cgagccctagctgtgttccacgtct

SEQ ID NO: 3020281 - DNA, 25 bp, Homo sapien
taaggaaatggactcaaagaagcga

SEQ ID NO: 3020282 - DNA, 25 bp, Homo sapien
gaagcgaaccattggctaattcagt

SEQ ID NO: 3020283 - DNA, 25 bp, Homo sapien
ccgaatcctatcattgtgttcttgc

SEQ ID NO: 3020284 - DNA, 25 bp, Homo sapien
tttgtgacgttcatgttttgtcgtg

SEQ ID NO: 3020285 - DNA, 25 bp, Homo sapien
tgtcgtgttgattcctttctccgaa

SEQ ID NO: 3020286 - DNA, 25 bp, Homo sapien
catgagtggcgcagttttggatacg

SEQ ID NO: 3020287 - DNA, 25 bp, Homo sapien
tgtgagacttttgtgctggagacgc

SEQ ID NO: 3020288 - DNA, 25 bp, Homo sapien
ttagaccgtggagctgtaacagatc

SEQ ID NO: 3020289 - DNA, 25 bp, Homo sapien
tgctcacctttgtttaggaaggcgt

SEQ ID NO: 3020290 - DNA, 25 bp, Homo sapien
aacagatctgttcttcgtgtgagac

SEQ ID NO: 3020291 - DNA, 25 bp, Homo sapien
tgatagcgaaccctgcacagtgagg

SEQ ID NO: 3020292 - DNA, 25 bp, Homo sapien
gaatgctgatgagggcttctgcccc

SEQ ID NO: 3020293 - DNA, 25 bp, Homo sapien
cataactgagggaaaggcacgaagg

SEQ ID NO: 3020294 - DNA, 25 bp, Homo sapien
catggtcctgcagagactaccgagg

SEQ ID NO: 3020295 - DNA, 25 bp, Homo sapien
ctgtgtagagacatgacccaagtag

SEQ ID NO: 3020296 - DNA, 25 bp, Homo sapien
tgtgtagagacatgacccaagtagc

SEQ ID NO: 3020297 - DNA, 25 bp, Homo sapien
gtgtagagacatgacccaagtagct

SEQ ID NO: 3020298 - DNA, 25 bp, Homo sapien
gcttcagaggaacaagtggcactgg

SEQ ID NO: 3020299 - DNA, 25 bp, Homo sapien
tgcttcagaggaacaagtggcactg

SEQ ID NO: 3020300 - DNA, 25 bp, Homo sapien
cagcatgacgagagtaaaggaccca

SEQ ID NO: 3020301 - DNA, 25 bp, Homo sapien
ttgcaaagctaagtgacggccagaa

SEQ ID NO: 3020302 - DNA, 25 bp, Homo sapien
tggtattccccagtctgaacatgtg

SEQ ID NO: 3020303 - DNA, 25 bp, Homo sapien
caagggaggacctttgttcaagagc

SEQ ID NO: 3020304 - DNA, 25 bp, Homo sapien
tcagtaactgacaagagggactcgg

SEQ ID NO: 3020305 - DNA, 25 bp, Homo sapien
gtgtacatacatcacgggccctagg

SEQ ID NO: 3020306 - DNA, 25 bp, Homo sapien
tccacatagagctcgggtcgacgct

SEQ ID NO: 3020307 - DNA, 25 bp, Homo sapien
gaaaattgtgatctccagtccgtgt

SEQ ID NO: 3020308 - DNA, 25 bp, Homo sapien
caatctaaaccaatgtacaggtgta

SEQ ID NO: 3020309 - DNA, 25 bp, Homo sapien
tcaccctcctctgagagtgggatgt

SEQ ID NO: 3020310 - DNA, 25 bp, Homo sapien
ggcaagggcaggtcatgcctcaatt

SEQ ID NO: 3020311 - DNA, 25 bp, Homo sapien
tcccaacacagtgtaaagtcaccct

SEQ ID NO: 3020312 - DNA, 25 bp, Homo sapien
ccctgagcttggcatctgttcttgc

SEQ ID NO: 3020313 - DNA, 25 bp, Homo sapien
tggagcctgaaggtcaccacctgtg

SEQ ID NO: 3020314 - DNA, 25 bp, Homo sapien
tctcaaatgcacaccgggatggagc

SEQ ID NO: 3020315 - DNA, 25 bp, Homo sapien
gggacatggccgtcaatctcaaatg

SEQ ID NO: 3020316 - DNA, 25 bp, Homo sapien
tctcaaaaccttcgagggcaaagtg

SEQ ID NO: 3020317 - DNA, 25 bp, Homo sapien
taaatcccgcaaggaggacaatgga

SEQ ID NO: 3020318 - DNA, 25 bp, Homo sapien
gaggacaggttccagaggtgctcac

SEQ ID NO: 3020319 - DNA, 25 bp, Homo sapien
tacgacgggagctgacttcttccaa

SEQ ID NO: 3020320 - DNA, 25 bp, Homo sapien
aaggtgccgccgtctgtttccaaga

SEQ ID NO: 3020321 - DNA, 25 bp, Homo sapien
ggcaccagtcctaagaggcatctat

SEQ ID NO: 3020322 - DNA, 25 bp, Homo sapien
gactagtgcttatgtgggagcccaa

SEQ ID NO: 3020323 - DNA, 25 bp, Homo sapien
tcttcagcttctaccagcaaggagg

SEQ ID NO: 3020324 - DNA, 25 bp, Homo sapien
gcttgggcattgttggaaagtctcc

SEQ ID NO: 3020325 - DNA, 25 bp, Homo sapien
ccatctcctcgatgtcgccagcaaa

SEQ ID NO: 3020326 - DNA, 25 bp, Homo sapien
gtcgccagcaaacagggctttcagt

SEQ ID NO: 3020327 - DNA, 25 bp, Homo sapien
ggctcctctgtgtgggcccgcttct

SEQ ID NO: 3020328 - DNA, 25 bp, Homo sapien
gcatccccacgctgatggcttggga

SEQ ID NO: 3020329 - DNA, 25 bp, Homo sapien
aagtggttcagcataatgaactccg

SEQ ID NO: 3020330 - DNA, 25 bp, Homo sapien
ggaccttggcatagcgctggctgaa

SEQ ID NO: 3020331 - DNA, 25 bp, Homo sapien
aatgaactccgcgttcatccgcatc

SEQ ID NO: 3020332 - DNA, 25 bp, Homo sapien
cagggtggcttcatgtatcaggagg

SEQ ID NO: 3020333 - DNA, 25 bp, Homo sapien
tgtatcaggagggtggcatctttcc

SEQ ID NO: 3020334 - DNA, 25 bp, Homo sapien
tcatgtatcaggagggtggcatctt

SEQ ID NO: 3020335 - DNA, 25 bp, Homo sapien
gcttcatgtatcaggagggtggcat

SEQ ID NO: 3020336 - DNA, 25 bp, Homo sapien
agccagaggtgtgcaccagcgcaca

SEQ ID NO: 3020337 - DNA, 25 bp, Homo sapien
ccaaacgcatgcttgcagtgccgca

SEQ ID NO: 3020338 - DNA, 25 bp, Homo sapien
ccagagcctcgcagggcatggtgtc

SEQ ID NO: 3020339 - DNA, 25 bp, Homo sapien
atggtgtccccggaatagaccactt

SEQ ID NO: 3020340 - DNA, 25 bp, Homo sapien
catgatgcctgcggctgtgcccctt

SEQ ID NO: 3020341 - DNA, 25 bp, Homo sapien
cacctcgcccccatgatgcctgcgg

SEQ ID NO: 3020342 - DNA, 25 bp, Homo sapien
ccccatgatgcctgcggctgtgccc

SEQ ID NO: 3020343 - DNA, 25 bp, Homo sapien
tgatgcctgcggctgtgccccttac

SEQ ID NO: 3020344 - DNA, 25 bp, Homo sapien
tccaaatcacatgttcgcaacagcg

SEQ ID NO: 3020345 - DNA, 25 bp, Homo sapien
aggactggagatctcagccccttcc

SEQ ID NO: 3020346 - DNA, 25 bp, Homo sapien
cctgaaggcatttggcaggaatcat

SEQ ID NO: 3020347 - DNA, 25 bp, Homo sapien
tcgcaacagcgaactgatcaatctt

SEQ ID NO: 3020348 - DNA, 25 bp, Homo sapien
tgtctcatcaagaaaagctgctcga

SEQ ID NO: 3020349 - DNA, 25 bp, Homo sapien
ctgctatggacattctctgtgctag

SEQ ID NO: 3020350 - DNA, 25 bp, Homo sapien
tctgtgctagccactatttgggtgc

SEQ ID NO: 3020351 - DNA, 25 bp, Homo sapien
tagaaagcagctcagaactcaaatg

SEQ ID NO: 3020352 - DNA, 25 bp, Homo sapien
ttctgtccttcagccaatgcacttc

SEQ ID NO: 3020353 - DNA, 25 bp, Homo sapien
ggtttctgtccttcagccaatgcac

SEQ ID NO: 3020354 - DNA, 25 bp, Homo sapien
gggaactatctaatggtttctgtcc

SEQ ID NO: 3020355 - DNA, 25 bp, Homo sapien
acatgggaactatctaatggtttct

SEQ ID NO: 3020356 - DNA, 25 bp, Homo sapien
tttgagctggttgggggcaaccacc

SEQ ID NO: 3020357 - DNA, 25 bp, Homo sapien
ggtgaagcggctttcccaaagatgc

SEQ ID NO: 3020358 - DNA, 25 bp, Homo sapien
gcaaagggtgaagcggctttcccaa

SEQ ID NO: 3020359 - DNA, 25 bp, Homo sapien
gggcaaccaccagcaaagggtgaag

SEQ ID NO: 3020360 - DNA, 25 bp, Homo sapien
ctctctgcagcaagatacttggcaa

SEQ ID NO: 3020361 - DNA, 25 bp, Homo sapien
tctctgcagcaagatacttggcaag

SEQ ID NO: 3020362 - DNA, 25 bp, Homo sapien
tctgcagcaagatacttggcaagcc

SEQ ID NO: 3020363 - DNA, 25 bp, Homo sapien
tctctctgcagcaagatacttggca

SEQ ID NO: 3020364 - DNA, 25 bp, Homo sapien
gctgggtaaactcaaacctgtcctg

SEQ ID NO: 3020365 - DNA, 25 bp, Homo sapien
aaagcgacacgacccgtgctgggaa

SEQ ID NO: 3020366 - DNA, 25 bp, Homo sapien
tccggtcaaagcttccgctgagcag

SEQ ID NO: 3020367 - DNA, 25 bp, Homo sapien
gagcaggccgtgtgagattcaagac

SEQ ID NO: 3020368 - DNA, 25 bp, Homo sapien
tctgcgtgcaggtgggacacaaaca

SEQ ID NO: 3020369 - DNA, 25 bp, Homo sapien
cctgtccacctggtctccgtaatga

SEQ ID NO: 3020370 - DNA, 25 bp, Homo sapien
agctgcccaaatgtgccctcaccac

SEQ ID NO: 3020371 - DNA, 25 bp, Homo sapien
gtctccgtaatgacggcacagctgc

SEQ ID NO: 3020372 - DNA, 25 bp, Homo sapien
gaagccccggtgctaagacattacc

SEQ ID NO: 3020373 - DNA, 25 bp, Homo sapien
aggagccacgaacactgagagggct

SEQ ID NO: 3020374 - DNA, 25 bp, Homo sapien
ccttcattctctgggaggagccacg

SEQ ID NO: 3020375 - DNA, 25 bp, Homo sapien
gcagagagaagccccggtgctaaga

SEQ ID NO: 3020376 - DNA, 25 bp, Homo sapien
tcttcatcgggatggcagaccctgt

SEQ ID NO: 3020377 - DNA, 25 bp, Homo sapien
gcagaccctgttccaaggaagatga

SEQ ID NO: 3020378 - DNA, 25 bp, Homo sapien
actgacatttcgaatcttcatcggg

SEQ ID NO: 3020379 - DNA, 25 bp, Homo sapien
tatgttgacaagtgtggcactgaca

SEQ ID NO: 3020380 - DNA, 25 bp, Homo sapien
tcctgcacgctctgctggaagttgg

SEQ ID NO: 3020381 - DNA, 25 bp, Homo sapien
ttgggaagctgcagcgcctcaacta

SEQ ID NO: 3020382 - DNA, 25 bp, Homo sapien
tcaactatgaattcctcaggattgc

SEQ ID NO: 3020383 - DNA, 25 bp, Homo sapien
cctcaggattgcaagtaataatggc

SEQ ID NO: 3020384 - DNA, 25 bp, Homo sapien
ggtcaatggtccgagctgagaagca

SEQ ID NO: 3020385 - DNA, 25 bp, Homo sapien
gacagggtatatggcctcagcagac

SEQ ID NO: 3020386 - DNA, 25 bp, Homo sapien
caagaacgtttccagatgttgccaa

SEQ ID NO: 3020387 - DNA, 25 bp, Homo sapien
caaaacgcagaagccagttcggcag

SEQ ID NO: 3020388 - DNA, 25 bp, Homo sapien
accctgaaccatgggcacactgagg

SEQ ID NO: 3020389 - DNA, 25 bp, Homo sapien
tacttgaggaggcattcaccctgaa

SEQ ID NO: 3020390 - DNA, 25 bp, Homo sapien
gcattcaccctgaaccatgggcaca

SEQ ID NO: 3020391 - DNA, 25 bp, Homo sapien
ctgggacggagctggtacttgagga

SEQ ID NO: 3020392 - DNA, 25 bp, Homo sapien
acaaggggccggtctgagacactac

SEQ ID NO: 3020393 - DNA, 25 bp, Homo sapien
aagagaggggacgagagctgggccg

SEQ ID NO: 3020394 - DNA, 25 bp, Homo sapien
gctgggccgacaaggggccggtctg

SEQ ID NO: 3020395 - DNA, 25 bp, Homo sapien
gagacaaaacacattcatggagaga

SEQ ID NO: 3020396 - DNA, 25 bp, Homo sapien
gcagggggaagatgtccgggtggat

SEQ ID NO: 3020397 - DNA, 25 bp, Homo sapien
tgcgaaggttgtgaactgaggcaca

SEQ ID NO: 3020398 - DNA, 25 bp, Homo sapien
tgggtttgaatcttgtggctgcgaa

SEQ ID NO: 3020399 - DNA, 25 bp, Homo sapien
tttgaatcttgtggctgcgaaggtt

SEQ ID NO: 3020400 - DNA, 25 bp, Homo sapien
cccaagtgccgctgggctgggctcc

SEQ ID NO: 3020401 - DNA, 25 bp, Homo sapien
agtgccgctgggctgggctccatac

SEQ ID NO: 3020402 - DNA, 25 bp, Homo sapien
aagtgccgctgggctgggctccata

SEQ ID NO: 3020403 - DNA, 25 bp, Homo sapien
ccaagtgccgctgggctgggctcca

SEQ ID NO: 3020404 - DNA, 25 bp, Homo sapien
ccatgtgaaccaccaaggccacggg

SEQ ID NO: 3020405 - DNA, 25 bp, Homo sapien
tcctgtatctggcaagctctgctct

SEQ ID NO: 3020406 - DNA, 25 bp, Homo sapien
cactcatacgggtccaacctgcaaa

SEQ ID NO: 3020407 - DNA, 25 bp, Homo sapien
tgagacacaggcacgagaaatgaaa

SEQ ID NO: 3020408 - DNA, 25 bp, Homo sapien
catttccaatggacgtgggattcct

SEQ ID NO: 3020409 - DNA, 25 bp, Homo sapien
caggatctggaggagtacacagctc

SEQ ID NO: 3020410 - DNA, 25 bp, Homo sapien
tctcacagatgggttgaatgaagct

SEQ ID NO: 3020411 - DNA, 25 bp, Homo sapien
tgaagctttcatctggacattctac

SEQ ID NO: 3020412 - DNA, 25 bp, Homo sapien
agcaccaggatctggaggagtacac

SEQ ID NO: 3020413 - DNA, 25 bp, Homo sapien
gtaactgctgaatcaagaaaaccag

SEQ ID NO: 3020414 - DNA, 25 bp, Homo sapien
gatgggagcgatggcagctgtccca

SEQ ID NO: 3020415 - DNA, 25 bp, Homo sapien
tcatgagtgatgcttttcccgtcct

SEQ ID NO: 3020416 - DNA, 25 bp, Homo sapien
ttgacagcagcaatgatgggagcga

SEQ ID NO: 3020417 - DNA, 25 bp, Homo sapien
gatgcttttcccgtccttgacagca

SEQ ID NO: 3020418 - DNA, 25 bp, Homo sapien
atgtgatttccttaagtggacaggt

SEQ ID NO: 3020419 - DNA, 25 bp, Homo sapien
tgtgatttccttaagtggacaggtg

SEQ ID NO: 3020420 - DNA, 25 bp, Homo sapien
gatttccttaagtggacaggtgtac

SEQ ID NO: 3020421 - DNA, 25 bp, Homo sapien
tgatttccttaagtggacaggtgta

SEQ ID NO: 3020422 - DNA, 25 bp, Homo sapien
actgggaggcccatctcctttgctt

SEQ ID NO: 3020423 - DNA, 25 bp, Homo sapien
agaagtttcctctctttaagtgaag

SEQ ID NO: 3020424 - DNA, 25 bp, Homo sapien
ccaagaagtttcctctctttaagtg

SEQ ID NO: 3020425 - DNA, 25 bp, Homo sapien
cctttgctttgagcaccaagaagtt

SEQ ID NO: 3020426 - DNA, 25 bp, Homo sapien
tgatcttaggggctaatgaagaagg

SEQ ID NO: 3020427 - DNA, 25 bp, Homo sapien
ccaaaatgacttaaatcagtgtttt

SEQ ID NO: 3020428 - DNA, 25 bp, Homo sapien
cattaaaatgcgtttattgctttca

SEQ ID NO: 3020429 - DNA, 25 bp, Homo sapien
gatgttgtttccttacaattcatta

SEQ ID NO: 3020430 - DNA, 25 bp, Homo sapien
cagatctaggcctttgtgaatgcta

SEQ ID NO: 3020431 - DNA, 25 bp, Homo sapien
taatctaagcccacaaaaaggcaat

SEQ ID NO: 3020432 - DNA, 25 bp, Homo sapien
taaaaataagccactagtcagatct

SEQ ID NO: 3020433 - DNA, 25 bp, Homo sapien
aaagactttgaataaaggcctgatg

SEQ ID NO: 3020434 - DNA, 25 bp, Homo sapien
catgtacagccctccggaaagtctt

SEQ ID NO: 3020435 - DNA, 25 bp, Homo sapien
gtcatgtacagccctccggaaagtc

SEQ ID NO: 3020436 - DNA, 25 bp, Homo sapien
cagtcatgtacagccctccggaaag

SEQ ID NO: 3020437 - DNA, 25 bp, Homo sapien
cccagtcatgtacagccctccggaa

SEQ ID NO: 3020438 - DNA, 25 bp, Homo sapien
tgaaagctacgaccagggaagagtc

SEQ ID NO: 3020439 - DNA, 25 bp, Homo sapien
gatgaaagctacgaccagggaagag

SEQ ID NO: 3020440 - DNA, 25 bp, Homo sapien
gaaagctacgaccagggaagagtcc

SEQ ID NO: 3020441 - DNA, 25 bp, Homo sapien
agatgaaagctacgaccagggaaga

SEQ ID NO: 3020442 - DNA, 25 bp, Homo sapien
ctgacccctcttctctggctaacac

SEQ ID NO: 3020443 - DNA, 25 bp, Homo sapien
actgtggactggtcattattaaagt

SEQ ID NO: 3020444 - DNA, 25 bp, Homo sapien
ctcattttcattcgactcggagtct

SEQ ID NO: 3020445 - DNA, 25 bp, Homo sapien
tctgaagatcgctctggactgagcc

SEQ ID NO: 3020446 - DNA, 25 bp, Homo sapien
tctggactctgccatggttggtgct

SEQ ID NO: 3020447 - DNA, 25 bp, Homo sapien
tcgactcggagtctgaagatcgctc

SEQ ID NO: 3020448 - DNA, 25 bp, Homo sapien
gtgtaagcctcatctcctcgccagg

SEQ ID NO: 3020449 - DNA, 25 bp, Homo sapien
aggagcaagccaggcaatgggagtg

SEQ ID NO: 3020450 - DNA, 25 bp, Homo sapien
gcactggcctaggagcacttgtgcc

SEQ ID NO: 3020451 - DNA, 25 bp, Homo sapien
caatgggagtgctgatcagctcatc

SEQ ID NO: 3020452 - DNA, 25 bp, Homo sapien
ctcctcctgggaaacctggctttca

SEQ ID NO: 3020453 - DNA, 25 bp, Homo sapien
ctcctgggaaacctggctttcatac

SEQ ID NO: 3020454 - DNA, 25 bp, Homo sapien
cctgggaaacctggctttcatactc

SEQ ID NO: 3020455 - DNA, 25 bp, Homo sapien
tgggaaacctggctttcatactcac

SEQ ID NO: 3020456 - DNA, 25 bp, Homo sapien
aactgtcatggtttcatcctcgtat

SEQ ID NO: 3020457 - DNA, 25 bp, Homo sapien
actgtcatggtttcatcctcgtatt

SEQ ID NO: 3020458 - DNA, 25 bp, Homo sapien
ctgtcatggtttcatcctcgtattc

SEQ ID NO: 3020459 - DNA, 25 bp, Homo sapien
aacagcaaagtgattgcattagtga

SEQ ID NO: 3020460 - DNA, 25 bp, Homo sapien
tggaccagaaaatattttgattgct

SEQ ID NO: 3020461 - DNA, 25 bp, Homo sapien
tattcctttcaatggaccagaaaat

SEQ ID NO: 3020462 - DNA, 25 bp, Homo sapien
ttttgattgcttcgaggtatttttc

SEQ ID NO: 3020463 - DNA, 25 bp, Homo sapien
tctattcctttcaatggaccagaaa

SEQ ID NO: 3020464 - DNA, 25 bp, Homo sapien
cagaaagtacacactttggaagccc

SEQ ID NO: 3020465 - DNA, 25 bp, Homo sapien
ggaggtccagaaagtacacactttg

SEQ ID NO: 3020466 - DNA, 25 bp, Homo sapien
tggcgtctgcggtaaacatattaac

SEQ ID NO: 3020467 - DNA, 25 bp, Homo sapien
taaatgacagggtaatctggacagt

SEQ ID NO: 3020468 - DNA, 25 bp, Homo sapien
tccggttgatagacataaatgacag

SEQ ID NO: 3020469 - DNA, 25 bp, Homo sapien
tgtggctgccaatgtgccaatggcg

SEQ ID NO: 3020470 - DNA, 25 bp, Homo sapien
ccccaacattagaccagtgcattcg

SEQ ID NO: 3020471 - DNA, 25 bp, Homo sapien
gttgtccaggcgagcaacctttaac

SEQ ID NO: 3020472 - DNA, 25 bp, Homo sapien
gaccagtgcattcgtgtcaggaata

SEQ ID NO: 3020473 - DNA, 25 bp, Homo sapien
ttaagcccccaacattagaccagtg

SEQ ID NO: 3020474 - DNA, 25 bp, Homo sapien
tgctcctgcatgagtctctgaacgc

SEQ ID NO: 3020475 - DNA, 25 bp, Homo sapien
ttgtgctcctgcatgagtctctgaa

SEQ ID NO: 3020476 - DNA, 25 bp, Homo sapien
tgtgctcctgcatgagtctctgaac

SEQ ID NO: 3020477 - DNA, 25 bp, Homo sapien
gtgctcctgcatgagtctctgaacg

SEQ ID NO: 3020478 - DNA, 25 bp, Homo sapien
gacaaacattacacaagacattcag

SEQ ID NO: 3020479 - DNA, 25 bp, Homo sapien
cacatttatgctggtgggttttgag

SEQ ID NO: 3020480 - DNA, 25 bp, Homo sapien
aagtccacgttggactaccgagcca

SEQ ID NO: 3020481 - DNA, 25 bp, Homo sapien
ctgacaccaattagatgttttattg

SEQ ID NO: 3020482 - DNA, 25 bp, Homo sapien
ctaacaacgacacactggccttggg

SEQ ID NO: 3020483 - DNA, 25 bp, Homo sapien
acgctaacaacgacacactggcctt

SEQ ID NO: 3020484 - DNA, 25 bp, Homo sapien
gccttggggtgcacggaagagggtg

SEQ ID NO: 3020485 - DNA, 25 bp, Homo sapien
tgtccaccccacacgctaacaacga

SEQ ID NO: 3020486 - DNA, 25 bp, Homo sapien
aatcacatggatgcaaagaatctcg

SEQ ID NO: 3020487 - DNA, 25 bp, Homo sapien
ttgggaaaaggacgctcagacccag

SEQ ID NO: 3020488 - DNA, 25 bp, Homo sapien
caggcctgaagttcttcacagatcc

SEQ ID NO: 3020489 - DNA, 25 bp, Homo sapien
tcacagatccgcagaaatcacatgg

SEQ ID NO: 3020490 - DNA, 25 bp, Homo sapien
tgctcagaggctgcgccgcactgag

SEQ ID NO: 3020491 - DNA, 25 bp, Homo sapien
gacggggcgtggctcgttgactgac

SEQ ID NO: 3020492 - DNA, 25 bp, Homo sapien
tgaaccacatgtgtgaagcagggaa

SEQ ID NO: 3020493 - DNA, 25 bp, Homo sapien
gggaggtgccccgatgctcagaggc

SEQ ID NO: 3020494 - DNA, 25 bp, Homo sapien
ctcggagaagacgtagagcgcggcg

SEQ ID NO: 3020495 - DNA, 25 bp, Homo sapien
tgaactcggagaagacgtagagcgc

SEQ ID NO: 3020496 - DNA, 25 bp, Homo sapien
tcggagaagacgtagagcgcggcgc

SEQ ID NO: 3020497 - DNA, 25 bp, Homo sapien
cggttgaactcggagaagacgtaga

SEQ ID NO: 3020498 - DNA, 25 bp, Homo sapien
gccaccacctgcaggtacacggtgt

SEQ ID NO: 3020499 - DNA, 25 bp, Homo sapien
tgtttgggccgccggagcaccccga

SEQ ID NO: 3020500 - DNA, 25 bp, Homo sapien
gcttctctcgcgtgcgcaggtgccg

SEQ ID NO: 3020501 - DNA, 25 bp, Homo sapien
gcgatatggtgcgtccctgcgacat

SEQ ID NO: 3020502 - DNA, 25 bp, Homo sapien
cgcggaccgcagcagcgagcaaagc

SEQ ID NO: 3020503 - DNA, 25 bp, Homo sapien
gcagcagcgagcaaagcgcccacat

SEQ ID NO: 3020504 - DNA, 25 bp, Homo sapien
cggaccgcagcagcgagcaaagcgc

SEQ ID NO: 3020505 - DNA, 25 bp, Homo sapien
ggccgcggaccgcagcagcgagcaa

SEQ ID NO: 3020506 - DNA, 25 bp, Homo sapien
cccgcgtttcccgtgcaccacctag

SEQ ID NO: 3020507 - DNA, 25 bp, Homo sapien
tgagaaagccgccggtcacctacgc

SEQ ID NO: 3020508 - DNA, 25 bp, Homo sapien
ctgagaaagccgccggtcacctacg

SEQ ID NO: 3020509 - DNA, 25 bp, Homo sapien
tcacctacgcccgcgtttcccgtgc

SEQ ID NO: 3020510 - DNA, 25 bp, Homo sapien
agaggagtgcgatgcgcgcccttgg

SEQ ID NO: 3020511 - DNA, 25 bp, Homo sapien
actagagggcgcagaagcgcaggcc

SEQ ID NO: 3020512 - DNA, 25 bp, Homo sapien
atgcgcgcccttggtcactagaggg

SEQ ID NO: 3020513 - DNA, 25 bp, Homo sapien
tccagttctcccgggtcagaggagg

SEQ ID NO: 3020514 - DNA, 25 bp, Homo sapien
tgtttttcaagagagataacgagca

SEQ ID NO: 3020515 - DNA, 25 bp, Homo sapien
agataacgagcaggagtttctcttc

SEQ ID NO: 3020516 - DNA, 25 bp, Homo sapien
tccttagcttgaagcttttgtcctc

SEQ ID NO: 3020517 - DNA, 25 bp, Homo sapien
caatctttccgatccctgctccaca

SEQ ID NO: 3020518 - DNA, 25 bp, Homo sapien
tctcctgataagtcatcaatttctt

SEQ ID NO: 3020519 - DNA, 25 bp, Homo sapien
cctgataagtcatcaatttctttct

SEQ ID NO: 3020520 - DNA, 25 bp, Homo sapien
atctcctgataagtcatcaatttct

SEQ ID NO: 3020521 - DNA, 25 bp, Homo sapien
tcctgataagtcatcaatttctttc

SEQ ID NO: 3020522 - DNA, 25 bp, Homo sapien
catctggtttgggatcctgagttat

SEQ ID NO: 3020523 - DNA, 25 bp, Homo sapien
ctggtttgggatcctgagttatgag

SEQ ID NO: 3020524 - DNA, 25 bp, Homo sapien
aaacatctggtttgggatcctgagt

SEQ ID NO: 3020525 - DNA, 25 bp, Homo sapien
ccaaaacatctggtttgggatcctg

SEQ ID NO: 3020526 - DNA, 25 bp, Homo sapien
gcaggctgattccaaccgattgaat

SEQ ID NO: 3020527 - DNA, 25 bp, Homo sapien
tgatgacagtgacgggcttgagcac

SEQ ID NO: 3020528 - DNA, 25 bp, Homo sapien
cttttccggaaatcagtgaaatcga

SEQ ID NO: 3020529 - DNA, 25 bp, Homo sapien
gctttgctggtgtgaacttgcaggc

SEQ ID NO: 3020530 - DNA, 25 bp, Homo sapien
tccagatccggagactctgagtgct

SEQ ID NO: 3020531 - DNA, 25 bp, Homo sapien
tccggagactctgagtgctccttgc

SEQ ID NO: 3020532 - DNA, 25 bp, Homo sapien
agtccagatccggagactctgagtg

SEQ ID NO: 3020533 - DNA, 25 bp, Homo sapien
ctggagtccagatccggagactctg

SEQ ID NO: 3020534 - DNA, 25 bp, Homo sapien
gaaattctggcgctgaaccttctct

SEQ ID NO: 3020535 - DNA, 25 bp, Homo sapien
tagactgatatcatcgaacacagtt

SEQ ID NO: 3020536 - DNA, 25 bp, Homo sapien
gaagcctgttgacccttctgcactg

SEQ ID NO: 3020537 - DNA, 25 bp, Homo sapien
gttttgatttgtggccgacctggtc

SEQ ID NO: 3020538 - DNA, 25 bp, Homo sapien
tatcaactattgagcagttaatgag

SEQ ID NO: 3020539 - DNA, 25 bp, Homo sapien
aataggcttcataatacctgtccaa

SEQ ID NO: 3020540 - DNA, 25 bp, Homo sapien
tcaggaagatttatgagtagtagct

SEQ ID NO: 3020541 - DNA, 25 bp, Homo sapien
cggaatatctagcatttagtcagaa

SEQ ID NO: 3020542 - DNA, 25 bp, Homo sapien
attcttttgggtataagatactgaa

SEQ ID NO: 3020543 - DNA, 25 bp, Homo sapien
gttcttggcagtattcttttgggta

SEQ ID NO: 3020544 - DNA, 25 bp, Homo sapien
catgacccagcatggccattgctag

SEQ ID NO: 3020545 - DNA, 25 bp, Homo sapien
cagacgccgaagtatctttgccttt

SEQ ID NO: 3020546 - DNA, 25 bp, Homo sapien
cattgctagcctttccacgttgtaa

SEQ ID NO: 3020547 - DNA, 25 bp, Homo sapien
gactcaatgcatggatatctggctt

SEQ ID NO: 3020548 - DNA, 25 bp, Homo sapien
tcttcctagcacaggttccttgaga

SEQ ID NO: 3020549 - DNA, 25 bp, Homo sapien
tataatccacgaatgccggagacct

SEQ ID NO: 3020550 - DNA, 25 bp, Homo sapien
gagatcttggctgccagtcatcttg

SEQ ID NO: 3020551 - DNA, 25 bp, Homo sapien
ggagacctcgccctcattctgtctt

SEQ ID NO: 3020552 - DNA, 25 bp, Homo sapien
tctgcatttattgtgcaagttctta

SEQ ID NO: 3020553 - DNA, 25 bp, Homo sapien
cagggactggcttgtgtctgaatga

SEQ ID NO: 3020554 - DNA, 25 bp, Homo sapien
gacggtcacaaagacttctgcattt

SEQ ID NO: 3020555 - DNA, 25 bp, Homo sapien
ggcttgtgtctgaatgacggtcaca

SEQ ID NO: 3020556 - DNA, 25 bp, Homo sapien
cttggtttgcacttgatcaattgcc

SEQ ID NO: 3020557 - DNA, 25 bp, Homo sapien
tggtttgcacttgatcaattgcctc

SEQ ID NO: 3020558 - DNA, 25 bp, Homo sapien
ggtttgcacttgatcaattgcctcc

SEQ ID NO: 3020559 - DNA, 25 bp, Homo sapien
tttgcacttgatcaattgcctccat

SEQ ID NO: 3020560 - DNA, 25 bp, Homo sapien
gctgtgggtttgacggctatagcaa

SEQ ID NO: 3020561 - DNA, 25 bp, Homo sapien
gacggctatagcaatggtagtgcag

SEQ ID NO: 3020562 - DNA, 25 bp, Homo sapien
ggtttgacggctatagcaatggtag

SEQ ID NO: 3020563 - DNA, 25 bp, Homo sapien
tgcagctgtgggtttgacggctata

SEQ ID NO: 3020564 - DNA, 25 bp, Homo sapien
tatatttggtgaagagcctttataa

SEQ ID NO: 3020565 - DNA, 25 bp, Homo sapien
ttaagttcagatatgtcagattttc

SEQ ID NO: 3020566 - DNA, 25 bp, Homo sapien
tgcgatcccccaactgtatttgaag

SEQ ID NO: 3020567 - DNA, 25 bp, Homo sapien
tatttataagagctttcatgagctc

SEQ ID NO: 3020568 - DNA, 25 bp, Homo sapien
aatgttaccattataagtctacgtg

SEQ ID NO: 3020569 - DNA, 25 bp, Homo sapien
ttaatgatatgacccagatttggtc

SEQ ID NO: 3020570 - DNA, 25 bp, Homo sapien
tagttaggttccatatacagaacat

SEQ ID NO: 3020571 - DNA, 25 bp, Homo sapien
tttgtcagtctacgatagtcagtct

SEQ ID NO: 3020572 - DNA, 25 bp, Homo sapien
gggtgtcacctcatcataaatccat

SEQ ID NO: 3020573 - DNA, 25 bp, Homo sapien
ggtcacctggtttgtccctggcact

SEQ ID NO: 3020574 - DNA, 25 bp, Homo sapien
ctgcaagaccttgggtttatactga

SEQ ID NO: 3020575 - DNA, 25 bp, Homo sapien
ctgctgggtgtcacctcatcataaa

SEQ ID NO: 3020576 - DNA, 25 bp, Homo sapien
tctgacacccgaaacattctggaat

SEQ ID NO: 3020577 - DNA, 25 bp, Homo sapien
ttgcttgtccgctggtgtcagccat

SEQ ID NO: 3020578 - DNA, 25 bp, Homo sapien
atctgcctctgacacccgaaacatt

SEQ ID NO: 3020579 - DNA, 25 bp, Homo sapien
aacattctggaattgcttgtccgct

SEQ ID NO: 3020580 - DNA, 25 bp, Homo sapien
ctggctggtagaccgccaacagcat

SEQ ID NO: 3020581 - DNA, 25 bp, Homo sapien
gggaataatcgctggctggtagacc

SEQ ID NO: 3020582 - DNA, 25 bp, Homo sapien
agtcttgtactgttgcaacatctgg

SEQ ID NO: 3020583 - DNA, 25 bp, Homo sapien
caacatctggataccaaggggaata

SEQ ID NO: 3020584 - DNA, 25 bp, Homo sapien
cgtatgtcatataatcttagaaaga

SEQ ID NO: 3020585 - DNA, 25 bp, Homo sapien
tgcgtatgtcatataatcttagaaa

SEQ ID NO: 3020586 - DNA, 25 bp, Homo sapien
ctgcgtatgtcatataatcttagaa

SEQ ID NO: 3020587 - DNA, 25 bp, Homo sapien
gcgtatgtcatataatcttagaaag

SEQ ID NO: 3020588 - DNA, 25 bp, Homo sapien
cagtggcataaggaacgtcatgatt

SEQ ID NO: 3020589 - DNA, 25 bp, Homo sapien
cataaggaacgtcatgattatcatc

SEQ ID NO: 3020590 - DNA, 25 bp, Homo sapien
gagcaggatcttggctaaggagtcc

SEQ ID NO: 3020591 - DNA, 25 bp, Homo sapien
aggaacgtcatgattatcatcagca

SEQ ID NO: 3020592 - DNA, 25 bp, Homo sapien
ttttccagttcccagcctgtaagac

SEQ ID NO: 3020593 - DNA, 25 bp, Homo sapien
agttactctccaccactggttgtat

SEQ ID NO: 3020594 - DNA, 25 bp, Homo sapien
gacttgctgtaatttcacacttggt

SEQ ID NO: 3020595 - DNA, 25 bp, Homo sapien
ttagtaagatgagtagaaagatgct

SEQ ID NO: 3020596 - DNA, 25 bp, Homo sapien
gtaatgctttgctctcaaaattcag

SEQ ID NO: 3020597 - DNA, 25 bp, Homo sapien
tgtaatgctttgctctcaaaattca

SEQ ID NO: 3020598 - DNA, 25 bp, Homo sapien
tagacatggcttcacacggtttgtg

SEQ ID NO: 3020599 - DNA, 25 bp, Homo sapien
ccctccaagggcagcatagctatag

SEQ ID NO: 3020600 - DNA, 25 bp, Homo sapien
tttaaagagtccataccaaggcagg

SEQ ID NO: 3020601 - DNA, 25 bp, Homo sapien
ttctcgtaaactcgcggaagccatt

SEQ ID NO: 3020602 - DNA, 25 bp, Homo sapien
cctgatgtggagctgtcgtactcaa

SEQ ID NO: 3020603 - DNA, 25 bp, Homo sapien
ctaggctgacttgaagagttcccct

SEQ ID NO: 3020604 - DNA, 25 bp, Homo sapien
gctgacttgaagagttcccctgatg

SEQ ID NO: 3020605 - DNA, 25 bp, Homo sapien
agctgtcgtactcaaattcctgctg

SEQ ID NO: 3020606 - DNA, 25 bp, Homo sapien
taggaatctgaattaaccagttaat

SEQ ID NO: 3020607 - DNA, 25 bp, Homo sapien
gacagtgtctttctcaaactgggaa

SEQ ID NO: 3020608 - DNA, 25 bp, Homo sapien
gaaatgctaaaagatccttaggaat

SEQ ID NO: 3020609 - DNA, 25 bp, Homo sapien
caagcctcatccgtattctagagga

SEQ ID NO: 3020610 - DNA, 25 bp, Homo sapien
tccggcccacggatgaagtaagggc

SEQ ID NO: 3020611 - DNA, 25 bp, Homo sapien
agtaagggcaatgaacgcgatattc

SEQ ID NO: 3020612 - DNA, 25 bp, Homo sapien
tacagggatgagtaataatcaccac

SEQ ID NO: 3020613 - DNA, 25 bp, Homo sapien
cacggatgaagtaagggcaatgaac

SEQ ID NO: 3020614 - DNA, 25 bp, Homo sapien
aatagcatgtggaaaatcttggccc

SEQ ID NO: 3020615 - DNA, 25 bp, Homo sapien
tgaggcattcggaggctaccaggat

SEQ ID NO: 3020616 - DNA, 25 bp, Homo sapien
caactagaggcatggggaaggcttt

SEQ ID NO: 3020617 - DNA, 25 bp, Homo sapien
ttgaaaggctgagcctatgaatagc

SEQ ID NO: 3020618 - DNA, 25 bp, Homo sapien
cagcctgtgtggcaattagcaacat

SEQ ID NO: 3020619 - DNA, 25 bp, Homo sapien
ccaagatcatcatcagcaagggctg

SEQ ID NO: 3020620 - DNA, 25 bp, Homo sapien
agatcatcatcagcaagggctggaa

SEQ ID NO: 3020621 - DNA, 25 bp, Homo sapien
gcaagtaccagccttccccacagag

SEQ ID NO: 3020622 - DNA, 25 bp, Homo sapien
ctgtgctgctttcaaaaaatgtgga

SEQ ID NO: 3020623 - DNA, 25 bp, Homo sapien
tgtgctgctttcaaaaaatgtggac

SEQ ID NO: 3020624 - DNA, 25 bp, Homo sapien
gctttcaaaaaatgtggacagtggg

SEQ ID NO: 3020625 - DNA, 25 bp, Homo sapien
ttcaaaaaatgtggacagtgggtcc

SEQ ID NO: 3020626 - DNA, 25 bp, Homo sapien
tgatctccacgaaatggaatcgtac

SEQ ID NO: 3020627 - DNA, 25 bp, Homo sapien
caatctgctctcttgatttactcaa

SEQ ID NO: 3020628 - DNA, 25 bp, Homo sapien
agttggttcgcagttatcaaagccc

SEQ ID NO: 3020629 - DNA, 25 bp, Homo sapien
gaaatggaatcgtacttgaagttgg

SEQ ID NO: 3020630 - DNA, 25 bp, Homo sapien
ttaagatacactggatcctactttc

SEQ ID NO: 3020631 - DNA, 25 bp, Homo sapien
ctgccacataggccaacagtgtgtt

SEQ ID NO: 3020632 - DNA, 25 bp, Homo sapien
tgccacataggccaacagtgtgttc

SEQ ID NO: 3020633 - DNA, 25 bp, Homo sapien
gccacataggccaacagtgtgttca

SEQ ID NO: 3020634 - DNA, 25 bp, Homo sapien
actggaccagtttgagagaataagg

SEQ ID NO: 3020635 - DNA, 25 bp, Homo sapien
tgaccacaccacctgaagagtgtgc

SEQ ID NO: 3020636 - DNA, 25 bp, Homo sapien
gatttgtgacataagtaattccgtg

SEQ ID NO: 3020637 - DNA, 25 bp, Homo sapien
ttctctggtggtctgatttgtgaca

SEQ ID NO: 3020638 - DNA, 25 bp, Homo sapien
ttcttttgcagcgttgacaccttat

SEQ ID NO: 3020639 - DNA, 25 bp, Homo sapien
ttgcagcgttgacaccttatcccca

SEQ ID NO: 3020640 - DNA, 25 bp, Homo sapien
cctacccctgcaccttgctctaaca

SEQ ID NO: 3020641 - DNA, 25 bp, Homo sapien
ttttgcagcgttgacaccttatccc

SEQ ID NO: 3020642 - DNA, 25 bp, Homo sapien
gtcctcttctttctggaagtagttc

SEQ ID NO: 3020643 - DNA, 25 bp, Homo sapien
ctccttgtggtctgagtcctcttct

SEQ ID NO: 3020644 - DNA, 25 bp, Homo sapien
ccttgtggtctgagtcctcttcttt

SEQ ID NO: 3020645 - DNA, 25 bp, Homo sapien
cctcttctttctggaagtagttcat

SEQ ID NO: 3020646 - DNA, 25 bp, Homo sapien
caaaatattactcttggctccttca

SEQ ID NO: 3020647 - DNA, 25 bp, Homo sapien
tatttaaacgtacatttatatcatc

SEQ ID NO: 3020648 - DNA, 25 bp, Homo sapien
cgtacatttatatcatctatttcta

SEQ ID NO: 3020649 - DNA, 25 bp, Homo sapien
aaaatattactcttggctccttcat

SEQ ID NO: 3020650 - DNA, 25 bp, Homo sapien
catgcagtgctctacctttctcaga

SEQ ID NO: 3020651 - DNA, 25 bp, Homo sapien
aattccggcaaaaccaggtcagttg

SEQ ID NO: 3020652 - DNA, 25 bp, Homo sapien
gatcagcagcgactgagaagcctct

SEQ ID NO: 3020653 - DNA, 25 bp, Homo sapien
gagtctatccctgttcctcatgcgt

SEQ ID NO: 3020654 - DNA, 25 bp, Homo sapien
gctggttcaagccatgcttcatggg

SEQ ID NO: 3020655 - DNA, 25 bp, Homo sapien
agtgtgtctggcagtgcagcacgca

SEQ ID NO: 3020656 - DNA, 25 bp, Homo sapien
ccgttagcacagagtctaagcaaaa

SEQ ID NO: 3020657 - DNA, 25 bp, Homo sapien
tgacattgtgagctcataacctaag

SEQ ID NO: 3020658 - DNA, 25 bp, Homo sapien
gcagcacgcagactcttagtgagcg

SEQ ID NO: 3020659 - DNA, 25 bp, Homo sapien
ctttggcttcttgccgaagtccttc

SEQ ID NO: 3020660 - DNA, 25 bp, Homo sapien
tggcttcttgccgaagtccttcaaa

SEQ ID NO: 3020661 - DNA, 25 bp, Homo sapien
ggcttcttgccgaagtccttcaaaa

SEQ ID NO: 3020662 - DNA, 25 bp, Homo sapien
tcatcccatctgataacagcagcaa

SEQ ID NO: 3020663 - DNA, 25 bp, Homo sapien
cattggataatcatctccttgtcca

SEQ ID NO: 3020664 - DNA, 25 bp, Homo sapien
tacagaagttatgccttcagcatga

SEQ ID NO: 3020665 - DNA, 25 bp, Homo sapien
ggaacggattaacctctgaggcaat

SEQ ID NO: 3020666 - DNA, 25 bp, Homo sapien
tctgtgcttgatgggaaagatctgg

SEQ ID NO: 3020667 - DNA, 25 bp, Homo sapien
tcatcagtggtttgtggcaagcaaa

SEQ ID NO: 3020668 - DNA, 25 bp, Homo sapien
ctggctggcttgacggtggccttca

SEQ ID NO: 3020669 - DNA, 25 bp, Homo sapien
cggtgtgctgagaaaaacagcgaca

SEQ ID NO: 3020670 - DNA, 25 bp, Homo sapien
tttgccgaactatgaaaggaggcac

SEQ ID NO: 3020671 - DNA, 25 bp, Homo sapien
cctgacacgggacagagatgattct

SEQ ID NO: 3020672 - DNA, 25 bp, Homo sapien
gtacccctagccaagtagcagcact

SEQ ID NO: 3020673 - DNA, 25 bp, Homo sapien
gagatgattcttctccgttggggct

SEQ ID NO: 3020674 - DNA, 25 bp, Homo sapien
agacaatcccgtacccctagccaag

SEQ ID NO: 3020675 - DNA, 25 bp, Homo sapien
gttacgaagtctgcagctgaaattt

SEQ ID NO: 3020676 - DNA, 25 bp, Homo sapien
taggtcaggtcttaagattggtgtc

SEQ ID NO: 3020677 - DNA, 25 bp, Homo sapien
ctgctatgttcatgctcttgtgagt

SEQ ID NO: 3020678 - DNA, 25 bp, Homo sapien
gctgaaatttctaggtcaggtctta

SEQ ID NO: 3020679 - DNA, 25 bp, Homo sapien
gcttgaagacttcaagacttttcat

SEQ ID NO: 3020680 - DNA, 25 bp, Homo sapien
cacaaaacaaagcttgaagacttca

SEQ ID NO: 3020681 - DNA, 25 bp, Homo sapien
caaagcttgaagacttcaagacttt

SEQ ID NO: 3020682 - DNA, 25 bp, Homo sapien
aacaaagcttgaagacttcaagact

SEQ ID NO: 3020683 - DNA, 25 bp, Homo sapien
gagtggataagacctcagattcagg

SEQ ID NO: 3020684 - DNA, 25 bp, Homo sapien
tcatgatgctgttgcagagagtccc

SEQ ID NO: 3020685 - DNA, 25 bp, Homo sapien
caatcagaattgcatcggctggcac

SEQ ID NO: 3020686 - DNA, 25 bp, Homo sapien
gagtcccagttgagcccaatcagaa

SEQ ID NO: 3020687 - DNA, 25 bp, Homo sapien
tgaatgaaccatttctcctgttcca

SEQ ID NO: 3020688 - DNA, 25 bp, Homo sapien
gctattttcatttgaatgaaccatt

SEQ ID NO: 3020689 - DNA, 25 bp, Homo sapien
ctgtggctgacacttatttgctatt

SEQ ID NO: 3020690 - DNA, 25 bp, Homo sapien
gcacacacaaaacagctggttagcc

SEQ ID NO: 3020691 - DNA, 25 bp, Homo sapien
tacttggtgtgggacaggtattact

SEQ ID NO: 3020692 - DNA, 25 bp, Homo sapien
tactgtgtaggttctccaggggacc

SEQ ID NO: 3020693 - DNA, 25 bp, Homo sapien
cacagcattcagcttgttaccgagg

SEQ ID NO: 3020694 - DNA, 25 bp, Homo sapien
gtttcatcccccgaaacagacacag

SEQ ID NO: 3020695 - DNA, 25 bp, Homo sapien
cagtgcctggcgtagtactaacgta

SEQ ID NO: 3020696 - DNA, 25 bp, Homo sapien
tctctgtaggatacggttggtacct

SEQ ID NO: 3020697 - DNA, 25 bp, Homo sapien
gaagtcagggtgctgcctttaacta

SEQ ID NO: 3020698 - DNA, 25 bp, Homo sapien
tgcctgcaccactgataggacagag

SEQ ID NO: 3020699 - DNA, 25 bp, Homo sapien
gatgcttactaaatcagataaatca

SEQ ID NO: 3020700 - DNA, 25 bp, Homo sapien
tctggaataacagggctagagtctc

SEQ ID NO: 3020701 - DNA, 25 bp, Homo sapien
catctctccggagttactgtcctca

SEQ ID NO: 3020702 - DNA, 25 bp, Homo sapien
tcctgacgtcaaagtatattcacct

SEQ ID NO: 3020703 - DNA, 25 bp, Homo sapien
tacatcccagattagactgtaaccc

SEQ ID NO: 3020704 - DNA, 25 bp, Homo sapien
cgacacactgggcaactttgctaca

SEQ ID NO: 3020705 - DNA, 25 bp, Homo sapien
acccttttagttgttcatcaagaca

SEQ ID NO: 3020706 - DNA, 25 bp, Homo sapien
tgttcatcaagacatataatgaatg

SEQ ID NO: 3020707 - DNA, 25 bp, Homo sapien
ctttggttatttatgcttaaccact

SEQ ID NO: 3020708 - DNA, 25 bp, Homo sapien
ttatgcttaaccactccaaagttct

SEQ ID NO: 3020709 - DNA, 25 bp, Homo sapien
acaaaactgagaaataacatgtaaa

SEQ ID NO: 3020710 - DNA, 25 bp, Homo sapien
ctgacaaggaaagacaacaaaactg

SEQ ID NO: 3020711 - DNA, 25 bp, Homo sapien
taagacttgcaattggtcttggtgc

SEQ ID NO: 3020712 - DNA, 25 bp, Homo sapien
gcttccagacaaagagtcagggtag

SEQ ID NO: 3020713 - DNA, 25 bp, Homo sapien
tatacgcatatcctttttgctaaga

SEQ ID NO: 3020714 - DNA, 25 bp, Homo sapien
tgcaattggtcttggtgcttccaga

SEQ ID NO: 3020715 - DNA, 25 bp, Homo sapien
tgtgtgtttagactcatgccacacc

SEQ ID NO: 3020716 - DNA, 25 bp, Homo sapien
gaatacgttcgcctggcctttggtc

SEQ ID NO: 3020717 - DNA, 25 bp, Homo sapien
aatttcatccgggaggaaaagctgt

SEQ ID NO: 3020718 - DNA, 25 bp, Homo sapien
aaaagctgtttcagatgaccatgaa

SEQ ID NO: 3020719 - DNA, 25 bp, Homo sapien
ctatatccttcatcacagtacccat

SEQ ID NO: 3020720 - DNA, 25 bp, Homo sapien
atcccacagtaaaacctgtccagcc

SEQ ID NO: 3020721 - DNA, 25 bp, Homo sapien
tatatccttcatcacagtacccatg

SEQ ID NO: 3020722 - DNA, 25 bp, Homo sapien
tatccttcatcacagtacccatgtc

SEQ ID NO: 3020723 - DNA, 25 bp, Homo sapien
atcagatatcatcctctggcatcca

SEQ ID NO: 3020724 - DNA, 25 bp, Homo sapien
ttatcagatatcatcctctggcatc

SEQ ID NO: 3020725 - DNA, 25 bp, Homo sapien
tatcagatatcatcctctggcatcc

SEQ ID NO: 3020726 - DNA, 25 bp, Homo sapien
ctttatcagatatcatcctctggca

SEQ ID NO: 3020727 - DNA, 25 bp, Homo sapien
gagatgtggtcttaattaagcccat

SEQ ID NO: 3020728 - DNA, 25 bp, Homo sapien
gcttgtcagagatgtggtcttaatt

SEQ ID NO: 3020729 - DNA, 25 bp, Homo sapien
tgttccctgctgcttgtcagagatg

SEQ ID NO: 3020730 - DNA, 25 bp, Homo sapien
tagtgttgtgttccctgctgcttgt

SEQ ID NO: 3020731 - DNA, 25 bp, Homo sapien
tgaaaccagactccatcaatcagtg

SEQ ID NO: 3020732 - DNA, 25 bp, Homo sapien
ggattagcgccctcatagaagagat

SEQ ID NO: 3020733 - DNA, 25 bp, Homo sapien
tgtcactactaggattcaccagtcg

SEQ ID NO: 3020734 - DNA, 25 bp, Homo sapien
gatgacttacgatgggaatgcctct

SEQ ID NO: 3020735 - DNA, 25 bp, Homo sapien
aatgcagcagctatggtaaatgtac

SEQ ID NO: 3020736 - DNA, 25 bp, Homo sapien
cactgggaaattgagagcatagaca

SEQ ID NO: 3020737 - DNA, 25 bp, Homo sapien
cttgttaatacccactcagagagga

SEQ ID NO: 3020738 - DNA, 25 bp, Homo sapien
taaatagccaagaggcaagactggc

SEQ ID NO: 3020739 - DNA, 25 bp, Homo sapien
ctgtgacgggtacaaacatatgata

SEQ ID NO: 3020740 - DNA, 25 bp, Homo sapien
cactatgaaaactgtgacgggtaca

SEQ ID NO: 3020741 - DNA, 25 bp, Homo sapien
gatatcaattttatcagggccttgt

SEQ ID NO: 3020742 - DNA, 25 bp, Homo sapien
catatgataatactaactgggaaat

SEQ ID NO: 3020743 - DNA, 25 bp, Homo sapien
ctgtctcttctctaccgattggtaa

SEQ ID NO: 3020744 - DNA, 25 bp, Homo sapien
ccttttctgttgatccacgtgtttg

SEQ ID NO: 3020745 - DNA, 25 bp, Homo sapien
tactttatgactgggtatatagaac

SEQ ID NO: 3020746 - DNA, 25 bp, Homo sapien
gacaactgatgcttatactttatga

SEQ ID NO: 3020747 - DNA, 25 bp, Homo sapien
tgaacgtcaagctctcgaaggtggg

SEQ ID NO: 3020748 - DNA, 25 bp, Homo sapien
tgtccttggacatggccgagatgcg

SEQ ID NO: 3020749 - DNA, 25 bp, Homo sapien
ggcctcccgcgtgacgaagtaactg

SEQ ID NO: 3020750 - DNA, 25 bp, Homo sapien
gttgaaaggccggtagaactcgcgc

SEQ ID NO: 3020751 - DNA, 25 bp, Homo sapien
cccgtccagggttctgggcatcagg

SEQ ID NO: 3020752 - DNA, 25 bp, Homo sapien
gtgatctgcccgtccagggttctgg

SEQ ID NO: 3020753 - DNA, 25 bp, Homo sapien
ggtgatctgcccgtccagggttctg

SEQ ID NO: 3020754 - DNA, 25 bp, Homo sapien
gtccagggttctgggcatcaggtcc

SEQ ID NO: 3020755 - DNA, 25 bp, Homo sapien
gatgtgcagagagagctcagtccca

SEQ ID NO: 3020756 - DNA, 25 bp, Homo sapien
gaaacgcaaaaaggcatgtcagaga

SEQ ID NO: 3020757 - DNA, 25 bp, Homo sapien
tcagagatgtgcagagagagctcag

SEQ ID NO: 3020758 - DNA, 25 bp, Homo sapien
agagagagctcagtcccaggagaga

SEQ ID NO: 3020759 - DNA, 25 bp, Homo sapien
tcagggaaccacctgggagagctct

SEQ ID NO: 3020760 - DNA, 25 bp, Homo sapien
caacacatatgcatggtgcatccga

SEQ ID NO: 3020761 - DNA, 25 bp, Homo sapien
ggcaagccaagcactctagcactgg

SEQ ID NO: 3020762 - DNA, 25 bp, Homo sapien
taacgatggtccaagaggcaagcca

SEQ ID NO: 3020763 - DNA, 25 bp, Homo sapien
taatggtggattgctattgcccctg

SEQ ID NO: 3020764 - DNA, 25 bp, Homo sapien
tctccaatagttttctctcggtaag

SEQ ID NO: 3020765 - DNA, 25 bp, Homo sapien
tctgggtgctacagaaaatagataa

SEQ ID NO: 3020766 - DNA, 25 bp, Homo sapien
tgtttcccacagagagttttagcaa

SEQ ID NO: 3020767 - DNA, 25 bp, Homo sapien
tgcagtataagtaacgaacgtctcc

SEQ ID NO: 3020768 - DNA, 25 bp, Homo sapien
caactatggctgcagcggatctggc

SEQ ID NO: 3020769 - DNA, 25 bp, Homo sapien
caaacatttgttcgtaggcttccaa

SEQ ID NO: 3020770 - DNA, 25 bp, Homo sapien
tgtgggcagccgacaggtttcagct

SEQ ID NO: 3020771 - DNA, 25 bp, Homo sapien
taaaacaagcataccagcagtggcc

SEQ ID NO: 3020772 - DNA, 25 bp, Homo sapien
cactccagctgcatcgtgtggcata

SEQ ID NO: 3020773 - DNA, 25 bp, Homo sapien
cttgtcaactgagggtagggctacc

SEQ ID NO: 3020774 - DNA, 25 bp, Homo sapien
gagaatgagctaacagacaggcagg

SEQ ID NO: 3020775 - DNA, 25 bp, Homo sapien
gaaacctccgttgctcatgtctgca

SEQ ID NO: 3020776 - DNA, 25 bp, Homo sapien
ccgggagaaacctccgttgctcatg

SEQ ID NO: 3020777 - DNA, 25 bp, Homo sapien
ggagaaacctccgttgctcatgtct

SEQ ID NO: 3020778 - DNA, 25 bp, Homo sapien
gagaaacctccgttgctcatgtctg

SEQ ID NO: 3020779 - DNA, 25 bp, Homo sapien
acactgatgacttccaaagcactaa

SEQ ID NO: 3020780 - DNA, 25 bp, Homo sapien
tgaacactgatgacttccaaagcac

SEQ ID NO: 3020781 - DNA, 25 bp, Homo sapien
ttcctgaacactgatgacttccaaa

SEQ ID NO: 3020782 - DNA, 25 bp, Homo sapien
tgatgacttccaaagcactaagtcc

SEQ ID NO: 3020783 - DNA, 25 bp, Homo sapien
cttctgatggtggttgctccccact

SEQ ID NO: 3020784 - DNA, 25 bp, Homo sapien
tctgatggtggttgctccccactct

SEQ ID NO: 3020785 - DNA, 25 bp, Homo sapien
tcttctgatggtggttgctccccac

SEQ ID NO: 3020786 - DNA, 25 bp, Homo sapien
ttctgatggtggttgctccccactc

SEQ ID NO: 3020787 - DNA, 25 bp, Homo sapien
aaacagcttcccattcctagaattt

SEQ ID NO: 3020788 - DNA, 25 bp, Homo sapien
acagcttcccattcctagaatttca

SEQ ID NO: 3020789 - DNA, 25 bp, Homo sapien
gcttgtcctcaaacagcttcccatt

SEQ ID NO: 3020790 - DNA, 25 bp, Homo sapien
agcttcccattcctagaatttcatt

SEQ ID NO: 3020791 - DNA, 25 bp, Homo sapien
tgagggccccttagagtggaagcat

SEQ ID NO: 3020792 - DNA, 25 bp, Homo sapien
ggccccttagagtggaagcatcttg

SEQ ID NO: 3020793 - DNA, 25 bp, Homo sapien
gagggccccttagagtggaagcatc

SEQ ID NO: 3020794 - DNA, 25 bp, Homo sapien
gggccccttagagtggaagcatctt

SEQ ID NO: 3020795 - DNA, 25 bp, Homo sapien
aaagagtttctcaagtcgatgttag

SEQ ID NO: 3020796 - DNA, 25 bp, Homo sapien
gtttctcaagtcgatgttagactgt

SEQ ID NO: 3020797 - DNA, 25 bp, Homo sapien
gattaaagagtttctcaagtcgatg

SEQ ID NO: 3020798 - DNA, 25 bp, Homo sapien
caagtcgatgttagactgtattaag

SEQ ID NO: 3020799 - DNA, 25 bp, Homo sapien
tcttatgcaaaatgacctaagaaga

SEQ ID NO: 3020800 - DNA, 25 bp, Homo sapien
atcttatgcaaaatgacctaagaag

SEQ ID NO: 3020801 - DNA, 25 bp, Homo sapien
caatcttatgcaaaatgacctaaga

SEQ ID NO: 3020802 - DNA, 25 bp, Homo sapien
ccaatcttatgcaaaatgacctaag

SEQ ID NO: 3020803 - DNA, 25 bp, Homo sapien
acacagtcatggtctggaggagtcc

SEQ ID NO: 3020804 - DNA, 25 bp, Homo sapien
tctggaggagtccaggatcgctcat

SEQ ID NO: 3020805 - DNA, 25 bp, Homo sapien
aggagatgagtcagacacagtcatg

SEQ ID NO: 3020806 - DNA, 25 bp, Homo sapien
atgccaggagatgagtcagacacag

SEQ ID NO: 3020807 - DNA, 25 bp, Homo sapien
gctaaacgatcaaggagttgcacgt

SEQ ID NO: 3020808 - DNA, 25 bp, Homo sapien
caatagttcaaatttttagcggcct

SEQ ID NO: 3020809 - DNA, 25 bp, Homo sapien
tggcaaagtatagtacatcatcact

SEQ ID NO: 3020810 - DNA, 25 bp, Homo sapien
gcccgaacctttacaactgtgctag

SEQ ID NO: 3020811 - DNA, 25 bp, Homo sapien
tacgaacctctatgagttggagaga

SEQ ID NO: 3020812 - DNA, 25 bp, Homo sapien
gagcagtacatttgtgagtcagaca

SEQ ID NO: 3020813 - DNA, 25 bp, Homo sapien
aatgcaaagcaaagagtacctggat

SEQ ID NO: 3020814 - DNA, 25 bp, Homo sapien
gagaaattgaacactacaacggtat

SEQ ID NO: 3020815 - DNA, 25 bp, Homo sapien
catgtcttgtgattcatgtttgaaa

SEQ ID NO: 3020816 - DNA, 25 bp, Homo sapien
taactctgaccttcaccacacgtca

SEQ ID NO: 3020817 - DNA, 25 bp, Homo sapien
aggatggtcttgaccgtctcggcct

SEQ ID NO: 3020818 - DNA, 25 bp, Homo sapien
attgattttatcagacattcatgtc

SEQ ID NO: 3020819 - DNA, 25 bp, Homo sapien
ttactctagtcaaccagaagcccag

SEQ ID NO: 3020820 - DNA, 25 bp, Homo sapien
ctatcccttgcacgaaagcagttga

SEQ ID NO: 3020821 - DNA, 25 bp, Homo sapien
gaaactgatcctccagaggtctgaa

SEQ ID NO: 3020822 - DNA, 25 bp, Homo sapien
tgccataaggtgcatccacagctct

SEQ ID NO: 3020823 - DNA, 25 bp, Homo sapien
gctgcttgctgccttcgtccaggag

SEQ ID NO: 3020824 - DNA, 25 bp, Homo sapien
tcttcactccgatgatgatggcctg

SEQ ID NO: 3020825 - DNA, 25 bp, Homo sapien
cccttgtcgtagctgcggtcgaaga

SEQ ID NO: 3020826 - DNA, 25 bp, Homo sapien
ccaggcgaggcccttgtcgtagctg

SEQ ID NO: 3020827 - DNA, 25 bp, Homo sapien
ctcggccacggtgcttccggccccg

SEQ ID NO: 3020828 - DNA, 25 bp, Homo sapien
gccacggtgcttccggccccggagc

SEQ ID NO: 3020829 - DNA, 25 bp, Homo sapien
ggccaggggactcttcttcccaggc

SEQ ID NO: 3020830 - DNA, 25 bp, Homo sapien
aggccaggggactcttcttcccagg

SEQ ID NO: 3020831 - DNA, 25 bp, Homo sapien
cgccactgcggcagttgcaggaggc

SEQ ID NO: 3020832 - DNA, 25 bp, Homo sapien
gaggcgctttctctgtgccgccgcc

SEQ ID NO: 3020833 - DNA, 25 bp, Homo sapien
tccgccactgcggcagttgcaggag

SEQ ID NO: 3020834 - DNA, 25 bp, Homo sapien
ctccgccactgcggcagttgcagga

SEQ ID NO: 3020835 - DNA, 25 bp, Homo sapien
cagtagaagacgtaaagggacgtga

SEQ ID NO: 3020836 - DNA, 25 bp, Homo sapien
gggccggacagggtctggcagcgct

SEQ ID NO: 3020837 - DNA, 25 bp, Homo sapien
gcatcagcaagaacttccggaagat

SEQ ID NO: 3020838 - DNA, 25 bp, Homo sapien
cagcgctcggccaggcagtagaaga

SEQ ID NO: 3020839 - DNA, 25 bp, Homo sapien
cagcggctcggccgaggtggagagg

SEQ ID NO: 3020840 - DNA, 25 bp, Homo sapien
gacagcggctcggccgaggtggaga

SEQ ID NO: 3020841 - DNA, 25 bp, Homo sapien
acagcggctcggccgaggtggagag

SEQ ID NO: 3020842 - DNA, 25 bp, Homo sapien
gacgtcgggcaacgcgccggccatg

SEQ ID NO: 3020843 - DNA, 25 bp, Homo sapien
cgacgtcgggcaacgcgccggccat

SEQ ID NO: 3020844 - DNA, 25 bp, Homo sapien
ctagccggaggcgacgtcgggcaac

SEQ ID NO: 3020845 - DNA, 25 bp, Homo sapien
cggaggcgacgtcgggcaacgcgcc

SEQ ID NO: 3020846 - DNA, 25 bp, Homo sapien
taagaaaccatcgtcttagactcgc

SEQ ID NO: 3020847 - DNA, 25 bp, Homo sapien
gagttcaggttctctcagccaagga

SEQ ID NO: 3020848 - DNA, 25 bp, Homo sapien
acagtggcgagcgacagtgacttcc

SEQ ID NO: 3020849 - DNA, 25 bp, Homo sapien
tcagcgatcctgcatcactggctcg

SEQ ID NO: 3020850 - DNA, 25 bp, Homo sapien
tggagaaaaggtggcgcgggctccg

SEQ ID NO: 3020851 - DNA, 25 bp, Homo sapien
gtgggacgccgagggcagcaaactt

SEQ ID NO: 3020852 - DNA, 25 bp, Homo sapien
ctggccgccgccacacgtgggacgc

SEQ ID NO: 3020853 - DNA, 25 bp, Homo sapien
cagcggggcgcggaccagcggccag

SEQ ID NO: 3020854 - DNA, 25 bp, Homo sapien
tctgtgctctatttgaccacggaag

SEQ ID NO: 3020855 - DNA, 25 bp, Homo sapien
aggcatttctgcgtccccatgcagg

SEQ ID NO: 3020856 - DNA, 25 bp, Homo sapien
ctaactctgggcttgcatggatcca

SEQ ID NO: 3020857 - DNA, 25 bp, Homo sapien
gcaggaacttcgcagcctttctgtg

SEQ ID NO: 3020858 - DNA, 25 bp, Homo sapien
gagtacattcgcttggctctcaata

SEQ ID NO: 3020859 - DNA, 25 bp, Homo sapien
cgcgcccagcccgaagtataatgtt

SEQ ID NO: 3020860 - DNA, 25 bp, Homo sapien
taaccagatgctttttccatgccaa

SEQ ID NO: 3020861 - DNA, 25 bp, Homo sapien
tagattgtccacacgcttctcaagg

SEQ ID NO: 3020862 - DNA, 25 bp, Homo sapien
ttagtcagcaaactcagctgctccc

SEQ ID NO: 3020863 - DNA, 25 bp, Homo sapien
ttttcttctcctttttcatatttca

SEQ ID NO: 3020864 - DNA, 25 bp, Homo sapien
tgattttcttctcctttttcatatt

SEQ ID NO: 3020865 - DNA, 25 bp, Homo sapien
ctgattttcttctcctttttcatat

SEQ ID NO: 3020866 - DNA, 25 bp, Homo sapien
tttcttctcctttttcatatttcat

SEQ ID NO: 3020867 - DNA, 25 bp, Homo sapien
ccacaaggctgccaaatccctgagt

SEQ ID NO: 3020868 - DNA, 25 bp, Homo sapien
ttagtccactacccagaccacaagg

SEQ ID NO: 3020869 - DNA, 25 bp, Homo sapien
caaatccctgagtcatgtgagtttt

SEQ ID NO: 3020870 - DNA, 25 bp, Homo sapien
tgccaaatccctgagtcatgtgagt

SEQ ID NO: 3020871 - DNA, 25 bp, Homo sapien
gaccacaaaatcctgtaagcctgat

SEQ ID NO: 3020872 - DNA, 25 bp, Homo sapien
tgatcaatccatagttcacctcagt

SEQ ID NO: 3020873 - DNA, 25 bp, Homo sapien
gatctcataagaattgatcaatcca

SEQ ID NO: 3020874 - DNA, 25 bp, Homo sapien
gagaaattagggatccatggtctga

SEQ ID NO: 3020875 - DNA, 25 bp, Homo sapien
ttccacttaggttcagccagtgagg

SEQ ID NO: 3020876 - DNA, 25 bp, Homo sapien
cacttaggttcagccagtgaggatc

SEQ ID NO: 3020877 - DNA, 25 bp, Homo sapien
gtttccacttaggttcagccagtga

SEQ ID NO: 3020878 - DNA, 25 bp, Homo sapien
tccacttaggttcagccagtgagga

SEQ ID NO: 3020879 - DNA, 25 bp, Homo sapien
tgcttaattcccttaaacgctagga

SEQ ID NO: 3020880 - DNA, 25 bp, Homo sapien
taattcccttaaacgctaggatgag

SEQ ID NO: 3020881 - DNA, 25 bp, Homo sapien
tcccttaaacgctaggatgaggctc

SEQ ID NO: 3020882 - DNA, 25 bp, Homo sapien
ccttaaacgctaggatgaggctcca

SEQ ID NO: 3020883 - DNA, 25 bp, Homo sapien
ccaaggaaaataggttaggcaggtg

SEQ ID NO: 3020884 - DNA, 25 bp, Homo sapien
ctcagtggccaagatctaaatattc

SEQ ID NO: 3020885 - DNA, 25 bp, Homo sapien
gcaggtgaaggccaatccaaccaga

SEQ ID NO: 3020886 - DNA, 25 bp, Homo sapien
gagtggtgggtctaaacattctgta

SEQ ID NO: 3020887 - DNA, 25 bp, Homo sapien
tgacatttctgggttttacgacttg

SEQ ID NO: 3020888 - DNA, 25 bp, Homo sapien
tttacgacttgctttggggagaata

SEQ ID NO: 3020889 - DNA, 25 bp, Homo sapien
ttacgacttgctttggggagaatag

SEQ ID NO: 3020890 - DNA, 25 bp, Homo sapien
tctaattttgtatcccaggctgacc

SEQ ID NO: 3020891 - DNA, 25 bp, Homo sapien
ccacatgggcaaaggcactaatcaa

SEQ ID NO: 3020892 - DNA, 25 bp, Homo sapien
cgttgttttaagttccaggcagcca

SEQ ID NO: 3020893 - DNA, 25 bp, Homo sapien
ttgggagcttctagataacgacgcc

SEQ ID NO: 3020894 - DNA, 25 bp, Homo sapien
gattgcttcatttagaggactctct

SEQ ID NO: 3020895 - DNA, 25 bp, Homo sapien
gagtaacacacaagaatcacctggg

SEQ ID NO: 3020896 - DNA, 25 bp, Homo sapien
cataagaaacatgtagggagtcccc

SEQ ID NO: 3020897 - DNA, 25 bp, Homo sapien
tggcaattctgacctcataagaaac

SEQ ID NO: 3020898 - DNA, 25 bp, Homo sapien
tctcatatggtagagatctagacac

SEQ ID NO: 3020899 - DNA, 25 bp, Homo sapien
tcctgtccagaagcaacgtccttca

SEQ ID NO: 3020900 - DNA, 25 bp, Homo sapien
aactctggctgccattgtaatgagc

SEQ ID NO: 3020901 - DNA, 25 bp, Homo sapien
tgtggttggcccttggaactctggc

SEQ ID NO: 3020902 - DNA, 25 bp, Homo sapien
tcactgttgcggctggatccaacca

SEQ ID NO: 3020903 - DNA, 25 bp, Homo sapien
tctgtcactgttgcggctggatcca

SEQ ID NO: 3020904 - DNA, 25 bp, Homo sapien
tcctctgtcactgttgcggctggat

SEQ ID NO: 3020905 - DNA, 25 bp, Homo sapien
ttccctcctctgtcactgttgcggc

SEQ ID NO: 3020906 - DNA, 25 bp, Homo sapien
gctgacattagcacaccagacagca

SEQ ID NO: 3020907 - DNA, 25 bp, Homo sapien
cttatttatcattgggcaatccact

SEQ ID NO: 3020908 - DNA, 25 bp, Homo sapien
cattgggcaatccactaataaaatt

SEQ ID NO: 3020909 - DNA, 25 bp, Homo sapien
tgggcaatccactaataaaattcac

SEQ ID NO: 3020910 - DNA, 25 bp, Homo sapien
tttatcattgggcaatccactaata

SEQ ID NO: 3020911 - DNA, 25 bp, Homo sapien
tgtagacttgtgaatgaggagccct

SEQ ID NO: 3020912 - DNA, 25 bp, Homo sapien
tattgcaaaggatggcctcaactgc

SEQ ID NO: 3020913 - DNA, 25 bp, Homo sapien
gacaatatgcatactagggccctaa

SEQ ID NO: 3020914 - DNA, 25 bp, Homo sapien
tcattgccacgagagatattagcca

SEQ ID NO: 3020915 - DNA, 25 bp, Homo sapien
tagaaagcagagagatgtagcccat

SEQ ID NO: 3020916 - DNA, 25 bp, Homo sapien
aaaacacatgttgctgactcccacc

SEQ ID NO: 3020917 - DNA, 25 bp, Homo sapien
gataccacactttgcgaaccactag

SEQ ID NO: 3020918 - DNA, 25 bp, Homo sapien
ctgtttctgggatagggcctggaaa

SEQ ID NO: 3020919 - DNA, 25 bp, Homo sapien
tatgaggtgcttgttagcccaaccc

SEQ ID NO: 3020920 - DNA, 25 bp, Homo sapien
caagaagggtctaacctccagagta

SEQ ID NO: 3020921 - DNA, 25 bp, Homo sapien
tagtctgctatggtggaacaggcct

SEQ ID NO: 3020922 - DNA, 25 bp, Homo sapien
tcttgatgggcaatgcagtccccta

SEQ ID NO: 3020923 - DNA, 25 bp, Homo sapien
gcctccggccaaggaaaaagctaga

SEQ ID NO: 3020924 - DNA, 25 bp, Homo sapien
gaaccataggtgtcctccaagaaaa

SEQ ID NO: 3020925 - DNA, 25 bp, Homo sapien
tagcagatttatcctagaggctctc

SEQ ID NO: 3020926 - DNA, 25 bp, Homo sapien
gaaaatacaggcagcagactctagg

SEQ ID NO: 3020927 - DNA, 25 bp, Homo sapien
ttaaatctgcccaagaaaatgcttc

SEQ ID NO: 3020928 - DNA, 25 bp, Homo sapien
cgatggcacttttatcacagactaa

SEQ ID NO: 3020929 - DNA, 25 bp, Homo sapien
gggtctaacgatccataaaacagta

SEQ ID NO: 3020930 - DNA, 25 bp, Homo sapien
attaagttgttctgcctcgggcctt

SEQ ID NO: 3020931 - DNA, 25 bp, Homo sapien
gtcttagtagatgtccttgctttcc

SEQ ID NO: 3020932 - DNA, 25 bp, Homo sapien
tcatatgtcatccaagttcagtggc

SEQ ID NO: 3020933 - DNA, 25 bp, Homo sapien
gtgttccaaattatgctcaccatgg

SEQ ID NO: 3020934 - DNA, 25 bp, Homo sapien
tatttttcagtcttagtagatgtcc

SEQ ID NO: 3020935 - DNA, 25 bp, Homo sapien
gcttttccgaaaactctgccactcg

SEQ ID NO: 3020936 - DNA, 25 bp, Homo sapien
gagcgtgtcagatttccatgcagga

SEQ ID NO: 3020937 - DNA, 25 bp, Homo sapien
cattttgcactaacagcttttccga

SEQ ID NO: 3020938 - DNA, 25 bp, Homo sapien
catttgtgaagcatgcaatcccgct

SEQ ID NO: 3020939 - DNA, 25 bp, Homo sapien
cctgatttaggttctattggatgga

SEQ ID NO: 3020940 - DNA, 25 bp, Homo sapien
cactcaagtttaagtgtaaggcctg

SEQ ID NO: 3020941 - DNA, 25 bp, Homo sapien
tggataaaccgctcctcccagtaaa

SEQ ID NO: 3020942 - DNA, 25 bp, Homo sapien
ggaaatttgggtatgcactcaagtt

SEQ ID NO: 3020943 - DNA, 25 bp, Homo sapien
aggaaattgggatgagaagctcctg

SEQ ID NO: 3020944 - DNA, 25 bp, Homo sapien
gaaattgggatgagaagctcctgct

SEQ ID NO: 3020945 - DNA, 25 bp, Homo sapien
ggaaagacagacttgggaagcttcc

SEQ ID NO: 3020946 - DNA, 25 bp, Homo sapien
aaattgggatgagaagctcctgctt

SEQ ID NO: 3020947 - DNA, 25 bp, Homo sapien
gcaggcagcatgaagcacagagatg

SEQ ID NO: 3020948 - DNA, 25 bp, Homo sapien
ggcagcatgaagcacagagatgcct

SEQ ID NO: 3020949 - DNA, 25 bp, Homo sapien
aggcaggcagcatgaagcacagaga

SEQ ID NO: 3020950 - DNA, 25 bp, Homo sapien
ctgacaccaggcaggcagcatgaag

SEQ ID NO: 3020951 - DNA, 25 bp, Homo sapien
cagtgagcttcacttgaacaaggcc

SEQ ID NO: 3020952 - DNA, 25 bp, Homo sapien
catgcaccttggtaatgttctcctc

SEQ ID NO: 3020953 - DNA, 25 bp, Homo sapien
gccaaagttcccgtgctaagcacag

SEQ ID NO: 3020954 - DNA, 25 bp, Homo sapien
taacggggccaagttcttcaggcag

SEQ ID NO: 3020955 - DNA, 25 bp, Homo sapien
cttaaaggcataaagcaaacaccat

SEQ ID NO: 3020956 - DNA, 25 bp, Homo sapien
ccaaccagtctagcagtgagccaag

SEQ ID NO: 3020957 - DNA, 25 bp, Homo sapien
tggatccaaccagtctagcagtgag

SEQ ID NO: 3020958 - DNA, 25 bp, Homo sapien
gatccaaccagtctagcagtgagcc

SEQ ID NO: 3020959 - DNA, 25 bp, Homo sapien
ctggatccaaccagtctagcagtga

SEQ ID NO: 3020960 - DNA, 25 bp, Homo sapien
gcagcgtggtcactagcagctggtc

SEQ ID NO: 3020961 - DNA, 25 bp, Homo sapien
gctggtcactatgccccacactggt

SEQ ID NO: 3020962 - DNA, 25 bp, Homo sapien
actagcagctggtcactatgcccca

SEQ ID NO: 3020963 - DNA, 25 bp, Homo sapien
tggtcactagcagctggtcactatg

SEQ ID NO: 3020964 - DNA, 25 bp, Homo sapien
ctttatgtggatccacatatccatc

SEQ ID NO: 3020965 - DNA, 25 bp, Homo sapien
cagtatagttactatttcctgtgct

SEQ ID NO: 3020966 - DNA, 25 bp, Homo sapien
ggatccacatatccatctggtatca

SEQ ID NO: 3020967 - DNA, 25 bp, Homo sapien
gtatagttactatttcctgtgctct

SEQ ID NO: 3020968 - DNA, 25 bp, Homo sapien
accctcatttaccttatgcttcttg

SEQ ID NO: 3020969 - DNA, 25 bp, Homo sapien
ctaaatgtagtatgtacatctccac

SEQ ID NO: 3020970 - DNA, 25 bp, Homo sapien
gagctgccctaaatgtagtatgtac

SEQ ID NO: 3020971 - DNA, 25 bp, Homo sapien
gcattttaacctggttgagctgccc

SEQ ID NO: 3020972 - DNA, 25 bp, Homo sapien
ttcactccagcctgggcgacagagt

SEQ ID NO: 3020973 - DNA, 25 bp, Homo sapien
ctgcagtgagctgagatcgcgccac

SEQ ID NO: 3020974 - DNA, 25 bp, Homo sapien
tgggcgacagagtgagaacttgtct

SEQ ID NO: 3020975 - DNA, 25 bp, Homo sapien
atcacttgagcatgggagttcaagg

SEQ ID NO: 3020976 - DNA, 25 bp, Homo sapien
aaattctatcagagagggaattatc

SEQ ID NO: 3020977 - DNA, 25 bp, Homo sapien
catggctctgaatctctcctcaatg

SEQ ID NO: 3020978 - DNA, 25 bp, Homo sapien
gagagggaattatctttgaagacca

SEQ ID NO: 3020979 - DNA, 25 bp, Homo sapien
gatggcagcaatgacagacctctgc

SEQ ID NO: 3020980 - DNA, 25 bp, Homo sapien
ccctcgtcagattcaattgtgttca

SEQ ID NO: 3020981 - DNA, 25 bp, Homo sapien
aactcttcctgttcaactgcaccag

SEQ ID NO: 3020982 - DNA, 25 bp, Homo sapien
ttcccctcgtcagattcaattgtgt

SEQ ID NO: 3020983 - DNA, 25 bp, Homo sapien
aaactcctctgggtcaaataactct

SEQ ID NO: 3020984 - DNA, 25 bp, Homo sapien
gaatatttcttagcccctagagagg

SEQ ID NO: 3020985 - DNA, 25 bp, Homo sapien
ctcagcttagtttctgtgcgcatga

SEQ ID NO: 3020986 - DNA, 25 bp, Homo sapien
cctgcatggcataactacactgtga

SEQ ID NO: 3020987 - DNA, 25 bp, Homo sapien
tcccttacctataggctcagcttag

SEQ ID NO: 3020988 - DNA, 25 bp, Homo sapien
ttgccacagtgacatgagcaaggac

SEQ ID NO: 3020989 - DNA, 25 bp, Homo sapien
tcttgccacagtgacatgagcaagg

SEQ ID NO: 3020990 - DNA, 25 bp, Homo sapien
gccacagtgacatgagcaaggacag

SEQ ID NO: 3020991 - DNA, 25 bp, Homo sapien
acagtgacatgagcaaggacagcat

SEQ ID NO: 3020992 - DNA, 25 bp, Homo sapien
taaacttgattgctaccagcagctg

SEQ ID NO: 3020993 - DNA, 25 bp, Homo sapien
ccaccagatgaaggagtaaacaaac

SEQ ID NO: 3020994 - DNA, 25 bp, Homo sapien
caagcggaaccagtcttaaagtgaa

SEQ ID NO: 3020995 - DNA, 25 bp, Homo sapien
gcactgaaggctaccctatcctgga

SEQ ID NO: 3020996 - DNA, 25 bp, Homo sapien
tcactggacagaacctggctttgtg

SEQ ID NO: 3020997 - DNA, 25 bp, Homo sapien
aattttctgagagaaccgagtgaat

SEQ ID NO: 3020998 - DNA, 25 bp, Homo sapien
gagaaccgagtgaatctttggcctt

SEQ ID NO: 3020999 - DNA, 25 bp, Homo sapien
cagaacctggctttgtgaataattt

SEQ ID NO: 3021000 - DNA, 25 bp, Homo sapien
gaaagcaggcaaatcttggagatgg

SEQ ID NO: 3021001 - DNA, 25 bp, Homo sapien
ggtaggtggccttttcactggatgt

SEQ ID NO: 3021002 - DNA, 25 bp, Homo sapien
cagcatatgattggccaagcttggg

SEQ ID NO: 3021003 - DNA, 25 bp, Homo sapien
tggccttttcactggatgtaccagg

SEQ ID NO: 3021004 - DNA, 25 bp, Homo sapien
tgcagaatagacacctaaatttcca

SEQ ID NO: 3021005 - DNA, 25 bp, Homo sapien
ctgcagaatagacacctaaatttcc

SEQ ID NO: 3021006 - DNA, 25 bp, Homo sapien
gcagaatagacacctaaatttccag

SEQ ID NO: 3021007 - DNA, 25 bp, Homo sapien
ggaaacattgacctcagtgttagca

SEQ ID NO: 3021008 - DNA, 25 bp, Homo sapien
tcagagacagggttggaaacattga

SEQ ID NO: 3021009 - DNA, 25 bp, Homo sapien
gacagggttggaaacattgacctca

SEQ ID NO: 3021010 - DNA, 25 bp, Homo sapien
tggaaacattgacctcagtgttagc

SEQ ID NO: 3021011 - DNA, 25 bp, Homo sapien
ggaagacacgagaaagaaggttgga

SEQ ID NO: 3021012 - DNA, 25 bp, Homo sapien
tcagctctccaggaagacacgagaa

SEQ ID NO: 3021013 - DNA, 25 bp, Homo sapien
ggttggaaagttggacttagcttca

SEQ ID NO: 3021014 - DNA, 25 bp, Homo sapien
gttggaaagttggacttagcttcat

SEQ ID NO: 3021015 - DNA, 25 bp, Homo sapien
tacatgcatcaaatgggagaaccca

SEQ ID NO: 3021016 - DNA, 25 bp, Homo sapien
catatatagtagcacaggcactgga

SEQ ID NO: 3021017 - DNA, 25 bp, Homo sapien
taaaatctcattgggcacatggagg

SEQ ID NO: 3021018 - DNA, 25 bp, Homo sapien
gggactcctgactaccatcatgaag

SEQ ID NO: 3021019 - DNA, 25 bp, Homo sapien
actacatagctaacacatgcaggga

SEQ ID NO: 3021020 - DNA, 25 bp, Homo sapien
ccatgtactgttatctcctagggaa

SEQ ID NO: 3021021 - DNA, 25 bp, Homo sapien
tattaaggcccttctaagcacagtc

SEQ ID NO: 3021022 - DNA, 25 bp, Homo sapien
tcaggaatgactctctatcggcact

SEQ ID NO: 3021023 - DNA, 25 bp, Homo sapien
tgtgatatttactctacgggctcag

SEQ ID NO: 3021024 - DNA, 25 bp, Homo sapien
ttctgtccataaggtaggtgcccca

SEQ ID NO: 3021025 - DNA, 25 bp, Homo sapien
gatttcaacccagaaagagaggctc

SEQ ID NO: 3021026 - DNA, 25 bp, Homo sapien
tactagactagacagcccctgtggg

SEQ ID NO: 3021027 - DNA, 25 bp, Homo sapien
tggattcagactacccacgttcaaa

SEQ ID NO: 3021028 - DNA, 25 bp, Homo sapien
attagaggacacttttcacaatgct

SEQ ID NO: 3021029 - DNA, 25 bp, Homo sapien
aagtactaattatggcaactctctc

SEQ ID NO: 3021030 - DNA, 25 bp, Homo sapien
agctgtgtggatttaagcatgttgc

SEQ ID NO: 3021031 - DNA, 25 bp, Homo sapien
tcttcagaaatatcataacaagttc

SEQ ID NO: 3021032 - DNA, 25 bp, Homo sapien
tggaaaatggagaatggttgctaag

SEQ ID NO: 3021033 - DNA, 25 bp, Homo sapien
tccttacagtctcttcttcttcaga

SEQ ID NO: 3021034 - DNA, 25 bp, Homo sapien
gagaggtcttccttacagtctcttc

SEQ ID NO: 3021035 - DNA, 25 bp, Homo sapien
gccttcttccatgaagcagggtttt

SEQ ID NO: 3021036 - DNA, 25 bp, Homo sapien
ccatgaagcagggtttttgttggca

SEQ ID NO: 3021037 - DNA, 25 bp, Homo sapien
ctatgccatggagcatggccttctt

SEQ ID NO: 3021038 - DNA, 25 bp, Homo sapien
gagcatggccttcttccatgaagca

SEQ ID NO: 3021039 - DNA, 25 bp, Homo sapien
gggtgaattaccctgtccttactgc

SEQ ID NO: 3021040 - DNA, 25 bp, Homo sapien
tctttacccctcctttgatctgtca

SEQ ID NO: 3021041 - DNA, 25 bp, Homo sapien
gacgtcaggggctctcaaattcagt

SEQ ID NO: 3021042 - DNA, 25 bp, Homo sapien
cctggtccatgggttttatgggatt

SEQ ID NO: 3021043 - DNA, 25 bp, Homo sapien
agagaaagtttatccaagaatgtgg

SEQ ID NO: 3021044 - DNA, 25 bp, Homo sapien
tgtgtgaaggtatgggtgctctaat

SEQ ID NO: 3021045 - DNA, 25 bp, Homo sapien
gattttcctagggagtttcagctag

SEQ ID NO: 3021046 - DNA, 25 bp, Homo sapien
gctctaatacctgttttagtgtgaa

SEQ ID NO: 3021047 - DNA, 25 bp, Homo sapien
atctctgtgattgctgcttggtgga

SEQ ID NO: 3021048 - DNA, 25 bp, Homo sapien
tcttatctctgtgattgctgcttgg

SEQ ID NO: 3021049 - DNA, 25 bp, Homo sapien
ttatctctgtgattgctgcttggtg

SEQ ID NO: 3021050 - DNA, 25 bp, Homo sapien
ctttcttatctctgtgattgctgct

SEQ ID NO: 3021051 - DNA, 25 bp, Homo sapien
gaatgaagaatcgagtcagaagttt

SEQ ID NO: 3021052 - DNA, 25 bp, Homo sapien
gagaatgaagaatcgagtcagaagt

SEQ ID NO: 3021053 - DNA, 25 bp, Homo sapien
gagtcagaagttttacactcagagc

SEQ ID NO: 3021054 - DNA, 25 bp, Homo sapien
ttacactcagagctaacctcattgg

SEQ ID NO: 3021055 - DNA, 25 bp, Homo sapien
gattggcctagggagatgcttccgt

SEQ ID NO: 3021056 - DNA, 25 bp, Homo sapien
aagaaaattcatcccgagtggccct

SEQ ID NO: 3021057 - DNA, 25 bp, Homo sapien
gatgccgtccctgagataacactgt

SEQ ID NO: 3021058 - DNA, 25 bp, Homo sapien
caaggagtgtcctaagattggccta

SEQ ID NO: 3021059 - DNA, 25 bp, Homo sapien
tcttttctctcacccaaggcggaaa

SEQ ID NO: 3021060 - DNA, 25 bp, Homo sapien
taggacagtcttacgagagtctgca

SEQ ID NO: 3021061 - DNA, 25 bp, Homo sapien
cattgtactgtgaggcgctaagcca

SEQ ID NO: 3021062 - DNA, 25 bp, Homo sapien
tctgcacaagcaatggccccaagtt

SEQ ID NO: 3021063 - DNA, 25 bp, Homo sapien
gaggacgtcagtcctccaggcagac

SEQ ID NO: 3021064 - DNA, 25 bp, Homo sapien
gtcagtcctccaggcagacgtcagt

SEQ ID NO: 3021065 - DNA, 25 bp, Homo sapien
cctcactcaggaggacgtcagtcct

SEQ ID NO: 3021066 - DNA, 25 bp, Homo sapien
acctcactcaggaggacgtcagtcc

SEQ ID NO: 3021067 - DNA, 25 bp, Homo sapien
cctaaccctggaactgaaagcgtgg

SEQ ID NO: 3021068 - DNA, 25 bp, Homo sapien
taaattcagtgaggtcgtttctgtg

SEQ ID NO: 3021069 - DNA, 25 bp, Homo sapien
ccatgtgcagaagtaagagcactgc

SEQ ID NO: 3021070 - DNA, 25 bp, Homo sapien
cagccaaggaccagaccaatgagga

SEQ ID NO: 3021071 - DNA, 25 bp, Homo sapien
gacacgcaggacataggggcagaaa

SEQ ID NO: 3021072 - DNA, 25 bp, Homo sapien
acacgcaggacataggggcagaaag

SEQ ID NO: 3021073 - DNA, 25 bp, Homo sapien
catgcacctttaaacatcagagctg

SEQ ID NO: 3021074 - DNA, 25 bp, Homo sapien
ctttgtccatcgcatccaagctgta

SEQ ID NO: 3021075 - DNA, 25 bp, Homo sapien
cagatctactgtggtggtattgcag

SEQ ID NO: 3021076 - DNA, 25 bp, Homo sapien
cgggagtctccctgtacaagctttc

SEQ ID NO: 3021077 - DNA, 25 bp, Homo sapien
gctgagcttgctaagatttacagta

SEQ ID NO: 3021078 - DNA, 25 bp, Homo sapien
gcttgctaagatttacagtaagaaa

SEQ ID NO: 3021079 - DNA, 25 bp, Homo sapien
tgagcttgctaagatttacagtaag

SEQ ID NO: 3021080 - DNA, 25 bp, Homo sapien
gagcttgctaagatttacagtaaga

SEQ ID NO: 3021081 - DNA, 25 bp, Homo sapien
taccagagagtaaatgcacaaggat

SEQ ID NO: 3021082 - DNA, 25 bp, Homo sapien
gcacaaggatgtatattcaagacta

SEQ ID NO: 3021083 - DNA, 25 bp, Homo sapien
ggcagaactgcaaattggtacaatt

SEQ ID NO: 3021084 - DNA, 25 bp, Homo sapien
ttagcaaaaatcagcgaactcaatg

SEQ ID NO: 3021085 - DNA, 25 bp, Homo sapien
catcctagggtttgttcagctgctc

SEQ ID NO: 3021086 - DNA, 25 bp, Homo sapien
caaggtcatgagatagctgcagcaa

SEQ ID NO: 3021087 - DNA, 25 bp, Homo sapien
gagaacttctcttccaccaccttgg

SEQ ID NO: 3021088 - DNA, 25 bp, Homo sapien
gtgaaaatagccatcgataccttgc

SEQ ID NO: 3021089 - DNA, 25 bp, Homo sapien
gaggaacacaggtgagtcttaccaa

SEQ ID NO: 3021090 - DNA, 25 bp, Homo sapien
gtattatcaaggagaaagagccaca

SEQ ID NO: 3021091 - DNA, 25 bp, Homo sapien
acttgtggcagacactattggctgt

SEQ ID NO: 3021092 - DNA, 25 bp, Homo sapien
cagaatcatgtattacctactcagt

SEQ ID NO: 3021093 - DNA, 25 bp, Homo sapien
tttgtttatatattggatggccaag

SEQ ID NO: 3021094 - DNA, 25 bp, Homo sapien
tatatattggatggccaagtgtttt

SEQ ID NO: 3021095 - DNA, 25 bp, Homo sapien
ctttcctgacaggagtaccagattt

SEQ ID NO: 3021096 - DNA, 25 bp, Homo sapien
tcctgacaggagtaccagatttgtt

SEQ ID NO: 3021097 - DNA, 25 bp, Homo sapien
cattgcggtaagtccatccctgttg

SEQ ID NO: 3021098 - DNA, 25 bp, Homo sapien
tgcagagctttagccaccatagtga

SEQ ID NO: 3021099 - DNA, 25 bp, Homo sapien
ggtcctgggtgatactgttgagctc

SEQ ID NO: 3021100 - DNA, 25 bp, Homo sapien
tccctggtcatggagcattgtggtg

SEQ ID NO: 3021101 - DNA, 25 bp, Homo sapien
cattaagccccagtttctgagagcg

SEQ ID NO: 3021102 - DNA, 25 bp, Homo sapien
tctattaaggatatcagaggccctc

SEQ ID NO: 3021103 - DNA, 25 bp, Homo sapien
caagaatagctacaagcagctgagc

SEQ ID NO: 3021104 - DNA, 25 bp, Homo sapien
cctcaacgtgtactggagagtcagc

SEQ ID NO: 3021105 - DNA, 25 bp, Homo sapien
agtgacagcagaggcggattcctct

SEQ ID NO: 3021106 - DNA, 25 bp, Homo sapien
catctgtggaatatctggggtggca

SEQ ID NO: 3021107 - DNA, 25 bp, Homo sapien
gcagtggggtagataatgagtgaca

SEQ ID NO: 3021108 - DNA, 25 bp, Homo sapien
cccacgccggcatctggctccccat

SEQ ID NO: 3021109 - DNA, 25 bp, Homo sapien
taggctgaaacgctaaatgacaccc

SEQ ID NO: 3021110 - DNA, 25 bp, Homo sapien
tgtaggtcaaaccaccctgagaagc

SEQ ID NO: 3021111 - DNA, 25 bp, Homo sapien
cacatctgtacaggccaaggttggt

SEQ ID NO: 3021112 - DNA, 25 bp, Homo sapien
gactttttctattccgcacacacca

SEQ ID NO: 3021113 - DNA, 25 bp, Homo sapien
agagccaagtaatctacatactggg

SEQ ID NO: 3021114 - DNA, 25 bp, Homo sapien
gtggctgcatttgctgaacgctaaa

SEQ ID NO: 3021115 - DNA, 25 bp, Homo sapien
acatactgggtataacattcttagc

SEQ ID NO: 3021116 - DNA, 25 bp, Homo sapien
aacgctaaattctggttacagagcc

SEQ ID NO: 3021117 - DNA, 25 bp, Homo sapien
gaaccactggaatgtatctttgaat

SEQ ID NO: 3021118 - DNA, 25 bp, Homo sapien
aacagtggagtcgtttggcatctaa

SEQ ID NO: 3021119 - DNA, 25 bp, Homo sapien
acggccaagtggctagattctagca

SEQ ID NO: 3021120 - DNA, 25 bp, Homo sapien
gaatgctcgcctgtcctagtgaaag

SEQ ID NO: 3021121 - DNA, 25 bp, Homo sapien
tgtagccatcagtctgcagacagat

SEQ ID NO: 3021122 - DNA, 25 bp, Homo sapien
gaaacagccaccatattcgaatctg

SEQ ID NO: 3021123 - DNA, 25 bp, Homo sapien
caagctttgatgtcaggttgctcac

SEQ ID NO: 3021124 - DNA, 25 bp, Homo sapien
cctgacttggtgtagcggctcaaca

SEQ ID NO: 3021125 - DNA, 25 bp, Homo sapien
cagattcaatgggtctagaggtggc

SEQ ID NO: 3021126 - DNA, 25 bp, Homo sapien
taacaccctcacaggtttcagggac

SEQ ID NO: 3021127 - DNA, 25 bp, Homo sapien
tcaccagcggtgctttaaagagaaa

SEQ ID NO: 3021128 - DNA, 25 bp, Homo sapien
tctggcactcaacagctaggtaact

SEQ ID NO: 3021129 - DNA, 25 bp, Homo sapien
gtccgcgcgcggctttttcttcagg

SEQ ID NO: 3021130 - DNA, 25 bp, Homo sapien
ttcccggaagtccttcaggcctcag

SEQ ID NO: 3021131 - DNA, 25 bp, Homo sapien
cacaccgtgctttgcggttcccgga

SEQ ID NO: 3021132 - DNA, 25 bp, Homo sapien
tttcttcaggacagcggaggcacac

SEQ ID NO: 3021133 - DNA, 25 bp, Homo sapien
aaggttttgtatgcgttttcattat

SEQ ID NO: 3021134 - DNA, 25 bp, Homo sapien
gagtccactcctgcataagcagtct

SEQ ID NO: 3021135 - DNA, 25 bp, Homo sapien
cattttggtaaggtttagcatcttt

SEQ ID NO: 3021136 - DNA, 25 bp, Homo sapien
cagtttcgccaatttgatcattgaa

SEQ ID NO: 3021137 - DNA, 25 bp, Homo sapien
gtatactgtgaggttagaactaggg

SEQ ID NO: 3021138 - DNA, 25 bp, Homo sapien
ggctaaatttgtactgcgagtcctg

SEQ ID NO: 3021139 - DNA, 25 bp, Homo sapien
taaaagcctccatttatgggtgaca

SEQ ID NO: 3021140 - DNA, 25 bp, Homo sapien
tgctgccctgcaaagtatactgtga

SEQ ID NO: 3021141 - DNA, 25 bp, Homo sapien
ctgttgcagaagtaacagcatgcat

SEQ ID NO: 3021142 - DNA, 25 bp, Homo sapien
tgtagcccccctcatggttactgga

SEQ ID NO: 3021143 - DNA, 25 bp, Homo sapien
catgccaccttattgtcttgatgca

SEQ ID NO: 3021144 - DNA, 25 bp, Homo sapien
caatagtggtgccttcctgttctgc

SEQ ID NO: 3021145 - DNA, 25 bp, Homo sapien
ctggacacccatgccaccttattgt

SEQ ID NO: 3021146 - DNA, 25 bp, Homo sapien
gagttgagattggattctgtaggca

SEQ ID NO: 3021147 - DNA, 25 bp, Homo sapien
cagtagggagccattgaagtgggca

SEQ ID NO: 3021148 - DNA, 25 bp, Homo sapien
ttgttgagtatcgtaattgcccagc

SEQ ID NO: 3021149 - DNA, 25 bp, Homo sapien
aagtagttggccatacggcttgggt

SEQ ID NO: 3021150 - DNA, 25 bp, Homo sapien
gtaagaagtcctggcagttggcgat

SEQ ID NO: 3021151 - DNA, 25 bp, Homo sapien
ggcgattggtgccaagatctctgag

SEQ ID NO: 3021152 - DNA, 25 bp, Homo sapien
aagaagtcctggcagttggcgattg

SEQ ID NO: 3021153 - DNA, 25 bp, Homo sapien
gcagttggcgattggtgccaagatc

SEQ ID NO: 3021154 - DNA, 25 bp, Homo sapien
tttgtggtttgttgtctctcctttg

SEQ ID NO: 3021155 - DNA, 25 bp, Homo sapien
tctttgtggtttgttgtctctcctt

SEQ ID NO: 3021156 - DNA, 25 bp, Homo sapien
ttgtggtttgttgtctctcctttgc

SEQ ID NO: 3021157 - DNA, 25 bp, Homo sapien
agcctgattgtcttcatcatatgca

SEQ ID NO: 3021158 - DNA, 25 bp, Homo sapien
taaattctgacggagaatccgtgtc

SEQ ID NO: 3021159 - DNA, 25 bp, Homo sapien
tgagacagcacgaaggtatgatcct

SEQ ID NO: 3021160 - DNA, 25 bp, Homo sapien
tttgagatgtagctttccacagctg

SEQ ID NO: 3021161 - DNA, 25 bp, Homo sapien
cgtgtcgatggtcaaatctatcact

SEQ ID NO: 3021162 - DNA, 25 bp, Homo sapien
ataagccctttaccgaatggtggtg

SEQ ID NO: 3021163 - DNA, 25 bp, Homo sapien
tatttttgcatgacccatagtagct

SEQ ID NO: 3021164 - DNA, 25 bp, Homo sapien
tcatgagtcatacaataaaggaagc

SEQ ID NO: 3021165 - DNA, 25 bp, Homo sapien
tcagcttgtcttactttatagggca

SEQ ID NO: 3021166 - DNA, 25 bp, Homo sapien
agaggaaccctggtattcgtaatgg

SEQ ID NO: 3021167 - DNA, 25 bp, Homo sapien
ttaaaggcttcataaggtagactcc

SEQ ID NO: 3021168 - DNA, 25 bp, Homo sapien
cttcataaggtagactccatgatgc

SEQ ID NO: 3021169 - DNA, 25 bp, Homo sapien
taatggttatttgagtcagtgtttc

SEQ ID NO: 3021170 - DNA, 25 bp, Homo sapien
gatcaaacttgttcccaaagaatat

SEQ ID NO: 3021171 - DNA, 25 bp, Homo sapien
agaatatgtgtggtgtaacacactc

SEQ ID NO: 3021172 - DNA, 25 bp, Homo sapien
ctccaaaaagggacagcaagcacat

SEQ ID NO: 3021173 - DNA, 25 bp, Homo sapien
aaagggacagcaagcacataaaagg

SEQ ID NO: 3021174 - DNA, 25 bp, Homo sapien
tagttttttgactagacatggataa

SEQ ID NO: 3021175 - DNA, 25 bp, Homo sapien
taaactctttatttagagatcttca

SEQ ID NO: 3021176 - DNA, 25 bp, Homo sapien
aaacagcactgctatttaactttaa

SEQ ID NO: 3021177 - DNA, 25 bp, Homo sapien
ggtagtagttttttgactagacatg

SEQ ID NO: 3021178 - DNA, 25 bp, Homo sapien
tggataaatctagagtcgtggtgca

SEQ ID NO: 3021179 - DNA, 25 bp, Homo sapien
gggccacttgatgaacttgagtaca

SEQ ID NO: 3021180 - DNA, 25 bp, Homo sapien
tgtacatcacatcacttaggaagca

SEQ ID NO: 3021181 - DNA, 25 bp, Homo sapien
cgtggtgcatttggctaaagagctc

SEQ ID NO: 3021182 - DNA, 25 bp, Homo sapien
acaccttccacttaacgaagctgca

SEQ ID NO: 3021183 - DNA, 25 bp, Homo sapien
ttaacgaagctgcatatctgcttgc

SEQ ID NO: 3021184 - DNA, 25 bp, Homo sapien
gaacaccttccacttaacgaagctg

SEQ ID NO: 3021185 - DNA, 25 bp, Homo sapien
cttgaacaccttccacttaacgaag

SEQ ID NO: 3021186 - DNA, 25 bp, Homo sapien
tctgcttttctctgtactttcactg

SEQ ID NO: 3021187 - DNA, 25 bp, Homo sapien
ttttctctgtactttcactgcattt

SEQ ID NO: 3021188 - DNA, 25 bp, Homo sapien
tgcttttctctgtactttcactgca

SEQ ID NO: 3021189 - DNA, 25 bp, Homo sapien
gcttttctctgtactttcactgcat

SEQ ID NO: 3021190 - DNA, 25 bp, Homo sapien
gtgtcctttgccacttgttgtgctg

SEQ ID NO: 3021191 - DNA, 25 bp, Homo sapien
tcctttgccacttgttgtgctgttc

SEQ ID NO: 3021192 - DNA, 25 bp, Homo sapien
tgtcctttgccacttgttgtgctgt

SEQ ID NO: 3021193 - DNA, 25 bp, Homo sapien
tgtgtcctttgccacttgttgtgct

SEQ ID NO: 3021194 - DNA, 25 bp, Homo sapien
catcccgcctgtcatgggctggaca

SEQ ID NO: 3021195 - DNA, 25 bp, Homo sapien
tgagcacactcggtcaaggaggcat

SEQ ID NO: 3021196 - DNA, 25 bp, Homo sapien
ccacgggcagcctcgatgctggtaa

SEQ ID NO: 3021197 - DNA, 25 bp, Homo sapien
tcagcattgccaacacatgggtcgg

SEQ ID NO: 3021198 - DNA, 25 bp, Homo sapien
tacgctctggatcaaagaggctctc

SEQ ID NO: 3021199 - DNA, 25 bp, Homo sapien
taattcagagtccatcactcagtgg

SEQ ID NO: 3021200 - DNA, 25 bp, Homo sapien
tgtgatgccaccagtttgagccctc

SEQ ID NO: 3021201 - DNA, 25 bp, Homo sapien
gcatctgagaggcaaggtatccacc

SEQ ID NO: 3021202 - DNA, 25 bp, Homo sapien
cctcatcatctgctgcgaaaggctt

SEQ ID NO: 3021203 - DNA, 25 bp, Homo sapien
gataggagctcaggcttcacctcct

SEQ ID NO: 3021204 - DNA, 25 bp, Homo sapien
cagataggagctcaggcttcacctc

SEQ ID NO: 3021205 - DNA, 25 bp, Homo sapien
aaggctttgctttaactcattccca

SEQ ID NO: 3021206 - DNA, 25 bp, Homo sapien
ctgtaaatgagggaaccattcccgg

SEQ ID NO: 3021207 - DNA, 25 bp, Homo sapien
gctgggggcttctcaacatccgctt

SEQ ID NO: 3021208 - DNA, 25 bp, Homo sapien
gggcttctcaacatccgcttctcca

SEQ ID NO: 3021209 - DNA, 25 bp, Homo sapien
tctcagggtccttcgttccgggctc

SEQ ID NO: 3021210 - DNA, 25 bp, Homo sapien
cagggtccttcgttccgggctccat

SEQ ID NO: 3021211 - DNA, 25 bp, Homo sapien
gccataggccctgactctataaggg

SEQ ID NO: 3021212 - DNA, 25 bp, Homo sapien
acagggctggtctggccataggccc

SEQ ID NO: 3021213 - DNA, 25 bp, Homo sapien
tcacagggctggtctggccataggc

SEQ ID NO: 3021214 - DNA, 25 bp, Homo sapien
ggtctggccataggccctgactcta

SEQ ID NO: 3021215 - DNA, 25 bp, Homo sapien
agccaaaccgagcactcaacccagc

SEQ ID NO: 3021216 - DNA, 25 bp, Homo sapien
tgagccaaaccgagcactcaaccca

SEQ ID NO: 3021217 - DNA, 25 bp, Homo sapien
aaaccgagcactcaacccagcccat

SEQ ID NO: 3021218 - DNA, 25 bp, Homo sapien
cttgagccaaaccgagcactcaacc

SEQ ID NO: 3021219 - DNA, 25 bp, Homo sapien
caaacctgaagctcattacagagaa

SEQ ID NO: 3021220 - DNA, 25 bp, Homo sapien
aagccagctgtgaagtaaactgggt

SEQ ID NO: 3021221 - DNA, 25 bp, Homo sapien
cattacagagaaaggatatcagttg

SEQ ID NO: 3021222 - DNA, 25 bp, Homo sapien
tcttttagcttgtagacagtcgtgc

SEQ ID NO: 3021223 - DNA, 25 bp, Homo sapien
tggcacatcttgatcaccacggtgt

SEQ ID NO: 3021224 - DNA, 25 bp, Homo sapien
cacagtagtgaacacttgttcaggc

SEQ ID NO: 3021225 - DNA, 25 bp, Homo sapien
tgttcaggctcaaaatggcacatct

SEQ ID NO: 3021226 - DNA, 25 bp, Homo sapien
gtgtacttacgcagggcccacagtg

SEQ ID NO: 3021227 - DNA, 25 bp, Homo sapien
gcctcgccaggagtctgctgagcac

SEQ ID NO: 3021228 - DNA, 25 bp, Homo sapien
tcacacagcctcgccaggagtctgc

SEQ ID NO: 3021229 - DNA, 25 bp, Homo sapien
acagcctcgccaggagtctgctgag

SEQ ID NO: 3021230 - DNA, 25 bp, Homo sapien
acacagcctcgccaggagtctgctg

SEQ ID NO: 3021231 - DNA, 25 bp, Homo sapien
ttgtaatctcgtttcatcaacttgt

SEQ ID NO: 3021232 - DNA, 25 bp, Homo sapien
tgttaagggcctgtcccgggcagca

SEQ ID NO: 3021233 - DNA, 25 bp, Homo sapien
tgtggacccgcatccatgcctggag

SEQ ID NO: 3021234 - DNA, 25 bp, Homo sapien
gggcacaacggctgtcgttaaaagc

SEQ ID NO: 3021235 - DNA, 25 bp, Homo sapien
tctgcctgcatgtttgccaccgtgc

SEQ ID NO: 3021236 - DNA, 25 bp, Homo sapien
ttccagggttagggctagtggctac

SEQ ID NO: 3021237 - DNA, 25 bp, Homo sapien
ccagccacgctttcagttccagggt

SEQ ID NO: 3021238 - DNA, 25 bp, Homo sapien
tcagttccagggttagggctagtgg

SEQ ID NO: 3021239 - DNA, 25 bp, Homo sapien
cgctttcagttccagggttagggct

SEQ ID NO: 3021240 - DNA, 25 bp, Homo sapien
tgctcttacttctgcacatggacca

SEQ ID NO: 3021241 - DNA, 25 bp, Homo sapien
cctcgttggtctggtccttggctgg

SEQ ID NO: 3021242 - DNA, 25 bp, Homo sapien
gctctggctccgccgctggtgctgg

SEQ ID NO: 3021243 - DNA, 25 bp, Homo sapien
tttcaggcagctcctcgttggtctg

SEQ ID NO: 3021244 - DNA, 25 bp, Homo sapien
attacaacgggcgacaggcgtctgg

SEQ ID NO: 3021245 - DNA, 25 bp, Homo sapien
acctggatgcgccttattacaacgg

SEQ ID NO: 3021246 - DNA, 25 bp, Homo sapien
gccttattacaacgggcgacaggcg

SEQ ID NO: 3021247 - DNA, 25 bp, Homo sapien
tggatgcgccttattacaacgggcg

SEQ ID NO: 3021248 - DNA, 25 bp, Homo sapien
cgaagtggggaagcaacacgagaac

SEQ ID NO: 3021249 - DNA, 25 bp, Homo sapien
ctgaagcagcaacctctcgaagtgg

SEQ ID NO: 3021250 - DNA, 25 bp, Homo sapien
acacgagaacatcttgctctcttga

SEQ ID NO: 3021251 - DNA, 25 bp, Homo sapien
acctctcgaagtggggaagcaacac

SEQ ID NO: 3021252 - DNA, 25 bp, Homo sapien
gccagatgtcgtcctcaggcctgat

SEQ ID NO: 3021253 - DNA, 25 bp, Homo sapien
cagatgtcgtcctcaggcctgatgt

SEQ ID NO: 3021254 - DNA, 25 bp, Homo sapien
agatgtcgtcctcaggcctgatgtc

SEQ ID NO: 3021255 - DNA, 25 bp, Homo sapien
gggccagatgtcgtcctcaggcctg

SEQ ID NO: 3021256 - DNA, 25 bp, Homo sapien
tggcctactgggtcttgttgttcac

SEQ ID NO: 3021257 - DNA, 25 bp, Homo sapien
cctgatggcctactgggtcttgttg

SEQ ID NO: 3021258 - DNA, 25 bp, Homo sapien
ggcctgatggcctactgggtcttgt

SEQ ID NO: 3021259 - DNA, 25 bp, Homo sapien
tgatggcctactgggtcttgttgtt

SEQ ID NO: 3021260 - DNA, 25 bp, Homo sapien
gtgttcaacatgggcctgctgtcca

SEQ ID NO: 3021261 - DNA, 25 bp, Homo sapien
actttgagtccagggtccacctggg

SEQ ID NO: 3021262 - DNA, 25 bp, Homo sapien
ctggtatacactttgagtccagggt

SEQ ID NO: 3021263 - DNA, 25 bp, Homo sapien
tatacactttgagtccagggtccac

SEQ ID NO: 3021264 - DNA, 25 bp, Homo sapien
cagtacatccttctggtgccaccag

SEQ ID NO: 3021265 - DNA, 25 bp, Homo sapien
tccttctggtgccaccaggatgcca

SEQ ID NO: 3021266 - DNA, 25 bp, Homo sapien
agtacatccttctggtgccaccagg

SEQ ID NO: 3021267 - DNA, 25 bp, Homo sapien
ggtgccaccaggatgccacttactc

SEQ ID NO: 3021268 - DNA, 25 bp, Homo sapien
gatgtatccatggttctaagttgga

SEQ ID NO: 3021269 - DNA, 25 bp, Homo sapien
caggcagtgcttcagcgtggccttg

SEQ ID NO: 3021270 - DNA, 25 bp, Homo sapien
ccgtgcctgacatgttcaccagtgc

SEQ ID NO: 3021271 - DNA, 25 bp, Homo sapien
gaaccacctgtgtctctggaaagac

SEQ ID NO: 3021272 - DNA, 25 bp, Homo sapien
tcagggaaacatggaccggcctcat

SEQ ID NO: 3021273 - DNA, 25 bp, Homo sapien
catcagggaaacatggaccggcctc

SEQ ID NO: 3021274 - DNA, 25 bp, Homo sapien
atcagggaaacatggaccggcctca

SEQ ID NO: 3021275 - DNA, 25 bp, Homo sapien
tataaaccaatgcatacagcacctg

SEQ ID NO: 3021276 - DNA, 25 bp, Homo sapien
ctttagagaaggacgggtgcaggtt

SEQ ID NO: 3021277 - DNA, 25 bp, Homo sapien
gatggtaaccatactttagagaagg

SEQ ID NO: 3021278 - DNA, 25 bp, Homo sapien
tgctgatggtaaccatactttagag

SEQ ID NO: 3021279 - DNA, 25 bp, Homo sapien
ttctctaggagacaagggaggctcc

SEQ ID NO: 3021280 - DNA, 25 bp, Homo sapien
ccaacaaaggtacagcgggagtcca

SEQ ID NO: 3021281 - DNA, 25 bp, Homo sapien
gagtccaggccgagataaagttccc

SEQ ID NO: 3021282 - DNA, 25 bp, Homo sapien
caagtcatcaaaccaaccagggcgt

SEQ ID NO: 3021283 - DNA, 25 bp, Homo sapien
gggtgctaacgtcaatctggctttc

SEQ ID NO: 3021284 - DNA, 25 bp, Homo sapien
tcggagccggaaggaatgttctgtc

SEQ ID NO: 3021285 - DNA, 25 bp, Homo sapien
gccgtcgccgacagtgaagtaagta

SEQ ID NO: 3021286 - DNA, 25 bp, Homo sapien
ggttgcaggcatcgaaaacttcctg

SEQ ID NO: 3021287 - DNA, 25 bp, Homo sapien
tccctactctgcaacacgtaagcat

SEQ ID NO: 3021288 - DNA, 25 bp, Homo sapien
aacatctgggcaactaccgccaagg

SEQ ID NO: 3021289 - DNA, 25 bp, Homo sapien
atctgggcaactaccgccaaggctg

SEQ ID NO: 3021290 - DNA, 25 bp, Homo sapien
catcacgaaacctcctgcgaaacat

SEQ ID NO: 3021291 - DNA, 25 bp, Homo sapien
ccctcgtcctgggagcgggttggct

SEQ ID NO: 3021292 - DNA, 25 bp, Homo sapien
cctgggagcgggttggctgctgagc

SEQ ID NO: 3021293 - DNA, 25 bp, Homo sapien
gctctcggagaagcgcctgtatttg

SEQ ID NO: 3021294 - DNA, 25 bp, Homo sapien
ctgctgagctctcggagaagcgcct

SEQ ID NO: 3021295 - DNA, 25 bp, Homo sapien
gaggtctagatttcggcctccgata

SEQ ID NO: 3021296 - DNA, 25 bp, Homo sapien
gaaattctgttctcgagtcgggttg

SEQ ID NO: 3021297 - DNA, 25 bp, Homo sapien
ttgcttcgaggtcgcggcttccgga

SEQ ID NO: 3021298 - DNA, 25 bp, Homo sapien
tgagctgttgggttgcccgagcttc

SEQ ID NO: 3021299 - DNA, 25 bp, Homo sapien
aagcacctggggcaagctatggaaa

SEQ ID NO: 3021300 - DNA, 25 bp, Homo sapien
cctggggcaagctatggaaatcccc

SEQ ID NO: 3021301 - DNA, 25 bp, Homo sapien
ttttgaagcacctggggcaagctat

SEQ ID NO: 3021302 - DNA, 25 bp, Homo sapien
cacctggggcaagctatggaaatcc

SEQ ID NO: 3021303 - DNA, 25 bp, Homo sapien
tgattgactaaaaaacgctgaatga

SEQ ID NO: 3021304 - DNA, 25 bp, Homo sapien
aacgctgaatgaagaacgaagtcgc

SEQ ID NO: 3021305 - DNA, 25 bp, Homo sapien
cacctgccacgttctttttgattga

SEQ ID NO: 3021306 - DNA, 25 bp, Homo sapien
gaagtcgcgtggaaaccctcgccgc

SEQ ID NO: 3021307 - DNA, 25 bp, Homo sapien
taaaatctggtacccagagtgcacc

SEQ ID NO: 3021308 - DNA, 25 bp, Homo sapien
aactttaaacagaccacgccaggag

SEQ ID NO: 3021309 - DNA, 25 bp, Homo sapien
cctgcagtcaggcaaccaattggag

SEQ ID NO: 3021310 - DNA, 25 bp, Homo sapien
tgccaagctttgctccgtgccagag

SEQ ID NO: 3021311 - DNA, 25 bp, Homo sapien
tcaggtctgcggacggaagtgtcca

SEQ ID NO: 3021312 - DNA, 25 bp, Homo sapien
ggtctgcggacggaagtgtccagca

SEQ ID NO: 3021313 - DNA, 25 bp, Homo sapien
caggtctgcggacggaagtgtccag

SEQ ID NO: 3021314 - DNA, 25 bp, Homo sapien
tctgcggacggaagtgtccagcagg

SEQ ID NO: 3021315 - DNA, 25 bp, Homo sapien
gtgtcgcgcgggatcgccgcctctg

SEQ ID NO: 3021316 - DNA, 25 bp, Homo sapien
cttggacatcccgttctggaagggt

SEQ ID NO: 3021317 - DNA, 25 bp, Homo sapien
gggcatcaatcgacgcggccctggt

SEQ ID NO: 3021318 - DNA, 25 bp, Homo sapien
gggcgttggcttggacatcccgttc

SEQ ID NO: 3021319 - DNA, 25 bp, Homo sapien
ctgagccggagacagatggcggagc

SEQ ID NO: 3021320 - DNA, 25 bp, Homo sapien
ctaggctggccgggtagtcctccgt

SEQ ID NO: 3021321 - DNA, 25 bp, Homo sapien
agacagatggcggagcttcccagtg

SEQ ID NO: 3021322 - DNA, 25 bp, Homo sapien
gtagtcctccgtggccacgtgacca

SEQ ID NO: 3021323 - DNA, 25 bp, Homo sapien
cccgtcttcgcgctgattgggtgga

SEQ ID NO: 3021324 - DNA, 25 bp, Homo sapien
gctgcggagagaccaatggtgttcc

SEQ ID NO: 3021325 - DNA, 25 bp, Homo sapien
cgcgctagaggtgggcggtgccggc

SEQ ID NO: 3021326 - DNA, 25 bp, Homo sapien
cggcgggacccgtcttcgcgctgat

SEQ ID NO: 3021327 - DNA, 25 bp, Homo sapien
tgggcccgagtggattatttacagc

SEQ ID NO: 3021328 - DNA, 25 bp, Homo sapien
tatttacagccgaagaggacacttc

SEQ ID NO: 3021329 - DNA, 25 bp, Homo sapien
cctgttttctggagcggagatgtct

SEQ ID NO: 3021330 - DNA, 25 bp, Homo sapien
agatgtctgttctccgaatgttcgg

SEQ ID NO: 3021331 - DNA, 25 bp, Homo sapien
taatgggtgcctgtaaggcgattcc

SEQ ID NO: 3021332 - DNA, 25 bp, Homo sapien
tgagtcaatttgcaacgagcacgtt

SEQ ID NO: 3021333 - DNA, 25 bp, Homo sapien
tcagtggataacagaaaataccttc

SEQ ID NO: 3021334 - DNA, 25 bp, Homo sapien
gcccattaaatgacaggacgaagag

SEQ ID NO: 3021335 - DNA, 25 bp, Homo sapien
tgtaatcccaggtatgcatcaactt

SEQ ID NO: 3021336 - DNA, 25 bp, Homo sapien
tcccaggtatgcatcaacttgtatg

SEQ ID NO: 3021337 - DNA, 25 bp, Homo sapien
tgtatgcatcgtttctctgcagggc

SEQ ID NO: 3021338 - DNA, 25 bp, Homo sapien
catcaacttgtatgcatcgtttctc

SEQ ID NO: 3021339 - DNA, 25 bp, Homo sapien
tgcttctgagctgtattgtccagca

SEQ ID NO: 3021340 - DNA, 25 bp, Homo sapien
ggcccattgcttctgagctgtattg

SEQ ID NO: 3021341 - DNA, 25 bp, Homo sapien
aactacaccactcagggtctcagct

SEQ ID NO: 3021342 - DNA, 25 bp, Homo sapien
tcttgggatcacattgacacacccc

SEQ ID NO: 3021343 - DNA, 25 bp, Homo sapien
ggccgctcagttccagcattcagtt

SEQ ID NO: 3021344 - DNA, 25 bp, Homo sapien
tccagcattcagttccaggctgcca

SEQ ID NO: 3021345 - DNA, 25 bp, Homo sapien
tcagttccagcattcagttccaggc

SEQ ID NO: 3021346 - DNA, 25 bp, Homo sapien
ccattggccgctcagttccagcatt

SEQ ID NO: 3021347 - DNA, 25 bp, Homo sapien
acaaccaacccgtggctggtggaca

SEQ ID NO: 3021348 - DNA, 25 bp, Homo sapien
caaggctcttaatctgggcccacag

SEQ ID NO: 3021349 - DNA, 25 bp, Homo sapien
atgtcaaccaggcttttgaccagca

SEQ ID NO: 3021350 - DNA, 25 bp, Homo sapien
ccctaacacagatcatgtcaaccag

SEQ ID NO: 3021351 - DNA, 25 bp, Homo sapien
cacaacgagaagctatgaacatttc

SEQ ID NO: 3021352 - DNA, 25 bp, Homo sapien
gaagctatgaacatttccagatttg

SEQ ID NO: 3021353 - DNA, 25 bp, Homo sapien
tcaacacaacgagaagctatgaaca

SEQ ID NO: 3021354 - DNA, 25 bp, Homo sapien
cgagaagctatgaacatttccagat

SEQ ID NO: 3021355 - DNA, 25 bp, Homo sapien
caacataaacggtaagtccctggag

SEQ ID NO: 3021356 - DNA, 25 bp, Homo sapien
tccttcatcattatgacaaatatta

SEQ ID NO: 3021357 - DNA, 25 bp, Homo sapien
agggcaagaatcatcccgatcaaca

SEQ ID NO: 3021358 - DNA, 25 bp, Homo sapien
cacacactggccatatcactgactc

SEQ ID NO: 3021359 - DNA, 25 bp, Homo sapien
tactgtgtcgttccttacgggtgaa

SEQ ID NO: 3021360 - DNA, 25 bp, Homo sapien
gagatgaacgggaatgctttgtcta

SEQ ID NO: 3021361 - DNA, 25 bp, Homo sapien
taatctccttggtgtttactgtgtc

SEQ ID NO: 3021362 - DNA, 25 bp, Homo sapien
tccttacgggtgaagaatgggagat

SEQ ID NO: 3021363 - DNA, 25 bp, Homo sapien
gggtagcatctgaacttcacaagct

SEQ ID NO: 3021364 - DNA, 25 bp, Homo sapien
ttcacaagctgagaattccaataaa

SEQ ID NO: 3021365 - DNA, 25 bp, Homo sapien
tcctgctgaaagttgattccgggta

SEQ ID NO: 3021366 - DNA, 25 bp, Homo sapien
acaagctgagaattccaataaatcc

SEQ ID NO: 3021367 - DNA, 25 bp, Homo sapien
cttggtcaccctcaagcatatgtac

SEQ ID NO: 3021368 - DNA, 25 bp, Homo sapien
caccctcaagcatatgtacaagcca

SEQ ID NO: 3021369 - DNA, 25 bp, Homo sapien
cattgacattgccatgtctcttgtt

SEQ ID NO: 3021370 - DNA, 25 bp, Homo sapien
gacattgccatgtctcttgttttct

SEQ ID NO: 3021371 - DNA, 25 bp, Homo sapien
ggagactgaaataagccctcagctt

SEQ ID NO: 3021372 - DNA, 25 bp, Homo sapien
agcttccatcccaccggttcttggg

SEQ ID NO: 3021373 - DNA, 25 bp, Homo sapien
ttgagcaactggtccacggaatgcg

SEQ ID NO: 3021374 - DNA, 25 bp, Homo sapien
tcctggaatggaaagattgagcaac

SEQ ID NO: 3021375 - DNA, 25 bp, Homo sapien
tgattgttctcgtaggaaagaaact

SEQ ID NO: 3021376 - DNA, 25 bp, Homo sapien
ggagtgagaccctgtgcgtccccag

SEQ ID NO: 3021377 - DNA, 25 bp, Homo sapien
taatacccatgatgttggtcttggt

SEQ ID NO: 3021378 - DNA, 25 bp, Homo sapien
gggtttcgagaccagcaaagctgcg

SEQ ID NO: 3021379 - DNA, 25 bp, Homo sapien
gaaattccggctgcagagttcaggg

SEQ ID NO: 3021380 - DNA, 25 bp, Homo sapien
caattgccgatttagcattctgttc

SEQ ID NO: 3021381 - DNA, 25 bp, Homo sapien
tgtggtttcctatacacaattgccg

SEQ ID NO: 3021382 - DNA, 25 bp, Homo sapien
tctgttcagctactgacaagccctt

SEQ ID NO: 3021383 - DNA, 25 bp, Homo sapien
tacctcgtaggaacgctgagctgcc

SEQ ID NO: 3021384 - DNA, 25 bp, Homo sapien
tcagtcaccgtctgagttctccagt

SEQ ID NO: 3021385 - DNA, 25 bp, Homo sapien
tgtggtgtcccgtccaatgatgtag

SEQ ID NO: 3021386 - DNA, 25 bp, Homo sapien
tgagctgcctcaacagggctgtatt

SEQ ID NO: 3021387 - DNA, 25 bp, Homo sapien
tcggcatcagcgtctaccaaggtgc

SEQ ID NO: 3021388 - DNA, 25 bp, Homo sapien
gaagtgtatgtagattgttgccccg

SEQ ID NO: 3021389 - DNA, 25 bp, Homo sapien
ccaaagaatcccgtaggctagcaga

SEQ ID NO: 3021390 - DNA, 25 bp, Homo sapien
ggctcacagcctcaatagggagaaa

SEQ ID NO: 3021391 - DNA, 25 bp, Homo sapien
gatcagagatgtcactggtctttaa

SEQ ID NO: 3021392 - DNA, 25 bp, Homo sapien
ccaaaagttttagcctacatctagc

SEQ ID NO: 3021393 - DNA, 25 bp, Homo sapien
tatgttgtatgggatcacttgcctg

SEQ ID NO: 3021394 - DNA, 25 bp, Homo sapien
acttagcagccaaaccatcattgtg

SEQ ID NO: 3021395 - DNA, 25 bp, Homo sapien
agcttgcaccccatcatcggacggt

SEQ ID NO: 3021396 - DNA, 25 bp, Homo sapien
cagatgtccataatcagtactgatg

SEQ ID NO: 3021397 - DNA, 25 bp, Homo sapien
tctggttgcagcatctgccggagct

SEQ ID NO: 3021398 - DNA, 25 bp, Homo sapien
tcctcataagggtctgcaagggtct

SEQ ID NO: 3021399 - DNA, 25 bp, Homo sapien
gaaacagtacgtatctaagatgctg

SEQ ID NO: 3021400 - DNA, 25 bp, Homo sapien
gaaacagtttcagatcctgccagga

SEQ ID NO: 3021401 - DNA, 25 bp, Homo sapien
ttttcagcttatcaagaggatggcc

SEQ ID NO: 3021402 - DNA, 25 bp, Homo sapien
catgctttctttgcggtgtttgaac

SEQ ID NO: 3021403 - DNA, 25 bp, Homo sapien
tgcagagtgttctcctattaggtgg

SEQ ID NO: 3021404 - DNA, 25 bp, Homo sapien
ggattttgataataggtgccttctc

SEQ ID NO: 3021405 - DNA, 25 bp, Homo sapien
cacacgacaggtgcaatgtgagcac

SEQ ID NO: 3021406 - DNA, 25 bp, Homo sapien
gcacctatggctggatggattttga

SEQ ID NO: 3021407 - DNA, 25 bp, Homo sapien
gaactctcagctctcgtccctaaat

SEQ ID NO: 3021408 - DNA, 25 bp, Homo sapien
ggcaaattaagagcaatccagctgc

SEQ ID NO: 3021409 - DNA, 25 bp, Homo sapien
gagtgctgtcaagacaacttccaga

SEQ ID NO: 3021410 - DNA, 25 bp, Homo sapien
cccagaaaatcgtactgcaggcaaa

SEQ ID NO: 3021411 - DNA, 25 bp, Homo sapien
catctgaatgagattttgcctcagt

SEQ ID NO: 3021412 - DNA, 25 bp, Homo sapien
aggccctggacagctcttataccca

SEQ ID NO: 3021413 - DNA, 25 bp, Homo sapien
gaattagagatttcccagacttcaa

SEQ ID NO: 3021414 - DNA, 25 bp, Homo sapien
gacatggatttgagcccagctctga

SEQ ID NO: 3021415 - DNA, 25 bp, Homo sapien
cagacttcaatctgtttgggtccct

SEQ ID NO: 3021416 - DNA, 25 bp, Homo sapien
cccggctgaagccccaagccttctt

SEQ ID NO: 3021417 - DNA, 25 bp, Homo sapien
cggctgaagccccaagccttcttcc

SEQ ID NO: 3021418 - DNA, 25 bp, Homo sapien
agcccccggctgaagccccaagcct

SEQ ID NO: 3021419 - DNA, 25 bp, Homo sapien
ctgaagccccaagccttcttcccct

SEQ ID NO: 3021420 - DNA, 25 bp, Homo sapien
tgaaaatggaatacagctggcaggt

SEQ ID NO: 3021421 - DNA, 25 bp, Homo sapien
gcggacagtgaaaacgtgccctgat

SEQ ID NO: 3021422 - DNA, 25 bp, Homo sapien
catgcaaatactcggtgaccaggag

SEQ ID NO: 3021423 - DNA, 25 bp, Homo sapien
aggaatgtgaccacccagctgggtg

SEQ ID NO: 3021424 - DNA, 25 bp, Homo sapien
tcccataggaccgtagagggcctgg

SEQ ID NO: 3021425 - DNA, 25 bp, Homo sapien
cataggaccgtagagggcctgggtc

SEQ ID NO: 3021426 - DNA, 25 bp, Homo sapien
cctgggtccaggtgctattctttgc

SEQ ID NO: 3021427 - DNA, 25 bp, Homo sapien
tctcccataggaccgtagagggcct

SEQ ID NO: 3021428 - DNA, 25 bp, Homo sapien
acctgttcaaatggtgtgtgcccat

SEQ ID NO: 3021429 - DNA, 25 bp, Homo sapien
caggaaagggcagagctgttgggcc

SEQ ID NO: 3021430 - DNA, 25 bp, Homo sapien
gaaagggcagagctgttgggcccca

SEQ ID NO: 3021431 - DNA, 25 bp, Homo sapien
acaggaaagggcagagctgttgggc

SEQ ID NO: 3021432 - DNA, 25 bp, Homo sapien
cttgatctacaggaaagggcagagc

SEQ ID NO: 3021433 - DNA, 25 bp, Homo sapien
gagggcacttatttattctgtgttg

SEQ ID NO: 3021434 - DNA, 25 bp, Homo sapien
caggagggcacttatttattctgtg

SEQ ID NO: 3021435 - DNA, 25 bp, Homo sapien
ttgcaggagggcacttatttattct

SEQ ID NO: 3021436 - DNA, 25 bp, Homo sapien
tgcaggagggcacttatttattctg

SEQ ID NO: 3021437 - DNA, 25 bp, Homo sapien
gtaaggcctacagggaccgtacagc

SEQ ID NO: 3021438 - DNA, 25 bp, Homo sapien
tatgacagcggattaggtaaggcct

SEQ ID NO: 3021439 - DNA, 25 bp, Homo sapien
tttcagatccctatcacgtcctcga

SEQ ID NO: 3021440 - DNA, 25 bp, Homo sapien
tacagccggtgattgggctcccaac

SEQ ID NO: 3021441 - DNA, 25 bp, Homo sapien
aaggtacagcgaattttgtcaaatg

SEQ ID NO: 3021442 - DNA, 25 bp, Homo sapien
aggagatggaaaggtacagcgaatt

SEQ ID NO: 3021443 - DNA, 25 bp, Homo sapien
gaaaggtacagcgaattttgtcaaa

SEQ ID NO: 3021444 - DNA, 25 bp, Homo sapien
gatggaaaggtacagcgaattttgt

SEQ ID NO: 3021445 - DNA, 25 bp, Homo sapien
tattgttcctatgattgtctgcaca

SEQ ID NO: 3021446 - DNA, 25 bp, Homo sapien
cacctattgttcctatgattgtctg

SEQ ID NO: 3021447 - DNA, 25 bp, Homo sapien
aaataactagctgttgcatgatgtt

SEQ ID NO: 3021448 - DNA, 25 bp, Homo sapien
ctcggccacctattgttcctatgat

SEQ ID NO: 3021449 - DNA, 25 bp, Homo sapien
ccaattaggtcatgtaggatgattg

SEQ ID NO: 3021450 - DNA, 25 bp, Homo sapien
tggtcgatccaattaggtcatgtag

SEQ ID NO: 3021451 - DNA, 25 bp, Homo sapien
gatccaattaggtcatgtaggatga

SEQ ID NO: 3021452 - DNA, 25 bp, Homo sapien
ttaaaatggtcgatccaattaggtc

SEQ ID NO: 3021453 - DNA, 25 bp, Homo sapien
cattttggatcacagagggatggga

SEQ ID NO: 3021454 - DNA, 25 bp, Homo sapien
cattttagcacctgggtggccgaag

SEQ ID NO: 3021455 - DNA, 25 bp, Homo sapien
taagaggttcggctctctaaaggtc

SEQ ID NO: 3021456 - DNA, 25 bp, Homo sapien
caaagcccaggcaaagcaaacagta

SEQ ID NO: 3021457 - DNA, 25 bp, Homo sapien
gaaccaggctctctttcgatagaaa

SEQ ID NO: 3021458 - DNA, 25 bp, Homo sapien
cctgtctttgggaatagggtcaaat

SEQ ID NO: 3021459 - DNA, 25 bp, Homo sapien
tttgcaggcgagacggaaaaaccta

SEQ ID NO: 3021460 - DNA, 25 bp, Homo sapien
caagaaatcccgaaacatgccagca

SEQ ID NO: 3021461 - DNA, 25 bp, Homo sapien
tcaacagatactttgtaacccttaa

SEQ ID NO: 3021462 - DNA, 25 bp, Homo sapien
tcattacctcaacagatactttgta

SEQ ID NO: 3021463 - DNA, 25 bp, Homo sapien
tacctcaacagatactttgtaaccc

SEQ ID NO: 3021464 - DNA, 25 bp, Homo sapien
aacttttcattacctcaacagatac

SEQ ID NO: 3021465 - DNA, 25 bp, Homo sapien
aatatttaatgacagtgattttcac

SEQ ID NO: 3021466 - DNA, 25 bp, Homo sapien
taaaaatatttaatgacagtgattt

SEQ ID NO: 3021467 - DNA, 25 bp, Homo sapien
aaaatatttaatgacagtgattttc

SEQ ID NO: 3021468 - DNA, 25 bp, Homo sapien
aaatatttaatgacagtgattttca

SEQ ID NO: 3021469 - DNA, 25 bp, Homo sapien
ttgcctttgactagcagtccttgga

SEQ ID NO: 3021470 - DNA, 25 bp, Homo sapien
ctagcagtccttggaaaaactgcat

SEQ ID NO: 3021471 - DNA, 25 bp, Homo sapien
cctttgactagcagtccttggaaaa

SEQ ID NO: 3021472 - DNA, 25 bp, Homo sapien
tttgactagcagtccttggaaaaac

SEQ ID NO: 3021473 - DNA, 25 bp, Homo sapien
gtctgggaatagcaagccaggtttc

SEQ ID NO: 3021474 - DNA, 25 bp, Homo sapien
ttctctacatgtgggggtgtggata

SEQ ID NO: 3021475 - DNA, 25 bp, Homo sapien
tggataaagtggtacttctggaaag

SEQ ID NO: 3021476 - DNA, 25 bp, Homo sapien
aaagtggtacttctggaaagcggtg

SEQ ID NO: 3021477 - DNA, 25 bp, Homo sapien
gaccgttactgacttctccaaacac

SEQ ID NO: 3021478 - DNA, 25 bp, Homo sapien
tgatagagtttgaccgttactgact

SEQ ID NO: 3021479 - DNA, 25 bp, Homo sapien
cctttgatagagtttgaccgttact

SEQ ID NO: 3021480 - DNA, 25 bp, Homo sapien
gtttgaccgttactgacttctccaa

SEQ ID NO: 3021481 - DNA, 25 bp, Homo sapien
cagggccatgtccaaagcatcaaga

SEQ ID NO: 3021482 - DNA, 25 bp, Homo sapien
ctgatccccgattccacctcaagag

SEQ ID NO: 3021483 - DNA, 25 bp, Homo sapien
aagagcctgcagggccatgtccaaa

SEQ ID NO: 3021484 - DNA, 25 bp, Homo sapien
gagaacatccatggcctccctgatc

SEQ ID NO: 3021485 - DNA, 25 bp, Homo sapien
acctcccaaaactccatcatttctt

SEQ ID NO: 3021486 - DNA, 25 bp, Homo sapien
ccttttccactaacattttgcacat

SEQ ID NO: 3021487 - DNA, 25 bp, Homo sapien
tgccaatgctttccacctcccaaaa

SEQ ID NO: 3021488 - DNA, 25 bp, Homo sapien
ttccttttccactaacattttgcac

SEQ ID NO: 3021489 - DNA, 25 bp, Homo sapien
attttgtgctcgagaaagcaccggg

SEQ ID NO: 3021490 - DNA, 25 bp, Homo sapien
tgtaccacgtgtgctctgagcttgg

SEQ ID NO: 3021491 - DNA, 25 bp, Homo sapien
ctaagtgacattgaggtatgatttt

SEQ ID NO: 3021492 - DNA, 25 bp, Homo sapien
gtgtgtttctagtgtgtttgagttt

SEQ ID NO: 3021493 - DNA, 25 bp, Homo sapien
taggacaaacctattttcaacttca

SEQ ID NO: 3021494 - DNA, 25 bp, Homo sapien
ctctctttctacaaggtttctcctt

SEQ ID NO: 3021495 - DNA, 25 bp, Homo sapien
tttccatctgagcccttaggacaaa

SEQ ID NO: 3021496 - DNA, 25 bp, Homo sapien
tctgagcccttaggacaaacctatt

SEQ ID NO: 3021497 - DNA, 25 bp, Homo sapien
gctgaggcacagatagccgtagcac

SEQ ID NO: 3021498 - DNA, 25 bp, Homo sapien
attggtatagagctcctgttcgccc

SEQ ID NO: 3021499 - DNA, 25 bp, Homo sapien
gccgtagcaccattgtgactgccat

SEQ ID NO: 3021500 - DNA, 25 bp, Homo sapien
tgtaccatcaagatgagccacggct

SEQ ID NO: 3021501 - DNA, 25 bp, Homo sapien
caagggctattacttccagcaatga

SEQ ID NO: 3021502 - DNA, 25 bp, Homo sapien
ggtcatttggatcaattctctgtct

SEQ ID NO: 3021503 - DNA, 25 bp, Homo sapien
tgacggttgaggtcatttggatcaa

SEQ ID NO: 3021504 - DNA, 25 bp, Homo sapien
cttccagcaatgacggttgaggtca

SEQ ID NO: 3021505 - DNA, 25 bp, Homo sapien
ttgctctagaccattcccagtaggg

SEQ ID NO: 3021506 - DNA, 25 bp, Homo sapien
tcatctgccacgttgcttcctgctt

SEQ ID NO: 3021507 - DNA, 25 bp, Homo sapien
gtagaacagtctgcagcatccatag

SEQ ID NO: 3021508 - DNA, 25 bp, Homo sapien
cctgcttttcctgttggtcttgctc

SEQ ID NO: 3021509 - DNA, 25 bp, Homo sapien
gactcacatctaataagtctccact

SEQ ID NO: 3021510 - DNA, 25 bp, Homo sapien
gagtgagaactaatgatgcctccat

SEQ ID NO: 3021511 - DNA, 25 bp, Homo sapien
ccttctctaggagtgagaactaatg

SEQ ID NO: 3021512 - DNA, 25 bp, Homo sapien
tggactcacatctaataagtctcca

SEQ ID NO: 3021513 - DNA, 25 bp, Homo sapien
cctgctgtcgtgtgttcgtcaaggg

SEQ ID NO: 3021514 - DNA, 25 bp, Homo sapien
ctgtcgtgtgttcgtcaagggtact

SEQ ID NO: 3021515 - DNA, 25 bp, Homo sapien
gtcgtgtgttcgtcaagggtactat

SEQ ID NO: 3021516 - DNA, 25 bp, Homo sapien
tgctgtcgtgtgttcgtcaagggta

SEQ ID NO: 3021517 - DNA, 25 bp, Homo sapien
cagatctgaagtggcacaagactgt

SEQ ID NO: 3021518 - DNA, 25 bp, Homo sapien
tctgaagtggcacaagactgtagag

SEQ ID NO: 3021519 - DNA, 25 bp, Homo sapien
gatctgaagtggcacaagactgtag

SEQ ID NO: 3021520 - DNA, 25 bp, Homo sapien
ctgaagtggcacaagactgtagaga

SEQ ID NO: 3021521 - DNA, 25 bp, Homo sapien
caagtttcctttgggtcctatgagg

SEQ ID NO: 3021522 - DNA, 25 bp, Homo sapien
tcaactgttgttgatgccactgaac

SEQ ID NO: 3021523 - DNA, 25 bp, Homo sapien
cagaaatctctgacacggccggagt

SEQ ID NO: 3021524 - DNA, 25 bp, Homo sapien
tctgtagcatactgaagttcctctg

SEQ ID NO: 3021525 - DNA, 25 bp, Homo sapien
gagtaggtcaagtaggactttatcc

SEQ ID NO: 3021526 - DNA, 25 bp, Homo sapien
tatcccatgtcaggtatgggcttgg

SEQ ID NO: 3021527 - DNA, 25 bp, Homo sapien
tatgggcttgggtttcctgccagct

SEQ ID NO: 3021528 - DNA, 25 bp, Homo sapien
tccgggagaaagagtaggtcaagta

SEQ ID NO: 3021529 - DNA, 25 bp, Homo sapien
caatggccctttctgcgggacggtt

SEQ ID NO: 3021530 - DNA, 25 bp, Homo sapien
tgcaggaaacccggcaatggccctt

SEQ ID NO: 3021531 - DNA, 25 bp, Homo sapien
tctgcgggacggttcattgttgtgc

SEQ ID NO: 3021532 - DNA, 25 bp, Homo sapien
ccctttctgcgggacggttcattgt

SEQ ID NO: 3021533 - DNA, 25 bp, Homo sapien
ttgaggatgtctcgggctctgccag

SEQ ID NO: 3021534 - DNA, 25 bp, Homo sapien
ctgccagggcttgccatgtgtgcac

SEQ ID NO: 3021535 - DNA, 25 bp, Homo sapien
taaattgaggatgtctcgggctctg

SEQ ID NO: 3021536 - DNA, 25 bp, Homo sapien
tcacaataaattgaggatgtctcgg

SEQ ID NO: 3021537 - DNA, 25 bp, Homo sapien
tgcataggtctgtccacaagggctc

SEQ ID NO: 3021538 - DNA, 25 bp, Homo sapien
gactgcagtgcatacggctggcttt

SEQ ID NO: 3021539 - DNA, 25 bp, Homo sapien
tattgctgccgtgttcatctaagga

SEQ ID NO: 3021540 - DNA, 25 bp, Homo sapien
tcatgaagttgggaccgaggactgc

SEQ ID NO: 3021541 - DNA, 25 bp, Homo sapien
cctgcttgctaagcagcatgtggga

SEQ ID NO: 3021542 - DNA, 25 bp, Homo sapien
gagaatcattgtgggtgtctaataa

SEQ ID NO: 3021543 - DNA, 25 bp, Homo sapien
gggagacctggattgagaatcattg

SEQ ID NO: 3021544 - DNA, 25 bp, Homo sapien
cattgtgggtgtctaataagtctct

SEQ ID NO: 3021545 - DNA, 25 bp, Homo sapien
agcctccattctgggcaccttgtgg

SEQ ID NO: 3021546 - DNA, 25 bp, Homo sapien
aagcctccattctgggcaccttgtg

SEQ ID NO: 3021547 - DNA, 25 bp, Homo sapien
gaagcctccattctgggcaccttgt

SEQ ID NO: 3021548 - DNA, 25 bp, Homo sapien
tccctgattgatggcgtagggtttt

SEQ ID NO: 3021549 - DNA, 25 bp, Homo sapien
tgaatccctgattgatggcgtaggg

SEQ ID NO: 3021550 - DNA, 25 bp, Homo sapien
cttttccaatgccatgagttccgcc

SEQ ID NO: 3021551 - DNA, 25 bp, Homo sapien
attgatggcgtagggttttctcttc

SEQ ID NO: 3021552 - DNA, 25 bp, Homo sapien
tttctgtacccacttggtaatgcag

SEQ ID NO: 3021553 - DNA, 25 bp, Homo sapien
aatcctgtgttctggtgatggtcat

SEQ ID NO: 3021554 - DNA, 25 bp, Homo sapien
tctgtacccacttggtaatgcagga

SEQ ID NO: 3021555 - DNA, 25 bp, Homo sapien
acatgaggattaaaatcctgtgttc

SEQ ID NO: 3021556 - DNA, 25 bp, Homo sapien
cttacaatatctatgccctgatcta

SEQ ID NO: 3021557 - DNA, 25 bp, Homo sapien
gatctactctatcgtaaccccaaca

SEQ ID NO: 3021558 - DNA, 25 bp, Homo sapien
tatctatgccctgatctactctatc

SEQ ID NO: 3021559 - DNA, 25 bp, Homo sapien
tatgccctgatctactctatcgtaa

SEQ ID NO: 3021560 - DNA, 25 bp, Homo sapien
aagcagtttcatattacttgaaaca

SEQ ID NO: 3021561 - DNA, 25 bp, Homo sapien
atattacttgaaacaatcaccaagg

SEQ ID NO: 3021562 - DNA, 25 bp, Homo sapien
tgagtgcgtgatgaaaagcagtttc

SEQ ID NO: 3021563 - DNA, 25 bp, Homo sapien
tctctgctgtcccttgagtgcgtga

SEQ ID NO: 3021564 - DNA, 25 bp, Homo sapien
tatctctgatgaaaagcccttgctt

SEQ ID NO: 3021565 - DNA, 25 bp, Homo sapien
taactgatatgtactgaggatccac

SEQ ID NO: 3021566 - DNA, 25 bp, Homo sapien
tgatagcgcaaatcgtgccttgacc

SEQ ID NO: 3021567 - DNA, 25 bp, Homo sapien
tgctcccatgcccactggaatagag

SEQ ID NO: 3021568 - DNA, 25 bp, Homo sapien
tcttctgatcattgttcgctctccc

SEQ ID NO: 3021569 - DNA, 25 bp, Homo sapien
cagggatttgggtaagccttagcct

SEQ ID NO: 3021570 - DNA, 25 bp, Homo sapien
agccttagccttcttctgatcattg

SEQ ID NO: 3021571 - DNA, 25 bp, Homo sapien
gcaccaaatggagtgttcataaata

SEQ ID NO: 3021572 - DNA, 25 bp, Homo sapien
aaaaggtgtcataaatgcttctgac

SEQ ID NO: 3021573 - DNA, 25 bp, Homo sapien
gcattttcaacatatcggaaaaggt

SEQ ID NO: 3021574 - DNA, 25 bp, Homo sapien
tgcttctgacagtgctcttgcttac

SEQ ID NO: 3021575 - DNA, 25 bp, Homo sapien
tgacagtgctcttgcttactgccct

SEQ ID NO: 3021576 - DNA, 25 bp, Homo sapien
cggaatgtgaaaggtatgcaagatc

SEQ ID NO: 3021577 - DNA, 25 bp, Homo sapien
gacaatcggaatgtgaaaggtatgc

SEQ ID NO: 3021578 - DNA, 25 bp, Homo sapien
caagagttggacaatcggaatgtga

SEQ ID NO: 3021579 - DNA, 25 bp, Homo sapien
cttggaaagactcaagagttggaca

SEQ ID NO: 3021580 - DNA, 25 bp, Homo sapien
gactgtggtcttaagtgggatgatt

SEQ ID NO: 3021581 - DNA, 25 bp, Homo sapien
ttattttgagctattgactgtggtc

SEQ ID NO: 3021582 - DNA, 25 bp, Homo sapien
gtgcccaacttcacttgggaaggtg

SEQ ID NO: 3021583 - DNA, 25 bp, Homo sapien
ttgttggcagccgagatgggtagag

SEQ ID NO: 3021584 - DNA, 25 bp, Homo sapien
actgcctgaagatccaggtaggagc

SEQ ID NO: 3021585 - DNA, 25 bp, Homo sapien
gcctgaagatccaggtaggagcctc

SEQ ID NO: 3021586 - DNA, 25 bp, Homo sapien
tcataagatcgagggctggccactg

SEQ ID NO: 3021587 - DNA, 25 bp, Homo sapien
gggctggccactgcctgaagatcca

SEQ ID NO: 3021588 - DNA, 25 bp, Homo sapien
tgcagctcgtaggtcacagattccg

SEQ ID NO: 3021589 - DNA, 25 bp, Homo sapien
cgtaggtcacagattccgagtgctc

SEQ ID NO: 3021590 - DNA, 25 bp, Homo sapien
tgctgcagctcgtaggtcacagatt

SEQ ID NO: 3021591 - DNA, 25 bp, Homo sapien
ctgcagtgctgcagctcgtaggtca

SEQ ID NO: 3021592 - DNA, 25 bp, Homo sapien
tctttaccctcgcatttctgaactt

SEQ ID NO: 3021593 - DNA, 25 bp, Homo sapien
actttgggggagatgcgattttctt

SEQ ID NO: 3021594 - DNA, 25 bp, Homo sapien
tttctgaactttgggggagatgcga

SEQ ID NO: 3021595 - DNA, 25 bp, Homo sapien
ttattctttaccctcgcatttctga

SEQ ID NO: 3021596 - DNA, 25 bp, Homo sapien
ggaagaggtaaatttgcggcggctc

SEQ ID NO: 3021597 - DNA, 25 bp, Homo sapien
caggctcaggtgaacagagagggga

SEQ ID NO: 3021598 - DNA, 25 bp, Homo sapien
aagaggtaaatttgcggcggctcac

SEQ ID NO: 3021599 - DNA, 25 bp, Homo sapien
gtgtccctgttcggcactgccaggc

SEQ ID NO: 3021600 - DNA, 25 bp, Homo sapien
gggcagtcgtccaggctcacaaaga

SEQ ID NO: 3021601 - DNA, 25 bp, Homo sapien
aagatgccggtgtcaggtgcattcc

SEQ ID NO: 3021602 - DNA, 25 bp, Homo sapien
tcggtccgaccctcggaagatgccg

SEQ ID NO: 3021603 - DNA, 25 bp, Homo sapien
gatgtggcttctgttgtgggcagtc

SEQ ID NO: 3021604 - DNA, 25 bp, Homo sapien
cccagttcccactatctttgctccc

SEQ ID NO: 3021605 - DNA, 25 bp, Homo sapien
tgattttttgacactgtaactatct

SEQ ID NO: 3021606 - DNA, 25 bp, Homo sapien
ctttgaatatttggaagtggtgttt

SEQ ID NO: 3021607 - DNA, 25 bp, Homo sapien
ctgattttttgacactgtaactatc

SEQ ID NO: 3021608 - DNA, 25 bp, Homo sapien
ttgcattcaagctccatattaccag

SEQ ID NO: 3021609 - DNA, 25 bp, Homo sapien
ctttgcattcaagctccatattacc

SEQ ID NO: 3021610 - DNA, 25 bp, Homo sapien
cattcaagctccatattaccagaat

SEQ ID NO: 3021611 - DNA, 25 bp, Homo sapien
tgcattcaagctccatattaccaga

SEQ ID NO: 3021612 - DNA, 25 bp, Homo sapien
cgacgtttcaacttggtcatgccga

SEQ ID NO: 3021613 - DNA, 25 bp, Homo sapien
cctcctttggcgatagtaacggata

SEQ ID NO: 3021614 - DNA, 25 bp, Homo sapien
gcttggaaaatgaagcgacgtttca

SEQ ID NO: 3021615 - DNA, 25 bp, Homo sapien
tctgggcccctgagtttttcaggag

SEQ ID NO: 3021616 - DNA, 25 bp, Homo sapien
cgaatggtggggctttcccttcaca

SEQ ID NO: 3021617 - DNA, 25 bp, Homo sapien
tctgaacctgaacgggctgtgccaa

SEQ ID NO: 3021618 - DNA, 25 bp, Homo sapien
tgccaacgggagattccttgatgtt

SEQ ID NO: 3021619 - DNA, 25 bp, Homo sapien
ggattggctctgaacctgaacgggc

SEQ ID NO: 3021620 - DNA, 25 bp, Homo sapien
agtcctctgttgagtgcgggtaaga

SEQ ID NO: 3021621 - DNA, 25 bp, Homo sapien
ctaagagcagtcctctgttgagtgc

SEQ ID NO: 3021622 - DNA, 25 bp, Homo sapien
aagagcagtcctctgttgagtgcgg

SEQ ID NO: 3021623 - DNA, 25 bp, Homo sapien
agcagtcctctgttgagtgcgggta

SEQ ID NO: 3021624 - DNA, 25 bp, Homo sapien
tcagatgtagggtgtgaaggattcc

SEQ ID NO: 3021625 - DNA, 25 bp, Homo sapien
tacgtagattggagtcactgtcctc

SEQ ID NO: 3021626 - DNA, 25 bp, Homo sapien
ggattcccgaccttcctcaatagat

SEQ ID NO: 3021627 - DNA, 25 bp, Homo sapien
ttcctcaatagattcccgttccagc

SEQ ID NO: 3021628 - DNA, 25 bp, Homo sapien
tgtcccagaaaggctgctgagctca

SEQ ID NO: 3021629 - DNA, 25 bp, Homo sapien
ctgtcccagaaaggctgctgagctc

SEQ ID NO: 3021630 - DNA, 25 bp, Homo sapien
ctgagggtcacaagaaaatattttc

SEQ ID NO: 3021631 - DNA, 25 bp, Homo sapien
caaagtaaaacgacatttgaactcg

SEQ ID NO: 3021632 - DNA, 25 bp, Homo sapien
taaaacgacatttgaactcggtcat

SEQ ID NO: 3021633 - DNA, 25 bp, Homo sapien
tgtacaaagtaaaacgacatttgaa

SEQ ID NO: 3021634 - DNA, 25 bp, Homo sapien
cttgtacaaagtaaaacgacatttg

SEQ ID NO: 3021635 - DNA, 25 bp, Homo sapien
aagtcttcaccatgtctacactgca

SEQ ID NO: 3021636 - DNA, 25 bp, Homo sapien
caaagtcttcaccatgtctacactg

SEQ ID NO: 3021637 - DNA, 25 bp, Homo sapien
ttcaaagtcttcaccatgtctacac

SEQ ID NO: 3021638 - DNA, 25 bp, Homo sapien
cttcattcctcatgactccatcttt

SEQ ID NO: 3021639 - DNA, 25 bp, Homo sapien
attttcttagctagtttacttgcct

SEQ ID NO: 3021640 - DNA, 25 bp, Homo sapien
ttttcttagctagtttacttgcctg

SEQ ID NO: 3021641 - DNA, 25 bp, Homo sapien
caattttcttagctagtttacttgc

SEQ ID NO: 3021642 - DNA, 25 bp, Homo sapien
cgcattatttcctcaccttcaggga

SEQ ID NO: 3021643 - DNA, 25 bp, Homo sapien
cagggataagttcagtgtcagactc

SEQ ID NO: 3021644 - DNA, 25 bp, Homo sapien
gtcagactctttgtttatcaactca

SEQ ID NO: 3021645 - DNA, 25 bp, Homo sapien
caccttcagggataagttcagtgtc

SEQ ID NO: 3021646 - DNA, 25 bp, Homo sapien
aaaatcgactaaaagcaagtgaccg

SEQ ID NO: 3021647 - DNA, 25 bp, Homo sapien
cagattagccttaggtttcacaggt

SEQ ID NO: 3021648 - DNA, 25 bp, Homo sapien
cattggattcctaggtgcacgggac

SEQ ID NO: 3021649 - DNA, 25 bp, Homo sapien
ggcaaaaccagatgggaggagtccc

SEQ ID NO: 3021650 - DNA, 25 bp, Homo sapien
cttccctggtactctatgtccctgg

SEQ ID NO: 3021651 - DNA, 25 bp, Homo sapien
tgagtgtgaactcaccatctttatc

SEQ ID NO: 3021652 - DNA, 25 bp, Homo sapien
cctggcagacagcatcaattgaaaa

SEQ ID NO: 3021653 - DNA, 25 bp, Homo sapien
gacagcatcaattgaaaatctttcc

SEQ ID NO: 3021654 - DNA, 25 bp, Homo sapien
ttctaatttggggaaccagatgtag

SEQ ID NO: 3021655 - DNA, 25 bp, Homo sapien
gggaaccagatgtagaataaaatca

SEQ ID NO: 3021656 - DNA, 25 bp, Homo sapien
tatttctccaatagactagaagatc

SEQ ID NO: 3021657 - DNA, 25 bp, Homo sapien
ctccaatagactagaagatcccatc

SEQ ID NO: 3021658 - DNA, 25 bp, Homo sapien
atcttctggttgttgggccctccta

SEQ ID NO: 3021659 - DNA, 25 bp, Homo sapien
cagctcctgtagacatgctccgcag

SEQ ID NO: 3021660 - DNA, 25 bp, Homo sapien
cagtatgagtgaagacttgggccca

SEQ ID NO: 3021661 - DNA, 25 bp, Homo sapien
catagcctaagaagtggatgggttc

SEQ ID NO: 3021662 - DNA, 25 bp, Homo sapien
taaccacacctccacgtgtggctag

SEQ ID NO: 3021663 - DNA, 25 bp, Homo sapien
ggtaaccacacctccacgtgtggct

SEQ ID NO: 3021664 - DNA, 25 bp, Homo sapien
cacctccacgtgtggctagctccat

SEQ ID NO: 3021665 - DNA, 25 bp, Homo sapien
agaggtaaccacacctccacgtgtg

SEQ ID NO: 3021666 - DNA, 25 bp, Homo sapien
tatataaactatttattaacaaaca

SEQ ID NO: 3021667 - DNA, 25 bp, Homo sapien
tatttattaacaaacaaggcctaca

SEQ ID NO: 3021668 - DNA, 25 bp, Homo sapien
tttattaacaaacaaggcctacaga

SEQ ID NO: 3021669 - DNA, 25 bp, Homo sapien
ttattaacaaacaaggcctacagac

SEQ ID NO: 3021670 - DNA, 25 bp, Homo sapien
gctcgttgtccagaccgttggccag

SEQ ID NO: 3021671 - DNA, 25 bp, Homo sapien
gagctcgttgtccagaccgttggcc

SEQ ID NO: 3021672 - DNA, 25 bp, Homo sapien
tcgttgtccagaccgttggccagga

SEQ ID NO: 3021673 - DNA, 25 bp, Homo sapien
cagaccgttggccaggacctggtta

SEQ ID NO: 3021674 - DNA, 25 bp, Homo sapien
ggcagcagcacaagcggcggcgtgt

SEQ ID NO: 3021675 - DNA, 25 bp, Homo sapien
agcacaagcggcggcgtgtaggcct

SEQ ID NO: 3021676 - DNA, 25 bp, Homo sapien
agcagcacaagcggcggcgtgtagg

SEQ ID NO: 3021677 - DNA, 25 bp, Homo sapien
gcacaagcggcggcgtgtaggcctc

SEQ ID NO: 3021678 - DNA, 25 bp, Homo sapien
cctctgtagtaatggtgtcccttgt

SEQ ID NO: 3021679 - DNA, 25 bp, Homo sapien
ggtatcatttccaaccccatctgag

SEQ ID NO: 3021680 - DNA, 25 bp, Homo sapien
tgcagacggataagcgaagaattac

SEQ ID NO: 3021681 - DNA, 25 bp, Homo sapien
gatacgtcttatcagttgtggtgcc

SEQ ID NO: 3021682 - DNA, 25 bp, Homo sapien
tatgagaaacacctctggctagagg

SEQ ID NO: 3021683 - DNA, 25 bp, Homo sapien
gctaatccagggaggcaaaactagt

SEQ ID NO: 3021684 - DNA, 25 bp, Homo sapien
caaaactagttgtgcctgcgctctc

SEQ ID NO: 3021685 - DNA, 25 bp, Homo sapien
gagatgaatcagacgcaaagtgact

SEQ ID NO: 3021686 - DNA, 25 bp, Homo sapien
ggacgtactgatgttgatcctgcat

SEQ ID NO: 3021687 - DNA, 25 bp, Homo sapien
gacgtactgatgttgatcctgcatc

SEQ ID NO: 3021688 - DNA, 25 bp, Homo sapien
gcttcatcgcccaggagggctcctt

SEQ ID NO: 3021689 - DNA, 25 bp, Homo sapien
ccaaggccttggtcttagggtgcag

SEQ ID NO: 3021690 - DNA, 25 bp, Homo sapien
ttggaacactaaagcggtcaccttc

SEQ ID NO: 3021691 - DNA, 25 bp, Homo sapien
cagttgcttcgaacttgcttcatcg

SEQ ID NO: 3021692 - DNA, 25 bp, Homo sapien
gaggaaaagtctgttcacaccactt

SEQ ID NO: 3021693 - DNA, 25 bp, Homo sapien
gtaggtgtttccaagcgtcttcagt

SEQ ID NO: 3021694 - DNA, 25 bp, Homo sapien
tgtgacccttggctcctcatactgt

SEQ ID NO: 3021695 - DNA, 25 bp, Homo sapien
aaagtctgtacagggaagtgctggc

SEQ ID NO: 3021696 - DNA, 25 bp, Homo sapien
tatagacgggccctgtaaagacttc

SEQ ID NO: 3021697 - DNA, 25 bp, Homo sapien
caattccagaaaaagacctcgggca

SEQ ID NO: 3021698 - DNA, 25 bp, Homo sapien
aaagtcaagtgcgattagtcagccc

SEQ ID NO: 3021699 - DNA, 25 bp, Homo sapien
aacagcctaggagtgacatgacccc

SEQ ID NO: 3021700 - DNA, 25 bp, Homo sapien
ctccaccctgccactgttccccagg

SEQ ID NO: 3021701 - DNA, 25 bp, Homo sapien
gagtctattatagcccaatcactgt

SEQ ID NO: 3021702 - DNA, 25 bp, Homo sapien
cagcaggcgccagggattacagctg

SEQ ID NO: 3021703 - DNA, 25 bp, Homo sapien
ggccagtgacagagtctattatagc

SEQ ID NO: 3021704 - DNA, 25 bp, Homo sapien
cagcctcttcagctctggattcatt

SEQ ID NO: 3021705 - DNA, 25 bp, Homo sapien
ttcagctctggattcattatcttaa

SEQ ID NO: 3021706 - DNA, 25 bp, Homo sapien
cagctctggattcattatcttaagc

SEQ ID NO: 3021707 - DNA, 25 bp, Homo sapien
gcctcttcagctctggattcattat

SEQ ID NO: 3021708 - DNA, 25 bp, Homo sapien
ccaaacattccccataagcctgtgt

SEQ ID NO: 3021709 - DNA, 25 bp, Homo sapien
ggagacacgacagaaaagcagtgtg

SEQ ID NO: 3021710 - DNA, 25 bp, Homo sapien
tgttgaggcgcatccaccaacccag

SEQ ID NO: 3021711 - DNA, 25 bp, Homo sapien
aaagcaatgcacagaaatcttggag

SEQ ID NO: 3021712 - DNA, 25 bp, Homo sapien
cagccaagtaggataagaacagaga

SEQ ID NO: 3021713 - DNA, 25 bp, Homo sapien
aataataaggcatgagcttggaggc

SEQ ID NO: 3021714 - DNA, 25 bp, Homo sapien
tgatgccggcgatggaggtctggtt

SEQ ID NO: 3021715 - DNA, 25 bp, Homo sapien
catgagcttggaggcgttgctgcta

SEQ ID NO: 3021716 - DNA, 25 bp, Homo sapien
tatgcagcggaaacacacaggagca

SEQ ID NO: 3021717 - DNA, 25 bp, Homo sapien
ccattctgtggatgctccatttcga

SEQ ID NO: 3021718 - DNA, 25 bp, Homo sapien
cctggcttgtgcaggagatctccat

SEQ ID NO: 3021719 - DNA, 25 bp, Homo sapien
tgtggatgctccatttcgagttcag

SEQ ID NO: 3021720 - DNA, 25 bp, Homo sapien
ctctttcatcgaagccattgttagg

SEQ ID NO: 3021721 - DNA, 25 bp, Homo sapien
ggctgcattagtgggaaccaccgat

SEQ ID NO: 3021722 - DNA, 25 bp, Homo sapien
ttaggggctgcattagtgggaacca

SEQ ID NO: 3021723 - DNA, 25 bp, Homo sapien
tctttcatcgaagccattgttaggg

SEQ ID NO: 3021724 - DNA, 25 bp, Homo sapien
tctgaggggattgacgcctgggccc

SEQ ID NO: 3021725 - DNA, 25 bp, Homo sapien
gatgtaaaaatgatggaacaaaggc

SEQ ID NO: 3021726 - DNA, 25 bp, Homo sapien
tctgaacaatccagaggagggtcga

SEQ ID NO: 3021727 - DNA, 25 bp, Homo sapien
aggaggcagcagtatcatatcacag

SEQ ID NO: 3021728 - DNA, 25 bp, Homo sapien
cctgaatcaggagcagggaatgctc

SEQ ID NO: 3021729 - DNA, 25 bp, Homo sapien
catcctgaatcaggagcagggaatg

SEQ ID NO: 3021730 - DNA, 25 bp, Homo sapien
tcctgaatcaggagcagggaatgct

SEQ ID NO: 3021731 - DNA, 25 bp, Homo sapien
gaatcaggagcagggaatgctcccc

SEQ ID NO: 3021732 - DNA, 25 bp, Homo sapien
acatgaggcgccgagatgtgttagg

SEQ ID NO: 3021733 - DNA, 25 bp, Homo sapien
ccccaacaacgtccacttcacaaat

SEQ ID NO: 3021734 - DNA, 25 bp, Homo sapien
aggcgccgagatgtgttaggttttt

SEQ ID NO: 3021735 - DNA, 25 bp, Homo sapien
tctgatggagagcaccccaacaacg

SEQ ID NO: 3021736 - DNA, 25 bp, Homo sapien
catcttgaaggtccttccaggtgtc

SEQ ID NO: 3021737 - DNA, 25 bp, Homo sapien
tctacctggtcccttgaagcatcac

SEQ ID NO: 3021738 - DNA, 25 bp, Homo sapien
tttctcttgcatcttgaaggtcctt

SEQ ID NO: 3021739 - DNA, 25 bp, Homo sapien
gtctgccttctgatcgtctacctgg

SEQ ID NO: 3021740 - DNA, 25 bp, Homo sapien
tctgttccagttacaaaggtgttgc

SEQ ID NO: 3021741 - DNA, 25 bp, Homo sapien
acttgaacagtgtgagcggcagccc

SEQ ID NO: 3021742 - DNA, 25 bp, Homo sapien
agcagctggccgcatccatttagaa

SEQ ID NO: 3021743 - DNA, 25 bp, Homo sapien
tagcgtcttctcttagcagtgcatg

SEQ ID NO: 3021744 - DNA, 25 bp, Homo sapien
ctagatgcaggaatcggatttcaag

SEQ ID NO: 3021745 - DNA, 25 bp, Homo sapien
tgcaggaatcggatttcaagtccaa

SEQ ID NO: 3021746 - DNA, 25 bp, Homo sapien
acatcatcctgctacttccacccgt

SEQ ID NO: 3021747 - DNA, 25 bp, Homo sapien
cctgctacttccacccgtatgaatt

SEQ ID NO: 3021748 - DNA, 25 bp, Homo sapien
ccagccagcctggtaaggatttgag

SEQ ID NO: 3021749 - DNA, 25 bp, Homo sapien
gggaaatttacgacatctaatggtg

SEQ ID NO: 3021750 - DNA, 25 bp, Homo sapien
tcagtctccaggcagcggatttcag

SEQ ID NO: 3021751 - DNA, 25 bp, Homo sapien
atttacgacatctaatggtgcagcc

SEQ ID NO: 3021752 - DNA, 25 bp, Homo sapien
ggcagtcctcaacaggctagcaggt

SEQ ID NO: 3021753 - DNA, 25 bp, Homo sapien
tgtccctgccgaagcaatcatttca

SEQ ID NO: 3021754 - DNA, 25 bp, Homo sapien
cagcaggtgcttattacatgcccca

SEQ ID NO: 3021755 - DNA, 25 bp, Homo sapien
gacctgtctcctggtacagcaggtg

SEQ ID NO: 3021756 - DNA, 25 bp, Homo sapien
gatgagaggcatttctccacggcag

SEQ ID NO: 3021757 - DNA, 25 bp, Homo sapien
cctggcaaaccatagggatgtgctg

SEQ ID NO: 3021758 - DNA, 25 bp, Homo sapien
ggatgtgctgatgccagacctgctg

SEQ ID NO: 3021759 - DNA, 25 bp, Homo sapien
gagtctgatcttagacctgctctgc

SEQ ID NO: 3021760 - DNA, 25 bp, Homo sapien
tttacagcatgatgtgaagccctcc

SEQ ID NO: 3021761 - DNA, 25 bp, Homo sapien
cagcatgatgtgaagccctccccaa

SEQ ID NO: 3021762 - DNA, 25 bp, Homo sapien
tacagcatgatgtgaagccctcccc

SEQ ID NO: 3021763 - DNA, 25 bp, Homo sapien
gtttacagcatgatgtgaagccctc

SEQ ID NO: 3021764 - DNA, 25 bp, Homo sapien
cattgtctgctggaacaggaaaaat

SEQ ID NO: 3021765 - DNA, 25 bp, Homo sapien
caaagttgtcagaggttctgttact

SEQ ID NO: 3021766 - DNA, 25 bp, Homo sapien
ctgcaaagccaaagttgtcagaggt

SEQ ID NO: 3021767 - DNA, 25 bp, Homo sapien
agacattgtctgctggaacaggaaa

SEQ ID NO: 3021768 - DNA, 25 bp, Homo sapien
gacgtggtggttcctctaatgaagt

SEQ ID NO: 3021769 - DNA, 25 bp, Homo sapien
cgtggtggttcctctaatgaagttc

SEQ ID NO: 3021770 - DNA, 25 bp, Homo sapien
tgtctctaaatgccttgggcacagt

SEQ ID NO: 3021771 - DNA, 25 bp, Homo sapien
agtgtctctaaatgccttgggcaca

SEQ ID NO: 3021772 - DNA, 25 bp, Homo sapien
gctgccttttttccgtcgcatgatt

SEQ ID NO: 3021773 - DNA, 25 bp, Homo sapien
gaagaaagtaacctgttgccacaag

SEQ ID NO: 3021774 - DNA, 25 bp, Homo sapien
caagcagaaatcgttcaggtaccag

SEQ ID NO: 3021775 - DNA, 25 bp, Homo sapien
tttttccgtcgcatgattccagaag

SEQ ID NO: 3021776 - DNA, 25 bp, Homo sapien
caagcagagtggaacagagctttgc

SEQ ID NO: 3021777 - DNA, 25 bp, Homo sapien
gagctttgcttgttctctaggaacg

SEQ ID NO: 3021778 - DNA, 25 bp, Homo sapien
tctctaggaacgtgacatctgaaat

SEQ ID NO: 3021779 - DNA, 25 bp, Homo sapien
tggcaagcagagtggaacagagctt

SEQ ID NO: 3021780 - DNA, 25 bp, Homo sapien
tcccctcgggttgcctaactttgca

SEQ ID NO: 3021781 - DNA, 25 bp, Homo sapien
tgcaggtctcacaagtctctatttg

SEQ ID NO: 3021782 - DNA, 25 bp, Homo sapien
tttgctcatctatggaatgggtcga

SEQ ID NO: 3021783 - DNA, 25 bp, Homo sapien
gaatgggtcgatatggaaagcttca

SEQ ID NO: 3021784 - DNA, 25 bp, Homo sapien
ggccccataacctttgctctcaggt

SEQ ID NO: 3021785 - DNA, 25 bp, Homo sapien
gtggttggccacttggagactgtcc

SEQ ID NO: 3021786 - DNA, 25 bp, Homo sapien
cagcattgacatggcggccccataa

SEQ ID NO: 3021787 - DNA, 25 bp, Homo sapien
gttttggagaaagcgctagatgtgc

SEQ ID NO: 3021788 - DNA, 25 bp, Homo sapien
ttgaccatgtcaaacaggtgccact

SEQ ID NO: 3021789 - DNA, 25 bp, Homo sapien
gaccatgtcaaacaggtgccacttc

SEQ ID NO: 3021790 - DNA, 25 bp, Homo sapien
ccatgtcaaacaggtgccacttctc

SEQ ID NO: 3021791 - DNA, 25 bp, Homo sapien
ctttgaccatgtcaaacaggtgcca

SEQ ID NO: 3021792 - DNA, 25 bp, Homo sapien
aggaaacaaaattcactgcatccac

SEQ ID NO: 3021793 - DNA, 25 bp, Homo sapien
ttctcttcacaggaaacaaaattca

SEQ ID NO: 3021794 - DNA, 25 bp, Homo sapien
aaacaaaattcactgcatccaccat

SEQ ID NO: 3021795 - DNA, 25 bp, Homo sapien
tctcttcacaggaaacaaaattcac

SEQ ID NO: 3021796 - DNA, 25 bp, Homo sapien
gctctgataatgtccaccactgttg

SEQ ID NO: 3021797 - DNA, 25 bp, Homo sapien
ttctgactacatgaccaacaaaggt

SEQ ID NO: 3021798 - DNA, 25 bp, Homo sapien
ggactaggtgcacatcctcttagga

SEQ ID NO: 3021799 - DNA, 25 bp, Homo sapien
gtttgactgaaacacctagcacctc

SEQ ID NO: 3021800 - DNA, 25 bp, Homo sapien
ggtcagcttagaataaatgtgtagc

SEQ ID NO: 3021801 - DNA, 25 bp, Homo sapien
tgtagcattgttggtattaaggaca

SEQ ID NO: 3021802 - DNA, 25 bp, Homo sapien
tcccatcccagtttagttgcaagag

SEQ ID NO: 3021803 - DNA, 25 bp, Homo sapien
ttcaggcgaatgaaaggaccaagga

SEQ ID NO: 3021804 - DNA, 25 bp, Homo sapien
agaaaactcgagagacacagatctc

SEQ ID NO: 3021805 - DNA, 25 bp, Homo sapien
gttgctgtacagaaggcagtgacag

SEQ ID NO: 3021806 - DNA, 25 bp, Homo sapien
tattgtcagtgtggtaagaaaactc

SEQ ID NO: 3021807 - DNA, 25 bp, Homo sapien
agtgtccccatcagaggaaaggtga

SEQ ID NO: 3021808 - DNA, 25 bp, Homo sapien
gattgagaaaaaccttcatctggtg

SEQ ID NO: 3021809 - DNA, 25 bp, Homo sapien
aaaggtggactttcctgtgactagc

SEQ ID NO: 3021810 - DNA, 25 bp, Homo sapien
ttctcgggagataccggagatggca

SEQ ID NO: 3021811 - DNA, 25 bp, Homo sapien
gaggaaaacttgagtgatgaggcag

SEQ ID NO: 3021812 - DNA, 25 bp, Homo sapien
catgataaacagtggaatgtatgcc

SEQ ID NO: 3021813 - DNA, 25 bp, Homo sapien
atccaaagcatgataaacagtggaa

SEQ ID NO: 3021814 - DNA, 25 bp, Homo sapien
caaagcatgataaacagtggaatgt

SEQ ID NO: 3021815 - DNA, 25 bp, Homo sapien
taaacagtggaatgtatgccttctt

SEQ ID NO: 3021816 - DNA, 25 bp, Homo sapien
cctgattaggttattgacattggcc

SEQ ID NO: 3021817 - DNA, 25 bp, Homo sapien
caggccctgattaggttattgacat

SEQ ID NO: 3021818 - DNA, 25 bp, Homo sapien
ctggcacttgttggctttggcatcc

SEQ ID NO: 3021819 - DNA, 25 bp, Homo sapien
gatctggcacttgttggctttggca

SEQ ID NO: 3021820 - DNA, 25 bp, Homo sapien
tgtgtctgtggatgcctctcatctc

SEQ ID NO: 3021821 - DNA, 25 bp, Homo sapien
gtgtctgtggatgcctctcatctct

SEQ ID NO: 3021822 - DNA, 25 bp, Homo sapien
gcctgcagatagactaggtgtgtac

SEQ ID NO: 3021823 - DNA, 25 bp, Homo sapien
ggagaaccaaggtgggactaagtca

SEQ ID NO: 3021824 - DNA, 25 bp, Homo sapien
catggggcctgcagatagactaggt

SEQ ID NO: 3021825 - DNA, 25 bp, Homo sapien
tcaggagaaccaaggtgggactaag

SEQ ID NO: 3021826 - DNA, 25 bp, Homo sapien
tgtacatgggaactaagccttcttc

SEQ ID NO: 3021827 - DNA, 25 bp, Homo sapien
ggatgtacatgggaactaagccttc

SEQ ID NO: 3021828 - DNA, 25 bp, Homo sapien
aggacaccaccaccgtagcaatgga

SEQ ID NO: 3021829 - DNA, 25 bp, Homo sapien
gcaatggaggaaccacggagagctc

SEQ ID NO: 3021830 - DNA, 25 bp, Homo sapien
cacttggaggcactgacatgttatc

SEQ ID NO: 3021831 - DNA, 25 bp, Homo sapien
tgagttttatcctgaaaaggcccac

SEQ ID NO: 3021832 - DNA, 25 bp, Homo sapien
tccatcttcgcagaatgccacctga

SEQ ID NO: 3021833 - DNA, 25 bp, Homo sapien
tggatgtccatcttcgcagaatgcc

SEQ ID NO: 3021834 - DNA, 25 bp, Homo sapien
ccaatccgatgatgtaaggaaaact

SEQ ID NO: 3021835 - DNA, 25 bp, Homo sapien
ggaaaactgtgtaccaccactagaa

SEQ ID NO: 3021836 - DNA, 25 bp, Homo sapien
cagaatggcagtccaagtctgcata

SEQ ID NO: 3021837 - DNA, 25 bp, Homo sapien
cagttcccgctgatgttgaccaatc

SEQ ID NO: 3021838 - DNA, 25 bp, Homo sapien
gtgcccactacatcatgattctggc

SEQ ID NO: 3021839 - DNA, 25 bp, Homo sapien
tctgggacgcagatatctgaggctc

SEQ ID NO: 3021840 - DNA, 25 bp, Homo sapien
tctttctacatcaaatagtccagac

SEQ ID NO: 3021841 - DNA, 25 bp, Homo sapien
tatctgaggctctataagattcctc

SEQ ID NO: 3021842 - DNA, 25 bp, Homo sapien
gaaagtatccatccactaaaacgtg

SEQ ID NO: 3021843 - DNA, 25 bp, Homo sapien
ccagttacactgaatatgggcaata

SEQ ID NO: 3021844 - DNA, 25 bp, Homo sapien
tcaccttagtgctcacgtggccatt

SEQ ID NO: 3021845 - DNA, 25 bp, Homo sapien
aaacgtgcacccttaataatgtcct

SEQ ID NO: 3021846 - DNA, 25 bp, Homo sapien
ctctcattattctgcgcaccacttg

SEQ ID NO: 3021847 - DNA, 25 bp, Homo sapien
tctgcgcaccacttgagctgtgcag

SEQ ID NO: 3021848 - DNA, 25 bp, Homo sapien
cattattctgcgcaccacttgagct

SEQ ID NO: 3021849 - DNA, 25 bp, Homo sapien
attctgcgcaccacttgagctgtgc

SEQ ID NO: 3021850 - DNA, 25 bp, Homo sapien
gcaaaatgcttctcgaatggcccac

SEQ ID NO: 3021851 - DNA, 25 bp, Homo sapien
aaaatgcttctcgaatggcccacca

SEQ ID NO: 3021852 - DNA, 25 bp, Homo sapien
tggcccaccagcatgacggcaactg

SEQ ID NO: 3021853 - DNA, 25 bp, Homo sapien
ccaccagcatgacggcaactggagt

SEQ ID NO: 3021854 - DNA, 25 bp, Homo sapien
ggttgagcacctcatctaccccagg

SEQ ID NO: 3021855 - DNA, 25 bp, Homo sapien
accccaggctgaagatgtgacttct

SEQ ID NO: 3021856 - DNA, 25 bp, Homo sapien
ccccaggctgaagatgtgacttctt

SEQ ID NO: 3021857 - DNA, 25 bp, Homo sapien
aagactggttgagcacctcatctac

SEQ ID NO: 3021858 - DNA, 25 bp, Homo sapien
tcagcgagctctacattatgttgaa

SEQ ID NO: 3021859 - DNA, 25 bp, Homo sapien
tcaaattggtgagctggccaccacc

SEQ ID NO: 3021860 - DNA, 25 bp, Homo sapien
caccacctgacacgaatgggctttg

SEQ ID NO: 3021861 - DNA, 25 bp, Homo sapien
tttcattgggacacatgtaaactgt

SEQ ID NO: 3021862 - DNA, 25 bp, Homo sapien
caggaaagtacagaaagggcttctt

SEQ ID NO: 3021863 - DNA, 25 bp, Homo sapien
agtacagaaagggcttcttagccat

SEQ ID NO: 3021864 - DNA, 25 bp, Homo sapien
ctatactcaggaaagtacagaaagg

SEQ ID NO: 3021865 - DNA, 25 bp, Homo sapien
tatactcaggaaagtacagaaaggg

SEQ ID NO: 3021866 - DNA, 25 bp, Homo sapien
tcaaacatcaaataaggctgatttc

SEQ ID NO: 3021867 - DNA, 25 bp, Homo sapien
gggcttattcagttcaaacatcaaa

SEQ ID NO: 3021868 - DNA, 25 bp, Homo sapien
tttaggccttcctccaattgagttg

SEQ ID NO: 3021869 - DNA, 25 bp, Homo sapien
aattgagttgttcaagattcctggg

SEQ ID NO: 3021870 - DNA, 25 bp, Homo sapien
agtccccaatttctgttagctccat

SEQ ID NO: 3021871 - DNA, 25 bp, Homo sapien
ggtagtccccaatttctgttagctc

SEQ ID NO: 3021872 - DNA, 25 bp, Homo sapien
tctccgcatcaaggtagtccccaat

SEQ ID NO: 3021873 - DNA, 25 bp, Homo sapien
tcattctccgcatcaaggtagtccc

SEQ ID NO: 3021874 - DNA, 25 bp, Homo sapien
tttctaaatctgaagtgctaccctg

SEQ ID NO: 3021875 - DNA, 25 bp, Homo sapien
gttaaatccacaatgctgcaaagca

SEQ ID NO: 3021876 - DNA, 25 bp, Homo sapien
aagtgacatgcctcgttgctttccc

SEQ ID NO: 3021877 - DNA, 25 bp, Homo sapien
tgaagtgctaccctgctgcttaaac

SEQ ID NO: 3021878 - DNA, 25 bp, Homo sapien
tcatgattgtgcaaaaacgccgagc

SEQ ID NO: 3021879 - DNA, 25 bp, Homo sapien
agtctcctaagacgtcccaggttgg

SEQ ID NO: 3021880 - DNA, 25 bp, Homo sapien
gatgaggccttcaacggacacacta

SEQ ID NO: 3021881 - DNA, 25 bp, Homo sapien
tgcgggaagagtcacaagcatcatc

SEQ ID NO: 3021882 - DNA, 25 bp, Homo sapien
caaatgaatgtagggtgtcccaggg

SEQ ID NO: 3021883 - DNA, 25 bp, Homo sapien
tccgcacgtacacaacagttctcag

SEQ ID NO: 3021884 - DNA, 25 bp, Homo sapien
cacagtccgcacgtacacaacagtt

SEQ ID NO: 3021885 - DNA, 25 bp, Homo sapien
atttccaaatgaatgtagggtgtcc

SEQ ID NO: 3021886 - DNA, 25 bp, Homo sapien
ggtgcaccttgagaatctccactga

SEQ ID NO: 3021887 - DNA, 25 bp, Homo sapien
ctaaagggttgtggcatgaaaggct

SEQ ID NO: 3021888 - DNA, 25 bp, Homo sapien
catatgcaagagtggctgtttcctg

SEQ ID NO: 3021889 - DNA, 25 bp, Homo sapien
caggtaggtgcaggacaactaaagg

SEQ ID NO: 3021890 - DNA, 25 bp, Homo sapien
gcaggctcagcagagttggaagcca

SEQ ID NO: 3021891 - DNA, 25 bp, Homo sapien
tgttttgagaattacccacgtccag

SEQ ID NO: 3021892 - DNA, 25 bp, Homo sapien
cagcagtgtactgaacaaggttttc

SEQ ID NO: 3021893 - DNA, 25 bp, Homo sapien
caggtaacccctgtttgctcccatt

SEQ ID NO: 3021894 - DNA, 25 bp, Homo sapien
ccaggtaatgaaagtgagtgccagc

SEQ ID NO: 3021895 - DNA, 25 bp, Homo sapien
gctgtaagtaggacaattgctcaac

SEQ ID NO: 3021896 - DNA, 25 bp, Homo sapien
gacaattgctcaacccattctgcta

SEQ ID NO: 3021897 - DNA, 25 bp, Homo sapien
ccattctgctaaccaagttttctca

SEQ ID NO: 3021898 - DNA, 25 bp, Homo sapien
tccctaaataatgccaggggtgcct

SEQ ID NO: 3021899 - DNA, 25 bp, Homo sapien
aggcactgcccggagatactggaga

SEQ ID NO: 3021900 - DNA, 25 bp, Homo sapien
gcccggagatactggagagtatgcc

SEQ ID NO: 3021901 - DNA, 25 bp, Homo sapien
actggagagtatgcccttccagcca

SEQ ID NO: 3021902 - DNA, 25 bp, Homo sapien
gagatactggagagtatgcccttcc

SEQ ID NO: 3021903 - DNA, 25 bp, Homo sapien
ggatcatgctcctttattcaaccaa

SEQ ID NO: 3021904 - DNA, 25 bp, Homo sapien
tctggctccattgcaggatcatgct

SEQ ID NO: 3021905 - DNA, 25 bp, Homo sapien
tcactgtatcctctattccaaagca

SEQ ID NO: 3021906 - DNA, 25 bp, Homo sapien
tggatatccctctggttccctggtt

SEQ ID NO: 3021907 - DNA, 25 bp, Homo sapien
taggatcccgcacagttctgcacag

SEQ ID NO: 3021908 - DNA, 25 bp, Homo sapien
tgcacagactggatactcagtaaat

SEQ ID NO: 3021909 - DNA, 25 bp, Homo sapien
tctggaattctccataggatcccgc

SEQ ID NO: 3021910 - DNA, 25 bp, Homo sapien
gactacagttaattgactggcagtg

SEQ ID NO: 3021911 - DNA, 25 bp, Homo sapien
tgggtccaggttctcgggctggaaa

SEQ ID NO: 3021912 - DNA, 25 bp, Homo sapien
aggttctcgggctggaaacatctgc

SEQ ID NO: 3021913 - DNA, 25 bp, Homo sapien
ggtccaggttctcgggctggaaaca

SEQ ID NO: 3021914 - DNA, 25 bp, Homo sapien
tccaggttctcgggctggaaacatc

SEQ ID NO: 3021915 - DNA, 25 bp, Homo sapien
ataatactgccatactgaattccct

SEQ ID NO: 3021916 - DNA, 25 bp, Homo sapien
gataatactgccatactgaattccc

SEQ ID NO: 3021917 - DNA, 25 bp, Homo sapien
tctaaagctccctgagaagagtcat

SEQ ID NO: 3021918 - DNA, 25 bp, Homo sapien
gtaccttgcagtcctagagtggcca

SEQ ID NO: 3021919 - DNA, 25 bp, Homo sapien
gctcagtctgaagtgtgtctcccgt

SEQ ID NO: 3021920 - DNA, 25 bp, Homo sapien
ttcccgcaaaaattcctcaacagct

SEQ ID NO: 3021921 - DNA, 25 bp, Homo sapien
tccatgtagaatgtaaggctccact

SEQ ID NO: 3021922 - DNA, 25 bp, Homo sapien
gttcccaaggaagcgaagctgtccc

SEQ ID NO: 3021923 - DNA, 25 bp, Homo sapien
caaaatatctatcaatggagggctg

SEQ ID NO: 3021924 - DNA, 25 bp, Homo sapien
tacagatcctcaaggcagacaagtt

SEQ ID NO: 3021925 - DNA, 25 bp, Homo sapien
taaagcttcacacagaggttcgggc

SEQ ID NO: 3021926 - DNA, 25 bp, Homo sapien
cgaagatactccacctgtaagggca

SEQ ID NO: 3021927 - DNA, 25 bp, Homo sapien
cattttgtccgtgtgcgcgtaaagc

SEQ ID NO: 3021928 - DNA, 25 bp, Homo sapien
ttaaggctcaacacgaggctgatgg

SEQ ID NO: 3021929 - DNA, 25 bp, Homo sapien
gatgtaggcgaaaccgtaggagtaa

SEQ ID NO: 3021930 - DNA, 25 bp, Homo sapien
taggagtaatccgagttgagatgcc

SEQ ID NO: 3021931 - DNA, 25 bp, Homo sapien
tgcctcaccgtgtagatggccgcag

SEQ ID NO: 3021932 - DNA, 25 bp, Homo sapien
gatcacatagatgacaccgctgaga

SEQ ID NO: 3021933 - DNA, 25 bp, Homo sapien
tacggaggatgctacccaaatgcag

SEQ ID NO: 3021934 - DNA, 25 bp, Homo sapien
tgaggaggcctttgcatagctgcac

SEQ ID NO: 3021935 - DNA, 25 bp, Homo sapien
tagctgctgctctagatgtaccaag

SEQ ID NO: 3021936 - DNA, 25 bp, Homo sapien
taatgagtgcctattgcatgcgggc

SEQ ID NO: 3021937 - DNA, 25 bp, Homo sapien
aaatgctctatagctatattgatct

SEQ ID NO: 3021938 - DNA, 25 bp, Homo sapien
tttaaatgctctatagctatattga

SEQ ID NO: 3021939 - DNA, 25 bp, Homo sapien
atattgatctttctattaacaaaac

SEQ ID NO: 3021940 - DNA, 25 bp, Homo sapien
gctctatagctatattgatctttct

SEQ ID NO: 3021941 - DNA, 25 bp, Homo sapien
tcaggagtcccctctattctttctg

SEQ ID NO: 3021942 - DNA, 25 bp, Homo sapien
ccacacatttgacttgagtttgatt

SEQ ID NO: 3021943 - DNA, 25 bp, Homo sapien
tctgttcttaatcccggtaaccaca

SEQ ID NO: 3021944 - DNA, 25 bp, Homo sapien
ttaatcccggtaaccacacatttga

SEQ ID NO: 3021945 - DNA, 25 bp, Homo sapien
taatttggcaaaccatggagacccc

SEQ ID NO: 3021946 - DNA, 25 bp, Homo sapien
tccataaagatcacagctgggccca

SEQ ID NO: 3021947 - DNA, 25 bp, Homo sapien
tccggagactacacagagattctag

SEQ ID NO: 3021948 - DNA, 25 bp, Homo sapien
tgggcccaccaagaggaagctgtgc

SEQ ID NO: 3021949 - DNA, 25 bp, Homo sapien
ttcagtttcatgagacgtaagcagc

SEQ ID NO: 3021950 - DNA, 25 bp, Homo sapien
taaatcgcaatacctaggagaagag

SEQ ID NO: 3021951 - DNA, 25 bp, Homo sapien
tgtgactgggtcttatagtacaggc

SEQ ID NO: 3021952 - DNA, 25 bp, Homo sapien
gaaggtactggctatcccaaggagc

SEQ ID NO: 3021953 - DNA, 25 bp, Homo sapien
aacgtgccaaatcataacaaggttt

SEQ ID NO: 3021954 - DNA, 25 bp, Homo sapien
gggtaacgtgccaaatcataacaag

SEQ ID NO: 3021955 - DNA, 25 bp, Homo sapien
gatgggtaacgtgccaaatcataac

SEQ ID NO: 3021956 - DNA, 25 bp, Homo sapien
gtaacgtgccaaatcataacaaggt

SEQ ID NO: 3021957 - DNA, 25 bp, Homo sapien
catacaaccctatttacgtcaacct

SEQ ID NO: 3021958 - DNA, 25 bp, Homo sapien
cctatttacgtcaaccttccaatga

SEQ ID NO: 3021959 - DNA, 25 bp, Homo sapien
tacgtcaaccttccaatgactgctc

SEQ ID NO: 3021960 - DNA, 25 bp, Homo sapien
ctgtgtcttcccatacaaccctatt

SEQ ID NO: 3021961 - DNA, 25 bp, Homo sapien
catattaataacgtatttaaagagg

SEQ ID NO: 3021962 - DNA, 25 bp, Homo sapien
cttgaagacagtttaggcaggagat

SEQ ID NO: 3021963 - DNA, 25 bp, Homo sapien
ggcaggagattaaggagacctctca

SEQ ID NO: 3021964 - DNA, 25 bp, Homo sapien
tgtgttgtcatagccccatgtttgg

SEQ ID NO: 3021965 - DNA, 25 bp, Homo sapien
aatcaaagcccagtagaatctagga

SEQ ID NO: 3021966 - DNA, 25 bp, Homo sapien
gaggatgacaacagtcaatcaaagc

SEQ ID NO: 3021967 - DNA, 25 bp, Homo sapien
acaccagaggatgacaacagtcaat

SEQ ID NO: 3021968 - DNA, 25 bp, Homo sapien
atcaaagcccagtagaatctaggaa

SEQ ID NO: 3021969 - DNA, 25 bp, Homo sapien
taatcattccgcagacttggatgca

SEQ ID NO: 3021970 - DNA, 25 bp, Homo sapien
tggtggaagacacatacctgataac

SEQ ID NO: 3021971 - DNA, 25 bp, Homo sapien
cattcctgttgatacgcctggcttg

SEQ ID NO: 3021972 - DNA, 25 bp, Homo sapien
tagttcttagcacatcagggccatt

SEQ ID NO: 3021973 - DNA, 25 bp, Homo sapien
cagtgatgtaaaacctgcccccctt

SEQ ID NO: 3021974 - DNA, 25 bp, Homo sapien
aacagagacagaatgctgaagatga

SEQ ID NO: 3021975 - DNA, 25 bp, Homo sapien
aatgctgaagatgatcgacaggatc

SEQ ID NO: 3021976 - DNA, 25 bp, Homo sapien
gaagagttggcagaagaacaggaac

SEQ ID NO: 3021977 - DNA, 25 bp, Homo sapien
gtggcctggacagactgcagccatt

SEQ ID NO: 3021978 - DNA, 25 bp, Homo sapien
ggtggcctggacagactgcagccat

SEQ ID NO: 3021979 - DNA, 25 bp, Homo sapien
agacacttggttaggagagctggcc

SEQ ID NO: 3021980 - DNA, 25 bp, Homo sapien
gacacttggttaggagagctggcca

SEQ ID NO: 3021981 - DNA, 25 bp, Homo sapien
ctgggggaaagagacacttggttag

SEQ ID NO: 3021982 - DNA, 25 bp, Homo sapien
acacttggttaggagagctggccat

SEQ ID NO: 3021983 - DNA, 25 bp, Homo sapien
tcttccaagtgccacagaatgctgg

SEQ ID NO: 3021984 - DNA, 25 bp, Homo sapien
cacacatgggacagcttttcaaact

SEQ ID NO: 3021985 - DNA, 25 bp, Homo sapien
cagagcggtgtgtgatcgccaacca

SEQ ID NO: 3021986 - DNA, 25 bp, Homo sapien
caataaacatcgtaaaaggtgccca

SEQ ID NO: 3021987 - DNA, 25 bp, Homo sapien
tttcttcagctaactcagggccttg

SEQ ID NO: 3021988 - DNA, 25 bp, Homo sapien
cacatcactatggaaggaagaggcc

SEQ ID NO: 3021989 - DNA, 25 bp, Homo sapien
gaatgcctggcacttacgtgagctg

SEQ ID NO: 3021990 - DNA, 25 bp, Homo sapien
gtctggactatgaccacaaactcct

SEQ ID NO: 3021991 - DNA, 25 bp, Homo sapien
ccaccaggtgtcagtagcgagtacg

SEQ ID NO: 3021992 - DNA, 25 bp, Homo sapien
tacggagactcccatccggagtgct

SEQ ID NO: 3021993 - DNA, 25 bp, Homo sapien
tcgggctgagtcactacttgtaacc

SEQ ID NO: 3021994 - DNA, 25 bp, Homo sapien
caaagcctgcccttttcgggctgag

SEQ ID NO: 3021995 - DNA, 25 bp, Homo sapien
cagtggtggacatttcctgaggaag

SEQ ID NO: 3021996 - DNA, 25 bp, Homo sapien
gtgatgatgagaaacagtggtggac

SEQ ID NO: 3021997 - DNA, 25 bp, Homo sapien
tgccagagatcagttgcgtgtccat

SEQ ID NO: 3021998 - DNA, 25 bp, Homo sapien
ctacagttctgccagagatcagttg

SEQ ID NO: 3021999 - DNA, 25 bp, Homo sapien
tagatcggctctgaagttacttggc

SEQ ID NO: 3022000 - DNA, 25 bp, Homo sapien
tacttggcttaaatagagacctgcg

SEQ ID NO: 3022001 - DNA, 25 bp, Homo sapien
taaagccgacatgggacctgtgaac

SEQ ID NO: 3022002 - DNA, 25 bp, Homo sapien
gatggcctgttcctaccagtggaag

SEQ ID NO: 3022003 - DNA, 25 bp, Homo sapien
acacagtcctgaaccagcaggagca

SEQ ID NO: 3022004 - DNA, 25 bp, Homo sapien
cttccctgggacgtctgagacttcc

SEQ ID NO: 3022005 - DNA, 25 bp, Homo sapien
tctgcaaataacacagtcctgaacc

SEQ ID NO: 3022006 - DNA, 25 bp, Homo sapien
gacttccaactgtctgcaaataaca

SEQ ID NO: 3022007 - DNA, 25 bp, Homo sapien
ggaggacgatgatactcagcaacag

SEQ ID NO: 3022008 - DNA, 25 bp, Homo sapien
gcgacgtggaggacgatgatactca

SEQ ID NO: 3022009 - DNA, 25 bp, Homo sapien
acgatgatactcagcaacaggagga

SEQ ID NO: 3022010 - DNA, 25 bp, Homo sapien
caccgcgacgtggaggacgatgata

SEQ ID NO: 3022011 - DNA, 25 bp, Homo sapien
ggcggcaagttctgctcagcggagt

SEQ ID NO: 3022012 - DNA, 25 bp, Homo sapien
tctggcggcaagttctgctcagcgg

SEQ ID NO: 3022013 - DNA, 25 bp, Homo sapien
cggcaagttctgctcagcggagttt

SEQ ID NO: 3022014 - DNA, 25 bp, Homo sapien
ctggcggcaagttctgctcagcgga

SEQ ID NO: 3022015 - DNA, 25 bp, Homo sapien
ctgcgaggagagcgctgggcgtgag

SEQ ID NO: 3022016 - DNA, 25 bp, Homo sapien
cgaggagagcgctgggcgtgaggcc

SEQ ID NO: 3022017 - DNA, 25 bp, Homo sapien
gcgaggagagcgctgggcgtgaggc

SEQ ID NO: 3022018 - DNA, 25 bp, Homo sapien
tgcgaggagagcgctgggcgtgagg

SEQ ID NO: 3022019 - DNA, 25 bp, Homo sapien
aaagaatggctcgagagggttgccc

SEQ ID NO: 3022020 - DNA, 25 bp, Homo sapien
tctgccagcgtagaggaacggtcct

SEQ ID NO: 3022021 - DNA, 25 bp, Homo sapien
tctccgcattccgtttgtctccaag

SEQ ID NO: 3022022 - DNA, 25 bp, Homo sapien
gcattctgctcttgcgctagaccca

SEQ ID NO: 3022023 - DNA, 25 bp, Homo sapien
ggacacgaaccccaacaagcctgag

SEQ ID NO: 3022024 - DNA, 25 bp, Homo sapien
gaaccccaacaagcctgagctccgg

SEQ ID NO: 3022025 - DNA, 25 bp, Homo sapien
aggcactcaaagccaggacacgaac

SEQ ID NO: 3022026 - DNA, 25 bp, Homo sapien
aagccaggacacgaaccccaacaag

SEQ ID NO: 3022027 - DNA, 25 bp, Homo sapien
tgcggtgggacaggagcccaggagc

SEQ ID NO: 3022028 - DNA, 25 bp, Homo sapien
ggtgcggtgggacaggagcccagga

SEQ ID NO: 3022029 - DNA, 25 bp, Homo sapien
tgggtgcggtgggacaggagcccag

SEQ ID NO: 3022030 - DNA, 25 bp, Homo sapien
ctgggtgcggtgggacaggagccca

SEQ ID NO: 3022031 - DNA, 25 bp, Homo sapien
ctgttagaggacatgcatggctgtg

SEQ ID NO: 3022032 - DNA, 25 bp, Homo sapien
gcatggctgtgaaagatctggctga

SEQ ID NO: 3022033 - DNA, 25 bp, Homo sapien
tgttagaggacatgcatggctgtga

SEQ ID NO: 3022034 - DNA, 25 bp, Homo sapien
ggacatgcatggctgtgaaagatct

SEQ ID NO: 3022035 - DNA, 25 bp, Homo sapien
acaaactcgggtgcgttggctccgc

SEQ ID NO: 3022036 - DNA, 25 bp, Homo sapien
aacagctgtcccgatcctcagggtg

SEQ ID NO: 3022037 - DNA, 25 bp, Homo sapien
cgggaacaacgccctgtttgcgtcg

SEQ ID NO: 3022038 - DNA, 25 bp, Homo sapien
tgctggcgccgccaaagctgcgctg

SEQ ID NO: 3022039 - DNA, 25 bp, Homo sapien
gtcagccttggctggagtcctggcc

SEQ ID NO: 3022040 - DNA, 25 bp, Homo sapien
ctgcagcagtcgggcttggctgtca

SEQ ID NO: 3022041 - DNA, 25 bp, Homo sapien
aaagtgttcctgcagcagtcgggct

SEQ ID NO: 3022042 - DNA, 25 bp, Homo sapien
gcagtcgggcttggctgtcagcctt

SEQ ID NO: 3022043 - DNA, 25 bp, Homo sapien
tctttgcagccaaatgcaagggatg

SEQ ID NO: 3022044 - DNA, 25 bp, Homo sapien
caagggatgttaaggcaagaccctc

SEQ ID NO: 3022045 - DNA, 25 bp, Homo sapien
agcgtaaccccttcttccaagcaga

SEQ ID NO: 3022046 - DNA, 25 bp, Homo sapien
gacagactaagcctgcagcttccaa

SEQ ID NO: 3022047 - DNA, 25 bp, Homo sapien
gggaagtaaaggaagttatggcata

SEQ ID NO: 3022048 - DNA, 25 bp, Homo sapien
catatttaggttctttgcagcgtac

SEQ ID NO: 3022049 - DNA, 25 bp, Homo sapien
ggaagttatggcatatttaggttct

SEQ ID NO: 3022050 - DNA, 25 bp, Homo sapien
gttatggcatatttaggttctttgc

SEQ ID NO: 3022051 - DNA, 25 bp, Homo sapien
gaggactggtttcattgcatgagtt

SEQ ID NO: 3022052 - DNA, 25 bp, Homo sapien
gctgcaaactctgacacaagaggac

SEQ ID NO: 3022053 - DNA, 25 bp, Homo sapien
cttcctcttgtgttagggatcccca

SEQ ID NO: 3022054 - DNA, 25 bp, Homo sapien
cccttgaaccgcttctagctgcaaa

SEQ ID NO: 3022055 - DNA, 25 bp, Homo sapien
ctccaaaggctacacgacagaggct

SEQ ID NO: 3022056 - DNA, 25 bp, Homo sapien
gtactgccatgatcagctccaaagg

SEQ ID NO: 3022057 - DNA, 25 bp, Homo sapien
gataggagcagtctgattagccctc

SEQ ID NO: 3022058 - DNA, 25 bp, Homo sapien
ggatcaagcctgaagacacgtaaga

SEQ ID NO: 3022059 - DNA, 25 bp, Homo sapien
gttgcagcatctatcccaccaggtg

SEQ ID NO: 3022060 - DNA, 25 bp, Homo sapien
ggctcagtagcatcagttatccgca

SEQ ID NO: 3022061 - DNA, 25 bp, Homo sapien
tatagcataagcactggcagaatcc

SEQ ID NO: 3022062 - DNA, 25 bp, Homo sapien
tccagggactagctagtgaatgcca

SEQ ID NO: 3022063 - DNA, 25 bp, Homo sapien
tttggaagaactgcccagaacccag

SEQ ID NO: 3022064 - DNA, 25 bp, Homo sapien
taaatgagcccacgatggcctctgg

SEQ ID NO: 3022065 - DNA, 25 bp, Homo sapien
gaaacattgggctccacgattctag

SEQ ID NO: 3022066 - DNA, 25 bp, Homo sapien
tctaaccatggaggcgagctgacga

SEQ ID NO: 3022067 - DNA, 25 bp, Homo sapien
aaaacaccatttctgactcatacca

SEQ ID NO: 3022068 - DNA, 25 bp, Homo sapien
tctgcactagtctctgaattgggca

SEQ ID NO: 3022069 - DNA, 25 bp, Homo sapien
tgactcataccacatgctccataga

SEQ ID NO: 3022070 - DNA, 25 bp, Homo sapien
gcactagtctctgaattgggcaaaa

SEQ ID NO: 3022071 - DNA, 25 bp, Homo sapien
acagtcagccttccgtatccaaggg

SEQ ID NO: 3022072 - DNA, 25 bp, Homo sapien
gccctaagcgtatcacacactgttt

SEQ ID NO: 3022073 - DNA, 25 bp, Homo sapien
tcagagtagccatacacagtcagcc

SEQ ID NO: 3022074 - DNA, 25 bp, Homo sapien
tcttgcattcttcagagtagccata

SEQ ID NO: 3022075 - DNA, 25 bp, Homo sapien
cttccaacagccagtcctgccgctc

SEQ ID NO: 3022076 - DNA, 25 bp, Homo sapien
aatcccatttgatcttttccgtgta

SEQ ID NO: 3022077 - DNA, 25 bp, Homo sapien
cccatttgatcttttccgtgtatct

SEQ ID NO: 3022078 - DNA, 25 bp, Homo sapien
tcaaatcccatttgatcttttccgt

SEQ ID NO: 3022079 - DNA, 25 bp, Homo sapien
tcttcagagcctgttgaccaaaatt

SEQ ID NO: 3022080 - DNA, 25 bp, Homo sapien
agagggaggaacacgtgctcttaat

SEQ ID NO: 3022081 - DNA, 25 bp, Homo sapien
gaacacgtgctcttaattccctgaa

SEQ ID NO: 3022082 - DNA, 25 bp, Homo sapien
ttatcaacaagtagcctccaaggtc

SEQ ID NO: 3022083 - DNA, 25 bp, Homo sapien
gtcttctgagtcactaacactagtg

SEQ ID NO: 3022084 - DNA, 25 bp, Homo sapien
catctagaggaatggtgaagagaac

SEQ ID NO: 3022085 - DNA, 25 bp, Homo sapien
attggttctacaggcaaacagggcc

SEQ ID NO: 3022086 - DNA, 25 bp, Homo sapien
agggtcctctctcgggcagcagaag

SEQ ID NO: 3022087 - DNA, 25 bp, Homo sapien
gagcagaatagaggctccctcttta

SEQ ID NO: 3022088 - DNA, 25 bp, Homo sapien
cagggtttcaataacctcaacagca

SEQ ID NO: 3022089 - DNA, 25 bp, Homo sapien
ggtctgcttatttgaggcctgctct

SEQ ID NO: 3022090 - DNA, 25 bp, Homo sapien
tttagtctgggcacacgttcttcag

SEQ ID NO: 3022091 - DNA, 25 bp, Homo sapien
gccccataagcgtttgagcttgcca

SEQ ID NO: 3022092 - DNA, 25 bp, Homo sapien
ttcgcttatatctcctggctggccc

SEQ ID NO: 3022093 - DNA, 25 bp, Homo sapien
cactaaagcgccttgggttgttttg

SEQ ID NO: 3022094 - DNA, 25 bp, Homo sapien
ctatagcttctgagtgttttaacac

SEQ ID NO: 3022095 - DNA, 25 bp, Homo sapien
tctggctcagccttaacttaggggt

SEQ ID NO: 3022096 - DNA, 25 bp, Homo sapien
gtgactatattagcattcggttcaa

SEQ ID NO: 3022097 - DNA, 25 bp, Homo sapien
cagcataatcctttaataagtgact

SEQ ID NO: 3022098 - DNA, 25 bp, Homo sapien
tccatcagcataatcctttaataag

SEQ ID NO: 3022099 - DNA, 25 bp, Homo sapien
gacagccaggtcatactcgagtgtg

SEQ ID NO: 3022100 - DNA, 25 bp, Homo sapien
tctggatggtgtcgtcaacctcgtg

SEQ ID NO: 3022101 - DNA, 25 bp, Homo sapien
cgatgtacagggaattggctttgac

SEQ ID NO: 3022102 - DNA, 25 bp, Homo sapien
gctttgatgtggaccagcgactgca

SEQ ID NO: 3022103 - DNA, 25 bp, Homo sapien
ttcttctaaagcagagaggtgcctc

SEQ ID NO: 3022104 - DNA, 25 bp, Homo sapien
gcttatcctaaataatgagctgtgc

SEQ ID NO: 3022105 - DNA, 25 bp, Homo sapien
ccagttggctgtctaggggcccatg

SEQ ID NO: 3022106 - DNA, 25 bp, Homo sapien
tgaagaggggttctatggaacccac

SEQ ID NO: 3022107 - DNA, 25 bp, Homo sapien
ccttcaggaaggcagtcttgtcctt

SEQ ID NO: 3022108 - DNA, 25 bp, Homo sapien
aatgttcggccgtcttgtgcgctca

SEQ ID NO: 3022109 - DNA, 25 bp, Homo sapien
tgtctcggcacaactcaatgttcgg

SEQ ID NO: 3022110 - DNA, 25 bp, Homo sapien
tgatggattctatggtcatttcagt

SEQ ID NO: 3022111 - DNA, 25 bp, Homo sapien
cagtctcagcaatgcgattggtgaa

SEQ ID NO: 3022112 - DNA, 25 bp, Homo sapien
gcccgttcactctgggagcggagaa

SEQ ID NO: 3022113 - DNA, 25 bp, Homo sapien
ggcagtcacaaccaagaggttttca

SEQ ID NO: 3022114 - DNA, 25 bp, Homo sapien
caatgtcgtctcttagcttagcgga

SEQ ID NO: 3022115 - DNA, 25 bp, Homo sapien
gaagtagccgacaccgtctgatgtg

SEQ ID NO: 3022116 - DNA, 25 bp, Homo sapien
tttgtcgtcgatccggtaagccgtc

SEQ ID NO: 3022117 - DNA, 25 bp, Homo sapien
ctcatgctgggacgctctgttggct

SEQ ID NO: 3022118 - DNA, 25 bp, Homo sapien
gtaagccgtctgtttgtcactcagg

SEQ ID NO: 3022119 - DNA, 25 bp, Homo sapien
ctgcaatacagagtcgggaagtgga

SEQ ID NO: 3022120 - DNA, 25 bp, Homo sapien
tgcaaggacacatgagtgcccttcc

SEQ ID NO: 3022121 - DNA, 25 bp, Homo sapien
caaggacacatgagtgcccttccat

SEQ ID NO: 3022122 - DNA, 25 bp, Homo sapien
gtcgggaagtggagcttcacactca

SEQ ID NO: 3022123 - DNA, 25 bp, Homo sapien
gcaagttgggcaatagccttatcca

SEQ ID NO: 3022124 - DNA, 25 bp, Homo sapien
atagccttatccaaatgtagcttca

SEQ ID NO: 3022125 - DNA, 25 bp, Homo sapien
tgggcaatagccttatccaaatgta

SEQ ID NO: 3022126 - DNA, 25 bp, Homo sapien
ttctttcttgacaacacagaatagt

SEQ ID NO: 3022127 - DNA, 25 bp, Homo sapien
tgaaatgctgaaacgtctctccagc

SEQ ID NO: 3022128 - DNA, 25 bp, Homo sapien
ccagcctgagttctgagcagctgtc

SEQ ID NO: 3022129 - DNA, 25 bp, Homo sapien
ccttagaggagaaccgccttggact

SEQ ID NO: 3022130 - DNA, 25 bp, Homo sapien
caacaaacgtctgaggctggagtat

SEQ ID NO: 3022131 - DNA, 25 bp, Homo sapien
tttcctaccaaggactcaattctca

SEQ ID NO: 3022132 - DNA, 25 bp, Homo sapien
gactcaattctcaccaaggaccaat

SEQ ID NO: 3022133 - DNA, 25 bp, Homo sapien
aggtgtgaccctgcaaagcttgtgc

SEQ ID NO: 3022134 - DNA, 25 bp, Homo sapien
taaaaagaggcgaagaggtgtgacc

SEQ ID NO: 3022135 - DNA, 25 bp, Homo sapien
ctgatacgataatgctttacttata

SEQ ID NO: 3022136 - DNA, 25 bp, Homo sapien
tttatttactcgtttgcattttcat

SEQ ID NO: 3022137 - DNA, 25 bp, Homo sapien
tctttatttactcgtttgcattttc

SEQ ID NO: 3022138 - DNA, 25 bp, Homo sapien
acgataatgctttacttataagtca

SEQ ID NO: 3022139 - DNA, 25 bp, Homo sapien
ctaagctgcctgtgactgatgcatt

SEQ ID NO: 3022140 - DNA, 25 bp, Homo sapien
taagctgcctgtgactgatgcattt

SEQ ID NO: 3022141 - DNA, 25 bp, Homo sapien
agctgcctgtgactgatgcatttcc

SEQ ID NO: 3022142 - DNA, 25 bp, Homo sapien
ctgcctgtgactgatgcatttcccc

SEQ ID NO: 3022143 - DNA, 25 bp, Homo sapien
gtgcttcaacttcatcgtgaactag

SEQ ID NO: 3022144 - DNA, 25 bp, Homo sapien
gaactaggtcgattcccattctctt

SEQ ID NO: 3022145 - DNA, 25 bp, Homo sapien
tcttttctcgatgaaatagacattc

SEQ ID NO: 3022146 - DNA, 25 bp, Homo sapien
tcatcgtgaactaggtcgattccca

SEQ ID NO: 3022147 - DNA, 25 bp, Homo sapien
agtcatccggtgtgtatcttgtgaa

SEQ ID NO: 3022148 - DNA, 25 bp, Homo sapien
tgtcattgacacgttctcccagatt

SEQ ID NO: 3022149 - DNA, 25 bp, Homo sapien
gaatcaggcgagatgtatccactct

SEQ ID NO: 3022150 - DNA, 25 bp, Homo sapien
aattggacctgtaccagtcatccgg

SEQ ID NO: 3022151 - DNA, 25 bp, Homo sapien
actttgtagtatgtgctgggtctcc

SEQ ID NO: 3022152 - DNA, 25 bp, Homo sapien
aaagcggtccctgtagcttgaggcc

SEQ ID NO: 3022153 - DNA, 25 bp, Homo sapien
ggctcaggctatgggtcaaattgga

SEQ ID NO: 3022154 - DNA, 25 bp, Homo sapien
gggaagcatggtattctcggacacc

SEQ ID NO: 3022155 - DNA, 25 bp, Homo sapien
tgccaaaacactatttgtaaatctc

SEQ ID NO: 3022156 - DNA, 25 bp, Homo sapien
ccaaaacactatttgtaaatctctc

SEQ ID NO: 3022157 - DNA, 25 bp, Homo sapien
gccaaaacactatttgtaaatctct

SEQ ID NO: 3022158 - DNA, 25 bp, Homo sapien
gatgccaaaacactatttgtaaatc

SEQ ID NO: 3022159 - DNA, 25 bp, Homo sapien
ctgtgactcagcaattcaatttctt

SEQ ID NO: 3022160 - DNA, 25 bp, Homo sapien
agcaattcaatttcttggtatgtac

SEQ ID NO: 3022161 - DNA, 25 bp, Homo sapien
ctcagcaattcaatttcttggtatg

SEQ ID NO: 3022162 - DNA, 25 bp, Homo sapien
gtgactcagcaattcaatttcttgg

SEQ ID NO: 3022163 - DNA, 25 bp, Homo sapien
tgtcggcggatgcccggcgaggggc

SEQ ID NO: 3022164 - DNA, 25 bp, Homo sapien
cggatgcccggcgaggggcgggaag

SEQ ID NO: 3022165 - DNA, 25 bp, Homo sapien
ctgtcggcggatgcccggcgagggg

SEQ ID NO: 3022166 - DNA, 25 bp, Homo sapien
cggcggatgcccggcgaggggcggg

SEQ ID NO: 3022167 - DNA, 25 bp, Homo sapien
aggaaggggtcgcagcctaccacct

SEQ ID NO: 3022168 - DNA, 25 bp, Homo sapien
tttcctatctgtgacgatagcagcg

SEQ ID NO: 3022169 - DNA, 25 bp, Homo sapien
cctggccccgcctttcctatctgtg

SEQ ID NO: 3022170 - DNA, 25 bp, Homo sapien
cgatagcagcgcctgagggccactc

SEQ ID NO: 3022171 - DNA, 25 bp, Homo sapien
cctataatcctcattactcaaggta

SEQ ID NO: 3022172 - DNA, 25 bp, Homo sapien
tgcaaacatgctcccatttccatgg

SEQ ID NO: 3022173 - DNA, 25 bp, Homo sapien
ttcttaattctatgtgattccttcc

SEQ ID NO: 3022174 - DNA, 25 bp, Homo sapien
cactggagccttcttacattctgaa

SEQ ID NO: 3022175 - DNA, 25 bp, Homo sapien
tcacctcattgagggacctaatttt

SEQ ID NO: 3022176 - DNA, 25 bp, Homo sapien
caagctaggaatcacctcattgagg

SEQ ID NO: 3022177 - DNA, 25 bp, Homo sapien
ggaatcacctcattgagggacctaa

SEQ ID NO: 3022178 - DNA, 25 bp, Homo sapien
tgagggacctaattttctggccatt

SEQ ID NO: 3022179 - DNA, 25 bp, Homo sapien
ggtagaaaaagcagctgaacctcct

SEQ ID NO: 3022180 - DNA, 25 bp, Homo sapien
gaggtagaaaaagcagctgaacctc

SEQ ID NO: 3022181 - DNA, 25 bp, Homo sapien
tagaaaaagcagctgaacctccttt

SEQ ID NO: 3022182 - DNA, 25 bp, Homo sapien
ctgaggtagaaaaagcagctgaacc

SEQ ID NO: 3022183 - DNA, 25 bp, Homo sapien
tcctctcatttgcagcagccaagat

SEQ ID NO: 3022184 - DNA, 25 bp, Homo sapien
gtcttcctctcatttgcagcagcca

SEQ ID NO: 3022185 - DNA, 25 bp, Homo sapien
cttcctctcatttgcagcagccaag

SEQ ID NO: 3022186 - DNA, 25 bp, Homo sapien
ctgtcttcctctcatttgcagcagc

SEQ ID NO: 3022187 - DNA, 25 bp, Homo sapien
acatcctagctttctaccttgaggc

SEQ ID NO: 3022188 - DNA, 25 bp, Homo sapien
tgtgacttgatggcagcccaggaat

SEQ ID NO: 3022189 - DNA, 25 bp, Homo sapien
gaggcaactgattaccattctgtga

SEQ ID NO: 3022190 - DNA, 25 bp, Homo sapien
cagataatggtgacctggctcttcc

SEQ ID NO: 3022191 - DNA, 25 bp, Homo sapien
ttgaagggaaacaaacatgggtcca

SEQ ID NO: 3022192 - DNA, 25 bp, Homo sapien
ccataagatccttgtccaacttgaa

SEQ ID NO: 3022193 - DNA, 25 bp, Homo sapien
acaactgcatgtccatcaccataag

SEQ ID NO: 3022194 - DNA, 25 bp, Homo sapien
tttgacctgtaaggacaactgcatg

SEQ ID NO: 3022195 - DNA, 25 bp, Homo sapien
gatgacagatctaaatactcagaat

SEQ ID NO: 3022196 - DNA, 25 bp, Homo sapien
ttttaaagcaactcccctgttctgc

SEQ ID NO: 3022197 - DNA, 25 bp, Homo sapien
cctaagagctcataagaactgcaga

SEQ ID NO: 3022198 - DNA, 25 bp, Homo sapien
tcaataatggaaccatgcccagccc

SEQ ID NO: 3022199 - DNA, 25 bp, Homo sapien
tggacatctaggctttgctctgaac

SEQ ID NO: 3022200 - DNA, 25 bp, Homo sapien
tttatcaatgtgtggacaagcttct

SEQ ID NO: 3022201 - DNA, 25 bp, Homo sapien
tcctccacaaaaagaggtcccaatg

SEQ ID NO: 3022202 - DNA, 25 bp, Homo sapien
gaggtcccaatgcaaactagatgca

SEQ ID NO: 3022203 - DNA, 25 bp, Homo sapien
ttctggcgccgtgagaggaaacact

SEQ ID NO: 3022204 - DNA, 25 bp, Homo sapien
cacagccatggagtacagagagaca

SEQ ID NO: 3022205 - DNA, 25 bp, Homo sapien
gacacagtccagacagtcgattgta

SEQ ID NO: 3022206 - DNA, 25 bp, Homo sapien
tggcctttgtccgaactcccataaa

SEQ ID NO: 3022207 - DNA, 25 bp, Homo sapien
gctcaaagatatgattcactgtgtc

SEQ ID NO: 3022208 - DNA, 25 bp, Homo sapien
ttggcccagagctcaaagatatgat

SEQ ID NO: 3022209 - DNA, 25 bp, Homo sapien
ctttttggcccagagctcaaagata

SEQ ID NO: 3022210 - DNA, 25 bp, Homo sapien
cagagctcaaagatatgattcactg

SEQ ID NO: 3022211 - DNA, 25 bp, Homo sapien
gctctggtaagccttgtgctgactc

SEQ ID NO: 3022212 - DNA, 25 bp, Homo sapien
ctcagggtcagcgttagagaggaga

SEQ ID NO: 3022213 - DNA, 25 bp, Homo sapien
agcgttagagaggagacagtcgggc

SEQ ID NO: 3022214 - DNA, 25 bp, Homo sapien
tctggtaagccttgtgctgactcgg

SEQ ID NO: 3022215 - DNA, 25 bp, Homo sapien
cagatgctgccatcagaggagttaa

SEQ ID NO: 3022216 - DNA, 25 bp, Homo sapien
ggtggtcccagtttgattgtgcaga

SEQ ID NO: 3022217 - DNA, 25 bp, Homo sapien
gagttaagaagttcctgggacaaca

SEQ ID NO: 3022218 - DNA, 25 bp, Homo sapien
tttgattgtgcagagcttgaatctg

SEQ ID NO: 3022219 - DNA, 25 bp, Homo sapien
gcccaggatatctaggctatagttc

SEQ ID NO: 3022220 - DNA, 25 bp, Homo sapien
tatagttctgggctatgccaattgg

SEQ ID NO: 3022221 - DNA, 25 bp, Homo sapien
tgccaattgggtgtccgcactaaat

SEQ ID NO: 3022222 - DNA, 25 bp, Homo sapien
ggtgtccgcactaaattccacatca

SEQ ID NO: 3022223 - DNA, 25 bp, Homo sapien
cgaccgcagctgagaacgtgtggct

SEQ ID NO: 3022224 - DNA, 25 bp, Homo sapien
cgcagacctgtgccagacggcagcg

SEQ ID NO: 3022225 - DNA, 25 bp, Homo sapien
cagttcatggtgtctcctcagccac

SEQ ID NO: 3022226 - DNA, 25 bp, Homo sapien
tggctgcccgtatgattctgctcag

SEQ ID NO: 3022227 - DNA, 25 bp, Homo sapien
tcaagtatgtccagatttagtgaat

SEQ ID NO: 3022228 - DNA, 25 bp, Homo sapien
tgaagaggccctccagattcacgga

SEQ ID NO: 3022229 - DNA, 25 bp, Homo sapien
gattcacggacaccctcattagtga

SEQ ID NO: 3022230 - DNA, 25 bp, Homo sapien
cagctggccgttagatgtaggactt

SEQ ID NO: 3022231 - DNA, 25 bp, Homo sapien
cctccagaaaaccttcagtgaagac

SEQ ID NO: 3022232 - DNA, 25 bp, Homo sapien
cagaaaaccttcagtgaagacaggc

SEQ ID NO: 3022233 - DNA, 25 bp, Homo sapien
ctcctcctccagaaaaccttcagtg

SEQ ID NO: 3022234 - DNA, 25 bp, Homo sapien
gaaaaccttcagtgaagacaggcat

SEQ ID NO: 3022235 - DNA, 25 bp, Homo sapien
tccccagaactcaggcttggtgatt

SEQ ID NO: 3022236 - DNA, 25 bp, Homo sapien
ttctgccctcatctgaggaatttgc

SEQ ID NO: 3022237 - DNA, 25 bp, Homo sapien
gaatttgcagaaattccccagaact

SEQ ID NO: 3022238 - DNA, 25 bp, Homo sapien
ttgcagctgtccaggccattctgcc

SEQ ID NO: 3022239 - DNA, 25 bp, Homo sapien
ctgcttgaaggtggacatgtgtgtc

SEQ ID NO: 3022240 - DNA, 25 bp, Homo sapien
ccgtgatttcaaggtcgtaactgct

SEQ ID NO: 3022241 - DNA, 25 bp, Homo sapien
gcttgaaggtggacatgtgtgtcta

SEQ ID NO: 3022242 - DNA, 25 bp, Homo sapien
aggtcgtaactgctgcttgaaggtg

SEQ ID NO: 3022243 - DNA, 25 bp, Homo sapien
ggtgcatcagaagtgacggttccca

SEQ ID NO: 3022244 - DNA, 25 bp, Homo sapien
tgcaggtccccttttactattccag

SEQ ID NO: 3022245 - DNA, 25 bp, Homo sapien
cagaagtgacggttcccatgagcat

SEQ ID NO: 3022246 - DNA, 25 bp, Homo sapien
catcagaagtgacggttcccatgag

SEQ ID NO: 3022247 - DNA, 25 bp, Homo sapien
gagactgggcctttgctaatttaca

SEQ ID NO: 3022248 - DNA, 25 bp, Homo sapien
ccatccaagtgcaaggactcctgga

SEQ ID NO: 3022249 - DNA, 25 bp, Homo sapien
gatgtcttgaaagtccgcgggagcc

SEQ ID NO: 3022250 - DNA, 25 bp, Homo sapien
ttagtgaagtaacccaaaagctgct

SEQ ID NO: 3022251 - DNA, 25 bp, Homo sapien
gacgccccagtacctccaggattaa

SEQ ID NO: 3022252 - DNA, 25 bp, Homo sapien
gactgaacaagtcgtgcaacagaaa

SEQ ID NO: 3022253 - DNA, 25 bp, Homo sapien
ggcaaagtaaggtgcaggacgcccc

SEQ ID NO: 3022254 - DNA, 25 bp, Homo sapien
tctatgatcaagaaaagagggaacc

SEQ ID NO: 3022255 - DNA, 25 bp, Homo sapien
gacagagtgaggagtactatggcta

SEQ ID NO: 3022256 - DNA, 25 bp, Homo sapien
atagaacgagggcaaggtcacggtt

SEQ ID NO: 3022257 - DNA, 25 bp, Homo sapien
gaaatctggccacgccagtagggag

SEQ ID NO: 3022258 - DNA, 25 bp, Homo sapien
ctatggctataaccaaagaggttgg

SEQ ID NO: 3022259 - DNA, 25 bp, Homo sapien
caagttccaatctcgaaagggctct

SEQ ID NO: 3022260 - DNA, 25 bp, Homo sapien
cagcagggttgtcatgggtaacacc

SEQ ID NO: 3022261 - DNA, 25 bp, Homo sapien
tctaatcaactagggagcataggcc

SEQ ID NO: 3022262 - DNA, 25 bp, Homo sapien
tataacggcaaacacagctgacctc

SEQ ID NO: 3022263 - DNA, 25 bp, Homo sapien
tcctcatgagcaaagctggtcctgc

SEQ ID NO: 3022264 - DNA, 25 bp, Homo sapien
cagctcgggcttaagcagagttccc

SEQ ID NO: 3022265 - DNA, 25 bp, Homo sapien
gccctggctgctcgtgatgaacttc

SEQ ID NO: 3022266 - DNA, 25 bp, Homo sapien
tgaatcattgatcgccacgcacatg

SEQ ID NO: 3022267 - DNA, 25 bp, Homo sapien
gaagtaggaagtggccccttgctca

SEQ ID NO: 3022268 - DNA, 25 bp, Homo sapien
ggtcagcctgtcataattggatccc

SEQ ID NO: 3022269 - DNA, 25 bp, Homo sapien
gacccttgaatggagaacatgcctt

SEQ ID NO: 3022270 - DNA, 25 bp, Homo sapien
cagaaactcaggtaaggtcagcctt

SEQ ID NO: 3022271 - DNA, 25 bp, Homo sapien
tcgagggcacgcatgcattccagtt

SEQ ID NO: 3022272 - DNA, 25 bp, Homo sapien
aggtataggtgacataggccggcca

SEQ ID NO: 3022273 - DNA, 25 bp, Homo sapien
ccttttcggctgaatgacgctggaa

SEQ ID NO: 3022274 - DNA, 25 bp, Homo sapien
cagtagcgaactgtagggagcatcc

SEQ ID NO: 3022275 - DNA, 25 bp, Homo sapien
aagcacagactgttcacccttgcct

SEQ ID NO: 3022276 - DNA, 25 bp, Homo sapien
gatcttgtgggatagggcatttgca

SEQ ID NO: 3022277 - DNA, 25 bp, Homo sapien
gcctcctccaagcaaatgtaagatc

SEQ ID NO: 3022278 - DNA, 25 bp, Homo sapien
tctggcagagtccaaattcaaacgc

SEQ ID NO: 3022279 - DNA, 25 bp, Homo sapien
aatgagcagcaaccccgttccatct

SEQ ID NO: 3022280 - DNA, 25 bp, Homo sapien
ctggagcaaaatgagcagcaacccc

SEQ ID NO: 3022281 - DNA, 25 bp, Homo sapien
aaaatgagcagcaaccccgttccat

SEQ ID NO: 3022282 - DNA, 25 bp, Homo sapien
gagcaaaatgagcagcaaccccgtt

SEQ ID NO: 3022283 - DNA, 25 bp, Homo sapien
taatatttactgatttcttaacatc

SEQ ID NO: 3022284 - DNA, 25 bp, Homo sapien
ttcttaacatcacaggttcagattc

SEQ ID NO: 3022285 - DNA, 25 bp, Homo sapien
tgatttcttaacatcacaggttcag

SEQ ID NO: 3022286 - DNA, 25 bp, Homo sapien
tatttactgatttcttaacatcaca

SEQ ID NO: 3022287 - DNA, 25 bp, Homo sapien
taggacaagtctacgaatggtgggt

SEQ ID NO: 3022288 - DNA, 25 bp, Homo sapien
gtggctgataggacaagtctacgaa

SEQ ID NO: 3022289 - DNA, 25 bp, Homo sapien
tttttctcgtacctgctgaagcagg

SEQ ID NO: 3022290 - DNA, 25 bp, Homo sapien
tttctcgtacctgctgaagcaggaa

SEQ ID NO: 3022291 - DNA, 25 bp, Homo sapien
gtggcacgatcgtagctcaccgcag

SEQ ID NO: 3022292 - DNA, 25 bp, Homo sapien
gtagtggcacgatcgtagctcaccg

SEQ ID NO: 3022293 - DNA, 25 bp, Homo sapien
tagtggcacgatcgtagctcaccgc

SEQ ID NO: 3022294 - DNA, 25 bp, Homo sapien
gtgtagtggcacgatcgtagctcac

SEQ ID NO: 3022295 - DNA, 25 bp, Homo sapien
gcaatcagactgctaacattctaga

SEQ ID NO: 3022296 - DNA, 25 bp, Homo sapien
ctattttgcctgatctcaagttcct

SEQ ID NO: 3022297 - DNA, 25 bp, Homo sapien
tgccatgtctgctgcgagaatgaag

SEQ ID NO: 3022298 - DNA, 25 bp, Homo sapien
ggtgtgaatcataacacctagccca

SEQ ID NO: 3022299 - DNA, 25 bp, Homo sapien
tccactggaaacaagacctgtgttc

SEQ ID NO: 3022300 - DNA, 25 bp, Homo sapien
gagccatccctaagtgtcttgcctg

SEQ ID NO: 3022301 - DNA, 25 bp, Homo sapien
tgctcagggtataacagggtcttca

SEQ ID NO: 3022302 - DNA, 25 bp, Homo sapien
gaggatagaatgatgaacttgctca

SEQ ID NO: 3022303 - DNA, 25 bp, Homo sapien
gaattgcccagttcaaacatctaac

SEQ ID NO: 3022304 - DNA, 25 bp, Homo sapien
ttttcatggttcaaacaaactcttg

SEQ ID NO: 3022305 - DNA, 25 bp, Homo sapien
gcatcatcattcatcgaattgccca

SEQ ID NO: 3022306 - DNA, 25 bp, Homo sapien
ggcaatcagttttgtggctctacat

SEQ ID NO: 3022307 - DNA, 25 bp, Homo sapien
tgttctgatatcttgccttcctctt

SEQ ID NO: 3022308 - DNA, 25 bp, Homo sapien
ccagctgaaaactctctcttaaagt

SEQ ID NO: 3022309 - DNA, 25 bp, Homo sapien
cagctgaaaactctctcttaaagtt

SEQ ID NO: 3022310 - DNA, 25 bp, Homo sapien
cattcatgaagatgcaggcctgaac

SEQ ID NO: 3022311 - DNA, 25 bp, Homo sapien
tcccagcaggccgtgaaagagtcac

SEQ ID NO: 3022312 - DNA, 25 bp, Homo sapien
caaaggccgctgaacttgtgaaagc

SEQ ID NO: 3022313 - DNA, 25 bp, Homo sapien
aagatgaccacttggccaccagaag

SEQ ID NO: 3022314 - DNA, 25 bp, Homo sapien
tgcacgctcttatatccaatccctg

SEQ ID NO: 3022315 - DNA, 25 bp, Homo sapien
catgctgccatacggaatgatctcc

SEQ ID NO: 3022316 - DNA, 25 bp, Homo sapien
aaagtgtgtttctagccatgggctc

SEQ ID NO: 3022317 - DNA, 25 bp, Homo sapien
taaagagatgcaccaaccaatgagg

SEQ ID NO: 3022318 - DNA, 25 bp, Homo sapien
tcagccctgagtgtacaatagaatc

SEQ ID NO: 3022319 - DNA, 25 bp, Homo sapien
tatagacatacctgagctcaagccc

SEQ ID NO: 3022320 - DNA, 25 bp, Homo sapien
gcttaagtagagtggtcagccctga

SEQ ID NO: 3022321 - DNA, 25 bp, Homo sapien
gaatcacctggctgtcattatagac

SEQ ID NO: 3022322 - DNA, 25 bp, Homo sapien
cagcaatgcagtcctcaaacacgga

SEQ ID NO: 3022323 - DNA, 25 bp, Homo sapien
acaagcagttactctggcccagacg

SEQ ID NO: 3022324 - DNA, 25 bp, Homo sapien
tccagccaggaatgtaaagtcccct

SEQ ID NO: 3022325 - DNA, 25 bp, Homo sapien
tactatgtgctggaccctagaccaa

SEQ ID NO: 3022326 - DNA, 25 bp, Homo sapien
ttttcttcatagttctctataatct

SEQ ID NO: 3022327 - DNA, 25 bp, Homo sapien
tctataatcttcagagagaggtgca

SEQ ID NO: 3022328 - DNA, 25 bp, Homo sapien
gttctctataatcttcagagagagg

SEQ ID NO: 3022329 - DNA, 25 bp, Homo sapien
ccttttcttcatagttctctataat

SEQ ID NO: 3022330 - DNA, 25 bp, Homo sapien
aggccaggcagaaaacacctgtgtt

SEQ ID NO: 3022331 - DNA, 25 bp, Homo sapien
aaaaaggccaggcagaaaacacctg

SEQ ID NO: 3022332 - DNA, 25 bp, Homo sapien
gccaggcagaaaacacctgtgtttc

SEQ ID NO: 3022333 - DNA, 25 bp, Homo sapien
caggcagaaaacacctgtgtttcag

SEQ ID NO: 3022334 - DNA, 25 bp, Homo sapien
ggagctcccgtgtcagcggagccat

SEQ ID NO: 3022335 - DNA, 25 bp, Homo sapien
cctgaattcattctcgctctggagc

SEQ ID NO: 3022336 - DNA, 25 bp, Homo sapien
tgagccctgagtatctccattcagt

SEQ ID NO: 3022337 - DNA, 25 bp, Homo sapien
ccatgggcccctattttgtggctca

SEQ ID NO: 3022338 - DNA, 25 bp, Homo sapien
agtgtttccggaagccatgatgcta

SEQ ID NO: 3022339 - DNA, 25 bp, Homo sapien
atgatgctaatcatgtctgtttctg

SEQ ID NO: 3022340 - DNA, 25 bp, Homo sapien
catgatgctaatcatgtctgtttct

SEQ ID NO: 3022341 - DNA, 25 bp, Homo sapien
tttccggaagccatgatgctaatca

SEQ ID NO: 3022342 - DNA, 25 bp, Homo sapien
tctcaggaacgcaaaaggaggtagg

SEQ ID NO: 3022343 - DNA, 25 bp, Homo sapien
tgatcaaaccaggtagtccaccggc

SEQ ID NO: 3022344 - DNA, 25 bp, Homo sapien
gaggaacacaaaggccacgagaggt

SEQ ID NO: 3022345 - DNA, 25 bp, Homo sapien
gtaggaaacgaacaggcaattggcc

SEQ ID NO: 3022346 - DNA, 25 bp, Homo sapien
gcagtttatgagaaaggcaacacaa

SEQ ID NO: 3022347 - DNA, 25 bp, Homo sapien
tccagagcctacagggatatccagc

SEQ ID NO: 3022348 - DNA, 25 bp, Homo sapien
gatattcgcaaactccaaaagtagc

SEQ ID NO: 3022349 - DNA, 25 bp, Homo sapien
taatcctagctgatacaacacaggt

SEQ ID NO: 3022350 - DNA, 25 bp, Homo sapien
gtaatataatggtataggccaggtg

SEQ ID NO: 3022351 - DNA, 25 bp, Homo sapien
taatataatggtataggccaggtgc

SEQ ID NO: 3022352 - DNA, 25 bp, Homo sapien
tagtaatataatggtataggccagg

SEQ ID NO: 3022353 - DNA, 25 bp, Homo sapien
atagtaatataatggtataggccag

SEQ ID NO: 3022354 - DNA, 25 bp, Homo sapien
ctgagtgatgggtatgtagatgttc

SEQ ID NO: 3022355 - DNA, 25 bp, Homo sapien
aaacaaaaccacttgtctgagccct

SEQ ID NO: 3022356 - DNA, 25 bp, Homo sapien
accagtctctctattcttgtgtatg

SEQ ID NO: 3022357 - DNA, 25 bp, Homo sapien
tcatcccttgtgaataatggaaggg

SEQ ID NO: 3022358 - DNA, 25 bp, Homo sapien
ttttgacacacttataccgtatcgg

SEQ ID NO: 3022359 - DNA, 25 bp, Homo sapien
gatctaggctccagattacaatccc

SEQ ID NO: 3022360 - DNA, 25 bp, Homo sapien
gggcacagaactcaagcaacattaa

SEQ ID NO: 3022361 - DNA, 25 bp, Homo sapien
tatcagtgggcaggcaacatgccaa

SEQ ID NO: 3022362 - DNA, 25 bp, Homo sapien
tattttgagtcacaacacccggcct

SEQ ID NO: 3022363 - DNA, 25 bp, Homo sapien
gcacaccattatgtctagccattta

SEQ ID NO: 3022364 - DNA, 25 bp, Homo sapien
catctgggcaagctcatgtgaaagt

SEQ ID NO: 3022365 - DNA, 25 bp, Homo sapien
tgcccacattgtaaccactattaaa

SEQ ID NO: 3022366 - DNA, 25 bp, Homo sapien
tgccctctaagaccagacaatagcg

SEQ ID NO: 3022367 - DNA, 25 bp, Homo sapien
accacagtggtgatgctacaaagca

SEQ ID NO: 3022368 - DNA, 25 bp, Homo sapien
aaaactcgctttgctcgggttccag

SEQ ID NO: 3022369 - DNA, 25 bp, Homo sapien
ttccagatttgtgccatgatgtccc

SEQ ID NO: 3022370 - DNA, 25 bp, Homo sapien
tggctggtaactcaagctggtaact

SEQ ID NO: 3022371 - DNA, 25 bp, Homo sapien
ggctccccctactatgcagacagaa

SEQ ID NO: 3022372 - DNA, 25 bp, Homo sapien
catgcactgcaatgctgccacagtg

SEQ ID NO: 3022373 - DNA, 25 bp, Homo sapien
ctactaagtggctaagaggtgcaat

SEQ ID NO: 3022374 - DNA, 25 bp, Homo sapien
gcccatggtggtggtatacgctccc

SEQ ID NO: 3022375 - DNA, 25 bp, Homo sapien
catccaaacatcaccctgtcacttg

SEQ ID NO: 3022376 - DNA, 25 bp, Homo sapien
tggtggtatacgctccccaatcact

SEQ ID NO: 3022377 - DNA, 25 bp, Homo sapien
tccccaatcactttcttgcttcatg

SEQ ID NO: 3022378 - DNA, 25 bp, Homo sapien
agtcatctgagcattcgtcacaggg

SEQ ID NO: 3022379 - DNA, 25 bp, Homo sapien
tcttcctggacattcgggagcttct

SEQ ID NO: 3022380 - DNA, 25 bp, Homo sapien
caatggctccattcgtcctgtgggc

SEQ ID NO: 3022381 - DNA, 25 bp, Homo sapien
tcaggcgaggaaaggcacagatgtc

SEQ ID NO: 3022382 - DNA, 25 bp, Homo sapien
gccctgggagcaccaatctttgtca

SEQ ID NO: 3022383 - DNA, 25 bp, Homo sapien
tcttacatgggtgtgaaaaccacca

SEQ ID NO: 3022384 - DNA, 25 bp, Homo sapien
gagactcacagggatccagaaacct

SEQ ID NO: 3022385 - DNA, 25 bp, Homo sapien
tttgtgcagctaaaccccacagggc

SEQ ID NO: 3022386 - DNA, 25 bp, Homo sapien
tagagagggcgttggccccttgcat

SEQ ID NO: 3022387 - DNA, 25 bp, Homo sapien
aaaggcagtcatgtggtcccagcaa

SEQ ID NO: 3022388 - DNA, 25 bp, Homo sapien
catttgaggatgcaggatctttcca

SEQ ID NO: 3022389 - DNA, 25 bp, Homo sapien
gaagattaggcatagactgaccctg

SEQ ID NO: 3022390 - DNA, 25 bp, Homo sapien
aatttgtattggaagtaatgggcag

SEQ ID NO: 3022391 - DNA, 25 bp, Homo sapien
aactgtcccacatatcaacccacca

SEQ ID NO: 3022392 - DNA, 25 bp, Homo sapien
catgttaccacctgttttaaccaat

SEQ ID NO: 3022393 - DNA, 25 bp, Homo sapien
tgtcccacatatcaacccaccatgt

SEQ ID NO: 3022394 - DNA, 25 bp, Homo sapien
tatttgacccaacgactcacggagg

SEQ ID NO: 3022395 - DNA, 25 bp, Homo sapien
ggactaatggccactcctcagagag

SEQ ID NO: 3022396 - DNA, 25 bp, Homo sapien
cagccagcggtagtgcgactgaagt

SEQ ID NO: 3022397 - DNA, 25 bp, Homo sapien
tggccacaatatgcactcaggagct

SEQ ID NO: 3022398 - DNA, 25 bp, Homo sapien
tgttacctctcagtgggcagagctg

SEQ ID NO: 3022399 - DNA, 25 bp, Homo sapien
gcactaagtagtaaaactggtcaac

SEQ ID NO: 3022400 - DNA, 25 bp, Homo sapien
tccttcaacggtataatcactcagc

SEQ ID NO: 3022401 - DNA, 25 bp, Homo sapien
tcttagtcacgaaggtgccctctgg

SEQ ID NO: 3022402 - DNA, 25 bp, Homo sapien
tgggggggcacaagagggtgattga

SEQ ID NO: 3022403 - DNA, 25 bp, Homo sapien
gggcacaagagggtgattgaaaaaa

SEQ ID NO: 3022404 - DNA, 25 bp, Homo sapien
acagataatttctggaattggatct

SEQ ID NO: 3022405 - DNA, 25 bp, Homo sapien
tggaattggatctgttaagccttac

SEQ ID NO: 3022406 - DNA, 25 bp, Homo sapien
tcgtcctcgcctaggagggaccgtg

SEQ ID NO: 3022407 - DNA, 25 bp, Homo sapien
cctcggaagtaagggcctgtcattc

SEQ ID NO: 3022408 - DNA, 25 bp, Homo sapien
cctcttcgtcctcgcctaggaggga

SEQ ID NO: 3022409 - DNA, 25 bp, Homo sapien
tgtcattctgtaaagggacgcagcc

SEQ ID NO: 3022410 - DNA, 25 bp, Homo sapien
catccttcctcggggccgcatggcc

SEQ ID NO: 3022411 - DNA, 25 bp, Homo sapien
gcatccttcctcggggccgcatggc

SEQ ID NO: 3022412 - DNA, 25 bp, Homo sapien
cgcatccttcctcggggccgcatgg

SEQ ID NO: 3022413 - DNA, 25 bp, Homo sapien
agcggacgcttgcagggaccacgct

SEQ ID NO: 3022414 - DNA, 25 bp, Homo sapien
tgccccacaaagcaggcgtgctggg

SEQ ID NO: 3022415 - DNA, 25 bp, Homo sapien
caggaaagcggacgcttgcagggac

SEQ ID NO: 3022416 - DNA, 25 bp, Homo sapien
ggagcttcagatttgtgggttgttt

SEQ ID NO: 3022417 - DNA, 25 bp, Homo sapien
tgaaacttcctcgagggatggcccg

SEQ ID NO: 3022418 - DNA, 25 bp, Homo sapien
tttccagtaaagagctcgatccgtg

SEQ ID NO: 3022419 - DNA, 25 bp, Homo sapien
tcgatccgtgatcctcgtgaaagaa

SEQ ID NO: 3022420 - DNA, 25 bp, Homo sapien
cagatgaaattttggcccgggctca

SEQ ID NO: 3022421 - DNA, 25 bp, Homo sapien
tagcatgcaggccaccgaagttcta

SEQ ID NO: 3022422 - DNA, 25 bp, Homo sapien
tgttggaacacggtgcagaaccctc

SEQ ID NO: 3022423 - DNA, 25 bp, Homo sapien
gaacgcctcagtgcttagacatgaa

SEQ ID NO: 3022424 - DNA, 25 bp, Homo sapien
ggagcctaggcctgaataatgggaa

SEQ ID NO: 3022425 - DNA, 25 bp, Homo sapien
agccactgtgctccacggaggatga

SEQ ID NO: 3022426 - DNA, 25 bp, Homo sapien
cttggaaggtactttccattgatct

SEQ ID NO: 3022427 - DNA, 25 bp, Homo sapien
aacttggaaggtactttccattgat

SEQ ID NO: 3022428 - DNA, 25 bp, Homo sapien
acttggaaggtactttccattgatc

SEQ ID NO: 3022429 - DNA, 25 bp, Homo sapien
ccaataaaaccgctgtttatttgag

SEQ ID NO: 3022430 - DNA, 25 bp, Homo sapien
gtttatttgagtcagcatcatgcac

SEQ ID NO: 3022431 - DNA, 25 bp, Homo sapien
cacacagacccacagttatatactg

SEQ ID NO: 3022432 - DNA, 25 bp, Homo sapien
tgattacacattcaacgcatgtgtg

SEQ ID NO: 3022433 - DNA, 25 bp, Homo sapien
acatcgccatcaacggggagccctt

SEQ ID NO: 3022434 - DNA, 25 bp, Homo sapien
tcttcaacatcgccatcaacgggga

SEQ ID NO: 3022435 - DNA, 25 bp, Homo sapien
tcaacatcgccatcaacggggagcc

SEQ ID NO: 3022436 - DNA, 25 bp, Homo sapien
catcgccatcaacggggagcccttg

SEQ ID NO: 3022437 - DNA, 25 bp, Homo sapien
ttgcaaacaagattccaaagacggc

SEQ ID NO: 3022438 - DNA, 25 bp, Homo sapien
aacaagattccaaagacggcagaaa

SEQ ID NO: 3022439 - DNA, 25 bp, Homo sapien
acggcagaaaactttcatgctctaa

SEQ ID NO: 3022440 - DNA, 25 bp, Homo sapien
gacggcagaaaactttcatgctcta

SEQ ID NO: 3022441 - DNA, 25 bp, Homo sapien
aatgaatgacatgtggtggccagct

SEQ ID NO: 3022442 - DNA, 25 bp, Homo sapien
taagacataccctgatttcggagac

SEQ ID NO: 3022443 - DNA, 25 bp, Homo sapien
gagacccgagggactaagacttgag

SEQ ID NO: 3022444 - DNA, 25 bp, Homo sapien
tatcaacacaagacgtacaagcggc

SEQ ID NO: 3022445 - DNA, 25 bp, Homo sapien
agtcagactgaattaaggcctaccc

SEQ ID NO: 3022446 - DNA, 25 bp, Homo sapien
ctgaattaaggcctacccatatgac

SEQ ID NO: 3022447 - DNA, 25 bp, Homo sapien
ttaatcatgtctttaaaggtcctgt

SEQ ID NO: 3022448 - DNA, 25 bp, Homo sapien
taatcatgtctttaaaggtcctgtc

SEQ ID NO: 3022449 - DNA, 25 bp, Homo sapien
aagatgagaattccccccacttgat

SEQ ID NO: 3022450 - DNA, 25 bp, Homo sapien
cacggtttcaatggagttatgatca

SEQ ID NO: 3022451 - DNA, 25 bp, Homo sapien
ggcagagcttttttggtacttaaca

SEQ ID NO: 3022452 - DNA, 25 bp, Homo sapien
gagacatacaatgttcatggatcag

SEQ ID NO: 3022453 - DNA, 25 bp, Homo sapien
ggtgggacatacattatatctgctc

SEQ ID NO: 3022454 - DNA, 25 bp, Homo sapien
caagtcacgtggttaagctaaaaga

SEQ ID NO: 3022455 - DNA, 25 bp, Homo sapien
aatgaatcatggcacaggcaggaag

SEQ ID NO: 3022456 - DNA, 25 bp, Homo sapien
ttctaatcaccaaaacaagtcacgt

SEQ ID NO: 3022457 - DNA, 25 bp, Homo sapien
gaacttggtatttgacagaatggca

SEQ ID NO: 3022458 - DNA, 25 bp, Homo sapien
cttatataagtcaaaacactcctgg

SEQ ID NO: 3022459 - DNA, 25 bp, Homo sapien
aaatagacctattcacaccaggaac

SEQ ID NO: 3022460 - DNA, 25 bp, Homo sapien
tacagggtgctgatacaactggctg

SEQ ID NO: 3022461 - DNA, 25 bp, Homo sapien
gaatgcctgagctcaggcagtccac

SEQ ID NO: 3022462 - DNA, 25 bp, Homo sapien
tctcgaatgcctgagctcaggcagt

SEQ ID NO: 3022463 - DNA, 25 bp, Homo sapien
atgagccaccccgccaggccttttt

SEQ ID NO: 3022464 - DNA, 25 bp, Homo sapien
catgagccaccccgccaggcctttt

SEQ ID NO: 3022465 - DNA, 25 bp, Homo sapien
tgtgtgtgttactcccgtctttaca

SEQ ID NO: 3022466 - DNA, 25 bp, Homo sapien
gcgcccagccgccagaagatatttt

SEQ ID NO: 3022467 - DNA, 25 bp, Homo sapien
gaagaacaacaaagtgtttgttgtg

SEQ ID NO: 3022468 - DNA, 25 bp, Homo sapien
tatttcaaagatgtcctatacgcac

SEQ ID NO: 3022469 - DNA, 25 bp, Homo sapien
gcttgaaaacctttatgccttcatc

SEQ ID NO: 3022470 - DNA, 25 bp, Homo sapien
ttttgctgcttgaaaacctttatgc

SEQ ID NO: 3022471 - DNA, 25 bp, Homo sapien
tctaaccctggaaggttttgctgct

SEQ ID NO: 3022472 - DNA, 25 bp, Homo sapien
gaaacactcttatctaaccctggaa

SEQ ID NO: 3022473 - DNA, 25 bp, Homo sapien
tattgagtgccattaggtgcccggc

SEQ ID NO: 3022474 - DNA, 25 bp, Homo sapien
gaatgtctcagccagtcagttaaag

SEQ ID NO: 3022475 - DNA, 25 bp, Homo sapien
tacactgttaaaaggcgggcacatg

SEQ ID NO: 3022476 - DNA, 25 bp, Homo sapien
gttggccaagccagatctccaggaa

SEQ ID NO: 3022477 - DNA, 25 bp, Homo sapien
ggcagactgtccagataggaacctt

SEQ ID NO: 3022478 - DNA, 25 bp, Homo sapien
tgtactagatgcaccatgaccttgg

SEQ ID NO: 3022479 - DNA, 25 bp, Homo sapien
aaactgcatgtggtgcttagcactg

SEQ ID NO: 3022480 - DNA, 25 bp, Homo sapien
tggcacgagacccacatacaaaggt

SEQ ID NO: 3022481 - DNA, 25 bp, Homo sapien
tctagttatatgaccccaggaaagc

SEQ ID NO: 3022482 - DNA, 25 bp, Homo sapien
cctttggcctaatcctgaggttgag

SEQ ID NO: 3022483 - DNA, 25 bp, Homo sapien
cacttgttaaatggcagggtttgcc

SEQ ID NO: 3022484 - DNA, 25 bp, Homo sapien
gaagcctcaccattgacaagtcctg

SEQ ID NO: 3022485 - DNA, 25 bp, Homo sapien
aaaccaagtaaattggctgctccag

SEQ ID NO: 3022486 - DNA, 25 bp, Homo sapien
catcatatgttagtatattgccatc

SEQ ID NO: 3022487 - DNA, 25 bp, Homo sapien
gctgctccagtatgcgttggtttca

SEQ ID NO: 3022488 - DNA, 25 bp, Homo sapien
tgccatctagaggaccaagtgcaag

SEQ ID NO: 3022489 - DNA, 25 bp, Homo sapien
aatcaaggcctcaacctgccagact

SEQ ID NO: 3022490 - DNA, 25 bp, Homo sapien
cctcatgtggattggagttattgtc

SEQ ID NO: 3022491 - DNA, 25 bp, Homo sapien
tcctttcatttcagtctgaaggatg

SEQ ID NO: 3022492 - DNA, 25 bp, Homo sapien
tcagtctgaaggatgtcttttagca

SEQ ID NO: 3022493 - DNA, 25 bp, Homo sapien
tctggaactcctttaatgcgtatgt

SEQ ID NO: 3022494 - DNA, 25 bp, Homo sapien
tataggcggctgtaattgctgtttc

SEQ ID NO: 3022495 - DNA, 25 bp, Homo sapien
ctgtagtttctgatgagtggtaggc

SEQ ID NO: 3022496 - DNA, 25 bp, Homo sapien
tctgttcctcggactggataattac

SEQ ID NO: 3022497 - DNA, 25 bp, Homo sapien
cacaagagagatcacacaccatggg

SEQ ID NO: 3022498 - DNA, 25 bp, Homo sapien
tggttacgtactgaacaaagactac

SEQ ID NO: 3022499 - DNA, 25 bp, Homo sapien
ctggagatggccaaaactcctgatg

SEQ ID NO: 3022500 - DNA, 25 bp, Homo sapien
caaatgccatgagcaatgttgccac

SEQ ID NO: 3022501 - DNA, 25 bp, Homo sapien
tgaaatttttaatctaggaggaaga

SEQ ID NO: 3022502 - DNA, 25 bp, Homo sapien
aattctaaatgagtgtaaacattga

SEQ ID NO: 3022503 - DNA, 25 bp, Homo sapien
tctaaatgagtgtaaacattgaaat

SEQ ID NO: 3022504 - DNA, 25 bp, Homo sapien
tgaagaagtcaaatgtgcccacagg

SEQ ID NO: 3022505 - DNA, 25 bp, Homo sapien
gtgttccaaccgagagcctagctga

SEQ ID NO: 3022506 - DNA, 25 bp, Homo sapien
cccagtgccaggttgtgaagaagtc

SEQ ID NO: 3022507 - DNA, 25 bp, Homo sapien
tgcccacagggagaaactacacagt

SEQ ID NO: 3022508 - DNA, 25 bp, Homo sapien
ataccactggccctaattgttttca

SEQ ID NO: 3022509 - DNA, 25 bp, Homo sapien
accactggccctaattgttttcact

SEQ ID NO: 3022510 - DNA, 25 bp, Homo sapien
ttcacttgcttgcatacgtctaaga

SEQ ID NO: 3022511 - DNA, 25 bp, Homo sapien
tgcatacgtctaagaaatttcccca

SEQ ID NO: 3022512 - DNA, 25 bp, Homo sapien
tattacatggccgtgtgcataccta

SEQ ID NO: 3022513 - DNA, 25 bp, Homo sapien
tgtgcatacctatggaatgtgcata

SEQ ID NO: 3022514 - DNA, 25 bp, Homo sapien
tacatggccgtgtgcatacctatgg

SEQ ID NO: 3022515 - DNA, 25 bp, Homo sapien
ggccgtgtgcatacctatggaatgt

SEQ ID NO: 3022516 - DNA, 25 bp, Homo sapien
tccagtgttccgcaaaagacaaaaa

SEQ ID NO: 3022517 - DNA, 25 bp, Homo sapien
tctcatttgagcagacgccggatac

SEQ ID NO: 3022518 - DNA, 25 bp, Homo sapien
tatttcacttcacacaccatggact

SEQ ID NO: 3022519 - DNA, 25 bp, Homo sapien
cgccggataccatgtaagacactaa

SEQ ID NO: 3022520 - DNA, 25 bp, Homo sapien
aggttggcaccttgtagcaccacac

SEQ ID NO: 3022521 - DNA, 25 bp, Homo sapien
tcagacatcttaatggattatttga

SEQ ID NO: 3022522 - DNA, 25 bp, Homo sapien
ccactttactgtgaaggagaagagt

SEQ ID NO: 3022523 - DNA, 25 bp, Homo sapien
atatcacccacagtactgaacaggc

SEQ ID NO: 3022524 - DNA, 25 bp, Homo sapien
ggagaagagtgcactaaaggcaaat

SEQ ID NO: 3022525 - DNA, 25 bp, Homo sapien
cagccactttactgtgaaggagaag

SEQ ID NO: 3022526 - DNA, 25 bp, Homo sapien
tccaccaacgtaggccaaccattag

SEQ ID NO: 3022527 - DNA, 25 bp, Homo sapien
tgtgattccaccaacgtaggccaac

SEQ ID NO: 3022528 - DNA, 25 bp, Homo sapien
ctttccatcttcatcaatgtgattc

SEQ ID NO: 3022529 - DNA, 25 bp, Homo sapien
catcaatgtgattccaccaacgtag

SEQ ID NO: 3022530 - DNA, 25 bp, Homo sapien
ttttgccaaggataaaagggtgcca

SEQ ID NO: 3022531 - DNA, 25 bp, Homo sapien
atttataacaattacgacacatctc

SEQ ID NO: 3022532 - DNA, 25 bp, Homo sapien
taatttccctattcttgacttctta

SEQ ID NO: 3022533 - DNA, 25 bp, Homo sapien
gtttcagaaccctgcttatcccaag

SEQ ID NO: 3022534 - DNA, 25 bp, Homo sapien
cccatggtatggattagaagcaaca

SEQ ID NO: 3022535 - DNA, 25 bp, Homo sapien
gtaagcctgaagcaaaacccatggt

SEQ ID NO: 3022536 - DNA, 25 bp, Homo sapien
gcatccataggagccttttcaaaag

SEQ ID NO: 3022537 - DNA, 25 bp, Homo sapien
gacaaatattcagtgggtggcaagc

SEQ ID NO: 3022538 - DNA, 25 bp, Homo sapien
gtaaccatacaggtaataaagctgc

SEQ ID NO: 3022539 - DNA, 25 bp, Homo sapien
caacaagataattgtaaccatacag

SEQ ID NO: 3022540 - DNA, 25 bp, Homo sapien
acagagaagacagacgatgattgca

SEQ ID NO: 3022541 - DNA, 25 bp, Homo sapien
aaaagtcacacgacaacaacaagat

SEQ ID NO: 3022542 - DNA, 25 bp, Homo sapien
taagtggaaaaacgatgctactgga

SEQ ID NO: 3022543 - DNA, 25 bp, Homo sapien
gaataagtggaaaaacgatgctact

SEQ ID NO: 3022544 - DNA, 25 bp, Homo sapien
agaataagtggaaaaacgatgctac

SEQ ID NO: 3022545 - DNA, 25 bp, Homo sapien
gtggaaaaacgatgctactggatgt

SEQ ID NO: 3022546 - DNA, 25 bp, Homo sapien
caggtactagcaaatgtagagaaaa

SEQ ID NO: 3022547 - DNA, 25 bp, Homo sapien
tttactacaggtactagcaaatgta

SEQ ID NO: 3022548 - DNA, 25 bp, Homo sapien
ctacaggtactagcaaatgtagaga

SEQ ID NO: 3022549 - DNA, 25 bp, Homo sapien
cattttactacaggtactagcaaat

SEQ ID NO: 3022550 - DNA, 25 bp, Homo sapien
cttttcttggtctattagtcgtctc

SEQ ID NO: 3022551 - DNA, 25 bp, Homo sapien
ctcctcttccgcatcaaacagtgaa

SEQ ID NO: 3022552 - DNA, 25 bp, Homo sapien
ccgggttcaagggactcccctgcat

SEQ ID NO: 3022553 - DNA, 25 bp, Homo sapien
aagggactcccctgcatcagcctca

SEQ ID NO: 3022554 - DNA, 25 bp, Homo sapien
caatggtgtgatcttggctcactgc

SEQ ID NO: 3022555 - DNA, 25 bp, Homo sapien
tgcaatggtgtgatcttggctcact

SEQ ID NO: 3022556 - DNA, 25 bp, Homo sapien
ctgtaagagcctcagtccggcctca

SEQ ID NO: 3022557 - DNA, 25 bp, Homo sapien
gaccactgtaagagcctcagtccgg

SEQ ID NO: 3022558 - DNA, 25 bp, Homo sapien
gacccgtcaccaagggccagcaggg

SEQ ID NO: 3022559 - DNA, 25 bp, Homo sapien
gtcagcgcagcagcgtacgggtccg

SEQ ID NO: 3022560 - DNA, 25 bp, Homo sapien
tattgtaaaacactgtaatttccca

SEQ ID NO: 3022561 - DNA, 25 bp, Homo sapien
ccgcttggctttctgtttattgtaa

SEQ ID NO: 3022562 - DNA, 25 bp, Homo sapien
aaacactgtaatttcccaaggctgg

SEQ ID NO: 3022563 - DNA, 25 bp, Homo sapien
tggctttctgtttattgtaaaacac

SEQ ID NO: 3022564 - DNA, 25 bp, Homo sapien
gaacctggagcggataatcatgggc

SEQ ID NO: 3022565 - DNA, 25 bp, Homo sapien
cagggcgctaacagtcaggaggaat

SEQ ID NO: 3022566 - DNA, 25 bp, Homo sapien
ttcacggtcaacagcacgaactcag

SEQ ID NO: 3022567 - DNA, 25 bp, Homo sapien
ggtatgaaattgaaggtccccagac

SEQ ID NO: 3022568 - DNA, 25 bp, Homo sapien
caggagtttccaattgtccttgttt

SEQ ID NO: 3022569 - DNA, 25 bp, Homo sapien
acaccttccacttaacgaagctgca

SEQ ID NO: 3022570 - DNA, 25 bp, Homo sapien
gaacaccttccacttaacgaagctg

SEQ ID NO: 3022571 - DNA, 25 bp, Homo sapien
ttaacgaagctgcatatctgcttgc

SEQ ID NO: 3022572 - DNA, 25 bp, Homo sapien
cttgaacaccttccacttaacgaag

SEQ ID NO: 3022573 - DNA, 25 bp, Homo sapien
tgcttttctctgtactttcactgca

SEQ ID NO: 3022574 - DNA, 25 bp, Homo sapien
tctgcttttctctgtactttcactg

SEQ ID NO: 3022575 - DNA, 25 bp, Homo sapien
ttttctctgtactttcactgcattt

SEQ ID NO: 3022576 - DNA, 25 bp, Homo sapien
gcttttctctgtactttcactgcat

SEQ ID NO: 3022577 - DNA, 25 bp, Homo sapien
taatgatttcccatccaaatgctca

SEQ ID NO: 3022578 - DNA, 25 bp, Homo sapien
tgagctttgctcttgatctgtccgc

SEQ ID NO: 3022579 - DNA, 25 bp, Homo sapien
caaatgctcacaaggttgcccgtgt

SEQ ID NO: 3022580 - DNA, 25 bp, Homo sapien
catatgacgtatgagggaacttcaa

SEQ ID NO: 3022581 - DNA, 25 bp, Homo sapien
aacctggagccttgagaaggcagga

SEQ ID NO: 3022582 - DNA, 25 bp, Homo sapien
cgtcttgggagctagagtgaacctg

SEQ ID NO: 3022583 - DNA, 25 bp, Homo sapien
gaacctggagccttgagaaggcagg

SEQ ID NO: 3022584 - DNA, 25 bp, Homo sapien
ttaaggcgtcttgggagctagagtg

SEQ ID NO: 3022585 - DNA, 25 bp, Homo sapien
gccaggtaggaaagagtcagtgctg

SEQ ID NO: 3022586 - DNA, 25 bp, Homo sapien
ggtaggaaagagtcagtgctggccc

SEQ ID NO: 3022587 - DNA, 25 bp, Homo sapien
caggccaggtaggaaagagtcagtg

SEQ ID NO: 3022588 - DNA, 25 bp, Homo sapien
tgcaggccaggtaggaaagagtcag

SEQ ID NO: 3022589 - DNA, 25 bp, Homo sapien
cgggaaccggtagcatgctgagcct

SEQ ID NO: 3022590 - DNA, 25 bp, Homo sapien
tactgttgtcgggaaccggtagcat

SEQ ID NO: 3022591 - DNA, 25 bp, Homo sapien
caacggccacctggtgtttactgtt

SEQ ID NO: 3022592 - DNA, 25 bp, Homo sapien
cagaggcacatcattgctactcatg

SEQ ID NO: 3022593 - DNA, 25 bp, Homo sapien
tcagtgctgcctctactggataggt

SEQ ID NO: 3022594 - DNA, 25 bp, Homo sapien
gcaggaggcattgtctcagtcagtc

SEQ ID NO: 3022595 - DNA, 25 bp, Homo sapien
cagtcagtcttcaaccctaggagga

SEQ ID NO: 3022596 - DNA, 25 bp, Homo sapien
tagctgccctatagccaggaaggga

SEQ ID NO: 3022597 - DNA, 25 bp, Homo sapien
tccagcccgttgctagctgtgtcct

SEQ ID NO: 3022598 - DNA, 25 bp, Homo sapien
ccagcccgttgctagctgtgtcctt

SEQ ID NO: 3022599 - DNA, 25 bp, Homo sapien
tttccagcccgttgctagctgtgtc

SEQ ID NO: 3022600 - DNA, 25 bp, Homo sapien
tttttccagcccgttgctagctgtg

SEQ ID NO: 3022601 - DNA, 25 bp, Homo sapien
cttgggggtgaatccactcacagga

SEQ ID NO: 3022602 - DNA, 25 bp, Homo sapien
tcaacattttcctgtatacctgctg

SEQ ID NO: 3022603 - DNA, 25 bp, Homo sapien
gagccctggggctcttcaacatttt

SEQ ID NO: 3022604 - DNA, 25 bp, Homo sapien
tcacaggagccctggggctcttcaa

SEQ ID NO: 3022605 - DNA, 25 bp, Homo sapien
ccacgggcagcctcgatgctggtaa

SEQ ID NO: 3022606 - DNA, 25 bp, Homo sapien
cctgtcatgggctggacagcggcca

SEQ ID NO: 3022607 - DNA, 25 bp, Homo sapien
ccaacacatgggtcggagctgtggt

SEQ ID NO: 3022608 - DNA, 25 bp, Homo sapien
cactgaaaaggatcagcattgccaa

SEQ ID NO: 3022609 - DNA, 25 bp, Homo sapien
tccatcccacgttaattcttttagc

SEQ ID NO: 3022610 - DNA, 25 bp, Homo sapien
atgtgctgatgtggcagactgaaat

SEQ ID NO: 3022611 - DNA, 25 bp, Homo sapien
tgtgctgatgtggcagactgaaatt

SEQ ID NO: 3022612 - DNA, 25 bp, Homo sapien
tctgcacaggcgctgatgacccgga

SEQ ID NO: 3022613 - DNA, 25 bp, Homo sapien
ctgttgccctgaataaagaaggaca

SEQ ID NO: 3022614 - DNA, 25 bp, Homo sapien
gctgatgacccggaggaagagaagg

SEQ ID NO: 3022615 - DNA, 25 bp, Homo sapien
tgtaaattcggatcttgccatctgc

SEQ ID NO: 3022616 - DNA, 25 bp, Homo sapien
aggtgcagagaacacgatgtctaca

SEQ ID NO: 3022617 - DNA, 25 bp, Homo sapien
acaccaggttcatcgctccgggctt

SEQ ID NO: 3022618 - DNA, 25 bp, Homo sapien
agaacacgatgtctacagggagcag

SEQ ID NO: 3022619 - DNA, 25 bp, Homo sapien
cagaaggtctgccaatgattgcagt

SEQ ID NO: 3022620 - DNA, 25 bp, Homo sapien
aggccatcaggcagcgctcgtactt

SEQ ID NO: 3022621 - DNA, 25 bp, Homo sapien
aggcagcgctcgtacttccccacca

SEQ ID NO: 3022622 - DNA, 25 bp, Homo sapien
agcgctcgtacttccccaccatgct

SEQ ID NO: 3022623 - DNA, 25 bp, Homo sapien
ggccatcaggcagcgctcgtacttc

SEQ ID NO: 3022624 - DNA, 25 bp, Homo sapien
aggcatttcacagctccctcgtggc

SEQ ID NO: 3022625 - DNA, 25 bp, Homo sapien
aacaggcatttcacagctccctcgt

SEQ ID NO: 3022626 - DNA, 25 bp, Homo sapien
gagatgccactggtcaaagaacagg

SEQ ID NO: 3022627 - DNA, 25 bp, Homo sapien
tgccactggtcaaagaacaggcatt

SEQ ID NO: 3022628 - DNA, 25 bp, Homo sapien
tctttgtgtctaaacgtcttcaggc

SEQ ID NO: 3022629 - DNA, 25 bp, Homo sapien
cacagctgctcacaatgtaggtatc

SEQ ID NO: 3022630 - DNA, 25 bp, Homo sapien
taggtatcattgatcctggtggcca

SEQ ID NO: 3022631 - DNA, 25 bp, Homo sapien
gtgtctaaacgtcttcaggcacttc

SEQ ID NO: 3022632 - DNA, 25 bp, Homo sapien
gctatggccctggaacttagccttg

SEQ ID NO: 3022633 - DNA, 25 bp, Homo sapien
tctctaatcagctgattcctcaagc

SEQ ID NO: 3022634 - DNA, 25 bp, Homo sapien
gaagagcaggctcaccaacagctca

SEQ ID NO: 3022635 - DNA, 25 bp, Homo sapien
cttgaggcccaagtgctagacagct

SEQ ID NO: 3022636 - DNA, 25 bp, Homo sapien
tcctccagatacgagcctgttctta

SEQ ID NO: 3022637 - DNA, 25 bp, Homo sapien
tcttcctccagatacgagcctgttc

SEQ ID NO: 3022638 - DNA, 25 bp, Homo sapien
ttcctccagatacgagcctgttctt

SEQ ID NO: 3022639 - DNA, 25 bp, Homo sapien
ctccagatacgagcctgttcttaca

SEQ ID NO: 3022640 - DNA, 25 bp, Homo sapien
gcaagtgatagtcccctggtgacca

SEQ ID NO: 3022641 - DNA, 25 bp, Homo sapien
cccctggtgaccaccgaagattcgt

SEQ ID NO: 3022642 - DNA, 25 bp, Homo sapien
gaagattcgtgtgcaaaccccactt

SEQ ID NO: 3022643 - DNA, 25 bp, Homo sapien
gaccaccgaagattcgtgtgcaaac

SEQ ID NO: 3022644 - DNA, 25 bp, Homo sapien
gataattagttagttgggaggcagc

SEQ ID NO: 3022645 - DNA, 25 bp, Homo sapien
ggatcatactgcgtagaacccatgt

SEQ ID NO: 3022646 - DNA, 25 bp, Homo sapien
tgagggcccaaaggatcatactgcg

SEQ ID NO: 3022647 - DNA, 25 bp, Homo sapien
gaatgtgagagttcctgagggccca

SEQ ID NO: 3022648 - DNA, 25 bp, Homo sapien
gatacttaggtcatagctcccgctt

SEQ ID NO: 3022649 - DNA, 25 bp, Homo sapien
gcatggcctcggaattcaacgggta

SEQ ID NO: 3022650 - DNA, 25 bp, Homo sapien
gatgacacagctatcagatctcccc

SEQ ID NO: 3022651 - DNA, 25 bp, Homo sapien
ccccggaatagtggatgactcggtt

SEQ ID NO: 3022652 - DNA, 25 bp, Homo sapien
cgaacattgtaggtcccacagaaaa

SEQ ID NO: 3022653 - DNA, 25 bp, Homo sapien
gtcagagagaatgcgaacattgtag

SEQ ID NO: 3022654 - DNA, 25 bp, Homo sapien
gagagaatgcgaacattgtaggtcc

SEQ ID NO: 3022655 - DNA, 25 bp, Homo sapien
gaatgcgaacattgtaggtcccaca

SEQ ID NO: 3022656 - DNA, 25 bp, Homo sapien
cctcgttctggtatgcagtccacag

SEQ ID NO: 3022657 - DNA, 25 bp, Homo sapien
tgctgcgtttcctcgttctggtatg

SEQ ID NO: 3022658 - DNA, 25 bp, Homo sapien
atgcagtccacaggttgtactcatt

SEQ ID NO: 3022659 - DNA, 25 bp, Homo sapien
gcgtttcctcgttctggtatgcagt

SEQ ID NO: 3022660 - DNA, 25 bp, Homo sapien
ctacaagcgtgcaccaccatgccca

SEQ ID NO: 3022661 - DNA, 25 bp, Homo sapien
ccagagtaattgggactacaagcgt

SEQ ID NO: 3022662 - DNA, 25 bp, Homo sapien
acaagcgtgcaccaccatgcccagc

SEQ ID NO: 3022663 - DNA, 25 bp, Homo sapien
ctccagagtaattgggactacaagc

SEQ ID NO: 3022664 - DNA, 25 bp, Homo sapien
cacttcggatgtttcacacgcatgc

SEQ ID NO: 3022665 - DNA, 25 bp, Homo sapien
aactgggatagaaaccttattggca

SEQ ID NO: 3022666 - DNA, 25 bp, Homo sapien
cttccacttcggatgtttcacacgc

SEQ ID NO: 3022667 - DNA, 25 bp, Homo sapien
ggatgtttcacacgcatgctcttcc

SEQ ID NO: 3022668 - DNA, 25 bp, Homo sapien
ctgcaagaaggtaatctggttctga

SEQ ID NO: 3022669 - DNA, 25 bp, Homo sapien
tcacagaggcgcacttgttcagggt

SEQ ID NO: 3022670 - DNA, 25 bp, Homo sapien
tcttgacctgttgagccatggcggc

SEQ ID NO: 3022671 - DNA, 25 bp, Homo sapien
tgaagccgtgcgctgacaagtccat

SEQ ID NO: 3022672 - DNA, 25 bp, Homo sapien
gaaatcccctcatacaccccagcat

SEQ ID NO: 3022673 - DNA, 25 bp, Homo sapien
aaatcccctcatacaccccagcata

SEQ ID NO: 3022674 - DNA, 25 bp, Homo sapien
ggaaatcccctcatacaccccagca

SEQ ID NO: 3022675 - DNA, 25 bp, Homo sapien
gggaaatcccctcatacaccccagc

SEQ ID NO: 3022676 - DNA, 25 bp, Homo sapien
gtaacggatgaagtctcggtatttg

SEQ ID NO: 3022677 - DNA, 25 bp, Homo sapien
atgggcaggtaacggatgaagtctc

SEQ ID NO: 3022678 - DNA, 25 bp, Homo sapien
gcaggtaacggatgaagtctcggta

SEQ ID NO: 3022679 - DNA, 25 bp, Homo sapien
aggtggatgggcaggtaacggatga

SEQ ID NO: 3022680 - DNA, 25 bp, Homo sapien
gaaaacagcctattcatttcggata

SEQ ID NO: 3022681 - DNA, 25 bp, Homo sapien
tccaggtcaaccaatagattgcagg

SEQ ID NO: 3022682 - DNA, 25 bp, Homo sapien
gggatcgtaccctggcttggttatg

SEQ ID NO: 3022683 - DNA, 25 bp, Homo sapien
tacaccggagtgaattcctccatgg

SEQ ID NO: 3022684 - DNA, 25 bp, Homo sapien
gccccaaggaagtgttcattttctg

SEQ ID NO: 3022685 - DNA, 25 bp, Homo sapien
agggttagatgctgccccaaggaag

SEQ ID NO: 3022686 - DNA, 25 bp, Homo sapien
cagggttagatgctgccccaaggaa

SEQ ID NO: 3022687 - DNA, 25 bp, Homo sapien
ccaaggaagtgttcattttctgggg

SEQ ID NO: 3022688 - DNA, 25 bp, Homo sapien
cttgtgaggtcgcagacttggagct

SEQ ID NO: 3022689 - DNA, 25 bp, Homo sapien
tgtgctgagttttggctgtccaata

SEQ ID NO: 3022690 - DNA, 25 bp, Homo sapien
aaacacacatctgtgatgtcttgat

SEQ ID NO: 3022691 - DNA, 25 bp, Homo sapien
tttggctgtccaatagacttgtgag

SEQ ID NO: 3022692 - DNA, 25 bp, Homo sapien
tgccttctggtcttcgggggccctc

SEQ ID NO: 3022693 - DNA, 25 bp, Homo sapien
tcttcgggggccctctagtctctgc

SEQ ID NO: 3022694 - DNA, 25 bp, Homo sapien
tggtcttcgggggccctctagtctc

SEQ ID NO: 3022695 - DNA, 25 bp, Homo sapien
tctggtcttcgggggccctctagtc

SEQ ID NO: 3022696 - DNA, 25 bp, Homo sapien
taagagagtataattcgccttggtc

SEQ ID NO: 3022697 - DNA, 25 bp, Homo sapien
tcaaggaggacttcacaactttccc

SEQ ID NO: 3022698 - DNA, 25 bp, Homo sapien
cctgttatagatgaaatcctttccc

SEQ ID NO: 3022699 - DNA, 25 bp, Homo sapien
tctgatcacattggcagcagtgagc

SEQ ID NO: 3022700 - DNA, 25 bp, Homo sapien
gaatcggttcccttctcacaacgaa

SEQ ID NO: 3022701 - DNA, 25 bp, Homo sapien
gaatgccaactagaaacctcctctg

SEQ ID NO: 3022702 - DNA, 25 bp, Homo sapien
gatatgtcattgatcctgcagaacc

SEQ ID NO: 3022703 - DNA, 25 bp, Homo sapien
cgtctcacacttccggcatagaggg

SEQ ID NO: 3022704 - DNA, 25 bp, Homo sapien
ggaaagcctatctctctcagtaact

SEQ ID NO: 3022705 - DNA, 25 bp, Homo sapien
acggcaacgccaccaaacactagag

SEQ ID NO: 3022706 - DNA, 25 bp, Homo sapien
tttagccctgcgcacttgcaacggc

SEQ ID NO: 3022707 - DNA, 25 bp, Homo sapien
gagcaaaagtaaatggctgccatgg

SEQ ID NO: 3022708 - DNA, 25 bp, Homo sapien
cagtgtctccatcctagttatgagg

SEQ ID NO: 3022709 - DNA, 25 bp, Homo sapien
tcctacttcaggtaagactcggttc

SEQ ID NO: 3022710 - DNA, 25 bp, Homo sapien
gactcggttcaaacattgactctgg

SEQ ID NO: 3022711 - DNA, 25 bp, Homo sapien
actgtagtcaaagtgcccaggcaaa

SEQ ID NO: 3022712 - DNA, 25 bp, Homo sapien
caccatgtgaccagagtgaccttga

SEQ ID NO: 3022713 - DNA, 25 bp, Homo sapien
tataagcatctacccaatgggtgtt

SEQ ID NO: 3022714 - DNA, 25 bp, Homo sapien
cataagaacggtatctggcacatag

SEQ ID NO: 3022715 - DNA, 25 bp, Homo sapien
gactgagttaatgtgcaggaagcat

SEQ ID NO: 3022716 - DNA, 25 bp, Homo sapien
tgtgacatttacctgaacagagagg

SEQ ID NO: 3022717 - DNA, 25 bp, Homo sapien
tgcaaatcccatcactgtagctggc

SEQ ID NO: 3022718 - DNA, 25 bp, Homo sapien
gagaccccataggatttcaaaagcc

SEQ ID NO: 3022719 - DNA, 25 bp, Homo sapien
aaattactacaaacaggcagggcgc

SEQ ID NO: 3022720 - DNA, 25 bp, Homo sapien
cgggtcaaacgtgatgtcatacgca

SEQ ID NO: 3022721 - DNA, 25 bp, Homo sapien
gggtcaaacgtgatgtcatacgcat

SEQ ID NO: 3022722 - DNA, 25 bp, Homo sapien
ccgggtcaaacgtgatgtcatacgc

SEQ ID NO: 3022723 - DNA, 25 bp, Homo sapien
ggaactgttccctggtgctgggctc

SEQ ID NO: 3022724 - DNA, 25 bp, Homo sapien
tggaggaactgttccctggtgctgg

SEQ ID NO: 3022725 - DNA, 25 bp, Homo sapien
ggaagtccaatatttgcgctgaaca

SEQ ID NO: 3022726 - DNA, 25 bp, Homo sapien
ggtgctgggctcaggtttggaagtc

SEQ ID NO: 3022727 - DNA, 25 bp, Homo sapien
ctagaaaatcaagagagttgtgaat

SEQ ID NO: 3022728 - DNA, 25 bp, Homo sapien
aaaatcaagagagttgtgaatgcac

SEQ ID NO: 3022729 - DNA, 25 bp, Homo sapien
agaaaatcaagagagttgtgaatgc

SEQ ID NO: 3022730 - DNA, 25 bp, Homo sapien
aatcaagagagttgtgaatgcacac

SEQ ID NO: 3022731 - DNA, 25 bp, Homo sapien
tcatctactgctagagacacactca

SEQ ID NO: 3022732 - DNA, 25 bp, Homo sapien
cttcctatcatctactgctagagac

SEQ ID NO: 3022733 - DNA, 25 bp, Homo sapien
tgctagagacacactcactatagtc

SEQ ID NO: 3022734 - DNA, 25 bp, Homo sapien
actcactatagtccatggcccagaa

SEQ ID NO: 3022735 - DNA, 25 bp, Homo sapien
ttccgtgataactttgcggatgccc

SEQ ID NO: 3022736 - DNA, 25 bp, Homo sapien
gattaagtgtacagtggattccgtg

SEQ ID NO: 3022737 - DNA, 25 bp, Homo sapien
aacactagggaaggtgatgtcttca

SEQ ID NO: 3022738 - DNA, 25 bp, Homo sapien
gatgcccgagagtttatccttcagc

SEQ ID NO: 3022739 - DNA, 25 bp, Homo sapien
tctctgaaaagcagcaggctccagt

SEQ ID NO: 3022740 - DNA, 25 bp, Homo sapien
tagatctcgttccaatggcttacgg

SEQ ID NO: 3022741 - DNA, 25 bp, Homo sapien
taccaagcaaacctccatgcagtgg

SEQ ID NO: 3022742 - DNA, 25 bp, Homo sapien
gattcaggatgttgcagtttacccc

SEQ ID NO: 3022743 - DNA, 25 bp, Homo sapien
ctccaagaactggacagtgttgctg

SEQ ID NO: 3022744 - DNA, 25 bp, Homo sapien
tcttctccatctcggcactcctgta

SEQ ID NO: 3022745 - DNA, 25 bp, Homo sapien
caggtgggccttgataccgttggcc

SEQ ID NO: 3022746 - DNA, 25 bp, Homo sapien
ttggcctggctcagcgcagcttgct

SEQ ID NO: 3022747 - DNA, 25 bp, Homo sapien
cagccaccgctttgacctctgacac

SEQ ID NO: 3022748 - DNA, 25 bp, Homo sapien
ttcagccaccgctttgacctctgac

SEQ ID NO: 3022749 - DNA, 25 bp, Homo sapien
ccgctttgacctctgacaccgacac

SEQ ID NO: 3022750 - DNA, 25 bp, Homo sapien
caccgctttgacctctgacaccgac

SEQ ID NO: 3022751 - DNA, 25 bp, Homo sapien
ttagtgaggcatccaacttgataga

SEQ ID NO: 3022752 - DNA, 25 bp, Homo sapien
tattctcatgtgaattccaggttcc

SEQ ID NO: 3022753 - DNA, 25 bp, Homo sapien
ttattctcatgtgaattccaggttc

SEQ ID NO: 3022754 - DNA, 25 bp, Homo sapien
ttcttagtgaggcatccaacttgat

SEQ ID NO: 3022755 - DNA, 25 bp, Homo sapien
tcagagccaaatgcatgtctaagat

SEQ ID NO: 3022756 - DNA, 25 bp, Homo sapien
tgcccggttaaactgaccactgagt

SEQ ID NO: 3022757 - DNA, 25 bp, Homo sapien
cttagcatttcattatgcccggtta

SEQ ID NO: 3022758 - DNA, 25 bp, Homo sapien
taagatgatactgtctctaccacat

SEQ ID NO: 3022759 - DNA, 25 bp, Homo sapien
tttgtagagataggagcttactacg

SEQ ID NO: 3022760 - DNA, 25 bp, Homo sapien
ttgtagagataggagcttactacgt

SEQ ID NO: 3022761 - DNA, 25 bp, Homo sapien
cagacttttggttagcctggagcct

SEQ ID NO: 3022762 - DNA, 25 bp, Homo sapien
gacttttggttagcctggagcctgg

SEQ ID NO: 3022763 - DNA, 25 bp, Homo sapien
tcattcaacttgagtttccgctcca

SEQ ID NO: 3022764 - DNA, 25 bp, Homo sapien
ccaagtctaactgggtgcactggag

SEQ ID NO: 3022765 - DNA, 25 bp, Homo sapien
cacagaaggacacgggcactctcca

SEQ ID NO: 3022766 - DNA, 25 bp, Homo sapien
cagccctgacatccccgcccttctt

SEQ ID NO: 3022767 - DNA, 25 bp, Homo sapien
tccagccctgacatccccgcccttc

SEQ ID NO: 3022768 - DNA, 25 bp, Homo sapien
acacagaaggacacgggcactctcc

SEQ ID NO: 3022769 - DNA, 25 bp, Homo sapien
tcttcacagtaattcaccatgcagg

SEQ ID NO: 3022770 - DNA, 25 bp, Homo sapien
ggcagtatcgccagttgtggtcctt

SEQ ID NO: 3022771 - DNA, 25 bp, Homo sapien
gatgttcacctgatgcggctgcaag

SEQ ID NO: 3022772 - DNA, 25 bp, Homo sapien
ccatgcaggttagacaggacttcac

SEQ ID NO: 3022773 - DNA, 25 bp, Homo sapien
agaagtcacacaggacctctttccc

SEQ ID NO: 3022774 - DNA, 25 bp, Homo sapien
atcaaggcagaagtcacacaggacc

SEQ ID NO: 3022775 - DNA, 25 bp, Homo sapien
aggcagaagtcacacaggacctctt

SEQ ID NO: 3022776 - DNA, 25 bp, Homo sapien
ctgctctgcagagtcgctgtcctgt

SEQ ID NO: 3022777 - DNA, 25 bp, Homo sapien
ggaagctcggccactcattactgtg

SEQ ID NO: 3022778 - DNA, 25 bp, Homo sapien
gcagccagatgcgatgacgacaagg

SEQ ID NO: 3022779 - DNA, 25 bp, Homo sapien
gacaaggcagctagagtactcaggc

SEQ ID NO: 3022780 - DNA, 25 bp, Homo sapien
gaaccacgcctagatgattgcagct

SEQ ID NO: 3022781 - DNA, 25 bp, Homo sapien
gtaatgtccgtcacactcgtggaga

SEQ ID NO: 3022782 - DNA, 25 bp, Homo sapien
tactcagagttagaaggcaccgaag

SEQ ID NO: 3022783 - DNA, 25 bp, Homo sapien
tgaacatcacgtgggtactcagtgg

SEQ ID NO: 3022784 - DNA, 25 bp, Homo sapien
tcagaaatccgagagacctagtgac

SEQ ID NO: 3022785 - DNA, 25 bp, Homo sapien
tgtaacgtttcctcactgtccctgt

SEQ ID NO: 3022786 - DNA, 25 bp, Homo sapien
taagtagccctttttagcgatgtaa

SEQ ID NO: 3022787 - DNA, 25 bp, Homo sapien
tggccagggtcagaaacatgcatcc

SEQ ID NO: 3022788 - DNA, 25 bp, Homo sapien
ttttcaaccacgcatagaatacgca

SEQ ID NO: 3022789 - DNA, 25 bp, Homo sapien
tgacctggtactggaggctgaactg

SEQ ID NO: 3022790 - DNA, 25 bp, Homo sapien
aaccagactatttgttcgggctcag

SEQ ID NO: 3022791 - DNA, 25 bp, Homo sapien
aatagctgtcccgtcattgaagtcc

SEQ ID NO: 3022792 - DNA, 25 bp, Homo sapien
cagagaccacacaaagccatacagg

SEQ ID NO: 3022793 - DNA, 25 bp, Homo sapien
gctagcagacattccacagtggtgt

SEQ ID NO: 3022794 - DNA, 25 bp, Homo sapien
tatgttgtcctaagtcagggccggt

SEQ ID NO: 3022795 - DNA, 25 bp, Homo sapien
gcagttcatgggagtgctcagccct

SEQ ID NO: 3022796 - DNA, 25 bp, Homo sapien
ggtctaagtgcatgtccgagctcaa

SEQ ID NO: 3022797 - DNA, 25 bp, Homo sapien
tgagctggaagtcgcatcactcctc

SEQ ID NO: 3022798 - DNA, 25 bp, Homo sapien
gacttcaagacaaatcagcccatca

SEQ ID NO: 3022799 - DNA, 25 bp, Homo sapien
cacaggtaatatttgtccaccagac

SEQ ID NO: 3022800 - DNA, 25 bp, Homo sapien
gaagagtgacatctaagtcagtcct

SEQ ID NO: 3022801 - DNA, 25 bp, Homo sapien
aggcccaatgaactttctggtttgg

SEQ ID NO: 3022802 - DNA, 25 bp, Homo sapien
tcactatcagcaaactggtctccag

SEQ ID NO: 3022803 - DNA, 25 bp, Homo sapien
gtgcaggcccaatgaactttctggt

SEQ ID NO: 3022804 - DNA, 25 bp, Homo sapien
tctggtttggggtcactatcagcaa

SEQ ID NO: 3022805 - DNA, 25 bp, Homo sapien
aagaagaagatggcctcttggatca

SEQ ID NO: 3022806 - DNA, 25 bp, Homo sapien
taggtatcttacagttgctcagagg

SEQ ID NO: 3022807 - DNA, 25 bp, Homo sapien
taggctacatgaggacgttctggct

SEQ ID NO: 3022808 - DNA, 25 bp, Homo sapien
ccagaagcggtcttggtaggctaca

SEQ ID NO: 3022809 - DNA, 25 bp, Homo sapien
tagggcagggctactactaggtatc

SEQ ID NO: 3022810 - DNA, 25 bp, Homo sapien
actgcacccaccctcagagaaagct

SEQ ID NO: 3022811 - DNA, 25 bp, Homo sapien
caactttactgaggtatactttaca

SEQ ID NO: 3022812 - DNA, 25 bp, Homo sapien
gcacccaccctcagagaaagctttt

SEQ ID NO: 3022813 - DNA, 25 bp, Homo sapien
tactgaggtatactttacatgcaat

SEQ ID NO: 3022814 - DNA, 25 bp, Homo sapien
tctaccatggtagatcaaactcttt

SEQ ID NO: 3022815 - DNA, 25 bp, Homo sapien
caactctcgagtacatgactttata

SEQ ID NO: 3022816 - DNA, 25 bp, Homo sapien
tttccagcaaaaatgtacacgtgca

SEQ ID NO: 3022817 - DNA, 25 bp, Homo sapien
gggtacacaacacctctactgttaa

SEQ ID NO: 3022818 - DNA, 25 bp, Homo sapien
ggacctatccatgtactcgtgtacg

SEQ ID NO: 3022819 - DNA, 25 bp, Homo sapien
ccatggttggaagtagttctaagac

SEQ ID NO: 3022820 - DNA, 25 bp, Homo sapien
gttcagcttgcctctcaaccttcgg

SEQ ID NO: 3022821 - DNA, 25 bp, Homo sapien
tagccactatcttataacccttgag

SEQ ID NO: 3022822 - DNA, 25 bp, Homo sapien
tgtatgatctgagccaaacctgtgc

SEQ ID NO: 3022823 - DNA, 25 bp, Homo sapien
gttcaattggctagctatgttatcc

SEQ ID NO: 3022824 - DNA, 25 bp, Homo sapien
cagcattagatggaacacagtccaa

SEQ ID NO: 3022825 - DNA, 25 bp, Homo sapien
tgtctctaggcttttgcacatgaaa

SEQ ID NO: 3022826 - DNA, 25 bp, Homo sapien
gagatgataccaggtttggaaaatg

SEQ ID NO: 3022827 - DNA, 25 bp, Homo sapien
tgataccaggtttggaaaatggaaa

SEQ ID NO: 3022828 - DNA, 25 bp, Homo sapien
cttccaactaggagatgataccagg

SEQ ID NO: 3022829 - DNA, 25 bp, Homo sapien
taccacttcttccaactaggagatg

SEQ ID NO: 3022830 - DNA, 25 bp, Homo sapien
ttacatccctgtacaagactctctg

SEQ ID NO: 3022831 - DNA, 25 bp, Homo sapien
gcattacatccctgtacaagactct

SEQ ID NO: 3022832 - DNA, 25 bp, Homo sapien
cattacatccctgtacaagactctc

SEQ ID NO: 3022833 - DNA, 25 bp, Homo sapien
cagcattacatccctgtacaagact

SEQ ID NO: 3022834 - DNA, 25 bp, Homo sapien
tgctgtccggcaaagagcagccata

SEQ ID NO: 3022835 - DNA, 25 bp, Homo sapien
gctgtccggcaaagagcagccatat

SEQ ID NO: 3022836 - DNA, 25 bp, Homo sapien
ctgtccggcaaagagcagccatatt

SEQ ID NO: 3022837 - DNA, 25 bp, Homo sapien
ctgtgctgcccacacacattttaca

SEQ ID NO: 3022838 - DNA, 25 bp, Homo sapien
tctgtgctgcccacacacattttac

SEQ ID NO: 3022839 - DNA, 25 bp, Homo sapien
ctctgtgctgcccacacacatttta

SEQ ID NO: 3022840 - DNA, 25 bp, Homo sapien
ttcctggaaattgccagcattctac

SEQ ID NO: 3022841 - DNA, 25 bp, Homo sapien
tcctggaaattgccagcattctacc

SEQ ID NO: 3022842 - DNA, 25 bp, Homo sapien
ccaaatgctccagggtatgcgggcc

SEQ ID NO: 3022843 - DNA, 25 bp, Homo sapien
tccaagcaaacgacccagaggtgtc

SEQ ID NO: 3022844 - DNA, 25 bp, Homo sapien
tacaggtaaagaacacgagacacag

SEQ ID NO: 3022845 - DNA, 25 bp, Homo sapien
gctgcagagacataagggacgcgtt

SEQ ID NO: 3022846 - DNA, 25 bp, Homo sapien
aggacacagactcgccacgcgcgga

SEQ ID NO: 3022847 - DNA, 25 bp, Homo sapien
cagggaggacacagactcgccacgc

SEQ ID NO: 3022848 - DNA, 25 bp, Homo sapien
ggaggacacagactcgccacgcgcg

SEQ ID NO: 3022849 - DNA, 25 bp, Homo sapien
acacagactcgccacgcgcggagat

SEQ ID NO: 3022850 - DNA, 25 bp, Homo sapien
tctttaggcttggtcaggtgacaac

SEQ ID NO: 3022851 - DNA, 25 bp, Homo sapien
tttaggcttggtcaggtgacaacac

SEQ ID NO: 3022852 - DNA, 25 bp, Homo sapien
aggtctttaggcttggtcaggtgac

SEQ ID NO: 3022853 - DNA, 25 bp, Homo sapien
aggcttggtcaggtgacaacacaaa

SEQ ID NO: 3022854 - DNA, 25 bp, Homo sapien
tctggcgatgccaaggcgcttctgg

SEQ ID NO: 3022855 - DNA, 25 bp, Homo sapien
tgccaaggcgcttctgggaattgta

SEQ ID NO: 3022856 - DNA, 25 bp, Homo sapien
gagtctggcgatgccaaggcgcttc

SEQ ID NO: 3022857 - DNA, 25 bp, Homo sapien
tgcggagaaccggagtctggcgatg

SEQ ID NO: 3022858 - DNA, 25 bp, Homo sapien
taaataacttagagacagagttgga

SEQ ID NO: 3022859 - DNA, 25 bp, Homo sapien
agaaaaacaaatccaggtcccagtg

SEQ ID NO: 3022860 - DNA, 25 bp, Homo sapien
cccagccataatttaaataacttag

SEQ ID NO: 3022861 - DNA, 25 bp, Homo sapien
gaaaaacaaatccaggtcccagtgc

SEQ ID NO: 3022862 - DNA, 25 bp, Homo sapien
ccccgtggatctctgtgagcagacg

SEQ ID NO: 3022863 - DNA, 25 bp, Homo sapien
agtccctcttgagcacgttgacgca

SEQ ID NO: 3022864 - DNA, 25 bp, Homo sapien
agcagtacgtgtcggatgcccagct

SEQ ID NO: 3022865 - DNA, 25 bp, Homo sapien
tcttatcgcgctcgccagcatgctt

SEQ ID NO: 3022866 - DNA, 25 bp, Homo sapien
gagtttcatgcggaacagacctcca

SEQ ID NO: 3022867 - DNA, 25 bp, Homo sapien
agcaggagtttcatgcggaacagac

SEQ ID NO: 3022868 - DNA, 25 bp, Homo sapien
tttcatgcggaacagacctccagca

SEQ ID NO: 3022869 - DNA, 25 bp, Homo sapien
gcggaacagacctccagcatatggg

SEQ ID NO: 3022870 - DNA, 25 bp, Homo sapien
tgggtctgcggtcagtgtcgtcacc

SEQ ID NO: 3022871 - DNA, 25 bp, Homo sapien
ccttgatgccatcgggtgggtctgc

SEQ ID NO: 3022872 - DNA, 25 bp, Homo sapien
gaggtcggtgaggtcctcctcgttg

SEQ ID NO: 3022873 - DNA, 25 bp, Homo sapien
tccttgtacaccaggcggatgatgt

SEQ ID NO: 3022874 - DNA, 25 bp, Homo sapien
ctgcgttcttcggtccgccggccgg

SEQ ID NO: 3022875 - DNA, 25 bp, Homo sapien
cattgttatccctctaccgcggaga

SEQ ID NO: 3022876 - DNA, 25 bp, Homo sapien
taatcaaagggtgagggagacttct

SEQ ID NO: 3022877 - DNA, 25 bp, Homo sapien
caaggcacggaaaatagctcacagg

SEQ ID NO: 3022878 - DNA, 25 bp, Homo sapien
aaactacctgcgtggtccagtcacc

SEQ ID NO: 3022879 - DNA, 25 bp, Homo sapien
agtgccagagcatccgtcagtagaa

SEQ ID NO: 3022880 - DNA, 25 bp, Homo sapien
ccagtagctatctgggatggttcca

SEQ ID NO: 3022881 - DNA, 25 bp, Homo sapien
ttacccatgaagaactgtgaccatc

SEQ ID NO: 3022882 - DNA, 25 bp, Homo sapien
ggatctctggccctttgcgtttcag

SEQ ID NO: 3022883 - DNA, 25 bp, Homo sapien
tgagtctggcccctgtcatctggga

SEQ ID NO: 3022884 - DNA, 25 bp, Homo sapien
gagcccaccactggttggaggcaag

SEQ ID NO: 3022885 - DNA, 25 bp, Homo sapien
ggagagccttgggatgactttgtct

SEQ ID NO: 3022886 - DNA, 25 bp, Homo sapien
gttcccgtgtgctcaaatcctcagg

SEQ ID NO: 3022887 - DNA, 25 bp, Homo sapien
cctggctgggccaacctcctctcca

SEQ ID NO: 3022888 - DNA, 25 bp, Homo sapien
cagggtcagaactcctcccaggctc

SEQ ID NO: 3022889 - DNA, 25 bp, Homo sapien
tttgtttttagaaaggcctctctga

SEQ ID NO: 3022890 - DNA, 25 bp, Homo sapien
tctctgaagcaggacatgtctccct

SEQ ID NO: 3022891 - DNA, 25 bp, Homo sapien
cagagattctgcttcccgctggctc

SEQ ID NO: 3022892 - DNA, 25 bp, Homo sapien
ctccagagattctgcttcccgctgg

SEQ ID NO: 3022893 - DNA, 25 bp, Homo sapien
ttctgcttcccgctggctcaatcaa

SEQ ID NO: 3022894 - DNA, 25 bp, Homo sapien
gagattctgcttcccgctggctcaa

SEQ ID NO: 3022895 - DNA, 25 bp, Homo sapien
gaagggcaagaggtcctccagaatc

SEQ ID NO: 3022896 - DNA, 25 bp, Homo sapien
ccagaagtgctgactgtgggatgac

SEQ ID NO: 3022897 - DNA, 25 bp, Homo sapien
accacaggtgcgctgggctctgctg

SEQ ID NO: 3022898 - DNA, 25 bp, Homo sapien
tgcatccagctagatgtcagccaca

SEQ ID NO: 3022899 - DNA, 25 bp, Homo sapien
aaagtcagatgggtctgccagtcct

SEQ ID NO: 3022900 - DNA, 25 bp, Homo sapien
gatgggtctgccagtcctcagggcg

SEQ ID NO: 3022901 - DNA, 25 bp, Homo sapien
agaaagtcagatgggtctgccagtc

SEQ ID NO: 3022902 - DNA, 25 bp, Homo sapien
aagaaagtcagatgggtctgccagt

SEQ ID NO: 3022903 - DNA, 25 bp, Homo sapien
ggcacggatcatggcctcgcagaag

SEQ ID NO: 3022904 - DNA, 25 bp, Homo sapien
cgcgacagcgtggagcaggtggtgc

SEQ ID NO: 3022905 - DNA, 25 bp, Homo sapien
ctgccctttgctggcgttgggcacg

SEQ ID NO: 3022906 - DNA, 25 bp, Homo sapien
tttgctggcgttgggcacggatcat

SEQ ID NO: 3022907 - DNA, 25 bp, Homo sapien
cgcggcgcctctcggggtccgctcc

SEQ ID NO: 3022908 - DNA, 25 bp, Homo sapien
gcggcgcctctcggggtccgctccc

SEQ ID NO: 3022909 - DNA, 25 bp, Homo sapien
tgtcagatgcaaatcctagagctag

SEQ ID NO: 3022910 - DNA, 25 bp, Homo sapien
gctctgcatccagggatcttggtca

SEQ ID NO: 3022911 - DNA, 25 bp, Homo sapien
gattgccagtacgtttgcactgtgt

SEQ ID NO: 3022912 - DNA, 25 bp, Homo sapien
atcttggtcaggtgttggaatcggt

SEQ ID NO: 3022913 - DNA, 25 bp, Homo sapien
tccgttcacaggaccagcatcctgg

SEQ ID NO: 3022914 - DNA, 25 bp, Homo sapien
tggatggttggccactcggcaccct

SEQ ID NO: 3022915 - DNA, 25 bp, Homo sapien
gaggcagaagcctccatccgttcac

SEQ ID NO: 3022916 - DNA, 25 bp, Homo sapien
gaggaccctggcctgagcgagctgc

SEQ ID NO: 3022917 - DNA, 25 bp, Homo sapien
ccccaggtgagaagacctgagttca

SEQ ID NO: 3022918 - DNA, 25 bp, Homo sapien
ggtgagaagacctgagttcacctgc

SEQ ID NO: 3022919 - DNA, 25 bp, Homo sapien
agaagacctgagttcacctgcgctg

SEQ ID NO: 3022920 - DNA, 25 bp, Homo sapien
cagaggctcatattcaaccccacag

SEQ ID NO: 3022921 - DNA, 25 bp, Homo sapien
ttctggcttcgggaactggcagaga

SEQ ID NO: 3022922 - DNA, 25 bp, Homo sapien
tctggcttcgggaactggcagagag

SEQ ID NO: 3022923 - DNA, 25 bp, Homo sapien
cagggagcgcaaagcagagaacaga

SEQ ID NO: 3022924 - DNA, 25 bp, Homo sapien
tgctgcacccaagggttcccagggt

SEQ ID NO: 3022925 - DNA, 25 bp, Homo sapien
ttcgaggattggactccttgcaggg

SEQ ID NO: 3022926 - DNA, 25 bp, Homo sapien
tctggactctcccaccttcgaggat

SEQ ID NO: 3022927 - DNA, 25 bp, Homo sapien
ctgtgtgcccagaagtgacataggc

SEQ ID NO: 3022928 - DNA, 25 bp, Homo sapien
gtgtgcccagaagtgacataggcat

SEQ ID NO: 3022929 - DNA, 25 bp, Homo sapien
tgtgtgcccagaagtgacataggca

SEQ ID NO: 3022930 - DNA, 25 bp, Homo sapien
ggactgagggaggaaagaaggagcc

SEQ ID NO: 3022931 - DNA, 25 bp, Homo sapien
actgagggaggaaagaaggagccat

SEQ ID NO: 3022932 - DNA, 25 bp, Homo sapien
agggactgagggaggaaagaaggag

SEQ ID NO: 3022933 - DNA, 25 bp, Homo sapien
tcagaaaaagggactgagggaggaa

SEQ ID NO: 3022934 - DNA, 25 bp, Homo sapien
atctgttttgattaattcttgtctc

SEQ ID NO: 3022935 - DNA, 25 bp, Homo sapien
cttgtctcctacttcttggacattt

SEQ ID NO: 3022936 - DNA, 25 bp, Homo sapien
tctttgatttctcactagtttcttg

SEQ ID NO: 3022937 - DNA, 25 bp, Homo sapien
tattccactgttaatctgttttgat

SEQ ID NO: 3022938 - DNA, 25 bp, Homo sapien
attacctcatggaagtattctgcta

SEQ ID NO: 3022939 - DNA, 25 bp, Homo sapien
tcatggaagtattctgctaagaggg

SEQ ID NO: 3022940 - DNA, 25 bp, Homo sapien
tcagtgttgtgatcctcacccactg

SEQ ID NO: 3022941 - DNA, 25 bp, Homo sapien
ctggaattcagtgttgtgatcctca

SEQ ID NO: 3022942 - DNA, 25 bp, Homo sapien
taccacaggacagcccggggcaggc

SEQ ID NO: 3022943 - DNA, 25 bp, Homo sapien
gccctttgtaagaaggcgcacccag

SEQ ID NO: 3022944 - DNA, 25 bp, Homo sapien
aggccacaccatagatcccatcggg

SEQ ID NO: 3022945 - DNA, 25 bp, Homo sapien
cactggccttaatgctggagctgaa

SEQ ID NO: 3022946 - DNA, 25 bp, Homo sapien
aagagtaaacacaaaggcactggta

SEQ ID NO: 3022947 - DNA, 25 bp, Homo sapien
aaaggcactggtaaccaactgactc

SEQ ID NO: 3022948 - DNA, 25 bp, Homo sapien
gctaagacagggctgctcattaggg

SEQ ID NO: 3022949 - DNA, 25 bp, Homo sapien
cagggctaagacagggctgctcatt

SEQ ID NO: 3022950 - DNA, 25 bp, Homo sapien
gcaacacatatactatagtacttac

SEQ ID NO: 3022951 - DNA, 25 bp, Homo sapien
gactttacagtaattggcaacacat

SEQ ID NO: 3022952 - DNA, 25 bp, Homo sapien
tacttacgactttacagtaattggc

SEQ ID NO: 3022953 - DNA, 25 bp, Homo sapien
tataaatacttacgactttacagta

SEQ ID NO: 3022954 - DNA, 25 bp, Homo sapien
tgcctttgtagatcgtttgtggttg

SEQ ID NO: 3022955 - DNA, 25 bp, Homo sapien
aacagggcaaattgcaggtagccat

SEQ ID NO: 3022956 - DNA, 25 bp, Homo sapien
tgatgaacagggcaaattgcaggta

SEQ ID NO: 3022957 - DNA, 25 bp, Homo sapien
tcgtttgtggttgttgatgaacagg

SEQ ID NO: 3022958 - DNA, 25 bp, Homo sapien
gtgcagcctcgcacacaggatgtct

SEQ ID NO: 3022959 - DNA, 25 bp, Homo sapien
cgtgcagcctcgcacacaggatgtc

SEQ ID NO: 3022960 - DNA, 25 bp, Homo sapien
ggtatcctggttatgagccaggtga

SEQ ID NO: 3022961 - DNA, 25 bp, Homo sapien
tgcttcgtagcacactgcagggcca

SEQ ID NO: 3022962 - DNA, 25 bp, Homo sapien
cgtagcaggcaatggtgaacagctg

SEQ ID NO: 3022963 - DNA, 25 bp, Homo sapien
ggagctccacgtagcaggcaatggt

SEQ ID NO: 3022964 - DNA, 25 bp, Homo sapien
ggcgcaggatagtggtgtgggatac

SEQ ID NO: 3022965 - DNA, 25 bp, Homo sapien
ctgtggatagtcaagactgaggcgc

SEQ ID NO: 3022966 - DNA, 25 bp, Homo sapien
gatagtcaagactgaggcgcaggat

SEQ ID NO: 3022967 - DNA, 25 bp, Homo sapien
agtcaagactgaggcgcaggatagt

SEQ ID NO: 3022968 - DNA, 25 bp, Homo sapien
gagagcctgagctcagccgtggcca

SEQ ID NO: 3022969 - DNA, 25 bp, Homo sapien
ctgtcggggagagcctgagctcagc

SEQ ID NO: 3022970 - DNA, 25 bp, Homo sapien
ggagagcctgagctcagccgtggcc

SEQ ID NO: 3022971 - DNA, 25 bp, Homo sapien
tcggggagagcctgagctcagccgt

SEQ ID NO: 3022972 - DNA, 25 bp, Homo sapien
agccgcatcctttcttaggccatca

SEQ ID NO: 3022973 - DNA, 25 bp, Homo sapien
tcttaggccatcaggaataggaata

SEQ ID NO: 3022974 - DNA, 25 bp, Homo sapien
gagagctccaaggattcgttgtcct

SEQ ID NO: 3022975 - DNA, 25 bp, Homo sapien
ccaagagtagggtatagaaactcct

SEQ ID NO: 3022976 - DNA, 25 bp, Homo sapien
aggtcaccaaccatcgtaccatctc

SEQ ID NO: 3022977 - DNA, 25 bp, Homo sapien
tagtgggagtagcaatcttgaacgc

SEQ ID NO: 3022978 - DNA, 25 bp, Homo sapien
agtttccagcgccacgttgagcagg

SEQ ID NO: 3022979 - DNA, 25 bp, Homo sapien
tgagcggggaagaacgaatgtgctt

SEQ ID NO: 3022980 - DNA, 25 bp, Homo sapien
ttttgggccagtttgaagatgagcg

SEQ ID NO: 3022981 - DNA, 25 bp, Homo sapien
agaggtatgcatggaaacgctctct

SEQ ID NO: 3022982 - DNA, 25 bp, Homo sapien
cagaggtatgcatggaaacgctctc

SEQ ID NO: 3022983 - DNA, 25 bp, Homo sapien
gaggtatgcatggaaacgctctctc

SEQ ID NO: 3022984 - DNA, 25 bp, Homo sapien
ggtcatcatccaattgcagctcttg

SEQ ID NO: 3022985 - DNA, 25 bp, Homo sapien
catcatccaattgcagctcttggag

SEQ ID NO: 3022986 - DNA, 25 bp, Homo sapien
tgggtcatcatccaattgcagctct

SEQ ID NO: 3022987 - DNA, 25 bp, Homo sapien
caccttgtcctgtgcataggagcct

SEQ ID NO: 3022988 - DNA, 25 bp, Homo sapien
agatacctgtcatcattcaggaggc

SEQ ID NO: 3022989 - DNA, 25 bp, Homo sapien
ctagatacctgtcatcattcaggag

SEQ ID NO: 3022990 - DNA, 25 bp, Homo sapien
tagatacctgtcatcattcaggagg

SEQ ID NO: 3022991 - DNA, 25 bp, Homo sapien
tctagatacctgtcatcattcagga

SEQ ID NO: 3022992 - DNA, 25 bp, Homo sapien
caggccgacgggtctggcccagact

SEQ ID NO: 3022993 - DNA, 25 bp, Homo sapien
aaggatcgacgagctttccggagaa

SEQ ID NO: 3022994 - DNA, 25 bp, Homo sapien
aagatccgcgagctttccggagccg

SEQ ID NO: 3022995 - DNA, 25 bp, Homo sapien
ctacttctgcggagaaggatcgacg

SEQ ID NO: 3022996 - DNA, 25 bp, Homo sapien
tgcctaaaagttaccacagactgta

SEQ ID NO: 3022997 - DNA, 25 bp, Homo sapien
gcagtacctataaagtaaagctaaa

SEQ ID NO: 3022998 - DNA, 25 bp, Homo sapien
ctgtgattgatgaaggaatgcctaa

SEQ ID NO: 3022999 - DNA, 25 bp, Homo sapien
caacttcagcagtacctataaagta

SEQ ID NO: 3023000 - DNA, 25 bp, Homo sapien
taatctgactcgtttcaaaaatttg

SEQ ID NO: 3023001 - DNA, 25 bp, Homo sapien
ccacgattaagagctagggatcccc

SEQ ID NO: 3023002 - DNA, 25 bp, Homo sapien
gtttattattgacaacctctttgaa

SEQ ID NO: 3023003 - DNA, 25 bp, Homo sapien
acaaactcaacagagtgccacgatt

SEQ ID NO: 3023004 - DNA, 25 bp, Homo sapien
cagaagaaacagctggcgcaggaca

SEQ ID NO: 3023005 - DNA, 25 bp, Homo sapien
gagcagaagaaacagctggcgcagg

SEQ ID NO: 3023006 - DNA, 25 bp, Homo sapien
gaagaaacagctggcgcaggacacg

SEQ ID NO: 3023007 - DNA, 25 bp, Homo sapien
ggcgcaggacacggggcttaccatc

SEQ ID NO: 3023008 - DNA, 25 bp, Homo sapien
taaccaccacatgcgacatggaggc

SEQ ID NO: 3023009 - DNA, 25 bp, Homo sapien
gcaaactaaaaagacgtgggcaata

SEQ ID NO: 3023010 - DNA, 25 bp, Homo sapien
gacccaggcctcgagtttagtgcta

SEQ ID NO: 3023011 - DNA, 25 bp, Homo sapien
tctgcagttctgaggtagggtgtaa

SEQ ID NO: 3023012 - DNA, 25 bp, Homo sapien
caatgtcaaggtcacttgcattagc

SEQ ID NO: 3023013 - DNA, 25 bp, Homo sapien
actttctgataatgtctaccttttc

SEQ ID NO: 3023014 - DNA, 25 bp, Homo sapien
gcctcaagagcctatgaaggaagtt

SEQ ID NO: 3023015 - DNA, 25 bp, Homo sapien
gatgtgcctcaagagcctatgaagg

SEQ ID NO: 3023016 - DNA, 25 bp, Homo sapien
cattagtttgatttatacccagtgt

SEQ ID NO: 3023017 - DNA, 25 bp, Homo sapien
caaaaaacatgttatggctaatgaa

SEQ ID NO: 3023018 - DNA, 25 bp, Homo sapien
caaacactgcacactaacaatcatg

SEQ ID NO: 3023019 - DNA, 25 bp, Homo sapien
cattttatgcagcaatctctgtcaa

SEQ ID NO: 3023020 - DNA, 25 bp, Homo sapien
ttcatatgtttgaataaactgagaa

SEQ ID NO: 3023021 - DNA, 25 bp, Homo sapien
tgagaatctcattctccaatttggc

SEQ ID NO: 3023022 - DNA, 25 bp, Homo sapien
caatttggctacaaataaatccaca

SEQ ID NO: 3023023 - DNA, 25 bp, Homo sapien
tagatcaaaatatatcctctattca

SEQ ID NO: 3023024 - DNA, 25 bp, Homo sapien
cgtgcttcgcacatcttgctcagca

SEQ ID NO: 3023025 - DNA, 25 bp, Homo sapien
gaccgtgcttcgcacatcttgctca

SEQ ID NO: 3023026 - DNA, 25 bp, Homo sapien
acaggaccgtgcttcgcacatcttg

SEQ ID NO: 3023027 - DNA, 25 bp, Homo sapien
ctggacacaggaccgtgcttcgcac

SEQ ID NO: 3023028 - DNA, 25 bp, Homo sapien
ttccaggccaaagggaggaagctct

SEQ ID NO: 3023029 - DNA, 25 bp, Homo sapien
tctgtagtgcaccatgctgcctgca

SEQ ID NO: 3023030 - DNA, 25 bp, Homo sapien
ttattaacacctactctgaagcagg

SEQ ID NO: 3023031 - DNA, 25 bp, Homo sapien
caatcctgctgttgaggttccaggc

SEQ ID NO: 3023032 - DNA, 25 bp, Homo sapien
cctggcatttgccagcagcctcggc

SEQ ID NO: 3023033 - DNA, 25 bp, Homo sapien
aaggctcctaatgactggtgcctgg

SEQ ID NO: 3023034 - DNA, 25 bp, Homo sapien
tcggccaggtgctcgtcaggaatgc

SEQ ID NO: 3023035 - DNA, 25 bp, Homo sapien
tggccccaaggctcctaatgactgg

SEQ ID NO: 3023036 - DNA, 25 bp, Homo sapien
cttctgttctcagattgacagagac

SEQ ID NO: 3023037 - DNA, 25 bp, Homo sapien
tccttctgttctcagattgacagag

SEQ ID NO: 3023038 - DNA, 25 bp, Homo sapien
tctgttctcagattgacagagacct

SEQ ID NO: 3023039 - DNA, 25 bp, Homo sapien
cagtccttctgttctcagattgaca

SEQ ID NO: 3023040 - DNA, 25 bp, Homo sapien
ctactctgaaggcttcgtgggggcc

SEQ ID NO: 3023041 - DNA, 25 bp, Homo sapien
tgaaggcttcgtgggggcctggaca

SEQ ID NO: 3023042 - DNA, 25 bp, Homo sapien
actctgaaggcttcgtgggggcctg

SEQ ID NO: 3023043 - DNA, 25 bp, Homo sapien
tctgaaggcttcgtgggggcctgga

SEQ ID NO: 3023044 - DNA, 25 bp, Homo sapien
atccttggcctttggccggcagaac

SEQ ID NO: 3023045 - DNA, 25 bp, Homo sapien
ggaagcctgagctagaactgaagct

SEQ ID NO: 3023046 - DNA, 25 bp, Homo sapien
ctttggaagcctgagctagaactga

SEQ ID NO: 3023047 - DNA, 25 bp, Homo sapien
tggaagcctgagctagaactgaagc

SEQ ID NO: 3023048 - DNA, 25 bp, Homo sapien
ttgctcctcgagtccaggctctttg

SEQ ID NO: 3023049 - DNA, 25 bp, Homo sapien
gctcctcgagtccaggctctttgca

SEQ ID NO: 3023050 - DNA, 25 bp, Homo sapien
ggatgacatttctagcagagctcca

SEQ ID NO: 3023051 - DNA, 25 bp, Homo sapien
tgacatttctagcagagctccaggg

SEQ ID NO: 3023052 - DNA, 25 bp, Homo sapien
ggaggcccagtgaacatggctggag

SEQ ID NO: 3023053 - DNA, 25 bp, Homo sapien
aacatggctggagctctgaacttat

SEQ ID NO: 3023054 - DNA, 25 bp, Homo sapien
acatggctggagctctgaacttatg

SEQ ID NO: 3023055 - DNA, 25 bp, Homo sapien
ggcccagtgaacatggctggagctc

SEQ ID NO: 3023056 - DNA, 25 bp, Homo sapien
gcatgactggtgagctaaaaggccg

SEQ ID NO: 3023057 - DNA, 25 bp, Homo sapien
tccatgacctgagtgccgagtaatt

SEQ ID NO: 3023058 - DNA, 25 bp, Homo sapien
tgaaatgaccctgtgatgaaaactg

SEQ ID NO: 3023059 - DNA, 25 bp, Homo sapien
ccgagtaattggtgaataggcctgc

SEQ ID NO: 3023060 - DNA, 25 bp, Homo sapien
tcatcttcctctcagtccatcaacg

SEQ ID NO: 3023061 - DNA, 25 bp, Homo sapien
tggcaggcatcctaagggctcatct

SEQ ID NO: 3023062 - DNA, 25 bp, Homo sapien
atcttcctctcagtccatcaacggg

SEQ ID NO: 3023063 - DNA, 25 bp, Homo sapien
gcatggcaggcatcctaagggctca

SEQ ID NO: 3023064 - DNA, 25 bp, Homo sapien
gaagcacttgccaccggaaaaatcc

SEQ ID NO: 3023065 - DNA, 25 bp, Homo sapien
tggaggatggagaagcacttgccac

SEQ ID NO: 3023066 - DNA, 25 bp, Homo sapien
tgggacatccttccttacggctggc

SEQ ID NO: 3023067 - DNA, 25 bp, Homo sapien
acacatgaacaaaacctcgcctgca

SEQ ID NO: 3023068 - DNA, 25 bp, Homo sapien
acagccactgtaaaagggaggcgaa

SEQ ID NO: 3023069 - DNA, 25 bp, Homo sapien
tacagccactgtaaaagggaggcga

SEQ ID NO: 3023070 - DNA, 25 bp, Homo sapien
gcgtacagccactgtaaaagggagg

SEQ ID NO: 3023071 - DNA, 25 bp, Homo sapien
agttgcgtacagccactgtaaaagg

SEQ ID NO: 3023072 - DNA, 25 bp, Homo sapien
ccacctttgacagttgctgggcttc

SEQ ID NO: 3023073 - DNA, 25 bp, Homo sapien
ctccacctttgacagttgctgggct

SEQ ID NO: 3023074 - DNA, 25 bp, Homo sapien
atcttttgtgctcaccacccatatc

SEQ ID NO: 3023075 - DNA, 25 bp, Homo sapien
gacagcctagattcacagcctttcc

SEQ ID NO: 3023076 - DNA, 25 bp, Homo sapien
gccagatggaccccggagacagcct

SEQ ID NO: 3023077 - DNA, 25 bp, Homo sapien
ccaggcggggagcaaatcttttctc

SEQ ID NO: 3023078 - DNA, 25 bp, Homo sapien
tgatcggcttggaggccacaagttg

SEQ ID NO: 3023079 - DNA, 25 bp, Homo sapien
cagaagaaataccttgccaagcatt

SEQ ID NO: 3023080 - DNA, 25 bp, Homo sapien
gacactgtgttgtcaccaagcattg

SEQ ID NO: 3023081 - DNA, 25 bp, Homo sapien
caagttgggacacttcagctgtgac

SEQ ID NO: 3023082 - DNA, 25 bp, Homo sapien
aacctggacaccattatcatcagtg

SEQ ID NO: 3023083 - DNA, 25 bp, Homo sapien
tgtggaacctcagcattcagtgtcg

SEQ ID NO: 3023084 - DNA, 25 bp, Homo sapien
cagcattcagtgtcggtgccatcca

SEQ ID NO: 3023085 - DNA, 25 bp, Homo sapien
gaacatgacacgcagtagaactgtg

SEQ ID NO: 3023086 - DNA, 25 bp, Homo sapien
caggatggagagctctcataacctg

SEQ ID NO: 3023087 - DNA, 25 bp, Homo sapien
ccagtgccttttcctagcagcaaga

SEQ ID NO: 3023088 - DNA, 25 bp, Homo sapien
taatttccaccagtgccttttccta

SEQ ID NO: 3023089 - DNA, 25 bp, Homo sapien
gagctctcataacctgaaggtgtaa

SEQ ID NO: 3023090 - DNA, 25 bp, Homo sapien
aggtggttccagccggatctgcaga

SEQ ID NO: 3023091 - DNA, 25 bp, Homo sapien
ggaggtggttccagccggatctgca

SEQ ID NO: 3023092 - DNA, 25 bp, Homo sapien
atctgacacagggttgggctctggc

SEQ ID NO: 3023093 - DNA, 25 bp, Homo sapien
caccagccctggcaggcatctgaca

SEQ ID NO: 3023094 - DNA, 25 bp, Homo sapien
ccctggtgggagagtcagaaattcc

SEQ ID NO: 3023095 - DNA, 25 bp, Homo sapien
tccccattgttgatgagcagtgcat

SEQ ID NO: 3023096 - DNA, 25 bp, Homo sapien
acaaggcttctctaacagcagcggg

SEQ ID NO: 3023097 - DNA, 25 bp, Homo sapien
tgatacaatcctttgaacctctttg

SEQ ID NO: 3023098 - DNA, 25 bp, Homo sapien
catttcagcaacctccatcaggcag

SEQ ID NO: 3023099 - DNA, 25 bp, Homo sapien
ccatttcagcaacctccatcaggca

SEQ ID NO: 3023100 - DNA, 25 bp, Homo sapien
tattagctatccaaaggaaagctag

SEQ ID NO: 3023101 - DNA, 25 bp, Homo sapien
gctattagctatccaaaggaaagct

SEQ ID NO: 3023102 - DNA, 25 bp, Homo sapien
ggagctattagctatccaaaggaaa

SEQ ID NO: 3023103 - DNA, 25 bp, Homo sapien
gagctattagctatccaaaggaaag

SEQ ID NO: 3023104 - DNA, 25 bp, Homo sapien
ccttgtcactactgtcctttgtgtc

SEQ ID NO: 3023105 - DNA, 25 bp, Homo sapien
cccttgtcactactgtcctttgtgt

SEQ ID NO: 3023106 - DNA, 25 bp, Homo sapien
cttgtcactactgtcctttgtgtct

SEQ ID NO: 3023107 - DNA, 25 bp, Homo sapien
tcagatgtaaattcctcttgttccc

SEQ ID NO: 3023108 - DNA, 25 bp, Homo sapien
tgttcccgatcctttgccagaacgc

SEQ ID NO: 3023109 - DNA, 25 bp, Homo sapien
cgatcctttgccagaacgccctgca

SEQ ID NO: 3023110 - DNA, 25 bp, Homo sapien
cttggcctcctcagatgtaaattcc

SEQ ID NO: 3023111 - DNA, 25 bp, Homo sapien
tgggcttctcgtgctcctcaccagc

SEQ ID NO: 3023112 - DNA, 25 bp, Homo sapien
ctctgggcttctcgtgctcctcacc

SEQ ID NO: 3023113 - DNA, 25 bp, Homo sapien
ctctctgggcttctcgtgctcctca

SEQ ID NO: 3023114 - DNA, 25 bp, Homo sapien
gcttctcgtgctcctcaccagccct

SEQ ID NO: 3023115 - DNA, 25 bp, Homo sapien
tgcccacccagttggaaaggtgcca

SEQ ID NO: 3023116 - DNA, 25 bp, Homo sapien
cagttggaaaggtgccaccacagtt

SEQ ID NO: 3023117 - DNA, 25 bp, Homo sapien
gaaagctgcccacccagttggaaag

SEQ ID NO: 3023118 - DNA, 25 bp, Homo sapien
agccttaacttcagaaagctgccca

SEQ ID NO: 3023119 - DNA, 25 bp, Homo sapien
acagaacatctccaacgccctcaga

SEQ ID NO: 3023120 - DNA, 25 bp, Homo sapien
ccagagtcccccaaggtcgatgctg

SEQ ID NO: 3023121 - DNA, 25 bp, Homo sapien
gtcccccaaggtcgatgctgctggc

SEQ ID NO: 3023122 - DNA, 25 bp, Homo sapien
agacctgtggatgaagagccagagt

SEQ ID NO: 3023123 - DNA, 25 bp, Homo sapien
cctcccagctgcctgccttggcccc

SEQ ID NO: 3023124 - DNA, 25 bp, Homo sapien
aaagtgccgagattgcagcctctgc

SEQ ID NO: 3023125 - DNA, 25 bp, Homo sapien
ctccacctcccagctgcctgccttg

SEQ ID NO: 3023126 - DNA, 25 bp, Homo sapien
ccccaaagtgccgagattgcagcct

SEQ ID NO: 3023127 - DNA, 25 bp, Homo sapien
gataagtcgtcaaagagcccagaga

SEQ ID NO: 3023128 - DNA, 25 bp, Homo sapien
tgtcatgccctcctgaactacacag

SEQ ID NO: 3023129 - DNA, 25 bp, Homo sapien
tgtcaaaatcggtgtcagaaggtgg

SEQ ID NO: 3023130 - DNA, 25 bp, Homo sapien
cacagacaagcaagcggtagacttt

SEQ ID NO: 3023131 - DNA, 25 bp, Homo sapien
cttggtgtggtcaaggacatggaag

SEQ ID NO: 3023132 - DNA, 25 bp, Homo sapien
ttggtgtggtcaaggacatggaaga

SEQ ID NO: 3023133 - DNA, 25 bp, Homo sapien
catggaagaaagctggttggctgga

SEQ ID NO: 3023134 - DNA, 25 bp, Homo sapien
tgatccagggagtccaagggggcag

SEQ ID NO: 3023135 - DNA, 25 bp, Homo sapien
ggagccagtcccaagcttgaaccag

SEQ ID NO: 3023136 - DNA, 25 bp, Homo sapien
tgttctgaaatgtaggctgtgactc

SEQ ID NO: 3023137 - DNA, 25 bp, Homo sapien
caagaacttaaagcccgtcagtgtt

SEQ ID NO: 3023138 - DNA, 25 bp, Homo sapien
tggcaagacctacccaacagtcgtt

SEQ ID NO: 3023139 - DNA, 25 bp, Homo sapien
taaagataagaatcccacatcgtgt

SEQ ID NO: 3023140 - DNA, 25 bp, Homo sapien
tctctgttatgagcagggcacatgt

SEQ ID NO: 3023141 - DNA, 25 bp, Homo sapien
taagagtcggcagtatacatgtgca

SEQ ID NO: 3023142 - DNA, 25 bp, Homo sapien
tgggattagctctgaaccgatgagc

SEQ ID NO: 3023143 - DNA, 25 bp, Homo sapien
tcttgccataggaagctggttggga

SEQ ID NO: 3023144 - DNA, 25 bp, Homo sapien
ggagtgctgccaactttcttgaccg

SEQ ID NO: 3023145 - DNA, 25 bp, Homo sapien
ggtggaccaccttggattgcctctt

SEQ ID NO: 3023146 - DNA, 25 bp, Homo sapien
cagtctcaactggttgaatcactgg

SEQ ID NO: 3023147 - DNA, 25 bp, Homo sapien
ccagaactcccctgttgtgtgggcc

SEQ ID NO: 3023148 - DNA, 25 bp, Homo sapien
ccttttgttgattccctccgtgtga

SEQ ID NO: 3023149 - DNA, 25 bp, Homo sapien
tgcaaaggctgggattgtttctgcc

SEQ ID NO: 3023150 - DNA, 25 bp, Homo sapien
taacctcagtgttcacgctgtttcc

SEQ ID NO: 3023151 - DNA, 25 bp, Homo sapien
aggacggaaggacgtggcccatgcc

SEQ ID NO: 3023152 - DNA, 25 bp, Homo sapien
aaggacggaaggacgtggcccatgc

SEQ ID NO: 3023153 - DNA, 25 bp, Homo sapien
gctggcgaacggaaggacggaagga

SEQ ID NO: 3023154 - DNA, 25 bp, Homo sapien
gaaggacggaaggacgtggcccatg

SEQ ID NO: 3023155 - DNA, 25 bp, Homo sapien
tttggggagatggacaaacgcatgc

SEQ ID NO: 3023156 - DNA, 25 bp, Homo sapien
gggagatggacaaacgcatgcagac

SEQ ID NO: 3023157 - DNA, 25 bp, Homo sapien
cagacctgagggtgttcggagcaca

SEQ ID NO: 3023158 - DNA, 25 bp, Homo sapien
gatggacaaacgcatgcagacctga

SEQ ID NO: 3023159 - DNA, 25 bp, Homo sapien
ataacatcgcagagcacactccgct

SEQ ID NO: 3023160 - DNA, 25 bp, Homo sapien
cacactccgcttcctacagaggttg

SEQ ID NO: 3023161 - DNA, 25 bp, Homo sapien
actccgcttcctacagaggttgtgc

SEQ ID NO: 3023162 - DNA, 25 bp, Homo sapien
ggggtctggttatgtcctccagcat

SEQ ID NO: 3023163 - DNA, 25 bp, Homo sapien
cactcaactgtcccactccctgcac

SEQ ID NO: 3023164 - DNA, 25 bp, Homo sapien
actccctgcactggcgctgttcttg

SEQ ID NO: 3023165 - DNA, 25 bp, Homo sapien
tgtttccagtgcctagcagaatgtg

SEQ ID NO: 3023166 - DNA, 25 bp, Homo sapien
tagcttctgcctgaaaggcctcctg

SEQ ID NO: 3023167 - DNA, 25 bp, Homo sapien
catgggtcccggtgcctatgaactg

SEQ ID NO: 3023168 - DNA, 25 bp, Homo sapien
cattttggtatagcggaacccgtcg

SEQ ID NO: 3023169 - DNA, 25 bp, Homo sapien
gagatccatgcagccaagtcactgg

SEQ ID NO: 3023170 - DNA, 25 bp, Homo sapien
tatgtatgtgtcagtagtaggctcc

SEQ ID NO: 3023171 - DNA, 25 bp, Homo sapien
cattgtctatgcttaccggaaccga

SEQ ID NO: 3023172 - DNA, 25 bp, Homo sapien
gaaagatagctacacctcacaagga

SEQ ID NO: 3023173 - DNA, 25 bp, Homo sapien
gaaactggtgaaatgggatccctcc

SEQ ID NO: 3023174 - DNA, 25 bp, Homo sapien
ttctaaactttaccctgaaggctgc

SEQ ID NO: 3023175 - DNA, 25 bp, Homo sapien
aaaagacaagcttagggtgctgcat

SEQ ID NO: 3023176 - DNA, 25 bp, Homo sapien
taagttatgctgagtccaagtttcc

SEQ ID NO: 3023177 - DNA, 25 bp, Homo sapien
gaaatgctgcagacagggaattcct

SEQ ID NO: 3023178 - DNA, 25 bp, Homo sapien
tgaaaatccctggtagtacctgtag

SEQ ID NO: 3023179 - DNA, 25 bp, Homo sapien
tctctcggtgtccaactgagtctca

SEQ ID NO: 3023180 - DNA, 25 bp, Homo sapien
tgtgggcagctttaccataagttct

SEQ ID NO: 3023181 - DNA, 25 bp, Homo sapien
tgttgctgctcaatagtttcctgga

SEQ ID NO: 3023182 - DNA, 25 bp, Homo sapien
tacttaagctgttttggcacaagca

SEQ ID NO: 3023183 - DNA, 25 bp, Homo sapien
ggaaaagaactgacctactcgtcga

SEQ ID NO: 3023184 - DNA, 25 bp, Homo sapien
taagactaaatagggtcaggcgcag

SEQ ID NO: 3023185 - DNA, 25 bp, Homo sapien
ttgattccatccagggacatttttt

SEQ ID NO: 3023186 - DNA, 25 bp, Homo sapien
tatttcttgacaagactgtacaggg

SEQ ID NO: 3023187 - DNA, 25 bp, Homo sapien
gagactggctcagggtatttcttga

SEQ ID NO: 3023188 - DNA, 25 bp, Homo sapien
ttgacaagactgtacagggcttctc

SEQ ID NO: 3023189 - DNA, 25 bp, Homo sapien
atacacaaaccctccacagcccacg

SEQ ID NO: 3023190 - DNA, 25 bp, Homo sapien
taacatgaagtgtctgaagatccat

SEQ ID NO: 3023191 - DNA, 25 bp, Homo sapien
catgacgctttcaatgcatttcttg

SEQ ID NO: 3023192 - DNA, 25 bp, Homo sapien
aaagggacagtaacatgaagtgtct

SEQ ID NO: 3023193 - DNA, 25 bp, Homo sapien
tccatgtgaatcatgacgctttcaa

SEQ ID NO: 3023194 - DNA, 25 bp, Homo sapien
tctccatcaataatatgtcagtcaa

SEQ ID NO: 3023195 - DNA, 25 bp, Homo sapien
ccatcaataatatgtcagtcaactg

SEQ ID NO: 3023196 - DNA, 25 bp, Homo sapien
catcaataatatgtcagtcaactgc

SEQ ID NO: 3023197 - DNA, 25 bp, Homo sapien
tccatcaataatatgtcagtcaact

SEQ ID NO: 3023198 - DNA, 25 bp, Homo sapien
ctgactcaggtaaactgccaagaga

SEQ ID NO: 3023199 - DNA, 25 bp, Homo sapien
ctcaggtaaactgccaagagatgct

SEQ ID NO: 3023200 - DNA, 25 bp, Homo sapien
ttagctgctgacaggtcctcataac

SEQ ID NO: 3023201 - DNA, 25 bp, Homo sapien
aggtcctcataacctgactcaggta

SEQ ID NO: 3023202 - DNA, 25 bp, Homo sapien
agggctggccagtctaaccaagatt

SEQ ID NO: 3023203 - DNA, 25 bp, Homo sapien
tatttggcaggagaagactagagca

SEQ ID NO: 3023204 - DNA, 25 bp, Homo sapien
aagactagagcatacagattacggg

SEQ ID NO: 3023205 - DNA, 25 bp, Homo sapien
tctaaaaagtgcagatgggccgggc

SEQ ID NO: 3023206 - DNA, 25 bp, Homo sapien
ttttggttcaatcctgtctcttgca

SEQ ID NO: 3023207 - DNA, 25 bp, Homo sapien
tcagagaacacagctttagatcttg

SEQ ID NO: 3023208 - DNA, 25 bp, Homo sapien
cagagaacacagctttagatcttga

SEQ ID NO: 3023209 - DNA, 25 bp, Homo sapien
ggttttggttcaatcctgtctcttg

SEQ ID NO: 3023210 - DNA, 25 bp, Homo sapien
tccgtagcactgagaatgcaaatgc

SEQ ID NO: 3023211 - DNA, 25 bp, Homo sapien
gacaagaagccaaacatgtgtatgt

SEQ ID NO: 3023212 - DNA, 25 bp, Homo sapien
tgcaaatgcaggacatgaacagtaa

SEQ ID NO: 3023213 - DNA, 25 bp, Homo sapien
tatgttttactggaacttccaagga

SEQ ID NO: 3023214 - DNA, 25 bp, Homo sapien
ctacaaagaaaggatagatgggatc

SEQ ID NO: 3023215 - DNA, 25 bp, Homo sapien
agttgctctgcaaattgcaccgaga

SEQ ID NO: 3023216 - DNA, 25 bp, Homo sapien
gatgggatcagacctcagatgtgct

SEQ ID NO: 3023217 - DNA, 25 bp, Homo sapien
caccgagaagaactgcagtaatgtt

SEQ ID NO: 3023218 - DNA, 25 bp, Homo sapien
atcccaatattgtgagaggccaagg

SEQ ID NO: 3023219 - DNA, 25 bp, Homo sapien
taatcccaatattgtgagaggccaa

SEQ ID NO: 3023220 - DNA, 25 bp, Homo sapien
tgtaatcccaatattgtgagaggcc

SEQ ID NO: 3023221 - DNA, 25 bp, Homo sapien
cccaatattgtgagaggccaaggtg

SEQ ID NO: 3023222 - DNA, 25 bp, Homo sapien
gtcgatcaactaggtccaaggcctg

SEQ ID NO: 3023223 - DNA, 25 bp, Homo sapien
aaggtgatggactgtcgatcaacta

SEQ ID NO: 3023224 - DNA, 25 bp, Homo sapien
cactgggtgatgagattaaggtgat

SEQ ID NO: 3023225 - DNA, 25 bp, Homo sapien
ggtaaacacgccttccactgggtga

SEQ ID NO: 3023226 - DNA, 25 bp, Homo sapien
ttatccctgaggcaagcacatgcat

SEQ ID NO: 3023227 - DNA, 25 bp, Homo sapien
ccttatccctgaggcaagcacatgc

SEQ ID NO: 3023228 - DNA, 25 bp, Homo sapien
tccccttatccctgaggcaagcaca

SEQ ID NO: 3023229 - DNA, 25 bp, Homo sapien
cttccccttatccctgaggcaagca

SEQ ID NO: 3023230 - DNA, 25 bp, Homo sapien
gagtgattattactgggtggtatga

SEQ ID NO: 3023231 - DNA, 25 bp, Homo sapien
tactgggtggtatgattattgatgc

SEQ ID NO: 3023232 - DNA, 25 bp, Homo sapien
gcaataaaccaaaatttaagagtga

SEQ ID NO: 3023233 - DNA, 25 bp, Homo sapien
aaatttaagagtgattattactggg

SEQ ID NO: 3023234 - DNA, 25 bp, Homo sapien
cctgcctcggtgtgtgccacctgta

SEQ ID NO: 3023235 - DNA, 25 bp, Homo sapien
tgcctcggtgtgtgccacctgtagt

SEQ ID NO: 3023236 - DNA, 25 bp, Homo sapien
gcctcggtgtgtgccacctgtagtc

SEQ ID NO: 3023237 - DNA, 25 bp, Homo sapien
ccacctgcctcggtgtgtgccacct

SEQ ID NO: 3023238 - DNA, 25 bp, Homo sapien
cattggaagctgatagaagagtgga

SEQ ID NO: 3023239 - DNA, 25 bp, Homo sapien
ttggaagctgatagaagagtggaaa

SEQ ID NO: 3023240 - DNA, 25 bp, Homo sapien
tgatacattggaagctgatagaaga

SEQ ID NO: 3023241 - DNA, 25 bp, Homo sapien
tacattggaagctgatagaagagtg

SEQ ID NO: 3023242 - DNA, 25 bp, Homo sapien
cacaaccgccggcaacactacggcc

SEQ ID NO: 3023243 - DNA, 25 bp, Homo sapien
gccgccgccatctcgctcaggagct

SEQ ID NO: 3023244 - DNA, 25 bp, Homo sapien
aggagctcctccacaaccgccggca

SEQ ID NO: 3023245 - DNA, 25 bp, Homo sapien
ccgccatctcgctcaggagctcctc

SEQ ID NO: 3023246 - DNA, 25 bp, Homo sapien
caggacacgccctccacgaccggcg

SEQ ID NO: 3023247 - DNA, 25 bp, Homo sapien
ggaccgccgcgacgctccagctgac

SEQ ID NO: 3023248 - DNA, 25 bp, Homo sapien
ggacacgccctccacgaccggcgga

SEQ ID NO: 3023249 - DNA, 25 bp, Homo sapien
ccacgaccggcggaccgccgcgacg

SEQ ID NO: 3023250 - DNA, 25 bp, Homo sapien
ccggggcagggcgagacggagtgac

SEQ ID NO: 3023251 - DNA, 25 bp, Homo sapien
gccatcccgagtcgcgccgcacggc

SEQ ID NO: 3023252 - DNA, 25 bp, Homo sapien
agcatgttccggctcctgagctgga

SEQ ID NO: 3023253 - DNA, 25 bp, Homo sapien
ctggcaggaggtccggggcccgagg

SEQ ID NO: 3023254 - DNA, 25 bp, Homo sapien
gtgcaggtgccgccatcccgagtcg

SEQ ID NO: 3023255 - DNA, 25 bp, Homo sapien
aatgcttattacgttttagccctag

SEQ ID NO: 3023256 - DNA, 25 bp, Homo sapien
ttagttcagctaccaatcaaaatgc

SEQ ID NO: 3023257 - DNA, 25 bp, Homo sapien
tactctataccaagagctaccgaga

SEQ ID NO: 3023258 - DNA, 25 bp, Homo sapien
tctggaggctaggaatagaactgga

SEQ ID NO: 3023259 - DNA, 25 bp, Homo sapien
accgcacttggccctattttcaact

SEQ ID NO: 3023260 - DNA, 25 bp, Homo sapien
ccgcacttggccctattttcaactt

SEQ ID NO: 3023261 - DNA, 25 bp, Homo sapien
cgcacttggccctattttcaacttt

SEQ ID NO: 3023262 - DNA, 25 bp, Homo sapien
gttattgggcatcaagatagtgtcc

SEQ ID NO: 3023263 - DNA, 25 bp, Homo sapien
gttgatgactattgccaaattgcca

SEQ ID NO: 3023264 - DNA, 25 bp, Homo sapien
gagatttccaagtcaagagtagcac

SEQ ID NO: 3023265 - DNA, 25 bp, Homo sapien
gagtaacactcataggacctttagg

SEQ ID NO: 3023266 - DNA, 25 bp, Homo sapien
aacttgcgtttcttatgagatccac

SEQ ID NO: 3023267 - DNA, 25 bp, Homo sapien
ccaggcttgcttgtaggttaattgc

SEQ ID NO: 3023268 - DNA, 25 bp, Homo sapien
ttccttgaaagttgcagagtctgtg

SEQ ID NO: 3023269 - DNA, 25 bp, Homo sapien
tattatatatctagagcggaccagg

SEQ ID NO: 3023270 - DNA, 25 bp, Homo sapien
tctctgtatatctttgttatcagat

SEQ ID NO: 3023271 - DNA, 25 bp, Homo sapien
gcagtatattagtgttcatgatgtt

SEQ ID NO: 3023272 - DNA, 25 bp, Homo sapien
gactagcagtatattagtgttcatg

SEQ ID NO: 3023273 - DNA, 25 bp, Homo sapien
tacattttgactagcagtatattag

SEQ ID NO: 3023274 - DNA, 25 bp, Homo sapien
gacgcatagtaagcactacccagta

SEQ ID NO: 3023275 - DNA, 25 bp, Homo sapien
aaaacaaagtcaccgcctcatggag

SEQ ID NO: 3023276 - DNA, 25 bp, Homo sapien
gccaagtggctatttgtgagggaaa

SEQ ID NO: 3023277 - DNA, 25 bp, Homo sapien
gccttgttagtatgaaacctggtga

SEQ ID NO: 3023278 - DNA, 25 bp, Homo sapien
gatcgctgaagacgtcaaatcctag

SEQ ID NO: 3023279 - DNA, 25 bp, Homo sapien
aatcgttgccacaaaatatctcgct

SEQ ID NO: 3023280 - DNA, 25 bp, Homo sapien
tagaaaacatagcatgcctacgcgt

SEQ ID NO: 3023281 - DNA, 25 bp, Homo sapien
cattctcgaatagttgttggttgaa

SEQ ID NO: 3023282 - DNA, 25 bp, Homo sapien
catgtgcttagacgcctgtgctcgc

SEQ ID NO: 3023283 - DNA, 25 bp, Homo sapien
tatcagttactaggtctgcccagaa

SEQ ID NO: 3023284 - DNA, 25 bp, Homo sapien
ccttagtggaagagaaagccaatac

SEQ ID NO: 3023285 - DNA, 25 bp, Homo sapien
cactcattggtaacaggatcagcag

SEQ ID NO: 3023286 - DNA, 25 bp, Homo sapien
tctgagtcagaataggcccctacag

SEQ ID NO: 3023287 - DNA, 25 bp, Homo sapien
tgctggtatagctgaactactgacc

SEQ ID NO: 3023288 - DNA, 25 bp, Homo sapien
gaatgaatagactgctgtgctgaaa

SEQ ID NO: 3023289 - DNA, 25 bp, Homo sapien
taggcacgtgacagtatagcaccca

SEQ ID NO: 3023290 - DNA, 25 bp, Homo sapien
tgaaccacagtaagttgtcagtgct

SEQ ID NO: 3023291 - DNA, 25 bp, Homo sapien
gggtcttggtcagtagctaatcaca

SEQ ID NO: 3023292 - DNA, 25 bp, Homo sapien
tatatgggcaaagtactaaacctgt

SEQ ID NO: 3023293 - DNA, 25 bp, Homo sapien
caagtactaggaatgctgaccacta

SEQ ID NO: 3023294 - DNA, 25 bp, Homo sapien
ccccaaagttgatgcgctgatttga

SEQ ID NO: 3023295 - DNA, 25 bp, Homo sapien
gtacaatgcccgtgacagccaacat

SEQ ID NO: 3023296 - DNA, 25 bp, Homo sapien
taaactgaactagaacatacccatg

SEQ ID NO: 3023297 - DNA, 25 bp, Homo sapien
cagtgtgcgtaacagtgaggtatgc

SEQ ID NO: 3023298 - DNA, 25 bp, Homo sapien
cagagggagcacatgcaatcggtgt

SEQ ID NO: 3023299 - DNA, 25 bp, Homo sapien
tggtggagtactgctgagcatccgc

SEQ ID NO: 3023300 - DNA, 25 bp, Homo sapien
tatccgacagggtctcgtactgtgc

SEQ ID NO: 3023301 - DNA, 25 bp, Homo sapien
agctgcttggttcaccgcagaggga

SEQ ID NO: 3023302 - DNA, 25 bp, Homo sapien
ccaccctggcgtctgcctatggtaa

SEQ ID NO: 3023303 - DNA, 25 bp, Homo sapien
cttgcccaggtataggagacttaga

SEQ ID NO: 3023304 - DNA, 25 bp, Homo sapien
gctgatcagctttggtttgcaaact

SEQ ID NO: 3023305 - DNA, 25 bp, Homo sapien
ggtaatccccttctgaatgtacaga

SEQ ID NO: 3023306 - DNA, 25 bp, Homo sapien
tctgcatggcggttgccaaaggctg

SEQ ID NO: 3023307 - DNA, 25 bp, Homo sapien
tggagttgatccctcaaacccttct

SEQ ID NO: 3023308 - DNA, 25 bp, Homo sapien
cagatcctggtactcaatgaaataa

SEQ ID NO: 3023309 - DNA, 25 bp, Homo sapien
gatactgagggtttagtaagtcaca

SEQ ID NO: 3023310 - DNA, 25 bp, Homo sapien
tcacggcttaccagctcactaaagc

SEQ ID NO: 3023311 - DNA, 25 bp, Homo sapien
tgagtcatcatacccggcctctctt

SEQ ID NO: 3023312 - DNA, 25 bp, Homo sapien
gatcccctcccaagttatccatggg

SEQ ID NO: 3023313 - DNA, 25 bp, Homo sapien
tatttctcctacacctgcagtgact

SEQ ID NO: 3023314 - DNA, 25 bp, Homo sapien
tacaattgtaattgactaagtcacc

SEQ ID NO: 3023315 - DNA, 25 bp, Homo sapien
aacagaaatactgctgaacttcagg

SEQ ID NO: 3023316 - DNA, 25 bp, Homo sapien
aaaacaatttcacactgccccaaat

SEQ ID NO: 3023317 - DNA, 25 bp, Homo sapien
ccatagtgagatagatcttttgctt

SEQ ID NO: 3023318 - DNA, 25 bp, Homo sapien
gaaaccctaagaggtgactctgagc

SEQ ID NO: 3023319 - DNA, 25 bp, Homo sapien
gactctgagcacataaagacataaa

SEQ ID NO: 3023320 - DNA, 25 bp, Homo sapien
tattataatgtctgggtaggttttc

SEQ ID NO: 3023321 - DNA, 25 bp, Homo sapien
gtcttagtgatgcatcagaatttgg

SEQ ID NO: 3023322 - DNA, 25 bp, Homo sapien
gaatgaggtgatgggtccccttcct

SEQ ID NO: 3023323 - DNA, 25 bp, Homo sapien
ctgaatgaggtgatgggtccccttc

SEQ ID NO: 3023324 - DNA, 25 bp, Homo sapien
atgaggtgatgggtccccttcctct

SEQ ID NO: 3023325 - DNA, 25 bp, Homo sapien
tgaggtgatgggtccccttcctctc

SEQ ID NO: 3023326 - DNA, 25 bp, Homo sapien
gaatggcctctagagctaactgagc

SEQ ID NO: 3023327 - DNA, 25 bp, Homo sapien
cataggctgggacatgacaactcca

SEQ ID NO: 3023328 - DNA, 25 bp, Homo sapien
tggcaggatcagcaaaagaatggcc

SEQ ID NO: 3023329 - DNA, 25 bp, Homo sapien
tgttggcagtaccaggcactactcc

SEQ ID NO: 3023330 - DNA, 25 bp, Homo sapien
ctgaaagagaatcaaaaacatttcc

SEQ ID NO: 3023331 - DNA, 25 bp, Homo sapien
aaagagaatcaaaaacatttccact

SEQ ID NO: 3023332 - DNA, 25 bp, Homo sapien
gagaatcaaaaacatttccacttat

SEQ ID NO: 3023333 - DNA, 25 bp, Homo sapien
aagagaatcaaaaacatttccactt

SEQ ID NO: 3023334 - DNA, 25 bp, Homo sapien
gaaaggccaatcaggaaacaaacat

SEQ ID NO: 3023335 - DNA, 25 bp, Homo sapien
ctgaaaggccaatcaggaaacaaac

SEQ ID NO: 3023336 - DNA, 25 bp, Homo sapien
aaggccaatcaggaaacaaacatgc

SEQ ID NO: 3023337 - DNA, 25 bp, Homo sapien
ggccaatcaggaaacaaacatgcat

SEQ ID NO: 3023338 - DNA, 25 bp, Homo sapien
ggcaagtgacctagaacaataccag

SEQ ID NO: 3023339 - DNA, 25 bp, Homo sapien
tgaatacacacagcacttggcaagt

SEQ ID NO: 3023340 - DNA, 25 bp, Homo sapien
aggacccaccacacagagacctttt

SEQ ID NO: 3023341 - DNA, 25 bp, Homo sapien
acaataccaggacccaccacacaga

SEQ ID NO: 3023342 - DNA, 25 bp, Homo sapien
tggcagattaaagatctcagttcct

SEQ ID NO: 3023343 - DNA, 25 bp, Homo sapien
taccaacaggtttgaggcagcctgg

SEQ ID NO: 3023344 - DNA, 25 bp, Homo sapien
gcagccaaatgatgtgtcccaaaga

SEQ ID NO: 3023345 - DNA, 25 bp, Homo sapien
taacagcataagacctgggaaccgc

SEQ ID NO: 3023346 - DNA, 25 bp, Homo sapien
gactctgggatgaccgccacaaata

SEQ ID NO: 3023347 - DNA, 25 bp, Homo sapien
agtcttcttacttatgggccaggtg

SEQ ID NO: 3023348 - DNA, 25 bp, Homo sapien
gactcttacccaagggctgagcaca

SEQ ID NO: 3023349 - DNA, 25 bp, Homo sapien
gaccacagaaggatggactcttacc

SEQ ID NO: 3023350 - DNA, 25 bp, Homo sapien
tgcatgtgcctagaaacaaacttgg

SEQ ID NO: 3023351 - DNA, 25 bp, Homo sapien
ctggtgctgcaccagtgggatcctg

SEQ ID NO: 3023352 - DNA, 25 bp, Homo sapien
gaagaaagtggaagcaaacaaagaa

SEQ ID NO: 3023353 - DNA, 25 bp, Homo sapien
gcaaacaaagaagaatctgaggagt

SEQ ID NO: 3023354 - DNA, 25 bp, Homo sapien
ctgagaagaaagtggaagcaaacaa

SEQ ID NO: 3023355 - DNA, 25 bp, Homo sapien
gagaagaaagtggaagcaaacaaag

SEQ ID NO: 3023356 - DNA, 25 bp, Homo sapien
tacagggatgtataccaccgcaccc

SEQ ID NO: 3023357 - DNA, 25 bp, Homo sapien
ttacacggttagtttatcagagttg

SEQ ID NO: 3023358 - DNA, 25 bp, Homo sapien
cacggttagtttatcagagttgcat

SEQ ID NO: 3023359 - DNA, 25 bp, Homo sapien
gactacagggatgtataccaccgca

SEQ ID NO: 3023360 - DNA, 25 bp, Homo sapien
taaaagtagagcgagggcaaggcat

SEQ ID NO: 3023361 - DNA, 25 bp, Homo sapien
gactggagcaagcacagacggactt

SEQ ID NO: 3023362 - DNA, 25 bp, Homo sapien
cttggacttgtcctatacttggagc

SEQ ID NO: 3023363 - DNA, 25 bp, Homo sapien
tgtataggctgccaacaaaacagct

SEQ ID NO: 3023364 - DNA, 25 bp, Homo sapien
ggttcatgaaagaaatcccacttac

SEQ ID NO: 3023365 - DNA, 25 bp, Homo sapien
ttatttggggttcatgaaagaaatc

SEQ ID NO: 3023366 - DNA, 25 bp, Homo sapien
tttggggttcatgaaagaaatccca

SEQ ID NO: 3023367 - DNA, 25 bp, Homo sapien
tggggttcatgaaagaaatcccact

SEQ ID NO: 3023368 - DNA, 25 bp, Homo sapien
cctccaccagaggagttcaacttac

SEQ ID NO: 3023369 - DNA, 25 bp, Homo sapien
catatcagagtcacctccaccagag

SEQ ID NO: 3023370 - DNA, 25 bp, Homo sapien
tcacctccaccagaggagttcaact

SEQ ID NO: 3023371 - DNA, 25 bp, Homo sapien
tcagagtcacctccaccagaggagt

SEQ ID NO: 3023372 - DNA, 25 bp, Homo sapien
ttttcaagcttggtgaagaatgaag

SEQ ID NO: 3023373 - DNA, 25 bp, Homo sapien
ttaaccatgggtgatgtattttcaa

SEQ ID NO: 3023374 - DNA, 25 bp, Homo sapien
ctgcttctttgatttaaccatgggt

SEQ ID NO: 3023375 - DNA, 25 bp, Homo sapien
caagcttggtgaagaatgaaggcaa

SEQ ID NO: 3023376 - DNA, 25 bp, Homo sapien
tctgcgcccctctgagacaagagca

SEQ ID NO: 3023377 - DNA, 25 bp, Homo sapien
gggctcgtagggctccgaagagacg

SEQ ID NO: 3023378 - DNA, 25 bp, Homo sapien
cgaagagacgtgactcctctctggg

SEQ ID NO: 3023379 - DNA, 25 bp, Homo sapien
tctcatgcacaaccggaacctgggg

SEQ ID NO: 3023380 - DNA, 25 bp, Homo sapien
tgaggctccgcatgtccttcaacat

SEQ ID NO: 3023381 - DNA, 25 bp, Homo sapien
ccttggctccttagtccaggtgaaa

SEQ ID NO: 3023382 - DNA, 25 bp, Homo sapien
cgtggatccaggagtcacgtcatca

SEQ ID NO: 3023383 - DNA, 25 bp, Homo sapien
gtgttactgccacttgacccatgcg

SEQ ID NO: 3023384 - DNA, 25 bp, Homo sapien
ggtctcactatgttgctgacctcaa

SEQ ID NO: 3023385 - DNA, 25 bp, Homo sapien
gtctcactatgttgctgacctcaaa

SEQ ID NO: 3023386 - DNA, 25 bp, Homo sapien
tctcactatgttgctgacctcaaac

SEQ ID NO: 3023387 - DNA, 25 bp, Homo sapien
catccagttgttcaagatagccact

SEQ ID NO: 3023388 - DNA, 25 bp, Homo sapien
gctgtttacctccaaaactctgtaa

SEQ ID NO: 3023389 - DNA, 25 bp, Homo sapien
gcgattatgcatatgaaagccacct

SEQ ID NO: 3023390 - DNA, 25 bp, Homo sapien
ctttctcaatcagcccatccagttg

SEQ ID NO: 3023391 - DNA, 25 bp, Homo sapien
tattccaaacattaaggaaggactc

SEQ ID NO: 3023392 - DNA, 25 bp, Homo sapien
tgtacaaaaagagctggcaccattc

SEQ ID NO: 3023393 - DNA, 25 bp, Homo sapien
gaacacctttatgcatataacctag

SEQ ID NO: 3023394 - DNA, 25 bp, Homo sapien
gcattcctcttgaaagccagcacac

SEQ ID NO: 3023395 - DNA, 25 bp, Homo sapien
tgagccatggcttccattactctgg

SEQ ID NO: 3023396 - DNA, 25 bp, Homo sapien
gaatctttgatctgcccatatctca

SEQ ID NO: 3023397 - DNA, 25 bp, Homo sapien
catatctcagtcttgttctcagcat

SEQ ID NO: 3023398 - DNA, 25 bp, Homo sapien
attactctggctcatgtgtcctcta

SEQ ID NO: 3023399 - DNA, 25 bp, Homo sapien
taccaaatgccaagacagtggacat

SEQ ID NO: 3023400 - DNA, 25 bp, Homo sapien
ttcctgggaataaaggcaaatgaac

SEQ ID NO: 3023401 - DNA, 25 bp, Homo sapien
gaagcaccactgaagtgtccccaaa

SEQ ID NO: 3023402 - DNA, 25 bp, Homo sapien
gagaggtattattcggaagcaccac

SEQ ID NO: 3023403 - DNA, 25 bp, Homo sapien
ggagtctgcgaggaaacttgatttc

SEQ ID NO: 3023404 - DNA, 25 bp, Homo sapien
cacaagattttctggagagaccctt

SEQ ID NO: 3023405 - DNA, 25 bp, Homo sapien
gatgttttagtcctcacaggtgtag

SEQ ID NO: 3023406 - DNA, 25 bp, Homo sapien
ggtgtagataccaaagcagaaggtg

SEQ ID NO: 3023407 - DNA, 25 bp, Homo sapien
gtggtcgatagtgatgtaatggtcc

SEQ ID NO: 3023408 - DNA, 25 bp, Homo sapien
tgattcctgctgtggtcgatagtga

SEQ ID NO: 3023409 - DNA, 25 bp, Homo sapien
caagtgtgatcagccgatgggtcct

SEQ ID NO: 3023410 - DNA, 25 bp, Homo sapien
acagatgtgatcagcaagtgtgatc

SEQ ID NO: 3023411 - DNA, 25 bp, Homo sapien
gaacacctgaaaggatgtggtacat

SEQ ID NO: 3023412 - DNA, 25 bp, Homo sapien
ggatgtggtacatagctccaaacaa

SEQ ID NO: 3023413 - DNA, 25 bp, Homo sapien
tagatgtcttactccaggaatgtct

SEQ ID NO: 3023414 - DNA, 25 bp, Homo sapien
aggagagaacacatagatgtcttac

SEQ ID NO: 3023415 - DNA, 25 bp, Homo sapien
ttaacaacctctggctgataggtct

SEQ ID NO: 3023416 - DNA, 25 bp, Homo sapien
tttccgcttgatttgccttaacaac

SEQ ID NO: 3023417 - DNA, 25 bp, Homo sapien
catcgctaggtgtttcatacctgtg

SEQ ID NO: 3023418 - DNA, 25 bp, Homo sapien
aggacttatcacctcaatagcatcg

SEQ ID NO: 3023419 - DNA, 25 bp, Homo sapien
gctccaaagggtgcatggccctggg

SEQ ID NO: 3023420 - DNA, 25 bp, Homo sapien
caaactgcactacagaatctgagag

SEQ ID NO: 3023421 - DNA, 25 bp, Homo sapien
actacagaatctgagagcactgtca

SEQ ID NO: 3023422 - DNA, 25 bp, Homo sapien
agttgggagcagatgtaaccgcctg

SEQ ID NO: 3023423 - DNA, 25 bp, Homo sapien
tagctgcagtaatggtagtcttccc

SEQ ID NO: 3023424 - DNA, 25 bp, Homo sapien
gggcttgccacttggaaaggctgaa

SEQ ID NO: 3023425 - DNA, 25 bp, Homo sapien
caatttgccgggtgatgatcacgtc

SEQ ID NO: 3023426 - DNA, 25 bp, Homo sapien
catccttgtccgaggcaatttgccg

SEQ ID NO: 3023427 - DNA, 25 bp, Homo sapien
gtgttgtaacgggaggctggcaggc

SEQ ID NO: 3023428 - DNA, 25 bp, Homo sapien
tctcttttgttttggacacatccat

SEQ ID NO: 3023429 - DNA, 25 bp, Homo sapien
caggccttggcttattgaagggccc

SEQ ID NO: 3023430 - DNA, 25 bp, Homo sapien
agggcatccgcagcagtgttgtaac

SEQ ID NO: 3023431 - DNA, 25 bp, Homo sapien
cagctctgtgaagggaagaccattt

SEQ ID NO: 3023432 - DNA, 25 bp, Homo sapien
gctctgtgaagggaagaccatttgc

SEQ ID NO: 3023433 - DNA, 25 bp, Homo sapien
ctgtgaagggaagaccatttgctgg

SEQ ID NO: 3023434 - DNA, 25 bp, Homo sapien
tcacagctctgtgaagggaagacca

SEQ ID NO: 3023435 - DNA, 25 bp, Homo sapien
tatatgcaagagacattttttgtca

SEQ ID NO: 3023436 - DNA, 25 bp, Homo sapien
gactattgcagtcacaaattttaaa

SEQ ID NO: 3023437 - DNA, 25 bp, Homo sapien
tagactattgcagtcacaaatttta

SEQ ID NO: 3023438 - DNA, 25 bp, Homo sapien
tatgcaagagacattttttgtcaaa

SEQ ID NO: 3023439 - DNA, 25 bp, Homo sapien
tctctgttgcaacatggtctcctga

SEQ ID NO: 3023440 - DNA, 25 bp, Homo sapien
ggtctcctgagttcttactgaaggg

SEQ ID NO: 3023441 - DNA, 25 bp, Homo sapien
tcgtagctgagcagttggatccaaa

SEQ ID NO: 3023442 - DNA, 25 bp, Homo sapien
tggatccaaaggtgtgattacactg

SEQ ID NO: 3023443 - DNA, 25 bp, Homo sapien
gcagcaatccgttcccgctcccgct

SEQ ID NO: 3023444 - DNA, 25 bp, Homo sapien
ggaagctgcagcaatccgttcccgc

SEQ ID NO: 3023445 - DNA, 25 bp, Homo sapien
ctgcagcaatccgttcccgctcccg

SEQ ID NO: 3023446 - DNA, 25 bp, Homo sapien
agctgcagcaatccgttcccgctcc

SEQ ID NO: 3023447 - DNA, 25 bp, Homo sapien
cctgggagggaaagtaatctgtgta

SEQ ID NO: 3023448 - DNA, 25 bp, Homo sapien
cctggatgaggcactaaaattgttg

SEQ ID NO: 3023449 - DNA, 25 bp, Homo sapien
gacatggaagcagagttgtacggcc

SEQ ID NO: 3023450 - DNA, 25 bp, Homo sapien
tataagtgattctgtccatgggagg

SEQ ID NO: 3023451 - DNA, 25 bp, Homo sapien
tccattgcgtaaagctgatactgac

SEQ ID NO: 3023452 - DNA, 25 bp, Homo sapien
ggccacatctggacgcaagttcact

SEQ ID NO: 3023453 - DNA, 25 bp, Homo sapien
taacctggagttggtgaaagctgtc

SEQ ID NO: 3023454 - DNA, 25 bp, Homo sapien
tgatactgacttgggtaacctggag

SEQ ID NO: 3023455 - DNA, 25 bp, Homo sapien
tttgctaaacaccacgtacaaaaga

SEQ ID NO: 3023456 - DNA, 25 bp, Homo sapien
cacgtacaaaagagtagagaaaaat

SEQ ID NO: 3023457 - DNA, 25 bp, Homo sapien
gagaaaaatcacatgctgagctagt

SEQ ID NO: 3023458 - DNA, 25 bp, Homo sapien
tgagttttgtcctggctgaaataca

SEQ ID NO: 3023459 - DNA, 25 bp, Homo sapien
tccgataaacctcgcctgcagtgct

SEQ ID NO: 3023460 - DNA, 25 bp, Homo sapien
ggatcaaacggactgtggctcacga

SEQ ID NO: 3023461 - DNA, 25 bp, Homo sapien
gggtcagtgtcgatttcctttcatg

SEQ ID NO: 3023462 - DNA, 25 bp, Homo sapien
gcactggagacttcgctgggatact

SEQ ID NO: 3023463 - DNA, 25 bp, Homo sapien
gccacaagttcttaagaaacttgca

SEQ ID NO: 3023464 - DNA, 25 bp, Homo sapien
ttaagaaacttgcaagtatgataat

SEQ ID NO: 3023465 - DNA, 25 bp, Homo sapien
taagaaacttgcaagtatgataata

SEQ ID NO: 3023466 - DNA, 25 bp, Homo sapien
tgagatttggagagtactgtcacct

SEQ ID NO: 3023467 - DNA, 25 bp, Homo sapien
gagagtactgtcaccttttggatca

SEQ ID NO: 3023468 - DNA, 25 bp, Homo sapien
tctctttccactcaacatttaacat

SEQ ID NO: 3023469 - DNA, 25 bp, Homo sapien
gtaaacaactagtagaaactgagat

SEQ ID NO: 3023470 - DNA, 25 bp, Homo sapien
tgctgcacccagccaccctcaattt

SEQ ID NO: 3023471 - DNA, 25 bp, Homo sapien
gctgctgcacccagccaccctcaat

SEQ ID NO: 3023472 - DNA, 25 bp, Homo sapien
gattatgggtatgagctgctgcacc

SEQ ID NO: 3023473 - DNA, 25 bp, Homo sapien
gggattatgggtatgagctgctgca

SEQ ID NO: 3023474 - DNA, 25 bp, Homo sapien
cagaccaagcaacaaaagtaacata

SEQ ID NO: 3023475 - DNA, 25 bp, Homo sapien
agaccaagcaacaaaagtaacatac

SEQ ID NO: 3023476 - DNA, 25 bp, Homo sapien
ttctgttcatcatgggtgagcctct

SEQ ID NO: 3023477 - DNA, 25 bp, Homo sapien
cagttgtgctttgggagcttcatgc

SEQ ID NO: 3023478 - DNA, 25 bp, Homo sapien
catggtgttttgataactcacaggg

SEQ ID NO: 3023479 - DNA, 25 bp, Homo sapien
tgagcctctggacatggtgttttga

SEQ ID NO: 3023480 - DNA, 25 bp, Homo sapien
taagaacggaggggccagagcttac

SEQ ID NO: 3023481 - DNA, 25 bp, Homo sapien
ctaagaacggaggggccagagctta

SEQ ID NO: 3023482 - DNA, 25 bp, Homo sapien
gaacggaggggccagagcttaccac

SEQ ID NO: 3023483 - DNA, 25 bp, Homo sapien
agaacggaggggccagagcttacca

SEQ ID NO: 3023484 - DNA, 25 bp, Homo sapien
gggaacgcacggtctcgcctgcttt

SEQ ID NO: 3023485 - DNA, 25 bp, Homo sapien
ttccagcggaggcattccacgggat

SEQ ID NO: 3023486 - DNA, 25 bp, Homo sapien
taggccccgtgattaaggatttgac

SEQ ID NO: 3023487 - DNA, 25 bp, Homo sapien
tccacgggatagtttgctaggcccc

SEQ ID NO: 3023488 - DNA, 25 bp, Homo sapien
aaatggaaccctcaattatcggccg

SEQ ID NO: 3023489 - DNA, 25 bp, Homo sapien
tggaccacttctggagttttccgac

SEQ ID NO: 3023490 - DNA, 25 bp, Homo sapien
ccttcaaatgctcgtatgggaggac

SEQ ID NO: 3023491 - DNA, 25 bp, Homo sapien
tgccttggaatctcatgaatggaac

SEQ ID NO: 3023492 - DNA, 25 bp, Homo sapien
gaggcagaaaagtaataaccaagac

SEQ ID NO: 3023493 - DNA, 25 bp, Homo sapien
tagtcacagaatggttcttgcataa

SEQ ID NO: 3023494 - DNA, 25 bp, Homo sapien
taatgccttgacatcttgtagtttc

SEQ ID NO: 3023495 - DNA, 25 bp, Homo sapien
aatgcatcattcataatagtcacag

SEQ ID NO: 3023496 - DNA, 25 bp, Homo sapien
tttgaggtcagaatgaggactcccc

SEQ ID NO: 3023497 - DNA, 25 bp, Homo sapien
aggactccccctgggtaatgctcgg

SEQ ID NO: 3023498 - DNA, 25 bp, Homo sapien
ctgggtaatgctcggcatatcagcc

SEQ ID NO: 3023499 - DNA, 25 bp, Homo sapien
tatggagccagacaatacagtcctt

SEQ ID NO: 3023500 - DNA, 25 bp, Homo sapien
ccactgattcatagcttctctttaa

SEQ ID NO: 3023501 - DNA, 25 bp, Homo sapien
tccctcattgacatcccttgcttta

SEQ ID NO: 3023502 - DNA, 25 bp, Homo sapien
tgttcttggactcctagtcccttct

SEQ ID NO: 3023503 - DNA, 25 bp, Homo sapien
taacggtgctgatacaggagactcc

SEQ ID NO: 3023504 - DNA, 25 bp, Homo sapien
acatggcctttggatgcagcttcct

SEQ ID NO: 3023505 - DNA, 25 bp, Homo sapien
tgggcattctcgaaatggacccctt

SEQ ID NO: 3023506 - DNA, 25 bp, Homo sapien
gactgctgtcttcaatgggcattct

SEQ ID NO: 3023507 - DNA, 25 bp, Homo sapien
tatcatatgacaagatatgtccact

SEQ ID NO: 3023508 - DNA, 25 bp, Homo sapien
tccttcttgtatggctcctgcggta

SEQ ID NO: 3023509 - DNA, 25 bp, Homo sapien
gctggttggagttccccgagttata

SEQ ID NO: 3023510 - DNA, 25 bp, Homo sapien
cactgaaattttgctggttggagtt

SEQ ID NO: 3023511 - DNA, 25 bp, Homo sapien
ctgagtgatagagccccgtagggat

SEQ ID NO: 3023512 - DNA, 25 bp, Homo sapien
gaccctcaggttgtgagttttggct

SEQ ID NO: 3023513 - DNA, 25 bp, Homo sapien
tcttcctgcttgatgtagggcaaag

SEQ ID NO: 3023514 - DNA, 25 bp, Homo sapien
tgttgggccctgaccaacagaccct

SEQ ID NO: 3023515 - DNA, 25 bp, Homo sapien
tacaccttcatgttgggccctgacc

SEQ ID NO: 3023516 - DNA, 25 bp, Homo sapien
tgtttcttgagtgtaggaagcctga

SEQ ID NO: 3023517 - DNA, 25 bp, Homo sapien
agagatagatcccactgacggcttg

SEQ ID NO: 3023518 - DNA, 25 bp, Homo sapien
gcagattcctgttgccgtggcagtc

SEQ ID NO: 3023519 - DNA, 25 bp, Homo sapien
aagtcaaataagtgcctggtgttcc

SEQ ID NO: 3023520 - DNA, 25 bp, Homo sapien
cagtattcctgtatcaagaccatcc

SEQ ID NO: 3023521 - DNA, 25 bp, Homo sapien
agtattcctgtatcaagaccatcct

SEQ ID NO: 3023522 - DNA, 25 bp, Homo sapien
tgttcaccaattcactattcagtat

SEQ ID NO: 3023523 - DNA, 25 bp, Homo sapien
tagttccctatgctcgccttctggg

SEQ ID NO: 3023524 - DNA, 25 bp, Homo sapien
aataaatgaagtggcgaaagaaaag

SEQ ID NO: 3023525 - DNA, 25 bp, Homo sapien
tatgttaaatgctcactgcacccac

SEQ ID NO: 3023526 - DNA, 25 bp, Homo sapien
aaaacatgtttcaactcctgcaaat

SEQ ID NO: 3023527 - DNA, 25 bp, Homo sapien
acgccttcagggagattagttatca

SEQ ID NO: 3023528 - DNA, 25 bp, Homo sapien
ttatcacttgatgtggagcaggctg

SEQ ID NO: 3023529 - DNA, 25 bp, Homo sapien
ttggtcgagttgtcggaagccgaac

SEQ ID NO: 3023530 - DNA, 25 bp, Homo sapien
gatggagcctcccattataaaagat

SEQ ID NO: 3023531 - DNA, 25 bp, Homo sapien
gcgggacactatagcgggctgcact

SEQ ID NO: 3023532 - DNA, 25 bp, Homo sapien
tctcttggagaaagcctacacggtg

SEQ ID NO: 3023533 - DNA, 25 bp, Homo sapien
tgttctagagcacgtttgacctcag

SEQ ID NO: 3023534 - DNA, 25 bp, Homo sapien
gcataaggcatataggcgactgatt

SEQ ID NO: 3023535 - DNA, 25 bp, Homo sapien
caaatataataatcagttgggaggc

SEQ ID NO: 3023536 - DNA, 25 bp, Homo sapien
ttgggaggctgacaacttacaaagc

SEQ ID NO: 3023537 - DNA, 25 bp, Homo sapien
tccagcacaaagatgaatatcagaa

SEQ ID NO: 3023538 - DNA, 25 bp, Homo sapien
taaggaactgtgtctgttaggacaa

SEQ ID NO: 3023539 - DNA, 25 bp, Homo sapien
gccacatggacttgtagaacttcta

SEQ ID NO: 3023540 - DNA, 25 bp, Homo sapien
tgtttggactcttggatgtgccaca

SEQ ID NO: 3023541 - DNA, 25 bp, Homo sapien
tgtcgctggtagagagcatagccgc

SEQ ID NO: 3023542 - DNA, 25 bp, Homo sapien
ccaggagtgctgactcatgcattgc

SEQ ID NO: 3023543 - DNA, 25 bp, Homo sapien
tggcctacctaacaactccacttgg

SEQ ID NO: 3023544 - DNA, 25 bp, Homo sapien
ggcagatcacatccatttatgttga

SEQ ID NO: 3023545 - DNA, 25 bp, Homo sapien
cattcacatagccattcccttagga

SEQ ID NO: 3023546 - DNA, 25 bp, Homo sapien
ggcagccatccttgactaattaatc

SEQ ID NO: 3023547 - DNA, 25 bp, Homo sapien
tgcctggccgcccaccgtctgggat

SEQ ID NO: 3023548 - DNA, 25 bp, Homo sapien
cctggccgcccaccgtctgggatgt

SEQ ID NO: 3023549 - DNA, 25 bp, Homo sapien
tctgcctggccgcccaccgtctggg

SEQ ID NO: 3023550 - DNA, 25 bp, Homo sapien
ctggccgcccaccgtctgggatgtg

SEQ ID NO: 3023551 - DNA, 25 bp, Homo sapien
agtgagcagcgcctcttcccggccg

SEQ ID NO: 3023552 - DNA, 25 bp, Homo sapien
tgggaagtgagcagcgcctcttccc

SEQ ID NO: 3023553 - DNA, 25 bp, Homo sapien
gcagcgcctcttcccggccgccatc

SEQ ID NO: 3023554 - DNA, 25 bp, Homo sapien
gggaagtgagcagcgcctcttcccg

SEQ ID NO: 3023555 - DNA, 25 bp, Homo sapien
gatgagacgagtatagatccagtgg

SEQ ID NO: 3023556 - DNA, 25 bp, Homo sapien
gatttggttttaacggagatgagac

SEQ ID NO: 3023557 - DNA, 25 bp, Homo sapien
cattggtgggataacagcagctcga

SEQ ID NO: 3023558 - DNA, 25 bp, Homo sapien
tgaaggctttgagtccataggaaac

SEQ ID NO: 3023559 - DNA, 25 bp, Homo sapien
tgcacgtggcactggaatcattgtc

SEQ ID NO: 3023560 - DNA, 25 bp, Homo sapien
gggctcaagctcaaccgcaggttct

SEQ ID NO: 3023561 - DNA, 25 bp, Homo sapien
acatcctcatcagcgctgcacgtgg

SEQ ID NO: 3023562 - DNA, 25 bp, Homo sapien
cacagagtcagctttggtagcgggt

SEQ ID NO: 3023563 - DNA, 25 bp, Homo sapien
ggagcactttctgtatcagaactat

SEQ ID NO: 3023564 - DNA, 25 bp, Homo sapien
ggagaaggagcactttctgtatcag

SEQ ID NO: 3023565 - DNA, 25 bp, Homo sapien
ctggtgaaggagaaggagcactttc

SEQ ID NO: 3023566 - DNA, 25 bp, Homo sapien
gaaggagcactttctgtatcagaac

SEQ ID NO: 3023567 - DNA, 25 bp, Homo sapien
gcattttacattttctgcatatcta

SEQ ID NO: 3023568 - DNA, 25 bp, Homo sapien
gtgcattttacattttctgcatatc

SEQ ID NO: 3023569 - DNA, 25 bp, Homo sapien
ttacattttctgcatatctaatttt

SEQ ID NO: 3023570 - DNA, 25 bp, Homo sapien
aatcttcaaaatctggtgtgcattt

SEQ ID NO: 3023571 - DNA, 25 bp, Homo sapien
gtttatatagtggtagaaagcccca

SEQ ID NO: 3023572 - DNA, 25 bp, Homo sapien
gagacttgccacacaataaacagtg

SEQ ID NO: 3023573 - DNA, 25 bp, Homo sapien
taatgtttcaccaagcagtagccaa

SEQ ID NO: 3023574 - DNA, 25 bp, Homo sapien
gatagaggaaccctcccttcagcag

SEQ ID NO: 3023575 - DNA, 25 bp, Homo sapien
tcagaaagcaactgtgccagcacct

SEQ ID NO: 3023576 - DNA, 25 bp, Homo sapien
taacaaggcggttagccatctgcaa

SEQ ID NO: 3023577 - DNA, 25 bp, Homo sapien
gacttgggctttgttatggactgca

SEQ ID NO: 3023578 - DNA, 25 bp, Homo sapien
taacagtgggctctaatccagtagg

SEQ ID NO: 3023579 - DNA, 25 bp, Homo sapien
cattggaggcttcaatatcttcatc

SEQ ID NO: 3023580 - DNA, 25 bp, Homo sapien
ttcttcttcattggaggcttcaata

SEQ ID NO: 3023581 - DNA, 25 bp, Homo sapien
ttcttcattggaggcttcaatatct

SEQ ID NO: 3023582 - DNA, 25 bp, Homo sapien
tcattggaggcttcaatatcttcat

SEQ ID NO: 3023583 - DNA, 25 bp, Homo sapien
tgagcagaaacagtggaagcgacac

SEQ ID NO: 3023584 - DNA, 25 bp, Homo sapien
ctcctgagcagaaacagtggaagcg

SEQ ID NO: 3023585 - DNA, 25 bp, Homo sapien
tcctgagcagaaacagtggaagcga

SEQ ID NO: 3023586 - DNA, 25 bp, Homo sapien
cctgagcagaaacagtggaagcgac

SEQ ID NO: 3023587 - DNA, 25 bp, Homo sapien
catctcgctcttcacgaggttttcg

SEQ ID NO: 3023588 - DNA, 25 bp, Homo sapien
tcgctcttcacgaggttttcgtgaa

SEQ ID NO: 3023589 - DNA, 25 bp, Homo sapien
tttcacattgagacacatctcgctc

SEQ ID NO: 3023590 - DNA, 25 bp, Homo sapien
tgagacacatctcgctcttcacgag

SEQ ID NO: 3023591 - DNA, 25 bp, Homo sapien
tgtgccccttacagagcctacgttt

SEQ ID NO: 3023592 - DNA, 25 bp, Homo sapien
tactcaacattctcatgcggatgat

SEQ ID NO: 3023593 - DNA, 25 bp, Homo sapien
tctaagttcatagcaggaatgcaag

SEQ ID NO: 3023594 - DNA, 25 bp, Homo sapien
caagcaatccaggtgtgacctacca

SEQ ID NO: 3023595 - DNA, 25 bp, Homo sapien
ttttagcaattgctgcccagttacg

SEQ ID NO: 3023596 - DNA, 25 bp, Homo sapien
ttgagcttcacttttcgttcccacc

SEQ ID NO: 3023597 - DNA, 25 bp, Homo sapien
ggttgtcaagattgtgtcgcctttt

SEQ ID NO: 3023598 - DNA, 25 bp, Homo sapien
cagttacgaccatgttctactagac

SEQ ID NO: 3023599 - DNA, 25 bp, Homo sapien
tctgtccatcgagaggtctccacag

SEQ ID NO: 3023600 - DNA, 25 bp, Homo sapien
cttacggcggccctgactgttggca

SEQ ID NO: 3023601 - DNA, 25 bp, Homo sapien
ggctcttcagtagccgctgcggctg

SEQ ID NO: 3023602 - DNA, 25 bp, Homo sapien
tgtcatggacctggtgatccggccc

SEQ ID NO: 3023603 - DNA, 25 bp, Homo sapien
ctgctgtaccatctatcttgtcctt

SEQ ID NO: 3023604 - DNA, 25 bp, Homo sapien
ttaaggaaacgtactcaatgtacat

SEQ ID NO: 3023605 - DNA, 25 bp, Homo sapien
tatatttaaggaaacgtactcaatg

SEQ ID NO: 3023606 - DNA, 25 bp, Homo sapien
tatttaaggaaacgtactcaatgta

SEQ ID NO: 3023607 - DNA, 25 bp, Homo sapien
tgttatatttaaggaaacgtactca

SEQ ID NO: 3023608 - DNA, 25 bp, Homo sapien
cttcttgcgagggtcgagcaatttg

SEQ ID NO: 3023609 - DNA, 25 bp, Homo sapien
ttttcttcttgcgagggtcgagcaa

SEQ ID NO: 3023610 - DNA, 25 bp, Homo sapien
actttttcttcttgcgagggtcgag

SEQ ID NO: 3023611 - DNA, 25 bp, Homo sapien
ttcttcttgcgagggtcgagcaatt

SEQ ID NO: 3023612 - DNA, 25 bp, Homo sapien
tctgacgagggctttataattctca

SEQ ID NO: 3023613 - DNA, 25 bp, Homo sapien
tgcctctgcgtttcccataattcct

SEQ ID NO: 3023614 - DNA, 25 bp, Homo sapien
gcgtttcccataattccttctgacg

SEQ ID NO: 3023615 - DNA, 25 bp, Homo sapien
attccttctgacgagggctttataa

SEQ ID NO: 3023616 - DNA, 25 bp, Homo sapien
aggccatgctaatctctgcatcgtt

SEQ ID NO: 3023617 - DNA, 25 bp, Homo sapien
catgctaatctctgcatcgttccaa

SEQ ID NO: 3023618 - DNA, 25 bp, Homo sapien
tggaatgattcacaaatttgcttgt

SEQ ID NO: 3023619 - DNA, 25 bp, Homo sapien
atgattcacaaatttgcttgtcatc

SEQ ID NO: 3023620 - DNA, 25 bp, Homo sapien
caagtatgatgcaattagtccaaag

SEQ ID NO: 3023621 - DNA, 25 bp, Homo sapien
ccaagtatgatgcaattagtccaaa

SEQ ID NO: 3023622 - DNA, 25 bp, Homo sapien
ctccaagtatgatgcaattagtcca

SEQ ID NO: 3023623 - DNA, 25 bp, Homo sapien
agtatgatgcaattagtccaaagtt

SEQ ID NO: 3023624 - DNA, 25 bp, Homo sapien
acacttgcgtacaaatatttcaaca

SEQ ID NO: 3023625 - DNA, 25 bp, Homo sapien
caaaaacacacttgcgtacaaatat

SEQ ID NO: 3023626 - DNA, 25 bp, Homo sapien
aacaaaaacacacttgcgtacaaat

SEQ ID NO: 3023627 - DNA, 25 bp, Homo sapien
aaacacacttgcgtacaaatatttc

SEQ ID NO: 3023628 - DNA, 25 bp, Homo sapien
gtccttaaagatctccttttcatgg

SEQ ID NO: 3023629 - DNA, 25 bp, Homo sapien
tctccttttcatggtcagtccaaac

SEQ ID NO: 3023630 - DNA, 25 bp, Homo sapien
gatctccttttcatggtcagtccaa

SEQ ID NO: 3023631 - DNA, 25 bp, Homo sapien
taaagatctccttttcatggtcagt

SEQ ID NO: 3023632 - DNA, 25 bp, Homo sapien
attcataaactgcctatctttatac

SEQ ID NO: 3023633 - DNA, 25 bp, Homo sapien
gactcgtctttgttctgcatcaaac

SEQ ID NO: 3023634 - DNA, 25 bp, Homo sapien
ggtggaatcacagagagctgccgca

SEQ ID NO: 3023635 - DNA, 25 bp, Homo sapien
ggtcctccataagcccattcatgtt

SEQ ID NO: 3023636 - DNA, 25 bp, Homo sapien
gcatcaaacatcataggtggaatca

SEQ ID NO: 3023637 - DNA, 25 bp, Homo sapien
taaagctcttgattatactgctaca

SEQ ID NO: 3023638 - DNA, 25 bp, Homo sapien
tccaagtctaatctgggcagtatag

SEQ ID NO: 3023639 - DNA, 25 bp, Homo sapien
tgtacttacagatgtttcctcatgg

SEQ ID NO: 3023640 - DNA, 25 bp, Homo sapien
tttaacagagatttactcgtcattg

SEQ ID NO: 3023641 - DNA, 25 bp, Homo sapien
cctgggttgagtatctggctccact

SEQ ID NO: 3023642 - DNA, 25 bp, Homo sapien
aaacagccattaattatagcctcca

SEQ ID NO: 3023643 - DNA, 25 bp, Homo sapien
tatgaggtgcttatcacaattggca

SEQ ID NO: 3023644 - DNA, 25 bp, Homo sapien
gaaaaacttactgcaactgtctcac

SEQ ID NO: 3023645 - DNA, 25 bp, Homo sapien
tcactcctagcaatggtggctgaaa

SEQ ID NO: 3023646 - DNA, 25 bp, Homo sapien
tgctcactcctagcaatggtggctg

SEQ ID NO: 3023647 - DNA, 25 bp, Homo sapien
tcatgctcactcctagcaatggtgg

SEQ ID NO: 3023648 - DNA, 25 bp, Homo sapien
gctcactcctagcaatggtggctga

SEQ ID NO: 3023649 - DNA, 25 bp, Homo sapien
ccatgcctccatgagctgatcataa

SEQ ID NO: 3023650 - DNA, 25 bp, Homo sapien
tcatagtattcccttgttttgcttt

SEQ ID NO: 3023651 - DNA, 25 bp, Homo sapien
tagctttcctccgaggattattttc

SEQ ID NO: 3023652 - DNA, 25 bp, Homo sapien
cataacgctggcagattttttgttc

SEQ ID NO: 3023653 - DNA, 25 bp, Homo sapien
aataaaatgagttttttcctcatca

SEQ ID NO: 3023654 - DNA, 25 bp, Homo sapien
taaaatgagttttttcctcatcacc

SEQ ID NO: 3023655 - DNA, 25 bp, Homo sapien
ttgttttcttgcatgatttcttctt

SEQ ID NO: 3023656 - DNA, 25 bp, Homo sapien
cctttgttttcttgcatgatttctt

SEQ ID NO: 3023657 - DNA, 25 bp, Homo sapien
tgcaaaaattagaactgactaaagt

SEQ ID NO: 3023658 - DNA, 25 bp, Homo sapien
tatccttcttaacaactctggtgac

SEQ ID NO: 3023659 - DNA, 25 bp, Homo sapien
aacatcttactctttggagaaggga

SEQ ID NO: 3023660 - DNA, 25 bp, Homo sapien
gttcctcccattctacagtaagact

SEQ ID NO: 3023661 - DNA, 25 bp, Homo sapien
ccatctaggatagtgtgctgagcac

SEQ ID NO: 3023662 - DNA, 25 bp, Homo sapien
tattccaaaaggtgtcgtacaggga

SEQ ID NO: 3023663 - DNA, 25 bp, Homo sapien
tgactcatacagatgcatgcagctg

SEQ ID NO: 3023664 - DNA, 25 bp, Homo sapien
gaaataaatcggacagagctgctct

SEQ ID NO: 3023665 - DNA, 25 bp, Homo sapien
taccgtcattagcaagagtcatgga

SEQ ID NO: 3023666 - DNA, 25 bp, Homo sapien
cacaaggtgactgagcgcttccaag

SEQ ID NO: 3023667 - DNA, 25 bp, Homo sapien
taaaggcctggtactaggatgagca

SEQ ID NO: 3023668 - DNA, 25 bp, Homo sapien
gcagaagggtctacaaataccgtca

SEQ ID NO: 3023669 - DNA, 25 bp, Homo sapien
tcatcatgcgccttgcaggtactcc

SEQ ID NO: 3023670 - DNA, 25 bp, Homo sapien
catcatgcgccttgcaggtactcca

SEQ ID NO: 3023671 - DNA, 25 bp, Homo sapien
ttcatcatgcgccttgcaggtactc

SEQ ID NO: 3023672 - DNA, 25 bp, Homo sapien
tacaccttggtatctgatggctggt

SEQ ID NO: 3023673 - DNA, 25 bp, Homo sapien
tcatggtacaccttggtatctgatg

SEQ ID NO: 3023674 - DNA, 25 bp, Homo sapien
tatctgatggctggttatacagtgg

SEQ ID NO: 3023675 - DNA, 25 bp, Homo sapien
gtcttgatgttctcatggtacacct

SEQ ID NO: 3023676 - DNA, 25 bp, Homo sapien
ccaagaccttcaaaaattttatgag

SEQ ID NO: 3023677 - DNA, 25 bp, Homo sapien
cagttcaacttttgggccaagacct

SEQ ID NO: 3023678 - DNA, 25 bp, Homo sapien
gccaagaccttcaaaaattttatga

SEQ ID NO: 3023679 - DNA, 25 bp, Homo sapien
tcaacttttgggccaagaccttcaa

SEQ ID NO: 3023680 - DNA, 25 bp, Homo sapien
tgttcggtatgttctatgtgccaag

SEQ ID NO: 3023681 - DNA, 25 bp, Homo sapien
taagaccctcatatgttcgtaatac

SEQ ID NO: 3023682 - DNA, 25 bp, Homo sapien
aataatccagaccaaagtgttacct

SEQ ID NO: 3023683 - DNA, 25 bp, Homo sapien
tacaatttgtattctaagtctacag

SEQ ID NO: 3023684 - DNA, 25 bp, Homo sapien
tatttaggaggtgggactaacgctc

SEQ ID NO: 3023685 - DNA, 25 bp, Homo sapien
ccaggcgggtaagcatgtaaacatc

SEQ ID NO: 3023686 - DNA, 25 bp, Homo sapien
aagaaaggactgaagcgtgagactc

SEQ ID NO: 3023687 - DNA, 25 bp, Homo sapien
caataactatgtgggagatgaaggc

SEQ ID NO: 3023688 - DNA, 25 bp, Homo sapien
aagtcaacttttctcaggaagtcaa

SEQ ID NO: 3023689 - DNA, 25 bp, Homo sapien
ctcgatctcttaagccacacttggc

SEQ ID NO: 3023690 - DNA, 25 bp, Homo sapien
tgctgccacccaagaaataagaggg

SEQ ID NO: 3023691 - DNA, 25 bp, Homo sapien
taattccaactagtgtaactgctgc

SEQ ID NO: 3023692 - DNA, 25 bp, Homo sapien
ggctcaggaggtttagctgcctctt

SEQ ID NO: 3023693 - DNA, 25 bp, Homo sapien
taaataatttggacaatactgcggt

SEQ ID NO: 3023694 - DNA, 25 bp, Homo sapien
tcaggaggtttagctgcctcttctt

SEQ ID NO: 3023695 - DNA, 25 bp, Homo sapien
aatttggacaatactgcggtgtttc

SEQ ID NO: 3023696 - DNA, 25 bp, Homo sapien
atctactgtagggagacaaacatac

SEQ ID NO: 3023697 - DNA, 25 bp, Homo sapien
caaaaatatctactgtagggagaca

SEQ ID NO: 3023698 - DNA, 25 bp, Homo sapien
ttagaatatattaagcaaagacatt

SEQ ID NO: 3023699 - DNA, 25 bp, Homo sapien
aaatatctactgtagggagacaaac

SEQ ID NO: 3023700 - DNA, 25 bp, Homo sapien
ggtgaagcattttgatcatctccac

SEQ ID NO: 3023701 - DNA, 25 bp, Homo sapien
gagataactggacagttgcttcaaa

SEQ ID NO: 3023702 - DNA, 25 bp, Homo sapien
aagctccagtatcctttgcatctgg

SEQ ID NO: 3023703 - DNA, 25 bp, Homo sapien
tacttagactatgagaaacctacaa

SEQ ID NO: 3023704 - DNA, 25 bp, Homo sapien
gcatacagtcaatctttggcagctt

SEQ ID NO: 3023705 - DNA, 25 bp, Homo sapien
ttagcatctgcagaagccctcagcc

SEQ ID NO: 3023706 - DNA, 25 bp, Homo sapien
gaatcagaaacctgttccagacgtg

SEQ ID NO: 3023707 - DNA, 25 bp, Homo sapien
tccagacgtggtcgcttcgattcca

SEQ ID NO: 3023708 - DNA, 25 bp, Homo sapien
tctggcagcgggtgcactaaaggca

SEQ ID NO: 3023709 - DNA, 25 bp, Homo sapien
ctaatacatacaaagaaaataaaca

SEQ ID NO: 3023710 - DNA, 25 bp, Homo sapien
aaaaaatcctttcataccataacat

SEQ ID NO: 3023711 - DNA, 25 bp, Homo sapien
aaaacaacaaccagatacctacact

SEQ ID NO: 3023712 - DNA, 25 bp, Homo sapien
aacaaccagatacctacactcccat

SEQ ID NO: 3023713 - DNA, 25 bp, Homo sapien
aaccagatacctacactcccatatt

SEQ ID NO: 3023714 - DNA, 25 bp, Homo sapien
gaaagcaaggaaggtcgccttcgaa

SEQ ID NO: 3023715 - DNA, 25 bp, Homo sapien
gaacgataatcagggactgcgaact

SEQ ID NO: 3023716 - DNA, 25 bp, Homo sapien
agatgagaggaacgataatcaggga

SEQ ID NO: 3023717 - DNA, 25 bp, Homo sapien
gctgtgatgcctgactcacttcaag

SEQ ID NO: 3023718 - DNA, 25 bp, Homo sapien
ggcgggtgttgggaaatgtatactg

SEQ ID NO: 3023719 - DNA, 25 bp, Homo sapien
ttgggaaatgtatactggacagagt

SEQ ID NO: 3023720 - DNA, 25 bp, Homo sapien
ggtgttgggaaatgtatactggaca

SEQ ID NO: 3023721 - DNA, 25 bp, Homo sapien
tgttgggaaatgtatactggacaga

SEQ ID NO: 3023722 - DNA, 25 bp, Homo sapien
tatcagtaaagaagtcctcaccaga

SEQ ID NO: 3023723 - DNA, 25 bp, Homo sapien
agatcaatgccaataaacaatcatg

SEQ ID NO: 3023724 - DNA, 25 bp, Homo sapien
tgagatcaatgccaataaacaatca

SEQ ID NO: 3023725 - DNA, 25 bp, Homo sapien
ctgtgagatcaatgccaataaacaa

SEQ ID NO: 3023726 - DNA, 25 bp, Homo sapien
tgtgagatcaatgccaataaacaat

SEQ ID NO: 3023727 - DNA, 25 bp, Homo sapien
tatttctctatatgggccgggtgcg

SEQ ID NO: 3023728 - DNA, 25 bp, Homo sapien
ggcaattattctcatcaatttatgg

SEQ ID NO: 3023729 - DNA, 25 bp, Homo sapien
gtatttctctatatgggccgggtgc

SEQ ID NO: 3023730 - DNA, 25 bp, Homo sapien
tggttctttctattgctaaacagta

SEQ ID NO: 3023731 - DNA, 25 bp, Homo sapien
gtgccagccactatgcctaatgcta

SEQ ID NO: 3023732 - DNA, 25 bp, Homo sapien
gaaagtcttaagtagagcacaaaac

SEQ ID NO: 3023733 - DNA, 25 bp, Homo sapien
taaatagactaataagagtcacagc

SEQ ID NO: 3023734 - DNA, 25 bp, Homo sapien
taaggaaattaaggtgtacagagat

SEQ ID NO: 3023735 - DNA, 25 bp, Homo sapien
cgggagctggctaagcgtgggagcc

SEQ ID NO: 3023736 - DNA, 25 bp, Homo sapien
cgggacctcgttcggcgcggcgagt

SEQ ID NO: 3023737 - DNA, 25 bp, Homo sapien
cctgaggagtgggacgcggccacgg

SEQ ID NO: 3023738 - DNA, 25 bp, Homo sapien
ctaagcgtgggagccgacgtgcgcc

SEQ ID NO: 3023739 - DNA, 25 bp, Homo sapien
gctgcttcgccaccttggccgccat

SEQ ID NO: 3023740 - DNA, 25 bp, Homo sapien
ctcctccttccggagagttgggaga

SEQ ID NO: 3023741 - DNA, 25 bp, Homo sapien
ttgggagaccaactccctccgctgg

SEQ ID NO: 3023742 - DNA, 25 bp, Homo sapien
tccttccggagagttgggagaccaa

SEQ ID NO: 3023743 - DNA, 25 bp, Homo sapien
ggagagttgggagaccaactccctc

SEQ ID NO: 3023744 - DNA, 25 bp, Homo sapien
cagccggatccagcgctgctgccat

SEQ ID NO: 3023745 - DNA, 25 bp, Homo sapien
cgctgcgcccggtctcttcatgtct

SEQ ID NO: 3023746 - DNA, 25 bp, Homo sapien
agcgcccagccggatccagcgctgc

SEQ ID NO: 3023747 - DNA, 25 bp, Homo sapien
agcggcggtcctctcggacggatac

SEQ ID NO: 3023748 - DNA, 25 bp, Homo sapien
actccaggccgtggaagggaccctg

SEQ ID NO: 3023749 - DNA, 25 bp, Homo sapien
ctcctctggccggagctgcgtacag

SEQ ID NO: 3023750 - DNA, 25 bp, Homo sapien
tgcaaacccctccgcggcgtggtgg

SEQ ID NO: 3023751 - DNA, 25 bp, Homo sapien
ctgcgtacagggaagccggtcccct

SEQ ID NO: 3023752 - DNA, 25 bp, Homo sapien
aatgctgggcgaggccgatttgtcc

SEQ ID NO: 3023753 - DNA, 25 bp, Homo sapien
tcactgaaatgctgggcgaggccga

SEQ ID NO: 3023754 - DNA, 25 bp, Homo sapien
tgggcgaggccgatttgtccacgat

SEQ ID NO: 3023755 - DNA, 25 bp, Homo sapien
cactgaaatgctgggcgaggccgat

SEQ ID NO: 3023756 - DNA, 25 bp, Homo sapien
tacgccagcaggattgaggagcaga

SEQ ID NO: 3023757 - DNA, 25 bp, Homo sapien
cgcgtactacgccagcaggattgag

SEQ ID NO: 3023758 - DNA, 25 bp, Homo sapien
gggacgtcggcagctcgcgtactac

SEQ ID NO: 3023759 - DNA, 25 bp, Homo sapien
cagctcgcgtactacgccagcagga

SEQ ID NO: 3023760 - DNA, 25 bp, Homo sapien
ttttgttttgttttgagtctagctc

SEQ ID NO: 3023761 - DNA, 25 bp, Homo sapien
tgttttgttttgagtctagctctgt

SEQ ID NO: 3023762 - DNA, 25 bp, Homo sapien
caccatacctggctaatttttgttt

SEQ ID NO: 3023763 - DNA, 25 bp, Homo sapien
catacctggctaatttttgtttttg

SEQ ID NO: 3023764 - DNA, 25 bp, Homo sapien
taaaagtgttcgtgtgaatgctgag

SEQ ID NO: 3023765 - DNA, 25 bp, Homo sapien
tccaaagaaggtatcaaatgggcca

SEQ ID NO: 3023766 - DNA, 25 bp, Homo sapien
gaatgctgagatattggaaccctaa

SEQ ID NO: 3023767 - DNA, 25 bp, Homo sapien
cacagaaaacagttcggcggttcct

SEQ ID NO: 3023768 - DNA, 25 bp, Homo sapien
cacatcagcatccgagaaatttcca

SEQ ID NO: 3023769 - DNA, 25 bp, Homo sapien
ccacgcacatcagcatccgagaaat

SEQ ID NO: 3023770 - DNA, 25 bp, Homo sapien
acatcagcatccgagaaatttccat

SEQ ID NO: 3023771 - DNA, 25 bp, Homo sapien
gagtagctgggaactactggtgcat

SEQ ID NO: 3023772 - DNA, 25 bp, Homo sapien
gtagctgggaactactggtgcatgc

SEQ ID NO: 3023773 - DNA, 25 bp, Homo sapien
catgccaccacgcccggttaatttt

SEQ ID NO: 3023774 - DNA, 25 bp, Homo sapien
tcaccatattggccaggctggtgcc

SEQ ID NO: 3023775 - DNA, 25 bp, Homo sapien
tagatgtggaacacctagcccagtg

SEQ ID NO: 3023776 - DNA, 25 bp, Homo sapien
gaagggttttcagatccaaggaaca

SEQ ID NO: 3023777 - DNA, 25 bp, Homo sapien
gattgaagcatccaagtacaggtca

SEQ ID NO: 3023778 - DNA, 25 bp, Homo sapien
tgtgggtctaggaaaaacttgctct

SEQ ID NO: 3023779 - DNA, 25 bp, Homo sapien
gatgaccctagtcaacggaaccagc

SEQ ID NO: 3023780 - DNA, 25 bp, Homo sapien
caaagagctgcctaaagaaactggt

SEQ ID NO: 3023781 - DNA, 25 bp, Homo sapien
aactggtagctggagcaaactgcag

SEQ ID NO: 3023782 - DNA, 25 bp, Homo sapien
aattagactacatcaaaatctgggc

SEQ ID NO: 3023783 - DNA, 25 bp, Homo sapien
tcgctgccattgaattcctcagtga

SEQ ID NO: 3023784 - DNA, 25 bp, Homo sapien
gaattcctcagtgaccatactccgc

SEQ ID NO: 3023785 - DNA, 25 bp, Homo sapien
ggccttctcccaatcgctgccattg

SEQ ID NO: 3023786 - DNA, 25 bp, Homo sapien
tcagtgaccatactccgcacagtgc

SEQ ID NO: 3023787 - DNA, 25 bp, Homo sapien
catctcttacagaaggtatgctggg

SEQ ID NO: 3023788 - DNA, 25 bp, Homo sapien
tgtaagtcgttatgtgctcagctcc

SEQ ID NO: 3023789 - DNA, 25 bp, Homo sapien
tatagaagctctgaacgccacatct

SEQ ID NO: 3023790 - DNA, 25 bp, Homo sapien
ttgtgagtattgaacgtgtaagtcg

SEQ ID NO: 3023791 - DNA, 25 bp, Homo sapien
gacatttatttttatgtcacttaaa

SEQ ID NO: 3023792 - DNA, 25 bp, Homo sapien
agacatttatttttatgtcacttaa

SEQ ID NO: 3023793 - DNA, 25 bp, Homo sapien
catcacatcagggagggaaagtgct

SEQ ID NO: 3023794 - DNA, 25 bp, Homo sapien
taagaggccatttcctatctccaga

SEQ ID NO: 3023795 - DNA, 25 bp, Homo sapien
ttgaggacagagacccatctacact

SEQ ID NO: 3023796 - DNA, 25 bp, Homo sapien
taggtcaacggcatacagaattcag

SEQ ID NO: 3023797 - DNA, 25 bp, Homo sapien
cacaataccaaataggcctccaaaa

SEQ ID NO: 3023798 - DNA, 25 bp, Homo sapien
aatgtttccacaataccaaataggc

SEQ ID NO: 3023799 - DNA, 25 bp, Homo sapien
ttccacaataccaaataggcctcca

SEQ ID NO: 3023800 - DNA, 25 bp, Homo sapien
gtttccacaataccaaataggcctc

SEQ ID NO: 3023801 - DNA, 25 bp, Homo sapien
tacagacggcatgctaacagttggg

SEQ ID NO: 3023802 - DNA, 25 bp, Homo sapien
caccaatgggttctgcactccttga

SEQ ID NO: 3023803 - DNA, 25 bp, Homo sapien
aaagcccgtgagaggccctgctatg

SEQ ID NO: 3023804 - DNA, 25 bp, Homo sapien
gggtcctgtaaatctcaccaatggg

SEQ ID NO: 3023805 - DNA, 25 bp, Homo sapien
gctggaacaatgaagtgtctattct

SEQ ID NO: 3023806 - DNA, 25 bp, Homo sapien
tcaggagcttgaagcgagaagctgg

SEQ ID NO: 3023807 - DNA, 25 bp, Homo sapien
tgaagcgagaagctggaacaatgaa

SEQ ID NO: 3023808 - DNA, 25 bp, Homo sapien
ggaacaatgaagtgtctattctgct

SEQ ID NO: 3023809 - DNA, 25 bp, Homo sapien
tcagaacacaggaccaacagacagg

SEQ ID NO: 3023810 - DNA, 25 bp, Homo sapien
gggtcccaagtcagcagtcgaggtt

SEQ ID NO: 3023811 - DNA, 25 bp, Homo sapien
aattccagattgtgagcagccacct

SEQ ID NO: 3023812 - DNA, 25 bp, Homo sapien
gaagtccagctccaagtaaaacacg

SEQ ID NO: 3023813 - DNA, 25 bp, Homo sapien
tggactctattgttagtagcctggt

SEQ ID NO: 3023814 - DNA, 25 bp, Homo sapien
aatcctctcacaagttattccacag

SEQ ID NO: 3023815 - DNA, 25 bp, Homo sapien
gtagcctggtcagttctccatttga

SEQ ID NO: 3023816 - DNA, 25 bp, Homo sapien
tctggaattaaactgaagtcccctc

SEQ ID NO: 3023817 - DNA, 25 bp, Homo sapien
tgttaaataattagctgcatgccaa

SEQ ID NO: 3023818 - DNA, 25 bp, Homo sapien
gaaggtggtacaaatcaggccctcc

SEQ ID NO: 3023819 - DNA, 25 bp, Homo sapien
ggcaaaaaggactggatgctgttaa

SEQ ID NO: 3023820 - DNA, 25 bp, Homo sapien
agtgccatctgcctcaaccgaagag

SEQ ID NO: 3023821 - DNA, 25 bp, Homo sapien
ggccaatgtttcctctgtaccccaa

SEQ ID NO: 3023822 - DNA, 25 bp, Homo sapien
aggccaatgtttcctctgtacccca

SEQ ID NO: 3023823 - DNA, 25 bp, Homo sapien
acttcaacagttaccagcccaaggc

SEQ ID NO: 3023824 - DNA, 25 bp, Homo sapien
catcacctgacttcaacagttacca

SEQ ID NO: 3023825 - DNA, 25 bp, Homo sapien
tatatgcaagtctgctgaggcccaa

SEQ ID NO: 3023826 - DNA, 25 bp, Homo sapien
atatatgcaagtctgctgaggccca

SEQ ID NO: 3023827 - DNA, 25 bp, Homo sapien
atatgcaagtctgctgaggcccaaa

SEQ ID NO: 3023828 - DNA, 25 bp, Homo sapien
agataataatttctgaatagctgcc

SEQ ID NO: 3023829 - DNA, 25 bp, Homo sapien
taataatttctgaatagctgcctcc

SEQ ID NO: 3023830 - DNA, 25 bp, Homo sapien
taatttctgaatagctgcctcctgc

SEQ ID NO: 3023831 - DNA, 25 bp, Homo sapien
tttctgaatagctgcctcctgctct

SEQ ID NO: 3023832 - DNA, 25 bp, Homo sapien
gtgctcaaagtgaaagcctcctgta

SEQ ID NO: 3023833 - DNA, 25 bp, Homo sapien
cactaaacaagatacagcagacacg

SEQ ID NO: 3023834 - DNA, 25 bp, Homo sapien
cagacacgattgctacccttaccga

SEQ ID NO: 3023835 - DNA, 25 bp, Homo sapien
cacccagagggatctacagttaatt

SEQ ID NO: 3023836 - DNA, 25 bp, Homo sapien
atccccgccgccgcgcgaggccgga

SEQ ID NO: 3023837 - DNA, 25 bp, Homo sapien
ccgccgccgcgcgaggccggagcat

SEQ ID NO: 3023838 - DNA, 25 bp, Homo sapien
gtaggtatccccgccgccgcgcgag

SEQ ID NO: 3023839 - DNA, 25 bp, Homo sapien
tccccgccgccgcgcgaggccggag

SEQ ID NO: 3023840 - DNA, 25 bp, Homo sapien
ccctcggaggtaagcttctgccgct

SEQ ID NO: 3023841 - DNA, 25 bp, Homo sapien
ctcggaggtaagcttctgccgcttc

SEQ ID NO: 3023842 - DNA, 25 bp, Homo sapien
agcttggcggcaccctcggaggtaa

SEQ ID NO: 3023843 - DNA, 25 bp, Homo sapien
gcggcaccctcggaggtaagcttct

SEQ ID NO: 3023844 - DNA, 25 bp, Homo sapien
ttctgcccgcgcagcttggcggccg

SEQ ID NO: 3023845 - DNA, 25 bp, Homo sapien
gtggcgggagcaacgccagctcagg

SEQ ID NO: 3023846 - DNA, 25 bp, Homo sapien
ctggctagcggagcgccgtgtgcgg

SEQ ID NO: 3023847 - DNA, 25 bp, Homo sapien
caggtccaggttggacgccgaggac

SEQ ID NO: 3023848 - DNA, 25 bp, Homo sapien
ctcccgcagcctggcgcgcaggcct

SEQ ID NO: 3023849 - DNA, 25 bp, Homo sapien
cctgccctgtgtgaatccagcgggc

SEQ ID NO: 3023850 - DNA, 25 bp, Homo sapien
cctgtgtgaatccagcgggctcttc

SEQ ID NO: 3023851 - DNA, 25 bp, Homo sapien
tgtgtgaatccagcgggctcttcgt

SEQ ID NO: 3023852 - DNA, 25 bp, Homo sapien
tgccctgtgtgaatccagcgggctc

SEQ ID NO: 3023853 - DNA, 25 bp, Homo sapien
ctgggttgggcctgaattcgcaggc

SEQ ID NO: 3023854 - DNA, 25 bp, Homo sapien
gttgggcctgaattcgcaggctcat

SEQ ID NO: 3023855 - DNA, 25 bp, Homo sapien
ggttgggcctgaattcgcaggctca

SEQ ID NO: 3023856 - DNA, 25 bp, Homo sapien
tgggttgggcctgaattcgcaggct

SEQ ID NO: 3023857 - DNA, 25 bp, Homo sapien
taacagcggccgaaaccatagttct

SEQ ID NO: 3023858 - DNA, 25 bp, Homo sapien
ctgctacctcctgtgtaacagcggc

SEQ ID NO: 3023859 - DNA, 25 bp, Homo sapien
tctgtcacattatagaacagtgtca

SEQ ID NO: 3023860 - DNA, 25 bp, Homo sapien
gccgaaaccatagttcttcaccttc

SEQ ID NO: 3023861 - DNA, 25 bp, Homo sapien
gctgaacctgttcaaaatgttaata

SEQ ID NO: 3023862 - DNA, 25 bp, Homo sapien
gaaattacaagtttcagtaatagct

SEQ ID NO: 3023863 - DNA, 25 bp, Homo sapien
taattcttcagtcatggcattcgca

SEQ ID NO: 3023864 - DNA, 25 bp, Homo sapien
ttcagtcatggcattcgcagtgccc

SEQ ID NO: 3023865 - DNA, 25 bp, Homo sapien
cctgggaggcgaggcagtggttgca

SEQ ID NO: 3023866 - DNA, 25 bp, Homo sapien
tgaaacctgtctctactacaaatac

SEQ ID NO: 3023867 - DNA, 25 bp, Homo sapien
aaaaattagctggtcgtcgtggcag

SEQ ID NO: 3023868 - DNA, 25 bp, Homo sapien
aaaaagaccagccttgccaacgtgg

SEQ ID NO: 3023869 - DNA, 25 bp, Homo sapien
tacttcagccgtgacgatgtggctc

SEQ ID NO: 3023870 - DNA, 25 bp, Homo sapien
cagccgtgacgatgtggctctggaa

SEQ ID NO: 3023871 - DNA, 25 bp, Homo sapien
gcttctacttcagccgtgacgatgt

SEQ ID NO: 3023872 - DNA, 25 bp, Homo sapien
tctctgggcttctacttcagccgtg

SEQ ID NO: 3023873 - DNA, 25 bp, Homo sapien
ccctccaagccggagggaaatgctg

SEQ ID NO: 3023874 - DNA, 25 bp, Homo sapien
aaatgctgtggtcccgccgtccgcc

SEQ ID NO: 3023875 - DNA, 25 bp, Homo sapien
ctccagagcgcgctcccgggtcggc

SEQ ID NO: 3023876 - DNA, 25 bp, Homo sapien
ccagagcgcgctcccgggtcggcct

SEQ ID NO: 3023877 - DNA, 25 bp, Homo sapien
agtccagctctgtgacttggggaag

SEQ ID NO: 3023878 - DNA, 25 bp, Homo sapien
tgtgacttggggaagggagtggcgc

SEQ ID NO: 3023879 - DNA, 25 bp, Homo sapien
ccagctctgtgacttggggaaggga

SEQ ID NO: 3023880 - DNA, 25 bp, Homo sapien
tgacttggggaagggagtggcgcat

SEQ ID NO: 3023881 - DNA, 25 bp, Homo sapien
tgaggacatccgcaacctgcaggat

SEQ ID NO: 3023882 - DNA, 25 bp, Homo sapien
cagcatgtatgatgggctcctccaa

SEQ ID NO: 3023883 - DNA, 25 bp, Homo sapien
gatgatctcggacaactcagctgag

SEQ ID NO: 3023884 - DNA, 25 bp, Homo sapien
tgcaggatctcacgcctctgaagct

SEQ ID NO: 3023885 - DNA, 25 bp, Homo sapien
tgacatttactaggcctcggcacat

SEQ ID NO: 3023886 - DNA, 25 bp, Homo sapien
ccgaatggtcgttttggagcccctg

SEQ ID NO: 3023887 - DNA, 25 bp, Homo sapien
tttcattgcaagagcccggtgagcc

SEQ ID NO: 3023888 - DNA, 25 bp, Homo sapien
gattctgaccgcgaaagtgcacaca

SEQ ID NO: 3023889 - DNA, 25 bp, Homo sapien
agtccaactgatggcccagatgcag

SEQ ID NO: 3023890 - DNA, 25 bp, Homo sapien
tccagtccaactgatggcccagatg

SEQ ID NO: 3023891 - DNA, 25 bp, Homo sapien
aggatggtgcctctgaggaaaacta

SEQ ID NO: 3023892 - DNA, 25 bp, Homo sapien
ggaaaactatgtgcccgtccagctc

SEQ ID NO: 3023893 - DNA, 25 bp, Homo sapien
caaggttcaagagtgattggctccc

SEQ ID NO: 3023894 - DNA, 25 bp, Homo sapien
aactaactggcatcaacactgggtg

SEQ ID NO: 3023895 - DNA, 25 bp, Homo sapien
taacccacctgataggagaagcgcc

SEQ ID NO: 3023896 - DNA, 25 bp, Homo sapien
cataaggaggtaggccacgttcagt

SEQ ID NO: 3023897 - DNA, 25 bp, Homo sapien
ttgcccaggtcaatccacgtgacat

SEQ ID NO: 3023898 - DNA, 25 bp, Homo sapien
gaacttgctgggatccttaaggatg

SEQ ID NO: 3023899 - DNA, 25 bp, Homo sapien
ttggggaacttgctgggatccttaa

SEQ ID NO: 3023900 - DNA, 25 bp, Homo sapien
gggagcgcttgcgcaggctgagcag

SEQ ID NO: 3023901 - DNA, 25 bp, Homo sapien
aaccggttgccattgagtgccagtg

SEQ ID NO: 3023902 - DNA, 25 bp, Homo sapien
gattcccgacaggtccactgtgttg

SEQ ID NO: 3023903 - DNA, 25 bp, Homo sapien
catgtcgtccgtgaggcctgtgaag

SEQ ID NO: 3023904 - DNA, 25 bp, Homo sapien
cacagcgctgtaggtagctggtcac

SEQ ID NO: 3023905 - DNA, 25 bp, Homo sapien
ttgagttaagagtaccattgggctg

SEQ ID NO: 3023906 - DNA, 25 bp, Homo sapien
cgagtgaggaataaacatttgctgc

SEQ ID NO: 3023907 - DNA, 25 bp, Homo sapien
tatatggaagaagttcataagtgca

SEQ ID NO: 3023908 - DNA, 25 bp, Homo sapien
aaaatggtgccttgtatagtaggcg

SEQ ID NO: 3023909 - DNA, 25 bp, Homo sapien
cacctgggaatgcgcctctccagga

SEQ ID NO: 3023910 - DNA, 25 bp, Homo sapien
caggatccatctcctagttgtgggt

SEQ ID NO: 3023911 - DNA, 25 bp, Homo sapien
acctgggaatgcgcctctccaggat

SEQ ID NO: 3023912 - DNA, 25 bp, Homo sapien
gatccatctcctagttgtgggtggg

SEQ ID NO: 3023913 - DNA, 25 bp, Homo sapien
tactagggagtgcttgttgctcagg

SEQ ID NO: 3023914 - DNA, 25 bp, Homo sapien
tttgtgagggcacaccactcagcta

SEQ ID NO: 3023915 - DNA, 25 bp, Homo sapien
gcttcctacggtgttatcacagccc

SEQ ID NO: 3023916 - DNA, 25 bp, Homo sapien
cacaggttctgtgtcctacatgccc

SEQ ID NO: 3023917 - DNA, 25 bp, Homo sapien
aggtggtatgtcagctgccggcaca

SEQ ID NO: 3023918 - DNA, 25 bp, Homo sapien
tgaggtggtatgtcagctgccggca

SEQ ID NO: 3023919 - DNA, 25 bp, Homo sapien
tccatggcgcccagtgcatcgcctt

SEQ ID NO: 3023920 - DNA, 25 bp, Homo sapien
ggctgaggtggtatgtcagctgccg

SEQ ID NO: 3023921 - DNA, 25 bp, Homo sapien
gaattagttgctagcattgaaaaac

SEQ ID NO: 3023922 - DNA, 25 bp, Homo sapien
gatttatgtaagtctggattccagg

SEQ ID NO: 3023923 - DNA, 25 bp, Homo sapien
caggcttcctgtctcccgggtaaga

SEQ ID NO: 3023924 - DNA, 25 bp, Homo sapien
tccaggagatcggacaaaagttggc

SEQ ID NO: 3023925 - DNA, 25 bp, Homo sapien
ccgcccagaaggctcaatggctgtg

SEQ ID NO: 3023926 - DNA, 25 bp, Homo sapien
tgtgtgctgaatcaatgctttgcag

SEQ ID NO: 3023927 - DNA, 25 bp, Homo sapien
caatggctgtgtgctgaatcaatgc

SEQ ID NO: 3023928 - DNA, 25 bp, Homo sapien
aaggctcaatggctgtgtgctgaat

SEQ ID NO: 3023929 - DNA, 25 bp, Homo sapien
tggggcagaacgtgtttgaggggct

SEQ ID NO: 3023930 - DNA, 25 bp, Homo sapien
tcctggggcagaacgtgtttgaggg

SEQ ID NO: 3023931 - DNA, 25 bp, Homo sapien
gggcagaacgtgtttgaggggcttc

SEQ ID NO: 3023932 - DNA, 25 bp, Homo sapien
gcagaacgtgtttgaggggcttctc

SEQ ID NO: 3023933 - DNA, 25 bp, Homo sapien
tctaggaaaggcagagtctggcacc

SEQ ID NO: 3023934 - DNA, 25 bp, Homo sapien
gacaaagccgcagatggagctcagc

SEQ ID NO: 3023935 - DNA, 25 bp, Homo sapien
gcaactccattgctgctctaggaaa

SEQ ID NO: 3023936 - DNA, 25 bp, Homo sapien
tgcaacattgtgctcctgaccctgg

SEQ ID NO: 3023937 - DNA, 25 bp, Homo sapien
ggtgcctggaggacgggcttgtcct

SEQ ID NO: 3023938 - DNA, 25 bp, Homo sapien
gcccagaaaggcacccaccgcacac

SEQ ID NO: 3023939 - DNA, 25 bp, Homo sapien
ggacctggctggctcggaccacagc

SEQ ID NO: 3023940 - DNA, 25 bp, Homo sapien
tgccagtcctccttgggcatacagc

SEQ ID NO: 3023941 - DNA, 25 bp, Homo sapien
tagcgaggtcgactccatgcccagg

SEQ ID NO: 3023942 - DNA, 25 bp, Homo sapien
ggtccaccaggttccggaagctggc

SEQ ID NO: 3023943 - DNA, 25 bp, Homo sapien
tggatgtagcgtgccaggctgatga

SEQ ID NO: 3023944 - DNA, 25 bp, Homo sapien
gctggcgtagcgatacagaacgtcg

SEQ ID NO: 3023945 - DNA, 25 bp, Homo sapien
agcacagcccagagaaaggctccca

SEQ ID NO: 3023946 - DNA, 25 bp, Homo sapien
ccactgcaggctgtcctcattctgg

SEQ ID NO: 3023947 - DNA, 25 bp, Homo sapien
tgcaggctgtcctcattctgggggc

SEQ ID NO: 3023948 - DNA, 25 bp, Homo sapien
gctgtcctcattctgggggctccca

SEQ ID NO: 3023949 - DNA, 25 bp, Homo sapien
ctgcaggggttctcgatctcctgga

SEQ ID NO: 3023950 - DNA, 25 bp, Homo sapien
ggaccacagacccaattgagaatgt

SEQ ID NO: 3023951 - DNA, 25 bp, Homo sapien
cagacccaattgagaatgtgtcaaa

SEQ ID NO: 3023952 - DNA, 25 bp, Homo sapien
cacagacccaattgagaatgtgtca

SEQ ID NO: 3023953 - DNA, 25 bp, Homo sapien
gcacaaggcattgaggacaatccca

SEQ ID NO: 3023954 - DNA, 25 bp, Homo sapien
taactgagggcacttcatagtcctg

SEQ ID NO: 3023955 - DNA, 25 bp, Homo sapien
catgataggtctaaacggtaccacc

SEQ ID NO: 3023956 - DNA, 25 bp, Homo sapien
cacctctaggaactgtgcctgtgga

SEQ ID NO: 3023957 - DNA, 25 bp, Homo sapien
gtgcatcgtcttaggtgtcttaggg

SEQ ID NO: 3023958 - DNA, 25 bp, Homo sapien
ttttggtgcatcgtcttaggtgtct

SEQ ID NO: 3023959 - DNA, 25 bp, Homo sapien
ttttttggtgcatcgtcttaggtgt

SEQ ID NO: 3023960 - DNA, 25 bp, Homo sapien
tggtgcatcgtcttaggtgtcttag

SEQ ID NO: 3023961 - DNA, 25 bp, Homo sapien
gcctggcgagaggaaccacaaaaga

SEQ ID NO: 3023962 - DNA, 25 bp, Homo sapien
gattttaagcagaacaccggaagtg

SEQ ID NO: 3023963 - DNA, 25 bp, Homo sapien
tcagtgcagcaacaaggcgccttta

SEQ ID NO: 3023964 - DNA, 25 bp, Homo sapien
gcatccaaggaggtgccactaagta

SEQ ID NO: 3023965 - DNA, 25 bp, Homo sapien
ctgggcagcgatgtttggcagcttt

SEQ ID NO: 3023966 - DNA, 25 bp, Homo sapien
tcgacggtgacgagtgttgccacca

SEQ ID NO: 3023967 - DNA, 25 bp, Homo sapien
ctgagggatgagaggtaaagactgg

SEQ ID NO: 3023968 - DNA, 25 bp, Homo sapien
cagctttgctcagtgaggggcttca

SEQ ID NO: 3023969 - DNA, 25 bp, Homo sapien
caatcaaatcgagccgggcaccctt

SEQ ID NO: 3023970 - DNA, 25 bp, Homo sapien
aatcgagccgggcacccttcttgac

SEQ ID NO: 3023971 - DNA, 25 bp, Homo sapien
tgaccgccaccaaccacttccagtt

SEQ ID NO: 3023972 - DNA, 25 bp, Homo sapien
tcagacaatcaaatcgagccgggca

SEQ ID NO: 3023973 - DNA, 25 bp, Homo sapien
ataacccttcttcaaggagtctctc

SEQ ID NO: 3023974 - DNA, 25 bp, Homo sapien
taacccttcttcaaggagtctctcc

SEQ ID NO: 3023975 - DNA, 25 bp, Homo sapien
tactttaggacctctgaagacagca

SEQ ID NO: 3023976 - DNA, 25 bp, Homo sapien
gcacgcatggcaatgaaatgacact

SEQ ID NO: 3023977 - DNA, 25 bp, Homo sapien
ggcccacggtcacagtagaaacact

SEQ ID NO: 3023978 - DNA, 25 bp, Homo sapien
tgtgcctgatgggaagtttcaatcc

SEQ ID NO: 3023979 - DNA, 25 bp, Homo sapien
cagggaaacagacgcctttttctgc

SEQ ID NO: 3023980 - DNA, 25 bp, Homo sapien
tgctccatgacgcaggccgacagct

SEQ ID NO: 3023981 - DNA, 25 bp, Homo sapien
ctcagctgggtgtatcccagggaaa

SEQ ID NO: 3023982 - DNA, 25 bp, Homo sapien
tcagctgggtgtatcccagggaaac

SEQ ID NO: 3023983 - DNA, 25 bp, Homo sapien
tgtgaaccctccgaaattgcctgtg

SEQ ID NO: 3023984 - DNA, 25 bp, Homo sapien
agattctgagcttggagtctgtagc

SEQ ID NO: 3023985 - DNA, 25 bp, Homo sapien
cattcagaagaagtggcaccagcag

SEQ ID NO: 3023986 - DNA, 25 bp, Homo sapien
tcagagcctcaaaaagatcaaggac

SEQ ID NO: 3023987 - DNA, 25 bp, Homo sapien
aggcaggcatccctgcttccccgcc

SEQ ID NO: 3023988 - DNA, 25 bp, Homo sapien
ggcaggcatccctgcttccccgccc

SEQ ID NO: 3023989 - DNA, 25 bp, Homo sapien
tcaggcaggcatccctgcttccccg

SEQ ID NO: 3023990 - DNA, 25 bp, Homo sapien
caggcatccctgcttccccgcccac

SEQ ID NO: 3023991 - DNA, 25 bp, Homo sapien
cgactgtccccggagaccagcctcc

SEQ ID NO: 3023992 - DNA, 25 bp, Homo sapien
tgtccccggagaccagcctccttct

SEQ ID NO: 3023993 - DNA, 25 bp, Homo sapien
gactgtccccggagaccagcctcct

SEQ ID NO: 3023994 - DNA, 25 bp, Homo sapien
tccccggagaccagcctccttctct

SEQ ID NO: 3023995 - DNA, 25 bp, Homo sapien
ggccctggcgcaccatccgcagcag

SEQ ID NO: 3023996 - DNA, 25 bp, Homo sapien
accatgccgactcgccggtggtagg

SEQ ID NO: 3023997 - DNA, 25 bp, Homo sapien
ctggaccatgccgactcgccggtgg

SEQ ID NO: 3023998 - DNA, 25 bp, Homo sapien
aggtgctgcagcagcgtccccgcct

SEQ ID NO: 3023999 - DNA, 25 bp, Homo sapien
ccaggctgcccttggtctgccgggt

SEQ ID NO: 3024000 - DNA, 25 bp, Homo sapien
gggaactgttgcgcgcgggcgtcgc

SEQ ID NO: 3024001 - DNA, 25 bp, Homo sapien
gggactctccgctctgggccgcgag

SEQ ID NO: 3024002 - DNA, 25 bp, Homo sapien
ccagaagtccggccgttcgcgtcgg

SEQ ID NO: 3024003 - DNA, 25 bp, Homo sapien
gagctgcccgcagagaattgaggac

SEQ ID NO: 3024004 - DNA, 25 bp, Homo sapien
cccgcagagaattgaggactgaagt

SEQ ID NO: 3024005 - DNA, 25 bp, Homo sapien
ctagaagaggccacaggaccaacac

SEQ ID NO: 3024006 - DNA, 25 bp, Homo sapien
gactgaagtggccataaacgccaag

SEQ ID NO: 3024007 - DNA, 25 bp, Homo sapien
aggatgatagttccacttgccctgc

SEQ ID NO: 3024008 - DNA, 25 bp, Homo sapien
caagccttagcttcatgctccatga

SEQ ID NO: 3024009 - DNA, 25 bp, Homo sapien
aatgtccacaggatgatagttccac

SEQ ID NO: 3024010 - DNA, 25 bp, Homo sapien
ccaagccttagcttcatgctccatg

SEQ ID NO: 3024011 - DNA, 25 bp, Homo sapien
accgagaccggtagggcctgcctca

SEQ ID NO: 3024012 - DNA, 25 bp, Homo sapien
tctcgtaccccggaagggtgcgtgc

SEQ ID NO: 3024013 - DNA, 25 bp, Homo sapien
aagaacactgcgttcctgggcccgc

SEQ ID NO: 3024014 - DNA, 25 bp, Homo sapien
agtgtcccagagtccctttcgaggc

SEQ ID NO: 3024015 - DNA, 25 bp, Homo sapien
ttctggcgttgtgcctctatactcc

SEQ ID NO: 3024016 - DNA, 25 bp, Homo sapien
ggacttctggcgttgtgcctctata

SEQ ID NO: 3024017 - DNA, 25 bp, Homo sapien
gacttctggcgttgtgcctctatac

SEQ ID NO: 3024018 - DNA, 25 bp, Homo sapien
ctggacttctggcgttgtgcctcta

SEQ ID NO: 3024019 - DNA, 25 bp, Homo sapien
cctggatggtcgtttggcttagtaa

SEQ ID NO: 3024020 - DNA, 25 bp, Homo sapien
gtttggcttagtaaatagacctaga

SEQ ID NO: 3024021 - DNA, 25 bp, Homo sapien
tttgcctggatggtcgtttggctta

SEQ ID NO: 3024022 - DNA, 25 bp, Homo sapien
gcttagtaaatagacctagacccca

SEQ ID NO: 3024023 - DNA, 25 bp, Homo sapien
aggcaggggaagaaacggccaccat

SEQ ID NO: 3024024 - DNA, 25 bp, Homo sapien
tgcagctaggtctcaggtaggtttg

SEQ ID NO: 3024025 - DNA, 25 bp, Homo sapien
tctgcagctaggtctcaggtaggtt

SEQ ID NO: 3024026 - DNA, 25 bp, Homo sapien
taggtctcaggtaggtttgggccat

SEQ ID NO: 3024027 - DNA, 25 bp, Homo sapien
gctctgcagctaggtctcaggtagg

SEQ ID NO: 3024028 - DNA, 25 bp, Homo sapien
gaatgtatgggactcacaaagaact

SEQ ID NO: 3024029 - DNA, 25 bp, Homo sapien
taggtctgggagctccgagtttatc

SEQ ID NO: 3024030 - DNA, 25 bp, Homo sapien
gaacagtttcatcgaagccaatcca

SEQ ID NO: 3024031 - DNA, 25 bp, Homo sapien
caagagttaagtaaatggactgcac

SEQ ID NO: 3024032 - DNA, 25 bp, Homo sapien
taatgattaacacctctagtagagg

SEQ ID NO: 3024033 - DNA, 25 bp, Homo sapien
tggaagttgctatactcactctgct

SEQ ID NO: 3024034 - DNA, 25 bp, Homo sapien
caaggcttcatagaccaccaaagga

SEQ ID NO: 3024035 - DNA, 25 bp, Homo sapien
caagagggttatacgtggtagcacc

SEQ ID NO: 3024036 - DNA, 25 bp, Homo sapien
taaagccccgactcttacagtcagg

SEQ ID NO: 3024037 - DNA, 25 bp, Homo sapien
tgtagaacatcgtggcgccccatat

SEQ ID NO: 3024038 - DNA, 25 bp, Homo sapien
taacagcagatagtgtgatatcacc

SEQ ID NO: 3024039 - DNA, 25 bp, Homo sapien
ggctatttgaagacatgcctagtca

SEQ ID NO: 3024040 - DNA, 25 bp, Homo sapien
taattatgaaagatagagccatggg

SEQ ID NO: 3024041 - DNA, 25 bp, Homo sapien
tctgccttaagagatgtgatgggaa

SEQ ID NO: 3024042 - DNA, 25 bp, Homo sapien
taagaatacattttcgggcacatgc

SEQ ID NO: 3024043 - DNA, 25 bp, Homo sapien
tgcaagtgaactgacaccagaagac

SEQ ID NO: 3024044 - DNA, 25 bp, Homo sapien
tgccagtgacactccgggagcagtg

SEQ ID NO: 3024045 - DNA, 25 bp, Homo sapien
gatatcttgtgttagaaggcaatca

SEQ ID NO: 3024046 - DNA, 25 bp, Homo sapien
atagctacctattaaaaggagccag

SEQ ID NO: 3024047 - DNA, 25 bp, Homo sapien
cagtgagaatccctagtgcccagat

SEQ ID NO: 3024048 - DNA, 25 bp, Homo sapien
tgcgggtcagacaactgtaaaagtg

SEQ ID NO: 3024049 - DNA, 25 bp, Homo sapien
caaaggaaggcgctatggactgtca

SEQ ID NO: 3024050 - DNA, 25 bp, Homo sapien
acacaaagatctagggttctccact

SEQ ID NO: 3024051 - DNA, 25 bp, Homo sapien
catgccacatgctcaaccaagggaa

SEQ ID NO: 3024052 - DNA, 25 bp, Homo sapien
gcactattatgcaagggactggaga

SEQ ID NO: 3024053 - DNA, 25 bp, Homo sapien
caatttcccctcatttagctcagga

SEQ ID NO: 3024054 - DNA, 25 bp, Homo sapien
cctgacatgttaagagtaatctctg

SEQ ID NO: 3024055 - DNA, 25 bp, Homo sapien
aacttcctgtacaaagatgtcccag

SEQ ID NO: 3024056 - DNA, 25 bp, Homo sapien
ccatatctgagggaaggtgtaacca

SEQ ID NO: 3024057 - DNA, 25 bp, Homo sapien
gattttcgtatacatgggtggtcct

SEQ ID NO: 3024058 - DNA, 25 bp, Homo sapien
cactgtaacaagcttgagaggatcc

SEQ ID NO: 3024059 - DNA, 25 bp, Homo sapien
caggctgaccgtgcaacttgagtat

SEQ ID NO: 3024060 - DNA, 25 bp, Homo sapien
ttaattacgatgtttggcacctgta

SEQ ID NO: 3024061 - DNA, 25 bp, Homo sapien
attacgatgtttggcacctgtatga

SEQ ID NO: 3024062 - DNA, 25 bp, Homo sapien
aattacgatgtttggcacctgtatg

SEQ ID NO: 3024063 - DNA, 25 bp, Homo sapien
tacgatgtttggcacctgtatgaac

SEQ ID NO: 3024064 - DNA, 25 bp, Homo sapien
acgttgatgctgaataaggtttgta

SEQ ID NO: 3024065 - DNA, 25 bp, Homo sapien
taaggtaagtactctgactaaacac

SEQ ID NO: 3024066 - DNA, 25 bp, Homo sapien
tgcaataagggatgagatatgccta

SEQ ID NO: 3024067 - DNA, 25 bp, Homo sapien
gaagaaggtgtgtactctgactgaa

SEQ ID NO: 3024068 - DNA, 25 bp, Homo sapien
gctgagtaagatttgcgccttgtct

SEQ ID NO: 3024069 - DNA, 25 bp, Homo sapien
ttggtgtttcaggagggatgggtat

SEQ ID NO: 3024070 - DNA, 25 bp, Homo sapien
tttggcatgggtactttggtgtttc

SEQ ID NO: 3024071 - DNA, 25 bp, Homo sapien
cacattcatacgatttctctttggc

SEQ ID NO: 3024072 - DNA, 25 bp, Homo sapien
ttctctttggcatgggtactttggt

SEQ ID NO: 3024073 - DNA, 25 bp, Homo sapien
tccaggaagtattttcctatgtaca

SEQ ID NO: 3024074 - DNA, 25 bp, Homo sapien
tctctccaggaagtattttcctatg

SEQ ID NO: 3024075 - DNA, 25 bp, Homo sapien
aggcttctctccaggaagtattttc

SEQ ID NO: 3024076 - DNA, 25 bp, Homo sapien
cttctctccaggaagtattttccta

SEQ ID NO: 3024077 - DNA, 25 bp, Homo sapien
tatgagacatgattgaaggttgccc

SEQ ID NO: 3024078 - DNA, 25 bp, Homo sapien
catatgagacatgattgaaggttgc

SEQ ID NO: 3024079 - DNA, 25 bp, Homo sapien
gagacatgattgaaggttgccctgc

SEQ ID NO: 3024080 - DNA, 25 bp, Homo sapien
tgagacatgattgaaggttgccctg

SEQ ID NO: 3024081 - DNA, 25 bp, Homo sapien
gtaggatcatattcttgtgaaagga

SEQ ID NO: 3024082 - DNA, 25 bp, Homo sapien
ctgtacaattaggtttgaatgcttt

SEQ ID NO: 3024083 - DNA, 25 bp, Homo sapien
taagacattcttctgtaggatcata

SEQ ID NO: 3024084 - DNA, 25 bp, Homo sapien
caattaggtttgaatgcttttcaaa

SEQ ID NO: 3024085 - DNA, 25 bp, Homo sapien
tcgcctctctagtctatcatcgtag

SEQ ID NO: 3024086 - DNA, 25 bp, Homo sapien
tatcatcgtagtcatatgagtcttc

SEQ ID NO: 3024087 - DNA, 25 bp, Homo sapien
taatttgatggtatgggtttcttcc

SEQ ID NO: 3024088 - DNA, 25 bp, Homo sapien
agaagccaccttttcctcgcctctc

SEQ ID NO: 3024089 - DNA, 25 bp, Homo sapien
atcctccactggagtacatgcttgg

SEQ ID NO: 3024090 - DNA, 25 bp, Homo sapien
cctccactggagtacatgcttgggc

SEQ ID NO: 3024091 - DNA, 25 bp, Homo sapien
tccactggagtacatgcttgggctt

SEQ ID NO: 3024092 - DNA, 25 bp, Homo sapien
tcctccactggagtacatgcttggg

SEQ ID NO: 3024093 - DNA, 25 bp, Homo sapien
cctagagtgtgcagaatttgttccc

SEQ ID NO: 3024094 - DNA, 25 bp, Homo sapien
tgttccccagagaatttagtgtgct

SEQ ID NO: 3024095 - DNA, 25 bp, Homo sapien
tttgccaactaaggcatataaggcc

SEQ ID NO: 3024096 - DNA, 25 bp, Homo sapien
cagactgcaagtatctcccagaaga

SEQ ID NO: 3024097 - DNA, 25 bp, Homo sapien
gggaaggatacatcagaaaccaatg

SEQ ID NO: 3024098 - DNA, 25 bp, Homo sapien
gcaagatgcaagaatatacatagta

SEQ ID NO: 3024099 - DNA, 25 bp, Homo sapien
ggaaatgtatacctttctatatagt

SEQ ID NO: 3024100 - DNA, 25 bp, Homo sapien
tcatggttacctatagggagtaggt

SEQ ID NO: 3024101 - DNA, 25 bp, Homo sapien
catgctgttatgacagcggtcacat

SEQ ID NO: 3024102 - DNA, 25 bp, Homo sapien
ctacttatgtggaactttattacag

SEQ ID NO: 3024103 - DNA, 25 bp, Homo sapien
acagacttctacaggaaaacagtgg

SEQ ID NO: 3024104 - DNA, 25 bp, Homo sapien
ggaaaacagtggttcattgacatgc

SEQ ID NO: 3024105 - DNA, 25 bp, Homo sapien
tttagggggcattcatacatgttta

SEQ ID NO: 3024106 - DNA, 25 bp, Homo sapien
atttttagggggcattcatacatgt

SEQ ID NO: 3024107 - DNA, 25 bp, Homo sapien
taaatttttagggggcattcataca

SEQ ID NO: 3024108 - DNA, 25 bp, Homo sapien
aatttttagggggcattcatacatg

SEQ ID NO: 3024109 - DNA, 25 bp, Homo sapien
cttccaatatgggaatcacagttgg

SEQ ID NO: 3024110 - DNA, 25 bp, Homo sapien
acagttggtctgtacactgtaagtc

SEQ ID NO: 3024111 - DNA, 25 bp, Homo sapien
caccatccatggttcttccaatatg

SEQ ID NO: 3024112 - DNA, 25 bp, Homo sapien
aatcacagttggtctgtacactgta

SEQ ID NO: 3024113 - DNA, 25 bp, Homo sapien
gagaaaccatgttccaatagttctg

SEQ ID NO: 3024114 - DNA, 25 bp, Homo sapien
cgtcacagtcttgtataattccttc

SEQ ID NO: 3024115 - DNA, 25 bp, Homo sapien
tccttctgcacaggacgcattaact

SEQ ID NO: 3024116 - DNA, 25 bp, Homo sapien
tgcacaggacgcattaactcccagt

SEQ ID NO: 3024117 - DNA, 25 bp, Homo sapien
tgcagttccaatggtagagccggga

SEQ ID NO: 3024118 - DNA, 25 bp, Homo sapien
cacagtagttatagggccaggtcag

SEQ ID NO: 3024119 - DNA, 25 bp, Homo sapien
cagtaatatgacagaatgcatggcc

SEQ ID NO: 3024120 - DNA, 25 bp, Homo sapien
aataatatagactcatggccgggcg

SEQ ID NO: 3024121 - DNA, 25 bp, Homo sapien
caagtcatttagccatcctgtctgg

SEQ ID NO: 3024122 - DNA, 25 bp, Homo sapien
gggccaatgacttgtcctaagacat

SEQ ID NO: 3024123 - DNA, 25 bp, Homo sapien
aacctctgaaggtactttctgaggg

SEQ ID NO: 3024124 - DNA, 25 bp, Homo sapien
ttctgaatagcctaggaaacccctc

SEQ ID NO: 3024125 - DNA, 25 bp, Homo sapien
gaaacccctcaccaaatagatgcct

SEQ ID NO: 3024126 - DNA, 25 bp, Homo sapien
catgcaggatggagctcatgttaaa

SEQ ID NO: 3024127 - DNA, 25 bp, Homo sapien
caggatggagctcatgttaaagcct

SEQ ID NO: 3024128 - DNA, 25 bp, Homo sapien
gatggagctcatgttaaagccttgt

SEQ ID NO: 3024129 - DNA, 25 bp, Homo sapien
tgttctcactcactaacctttgttc

SEQ ID NO: 3024130 - DNA, 25 bp, Homo sapien
cagatgtgctagttgtcttctttaa

SEQ ID NO: 3024131 - DNA, 25 bp, Homo sapien
acccagggattcctcccctctctgc

SEQ ID NO: 3024132 - DNA, 25 bp, Homo sapien
gctgctcagatgtgctagttgtctt

SEQ ID NO: 3024133 - DNA, 25 bp, Homo sapien
gctcagatgtgctagttgtcttctt

SEQ ID NO: 3024134 - DNA, 25 bp, Homo sapien
tcttctagaatctgagtcaaatcct

SEQ ID NO: 3024135 - DNA, 25 bp, Homo sapien
gccaggtctgggtatggaaaattcc

SEQ ID NO: 3024136 - DNA, 25 bp, Homo sapien
tcaatgcctttcgaggaccagccag

SEQ ID NO: 3024137 - DNA, 25 bp, Homo sapien
gacaggtctcagtgtcacgcaagaa

SEQ ID NO: 3024138 - DNA, 25 bp, Homo sapien
tctcagccacttaaggcagagctct

SEQ ID NO: 3024139 - DNA, 25 bp, Homo sapien
ctgacttccaccttagaaggatttg

SEQ ID NO: 3024140 - DNA, 25 bp, Homo sapien
tttgagaacgtgaagaactgttcat

SEQ ID NO: 3024141 - DNA, 25 bp, Homo sapien
gacttccaccttagaaggatttgag

SEQ ID NO: 3024142 - DNA, 25 bp, Homo sapien
aggatttgagaacgtgaagaactgt

SEQ ID NO: 3024143 - DNA, 25 bp, Homo sapien
tctccagtagtgagccaactgcttg

SEQ ID NO: 3024144 - DNA, 25 bp, Homo sapien
tacagacaggagagtcaatctggca

SEQ ID NO: 3024145 - DNA, 25 bp, Homo sapien
ggtagagttagcagccttagtgaca

SEQ ID NO: 3024146 - DNA, 25 bp, Homo sapien
ccagaacttgcagggatggataaga

SEQ ID NO: 3024147 - DNA, 25 bp, Homo sapien
gaagctgtaatgactgaacggactc

SEQ ID NO: 3024148 - DNA, 25 bp, Homo sapien
gactcgaatctaagccaaacaacag

SEQ ID NO: 3024149 - DNA, 25 bp, Homo sapien
gaacggactctcaacaataacaaag

SEQ ID NO: 3024150 - DNA, 25 bp, Homo sapien
gacttgtaagggaactgccatctgc

SEQ ID NO: 3024151 - DNA, 25 bp, Homo sapien
ccggccaagtccctctgcctcttac

SEQ ID NO: 3024152 - DNA, 25 bp, Homo sapien
ccttcccggccaagtccctctgcct

SEQ ID NO: 3024153 - DNA, 25 bp, Homo sapien
ttcccggccaagtccctctgcctct

SEQ ID NO: 3024154 - DNA, 25 bp, Homo sapien
cttgcctcctgtcgcctccccttcc

SEQ ID NO: 3024155 - DNA, 25 bp, Homo sapien
tcccgcaagccacgagcacgggagc

SEQ ID NO: 3024156 - DNA, 25 bp, Homo sapien
acgggctcgggctgtcactgatcgc

SEQ ID NO: 3024157 - DNA, 25 bp, Homo sapien
ccgtgcgacgcgcaacgctgggact

SEQ ID NO: 3024158 - DNA, 25 bp, Homo sapien
ttcagccgcagggtcgaggtcgagg

SEQ ID NO: 3024159 - DNA, 25 bp, Homo sapien
cttccccgcaaagcacagagtgtcc

SEQ ID NO: 3024160 - DNA, 25 bp, Homo sapien
agctgcacgttccagcccggtcctg

SEQ ID NO: 3024161 - DNA, 25 bp, Homo sapien
aggcgcctgcgtggcgggctcagtc

SEQ ID NO: 3024162 - DNA, 25 bp, Homo sapien
taaggccacaggcaacaatggcgac

SEQ ID NO: 3024163 - DNA, 25 bp, Homo sapien
cgctctgacttgcttgtcagcctgc

SEQ ID NO: 3024164 - DNA, 25 bp, Homo sapien
ttcaaagtttccccgggcagacgca

SEQ ID NO: 3024165 - DNA, 25 bp, Homo sapien
acccatcgctctgacttgcttgtca

SEQ ID NO: 3024166 - DNA, 25 bp, Homo sapien
cagcctgcgaggttccgaagggaac

SEQ ID NO: 3024167 - DNA, 25 bp, Homo sapien
tgtcttcagggactaggtacgctgt

SEQ ID NO: 3024168 - DNA, 25 bp, Homo sapien
gaactgaatacgtgtgtccctctaa

SEQ ID NO: 3024169 - DNA, 25 bp, Homo sapien
taggacagggcaatgtttctccagt

SEQ ID NO: 3024170 - DNA, 25 bp, Homo sapien
ggacagcagagcctatatgggaaaa

SEQ ID NO: 3024171 - DNA, 25 bp, Homo sapien
tatggcggccgattgagagtcttcc

SEQ ID NO: 3024172 - DNA, 25 bp, Homo sapien
aaaagagcactcagcagcgcctgat

SEQ ID NO: 3024173 - DNA, 25 bp, Homo sapien
tgtctccatggaagaatcacgccga

SEQ ID NO: 3024174 - DNA, 25 bp, Homo sapien
gatccttgctgagcatcgtggagaa

SEQ ID NO: 3024175 - DNA, 25 bp, Homo sapien
aaggaatttaatagtgacctattca

SEQ ID NO: 3024176 - DNA, 25 bp, Homo sapien
taaggcaatcatcttggtagcaaac

SEQ ID NO: 3024177 - DNA, 25 bp, Homo sapien
cataactcaagctttataaaaagcc

SEQ ID NO: 3024178 - DNA, 25 bp, Homo sapien
caaatggcagatatcaacatttaaa

SEQ ID NO: 3024179 - DNA, 25 bp, Homo sapien
agtgtgcagacaacaagagagttct

SEQ ID NO: 3024180 - DNA, 25 bp, Homo sapien
tccataatagtgtgcagacaacaag

SEQ ID NO: 3024181 - DNA, 25 bp, Homo sapien
ccataatagtgtgcagacaacaaga

SEQ ID NO: 3024182 - DNA, 25 bp, Homo sapien
gtgcagacaacaagagagttctgag

SEQ ID NO: 3024183 - DNA, 25 bp, Homo sapien
caggtagcggcgaattggaacggga

SEQ ID NO: 3024184 - DNA, 25 bp, Homo sapien
ccttagatctgcttcgagaatgtga

SEQ ID NO: 3024185 - DNA, 25 bp, Homo sapien
ttagatttgctctttgatctagatt

SEQ ID NO: 3024186 - DNA, 25 bp, Homo sapien
cccgatcagacttgggcttagattt

SEQ ID NO: 3024187 - DNA, 25 bp, Homo sapien
aatgtgaatgggagccccgatcaga

SEQ ID NO: 3024188 - DNA, 25 bp, Homo sapien
tcatgtcagagtaggagcgaaactc

SEQ ID NO: 3024189 - DNA, 25 bp, Homo sapien
gtccaaagcacgcttcatgtcagag

SEQ ID NO: 3024190 - DNA, 25 bp, Homo sapien
caaagcacgcttcatgtcagagtag

SEQ ID NO: 3024191 - DNA, 25 bp, Homo sapien
gagtaggagcgaaactcaattacac

SEQ ID NO: 3024192 - DNA, 25 bp, Homo sapien
ggttacttaacctgcttgtcgcata

SEQ ID NO: 3024193 - DNA, 25 bp, Homo sapien
tacttaacctgcttgtcgcataaaa

SEQ ID NO: 3024194 - DNA, 25 bp, Homo sapien
cttgtgggcatccgcacaggttact

SEQ ID NO: 3024195 - DNA, 25 bp, Homo sapien
tgggcatccgcacaggttacttaac

SEQ ID NO: 3024196 - DNA, 25 bp, Homo sapien
aactgcacagactagaaagattttc

SEQ ID NO: 3024197 - DNA, 25 bp, Homo sapien
ctgcacagactagaaagattttcta

SEQ ID NO: 3024198 - DNA, 25 bp, Homo sapien
agattttctacaataagcctgtatt

SEQ ID NO: 3024199 - DNA, 25 bp, Homo sapien
ccaactgcacagactagaaagattt

SEQ ID NO: 3024200 - DNA, 25 bp, Homo sapien
gctcctcgctgttcagctcgtaaag

SEQ ID NO: 3024201 - DNA, 25 bp, Homo sapien
cgctgttcagctcgtaaagggcgtc

SEQ ID NO: 3024202 - DNA, 25 bp, Homo sapien
tcctcgctgttcagctcgtaaaggg

SEQ ID NO: 3024203 - DNA, 25 bp, Homo sapien
ctcgctgttcagctcgtaaagggcg

SEQ ID NO: 3024204 - DNA, 25 bp, Homo sapien
ttcgaggaggcggccatagccactg

SEQ ID NO: 3024205 - DNA, 25 bp, Homo sapien
ttttgaggtctacttcgaggaggcg

SEQ ID NO: 3024206 - DNA, 25 bp, Homo sapien
ccatttttgaggtctacttcgagga

SEQ ID NO: 3024207 - DNA, 25 bp, Homo sapien
tttttgaggtctacttcgaggaggc

SEQ ID NO: 3024208 - DNA, 25 bp, Homo sapien
aggcgtcctatgtagacgcgcggca

SEQ ID NO: 3024209 - DNA, 25 bp, Homo sapien
ggcgtcctatgtagacgcgcggcat

SEQ ID NO: 3024210 - DNA, 25 bp, Homo sapien
gggacggcaagagcccgaacacgcg

SEQ ID NO: 3024211 - DNA, 25 bp, Homo sapien
cggcaagagcccgaacacgcgcctc

SEQ ID NO: 3024212 - DNA, 25 bp, Homo sapien
caagagcccgaacacgcgcctcaca

SEQ ID NO: 3024213 - DNA, 25 bp, Homo sapien
tgcggggacggcaagagcccgaaca

SEQ ID NO: 3024214 - DNA, 25 bp, Homo sapien
cccttccccaatggatacttttcag

SEQ ID NO: 3024215 - DNA, 25 bp, Homo sapien
tccccaatggatacttttcagttct

SEQ ID NO: 3024216 - DNA, 25 bp, Homo sapien
ctctagtcaggttggtgtgggtcat

SEQ ID NO: 3024217 - DNA, 25 bp, Homo sapien
gtcaggttggtgtgggtcatcccca

SEQ ID NO: 3024218 - DNA, 25 bp, Homo sapien
tacagttgctctcctatgaagaacc

SEQ ID NO: 3024219 - DNA, 25 bp, Homo sapien
taacctagggattaaggagatctct

SEQ ID NO: 3024220 - DNA, 25 bp, Homo sapien
tgaagaaccatccagtccagaggga

SEQ ID NO: 3024221 - DNA, 25 bp, Homo sapien
ggtaatcaatattaacagcctggtg

SEQ ID NO: 3024222 - DNA, 25 bp, Homo sapien
ggtgaatgccctctcgcagtcagta

SEQ ID NO: 3024223 - DNA, 25 bp, Homo sapien
tatgccttcgttggtgcacggtaag

SEQ ID NO: 3024224 - DNA, 25 bp, Homo sapien
caatgcactgtaaggtaagaacccc

SEQ ID NO: 3024225 - DNA, 25 bp, Homo sapien
taaggctcgaactactcctgaaggc

SEQ ID NO: 3024226 - DNA, 25 bp, Homo sapien
tacagtaaggcatgaataattaatg

SEQ ID NO: 3024227 - DNA, 25 bp, Homo sapien
tatgcattctgtggtgtacagtaag

SEQ ID NO: 3024228 - DNA, 25 bp, Homo sapien
attctgaaagactccccacattcat

SEQ ID NO: 3024229 - DNA, 25 bp, Homo sapien
agaagaacgcatgaaggcctttcca

SEQ ID NO: 3024230 - DNA, 25 bp, Homo sapien
taagatatgacttgttcctaaaggc

SEQ ID NO: 3024231 - DNA, 25 bp, Homo sapien
tgtgagtttcctgatgtcttgcaag

SEQ ID NO: 3024232 - DNA, 25 bp, Homo sapien
tgcgatgcggttgaatgctttccca

SEQ ID NO: 3024233 - DNA, 25 bp, Homo sapien
tctctggtgctgattaagacgggca

SEQ ID NO: 3024234 - DNA, 25 bp, Homo sapien
gtgatgaagaagcaatgaaggcctt

SEQ ID NO: 3024235 - DNA, 25 bp, Homo sapien
taccataagtgatgaagaagcaatg

SEQ ID NO: 3024236 - DNA, 25 bp, Homo sapien
tgatgtaccataagtgatgaagaag

SEQ ID NO: 3024237 - DNA, 25 bp, Homo sapien
aattctctgatgtaccataagtgat

SEQ ID NO: 3024238 - DNA, 25 bp, Homo sapien
tgaaggctggctgaatgttttccca

SEQ ID NO: 3024239 - DNA, 25 bp, Homo sapien
ctgaagtctgccttatggctttgct

SEQ ID NO: 3024240 - DNA, 25 bp, Homo sapien
aatgaaaggccttttcgcatgtact

SEQ ID NO: 3024241 - DNA, 25 bp, Homo sapien
ttcgcatgtactacatttgtagggt

SEQ ID NO: 3024242 - DNA, 25 bp, Homo sapien
ctgtaatcaaatttaaattctctgt

SEQ ID NO: 3024243 - DNA, 25 bp, Homo sapien
gtgtttggcatctgctgtgaagctc

SEQ ID NO: 3024244 - DNA, 25 bp, Homo sapien
gtttggcatctgctgtgaagctctt

SEQ ID NO: 3024245 - DNA, 25 bp, Homo sapien
taaattctctgtgaaattttcctct

SEQ ID NO: 3024246 - DNA, 25 bp, Homo sapien
ctagtgggagtcttcttgagtggaa

SEQ ID NO: 3024247 - DNA, 25 bp, Homo sapien
gaaatagcctttgttcgtgtagcct

SEQ ID NO: 3024248 - DNA, 25 bp, Homo sapien
tctagtatggcctcctgtgataaat

SEQ ID NO: 3024249 - DNA, 25 bp, Homo sapien
atctaaagcctctttgactagtggg

SEQ ID NO: 3024250 - DNA, 25 bp, Homo sapien
ttgtgcttcagcttccgaagtagtt

SEQ ID NO: 3024251 - DNA, 25 bp, Homo sapien
gtcatgctgttgctatttatcattc

SEQ ID NO: 3024252 - DNA, 25 bp, Homo sapien
taaaacccacttttaagcagtatga

SEQ ID NO: 3024253 - DNA, 25 bp, Homo sapien
tgctgtcataggatattatattgcc

SEQ ID NO: 3024254 - DNA, 25 bp, Homo sapien
gacataattcagagcatcctgtctg

SEQ ID NO: 3024255 - DNA, 25 bp, Homo sapien
tacaaaattctgcaaagactgacat

SEQ ID NO: 3024256 - DNA, 25 bp, Homo sapien
gcaaatgtatagtctcactagcaga

SEQ ID NO: 3024257 - DNA, 25 bp, Homo sapien
tcctgtctgaccatagtagaattaa

SEQ ID NO: 3024258 - DNA, 25 bp, Homo sapien
taaaagccaagtaatgtcaggcatg

SEQ ID NO: 3024259 - DNA, 25 bp, Homo sapien
aaaagccaagtaatgtcaggcatgg

SEQ ID NO: 3024260 - DNA, 25 bp, Homo sapien
ttaaaagccaagtaatgtcaggcat

SEQ ID NO: 3024261 - DNA, 25 bp, Homo sapien
gtaataaaactcaaacatacaagaa

SEQ ID NO: 3024262 - DNA, 25 bp, Homo sapien
agtttctgtagccttgcaggtgaag

SEQ ID NO: 3024263 - DNA, 25 bp, Homo sapien
ttctgtagccttgcaggtgaagaaa

SEQ ID NO: 3024264 - DNA, 25 bp, Homo sapien
tctgtagccttgcaggtgaagaaaa

SEQ ID NO: 3024265 - DNA, 25 bp, Homo sapien
gtttctgtagccttgcaggtgaaga

SEQ ID NO: 3024266 - DNA, 25 bp, Homo sapien
tcaaataaatcccatcttcttggtt

SEQ ID NO: 3024267 - DNA, 25 bp, Homo sapien
cccatcttcttggttctgtttaact

SEQ ID NO: 3024268 - DNA, 25 bp, Homo sapien
caaataaatcccatcttcttggttc

SEQ ID NO: 3024269 - DNA, 25 bp, Homo sapien
atcttcttggttctgtttaactcac

SEQ ID NO: 3024270 - DNA, 25 bp, Homo sapien
ttctctcaccgtcacccatggtcct

SEQ ID NO: 3024271 - DNA, 25 bp, Homo sapien
tttctctcaccgtcacccatggtcc

SEQ ID NO: 3024272 - DNA, 25 bp, Homo sapien
gaaatttctctcaccgtcacccatg

SEQ ID NO: 3024273 - DNA, 25 bp, Homo sapien
aatttctctcaccgtcacccatggt

SEQ ID NO: 3024274 - DNA, 25 bp, Homo sapien
tgtgtagggtccatcaacctccact

SEQ ID NO: 3024275 - DNA, 25 bp, Homo sapien
ctgtgtagggtccatcaacctccac

SEQ ID NO: 3024276 - DNA, 25 bp, Homo sapien
ccttgtgcaggttcctctgtgtagg

SEQ ID NO: 3024277 - DNA, 25 bp, Homo sapien
gtgcaggttcctctgtgtagggtcc

SEQ ID NO: 3024278 - DNA, 25 bp, Homo sapien
aataaaagacatttagcactgaaat

SEQ ID NO: 3024279 - DNA, 25 bp, Homo sapien
tgtaaaataaaagacatttagcact

SEQ ID NO: 3024280 - DNA, 25 bp, Homo sapien
taaaataaaagacatttagcactga

SEQ ID NO: 3024281 - DNA, 25 bp, Homo sapien
aaataaaagacatttagcactgaaa

SEQ ID NO: 3024282 - DNA, 25 bp, Homo sapien
gaagatcttcatctggctgggtaac

SEQ ID NO: 3024283 - DNA, 25 bp, Homo sapien
tcttcatctggctgggtaacttcag

SEQ ID NO: 3024284 - DNA, 25 bp, Homo sapien
agatcttcatctggctgggtaactt

SEQ ID NO: 3024285 - DNA, 25 bp, Homo sapien
atcttcatctggctgggtaacttca

SEQ ID NO: 3024286 - DNA, 25 bp, Homo sapien
cagcagccataatctctccctctgg

SEQ ID NO: 3024287 - DNA, 25 bp, Homo sapien
gcagccataatctctccctctggtt

SEQ ID NO: 3024288 - DNA, 25 bp, Homo sapien
aactgagaaaaacacagcagccata

SEQ ID NO: 3024289 - DNA, 25 bp, Homo sapien
caggcgtccaactgagaaaaacaca

SEQ ID NO: 3024290 - DNA, 25 bp, Homo sapien
gaaagagtggagtcttgcaaagaca

SEQ ID NO: 3024291 - DNA, 25 bp, Homo sapien
ctggaaagagtggagtcttgcaaag

SEQ ID NO: 3024292 - DNA, 25 bp, Homo sapien
ggaaagagtggagtcttgcaaagac

SEQ ID NO: 3024293 - DNA, 25 bp, Homo sapien
aaagagtggagtcttgcaaagacat

SEQ ID NO: 3024294 - DNA, 25 bp, Homo sapien
caagttggaatcctgacatacaagt

SEQ ID NO: 3024295 - DNA, 25 bp, Homo sapien
ggaatcctgacatacaagtgagcat

SEQ ID NO: 3024296 - DNA, 25 bp, Homo sapien
gttggaatcctgacatacaagtgag

SEQ ID NO: 3024297 - DNA, 25 bp, Homo sapien
tggaatcctgacatacaagtgagca

SEQ ID NO: 3024298 - DNA, 25 bp, Homo sapien
gctttggctaccgtaaaactgtgac

SEQ ID NO: 3024299 - DNA, 25 bp, Homo sapien
ggcaagtcacttgagcacaacgaat

SEQ ID NO: 3024300 - DNA, 25 bp, Homo sapien
taggaataaaatcccagagtggctg

SEQ ID NO: 3024301 - DNA, 25 bp, Homo sapien
gatatctaggccactattccccagt

SEQ ID NO: 3024302 - DNA, 25 bp, Homo sapien
cctcctcagggcctgcaaggcgcgg

SEQ ID NO: 3024303 - DNA, 25 bp, Homo sapien
gccctcctcagggcctgcaaggcgc

SEQ ID NO: 3024304 - DNA, 25 bp, Homo sapien
tcctcagggcctgcaaggcgcgggg

SEQ ID NO: 3024305 - DNA, 25 bp, Homo sapien
ttcgggtatgccctcctcagggcct

SEQ ID NO: 3024306 - DNA, 25 bp, Homo sapien
gcagggcgggaacgcttccagcaat

SEQ ID NO: 3024307 - DNA, 25 bp, Homo sapien
acaactgagggaactcgcagagcag

SEQ ID NO: 3024308 - DNA, 25 bp, Homo sapien
gcttccagcaatggcggcggctcgg

SEQ ID NO: 3024309 - DNA, 25 bp, Homo sapien
ctggcggccgaactgaggacaactg

SEQ ID NO: 3024310 - DNA, 25 bp, Homo sapien
gcgcctgcgcagccggagcgtcgga

SEQ ID NO: 3024311 - DNA, 25 bp, Homo sapien
tgcgcctgcgcagccggagcgtcgg

SEQ ID NO: 3024312 - DNA, 25 bp, Homo sapien
cgcctgcgcagccggagcgtcggaa

SEQ ID NO: 3024313 - DNA, 25 bp, Homo sapien
gaaagatgtttaatttcaccaattg

SEQ ID NO: 3024314 - DNA, 25 bp, Homo sapien
ccagcaggctggaaagatgtttaat

SEQ ID NO: 3024315 - DNA, 25 bp, Homo sapien
gatgtttaatttcaccaattgcctt

SEQ ID NO: 3024316 - DNA, 25 bp, Homo sapien
accaattgcctttagtaattcttgt

SEQ ID NO: 3024317 - DNA, 25 bp, Homo sapien
cgtgtcttttgcatggaaagcacgc

SEQ ID NO: 3024318 - DNA, 25 bp, Homo sapien
atctcttggcactggcgcggctttc

SEQ ID NO: 3024319 - DNA, 25 bp, Homo sapien
cactggcgcggctttccttcaataa

SEQ ID NO: 3024320 - DNA, 25 bp, Homo sapien
ggccatgatctcttggcactggcgc

SEQ ID NO: 3024321 - DNA, 25 bp, Homo sapien
gacaatttcgggctcaggtgcaggg

SEQ ID NO: 3024322 - DNA, 25 bp, Homo sapien
tttcagatccccgggaaggatgcat

SEQ ID NO: 3024323 - DNA, 25 bp, Homo sapien
cggagtccaaacgtcagccctgcgg

SEQ ID NO: 3024324 - DNA, 25 bp, Homo sapien
cgtcctgggcgccatctgaggccgt

SEQ ID NO: 3024325 - DNA, 25 bp, Homo sapien
atctgactccgcttgcgtcctggca

SEQ ID NO: 3024326 - DNA, 25 bp, Homo sapien
tgtgaagcggcactcatgacaggca

SEQ ID NO: 3024327 - DNA, 25 bp, Homo sapien
aaccgagcaagcctaggagcaggtg

SEQ ID NO: 3024328 - DNA, 25 bp, Homo sapien
gggcaactttgctgcagtggccaag

SEQ ID NO: 3024329 - DNA, 25 bp, Homo sapien
ctatgcagaagctcctttgtttaac

SEQ ID NO: 3024330 - DNA, 25 bp, Homo sapien
ggttgcctatttagtctcttgaatg

SEQ ID NO: 3024331 - DNA, 25 bp, Homo sapien
tttcctatgcagaagctcctttgtt

SEQ ID NO: 3024332 - DNA, 25 bp, Homo sapien
cattgtttaggttgcctatttagtc

SEQ ID NO: 3024333 - DNA, 25 bp, Homo sapien
ctcggggtcatttacacgtttctgg

SEQ ID NO: 3024334 - DNA, 25 bp, Homo sapien
gtcacactcggggtcatttacacgt

SEQ ID NO: 3024335 - DNA, 25 bp, Homo sapien
ttcccagtcacactcggggtcattt

SEQ ID NO: 3024336 - DNA, 25 bp, Homo sapien
atggaggccaggtgcgtgcagtgac

SEQ ID NO: 3024337 - DNA, 25 bp, Homo sapien
tttctgggtgctggactgtcgtcac

SEQ ID NO: 3024338 - DNA, 25 bp, Homo sapien
cttgtttgccagtcgctcttttctg

SEQ ID NO: 3024339 - DNA, 25 bp, Homo sapien
ttctgccttgcagatcctcctgttt

SEQ ID NO: 3024340 - DNA, 25 bp, Homo sapien
tgtgctctttatcactgccgctgtg

SEQ ID NO: 3024341 - DNA, 25 bp, Homo sapien
tgcttgccacctccagtatcaatct

SEQ ID NO: 3024342 - DNA, 25 bp, Homo sapien
ctgcaccgggagcacaggattcctg

SEQ ID NO: 3024343 - DNA, 25 bp, Homo sapien
ggtttctctgtggttggttcctctc

SEQ ID NO: 3024344 - DNA, 25 bp, Homo sapien
tccagtatcaatctcctctcctctt

SEQ ID NO: 3024345 - DNA, 25 bp, Homo sapien
attttctaactctctcctccgttct

SEQ ID NO: 3024346 - DNA, 25 bp, Homo sapien
taactctctcctccgttcttctcgc

SEQ ID NO: 3024347 - DNA, 25 bp, Homo sapien
ctctctcctccgttcttctcgcttc

SEQ ID NO: 3024348 - DNA, 25 bp, Homo sapien
tttctaactctctcctccgttcttc

SEQ ID NO: 3024349 - DNA, 25 bp, Homo sapien
ccccagcagagtctcagggttggca

SEQ ID NO: 3024350 - DNA, 25 bp, Homo sapien
tccaaaagaggtgtggttcttctag

SEQ ID NO: 3024351 - DNA, 25 bp, Homo sapien
tattccaaaagaggtgtggttcttc

SEQ ID NO: 3024352 - DNA, 25 bp, Homo sapien
atatattccaaaagaggtgtggttc

SEQ ID NO: 3024353 - DNA, 25 bp, Homo sapien
tttgctgtcaaggaagatatatcca

SEQ ID NO: 3024354 - DNA, 25 bp, Homo sapien
tcaaggaagatatatccatcaaaac

SEQ ID NO: 3024355 - DNA, 25 bp, Homo sapien
tattctggatctttgctgtcaagga

SEQ ID NO: 3024356 - DNA, 25 bp, Homo sapien
gctgtcaaggaagatatatccatca

SEQ ID NO: 3024357 - DNA, 25 bp, Homo sapien
taatgtatgctcttgagtagagatg

SEQ ID NO: 3024358 - DNA, 25 bp, Homo sapien
aggattcctaaaattaatgtatgct

SEQ ID NO: 3024359 - DNA, 25 bp, Homo sapien
ggcgaagaactcgaagtagtcgtgt

SEQ ID NO: 3024360 - DNA, 25 bp, Homo sapien
tcggcggcgaagaactcgaagtagt

SEQ ID NO: 3024361 - DNA, 25 bp, Homo sapien
atgtctacatctggatgcagagaat

SEQ ID NO: 3024362 - DNA, 25 bp, Homo sapien
tgcaggttggtttatttatctgtaa

SEQ ID NO: 3024363 - DNA, 25 bp, Homo sapien
caggttggtttatttatctgtaatg

SEQ ID NO: 3024364 - DNA, 25 bp, Homo sapien
ttatctgtaatgtgctttcattcat

SEQ ID NO: 3024365 - DNA, 25 bp, Homo sapien
cttgcaggttggtttatttatctgt

SEQ ID NO: 3024366 - DNA, 25 bp, Homo sapien
gaagctggagcaattccaccagatt

SEQ ID NO: 3024367 - DNA, 25 bp, Homo sapien
caggaagctggagcaattccaccag

SEQ ID NO: 3024368 - DNA, 25 bp, Homo sapien
ggccggggggaagcacttgctgtca

SEQ ID NO: 3024369 - DNA, 25 bp, Homo sapien
tcataaagccggatcaggtcctggg

SEQ ID NO: 3024370 - DNA, 25 bp, Homo sapien
gacctttggccatgctctcattaca

SEQ ID NO: 3024371 - DNA, 25 bp, Homo sapien
atgctctcattacacttgattgcca

SEQ ID NO: 3024372 - DNA, 25 bp, Homo sapien
acttaaaagagttgtgcttcatttt

SEQ ID NO: 3024373 - DNA, 25 bp, Homo sapien
gccactgctgctgattcaacatgtt

SEQ ID NO: 3024374 - DNA, 25 bp, Homo sapien
cacttaaaagagttgtgcttcattt

SEQ ID NO: 3024375 - DNA, 25 bp, Homo sapien
actgctgctgattcaacatgtttca

SEQ ID NO: 3024376 - DNA, 25 bp, Homo sapien
catcatagcattttttaggagagta

SEQ ID NO: 3024377 - DNA, 25 bp, Homo sapien
aatgattaccaggagtttttgctaa

SEQ ID NO: 3024378 - DNA, 25 bp, Homo sapien
ttgctaacatttatgggaacatgct

SEQ ID NO: 3024379 - DNA, 25 bp, Homo sapien
gacataaagttgcatatactggaaa

SEQ ID NO: 3024380 - DNA, 25 bp, Homo sapien
tctaagcatagatcccaagaggtaa

SEQ ID NO: 3024381 - DNA, 25 bp, Homo sapien
tgtggttggccataaagtattcctg

SEQ ID NO: 3024382 - DNA, 25 bp, Homo sapien
gagataatatttaactggccatgag

SEQ ID NO: 3024383 - DNA, 25 bp, Homo sapien
gtcttcctctagcactgtagcctgt

SEQ ID NO: 3024384 - DNA, 25 bp, Homo sapien
caattgtgcttgtccagatatgaac

SEQ ID NO: 3024385 - DNA, 25 bp, Homo sapien
tagagaactttcaggcagatcccac

SEQ ID NO: 3024386 - DNA, 25 bp, Homo sapien
gccacctgggaccaaataagaattc

SEQ ID NO: 3024387 - DNA, 25 bp, Homo sapien
tgttacagcaaagctaccactctgg

SEQ ID NO: 3024388 - DNA, 25 bp, Homo sapien
tgtaataaagtcagacaaaatgcat

SEQ ID NO: 3024389 - DNA, 25 bp, Homo sapien
gtaataaagtcagacaaaatgcata

SEQ ID NO: 3024390 - DNA, 25 bp, Homo sapien
taataaagtcagacaaaatgcatac

SEQ ID NO: 3024391 - DNA, 25 bp, Homo sapien
ttctagtgggatccgtgtccacaca

SEQ ID NO: 3024392 - DNA, 25 bp, Homo sapien
aggtgtgaagtgcttaggcggcagg

SEQ ID NO: 3024393 - DNA, 25 bp, Homo sapien
gtgaagtgcttaggcggcaggagag

SEQ ID NO: 3024394 - DNA, 25 bp, Homo sapien
tagtgggatccgtgtccacacaggg

SEQ ID NO: 3024395 - DNA, 25 bp, Homo sapien
ccatgatcttggtgtggatttggtg

SEQ ID NO: 3024396 - DNA, 25 bp, Homo sapien
tccatgatcttggtgtggatttggt

SEQ ID NO: 3024397 - DNA, 25 bp, Homo sapien
catgatcttggtgtggatttggtgg

SEQ ID NO: 3024398 - DNA, 25 bp, Homo sapien
atgactgcgatccagaggagaactg

SEQ ID NO: 3024399 - DNA, 25 bp, Homo sapien
tctctggatgactgcgatccagagg

SEQ ID NO: 3024400 - DNA, 25 bp, Homo sapien
tggggccgtgagagtgccatggtgg

SEQ ID NO: 3024401 - DNA, 25 bp, Homo sapien
cattagatacatggtggggccgtga

SEQ ID NO: 3024402 - DNA, 25 bp, Homo sapien
gaagacagaaaagggcagggtcatt

SEQ ID NO: 3024403 - DNA, 25 bp, Homo sapien
catggtggggcggattaaggggagg

SEQ ID NO: 3024404 - DNA, 25 bp, Homo sapien
gatttgggccagctgcacacagtag

SEQ ID NO: 3024405 - DNA, 25 bp, Homo sapien
cacactgccaatcatctcctggatt

SEQ ID NO: 3024406 - DNA, 25 bp, Homo sapien
ctggatttgggccagctgcacacag

SEQ ID NO: 3024407 - DNA, 25 bp, Homo sapien
cacagtagcggcctttggtctcctc

SEQ ID NO: 3024408 - DNA, 25 bp, Homo sapien
gaatcaaggattagtgagtgtggcc

SEQ ID NO: 3024409 - DNA, 25 bp, Homo sapien
gtgtggccattctctccctgccagt

SEQ ID NO: 3024410 - DNA, 25 bp, Homo sapien
gaaagggaatcaaggattagtgagt

SEQ ID NO: 3024411 - DNA, 25 bp, Homo sapien
attagtgagtgtggccattctctcc

SEQ ID NO: 3024412 - DNA, 25 bp, Homo sapien
tggtgtgccagagctccgaaatctc

SEQ ID NO: 3024413 - DNA, 25 bp, Homo sapien
ccaggttctgcatggtgtgccagag

SEQ ID NO: 3024414 - DNA, 25 bp, Homo sapien
tggtggccacctcgtggttcagctt

SEQ ID NO: 3024415 - DNA, 25 bp, Homo sapien
tggccacctcgtggttcagcttctc

SEQ ID NO: 3024416 - DNA, 25 bp, Homo sapien
aagaaccgttcctctgcgtccttgt

SEQ ID NO: 3024417 - DNA, 25 bp, Homo sapien
gcgcaggttcaactctgtctcatac

SEQ ID NO: 3024418 - DNA, 25 bp, Homo sapien
cacactcatgcgcaggttcaactct

SEQ ID NO: 3024419 - DNA, 25 bp, Homo sapien
cactcatgcgcaggttcaactctgt

SEQ ID NO: 3024420 - DNA, 25 bp, Homo sapien
catgcgcaggttcaactctgtctca

SEQ ID NO: 3024421 - DNA, 25 bp, Homo sapien
ggggacactggatgttctggcccac

SEQ ID NO: 3024422 - DNA, 25 bp, Homo sapien
tggggacactggatgttctggccca

SEQ ID NO: 3024423 - DNA, 25 bp, Homo sapien
tttggggacactggatgttctggcc

SEQ ID NO: 3024424 - DNA, 25 bp, Homo sapien
ttggggacactggatgttctggccc

SEQ ID NO: 3024425 - DNA, 25 bp, Homo sapien
tctgcggccagacgggcgttgtcaa

SEQ ID NO: 3024426 - DNA, 25 bp, Homo sapien
ttggtgcggaagtcatctgcggcca

SEQ ID NO: 3024427 - DNA, 25 bp, Homo sapien
tgcggaagtcatctgcggccagacg

SEQ ID NO: 3024428 - DNA, 25 bp, Homo sapien
cattggcattgtccactgtggccgt

SEQ ID NO: 3024429 - DNA, 25 bp, Homo sapien
tcccagaaggagctagctggaatgg

SEQ ID NO: 3024430 - DNA, 25 bp, Homo sapien
tagctggaatggcaccttctgctgc

SEQ ID NO: 3024431 - DNA, 25 bp, Homo sapien
gaaggagctagctggaatggcacct

SEQ ID NO: 3024432 - DNA, 25 bp, Homo sapien
ctattgttcccagaaggagctagct

SEQ ID NO: 3024433 - DNA, 25 bp, Homo sapien
gtcttgaagtagggactgtagtctt

SEQ ID NO: 3024434 - DNA, 25 bp, Homo sapien
tcttgaagtagggactgtagtcttt

SEQ ID NO: 3024435 - DNA, 25 bp, Homo sapien
acccaagccaccaccgaagccagca

SEQ ID NO: 3024436 - DNA, 25 bp, Homo sapien
cggccaggacggaggagatgtggct

SEQ ID NO: 3024437 - DNA, 25 bp, Homo sapien
gcggcacgaccctccggccaggacg

SEQ ID NO: 3024438 - DNA, 25 bp, Homo sapien
acaggccacccctgtaggtgctggg

SEQ ID NO: 3024439 - DNA, 25 bp, Homo sapien
agcctgtaggctcccccagaggaga

SEQ ID NO: 3024440 - DNA, 25 bp, Homo sapien
gaggagggaggtgagtgagcgagca

SEQ ID NO: 3024441 - DNA, 25 bp, Homo sapien
ccgaggagggaggtgagtgagcgag

SEQ ID NO: 3024442 - DNA, 25 bp, Homo sapien
tgccgaggagggaggtgagtgagcg

SEQ ID NO: 3024443 - DNA, 25 bp, Homo sapien
ggtgccgaggagggaggtgagtgag

SEQ ID NO: 3024444 - DNA, 25 bp, Homo sapien
tcagtcaggtaggggtgactcgggg

SEQ ID NO: 3024445 - DNA, 25 bp, Homo sapien
cagtcaggtaggggtgactcggggg

SEQ ID NO: 3024446 - DNA, 25 bp, Homo sapien
gagacagctgggaactgcgctggga

SEQ ID NO: 3024447 - DNA, 25 bp, Homo sapien
agctttattagcccatcaccagtag

SEQ ID NO: 3024448 - DNA, 25 bp, Homo sapien
cagctgggaactgcgctgggagagc

SEQ ID NO: 3024449 - DNA, 25 bp, Homo sapien
cccatcaccagtagaggagcaggga

SEQ ID NO: 3024450 - DNA, 25 bp, Homo sapien
gaggccagctggtgggcatgaggct

SEQ ID NO: 3024451 - DNA, 25 bp, Homo sapien
ggaggtgaggccagctggtgggcat

SEQ ID NO: 3024452 - DNA, 25 bp, Homo sapien
catgaggctgtggtagaggcagctc

SEQ ID NO: 3024453 - DNA, 25 bp, Homo sapien
gcatgaggctgtggtagaggcagct

SEQ ID NO: 3024454 - DNA, 25 bp, Homo sapien
aggatgggccaggtctgacggttcg

SEQ ID NO: 3024455 - DNA, 25 bp, Homo sapien
tctgacggttcgaagaggacgaaga

SEQ ID NO: 3024456 - DNA, 25 bp, Homo sapien
tggctgaagctggatgagccctgct

SEQ ID NO: 3024457 - DNA, 25 bp, Homo sapien
ccaggtctgacggttcgaagaggac

SEQ ID NO: 3024458 - DNA, 25 bp, Homo sapien
gggtctgagagctaagccaactcca

SEQ ID NO: 3024459 - DNA, 25 bp, Homo sapien
tgagagctaagccaactccagggca

SEQ ID NO: 3024460 - DNA, 25 bp, Homo sapien
tgccggggagcctcaggagccttac

SEQ ID NO: 3024461 - DNA, 25 bp, Homo sapien
aaggggtctgagagctaagccaact

SEQ ID NO: 3024462 - DNA, 25 bp, Homo sapien
ggattggccagatgcgtgtggggag

SEQ ID NO: 3024463 - DNA, 25 bp, Homo sapien
gattggccagatgcgtgtggggagg

SEQ ID NO: 3024464 - DNA, 25 bp, Homo sapien
tgtcttcatgtccagcaagatctgg

SEQ ID NO: 3024465 - DNA, 25 bp, Homo sapien
gccgtgtcttcatgtccagcaagat

SEQ ID NO: 3024466 - DNA, 25 bp, Homo sapien
gtgtcttcatgtccagcaagatctg

SEQ ID NO: 3024467 - DNA, 25 bp, Homo sapien
cgtgtcttcatgtccagcaagatct

SEQ ID NO: 3024468 - DNA, 25 bp, Homo sapien
tgcctggattttgatcccagttggg

SEQ ID NO: 3024469 - DNA, 25 bp, Homo sapien
ggggctgctgctgtgccgggtcctt

SEQ ID NO: 3024470 - DNA, 25 bp, Homo sapien
tgctgctgtgccgggtccttcatac

SEQ ID NO: 3024471 - DNA, 25 bp, Homo sapien
ggctgctgctgtgccgggtccttca

SEQ ID NO: 3024472 - DNA, 25 bp, Homo sapien
ctgctgctgtgccgggtccttcata

SEQ ID NO: 3024473 - DNA, 25 bp, Homo sapien
actgctggaggccacttttttgttc

SEQ ID NO: 3024474 - DNA, 25 bp, Homo sapien
cctggaacaccctctggagcaacgt

SEQ ID NO: 3024475 - DNA, 25 bp, Homo sapien
ctgctctgtaccagttcactgctgg

SEQ ID NO: 3024476 - DNA, 25 bp, Homo sapien
tctggagcaacgtcacctcactgcg

SEQ ID NO: 3024477 - DNA, 25 bp, Homo sapien
gtggttgtgctttgccatctgctcg

SEQ ID NO: 3024478 - DNA, 25 bp, Homo sapien
gcatctctgtggttgtgctttgcca

SEQ ID NO: 3024479 - DNA, 25 bp, Homo sapien
ctctgtggttgtgctttgccatctg

SEQ ID NO: 3024480 - DNA, 25 bp, Homo sapien
gttgtgctttgccatctgctcgtac

SEQ ID NO: 3024481 - DNA, 25 bp, Homo sapien
tcacttctccaccggtctgacctcg

SEQ ID NO: 3024482 - DNA, 25 bp, Homo sapien
acttctccaccggtctgacctcgca

SEQ ID NO: 3024483 - DNA, 25 bp, Homo sapien
cacttctccaccggtctgacctcgc

SEQ ID NO: 3024484 - DNA, 25 bp, Homo sapien
ttctccaccggtctgacctcgcaga

SEQ ID NO: 3024485 - DNA, 25 bp, Homo sapien
cggcacaggccattgacgccagcct

SEQ ID NO: 3024486 - DNA, 25 bp, Homo sapien
ccggcacaggccattgacgccagcc

SEQ ID NO: 3024487 - DNA, 25 bp, Homo sapien
ggcacaggccattgacgccagcctc

SEQ ID NO: 3024488 - DNA, 25 bp, Homo sapien
gcacaggccattgacgccagcctcc

SEQ ID NO: 3024489 - DNA, 25 bp, Homo sapien
ggtcctgaagtcatcagctgccagc

SEQ ID NO: 3024490 - DNA, 25 bp, Homo sapien
cctgaagtcatcagctgccagcctg

SEQ ID NO: 3024491 - DNA, 25 bp, Homo sapien
ttggtcctgaagtcatcagctgcca

SEQ ID NO: 3024492 - DNA, 25 bp, Homo sapien
tcctgaagtcatcagctgccagcct

SEQ ID NO: 3024493 - DNA, 25 bp, Homo sapien
aaatgggctgcgcattctcaatggt

SEQ ID NO: 3024494 - DNA, 25 bp, Homo sapien
gcaaaatgggctgcgcattctcaat

SEQ ID NO: 3024495 - DNA, 25 bp, Homo sapien
aaaatgggctgcgcattctcaatgg

SEQ ID NO: 3024496 - DNA, 25 bp, Homo sapien
ctgcaaaatgggctgcgcattctca

SEQ ID NO: 3024497 - DNA, 25 bp, Homo sapien
tagggactgcagtctttgatctcac

SEQ ID NO: 3024498 - DNA, 25 bp, Homo sapien
tggtcttgaagtagggactgcagtc

SEQ ID NO: 3024499 - DNA, 25 bp, Homo sapien
cagtctttgatctcactgggccgct

SEQ ID NO: 3024500 - DNA, 25 bp, Homo sapien
ctttgatctcactgggccgctgcct

SEQ ID NO: 3024501 - DNA, 25 bp, Homo sapien
ggccaggcggtcactgaggtgctgc

SEQ ID NO: 3024502 - DNA, 25 bp, Homo sapien
ttcacttccaggtcggcgttggcct

SEQ ID NO: 3024503 - DNA, 25 bp, Homo sapien
gtcacggatcttcacttccaggtcg

SEQ ID NO: 3024504 - DNA, 25 bp, Homo sapien
tccagagcacgcaccttgtccaggt

SEQ ID NO: 3024505 - DNA, 25 bp, Homo sapien
caccgacgccagcaccaaggccacc

SEQ ID NO: 3024506 - DNA, 25 bp, Homo sapien
acccaagccagcacccaagccacca

SEQ ID NO: 3024507 - DNA, 25 bp, Homo sapien
acccaagccaccaccgacgccagca

SEQ ID NO: 3024508 - DNA, 25 bp, Homo sapien
ccacccaagccagcacccaagccac

SEQ ID NO: 3024509 - DNA, 25 bp, Homo sapien
cccccaaagccactagcaaagctgc

SEQ ID NO: 3024510 - DNA, 25 bp, Homo sapien
aagccactagcaaagctgctgctgc

SEQ ID NO: 3024511 - DNA, 25 bp, Homo sapien
gctgctgccgaagccaccgccatag

SEQ ID NO: 3024512 - DNA, 25 bp, Homo sapien
caaagccactagcaaagctgctgct

SEQ ID NO: 3024513 - DNA, 25 bp, Homo sapien
agacacacaggcccccccgtaggtg

SEQ ID NO: 3024514 - DNA, 25 bp, Homo sapien
ctcccccaaaggagaagcgagagaa

SEQ ID NO: 3024515 - DNA, 25 bp, Homo sapien
ggagaagcgagagaaggagacacac

SEQ ID NO: 3024516 - DNA, 25 bp, Homo sapien
agaagcgagagaaggagacacacag

SEQ ID NO: 3024517 - DNA, 25 bp, Homo sapien
tgcaggtgctcatcgtgccaaggag

SEQ ID NO: 3024518 - DNA, 25 bp, Homo sapien
gggaggtgagcgagcgagcagttgg

SEQ ID NO: 3024519 - DNA, 25 bp, Homo sapien
tgcggctggagccgcccctgatgct

SEQ ID NO: 3024520 - DNA, 25 bp, Homo sapien
caggagcccttcatggatctggagg

SEQ ID NO: 3024521 - DNA, 25 bp, Homo sapien
ctgtgtccacagatcccacgctggg

SEQ ID NO: 3024522 - DNA, 25 bp, Homo sapien
tcctgtgtccacagatcccacgctg

SEQ ID NO: 3024523 - DNA, 25 bp, Homo sapien
cctgtgtccacagatcccacgctgg

SEQ ID NO: 3024524 - DNA, 25 bp, Homo sapien
tgtgtccacagatcccacgctgggc

SEQ ID NO: 3024525 - DNA, 25 bp, Homo sapien
gatcactggcatgaggtctgcccag

SEQ ID NO: 3024526 - DNA, 25 bp, Homo sapien
tccccacgatcactggcatgaggtc

SEQ ID NO: 3024527 - DNA, 25 bp, Homo sapien
cacgatcactggcatgaggtctgcc

SEQ ID NO: 3024528 - DNA, 25 bp, Homo sapien
cccacgatcactggcatgaggtctg

SEQ ID NO: 3024529 - DNA, 25 bp, Homo sapien
gctttattgtcatcacgcagggaag

SEQ ID NO: 3024530 - DNA, 25 bp, Homo sapien
gggggccggccaggaaagctgagtg

SEQ ID NO: 3024531 - DNA, 25 bp, Homo sapien
gggcagatgggaccgctgcctccct

SEQ ID NO: 3024532 - DNA, 25 bp, Homo sapien
ttgtcatcacgcagggaagcatggg

SEQ ID NO: 3024533 - DNA, 25 bp, Homo sapien
ctgctcgcgggaggagatgacctta

SEQ ID NO: 3024534 - DNA, 25 bp, Homo sapien
tgctcgcgggaggagatgaccttac

SEQ ID NO: 3024535 - DNA, 25 bp, Homo sapien
tccacaatggtaggcacctgacagg

SEQ ID NO: 3024536 - DNA, 25 bp, Homo sapien
tggacctcttccacaatggtaggca

SEQ ID NO: 3024537 - DNA, 25 bp, Homo sapien
cctcttccacaatggtaggcacctg

SEQ ID NO: 3024538 - DNA, 25 bp, Homo sapien
tcttccacaatggtaggcacctgac

SEQ ID NO: 3024539 - DNA, 25 bp, Homo sapien
aagcaggcaatttaaagtgggtagg

SEQ ID NO: 3024540 - DNA, 25 bp, Homo sapien
ctgcaggagaagcaggcaatttaaa

SEQ ID NO: 3024541 - DNA, 25 bp, Homo sapien
ggagaagcaggcaatttaaagtggg

SEQ ID NO: 3024542 - DNA, 25 bp, Homo sapien
gaagcaggcaatttaaagtgggtag

SEQ ID NO: 3024543 - DNA, 25 bp, Homo sapien
atgttctttcttgtactgagtcagg

SEQ ID NO: 3024544 - DNA, 25 bp, Homo sapien
cttatgttctttcttgtactgagtc

SEQ ID NO: 3024545 - DNA, 25 bp, Homo sapien
aagatgcttatgttctttcttgtac

SEQ ID NO: 3024546 - DNA, 25 bp, Homo sapien
caagatgcttatgttctttcttgta

SEQ ID NO: 3024547 - DNA, 25 bp, Homo sapien
tcatgtccaggaggatcttgtactc

SEQ ID NO: 3024548 - DNA, 25 bp, Homo sapien
ctgctgctccatctcgcagagaagc

SEQ ID NO: 3024549 - DNA, 25 bp, Homo sapien
ctccagccgcatcttcatgtccagg

SEQ ID NO: 3024550 - DNA, 25 bp, Homo sapien
tgctccatctcgcagagaagctggg

SEQ ID NO: 3024551 - DNA, 25 bp, Homo sapien
ctctgtctccgccaggttgccctcc

SEQ ID NO: 3024552 - DNA, 25 bp, Homo sapien
tctgtctccgccaggttgccctcca

SEQ ID NO: 3024553 - DNA, 25 bp, Homo sapien
tggtagccacctcgcggttcagctc

SEQ ID NO: 3024554 - DNA, 25 bp, Homo sapien
tggtgcaccggagctccgaaatctc

SEQ ID NO: 3024555 - DNA, 25 bp, Homo sapien
gaaatctcgctcttgccgctctgga

SEQ ID NO: 3024556 - DNA, 25 bp, Homo sapien
gctctggaccagctcactgttggta

SEQ ID NO: 3024557 - DNA, 25 bp, Homo sapien
catctcattcaggatgcggctcagg

SEQ ID NO: 3024558 - DNA, 25 bp, Homo sapien
ctcggcatccttgcggttcttctct

SEQ ID NO: 3024559 - DNA, 25 bp, Homo sapien
gctgaagaaccaatcctcggcatcc

SEQ ID NO: 3024560 - DNA, 25 bp, Homo sapien
tctcatactgctcacgcatctcatt

SEQ ID NO: 3024561 - DNA, 25 bp, Homo sapien
tccttgaggttctcaatgtgcatct

SEQ ID NO: 3024562 - DNA, 25 bp, Homo sapien
tcatccagcaccctgcacgggccat

SEQ ID NO: 3024563 - DNA, 25 bp, Homo sapien
gttctcaatgtgcatctccaggtcg

SEQ ID NO: 3024564 - DNA, 25 bp, Homo sapien
cacgggccattgatgtcggcctcca

SEQ ID NO: 3024565 - DNA, 25 bp, Homo sapien
tgcttggaattgcaggtccaggtcc

SEQ ID NO: 3024566 - DNA, 25 bp, Homo sapien
aggctgcttggaattgcaggtccag

SEQ ID NO: 3024567 - DNA, 25 bp, Homo sapien
caggctgcttggaattgcaggtcca

SEQ ID NO: 3024568 - DNA, 25 bp, Homo sapien
gcattgtcaatatgtagcaggatgt

SEQ ID NO: 3024569 - DNA, 25 bp, Homo sapien
caggatgttggcattgtccacggtg

SEQ ID NO: 3024570 - DNA, 25 bp, Homo sapien
ttggtgcggaagtcagcagcagcca

SEQ ID NO: 3024571 - DNA, 25 bp, Homo sapien
ggtgcggaagtcagcagcagccaga

SEQ ID NO: 3024572 - DNA, 25 bp, Homo sapien
tcctgtagtactggctgtagtcacg

SEQ ID NO: 3024573 - DNA, 25 bp, Homo sapien
tgaactggcggatggaggtggtcat

SEQ ID NO: 3024574 - DNA, 25 bp, Homo sapien
gaggtgaactggcggatggaggtgg

SEQ ID NO: 3024575 - DNA, 25 bp, Homo sapien
ggtgaactggcggatggaggtggtc

SEQ ID NO: 3024576 - DNA, 25 bp, Homo sapien
aggaggtgaactggcggatggaggt

SEQ ID NO: 3024577 - DNA, 25 bp, Homo sapien
gcaggaggcaggcacacaggagaag

SEQ ID NO: 3024578 - DNA, 25 bp, Homo sapien
aggaggcaggcacacaggagaaggg

SEQ ID NO: 3024579 - DNA, 25 bp, Homo sapien
caggaggcaggcacacaggagaagg

SEQ ID NO: 3024580 - DNA, 25 bp, Homo sapien
ggtggcggcggcaggaggcaggcac

SEQ ID NO: 3024581 - DNA, 25 bp, Homo sapien
gaacttggagcaaagctttaatagc

SEQ ID NO: 3024582 - DNA, 25 bp, Homo sapien
gctttaatagcaggcactggacaaa

SEQ ID NO: 3024583 - DNA, 25 bp, Homo sapien
ttaatagcaggcactggacaaaccc

SEQ ID NO: 3024584 - DNA, 25 bp, Homo sapien
aagctttaatagcaggcactggaca

SEQ ID NO: 3024585 - DNA, 25 bp, Homo sapien
gctgatggctgtgccgtgaccctcg

SEQ ID NO: 3024586 - DNA, 25 bp, Homo sapien
agacaacaggtcatggaccagtgcc

SEQ ID NO: 3024587 - DNA, 25 bp, Homo sapien
tcatggaccagtgcccagacggaca

SEQ ID NO: 3024588 - DNA, 25 bp, Homo sapien
atggctgtgccgtgaccctcgaggt

SEQ ID NO: 3024589 - DNA, 25 bp, Homo sapien
cacacctggtggctggtcaccgtgg

SEQ ID NO: 3024590 - DNA, 25 bp, Homo sapien
tctccaacctggacttcctccacga

SEQ ID NO: 3024591 - DNA, 25 bp, Homo sapien
ttcctccacgatggcacacctggtg

SEQ ID NO: 3024592 - DNA, 25 bp, Homo sapien
aacctggacttcctccacgatggca

SEQ ID NO: 3024593 - DNA, 25 bp, Homo sapien
ggtgggctgcgaggccagggacaag

SEQ ID NO: 3024594 - DNA, 25 bp, Homo sapien
ggagcacccatcgacccagggatgc

SEQ ID NO: 3024595 - DNA, 25 bp, Homo sapien
gaggagcacccatcgacccagggat

SEQ ID NO: 3024596 - DNA, 25 bp, Homo sapien
cagggagaggagcacccatcgaccc

SEQ ID NO: 3024597 - DNA, 25 bp, Homo sapien
gagaggagcacccatcgacccaggg

SEQ ID NO: 3024598 - DNA, 25 bp, Homo sapien
ggtcctggtgctctgcatcacagca

SEQ ID NO: 3024599 - DNA, 25 bp, Homo sapien
gtcctggtgctctgcatcacagcag

SEQ ID NO: 3024600 - DNA, 25 bp, Homo sapien
ggccaagagataggtggtgcgatga

SEQ ID NO: 3024601 - DNA, 25 bp, Homo sapien
gagataggtggtgcgatgagatgga

SEQ ID NO: 3024602 - DNA, 25 bp, Homo sapien
tgtgggccaagagataggtggtgcg

SEQ ID NO: 3024603 - DNA, 25 bp, Homo sapien
caagagataggtggtgcgatgagat

SEQ ID NO: 3024604 - DNA, 25 bp, Homo sapien
gcctctgtgttggtggccacctcgc

SEQ ID NO: 3024605 - DNA, 25 bp, Homo sapien
gcacagagatgtagagctccatatc

SEQ ID NO: 3024606 - DNA, 25 bp, Homo sapien
gttggtggccacctcgcagttcagc

SEQ ID NO: 3024607 - DNA, 25 bp, Homo sapien
agctgggacggctcaggttctgcac

SEQ ID NO: 3024608 - DNA, 25 bp, Homo sapien
gcagctcttctccaccagtttcttg

SEQ ID NO: 3024609 - DNA, 25 bp, Homo sapien
cacgcatctcattcaggatgcagct

SEQ ID NO: 3024610 - DNA, 25 bp, Homo sapien
agtttcttgtcctggtcacgcatct

SEQ ID NO: 3024611 - DNA, 25 bp, Homo sapien
acgctgaagaaccagccctgggcat

SEQ ID NO: 3024612 - DNA, 25 bp, Homo sapien
cctgacctcgcccctaccaccgcct

SEQ ID NO: 3024613 - DNA, 25 bp, Homo sapien
tgacctcgcccctaccaccgccttg

SEQ ID NO: 3024614 - DNA, 25 bp, Homo sapien
tgccctgacctcgcccctaccaccg

SEQ ID NO: 3024615 - DNA, 25 bp, Homo sapien
gccctgacctcgcccctaccaccgc

SEQ ID NO: 3024616 - DNA, 25 bp, Homo sapien
tcttcttcaggtagaccaggtcctc

SEQ ID NO: 3024617 - DNA, 25 bp, Homo sapien
aggtagaccaggtcctccttgaggt

SEQ ID NO: 3024618 - DNA, 25 bp, Homo sapien
cttcaggtagaccaggtcctccttg

SEQ ID NO: 3024619 - DNA, 25 bp, Homo sapien
tcaggtagaccaggtcctccttgag

SEQ ID NO: 3024620 - DNA, 25 bp, Homo sapien
ggcagggtcagcttgtccagcccct

SEQ ID NO: 3024621 - DNA, 25 bp, Homo sapien
gctccaggcagggtcagcttgtcca

SEQ ID NO: 3024622 - DNA, 25 bp, Homo sapien
ttggctccaggcagggtcagcttgt

SEQ ID NO: 3024623 - DNA, 25 bp, Homo sapien
caggcagggtcagcttgtccagccc

SEQ ID NO: 3024624 - DNA, 25 bp, Homo sapien
tgcagaagtcatcagcagccaggtg

SEQ ID NO: 3024625 - DNA, 25 bp, Homo sapien
ttggtgcagaagtcatcagcagcca

SEQ ID NO: 3024626 - DNA, 25 bp, Homo sapien
tcatcagcagccaggtgggcatcat

SEQ ID NO: 3024627 - DNA, 25 bp, Homo sapien
gtcatcagcagccaggtgggcatca

SEQ ID NO: 3024628 - DNA, 25 bp, Homo sapien
tttctgtgtctcttttccgggccat

SEQ ID NO: 3024629 - DNA, 25 bp, Homo sapien
ctttctgtgtctcttttccgggcca

SEQ ID NO: 3024630 - DNA, 25 bp, Homo sapien
catgctcagtcaccccgggcagtgt

SEQ ID NO: 3024631 - DNA, 25 bp, Homo sapien
caggggcatgctcagtcaccccggg

SEQ ID NO: 3024632 - DNA, 25 bp, Homo sapien
ggcagtgtccccgctgtggccctgt

SEQ ID NO: 3024633 - DNA, 25 bp, Homo sapien
gggcatgctcagtcaccccgggcag

SEQ ID NO: 3024634 - DNA, 25 bp, Homo sapien
gatggcttggccatcatctgggtga

SEQ ID NO: 3024635 - DNA, 25 bp, Homo sapien
catcgtccctgttgggcaaggagca

SEQ ID NO: 3024636 - DNA, 25 bp, Homo sapien
cgtcaataccttggtgaaggaggtc

SEQ ID NO: 3024637 - DNA, 25 bp, Homo sapien
tgacggctccatcatcgtccctgtt

SEQ ID NO: 3024638 - DNA, 25 bp, Homo sapien
caggtggatcggcaagaacgtcaat

SEQ ID NO: 3024639 - DNA, 25 bp, Homo sapien
tagctcagtgctaaagggccggagc

SEQ ID NO: 3024640 - DNA, 25 bp, Homo sapien
cactgagtgctcatattggatgaca

SEQ ID NO: 3024641 - DNA, 25 bp, Homo sapien
tgagtgccaggtaaagccatccgtg

SEQ ID NO: 3024642 - DNA, 25 bp, Homo sapien
gccggagcagatgctgagttcactg

SEQ ID NO: 3024643 - DNA, 25 bp, Homo sapien
gaaggaaatacctgctcccggccat

SEQ ID NO: 3024644 - DNA, 25 bp, Homo sapien
gcacagaaggaaatacctgctcccg

SEQ ID NO: 3024645 - DNA, 25 bp, Homo sapien
gtcttcctgagcccgcagagggcac

SEQ ID NO: 3024646 - DNA, 25 bp, Homo sapien
tcctgagcccgcagagggcacagaa

SEQ ID NO: 3024647 - DNA, 25 bp, Homo sapien
gaagccatcggtgtcagaccagagt

SEQ ID NO: 3024648 - DNA, 25 bp, Homo sapien
tggtaacgggcagtggatgagccag

SEQ ID NO: 3024649 - DNA, 25 bp, Homo sapien
tctctggactcgtggtctgcaagga

SEQ ID NO: 3024650 - DNA, 25 bp, Homo sapien
gaaataacaatctcgaatccagggc

SEQ ID NO: 3024651 - DNA, 25 bp, Homo sapien
gggcatgtcaaggaggtaggtgggc

SEQ ID NO: 3024652 - DNA, 25 bp, Homo sapien
aagtgataggggctcgggcatgtca

SEQ ID NO: 3024653 - DNA, 25 bp, Homo sapien
gggctcgggcatgtcaaggaggtag

SEQ ID NO: 3024654 - DNA, 25 bp, Homo sapien
gctcgggcatgtcaaggaggtaggt

SEQ ID NO: 3024655 - DNA, 25 bp, Homo sapien
tgactttggtccagagcaagtggtc

SEQ ID NO: 3024656 - DNA, 25 bp, Homo sapien
tttggtccagagcaagtggtccagg

SEQ ID NO: 3024657 - DNA, 25 bp, Homo sapien
cctgactttggtccagagcaagtgg

SEQ ID NO: 3024658 - DNA, 25 bp, Homo sapien
cacctgactttggtccagagcaagt

SEQ ID NO: 3024659 - DNA, 25 bp, Homo sapien
gagacattcggtgcaatactgaaca

SEQ ID NO: 3024660 - DNA, 25 bp, Homo sapien
agaactacaccttctggctgttggg

SEQ ID NO: 3024661 - DNA, 25 bp, Homo sapien
ccaggacaggcgcaggataactttg

SEQ ID NO: 3024662 - DNA, 25 bp, Homo sapien
gagtcagcactgtatactggtttcc

SEQ ID NO: 3024663 - DNA, 25 bp, Homo sapien
cccgtctctgagagagttgctcctg

SEQ ID NO: 3024664 - DNA, 25 bp, Homo sapien
cggtgttgtcctccaggacccgtct

SEQ ID NO: 3024665 - DNA, 25 bp, Homo sapien
ccaggacccgtctctgagagagttg

SEQ ID NO: 3024666 - DNA, 25 bp, Homo sapien
tgaggacggtgttgtcctccaggac

SEQ ID NO: 3024667 - DNA, 25 bp, Homo sapien
gccacggcacactgaggcttggaaa

SEQ ID NO: 3024668 - DNA, 25 bp, Homo sapien
gacagcaaaagccacggcacactga

SEQ ID NO: 3024669 - DNA, 25 bp, Homo sapien
gtagtaggcttggagttgctgcatt

SEQ ID NO: 3024670 - DNA, 25 bp, Homo sapien
gcttggagttgctgcattgtgagca

SEQ ID NO: 3024671 - DNA, 25 bp, Homo sapien
cgctagaaacctaaagggggtgatg

SEQ ID NO: 3024672 - DNA, 25 bp, Homo sapien
gctcactctcatgcagggttgattc

SEQ ID NO: 3024673 - DNA, 25 bp, Homo sapien
ggttgattctgcagtcgggttccag

SEQ ID NO: 3024674 - DNA, 25 bp, Homo sapien
ttctgcagtcgggttccagaacccc

SEQ ID NO: 3024675 - DNA, 25 bp, Homo sapien
gatcatggtcatccagtgtgatgcc

SEQ ID NO: 3024676 - DNA, 25 bp, Homo sapien
ccagtgcctgatcatggtcatccag

SEQ ID NO: 3024677 - DNA, 25 bp, Homo sapien
gcctgatcatggtcatccagtgtga

SEQ ID NO: 3024678 - DNA, 25 bp, Homo sapien
tcatggtcatccagtgtgatgccac

SEQ ID NO: 3024679 - DNA, 25 bp, Homo sapien
cactgagctgaatgacccttcctct

SEQ ID NO: 3024680 - DNA, 25 bp, Homo sapien
tgagctgaatgacccttcctctgca

SEQ ID NO: 3024681 - DNA, 25 bp, Homo sapien
ttcaggatggccttggatggtagaa

SEQ ID NO: 3024682 - DNA, 25 bp, Homo sapien
ggatggtagaatcaggacaatggct

SEQ ID NO: 3024683 - DNA, 25 bp, Homo sapien
ccaaaaataccagcgatgccctggg

SEQ ID NO: 3024684 - DNA, 25 bp, Homo sapien
gaagccaaaaataccagcgatgccc

SEQ ID NO: 3024685 - DNA, 25 bp, Homo sapien
agccaaaaataccagcgatgccctg

SEQ ID NO: 3024686 - DNA, 25 bp, Homo sapien
agaagccaaaaataccagcgatgcc

SEQ ID NO: 3024687 - DNA, 25 bp, Homo sapien
cagtatcaccatcccgtaatgactg

SEQ ID NO: 3024688 - DNA, 25 bp, Homo sapien
ctctaatgtactttccagtaagaat

SEQ ID NO: 3024689 - DNA, 25 bp, Homo sapien
ctaagagtctactctgagctcctgg

SEQ ID NO: 3024690 - DNA, 25 bp, Homo sapien
gctcctggttttgtgttacgatggg

SEQ ID NO: 3024691 - DNA, 25 bp, Homo sapien
tctccatctctaatgtactttccag

SEQ ID NO: 3024692 - DNA, 25 bp, Homo sapien
gtttgaaactacaatattagagcag

SEQ ID NO: 3024693 - DNA, 25 bp, Homo sapien
tattgtagtattagagtcagcagct

SEQ ID NO: 3024694 - DNA, 25 bp, Homo sapien
gctggaatccgtaacccttagcaag

SEQ ID NO: 3024695 - DNA, 25 bp, Homo sapien
ccttagcaagttgtgatgggacgag

SEQ ID NO: 3024696 - DNA, 25 bp, Homo sapien
ctttggcttttacgttcctctcact

SEQ ID NO: 3024697 - DNA, 25 bp, Homo sapien
ttctttggcttttacgttcctctca

SEQ ID NO: 3024698 - DNA, 25 bp, Homo sapien
tctttggcttttacgttcctctcac

SEQ ID NO: 3024699 - DNA, 25 bp, Homo sapien
ctccttttattgacacaagcagtca

SEQ ID NO: 3024700 - DNA, 25 bp, Homo sapien
acacaagcagtcaaagagagggtgg

SEQ ID NO: 3024701 - DNA, 25 bp, Homo sapien
aggagggaaaacagcagccagggca

SEQ ID NO: 3024702 - DNA, 25 bp, Homo sapien
acaagcagtcaaagagagggtggca

SEQ ID NO: 3024703 - DNA, 25 bp, Homo sapien
aagtctgtgtccaggtaggggcttc

SEQ ID NO: 3024704 - DNA, 25 bp, Homo sapien
aagtaatgccatgtaggctgccatg

SEQ ID NO: 3024705 - DNA, 25 bp, Homo sapien
gtaatgccatgtaggctgccatgat

SEQ ID NO: 3024706 - DNA, 25 bp, Homo sapien
catgatggcgataggtagagccggc

SEQ ID NO: 3024707 - DNA, 25 bp, Homo sapien
ccatgccacgttcttctactgaggg

SEQ ID NO: 3024708 - DNA, 25 bp, Homo sapien
gaatccttacagcatcagggctcac

SEQ ID NO: 3024709 - DNA, 25 bp, Homo sapien
gaccaagccccgctgaatgggattt

SEQ ID NO: 3024710 - DNA, 25 bp, Homo sapien
tcctctgtcataagcctgggcaggg

SEQ ID NO: 3024711 - DNA, 25 bp, Homo sapien
cctccgccatggagacaaccctgtc

SEQ ID NO: 3024712 - DNA, 25 bp, Homo sapien
gcctccgccatggagacaaccctgt

SEQ ID NO: 3024713 - DNA, 25 bp, Homo sapien
atggagacaaccctgtcaggccagg

SEQ ID NO: 3024714 - DNA, 25 bp, Homo sapien
gccatggagacaaccctgtcaggcc

SEQ ID NO: 3024715 - DNA, 25 bp, Homo sapien
ggctgatggcatgagcccctggagc

SEQ ID NO: 3024716 - DNA, 25 bp, Homo sapien
cacagaggggcctaatgccaggaga

SEQ ID NO: 3024717 - DNA, 25 bp, Homo sapien
agggccaatctgtccccctcacaga

SEQ ID NO: 3024718 - DNA, 25 bp, Homo sapien
atgccaggagacaccctcgaggacc

SEQ ID NO: 3024719 - DNA, 25 bp, Homo sapien
ttttttgtgagttccttcatagagg

SEQ ID NO: 3024720 - DNA, 25 bp, Homo sapien
ctgaaactcccagacggtgctccag

SEQ ID NO: 3024721 - DNA, 25 bp, Homo sapien
tgagagagtcgctcctgaaactccc

SEQ ID NO: 3024722 - DNA, 25 bp, Homo sapien
ttgaaggttcctgaggaccgagttg

SEQ ID NO: 3024723 - DNA, 25 bp, Homo sapien
cctgctcgccctccaagataagcac

SEQ ID NO: 3024724 - DNA, 25 bp, Homo sapien
tgctcgccctccaagataagcacat

SEQ ID NO: 3024725 - DNA, 25 bp, Homo sapien
gctcgccctccaagataagcacatc

SEQ ID NO: 3024726 - DNA, 25 bp, Homo sapien
ctgctcgccctccaagataagcaca

SEQ ID NO: 3024727 - DNA, 25 bp, Homo sapien
gcctgagcaggacccattggggttt

SEQ ID NO: 3024728 - DNA, 25 bp, Homo sapien
gcggtcagacaaggtcctgcagctc

SEQ ID NO: 3024729 - DNA, 25 bp, Homo sapien
ctctggagtgctgaggacccctttc

SEQ ID NO: 3024730 - DNA, 25 bp, Homo sapien
aggctgcggtcagacaaggtcctgc

SEQ ID NO: 3024731 - DNA, 25 bp, Homo sapien
tcgtcagcatggaaccctcaatgca

SEQ ID NO: 3024732 - DNA, 25 bp, Homo sapien
cctcgtcagcatggaaccctcaatg

SEQ ID NO: 3024733 - DNA, 25 bp, Homo sapien
gagcctcgtcagcatggaaccctca

SEQ ID NO: 3024734 - DNA, 25 bp, Homo sapien
gcctcgtcagcatggaaccctcaat

SEQ ID NO: 3024735 - DNA, 25 bp, Homo sapien
gatctttgggaaggacttgtgcagc

SEQ ID NO: 3024736 - DNA, 25 bp, Homo sapien
ctttgggaaggacttgtgcagcacc

SEQ ID NO: 3024737 - DNA, 25 bp, Homo sapien
tctttgggaaggacttgtgcagcac

SEQ ID NO: 3024738 - DNA, 25 bp, Homo sapien
tttgggaaggacttgtgcagcacct

SEQ ID NO: 3024739 - DNA, 25 bp, Homo sapien
aaaggaggacggcagtgttgcggct

SEQ ID NO: 3024740 - DNA, 25 bp, Homo sapien
aaggaggacggcagtgttgcggctc

SEQ ID NO: 3024741 - DNA, 25 bp, Homo sapien
gataaaggaggacggcagtgttgcg

SEQ ID NO: 3024742 - DNA, 25 bp, Homo sapien
gcagataaaggaggacggcagtgtt

SEQ ID NO: 3024743 - DNA, 25 bp, Homo sapien
tgactttgtcaatgtctagcagaag

SEQ ID NO: 3024744 - DNA, 25 bp, Homo sapien
tcaatgtctagcagaagtgcccacg

SEQ ID NO: 3024745 - DNA, 25 bp, Homo sapien
tttgtcaatgtctagcagaagtgcc

SEQ ID NO: 3024746 - DNA, 25 bp, Homo sapien
gtctagcagaagtgcccacgcctgg

SEQ ID NO: 3024747 - DNA, 25 bp, Homo sapien
gagctaccaggcccaaccgccatgt

SEQ ID NO: 3024748 - DNA, 25 bp, Homo sapien
taccaggcccaaccgccatgtcacc

SEQ ID NO: 3024749 - DNA, 25 bp, Homo sapien
aggcccaaccgccatgtcaccttct

SEQ ID NO: 3024750 - DNA, 25 bp, Homo sapien
ggcccaaccgccatgtcaccttctt

SEQ ID NO: 3024751 - DNA, 25 bp, Homo sapien
gagctgccaggcctccggcagcggc

SEQ ID NO: 3024752 - DNA, 25 bp, Homo sapien
ggagctgccaggcctccggcagcgg

SEQ ID NO: 3024753 - DNA, 25 bp, Homo sapien
agggcactgacacgggcagctctgt

SEQ ID NO: 3024754 - DNA, 25 bp, Homo sapien
caaccactcctgattccctgtccct

SEQ ID NO: 3024755 - DNA, 25 bp, Homo sapien
ctgtccctggaccagtctcccacgc

SEQ ID NO: 3024756 - DNA, 25 bp, Homo sapien
ctggaccagtctcccacgcagcagg

SEQ ID NO: 3024757 - DNA, 25 bp, Homo sapien
aatttccagatgtcaacacgctcat

SEQ ID NO: 3024758 - DNA, 25 bp, Homo sapien
ccagatgtcaacacgctcatgctct

SEQ ID NO: 3024759 - DNA, 25 bp, Homo sapien
cacacaacccagagacgactggtga

SEQ ID NO: 3024760 - DNA, 25 bp, Homo sapien
cagagacgactggtgaatttccaga

SEQ ID NO: 3024761 - DNA, 25 bp, Homo sapien
gggcaggatatccgggtgctcatcc

SEQ ID NO: 3024762 - DNA, 25 bp, Homo sapien
tgggtgggcaggatatccgggtgct

SEQ ID NO: 3024763 - DNA, 25 bp, Homo sapien
tgggcaggatatccgggtgctcatc

SEQ ID NO: 3024764 - DNA, 25 bp, Homo sapien
ggtgggcaggatatccgggtgctca

SEQ ID NO: 3024765 - DNA, 25 bp, Homo sapien
gggtcaggaaccagacgtctctata

SEQ ID NO: 3024766 - DNA, 25 bp, Homo sapien
ctgctgagggtaaagggcccacgat

SEQ ID NO: 3024767 - DNA, 25 bp, Homo sapien
ctgggatccttctaggaccatgaag

SEQ ID NO: 3024768 - DNA, 25 bp, Homo sapien
tctctataggatcagcctcctggga

SEQ ID NO: 3024769 - DNA, 25 bp, Homo sapien
cctttgaccaagagggacgatcatc

SEQ ID NO: 3024770 - DNA, 25 bp, Homo sapien
tgttctcaatgacgaggaccccgct

SEQ ID NO: 3024771 - DNA, 25 bp, Homo sapien
tctgtcctcgtggagaccctgtgct

SEQ ID NO: 3024772 - DNA, 25 bp, Homo sapien
gctggaaccccggatggatttggaa

SEQ ID NO: 3024773 - DNA, 25 bp, Homo sapien
aactgtgcctctcacttaagaaagc

SEQ ID NO: 3024774 - DNA, 25 bp, Homo sapien
ggtagcgactgtcccaggtcagcag

SEQ ID NO: 3024775 - DNA, 25 bp, Homo sapien
ctgagcagaaccagacatcgctgtt

SEQ ID NO: 3024776 - DNA, 25 bp, Homo sapien
tgagtctgctgatccaactgtgcct

SEQ ID NO: 3024777 - DNA, 25 bp, Homo sapien
gtgatgtgactcatccccactacag

SEQ ID NO: 3024778 - DNA, 25 bp, Homo sapien
tgatgtgactcatccccactacaga

SEQ ID NO: 3024779 - DNA, 25 bp, Homo sapien
acagatggcggcaagcaagctccaa

SEQ ID NO: 3024780 - DNA, 25 bp, Homo sapien
atccccactacagatggcggcaagc

SEQ ID NO: 3024781 - DNA, 25 bp, Homo sapien
gcaagcgtctgcgccagttctggga

SEQ ID NO: 3024782 - DNA, 25 bp, Homo sapien
cagcaagcgtctgcgccagttctgg

SEQ ID NO: 3024783 - DNA, 25 bp, Homo sapien
caagcgtctgcgccagttctgggat

SEQ ID NO: 3024784 - DNA, 25 bp, Homo sapien
ccagcaagcgtctgcgccagttctg

SEQ ID NO: 3024785 - DNA, 25 bp, Homo sapien
catggcggtgaggaaacaatgccac

SEQ ID NO: 3024786 - DNA, 25 bp, Homo sapien
gggcagacactttttagatgccaac

SEQ ID NO: 3024787 - DNA, 25 bp, Homo sapien
tgaggcatggcggtgaggaaacaat

SEQ ID NO: 3024788 - DNA, 25 bp, Homo sapien
ggcatggcggtgaggaaacaatgcc

SEQ ID NO: 3024789 - DNA, 25 bp, Homo sapien
gggcagctgccaaaggttttattct

SEQ ID NO: 3024790 - DNA, 25 bp, Homo sapien
cacgaggactttattgcacgtgtgg

SEQ ID NO: 3024791 - DNA, 25 bp, Homo sapien
ggtgatgacgacctacagctgcact

SEQ ID NO: 3024792 - DNA, 25 bp, Homo sapien
aactgggactcagagtgccccgacc

SEQ ID NO: 3024793 - DNA, 25 bp, Homo sapien
acacacaatgccaaggccactgtct

SEQ ID NO: 3024794 - DNA, 25 bp, Homo sapien
gccaaggccactgtctgggatgtgt

SEQ ID NO: 3024795 - DNA, 25 bp, Homo sapien
tgtggtcctggtgtggcacccccac

SEQ ID NO: 3024796 - DNA, 25 bp, Homo sapien
tgggcaaggctgcaggactgtggtc

SEQ ID NO: 3024797 - DNA, 25 bp, Homo sapien
tccagcacaagtggggtcgggggtc

SEQ ID NO: 3024798 - DNA, 25 bp, Homo sapien
ggtcgggggtcccaggcgtgactgc

SEQ ID NO: 3024799 - DNA, 25 bp, Homo sapien
cgtgactgcgctctcctgcgtgggc

SEQ ID NO: 3024800 - DNA, 25 bp, Homo sapien
cgtgggcgccctgcactcagggaag

SEQ ID NO: 3024801 - DNA, 25 bp, Homo sapien
tcacagggctgccggcttccatcgc

SEQ ID NO: 3024802 - DNA, 25 bp, Homo sapien
agggctgccggcttccatcgcgtga

SEQ ID NO: 3024803 - DNA, 25 bp, Homo sapien
gctcacagggctgccggcttccatc

SEQ ID NO: 3024804 - DNA, 25 bp, Homo sapien
acagggctgccggcttccatcgcgt

SEQ ID NO: 3024805 - DNA, 25 bp, Homo sapien
ctgggaagacttggccggactttga

SEQ ID NO: 3024806 - DNA, 25 bp, Homo sapien
tgggaagacttggccggactttgac

SEQ ID NO: 3024807 - DNA, 25 bp, Homo sapien
cctgggaagacttggccggactttg

SEQ ID NO: 3024808 - DNA, 25 bp, Homo sapien
agcagaggacggcacacaggcagag

SEQ ID NO: 3024809 - DNA, 25 bp, Homo sapien
ggaagcaggccaccgccaccaggaa

SEQ ID NO: 3024810 - DNA, 25 bp, Homo sapien
ggcaggagcagggatcccccctctt

SEQ ID NO: 3024811 - DNA, 25 bp, Homo sapien
aggcagagccccagcgtgctgtaga

SEQ ID NO: 3024812 - DNA, 25 bp, Homo sapien
ctgatctgcactcagcttcagcccc

SEQ ID NO: 3024813 - DNA, 25 bp, Homo sapien
gcactcagcttcagccccgggagag

SEQ ID NO: 3024814 - DNA, 25 bp, Homo sapien
tctgcactcagcttcagccccggga

SEQ ID NO: 3024815 - DNA, 25 bp, Homo sapien
tgatctgcactcagcttcagccccg

SEQ ID NO: 3024816 - DNA, 25 bp, Homo sapien
tgcaggtttgccttgggtggcttac

SEQ ID NO: 3024817 - DNA, 25 bp, Homo sapien
atgcaggtttgccttgggtggctta

SEQ ID NO: 3024818 - DNA, 25 bp, Homo sapien
cgtgacaccatgcaggtttgccttg

SEQ ID NO: 3024819 - DNA, 25 bp, Homo sapien
cctgcgtgacaccatgcaggtttgc

SEQ ID NO: 3024820 - DNA, 25 bp, Homo sapien
tctggtggaaggttcactgggctcc

SEQ ID NO: 3024821 - DNA, 25 bp, Homo sapien
gccttgctccttgcggcagctgagt

SEQ ID NO: 3024822 - DNA, 25 bp, Homo sapien
tggtaccttcccgagttgtctgaat

SEQ ID NO: 3024823 - DNA, 25 bp, Homo sapien
tcaggagatggtcatagaacttgcc

SEQ ID NO: 3024824 - DNA, 25 bp, Homo sapien
ccagcagaggatcccagtactgctc

SEQ ID NO: 3024825 - DNA, 25 bp, Homo sapien
agccacccccgtccacaggccctgt

SEQ ID NO: 3024826 - DNA, 25 bp, Homo sapien
cacccccgtccacaggccctgtgga

SEQ ID NO: 3024827 - DNA, 25 bp, Homo sapien
gccacccccgtccacaggccctgtg

SEQ ID NO: 3024828 - DNA, 25 bp, Homo sapien
ccacccccgtccacaggccctgtgg

SEQ ID NO: 3024829 - DNA, 25 bp, Homo sapien
attccagcgtgcagagatagggtgt

SEQ ID NO: 3024830 - DNA, 25 bp, Homo sapien
gagaggattccagcgtgcagagata

SEQ ID NO: 3024831 - DNA, 25 bp, Homo sapien
tgtgtgccccgataaggctgcagcc

SEQ ID NO: 3024832 - DNA, 25 bp, Homo sapien
cagagatagggtgtgtgccccgata

SEQ ID NO: 3024833 - DNA, 25 bp, Homo sapien
agcgctcctcctggtccacacggct

SEQ ID NO: 3024834 - DNA, 25 bp, Homo sapien
tggtccacacggctccggccacctc

SEQ ID NO: 3024835 - DNA, 25 bp, Homo sapien
gctccggccacctcgcctgctccgg

SEQ ID NO: 3024836 - DNA, 25 bp, Homo sapien
cctcctggtccacacggctccggcc

SEQ ID NO: 3024837 - DNA, 25 bp, Homo sapien
tataatgaagactcagggaccctcc

SEQ ID NO: 3024838 - DNA, 25 bp, Homo sapien
ttctggctgagaccctgaaggcaat

SEQ ID NO: 3024839 - DNA, 25 bp, Homo sapien
ccatttagtatagcctgccggacag

SEQ ID NO: 3024840 - DNA, 25 bp, Homo sapien
tcttagacatgcagcgaaagccctc

SEQ ID NO: 3024841 - DNA, 25 bp, Homo sapien
aataaacggacaagaaggccagacg

SEQ ID NO: 3024842 - DNA, 25 bp, Homo sapien
tcggagcctggcaaagtattcagct

SEQ ID NO: 3024843 - DNA, 25 bp, Homo sapien
tgagccttcaggacttcaggtccag

SEQ ID NO: 3024844 - DNA, 25 bp, Homo sapien
caaagtgcctgactggtcctcggag

SEQ ID NO: 3024845 - DNA, 25 bp, Homo sapien
ctcgctggtgggctatctgcttccc

SEQ ID NO: 3024846 - DNA, 25 bp, Homo sapien
tgctcgctggtgggctatctgcttc

SEQ ID NO: 3024847 - DNA, 25 bp, Homo sapien
gctcgctggtgggctatctgcttcc

SEQ ID NO: 3024848 - DNA, 25 bp, Homo sapien
tggggcttggttttgagctgctcct

SEQ ID NO: 3024849 - DNA, 25 bp, Homo sapien
atggggcttggttttgagctgctcc

SEQ ID NO: 3024850 - DNA, 25 bp, Homo sapien
tcagctgcgtgctgtgaggtagatg

SEQ ID NO: 3024851 - DNA, 25 bp, Homo sapien
tgcttcacaaccagcaagccgggtg

SEQ ID NO: 3024852 - DNA, 25 bp, Homo sapien
aagccgggtgcggtgtggtgcaggc

SEQ ID NO: 3024853 - DNA, 25 bp, Homo sapien
gtgcggtgtggtgcaggcccatcca

SEQ ID NO: 3024854 - DNA, 25 bp, Homo sapien
tgcctgccctgtgcagaggactttg

SEQ ID NO: 3024855 - DNA, 25 bp, Homo sapien
cagaggactttgtccttggagcagg

SEQ ID NO: 3024856 - DNA, 25 bp, Homo sapien
agcaggtgggtgcaatgaatttcag

SEQ ID NO: 3024857 - DNA, 25 bp, Homo sapien
gagcaggtgggtgcaatgaatttca

SEQ ID NO: 3024858 - DNA, 25 bp, Homo sapien
caatcctcgaaggtgggagagtcca

SEQ ID NO: 3024859 - DNA, 25 bp, Homo sapien
caggcctcgagaagaacagtgtcaa

SEQ ID NO: 3024860 - DNA, 25 bp, Homo sapien
tgtgcaaaagatctggcccgtggct

SEQ ID NO: 3024861 - DNA, 25 bp, Homo sapien
tagaggctctctaggacacggtgca

SEQ ID NO: 3024862 - DNA, 25 bp, Homo sapien
tctgagggtctgagttgatgtcgtc

SEQ ID NO: 3024863 - DNA, 25 bp, Homo sapien
gagggtctgagttgatgtcgtcccc

SEQ ID NO: 3024864 - DNA, 25 bp, Homo sapien
gagtctgagggtctgagttgatgtc

SEQ ID NO: 3024865 - DNA, 25 bp, Homo sapien
gggtctgagttgatgtcgtccccat

SEQ ID NO: 3024866 - DNA, 25 bp, Homo sapien
agctgcccttgtccgcctggacaga

SEQ ID NO: 3024867 - DNA, 25 bp, Homo sapien
gccattgcgaaggaatcctgcccca

SEQ ID NO: 3024868 - DNA, 25 bp, Homo sapien
ggtgtggccattgcgaaggaatcct

SEQ ID NO: 3024869 - DNA, 25 bp, Homo sapien
gcccttgtccgcctggacagacttg

SEQ ID NO: 3024870 - DNA, 25 bp, Homo sapien
tgctcagtgttgggtggagccacat

SEQ ID NO: 3024871 - DNA, 25 bp, Homo sapien
gcgtggcaggtgcactcaggaggca

SEQ ID NO: 3024872 - DNA, 25 bp, Homo sapien
tgggcgtggcaggtgcactcaggag

SEQ ID NO: 3024873 - DNA, 25 bp, Homo sapien
cctgctcagtgttgggtggagccac

SEQ ID NO: 3024874 - DNA, 25 bp, Homo sapien
gaagccccaggtgcgacttggcagg

SEQ ID NO: 3024875 - DNA, 25 bp, Homo sapien
gggaagccccaggtgcgacttggca

SEQ ID NO: 3024876 - DNA, 25 bp, Homo sapien
gggctgtggacggatggagagctgt

SEQ ID NO: 3024877 - DNA, 25 bp, Homo sapien
ctgtggacggatggagagctgtcat

SEQ ID NO: 3024878 - DNA, 25 bp, Homo sapien
ttaaattgttcccaagctgccactt

SEQ ID NO: 3024879 - DNA, 25 bp, Homo sapien
taaattgttcccaagctgccactta

SEQ ID NO: 3024880 - DNA, 25 bp, Homo sapien
aaattgttcccaagctgccacttag

SEQ ID NO: 3024881 - DNA, 25 bp, Homo sapien
aattgttcccaagctgccacttagt

SEQ ID NO: 3024882 - DNA, 25 bp, Homo sapien
agtgcggggagcaccaggtccccat

SEQ ID NO: 3024883 - DNA, 25 bp, Homo sapien
tgggccaggccatgggcgagatggg

SEQ ID NO: 3024884 - DNA, 25 bp, Homo sapien
tctgctcttgaatgtccaccatggg

SEQ ID NO: 3024885 - DNA, 25 bp, Homo sapien
tcacttagcatgctggcccatctgc

SEQ ID NO: 3024886 - DNA, 25 bp, Homo sapien
ggccacgggctgtttgtcaagacca

SEQ ID NO: 3024887 - DNA, 25 bp, Homo sapien
tcaagaccaaacagggaagaggctt

SEQ ID NO: 3024888 - DNA, 25 bp, Homo sapien
gaaatttgtccccacgcattctcca

SEQ ID NO: 3024889 - DNA, 25 bp, Homo sapien
tgcgaagacgttgccccagaaattt

SEQ ID NO: 3024890 - DNA, 25 bp, Homo sapien
ccagcggacagagcagcggagccat

SEQ ID NO: 3024891 - DNA, 25 bp, Homo sapien
gcggacagagcagcggagccatgaa

SEQ ID NO: 3024892 - DNA, 25 bp, Homo sapien
tcaccagcggacagagcagcggagc

SEQ ID NO: 3024893 - DNA, 25 bp, Homo sapien
gacagagcagcggagccatgaaggc

SEQ ID NO: 3024894 - DNA, 25 bp, Homo sapien
gcgttgatagtgtgggcggtgccct

SEQ ID NO: 3024895 - DNA, 25 bp, Homo sapien
gagggcatcttgaatccttgtcctc

SEQ ID NO: 3024896 - DNA, 25 bp, Homo sapien
ggacaggccagctgcgttgatagtg

SEQ ID NO: 3024897 - DNA, 25 bp, Homo sapien
agggcatcttgaatccttgtcctcg

SEQ ID NO: 3024898 - DNA, 25 bp, Homo sapien
ggagcccaactttgtactgggtgct

SEQ ID NO: 3024899 - DNA, 25 bp, Homo sapien
tttgtactgggtgcttcactggatg

SEQ ID NO: 3024900 - DNA, 25 bp, Homo sapien
ccagcgaggagatgtggtgttgtga

SEQ ID NO: 3024901 - DNA, 25 bp, Homo sapien
actggatgaggcaggattcttgtcc

SEQ ID NO: 3024902 - DNA, 25 bp, Homo sapien
cagggaagtagttggagaggccagc

SEQ ID NO: 3024903 - DNA, 25 bp, Homo sapien
ctccagggaagtagttggagaggcc

SEQ ID NO: 3024904 - DNA, 25 bp, Homo sapien
ggccagcagagcatacgcggtgcag

SEQ ID NO: 3024905 - DNA, 25 bp, Homo sapien
cagcagagcatacgcggtgcagctc

SEQ ID NO: 3024906 - DNA, 25 bp, Homo sapien
gagctgggaccatcattggcctgac

SEQ ID NO: 3024907 - DNA, 25 bp, Homo sapien
aaaggtttgcattataccgagcagc

SEQ ID NO: 3024908 - DNA, 25 bp, Homo sapien
caaactttcttacagtgctgccgct

SEQ ID NO: 3024909 - DNA, 25 bp, Homo sapien
gctgccgcttgcaccctataaattg

SEQ ID NO: 3024910 - DNA, 25 bp, Homo sapien
ctcgattcagtgcagtcttgacctc

SEQ ID NO: 3024911 - DNA, 25 bp, Homo sapien
tgatctcgattcagtgcagtcttga

SEQ ID NO: 3024912 - DNA, 25 bp, Homo sapien
catgatctcgattcagtgcagtctt

SEQ ID NO: 3024913 - DNA, 25 bp, Homo sapien
atctcgattcagtgcagtcttgacc

SEQ ID NO: 3024914 - DNA, 25 bp, Homo sapien
cacacgttgtttctgctcctgagga

SEQ ID NO: 3024915 - DNA, 25 bp, Homo sapien
tcctgatggcatctgaccgccgtgg

SEQ ID NO: 3024916 - DNA, 25 bp, Homo sapien
acctcagtgaattctggagcctggc

SEQ ID NO: 3024917 - DNA, 25 bp, Homo sapien
gaagtggtgaatccatgccttggca

SEQ ID NO: 3024918 - DNA, 25 bp, Homo sapien
tggagtcatacgtggatggctgagc

SEQ ID NO: 3024919 - DNA, 25 bp, Homo sapien
ggagtcatacgtggatggctgagcc

SEQ ID NO: 3024920 - DNA, 25 bp, Homo sapien
ctacaggacggtgagcgcctctagg

SEQ ID NO: 3024921 - DNA, 25 bp, Homo sapien
cttgcttgagtttctgatgtaaaga

SEQ ID NO: 3024922 - DNA, 25 bp, Homo sapien
gatgtaaagatttcaggtaggccac

SEQ ID NO: 3024923 - DNA, 25 bp, Homo sapien
ggctggcgaatcaggcagctgtcct

SEQ ID NO: 3024924 - DNA, 25 bp, Homo sapien
tgtggagcgtgccggccacagggga

SEQ ID NO: 3024925 - DNA, 25 bp, Homo sapien
agcgtgccggccacaggggaacaca

SEQ ID NO: 3024926 - DNA, 25 bp, Homo sapien
gaacacagggccaggagtcctcttg

SEQ ID NO: 3024927 - DNA, 25 bp, Homo sapien
cagggccaggagtcctcttggcttc

SEQ ID NO: 3024928 - DNA, 25 bp, Homo sapien
gaatggaatgtgttgtccagggtca

SEQ ID NO: 3024929 - DNA, 25 bp, Homo sapien
catggctggacagccgacccttttc

SEQ ID NO: 3024930 - DNA, 25 bp, Homo sapien
tgctctcgtgcgtattaggtgctgg

SEQ ID NO: 3024931 - DNA, 25 bp, Homo sapien
tcatgcggctggttgtcccagaacc

SEQ ID NO: 3024932 - DNA, 25 bp, Homo sapien
caggaagggagtgtcacatgcaaaa

SEQ ID NO: 3024933 - DNA, 25 bp, Homo sapien
cacacggaggtaaaaatcggttcat

SEQ ID NO: 3024934 - DNA, 25 bp, Homo sapien
ccccacctaatgtcagaagtaaaat

SEQ ID NO: 3024935 - DNA, 25 bp, Homo sapien
attgcctattaaaccccacacggag

SEQ ID NO: 3024936 - DNA, 25 bp, Homo sapien
gctcaaatgtcacccgcagggagct

SEQ ID NO: 3024937 - DNA, 25 bp, Homo sapien
tggctcaaatgtcacccgcagggag

SEQ ID NO: 3024938 - DNA, 25 bp, Homo sapien
ccttggctcaaatgtcacccgcagg

SEQ ID NO: 3024939 - DNA, 25 bp, Homo sapien
ttggctcaaatgtcacccgcaggga

SEQ ID NO: 3024940 - DNA, 25 bp, Homo sapien
cctgctgggcaacgttgaggtcgac

SEQ ID NO: 3024941 - DNA, 25 bp, Homo sapien
agttccagcccagctagtggacacc

SEQ ID NO: 3024942 - DNA, 25 bp, Homo sapien
aacatctgaaaggttagggccctgc

SEQ ID NO: 3024943 - DNA, 25 bp, Homo sapien
tgtggacaggcagctccatgtaatt

SEQ ID NO: 3024944 - DNA, 25 bp, Homo sapien
tggacctctgtttgtcccgtttgta

SEQ ID NO: 3024945 - DNA, 25 bp, Homo sapien
catgggctccaagagttgatgctgc

SEQ ID NO: 3024946 - DNA, 25 bp, Homo sapien
tgcatgcaggcctcatgtactttga

SEQ ID NO: 3024947 - DNA, 25 bp, Homo sapien
gtaaccacttctgtctggcatgggc

SEQ ID NO: 3024948 - DNA, 25 bp, Homo sapien
ggccaacagtctcctaagagtccag

SEQ ID NO: 3024949 - DNA, 25 bp, Homo sapien
attgtggggtcacatatctttctac

SEQ ID NO: 3024950 - DNA, 25 bp, Homo sapien
aggtcgagggcccaacagggatgct

SEQ ID NO: 3024951 - DNA, 25 bp, Homo sapien
tgcccattgctattgtggggtcaca

SEQ ID NO: 3024952 - DNA, 25 bp, Homo sapien
gattatccgacgtcctgtaatgaga

SEQ ID NO: 3024953 - DNA, 25 bp, Homo sapien
tggtggtgtgagagacgctgtctct

SEQ ID NO: 3024954 - DNA, 25 bp, Homo sapien
ctgtctctgattatccgacgtcctg

SEQ ID NO: 3024955 - DNA, 25 bp, Homo sapien
tgtaatgagatacttttcagtgagg

SEQ ID NO: 3024956 - DNA, 25 bp, Homo sapien
ttgtggtcgacttgtagaagcccct

SEQ ID NO: 3024957 - DNA, 25 bp, Homo sapien
tttctcagccctgccggcgtccaac

SEQ ID NO: 3024958 - DNA, 25 bp, Homo sapien
gaggtgctcagtaccccgttttcta

SEQ ID NO: 3024959 - DNA, 25 bp, Homo sapien
tggattcctacactcttggtctttt

SEQ ID NO: 3024960 - DNA, 25 bp, Homo sapien
agacagaatccacatagtgtttcct

SEQ ID NO: 3024961 - DNA, 25 bp, Homo sapien
ctttgactggtgaaggctggccagg

SEQ ID NO: 3024962 - DNA, 25 bp, Homo sapien
cagacagaatccacatagtgtttcc

SEQ ID NO: 3024963 - DNA, 25 bp, Homo sapien
ctggagagatccgggatgcagagct

SEQ ID NO: 3024964 - DNA, 25 bp, Homo sapien
ggagagatccgggatgcagagctgt

SEQ ID NO: 3024965 - DNA, 25 bp, Homo sapien
gagagatccgggatgcagagctgtt

SEQ ID NO: 3024966 - DNA, 25 bp, Homo sapien
ctgctggagagatccgggatgcaga

SEQ ID NO: 3024967 - DNA, 25 bp, Homo sapien
catgggagccggctgaaaagctccc

SEQ ID NO: 3024968 - DNA, 25 bp, Homo sapien
taccctaaaggtacatgaagcacct

SEQ ID NO: 3024969 - DNA, 25 bp, Homo sapien
tgtgagacccgcgaaacaatgagca

SEQ ID NO: 3024970 - DNA, 25 bp, Homo sapien
tcatgagtagatcagtgccctgccc

SEQ ID NO: 3024971 - DNA, 25 bp, Homo sapien
acaccagcgcccatttgccttccac

SEQ ID NO: 3024972 - DNA, 25 bp, Homo sapien
gagggagacctggcaacgggtggcc

SEQ ID NO: 3024973 - DNA, 25 bp, Homo sapien
ttgggaccgcatgttctgttgtagg

SEQ ID NO: 3024974 - DNA, 25 bp, Homo sapien
tcttgggaccgcatgttctgttgta

SEQ ID NO: 3024975 - DNA, 25 bp, Homo sapien
ctcttgggaccgcatgttctgttgt

SEQ ID NO: 3024976 - DNA, 25 bp, Homo sapien
tatgcgatggcagtgatacacctca

SEQ ID NO: 3024977 - DNA, 25 bp, Homo sapien
cttgggcatgctgctgcgcttttcc

SEQ ID NO: 3024978 - DNA, 25 bp, Homo sapien
tgtccctgtgtatgcgatggcagtg

SEQ ID NO: 3024979 - DNA, 25 bp, Homo sapien
cgcttttccaactggtgtccctgtg

SEQ ID NO: 3024980 - DNA, 25 bp, Homo sapien
tgatttgcaagtattcccttccctt

SEQ ID NO: 3024981 - DNA, 25 bp, Homo sapien
tctagatactaatactttgtcagat

SEQ ID NO: 3024982 - DNA, 25 bp, Homo sapien
gctgtttattctagatactaatact

SEQ ID NO: 3024983 - DNA, 25 bp, Homo sapien
cttccctaggttgccttttcgctct

SEQ ID NO: 3024984 - DNA, 25 bp, Homo sapien
tggatcctgctagctgaccattgtg

SEQ ID NO: 3024985 - DNA, 25 bp, Homo sapien
ttcttgcattgaggtatctgctcca

SEQ ID NO: 3024986 - DNA, 25 bp, Homo sapien
tgttgcatatggtgtagtgtcaccc

SEQ ID NO: 3024987 - DNA, 25 bp, Homo sapien
gctccatttcaagttcattgttgca

SEQ ID NO: 3024988 - DNA, 25 bp, Homo sapien
tccagtcctcactgtggtccatgga

SEQ ID NO: 3024989 - DNA, 25 bp, Homo sapien
acaagatgccttgtctagggaggtg

SEQ ID NO: 3024990 - DNA, 25 bp, Homo sapien
tctagtaacgagtgcactggccact

SEQ ID NO: 3024991 - DNA, 25 bp, Homo sapien
gcaaacaagagagtccacctcagag

SEQ ID NO: 3024992 - DNA, 25 bp, Homo sapien
ccttggtgaagttttaagtgcagcc

SEQ ID NO: 3024993 - DNA, 25 bp, Homo sapien
tggtgaagttttaagtgcagccttc

SEQ ID NO: 3024994 - DNA, 25 bp, Homo sapien
tgaagttttaagtgcagccttctgc

SEQ ID NO: 3024995 - DNA, 25 bp, Homo sapien
cctcagagtggtcagaagaagtggc

SEQ ID NO: 3024996 - DNA, 25 bp, Homo sapien
catcccaggttgtatgagcgaggcc

SEQ ID NO: 3024997 - DNA, 25 bp, Homo sapien
tcccaggttgtatgagcgaggccct

SEQ ID NO: 3024998 - DNA, 25 bp, Homo sapien
caggttgtatgagcgaggccctctc

SEQ ID NO: 3024999 - DNA, 25 bp, Homo sapien
aacatcccaggttgtatgagcgagg

SEQ ID NO: 3025000 - DNA, 25 bp, Homo sapien
tggctggagatgctcatggtctatc

SEQ ID NO: 3025001 - DNA, 25 bp, Homo sapien
gagatgctcatggtctatccccgga

SEQ ID NO: 3025002 - DNA, 25 bp, Homo sapien
ggtctatccccggaccaacaagcag

SEQ ID NO: 3025003 - DNA, 25 bp, Homo sapien
ccccggaccaacaagcagaatcaga

SEQ ID NO: 3025004 - DNA, 25 bp, Homo sapien
cccaagccaacatccgctggaaagg

SEQ ID NO: 3025005 - DNA, 25 bp, Homo sapien
gaacagcagttaatacgtaaatccc

SEQ ID NO: 3025006 - DNA, 25 bp, Homo sapien
gagatgtcgctagcaagaagtcagc

SEQ ID NO: 3025007 - DNA, 25 bp, Homo sapien
tggttcctgggactgaaaatggagc

SEQ ID NO: 3025008 - DNA, 25 bp, Homo sapien
agccctgcgcatggaggtggaccgg

SEQ ID NO: 3025009 - DNA, 25 bp, Homo sapien
gctggagcgggagcgtgcacggagg

SEQ ID NO: 3025010 - DNA, 25 bp, Homo sapien
cgggagcgtgcacggaggcgggagg

SEQ ID NO: 3025011 - DNA, 25 bp, Homo sapien
cctgcgccctgaggcggagcctggg

SEQ ID NO: 3025012 - DNA, 25 bp, Homo sapien
ctgcagagaaactatgagctgctgc

SEQ ID NO: 3025013 - DNA, 25 bp, Homo sapien
tggccaagctcaagggcgacctgaa

SEQ ID NO: 3025014 - DNA, 25 bp, Homo sapien
caactgggcgccagtgagcaggcgc

SEQ ID NO: 3025015 - DNA, 25 bp, Homo sapien
gaagacaaggccagcgcctatgagg

SEQ ID NO: 3025016 - DNA, 25 bp, Homo sapien
taaatgactaggatgactaggcccc

SEQ ID NO: 3025017 - DNA, 25 bp, Homo sapien
tcacctctgtgtgacggactcggcc

SEQ ID NO: 3025018 - DNA, 25 bp, Homo sapien
tgattgccctaggagagcacagtcg

SEQ ID NO: 3025019 - DNA, 25 bp, Homo sapien
tgtcagcgagcacctcaggagaact

SEQ ID NO: 3025020 - DNA, 25 bp, Homo sapien
ttagctgccgttgcatagtgtcccc

SEQ ID NO: 3025021 - DNA, 25 bp, Homo sapien
acttgtaaatagacagcaccttgag

SEQ ID NO: 3025022 - DNA, 25 bp, Homo sapien
agcccaggtgtggtgttctcaccca

SEQ ID NO: 3025023 - DNA, 25 bp, Homo sapien
tctctccaaagaagcaactaggtct

SEQ ID NO: 3025024 - DNA, 25 bp, Homo sapien
cagccccttcaatggtgaccagatg

SEQ ID NO: 3025025 - DNA, 25 bp, Homo sapien
gctgtgagaaccctgcactctgtgg

SEQ ID NO: 3025026 - DNA, 25 bp, Homo sapien
ggcttccaaagaaaccctctcagaa

SEQ ID NO: 3025027 - DNA, 25 bp, Homo sapien
caattatcaagctgtgacaactgct

SEQ ID NO: 3025028 - DNA, 25 bp, Homo sapien
ggcatgcccactaaccgcacctgca

SEQ ID NO: 3025029 - DNA, 25 bp, Homo sapien
catttcccggggactctcctcctgg

SEQ ID NO: 3025030 - DNA, 25 bp, Homo sapien
catccaagtaattttgtgaagggga

SEQ ID NO: 3025031 - DNA, 25 bp, Homo sapien
aacatcctccaataacagcatttcc

SEQ ID NO: 3025032 - DNA, 25 bp, Homo sapien
tgtcccatccaagttgagcacgcgc

SEQ ID NO: 3025033 - DNA, 25 bp, Homo sapien
gcctgacggtgcaagaacggttgaa

SEQ ID NO: 3025034 - DNA, 25 bp, Homo sapien
gaagaaagactaggtgtgtcccatc

SEQ ID NO: 3025035 - DNA, 25 bp, Homo sapien
gaagctctttgaatccagggacttg

SEQ ID NO: 3025036 - DNA, 25 bp, Homo sapien
gaaaatgttgaaagcaaccattcct

SEQ ID NO: 3025037 - DNA, 25 bp, Homo sapien
atgttgaaagcaaccattcctattt

SEQ ID NO: 3025038 - DNA, 25 bp, Homo sapien
aaatgttgaaagcaaccattcctat

SEQ ID NO: 3025039 - DNA, 25 bp, Homo sapien
aaaatgttgaaagcaaccattccta

SEQ ID NO: 3025040 - DNA, 25 bp, Homo sapien
ccattaatcccattaagatagggag

SEQ ID NO: 3025041 - DNA, 25 bp, Homo sapien
tatggccccatgaaaaccattaatc

SEQ ID NO: 3025042 - DNA, 25 bp, Homo sapien
taaattggagtctattatggcccca

SEQ ID NO: 3025043 - DNA, 25 bp, Homo sapien
gatagggagtataaacccctggctg

SEQ ID NO: 3025044 - DNA, 25 bp, Homo sapien
gaaataactaagtgctctccactgg

SEQ ID NO: 3025045 - DNA, 25 bp, Homo sapien
tggcatcgagccctttccacaagtt

SEQ ID NO: 3025046 - DNA, 25 bp, Homo sapien
tagtcttcagtgttgttaacagcaa

SEQ ID NO: 3025047 - DNA, 25 bp, Homo sapien
tttcagacccaggtttaggtgctct

SEQ ID NO: 3025048 - DNA, 25 bp, Homo sapien
gacctggagtgcatcaggatctgac

SEQ ID NO: 3025049 - DNA, 25 bp, Homo sapien
agaaggaacattcgggaccccgctg

SEQ ID NO: 3025050 - DNA, 25 bp, Homo sapien
gattttgtgccgttctctgaggtcc

SEQ ID NO: 3025051 - DNA, 25 bp, Homo sapien
gggtcacacgaatgctccaggacag

SEQ ID NO: 3025052 - DNA, 25 bp, Homo sapien
gcacagatgttgacggctgcccaac

SEQ ID NO: 3025053 - DNA, 25 bp, Homo sapien
catcctgcgatggagtgaaccaggc

SEQ ID NO: 3025054 - DNA, 25 bp, Homo sapien
tgccacactgagcagggagccttgt

SEQ ID NO: 3025055 - DNA, 25 bp, Homo sapien
gaaccaggcgagaaaggatgacgat

SEQ ID NO: 3025056 - DNA, 25 bp, Homo sapien
cctgttggagcactaagaggtgaca

SEQ ID NO: 3025057 - DNA, 25 bp, Homo sapien
gagccataggtctgttgtacaagga

SEQ ID NO: 3025058 - DNA, 25 bp, Homo sapien
gcctggcctataagatacggtaaaa

SEQ ID NO: 3025059 - DNA, 25 bp, Homo sapien
tgatgagaagcttcactttcctggg

SEQ ID NO: 3025060 - DNA, 25 bp, Homo sapien
gagaggttcctagcccgctcagcgc

SEQ ID NO: 3025061 - DNA, 25 bp, Homo sapien
gtaatagcagctgaacgtgggtttt

SEQ ID NO: 3025062 - DNA, 25 bp, Homo sapien
gcttggaggtgccatatacaagcac

SEQ ID NO: 3025063 - DNA, 25 bp, Homo sapien
tcagcgcgagcgtctccagtaggta

SEQ ID NO: 3025064 - DNA, 25 bp, Homo sapien
ccagtaatgtaggatggcctgagag

SEQ ID NO: 3025065 - DNA, 25 bp, Homo sapien
gtggacacggcatgttcctcgggca

SEQ ID NO: 3025066 - DNA, 25 bp, Homo sapien
cactgagtcacagaatacttaagaa

SEQ ID NO: 3025067 - DNA, 25 bp, Homo sapien
ctatttttgtcagattggtaaggaa

SEQ ID NO: 3025068 - DNA, 25 bp, Homo sapien
gaaagggtgtttcggaggcgcagcc

SEQ ID NO: 3025069 - DNA, 25 bp, Homo sapien
gaggaaagggtgtttcggaggcgca

SEQ ID NO: 3025070 - DNA, 25 bp, Homo sapien
agggtgtttcggaggcgcagccaca

SEQ ID NO: 3025071 - DNA, 25 bp, Homo sapien
ctgaggaaagggtgtttcggaggcg

SEQ ID NO: 3025072 - DNA, 25 bp, Homo sapien
gacatactgttaggattcaaaacca

SEQ ID NO: 3025073 - DNA, 25 bp, Homo sapien
taacaacgtatctactgacatactg

SEQ ID NO: 3025074 - DNA, 25 bp, Homo sapien
cttcatgtggttttcctagggtaca

SEQ ID NO: 3025075 - DNA, 25 bp, Homo sapien
taagtataagaattacttcatgtgg

SEQ ID NO: 3025076 - DNA, 25 bp, Homo sapien
tccctggatgtagctgatcattttt

SEQ ID NO: 3025077 - DNA, 25 bp, Homo sapien
ttgtgtgacatgctagattccctgg

SEQ ID NO: 3025078 - DNA, 25 bp, Homo sapien
accctttgcatgctgtgtaatgaga

SEQ ID NO: 3025079 - DNA, 25 bp, Homo sapien
taaactatttttgcatcaccctttg

SEQ ID NO: 3025080 - DNA, 25 bp, Homo sapien
taaacaatatattcacaacctttag

SEQ ID NO: 3025081 - DNA, 25 bp, Homo sapien
aaaagttgattctaccaataaatca

SEQ ID NO: 3025082 - DNA, 25 bp, Homo sapien
gggggttactgtgagcctagatcgt

SEQ ID NO: 3025083 - DNA, 25 bp, Homo sapien
cttttatccagataacattgaaaaa

SEQ ID NO: 3025084 - DNA, 25 bp, Homo sapien
cccttgaagcatgacgcgaggtgaa

SEQ ID NO: 3025085 - DNA, 25 bp, Homo sapien
ggagtgactactactggaacagtgt

SEQ ID NO: 3025086 - DNA, 25 bp, Homo sapien
cagtcatgattttaaaggcgtcggc

SEQ ID NO: 3025087 - DNA, 25 bp, Homo sapien
tcagagtaatggatggagccctaaa

SEQ ID NO: 3025088 - DNA, 25 bp, Homo sapien
tttctaaatagctgtatactgcccc

SEQ ID NO: 3025089 - DNA, 25 bp, Homo sapien
cattgcaatcttagtctgcttaggg

SEQ ID NO: 3025090 - DNA, 25 bp, Homo sapien
gccgataaggcatcggctagcctga

SEQ ID NO: 3025091 - DNA, 25 bp, Homo sapien
tggtaggaagagacaaagcgagcta

SEQ ID NO: 3025092 - DNA, 25 bp, Homo sapien
aagtccagggtcacgcggcttcgca

SEQ ID NO: 3025093 - DNA, 25 bp, Homo sapien
attcagatgtgccagaagtccaggg

SEQ ID NO: 3025094 - DNA, 25 bp, Homo sapien
catacactgggggaattcacaaact

SEQ ID NO: 3025095 - DNA, 25 bp, Homo sapien
gagatgctttacaagctctcccatt

SEQ ID NO: 3025096 - DNA, 25 bp, Homo sapien
ctaacactgtgagtcaaaagtaacc

SEQ ID NO: 3025097 - DNA, 25 bp, Homo sapien
ggaggtgagactaagcacatggcta

SEQ ID NO: 3025098 - DNA, 25 bp, Homo sapien
cactgaagggtctctgggtggtaat

SEQ ID NO: 3025099 - DNA, 25 bp, Homo sapien
gatgtcatcggagctatctgtatat

SEQ ID NO: 3025100 - DNA, 25 bp, Homo sapien
tagcagacctcaggatgggccctgg

SEQ ID NO: 3025101 - DNA, 25 bp, Homo sapien
tcccgtgatgggttacgctgagcca

SEQ ID NO: 3025102 - DNA, 25 bp, Homo sapien
ggaatgcaaaccctgagctgcaaat

SEQ ID NO: 3025103 - DNA, 25 bp, Homo sapien
tgagccagcaatgtgcacgcactaa

SEQ ID NO: 3025104 - DNA, 25 bp, Homo sapien
taagaacacagacgtgggagacacc

SEQ ID NO: 3025105 - DNA, 25 bp, Homo sapien
tctggcccgaaataactgacccgaa

SEQ ID NO: 3025106 - DNA, 25 bp, Homo sapien
cactggcgtgcatactggttttaaa

SEQ ID NO: 3025107 - DNA, 25 bp, Homo sapien
gcctttggtggcaatgacgctcacg

SEQ ID NO: 3025108 - DNA, 25 bp, Homo sapien
aatgggatcgacctggaagaggcac

SEQ ID NO: 3025109 - DNA, 25 bp, Homo sapien
ccatgaaagcaatctccctccagct

SEQ ID NO: 3025110 - DNA, 25 bp, Homo sapien
tggaggtgccgcaagttctgtgcca

SEQ ID NO: 3025111 - DNA, 25 bp, Homo sapien
taggtttggctttcgctggaggtgc

SEQ ID NO: 3025112 - DNA, 25 bp, Homo sapien
ttcgctggaggtgccgcaagttctg

SEQ ID NO: 3025113 - DNA, 25 bp, Homo sapien
aaacttgtgatgcatgtagcctggg

SEQ ID NO: 3025114 - DNA, 25 bp, Homo sapien
cttgcgtggtccagttgagcgagcc

SEQ ID NO: 3025115 - DNA, 25 bp, Homo sapien
tagcctgggtcttgatcgtgccgga

SEQ ID NO: 3025116 - DNA, 25 bp, Homo sapien
gaaaaagccgcacgtactcgtcgtc

SEQ ID NO: 3025117 - DNA, 25 bp, Homo sapien
cgttgagggccatgtagtcgcagtc

SEQ ID NO: 3025118 - DNA, 25 bp, Homo sapien
agcaggcggcttagcgcgctctcgc

SEQ ID NO: 3025119 - DNA, 25 bp, Homo sapien
gcagcagaccgatttgcgagccgtt

SEQ ID NO: 3025120 - DNA, 25 bp, Homo sapien
tggtgcagcaactgcacggcgcggc

SEQ ID NO: 3025121 - DNA, 25 bp, Homo sapien
gcctggaccgcagccagcgcagcac

SEQ ID NO: 3025122 - DNA, 25 bp, Homo sapien
acgggaagaacagcgcctcgcgccg

SEQ ID NO: 3025123 - DNA, 25 bp, Homo sapien
agacgggaagaacagcgcctcgcgc

SEQ ID NO: 3025124 - DNA, 25 bp, Homo sapien
ctgagacgggaagaacagcgcctcg

SEQ ID NO: 3025125 - DNA, 25 bp, Homo sapien
ccaaggcagcgcctccagagtcaga

SEQ ID NO: 3025126 - DNA, 25 bp, Homo sapien
caaggcagcgcctccagagtcagag

SEQ ID NO: 3025127 - DNA, 25 bp, Homo sapien
cgcggccgccacctgccaactcaac

SEQ ID NO: 3025128 - DNA, 25 bp, Homo sapien
ccacctgccaactcaaccgtcccat

SEQ ID NO: 3025129 - DNA, 25 bp, Homo sapien
gctaatccgggacccacagccacgc

SEQ ID NO: 3025130 - DNA, 25 bp, Homo sapien
gccgccgctaatccgggacccacag

SEQ ID NO: 3025131 - DNA, 25 bp, Homo sapien
cgccgctaatccgggacccacagcc

SEQ ID NO: 3025132 - DNA, 25 bp, Homo sapien
ccgctaatccgggacccacagccac

SEQ ID NO: 3025133 - DNA, 25 bp, Homo sapien
gtcacgcagcgccaacggccacgtg

SEQ ID NO: 3025134 - DNA, 25 bp, Homo sapien
cccagccctagaccgccaggccacg

SEQ ID NO: 3025135 - DNA, 25 bp, Homo sapien
gtcctgccaattgccacgcaccagg

SEQ ID NO: 3025136 - DNA, 25 bp, Homo sapien
ccaggccacgccctatcacgtcctg

SEQ ID NO: 3025137 - DNA, 25 bp, Homo sapien
taactttgtcggtatatagtaggta

SEQ ID NO: 3025138 - DNA, 25 bp, Homo sapien
tcttgaatgtaaaatcaggaaaccc

SEQ ID NO: 3025139 - DNA, 25 bp, Homo sapien
aaggttcaagatctggaacttgttt

SEQ ID NO: 3025140 - DNA, 25 bp, Homo sapien
tcttgggctggcataggttcagctc

SEQ ID NO: 3025141 - DNA, 25 bp, Homo sapien
acccctattccctcacaaggacagc

SEQ ID NO: 3025142 - DNA, 25 bp, Homo sapien
tctgagccatgaatccttattaaaa

SEQ ID NO: 3025143 - DNA, 25 bp, Homo sapien
agcaaaaccatcagaaaatccctct

SEQ ID NO: 3025144 - DNA, 25 bp, Homo sapien
gttgttgcattatacagatacctag

SEQ ID NO: 3025145 - DNA, 25 bp, Homo sapien
tttattgtgttccaatgttgttgca

SEQ ID NO: 3025146 - DNA, 25 bp, Homo sapien
cagaataaaagcatggcggggctca

SEQ ID NO: 3025147 - DNA, 25 bp, Homo sapien
aagacaaaagcgatacagaataaaa

SEQ ID NO: 3025148 - DNA, 25 bp, Homo sapien
caaacgtaaatgttgaaagcagcaa

SEQ ID NO: 3025149 - DNA, 25 bp, Homo sapien
tcaatcaccacactccgaaaatagt

SEQ ID NO: 3025150 - DNA, 25 bp, Homo sapien
agggactccatcattaagccccagg

SEQ ID NO: 3025151 - DNA, 25 bp, Homo sapien
tgtgcaaaaatgatcagggactcca

SEQ ID NO: 3025152 - DNA, 25 bp, Homo sapien
tgccgacccctcagcaacctgtctt

SEQ ID NO: 3025153 - DNA, 25 bp, Homo sapien
tgggcaagtcagatgcttgccgacc

SEQ ID NO: 3025154 - DNA, 25 bp, Homo sapien
cccaaagtctcttgcggagccctaa

SEQ ID NO: 3025155 - DNA, 25 bp, Homo sapien
cataaggcccagaaactcttgctga

SEQ ID NO: 3025156 - DNA, 25 bp, Homo sapien
ttgagaaactcaagggacagtccct

SEQ ID NO: 3025157 - DNA, 25 bp, Homo sapien
aacgcttgaatgttaacctcgggag

SEQ ID NO: 3025158 - DNA, 25 bp, Homo sapien
agttccgagactccgaggctgtggg

SEQ ID NO: 3025159 - DNA, 25 bp, Homo sapien
cagttccgagactccgaggctgtgg

SEQ ID NO: 3025160 - DNA, 25 bp, Homo sapien
tcagttccgagactccgaggctgtg

SEQ ID NO: 3025161 - DNA, 25 bp, Homo sapien
tcctcggacgcacccaggatgctca

SEQ ID NO: 3025162 - DNA, 25 bp, Homo sapien
gacttgtaggtcttgctcaggccag

SEQ ID NO: 3025163 - DNA, 25 bp, Homo sapien
tttgggtcgactgtccaccttggtg

SEQ ID NO: 3025164 - DNA, 25 bp, Homo sapien
ggccagtcatccagaacttcagcag

SEQ ID NO: 3025165 - DNA, 25 bp, Homo sapien
actcctccttgaggcagacgaggca

SEQ ID NO: 3025166 - DNA, 25 bp, Homo sapien
gtcagagccgcttcaatcttattca

SEQ ID NO: 3025167 - DNA, 25 bp, Homo sapien
tgaggcagacgaggcactggtccac

SEQ ID NO: 3025168 - DNA, 25 bp, Homo sapien
ggtcagagccgcttcaatcttattc

SEQ ID NO: 3025169 - DNA, 25 bp, Homo sapien
caaactcgtacttgctgagagactg

SEQ ID NO: 3025170 - DNA, 25 bp, Homo sapien
ggtggagggtggaacgtgcggctgc

SEQ ID NO: 3025171 - DNA, 25 bp, Homo sapien
cgtggacctccacgatgacagcaaa

SEQ ID NO: 3025172 - DNA, 25 bp, Homo sapien
tgagagactggtcatcctcacaccc

SEQ ID NO: 3025173 - DNA, 25 bp, Homo sapien
ggatctgcacgtgcgggctgagccc

SEQ ID NO: 3025174 - DNA, 25 bp, Homo sapien
agccccaggaagttgcaccgatagg

SEQ ID NO: 3025175 - DNA, 25 bp, Homo sapien
gataggcctcctcgtactggctgct

SEQ ID NO: 3025176 - DNA, 25 bp, Homo sapien
atgatgcggacgcagcccacgggaa

SEQ ID NO: 3025177 - DNA, 25 bp, Homo sapien
cctgcgccgcacacctaaggaaaag

SEQ ID NO: 3025178 - DNA, 25 bp, Homo sapien
ggcaccaggccaatactgccctgcg

SEQ ID NO: 3025179 - DNA, 25 bp, Homo sapien
cacacctaaggaaaagatgttctca

SEQ ID NO: 3025180 - DNA, 25 bp, Homo sapien
ggcatccccacctgacgccaggcac

SEQ ID NO: 3025181 - DNA, 25 bp, Homo sapien
cagcatgcggaaagaaggggcaccc

SEQ ID NO: 3025182 - DNA, 25 bp, Homo sapien
ggttccccatgagaacgtgccaggc

SEQ ID NO: 3025183 - DNA, 25 bp, Homo sapien
ccatgagaacgtgccaggccagcat

SEQ ID NO: 3025184 - DNA, 25 bp, Homo sapien
caaaagctgactggacgaggtccac

SEQ ID NO: 3025185 - DNA, 25 bp, Homo sapien
catgggatgccaactatctgggctt

SEQ ID NO: 3025186 - DNA, 25 bp, Homo sapien
gagcttcttagaggattagaggacc

SEQ ID NO: 3025187 - DNA, 25 bp, Homo sapien
catcacttacaatgggcagggtcca

SEQ ID NO: 3025188 - DNA, 25 bp, Homo sapien
gatacttaggtcatcactgaaaggg

SEQ ID NO: 3025189 - DNA, 25 bp, Homo sapien
tcatgtgccggagggacttgaagac

SEQ ID NO: 3025190 - DNA, 25 bp, Homo sapien
gagaggaggactctgccgggccctg

SEQ ID NO: 3025191 - DNA, 25 bp, Homo sapien
tcttcagcctcagagttgtcccagc

SEQ ID NO: 3025192 - DNA, 25 bp, Homo sapien
tctctggcaacacaggggctttctc

SEQ ID NO: 3025193 - DNA, 25 bp, Homo sapien
tttcacatcacgagacccaaaggga

SEQ ID NO: 3025194 - DNA, 25 bp, Homo sapien
caaatccaggatgcgaagccaggtc

SEQ ID NO: 3025195 - DNA, 25 bp, Homo sapien
ggtgcacgtcagaagcaaatccagg

SEQ ID NO: 3025196 - DNA, 25 bp, Homo sapien
caagggtatgctgcgtggtgctaaa

SEQ ID NO: 3025197 - DNA, 25 bp, Homo sapien
aaaggcttcgacagacctggctctt

SEQ ID NO: 3025198 - DNA, 25 bp, Homo sapien
tggctcttcgtgctaaaaagctcac

SEQ ID NO: 3025199 - DNA, 25 bp, Homo sapien
ggctcttcgtgctaaaaagctcacc

SEQ ID NO: 3025200 - DNA, 25 bp, Homo sapien
caagcagaagcatgggaagcattat

SEQ ID NO: 3025201 - DNA, 25 bp, Homo sapien
gaaggctggtcatttgcaagcagaa

SEQ ID NO: 3025202 - DNA, 25 bp, Homo sapien
gaaacacctcgaaacagctctggct

SEQ ID NO: 3025203 - DNA, 25 bp, Homo sapien
caaagcttatttgagggcacgcctg

SEQ ID NO: 3025204 - DNA, 25 bp, Homo sapien
gctggtgcacacagtgccacgatcc

SEQ ID NO: 3025205 - DNA, 25 bp, Homo sapien
tagcaccaagatcaaatcatccctg

SEQ ID NO: 3025206 - DNA, 25 bp, Homo sapien
ggaaagcttggccaagactggccca

SEQ ID NO: 3025207 - DNA, 25 bp, Homo sapien
gcttccaggctggtgcacacagtgc

SEQ ID NO: 3025208 - DNA, 25 bp, Homo sapien
actgcccttcatggaaaacttggga

SEQ ID NO: 3025209 - DNA, 25 bp, Homo sapien
tgggaggtcagggaaccactgccct

SEQ ID NO: 3025210 - DNA, 25 bp, Homo sapien
ggaaccactgcccttcatggaaaac

SEQ ID NO: 3025211 - DNA, 25 bp, Homo sapien
gcccttcatggaaaacttgggacga

SEQ ID NO: 3025212 - DNA, 25 bp, Homo sapien
agcaaagaccgtcgaccaggccaag

SEQ ID NO: 3025213 - DNA, 25 bp, Homo sapien
aagaccgtcgaccaggccaagcact

SEQ ID NO: 3025214 - DNA, 25 bp, Homo sapien
tatttgtaaaggagcaaagaccgtc

SEQ ID NO: 3025215 - DNA, 25 bp, Homo sapien
taaaggagcaaagaccgtcgaccag

SEQ ID NO: 3025216 - DNA, 25 bp, Homo sapien
ggaacagattctttcacatggcggt

SEQ ID NO: 3025217 - DNA, 25 bp, Homo sapien
tacagacagcccacctgtgaatttt

SEQ ID NO: 3025218 - DNA, 25 bp, Homo sapien
tcgggacgagaagcctttaatcagc

SEQ ID NO: 3025219 - DNA, 25 bp, Homo sapien
cggtcaaggcaaacgagacaggaaa

SEQ ID NO: 3025220 - DNA, 25 bp, Homo sapien
ggctgattcagagccgcgtttccct

SEQ ID NO: 3025221 - DNA, 25 bp, Homo sapien
tcacaccgagatcggagggtgagct

SEQ ID NO: 3025222 - DNA, 25 bp, Homo sapien
tgagcttcccgaaggctcgttctgg

SEQ ID NO: 3025223 - DNA, 25 bp, Homo sapien
accgagatcggagggtgagcttccc

SEQ ID NO: 3025224 - DNA, 25 bp, Homo sapien
ttccaggagcttctcggtcagccgg

SEQ ID NO: 3025225 - DNA, 25 bp, Homo sapien
gaccaaggtatcctcggtcggagca

SEQ ID NO: 3025226 - DNA, 25 bp, Homo sapien
cggtcggagcaccttccaggagctt

SEQ ID NO: 3025227 - DNA, 25 bp, Homo sapien
aggtatcctcggtcggagcaccttc

SEQ ID NO: 3025228 - DNA, 25 bp, Homo sapien
aggcacgcccacaggttgtcatcac

SEQ ID NO: 3025229 - DNA, 25 bp, Homo sapien
ggtgtgcaggcacgcccacaggttg

SEQ ID NO: 3025230 - DNA, 25 bp, Homo sapien
caaaggaggtgtgcaggcacgccca

SEQ ID NO: 3025231 - DNA, 25 bp, Homo sapien
gcaggcacgcccacaggttgtcatc

SEQ ID NO: 3025232 - DNA, 25 bp, Homo sapien
ttgtcagcgatgtcagcgagcgggc

SEQ ID NO: 3025233 - DNA, 25 bp, Homo sapien
tgagcacgctgtgggcatccaaact

SEQ ID NO: 3025234 - DNA, 25 bp, Homo sapien
tctggtgtaggaatggcgtgaaggc

SEQ ID NO: 3025235 - DNA, 25 bp, Homo sapien
gagcgggcggcgttgccgttcctct

SEQ ID NO: 3025236 - DNA, 25 bp, Homo sapien
ccttctgggtgcactacttggctaa

SEQ ID NO: 3025237 - DNA, 25 bp, Homo sapien
tacatcaggagctatccgagaacag

SEQ ID NO: 3025238 - DNA, 25 bp, Homo sapien
gactcctggaggatcagtcccacta

SEQ ID NO: 3025239 - DNA, 25 bp, Homo sapien
ttggctaaggcacacgtgactggct

SEQ ID NO: 3025240 - DNA, 25 bp, Homo sapien
tgtggctgaacacaaagccgtgctg

SEQ ID NO: 3025241 - DNA, 25 bp, Homo sapien
gccgtgctgctcatctccgaagaag

SEQ ID NO: 3025242 - DNA, 25 bp, Homo sapien
gatgatgctgtaccagcgctggaag

SEQ ID NO: 3025243 - DNA, 25 bp, Homo sapien
ggtagatccggtccatcatgatggt

SEQ ID NO: 3025244 - DNA, 25 bp, Homo sapien
tcattgtggactgcaagggccggta

SEQ ID NO: 3025245 - DNA, 25 bp, Homo sapien
acaaatcagccagcgttaataacgg

SEQ ID NO: 3025246 - DNA, 25 bp, Homo sapien
tagtgacaccaaatcaaagcctctt

SEQ ID NO: 3025247 - DNA, 25 bp, Homo sapien
gccatgagagccgaagactgtactc

SEQ ID NO: 3025248 - DNA, 25 bp, Homo sapien
tgatgcaatgaaccacctaacctag

SEQ ID NO: 3025249 - DNA, 25 bp, Homo sapien
cagcagcgacgtagtttaggaagaa

SEQ ID NO: 3025250 - DNA, 25 bp, Homo sapien
gagcagcacgggatcatcactgaga

SEQ ID NO: 3025251 - DNA, 25 bp, Homo sapien
aattctaacagacatgccgagctgc

SEQ ID NO: 3025252 - DNA, 25 bp, Homo sapien
cctggcggacaatgctgaagagctg

SEQ ID NO: 3025253 - DNA, 25 bp, Homo sapien
gtgccctgcagcaagtgaccggcag

SEQ ID NO: 3025254 - DNA, 25 bp, Homo sapien
tggctgatatatcccgggtgccctg

SEQ ID NO: 3025255 - DNA, 25 bp, Homo sapien
gctggtggctgacgtatttaatgga

SEQ ID NO: 3025256 - DNA, 25 bp, Homo sapien
ctgtccatgaaaaggaaaagtaaat

SEQ ID NO: 3025257 - DNA, 25 bp, Homo sapien
gggctgtgcgcacgcatccgactgt

SEQ ID NO: 3025258 - DNA, 25 bp, Homo sapien
gggctgctggactcgacgctggccc

SEQ ID NO: 3025259 - DNA, 25 bp, Homo sapien
cgactttttgggccccgggctgctg

SEQ ID NO: 3025260 - DNA, 25 bp, Homo sapien
catccgactgttcatctgaatgcca

SEQ ID NO: 3025261 - DNA, 25 bp, Homo sapien
agtgcgggggccgtggagctcgcag

SEQ ID NO: 3025262 - DNA, 25 bp, Homo sapien
ccttgaggaagtggggcgtgcagca

SEQ ID NO: 3025263 - DNA, 25 bp, Homo sapien
ggccgtggagctcgcagaagtggca

SEQ ID NO: 3025264 - DNA, 25 bp, Homo sapien
ccccttgaggaagtggggcgtgcag

SEQ ID NO: 3025265 - DNA, 25 bp, Homo sapien
aaggtgctaggcaacatgatactgc

SEQ ID NO: 3025266 - DNA, 25 bp, Homo sapien
ccaacggcgctggaaaggaatgtcc

SEQ ID NO: 3025267 - DNA, 25 bp, Homo sapien
gaccaatgatagcacagctggagct

SEQ ID NO: 3025268 - DNA, 25 bp, Homo sapien
tgctttgccccagtgcgagaggaac

SEQ ID NO: 3025269 - DNA, 25 bp, Homo sapien
tcggcgggggacacaggaaaactgc

SEQ ID NO: 3025270 - DNA, 25 bp, Homo sapien
gcgggggacacaggaaaactgcttc

SEQ ID NO: 3025271 - DNA, 25 bp, Homo sapien
tcctgcagggggtcggcgggggaca

SEQ ID NO: 3025272 - DNA, 25 bp, Homo sapien
tgcagggggtcggcgggggacacag

SEQ ID NO: 3025273 - DNA, 25 bp, Homo sapien
gaggcaccctgctgactgatctgag

SEQ ID NO: 3025274 - DNA, 25 bp, Homo sapien
caagctacggcacggctgaaactga

SEQ ID NO: 3025275 - DNA, 25 bp, Homo sapien
tccgtggagtgcagcccttgtagac

SEQ ID NO: 3025276 - DNA, 25 bp, Homo sapien
aaggtccggtgtccaaagagcagca

SEQ ID NO: 3025277 - DNA, 25 bp, Homo sapien
gtttccggtggagaaaaagctcaca

SEQ ID NO: 3025278 - DNA, 25 bp, Homo sapien
tttggagagtttccgtggcagagcc

SEQ ID NO: 3025279 - DNA, 25 bp, Homo sapien
tgccggcggaaccatgtgaaggcca

SEQ ID NO: 3025280 - DNA, 25 bp, Homo sapien
tggccacagtacagctgcgatgccg

SEQ ID NO: 3025281 - DNA, 25 bp, Homo sapien
tgtttgctaggcacacacgactcac

SEQ ID NO: 3025282 - DNA, 25 bp, Homo sapien
ctcagtaggtgcactccgagaggga

SEQ ID NO: 3025283 - DNA, 25 bp, Homo sapien
tgtctcaccggccatgtcctgagtg

SEQ ID NO: 3025284 - DNA, 25 bp, Homo sapien
gacaggcagcgggagaggaaacaga

SEQ ID NO: 3025285 - DNA, 25 bp, Homo sapien
ggctgcttagctgcacgagctgctc

SEQ ID NO: 3025286 - DNA, 25 bp, Homo sapien
agatacggctgagcacgagtggtca

SEQ ID NO: 3025287 - DNA, 25 bp, Homo sapien
cctgtcctcctgctgagatacggct

SEQ ID NO: 3025288 - DNA, 25 bp, Homo sapien
ttagctgcacgagctgctccggcac

SEQ ID NO: 3025289 - DNA, 25 bp, Homo sapien
ccacttgctcccctgctcagagtac

SEQ ID NO: 3025290 - DNA, 25 bp, Homo sapien
actcggcctccacttgctcccctgc

SEQ ID NO: 3025291 - DNA, 25 bp, Homo sapien
tcggcctccacttgctcccctgctc

SEQ ID NO: 3025292 - DNA, 25 bp, Homo sapien
gcctccacttgctcccctgctcaga

SEQ ID NO: 3025293 - DNA, 25 bp, Homo sapien
agaactgcgcctccaaagtgccttc

SEQ ID NO: 3025294 - DNA, 25 bp, Homo sapien
tagcgctcctcatcgcagaactgcg

SEQ ID NO: 3025295 - DNA, 25 bp, Homo sapien
tgagtcgtagcgctcctcatcgcag

SEQ ID NO: 3025296 - DNA, 25 bp, Homo sapien
ccctgccctgctttgagtcgtagcg

SEQ ID NO: 3025297 - DNA, 25 bp, Homo sapien
gcagaatcacgcttccaccgtccac

SEQ ID NO: 3025298 - DNA, 25 bp, Homo sapien
ctcagcagaatcacgcttccaccgt

SEQ ID NO: 3025299 - DNA, 25 bp, Homo sapien
tgacactcagcagaatcacgcttcc

SEQ ID NO: 3025300 - DNA, 25 bp, Homo sapien
gacactcagcagaatcacgcttcca

SEQ ID NO: 3025301 - DNA, 25 bp, Homo sapien
aggctgctgccaaatgggtcaggca

SEQ ID NO: 3025302 - DNA, 25 bp, Homo sapien
tggtggcagacacccttgaagacct

SEQ ID NO: 3025303 - DNA, 25 bp, Homo sapien
ggcagacacccttgaagacctggcg

SEQ ID NO: 3025304 - DNA, 25 bp, Homo sapien
gtggcagacacccttgaagacctgg

SEQ ID NO: 3025305 - DNA, 25 bp, Homo sapien
ggtggtggcagacacccttgaagac

SEQ ID NO: 3025306 - DNA, 25 bp, Homo sapien
ttttttgcggaagggtctcattctg

SEQ ID NO: 3025307 - DNA, 25 bp, Homo sapien
ggtctcattctgttgcccaggctgg

SEQ ID NO: 3025308 - DNA, 25 bp, Homo sapien
cagaattctgggcagcgtgaggtca

SEQ ID NO: 3025309 - DNA, 25 bp, Homo sapien
aaagcacttgtcagacgagagctct

SEQ ID NO: 3025310 - DNA, 25 bp, Homo sapien
gcacttagctttgcggtcaccggag

SEQ ID NO: 3025311 - DNA, 25 bp, Homo sapien
gaggcctctcagaattcgcattaca

SEQ ID NO: 3025312 - DNA, 25 bp, Homo sapien
gaaaacaaactggtttgagtgtgtc

SEQ ID NO: 3025313 - DNA, 25 bp, Homo sapien
aaacaaactggtttgagtgtgtctc

SEQ ID NO: 3025314 - DNA, 25 bp, Homo sapien
agaaaacaaactggtttgagtgtgt

SEQ ID NO: 3025315 - DNA, 25 bp, Homo sapien
aacaaactggtttgagtgtgtctca

SEQ ID NO: 3025316 - DNA, 25 bp, Homo sapien
agctttccagaacccacataggaag

SEQ ID NO: 3025317 - DNA, 25 bp, Homo sapien
tcaaattccctgatgtggtagagtg

SEQ ID NO: 3025318 - DNA, 25 bp, Homo sapien
cccacataggaagccgaaatgccct

SEQ ID NO: 3025319 - DNA, 25 bp, Homo sapien
cagtattcaaattccctgatgtggt

SEQ ID NO: 3025320 - DNA, 25 bp, Homo sapien
gctgagtcccagacctggacagtga

SEQ ID NO: 3025321 - DNA, 25 bp, Homo sapien
taaagaggccactaagtaagggcac

SEQ ID NO: 3025322 - DNA, 25 bp, Homo sapien
taagggcactctaaataaacaaagc

SEQ ID NO: 3025323 - DNA, 25 bp, Homo sapien
tagcaccgtggagaattaaagaggc

SEQ ID NO: 3025324 - DNA, 25 bp, Homo sapien
tgctccccaaatcgaggcccgcggg

SEQ ID NO: 3025325 - DNA, 25 bp, Homo sapien
ccgcgggacacctggactcggcagc

SEQ ID NO: 3025326 - DNA, 25 bp, Homo sapien
agccccgcccctgactgcgctgggt

SEQ ID NO: 3025327 - DNA, 25 bp, Homo sapien
cctgactgcgctgggtaggtggtcg

SEQ ID NO: 3025328 - DNA, 25 bp, Homo sapien
aagcccacggcagggatgtcacccg

SEQ ID NO: 3025329 - DNA, 25 bp, Homo sapien
aggagcgaccacactcactcgcggt

SEQ ID NO: 3025330 - DNA, 25 bp, Homo sapien
ggaccggcggaatcacacccagagc

SEQ ID NO: 3025331 - DNA, 25 bp, Homo sapien
tctcaagcccgggttcaggctctca

SEQ ID NO: 3025332 - DNA, 25 bp, Homo sapien
cgcggcgcccgtgggaggttggttg

SEQ ID NO: 3025333 - DNA, 25 bp, Homo sapien
ggttgcagaactcggaaccgctgtg

SEQ ID NO: 3025334 - DNA, 25 bp, Homo sapien
tcacgtgacgcggagaaggcgcggc

SEQ ID NO: 3025335 - DNA, 25 bp, Homo sapien
agtatggaaggtgcgggagacggcc

SEQ ID NO: 3025336 - DNA, 25 bp, Homo sapien
tcacttccaaggcatcagttgccag

SEQ ID NO: 3025337 - DNA, 25 bp, Homo sapien
aaactgatcaatcacttccaaggca

SEQ ID NO: 3025338 - DNA, 25 bp, Homo sapien
tatagctgagtatccaaactgatca

SEQ ID NO: 3025339 - DNA, 25 bp, Homo sapien
ggcttcattatagctgagtatccaa

SEQ ID NO: 3025340 - DNA, 25 bp, Homo sapien
tatagtcacgactgacaagtactag

SEQ ID NO: 3025341 - DNA, 25 bp, Homo sapien
caagtactagcagttcacagacaca

SEQ ID NO: 3025342 - DNA, 25 bp, Homo sapien
cagatccagataatgagaagctaat

SEQ ID NO: 3025343 - DNA, 25 bp, Homo sapien
caaactataggcttcaggtcagacc

SEQ ID NO: 3025344 - DNA, 25 bp, Homo sapien
ccagggctaaatcagtaaatcctag

SEQ ID NO: 3025345 - DNA, 25 bp, Homo sapien
gggctaaatcagtaaatcctagtcc

SEQ ID NO: 3025346 - DNA, 25 bp, Homo sapien
gctaaatcagtaaatcctagtccaa

SEQ ID NO: 3025347 - DNA, 25 bp, Homo sapien
ttccagggctaaatcagtaaatcct

SEQ ID NO: 3025348 - DNA, 25 bp, Homo sapien
ctaaaatccagctatttctgttcac

SEQ ID NO: 3025349 - DNA, 25 bp, Homo sapien
tcctaaaatccagctatttctgttc

SEQ ID NO: 3025350 - DNA, 25 bp, Homo sapien
gaagacacattaatgttcaagcaac

SEQ ID NO: 3025351 - DNA, 25 bp, Homo sapien
atacagaagacacattaatgttcaa

SEQ ID NO: 3025352 - DNA, 25 bp, Homo sapien
ggataaataaatccacgacagactt

SEQ ID NO: 3025353 - DNA, 25 bp, Homo sapien
tgcagtaacaataatctgaggataa

SEQ ID NO: 3025354 - DNA, 25 bp, Homo sapien
cagtaacaataatctgaggataaat

SEQ ID NO: 3025355 - DNA, 25 bp, Homo sapien
taaataaatccacgacagactttaa

SEQ ID NO: 3025356 - DNA, 25 bp, Homo sapien
acaggactgaagatgtcaaaacaaa

SEQ ID NO: 3025357 - DNA, 25 bp, Homo sapien
cacaggactgaagatgtcaaaacaa

SEQ ID NO: 3025358 - DNA, 25 bp, Homo sapien
ctctgctgccctccgaacacttgtc

SEQ ID NO: 3025359 - DNA, 25 bp, Homo sapien
tgccctccgaacacttgtcactggc

SEQ ID NO: 3025360 - DNA, 25 bp, Homo sapien
tcaagaataactggatggtttgttt

SEQ ID NO: 3025361 - DNA, 25 bp, Homo sapien
caagaataactggatggtttgtttc

SEQ ID NO: 3025362 - DNA, 25 bp, Homo sapien
agaataactggatggtttgtttcct

SEQ ID NO: 3025363 - DNA, 25 bp, Homo sapien
ccaataagcacaccagttgccctgt

SEQ ID NO: 3025364 - DNA, 25 bp, Homo sapien
catgaccgtactggtaaggttttca

SEQ ID NO: 3025365 - DNA, 25 bp, Homo sapien
caactagtatttctccatgaccgta

SEQ ID NO: 3025366 - DNA, 25 bp, Homo sapien
gaaccaccctaagcatccctaagtg

SEQ ID NO: 3025367 - DNA, 25 bp, Homo sapien
tcctgtgcctgatgtgacaacaccc

SEQ ID NO: 3025368 - DNA, 25 bp, Homo sapien
agttcctgtgcctgatgtgacaaca

SEQ ID NO: 3025369 - DNA, 25 bp, Homo sapien
tagttcctgtgcctgatgtgacaac

SEQ ID NO: 3025370 - DNA, 25 bp, Homo sapien
tgtgcctgatgtgacaacacccctc

SEQ ID NO: 3025371 - DNA, 25 bp, Homo sapien
tcttgtaataagggaaccctcatca

SEQ ID NO: 3025372 - DNA, 25 bp, Homo sapien
ttcttgtaataagggaaccctcatc

SEQ ID NO: 3025373 - DNA, 25 bp, Homo sapien
gagggttcactgtgatctcctggtc

SEQ ID NO: 3025374 - DNA, 25 bp, Homo sapien
ttttgtacaaactgagggttcactg

SEQ ID NO: 3025375 - DNA, 25 bp, Homo sapien
ttgtacaaactgagggttcactgtg

SEQ ID NO: 3025376 - DNA, 25 bp, Homo sapien
gggttcactgtgatctcctggtcca

SEQ ID NO: 3025377 - DNA, 25 bp, Homo sapien
aatctcttgatgtgaaacccctggg

SEQ ID NO: 3025378 - DNA, 25 bp, Homo sapien
cggcgggtttaggtcagctgcatcc

SEQ ID NO: 3025379 - DNA, 25 bp, Homo sapien
tgaagactagacaccatttcaggtg

SEQ ID NO: 3025380 - DNA, 25 bp, Homo sapien
taacttacactgttcacaagggtgc

SEQ ID NO: 3025381 - DNA, 25 bp, Homo sapien
gaaactgaccataccgtccttctgg

SEQ ID NO: 3025382 - DNA, 25 bp, Homo sapien
gatcaatgttatgaagcatggctgg

SEQ ID NO: 3025383 - DNA, 25 bp, Homo sapien
gcatggctgggttattatatttttc

SEQ ID NO: 3025384 - DNA, 25 bp, Homo sapien
ggttaatacttgcaaaaatctcacc

SEQ ID NO: 3025385 - DNA, 25 bp, Homo sapien
tcttgtaatgatagagttaaaaagg

SEQ ID NO: 3025386 - DNA, 25 bp, Homo sapien
cacgacttgccatatcttgtaatga

SEQ ID NO: 3025387 - DNA, 25 bp, Homo sapien
tgaggtccagacaactgcacacgac

SEQ ID NO: 3025388 - DNA, 25 bp, Homo sapien
gacaactgcacacgacttgccatat

SEQ ID NO: 3025389 - DNA, 25 bp, Homo sapien
tcagaagcagaattagtcacaggta

SEQ ID NO: 3025390 - DNA, 25 bp, Homo sapien
aaatgtgtacagagcggccaggcgt

SEQ ID NO: 3025391 - DNA, 25 bp, Homo sapien
tattaaatgtgtacagagcggccag

SEQ ID NO: 3025392 - DNA, 25 bp, Homo sapien
ttaaatgtgtacagagcggccaggc

SEQ ID NO: 3025393 - DNA, 25 bp, Homo sapien
tgttgttatcgcgagtgaaggtttc

SEQ ID NO: 3025394 - DNA, 25 bp, Homo sapien
cttataaagagatgacaagcattgc

SEQ ID NO: 3025395 - DNA, 25 bp, Homo sapien
tattcaccaggtttcggagttctga

SEQ ID NO: 3025396 - DNA, 25 bp, Homo sapien
taactcgtggtatgcattgctaaga

SEQ ID NO: 3025397 - DNA, 25 bp, Homo sapien
tacaaaattaactgagcgtgatagc

SEQ ID NO: 3025398 - DNA, 25 bp, Homo sapien
aaattaactgagcgtgatagcacat

SEQ ID NO: 3025399 - DNA, 25 bp, Homo sapien
caaaattaactgagcgtgatagcac

SEQ ID NO: 3025400 - DNA, 25 bp, Homo sapien
aattaactgagcgtgatagcacatg

SEQ ID NO: 3025401 - DNA, 25 bp, Homo sapien
tctttctcacacctcaccagatgca

SEQ ID NO: 3025402 - DNA, 25 bp, Homo sapien
tctctttctcacacctcaccagatg

SEQ ID NO: 3025403 - DNA, 25 bp, Homo sapien
aaggcacacgtcttcatcagtgctt

SEQ ID NO: 3025404 - DNA, 25 bp, Homo sapien
accagatgcaacaggacaatctgct

SEQ ID NO: 3025405 - DNA, 25 bp, Homo sapien
tctgggaggcagacgcagaaggact

SEQ ID NO: 3025406 - DNA, 25 bp, Homo sapien
ctctgggaggcagacgcagaaggac

SEQ ID NO: 3025407 - DNA, 25 bp, Homo sapien
tgatatgactgaccgccatggcagg

SEQ ID NO: 3025408 - DNA, 25 bp, Homo sapien
ggtagctgttgtactttgccaagta

SEQ ID NO: 3025409 - DNA, 25 bp, Homo sapien
gaatctacccacaatttgagatgta

SEQ ID NO: 3025410 - DNA, 25 bp, Homo sapien
tgccaagtaatatcaaagacactaa

SEQ ID NO: 3025411 - DNA, 25 bp, Homo sapien
cataaaaagtgttttgcatcatagg

SEQ ID NO: 3025412 - DNA, 25 bp, Homo sapien
gttttgcatcataggctccattctc

SEQ ID NO: 3025413 - DNA, 25 bp, Homo sapien
catatccacgtcaagatatggaagg

SEQ ID NO: 3025414 - DNA, 25 bp, Homo sapien
ttcaaagttcttcagcccagtatag

SEQ ID NO: 3025415 - DNA, 25 bp, Homo sapien
tgtctatggcttgcttaaggatgcc

SEQ ID NO: 3025416 - DNA, 25 bp, Homo sapien
gtctatggcttgcttaaggatgcca

SEQ ID NO: 3025417 - DNA, 25 bp, Homo sapien
tcttgtctatggcttgcttaaggat

SEQ ID NO: 3025418 - DNA, 25 bp, Homo sapien
ttgtctatggcttgcttaaggatgc

SEQ ID NO: 3025419 - DNA, 25 bp, Homo sapien
gttctcaaagatggcagcacattgg

SEQ ID NO: 3025420 - DNA, 25 bp, Homo sapien
ttactaccaaaactaacaccataga

SEQ ID NO: 3025421 - DNA, 25 bp, Homo sapien
caccatagatttcaaaaggactgtt

SEQ ID NO: 3025422 - DNA, 25 bp, Homo sapien
agatttcaaaaggactgtttcctgc

SEQ ID NO: 3025423 - DNA, 25 bp, Homo sapien
ctaacaccatagatttcaaaaggac

SEQ ID NO: 3025424 - DNA, 25 bp, Homo sapien
agctttttcaaaaactcatgatttt

SEQ ID NO: 3025425 - DNA, 25 bp, Homo sapien
caaacatggttacttagtactacaa

SEQ ID NO: 3025426 - DNA, 25 bp, Homo sapien
tcttaaccatctctttcaaacatgg

SEQ ID NO: 3025427 - DNA, 25 bp, Homo sapien
taaaaatagctcaataacttacagc

SEQ ID NO: 3025428 - DNA, 25 bp, Homo sapien
gtgcatttgttagctgatggcaaag

SEQ ID NO: 3025429 - DNA, 25 bp, Homo sapien
agtgcatttgttagctgatggcaaa

SEQ ID NO: 3025430 - DNA, 25 bp, Homo sapien
atataaccacaagggcaaaatattt

SEQ ID NO: 3025431 - DNA, 25 bp, Homo sapien
tattttcaatggagaataaaatgtt

SEQ ID NO: 3025432 - DNA, 25 bp, Homo sapien
tttcaatggagaataaaatgttatt

SEQ ID NO: 3025433 - DNA, 25 bp, Homo sapien
aaatataaatataaccacaagggca

SEQ ID NO: 3025434 - DNA, 25 bp, Homo sapien
tagcgtttcgaagtcaggaacactg

SEQ ID NO: 3025435 - DNA, 25 bp, Homo sapien
ctgatgaagagctgaacctgtgaga

SEQ ID NO: 3025436 - DNA, 25 bp, Homo sapien
tctgttgcatatcgaatgtgctccc

SEQ ID NO: 3025437 - DNA, 25 bp, Homo sapien
tgtgctccccattacaagtgctgat

SEQ ID NO: 3025438 - DNA, 25 bp, Homo sapien
taagttcttcgcaaggagttcccca

SEQ ID NO: 3025439 - DNA, 25 bp, Homo sapien
agcaaggacgcccaaggagtgttct

SEQ ID NO: 3025440 - DNA, 25 bp, Homo sapien
gttcttgtacatccagagccccgag

SEQ ID NO: 3025441 - DNA, 25 bp, Homo sapien
ccgagcacagtgtccagatgggata

SEQ ID NO: 3025442 - DNA, 25 bp, Homo sapien
aataggcgcacaggttcccgagcgt

SEQ ID NO: 3025443 - DNA, 25 bp, Homo sapien
tccgcagcattctgtaggaccaaaa

SEQ ID NO: 3025444 - DNA, 25 bp, Homo sapien
gagcgagagcttccgcagcattctg

SEQ ID NO: 3025445 - DNA, 25 bp, Homo sapien
taggaccaaaataggcgcacaggtt

SEQ ID NO: 3025446 - DNA, 25 bp, Homo sapien
acactgttcacgaactgctccaggg

SEQ ID NO: 3025447 - DNA, 25 bp, Homo sapien
ctgagagctgtcggacactgttcac

SEQ ID NO: 3025448 - DNA, 25 bp, Homo sapien
gacactgttcacgaactgctccagg

SEQ ID NO: 3025449 - DNA, 25 bp, Homo sapien
cggacactgttcacgaactgctcca

SEQ ID NO: 3025450 - DNA, 25 bp, Homo sapien
ggcccgagcggcgaaggcagcacgc

SEQ ID NO: 3025451 - DNA, 25 bp, Homo sapien
acgcgcgggaaaaggctgccgctct

SEQ ID NO: 3025452 - DNA, 25 bp, Homo sapien
gcgaaggcagcacgcgcgggaaaag

SEQ ID NO: 3025453 - DNA, 25 bp, Homo sapien
cagcacgcgcgggaaaaggctgccg

SEQ ID NO: 3025454 - DNA, 25 bp, Homo sapien
cattttgacttatgtacacactgtt

SEQ ID NO: 3025455 - DNA, 25 bp, Homo sapien
ccatcttctcaatcaaggtagtgaa

SEQ ID NO: 3025456 - DNA, 25 bp, Homo sapien
gaatacatccatcactcctcaaagg

SEQ ID NO: 3025457 - DNA, 25 bp, Homo sapien
ggtataattgaccaacagaaaatgc

SEQ ID NO: 3025458 - DNA, 25 bp, Homo sapien
cgatttcgaaaacgtgcctggcacc

SEQ ID NO: 3025459 - DNA, 25 bp, Homo sapien
cagacccgatgtatctgtccctggg

SEQ ID NO: 3025460 - DNA, 25 bp, Homo sapien
cagctggagtttcactgggtggcca

SEQ ID NO: 3025461 - DNA, 25 bp, Homo sapien
gagtgagatgaacgacatggcctca

SEQ ID NO: 3025462 - DNA, 25 bp, Homo sapien
acaaggccctcacagagcagatcat

SEQ ID NO: 3025463 - DNA, 25 bp, Homo sapien
ggctgacaaggccctcacagagcag

SEQ ID NO: 3025464 - DNA, 25 bp, Homo sapien
gcaggctgacaaggccctcacagag

SEQ ID NO: 3025465 - DNA, 25 bp, Homo sapien
ctgacaaggccctcacagagcagat

SEQ ID NO: 3025466 - DNA, 25 bp, Homo sapien
tactccctgtaggacttaggctaaa

SEQ ID NO: 3025467 - DNA, 25 bp, Homo sapien
gacttaggctaaaagacttggcact

SEQ ID NO: 3025468 - DNA, 25 bp, Homo sapien
ccagttgctccagtacgttttccag

SEQ ID NO: 3025469 - DNA, 25 bp, Homo sapien
tggcatgtaaagaaaccctaggttc

SEQ ID NO: 3025470 - DNA, 25 bp, Homo sapien
tagtagccaccgatgattgtttaaa

SEQ ID NO: 3025471 - DNA, 25 bp, Homo sapien
tatggcttcagttgttgttacttgt

SEQ ID NO: 3025472 - DNA, 25 bp, Homo sapien
ctgtaatatcagttgtagtgtttcc

SEQ ID NO: 3025473 - DNA, 25 bp, Homo sapien
taatgtattggcatgtagttgccca

SEQ ID NO: 3025474 - DNA, 25 bp, Homo sapien
catgtgaggaaagcttctgatcctt

SEQ ID NO: 3025475 - DNA, 25 bp, Homo sapien
tccagtccacggcagtgccattccc

SEQ ID NO: 3025476 - DNA, 25 bp, Homo sapien
accccgtggggtcgtcaggccagat

SEQ ID NO: 3025477 - DNA, 25 bp, Homo sapien
tgaggccatgcatgtgaggaaagct

SEQ ID NO: 3025478 - DNA, 25 bp, Homo sapien
ccatgtgcacgtgcgcaaagctcgt

SEQ ID NO: 3025479 - DNA, 25 bp, Homo sapien
tgtgcacgtgcgcaaagctcgttgg

SEQ ID NO: 3025480 - DNA, 25 bp, Homo sapien
aggttccagacttccacttgcgtgt

SEQ ID NO: 3025481 - DNA, 25 bp, Homo sapien
gcgtgtgtcagaaacgcagctcaaa

SEQ ID NO: 3025482 - DNA, 25 bp, Homo sapien
gcagatgatgtcgtagaaagggccc

SEQ ID NO: 3025483 - DNA, 25 bp, Homo sapien
ggttgcagatgatgtcgtagaaagg

SEQ ID NO: 3025484 - DNA, 25 bp, Homo sapien
agatgatgtcgtagaaagggcccag

SEQ ID NO: 3025485 - DNA, 25 bp, Homo sapien
ttgcagatgatgtcgtagaaagggc

SEQ ID NO: 3025486 - DNA, 25 bp, Homo sapien
tggcgctgccatcgacttgctgtgt

SEQ ID NO: 3025487 - DNA, 25 bp, Homo sapien
gattctgttacacctgcgcctcatt

SEQ ID NO: 3025488 - DNA, 25 bp, Homo sapien
gctgtgtgactgttctctgagccga

SEQ ID NO: 3025489 - DNA, 25 bp, Homo sapien
gcatcatggtgtcaaccccaggaaa

SEQ ID NO: 3025490 - DNA, 25 bp, Homo sapien
gtctttaccggcgctttctgcacaa

SEQ ID NO: 3025491 - DNA, 25 bp, Homo sapien
ctgtctttaccggcgctttctgcac

SEQ ID NO: 3025492 - DNA, 25 bp, Homo sapien
tctttaccggcgctttctgcacaag

SEQ ID NO: 3025493 - DNA, 25 bp, Homo sapien
tttaccggcgctttctgcacaagcc

SEQ ID NO: 3025494 - DNA, 25 bp, Homo sapien
tctggttccaggctctcggacaaga

SEQ ID NO: 3025495 - DNA, 25 bp, Homo sapien
ggacggtcctgggatagcctgtgct

SEQ ID NO: 3025496 - DNA, 25 bp, Homo sapien
aacattcccatgagtcagcagagga

SEQ ID NO: 3025497 - DNA, 25 bp, Homo sapien
ccagcattgggaacatggggtctga

SEQ ID NO: 3025498 - DNA, 25 bp, Homo sapien
gggagaggccggacacccctgccat

SEQ ID NO: 3025499 - DNA, 25 bp, Homo sapien
cagggagaggccggacacccctgcc

SEQ ID NO: 3025500 - DNA, 25 bp, Homo sapien
ggctgggccagggagaggccggaca

SEQ ID NO: 3025501 - DNA, 25 bp, Homo sapien
tgggccagggagaggccggacaccc

SEQ ID NO: 3025502 - DNA, 25 bp, Homo sapien
gtgctggacggccaagctctcattc

SEQ ID NO: 3025503 - DNA, 25 bp, Homo sapien
tgctggacggccaagctctcattca

SEQ ID NO: 3025504 - DNA, 25 bp, Homo sapien
cgtggtgctggacggccaagctctc

SEQ ID NO: 3025505 - DNA, 25 bp, Homo sapien
ccacgtggtgctggacggccaagct

SEQ ID NO: 3025506 - DNA, 25 bp, Homo sapien
cagtgatcactcgagctttctcctt

SEQ ID NO: 3025507 - DNA, 25 bp, Homo sapien
cccgtatgccgaagagccgggcgtt

SEQ ID NO: 3025508 - DNA, 25 bp, Homo sapien
acgggccatacggagactagcgaag

SEQ ID NO: 3025509 - DNA, 25 bp, Homo sapien
gttggcacgggccatacggagacta

SEQ ID NO: 3025510 - DNA, 25 bp, Homo sapien
aaatgccgatggtccgggccacctt

SEQ ID NO: 3025511 - DNA, 25 bp, Homo sapien
gatccacagaaatgccgatggtccg

SEQ ID NO: 3025512 - DNA, 25 bp, Homo sapien
ccggcgcgcaccttcgtgtggtacc

SEQ ID NO: 3025513 - DNA, 25 bp, Homo sapien
cctcggatccacagaaatgccgatg

SEQ ID NO: 3025514 - DNA, 25 bp, Homo sapien
tgcggctcctgagcaggaaaacagc

SEQ ID NO: 3025515 - DNA, 25 bp, Homo sapien
cctgcggctcctgagcaggaaaaca

SEQ ID NO: 3025516 - DNA, 25 bp, Homo sapien
acggccctgcggctcctgagcagga

SEQ ID NO: 3025517 - DNA, 25 bp, Homo sapien
gccctgcggctcctgagcaggaaaa

SEQ ID NO: 3025518 - DNA, 25 bp, Homo sapien
tggaagaccaaactcaccacccaaa

SEQ ID NO: 3025519 - DNA, 25 bp, Homo sapien
cagaaacggaacacagcttgctcct

SEQ ID NO: 3025520 - DNA, 25 bp, Homo sapien
tcctctgttgatctgcctggaagac

SEQ ID NO: 3025521 - DNA, 25 bp, Homo sapien
cacaggatgggagcatcgccgtcct

SEQ ID NO: 3025522 - DNA, 25 bp, Homo sapien
gcacaggcctggcacccgcaggtgt

SEQ ID NO: 3025523 - DNA, 25 bp, Homo sapien
tggcacccgcaggtgttcacctgaa

SEQ ID NO: 3025524 - DNA, 25 bp, Homo sapien
gcccctagtggctggctgacgtctg

SEQ ID NO: 3025525 - DNA, 25 bp, Homo sapien
gggtgagcccctagtggctggctga

SEQ ID NO: 3025526 - DNA, 25 bp, Homo sapien
gtatctggccaaggctaccctttgg

SEQ ID NO: 3025527 - DNA, 25 bp, Homo sapien
tcaaaggcccgtggactaactccag

SEQ ID NO: 3025528 - DNA, 25 bp, Homo sapien
cagtgtcagcactaggacctccggt

SEQ ID NO: 3025529 - DNA, 25 bp, Homo sapien
ttaggacacggaggacaggcttgct

SEQ ID NO: 3025530 - DNA, 25 bp, Homo sapien
ctgaacccacctccctccctgacgg

SEQ ID NO: 3025531 - DNA, 25 bp, Homo sapien
gctgaacccacctccctccctgacg

SEQ ID NO: 3025532 - DNA, 25 bp, Homo sapien
gggctgaacccacctccctccctga

SEQ ID NO: 3025533 - DNA, 25 bp, Homo sapien
ggctgaacccacctccctccctgac

SEQ ID NO: 3025534 - DNA, 25 bp, Homo sapien
acggggccgctggccgggcagaggg

SEQ ID NO: 3025535 - DNA, 25 bp, Homo sapien
cggacggggccgctggccgggcaga

SEQ ID NO: 3025536 - DNA, 25 bp, Homo sapien
cagaaatgatgtccaaggctaggcc

SEQ ID NO: 3025537 - DNA, 25 bp, Homo sapien
tagaaagcatgagtaggcgccaaac

SEQ ID NO: 3025538 - DNA, 25 bp, Homo sapien
aagactaagtgttccagatgggcca

SEQ ID NO: 3025539 - DNA, 25 bp, Homo sapien
gaataggacccatctggcaaccagt

SEQ ID NO: 3025540 - DNA, 25 bp, Homo sapien
aaggcaggccttgatgttcacttgc

SEQ ID NO: 3025541 - DNA, 25 bp, Homo sapien
tcgtatgggttggtccccagctgcc

SEQ ID NO: 3025542 - DNA, 25 bp, Homo sapien
tgttcacttgccatatcaggtcccg

SEQ ID NO: 3025543 - DNA, 25 bp, Homo sapien
tggcttcctccgcatgttggattcg

SEQ ID NO: 3025544 - DNA, 25 bp, Homo sapien
caccatgcggtgaggttgggttgca

SEQ ID NO: 3025545 - DNA, 25 bp, Homo sapien
ggtgaggttgggttgcatccagcca

SEQ ID NO: 3025546 - DNA, 25 bp, Homo sapien
catgcggtgaggttgggttgcatcc

SEQ ID NO: 3025547 - DNA, 25 bp, Homo sapien
tgcggtgaggttgggttgcatccag

SEQ ID NO: 3025548 - DNA, 25 bp, Homo sapien
ttctgcggaatgacccatgcgatgg

SEQ ID NO: 3025549 - DNA, 25 bp, Homo sapien
gcttgtcacatggaagtccctcctg

SEQ ID NO: 3025550 - DNA, 25 bp, Homo sapien
gggatgggccactgacagatccctc

SEQ ID NO: 3025551 - DNA, 25 bp, Homo sapien
gcatttgcatcagattcactgctcc

SEQ ID NO: 3025552 - DNA, 25 bp, Homo sapien
caaggagcaggcatagaagaggcca

SEQ ID NO: 3025553 - DNA, 25 bp, Homo sapien
tcacctcgggccttcctcgccagca

SEQ ID NO: 3025554 - DNA, 25 bp, Homo sapien
gctgcagaagctctagcaactctct

SEQ ID NO: 3025555 - DNA, 25 bp, Homo sapien
tcttatgtcccaggggggtcgctgc

SEQ ID NO: 3025556 - DNA, 25 bp, Homo sapien
ggcagagttgttcttatgtcccagg

SEQ ID NO: 3025557 - DNA, 25 bp, Homo sapien
ttgggtctcggaatgggcgcataac

SEQ ID NO: 3025558 - DNA, 25 bp, Homo sapien
tagcagagcttccattagtgtagac

SEQ ID NO: 3025559 - DNA, 25 bp, Homo sapien
tagtgtagacctgtagccacctgtc

SEQ ID NO: 3025560 - DNA, 25 bp, Homo sapien
tgtgtgctctcccttgactgtcaga

SEQ ID NO: 3025561 - DNA, 25 bp, Homo sapien
gctctgacagataccacgaaacatg

SEQ ID NO: 3025562 - DNA, 25 bp, Homo sapien
tgaagcacgtggaactacaagaccc

SEQ ID NO: 3025563 - DNA, 25 bp, Homo sapien
gaaatttcacagtagtgggtgggcc

SEQ ID NO: 3025564 - DNA, 25 bp, Homo sapien
ctctggatttaagcgggtggtcacc

SEQ ID NO: 3025565 - DNA, 25 bp, Homo sapien
tcctccttaggttgtgtcgccagcg

SEQ ID NO: 3025566 - DNA, 25 bp, Homo sapien
gagaagataaatccaccctcggctg

SEQ ID NO: 3025567 - DNA, 25 bp, Homo sapien
acagacaagataatgccccgtgggt

SEQ ID NO: 3025568 - DNA, 25 bp, Homo sapien
gacggtttcttgaagcctagcagag

SEQ ID NO: 3025569 - DNA, 25 bp, Homo sapien
tcttgtgcagcacgtcgcagtactg

SEQ ID NO: 3025570 - DNA, 25 bp, Homo sapien
tacatgaggtcgctgtgtacgctgg

SEQ ID NO: 3025571 - DNA, 25 bp, Homo sapien
aagggtgccacgatgccaaaggcgt

SEQ ID NO: 3025572 - DNA, 25 bp, Homo sapien
gatgacgcagcgctccttgtccttg

SEQ ID NO: 3025573 - DNA, 25 bp, Homo sapien
gaagagcgcgcggaacatctggtcc

SEQ ID NO: 3025574 - DNA, 25 bp, Homo sapien
agagcgcgcggaacatctggtccag

SEQ ID NO: 3025575 - DNA, 25 bp, Homo sapien
ccatggcgaagagcgcgcggaacat

SEQ ID NO: 3025576 - DNA, 25 bp, Homo sapien
gcgcgcggaacatctggtccaggct

SEQ ID NO: 3025577 - DNA, 25 bp, Homo sapien
tcgaagtaggcgcagcgctgggggt

SEQ ID NO: 3025578 - DNA, 25 bp, Homo sapien
taggcgcagcgctgggggtcgtcgc

SEQ ID NO: 3025579 - DNA, 25 bp, Homo sapien
ctcgaagtaggcgcagcgctggggg

SEQ ID NO: 3025580 - DNA, 25 bp, Homo sapien
aagtaggcgcagcgctgggggtcgt

SEQ ID NO: 3025581 - DNA, 25 bp, Homo sapien
caagacttggtgtcgaggatctgct

SEQ ID NO: 3025582 - DNA, 25 bp, Homo sapien
cgctggtccacctcgcggtagaagt

SEQ ID NO: 3025583 - DNA, 25 bp, Homo sapien
tcctcgaaggagtcgcggttgtcca

SEQ ID NO: 3025584 - DNA, 25 bp, Homo sapien
gtagaagtcgcggtcacccttgttg

SEQ ID NO: 3025585 - DNA, 25 bp, Homo sapien
gggcgcgctagcctctctaagcgcg

SEQ ID NO: 3025586 - DNA, 25 bp, Homo sapien
tagcctctctaagcgcgaagcgcac

SEQ ID NO: 3025587 - DNA, 25 bp, Homo sapien
aagcgcactactcggcgcgcggcag

SEQ ID NO: 3025588 - DNA, 25 bp, Homo sapien
tctaagcgcgaagcgcactactcgg

SEQ ID NO: 3025589 - DNA, 25 bp, Homo sapien
gagtcgctcgggcacatcttcttga

SEQ ID NO: 3025590 - DNA, 25 bp, Homo sapien
ttggacgagccgaggatgaccatgc

SEQ ID NO: 3025591 - DNA, 25 bp, Homo sapien
tcgccgcggatggagtagaacttgc

SEQ ID NO: 3025592 - DNA, 25 bp, Homo sapien
catgcgatagcagttcttggccggg

SEQ ID NO: 3025593 - DNA, 25 bp, Homo sapien
gaagggcagagagcggctgagggtc

SEQ ID NO: 3025594 - DNA, 25 bp, Homo sapien
cagaggggccgcgagggcgggcgcg

SEQ ID NO: 3025595 - DNA, 25 bp, Homo sapien
cgggcgcggggccgagagaagggca

SEQ ID NO: 3025596 - DNA, 25 bp, Homo sapien
gagaagggcagagagcggctgaggg

SEQ ID NO: 3025597 - DNA, 25 bp, Homo sapien
gctgggcgcggctcgggcttggggc

SEQ ID NO: 3025598 - DNA, 25 bp, Homo sapien
gagggctctgctcgggctgggcgcg

SEQ ID NO: 3025599 - DNA, 25 bp, Homo sapien
ctggagggctctgctcgggctgggc

SEQ ID NO: 3025600 - DNA, 25 bp, Homo sapien
tggcacgcggggtgagcggctggag

SEQ ID NO: 3025601 - DNA, 25 bp, Homo sapien
agcagtccagggtcgggctgaggct

SEQ ID NO: 3025602 - DNA, 25 bp, Homo sapien
ggactccgcttttccactgccgcgg

SEQ ID NO: 3025603 - DNA, 25 bp, Homo sapien
gctggaggcgctcggactccgcttt

SEQ ID NO: 3025604 - DNA, 25 bp, Homo sapien
cggcgacctcgtcacccgctgccgg

SEQ ID NO: 3025605 - DNA, 25 bp, Homo sapien
tttgctgagtgcttgcgcggaccgt

SEQ ID NO: 3025606 - DNA, 25 bp, Homo sapien
cgcggaccgtatattgcagtcctca

SEQ ID NO: 3025607 - DNA, 25 bp, Homo sapien
gtaagtaacccagtaagcgcagcag

SEQ ID NO: 3025608 - DNA, 25 bp, Homo sapien
ccagccgggctcttgttcccgggag

SEQ ID NO: 3025609 - DNA, 25 bp, Homo sapien
ctcgggccgccagagggcagcagag

SEQ ID NO: 3025610 - DNA, 25 bp, Homo sapien
caggcgcggagctcggcaccgcgcg

SEQ ID NO: 3025611 - DNA, 25 bp, Homo sapien
gctcgggccgccagagggcagcaga

SEQ ID NO: 3025612 - DNA, 25 bp, Homo sapien
cgctcgggccgccagagggcagcag

SEQ ID NO: 3025613 - DNA, 25 bp, Homo sapien
ctagaacagaggctaggagcaggcg

SEQ ID NO: 3025614 - DNA, 25 bp, Homo sapien
ggatggagcaggggtctcagggcgc

SEQ ID NO: 3025615 - DNA, 25 bp, Homo sapien
gcaggacaccactaacttgtttctc

SEQ ID NO: 3025616 - DNA, 25 bp, Homo sapien
tgcaggacaccactaacttgtttct

SEQ ID NO: 3025617 - DNA, 25 bp, Homo sapien
caggacaccactaacttgtttctca

SEQ ID NO: 3025618 - DNA, 25 bp, Homo sapien
ctgcaggacaccactaacttgtttc

SEQ ID NO: 3025619 - DNA, 25 bp, Homo sapien
tcacacagtgagcatccaagggctc

SEQ ID NO: 3025620 - DNA, 25 bp, Homo sapien
cctggtgtcacttatgcagcagtta

SEQ ID NO: 3025621 - DNA, 25 bp, Homo sapien
gcagttatccgacaggctagctggg

SEQ ID NO: 3025622 - DNA, 25 bp, Homo sapien
cccatctgaggtatgtctgccagag

SEQ ID NO: 3025623 - DNA, 25 bp, Homo sapien
ttcagactgagcaccgccttcctgt

SEQ ID NO: 3025624 - DNA, 25 bp, Homo sapien
agcggcactgcatgggcagccgggc

SEQ ID NO: 3025625 - DNA, 25 bp, Homo sapien
gcagccgggctctaacttgggatga

SEQ ID NO: 3025626 - DNA, 25 bp, Homo sapien
ctaacttgggatgactgatggccag

SEQ ID NO: 3025627 - DNA, 25 bp, Homo sapien
agggagcacgtgtactgggcttccc

SEQ ID NO: 3025628 - DNA, 25 bp, Homo sapien
agcacgtgtactgggcttcccagca

SEQ ID NO: 3025629 - DNA, 25 bp, Homo sapien
gtggatcccggagtcccacagagag

SEQ ID NO: 3025630 - DNA, 25 bp, Homo sapien
accatccgccccgtggatcccggag

SEQ ID NO: 3025631 - DNA, 25 bp, Homo sapien
tgtgggttggagctcaatggccata

SEQ ID NO: 3025632 - DNA, 25 bp, Homo sapien
gccatatgtcggcacgtccagggtc

SEQ ID NO: 3025633 - DNA, 25 bp, Homo sapien
agcagcaggcaccattctcgccctg

SEQ ID NO: 3025634 - DNA, 25 bp, Homo sapien
tcaatggccatatgtcggcacgtcc

SEQ ID NO: 3025635 - DNA, 25 bp, Homo sapien
gacccggaggctttctgccggtaga

SEQ ID NO: 3025636 - DNA, 25 bp, Homo sapien
ggctttctgccggtagatctcagcg

SEQ ID NO: 3025637 - DNA, 25 bp, Homo sapien
tctgccggtagatctcagcggtgaa

SEQ ID NO: 3025638 - DNA, 25 bp, Homo sapien
ttgtgggacccggaggctttctgcc

SEQ ID NO: 3025639 - DNA, 25 bp, Homo sapien
agaggcttcggtcagcaggtcctgg

SEQ ID NO: 3025640 - DNA, 25 bp, Homo sapien
agcggggagaggcttcggtcagcag

SEQ ID NO: 3025641 - DNA, 25 bp, Homo sapien
gggagaggcttcggtcagcaggtcc

SEQ ID NO: 3025642 - DNA, 25 bp, Homo sapien
gcggggagaggcttcggtcagcagg

SEQ ID NO: 3025643 - DNA, 25 bp, Homo sapien
gagagacagggccagtcgggcagcc

SEQ ID NO: 3025644 - DNA, 25 bp, Homo sapien
ccacaaggaaaggttctagagggag

SEQ ID NO: 3025645 - DNA, 25 bp, Homo sapien
ggagagacagggccagtcgggcagc

SEQ ID NO: 3025646 - DNA, 25 bp, Homo sapien
tgagcctgccctggccacaaggaaa

SEQ ID NO: 3025647 - DNA, 25 bp, Homo sapien
cagcaccgtcaggagcaggcccgtg

SEQ ID NO: 3025648 - DNA, 25 bp, Homo sapien
tcttcgtataggagagccactatgt

SEQ ID NO: 3025649 - DNA, 25 bp, Homo sapien
tcgtataggagagccactatgtagg

SEQ ID NO: 3025650 - DNA, 25 bp, Homo sapien
ataggagagccactatgtaggtgag

SEQ ID NO: 3025651 - DNA, 25 bp, Homo sapien
gcactgccccttcctgagtctggct

SEQ ID NO: 3025652 - DNA, 25 bp, Homo sapien
ctggccctccggccgacgctgggcc

SEQ ID NO: 3025653 - DNA, 25 bp, Homo sapien
cctggccctccggccgacgctgggc

SEQ ID NO: 3025654 - DNA, 25 bp, Homo sapien
tggccctccggccgacgctgggcca

SEQ ID NO: 3025655 - DNA, 25 bp, Homo sapien
tggagcatcgccaggggctctttgc

SEQ ID NO: 3025656 - DNA, 25 bp, Homo sapien
agcaggcccaaggccggatggagca

SEQ ID NO: 3025657 - DNA, 25 bp, Homo sapien
ccaaggccggatggagcatcgccag

SEQ ID NO: 3025658 - DNA, 25 bp, Homo sapien
gcccaaggccggatggagcatcgcc

SEQ ID NO: 3025659 - DNA, 25 bp, Homo sapien
tcccacagctcccgcaggtgctggg

SEQ ID NO: 3025660 - DNA, 25 bp, Homo sapien
tctgatcccacagctcccgcaggtg

SEQ ID NO: 3025661 - DNA, 25 bp, Homo sapien
ctctgatcccacagctcccgcaggt

SEQ ID NO: 3025662 - DNA, 25 bp, Homo sapien
cacagctcccgcaggtgctgggctg

SEQ ID NO: 3025663 - DNA, 25 bp, Homo sapien
gagccaggtgtgttgggaaccctaa

SEQ ID NO: 3025664 - DNA, 25 bp, Homo sapien
tctaggcgagggaacagtgtgtgag

SEQ ID NO: 3025665 - DNA, 25 bp, Homo sapien
tcgtgcaggagggaacacttgacgt

SEQ ID NO: 3025666 - DNA, 25 bp, Homo sapien
gacgttgggtttggaaggactgaca

SEQ ID NO: 3025667 - DNA, 25 bp, Homo sapien
tgggaaggggtatctgccacatggg

SEQ ID NO: 3025668 - DNA, 25 bp, Homo sapien
ggaaggggtatctgccacatgggca

SEQ ID NO: 3025669 - DNA, 25 bp, Homo sapien
aaggggtatctgccacatgggcaga

SEQ ID NO: 3025670 - DNA, 25 bp, Homo sapien
ctgtgggaaggggtatctgccacat

SEQ ID NO: 3025671 - DNA, 25 bp, Homo sapien
gcccaggtagttggctgtgcttccc

SEQ ID NO: 3025672 - DNA, 25 bp, Homo sapien
ccccagtacatggggttgtccagga

SEQ ID NO: 3025673 - DNA, 25 bp, Homo sapien
ttccccagtacatggggttgtccag

SEQ ID NO: 3025674 - DNA, 25 bp, Homo sapien
tgaaggggaacacggtcactctcgc

SEQ ID NO: 3025675 - DNA, 25 bp, Homo sapien
gccatgtctgctggcagggccgcca

SEQ ID NO: 3025676 - DNA, 25 bp, Homo sapien
gctggtcctcggtgtttctaggcca

SEQ ID NO: 3025677 - DNA, 25 bp, Homo sapien
tgtttctaggccatgtctgctggca

SEQ ID NO: 3025678 - DNA, 25 bp, Homo sapien
tgctggtcctcggtgtttctaggcc

SEQ ID NO: 3025679 - DNA, 25 bp, Homo sapien
gctggagagcacgagcacgacgccc

SEQ ID NO: 3025680 - DNA, 25 bp, Homo sapien
ggagagcacgagcacgacgcccagt

SEQ ID NO: 3025681 - DNA, 25 bp, Homo sapien
cgaaccccagtgcaaagaagctgga

SEQ ID NO: 3025682 - DNA, 25 bp, Homo sapien
gaaagttccagcgaaccccagtgca

SEQ ID NO: 3025683 - DNA, 25 bp, Homo sapien
ctggctcagcatggcctgcgtgaag

SEQ ID NO: 3025684 - DNA, 25 bp, Homo sapien
cctgggctggctcagcatggcctgc

SEQ ID NO: 3025685 - DNA, 25 bp, Homo sapien
ggctggctcagcatggcctgcgtga

SEQ ID NO: 3025686 - DNA, 25 bp, Homo sapien
tgggctggctcagcatggcctgcgt

SEQ ID NO: 3025687 - DNA, 25 bp, Homo sapien
gtcccgtttctatctgcagccgacc

SEQ ID NO: 3025688 - DNA, 25 bp, Homo sapien
cctgactttgatcatcctggggtgt

SEQ ID NO: 3025689 - DNA, 25 bp, Homo sapien
ggtgtctccgcaacgtcgtccacat

SEQ ID NO: 3025690 - DNA, 25 bp, Homo sapien
tatctgcagccgaccagaaacactt

SEQ ID NO: 3025691 - DNA, 25 bp, Homo sapien
tgaggaagattcctgatcgacagcc

SEQ ID NO: 3025692 - DNA, 25 bp, Homo sapien
caggttgaggaagattcctgatcga

SEQ ID NO: 3025693 - DNA, 25 bp, Homo sapien
agcctctcccctcagaagacccaga

SEQ ID NO: 3025694 - DNA, 25 bp, Homo sapien
gaagattcctgatcgacagccacac

SEQ ID NO: 3025695 - DNA, 25 bp, Homo sapien
tgggcgggaaggatgggtcaccagg

SEQ ID NO: 3025696 - DNA, 25 bp, Homo sapien
tcacactggcaggtgtgggcgggaa

SEQ ID NO: 3025697 - DNA, 25 bp, Homo sapien
ggacatggcaggatagggtgcaggc

SEQ ID NO: 3025698 - DNA, 25 bp, Homo sapien
cagggacatggcaggatagggtgca

SEQ ID NO: 3025699 - DNA, 25 bp, Homo sapien
tttgtgccggccctgatggtggtcc

SEQ ID NO: 3025700 - DNA, 25 bp, Homo sapien
ctggatctgtgtgcgctgtgggctg

SEQ ID NO: 3025701 - DNA, 25 bp, Homo sapien
ctcctgctttgtgccggccctgatg

SEQ ID NO: 3025702 - DNA, 25 bp, Homo sapien
cctggatctgtgtgcgctgtgggct

SEQ ID NO: 3025703 - DNA, 25 bp, Homo sapien
ccctgctcagcttgcgggtcttgtg

SEQ ID NO: 3025704 - DNA, 25 bp, Homo sapien
cgcttagagagtagcaggccaggta

SEQ ID NO: 3025705 - DNA, 25 bp, Homo sapien
cagtgcgagcgcaggaagttcagga

SEQ ID NO: 3025706 - DNA, 25 bp, Homo sapien
gggtcttgtgttcccatcgtgcaac

SEQ ID NO: 3025707 - DNA, 25 bp, Homo sapien
gcagcatgaggacagcccatcgagg

SEQ ID NO: 3025708 - DNA, 25 bp, Homo sapien
cagcagcatgaggacagcccatcga

SEQ ID NO: 3025709 - DNA, 25 bp, Homo sapien
agcatgaggacagcccatcgaggca

SEQ ID NO: 3025710 - DNA, 25 bp, Homo sapien
tgggcatcccctaggccggccccga

SEQ ID NO: 3025711 - DNA, 25 bp, Homo sapien
caggtgcgactcatgctctgtgctc

SEQ ID NO: 3025712 - DNA, 25 bp, Homo sapien
tccaccaggtgcgactcatgctctg

SEQ ID NO: 3025713 - DNA, 25 bp, Homo sapien
tgcgactcatgctctgtgctccctg

SEQ ID NO: 3025714 - DNA, 25 bp, Homo sapien
tgcccgtccaccaggtgcgactcat

SEQ ID NO: 3025715 - DNA, 25 bp, Homo sapien
aatatttggcgagtggcagaatggt

SEQ ID NO: 3025716 - DNA, 25 bp, Homo sapien
acttcagcctgcctcggaaaggaaa

SEQ ID NO: 3025717 - DNA, 25 bp, Homo sapien
tttgaaaatatttggcgagtggcag

SEQ ID NO: 3025718 - DNA, 25 bp, Homo sapien
gcctgcctcggaaaggaaatttgaa

SEQ ID NO: 3025719 - DNA, 25 bp, Homo sapien
ctacacaggccgataagcagctggg

SEQ ID NO: 3025720 - DNA, 25 bp, Homo sapien
ctggctacacaggccgataagcagc

SEQ ID NO: 3025721 - DNA, 25 bp, Homo sapien
tggctacacaggccgataagcagct

SEQ ID NO: 3025722 - DNA, 25 bp, Homo sapien
gctacacaggccgataagcagctgg

SEQ ID NO: 3025723 - DNA, 25 bp, Homo sapien
gcatcgtggaccgtggcccgcagca

SEQ ID NO: 3025724 - DNA, 25 bp, Homo sapien
cagggagcatcgtggaccgtggccc

SEQ ID NO: 3025725 - DNA, 25 bp, Homo sapien
gggagcatcgtggaccgtggcccgc

SEQ ID NO: 3025726 - DNA, 25 bp, Homo sapien
gagcatcgtggaccgtggcccgcag

SEQ ID NO: 3025727 - DNA, 25 bp, Homo sapien
cagccccaagaccaccggccgcagc

SEQ ID NO: 3025728 - DNA, 25 bp, Homo sapien
gccccaagaccaccggccgcagcag

SEQ ID NO: 3025729 - DNA, 25 bp, Homo sapien
tgtccccacttagctcccaggagag

SEQ ID NO: 3025730 - DNA, 25 bp, Homo sapien
ccccacttagctcccaggagagaag

SEQ ID NO: 3025731 - DNA, 25 bp, Homo sapien
cagacacgggtccaagagaatcttc

SEQ ID NO: 3025732 - DNA, 25 bp, Homo sapien
gaaaggcgggcattttagccaccaa

SEQ ID NO: 3025733 - DNA, 25 bp, Homo sapien
cagcattcttaccaagggacctgga

SEQ ID NO: 3025734 - DNA, 25 bp, Homo sapien
ggcttcctttagtcctccgaacaga

SEQ ID NO: 3025735 - DNA, 25 bp, Homo sapien
agagcattctgatggacctcacccg

SEQ ID NO: 3025736 - DNA, 25 bp, Homo sapien
cgttgcatgctcctcacagtgttcc

SEQ ID NO: 3025737 - DNA, 25 bp, Homo sapien
gcttcaactcctacaccagagacgg

SEQ ID NO: 3025738 - DNA, 25 bp, Homo sapien
catgctgaagatcctcctcttgtgg

SEQ ID NO: 3025739 - DNA, 25 bp, Homo sapien
cagcgttcgtgacgtcagctaccaa

SEQ ID NO: 3025740 - DNA, 25 bp, Homo sapien
gcagcctataaacttgccaggtggg

SEQ ID NO: 3025741 - DNA, 25 bp, Homo sapien
gcacagacgctctggctggatccag

SEQ ID NO: 3025742 - DNA, 25 bp, Homo sapien
cagagggacaggtcacagcgttcgt

SEQ ID NO: 3025743 - DNA, 25 bp, Homo sapien
tgtcttggtggctagccaggcagcc

SEQ ID NO: 3025744 - DNA, 25 bp, Homo sapien
tgggtttggccgggctttgctctcc

SEQ ID NO: 3025745 - DNA, 25 bp, Homo sapien
gcatgtgtgggccacggcatgtcct

SEQ ID NO: 3025746 - DNA, 25 bp, Homo sapien
gaacccaccaggcagaatcaaatgg

SEQ ID NO: 3025747 - DNA, 25 bp, Homo sapien
ttttcagcccagcagacgggaggca

SEQ ID NO: 3025748 - DNA, 25 bp, Homo sapien
cagctatcgagggtatgccacagca

SEQ ID NO: 3025749 - DNA, 25 bp, Homo sapien
tattctagttcaaggtcgcaggtgg

SEQ ID NO: 3025750 - DNA, 25 bp, Homo sapien
tgttgaacgccatgcagaaggctgc

SEQ ID NO: 3025751 - DNA, 25 bp, Homo sapien
gatggaaagagcgtaggcaaccaca

SEQ ID NO: 3025752 - DNA, 25 bp, Homo sapien
cctcagggacctgtatccatggcca

SEQ ID NO: 3025753 - DNA, 25 bp, Homo sapien
tgtggtgccactgtcccagaatgac

SEQ ID NO: 3025754 - DNA, 25 bp, Homo sapien
gaatgacccctcacatgaaattgtg

SEQ ID NO: 3025755 - DNA, 25 bp, Homo sapien
tcaggaccggatctgggccggatcc

SEQ ID NO: 3025756 - DNA, 25 bp, Homo sapien
ccggatccacgagaggcgcttggag

SEQ ID NO: 3025757 - DNA, 25 bp, Homo sapien
aaggctggcgttccggcccattgga

SEQ ID NO: 3025758 - DNA, 25 bp, Homo sapien
gcccattggagtcggccgtgctgca

SEQ ID NO: 3025759 - DNA, 25 bp, Homo sapien
tgaccaccgtgacagtcacagtgga

SEQ ID NO: 3025760 - DNA, 25 bp, Homo sapien
tcacagtggaggcacggttagcact

SEQ ID NO: 3025761 - DNA, 25 bp, Homo sapien
atgactatgaggctgaccaccgtga

SEQ ID NO: 3025762 - DNA, 25 bp, Homo sapien
ccacgacagtggcaggagtgttgat

SEQ ID NO: 3025763 - DNA, 25 bp, Homo sapien
ttcgagcagacaattgcccctggcc

SEQ ID NO: 3025764 - DNA, 25 bp, Homo sapien
cacgctcaaaggctgttggggaaca

SEQ ID NO: 3025765 - DNA, 25 bp, Homo sapien
agctgcactcccttgatcccacgct

SEQ ID NO: 3025766 - DNA, 25 bp, Homo sapien
gggaacatgtgccttcgagcagaca

SEQ ID NO: 3025767 - DNA, 25 bp, Homo sapien
ttgtgactaggacagcctggccgag

SEQ ID NO: 3025768 - DNA, 25 bp, Homo sapien
aggctccaagatctgtctcagcagc

SEQ ID NO: 3025769 - DNA, 25 bp, Homo sapien
ctggccgaggctccaagatctgtct

SEQ ID NO: 3025770 - DNA, 25 bp, Homo sapien
cttgtgactaggacagcctggccga

SEQ ID NO: 3025771 - DNA, 25 bp, Homo sapien
ctcaggtacatggggcttctgggca

SEQ ID NO: 3025772 - DNA, 25 bp, Homo sapien
ggtacatggggcttctgggcagaca

SEQ ID NO: 3025773 - DNA, 25 bp, Homo sapien
gtacatggggcttctgggcagacac

SEQ ID NO: 3025774 - DNA, 25 bp, Homo sapien
caggtacatggggcttctgggcaga

SEQ ID NO: 3025775 - DNA, 25 bp, Homo sapien
ggtgttgttattggtgccagccatt

SEQ ID NO: 3025776 - DNA, 25 bp, Homo sapien
tggtctacatgggtgttgttattgg

SEQ ID NO: 3025777 - DNA, 25 bp, Homo sapien
ttccaataaccgcatccgcaggggc

SEQ ID NO: 3025778 - DNA, 25 bp, Homo sapien
ctcgcagggaggtaccatctctgag

SEQ ID NO: 3025779 - DNA, 25 bp, Homo sapien
agcccacctaagtctcactgtgcca

SEQ ID NO: 3025780 - DNA, 25 bp, Homo sapien
tgagcccacctaagtctcactgtgc

SEQ ID NO: 3025781 - DNA, 25 bp, Homo sapien
tctgagcccacctaagtctcactgt

SEQ ID NO: 3025782 - DNA, 25 bp, Homo sapien
tatctgagcccacctaagtctcact

SEQ ID NO: 3025783 - DNA, 25 bp, Homo sapien
cagccgggtccacagaaaggtggaa

SEQ ID NO: 3025784 - DNA, 25 bp, Homo sapien
tggaagtaggaggcccaacctactg

SEQ ID NO: 3025785 - DNA, 25 bp, Homo sapien
agccatgcttagcctgaaggccacc

SEQ ID NO: 3025786 - DNA, 25 bp, Homo sapien
gtacactttgtcaccacgttgctca

SEQ ID NO: 3025787 - DNA, 25 bp, Homo sapien
tcaggcaccacaattctaaagttag

SEQ ID NO: 3025788 - DNA, 25 bp, Homo sapien
tgttgtacactttgtcaccacgttg

SEQ ID NO: 3025789 - DNA, 25 bp, Homo sapien
taaagttagccctagcctgatagca

SEQ ID NO: 3025790 - DNA, 25 bp, Homo sapien
aacgagccatagaccgctggctggg

SEQ ID NO: 3025791 - DNA, 25 bp, Homo sapien
ctcacactaagggtggtaggcaggt

SEQ ID NO: 3025792 - DNA, 25 bp, Homo sapien
gcagcagcaaactcacactaagggt

SEQ ID NO: 3025793 - DNA, 25 bp, Homo sapien
gggcactcagaaacgagccatagac

SEQ ID NO: 3025794 - DNA, 25 bp, Homo sapien
ccggcccaatggagcgagaggtctt

SEQ ID NO: 3025795 - DNA, 25 bp, Homo sapien
ccccggcccaatggagcgagaggtc

SEQ ID NO: 3025796 - DNA, 25 bp, Homo sapien
acccccggcccaatggagcgagagg

SEQ ID NO: 3025797 - DNA, 25 bp, Homo sapien
aatggagcgagaggtcttgggcagg

SEQ ID NO: 3025798 - DNA, 25 bp, Homo sapien
atggacttgggtgtccccaagcaaa

SEQ ID NO: 3025799 - DNA, 25 bp, Homo sapien
ggacttgggtgtccccaagcaaaga

SEQ ID NO: 3025800 - DNA, 25 bp, Homo sapien
gacttgggtgtccccaagcaaagac

SEQ ID NO: 3025801 - DNA, 25 bp, Homo sapien
tggacttgggtgtccccaagcaaag

SEQ ID NO: 3025802 - DNA, 25 bp, Homo sapien
gagcaggctccgcttcaactctctt

SEQ ID NO: 3025803 - DNA, 25 bp, Homo sapien
agaagcagagcaggctccgcttcaa

SEQ ID NO: 3025804 - DNA, 25 bp, Homo sapien
ggctccgcttcaactctcttaggat

SEQ ID NO: 3025805 - DNA, 25 bp, Homo sapien
ccgcttcaactctcttaggatgctc

SEQ ID NO: 3025806 - DNA, 25 bp, Homo sapien
tagagtccgcgagggtacagatccg

SEQ ID NO: 3025807 - DNA, 25 bp, Homo sapien
tgatggcacgaagccaggtagagtc

SEQ ID NO: 3025808 - DNA, 25 bp, Homo sapien
cacgaagccaggtagagtccgcgag

SEQ ID NO: 3025809 - DNA, 25 bp, Homo sapien
cctcaagggtggctagagaggagca

SEQ ID NO: 3025810 - DNA, 25 bp, Homo sapien
atactcccgtctggacagtgtcagg

SEQ ID NO: 3025811 - DNA, 25 bp, Homo sapien
tgagatactcccgtctggacagtgt

SEQ ID NO: 3025812 - DNA, 25 bp, Homo sapien
aagcagtgagatactcccgtctgga

SEQ ID NO: 3025813 - DNA, 25 bp, Homo sapien
cagtgagatactcccgtctggacag

SEQ ID NO: 3025814 - DNA, 25 bp, Homo sapien
tccagtagagcggattgaaggtgat

SEQ ID NO: 3025815 - DNA, 25 bp, Homo sapien
cattccagtagagcggattgaaggt

SEQ ID NO: 3025816 - DNA, 25 bp, Homo sapien
tgggatccagggggtccacgtagcc

SEQ ID NO: 3025817 - DNA, 25 bp, Homo sapien
cacattccagtagagcggattgaag

SEQ ID NO: 3025818 - DNA, 25 bp, Homo sapien
gcagggacagagctagcatcagcac

SEQ ID NO: 3025819 - DNA, 25 bp, Homo sapien
tgcagggacagagctagcatcagca

SEQ ID NO: 3025820 - DNA, 25 bp, Homo sapien
aaaacaatagtggtgtgcctctcct

SEQ ID NO: 3025821 - DNA, 25 bp, Homo sapien
taaaacaatagtggtgtgcctctcc

SEQ ID NO: 3025822 - DNA, 25 bp, Homo sapien
tgcaccaagagtgagttatctccct

SEQ ID NO: 3025823 - DNA, 25 bp, Homo sapien
caccaagagtgagttatctccctgc

SEQ ID NO: 3025824 - DNA, 25 bp, Homo sapien
gaagtgcaccaagagtgagttatct

SEQ ID NO: 3025825 - DNA, 25 bp, Homo sapien
ccaagagtgagttatctccctgcat

SEQ ID NO: 3025826 - DNA, 25 bp, Homo sapien
agaggctttatggtaatttactcca

SEQ ID NO: 3025827 - DNA, 25 bp, Homo sapien
tgttaacaccccaaagcatgggtaa

SEQ ID NO: 3025828 - DNA, 25 bp, Homo sapien
cacaggtcaccgacgaatagcctca

SEQ ID NO: 3025829 - DNA, 25 bp, Homo sapien
ggaatagctcgagtcccacaggtca

SEQ ID NO: 3025830 - DNA, 25 bp, Homo sapien
caggcccagaaaagagctggtggag

SEQ ID NO: 3025831 - DNA, 25 bp, Homo sapien
ccagaaaagagctggtggagggcat

SEQ ID NO: 3025832 - DNA, 25 bp, Homo sapien
gcaggcccagaaaagagctggtgga

SEQ ID NO: 3025833 - DNA, 25 bp, Homo sapien
aggcccagaaaagagctggtggagg

SEQ ID NO: 3025834 - DNA, 25 bp, Homo sapien
attgccgaggcctccgcagcagtca

SEQ ID NO: 3025835 - DNA, 25 bp, Homo sapien
atcaatattgccgaggcctccgcag

SEQ ID NO: 3025836 - DNA, 25 bp, Homo sapien
caatattgccgaggcctccgcagca

SEQ ID NO: 3025837 - DNA, 25 bp, Homo sapien
taaaatcaatattgccgaggcctcc

SEQ ID NO: 3025838 - DNA, 25 bp, Homo sapien
ggctcccgggttcccagatctcttc

SEQ ID NO: 3025839 - DNA, 25 bp, Homo sapien
ctcggctcccgggttcccagatctc

SEQ ID NO: 3025840 - DNA, 25 bp, Homo sapien
cggctcccgggttcccagatctctt

SEQ ID NO: 3025841 - DNA, 25 bp, Homo sapien
ctcccgggttcccagatctcttcat

SEQ ID NO: 3025842 - DNA, 25 bp, Homo sapien
ccgcctcaggaggcaccacgcgggc

SEQ ID NO: 3025843 - DNA, 25 bp, Homo sapien
ggcaccacgcgggccccgctgcagc

SEQ ID NO: 3025844 - DNA, 25 bp, Homo sapien
ccgggggccgcctcaggaggcacca

SEQ ID NO: 3025845 - DNA, 25 bp, Homo sapien
cccgctgcagccacgcgcccccgga

SEQ ID NO: 3025846 - DNA, 25 bp, Homo sapien
cgcgggtcgtagctataagcagctt

SEQ ID NO: 3025847 - DNA, 25 bp, Homo sapien
ttggcccgggtcacacacgcccagg

SEQ ID NO: 3025848 - DNA, 25 bp, Homo sapien
gggccgcgggtcgtagctataagca

SEQ ID NO: 3025849 - DNA, 25 bp, Homo sapien
tcgtagctataagcagcttcccgcg

SEQ ID NO: 3025850 - DNA, 25 bp, Homo sapien
gacagcaggtactgcaggttatcag

SEQ ID NO: 3025851 - DNA, 25 bp, Homo sapien
acagcaggtactgcaggttatcaga

SEQ ID NO: 3025852 - DNA, 25 bp, Homo sapien
caacacaacttctctttgtgccttt

SEQ ID NO: 3025853 - DNA, 25 bp, Homo sapien
aacacaacttctctttgtgcctttt

SEQ ID NO: 3025854 - DNA, 25 bp, Homo sapien
acacaacttctctttgtgccttttt

SEQ ID NO: 3025855 - DNA, 25 bp, Homo sapien
cacaacttctctttgtgcctttttt

SEQ ID NO: 3025856 - DNA, 25 bp, Homo sapien
taggctgtgagcccacctagattcc

SEQ ID NO: 3025857 - DNA, 25 bp, Homo sapien
cccatcaccacgtaaatgagaatgt

SEQ ID NO: 3025858 - DNA, 25 bp, Homo sapien
agaatgtgatgggtgccccttttgg

SEQ ID NO: 3025859 - DNA, 25 bp, Homo sapien
tttggggttccataggccagtgaga

SEQ ID NO: 3025860 - DNA, 25 bp, Homo sapien
gtgcttgtgtaaggctcgacacaca

SEQ ID NO: 3025861 - DNA, 25 bp, Homo sapien
ccagggatagatcatgatgctcaga

SEQ ID NO: 3025862 - DNA, 25 bp, Homo sapien
catgtgtgcttgtgtaaggctcgac

SEQ ID NO: 3025863 - DNA, 25 bp, Homo sapien
agctccagggatagatcatgatgct

SEQ ID NO: 3025864 - DNA, 25 bp, Homo sapien
aggagccctcagccaaacgaccacc

SEQ ID NO: 3025865 - DNA, 25 bp, Homo sapien
gatcttcccctgcagaccgcccccg

SEQ ID NO: 3025866 - DNA, 25 bp, Homo sapien
accgcccccggcagtcagttccaca

SEQ ID NO: 3025867 - DNA, 25 bp, Homo sapien
gagccctcagccaaacgaccaccat

SEQ ID NO: 3025868 - DNA, 25 bp, Homo sapien
gggatggtcccaatcagatgctcag

SEQ ID NO: 3025869 - DNA, 25 bp, Homo sapien
acagtgtaggatcggtgaggccacc

SEQ ID NO: 3025870 - DNA, 25 bp, Homo sapien
gaaggccacccttattcaccgatga

SEQ ID NO: 3025871 - DNA, 25 bp, Homo sapien
tgaggccaccagcaaccattagcgt

SEQ ID NO: 3025872 - DNA, 25 bp, Homo sapien
gggacacccacacgttccagggatg

SEQ ID NO: 3025873 - DNA, 25 bp, Homo sapien
cactagggacagcatttaaggaacc

SEQ ID NO: 3025874 - DNA, 25 bp, Homo sapien
taaggaacccctagatagcccagga

SEQ ID NO: 3025875 - DNA, 25 bp, Homo sapien
tccgtgcttgtgttgtcgagtctcc

SEQ ID NO: 3025876 - DNA, 25 bp, Homo sapien
gcgctgacaccataggccccaagag

SEQ ID NO: 3025877 - DNA, 25 bp, Homo sapien
gctggtgagagctccccagaacagt

SEQ ID NO: 3025878 - DNA, 25 bp, Homo sapien
ccccaagagcctgtgaccatggctg

SEQ ID NO: 3025879 - DNA, 25 bp, Homo sapien
gaggagcacagagagacggatgggt

SEQ ID NO: 3025880 - DNA, 25 bp, Homo sapien
tttgagaccgaaggcaaggaaacca

SEQ ID NO: 3025881 - DNA, 25 bp, Homo sapien
gattgtggtctggcaggtagtgaag

SEQ ID NO: 3025882 - DNA, 25 bp, Homo sapien
ggaaaggaacaattgcttgggccac

SEQ ID NO: 3025883 - DNA, 25 bp, Homo sapien
gaacaattgcttgggccaccgtgag

SEQ ID NO: 3025884 - DNA, 25 bp, Homo sapien
gcaccagcatctggtgggggtcttc

SEQ ID NO: 3025885 - DNA, 25 bp, Homo sapien
ggggtcttcatgctgtatcatccca

SEQ ID NO: 3025886 - DNA, 25 bp, Homo sapien
gaagtccaagagtatggcaccagca

SEQ ID NO: 3025887 - DNA, 25 bp, Homo sapien
tggctcatgcttctgaagactggga

SEQ ID NO: 3025888 - DNA, 25 bp, Homo sapien
gaaggaagcccaagggtctctcctg

SEQ ID NO: 3025889 - DNA, 25 bp, Homo sapien
ttctctctgctagagaccagaggcc

SEQ ID NO: 3025890 - DNA, 25 bp, Homo sapien
tctctctgctagagaccagaggcct

SEQ ID NO: 3025891 - DNA, 25 bp, Homo sapien
ccttgcatcctattgagtgagccaa

SEQ ID NO: 3025892 - DNA, 25 bp, Homo sapien
cagtaaacgcccttgcatcctattg

SEQ ID NO: 3025893 - DNA, 25 bp, Homo sapien
aacgcccttgcatcctattgagtga

SEQ ID NO: 3025894 - DNA, 25 bp, Homo sapien
ctggccacagtaaacgcccttgcat

SEQ ID NO: 3025895 - DNA, 25 bp, Homo sapien
atgagttgaggcaagacagcattca

SEQ ID NO: 3025896 - DNA, 25 bp, Homo sapien
gaggcaagacagcattcagagggtc

SEQ ID NO: 3025897 - DNA, 25 bp, Homo sapien
gtaaaatgagttgaggcaagacagc

SEQ ID NO: 3025898 - DNA, 25 bp, Homo sapien
gagttgaggcaagacagcattcaga

SEQ ID NO: 3025899 - DNA, 25 bp, Homo sapien
ggccagaaaattgactctccttggg

SEQ ID NO: 3025900 - DNA, 25 bp, Homo sapien
cagtggccccagtcatgtaaacttg

SEQ ID NO: 3025901 - DNA, 25 bp, Homo sapien
tgagtggtgcctgagctatggctcc

SEQ ID NO: 3025902 - DNA, 25 bp, Homo sapien
ccttgtgtgggaaccagaaatctcc

SEQ ID NO: 3025903 - DNA, 25 bp, Homo sapien
ccgcccgtccgctcgtccgctcttc

SEQ ID NO: 3025904 - DNA, 25 bp, Homo sapien
ccgtccgctcgtccgctcttcctgt

SEQ ID NO: 3025905 - DNA, 25 bp, Homo sapien
gatcgcattcctcgcggcacccgcg

SEQ ID NO: 3025906 - DNA, 25 bp, Homo sapien
ctgtgcggaggggatcgcattcctc

SEQ ID NO: 3025907 - DNA, 25 bp, Homo sapien
cttcggggatgacgtcacgggcggg

SEQ ID NO: 3025908 - DNA, 25 bp, Homo sapien
gggagctctgtagcggccaggcccg

SEQ ID NO: 3025909 - DNA, 25 bp, Homo sapien
cagcccgccgcccttttcgaggccg

SEQ ID NO: 3025910 - DNA, 25 bp, Homo sapien
ttgcgccccacagacggcggcgcag

SEQ ID NO: 3025911 - DNA, 25 bp, Homo sapien
gagcagtgggtctcattcgggggcg

SEQ ID NO: 3025912 - DNA, 25 bp, Homo sapien
cagtgggtctcattcgggggcgatc

SEQ ID NO: 3025913 - DNA, 25 bp, Homo sapien
attcgggggcgatcttgtgtctcag

SEQ ID NO: 3025914 - DNA, 25 bp, Homo sapien
ttcactcattcaagggggctctgtg

SEQ ID NO: 3025915 - DNA, 25 bp, Homo sapien
cccgtttgaagcatagagcgtggta

SEQ ID NO: 3025916 - DNA, 25 bp, Homo sapien
tccatgtgccgagggttgagatccc

SEQ ID NO: 3025917 - DNA, 25 bp, Homo sapien
agtggccaagcagatggagcccctg

SEQ ID NO: 3025918 - DNA, 25 bp, Homo sapien
taggtgagcagacgttacagaaatg

SEQ ID NO: 3025919 - DNA, 25 bp, Homo sapien
tagtctgtttgagggaactccagcc

SEQ ID NO: 3025920 - DNA, 25 bp, Homo sapien
tatgatacctttgagacaagcacag

SEQ ID NO: 3025921 - DNA, 25 bp, Homo sapien
aaacagacgttttgccaaatcagac

SEQ ID NO: 3025922 - DNA, 25 bp, Homo sapien
caccgtggcccgaaatagcactaaa

SEQ ID NO: 3025923 - DNA, 25 bp, Homo sapien
gcaggatgtggctggagctggcttt

SEQ ID NO: 3025924 - DNA, 25 bp, Homo sapien
cccttggggtgacactgtcccctgg

SEQ ID NO: 3025925 - DNA, 25 bp, Homo sapien
agctggctttgttcccttggggtga

SEQ ID NO: 3025926 - DNA, 25 bp, Homo sapien
tgttcccttggggtgacactgtccc

SEQ ID NO: 3025927 - DNA, 25 bp, Homo sapien
ggttcctgacaggagggccaactga

SEQ ID NO: 3025928 - DNA, 25 bp, Homo sapien
ggccaactgagtgaaagcattggtg

SEQ ID NO: 3025929 - DNA, 25 bp, Homo sapien
ttgggtggtcctcgctaagtcttat

SEQ ID NO: 3025930 - DNA, 25 bp, Homo sapien
gaggcctggttcctctaatatgtga

SEQ ID NO: 3025931 - DNA, 25 bp, Homo sapien
catccattcgggagctaattcctgg

SEQ ID NO: 3025932 - DNA, 25 bp, Homo sapien
ttcgctcaggctgtgtagggcttcc

SEQ ID NO: 3025933 - DNA, 25 bp, Homo sapien
cccagcttggcagggtgcaataaaa

SEQ ID NO: 3025934 - DNA, 25 bp, Homo sapien
gaaggcttgcagtcagacagccatg

SEQ ID NO: 3025935 - DNA, 25 bp, Homo sapien
agccattgtcgaaggtcaggccacc

SEQ ID NO: 3025936 - DNA, 25 bp, Homo sapien
agccttcctgattgacaaacaaaac

SEQ ID NO: 3025937 - DNA, 25 bp, Homo sapien
ttctaagatgctgcgagggggctcc

SEQ ID NO: 3025938 - DNA, 25 bp, Homo sapien
aactggcaccctacattctaagatg

SEQ ID NO: 3025939 - DNA, 25 bp, Homo sapien
tgtgtggctgcagattggcggctca

SEQ ID NO: 3025940 - DNA, 25 bp, Homo sapien
tgaggcggcgcttgctgcaatggcc

SEQ ID NO: 3025941 - DNA, 25 bp, Homo sapien
gggttgccatgaggcggcgcttgct

SEQ ID NO: 3025942 - DNA, 25 bp, Homo sapien
gtagctgagaaagacatcggatcca

SEQ ID NO: 3025943 - DNA, 25 bp, Homo sapien
tcattcacacgtaggactcgctggc

SEQ ID NO: 3025944 - DNA, 25 bp, Homo sapien
tgccactacgtgtggacaggcatct

SEQ ID NO: 3025945 - DNA, 25 bp, Homo sapien
ggcttgtttgcccacctaatctggg

SEQ ID NO: 3025946 - DNA, 25 bp, Homo sapien
tcgctggcttaggaggagagtcacc

SEQ ID NO: 3025947 - DNA, 25 bp, Homo sapien
gatctgtgggcactttggagtcttt

SEQ ID NO: 3025948 - DNA, 25 bp, Homo sapien
ggagctgctagccttgccgggtctc

SEQ ID NO: 3025949 - DNA, 25 bp, Homo sapien
cctgggagggcagcgacttctgctt

SEQ ID NO: 3025950 - DNA, 25 bp, Homo sapien
cacagaatcaaagggattcagggtc

SEQ ID NO: 3025951 - DNA, 25 bp, Homo sapien
gtaggagctgtcaggccagacgccc

SEQ ID NO: 3025952 - DNA, 25 bp, Homo sapien
acattctggatcccagcgagggcag

SEQ ID NO: 3025953 - DNA, 25 bp, Homo sapien
gaacatagccaggaagacgggcctt

SEQ ID NO: 3025954 - DNA, 25 bp, Homo sapien
gcatcaggcctgaggaaccaaactg

SEQ ID NO: 3025955 - DNA, 25 bp, Homo sapien
gcggtggcgtcccacaggccgcggt

SEQ ID NO: 3025956 - DNA, 25 bp, Homo sapien
tggcgtcccacaggccgcggtcggg

SEQ ID NO: 3025957 - DNA, 25 bp, Homo sapien
ctcctccgcggtggcgtcccacagg

SEQ ID NO: 3025958 - DNA, 25 bp, Homo sapien
tccgcggtggcgtcccacaggccgc

SEQ ID NO: 3025959 - DNA, 25 bp, Homo sapien
cggggcgggccgctcgcgtcgccat

SEQ ID NO: 3025960 - DNA, 25 bp, Homo sapien
aggcggggcgggccgctcgcgtcgc

SEQ ID NO: 3025961 - DNA, 25 bp, Homo sapien
ctgaggccaggcggggggcgaggcg

SEQ ID NO: 3025962 - DNA, 25 bp, Homo sapien
gcgaggcggggcgggccgctcgcgt

SEQ ID NO: 3025963 - DNA, 25 bp, Homo sapien
cgagcccggcaaccccacggcaggg

SEQ ID NO: 3025964 - DNA, 25 bp, Homo sapien
ctcgggaagccgcttccgagggcca

SEQ ID NO: 3025965 - DNA, 25 bp, Homo sapien
gcctcgggaagccgcttccgagggc

SEQ ID NO: 3025966 - DNA, 25 bp, Homo sapien
tcgggaagccgcttccgagggccag

SEQ ID NO: 3025967 - DNA, 25 bp, Homo sapien
ctgggtctcgagctcttccccggaa

SEQ ID NO: 3025968 - DNA, 25 bp, Homo sapien
tgggtctcgagctcttccccggaac

SEQ ID NO: 3025969 - DNA, 25 bp, Homo sapien
tggactgtctggctgggaggcacat

SEQ ID NO: 3025970 - DNA, 25 bp, Homo sapien
gagcacaggcctcccctagttggca

SEQ ID NO: 3025971 - DNA, 25 bp, Homo sapien
agtgaggacctaccctttgccctag

SEQ ID NO: 3025972 - DNA, 25 bp, Homo sapien
ctaccctttgccctagggcaggaga

SEQ ID NO: 3025973 - DNA, 25 bp, Homo sapien
tgactgtcttccagtagaactgggc

SEQ ID NO: 3025974 - DNA, 25 bp, Homo sapien
cattgcgcactgactgagttgctgg

SEQ ID NO: 3025975 - DNA, 25 bp, Homo sapien
tccagtagaactgggccttcctgcc

SEQ ID NO: 3025976 - DNA, 25 bp, Homo sapien
gggcattgcgcactgactgagttgc

SEQ ID NO: 3025977 - DNA, 25 bp, Homo sapien
ggggggaatcaaatgaattgccagt

SEQ ID NO: 3025978 - DNA, 25 bp, Homo sapien
tgaaagcccatccattgtcgggggg

SEQ ID NO: 3025979 - DNA, 25 bp, Homo sapien
aatcgttgagtgacttcatttccaa

SEQ ID NO: 3025980 - DNA, 25 bp, Homo sapien
ttctggattattctaccctgcttcc

SEQ ID NO: 3025981 - DNA, 25 bp, Homo sapien
ggccattggtgggcaaaacaagcat

SEQ ID NO: 3025982 - DNA, 25 bp, Homo sapien
gatctggcggctacaggctccctgt

SEQ ID NO: 3025983 - DNA, 25 bp, Homo sapien
ccgactgggtgtgttcacgggatct

SEQ ID NO: 3025984 - DNA, 25 bp, Homo sapien
ccccgactgggtgtgttcacgggat

SEQ ID NO: 3025985 - DNA, 25 bp, Homo sapien
tgtgttcacgggatctggcggctac

SEQ ID NO: 3025986 - DNA, 25 bp, Homo sapien
gggcacgtgcccaagtctgattgga

SEQ ID NO: 3025987 - DNA, 25 bp, Homo sapien
agttgggagccccagattggaccca

SEQ ID NO: 3025988 - DNA, 25 bp, Homo sapien
catggatctccactcatatgccagg

SEQ ID NO: 3025989 - DNA, 25 bp, Homo sapien
cttgaggtcatgcagccaggagttg

SEQ ID NO: 3025990 - DNA, 25 bp, Homo sapien
ctgggtgactcactagcctggagca

SEQ ID NO: 3025991 - DNA, 25 bp, Homo sapien
gccccgtgaggctcaagacactgta

SEQ ID NO: 3025992 - DNA, 25 bp, Homo sapien
gacactgtatccacactgctgggta

SEQ ID NO: 3025993 - DNA, 25 bp, Homo sapien
gccttgtaaggactacggtggtaga

SEQ ID NO: 3025994 - DNA, 25 bp, Homo sapien
cctcaggacattccccatgtttgtg

SEQ ID NO: 3025995 - DNA, 25 bp, Homo sapien
caggacattccccatgtttgtggcc

SEQ ID NO: 3025996 - DNA, 25 bp, Homo sapien
ccctcaggacattccccatgtttgt

SEQ ID NO: 3025997 - DNA, 25 bp, Homo sapien
ggacattccccatgtttgtggcctt

SEQ ID NO: 3025998 - DNA, 25 bp, Homo sapien
catgttctcgtacataaccttttgc

SEQ ID NO: 3025999 - DNA, 25 bp, Homo sapien
gaagtgacaacgtgcgataaaaggg

SEQ ID NO: 3026000 - DNA, 25 bp, Homo sapien
tttgctgaagtgacaacgtgcgata

SEQ ID NO: 3026001 - DNA, 25 bp, Homo sapien
acgtgcgataaaagggtcccaggag

SEQ ID NO: 3026002 - DNA, 25 bp, Homo sapien
gttctgattcgtcttccactgcttg

SEQ ID NO: 3026003 - DNA, 25 bp, Homo sapien
cacccaatgcaaaggtctggccatc

SEQ ID NO: 3026004 - DNA, 25 bp, Homo sapien
tctcacgtttttgggtgaggatctt

SEQ ID NO: 3026005 - DNA, 25 bp, Homo sapien
gccctgggaccacgtgtacgttctg

SEQ ID NO: 3026006 - DNA, 25 bp, Homo sapien
aggctccaagaacttccactgcaga

SEQ ID NO: 3026007 - DNA, 25 bp, Homo sapien
agaccagtgggcccacacctgcttt

SEQ ID NO: 3026008 - DNA, 25 bp, Homo sapien
tcagggacggacctggtgcagacca

SEQ ID NO: 3026009 - DNA, 25 bp, Homo sapien
cagaggtgtcagggacggacctggt

SEQ ID NO: 3026010 - DNA, 25 bp, Homo sapien
tcagagcgtgtaggtgtattacatg

SEQ ID NO: 3026011 - DNA, 25 bp, Homo sapien
tgtgcgggtcagagcgtgtaggtgt

SEQ ID NO: 3026012 - DNA, 25 bp, Homo sapien
cacacaggggcacatatctgtgctt

SEQ ID NO: 3026013 - DNA, 25 bp, Homo sapien
gtattacatgcctgcctgtgtgtct

SEQ ID NO: 3026014 - DNA, 25 bp, Homo sapien
agatggcatgcacacttccagatag

SEQ ID NO: 3026015 - DNA, 25 bp, Homo sapien
gcatgcacacttccagataggagct

SEQ ID NO: 3026016 - DNA, 25 bp, Homo sapien
cacacttccagataggagctggaac

SEQ ID NO: 3026017 - DNA, 25 bp, Homo sapien
ttccagataggagctggaacatttc

SEQ ID NO: 3026018 - DNA, 25 bp, Homo sapien
agcccagcacgctgcccgtagtatc

SEQ ID NO: 3026019 - DNA, 25 bp, Homo sapien
ccagacagcccagcacgctgcccgt

SEQ ID NO: 3026020 - DNA, 25 bp, Homo sapien
gacagcccagcacgctgcccgtagt

SEQ ID NO: 3026021 - DNA, 25 bp, Homo sapien
cagcccagcacgctgcccgtagtat

SEQ ID NO: 3026022 - DNA, 25 bp, Homo sapien
aaccaggaaatttctgtcagtggga

SEQ ID NO: 3026023 - DNA, 25 bp, Homo sapien
ctgaggtgtgttttcctggcaacca

SEQ ID NO: 3026024 - DNA, 25 bp, Homo sapien
gggcagcagctgtcatcagtgttat

SEQ ID NO: 3026025 - DNA, 25 bp, Homo sapien
agtgggaacagcctgcccaaggcct

SEQ ID NO: 3026026 - DNA, 25 bp, Homo sapien
gtcttatgccaccactccactctga

SEQ ID NO: 3026027 - DNA, 25 bp, Homo sapien
cttatgccaccactccactctgagc

SEQ ID NO: 3026028 - DNA, 25 bp, Homo sapien
ggtcttatgccaccactccactctg

SEQ ID NO: 3026029 - DNA, 25 bp, Homo sapien
ggtggtgcggggtggtgagagtggt

SEQ ID NO: 3026030 - DNA, 25 bp, Homo sapien
tctccccactgggagtggggatgga

SEQ ID NO: 3026031 - DNA, 25 bp, Homo sapien
ccccactgggagtggggatggaagc

SEQ ID NO: 3026032 - DNA, 25 bp, Homo sapien
ctgggagtggggatggaagcctcca

SEQ ID NO: 3026033 - DNA, 25 bp, Homo sapien
ccactgggagtggggatggaagcct

SEQ ID NO: 3026034 - DNA, 25 bp, Homo sapien
ggagagttgggggtcacccatctct

SEQ ID NO: 3026035 - DNA, 25 bp, Homo sapien
cctaacacagccacctctggagagt

SEQ ID NO: 3026036 - DNA, 25 bp, Homo sapien
catctcttctttgctccccacccac

SEQ ID NO: 3026037 - DNA, 25 bp, Homo sapien
tgcaagactggaaccctaacacagc

SEQ ID NO: 3026038 - DNA, 25 bp, Homo sapien
ggtggaagtggttcatctgctctga

SEQ ID NO: 3026039 - DNA, 25 bp, Homo sapien
tggaagtggttcatctgctctgagc

SEQ ID NO: 3026040 - DNA, 25 bp, Homo sapien
ggaagtggttcatctgctctgagcc

SEQ ID NO: 3026041 - DNA, 25 bp, Homo sapien
cctggtggaagtggttcatctgctc

SEQ ID NO: 3026042 - DNA, 25 bp, Homo sapien
tgctgaaaaggcagtaaccagcttc

SEQ ID NO: 3026043 - DNA, 25 bp, Homo sapien
gctgaaaaggcagtaaccagcttca

SEQ ID NO: 3026044 - DNA, 25 bp, Homo sapien
tcagccccgagcactggaaacggca

SEQ ID NO: 3026045 - DNA, 25 bp, Homo sapien
ccccactcgccatctccgatgctca

SEQ ID NO: 3026046 - DNA, 25 bp, Homo sapien
ccagggacacgggtgatagccaagc

SEQ ID NO: 3026047 - DNA, 25 bp, Homo sapien
gtgatagccaagcccggcagatgcc

SEQ ID NO: 3026048 - DNA, 25 bp, Homo sapien
acagtgtacgcacgcgtatgtcggt

SEQ ID NO: 3026049 - DNA, 25 bp, Homo sapien
aagaaacagtgtacgcacgcgtatg

SEQ ID NO: 3026050 - DNA, 25 bp, Homo sapien
cagaagaaacagtgtacgcacgcgt

SEQ ID NO: 3026051 - DNA, 25 bp, Homo sapien
aaacagtgtacgcacgcgtatgtcg

SEQ ID NO: 3026052 - DNA, 25 bp, Homo sapien
tggagtgagcagaggcgagcctgaa

SEQ ID NO: 3026053 - DNA, 25 bp, Homo sapien
gagcagaggcgagcctgaaagctgg

SEQ ID NO: 3026054 - DNA, 25 bp, Homo sapien
gtgagcagaggcgagcctgaaagct

SEQ ID NO: 3026055 - DNA, 25 bp, Homo sapien
gaaagctggcggcagggacctcagg

SEQ ID NO: 3026056 - DNA, 25 bp, Homo sapien
tgacctaagtctgagatccttccga

SEQ ID NO: 3026057 - DNA, 25 bp, Homo sapien
tccgacccacactgcagagggaatg

SEQ ID NO: 3026058 - DNA, 25 bp, Homo sapien
catttggtcgggctttgaaggctaa

SEQ ID NO: 3026059 - DNA, 25 bp, Homo sapien
cacgcttcccgaggaggtgacattt

SEQ ID NO: 3026060 - DNA, 25 bp, Homo sapien
aggaggctctccacacagaccgtga

SEQ ID NO: 3026061 - DNA, 25 bp, Homo sapien
cctctgcccagcgtttatatctctt

SEQ ID NO: 3026062 - DNA, 25 bp, Homo sapien
gtgagtgctccttgatggcggcccc

SEQ ID NO: 3026063 - DNA, 25 bp, Homo sapien
cagacccgggcttcctgtccgtagt

SEQ ID NO: 3026064 - DNA, 25 bp, Homo sapien
aaaatcctcttagtgaagcagacgc

SEQ ID NO: 3026065 - DNA, 25 bp, Homo sapien
taaagtgtgctagcttcaaatcaga

SEQ ID NO: 3026066 - DNA, 25 bp, Homo sapien
tactacgtgctaatctgtcccaggt

SEQ ID NO: 3026067 - DNA, 25 bp, Homo sapien
tagagtcttccgcaaatccttgagc

SEQ ID NO: 3026068 - DNA, 25 bp, Homo sapien
ggtgatgtgcttgcccggtgggaac

SEQ ID NO: 3026069 - DNA, 25 bp, Homo sapien
gggaacggtattctgttcatgactg

SEQ ID NO: 3026070 - DNA, 25 bp, Homo sapien
tgttattaaccgcatgcccattgcc

SEQ ID NO: 3026071 - DNA, 25 bp, Homo sapien
actgttgccattgttattaaccgca

SEQ ID NO: 3026072 - DNA, 25 bp, Homo sapien
agctcctgcctaggtgaagacaagg

SEQ ID NO: 3026073 - DNA, 25 bp, Homo sapien
cagcacctatggacagggacgggct

SEQ ID NO: 3026074 - DNA, 25 bp, Homo sapien
tgctgccctggttagaggaagcttg

SEQ ID NO: 3026075 - DNA, 25 bp, Homo sapien
cagaggaaatgggtggcttacagct

SEQ ID NO: 3026076 - DNA, 25 bp, Homo sapien
tacgaggagttgtctcactctttgc

SEQ ID NO: 3026077 - DNA, 25 bp, Homo sapien
gatgcgtccgttggcagtctctcca

SEQ ID NO: 3026078 - DNA, 25 bp, Homo sapien
acacagacttcagcccagctatgga

SEQ ID NO: 3026079 - DNA, 25 bp, Homo sapien
gagtggccaactacgaggagttgtc

SEQ ID NO: 3026080 - DNA, 25 bp, Homo sapien
catccattgggcatgcgtgtgtctg

SEQ ID NO: 3026081 - DNA, 25 bp, Homo sapien
tgactgggctcattggagaagaccc

SEQ ID NO: 3026082 - DNA, 25 bp, Homo sapien
cacggagcttaccagtgcagagaga

SEQ ID NO: 3026083 - DNA, 25 bp, Homo sapien
tgacaagacagatggactctgccct

SEQ ID NO: 3026084 - DNA, 25 bp, Homo sapien
ccctgcatccccccgctttcctggg

SEQ ID NO: 3026085 - DNA, 25 bp, Homo sapien
ctgcatccccccgctttcctggggt

SEQ ID NO: 3026086 - DNA, 25 bp, Homo sapien
tggcaacaccgtttcccccagatcc

SEQ ID NO: 3026087 - DNA, 25 bp, Homo sapien
attggcaacaccgtttcccccagat

SEQ ID NO: 3026088 - DNA, 25 bp, Homo sapien
ccattcaatgtgtgccttggaagtg

SEQ ID NO: 3026089 - DNA, 25 bp, Homo sapien
tagttgttactttggctggcctccc

SEQ ID NO: 3026090 - DNA, 25 bp, Homo sapien
cttggattcatcacagggaagacct

SEQ ID NO: 3026091 - DNA, 25 bp, Homo sapien
aactcacattgtagtgtcccgtgca

SEQ ID NO: 3026092 - DNA, 25 bp, Homo sapien
gccaagcatgggtaatcctttgcct

SEQ ID NO: 3026093 - DNA, 25 bp, Homo sapien
tcggatctcagactgcagcatgtgg

SEQ ID NO: 3026094 - DNA, 25 bp, Homo sapien
ccactgatggcgtcataatgaagga

SEQ ID NO: 3026095 - DNA, 25 bp, Homo sapien
ccagacctaggacctgtggcagtga

SEQ ID NO: 3026096 - DNA, 25 bp, Homo sapien
gagcagaaagtagtagggagccact

SEQ ID NO: 3026097 - DNA, 25 bp, Homo sapien
tctacctgcggggtagggagacagc

SEQ ID NO: 3026098 - DNA, 25 bp, Homo sapien
gtctacctgcggggtagggagacag

SEQ ID NO: 3026099 - DNA, 25 bp, Homo sapien
tgcaggatccttgtctacctgcggg

SEQ ID NO: 3026100 - DNA, 25 bp, Homo sapien
gggtgcaggatccttgtctacctgc

SEQ ID NO: 3026101 - DNA, 25 bp, Homo sapien
gactgggaaccagacccatagagtt

SEQ ID NO: 3026102 - DNA, 25 bp, Homo sapien
aaaatggagttctaagcctttggct

SEQ ID NO: 3026103 - DNA, 25 bp, Homo sapien
tcctaggccttaatggcacatctat

SEQ ID NO: 3026104 - DNA, 25 bp, Homo sapien
aatctaaacgttgctgctcaccagg

SEQ ID NO: 3026105 - DNA, 25 bp, Homo sapien
tgcagatgacttcgggcccaggtta

SEQ ID NO: 3026106 - DNA, 25 bp, Homo sapien
ttacaaatactcaagggcctgggca

SEQ ID NO: 3026107 - DNA, 25 bp, Homo sapien
gagtctgcatgagtcttgtacccca

SEQ ID NO: 3026108 - DNA, 25 bp, Homo sapien
tgtcgcagacatacgtggctccctg

SEQ ID NO: 3026109 - DNA, 25 bp, Homo sapien
gagttctggaatggtctgcagcagc

SEQ ID NO: 3026110 - DNA, 25 bp, Homo sapien
tctggctgtggtgaatctgacctct

SEQ ID NO: 3026111 - DNA, 25 bp, Homo sapien
cccagatgctgagtgactagaagcc

SEQ ID NO: 3026112 - DNA, 25 bp, Homo sapien
tggagagcccgccaagagggattct

SEQ ID NO: 3026113 - DNA, 25 bp, Homo sapien
tgcttctggtcagcagactgcgtgt

SEQ ID NO: 3026114 - DNA, 25 bp, Homo sapien
ccttgatatcaaaatgggacctgtt

SEQ ID NO: 3026115 - DNA, 25 bp, Homo sapien
taggcccgtagtaaatggaagctcc

SEQ ID NO: 3026116 - DNA, 25 bp, Homo sapien
agacacaagacaaggcatcagccga

SEQ ID NO: 3026117 - DNA, 25 bp, Homo sapien
gcgcatgctaccatgtcaagttaat

SEQ ID NO: 3026118 - DNA, 25 bp, Homo sapien
cgcatgctaccatgtcaagttaatt

SEQ ID NO: 3026119 - DNA, 25 bp, Homo sapien
tcgcccatgtctttcacccctgggt

SEQ ID NO: 3026120 - DNA, 25 bp, Homo sapien
ggcatctccccgattgaggtcccac

SEQ ID NO: 3026121 - DNA, 25 bp, Homo sapien
gacctcctcgcccatgtctttcacc

SEQ ID NO: 3026122 - DNA, 25 bp, Homo sapien
ttcacccctgggtgcctgtatcctg

SEQ ID NO: 3026123 - DNA, 25 bp, Homo sapien
ttcactcggctgacttcgagggcgg

SEQ ID NO: 3026124 - DNA, 25 bp, Homo sapien
cttcactcggctgacttcgagggcg

SEQ ID NO: 3026125 - DNA, 25 bp, Homo sapien
gctgcttcactcggctgacttcgag

SEQ ID NO: 3026126 - DNA, 25 bp, Homo sapien
tgcttcactcggctgacttcgaggg

SEQ ID NO: 3026127 - DNA, 25 bp, Homo sapien
tgcggattttctccggcagcagcag

SEQ ID NO: 3026128 - DNA, 25 bp, Homo sapien
gggagtcctgcggattttctccggc

SEQ ID NO: 3026129 - DNA, 25 bp, Homo sapien
tcctgcggattttctccggcagcag

SEQ ID NO: 3026130 - DNA, 25 bp, Homo sapien
agcagcaggcgctctgcctttgtct

SEQ ID NO: 3026131 - DNA, 25 bp, Homo sapien
gcacttgtcctgaacctcacttttt

SEQ ID NO: 3026132 - DNA, 25 bp, Homo sapien
ctaagcagggcacttgtcctgaacc

SEQ ID NO: 3026133 - DNA, 25 bp, Homo sapien
gggcacttgtcctgaacctcacttt

SEQ ID NO: 3026134 - DNA, 25 bp, Homo sapien
gcagggcacttgtcctgaacctcac

SEQ ID NO: 3026135 - DNA, 25 bp, Homo sapien
tcaaaggtcaccatcgttctgccgg

SEQ ID NO: 3026136 - DNA, 25 bp, Homo sapien
aacccacaatctgcctgctaggcca

SEQ ID NO: 3026137 - DNA, 25 bp, Homo sapien
agctggaccatgaggagtgagccca

SEQ ID NO: 3026138 - DNA, 25 bp, Homo sapien
aaacggatggatgggaatgagtggg

SEQ ID NO: 3026139 - DNA, 25 bp, Homo sapien
ggaaaatctgcagcccgtggattcc

SEQ ID NO: 3026140 - DNA, 25 bp, Homo sapien
gagtcggcctttcacagaacaggaa

SEQ ID NO: 3026141 - DNA, 25 bp, Homo sapien
ccctctccagtgtggcggcaggtcg

SEQ ID NO: 3026142 - DNA, 25 bp, Homo sapien
cagacttcttgcagggagacccaag

SEQ ID NO: 3026143 - DNA, 25 bp, Homo sapien
tgtcacacaacaggtcctggaagtc

SEQ ID NO: 3026144 - DNA, 25 bp, Homo sapien
caacaggtcctggaagtcagtccat

SEQ ID NO: 3026145 - DNA, 25 bp, Homo sapien
ggtcctggaagtcagtccatcctcc

SEQ ID NO: 3026146 - DNA, 25 bp, Homo sapien
tggaagtcagtccatcctcccgtgc

SEQ ID NO: 3026147 - DNA, 25 bp, Homo sapien
acaactgaccccatggaggccctaa

SEQ ID NO: 3026148 - DNA, 25 bp, Homo sapien
gcccaaccatgtgccctgggagcag

SEQ ID NO: 3026149 - DNA, 25 bp, Homo sapien
gaggccctaagggttgacacagccc

SEQ ID NO: 3026150 - DNA, 25 bp, Homo sapien
taggctggaggccatacagccagcc

SEQ ID NO: 3026151 - DNA, 25 bp, Homo sapien
ctgggggagggcccaagcactctca

SEQ ID NO: 3026152 - DNA, 25 bp, Homo sapien
actctcactagtcagcacatccatc

SEQ ID NO: 3026153 - DNA, 25 bp, Homo sapien
aagcactctcactagtcagcacatc

SEQ ID NO: 3026154 - DNA, 25 bp, Homo sapien
tctcactagtcagcacatccatcag

SEQ ID NO: 3026155 - DNA, 25 bp, Homo sapien
tgacctacactatgtacacgtctct

SEQ ID NO: 3026156 - DNA, 25 bp, Homo sapien
gttggcttccgtcagcacagggaaa

SEQ ID NO: 3026157 - DNA, 25 bp, Homo sapien
tgcagtccgggaaagccaagttggc

SEQ ID NO: 3026158 - DNA, 25 bp, Homo sapien
caggtcaggaggctaagcacgctga

SEQ ID NO: 3026159 - DNA, 25 bp, Homo sapien
ctgcagtgccccgatcggccaccag

SEQ ID NO: 3026160 - DNA, 25 bp, Homo sapien
cctgcagtgccccgatcggccacca

SEQ ID NO: 3026161 - DNA, 25 bp, Homo sapien
tgcagtgccccgatcggccaccaga

SEQ ID NO: 3026162 - DNA, 25 bp, Homo sapien
cccccaaaatggctcggcccctgca

SEQ ID NO: 3026163 - DNA, 25 bp, Homo sapien
tcatggccgccggtcttagggtcaa

SEQ ID NO: 3026164 - DNA, 25 bp, Homo sapien
tcggccttcaaagcttcgacgcagg

SEQ ID NO: 3026165 - DNA, 25 bp, Homo sapien
ttagggtcaagatcgcgcccctcgg

SEQ ID NO: 3026166 - DNA, 25 bp, Homo sapien
ccgcaggtcgaactgtggaggccag

SEQ ID NO: 3026167 - DNA, 25 bp, Homo sapien
gcacgggaccaaagtggctagagac

SEQ ID NO: 3026168 - DNA, 25 bp, Homo sapien
aagtggctagagacaggggtgctga

SEQ ID NO: 3026169 - DNA, 25 bp, Homo sapien
acgggaccaaagtggctagagacag

SEQ ID NO: 3026170 - DNA, 25 bp, Homo sapien
caaagtggctagagacaggggtgct

SEQ ID NO: 3026171 - DNA, 25 bp, Homo sapien
tagctggaagtgacagtggtcccac

SEQ ID NO: 3026172 - DNA, 25 bp, Homo sapien
ctagctggaagtgacagtggtccca

SEQ ID NO: 3026173 - DNA, 25 bp, Homo sapien
tgctgacagtcgtgcagcagccggc

SEQ ID NO: 3026174 - DNA, 25 bp, Homo sapien
agcagccggcgatcgccaagcttct

SEQ ID NO: 3026175 - DNA, 25 bp, Homo sapien
gcatctgctgacagtcgtgcagcag

SEQ ID NO: 3026176 - DNA, 25 bp, Homo sapien
agcttctcgagtgtgcgcgccgcct

SEQ ID NO: 3026177 - DNA, 25 bp, Homo sapien
gaaaggaattgtcatcaggtaacca

SEQ ID NO: 3026178 - DNA, 25 bp, Homo sapien
caggtaaccatcaagaagatgcttg

SEQ ID NO: 3026179 - DNA, 25 bp, Homo sapien
aggcctgtctgtcccgtctgacaca

SEQ ID NO: 3026180 - DNA, 25 bp, Homo sapien
gcacgtgcagtcatgtatcccacaa

SEQ ID NO: 3026181 - DNA, 25 bp, Homo sapien
tgcccgccgcctcagactgcggtcg

SEQ ID NO: 3026182 - DNA, 25 bp, Homo sapien
ccgggccgtggcctcatgtaggaac

SEQ ID NO: 3026183 - DNA, 25 bp, Homo sapien
tggtgtgtccgtgtggggctggccc

SEQ ID NO: 3026184 - DNA, 25 bp, Homo sapien
gactgcggtcgaggagctggtgtgt

SEQ ID NO: 3026185 - DNA, 25 bp, Homo sapien
ctgggggccaggagagtggaggctc

SEQ ID NO: 3026186 - DNA, 25 bp, Homo sapien
tgggggccaggagagtggaggctca

SEQ ID NO: 3026187 - DNA, 25 bp, Homo sapien
ctccgcatggcgggccggaagctct

SEQ ID NO: 3026188 - DNA, 25 bp, Homo sapien
atggcgggccggaagctctgtgcca

SEQ ID NO: 3026189 - DNA, 25 bp, Homo sapien
accacaagaagcaggtcacacagga

SEQ ID NO: 3026190 - DNA, 25 bp, Homo sapien
ccacaggctggtgcgcaccacaaga

SEQ ID NO: 3026191 - DNA, 25 bp, Homo sapien
gcagggcaggggtcaccagggctcc

SEQ ID NO: 3026192 - DNA, 25 bp, Homo sapien
agggcaggggtcaccagggctccag

SEQ ID NO: 3026193 - DNA, 25 bp, Homo sapien
ggcaggggtcaccagggctccagct

SEQ ID NO: 3026194 - DNA, 25 bp, Homo sapien
caggcagggcaggggtcaccagggc

SEQ ID NO: 3026195 - DNA, 25 bp, Homo sapien
tcacagatggtcaggctggctggac

SEQ ID NO: 3026196 - DNA, 25 bp, Homo sapien
gctggtgtggtagccaggctgtcct

SEQ ID NO: 3026197 - DNA, 25 bp, Homo sapien
gccttgaaggagtgcagagctgccc

SEQ ID NO: 3026198 - DNA, 25 bp, Homo sapien
ggaccagactctgccttggcacagc

SEQ ID NO: 3026199 - DNA, 25 bp, Homo sapien
ccaccacttggccaccgggtctacg

SEQ ID NO: 3026200 - DNA, 25 bp, Homo sapien
acagctgtcagagaggcccaccact

SEQ ID NO: 3026201 - DNA, 25 bp, Homo sapien
ctcatcccgccgcagccagtggatc

SEQ ID NO: 3026202 - DNA, 25 bp, Homo sapien
ccgcagccagtggatcaccacagct

SEQ ID NO: 3026203 - DNA, 25 bp, Homo sapien
aaccctcagtcacgctgcacggggg

SEQ ID NO: 3026204 - DNA, 25 bp, Homo sapien
ccctcagtcacgctgcacgggggag

SEQ ID NO: 3026205 - DNA, 25 bp, Homo sapien
accctcagtcacgctgcacggggga

SEQ ID NO: 3026206 - DNA, 25 bp, Homo sapien
caggtacccgagggcatccgagaat

SEQ ID NO: 3026207 - DNA, 25 bp, Homo sapien
gtacccgagggcatccgagaattcc

SEQ ID NO: 3026208 - DNA, 25 bp, Homo sapien
aggtacccgagggcatccgagaatt

SEQ ID NO: 3026209 - DNA, 25 bp, Homo sapien
ggtacccgagggcatccgagaattc

SEQ ID NO: 3026210 - DNA, 25 bp, Homo sapien
cacacagttcagtgctcgctctaag

SEQ ID NO: 3026211 - DNA, 25 bp, Homo sapien
gatgttcccggaatagctgagtcac

SEQ ID NO: 3026212 - DNA, 25 bp, Homo sapien
cagtgctcgctctaagagatgttcc

SEQ ID NO: 3026213 - DNA, 25 bp, Homo sapien
cgctctaagagatgttcccggaata

SEQ ID NO: 3026214 - DNA, 25 bp, Homo sapien
ctgggaagtgccggcatgcccctgg

SEQ ID NO: 3026215 - DNA, 25 bp, Homo sapien
tgggaagtgccggcatgcccctggg

SEQ ID NO: 3026216 - DNA, 25 bp, Homo sapien
ggaaaaccgacttgagaagatgcca

SEQ ID NO: 3026217 - DNA, 25 bp, Homo sapien
tacactgcttccaaaggaaaaccga

SEQ ID NO: 3026218 - DNA, 25 bp, Homo sapien
ggaaagcgggtggacataactatca

SEQ ID NO: 3026219 - DNA, 25 bp, Homo sapien
tgaaagccccaatgggaacgagagg

SEQ ID NO: 3026220 - DNA, 25 bp, Homo sapien
tccccatccacgaagaaacggtggc

SEQ ID NO: 3026221 - DNA, 25 bp, Homo sapien
ttcccggccaagctgtacaggctct

SEQ ID NO: 3026222 - DNA, 25 bp, Homo sapien
tggcgggcactgctcaggaagaagc

SEQ ID NO: 3026223 - DNA, 25 bp, Homo sapien
gtactgagcacggaccagtccccat

SEQ ID NO: 3026224 - DNA, 25 bp, Homo sapien
gagggtactgggctgtcacagtgga

SEQ ID NO: 3026225 - DNA, 25 bp, Homo sapien
ctgtaggggagggtactgggctgtc

SEQ ID NO: 3026226 - DNA, 25 bp, Homo sapien
taggggagggtactgggctgtcaca

SEQ ID NO: 3026227 - DNA, 25 bp, Homo sapien
gggagggtactgggctgtcacagtg

SEQ ID NO: 3026228 - DNA, 25 bp, Homo sapien
aatgcagccgccacatagatctcgg

SEQ ID NO: 3026229 - DNA, 25 bp, Homo sapien
tctgccaggttcagggcactcagcg

SEQ ID NO: 3026230 - DNA, 25 bp, Homo sapien
cagtgaggtgcccgcctgtgtgctt

SEQ ID NO: 3026231 - DNA, 25 bp, Homo sapien
gactggtcttcactctcaatgcagc

SEQ ID NO: 3026232 - DNA, 25 bp, Homo sapien
ctagcatccactcgcagagcacagt

SEQ ID NO: 3026233 - DNA, 25 bp, Homo sapien
cgtctcgggcgctggcgctagcatc

SEQ ID NO: 3026234 - DNA, 25 bp, Homo sapien
tgcagcttatggtagaccagggctg

SEQ ID NO: 3026235 - DNA, 25 bp, Homo sapien
tgcagcaggtgacggatgaggttcc

SEQ ID NO: 3026236 - DNA, 25 bp, Homo sapien
agacgagcaccaacagcccattgag

SEQ ID NO: 3026237 - DNA, 25 bp, Homo sapien
gactggctcaccgtagacaaagaga

SEQ ID NO: 3026238 - DNA, 25 bp, Homo sapien
aagagaagcaccaaggagacgagca

SEQ ID NO: 3026239 - DNA, 25 bp, Homo sapien
gcctgcttgcgatgcctccagaagt

SEQ ID NO: 3026240 - DNA, 25 bp, Homo sapien
tgcgcccagggctatggtagacgct

SEQ ID NO: 3026241 - DNA, 25 bp, Homo sapien
gcgggagcggtccagcatgccccgg

SEQ ID NO: 3026242 - DNA, 25 bp, Homo sapien
gcagaggaagacgagcgtgcacagg

SEQ ID NO: 3026243 - DNA, 25 bp, Homo sapien
cagcaaggaggccaaggggttgcag

SEQ ID NO: 3026244 - DNA, 25 bp, Homo sapien
ctgtgcagagacggccgctgctctg

SEQ ID NO: 3026245 - DNA, 25 bp, Homo sapien
tgcagagacggccgctgctctggct

SEQ ID NO: 3026246 - DNA, 25 bp, Homo sapien
cagagacggccgctgctctggcttt

SEQ ID NO: 3026247 - DNA, 25 bp, Homo sapien
tgtgcagagacggccgctgctctgg

SEQ ID NO: 3026248 - DNA, 25 bp, Homo sapien
agggcagaatcggagggaccccaga

SEQ ID NO: 3026249 - DNA, 25 bp, Homo sapien
ggcagaatcggagggaccccagaga

SEQ ID NO: 3026250 - DNA, 25 bp, Homo sapien
gggcagaatcggagggaccccagag

SEQ ID NO: 3026251 - DNA, 25 bp, Homo sapien
gagggcagaatcggagggaccccag

SEQ ID NO: 3026252 - DNA, 25 bp, Homo sapien
ttactgtgggaccccacgtggctcc

SEQ ID NO: 3026253 - DNA, 25 bp, Homo sapien
cttactgtgggaccccacgtggctc

SEQ ID NO: 3026254 - DNA, 25 bp, Homo sapien
gaggtaggatctgttagggtcttcc

SEQ ID NO: 3026255 - DNA, 25 bp, Homo sapien
ggaggtaggatctgttagggtcttc

SEQ ID NO: 3026256 - DNA, 25 bp, Homo sapien
tgtcaggctccgagtcactgccact

SEQ ID NO: 3026257 - DNA, 25 bp, Homo sapien
tcctcaaagactgggctgtcaggct

SEQ ID NO: 3026258 - DNA, 25 bp, Homo sapien
agtcttcacgccctccatgagcacg

SEQ ID NO: 3026259 - DNA, 25 bp, Homo sapien
acgccctccatgagcacgtctgtgt

SEQ ID NO: 3026260 - DNA, 25 bp, Homo sapien
gcttttgtggacagcagtgcgcaga

SEQ ID NO: 3026261 - DNA, 25 bp, Homo sapien
cagacttaggttctcctgcttgagt

SEQ ID NO: 3026262 - DNA, 25 bp, Homo sapien
ggccttgcgcaagacagcagattta

SEQ ID NO: 3026263 - DNA, 25 bp, Homo sapien
gtgttgcagaaagcgaatgtagtcg

SEQ ID NO: 3026264 - DNA, 25 bp, Homo sapien
caaacgtggtggtctcgagcactta

SEQ ID NO: 3026265 - DNA, 25 bp, Homo sapien
tgaaccgttcctcgcctagtagcac

SEQ ID NO: 3026266 - DNA, 25 bp, Homo sapien
ccgggcatagggttagaatgtaaga

SEQ ID NO: 3026267 - DNA, 25 bp, Homo sapien
tttctctgcaacgagccaaacgtgg

SEQ ID NO: 3026268 - DNA, 25 bp, Homo sapien
tacgaccagtgggactgttgccaag

SEQ ID NO: 3026269 - DNA, 25 bp, Homo sapien
tgcgagccggttgataggcagcttc

SEQ ID NO: 3026270 - DNA, 25 bp, Homo sapien
tgttgccaagatggttccgccactc

SEQ ID NO: 3026271 - DNA, 25 bp, Homo sapien
cttctcaatggcgttgtgggctgtg

SEQ ID NO: 3026272 - DNA, 25 bp, Homo sapien
ttcacagtggctccgtctgtcttca

SEQ ID NO: 3026273 - DNA, 25 bp, Homo sapien
gagacctgccgccttcacagtggct

SEQ ID NO: 3026274 - DNA, 25 bp, Homo sapien
gaagcagcgagtctgccttgatgaa

SEQ ID NO: 3026275 - DNA, 25 bp, Homo sapien
gctgtcagaagcagcgagtctgcct

SEQ ID NO: 3026276 - DNA, 25 bp, Homo sapien
acctgggtgtgcaaggagacgggcg

SEQ ID NO: 3026277 - DNA, 25 bp, Homo sapien
tgcgaggtcacagtggtcgttacag

SEQ ID NO: 3026278 - DNA, 25 bp, Homo sapien
ctggatctgcgaggtcacagtggtc

SEQ ID NO: 3026279 - DNA, 25 bp, Homo sapien
gtcagtagctgctgggggaccacac

SEQ ID NO: 3026280 - DNA, 25 bp, Homo sapien
ccaggcagcggctgctgggtgttcc

SEQ ID NO: 3026281 - DNA, 25 bp, Homo sapien
ggaagccagtggcaggccaggcagc

SEQ ID NO: 3026282 - DNA, 25 bp, Homo sapien
gcagcggctgctgggtgttcccggg

SEQ ID NO: 3026283 - DNA, 25 bp, Homo sapien
ctgctgggtgttcccgggagggctt

SEQ ID NO: 3026284 - DNA, 25 bp, Homo sapien
tcttcaggtctctatcaccgactgg

SEQ ID NO: 3026285 - DNA, 25 bp, Homo sapien
ggcctccagtgcgaggttgcgccta

SEQ ID NO: 3026286 - DNA, 25 bp, Homo sapien
gagtcattgccccatgtggcttcct

SEQ ID NO: 3026287 - DNA, 25 bp, Homo sapien
gcttcctatggacagtccctgcctg

SEQ ID NO: 3026288 - DNA, 25 bp, Homo sapien
ctgtgctcctggaagccccaccccg

SEQ ID NO: 3026289 - DNA, 25 bp, Homo sapien
cgggtgtcccctcccgccacacatc

SEQ ID NO: 3026290 - DNA, 25 bp, Homo sapien
ttcctgtgctcctggaagccccacc

SEQ ID NO: 3026291 - DNA, 25 bp, Homo sapien
ccgggtgtcccctcccgccacacat

SEQ ID NO: 3026292 - DNA, 25 bp, Homo sapien
gtagagaagcctcccggagggctgg

SEQ ID NO: 3026293 - DNA, 25 bp, Homo sapien
tgtagagaagcctcccggagggctg

SEQ ID NO: 3026294 - DNA, 25 bp, Homo sapien
ctgtagagaagcctcccggagggct

SEQ ID NO: 3026295 - DNA, 25 bp, Homo sapien
agagaagcctcccggagggctgggg

SEQ ID NO: 3026296 - DNA, 25 bp, Homo sapien
agcatagggtgggtcaaataggcca

SEQ ID NO: 3026297 - DNA, 25 bp, Homo sapien
aaagcgggcatggacgggtacatct

SEQ ID NO: 3026298 - DNA, 25 bp, Homo sapien
gcccgctcaggaaggcttcaagaga

SEQ ID NO: 3026299 - DNA, 25 bp, Homo sapien
ggtctgcaggatgctcagtggcact

SEQ ID NO: 3026300 - DNA, 25 bp, Homo sapien
tcgaaagtgcaatccatggctccgc

SEQ ID NO: 3026301 - DNA, 25 bp, Homo sapien
aaagtgcaatccatggctccgcgat

SEQ ID NO: 3026302 - DNA, 25 bp, Homo sapien
gcaatccatggctccgcgatctgcg

SEQ ID NO: 3026303 - DNA, 25 bp, Homo sapien
cttcgaaagtgcaatccatggctcc

SEQ ID NO: 3026304 - DNA, 25 bp, Homo sapien
tctccctggcgtcgaatggtagaag

SEQ ID NO: 3026305 - DNA, 25 bp, Homo sapien
agcagagaagtcctggcccaacaca

SEQ ID NO: 3026306 - DNA, 25 bp, Homo sapien
gaaatcactggttcgctggcaccct

SEQ ID NO: 3026307 - DNA, 25 bp, Homo sapien
tcgttaaagggtcaaagcagagaag

SEQ ID NO: 3026308 - DNA, 25 bp, Homo sapien
cgggcttccctatgaacactgagaa

SEQ ID NO: 3026309 - DNA, 25 bp, Homo sapien
catgagggaaatcctgggcaggcct

SEQ ID NO: 3026310 - DNA, 25 bp, Homo sapien
gaaggcagatgcaggcgccctttaa

SEQ ID NO: 3026311 - DNA, 25 bp, Homo sapien
gggcagcccatcttaggaggtgaca

SEQ ID NO: 3026312 - DNA, 25 bp, Homo sapien
cagcacctgcgagatggcaattaca

SEQ ID NO: 3026313 - DNA, 25 bp, Homo sapien
caattctgggagtagcccctgctgc

SEQ ID NO: 3026314 - DNA, 25 bp, Homo sapien
caggtgtgcggaattaccctcagca

SEQ ID NO: 3026315 - DNA, 25 bp, Homo sapien
caattacatgtgatgctggtcggca

SEQ ID NO: 3026316 - DNA, 25 bp, Homo sapien
ccccagtcttcaaggggctgggact

SEQ ID NO: 3026317 - DNA, 25 bp, Homo sapien
aaaagatgtgtgtaattgggaagaa

SEQ ID NO: 3026318 - DNA, 25 bp, Homo sapien
ctactgaagtgggtaaagctgagcc

SEQ ID NO: 3026319 - DNA, 25 bp, Homo sapien
tcctctactgaagtgggtaaagctg

SEQ ID NO: 3026320 - DNA, 25 bp, Homo sapien
tgctccaaagatggaagccggtgcc

SEQ ID NO: 3026321 - DNA, 25 bp, Homo sapien
gaagcaacgggcctcctaattggca

SEQ ID NO: 3026322 - DNA, 25 bp, Homo sapien
aggtctgtctgtaaaccctcggtgc

SEQ ID NO: 3026323 - DNA, 25 bp, Homo sapien
tggccacgggttccatggacatgtc

SEQ ID NO: 3026324 - DNA, 25 bp, Homo sapien
catgcgcatgcgcaagagctccgac

SEQ ID NO: 3026325 - DNA, 25 bp, Homo sapien
tgaatgagtgcggaggctgtgcccg

SEQ ID NO: 3026326 - DNA, 25 bp, Homo sapien
ctgtgcccgtcgcagaccgggagaa

SEQ ID NO: 3026327 - DNA, 25 bp, Homo sapien
cctggcattcggtggatgtcagtga

SEQ ID NO: 3026328 - DNA, 25 bp, Homo sapien
aaagccgcctcgctgaagggtggct

SEQ ID NO: 3026329 - DNA, 25 bp, Homo sapien
ctccaaagccgcctcgctgaagggt

SEQ ID NO: 3026330 - DNA, 25 bp, Homo sapien
cctcgctgaagggtggctcgtccat

SEQ ID NO: 3026331 - DNA, 25 bp, Homo sapien
agcgccgcgtccagatcgcacggct

SEQ ID NO: 3026332 - DNA, 25 bp, Homo sapien
ggcgcagccgcctcctccgggaggc

SEQ ID NO: 3026333 - DNA, 25 bp, Homo sapien
gcagccgcctcctccgggaggcccg

SEQ ID NO: 3026334 - DNA, 25 bp, Homo sapien
cagccgcctcctccgggaggcccgc

SEQ ID NO: 3026335 - DNA, 25 bp, Homo sapien
gcgcagccgcctcctccgggaggcc

SEQ ID NO: 3026336 - DNA, 25 bp, Homo sapien
gcggccccggctctcagtcgccgcc

SEQ ID NO: 3026337 - DNA, 25 bp, Homo sapien
ccgcggccccggctctcagtcgccg

SEQ ID NO: 3026338 - DNA, 25 bp, Homo sapien
ccgctccgcgcgttcgtgtcctgcc

SEQ ID NO: 3026339 - DNA, 25 bp, Homo sapien
gccgccgctccgcgcgttcgtgtcc

SEQ ID NO: 3026340 - DNA, 25 bp, Homo sapien
cccaactgagttagagatgcgtgtc

SEQ ID NO: 3026341 - DNA, 25 bp, Homo sapien
ggagggcgcctatttcagcttcacg

SEQ ID NO: 3026342 - DNA, 25 bp, Homo sapien
cacttgtcagcatggccaatggcct

SEQ ID NO: 3026343 - DNA, 25 bp, Homo sapien
taaacttctaggacgagtggacagc

SEQ ID NO: 3026344 - DNA, 25 bp, Homo sapien
gtcttcacattcaagctggcctcag

SEQ ID NO: 3026345 - DNA, 25 bp, Homo sapien
tttctgcagctcaagtgaagccagc

SEQ ID NO: 3026346 - DNA, 25 bp, Homo sapien
gacagggctagaatcaggctggcca

SEQ ID NO: 3026347 - DNA, 25 bp, Homo sapien
cctgggtgaacctgagcaactggag

SEQ ID NO: 3026348 - DNA, 25 bp, Homo sapien
ggcaagccagagcaatacctccagt

SEQ ID NO: 3026349 - DNA, 25 bp, Homo sapien
gatcaggaacctgtgctgacctagg

SEQ ID NO: 3026350 - DNA, 25 bp, Homo sapien
gaatacatgttaccagcccctagct

SEQ ID NO: 3026351 - DNA, 25 bp, Homo sapien
gggctaactacaccatggatcagga

SEQ ID NO: 3026352 - DNA, 25 bp, Homo sapien
tgccctcccaattgtccttggccct

SEQ ID NO: 3026353 - DNA, 25 bp, Homo sapien
gtctcagcagcgtgccacatggcca

SEQ ID NO: 3026354 - DNA, 25 bp, Homo sapien
ttggtttattggtagtgtcgtctca

SEQ ID NO: 3026355 - DNA, 25 bp, Homo sapien
tgtcgtctcagcagcgtgccacatg

SEQ ID NO: 3026356 - DNA, 25 bp, Homo sapien
gagccagcttgggtgtgaagcctgg

SEQ ID NO: 3026357 - DNA, 25 bp, Homo sapien
aggaaagacagtccgggtggtctgc

SEQ ID NO: 3026358 - DNA, 25 bp, Homo sapien
ctgcagggaccctcggtgccaggct

SEQ ID NO: 3026359 - DNA, 25 bp, Homo sapien
aagaaggtgagagacccccaccatg

SEQ ID NO: 3026360 - DNA, 25 bp, Homo sapien
aagctggtcctgactagtgggaggc

SEQ ID NO: 3026361 - DNA, 25 bp, Homo sapien
gggccactctgcccgctcttcctgg

SEQ ID NO: 3026362 - DNA, 25 bp, Homo sapien
agttgtcccaccactcagagaaaag

SEQ ID NO: 3026363 - DNA, 25 bp, Homo sapien
agcagacacggtggcatttccatgg

SEQ ID NO: 3026364 - DNA, 25 bp, Homo sapien
ccagaagggtttgaggctggggcag

SEQ ID NO: 3026365 - DNA, 25 bp, Homo sapien
tctggcttcttccggccagaagggt

SEQ ID NO: 3026366 - DNA, 25 bp, Homo sapien
gggcatcctctgaccgctctggctt

SEQ ID NO: 3026367 - DNA, 25 bp, Homo sapien
ggggaggtcgggaaccatttcagca

SEQ ID NO: 3026368 - DNA, 25 bp, Homo sapien
ctgcaatacaaaccaaggcaagggt

SEQ ID NO: 3026369 - DNA, 25 bp, Homo sapien
tcagggttggtgagggcaggccacc

SEQ ID NO: 3026370 - DNA, 25 bp, Homo sapien
agaggaagcgcacccttccactccc

SEQ ID NO: 3026371 - DNA, 25 bp, Homo sapien
aatacaaaccaaggcaagggtcagg

SEQ ID NO: 3026372 - DNA, 25 bp, Homo sapien
gggagtgccccatttctatgggcac

SEQ ID NO: 3026373 - DNA, 25 bp, Homo sapien
actgaggagatgctgaggaatgcag

SEQ ID NO: 3026374 - DNA, 25 bp, Homo sapien
tgcggagcggtctggccacagggtc

SEQ ID NO: 3026375 - DNA, 25 bp, Homo sapien
ggtcctctgaagtttccctccctgc

SEQ ID NO: 3026376 - DNA, 25 bp, Homo sapien
gtgacaccctcctccagatcatcac

SEQ ID NO: 3026377 - DNA, 25 bp, Homo sapien
cttcacttgtgacaccctcctccag

SEQ ID NO: 3026378 - DNA, 25 bp, Homo sapien
gacaccctcctccagatcatcaccc

SEQ ID NO: 3026379 - DNA, 25 bp, Homo sapien
tcacttgtgacaccctcctccagat

SEQ ID NO: 3026380 - DNA, 25 bp, Homo sapien
caatagctggaaaccgcatgaggcc

SEQ ID NO: 3026381 - DNA, 25 bp, Homo sapien
catgaggccttgatggctcagggcc

SEQ ID NO: 3026382 - DNA, 25 bp, Homo sapien
tgggaagacgctgttgacaccaata

SEQ ID NO: 3026383 - DNA, 25 bp, Homo sapien
ttgacaccaatagctggaaaccgca

SEQ ID NO: 3026384 - DNA, 25 bp, Homo sapien
agatgaaatagaaaagtcgagtctc

SEQ ID NO: 3026385 - DNA, 25 bp, Homo sapien
cccacagatgaaatagaaaagtcga

SEQ ID NO: 3026386 - DNA, 25 bp, Homo sapien
acagatgaaatagaaaagtcgagtc

SEQ ID NO: 3026387 - DNA, 25 bp, Homo sapien
atgaaatagaaaagtcgagtctcac

SEQ ID NO: 3026388 - DNA, 25 bp, Homo sapien
tccatgacagatggctgcgcaacgg

SEQ ID NO: 3026389 - DNA, 25 bp, Homo sapien
tgtcgtccatgacagatggctgcgc

SEQ ID NO: 3026390 - DNA, 25 bp, Homo sapien
acctcaatgtcgtccatgacagatg

SEQ ID NO: 3026391 - DNA, 25 bp, Homo sapien
gagccacacctcaatgtcgtccatg

SEQ ID NO: 3026392 - DNA, 25 bp, Homo sapien
aatcatcaacagcaaccccaaataa

SEQ ID NO: 3026393 - DNA, 25 bp, Homo sapien
gaaggtggctgtacgcgttcttgaa

SEQ ID NO: 3026394 - DNA, 25 bp, Homo sapien
aaatgataagaagcaggctcccggc

SEQ ID NO: 3026395 - DNA, 25 bp, Homo sapien
cagaacaccggaacaaaggaaatca

SEQ ID NO: 3026396 - DNA, 25 bp, Homo sapien
aacaccttctaacttcaggaaggcg

SEQ ID NO: 3026397 - DNA, 25 bp, Homo sapien
tgattttgaactcagccactatgac

SEQ ID NO: 3026398 - DNA, 25 bp, Homo sapien
cgctgccacgcaggctgattttgaa

SEQ ID NO: 3026399 - DNA, 25 bp, Homo sapien
tgaactcagccactatgacagtccg

SEQ ID NO: 3026400 - DNA, 25 bp, Homo sapien
tgattctcacttggaactgcaggca

SEQ ID NO: 3026401 - DNA, 25 bp, Homo sapien
tgggcaatgatccaagctgaaggct

SEQ ID NO: 3026402 - DNA, 25 bp, Homo sapien
gattatccttccagagtaagagcct

SEQ ID NO: 3026403 - DNA, 25 bp, Homo sapien
cctctgaagataggtaggccaggct

SEQ ID NO: 3026404 - DNA, 25 bp, Homo sapien
tcaggtgtactatttccagagaagc

SEQ ID NO: 3026405 - DNA, 25 bp, Homo sapien
gagactggagctctacgtgggacct

SEQ ID NO: 3026406 - DNA, 25 bp, Homo sapien
tgagtcccaggagcataagggttcc

SEQ ID NO: 3026407 - DNA, 25 bp, Homo sapien
gcaggattaataggcacaagggcat

SEQ ID NO: 3026408 - DNA, 25 bp, Homo sapien
tttgggctctgctagaggtgaaatg

SEQ ID NO: 3026409 - DNA, 25 bp, Homo sapien
catcacatgtaccacagctttgggc

SEQ ID NO: 3026410 - DNA, 25 bp, Homo sapien
tacagcctgagatgagctgaccctc

SEQ ID NO: 3026411 - DNA, 25 bp, Homo sapien
ggtcatcccaagacatacagcctga

SEQ ID NO: 3026412 - DNA, 25 bp, Homo sapien
ggcacccctgccagaaagaaagcgt

SEQ ID NO: 3026413 - DNA, 25 bp, Homo sapien
gcttggctcggctggtgactcctca

SEQ ID NO: 3026414 - DNA, 25 bp, Homo sapien
tctgattcacaaaggctcggcaggt

SEQ ID NO: 3026415 - DNA, 25 bp, Homo sapien
atttttgggactgggaatctgtggc

SEQ ID NO: 3026416 - DNA, 25 bp, Homo sapien
cttgggttataagccagctgtctat

SEQ ID NO: 3026417 - DNA, 25 bp, Homo sapien
cagctgtctatgggctccaggtcag

SEQ ID NO: 3026418 - DNA, 25 bp, Homo sapien
tccaggtcagactccccacctctac

SEQ ID NO: 3026419 - DNA, 25 bp, Homo sapien
cattccttgggttataagccagctg

SEQ ID NO: 3026420 - DNA, 25 bp, Homo sapien
aggaaatgtgatgccctgctcccaa

SEQ ID NO: 3026421 - DNA, 25 bp, Homo sapien
agaagtcaatagcacatattgtgga

SEQ ID NO: 3026422 - DNA, 25 bp, Homo sapien
cacgtaaggaaatgtgatgccctgc

SEQ ID NO: 3026423 - DNA, 25 bp, Homo sapien
ttcagacgtgatcctttgccacgta

SEQ ID NO: 3026424 - DNA, 25 bp, Homo sapien
caattacggctatcagggttgggag

SEQ ID NO: 3026425 - DNA, 25 bp, Homo sapien
tcacagaaggttgaccagagccgct

SEQ ID NO: 3026426 - DNA, 25 bp, Homo sapien
tgaaaacagggagctagtccaagcc

SEQ ID NO: 3026427 - DNA, 25 bp, Homo sapien
caatctgcctactgctgggtggaaa

SEQ ID NO: 3026428 - DNA, 25 bp, Homo sapien
gggatgcatgccctcagatccacca

SEQ ID NO: 3026429 - DNA, 25 bp, Homo sapien
tgcgccctctggtgaccagtgcaga

SEQ ID NO: 3026430 - DNA, 25 bp, Homo sapien
cagagggatgcatgccctcagatcc

SEQ ID NO: 3026431 - DNA, 25 bp, Homo sapien
actcctgtggaaaggcacggcactg

SEQ ID NO: 3026432 - DNA, 25 bp, Homo sapien
agtggacagatgatcactgccctct

SEQ ID NO: 3026433 - DNA, 25 bp, Homo sapien
attgggacccagtaagcaaacagcc

SEQ ID NO: 3026434 - DNA, 25 bp, Homo sapien
gctaaaaattgggacccagtaagca

SEQ ID NO: 3026435 - DNA, 25 bp, Homo sapien
tccagtggacagatgatcactgccc

SEQ ID NO: 3026436 - DNA, 25 bp, Homo sapien
taatcctaggattggaaccccagct

SEQ ID NO: 3026437 - DNA, 25 bp, Homo sapien
tcagagatgtggctcgggtcagcat

SEQ ID NO: 3026438 - DNA, 25 bp, Homo sapien
gctctgctaggccagtgacaaatgg

SEQ ID NO: 3026439 - DNA, 25 bp, Homo sapien
tcaatgaggcactacctgggttcca

SEQ ID NO: 3026440 - DNA, 25 bp, Homo sapien
ttcgattgtctagtgcagaagcaag

SEQ ID NO: 3026441 - DNA, 25 bp, Homo sapien
tctgaactctgttttcgattgtcta

SEQ ID NO: 3026442 - DNA, 25 bp, Homo sapien
tagtgcagaagcaagtcctccgaca

SEQ ID NO: 3026443 - DNA, 25 bp, Homo sapien
gcaagtcctccgacagcctgaggat

SEQ ID NO: 3026444 - DNA, 25 bp, Homo sapien
cagcacaagcagagttcattttcct

SEQ ID NO: 3026445 - DNA, 25 bp, Homo sapien
aagcagcacaagcagagttcatttt

SEQ ID NO: 3026446 - DNA, 25 bp, Homo sapien
ttcctccagtggtcatggagggatg

SEQ ID NO: 3026447 - DNA, 25 bp, Homo sapien
cacaagcagagttcattttcctcca

SEQ ID NO: 3026448 - DNA, 25 bp, Homo sapien
tcctagccagagctgctatcagagg

SEQ ID NO: 3026449 - DNA, 25 bp, Homo sapien
tgtcactgattatgggaggtcttcc

SEQ ID NO: 3026450 - DNA, 25 bp, Homo sapien
tctcgctgtaaggaatgggttcacc

SEQ ID NO: 3026451 - DNA, 25 bp, Homo sapien
tgctgagtgcaccaagatgctgggt

SEQ ID NO: 3026452 - DNA, 25 bp, Homo sapien
cgtcacggggattacattgctggag

SEQ ID NO: 3026453 - DNA, 25 bp, Homo sapien
tcctctcgtctgggcaaacatgtca

SEQ ID NO: 3026454 - DNA, 25 bp, Homo sapien
aaacatgtcaaagccgtcacgggga

SEQ ID NO: 3026455 - DNA, 25 bp, Homo sapien
ctcgtctgggcaaacatgtcaaagc

SEQ ID NO: 3026456 - DNA, 25 bp, Homo sapien
ctgagtacctgggactacaggtgtg

SEQ ID NO: 3026457 - DNA, 25 bp, Homo sapien
caggagattctcctactgcagcctc

SEQ ID NO: 3026458 - DNA, 25 bp, Homo sapien
ggctcaggagattctcctactgcag

SEQ ID NO: 3026459 - DNA, 25 bp, Homo sapien
tcaggagattctcctactgcagcct

SEQ ID NO: 3026460 - DNA, 25 bp, Homo sapien
tttttaagaagagaggtagcagaat

SEQ ID NO: 3026461 - DNA, 25 bp, Homo sapien
tatgcctggcctactataccttttt

SEQ ID NO: 3026462 - DNA, 25 bp, Homo sapien
gaggtagcagaatccaatttgattt

SEQ ID NO: 3026463 - DNA, 25 bp, Homo sapien
gtgtagtagagcgatgtcggctcac

SEQ ID NO: 3026464 - DNA, 25 bp, Homo sapien
gaaagtaaggtggtacaactggcta

SEQ ID NO: 3026465 - DNA, 25 bp, Homo sapien
ggactcaggaatacactttcacatg

SEQ ID NO: 3026466 - DNA, 25 bp, Homo sapien
ccgtgacctttctttaattcattgg

SEQ ID NO: 3026467 - DNA, 25 bp, Homo sapien
gcgcacggccgtgacctttctttaa

SEQ ID NO: 3026468 - DNA, 25 bp, Homo sapien
aagatgggggcgctgtgttccccac

SEQ ID NO: 3026469 - DNA, 25 bp, Homo sapien
gttgtcttcggttacttcattcagt

SEQ ID NO: 3026470 - DNA, 25 bp, Homo sapien
ccattgggctcaccacggctggaga

SEQ ID NO: 3026471 - DNA, 25 bp, Homo sapien
ctggccccaggtctattaagttgtc

SEQ ID NO: 3026472 - DNA, 25 bp, Homo sapien
gggttccaagaagaaaagtatcagc

SEQ ID NO: 3026473 - DNA, 25 bp, Homo sapien
caaacttagggcttgcttgccacct

SEQ ID NO: 3026474 - DNA, 25 bp, Homo sapien
caaggcaactatgcagggttccaag

SEQ ID NO: 3026475 - DNA, 25 bp, Homo sapien
tatcagcgctgctctagtacagaag

SEQ ID NO: 3026476 - DNA, 25 bp, Homo sapien
ccattactggcattttgaacggatc

SEQ ID NO: 3026477 - DNA, 25 bp, Homo sapien
tcggccagacctgtatcgttcgaac

SEQ ID NO: 3026478 - DNA, 25 bp, Homo sapien
gcattttgaacggatcggccagacc

SEQ ID NO: 3026479 - DNA, 25 bp, Homo sapien
gaacggatcggccagacctgtatcg

SEQ ID NO: 3026480 - DNA, 25 bp, Homo sapien
taaccaccttaccttggagctgcag

SEQ ID NO: 3026481 - DNA, 25 bp, Homo sapien
gaaatgctcgccagtagctgctaca

SEQ ID NO: 3026482 - DNA, 25 bp, Homo sapien
catgggcagcggtagctaagagact

SEQ ID NO: 3026483 - DNA, 25 bp, Homo sapien
tgagcaactgtcgaaggccaggtca

SEQ ID NO: 3026484 - DNA, 25 bp, Homo sapien
gagcctaattctgcacgtcaacttc

SEQ ID NO: 3026485 - DNA, 25 bp, Homo sapien
aagaaatccctctgttatggcaaca

SEQ ID NO: 3026486 - DNA, 25 bp, Homo sapien
gccgggaacaaattagcatctctga

SEQ ID NO: 3026487 - DNA, 25 bp, Homo sapien
tcaaaggagcaggtgcagaagctct

SEQ ID NO: 3026488 - DNA, 25 bp, Homo sapien
ctctcgtatcgaaggaagacgttgt

SEQ ID NO: 3026489 - DNA, 25 bp, Homo sapien
tcctcggtgacctcctcattggaca

SEQ ID NO: 3026490 - DNA, 25 bp, Homo sapien
acgcgggagatgagctccacgatgc

SEQ ID NO: 3026491 - DNA, 25 bp, Homo sapien
ttgaggtcatcgttcacatgcagca

SEQ ID NO: 3026492 - DNA, 25 bp, Homo sapien
cagacaccgttctccatcacttggt

SEQ ID NO: 3026493 - DNA, 25 bp, Homo sapien
tttttcagcagacaaatgtccagac

SEQ ID NO: 3026494 - DNA, 25 bp, Homo sapien
tgcacctctgggtagcctgctgggt

SEQ ID NO: 3026495 - DNA, 25 bp, Homo sapien
gacatgtgccgaattcaaagtagaa

SEQ ID NO: 3026496 - DNA, 25 bp, Homo sapien
tcaccaaggtggtcaatcagccagt

SEQ ID NO: 3026497 - DNA, 25 bp, Homo sapien
gactctaaagtattcagaggccggg

SEQ ID NO: 3026498 - DNA, 25 bp, Homo sapien
atgtccctggtatcctgcaacacag

SEQ ID NO: 3026499 - DNA, 25 bp, Homo sapien
gccacacacagtgaaaaagcccagt

SEQ ID NO: 3026500 - DNA, 25 bp, Homo sapien
gggctctcaaaaagctgcctgggcc

SEQ ID NO: 3026501 - DNA, 25 bp, Homo sapien
gagaggggctctcaaaaagctgcct

SEQ ID NO: 3026502 - DNA, 25 bp, Homo sapien
ttgtgaatggctcatgtccccaggc

SEQ ID NO: 3026503 - DNA, 25 bp, Homo sapien
tctcctctgttgtgaatggctcatg

SEQ ID NO: 3026504 - DNA, 25 bp, Homo sapien
tgccatggactgttccgggccaccg

SEQ ID NO: 3026505 - DNA, 25 bp, Homo sapien
tagatttaccccatactttggaaga

SEQ ID NO: 3026506 - DNA, 25 bp, Homo sapien
ccagggatgtggacgtgccaacaca

SEQ ID NO: 3026507 - DNA, 25 bp, Homo sapien
ccaacacttgggcagtagatttacc

SEQ ID NO: 3026508 - DNA, 25 bp, Homo sapien
cgctccaggtgtctgcggaaaatct

SEQ ID NO: 3026509 - DNA, 25 bp, Homo sapien
ctctttgctccagcgctccaggtgt

SEQ ID NO: 3026510 - DNA, 25 bp, Homo sapien
tccagcgctccaggtgtctgcggaa

SEQ ID NO: 3026511 - DNA, 25 bp, Homo sapien
atgaggaccgagccaggcactgctg

SEQ ID NO: 3026512 - DNA, 25 bp, Homo sapien
gcaaaaggatctcaagtcccagctc

SEQ ID NO: 3026513 - DNA, 25 bp, Homo sapien
tgagcaaaaggatctcaagtcccag

SEQ ID NO: 3026514 - DNA, 25 bp, Homo sapien
gagcaaaaggatctcaagtcccagc

SEQ ID NO: 3026515 - DNA, 25 bp, Homo sapien
tgatgagcaaaaggatctcaagtcc

SEQ ID NO: 3026516 - DNA, 25 bp, Homo sapien
caggcccattacaagaaagtgtggc

SEQ ID NO: 3026517 - DNA, 25 bp, Homo sapien
caaacaggcccattacaagaaagtg

SEQ ID NO: 3026518 - DNA, 25 bp, Homo sapien
gcccattacaagaaagtgtggcctc

SEQ ID NO: 3026519 - DNA, 25 bp, Homo sapien
ctccagcaaacaggcccattacaag

SEQ ID NO: 3026520 - DNA, 25 bp, Homo sapien
gcatctgggtaacgcctggccgaac

SEQ ID NO: 3026521 - DNA, 25 bp, Homo sapien
agtttctggactgacctcagaatcc

SEQ ID NO: 3026522 - DNA, 25 bp, Homo sapien
gtttctggactgacctcagaatcct

SEQ ID NO: 3026523 - DNA, 25 bp, Homo sapien
tgtgcatctgggtaacgcctggccg

SEQ ID NO: 3026524 - DNA, 25 bp, Homo sapien
aaggtgtagcacttggggaccaaga

SEQ ID NO: 3026525 - DNA, 25 bp, Homo sapien
tcacaggcggcaagcatgtgccagc

SEQ ID NO: 3026526 - DNA, 25 bp, Homo sapien
tagaaggtgtagcacttggggacca

SEQ ID NO: 3026527 - DNA, 25 bp, Homo sapien
agcagcagggtagaaggtgtagcac

SEQ ID NO: 3026528 - DNA, 25 bp, Homo sapien
aaagtgtgtggggccttgcagttca

SEQ ID NO: 3026529 - DNA, 25 bp, Homo sapien
tgttccctcaagcatcttgcctccc

SEQ ID NO: 3026530 - DNA, 25 bp, Homo sapien
ctcaagcatcttgcctcccattgaa

SEQ ID NO: 3026531 - DNA, 25 bp, Homo sapien
tcttgcctcccattgaaaagtgtgt

SEQ ID NO: 3026532 - DNA, 25 bp, Homo sapien
ggaccatttctgttaacatctcaga

SEQ ID NO: 3026533 - DNA, 25 bp, Homo sapien
tgtgtttcctcgaacgacgtccagt

SEQ ID NO: 3026534 - DNA, 25 bp, Homo sapien
gaacgacgtccagttcactccgcag

SEQ ID NO: 3026535 - DNA, 25 bp, Homo sapien
tctcagacatgacttttgtgtttcc

SEQ ID NO: 3026536 - DNA, 25 bp, Homo sapien
ttctgaattggctgtgatggggcca

SEQ ID NO: 3026537 - DNA, 25 bp, Homo sapien
tgtgatggggccagtcacactcaga

SEQ ID NO: 3026538 - DNA, 25 bp, Homo sapien
ctgttctgaattggctgtgatgggg

SEQ ID NO: 3026539 - DNA, 25 bp, Homo sapien
tggggccagtcacactcagagctgg

SEQ ID NO: 3026540 - DNA, 25 bp, Homo sapien
tgctgtgattgggacctgggcatgg

SEQ ID NO: 3026541 - DNA, 25 bp, Homo sapien
ggcatggtcgcagctggatccactt

SEQ ID NO: 3026542 - DNA, 25 bp, Homo sapien
tgcggagtagggagcaggaggcggc

SEQ ID NO: 3026543 - DNA, 25 bp, Homo sapien
gcggcgaggaataggaaccagcact

SEQ ID NO: 3026544 - DNA, 25 bp, Homo sapien
gacagagcgtccaagtctgccatgg

SEQ ID NO: 3026545 - DNA, 25 bp, Homo sapien
gagatcaggactgcttcgaaaggca

SEQ ID NO: 3026546 - DNA, 25 bp, Homo sapien
tgcttcgaaaggcatcagcccatgc

SEQ ID NO: 3026547 - DNA, 25 bp, Homo sapien
tcatatatgtgcacaacgccggtga

SEQ ID NO: 3026548 - DNA, 25 bp, Homo sapien
tagaaggcctgttaggaagcatttc

SEQ ID NO: 3026549 - DNA, 25 bp, Homo sapien
ataatagaaggcctgttaggaagca

SEQ ID NO: 3026550 - DNA, 25 bp, Homo sapien
gggataatagaaggcctgttaggaa

SEQ ID NO: 3026551 - DNA, 25 bp, Homo sapien
ctgggataatagaaggcctgttagg

SEQ ID NO: 3026552 - DNA, 25 bp, Homo sapien
cctctccccgagaccagtgctctcc

SEQ ID NO: 3026553 - DNA, 25 bp, Homo sapien
tcctctccccgagaccagtgctctc

SEQ ID NO: 3026554 - DNA, 25 bp, Homo sapien
gtcctctccccgagaccagtgctct

SEQ ID NO: 3026555 - DNA, 25 bp, Homo sapien
gcacatgcaaattgcactggctaaa

SEQ ID NO: 3026556 - DNA, 25 bp, Homo sapien
tgcacatgcaaattgcactggctaa

SEQ ID NO: 3026557 - DNA, 25 bp, Homo sapien
cacatgcaaattgcactggctaaac

SEQ ID NO: 3026558 - DNA, 25 bp, Homo sapien
ttgcacatgcaaattgcactggcta

SEQ ID NO: 3026559 - DNA, 25 bp, Homo sapien
accctggctttcaatggtgctgctg

SEQ ID NO: 3026560 - DNA, 25 bp, Homo sapien
tgctgagcgtgaacaaaaacacaaa

SEQ ID NO: 3026561 - DNA, 25 bp, Homo sapien
cacaaaacttaatttagcatgtatt

SEQ ID NO: 3026562 - DNA, 25 bp, Homo sapien
aatggtgctgctgagcgtgaacaaa

SEQ ID NO: 3026563 - DNA, 25 bp, Homo sapien
gtcaacatttatcaggttaaactga

SEQ ID NO: 3026564 - DNA, 25 bp, Homo sapien
accgagtctctcacccgtgtacaga

SEQ ID NO: 3026565 - DNA, 25 bp, Homo sapien
cagagaaggcagtcagtcaacattt

SEQ ID NO: 3026566 - DNA, 25 bp, Homo sapien
ccttttgaaggcagacaccgagtct

SEQ ID NO: 3026567 - DNA, 25 bp, Homo sapien
gaagcggtggccacagttcttcaca

SEQ ID NO: 3026568 - DNA, 25 bp, Homo sapien
gatgaaatctcggttggccacaagg

SEQ ID NO: 3026569 - DNA, 25 bp, Homo sapien
tttgaccagaacactgtcgatgaaa

SEQ ID NO: 3026570 - DNA, 25 bp, Homo sapien
ctggatcagagcaagcactttgtcc

SEQ ID NO: 3026571 - DNA, 25 bp, Homo sapien
aagaggaaactgatatctagagaag

SEQ ID NO: 3026572 - DNA, 25 bp, Homo sapien
tgggcttctgtacctgacagcactg

SEQ ID NO: 3026573 - DNA, 25 bp, Homo sapien
ggaaactgatatctagagaaggagt

SEQ ID NO: 3026574 - DNA, 25 bp, Homo sapien
tgctctgggcttctgtacctgacag

SEQ ID NO: 3026575 - DNA, 25 bp, Homo sapien
tttaccaaattgaagctcaccactc

SEQ ID NO: 3026576 - DNA, 25 bp, Homo sapien
cactccctgtttcagaggacaggaa

SEQ ID NO: 3026577 - DNA, 25 bp, Homo sapien
cattcagaggttgtgctaagtgggc

SEQ ID NO: 3026578 - DNA, 25 bp, Homo sapien
tatcttctgctcgtatacatttacc

SEQ ID NO: 3026579 - DNA, 25 bp, Homo sapien
ctgtgaggggggcaaggccaggagc

SEQ ID NO: 3026580 - DNA, 25 bp, Homo sapien
caaggccaggagcaaggagttcccc

SEQ ID NO: 3026581 - DNA, 25 bp, Homo sapien
gggcaaggccaggagcaaggagttc

SEQ ID NO: 3026582 - DNA, 25 bp, Homo sapien
tgtgaggggggcaaggccaggagca

SEQ ID NO: 3026583 - DNA, 25 bp, Homo sapien
gccgcttcttcagggctcgaatggc

SEQ ID NO: 3026584 - DNA, 25 bp, Homo sapien
ggttcccgttgagccgcttcttcag

SEQ ID NO: 3026585 - DNA, 25 bp, Homo sapien
catcacctctctgtagttccggttc

SEQ ID NO: 3026586 - DNA, 25 bp, Homo sapien
tctgtagttccggttcccgttgagc

SEQ ID NO: 3026587 - DNA, 25 bp, Homo sapien
cctctgggaccatggcatcagggac

SEQ ID NO: 3026588 - DNA, 25 bp, Homo sapien
ccgtctcattgatgatgtcacagat

SEQ ID NO: 3026589 - DNA, 25 bp, Homo sapien
ttcctccgtctcattgatgatgtca

SEQ ID NO: 3026590 - DNA, 25 bp, Homo sapien
ccttcctccgtctcattgatgatgt

SEQ ID NO: 3026591 - DNA, 25 bp, Homo sapien
ctccgtctcattgatgatgtcacag

SEQ ID NO: 3026592 - DNA, 25 bp, Homo sapien
ttcaacgtccaatcctcactttgca

SEQ ID NO: 3026593 - DNA, 25 bp, Homo sapien
caacgtccaatcctcactttgcagg

SEQ ID NO: 3026594 - DNA, 25 bp, Homo sapien
attcaacgtccaatcctcactttgc

SEQ ID NO: 3026595 - DNA, 25 bp, Homo sapien
tcaacgtccaatcctcactttgcag

SEQ ID NO: 3026596 - DNA, 25 bp, Homo sapien
gagctaaatacccatggttgtgttt

SEQ ID NO: 3026597 - DNA, 25 bp, Homo sapien
cagtagagctaaatacccatggttg

SEQ ID NO: 3026598 - DNA, 25 bp, Homo sapien
gtagagctaaatacccatggttgtg

SEQ ID NO: 3026599 - DNA, 25 bp, Homo sapien
ctaaatacccatggttgtgtttgtg

SEQ ID NO: 3026600 - DNA, 25 bp, Homo sapien
tacagttcacacaaggactgagcct

SEQ ID NO: 3026601 - DNA, 25 bp, Homo sapien
tggtgaaaggcagcatcgttgcgcc

SEQ ID NO: 3026602 - DNA, 25 bp, Homo sapien
gtctagaacagggagtgtgaactca

SEQ ID NO: 3026603 - DNA, 25 bp, Homo sapien
tcttcatgtcaagaaggcctggctt

SEQ ID NO: 3026604 - DNA, 25 bp, Homo sapien
tccaagcattaaaactccaagaggt

SEQ ID NO: 3026605 - DNA, 25 bp, Homo sapien
caagcattaaaactccaagaggtct

SEQ ID NO: 3026606 - DNA, 25 bp, Homo sapien
tccttaagaatccaagcattaaaac

SEQ ID NO: 3026607 - DNA, 25 bp, Homo sapien
agaatccaagcattaaaactccaag

SEQ ID NO: 3026608 - DNA, 25 bp, Homo sapien
tatacaatattcagggctaacagac

SEQ ID NO: 3026609 - DNA, 25 bp, Homo sapien
ccccaacacaagcatgtattcctgt

SEQ ID NO: 3026610 - DNA, 25 bp, Homo sapien
taagtgggtcaccttgaataatacg

SEQ ID NO: 3026611 - DNA, 25 bp, Homo sapien
caaagcttgccaagggaaacatgca

SEQ ID NO: 3026612 - DNA, 25 bp, Homo sapien
caaagtgcttctgctacgtgggttt

SEQ ID NO: 3026613 - DNA, 25 bp, Homo sapien
caagaactgcccatctagacagaag

SEQ ID NO: 3026614 - DNA, 25 bp, Homo sapien
cactatagtaaagggtacaagccag

SEQ ID NO: 3026615 - DNA, 25 bp, Homo sapien
tacaagccagaatgcagtcgggact

SEQ ID NO: 3026616 - DNA, 25 bp, Homo sapien
tctgagtaggcaagtgtgcatcaca

SEQ ID NO: 3026617 - DNA, 25 bp, Homo sapien
ttaaaagtgtatacctggctgggca

SEQ ID NO: 3026618 - DNA, 25 bp, Homo sapien
tgtcattaaatccagccagggagac

SEQ ID NO: 3026619 - DNA, 25 bp, Homo sapien
tgactcactgcctggaaaggcttgc

SEQ ID NO: 3026620 - DNA, 25 bp, Homo sapien
taactttcatctgatgggaggcctc

SEQ ID NO: 3026621 - DNA, 25 bp, Homo sapien
gaggtcttgctaaagtgaccgcccc

SEQ ID NO: 3026622 - DNA, 25 bp, Homo sapien
ggccgcccagagaagctaaatgact

SEQ ID NO: 3026623 - DNA, 25 bp, Homo sapien
ggtgttgagacgaataccaggcaaa

SEQ ID NO: 3026624 - DNA, 25 bp, Homo sapien
gacagagggctgaatcctgctgcct

SEQ ID NO: 3026625 - DNA, 25 bp, Homo sapien
ggtatgttctgtccccaaattctga

SEQ ID NO: 3026626 - DNA, 25 bp, Homo sapien
tcagatagtggcagaccagcctgct

SEQ ID NO: 3026627 - DNA, 25 bp, Homo sapien
tcttgatatgggtccaaagtgctgc

SEQ ID NO: 3026628 - DNA, 25 bp, Homo sapien
ataccaaagggtggatttaaagcag

SEQ ID NO: 3026629 - DNA, 25 bp, Homo sapien
tgcaaataccaaagggtggatttaa

SEQ ID NO: 3026630 - DNA, 25 bp, Homo sapien
ctttgcaaataccaaagggtggatt

SEQ ID NO: 3026631 - DNA, 25 bp, Homo sapien
taccaaagggtggatttaaagcaga

SEQ ID NO: 3026632 - DNA, 25 bp, Homo sapien
ttctccaatggggaacagcagtgtg

SEQ ID NO: 3026633 - DNA, 25 bp, Homo sapien
caatggggaacagcagtgtggaact

SEQ ID NO: 3026634 - DNA, 25 bp, Homo sapien
tgtggaactcgtgccaggaaaaccc

SEQ ID NO: 3026635 - DNA, 25 bp, Homo sapien
gcagtgtggaactcgtgccaggaaa

SEQ ID NO: 3026636 - DNA, 25 bp, Homo sapien
gaatctcccacataagcgagaagca

SEQ ID NO: 3026637 - DNA, 25 bp, Homo sapien
cagaatctcccacataagcgagaag

SEQ ID NO: 3026638 - DNA, 25 bp, Homo sapien
ggagcagaatctcccacataagcga

SEQ ID NO: 3026639 - DNA, 25 bp, Homo sapien
tctcccacataagcgagaagcagat

SEQ ID NO: 3026640 - DNA, 25 bp, Homo sapien
aatctgtgacagcataggtggctca

SEQ ID NO: 3026641 - DNA, 25 bp, Homo sapien
tgcaagatctgggaaaacctaggcc

SEQ ID NO: 3026642 - DNA, 25 bp, Homo sapien
tagtccccaggagaatggaaactgc

SEQ ID NO: 3026643 - DNA, 25 bp, Homo sapien
ggttctgctacctactccctgagag

SEQ ID NO: 3026644 - DNA, 25 bp, Homo sapien
gacatgagcattttgtccctaggaa

SEQ ID NO: 3026645 - DNA, 25 bp, Homo sapien
caaaagcgagctgtaaaatgaagcc

SEQ ID NO: 3026646 - DNA, 25 bp, Homo sapien
tgcgccacacactaagcagctgatt

SEQ ID NO: 3026647 - DNA, 25 bp, Homo sapien
gaaacttcatggaacatgcgccaca

SEQ ID NO: 3026648 - DNA, 25 bp, Homo sapien
catgaattaatcaggaagcagcagt

SEQ ID NO: 3026649 - DNA, 25 bp, Homo sapien
tagaggaacactggagtaagaagca

SEQ ID NO: 3026650 - DNA, 25 bp, Homo sapien
taagaagcaacatggaatgctggtc

SEQ ID NO: 3026651 - DNA, 25 bp, Homo sapien
gactgcagagagtcattctggtcct

SEQ ID NO: 3026652 - DNA, 25 bp, Homo sapien
cacatagggtgtgtagtgggcctca

SEQ ID NO: 3026653 - DNA, 25 bp, Homo sapien
gggtgtagaaacagcccacagctga

SEQ ID NO: 3026654 - DNA, 25 bp, Homo sapien
tgtacagttagccactctcaggaca

SEQ ID NO: 3026655 - DNA, 25 bp, Homo sapien
gacaggcataggacagggcaagcat

SEQ ID NO: 3026656 - DNA, 25 bp, Homo sapien
tgacgacatctctgctcacctcaat

SEQ ID NO: 3026657 - DNA, 25 bp, Homo sapien
ggagtacagtgacgacatctctgct

SEQ ID NO: 3026658 - DNA, 25 bp, Homo sapien
acacgccaccaagcccagataaatt

SEQ ID NO: 3026659 - DNA, 25 bp, Homo sapien
agtgacgacatctctgctcacctca

SEQ ID NO: 3026660 - DNA, 25 bp, Homo sapien
gaggcactgccccactggtgtgctg

SEQ ID NO: 3026661 - DNA, 25 bp, Homo sapien
actggtgtgctgaacgggttcccca

SEQ ID NO: 3026662 - DNA, 25 bp, Homo sapien
tgctgaacgggttccccaggaggaa

SEQ ID NO: 3026663 - DNA, 25 bp, Homo sapien
cgaggcactgccccactggtgtgct

SEQ ID NO: 3026664 - DNA, 25 bp, Homo sapien
gtggacaacacgcagcggcccgggc

SEQ ID NO: 3026665 - DNA, 25 bp, Homo sapien
tggacaacacgcagcggcccgggcc

SEQ ID NO: 3026666 - DNA, 25 bp, Homo sapien
gggtggacaacacgcagcggcccgg

SEQ ID NO: 3026667 - DNA, 25 bp, Homo sapien
ttgggtggacaacacgcagcggccc

SEQ ID NO: 3026668 - DNA, 25 bp, Homo sapien
taggcctccgctgtaacccgccgga

SEQ ID NO: 3026669 - DNA, 25 bp, Homo sapien
gcctccgctgtaacccgccggactc

SEQ ID NO: 3026670 - DNA, 25 bp, Homo sapien
cctaggcctccgctgtaacccgccg

SEQ ID NO: 3026671 - DNA, 25 bp, Homo sapien
gccacctaggcctccgctgtaaccc

SEQ ID NO: 3026672 - DNA, 25 bp, Homo sapien
tcaacttcacatctcccacggggag

SEQ ID NO: 3026673 - DNA, 25 bp, Homo sapien
ctagggacattagggactggaaagc

SEQ ID NO: 3026674 - DNA, 25 bp, Homo sapien
tgctctctgcttaactatgtaccca

SEQ ID NO: 3026675 - DNA, 25 bp, Homo sapien
agctcaagcagccagctccgatggg

SEQ ID NO: 3026676 - DNA, 25 bp, Homo sapien
taagtatacaaaccccgagatgcag

SEQ ID NO: 3026677 - DNA, 25 bp, Homo sapien
tggacgatgacatgctcaagctggc

SEQ ID NO: 3026678 - DNA, 25 bp, Homo sapien
gattccatgcaaagtccacggtcga

SEQ ID NO: 3026679 - DNA, 25 bp, Homo sapien
gaaccagccgtgcaactcgatggag

SEQ ID NO: 3026680 - DNA, 25 bp, Homo sapien
ttgggtatccctgtgatgaggtaag

SEQ ID NO: 3026681 - DNA, 25 bp, Homo sapien
ggtaccaagtgatagtccagctgtg

SEQ ID NO: 3026682 - DNA, 25 bp, Homo sapien
cagcctctcatgatggcgatggcat

SEQ ID NO: 3026683 - DNA, 25 bp, Homo sapien
gatgacgctgtagccatgcaagctg

SEQ ID NO: 3026684 - DNA, 25 bp, Homo sapien
caaatttaataagttctcataacct

SEQ ID NO: 3026685 - DNA, 25 bp, Homo sapien
acaccaaatttaataagttctcata

SEQ ID NO: 3026686 - DNA, 25 bp, Homo sapien
caccaaatttaataagttctcataa

SEQ ID NO: 3026687 - DNA, 25 bp, Homo sapien
gccgttagggccgaaagcttatata

SEQ ID NO: 3026688 - DNA, 25 bp, Homo sapien
caaggcagatgagcgttagtttaac

SEQ ID NO: 3026689 - DNA, 25 bp, Homo sapien
gaggtttgggctaaggcagttcatc

SEQ ID NO: 3026690 - DNA, 25 bp, Homo sapien
tacatgggagcattcacaagcaaaa

SEQ ID NO: 3026691 - DNA, 25 bp, Homo sapien
caaagctgagacttgcacttgggca

SEQ ID NO: 3026692 - DNA, 25 bp, Homo sapien
tagtgctcaaagagcctcacatgtg

SEQ ID NO: 3026693 - DNA, 25 bp, Homo sapien
ggtagcttctacacgctttcagagc

SEQ ID NO: 3026694 - DNA, 25 bp, Homo sapien
tatcaatcgcactttacagaccagg

SEQ ID NO: 3026695 - DNA, 25 bp, Homo sapien
tgaattgaacctcatcggatgctgc

SEQ ID NO: 3026696 - DNA, 25 bp, Homo sapien
tatgtgttacaaggcagcggaggct

SEQ ID NO: 3026697 - DNA, 25 bp, Homo sapien
tggcaggcctggagatcacatcttc

SEQ ID NO: 3026698 - DNA, 25 bp, Homo sapien
gcagttgccgcttctcaggtgacgt

SEQ ID NO: 3026699 - DNA, 25 bp, Homo sapien
cagcactgttcgcaataacaagata

SEQ ID NO: 3026700 - DNA, 25 bp, Homo sapien
tactgtaagtaagaatgtaaactag

SEQ ID NO: 3026701 - DNA, 25 bp, Homo sapien
aaactacaaacagaactatcatatg

SEQ ID NO: 3026702 - DNA, 25 bp, Homo sapien
taaactaggacagccactaggaaga

SEQ ID NO: 3026703 - DNA, 25 bp, Homo sapien
cagtgccaacgtgtttaaacaaaga

SEQ ID NO: 3026704 - DNA, 25 bp, Homo sapien
gcccggccagtgccaacgtgtttaa

SEQ ID NO: 3026705 - DNA, 25 bp, Homo sapien
gccagtgccaacgtgtttaaacaaa

SEQ ID NO: 3026706 - DNA, 25 bp, Homo sapien
ggccagtgccaacgtgtttaaacaa

SEQ ID NO: 3026707 - DNA, 25 bp, Homo sapien
aatgtcacacagtttttcataacca

SEQ ID NO: 3026708 - DNA, 25 bp, Homo sapien
gctcaaaaaagactcaggaatacct

SEQ ID NO: 3026709 - DNA, 25 bp, Homo sapien
taaccaattctaatcatgtatgttt

SEQ ID NO: 3026710 - DNA, 25 bp, Homo sapien
gtgctttcaacctgcagaaactgga

SEQ ID NO: 3026711 - DNA, 25 bp, Homo sapien
taatagacagggtgagtcaatccca

SEQ ID NO: 3026712 - DNA, 25 bp, Homo sapien
cacccatgagtttgtagggcctgct

SEQ ID NO: 3026713 - DNA, 25 bp, Homo sapien
agtgcgctgatacaaaggtgggctc

SEQ ID NO: 3026714 - DNA, 25 bp, Homo sapien
ggactgcaaagtaacaccctggttg

SEQ ID NO: 3026715 - DNA, 25 bp, Homo sapien
catacgtgaaaacagggctcagcac

SEQ ID NO: 3026716 - DNA, 25 bp, Homo sapien
gagataagctgtttaaccctctgga

SEQ ID NO: 3026717 - DNA, 25 bp, Homo sapien
gcagatatccaaacacgccatggga

SEQ ID NO: 3026718 - DNA, 25 bp, Homo sapien
gattacatgattgtttccccagtgc

SEQ ID NO: 3026719 - DNA, 25 bp, Homo sapien
tcagagtcgagagaaagtcacttgc

SEQ ID NO: 3026720 - DNA, 25 bp, Homo sapien
aatctcagggtgacgctgaggccga

SEQ ID NO: 3026721 - DNA, 25 bp, Homo sapien
tgaaatcaggctgacctccggacag

SEQ ID NO: 3026722 - DNA, 25 bp, Homo sapien
ggacagccgtactagcgcactgtgt

SEQ ID NO: 3026723 - DNA, 25 bp, Homo sapien
gggcccactcaatgttgccccactt

SEQ ID NO: 3026724 - DNA, 25 bp, Homo sapien
actgtggtgctctcggagcagagat

SEQ ID NO: 3026725 - DNA, 25 bp, Homo sapien
atgaagagggtgccggcggcggtgc

SEQ ID NO: 3026726 - DNA, 25 bp, Homo sapien
cccactcaatgttgccccacttctg

SEQ ID NO: 3026727 - DNA, 25 bp, Homo sapien
ctacttgacaatacttctgctggtc

SEQ ID NO: 3026728 - DNA, 25 bp, Homo sapien
gcctacttgacaatacttctgctgg

SEQ ID NO: 3026729 - DNA, 25 bp, Homo sapien
ggcctacttgacaatacttctgctg

SEQ ID NO: 3026730 - DNA, 25 bp, Homo sapien
cctacttgacaatacttctgctggt

SEQ ID NO: 3026731 - DNA, 25 bp, Homo sapien
ggcgcaggtcaatcaggcccaaggt

SEQ ID NO: 3026732 - DNA, 25 bp, Homo sapien
gctccactgtcaggcgcaggtcaat

SEQ ID NO: 3026733 - DNA, 25 bp, Homo sapien
tactcctcctccaggcgtgacagca

SEQ ID NO: 3026734 - DNA, 25 bp, Homo sapien
caatcaggcccaaggttagcaccat

SEQ ID NO: 3026735 - DNA, 25 bp, Homo sapien
cagggacacaagccaagtcagaacc

SEQ ID NO: 3026736 - DNA, 25 bp, Homo sapien
ggacacaagccaagtcagaacccaa

SEQ ID NO: 3026737 - DNA, 25 bp, Homo sapien
cacaacctaccccttgtgagtccca

SEQ ID NO: 3026738 - DNA, 25 bp, Homo sapien
agctgccacaacctaccccttgtga

SEQ ID NO: 3026739 - DNA, 25 bp, Homo sapien
aagagccatccagcgattgtcccac

SEQ ID NO: 3026740 - DNA, 25 bp, Homo sapien
tcttctgaaagagcactctggtctt

SEQ ID NO: 3026741 - DNA, 25 bp, Homo sapien
tgagtggtgcaaagagccatccagc

SEQ ID NO: 3026742 - DNA, 25 bp, Homo sapien
tgcaaagagccatccagcgattgtc

SEQ ID NO: 3026743 - DNA, 25 bp, Homo sapien
tagagtgattggctagcatcagagc

SEQ ID NO: 3026744 - DNA, 25 bp, Homo sapien
gtgagacacatgacccgaacttggc

SEQ ID NO: 3026745 - DNA, 25 bp, Homo sapien
gagctttccgcacccagtctagtga

SEQ ID NO: 3026746 - DNA, 25 bp, Homo sapien
caagccagggcaatgagattgaact

SEQ ID NO: 3026747 - DNA, 25 bp, Homo sapien
gatgctgggtcccattatgctggtg

SEQ ID NO: 3026748 - DNA, 25 bp, Homo sapien
atgctgggtcccattatgctggtgg

SEQ ID NO: 3026749 - DNA, 25 bp, Homo sapien
ctcccgagttttggcagggatgctg

SEQ ID NO: 3026750 - DNA, 25 bp, Homo sapien
gacgagcacctcccgagttttggca

SEQ ID NO: 3026751 - DNA, 25 bp, Homo sapien
gaaacaaaggcctaagcttcagagc

SEQ ID NO: 3026752 - DNA, 25 bp, Homo sapien
tagggctcggttatacgcagctgcc

SEQ ID NO: 3026753 - DNA, 25 bp, Homo sapien
tgtcatgctgtagcccaagagcagc

SEQ ID NO: 3026754 - DNA, 25 bp, Homo sapien
ggaaaagggcttcggcatgtctctg

SEQ ID NO: 3026755 - DNA, 25 bp, Homo sapien
cagcccattcgatgattggatccca

SEQ ID NO: 3026756 - DNA, 25 bp, Homo sapien
ttccactaatgtctcgggctcctcc

SEQ ID NO: 3026757 - DNA, 25 bp, Homo sapien
ttttctcagcccattcgatgattgg

SEQ ID NO: 3026758 - DNA, 25 bp, Homo sapien
cgatgattggatcccactcattcct

SEQ ID NO: 3026759 - DNA, 25 bp, Homo sapien
cagatgccagacctgatgggaccaa

SEQ ID NO: 3026760 - DNA, 25 bp, Homo sapien
ggcacagatgccagacctgatggga

SEQ ID NO: 3026761 - DNA, 25 bp, Homo sapien
cctgatgggaccaagctagaggtca

SEQ ID NO: 3026762 - DNA, 25 bp, Homo sapien
atgggaccaagctagaggtcaggct

SEQ ID NO: 3026763 - DNA, 25 bp, Homo sapien
gatggtgtcggtgtccagaaacttc

SEQ ID NO: 3026764 - DNA, 25 bp, Homo sapien
tccaatgatgtgttgcacaatgtgg

SEQ ID NO: 3026765 - DNA, 25 bp, Homo sapien
tctctgggttgggttgtccaatgat

SEQ ID NO: 3026766 - DNA, 25 bp, Homo sapien
aaacttcacggctgcccggatcagc

SEQ ID NO: 3026767 - DNA, 25 bp, Homo sapien
actcgagggaagcttgcagcagccc

SEQ ID NO: 3026768 - DNA, 25 bp, Homo sapien
cagaggcgtctgcattaccggagca

SEQ ID NO: 3026769 - DNA, 25 bp, Homo sapien
tgttgacgctcacaggactcgaggg

SEQ ID NO: 3026770 - DNA, 25 bp, Homo sapien
tactgagagtgtgccacaaccaggc

SEQ ID NO: 3026771 - DNA, 25 bp, Homo sapien
cagaggctggacctaagagtgtagc

SEQ ID NO: 3026772 - DNA, 25 bp, Homo sapien
cctgggtttgcaaaggttgagcaca

SEQ ID NO: 3026773 - DNA, 25 bp, Homo sapien
ccacagctccgtgaggtgggtacta

SEQ ID NO: 3026774 - DNA, 25 bp, Homo sapien
ttcactaggttgtcaaggaccaggc

SEQ ID NO: 3026775 - DNA, 25 bp, Homo sapien
gaggtgaatccctgggggccagaca

SEQ ID NO: 3026776 - DNA, 25 bp, Homo sapien
agagtttagcacgttagtgacttga

SEQ ID NO: 3026777 - DNA, 25 bp, Homo sapien
cctacgaagccctgggtgggtctca

SEQ ID NO: 3026778 - DNA, 25 bp, Homo sapien
agtttagcacgttagtgacttgaga

SEQ ID NO: 3026779 - DNA, 25 bp, Homo sapien
tgtagtacttgatggtatcctgctg

SEQ ID NO: 3026780 - DNA, 25 bp, Homo sapien
gatggtatcctgctgggaatcccac

SEQ ID NO: 3026781 - DNA, 25 bp, Homo sapien
gtacttgatggtatcctgctgggaa

SEQ ID NO: 3026782 - DNA, 25 bp, Homo sapien
cctcgctggggacggtaaagagctt

SEQ ID NO: 3026783 - DNA, 25 bp, Homo sapien
accctgtgtgatgctgacattctga

SEQ ID NO: 3026784 - DNA, 25 bp, Homo sapien
gacattctgataaaacctcttcctt

SEQ ID NO: 3026785 - DNA, 25 bp, Homo sapien
tcaccctgtgtgatgctgacattct

SEQ ID NO: 3026786 - DNA, 25 bp, Homo sapien
cttcaccctgtgtgatgctgacatt

SEQ ID NO: 3026787 - DNA, 25 bp, Homo sapien
aatgaaagagccactacttctaagc

SEQ ID NO: 3026788 - DNA, 25 bp, Homo sapien
agcaatgaaagagccactacttcta

SEQ ID NO: 3026789 - DNA, 25 bp, Homo sapien
caatgaaagagccactacttctaag

SEQ ID NO: 3026790 - DNA, 25 bp, Homo sapien
cagcaatgaaagagccactacttct

SEQ ID NO: 3026791 - DNA, 25 bp, Homo sapien
gccccaacccaaaagaacatgtcat

SEQ ID NO: 3026792 - DNA, 25 bp, Homo sapien
ccggccgattcaggagacggcgtcc

SEQ ID NO: 3026793 - DNA, 25 bp, Homo sapien
acccgccggccgattcaggagacgg

SEQ ID NO: 3026794 - DNA, 25 bp, Homo sapien
tggccccggactcatagaagcgctg

SEQ ID NO: 3026795 - DNA, 25 bp, Homo sapien
agcccgggctggagacgggatggtt

SEQ ID NO: 3026796 - DNA, 25 bp, Homo sapien
gtctgggaagatgcgagacgcgaaa

SEQ ID NO: 3026797 - DNA, 25 bp, Homo sapien
tctgggaagatgcgagacgcgaaac

SEQ ID NO: 3026798 - DNA, 25 bp, Homo sapien
gggtctgggaagatgcgagacgcga

SEQ ID NO: 3026799 - DNA, 25 bp, Homo sapien
ggtctgggaagatgcgagacgcgaa

SEQ ID NO: 3026800 - DNA, 25 bp, Homo sapien
gcaggaaacacagagcgatgggatc

SEQ ID NO: 3026801 - DNA, 25 bp, Homo sapien
caaagccgcacggtcgggctgtacg

SEQ ID NO: 3026802 - DNA, 25 bp, Homo sapien
gctgtacggaaacctctcaacgcct

SEQ ID NO: 3026803 - DNA, 25 bp, Homo sapien
gatgggatccccaaagccgcacggt

SEQ ID NO: 3026804 - DNA, 25 bp, Homo sapien
caccacacccgatctgaattttaaa

SEQ ID NO: 3026805 - DNA, 25 bp, Homo sapien
cataagccaccacacccgatctgaa

SEQ ID NO: 3026806 - DNA, 25 bp, Homo sapien
aagccaccacacccgatctgaattt

SEQ ID NO: 3026807 - DNA, 25 bp, Homo sapien
ccaccacacccgatctgaattttaa

SEQ ID NO: 3026808 - DNA, 25 bp, Homo sapien
gcggcagccttccatgaggcagaag

SEQ ID NO: 3026809 - DNA, 25 bp, Homo sapien
tcaaaacagcaatgcttggcggcag

SEQ ID NO: 3026810 - DNA, 25 bp, Homo sapien
gtcgtcgttctctgaaaacagtgac

SEQ ID NO: 3026811 - DNA, 25 bp, Homo sapien
aatgcttggcggcagccttccatga

SEQ ID NO: 3026812 - DNA, 25 bp, Homo sapien
tgtccttcctgccgtacgtgccatt

SEQ ID NO: 3026813 - DNA, 25 bp, Homo sapien
agcatgcgagcccataccttctgca

SEQ ID NO: 3026814 - DNA, 25 bp, Homo sapien
tgtggtcttgttgagctgatggcct

SEQ ID NO: 3026815 - DNA, 25 bp, Homo sapien
tgccgtacgtgccattccactctct

SEQ ID NO: 3026816 - DNA, 25 bp, Homo sapien
tagtgctttctgtaagacttctcca

SEQ ID NO: 3026817 - DNA, 25 bp, Homo sapien
gagtcgagaagacagtaaacctgct

SEQ ID NO: 3026818 - DNA, 25 bp, Homo sapien
gacctatcggagtcagggaagtaaa

SEQ ID NO: 3026819 - DNA, 25 bp, Homo sapien
tctgctgaagtatggtcaggcacag

SEQ ID NO: 3026820 - DNA, 25 bp, Homo sapien
ggagtataggctctcccaccgtggg

SEQ ID NO: 3026821 - DNA, 25 bp, Homo sapien
gagagagattgatagagaagccgct

SEQ ID NO: 3026822 - DNA, 25 bp, Homo sapien
ccacattctggacttgagaggtcta

SEQ ID NO: 3026823 - DNA, 25 bp, Homo sapien
tagttaccaagagccgtgacccttg

SEQ ID NO: 3026824 - DNA, 25 bp, Homo sapien
ggtgtgatgcccatgcagtcccctc

SEQ ID NO: 3026825 - DNA, 25 bp, Homo sapien
tcacctcatcctgaatgtgtccgct

SEQ ID NO: 3026826 - DNA, 25 bp, Homo sapien
tcatcctgaatgtgtccgctgtaca

SEQ ID NO: 3026827 - DNA, 25 bp, Homo sapien
tcctgaatgtgtccgctgtacacca

SEQ ID NO: 3026828 - DNA, 25 bp, Homo sapien
cagggccagcctgtttcacctcatc

SEQ ID NO: 3026829 - DNA, 25 bp, Homo sapien
tatgtgcccacaggcctacaggaac

SEQ ID NO: 3026830 - DNA, 25 bp, Homo sapien
gacaggtagagcatgtgcctgcaca

SEQ ID NO: 3026831 - DNA, 25 bp, Homo sapien
catccatgcggttccgtgagcagca

SEQ ID NO: 3026832 - DNA, 25 bp, Homo sapien
aggtgtccacgcattttccccagga

SEQ ID NO: 3026833 - DNA, 25 bp, Homo sapien
cctcatgggattgttaacaacggca

SEQ ID NO: 3026834 - DNA, 25 bp, Homo sapien
acggcattatcagggcaatgtgtct

SEQ ID NO: 3026835 - DNA, 25 bp, Homo sapien
aaataggtgggagcttgtgatcagc

SEQ ID NO: 3026836 - DNA, 25 bp, Homo sapien
tgcccgtgagatggtattccttttg

SEQ ID NO: 3026837 - DNA, 25 bp, Homo sapien
ttcctctgtgtgcgcacaaccctgg

SEQ ID NO: 3026838 - DNA, 25 bp, Homo sapien
tctgtgtgcgcacaaccctggtatc

SEQ ID NO: 3026839 - DNA, 25 bp, Homo sapien
tttcctctgtgtgcgcacaaccctg

SEQ ID NO: 3026840 - DNA, 25 bp, Homo sapien
tttgctcccagaactagaccctgcg

SEQ ID NO: 3026841 - DNA, 25 bp, Homo sapien
atgtgggcacctggaggtcagtcca

SEQ ID NO: 3026842 - DNA, 25 bp, Homo sapien
ggagtagggcccatcctaacagctt

SEQ ID NO: 3026843 - DNA, 25 bp, Homo sapien
attcagcccataataagtaggacct

SEQ ID NO: 3026844 - DNA, 25 bp, Homo sapien
attaactctctatcactctgacttt

SEQ ID NO: 3026845 - DNA, 25 bp, Homo sapien
gcattaactctctatcactctgact

SEQ ID NO: 3026846 - DNA, 25 bp, Homo sapien
ggcattaactctctatcactctgac

SEQ ID NO: 3026847 - DNA, 25 bp, Homo sapien
aggcattaactctctatcactctga

SEQ ID NO: 3026848 - DNA, 25 bp, Homo sapien
tgtgccttcctatgtttgtagcaac

SEQ ID NO: 3026849 - DNA, 25 bp, Homo sapien
gcagtacggagccatagaaggttga

SEQ ID NO: 3026850 - DNA, 25 bp, Homo sapien
gacactagaggtttgagaaagttca

SEQ ID NO: 3026851 - DNA, 25 bp, Homo sapien
aaggttgatgagagggcaaggacac

SEQ ID NO: 3026852 - DNA, 25 bp, Homo sapien
taaaacaggtaggacacatcaggcc

SEQ ID NO: 3026853 - DNA, 25 bp, Homo sapien
caattgggagcactaagcctgggtc

SEQ ID NO: 3026854 - DNA, 25 bp, Homo sapien
tgatttaattagtcgaggtggcccc

SEQ ID NO: 3026855 - DNA, 25 bp, Homo sapien
gaagactccatttgcacacgctgat

SEQ ID NO: 3026856 - DNA, 25 bp, Homo sapien
gcctggcgacagagcgaaactccat

SEQ ID NO: 3026857 - DNA, 25 bp, Homo sapien
gttgtcgccaccgttgcatgacccg

SEQ ID NO: 3026858 - DNA, 25 bp, Homo sapien
gtcgtgcggagagctttaaagtgcg

SEQ ID NO: 3026859 - DNA, 25 bp, Homo sapien
cgtccgagggtctggtcgggagtcg

SEQ ID NO: 3026860 - DNA, 25 bp, Homo sapien
tccgcggcatgaggcgctgccggcg

SEQ ID NO: 3026861 - DNA, 25 bp, Homo sapien
cgggacaactataaggcgggcagcc

SEQ ID NO: 3026862 - DNA, 25 bp, Homo sapien
tgacgtcccgggacaactataaggc

SEQ ID NO: 3026863 - DNA, 25 bp, Homo sapien
tgagaagctcaagtccatgacgtcc

SEQ ID NO: 3026864 - DNA, 25 bp, Homo sapien
tcaagtccatgacgtcccgggacaa

SEQ ID NO: 3026865 - DNA, 25 bp, Homo sapien
caacaagtacttcttcggcgaaggc

SEQ ID NO: 3026866 - DNA, 25 bp, Homo sapien
gcctgtacaacgagcacacggtgga

SEQ ID NO: 3026867 - DNA, 25 bp, Homo sapien
caagcgcaagtatcaggaggactcg

SEQ ID NO: 3026868 - DNA, 25 bp, Homo sapien
aaaagctggtggagcaccgcgtcat

SEQ ID NO: 3026869 - DNA, 25 bp, Homo sapien
ccagcgtggatttctcaagtcggga

SEQ ID NO: 3026870 - DNA, 25 bp, Homo sapien
caagtcgggactgcataattaaagc

SEQ ID NO: 3026871 - DNA, 25 bp, Homo sapien
gaacagttagacttgccacgttggg

SEQ ID NO: 3026872 - DNA, 25 bp, Homo sapien
tttctagctagagggactggtgtcc

SEQ ID NO: 3026873 - DNA, 25 bp, Homo sapien
ggacgactggccacccttccgcaag

SEQ ID NO: 3026874 - DNA, 25 bp, Homo sapien
ggctgccgaggacgactggccaccc

SEQ ID NO: 3026875 - DNA, 25 bp, Homo sapien
ctgtgagcacgctgacagcctggcc

SEQ ID NO: 3026876 - DNA, 25 bp, Homo sapien
gtgagcacgctgacagcctggccca

SEQ ID NO: 3026877 - DNA, 25 bp, Homo sapien
tgcaagtatacagcccagatggtgg

SEQ ID NO: 3026878 - DNA, 25 bp, Homo sapien
ggctgcttcgatccctacagtgacg

SEQ ID NO: 3026879 - DNA, 25 bp, Homo sapien
gctccggcactcacatgacatacag

SEQ ID NO: 3026880 - DNA, 25 bp, Homo sapien
gcttggcgtgcagaaggttgctctc

SEQ ID NO: 3026881 - DNA, 25 bp, Homo sapien
ctgggagggcaggaatctagtccta

SEQ ID NO: 3026882 - DNA, 25 bp, Homo sapien
acacaaggctcctgtactgggccca

SEQ ID NO: 3026883 - DNA, 25 bp, Homo sapien
ctctgcctcgaaagaactcgaggtt

SEQ ID NO: 3026884 - DNA, 25 bp, Homo sapien
tcactgtgccacacaaggctcctgt

SEQ ID NO: 3026885 - DNA, 25 bp, Homo sapien
tggcgcttggatacccatctggaga

SEQ ID NO: 3026886 - DNA, 25 bp, Homo sapien
aggtcaggtctcatcggttgggccc

SEQ ID NO: 3026887 - DNA, 25 bp, Homo sapien
tcactgaggtgcacgaggtcaggtc

SEQ ID NO: 3026888 - DNA, 25 bp, Homo sapien
agtggctgacttacccctgcctgag

SEQ ID NO: 3026889 - DNA, 25 bp, Homo sapien
catctgctttatccctagcggaaga

SEQ ID NO: 3026890 - DNA, 25 bp, Homo sapien
ccacatctgctttatccctagcgga

SEQ ID NO: 3026891 - DNA, 25 bp, Homo sapien
gctttatccctagcggaagagtgag

SEQ ID NO: 3026892 - DNA, 25 bp, Homo sapien
tgagggggcttcacacgtgcactca

SEQ ID NO: 3026893 - DNA, 25 bp, Homo sapien
gagcaggtggtgtcacctgagtaca

SEQ ID NO: 3026894 - DNA, 25 bp, Homo sapien
gactgtggcactggacgtggctgga

SEQ ID NO: 3026895 - DNA, 25 bp, Homo sapien
ctgtcagggtcatccccattggtgc

SEQ ID NO: 3026896 - DNA, 25 bp, Homo sapien
gagtacattctttgctagcagacag

SEQ ID NO: 3026897 - DNA, 25 bp, Homo sapien
ttgcagaaggcgctccaggcgtgga

SEQ ID NO: 3026898 - DNA, 25 bp, Homo sapien
ttaggccagggccttgcagaaggcg

SEQ ID NO: 3026899 - DNA, 25 bp, Homo sapien
ccagggccttgcagaaggcgctcca

SEQ ID NO: 3026900 - DNA, 25 bp, Homo sapien
cagaaggcgctccaggcgtggaagc

SEQ ID NO: 3026901 - DNA, 25 bp, Homo sapien
ggccgctcatgttccttggaccgca

SEQ ID NO: 3026902 - DNA, 25 bp, Homo sapien
ggcgcggccgctcatgttccttgga

SEQ ID NO: 3026903 - DNA, 25 bp, Homo sapien
attgcccttgcggaccaggcgcagc

SEQ ID NO: 3026904 - DNA, 25 bp, Homo sapien
ccttggaccgcatgtgctggatata

SEQ ID NO: 3026905 - DNA, 25 bp, Homo sapien
tggcaaggggacagcgagccttggg

SEQ ID NO: 3026906 - DNA, 25 bp, Homo sapien
ctggcaaggggacagcgagccttgg

SEQ ID NO: 3026907 - DNA, 25 bp, Homo sapien
aaggggacagcgagccttgggtgat

SEQ ID NO: 3026908 - DNA, 25 bp, Homo sapien
gcaaggggacagcgagccttgggtg

SEQ ID NO: 3026909 - DNA, 25 bp, Homo sapien
ttgatctccacctggctagtctggg

SEQ ID NO: 3026910 - DNA, 25 bp, Homo sapien
atctccacctggctagtctgggtcc

SEQ ID NO: 3026911 - DNA, 25 bp, Homo sapien
ctggcaggccttcaggctcagcttg

SEQ ID NO: 3026912 - DNA, 25 bp, Homo sapien
aggccttcaggctcagcttgatctc

SEQ ID NO: 3026913 - DNA, 25 bp, Homo sapien
tctatgggcgcctccttggatgggc

SEQ ID NO: 3026914 - DNA, 25 bp, Homo sapien
gagatacggttgcatgggtgcctgg

SEQ ID NO: 3026915 - DNA, 25 bp, Homo sapien
tgctcctggcccgagaattcccatt

SEQ ID NO: 3026916 - DNA, 25 bp, Homo sapien
gaattcccatttgtaagtaagtcta

SEQ ID NO: 3026917 - DNA, 25 bp, Homo sapien
gtcggagcatttctcagtcactgca

SEQ ID NO: 3026918 - DNA, 25 bp, Homo sapien
tctcagtcactgcaaagtagccctt

SEQ ID NO: 3026919 - DNA, 25 bp, Homo sapien
catcttggcaaaagtcggagcattt

SEQ ID NO: 3026920 - DNA, 25 bp, Homo sapien
aaagtagcccttctcgttggagcac

SEQ ID NO: 3026921 - DNA, 25 bp, Homo sapien
aatcaagggtcaaggtgaggccaga

SEQ ID NO: 3026922 - DNA, 25 bp, Homo sapien
gaggccagaggtcataagcagcagt

SEQ ID NO: 3026923 - DNA, 25 bp, Homo sapien
gggaatcaagggtcaaggtgaggcc

SEQ ID NO: 3026924 - DNA, 25 bp, Homo sapien
tcaaggtgaggccagaggtcataag

SEQ ID NO: 3026925 - DNA, 25 bp, Homo sapien
tgtactcggcatcgtcatcataggg

SEQ ID NO: 3026926 - DNA, 25 bp, Homo sapien
catcgtcatcatagggcttctgtgc

SEQ ID NO: 3026927 - DNA, 25 bp, Homo sapien
tagggcttctgtgccccaatgccca

SEQ ID NO: 3026928 - DNA, 25 bp, Homo sapien
tgtgtttcatgtactcggcatcgtc

SEQ ID NO: 3026929 - DNA, 25 bp, Homo sapien
tggctcctctgtgtgtgcccgcctg

SEQ ID NO: 3026930 - DNA, 25 bp, Homo sapien
ctgcgggaaaggccagtccagccca

SEQ ID NO: 3026931 - DNA, 25 bp, Homo sapien
gctcctctgtgtgtgcccgcctgcc

SEQ ID NO: 3026932 - DNA, 25 bp, Homo sapien
gccctggctcctctgtgtgtgcccg

SEQ ID NO: 3026933 - DNA, 25 bp, Homo sapien
ctgccaacttggcttcgtcagggtc

SEQ ID NO: 3026934 - DNA, 25 bp, Homo sapien
caacttggcttcgtcagggtctgat

SEQ ID NO: 3026935 - DNA, 25 bp, Homo sapien
tcaggatgtcttctgccaacttggc

SEQ ID NO: 3026936 - DNA, 25 bp, Homo sapien
gccaacttggcttcgtcagggtctg

SEQ ID NO: 3026937 - DNA, 25 bp, Homo sapien
ccaggcatacacgatgccctggttg

SEQ ID NO: 3026938 - DNA, 25 bp, Homo sapien
acacgatgccctggttgtcctcact

SEQ ID NO: 3026939 - DNA, 25 bp, Homo sapien
ggcatacacgatgccctggttgtcc

SEQ ID NO: 3026940 - DNA, 25 bp, Homo sapien
atacacgatgccctggttgtcctca

SEQ ID NO: 3026941 - DNA, 25 bp, Homo sapien
caccccttggtccacggagtcctgg

SEQ ID NO: 3026942 - DNA, 25 bp, Homo sapien
ccaccccttggtccacggagtcctg

SEQ ID NO: 3026943 - DNA, 25 bp, Homo sapien
gggggtgttcgcagctgactcagcc

SEQ ID NO: 3026944 - DNA, 25 bp, Homo sapien
agcagaactcggagttgaggaggct

SEQ ID NO: 3026945 - DNA, 25 bp, Homo sapien
cttgaggatgaagcagaactcggag

SEQ ID NO: 3026946 - DNA, 25 bp, Homo sapien
ggggcatcagcaaggattcaggcct

SEQ ID NO: 3026947 - DNA, 25 bp, Homo sapien
ggcatcagcaaggattcaggcctgg

SEQ ID NO: 3026948 - DNA, 25 bp, Homo sapien
atggggcatcagcaaggattcaggc

SEQ ID NO: 3026949 - DNA, 25 bp, Homo sapien
gcatcagcaaggattcaggcctggc

SEQ ID NO: 3026950 - DNA, 25 bp, Homo sapien
ccactgcgtcctcccccagccaggc

SEQ ID NO: 3026951 - DNA, 25 bp, Homo sapien
cgccactgcgtcctcccccagccag

SEQ ID NO: 3026952 - DNA, 25 bp, Homo sapien
gcttgctcgccactgcgtcctcccc

SEQ ID NO: 3026953 - DNA, 25 bp, Homo sapien
actgcgtcctcccccagccaggcac

SEQ ID NO: 3026954 - DNA, 25 bp, Homo sapien
ctcttgccccggtggatgatgaact

SEQ ID NO: 3026955 - DNA, 25 bp, Homo sapien
cgctgccgttggtgcggatctggta

SEQ ID NO: 3026956 - DNA, 25 bp, Homo sapien
gaacttcctcttgaaatgggacagg

SEQ ID NO: 3026957 - DNA, 25 bp, Homo sapien
gttctcctgctgctgcgtcatgcgt

SEQ ID NO: 3026958 - DNA, 25 bp, Homo sapien
cctcgggctcgcggggctgccaggc

SEQ ID NO: 3026959 - DNA, 25 bp, Homo sapien
tcgggctcgcggggctgccaggcac

SEQ ID NO: 3026960 - DNA, 25 bp, Homo sapien
gggctcgcggggctgccaggcacac

SEQ ID NO: 3026961 - DNA, 25 bp, Homo sapien
ctcgggctcgcggggctgccaggca

SEQ ID NO: 3026962 - DNA, 25 bp, Homo sapien
gaagaggctctcgaacttcttttgc

SEQ ID NO: 3026963 - DNA, 25 bp, Homo sapien
aagaggctctcgaacttcttttgca

SEQ ID NO: 3026964 - DNA, 25 bp, Homo sapien
agaggctctcgaacttcttttgcag

SEQ ID NO: 3026965 - DNA, 25 bp, Homo sapien
gaggctctcgaacttcttttgcagg

SEQ ID NO: 3026966 - DNA, 25 bp, Homo sapien
gtgaaggtgagccagcccatattgg

SEQ ID NO: 3026967 - DNA, 25 bp, Homo sapien
ggtgagccagcccatattggaggct

SEQ ID NO: 3026968 - DNA, 25 bp, Homo sapien
catattggaggcttcacggccctgc

SEQ ID NO: 3026969 - DNA, 25 bp, Homo sapien
ttggaggcttcacggccctgccaga

SEQ ID NO: 3026970 - DNA, 25 bp, Homo sapien
tctgcctcagcggttgcttcctcgc

SEQ ID NO: 3026971 - DNA, 25 bp, Homo sapien
cagcggttgcttcctcgccttcttt

SEQ ID NO: 3026972 - DNA, 25 bp, Homo sapien
ctcctctgcctcagcggttgcttcc

SEQ ID NO: 3026973 - DNA, 25 bp, Homo sapien
gcctcagcggttgcttcctcgcctt

SEQ ID NO: 3026974 - DNA, 25 bp, Homo sapien
gtgagcaggggctcgagcccccagc

SEQ ID NO: 3026975 - DNA, 25 bp, Homo sapien
gaaggttgtgagcaggggctcgagc

SEQ ID NO: 3026976 - DNA, 25 bp, Homo sapien
aggttgtgagcaggggctcgagccc

SEQ ID NO: 3026977 - DNA, 25 bp, Homo sapien
ttgtgagcaggggctcgagccccca

SEQ ID NO: 3026978 - DNA, 25 bp, Homo sapien
catgccgtctaggtcttcgttccac

SEQ ID NO: 3026979 - DNA, 25 bp, Homo sapien
ttccggcagccgcgcaaacttcttg

SEQ ID NO: 3026980 - DNA, 25 bp, Homo sapien
ctgcgtgtagaagtggccaaactcc

SEQ ID NO: 3026981 - DNA, 25 bp, Homo sapien
agacgtagcagtcctgcgtgtagaa

SEQ ID NO: 3026982 - DNA, 25 bp, Homo sapien
cggctgccgcggcaggaaaagcgca

SEQ ID NO: 3026983 - DNA, 25 bp, Homo sapien
gtgaggtcagccttcatctggtctt

SEQ ID NO: 3026984 - DNA, 25 bp, Homo sapien
ctttcttctcggcgtcgcgtttcac

SEQ ID NO: 3026985 - DNA, 25 bp, Homo sapien
gcggcaggaaaagcgcagtgaggtc

SEQ ID NO: 3026986 - DNA, 25 bp, Homo sapien
cgtcaacacatcgtcccaattcttg

SEQ ID NO: 3026987 - DNA, 25 bp, Homo sapien
tgcagcacggcctccgcattgcgtg

SEQ ID NO: 3026988 - DNA, 25 bp, Homo sapien
tccgcattgcgtgtgtagtccaccg

SEQ ID NO: 3026989 - DNA, 25 bp, Homo sapien
gcgtgtgtagtccaccgtcaacaca

SEQ ID NO: 3026990 - DNA, 25 bp, Homo sapien
gaggccatcaactaaccatgagggg

SEQ ID NO: 3026991 - DNA, 25 bp, Homo sapien
taaccatgaggggtgcggcatgatt

SEQ ID NO: 3026992 - DNA, 25 bp, Homo sapien
catcaactaaccatgaggggtgcgg

SEQ ID NO: 3026993 - DNA, 25 bp, Homo sapien
caactaaccatgaggggtgcggcat

SEQ ID NO: 3026994 - DNA, 25 bp, Homo sapien
tacacgcagcgcgtgtccagcagac

SEQ ID NO: 3026995 - DNA, 25 bp, Homo sapien
ggaccaacagtccagaatgtacacg

SEQ ID NO: 3026996 - DNA, 25 bp, Homo sapien
tcctgacccagcttgagggcggcag

SEQ ID NO: 3026997 - DNA, 25 bp, Homo sapien
acttgcggccgagccagatgaacac

SEQ ID NO: 3026998 - DNA, 25 bp, Homo sapien
cagctccaccttgggacgctgctta

SEQ ID NO: 3026999 - DNA, 25 bp, Homo sapien
caccttgggacgctgcttatgttcc

SEQ ID NO: 3027000 - DNA, 25 bp, Homo sapien
gacgctgcttatgttccacggagag

SEQ ID NO: 3027001 - DNA, 25 bp, Homo sapien
ttatgttccacggagagcttgtagt

SEQ ID NO: 3027002 - DNA, 25 bp, Homo sapien
ttccctttccgctcattcttgttaa

SEQ ID NO: 3027003 - DNA, 25 bp, Homo sapien
tcagccttccctttccgctcattct

SEQ ID NO: 3027004 - DNA, 25 bp, Homo sapien
gtcttcaggcacgtgcttcttgatc

SEQ ID NO: 3027005 - DNA, 25 bp, Homo sapien
caggcacgtgcttcttgatctcaga

SEQ ID NO: 3027006 - DNA, 25 bp, Homo sapien
tgggccccccgccatacgtagatgt

SEQ ID NO: 3027007 - DNA, 25 bp, Homo sapien
ccatacgtagatgtctagccctcgg

SEQ ID NO: 3027008 - DNA, 25 bp, Homo sapien
tctagccctcggtccagcaggaaaa

SEQ ID NO: 3027009 - DNA, 25 bp, Homo sapien
acgtagatgtctagccctcggtcca

SEQ ID NO: 3027010 - DNA, 25 bp, Homo sapien
cacaggctccaacttgatgttcttt

SEQ ID NO: 3027011 - DNA, 25 bp, Homo sapien
gggcacaggctccaacttgatgttc

SEQ ID NO: 3027012 - DNA, 25 bp, Homo sapien
ggcacaggctccaacttgatgttct

SEQ ID NO: 3027013 - DNA, 25 bp, Homo sapien
ggggcacaggctccaacttgatgtt

SEQ ID NO: 3027014 - DNA, 25 bp, Homo sapien
tgtaggagatgtcgttgtcaaacac

SEQ ID NO: 3027015 - DNA, 25 bp, Homo sapien
tgttccaccctcaatgtaggagatg

SEQ ID NO: 3027016 - DNA, 25 bp, Homo sapien
ggctgttccaccctcaatgtaggag

SEQ ID NO: 3027017 - DNA, 25 bp, Homo sapien
cctcaatgtaggagatgtcgttgtc

SEQ ID NO: 3027018 - DNA, 25 bp, Homo sapien
tccagtagtagatctcccagttgag

SEQ ID NO: 3027019 - DNA, 25 bp, Homo sapien
agggagccgctgtcatccagaaagg

SEQ ID NO: 3027020 - DNA, 25 bp, Homo sapien
acccaggtagttgcgcaagttgaca

SEQ ID NO: 3027021 - DNA, 25 bp, Homo sapien
caagctttcttgtcgagtgtggcct

SEQ ID NO: 3027022 - DNA, 25 bp, Homo sapien
gctttcatcctggtcttccggccac

SEQ ID NO: 3027023 - DNA, 25 bp, Homo sapien
tcttagaggaaggtactgggccaca

SEQ ID NO: 3027024 - DNA, 25 bp, Homo sapien
tccctgaacaaaactctggagttgg

SEQ ID NO: 3027025 - DNA, 25 bp, Homo sapien
aaggcaccggccacatcagctttca

SEQ ID NO: 3027026 - DNA, 25 bp, Homo sapien
gcacgaagttctctatctgccagat

SEQ ID NO: 3027027 - DNA, 25 bp, Homo sapien
tgccagatggtcagtccgggcagct

SEQ ID NO: 3027028 - DNA, 25 bp, Homo sapien
tgaagaactcggagtagtcaaggcg

SEQ ID NO: 3027029 - DNA, 25 bp, Homo sapien
cagcctcgtagaacttgccgtggaa

SEQ ID NO: 3027030 - DNA, 25 bp, Homo sapien
gcaacatctgacatgcccttcagca

SEQ ID NO: 3027031 - DNA, 25 bp, Homo sapien
agccatagggtccttgggcccactc

SEQ ID NO: 3027032 - DNA, 25 bp, Homo sapien
tgggctgaatccttgcgcctccgca

SEQ ID NO: 3027033 - DNA, 25 bp, Homo sapien
tccgcagtcgcatcttgcgagccat

SEQ ID NO: 3027034 - DNA, 25 bp, Homo sapien
aggcacccgctagccgcagctggtt

SEQ ID NO: 3027035 - DNA, 25 bp, Homo sapien
tgcagcgagaagtcgatgttgtacc

SEQ ID NO: 3027036 - DNA, 25 bp, Homo sapien
cactcagcggcacggtctgcgggct

SEQ ID NO: 3027037 - DNA, 25 bp, Homo sapien
cagccacggtagcaggagaggcacc

SEQ ID NO: 3027038 - DNA, 25 bp, Homo sapien
tcgatctccgtcaggaaatggatgg

SEQ ID NO: 3027039 - DNA, 25 bp, Homo sapien
ctcgatctccgtcaggaaatggatg

SEQ ID NO: 3027040 - DNA, 25 bp, Homo sapien
caaagtccagcttgttggaattcag

SEQ ID NO: 3027041 - DNA, 25 bp, Homo sapien
tgcagagactttcagggaccagctc

SEQ ID NO: 3027042 - DNA, 25 bp, Homo sapien
tgagggcagcccgtcaaagtccagc

SEQ ID NO: 3027043 - DNA, 25 bp, Homo sapien
ctccaggttgttgttggcagccatg

SEQ ID NO: 3027044 - DNA, 25 bp, Homo sapien
caggctcacggccttcctcccatcc

SEQ ID NO: 3027045 - DNA, 25 bp, Homo sapien
aggctcacggccttcctcccatccc

SEQ ID NO: 3027046 - DNA, 25 bp, Homo sapien
agggccaggctcacggccttcctcc

SEQ ID NO: 3027047 - DNA, 25 bp, Homo sapien
aggtcagggccaggctcacggcctt

SEQ ID NO: 3027048 - DNA, 25 bp, Homo sapien
gtgagctgatttcgggacaggttca

SEQ ID NO: 3027049 - DNA, 25 bp, Homo sapien
gacaggttcagagtttccacgtgca

SEQ ID NO: 3027050 - DNA, 25 bp, Homo sapien
gggacagctccgtgatctggttgct

SEQ ID NO: 3027051 - DNA, 25 bp, Homo sapien
ccactggtctatgcacagggacagc

SEQ ID NO: 3027052 - DNA, 25 bp, Homo sapien
taggcaagtgacaactgctgtgcgc

SEQ ID NO: 3027053 - DNA, 25 bp, Homo sapien
gtattggtccgaagagcagggttca

SEQ ID NO: 3027054 - DNA, 25 bp, Homo sapien
cctctgagctgtgtggcttaggcaa

SEQ ID NO: 3027055 - DNA, 25 bp, Homo sapien
taaagtcagtgttaaggcatcatca

SEQ ID NO: 3027056 - DNA, 25 bp, Homo sapien
tctgcagggccgtcatcgctgggag

SEQ ID NO: 3027057 - DNA, 25 bp, Homo sapien
ggtgcgctgggtgctccgcaggtgc

SEQ ID NO: 3027058 - DNA, 25 bp, Homo sapien
agggtctgcagggccgtcatcgctg

SEQ ID NO: 3027059 - DNA, 25 bp, Homo sapien
gctctgggtgcgctgggtgctccgc

SEQ ID NO: 3027060 - DNA, 25 bp, Homo sapien
tttccattgagcacgagcgtctgca

SEQ ID NO: 3027061 - DNA, 25 bp, Homo sapien
acgagcgtctgcaggtgcaccaggc

SEQ ID NO: 3027062 - DNA, 25 bp, Homo sapien
tgagcacgagcgtctgcaggtgcac

SEQ ID NO: 3027063 - DNA, 25 bp, Homo sapien
gggtttccattgagcacgagcgtct

SEQ ID NO: 3027064 - DNA, 25 bp, Homo sapien
ctgaggtccaggtatagtaggtcag

SEQ ID NO: 3027065 - DNA, 25 bp, Homo sapien
ggtatagtaggtcagtgaggttgat

SEQ ID NO: 3027066 - DNA, 25 bp, Homo sapien
gaggtccaggtatagtaggtcagtg

SEQ ID NO: 3027067 - DNA, 25 bp, Homo sapien
tatagtaggtcagtgaggttgatga

SEQ ID NO: 3027068 - DNA, 25 bp, Homo sapien
gctcccgcgggcactctgtcagctg

SEQ ID NO: 3027069 - DNA, 25 bp, Homo sapien
cagctcccgcgggcactctgtcagc

SEQ ID NO: 3027070 - DNA, 25 bp, Homo sapien
agctcccgcgggcactctgtcagct

SEQ ID NO: 3027071 - DNA, 25 bp, Homo sapien
tcccgcgggcactctgtcagctggt

SEQ ID NO: 3027072 - DNA, 25 bp, Homo sapien
tcagactgttggctcgggccacgat

SEQ ID NO: 3027073 - DNA, 25 bp, Homo sapien
tgaagatgtcatcggggactccgga

SEQ ID NO: 3027074 - DNA, 25 bp, Homo sapien
tcatcggggactccggaattcttca

SEQ ID NO: 3027075 - DNA, 25 bp, Homo sapien
caggactgagagatcatctagcttg

SEQ ID NO: 3027076 - DNA, 25 bp, Homo sapien
acttcagatgggatggccctcgttg

SEQ ID NO: 3027077 - DNA, 25 bp, Homo sapien
gatgttctgggacgttcaagtcttg

SEQ ID NO: 3027078 - DNA, 25 bp, Homo sapien
cctcgttgaggcctacagggtctgg

SEQ ID NO: 3027079 - DNA, 25 bp, Homo sapien
cctacagggtctggccaagggcctg

SEQ ID NO: 3027080 - DNA, 25 bp, Homo sapien
cccaagctcggtggcctcccggcca

SEQ ID NO: 3027081 - DNA, 25 bp, Homo sapien
caaccccaagctcggtggcctcccg

SEQ ID NO: 3027082 - DNA, 25 bp, Homo sapien
aagctcggtggcctcccggccagca

SEQ ID NO: 3027083 - DNA, 25 bp, Homo sapien
ggacagctccccatgaagcgtggtc

SEQ ID NO: 3027084 - DNA, 25 bp, Homo sapien
cagctccccatgaagcgtggtcagg

SEQ ID NO: 3027085 - DNA, 25 bp, Homo sapien
gctccccatgaagcgtggtcaggtt

SEQ ID NO: 3027086 - DNA, 25 bp, Homo sapien
tgttgtggctcacagacaagtgttc

SEQ ID NO: 3027087 - DNA, 25 bp, Homo sapien
cgcaggctggtcatggccttgacat

SEQ ID NO: 3027088 - DNA, 25 bp, Homo sapien
tgacattctcagggaagtagccgcc

SEQ ID NO: 3027089 - DNA, 25 bp, Homo sapien
aggccagtgcggttcagcttcagcc

SEQ ID NO: 3027090 - DNA, 25 bp, Homo sapien
ttcagccaccgcaggctggtcatgg

SEQ ID NO: 3027091 - DNA, 25 bp, Homo sapien
acgaacggcagcaccccggtggcct

SEQ ID NO: 3027092 - DNA, 25 bp, Homo sapien
tgaggtccacgccacgcacgaacgg

SEQ ID NO: 3027093 - DNA, 25 bp, Homo sapien
gtcgttgccgctgaggtccacgcca

SEQ ID NO: 3027094 - DNA, 25 bp, Homo sapien
cttgaagtcgttgccgctgaggtcc

SEQ ID NO: 3027095 - DNA, 25 bp, Homo sapien
cgccgggctagggagcgccggggcg

SEQ ID NO: 3027096 - DNA, 25 bp, Homo sapien
ccgcgccgggctagggagcgccggg

SEQ ID NO: 3027097 - DNA, 25 bp, Homo sapien
ggccgcgccgggctagggagcgccg

SEQ ID NO: 3027098 - DNA, 25 bp, Homo sapien
cgggccgcgccgggctagggagcgc

SEQ ID NO: 3027099 - DNA, 25 bp, Homo sapien
taacaaagaatgcacgtgtagctcg

SEQ ID NO: 3027100 - DNA, 25 bp, Homo sapien
gtgtagctcgcagcatacagcaggc

SEQ ID NO: 3027101 - DNA, 25 bp, Homo sapien
ggttgtcaccatgagcaaattaaca

SEQ ID NO: 3027102 - DNA, 25 bp, Homo sapien
cagtgagtggcaggttattattccg

SEQ ID NO: 3027103 - DNA, 25 bp, Homo sapien
gctccgattggagttagggcctgct

SEQ ID NO: 3027104 - DNA, 25 bp, Homo sapien
tgaaccgcgcagtattttggcacct

SEQ ID NO: 3027105 - DNA, 25 bp, Homo sapien
cttgtctgcgtgctgcgaagtccgc

SEQ ID NO: 3027106 - DNA, 25 bp, Homo sapien
taaatccagactgcgtcagggagtc

SEQ ID NO: 3027107 - DNA, 25 bp, Homo sapien
tgcttggtgtctaactgatgtccta

SEQ ID NO: 3027108 - DNA, 25 bp, Homo sapien
gatgtcctaaggtcccagcccttct

SEQ ID NO: 3027109 - DNA, 25 bp, Homo sapien
gcctccccgggagagttctgcttgg

SEQ ID NO: 3027110 - DNA, 25 bp, Homo sapien
gacctcatggtcatctgctcaggcc

SEQ ID NO: 3027111 - DNA, 25 bp, Homo sapien
ttgcttggccttccggcagttgaga

SEQ ID NO: 3027112 - DNA, 25 bp, Homo sapien
tttctgtgttgcttggccttccggc

SEQ ID NO: 3027113 - DNA, 25 bp, Homo sapien
tctgtgttgcttggccttccggcag

SEQ ID NO: 3027114 - DNA, 25 bp, Homo sapien
tggccttccggcagttgagaagcat

SEQ ID NO: 3027115 - DNA, 25 bp, Homo sapien
aggttatcatagagggctgctgtgc

SEQ ID NO: 3027116 - DNA, 25 bp, Homo sapien
tacacattgtcccaagactgagagg

SEQ ID NO: 3027117 - DNA, 25 bp, Homo sapien
cttgggctaccctgtcaagatttgg

SEQ ID NO: 3027118 - DNA, 25 bp, Homo sapien
gcagcttgggccgtcttactctgcc

SEQ ID NO: 3027119 - DNA, 25 bp, Homo sapien
agcgggagctcagtatgacttgcca

SEQ ID NO: 3027120 - DNA, 25 bp, Homo sapien
tgcaagcaccgtttcagctcttggg

SEQ ID NO: 3027121 - DNA, 25 bp, Homo sapien
tagctccaggcgttttgaggcgtct

SEQ ID NO: 3027122 - DNA, 25 bp, Homo sapien
gctgagagaaggtgacttaacgcct

SEQ ID NO: 3027123 - DNA, 25 bp, Homo sapien
cctgctcagaatgcaagggtcgcta

SEQ ID NO: 3027124 - DNA, 25 bp, Homo sapien
gatgactctggtaaggcagtgacta

SEQ ID NO: 3027125 - DNA, 25 bp, Homo sapien
cactgtggtgactcaaattccttgt

SEQ ID NO: 3027126 - DNA, 25 bp, Homo sapien
ttaccttcaccaagtaacccagagc

SEQ ID NO: 3027127 - DNA, 25 bp, Homo sapien
cagctcgtttccgtatctgctaata

SEQ ID NO: 3027128 - DNA, 25 bp, Homo sapien
tattcccgtagagctgacctgttca

SEQ ID NO: 3027129 - DNA, 25 bp, Homo sapien
gggaccatttattcccgtagagctg

SEQ ID NO: 3027130 - DNA, 25 bp, Homo sapien
gacctgttcagctcgtttccgtatc

SEQ ID NO: 3027131 - DNA, 25 bp, Homo sapien
ttccaaagacaaacaccggtgactc

SEQ ID NO: 3027132 - DNA, 25 bp, Homo sapien
ccttgagaaagctaaggttgtagtg

SEQ ID NO: 3027133 - DNA, 25 bp, Homo sapien
gccaacatttgcgtttttaatgaca

SEQ ID NO: 3027134 - DNA, 25 bp, Homo sapien
catctctgcattgcttgccgaattc

SEQ ID NO: 3027135 - DNA, 25 bp, Homo sapien
gggctcgcttgcgtgggtttcagaa

SEQ ID NO: 3027136 - DNA, 25 bp, Homo sapien
gccagaccctgactctatattagtg

SEQ ID NO: 3027137 - DNA, 25 bp, Homo sapien
ataagaccaatcagttcagtgggct

SEQ ID NO: 3027138 - DNA, 25 bp, Homo sapien
ttcagaaggaacctttcaggttcag

SEQ ID NO: 3027139 - DNA, 25 bp, Homo sapien
gacacccagaaaaaataccagccat

SEQ ID NO: 3027140 - DNA, 25 bp, Homo sapien
tgcacagatctgtccctggtaggga

SEQ ID NO: 3027141 - DNA, 25 bp, Homo sapien
ccatctacaagctgtggaaagaagc

SEQ ID NO: 3027142 - DNA, 25 bp, Homo sapien
aagaagccggtagcatagctgagtc

SEQ ID NO: 3027143 - DNA, 25 bp, Homo sapien
tagtctcagctagatccatcaaggg

SEQ ID NO: 3027144 - DNA, 25 bp, Homo sapien
tgcatgctgctaacctgagtgggcc

SEQ ID NO: 3027145 - DNA, 25 bp, Homo sapien
tgttaagtgcaagcaatcacctggg

SEQ ID NO: 3027146 - DNA, 25 bp, Homo sapien
tgcagatgtggctcaacacagggac

SEQ ID NO: 3027147 - DNA, 25 bp, Homo sapien
tatgaacaaggacaccccattacgg

SEQ ID NO: 3027148 - DNA, 25 bp, Homo sapien
gcctgggtctgtctgatctcagatg

SEQ ID NO: 3027149 - DNA, 25 bp, Homo sapien
tggtgcagcccaatcctgcagtttg

SEQ ID NO: 3027150 - DNA, 25 bp, Homo sapien
taatttgcagtcgtgcctgaccgta

SEQ ID NO: 3027151 - DNA, 25 bp, Homo sapien
catctgatatccagaaactattaag

SEQ ID NO: 3027152 - DNA, 25 bp, Homo sapien
gctgggataggcaaaatcacacacg

SEQ ID NO: 3027153 - DNA, 25 bp, Homo sapien
cacagagccactggtctatgggcca

SEQ ID NO: 3027154 - DNA, 25 bp, Homo sapien
caacaactagcaacatgactgggca

SEQ ID NO: 3027155 - DNA, 25 bp, Homo sapien
acacccactcggagatgttccagga

SEQ ID NO: 3027156 - DNA, 25 bp, Homo sapien
catatggcttgtattattcacaagg

SEQ ID NO: 3027157 - DNA, 25 bp, Homo sapien
tcagagtccatatggcttgtattat

SEQ ID NO: 3027158 - DNA, 25 bp, Homo sapien
tattattcacaaggtttttgtgaag

SEQ ID NO: 3027159 - DNA, 25 bp, Homo sapien
gagtccatatggcttgtattattca

SEQ ID NO: 3027160 - DNA, 25 bp, Homo sapien
tcattagacatctctgctctgaggg

SEQ ID NO: 3027161 - DNA, 25 bp, Homo sapien
gaagggctctccacatgggacacaa

SEQ ID NO: 3027162 - DNA, 25 bp, Homo sapien
tgaactaaagacgtgtacaactgtg

SEQ ID NO: 3027163 - DNA, 25 bp, Homo sapien
catgaaggacagaggctgacgagac

SEQ ID NO: 3027164 - DNA, 25 bp, Homo sapien
cgggtctacaggcgcacaccgccac

SEQ ID NO: 3027165 - DNA, 25 bp, Homo sapien
caggcaatccgccccccacagcctc

SEQ ID NO: 3027166 - DNA, 25 bp, Homo sapien
cgctctgtcgtccagtggcgcaatc

SEQ ID NO: 3027167 - DNA, 25 bp, Homo sapien
tagccgggtctacaggcgcacaccg

SEQ ID NO: 3027168 - DNA, 25 bp, Homo sapien
gaattctggatgtcctggcttaact

SEQ ID NO: 3027169 - DNA, 25 bp, Homo sapien
tggatgtcctggcttaactagatta

SEQ ID NO: 3027170 - DNA, 25 bp, Homo sapien
atgaattctggatgtcctggcttaa

SEQ ID NO: 3027171 - DNA, 25 bp, Homo sapien
ttctggatgtcctggcttaactaga

SEQ ID NO: 3027172 - DNA, 25 bp, Homo sapien
taagtttccaggacactaaatggcc

SEQ ID NO: 3027173 - DNA, 25 bp, Homo sapien
cagagtgatctggaccttgtgcccc

SEQ ID NO: 3027174 - DNA, 25 bp, Homo sapien
ggacgtctatgagaagccctgggca

SEQ ID NO: 3027175 - DNA, 25 bp, Homo sapien
gagcagctgcgtgacttttcagcag

SEQ ID NO: 3027176 - DNA, 25 bp, Homo sapien
aaaagggacgggtgtgtccaggctg

SEQ ID NO: 3027177 - DNA, 25 bp, Homo sapien
tgcatttccggggtttctttgctgt

SEQ ID NO: 3027178 - DNA, 25 bp, Homo sapien
ctgaggacaaaagggacgggtgtgt

SEQ ID NO: 3027179 - DNA, 25 bp, Homo sapien
aggctgcatttccggggtttctttg

SEQ ID NO: 3027180 - DNA, 25 bp, Homo sapien
tctccctcaagaatcctaagctttg

SEQ ID NO: 3027181 - DNA, 25 bp, Homo sapien
ccacactcacttggtaagtggactt

SEQ ID NO: 3027182 - DNA, 25 bp, Homo sapien
taagctttggagacattgtcccaca

SEQ ID NO: 3027183 - DNA, 25 bp, Homo sapien
tcatgccggccctttttacagaggc

SEQ ID NO: 3027184 - DNA, 25 bp, Homo sapien
cagctacttaagctctgttgtgcac

SEQ ID NO: 3027185 - DNA, 25 bp, Homo sapien
taagctctgttgtgcactggagcag

SEQ ID NO: 3027186 - DNA, 25 bp, Homo sapien
agctctgttgtgcactggagcagga

SEQ ID NO: 3027187 - DNA, 25 bp, Homo sapien
tacttaagctctgttgtgcactgga

SEQ ID NO: 3027188 - DNA, 25 bp, Homo sapien
gggcaggttcctaaatatcatcggg

SEQ ID NO: 3027189 - DNA, 25 bp, Homo sapien
acttctcatgacacccagttcccgg

SEQ ID NO: 3027190 - DNA, 25 bp, Homo sapien
cctgggcaggttcctaaatatcatc

SEQ ID NO: 3027191 - DNA, 25 bp, Homo sapien
gttcccggacattggcccaagctgt

SEQ ID NO: 3027192 - DNA, 25 bp, Homo sapien
ggtcacgacagctgcaagggcacat

SEQ ID NO: 3027193 - DNA, 25 bp, Homo sapien
tgcttatggtctgccaagggtcacg

SEQ ID NO: 3027194 - DNA, 25 bp, Homo sapien
tacccaatgaggatggaagatgcac

SEQ ID NO: 3027195 - DNA, 25 bp, Homo sapien
tgtctgttgctatgggaccctgagc

SEQ ID NO: 3027196 - DNA, 25 bp, Homo sapien
acatgtgtggaactggcgccccttg

SEQ ID NO: 3027197 - DNA, 25 bp, Homo sapien
actgctgctctctcggcttggcaca

SEQ ID NO: 3027198 - DNA, 25 bp, Homo sapien
cttctgcacagtccgtgtgacggag

SEQ ID NO: 3027199 - DNA, 25 bp, Homo sapien
tggagcggtgttctcatcgacccac

SEQ ID NO: 3027200 - DNA, 25 bp, Homo sapien
aaaggcaggatgtgccactaccact

SEQ ID NO: 3027201 - DNA, 25 bp, Homo sapien
gctgcaaaggcaggatgtgccacta

SEQ ID NO: 3027202 - DNA, 25 bp, Homo sapien
tgcaaaggcaggatgtgccactacc

SEQ ID NO: 3027203 - DNA, 25 bp, Homo sapien
actaccactgccatcaccagggttg

SEQ ID NO: 3027204 - DNA, 25 bp, Homo sapien
cagggaggcgcccaggggtctatat

SEQ ID NO: 3027205 - DNA, 25 bp, Homo sapien
gcgcccaggggtctatatgccaagg

SEQ ID NO: 3027206 - DNA, 25 bp, Homo sapien
cccaggggtctatatgccaaggcag

SEQ ID NO: 3027207 - DNA, 25 bp, Homo sapien
aggcgcccaggggtctatatgccaa

SEQ ID NO: 3027208 - DNA, 25 bp, Homo sapien
gtcacagaattgctttcaccagcag

SEQ ID NO: 3027209 - DNA, 25 bp, Homo sapien
agcctttgaggacccagtctgtctg

SEQ ID NO: 3027210 - DNA, 25 bp, Homo sapien
catccgccgatgcagcaaacaaact

SEQ ID NO: 3027211 - DNA, 25 bp, Homo sapien
tcctgttcagggactggttagcctg

SEQ ID NO: 3027212 - DNA, 25 bp, Homo sapien
gggcctgagtggaatccccgacact

SEQ ID NO: 3027213 - DNA, 25 bp, Homo sapien
caagggaaagatggtgtacacactc

SEQ ID NO: 3027214 - DNA, 25 bp, Homo sapien
tgctacgtagcccaagcttggatgt

SEQ ID NO: 3027215 - DNA, 25 bp, Homo sapien
taagcctggtgtagcaatcatctat

SEQ ID NO: 3027216 - DNA, 25 bp, Homo sapien
acacagctgagcgacactctgggaa

SEQ ID NO: 3027217 - DNA, 25 bp, Homo sapien
ctgacaaactggacacacactgctg

SEQ ID NO: 3027218 - DNA, 25 bp, Homo sapien
tggcctccagcaccgagtcaggaag

SEQ ID NO: 3027219 - DNA, 25 bp, Homo sapien
gggaaacccatgcagctgaggtaga

SEQ ID NO: 3027220 - DNA, 25 bp, Homo sapien
tcgagctacggctgacaccgcaggt

SEQ ID NO: 3027221 - DNA, 25 bp, Homo sapien
atggcagggtctttcgagctacggc

SEQ ID NO: 3027222 - DNA, 25 bp, Homo sapien
gaaagattccatggagtgaaatggc

SEQ ID NO: 3027223 - DNA, 25 bp, Homo sapien
tgcaggttggcaacaacaggcctgt

SEQ ID NO: 3027224 - DNA, 25 bp, Homo sapien
cactgtgggcacttcctgatgggct

SEQ ID NO: 3027225 - DNA, 25 bp, Homo sapien
tcttcttggtcttaaggaccatgtc

SEQ ID NO: 3027226 - DNA, 25 bp, Homo sapien
gatatcttcttgctgggccaactct

SEQ ID NO: 3027227 - DNA, 25 bp, Homo sapien
ccaaagtactgggccaaggcctcgt

SEQ ID NO: 3027228 - DNA, 25 bp, Homo sapien
ttctttgctttagccaccgcttcaa

SEQ ID NO: 3027229 - DNA, 25 bp, Homo sapien
tcagcttcagatcagcttccagttc

SEQ ID NO: 3027230 - DNA, 25 bp, Homo sapien
caccgcttcaatgaaaacctgcttg

SEQ ID NO: 3027231 - DNA, 25 bp, Homo sapien
agttcagcccggaggtcaggcttag

SEQ ID NO: 3027232 - DNA, 25 bp, Homo sapien
tctcgatgtgctccgcatgagtggc

SEQ ID NO: 3027233 - DNA, 25 bp, Homo sapien
gtgcccagggaggaaccgcttgtct

SEQ ID NO: 3027234 - DNA, 25 bp, Homo sapien
tccgggctttgatggtctcgatgtg

SEQ ID NO: 3027235 - DNA, 25 bp, Homo sapien
ggtgaggcccacgtacatccgggct

SEQ ID NO: 3027236 - DNA, 25 bp, Homo sapien
gctgcccttcgctgatccagaagtc

SEQ ID NO: 3027237 - DNA, 25 bp, Homo sapien
tactatgaggttttggtccagctca

SEQ ID NO: 3027238 - DNA, 25 bp, Homo sapien
tactccctgcagaactattacattg

SEQ ID NO: 3027239 - DNA, 25 bp, Homo sapien
caatccagctacagcaggcttctgc

SEQ ID NO: 3027240 - DNA, 25 bp, Homo sapien
gtgctgggctgaaagtgggatcctt

SEQ ID NO: 3027241 - DNA, 25 bp, Homo sapien
agggcaatgaggtcggcctcggtga

SEQ ID NO: 3027242 - DNA, 25 bp, Homo sapien
gatccttgctcatagacagggagga

SEQ ID NO: 3027243 - DNA, 25 bp, Homo sapien
tctccccgtccaccatctccacggt

SEQ ID NO: 3027244 - DNA, 25 bp, Homo sapien
cacatccagatagtttcgggccaga

SEQ ID NO: 3027245 - DNA, 25 bp, Homo sapien
tgagcgatgtcgatctccactgtgg

SEQ ID NO: 3027246 - DNA, 25 bp, Homo sapien
ccaggaaatggcgaacaataaactc

SEQ ID NO: 3027247 - DNA, 25 bp, Homo sapien
gccagaatcatgaggccatgggcca

SEQ ID NO: 3027248 - DNA, 25 bp, Homo sapien
tgctgttccaccaacaccgtcaggt

SEQ ID NO: 3027249 - DNA, 25 bp, Homo sapien
ttctgttcggggatagctgatgtac

SEQ ID NO: 3027250 - DNA, 25 bp, Homo sapien
cccgctctagaatgctctgggcaaa

SEQ ID NO: 3027251 - DNA, 25 bp, Homo sapien
caccgtcaggtttaagtctctggga

SEQ ID NO: 3027252 - DNA, 25 bp, Homo sapien
ctcaactttcgagaagccagcttct

SEQ ID NO: 3027253 - DNA, 25 bp, Homo sapien
catttattctcaactttcgagaagc

SEQ ID NO: 3027254 - DNA, 25 bp, Homo sapien
agcatttattctcaactttcgagaa

SEQ ID NO: 3027255 - DNA, 25 bp, Homo sapien
tctcaactttcgagaagccagcttc

SEQ ID NO: 3027256 - DNA, 25 bp, Homo sapien
tccaaggcttgaggccgccacttgc

SEQ ID NO: 3027257 - DNA, 25 bp, Homo sapien
tgctcttgggcttagatctgacctc

SEQ ID NO: 3027258 - DNA, 25 bp, Homo sapien
cgccacttgctcttgggcttagatc

SEQ ID NO: 3027259 - DNA, 25 bp, Homo sapien
ttgggcttagatctgacctctacca

SEQ ID NO: 3027260 - DNA, 25 bp, Homo sapien
agagtcgatgccttttccagttgaa

SEQ ID NO: 3027261 - DNA, 25 bp, Homo sapien
actaggcaagccgtgtggttaaaga

SEQ ID NO: 3027262 - DNA, 25 bp, Homo sapien
cacacaactgatagagaactaggca

SEQ ID NO: 3027263 - DNA, 25 bp, Homo sapien
tccagttgaattctacgataccatc

SEQ ID NO: 3027264 - DNA, 25 bp, Homo sapien
gaactggcagctgccgtaactgatg

SEQ ID NO: 3027265 - DNA, 25 bp, Homo sapien
gctgccgtaactgatgagctgctct

SEQ ID NO: 3027266 - DNA, 25 bp, Homo sapien
gaaaaatcctctgaagccgcagggt

SEQ ID NO: 3027267 - DNA, 25 bp, Homo sapien
tttctggtacaaaagcctgaatggc

SEQ ID NO: 3027268 - DNA, 25 bp, Homo sapien
catggggtgtgatctcagagaatcg

SEQ ID NO: 3027269 - DNA, 25 bp, Homo sapien
tcgggctcgcaacacctgcagattg

SEQ ID NO: 3027270 - DNA, 25 bp, Homo sapien
tcacaagctgtcctgacggcatggg

SEQ ID NO: 3027271 - DNA, 25 bp, Homo sapien
tcaccctctgatcaggctcggtcag

SEQ ID NO: 3027272 - DNA, 25 bp, Homo sapien
gctgtgagatgaccaatttacctat

SEQ ID NO: 3027273 - DNA, 25 bp, Homo sapien
ggttaaatcaatggtgtacagtgtc

SEQ ID NO: 3027274 - DNA, 25 bp, Homo sapien
cagatcgttactgtgtctagtagaa

SEQ ID NO: 3027275 - DNA, 25 bp, Homo sapien
tgccctccatcataaaggactcact

SEQ ID NO: 3027276 - DNA, 25 bp, Homo sapien
gagtaaggcctctatgcggttgaga

SEQ ID NO: 3027277 - DNA, 25 bp, Homo sapien
ccttatggctggaggcgagacatca

SEQ ID NO: 3027278 - DNA, 25 bp, Homo sapien
gaccagcactggtgtaggtcttcac

SEQ ID NO: 3027279 - DNA, 25 bp, Homo sapien
aatggaatgactcggtgtacaaccg

SEQ ID NO: 3027280 - DNA, 25 bp, Homo sapien
gcactggcgagtctctcgttccaaa

SEQ ID NO: 3027281 - DNA, 25 bp, Homo sapien
gatgttttcgccttctctatcacag

SEQ ID NO: 3027282 - DNA, 25 bp, Homo sapien
gccttacacacgtggataatctcaa

SEQ ID NO: 3027283 - DNA, 25 bp, Homo sapien
tcacagtcagtccagatcaccagag

SEQ ID NO: 3027284 - DNA, 25 bp, Homo sapien
tgagaacagaattgcacaacagtga

SEQ ID NO: 3027285 - DNA, 25 bp, Homo sapien
catctctaagctaaggggatctgac

SEQ ID NO: 3027286 - DNA, 25 bp, Homo sapien
tgcacaacagtgacttgacatctct

SEQ ID NO: 3027287 - DNA, 25 bp, Homo sapien
gggatctgactgaaggttaatgctg

SEQ ID NO: 3027288 - DNA, 25 bp, Homo sapien
gaaatcactctgtttgactctgtgg

SEQ ID NO: 3027289 - DNA, 25 bp, Homo sapien
ggtggaaaaccttatctccaaatgc

SEQ ID NO: 3027290 - DNA, 25 bp, Homo sapien
acttcagtcccttggccacttagcc

SEQ ID NO: 3027291 - DNA, 25 bp, Homo sapien
tatacaatgggtgggaaccagcttt

SEQ ID NO: 3027292 - DNA, 25 bp, Homo sapien
aagaggacaagagggttgcagctct

SEQ ID NO: 3027293 - DNA, 25 bp, Homo sapien
cttgatgtctacaaaattctctggg

SEQ ID NO: 3027294 - DNA, 25 bp, Homo sapien
gtctacaaaattctctgggcagtac

SEQ ID NO: 3027295 - DNA, 25 bp, Homo sapien
gatgtctacaaaattctctgggcag

SEQ ID NO: 3027296 - DNA, 25 bp, Homo sapien
caactcagtacatgacagagagccc

SEQ ID NO: 3027297 - DNA, 25 bp, Homo sapien
ggctatgaccctctgcatgacacac

SEQ ID NO: 3027298 - DNA, 25 bp, Homo sapien
gcaaactgttccaatgggttcatgg

SEQ ID NO: 3027299 - DNA, 25 bp, Homo sapien
gagagccctccaatctaatgacagc

SEQ ID NO: 3027300 - DNA, 25 bp, Homo sapien
agtccttcccttgagaattgtactg

SEQ ID NO: 3027301 - DNA, 25 bp, Homo sapien
aagtccttcccttgagaattgtact

SEQ ID NO: 3027302 - DNA, 25 bp, Homo sapien
tggaaatcatgagccagtaaatgtc

SEQ ID NO: 3027303 - DNA, 25 bp, Homo sapien
cattttcgaaactgcatctggaaat

SEQ ID NO: 3027304 - DNA, 25 bp, Homo sapien
cgaaactgcatctggaaatcatgag

SEQ ID NO: 3027305 - DNA, 25 bp, Homo sapien
catgagccagtaaatgtccagaaac

SEQ ID NO: 3027306 - DNA, 25 bp, Homo sapien
tattcttaagacagcgacatattct

SEQ ID NO: 3027307 - DNA, 25 bp, Homo sapien
ttctacatatgacgaggctgactac

SEQ ID NO: 3027308 - DNA, 25 bp, Homo sapien
aagtgatcaccccatatccaggaac

SEQ ID NO: 3027309 - DNA, 25 bp, Homo sapien
ggctgactactttctcttgcttatg

SEQ ID NO: 3027310 - DNA, 25 bp, Homo sapien
tcatagatcttgttgaattttgaaa

SEQ ID NO: 3027311 - DNA, 25 bp, Homo sapien
ctggccatacagatgataatcaaat

SEQ ID NO: 3027312 - DNA, 25 bp, Homo sapien
gccatacagatgataatcaaattca

SEQ ID NO: 3027313 - DNA, 25 bp, Homo sapien
tgataatcaaattcatagatcttgt

SEQ ID NO: 3027314 - DNA, 25 bp, Homo sapien
tttctggtagacaaaggagctctgg

SEQ ID NO: 3027315 - DNA, 25 bp, Homo sapien
ttctggtagacaaaggagctctggc

SEQ ID NO: 3027316 - DNA, 25 bp, Homo sapien
gtcaagactgtggtgtcaaattcca

SEQ ID NO: 3027317 - DNA, 25 bp, Homo sapien
cgtcaagactgtggtgtcaaattcc

SEQ ID NO: 3027318 - DNA, 25 bp, Homo sapien
gacatatgagatctgctgtcactgg

SEQ ID NO: 3027319 - DNA, 25 bp, Homo sapien
tgggacaaattacaacgacatatga

SEQ ID NO: 3027320 - DNA, 25 bp, Homo sapien
aattacaacgacatatgagatctgc

SEQ ID NO: 3027321 - DNA, 25 bp, Homo sapien
caacgacatatgagatctgctgtca

SEQ ID NO: 3027322 - DNA, 25 bp, Homo sapien
ctacttcattgtctagaagtagaca

SEQ ID NO: 3027323 - DNA, 25 bp, Homo sapien
cttcattgtctagaagtagacaaac

SEQ ID NO: 3027324 - DNA, 25 bp, Homo sapien
taggcgtaggagaaccatttttcaa

SEQ ID NO: 3027325 - DNA, 25 bp, Homo sapien
gcgtaggagaaccatttttcaatgt

SEQ ID NO: 3027326 - DNA, 25 bp, Homo sapien
cttggggctggtcaccaggacttct

SEQ ID NO: 3027327 - DNA, 25 bp, Homo sapien
ttggggctggtcaccaggacttcta

SEQ ID NO: 3027328 - DNA, 25 bp, Homo sapien
gggctggtcaccaggacttctagca

SEQ ID NO: 3027329 - DNA, 25 bp, Homo sapien
tggggctggtcaccaggacttctag

SEQ ID NO: 3027330 - DNA, 25 bp, Homo sapien
tgttgctgtaagtgtgcactgtgag

SEQ ID NO: 3027331 - DNA, 25 bp, Homo sapien
gttgctgtaagtgtgcactgtgagg

SEQ ID NO: 3027332 - DNA, 25 bp, Homo sapien
gtgttgctgtaagtgtgcactgtga

SEQ ID NO: 3027333 - DNA, 25 bp, Homo sapien
cgtgttgctgtaagtgtgcactgtg

SEQ ID NO: 3027334 - DNA, 25 bp, Homo sapien
aagtcacaagggctgtagaatgcag

SEQ ID NO: 3027335 - DNA, 25 bp, Homo sapien
aaagtcacaagggctgtagaatgca

SEQ ID NO: 3027336 - DNA, 25 bp, Homo sapien
ggaaagtcacaagggctgtagaatg

SEQ ID NO: 3027337 - DNA, 25 bp, Homo sapien
ctggaaagtcacaagggctgtagaa

SEQ ID NO: 3027338 - DNA, 25 bp, Homo sapien
agtagttcccaaatgaatttctgaa

SEQ ID NO: 3027339 - DNA, 25 bp, Homo sapien
tcagtagttcccaaatgaatttctg

SEQ ID NO: 3027340 - DNA, 25 bp, Homo sapien
cagtagttcccaaatgaatttctga

SEQ ID NO: 3027341 - DNA, 25 bp, Homo sapien
ggccacacagaggactttccgcacg

SEQ ID NO: 3027342 - DNA, 25 bp, Homo sapien
cgcctcatgcgaccgtttgacagca

SEQ ID NO: 3027343 - DNA, 25 bp, Homo sapien
cggcgatccccttggccgcgtcgtt

SEQ ID NO: 3027344 - DNA, 25 bp, Homo sapien
gcgtcgtttttttcggccacacaga

SEQ ID NO: 3027345 - DNA, 25 bp, Homo sapien
gccgtcgcagccaccggagcgcgta

SEQ ID NO: 3027346 - DNA, 25 bp, Homo sapien
ccggagcgcgtagcgggcgacagga

SEQ ID NO: 3027347 - DNA, 25 bp, Homo sapien
tcgcagccaccggagcgcgtagcgg

SEQ ID NO: 3027348 - DNA, 25 bp, Homo sapien
cgtagcgggcgacaggaaagatcat

SEQ ID NO: 3027349 - DNA, 25 bp, Homo sapien
gggaaccagagcctcgcttcggtca

SEQ ID NO: 3027350 - DNA, 25 bp, Homo sapien
gcctcagcaccgaatccagtatctt

SEQ ID NO: 3027351 - DNA, 25 bp, Homo sapien
atggcgcccaccgaaagggaaccag

SEQ ID NO: 3027352 - DNA, 25 bp, Homo sapien
cctttggagcttcagtcactgagcc

SEQ ID NO: 3027353 - DNA, 25 bp, Homo sapien
caagagtgaccgaagagggcttgca

SEQ ID NO: 3027354 - DNA, 25 bp, Homo sapien
gtagtacgccatcgaggtcatcatg

SEQ ID NO: 3027355 - DNA, 25 bp, Homo sapien
tggacctgaatcagccctgggtgtg

SEQ ID NO: 3027356 - DNA, 25 bp, Homo sapien
ggcttgcatcacgtcactccagtgg

SEQ ID NO: 3027357 - DNA, 25 bp, Homo sapien
tcactcctttggtagaaccttggga

SEQ ID NO: 3027358 - DNA, 25 bp, Homo sapien
ttatatcgcacaggacacatcagcc

SEQ ID NO: 3027359 - DNA, 25 bp, Homo sapien
ctaggttaaactagccaggcaggta

SEQ ID NO: 3027360 - DNA, 25 bp, Homo sapien
tcaaaagccccactttagagatcag

SEQ ID NO: 3027361 - DNA, 25 bp, Homo sapien
gccactaaatagctggagtcacaga

SEQ ID NO: 3027362 - DNA, 25 bp, Homo sapien
tcaccgggattgtctgccactaaat

SEQ ID NO: 3027363 - DNA, 25 bp, Homo sapien
gaccactttggtagcagaactgtag

SEQ ID NO: 3027364 - DNA, 25 bp, Homo sapien
cacaataaagcaaacgccgacaggc

SEQ ID NO: 3027365 - DNA, 25 bp, Homo sapien
ggttgattctcacaccaggatggga

SEQ ID NO: 3027366 - DNA, 25 bp, Homo sapien
tctctgttgcagcaaggcggaggaa

SEQ ID NO: 3027367 - DNA, 25 bp, Homo sapien
caccatactttgagctactgacagc

SEQ ID NO: 3027368 - DNA, 25 bp, Homo sapien
gacatttggcttcctgattacggga

SEQ ID NO: 3027369 - DNA, 25 bp, Homo sapien
gaattatgtccagctgtgagaaagc

SEQ ID NO: 3027370 - DNA, 25 bp, Homo sapien
aattatgtccagctgtgagaaagcc

SEQ ID NO: 3027371 - DNA, 25 bp, Homo sapien
tgtcccagaattactaacaatgaga

SEQ ID NO: 3027372 - DNA, 25 bp, Homo sapien
ctcaaagggcccgagtgtcaacagt

SEQ ID NO: 3027373 - DNA, 25 bp, Homo sapien
caatgagacttaaacaaattttgat

SEQ ID NO: 3027374 - DNA, 25 bp, Homo sapien
cccgagtgtcaacagttcccctttg

SEQ ID NO: 3027375 - DNA, 25 bp, Homo sapien
agggaagagagaggcgaagctctca

SEQ ID NO: 3027376 - DNA, 25 bp, Homo sapien
ctgacaccagtgtcgctctggatct

SEQ ID NO: 3027377 - DNA, 25 bp, Homo sapien
cctggtacttatcccctgccagtct

SEQ ID NO: 3027378 - DNA, 25 bp, Homo sapien
agagagaggcgaagctctcaacctc

SEQ ID NO: 3027379 - DNA, 25 bp, Homo sapien
tgccacaagacacaaatgagtcacc

SEQ ID NO: 3027380 - DNA, 25 bp, Homo sapien
ctgtgccacaagacacaaatgagtc

SEQ ID NO: 3027381 - DNA, 25 bp, Homo sapien
caagacacaaatgagtcaccccaca

SEQ ID NO: 3027382 - DNA, 25 bp, Homo sapien
cacaagacacaaatgagtcacccca

SEQ ID NO: 3027383 - DNA, 25 bp, Homo sapien
cacaaggtctccatgcttacctcaa

SEQ ID NO: 3027384 - DNA, 25 bp, Homo sapien
tcctgggcagcccaaatttataacc

SEQ ID NO: 3027385 - DNA, 25 bp, Homo sapien
atgcacccacccttggacagatgtc

SEQ ID NO: 3027386 - DNA, 25 bp, Homo sapien
tttataaccctctcagacaaggtga

SEQ ID NO: 3027387 - DNA, 25 bp, Homo sapien
tctgtgaataaagtgggctactttt

SEQ ID NO: 3027388 - DNA, 25 bp, Homo sapien
tgaataaagtgggctactttttgga

SEQ ID NO: 3027389 - DNA, 25 bp, Homo sapien
ctctgtgaataaagtgggctacttt

SEQ ID NO: 3027390 - DNA, 25 bp, Homo sapien
tgtgaataaagtgggctactttttg

SEQ ID NO: 3027391 - DNA, 25 bp, Homo sapien
tccactgggccgcagagcgcttctg

SEQ ID NO: 3027392 - DNA, 25 bp, Homo sapien
ctgggccgcagagcgcttctgtcac

SEQ ID NO: 3027393 - DNA, 25 bp, Homo sapien
cactgggccgcagagcgcttctgtc

SEQ ID NO: 3027394 - DNA, 25 bp, Homo sapien
cagtccactgggccgcagagcgctt

SEQ ID NO: 3027395 - DNA, 25 bp, Homo sapien
agctctacatcagtctttttgctcc

SEQ ID NO: 3027396 - DNA, 25 bp, Homo sapien
tctgatgaatgtaccacctccaaca

SEQ ID NO: 3027397 - DNA, 25 bp, Homo sapien
tccaacagctctacatcagtctttt

SEQ ID NO: 3027398 - DNA, 25 bp, Homo sapien
gatgaatgtaccacctccaacagct

SEQ ID NO: 3027399 - DNA, 25 bp, Homo sapien
ctgtgcctttggaacggagatccac

SEQ ID NO: 3027400 - DNA, 25 bp, Homo sapien
gagatccacaaggatcaaatggttg

SEQ ID NO: 3027401 - DNA, 25 bp, Homo sapien
caaggatcaaatggttgtcagaacc

SEQ ID NO: 3027402 - DNA, 25 bp, Homo sapien
cctttggaacggagatccacaagga

SEQ ID NO: 3027403 - DNA, 25 bp, Homo sapien
aattccagagtcatagcttgcttca

SEQ ID NO: 3027404 - DNA, 25 bp, Homo sapien
attccagagtcatagcttgcttcag

SEQ ID NO: 3027405 - DNA, 25 bp, Homo sapien
cagtcttgggatccacacttttcac

SEQ ID NO: 3027406 - DNA, 25 bp, Homo sapien
agtcttgggatccacacttttcact

SEQ ID NO: 3027407 - DNA, 25 bp, Homo sapien
catattccaggtttcgggagtagca

SEQ ID NO: 3027408 - DNA, 25 bp, Homo sapien
aagatcatgccagctcggcagcctc

SEQ ID NO: 3027409 - DNA, 25 bp, Homo sapien
gatgtgagccatgtccgccatgaga

SEQ ID NO: 3027410 - DNA, 25 bp, Homo sapien
tcatctgcaatcttccgtagccggg

SEQ ID NO: 3027411 - DNA, 25 bp, Homo sapien
tcaacagggtgcgaacatctttcca

SEQ ID NO: 3027412 - DNA, 25 bp, Homo sapien
tatccagggcagaaactagcagtgg

SEQ ID NO: 3027413 - DNA, 25 bp, Homo sapien
gtaagaggcaccaggctactggtga

SEQ ID NO: 3027414 - DNA, 25 bp, Homo sapien
tatgtagaccccagaaactcagtta

SEQ ID NO: 3027415 - DNA, 25 bp, Homo sapien
cctccagctggtcatagttgatgta

SEQ ID NO: 3027416 - DNA, 25 bp, Homo sapien
cagctggtcatagttgatgtagcca

SEQ ID NO: 3027417 - DNA, 25 bp, Homo sapien
tccagctggtcatagttgatgtagc

SEQ ID NO: 3027418 - DNA, 25 bp, Homo sapien
tcctccagctggtcatagttgatgt

SEQ ID NO: 3027419 - DNA, 25 bp, Homo sapien
gatggatactggtgtgttcagcctg

SEQ ID NO: 3027420 - DNA, 25 bp, Homo sapien
gaaacaaatgtgacgggaccacaca

SEQ ID NO: 3027421 - DNA, 25 bp, Homo sapien
gttcagcctgctcaaccaagtatgg

SEQ ID NO: 3027422 - DNA, 25 bp, Homo sapien
gtatggctcacagacccaggagtcc

SEQ ID NO: 3027423 - DNA, 25 bp, Homo sapien
accagggcagtgtacacagcaaagt

SEQ ID NO: 3027424 - DNA, 25 bp, Homo sapien
tcaggtggcccccatccggaaggtc

SEQ ID NO: 3027425 - DNA, 25 bp, Homo sapien
tggcccccatccggaaggtccaggc

SEQ ID NO: 3027426 - DNA, 25 bp, Homo sapien
ccaccagggcagtgtacacagcaaa

SEQ ID NO: 3027427 - DNA, 25 bp, Homo sapien
caggccatatggatgagacaagcac

SEQ ID NO: 3027428 - DNA, 25 bp, Homo sapien
atggcagtccatcttaggactcttc

SEQ ID NO: 3027429 - DNA, 25 bp, Homo sapien
tcttcttggtgcatgtcggccctgg

SEQ ID NO: 3027430 - DNA, 25 bp, Homo sapien
tgggcccggcctatggcagtccatg

SEQ ID NO: 3027431 - DNA, 25 bp, Homo sapien
aataaactcagtcccgccatagtat

SEQ ID NO: 3027432 - DNA, 25 bp, Homo sapien
catcaataaactcagtcccgccata

SEQ ID NO: 3027433 - DNA, 25 bp, Homo sapien
cagagggtctccagttcatcaataa

SEQ ID NO: 3027434 - DNA, 25 bp, Homo sapien
acagagggtctccagttcatcaata

SEQ ID NO: 3027435 - DNA, 25 bp, Homo sapien
agaagagcaggagacttagatccac

SEQ ID NO: 3027436 - DNA, 25 bp, Homo sapien
gaaagtctgtgcttcacagaggcca

SEQ ID NO: 3027437 - DNA, 25 bp, Homo sapien
tagatccactcagacccagaaagtc

SEQ ID NO: 3027438 - DNA, 25 bp, Homo sapien
gagacttagatccactcagacccag

SEQ ID NO: 3027439 - DNA, 25 bp, Homo sapien
cctctggaatctacagtcaagagac

SEQ ID NO: 3027440 - DNA, 25 bp, Homo sapien
agagaccaaaccagctgtgcaactt

SEQ ID NO: 3027441 - DNA, 25 bp, Homo sapien
ccagcatgatcaagtgttccaccaa

SEQ ID NO: 3027442 - DNA, 25 bp, Homo sapien
gatcaagtgttccaccaatgcctct

SEQ ID NO: 3027443 - DNA, 25 bp, Homo sapien
aatgagctaagtatagtggcttgca

SEQ ID NO: 3027444 - DNA, 25 bp, Homo sapien
caaatgagctaagtatagtggcttg

SEQ ID NO: 3027445 - DNA, 25 bp, Homo sapien
tacaaatgagctaagtatagtggct

SEQ ID NO: 3027446 - DNA, 25 bp, Homo sapien
ttacaaatgagctaagtatagtggc

SEQ ID NO: 3027447 - DNA, 25 bp, Homo sapien
tgaggctgcaatgagacgagattgc

SEQ ID NO: 3027448 - DNA, 25 bp, Homo sapien
tgtggtcctagctacagagaggctg

SEQ ID NO: 3027449 - DNA, 25 bp, Homo sapien
aggcaggaggattgcttgagcccaa

SEQ ID NO: 3027450 - DNA, 25 bp, Homo sapien
acgagattgcaccactgcactccag

SEQ ID NO: 3027451 - DNA, 25 bp, Homo sapien
caatccaaccctctgccggttactc

SEQ ID NO: 3027452 - DNA, 25 bp, Homo sapien
ctctgccggttactctccttcttaa

SEQ ID NO: 3027453 - DNA, 25 bp, Homo sapien
gccggttactctccttcttaatgat

SEQ ID NO: 3027454 - DNA, 25 bp, Homo sapien
cggttactctccttcttaatgatgt

SEQ ID NO: 3027455 - DNA, 25 bp, Homo sapien
ccagcatcttgtcatgtgaggacca

SEQ ID NO: 3027456 - DNA, 25 bp, Homo sapien
agcatcttgtcatgtgaggaccaca

SEQ ID NO: 3027457 - DNA, 25 bp, Homo sapien
cagcatcttgtcatgtgaggaccac

SEQ ID NO: 3027458 - DNA, 25 bp, Homo sapien
gccagcatcttgtcatgtgaggacc

SEQ ID NO: 3027459 - DNA, 25 bp, Homo sapien
aagttaatgatgaacaggatatagg

SEQ ID NO: 3027460 - DNA, 25 bp, Homo sapien
gtattctcagctactctgggtggct

SEQ ID NO: 3027461 - DNA, 25 bp, Homo sapien
tgagcccagattttcccacagcact

SEQ ID NO: 3027462 - DNA, 25 bp, Homo sapien
cagtgagcccagattttcccacagc

SEQ ID NO: 3027463 - DNA, 25 bp, Homo sapien
gatgatcacttgagtcccggaggtt

SEQ ID NO: 3027464 - DNA, 25 bp, Homo sapien
gaaggagctaggattgtttaaatcg

SEQ ID NO: 3027465 - DNA, 25 bp, Homo sapien
gacttgcagctttgttgtgaaggag

SEQ ID NO: 3027466 - DNA, 25 bp, Homo sapien
ttcagtggagagctactactcacat

SEQ ID NO: 3027467 - DNA, 25 bp, Homo sapien
gtttaaatcgaaaatgctcaacgag

SEQ ID NO: 3027468 - DNA, 25 bp, Homo sapien
atcataccgaatgtgcctggaactg

SEQ ID NO: 3027469 - DNA, 25 bp, Homo sapien
aagcgctcccctcccgtcattgcgg

SEQ ID NO: 3027470 - DNA, 25 bp, Homo sapien
cccatcataccgaatgtgcctggaa

SEQ ID NO: 3027471 - DNA, 25 bp, Homo sapien
tcccctcccgtcattgcggctgcag

SEQ ID NO: 3027472 - DNA, 25 bp, Homo sapien
agccacgtgaccagccgctccaacc

SEQ ID NO: 3027473 - DNA, 25 bp, Homo sapien
ctagcgacgcctccgtcctacgccg

SEQ ID NO: 3027474 - DNA, 25 bp, Homo sapien
gcgctggaccgctcgagctcaggaa

SEQ ID NO: 3027475 - DNA, 25 bp, Homo sapien
gaaggtgcactctgcgcgccaggct

SEQ ID NO: 3027476 - DNA, 25 bp, Homo sapien
tcagagcaaaaggttttctgcttac

SEQ ID NO: 3027477 - DNA, 25 bp, Homo sapien
tctcagagcaaaaggttttctgctt

SEQ ID NO: 3027478 - DNA, 25 bp, Homo sapien
cctctcagagcaaaaggttttctgc

SEQ ID NO: 3027479 - DNA, 25 bp, Homo sapien
ctctcagagcaaaaggttttctgct

SEQ ID NO: 3027480 - DNA, 25 bp, Homo sapien
agatcgcggagctcaacatcgtgca

SEQ ID NO: 3027481 - DNA, 25 bp, Homo sapien
tttttccagtcagagccggagctag

SEQ ID NO: 3027482 - DNA, 25 bp, Homo sapien
tggccaccttcttgacagcatcgag

SEQ ID NO: 3027483 - DNA, 25 bp, Homo sapien
tactgtgccctgtacgagaagatgg

SEQ ID NO: 3027484 - DNA, 25 bp, Homo sapien
gagaggaacttccagtgcccgctat

SEQ ID NO: 3027485 - DNA, 25 bp, Homo sapien
aataatacccatagtgtaggaccct

SEQ ID NO: 3027486 - DNA, 25 bp, Homo sapien
cagtgctgcagctagaggtagctcc

SEQ ID NO: 3027487 - DNA, 25 bp, Homo sapien
taatggttgtctacaaggcacacct

SEQ ID NO: 3027488 - DNA, 25 bp, Homo sapien
tccgagatgcggcaagagctgaaaa

SEQ ID NO: 3027489 - DNA, 25 bp, Homo sapien
gagaaaactgatccactattctcat

SEQ ID NO: 3027490 - DNA, 25 bp, Homo sapien
caaaactggacaacatgaacttgtc

SEQ ID NO: 3027491 - DNA, 25 bp, Homo sapien
tttcccctcatgaggcccaagtgat

SEQ ID NO: 3027492 - DNA, 25 bp, Homo sapien
gcgggaactattctacatccttgtg

SEQ ID NO: 3027493 - DNA, 25 bp, Homo sapien
ggcatattcagagtataacccggtg

SEQ ID NO: 3027494 - DNA, 25 bp, Homo sapien
gaggtaggattccaggtcactgctg

SEQ ID NO: 3027495 - DNA, 25 bp, Homo sapien
ggtcaagctgagacacaaaggactt

SEQ ID NO: 3027496 - DNA, 25 bp, Homo sapien
ctgtaaccggtgtgatcaatcagtt

SEQ ID NO: 3027497 - DNA, 25 bp, Homo sapien
cagagactgctctggatctaagtac

SEQ ID NO: 3027498 - DNA, 25 bp, Homo sapien
tacaaaatgaatgccgtagtcacaa

SEQ ID NO: 3027499 - DNA, 25 bp, Homo sapien
gactccatgtccaatgccaaaggta

SEQ ID NO: 3027500 - DNA, 25 bp, Homo sapien
tgaacaaagttaggccgggagtcta

SEQ ID NO: 3027501 - DNA, 25 bp, Homo sapien
cagtgttagctgctggaataaggtg

SEQ ID NO: 3027502 - DNA, 25 bp, Homo sapien
gtacattcagaatgtcgccacagat

SEQ ID NO: 3027503 - DNA, 25 bp, Homo sapien
taaggtgtttgtccagtacattcag

SEQ ID NO: 3027504 - DNA, 25 bp, Homo sapien
cattcagaatgtcgccacagattaa

SEQ ID NO: 3027505 - DNA, 25 bp, Homo sapien
cttggcacgatgagcacctgcagcc

SEQ ID NO: 3027506 - DNA, 25 bp, Homo sapien
tccctccttggcacgatgagcacct

SEQ ID NO: 3027507 - DNA, 25 bp, Homo sapien
ctccttggcacgatgagcacctgca

SEQ ID NO: 3027508 - DNA, 25 bp, Homo sapien
ctccctccttggcacgatgagcacc

SEQ ID NO: 3027509 - DNA, 25 bp, Homo sapien
gcatctcctctgtcctggccggagg

SEQ ID NO: 3027510 - DNA, 25 bp, Homo sapien
atcgggggcagcatcgggggcggct

SEQ ID NO: 3027511 - DNA, 25 bp, Homo sapien
ggggcggctccagccgcatctcctc

SEQ ID NO: 3027512 - DNA, 25 bp, Homo sapien
agggctcctgcagcatcgggggcag

SEQ ID NO: 3027513 - DNA, 25 bp, Homo sapien
tggccgggctgtttgcagctccttg

SEQ ID NO: 3027514 - DNA, 25 bp, Homo sapien
tcaggctccaggttaggccacggtt

SEQ ID NO: 3027515 - DNA, 25 bp, Homo sapien
catgctagagctccggagtcggtgc

SEQ ID NO: 3027516 - DNA, 25 bp, Homo sapien
ttccatgctagagctccggagtcgg

SEQ ID NO: 3027517 - DNA, 25 bp, Homo sapien
ctagagctccggagtcggtgcgtgg

SEQ ID NO: 3027518 - DNA, 25 bp, Homo sapien
tagagctccggagtcggtgcgtggg

SEQ ID NO: 3027519 - DNA, 25 bp, Homo sapien
ttgctggcagatttggggagcccac

SEQ ID NO: 3027520 - DNA, 25 bp, Homo sapien
ctttgctggcagatttggggagccc

SEQ ID NO: 3027521 - DNA, 25 bp, Homo sapien
tttgctggcagatttggggagccca

SEQ ID NO: 3027522 - DNA, 25 bp, Homo sapien
tgctggcagatttggggagcccaca

SEQ ID NO: 3027523 - DNA, 25 bp, Homo sapien
cctcctcagcaccatgagcacctgc

SEQ ID NO: 3027524 - DNA, 25 bp, Homo sapien
ctccctcctcagcaccatgagcacc

SEQ ID NO: 3027525 - DNA, 25 bp, Homo sapien
catgagcacctgcagccgccagttc

SEQ ID NO: 3027526 - DNA, 25 bp, Homo sapien
atgagcacctgcagccgccagttca

SEQ ID NO: 3027527 - DNA, 25 bp, Homo sapien
cggcatcgggggcggcatcgggggc

SEQ ID NO: 3027528 - DNA, 25 bp, Homo sapien
ctgcggcatcgggggcggcatcggg

SEQ ID NO: 3027529 - DNA, 25 bp, Homo sapien
gaagggctcctgcggcatcgggggc

SEQ ID NO: 3027530 - DNA, 25 bp, Homo sapien
ctcctgcggcatcgggggcggcatc

SEQ ID NO: 3027531 - DNA, 25 bp, Homo sapien
tggccggagggtcctgccgcgccac

SEQ ID NO: 3027532 - DNA, 25 bp, Homo sapien
gagggtcctgccgcgccaccagcac

SEQ ID NO: 3027533 - DNA, 25 bp, Homo sapien
ccggagggtcctgccgcgccaccag

SEQ ID NO: 3027534 - DNA, 25 bp, Homo sapien
ctccgtcctggccggagggtcctgc

SEQ ID NO: 3027535 - DNA, 25 bp, Homo sapien
cacatcaaatcggactcagtctggt

SEQ ID NO: 3027536 - DNA, 25 bp, Homo sapien
tgtccgagacttcctttggggcact

SEQ ID NO: 3027537 - DNA, 25 bp, Homo sapien
cttgcgctctgtagccgtggtggca

SEQ ID NO: 3027538 - DNA, 25 bp, Homo sapien
caaaccaaggtggagtacgaatgga

SEQ ID NO: 3027539 - DNA, 25 bp, Homo sapien
gattctgacgattacaccacctgtg

SEQ ID NO: 3027540 - DNA, 25 bp, Homo sapien
cgattacaccacctgtgagggagca

SEQ ID NO: 3027541 - DNA, 25 bp, Homo sapien
tgacgattacaccacctgtgaggga

SEQ ID NO: 3027542 - DNA, 25 bp, Homo sapien
ttggattctgacgattacaccacct

SEQ ID NO: 3027543 - DNA, 25 bp, Homo sapien
aagagctgcactgtcaaggccgaca

SEQ ID NO: 3027544 - DNA, 25 bp, Homo sapien
cggtctctgggcacaaccaggaaca

SEQ ID NO: 3027545 - DNA, 25 bp, Homo sapien
ttgatttgttccatgcaaagagctg

SEQ ID NO: 3027546 - DNA, 25 bp, Homo sapien
agctctgctttgacttccaggtagg

SEQ ID NO: 3027547 - DNA, 25 bp, Homo sapien
gtcctctcagaacgctgccagccag

SEQ ID NO: 3027548 - DNA, 25 bp, Homo sapien
cgcaccccgtcctctcagaacgctg

SEQ ID NO: 3027549 - DNA, 25 bp, Homo sapien
accccgtcctctcagaacgctgcca

SEQ ID NO: 3027550 - DNA, 25 bp, Homo sapien
cctctcagaacgctgccagccaggg

SEQ ID NO: 3027551 - DNA, 25 bp, Homo sapien
ccaaagatatcgtcatggaagtgct

SEQ ID NO: 3027552 - DNA, 25 bp, Homo sapien
gcttgatggggaacgaggtgagaaa

SEQ ID NO: 3027553 - DNA, 25 bp, Homo sapien
tatcgtcatggaagtgcttctggct

SEQ ID NO: 3027554 - DNA, 25 bp, Homo sapien
agcaccaaagatatcgtcatggaag

SEQ ID NO: 3027555 - DNA, 25 bp, Homo sapien
gaaagaaatagtcctcgacctgctc

SEQ ID NO: 3027556 - DNA, 25 bp, Homo sapien
aagaaatagtcctcgacctgctcct

SEQ ID NO: 3027557 - DNA, 25 bp, Homo sapien
gaaatagtcctcgacctgctcctca

SEQ ID NO: 3027558 - DNA, 25 bp, Homo sapien
ctgaaagaaatagtcctcgacctgc

SEQ ID NO: 3027559 - DNA, 25 bp, Homo sapien
caccagctgctagggtgtgggccac

SEQ ID NO: 3027560 - DNA, 25 bp, Homo sapien
gcagccaccagctgctagggtgtgg

SEQ ID NO: 3027561 - DNA, 25 bp, Homo sapien
ccaccagctgctagggtgtgggcca

SEQ ID NO: 3027562 - DNA, 25 bp, Homo sapien
ctaggcagccaccagctgctagggt

SEQ ID NO: 3027563 - DNA, 25 bp, Homo sapien
cacggagcacctcgctggccagctg

SEQ ID NO: 3027564 - DNA, 25 bp, Homo sapien
ggagcacacggagcacctcgctggc

SEQ ID NO: 3027565 - DNA, 25 bp, Homo sapien
cggagcacctcgctggccagctgct

SEQ ID NO: 3027566 - DNA, 25 bp, Homo sapien
tccttgtggagcacacggagcacct

SEQ ID NO: 3027567 - DNA, 25 bp, Homo sapien
tcgaacaccggggtcatgcggcctc

SEQ ID NO: 3027568 - DNA, 25 bp, Homo sapien
ctcatttgggctgcggcactcgaac

SEQ ID NO: 3027569 - DNA, 25 bp, Homo sapien
tggtcctcatttgggctgcggcact

SEQ ID NO: 3027570 - DNA, 25 bp, Homo sapien
tttgggctgcggcactcgaacaccg

SEQ ID NO: 3027571 - DNA, 25 bp, Homo sapien
ggacacgaggatgggaggggtcctc

SEQ ID NO: 3027572 - DNA, 25 bp, Homo sapien
caggcccgatgaggacacgaggatg

SEQ ID NO: 3027573 - DNA, 25 bp, Homo sapien
ccgatgaggacacgaggatgggagg

SEQ ID NO: 3027574 - DNA, 25 bp, Homo sapien
aggacacgaggatgggaggggtcct

SEQ ID NO: 3027575 - DNA, 25 bp, Homo sapien
aggacaggagaagagggggccagtc

SEQ ID NO: 3027576 - DNA, 25 bp, Homo sapien
tgaagaggacaggagaagagggggc

SEQ ID NO: 3027577 - DNA, 25 bp, Homo sapien
ctgaagaggacaggagaagaggggg

SEQ ID NO: 3027578 - DNA, 25 bp, Homo sapien
aagaggacaggagaagagggggcca

SEQ ID NO: 3027579 - DNA, 25 bp, Homo sapien
catgtgccgcagacgccgtggtgca

SEQ ID NO: 3027580 - DNA, 25 bp, Homo sapien
ttccgcacaaagcaggacacttggt

SEQ ID NO: 3027581 - DNA, 25 bp, Homo sapien
acaaagcaggacacttggtcttggg

SEQ ID NO: 3027582 - DNA, 25 bp, Homo sapien
cagttgttgagccatgtgccgcaga

SEQ ID NO: 3027583 - DNA, 25 bp, Homo sapien
tgtgcgtgctcatgagcgtggccct

SEQ ID NO: 3027584 - DNA, 25 bp, Homo sapien
ggtggctactgctgtgcgtgctcat

SEQ ID NO: 3027585 - DNA, 25 bp, Homo sapien
tactgctgtgcgtgctcatgagcgt

SEQ ID NO: 3027586 - DNA, 25 bp, Homo sapien
gctcatgagcgtggcccttgctggt

SEQ ID NO: 3027587 - DNA, 25 bp, Homo sapien
agggatgggaactcctccagcaact

SEQ ID NO: 3027588 - DNA, 25 bp, Homo sapien
gctgatggagtaaaacctgggcttc

SEQ ID NO: 3027589 - DNA, 25 bp, Homo sapien
tcgagtgtggtacatgagcacggcc

SEQ ID NO: 3027590 - DNA, 25 bp, Homo sapien
acttccacttgctgtactctgagga

SEQ ID NO: 3027591 - DNA, 25 bp, Homo sapien
tctgccgaagccatgcccaagcagt

SEQ ID NO: 3027592 - DNA, 25 bp, Homo sapien
tgcccaagcagttccctttgcctgg

SEQ ID NO: 3027593 - DNA, 25 bp, Homo sapien
gttctctgccgaagccatgcccaag

SEQ ID NO: 3027594 - DNA, 25 bp, Homo sapien
gaagccatgcccaagcagttccctt

SEQ ID NO: 3027595 - DNA, 25 bp, Homo sapien
actttttaatgggacatgtccaggt

SEQ ID NO: 3027596 - DNA, 25 bp, Homo sapien
cactttttaatgggacatgtccagg

SEQ ID NO: 3027597 - DNA, 25 bp, Homo sapien
ctttttaatgggacatgtccaggta

SEQ ID NO: 3027598 - DNA, 25 bp, Homo sapien
ttttaatgggacatgtccaggtagg

SEQ ID NO: 3027599 - DNA, 25 bp, Homo sapien
gaactcctaatgtctgggatgtgtt

SEQ ID NO: 3027600 - DNA, 25 bp, Homo sapien
acttatgaactcctaatgtctggga

SEQ ID NO: 3027601 - DNA, 25 bp, Homo sapien
agtggacatgcaaacaaagcaaaac

SEQ ID NO: 3027602 - DNA, 25 bp, Homo sapien
caacttgcagggtctaaatgaataa

SEQ ID NO: 3027603 - DNA, 25 bp, Homo sapien
aagatggtgcaaatattggcaactg

SEQ ID NO: 3027604 - DNA, 25 bp, Homo sapien
catgtgaagatggtgcaaatattgg

SEQ ID NO: 3027605 - DNA, 25 bp, Homo sapien
aaatattggcaactgctccccttcc

SEQ ID NO: 3027606 - DNA, 25 bp, Homo sapien
tgcaaatattggcaactgctcccct

SEQ ID NO: 3027607 - DNA, 25 bp, Homo sapien
ttaagagagcctccctttcagactg

SEQ ID NO: 3027608 - DNA, 25 bp, Homo sapien
aattcttatttggtcccaggtggct

SEQ ID NO: 3027609 - DNA, 25 bp, Homo sapien
ttcttatttggtcccaggtggctgg

SEQ ID NO: 3027610 - DNA, 25 bp, Homo sapien
attcttatttggtcccaggtggctg

SEQ ID NO: 3027611 - DNA, 25 bp, Homo sapien
gaaattgtgcgtagtctatcctctg

SEQ ID NO: 3027612 - DNA, 25 bp, Homo sapien
cgtaatcagactcaaagtcttcatc

SEQ ID NO: 3027613 - DNA, 25 bp, Homo sapien
tcatccatactgcttgtgtctgcca

SEQ ID NO: 3027614 - DNA, 25 bp, Homo sapien
ggcagagtcggtgtcaatttcatca

SEQ ID NO: 3027615 - DNA, 25 bp, Homo sapien
tttggcataagtgacgtaatggccc

SEQ ID NO: 3027616 - DNA, 25 bp, Homo sapien
gccattgtagcagtaccacttgcag

SEQ ID NO: 3027617 - DNA, 25 bp, Homo sapien
ccacttgcagtttgggtttttggca

SEQ ID NO: 3027618 - DNA, 25 bp, Homo sapien
agatgctgccattgtagcagtacca

SEQ ID NO: 3027619 - DNA, 25 bp, Homo sapien
tgaaattgcatatagattataaata

SEQ ID NO: 3027620 - DNA, 25 bp, Homo sapien
aattgcatatagattataaataggc

SEQ ID NO: 3027621 - DNA, 25 bp, Homo sapien
gaaattgcatatagattataaatag

SEQ ID NO: 3027622 - DNA, 25 bp, Homo sapien
ttgcatatagattataaataggctt

SEQ ID NO: 3027623 - DNA, 25 bp, Homo sapien
gaccattgctgtagccattgccata

SEQ ID NO: 3027624 - DNA, 25 bp, Homo sapien
actgtggtttccaagctgaccattg

SEQ ID NO: 3027625 - DNA, 25 bp, Homo sapien
ttccaagctgaccattgctgtagcc

SEQ ID NO: 3027626 - DNA, 25 bp, Homo sapien
agctgaccattgctgtagccattgc

SEQ ID NO: 3027627 - DNA, 25 bp, Homo sapien
ttcatgctcataaaggaatccattg

SEQ ID NO: 3027628 - DNA, 25 bp, Homo sapien
cttcatgctcataaaggaatccatt

SEQ ID NO: 3027629 - DNA, 25 bp, Homo sapien
tcagctcaaggcatcagccagctca

SEQ ID NO: 3027630 - DNA, 25 bp, Homo sapien
cagctcaaggcatcagccagctcac

SEQ ID NO: 3027631 - DNA, 25 bp, Homo sapien
ctcagctcaaggcatcagccagctc

SEQ ID NO: 3027632 - DNA, 25 bp, Homo sapien
tgcccagccccattctctttgctgg

SEQ ID NO: 3027633 - DNA, 25 bp, Homo sapien
cagccccattctctttgctggcatc

SEQ ID NO: 3027634 - DNA, 25 bp, Homo sapien
cccagccccattctctttgctggca

SEQ ID NO: 3027635 - DNA, 25 bp, Homo sapien
ttgctggcatccaagttcttcttac

SEQ ID NO: 3027636 - DNA, 25 bp, Homo sapien
aaagtccgtgggcagctattagggc

SEQ ID NO: 3027637 - DNA, 25 bp, Homo sapien
tccgtgggcagctattagggctgct

SEQ ID NO: 3027638 - DNA, 25 bp, Homo sapien
tccccaaagtccgtgggcagctatt

SEQ ID NO: 3027639 - DNA, 25 bp, Homo sapien
tgggcagctattagggctgctgttt

SEQ ID NO: 3027640 - DNA, 25 bp, Homo sapien
tgctaactctgaggttagcttcaca

SEQ ID NO: 3027641 - DNA, 25 bp, Homo sapien
caaatgctaactctgaggttagctt

SEQ ID NO: 3027642 - DNA, 25 bp, Homo sapien
aatgccacaaagtaagccagcccca

SEQ ID NO: 3027643 - DNA, 25 bp, Homo sapien
caaatgccacaaagtaagccagccc

SEQ ID NO: 3027644 - DNA, 25 bp, Homo sapien
tagcgctgagtgaggatgggctttt

SEQ ID NO: 3027645 - DNA, 25 bp, Homo sapien
tgttagcgctgagtgaggatgggct

SEQ ID NO: 3027646 - DNA, 25 bp, Homo sapien
tgatgttagcgctgagtgaggatgg

SEQ ID NO: 3027647 - DNA, 25 bp, Homo sapien
atgttagcgctgagtgaggatgggc

SEQ ID NO: 3027648 - DNA, 25 bp, Homo sapien
ggttgatgctggcagagagccgggt

SEQ ID NO: 3027649 - DNA, 25 bp, Homo sapien
gtggttgatgctggcagagagccgg

SEQ ID NO: 3027650 - DNA, 25 bp, Homo sapien
tgtgagtggttgatgctggcagaga

SEQ ID NO: 3027651 - DNA, 25 bp, Homo sapien
gagtggttgatgctggcagagagcc

SEQ ID NO: 3027652 - DNA, 25 bp, Homo sapien
ccaaaaaagcactcggatcaaaact

SEQ ID NO: 3027653 - DNA, 25 bp, Homo sapien
acaaattgaaatcgcttaaggtgaa

SEQ ID NO: 3027654 - DNA, 25 bp, Homo sapien
ctgatcatttacaaattgaaatcgc

SEQ ID NO: 3027655 - DNA, 25 bp, Homo sapien
tctgtgattttatccactgatcatt

SEQ ID NO: 3027656 - DNA, 25 bp, Homo sapien
aagggtggaagcctccagagatcca

SEQ ID NO: 3027657 - DNA, 25 bp, Homo sapien
ctccagagatccagcttctttgttg

SEQ ID NO: 3027658 - DNA, 25 bp, Homo sapien
gtggaagcctccagagatccagctt

SEQ ID NO: 3027659 - DNA, 25 bp, Homo sapien
aggaagggtggaagcctccagagat

SEQ ID NO: 3027660 - DNA, 25 bp, Homo sapien
gaaagcacggagacagctgtccagg

SEQ ID NO: 3027661 - DNA, 25 bp, Homo sapien
aaagcacggagacagctgtccaggt

SEQ ID NO: 3027662 - DNA, 25 bp, Homo sapien
agcacggagacagctgtccaggttg

SEQ ID NO: 3027663 - DNA, 25 bp, Homo sapien
acggagacagctgtccaggttgatg

SEQ ID NO: 3027664 - DNA, 25 bp, Homo sapien
cacaacccaaactagagtctgagca

SEQ ID NO: 3027665 - DNA, 25 bp, Homo sapien
aaacacaacccaaactagagtctga

SEQ ID NO: 3027666 - DNA, 25 bp, Homo sapien
caacccaaactagagtctgagcaaa

SEQ ID NO: 3027667 - DNA, 25 bp, Homo sapien
aacacaacccaaactagagtctgag

SEQ ID NO: 3027668 - DNA, 25 bp, Homo sapien
tacaactcatttacatctgatccca

SEQ ID NO: 3027669 - DNA, 25 bp, Homo sapien
cagggtacaactcatttacatctga

SEQ ID NO: 3027670 - DNA, 25 bp, Homo sapien
cacagggtacaactcatttacatct

SEQ ID NO: 3027671 - DNA, 25 bp, Homo sapien
gggtacaactcatttacatctgatc

SEQ ID NO: 3027672 - DNA, 25 bp, Homo sapien
taccaagtctatacttatctgtctc

SEQ ID NO: 3027673 - DNA, 25 bp, Homo sapien
acagagttatcagaataccaagtct

SEQ ID NO: 3027674 - DNA, 25 bp, Homo sapien
gagttatcagaataccaagtctata

SEQ ID NO: 3027675 - DNA, 25 bp, Homo sapien
ccaagtctatacttatctgtctcct

SEQ ID NO: 3027676 - DNA, 25 bp, Homo sapien
aacaagctcaagagtgtgctgcttt

SEQ ID NO: 3027677 - DNA, 25 bp, Homo sapien
gggcctttttatctgagatggcaac

SEQ ID NO: 3027678 - DNA, 25 bp, Homo sapien
tgttgagaaggcccctaatacccac

SEQ ID NO: 3027679 - DNA, 25 bp, Homo sapien
caagagtgtgctgcttttgttgaga

SEQ ID NO: 3027680 - DNA, 25 bp, Homo sapien
cctttggggtcctgttaatcagcat

SEQ ID NO: 3027681 - DNA, 25 bp, Homo sapien
acctttggggtcctgttaatcagca

SEQ ID NO: 3027682 - DNA, 25 bp, Homo sapien
taggctgcctggaatacaaattggc

SEQ ID NO: 3027683 - DNA, 25 bp, Homo sapien
cttagcatgggttttcaggcgagac

SEQ ID NO: 3027684 - DNA, 25 bp, Homo sapien
gaaactcacgatgggaaccttaggc

SEQ ID NO: 3027685 - DNA, 25 bp, Homo sapien
aattggcacagctcaagacacgcag

SEQ ID NO: 3027686 - DNA, 25 bp, Homo sapien
catcttttgaactggtcactcaagg

SEQ ID NO: 3027687 - DNA, 25 bp, Homo sapien
tctgtggaacacaggctacagtgct

SEQ ID NO: 3027688 - DNA, 25 bp, Homo sapien
tatgaattacttataggcaccctct

SEQ ID NO: 3027689 - DNA, 25 bp, Homo sapien
caaaaggaaacgtgctgtatcatcg

SEQ ID NO: 3027690 - DNA, 25 bp, Homo sapien
ggataagagtgagtgtccctgtatt

SEQ ID NO: 3027691 - DNA, 25 bp, Homo sapien
aaggataagagtgagtgtccctgta

SEQ ID NO: 3027692 - DNA, 25 bp, Homo sapien
gataagagtgagtgtccctgtattt

SEQ ID NO: 3027693 - DNA, 25 bp, Homo sapien
taagagtgagtgtccctgtattttt

SEQ ID NO: 3027694 - DNA, 25 bp, Homo sapien
gcctagggagatgagcaagcatttt

SEQ ID NO: 3027695 - DNA, 25 bp, Homo sapien
ttgccagacttcctgaccagtggga

SEQ ID NO: 3027696 - DNA, 25 bp, Homo sapien
ccatgtgactgttgccctgcaggaa

SEQ ID NO: 3027697 - DNA, 25 bp, Homo sapien
tctagtgtgttctgggcacgtgccc

SEQ ID NO: 3027698 - DNA, 25 bp, Homo sapien
agagctctctgctaggttctctggg

SEQ ID NO: 3027699 - DNA, 25 bp, Homo sapien
ttcatcggcatcgtcggaatcagcc

SEQ ID NO: 3027700 - DNA, 25 bp, Homo sapien
tcggcatcgtcggaatcagccagca

SEQ ID NO: 3027701 - DNA, 25 bp, Homo sapien
ctggcaattcatcggcatcgtcgga

SEQ ID NO: 3027702 - DNA, 25 bp, Homo sapien
atcgtcggaatcagccagcagcttg

SEQ ID NO: 3027703 - DNA, 25 bp, Homo sapien
tgagtccagagtcccgcccatatta

SEQ ID NO: 3027704 - DNA, 25 bp, Homo sapien
gtccagagtcccgcccatattacac

SEQ ID NO: 3027705 - DNA, 25 bp, Homo sapien
agtccagagtcccgcccatattaca

SEQ ID NO: 3027706 - DNA, 25 bp, Homo sapien
gagtccagagtcccgcccatattac

SEQ ID NO: 3027707 - DNA, 25 bp, Homo sapien
taggctattgacagtgtaccccggg

SEQ ID NO: 3027708 - DNA, 25 bp, Homo sapien
gaagcgaactgcctcatgaagtgag

SEQ ID NO: 3027709 - DNA, 25 bp, Homo sapien
gagatcaggattacacggtcagaaa

SEQ ID NO: 3027710 - DNA, 25 bp, Homo sapien
taattgcctctgatgaagtgctgac

SEQ ID NO: 3027711 - DNA, 25 bp, Homo sapien
aggcctttgaaggtcaggccagttg

SEQ ID NO: 3027712 - DNA, 25 bp, Homo sapien
aaggcctttgaaggtcaggccagtt

SEQ ID NO: 3027713 - DNA, 25 bp, Homo sapien
ggcctttgaaggtcaggccagttgt

SEQ ID NO: 3027714 - DNA, 25 bp, Homo sapien
gaaggcctttgaaggtcaggccagt

SEQ ID NO: 3027715 - DNA, 25 bp, Homo sapien
tgagctatgagttgagttgtaaagg

SEQ ID NO: 3027716 - DNA, 25 bp, Homo sapien
gtaaagggcaaatctgtttccaaga

SEQ ID NO: 3027717 - DNA, 25 bp, Homo sapien
aatggaggcgacagcaggtgtggct

SEQ ID NO: 3027718 - DNA, 25 bp, Homo sapien
tgctgccaggtcacttcacaggctt

SEQ ID NO: 3027719 - DNA, 25 bp, Homo sapien
gagtggagcacacacgttaaacttg

SEQ ID NO: 3027720 - DNA, 25 bp, Homo sapien
ggagcacacacgttaaacttggctt

SEQ ID NO: 3027721 - DNA, 25 bp, Homo sapien
cacacacgttaaacttggcttcctc

SEQ ID NO: 3027722 - DNA, 25 bp, Homo sapien
ttggaggagtggagcacacacgtta

SEQ ID NO: 3027723 - DNA, 25 bp, Homo sapien
caacagagtgaacagctcacagaaa

SEQ ID NO: 3027724 - DNA, 25 bp, Homo sapien
taccattgcggacataggacctgga

SEQ ID NO: 3027725 - DNA, 25 bp, Homo sapien
ggaaatgatcttcatgacaaagatg

SEQ ID NO: 3027726 - DNA, 25 bp, Homo sapien
caacctagccatctgacaaacgtct

SEQ ID NO: 3027727 - DNA, 25 bp, Homo sapien
aatcacccatcttaaattatttggc

SEQ ID NO: 3027728 - DNA, 25 bp, Homo sapien
gaaagtcaacatcatggattgtaaa

SEQ ID NO: 3027729 - DNA, 25 bp, Homo sapien
tgagatagtaacagtaaaccatttt

SEQ ID NO: 3027730 - DNA, 25 bp, Homo sapien
gaggcatcatacctgcaacttataa

SEQ ID NO: 3027731 - DNA, 25 bp, Homo sapien
aattattaacagcagaataggccaa

SEQ ID NO: 3027732 - DNA, 25 bp, Homo sapien
ctgttagagctgagtgaacttcaca

SEQ ID NO: 3027733 - DNA, 25 bp, Homo sapien
ttagagctgagtgaacttcacaatg

SEQ ID NO: 3027734 - DNA, 25 bp, Homo sapien
ttaacagcagaataggccaagaaaa

SEQ ID NO: 3027735 - DNA, 25 bp, Homo sapien
actccagtgagatactccacgagga

SEQ ID NO: 3027736 - DNA, 25 bp, Homo sapien
acgaggagatcatccctgagacaca

SEQ ID NO: 3027737 - DNA, 25 bp, Homo sapien
ccaggttagttctagcaagacaggc

SEQ ID NO: 3027738 - DNA, 25 bp, Homo sapien
acttccccaggttagttctagcaag

SEQ ID NO: 3027739 - DNA, 25 bp, Homo sapien
cttaaatctcaatgtgttttccaat

SEQ ID NO: 3027740 - DNA, 25 bp, Homo sapien
tctcaatgtgttttccaatgaaaga

SEQ ID NO: 3027741 - DNA, 25 bp, Homo sapien
tgtgttttccaatgaaagacacaga

SEQ ID NO: 3027742 - DNA, 25 bp, Homo sapien
caatgtgttttccaatgaaagacac

SEQ ID NO: 3027743 - DNA, 25 bp, Homo sapien
taacagaatctccaggactcagcta

SEQ ID NO: 3027744 - DNA, 25 bp, Homo sapien
tctccaggactcagctaaagcagtg

SEQ ID NO: 3027745 - DNA, 25 bp, Homo sapien
gaatctccaggactcagctaaagca

SEQ ID NO: 3027746 - DNA, 25 bp, Homo sapien
acaacataacagaatctccaggact

SEQ ID NO: 3027747 - DNA, 25 bp, Homo sapien
catgctgttttagtgactatggtgt

SEQ ID NO: 3027748 - DNA, 25 bp, Homo sapien
tttagtgactatggtgttacagaat

SEQ ID NO: 3027749 - DNA, 25 bp, Homo sapien
gaatgaggttataccgcgttgtggt

SEQ ID NO: 3027750 - DNA, 25 bp, Homo sapien
tcctttcctcactttgttgaagatc

SEQ ID NO: 3027751 - DNA, 25 bp, Homo sapien
tcacagacaggaaggatcaatatcg

SEQ ID NO: 3027752 - DNA, 25 bp, Homo sapien
tcaaagtcatggtggagtcaaggaa

SEQ ID NO: 3027753 - DNA, 25 bp, Homo sapien
gatgctgggctactattaataccta

SEQ ID NO: 3027754 - DNA, 25 bp, Homo sapien
agaagggagagcatcgtgaagaaca

SEQ ID NO: 3027755 - DNA, 25 bp, Homo sapien
gacattctgtattattggactttac

SEQ ID NO: 3027756 - DNA, 25 bp, Homo sapien
agatttaaggtcataaaggtcaaag

SEQ ID NO: 3027757 - DNA, 25 bp, Homo sapien
tgcagtgagaagatcatgggataac

SEQ ID NO: 3027758 - DNA, 25 bp, Homo sapien
tgcaggtcacctgatagaatgcagt

SEQ ID NO: 3027759 - DNA, 25 bp, Homo sapien
ctgcagttagatcattttgcaactt

SEQ ID NO: 3027760 - DNA, 25 bp, Homo sapien
tgctacttctgcagttagatcattt

SEQ ID NO: 3027761 - DNA, 25 bp, Homo sapien
acttctgcagttagatcattttgca

SEQ ID NO: 3027762 - DNA, 25 bp, Homo sapien
tacttctgcagttagatcattttgc

SEQ ID NO: 3027763 - DNA, 25 bp, Homo sapien
tcacatatgatgacgggtagaaaac

SEQ ID NO: 3027764 - DNA, 25 bp, Homo sapien
caagaattctatcagaaatctgaac

SEQ ID NO: 3027765 - DNA, 25 bp, Homo sapien
aattctatcagaaatctgaacgccg

SEQ ID NO: 3027766 - DNA, 25 bp, Homo sapien
tgaacgccgaaggaaaaaagatagc

SEQ ID NO: 3027767 - DNA, 25 bp, Homo sapien
cagaaatctgaacgccgaaggaaaa

SEQ ID NO: 3027768 - DNA, 25 bp, Homo sapien
tccatgtccttaagagcagacctct

SEQ ID NO: 3027769 - DNA, 25 bp, Homo sapien
ttcaacaagtagctctccatgtcct

SEQ ID NO: 3027770 - DNA, 25 bp, Homo sapien
ctggccttgtagcataagcagtgaa

SEQ ID NO: 3027771 - DNA, 25 bp, Homo sapien
gttgagaccttcactatcattaaga

SEQ ID NO: 3027772 - DNA, 25 bp, Homo sapien
agtcggcttgcgaagtttttattct

SEQ ID NO: 3027773 - DNA, 25 bp, Homo sapien
tcggcttgcgaagtttttattctgg

SEQ ID NO: 3027774 - DNA, 25 bp, Homo sapien
tgagttcatttgacaaggattctct

SEQ ID NO: 3027775 - DNA, 25 bp, Homo sapien
gttcatttgacaaggattctctaac

SEQ ID NO: 3027776 - DNA, 25 bp, Homo sapien
tgtagacatcgtgaaggtacagttt

SEQ ID NO: 3027777 - DNA, 25 bp, Homo sapien
tcatagagaataatgtctgttgaag

SEQ ID NO: 3027778 - DNA, 25 bp, Homo sapien
tagacatcgtgaaggtacagtttcc

SEQ ID NO: 3027779 - DNA, 25 bp, Homo sapien
gaataatgtctgttgaagttgaaga

SEQ ID NO: 3027780 - DNA, 25 bp, Homo sapien
tgcgcgtggaattcatggacgacac

SEQ ID NO: 3027781 - DNA, 25 bp, Homo sapien
tggacgacacgagccgatccatcat

SEQ ID NO: 3027782 - DNA, 25 bp, Homo sapien
tcatccgcaatgtaaaaggccccgt

SEQ ID NO: 3027783 - DNA, 25 bp, Homo sapien
gcgagggcgacgtgctcaccctttt

SEQ ID NO: 3027784 - DNA, 25 bp, Homo sapien
ggaagcttaggccacaaagagagcc

SEQ ID NO: 3027785 - DNA, 25 bp, Homo sapien
aagaggctctctaccgcagactgct

SEQ ID NO: 3027786 - DNA, 25 bp, Homo sapien
tccaacattaagttagaagaggctc

SEQ ID NO: 3027787 - DNA, 25 bp, Homo sapien
gagttccaatgtagatatctgggca

SEQ ID NO: 3027788 - DNA, 25 bp, Homo sapien
atagattaactgttgacatgttatg

SEQ ID NO: 3027789 - DNA, 25 bp, Homo sapien
gttgacatgttatgtttcatacaaa

SEQ ID NO: 3027790 - DNA, 25 bp, Homo sapien
ctatagattaactgttgacatgtta

SEQ ID NO: 3027791 - DNA, 25 bp, Homo sapien
actgttgacatgttatgtttcatac

SEQ ID NO: 3027792 - DNA, 25 bp, Homo sapien
tgacgtaggttgttgttttaggaga

SEQ ID NO: 3027793 - DNA, 25 bp, Homo sapien
tgaggtagcctctgacgtaggttgt

SEQ ID NO: 3027794 - DNA, 25 bp, Homo sapien
gttttaggagatcggtccattcttg

SEQ ID NO: 3027795 - DNA, 25 bp, Homo sapien
tgtgacaacgtgaggtagcctctga

SEQ ID NO: 3027796 - DNA, 25 bp, Homo sapien
ttagccataaccaaatattacttta

SEQ ID NO: 3027797 - DNA, 25 bp, Homo sapien
tagccataaccaaatattactttac

SEQ ID NO: 3027798 - DNA, 25 bp, Homo sapien
tgattatattcatccatcagctcct

SEQ ID NO: 3027799 - DNA, 25 bp, Homo sapien
tgaaagaatctgcttttcactctca

SEQ ID NO: 3027800 - DNA, 25 bp, Homo sapien
ttaaatgattatattcatccatcag

SEQ ID NO: 3027801 - DNA, 25 bp, Homo sapien
aatgattatattcatccatcagctc

SEQ ID NO: 3027802 - DNA, 25 bp, Homo sapien
cagattgttcagctgtccactgtac

SEQ ID NO: 3027803 - DNA, 25 bp, Homo sapien
ggaaatcaagttttaggtctcttgc

SEQ ID NO: 3027804 - DNA, 25 bp, Homo sapien
cattttgtcatgtaaacgaacccac

SEQ ID NO: 3027805 - DNA, 25 bp, Homo sapien
tagcttgtaggccagacatatcaac

SEQ ID NO: 3027806 - DNA, 25 bp, Homo sapien
gcttttctttctgatgcctatgaga

SEQ ID NO: 3027807 - DNA, 25 bp, Homo sapien
cttttctttctgatgcctatgagaa

SEQ ID NO: 3027808 - DNA, 25 bp, Homo sapien
caattttcatgaaagagatgctttt

SEQ ID NO: 3027809 - DNA, 25 bp, Homo sapien
catgcaattttcatgaaagagatgc

SEQ ID NO: 3027810 - DNA, 25 bp, Homo sapien
gaaagttgcttctgggcatcgtttc

SEQ ID NO: 3027811 - DNA, 25 bp, Homo sapien
ttgcttctgggcatcgtttctctcc

SEQ ID NO: 3027812 - DNA, 25 bp, Homo sapien
gttgcttctgggcatcgtttctctc

SEQ ID NO: 3027813 - DNA, 25 bp, Homo sapien
aagttgcttctgggcatcgtttctc

SEQ ID NO: 3027814 - DNA, 25 bp, Homo sapien
ctgttcactatctttattatacaac

SEQ ID NO: 3027815 - DNA, 25 bp, Homo sapien
ttgttgctttgtttcaaccactttc

SEQ ID NO: 3027816 - DNA, 25 bp, Homo sapien
ccttaacaagtcttctcagattcca

SEQ ID NO: 3027817 - DNA, 25 bp, Homo sapien
tgtcctcaattccttaacaagtctt

SEQ ID NO: 3027818 - DNA, 25 bp, Homo sapien
tctcccattttcttgttttaaggca

SEQ ID NO: 3027819 - DNA, 25 bp, Homo sapien
atcggcatttcttttctcccatttt

SEQ ID NO: 3027820 - DNA, 25 bp, Homo sapien
cggcatttcttttctcccattttct

SEQ ID NO: 3027821 - DNA, 25 bp, Homo sapien
catttcttttctcccattttcttgt

SEQ ID NO: 3027822 - DNA, 25 bp, Homo sapien
taagttttactgtaagttggtcaca

SEQ ID NO: 3027823 - DNA, 25 bp, Homo sapien
ctcaaatcgtacagctctttctccc

SEQ ID NO: 3027824 - DNA, 25 bp, Homo sapien
tcattttgtagtacactgaccatat

SEQ ID NO: 3027825 - DNA, 25 bp, Homo sapien
tcttaagtttcagtaagtgttcaca

SEQ ID NO: 3027826 - DNA, 25 bp, Homo sapien
tctggccacaatggacagcaagtac

SEQ ID NO: 3027827 - DNA, 25 bp, Homo sapien
ccacaatggacagcaagtactgatt

SEQ ID NO: 3027828 - DNA, 25 bp, Homo sapien
tggccacaatggacagcaagtactg

SEQ ID NO: 3027829 - DNA, 25 bp, Homo sapien
caatggacagcaagtactgatttac

SEQ ID NO: 3027830 - DNA, 25 bp, Homo sapien
gaacacagattagacatcaccaaag

SEQ ID NO: 3027831 - DNA, 25 bp, Homo sapien
caaatccagaagtatctggctggga

SEQ ID NO: 3027832 - DNA, 25 bp, Homo sapien
gctaaaatggatggaagtgaacaca

SEQ ID NO: 3027833 - DNA, 25 bp, Homo sapien
gagacatcagtgaactatgagaaaa

SEQ ID NO: 3027834 - DNA, 25 bp, Homo sapien
cagagtttcaccgtattggtcagga

SEQ ID NO: 3027835 - DNA, 25 bp, Homo sapien
ctcctgcttcagcctgccaccacgc

SEQ ID NO: 3027836 - DNA, 25 bp, Homo sapien
ccactgcacccggcctgcaatcaat

SEQ ID NO: 3027837 - DNA, 25 bp, Homo sapien
agccactgcacccggcctgcaatca

SEQ ID NO: 3027838 - DNA, 25 bp, Homo sapien
aggctatttcagatggctccattga

SEQ ID NO: 3027839 - DNA, 25 bp, Homo sapien
gctccattgagtcagcaaagtcagc

SEQ ID NO: 3027840 - DNA, 25 bp, Homo sapien
attctcataaacagagtgagacaat

SEQ ID NO: 3027841 - DNA, 25 bp, Homo sapien
gctatttcagatggctccattgagt

SEQ ID NO: 3027842 - DNA, 25 bp, Homo sapien
tgttcttttcattagctgttttatc

SEQ ID NO: 3027843 - DNA, 25 bp, Homo sapien
ttcattagctgttttatctgcaggc

SEQ ID NO: 3027844 - DNA, 25 bp, Homo sapien
cttgttcttttcattagctgtttta

SEQ ID NO: 3027845 - DNA, 25 bp, Homo sapien
tcttttcattagctgttttatctgc

SEQ ID NO: 3027846 - DNA, 25 bp, Homo sapien
aaatgcagtaattttctacaacgga

SEQ ID NO: 3027847 - DNA, 25 bp, Homo sapien
acgcttgaccaattgtctcctgtta

SEQ ID NO: 3027848 - DNA, 25 bp, Homo sapien
tctcctgttaaacgctgctataggc

SEQ ID NO: 3027849 - DNA, 25 bp, Homo sapien
tgtctcctgttaaacgctgctatag

SEQ ID NO: 3027850 - DNA, 25 bp, Homo sapien
agccaccacgcttgaccaattgtct

SEQ ID NO: 3027851 - DNA, 25 bp, Homo sapien
taccatcagttagggttcctgataa

SEQ ID NO: 3027852 - DNA, 25 bp, Homo sapien
tctgctgatttagtccatcatcatc

SEQ ID NO: 3027853 - DNA, 25 bp, Homo sapien
catcatcattgccaacagtagtacc

SEQ ID NO: 3027854 - DNA, 25 bp, Homo sapien
gtgctattacttctgtgcttctcca

SEQ ID NO: 3027855 - DNA, 25 bp, Homo sapien
cttgagtgagagtttgatgttcagg

SEQ ID NO: 3027856 - DNA, 25 bp, Homo sapien
tcatattaaacagccagattgagag

SEQ ID NO: 3027857 - DNA, 25 bp, Homo sapien
tttgactggcacaaacatggaaata

SEQ ID NO: 3027858 - DNA, 25 bp, Homo sapien
acttgactttcatattaaacagcca

SEQ ID NO: 3027859 - DNA, 25 bp, Homo sapien
gacacaaagcgtgtcttcttctgtc

SEQ ID NO: 3027860 - DNA, 25 bp, Homo sapien
tagctggaggatatacagtataaga

SEQ ID NO: 3027861 - DNA, 25 bp, Homo sapien
tagctcactctctattgataactgg

SEQ ID NO: 3027862 - DNA, 25 bp, Homo sapien
ctattgataactgggctaaagccaa

SEQ ID NO: 3027863 - DNA, 25 bp, Homo sapien
agtataagaatctactttagctcac

SEQ ID NO: 3027864 - DNA, 25 bp, Homo sapien
cactacggcccagaatgcctggcct

SEQ ID NO: 3027865 - DNA, 25 bp, Homo sapien
cttagcaaatctggtggtgccccgc

SEQ ID NO: 3027866 - DNA, 25 bp, Homo sapien
cagcacaggagttacttatgacctg

SEQ ID NO: 3027867 - DNA, 25 bp, Homo sapien
gagttacttatgacctgctccattt

SEQ ID NO: 3027868 - DNA, 25 bp, Homo sapien
gatatatggctacatgagtttcaca

SEQ ID NO: 3027869 - DNA, 25 bp, Homo sapien
gaagactgacagagagacttaggtc

SEQ ID NO: 3027870 - DNA, 25 bp, Homo sapien
ggaaaaagccctcaagctcatcaca

SEQ ID NO: 3027871 - DNA, 25 bp, Homo sapien
gtttcacaatccatacgccacttgg

SEQ ID NO: 3027872 - DNA, 25 bp, Homo sapien
gctgtaattcttcatgtagatatac

SEQ ID NO: 3027873 - DNA, 25 bp, Homo sapien
gaactcttcttctaatgtgttgacc

SEQ ID NO: 3027874 - DNA, 25 bp, Homo sapien
gtagatatacttctgatgttctgtc

SEQ ID NO: 3027875 - DNA, 25 bp, Homo sapien
gttgacctcattcttaaacttttgc

SEQ ID NO: 3027876 - DNA, 25 bp, Homo sapien
gagttatcaagtagtggctcttcct

SEQ ID NO: 3027877 - DNA, 25 bp, Homo sapien
ctggtggtaaagaactcagattttc

SEQ ID NO: 3027878 - DNA, 25 bp, Homo sapien
ggaaatgtctcgaataccactgaga

SEQ ID NO: 3027879 - DNA, 25 bp, Homo sapien
tcctcaggacaagccggaattttgt

SEQ ID NO: 3027880 - DNA, 25 bp, Homo sapien
gatatataggtatatcctctctatc

SEQ ID NO: 3027881 - DNA, 25 bp, Homo sapien
tgcacatgaggaagtactggatata

SEQ ID NO: 3027882 - DNA, 25 bp, Homo sapien
catgaggaagtactggatatatagg

SEQ ID NO: 3027883 - DNA, 25 bp, Homo sapien
ttcctcagatttttgcacatgagga

SEQ ID NO: 3027884 - DNA, 25 bp, Homo sapien
ctctgttgggctacatgttttaaaa

SEQ ID NO: 3027885 - DNA, 25 bp, Homo sapien
tctctgttgggctacatgttttaaa

SEQ ID NO: 3027886 - DNA, 25 bp, Homo sapien
cttctctgttgggctacatgtttta

SEQ ID NO: 3027887 - DNA, 25 bp, Homo sapien
tctgttgggctacatgttttaaaaa

SEQ ID NO: 3027888 - DNA, 25 bp, Homo sapien
gcttattttcgcatcctttaagtct

SEQ ID NO: 3027889 - DNA, 25 bp, Homo sapien
cttattttcgcatcctttaagtctt

SEQ ID NO: 3027890 - DNA, 25 bp, Homo sapien
tgcaaaatccaaacgttcagttaaa

SEQ ID NO: 3027891 - DNA, 25 bp, Homo sapien
actacttagaacagttagataaaag

SEQ ID NO: 3027892 - DNA, 25 bp, Homo sapien
cgttcagttaaactacttagaacag

SEQ ID NO: 3027893 - DNA, 25 bp, Homo sapien
ctgcaaaatccaaacgttcagttaa

SEQ ID NO: 3027894 - DNA, 25 bp, Homo sapien
ctaagggtcaaattagtaggatgcc

SEQ ID NO: 3027895 - DNA, 25 bp, Homo sapien
tatcattccctgagagaagtacaac

SEQ ID NO: 3027896 - DNA, 25 bp, Homo sapien
tcccagttctttggttgctgactga

SEQ ID NO: 3027897 - DNA, 25 bp, Homo sapien
tctggtagctgtgattggcacaggt

SEQ ID NO: 3027898 - DNA, 25 bp, Homo sapien
gaacgatatatacgtgcatctggtg

SEQ ID NO: 3027899 - DNA, 25 bp, Homo sapien
atacgtgcatctggtggtggcttcc

SEQ ID NO: 3027900 - DNA, 25 bp, Homo sapien
ccatgtcagaggaacgatatatacg

SEQ ID NO: 3027901 - DNA, 25 bp, Homo sapien
ttatgattccatgtcagaggaacga

SEQ ID NO: 3027902 - DNA, 25 bp, Homo sapien
cactgtgctggccccaacagtattt

SEQ ID NO: 3027903 - DNA, 25 bp, Homo sapien
caccactgtgctggccccaacagta

SEQ ID NO: 3027904 - DNA, 25 bp, Homo sapien
ctgtgctggccccaacagtattttt

SEQ ID NO: 3027905 - DNA, 25 bp, Homo sapien
ccactgtgctggccccaacagtatt

SEQ ID NO: 3027906 - DNA, 25 bp, Homo sapien
cttatattcaggaactagttgctga

SEQ ID NO: 3027907 - DNA, 25 bp, Homo sapien
ccttatattcaggaactagttgctg

SEQ ID NO: 3027908 - DNA, 25 bp, Homo sapien
tccttatattcaggaactagttgct

SEQ ID NO: 3027909 - DNA, 25 bp, Homo sapien
ctatccctcttgtccacgccagtgt

SEQ ID NO: 3027910 - DNA, 25 bp, Homo sapien
gtctaaggcgccctcaccgtgcttg

SEQ ID NO: 3027911 - DNA, 25 bp, Homo sapien
accgtgcttgctctcgctgccgacg

SEQ ID NO: 3027912 - DNA, 25 bp, Homo sapien
tgtggagctcgccaagatcttccag

SEQ ID NO: 3027913 - DNA, 25 bp, Homo sapien
cctggctcctgacgctacgggtctt

SEQ ID NO: 3027914 - DNA, 25 bp, Homo sapien
ggagaagcccgaagaccactggtcc

SEQ ID NO: 3027915 - DNA, 25 bp, Homo sapien
ggtagcccaagtaccactggtcctc

SEQ ID NO: 3027916 - DNA, 25 bp, Homo sapien
tcctcgtggcgtagactgccagctt

SEQ ID NO: 3027917 - DNA, 25 bp, Homo sapien
tcccagcaggatagcccgcggtttc

SEQ ID NO: 3027918 - DNA, 25 bp, Homo sapien
cagtagcgagctactgcctcggcca

SEQ ID NO: 3027919 - DNA, 25 bp, Homo sapien
tcggccacaacctcccagcaggata

SEQ ID NO: 3027920 - DNA, 25 bp, Homo sapien
tagcgagctactgcctcggccacaa

SEQ ID NO: 3027921 - DNA, 25 bp, Homo sapien
ccaagcgatcactgccacgccaagc

SEQ ID NO: 3027922 - DNA, 25 bp, Homo sapien
gcgatcactgccacgccaagccaag

SEQ ID NO: 3027923 - DNA, 25 bp, Homo sapien
actgccacgccaagccaagcgacca

SEQ ID NO: 3027924 - DNA, 25 bp, Homo sapien
tcactgccacgccaagccaagcgac

SEQ ID NO: 3027925 - DNA, 25 bp, Homo sapien
tcacacatcagggataccaataagg

SEQ ID NO: 3027926 - DNA, 25 bp, Homo sapien
tacctccaatttgtgggcaaaggtg

SEQ ID NO: 3027927 - DNA, 25 bp, Homo sapien
cagggataccaataagggtcacagt

SEQ ID NO: 3027928 - DNA, 25 bp, Homo sapien
cctccaatttgtgggcaaaggtgcc

SEQ ID NO: 3027929 - DNA, 25 bp, Homo sapien
atggcaggcggtgtcttccaaaccc

SEQ ID NO: 3027930 - DNA, 25 bp, Homo sapien
cagagtaagaaaggacaccgagcag

SEQ ID NO: 3027931 - DNA, 25 bp, Homo sapien
gaaagcagcccgagggattcggcca

SEQ ID NO: 3027932 - DNA, 25 bp, Homo sapien
gagcccacgaggttcacagtaagaa

SEQ ID NO: 3027933 - DNA, 25 bp, Homo sapien
cgtgcccaacgccagcaaagggcag

SEQ ID NO: 3027934 - DNA, 25 bp, Homo sapien
ggaaatgcatccttcccggggatct

SEQ ID NO: 3027935 - DNA, 25 bp, Homo sapien
ttctgcgaggccatgatccgtgccc

SEQ ID NO: 3027936 - DNA, 25 bp, Homo sapien
tgctccacgctgtcgcgggcttctg

SEQ ID NO: 3027937 - DNA, 25 bp, Homo sapien
gggcaccgcgtgctttccatgcaaa

SEQ ID NO: 3027938 - DNA, 25 bp, Homo sapien
ggcccaggatggttgctcccttgaa

SEQ ID NO: 3027939 - DNA, 25 bp, Homo sapien
gaattattgaaggaaagccgcgcca

SEQ ID NO: 3027940 - DNA, 25 bp, Homo sapien
caagacatcgatagtgggtgaaggc

SEQ ID NO: 3027941 - DNA, 25 bp, Homo sapien
aatatcgctgcccgggaatactcac

SEQ ID NO: 3027942 - DNA, 25 bp, Homo sapien
caggaatatcgctgcccgggaatac

SEQ ID NO: 3027943 - DNA, 25 bp, Homo sapien
ggaatatcgctgcccgggaatactc

SEQ ID NO: 3027944 - DNA, 25 bp, Homo sapien
aggaatatcgctgcccgggaatact

SEQ ID NO: 3027945 - DNA, 25 bp, Homo sapien
ggttatatgcagaataggccacgag

SEQ ID NO: 3027946 - DNA, 25 bp, Homo sapien
agggttatatgcagaataggccacg

SEQ ID NO: 3027947 - DNA, 25 bp, Homo sapien
gttatatgcagaataggccacgagg

SEQ ID NO: 3027948 - DNA, 25 bp, Homo sapien
gggttatatgcagaataggccacga

SEQ ID NO: 3027949 - DNA, 25 bp, Homo sapien
ggctgacatctagctggatgcagtg

SEQ ID NO: 3027950 - DNA, 25 bp, Homo sapien
cagtggatgattctggaggacctct

SEQ ID NO: 3027951 - DNA, 25 bp, Homo sapien
ccgaatctttgtatgaacatcatgt

SEQ ID NO: 3027952 - DNA, 25 bp, Homo sapien
ttgactccgaatctttgtatgaaca

SEQ ID NO: 3027953 - DNA, 25 bp, Homo sapien
cccgcaccgccaggggaatgacttt

SEQ ID NO: 3027954 - DNA, 25 bp, Homo sapien
caggggaatgactttgcatactctt

SEQ ID NO: 3027955 - DNA, 25 bp, Homo sapien
atctagcaaaagtgacaacgcccgg

SEQ ID NO: 3027956 - DNA, 25 bp, Homo sapien
cttatatttgcctgggttctgggac

SEQ ID NO: 3027957 - DNA, 25 bp, Homo sapien
ttcttggtgctcctatattttgtcc

SEQ ID NO: 3027958 - DNA, 25 bp, Homo sapien
cagtctgcaagcatcttttgccact

SEQ ID NO: 3027959 - DNA, 25 bp, Homo sapien
gcatcttttgccacttgttggtacg

SEQ ID NO: 3027960 - DNA, 25 bp, Homo sapien
tgctcctatattttgtccagtctgc

SEQ ID NO: 3027961 - DNA, 25 bp, Homo sapien
agcagcctcccacgcagcaggcaca

SEQ ID NO: 3027962 - DNA, 25 bp, Homo sapien
ctgaagcagcctcccacgcagcagg

SEQ ID NO: 3027963 - DNA, 25 bp, Homo sapien
aagcagcctcccacgcagcaggcac

SEQ ID NO: 3027964 - DNA, 25 bp, Homo sapien
agcctcccacgcagcaggcacaggc

SEQ ID NO: 3027965 - DNA, 25 bp, Homo sapien
ttcacctccagggcactgacgcggg

SEQ ID NO: 3027966 - DNA, 25 bp, Homo sapien
actgacgcggggcagctccatctca

SEQ ID NO: 3027967 - DNA, 25 bp, Homo sapien
gcactgacgcggggcagctccatct

SEQ ID NO: 3027968 - DNA, 25 bp, Homo sapien
agggcactgacgcggggcagctcca

SEQ ID NO: 3027969 - DNA, 25 bp, Homo sapien
ggccaagccctgactaacagcagta

SEQ ID NO: 3027970 - DNA, 25 bp, Homo sapien
aggtgacaccctctgtggacgctaa

SEQ ID NO: 3027971 - DNA, 25 bp, Homo sapien
tctcagcctgggacaaggcacagag

SEQ ID NO: 3027972 - DNA, 25 bp, Homo sapien
ggatctgacactagcaaggcactgg

SEQ ID NO: 3027973 - DNA, 25 bp, Homo sapien
tttctgacatcaacctgctcatgcc

SEQ ID NO: 3027974 - DNA, 25 bp, Homo sapien
attggtgtattttctgacatcaacc

SEQ ID NO: 3027975 - DNA, 25 bp, Homo sapien
tgcacaatcccgaggttattggtgt

SEQ ID NO: 3027976 - DNA, 25 bp, Homo sapien
tgctcatgccccaagtccactgctg

SEQ ID NO: 3027977 - DNA, 25 bp, Homo sapien
tgatattgccttgcccctgggcagg

SEQ ID NO: 3027978 - DNA, 25 bp, Homo sapien
catacttagtaatgatgatattgcc

SEQ ID NO: 3027979 - DNA, 25 bp, Homo sapien
ctgctcatacttagtaatgatgata

SEQ ID NO: 3027980 - DNA, 25 bp, Homo sapien
ggcaggcaggttatccgggtcctca

SEQ ID NO: 3027981 - DNA, 25 bp, Homo sapien
ctgccctggcaggacaaacggcgtc

SEQ ID NO: 3027982 - DNA, 25 bp, Homo sapien
gggtgaagtccccacgatgggctgt

SEQ ID NO: 3027983 - DNA, 25 bp, Homo sapien
gcgtccacttgctgagggtgaagtc

SEQ ID NO: 3027984 - DNA, 25 bp, Homo sapien
aagtccccacgatgggctgttctgg

SEQ ID NO: 3027985 - DNA, 25 bp, Homo sapien
ggaggcaggtggagtcagggactgg

SEQ ID NO: 3027986 - DNA, 25 bp, Homo sapien
ggcaggtggagtcagggactggatg

SEQ ID NO: 3027987 - DNA, 25 bp, Homo sapien
caggtggagtcagggactggatgtc

SEQ ID NO: 3027988 - DNA, 25 bp, Homo sapien
ctggaggcaggtggagtcagggact

SEQ ID NO: 3027989 - DNA, 25 bp, Homo sapien
cgccagccaagcagtttggtttggg

SEQ ID NO: 3027990 - DNA, 25 bp, Homo sapien
cttcaggaacaacgccagccaagca

SEQ ID NO: 3027991 - DNA, 25 bp, Homo sapien
gcaggtcgaggacggtggacaccac

SEQ ID NO: 3027992 - DNA, 25 bp, Homo sapien
ctctgtgctcatggagaccccgtcg

SEQ ID NO: 3027993 - DNA, 25 bp, Homo sapien
gcctctttgaccaggagagacgatt

SEQ ID NO: 3027994 - DNA, 25 bp, Homo sapien
gccttagtcctagagaacacctggg

SEQ ID NO: 3027995 - DNA, 25 bp, Homo sapien
gacttggaccaagaatttcaccctc

SEQ ID NO: 3027996 - DNA, 25 bp, Homo sapien
gggcaaacggaaggcaaggcctcta

SEQ ID NO: 3027997 - DNA, 25 bp, Homo sapien
tgtgtctctcgcttagaaaagtcgt

SEQ ID NO: 3027998 - DNA, 25 bp, Homo sapien
ctgctgtgtctctcgcttagaaaag

SEQ ID NO: 3027999 - DNA, 25 bp, Homo sapien
tgctgtgtctctcgcttagaaaagt

SEQ ID NO: 3028000 - DNA, 25 bp, Homo sapien
ctgtgtctctcgcttagaaaagtcg

SEQ ID NO: 3028001 - DNA, 25 bp, Homo sapien
tggtgatttagcagaacacaggaga

SEQ ID NO: 3028002 - DNA, 25 bp, Homo sapien
gagttatgttactaatgtatgcaac

SEQ ID NO: 3028003 - DNA, 25 bp, Homo sapien
aggtatggtgatttagcagaacaca

SEQ ID NO: 3028004 - DNA, 25 bp, Homo sapien
gaaaatgtgtcacatctataccaaa

SEQ ID NO: 3028005 - DNA, 25 bp, Homo sapien
tattatgtacagttaattctactgt

SEQ ID NO: 3028006 - DNA, 25 bp, Homo sapien
attctactgttttggctgcaataaa

SEQ ID NO: 3028007 - DNA, 25 bp, Homo sapien
gtttattatgtacagttaattctac

SEQ ID NO: 3028008 - DNA, 25 bp, Homo sapien
atagtttattatgtacagttaattc

SEQ ID NO: 3028009 - DNA, 25 bp, Homo sapien
cccagttatctctcagtaagttcaa

SEQ ID NO: 3028010 - DNA, 25 bp, Homo sapien
tatctctcagtaagttcaacttttc

SEQ ID NO: 3028011 - DNA, 25 bp, Homo sapien
tctctcagtaagttcaacttttcca

SEQ ID NO: 3028012 - DNA, 25 bp, Homo sapien
ccagttatctctcagtaagttcaac

SEQ ID NO: 3028013 - DNA, 25 bp, Homo sapien
gaccctaaatatgttgacaccttga

SEQ ID NO: 3028014 - DNA, 25 bp, Homo sapien
gaaaggtgctttctattaaccaaga

SEQ ID NO: 3028015 - DNA, 25 bp, Homo sapien
taaccaagaagcagaccttccctag

SEQ ID NO: 3028016 - DNA, 25 bp, Homo sapien
tttgtgatattaaagcccagaggca

SEQ ID NO: 3028017 - DNA, 25 bp, Homo sapien
gaatgatttagcactgtccccctac

SEQ ID NO: 3028018 - DNA, 25 bp, Homo sapien
ccctactgctgtctcgtgatagagt

SEQ ID NO: 3028019 - DNA, 25 bp, Homo sapien
tgcaaggtgactggaccacgcaggt

SEQ ID NO: 3028020 - DNA, 25 bp, Homo sapien
ccacgcaggtagtttctcatgaatg

SEQ ID NO: 3028021 - DNA, 25 bp, Homo sapien
tctgatgagagatgaactgcactta

SEQ ID NO: 3028022 - DNA, 25 bp, Homo sapien
tcaactgatgctgcacaagatgtgt

SEQ ID NO: 3028023 - DNA, 25 bp, Homo sapien
gaactctctgatgcttagttaggga

SEQ ID NO: 3028024 - DNA, 25 bp, Homo sapien
tgttgaacaagatgtgtgctctgac

SEQ ID NO: 3028025 - DNA, 25 bp, Homo sapien
aggtgaagagttcaccacaatcatt

SEQ ID NO: 3028026 - DNA, 25 bp, Homo sapien
gtgaagagttcaccacaatcattac

SEQ ID NO: 3028027 - DNA, 25 bp, Homo sapien
ggtgaagagttcaccacaatcatta

SEQ ID NO: 3028028 - DNA, 25 bp, Homo sapien
tgaagagttcaccacaatcattaca

SEQ ID NO: 3028029 - DNA, 25 bp, Homo sapien
tttctctttataagttctctgcttt

SEQ ID NO: 3028030 - DNA, 25 bp, Homo sapien
tctctttataagttctctgcttttt

SEQ ID NO: 3028031 - DNA, 25 bp, Homo sapien
tttttctctttataagttctctgct

SEQ ID NO: 3028032 - DNA, 25 bp, Homo sapien
tctttataagttctctgctttttca

SEQ ID NO: 3028033 - DNA, 25 bp, Homo sapien
tatggaaggcataagatcctttggg

SEQ ID NO: 3028034 - DNA, 25 bp, Homo sapien
gcataagatcctttgggaactctgt

SEQ ID NO: 3028035 - DNA, 25 bp, Homo sapien
caagtgtatggaaggcataagatcc

SEQ ID NO: 3028036 - DNA, 25 bp, Homo sapien
tctgtttcctcagagagtgaattca

SEQ ID NO: 3028037 - DNA, 25 bp, Homo sapien
tcttgcactgaagttgaatccttgc

SEQ ID NO: 3028038 - DNA, 25 bp, Homo sapien
aagggctgcttccaagttagagtca

SEQ ID NO: 3028039 - DNA, 25 bp, Homo sapien
ttagagtcatagacactattccgtg

SEQ ID NO: 3028040 - DNA, 25 bp, Homo sapien
gaatccttgctctgtggtctagtct

SEQ ID NO: 3028041 - DNA, 25 bp, Homo sapien
ttcgttttctgtgctcaacaaaaag

SEQ ID NO: 3028042 - DNA, 25 bp, Homo sapien
ccttcgttttctgtgctcaacaaaa

SEQ ID NO: 3028043 - DNA, 25 bp, Homo sapien
cgttttctgtgctcaacaaaaaggc

SEQ ID NO: 3028044 - DNA, 25 bp, Homo sapien
ttttctgtgctcaacaaaaaggcag

SEQ ID NO: 3028045 - DNA, 25 bp, Homo sapien
gagcaagtggatttgactctttcag

SEQ ID NO: 3028046 - DNA, 25 bp, Homo sapien
taggtaagagttaatgaaagtgaaa

SEQ ID NO: 3028047 - DNA, 25 bp, Homo sapien
taatgaaagtgaaaagcatgccttc

SEQ ID NO: 3028048 - DNA, 25 bp, Homo sapien
aaagcatgccttcaaggagcaagtg

SEQ ID NO: 3028049 - DNA, 25 bp, Homo sapien
aatatgcagagaaaataagtacatc

SEQ ID NO: 3028050 - DNA, 25 bp, Homo sapien
acaaatgctcagaatatgcagagaa

SEQ ID NO: 3028051 - DNA, 25 bp, Homo sapien
tgcaaagagaaacaaagggagggaa

SEQ ID NO: 3028052 - DNA, 25 bp, Homo sapien
agggaaacaaatgctcagaatatgc

SEQ ID NO: 3028053 - DNA, 25 bp, Homo sapien
ttaagcagtgtagttcaaagaaata

SEQ ID NO: 3028054 - DNA, 25 bp, Homo sapien
ggcagagatggaagcttaacctctc

SEQ ID NO: 3028055 - DNA, 25 bp, Homo sapien
catggcaactgattaactattagaa

SEQ ID NO: 3028056 - DNA, 25 bp, Homo sapien
aaaattaagttagatgagtcactca

SEQ ID NO: 3028057 - DNA, 25 bp, Homo sapien
catatcaagttgcattcagaagcag

SEQ ID NO: 3028058 - DNA, 25 bp, Homo sapien
tatgtcatacattaaagagattggc

SEQ ID NO: 3028059 - DNA, 25 bp, Homo sapien
tccatgcatggcaaccaaaacaaca

SEQ ID NO: 3028060 - DNA, 25 bp, Homo sapien
caacttatatctgcgtgacactgga

SEQ ID NO: 3028061 - DNA, 25 bp, Homo sapien
ttttgatccttaagaaaggcggcag

SEQ ID NO: 3028062 - DNA, 25 bp, Homo sapien
tcgcattgaaagaaggatgaggtgc

SEQ ID NO: 3028063 - DNA, 25 bp, Homo sapien
aaagcagccgcacacgtatttctgg

SEQ ID NO: 3028064 - DNA, 25 bp, Homo sapien
gcaagaggcctcatgaccaatcatt

SEQ ID NO: 3028065 - DNA, 25 bp, Homo sapien
ttcacttcctctagtagtactctgc

SEQ ID NO: 3028066 - DNA, 25 bp, Homo sapien
cctcatttgacaggcatgattccat

SEQ ID NO: 3028067 - DNA, 25 bp, Homo sapien
ttatttgggcatccgcttcaagacc

SEQ ID NO: 3028068 - DNA, 25 bp, Homo sapien
atgattccatcagaacttcacttcc

SEQ ID NO: 3028069 - DNA, 25 bp, Homo sapien
aattatacctaatcgtacaatgttc

SEQ ID NO: 3028070 - DNA, 25 bp, Homo sapien
ggcaagtagcgattttgttagttac

SEQ ID NO: 3028071 - DNA, 25 bp, Homo sapien
gtctcaatataaggggcggaaggct

SEQ ID NO: 3028072 - DNA, 25 bp, Homo sapien
gggtgaaatcaacagggccatcgct

SEQ ID NO: 3028073 - DNA, 25 bp, Homo sapien
tcctaaggcccatgcataaggttcc

SEQ ID NO: 3028074 - DNA, 25 bp, Homo sapien
ccagaggagttataaagccaaggcg

SEQ ID NO: 3028075 - DNA, 25 bp, Homo sapien
gacgtgtgacaataccaaatggaac

SEQ ID NO: 3028076 - DNA, 25 bp, Homo sapien
cgttttgcctatgcatggttcagtc

SEQ ID NO: 3028077 - DNA, 25 bp, Homo sapien
tggttcagtcctggacgggtgcgca

SEQ ID NO: 3028078 - DNA, 25 bp, Homo sapien
gttttgcctatgcatggttcagtcc

SEQ ID NO: 3028079 - DNA, 25 bp, Homo sapien
actcgttttgcctatgcatggttca

SEQ ID NO: 3028080 - DNA, 25 bp, Homo sapien
gctgtaaacggtatcactgtccact

SEQ ID NO: 3028081 - DNA, 25 bp, Homo sapien
aaaatggcgtgggattcacaaaggt

SEQ ID NO: 3028082 - DNA, 25 bp, Homo sapien
aacagtctctgctgggttaggaaaa

SEQ ID NO: 3028083 - DNA, 25 bp, Homo sapien
tcacaaaggtgttaagctgtaaacg

SEQ ID NO: 3028084 - DNA, 25 bp, Homo sapien
gatgaggcctgcttagcaccagtga

SEQ ID NO: 3028085 - DNA, 25 bp, Homo sapien
tgagatgaggcctgcttagcaccag

SEQ ID NO: 3028086 - DNA, 25 bp, Homo sapien
gaggcctgcttagcaccagtgaagt

SEQ ID NO: 3028087 - DNA, 25 bp, Homo sapien
tgaggcctgcttagcaccagtgaag

SEQ ID NO: 3028088 - DNA, 25 bp, Homo sapien
tgacagaattcgacaaggcacggct

SEQ ID NO: 3028089 - DNA, 25 bp, Homo sapien
ttccggcgggaattctgggcagaca

SEQ ID NO: 3028090 - DNA, 25 bp, Homo sapien
cattgcgaagcatcacgttccggcg

SEQ ID NO: 3028091 - DNA, 25 bp, Homo sapien
tgaacatgtccaggtccaagtcgct

SEQ ID NO: 3028092 - DNA, 25 bp, Homo sapien
aacaccgtgctgttaaaggagctgg

SEQ ID NO: 3028093 - DNA, 25 bp, Homo sapien
tcatcatgacatcgctgtggctaag

SEQ ID NO: 3028094 - DNA, 25 bp, Homo sapien
taagtgagtccgaagtgagcaggtc

SEQ ID NO: 3028095 - DNA, 25 bp, Homo sapien
caggcccgagcccttggtggtatac

SEQ ID NO: 3028096 - DNA, 25 bp, Homo sapien
tggcgggagcgtgatgttatccagc

SEQ ID NO: 3028097 - DNA, 25 bp, Homo sapien
tgggatggcgggagcgtgatgttat

SEQ ID NO: 3028098 - DNA, 25 bp, Homo sapien
gggatggcgggagcgtgatgttatc

SEQ ID NO: 3028099 - DNA, 25 bp, Homo sapien
gatggcgggagcgtgatgttatcca

SEQ ID NO: 3028100 - DNA, 25 bp, Homo sapien
cattcagattcatggtgcctgccat

SEQ ID NO: 3028101 - DNA, 25 bp, Homo sapien
atcattcagattcatggtgcctgcc

SEQ ID NO: 3028102 - DNA, 25 bp, Homo sapien
tcattcagattcatggtgcctgcca

SEQ ID NO: 3028103 - DNA, 25 bp, Homo sapien
gatgatccaccaagagctcttgcca

SEQ ID NO: 3028104 - DNA, 25 bp, Homo sapien
ctggcgttagaattggtgcgtgaac

SEQ ID NO: 3028105 - DNA, 25 bp, Homo sapien
acttgttgctattgtccatggagac

SEQ ID NO: 3028106 - DNA, 25 bp, Homo sapien
cacggctcttggtatacttgttgct

SEQ ID NO: 3028107 - DNA, 25 bp, Homo sapien
ggacccgcatgaatcgactatgcag

SEQ ID NO: 3028108 - DNA, 25 bp, Homo sapien
ctggacccgcatgaatcgactatgc

SEQ ID NO: 3028109 - DNA, 25 bp, Homo sapien
catgaatcgactatgcagtgacagg

SEQ ID NO: 3028110 - DNA, 25 bp, Homo sapien
actatgcagtgacaggttgtgccgg

SEQ ID NO: 3028111 - DNA, 25 bp, Homo sapien
cacgtacaggatcgcggacggctct

SEQ ID NO: 3028112 - DNA, 25 bp, Homo sapien
tcaggtccgcgtaggacaggtttcc

SEQ ID NO: 3028113 - DNA, 25 bp, Homo sapien
cttggcagggctcgcttggagctcc

SEQ ID NO: 3028114 - DNA, 25 bp, Homo sapien
gggtcttgccctccgggtgccagca

SEQ ID NO: 3028115 - DNA, 25 bp, Homo sapien
gtgcagcgggggagggacgtggacg

SEQ ID NO: 3028116 - DNA, 25 bp, Homo sapien
gtggacgccgcgaaggctccggctc

SEQ ID NO: 3028117 - DNA, 25 bp, Homo sapien
gagggacgtggacgccgcgaaggct

SEQ ID NO: 3028118 - DNA, 25 bp, Homo sapien
cagcgggggagggacgtggacgccg

SEQ ID NO: 3028119 - DNA, 25 bp, Homo sapien
tggcagttcctagtaaagctaaaca

SEQ ID NO: 3028120 - DNA, 25 bp, Homo sapien
cactgcaactgctactaatggcaaa

SEQ ID NO: 3028121 - DNA, 25 bp, Homo sapien
tccctaaaccagctctcaagatgaa

SEQ ID NO: 3028122 - DNA, 25 bp, Homo sapien
catgtgatgatttaagacctactaa

SEQ ID NO: 3028123 - DNA, 25 bp, Homo sapien
tgggatctggccgtgaggcgcagag

SEQ ID NO: 3028124 - DNA, 25 bp, Homo sapien
ggatctggccgtgaggcgcagagca

SEQ ID NO: 3028125 - DNA, 25 bp, Homo sapien
gggatctggccgtgaggcgcagagc

SEQ ID NO: 3028126 - DNA, 25 bp, Homo sapien
ctgggatctggccgtgaggcgcaga

SEQ ID NO: 3028127 - DNA, 25 bp, Homo sapien
ggagattctgctcttcaccccaatt

SEQ ID NO: 3028128 - DNA, 25 bp, Homo sapien
gagattctgctcttcaccccaattc

SEQ ID NO: 3028129 - DNA, 25 bp, Homo sapien
gcctgggttagatcgggtctctttc

SEQ ID NO: 3028130 - DNA, 25 bp, Homo sapien
gggttagatcgggtctctttctcac

SEQ ID NO: 3028131 - DNA, 25 bp, Homo sapien
ccgggcctcgtggtcccacttcctg

SEQ ID NO: 3028132 - DNA, 25 bp, Homo sapien
ctggccagacgagttagaagccccc

SEQ ID NO: 3028133 - DNA, 25 bp, Homo sapien
tctgcctcagtcctacggcgctgga

SEQ ID NO: 3028134 - DNA, 25 bp, Homo sapien
tgcctcagtcctacggcgctggagc

SEQ ID NO: 3028135 - DNA, 25 bp, Homo sapien
ctgcctcagtcctacggcgctggag

SEQ ID NO: 3028136 - DNA, 25 bp, Homo sapien
aagcccggggacagcatccctgagg

SEQ ID NO: 3028137 - DNA, 25 bp, Homo sapien
tgtctgtccctaccgcttgaagctg

SEQ ID NO: 3028138 - DNA, 25 bp, Homo sapien
agatgtctgtccctaccgcttgaag

SEQ ID NO: 3028139 - DNA, 25 bp, Homo sapien
tggaagcccggggacagcatccctg

SEQ ID NO: 3028140 - DNA, 25 bp, Homo sapien
ggggacgaacttctttggccagctc

SEQ ID NO: 3028141 - DNA, 25 bp, Homo sapien
aggggacgaacttctttggccagct

SEQ ID NO: 3028142 - DNA, 25 bp, Homo sapien
gattttcctgagtctcccttcgttg

SEQ ID NO: 3028143 - DNA, 25 bp, Homo sapien
tttcctgagtctcccttcgttggat

SEQ ID NO: 3028144 - DNA, 25 bp, Homo sapien
ttttcctgagtctcccttcgttgga

SEQ ID NO: 3028145 - DNA, 25 bp, Homo sapien
tgattttcctgagtctcccttcgtt

SEQ ID NO: 3028146 - DNA, 25 bp, Homo sapien
tactctttccgttataccacctgcc

SEQ ID NO: 3028147 - DNA, 25 bp, Homo sapien
cgtactctttccgttataccacctg

SEQ ID NO: 3028148 - DNA, 25 bp, Homo sapien
gtactctttccgttataccacctgc

SEQ ID NO: 3028149 - DNA, 25 bp, Homo sapien
ctctttccgttataccacctgcctt

SEQ ID NO: 3028150 - DNA, 25 bp, Homo sapien
gaaggatgaggggggataagtcaga

SEQ ID NO: 3028151 - DNA, 25 bp, Homo sapien
aggatgaggggggataagtcagact

SEQ ID NO: 3028152 - DNA, 25 bp, Homo sapien
ctgaaggatgaggggggataagtca

SEQ ID NO: 3028153 - DNA, 25 bp, Homo sapien
ggatgaggggggataagtcagactc

SEQ ID NO: 3028154 - DNA, 25 bp, Homo sapien
tagagataagcgcaaagaaatgctc

SEQ ID NO: 3028155 - DNA, 25 bp, Homo sapien
gagataagcgcaaagaaatgctcaa

SEQ ID NO: 3028156 - DNA, 25 bp, Homo sapien
tacctagagataagcgcaaagaaat

SEQ ID NO: 3028157 - DNA, 25 bp, Homo sapien
gataagcgcaaagaaatgctcaaag

SEQ ID NO: 3028158 - DNA, 25 bp, Homo sapien
tggggtggctaaaggtgtctgtgac

SEQ ID NO: 3028159 - DNA, 25 bp, Homo sapien
cctggaatactcacgatggggtggc

SEQ ID NO: 3028160 - DNA, 25 bp, Homo sapien
aatactcacgatggggtggctaaag

SEQ ID NO: 3028161 - DNA, 25 bp, Homo sapien
tgggcctggaatactcacgatgggg

SEQ ID NO: 3028162 - DNA, 25 bp, Homo sapien
gctcagagagtcttgtacagggatg

SEQ ID NO: 3028163 - DNA, 25 bp, Homo sapien
tgaacttcactaggaagaatggaga

SEQ ID NO: 3028164 - DNA, 25 bp, Homo sapien
agcttgggtccttccaccccagatt

SEQ ID NO: 3028165 - DNA, 25 bp, Homo sapien
tacagggatgtaatgctggagaact

SEQ ID NO: 3028166 - DNA, 25 bp, Homo sapien
cctgataatcaaatggtttctttcc

SEQ ID NO: 3028167 - DNA, 25 bp, Homo sapien
tgatgctggataagagatgaactct

SEQ ID NO: 3028168 - DNA, 25 bp, Homo sapien
cccacagtctttacaggtgtagggt

SEQ ID NO: 3028169 - DNA, 25 bp, Homo sapien
atgaaccctctgatgctggataaga

SEQ ID NO: 3028170 - DNA, 25 bp, Homo sapien
cttttgtatgttttgtaagagttga

SEQ ID NO: 3028171 - DNA, 25 bp, Homo sapien
gttgagctctggctgaaggcttcac

SEQ ID NO: 3028172 - DNA, 25 bp, Homo sapien
tgtatgttttgtaagagttgagctc

SEQ ID NO: 3028173 - DNA, 25 bp, Homo sapien
agttgagctctggctgaaggcttca

SEQ ID NO: 3028174 - DNA, 25 bp, Homo sapien
aatgtggcagagctttcgtgtagtt

SEQ ID NO: 3028175 - DNA, 25 bp, Homo sapien
tgtggcagagctttcgtgtagttca

SEQ ID NO: 3028176 - DNA, 25 bp, Homo sapien
tggcagagctttcgtgtagttcagc

SEQ ID NO: 3028177 - DNA, 25 bp, Homo sapien
ggcagagctttcgtgtagttcagcc

SEQ ID NO: 3028178 - DNA, 25 bp, Homo sapien
aaatgtcacactgtgcccagaatgg

SEQ ID NO: 3028179 - DNA, 25 bp, Homo sapien
ctgcgccctgcctgtttgtagtaat

SEQ ID NO: 3028180 - DNA, 25 bp, Homo sapien
tttttaggcaccaaatctccctcat

SEQ ID NO: 3028181 - DNA, 25 bp, Homo sapien
tagtaatttttaggcaccaaatctc

SEQ ID NO: 3028182 - DNA, 25 bp, Homo sapien
catattttgggcctaggacttcact

SEQ ID NO: 3028183 - DNA, 25 bp, Homo sapien
cacaaggttttgcaaagtccacttc

SEQ ID NO: 3028184 - DNA, 25 bp, Homo sapien
catatttctgtaacccagcccagca

SEQ ID NO: 3028185 - DNA, 25 bp, Homo sapien
tcaatatgctgagagacgaagttcc

SEQ ID NO: 3028186 - DNA, 25 bp, Homo sapien
catttgacaacattgagcttttcct

SEQ ID NO: 3028187 - DNA, 25 bp, Homo sapien
tgcatttgacaacattgagcttttc

SEQ ID NO: 3028188 - DNA, 25 bp, Homo sapien
ggtggacctgttgcatttgacaaca

SEQ ID NO: 3028189 - DNA, 25 bp, Homo sapien
tcagtggggtggacctgttgcattt

SEQ ID NO: 3028190 - DNA, 25 bp, Homo sapien
caaagagggccagtaacatcaagtg

SEQ ID NO: 3028191 - DNA, 25 bp, Homo sapien
gtgcattgaggtttctgcttaaacc

SEQ ID NO: 3028192 - DNA, 25 bp, Homo sapien
tatttatcctctgtacaaagagggc

SEQ ID NO: 3028193 - DNA, 25 bp, Homo sapien
acatcaagtgcattgaggtttctgc

SEQ ID NO: 3028194 - DNA, 25 bp, Homo sapien
ttagaaagttcaagccttgaccagg

SEQ ID NO: 3028195 - DNA, 25 bp, Homo sapien
tacaagagctatggcccattagaaa

SEQ ID NO: 3028196 - DNA, 25 bp, Homo sapien
caggtaatttagaagagtgcagccc

SEQ ID NO: 3028197 - DNA, 25 bp, Homo sapien
gaaagttcaagccttgaccaggtgc

SEQ ID NO: 3028198 - DNA, 25 bp, Homo sapien
cccggacccgtacgctgctgcgctg

SEQ ID NO: 3028199 - DNA, 25 bp, Homo sapien
cgacccggacccgtacgctgctgcg

SEQ ID NO: 3028200 - DNA, 25 bp, Homo sapien
ggacccgtacgctgctgcgctgacg

SEQ ID NO: 3028201 - DNA, 25 bp, Homo sapien
cccgtacgctgctgcgctgacgtgg

SEQ ID NO: 3028202 - DNA, 25 bp, Homo sapien
tgcaggttccgtgggactggagccc

SEQ ID NO: 3028203 - DNA, 25 bp, Homo sapien
gcgcccgctactcgaactcgaggag

SEQ ID NO: 3028204 - DNA, 25 bp, Homo sapien
tgcggcgcagagcaagtacttcttg

SEQ ID NO: 3028205 - DNA, 25 bp, Homo sapien
tacttcttgcggctgtggggacgcc

SEQ ID NO: 3028206 - DNA, 25 bp, Homo sapien
gcctggccatcttttaattcttaaa

SEQ ID NO: 3028207 - DNA, 25 bp, Homo sapien
tgcgcctggccatcttttaattctt

SEQ ID NO: 3028208 - DNA, 25 bp, Homo sapien
actgcgcctggccatcttttaattc

SEQ ID NO: 3028209 - DNA, 25 bp, Homo sapien
ctggccatcttttaattcttaaaga

SEQ ID NO: 3028210 - DNA, 25 bp, Homo sapien
taggccgcataatgctgagaaggaa

SEQ ID NO: 3028211 - DNA, 25 bp, Homo sapien
tctgttgtccagtcttctttggctt

SEQ ID NO: 3028212 - DNA, 25 bp, Homo sapien
aggtttttctgttgtccagtcttct

SEQ ID NO: 3028213 - DNA, 25 bp, Homo sapien
cagtttccataggccgcataatgct

SEQ ID NO: 3028214 - DNA, 25 bp, Homo sapien
tacatactgctcacagttttgatac

SEQ ID NO: 3028215 - DNA, 25 bp, Homo sapien
cttctgttactttatgctccaaagt

SEQ ID NO: 3028216 - DNA, 25 bp, Homo sapien
tcacagttttgatacacgtttcttt

SEQ ID NO: 3028217 - DNA, 25 bp, Homo sapien
caaatagaacatgctttccagtcag

SEQ ID NO: 3028218 - DNA, 25 bp, Homo sapien
tagcaaagcaatggagatataaagc

SEQ ID NO: 3028219 - DNA, 25 bp, Homo sapien
tatccttggcaaaactacttataga

SEQ ID NO: 3028220 - DNA, 25 bp, Homo sapien
caaaattaagaagtcaagaataggg

SEQ ID NO: 3028221 - DNA, 25 bp, Homo sapien
cttgggataagcagggttctgaaac

SEQ ID NO: 3028222 - DNA, 25 bp, Homo sapien
catgtcagcactaaaggagatggcc

SEQ ID NO: 3028223 - DNA, 25 bp, Homo sapien
cacaggtagactaatggttggccta

SEQ ID NO: 3028224 - DNA, 25 bp, Homo sapien
gttggcctacgttggtggaatcaca

SEQ ID NO: 3028225 - DNA, 25 bp, Homo sapien
gagccattgggtgtttgaatctaga

SEQ ID NO: 3028226 - DNA, 25 bp, Homo sapien
tcttcccacccggtggcaccactat

SEQ ID NO: 3028227 - DNA, 25 bp, Homo sapien
gattaatgatccttctgcgcttcct

SEQ ID NO: 3028228 - DNA, 25 bp, Homo sapien
agatgatcatctctcatgattaatg

SEQ ID NO: 3028229 - DNA, 25 bp, Homo sapien
tctcttaagatgatcatctctcatg

SEQ ID NO: 3028230 - DNA, 25 bp, Homo sapien
tgttggcactagaaacattgtcaag

SEQ ID NO: 3028231 - DNA, 25 bp, Homo sapien
tacataggtaatggagacctttgca

SEQ ID NO: 3028232 - DNA, 25 bp, Homo sapien
ttccataggtatgcacacggccatg

SEQ ID NO: 3028233 - DNA, 25 bp, Homo sapien
cacggccatgtaatatcagtatatc

SEQ ID NO: 3028234 - DNA, 25 bp, Homo sapien
aagtcatctatttaaggcccagtta

SEQ ID NO: 3028235 - DNA, 25 bp, Homo sapien
ttttacagaaaggatagctagattg

SEQ ID NO: 3028236 - DNA, 25 bp, Homo sapien
gctagattgaaagctcttcagtgga

SEQ ID NO: 3028237 - DNA, 25 bp, Homo sapien
agtggaccttgagctaatagatctt

SEQ ID NO: 3028238 - DNA, 25 bp, Homo sapien
ggacctaccgacttcagattcagcg

SEQ ID NO: 3028239 - DNA, 25 bp, Homo sapien
tgacaatggagctatcaagttcaag

SEQ ID NO: 3028240 - DNA, 25 bp, Homo sapien
gaggagaccgtgcagacactgcaag

SEQ ID NO: 3028241 - DNA, 25 bp, Homo sapien
tagggaagactcgaaagtgacaatg

SEQ ID NO: 3028242 - DNA, 25 bp, Homo sapien
caccgcggacgccaatcttgtgcat

SEQ ID NO: 3028243 - DNA, 25 bp, Homo sapien
cggcctcgcagtcaccgcggacgcc

SEQ ID NO: 3028244 - DNA, 25 bp, Homo sapien
gcagtcaccgcggacgccaatcttg

SEQ ID NO: 3028245 - DNA, 25 bp, Homo sapien
gcctcgcagtcaccgcggacgccaa

SEQ ID NO: 3028246 - DNA, 25 bp, Homo sapien
tagattgggatttgcattaaatctg

SEQ ID NO: 3028247 - DNA, 25 bp, Homo sapien
tcaagttgggtattgtcacacctcc

SEQ ID NO: 3028248 - DNA, 25 bp, Homo sapien
acgcccagccttaatagtcttcaag

SEQ ID NO: 3028249 - DNA, 25 bp, Homo sapien
tctgtagatcagattggggagaact

SEQ ID NO: 3028250 - DNA, 25 bp, Homo sapien
tgaacatatttatgatagctaattt

SEQ ID NO: 3028251 - DNA, 25 bp, Homo sapien
gacattgggctttttcagagatcgt

SEQ ID NO: 3028252 - DNA, 25 bp, Homo sapien
ctgtgaacatatttatgatagctaa

SEQ ID NO: 3028253 - DNA, 25 bp, Homo sapien
tgtgaacatatttatgatagctaat

SEQ ID NO: 3028254 - DNA, 25 bp, Homo sapien
tacctccaccaattcccagtgtttg

SEQ ID NO: 3028255 - DNA, 25 bp, Homo sapien
atatgtttgtttagtggccaccctg

SEQ ID NO: 3028256 - DNA, 25 bp, Homo sapien
tggttggttagcttactggccagct

SEQ ID NO: 3028257 - DNA, 25 bp, Homo sapien
gccaccctgtgccaattctgtaaag

SEQ ID NO: 3028258 - DNA, 25 bp, Homo sapien
ctgcttgtagcacttttctgatggc

SEQ ID NO: 3028259 - DNA, 25 bp, Homo sapien
ggctcgtttctgctaggtaagggta

SEQ ID NO: 3028260 - DNA, 25 bp, Homo sapien
ctttagtgtggcgagtggcttctga

SEQ ID NO: 3028261 - DNA, 25 bp, Homo sapien
cagcatgtctgtcatcttggtgttg

SEQ ID NO: 3028262 - DNA, 25 bp, Homo sapien
agaaaggatcgggcaaaaacgatca

SEQ ID NO: 3028263 - DNA, 25 bp, Homo sapien
gaaaggatcgggcaaaaacgatcat

SEQ ID NO: 3028264 - DNA, 25 bp, Homo sapien
ggccatccacttcctgaatattgag

SEQ ID NO: 3028265 - DNA, 25 bp, Homo sapien
gctggccatccacttcctgaatatt

SEQ ID NO: 3028266 - DNA, 25 bp, Homo sapien
gagactgggaagtcctggatcaagg

SEQ ID NO: 3028267 - DNA, 25 bp, Homo sapien
actgcacccggccagactgggtaat

SEQ ID NO: 3028268 - DNA, 25 bp, Homo sapien
actgggaagtcctggatcaaggcac

SEQ ID NO: 3028269 - DNA, 25 bp, Homo sapien
ctgcacccggccagactgggtaatt

SEQ ID NO: 3028270 - DNA, 25 bp, Homo sapien
tctcatggtctatacctggtatcgg

SEQ ID NO: 3028271 - DNA, 25 bp, Homo sapien
tatatattttggcatatggcgcata

SEQ ID NO: 3028272 - DNA, 25 bp, Homo sapien
tctatacctggtatcggaattgctg

SEQ ID NO: 3028273 - DNA, 25 bp, Homo sapien
tatcggaattgctgcgtcacttggt

SEQ ID NO: 3028274 - DNA, 25 bp, Homo sapien
tgtacgcacccttttcaggttagaa

SEQ ID NO: 3028275 - DNA, 25 bp, Homo sapien
ttttaactttacaaggtgctgccaa

SEQ ID NO: 3028276 - DNA, 25 bp, Homo sapien
agtggtcacacccatttcccaagtt

SEQ ID NO: 3028277 - DNA, 25 bp, Homo sapien
atagtgggtgccccacattatcccc

SEQ ID NO: 3028278 - DNA, 25 bp, Homo sapien
cctttcagaggcgatccgtcggatc

SEQ ID NO: 3028279 - DNA, 25 bp, Homo sapien
actgctcggtgggatggatttcaca

SEQ ID NO: 3028280 - DNA, 25 bp, Homo sapien
gatttcacaggaaccgtcatgcttg

SEQ ID NO: 3028281 - DNA, 25 bp, Homo sapien
tggaaacataagagtgactgctcgg

SEQ ID NO: 3028282 - DNA, 25 bp, Homo sapien
atctgccattggtcttggtgtggct

SEQ ID NO: 3028283 - DNA, 25 bp, Homo sapien
ccattggtcttggtgtggctttgcc

SEQ ID NO: 3028284 - DNA, 25 bp, Homo sapien
tttgcctctcttccgtggctggctg

SEQ ID NO: 3028285 - DNA, 25 bp, Homo sapien
ttggtgtggctttgcctctcttccg

SEQ ID NO: 3028286 - DNA, 25 bp, Homo sapien
cgtgggctcttgcacactcagcagt

SEQ ID NO: 3028287 - DNA, 25 bp, Homo sapien
cccaagtgttccgtgggctcttgca

SEQ ID NO: 3028288 - DNA, 25 bp, Homo sapien
ccctcacacctagtttacttgagga

SEQ ID NO: 3028289 - DNA, 25 bp, Homo sapien
ccccagtaggccagggccttgtttg

SEQ ID NO: 3028290 - DNA, 25 bp, Homo sapien
ctatagatgacggttgaagttgcca

SEQ ID NO: 3028291 - DNA, 25 bp, Homo sapien
taaccatttgctactatagatgacg

SEQ ID NO: 3028292 - DNA, 25 bp, Homo sapien
ttctgccgtttggatgctgcctaac

SEQ ID NO: 3028293 - DNA, 25 bp, Homo sapien
ggatgctgcctaaccatttgctact

SEQ ID NO: 3028294 - DNA, 25 bp, Homo sapien
cgtgagccataatgcaggtgtcccc

SEQ ID NO: 3028295 - DNA, 25 bp, Homo sapien
tgcctccgggtccactaaatgcggt

SEQ ID NO: 3028296 - DNA, 25 bp, Homo sapien
gctcatacctagtgcctgcggcagg

SEQ ID NO: 3028297 - DNA, 25 bp, Homo sapien
ccgccacggcagtatcttcagaggt

SEQ ID NO: 3028298 - DNA, 25 bp, Homo sapien
ttctctctttgggtaatggcgtctc

SEQ ID NO: 3028299 - DNA, 25 bp, Homo sapien
gacttgcttggagaccttgaccaag

SEQ ID NO: 3028300 - DNA, 25 bp, Homo sapien
tctctttgggtaatggcgtctccat

SEQ ID NO: 3028301 - DNA, 25 bp, Homo sapien
gagaccttgaccaagcccgtttctc

SEQ ID NO: 3028302 - DNA, 25 bp, Homo sapien
gaggtctgctatcaaggggcccaca

SEQ ID NO: 3028303 - DNA, 25 bp, Homo sapien
tatcacaggttggatttcaaaaatc

SEQ ID NO: 3028304 - DNA, 25 bp, Homo sapien
gagtagcagccgcagtcattaaaat

SEQ ID NO: 3028305 - DNA, 25 bp, Homo sapien
tctgaaacccaaaatctggaacatt

SEQ ID NO: 3028306 - DNA, 25 bp, Homo sapien
tatttcggataacggctcctcaacc

SEQ ID NO: 3028307 - DNA, 25 bp, Homo sapien
taactcacaagtagcccagtgctgg

SEQ ID NO: 3028308 - DNA, 25 bp, Homo sapien
gtttcctcaaacacgcaatgcgggt

SEQ ID NO: 3028309 - DNA, 25 bp, Homo sapien
agtgctggccatcggcaaagccgag

SEQ ID NO: 3028310 - DNA, 25 bp, Homo sapien
gcttgtagctccacggccaggtctt

SEQ ID NO: 3028311 - DNA, 25 bp, Homo sapien
tcacaatggccccgtgatgcaggca

SEQ ID NO: 3028312 - DNA, 25 bp, Homo sapien
tattagcaacagtaatgtcccctga

SEQ ID NO: 3028313 - DNA, 25 bp, Homo sapien
cctgacatccgcacaagcttgtagc

SEQ ID NO: 3028314 - DNA, 25 bp, Homo sapien
ctgggaataacagtcccacacaagg

SEQ ID NO: 3028315 - DNA, 25 bp, Homo sapien
ccagagagggccttgcccgaggtca

SEQ ID NO: 3028316 - DNA, 25 bp, Homo sapien
ctccgcagctggacctgtacgcggg

SEQ ID NO: 3028317 - DNA, 25 bp, Homo sapien
agccctgggaataacagtcccacac

SEQ ID NO: 3028318 - DNA, 25 bp, Homo sapien
tccctggaagtatgtaagcagagcc

SEQ ID NO: 3028319 - DNA, 25 bp, Homo sapien
ggctgagcagtttctaacccttgaa

SEQ ID NO: 3028320 - DNA, 25 bp, Homo sapien
tgctgtaatctacacggacgccctg

SEQ ID NO: 3028321 - DNA, 25 bp, Homo sapien
agataggaaactcacagggctgccc

SEQ ID NO: 3028322 - DNA, 25 bp, Homo sapien
tgagcccgccagatggtctatatgg

SEQ ID NO: 3028323 - DNA, 25 bp, Homo sapien
tgaatcgacaatcggaaacctggct

SEQ ID NO: 3028324 - DNA, 25 bp, Homo sapien
tgaccccgaggtagacaggaacagt

SEQ ID NO: 3028325 - DNA, 25 bp, Homo sapien
tgagtgtccagaggccaacagtgac

SEQ ID NO: 3028326 - DNA, 25 bp, Homo sapien
tttagaatccgatgaggcccactgg

SEQ ID NO: 3028327 - DNA, 25 bp, Homo sapien
cagcgtttctggtagagctctggac

SEQ ID NO: 3028328 - DNA, 25 bp, Homo sapien
ctttatccctagtccctgaggcagg

SEQ ID NO: 3028329 - DNA, 25 bp, Homo sapien
gcctttaggtgcttcgactgagaca

SEQ ID NO: 3028330 - DNA, 25 bp, Homo sapien
tcaggagattttcccatcaaggcca

SEQ ID NO: 3028331 - DNA, 25 bp, Homo sapien
ccaaacgaatctgcacatgtcctgg

SEQ ID NO: 3028332 - DNA, 25 bp, Homo sapien
cccatcaaggccaaacgaatctgca

SEQ ID NO: 3028333 - DNA, 25 bp, Homo sapien
tcaaggccaaacgaatctgcacatg

SEQ ID NO: 3028334 - DNA, 25 bp, Homo sapien
tatcagtgctgggagagatctcaga

SEQ ID NO: 3028335 - DNA, 25 bp, Homo sapien
catgcaaacacagttggcgccagtg

SEQ ID NO: 3028336 - DNA, 25 bp, Homo sapien
ttctgcaaatctggaaaggcctggt

SEQ ID NO: 3028337 - DNA, 25 bp, Homo sapien
gctaatgggacatcatcgtgcctca

SEQ ID NO: 3028338 - DNA, 25 bp, Homo sapien
tgaaccatgccaaggcgggctccat

SEQ ID NO: 3028339 - DNA, 25 bp, Homo sapien
gacctgaaccatgccaaggcgggct

SEQ ID NO: 3028340 - DNA, 25 bp, Homo sapien
ccgggacctgaaccatgccaaggcg

SEQ ID NO: 3028341 - DNA, 25 bp, Homo sapien
ggacctgaaccatgccaaggcgggc

SEQ ID NO: 3028342 - DNA, 25 bp, Homo sapien
cattgttcccaggtaggacgggctc

SEQ ID NO: 3028343 - DNA, 25 bp, Homo sapien
tgatcagccgcgcattgttcccagg

SEQ ID NO: 3028344 - DNA, 25 bp, Homo sapien
tgccgggcatgatcagccgcgcatt

SEQ ID NO: 3028345 - DNA, 25 bp, Homo sapien
gggctccgggcactgaacccaggct

SEQ ID NO: 3028346 - DNA, 25 bp, Homo sapien
tgcaaacgtcaccagaagaagaggc

SEQ ID NO: 3028347 - DNA, 25 bp, Homo sapien
ggcaggtgccatcaagatcctctaa

SEQ ID NO: 3028348 - DNA, 25 bp, Homo sapien
gctgtaaatgaacgtccctgtgccc

SEQ ID NO: 3028349 - DNA, 25 bp, Homo sapien
cacaggctttggagacctctaggtg

SEQ ID NO: 3028350 - DNA, 25 bp, Homo sapien
tgatggccttccatatggccctggc

SEQ ID NO: 3028351 - DNA, 25 bp, Homo sapien
tggtagcccagaagacaacagctcg

SEQ ID NO: 3028352 - DNA, 25 bp, Homo sapien
agggactcgtgacccctggtgtgca

SEQ ID NO: 3028353 - DNA, 25 bp, Homo sapien
caagggaattgaagtcatcagagtc

SEQ ID NO: 3028354 - DNA, 25 bp, Homo sapien
gcatcctcttcaacgcatctgcttc

SEQ ID NO: 3028355 - DNA, 25 bp, Homo sapien
ctcgggttatatggggggcactcag

SEQ ID NO: 3028356 - DNA, 25 bp, Homo sapien
cgggttatatggggggcactcagct

SEQ ID NO: 3028357 - DNA, 25 bp, Homo sapien
tcgggttatatggggggcactcagc

SEQ ID NO: 3028358 - DNA, 25 bp, Homo sapien
tggcgcctccggagagggactgagt

SEQ ID NO: 3028359 - DNA, 25 bp, Homo sapien
gtggcgcctccggagagggactgag

SEQ ID NO: 3028360 - DNA, 25 bp, Homo sapien
ctgagtggcgcctccggagagggac

SEQ ID NO: 3028361 - DNA, 25 bp, Homo sapien
gagtggcgcctccggagagggactg

SEQ ID NO: 3028362 - DNA, 25 bp, Homo sapien
tcctgggtcacagatagctgccgct

SEQ ID NO: 3028363 - DNA, 25 bp, Homo sapien
ggttgacgagcttcttggccacagt

SEQ ID NO: 3028364 - DNA, 25 bp, Homo sapien
gatcttggcaatctcgtcgacgctc

SEQ ID NO: 3028365 - DNA, 25 bp, Homo sapien
ggctagtacatctgccacagggact

SEQ ID NO: 3028366 - DNA, 25 bp, Homo sapien
taaggacggctctcagagtgacccc

SEQ ID NO: 3028367 - DNA, 25 bp, Homo sapien
gtacaggattcactaagcagctcag

SEQ ID NO: 3028368 - DNA, 25 bp, Homo sapien
ccataggcttgcgaaggcacggcct

SEQ ID NO: 3028369 - DNA, 25 bp, Homo sapien
gccttgggaccaatgaaccggaata

SEQ ID NO: 3028370 - DNA, 25 bp, Homo sapien
gcccggtctccatccacaaacatga

SEQ ID NO: 3028371 - DNA, 25 bp, Homo sapien
ccagggcacccttgaacttggttgc

SEQ ID NO: 3028372 - DNA, 25 bp, Homo sapien
cttgaacttggttgccgaccgcgtg

SEQ ID NO: 3028373 - DNA, 25 bp, Homo sapien
tgccgaccgcgtgaagaactcagtt

SEQ ID NO: 3028374 - DNA, 25 bp, Homo sapien
tctttgttcatcagaaacgggaaac

SEQ ID NO: 3028375 - DNA, 25 bp, Homo sapien
ctttgttcatcagaaacgggaaacg

SEQ ID NO: 3028376 - DNA, 25 bp, Homo sapien
tcatcagaaacgggaaacgggtctg

SEQ ID NO: 3028377 - DNA, 25 bp, Homo sapien
catcagaaacgggaaacgggtctgg

SEQ ID NO: 3028378 - DNA, 25 bp, Homo sapien
aactctgcaagcagcggagcagcca

SEQ ID NO: 3028379 - DNA, 25 bp, Homo sapien
cctccggcttcctggaaactcagaa

SEQ ID NO: 3028380 - DNA, 25 bp, Homo sapien
tcagaactctgcaagcagcggagca

SEQ ID NO: 3028381 - DNA, 25 bp, Homo sapien
cattgcctccggcttcctggaaact

SEQ ID NO: 3028382 - DNA, 25 bp, Homo sapien
ctcacacatgtgcaggaagtacttg

SEQ ID NO: 3028383 - DNA, 25 bp, Homo sapien
aagtacttgacgttactctcatcca

SEQ ID NO: 3028384 - DNA, 25 bp, Homo sapien
ccacgatgatgtacacggccacttt

SEQ ID NO: 3028385 - DNA, 25 bp, Homo sapien
tgcatgcaggcccgctcacacatgt

SEQ ID NO: 3028386 - DNA, 25 bp, Homo sapien
tgggtcccatcactgagcttgttcc

SEQ ID NO: 3028387 - DNA, 25 bp, Homo sapien
gggtcccatcactgagcttgttccg

SEQ ID NO: 3028388 - DNA, 25 bp, Homo sapien
gtcccatcactgagcttgttccgct

SEQ ID NO: 3028389 - DNA, 25 bp, Homo sapien
ctgggtcccatcactgagcttgttc

SEQ ID NO: 3028390 - DNA, 25 bp, Homo sapien
aatactgcaaagacaaggggctggc

SEQ ID NO: 3028391 - DNA, 25 bp, Homo sapien
cctggtcatggctcaggaatactgc

SEQ ID NO: 3028392 - DNA, 25 bp, Homo sapien
tcccccagacggacatcagcttcct

SEQ ID NO: 3028393 - DNA, 25 bp, Homo sapien
gccatgaggtgaccaaggctgttcc

SEQ ID NO: 3028394 - DNA, 25 bp, Homo sapien
tccaggatgcgcttgagctccagct

SEQ ID NO: 3028395 - DNA, 25 bp, Homo sapien
ccagttcacatggttgtcgtccaga

SEQ ID NO: 3028396 - DNA, 25 bp, Homo sapien
ttgagcacctcgtagaaggcgtccc

SEQ ID NO: 3028397 - DNA, 25 bp, Homo sapien
tagaagaactcaggcttggactcgc

SEQ ID NO: 3028398 - DNA, 25 bp, Homo sapien
gcctctccgcggcctctgcttctct

SEQ ID NO: 3028399 - DNA, 25 bp, Homo sapien
ggtgggcaaggtccagctcctagct

SEQ ID NO: 3028400 - DNA, 25 bp, Homo sapien
agctcctagctccggcccagctggg

SEQ ID NO: 3028401 - DNA, 25 bp, Homo sapien
ggcaaggtccagctcctagctccgg

SEQ ID NO: 3028402 - DNA, 25 bp, Homo sapien
gcggagcggggcgcacacgcggcgg

SEQ ID NO: 3028403 - DNA, 25 bp, Homo sapien
gagcggggcgcacacgcggcggctg

SEQ ID NO: 3028404 - DNA, 25 bp, Homo sapien
taattggagcctgtgataccccggc

SEQ ID NO: 3028405 - DNA, 25 bp, Homo sapien
attggagcctgtgataccccggcag

SEQ ID NO: 3028406 - DNA, 25 bp, Homo sapien
tggagcctgtgataccccggcagcg

SEQ ID NO: 3028407 - DNA, 25 bp, Homo sapien
ttaattggagcctgtgataccccgg

SEQ ID NO: 3028408 - DNA, 25 bp, Homo sapien
ggggactgtgtttcaatggtgacac

SEQ ID NO: 3028409 - DNA, 25 bp, Homo sapien
cttggtcaaaccagtgggactcggg

SEQ ID NO: 3028410 - DNA, 25 bp, Homo sapien
cactgccacggttctcataaagaag

SEQ ID NO: 3028411 - DNA, 25 bp, Homo sapien
aacacttggtcaaaccagtgggact

SEQ ID NO: 3028412 - DNA, 25 bp, Homo sapien
gatcatggcacattctctggaggac

SEQ ID NO: 3028413 - DNA, 25 bp, Homo sapien
tcgttttgaatacacaggctgggtc

SEQ ID NO: 3028414 - DNA, 25 bp, Homo sapien
gatttgccagcactcagggttctaa

SEQ ID NO: 3028415 - DNA, 25 bp, Homo sapien
cagttaggagcccacgttcagtcca

SEQ ID NO: 3028416 - DNA, 25 bp, Homo sapien
tcaatgatgtcgccacggcggaagc

SEQ ID NO: 3028417 - DNA, 25 bp, Homo sapien
ggacctcaatgatgtcgccacggcg

SEQ ID NO: 3028418 - DNA, 25 bp, Homo sapien
cctcaatgatgtcgccacggcggaa

SEQ ID NO: 3028419 - DNA, 25 bp, Homo sapien
gacctcaatgatgtcgccacggcgg

SEQ ID NO: 3028420 - DNA, 25 bp, Homo sapien
ggatcttatttacccgactctgcag

SEQ ID NO: 3028421 - DNA, 25 bp, Homo sapien
cgggcagcaccggagttgaacttta

SEQ ID NO: 3028422 - DNA, 25 bp, Homo sapien
cacccaagagaagtgatttgccaca

SEQ ID NO: 3028423 - DNA, 25 bp, Homo sapien
catggtagcttttgactccaggcca

SEQ ID NO: 3028424 - DNA, 25 bp, Homo sapien
acttcgaagcctgggctggacgcct

SEQ ID NO: 3028425 - DNA, 25 bp, Homo sapien
taacttcgaagcctgggctggacgc

SEQ ID NO: 3028426 - DNA, 25 bp, Homo sapien
gctggacgcctcttgcaataccagg

SEQ ID NO: 3028427 - DNA, 25 bp, Homo sapien
gggctggacgcctcttgcaatacca

SEQ ID NO: 3028428 - DNA, 25 bp, Homo sapien
aagtgagaccaggcccgtgcttggc

SEQ ID NO: 3028429 - DNA, 25 bp, Homo sapien
gagaccaggcccgtgcttggcctca

SEQ ID NO: 3028430 - DNA, 25 bp, Homo sapien
agtgagaccaggcccgtgcttggcc

SEQ ID NO: 3028431 - DNA, 25 bp, Homo sapien
ggaagtgagaccaggcccgtgcttg

SEQ ID NO: 3028432 - DNA, 25 bp, Homo sapien
tgcggtagaagtcgaccagctcgtt

SEQ ID NO: 3028433 - DNA, 25 bp, Homo sapien
ccagctcgttgagggagttgaactt

SEQ ID NO: 3028434 - DNA, 25 bp, Homo sapien
gaagtgctgcacctggtctccatag

SEQ ID NO: 3028435 - DNA, 25 bp, Homo sapien
ttgagcaagggctcctcgtcgcgca

SEQ ID NO: 3028436 - DNA, 25 bp, Homo sapien
gggccacctcaggtggtggccgtcc

SEQ ID NO: 3028437 - DNA, 25 bp, Homo sapien
cctcaggtggtggccgtcccagcct

SEQ ID NO: 3028438 - DNA, 25 bp, Homo sapien
caggtggtggccgtcccagcctggc

SEQ ID NO: 3028439 - DNA, 25 bp, Homo sapien
ccacctcaggtggtggccgtcccag

SEQ ID NO: 3028440 - DNA, 25 bp, Homo sapien
ccccaagtaccttctagcccagcgg

SEQ ID NO: 3028441 - DNA, 25 bp, Homo sapien
actatcgccaaatcgccccaagtac

SEQ ID NO: 3028442 - DNA, 25 bp, Homo sapien
tctagcccagcggaggagagagcct

SEQ ID NO: 3028443 - DNA, 25 bp, Homo sapien
ttccagccagcccactatcgccaaa

SEQ ID NO: 3028444 - DNA, 25 bp, Homo sapien
tggaacctctcacactcggcgtgtc

SEQ ID NO: 3028445 - DNA, 25 bp, Homo sapien
tgtccacccaggacaggccttgtgg

SEQ ID NO: 3028446 - DNA, 25 bp, Homo sapien
tgcagctgtgggtcaagatcatggc

SEQ ID NO: 3028447 - DNA, 25 bp, Homo sapien
gctgggactggaggcggtgcagctg

SEQ ID NO: 3028448 - DNA, 25 bp, Homo sapien
ccatgttgctacctgggctgtgccc

SEQ ID NO: 3028449 - DNA, 25 bp, Homo sapien
tgaggcatagggcaaaacaggattc

SEQ ID NO: 3028450 - DNA, 25 bp, Homo sapien
gcatttgcacacagagtgtcctcca

SEQ ID NO: 3028451 - DNA, 25 bp, Homo sapien
taaaacgttgcctaatgccctcctg

SEQ ID NO: 3028452 - DNA, 25 bp, Homo sapien
gttcaagcgattatctcatctaagc

SEQ ID NO: 3028453 - DNA, 25 bp, Homo sapien
gcgattatctcatctaagccttccg

SEQ ID NO: 3028454 - DNA, 25 bp, Homo sapien
ttcaagcgattatctcatctaagcc

SEQ ID NO: 3028455 - DNA, 25 bp, Homo sapien
attatctcatctaagccttccgagt

SEQ ID NO: 3028456 - DNA, 25 bp, Homo sapien
tgcacacagtatttcctccaactgg

SEQ ID NO: 3028457 - DNA, 25 bp, Homo sapien
taaatacacctccaggcatttgcac

SEQ ID NO: 3028458 - DNA, 25 bp, Homo sapien
aggcccaggtaaaatggcgcatcct

SEQ ID NO: 3028459 - DNA, 25 bp, Homo sapien
cgcatcctgtgagagctgcatcaga

SEQ ID NO: 3028460 - DNA, 25 bp, Homo sapien
tcagtaaatggcaaatcttgcccct

SEQ ID NO: 3028461 - DNA, 25 bp, Homo sapien
agcatttgagaatcccccagactgg

SEQ ID NO: 3028462 - DNA, 25 bp, Homo sapien
tgtctagtcttgaccttagccatcc

SEQ ID NO: 3028463 - DNA, 25 bp, Homo sapien
tctctgtctagtcttgaccttagcc

SEQ ID NO: 3028464 - DNA, 25 bp, Homo sapien
cgctgggcgatctccatcaggcatg

SEQ ID NO: 3028465 - DNA, 25 bp, Homo sapien
ccgctgggcgatctccatcaggcat

SEQ ID NO: 3028466 - DNA, 25 bp, Homo sapien
gctgggcgatctccatcaggcatgg

SEQ ID NO: 3028467 - DNA, 25 bp, Homo sapien
tgcccgctgggcgatctccatcagg

SEQ ID NO: 3028468 - DNA, 25 bp, Homo sapien
tgtgagtatgccagagatgccatgc

SEQ ID NO: 3028469 - DNA, 25 bp, Homo sapien
tcataaagggcagctagctatggcc

SEQ ID NO: 3028470 - DNA, 25 bp, Homo sapien
cattttccgaggtggccatcaggtc

SEQ ID NO: 3028471 - DNA, 25 bp, Homo sapien
gagttcccaagtaccaaccagcaag

SEQ ID NO: 3028472 - DNA, 25 bp, Homo sapien
tgtgcgccaaaatcctactcatgct

SEQ ID NO: 3028473 - DNA, 25 bp, Homo sapien
ggatttctctgagggtcgcttccag

SEQ ID NO: 3028474 - DNA, 25 bp, Homo sapien
tcaagaactgctccctaagactgtc

SEQ ID NO: 3028475 - DNA, 25 bp, Homo sapien
acacttggccagtatgccttggaca

SEQ ID NO: 3028476 - DNA, 25 bp, Homo sapien
gagactaactaggagcctgaccctg

SEQ ID NO: 3028477 - DNA, 25 bp, Homo sapien
ggattcctcaatcactccagggtgg

SEQ ID NO: 3028478 - DNA, 25 bp, Homo sapien
gagggccgccctaatacaatgccag

SEQ ID NO: 3028479 - DNA, 25 bp, Homo sapien
tagattctaccaaggcctaagagta

SEQ ID NO: 3028480 - DNA, 25 bp, Homo sapien
tcccagatggttccgcttcatcaga

SEQ ID NO: 3028481 - DNA, 25 bp, Homo sapien
tcatcagaatctcttcggccagctg

SEQ ID NO: 3028482 - DNA, 25 bp, Homo sapien
gctgccgggaaatcctgcccgagta

SEQ ID NO: 3028483 - DNA, 25 bp, Homo sapien
ggagctctcactctcccggatcagg

SEQ ID NO: 3028484 - DNA, 25 bp, Homo sapien
ccggagctcggccttgtaccagttc

SEQ ID NO: 3028485 - DNA, 25 bp, Homo sapien
ggcttgacgcggatgtagttcttgg

SEQ ID NO: 3028486 - DNA, 25 bp, Homo sapien
tcttgggaataaatccctcgacacc

SEQ ID NO: 3028487 - DNA, 25 bp, Homo sapien
tcgacaccccggagctcggccttgt

SEQ ID NO: 3028488 - DNA, 25 bp, Homo sapien
tagaagccctcgttcctcagtgctg

SEQ ID NO: 3028489 - DNA, 25 bp, Homo sapien
gaattagaagccctcgttcctcagt

SEQ ID NO: 3028490 - DNA, 25 bp, Homo sapien
gattctcaggctccgacaccaggag

SEQ ID NO: 3028491 - DNA, 25 bp, Homo sapien
acagtcggggactcgtaggaggctt

SEQ ID NO: 3028492 - DNA, 25 bp, Homo sapien
gccacgcactgagccttggggtgaa

SEQ ID NO: 3028493 - DNA, 25 bp, Homo sapien
atgccacgcactgagccttggggtg

SEQ ID NO: 3028494 - DNA, 25 bp, Homo sapien
cactgagccttggggtgaaggtcgg

SEQ ID NO: 3028495 - DNA, 25 bp, Homo sapien
ctgagccttggggtgaaggtcgggg

SEQ ID NO: 3028496 - DNA, 25 bp, Homo sapien
gtccctcgcatttagacagctcagg

SEQ ID NO: 3028497 - DNA, 25 bp, Homo sapien
cagctcaggggtgacaattcagtgg

SEQ ID NO: 3028498 - DNA, 25 bp, Homo sapien
gtcacctagggtccctcgcatttag

SEQ ID NO: 3028499 - DNA, 25 bp, Homo sapien
cacagccaccagtggtcacctaggg

SEQ ID NO: 3028500 - DNA, 25 bp, Homo sapien
tgaaagctgtacagggccacggact

SEQ ID NO: 3028501 - DNA, 25 bp, Homo sapien
tgtagcctgaaagctgtacagggcc

SEQ ID NO: 3028502 - DNA, 25 bp, Homo sapien
gagtgtgtctcccttgttgaaggcc

SEQ ID NO: 3028503 - DNA, 25 bp, Homo sapien
gctcgtcgctctctgtagcctgaaa

SEQ ID NO: 3028504 - DNA, 25 bp, Homo sapien
cctttgttttgagtgcgcgtttgtt

SEQ ID NO: 3028505 - DNA, 25 bp, Homo sapien
cagtcgaggacggtcttcctttgtt

SEQ ID NO: 3028506 - DNA, 25 bp, Homo sapien
tgagtgcgcgtttgttcttttgaag

SEQ ID NO: 3028507 - DNA, 25 bp, Homo sapien
tgcttcctctgcagtcgaggacggt

SEQ ID NO: 3028508 - DNA, 25 bp, Homo sapien
tgggaggatcgtttcggtcctggat

SEQ ID NO: 3028509 - DNA, 25 bp, Homo sapien
ttgtactcctgcctctgaggacaga

SEQ ID NO: 3028510 - DNA, 25 bp, Homo sapien
gtgggaggatcgtttcggtcctgga

SEQ ID NO: 3028511 - DNA, 25 bp, Homo sapien
attgtactcctgcctctgaggacag

SEQ ID NO: 3028512 - DNA, 25 bp, Homo sapien
tcttctctgagctccaaatgcctct

SEQ ID NO: 3028513 - DNA, 25 bp, Homo sapien
ttctctgagctccaaatgcctcttg

SEQ ID NO: 3028514 - DNA, 25 bp, Homo sapien
tctgagctccaaatgcctcttgggc

SEQ ID NO: 3028515 - DNA, 25 bp, Homo sapien
tgagctccaaatgcctcttgggcgc

SEQ ID NO: 3028516 - DNA, 25 bp, Homo sapien
tctcagatgtataacagcccagata

SEQ ID NO: 3028517 - DNA, 25 bp, Homo sapien
cccctggacgtttctcagatgtata

SEQ ID NO: 3028518 - DNA, 25 bp, Homo sapien
gacgtttctcagatgtataacagcc

SEQ ID NO: 3028519 - DNA, 25 bp, Homo sapien
gtataacagcccagataaaactcat

SEQ ID NO: 3028520 - DNA, 25 bp, Homo sapien
cctgggctacgtagcaagactccat

SEQ ID NO: 3028521 - DNA, 25 bp, Homo sapien
cataagaaaatccgttaacgtaatg

SEQ ID NO: 3028522 - DNA, 25 bp, Homo sapien
tgcagggggtggttcaacataagaa

SEQ ID NO: 3028523 - DNA, 25 bp, Homo sapien
gtgagacaacgattcttgccaagga

SEQ ID NO: 3028524 - DNA, 25 bp, Homo sapien
aatcagtgagacaacgattcttgcc

SEQ ID NO: 3028525 - DNA, 25 bp, Homo sapien
catgccaatggctacacgaatgtac

SEQ ID NO: 3028526 - DNA, 25 bp, Homo sapien
tctgcaacatgttacaacgtgaatg

SEQ ID NO: 3028527 - DNA, 25 bp, Homo sapien
cagtgagctgtcacatcatgcatca

SEQ ID NO: 3028528 - DNA, 25 bp, Homo sapien
ggacaatattgcatgtttccactta

SEQ ID NO: 3028529 - DNA, 25 bp, Homo sapien
tcgacaagctgttattgccaaacta

SEQ ID NO: 3028530 - DNA, 25 bp, Homo sapien
ccatcagttaaaagtttgcggcaga

SEQ ID NO: 3028531 - DNA, 25 bp, Homo sapien
tggcatcggaactagcgaaagtttc

SEQ ID NO: 3028532 - DNA, 25 bp, Homo sapien
ctatttgtttcctaatggcatcgga

SEQ ID NO: 3028533 - DNA, 25 bp, Homo sapien
cgctgaaacaggaggcgaaaacctt

SEQ ID NO: 3028534 - DNA, 25 bp, Homo sapien
cccggagtttacgagctagtctctg

SEQ ID NO: 3028535 - DNA, 25 bp, Homo sapien
tctctgtcattgagccatcaagaag

SEQ ID NO: 3028536 - DNA, 25 bp, Homo sapien
gcctcgcgccaagactaaaattaaa

SEQ ID NO: 3028537 - DNA, 25 bp, Homo sapien
cactccccaatacggagagaagaac

SEQ ID NO: 3028538 - DNA, 25 bp, Homo sapien
ccaagcaacgccagaaagccggctt

SEQ ID NO: 3028539 - DNA, 25 bp, Homo sapien
ctcagaccgcgttctctccctctca

SEQ ID NO: 3028540 - DNA, 25 bp, Homo sapien
ttgcagccaagcaacgccagaaagc

SEQ ID NO: 3028541 - DNA, 25 bp, Homo sapien
tctgagcgttgtgcagaggaccctg

SEQ ID NO: 3028542 - DNA, 25 bp, Homo sapien
ctctgagcgttgtgcagaggaccct

SEQ ID NO: 3028543 - DNA, 25 bp, Homo sapien
gctctgagcgttgtgcagaggaccc

SEQ ID NO: 3028544 - DNA, 25 bp, Homo sapien
cagcctagtgtgcagactggagtga

SEQ ID NO: 3028545 - DNA, 25 bp, Homo sapien
ctcaaggctacagtgttcacaccac

SEQ ID NO: 3028546 - DNA, 25 bp, Homo sapien
ggcaagagacgctgtttctacaaaa

SEQ ID NO: 3028547 - DNA, 25 bp, Homo sapien
accgcgcctggcaagagacgctgtt

SEQ ID NO: 3028548 - DNA, 25 bp, Homo sapien
tgtgctactgtaacatgagccccta

SEQ ID NO: 3028549 - DNA, 25 bp, Homo sapien
aactgggattcgaacgtgtgctact

SEQ ID NO: 3028550 - DNA, 25 bp, Homo sapien
ccagccactggtgggagatcttgcc

SEQ ID NO: 3028551 - DNA, 25 bp, Homo sapien
gagcccctaaccacaggagtctctg

SEQ ID NO: 3028552 - DNA, 25 bp, Homo sapien
ggcccgtgtctgctcaatgactgaa

SEQ ID NO: 3028553 - DNA, 25 bp, Homo sapien
taaacagttctgcatcatcgcccaa

SEQ ID NO: 3028554 - DNA, 25 bp, Homo sapien
gtaacacacgcacatatcctctggg

SEQ ID NO: 3028555 - DNA, 25 bp, Homo sapien
gagtaggctgtaaagtgctatcccc

SEQ ID NO: 3028556 - DNA, 25 bp, Homo sapien
tgaggaggtgttccccatcgggacc

SEQ ID NO: 3028557 - DNA, 25 bp, Homo sapien
cccagtgtggttaatgacgtgacca

SEQ ID NO: 3028558 - DNA, 25 bp, Homo sapien
cagagccccttgcttgacggaagag

SEQ ID NO: 3028559 - DNA, 25 bp, Homo sapien
gaacagcagcatcgctatacgtgga

SEQ ID NO: 3028560 - DNA, 25 bp, Homo sapien
ctgggtcttcacacccttgagtgaa

SEQ ID NO: 3028561 - DNA, 25 bp, Homo sapien
ggattagaacccatgtttcttggcc

SEQ ID NO: 3028562 - DNA, 25 bp, Homo sapien
gagtgaagcatcctttttagtaacc

SEQ ID NO: 3028563 - DNA, 25 bp, Homo sapien
ggtacaggactcaatcaaggtccca

SEQ ID NO: 3028564 - DNA, 25 bp, Homo sapien
tggggatcgtctggcacagcccact

SEQ ID NO: 3028565 - DNA, 25 bp, Homo sapien
tggtgaggtttggtgtgtccgagcc

SEQ ID NO: 3028566 - DNA, 25 bp, Homo sapien
gtgtccgagccgaagagcagccaat

SEQ ID NO: 3028567 - DNA, 25 bp, Homo sapien
acaggcctggggatcgtctggcaca

SEQ ID NO: 3028568 - DNA, 25 bp, Homo sapien
cccatctgggatgccttgtctttta

SEQ ID NO: 3028569 - DNA, 25 bp, Homo sapien
atacctttactccacaaatatgtgc

SEQ ID NO: 3028570 - DNA, 25 bp, Homo sapien
cgtctcagactctccaagtgctagg

SEQ ID NO: 3028571 - DNA, 25 bp, Homo sapien
tgtgcttaggcattgcttgctgtgg

SEQ ID NO: 3028572 - DNA, 25 bp, Homo sapien
tgccaacaggtaagctggcagggcc

SEQ ID NO: 3028573 - DNA, 25 bp, Homo sapien
gcctctcagttaaggacatttgcaa

SEQ ID NO: 3028574 - DNA, 25 bp, Homo sapien
gataatggagatgcaattgtgttct

SEQ ID NO: 3028575 - DNA, 25 bp, Homo sapien
ttacctactgtgtccgcgtcagcct

SEQ ID NO: 3028576 - DNA, 25 bp, Homo sapien
aaaataatcgagtgtaaggcaggcc

SEQ ID NO: 3028577 - DNA, 25 bp, Homo sapien
cacaaaacatgattgggagggcact

SEQ ID NO: 3028578 - DNA, 25 bp, Homo sapien
gaataggcacagatctccacagctg

SEQ ID NO: 3028579 - DNA, 25 bp, Homo sapien
taacataaaaacagcctgggacagg

SEQ ID NO: 3028580 - DNA, 25 bp, Homo sapien
gagtatgttattgattttgtgaatg

SEQ ID NO: 3028581 - DNA, 25 bp, Homo sapien
atggattctgattaaccaaagggga

SEQ ID NO: 3028582 - DNA, 25 bp, Homo sapien
gagaagggatcatcgggtagggttc

SEQ ID NO: 3028583 - DNA, 25 bp, Homo sapien
agaactggagtagttcagagaacca

SEQ ID NO: 3028584 - DNA, 25 bp, Homo sapien
tctcttgtagaaaggtgctatgcac

SEQ ID NO: 3028585 - DNA, 25 bp, Homo sapien
gaaaatctcagcctatcagctgggc

SEQ ID NO: 3028586 - DNA, 25 bp, Homo sapien
caggtgaggagctacggctttctca

SEQ ID NO: 3028587 - DNA, 25 bp, Homo sapien
tagtggatagatgttggtccctggc

SEQ ID NO: 3028588 - DNA, 25 bp, Homo sapien
ctgaactcaggtgttcaggagcagc

SEQ ID NO: 3028589 - DNA, 25 bp, Homo sapien
taacatgctgacaccccgtttctgc

SEQ ID NO: 3028590 - DNA, 25 bp, Homo sapien
cctggagtggcgtgtgcgcctttaa

SEQ ID NO: 3028591 - DNA, 25 bp, Homo sapien
gatcacctgagatcacgcgttggag

SEQ ID NO: 3028592 - DNA, 25 bp, Homo sapien
cgctgaaacaggaggcgaaaacctt

SEQ ID NO: 3028593 - DNA, 25 bp, Homo sapien
cccggagtttacgagctagtctctg

SEQ ID NO: 3028594 - DNA, 25 bp, Homo sapien
tctctgtcattgagccatcaagaag

SEQ ID NO: 3028595 - DNA, 25 bp, Homo sapien
gcctcgcgccaagactaaaattaaa

SEQ ID NO: 3028596 - DNA, 25 bp, Homo sapien
ttgcagccaagcaacgccagaaagc

SEQ ID NO: 3028597 - DNA, 25 bp, Homo sapien
cactccccaatacggagagaagaac

SEQ ID NO: 3028598 - DNA, 25 bp, Homo sapien
ccaagcaacgccagaaagccggctt

SEQ ID NO: 3028599 - DNA, 25 bp, Homo sapien
ctcagaccgcgttctctccctctca

SEQ ID NO: 3028600 - DNA, 25 bp, Homo sapien
caaaacactacaagaggcagaaaaa

SEQ ID NO: 3028601 - DNA, 25 bp, Homo sapien
tatcaacatccctttgcatatcagt

SEQ ID NO: 3028602 - DNA, 25 bp, Homo sapien
tatatcaacatccctttgcatatca

SEQ ID NO: 3028603 - DNA, 25 bp, Homo sapien
atatcaacatccctttgcatatcag

SEQ ID NO: 3028604 - DNA, 25 bp, Homo sapien
cactgtgtgggatcagcacgtctgc

SEQ ID NO: 3028605 - DNA, 25 bp, Homo sapien
ttgaaacaagctcaagctgttcact

SEQ ID NO: 3028606 - DNA, 25 bp, Homo sapien
tgggatcagcacgtctgctgctagc

SEQ ID NO: 3028607 - DNA, 25 bp, Homo sapien
tcagccggcctgttttgaaacaagc

SEQ ID NO: 3028608 - DNA, 25 bp, Homo sapien
tgcccaggtcaaaactgtcaggagc

SEQ ID NO: 3028609 - DNA, 25 bp, Homo sapien
gagccagcaccggtgtttcctggga

SEQ ID NO: 3028610 - DNA, 25 bp, Homo sapien
tggaagcgaccctcagagaaatcct

SEQ ID NO: 3028611 - DNA, 25 bp, Homo sapien
tgtccaaggcatactggccaagtgt

SEQ ID NO: 3028612 - DNA, 25 bp, Homo sapien
tgggttgtacacagcaccagcaggt

SEQ ID NO: 3028613 - DNA, 25 bp, Homo sapien
ccagcaggtggagccattgaccctt

SEQ ID NO: 3028614 - DNA, 25 bp, Homo sapien
cacagcaccagcaggtggagccatt

SEQ ID NO: 3028615 - DNA, 25 bp, Homo sapien
ggtggagccattgacccttggcttc

SEQ ID NO: 3028616 - DNA, 25 bp, Homo sapien
cggttccggggccatctggactcag

SEQ ID NO: 3028617 - DNA, 25 bp, Homo sapien
caactcaggcccacaatcccagtgc

SEQ ID NO: 3028618 - DNA, 25 bp, Homo sapien
aactcaggcccacaatcccagtgcc

SEQ ID NO: 3028619 - DNA, 25 bp, Homo sapien
ttccggggccatctggactcagatt

SEQ ID NO: 3028620 - DNA, 25 bp, Homo sapien
ctccgcgtcacgagcacatgaacta

SEQ ID NO: 3028621 - DNA, 25 bp, Homo sapien
tcacgagcacatgaactagctctct

SEQ ID NO: 3028622 - DNA, 25 bp, Homo sapien
cgcgtcacgagcacatgaactagct

SEQ ID NO: 3028623 - DNA, 25 bp, Homo sapien
cgtcacgagcacatgaactagctct

SEQ ID NO: 3028624 - DNA, 25 bp, Homo sapien
tctcatacatgttcttgcgcaaatt

SEQ ID NO: 3028625 - DNA, 25 bp, Homo sapien
agtccccagcagatgacgtacatta

SEQ ID NO: 3028626 - DNA, 25 bp, Homo sapien
gacgtacattataccctgcattctg

SEQ ID NO: 3028627 - DNA, 25 bp, Homo sapien
cttgcgcaaatttaactgcagggta

SEQ ID NO: 3028628 - DNA, 25 bp, Homo sapien
aataaacagctgaccgagcacagtg

SEQ ID NO: 3028629 - DNA, 25 bp, Homo sapien
caccgtgctggcttgcctttggttc

SEQ ID NO: 3028630 - DNA, 25 bp, Homo sapien
cagatcaaagaaccctacccgatga

SEQ ID NO: 3028631 - DNA, 25 bp, Homo sapien
ttcccctttggttaatcagaatcca

SEQ ID NO: 3028632 - DNA, 25 bp, Homo sapien
tcaagactgagatgtcaggccaggt

SEQ ID NO: 3028633 - DNA, 25 bp, Homo sapien
tagttgtattcatccagtgccctcc

SEQ ID NO: 3028634 - DNA, 25 bp, Homo sapien
cactccttaaggcaaactacttggg

SEQ ID NO: 3028635 - DNA, 25 bp, Homo sapien
actttgggagccgatggatcactca

SEQ ID NO: 3028636 - DNA, 25 bp, Homo sapien
gggctctagacaaggctgaccatca

SEQ ID NO: 3028637 - DNA, 25 bp, Homo sapien
catcaggatccactggttggtccag

SEQ ID NO: 3028638 - DNA, 25 bp, Homo sapien
taattagaagaatgccaggaggact

SEQ ID NO: 3028639 - DNA, 25 bp, Homo sapien
gagatctcggaacagactggttctc

SEQ ID NO: 3028640 - DNA, 25 bp, Homo sapien
tcatgcaactgtagttttcttagcc

SEQ ID NO: 3028641 - DNA, 25 bp, Homo sapien
tgtgagggaggctgacgcggacaca

SEQ ID NO: 3028642 - DNA, 25 bp, Homo sapien
ggacacagtaggtaagaggccaaga

SEQ ID NO: 3028643 - DNA, 25 bp, Homo sapien
atgcaactgtagttttcttagcccc

SEQ ID NO: 3028644 - DNA, 25 bp, Homo sapien
gcactgagcagaaagaagaacacaa

SEQ ID NO: 3028645 - DNA, 25 bp, Homo sapien
tgcaaatgtccttaactgagaggca

SEQ ID NO: 3028646 - DNA, 25 bp, Homo sapien
ggctgactgctaattggctttagga

SEQ ID NO: 3028647 - DNA, 25 bp, Homo sapien
tgccagcttacctgttggcacacct

SEQ ID NO: 3028648 - DNA, 25 bp, Homo sapien
tgacagtagcatccctagaacctag

SEQ ID NO: 3028649 - DNA, 25 bp, Homo sapien
cagagatgcgctcaggaacccagtt

SEQ ID NO: 3028650 - DNA, 25 bp, Homo sapien
ggctgcacccctcaggagtctaggt

SEQ ID NO: 3028651 - DNA, 25 bp, Homo sapien
tcaggcctgactcacagtgtgtgct

SEQ ID NO: 3028652 - DNA, 25 bp, Homo sapien
tgttcaccagagatgagcctaggct

SEQ ID NO: 3028653 - DNA, 25 bp, Homo sapien
gctttggctagagggtaccctgttc

SEQ ID NO: 3028654 - DNA, 25 bp, Homo sapien
aggccacgtgctcaaggtgtgcagg

SEQ ID NO: 3028655 - DNA, 25 bp, Homo sapien
tatgaggggcatgtgcctcgccttg

SEQ ID NO: 3028656 - DNA, 25 bp, Homo sapien
gtgggctgtgccagacgatccccag

SEQ ID NO: 3028657 - DNA, 25 bp, Homo sapien
ccgaggcccaggctgaaatccggtt

SEQ ID NO: 3028658 - DNA, 25 bp, Homo sapien
tttccaaggccttgtcaagtgggct

SEQ ID NO: 3028659 - DNA, 25 bp, Homo sapien
ttggctgctcttcggctcggacaca

SEQ ID NO: 3028660 - DNA, 25 bp, Homo sapien
caaaggtcgactcctgtatgcaggg

SEQ ID NO: 3028661 - DNA, 25 bp, Homo sapien
agtaggtgcccaatcataacagcag

SEQ ID NO: 3028662 - DNA, 25 bp, Homo sapien
gcccaggaaggtgaatttaccagcc

SEQ ID NO: 3028663 - DNA, 25 bp, Homo sapien
tttaccagccagctcacaaatggac

SEQ ID NO: 3028664 - DNA, 25 bp, Homo sapien
gaagcaggacatggccccagtgagg

SEQ ID NO: 3028665 - DNA, 25 bp, Homo sapien
tctgccagcacctgccccgggtggg

SEQ ID NO: 3028666 - DNA, 25 bp, Homo sapien
gccagcacctgccccgggtgggccc

SEQ ID NO: 3028667 - DNA, 25 bp, Homo sapien
ccgggtgggccctgcagcatggcca

SEQ ID NO: 3028668 - DNA, 25 bp, Homo sapien
cacctgccccgggtgggccctgcag

SEQ ID NO: 3028669 - DNA, 25 bp, Homo sapien
gtttatttcccctatcactgtgaac

SEQ ID NO: 3028670 - DNA, 25 bp, Homo sapien
aacccggagaccagccatggctggc

SEQ ID NO: 3028671 - DNA, 25 bp, Homo sapien
gacgtcctctgtaatgcgcttggcg

SEQ ID NO: 3028672 - DNA, 25 bp, Homo sapien
cccttgtttacagcgtggctgatgc

SEQ ID NO: 3028673 - DNA, 25 bp, Homo sapien
tcttcgtgaccataggctcccattt

SEQ ID NO: 3028674 - DNA, 25 bp, Homo sapien
tttccaggaaatagatagcattttc

SEQ ID NO: 3028675 - DNA, 25 bp, Homo sapien
attttgccccactcaactagctctt

SEQ ID NO: 3028676 - DNA, 25 bp, Homo sapien
tctgtatcccaaggatgctgccttc

SEQ ID NO: 3028677 - DNA, 25 bp, Homo sapien
taaagataaatcaactggaggcaga

SEQ ID NO: 3028678 - DNA, 25 bp, Homo sapien
aaagataaatcaactggaggcagat

SEQ ID NO: 3028679 - DNA, 25 bp, Homo sapien
aagataaatcaactggaggcagatc

SEQ ID NO: 3028680 - DNA, 25 bp, Homo sapien
ctaaagataaatcaactggaggcag

SEQ ID NO: 3028681 - DNA, 25 bp, Homo sapien
tctggctgttccatgtgtctcttgg

SEQ ID NO: 3028682 - DNA, 25 bp, Homo sapien
tgcatctgcaggttagctgaaggtc

SEQ ID NO: 3028683 - DNA, 25 bp, Homo sapien
gggggacaatcttctcacagcagaa

SEQ ID NO: 3028684 - DNA, 25 bp, Homo sapien
tgtggaagtgcacctcaagcctttg

SEQ ID NO: 3028685 - DNA, 25 bp, Homo sapien
tggaagaacctggacttcggaatca

SEQ ID NO: 3028686 - DNA, 25 bp, Homo sapien
tgcagttgcaggtggaagaacctgg

SEQ ID NO: 3028687 - DNA, 25 bp, Homo sapien
ggaagaacctggacttcggaatcac

SEQ ID NO: 3028688 - DNA, 25 bp, Homo sapien
gtggaagaacctggacttcggaatc

SEQ ID NO: 3028689 - DNA, 25 bp, Homo sapien
gggatcagtaaatgtctcttactca

SEQ ID NO: 3028690 - DNA, 25 bp, Homo sapien
cggaagtacaggagccagattgcca

SEQ ID NO: 3028691 - DNA, 25 bp, Homo sapien
caaagtgacctcagggatgcggaag

SEQ ID NO: 3028692 - DNA, 25 bp, Homo sapien
caactataaaaagggatcagtaaat

SEQ ID NO: 3028693 - DNA, 25 bp, Homo sapien
tctgctatcattgcgcctccatggg

SEQ ID NO: 3028694 - DNA, 25 bp, Homo sapien
tgccagtaattctgctatcattgcg

SEQ ID NO: 3028695 - DNA, 25 bp, Homo sapien
ccagcaggttaacagtgccagtaat

SEQ ID NO: 3028696 - DNA, 25 bp, Homo sapien
ttcccactccagcaggttaacagtg

SEQ ID NO: 3028697 - DNA, 25 bp, Homo sapien
caaggccagcgctgcacgactccag

SEQ ID NO: 3028698 - DNA, 25 bp, Homo sapien
gccagcgctgcacgactccaggggg

SEQ ID NO: 3028699 - DNA, 25 bp, Homo sapien
tctgatgaccgagattgccgacctg

SEQ ID NO: 3028700 - DNA, 25 bp, Homo sapien
gcttgattacggagactgaaccttc

SEQ ID NO: 3028701 - DNA, 25 bp, Homo sapien
tagggtgcgcacttaccaaggacag

SEQ ID NO: 3028702 - DNA, 25 bp, Homo sapien
caacgtggtggccttctcggagatc

SEQ ID NO: 3028703 - DNA, 25 bp, Homo sapien
tctgtgggcaaagcatgcaggttct

SEQ ID NO: 3028704 - DNA, 25 bp, Homo sapien
gggttacgggactgagccatcatgc

SEQ ID NO: 3028705 - DNA, 25 bp, Homo sapien
tggctgcatagactgaccactggca

SEQ ID NO: 3028706 - DNA, 25 bp, Homo sapien
cagtcgggatctaccaagttgtgca

SEQ ID NO: 3028707 - DNA, 25 bp, Homo sapien
gttaggagttcaagaccagcctggc

SEQ ID NO: 3028708 - DNA, 25 bp, Homo sapien
ctggtgtagtccgggtggggtggct

SEQ ID NO: 3028709 - DNA, 25 bp, Homo sapien
cacgcctgtaatcccagcagtttgg

SEQ ID NO: 3028710 - DNA, 25 bp, Homo sapien
gaggccgaggcaggcagatcacgag

SEQ ID NO: 3028711 - DNA, 25 bp, Homo sapien
tcataatgcaaaaggccgccttcct

SEQ ID NO: 3028712 - DNA, 25 bp, Homo sapien
cctgcaacaatgagagagtggcaca

SEQ ID NO: 3028713 - DNA, 25 bp, Homo sapien
gagaaggtccgtgcatttgatgcga

SEQ ID NO: 3028714 - DNA, 25 bp, Homo sapien
tcaggtggtcagaagggcccattca

SEQ ID NO: 3028715 - DNA, 25 bp, Homo sapien
tcagatagagttgtcctgccccttg

SEQ ID NO: 3028716 - DNA, 25 bp, Homo sapien
taagaattcctgtaccgtgaagcat

SEQ ID NO: 3028717 - DNA, 25 bp, Homo sapien
tgaagcatcccgtcgtggcaatcac

SEQ ID NO: 3028718 - DNA, 25 bp, Homo sapien
gtaaattgcccatgcctagcttcca

SEQ ID NO: 3028719 - DNA, 25 bp, Homo sapien
gaattaaatccactagagcgagctt

SEQ ID NO: 3028720 - DNA, 25 bp, Homo sapien
caacgtggctctatgcttgtgtacc

SEQ ID NO: 3028721 - DNA, 25 bp, Homo sapien
tacgaatataccaacatcctgaaag

SEQ ID NO: 3028722 - DNA, 25 bp, Homo sapien
tgtgagttcaaagtaaacaccacca

SEQ ID NO: 3028723 - DNA, 25 bp, Homo sapien
cgggtccctgggcaacagtccctag

SEQ ID NO: 3028724 - DNA, 25 bp, Homo sapien
tgcttctgtgcccacgggtccctgg

SEQ ID NO: 3028725 - DNA, 25 bp, Homo sapien
gaaatggcagttgtcccgagggcgt

SEQ ID NO: 3028726 - DNA, 25 bp, Homo sapien
aatccacgctcaggctaaagatggg

SEQ ID NO: 3028727 - DNA, 25 bp, Homo sapien
catgatgtgactttgaggccccaac

SEQ ID NO: 3028728 - DNA, 25 bp, Homo sapien
cagaagattacccttcgcaccggca

SEQ ID NO: 3028729 - DNA, 25 bp, Homo sapien
tgggccagccttacaggtcagtaga

SEQ ID NO: 3028730 - DNA, 25 bp, Homo sapien
ttccttcagacggtgcagggcctgg

SEQ ID NO: 3028731 - DNA, 25 bp, Homo sapien
tcttttgcaaccttttgatgctaat

SEQ ID NO: 3028732 - DNA, 25 bp, Homo sapien
cttttgcaaccttttgatgctaatt

SEQ ID NO: 3028733 - DNA, 25 bp, Homo sapien
tcttcaatgtgtgcctcaaagggtg

SEQ ID NO: 3028734 - DNA, 25 bp, Homo sapien
cacgcagctgcttagccaacaagag

SEQ ID NO: 3028735 - DNA, 25 bp, Homo sapien
caaagggtgccatggacaagaacga

SEQ ID NO: 3028736 - DNA, 25 bp, Homo sapien
taaccccaagctctcattggctgag

SEQ ID NO: 3028737 - DNA, 25 bp, Homo sapien
tatacaagtacggaacaggaaattg

SEQ ID NO: 3028738 - DNA, 25 bp, Homo sapien
gcctgaggcttgtacgtgcacacca

SEQ ID NO: 3028739 - DNA, 25 bp, Homo sapien
ggtgacttagtatttcccagctgct

SEQ ID NO: 3028740 - DNA, 25 bp, Homo sapien
caccacaggctagaggcttcaggga

SEQ ID NO: 3028741 - DNA, 25 bp, Homo sapien
ggctgttaagtttcctcagagaatg

SEQ ID NO: 3028742 - DNA, 25 bp, Homo sapien
tcagagaatgcatgagggagttgtc

SEQ ID NO: 3028743 - DNA, 25 bp, Homo sapien
tgaaggagcccgtgtaggaaaactc

SEQ ID NO: 3028744 - DNA, 25 bp, Homo sapien
aagggagcgccttagctaagctggc

SEQ ID NO: 3028745 - DNA, 25 bp, Homo sapien
ctgctctaggctcaccgcacatggg

SEQ ID NO: 3028746 - DNA, 25 bp, Homo sapien
acagggaagcgccacatgagggagg

SEQ ID NO: 3028747 - DNA, 25 bp, Homo sapien
gtaacaagagatatgcctgcctggc

SEQ ID NO: 3028748 - DNA, 25 bp, Homo sapien
ggatgcctcaatccagactttggag

SEQ ID NO: 3028749 - DNA, 25 bp, Homo sapien
tcgggaaggcagcccttcattatca

SEQ ID NO: 3028750 - DNA, 25 bp, Homo sapien
gatgggcagcggctgacttcgggaa

SEQ ID NO: 3028751 - DNA, 25 bp, Homo sapien
gccgatgggcagcggctgacttcgg

SEQ ID NO: 3028752 - DNA, 25 bp, Homo sapien
cagcggctgacttcgggaaggcagc

SEQ ID NO: 3028753 - DNA, 25 bp, Homo sapien
tcactgggggaagctctggggtggg

SEQ ID NO: 3028754 - DNA, 25 bp, Homo sapien
tgggggaagctctggggtgggctgg

SEQ ID NO: 3028755 - DNA, 25 bp, Homo sapien
tggggtgggctgggccccaacacac

SEQ ID NO: 3028756 - DNA, 25 bp, Homo sapien
actgggggaagctctggggtgggct

SEQ ID NO: 3028757 - DNA, 25 bp, Homo sapien
aagccctgagaacggacacgggtca

SEQ ID NO: 3028758 - DNA, 25 bp, Homo sapien
tgtgtatcagaaggcccagtgtcat

SEQ ID NO: 3028759 - DNA, 25 bp, Homo sapien
ggtgacaaagccctgagaacggaca

SEQ ID NO: 3028760 - DNA, 25 bp, Homo sapien
tggtcaccacgttgaagaggagggt

SEQ ID NO: 3028761 - DNA, 25 bp, Homo sapien
cagaagggcagcatcagccaggctg

SEQ ID NO: 3028762 - DNA, 25 bp, Homo sapien
acagaagggcagcatcagccaggct

SEQ ID NO: 3028763 - DNA, 25 bp, Homo sapien
ggacagaagggcagcatcagccagg

SEQ ID NO: 3028764 - DNA, 25 bp, Homo sapien
ggggacagaagggcagcatcagcca

SEQ ID NO: 3028765 - DNA, 25 bp, Homo sapien
gcagagagagacccaggttgatctg

SEQ ID NO: 3028766 - DNA, 25 bp, Homo sapien
ggttgatctgggaatctcagcctca

SEQ ID NO: 3028767 - DNA, 25 bp, Homo sapien
cagagagagacccaggttgatctgg

SEQ ID NO: 3028768 - DNA, 25 bp, Homo sapien
gggaatctcagcctcagcgttctca

SEQ ID NO: 3028769 - DNA, 25 bp, Homo sapien
tcctatgtgcctggcaggtccccgg

SEQ ID NO: 3028770 - DNA, 25 bp, Homo sapien
cagacatgacaaaccctctgtgctc

SEQ ID NO: 3028771 - DNA, 25 bp, Homo sapien
gggaacatttgtgggctagctccta

SEQ ID NO: 3028772 - DNA, 25 bp, Homo sapien
cactcccaggctgtaacctgtatgg

SEQ ID NO: 3028773 - DNA, 25 bp, Homo sapien
gccaccaccttggggtctgtgtact

SEQ ID NO: 3028774 - DNA, 25 bp, Homo sapien
agccaccaccttggggtctgtgtac

SEQ ID NO: 3028775 - DNA, 25 bp, Homo sapien
gagccaccaccttggggtctgtgta

SEQ ID NO: 3028776 - DNA, 25 bp, Homo sapien
atgtcacttcccatcttggcaccca

SEQ ID NO: 3028777 - DNA, 25 bp, Homo sapien
gggtccaggacatgtcacttcccat

SEQ ID NO: 3028778 - DNA, 25 bp, Homo sapien
tgtggggtccaggacatgtcacttc

SEQ ID NO: 3028779 - DNA, 25 bp, Homo sapien
caggacatgtcacttcccatcttgg

SEQ ID NO: 3028780 - DNA, 25 bp, Homo sapien
gaggggctctcagctgccgcagagt

SEQ ID NO: 3028781 - DNA, 25 bp, Homo sapien
atggagctcccgttcccactgaatt

SEQ ID NO: 3028782 - DNA, 25 bp, Homo sapien
tggagctcccgttcccactgaattt

SEQ ID NO: 3028783 - DNA, 25 bp, Homo sapien
gcccagttgcgagcccctccacagg

SEQ ID NO: 3028784 - DNA, 25 bp, Homo sapien
aaaccctttcctcagcgagctgtcc

SEQ ID NO: 3028785 - DNA, 25 bp, Homo sapien
ttgcccagttgcgagcccctccaca

SEQ ID NO: 3028786 - DNA, 25 bp, Homo sapien
tgccttgcccagttgcgagcccctc

SEQ ID NO: 3028787 - DNA, 25 bp, Homo sapien
ggaacccagggagtcctccatgttc

SEQ ID NO: 3028788 - DNA, 25 bp, Homo sapien
taatggtcctcgagtcagaaggcca

SEQ ID NO: 3028789 - DNA, 25 bp, Homo sapien
ttgctgcccaactgcgctaatggtc

SEQ ID NO: 3028790 - DNA, 25 bp, Homo sapien
tgtgcctcactaatctgccggtggg

SEQ ID NO: 3028791 - DNA, 25 bp, Homo sapien
tttcccatctgacaagagtttttcc

SEQ ID NO: 3028792 - DNA, 25 bp, Homo sapien
gctgaagggagccccgtgactcagc

SEQ ID NO: 3028793 - DNA, 25 bp, Homo sapien
ggtaaaatcgcccggccttctgctg

SEQ ID NO: 3028794 - DNA, 25 bp, Homo sapien
tttaatgtcacattatgtcatgagc

SEQ ID NO: 3028795 - DNA, 25 bp, Homo sapien
tttgtcctcagtgggtggagcagct

SEQ ID NO: 3028796 - DNA, 25 bp, Homo sapien
cctcagtgggtggagcagcttgcag

SEQ ID NO: 3028797 - DNA, 25 bp, Homo sapien
ctatttgtcctcagtgggtggagca

SEQ ID NO: 3028798 - DNA, 25 bp, Homo sapien
tgtcctcagtgggtggagcagcttg

SEQ ID NO: 3028799 - DNA, 25 bp, Homo sapien
tgtaaacttctgcagtttagacgta

SEQ ID NO: 3028800 - DNA, 25 bp, Homo sapien
tctgcagtttagacgtagattctgg

SEQ ID NO: 3028801 - DNA, 25 bp, Homo sapien
gacgtagattctgggacaaacatgg

SEQ ID NO: 3028802 - DNA, 25 bp, Homo sapien
cagtttagacgtagattctgggaca

SEQ ID NO: 3028803 - DNA, 25 bp, Homo sapien
acaaatgtttttgcagacagagatg

SEQ ID NO: 3028804 - DNA, 25 bp, Homo sapien
gaaacaaatgtttttgcagacagag

SEQ ID NO: 3028805 - DNA, 25 bp, Homo sapien
aaacaaatgtttttgcagacagaga

SEQ ID NO: 3028806 - DNA, 25 bp, Homo sapien
ctgaaacaaatgtttttgcagacag

SEQ ID NO: 3028807 - DNA, 25 bp, Homo sapien
atagcctcgaaccacatcgttcccg

SEQ ID NO: 3028808 - DNA, 25 bp, Homo sapien
atcgttcccgaacacatctggtcca

SEQ ID NO: 3028809 - DNA, 25 bp, Homo sapien
tacacgctgagcacgatctgtggcc

SEQ ID NO: 3028810 - DNA, 25 bp, Homo sapien
cggccaggtgagaagggcacgtgca

SEQ ID NO: 3028811 - DNA, 25 bp, Homo sapien
taagcccaggctttgtgcacagtag

SEQ ID NO: 3028812 - DNA, 25 bp, Homo sapien
gaagctcggataagtccacacagtg

SEQ ID NO: 3028813 - DNA, 25 bp, Homo sapien
ccacgtgcagtagaaaggcctagat

SEQ ID NO: 3028814 - DNA, 25 bp, Homo sapien
tgatgacagcaggatggaattccct

SEQ ID NO: 3028815 - DNA, 25 bp, Homo sapien
agtgcttgccgcacatcttggctct

SEQ ID NO: 3028816 - DNA, 25 bp, Homo sapien
atcaatggggaagttccacaccagt

SEQ ID NO: 3028817 - DNA, 25 bp, Homo sapien
gtgcttgccgcacatcttggctctt

SEQ ID NO: 3028818 - DNA, 25 bp, Homo sapien
taaaggtgacatcaatggggaagtt

SEQ ID NO: 3028819 - DNA, 25 bp, Homo sapien
gcagtacttgcagtagaggtcatca

SEQ ID NO: 3028820 - DNA, 25 bp, Homo sapien
cagtacttgcagtagaggtcatcat

SEQ ID NO: 3028821 - DNA, 25 bp, Homo sapien
ccgtacacaaagcagtacttgcagt

SEQ ID NO: 3028822 - DNA, 25 bp, Homo sapien
ctggccgtacacaaagcagtacttg

SEQ ID NO: 3028823 - DNA, 25 bp, Homo sapien
tccacctgcccgttgaccatgagta

SEQ ID NO: 3028824 - DNA, 25 bp, Homo sapien
cgttgaccatgagtagaaagacgct

SEQ ID NO: 3028825 - DNA, 25 bp, Homo sapien
ccatgagtagaaagacgctaggact

SEQ ID NO: 3028826 - DNA, 25 bp, Homo sapien
agacgctaggactcgcggtcgccat

SEQ ID NO: 3028827 - DNA, 25 bp, Homo sapien
ccctagaaacagacggcgtagcgcg

SEQ ID NO: 3028828 - DNA, 25 bp, Homo sapien
agagacgccggcgttgccctagaaa

SEQ ID NO: 3028829 - DNA, 25 bp, Homo sapien
cacgtttcttggcagcgacaccttc

SEQ ID NO: 3028830 - DNA, 25 bp, Homo sapien
gcgtagcgcgcaggacacgtttctt

SEQ ID NO: 3028831 - DNA, 25 bp, Homo sapien
cccgccgaagcgcagaggcgaatga

SEQ ID NO: 3028832 - DNA, 25 bp, Homo sapien
cacgcgcagggagtgtgtgttcact

SEQ ID NO: 3028833 - DNA, 25 bp, Homo sapien
cgctcgactcagttgcacgcgcagg

SEQ ID NO: 3028834 - DNA, 25 bp, Homo sapien
ctcacgccctcagcaagccgagtgt

SEQ ID NO: 3028835 - DNA, 25 bp, Homo sapien
ctctatggtggcttctaagggttca

SEQ ID NO: 3028836 - DNA, 25 bp, Homo sapien
tctcctccccaacctgttccattgg

SEQ ID NO: 3028837 - DNA, 25 bp, Homo sapien
ggttcatgggtgttcttggtcccaa

SEQ ID NO: 3028838 - DNA, 25 bp, Homo sapien
gcttctaagggttcatgggtgttct

SEQ ID NO: 3028839 - DNA, 25 bp, Homo sapien
tggaacaccgcagggactgggcgga

SEQ ID NO: 3028840 - DNA, 25 bp, Homo sapien
gacagcgttaacaagggcggctgct

SEQ ID NO: 3028841 - DNA, 25 bp, Homo sapien
gggccagaccttgtgtcaggtgccc

SEQ ID NO: 3028842 - DNA, 25 bp, Homo sapien
tgggtgaagggccagaccttgtgtc

SEQ ID NO: 3028843 - DNA, 25 bp, Homo sapien
tagaagccgcctaggagtgaaacca

SEQ ID NO: 3028844 - DNA, 25 bp, Homo sapien
tgagggacccctccagttattgata

SEQ ID NO: 3028845 - DNA, 25 bp, Homo sapien
gggcggtgctccataaacatttgct

SEQ ID NO: 3028846 - DNA, 25 bp, Homo sapien
gacagctcggttccagcgagggctc

SEQ ID NO: 3028847 - DNA, 25 bp, Homo sapien
aatggcggacacaattccctgggcg

SEQ ID NO: 3028848 - DNA, 25 bp, Homo sapien
tcgggagccagtagccaaggtaaca

SEQ ID NO: 3028849 - DNA, 25 bp, Homo sapien
cggacgctctagaatcccggaggac

SEQ ID NO: 3028850 - DNA, 25 bp, Homo sapien
gagctgcagtccaacttggccggaa

SEQ ID NO: 3028851 - DNA, 25 bp, Homo sapien
ctccaggtgtaatttttggagttcg

SEQ ID NO: 3028852 - DNA, 25 bp, Homo sapien
tggagttcggggtaggacaccatca

SEQ ID NO: 3028853 - DNA, 25 bp, Homo sapien
gcacctgactccaggtgtaattttt

SEQ ID NO: 3028854 - DNA, 25 bp, Homo sapien
gaaatacaaggttcccttctgcacc

SEQ ID NO: 3028855 - DNA, 25 bp, Homo sapien
aatatgtttgtgtgtatgaagccag

SEQ ID NO: 3028856 - DNA, 25 bp, Homo sapien
tatgtttgtgtgtatgaagccagtt

SEQ ID NO: 3028857 - DNA, 25 bp, Homo sapien
catttgggggataaacaaatatgtt

SEQ ID NO: 3028858 - DNA, 25 bp, Homo sapien
ctacatttgggggataaacaaatat

SEQ ID NO: 3028859 - DNA, 25 bp, Homo sapien
gaaggtttattgagaccttcagtcc

SEQ ID NO: 3028860 - DNA, 25 bp, Homo sapien
tgaaggtttattgagaccttcagtc

SEQ ID NO: 3028861 - DNA, 25 bp, Homo sapien
tccctcatgtggctaaacctctcaa

SEQ ID NO: 3028862 - DNA, 25 bp, Homo sapien
gtggctaaacctctcaacacccaga

SEQ ID NO: 3028863 - DNA, 25 bp, Homo sapien
tctcaacacccagagggtatgggga

SEQ ID NO: 3028864 - DNA, 25 bp, Homo sapien
tatggggaagacctcatatgcatgc

SEQ ID NO: 3028865 - DNA, 25 bp, Homo sapien
tcagcttagcacactagggtggccc

SEQ ID NO: 3028866 - DNA, 25 bp, Homo sapien
gaactgctggcagtgtaacttcagg

SEQ ID NO: 3028867 - DNA, 25 bp, Homo sapien
gcctagaatacaccatgggccctgt

SEQ ID NO: 3028868 - DNA, 25 bp, Homo sapien
gctagaaccatgtgcctctcggaag

SEQ ID NO: 3028869 - DNA, 25 bp, Homo sapien
actcatggagaccatgggtgtccag

SEQ ID NO: 3028870 - DNA, 25 bp, Homo sapien
agggagcactcatggagaccatggg

SEQ ID NO: 3028871 - DNA, 25 bp, Homo sapien
gagcactcatggagaccatgggtgt

SEQ ID NO: 3028872 - DNA, 25 bp, Homo sapien
gcactcatggagaccatgggtgtcc

SEQ ID NO: 3028873 - DNA, 25 bp, Homo sapien
cattgaggttggcaaagtggcagct

SEQ ID NO: 3028874 - DNA, 25 bp, Homo sapien
tcctggtcccggtcgaaggtagaga

SEQ ID NO: 3028875 - DNA, 25 bp, Homo sapien
gagccacctaggtagaagccattga

SEQ ID NO: 3028876 - DNA, 25 bp, Homo sapien
tcctgaggagagagctgcgcagttc

SEQ ID NO: 3028877 - DNA, 25 bp, Homo sapien
ttcagtgtcaggaggtgcatgttct

SEQ ID NO: 3028878 - DNA, 25 bp, Homo sapien
gcgtacttggcataggccgtgttgt

SEQ ID NO: 3028879 - DNA, 25 bp, Homo sapien
gatggagaagtcagcgtacttggca

SEQ ID NO: 3028880 - DNA, 25 bp, Homo sapien
ggccgtgttgttctcaaagtcctcc

SEQ ID NO: 3028881 - DNA, 25 bp, Homo sapien
gtagtcattccagccgcggaagaaa

SEQ ID NO: 3028882 - DNA, 25 bp, Homo sapien
tactgagccattgaatctcttctgg

SEQ ID NO: 3028883 - DNA, 25 bp, Homo sapien
agtactctccatcagcacggccgaa

SEQ ID NO: 3028884 - DNA, 25 bp, Homo sapien
acggccgaagcccagcttgtagtca

SEQ ID NO: 3028885 - DNA, 25 bp, Homo sapien
gtccacttcccgccctcggtggtca

SEQ ID NO: 3028886 - DNA, 25 bp, Homo sapien
cctcggtggtcatgtcacagaagac

SEQ ID NO: 3028887 - DNA, 25 bp, Homo sapien
cgccctcggtggtcatgtcacagaa

SEQ ID NO: 3028888 - DNA, 25 bp, Homo sapien
cacttcccgccctcggtggtcatgt

SEQ ID NO: 3028889 - DNA, 25 bp, Homo sapien
gccctgggcatagatgtcgtcacag

SEQ ID NO: 3028890 - DNA, 25 bp, Homo sapien
tgggcatagatgtcgtcacagtcca

SEQ ID NO: 3028891 - DNA, 25 bp, Homo sapien
acacgccgtctgactggtagccctg

SEQ ID NO: 3028892 - DNA, 25 bp, Homo sapien
agatgaggtacacgccgtctgactg

SEQ ID NO: 3028893 - DNA, 25 bp, Homo sapien
cacgggggcgtggagagaagcagca

SEQ ID NO: 3028894 - DNA, 25 bp, Homo sapien
ctggggggcacacgggggcgtggag

SEQ ID NO: 3028895 - DNA, 25 bp, Homo sapien
cacacgggggcgtggagagaagcag

SEQ ID NO: 3028896 - DNA, 25 bp, Homo sapien
ggcacacgggggcgtggagagaagc

SEQ ID NO: 3028897 - DNA, 25 bp, Homo sapien
ttcccagctccagagatcccctgtt

SEQ ID NO: 3028898 - DNA, 25 bp, Homo sapien
agctccagagatcccctgttctctt

SEQ ID NO: 3028899 - DNA, 25 bp, Homo sapien
ctggcgatgggcagacagggtcagc

SEQ ID NO: 3028900 - DNA, 25 bp, Homo sapien
agagatcccctgttctctttgcatt

SEQ ID NO: 3028901 - DNA, 25 bp, Homo sapien
aagagaactccttgtgccttcatag

SEQ ID NO: 3028902 - DNA, 25 bp, Homo sapien
agtttcaagagaactccttgtgcct

SEQ ID NO: 3028903 - DNA, 25 bp, Homo sapien
tccttgtgccttcatagtgccctct

SEQ ID NO: 3028904 - DNA, 25 bp, Homo sapien
cttgtgccttcatagtgccctctgt

SEQ ID NO: 3028905 - DNA, 25 bp, Homo sapien
gctatgagtcccccgaccctgggcc

SEQ ID NO: 3028906 - DNA, 25 bp, Homo sapien
agagtggctgggtgtctgcggcccc

SEQ ID NO: 3028907 - DNA, 25 bp, Homo sapien
cagactgcaaccgcccagagttatg

SEQ ID NO: 3028908 - DNA, 25 bp, Homo sapien
gctcagagtggctgggtgtctgcgg

SEQ ID NO: 3028909 - DNA, 25 bp, Homo sapien
gtctgcggccccagactgcaaccgc

SEQ ID NO: 3028910 - DNA, 25 bp, Homo sapien
actccagaggggtctatgggtcctg

SEQ ID NO: 3028911 - DNA, 25 bp, Homo sapien
tcttactccagaggggtctatgggt

SEQ ID NO: 3028912 - DNA, 25 bp, Homo sapien
cctcttactccagaggggtctatgg

SEQ ID NO: 3028913 - DNA, 25 bp, Homo sapien
ggtcctggatccagttgggcatagt

SEQ ID NO: 3028914 - DNA, 25 bp, Homo sapien
gccagggtcaggacccggatgggga

SEQ ID NO: 3028915 - DNA, 25 bp, Homo sapien
gcacagacacagctgtggcgagagc

SEQ ID NO: 3028916 - DNA, 25 bp, Homo sapien
cgagagcaaggagggccactgggcc

SEQ ID NO: 3028917 - DNA, 25 bp, Homo sapien
cagacacagctgtggcgagagcaag

SEQ ID NO: 3028918 - DNA, 25 bp, Homo sapien
cctaatcagtcagacccaagaggag

SEQ ID NO: 3028919 - DNA, 25 bp, Homo sapien
tcctggcccaggagacgtgtcctgt

SEQ ID NO: 3028920 - DNA, 25 bp, Homo sapien
tgctggttcgcatcaatgcctctgg

SEQ ID NO: 3028921 - DNA, 25 bp, Homo sapien
gtggctttggccctattctagaaca

SEQ ID NO: 3028922 - DNA, 25 bp, Homo sapien
tttgcagcaggtatctcccaagtgg

SEQ ID NO: 3028923 - DNA, 25 bp, Homo sapien
tcagcatggtgtgagattgccactc

SEQ ID NO: 3028924 - DNA, 25 bp, Homo sapien
ggcccaaagggacgcatggatctga

SEQ ID NO: 3028925 - DNA, 25 bp, Homo sapien
tccagaaggcagagtaaacaagtca

SEQ ID NO: 3028926 - DNA, 25 bp, Homo sapien
tggagcctgagtccgctgcacggag

SEQ ID NO: 3028927 - DNA, 25 bp, Homo sapien
ctggagcctgagtccgctgcacgga

SEQ ID NO: 3028928 - DNA, 25 bp, Homo sapien
agcctgagtccgctgcacggagact

SEQ ID NO: 3028929 - DNA, 25 bp, Homo sapien
agctggagcctgagtccgctgcacg

SEQ ID NO: 3028930 - DNA, 25 bp, Homo sapien
cttagaaatggcatcaaaggtggcc

SEQ ID NO: 3028931 - DNA, 25 bp, Homo sapien
taggtagctgtaggtcttagaaatg

SEQ ID NO: 3028932 - DNA, 25 bp, Homo sapien
cctgatagggagacttggtaaatac

SEQ ID NO: 3028933 - DNA, 25 bp, Homo sapien
ccagaggtcgggggttaggtagctg

SEQ ID NO: 3028934 - DNA, 25 bp, Homo sapien
tgcccagggtggcagtgcagccccg

SEQ ID NO: 3028935 - DNA, 25 bp, Homo sapien
gttgcccagggtggcagtgcagccc

SEQ ID NO: 3028936 - DNA, 25 bp, Homo sapien
aagttgcccagggtggcagtgcagc

SEQ ID NO: 3028937 - DNA, 25 bp, Homo sapien
tgaagttgcccagggtggcagtgca

SEQ ID NO: 3028938 - DNA, 25 bp, Homo sapien
gtgtagcagtcatcgataccagcca

SEQ ID NO: 3028939 - DNA, 25 bp, Homo sapien
aggtgtagcagtcatcgataccagc

SEQ ID NO: 3028940 - DNA, 25 bp, Homo sapien
tgtagcagtcatcgataccagccat

SEQ ID NO: 3028941 - DNA, 25 bp, Homo sapien
agcagtcatcgataccagccatcat

SEQ ID NO: 3028942 - DNA, 25 bp, Homo sapien
aggtgcggagacgatgccagtgccc

SEQ ID NO: 3028943 - DNA, 25 bp, Homo sapien
tgaggcgtaccagcacagagccgca

SEQ ID NO: 3028944 - DNA, 25 bp, Homo sapien
atgaggcgtaccagcacagagccgc

SEQ ID NO: 3028945 - DNA, 25 bp, Homo sapien
ggtgcagggatgaggcgtaccagca

SEQ ID NO: 3028946 - DNA, 25 bp, Homo sapien
ctgggtgcagggatgaggcgtacca

SEQ ID NO: 3028947 - DNA, 25 bp, Homo sapien
caggaagaaatcaatgatctctgat

SEQ ID NO: 3028948 - DNA, 25 bp, Homo sapien
ccccaggaagaaatcaatgatctct

SEQ ID NO: 3028949 - DNA, 25 bp, Homo sapien
agaggcccccaggaagaaatcaatg

SEQ ID NO: 3028950 - DNA, 25 bp, Homo sapien
gaggcccccaggaagaaatcaatga

SEQ ID NO: 3028951 - DNA, 25 bp, Homo sapien
gaagagatagatctcctccagggac

SEQ ID NO: 3028952 - DNA, 25 bp, Homo sapien
gagaagagatagatctcctccaggg

SEQ ID NO: 3028953 - DNA, 25 bp, Homo sapien
cttaattgggcagggagaagagata

SEQ ID NO: 3028954 - DNA, 25 bp, Homo sapien
gggagaagagatagatctcctccag

SEQ ID NO: 3028955 - DNA, 25 bp, Homo sapien
ctcggccttgcctccgcgagctccg

SEQ ID NO: 3028956 - DNA, 25 bp, Homo sapien
tcggccttgcctccgcgagctccgc

SEQ ID NO: 3028957 - DNA, 25 bp, Homo sapien
caagcggcccaacttggtgacgggc

SEQ ID NO: 3028958 - DNA, 25 bp, Homo sapien
gccttgcctccgcgagctccgcggc

SEQ ID NO: 3028959 - DNA, 25 bp, Homo sapien
cgaccctggccccggatgccactgc

SEQ ID NO: 3028960 - DNA, 25 bp, Homo sapien
acggccgcgaccctggccccggatg

SEQ ID NO: 3028961 - DNA, 25 bp, Homo sapien
ccgcgaccctggccccggatgccac

SEQ ID NO: 3028962 - DNA, 25 bp, Homo sapien
cacggccgcgaccctggccccggat

SEQ ID NO: 3028963 - DNA, 25 bp, Homo sapien
ctcagggccaccagggcctccgggc

SEQ ID NO: 3028964 - DNA, 25 bp, Homo sapien
gggcccccccgctgcaccggcgtca

SEQ ID NO: 3028965 - DNA, 25 bp, Homo sapien
ccgctgcaccggcgtcatccgccat

SEQ ID NO: 3028966 - DNA, 25 bp, Homo sapien
ccccgctgcaccggcgtcatccgcc

SEQ ID NO: 3028967 - DNA, 25 bp, Homo sapien
tgaaaggggaatcggcatgtgcaaa

SEQ ID NO: 3028968 - DNA, 25 bp, Homo sapien
agtaactaggcccataggtgcatgc

SEQ ID NO: 3028969 - DNA, 25 bp, Homo sapien
gacagggatgttgcaatgtctgtgt

SEQ ID NO: 3028970 - DNA, 25 bp, Homo sapien
aagagatcacacatgctgaagagga

SEQ ID NO: 3028971 - DNA, 25 bp, Homo sapien
aaatattcaaatgagcgttttgaag

SEQ ID NO: 3028972 - DNA, 25 bp, Homo sapien
atggcaggggcagatcttggtggta

SEQ ID NO: 3028973 - DNA, 25 bp, Homo sapien
ccactgtggtgtgcctgcaagccta

SEQ ID NO: 3028974 - DNA, 25 bp, Homo sapien
gggccactgtggtgtgcctgcaagc

SEQ ID NO: 3028975 - DNA, 25 bp, Homo sapien
tggggaggtccactggtgtcccaaa

SEQ ID NO: 3028976 - DNA, 25 bp, Homo sapien
gaggtccactggtgtcccaaagcag

SEQ ID NO: 3028977 - DNA, 25 bp, Homo sapien
gggaggtccactggtgtcccaaagc

SEQ ID NO: 3028978 - DNA, 25 bp, Homo sapien
ggaggtccactggtgtcccaaagca

SEQ ID NO: 3028979 - DNA, 25 bp, Homo sapien
cagccgtgcatgatgccctgagcag

SEQ ID NO: 3028980 - DNA, 25 bp, Homo sapien
taatctctgaactgctcctctaggg

SEQ ID NO: 3028981 - DNA, 25 bp, Homo sapien
ttaatctctgaactgctcctctagg

SEQ ID NO: 3028982 - DNA, 25 bp, Homo sapien
tgaggccccccagccgtgcatgatg

SEQ ID NO: 3028983 - DNA, 25 bp, Homo sapien
tcctaagtgtagagataacatggca

SEQ ID NO: 3028984 - DNA, 25 bp, Homo sapien
gagaagtcggctttcagaacaggag

SEQ ID NO: 3028985 - DNA, 25 bp, Homo sapien
tgttcatgtcctaatagagttgccg

SEQ ID NO: 3028986 - DNA, 25 bp, Homo sapien
tgccgtttattagtgtacaagacaa

SEQ ID NO: 3028987 - DNA, 25 bp, Homo sapien
gctgcgcaactgagcactcacagtg

SEQ ID NO: 3028988 - DNA, 25 bp, Homo sapien
ggctgaattcccgaattactaagac

SEQ ID NO: 3028989 - DNA, 25 bp, Homo sapien
ggaactcggtcgctgtccttaccac

SEQ ID NO: 3028990 - DNA, 25 bp, Homo sapien
attactaagactcgcctctctcggg

SEQ ID NO: 3028991 - DNA, 25 bp, Homo sapien
gcgaaaagagaagtaaaccgatctc

SEQ ID NO: 3028992 - DNA, 25 bp, Homo sapien
tccaagagaactcatggatgggagg

SEQ ID NO: 3028993 - DNA, 25 bp, Homo sapien
gaccttgtttacacaaagatactcc

SEQ ID NO: 3028994 - DNA, 25 bp, Homo sapien
gagttgagtcttggctgcggaagca

SEQ ID NO: 3028995 - DNA, 25 bp, Homo sapien
cggtcacaggttgggctctccagaa

SEQ ID NO: 3028996 - DNA, 25 bp, Homo sapien
tgcaggtttcttagggcgtgccctg

SEQ ID NO: 3028997 - DNA, 25 bp, Homo sapien
ctctccagaagcagtgtctgagagg

SEQ ID NO: 3028998 - DNA, 25 bp, Homo sapien
gatccttatcagcagctaggcagtg

SEQ ID NO: 3028999 - DNA, 25 bp, Homo sapien
tgagacccagcaaaggttgctgatc

SEQ ID NO: 3029000 - DNA, 25 bp, Homo sapien
gcaaaggttgctgatctccttcttt

SEQ ID NO: 3029001 - DNA, 25 bp, Homo sapien
cagcaaaggttgctgatctccttct

SEQ ID NO: 3029002 - DNA, 25 bp, Homo sapien
gacccagcaaaggttgctgatctcc

SEQ ID NO: 3029003 - DNA, 25 bp, Homo sapien
ttcagaaagcagctatggagatggt

SEQ ID NO: 3029004 - DNA, 25 bp, Homo sapien
ttgcttgtgccagagaggccaataa

SEQ ID NO: 3029005 - DNA, 25 bp, Homo sapien
ttgtgccagagaggccaataaggtc

SEQ ID NO: 3029006 - DNA, 25 bp, Homo sapien
cagttcagaaagcagctatggagat

SEQ ID NO: 3029007 - DNA, 25 bp, Homo sapien
tcacttcacaggtaatacaagtgct

SEQ ID NO: 3029008 - DNA, 25 bp, Homo sapien
caagggattgatcctgatttgccta

SEQ ID NO: 3029009 - DNA, 25 bp, Homo sapien
ttgattttagatgatagggtgacct

SEQ ID NO: 3029010 - DNA, 25 bp, Homo sapien
tgggtttcccactacaggtaagctg

SEQ ID NO: 3029011 - DNA, 25 bp, Homo sapien
ctatggtgatggctaagtgcaggca

SEQ ID NO: 3029012 - DNA, 25 bp, Homo sapien
tggctaagtgcaggcatcacatccc

SEQ ID NO: 3029013 - DNA, 25 bp, Homo sapien
ggcatcacatcccacagttaggaaa

SEQ ID NO: 3029014 - DNA, 25 bp, Homo sapien
aacctgacgctttgaaccgctatgg

SEQ ID NO: 3029015 - DNA, 25 bp, Homo sapien
ctccacccccctccatgctcaagtg

SEQ ID NO: 3029016 - DNA, 25 bp, Homo sapien
tccacccccctccatgctcaagtga

SEQ ID NO: 3029017 - DNA, 25 bp, Homo sapien
ctagaattggatcatgagcttgggc

SEQ ID NO: 3029018 - DNA, 25 bp, Homo sapien
gaattgggtcatgcatgtccattcc

SEQ ID NO: 3029019 - DNA, 25 bp, Homo sapien
tcggatgccacaatatctgaaggag

SEQ ID NO: 3029020 - DNA, 25 bp, Homo sapien
ttttcactcaggcttcatggctaga

SEQ ID NO: 3029021 - DNA, 25 bp, Homo sapien
tctataaaggcatcagatggtcctc

SEQ ID NO: 3029022 - DNA, 25 bp, Homo sapien
gagtggccttcaaaccttcaagaaa

SEQ ID NO: 3029023 - DNA, 25 bp, Homo sapien
tacagagcctaaagattcacggaag

SEQ ID NO: 3029024 - DNA, 25 bp, Homo sapien
gcaataaatctaccactatatacct

SEQ ID NO: 3029025 - DNA, 25 bp, Homo sapien
cattccctagatgagtactgattag

SEQ ID NO: 3029026 - DNA, 25 bp, Homo sapien
tcatcatatccctagtccagtgagt

SEQ ID NO: 3029027 - DNA, 25 bp, Homo sapien
ttttaacgaggtgcattctttctga

SEQ ID NO: 3029028 - DNA, 25 bp, Homo sapien
ttcagcaagttaagaaccgtatatg

SEQ ID NO: 3029029 - DNA, 25 bp, Homo sapien
ccacctttaaggagtgaggagttat

SEQ ID NO: 3029030 - DNA, 25 bp, Homo sapien
gagttatgctctgtatcacgaggac

SEQ ID NO: 3029031 - DNA, 25 bp, Homo sapien
tgggctactcacctgtacaatgtgc

SEQ ID NO: 3029032 - DNA, 25 bp, Homo sapien
tgtgctcagccaaccacacgttgtt

SEQ ID NO: 3029033 - DNA, 25 bp, Homo sapien
tgattccggccaataaaacgcaagt

SEQ ID NO: 3029034 - DNA, 25 bp, Homo sapien
caaaagttcgggagctctgcgatct

SEQ ID NO: 3029035 - DNA, 25 bp, Homo sapien
ggagcgcgttccgttagtttacaga

SEQ ID NO: 3029036 - DNA, 25 bp, Homo sapien
gataaacttccaacacgaccagctg

SEQ ID NO: 3029037 - DNA, 25 bp, Homo sapien
gatctcaaggatggcatgcggtgtc

SEQ ID NO: 3029038 - DNA, 25 bp, Homo sapien
gcttgggtagcagaaaggcagtcct

SEQ ID NO: 3029039 - DNA, 25 bp, Homo sapien
tatgcctgtgatacccgctgagcag

SEQ ID NO: 3029040 - DNA, 25 bp, Homo sapien
tatcgtccagtgtcaaaggtgcctt

SEQ ID NO: 3029041 - DNA, 25 bp, Homo sapien
tctgcgggtaaatgaaatgggttct

SEQ ID NO: 3029042 - DNA, 25 bp, Homo sapien
tgggttctatgcatacagtggagta

SEQ ID NO: 3029043 - DNA, 25 bp, Homo sapien
aaggtggaagcaacctatgtgtctg

SEQ ID NO: 3029044 - DNA, 25 bp, Homo sapien
caacctatgtgtctgcgggtaaatg

SEQ ID NO: 3029045 - DNA, 25 bp, Homo sapien
gtgaccctgggaacattaactgcct

SEQ ID NO: 3029046 - DNA, 25 bp, Homo sapien
cccgtagatgtagtgagggtaacaa

SEQ ID NO: 3029047 - DNA, 25 bp, Homo sapien
cgtttgtgcctcagttacccgtaga

SEQ ID NO: 3029048 - DNA, 25 bp, Homo sapien
tgcaccaaatcgaagaaagcactgg

SEQ ID NO: 3029049 - DNA, 25 bp, Homo sapien
aatcagtaaggccaaaaatatcctc

SEQ ID NO: 3029050 - DNA, 25 bp, Homo sapien
cagtaaggccaaaaatatcctctga

SEQ ID NO: 3029051 - DNA, 25 bp, Homo sapien
ttataatcagtaaggccaaaaatat

SEQ ID NO: 3029052 - DNA, 25 bp, Homo sapien
tataatcagtaaggccaaaaatatc

SEQ ID NO: 3029053 - DNA, 25 bp, Homo sapien
tgtgaaatccgcataacaatagcac

SEQ ID NO: 3029054 - DNA, 25 bp, Homo sapien
tggtaggtacccaagtcgccaaagc

SEQ ID NO: 3029055 - DNA, 25 bp, Homo sapien
ccagggcctgattcttggtaggtac

SEQ ID NO: 3029056 - DNA, 25 bp, Homo sapien
ggtcagcgtctcagtcatgtgatct

SEQ ID NO: 3029057 - DNA, 25 bp, Homo sapien
gctgttggggttgagaagcacccag

SEQ ID NO: 3029058 - DNA, 25 bp, Homo sapien
ctgttggggttgagaagcacccaga

SEQ ID NO: 3029059 - DNA, 25 bp, Homo sapien
tgttggggttgagaagcacccagaa

SEQ ID NO: 3029060 - DNA, 25 bp, Homo sapien
ttggggttgagaagcacccagaact

SEQ ID NO: 3029061 - DNA, 25 bp, Homo sapien
cagcagatgcgccaagaagaacctt

SEQ ID NO: 3029062 - DNA, 25 bp, Homo sapien
gaacctttgccggaacatccacagg

SEQ ID NO: 3029063 - DNA, 25 bp, Homo sapien
gagcctcagtcagatcagcagatgc

SEQ ID NO: 3029064 - DNA, 25 bp, Homo sapien
tgttggaaagacaggcgagcctcag

SEQ ID NO: 3029065 - DNA, 25 bp, Homo sapien
aaactgcgtgctgtaagctgggacc

SEQ ID NO: 3029066 - DNA, 25 bp, Homo sapien
gaagccagggataaaagcacctcag

SEQ ID NO: 3029067 - DNA, 25 bp, Homo sapien
gaataattttgcctgcccggttgct

SEQ ID NO: 3029068 - DNA, 25 bp, Homo sapien
tgtgttgttccgacataccgaggac

SEQ ID NO: 3029069 - DNA, 25 bp, Homo sapien
gggccacgaggcccattctccagga

SEQ ID NO: 3029070 - DNA, 25 bp, Homo sapien
ccacgaggcccattctccaggaagg

SEQ ID NO: 3029071 - DNA, 25 bp, Homo sapien
gaaggcaggtaaaggcttgcactgt

SEQ ID NO: 3029072 - DNA, 25 bp, Homo sapien
ggaaggcaggtaaaggcttgcactg

SEQ ID NO: 3029073 - DNA, 25 bp, Homo sapien
aggtcgagccggacgctgtcacgct

SEQ ID NO: 3029074 - DNA, 25 bp, Homo sapien
tgtgaacgcgccttgctttccgcgc

SEQ ID NO: 3029075 - DNA, 25 bp, Homo sapien
gtcacggtgggtgcctgatttcgcc

SEQ ID NO: 3029076 - DNA, 25 bp, Homo sapien
ccgcagtttcttgcgcagttgatga

SEQ ID NO: 3029077 - DNA, 25 bp, Homo sapien
aggatgcgctcggtgttgaccaagt

SEQ ID NO: 3029078 - DNA, 25 bp, Homo sapien
aagagcaggaggatgcgctcggtgt

SEQ ID NO: 3029079 - DNA, 25 bp, Homo sapien
caggaggatgcgctcggtgttgacc

SEQ ID NO: 3029080 - DNA, 25 bp, Homo sapien
tgcgctcggtgttgaccaagtcggc

SEQ ID NO: 3029081 - DNA, 25 bp, Homo sapien
gatccccacgcgcttgaggttcttg

SEQ ID NO: 3029082 - DNA, 25 bp, Homo sapien
gaagtatgatccccacgcgcttgag

SEQ ID NO: 3029083 - DNA, 25 bp, Homo sapien
gacccctctctgaagtatgatcccc

SEQ ID NO: 3029084 - DNA, 25 bp, Homo sapien
gtatgatccccacgcgcttgaggtt

SEQ ID NO: 3029085 - DNA, 25 bp, Homo sapien
ctcagtttgataaaagcttgtgaca

SEQ ID NO: 3029086 - DNA, 25 bp, Homo sapien
aggccatggtcctgctttacatggg

SEQ ID NO: 3029087 - DNA, 25 bp, Homo sapien
taagcgagaggtctaacgtcagagc

SEQ ID NO: 3029088 - DNA, 25 bp, Homo sapien
ctttacatgggtagactgagccccg

SEQ ID NO: 3029089 - DNA, 25 bp, Homo sapien
ccatcatcctgctgttaattctact

SEQ ID NO: 3029090 - DNA, 25 bp, Homo sapien
gctcctaccatcatgccgcctagtc

SEQ ID NO: 3029091 - DNA, 25 bp, Homo sapien
catgccgcctagtcataatataatt

SEQ ID NO: 3029092 - DNA, 25 bp, Homo sapien
catcatcctgctgttaattctactg

SEQ ID NO: 3029093 - DNA, 25 bp, Homo sapien
tccatgccacctattacaccacatc

SEQ ID NO: 3029094 - DNA, 25 bp, Homo sapien
catgccacctattacaccacatcct

SEQ ID NO: 3029095 - DNA, 25 bp, Homo sapien
tctccatgccacctattacaccaca

SEQ ID NO: 3029096 - DNA, 25 bp, Homo sapien
atgccacctattacaccacatccta

SEQ ID NO: 3029097 - DNA, 25 bp, Homo sapien
gactctcttctgcatcattgaacgc

SEQ ID NO: 3029098 - DNA, 25 bp, Homo sapien
ctctcttctgcatcattgaacgcaa

SEQ ID NO: 3029099 - DNA, 25 bp, Homo sapien
gcaagactctcttctgcatcattga

SEQ ID NO: 3029100 - DNA, 25 bp, Homo sapien
agactctcttctgcatcattgaacg

SEQ ID NO: 3029101 - DNA, 25 bp, Homo sapien
tctaaacaccctaatcaattggctt

SEQ ID NO: 3029102 - DNA, 25 bp, Homo sapien
ctaacatctaaacaccctaatcaat

SEQ ID NO: 3029103 - DNA, 25 bp, Homo sapien
gctaggctggtggaattcaaaccca

SEQ ID NO: 3029104 - DNA, 25 bp, Homo sapien
cccacgaaaatttagctaacatcta

SEQ ID NO: 3029105 - DNA, 25 bp, Homo sapien
aattcaacatgagaaatcacttcag

SEQ ID NO: 3029106 - DNA, 25 bp, Homo sapien
tgcaattcaacatgagaaatcactt

SEQ ID NO: 3029107 - DNA, 25 bp, Homo sapien
ttcaacatgagaaatcacttcaggg

SEQ ID NO: 3029108 - DNA, 25 bp, Homo sapien
gcaattcaacatgagaaatcacttc

SEQ ID NO: 3029109 - DNA, 25 bp, Homo sapien
acagtctcatgcttactcagccatt

SEQ ID NO: 3029110 - DNA, 25 bp, Homo sapien
agaggtcttgacctctgtctttaga

SEQ ID NO: 3029111 - DNA, 25 bp, Homo sapien
taaaaagaggtcttgacctctgtct

SEQ ID NO: 3029112 - DNA, 25 bp, Homo sapien
ttagatttacagtctcatgcttact

SEQ ID NO: 3029113 - DNA, 25 bp, Homo sapien
cacttatgttcatcagtcgttgatt

SEQ ID NO: 3029114 - DNA, 25 bp, Homo sapien
ggatagtgggcaccaccttaagcct

SEQ ID NO: 3029115 - DNA, 25 bp, Homo sapien
tacctgctattcagcgcatgagtgg

SEQ ID NO: 3029116 - DNA, 25 bp, Homo sapien
tgggcaccaccttaagccttctaat

SEQ ID NO: 3029117 - DNA, 25 bp, Homo sapien
ggtgcacccgatatgacatttccct

SEQ ID NO: 3029118 - DNA, 25 bp, Homo sapien
cgatatgacatttccctggataaat

SEQ ID NO: 3029119 - DNA, 25 bp, Homo sapien
ctactcttacttgcatcctcaacag

SEQ ID NO: 3029120 - DNA, 25 bp, Homo sapien
gcatcctcaacagtagaagccggcg

SEQ ID NO: 3029121 - DNA, 25 bp, Homo sapien
cctggagctctactgggaagacgga

SEQ ID NO: 3029122 - DNA, 25 bp, Homo sapien
ttccagaagctgaccggctctcatt

SEQ ID NO: 3029123 - DNA, 25 bp, Homo sapien
tttctgcccttggatcatggctgtg

SEQ ID NO: 3029124 - DNA, 25 bp, Homo sapien
tcttgtgtgcagtaaggctaaggac

SEQ ID NO: 3029125 - DNA, 25 bp, Homo sapien
tgaacttaggctagttttcaaaaca

SEQ ID NO: 3029126 - DNA, 25 bp, Homo sapien
ttttatcaactgaacttaggctagt

SEQ ID NO: 3029127 - DNA, 25 bp, Homo sapien
tgaaacttccgccttccgagctcaa

SEQ ID NO: 3029128 - DNA, 25 bp, Homo sapien
ggcctcaagttcttaatcttaacaa

SEQ ID NO: 3029129 - DNA, 25 bp, Homo sapien
ctggccctagattttattgaagtaa

SEQ ID NO: 3029130 - DNA, 25 bp, Homo sapien
ttatcataccaaaaaggaaactcag

SEQ ID NO: 3029131 - DNA, 25 bp, Homo sapien
gattattaacctctcactccccata

SEQ ID NO: 3029132 - DNA, 25 bp, Homo sapien
ggaaactcagattattaacctctca

SEQ ID NO: 3029133 - DNA, 25 bp, Homo sapien
agtgggagagttgcataccaacttg

SEQ ID NO: 3029134 - DNA, 25 bp, Homo sapien
tctgaataacccattaccatcagac

SEQ ID NO: 3029135 - DNA, 25 bp, Homo sapien
gtgggagagttgcataccaacttga

SEQ ID NO: 3029136 - DNA, 25 bp, Homo sapien
taagaagaacgtgctcaccatgctg

SEQ ID NO: 3029137 - DNA, 25 bp, Homo sapien
tgggttactgctaaaccagttaaga

SEQ ID NO: 3029138 - DNA, 25 bp, Homo sapien
tggatgaggcctatattcagccaca

SEQ ID NO: 3029139 - DNA, 25 bp, Homo sapien
gattttatgcttgagaatcttcctg

SEQ ID NO: 3029140 - DNA, 25 bp, Homo sapien
gaaacatgagatccacaagccagct

SEQ ID NO: 3029141 - DNA, 25 bp, Homo sapien
caaggattgaataggacgtagaacc

SEQ ID NO: 3029142 - DNA, 25 bp, Homo sapien
gaaacatttgttgggcagctgaacc

SEQ ID NO: 3029143 - DNA, 25 bp, Homo sapien
taactgactctgtccggataaggag

SEQ ID NO: 3029144 - DNA, 25 bp, Homo sapien
tgaagaaatataggatttaagttgg

SEQ ID NO: 3029145 - DNA, 25 bp, Homo sapien
gtcctaagccaagacttgaagaaat

SEQ ID NO: 3029146 - DNA, 25 bp, Homo sapien
atataggatttaagttggtagaaag

SEQ ID NO: 3029147 - DNA, 25 bp, Homo sapien
taacaatctttcagcgtgtttaaag

SEQ ID NO: 3029148 - DNA, 25 bp, Homo sapien
ctagaagaggtgcaagtccttgtct

SEQ ID NO: 3029149 - DNA, 25 bp, Homo sapien
aaagcatcctgtttgacagggaaat

SEQ ID NO: 3029150 - DNA, 25 bp, Homo sapien
aagaggtgcaagtccttgtcttgct

SEQ ID NO: 3029151 - DNA, 25 bp, Homo sapien
gcatcctgtttgacagggaaattga

SEQ ID NO: 3029152 - DNA, 25 bp, Homo sapien
tcagcttcctactgaaaatgctagg

SEQ ID NO: 3029153 - DNA, 25 bp, Homo sapien
gaattccatgtagagacttcagctt

SEQ ID NO: 3029154 - DNA, 25 bp, Homo sapien
gatttagagcagaagtattgtacac

SEQ ID NO: 3029155 - DNA, 25 bp, Homo sapien
tgaaccttgagattgcagcagccct

SEQ ID NO: 3029156 - DNA, 25 bp, Homo sapien
gtgatcaaacttaaaagtcattgcc

SEQ ID NO: 3029157 - DNA, 25 bp, Homo sapien
ttaaatcataccaaaaatagtaaga

SEQ ID NO: 3029158 - DNA, 25 bp, Homo sapien
tgcaaacactctgtgatcaaactta

SEQ ID NO: 3029159 - DNA, 25 bp, Homo sapien
aaatatgcaaacactctgtgatcaa

SEQ ID NO: 3029160 - DNA, 25 bp, Homo sapien
taagccactgcggttggtcatactg

SEQ ID NO: 3029161 - DNA, 25 bp, Homo sapien
gagtaggcccctggtcagaagtgcc

SEQ ID NO: 3029162 - DNA, 25 bp, Homo sapien
tcaagagcttggtacttcccagggc

SEQ ID NO: 3029163 - DNA, 25 bp, Homo sapien
tctggacaagaagcgagtaagccac

SEQ ID NO: 3029164 - DNA, 25 bp, Homo sapien
tatctgcagtgtcccatttgaagcc

SEQ ID NO: 3029165 - DNA, 25 bp, Homo sapien
taatagtgacaatccctggactctg

SEQ ID NO: 3029166 - DNA, 25 bp, Homo sapien
gactctgactcgtgcagttggctga

SEQ ID NO: 3029167 - DNA, 25 bp, Homo sapien
tgtagagcagtccaagtcacagaag

SEQ ID NO: 3029168 - DNA, 25 bp, Homo sapien
ctagtgcctggtggctaggatcctg

SEQ ID NO: 3029169 - DNA, 25 bp, Homo sapien
agtgcctggtggctaggatcctgac

SEQ ID NO: 3029170 - DNA, 25 bp, Homo sapien
tagtgcctggtggctaggatcctga

SEQ ID NO: 3029171 - DNA, 25 bp, Homo sapien
gagtcctgaagaagtccacgtggca

SEQ ID NO: 3029172 - DNA, 25 bp, Homo sapien
tgtttcactgatagtctgctggtag

SEQ ID NO: 3029173 - DNA, 25 bp, Homo sapien
cactcagaccttgaatacgttgtca

SEQ ID NO: 3029174 - DNA, 25 bp, Homo sapien
taggagctgaaagggcgtgggcctc

SEQ ID NO: 3029175 - DNA, 25 bp, Homo sapien
tgctgccggcctgaatgtttcttag

SEQ ID NO: 3029176 - DNA, 25 bp, Homo sapien
gctgccggcctgaatgtttcttagc

SEQ ID NO: 3029177 - DNA, 25 bp, Homo sapien
ttcagggtctttgagagaacactgc

SEQ ID NO: 3029178 - DNA, 25 bp, Homo sapien
taggattcagggtctttgagagaac

SEQ ID NO: 3029179 - DNA, 25 bp, Homo sapien
gcttgcagacttgagttgtgccttt

SEQ ID NO: 3029180 - DNA, 25 bp, Homo sapien
tctgcttgcagacttgagttgtgcc

SEQ ID NO: 3029181 - DNA, 25 bp, Homo sapien
tccagccgggcagtataagcaacaa

SEQ ID NO: 3029182 - DNA, 25 bp, Homo sapien
gtccagccgggcagtataagcaaca

SEQ ID NO: 3029183 - DNA, 25 bp, Homo sapien
agtccagccgggcagtataagcaac

SEQ ID NO: 3029184 - DNA, 25 bp, Homo sapien
gaacaatgtccgacgaccacccagg

SEQ ID NO: 3029185 - DNA, 25 bp, Homo sapien
tgatgggaacaatgtccgacgacca

SEQ ID NO: 3029186 - DNA, 25 bp, Homo sapien
tgggaacaatgtccgacgaccaccc

SEQ ID NO: 3029187 - DNA, 25 bp, Homo sapien
gatgggaacaatgtccgacgaccac

SEQ ID NO: 3029188 - DNA, 25 bp, Homo sapien
tgcccagtggtaggccgatgatgta

SEQ ID NO: 3029189 - DNA, 25 bp, Homo sapien
ccgatgatgtaatatgtgatggcat

SEQ ID NO: 3029190 - DNA, 25 bp, Homo sapien
tgatggcattcacagcggcaccaaa

SEQ ID NO: 3029191 - DNA, 25 bp, Homo sapien
gttcctctcagaactccgccataga

SEQ ID NO: 3029192 - DNA, 25 bp, Homo sapien
gaaaacagctggaactctgaatacg

SEQ ID NO: 3029193 - DNA, 25 bp, Homo sapien
aatacgtctctagcccacacatgga

SEQ ID NO: 3029194 - DNA, 25 bp, Homo sapien
cacacatggatctgtcagcagagaa

SEQ ID NO: 3029195 - DNA, 25 bp, Homo sapien
taattggctgaacactaagctctgc

SEQ ID NO: 3029196 - DNA, 25 bp, Homo sapien
gtgttaagtatatagccagccctcc

SEQ ID NO: 3029197 - DNA, 25 bp, Homo sapien
gaaccaattgcccaaggatacctag

SEQ ID NO: 3029198 - DNA, 25 bp, Homo sapien
gcatccgtggatgcaaccagccatg

SEQ ID NO: 3029199 - DNA, 25 bp, Homo sapien
tttaaactcataggaggatgggcat

SEQ ID NO: 3029200 - DNA, 25 bp, Homo sapien
cacgtgaaagacactataaaccggc

SEQ ID NO: 3029201 - DNA, 25 bp, Homo sapien
gatggcctcaaacacgtgaaagaca

SEQ ID NO: 3029202 - DNA, 25 bp, Homo sapien
ctataaaccggcaagacctggctca

SEQ ID NO: 3029203 - DNA, 25 bp, Homo sapien
gaaagacactataaaccggcaagac

SEQ ID NO: 3029204 - DNA, 25 bp, Homo sapien
caggatgcttatcagggtgcccagg

SEQ ID NO: 3029205 - DNA, 25 bp, Homo sapien
atcattggtaaaaatatgccccagc

SEQ ID NO: 3029206 - DNA, 25 bp, Homo sapien
tggtaaaaatatgccccagctgatt

SEQ ID NO: 3029207 - DNA, 25 bp, Homo sapien
ttcaggatgcttatcagggtgccca

SEQ ID NO: 3029208 - DNA, 25 bp, Homo sapien
agagccatccccactcggacacaga

SEQ ID NO: 3029209 - DNA, 25 bp, Homo sapien
ctatgctgagcacgcccgagacggc

SEQ ID NO: 3029210 - DNA, 25 bp, Homo sapien
ccgagacggccgagcgcttggcctg

SEQ ID NO: 3029211 - DNA, 25 bp, Homo sapien
tggcctgcacagtatccgcagcccc

SEQ ID NO: 3029212 - DNA, 25 bp, Homo sapien
gagtgacatgggctgcataagcaag

SEQ ID NO: 3029213 - DNA, 25 bp, Homo sapien
tgacatgggctgcataagcaagacg

SEQ ID NO: 3029214 - DNA, 25 bp, Homo sapien
tgggctgcataagcaagacgatggc

SEQ ID NO: 3029215 - DNA, 25 bp, Homo sapien
cataagcaagacgatggctgtgtct

SEQ ID NO: 3029216 - DNA, 25 bp, Homo sapien
tcctggcgtaagctgagcagggtct

SEQ ID NO: 3029217 - DNA, 25 bp, Homo sapien
tctggacctggtgggcacgagaggc

SEQ ID NO: 3029218 - DNA, 25 bp, Homo sapien
tccttcgggagacagagatagcttc

SEQ ID NO: 3029219 - DNA, 25 bp, Homo sapien
ccttggtcgtcaggttgtgggcacc

SEQ ID NO: 3029220 - DNA, 25 bp, Homo sapien
agtggccacctcgtagatgacagcc

SEQ ID NO: 3029221 - DNA, 25 bp, Homo sapien
tggccacctcgtagatgacagcctg

SEQ ID NO: 3029222 - DNA, 25 bp, Homo sapien
cacagtggccacctcgtagatgaca

SEQ ID NO: 3029223 - DNA, 25 bp, Homo sapien
cacctcgtagatgacagcctgggca

SEQ ID NO: 3029224 - DNA, 25 bp, Homo sapien
ccatgaggaagctcccgatctcata

SEQ ID NO: 3029225 - DNA, 25 bp, Homo sapien
catgaggaagctcccgatctcatag

SEQ ID NO: 3029226 - DNA, 25 bp, Homo sapien
aagacggtctgtgcaaactgggaga

SEQ ID NO: 3029227 - DNA, 25 bp, Homo sapien
ttcagcacaatgtagagaaggagga

SEQ ID NO: 3029228 - DNA, 25 bp, Homo sapien
cggtctgtgcaaactgggagatgat

SEQ ID NO: 3029229 - DNA, 25 bp, Homo sapien
ctgcccacgtctccaggtgcagctt

SEQ ID NO: 3029230 - DNA, 25 bp, Homo sapien
gggcatagttggccacaccgttgac

SEQ ID NO: 3029231 - DNA, 25 bp, Homo sapien
agggcatagttggccacaccgttga

SEQ ID NO: 3029232 - DNA, 25 bp, Homo sapien
cctgctaaggtgtgagtgagatgga

SEQ ID NO: 3029233 - DNA, 25 bp, Homo sapien
aaaactggccctgctaaggtgtgag

SEQ ID NO: 3029234 - DNA, 25 bp, Homo sapien
actggccctgctaaggtgtgagtga

SEQ ID NO: 3029235 - DNA, 25 bp, Homo sapien
tgaaaactggccctgctaaggtgtg

SEQ ID NO: 3029236 - DNA, 25 bp, Homo sapien
cccctttcaagagctggttcacaga

SEQ ID NO: 3029237 - DNA, 25 bp, Homo sapien
gttggaagtgacccctttcaagagc

SEQ ID NO: 3029238 - DNA, 25 bp, Homo sapien
gcctctgtgcgggaggtcaggatat

SEQ ID NO: 3029239 - DNA, 25 bp, Homo sapien
tcccactggaatagggcagtgtgct

SEQ ID NO: 3029240 - DNA, 25 bp, Homo sapien
caaatattttgccagcagattgtaa

SEQ ID NO: 3029241 - DNA, 25 bp, Homo sapien
aatattttgccagcagattgtaaag

SEQ ID NO: 3029242 - DNA, 25 bp, Homo sapien
attttgccagcagattgtaaagaaa

SEQ ID NO: 3029243 - DNA, 25 bp, Homo sapien
tgcaaatattttgccagcagattgt

SEQ ID NO: 3029244 - DNA, 25 bp, Homo sapien
gcctggtagggctgtctagcacaca

SEQ ID NO: 3029245 - DNA, 25 bp, Homo sapien
gctgtctagcacacagaactgccag

SEQ ID NO: 3029246 - DNA, 25 bp, Homo sapien
tggtgccatggaggctacactgtca

SEQ ID NO: 3029247 - DNA, 25 bp, Homo sapien
gccagtcgtaacaggcatcactaag

SEQ ID NO: 3029248 - DNA, 25 bp, Homo sapien
ctgcaagtcaaacagtgaagcactg

SEQ ID NO: 3029249 - DNA, 25 bp, Homo sapien
tgcaagtcaaacagtgaagcactgg

SEQ ID NO: 3029250 - DNA, 25 bp, Homo sapien
gcaagtcaaacagtgaagcactggg

SEQ ID NO: 3029251 - DNA, 25 bp, Homo sapien
aatcattacatagtcctgggtcaac

SEQ ID NO: 3029252 - DNA, 25 bp, Homo sapien
ggaagtcctggaatgaaaatcatta

SEQ ID NO: 3029253 - DNA, 25 bp, Homo sapien
gaagtcctggaatgaaaatcattac

SEQ ID NO: 3029254 - DNA, 25 bp, Homo sapien
aagtcctggaatgaaaatcattaca

SEQ ID NO: 3029255 - DNA, 25 bp, Homo sapien
acgcccacgtgcttcttgttggggc

SEQ ID NO: 3029256 - DNA, 25 bp, Homo sapien
cgcccacgtgcttcttgttggggct

SEQ ID NO: 3029257 - DNA, 25 bp, Homo sapien
gcccacgtgcttcttgttggggctg

SEQ ID NO: 3029258 - DNA, 25 bp, Homo sapien
cgggacattcctaaatcccgcgcgg

SEQ ID NO: 3029259 - DNA, 25 bp, Homo sapien
cccgcgtcagccgtttccactgccc

SEQ ID NO: 3029260 - DNA, 25 bp, Homo sapien
cgccccgcgtcagccgtttccactg

SEQ ID NO: 3029261 - DNA, 25 bp, Homo sapien
tttccactgcccgggacattcctaa

SEQ ID NO: 3029262 - DNA, 25 bp, Homo sapien
ccagcggtgtgtggcggacccggcg

SEQ ID NO: 3029263 - DNA, 25 bp, Homo sapien
acccggcggcctctggtgaccacag

SEQ ID NO: 3029264 - DNA, 25 bp, Homo sapien
ggacccggcggcctctggtgaccac

SEQ ID NO: 3029265 - DNA, 25 bp, Homo sapien
ggcgccagcggtgtgtggcggaccc

SEQ ID NO: 3029266 - DNA, 25 bp, Homo sapien
aggtgaggccttgccgctttgtgac

SEQ ID NO: 3029267 - DNA, 25 bp, Homo sapien
ttaagtggagccaggacaaagccca

SEQ ID NO: 3029268 - DNA, 25 bp, Homo sapien
cccctgcaagcagggaggttccttc

SEQ ID NO: 3029269 - DNA, 25 bp, Homo sapien
gggcttcatcacatgtcagcggcag

SEQ ID NO: 3029270 - DNA, 25 bp, Homo sapien
cagactctttcaaaggggagggtct

SEQ ID NO: 3029271 - DNA, 25 bp, Homo sapien
ccatggcacctgtggaattggctct

SEQ ID NO: 3029272 - DNA, 25 bp, Homo sapien
acctgtggaattggctctgcccttg

SEQ ID NO: 3029273 - DNA, 25 bp, Homo sapien
catctccatggcacctgtggaattg

SEQ ID NO: 3029274 - DNA, 25 bp, Homo sapien
cagaaactccgcagacattgacaaa

SEQ ID NO: 3029275 - DNA, 25 bp, Homo sapien
cccagggccagaccgcctccatctc

SEQ ID NO: 3029276 - DNA, 25 bp, Homo sapien
gaggaaacaagagcttgtcaggtga

SEQ ID NO: 3029277 - DNA, 25 bp, Homo sapien
aacaagagcttgtcaggtgaggcct

SEQ ID NO: 3029278 - DNA, 25 bp, Homo sapien
tggggagagaacgtccctgctctgg

SEQ ID NO: 3029279 - DNA, 25 bp, Homo sapien
ccgcgagggtcaccgatgccagctc

SEQ ID NO: 3029280 - DNA, 25 bp, Homo sapien
gcccaggtgcccgcagaacacagtg

SEQ ID NO: 3029281 - DNA, 25 bp, Homo sapien
gaacacagtgctcacgatgtagatc

SEQ ID NO: 3029282 - DNA, 25 bp, Homo sapien
cgatgtagatcataaaagtcagcac

SEQ ID NO: 3029283 - DNA, 25 bp, Homo sapien
gggccccgcaccagtgccccgagag

SEQ ID NO: 3029284 - DNA, 25 bp, Homo sapien
aggacagcggccaggtcagactcgg

SEQ ID NO: 3029285 - DNA, 25 bp, Homo sapien
agccctgcaagacaggcctctccag

SEQ ID NO: 3029286 - DNA, 25 bp, Homo sapien
cagtgccccgagaggtcacctacgc

SEQ ID NO: 3029287 - DNA, 25 bp, Homo sapien
ctgccccccagctcctcctccttac

SEQ ID NO: 3029288 - DNA, 25 bp, Homo sapien
gagagtccacatctcagtcccaaag

SEQ ID NO: 3029289 - DNA, 25 bp, Homo sapien
aaagggcaaagagagtccacatctc

SEQ ID NO: 3029290 - DNA, 25 bp, Homo sapien
cagtcccaaagcctctgggaaccag

SEQ ID NO: 3029291 - DNA, 25 bp, Homo sapien
caaagagagtccacatctcagtccc

SEQ ID NO: 3029292 - DNA, 25 bp, Homo sapien
caacttgtgggatgagccctgcctc

SEQ ID NO: 3029293 - DNA, 25 bp, Homo sapien
cagtgactcccgtttttcagaagaa

SEQ ID NO: 3029294 - DNA, 25 bp, Homo sapien
tcagcagcatatctgagagccaggg

SEQ ID NO: 3029295 - DNA, 25 bp, Homo sapien
gaaagcagctcactatgcacgccag

SEQ ID NO: 3029296 - DNA, 25 bp, Homo sapien
tcctgtcgcagcattgcagtgagcc

SEQ ID NO: 3029297 - DNA, 25 bp, Homo sapien
tgtcgcagcattgcagtgagccctg

SEQ ID NO: 3029298 - DNA, 25 bp, Homo sapien
tgtcacctcctgtcgcagcattgca

SEQ ID NO: 3029299 - DNA, 25 bp, Homo sapien
ggtctctgttatgtgaaaccagctg

SEQ ID NO: 3029300 - DNA, 25 bp, Homo sapien
gcaagggcgattactgactccactg

SEQ ID NO: 3029301 - DNA, 25 bp, Homo sapien
tcagctgcacaggacaaaggtcggg

SEQ ID NO: 3029302 - DNA, 25 bp, Homo sapien
gccccggaacctgagatactttgag

SEQ ID NO: 3029303 - DNA, 25 bp, Homo sapien
cagctccgagttgggttttccagga

SEQ ID NO: 3029304 - DNA, 25 bp, Homo sapien
agaggttgtccgttcagccttgtca

SEQ ID NO: 3029305 - DNA, 25 bp, Homo sapien
gaacattgcgctgaaagaaactcca

SEQ ID NO: 3029306 - DNA, 25 bp, Homo sapien
tccattgcctcatccaaatgagggc

SEQ ID NO: 3029307 - DNA, 25 bp, Homo sapien
agcaaccctgggtggcaaatttggg

SEQ ID NO: 3029308 - DNA, 25 bp, Homo sapien
ttaggaatgaaggagctcaggccaa

SEQ ID NO: 3029309 - DNA, 25 bp, Homo sapien
gcctctcctgcccaaacaatttctg

SEQ ID NO: 3029310 - DNA, 25 bp, Homo sapien
tgcctctcctgcccaaacaatttct

SEQ ID NO: 3029311 - DNA, 25 bp, Homo sapien
tcaaggtgagctcctcgagcgcagt

SEQ ID NO: 3029312 - DNA, 25 bp, Homo sapien
tgtagccgccgccattctgaggtta

SEQ ID NO: 3029313 - DNA, 25 bp, Homo sapien
ggttgaccttgtggagcagagctcc

SEQ ID NO: 3029314 - DNA, 25 bp, Homo sapien
tgcctgctggaggaacccataggtg

SEQ ID NO: 3029315 - DNA, 25 bp, Homo sapien
tgtgtcatactaacaacacatagaa

SEQ ID NO: 3029316 - DNA, 25 bp, Homo sapien
agtgcagataatgtccttgggaacc

SEQ ID NO: 3029317 - DNA, 25 bp, Homo sapien
tgattatgattctcacccacctgct

SEQ ID NO: 3029318 - DNA, 25 bp, Homo sapien
ggtaatattgtaaattgtgtcatac

SEQ ID NO: 3029319 - DNA, 25 bp, Homo sapien
gaaaattgtattcgtctctttattg

SEQ ID NO: 3029320 - DNA, 25 bp, Homo sapien
tgagttagaaaattgtattcgtctc

SEQ ID NO: 3029321 - DNA, 25 bp, Homo sapien
gtattcgtctctttattggtctaga

SEQ ID NO: 3029322 - DNA, 25 bp, Homo sapien
gagttagaaaattgtattcgtctct

SEQ ID NO: 3029323 - DNA, 25 bp, Homo sapien
aaggggtggagacttggaatggtga

SEQ ID NO: 3029324 - DNA, 25 bp, Homo sapien
cagtgagggtggtccgcactccgat

SEQ ID NO: 3029325 - DNA, 25 bp, Homo sapien
ccaggccaggcggagcaacccctcc

SEQ ID NO: 3029326 - DNA, 25 bp, Homo sapien
cggtgagagaaagtctcgaagctct

SEQ ID NO: 3029327 - DNA, 25 bp, Homo sapien
tggtaggatcccatgccgctgttcc

SEQ ID NO: 3029328 - DNA, 25 bp, Homo sapien
cctcaccaggcaagagcggcggtga

SEQ ID NO: 3029329 - DNA, 25 bp, Homo sapien
tcgaagctcttcttgccatggtagg

SEQ ID NO: 3029330 - DNA, 25 bp, Homo sapien
ccccgaagggcagagagtgcaaggt

SEQ ID NO: 3029331 - DNA, 25 bp, Homo sapien
cgttggccgccaccccaccactgga

SEQ ID NO: 3029332 - DNA, 25 bp, Homo sapien
tgtggacgatgacatcgttggccgc

SEQ ID NO: 3029333 - DNA, 25 bp, Homo sapien
accccaccactggatgtctctgcaa

SEQ ID NO: 3029334 - DNA, 25 bp, Homo sapien
aggacccagccactggcctcagtct

SEQ ID NO: 3029335 - DNA, 25 bp, Homo sapien
gcaccaggacccagccactggcctc

SEQ ID NO: 3029336 - DNA, 25 bp, Homo sapien
ccaggacccagccactggcctcagt

SEQ ID NO: 3029337 - DNA, 25 bp, Homo sapien
ctgcaccaggacccagccactggcc

SEQ ID NO: 3029338 - DNA, 25 bp, Homo sapien
tacagacgaggtgaaaggagctcag

SEQ ID NO: 3029339 - DNA, 25 bp, Homo sapien
cagccagagaacagtgaagctgcag

SEQ ID NO: 3029340 - DNA, 25 bp, Homo sapien
gccctgggcaaggatcgctcattca

SEQ ID NO: 3029341 - DNA, 25 bp, Homo sapien
gtcagcaccacatgagcaaagagtg

SEQ ID NO: 3029342 - DNA, 25 bp, Homo sapien
aggctgcgcacgcacacgatgggca

SEQ ID NO: 3029343 - DNA, 25 bp, Homo sapien
ctccaggctgcgcacgcacacgatg

SEQ ID NO: 3029344 - DNA, 25 bp, Homo sapien
tgctggagaacatgtagagggccag

SEQ ID NO: 3029345 - DNA, 25 bp, Homo sapien
cgcacgcacacgatgggcagcacag

SEQ ID NO: 3029346 - DNA, 25 bp, Homo sapien
gactgggggtccacgtccgtgagga

SEQ ID NO: 3029347 - DNA, 25 bp, Homo sapien
ggtccacgtccgtgaggatggtggg

SEQ ID NO: 3029348 - DNA, 25 bp, Homo sapien
gggtccacgtccgtgaggatggtgg

SEQ ID NO: 3029349 - DNA, 25 bp, Homo sapien
tgggggtccacgtccgtgaggatgg

SEQ ID NO: 3029350 - DNA, 25 bp, Homo sapien
agatgaggcccctctttctgggcct

SEQ ID NO: 3029351 - DNA, 25 bp, Homo sapien
gcagggagatgaggcccctctttct

SEQ ID NO: 3029352 - DNA, 25 bp, Homo sapien
agcctgggcactgggggcccctcac

SEQ ID NO: 3029353 - DNA, 25 bp, Homo sapien
ggcccctcacggctgggcacacctg

SEQ ID NO: 3029354 - DNA, 25 bp, Homo sapien
accctctggaagtgccgggcactaa

SEQ ID NO: 3029355 - DNA, 25 bp, Homo sapien
catagtcccgggatttcttagcatc

SEQ ID NO: 3029356 - DNA, 25 bp, Homo sapien
tcttagcatcttccccgtagaactc

SEQ ID NO: 3029357 - DNA, 25 bp, Homo sapien
ctatgtagcgagtggcggcatcccc

SEQ ID NO: 3029358 - DNA, 25 bp, Homo sapien
tcatgaatttcccccaggcgatgcg

SEQ ID NO: 3029359 - DNA, 25 bp, Homo sapien
gtcacagaggatgtagtcaggggcc

SEQ ID NO: 3029360 - DNA, 25 bp, Homo sapien
ccacaatttggttctggatcgaggg

SEQ ID NO: 3029361 - DNA, 25 bp, Homo sapien
cacgcaggtctggccactgttcatg

SEQ ID NO: 3029362 - DNA, 25 bp, Homo sapien
cccctgagctctctggtcagcagaa

SEQ ID NO: 3029363 - DNA, 25 bp, Homo sapien
caaaaggttccccaggagttgcatc

SEQ ID NO: 3029364 - DNA, 25 bp, Homo sapien
tctggtcagcagaagccatcggctg

SEQ ID NO: 3029365 - DNA, 25 bp, Homo sapien
gcatctcgttttgcagacccctgag

SEQ ID NO: 3029366 - DNA, 25 bp, Homo sapien
tctgttgagggcaacctccgtgctc

SEQ ID NO: 3029367 - DNA, 25 bp, Homo sapien
caatggccctgatcatgttcaccgg

SEQ ID NO: 3029368 - DNA, 25 bp, Homo sapien
ggagtaccacttccccagtgatgcg

SEQ ID NO: 3029369 - DNA, 25 bp, Homo sapien
tggacccacagcatgaggtgcagtc

SEQ ID NO: 3029370 - DNA, 25 bp, Homo sapien
cacagttcttgtccacgtagcaggg

SEQ ID NO: 3029371 - DNA, 25 bp, Homo sapien
cccgtgctgcccgtgtacaggatat

SEQ ID NO: 3029372 - DNA, 25 bp, Homo sapien
tatggtcgaacctctccttgagcag

SEQ ID NO: 3029373 - DNA, 25 bp, Homo sapien
tggcagcagccgtcatgatgatctt

SEQ ID NO: 3029374 - DNA, 25 bp, Homo sapien
agcaggctcgccatgttctcactca

SEQ ID NO: 3029375 - DNA, 25 bp, Homo sapien
gatgatggtagccagcaggctcgcc

SEQ ID NO: 3029376 - DNA, 25 bp, Homo sapien
gagggcttgaggaccactgagttcc

SEQ ID NO: 3029377 - DNA, 25 bp, Homo sapien
gttctcactcagctccgagggcttg

SEQ ID NO: 3029378 - DNA, 25 bp, Homo sapien
gccaggcctatgcccagggtacttc

SEQ ID NO: 3029379 - DNA, 25 bp, Homo sapien
agagcacaccgagccaggcctatgc

SEQ ID NO: 3029380 - DNA, 25 bp, Homo sapien
gcagagcacaccgagccaggcctat

SEQ ID NO: 3029381 - DNA, 25 bp, Homo sapien
ctgcagagcacaccgagccaggcct

SEQ ID NO: 3029382 - DNA, 25 bp, Homo sapien
gaggcctggctaaacagcttggtcc

SEQ ID NO: 3029383 - DNA, 25 bp, Homo sapien
tagaacagcgctggcccattctagg

SEQ ID NO: 3029384 - DNA, 25 bp, Homo sapien
gcaggccctctctgtatcaccaggt

SEQ ID NO: 3029385 - DNA, 25 bp, Homo sapien
gaagccctgatgcatattaggtgac

SEQ ID NO: 3029386 - DNA, 25 bp, Homo sapien
gggtagttccaggtgccaatgacga

SEQ ID NO: 3029387 - DNA, 25 bp, Homo sapien
cccactcagggagcttctggatcat

SEQ ID NO: 3029388 - DNA, 25 bp, Homo sapien
cccagtggctccgagtggatgtaga

SEQ ID NO: 3029389 - DNA, 25 bp, Homo sapien
catgtactcgatctcctctaggacg

SEQ ID NO: 3029390 - DNA, 25 bp, Homo sapien
ctgcagcgacagagccggagtgagc

SEQ ID NO: 3029391 - DNA, 25 bp, Homo sapien
cagcgacagagccggagtgagcttc

SEQ ID NO: 3029392 - DNA, 25 bp, Homo sapien
cgacagagccggagtgagcttccag

SEQ ID NO: 3029393 - DNA, 25 bp, Homo sapien
tgccagggtgatgggggtcactcac

SEQ ID NO: 3029394 - DNA, 25 bp, Homo sapien
tgagaggacccctttctgccagagg

SEQ ID NO: 3029395 - DNA, 25 bp, Homo sapien
ccaggcatgggcaacggaatggatc

SEQ ID NO: 3029396 - DNA, 25 bp, Homo sapien
gattagccgttggacctgtgggtct

SEQ ID NO: 3029397 - DNA, 25 bp, Homo sapien
tcttgaaaagtgcagtagcaggccc

SEQ ID NO: 3029398 - DNA, 25 bp, Homo sapien
tccggaactgcagcggacgggtcct

SEQ ID NO: 3029399 - DNA, 25 bp, Homo sapien
gggcgcgcttcacggcctcgctgat

SEQ ID NO: 3029400 - DNA, 25 bp, Homo sapien
ctgctggatccggaactgcagcgga

SEQ ID NO: 3029401 - DNA, 25 bp, Homo sapien
cgggtcctgcccgagctgaaggcgg

SEQ ID NO: 3029402 - DNA, 25 bp, Homo sapien
ggaaggtccactttctgcctcgcct

SEQ ID NO: 3029403 - DNA, 25 bp, Homo sapien
ttgctagcccctgagaaggtgacac

SEQ ID NO: 3029404 - DNA, 25 bp, Homo sapien
acccgagtcctaagccgaactgctg

SEQ ID NO: 3029405 - DNA, 25 bp, Homo sapien
cctgcctgaattctataggaaggga

SEQ ID NO: 3029406 - DNA, 25 bp, Homo sapien
ttagcaggtggcatgtcagggtttg

SEQ ID NO: 3029407 - DNA, 25 bp, Homo sapien
agcaggtggcatgtcagggtttgaa

SEQ ID NO: 3029408 - DNA, 25 bp, Homo sapien
agttagcaggtggcatgtcagggtt

SEQ ID NO: 3029409 - DNA, 25 bp, Homo sapien
ggtggcatgtcagggtttgaaccca

SEQ ID NO: 3029410 - DNA, 25 bp, Homo sapien
ctcatgcctttagcactcggctctg

SEQ ID NO: 3029411 - DNA, 25 bp, Homo sapien
gagtctgacggcccatcagggcctc

SEQ ID NO: 3029412 - DNA, 25 bp, Homo sapien
atgcctttagcactcggctctgctg

SEQ ID NO: 3029413 - DNA, 25 bp, Homo sapien
tgcatctctgtcagcagctcatgcc

SEQ ID NO: 3029414 - DNA, 25 bp, Homo sapien
cttggtgtccctgctccgcggatcc

SEQ ID NO: 3029415 - DNA, 25 bp, Homo sapien
agagatgatgtaggactcttgacac

SEQ ID NO: 3029416 - DNA, 25 bp, Homo sapien
tcttgacacttagggccccggctct

SEQ ID NO: 3029417 - DNA, 25 bp, Homo sapien
gccccggctctgagtgcagactcca

SEQ ID NO: 3029418 - DNA, 25 bp, Homo sapien
aaaaataaggaatgcagggaagagg

SEQ ID NO: 3029419 - DNA, 25 bp, Homo sapien
agagaaaaaataaggaatgcaggga

SEQ ID NO: 3029420 - DNA, 25 bp, Homo sapien
aaaataaggaatgcagggaagagga

SEQ ID NO: 3029421 - DNA, 25 bp, Homo sapien
gaaaaaataaggaatgcagggaaga

SEQ ID NO: 3029422 - DNA, 25 bp, Homo sapien
ttgacacagcctctcccggtaactg

SEQ ID NO: 3029423 - DNA, 25 bp, Homo sapien
ctttgacacagcctctcccggtaac

SEQ ID NO: 3029424 - DNA, 25 bp, Homo sapien
cagcctctcccggtaactggggctc

SEQ ID NO: 3029425 - DNA, 25 bp, Homo sapien
gacacagcctctcccggtaactggg

SEQ ID NO: 3029426 - DNA, 25 bp, Homo sapien
tcccgtccattgagcccttggagtt

SEQ ID NO: 3029427 - DNA, 25 bp, Homo sapien
tcctgcccaggaagtttgcgtgaca

SEQ ID NO: 3029428 - DNA, 25 bp, Homo sapien
caggaagtttgcgtgacaagaaaaa

SEQ ID NO: 3029429 - DNA, 25 bp, Homo sapien
tgcttcccgtccattgagcccttgg

SEQ ID NO: 3029430 - DNA, 25 bp, Homo sapien
gccaagggtctgtgtggtcaccgaa

SEQ ID NO: 3029431 - DNA, 25 bp, Homo sapien
gggtctccaatccataaatctgctc

SEQ ID NO: 3029432 - DNA, 25 bp, Homo sapien
tctcgttgaatagctgagaagaggg

SEQ ID NO: 3029433 - DNA, 25 bp, Homo sapien
tcaccgaaaaccagagatgcttggg

SEQ ID NO: 3029434 - DNA, 25 bp, Homo sapien
tgttccccgtggatgggagaccact

SEQ ID NO: 3029435 - DNA, 25 bp, Homo sapien
gatcaatgctccatgggccgctttg

SEQ ID NO: 3029436 - DNA, 25 bp, Homo sapien
tgcaagcaaccacaatgttccccgt

SEQ ID NO: 3029437 - DNA, 25 bp, Homo sapien
aaaatgtacatgacacactggaagc

SEQ ID NO: 3029438 - DNA, 25 bp, Homo sapien
tggccacagggggcagcccgtgtga

SEQ ID NO: 3029439 - DNA, 25 bp, Homo sapien
tcctgaacatgagggagaactggtt

SEQ ID NO: 3029440 - DNA, 25 bp, Homo sapien
ctgaagttcgctgtcccctgatcct

SEQ ID NO: 3029441 - DNA, 25 bp, Homo sapien
gggagaactggttggatcccccagc

SEQ ID NO: 3029442 - DNA, 25 bp, Homo sapien
tgagacaagccgtcctggatggcct

SEQ ID NO: 3029443 - DNA, 25 bp, Homo sapien
catgggcttcgggagggaccctctg

SEQ ID NO: 3029444 - DNA, 25 bp, Homo sapien
aactcagggataacatgggcttcgg

SEQ ID NO: 3029445 - DNA, 25 bp, Homo sapien
tagcagggggtgtcacctgagacaa

SEQ ID NO: 3029446 - DNA, 25 bp, Homo sapien
tggagcaccgcaaccacaccatgtg

SEQ ID NO: 3029447 - DNA, 25 bp, Homo sapien
tttgaccgcctcatgtgaaaacgcc

SEQ ID NO: 3029448 - DNA, 25 bp, Homo sapien
tgcgctggatgacaacgagctggcc

SEQ ID NO: 3029449 - DNA, 25 bp, Homo sapien
caacgagctggccatgtgctttgac

SEQ ID NO: 3029450 - DNA, 25 bp, Homo sapien
ggagcgaacgcattgtccccatgca

SEQ ID NO: 3029451 - DNA, 25 bp, Homo sapien
cccagagggagcgaacgcattgtcc

SEQ ID NO: 3029452 - DNA, 25 bp, Homo sapien
gtccccatgcaagacgcctgtgcag

SEQ ID NO: 3029453 - DNA, 25 bp, Homo sapien
tccccatgcaagacgcctgtgcagg

SEQ ID NO: 3029454 - DNA, 25 bp, Homo sapien
gaagatatggaagggccggctctgc

SEQ ID NO: 3029455 - DNA, 25 bp, Homo sapien
tggaagatatggaagggccggctct

SEQ ID NO: 3029456 - DNA, 25 bp, Homo sapien
ggaagatatggaagggccggctctg

SEQ ID NO: 3029457 - DNA, 25 bp, Homo sapien
aagatatggaagggccggctctgct

SEQ ID NO: 3029458 - DNA, 25 bp, Homo sapien
aggatgtacagagcccaagatgatg

SEQ ID NO: 3029459 - DNA, 25 bp, Homo sapien
tgtacagagcccaagatgatggcat

SEQ ID NO: 3029460 - DNA, 25 bp, Homo sapien
cacgaaggatgtacagagcccaaga

SEQ ID NO: 3029461 - DNA, 25 bp, Homo sapien
cacacgaaggatgtacagagcccaa

SEQ ID NO: 3029462 - DNA, 25 bp, Homo sapien
tccaggccgcaggacagtgcttgtc

SEQ ID NO: 3029463 - DNA, 25 bp, Homo sapien
ctgtggtgcatccaggccgcaggac

SEQ ID NO: 3029464 - DNA, 25 bp, Homo sapien
gcatccaggccgcaggacagtgctt

SEQ ID NO: 3029465 - DNA, 25 bp, Homo sapien
tccaagccctgtggtgcatccaggc

SEQ ID NO: 3029466 - DNA, 25 bp, Homo sapien
tgtgtggggcctgacctaagctcct

SEQ ID NO: 3029467 - DNA, 25 bp, Homo sapien
gtgtggggcctgacctaagctcctt

SEQ ID NO: 3029468 - DNA, 25 bp, Homo sapien
gtgtgtggggcctgacctaagctcc

SEQ ID NO: 3029469 - DNA, 25 bp, Homo sapien
agcaataacctctagccacccaggg

SEQ ID NO: 3029470 - DNA, 25 bp, Homo sapien
tagctccaaagtttatcaactcatc

SEQ ID NO: 3029471 - DNA, 25 bp, Homo sapien
ctaaatcagtcatctttggtttagc

SEQ ID NO: 3029472 - DNA, 25 bp, Homo sapien
aattttccagaggaagtggagcaat

SEQ ID NO: 3029473 - DNA, 25 bp, Homo sapien
tgaaattttgctgccttccactagg

SEQ ID NO: 3029474 - DNA, 25 bp, Homo sapien
tattaacatgtctcccaagtctttt

SEQ ID NO: 3029475 - DNA, 25 bp, Homo sapien
cattggagcaccaaatggaaaagct

SEQ ID NO: 3029476 - DNA, 25 bp, Homo sapien
attgctgttgagctccaactccagg

SEQ ID NO: 3029477 - DNA, 25 bp, Homo sapien
tacaggatggctgcacagagtactc

SEQ ID NO: 3029478 - DNA, 25 bp, Homo sapien
gaaaaaagtggtctgaggccgtcta

SEQ ID NO: 3029479 - DNA, 25 bp, Homo sapien
tcaacattaaggatagcccgggcgc

SEQ ID NO: 3029480 - DNA, 25 bp, Homo sapien
gagttgcagaaaccccaaaggaggc

SEQ ID NO: 3029481 - DNA, 25 bp, Homo sapien
cagtagccaagatctaaatcctggg

SEQ ID NO: 3029482 - DNA, 25 bp, Homo sapien
tggaagcctgcatgacagtagccaa

SEQ ID NO: 3029483 - DNA, 25 bp, Homo sapien
aaaacagtctatgttcctggaagcc

SEQ ID NO: 3029484 - DNA, 25 bp, Homo sapien
taaactcactaaggaagtacctggc

SEQ ID NO: 3029485 - DNA, 25 bp, Homo sapien
cagtgagttttacctagtttcaaga

SEQ ID NO: 3029486 - DNA, 25 bp, Homo sapien
agctctgtgcaatttgtcaaagagt

SEQ ID NO: 3029487 - DNA, 25 bp, Homo sapien
caatttgtcaaagagttcagattat

SEQ ID NO: 3029488 - DNA, 25 bp, Homo sapien
gacctaaaaatacaaacgtcatata

SEQ ID NO: 3029489 - DNA, 25 bp, Homo sapien
caagtaatacacaacgtaggaacca

SEQ ID NO: 3029490 - DNA, 25 bp, Homo sapien
ccatgactagctatttggtgaactg

SEQ ID NO: 3029491 - DNA, 25 bp, Homo sapien
taggaactccacatcactaacaagc

SEQ ID NO: 3029492 - DNA, 25 bp, Homo sapien
tctgatgaacccagtgacgagcact

SEQ ID NO: 3029493 - DNA, 25 bp, Homo sapien
tatctttaagaataactgtaccgat

SEQ ID NO: 3029494 - DNA, 25 bp, Homo sapien
ttaattatctttaagaataactgta

SEQ ID NO: 3029495 - DNA, 25 bp, Homo sapien
attatctttaagaataactgtaccg

SEQ ID NO: 3029496 - DNA, 25 bp, Homo sapien
cactttgtttcatttttaattatct

SEQ ID NO: 3029497 - DNA, 25 bp, Homo sapien
caccaagtccaaactgggagccaaa

SEQ ID NO: 3029498 - DNA, 25 bp, Homo sapien
ttattcaccaagtccaaactgggag

SEQ ID NO: 3029499 - DNA, 25 bp, Homo sapien
tattcaccaagtccaaactgggagc

SEQ ID NO: 3029500 - DNA, 25 bp, Homo sapien
ggtagtcaccagttaagaagctaca

SEQ ID NO: 3029501 - DNA, 25 bp, Homo sapien
ggcagatttcctacaaatatgtagt

SEQ ID NO: 3029502 - DNA, 25 bp, Homo sapien
tgcttgttctttggtagtcaccagt

SEQ ID NO: 3029503 - DNA, 25 bp, Homo sapien
gtgattttctccaataaggcagatt

SEQ ID NO: 3029504 - DNA, 25 bp, Homo sapien
ccggtccacgggatgagcctgctgc

SEQ ID NO: 3029505 - DNA, 25 bp, Homo sapien
accggtccacgggatgagcctgctg

SEQ ID NO: 3029506 - DNA, 25 bp, Homo sapien
ttcccaccaccggtccacgggatga

SEQ ID NO: 3029507 - DNA, 25 bp, Homo sapien
caccaccggtccacgggatgagcct

SEQ ID NO: 3029508 - DNA, 25 bp, Homo sapien
tcacacggttgcggtgctatggcag

SEQ ID NO: 3029509 - DNA, 25 bp, Homo sapien
gcagagcgccgacagtcttctctca

SEQ ID NO: 3029510 - DNA, 25 bp, Homo sapien
tgctatggcagagcgccgacagtct

SEQ ID NO: 3029511 - DNA, 25 bp, Homo sapien
cacacggttgcggtgctatggcaga

SEQ ID NO: 3029512 - DNA, 25 bp, Homo sapien
caatatcttcggtctgctgaaacat

SEQ ID NO: 3029513 - DNA, 25 bp, Homo sapien
tgcagggtcctgtagaatcctactt

SEQ ID NO: 3029514 - DNA, 25 bp, Homo sapien
ccaaaagaagggctgccttatgata

SEQ ID NO: 3029515 - DNA, 25 bp, Homo sapien
tgatagcgataaacaatatcttcgg

SEQ ID NO: 3029516 - DNA, 25 bp, Homo sapien
tatcgttcgttcagattcttgacaa

SEQ ID NO: 3029517 - DNA, 25 bp, Homo sapien
gcacaattatagatgagtttctctg

SEQ ID NO: 3029518 - DNA, 25 bp, Homo sapien
tttgtcagagaagaatcgattcagc

SEQ ID NO: 3029519 - DNA, 25 bp, Homo sapien
agtttcttgcacatggtgatgcaga

SEQ ID NO: 3029520 - DNA, 25 bp, Homo sapien
tgctttcatgtacaacaccagctgc

SEQ ID NO: 3029521 - DNA, 25 bp, Homo sapien
ttggcaagatgcagagaagccgcaa

SEQ ID NO: 3029522 - DNA, 25 bp, Homo sapien
gatgggctcagtttcccggacttga

SEQ ID NO: 3029523 - DNA, 25 bp, Homo sapien
cagagaagccgcaagcagctgtgct

SEQ ID NO: 3029524 - DNA, 25 bp, Homo sapien
taacggatacactcagataaaaatc

SEQ ID NO: 3029525 - DNA, 25 bp, Homo sapien
tcttaatgcacaagtaaactctcaa

SEQ ID NO: 3029526 - DNA, 25 bp, Homo sapien
gggacaaggcatagttaaagatgtg

SEQ ID NO: 3029527 - DNA, 25 bp, Homo sapien
ccccaggccgaagtatagtggcttg

SEQ ID NO: 3029528 - DNA, 25 bp, Homo sapien
ccagcacacactcagtgaacatcag

SEQ ID NO: 3029529 - DNA, 25 bp, Homo sapien
cacactctcctggatctggtacaag

SEQ ID NO: 3029530 - DNA, 25 bp, Homo sapien
tcacattcagatggcgtaaggtgtc

SEQ ID NO: 3029531 - DNA, 25 bp, Homo sapien
agctgactgatctggtccaccacca

SEQ ID NO: 3029532 - DNA, 25 bp, Homo sapien
gggtgaagcaccgtaaggcacgtat

SEQ ID NO: 3029533 - DNA, 25 bp, Homo sapien
gccactcatggcacaaagagagccc

SEQ ID NO: 3029534 - DNA, 25 bp, Homo sapien
tcaaaggtgatgagcccctctaggc

SEQ ID NO: 3029535 - DNA, 25 bp, Homo sapien
tccggcagttcaggggcttcaaagg

SEQ ID NO: 3029536 - DNA, 25 bp, Homo sapien
tgctgttgcgcaggctgaattgcag

SEQ ID NO: 3029537 - DNA, 25 bp, Homo sapien
ttctgggctcaggtaattctttcac

SEQ ID NO: 3029538 - DNA, 25 bp, Homo sapien
tcttgctgttgcgcaggctgaattg

SEQ ID NO: 3029539 - DNA, 25 bp, Homo sapien
ccttgattttctgggctcaggtaat

SEQ ID NO: 3029540 - DNA, 25 bp, Homo sapien
ggttgttcttgttcgaaggaacatg

SEQ ID NO: 3029541 - DNA, 25 bp, Homo sapien
gggctgccgcactgtgtggaggaga

SEQ ID NO: 3029542 - DNA, 25 bp, Homo sapien
ttcgaaggaacatgtgggtacaagt

SEQ ID NO: 3029543 - DNA, 25 bp, Homo sapien
cttgttcgaaggaacatgtgggtac

SEQ ID NO: 3029544 - DNA, 25 bp, Homo sapien
agtgaagaggacagccttggaactt

SEQ ID NO: 3029545 - DNA, 25 bp, Homo sapien
gtgaagaggacagccttggaacttg

SEQ ID NO: 3029546 - DNA, 25 bp, Homo sapien
gacagccttggaacttgctgctgta

SEQ ID NO: 3029547 - DNA, 25 bp, Homo sapien
gaggacagccttggaacttgctgct

SEQ ID NO: 3029548 - DNA, 25 bp, Homo sapien
ggaggtgccagaacaccaccacagg

SEQ ID NO: 3029549 - DNA, 25 bp, Homo sapien
tgcaggaggtgccagaacaccacca

SEQ ID NO: 3029550 - DNA, 25 bp, Homo sapien
caggaggtgccagaacaccaccaca

SEQ ID NO: 3029551 - DNA, 25 bp, Homo sapien
ctgcaggaggtgccagaacaccacc

SEQ ID NO: 3029552 - DNA, 25 bp, Homo sapien
catgtcaatgcccagacacggacaa

SEQ ID NO: 3029553 - DNA, 25 bp, Homo sapien
aaaaatctacatcaagaccagccag

SEQ ID NO: 3029554 - DNA, 25 bp, Homo sapien
tctccccaagaaggacgggtacaga

SEQ ID NO: 3029555 - DNA, 25 bp, Homo sapien
gggtacagattgcaaagcccaggct

SEQ ID NO: 3029556 - DNA, 25 bp, Homo sapien
cattggtcgttctgtatttaaactg

SEQ ID NO: 3029557 - DNA, 25 bp, Homo sapien
tgtgctgccctgatgtcgacatata

SEQ ID NO: 3029558 - DNA, 25 bp, Homo sapien
tgataacttcccggtactgacagat

SEQ ID NO: 3029559 - DNA, 25 bp, Homo sapien
taggagtctttccttgttgatctga

SEQ ID NO: 3029560 - DNA, 25 bp, Homo sapien
aggcaatgggcacattcccgtggct

SEQ ID NO: 3029561 - DNA, 25 bp, Homo sapien
tttcgactgttcttcagcaggccca

SEQ ID NO: 3029562 - DNA, 25 bp, Homo sapien
agcaggcccatgacgagtaaccaag

SEQ ID NO: 3029563 - DNA, 25 bp, Homo sapien
ttccttgcactaagaggcaatgggc

SEQ ID NO: 3029564 - DNA, 25 bp, Homo sapien
tataccagttcctgacctacaaaag

SEQ ID NO: 3029565 - DNA, 25 bp, Homo sapien
cataaagtactataccagttcctga

SEQ ID NO: 3029566 - DNA, 25 bp, Homo sapien
gtactataccagttcctgacctaca

SEQ ID NO: 3029567 - DNA, 25 bp, Homo sapien
taaagtactataccagttcctgacc

SEQ ID NO: 3029568 - DNA, 25 bp, Homo sapien
gagccaatgattgttggcaaaggag

SEQ ID NO: 3029569 - DNA, 25 bp, Homo sapien
tctgcagtctagcacccgataagag

SEQ ID NO: 3029570 - DNA, 25 bp, Homo sapien
aagaaccagtcagaactccgtggag

SEQ ID NO: 3029571 - DNA, 25 bp, Homo sapien
ttctgcttgttctgatagatgtcag

SEQ ID NO: 3029572 - DNA, 25 bp, Homo sapien
cacagcagcactgactgaattgctc

SEQ ID NO: 3029573 - DNA, 25 bp, Homo sapien
cagcagcactgactgaattgctcag

SEQ ID NO: 3029574 - DNA, 25 bp, Homo sapien
ccacagcagcactgactgaattgct

SEQ ID NO: 3029575 - DNA, 25 bp, Homo sapien
gcagcactgactgaattgctcagga

SEQ ID NO: 3029576 - DNA, 25 bp, Homo sapien
tgagtaaggcctagaagacccagtg

SEQ ID NO: 3029577 - DNA, 25 bp, Homo sapien
gacccagtggagagccttcgtccaa

SEQ ID NO: 3029578 - DNA, 25 bp, Homo sapien
gagagccttcgtccaactgtctgtg

SEQ ID NO: 3029579 - DNA, 25 bp, Homo sapien
tgttggaccttcgtaccactgcaga

SEQ ID NO: 3029580 - DNA, 25 bp, Homo sapien
tgctctatgcgctgataattcctta

SEQ ID NO: 3029581 - DNA, 25 bp, Homo sapien
tgagctggcagtagatgtaagattc

SEQ ID NO: 3029582 - DNA, 25 bp, Homo sapien
taggaactggaattggtgctgtttc

SEQ ID NO: 3029583 - DNA, 25 bp, Homo sapien
tttgagtaggaactggaattggtgc

SEQ ID NO: 3029584 - DNA, 25 bp, Homo sapien
aggtgacacagtaggctgacactgc

SEQ ID NO: 3029585 - DNA, 25 bp, Homo sapien
tgaggtgacacagtaggctgacact

SEQ ID NO: 3029586 - DNA, 25 bp, Homo sapien
gaggtgacacagtaggctgacactg

SEQ ID NO: 3029587 - DNA, 25 bp, Homo sapien
attcatttgaagcacgtctgccagc

SEQ ID NO: 3029588 - DNA, 25 bp, Homo sapien
catttgaagcacgtctgccagcagt

SEQ ID NO: 3029589 - DNA, 25 bp, Homo sapien
tcatttgaagcacgtctgccagcag

SEQ ID NO: 3029590 - DNA, 25 bp, Homo sapien
ttgaagcacgtctgccagcagtccc

SEQ ID NO: 3029591 - DNA, 25 bp, Homo sapien
tgtgtacaagtagaaaagattctca

SEQ ID NO: 3029592 - DNA, 25 bp, Homo sapien
tctgacgagatgttgtgtggcacca

SEQ ID NO: 3029593 - DNA, 25 bp, Homo sapien
catccgtgtcacaagaagagttctt

SEQ ID NO: 3029594 - DNA, 25 bp, Homo sapien
ccaaaacaaagtcatccgtgtcaca

SEQ ID NO: 3029595 - DNA, 25 bp, Homo sapien
acttgtagatagttgggaggaccca

SEQ ID NO: 3029596 - DNA, 25 bp, Homo sapien
gctcctttgaatgtcactgtgccat

SEQ ID NO: 3029597 - DNA, 25 bp, Homo sapien
gctgctcctttgaatgtcactgtgc

SEQ ID NO: 3029598 - DNA, 25 bp, Homo sapien
gtcactgtgccatggtatcggtcac

SEQ ID NO: 3029599 - DNA, 25 bp, Homo sapien
tggtatcggtcactgataccactta

SEQ ID NO: 3029600 - DNA, 25 bp, Homo sapien
aagtggtccacccgcctcagacttc

SEQ ID NO: 3029601 - DNA, 25 bp, Homo sapien
agtggtccacccgcctcagacttcc

SEQ ID NO: 3029602 - DNA, 25 bp, Homo sapien
aaagtgctgggattataggcatgaa

SEQ ID NO: 3029603 - DNA, 25 bp, Homo sapien
caagtggtccacccgcctcagactt

SEQ ID NO: 3029604 - DNA, 25 bp, Homo sapien
cctcccttacagctgagtctacagt

SEQ ID NO: 3029605 - DNA, 25 bp, Homo sapien
cagaaaaaataggtttgtccaccag

SEQ ID NO: 3029606 - DNA, 25 bp, Homo sapien
tcatgcccaggcacgcctggctatt

SEQ ID NO: 3029607 - DNA, 25 bp, Homo sapien
tagttctacattcagctactccttg

SEQ ID NO: 3029608 - DNA, 25 bp, Homo sapien
gaggtgactcctccctcagtagaaa

SEQ ID NO: 3029609 - DNA, 25 bp, Homo sapien
tatccacctgtaatgggtactctgt

SEQ ID NO: 3029610 - DNA, 25 bp, Homo sapien
aaaatccaagctcatgtctacggca

SEQ ID NO: 3029611 - DNA, 25 bp, Homo sapien
cagtaacatatggacagaggcccga

SEQ ID NO: 3029612 - DNA, 25 bp, Homo sapien
accagaatacatgggcactggaact

SEQ ID NO: 3029613 - DNA, 25 bp, Homo sapien
gacagaaccagaatacatgggcact

SEQ ID NO: 3029614 - DNA, 25 bp, Homo sapien
tggtggagaagcaaaacgacaagat

SEQ ID NO: 3029615 - DNA, 25 bp, Homo sapien
agaagcaaaacgacaagatggagag

SEQ ID NO: 3029616 - DNA, 25 bp, Homo sapien
ctggaccttgctcaagaaaaggatg

SEQ ID NO: 3029617 - DNA, 25 bp, Homo sapien
tttactggaccttgctcaagaaaag

SEQ ID NO: 3029618 - DNA, 25 bp, Homo sapien
atttttttactggaccttgctcaag

SEQ ID NO: 3029619 - DNA, 25 bp, Homo sapien
caagaaaaggatggctaaaaaatgc

SEQ ID NO: 3029620 - DNA, 25 bp, Homo sapien
ccacctttgaccaataactggctga

SEQ ID NO: 3029621 - DNA, 25 bp, Homo sapien
aagcaccacctttgaccaataactg

SEQ ID NO: 3029622 - DNA, 25 bp, Homo sapien
tgaccaataactggctgaccactaa

SEQ ID NO: 3029623 - DNA, 25 bp, Homo sapien
acctttgaccaataactggctgacc

SEQ ID NO: 3029624 - DNA, 25 bp, Homo sapien
caaaaggagattagccaaataaggt

SEQ ID NO: 3029625 - DNA, 25 bp, Homo sapien
aaaaggagattagccaaataaggtg

SEQ ID NO: 3029626 - DNA, 25 bp, Homo sapien
aggagattagccaaataaggtgatg

SEQ ID NO: 3029627 - DNA, 25 bp, Homo sapien
cccaaaaggagattagccaaataag

SEQ ID NO: 3029628 - DNA, 25 bp, Homo sapien
gagccgggctgaaatgagagtacct

SEQ ID NO: 3029629 - DNA, 25 bp, Homo sapien
aatacaacatatctccggacacccg

SEQ ID NO: 3029630 - DNA, 25 bp, Homo sapien
cccgacgggcgcaagttgagcagtt

SEQ ID NO: 3029631 - DNA, 25 bp, Homo sapien
gagggctcatcgaagatcctgcctt

SEQ ID NO: 3029632 - DNA, 25 bp, Homo sapien
cgctctgtgtgcatttgggcccctc

SEQ ID NO: 3029633 - DNA, 25 bp, Homo sapien
ttttcaaaactgacatggatagaaa

SEQ ID NO: 3029634 - DNA, 25 bp, Homo sapien
ccctcttcttctggtattgtgtttt

SEQ ID NO: 3029635 - DNA, 25 bp, Homo sapien
tcttgggcgctctgtgtgcatttgg

SEQ ID NO: 3029636 - DNA, 25 bp, Homo sapien
taggcattaagctcctgtttttttc

SEQ ID NO: 3029637 - DNA, 25 bp, Homo sapien
gcattaagctcctgtttttttcata

SEQ ID NO: 3029638 - DNA, 25 bp, Homo sapien
ataaaacatccttaagtcttgagga

SEQ ID NO: 3029639 - DNA, 25 bp, Homo sapien
tccttaagtcttgaggactattggc

SEQ ID NO: 3029640 - DNA, 25 bp, Homo sapien
tatcaacttgaaagccatggattgc

SEQ ID NO: 3029641 - DNA, 25 bp, Homo sapien
cggcctgcccaataggtacattatt

SEQ ID NO: 3029642 - DNA, 25 bp, Homo sapien
tattctgaaggttacacggcctgcc

SEQ ID NO: 3029643 - DNA, 25 bp, Homo sapien
tcaaggaagggactgctgacaggaa

SEQ ID NO: 3029644 - DNA, 25 bp, Homo sapien
ggcattggtatatcactgttcctat

SEQ ID NO: 3029645 - DNA, 25 bp, Homo sapien
cataatgttgagacataataacctc

SEQ ID NO: 3029646 - DNA, 25 bp, Homo sapien
aaggtggttttccaactaggcattg

SEQ ID NO: 3029647 - DNA, 25 bp, Homo sapien
tgttgagacataataacctcaggag

SEQ ID NO: 3029648 - DNA, 25 bp, Homo sapien
catcggggatccacacagtgttgca

SEQ ID NO: 3029649 - DNA, 25 bp, Homo sapien
cagtgttgcagccatcatgttacta

SEQ ID NO: 3029650 - DNA, 25 bp, Homo sapien
catgttactatgtaggtaacgagca

SEQ ID NO: 3029651 - DNA, 25 bp, Homo sapien
ctatgtaggtaacgagcaaaaccaa

SEQ ID NO: 3029652 - DNA, 25 bp, Homo sapien
tgatgcgaataccactgacacttga

SEQ ID NO: 3029653 - DNA, 25 bp, Homo sapien
cagcaagatgttctgtggtttgaga

SEQ ID NO: 3029654 - DNA, 25 bp, Homo sapien
cgcatggcagcagcaatctgatgca

SEQ ID NO: 3029655 - DNA, 25 bp, Homo sapien
gacacttgattttctgcgattggca

SEQ ID NO: 3029656 - DNA, 25 bp, Homo sapien
gaagggaatgaggaatttggattca

SEQ ID NO: 3029657 - DNA, 25 bp, Homo sapien
atcaacaggattgggttgtgaagga

SEQ ID NO: 3029658 - DNA, 25 bp, Homo sapien
gattgggttgtgaaggagagcatga

SEQ ID NO: 3029659 - DNA, 25 bp, Homo sapien
aaggagtcacgtaaatatttaagca

SEQ ID NO: 3029660 - DNA, 25 bp, Homo sapien
ttgcaaataatctgcgaggtctcca

SEQ ID NO: 3029661 - DNA, 25 bp, Homo sapien
caaataatctgcgaggtctccacca

SEQ ID NO: 3029662 - DNA, 25 bp, Homo sapien
aataatctgcgaggtctccaccatt

SEQ ID NO: 3029663 - DNA, 25 bp, Homo sapien
aatctgcgaggtctccaccattgca

SEQ ID NO: 3029664 - DNA, 25 bp, Homo sapien
caccaaaaagacagagttgggtaat

SEQ ID NO: 3029665 - DNA, 25 bp, Homo sapien
ccatcaccaaaaagacagagttggg

SEQ ID NO: 3029666 - DNA, 25 bp, Homo sapien
ctccatcaccaaaaagacagagttg

SEQ ID NO: 3029667 - DNA, 25 bp, Homo sapien
atcaccaaaaagacagagttgggta

SEQ ID NO: 3029668 - DNA, 25 bp, Homo sapien
cataatatggccctaaatataagcc

SEQ ID NO: 3029669 - DNA, 25 bp, Homo sapien
aatataagccagctacttcatctgg

SEQ ID NO: 3029670 - DNA, 25 bp, Homo sapien
tctccaatgctgagatctgaaaagg

SEQ ID NO: 3029671 - DNA, 25 bp, Homo sapien
tgccttagtgattgactttagaacc

SEQ ID NO: 3029672 - DNA, 25 bp, Homo sapien
gaacttctatttaggcggggcgcag

SEQ ID NO: 3029673 - DNA, 25 bp, Homo sapien
cctttcaacattcatcagagaatgc

SEQ ID NO: 3029674 - DNA, 25 bp, Homo sapien
agaacttctatttaggcggggcgca

SEQ ID NO: 3029675 - DNA, 25 bp, Homo sapien
aacttctatttaggcggggcgcagt

SEQ ID NO: 3029676 - DNA, 25 bp, Homo sapien
catcatagagtgctacaatattttc

SEQ ID NO: 3029677 - DNA, 25 bp, Homo sapien
acatcatagagtgctacaatatttt

SEQ ID NO: 3029678 - DNA, 25 bp, Homo sapien
tcatagagtgctacaatattttcat

SEQ ID NO: 3029679 - DNA, 25 bp, Homo sapien
gaacatcatagagtgctacaatatt

SEQ ID NO: 3029680 - DNA, 25 bp, Homo sapien
taatagctacctcccaatcagtttt

SEQ ID NO: 3029681 - DNA, 25 bp, Homo sapien
cttttaatagctacctcccaatcag

SEQ ID NO: 3029682 - DNA, 25 bp, Homo sapien
tttaatagctacctcccaatcagtt

SEQ ID NO: 3029683 - DNA, 25 bp, Homo sapien
tacttttaatagctacctcccaatc

SEQ ID NO: 3029684 - DNA, 25 bp, Homo sapien
tccagggtaacctgggtgcaaacgc

SEQ ID NO: 3029685 - DNA, 25 bp, Homo sapien
ttgggtccagggtaacctgggtgca

SEQ ID NO: 3029686 - DNA, 25 bp, Homo sapien
cagggtaacctgggtgcaaacgctc

SEQ ID NO: 3029687 - DNA, 25 bp, Homo sapien
tgggtccagggtaacctgggtgcaa

SEQ ID NO: 3029688 - DNA, 25 bp, Homo sapien
ctgtactcgaagtcacccaccacct

SEQ ID NO: 3029689 - DNA, 25 bp, Homo sapien
gtcccacgagatccctcttgctgta

SEQ ID NO: 3029690 - DNA, 25 bp, Homo sapien
ggcgaaggccccgtgtcccacgaga

SEQ ID NO: 3029691 - DNA, 25 bp, Homo sapien
gtgtcccacgagatccctcttgctg

SEQ ID NO: 3029692 - DNA, 25 bp, Homo sapien
gcccgggcggactctcatgccgaga

SEQ ID NO: 3029693 - DNA, 25 bp, Homo sapien
gcagtgcggcgcaggtatcagcacc

SEQ ID NO: 3029694 - DNA, 25 bp, Homo sapien
agcgcgccagcgtgcggcgggtctg

SEQ ID NO: 3029695 - DNA, 25 bp, Homo sapien
tcatgccgagagaccggagcggaaa

SEQ ID NO: 3029696 - DNA, 25 bp, Homo sapien
gccggccgctggctgtctggcgaag

SEQ ID NO: 3029697 - DNA, 25 bp, Homo sapien
ggtgccgtcaccgtcactgtgcgcg

SEQ ID NO: 3029698 - DNA, 25 bp, Homo sapien
gtgaggggcccggtactctccatcc

SEQ ID NO: 3029699 - DNA, 25 bp, Homo sapien
cgcacacgcgctctgaggcagtgag

SEQ ID NO: 3029700 - DNA, 25 bp, Homo sapien
cgccctagaacccgcaccgccgcgg

SEQ ID NO: 3029701 - DNA, 25 bp, Homo sapien
cttccccgcctcgcggcggcgccca

SEQ ID NO: 3029702 - DNA, 25 bp, Homo sapien
gcgcccaacgccctcgcgcgcgcta

SEQ ID NO: 3029703 - DNA, 25 bp, Homo sapien
gccctagaacccgcaccgccgcggc

SEQ ID NO: 3029704 - DNA, 25 bp, Homo sapien
gcatagaggcccagaaccgaactgt

SEQ ID NO: 3029705 - DNA, 25 bp, Homo sapien
aaccgaactgtcagtgatgccaaac

SEQ ID NO: 3029706 - DNA, 25 bp, Homo sapien
gccaaactggatgctatgtgaggac

SEQ ID NO: 3029707 - DNA, 25 bp, Homo sapien
ggcccagaaccgaactgtcagtgat

SEQ ID NO: 3029708 - DNA, 25 bp, Homo sapien
tagagcagttgcaggagatcaccaa

SEQ ID NO: 3029709 - DNA, 25 bp, Homo sapien
ccaagtttggttacaggtgcaatcg

SEQ ID NO: 3029710 - DNA, 25 bp, Homo sapien
tgcaatcgaggagtgaaacgccagt

SEQ ID NO: 3029711 - DNA, 25 bp, Homo sapien
gtcttgggaacaggccagattgccg

SEQ ID NO: 3029712 - DNA, 25 bp, Homo sapien
tcacgggtactgttcccagcaaagg

SEQ ID NO: 3029713 - DNA, 25 bp, Homo sapien
ctgaggacctgaggtgcaaacagaa

SEQ ID NO: 3029714 - DNA, 25 bp, Homo sapien
tctgcctaggcaaccagagactgag

SEQ ID NO: 3029715 - DNA, 25 bp, Homo sapien
gtatgatcccaacagccgcaagtct

SEQ ID NO: 3029716 - DNA, 25 bp, Homo sapien
ctcttaagcttgtcttctttataag

SEQ ID NO: 3029717 - DNA, 25 bp, Homo sapien
acctcttaagcttgtcttctttata

SEQ ID NO: 3029718 - DNA, 25 bp, Homo sapien
cctcttaagcttgtcttctttataa

SEQ ID NO: 3029719 - DNA, 25 bp, Homo sapien
gtttagctgctatcccaacttccat

SEQ ID NO: 3029720 - DNA, 25 bp, Homo sapien
ctgccacttacagggtgactgaatg

SEQ ID NO: 3029721 - DNA, 25 bp, Homo sapien
tccaaggtgcctgcaagtttttatt

SEQ ID NO: 3029722 - DNA, 25 bp, Homo sapien
tgcgcctggccaataccagcatagt

SEQ ID NO: 3029723 - DNA, 25 bp, Homo sapien
cagttgttgcaatcctcgtctctca

SEQ ID NO: 3029724 - DNA, 25 bp, Homo sapien
tgcttcttggtaaatcccagctcct

SEQ ID NO: 3029725 - DNA, 25 bp, Homo sapien
cataaagttactaaggcaggaatac

SEQ ID NO: 3029726 - DNA, 25 bp, Homo sapien
tgaaactaagccctctctaggctcc

SEQ ID NO: 3029727 - DNA, 25 bp, Homo sapien
tcaccatgttagccaggacaatctc

SEQ ID NO: 3029728 - DNA, 25 bp, Homo sapien
ccatgttagccaggacaatctcgat

SEQ ID NO: 3029729 - DNA, 25 bp, Homo sapien
ctgggttcacatccttcctctgcct

SEQ ID NO: 3029730 - DNA, 25 bp, Homo sapien
tcctgggttcacatccttcctctgc

SEQ ID NO: 3029731 - DNA, 25 bp, Homo sapien
gattagaatttatcttaactgaaag

SEQ ID NO: 3029732 - DNA, 25 bp, Homo sapien
gcagtttacaactacttggcatctc

SEQ ID NO: 3029733 - DNA, 25 bp, Homo sapien
taaacagcctagagtcttgtagaaa

SEQ ID NO: 3029734 - DNA, 25 bp, Homo sapien
tggcatctctagctcagaagcacaa

SEQ ID NO: 3029735 - DNA, 25 bp, Homo sapien
tcttctgtcgatgaaacagtgtgcc

SEQ ID NO: 3029736 - DNA, 25 bp, Homo sapien
aaaccttgggtttatgccatacact

SEQ ID NO: 3029737 - DNA, 25 bp, Homo sapien
aaggcaaagtccagtagtggctcat

SEQ ID NO: 3029738 - DNA, 25 bp, Homo sapien
aacagaagagccataaatgccctga

SEQ ID NO: 3029739 - DNA, 25 bp, Homo sapien
tcatgtgcattgaggaagcgctggc

SEQ ID NO: 3029740 - DNA, 25 bp, Homo sapien
caactgggcagtcctgctgatggct

SEQ ID NO: 3029741 - DNA, 25 bp, Homo sapien
tgtgtgatcccgatgcagaagccaa

SEQ ID NO: 3029742 - DNA, 25 bp, Homo sapien
ccacgtggtcaatggagtgtgctca

SEQ ID NO: 3029743 - DNA, 25 bp, Homo sapien
taatgccgctgtcaagaagactgca

SEQ ID NO: 3029744 - DNA, 25 bp, Homo sapien
tatatactgccatcagaggaaggag

SEQ ID NO: 3029745 - DNA, 25 bp, Homo sapien
caatgctgattagggatgagttacc

SEQ ID NO: 3029746 - DNA, 25 bp, Homo sapien
tgtggtccctgtctattccagtagg

SEQ ID NO: 3029747 - DNA, 25 bp, Homo sapien
cctagagcatattcaagagggatgg

SEQ ID NO: 3029748 - DNA, 25 bp, Homo sapien
gccagaagctgactacaattttgtg

SEQ ID NO: 3029749 - DNA, 25 bp, Homo sapien
tcccatgttggcaatagatattaga

SEQ ID NO: 3029750 - DNA, 25 bp, Homo sapien
ttacaaattaaggatggacaccaac

SEQ ID NO: 3029751 - DNA, 25 bp, Homo sapien
tgaggaactaaagtagtcacctgca

SEQ ID NO: 3029752 - DNA, 25 bp, Homo sapien
tgagtattccttcgcaggcctagga

SEQ ID NO: 3029753 - DNA, 25 bp, Homo sapien
gtgtcgaatttctctgatctactaa

SEQ ID NO: 3029754 - DNA, 25 bp, Homo sapien
tcagctagttcttcgagtctactgt

SEQ ID NO: 3029755 - DNA, 25 bp, Homo sapien
tctctaacggttgatcatactgagc

SEQ ID NO: 3029756 - DNA, 25 bp, Homo sapien
ggttgatcatactgagcctgctgca

SEQ ID NO: 3029757 - DNA, 25 bp, Homo sapien
tgtagatttctctaacggttgatca

SEQ ID NO: 3029758 - DNA, 25 bp, Homo sapien
tcattttagcaatcttccaagctag

SEQ ID NO: 3029759 - DNA, 25 bp, Homo sapien
ttcatagcttgtgagaacatggatc

SEQ ID NO: 3029760 - DNA, 25 bp, Homo sapien
tcttcatagcttgtgagaacatgga

SEQ ID NO: 3029761 - DNA, 25 bp, Homo sapien
cttcatagcttgtgagaacatggat

SEQ ID NO: 3029762 - DNA, 25 bp, Homo sapien
ttcttcatagcttgtgagaacatgg

SEQ ID NO: 3029763 - DNA, 25 bp, Homo sapien
aattgaatgtacatttcatgcataa

SEQ ID NO: 3029764 - DNA, 25 bp, Homo sapien
tgaatgtacatttcatgcataattt

SEQ ID NO: 3029765 - DNA, 25 bp, Homo sapien
ttgaatgtacatttcatgcataatt

SEQ ID NO: 3029766 - DNA, 25 bp, Homo sapien
attgaatgtacatttcatgcataat

SEQ ID NO: 3029767 - DNA, 25 bp, Homo sapien
ccagaccagctcctatataaaaggg

SEQ ID NO: 3029768 - DNA, 25 bp, Homo sapien
taatgctcttgggtaagaatctagc

SEQ ID NO: 3029769 - DNA, 25 bp, Homo sapien
tataaaagggcttctaagacagagt

SEQ ID NO: 3029770 - DNA, 25 bp, Homo sapien
catctagtgttagtttgtggcaaac

SEQ ID NO: 3029771 - DNA, 25 bp, Homo sapien
ggtggcgagcgcctgtggtccctgc

SEQ ID NO: 3029772 - DNA, 25 bp, Homo sapien
gtggcgagcgcctgtggtccctgct

SEQ ID NO: 3029773 - DNA, 25 bp, Homo sapien
tggtggcgagcgcctgtggtccctg

SEQ ID NO: 3029774 - DNA, 25 bp, Homo sapien
tactcaggaggctgaggcaggagaa

SEQ ID NO: 3029775 - DNA, 25 bp, Homo sapien
ggttcaggctcagattctcggatga

SEQ ID NO: 3029776 - DNA, 25 bp, Homo sapien
aggttcaggctcagattctcggatg

SEQ ID NO: 3029777 - DNA, 25 bp, Homo sapien
cttgccgcatccacaattatcgctt

SEQ ID NO: 3029778 - DNA, 25 bp, Homo sapien
atgtccgttgatataaagattctgg

SEQ ID NO: 3029779 - DNA, 25 bp, Homo sapien
cggcatatgtccgttgatataaaga

SEQ ID NO: 3029780 - DNA, 25 bp, Homo sapien
catccacaattatcgcttcatcaaa

SEQ ID NO: 3029781 - DNA, 25 bp, Homo sapien
tcttaagcgttcagatacaaaatct

SEQ ID NO: 3029782 - DNA, 25 bp, Homo sapien
tctatctttggaatggaagagaatc

SEQ ID NO: 3029783 - DNA, 25 bp, Homo sapien
gacagacatacagacggatgtatgt

SEQ ID NO: 3029784 - DNA, 25 bp, Homo sapien
aattcatttctgatagagtgtaaat

SEQ ID NO: 3029785 - DNA, 25 bp, Homo sapien
taatctatgccatcaaaagtcagga

SEQ ID NO: 3029786 - DNA, 25 bp, Homo sapien
gaacattcttcaaggtgtctaaggt

SEQ ID NO: 3029787 - DNA, 25 bp, Homo sapien
taagtgcctaatcaaaaacaagaca

SEQ ID NO: 3029788 - DNA, 25 bp, Homo sapien
ggatagtagctaccctggtgacaag

SEQ ID NO: 3029789 - DNA, 25 bp, Homo sapien
gagactcatcaggagggccaacaga

SEQ ID NO: 3029790 - DNA, 25 bp, Homo sapien
tgagacgcagagctgtcagaactcc

SEQ ID NO: 3029791 - DNA, 25 bp, Homo sapien
agccaggagcagtcagcgacacgtt

SEQ ID NO: 3029792 - DNA, 25 bp, Homo sapien
tcagaactccctgggtgagactcat

SEQ ID NO: 3029793 - DNA, 25 bp, Homo sapien
cagctttgatccattataatcgtac

SEQ ID NO: 3029794 - DNA, 25 bp, Homo sapien
taatcgtacaggaccatcgtacacg

SEQ ID NO: 3029795 - DNA, 25 bp, Homo sapien
actaaaatgttatgtggcacgtgac

SEQ ID NO: 3029796 - DNA, 25 bp, Homo sapien
acttttgttattattgcactaccag

SEQ ID NO: 3029797 - DNA, 25 bp, Homo sapien
ctcttaatcactttgctggactgct

SEQ ID NO: 3029798 - DNA, 25 bp, Homo sapien
cactttgctggactgcttcaatttc

SEQ ID NO: 3029799 - DNA, 25 bp, Homo sapien
gtgctattctgcttggttttcccac

SEQ ID NO: 3029800 - DNA, 25 bp, Homo sapien
tcaatttccactgtgctattctgct

SEQ ID NO: 3029801 - DNA, 25 bp, Homo sapien
tatattttatgagttctaccaataa

SEQ ID NO: 3029802 - DNA, 25 bp, Homo sapien
tgatacgtttgaagttctgggttac

SEQ ID NO: 3029803 - DNA, 25 bp, Homo sapien
ttgatacgtttgaagttctgggtta

SEQ ID NO: 3029804 - DNA, 25 bp, Homo sapien
taatcgtacaacatcatcaaatcca

SEQ ID NO: 3029805 - DNA, 25 bp, Homo sapien
cgtaatggagttgtgaaacagttgg

SEQ ID NO: 3029806 - DNA, 25 bp, Homo sapien
tggattcaatttctaatcgtacaac

SEQ ID NO: 3029807 - DNA, 25 bp, Homo sapien
ccatggttgtccaggcctgacgtaa

SEQ ID NO: 3029808 - DNA, 25 bp, Homo sapien
gagcctgcaggcctagaactataga

SEQ ID NO: 3029809 - DNA, 25 bp, Homo sapien
ctatagagctatgtgatgacagtgc

SEQ ID NO: 3029810 - DNA, 25 bp, Homo sapien
tatctgcctgccaaccatccttagt

SEQ ID NO: 3029811 - DNA, 25 bp, Homo sapien
cacttccccagagatagttgggtca

SEQ ID NO: 3029812 - DNA, 25 bp, Homo sapien
gttatctgctgccaaccagaattgt

SEQ ID NO: 3029813 - DNA, 25 bp, Homo sapien
cagaattgtaagatattcactgcat

SEQ ID NO: 3029814 - DNA, 25 bp, Homo sapien
agctgagactggaagttatctgctg

SEQ ID NO: 3029815 - DNA, 25 bp, Homo sapien
gcctcctgtccatcatattggccct

SEQ ID NO: 3029816 - DNA, 25 bp, Homo sapien
ctctaatctataagctcaaatatta

SEQ ID NO: 3029817 - DNA, 25 bp, Homo sapien
aaacaaaaagatctacttcttctgt

SEQ ID NO: 3029818 - DNA, 25 bp, Homo sapien
gcaagttacagtcatttgagattga

SEQ ID NO: 3029819 - DNA, 25 bp, Homo sapien
cagatttctctcacaatctctaatc

SEQ ID NO: 3029820 - DNA, 25 bp, Homo sapien
gacttcgcagaaactcactaaagtg

SEQ ID NO: 3029821 - DNA, 25 bp, Homo sapien
cagaaatggtgacttcgcagaaact

SEQ ID NO: 3029822 - DNA, 25 bp, Homo sapien
cactggtcagcacttcaatctggta

SEQ ID NO: 3029823 - DNA, 25 bp, Homo sapien
tgtcagccaggtaaacagttccact

SEQ ID NO: 3029824 - DNA, 25 bp, Homo sapien
gaaacagttgggatccacctgtcca

SEQ ID NO: 3029825 - DNA, 25 bp, Homo sapien
tcttgctccattgcactaaagacta

SEQ ID NO: 3029826 - DNA, 25 bp, Homo sapien
cactaaagactatggactgtgccaa

SEQ ID NO: 3029827 - DNA, 25 bp, Homo sapien
tatggactgtgccaaaacgaaacag

SEQ ID NO: 3029828 - DNA, 25 bp, Homo sapien
ggctggtcccaacctacagtatgaa

SEQ ID NO: 3029829 - DNA, 25 bp, Homo sapien
cagttaaggtatgtgagggtctagt

SEQ ID NO: 3029830 - DNA, 25 bp, Homo sapien
cacagcagttaaggtatgtgagggt

SEQ ID NO: 3029831 - DNA, 25 bp, Homo sapien
gccatatctgagctgttaccctgga

SEQ ID NO: 3029832 - DNA, 25 bp, Homo sapien
tctggctaatgcaggtagacatcca

SEQ ID NO: 3029833 - DNA, 25 bp, Homo sapien
ctggtcgtgagactcttgggctgca

SEQ ID NO: 3029834 - DNA, 25 bp, Homo sapien
tgaagccctgagacggagaggccac

SEQ ID NO: 3029835 - DNA, 25 bp, Homo sapien
tgtgtggcacaatcaactggcaaaa

SEQ ID NO: 3029836 - DNA, 25 bp, Homo sapien
cgcccacttcgtgcactggtgcggg

SEQ ID NO: 3029837 - DNA, 25 bp, Homo sapien
gtctgtgccggttagcgtagccgcc

SEQ ID NO: 3029838 - DNA, 25 bp, Homo sapien
gctgccggccagtccatccggtggt

SEQ ID NO: 3029839 - DNA, 25 bp, Homo sapien
cagtccatccggtggtctgtgccgg

SEQ ID NO: 3029840 - DNA, 25 bp, Homo sapien
taggaagggaactgctaaattccat

SEQ ID NO: 3029841 - DNA, 25 bp, Homo sapien
tgccatagtttcaagcactgcttac

SEQ ID NO: 3029842 - DNA, 25 bp, Homo sapien
taacgaaaattgtcagttctgtgca

SEQ ID NO: 3029843 - DNA, 25 bp, Homo sapien
gcaccgaatgcagccgagaaacttt

SEQ ID NO: 3029844 - DNA, 25 bp, Homo sapien
tcattgcttctgtaattggtattgg

SEQ ID NO: 3029845 - DNA, 25 bp, Homo sapien
gtattggtttagcagcatctggaga

SEQ ID NO: 3029846 - DNA, 25 bp, Homo sapien
ttggtattggtttagcagcatctgg

SEQ ID NO: 3029847 - DNA, 25 bp, Homo sapien
aattggtattggtttagcagcatct

SEQ ID NO: 3029848 - DNA, 25 bp, Homo sapien
cagttacaggaatctatgtatgtgt

SEQ ID NO: 3029849 - DNA, 25 bp, Homo sapien
tgtaactaatgctcttttaataact

SEQ ID NO: 3029850 - DNA, 25 bp, Homo sapien
aaggtcaaacttactatatataata

SEQ ID NO: 3029851 - DNA, 25 bp, Homo sapien
ttacccttatagtggtgacagttac

SEQ ID NO: 3029852 - DNA, 25 bp, Homo sapien
gactatttctactggctactgtaag

SEQ ID NO: 3029853 - DNA, 25 bp, Homo sapien
taagtgtagaggaagattcttgggt

SEQ ID NO: 3029854 - DNA, 25 bp, Homo sapien
gtggagaagcgggactatttctact

SEQ ID NO: 3029855 - DNA, 25 bp, Homo sapien
tactggctactgtaagtgtagagga

SEQ ID NO: 3029856 - DNA, 25 bp, Homo sapien
tgagtcataaacaactgtgctgagc

SEQ ID NO: 3029857 - DNA, 25 bp, Homo sapien
gaatcctccaatctcttatcaagag

SEQ ID NO: 3029858 - DNA, 25 bp, Homo sapien
gagacaggctcagccagtgagctct

SEQ ID NO: 3029859 - DNA, 25 bp, Homo sapien
gactgtgtgctcttattcgcgacca

SEQ ID NO: 3029860 - DNA, 25 bp, Homo sapien
cgccgaagttccatgaattgaatga

SEQ ID NO: 3029861 - DNA, 25 bp, Homo sapien
ggtctcttgagtctggtagtccaga

SEQ ID NO: 3029862 - DNA, 25 bp, Homo sapien
caatagtgtcgtgcaagacttgttc

SEQ ID NO: 3029863 - DNA, 25 bp, Homo sapien
tgaagtaagggaggacaatagtgtc

SEQ ID NO: 3029864 - DNA, 25 bp, Homo sapien
gtctctaacatctggcaaacactaa

SEQ ID NO: 3029865 - DNA, 25 bp, Homo sapien
taattgcatgtttcacgtcataaga

SEQ ID NO: 3029866 - DNA, 25 bp, Homo sapien
ctgggataaatacagagtgcaactg

SEQ ID NO: 3029867 - DNA, 25 bp, Homo sapien
tgcatccactgccaagatacaactt

SEQ ID NO: 3029868 - DNA, 25 bp, Homo sapien
tcttaagtgtggctgtcctgctact

SEQ ID NO: 3029869 - DNA, 25 bp, Homo sapien
gctgtcctgctacttgaaaaggagt

SEQ ID NO: 3029870 - DNA, 25 bp, Homo sapien
gcttcttaagtgtggctgtcctgct

SEQ ID NO: 3029871 - DNA, 25 bp, Homo sapien
tcctgctacttgaaaaggagtccat

SEQ ID NO: 3029872 - DNA, 25 bp, Homo sapien
tttgtggggaatgtacggatattga

SEQ ID NO: 3029873 - DNA, 25 bp, Homo sapien
gattgcaacatgacttggtcctgca

SEQ ID NO: 3029874 - DNA, 25 bp, Homo sapien
cctccagcaaggcatgatttttagt

SEQ ID NO: 3029875 - DNA, 25 bp, Homo sapien
cagaaatggcattgattgcaacatg

SEQ ID NO: 3029876 - DNA, 25 bp, Homo sapien
cattactcttaagtcagcatactca

SEQ ID NO: 3029877 - DNA, 25 bp, Homo sapien
aagcattctaaaatacggattattt

SEQ ID NO: 3029878 - DNA, 25 bp, Homo sapien
aatccttaaaccttgcttgctttag

SEQ ID NO: 3029879 - DNA, 25 bp, Homo sapien
cttaatcaagtggtggaaaatagga

SEQ ID NO: 3029880 - DNA, 25 bp, Homo sapien
caaaaaagtaattctggcaaattca

SEQ ID NO: 3029881 - DNA, 25 bp, Homo sapien
gcagtgagctgcgcgatctcgccac

SEQ ID NO: 3029882 - DNA, 25 bp, Homo sapien
tccacatggactgtttgcaacagct

SEQ ID NO: 3029883 - DNA, 25 bp, Homo sapien
aacatcttactcacaccctccacat

SEQ ID NO: 3029884 - DNA, 25 bp, Homo sapien
tcaacttaggtttgctagactctaa

SEQ ID NO: 3029885 - DNA, 25 bp, Homo sapien
gcaagccagaaggtaggtatcaatc

SEQ ID NO: 3029886 - DNA, 25 bp, Homo sapien
taggttaatgagctagtaaacagcc

SEQ ID NO: 3029887 - DNA, 25 bp, Homo sapien
gttttggttctgttaggcaagccag

SEQ ID NO: 3029888 - DNA, 25 bp, Homo sapien
ttgtctaatgcccagaacagaagaa

SEQ ID NO: 3029889 - DNA, 25 bp, Homo sapien
caatgagggcaggacctaagtcttt

SEQ ID NO: 3029890 - DNA, 25 bp, Homo sapien
gatctagtctttacaggtctctgct

SEQ ID NO: 3029891 - DNA, 25 bp, Homo sapien
caaggtcatactgttagtggcaaag

SEQ ID NO: 3029892 - DNA, 25 bp, Homo sapien
ttaatggacttcacatctgaggtct

SEQ ID NO: 3029893 - DNA, 25 bp, Homo sapien
gtgtagtgactcaaatatggctcat

SEQ ID NO: 3029894 - DNA, 25 bp, Homo sapien
ctatgctgtacaggttgatctcgaa

SEQ ID NO: 3029895 - DNA, 25 bp, Homo sapien
tgaataactcacaacacccagctat

SEQ ID NO: 3029896 - DNA, 25 bp, Homo sapien
ccaccatgccctagaatgatctttt

SEQ ID NO: 3029897 - DNA, 25 bp, Homo sapien
cggagggtgcggggggactggcgcg

SEQ ID NO: 3029898 - DNA, 25 bp, Homo sapien
cggaagaaggacatggcggggcccg

SEQ ID NO: 3029899 - DNA, 25 bp, Homo sapien
ttccgccggaagaaggacatggcgg

SEQ ID NO: 3029900 - DNA, 25 bp, Homo sapien
gactggcgcggggagggcccggctc

SEQ ID NO: 3029901 - DNA, 25 bp, Homo sapien
aggggccgctgcactagcgcgaaaa

SEQ ID NO: 3029902 - DNA, 25 bp, Homo sapien
agctccagccgccatattatcaaca

SEQ ID NO: 3029903 - DNA, 25 bp, Homo sapien
acttccgggtccagaggggccgctg

SEQ ID NO: 3029904 - DNA, 25 bp, Homo sapien
cactagcgcgaaaagggacccttct

SEQ ID NO: 3029905 - DNA, 25 bp, Homo sapien
ctgcgggttcgaggcgatgcagaac

SEQ ID NO: 3029906 - DNA, 25 bp, Homo sapien
gctggccggcacgagcagcttcacc

SEQ ID NO: 3029907 - DNA, 25 bp, Homo sapien
gcttcctcaggagaacccgccacgg

SEQ ID NO: 3029908 - DNA, 25 bp, Homo sapien
gccggcacgagcagcttcaccctgc

SEQ ID NO: 3029909 - DNA, 25 bp, Homo sapien
ctcgacttccagtgtgatttgctgc

SEQ ID NO: 3029910 - DNA, 25 bp, Homo sapien
tcgacttccagtgtgatttgctgcc

SEQ ID NO: 3029911 - DNA, 25 bp, Homo sapien
cgacttccagtgtgatttgctgcct

SEQ ID NO: 3029912 - DNA, 25 bp, Homo sapien
tccccgacagctgcatacacctcag

SEQ ID NO: 3029913 - DNA, 25 bp, Homo sapien
aagtcgccgtaatccccgacagctg

SEQ ID NO: 3029914 - DNA, 25 bp, Homo sapien
ctgaagtcgccgtaatccccgacag

SEQ ID NO: 3029915 - DNA, 25 bp, Homo sapien
taatccccgacagctgcatacacct

SEQ ID NO: 3029916 - DNA, 25 bp, Homo sapien
tccctgcgcacacagttcggtacta

SEQ ID NO: 3029917 - DNA, 25 bp, Homo sapien
ggcagcataaccctcaatataaaaa

SEQ ID NO: 3029918 - DNA, 25 bp, Homo sapien
cacagttcggtactacatatatcct

SEQ ID NO: 3029919 - DNA, 25 bp, Homo sapien
caaaccacccgattaggcgcggtgg

SEQ ID NO: 3029920 - DNA, 25 bp, Homo sapien
gatgttgaccttgccgacttccagg

SEQ ID NO: 3029921 - DNA, 25 bp, Homo sapien
gaaaacctccagtgtagagtgcgga

SEQ ID NO: 3029922 - DNA, 25 bp, Homo sapien
agaatcacttgacgggcttgcgaga

SEQ ID NO: 3029923 - DNA, 25 bp, Homo sapien
tatgaggaaatcagctgtcacccgg

SEQ ID NO: 3029924 - DNA, 25 bp, Homo sapien
gtgttgagggtggtgatataaaaca

SEQ ID NO: 3029925 - DNA, 25 bp, Homo sapien
accacgctgacattacctgtttgag

SEQ ID NO: 3029926 - DNA, 25 bp, Homo sapien
ggtgatataaaacaccacgctgaca

SEQ ID NO: 3029927 - DNA, 25 bp, Homo sapien
cattacctgtttgagttgtctgagt

SEQ ID NO: 3029928 - DNA, 25 bp, Homo sapien
ggcccaatcaaacactatccaagga

SEQ ID NO: 3029929 - DNA, 25 bp, Homo sapien
aacactatccaaggaaggagcatgg

SEQ ID NO: 3029930 - DNA, 25 bp, Homo sapien
acttcttagatacgtggcccaatca

SEQ ID NO: 3029931 - DNA, 25 bp, Homo sapien
tggactctagagaggtttgggaaca

SEQ ID NO: 3029932 - DNA, 25 bp, Homo sapien
ttctgtgatcttcctctattcttgc

SEQ ID NO: 3029933 - DNA, 25 bp, Homo sapien
caattcctccttaattctgtgatct

SEQ ID NO: 3029934 - DNA, 25 bp, Homo sapien
tgtgatcttcctctattcttgctaa

SEQ ID NO: 3029935 - DNA, 25 bp, Homo sapien
tcttcctctattcttgctaaagtca

SEQ ID NO: 3029936 - DNA, 25 bp, Homo sapien
caactaatgggatatttgaacaggg

SEQ ID NO: 3029937 - DNA, 25 bp, Homo sapien
tactctttgaggaacctgcatactc

SEQ ID NO: 3029938 - DNA, 25 bp, Homo sapien
agtcatcctgacaatgtgcgttctg

SEQ ID NO: 3029939 - DNA, 25 bp, Homo sapien
gtatataccacatattgtctacccc

SEQ ID NO: 3029940 - DNA, 25 bp, Homo sapien
gtgacagatcttccggcattagagt

SEQ ID NO: 3029941 - DNA, 25 bp, Homo sapien
cataaagagcggaaaacctacatcc

SEQ ID NO: 3029942 - DNA, 25 bp, Homo sapien
aaaacagcagtgttgtagactggca

SEQ ID NO: 3029943 - DNA, 25 bp, Homo sapien
ttgtagactggcatgaagtgcaact

SEQ ID NO: 3029944 - DNA, 25 bp, Homo sapien
caaacatgaaaggtgctagtgagat

SEQ ID NO: 3029945 - DNA, 25 bp, Homo sapien
taccttggtcgttgtatatgaacat

SEQ ID NO: 3029946 - DNA, 25 bp, Homo sapien
tatgaacatcaaacatgaaaggtgc

SEQ ID NO: 3029947 - DNA, 25 bp, Homo sapien
ccttttccacattgtaccttggtcg

SEQ ID NO: 3029948 - DNA, 25 bp, Homo sapien
cagttcggtttttcagttctgtttg

SEQ ID NO: 3029949 - DNA, 25 bp, Homo sapien
tgagggccaaatggcctcagggcag

SEQ ID NO: 3029950 - DNA, 25 bp, Homo sapien
cagggcagttcggtttttcagttct

SEQ ID NO: 3029951 - DNA, 25 bp, Homo sapien
ggcctcagggcagttcggtttttca

SEQ ID NO: 3029952 - DNA, 25 bp, Homo sapien
aacttgtaagcccacaaacttcttg

SEQ ID NO: 3029953 - DNA, 25 bp, Homo sapien
ttaaaactgaaaatgtaccagcgta

SEQ ID NO: 3029954 - DNA, 25 bp, Homo sapien
cttgtaagcccacaaacttcttgtt

SEQ ID NO: 3029955 - DNA, 25 bp, Homo sapien
gaaaatgtaccagcgtattgtaact

SEQ ID NO: 3029956 - DNA, 25 bp, Homo sapien
tgggcagtgtatttggtccctgttg

SEQ ID NO: 3029957 - DNA, 25 bp, Homo sapien
tggtccctgttgcagtagatcccat

SEQ ID NO: 3029958 - DNA, 25 bp, Homo sapien
ttggtccctgttgcagtagatccca

SEQ ID NO: 3029959 - DNA, 25 bp, Homo sapien
ttttctgggcagtgtatttggtccc

SEQ ID NO: 3029960 - DNA, 25 bp, Homo sapien
tccgtagtagcagggaacgtggacc

SEQ ID NO: 3029961 - DNA, 25 bp, Homo sapien
tggaccccaggctttgtgaggatgc

SEQ ID NO: 3029962 - DNA, 25 bp, Homo sapien
gatgcccatatcattttggagctcc

SEQ ID NO: 3029963 - DNA, 25 bp, Homo sapien
gggcttactctaggccatccgtagt

SEQ ID NO: 3029964 - DNA, 25 bp, Homo sapien
cccctgctgtgatatgcttcctggt

SEQ ID NO: 3029965 - DNA, 25 bp, Homo sapien
ctgtgatatgcttcctggttgtagc

SEQ ID NO: 3029966 - DNA, 25 bp, Homo sapien
cctgctgtgatatgcttcctggttg

SEQ ID NO: 3029967 - DNA, 25 bp, Homo sapien
agcccctgctgtgatatgcttcctg

SEQ ID NO: 3029968 - DNA, 25 bp, Homo sapien
ggtgtggctgcttctgctcctttac

SEQ ID NO: 3029969 - DNA, 25 bp, Homo sapien
tgtggctgcttctgctcctttacag

SEQ ID NO: 3029970 - DNA, 25 bp, Homo sapien
tggtgtggctgcttctgctccttta

SEQ ID NO: 3029971 - DNA, 25 bp, Homo sapien
gtgtggctgcttctgctcctttaca

SEQ ID NO: 3029972 - DNA, 25 bp, Homo sapien
ttaaccctgcaaagcacagcagttg

SEQ ID NO: 3029973 - DNA, 25 bp, Homo sapien
cctgcaaagcacagcagttgctttc

SEQ ID NO: 3029974 - DNA, 25 bp, Homo sapien
gccagctggcactgcaggaatattg

SEQ ID NO: 3029975 - DNA, 25 bp, Homo sapien
ggcactgcaggaatattgctaaagc

SEQ ID NO: 3029976 - DNA, 25 bp, Homo sapien
gactcccgctgcatgtgcgagtgga

SEQ ID NO: 3029977 - DNA, 25 bp, Homo sapien
gccatgcggcgatgatccaggtttt

SEQ ID NO: 3029978 - DNA, 25 bp, Homo sapien
gggatatccaccacgactctgggta

SEQ ID NO: 3029979 - DNA, 25 bp, Homo sapien
gatggatattccctgttcagtggag

SEQ ID NO: 3029980 - DNA, 25 bp, Homo sapien
cgactcagcagggtatggatcaaaa

SEQ ID NO: 3029981 - DNA, 25 bp, Homo sapien
tgcagcaggttcaagtgatggagac

SEQ ID NO: 3029982 - DNA, 25 bp, Homo sapien
gtaagcaaaccagtggcctctcggg

SEQ ID NO: 3029983 - DNA, 25 bp, Homo sapien
cacgaagtcaagcatgcggagtgca

SEQ ID NO: 3029984 - DNA, 25 bp, Homo sapien
tggactatttcacgactttgaatgt

SEQ ID NO: 3029985 - DNA, 25 bp, Homo sapien
actatttcacgactttgaatgtcat

SEQ ID NO: 3029986 - DNA, 25 bp, Homo sapien
taacatatggactatttcacgactt

SEQ ID NO: 3029987 - DNA, 25 bp, Homo sapien
catatggactatttcacgactttga

SEQ ID NO: 3029988 - DNA, 25 bp, Homo sapien
gcccagccaggtcatatcatttacg

SEQ ID NO: 3029989 - DNA, 25 bp, Homo sapien
aaagcctgaagtgcaattttgccat

SEQ ID NO: 3029990 - DNA, 25 bp, Homo sapien
tcatttacgctctgtcgaaggaaga

SEQ ID NO: 3029991 - DNA, 25 bp, Homo sapien
tgaaagtaaggagggcattaaagcc

SEQ ID NO: 3029992 - DNA, 25 bp, Homo sapien
tgtcctccccttctgcttgcatgat

SEQ ID NO: 3029993 - DNA, 25 bp, Homo sapien
ttactttagtgcctgttggaaggtg

SEQ ID NO: 3029994 - DNA, 25 bp, Homo sapien
ttgtcctccccttctgcttgcatga

SEQ ID NO: 3029995 - DNA, 25 bp, Homo sapien
tcctccccttctgcttgcatgatgg

SEQ ID NO: 3029996 - DNA, 25 bp, Homo sapien
ctgtgcatgcaggcaaggagaaggg

SEQ ID NO: 3029997 - DNA, 25 bp, Homo sapien
ggaacactagcaggccttctgaagc

SEQ ID NO: 3029998 - DNA, 25 bp, Homo sapien
gaagggaacactagcaggccttctg

SEQ ID NO: 3029999 - DNA, 25 bp, Homo sapien
ggagaagggaacactagcaggcctt

SEQ ID NO: 3030000 - DNA, 25 bp, Homo sapien
gttacaaccatcaccgcagatgagt

SEQ ID NO: 3030001 - DNA, 25 bp, Homo sapien
tgtcactccagaaataccccatgct

SEQ ID NO: 3030002 - DNA, 25 bp, Homo sapien
tgtgtgtgctatttgcctaaggaac

SEQ ID NO: 3030003 - DNA, 25 bp, Homo sapien
tctgttcaccgagttggcctttggc

SEQ ID NO: 3030004 - DNA, 25 bp, Homo sapien
gctgaatgttatctaccgaatgaag

SEQ ID NO: 3030005 - DNA, 25 bp, Homo sapien
gaatgttatctaccgaatgaaggaa

SEQ ID NO: 3030006 - DNA, 25 bp, Homo sapien
agatgctgaatgttatctaccgaat

SEQ ID NO: 3030007 - DNA, 25 bp, Homo sapien
ttatctaccgaatgaaggaatctga

SEQ ID NO: 3030008 - DNA, 25 bp, Homo sapien
cagagtagggggaatccattcagag

SEQ ID NO: 3030009 - DNA, 25 bp, Homo sapien
cgacaaataccagtacaggttcaga

SEQ ID NO: 3030010 - DNA, 25 bp, Homo sapien
tccattcagagtccttgagaggagg

SEQ ID NO: 3030011 - DNA, 25 bp, Homo sapien
aataccagtacaggttcagagtagg

SEQ ID NO: 3030012 - DNA, 25 bp, Homo sapien
cattttagtaatttccgacagcggc

SEQ ID NO: 3030013 - DNA, 25 bp, Homo sapien
taggtctagcttcacacgagcagga

SEQ ID NO: 3030014 - DNA, 25 bp, Homo sapien
aatgcttattaagcgcctgtcctgc

SEQ ID NO: 3030015 - DNA, 25 bp, Homo sapien
caggattttgcctttccggcggcac

SEQ ID NO: 3030016 - DNA, 25 bp, Homo sapien
cagttgaggtggtccggcaggatgc

SEQ ID NO: 3030017 - DNA, 25 bp, Homo sapien
gcagctgcggttctcagcatccgcg

SEQ ID NO: 3030018 - DNA, 25 bp, Homo sapien
gctggtgcccgagtcggccaagcat

SEQ ID NO: 3030019 - DNA, 25 bp, Homo sapien
ctttctttgactggagcggacccgc

SEQ ID NO: 3030020 - DNA, 25 bp, Homo sapien
gttctatataagagagggccggctt

SEQ ID NO: 3030021 - DNA, 25 bp, Homo sapien
tggagcccgcatttcctgagtttga

SEQ ID NO: 3030022 - DNA, 25 bp, Homo sapien
tgtgatcccaaacgaaaggctaagc

SEQ ID NO: 3030023 - DNA, 25 bp, Homo sapien
taatgattatcccaggcaagtaggg

SEQ ID NO: 3030024 - DNA, 25 bp, Homo sapien
accaatacttgttatcttgtgtctt

SEQ ID NO: 3030025 - DNA, 25 bp, Homo sapien
gcctgttctgactagagttatggtg

SEQ ID NO: 3030026 - DNA, 25 bp, Homo sapien
gtgtgatgatcagtcctggactctc

SEQ ID NO: 3030027 - DNA, 25 bp, Homo sapien
ggactctcaggtttgcctgttctga

SEQ ID NO: 3030028 - DNA, 25 bp, Homo sapien
aaagtcagccttaatttagtgatgt

SEQ ID NO: 3030029 - DNA, 25 bp, Homo sapien
gctttgggcccaaatgtcgatggaa

SEQ ID NO: 3030030 - DNA, 25 bp, Homo sapien
gcccaagcaagagaatgaaggtgga

SEQ ID NO: 3030031 - DNA, 25 bp, Homo sapien
tggagaaaaggctgcgcttgagtcc

SEQ ID NO: 3030032 - DNA, 25 bp, Homo sapien
tgacacggaacctatgataagagct

SEQ ID NO: 3030033 - DNA, 25 bp, Homo sapien
tgccccaggatgcaagactcaaaag

SEQ ID NO: 3030034 - DNA, 25 bp, Homo sapien
gcagagcctttgagggacagcagcc

SEQ ID NO: 3030035 - DNA, 25 bp, Homo sapien
tacctagcttgtaacttggcgcaga

SEQ ID NO: 3030036 - DNA, 25 bp, Homo sapien
gaggctttgctcagggtgctcgacc

SEQ ID NO: 3030037 - DNA, 25 bp, Homo sapien
ccttctcggatgtaaattcttcttg

SEQ ID NO: 3030038 - DNA, 25 bp, Homo sapien
ttggccttctcggatgtaaattctt

SEQ ID NO: 3030039 - DNA, 25 bp, Homo sapien
tgatcctttgccaaaacgccgtgca

SEQ ID NO: 3030040 - DNA, 25 bp, Homo sapien
ctgatcctttgccaaaacgccgtgc

SEQ ID NO: 3030041 - DNA, 25 bp, Homo sapien
agttttctgttacgatggagagatt

SEQ ID NO: 3030042 - DNA, 25 bp, Homo sapien
ttttctgttacgatggagagatttc

SEQ ID NO: 3030043 - DNA, 25 bp, Homo sapien
tccatttgtaatttccagtaagaat

SEQ ID NO: 3030044 - DNA, 25 bp, Homo sapien
tttctgttacgatggagagatttcc

SEQ ID NO: 3030045 - DNA, 25 bp, Homo sapien
tacagatcaagaactagtggtcact

SEQ ID NO: 3030046 - DNA, 25 bp, Homo sapien
gatctgcattcaaatacggccgagc

SEQ ID NO: 3030047 - DNA, 25 bp, Homo sapien
ggatgacagtgcacacggctttgaa

SEQ ID NO: 3030048 - DNA, 25 bp, Homo sapien
gaagagtgtttcctgatcatgggct

SEQ ID NO: 3030049 - DNA, 25 bp, Homo sapien
tgtagagaccaacccaagtagatgc

SEQ ID NO: 3030050 - DNA, 25 bp, Homo sapien
ggacaagccatccagcggtgaggaa

SEQ ID NO: 3030051 - DNA, 25 bp, Homo sapien
aggactcgggcccatagatgcagac

SEQ ID NO: 3030052 - DNA, 25 bp, Homo sapien
tgctgcccacaaacgttacggagac

SEQ ID NO: 3030053 - DNA, 25 bp, Homo sapien
cgtagtgtgctatgccgatcaggtg

SEQ ID NO: 3030054 - DNA, 25 bp, Homo sapien
gccgtagtgtgctatgccgatcagg

SEQ ID NO: 3030055 - DNA, 25 bp, Homo sapien
gggccgtagtgtgctatgccgatca

SEQ ID NO: 3030056 - DNA, 25 bp, Homo sapien
ccgtagtgtgctatgccgatcaggt

SEQ ID NO: 3030057 - DNA, 25 bp, Homo sapien
agcacgagtgactgacagctcctct

SEQ ID NO: 3030058 - DNA, 25 bp, Homo sapien
gaactactcttcactcgacaccatg

SEQ ID NO: 3030059 - DNA, 25 bp, Homo sapien
gcatggctgactcacaaaggttgta

SEQ ID NO: 3030060 - DNA, 25 bp, Homo sapien
tctgcttacaaacgaatgaaaccca

SEQ ID NO: 3030061 - DNA, 25 bp, Homo sapien
tgccagtcgctcttttctgggtgct

SEQ ID NO: 3030062 - DNA, 25 bp, Homo sapien
tgtgctctttatcactgccgctgtg

SEQ ID NO: 3030063 - DNA, 25 bp, Homo sapien
tggactgtcgtcacacctctgcgct

SEQ ID NO: 3030064 - DNA, 25 bp, Homo sapien
ttctgccttgcagatcctcctgttt

SEQ ID NO: 3030065 - DNA, 25 bp, Homo sapien
tttctctgcaattttcttctgttta

SEQ ID NO: 3030066 - DNA, 25 bp, Homo sapien
ctgcaattttcttctgtttatctgt

SEQ ID NO: 3030067 - DNA, 25 bp, Homo sapien
cttacttctttctctgcaattttct

SEQ ID NO: 3030068 - DNA, 25 bp, Homo sapien
tcttctgtttatctgtctctctttt

SEQ ID NO: 3030069 - DNA, 25 bp, Homo sapien
taactctctcctcctccgttcttct

SEQ ID NO: 3030070 - DNA, 25 bp, Homo sapien
tctcctcctccgttcttctcgcttc

SEQ ID NO: 3030071 - DNA, 25 bp, Homo sapien
ctctctcctcctccgttcttctcgc

SEQ ID NO: 3030072 - DNA, 25 bp, Homo sapien
actctctcctcctccgttcttctcg

SEQ ID NO: 3030073 - DNA, 25 bp, Homo sapien
tccaaaagaggtgtggttcttctag

SEQ ID NO: 3030074 - DNA, 25 bp, Homo sapien
ccccagcagagtctcagggttggca

SEQ ID NO: 3030075 - DNA, 25 bp, Homo sapien
atatattccaaaagaggtgtggttc

SEQ ID NO: 3030076 - DNA, 25 bp, Homo sapien
tattccaaaagaggtgtggttcttc

SEQ ID NO: 3030077 - DNA, 25 bp, Homo sapien
taatgtatgctcttgagtagagatg

SEQ ID NO: 3030078 - DNA, 25 bp, Homo sapien
aggattcctaaaattaatgtatgct

SEQ ID NO: 3030079 - DNA, 25 bp, Homo sapien
ggcgaagaactcgaagtagtcgtgt

SEQ ID NO: 3030080 - DNA, 25 bp, Homo sapien
tcggcggcgaagaactcgaagtagt

SEQ ID NO: 3030081 - DNA, 25 bp, Homo sapien
aacttgggccctctcttctcggcat

SEQ ID NO: 3030082 - DNA, 25 bp, Homo sapien
cccacactggcatatgaacttgggc

SEQ ID NO: 3030083 - DNA, 25 bp, Homo sapien
tgaacttgggccctctcttctcggc

SEQ ID NO: 3030084 - DNA, 25 bp, Homo sapien
cggctcccacactggcatatgaact

SEQ ID NO: 3030085 - DNA, 25 bp, Homo sapien
gctgttaattgctataaattgccct

SEQ ID NO: 3030086 - DNA, 25 bp, Homo sapien
tatttgatatgagcttttaaactca

SEQ ID NO: 3030087 - DNA, 25 bp, Homo sapien
aaactcaatatatggtctattctgg

SEQ ID NO: 3030088 - DNA, 25 bp, Homo sapien
tattgattggcccagttgttcattc

SEQ ID NO: 3030089 - DNA, 25 bp, Homo sapien
gctaatgttgaacgtaaatggccta

SEQ ID NO: 3030090 - DNA, 25 bp, Homo sapien
taaatggacacatcaaaagcgagca

SEQ ID NO: 3030091 - DNA, 25 bp, Homo sapien
gaaaaagacacttcgtctaaatgga

SEQ ID NO: 3030092 - DNA, 25 bp, Homo sapien
caggcaacaaatagcgttacgaata

SEQ ID NO: 3030093 - DNA, 25 bp, Homo sapien
caggaagctggagcaattccaccag

SEQ ID NO: 3030094 - DNA, 25 bp, Homo sapien
gaagctggagcaattccaccagatt

SEQ ID NO: 3030095 - DNA, 25 bp, Homo sapien
tgtacaacagatgcaacaagaaaat

SEQ ID NO: 3030096 - DNA, 25 bp, Homo sapien
caacagatgcaacaagaaaattcat

SEQ ID NO: 3030097 - DNA, 25 bp, Homo sapien
tacaacagatgcaacaagaaaattc

SEQ ID NO: 3030098 - DNA, 25 bp, Homo sapien
ctgtacaacagatgcaacaagaaaa

SEQ ID NO: 3030099 - DNA, 25 bp, Homo sapien
ttgccttcccggtcctcaagggtca

SEQ ID NO: 3030100 - DNA, 25 bp, Homo sapien
aaggaaaatgacaggcccttgcctt

SEQ ID NO: 3030101 - DNA, 25 bp, Homo sapien
taagatgatgtcataaagccggatc

SEQ ID NO: 3030102 - DNA, 25 bp, Homo sapien
aagggtcagctgtaagatgatgtca

SEQ ID NO: 3030103 - DNA, 25 bp, Homo sapien
ggctttcagtcctcagagtacagca

SEQ ID NO: 3030104 - DNA, 25 bp, Homo sapien
tactgggttgtgacagccttttccc

SEQ ID NO: 3030105 - DNA, 25 bp, Homo sapien
aactgcctaggacacgacagctggg

SEQ ID NO: 3030106 - DNA, 25 bp, Homo sapien
taagtgtaccggactgagttcctcc

SEQ ID NO: 3030107 - DNA, 25 bp, Homo sapien
gagaacactctggtcagttggtgga

SEQ ID NO: 3030108 - DNA, 25 bp, Homo sapien
ccctgaagagaacactctggtcagt

SEQ ID NO: 3030109 - DNA, 25 bp, Homo sapien
tgaagagaacactctggtcagttgg

SEQ ID NO: 3030110 - DNA, 25 bp, Homo sapien
cactctggtcagttggtggaggcca

SEQ ID NO: 3030111 - DNA, 25 bp, Homo sapien
ccagatcccaggcacggttggaaag

SEQ ID NO: 3030112 - DNA, 25 bp, Homo sapien
caggaccagataaggacatggcctc

SEQ ID NO: 3030113 - DNA, 25 bp, Homo sapien
ctgctgcggctgaggaagacaatcc

SEQ ID NO: 3030114 - DNA, 25 bp, Homo sapien
cagtcagctgccttctcaattccag

SEQ ID NO: 3030115 - DNA, 25 bp, Homo sapien
tcctcaggcgatggtagtattcaaa

SEQ ID NO: 3030116 - DNA, 25 bp, Homo sapien
ctcaggcgatggtagtattcaaaca

SEQ ID NO: 3030117 - DNA, 25 bp, Homo sapien
ggttcctcaggcgatggtagtattc

SEQ ID NO: 3030118 - DNA, 25 bp, Homo sapien
gcaggttcctcaggcgatggtagta

SEQ ID NO: 3030119 - DNA, 25 bp, Homo sapien
gaggcagtgagcttcacacaagatc

SEQ ID NO: 3030120 - DNA, 25 bp, Homo sapien
ggcagtgagcttcacacaagatcca

SEQ ID NO: 3030121 - DNA, 25 bp, Homo sapien
ttgaggcagtgagcttcacacaaga

SEQ ID NO: 3030122 - DNA, 25 bp, Homo sapien
tgaggcagtgagcttcacacaagat

SEQ ID NO: 3030123 - DNA, 25 bp, Homo sapien
ttcggggcagacttcgctcctcaga

SEQ ID NO: 3030124 - DNA, 25 bp, Homo sapien
cccagagcacaggttgatgtggaac

SEQ ID NO: 3030125 - DNA, 25 bp, Homo sapien
gcattctcatcaaaacgggggttca

SEQ ID NO: 3030126 - DNA, 25 bp, Homo sapien
cgaagggcatttttcggggcagact

SEQ ID NO: 3030127 - DNA, 25 bp, Homo sapien
ctggacctttgtccactgagttctg

SEQ ID NO: 3030128 - DNA, 25 bp, Homo sapien
gtccactgagttctgagccccattt

SEQ ID NO: 3030129 - DNA, 25 bp, Homo sapien
tttgtccactgagttctgagcccca

SEQ ID NO: 3030130 - DNA, 25 bp, Homo sapien
ggacctttgtccactgagttctgag

SEQ ID NO: 3030131 - DNA, 25 bp, Homo sapien
atgatggacttggatgggtacagcc

SEQ ID NO: 3030132 - DNA, 25 bp, Homo sapien
gaatggtggtgatgaaaggcatcgg

SEQ ID NO: 3030133 - DNA, 25 bp, Homo sapien
ggacttggatgggtacagccctccc

SEQ ID NO: 3030134 - DNA, 25 bp, Homo sapien
tggatgggtacagccctcccggaat

SEQ ID NO: 3030135 - DNA, 25 bp, Homo sapien
cagaaagaaagactcgtggggtgaa

SEQ ID NO: 3030136 - DNA, 25 bp, Homo sapien
gcttagattagtgtcatgaaaggaa

SEQ ID NO: 3030137 - DNA, 25 bp, Homo sapien
tgaaaggaaatttggccaaacacag

SEQ ID NO: 3030138 - DNA, 25 bp, Homo sapien
aagggagggccatgcaatgtgctca

SEQ ID NO: 3030139 - DNA, 25 bp, Homo sapien
attttgaaagcccttcgcttttcat

SEQ ID NO: 3030140 - DNA, 25 bp, Homo sapien
cattttgaaagcccttcgcttttca

SEQ ID NO: 3030141 - DNA, 25 bp, Homo sapien
gatccccccgtagcggcccttcatc

SEQ ID NO: 3030142 - DNA, 25 bp, Homo sapien
cccgtagcggcccttcatccctagc

SEQ ID NO: 3030143 - DNA, 25 bp, Homo sapien
tacatcataggtgggatggcgggag

SEQ ID NO: 3030144 - DNA, 25 bp, Homo sapien
gcagggtgggggtacatcataggtg

SEQ ID NO: 3030145 - DNA, 25 bp, Homo sapien
ataggcagggtgggggtacatcata

SEQ ID NO: 3030146 - DNA, 25 bp, Homo sapien
gggtacatcataggtgggatggcgg

SEQ ID NO: 3030147 - DNA, 25 bp, Homo sapien
gaggcgctctgcaccgtgtggatga

SEQ ID NO: 3030148 - DNA, 25 bp, Homo sapien
agaacatctgtccagaggcgctctg

SEQ ID NO: 3030149 - DNA, 25 bp, Homo sapien
gtccagaggcgctctgcaccgtgtg

SEQ ID NO: 3030150 - DNA, 25 bp, Homo sapien
catctgtccagaggcgctctgcacc

SEQ ID NO: 3030151 - DNA, 25 bp, Homo sapien
tgggagctgggttggcaggccgcac

SEQ ID NO: 3030152 - DNA, 25 bp, Homo sapien
gagctgggttggcaggccgcacgct

SEQ ID NO: 3030153 - DNA, 25 bp, Homo sapien
tgggttggcaggccgcacgctggga

SEQ ID NO: 3030154 - DNA, 25 bp, Homo sapien
aatgggagctgggttggcaggccgc

SEQ ID NO: 3030155 - DNA, 25 bp, Homo sapien
ggctgccctgcgaatgttccctggg

SEQ ID NO: 3030156 - DNA, 25 bp, Homo sapien
gggccaaagtttggctgccctgcga

SEQ ID NO: 3030157 - DNA, 25 bp, Homo sapien
ggctccaccagtcctgaagtcagcg

SEQ ID NO: 3030158 - DNA, 25 bp, Homo sapien
tttctgtcatccctagggccagggc

SEQ ID NO: 3030159 - DNA, 25 bp, Homo sapien
cccagggcctctgtgttgaactcac

SEQ ID NO: 3030160 - DNA, 25 bp, Homo sapien
cacccagggcctctgtgttgaactc

SEQ ID NO: 3030161 - DNA, 25 bp, Homo sapien
tgctgtctgctcagccacccagggc

SEQ ID NO: 3030162 - DNA, 25 bp, Homo sapien
gccacccagggcctctgtgttgaac

SEQ ID NO: 3030163 - DNA, 25 bp, Homo sapien
gctgggagaacggcaccgtggagaa

SEQ ID NO: 3030164 - DNA, 25 bp, Homo sapien
ggctgggagaacggcaccgtggaga

SEQ ID NO: 3030165 - DNA, 25 bp, Homo sapien
ctgggagaacggcaccgtggagaag

SEQ ID NO: 3030166 - DNA, 25 bp, Homo sapien
aggctgggagaacggcaccgtggag

SEQ ID NO: 3030167 - DNA, 25 bp, Homo sapien
acagggaagcagaggttgtccccag

SEQ ID NO: 3030168 - DNA, 25 bp, Homo sapien
gggaagcagaggttgtccccagagt

SEQ ID NO: 3030169 - DNA, 25 bp, Homo sapien
aagcagaggttgtccccagagtgac

SEQ ID NO: 3030170 - DNA, 25 bp, Homo sapien
gacagggaagcagaggttgtcccca

SEQ ID NO: 3030171 - DNA, 25 bp, Homo sapien
ctgggtaggagattggcttgggtcc

SEQ ID NO: 3030172 - DNA, 25 bp, Homo sapien
agccattgacggagatggtgtccac

SEQ ID NO: 3030173 - DNA, 25 bp, Homo sapien
cacagagccattgacggagatggtg

SEQ ID NO: 3030174 - DNA, 25 bp, Homo sapien
cacacggtggaagggcacgcggtgg

SEQ ID NO: 3030175 - DNA, 25 bp, Homo sapien
cacgcggtggaagtactgcacgaag

SEQ ID NO: 3030176 - DNA, 25 bp, Homo sapien
ttctgctcctgcaacggcttccagc

SEQ ID NO: 3030177 - DNA, 25 bp, Homo sapien
ctgctcctgcaacggcttccagctc

SEQ ID NO: 3030178 - DNA, 25 bp, Homo sapien
ttttctgctcctgcaacggcttcca

SEQ ID NO: 3030179 - DNA, 25 bp, Homo sapien
tttctgctcctgcaacggcttccag

SEQ ID NO: 3030180 - DNA, 25 bp, Homo sapien
cgtcttcaaaccgagggttgaagtg

SEQ ID NO: 3030181 - DNA, 25 bp, Homo sapien
tcgtttccactgaagcccgtctgaa

SEQ ID NO: 3030182 - DNA, 25 bp, Homo sapien
ccttctggaagggcatgtgcatctt

SEQ ID NO: 3030183 - DNA, 25 bp, Homo sapien
tctgcctcgtgttgcacaccacata

SEQ ID NO: 3030184 - DNA, 25 bp, Homo sapien
taggcccaggaaaagcaaatagtct

SEQ ID NO: 3030185 - DNA, 25 bp, Homo sapien
aggcccaggaaaagcaaatagtctt

SEQ ID NO: 3030186 - DNA, 25 bp, Homo sapien
ctaggcccaggaaaagcaaatagtc

SEQ ID NO: 3030187 - DNA, 25 bp, Homo sapien
atccgtcctggagacccccttggat

SEQ ID NO: 3030188 - DNA, 25 bp, Homo sapien
ttcccagatgccctccgcagccccg

SEQ ID NO: 3030189 - DNA, 25 bp, Homo sapien
cagccccgagccccagcgtagtttc

SEQ ID NO: 3030190 - DNA, 25 bp, Homo sapien
cttcagcagagcctcttcccagatg

SEQ ID NO: 3030191 - DNA, 25 bp, Homo sapien
cgcagccccgagccccagcgtagtt

SEQ ID NO: 3030192 - DNA, 25 bp, Homo sapien
ctggaagtcaaagcagagctgagcc

SEQ ID NO: 3030193 - DNA, 25 bp, Homo sapien
tgggctcagatagggagcctgggaa

SEQ ID NO: 3030194 - DNA, 25 bp, Homo sapien
ctcagatagggagcctgggaaccgc

SEQ ID NO: 3030195 - DNA, 25 bp, Homo sapien
gatagggagcctgggaaccgctgaa

SEQ ID NO: 3030196 - DNA, 25 bp, Homo sapien
gagcctgggaaccgctgaaggccat

SEQ ID NO: 3030197 - DNA, 25 bp, Homo sapien
ctccaccgcctctgtggccaccgct

SEQ ID NO: 3030198 - DNA, 25 bp, Homo sapien
ctctgtggccaccgctgcctttcac

SEQ ID NO: 3030199 - DNA, 25 bp, Homo sapien
gcctctgtggccaccgctgcctttc

SEQ ID NO: 3030200 - DNA, 25 bp, Homo sapien
ccgcctctgtggccaccgctgcctt

SEQ ID NO: 3030201 - DNA, 25 bp, Homo sapien
caggtcccaacgatgtgctggcgag

SEQ ID NO: 3030202 - DNA, 25 bp, Homo sapien
ttgaccaggtcccaacgatgtgctg

SEQ ID NO: 3030203 - DNA, 25 bp, Homo sapien
ctgaagttgaccaggtcccaacgat

SEQ ID NO: 3030204 - DNA, 25 bp, Homo sapien
ccaacgatgtgctggcgagaaggcc

SEQ ID NO: 3030205 - DNA, 25 bp, Homo sapien
gcagcttcactagtgagtccagccc

SEQ ID NO: 3030206 - DNA, 25 bp, Homo sapien
tgagccttggaggtgagtcacagtt

SEQ ID NO: 3030207 - DNA, 25 bp, Homo sapien
agttaagcagcttcactagtgagtc

SEQ ID NO: 3030208 - DNA, 25 bp, Homo sapien
cagcccataaaggagggccctctgc

SEQ ID NO: 3030209 - DNA, 25 bp, Homo sapien
gctgtattctttagcaacgtctttg

SEQ ID NO: 3030210 - DNA, 25 bp, Homo sapien
cataaccaagacaaccaattgttac

SEQ ID NO: 3030211 - DNA, 25 bp, Homo sapien
tactgctgtattctttagcaacgtc

SEQ ID NO: 3030212 - DNA, 25 bp, Homo sapien
ctgctgtattctttagcaacgtctt

SEQ ID NO: 3030213 - DNA, 25 bp, Homo sapien
aggttggttcccaatattggcatga

SEQ ID NO: 3030214 - DNA, 25 bp, Homo sapien
taggttggttcccaatattggcatg

SEQ ID NO: 3030215 - DNA, 25 bp, Homo sapien
ctgcatgcactgatatgttagtgtt

SEQ ID NO: 3030216 - DNA, 25 bp, Homo sapien
cactgatatgttagtgttaggatgt

SEQ ID NO: 3030217 - DNA, 25 bp, Homo sapien
tatcctgcatgcactgatatgttag

SEQ ID NO: 3030218 - DNA, 25 bp, Homo sapien
atgcactgatatgttagtgttagga

SEQ ID NO: 3030219 - DNA, 25 bp, Homo sapien
gccaggccactcagtaaatcaagag

SEQ ID NO: 3030220 - DNA, 25 bp, Homo sapien
ctaggtttacccaatgctgatacat

SEQ ID NO: 3030221 - DNA, 25 bp, Homo sapien
aggtttacccaatgctgatacatag

SEQ ID NO: 3030222 - DNA, 25 bp, Homo sapien
taggtttacccaatgctgatacata

SEQ ID NO: 3030223 - DNA, 25 bp, Homo sapien
ggtttacccaatgctgatacatagg

SEQ ID NO: 3030224 - DNA, 25 bp, Homo sapien
atctgctaatgtccctctggcattg

SEQ ID NO: 3030225 - DNA, 25 bp, Homo sapien
ccagactgcagcaccgtggcaactg

SEQ ID NO: 3030226 - DNA, 25 bp, Homo sapien
aatctgctaatgtccctctggcatt

SEQ ID NO: 3030227 - DNA, 25 bp, Homo sapien
cagactgcagcaccgtggcaactga

SEQ ID NO: 3030228 - DNA, 25 bp, Homo sapien
ctgaataaggtgaggaataagctca

SEQ ID NO: 3030229 - DNA, 25 bp, Homo sapien
catcatgatgcacgtttgcaagaac

SEQ ID NO: 3030230 - DNA, 25 bp, Homo sapien
atcatgatgcacgtttgcaagaaca

SEQ ID NO: 3030231 - DNA, 25 bp, Homo sapien
tcatgatgcacgtttgcaagaacat

SEQ ID NO: 3030232 - DNA, 25 bp, Homo sapien
tcatcatgatgcacgtttgcaagaa

SEQ ID NO: 3030233 - DNA, 25 bp, Homo sapien
tatatcctgttcactatcaggaatc

SEQ ID NO: 3030234 - DNA, 25 bp, Homo sapien
gccattcactaacacaggaatcaac

SEQ ID NO: 3030235 - DNA, 25 bp, Homo sapien
taaagttagccaaaattcacaggct

SEQ ID NO: 3030236 - DNA, 25 bp, Homo sapien
tctgagtacttcatgccattcacta

SEQ ID NO: 3030237 - DNA, 25 bp, Homo sapien
gttcagctaaagttagccaaaattc

SEQ ID NO: 3030238 - DNA, 25 bp, Homo sapien
tgtgagggagcaggcgatccactca

SEQ ID NO: 3030239 - DNA, 25 bp, Homo sapien
actcaaacttcgaacaacatcacaa

SEQ ID NO: 3030240 - DNA, 25 bp, Homo sapien
ggcgatccactcaaacttcgaacaa

SEQ ID NO: 3030241 - DNA, 25 bp, Homo sapien
gggagcaggcgatccactcaaactt

SEQ ID NO: 3030242 - DNA, 25 bp, Homo sapien
cacaaatcttctgaagggtgccaaa

SEQ ID NO: 3030243 - DNA, 25 bp, Homo sapien
ttggactactgtgcttgaagaactg

SEQ ID NO: 3030244 - DNA, 25 bp, Homo sapien
acatcactatctaaaatctcaacag

SEQ ID NO: 3030245 - DNA, 25 bp, Homo sapien
cctgatgttgagaggacaatctaaa

SEQ ID NO: 3030246 - DNA, 25 bp, Homo sapien
ctcttggaggctatagctgtgatcg

SEQ ID NO: 3030247 - DNA, 25 bp, Homo sapien
aggtggtgtaatcgtcagaatccaa

SEQ ID NO: 3030248 - DNA, 25 bp, Homo sapien
gctgtgatcgaaataccaacagtgg

SEQ ID NO: 3030249 - DNA, 25 bp, Homo sapien
ggtgtaatcgtcagaatccaacagg

SEQ ID NO: 3030250 - DNA, 25 bp, Homo sapien
atgaagtttgttgcaccatttggga

SEQ ID NO: 3030251 - DNA, 25 bp, Homo sapien
gaagtttgttgcaccatttgggaag

SEQ ID NO: 3030252 - DNA, 25 bp, Homo sapien
tgaagtttgttgcaccatttgggaa

SEQ ID NO: 3030253 - DNA, 25 bp, Homo sapien
tgttgcacagttctctggatggtgg

SEQ ID NO: 3030254 - DNA, 25 bp, Homo sapien
aattgttgcacagttctctggatgg

SEQ ID NO: 3030255 - DNA, 25 bp, Homo sapien
ctagaattgttgcacagttctctgg

SEQ ID NO: 3030256 - DNA, 25 bp, Homo sapien
gaattgttgcacagttctctggatg

SEQ ID NO: 3030257 - DNA, 25 bp, Homo sapien
aacacctcattccagtagctgacac

SEQ ID NO: 3030258 - DNA, 25 bp, Homo sapien
ttaatctgtggcaaggtgctggatg

SEQ ID NO: 3030259 - DNA, 25 bp, Homo sapien
aaggtgctggatgcactggacaaac

SEQ ID NO: 3030260 - DNA, 25 bp, Homo sapien
tcattccagtagctgacactggcaa

SEQ ID NO: 3030261 - DNA, 25 bp, Homo sapien
cagtgttagctgctggaataaggtg

SEQ ID NO: 3030262 - DNA, 25 bp, Homo sapien
gaatgtcgccacagattaacttcag

SEQ ID NO: 3030263 - DNA, 25 bp, Homo sapien
aaggtgtttgtccagtacattcaga

SEQ ID NO: 3030264 - DNA, 25 bp, Homo sapien
tacattcagaatgtcgccacagatt

SEQ ID NO: 3030265 - DNA, 25 bp, Homo sapien
cagaggcaaaggtatcgtccacggg

SEQ ID NO: 3030266 - DNA, 25 bp, Homo sapien
ccccagaggcaaaggtatcgtccac

SEQ ID NO: 3030267 - DNA, 25 bp, Homo sapien
caaaggtatcgtccacgggggacat

SEQ ID NO: 3030268 - DNA, 25 bp, Homo sapien
gcaaaggtatcgtccacgggggaca

SEQ ID NO: 3030269 - DNA, 25 bp, Homo sapien
tagctggaatggcaccttctgctgc

SEQ ID NO: 3030270 - DNA, 25 bp, Homo sapien
gaaggagctagctggaatggcacct

SEQ ID NO: 3030271 - DNA, 25 bp, Homo sapien
ctattgttcccagaaggagctagct

SEQ ID NO: 3030272 - DNA, 25 bp, Homo sapien
tcccagaaggagctagctggaatgg

SEQ ID NO: 3030273 - DNA, 25 bp, Homo sapien
tcttgaagtagggactgtagtcttt

SEQ ID NO: 3030274 - DNA, 25 bp, Homo sapien
gtcttgaagtagggactgtagtctt

SEQ ID NO: 3030275 - DNA, 25 bp, Homo sapien
cgcccccgatgccgcccccgatgcc

SEQ ID NO: 3030276 - DNA, 25 bp, Homo sapien
atgccgcccccgatgccgcaggagc

SEQ ID NO: 3030277 - DNA, 25 bp, Homo sapien
cccgatgccgcccccgatgccgcag

SEQ ID NO: 3030278 - DNA, 25 bp, Homo sapien
cgatgccgcccccgatgccgcagga

SEQ ID NO: 3030279 - DNA, 25 bp, Homo sapien
aggaggtgaactggcggctgcaggt

SEQ ID NO: 3030280 - DNA, 25 bp, Homo sapien
tggaggaggtgaactggcggctgca

SEQ ID NO: 3030281 - DNA, 25 bp, Homo sapien
gaggtgaactggcggctgcaggtgc

SEQ ID NO: 3030282 - DNA, 25 bp, Homo sapien
tgaactggcggctgcaggtgctcat

SEQ ID NO: 3030283 - DNA, 25 bp, Homo sapien
ccagaacatccctagtgtaggcaga

SEQ ID NO: 3030284 - DNA, 25 bp, Homo sapien
tcaggtgccctcgtttgagcccctt

SEQ ID NO: 3030285 - DNA, 25 bp, Homo sapien
ttgagccccttgtggaactggccca

SEQ ID NO: 3030286 - DNA, 25 bp, Homo sapien
taggcagaagtctggctcaggtgcc

SEQ ID NO: 3030287 - DNA, 25 bp, Homo sapien
tagcatggaatataagcctgatccc

SEQ ID NO: 3030288 - DNA, 25 bp, Homo sapien
ctactccggagctctagcatggaat

SEQ ID NO: 3030289 - DNA, 25 bp, Homo sapien
ccccatacccgttctcagaaccgtg

SEQ ID NO: 3030290 - DNA, 25 bp, Homo sapien
tcagaaccgtggcctaacctggagc

SEQ ID NO: 3030291 - DNA, 25 bp, Homo sapien
tgatggaaatcattcagtggaaatt

SEQ ID NO: 3030292 - DNA, 25 bp, Homo sapien
cagtggaaattgaatgtggatgaga

SEQ ID NO: 3030293 - DNA, 25 bp, Homo sapien
aattgaatgtggatgagattgactc

SEQ ID NO: 3030294 - DNA, 25 bp, Homo sapien
ttgatcctgaccacattctgatgga

SEQ ID NO: 3030295 - DNA, 25 bp, Homo sapien
ggacccagttaggctgtgcccaggt

SEQ ID NO: 3030296 - DNA, 25 bp, Homo sapien
tgctcatcagcacgcaattcaccag

SEQ ID NO: 3030297 - DNA, 25 bp, Homo sapien
gtgctcatcagcacgcaattcacca

SEQ ID NO: 3030298 - DNA, 25 bp, Homo sapien
ttgaggatgggccaggtctgacggc

SEQ ID NO: 3030299 - DNA, 25 bp, Homo sapien
ctgaagctggatgagccctgctcct

SEQ ID NO: 3030300 - DNA, 25 bp, Homo sapien
tctgacggctcgaagaggacgaaga

SEQ ID NO: 3030301 - DNA, 25 bp, Homo sapien
tcagttctaggagcactggccctgg

SEQ ID NO: 3030302 - DNA, 25 bp, Homo sapien
gattggccagatgcgtgtggggagg

SEQ ID NO: 3030303 - DNA, 25 bp, Homo sapien
ggattggccagatgcgtgtggggag

SEQ ID NO: 3030304 - DNA, 25 bp, Homo sapien
cgtgtcttcatgtccagcaagatct

SEQ ID NO: 3030305 - DNA, 25 bp, Homo sapien
gccgtgtcttcatgtccagcaagat

SEQ ID NO: 3030306 - DNA, 25 bp, Homo sapien
gtgtcttcatgtccagcaagatctg

SEQ ID NO: 3030307 - DNA, 25 bp, Homo sapien
tgtcttcatgtccagcaagatctgg

SEQ ID NO: 3030308 - DNA, 25 bp, Homo sapien
tgcctggattttgatcccagttggg

SEQ ID NO: 3030309 - DNA, 25 bp, Homo sapien
ctgatgggccagacaatatagagaa

SEQ ID NO: 3030310 - DNA, 25 bp, Homo sapien
tgatgggccagacaatatagagaaa

SEQ ID NO: 3030311 - DNA, 25 bp, Homo sapien
atgggccagacaatatagagaaatg

SEQ ID NO: 3030312 - DNA, 25 bp, Homo sapien
gatgggccagacaatatagagaaat

SEQ ID NO: 3030313 - DNA, 25 bp, Homo sapien
ccctggaacaccctctggagctccg

SEQ ID NO: 3030314 - DNA, 25 bp, Homo sapien
ctggaacaccctctggagctccgtc

SEQ ID NO: 3030315 - DNA, 25 bp, Homo sapien
tggaacaccctctggagctccgtca

SEQ ID NO: 3030316 - DNA, 25 bp, Homo sapien
aggccctggaacaccctctggagct

SEQ ID NO: 3030317 - DNA, 25 bp, Homo sapien
gctggaggccacttttttgttgagc

SEQ ID NO: 3030318 - DNA, 25 bp, Homo sapien
ctgctctgtaccagttcactgctgg

SEQ ID NO: 3030319 - DNA, 25 bp, Homo sapien
actgcggctgctctgtaccagttca

SEQ ID NO: 3030320 - DNA, 25 bp, Homo sapien
actgctggaggccacttttttgttg

SEQ ID NO: 3030321 - DNA, 25 bp, Homo sapien
gtgaaaggtgaggctctcccaaagc

SEQ ID NO: 3030322 - DNA, 25 bp, Homo sapien
gaaaggtgaggctctcccaaagccc

SEQ ID NO: 3030323 - DNA, 25 bp, Homo sapien
tgaaaggtgaggctctcccaaagcc

SEQ ID NO: 3030324 - DNA, 25 bp, Homo sapien
gtggttgtgctttgccatctgctcg

SEQ ID NO: 3030325 - DNA, 25 bp, Homo sapien
gcatctctgtggttgtgctttgcca

SEQ ID NO: 3030326 - DNA, 25 bp, Homo sapien
ctctgtggttgtgctttgccatctg

SEQ ID NO: 3030327 - DNA, 25 bp, Homo sapien
gttgtgctttgccatctgctcgtac

SEQ ID NO: 3030328 - DNA, 25 bp, Homo sapien
caggtgcggcatccgtctccacgtt

SEQ ID NO: 3030329 - DNA, 25 bp, Homo sapien
ggcatccgtctccacgttcacttct

SEQ ID NO: 3030330 - DNA, 25 bp, Homo sapien
gatgcagctcaggtccacgccaggt

SEQ ID NO: 3030331 - DNA, 25 bp, Homo sapien
ggtccacgccaggtgcggcatccgt

SEQ ID NO: 3030332 - DNA, 25 bp, Homo sapien
cggcacaggccattgacgccagcct

SEQ ID NO: 3030333 - DNA, 25 bp, Homo sapien
ccggcacaggccattgacgccagcc

SEQ ID NO: 3030334 - DNA, 25 bp, Homo sapien
ggcacaggccattgacgccagcctc

SEQ ID NO: 3030335 - DNA, 25 bp, Homo sapien
gcacaggccattgacgccagcctcc

SEQ ID NO: 3030336 - DNA, 25 bp, Homo sapien
ggtcctgaagtcatcagctgccagc

SEQ ID NO: 3030337 - DNA, 25 bp, Homo sapien
cctgaagtcatcagctgccagcctg

SEQ ID NO: 3030338 - DNA, 25 bp, Homo sapien
ttggtcctgaagtcatcagctgcca

SEQ ID NO: 3030339 - DNA, 25 bp, Homo sapien
tcctgaagtcatcagctgccagcct

SEQ ID NO: 3030340 - DNA, 25 bp, Homo sapien
aaatgggctgcgcattctcaatggt

SEQ ID NO: 3030341 - DNA, 25 bp, Homo sapien
gcaaaatgggctgcgcattctcaat

SEQ ID NO: 3030342 - DNA, 25 bp, Homo sapien
ctgcaaaatgggctgcgcattctca

SEQ ID NO: 3030343 - DNA, 25 bp, Homo sapien
aaaatgggctgcgcattctcaatgg

SEQ ID NO: 3030344 - DNA, 25 bp, Homo sapien
gtcttgaagtagggactgtagtctt

SEQ ID NO: 3030345 - DNA, 25 bp, Homo sapien
tcttgaagtagggactgtagtcttt

SEQ ID NO: 3030346 - DNA, 25 bp, Homo sapien
acccaagccaccaccgaagccagca

SEQ ID NO: 3030347 - DNA, 25 bp, Homo sapien
atatcctcccccaaagccactagca

SEQ ID NO: 3030348 - DNA, 25 bp, Homo sapien
cccaaagccactagcaaagctgctg

SEQ ID NO: 3030349 - DNA, 25 bp, Homo sapien
cccccaaagccactagcaaagctgc

SEQ ID NO: 3030350 - DNA, 25 bp, Homo sapien
aaagccactagcaaagctgctgctg

SEQ ID NO: 3030351 - DNA, 25 bp, Homo sapien
gagacacacaggccccccagtaggt

SEQ ID NO: 3030352 - DNA, 25 bp, Homo sapien
agaagcgagagaaggagacacacag

SEQ ID NO: 3030353 - DNA, 25 bp, Homo sapien
tcccccaaaggagaagcgagagaag

SEQ ID NO: 3030354 - DNA, 25 bp, Homo sapien
aggctcccccaaaggagaagcgaga

SEQ ID NO: 3030355 - DNA, 25 bp, Homo sapien
tgcaggtgctcatcgtgccaaggag

SEQ ID NO: 3030356 - DNA, 25 bp, Homo sapien
gcccccgatgctgcccccgatactg

SEQ ID NO: 3030357 - DNA, 25 bp, Homo sapien
caggagcccttcatggatctggagg

SEQ ID NO: 3030358 - DNA, 25 bp, Homo sapien
atgctgcccccgatactgcaggagc

SEQ ID NO: 3030359 - DNA, 25 bp, Homo sapien
ctgtgtccacagatcccacgctggg

SEQ ID NO: 3030360 - DNA, 25 bp, Homo sapien
tgtgtccacagatcccacgctgggc

SEQ ID NO: 3030361 - DNA, 25 bp, Homo sapien
tcctgtgtccacagatcccacgctg

SEQ ID NO: 3030362 - DNA, 25 bp, Homo sapien
cctgtgtccacagatcccacgctgg

SEQ ID NO: 3030363 - DNA, 25 bp, Homo sapien
agagcctggtgtgtgttgtacggtt

SEQ ID NO: 3030364 - DNA, 25 bp, Homo sapien
ggagagcaccggtcatgggcccact

SEQ ID NO: 3030365 - DNA, 25 bp, Homo sapien
ctgggggagagcaccggtcatgggc

SEQ ID NO: 3030366 - DNA, 25 bp, Homo sapien
atggagagcctggtgtgtgttgtac

SEQ ID NO: 3030367 - DNA, 25 bp, Homo sapien
gatcactggcatgaggtctgcccag

SEQ ID NO: 3030368 - DNA, 25 bp, Homo sapien
cccacgatcactggcatgaggtctg

SEQ ID NO: 3030369 - DNA, 25 bp, Homo sapien
tccccacgatcactggcatgaggtc

SEQ ID NO: 3030370 - DNA, 25 bp, Homo sapien
cacgatcactggcatgaggtctgcc

SEQ ID NO: 3030371 - DNA, 25 bp, Homo sapien
cctcctcactcacgccatcagtaat

SEQ ID NO: 3030372 - DNA, 25 bp, Homo sapien
ctcactcacgccatcagtaattgtg

SEQ ID NO: 3030373 - DNA, 25 bp, Homo sapien
gacccctcctcactcacgccatcag

SEQ ID NO: 3030374 - DNA, 25 bp, Homo sapien
cctcactcacgccatcagtaattgt

SEQ ID NO: 3030375 - DNA, 25 bp, Homo sapien
agaggccggagaccgcggggcagat

SEQ ID NO: 3030376 - DNA, 25 bp, Homo sapien
gagaccgcggggcagatgggaccgc

SEQ ID NO: 3030377 - DNA, 25 bp, Homo sapien
cgaagggactgaagcagggggctga

SEQ ID NO: 3030378 - DNA, 25 bp, Homo sapien
gggcagatgggaccgctgcctccct

SEQ ID NO: 3030379 - DNA, 25 bp, Homo sapien
tgctcgcgggaggagatgaccttac

SEQ ID NO: 3030380 - DNA, 25 bp, Homo sapien
ctgctcgcgggaggagatgacctta

SEQ ID NO: 3030381 - DNA, 25 bp, Homo sapien
tggacctcttccacaatggtaggca

SEQ ID NO: 3030382 - DNA, 25 bp, Homo sapien
tccacaatggtaggcacctgacagg

SEQ ID NO: 3030383 - DNA, 25 bp, Homo sapien
cctcttccacaatggtaggcacctg

SEQ ID NO: 3030384 - DNA, 25 bp, Homo sapien
tcttccacaatggtaggcacctgac

SEQ ID NO: 3030385 - DNA, 25 bp, Homo sapien
cctctgccggtggccctgtgtgagt

SEQ ID NO: 3030386 - DNA, 25 bp, Homo sapien
ccatcagactgggatcgccaagaca

SEQ ID NO: 3030387 - DNA, 25 bp, Homo sapien
gaggagccatgtagactccatgaaa

SEQ ID NO: 3030388 - DNA, 25 bp, Homo sapien
tagccctcatggacaggagccggct

SEQ ID NO: 3030389 - DNA, 25 bp, Homo sapien
atgttctttcttgtactgagtcagg

SEQ ID NO: 3030390 - DNA, 25 bp, Homo sapien
cttatgttctttcttgtactgagtc

SEQ ID NO: 3030391 - DNA, 25 bp, Homo sapien
aagatgcttatgttctttcttgtac

SEQ ID NO: 3030392 - DNA, 25 bp, Homo sapien
caagatgcttatgttctttcttgta

SEQ ID NO: 3030393 - DNA, 25 bp, Homo sapien
ctctgtctccgccaggttgccctcc

SEQ ID NO: 3030394 - DNA, 25 bp, Homo sapien
tctgtctccgccaggttgccctcca

SEQ ID NO: 3030395 - DNA, 25 bp, Homo sapien
aaatctcgctcttgccgctctggac

SEQ ID NO: 3030396 - DNA, 25 bp, Homo sapien
ttggtagccacctcgcggttcagct

SEQ ID NO: 3030397 - DNA, 25 bp, Homo sapien
tggtgcaccggagctccgaaatctc

SEQ ID NO: 3030398 - DNA, 25 bp, Homo sapien
gctctggaccagctcactgttggta

SEQ ID NO: 3030399 - DNA, 25 bp, Homo sapien
tgctcacgtatctcgttcaggatga

SEQ ID NO: 3030400 - DNA, 25 bp, Homo sapien
atactgctcacgtatctcgttcagg

SEQ ID NO: 3030401 - DNA, 25 bp, Homo sapien
cacgtatctcgttcaggatgaggct

SEQ ID NO: 3030402 - DNA, 25 bp, Homo sapien
tcacgtatctcgttcaggatgaggc

SEQ ID NO: 3030403 - DNA, 25 bp, Homo sapien
actcctcagcatctttgaccttctg

SEQ ID NO: 3030404 - DNA, 25 bp, Homo sapien
acccactcctcagcatctttgacct

SEQ ID NO: 3030405 - DNA, 25 bp, Homo sapien
tcagcatctttgaccttctgcccca

SEQ ID NO: 3030406 - DNA, 25 bp, Homo sapien
cctcagcatctttgaccttctgccc

SEQ ID NO: 3030407 - DNA, 25 bp, Homo sapien
ggttctcaatgtgcatctccgggtc

SEQ ID NO: 3030408 - DNA, 25 bp, Homo sapien
tccttgaggttctcaatgtgcatct

SEQ ID NO: 3030409 - DNA, 25 bp, Homo sapien
tgaggttctcaatgtgcatctccgg

SEQ ID NO: 3030410 - DNA, 25 bp, Homo sapien
ctcaatgtgcatctccgggtcggct

SEQ ID NO: 3030411 - DNA, 25 bp, Homo sapien
ggccagggtcagctcatccagcacc

SEQ ID NO: 3030412 - DNA, 25 bp, Homo sapien
ctggccagggtcagctcatccagca

SEQ ID NO: 3030413 - DNA, 25 bp, Homo sapien
tggccagggtcagctcatccagcac

SEQ ID NO: 3030414 - DNA, 25 bp, Homo sapien
tcacgggccattgatgtcggcctcc

SEQ ID NO: 3030415 - DNA, 25 bp, Homo sapien
cttcacgggccattgatgtcggcct

SEQ ID NO: 3030416 - DNA, 25 bp, Homo sapien
tcggcctccacactcaggcacaggg

SEQ ID NO: 3030417 - DNA, 25 bp, Homo sapien
gcctccacactcaggcacagggcct

SEQ ID NO: 3030418 - DNA, 25 bp, Homo sapien
tgtggaagtcagcagcagccagatg

SEQ ID NO: 3030419 - DNA, 25 bp, Homo sapien
gcattgtcattctgtagcaggatgt

SEQ ID NO: 3030420 - DNA, 25 bp, Homo sapien
ccagatgggcattgtcattctgtag

SEQ ID NO: 3030421 - DNA, 25 bp, Homo sapien
caggatgttggcattgtccacggtg

SEQ ID NO: 3030422 - DNA, 25 bp, Homo sapien
ctgtgaggatcagcggagatgggag

SEQ ID NO: 3030423 - DNA, 25 bp, Homo sapien
cagcggagatgggagagtagtcagg

SEQ ID NO: 3030424 - DNA, 25 bp, Homo sapien
gatcagcggagatgggagagtagtc

SEQ ID NO: 3030425 - DNA, 25 bp, Homo sapien
gggagagtagtcaggtcatcggatg

SEQ ID NO: 3030426 - DNA, 25 bp, Homo sapien
tcctgtagtactggctgtagtcacg

SEQ ID NO: 3030427 - DNA, 25 bp, Homo sapien
tgaactggcggatggaggtggtcat

SEQ ID NO: 3030428 - DNA, 25 bp, Homo sapien
aggaggtgaactggcggatggaggt

SEQ ID NO: 3030429 - DNA, 25 bp, Homo sapien
gaggtgaactggcggatggaggtgg

SEQ ID NO: 3030430 - DNA, 25 bp, Homo sapien
ggtgaactggcggatggaggtggtc

SEQ ID NO: 3030431 - DNA, 25 bp, Homo sapien
gcaggaggcaggcacacaggagaag

SEQ ID NO: 3030432 - DNA, 25 bp, Homo sapien
aggaggcaggcacacaggagaaggg

SEQ ID NO: 3030433 - DNA, 25 bp, Homo sapien
caggaggcaggcacacaggagaagg

SEQ ID NO: 3030434 - DNA, 25 bp, Homo sapien
ggtggcggcggcaggaggcaggcac

SEQ ID NO: 3030435 - DNA, 25 bp, Homo sapien
aaagctttaatagcaggcactggac

SEQ ID NO: 3030436 - DNA, 25 bp, Homo sapien
gctttaatagcaggcactggacaaa

SEQ ID NO: 3030437 - DNA, 25 bp, Homo sapien
ttaatagcaggcactggacaaaccc

SEQ ID NO: 3030438 - DNA, 25 bp, Homo sapien
aagctttaatagcaggcactggaca

SEQ ID NO: 3030439 - DNA, 25 bp, Homo sapien
agacaacaggtcatggaccagtgcc

SEQ ID NO: 3030440 - DNA, 25 bp, Homo sapien
gctgatggctgtgccgtgaccctcg

SEQ ID NO: 3030441 - DNA, 25 bp, Homo sapien
tcatggaccagtgcccagacggaca

SEQ ID NO: 3030442 - DNA, 25 bp, Homo sapien
atggctgtgccgtgaccctcgaggt

SEQ ID NO: 3030443 - DNA, 25 bp, Homo sapien
ctccacgatggcacacctggtggct

SEQ ID NO: 3030444 - DNA, 25 bp, Homo sapien
tctccaacctggacttcctccacga

SEQ ID NO: 3030445 - DNA, 25 bp, Homo sapien
ggcacacctggtggctggtcactgt

SEQ ID NO: 3030446 - DNA, 25 bp, Homo sapien
aacctggacttcctccacgatggca

SEQ ID NO: 3030447 - DNA, 25 bp, Homo sapien
ggtgggctgcgaggccagggacaag

SEQ ID NO: 3030448 - DNA, 25 bp, Homo sapien
ggagcacccatcgacccagggatgc

SEQ ID NO: 3030449 - DNA, 25 bp, Homo sapien
gaggagcacccatcgacccagggat

SEQ ID NO: 3030450 - DNA, 25 bp, Homo sapien
cagggagaggagcacccatcgaccc

SEQ ID NO: 3030451 - DNA, 25 bp, Homo sapien
gagaggagcacccatcgacccaggg

SEQ ID NO: 3030452 - DNA, 25 bp, Homo sapien
gcaggccctgtcagaggaggttccc

SEQ ID NO: 3030453 - DNA, 25 bp, Homo sapien
agcaggccctgtcagaggaggttcc

SEQ ID NO: 3030454 - DNA, 25 bp, Homo sapien
ctggggagaagcaggccctgtcaga

SEQ ID NO: 3030455 - DNA, 25 bp, Homo sapien
gagaagcaggccctgtcagaggagg

SEQ ID NO: 3030456 - DNA, 25 bp, Homo sapien
gcacagaaattagcacaggcccaag

SEQ ID NO: 3030457 - DNA, 25 bp, Homo sapien
gaaaaatcacagttgggaatgcaca

SEQ ID NO: 3030458 - DNA, 25 bp, Homo sapien
ggaatgcacagaaattagcacaggc

SEQ ID NO: 3030459 - DNA, 25 bp, Homo sapien
cagaaattagcacaggcccaagaat

SEQ ID NO: 3030460 - DNA, 25 bp, Homo sapien
ggtcctggtgctctgcatcacagca

SEQ ID NO: 3030461 - DNA, 25 bp, Homo sapien
gtcctggtgctctgcatcacagcag

SEQ ID NO: 3030462 - DNA, 25 bp, Homo sapien
ggccaagagataggtggtgcgatga

SEQ ID NO: 3030463 - DNA, 25 bp, Homo sapien
gagataggtggtgcgatgagatgga

SEQ ID NO: 3030464 - DNA, 25 bp, Homo sapien
caagagataggtggtgcgatgagat

SEQ ID NO: 3030465 - DNA, 25 bp, Homo sapien
tgtgggccaagagataggtggtgcg

SEQ ID NO: 3030466 - DNA, 25 bp, Homo sapien
gatgtagagctccatatctccatcc

SEQ ID NO: 3030467 - DNA, 25 bp, Homo sapien
ttggtggccagctcgcagttcagcc

SEQ ID NO: 3030468 - DNA, 25 bp, Homo sapien
tgtgttggtggccagctcgcagttc

SEQ ID NO: 3030469 - DNA, 25 bp, Homo sapien
agctgggacggctcaggttctgcac

SEQ ID NO: 3030470 - DNA, 25 bp, Homo sapien
ccaagggtatgtgtatgtactcaaa

SEQ ID NO: 3030471 - DNA, 25 bp, Homo sapien
gcctgtgaatctgccggtgttccaa

SEQ ID NO: 3030472 - DNA, 25 bp, Homo sapien
ttcttactcctaccgaactacagca

SEQ ID NO: 3030473 - DNA, 25 bp, Homo sapien
gcacacggcgtatgtgcccacacgt

SEQ ID NO: 3030474 - DNA, 25 bp, Homo sapien
cacgcatctcattcaggatgcagct

SEQ ID NO: 3030475 - DNA, 25 bp, Homo sapien
tgggcatccttgcagctcttctcca

SEQ ID NO: 3030476 - DNA, 25 bp, Homo sapien
catcttcacactgacatccttgtcc

SEQ ID NO: 3030477 - DNA, 25 bp, Homo sapien
aagctgaagaaccagccctgggcat

SEQ ID NO: 3030478 - DNA, 25 bp, Homo sapien
tgccctggcctcgcccctaccaccg

SEQ ID NO: 3030479 - DNA, 25 bp, Homo sapien
gcctcgcccctaccaccgccttgcc

SEQ ID NO: 3030480 - DNA, 25 bp, Homo sapien
tggcctcgcccctaccaccgccttg

SEQ ID NO: 3030481 - DNA, 25 bp, Homo sapien
cctggcctcgcccctaccaccgcct

SEQ ID NO: 3030482 - DNA, 25 bp, Homo sapien
tcttcttcaggtagaccaggtcctc

SEQ ID NO: 3030483 - DNA, 25 bp, Homo sapien
aggtagaccaggtcctccttgaggt

SEQ ID NO: 3030484 - DNA, 25 bp, Homo sapien
cttcaggtagaccaggtcctccttg

SEQ ID NO: 3030485 - DNA, 25 bp, Homo sapien
tcaggtagaccaggtcctccttgag

SEQ ID NO: 3030486 - DNA, 25 bp, Homo sapien
gctccaggcagggtcagcttgtcca

SEQ ID NO: 3030487 - DNA, 25 bp, Homo sapien
ttggctccaggcagggtcagcttgt

SEQ ID NO: 3030488 - DNA, 25 bp, Homo sapien
caggcagggtcagcttgtccagccc

SEQ ID NO: 3030489 - DNA, 25 bp, Homo sapien
ggcagggtcagcttgtccagcccct

SEQ ID NO: 3030490 - DNA, 25 bp, Homo sapien
cggcagccaggtgggcatcatccac

SEQ ID NO: 3030491 - DNA, 25 bp, Homo sapien
ttggtgcagaagtcatcggcagcca

SEQ ID NO: 3030492 - DNA, 25 bp, Homo sapien
tgcagaagtcatcggcagccaggtg

SEQ ID NO: 3030493 - DNA, 25 bp, Homo sapien
gtgcagaagtcatcggcagccaggt

SEQ ID NO: 3030494 - DNA, 25 bp, Homo sapien
catgggtaaagacggatgccaggag

SEQ ID NO: 3030495 - DNA, 25 bp, Homo sapien
tcacagccaccacgatcggggagag

SEQ ID NO: 3030496 - DNA, 25 bp, Homo sapien
caacatccttcttgcagcctttttg

SEQ ID NO: 3030497 - DNA, 25 bp, Homo sapien
ggaatttctgggacccagccaaggc

SEQ ID NO: 3030498 - DNA, 25 bp, Homo sapien
tttctgtgtctcttttccgggccat

SEQ ID NO: 3030499 - DNA, 25 bp, Homo sapien
ctttctgtgtctcttttccgggcca

SEQ ID NO: 3030500 - DNA, 25 bp, Homo sapien
gcggtggtaggtgtcaattagttca

SEQ ID NO: 3030501 - DNA, 25 bp, Homo sapien
atcattatataaaaaggcactgcac

SEQ ID NO: 3030502 - DNA, 25 bp, Homo sapien
ctcccatgtttatcgcagcataact

SEQ ID NO: 3030503 - DNA, 25 bp, Homo sapien
attatataaaaaggcactgcactcc

SEQ ID NO: 3030504 - DNA, 25 bp, Homo sapien
ccatgtttatcgcagcataacttac

SEQ ID NO: 3030505 - DNA, 25 bp, Homo sapien
tgtattaagtgagaacaatgggtac

SEQ ID NO: 3030506 - DNA, 25 bp, Homo sapien
atgtattaagtgagaacaatgggta

SEQ ID NO: 3030507 - DNA, 25 bp, Homo sapien
catgtattaagtgagaacaatgggt

SEQ ID NO: 3030508 - DNA, 25 bp, Homo sapien
cagtgtcagctactggaatgaggtg

SEQ ID NO: 3030509 - DNA, 25 bp, Homo sapien
tgcatccagcaccttgccacagatt

SEQ ID NO: 3030510 - DNA, 25 bp, Homo sapien
gcaccttgccacagattaactgtag

SEQ ID NO: 3030511 - DNA, 25 bp, Homo sapien
gtccagtgcatccagcaccttgcca

SEQ ID NO: 3030512 - DNA, 25 bp, Homo sapien
cgtaacagttggtcactatggttcc

SEQ ID NO: 3030513 - DNA, 25 bp, Homo sapien
cagcaccgtaacttaattggaaggg

SEQ ID NO: 3030514 - DNA, 25 bp, Homo sapien
caatccagtctgtccgtaacagttg

SEQ ID NO: 3030515 - DNA, 25 bp, Homo sapien
ggttccaagcttgagtataactaca

SEQ ID NO: 3030516 - DNA, 25 bp, Homo sapien
ggacatgactttctgcgggacacta

SEQ ID NO: 3030517 - DNA, 25 bp, Homo sapien
tgactgtaggcagcgtaactccaga

SEQ ID NO: 3030518 - DNA, 25 bp, Homo sapien
ttttttcaccattcacgaggccaga

SEQ ID NO: 3030519 - DNA, 25 bp, Homo sapien
gagttctgcctctgttataaagccc

SEQ ID NO: 3030520 - DNA, 25 bp, Homo sapien
tctaagtagttctgtacagccacag

SEQ ID NO: 3030521 - DNA, 25 bp, Homo sapien
tcagggcaagatgatagaagggcat

SEQ ID NO: 3030522 - DNA, 25 bp, Homo sapien
taaaatagcatggagagttgacaga

SEQ ID NO: 3030523 - DNA, 25 bp, Homo sapien
aagatttgataaatagttcagggca

SEQ ID NO: 3030524 - DNA, 25 bp, Homo sapien
agaaacaattggtaaaggagcacat

SEQ ID NO: 3030525 - DNA, 25 bp, Homo sapien
tggggctggctgggcgcacagacac

SEQ ID NO: 3030526 - DNA, 25 bp, Homo sapien
gggctggctgggcgcacagacacac

SEQ ID NO: 3030527 - DNA, 25 bp, Homo sapien
atggggctggctgggcgcacagaca

SEQ ID NO: 3030528 - DNA, 25 bp, Homo sapien
tcatggggctggctgggcgcacaga

SEQ ID NO: 3030529 - DNA, 25 bp, Homo sapien
acaggcgggcgcacgcgtggagcgc

SEQ ID NO: 3030530 - DNA, 25 bp, Homo sapien
caagaagacgatcgggggcgaagac

SEQ ID NO: 3030531 - DNA, 25 bp, Homo sapien
aagggggtgggcaagaagacgatcg

SEQ ID NO: 3030532 - DNA, 25 bp, Homo sapien
acgcgtggagcgcttctaggtgaaa

SEQ ID NO: 3030533 - DNA, 25 bp, Homo sapien
gaagaagatggcggagaataagagg

SEQ ID NO: 3030534 - DNA, 25 bp, Homo sapien
tgggaagaagattgcgactgacaga

SEQ ID NO: 3030535 - DNA, 25 bp, Homo sapien
gaagattgcgactgacagacgctgc

SEQ ID NO: 3030536 - DNA, 25 bp, Homo sapien
actgacagacgctgctgcgagacgg

SEQ ID NO: 3030537 - DNA, 25 bp, Homo sapien
gctgcgagacggtgggaggacatgg

SEQ ID NO: 3030538 - DNA, 25 bp, Homo sapien
actggagtttgatacttcaggattg

SEQ ID NO: 3030539 - DNA, 25 bp, Homo sapien
tgatacttcaggattgatggttttg

SEQ ID NO: 3030540 - DNA, 25 bp, Homo sapien
gatacttcaggattgatggttttgg

SEQ ID NO: 3030541 - DNA, 25 bp, Homo sapien
tttgatacttcaggattgatggttt

SEQ ID NO: 3030542 - DNA, 25 bp, Homo sapien
ttctgtggcacggtgtgaaacttca

SEQ ID NO: 3030543 - DNA, 25 bp, Homo sapien
tgccttttctgtggcacggtgtgaa

SEQ ID NO: 3030544 - DNA, 25 bp, Homo sapien
tggcacggtgtgaaacttcatctgc

SEQ ID NO: 3030545 - DNA, 25 bp, Homo sapien
ccttttctgtggcacggtgtgaaac

SEQ ID NO: 3030546 - DNA, 25 bp, Homo sapien
gaggggacatggcactggagcccac

SEQ ID NO: 3030547 - DNA, 25 bp, Homo sapien
ggtgacatgggaggggacatggcac

SEQ ID NO: 3030548 - DNA, 25 bp, Homo sapien
ttgactgccccagagggtgacatgg

SEQ ID NO: 3030549 - DNA, 25 bp, Homo sapien
ctattgactgccccagagggtgaca

SEQ ID NO: 3030550 - DNA, 25 bp, Homo sapien
gaagaactggttccgaaaacatgcc

SEQ ID NO: 3030551 - DNA, 25 bp, Homo sapien
agaactggttccgaaaacatgccaa

SEQ ID NO: 3030552 - DNA, 25 bp, Homo sapien
atggaagaactggttccgaaaacat

SEQ ID NO: 3030553 - DNA, 25 bp, Homo sapien
actggttccgaaaacatgccaaaag

SEQ ID NO: 3030554 - DNA, 25 bp, Homo sapien
gcttctgatcggcatcaacacctgt

SEQ ID NO: 3030555 - DNA, 25 bp, Homo sapien
aatgcttctgatcggcatcaacacc

SEQ ID NO: 3030556 - DNA, 25 bp, Homo sapien
aaaagcaatgcttctgatcggcatc

SEQ ID NO: 3030557 - DNA, 25 bp, Homo sapien
gcaatgcttctgatcggcatcaaca

SEQ ID NO: 3030558 - DNA, 25 bp, Homo sapien
aggcagcctaatgaggaacactgtc

SEQ ID NO: 3030559 - DNA, 25 bp, Homo sapien
tgaggaacactgtccgcatagacct

SEQ ID NO: 3030560 - DNA, 25 bp, Homo sapien
ttgaatcaacatccggagaaggcag

SEQ ID NO: 3030561 - DNA, 25 bp, Homo sapien
cccttgaatcaacatccggagaagg

SEQ ID NO: 3030562 - DNA, 25 bp, Homo sapien
gtcttgggttgtgacttgggtacca

SEQ ID NO: 3030563 - DNA, 25 bp, Homo sapien
gttgtgacttgggtaccacatgctc

SEQ ID NO: 3030564 - DNA, 25 bp, Homo sapien
tgggttgtgacttgggtaccacatg

SEQ ID NO: 3030565 - DNA, 25 bp, Homo sapien
tgccacatggtcttgggttgtgact

SEQ ID NO: 3030566 - DNA, 25 bp, Homo sapien
gagcagccagaacacggtgggtgct

SEQ ID NO: 3030567 - DNA, 25 bp, Homo sapien
tttgaggtcacaacagagcagccag

SEQ ID NO: 3030568 - DNA, 25 bp, Homo sapien
gctgggcttcctggtcatcttgtgg

SEQ ID NO: 3030569 - DNA, 25 bp, Homo sapien
ggcttcctggtcatcttgtggaagt

SEQ ID NO: 3030570 - DNA, 25 bp, Homo sapien
aaaggagaaacaaggtggcaatgtg

SEQ ID NO: 3030571 - DNA, 25 bp, Homo sapien
aaacaaggtggcaatgtggctcagg

SEQ ID NO: 3030572 - DNA, 25 bp, Homo sapien
aggagaaacaaggtggcaatgtggc

SEQ ID NO: 3030573 - DNA, 25 bp, Homo sapien
gagaaacaaggtggcaatgtggctc

SEQ ID NO: 3030574 - DNA, 25 bp, Homo sapien
atatgccacaaggatgtagaatagt

SEQ ID NO: 3030575 - DNA, 25 bp, Homo sapien
ctctgaatatgccacaaggatgtag

SEQ ID NO: 3030576 - DNA, 25 bp, Homo sapien
gggttatactctgaatatgccacaa

SEQ ID NO: 3030577 - DNA, 25 bp, Homo sapien
cacaaggatgtagaatagttcccgc

SEQ ID NO: 3030578 - DNA, 25 bp, Homo sapien
ctgctcacgtccagtttgatctggt

SEQ ID NO: 3030579 - DNA, 25 bp, Homo sapien
ggcagggccaagaggaggaagcagc

SEQ ID NO: 3030580 - DNA, 25 bp, Homo sapien
tagggcagggccaagaggaggaagc

SEQ ID NO: 3030581 - DNA, 25 bp, Homo sapien
ctgtagggcagggccaagaggagga

SEQ ID NO: 3030582 - DNA, 25 bp, Homo sapien
gggcagggccaagaggaggaagcag

SEQ ID NO: 3030583 - DNA, 25 bp, Homo sapien
tcctgaatgttcaggaggactgaca

SEQ ID NO: 3030584 - DNA, 25 bp, Homo sapien
tgatttcctgaatgttcaggaggac

SEQ ID NO: 3030585 - DNA, 25 bp, Homo sapien
gatttcctgaatgttcaggaggact

SEQ ID NO: 3030586 - DNA, 25 bp, Homo sapien
tttcctgaatgttcaggaggactga

SEQ ID NO: 3030587 - DNA, 25 bp, Homo sapien
gggaatgcccttatagatgcgatct

SEQ ID NO: 3030588 - DNA, 25 bp, Homo sapien
ggaatgcccttatagatgcgatcta

SEQ ID NO: 3030589 - DNA, 25 bp, Homo sapien
tgcccttatagatgcgatctatgag

SEQ ID NO: 3030590 - DNA, 25 bp, Homo sapien
aatgcccttatagatgcgatctatg

SEQ ID NO: 3030591 - DNA, 25 bp, Homo sapien
tgtttttatatgactcgcatttgcc

SEQ ID NO: 3030592 - DNA, 25 bp, Homo sapien
ttatatgactcgcatttgcccagca

SEQ ID NO: 3030593 - DNA, 25 bp, Homo sapien
tatgactcgcatttgcccagcattt

SEQ ID NO: 3030594 - DNA, 25 bp, Homo sapien
ttttatatgactcgcatttgcccag

SEQ ID NO: 3030595 - DNA, 25 bp, Homo sapien
gctctttctttttttctcctgccga

SEQ ID NO: 3030596 - DNA, 25 bp, Homo sapien
ttgctctttctttttttctcctgcc

SEQ ID NO: 3030597 - DNA, 25 bp, Homo sapien
tgctctttctttttttctcctgccg

SEQ ID NO: 3030598 - DNA, 25 bp, Homo sapien
tgaggaatgttggagttagcggagc

SEQ ID NO: 3030599 - DNA, 25 bp, Homo sapien
ttcccagagccgcccgtggatgctg

SEQ ID NO: 3030600 - DNA, 25 bp, Homo sapien
agagccgcccgtggatgctgggtct

SEQ ID NO: 3030601 - DNA, 25 bp, Homo sapien
caaatgaggaatgttggagttagcg

SEQ ID NO: 3030602 - DNA, 25 bp, Homo sapien
tttgcctcccgtgcagtcacaggag

SEQ ID NO: 3030603 - DNA, 25 bp, Homo sapien
agtcacaggaggcagctccgtctca

SEQ ID NO: 3030604 - DNA, 25 bp, Homo sapien
tgcagtcacaggaggcagctccgtc

SEQ ID NO: 3030605 - DNA, 25 bp, Homo sapien
ctttgcctcccgtgcagtcacagga

SEQ ID NO: 3030606 - DNA, 25 bp, Homo sapien
ctgtaaggcaactcaggcagagctg

SEQ ID NO: 3030607 - DNA, 25 bp, Homo sapien
gcacagggcctggagccacccaagc

SEQ ID NO: 3030608 - DNA, 25 bp, Homo sapien
gagctgaggacctgcacagggcctg

SEQ ID NO: 3030609 - DNA, 25 bp, Homo sapien
aggacctgcacagggcctggagcca

SEQ ID NO: 3030610 - DNA, 25 bp, Homo sapien
tcttgcaggttctgacctcccagca

SEQ ID NO: 3030611 - DNA, 25 bp, Homo sapien
gcccggtgtactctgggtgcaccag

SEQ ID NO: 3030612 - DNA, 25 bp, Homo sapien
gcctctccctgcatctgagccacac

SEQ ID NO: 3030613 - DNA, 25 bp, Homo sapien
ttgacagccccaaggctcttgcagg

SEQ ID NO: 3030614 - DNA, 25 bp, Homo sapien
ctctggtctcaccatgagatgccca

SEQ ID NO: 3030615 - DNA, 25 bp, Homo sapien
gcctctctggtctcaccatgagatg

SEQ ID NO: 3030616 - DNA, 25 bp, Homo sapien
ctctctggtctcaccatgagatgcc

SEQ ID NO: 3030617 - DNA, 25 bp, Homo sapien
gctgcctctctggtctcaccatgag

SEQ ID NO: 3030618 - DNA, 25 bp, Homo sapien
cccccttccccatggggacagtgag

SEQ ID NO: 3030619 - DNA, 25 bp, Homo sapien
catggggacagtgagggctgtagtt

SEQ ID NO: 3030620 - DNA, 25 bp, Homo sapien
tcccccttccccatggggacagtga

SEQ ID NO: 3030621 - DNA, 25 bp, Homo sapien
ccccatggggacagtgagggctgta

SEQ ID NO: 3030622 - DNA, 25 bp, Homo sapien
agcgatcaacgctgctgtagattcc

SEQ ID NO: 3030623 - DNA, 25 bp, Homo sapien
tcccaaagcgatcaacgctgctgta

SEQ ID NO: 3030624 - DNA, 25 bp, Homo sapien
gcagaatcccaaagcgatcaacgct

SEQ ID NO: 3030625 - DNA, 25 bp, Homo sapien
gtagattccaacaggttcaggcccc

SEQ ID NO: 3030626 - DNA, 25 bp, Homo sapien
acttcataattatgtcctcccgctc

SEQ ID NO: 3030627 - DNA, 25 bp, Homo sapien
gatacttcataattatgtcctcccg

SEQ ID NO: 3030628 - DNA, 25 bp, Homo sapien
ctgatacttcataattatgtcctcc

SEQ ID NO: 3030629 - DNA, 25 bp, Homo sapien
cttctgatacttcataattatgtcc

SEQ ID NO: 3030630 - DNA, 25 bp, Homo sapien
tgtggatgtgaactgcggtcaggca

SEQ ID NO: 3030631 - DNA, 25 bp, Homo sapien
tgtgaactgcggtcaggcaccagag

SEQ ID NO: 3030632 - DNA, 25 bp, Homo sapien
tggatgtgaactgcggtcaggcacc

SEQ ID NO: 3030633 - DNA, 25 bp, Homo sapien
ggatgtggatgtgaactgcggtcag

SEQ ID NO: 3030634 - DNA, 25 bp, Homo sapien
atcatttgcataaactggtaattta

SEQ ID NO: 3030635 - DNA, 25 bp, Homo sapien
catttgcataaactggtaatttaac

SEQ ID NO: 3030636 - DNA, 25 bp, Homo sapien
atttacatatcatttgcataaactg

SEQ ID NO: 3030637 - DNA, 25 bp, Homo sapien
tacatatcatttgcataaactggta

SEQ ID NO: 3030638 - DNA, 25 bp, Homo sapien
tgaagccctcgcctggtccccgcac

SEQ ID NO: 3030639 - DNA, 25 bp, Homo sapien
gcctggtccccgcaccccttgcctg

SEQ ID NO: 3030640 - DNA, 25 bp, Homo sapien
cgcctggtccccgcaccccttgcct

SEQ ID NO: 3030641 - DNA, 25 bp, Homo sapien
ctttgaagccctcgcctggtccccg

SEQ ID NO: 3030642 - DNA, 25 bp, Homo sapien
atcaggggcaaatagcccagaagcc

SEQ ID NO: 3030643 - DNA, 25 bp, Homo sapien
aatcaggggcaaatagcccagaagc

SEQ ID NO: 3030644 - DNA, 25 bp, Homo sapien
cccagaagcccagtagtggacagac

SEQ ID NO: 3030645 - DNA, 25 bp, Homo sapien
caaatcaggggcaaatagcccagaa

SEQ ID NO: 3030646 - DNA, 25 bp, Homo sapien
ctttggctgtatcggtgcagggccc

SEQ ID NO: 3030647 - DNA, 25 bp, Homo sapien
catagcgggcactggaagttcctct

SEQ ID NO: 3030648 - DNA, 25 bp, Homo sapien
tctgccacgtctatctccagcgatg

SEQ ID NO: 3030649 - DNA, 25 bp, Homo sapien
cagcaccggcagaatgaaaaggtcc

SEQ ID NO: 3030650 - DNA, 25 bp, Homo sapien
caagcgtctgcaccagtgccgggat

SEQ ID NO: 3030651 - DNA, 25 bp, Homo sapien
aagcgtctgcaccagtgccgggatt

SEQ ID NO: 3030652 - DNA, 25 bp, Homo sapien
agcaagcgtctgcaccagtgccggg

SEQ ID NO: 3030653 - DNA, 25 bp, Homo sapien
agcgtctgcaccagtgccgggattt

SEQ ID NO: 3030654 - DNA, 25 bp, Homo sapien
tatcgggcaaggagtggaataccag

SEQ ID NO: 3030655 - DNA, 25 bp, Homo sapien
gcagccgtgcttggagtttgcagac

SEQ ID NO: 3030656 - DNA, 25 bp, Homo sapien
gcgagatgacggcttggccgtcatc

SEQ ID NO: 3030657 - DNA, 25 bp, Homo sapien
gatcggcgagaatgtcaagaccctg

SEQ ID NO: 3030658 - DNA, 25 bp, Homo sapien
caggaggaaccagctggctctgggt

SEQ ID NO: 3030659 - DNA, 25 bp, Homo sapien
tcctggagctgtgagcaggaggcag

SEQ ID NO: 3030660 - DNA, 25 bp, Homo sapien
tccccaccaggacgatttcctggag

SEQ ID NO: 3030661 - DNA, 25 bp, Homo sapien
ggcaggaggaaccagctggctctgg

SEQ ID NO: 3030662 - DNA, 25 bp, Homo sapien
gagcagggatgacatttgagagcca

SEQ ID NO: 3030663 - DNA, 25 bp, Homo sapien
tggagcagggatgacatttgagagc

SEQ ID NO: 3030664 - DNA, 25 bp, Homo sapien
gtggagcagggatgacatttgagag

SEQ ID NO: 3030665 - DNA, 25 bp, Homo sapien
ggagcagggatgacatttgagagcc

SEQ ID NO: 3030666 - DNA, 25 bp, Homo sapien
ttgcggcaccggctgtcgagccaaa

SEQ ID NO: 3030667 - DNA, 25 bp, Homo sapien
atagcagcacttgcggcaccggctg

SEQ ID NO: 3030668 - DNA, 25 bp, Homo sapien
tacgcagacatagcagcacttgcgg

SEQ ID NO: 3030669 - DNA, 25 bp, Homo sapien
ggctgtcgagccaaagccagcatgg

SEQ ID NO: 3030670 - DNA, 25 bp, Homo sapien
aagagtaaacacaaaggcactggta

SEQ ID NO: 3030671 - DNA, 25 bp, Homo sapien
aaaggcactggtaaccaactgactc

SEQ ID NO: 3030672 - DNA, 25 bp, Homo sapien
gctaagacagggctgctcattaggg

SEQ ID NO: 3030673 - DNA, 25 bp, Homo sapien
cagggctaagacagggctgctcatt

SEQ ID NO: 3030674 - DNA, 25 bp, Homo sapien
gcaacacatatactatagtacttac

SEQ ID NO: 3030675 - DNA, 25 bp, Homo sapien
tacttacgactttacagtaattggc

SEQ ID NO: 3030676 - DNA, 25 bp, Homo sapien
gactttacagtaattggcaacacat

SEQ ID NO: 3030677 - DNA, 25 bp, Homo sapien
tataaatacttacgactttacagta

SEQ ID NO: 3030678 - DNA, 25 bp, Homo sapien
tctggtgaagcaatctctgagatgg

SEQ ID NO: 3030679 - DNA, 25 bp, Homo sapien
gtttctctggtgaagcaatctctga

SEQ ID NO: 3030680 - DNA, 25 bp, Homo sapien
aatgcatctgtttctctggtgaagc

SEQ ID NO: 3030681 - DNA, 25 bp, Homo sapien
agtaccttaaatgcatctgtttctc

SEQ ID NO: 3030682 - DNA, 25 bp, Homo sapien
caggacactcaggacgtaggggcat

SEQ ID NO: 3030683 - DNA, 25 bp, Homo sapien
ggacactcaggacgtaggggcataa

SEQ ID NO: 3030684 - DNA, 25 bp, Homo sapien
cactcaggacgtaggggcataaggt

SEQ ID NO: 3030685 - DNA, 25 bp, Homo sapien
gacactcaggacgtaggggcataag

SEQ ID NO: 3030686 - DNA, 25 bp, Homo sapien
tgcctttgtagatcgtttgtggttg

SEQ ID NO: 3030687 - DNA, 25 bp, Homo sapien
aacagggcaaattgcaggtagccat

SEQ ID NO: 3030688 - DNA, 25 bp, Homo sapien
tcgtttgtggttgttgatgaacagg

SEQ ID NO: 3030689 - DNA, 25 bp, Homo sapien
tgatgaacagggcaaattgcaggta

SEQ ID NO: 3030690 - DNA, 25 bp, Homo sapien
gagctttccagagctgtggtggccc

SEQ ID NO: 3030691 - DNA, 25 bp, Homo sapien
agctttccagagctgtggtggcccg

SEQ ID NO: 3030692 - DNA, 25 bp, Homo sapien
gctttccagagctgtggtggcccgg

SEQ ID NO: 3030693 - DNA, 25 bp, Homo sapien
gtgcagcctcgcacacaggatgtct

SEQ ID NO: 3030694 - DNA, 25 bp, Homo sapien
cgtgcagcctcgcacacaggatgtc

SEQ ID NO: 3030695 - DNA, 25 bp, Homo sapien
ggtatcctggttatgagccaggtga

SEQ ID NO: 3030696 - DNA, 25 bp, Homo sapien
cgtagcaggcaatggtgaacagctg

SEQ ID NO: 3030697 - DNA, 25 bp, Homo sapien
tgcttcgtagcacactgcagggcca

SEQ ID NO: 3030698 - DNA, 25 bp, Homo sapien
ggagctccacgtagcaggcaatggt

SEQ ID NO: 3030699 - DNA, 25 bp, Homo sapien
agtcaagactgaggcgcaggatagt

SEQ ID NO: 3030700 - DNA, 25 bp, Homo sapien
ctgtggatagtcaagactgaggcgc

SEQ ID NO: 3030701 - DNA, 25 bp, Homo sapien
gatagtcaagactgaggcgcaggat

SEQ ID NO: 3030702 - DNA, 25 bp, Homo sapien
ggcgcaggatagtggtgtgggatac

SEQ ID NO: 3030703 - DNA, 25 bp, Homo sapien
gagagcctgagctcagccgtggcca

SEQ ID NO: 3030704 - DNA, 25 bp, Homo sapien
ctgtcggggagagcctgagctcagc

SEQ ID NO: 3030705 - DNA, 25 bp, Homo sapien
ggagagcctgagctcagccgtggcc

SEQ ID NO: 3030706 - DNA, 25 bp, Homo sapien
tcggggagagcctgagctcagccgt

SEQ ID NO: 3030707 - DNA, 25 bp, Homo sapien
agccgcatcctttcttaggccatca

SEQ ID NO: 3030708 - DNA, 25 bp, Homo sapien
tcttaggccatcaggaataggaata

SEQ ID NO: 3030709 - DNA, 25 bp, Homo sapien
gagagctccaaggattcgttgtcct

SEQ ID NO: 3030710 - DNA, 25 bp, Homo sapien
ccaagagtagggtatagaaactcct

SEQ ID NO: 3030711 - DNA, 25 bp, Homo sapien
gggaagaacgaatgtgcttctgcat

SEQ ID NO: 3030712 - DNA, 25 bp, Homo sapien
ggggaagaacgaatgtgcttctgca

SEQ ID NO: 3030713 - DNA, 25 bp, Homo sapien
gtgtcgcctgcacaacctgaatttt

SEQ ID NO: 3030714 - DNA, 25 bp, Homo sapien
gacaccatacagtgagtgagggatg

SEQ ID NO: 3030715 - DNA, 25 bp, Homo sapien
gtccaagcaagaaccagggaggata

SEQ ID NO: 3030716 - DNA, 25 bp, Homo sapien
cagggaggataatggctgggcaccg

SEQ ID NO: 3030717 - DNA, 25 bp, Homo sapien
agaggtatgcatggaaacgctctct

SEQ ID NO: 3030718 - DNA, 25 bp, Homo sapien
cagaggtatgcatggaaacgctctc

SEQ ID NO: 3030719 - DNA, 25 bp, Homo sapien
gaggtatgcatggaaacgctctctc

SEQ ID NO: 3030720 - DNA, 25 bp, Homo sapien
catcatccaattgcagctcttggag

SEQ ID NO: 3030721 - DNA, 25 bp, Homo sapien
ggtcatcatccaattgcagctcttg

SEQ ID NO: 3030722 - DNA, 25 bp, Homo sapien
tgggtcatcatccaattgcagctct

SEQ ID NO: 3030723 - DNA, 25 bp, Homo sapien
caccttgtcctgtgcataggagcct

SEQ ID NO: 3030724 - DNA, 25 bp, Homo sapien
agatacctgtcatcattcaggaggc

SEQ ID NO: 3030725 - DNA, 25 bp, Homo sapien
ctagatacctgtcatcattcaggag

SEQ ID NO: 3030726 - DNA, 25 bp, Homo sapien
tagatacctgtcatcattcaggagg

SEQ ID NO: 3030727 - DNA, 25 bp, Homo sapien
tctagatacctgtcatcattcagga

SEQ ID NO: 3030728 - DNA, 25 bp, Homo sapien
gattccttcaacgaggacaacactg

SEQ ID NO: 3030729 - DNA, 25 bp, Homo sapien
tctgattccttcaacgaggacaaca

SEQ ID NO: 3030730 - DNA, 25 bp, Homo sapien
tgattccttcaacgaggacaacact

SEQ ID NO: 3030731 - DNA, 25 bp, Homo sapien
cctctgattccttcaacgaggacaa

SEQ ID NO: 3030732 - DNA, 25 bp, Homo sapien
gatcgatcaatccaaccgcataggg

SEQ ID NO: 3030733 - DNA, 25 bp, Homo sapien
gggtcgcccggatctgacattttgg

SEQ ID NO: 3030734 - DNA, 25 bp, Homo sapien
gaatggcattatctatagaggctga

SEQ ID NO: 3030735 - DNA, 25 bp, Homo sapien
gctataccgagacagagccacacgt

SEQ ID NO: 3030736 - DNA, 25 bp, Homo sapien
caaaaaacatgttatggctaatgaa

SEQ ID NO: 3030737 - DNA, 25 bp, Homo sapien
cattagtttgatttatacccagtgt

SEQ ID NO: 3030738 - DNA, 25 bp, Homo sapien
caaacactgcacactaacaatcatg

SEQ ID NO: 3030739 - DNA, 25 bp, Homo sapien
cattttatgcagcaatctctgtcaa

SEQ ID NO: 3030740 - DNA, 25 bp, Homo sapien
ctggacacaggaccgtgcttcgcac

SEQ ID NO: 3030741 - DNA, 25 bp, Homo sapien
acaggaccgtgcttcgcacatcttg

SEQ ID NO: 3030742 - DNA, 25 bp, Homo sapien
cgtgcttcgcacatcttgctcagca

SEQ ID NO: 3030743 - DNA, 25 bp, Homo sapien
gaccgtgcttcgcacatcttgctca

SEQ ID NO: 3030744 - DNA, 25 bp, Homo sapien
aacatctgagtgctccttgaacacg

SEQ ID NO: 3030745 - DNA, 25 bp, Homo sapien
tctgagtgctccttgaacacggctt

SEQ ID NO: 3030746 - DNA, 25 bp, Homo sapien
catctgagtgctccttgaacacggc

SEQ ID NO: 3030747 - DNA, 25 bp, Homo sapien
ccaaacatctgagtgctccttgaac

SEQ ID NO: 3030748 - DNA, 25 bp, Homo sapien
gaagattatcctctgactcaaagct

SEQ ID NO: 3030749 - DNA, 25 bp, Homo sapien
tgctagacaagtccttgaagattat

SEQ ID NO: 3030750 - DNA, 25 bp, Homo sapien
tctttggtgagatgtagatcagcat

SEQ ID NO: 3030751 - DNA, 25 bp, Homo sapien
ttgttattgttgctagacaagtcct

SEQ ID NO: 3030752 - DNA, 25 bp, Homo sapien
ttctggattgaagtgattcttctgc

SEQ ID NO: 3030753 - DNA, 25 bp, Homo sapien
acaggcacccaccaccacacccagc

SEQ ID NO: 3030754 - DNA, 25 bp, Homo sapien
ctcagccttccgagtagtggggatt

SEQ ID NO: 3030755 - DNA, 25 bp, Homo sapien
ccttctggattgaagtgattcttct

SEQ ID NO: 3030756 - DNA, 25 bp, Homo sapien
gcccgcaggttccacgccggcagct

SEQ ID NO: 3030757 - DNA, 25 bp, Homo sapien
agcccgcaggttccacgccggcagc

SEQ ID NO: 3030758 - DNA, 25 bp, Homo sapien
ccgcaggttccacgccggcagctcc

SEQ ID NO: 3030759 - DNA, 25 bp, Homo sapien
tgcagcccgcaggttccacgccggc

SEQ ID NO: 3030760 - DNA, 25 bp, Homo sapien
ctgggccttgcccacgttccacttc

SEQ ID NO: 3030761 - DNA, 25 bp, Homo sapien
taggaagcggtcacatccagactca

SEQ ID NO: 3030762 - DNA, 25 bp, Homo sapien
cttgcccacgttccacttccatcca

SEQ ID NO: 3030763 - DNA, 25 bp, Homo sapien
ccccataggaagcggtcacatccag

SEQ ID NO: 3030764 - DNA, 25 bp, Homo sapien
gaagcgcttgccacgggaaaaatcc

SEQ ID NO: 3030765 - DNA, 25 bp, Homo sapien
ctccaggaacacatgaacaaaactt

SEQ ID NO: 3030766 - DNA, 25 bp, Homo sapien
atgaacaaaacttcgcctgcacctg

SEQ ID NO: 3030767 - DNA, 25 bp, Homo sapien
tgggacatccttccttacggctggc

SEQ ID NO: 3030768 - DNA, 25 bp, Homo sapien
ccttcacgtgttcctggaggacttt

SEQ ID NO: 3030769 - DNA, 25 bp, Homo sapien
tttcggctcgcaagcgcttctccat

SEQ ID NO: 3030770 - DNA, 25 bp, Homo sapien
gaggtgaaggcccatttcgcgattt

SEQ ID NO: 3030771 - DNA, 25 bp, Homo sapien
agttgcgtacagccatgataaaagg

SEQ ID NO: 3030772 - DNA, 25 bp, Homo sapien
tcccagcgtctcgggcctggtgagt

SEQ ID NO: 3030773 - DNA, 25 bp, Homo sapien
ctcccagcgtctcgggcctggtgag

SEQ ID NO: 3030774 - DNA, 25 bp, Homo sapien
tctcccagcgtctcgggcctggtga

SEQ ID NO: 3030775 - DNA, 25 bp, Homo sapien
tgcagccgcattgacctcccagtgt

SEQ ID NO: 3030776 - DNA, 25 bp, Homo sapien
gtgtctccaccctgtatcgcctaca

SEQ ID NO: 3030777 - DNA, 25 bp, Homo sapien
ctacagccataccaggccttgtgtg

SEQ ID NO: 3030778 - DNA, 25 bp, Homo sapien
ttgtgtgtctccatcctcgtgcctg

SEQ ID NO: 3030779 - DNA, 25 bp, Homo sapien
cagtatcaccatcccgtaatgactg

SEQ ID NO: 3030780 - DNA, 25 bp, Homo sapien
ttgcagcacattgcttgccttgaat

SEQ ID NO: 3030781 - DNA, 25 bp, Homo sapien
tgcagcacattgcttgccttgaatg

SEQ ID NO: 3030782 - DNA, 25 bp, Homo sapien
gcagcacattgcttgccttgaatgt

SEQ ID NO: 3030783 - DNA, 25 bp, Homo sapien
cccttgtcactactgtcctttgtgt

SEQ ID NO: 3030784 - DNA, 25 bp, Homo sapien
cttgtcactactgtcctttgtgtct

SEQ ID NO: 3030785 - DNA, 25 bp, Homo sapien
ccttgtcactactgtcctttgtgtc

SEQ ID NO: 3030786 - DNA, 25 bp, Homo sapien
gtatgtggcctgcaactatggtctt

SEQ ID NO: 3030787 - DNA, 25 bp, Homo sapien
tatcaccaaatctccctacctgggt

SEQ ID NO: 3030788 - DNA, 25 bp, Homo sapien
tcttcatagtagagagctgttcccg

SEQ ID NO: 3030789 - DNA, 25 bp, Homo sapien
tatgcttgaggtttgactgctcatg

SEQ ID NO: 3030790 - DNA, 25 bp, Homo sapien
aaggtgtttgtccagtacattcaga

SEQ ID NO: 3030791 - DNA, 25 bp, Homo sapien
tacattcagaatgtcgccacagatt

SEQ ID NO: 3030792 - DNA, 25 bp, Homo sapien
gcagtgttagctgctggaataaggt

SEQ ID NO: 3030793 - DNA, 25 bp, Homo sapien
aaaaccttggacttggcagtgttag

SEQ ID NO: 3030794 - DNA, 25 bp, Homo sapien
tacccaatggaaacaagtggcacag

SEQ ID NO: 3030795 - DNA, 25 bp, Homo sapien
aatacgacagccgaactctgggcca

SEQ ID NO: 3030796 - DNA, 25 bp, Homo sapien
tcagacacctgtggaatacccaatg

SEQ ID NO: 3030797 - DNA, 25 bp, Homo sapien
tttcccatgatctccaaacggccag

SEQ ID NO: 3030798 - DNA, 25 bp, Homo sapien
atggaagaaatacttccagttcatc

SEQ ID NO: 3030799 - DNA, 25 bp, Homo sapien
catcagcattgttattggatggcat

SEQ ID NO: 3030800 - DNA, 25 bp, Homo sapien
ttttgaggtgaaggaatagcgggat

SEQ ID NO: 3030801 - DNA, 25 bp, Homo sapien
ccagttcatcagcattgttattgga

SEQ ID NO: 3030802 - DNA, 25 bp, Homo sapien
tggtgaattggaccgttaagtctta

SEQ ID NO: 3030803 - DNA, 25 bp, Homo sapien
tgaattggaccgttaagtcttacat

SEQ ID NO: 3030804 - DNA, 25 bp, Homo sapien
tttattttcactgattactagtcat

SEQ ID NO: 3030805 - DNA, 25 bp, Homo sapien
tattttcactgattactagtcatac

SEQ ID NO: 3030806 - DNA, 25 bp, Homo sapien
gttaaaccataaggtaatgcactct

SEQ ID NO: 3030807 - DNA, 25 bp, Homo sapien
aaaccataaggtaatgcactcttca

SEQ ID NO: 3030808 - DNA, 25 bp, Homo sapien
taaaccataaggtaatgcactcttc

SEQ ID NO: 3030809 - DNA, 25 bp, Homo sapien
ctgttaaaccataaggtaatgcact

SEQ ID NO: 3030810 - DNA, 25 bp, Homo sapien
taccatccacatctgaacactgtct

SEQ ID NO: 3030811 - DNA, 25 bp, Homo sapien
gacagatgagaagaattggcttctg

SEQ ID NO: 3030812 - DNA, 25 bp, Homo sapien
gaaattcagcttgacatattgaaca

SEQ ID NO: 3030813 - DNA, 25 bp, Homo sapien
catattgaacaagtaccatccacat

SEQ ID NO: 3030814 - DNA, 25 bp, Homo sapien
atattcgtaaaacctgtctgaaagt

SEQ ID NO: 3030815 - DNA, 25 bp, Homo sapien
aatattcgtaaaacctgtctgaaag

SEQ ID NO: 3030816 - DNA, 25 bp, Homo sapien
tcagatgcccaaaaaattccaaaag

SEQ ID NO: 3030817 - DNA, 25 bp, Homo sapien
taagactccgtctagttacattacc

SEQ ID NO: 3030818 - DNA, 25 bp, Homo sapien
aagccagcaatatcctaagactccg

SEQ ID NO: 3030819 - DNA, 25 bp, Homo sapien
tagtacgaggtaaagtaaagccagc

SEQ ID NO: 3030820 - DNA, 25 bp, Homo sapien
agcaatatcctaagactccgtctag

SEQ ID NO: 3030821 - DNA, 25 bp, Homo sapien
gcatgatgaaagaaggcaccaataa

SEQ ID NO: 3030822 - DNA, 25 bp, Homo sapien
caaatggtccaaaataggatataaa

SEQ ID NO: 3030823 - DNA, 25 bp, Homo sapien
ctcaaatggtccaaaataggatata

SEQ ID NO: 3030824 - DNA, 25 bp, Homo sapien
tcaaatggtccaaaataggatataa

SEQ ID NO: 3030825 - DNA, 25 bp, Homo sapien
tataaaagaacagaagatcctgcta

SEQ ID NO: 3030826 - DNA, 25 bp, Homo sapien
tgactgagaatgaaaggtgtaatat

SEQ ID NO: 3030827 - DNA, 25 bp, Homo sapien
agcacactgaatctttgaggacctt

SEQ ID NO: 3030828 - DNA, 25 bp, Homo sapien
tgctaagaataccagtaaccaagca

SEQ ID NO: 3030829 - DNA, 25 bp, Homo sapien
acataaaagttgttagcagcccaat

SEQ ID NO: 3030830 - DNA, 25 bp, Homo sapien
aaacctgatttacagtgcttttgtt

SEQ ID NO: 3030831 - DNA, 25 bp, Homo sapien
cttagaaaaacctgatttacagtgc

SEQ ID NO: 3030832 - DNA, 25 bp, Homo sapien
aagttgttagcagcccaattccaag

SEQ ID NO: 3030833 - DNA, 25 bp, Homo sapien
tgaagagctactaccgtgatctcca

SEQ ID NO: 3030834 - DNA, 25 bp, Homo sapien
gaagagctactaccgtgatctccag

SEQ ID NO: 3030835 - DNA, 25 bp, Homo sapien
acttgaagagctactaccgtgatct

SEQ ID NO: 3030836 - DNA, 25 bp, Homo sapien
gtgaccctgtaagtgactgtgtacc

SEQ ID NO: 3030837 - DNA, 25 bp, Homo sapien
tccgcacattctttagatatggcat

SEQ ID NO: 3030838 - DNA, 25 bp, Homo sapien
tgtattttccgcacattctttagat

SEQ ID NO: 3030839 - DNA, 25 bp, Homo sapien
tttccgcacattctttagatatggc

SEQ ID NO: 3030840 - DNA, 25 bp, Homo sapien
cacattctttagatatggcatttat

SEQ ID NO: 3030841 - DNA, 25 bp, Homo sapien
aaccgtccaacgaagagcttcctca

SEQ ID NO: 3030842 - DNA, 25 bp, Homo sapien
ctttaggagactctgacttatacat

SEQ ID NO: 3030843 - DNA, 25 bp, Homo sapien
ccgtccaacgaagagcttcctcagt

SEQ ID NO: 3030844 - DNA, 25 bp, Homo sapien
tcctcagttgttcaggctctttagg

SEQ ID NO: 3030845 - DNA, 25 bp, Homo sapien
gttggctgcttgtgcgcaaacaccc

SEQ ID NO: 3030846 - DNA, 25 bp, Homo sapien
ggttggctgcttgtgcgcaaacacc

SEQ ID NO: 3030847 - DNA, 25 bp, Homo sapien
tggctgcttgtgcgcaaacacccaa

SEQ ID NO: 3030848 - DNA, 25 bp, Homo sapien
ttggctgcttgtgcgcaaacaccca

SEQ ID NO: 3030849 - DNA, 25 bp, Homo sapien
ggcatcatagtgtgaggaagcccaa

SEQ ID NO: 3030850 - DNA, 25 bp, Homo sapien
gaagcccaagtgagtcctgtagaga

SEQ ID NO: 3030851 - DNA, 25 bp, Homo sapien
gacgtgcgttctagttgagctttgg

SEQ ID NO: 3030852 - DNA, 25 bp, Homo sapien
gcccagtgtctgcttacccaataga

SEQ ID NO: 3030853 - DNA, 25 bp, Homo sapien
cgggctttgtggcaggcacgtgtaa

SEQ ID NO: 3030854 - DNA, 25 bp, Homo sapien
tagccgggctttgtggcaggcacgt

SEQ ID NO: 3030855 - DNA, 25 bp, Homo sapien
gccgggctttgtggcaggcacgtgt

SEQ ID NO: 3030856 - DNA, 25 bp, Homo sapien
ttagccgggctttgtggcaggcacg

SEQ ID NO: 3030857 - DNA, 25 bp, Homo sapien
tatacgaaaataagccatcaaaact

SEQ ID NO: 3030858 - DNA, 25 bp, Homo sapien
tataacttacatatacgaaaataag

SEQ ID NO: 3030859 - DNA, 25 bp, Homo sapien
acgaaaataagccatcaaaacttga

SEQ ID NO: 3030860 - DNA, 25 bp, Homo sapien
tacatatacgaaaataagccatcaa

SEQ ID NO: 3030861 - DNA, 25 bp, Homo sapien
taggctgatttgagcaggagtatca

SEQ ID NO: 3030862 - DNA, 25 bp, Homo sapien
ctatgatcattccatcgctgcagcc

SEQ ID NO: 3030863 - DNA, 25 bp, Homo sapien
tatgaacctaggctgatttgagcag

SEQ ID NO: 3030864 - DNA, 25 bp, Homo sapien
gctatgatcattccatcgctgcagc

SEQ ID NO: 3030865 - DNA, 25 bp, Homo sapien
ggaaacacatcctataagaaactga

SEQ ID NO: 3030866 - DNA, 25 bp, Homo sapien
tgcaaggcatcaagttccctgagaa

SEQ ID NO: 3030867 - DNA, 25 bp, Homo sapien
ctgagaagctcacattcccccaaaa

SEQ ID NO: 3030868 - DNA, 25 bp, Homo sapien
caagtttgacattctcataatctgc

SEQ ID NO: 3030869 - DNA, 25 bp, Homo sapien
aatccagtgtcaggcaccaggttcc

SEQ ID NO: 3030870 - DNA, 25 bp, Homo sapien
caaaatccagtgtcaggcaccaggt

SEQ ID NO: 3030871 - DNA, 25 bp, Homo sapien
tcaaaatccagtgtcaggcaccagg

SEQ ID NO: 3030872 - DNA, 25 bp, Homo sapien
tccagctcctcttctacgcccttac

SEQ ID NO: 3030873 - DNA, 25 bp, Homo sapien
ttttatagcaccaatcttcgccgcc

SEQ ID NO: 3030874 - DNA, 25 bp, Homo sapien
cttttatagcaccaatcttcgccgc

SEQ ID NO: 3030875 - DNA, 25 bp, Homo sapien
gcctgcaggaaactcgagacaaaga

SEQ ID NO: 3030876 - DNA, 25 bp, Homo sapien
agcctgcaggaaactcgagacaaag

SEQ ID NO: 3030877 - DNA, 25 bp, Homo sapien
cctgcaggaaactcgagacaaagac

SEQ ID NO: 3030878 - DNA, 25 bp, Homo sapien
aaagcctgcaggaaactcgagacaa

SEQ ID NO: 3030879 - DNA, 25 bp, Homo sapien
tctaggcctattaatcccaaagggc

SEQ ID NO: 3030880 - DNA, 25 bp, Homo sapien
tatggatccagctgacacccatggg

SEQ ID NO: 3030881 - DNA, 25 bp, Homo sapien
caacagcagcaagcctatggatcca

SEQ ID NO: 3030882 - DNA, 25 bp, Homo sapien
gattccaaacatcagcagctgtgct

SEQ ID NO: 3030883 - DNA, 25 bp, Homo sapien
tttacattaggattacattttcaga

SEQ ID NO: 3030884 - DNA, 25 bp, Homo sapien
ctttattgaatgtgtttatcagctt

SEQ ID NO: 3030885 - DNA, 25 bp, Homo sapien
aattttgtaactctcaactttattg

SEQ ID NO: 3030886 - DNA, 25 bp, Homo sapien
gaatgtgtttatcagctttaacagg

SEQ ID NO: 3030887 - DNA, 25 bp, Homo sapien
gacagactagggaacagtggcaaca

SEQ ID NO: 3030888 - DNA, 25 bp, Homo sapien
taccgtagatcctctcatgtgggca

SEQ ID NO: 3030889 - DNA, 25 bp, Homo sapien
agttttaataacgtaccaggtgcag

SEQ ID NO: 3030890 - DNA, 25 bp, Homo sapien
gatgcacctgtatggtacctcatgg

SEQ ID NO: 3030891 - DNA, 25 bp, Homo sapien
gtggtgatgaaccctttgctcatgc

SEQ ID NO: 3030892 - DNA, 25 bp, Homo sapien
caacattagacacatgattcttccc

SEQ ID NO: 3030893 - DNA, 25 bp, Homo sapien
tgtggtgatgaaccctttgctcatg

SEQ ID NO: 3030894 - DNA, 25 bp, Homo sapien
agctgcagagccacgtcatctgctc

SEQ ID NO: 3030895 - DNA, 25 bp, Homo sapien
tggttcccattcctgacacctccac

SEQ ID NO: 3030896 - DNA, 25 bp, Homo sapien
cctgacacctccacccacagtgccc

SEQ ID NO: 3030897 - DNA, 25 bp, Homo sapien
caagggctggttcccattcctgaca

SEQ ID NO: 3030898 - DNA, 25 bp, Homo sapien
gggctggttcccattcctgacacct

SEQ ID NO: 3030899 - DNA, 25 bp, Homo sapien
actgctctatcgccactaccaaccg

SEQ ID NO: 3030900 - DNA, 25 bp, Homo sapien
aggtggaaggttgcggcttcttcca

SEQ ID NO: 3030901 - DNA, 25 bp, Homo sapien
caggtggaaggttgcggcttcttcc

SEQ ID NO: 3030902 - DNA, 25 bp, Homo sapien
gctctatcgccactaccaaccgcag

SEQ ID NO: 3030903 - DNA, 25 bp, Homo sapien
cttatattcaggaactagttgctga

SEQ ID NO: 3030904 - DNA, 25 bp, Homo sapien
ccttatattcaggaactagttgctg

SEQ ID NO: 3030905 - DNA, 25 bp, Homo sapien
tccttatattcaggaactagttgct

SEQ ID NO: 3030906 - DNA, 25 bp, Homo sapien
cttcaaaaatctgtgcatccttatg

SEQ ID NO: 3030907 - DNA, 25 bp, Homo sapien
aaaatctgtgcatccttatgcaggc

SEQ ID NO: 3030908 - DNA, 25 bp, Homo sapien
tatggaccacttcaaaaatctgtgc

SEQ ID NO: 3030909 - DNA, 25 bp, Homo sapien
caaaaatctgtgcatccttatgcag

SEQ ID NO: 3030910 - DNA, 25 bp, Homo sapien
ctatccctcttgtccacgccagtgt

SEQ ID NO: 3030911 - DNA, 25 bp, Homo sapien
gtctaaggcgccctcaccgtgcttg

SEQ ID NO: 3030912 - DNA, 25 bp, Homo sapien
tgtggagctcgccaagatcttccag

SEQ ID NO: 3030913 - DNA, 25 bp, Homo sapien
accgtgcttgctctcgctgccgacg

SEQ ID NO: 3030914 - DNA, 25 bp, Homo sapien
cttcctcgtggcgtagactgccggc

SEQ ID NO: 3030915 - DNA, 25 bp, Homo sapien
ggtcctcctggctcccaacactagg

SEQ ID NO: 3030916 - DNA, 25 bp, Homo sapien
ggtagtccaagtaccactggtcctc

SEQ ID NO: 3030917 - DNA, 25 bp, Homo sapien
ggagaagcccaaggaccactggtcc

SEQ ID NO: 3030918 - DNA, 25 bp, Homo sapien
tcccagcaggatagcccgcggtttc

SEQ ID NO: 3030919 - DNA, 25 bp, Homo sapien
cagtagcgagctactgcctcggcca

SEQ ID NO: 3030920 - DNA, 25 bp, Homo sapien
tcggccacaacctcccagcaggata

SEQ ID NO: 3030921 - DNA, 25 bp, Homo sapien
tagcgagctactgcctcggccacaa

SEQ ID NO: 3030922 - DNA, 25 bp, Homo sapien
aaatgccaagccaagcgatcactgc

SEQ ID NO: 3030923 - DNA, 25 bp, Homo sapien
gaaatgccaagccaagcgatcactg

SEQ ID NO: 3030924 - DNA, 25 bp, Homo sapien
agaaatgccaagccaagcgatcact

SEQ ID NO: 3030925 - DNA, 25 bp, Homo sapien
tccatcccctgggtcagcctctcca

SEQ ID NO: 3030926 - DNA, 25 bp, Homo sapien
gatcacctctttccctgcacttgtc

SEQ ID NO: 3030927 - DNA, 25 bp, Homo sapien
tcctctttgttgatcacctctttcc

SEQ ID NO: 3030928 - DNA, 25 bp, Homo sapien
ctctccagtgccacgaagtcctctt

SEQ ID NO: 3030929 - DNA, 25 bp, Homo sapien
catgtaggaaaacgtgtctctgcta

SEQ ID NO: 3030930 - DNA, 25 bp, Homo sapien
atttccgctctttggtttgtctgcc

SEQ ID NO: 3030931 - DNA, 25 bp, Homo sapien
ccatgtaggaaaacgtgtctctgct

SEQ ID NO: 3030932 - DNA, 25 bp, Homo sapien
atgaatttccgctctttggtttgtc

SEQ ID NO: 3030933 - DNA, 25 bp, Homo sapien
gcttcatgtgcttgcatatggctct

SEQ ID NO: 3030934 - DNA, 25 bp, Homo sapien
cggcttcatgtgcttgcatatggct

SEQ ID NO: 3030935 - DNA, 25 bp, Homo sapien
ggcttcatgtgcttgcatatggctc

SEQ ID NO: 3030936 - DNA, 25 bp, Homo sapien
gtgctttgcactcattcccggtcag

SEQ ID NO: 3030937 - DNA, 25 bp, Homo sapien
ctgtgctttgcactcattcccggtc

SEQ ID NO: 3030938 - DNA, 25 bp, Homo sapien
tgtgctttgcactcattcccggtca

SEQ ID NO: 3030939 - DNA, 25 bp, Homo sapien
tgctttgcactcattcccggtcaga

SEQ ID NO: 3030940 - DNA, 25 bp, Homo sapien
aacagaagccggctcatcgctcact

SEQ ID NO: 3030941 - DNA, 25 bp, Homo sapien
ccaggaacagaagccggctcatcgc

SEQ ID NO: 3030942 - DNA, 25 bp, Homo sapien
tgcggccaggaacagaagccggctc

SEQ ID NO: 3030943 - DNA, 25 bp, Homo sapien
cggccaggaacagaagccggctcat

SEQ ID NO: 3030944 - DNA, 25 bp, Homo sapien
ggctgccgagcaggggatctggaaa

SEQ ID NO: 3030945 - DNA, 25 bp, Homo sapien
tgtcgcaggggttagcccgggtggc

SEQ ID NO: 3030946 - DNA, 25 bp, Homo sapien
ccagcgcagcgcagggtgtcgcagg

SEQ ID NO: 3030947 - DNA, 25 bp, Homo sapien
ccctgagccccagcgcagcgcaggg

SEQ ID NO: 3030948 - DNA, 25 bp, Homo sapien
cggtcgctcgccaggaaaattttat

SEQ ID NO: 3030949 - DNA, 25 bp, Homo sapien
tgctgctgctcgcggtcgctcgcca

SEQ ID NO: 3030950 - DNA, 25 bp, Homo sapien
ctcctgctgctgctcgcggtcgctc

SEQ ID NO: 3030951 - DNA, 25 bp, Homo sapien
ggtcgctcgccaggaaaattttatg

SEQ ID NO: 3030952 - DNA, 25 bp, Homo sapien
gcctatgaaacttcagtactacaag

SEQ ID NO: 3030953 - DNA, 25 bp, Homo sapien
catctgactctcagggggcatgaag

SEQ ID NO: 3030954 - DNA, 25 bp, Homo sapien
acaaaaaacatatagatgacgggtt

SEQ ID NO: 3030955 - DNA, 25 bp, Homo sapien
gcatgaagtgcataatcttccctag

SEQ ID NO: 3030956 - DNA, 25 bp, Homo sapien
cccataatcttcatgcacctcctgg

SEQ ID NO: 3030957 - DNA, 25 bp, Homo sapien
cctgtcctcacgacgagtgtgtgca

SEQ ID NO: 3030958 - DNA, 25 bp, Homo sapien
tgccctgtcctcacgacgagtgtgt

SEQ ID NO: 3030959 - DNA, 25 bp, Homo sapien
tcacgacgagtgtgtgcaaaagtga

SEQ ID NO: 3030960 - DNA, 25 bp, Homo sapien
catcgtgtggttgggcacggacccc

SEQ ID NO: 3030961 - DNA, 25 bp, Homo sapien
cttgttcacgacacagggcacacag

SEQ ID NO: 3030962 - DNA, 25 bp, Homo sapien
tgaaaacaggctacagggggcatcg

SEQ ID NO: 3030963 - DNA, 25 bp, Homo sapien
gccacagacacagtaagcgtccttg

SEQ ID NO: 3030964 - DNA, 25 bp, Homo sapien
tcctgacgcaggtgcgccttgggct

SEQ ID NO: 3030965 - DNA, 25 bp, Homo sapien
ggtctcgcttcctgacgcaggtgcg

SEQ ID NO: 3030966 - DNA, 25 bp, Homo sapien
gtctctgcccagtgcgggtctcgct

SEQ ID NO: 3030967 - DNA, 25 bp, Homo sapien
ccagtgcgggtctcgcttcctgacg

SEQ ID NO: 3030968 - DNA, 25 bp, Homo sapien
tctgcctgcagtttatgccagctgt

SEQ ID NO: 3030969 - DNA, 25 bp, Homo sapien
cctgcagtttatgccagctgtcaag

SEQ ID NO: 3030970 - DNA, 25 bp, Homo sapien
gcagtttatgccagctgtcaagtct

SEQ ID NO: 3030971 - DNA, 25 bp, Homo sapien
gtttatgccagctgtcaagtctcca

SEQ ID NO: 3030972 - DNA, 25 bp, Homo sapien
cccattctgatattttcgtctgtct

SEQ ID NO: 3030973 - DNA, 25 bp, Homo sapien
tgatattttcgtctgtctgtcccct

SEQ ID NO: 3030974 - DNA, 25 bp, Homo sapien
ttgagtgttgcggtctccttagcct

SEQ ID NO: 3030975 - DNA, 25 bp, Homo sapien
gcttccaacacattacttgctttga

SEQ ID NO: 3030976 - DNA, 25 bp, Homo sapien
ccagaacgcccttgatcttcttgtg

SEQ ID NO: 3030977 - DNA, 25 bp, Homo sapien
tgccagaacgcccttgatcttcttg

SEQ ID NO: 3030978 - DNA, 25 bp, Homo sapien
ttgccagaacgcccttgatcttctt

SEQ ID NO: 3030979 - DNA, 25 bp, Homo sapien
gccagaacgcccttgatcttcttgt

SEQ ID NO: 3030980 - DNA, 25 bp, Homo sapien
cctggatcagaataaatgacaacat

SEQ ID NO: 3030981 - DNA, 25 bp, Homo sapien
tgcctggatcagaataaatgacaac

SEQ ID NO: 3030982 - DNA, 25 bp, Homo sapien
ctgtgcctggatcagaataaatgac

SEQ ID NO: 3030983 - DNA, 25 bp, Homo sapien
tgtgcctggatcagaataaatgaca

SEQ ID NO: 3030984 - DNA, 25 bp, Homo sapien
cctcagaaataaccgctgcttgtgg

SEQ ID NO: 3030985 - DNA, 25 bp, Homo sapien
gatgagcctcagaaataaccgctgc

SEQ ID NO: 3030986 - DNA, 25 bp, Homo sapien
taaccgctgcttgtggtttgctgtg

SEQ ID NO: 3030987 - DNA, 25 bp, Homo sapien
tgcttgtggtttgctgtgtattcct

SEQ ID NO: 3030988 - DNA, 25 bp, Homo sapien
aatattattagagcagtactgtagc

SEQ ID NO: 3030989 - DNA, 25 bp, Homo sapien
cattagagccagctgctccgtgagg

SEQ ID NO: 3030990 - DNA, 25 bp, Homo sapien
tcctgagtggaattagaatattatt

SEQ ID NO: 3030991 - DNA, 25 bp, Homo sapien
gcaagttgtaatgggatgtttaaga

SEQ ID NO: 3030992 - DNA, 25 bp, Homo sapien
ctggcgttttctgtgtttgctgacc

SEQ ID NO: 3030993 - DNA, 25 bp, Homo sapien
tttgctgaccgtctgcatctcctct

SEQ ID NO: 3030994 - DNA, 25 bp, Homo sapien
cgttttctgtgtttgctgaccgtct

SEQ ID NO: 3030995 - DNA, 25 bp, Homo sapien
tctgtgtttgctgaccgtctgcatc

SEQ ID NO: 3030996 - DNA, 25 bp, Homo sapien
gcccctgagacccaatgcacaggca

SEQ ID NO: 3030997 - DNA, 25 bp, Homo sapien
cccctgagacccaatgcacaggcat

SEQ ID NO: 3030998 - DNA, 25 bp, Homo sapien
ggcccctgagacccaatgcacaggc

SEQ ID NO: 3030999 - DNA, 25 bp, Homo sapien
tccccctctgtgagaaacacccaag

SEQ ID NO: 3031000 - DNA, 25 bp, Homo sapien
caaatccccctctgtgagaaacacc

SEQ ID NO: 3031001 - DNA, 25 bp, Homo sapien
cccctctgtgagaaacacccaagaa

SEQ ID NO: 3031002 - DNA, 25 bp, Homo sapien
aatccccctctgtgagaaacaccca

SEQ ID NO: 3031003 - DNA, 25 bp, Homo sapien
tgtttctggcaataatgggaaccag

SEQ ID NO: 3031004 - DNA, 25 bp, Homo sapien
gctgtttctggcaataatgggaacc

SEQ ID NO: 3031005 - DNA, 25 bp, Homo sapien
aggctgtttctggcaataatgggaa

SEQ ID NO: 3031006 - DNA, 25 bp, Homo sapien
gcagcaggggtcctatgaaaggctg

SEQ ID NO: 3031007 - DNA, 25 bp, Homo sapien
ggagaagcaggacgctccggttttg

SEQ ID NO: 3031008 - DNA, 25 bp, Homo sapien
aagcaggacgctccggttttgcttc

SEQ ID NO: 3031009 - DNA, 25 bp, Homo sapien
caggacgctccggttttgcttcccg

SEQ ID NO: 3031010 - DNA, 25 bp, Homo sapien
aagggagaagcaggacgctccggtt

SEQ ID NO: 3031011 - DNA, 25 bp, Homo sapien
gcatggccacgggctggaactttct

SEQ ID NO: 3031012 - DNA, 25 bp, Homo sapien
tgcatggccacgggctggaactttc

SEQ ID NO: 3031013 - DNA, 25 bp, Homo sapien
tggaactttctacccaggttctctg

SEQ ID NO: 3031014 - DNA, 25 bp, Homo sapien
cccaaggtgtgagtgcatggccacg

SEQ ID NO: 3031015 - DNA, 25 bp, Homo sapien
tgcagggacccttgctaatgccaag

SEQ ID NO: 3031016 - DNA, 25 bp, Homo sapien
gcagggacccttgctaatgccaagc

SEQ ID NO: 3031017 - DNA, 25 bp, Homo sapien
agggacccttgctaatgccaagccc

SEQ ID NO: 3031018 - DNA, 25 bp, Homo sapien
tttgcagggacccttgctaatgcca

SEQ ID NO: 3031019 - DNA, 25 bp, Homo sapien
tcccctgtggatggaaggttaggct

SEQ ID NO: 3031020 - DNA, 25 bp, Homo sapien
ggagatcgttccctcttaggacaca

SEQ ID NO: 3031021 - DNA, 25 bp, Homo sapien
gcatttaacccttcatcccctgtgg

SEQ ID NO: 3031022 - DNA, 25 bp, Homo sapien
tggatcccgtcttttgcaacctgaa

SEQ ID NO: 3031023 - DNA, 25 bp, Homo sapien
gcctcagatcactggcctgggcaga

SEQ ID NO: 3031024 - DNA, 25 bp, Homo sapien
tgatgctgtgatggtcaggcctcgc

SEQ ID NO: 3031025 - DNA, 25 bp, Homo sapien
taagggccaggcaggagctatgttt

SEQ ID NO: 3031026 - DNA, 25 bp, Homo sapien
tcatgtcctcaagagcagcaagtct

SEQ ID NO: 3031027 - DNA, 25 bp, Homo sapien
atcttggagggcgagcaggtactgt

SEQ ID NO: 3031028 - DNA, 25 bp, Homo sapien
tcatcttggagggcgagcaggtact

SEQ ID NO: 3031029 - DNA, 25 bp, Homo sapien
cctgcaactgtgggatatgctcatc

SEQ ID NO: 3031030 - DNA, 25 bp, Homo sapien
gcaactgtgggatatgctcatcttg

SEQ ID NO: 3031031 - DNA, 25 bp, Homo sapien
tctgagtcagggctgctgaacagcc

SEQ ID NO: 3031032 - DNA, 25 bp, Homo sapien
gttctgagtcagggctgctgaacag

SEQ ID NO: 3031033 - DNA, 25 bp, Homo sapien
gagttctgagtcagggctgctgaac

SEQ ID NO: 3031034 - DNA, 25 bp, Homo sapien
ctgagttctgagtcagggctgctga

SEQ ID NO: 3031035 - DNA, 25 bp, Homo sapien
tcctatgtcataataaagctacatt

SEQ ID NO: 3031036 - DNA, 25 bp, Homo sapien
ctatgtcataataaagctacatttt

SEQ ID NO: 3031037 - DNA, 25 bp, Homo sapien
cctatgtcataataaagctacattt

SEQ ID NO: 3031038 - DNA, 25 bp, Homo sapien
aaatgtagctttattatgacatagg

SEQ ID NO: 3031039 - DNA, 25 bp, Homo sapien
aaaatgtagctttattatgacatag

SEQ ID NO: 3031040 - DNA, 25 bp, Homo sapien
aatgtagctttattatgacatagga

SEQ ID NO: 3031041 - DNA, 25 bp, Homo sapien
ctcctcccccccagtgctttgtagt

SEQ ID NO: 3031042 - DNA, 25 bp, Homo sapien
ctcccccccagtgctttgtagtctc

SEQ ID NO: 3031043 - DNA, 25 bp, Homo sapien
ctgtggttggagactttatttacca

SEQ ID NO: 3031044 - DNA, 25 bp, Homo sapien
tgtggttggagactttatttaccaa

SEQ ID NO: 3031045 - DNA, 25 bp, Homo sapien
tggttggagactttatttaccaaga

SEQ ID NO: 3031046 - DNA, 25 bp, Homo sapien
cctcccccccagtgctttgtagtct

SEQ ID NO: 3031047 - DNA, 25 bp, Homo sapien
ttggtaaataaagtctccaaccaca

SEQ ID NO: 3031048 - DNA, 25 bp, Homo sapien
actacaaagcactgggggggaggag

SEQ ID NO: 3031049 - DNA, 25 bp, Homo sapien
tggtaaataaagtctccaaccacag

SEQ ID NO: 3031050 - DNA, 25 bp, Homo sapien
tcttggtaaataaagtctccaacca

SEQ ID NO: 3031051 - DNA, 25 bp, Homo sapien
gagactacaaagcactgggggggag

SEQ ID NO: 3031052 - DNA, 25 bp, Homo sapien
agactacaaagcactgggggggagg

SEQ ID NO: 3031053 - DNA, 25 bp, Homo sapien
tccattttgaggagctgtgtcactc

SEQ ID NO: 3031054 - DNA, 25 bp, Homo sapien
tatttaccaagatgtttactcttcc

SEQ ID NO: 3031055 - DNA, 25 bp, Homo sapien
ctgtggttggagactttatttacca

SEQ ID NO: 3031056 - DNA, 25 bp, Homo sapien
tgaggagctgtgtcactcctcctcc

SEQ ID NO: 3031057 - DNA, 25 bp, Homo sapien
tggttggagactttatttaccaaga

SEQ ID NO: 3031058 - DNA, 25 bp, Homo sapien
tttccccttccattttgaggagctg

SEQ ID NO: 3031059 - DNA, 25 bp, Homo sapien
ggaggaggagtgacacagctcctca

SEQ ID NO: 3031060 - DNA, 25 bp, Homo sapien
gagtgacacagctcctcaaaatgga

SEQ ID NO: 3031061 - DNA, 25 bp, Homo sapien
tggtaaataaagtctccaaccacag

SEQ ID NO: 3031062 - DNA, 25 bp, Homo sapien
tcttggtaaataaagtctccaacca

SEQ ID NO: 3031063 - DNA, 25 bp, Homo sapien
gacacagctcctcaaaatggaaggg

SEQ ID NO: 3031064 - DNA, 25 bp, Homo sapien
gaaaggaagagtaaacatcttggta

SEQ ID NO: 3031065 - DNA, 25 bp, Homo sapien
ggcttcgtggtgagcactgcagcct

SEQ ID NO: 3031066 - DNA, 25 bp, Homo sapien
caccactgcaacatatagacctgag

SEQ ID NO: 3031067 - DNA, 25 bp, Homo sapien
tagacctgagtgctattgtattttg

SEQ ID NO: 3031068 - DNA, 25 bp, Homo sapien
gcgccagcaccactgcaacatatag

SEQ ID NO: 3031069 - DNA, 25 bp, Homo sapien
tttggcttggtgtgtatgctcttca

SEQ ID NO: 3031070 - DNA, 25 bp, Homo sapien
tggctccctccgtggacctgggctt

SEQ ID NO: 3031071 - DNA, 25 bp, Homo sapien
aagcccaggtccacggagggagcca

SEQ ID NO: 3031072 - DNA, 25 bp, Homo sapien
caaaatacaatagcactcaggtcta

SEQ ID NO: 3031073 - DNA, 25 bp, Homo sapien
aggctgcagtgctcaccacgaagcc

SEQ ID NO: 3031074 - DNA, 25 bp, Homo sapien
tatatgttgcagtggtgctggcgct

SEQ ID NO: 3031075 - DNA, 25 bp, Homo sapien
tgaagagcatacacaccaagccaaa

SEQ ID NO: 3031076 - DNA, 25 bp, Homo sapien
tagcactcaggtctatatgttgcag

SEQ ID NO: 3031077 - DNA, 25 bp, Homo sapien
gacacatggcctttccctcttcaga

SEQ ID NO: 3031078 - DNA, 25 bp, Homo sapien
ggctggcctttcagtgcctcccagg

SEQ ID NO: 3031079 - DNA, 25 bp, Homo sapien
tgcattttggagatgctggctggcc

SEQ ID NO: 3031080 - DNA, 25 bp, Homo sapien
gagatgctggctggcctttcagtgc

SEQ ID NO: 3031081 - DNA, 25 bp, Homo sapien
ctttcagtgcctcccaggaagacac

SEQ ID NO: 3031082 - DNA, 25 bp, Homo sapien
gcctcccaggaagacacatggcctt

SEQ ID NO: 3031083 - DNA, 25 bp, Homo sapien
catgtgtcttcctgggaggcactga

SEQ ID NO: 3031084 - DNA, 25 bp, Homo sapien
gaaaggccatgtgtcttcctgggag

SEQ ID NO: 3031085 - DNA, 25 bp, Homo sapien
gaggcactgaaaggccagccagcat

SEQ ID NO: 3031086 - DNA, 25 bp, Homo sapien
gccagccagcatctccaaaatgcag

SEQ ID NO: 3031087 - DNA, 25 bp, Homo sapien
cttcctgggaggcactgaaaggcca

SEQ ID NO: 3031088 - DNA, 25 bp, Homo sapien
tctgaagagggaaaggccatgtgtc

SEQ ID NO: 3031089 - DNA, 25 bp, Homo sapien
gttgcctagtaatcaccccatgtag

SEQ ID NO: 3031090 - DNA, 25 bp, Homo sapien
cagttacctgatgcctgctgctgaa

SEQ ID NO: 3031091 - DNA, 25 bp, Homo sapien
tggcactgccccttgcattaggtct

SEQ ID NO: 3031092 - DNA, 25 bp, Homo sapien
tggcattgccgttctaagcagttac

SEQ ID NO: 3031093 - DNA, 25 bp, Homo sapien
gagagttgactgaagttggcccaca

SEQ ID NO: 3031094 - DNA, 25 bp, Homo sapien
tcatgaaggcttgccaccttgggac

SEQ ID NO: 3031095 - DNA, 25 bp, Homo sapien
aatcctgtgggccaacttcagtcaa

SEQ ID NO: 3031096 - DNA, 25 bp, Homo sapien
ttcagcagcaggcatcaggtaactg

SEQ ID NO: 3031097 - DNA, 25 bp, Homo sapien
taactgcttagaacggcaatgccac

SEQ ID NO: 3031098 - DNA, 25 bp, Homo sapien
ggcgtcccaaggtggcaagccttca

SEQ ID NO: 3031099 - DNA, 25 bp, Homo sapien
cacccctgaatgcaagtggagacag

SEQ ID NO: 3031100 - DNA, 25 bp, Homo sapien
taaaagaccactcataggccaggtg

SEQ ID NO: 3031101 - DNA, 25 bp, Homo sapien
gatgcggtttcttgcccacgtgctc

SEQ ID NO: 3031102 - DNA, 25 bp, Homo sapien
ggtgccgtttatgttgctgcccgcc

SEQ ID NO: 3031103 - DNA, 25 bp, Homo sapien
caccgtgattgagcttgtcagcaga

SEQ ID NO: 3031104 - DNA, 25 bp, Homo sapien
tgtgctgcagctcatacggtgtgtc

SEQ ID NO: 3031105 - DNA, 25 bp, Homo sapien
gatcatctgtctcagcggtgggcag

SEQ ID NO: 3031106 - DNA, 25 bp, Homo sapien
tacatttggtgtactttcgggcgtg

SEQ ID NO: 3031107 - DNA, 25 bp, Homo sapien
tctgctgacaagctcaatcacggtg

SEQ ID NO: 3031108 - DNA, 25 bp, Homo sapien
tctgcgggctgtgattgccaagtcc

SEQ ID NO: 3031109 - DNA, 25 bp, Homo sapien
caccaaatgtaaagcagaggcagac

SEQ ID NO: 3031110 - DNA, 25 bp, Homo sapien
gagatgacagacacaccgtatgagc

SEQ ID NO: 3031111 - DNA, 25 bp, Homo sapien
ggcagcaacataaacggcacccatt

SEQ ID NO: 3031112 - DNA, 25 bp, Homo sapien
gacactgcatttactccagactgag

SEQ ID NO: 3031113 - DNA, 25 bp, Homo sapien
tactagtaaagtgaatgaattactg

SEQ ID NO: 3031114 - DNA, 25 bp, Homo sapien
actagtaaagtgaatgaattactga

SEQ ID NO: 3031115 - DNA, 25 bp, Homo sapien
tcagtaattcattcactttactagt

SEQ ID NO: 3031116 - DNA, 25 bp, Homo sapien
cagtaattcattcactttactagta

SEQ ID NO: 3031117 - DNA, 25 bp, Homo sapien
gtgaatttcataaatgtaatactag

SEQ ID NO: 3031118 - DNA, 25 bp, Homo sapien
tactagtaaagtgaatgaattactg

SEQ ID NO: 3031119 - DNA, 25 bp, Homo sapien
actagtaaagtgaatgaattactga

SEQ ID NO: 3031120 - DNA, 25 bp, Homo sapien
ttactgagtttatacagaaatttag

SEQ ID NO: 3031121 - DNA, 25 bp, Homo sapien
gaatgaattactgagtttatacaga

SEQ ID NO: 3031122 - DNA, 25 bp, Homo sapien
tcataaatgtaatactagtaaagtg

SEQ ID NO: 3031123 - DNA, 25 bp, Homo sapien
ctaaatttctgtataaactcagtaa

SEQ ID NO: 3031124 - DNA, 25 bp, Homo sapien
tcagtaattcattcactttactagt

SEQ ID NO: 3031125 - DNA, 25 bp, Homo sapien
ctagtattacatttatgaaattcac

SEQ ID NO: 3031126 - DNA, 25 bp, Homo sapien
tataaactcagtaattcattcactt

SEQ ID NO: 3031127 - DNA, 25 bp, Homo sapien
cactttactagtattacatttatga

SEQ ID NO: 3031128 - DNA, 25 bp, Homo sapien
cagtaattcattcactttactagta

SEQ ID NO: 3031129 - DNA, 25 bp, Homo sapien
gtaacagcatcaagctgcacgtgga

SEQ ID NO: 3031130 - DNA, 25 bp, Homo sapien
aagcatctcgcggttttctagaaac

SEQ ID NO: 3031131 - DNA, 25 bp, Homo sapien
agctgcacgtggaagcatctcgcgg

SEQ ID NO: 3031132 - DNA, 25 bp, Homo sapien
tgcacgtggaagcatctcgcggttt

SEQ ID NO: 3031133 - DNA, 25 bp, Homo sapien
tctcgcggttttctagaaacaggca

SEQ ID NO: 3031134 - DNA, 25 bp, Homo sapien
cgtggaagcatctcgcggttttcta

SEQ ID NO: 3031135 - DNA, 25 bp, Homo sapien
atgcctgtttctagaaaaccgcgag

SEQ ID NO: 3031136 - DNA, 25 bp, Homo sapien
tgtttctagaaaaccgcgagatgct

SEQ ID NO: 3031137 - DNA, 25 bp, Homo sapien
aaaccgcgagatgcttccacgtgca

SEQ ID NO: 3031138 - DNA, 25 bp, Homo sapien
tagaaaaccgcgagatgcttccacg

SEQ ID NO: 3031139 - DNA, 25 bp, Homo sapien
tgtggaaaaaggagcgggagaggga

SEQ ID NO: 3031140 - DNA, 25 bp, Homo sapien
tccacgtgcagcttgatgctgttac

SEQ ID NO: 3031141 - DNA, 25 bp, Homo sapien
tgtgaagcagcctcctagcttcgga

SEQ ID NO: 3031142 - DNA, 25 bp, Homo sapien
taaaatacggagagtatggaactct

SEQ ID NO: 3031143 - DNA, 25 bp, Homo sapien
cgttttcaagcgtgtctgttctgca

SEQ ID NO: 3031144 - DNA, 25 bp, Homo sapien
tacggacactacgtcgcgttttcaa

SEQ ID NO: 3031145 - DNA, 25 bp, Homo sapien
tagcttcggaagtacggacactacg

SEQ ID NO: 3031146 - DNA, 25 bp, Homo sapien
cctccattttctcagcggctgtgaa

SEQ ID NO: 3031147 - DNA, 25 bp, Homo sapien
gcttgaaaacgcgacgtagtgtccg

SEQ ID NO: 3031148 - DNA, 25 bp, Homo sapien
ttcacagccgctgagaaaatggagg

SEQ ID NO: 3031149 - DNA, 25 bp, Homo sapien
gacgtagtgtccgtacttccgaagc

SEQ ID NO: 3031150 - DNA, 25 bp, Homo sapien
gagttccatactctccgtattttaa

SEQ ID NO: 3031151 - DNA, 25 bp, Homo sapien
tgcagaacagacacgcttgaaaacg

SEQ ID NO: 3031152 - DNA, 25 bp, Homo sapien
tacttccgaagctaggaggctgctt

SEQ ID NO: 3031153 - DNA, 25 bp, Homo sapien
gaacatctcttgtgtcatgacatgg

SEQ ID NO: 3031154 - DNA, 25 bp, Homo sapien
acgggggcctcacagcacagagtga

SEQ ID NO: 3031155 - DNA, 25 bp, Homo sapien
gggaggagcagcgtacacccgtcac

SEQ ID NO: 3031156 - DNA, 25 bp, Homo sapien
tcggtgtggaaaggcccctacctgc

SEQ ID NO: 3031157 - DNA, 25 bp, Homo sapien
agcactcggtgtggaaaggccccta

SEQ ID NO: 3031158 - DNA, 25 bp, Homo sapien
gagcagcgtacacccgtcaccagaa

SEQ ID NO: 3031159 - DNA, 25 bp, Homo sapien
ttctggtgacgggtgtacgctgctc

SEQ ID NO: 3031160 - DNA, 25 bp, Homo sapien
taggggcctttccacaccgagtgct

SEQ ID NO: 3031161 - DNA, 25 bp, Homo sapien
gtgacgggtgtacgctgctcctccc

SEQ ID NO: 3031162 - DNA, 25 bp, Homo sapien
catgtcatgacacaagagatgttct

SEQ ID NO: 3031163 - DNA, 25 bp, Homo sapien
ccccatgtcatgacacaagagatgt

SEQ ID NO: 3031164 - DNA, 25 bp, Homo sapien
actctgtgctgtgaggcccccgttg

SEQ ID NO: 3031165 - DNA, 25 bp, Homo sapien
cgggtcgggatggaccacacggacg

SEQ ID NO: 3031166 - DNA, 25 bp, Homo sapien
gacccatcgggtcgggatggaccac

SEQ ID NO: 3031167 - DNA, 25 bp, Homo sapien
ctgcacctgggacccatcgggtcgg

SEQ ID NO: 3031168 - DNA, 25 bp, Homo sapien
cacctgggacccatcgggtcgggat

SEQ ID NO: 3031169 - DNA, 25 bp, Homo sapien
ccatcgggtcgggatggaccacacg

SEQ ID NO: 3031170 - DNA, 25 bp, Homo sapien
atcgggtcgggatggaccacacgga

SEQ ID NO: 3031171 - DNA, 25 bp, Homo sapien
gtccgtgtggtccatcccgacccga

SEQ ID NO: 3031172 - DNA, 25 bp, Homo sapien
cgtgtggtccatcccgacccgatgg

SEQ ID NO: 3031173 - DNA, 25 bp, Homo sapien
tccccgtccgtgtggtccatcccga

SEQ ID NO: 3031174 - DNA, 25 bp, Homo sapien
ccgacccgatgggtcccaggtgcag

SEQ ID NO: 3031175 - DNA, 25 bp, Homo sapien
atcccgacccgatgggtcccaggtg

SEQ ID NO: 3031176 - DNA, 25 bp, Homo sapien
gtggtccatcccgacccgatgggtc

SEQ ID NO: 3031177 - DNA, 25 bp, Homo sapien
gcctccccggcctggtgacaccacc

SEQ ID NO: 3031178 - DNA, 25 bp, Homo sapien
cgcctccccggcctggtgacaccac

SEQ ID NO: 3031179 - DNA, 25 bp, Homo sapien
cctccccggcctggtgacaccacct

SEQ ID NO: 3031180 - DNA, 25 bp, Homo sapien
ggtggtgtcaccaggccggggaggc

SEQ ID NO: 3031181 - DNA, 25 bp, Homo sapien
gtggtgtcaccaggccggggaggcg

SEQ ID NO: 3031182 - DNA, 25 bp, Homo sapien
aggtggtgtcaccaggccggggagg

SEQ ID NO: 3031183 - DNA, 25 bp, Homo sapien
agcctcacaaagtgatcctccctgg

SEQ ID NO: 3031184 - DNA, 25 bp, Homo sapien
gcattggcaagcctcacaaagtgat

SEQ ID NO: 3031185 - DNA, 25 bp, Homo sapien
gcagctggtcagaaaaacaaaggca

SEQ ID NO: 3031186 - DNA, 25 bp, Homo sapien
cctggtgacaccacctcccatgcag

SEQ ID NO: 3031187 - DNA, 25 bp, Homo sapien
aacaaaggcaatgcattggcaagcc

SEQ ID NO: 3031188 - DNA, 25 bp, Homo sapien
ccttatctgcagctggtcagaaaaa

SEQ ID NO: 3031189 - DNA, 25 bp, Homo sapien
gatcactttgtgaggcttgccaatg

SEQ ID NO: 3031190 - DNA, 25 bp, Homo sapien
ggcttgccaatgcattgcctttgtt

SEQ ID NO: 3031191 - DNA, 25 bp, Homo sapien
cctttgtttttctgaccagctgcag

SEQ ID NO: 3031192 - DNA, 25 bp, Homo sapien
tgcatgggaggtggtgtcaccaggc

SEQ ID NO: 3031193 - DNA, 25 bp, Homo sapien
tttttctgaccagctgcagataagg

SEQ ID NO: 3031194 - DNA, 25 bp, Homo sapien
ccagggaggatcactttgtgaggct

SEQ ID NO: 3031195 - DNA, 25 bp, Homo sapien
gctgttctatcacaaacagttcctg

SEQ ID NO: 3031196 - DNA, 25 bp, Homo sapien
gtacttgctgttctatcacaaacag

SEQ ID NO: 3031197 - DNA, 25 bp, Homo sapien
tcacaaacagttcctggaatacgag

SEQ ID NO: 3031198 - DNA, 25 bp, Homo sapien
tatcacaaacagttcctggaatacg

SEQ ID NO: 3031199 - DNA, 25 bp, Homo sapien
caaacagttcctggaatacgagtag

SEQ ID NO: 3031200 - DNA, 25 bp, Homo sapien
ttctatcacaaacagttcctggaat

SEQ ID NO: 3031201 - DNA, 25 bp, Homo sapien
ctgtttgtgatagaacagcaagtac

SEQ ID NO: 3031202 - DNA, 25 bp, Homo sapien
ctactcgtattccaggaactgtttg

SEQ ID NO: 3031203 - DNA, 25 bp, Homo sapien
gaactgtttgtgatagaacagcaag

SEQ ID NO: 3031204 - DNA, 25 bp, Homo sapien
tactcgtattccaggaactgtttgt

SEQ ID NO: 3031205 - DNA, 25 bp, Homo sapien
tattccaggaactgtttgtgataga

SEQ ID NO: 3031206 - DNA, 25 bp, Homo sapien
caggaactgtttgtgatagaacagc

SEQ ID NO: 3031207 - DNA, 25 bp, Homo sapien
caaggccagcatcaaggacgtcctg

SEQ ID NO: 3031208 - DNA, 25 bp, Homo sapien
aaggccagcatcaaggacgtcctgg

SEQ ID NO: 3031209 - DNA, 25 bp, Homo sapien
ctgttgttaaccatcaagggacctt

SEQ ID NO: 3031210 - DNA, 25 bp, Homo sapien
actacaccagctttatccggcagca

SEQ ID NO: 3031211 - DNA, 25 bp, Homo sapien
tgctgttgttaaccatcaagggacc

SEQ ID NO: 3031212 - DNA, 25 bp, Homo sapien
gctgttgttaaccatcaagggacct

SEQ ID NO: 3031213 - DNA, 25 bp, Homo sapien
aggtcccttgatggttaacaacagc

SEQ ID NO: 3031214 - DNA, 25 bp, Homo sapien
caggacgtccttgatgctggccttg

SEQ ID NO: 3031215 - DNA, 25 bp, Homo sapien
ccaggacgtccttgatgctggcctt

SEQ ID NO: 3031216 - DNA, 25 bp, Homo sapien
aaggtcccttgatggttaacaacag

SEQ ID NO: 3031217 - DNA, 25 bp, Homo sapien
ggtcccttgatggttaacaacagca

SEQ ID NO: 3031218 - DNA, 25 bp, Homo sapien
tgctgccggataaagctggtgtagt

SEQ ID NO: 3031219 - DNA, 25 bp, Homo sapien
agcccacggacagtctcaacaatga

SEQ ID NO: 3031220 - DNA, 25 bp, Homo sapien
gcccacggacagtctcaacaatgac

SEQ ID NO: 3031221 - DNA, 25 bp, Homo sapien
ccacggacagtctcaacaatgacaa

SEQ ID NO: 3031222 - DNA, 25 bp, Homo sapien
cccacggacagtctcaacaatgaca

SEQ ID NO: 3031223 - DNA, 25 bp, Homo sapien
cagcccacggacagtctcaacaatg

SEQ ID NO: 3031224 - DNA, 25 bp, Homo sapien
tgtcattgttgagactgtccgtggg

SEQ ID NO: 3031225 - DNA, 25 bp, Homo sapien
ttgtcattgttgagactgtccgtgg

SEQ ID NO: 3031226 - DNA, 25 bp, Homo sapien
gtcattgttgagactgtccgtgggc

SEQ ID NO: 3031227 - DNA, 25 bp, Homo sapien
cattgttgagactgtccgtgggctg

SEQ ID NO: 3031228 - DNA, 25 bp, Homo sapien
tcattgttgagactgtccgtgggct

SEQ ID NO: 3031229 - DNA, 25 bp, Homo sapien
gataagtgttggtttcacgagagcc

SEQ ID NO: 3031230 - DNA, 25 bp, Homo sapien
gcttggataagtgttggtttcacga

SEQ ID NO: 3031231 - DNA, 25 bp, Homo sapien
cagcatctgcatggtcaagcttgga

SEQ ID NO: 3031232 - DNA, 25 bp, Homo sapien
gttggtttcacgagagccttgtgtc

SEQ ID NO: 3031233 - DNA, 25 bp, Homo sapien
tctgcatggtcaagcttggataagt

SEQ ID NO: 3031234 - DNA, 25 bp, Homo sapien
tgatgctgaatcctgccgttgtctg

SEQ ID NO: 3031235 - DNA, 25 bp, Homo sapien
cagacaacggcaggattcagcatca

SEQ ID NO: 3031236 - DNA, 25 bp, Homo sapien
gacacaaggctctcgtgaaaccaac

SEQ ID NO: 3031237 - DNA, 25 bp, Homo sapien
ggctctcgtgaaaccaacacttatc

SEQ ID NO: 3031238 - DNA, 25 bp, Homo sapien
tccaagcttgaccatgcagatgctg

SEQ ID NO: 3031239 - DNA, 25 bp, Homo sapien
cacttatccaagcttgaccatgcag

SEQ ID NO: 3031240 - DNA, 25 bp, Homo sapien
cgtgaaaccaacacttatccaagct

SEQ ID NO: 3031241 - DNA, 25 bp, Homo sapien
ctcggagctcctattaagatgactg

SEQ ID NO: 3031242 - DNA, 25 bp, Homo sapien
tattaagatgactgttggccgggtg

SEQ ID NO: 3031243 - DNA, 25 bp, Homo sapien
tcctattaagatgactgttggccgg

SEQ ID NO: 3031244 - DNA, 25 bp, Homo sapien
gagctcctattaagatgactgttgg

SEQ ID NO: 3031245 - DNA, 25 bp, Homo sapien
gggctgtgatcctatcaggacagga

SEQ ID NO: 3031246 - DNA, 25 bp, Homo sapien
ctgtgatcctatcaggacaggaatc

SEQ ID NO: 3031247 - DNA, 25 bp, Homo sapien
ggccaacagtcatcttaataggagc

SEQ ID NO: 3031248 - DNA, 25 bp, Homo sapien
cagtcatcttaataggagctccgag

SEQ ID NO: 3031249 - DNA, 25 bp, Homo sapien
cacccggccaacagtcatcttaata

SEQ ID NO: 3031250 - DNA, 25 bp, Homo sapien
gattcctgtcctgataggatcacag

SEQ ID NO: 3031251 - DNA, 25 bp, Homo sapien
tcctgtcctgataggatcacagccc

SEQ ID NO: 3031252 - DNA, 25 bp, Homo sapien
acagaacgggcctacaaccccacat

SEQ ID NO: 3031253 - DNA, 25 bp, Homo sapien
agatcaccacgtatgtgtccttccc

SEQ ID NO: 3031254 - DNA, 25 bp, Homo sapien
cggcggaagatcaccacgtatgtgt

SEQ ID NO: 3031255 - DNA, 25 bp, Homo sapien
gcggaagatcaccacgtatgtgtcc

SEQ ID NO: 3031256 - DNA, 25 bp, Homo sapien
tgcggcggaagatcaccacgtatgt

SEQ ID NO: 3031257 - DNA, 25 bp, Homo sapien
ggaagatcaccacgtatgtgtcctt

SEQ ID NO: 3031258 - DNA, 25 bp, Homo sapien
aagctgcggcggaagatcaccacgt

SEQ ID NO: 3031259 - DNA, 25 bp, Homo sapien
ggacatgacccctttcatggcctcc

SEQ ID NO: 3031260 - DNA, 25 bp, Homo sapien
ggaggccatgaaaggggtcatgtcc

SEQ ID NO: 3031261 - DNA, 25 bp, Homo sapien
aaggacacatacgtggtgatcttcc

SEQ ID NO: 3031262 - DNA, 25 bp, Homo sapien
acacatacgtggtgatcttccgccg

SEQ ID NO: 3031263 - DNA, 25 bp, Homo sapien
ggacacatacgtggtgatcttccgc

SEQ ID NO: 3031264 - DNA, 25 bp, Homo sapien
acatacgtggtgatcttccgccgca

SEQ ID NO: 3031265 - DNA, 25 bp, Homo sapien
cgtggtgatcttccgccgcagcttg

SEQ ID NO: 3031266 - DNA, 25 bp, Homo sapien
gggaaggacacatacgtggtgatct

SEQ ID NO: 3031267 - DNA, 25 bp, Homo sapien
tgccatgggccacggatctttgttt

SEQ ID NO: 3031268 - DNA, 25 bp, Homo sapien
cacaggctgcgtgcgatcatacgat

SEQ ID NO: 3031269 - DNA, 25 bp, Homo sapien
gaaaacgcccattcctagcttgctg

SEQ ID NO: 3031270 - DNA, 25 bp, Homo sapien
gaatgggtgactcctgatctaggca

SEQ ID NO: 3031271 - DNA, 25 bp, Homo sapien
tgaagatgtcgagctccacaggctg

SEQ ID NO: 3031272 - DNA, 25 bp, Homo sapien
taaatgaggacttgggtggattgcc

SEQ ID NO: 3031273 - DNA, 25 bp, Homo sapien
gaagacagtcctttgcctagatcag

SEQ ID NO: 3031274 - DNA, 25 bp, Homo sapien
aacaaagatccgtggcccatggcag

SEQ ID NO: 3031275 - DNA, 25 bp, Homo sapien
tgttcagtggtaacaccaagggtac

SEQ ID NO: 3031276 - DNA, 25 bp, Homo sapien
cagcaagctaggaatgggcgttttc

SEQ ID NO: 3031277 - DNA, 25 bp, Homo sapien
cagcctgtggagctcgacatcttca

SEQ ID NO: 3031278 - DNA, 25 bp, Homo sapien
tcgtatgatcgcacgcagcctgtgg

SEQ ID NO: 3031279 - DNA, 25 bp, Homo sapien
ttgccatagctaccaggagtccaca

SEQ ID NO: 3031280 - DNA, 25 bp, Homo sapien
caagatcaagtgcagcggttgccat

SEQ ID NO: 3031281 - DNA, 25 bp, Homo sapien
agagcacttgggcagcagcgccaag

SEQ ID NO: 3031282 - DNA, 25 bp, Homo sapien
gcagcggttgccatagctaccagga

SEQ ID NO: 3031283 - DNA, 25 bp, Homo sapien
gaccagagcacttgggcagcagcgc

SEQ ID NO: 3031284 - DNA, 25 bp, Homo sapien
gctaccaggagtccacaaagcagct

SEQ ID NO: 3031285 - DNA, 25 bp, Homo sapien
gaaactgcccatcgtagcctgtttt

SEQ ID NO: 3031286 - DNA, 25 bp, Homo sapien
tgcccatcgtagcctgttttcatct

SEQ ID NO: 3031287 - DNA, 25 bp, Homo sapien
ctgcccatcgtagcctgttttcatc

SEQ ID NO: 3031288 - DNA, 25 bp, Homo sapien
agaaactgcccatcgtagcctgttt

SEQ ID NO: 3031289 - DNA, 25 bp, Homo sapien
actgcccatcgtagcctgttttcat

SEQ ID NO: 3031290 - DNA, 25 bp, Homo sapien
aactgcccatcgtagcctgttttca

SEQ ID NO: 3031291 - DNA, 25 bp, Homo sapien
tgaaaacaggctacgatgggcagtt

SEQ ID NO: 3031292 - DNA, 25 bp, Homo sapien
aaacaggctacgatgggcagtttct

SEQ ID NO: 3031293 - DNA, 25 bp, Homo sapien
gatgaaaacaggctacgatgggcag

SEQ ID NO: 3031294 - DNA, 25 bp, Homo sapien
aaaacaggctacgatgggcagtttc

SEQ ID NO: 3031295 - DNA, 25 bp, Homo sapien
agatgaaaacaggctacgatgggca

SEQ ID NO: 3031296 - DNA, 25 bp, Homo sapien
atgaaaacaggctacgatgggcagt

SEQ ID NO: 3031297 - DNA, 25 bp, Homo sapien
tgtggactcctggtagctatggcaa

SEQ ID NO: 3031298 - DNA, 25 bp, Homo sapien
agctgctttgtggactcctggtagc

SEQ ID NO: 3031299 - DNA, 25 bp, Homo sapien
tcctggtagctatggcaaccgctgc

SEQ ID NO: 3031300 - DNA, 25 bp, Homo sapien
gcgctgctgcccaagtgctctggtc

SEQ ID NO: 3031301 - DNA, 25 bp, Homo sapien
tatggcaaccgctgcacttgatctt

SEQ ID NO: 3031302 - DNA, 25 bp, Homo sapien
cttggcgctgctgcccaagtgctct

SEQ ID NO: 3031303 - DNA, 25 bp, Homo sapien
tactccatggtacagtgttccacag

SEQ ID NO: 3031304 - DNA, 25 bp, Homo sapien
gcagcaaaggtggacaacattttct

SEQ ID NO: 3031305 - DNA, 25 bp, Homo sapien
tgagtaacattctggtgcacatttg

SEQ ID NO: 3031306 - DNA, 25 bp, Homo sapien
ctgggtcatatggtacttagaaaat

SEQ ID NO: 3031307 - DNA, 25 bp, Homo sapien
tctggctcaaattcaactgctgggt

SEQ ID NO: 3031308 - DNA, 25 bp, Homo sapien
tccagttttgtgactctcgtgagta

SEQ ID NO: 3031309 - DNA, 25 bp, Homo sapien
attttctaagtaccatatgacccag

SEQ ID NO: 3031310 - DNA, 25 bp, Homo sapien
caaatgtgcaccagaatgttactca

SEQ ID NO: 3031311 - DNA, 25 bp, Homo sapien
gaaaatgttgtccacctttgctgcc

SEQ ID NO: 3031312 - DNA, 25 bp, Homo sapien
gacccagcagttgaatttgagccag

SEQ ID NO: 3031313 - DNA, 25 bp, Homo sapien
tactcacgagagtcacaaaactgga

SEQ ID NO: 3031314 - DNA, 25 bp, Homo sapien
ctgtggaacactgtaccatggagta

SEQ ID NO: 3031315 - DNA, 25 bp, Homo sapien
agggctctttcacatgcccaggaca

SEQ ID NO: 3031316 - DNA, 25 bp, Homo sapien
tgactcaatatttctgtcccccagc

SEQ ID NO: 3031317 - DNA, 25 bp, Homo sapien
ggctctttcacatgcccaggacaga

SEQ ID NO: 3031318 - DNA, 25 bp, Homo sapien
gctctttcacatgcccaggacagag

SEQ ID NO: 3031319 - DNA, 25 bp, Homo sapien
aagcagggctctttcacatgcccag

SEQ ID NO: 3031320 - DNA, 25 bp, Homo sapien
gggctctttcacatgcccaggacag

SEQ ID NO: 3031321 - DNA, 25 bp, Homo sapien
ctctgtcctgggcatgtgaaagagc

SEQ ID NO: 3031322 - DNA, 25 bp, Homo sapien
tgtcctgggcatgtgaaagagccct

SEQ ID NO: 3031323 - DNA, 25 bp, Homo sapien
tctgtcctgggcatgtgaaagagcc

SEQ ID NO: 3031324 - DNA, 25 bp, Homo sapien
gctgggggacagaaatattgagtca

SEQ ID NO: 3031325 - DNA, 25 bp, Homo sapien
ctgtcctgggcatgtgaaagagccc

SEQ ID NO: 3031326 - DNA, 25 bp, Homo sapien
ctgggcatgtgaaagagccctgctt

SEQ ID NO: 3031327 - DNA, 25 bp, Homo sapien
gaaagccacgtgtcgggaaccacca

SEQ ID NO: 3031328 - DNA, 25 bp, Homo sapien
tgtcgggaaccaccacgctcacgga

SEQ ID NO: 3031329 - DNA, 25 bp, Homo sapien
tcgggaaccaccacgctcacggact

SEQ ID NO: 3031330 - DNA, 25 bp, Homo sapien
gtgtcgggaaccaccacgctcacgg

SEQ ID NO: 3031331 - DNA, 25 bp, Homo sapien
gtcgggaaccaccacgctcacggac

SEQ ID NO: 3031332 - DNA, 25 bp, Homo sapien
aagccacgtgtcgggaaccaccacg

SEQ ID NO: 3031333 - DNA, 25 bp, Homo sapien
agtccgtgagcgtggtggttcccga

SEQ ID NO: 3031334 - DNA, 25 bp, Homo sapien
gtccgtgagcgtggtggttcccgac

SEQ ID NO: 3031335 - DNA, 25 bp, Homo sapien
ccgtgagcgtggtggttcccgacac

SEQ ID NO: 3031336 - DNA, 25 bp, Homo sapien
tccgtgagcgtggtggttcccgaca

SEQ ID NO: 3031337 - DNA, 25 bp, Homo sapien
cgtggtggttcccgacacgtggctt

SEQ ID NO: 3031338 - DNA, 25 bp, Homo sapien
tggtggttcccgacacgtggctttc

SEQ ID NO: 3031339 - DNA, 25 bp, Homo sapien
gaaagccacgtgtcgggaaccacca

SEQ ID NO: 3031340 - DNA, 25 bp, Homo sapien
gaccccttctgggacatcagcttgg

SEQ ID NO: 3031341 - DNA, 25 bp, Homo sapien
tgtcgggaaccaccacgctcacgga

SEQ ID NO: 3031342 - DNA, 25 bp, Homo sapien
atcagcttggatctccccggctctt

SEQ ID NO: 3031343 - DNA, 25 bp, Homo sapien
cattctggcccctgagcccagggag

SEQ ID NO: 3031344 - DNA, 25 bp, Homo sapien
cccagggagcgagggcaacgtggta

SEQ ID NO: 3031345 - DNA, 25 bp, Homo sapien
tagaaaccgagtttgctctgagcaa

SEQ ID NO: 3031346 - DNA, 25 bp, Homo sapien
tcagaacccgaaatggactgtcact

SEQ ID NO: 3031347 - DNA, 25 bp, Homo sapien
gacgagcaaatatcgggaaaggcca

SEQ ID NO: 3031348 - DNA, 25 bp, Homo sapien
gaagtccttgcttgaggagcgcccc

SEQ ID NO: 3031349 - DNA, 25 bp, Homo sapien
caggccccaagttctagatgcagct

SEQ ID NO: 3031350 - DNA, 25 bp, Homo sapien
gacagggcccatgagtttatcctcc

SEQ ID NO: 3031351 - DNA, 25 bp, Homo sapien
gaggataaactcatgggccctgtca

SEQ ID NO: 3031352 - DNA, 25 bp, Homo sapien
gacagcgaggaggtccaaattgctc

SEQ ID NO: 3031353 - DNA, 25 bp, Homo sapien
gaagtgacagtccatttcgggttct

SEQ ID NO: 3031354 - DNA, 25 bp, Homo sapien
tgtgaccctaggcaacactggagac

SEQ ID NO: 3031355 - DNA, 25 bp, Homo sapien
ggaattcagtagttaagggacagcg

SEQ ID NO: 3031356 - DNA, 25 bp, Homo sapien
tatgctccttatagaaaatggcccc

SEQ ID NO: 3031357 - DNA, 25 bp, Homo sapien
cgtgctcggcaatatcaaaccctct

SEQ ID NO: 3031358 - DNA, 25 bp, Homo sapien
tgcgtgctcggcaatatcaaaccct

SEQ ID NO: 3031359 - DNA, 25 bp, Homo sapien
gctcggcaatatcaaaccctctggg

SEQ ID NO: 3031360 - DNA, 25 bp, Homo sapien
tgctcggcaatatcaaaccctctgg

SEQ ID NO: 3031361 - DNA, 25 bp, Homo sapien
ggtctttaaggaggctatgagataa

SEQ ID NO: 3031362 - DNA, 25 bp, Homo sapien
ttaaggaggctatgagataaatgat

SEQ ID NO: 3031363 - DNA, 25 bp, Homo sapien
tatctcatagcctccttaaagacct

SEQ ID NO: 3031364 - DNA, 25 bp, Homo sapien
ccccagagggtttgatattgccgag

SEQ ID NO: 3031365 - DNA, 25 bp, Homo sapien
tgtcagtacggccccagagggtttg

SEQ ID NO: 3031366 - DNA, 25 bp, Homo sapien
gggtttgatattgccgagcacgcag

SEQ ID NO: 3031367 - DNA, 25 bp, Homo sapien
atcatttatctcatagcctccttaa

SEQ ID NO: 3031368 - DNA, 25 bp, Homo sapien
cagagggtttgatattgccgagcac

SEQ ID NO: 3031369 - DNA, 25 bp, Homo sapien
tagaccagatcttcacaggcgggtt

SEQ ID NO: 3031370 - DNA, 25 bp, Homo sapien
atagaccagatcttcacaggcgggt

SEQ ID NO: 3031371 - DNA, 25 bp, Homo sapien
cagtcagacgtcacctgccaagtct

SEQ ID NO: 3031372 - DNA, 25 bp, Homo sapien
gttgcagtcagacgtcacctgccaa

SEQ ID NO: 3031373 - DNA, 25 bp, Homo sapien
cgggttgcagtcagacgtcacctgc

SEQ ID NO: 3031374 - DNA, 25 bp, Homo sapien
gcgggttgcagtcagacgtcacctg

SEQ ID NO: 3031375 - DNA, 25 bp, Homo sapien
tgcagtcagacgtcacctgccaagt

SEQ ID NO: 3031376 - DNA, 25 bp, Homo sapien
ggttgcagtcagacgtcacctgcca

SEQ ID NO: 3031377 - DNA, 25 bp, Homo sapien
acttggcaggtgacgtctgactgca

SEQ ID NO: 3031378 - DNA, 25 bp, Homo sapien
agacttggcaggtgacgtctgactg

SEQ ID NO: 3031379 - DNA, 25 bp, Homo sapien
ttggcaggtgacgtctgactgcaac

SEQ ID NO: 3031380 - DNA, 25 bp, Homo sapien
gacttggcaggtgacgtctgactgc

SEQ ID NO: 3031381 - DNA, 25 bp, Homo sapien
tggcaggtgacgtctgactgcaacc

SEQ ID NO: 3031382 - DNA, 25 bp, Homo sapien
gcaggtgacgtctgactgcaacccg

SEQ ID NO: 3031383 - DNA, 25 bp, Homo sapien
acccgcctgtgaagatctggtctat

SEQ ID NO: 3031384 - DNA, 25 bp, Homo sapien
aacccgcctgtgaagatctggtcta

SEQ ID NO: 3031385 - DNA, 25 bp, Homo sapien
cactgcaactgcatcatagaccaga

SEQ ID NO: 3031386 - DNA, 25 bp, Homo sapien
gatgacaatgggaagaaggccaaca

SEQ ID NO: 3031387 - DNA, 25 bp, Homo sapien
tagaccagatcttcacaggcgggtt

SEQ ID NO: 3031388 - DNA, 25 bp, Homo sapien
atagaccagatcttcacaggcgggt

SEQ ID NO: 3031389 - DNA, 25 bp, Homo sapien
gacaatgggaagaaggccaacaacc

SEQ ID NO: 3031390 - DNA, 25 bp, Homo sapien
acaggcgggttgcagtcagacgtca

SEQ ID NO: 3031391 - DNA, 25 bp, Homo sapien
acccgcctgtgaagatctggtctat

SEQ ID NO: 3031392 - DNA, 25 bp, Homo sapien
tctatgatgcagttgcagtggttgg

SEQ ID NO: 3031393 - DNA, 25 bp, Homo sapien
aacccgcctgtgaagatctggtcta

SEQ ID NO: 3031394 - DNA, 25 bp, Homo sapien
tggcaggtgacgtctgactgcaacc

SEQ ID NO: 3031395 - DNA, 25 bp, Homo sapien
tctggtctatgatgcagttgcagtg

SEQ ID NO: 3031396 - DNA, 25 bp, Homo sapien
ggttgttggccttcttcccattgtc

SEQ ID NO: 3031397 - DNA, 25 bp, Homo sapien
cccttagagactccccatatttggg

SEQ ID NO: 3031398 - DNA, 25 bp, Homo sapien
cattaggtgggttttcttggcaaga

SEQ ID NO: 3031399 - DNA, 25 bp, Homo sapien
ccaagtgctgtgatttctcgtcata

SEQ ID NO: 3031400 - DNA, 25 bp, Homo sapien
ggagacactaatcccagagccgtgg

SEQ ID NO: 3031401 - DNA, 25 bp, Homo sapien
caaggacaccctctgctaaaatgag

SEQ ID NO: 3031402 - DNA, 25 bp, Homo sapien
tctgctaaaatgaggagtgtcctca

SEQ ID NO: 3031403 - DNA, 25 bp, Homo sapien
cagaccacggctctgggattagtgt

SEQ ID NO: 3031404 - DNA, 25 bp, Homo sapien
tatgacgagaaatcacagcacttgg

SEQ ID NO: 3031405 - DNA, 25 bp, Homo sapien
aaacccacctaatgcccagtgactg

SEQ ID NO: 3031406 - DNA, 25 bp, Homo sapien
ggattagtgtctccccaaatatggg

SEQ ID NO: 3031407 - DNA, 25 bp, Homo sapien
gaggacactcctcattttagcagag

SEQ ID NO: 3031408 - DNA, 25 bp, Homo sapien
tcttgccaagaaaacccacctaatg

SEQ ID NO: 3031409 - DNA, 25 bp, Homo sapien
cgcgcctggccattctgttcatcat

SEQ ID NO: 3031410 - DNA, 25 bp, Homo sapien
cattctttgcgccttcctgtatgga

SEQ ID NO: 3031411 - DNA, 25 bp, Homo sapien
gtcccatgaatttgagatccctctg

SEQ ID NO: 3031412 - DNA, 25 bp, Homo sapien
cctgtatggatattcttgtcctctg

SEQ ID NO: 3031413 - DNA, 25 bp, Homo sapien
gatccctctgggaagcatttttctc

SEQ ID NO: 3031414 - DNA, 25 bp, Homo sapien
tgtcctctgaattttgtcccatgaa

SEQ ID NO: 3031415 - DNA, 25 bp, Homo sapien
cagagggatctcaaattcatgggac

SEQ ID NO: 3031416 - DNA, 25 bp, Homo sapien
gagaaaaatgcttcccagagggatc

SEQ ID NO: 3031417 - DNA, 25 bp, Homo sapien
aatgatgaacagaatggccaggcgc

SEQ ID NO: 3031418 - DNA, 25 bp, Homo sapien
caggaaggcgcaaagaatgatgaac

SEQ ID NO: 3031419 - DNA, 25 bp, Homo sapien
caagaatatccatacaggaaggcgc

SEQ ID NO: 3031420 - DNA, 25 bp, Homo sapien
tcatgggacaaaattcagaggacaa

SEQ ID NO: 3031421 - DNA, 25 bp, Homo sapien
gtctcattggacctgggccatctcc

SEQ ID NO: 3031422 - DNA, 25 bp, Homo sapien
tgaatgacttgagccaagatcggct

SEQ ID NO: 3031423 - DNA, 25 bp, Homo sapien
gcagagagactgagaggtgattctc

SEQ ID NO: 3031424 - DNA, 25 bp, Homo sapien
gctggtcacttgcaggtcttcctaa

SEQ ID NO: 3031425 - DNA, 25 bp, Homo sapien
cagctgaagtctatccatacaggca

SEQ ID NO: 3031426 - DNA, 25 bp, Homo sapien
gcaggtcttcctaaagcccgtgctg

SEQ ID NO: 3031427 - DNA, 25 bp, Homo sapien
ctagttgtagccgatatcctatcag

SEQ ID NO: 3031428 - DNA, 25 bp, Homo sapien
tggctgcttgtgagtttcctgtggt

SEQ ID NO: 3031429 - DNA, 25 bp, Homo sapien
catactctgagaacccatgcgctca

SEQ ID NO: 3031430 - DNA, 25 bp, Homo sapien
tctgggctggcacagctagttgtag

SEQ ID NO: 3031431 - DNA, 25 bp, Homo sapien
tggttcagatgccatactctgagaa

SEQ ID NO: 3031432 - DNA, 25 bp, Homo sapien
tgcgctcaggtcacagggcacctgg

SEQ ID NO: 3031433 - DNA, 25 bp, Homo sapien
taaaattaactgataggatatcggc

SEQ ID NO: 3031434 - DNA, 25 bp, Homo sapien
cctgtgacctgagcgcatgggttct

SEQ ID NO: 3031435 - DNA, 25 bp, Homo sapien
accacaggaaactcacaagcagcca

SEQ ID NO: 3031436 - DNA, 25 bp, Homo sapien
catgggttctcagagtatggcatct

SEQ ID NO: 3031437 - DNA, 25 bp, Homo sapien
gctacaactagctgtgccagcccag

SEQ ID NO: 3031438 - DNA, 25 bp, Homo sapien
ggatatcggctacaactagctgtgc

SEQ ID NO: 3031439 - DNA, 25 bp, Homo sapien
ttaggaagacctgcaagtgaccagc

SEQ ID NO: 3031440 - DNA, 25 bp, Homo sapien
ggagatggcccaggtccaatgagac

SEQ ID NO: 3031441 - DNA, 25 bp, Homo sapien
gagaccccaagagaagctttgctcg

SEQ ID NO: 3031442 - DNA, 25 bp, Homo sapien
cagcacgggctttaggaagacctgc

SEQ ID NO: 3031443 - DNA, 25 bp, Homo sapien
gcctgtatggatagacttcagctgc

SEQ ID NO: 3031444 - DNA, 25 bp, Homo sapien
aaaatcatcagggtaccaccctggg

SEQ ID NO: 3031445 - DNA, 25 bp, Homo sapien
caccataactaatgacctcagagag

SEQ ID NO: 3031446 - DNA, 25 bp, Homo sapien
taagaggcgaggaagtagttccagc

SEQ ID NO: 3031447 - DNA, 25 bp, Homo sapien
cagagaggctcctcctagtttattt

SEQ ID NO: 3031448 - DNA, 25 bp, Homo sapien
ctcagtgaccgatcacagtgaacag

SEQ ID NO: 3031449 - DNA, 25 bp, Homo sapien
tatgacaggtcctcagtgaccgatc

SEQ ID NO: 3031450 - DNA, 25 bp, Homo sapien
tagttccagcagtatgacaggtcct

SEQ ID NO: 3031451 - DNA, 25 bp, Homo sapien
acttcagaaacaaatgacgacaagg

SEQ ID NO: 3031452 - DNA, 25 bp, Homo sapien
tggaactacttcctcgcctcttaaa

SEQ ID NO: 3031453 - DNA, 25 bp, Homo sapien
tctctgaggtcattagttatggtga

SEQ ID NO: 3031454 - DNA, 25 bp, Homo sapien
gaggacctgtcatactgctggaact

SEQ ID NO: 3031455 - DNA, 25 bp, Homo sapien
aaaataaactaggaggagcctctct

SEQ ID NO: 3031456 - DNA, 25 bp, Homo sapien
cactgtgatcggtcactgaggacct

SEQ ID NO: 3031457 - DNA, 25 bp, Homo sapien
gtcccctcacatcccgtataagttg

SEQ ID NO: 3031458 - DNA, 25 bp, Homo sapien
gaggcacctagcaggctacgagcag

SEQ ID NO: 3031459 - DNA, 25 bp, Homo sapien
catcccgtataagttgctgcacctg

SEQ ID NO: 3031460 - DNA, 25 bp, Homo sapien
acgagcagcaggacgcccacgagtt

SEQ ID NO: 3031461 - DNA, 25 bp, Homo sapien
tggtgtggacccacgcgaggcacct

SEQ ID NO: 3031462 - DNA, 25 bp, Homo sapien
acgagttcctcatcgcggccctgga

SEQ ID NO: 3031463 - DNA, 25 bp, Homo sapien
tccagggccgcgatgaggaactcgt

SEQ ID NO: 3031464 - DNA, 25 bp, Homo sapien
cagcaacttatacgggatgtgaggg

SEQ ID NO: 3031465 - DNA, 25 bp, Homo sapien
actcgtgggcgtcctgctgctcgta

SEQ ID NO: 3031466 - DNA, 25 bp, Homo sapien
tgctcgtagcctgctaggtgcctcg

SEQ ID NO: 3031467 - DNA, 25 bp, Homo sapien
caggtgcagcaacttatacgggatg

SEQ ID NO: 3031468 - DNA, 25 bp, Homo sapien
aggtgcctcgcgtgggtccacacca

SEQ ID NO: 3031469 - DNA, 25 bp, Homo sapien
cggcatcagagcatggcagcgttca

SEQ ID NO: 3031470 - DNA, 25 bp, Homo sapien
tcaccggctccgtgacctagacatg

SEQ ID NO: 3031471 - DNA, 25 bp, Homo sapien
ggctgcacgtgtggcgttcctgtcc

SEQ ID NO: 3031472 - DNA, 25 bp, Homo sapien
tctgtcctcatgagctacgcgctgc

SEQ ID NO: 3031473 - DNA, 25 bp, Homo sapien
ttacctcaactaataagcaggctgg

SEQ ID NO: 3031474 - DNA, 25 bp, Homo sapien
tacgcgctgcacgttggctgttcct

SEQ ID NO: 3031475 - DNA, 25 bp, Homo sapien
catgtctaggtcacggagccggtga

SEQ ID NO: 3031476 - DNA, 25 bp, Homo sapien
gcagcgcgtagctcatgaggacaga

SEQ ID NO: 3031477 - DNA, 25 bp, Homo sapien
gacagaagtggacaggaacgccaca

SEQ ID NO: 3031478 - DNA, 25 bp, Homo sapien
aggaacagccaacgtgcagcgcgta

SEQ ID NO: 3031479 - DNA, 25 bp, Homo sapien
tagttgaggtaactgagctgcttca

SEQ ID NO: 3031480 - DNA, 25 bp, Homo sapien
tgaacgctgccatgctctgatgccg

SEQ ID NO: 3031481 - DNA, 25 bp, Homo sapien
gacgcactgctgactcagaacaagg

SEQ ID NO: 3031482 - DNA, 25 bp, Homo sapien
cctggcgtgatttttggggacgcac

SEQ ID NO: 3031483 - DNA, 25 bp, Homo sapien
gggacgcactgctgactcagaacaa

SEQ ID NO: 3031484 - DNA, 25 bp, Homo sapien
ctgctgactcagaacaaggagaagc

SEQ ID NO: 3031485 - DNA, 25 bp, Homo sapien
gcactgctgactcagaacaaggaga

SEQ ID NO: 3031486 - DNA, 25 bp, Homo sapien
aagggaagacctggcgtgatttttg

SEQ ID NO: 3031487 - DNA, 25 bp, Homo sapien
tgttctgagtcagcagtgcgtcccc

SEQ ID NO: 3031488 - DNA, 25 bp, Homo sapien
tgcgtccccaaaaatcacgccaggt

SEQ ID NO: 3031489 - DNA, 25 bp, Homo sapien
gcttctccttgttctgagtcagcag

SEQ ID NO: 3031490 - DNA, 25 bp, Homo sapien
tccttgttctgagtcagcagtgcgt

SEQ ID NO: 3031491 - DNA, 25 bp, Homo sapien
tgagtcagcagtgcgtccccaaaaa

SEQ ID NO: 3031492 - DNA, 25 bp, Homo sapien
caaaaatcacgccaggtcttccctt

SEQ ID NO: 3031493 - DNA, 25 bp, Homo sapien
gcgccattgacttctgcaggggaac

SEQ ID NO: 3031494 - DNA, 25 bp, Homo sapien
gccattgacttctgcaggggaacat

SEQ ID NO: 3031495 - DNA, 25 bp, Homo sapien
attgacttctgcaggggaacatttc

SEQ ID NO: 3031496 - DNA, 25 bp, Homo sapien
cgccattgacttctgcaggggaaca

SEQ ID NO: 3031497 - DNA, 25 bp, Homo sapien
gtgagcgccattgacttctgcaggg

SEQ ID NO: 3031498 - DNA, 25 bp, Homo sapien
ttgacttctgcaggggaacatttct

SEQ ID NO: 3031499 - DNA, 25 bp, Homo sapien
agaaatgttcccctgcagaagtcaa

SEQ ID NO: 3031500 - DNA, 25 bp, Homo sapien
gaaatgttcccctgcagaagtcaat

SEQ ID NO: 3031501 - DNA, 25 bp, Homo sapien
aatgttcccctgcagaagtcaatgg

SEQ ID NO: 3031502 - DNA, 25 bp, Homo sapien
atgttcccctgcagaagtcaatggc

SEQ ID NO: 3031503 - DNA, 25 bp, Homo sapien
tgttcccctgcagaagtcaatggcg

SEQ ID NO: 3031504 - DNA, 25 bp, Homo sapien
gttcccctgcagaagtcaatggcgc

SEQ ID NO: 3031505 - DNA, 25 bp, Homo sapien
caggcaccgctgtgagatgcagagc

SEQ ID NO: 3031506 - DNA, 25 bp, Homo sapien
cgctgtgagatgcagagccccagct

SEQ ID NO: 3031507 - DNA, 25 bp, Homo sapien
tctgcgtgggctgatcaaccttggg

SEQ ID NO: 3031508 - DNA, 25 bp, Homo sapien
gctgatcaaccttgggaacacatgc

SEQ ID NO: 3031509 - DNA, 25 bp, Homo sapien
tgaactgcatcgtgcaggccctgac

SEQ ID NO: 3031510 - DNA, 25 bp, Homo sapien
tcttcctgtctgacaggcaccgctg

SEQ ID NO: 3031511 - DNA, 25 bp, Homo sapien
cctgcacgatgcagttcatgaagca

SEQ ID NO: 3031512 - DNA, 25 bp, Homo sapien
gcatgtgttcccaaggttgatcagc

SEQ ID NO: 3031513 - DNA, 25 bp, Homo sapien
ggtcagggcctgcacgatgcagttc

SEQ ID NO: 3031514 - DNA, 25 bp, Homo sapien
tgttcccaaggttgatcagcccacg

SEQ ID NO: 3031515 - DNA, 25 bp, Homo sapien
gctctgcatctcacagcggtgcctg

SEQ ID NO: 3031516 - DNA, 25 bp, Homo sapien
cagcggtgcctgtcagacaggaaga

SEQ ID NO: 3031517 - DNA, 25 bp, Homo sapien
gggatccagcgacacctgtggttca

SEQ ID NO: 3031518 - DNA, 25 bp, Homo sapien
tggtggacattcttcaataccgttc

SEQ ID NO: 3031519 - DNA, 25 bp, Homo sapien
aaaactagcagaatgcgatatctca

SEQ ID NO: 3031520 - DNA, 25 bp, Homo sapien
cacacaggtaactcctgctctctgg

SEQ ID NO: 3031521 - DNA, 25 bp, Homo sapien
caataccgttcatgtaaaagtggca

SEQ ID NO: 3031522 - DNA, 25 bp, Homo sapien
gatatctcatcgtgttctggcttga

SEQ ID NO: 3031523 - DNA, 25 bp, Homo sapien
cagagagcaggagttacctgtgtgc

SEQ ID NO: 3031524 - DNA, 25 bp, Homo sapien
tatgccacttttacatgaacggtat

SEQ ID NO: 3031525 - DNA, 25 bp, Homo sapien
gaacggtattgaagaatgtccacca

SEQ ID NO: 3031526 - DNA, 25 bp, Homo sapien
tgaaccacaggtgtcgctggatccc

SEQ ID NO: 3031527 - DNA, 25 bp, Homo sapien
cacgatgagatatcgcattctgcta

SEQ ID NO: 3031528 - DNA, 25 bp, Homo sapien
tcattcaagccagaacacgatgaga

SEQ ID NO: 3031529 - DNA, 25 bp, Homo sapien
tgctgaagcacaacccgaaaaggag

SEQ ID NO: 3031530 - DNA, 25 bp, Homo sapien
agcacaacccgaaaaggagaaagat

SEQ ID NO: 3031531 - DNA, 25 bp, Homo sapien
aagatcacctcgaactgcaccatag

SEQ ID NO: 3031532 - DNA, 25 bp, Homo sapien
aacgggagcttgaactgctgaagca

SEQ ID NO: 3031533 - DNA, 25 bp, Homo sapien
caaccaaacgggagcttgaactgct

SEQ ID NO: 3031534 - DNA, 25 bp, Homo sapien
ggagaaagatcacctcgaactgcac

SEQ ID NO: 3031535 - DNA, 25 bp, Homo sapien
tgcagttcgaggtgatctttctcct

SEQ ID NO: 3031536 - DNA, 25 bp, Homo sapien
tgcttcagcagttcaagctcccgtt

SEQ ID NO: 3031537 - DNA, 25 bp, Homo sapien
atctttctccttttcgggttgtgct

SEQ ID NO: 3031538 - DNA, 25 bp, Homo sapien
gcagttcaagctcccgtttggttgg

SEQ ID NO: 3031539 - DNA, 25 bp, Homo sapien
tccttttcgggttgtgcttcagcag

SEQ ID NO: 3031540 - DNA, 25 bp, Homo sapien
ctatggtgcagttcgaggtgatctt

SEQ ID NO: 3031541 - DNA, 25 bp, Homo sapien
cttggaactgtccttcatctgctta

SEQ ID NO: 3031542 - DNA, 25 bp, Homo sapien
cgcttggaactgtccttcatctgct

SEQ ID NO: 3031543 - DNA, 25 bp, Homo sapien
ttggaactgtccttcatctgcttag

SEQ ID NO: 3031544 - DNA, 25 bp, Homo sapien
gcttggaactgtccttcatctgctt

SEQ ID NO: 3031545 - DNA, 25 bp, Homo sapien
agcagatgaaggacagttccaagcg

SEQ ID NO: 3031546 - DNA, 25 bp, Homo sapien
aagcagatgaaggacagttccaagc

SEQ ID NO: 3031547 - DNA, 25 bp, Homo sapien
taagcagatgaaggacagttccaag

SEQ ID NO: 3031548 - DNA, 25 bp, Homo sapien
ctaagcagatgaaggacagttccaa

SEQ ID NO: 3031549 - DNA, 25 bp, Homo sapien
caagggaacaaccccagcattactt

SEQ ID NO: 3031550 - DNA, 25 bp, Homo sapien
ttaagctctcccagggcgcacctgc

SEQ ID NO: 3031551 - DNA, 25 bp, Homo sapien
gcattacttaagctctcccagggcg

SEQ ID NO: 3031552 - DNA, 25 bp, Homo sapien
cagcattacttaagctctcccaggg

SEQ ID NO: 3031553 - DNA, 25 bp, Homo sapien
attacttaagctctcccagggcgca

SEQ ID NO: 3031554 - DNA, 25 bp, Homo sapien
ttacttaagctctcccagggcgcac

SEQ ID NO: 3031555 - DNA, 25 bp, Homo sapien
gtgcgccctgggagagcttaagtaa

SEQ ID NO: 3031556 - DNA, 25 bp, Homo sapien
tgcgccctgggagagcttaagtaat

SEQ ID NO: 3031557 - DNA, 25 bp, Homo sapien
ccctgggagagcttaagtaatgctg

SEQ ID NO: 3031558 - DNA, 25 bp, Homo sapien
gcaggtgcgccctgggagagcttaa

SEQ ID NO: 3031559 - DNA, 25 bp, Homo sapien
cgccctgggagagcttaagtaatgc

SEQ ID NO: 3031560 - DNA, 25 bp, Homo sapien
gcgccctgggagagcttaagtaatg

SEQ ID NO: 3031561 - DNA, 25 bp, Homo sapien
tctgatgtacggaggcatctactgt

SEQ ID NO: 3031562 - DNA, 25 bp, Homo sapien
ccattgatctgatgtacggaggcat

SEQ ID NO: 3031563 - DNA, 25 bp, Homo sapien
gttttctgtgccaggactacatcta

SEQ ID NO: 3031564 - DNA, 25 bp, Homo sapien
tttctgtgccaggactacatctatg

SEQ ID NO: 3031565 - DNA, 25 bp, Homo sapien
tgatctgatgtacggaggcatctac

SEQ ID NO: 3031566 - DNA, 25 bp, Homo sapien
atgtacggaggcatctactgttttc

SEQ ID NO: 3031567 - DNA, 25 bp, Homo sapien
gaaaacagtagatgcctccgtacat

SEQ ID NO: 3031568 - DNA, 25 bp, Homo sapien
atgcctccgtacatcagatcaatgg

SEQ ID NO: 3031569 - DNA, 25 bp, Homo sapien
tagatgcctccgtacatcagatcaa

SEQ ID NO: 3031570 - DNA, 25 bp, Homo sapien
tagatgtagtcctggcacagaaaac

SEQ ID NO: 3031571 - DNA, 25 bp, Homo sapien
catagatgtagtcctggcacagaaa

SEQ ID NO: 3031572 - DNA, 25 bp, Homo sapien
cagtagatgcctccgtacatcagat

SEQ ID NO: 3031573 - DNA, 25 bp, Homo sapien
tatctgccatgtctgtggcgtccac

SEQ ID NO: 3031574 - DNA, 25 bp, Homo sapien
cctctactgtgtcttcttcggctgt

SEQ ID NO: 3031575 - DNA, 25 bp, Homo sapien
tcacaaagaagcatattcacgagca

SEQ ID NO: 3031576 - DNA, 25 bp, Homo sapien
ggcgtccacctcaacaggctgcatt

SEQ ID NO: 3031577 - DNA, 25 bp, Homo sapien
tattcacgagcatgcgaaggcgaag

SEQ ID NO: 3031578 - DNA, 25 bp, Homo sapien
gccaagtcctgtatctgccatgtct

SEQ ID NO: 3031579 - DNA, 25 bp, Homo sapien
cagacatggcagatacaggacttgg

SEQ ID NO: 3031580 - DNA, 25 bp, Homo sapien
aatgcagcctgttgaggtggacgcc

SEQ ID NO: 3031581 - DNA, 25 bp, Homo sapien
aacagccgaagaagacacagtagag

SEQ ID NO: 3031582 - DNA, 25 bp, Homo sapien
tcgccttcgcatgctcgtgaatatg

SEQ ID NO: 3031583 - DNA, 25 bp, Homo sapien
ggtggacgccacagacatggcagat

SEQ ID NO: 3031584 - DNA, 25 bp, Homo sapien
aggttgtgccgcttcgccttcgcat

SEQ ID NO: 3031585 - DNA, 25 bp, Homo sapien
gttcactcctcctcttctctgaatt

SEQ ID NO: 3031586 - DNA, 25 bp, Homo sapien
actcctcctcttctctgaatttcag

SEQ ID NO: 3031587 - DNA, 25 bp, Homo sapien
cgttcactcctcctcttctctgaat

SEQ ID NO: 3031588 - DNA, 25 bp, Homo sapien
tcactcctcctcttctctgaatttc

SEQ ID NO: 3031589 - DNA, 25 bp, Homo sapien
cactcctcctcttctctgaatttca

SEQ ID NO: 3031590 - DNA, 25 bp, Homo sapien
ttcactcctcctcttctctgaattt

SEQ ID NO: 3031591 - DNA, 25 bp, Homo sapien
gaaattcagagaagaggaggagtga

SEQ ID NO: 3031592 - DNA, 25 bp, Homo sapien
aattcagagaagaggaggagtgaac

SEQ ID NO: 3031593 - DNA, 25 bp, Homo sapien
attcagagaagaggaggagtgaacg

SEQ ID NO: 3031594 - DNA, 25 bp, Homo sapien
tgaaattcagagaagaggaggagtg

SEQ ID NO: 3031595 - DNA, 25 bp, Homo sapien
aaattcagagaagaggaggagtgaa

SEQ ID NO: 3031596 - DNA, 25 bp, Homo sapien
ctgaaattcagagaagaggaggagt

SEQ ID NO: 3031597 - DNA, 25 bp, Homo sapien
acttaatttgagaagattatctaat

SEQ ID NO: 3031598 - DNA, 25 bp, Homo sapien
aatttgagaagattatctaattttg

SEQ ID NO: 3031599 - DNA, 25 bp, Homo sapien
tggaagctgaggtttttgaggttgg

SEQ ID NO: 3031600 - DNA, 25 bp, Homo sapien
gattgaggggcctgagtctggaagc

SEQ ID NO: 3031601 - DNA, 25 bp, Homo sapien
tttgagaagattatctaattttggc

SEQ ID NO: 3031602 - DNA, 25 bp, Homo sapien
gcttccagactcaggcccctcaatc

SEQ ID NO: 3031603 - DNA, 25 bp, Homo sapien
ccaacctcaaaaacctcagcttcca

SEQ ID NO: 3031604 - DNA, 25 bp, Homo sapien
gccaaaattagataatcttctcaaa

SEQ ID NO: 3031605 - DNA, 25 bp, Homo sapien
cttccagactcaggcccctcaatct

SEQ ID NO: 3031606 - DNA, 25 bp, Homo sapien
attagataatcttctcaaattaagt

SEQ ID NO: 3031607 - DNA, 25 bp, Homo sapien
caaaattagataatcttctcaaatt

SEQ ID NO: 3031608 - DNA, 25 bp, Homo sapien
tggcacgcgcccgtagtcccagata

SEQ ID NO: 3031609 - DNA, 25 bp, Homo sapien
gcctgagtctggaagctgaggtttt

SEQ ID NO: 3031610 - DNA, 25 bp, Homo sapien
caaagtctttagctttttagtgccg

SEQ ID NO: 3031611 - DNA, 25 bp, Homo sapien
gatagaatatttaggccgggcacgg

SEQ ID NO: 3031612 - DNA, 25 bp, Homo sapien
gggaacttaatttgagaagattatc

SEQ ID NO: 3031613 - DNA, 25 bp, Homo sapien
aagattatctaattttggcaaagtc

SEQ ID NO: 3031614 - DNA, 25 bp, Homo sapien
ccgtgcccggcctaaatattctatc

SEQ ID NO: 3031615 - DNA, 25 bp, Homo sapien
cggcactaaaaagctaaagactttg

SEQ ID NO: 3031616 - DNA, 25 bp, Homo sapien
gccaaaattagataatcttctcaaa

SEQ ID NO: 3031617 - DNA, 25 bp, Homo sapien
caaaaacctcagcttccagactcag

SEQ ID NO: 3031618 - DNA, 25 bp, Homo sapien
tatctgggactacgggcgcgtgcca

SEQ ID NO: 3031619 - DNA, 25 bp, Homo sapien
tctcaaattaagttccccaacctca

SEQ ID NO: 3031620 - DNA, 25 bp, Homo sapien
gcggtcccgggcgttcctgcgcgag

SEQ ID NO: 3031621 - DNA, 25 bp, Homo sapien
tgggcggtcccgggcgttcctgcgc

SEQ ID NO: 3031622 - DNA, 25 bp, Homo sapien
ggcggtcccgggcgttcctgcgcga

SEQ ID NO: 3031623 - DNA, 25 bp, Homo sapien
ctcgcgcaggaacgcccgggaccgc

SEQ ID NO: 3031624 - DNA, 25 bp, Homo sapien
tcgcgcaggaacgcccgggaccgcc

SEQ ID NO: 3031625 - DNA, 25 bp, Homo sapien
gcgcaggaacgcccgggaccgccca

SEQ ID NO: 3031626 - DNA, 25 bp, Homo sapien
gggctgctcgcacctgggcagcttc

SEQ ID NO: 3031627 - DNA, 25 bp, Homo sapien
agtgcttcgtgtggagcggcacggc

SEQ ID NO: 3031628 - DNA, 25 bp, Homo sapien
gcttcgtgtggagcggcacggctga

SEQ ID NO: 3031629 - DNA, 25 bp, Homo sapien
cagtgcttcgtgtggagcggcacgg

SEQ ID NO: 3031630 - DNA, 25 bp, Homo sapien
tgcttcgtgtggagcggcacggctg

SEQ ID NO: 3031631 - DNA, 25 bp, Homo sapien
tgtggagcggcacggctgaggcccg

SEQ ID NO: 3031632 - DNA, 25 bp, Homo sapien
tcagccgtgccgctccacacgaagc

SEQ ID NO: 3031633 - DNA, 25 bp, Homo sapien
cggcggcgctaccgccagctcggcg

SEQ ID NO: 3031634 - DNA, 25 bp, Homo sapien
cgggcctcagccgtgccgctccaca

SEQ ID NO: 3031635 - DNA, 25 bp, Homo sapien
ccgtgccgctccacacgaagcactg

SEQ ID NO: 3031636 - DNA, 25 bp, Homo sapien
gaagctgcccaggtgcgagcagccc

SEQ ID NO: 3031637 - DNA, 25 bp, Homo sapien
agccgtgccgctccacacgaagcac

SEQ ID NO: 3031638 - DNA, 25 bp, Homo sapien
tctttgtccggcctccgcgctttgt

SEQ ID NO: 3031639 - DNA, 25 bp, Homo sapien
ccgcgctttgttctcggcgcccggg

SEQ ID NO: 3031640 - DNA, 25 bp, Homo sapien
tttgtccggcctccgcgctttgttc

SEQ ID NO: 3031641 - DNA, 25 bp, Homo sapien
ggcgatcgcgcagccccatctttgt

SEQ ID NO: 3031642 - DNA, 25 bp, Homo sapien
ccacgccgcgctggcgtcgtcctcg

SEQ ID NO: 3031643 - DNA, 25 bp, Homo sapien
cggcctccgcgctttgttctcggcg

SEQ ID NO: 3031644 - DNA, 25 bp, Homo sapien
cgaggacgacgccagcgcggcgtgg

SEQ ID NO: 3031645 - DNA, 25 bp, Homo sapien
gaacaaagcgcggaggccggacaaa

SEQ ID NO: 3031646 - DNA, 25 bp, Homo sapien
acaaagatggggctgcgcgatcgcc

SEQ ID NO: 3031647 - DNA, 25 bp, Homo sapien
acaaagcgcggaggccggacaaaga

SEQ ID NO: 3031648 - DNA, 25 bp, Homo sapien
gaggcgaggacgacgccagcgcggc

SEQ ID NO: 3031649 - DNA, 25 bp, Homo sapien
cgggcgccgagaacaaagcgcggag

SEQ ID NO: 3031650 - DNA, 25 bp, Homo sapien
ggctattgtcataggctctcagtat

SEQ ID NO: 3031651 - DNA, 25 bp, Homo sapien
cttcggctattgtcataggctctca

SEQ ID NO: 3031652 - DNA, 25 bp, Homo sapien
tattgtcataggctctcagtatagt

SEQ ID NO: 3031653 - DNA, 25 bp, Homo sapien
tgtcataggctctcagtatagtccg

SEQ ID NO: 3031654 - DNA, 25 bp, Homo sapien
tggagacaagagtgtagaagtaaag

SEQ ID NO: 3031655 - DNA, 25 bp, Homo sapien
tgtggagacaagagtgtagaagtaa

SEQ ID NO: 3031656 - DNA, 25 bp, Homo sapien
gagacaagagtgtagaagtaaagac

SEQ ID NO: 3031657 - DNA, 25 bp, Homo sapien
ggtttctccccgtgtgtggagacaa

SEQ ID NO: 3031658 - DNA, 25 bp, Homo sapien
tggaaggacacacatagctaatagc

SEQ ID NO: 3031659 - DNA, 25 bp, Homo sapien
tgcctagcaggtggctcaagagccc

SEQ ID NO: 3031660 - DNA, 25 bp, Homo sapien
taaaagaagtagtggcctgtgatca

SEQ ID NO: 3031661 - DNA, 25 bp, Homo sapien
tacggttcatattgggtttgctaca

SEQ ID NO: 3031662 - DNA, 25 bp, Homo sapien
tctcgggtccatcgggtcctgtgta

SEQ ID NO: 3031663 - DNA, 25 bp, Homo sapien
gaagttgattgactatggtctctcc

SEQ ID NO: 3031664 - DNA, 25 bp, Homo sapien
tggtctctccggctaccaggtaggg

SEQ ID NO: 3031665 - DNA, 25 bp, Homo sapien
cacgtcacttccgaggcgggaggat

SEQ ID NO: 3031666 - DNA, 25 bp, Homo sapien
gcagtaacatatgctctcaaaccag

SEQ ID NO: 3031667 - DNA, 25 bp, Homo sapien
tcagagaaggaatgactaggacttc

SEQ ID NO: 3031668 - DNA, 25 bp, Homo sapien
ggtgggctagtagacagaacattcc

SEQ ID NO: 3031669 - DNA, 25 bp, Homo sapien
cctggtggcaacaaggcacatgtat

SEQ ID NO: 3031670 - DNA, 25 bp, Homo sapien
gctcagcccgagtctaaggttgaat

SEQ ID NO: 3031671 - DNA, 25 bp, Homo sapien
tgataggctgccctcaaaggaatgc

SEQ ID NO: 3031672 - DNA, 25 bp, Homo sapien
tgtgtactccgtcatcagaagatgg

SEQ ID NO: 3031673 - DNA, 25 bp, Homo sapien
tctccttggatgctgttggctgcca

SEQ ID NO: 3031674 - DNA, 25 bp, Homo sapien
ggtgcttccaagattgctccgaggg

SEQ ID NO: 3031675 - DNA, 25 bp, Homo sapien
taagtggtaacactgggccgcagct

SEQ ID NO: 3031676 - DNA, 25 bp, Homo sapien
gatctctgaagagcgatcctggagc

SEQ ID NO: 3031677 - DNA, 25 bp, Homo sapien
tcttctgtcagcctagggcaatggg

SEQ ID NO: 3031678 - DNA, 25 bp, Homo sapien
tgggctctggatggtacagttaaac

SEQ ID NO: 3031679 - DNA, 25 bp, Homo sapien
ccctcttgggttatggaaatccaca

SEQ ID NO: 3031680 - DNA, 25 bp, Homo sapien
tgtggcgatctgaatactctgttgt

SEQ ID NO: 3031681 - DNA, 25 bp, Homo sapien
cttagtgtaatgagctgaaaaaccc

SEQ ID NO: 3031682 - DNA, 25 bp, Homo sapien
ggaataatctaagggcagcgccaac

SEQ ID NO: 3031683 - DNA, 25 bp, Homo sapien
tataggcgtcgtactccacttggta

SEQ ID NO: 3031684 - DNA, 25 bp, Homo sapien
aatgtacttgtactgggcttccagg

SEQ ID NO: 3031685 - DNA, 25 bp, Homo sapien
caagggtcaaactgccaggagatcc

SEQ ID NO: 3031686 - DNA, 25 bp, Homo sapien
aacacaagggtcaatgtggcccatg

SEQ ID NO: 3031687 - DNA, 25 bp, Homo sapien
cacaagggtcaatgtggcccatgta

SEQ ID NO: 3031688 - DNA, 25 bp, Homo sapien
aggcaacacaagggtcaatgtggcc

SEQ ID NO: 3031689 - DNA, 25 bp, Homo sapien
caggcaacacaagggtcaatgtggc

SEQ ID NO: 3031690 - DNA, 25 bp, Homo sapien
tgtgcctgacaggaactagcttcct

SEQ ID NO: 3031691 - DNA, 25 bp, Homo sapien
acagccctcagtgtgcacagacgcg

SEQ ID NO: 3031692 - DNA, 25 bp, Homo sapien
tgaagctccgaatgtgcctgacagg

SEQ ID NO: 3031693 - DNA, 25 bp, Homo sapien
catggctaacgagaagcacagccct

SEQ ID NO: 3031694 - DNA, 25 bp, Homo sapien
gggttacacaatgttctcgccaaca

SEQ ID NO: 3031695 - DNA, 25 bp, Homo sapien
tcttgagacggaaatggagttgctt

SEQ ID NO: 3031696 - DNA, 25 bp, Homo sapien
caaatcgtgtcccaatcttgagacg

SEQ ID NO: 3031697 - DNA, 25 bp, Homo sapien
gctgtgcatcctactgactgtcaaa

SEQ ID NO: 3031698 - DNA, 25 bp, Homo sapien
cagcgccatcctgaatgtagtgaaa

SEQ ID NO: 3031699 - DNA, 25 bp, Homo sapien
cctcggcgtcttcatatgggctggg

SEQ ID NO: 3031700 - DNA, 25 bp, Homo sapien
ctcggcgtcttcatatgggctgggc

SEQ ID NO: 3031701 - DNA, 25 bp, Homo sapien
agcctcggcgtcttcatatgggctg

SEQ ID NO: 3031702 - DNA, 25 bp, Homo sapien
tcggcgtcttcatatgggctgggca

SEQ ID NO: 3031703 - DNA, 25 bp, Homo sapien
ttccaacaatcacggagggctctgg

SEQ ID NO: 3031704 - DNA, 25 bp, Homo sapien
ggccctgagacagtgaagccgagca

SEQ ID NO: 3031705 - DNA, 25 bp, Homo sapien
cgagcagcccaagtaagacaggcag

SEQ ID NO: 3031706 - DNA, 25 bp, Homo sapien
ggtccgggctggcacacggtggcag

SEQ ID NO: 3031707 - DNA, 25 bp, Homo sapien
gggcaagtgtgtctcaaagacgccg

SEQ ID NO: 3031708 - DNA, 25 bp, Homo sapien
gacgccgacaggacaagtggcaatc

SEQ ID NO: 3031709 - DNA, 25 bp, Homo sapien
caagtggcaatctgtttgatgtgct

SEQ ID NO: 3031710 - DNA, 25 bp, Homo sapien
gatgtgctcgttgccagtgtgctga

SEQ ID NO: 3031711 - DNA, 25 bp, Homo sapien
caggccaaaggtgcaacctgaacac

SEQ ID NO: 3031712 - DNA, 25 bp, Homo sapien
aacatctgcgtgtgtgagtagagcc

SEQ ID NO: 3031713 - DNA, 25 bp, Homo sapien
gagtagagccttcagttccaggcca

SEQ ID NO: 3031714 - DNA, 25 bp, Homo sapien
cgtgtgtgagtagagccttcagttc

SEQ ID NO: 3031715 - DNA, 25 bp, Homo sapien
tccctgttggaagaaacacgctcct

SEQ ID NO: 3031716 - DNA, 25 bp, Homo sapien
gctgaccgctgctataacaatcaag

SEQ ID NO: 3031717 - DNA, 25 bp, Homo sapien
gaacatgaaacacggaaactactcc

SEQ ID NO: 3031718 - DNA, 25 bp, Homo sapien
ggacagttaatccaggtggctccac

SEQ ID NO: 3031719 - DNA, 25 bp, Homo sapien
taaacgtgcagatcaaactacccct

SEQ ID NO: 3031720 - DNA, 25 bp, Homo sapien
cggctctgggctcggaagagacaca

SEQ ID NO: 3031721 - DNA, 25 bp, Homo sapien
cacatctggcgggagctaaagctcc

SEQ ID NO: 3031722 - DNA, 25 bp, Homo sapien
ttaaaggacttctacggcaggagcg

SEQ ID NO: 3031723 - DNA, 25 bp, Homo sapien
tgcccgggccaagacgcctccttcc

SEQ ID NO: 3031724 - DNA, 25 bp, Homo sapien
ccaggagccgtcctggttcgagcat

SEQ ID NO: 3031725 - DNA, 25 bp, Homo sapien
tgcttgccaacgtctcgcgccaagg

SEQ ID NO: 3031726 - DNA, 25 bp, Homo sapien
agaaactgagttcccggcgttcgca

SEQ ID NO: 3031727 - DNA, 25 bp, Homo sapien
ccgtagtccttctgcgagggcgcga

SEQ ID NO: 3031728 - DNA, 25 bp, Homo sapien
ggtccttgagtttcgagagccagta

SEQ ID NO: 3031729 - DNA, 25 bp, Homo sapien
cggtaggtccttgagtttcgagagc

SEQ ID NO: 3031730 - DNA, 25 bp, Homo sapien
gtccttgagtttcgagagccagtag

SEQ ID NO: 3031731 - DNA, 25 bp, Homo sapien
taggtccttgagtttcgagagccag

SEQ ID NO: 3031732 - DNA, 25 bp, Homo sapien
gaggcaagtgcctacaactcccaga

SEQ ID NO: 3031733 - DNA, 25 bp, Homo sapien
caactcccagagcactgcgcggagg

SEQ ID NO: 3031734 - DNA, 25 bp, Homo sapien
agagaggagaggcaagtgcctacaa

SEQ ID NO: 3031735 - DNA, 25 bp, Homo sapien
gggccgccgcgctgtctgcgggcta

SEQ ID NO: 3031736 - DNA, 25 bp, Homo sapien
ctgcctccaagtgtcagcgtagttc

SEQ ID NO: 3031737 - DNA, 25 bp, Homo sapien
gttgagtcatacagccctgcctcca

SEQ ID NO: 3031738 - DNA, 25 bp, Homo sapien
tcctgttgagtcatacagccctgcc

SEQ ID NO: 3031739 - DNA, 25 bp, Homo sapien
gcctccaagtgtcagcgtagttcat

SEQ ID NO: 3031740 - DNA, 25 bp, Homo sapien
cctgacaacaacgatgtggaaggtg

SEQ ID NO: 3031741 - DNA, 25 bp, Homo sapien
tcatcctgacaacaacgatgtggaa

SEQ ID NO: 3031742 - DNA, 25 bp, Homo sapien
atcctgacaacaacgatgtggaagg

SEQ ID NO: 3031743 - DNA, 25 bp, Homo sapien
tgacaacaacgatgtggaaggtgag

SEQ ID NO: 3031744 - DNA, 25 bp, Homo sapien
gaaacagattctaggaagcgcccat

SEQ ID NO: 3031745 - DNA, 25 bp, Homo sapien
gctctggtagttaacgttatgggaa

SEQ ID NO: 3031746 - DNA, 25 bp, Homo sapien
tcctgttgctcaaacagggccctgt

SEQ ID NO: 3031747 - DNA, 25 bp, Homo sapien
ccatgcatcgcatcacactttttca

SEQ ID NO: 3031748 - DNA, 25 bp, Homo sapien
tccttctgtccatccttctgcccac

SEQ ID NO: 3031749 - DNA, 25 bp, Homo sapien
cttctgtccatccttctgcccactc

SEQ ID NO: 3031750 - DNA, 25 bp, Homo sapien
tctccttctgtccatccttctgccc

SEQ ID NO: 3031751 - DNA, 25 bp, Homo sapien
ctctccttctgtccatccttctgcc

SEQ ID NO: 3031752 - DNA, 25 bp, Homo sapien
gtacacttaaaccgaactctctggc

SEQ ID NO: 3031753 - DNA, 25 bp, Homo sapien
catttccatagagcacatgccaggg

SEQ ID NO: 3031754 - DNA, 25 bp, Homo sapien
tagcaggtcctggagatatctgggc

SEQ ID NO: 3031755 - DNA, 25 bp, Homo sapien
agcccagaccaacaaatagcaggtc

SEQ ID NO: 3031756 - DNA, 25 bp, Homo sapien
cccaggaggccaccatgttggtgct

SEQ ID NO: 3031757 - DNA, 25 bp, Homo sapien
gctcaggttagagttcagtggctat

SEQ ID NO: 3031758 - DNA, 25 bp, Homo sapien
ggtctcgtgttgctcaggttagagt

SEQ ID NO: 3031759 - DNA, 25 bp, Homo sapien
tgctccgtttccagcagaggctggt

SEQ ID NO: 3031760 - DNA, 25 bp, Homo sapien
cagccttgccggaactcttatgtaa

SEQ ID NO: 3031761 - DNA, 25 bp, Homo sapien
tttgggtggacttgagcaaatccaa

SEQ ID NO: 3031762 - DNA, 25 bp, Homo sapien
tgtagccgtaagactgatacaactg

SEQ ID NO: 3031763 - DNA, 25 bp, Homo sapien
tccaagaaccctgaactgaggaaga

SEQ ID NO: 3031764 - DNA, 25 bp, Homo sapien
cttatggctcgaggcaggacccccc

SEQ ID NO: 3031765 - DNA, 25 bp, Homo sapien
ccttgcagctgagtgggaagttgct

SEQ ID NO: 3031766 - DNA, 25 bp, Homo sapien
gctggaagttgtatctgtttattgc

SEQ ID NO: 3031767 - DNA, 25 bp, Homo sapien
ggacccccccgcagccttgcagctg

SEQ ID NO: 3031768 - DNA, 25 bp, Homo sapien
gacataagacctcatatcacacaag

SEQ ID NO: 3031769 - DNA, 25 bp, Homo sapien
tgtggctttggcttgtgacccccga

SEQ ID NO: 3031770 - DNA, 25 bp, Homo sapien
tcctgagcccttctagcggtgtggc

SEQ ID NO: 3031771 - DNA, 25 bp, Homo sapien
caagcttgatgccaccaagaggacg

SEQ ID NO: 3031772 - DNA, 25 bp, Homo sapien
tgggcctggtgcaagattttcactt

SEQ ID NO: 3031773 - DNA, 25 bp, Homo sapien
gactgctgtgaaaacgaagtggagt

SEQ ID NO: 3031774 - DNA, 25 bp, Homo sapien
tcattctgagtagccatgtaacccc

SEQ ID NO: 3031775 - DNA, 25 bp, Homo sapien
ttcacttgttttggaagcattagcc

SEQ ID NO: 3031776 - DNA, 25 bp, Homo sapien
acagcggatctcatgcatggcatca

SEQ ID NO: 3031777 - DNA, 25 bp, Homo sapien
gcaacttcttatggcacagcggatc

SEQ ID NO: 3031778 - DNA, 25 bp, Homo sapien
gaagtcactgttatcctgcagggag

SEQ ID NO: 3031779 - DNA, 25 bp, Homo sapien
tcgctctccacgctgaaggctgtgc

SEQ ID NO: 3031780 - DNA, 25 bp, Homo sapien
tgctgtgggggaagcgacagcgtgc

SEQ ID NO: 3031781 - DNA, 25 bp, Homo sapien
cagcgtgcagacagcactgcatgcc

SEQ ID NO: 3031782 - DNA, 25 bp, Homo sapien
gctgtgggggaagcgacagcgtgca

SEQ ID NO: 3031783 - DNA, 25 bp, Homo sapien
ggaagcgacagcgtgcagacagcac

SEQ ID NO: 3031784 - DNA, 25 bp, Homo sapien
gctgggtccacaccctgccgccggc

SEQ ID NO: 3031785 - DNA, 25 bp, Homo sapien
ctctgagacctgttgatgagcttgg

SEQ ID NO: 3031786 - DNA, 25 bp, Homo sapien
cttttatggaaatgttcctctgaga

SEQ ID NO: 3031787 - DNA, 25 bp, Homo sapien
gtccagcggccagctgggtccacac

SEQ ID NO: 3031788 - DNA, 25 bp, Homo sapien
gaaagccctagtctcagttcctggg

SEQ ID NO: 3031789 - DNA, 25 bp, Homo sapien
gggctggccagatcaagagtcacct

SEQ ID NO: 3031790 - DNA, 25 bp, Homo sapien
catgtggcggcatccttaccaagga

SEQ ID NO: 3031791 - DNA, 25 bp, Homo sapien
catacctgcgggagcttgatgaggc

SEQ ID NO: 3031792 - DNA, 25 bp, Homo sapien
ggctttctccgacctctcacacaag

SEQ ID NO: 3031793 - DNA, 25 bp, Homo sapien
acaagccctttgcaaaagagctgac

SEQ ID NO: 3031794 - DNA, 25 bp, Homo sapien
ccagggctttctccgacctctcaca

SEQ ID NO: 3031795 - DNA, 25 bp, Homo sapien
ctcacacaagccctttgcaaaagag

SEQ ID NO: 3031796 - DNA, 25 bp, Homo sapien
aacaaatgtctcagccctaaagggc

SEQ ID NO: 3031797 - DNA, 25 bp, Homo sapien
ttagcactgacacaagagggcggga

SEQ ID NO: 3031798 - DNA, 25 bp, Homo sapien
aaagcatgctagtgtgtctcccagg

SEQ ID NO: 3031799 - DNA, 25 bp, Homo sapien
tctacagaagggcagggacgaatct

SEQ ID NO: 3031800 - DNA, 25 bp, Homo sapien
gacgtacttctggatgtaccagcag

SEQ ID NO: 3031801 - DNA, 25 bp, Homo sapien
gggttctccttgacgtacttctgga

SEQ ID NO: 3031802 - DNA, 25 bp, Homo sapien
tccttgacgtacttctggatgtacc

SEQ ID NO: 3031803 - DNA, 25 bp, Homo sapien
tctggatgtaccagcaggtgagatg

SEQ ID NO: 3031804 - DNA, 25 bp, Homo sapien
agtaactcccttgagtttcagtgtc

SEQ ID NO: 3031805 - DNA, 25 bp, Homo sapien
gtaactcccttgagtttcagtgtca

SEQ ID NO: 3031806 - DNA, 25 bp, Homo sapien
caggaatggggctcctgtgaagcac

SEQ ID NO: 3031807 - DNA, 25 bp, Homo sapien
gcaggaatggggctcctgtgaagca

SEQ ID NO: 3031808 - DNA, 25 bp, Homo sapien
cctggggtttgggatgccctgagga

SEQ ID NO: 3031809 - DNA, 25 bp, Homo sapien
gggtttgggatgccctgaggatgaa

SEQ ID NO: 3031810 - DNA, 25 bp, Homo sapien
cccacgtactcatagagcaggacgg

SEQ ID NO: 3031811 - DNA, 25 bp, Homo sapien
aaggtgcttggcgatgccacgccca

SEQ ID NO: 3031812 - DNA, 25 bp, Homo sapien
gcatctgggacctcggtgtgctgca

SEQ ID NO: 3031813 - DNA, 25 bp, Homo sapien
ccacgcccacggtaggcatctggga

SEQ ID NO: 3031814 - DNA, 25 bp, Homo sapien
tatggagttgactggggatagggct

SEQ ID NO: 3031815 - DNA, 25 bp, Homo sapien
agtcacggaggtgtatggagttgac

SEQ ID NO: 3031816 - DNA, 25 bp, Homo sapien
ctggaatgagagtcacggaggtgta

SEQ ID NO: 3031817 - DNA, 25 bp, Homo sapien
tgagagtcacggaggtgtatggagt

SEQ ID NO: 3031818 - DNA, 25 bp, Homo sapien
gccggcggtcgtgctccacgcggat

SEQ ID NO: 3031819 - DNA, 25 bp, Homo sapien
cgttgagccggacagtgaactggcg

SEQ ID NO: 3031820 - DNA, 25 bp, Homo sapien
gccggacagtgaactggcggcgccg

SEQ ID NO: 3031821 - DNA, 25 bp, Homo sapien
ggcggtcgtgctccacgcggatggg

SEQ ID NO: 3031822 - DNA, 25 bp, Homo sapien
cgcggggaaaggtcaggcgcgcggc

SEQ ID NO: 3031823 - DNA, 25 bp, Homo sapien
ggtagttacggcctgggagaccgca

SEQ ID NO: 3031824 - DNA, 25 bp, Homo sapien
ttacggcctgggagaccgcaggcgg

SEQ ID NO: 3031825 - DNA, 25 bp, Homo sapien
ggcacggcggcagccgagtgcgcca

SEQ ID NO: 3031826 - DNA, 25 bp, Homo sapien
ttactcattgcaggcaaatcctcac

SEQ ID NO: 3031827 - DNA, 25 bp, Homo sapien
cagtctctatgaggaactggcatat

SEQ ID NO: 3031828 - DNA, 25 bp, Homo sapien
aaattttactcattgcaggcaaatc

SEQ ID NO: 3031829 - DNA, 25 bp, Homo sapien
tccttagccagtccagtctctatga

SEQ ID NO: 3031830 - DNA, 25 bp, Homo sapien
ctgaaccttgttccgtgcagggctg

SEQ ID NO: 3031831 - DNA, 25 bp, Homo sapien
gaaccagaactccatccggaggctc

SEQ ID NO: 3031832 - DNA, 25 bp, Homo sapien
ttccccacccaagcagttagtaaga

SEQ ID NO: 3031833 - DNA, 25 bp, Homo sapien
ccacccaagcagttagtaagaacca

SEQ ID NO: 3031834 - DNA, 25 bp, Homo sapien
caggcagctcaaagtcaaatcctag

SEQ ID NO: 3031835 - DNA, 25 bp, Homo sapien
ctgagtttagggtggtttgtgacac

SEQ ID NO: 3031836 - DNA, 25 bp, Homo sapien
ttgtgacacagcaggagataaacaa

SEQ ID NO: 3031837 - DNA, 25 bp, Homo sapien
tcctttctcaacacatatctgctgg

SEQ ID NO: 3031838 - DNA, 25 bp, Homo sapien
cagacaggactactcaggatcccca

SEQ ID NO: 3031839 - DNA, 25 bp, Homo sapien
gccgatgtgttggtgtatttcctac

SEQ ID NO: 3031840 - DNA, 25 bp, Homo sapien
tggcagaagggagagatcccatcac

SEQ ID NO: 3031841 - DNA, 25 bp, Homo sapien
actttcccagctcaaacagggcaga

SEQ ID NO: 3031842 - DNA, 25 bp, Homo sapien
gcagccttgaagacggtgcatcctt

SEQ ID NO: 3031843 - DNA, 25 bp, Homo sapien
cacttgggcaaggtggactctgcaa

SEQ ID NO: 3031844 - DNA, 25 bp, Homo sapien
gaaagccacttctctaagcacgccg

SEQ ID NO: 3031845 - DNA, 25 bp, Homo sapien
tgtgtaaatctatcctcaggagggc

SEQ ID NO: 3031846 - DNA, 25 bp, Homo sapien
gtggcgacggcgaagcggtctgccc

SEQ ID NO: 3031847 - DNA, 25 bp, Homo sapien
tgcagccacctttggtctgtaggaa

SEQ ID NO: 3031848 - DNA, 25 bp, Homo sapien
tgtgtccctgcgctcctctgcttct

SEQ ID NO: 3031849 - DNA, 25 bp, Homo sapien
tctgcagggctcaaggtggcgacgg

SEQ ID NO: 3031850 - DNA, 25 bp, Homo sapien
ccgccacccccacccgcaggatgcg

SEQ ID NO: 3031851 - DNA, 25 bp, Homo sapien
gccacccccacccgcaggatgcgca

SEQ ID NO: 3031852 - DNA, 25 bp, Homo sapien
ccacccccacccgcaggatgcgcat

SEQ ID NO: 3031853 - DNA, 25 bp, Homo sapien
cgccacccccacccgcaggatgcgc

SEQ ID NO: 3031854 - DNA, 25 bp, Homo sapien
aataggatgagggaaatagtctgtg

SEQ ID NO: 3031855 - DNA, 25 bp, Homo sapien
agtctgtgggatgcaagcaaaggaa

SEQ ID NO: 3031856 - DNA, 25 bp, Homo sapien
tctgtgggatgcaagcaaaggaagc

SEQ ID NO: 3031857 - DNA, 25 bp, Homo sapien
gcaaaggaagcagggtgccttagac

SEQ ID NO: 3031858 - DNA, 25 bp, Homo sapien
gtggctgtaactttataaatagtgt

SEQ ID NO: 3031859 - DNA, 25 bp, Homo sapien
gctgtaactttataaatagtgtatc

SEQ ID NO: 3031860 - DNA, 25 bp, Homo sapien
tgtatctgtagacagtgactgggaa

SEQ ID NO: 3031861 - DNA, 25 bp, Homo sapien
ctttataaatagtgtatctgtagac

SEQ ID NO: 3031862 - DNA, 25 bp, Homo sapien
cccagagttggttgtaagctagcta

SEQ ID NO: 3031863 - DNA, 25 bp, Homo sapien
catcatggtgatgacggccggcagt

SEQ ID NO: 3031864 - DNA, 25 bp, Homo sapien
tctaattataactctcatggccgct

SEQ ID NO: 3031865 - DNA, 25 bp, Homo sapien
tagctagtccgtcccttccatgatg

SEQ ID NO: 3031866 - DNA, 25 bp, Homo sapien
tgcatggtttggagctgatcgcttc

SEQ ID NO: 3031867 - DNA, 25 bp, Homo sapien
taggacccgtctccagctgctgaga

SEQ ID NO: 3031868 - DNA, 25 bp, Homo sapien
gtgaataccccaagactcccatgag

SEQ ID NO: 3031869 - DNA, 25 bp, Homo sapien
gactttgcacactttggcccagggt

SEQ ID NO: 3031870 - DNA, 25 bp, Homo sapien
tgtgcagatgcgcatccctggcgcc

SEQ ID NO: 3031871 - DNA, 25 bp, Homo sapien
ccagcatagtctgcggccttctgcc

SEQ ID NO: 3031872 - DNA, 25 bp, Homo sapien
tcagatgtgcagatgcgcatccctg

SEQ ID NO: 3031873 - DNA, 25 bp, Homo sapien
cctggcgccccagcatagtctgcgg

SEQ ID NO: 3031874 - DNA, 25 bp, Homo sapien
ttcagatttgagatgatttcctcgg

SEQ ID NO: 3031875 - DNA, 25 bp, Homo sapien
accttgcgcaggcagctttgctggc

SEQ ID NO: 3031876 - DNA, 25 bp, Homo sapien
cgtggcttccccgagacactccttg

SEQ ID NO: 3031877 - DNA, 25 bp, Homo sapien
actccagtaaatagccccgacgtgg

SEQ ID NO: 3031878 - DNA, 25 bp, Homo sapien
ggaagtgcatttgcctgtaagggcc

SEQ ID NO: 3031879 - DNA, 25 bp, Homo sapien
ccagtggtgccaatgtacccgacca

SEQ ID NO: 3031880 - DNA, 25 bp, Homo sapien
tgcctggtccagtggtgccaatgta

SEQ ID NO: 3031881 - DNA, 25 bp, Homo sapien
gtggttgatacagccaaatgtctgc

SEQ ID NO: 3031882 - DNA, 25 bp, Homo sapien
tctgattttgtctccgcatccgggc

SEQ ID NO: 3031883 - DNA, 25 bp, Homo sapien
cagcaaattccaaagtccgttcttc

SEQ ID NO: 3031884 - DNA, 25 bp, Homo sapien
tgacacgacagcaaattccaaagtc

SEQ ID NO: 3031885 - DNA, 25 bp, Homo sapien
aggaggaactgacacgacagcaaat

SEQ ID NO: 3031886 - DNA, 25 bp, Homo sapien
ggacgctgtgggcatttccgctcag

SEQ ID NO: 3031887 - DNA, 25 bp, Homo sapien
gcacgtgccagatgcggacgctgtg

SEQ ID NO: 3031888 - DNA, 25 bp, Homo sapien
tgcggacgctgtgggcatttccgct

SEQ ID NO: 3031889 - DNA, 25 bp, Homo sapien
cagatgcggacgctgtgggcatttc

SEQ ID NO: 3031890 - DNA, 25 bp, Homo sapien
gagaggcggtgggatgagcaagagt

SEQ ID NO: 3031891 - DNA, 25 bp, Homo sapien
tgacatctaggctgctgagttgctg

SEQ ID NO: 3031892 - DNA, 25 bp, Homo sapien
aagagttgatttattgtgactgtgc

SEQ ID NO: 3031893 - DNA, 25 bp, Homo sapien
ctggctcattctcgccaaggacaag

SEQ ID NO: 3031894 - DNA, 25 bp, Homo sapien
agccgttcctggcatcagactccag

SEQ ID NO: 3031895 - DNA, 25 bp, Homo sapien
tctcaaagcggggattctctggctc

SEQ ID NO: 3031896 - DNA, 25 bp, Homo sapien
tggggctctccagcaagccgttcct

SEQ ID NO: 3031897 - DNA, 25 bp, Homo sapien
cgcccaccatgctccaaactctggg

SEQ ID NO: 3031898 - DNA, 25 bp, Homo sapien
gagaggcggtaatgagggacctgac

SEQ ID NO: 3031899 - DNA, 25 bp, Homo sapien
tggtgagaggcggtaatgagggacc

SEQ ID NO: 3031900 - DNA, 25 bp, Homo sapien
atgagggacctgacacgtggacggg

SEQ ID NO: 3031901 - DNA, 25 bp, Homo sapien
acctgacacgtggacgggatctggg

SEQ ID NO: 3031902 - DNA, 25 bp, Homo sapien
ttctgtgacctgcctgctgccccat

SEQ ID NO: 3031903 - DNA, 25 bp, Homo sapien
ggaacttctgtgacctgcctgctgc

SEQ ID NO: 3031904 - DNA, 25 bp, Homo sapien
ggggaacttctgtgacctgcctgct

SEQ ID NO: 3031905 - DNA, 25 bp, Homo sapien
cgggggaacttctgtgacctgcctg

SEQ ID NO: 3031906 - DNA, 25 bp, Homo sapien
ggcattggcccttgtcacttttgct

SEQ ID NO: 3031907 - DNA, 25 bp, Homo sapien
ggcgcaggttggcatttagcctgga

SEQ ID NO: 3031908 - DNA, 25 bp, Homo sapien
acttttgctgttgttagtatcatca

SEQ ID NO: 3031909 - DNA, 25 bp, Homo sapien
cctaatgcatggcaagtgcgtggtg

SEQ ID NO: 3031910 - DNA, 25 bp, Homo sapien
aagacgcgcccctcggcatggagcg

SEQ ID NO: 3031911 - DNA, 25 bp, Homo sapien
cccgggccactgaccgaggtaagtg

SEQ ID NO: 3031912 - DNA, 25 bp, Homo sapien
cgcccggagcttggaggacgccgag

SEQ ID NO: 3031913 - DNA, 25 bp, Homo sapien
gaccagggcgatccgctttgcagag

SEQ ID NO: 3031914 - DNA, 25 bp, Homo sapien
tcccgtgctgtaatggagtaaaaat

SEQ ID NO: 3031915 - DNA, 25 bp, Homo sapien
ctcccgtgctgtaatggagtaaaaa

SEQ ID NO: 3031916 - DNA, 25 bp, Homo sapien
aaatgattccatgccagcaagtcag

SEQ ID NO: 3031917 - DNA, 25 bp, Homo sapien
ctggaaatgattccatgccagcaag

SEQ ID NO: 3031918 - DNA, 25 bp, Homo sapien
gccttgatctccgaggggatggccg

SEQ ID NO: 3031919 - DNA, 25 bp, Homo sapien
ggccagggtccaccctgcgcgcgca

SEQ ID NO: 3031920 - DNA, 25 bp, Homo sapien
agggtccaccctgcgcgcgcacggc

SEQ ID NO: 3031921 - DNA, 25 bp, Homo sapien
cttgatctccgaggggatggccgct

SEQ ID NO: 3031922 - DNA, 25 bp, Homo sapien
gctccgccctggaccgccgccctgt

SEQ ID NO: 3031923 - DNA, 25 bp, Homo sapien
agctccgccctggaccgccgccctg

SEQ ID NO: 3031924 - DNA, 25 bp, Homo sapien
cagctccgccctggaccgccgccct

SEQ ID NO: 3031925 - DNA, 25 bp, Homo sapien
accagccttcctgccccagggccat

SEQ ID NO: 3031926 - DNA, 25 bp, Homo sapien
ccaccagccttcctgccccagggcc

SEQ ID NO: 3031927 - DNA, 25 bp, Homo sapien
cccaccagccttcctgccccagggc

SEQ ID NO: 3031928 - DNA, 25 bp, Homo sapien
caccagccttcctgccccagggcca

SEQ ID NO: 3031929 - DNA, 25 bp, Homo sapien
cagtgatgtaatgctgctgtaattc

SEQ ID NO: 3031930 - DNA, 25 bp, Homo sapien
cagctgtcagtgatgtaatgctgct

SEQ ID NO: 3031931 - DNA, 25 bp, Homo sapien
ctggacacggaggtcctcctgcccc

SEQ ID NO: 3031932 - DNA, 25 bp, Homo sapien
gctgctgtaattcctggacacggag

SEQ ID NO: 3031933 - DNA, 25 bp, Homo sapien
ccgtgaagatggcagccccgctgtc

SEQ ID NO: 3031934 - DNA, 25 bp, Homo sapien
gaggccaccagttctggccgtgaag

SEQ ID NO: 3031935 - DNA, 25 bp, Homo sapien
tggcagccccgctgtcatcgttctg

SEQ ID NO: 3031936 - DNA, 25 bp, Homo sapien
gtgctggttggtagcccccttgaca

SEQ ID NO: 3031937 - DNA, 25 bp, Homo sapien
gctccacctcatggttccacagttg

SEQ ID NO: 3031938 - DNA, 25 bp, Homo sapien
tggttccacagttgctgagcatctg

SEQ ID NO: 3031939 - DNA, 25 bp, Homo sapien
tggggctccacctcatggttccaca

SEQ ID NO: 3031940 - DNA, 25 bp, Homo sapien
cacctcatggttccacagttgctga

SEQ ID NO: 3031941 - DNA, 25 bp, Homo sapien
tggtgtcaggaacgccggtcacagt

SEQ ID NO: 3031942 - DNA, 25 bp, Homo sapien
cgagcatggaacagcgaggcagatc

SEQ ID NO: 3031943 - DNA, 25 bp, Homo sapien
ggtcagtgtcactcaaggttcctgc

SEQ ID NO: 3031944 - DNA, 25 bp, Homo sapien
gcttccactttctgagcatcctctg

SEQ ID NO: 3031945 - DNA, 25 bp, Homo sapien
ccagtgtgacaaaccagccttggct

SEQ ID NO: 3031946 - DNA, 25 bp, Homo sapien
agtgtgacaaaccagccttggctgt

SEQ ID NO: 3031947 - DNA, 25 bp, Homo sapien
aaaaccagtgtgacaaaccagcctt

SEQ ID NO: 3031948 - DNA, 25 bp, Homo sapien
cagtgtgacaaaccagccttggctg

SEQ ID NO: 3031949 - DNA, 25 bp, Homo sapien
ccaaatgtttgagggccatgggtta

SEQ ID NO: 3031950 - DNA, 25 bp, Homo sapien
cattggacccaaatgtttgagggcc

SEQ ID NO: 3031951 - DNA, 25 bp, Homo sapien
caggcctagcctgcatttggcatag

SEQ ID NO: 3031952 - DNA, 25 bp, Homo sapien
ttagcttcgtggacagaggtcagct

SEQ ID NO: 3031953 - DNA, 25 bp, Homo sapien
cccttccggtcagtgctttcttggt

SEQ ID NO: 3031954 - DNA, 25 bp, Homo sapien
gatgcaggcgcctgcactctccctt

SEQ ID NO: 3031955 - DNA, 25 bp, Homo sapien
gagctcctcccggatgtcaccgaaa

SEQ ID NO: 3031956 - DNA, 25 bp, Homo sapien
tctcccttccggtcagtgctttctt

SEQ ID NO: 3031957 - DNA, 25 bp, Homo sapien
ctggtagttggccagtttcgaggcc

SEQ ID NO: 3031958 - DNA, 25 bp, Homo sapien
gtagttggccagtttcgaggccgcc

SEQ ID NO: 3031959 - DNA, 25 bp, Homo sapien
ttggccagtttcgaggccgccagct

SEQ ID NO: 3031960 - DNA, 25 bp, Homo sapien
agttggccagtttcgaggccgccag

SEQ ID NO: 3031961 - DNA, 25 bp, Homo sapien
agagccagaaggcaccgaggactct

SEQ ID NO: 3031962 - DNA, 25 bp, Homo sapien
ttggcaggggagagcttgacacttc

SEQ ID NO: 3031963 - DNA, 25 bp, Homo sapien
ccagagctgagtccgaggaccccag

SEQ ID NO: 3031964 - DNA, 25 bp, Homo sapien
cccgaagccttaggggccttctcag

SEQ ID NO: 3031965 - DNA, 25 bp, Homo sapien
gggccagtgagacagccttctactc

SEQ ID NO: 3031966 - DNA, 25 bp, Homo sapien
ccagcccccaccctgcgggagagca

SEQ ID NO: 3031967 - DNA, 25 bp, Homo sapien
cagcccccaccctgcgggagagcag

SEQ ID NO: 3031968 - DNA, 25 bp, Homo sapien
gcccccaccctgcgggagagcagcc

SEQ ID NO: 3031969 - DNA, 25 bp, Homo sapien
cccaccctgcgggagagcagcccca

SEQ ID NO: 3031970 - DNA, 25 bp, Homo sapien
cccaaaggcggcagatgcttgattc

SEQ ID NO: 3031971 - DNA, 25 bp, Homo sapien
ctccccaaaggcggcagatgcttga

SEQ ID NO: 3031972 - DNA, 25 bp, Homo sapien
aggcggcagatgcttgattctcctg

SEQ ID NO: 3031973 - DNA, 25 bp, Homo sapien
caaaggcggcagatgcttgattctc

SEQ ID NO: 3031974 - DNA, 25 bp, Homo sapien
ttcccatggcgctgactggtaggca

SEQ ID NO: 3031975 - DNA, 25 bp, Homo sapien
tgatggtgccgtgcatggcagaatg

SEQ ID NO: 3031976 - DNA, 25 bp, Homo sapien
ggccaaaacacggtagcatctgtct

SEQ ID NO: 3031977 - DNA, 25 bp, Homo sapien
cctagggggtcatgaaggcttccca

SEQ ID NO: 3031978 - DNA, 25 bp, Homo sapien
ggtccaataagaggaacttagtgtc

SEQ ID NO: 3031979 - DNA, 25 bp, Homo sapien
agttcctgccatggggtccaataag

SEQ ID NO: 3031980 - DNA, 25 bp, Homo sapien
ggaacttagtgtcagtgatttcttc

SEQ ID NO: 3031981 - DNA, 25 bp, Homo sapien
tgccatggggtccaataagaggaac

SEQ ID NO: 3031982 - DNA, 25 bp, Homo sapien
caggtggcgtctgagaaaccaagca

SEQ ID NO: 3031983 - DNA, 25 bp, Homo sapien
ggtggcgtctgagaaaccaagcaac

SEQ ID NO: 3031984 - DNA, 25 bp, Homo sapien
aggtggcgtctgagaaaccaagcaa

SEQ ID NO: 3031985 - DNA, 25 bp, Homo sapien
ctgagcgcccacagtgtttagaatc

SEQ ID NO: 3031986 - DNA, 25 bp, Homo sapien
aggctttgactccacgggctgaggc

SEQ ID NO: 3031987 - DNA, 25 bp, Homo sapien
acatccacccctggatgcttcttgc

SEQ ID NO: 3031988 - DNA, 25 bp, Homo sapien
acagccagccccaaaactgagcgcc

SEQ ID NO: 3031989 - DNA, 25 bp, Homo sapien
gagcaattgatcctcactggtgttc

SEQ ID NO: 3031990 - DNA, 25 bp, Homo sapien
gaagagcaattgatcctcactggtg

SEQ ID NO: 3031991 - DNA, 25 bp, Homo sapien
aagagcaattgatcctcactggtgt

SEQ ID NO: 3031992 - DNA, 25 bp, Homo sapien
cagaagagcaattgatcctcactgg

SEQ ID NO: 3031993 - DNA, 25 bp, Homo sapien
gtagttcttgacagatgaaagggct

SEQ ID NO: 3031994 - DNA, 25 bp, Homo sapien
tagttcttgacagatgaaagggctt

SEQ ID NO: 3031995 - DNA, 25 bp, Homo sapien
ctaagcctgctctgaggggctgcag

SEQ ID NO: 3031996 - DNA, 25 bp, Homo sapien
taagcctgctctgaggggctgcagc

SEQ ID NO: 3031997 - DNA, 25 bp, Homo sapien
aagcctgctctgaggggctgcagct

SEQ ID NO: 3031998 - DNA, 25 bp, Homo sapien
gcctgctctgaggggctgcagctac

SEQ ID NO: 3031999 - DNA, 25 bp, Homo sapien
agatttttcgatggagcagaggcca

SEQ ID NO: 3032000 - DNA, 25 bp, Homo sapien
caaggcgtggataaagccggagatt

SEQ ID NO: 3032001 - DNA, 25 bp, Homo sapien
tgcccctggcagtgtctttgactgc

SEQ ID NO: 3032002 - DNA, 25 bp, Homo sapien
tgtctttgactgcaaggcgtggata

SEQ ID NO: 3032003 - DNA, 25 bp, Homo sapien
agggcatggcgcttcggacatgggc

SEQ ID NO: 3032004 - DNA, 25 bp, Homo sapien
tcgtgataaccctggtggcagtgct

SEQ ID NO: 3032005 - DNA, 25 bp, Homo sapien
tggcgcttcggacatgggcccttcc

SEQ ID NO: 3032006 - DNA, 25 bp, Homo sapien
tgctggaggccggtgaggtggtgaa

SEQ ID NO: 3032007 - DNA, 25 bp, Homo sapien
caccagataccagattttatcttca

SEQ ID NO: 3032008 - DNA, 25 bp, Homo sapien
ttttatcttcagatctggctcccat

SEQ ID NO: 3032009 - DNA, 25 bp, Homo sapien
cttcagatctggctcccataagagt

SEQ ID NO: 3032010 - DNA, 25 bp, Homo sapien
agattttatcttcagatctggctcc

SEQ ID NO: 3032011 - DNA, 25 bp, Homo sapien
ttccccagtccatggctgtgattac

SEQ ID NO: 3032012 - DNA, 25 bp, Homo sapien
aaatggagaggatgcttgaagtcct

SEQ ID NO: 3032013 - DNA, 25 bp, Homo sapien
aatggagaggatgcttgaagtcctt

SEQ ID NO: 3032014 - DNA, 25 bp, Homo sapien
atgcgctcacatgcggccacgtagg

SEQ ID NO: 3032015 - DNA, 25 bp, Homo sapien
tcctggaatgcgctcacatgcggcc

SEQ ID NO: 3032016 - DNA, 25 bp, Homo sapien
cacatgcggccacgtagggacctgg

SEQ ID NO: 3032017 - DNA, 25 bp, Homo sapien
tggaatgcgctcacatgcggccacg

SEQ ID NO: 3032018 - DNA, 25 bp, Homo sapien
ggacccaatggactgcttctctagg

SEQ ID NO: 3032019 - DNA, 25 bp, Homo sapien
tgcttttggaatcgcccatgtcccc

SEQ ID NO: 3032020 - DNA, 25 bp, Homo sapien
gtttggcttcgaggtccatggactc

SEQ ID NO: 3032021 - DNA, 25 bp, Homo sapien
gggcacactcctcggtgcttttgga

SEQ ID NO: 3032022 - DNA, 25 bp, Homo sapien
tgccgggcggcttgttcccagttcc

SEQ ID NO: 3032023 - DNA, 25 bp, Homo sapien
taaattccagccacgcgaaatttcc

SEQ ID NO: 3032024 - DNA, 25 bp, Homo sapien
gagagagggtcgttccgcactcgcc

SEQ ID NO: 3032025 - DNA, 25 bp, Homo sapien
acgcgaaatttcctgccgggcggct

SEQ ID NO: 3032026 - DNA, 25 bp, Homo sapien
tcatcttgacccctccacctgaggg

SEQ ID NO: 3032027 - DNA, 25 bp, Homo sapien
catcttgacccctccacctgaggga

SEQ ID NO: 3032028 - DNA, 25 bp, Homo sapien
gtcatcttgacccctccacctgagg

SEQ ID NO: 3032029 - DNA, 25 bp, Homo sapien
tactggagggatctttggaactgcc

SEQ ID NO: 3032030 - DNA, 25 bp, Homo sapien
aaagtctcttcctatctgagcctgt

SEQ ID NO: 3032031 - DNA, 25 bp, Homo sapien
ctttccatgaagaggctgtgggatg

SEQ ID NO: 3032032 - DNA, 25 bp, Homo sapien
ggtaatagcctactctaagcctgaa

SEQ ID NO: 3032033 - DNA, 25 bp, Homo sapien
gatagcttcctgaaacatgtgaagg

SEQ ID NO: 3032034 - DNA, 25 bp, Homo sapien
ccgagatagcttcctgaaacatgtg

SEQ ID NO: 3032035 - DNA, 25 bp, Homo sapien
gagatagcttcctgaaacatgtgaa

SEQ ID NO: 3032036 - DNA, 25 bp, Homo sapien
gccgagatagcttcctgaaacatgt

SEQ ID NO: 3032037 - DNA, 25 bp, Homo sapien
gcaaaactttctaatccgcgaggag

SEQ ID NO: 3032038 - DNA, 25 bp, Homo sapien
tgtcctcgcaggtagcagtcactcg

SEQ ID NO: 3032039 - DNA, 25 bp, Homo sapien
cactcggagcagaacggtagttagg

SEQ ID NO: 3032040 - DNA, 25 bp, Homo sapien
agccgcgtgggctgtctgtcctcgc

SEQ ID NO: 3032041 - DNA, 25 bp, Homo sapien
cctcgcccgccggagatgcggatcc

SEQ ID NO: 3032042 - DNA, 25 bp, Homo sapien
gaggcctcgcccgccggagatgcgg

SEQ ID NO: 3032043 - DNA, 25 bp, Homo sapien
gcccgccggagatgcggatccgatc

SEQ ID NO: 3032044 - DNA, 25 bp, Homo sapien
agatgcggatccgatccgcggccgc

SEQ ID NO: 3032045 - DNA, 25 bp, Homo sapien
ttaaggttttctctccggcgctctg

SEQ ID NO: 3032046 - DNA, 25 bp, Homo sapien
gatttggccacagggcgcggtgcag

SEQ ID NO: 3032047 - DNA, 25 bp, Homo sapien
cgctctggcgaagccggcaagaaag

SEQ ID NO: 3032048 - DNA, 25 bp, Homo sapien
ccacagggcgcggtgcagagttcca

SEQ ID NO: 3032049 - DNA, 25 bp, Homo sapien
tcggagattaaacctgagggtcagc

SEQ ID NO: 3032050 - DNA, 25 bp, Homo sapien
ttgtaggcgcgctcttgagctcgga

SEQ ID NO: 3032051 - DNA, 25 bp, Homo sapien
ctgagggtcagcgttgtaggcgcgc

SEQ ID NO: 3032052 - DNA, 25 bp, Homo sapien
ctttcgtcggagattaaacctgagg

SEQ ID NO: 3032053 - DNA, 25 bp, Homo sapien
tacacgcgggaatcgctgggccttc

SEQ ID NO: 3032054 - DNA, 25 bp, Homo sapien
tcaattagtacacgcgggaatcgct

SEQ ID NO: 3032055 - DNA, 25 bp, Homo sapien
acgcgggaatcgctgggccttccga

SEQ ID NO: 3032056 - DNA, 25 bp, Homo sapien
tagtacacgcgggaatcgctgggcc

SEQ ID NO: 3032057 - DNA, 25 bp, Homo sapien
aggccttccattacacccattatct

SEQ ID NO: 3032058 - DNA, 25 bp, Homo sapien
ccgtccgtggccacgcgtgggtcat

SEQ ID NO: 3032059 - DNA, 25 bp, Homo sapien
gggtcatggtcatccgacttgagct

SEQ ID NO: 3032060 - DNA, 25 bp, Homo sapien
tggcttgggcagtacgagaaaaacg

SEQ ID NO: 3032061 - DNA, 25 bp, Homo sapien
gcagtggatttagccgtggcccgca

SEQ ID NO: 3032062 - DNA, 25 bp, Homo sapien
cccaccggggaagagcgtacagcct

SEQ ID NO: 3032063 - DNA, 25 bp, Homo sapien
cagcctctggctccgagatagaggg

SEQ ID NO: 3032064 - DNA, 25 bp, Homo sapien
aatgggatcttgtggttggactttg

SEQ ID NO: 3032065 - DNA, 25 bp, Homo sapien
gatagaggggcgaccagatgtccca

SEQ ID NO: 3032066 - DNA, 25 bp, Homo sapien
aatgtactgaggactaaactgacat

SEQ ID NO: 3032067 - DNA, 25 bp, Homo sapien
tactgtaagattccaactctgtcac

SEQ ID NO: 3032068 - DNA, 25 bp, Homo sapien
gatttgccggactgtgaaactactc

SEQ ID NO: 3032069 - DNA, 25 bp, Homo sapien
cattagacatctgttcaaacccaca

SEQ ID NO: 3032070 - DNA, 25 bp, Homo sapien
catcactgtgattgcggttagggac

SEQ ID NO: 3032071 - DNA, 25 bp, Homo sapien
cagcgtggtccatgcatcagcagca

SEQ ID NO: 3032072 - DNA, 25 bp, Homo sapien
ccaatcgtaatagggtctctcagaa

SEQ ID NO: 3032073 - DNA, 25 bp, Homo sapien
gaggcccaaagtagtccaatcgtaa

SEQ ID NO: 3032074 - DNA, 25 bp, Homo sapien
ccccaattccccatagatagtggcc

SEQ ID NO: 3032075 - DNA, 25 bp, Homo sapien
caattccccatagatagtggccaac

SEQ ID NO: 3032076 - DNA, 25 bp, Homo sapien
cccaattccccatagatagtggcca

SEQ ID NO: 3032077 - DNA, 25 bp, Homo sapien
aattccccatagatagtggccaact

SEQ ID NO: 3032078 - DNA, 25 bp, Homo sapien
tacatagcttatagcacagtttggg

SEQ ID NO: 3032079 - DNA, 25 bp, Homo sapien
ggtaataatgcgttgtttgggatga

SEQ ID NO: 3032080 - DNA, 25 bp, Homo sapien
gatcctcttgtctagtattctttaa

SEQ ID NO: 3032081 - DNA, 25 bp, Homo sapien
taggagcccaatatagtgatccaga

SEQ ID NO: 3032082 - DNA, 25 bp, Homo sapien
tagggaggccagaatcctgcttgca

SEQ ID NO: 3032083 - DNA, 25 bp, Homo sapien
gggatgtctgtggtgatgtcatctc

SEQ ID NO: 3032084 - DNA, 25 bp, Homo sapien
tccagctgtgagctccagggcaatg

SEQ ID NO: 3032085 - DNA, 25 bp, Homo sapien
ccagggcaatgctgtctgggatgaa

SEQ ID NO: 3032086 - DNA, 25 bp, Homo sapien
aatgttaaggttgtagtaatccact

SEQ ID NO: 3032087 - DNA, 25 bp, Homo sapien
tttccaggcttaagcacaggcaaga

SEQ ID NO: 3032088 - DNA, 25 bp, Homo sapien
ggtcagtaagttccataatactggg

SEQ ID NO: 3032089 - DNA, 25 bp, Homo sapien
tagtaatccactgtgaagcaccatt

SEQ ID NO: 3032090 - DNA, 25 bp, Homo sapien
aaacaatggcgactccagtggccaa

SEQ ID NO: 3032091 - DNA, 25 bp, Homo sapien
gaataaaacaatggcgactccagtg

SEQ ID NO: 3032092 - DNA, 25 bp, Homo sapien
acaatggcgactccagtggccaagc

SEQ ID NO: 3032093 - DNA, 25 bp, Homo sapien
taaaacaatggcgactccagtggcc

SEQ ID NO: 3032094 - DNA, 25 bp, Homo sapien
ggaatggggtgctcaactgcttgta

SEQ ID NO: 3032095 - DNA, 25 bp, Homo sapien
gaatggggtgctcaactgcttgtac

SEQ ID NO: 3032096 - DNA, 25 bp, Homo sapien
tccctgccgcggaagaaatctttga

SEQ ID NO: 3032097 - DNA, 25 bp, Homo sapien
tgcccgaagccgaggttttgagtta

SEQ ID NO: 3032098 - DNA, 25 bp, Homo sapien
gatttgcccttggaacctagacgcc

SEQ ID NO: 3032099 - DNA, 25 bp, Homo sapien
tttcatccctggtgtctaggcctgc

SEQ ID NO: 3032100 - DNA, 25 bp, Homo sapien
cctgctgccttgtgcgggaaaccaa

SEQ ID NO: 3032101 - DNA, 25 bp, Homo sapien
tgccttgtgcgggaaaccaagatgg

SEQ ID NO: 3032102 - DNA, 25 bp, Homo sapien
tgtgcgggaaaccaagatggatcag

SEQ ID NO: 3032103 - DNA, 25 bp, Homo sapien
ttcattcatgggcaatcctgctgcc

SEQ ID NO: 3032104 - DNA, 25 bp, Homo sapien
taaaagatgtcttaggtccctacag

SEQ ID NO: 3032105 - DNA, 25 bp, Homo sapien
gtttgaacaggcagcgagccgaacc

SEQ ID NO: 3032106 - DNA, 25 bp, Homo sapien
aatactgcatagaagagggcggctc

SEQ ID NO: 3032107 - DNA, 25 bp, Homo sapien
cagtcaaacagcagaacggcatggc

SEQ ID NO: 3032108 - DNA, 25 bp, Homo sapien
gcctgcctgcttgtaacttccaggt

SEQ ID NO: 3032109 - DNA, 25 bp, Homo sapien
cccagcatcccgaaagcacattgga

SEQ ID NO: 3032110 - DNA, 25 bp, Homo sapien
aaagcacattggatggctgctggac

SEQ ID NO: 3032111 - DNA, 25 bp, Homo sapien
tcccgaaagcacattggatggctgc

SEQ ID NO: 3032112 - DNA, 25 bp, Homo sapien
gggtgtccacaggcacatccaactc

SEQ ID NO: 3032113 - DNA, 25 bp, Homo sapien
ggtgtccacaggcacatccaactcc

SEQ ID NO: 3032114 - DNA, 25 bp, Homo sapien
tccacaggcacatccaactccccat

SEQ ID NO: 3032115 - DNA, 25 bp, Homo sapien
tgtccacaggcacatccaactcccc

SEQ ID NO: 3032116 - DNA, 25 bp, Homo sapien
tgaaccacgattgcctgaagacgct

SEQ ID NO: 3032117 - DNA, 25 bp, Homo sapien
gatgaccaatgaaagcacagcgggc

SEQ ID NO: 3032118 - DNA, 25 bp, Homo sapien
tgaagacgcttttcctagggtgccc

SEQ ID NO: 3032119 - DNA, 25 bp, Homo sapien
ggagcttcaccaacctgtacacgag

SEQ ID NO: 3032120 - DNA, 25 bp, Homo sapien
tacccacaccatattggattgatgc

SEQ ID NO: 3032121 - DNA, 25 bp, Homo sapien
gcaaagtgcctgactcatagagacg

SEQ ID NO: 3032122 - DNA, 25 bp, Homo sapien
catagagacgagcagaaaatatttg

SEQ ID NO: 3032123 - DNA, 25 bp, Homo sapien
taaatttgacatacagtacccacac

SEQ ID NO: 3032124 - DNA, 25 bp, Homo sapien
gaggtgaggattacccctggccatg

SEQ ID NO: 3032125 - DNA, 25 bp, Homo sapien
ccatggaacactctagcggaggaga

SEQ ID NO: 3032126 - DNA, 25 bp, Homo sapien
aaattgtttgaggtgctctggaccc

SEQ ID NO: 3032127 - DNA, 25 bp, Homo sapien
tctaccataagaggagcaacccagg

SEQ ID NO: 3032128 - DNA, 25 bp, Homo sapien
tttaacggacacaacttcaggaagc

SEQ ID NO: 3032129 - DNA, 25 bp, Homo sapien
ttaacggacacaacttcaggaagct

SEQ ID NO: 3032130 - DNA, 25 bp, Homo sapien
tgtgagtgagaccagatccaggact

SEQ ID NO: 3032131 - DNA, 25 bp, Homo sapien
gaacctgggctgtatgcaaacatcc

SEQ ID NO: 3032132 - DNA, 25 bp, Homo sapien
gaacaccagcagagtttcagcatga

SEQ ID NO: 3032133 - DNA, 25 bp, Homo sapien
tgatggaccaccgaactgaacctgg

SEQ ID NO: 3032134 - DNA, 25 bp, Homo sapien
atggagcatgcagaccccgagttcc

SEQ ID NO: 3032135 - DNA, 25 bp, Homo sapien
gacccggcatgagctcaaaggagag

SEQ ID NO: 3032136 - DNA, 25 bp, Homo sapien
caggtgtgacactagcagaatttgc

SEQ ID NO: 3032137 - DNA, 25 bp, Homo sapien
tgcaggcaccgtaagaagccagtgg

SEQ ID NO: 3032138 - DNA, 25 bp, Homo sapien
agttccacggaaaatgaagaccctg

SEQ ID NO: 3032139 - DNA, 25 bp, Homo sapien
agttccatggagcacaaaggccctg

SEQ ID NO: 3032140 - DNA, 25 bp, Homo sapien
acgagatgatgcaggagatcggcca

SEQ ID NO: 3032141 - DNA, 25 bp, Homo sapien
cactcaaaagcatgctgggcggaag

SEQ ID NO: 3032142 - DNA, 25 bp, Homo sapien
ctgggcaaagcttcagagactggat

SEQ ID NO: 3032143 - DNA, 25 bp, Homo sapien
caaagcttcagagactggatgattt

SEQ ID NO: 3032144 - DNA, 25 bp, Homo sapien
gatgattttttctggggcacttctc

SEQ ID NO: 3032145 - DNA, 25 bp, Homo sapien
tttctttcatgtttgtggggcaggg

SEQ ID NO: 3032146 - DNA, 25 bp, Homo sapien
aaatgtatgaacaaaccatggtgca

SEQ ID NO: 3032147 - DNA, 25 bp, Homo sapien
tactattatgatagcccaaaacagg

SEQ ID NO: 3032148 - DNA, 25 bp, Homo sapien
tggcaacgacagcacaaaggatagg

SEQ ID NO: 3032149 - DNA, 25 bp, Homo sapien
tgcacactgtaatccttggaggaac

SEQ ID NO: 3032150 - DNA, 25 bp, Homo sapien
cctgggaccccgctgtcctctgatc

SEQ ID NO: 3032151 - DNA, 25 bp, Homo sapien
ctcctgggaccccgctgtcctctga

SEQ ID NO: 3032152 - DNA, 25 bp, Homo sapien
tcctgggaccccgctgtcctctgat

SEQ ID NO: 3032153 - DNA, 25 bp, Homo sapien
ctgggaccccgctgtcctctgatct

SEQ ID NO: 3032154 - DNA, 25 bp, Homo sapien
tctatatcagcaacaccatatgcag

SEQ ID NO: 3032155 - DNA, 25 bp, Homo sapien
tatcagcaacaccatatgcaggcca

SEQ ID NO: 3032156 - DNA, 25 bp, Homo sapien
tatatcagcaacaccatatgcaggc

SEQ ID NO: 3032157 - DNA, 25 bp, Homo sapien
tcagcaacaccatatgcaggccaca

SEQ ID NO: 3032158 - DNA, 25 bp, Homo sapien
gggcttccatgcacatgtccacacc

SEQ ID NO: 3032159 - DNA, 25 bp, Homo sapien
cacaccacccgtgcacccacttcct

SEQ ID NO: 3032160 - DNA, 25 bp, Homo sapien
tgtgggcttccatgcacatgtccac

SEQ ID NO: 3032161 - DNA, 25 bp, Homo sapien
ccacaccacccgtgcacccacttcc

SEQ ID NO: 3032162 - DNA, 25 bp, Homo sapien
agcctggacaatagagtgagacccc

SEQ ID NO: 3032163 - DNA, 25 bp, Homo sapien
cctggacaatagagtgagaccccat

SEQ ID NO: 3032164 - DNA, 25 bp, Homo sapien
accagcctggacaatagagtgagac

SEQ ID NO: 3032165 - DNA, 25 bp, Homo sapien
ccagcctggacaatagagtgagacc

SEQ ID NO: 3032166 - DNA, 25 bp, Homo sapien
gctttggtcggattgtgcaaactgt

SEQ ID NO: 3032167 - DNA, 25 bp, Homo sapien
cagagctttggtcggattgtgcaaa

SEQ ID NO: 3032168 - DNA, 25 bp, Homo sapien
atgacagagctttggtcggattgtg

SEQ ID NO: 3032169 - DNA, 25 bp, Homo sapien
ttggtcggattgtgcaaactgttgt

SEQ ID NO: 3032170 - DNA, 25 bp, Homo sapien
gaaatgaagttgtctggctccgagt

SEQ ID NO: 3032171 - DNA, 25 bp, Homo sapien
aagttgtctggctccgagtccttac

SEQ ID NO: 3032172 - DNA, 25 bp, Homo sapien
caggaaatgaagttgtctggctccg

SEQ ID NO: 3032173 - DNA, 25 bp, Homo sapien
gcccaggtgacaggaaatgaagttg

SEQ ID NO: 3032174 - DNA, 25 bp, Homo sapien
tgtaagccatcaccgatggatttgt

SEQ ID NO: 3032175 - DNA, 25 bp, Homo sapien
ttgatcttgtaagccatcaccgatg

SEQ ID NO: 3032176 - DNA, 25 bp, Homo sapien
aggttgatcttgtaagccatcaccg

SEQ ID NO: 3032177 - DNA, 25 bp, Homo sapien
tcttgtaagccatcaccgatggatt

SEQ ID NO: 3032178 - DNA, 25 bp, Homo sapien
ccaaatctggtagtaaaatgggtgc

SEQ ID NO: 3032179 - DNA, 25 bp, Homo sapien
gaaagctgtggcacggatattctgc

SEQ ID NO: 3032180 - DNA, 25 bp, Homo sapien
gctgctttgctcgtctctgcacaga

SEQ ID NO: 3032181 - DNA, 25 bp, Homo sapien
cttaacttcgttccttccaaatctg

SEQ ID NO: 3032182 - DNA, 25 bp, Homo sapien
gcagccacgaagtacaggacgtcat

SEQ ID NO: 3032183 - DNA, 25 bp, Homo sapien
gaagtacaggacgtcatcagaatgg

SEQ ID NO: 3032184 - DNA, 25 bp, Homo sapien
ggaaaagcgatccagatggtcccgc

SEQ ID NO: 3032185 - DNA, 25 bp, Homo sapien
catcagaatggaaaagcgatccaga

SEQ ID NO: 3032186 - DNA, 25 bp, Homo sapien
ctgtgttcttgcagccgagaggccc

SEQ ID NO: 3032187 - DNA, 25 bp, Homo sapien
cggggctcgggactgtgttcttgca

SEQ ID NO: 3032188 - DNA, 25 bp, Homo sapien
gtgatcacacgtgcggccaagcttc

SEQ ID NO: 3032189 - DNA, 25 bp, Homo sapien
ttctcccattatgccgggcgcgtag

SEQ ID NO: 3032190 - DNA, 25 bp, Homo sapien
cgtaagggtgatcacacgtgcggcc

SEQ ID NO: 3032191 - DNA, 25 bp, Homo sapien
ttttctcccattatgccgggcgcgt

SEQ ID NO: 3032192 - DNA, 25 bp, Homo sapien
accggtgcgggcgttcagtcagccc

SEQ ID NO: 3032193 - DNA, 25 bp, Homo sapien
gtaaactcacgacttcagacacccg

SEQ ID NO: 3032194 - DNA, 25 bp, Homo sapien
caggttcccagtgatcgctatgttc

SEQ ID NO: 3032195 - DNA, 25 bp, Homo sapien
gaaaggagtctctacttccaggttc

SEQ ID NO: 3032196 - DNA, 25 bp, Homo sapien
gacattcccgccctggtccaggagg

SEQ ID NO: 3032197 - DNA, 25 bp, Homo sapien
ggacattcccgccctggtccaggag

SEQ ID NO: 3032198 - DNA, 25 bp, Homo sapien
acattcccgccctggtccaggaggc

SEQ ID NO: 3032199 - DNA, 25 bp, Homo sapien
tcctctgtgaagtgatcgactctgg

SEQ ID NO: 3032200 - DNA, 25 bp, Homo sapien
gctcctctgtgaagtgatcgactct

SEQ ID NO: 3032201 - DNA, 25 bp, Homo sapien
gtgaagtgatcgactctggtgctga

SEQ ID NO: 3032202 - DNA, 25 bp, Homo sapien
tctgtgaagtgatcgactctggtgc

SEQ ID NO: 3032203 - DNA, 25 bp, Homo sapien
acgatgctgaggcttcaatatttaa

SEQ ID NO: 3032204 - DNA, 25 bp, Homo sapien
caagattaaggacaagttggaagga

SEQ ID NO: 3032205 - DNA, 25 bp, Homo sapien
aagacgatgctgaggcttcaatatt

SEQ ID NO: 3032206 - DNA, 25 bp, Homo sapien
ccaagattaaggacaagttggaagg

SEQ ID NO: 3032207 - DNA, 25 bp, Homo sapien
tattgtttcattctggaagggcagg

SEQ ID NO: 3032208 - DNA, 25 bp, Homo sapien
ttcactctggaatccctatggctga

SEQ ID NO: 3032209 - DNA, 25 bp, Homo sapien
tatcaggaagataaagcctccaggt

SEQ ID NO: 3032210 - DNA, 25 bp, Homo sapien
gaccaatgggccatgacacagccct

SEQ ID NO: 3032211 - DNA, 25 bp, Homo sapien
tgcgttgagctactataatcttggt

SEQ ID NO: 3032212 - DNA, 25 bp, Homo sapien
gcttggccatgaggtatctttatcc

SEQ ID NO: 3032213 - DNA, 25 bp, Homo sapien
taggcacttgtgtaccctcgttgat

SEQ ID NO: 3032214 - DNA, 25 bp, Homo sapien
aaaaggtgccacgtaatagctgaga

SEQ ID NO: 3032215 - DNA, 25 bp, Homo sapien
gtcatcagacctgcgcaatccagca

SEQ ID NO: 3032216 - DNA, 25 bp, Homo sapien
catcagacctgcgcaatccagcaga

SEQ ID NO: 3032217 - DNA, 25 bp, Homo sapien
cagacctgcgcaatccagcagaaac

SEQ ID NO: 3032218 - DNA, 25 bp, Homo sapien
gtcatgacacgaatctccaggaatt

SEQ ID NO: 3032219 - DNA, 25 bp, Homo sapien
ccggacaatgtgctaccgtggggct

SEQ ID NO: 3032220 - DNA, 25 bp, Homo sapien
gacaatgtgctaccgtggggctttt

SEQ ID NO: 3032221 - DNA, 25 bp, Homo sapien
tcatttcgcagagaagaggcgtgga

SEQ ID NO: 3032222 - DNA, 25 bp, Homo sapien
atgtgctaccgtggggcttttgtcc

SEQ ID NO: 3032223 - DNA, 25 bp, Homo sapien
tggcatccggagacgctcctgtgga

SEQ ID NO: 3032224 - DNA, 25 bp, Homo sapien
tggtcggcccatttcaggtcctggc

SEQ ID NO: 3032225 - DNA, 25 bp, Homo sapien
ggatgccgcgctgcttccccggcct

SEQ ID NO: 3032226 - DNA, 25 bp, Homo sapien
gccaagccccagggagtggtttcta

SEQ ID NO: 3032227 - DNA, 25 bp, Homo sapien
cagctggccccggagtagaacagat

SEQ ID NO: 3032228 - DNA, 25 bp, Homo sapien
gccccggagtagaacagatgggtct

SEQ ID NO: 3032229 - DNA, 25 bp, Homo sapien
cacagtgactttgggctgcccttgg

SEQ ID NO: 3032230 - DNA, 25 bp, Homo sapien
ggagtagaacagatgggtctgtcct

SEQ ID NO: 3032231 - DNA, 25 bp, Homo sapien
ctgccctctcctagggagccaggaa

SEQ ID NO: 3032232 - DNA, 25 bp, Homo sapien
tgttgtctacactctcgatctgcat

SEQ ID NO: 3032233 - DNA, 25 bp, Homo sapien
tgcctgttgtctacactctcgatct

SEQ ID NO: 3032234 - DNA, 25 bp, Homo sapien
ctctccccttctgcctgttgtctac

SEQ ID NO: 3032235 - DNA, 25 bp, Homo sapien
tctacactctcgatctgcatcctca

SEQ ID NO: 3032236 - DNA, 25 bp, Homo sapien
tactatggcctttatctaacttgac

SEQ ID NO: 3032237 - DNA, 25 bp, Homo sapien
tggtggccacattggataagtgtac

SEQ ID NO: 3032238 - DNA, 25 bp, Homo sapien
caggcaggcccggtgtttcctccat

SEQ ID NO: 3032239 - DNA, 25 bp, Homo sapien
tcactcctgacccactgtcctctgc

SEQ ID NO: 3032240 - DNA, 25 bp, Homo sapien
tcttggtctgccctcatgctttgtg

SEQ ID NO: 3032241 - DNA, 25 bp, Homo sapien
gaaggcgattttctctgctcgagct

SEQ ID NO: 3032242 - DNA, 25 bp, Homo sapien
tggtttcttggtctgccctcatgct

SEQ ID NO: 3032243 - DNA, 25 bp, Homo sapien
tctgctcgagctggattgcacggta

SEQ ID NO: 3032244 - DNA, 25 bp, Homo sapien
ctgaggagactttggcagacgagaa

SEQ ID NO: 3032245 - DNA, 25 bp, Homo sapien
tctggatgtttatgttggatggcac

SEQ ID NO: 3032246 - DNA, 25 bp, Homo sapien
ttgtacctctcttccatgtaccagc

SEQ ID NO: 3032247 - DNA, 25 bp, Homo sapien
gccagaagggctggatcttgtacct

SEQ ID NO: 3032248 - DNA, 25 bp, Homo sapien
ctgaatagagccagaagggctggat

SEQ ID NO: 3032249 - DNA, 25 bp, Homo sapien
aagggctggatcttgtacctctctt

SEQ ID NO: 3032250 - DNA, 25 bp, Homo sapien
ctcacaaggacatgtcagtttcact

SEQ ID NO: 3032251 - DNA, 25 bp, Homo sapien
tgtctcgggcagcaactgtgttggc

SEQ ID NO: 3032252 - DNA, 25 bp, Homo sapien
gtttcacttgagattaggccccggc

SEQ ID NO: 3032253 - DNA, 25 bp, Homo sapien
ggatgttcctcagtcctcacaagga

SEQ ID NO: 3032254 - DNA, 25 bp, Homo sapien
tcaggccctaggtggaaactcaggt

SEQ ID NO: 3032255 - DNA, 25 bp, Homo sapien
aggtgcacatcacgctccaagtgga

SEQ ID NO: 3032256 - DNA, 25 bp, Homo sapien
caggccccatggtgatacccaggtt

SEQ ID NO: 3032257 - DNA, 25 bp, Homo sapien
tggataccagaacctgggtggacac

SEQ ID NO: 3032258 - DNA, 25 bp, Homo sapien
cacaagtatctgtgttcatctgagt

SEQ ID NO: 3032259 - DNA, 25 bp, Homo sapien
ctgagtctgtaattacgtagctgac

SEQ ID NO: 3032260 - DNA, 25 bp, Homo sapien
aagtatctgtgttcatctgagtctg

SEQ ID NO: 3032261 - DNA, 25 bp, Homo sapien
agtctgtaattacgtagctgactct

SEQ ID NO: 3032262 - DNA, 25 bp, Homo sapien
gaacctggccatcagtgattctgaa

SEQ ID NO: 3032263 - DNA, 25 bp, Homo sapien
acctggagttctggccttgaaaatc

SEQ ID NO: 3032264 - DNA, 25 bp, Homo sapien
cagtcttgaggagtgaacctggcca

SEQ ID NO: 3032265 - DNA, 25 bp, Homo sapien
gtgcttggcccctgtacaattttaa

SEQ ID NO: 3032266 - DNA, 25 bp, Homo sapien
cgcacggagacggtgtctatgtaag

SEQ ID NO: 3032267 - DNA, 25 bp, Homo sapien
cagtggcgcacggagacggtgtcta

SEQ ID NO: 3032268 - DNA, 25 bp, Homo sapien
tgtaagaagtgataacgcaacacac

SEQ ID NO: 3032269 - DNA, 25 bp, Homo sapien
atgtaagaagtgataacgcaacaca

SEQ ID NO: 3032270 - DNA, 25 bp, Homo sapien
gattcgcagcatcctcgtatccgct

SEQ ID NO: 3032271 - DNA, 25 bp, Homo sapien
tcaggcacgactggctttgttgggt

SEQ ID NO: 3032272 - DNA, 25 bp, Homo sapien
gtatccgctaacaggtactggccca

SEQ ID NO: 3032273 - DNA, 25 bp, Homo sapien
tcctgtggctggacgtgattcgcag

SEQ ID NO: 3032274 - DNA, 25 bp, Homo sapien
gcgacacccggcctttctgggagag

SEQ ID NO: 3032275 - DNA, 25 bp, Homo sapien
cacccggcctttctgggagagtggg

SEQ ID NO: 3032276 - DNA, 25 bp, Homo sapien
cgacacccggcctttctgggagagt

SEQ ID NO: 3032277 - DNA, 25 bp, Homo sapien
gacacccggcctttctgggagagtg

SEQ ID NO: 3032278 - DNA, 25 bp, Homo sapien
acaggtagtggagaaagttgtggac

SEQ ID NO: 3032279 - DNA, 25 bp, Homo sapien
tttgaggcaggttggagttcggtca

SEQ ID NO: 3032280 - DNA, 25 bp, Homo sapien
cgcttggttagagagcgctctggat

SEQ ID NO: 3032281 - DNA, 25 bp, Homo sapien
taacaccgtgcttaggtttgaggca

SEQ ID NO: 3032282 - DNA, 25 bp, Homo sapien
ttgagtgacgaattttgtattaagt

SEQ ID NO: 3032283 - DNA, 25 bp, Homo sapien
ttgtattaagtgacttagcctcata

SEQ ID NO: 3032284 - DNA, 25 bp, Homo sapien
tattaagtgacttagcctcataaaa

SEQ ID NO: 3032285 - DNA, 25 bp, Homo sapien
tgagtgacgaattttgtattaagtg

SEQ ID NO: 3032286 - DNA, 25 bp, Homo sapien
tctgggacttcctagagaggccttt

SEQ ID NO: 3032287 - DNA, 25 bp, Homo sapien
tgaatgggataaaaccctggacgcc

SEQ ID NO: 3032288 - DNA, 25 bp, Homo sapien
tctactttggccacgatgacatggc

SEQ ID NO: 3032289 - DNA, 25 bp, Homo sapien
tgggttctgctgacacagacgtcac

SEQ ID NO: 3032290 - DNA, 25 bp, Homo sapien
ccaaagtctggccaccctcaagcat

SEQ ID NO: 3032291 - DNA, 25 bp, Homo sapien
ggagccgggccaggcaactgtcttt

SEQ ID NO: 3032292 - DNA, 25 bp, Homo sapien
ccaggcaactgtcttttccaaagtc

SEQ ID NO: 3032293 - DNA, 25 bp, Homo sapien
gctggccacctggagccgggccagg

SEQ ID NO: 3032294 - DNA, 25 bp, Homo sapien
tctctgaaatgtcccattgtagatt

SEQ ID NO: 3032295 - DNA, 25 bp, Homo sapien
ttttctgtagacttcaatggtctct

SEQ ID NO: 3032296 - DNA, 25 bp, Homo sapien
tggttttcaaggcgaaatattcagt

SEQ ID NO: 3032297 - DNA, 25 bp, Homo sapien
gtagacttcaatggtctctgaaatg

SEQ ID NO: 3032298 - DNA, 25 bp, Homo sapien
tcagagatagcttctttatagtttc

SEQ ID NO: 3032299 - DNA, 25 bp, Homo sapien
cagagatagcttctttatagtttct

SEQ ID NO: 3032300 - DNA, 25 bp, Homo sapien
tataggcttttataggtgtgaaaca

SEQ ID NO: 3032301 - DNA, 25 bp, Homo sapien
tcagtataggcctcaatttggtccg

SEQ ID NO: 3032302 - DNA, 25 bp, Homo sapien
tgcagaggtttaaatttgtgacatg

SEQ ID NO: 3032303 - DNA, 25 bp, Homo sapien
taccctagtagattgtagaaaaaga

SEQ ID NO: 3032304 - DNA, 25 bp, Homo sapien
atcaaaagaaaagttcaactggtga

SEQ ID NO: 3032305 - DNA, 25 bp, Homo sapien
aaagaaaagttcaactggtgagatg

SEQ ID NO: 3032306 - DNA, 25 bp, Homo sapien
gaaaagttcaactggtgagatgaaa

SEQ ID NO: 3032307 - DNA, 25 bp, Homo sapien
ctggtgagatgaaatcacacatcac

SEQ ID NO: 3032308 - DNA, 25 bp, Homo sapien
tgagattaatccaaacctcgcaaag

SEQ ID NO: 3032309 - DNA, 25 bp, Homo sapien
ggattttcagtataggcttcaatgg

SEQ ID NO: 3032310 - DNA, 25 bp, Homo sapien
tatttggattttcagtataggcttc

SEQ ID NO: 3032311 - DNA, 25 bp, Homo sapien
taatccaaacctcgcaaagcatttt

SEQ ID NO: 3032312 - DNA, 25 bp, Homo sapien
ttcttcattataggccccaagagct

SEQ ID NO: 3032313 - DNA, 25 bp, Homo sapien
aacaaaggtttaactgtcagatgaa

SEQ ID NO: 3032314 - DNA, 25 bp, Homo sapien
caagagctccaaaatgtcttagagt

SEQ ID NO: 3032315 - DNA, 25 bp, Homo sapien
cttgtttcaagttttcatcgcagga

SEQ ID NO: 3032316 - DNA, 25 bp, Homo sapien
tatagtttttattatgggacatttg

SEQ ID NO: 3032317 - DNA, 25 bp, Homo sapien
atagtttttattatgggacatttgg

SEQ ID NO: 3032318 - DNA, 25 bp, Homo sapien
ggacatttggttttttactatatgc

SEQ ID NO: 3032319 - DNA, 25 bp, Homo sapien
tactatatgcctcaatgggctccaa

SEQ ID NO: 3032320 - DNA, 25 bp, Homo sapien
ttcattgtgaaacaatcagtgtttc

SEQ ID NO: 3032321 - DNA, 25 bp, Homo sapien
cattgtgaaacaatcagtgtttcac

SEQ ID NO: 3032322 - DNA, 25 bp, Homo sapien
agttttcattgtgaaacaatcagtg

SEQ ID NO: 3032323 - DNA, 25 bp, Homo sapien
cattttcctagataacgttttcagt

SEQ ID NO: 3032324 - DNA, 25 bp, Homo sapien
ccgattcctgaacgcagcctctttc

SEQ ID NO: 3032325 - DNA, 25 bp, Homo sapien
attcctgaacgcagcctctttcggg

SEQ ID NO: 3032326 - DNA, 25 bp, Homo sapien
gattcctgaacgcagcctctttcgg

SEQ ID NO: 3032327 - DNA, 25 bp, Homo sapien
ttcctgaacgcagcctctttcggga

SEQ ID NO: 3032328 - DNA, 25 bp, Homo sapien
ctccttctccagcgggacccgacct

SEQ ID NO: 3032329 - DNA, 25 bp, Homo sapien
cttctccagcgggacccgaccttgg

SEQ ID NO: 3032330 - DNA, 25 bp, Homo sapien
tctccagcgggacccgaccttggag

SEQ ID NO: 3032331 - DNA, 25 bp, Homo sapien
ccagcgggacccgaccttggagacg

SEQ ID NO: 3032332 - DNA, 25 bp, Homo sapien
tggattatcgtaggcagcctttttc

SEQ ID NO: 3032333 - DNA, 25 bp, Homo sapien
cctctgtttaagcaggctaacagct

SEQ ID NO: 3032334 - DNA, 25 bp, Homo sapien
tttcctctgtttaagcaggctaaca

SEQ ID NO: 3032335 - DNA, 25 bp, Homo sapien
cagtggattatcgtaggcagccttt

SEQ ID NO: 3032336 - DNA, 25 bp, Homo sapien
gacaacagagacgacccgagggggc

SEQ ID NO: 3032337 - DNA, 25 bp, Homo sapien
acccgacaacagagacgacccgagg

SEQ ID NO: 3032338 - DNA, 25 bp, Homo sapien
ggacccgacaacagagacgacccga

SEQ ID NO: 3032339 - DNA, 25 bp, Homo sapien
ccgacaacagagacgacccgagggg

SEQ ID NO: 3032340 - DNA, 25 bp, Homo sapien
gtcccgcaatgggttatggaaggca

SEQ ID NO: 3032341 - DNA, 25 bp, Homo sapien
aaggcagcctttctcccgataccag

SEQ ID NO: 3032342 - DNA, 25 bp, Homo sapien
aatgggttatggaaggcagcctttc

SEQ ID NO: 3032343 - DNA, 25 bp, Homo sapien
ttctcccgataccaggccgtctctg

SEQ ID NO: 3032344 - DNA, 25 bp, Homo sapien
cttagctgggaaggagaccaccgtg

SEQ ID NO: 3032345 - DNA, 25 bp, Homo sapien
tgacaaatccctgcggcttagctgg

SEQ ID NO: 3032346 - DNA, 25 bp, Homo sapien
caaaggcggtggactctcgcctgtc

SEQ ID NO: 3032347 - DNA, 25 bp, Homo sapien
gaccaccgtggaggtgcaaaggcgg

SEQ ID NO: 3032348 - DNA, 25 bp, Homo sapien
ggctgtgggactctgtgtcctttgt

SEQ ID NO: 3032349 - DNA, 25 bp, Homo sapien
tgtgtcctttgtgtttccgtggttc

SEQ ID NO: 3032350 - DNA, 25 bp, Homo sapien
ctgtgtcctttgtgtttccgtggtt

SEQ ID NO: 3032351 - DNA, 25 bp, Homo sapien
tctgtgtcctttgtgtttccgtggt

SEQ ID NO: 3032352 - DNA, 25 bp, Homo sapien
cactgctcccttgtattgggattac

SEQ ID NO: 3032353 - DNA, 25 bp, Homo sapien
caggtgcctcccatcgtgaggagga

SEQ ID NO: 3032354 - DNA, 25 bp, Homo sapien
ctcccatcgtgaggaggacactgct

SEQ ID NO: 3032355 - DNA, 25 bp, Homo sapien
tcggattgggtttccagccaagcag

SEQ ID NO: 3032356 - DNA, 25 bp, Homo sapien
aggcagtccacacgtagctcagtgc

SEQ ID NO: 3032357 - DNA, 25 bp, Homo sapien
ctcgcattcccttcattacacaggc

SEQ ID NO: 3032358 - DNA, 25 bp, Homo sapien
acacgtagctcagtgcccagttggg

SEQ ID NO: 3032359 - DNA, 25 bp, Homo sapien
cagggaacagttggagcacaaactt

SEQ ID NO: 3032360 - DNA, 25 bp, Homo sapien
tggagggagtaccaagaccacagag

SEQ ID NO: 3032361 - DNA, 25 bp, Homo sapien
tgaaggccatgtggataaccgcctg

SEQ ID NO: 3032362 - DNA, 25 bp, Homo sapien
cctgaccatgaggtagtagatgcca

SEQ ID NO: 3032363 - DNA, 25 bp, Homo sapien
gaactgttgattgttgacgagtccc

SEQ ID NO: 3032364 - DNA, 25 bp, Homo sapien
tgggaagccagtggcagcccctgca

SEQ ID NO: 3032365 - DNA, 25 bp, Homo sapien
cagtggcagcccctgcagcatgcac

SEQ ID NO: 3032366 - DNA, 25 bp, Homo sapien
agcccctcctgggaagccagtggca

SEQ ID NO: 3032367 - DNA, 25 bp, Homo sapien
ctgcatggtgcagcccctcctggga

SEQ ID NO: 3032368 - DNA, 25 bp, Homo sapien
gagttggatgcagaactcgcagcca

SEQ ID NO: 3032369 - DNA, 25 bp, Homo sapien
ggatgcagaactcgcagccagaggc

SEQ ID NO: 3032370 - DNA, 25 bp, Homo sapien
gcttgcctttggtgagttggatgca

SEQ ID NO: 3032371 - DNA, 25 bp, Homo sapien
agctgctcctgctccgcaggtgggg

SEQ ID NO: 3032372 - DNA, 25 bp, Homo sapien
tgccctcacagcccttgaggttgag

SEQ ID NO: 3032373 - DNA, 25 bp, Homo sapien
agaaatgccctcacagcccttgagg

SEQ ID NO: 3032374 - DNA, 25 bp, Homo sapien
ctaacaccagaaatgccctcacagc

SEQ ID NO: 3032375 - DNA, 25 bp, Homo sapien
aacaccagaaatgccctcacagccc

SEQ ID NO: 3032376 - DNA, 25 bp, Homo sapien
tcgtccggttccttctagtctcagg

SEQ ID NO: 3032377 - DNA, 25 bp, Homo sapien
aggtgtgtcacagaacacgggcttc

SEQ ID NO: 3032378 - DNA, 25 bp, Homo sapien
cagcctgattccataggattgcaga

SEQ ID NO: 3032379 - DNA, 25 bp, Homo sapien
tctgtggatatctagccctccagct

SEQ ID NO: 3032380 - DNA, 25 bp, Homo sapien
ggggctggaggcaagtgagccccac

SEQ ID NO: 3032381 - DNA, 25 bp, Homo sapien
acgccgggcactgtggaggctgtag

SEQ ID NO: 3032382 - DNA, 25 bp, Homo sapien
ggccagatccgggacgccgggcact

SEQ ID NO: 3032383 - DNA, 25 bp, Homo sapien
cgggacgccgggcactgtggaggct

SEQ ID NO: 3032384 - DNA, 25 bp, Homo sapien
ccagatccgggacgccgggcactgt

SEQ ID NO: 3032385 - DNA, 25 bp, Homo sapien
cctctgagtgttgaagagaagtatg

SEQ ID NO: 3032386 - DNA, 25 bp, Homo sapien
aagagaagtatgaaaatttgctcca

SEQ ID NO: 3032387 - DNA, 25 bp, Homo sapien
gagaagtatgaaaatttgctccaca

SEQ ID NO: 3032388 - DNA, 25 bp, Homo sapien
aagtattcctctgagtgttgaagag

SEQ ID NO: 3032389 - DNA, 25 bp, Homo sapien
cctgagagatgtaaattatcttccc

SEQ ID NO: 3032390 - DNA, 25 bp, Homo sapien
taaatcagacttcctaataacccac

SEQ ID NO: 3032391 - DNA, 25 bp, Homo sapien
cttggtatgaagtaactgatcctga

SEQ ID NO: 3032392 - DNA, 25 bp, Homo sapien
cagacttcctaataacccacgtata

SEQ ID NO: 3032393 - DNA, 25 bp, Homo sapien
gagaaatcagggacaagtgggcacc

SEQ ID NO: 3032394 - DNA, 25 bp, Homo sapien
tcaggccccagttggacagtaggcc

SEQ ID NO: 3032395 - DNA, 25 bp, Homo sapien
ggatacctacgaccctagtgacctc

SEQ ID NO: 3032396 - DNA, 25 bp, Homo sapien
ccaggcctcagagggatacctacga

SEQ ID NO: 3032397 - DNA, 25 bp, Homo sapien
gggcaaccccactgggcactgtggc

SEQ ID NO: 3032398 - DNA, 25 bp, Homo sapien
ctaagagctagggtgggcaacccca

SEQ ID NO: 3032399 - DNA, 25 bp, Homo sapien
ggcctgccatgtctccttgttcagc

SEQ ID NO: 3032400 - DNA, 25 bp, Homo sapien
gccatgtctccttgttcagctgcca

SEQ ID NO: 3032401 - DNA, 25 bp, Homo sapien
catctgcaggtggtttaagtgtgaa

SEQ ID NO: 3032402 - DNA, 25 bp, Homo sapien
ctctcatctgcaggtggtttaagtg

SEQ ID NO: 3032403 - DNA, 25 bp, Homo sapien
tactctcatctgcaggtggtttaag

SEQ ID NO: 3032404 - DNA, 25 bp, Homo sapien
ctcatctgcaggtggtttaagtgtg

SEQ ID NO: 3032405 - DNA, 25 bp, Homo sapien
ctgtgccctcccagtgaggcaccca

SEQ ID NO: 3032406 - DNA, 25 bp, Homo sapien
gtgccctcccagtgaggcacccaag

SEQ ID NO: 3032407 - DNA, 25 bp, Homo sapien
tgtgccctcccagtgaggcacccaa

SEQ ID NO: 3032408 - DNA, 25 bp, Homo sapien
cttagggcacaccccttcacagggc

SEQ ID NO: 3032409 - DNA, 25 bp, Homo sapien
caccccttcacagggccacataggc

SEQ ID NO: 3032410 - DNA, 25 bp, Homo sapien
cagggccacataggccccagtcctc

SEQ ID NO: 3032411 - DNA, 25 bp, Homo sapien
acagggccacataggccccagtcct

SEQ ID NO: 3032412 - DNA, 25 bp, Homo sapien
caggcatctgttgagaactggccca

SEQ ID NO: 3032413 - DNA, 25 bp, Homo sapien
ggcatctgttgagaactggcccaat

SEQ ID NO: 3032414 - DNA, 25 bp, Homo sapien
ctgttgagaactggcccaatgttgg

SEQ ID NO: 3032415 - DNA, 25 bp, Homo sapien
catctgttgagaactggcccaatgt

SEQ ID NO: 3032416 - DNA, 25 bp, Homo sapien
tcctgtccttccctaagggtctcag

SEQ ID NO: 3032417 - DNA, 25 bp, Homo sapien
ccttccctaagggtctcaggttctg

SEQ ID NO: 3032418 - DNA, 25 bp, Homo sapien
ttccctaagggtctcaggttctgag

SEQ ID NO: 3032419 - DNA, 25 bp, Homo sapien
ctgtccttccctaagggtctcaggt

SEQ ID NO: 3032420 - DNA, 25 bp, Homo sapien
gcagaaggagatactaacgctggcc

SEQ ID NO: 3032421 - DNA, 25 bp, Homo sapien
cagaaggagatactaacgctggcca

SEQ ID NO: 3032422 - DNA, 25 bp, Homo sapien
agaaggagatactaacgctggccat

SEQ ID NO: 3032423 - DNA, 25 bp, Homo sapien
ctgcagaaggagatactaacgctgg

SEQ ID NO: 3032424 - DNA, 25 bp, Homo sapien
ccgtttgtgtatgggcccttcccag

SEQ ID NO: 3032425 - DNA, 25 bp, Homo sapien
gtaagcgtgatacgtcctggctgtc

SEQ ID NO: 3032426 - DNA, 25 bp, Homo sapien
tgcttctccaggaccgtttgtgtat

SEQ ID NO: 3032427 - DNA, 25 bp, Homo sapien
gaccatctccaggatacgatggcca

SEQ ID NO: 3032428 - DNA, 25 bp, Homo sapien
gtccaagaagatggctgtatgtttt

SEQ ID NO: 3032429 - DNA, 25 bp, Homo sapien
cgtccaagaagatggctgtatgttt

SEQ ID NO: 3032430 - DNA, 25 bp, Homo sapien
tccaagaagatggctgtatgttttc

SEQ ID NO: 3032431 - DNA, 25 bp, Homo sapien
caattcttgtggatatgtagggtca

SEQ ID NO: 3032432 - DNA, 25 bp, Homo sapien
gatgaggtccacagaatcaattctt

SEQ ID NO: 3032433 - DNA, 25 bp, Homo sapien
ggtcttttggatactgatgaggtcc

SEQ ID NO: 3032434 - DNA, 25 bp, Homo sapien
ttaataggtctgtgagggtaagaga

SEQ ID NO: 3032435 - DNA, 25 bp, Homo sapien
aattctttccgtaactgacgagctc

SEQ ID NO: 3032436 - DNA, 25 bp, Homo sapien
caattctttccgtaactgacgagct

SEQ ID NO: 3032437 - DNA, 25 bp, Homo sapien
acaattctttccgtaactgacgagc

SEQ ID NO: 3032438 - DNA, 25 bp, Homo sapien
cctactggagtttcccagtctgttc

SEQ ID NO: 3032439 - DNA, 25 bp, Homo sapien
cagtctgttccagacgcactctctt

SEQ ID NO: 3032440 - DNA, 25 bp, Homo sapien
tgcctactggagtttcccagtctgt

SEQ ID NO: 3032441 - DNA, 25 bp, Homo sapien
agacgcactctcttgatcctgaggg

SEQ ID NO: 3032442 - DNA, 25 bp, Homo sapien
tgttctgatagctgatgacttggct

SEQ ID NO: 3032443 - DNA, 25 bp, Homo sapien
gatagctgatgacttggctgacact

SEQ ID NO: 3032444 - DNA, 25 bp, Homo sapien
tgatagctgatgacttggctgacac

SEQ ID NO: 3032445 - DNA, 25 bp, Homo sapien
tctgatagctgatgacttggctgac

SEQ ID NO: 3032446 - DNA, 25 bp, Homo sapien
cctgaaccactttccttatatggtg

SEQ ID NO: 3032447 - DNA, 25 bp, Homo sapien
tgaaccactttccttatatggtgct

SEQ ID NO: 3032448 - DNA, 25 bp, Homo sapien
gcctgaaccactttccttatatggt

SEQ ID NO: 3032449 - DNA, 25 bp, Homo sapien
aaccactttccttatatggtgctct

SEQ ID NO: 3032450 - DNA, 25 bp, Homo sapien
gcatgagctgcctcacctatcactg

SEQ ID NO: 3032451 - DNA, 25 bp, Homo sapien
cagtagagaagaagactcactgtgt

SEQ ID NO: 3032452 - DNA, 25 bp, Homo sapien
ttttcagtagagaagaagactcact

SEQ ID NO: 3032453 - DNA, 25 bp, Homo sapien
tcagtagagaagaagactcactgtg

SEQ ID NO: 3032454 - DNA, 25 bp, Homo sapien
aaaataggctggctgagggtgctca

SEQ ID NO: 3032455 - DNA, 25 bp, Homo sapien
taggctggctgagggtgctcatgcc

SEQ ID NO: 3032456 - DNA, 25 bp, Homo sapien
aataaaataggctggctgagggtgc

SEQ ID NO: 3032457 - DNA, 25 bp, Homo sapien
aaataggctggctgagggtgctcat

SEQ ID NO: 3032458 - DNA, 25 bp, Homo sapien
tctttgtgttcccttggcactcagg

SEQ ID NO: 3032459 - DNA, 25 bp, Homo sapien
tgatcccctttctaccgggcgcatg

SEQ ID NO: 3032460 - DNA, 25 bp, Homo sapien
acatgcctccggtgacatacattca

SEQ ID NO: 3032461 - DNA, 25 bp, Homo sapien
tgctctggtatacgccagtgccagg

SEQ ID NO: 3032462 - DNA, 25 bp, Homo sapien
tctgtgcaggcctcgataacgtgag

SEQ ID NO: 3032463 - DNA, 25 bp, Homo sapien
gggatgtcttttatgtggaccggtc

SEQ ID NO: 3032464 - DNA, 25 bp, Homo sapien
ggtcctgcggccagctgtccatcgt

SEQ ID NO: 3032465 - DNA, 25 bp, Homo sapien
tatgtggaccggtctttggtgagcc

SEQ ID NO: 3032466 - DNA, 25 bp, Homo sapien
gccccacggtagcacattgtccggc

SEQ ID NO: 3032467 - DNA, 25 bp, Homo sapien
cacggtagcacattgtccggcagga

SEQ ID NO: 3032468 - DNA, 25 bp, Homo sapien
cggtagcacattgtccggcaggaga

SEQ ID NO: 3032469 - DNA, 25 bp, Homo sapien
cccacggtagcacattgtccggcag

SEQ ID NO: 3032470 - DNA, 25 bp, Homo sapien
aacaagccccgtccctggaacgctg

SEQ ID NO: 3032471 - DNA, 25 bp, Homo sapien
ctggacaagccacccgcttcgcacc

SEQ ID NO: 3032472 - DNA, 25 bp, Homo sapien
acccctcctcttatgcccgtggcgg

SEQ ID NO: 3032473 - DNA, 25 bp, Homo sapien
gcccgtggcggtggcacggcgctgt

SEQ ID NO: 3032474 - DNA, 25 bp, Homo sapien
tctttgtgttcccttggcactcagg

SEQ ID NO: 3032475 - DNA, 25 bp, Homo sapien
tgctctggtatacgccagtgccagg

SEQ ID NO: 3032476 - DNA, 25 bp, Homo sapien
tgatcccctttctaccgggcgcatg

SEQ ID NO: 3032477 - DNA, 25 bp, Homo sapien
acatgcctccggtgacatacattca

SEQ ID NO: 3032478 - DNA, 25 bp, Homo sapien
tgggtgtcgggcctccgaggctccg

SEQ ID NO: 3032479 - DNA, 25 bp, Homo sapien
tgccaggacggtgttcgggtgagtc

SEQ ID NO: 3032480 - DNA, 25 bp, Homo sapien
gtgagtctcccgagaagtcgtgccc

SEQ ID NO: 3032481 - DNA, 25 bp, Homo sapien
gggtccacaggaacgtctccggctg

SEQ ID NO: 3032482 - DNA, 25 bp, Homo sapien
cctgggggcgtgtatttctcggcca

SEQ ID NO: 3032483 - DNA, 25 bp, Homo sapien
gccctgtgcgtcaaaaagggatgtc

SEQ ID NO: 3032484 - DNA, 25 bp, Homo sapien
aatgtgccctgtgcgtcaaaaaggg

SEQ ID NO: 3032485 - DNA, 25 bp, Homo sapien
atttctcggccaccgcggtaggact

SEQ ID NO: 3032486 - DNA, 25 bp, Homo sapien
ggtcctgcggccagctgtccatcgt

SEQ ID NO: 3032487 - DNA, 25 bp, Homo sapien
gtctgtgcaggcctcgataacgtga

SEQ ID NO: 3032488 - DNA, 25 bp, Homo sapien
gcctcgataacgtgaggggatgcat

SEQ ID NO: 3032489 - DNA, 25 bp, Homo sapien
ctgtgcaggcctcgataacgtgagg

SEQ ID NO: 3032490 - DNA, 25 bp, Homo sapien
gccccacggtagcacattgtccggc

SEQ ID NO: 3032491 - DNA, 25 bp, Homo sapien
cacggtagcacattgtccggcagga

SEQ ID NO: 3032492 - DNA, 25 bp, Homo sapien
cggtagcacattgtccggcaggaga

SEQ ID NO: 3032493 - DNA, 25 bp, Homo sapien
cccacggtagcacattgtccggcag

SEQ ID NO: 3032494 - DNA, 25 bp, Homo sapien
gaaatgaagccacagaacgacacaa

SEQ ID NO: 3032495 - DNA, 25 bp, Homo sapien
tgcgtcggccgggagcaatggaagt

SEQ ID NO: 3032496 - DNA, 25 bp, Homo sapien
tcagaaagggatttcttgcttgtct

SEQ ID NO: 3032497 - DNA, 25 bp, Homo sapien
tgtctgccggtctttggtgggtttc

SEQ ID NO: 3032498 - DNA, 25 bp, Homo sapien
tgagcggcctaggtgcctcttggcc

SEQ ID NO: 3032499 - DNA, 25 bp, Homo sapien
ctgagcggcctaggtgcctcttggc

SEQ ID NO: 3032500 - DNA, 25 bp, Homo sapien
caaaggactcttgtgaggtcatcag

SEQ ID NO: 3032501 - DNA, 25 bp, Homo sapien
agggctagccactttactaaatcca

SEQ ID NO: 3032502 - DNA, 25 bp, Homo sapien
gaaattgttgcctgtgcttactgca

SEQ ID NO: 3032503 - DNA, 25 bp, Homo sapien
tcagaaatcccttttggtcaagctt

SEQ ID NO: 3032504 - DNA, 25 bp, Homo sapien
tcactctcgggcgagatgttttccc

SEQ ID NO: 3032505 - DNA, 25 bp, Homo sapien
cactctcgggcgagatgttttccct

SEQ ID NO: 3032506 - DNA, 25 bp, Homo sapien
actctcgggcgagatgttttccctc

SEQ ID NO: 3032507 - DNA, 25 bp, Homo sapien
gacaggatctaaactttgtctgcta

SEQ ID NO: 3032508 - DNA, 25 bp, Homo sapien
ggatctaaactttgtctgctattct

SEQ ID NO: 3032509 - DNA, 25 bp, Homo sapien
aaactttgtctgctattctgctgcc

SEQ ID NO: 3032510 - DNA, 25 bp, Homo sapien
cttggacaggatctaaactttgtct

SEQ ID NO: 3032511 - DNA, 25 bp, Homo sapien
actgcacttgaatgaggagtcctga

SEQ ID NO: 3032512 - DNA, 25 bp, Homo sapien
atggtcctccactgcacttgaatga

SEQ ID NO: 3032513 - DNA, 25 bp, Homo sapien
gtcctgagggtctgagtaagttgca

SEQ ID NO: 3032514 - DNA, 25 bp, Homo sapien
tcctgagggtctgagtaagttgcag

SEQ ID NO: 3032515 - DNA, 25 bp, Homo sapien
ggttgggctgctgatcgatctgatc

SEQ ID NO: 3032516 - DNA, 25 bp, Homo sapien
gcagaaatgaggctgatcgacccag

SEQ ID NO: 3032517 - DNA, 25 bp, Homo sapien
ttctagttgcccatctgcttggttg

SEQ ID NO: 3032518 - DNA, 25 bp, Homo sapien
tcatccatcggacatctggtcgcct

SEQ ID NO: 3032519 - DNA, 25 bp, Homo sapien
ctattttggagccagaggctgtacg

SEQ ID NO: 3032520 - DNA, 25 bp, Homo sapien
attttggagccagaggctgtacgct

SEQ ID NO: 3032521 - DNA, 25 bp, Homo sapien
tattttggagccagaggctgtacgc

SEQ ID NO: 3032522 - DNA, 25 bp, Homo sapien
acagcactccgagctcaatagtgcg

SEQ ID NO: 3032523 - DNA, 25 bp, Homo sapien
aggccacagcactccgagctcaata

SEQ ID NO: 3032524 - DNA, 25 bp, Homo sapien
tccgagctcaatagtgcgcctccaa

SEQ ID NO: 3032525 - DNA, 25 bp, Homo sapien
tcaatagtgcgcctccaacgctgac

SEQ ID NO: 3032526 - DNA, 25 bp, Homo sapien
aggacgaagagtacacccggcaaag

SEQ ID NO: 3032527 - DNA, 25 bp, Homo sapien
cagagcgccggagagaaaaccttaa

SEQ ID NO: 3032528 - DNA, 25 bp, Homo sapien
aagcagccgcggatcggatcggcat

SEQ ID NO: 3032529 - DNA, 25 bp, Homo sapien
gcaggtttaatctccgacgaaagga

SEQ ID NO: 3032530 - DNA, 25 bp, Homo sapien
cgcgggctccccgaggattccaaag

SEQ ID NO: 3032531 - DNA, 25 bp, Homo sapien
ggtcgcgggctccccgaggattcca

SEQ ID NO: 3032532 - DNA, 25 bp, Homo sapien
gtcgcgggctccccgaggattccaa

SEQ ID NO: 3032533 - DNA, 25 bp, Homo sapien
tcgcgggctccccgaggattccaaa

SEQ ID NO: 3032534 - DNA, 25 bp, Homo sapien
gcggcgggagggaccctgaagttga

SEQ ID NO: 3032535 - DNA, 25 bp, Homo sapien
tgcggcgggagggaccctgaagttg

SEQ ID NO: 3032536 - DNA, 25 bp, Homo sapien
ctgcggcgggagggaccctgaagtt

SEQ ID NO: 3032537 - DNA, 25 bp, Homo sapien
tcccaggtttgcacgtgcaacatgc

SEQ ID NO: 3032538 - DNA, 25 bp, Homo sapien
gtcccaggtttgcacgtgcaacatg

SEQ ID NO: 3032539 - DNA, 25 bp, Homo sapien
ctcctggagaatgaccacctactcc

SEQ ID NO: 3032540 - DNA, 25 bp, Homo sapien
atgctcctggagaatgaccacctac

SEQ ID NO: 3032541 - DNA, 25 bp, Homo sapien
gaagagcgctgacttgttagagcag

SEQ ID NO: 3032542 - DNA, 25 bp, Homo sapien
ggtcagcagccccatctggtgtggt

SEQ ID NO: 3032543 - DNA, 25 bp, Homo sapien
ggtaaggccttcaggtttagcactg

SEQ ID NO: 3032544 - DNA, 25 bp, Homo sapien
gttctgcctgctgcgatccatcacg

SEQ ID NO: 3032545 - DNA, 25 bp, Homo sapien
ctgctcaggtgcagatgggccagct

SEQ ID NO: 3032546 - DNA, 25 bp, Homo sapien
ttgggccagtatcgctgctcaggtg

SEQ ID NO: 3032547 - DNA, 25 bp, Homo sapien
tatcgctgctcaggtgcagatgggc

SEQ ID NO: 3032548 - DNA, 25 bp, Homo sapien
agtctgttgggccagtatcgctgct

SEQ ID NO: 3032549 - DNA, 25 bp, Homo sapien
ccaacacggaaagcggccatgaggt

SEQ ID NO: 3032550 - DNA, 25 bp, Homo sapien
gggcatcgggtgcaccatttctact

SEQ ID NO: 3032551 - DNA, 25 bp, Homo sapien
gtagctgccagccttcgtgagaagt

SEQ ID NO: 3032552 - DNA, 25 bp, Homo sapien
gcgcttctgggaccggccggctggg

SEQ ID NO: 3032553 - DNA, 25 bp, Homo sapien
tctccactgtgaggatcatgcaaac

SEQ ID NO: 3032554 - DNA, 25 bp, Homo sapien
ttttgacaggtaggctttaggagct

SEQ ID NO: 3032555 - DNA, 25 bp, Homo sapien
gctccaaccagcaacgtcattaacg

SEQ ID NO: 3032556 - DNA, 25 bp, Homo sapien
gatctcccggcaaggtgctcaggga

SEQ ID NO: 3032557 - DNA, 25 bp, Homo sapien
cacaggtgtccacatggagcacagt

SEQ ID NO: 3032558 - DNA, 25 bp, Homo sapien
gctagccacaggtgtccacatggag

SEQ ID NO: 3032559 - DNA, 25 bp, Homo sapien
ccagctagccacaggtgtccacatg

SEQ ID NO: 3032560 - DNA, 25 bp, Homo sapien
ccacaggtgtccacatggagcacag

SEQ ID NO: 3032561 - DNA, 25 bp, Homo sapien
cagcgtccatttcagggcacactgc

SEQ ID NO: 3032562 - DNA, 25 bp, Homo sapien
gaaaggagcatgtgtccccattgag

SEQ ID NO: 3032563 - DNA, 25 bp, Homo sapien
ctgatggcactgtaactctagagaa

SEQ ID NO: 3032564 - DNA, 25 bp, Homo sapien
gaaggcagcgtccatttcagggcac

SEQ ID NO: 3032565 - DNA, 25 bp, Homo sapien
cttggcacaggcggtcacactcccc

SEQ ID NO: 3032566 - DNA, 25 bp, Homo sapien
ttggcacaggcggtcacactcccca

SEQ ID NO: 3032567 - DNA, 25 bp, Homo sapien
tggcacaggcggtcacactccccac

SEQ ID NO: 3032568 - DNA, 25 bp, Homo sapien
ctgcaattcctgtgagtttctctct

SEQ ID NO: 3032569 - DNA, 25 bp, Homo sapien
tttgttggttccagagtagctttcc

SEQ ID NO: 3032570 - DNA, 25 bp, Homo sapien
gaatctgagtttgttggttccagag

SEQ ID NO: 3032571 - DNA, 25 bp, Homo sapien
ctgagtttgttggttccagagtagc

SEQ ID NO: 3032572 - DNA, 25 bp, Homo sapien
caagcacagaagaagccaccaaata

SEQ ID NO: 3032573 - DNA, 25 bp, Homo sapien
atcccaaccccacacaaaataatga

SEQ ID NO: 3032574 - DNA, 25 bp, Homo sapien
atctgaagtgagctgatgcctcggc

SEQ ID NO: 3032575 - DNA, 25 bp, Homo sapien
gaattggtaaatatggatggcagtg

SEQ ID NO: 3032576 - DNA, 25 bp, Homo sapien
gggtgcagataacatgcagctcagt

SEQ ID NO: 3032577 - DNA, 25 bp, Homo sapien
ctgggtgcagataacatgcagctca

SEQ ID NO: 3032578 - DNA, 25 bp, Homo sapien
tgggtgcagataacatgcagctcag

SEQ ID NO: 3032579 - DNA, 25 bp, Homo sapien
ggccatgcaaaggactctctagtaa

SEQ ID NO: 3032580 - DNA, 25 bp, Homo sapien
gcaaaggactctctagtaattccat

SEQ ID NO: 3032581 - DNA, 25 bp, Homo sapien
ctgtctccaaggtggccatgcaaag

SEQ ID NO: 3032582 - DNA, 25 bp, Homo sapien
caaggtggccatgcaaaggactctc

SEQ ID NO: 3032583 - DNA, 25 bp, Homo sapien
acttgcaagagctccgacttccctt

SEQ ID NO: 3032584 - DNA, 25 bp, Homo sapien
gccaaagcctttccacttgcaagag

SEQ ID NO: 3032585 - DNA, 25 bp, Homo sapien
ccttcagtgcatgcgggttgaccag

SEQ ID NO: 3032586 - DNA, 25 bp, Homo sapien
tcacatggagacataaacatcttcc

SEQ ID NO: 3032587 - DNA, 25 bp, Homo sapien
ttaatcccacatggattacaaccac

SEQ ID NO: 3032588 - DNA, 25 bp, Homo sapien
atcccacatggattacaaccacgac

SEQ ID NO: 3032589 - DNA, 25 bp, Homo sapien
ccacatggattacaaccacgaccaa

SEQ ID NO: 3032590 - DNA, 25 bp, Homo sapien
taatcccacatggattacaaccacg

SEQ ID NO: 3032591 - DNA, 25 bp, Homo sapien
agaaaaagtacttgacttcaccatc

SEQ ID NO: 3032592 - DNA, 25 bp, Homo sapien
cagagaaaaagtacttgacttcacc

SEQ ID NO: 3032593 - DNA, 25 bp, Homo sapien
ctcagagaaaaagtacttgacttca

SEQ ID NO: 3032594 - DNA, 25 bp, Homo sapien
gcacccaaagctaagattctaattt

SEQ ID NO: 3032595 - DNA, 25 bp, Homo sapien
tccgtgccacgtgtcacaccctatc

SEQ ID NO: 3032596 - DNA, 25 bp, Homo sapien
cgtgccacgtgtcacaccctatcct

SEQ ID NO: 3032597 - DNA, 25 bp, Homo sapien
ccgtgccacgtgtcacaccctatcc

SEQ ID NO: 3032598 - DNA, 25 bp, Homo sapien
ctccgtgccacgtgtcacaccctat

SEQ ID NO: 3032599 - DNA, 25 bp, Homo sapien
caaaaccctactttgcatctactga

SEQ ID NO: 3032600 - DNA, 25 bp, Homo sapien
aaaccctactttgcatctactgaac

SEQ ID NO: 3032601 - DNA, 25 bp, Homo sapien
accctactttgcatctactgaacgc

SEQ ID NO: 3032602 - DNA, 25 bp, Homo sapien
cctactttgcatctactgaacgcaa

SEQ ID NO: 3032603 - DNA, 25 bp, Homo sapien
gatcaatgggacttaaacccacaaa

SEQ ID NO: 3032604 - DNA, 25 bp, Homo sapien
gctagatcaatgggacttaaaccca

SEQ ID NO: 3032605 - DNA, 25 bp, Homo sapien
tggttaacagctaaataccttaatc

SEQ ID NO: 3032606 - DNA, 25 bp, Homo sapien
ggttaacagctaaataccttaatca

SEQ ID NO: 3032607 - DNA, 25 bp, Homo sapien
tgcaattcaacatgaaaggcacctc

SEQ ID NO: 3032608 - DNA, 25 bp, Homo sapien
ttcaacatgaaaggcacctcagggc

SEQ ID NO: 3032609 - DNA, 25 bp, Homo sapien
caattcaacatgaaaggcacctcag

SEQ ID NO: 3032610 - DNA, 25 bp, Homo sapien
aattcaacatgaaaggcacctcagg

SEQ ID NO: 3032611 - DNA, 25 bp, Homo sapien
cagtctaatgctttgctcagccatc

SEQ ID NO: 3032612 - DNA, 25 bp, Homo sapien
taatgctttgctcagccatcttacc

SEQ ID NO: 3032613 - DNA, 25 bp, Homo sapien
tacagtctaatgctttgctcagcca

SEQ ID NO: 3032614 - DNA, 25 bp, Homo sapien
gtctaatgctttgctcagccatctt

SEQ ID NO: 3032615 - DNA, 25 bp, Homo sapien
ctaggtaacgaccacatctacaacg

SEQ ID NO: 3032616 - DNA, 25 bp, Homo sapien
taggtaacgaccacatctacaacgt

SEQ ID NO: 3032617 - DNA, 25 bp, Homo sapien
atttagctgacttgctacgctccat

SEQ ID NO: 3032618 - DNA, 25 bp, Homo sapien
aggaattgaacctcctaaggctggt

SEQ ID NO: 3032619 - DNA, 25 bp, Homo sapien
cctaaggctggtttcaagccagcct

SEQ ID NO: 3032620 - DNA, 25 bp, Homo sapien
attgaacctcctaaggctggtttca

SEQ ID NO: 3032621 - DNA, 25 bp, Homo sapien
ttgaacctcctaaggctggtttcaa

SEQ ID NO: 3032622 - DNA, 25 bp, Homo sapien
agccagcaccaacatcacggtactt

SEQ ID NO: 3032623 - DNA, 25 bp, Homo sapien
caacatcacggtacttgatcttcca

SEQ ID NO: 3032624 - DNA, 25 bp, Homo sapien
catcacggtacttgatcttccaact

SEQ ID NO: 3032625 - DNA, 25 bp, Homo sapien
gcaccaacatcacggtacttgatct

SEQ ID NO: 3032626 - DNA, 25 bp, Homo sapien
ttttggaatctaggctgagaatcag

SEQ ID NO: 3032627 - DNA, 25 bp, Homo sapien
catagggatccctagcagccaggga

SEQ ID NO: 3032628 - DNA, 25 bp, Homo sapien
tccatgaaaccagacacccttttgg

SEQ ID NO: 3032629 - DNA, 25 bp, Homo sapien
ttgcctaccgccaggctccagtaag

SEQ ID NO: 3032630 - DNA, 25 bp, Homo sapien
tgctcctcctgatagcgccaatctt

SEQ ID NO: 3032631 - DNA, 25 bp, Homo sapien
ttttgctcctcctgatagcgccaat

SEQ ID NO: 3032632 - DNA, 25 bp, Homo sapien
tttgctcctcctgatagcgccaatc

SEQ ID NO: 3032633 - DNA, 25 bp, Homo sapien
cttttgctcctcctgatagcgccaa

SEQ ID NO: 3032634 - DNA, 25 bp, Homo sapien
aatctctgatcttcgaacccactga

SEQ ID NO: 3032635 - DNA, 25 bp, Homo sapien
gcaatctctgatcttcgaacccact

SEQ ID NO: 3032636 - DNA, 25 bp, Homo sapien
tcgcaatctctgatcttcgaaccca

SEQ ID NO: 3032637 - DNA, 25 bp, Homo sapien
tctgatcttcgaacccactgaaaaa

SEQ ID NO: 3032638 - DNA, 25 bp, Homo sapien
aaaggctgcaggaatctcgaggcaa

SEQ ID NO: 3032639 - DNA, 25 bp, Homo sapien
gaaaggctgcaggaatctcgaggca

SEQ ID NO: 3032640 - DNA, 25 bp, Homo sapien
aaggctgcaggaatctcgaggcaaa

SEQ ID NO: 3032641 - DNA, 25 bp, Homo sapien
tggaaaggctgcaggaatctcgagg

SEQ ID NO: 3032642 - DNA, 25 bp, Homo sapien
cccttcgggcaaagtgactgttaca

SEQ ID NO: 3032643 - DNA, 25 bp, Homo sapien
ctgcaaaagcagagacgcgtctccc

SEQ ID NO: 3032644 - DNA, 25 bp, Homo sapien
tgactgttacaaagtctgttccctc

SEQ ID NO: 3032645 - DNA, 25 bp, Homo sapien
gacgcgtctcccttcgggcaaagtg

SEQ ID NO: 3032646 - DNA, 25 bp, Homo sapien
atgcagccaaaaaaacacatgaaaa

SEQ ID NO: 3032647 - DNA, 25 bp, Homo sapien
caaaaagtgggcgaacgacatgaac

SEQ ID NO: 3032648 - DNA, 25 bp, Homo sapien
catcaaaaagtgggcgaacgacatg

SEQ ID NO: 3032649 - DNA, 25 bp, Homo sapien
agacacttctcaaaagaagacattt

SEQ ID NO: 3032650 - DNA, 25 bp, Homo sapien
caggaagaggcaagctgacttgtgt

SEQ ID NO: 3032651 - DNA, 25 bp, Homo sapien
gaggcaagctgacttgtgttggctt

SEQ ID NO: 3032652 - DNA, 25 bp, Homo sapien
gctgacttgtgttggcttgctctct

SEQ ID NO: 3032653 - DNA, 25 bp, Homo sapien
tgcagtgacagccaatttctctttc

SEQ ID NO: 3032654 - DNA, 25 bp, Homo sapien
aaagtttatgtctctgaagttttct

SEQ ID NO: 3032655 - DNA, 25 bp, Homo sapien
ggaacaccagtaaagcctctcttct

SEQ ID NO: 3032656 - DNA, 25 bp, Homo sapien
tcatcttaggactggaacaccagta

SEQ ID NO: 3032657 - DNA, 25 bp, Homo sapien
tctcagtgcatcacaactgacagca

SEQ ID NO: 3032658 - DNA, 25 bp, Homo sapien
gttgctgctttctctatgcacatcc

SEQ ID NO: 3032659 - DNA, 25 bp, Homo sapien
tgctttctctatgcacatcccaaag

SEQ ID NO: 3032660 - DNA, 25 bp, Homo sapien
tgctgctttctctatgcacatccca

SEQ ID NO: 3032661 - DNA, 25 bp, Homo sapien
gctgctttctctatgcacatcccaa

SEQ ID NO: 3032662 - DNA, 25 bp, Homo sapien
tctgtgggaaagtcgttccattcca

SEQ ID NO: 3032663 - DNA, 25 bp, Homo sapien
gattggtatctaatcattgaagaca

SEQ ID NO: 3032664 - DNA, 25 bp, Homo sapien
ggaaagtcgttccattccaaatgac

SEQ ID NO: 3032665 - DNA, 25 bp, Homo sapien
aaggaagcagattggtatctaatca

SEQ ID NO: 3032666 - DNA, 25 bp, Homo sapien
tctatagttcagaaatgctttacct

SEQ ID NO: 3032667 - DNA, 25 bp, Homo sapien
tatagttcagaaatgctttacctac

SEQ ID NO: 3032668 - DNA, 25 bp, Homo sapien
gctttacctacttcatgatgtgtag

SEQ ID NO: 3032669 - DNA, 25 bp, Homo sapien
tatgtctatagttcagaaatgcttt

SEQ ID NO: 3032670 - DNA, 25 bp, Homo sapien
tatctgccaagaaggaaactcttgt

SEQ ID NO: 3032671 - DNA, 25 bp, Homo sapien
atatctgccaagaaggaaactcttg

SEQ ID NO: 3032672 - DNA, 25 bp, Homo sapien
attttatcagaaggctgcctgattc

SEQ ID NO: 3032673 - DNA, 25 bp, Homo sapien
ctcccaattttatcagaaggctgcc

SEQ ID NO: 3032674 - DNA, 25 bp, Homo sapien
gaagaacagtttctagctcccacct

SEQ ID NO: 3032675 - DNA, 25 bp, Homo sapien
aacagtttctagctcccacctcagt

SEQ ID NO: 3032676 - DNA, 25 bp, Homo sapien
agaacagtttctagctcccacctca

SEQ ID NO: 3032677 - DNA, 25 bp, Homo sapien
gaatggaatcggaagaacagtttct

SEQ ID NO: 3032678 - DNA, 25 bp, Homo sapien
gctctgcttgggctgagggtctcca

SEQ ID NO: 3032679 - DNA, 25 bp, Homo sapien
cttccggtggcctgtctctgtggct

SEQ ID NO: 3032680 - DNA, 25 bp, Homo sapien
tcttcatttttccatggctcctgag

SEQ ID NO: 3032681 - DNA, 25 bp, Homo sapien
ccacagtaaattggaagaatggctg

SEQ ID NO: 3032682 - DNA, 25 bp, Homo sapien
ctcgattttggtttgtagctgagca

SEQ ID NO: 3032683 - DNA, 25 bp, Homo sapien
tcctccattgtctcggaattttatt

SEQ ID NO: 3032684 - DNA, 25 bp, Homo sapien
tcgattttggtttgtagctgagcag

SEQ ID NO: 3032685 - DNA, 25 bp, Homo sapien
catcaggaagcactcctccattgtc

SEQ ID NO: 3032686 - DNA, 25 bp, Homo sapien
tgggatgcagagtgtgagcaacaat

SEQ ID NO: 3032687 - DNA, 25 bp, Homo sapien
agcaacaataaggtcagataggggt

SEQ ID NO: 3032688 - DNA, 25 bp, Homo sapien
ctgggatgcagagtgtgagcaacaa

SEQ ID NO: 3032689 - DNA, 25 bp, Homo sapien
taaggtcagataggggtgaggatac

SEQ ID NO: 3032690 - DNA, 25 bp, Homo sapien
tcacctccccatacaaaggagccac

SEQ ID NO: 3032691 - DNA, 25 bp, Homo sapien
tgagacccacaggtgtacaaatcac

SEQ ID NO: 3032692 - DNA, 25 bp, Homo sapien
ttttgagtcccttcaccttctggtg

SEQ ID NO: 3032693 - DNA, 25 bp, Homo sapien
ggttcctgagtccacagtgagttgg

SEQ ID NO: 3032694 - DNA, 25 bp, Homo sapien
gaagatggtaccaaaagagtggttc

SEQ ID NO: 3032695 - DNA, 25 bp, Homo sapien
tttgaagatggtaccaaaagagtgg

SEQ ID NO: 3032696 - DNA, 25 bp, Homo sapien
ctttgaagatggtaccaaaagagtg

SEQ ID NO: 3032697 - DNA, 25 bp, Homo sapien
ttgaagatggtaccaaaagagtggt

SEQ ID NO: 3032698 - DNA, 25 bp, Homo sapien
caggtatgattccatcacgtggaca

SEQ ID NO: 3032699 - DNA, 25 bp, Homo sapien
ttttcattcccatgcgaccggattc

SEQ ID NO: 3032700 - DNA, 25 bp, Homo sapien
cagaagagcaatttccagcacccac

SEQ ID NO: 3032701 - DNA, 25 bp, Homo sapien
caactcaccggactgtattttcatt

SEQ ID NO: 3032702 - DNA, 25 bp, Homo sapien
gaaacgcctcctcctccagcgggac

SEQ ID NO: 3032703 - DNA, 25 bp, Homo sapien
tcacagtttcgaaacgcctcctcct

SEQ ID NO: 3032704 - DNA, 25 bp, Homo sapien
ctcacagtttcgaaacgcctcctcc

SEQ ID NO: 3032705 - DNA, 25 bp, Homo sapien
gcctcctcctccagcgggacccgac

SEQ ID NO: 3032706 - DNA, 25 bp, Homo sapien
tcgcgggcagcattttcccgagacc

SEQ ID NO: 3032707 - DNA, 25 bp, Homo sapien
agacgtgccgaggaggccttattgt

SEQ ID NO: 3032708 - DNA, 25 bp, Homo sapien
cagagacgtgccgaggaggccttat

SEQ ID NO: 3032709 - DNA, 25 bp, Homo sapien
ccgcagtgggttgtcgcgggcagca

SEQ ID NO: 3032710 - DNA, 25 bp, Homo sapien
tgcactagtctccatttctgggaag

SEQ ID NO: 3032711 - DNA, 25 bp, Homo sapien
taaagatccttcttacatgtccaag

SEQ ID NO: 3032712 - DNA, 25 bp, Homo sapien
gtcttgttcacaggcagtatttggg

SEQ ID NO: 3032713 - DNA, 25 bp, Homo sapien
tgggtagatggatataatcctcccg

SEQ ID NO: 3032714 - DNA, 25 bp, Homo sapien
ttcattcacttcagtatcagctaaa

SEQ ID NO: 3032715 - DNA, 25 bp, Homo sapien
catgacaatattcatcctgtgtaag

SEQ ID NO: 3032716 - DNA, 25 bp, Homo sapien
tcctgtgtaagcataggaccatctt

SEQ ID NO: 3032717 - DNA, 25 bp, Homo sapien
aatttccaccatgacaatattcatc

SEQ ID NO: 3032718 - DNA, 25 bp, Homo sapien
aacagggctgggatcaattcttcca

SEQ ID NO: 3032719 - DNA, 25 bp, Homo sapien
acggtcccagagtttaacagggctg

SEQ ID NO: 3032720 - DNA, 25 bp, Homo sapien
aatccggagtgaaagaatccggagt

SEQ ID NO: 3032721 - DNA, 25 bp, Homo sapien
ccggagtgaaagaatccggagtgaa

SEQ ID NO: 3032722 - DNA, 25 bp, Homo sapien
ttcccttcctcgccaggaccccaca

SEQ ID NO: 3032723 - DNA, 25 bp, Homo sapien
cccttcctcgccaggaccccacatc

SEQ ID NO: 3032724 - DNA, 25 bp, Homo sapien
acatccctccctctgagtcgcttcc

SEQ ID NO: 3032725 - DNA, 25 bp, Homo sapien
ccacatccctccctctgagtcgctt

SEQ ID NO: 3032726 - DNA, 25 bp, Homo sapien
tccctccggcttggccttcccgcag

SEQ ID NO: 3032727 - DNA, 25 bp, Homo sapien
ggatcctgggcgtggagccatcctc

SEQ ID NO: 3032728 - DNA, 25 bp, Homo sapien
tgctgcccgcggttttcgggatcct

SEQ ID NO: 3032729 - DNA, 25 bp, Homo sapien
gtgtgggcgaagaccctgtcacctc

SEQ ID NO: 3032730 - DNA, 25 bp, Homo sapien
cattctggcagcccaggctctagca

SEQ ID NO: 3032731 - DNA, 25 bp, Homo sapien
gcggagtgagcggaaccttgtactt

SEQ ID NO: 3032732 - DNA, 25 bp, Homo sapien
tagcaccagactggctgaggtctct

SEQ ID NO: 3032733 - DNA, 25 bp, Homo sapien
tgcggctcttcgtctccttttcggg

SEQ ID NO: 3032734 - DNA, 25 bp, Homo sapien
taatcccagctctgttaaactccgg

SEQ ID NO: 3032735 - DNA, 25 bp, Homo sapien
tccagaactggaggaattaatccca

SEQ ID NO: 3032736 - DNA, 25 bp, Homo sapien
ggacggttcttcttcgtgatacaga

SEQ ID NO: 3032737 - DNA, 25 bp, Homo sapien
ggaattggatgtgcaacagactcca

SEQ ID NO: 3032738 - DNA, 25 bp, Homo sapien
agcgctctgctggcgggacagccat

SEQ ID NO: 3032739 - DNA, 25 bp, Homo sapien
tggccctggtaagcattcggtactg

SEQ ID NO: 3032740 - DNA, 25 bp, Homo sapien
agtaacaaatagaatcgaagcctgg

SEQ ID NO: 3032741 - DNA, 25 bp, Homo sapien
gaagaccttcaagcaatggccctgg

SEQ ID NO: 3032742 - DNA, 25 bp, Homo sapien
gctaccccaaggtatatggtggtgg

SEQ ID NO: 3032743 - DNA, 25 bp, Homo sapien
cctctcttccgtgtatgagccccat

SEQ ID NO: 3032744 - DNA, 25 bp, Homo sapien
ctaccccaaggtatatggtggtggg

SEQ ID NO: 3032745 - DNA, 25 bp, Homo sapien
ccccaaggtatatggtggtggggct

SEQ ID NO: 3032746 - DNA, 25 bp, Homo sapien
gggataaaccgcacagaactaaaca

SEQ ID NO: 3032747 - DNA, 25 bp, Homo sapien
cactatctgtaggatctgcaagcgg

SEQ ID NO: 3032748 - DNA, 25 bp, Homo sapien
tcagaaccttcttcgtgacgtttgc

SEQ ID NO: 3032749 - DNA, 25 bp, Homo sapien
agatatggaccgctttgaggcctat

SEQ ID NO: 3032750 - DNA, 25 bp, Homo sapien
gcagctttctcccaccgtggctttt

SEQ ID NO: 3032751 - DNA, 25 bp, Homo sapien
ctactgcgcctttttgtccctgctg

SEQ ID NO: 3032752 - DNA, 25 bp, Homo sapien
gccacagattttggccgccgcggct

SEQ ID NO: 3032753 - DNA, 25 bp, Homo sapien
cacggcttttgcctacgcggcttct

SEQ ID NO: 3032754 - DNA, 25 bp, Homo sapien
gatgtgatgcgatgtcactcccgtg

SEQ ID NO: 3032755 - DNA, 25 bp, Homo sapien
tccacagatgcggagatacaggctc

SEQ ID NO: 3032756 - DNA, 25 bp, Homo sapien
tacatggcaaagacgatttccacag

SEQ ID NO: 3032757 - DNA, 25 bp, Homo sapien
cactcccgtggttatggcacattac

SEQ ID NO: 3032758 - DNA, 25 bp, Homo sapien
gcctcctggattccgtggtgaacag

SEQ ID NO: 3032759 - DNA, 25 bp, Homo sapien
tgcctcctggattccgtggtgaaca

SEQ ID NO: 3032760 - DNA, 25 bp, Homo sapien
tcctggattccgtggtgaacaggct

SEQ ID NO: 3032761 - DNA, 25 bp, Homo sapien
ctggattccgtggtgaacaggctgt

SEQ ID NO: 3032762 - DNA, 25 bp, Homo sapien
ggtccaataagaggaacttagtgtc

SEQ ID NO: 3032763 - DNA, 25 bp, Homo sapien
agttcctgccatggggtccaataag

SEQ ID NO: 3032764 - DNA, 25 bp, Homo sapien
ggaacttagtgtcagtgatttcttc

SEQ ID NO: 3032765 - DNA, 25 bp, Homo sapien
tgccatggggtccaataagaggaac

SEQ ID NO: 3032766 - DNA, 25 bp, Homo sapien
caggcagcgcccgagaaaccaagca

SEQ ID NO: 3032767 - DNA, 25 bp, Homo sapien
ggcagcgcccgagaaaccaagcaac

SEQ ID NO: 3032768 - DNA, 25 bp, Homo sapien
aggcagcgcccgagaaaccaagcaa

SEQ ID NO: 3032769 - DNA, 25 bp, Homo sapien
ccgctggccccaggctttgactcca

SEQ ID NO: 3032770 - DNA, 25 bp, Homo sapien
tttaaggacatcagcaggaccaagc

SEQ ID NO: 3032771 - DNA, 25 bp, Homo sapien
aggaccaagccaaaggagtgccgcc

SEQ ID NO: 3032772 - DNA, 25 bp, Homo sapien
agccaaaggagtgccgcccacccag

SEQ ID NO: 3032773 - DNA, 25 bp, Homo sapien
gcaggaccaagccaaaggagtgccg

SEQ ID NO: 3032774 - DNA, 25 bp, Homo sapien
gacttagagactgagtcagtgggct

SEQ ID NO: 3032775 - DNA, 25 bp, Homo sapien
ccatctccactgttgattgaagatt

SEQ ID NO: 3032776 - DNA, 25 bp, Homo sapien
tggatcaggtaactttaactttgtg

SEQ ID NO: 3032777 - DNA, 25 bp, Homo sapien
gcaggagtattgtcatctggaatca

SEQ ID NO: 3032778 - DNA, 25 bp, Homo sapien
gctttcatgaatctagttgcgcagt

SEQ ID NO: 3032779 - DNA, 25 bp, Homo sapien
tacgactacaaaggtgcttgcaggc

SEQ ID NO: 3032780 - DNA, 25 bp, Homo sapien
tggaggtctcctcaatagcaaagct

SEQ ID NO: 3032781 - DNA, 25 bp, Homo sapien
ttagagcctcactccatttccctgg

SEQ ID NO: 3032782 - DNA, 25 bp, Homo sapien
gtagttcttgacagatgaaagggct

SEQ ID NO: 3032783 - DNA, 25 bp, Homo sapien
tagttcttgacagatgaaagggctt

SEQ ID NO: 3032784 - DNA, 25 bp, Homo sapien
tcgtgataaccctggtggcagtgct

SEQ ID NO: 3032785 - DNA, 25 bp, Homo sapien
ggcatggcacttcggacatgggccc

SEQ ID NO: 3032786 - DNA, 25 bp, Homo sapien
tgctggaggccggtgaggtggtgaa

SEQ ID NO: 3032787 - DNA, 25 bp, Homo sapien
cacttcggacatgggcccttcttac

SEQ ID NO: 3032788 - DNA, 25 bp, Homo sapien
ccagagatgagatttcgtgttcaga

SEQ ID NO: 3032789 - DNA, 25 bp, Homo sapien
tctgtcaccagagatgagatttcgt

SEQ ID NO: 3032790 - DNA, 25 bp, Homo sapien
agatttcgtgttcagatctggcccc

SEQ ID NO: 3032791 - DNA, 25 bp, Homo sapien
gatgagatttcgtgttcagatctgg

SEQ ID NO: 3032792 - DNA, 25 bp, Homo sapien
aaatggagaggatgcttgaagtcct

SEQ ID NO: 3032793 - DNA, 25 bp, Homo sapien
ttccccagtccatggctgtgattac

SEQ ID NO: 3032794 - DNA, 25 bp, Homo sapien
aatggagaggatgcttgaagtcctt

SEQ ID NO: 3032795 - DNA, 25 bp, Homo sapien
tctgtagccgtcctctaccctgagt

SEQ ID NO: 3032796 - DNA, 25 bp, Homo sapien
taccctgagtagatactctgcattc

SEQ ID NO: 3032797 - DNA, 25 bp, Homo sapien
gcatgtttctgtagccgtcctctac

SEQ ID NO: 3032798 - DNA, 25 bp, Homo sapien
tgcattcttactgtgcaatgctttc

SEQ ID NO: 3032799 - DNA, 25 bp, Homo sapien
cagagacactgatggtgcgaaaagg

SEQ ID NO: 3032800 - DNA, 25 bp, Homo sapien
tgtagctgagcggaaatgcccacag

SEQ ID NO: 3032801 - DNA, 25 bp, Homo sapien
cctcaaccggagatactgatggtgt

SEQ ID NO: 3032802 - DNA, 25 bp, Homo sapien
aggaaaaggcgtctgggagggcctg

SEQ ID NO: 3032803 - DNA, 25 bp, Homo sapien
gatataaatcataatcaggatcttc

SEQ ID NO: 3032804 - DNA, 25 bp, Homo sapien
acagctgccacttccagggaaatgc

SEQ ID NO: 3032805 - DNA, 25 bp, Homo sapien
tcctttactgtcacagctgccactt

SEQ ID NO: 3032806 - DNA, 25 bp, Homo sapien
cttgaatgtgatataaatcataatc

SEQ ID NO: 3032807 - DNA, 25 bp, Homo sapien
taataatgaatgaaatcccggctgt

SEQ ID NO: 3032808 - DNA, 25 bp, Homo sapien
tcagggttgcaagatagtaattctc

SEQ ID NO: 3032809 - DNA, 25 bp, Homo sapien
tcttaataatgaatgaaatcccggc

SEQ ID NO: 3032810 - DNA, 25 bp, Homo sapien
aatgaatgaaatcccggctgtgttc

SEQ ID NO: 3032811 - DNA, 25 bp, Homo sapien
tatggtacagttacctctgtgggtt

SEQ ID NO: 3032812 - DNA, 25 bp, Homo sapien
ctggaagcccctgtactatcaaagc

SEQ ID NO: 3032813 - DNA, 25 bp, Homo sapien
aaagctgactggtcttgtagcatct

SEQ ID NO: 3032814 - DNA, 25 bp, Homo sapien
tctcatatggtacagttacctctgt

SEQ ID NO: 3032815 - DNA, 25 bp, Homo sapien
catggactcaagagctgacatgagg

SEQ ID NO: 3032816 - DNA, 25 bp, Homo sapien
ctgacatgaggaatgtcaccaccat

SEQ ID NO: 3032817 - DNA, 25 bp, Homo sapien
gctgacatgaggaatgtcaccacca

SEQ ID NO: 3032818 - DNA, 25 bp, Homo sapien
agagctgacatgaggaatgtcacca

SEQ ID NO: 3032819 - DNA, 25 bp, Homo sapien
cttgagtccagaagttccagatgag

SEQ ID NO: 3032820 - DNA, 25 bp, Homo sapien
ttgagtccagaagttccagatgagc

SEQ ID NO: 3032821 - DNA, 25 bp, Homo sapien
tcagaatcagaaatcgaagccccat

SEQ ID NO: 3032822 - DNA, 25 bp, Homo sapien
ttcctcttgttcaacatcttcacat

SEQ ID NO: 3032823 - DNA, 25 bp, Homo sapien
ttttcctcttgttcaacatcttcac

SEQ ID NO: 3032824 - DNA, 25 bp, Homo sapien
cttcagaatcagaaatcgaagcccc

SEQ ID NO: 3032825 - DNA, 25 bp, Homo sapien
acctcatcagctgtaactcggcctt

SEQ ID NO: 3032826 - DNA, 25 bp, Homo sapien
atcagctgtaactcggccttcattc

SEQ ID NO: 3032827 - DNA, 25 bp, Homo sapien
tcatcagctgtaactcggccttcat

SEQ ID NO: 3032828 - DNA, 25 bp, Homo sapien
gacctcatcagctgtaactcggcct

SEQ ID NO: 3032829 - DNA, 25 bp, Homo sapien
gctgaccagcccttaacttgaaaca

SEQ ID NO: 3032830 - DNA, 25 bp, Homo sapien
tctactgtctaagcggtgtgtggcc

SEQ ID NO: 3032831 - DNA, 25 bp, Homo sapien
tatgctaactcacttccagacaggt

SEQ ID NO: 3032832 - DNA, 25 bp, Homo sapien
gctttgctgggccaccatgatccat

SEQ ID NO: 3032833 - DNA, 25 bp, Homo sapien
atatcagttcttgcggcctttgcca

SEQ ID NO: 3032834 - DNA, 25 bp, Homo sapien
cagttcttgcggcctttgccaatgt

SEQ ID NO: 3032835 - DNA, 25 bp, Homo sapien
tcatatcagttcttgcggcctttgc

SEQ ID NO: 3032836 - DNA, 25 bp, Homo sapien
gttcttgcggcctttgccaatgtga

SEQ ID NO: 3032837 - DNA, 25 bp, Homo sapien
ggcatcttcgaagatgacactgagc

SEQ ID NO: 3032838 - DNA, 25 bp, Homo sapien
ctggcatcttcgaagatgacactga

SEQ ID NO: 3032839 - DNA, 25 bp, Homo sapien
gcatcttcgaagatgacactgagca

SEQ ID NO: 3032840 - DNA, 25 bp, Homo sapien
tggcatcttcgaagatgacactgag

SEQ ID NO: 3032841 - DNA, 25 bp, Homo sapien
tagcatggccatttaaataatattg

SEQ ID NO: 3032842 - DNA, 25 bp, Homo sapien
gtagcatggccatttaaataatatt

SEQ ID NO: 3032843 - DNA, 25 bp, Homo sapien
gcagttcttattgtagagatcatac

SEQ ID NO: 3032844 - DNA, 25 bp, Homo sapien
agcatggccatttaaataatattgc

SEQ ID NO: 3032845 - DNA, 25 bp, Homo sapien
ggagatcctctctctaagtcctgga

SEQ ID NO: 3032846 - DNA, 25 bp, Homo sapien
aaggctgggcagtactatggaaaac

SEQ ID NO: 3032847 - DNA, 25 bp, Homo sapien
catttgggccagagtgtacaaggct

SEQ ID NO: 3032848 - DNA, 25 bp, Homo sapien
cacaagggcgttgaacagagctaac

SEQ ID NO: 3032849 - DNA, 25 bp, Homo sapien
gaaacagtacatcaggactgagcct

SEQ ID NO: 3032850 - DNA, 25 bp, Homo sapien
gggaccccaatgcacagatctggaa

SEQ ID NO: 3032851 - DNA, 25 bp, Homo sapien
gatgctcagtgctaggcaagccatg

SEQ ID NO: 3032852 - DNA, 25 bp, Homo sapien
tcttcagtaacagccttgcatggtc

SEQ ID NO: 3032853 - DNA, 25 bp, Homo sapien
gcgtgggcaacacaggaagtttcca

SEQ ID NO: 3032854 - DNA, 25 bp, Homo sapien
ccagcgtgggcaacacaggaagttt

SEQ ID NO: 3032855 - DNA, 25 bp, Homo sapien
gtgggcaacacaggaagtttccaac

SEQ ID NO: 3032856 - DNA, 25 bp, Homo sapien
cagcgtgggcaacacaggaagtttc

SEQ ID NO: 3032857 - DNA, 25 bp, Homo sapien
taaacagggcattagccagtgccct

SEQ ID NO: 3032858 - DNA, 25 bp, Homo sapien
ctccattaagggcagaccggttgtc

SEQ ID NO: 3032859 - DNA, 25 bp, Homo sapien
gcagaccggttgtctactgcaaact

SEQ ID NO: 3032860 - DNA, 25 bp, Homo sapien
tgccatgacctggtaaacagggcat

SEQ ID NO: 3032861 - DNA, 25 bp, Homo sapien
tttgtgtacacacccctcgctccat

SEQ ID NO: 3032862 - DNA, 25 bp, Homo sapien
catgcctaacctttggcaggtcaca

SEQ ID NO: 3032863 - DNA, 25 bp, Homo sapien
tttcctgcgactgttcctgggatgt

SEQ ID NO: 3032864 - DNA, 25 bp, Homo sapien
ttcccttggtcactgactttgtgta

SEQ ID NO: 3032865 - DNA, 25 bp, Homo sapien
tgtaatgattgggtcgataacaaac

SEQ ID NO: 3032866 - DNA, 25 bp, Homo sapien
gtagcgatgtaatgattgggtcgat

SEQ ID NO: 3032867 - DNA, 25 bp, Homo sapien
cttgggtagcgatgtaatgattggg

SEQ ID NO: 3032868 - DNA, 25 bp, Homo sapien
gcgatgtaatgattgggtcgataac

SEQ ID NO: 3032869 - DNA, 25 bp, Homo sapien
gcacagtgttcacggtgctgccaac

SEQ ID NO: 3032870 - DNA, 25 bp, Homo sapien
cagtgttcacggtgctgccaacagg

SEQ ID NO: 3032871 - DNA, 25 bp, Homo sapien
gctgccaacagggaggtgattagct

SEQ ID NO: 3032872 - DNA, 25 bp, Homo sapien
ccaacagggaggtgattagctggca

SEQ ID NO: 3032873 - DNA, 25 bp, Homo sapien
gtatcacgtaatccagaccccaatt

SEQ ID NO: 3032874 - DNA, 25 bp, Homo sapien
ctgagagtatcacgtaatccagacc

SEQ ID NO: 3032875 - DNA, 25 bp, Homo sapien
tcacgtaatccagaccccaatttgc

SEQ ID NO: 3032876 - DNA, 25 bp, Homo sapien
gagtatcacgtaatccagaccccaa

SEQ ID NO: 3032877 - DNA, 25 bp, Homo sapien
gccgtgagacagcatcccaaatcag

SEQ ID NO: 3032878 - DNA, 25 bp, Homo sapien
cgtgagacagcatcccaaatcagca

SEQ ID NO: 3032879 - DNA, 25 bp, Homo sapien
gtgagacagcatcccaaatcagcat

SEQ ID NO: 3032880 - DNA, 25 bp, Homo sapien
ctgccgtgagacagcatcccaaatc

SEQ ID NO: 3032881 - DNA, 25 bp, Homo sapien
tacctgaaggtttacagcgatggcc

SEQ ID NO: 3032882 - DNA, 25 bp, Homo sapien
ttatcagctcagtaagtgaccttga

SEQ ID NO: 3032883 - DNA, 25 bp, Homo sapien
aagatcttaatcagtctctggagga

SEQ ID NO: 3032884 - DNA, 25 bp, Homo sapien
taagacgcaggagctcttatcagct

SEQ ID NO: 3032885 - DNA, 25 bp, Homo sapien
ggcccaaggccttttgcttatggct

SEQ ID NO: 3032886 - DNA, 25 bp, Homo sapien
aaggcccaaggccttttgcttatgg

SEQ ID NO: 3032887 - DNA, 25 bp, Homo sapien
taaggcccaaggccttttgcttatg

SEQ ID NO: 3032888 - DNA, 25 bp, Homo sapien
aggcccaaggccttttgcttatggc

SEQ ID NO: 3032889 - DNA, 25 bp, Homo sapien
ccttaaacgcaagggaagctgagca

SEQ ID NO: 3032890 - DNA, 25 bp, Homo sapien
aataatccagttgccatctctcagg

SEQ ID NO: 3032891 - DNA, 25 bp, Homo sapien
ccaataatccagttgccatctctca

SEQ ID NO: 3032892 - DNA, 25 bp, Homo sapien
tgccaataatccagttgccatctct

SEQ ID NO: 3032893 - DNA, 25 bp, Homo sapien
aatccagttgccatctctcagggtg

SEQ ID NO: 3032894 - DNA, 25 bp, Homo sapien
tgccgcaagattaggttgaacttca

SEQ ID NO: 3032895 - DNA, 25 bp, Homo sapien
cgcaagattaggttgaacttcaggt

SEQ ID NO: 3032896 - DNA, 25 bp, Homo sapien
ctgccgcaagattaggttgaacttc

SEQ ID NO: 3032897 - DNA, 25 bp, Homo sapien
gccgcaagattaggttgaacttcag

SEQ ID NO: 3032898 - DNA, 25 bp, Homo sapien
ggcaagctacttctctgggggcagg

SEQ ID NO: 3032899 - DNA, 25 bp, Homo sapien
aagctacttctctgggggcaggata

SEQ ID NO: 3032900 - DNA, 25 bp, Homo sapien
tacttctctgggggcaggataatcc

SEQ ID NO: 3032901 - DNA, 25 bp, Homo sapien
ttctctgggggcaggataatccaac

SEQ ID NO: 3032902 - DNA, 25 bp, Homo sapien
agggagaacatgactggcatgaagt

SEQ ID NO: 3032903 - DNA, 25 bp, Homo sapien
tgtcccaagtcagggagaacatgac

SEQ ID NO: 3032904 - DNA, 25 bp, Homo sapien
gcttgtggtggccaccttcctcctt

SEQ ID NO: 3032905 - DNA, 25 bp, Homo sapien
ggcatgaagtaggacacaaagggct

SEQ ID NO: 3032906 - DNA, 25 bp, Homo sapien
tggggcttgatggaacccggcttga

SEQ ID NO: 3032907 - DNA, 25 bp, Homo sapien
ggcttgatggaacccggcttgacca

SEQ ID NO: 3032908 - DNA, 25 bp, Homo sapien
tggtggggcttgatggaacccggct

SEQ ID NO: 3032909 - DNA, 25 bp, Homo sapien
tctggtggggcttgatggaacccgg

SEQ ID NO: 3032910 - DNA, 25 bp, Homo sapien
ccagaccccgccacaagtcctccct

SEQ ID NO: 3032911 - DNA, 25 bp, Homo sapien
agaccccgccacaagtcctccctcg

SEQ ID NO: 3032912 - DNA, 25 bp, Homo sapien
cagaccccgccacaagtcctccctc

SEQ ID NO: 3032913 - DNA, 25 bp, Homo sapien
gaccagaccccgccacaagtcctcc

SEQ ID NO: 3032914 - DNA, 25 bp, Homo sapien
cagggccctgaggttatctccagcc

SEQ ID NO: 3032915 - DNA, 25 bp, Homo sapien
agggccctgaggttatctccagcct

SEQ ID NO: 3032916 - DNA, 25 bp, Homo sapien
gccctgaggttatctccagcctcgg

SEQ ID NO: 3032917 - DNA, 25 bp, Homo sapien
tgaggttatctccagcctcggccct

SEQ ID NO: 3032918 - DNA, 25 bp, Homo sapien
gcagatgttcttattatgtcctagg

SEQ ID NO: 3032919 - DNA, 25 bp, Homo sapien
tttaaaatgtcatgctctagcatac

SEQ ID NO: 3032920 - DNA, 25 bp, Homo sapien
cagacatggagtacactgcctctac

SEQ ID NO: 3032921 - DNA, 25 bp, Homo sapien
ggtgccatggccagacatggagtac

SEQ ID NO: 3032922 - DNA, 25 bp, Homo sapien
gccatggccagacatggagtacact

SEQ ID NO: 3032923 - DNA, 25 bp, Homo sapien
tggccagacatggagtacactgcct

SEQ ID NO: 3032924 - DNA, 25 bp, Homo sapien
gcactgggatgtaagtgtccacagc

SEQ ID NO: 3032925 - DNA, 25 bp, Homo sapien
ggcactgggatgtaagtgtccacag

SEQ ID NO: 3032926 - DNA, 25 bp, Homo sapien
ctcaagggcagacagtagagcctac

SEQ ID NO: 3032927 - DNA, 25 bp, Homo sapien
cccctttatagccaaactcagtgaa

SEQ ID NO: 3032928 - DNA, 25 bp, Homo sapien
aacagctcctgaatctccagttcca

SEQ ID NO: 3032929 - DNA, 25 bp, Homo sapien
caccatctcagagtcctggacagca

SEQ ID NO: 3032930 - DNA, 25 bp, Homo sapien
tagccaaactcagtgaacagctcct

SEQ ID NO: 3032931 - DNA, 25 bp, Homo sapien
ttgttcacatacaccaccacatgct

SEQ ID NO: 3032932 - DNA, 25 bp, Homo sapien
cttgttcacatacaccaccacatgc

SEQ ID NO: 3032933 - DNA, 25 bp, Homo sapien
acaccaccacatgctccaccccaat

SEQ ID NO: 3032934 - DNA, 25 bp, Homo sapien
catacaccaccacatgctccacccc

SEQ ID NO: 3032935 - DNA, 25 bp, Homo sapien
ccagtaataagtgctctcgggtcta

SEQ ID NO: 3032936 - DNA, 25 bp, Homo sapien
taataagtgctctcgggtctagggc

SEQ ID NO: 3032937 - DNA, 25 bp, Homo sapien
ttggccagtaataagtgctctcggg

SEQ ID NO: 3032938 - DNA, 25 bp, Homo sapien
ctatttggccagtaataagtgctct

SEQ ID NO: 3032939 - DNA, 25 bp, Homo sapien
ggtgcccgtgatcatatacttaaca

SEQ ID NO: 3032940 - DNA, 25 bp, Homo sapien
tagaatctttgtgatagctgcaatc

SEQ ID NO: 3032941 - DNA, 25 bp, Homo sapien
gatggtgatacctggagcttgctcc

SEQ ID NO: 3032942 - DNA, 25 bp, Homo sapien
caatcagtttggtcttgccatggtc

SEQ ID NO: 3032943 - DNA, 25 bp, Homo sapien
agaccctgcagcaggaaggtccggc

SEQ ID NO: 3032944 - DNA, 25 bp, Homo sapien
agccaggccgtggcacaagagaggc

SEQ ID NO: 3032945 - DNA, 25 bp, Homo sapien
acaagagaggcaatgccagggcttt

SEQ ID NO: 3032946 - DNA, 25 bp, Homo sapien
tgcagcaggaaggtccggccggcag

SEQ ID NO: 3032947 - DNA, 25 bp, Homo sapien
ggcgtcgcgcgcagcaaggtggcag

SEQ ID NO: 3032948 - DNA, 25 bp, Homo sapien
tgaggcgtcgcgcgcagcaaggtgg

SEQ ID NO: 3032949 - DNA, 25 bp, Homo sapien
ctgaagtgaggcgtcgcgcgcagca

SEQ ID NO: 3032950 - DNA, 25 bp, Homo sapien
cgcgcagcaaggtggcagccgccat

SEQ ID NO: 3032951 - DNA, 25 bp, Homo sapien
catactctcacccccggaaccaaga

SEQ ID NO: 3032952 - DNA, 25 bp, Homo sapien
tgtggtcatactctcacccccggaa

SEQ ID NO: 3032953 - DNA, 25 bp, Homo sapien
tggtcatactctcacccccggaacc

SEQ ID NO: 3032954 - DNA, 25 bp, Homo sapien
gtcatactctcacccccggaaccaa

SEQ ID NO: 3032955 - DNA, 25 bp, Homo sapien
ccgtggagcgagcaactcaacggga

SEQ ID NO: 3032956 - DNA, 25 bp, Homo sapien
cctccatgccgtggagcgagcaact

SEQ ID NO: 3032957 - DNA, 25 bp, Homo sapien
tcctatctccgtcgctgccaacaac

SEQ ID NO: 3032958 - DNA, 25 bp, Homo sapien
agccgcactcctatctccgtcgctg

SEQ ID NO: 3032959 - DNA, 25 bp, Homo sapien
tcagggacttgatgagtacttctgg

SEQ ID NO: 3032960 - DNA, 25 bp, Homo sapien
tatgtgcactgaattgtcagctcac

SEQ ID NO: 3032961 - DNA, 25 bp, Homo sapien
gggacttgatgagtacttctggcat

SEQ ID NO: 3032962 - DNA, 25 bp, Homo sapien
tgcactgaattgtcagctcactcat

SEQ ID NO: 3032963 - DNA, 25 bp, Homo sapien
cccagtgccgattttcagtgccttt

SEQ ID NO: 3032964 - DNA, 25 bp, Homo sapien
cagtgccgattttcagtgccttttc

SEQ ID NO: 3032965 - DNA, 25 bp, Homo sapien
ttccccccagtgccgattttcagtg

SEQ ID NO: 3032966 - DNA, 25 bp, Homo sapien
cccccagtgccgattttcagtgcct

SEQ ID NO: 3032967 - DNA, 25 bp, Homo sapien
tagcccgggtctcattccaagaagt

SEQ ID NO: 3032968 - DNA, 25 bp, Homo sapien
tccagtggatgaggccagttatcaa

SEQ ID NO: 3032969 - DNA, 25 bp, Homo sapien
agctctgtaatccaagagggaacag

SEQ ID NO: 3032970 - DNA, 25 bp, Homo sapien
gaccattaaggcttgctaggcccca

SEQ ID NO: 3032971 - DNA, 25 bp, Homo sapien
tacgtttctcacgtgggaggaagcc

SEQ ID NO: 3032972 - DNA, 25 bp, Homo sapien
cctggttcagcgagaaggctttgcg

SEQ ID NO: 3032973 - DNA, 25 bp, Homo sapien
aagccccgtgggatggatctgctgc

SEQ ID NO: 3032974 - DNA, 25 bp, Homo sapien
gctttgcggtgcaagcctcctgcgt

SEQ ID NO: 3032975 - DNA, 25 bp, Homo sapien
tgttcaacatcagcaaagatccttt

SEQ ID NO: 3032976 - DNA, 25 bp, Homo sapien
tgatgttcaacatcagcaaagatcc

SEQ ID NO: 3032977 - DNA, 25 bp, Homo sapien
cctgttgatgttcaacatcagcaaa

SEQ ID NO: 3032978 - DNA, 25 bp, Homo sapien
aacatcagcaaagatccttttctcc

SEQ ID NO: 3032979 - DNA, 25 bp, Homo sapien
tgcagcaaggtcaagcccgtcacaa

SEQ ID NO: 3032980 - DNA, 25 bp, Homo sapien
aaatgtgggttgaatccaaagaatt

SEQ ID NO: 3032981 - DNA, 25 bp, Homo sapien
ccaaagaattgggaatcacaggaag

SEQ ID NO: 3032982 - DNA, 25 bp, Homo sapien
agaattgggaatcacaggaagaccc

SEQ ID NO: 3032983 - DNA, 25 bp, Homo sapien
tagtagagacagtctggaagttaaa

SEQ ID NO: 3032984 - DNA, 25 bp, Homo sapien
gaaaacactcgccacacattaaatg

SEQ ID NO: 3032985 - DNA, 25 bp, Homo sapien
taaaacctcataagatttgtgtggg

SEQ ID NO: 3032986 - DNA, 25 bp, Homo sapien
ttaggaaaacactcgccacacatta

SEQ ID NO: 3032987 - DNA, 25 bp, Homo sapien
gcagacttgactggcaccatcattc

SEQ ID NO: 3032988 - DNA, 25 bp, Homo sapien
tgactatctcagactaggtttgatg

SEQ ID NO: 3032989 - DNA, 25 bp, Homo sapien
tcagactaggtttgatgattctgta

SEQ ID NO: 3032990 - DNA, 25 bp, Homo sapien
atgcagacttgactggcaccatcat

SEQ ID NO: 3032991 - DNA, 25 bp, Homo sapien
gcagcagaggcagctggatgcccat

SEQ ID NO: 3032992 - DNA, 25 bp, Homo sapien
agcagcagcagaggcagctggatgc

SEQ ID NO: 3032993 - DNA, 25 bp, Homo sapien
agcagcagaggcagctggatgccca

SEQ ID NO: 3032994 - DNA, 25 bp, Homo sapien
cagcagcagaggcagctggatgccc

SEQ ID NO: 3032995 - DNA, 25 bp, Homo sapien
cctgccagccaatccttatccgact

SEQ ID NO: 3032996 - DNA, 25 bp, Homo sapien
gcccgtcagccagagtcagaggctg

SEQ ID NO: 3032997 - DNA, 25 bp, Homo sapien
ggagcagggactgtcggtggccttc

SEQ ID NO: 3032998 - DNA, 25 bp, Homo sapien
cagccaatccttatccgactgccgg

SEQ ID NO: 3032999 - DNA, 25 bp, Homo sapien
ctaaagatgactgcagcctaattct

SEQ ID NO: 3033000 - DNA, 25 bp, Homo sapien
aagatgactgcagcctaattctggc

SEQ ID NO: 3033001 - DNA, 25 bp, Homo sapien
ttgcttttggtgcctgtaaggcagc

SEQ ID NO: 3033002 - DNA, 25 bp, Homo sapien
tgactgcagcctaattctggctctg

SEQ ID NO: 3033003 - DNA, 25 bp, Homo sapien
ttctccagctacaagtgccagggtc

SEQ ID NO: 3033004 - DNA, 25 bp, Homo sapien
catcaatgtttgcatgccttctcca

SEQ ID NO: 3033005 - DNA, 25 bp, Homo sapien
tgtgcatcatcaatgtttgcatgcc

SEQ ID NO: 3033006 - DNA, 25 bp, Homo sapien
gtgccagggtcagccgcgaatccag

SEQ ID NO: 3033007 - DNA, 25 bp, Homo sapien
cttccattctgactcatctgtcttc

SEQ ID NO: 3033008 - DNA, 25 bp, Homo sapien
tccattctgactcatctgtcttcta

SEQ ID NO: 3033009 - DNA, 25 bp, Homo sapien
tctgactcatctgtcttctaattct

SEQ ID NO: 3033010 - DNA, 25 bp, Homo sapien
cattctgactcatctgtcttctaat

SEQ ID NO: 3033011 - DNA, 25 bp, Homo sapien
tgaagttggaatttgtgaactttgg

SEQ ID NO: 3033012 - DNA, 25 bp, Homo sapien
ttccttatgtgagtttgctaagctg

SEQ ID NO: 3033013 - DNA, 25 bp, Homo sapien
tccagcgtttgacatacattgtagg

SEQ ID NO: 3033014 - DNA, 25 bp, Homo sapien
cagcgtttgacatacattgtaggct

SEQ ID NO: 3033015 - DNA, 25 bp, Homo sapien
tttgacatacattgtaggctttcct

SEQ ID NO: 3033016 - DNA, 25 bp, Homo sapien
tggtccagcgtttgacatacattgt

SEQ ID NO: 3033017 - DNA, 25 bp, Homo sapien
aagtggttcctgctgtaagacctaa

SEQ ID NO: 3033018 - DNA, 25 bp, Homo sapien
caagtggttcctgctgtaagaccta

SEQ ID NO: 3033019 - DNA, 25 bp, Homo sapien
gcacaaagtcagaaaacgaaattaa

SEQ ID NO: 3033020 - DNA, 25 bp, Homo sapien
ttcaagtggttcctgctgtaagacc

SEQ ID NO: 3033021 - DNA, 25 bp, Homo sapien
gggaactgtcttcctccgcaggcgc

SEQ ID NO: 3033022 - DNA, 25 bp, Homo sapien
gctgggtacagggtctattgtctgt

SEQ ID NO: 3033023 - DNA, 25 bp, Homo sapien
ccttcgggagctttcccgaggcagt

SEQ ID NO: 3033024 - DNA, 25 bp, Homo sapien
ggttgactccgtactttggtctgag

SEQ ID NO: 3033025 - DNA, 25 bp, Homo sapien
cgtattcccggaatcagacggtgcc

SEQ ID NO: 3033026 - DNA, 25 bp, Homo sapien
gacggtgccccatagatggccagct

SEQ ID NO: 3033027 - DNA, 25 bp, Homo sapien
ccccgagggtcaacgagaaagagat

SEQ ID NO: 3033028 - DNA, 25 bp, Homo sapien
tgggaggaagcgactccaagtctga

SEQ ID NO: 3033029 - DNA, 25 bp, Homo sapien
tcaaacacttaagggaggagctggg

SEQ ID NO: 3033030 - DNA, 25 bp, Homo sapien
gcttagtgtctagccctggtcggct

SEQ ID NO: 3033031 - DNA, 25 bp, Homo sapien
tgttgaaggttgtgcgtccacacct

SEQ ID NO: 3033032 - DNA, 25 bp, Homo sapien
gctcagtggaaagcacgtcgcatta

SEQ ID NO: 3033033 - DNA, 25 bp, Homo sapien
tgcctttactaagtacaaggaggag

SEQ ID NO: 3033034 - DNA, 25 bp, Homo sapien
gcgcactattttgtatgtgggtgaa

SEQ ID NO: 3033035 - DNA, 25 bp, Homo sapien
tgaagtagccaaaacgcgcactatt

SEQ ID NO: 3033036 - DNA, 25 bp, Homo sapien
cctactcttgaagtgaatgtgtgcc

SEQ ID NO: 3033037 - DNA, 25 bp, Homo sapien
tagctaagtgccagatatctagaag

SEQ ID NO: 3033038 - DNA, 25 bp, Homo sapien
tacggagagtagaggcaagatttcc

SEQ ID NO: 3033039 - DNA, 25 bp, Homo sapien
gatactactgccttgagctactgcc

SEQ ID NO: 3033040 - DNA, 25 bp, Homo sapien
taaatctggtttgcttggttcagca

SEQ ID NO: 3033041 - DNA, 25 bp, Homo sapien
ctataccctgtctgcatagaagagg

SEQ ID NO: 3033042 - DNA, 25 bp, Homo sapien
gatggaatgcagaactcactatacc

SEQ ID NO: 3033043 - DNA, 25 bp, Homo sapien
cccaaagtaatatggaagcagtctc

SEQ ID NO: 3033044 - DNA, 25 bp, Homo sapien
tataggtgaacttttagctcctgca

SEQ ID NO: 3033045 - DNA, 25 bp, Homo sapien
gctgtctgctgtagagcacaacata

SEQ ID NO: 3033046 - DNA, 25 bp, Homo sapien
taagcagctggtgtatatcggtaac

SEQ ID NO: 3033047 - DNA, 25 bp, Homo sapien
gatgttgaatatttgaggcttgtga

SEQ ID NO: 3033048 - DNA, 25 bp, Homo sapien
taacccttgttatagataaattgct

SEQ ID NO: 3033049 - DNA, 25 bp, Homo sapien
gatgaagtaaccttgcattcggctg

SEQ ID NO: 3033050 - DNA, 25 bp, Homo sapien
taaagttttgagtcccagctggtcc

SEQ ID NO: 3033051 - DNA, 25 bp, Homo sapien
cacaatggtgttagctgggcagaaa

SEQ ID NO: 3033052 - DNA, 25 bp, Homo sapien
gggcgacctttaccataggatgaag

SEQ ID NO: 3033053 - DNA, 25 bp, Homo sapien
aaataatgtattgtgtctgtgcaga

SEQ ID NO: 3033054 - DNA, 25 bp, Homo sapien
aaggattgctttactccaagaggag

SEQ ID NO: 3033055 - DNA, 25 bp, Homo sapien
aattgggagtctgacaagtgaaacc

SEQ ID NO: 3033056 - DNA, 25 bp, Homo sapien
gattgtcttaggataaacctccaag

SEQ ID NO: 3033057 - DNA, 25 bp, Homo sapien
tcctaggctcaagttggtgacccaa

SEQ ID NO: 3033058 - DNA, 25 bp, Homo sapien
tatctgggatccacataatggagac

SEQ ID NO: 3033059 - DNA, 25 bp, Homo sapien
gatacggaaactagaaggacatcac

SEQ ID NO: 3033060 - DNA, 25 bp, Homo sapien
tctcctgatggagcattactggcta

SEQ ID NO: 3033061 - DNA, 25 bp, Homo sapien
cgatctgtatcttttagccatgatg

SEQ ID NO: 3033062 - DNA, 25 bp, Homo sapien
tgaccggtgggtacgatctgtatct

SEQ ID NO: 3033063 - DNA, 25 bp, Homo sapien
tgctggaggagcaaatgaccggtgg

SEQ ID NO: 3033064 - DNA, 25 bp, Homo sapien
agcaaatgaccggtgggtacgatct

SEQ ID NO: 3033065 - DNA, 25 bp, Homo sapien
gagaattgatgaggattatccagtg

SEQ ID NO: 3033066 - DNA, 25 bp, Homo sapien
tgagcaatggtctttgctgtgcctt

SEQ ID NO: 3033067 - DNA, 25 bp, Homo sapien
ggattatccagtgcaagttgcacct

SEQ ID NO: 3033068 - DNA, 25 bp, Homo sapien
tgtgccttctctactgatggcagtg

SEQ ID NO: 3033069 - DNA, 25 bp, Homo sapien
tgtcaatccgaagagtgatgcccac

SEQ ID NO: 3033070 - DNA, 25 bp, Homo sapien
taagctgctatatgttgaatggacc

SEQ ID NO: 3033071 - DNA, 25 bp, Homo sapien
ggtccctagcctgcaacatttatgt

SEQ ID NO: 3033072 - DNA, 25 bp, Homo sapien
atttttgggccactccacggcaggt

SEQ ID NO: 3033073 - DNA, 25 bp, Homo sapien
cctttaattacattccagcaggagg

SEQ ID NO: 3033074 - DNA, 25 bp, Homo sapien
aataatgtgcctcaagatgttggca

SEQ ID NO: 3033075 - DNA, 25 bp, Homo sapien
tgttggcaacaagtcatgatataga

SEQ ID NO: 3033076 - DNA, 25 bp, Homo sapien
ccttggctatgaggagcataagtat

SEQ ID NO: 3033077 - DNA, 25 bp, Homo sapien
aggatttaggcctgtcagagcagcc

SEQ ID NO: 3033078 - DNA, 25 bp, Homo sapien
cagccctggtggaccgtagaggaag

SEQ ID NO: 3033079 - DNA, 25 bp, Homo sapien
tgcttgagggctagagggctccctg

SEQ ID NO: 3033080 - DNA, 25 bp, Homo sapien
tgagggcctgtttgcttgagggcta

SEQ ID NO: 3033081 - DNA, 25 bp, Homo sapien
acattctgcaaaaccaacttctctg

SEQ ID NO: 3033082 - DNA, 25 bp, Homo sapien
gggcggattgttccatttttgacca

SEQ ID NO: 3033083 - DNA, 25 bp, Homo sapien
ctattctggtgggcggattgttcca

SEQ ID NO: 3033084 - DNA, 25 bp, Homo sapien
cattctgcaaaaccaacttctctgg

SEQ ID NO: 3033085 - DNA, 25 bp, Homo sapien
cctgaatgtggtatgggtccggcct

SEQ ID NO: 3033086 - DNA, 25 bp, Homo sapien
caaaagcttcatgtcctgaatgtgg

SEQ ID NO: 3033087 - DNA, 25 bp, Homo sapien
catgtcctgaatgtggtatgggtcc

SEQ ID NO: 3033088 - DNA, 25 bp, Homo sapien
gcttcatgtcctgaatgtggtatgg

SEQ ID NO: 3033089 - DNA, 25 bp, Homo sapien
cagcacagcacgacgggcttggaga

SEQ ID NO: 3033090 - DNA, 25 bp, Homo sapien
gcccatgttcctcaccgggggagct

SEQ ID NO: 3033091 - DNA, 25 bp, Homo sapien
cagcaggctggaacgatttctagaa

SEQ ID NO: 3033092 - DNA, 25 bp, Homo sapien
tggttttggtctggccgtgggccag

SEQ ID NO: 3033093 - DNA, 25 bp, Homo sapien
acttctagccctcggcggtggccag

SEQ ID NO: 3033094 - DNA, 25 bp, Homo sapien
catcttctgagtgtcatgggaacgg

SEQ ID NO: 3033095 - DNA, 25 bp, Homo sapien
acacgcacccgcacagtcccttcat

SEQ ID NO: 3033096 - DNA, 25 bp, Homo sapien
ctgcggattgggagtaaatattaaa

SEQ ID NO: 3033097 - DNA, 25 bp, Homo sapien
acgcccctcggtgatttctggccct

SEQ ID NO: 3033098 - DNA, 25 bp, Homo sapien
cacgcccctcggtgatttctggccc

SEQ ID NO: 3033099 - DNA, 25 bp, Homo sapien
ggttgagcctcttgggggcctcttg

SEQ ID NO: 3033100 - DNA, 25 bp, Homo sapien
ccggttgagcctcttgggggcctct

SEQ ID NO: 3033101 - DNA, 25 bp, Homo sapien
tcagctgaacttgaagctaaggctg

SEQ ID NO: 3033102 - DNA, 25 bp, Homo sapien
gtcttcctcaagttgatctcttttc

SEQ ID NO: 3033103 - DNA, 25 bp, Homo sapien
ctaaggctgtcttcctcaagttgat

SEQ ID NO: 3033104 - DNA, 25 bp, Homo sapien
tgatctcttttctgaatggcaaatc

SEQ ID NO: 3033105 - DNA, 25 bp, Homo sapien
tgcattgagcatcaactccgtgttg

SEQ ID NO: 3033106 - DNA, 25 bp, Homo sapien
atgcattgagcatcaactccgtgtt

SEQ ID NO: 3033107 - DNA, 25 bp, Homo sapien
gcattgagcatcaactccgtgttgg

SEQ ID NO: 3033108 - DNA, 25 bp, Homo sapien
gcgaggacaggcctttcatgtacca

SEQ ID NO: 3033109 - DNA, 25 bp, Homo sapien
gtgcatgtggccgacaacgacctga

SEQ ID NO: 3033110 - DNA, 25 bp, Homo sapien
gacaacgacctgatggccgtgctga

SEQ ID NO: 3033111 - DNA, 25 bp, Homo sapien
ggacaggcctttcatgtaccagcct

SEQ ID NO: 3033112 - DNA, 25 bp, Homo sapien
cagggcagcctgactatagcagggc

SEQ ID NO: 3033113 - DNA, 25 bp, Homo sapien
gggcagcctgactatagcagggcca

SEQ ID NO: 3033114 - DNA, 25 bp, Homo sapien
agggcagcctgactatagcagggcc

SEQ ID NO: 3033115 - DNA, 25 bp, Homo sapien
ggcagcctgactatagcagggccag

SEQ ID NO: 3033116 - DNA, 25 bp, Homo sapien
ccagtacatccagaatgttacaaca

SEQ ID NO: 3033117 - DNA, 25 bp, Homo sapien
gtacatccagaatgttacaacagat

SEQ ID NO: 3033118 - DNA, 25 bp, Homo sapien
gaatgttacaacagattaactttag

SEQ ID NO: 3033119 - DNA, 25 bp, Homo sapien
atccagaatgttacaacagattaac

SEQ ID NO: 3033120 - DNA, 25 bp, Homo sapien
aggaggatgcattctaggcactggc

SEQ ID NO: 3033121 - DNA, 25 bp, Homo sapien
gagccatgtcactgccttgttcctc

SEQ ID NO: 3033122 - DNA, 25 bp, Homo sapien
ggatgcattctaggcactggcgcag

SEQ ID NO: 3033123 - DNA, 25 bp, Homo sapien
agggacctgagccatgtcactgcct

SEQ ID NO: 3033124 - DNA, 25 bp, Homo sapien
ccatgggctgggagttgggtttcct

SEQ ID NO: 3033125 - DNA, 25 bp, Homo sapien
gggatgtcgggttccccatgggctg

SEQ ID NO: 3033126 - DNA, 25 bp, Homo sapien
catgggctgggagttgggtttcctt

SEQ ID NO: 3033127 - DNA, 25 bp, Homo sapien
ctgggatgtcgggttccccatgggc

SEQ ID NO: 3033128 - DNA, 25 bp, Homo sapien
aggacccaggtctgtgctggcatca

SEQ ID NO: 3033129 - DNA, 25 bp, Homo sapien
ggacccaggtctgtgctggcatcac

SEQ ID NO: 3033130 - DNA, 25 bp, Homo sapien
gacccaggtctgtgctggcatcaca

SEQ ID NO: 3033131 - DNA, 25 bp, Homo sapien
acccaggtctgtgctggcatcacat

SEQ ID NO: 3033132 - DNA, 25 bp, Homo sapien
tgcaagggggacaggaaggcccttc

SEQ ID NO: 3033133 - DNA, 25 bp, Homo sapien
gcccaccagcccggttccagcggcc

SEQ ID NO: 3033134 - DNA, 25 bp, Homo sapien
ctgcaagggggacaggaaggccctt

SEQ ID NO: 3033135 - DNA, 25 bp, Homo sapien
ccggcccaccagcccggttccagcg

SEQ ID NO: 3033136 - DNA, 25 bp, Homo sapien
acaggcctagcccagggagcccaag

SEQ ID NO: 3033137 - DNA, 25 bp, Homo sapien
acagccccgggaccatgggacaggc

SEQ ID NO: 3033138 - DNA, 25 bp, Homo sapien
ccccatgacgatttcaaacagagct

SEQ ID NO: 3033139 - DNA, 25 bp, Homo sapien
cagggagcccaaggggaccctgaca

SEQ ID NO: 3033140 - DNA, 25 bp, Homo sapien
cctcctgcactcgctgatgcggcag

SEQ ID NO: 3033141 - DNA, 25 bp, Homo sapien
tccctcctgcactcgctgatgcggc

SEQ ID NO: 3033142 - DNA, 25 bp, Homo sapien
ccctcctgcactcgctgatgcggca

SEQ ID NO: 3033143 - DNA, 25 bp, Homo sapien
ctcctgcactcgctgatgcggcagc

SEQ ID NO: 3033144 - DNA, 25 bp, Homo sapien
gagtggtctgggctgcctcaaaatc

SEQ ID NO: 3033145 - DNA, 25 bp, Homo sapien
caaaatccaggaaagtgcgccgcag

SEQ ID NO: 3033146 - DNA, 25 bp, Homo sapien
tcttccacgtcagggttgtttcctc

SEQ ID NO: 3033147 - DNA, 25 bp, Homo sapien
aggtattctactcctgcccgctggg

SEQ ID NO: 3033148 - DNA, 25 bp, Homo sapien
tggaaatggatttggcagtctcgtt

SEQ ID NO: 3033149 - DNA, 25 bp, Homo sapien
tggaatgggagtccctcacagttgg

SEQ ID NO: 3033150 - DNA, 25 bp, Homo sapien
cgtttttcgcatcattggaatggga

SEQ ID NO: 3033151 - DNA, 25 bp, Homo sapien
agaagaagtaatgctgggtggaaat

SEQ ID NO: 3033152 - DNA, 25 bp, Homo sapien
acaggtggccattcgcagaaaggag

SEQ ID NO: 3033153 - DNA, 25 bp, Homo sapien
caggtggccattcgcagaaaggagg

SEQ ID NO: 3033154 - DNA, 25 bp, Homo sapien
taacaggtggccattcgcagaaagg

SEQ ID NO: 3033155 - DNA, 25 bp, Homo sapien
aacaggtggccattcgcagaaagga

SEQ ID NO: 3033156 - DNA, 25 bp, Homo sapien
gctgcgatcggccatgtgtctagag

SEQ ID NO: 3033157 - DNA, 25 bp, Homo sapien
atcggccatgtgtctagaggaaact

SEQ ID NO: 3033158 - DNA, 25 bp, Homo sapien
gtgggctgcgatcggccatgtgtct

SEQ ID NO: 3033159 - DNA, 25 bp, Homo sapien
cgatcggccatgtgtctagaggaaa

SEQ ID NO: 3033160 - DNA, 25 bp, Homo sapien
gcttgttgagccagtcccagattct

SEQ ID NO: 3033161 - DNA, 25 bp, Homo sapien
ataaaacggagagttggtcctccag

SEQ ID NO: 3033162 - DNA, 25 bp, Homo sapien
ttctctgcagggcgcttgttgagcc

SEQ ID NO: 3033163 - DNA, 25 bp, Homo sapien
tgcagggcgcttgttgagccagtcc

SEQ ID NO: 3033164 - DNA, 25 bp, Homo sapien
cattgcccgtgatgtgccctgggaa

SEQ ID NO: 3033165 - DNA, 25 bp, Homo sapien
gtccacattgcccgtgatgtgccct

SEQ ID NO: 3033166 - DNA, 25 bp, Homo sapien
agggtccacattgcccgtgatgtgc

SEQ ID NO: 3033167 - DNA, 25 bp, Homo sapien
cacattgcccgtgatgtgccctggg

SEQ ID NO: 3033168 - DNA, 25 bp, Homo sapien
tttagctgataaggcatgctgcacc

SEQ ID NO: 3033169 - DNA, 25 bp, Homo sapien
tgtggcccttcaatcacgagtcagc

SEQ ID NO: 3033170 - DNA, 25 bp, Homo sapien
taagatacacgtaggtactgtggcc

SEQ ID NO: 3033171 - DNA, 25 bp, Homo sapien
ttatatagctatctccatgccatgg

SEQ ID NO: 3033172 - DNA, 25 bp, Homo sapien
tccagtgtgatggggaggtccctgg

SEQ ID NO: 3033173 - DNA, 25 bp, Homo sapien
ccagtgtgatggggaggtccctggg

SEQ ID NO: 3033174 - DNA, 25 bp, Homo sapien
tggggaggtccctggggagcttgag

SEQ ID NO: 3033175 - DNA, 25 bp, Homo sapien
tgatggggaggtccctggggagctt

SEQ ID NO: 3033176 - DNA, 25 bp, Homo sapien
tcagtttgctgggaggatctctgct

SEQ ID NO: 3033177 - DNA, 25 bp, Homo sapien
gtggtgccagcattcctgtctgatg

SEQ ID NO: 3033178 - DNA, 25 bp, Homo sapien
ggtgccagcattcctgtctgatgcc

SEQ ID NO: 3033179 - DNA, 25 bp, Homo sapien
gagtgaaggaccttaaactccatac

SEQ ID NO: 3033180 - DNA, 25 bp, Homo sapien
ggtaacccatttcattcttccagat

SEQ ID NO: 3033181 - DNA, 25 bp, Homo sapien
ccacctctttgcgatatgagacagc

SEQ ID NO: 3033182 - DNA, 25 bp, Homo sapien
cagacgttcccaaaaagggcttgcg

SEQ ID NO: 3033183 - DNA, 25 bp, Homo sapien
agagtcagtgcgtgcacagcaagac

SEQ ID NO: 3033184 - DNA, 25 bp, Homo sapien
gatgggcaggcaggtttgtacaggt

SEQ ID NO: 3033185 - DNA, 25 bp, Homo sapien
gaccgtcacggtggcagtttctttc

SEQ ID NO: 3033186 - DNA, 25 bp, Homo sapien
cagtttctttccgggatgggcaggc

SEQ ID NO: 3033187 - DNA, 25 bp, Homo sapien
ccttggctttatcaggagatcaagc

SEQ ID NO: 3033188 - DNA, 25 bp, Homo sapien
gcaccagcccctttacatgggttga

SEQ ID NO: 3033189 - DNA, 25 bp, Homo sapien
caggattcataacaaagggtatgca

SEQ ID NO: 3033190 - DNA, 25 bp, Homo sapien
gatcaagcttatgtgaagctccagg

SEQ ID NO: 3033191 - DNA, 25 bp, Homo sapien
gatgtcgtttgacttcagttgttgg

SEQ ID NO: 3033192 - DNA, 25 bp, Homo sapien
cacggcacagatgtcgtttgacttc

SEQ ID NO: 3033193 - DNA, 25 bp, Homo sapien
cagccttccagcgttggattcctgt

SEQ ID NO: 3033194 - DNA, 25 bp, Homo sapien
tcaaccgtaatcacggcacagatgt

SEQ ID NO: 3033195 - DNA, 25 bp, Homo sapien
cacagtcacgtttgttgagtgagtt

SEQ ID NO: 3033196 - DNA, 25 bp, Homo sapien
cacgtttgttgagtgagttgggata

SEQ ID NO: 3033197 - DNA, 25 bp, Homo sapien
ctgtggcacagtcacgtttgttgag

SEQ ID NO: 3033198 - DNA, 25 bp, Homo sapien
ttcccagggcctctcgcaggctgtg

SEQ ID NO: 3033199 - DNA, 25 bp, Homo sapien
gtttttaagcactgcctgatactcg

SEQ ID NO: 3033200 - DNA, 25 bp, Homo sapien
ctcgattatgtggatgtagttggat

SEQ ID NO: 3033201 - DNA, 25 bp, Homo sapien
aagcactgcctgatactcgattatg

SEQ ID NO: 3033202 - DNA, 25 bp, Homo sapien
cctgatactcgattatgtggatgta

SEQ ID NO: 3033203 - DNA, 25 bp, Homo sapien
gcacatttcggtgatttccacctcc

SEQ ID NO: 3033204 - DNA, 25 bp, Homo sapien
tggggatttgtccagcctttatctc

SEQ ID NO: 3033205 - DNA, 25 bp, Homo sapien
gggttgcacatttcggtgatttcca

SEQ ID NO: 3033206 - DNA, 25 bp, Homo sapien
agcagacttgcgggccggcagctgg

SEQ ID NO: 3033207 - DNA, 25 bp, Homo sapien
ccttatgttcctagatggctgctgg

SEQ ID NO: 3033208 - DNA, 25 bp, Homo sapien
tggaggtccagctttcacatcagct

SEQ ID NO: 3033209 - DNA, 25 bp, Homo sapien
cccaatgtcggtgtggtgggtccac

SEQ ID NO: 3033210 - DNA, 25 bp, Homo sapien
tctggatgtaggtaacccaatgtcg

SEQ ID NO: 3033211 - DNA, 25 bp, Homo sapien
agcgtgtaggtgattgtgggagtcc

SEQ ID NO: 3033212 - DNA, 25 bp, Homo sapien
gagagaccacttggccagatgcccc

SEQ ID NO: 3033213 - DNA, 25 bp, Homo sapien
tctaaattgggaggcataagcgtgt

SEQ ID NO: 3033214 - DNA, 25 bp, Homo sapien
ctgctgagttgtcagaaaggtagga

SEQ ID NO: 3033215 - DNA, 25 bp, Homo sapien
taagcttttccaggttgcagctgct

SEQ ID NO: 3033216 - DNA, 25 bp, Homo sapien
ttttccaggttgcagctgcttaatc

SEQ ID NO: 3033217 - DNA, 25 bp, Homo sapien
gcttttccaggttgcagctgcttaa

SEQ ID NO: 3033218 - DNA, 25 bp, Homo sapien
gcagctgcttaatcttcaggcagct

SEQ ID NO: 3033219 - DNA, 25 bp, Homo sapien
gttgatcatgttcagtcctcgtgca

SEQ ID NO: 3033220 - DNA, 25 bp, Homo sapien
tcagtcctcgtgcatcttttttaaa

SEQ ID NO: 3033221 - DNA, 25 bp, Homo sapien
catttgttgatcatgttcagtcctc

SEQ ID NO: 3033222 - DNA, 25 bp, Homo sapien
catgttcagtcctcgtgcatctttt

SEQ ID NO: 3033223 - DNA, 25 bp, Homo sapien
tcctctcacgtgttggaaaacgtat

SEQ ID NO: 3033224 - DNA, 25 bp, Homo sapien
attcttgggccgtggcgtggtattt

SEQ ID NO: 3033225 - DNA, 25 bp, Homo sapien
cacgtgttggaaaacgtatgaactc

SEQ ID NO: 3033226 - DNA, 25 bp, Homo sapien
caggttgagaggtcctctcacgtgt

SEQ ID NO: 3033227 - DNA, 25 bp, Homo sapien
ctaggacttggttactcaggagggg

SEQ ID NO: 3033228 - DNA, 25 bp, Homo sapien
atgctggtgatctccttccctagga

SEQ ID NO: 3033229 - DNA, 25 bp, Homo sapien
ccctaggacttggttactcaggagg

SEQ ID NO: 3033230 - DNA, 25 bp, Homo sapien
cagcatgctggtgatctccttccct

SEQ ID NO: 3033231 - DNA, 25 bp, Homo sapien
catgggccataattgttttagtcca

SEQ ID NO: 3033232 - DNA, 25 bp, Homo sapien
cataattgttttagtccaagccttg

SEQ ID NO: 3033233 - DNA, 25 bp, Homo sapien
tttgaaatccggcagggacagctcg

SEQ ID NO: 3033234 - DNA, 25 bp, Homo sapien
cagctcggctgagagttgcattcgt

SEQ ID NO: 3033235 - DNA, 25 bp, Homo sapien
tttgtacttttctactaaaatcagc

SEQ ID NO: 3033236 - DNA, 25 bp, Homo sapien
tactaaaatcagcagggtactcttt

SEQ ID NO: 3033237 - DNA, 25 bp, Homo sapien
tctactaaaatcagcagggtactct

SEQ ID NO: 3033238 - DNA, 25 bp, Homo sapien
cttttctactaaaatcagcagggta

SEQ ID NO: 3033239 - DNA, 25 bp, Homo sapien
cttcccactcagatcagcccattca

SEQ ID NO: 3033240 - DNA, 25 bp, Homo sapien
ctatagccttcccactcagatcagc

SEQ ID NO: 3033241 - DNA, 25 bp, Homo sapien
ccactcagatcagcccattcacaga

SEQ ID NO: 3033242 - DNA, 25 bp, Homo sapien
gccttcccactcagatcagcccatt

SEQ ID NO: 3033243 - DNA, 25 bp, Homo sapien
tcggatccgtcatggaagatctggc

SEQ ID NO: 3033244 - DNA, 25 bp, Homo sapien
gcttggggcatgctgttgagctcca

SEQ ID NO: 3033245 - DNA, 25 bp, Homo sapien
cccctgtgttctgtgggcgagtgct

SEQ ID NO: 3033246 - DNA, 25 bp, Homo sapien
gagagcacttcagcatatagccagc

SEQ ID NO: 3033247 - DNA, 25 bp, Homo sapien
cagtattcgtgtgctctgggtcagt

SEQ ID NO: 3033248 - DNA, 25 bp, Homo sapien
agtattcgtgtgctctgggtcagtg

SEQ ID NO: 3033249 - DNA, 25 bp, Homo sapien
gttggcaagcatagggttcccctct

SEQ ID NO: 3033250 - DNA, 25 bp, Homo sapien
ttggcaagcatagggttcccctctg

SEQ ID NO: 3033251 - DNA, 25 bp, Homo sapien
tactgttggagcagcggcttgtgct

SEQ ID NO: 3033252 - DNA, 25 bp, Homo sapien
aagagttggagatggtactgttgga

SEQ ID NO: 3033253 - DNA, 25 bp, Homo sapien
ctgctaaagtatgccggtatgccag

SEQ ID NO: 3033254 - DNA, 25 bp, Homo sapien
tcctgctaaagtatgccggtatgcc

SEQ ID NO: 3033255 - DNA, 25 bp, Homo sapien
taaagtatgccggtatgccagaaat

SEQ ID NO: 3033256 - DNA, 25 bp, Homo sapien
cttcctgctaaagtatgccggtatg

SEQ ID NO: 3033257 - DNA, 25 bp, Homo sapien
cctgggtggggaccattccatcagg

SEQ ID NO: 3033258 - DNA, 25 bp, Homo sapien
gggtggggaccattccatcaggggc

SEQ ID NO: 3033259 - DNA, 25 bp, Homo sapien
ctgggtggggaccattccatcaggg

SEQ ID NO: 3033260 - DNA, 25 bp, Homo sapien
ggtggggaccattccatcaggggca

SEQ ID NO: 3033261 - DNA, 25 bp, Homo sapien
gaatcagggtagaacaaggattcca

SEQ ID NO: 3033262 - DNA, 25 bp, Homo sapien
catgtatcttcctaagtgcagtggt

SEQ ID NO: 3033263 - DNA, 25 bp, Homo sapien
caactgaatcagggtagaacaagga

SEQ ID NO: 3033264 - DNA, 25 bp, Homo sapien
tgggaaactgagtcatcatgtatct

SEQ ID NO: 3033265 - DNA, 25 bp, Homo sapien
tttcccaggaagcatcatgggtgct

SEQ ID NO: 3033266 - DNA, 25 bp, Homo sapien
cataaaatggcctagcagttgttgc

SEQ ID NO: 3033267 - DNA, 25 bp, Homo sapien
gttgcacagaggagctaactcatca

SEQ ID NO: 3033268 - DNA, 25 bp, Homo sapien
tgctgagaaaactcgggcccttggc

SEQ ID NO: 3033269 - DNA, 25 bp, Homo sapien
catctgctgcagttcatagggttct

SEQ ID NO: 3033270 - DNA, 25 bp, Homo sapien
ctaggagttttgacagctgagcatc

SEQ ID NO: 3033271 - DNA, 25 bp, Homo sapien
tcacccgaagcatgcgagaagctgc

SEQ ID NO: 3033272 - DNA, 25 bp, Homo sapien
tgaaggttgtcccatgagccatccc

SEQ ID NO: 3033273 - DNA, 25 bp, Homo sapien
ccacggacagcataaaccagggagc

SEQ ID NO: 3033274 - DNA, 25 bp, Homo sapien
gaagagacctctgctctgtcacgaa

SEQ ID NO: 3033275 - DNA, 25 bp, Homo sapien
ccaaccatgtagaaagtgaatcgct

SEQ ID NO: 3033276 - DNA, 25 bp, Homo sapien
tccagcctgtaggtcaagtatggcc

SEQ ID NO: 3033277 - DNA, 25 bp, Homo sapien
tcagtgtggtcaagcattgtagacc

SEQ ID NO: 3033278 - DNA, 25 bp, Homo sapien
catctggcaacttgctgtcatgtca

SEQ ID NO: 3033279 - DNA, 25 bp, Homo sapien
ggactccgtggccaagcatgcttag

SEQ ID NO: 3033280 - DNA, 25 bp, Homo sapien
gcattgtagacctctatgaaccaaa

SEQ ID NO: 3033281 - DNA, 25 bp, Homo sapien
caatgaggcagtcagctgggcattc

SEQ ID NO: 3033282 - DNA, 25 bp, Homo sapien
tgtcacagataacgacagtgccacg

SEQ ID NO: 3033283 - DNA, 25 bp, Homo sapien
ggagtgtttcaagccagggagcaac

SEQ ID NO: 3033284 - DNA, 25 bp, Homo sapien
cagagcgatgagatagagcgagcct

SEQ ID NO: 3033285 - DNA, 25 bp, Homo sapien
ttgtctgcttgtagggaaatacagc

SEQ ID NO: 3033286 - DNA, 25 bp, Homo sapien
ctacgggccgtcagagcgctgacat

SEQ ID NO: 3033287 - DNA, 25 bp, Homo sapien
caccaaagatatcttcgtgatagca

SEQ ID NO: 3033288 - DNA, 25 bp, Homo sapien
actgccgccttgtctgcttgtaggg

SEQ ID NO: 3033289 - DNA, 25 bp, Homo sapien
tcgtggagtacacggagcaccttgc

SEQ ID NO: 3033290 - DNA, 25 bp, Homo sapien
cctcgtggagtacacggagcacctt

SEQ ID NO: 3033291 - DNA, 25 bp, Homo sapien
ctcgtggagtacacggagcaccttg

SEQ ID NO: 3033292 - DNA, 25 bp, Homo sapien
cgtggagtacacggagcaccttgct

SEQ ID NO: 3033293 - DNA, 25 bp, Homo sapien
agaccagggtcctgcggccttccag

SEQ ID NO: 3033294 - DNA, 25 bp, Homo sapien
cggcaccagaagaccagggtcctgc

SEQ ID NO: 3033295 - DNA, 25 bp, Homo sapien
ggtaggtggcggtcctcatctgggc

SEQ ID NO: 3033296 - DNA, 25 bp, Homo sapien
tcatctgggcggcggcaccagaaga

SEQ ID NO: 3033297 - DNA, 25 bp, Homo sapien
gtcatggagccgctgctgccagaaa

SEQ ID NO: 3033298 - DNA, 25 bp, Homo sapien
gagtcatggagccgctgctgccaga

SEQ ID NO: 3033299 - DNA, 25 bp, Homo sapien
ttccgctgggagtcatggagccgct

SEQ ID NO: 3033300 - DNA, 25 bp, Homo sapien
ccttccgctgggagtcatggagccg

SEQ ID NO: 3033301 - DNA, 25 bp, Homo sapien
aggcctgacaaggatgcgaggatgg

SEQ ID NO: 3033302 - DNA, 25 bp, Homo sapien
agcgatacctgtgccaggcctgaca

SEQ ID NO: 3033303 - DNA, 25 bp, Homo sapien
gagcgatacctgtgccaggcctgac

SEQ ID NO: 3033304 - DNA, 25 bp, Homo sapien
gcgatacctgtgccaggcctgacaa

SEQ ID NO: 3033305 - DNA, 25 bp, Homo sapien
caggcccacgcacacacaggatggc

SEQ ID NO: 3033306 - DNA, 25 bp, Homo sapien
aagagggggccagtcctcagacacc

SEQ ID NO: 3033307 - DNA, 25 bp, Homo sapien
gggccagtcctcagacaccccaggc

SEQ ID NO: 3033308 - DNA, 25 bp, Homo sapien
ggcccacgcacacacaggatggctg

SEQ ID NO: 3033309 - DNA, 25 bp, Homo sapien
cagttgttgagccatgtgctgcaga

SEQ ID NO: 3033310 - DNA, 25 bp, Homo sapien
gttgagccatgtgctgcagacgccg

SEQ ID NO: 3033311 - DNA, 25 bp, Homo sapien
agccatgtgctgcagacgccgtggt

SEQ ID NO: 3033312 - DNA, 25 bp, Homo sapien
catgtgctgcagacgccgtggtgca

SEQ ID NO: 3033313 - DNA, 25 bp, Homo sapien
tgtgcgtgctcatgagcgtggccct

SEQ ID NO: 3033314 - DNA, 25 bp, Homo sapien
tactgctgtgcgtgctcatgagcgt

SEQ ID NO: 3033315 - DNA, 25 bp, Homo sapien
tgcgtgctcatgagcgtggcccttg

SEQ ID NO: 3033316 - DNA, 25 bp, Homo sapien
ggtggctactgctgtgcgtgctcat

SEQ ID NO: 3033317 - DNA, 25 bp, Homo sapien
atgggcatgtgatcccaggaggagc

SEQ ID NO: 3033318 - DNA, 25 bp, Homo sapien
aagctagcagacacccacagggaca

SEQ ID NO: 3033319 - DNA, 25 bp, Homo sapien
acagtcaggtggatctccatgggca

SEQ ID NO: 3033320 - DNA, 25 bp, Homo sapien
gagcaggaagctagcagacacccac

SEQ ID NO: 3033321 - DNA, 25 bp, Homo sapien
cagcctcgtctctcaggcttttctg

SEQ ID NO: 3033322 - DNA, 25 bp, Homo sapien
ggcagcctcttgtcactgacccagt

SEQ ID NO: 3033323 - DNA, 25 bp, Homo sapien
cacctgggccagcttttggagcagc

SEQ ID NO: 3033324 - DNA, 25 bp, Homo sapien
cagcttttggagcagcagctgggtg

SEQ ID NO: 3033325 - DNA, 25 bp, Homo sapien
tggccctcctcacaagagaattcca

SEQ ID NO: 3033326 - DNA, 25 bp, Homo sapien
gccctcctcacaagagaattccacc

SEQ ID NO: 3033327 - DNA, 25 bp, Homo sapien
ccttggccctcctcacaagagaatt

SEQ ID NO: 3033328 - DNA, 25 bp, Homo sapien
ttggccctcctcacaagagaattcc

SEQ ID NO: 3033329 - DNA, 25 bp, Homo sapien
cagacgcttagagtccaagctggaa

SEQ ID NO: 3033330 - DNA, 25 bp, Homo sapien
aatcagtagagcatcacccgagaag

SEQ ID NO: 3033331 - DNA, 25 bp, Homo sapien
gttaccaggtgagccagtcctaccg

SEQ ID NO: 3033332 - DNA, 25 bp, Homo sapien
agtcctaccgatggcatggctgcta

SEQ ID NO: 3033333 - DNA, 25 bp, Homo sapien
cctcgtggtgaacatgttattggcg

SEQ ID NO: 3033334 - DNA, 25 bp, Homo sapien
tggtgaacatgttattggcgtgcat

SEQ ID NO: 3033335 - DNA, 25 bp, Homo sapien
ggactctgtagcttctgctgagatt

SEQ ID NO: 3033336 - DNA, 25 bp, Homo sapien
tttgagcctcgtggtgaacatgtta

SEQ ID NO: 3033337 - DNA, 25 bp, Homo sapien
aggacacagagacggtgaaacggca

SEQ ID NO: 3033338 - DNA, 25 bp, Homo sapien
acacagagacggtgaaacggcaaag

SEQ ID NO: 3033339 - DNA, 25 bp, Homo sapien
aagtggctcttgagcgtgggtggca

SEQ ID NO: 3033340 - DNA, 25 bp, Homo sapien
aacggcaaagtggctcttgagcgtg

SEQ ID NO: 3033341 - DNA, 25 bp, Homo sapien
tccctcagcgccttgagtcttgtgc

SEQ ID NO: 3033342 - DNA, 25 bp, Homo sapien
gagtcttgtgccctaacaggctctt

SEQ ID NO: 3033343 - DNA, 25 bp, Homo sapien
gctgtctctgttcagaaggacctgg

SEQ ID NO: 3033344 - DNA, 25 bp, Homo sapien
gcgccttgagtcttgtgccctaaca

SEQ ID NO: 3033345 - DNA, 25 bp, Homo sapien
gcacgagcctgaagtggtgcaagcc

SEQ ID NO: 3033346 - DNA, 25 bp, Homo sapien
cctgcacgagcctgaagtggtgcaa

SEQ ID NO: 3033347 - DNA, 25 bp, Homo sapien
gctgtgagtcctgcacgagcctgaa

SEQ ID NO: 3033348 - DNA, 25 bp, Homo sapien
tgagtcctgcacgagcctgaagtgg

SEQ ID NO: 3033349 - DNA, 25 bp, Homo sapien
tggcttcggacatcaaacgtttcac

SEQ ID NO: 3033350 - DNA, 25 bp, Homo sapien
gttggcttcggacatcaaacgtttc

SEQ ID NO: 3033351 - DNA, 25 bp, Homo sapien
ttggcttcggacatcaaacgtttca

SEQ ID NO: 3033352 - DNA, 25 bp, Homo sapien
ggcttcggacatcaaacgtttcaca

SEQ ID NO: 3033353 - DNA, 25 bp, Homo sapien
tctcccccagagttgtgtgcacaag

SEQ ID NO: 3033354 - DNA, 25 bp, Homo sapien
cttctcccccagagttgtgtgcaca

SEQ ID NO: 3033355 - DNA, 25 bp, Homo sapien
gcacaaggtggagctcttctaaggg

SEQ ID NO: 3033356 - DNA, 25 bp, Homo sapien
gtgtgcacaaggtggagctcttcta

SEQ ID NO: 3033357 - DNA, 25 bp, Homo sapien
agaactgagggtacttgctggagct

SEQ ID NO: 3033358 - DNA, 25 bp, Homo sapien
actgggtgaggtcatgagcaaaggc

SEQ ID NO: 3033359 - DNA, 25 bp, Homo sapien
ggcacagaactgagggtacttgctg

SEQ ID NO: 3033360 - DNA, 25 bp, Homo sapien
gggtgaggtcatgagcaaaggcaca

SEQ ID NO: 3033361 - DNA, 25 bp, Homo sapien
tgcccaaggaaacacacagagactc

SEQ ID NO: 3033362 - DNA, 25 bp, Homo sapien
cccaaggaaacacacagagactcat

SEQ ID NO: 3033363 - DNA, 25 bp, Homo sapien
gcccaaggaaacacacagagactca

SEQ ID NO: 3033364 - DNA, 25 bp, Homo sapien
ctgcccaaggaaacacacagagact

SEQ ID NO: 3033365 - DNA, 25 bp, Homo sapien
agctctttcagcatgaagagggatt

SEQ ID NO: 3033366 - DNA, 25 bp, Homo sapien
ctctttcagcatgaagagggatttc

SEQ ID NO: 3033367 - DNA, 25 bp, Homo sapien
tgaatttgttggtgagctctttcag

SEQ ID NO: 3033368 - DNA, 25 bp, Homo sapien
aatttgttggtgagctctttcagca

SEQ ID NO: 3033369 - DNA, 25 bp, Homo sapien
gggaagtctccattcccaaatgtgg

SEQ ID NO: 3033370 - DNA, 25 bp, Homo sapien
ccctgtacttgtccatgcagagaac

SEQ ID NO: 3033371 - DNA, 25 bp, Homo sapien
cattcccaaatgtggtggtctccac

SEQ ID NO: 3033372 - DNA, 25 bp, Homo sapien
gctgtgcctccctgtacttgtccat

SEQ ID NO: 3033373 - DNA, 25 bp, Homo sapien
ccctaagtattggatttgcttcatc

SEQ ID NO: 3033374 - DNA, 25 bp, Homo sapien
ccggggctggtccagcacgtggcca

SEQ ID NO: 3033375 - DNA, 25 bp, Homo sapien
taagtattggatttgcttcatcagt

SEQ ID NO: 3033376 - DNA, 25 bp, Homo sapien
ttccctaagtattggatttgcttca

SEQ ID NO: 3033377 - DNA, 25 bp, Homo sapien
ctggctgaactcttggctctggctc

SEQ ID NO: 3033378 - DNA, 25 bp, Homo sapien
tggctctgggcccggggtcctgcct

SEQ ID NO: 3033379 - DNA, 25 bp, Homo sapien
tgcctgtgccctctccttgaatgct

SEQ ID NO: 3033380 - DNA, 25 bp, Homo sapien
tgggcccggggtcctgcctgtgccc

SEQ ID NO: 3033381 - DNA, 25 bp, Homo sapien
tcatgaggcgctgtagggacagggt

SEQ ID NO: 3033382 - DNA, 25 bp, Homo sapien
ttcatgaggcgctgtagggacaggg

SEQ ID NO: 3033383 - DNA, 25 bp, Homo sapien
cttcatgaggcgctgtagggacagg

SEQ ID NO: 3033384 - DNA, 25 bp, Homo sapien
tcttcatgaggcgctgtagggacag

SEQ ID NO: 3033385 - DNA, 25 bp, Homo sapien
tacactcctgactttcatctgggtc

SEQ ID NO: 3033386 - DNA, 25 bp, Homo sapien
atggacttggtgtcattgtgccctg

SEQ ID NO: 3033387 - DNA, 25 bp, Homo sapien
ccagcccacctggacagacctcctt

SEQ ID NO: 3033388 - DNA, 25 bp, Homo sapien
tctgggtcatgtgggggatggactt

SEQ ID NO: 3033389 - DNA, 25 bp, Homo sapien
agaacaggtggttccttaatgtccg

SEQ ID NO: 3033390 - DNA, 25 bp, Homo sapien
ggtggttccttaatgtccggctcat

SEQ ID NO: 3033391 - DNA, 25 bp, Homo sapien
gttccttaatgtccggctcatgtcc

SEQ ID NO: 3033392 - DNA, 25 bp, Homo sapien
acaggtggttccttaatgtccggct

SEQ ID NO: 3033393 - DNA, 25 bp, Homo sapien
ccttccaggtagtgacagggggcag

SEQ ID NO: 3033394 - DNA, 25 bp, Homo sapien
tagtgacagggggcagctccgtctc

SEQ ID NO: 3033395 - DNA, 25 bp, Homo sapien
aggtagtgacagggggcagctccgt

SEQ ID NO: 3033396 - DNA, 25 bp, Homo sapien
cttccaggtagtgacagggggcagc

SEQ ID NO: 3033397 - DNA, 25 bp, Homo sapien
caaagcaatcagcactgctgtagat

SEQ ID NO: 3033398 - DNA, 25 bp, Homo sapien
cagaatcccaaagcaatcagcactg

SEQ ID NO: 3033399 - DNA, 25 bp, Homo sapien
gcaatcagcactgctgtagattcca

SEQ ID NO: 3033400 - DNA, 25 bp, Homo sapien
gcagaatcccaaagcaatcagcact

SEQ ID NO: 3033401 - DNA, 25 bp, Homo sapien
tgctttcacgtaagctttggtggcc

SEQ ID NO: 3033402 - DNA, 25 bp, Homo sapien
gctgctttcacgtaagctttggtgg

SEQ ID NO: 3033403 - DNA, 25 bp, Homo sapien
ctgctttcacgtaagctttggtggc

SEQ ID NO: 3033404 - DNA, 25 bp, Homo sapien
catccaggccctccaggtgtactgt

SEQ ID NO: 3033405 - DNA, 25 bp, Homo sapien
ggccctccaggtgtactgtctggtg

SEQ ID NO: 3033406 - DNA, 25 bp, Homo sapien
tggtggggtgcagtgccatccacca

SEQ ID NO: 3033407 - DNA, 25 bp, Homo sapien
ggtggggtgcagtgccatccaccat

SEQ ID NO: 3033408 - DNA, 25 bp, Homo sapien
gcactccaagatgctctggaccaga

SEQ ID NO: 3033409 - DNA, 25 bp, Homo sapien
actccaagatgctctggaccagagc

SEQ ID NO: 3033410 - DNA, 25 bp, Homo sapien
cactccaagatgctctggaccagag

SEQ ID NO: 3033411 - DNA, 25 bp, Homo sapien
gatctgaatttcacagcagccttgg

SEQ ID NO: 3033412 - DNA, 25 bp, Homo sapien
tgaaccctacggagcaaaagtgagt

SEQ ID NO: 3033413 - DNA, 25 bp, Homo sapien
cgtagtgttaccatcctgccgttca

SEQ ID NO: 3033414 - DNA, 25 bp, Homo sapien
taaatccagtgcaaaaatccgtcct

SEQ ID NO: 3033415 - DNA, 25 bp, Homo sapien
caaatcccacgagggtgttggagaa

SEQ ID NO: 3033416 - DNA, 25 bp, Homo sapien
gaagcccgactctgcatccaggtga

SEQ ID NO: 3033417 - DNA, 25 bp, Homo sapien
cttttgggcaggagtctcggacaca

SEQ ID NO: 3033418 - DNA, 25 bp, Homo sapien
cattgtgggtctctccggcattagg

SEQ ID NO: 3033419 - DNA, 25 bp, Homo sapien
aaaatgcaattcatgtaaatatctc

SEQ ID NO: 3033420 - DNA, 25 bp, Homo sapien
aaatacacagtggtgcgatagcacc

SEQ ID NO: 3033421 - DNA, 25 bp, Homo sapien
agtggtgcgatagcacctcctggtg

SEQ ID NO: 3033422 - DNA, 25 bp, Homo sapien
cttgatggggagcaacgttgaggaa

SEQ ID NO: 3033423 - DNA, 25 bp, Homo sapien
tcagagcgctgacatctccaggctg

SEQ ID NO: 3033424 - DNA, 25 bp, Homo sapien
ttcgcctcgtaaggaaatacagcac

SEQ ID NO: 3033425 - DNA, 25 bp, Homo sapien
cctgtccttcttcgcctcgtaagga

SEQ ID NO: 3033426 - DNA, 25 bp, Homo sapien
tccttcttcgcctcgtaaggaaata

SEQ ID NO: 3033427 - DNA, 25 bp, Homo sapien
aaagatatcttcgtgatagcgcttc

SEQ ID NO: 3033428 - DNA, 25 bp, Homo sapien
caaagatatcttcgtgatagcgctt

SEQ ID NO: 3033429 - DNA, 25 bp, Homo sapien
agatatcttcgtgatagcgcttctg

SEQ ID NO: 3033430 - DNA, 25 bp, Homo sapien
gatatcttcgtgatagcgcttctgg

SEQ ID NO: 3033431 - DNA, 25 bp, Homo sapien
gaaagaaatagtcctcgacctgctc

SEQ ID NO: 3033432 - DNA, 25 bp, Homo sapien
aagaaatagtcctcgacctgctcct

SEQ ID NO: 3033433 - DNA, 25 bp, Homo sapien
gaaatagtcctcgacctgctcctca

SEQ ID NO: 3033434 - DNA, 25 bp, Homo sapien
ctgaaagaaatagtcctcgacctgc

SEQ ID NO: 3033435 - DNA, 25 bp, Homo sapien
caccgcatgcagcacccccttctgg

SEQ ID NO: 3033436 - DNA, 25 bp, Homo sapien
ccaggcaggcgggaataggctgtgt

SEQ ID NO: 3033437 - DNA, 25 bp, Homo sapien
taggctgtgtgcaccgcatgcagca

SEQ ID NO: 3033438 - DNA, 25 bp, Homo sapien
tcctcctggtagatgtggtcctcat

SEQ ID NO: 3033439 - DNA, 25 bp, Homo sapien
tgggcggcggcacccaaacaccaag

SEQ ID NO: 3033440 - DNA, 25 bp, Homo sapien
gcggcggcacccaaacaccaaggtc

SEQ ID NO: 3033441 - DNA, 25 bp, Homo sapien
ctgggcggcggcacccaaacaccaa

SEQ ID NO: 3033442 - DNA, 25 bp, Homo sapien
cggcggcacccaaacaccaaggtca

SEQ ID NO: 3033443 - DNA, 25 bp, Homo sapien
atgaggatgcaaggatgggagggat

SEQ ID NO: 3033444 - DNA, 25 bp, Homo sapien
ccgatgaggatgcaaggatgggagg

SEQ ID NO: 3033445 - DNA, 25 bp, Homo sapien
ggctgttgagccatgtgctgcagac

SEQ ID NO: 3033446 - DNA, 25 bp, Homo sapien
ttccgcacaaagcagggcactgggt

SEQ ID NO: 3033447 - DNA, 25 bp, Homo sapien
tcaggctgttgagccatgtgctgca

SEQ ID NO: 3033448 - DNA, 25 bp, Homo sapien
gcttcaggctgttgagccatgtgct

SEQ ID NO: 3033449 - DNA, 25 bp, Homo sapien
ggtaggtgaccacggccacagtcag

SEQ ID NO: 3033450 - DNA, 25 bp, Homo sapien
ccgcagggacgggaactcctctagc

SEQ ID NO: 3033451 - DNA, 25 bp, Homo sapien
agggacgggaactcctctagcacct

SEQ ID NO: 3033452 - DNA, 25 bp, Homo sapien
tcgggtgtggtaggtgaccacggcc

SEQ ID NO: 3033453 - DNA, 25 bp, Homo sapien
tctcaggctcttctgtggccacctg

SEQ ID NO: 3033454 - DNA, 25 bp, Homo sapien
ggcagcctcttgtcactgacccagt

SEQ ID NO: 3033455 - DNA, 25 bp, Homo sapien
cacctgggccagcttttggagcagc

SEQ ID NO: 3033456 - DNA, 25 bp, Homo sapien
cagcttttggagcagcagctgggtt

SEQ ID NO: 3033457 - DNA, 25 bp, Homo sapien
ggtgtggggccatccaccactcgct

SEQ ID NO: 3033458 - DNA, 25 bp, Homo sapien
agggcctccaggcgcactgtctggt

SEQ ID NO: 3033459 - DNA, 25 bp, Homo sapien
atcctcacaggagagttccaccagg

SEQ ID NO: 3033460 - DNA, 25 bp, Homo sapien
tcgctccaggataccttggaccagg

SEQ ID NO: 3033461 - DNA, 25 bp, Homo sapien
atgggcaggcgagattccccaggaa

SEQ ID NO: 3033462 - DNA, 25 bp, Homo sapien
ccttgatgggcaggcgagattcccc

SEQ ID NO: 3033463 - DNA, 25 bp, Homo sapien
caggtgacattgcaggatttcctcc

SEQ ID NO: 3033464 - DNA, 25 bp, Homo sapien
gcctcaggtgacattgcaggatttc

SEQ ID NO: 3033465 - DNA, 25 bp, Homo sapien
gaacacgttcttggcatgcatgctg

SEQ ID NO: 3033466 - DNA, 25 bp, Homo sapien
ctggatgtcggactttgtagattct

SEQ ID NO: 3033467 - DNA, 25 bp, Homo sapien
cacgttcttggcatgcatgctgctg

SEQ ID NO: 3033468 - DNA, 25 bp, Homo sapien
ctttgtagattctgccgagatttga

SEQ ID NO: 3033469 - DNA, 25 bp, Homo sapien
aggacacagagacggtgaaatggca

SEQ ID NO: 3033470 - DNA, 25 bp, Homo sapien
aaagtggttcttgagcgtaggtagg

SEQ ID NO: 3033471 - DNA, 25 bp, Homo sapien
tcttgagcgtaggtaggggaagccc

SEQ ID NO: 3033472 - DNA, 25 bp, Homo sapien
acacagagacggtgaaatggcaaag

SEQ ID NO: 3033473 - DNA, 25 bp, Homo sapien
gtctccttgaccatgggcttagggc

SEQ ID NO: 3033474 - DNA, 25 bp, Homo sapien
cttagggctcagaccccaacacaaa

SEQ ID NO: 3033475 - DNA, 25 bp, Homo sapien
acaaacaagccccatgtgctgcaga

SEQ ID NO: 3033476 - DNA, 25 bp, Homo sapien
tgggggtctccttgaccatgggctt

SEQ ID NO: 3033477 - DNA, 25 bp, Homo sapien
cctgcacgagcctgtagtggtgcgg

SEQ ID NO: 3033478 - DNA, 25 bp, Homo sapien
tcatgtccctgctgtggggcagctc

SEQ ID NO: 3033479 - DNA, 25 bp, Homo sapien
atgtccctgctgtggggcagctctg

SEQ ID NO: 3033480 - DNA, 25 bp, Homo sapien
gtcatgtccctgctgtggggcagct

SEQ ID NO: 3033481 - DNA, 25 bp, Homo sapien
cctgtcatgtccctgctgtggggca

SEQ ID NO: 3033482 - DNA, 25 bp, Homo sapien
cttgaaggtttgcacggcccagctg

SEQ ID NO: 3033483 - DNA, 25 bp, Homo sapien
gatcaatgtcatgagcaaaggcgca

SEQ ID NO: 3033484 - DNA, 25 bp, Homo sapien
agaaccgagggtacatgctggagcc

SEQ ID NO: 3033485 - DNA, 25 bp, Homo sapien
tggagccgaggccaaacacagcgta

SEQ ID NO: 3033486 - DNA, 25 bp, Homo sapien
gacacatgtcccatgcaagcagcac

SEQ ID NO: 3033487 - DNA, 25 bp, Homo sapien
gagacacatgtcccatgcaagcagc

SEQ ID NO: 3033488 - DNA, 25 bp, Homo sapien
agacacatgtcccatgcaagcagca

SEQ ID NO: 3033489 - DNA, 25 bp, Homo sapien
agcacccagcaccaacagcctggag

SEQ ID NO: 3033490 - DNA, 25 bp, Homo sapien
agactctccccctccagctggagaa

SEQ ID NO: 3033491 - DNA, 25 bp, Homo sapien
agcaccaacagcctggagagccagc

SEQ ID NO: 3033492 - DNA, 25 bp, Homo sapien
acccagcaccaacagcctggagagc

SEQ ID NO: 3033493 - DNA, 25 bp, Homo sapien
gagctctttcagcatgaagagcgat

SEQ ID NO: 3033494 - DNA, 25 bp, Homo sapien
tctttcagcatgaagagcgatttct

SEQ ID NO: 3033495 - DNA, 25 bp, Homo sapien
gaatttgttgttgagctctttcagc

SEQ ID NO: 3033496 - DNA, 25 bp, Homo sapien
gcatgaagagcgatttcttcagttt

SEQ ID NO: 3033497 - DNA, 25 bp, Homo sapien
gctcagcctgtacttatccatgcag

SEQ ID NO: 3033498 - DNA, 25 bp, Homo sapien
agtctccattgccaaacgtactggt

SEQ ID NO: 3033499 - DNA, 25 bp, Homo sapien
gcctgtacttatccatgcagacaac

SEQ ID NO: 3033500 - DNA, 25 bp, Homo sapien
aaacgtactggtcaccaccaacagc

SEQ ID NO: 3033501 - DNA, 25 bp, Homo sapien
tcgggacgccattgtcttgcgcatc

SEQ ID NO: 3033502 - DNA, 25 bp, Homo sapien
gaaggcacagctgaataaggccccc

SEQ ID NO: 3033503 - DNA, 25 bp, Homo sapien
tgtcttgcgcatcagcatacaggca

SEQ ID NO: 3033504 - DNA, 25 bp, Homo sapien
tgtctctgtcgcaaagaggatggtg

SEQ ID NO: 3033505 - DNA, 25 bp, Homo sapien
gtcctgccagacatgggttttccag

SEQ ID NO: 3033506 - DNA, 25 bp, Homo sapien
tcttgggtctccgcttctcgtcctg

SEQ ID NO: 3033507 - DNA, 25 bp, Homo sapien
ttgaccaagactttcaatggaatct

SEQ ID NO: 3033508 - DNA, 25 bp, Homo sapien
aagactttcaatggaatctctcttc

SEQ ID NO: 3033509 - DNA, 25 bp, Homo sapien
caggaaggagagaagaggaaggccc

SEQ ID NO: 3033510 - DNA, 25 bp, Homo sapien
gcccccaggaaggagagaagaggaa

SEQ ID NO: 3033511 - DNA, 25 bp, Homo sapien
gaaggagagaagaggaaggccccta

SEQ ID NO: 3033512 - DNA, 25 bp, Homo sapien
ccccaggaaggagagaagaggaagg

SEQ ID NO: 3033513 - DNA, 25 bp, Homo sapien
ccacgggaccggtattcattctgca

SEQ ID NO: 3033514 - DNA, 25 bp, Homo sapien
gacgtagttcagcatctcctggtga

SEQ ID NO: 3033515 - DNA, 25 bp, Homo sapien
gattctgcagccgagtggtggtcca

SEQ ID NO: 3033516 - DNA, 25 bp, Homo sapien
ggagggaccagccaaatccagtctg

SEQ ID NO: 3033517 - DNA, 25 bp, Homo sapien
tcagactcacaaaactccagacata

SEQ ID NO: 3033518 - DNA, 25 bp, Homo sapien
caaaaagtcttcagactcacaaaac

SEQ ID NO: 3033519 - DNA, 25 bp, Homo sapien
gtcttcagactcacaaaactccaga

SEQ ID NO: 3033520 - DNA, 25 bp, Homo sapien
aagtcttcagactcacaaaactcca

SEQ ID NO: 3033521 - DNA, 25 bp, Homo sapien
gatctcaacgacagcctggtctttc

SEQ ID NO: 3033522 - DNA, 25 bp, Homo sapien
gcaatgttgatctcaacgacagcct

SEQ ID NO: 3033523 - DNA, 25 bp, Homo sapien
cagagcgaggccagcttgtgcgttt

SEQ ID NO: 3033524 - DNA, 25 bp, Homo sapien
gcttgtgcgtttccaggcccattct

SEQ ID NO: 3033525 - DNA, 25 bp, Homo sapien
caggatgttgtagcgctggacgtca

SEQ ID NO: 3033526 - DNA, 25 bp, Homo sapien
taccactttagctccagttcccgaa

SEQ ID NO: 3033527 - DNA, 25 bp, Homo sapien
cgtcacagaagtcccggactccgat

SEQ ID NO: 3033528 - DNA, 25 bp, Homo sapien
gcaggcagggcgtaccactttagct

SEQ ID NO: 3033529 - DNA, 25 bp, Homo sapien
gtcaggtgggatttcgaagagctca

SEQ ID NO: 3033530 - DNA, 25 bp, Homo sapien
ggggaccacatcgaagcggccgtac

SEQ ID NO: 3033531 - DNA, 25 bp, Homo sapien
agggggaccacatcgaagcggccgt

SEQ ID NO: 3033532 - DNA, 25 bp, Homo sapien
gggggaccacatcgaagcggccgta

SEQ ID NO: 3033533 - DNA, 25 bp, Homo sapien
ccagggggaccacatcgaagcggcc

SEQ ID NO: 3033534 - DNA, 25 bp, Homo sapien
gcttccagcccaggtcgatgcacag

SEQ ID NO: 3033535 - DNA, 25 bp, Homo sapien
ttgggcttccagcccaggtcgatgc

SEQ ID NO: 3033536 - DNA, 25 bp, Homo sapien
ggcttccagcccaggtcgatgcaca

SEQ ID NO: 3033537 - DNA, 25 bp, Homo sapien
gggcttccagcccaggtcgatgcac

SEQ ID NO: 3033538 - DNA, 25 bp, Homo sapien
agcccgggctgcgtgtctcctctgg

SEQ ID NO: 3033539 - DNA, 25 bp, Homo sapien
tgtgagtctgtaagcccgggctgcg

SEQ ID NO: 3033540 - DNA, 25 bp, Homo sapien
tccccgccccaatggccggtggctg

SEQ ID NO: 3033541 - DNA, 25 bp, Homo sapien
acaagacgggccctgtgagtctgta

SEQ ID NO: 3033542 - DNA, 25 bp, Homo sapien
tctggtagccagcatagcggatgag

SEQ ID NO: 3033543 - DNA, 25 bp, Homo sapien
atctggtagccagcatagcggatga

SEQ ID NO: 3033544 - DNA, 25 bp, Homo sapien
tgagtgaattccacgttggcagggt

SEQ ID NO: 3033545 - DNA, 25 bp, Homo sapien
tgaattccacgttggcagggtcccc

SEQ ID NO: 3033546 - DNA, 25 bp, Homo sapien
tcgtgcttgccatcactccgctggg

SEQ ID NO: 3033547 - DNA, 25 bp, Homo sapien
gaagtcgtgcttgccatcactccgc

SEQ ID NO: 3033548 - DNA, 25 bp, Homo sapien
agtcgtgcttgccatcactccgctg

SEQ ID NO: 3033549 - DNA, 25 bp, Homo sapien
ctgggggaacacggtgatggccgac

SEQ ID NO: 3033550 - DNA, 25 bp, Homo sapien
tgccattgttggtggagtaacgcac

SEQ ID NO: 3033551 - DNA, 25 bp, Homo sapien
ggagtaacgcacgtgtctgcagatg

SEQ ID NO: 3033552 - DNA, 25 bp, Homo sapien
gatgtgttcaaacatttcccgggca

SEQ ID NO: 3033553 - DNA, 25 bp, Homo sapien
cagtggaacagctgcgggcatcgaa

SEQ ID NO: 3033554 - DNA, 25 bp, Homo sapien
gtggcgaagatgagctcatctcccg

SEQ ID NO: 3033555 - DNA, 25 bp, Homo sapien
cccgtcagttggtaggttcctgttg

SEQ ID NO: 3033556 - DNA, 25 bp, Homo sapien
agctcatctcccgtcagttggtagg

SEQ ID NO: 3033557 - DNA, 25 bp, Homo sapien
gaagatgagctcatctcccgtcagt

SEQ ID NO: 3033558 - DNA, 25 bp, Homo sapien
ccctggccagatgttcctctatttt

SEQ ID NO: 3033559 - DNA, 25 bp, Homo sapien
accctggccagatgttcctctattt

SEQ ID NO: 3033560 - DNA, 25 bp, Homo sapien
tgagcatgacaacagtaatgatcac

SEQ ID NO: 3033561 - DNA, 25 bp, Homo sapien
tcagagttttagatgtgatagccat

SEQ ID NO: 3033562 - DNA, 25 bp, Homo sapien
tcagcacgtgcatatgcaagaaagg

SEQ ID NO: 3033563 - DNA, 25 bp, Homo sapien
caacacacatggtggtcagcacgtg

SEQ ID NO: 3033564 - DNA, 25 bp, Homo sapien
tagcttgaggtagaagctcatctgg

SEQ ID NO: 3033565 - DNA, 25 bp, Homo sapien
aatattggttgacaaattcgatagc

SEQ ID NO: 3033566 - DNA, 25 bp, Homo sapien
tgaaggagccgtaatattggttgac

SEQ ID NO: 3033567 - DNA, 25 bp, Homo sapien
cctctggtcaaacttttgggagtca

SEQ ID NO: 3033568 - DNA, 25 bp, Homo sapien
aggcaagatttggacctgcaagtta

SEQ ID NO: 3033569 - DNA, 25 bp, Homo sapien
gtgtgtcttggaaagtcatcccgct

SEQ ID NO: 3033570 - DNA, 25 bp, Homo sapien
cccgctgccccagtttttgatcctc

SEQ ID NO: 3033571 - DNA, 25 bp, Homo sapien
gaggacaatggggttgcatccagct

SEQ ID NO: 3033572 - DNA, 25 bp, Homo sapien
gtcttggaaagtcatcccgctgccc

SEQ ID NO: 3033573 - DNA, 25 bp, Homo sapien
ctgaaggtcatcctgtgtcactgga

SEQ ID NO: 3033574 - DNA, 25 bp, Homo sapien
tgtgatactgaaggtcatcctgtgt

SEQ ID NO: 3033575 - DNA, 25 bp, Homo sapien
gctgcttgctgaggttgtgatactg

SEQ ID NO: 3033576 - DNA, 25 bp, Homo sapien
tgctgaggttgtgatactgaaggtc

SEQ ID NO: 3033577 - DNA, 25 bp, Homo sapien
ggcttcggccggaggatcctgcaga

SEQ ID NO: 3033578 - DNA, 25 bp, Homo sapien
gcagtcaggcttcggccggaggatc

SEQ ID NO: 3033579 - DNA, 25 bp, Homo sapien
tgcagagcagcctgcacagccgggg

SEQ ID NO: 3033580 - DNA, 25 bp, Homo sapien
ggcggcctcgcacgccgcgcccagc

SEQ ID NO: 3033581 - DNA, 25 bp, Homo sapien
cagcggctgcattgaattccaacag

SEQ ID NO: 3033582 - DNA, 25 bp, Homo sapien
ggtgcccaataatcagcggctgcat

SEQ ID NO: 3033583 - DNA, 25 bp, Homo sapien
taatcagcggctgcattgaattcca

SEQ ID NO: 3033584 - DNA, 25 bp, Homo sapien
ggcacagcgaggtgcccaataatca

SEQ ID NO: 3033585 - DNA, 25 bp, Homo sapien
ttgcatactggtggaatttggtctt

SEQ ID NO: 3033586 - DNA, 25 bp, Homo sapien
tgcatactggtggaatttggtcttg

SEQ ID NO: 3033587 - DNA, 25 bp, Homo sapien
gtcttgaacagaaatttccaaggac

SEQ ID NO: 3033588 - DNA, 25 bp, Homo sapien
gaatttggtcttgaacagaaatttc

SEQ ID NO: 3033589 - DNA, 25 bp, Homo sapien
cacttatctggatttgagctcagat

SEQ ID NO: 3033590 - DNA, 25 bp, Homo sapien
tacaaagcaggtcacttatgtcact

SEQ ID NO: 3033591 - DNA, 25 bp, Homo sapien
aggtcacttatgtcacttatctgga

SEQ ID NO: 3033592 - DNA, 25 bp, Homo sapien
ttatgtcacttatctggatttgagc

SEQ ID NO: 3033593 - DNA, 25 bp, Homo sapien
gaatgaggctgagttctctgcggcc

SEQ ID NO: 3033594 - DNA, 25 bp, Homo sapien
tgccttgagaacttcgggactgtct

SEQ ID NO: 3033595 - DNA, 25 bp, Homo sapien
gagcctcagttttcgactcgctaca

SEQ ID NO: 3033596 - DNA, 25 bp, Homo sapien
tcaaaccaggaagagacctgtgcct

SEQ ID NO: 3033597 - DNA, 25 bp, Homo sapien
tcagcacgggaatgtcttgggctca

SEQ ID NO: 3033598 - DNA, 25 bp, Homo sapien
ggctgtgaagatggttcagatccag

SEQ ID NO: 3033599 - DNA, 25 bp, Homo sapien
ccagttagccctcggaagttagcaa

SEQ ID NO: 3033600 - DNA, 25 bp, Homo sapien
cattatcctggaattgattttccac

SEQ ID NO: 3033601 - DNA, 25 bp, Homo sapien
agatacaccagtggcagcagtcggc

SEQ ID NO: 3033602 - DNA, 25 bp, Homo sapien
cagcagatacaccagtggcagcagt

SEQ ID NO: 3033603 - DNA, 25 bp, Homo sapien
agtcacagcagatacaccagtggca

SEQ ID NO: 3033604 - DNA, 25 bp, Homo sapien
atacaccagtggcagcagtcggcac

SEQ ID NO: 3033605 - DNA, 25 bp, Homo sapien
tgacagctgtccactatgccatgag

SEQ ID NO: 3033606 - DNA, 25 bp, Homo sapien
tcaatctgcccctcggaattctagg

SEQ ID NO: 3033607 - DNA, 25 bp, Homo sapien
gtagtctgggccttagtcatggtca

SEQ ID NO: 3033608 - DNA, 25 bp, Homo sapien
tcctgggtctgctcgaagctttctc

SEQ ID NO: 3033609 - DNA, 25 bp, Homo sapien
gtacagtggacaccagggagagccg

SEQ ID NO: 3033610 - DNA, 25 bp, Homo sapien
ctgctgacattttgcttgtacagtg

SEQ ID NO: 3033611 - DNA, 25 bp, Homo sapien
tcctgctgacattttgcttgtacag

SEQ ID NO: 3033612 - DNA, 25 bp, Homo sapien
ttgtacagtggacaccagggagagc

SEQ ID NO: 3033613 - DNA, 25 bp, Homo sapien
tatttacttcattgccagcggagta

SEQ ID NO: 3033614 - DNA, 25 bp, Homo sapien
ttatcagttgagaagacacacgagc

SEQ ID NO: 3033615 - DNA, 25 bp, Homo sapien
ctagttcatccctgtggctgagtgc

SEQ ID NO: 3033616 - DNA, 25 bp, Homo sapien
cagcggagtacactcgcatacatag

SEQ ID NO: 3033617 - DNA, 25 bp, Homo sapien
ggcagctgctttggcgtctctcctt

SEQ ID NO: 3033618 - DNA, 25 bp, Homo sapien
tccattcttccacgatggtagcaaa

SEQ ID NO: 3033619 - DNA, 25 bp, Homo sapien
ggtgggcacttcaccacttcaagga

SEQ ID NO: 3033620 - DNA, 25 bp, Homo sapien
ctccttggttcatgtggtgggcact

SEQ ID NO: 3033621 - DNA, 25 bp, Homo sapien
gaaggcaaggcccagggctttgact

SEQ ID NO: 3033622 - DNA, 25 bp, Homo sapien
ctgaaggcaaggcccagggctttga

SEQ ID NO: 3033623 - DNA, 25 bp, Homo sapien
ggcaaggcccagggctttgacttcc

SEQ ID NO: 3033624 - DNA, 25 bp, Homo sapien
aggcaaggcccagggctttgacttc

SEQ ID NO: 3033625 - DNA, 25 bp, Homo sapien
caccttcatcttattgcatctggga

SEQ ID NO: 3033626 - DNA, 25 bp, Homo sapien
gacagggcaagctcgcaaacaaaaa

SEQ ID NO: 3033627 - DNA, 25 bp, Homo sapien
aaaaaactgagacccgatgcggtgc

SEQ ID NO: 3033628 - DNA, 25 bp, Homo sapien
gaagggagcccttcaggcactgtca

SEQ ID NO: 3033629 - DNA, 25 bp, Homo sapien
ctgggactcagagaatgataaagag

SEQ ID NO: 3033630 - DNA, 25 bp, Homo sapien
ccaaatttcacatcgtaagtggctg

SEQ ID NO: 3033631 - DNA, 25 bp, Homo sapien
tggaagtgcaaacataaaggatgct

SEQ ID NO: 3033632 - DNA, 25 bp, Homo sapien
cctgaggggacatctgctctgggac

SEQ ID NO: 3033633 - DNA, 25 bp, Homo sapien
ttcagccaacaaggccaatggctct

SEQ ID NO: 3033634 - DNA, 25 bp, Homo sapien
ggaaggctcaccctcggagctctca

SEQ ID NO: 3033635 - DNA, 25 bp, Homo sapien
aagaggagcctctggagcaaggtca

SEQ ID NO: 3033636 - DNA, 25 bp, Homo sapien
tttctggctttcagccaacaaggcc

SEQ ID NO: 3033637 - DNA, 25 bp, Homo sapien
gattcgaagtggaggagggaagcca

SEQ ID NO: 3033638 - DNA, 25 bp, Homo sapien
aatctcaggcctccatcatctggac

SEQ ID NO: 3033639 - DNA, 25 bp, Homo sapien
tgcaagacagagagattcgaagtgg

SEQ ID NO: 3033640 - DNA, 25 bp, Homo sapien
aaatctcaggcctccatcatctgga

SEQ ID NO: 3033641 - DNA, 25 bp, Homo sapien
aggcactgggcagccaaatctctag

SEQ ID NO: 3033642 - DNA, 25 bp, Homo sapien
tctagttcatgcctggactcccttt

SEQ ID NO: 3033643 - DNA, 25 bp, Homo sapien
ggcttcttggaggtggtgaaaccca

SEQ ID NO: 3033644 - DNA, 25 bp, Homo sapien
cttggaggtggtgaaacccaagcag

SEQ ID NO: 3033645 - DNA, 25 bp, Homo sapien
taagggccaagacgccagtctacat

SEQ ID NO: 3033646 - DNA, 25 bp, Homo sapien
gacagggaggtatggtcacactcca

SEQ ID NO: 3033647 - DNA, 25 bp, Homo sapien
tctcagctcgatcagcactgttggg

SEQ ID NO: 3033648 - DNA, 25 bp, Homo sapien
tctaataccagcatctaagggccaa

SEQ ID NO: 3033649 - DNA, 25 bp, Homo sapien
ctttcagcttctggaggagggaagc

SEQ ID NO: 3033650 - DNA, 25 bp, Homo sapien
agggaagcagctggctggtggcctc

SEQ ID NO: 3033651 - DNA, 25 bp, Homo sapien
cctcctccacagggaccattctcaa

SEQ ID NO: 3033652 - DNA, 25 bp, Homo sapien
tggtggcctcctccacagggaccat

SEQ ID NO: 3033653 - DNA, 25 bp, Homo sapien
atcatcaccccagctcgcaggcaga

SEQ ID NO: 3033654 - DNA, 25 bp, Homo sapien
gggcaggagtggcctctagtggtca

SEQ ID NO: 3033655 - DNA, 25 bp, Homo sapien
cagccatcatcaccccagctcgcag

SEQ ID NO: 3033656 - DNA, 25 bp, Homo sapien
accccagctcgcaggcagagcccag

SEQ ID NO: 3033657 - DNA, 25 bp, Homo sapien
ggctcttttaataatctgctggatt

SEQ ID NO: 3033658 - DNA, 25 bp, Homo sapien
aatggctcttttaataatctgctgg

SEQ ID NO: 3033659 - DNA, 25 bp, Homo sapien
cttcaatggctcttttaataatctg

SEQ ID NO: 3033660 - DNA, 25 bp, Homo sapien
caatggctcttttaataatctgctg

SEQ ID NO: 3033661 - DNA, 25 bp, Homo sapien
acagcgcagcaagtatcggtagagc

SEQ ID NO: 3033662 - DNA, 25 bp, Homo sapien
ctggcaacagcgcagcaagtatcgg

SEQ ID NO: 3033663 - DNA, 25 bp, Homo sapien
aagtatcggtagagctgcagtggcc

SEQ ID NO: 3033664 - DNA, 25 bp, Homo sapien
cagtggcctccgaaccagttctgct

SEQ ID NO: 3033665 - DNA, 25 bp, Homo sapien
agcctcatccctggcgtcttctttc

SEQ ID NO: 3033666 - DNA, 25 bp, Homo sapien
catccctggcgtcttctttctggaa

SEQ ID NO: 3033667 - DNA, 25 bp, Homo sapien
ccctggcgtcttctttctggaactc

SEQ ID NO: 3033668 - DNA, 25 bp, Homo sapien
ctggcgtcttctttctggaactcaa

SEQ ID NO: 3033669 - DNA, 25 bp, Homo sapien
aagtggtgcatgagtaggtgtccct

SEQ ID NO: 3033670 - DNA, 25 bp, Homo sapien
cttcaagtggtgcatgagtaggtgt

SEQ ID NO: 3033671 - DNA, 25 bp, Homo sapien
tggtgcatgagtaggtgtccctcac

SEQ ID NO: 3033672 - DNA, 25 bp, Homo sapien
ttcaagtggtgcatgagtaggtgtc

SEQ ID NO: 3033673 - DNA, 25 bp, Homo sapien
cggcagggtagggtagaaaagcagg

SEQ ID NO: 3033674 - DNA, 25 bp, Homo sapien
catcgggagctcatcacaaatgtag

SEQ ID NO: 3033675 - DNA, 25 bp, Homo sapien
ggctcacgcctttaagtagggcaga

SEQ ID NO: 3033676 - DNA, 25 bp, Homo sapien
ccagcaaaacccacagcatcgggag

SEQ ID NO: 3033677 - DNA, 25 bp, Homo sapien
caggcctgagccttgaaattcaaag

SEQ ID NO: 3033678 - DNA, 25 bp, Homo sapien
tcacaatctgccaccatccttaggg

SEQ ID NO: 3033679 - DNA, 25 bp, Homo sapien
gtaagcatcagtcaactacgccatg

SEQ ID NO: 3033680 - DNA, 25 bp, Homo sapien
gatgaacagtctggtgtacctagct

SEQ ID NO: 3033681 - DNA, 25 bp, Homo sapien
ccagggaatgagtaggacatgccaa

SEQ ID NO: 3033682 - DNA, 25 bp, Homo sapien
ctaatctatgtcccgatataggcac

SEQ ID NO: 3033683 - DNA, 25 bp, Homo sapien
cttggttcccagctttgtacccata

SEQ ID NO: 3033684 - DNA, 25 bp, Homo sapien
ttggttcccagctttgtacccatac

SEQ ID NO: 3033685 - DNA, 25 bp, Homo sapien
tatccgaatacctcctgatctgtct

SEQ ID NO: 3033686 - DNA, 25 bp, Homo sapien
ctgggactatccgaatacctcctga

SEQ ID NO: 3033687 - DNA, 25 bp, Homo sapien
ctggctgggactatccgaatacctc

SEQ ID NO: 3033688 - DNA, 25 bp, Homo sapien
gactatccgaatacctcctgatctg

SEQ ID NO: 3033689 - DNA, 25 bp, Homo sapien
cgggtcgcccctaggtcttcaatag

SEQ ID NO: 3033690 - DNA, 25 bp, Homo sapien
tcttcaatagatccgaggacacccg

SEQ ID NO: 3033691 - DNA, 25 bp, Homo sapien
taaatcatcacgacaaggttgctcc

SEQ ID NO: 3033692 - DNA, 25 bp, Homo sapien
tgcactcagctctccggtggaagag

SEQ ID NO: 3033693 - DNA, 25 bp, Homo sapien
gaacctctcgtgttgatgacaagaa

SEQ ID NO: 3033694 - DNA, 25 bp, Homo sapien
agtaaaacattgctccccggtggca

SEQ ID NO: 3033695 - DNA, 25 bp, Homo sapien
caagggcacgtcattaatgcagagc

SEQ ID NO: 3033696 - DNA, 25 bp, Homo sapien
gttgctacgccggatataagcccta

SEQ ID NO: 3033697 - DNA, 25 bp, Homo sapien
gaaagatcatatagtcccgagggat

SEQ ID NO: 3033698 - DNA, 25 bp, Homo sapien
tctgccatcgactttgacggtaacg

SEQ ID NO: 3033699 - DNA, 25 bp, Homo sapien
gcacgccgtcatcaattgttcagga

SEQ ID NO: 3033700 - DNA, 25 bp, Homo sapien
gatctagatttaagtctcctctgcc

SEQ ID NO: 3033701 - DNA, 25 bp, Homo sapien
acccaggcaaggtgccgtgtgccca

SEQ ID NO: 3033702 - DNA, 25 bp, Homo sapien
agggattctaaagggatggcctcac

SEQ ID NO: 3033703 - DNA, 25 bp, Homo sapien
cagatggctgcagtaccctctgcca

SEQ ID NO: 3033704 - DNA, 25 bp, Homo sapien
gaacacatgcttcggcactgattgc

SEQ ID NO: 3033705 - DNA, 25 bp, Homo sapien
gactttgcccataagggagcgtctt

SEQ ID NO: 3033706 - DNA, 25 bp, Homo sapien
tatatgattgagaaggcccaaacca

SEQ ID NO: 3033707 - DNA, 25 bp, Homo sapien
ggactcatctcggaactccaggctg

SEQ ID NO: 3033708 - DNA, 25 bp, Homo sapien
cacaggtctcaagcaggtcttggga

SEQ ID NO: 3033709 - DNA, 25 bp, Homo sapien
cattaggtagaaaacacaccaaaca

SEQ ID NO: 3033710 - DNA, 25 bp, Homo sapien
agatgaccagggagctggtattttt

SEQ ID NO: 3033711 - DNA, 25 bp, Homo sapien
aacatgggaaaggcgttccggagct

SEQ ID NO: 3033712 - DNA, 25 bp, Homo sapien
tcaaaactcattaggtagaaaacac

SEQ ID NO: 3033713 - DNA, 25 bp, Homo sapien
ggaacggattcttcttcacagctct

SEQ ID NO: 3033714 - DNA, 25 bp, Homo sapien
ggcatggaacggattcttcttcaca

SEQ ID NO: 3033715 - DNA, 25 bp, Homo sapien
ggagaggcatggaacggattcttct

SEQ ID NO: 3033716 - DNA, 25 bp, Homo sapien
gtgatgcgtctgcaggccaaagaat

SEQ ID NO: 3033717 - DNA, 25 bp, Homo sapien
gcaattaaccatttccccaggctga

SEQ ID NO: 3033718 - DNA, 25 bp, Homo sapien
gacagcattgcctgaaaaagacact

SEQ ID NO: 3033719 - DNA, 25 bp, Homo sapien
ggtatctaaaaccacggccagccta

SEQ ID NO: 3033720 - DNA, 25 bp, Homo sapien
taaggcattgctgattgagtccaca

SEQ ID NO: 3033721 - DNA, 25 bp, Homo sapien
ccagctggtagatgggccgctttct

SEQ ID NO: 3033722 - DNA, 25 bp, Homo sapien
caaggtttcagccaatttggtttgt

SEQ ID NO: 3033723 - DNA, 25 bp, Homo sapien
gtcctcaagtagcctttcctcagtg

SEQ ID NO: 3033724 - DNA, 25 bp, Homo sapien
atttggtttgtggtgagggttctct

SEQ ID NO: 3033725 - DNA, 25 bp, Homo sapien
gccagctggcatgtctgcgaatctg

SEQ ID NO: 3033726 - DNA, 25 bp, Homo sapien
cagctggcatgtctgcgaatctgca

SEQ ID NO: 3033727 - DNA, 25 bp, Homo sapien
gctggcatgtctgcgaatctgcatc

SEQ ID NO: 3033728 - DNA, 25 bp, Homo sapien
gagccagctggcatgtctgcgaatc

SEQ ID NO: 3033729 - DNA, 25 bp, Homo sapien
agattctttcatcagtcagggtcag

SEQ ID NO: 3033730 - DNA, 25 bp, Homo sapien
gagcaggtagaaggccctgataagc

SEQ ID NO: 3033731 - DNA, 25 bp, Homo sapien
tttcatcagtcagggtcaggagcag

SEQ ID NO: 3033732 - DNA, 25 bp, Homo sapien
ttctttcatcagtcagggtcaggag

SEQ ID NO: 3033733 - DNA, 25 bp, Homo sapien
tgttgaactccatgtatccgaccat

SEQ ID NO: 3033734 - DNA, 25 bp, Homo sapien
gctgtgttgaactccatgtatccga

SEQ ID NO: 3033735 - DNA, 25 bp, Homo sapien
gcttcgctgtgttgaactccatgta

SEQ ID NO: 3033736 - DNA, 25 bp, Homo sapien
ggtgagagctggcaggtgatccagc

SEQ ID NO: 3033737 - DNA, 25 bp, Homo sapien
gttttgagtggtctgggacatgtca

SEQ ID NO: 3033738 - DNA, 25 bp, Homo sapien
gagtggtctgggacatgtcaatagc

SEQ ID NO: 3033739 - DNA, 25 bp, Homo sapien
tggtctgggacatgtcaatagcttc

SEQ ID NO: 3033740 - DNA, 25 bp, Homo sapien
ccttctttgggttttgagtggtctg

SEQ ID NO: 3033741 - DNA, 25 bp, Homo sapien
cctcttatcttccaaatctcccatg

SEQ ID NO: 3033742 - DNA, 25 bp, Homo sapien
gatcatctccattgacaagcaccgc

SEQ ID NO: 3033743 - DNA, 25 bp, Homo sapien
tggaaaaatgatcatctccattgac

SEQ ID NO: 3033744 - DNA, 25 bp, Homo sapien
aaaatgatcatctccattgacaagc

SEQ ID NO: 3033745 - DNA, 25 bp, Homo sapien
ggccccacagccatgtaggaggagc

SEQ ID NO: 3033746 - DNA, 25 bp, Homo sapien
ctagagcagggccggacacttgtcc

SEQ ID NO: 3033747 - DNA, 25 bp, Homo sapien
cagggccggacacttgtccagagga

SEQ ID NO: 3033748 - DNA, 25 bp, Homo sapien
ggacacttgtccagaggaccacgac

SEQ ID NO: 3033749 - DNA, 25 bp, Homo sapien
cttgaatttggtaaagcaccacttc

SEQ ID NO: 3033750 - DNA, 25 bp, Homo sapien
gatgcggatcttctggcagccaagt

SEQ ID NO: 3033751 - DNA, 25 bp, Homo sapien
tgcggatcttctggcagccaagtaa

SEQ ID NO: 3033752 - DNA, 25 bp, Homo sapien
gagatgcggatcttctggcagccaa

SEQ ID NO: 3033753 - DNA, 25 bp, Homo sapien
aggtcctcaatcacaagctgcttgt

SEQ ID NO: 3033754 - DNA, 25 bp, Homo sapien
tgcataggtcctcaatcacaagctg

SEQ ID NO: 3033755 - DNA, 25 bp, Homo sapien
cataggtcctcaatcacaagctgct

SEQ ID NO: 3033756 - DNA, 25 bp, Homo sapien
taggtcctcaatcacaagctgcttg

SEQ ID NO: 3033757 - DNA, 25 bp, Homo sapien
cagagacatgaacatacatttgaaa

SEQ ID NO: 3033758 - DNA, 25 bp, Homo sapien
ctgggggtagtgcaaggtcagagac

SEQ ID NO: 3033759 - DNA, 25 bp, Homo sapien
gtcagagacatgaacatacatttga

SEQ ID NO: 3033760 - DNA, 25 bp, Homo sapien
aggtcagagacatgaacatacattt

SEQ ID NO: 3033761 - DNA, 25 bp, Homo sapien
gagcaacccatccaagaaacagtct

SEQ ID NO: 3033762 - DNA, 25 bp, Homo sapien
aacccatccaagaaacagtctgcgt

SEQ ID NO: 3033763 - DNA, 25 bp, Homo sapien
gcaacccatccaagaaacagtctgc

SEQ ID NO: 3033764 - DNA, 25 bp, Homo sapien
cccatccaagaaacagtctgcgtac

SEQ ID NO: 3033765 - DNA, 25 bp, Homo sapien
cctgacaaggaagctgctgtttgca

SEQ ID NO: 3033766 - DNA, 25 bp, Homo sapien
caaggaagctgctgtttgcagccat

SEQ ID NO: 3033767 - DNA, 25 bp, Homo sapien
gacaaggaagctgctgtttgcagcc

SEQ ID NO: 3033768 - DNA, 25 bp, Homo sapien
ctgacaaggaagctgctgtttgcag

SEQ ID NO: 3033769 - DNA, 25 bp, Homo sapien
ggcacaccaggtccctgtgaggaaa

SEQ ID NO: 3033770 - DNA, 25 bp, Homo sapien
gtccctgtgaggaaagaaactcagt

SEQ ID NO: 3033771 - DNA, 25 bp, Homo sapien
cctgtgaggaaagaaactcagttgg

SEQ ID NO: 3033772 - DNA, 25 bp, Homo sapien
gcacaccaggtccctgtgaggaaag

SEQ ID NO: 3033773 - DNA, 25 bp, Homo sapien
gacttctcgttcttcatgctcagct

SEQ ID NO: 3033774 - DNA, 25 bp, Homo sapien
ccgacttctcgttcttcatgctcag

SEQ ID NO: 3033775 - DNA, 25 bp, Homo sapien
acttctcgttcttcatgctcagctc

SEQ ID NO: 3033776 - DNA, 25 bp, Homo sapien
ttccgacttctcgttcttcatgctc

SEQ ID NO: 3033777 - DNA, 25 bp, Homo sapien
cgaacagtgcgcctgtctgaagctc

SEQ ID NO: 3033778 - DNA, 25 bp, Homo sapien
tggccgaacagtgcgcctgtctgaa

SEQ ID NO: 3033779 - DNA, 25 bp, Homo sapien
ccgaacagtgcgcctgtctgaagct

SEQ ID NO: 3033780 - DNA, 25 bp, Homo sapien
cactggccgaacagtgcgcctgtct

SEQ ID NO: 3033781 - DNA, 25 bp, Homo sapien
ggattggaggcggtggcggacaggt

SEQ ID NO: 3033782 - DNA, 25 bp, Homo sapien
tagggcagccggtccgtgcaaggcg

SEQ ID NO: 3033783 - DNA, 25 bp, Homo sapien
ttgcgcgtgtccgacgctggctccg

SEQ ID NO: 3033784 - DNA, 25 bp, Homo sapien
gacaggtgggcgtggattggctagg

SEQ ID NO: 3033785 - DNA, 25 bp, Homo sapien
ggccgcggcggaaccggcggctgag

SEQ ID NO: 3033786 - DNA, 25 bp, Homo sapien
gggaggtgagtccggccgcggcgga

SEQ ID NO: 3033787 - DNA, 25 bp, Homo sapien
ggaggtgagtccggccgcggcggaa

SEQ ID NO: 3033788 - DNA, 25 bp, Homo sapien
gaggtgagtccggccgcggcggaac

SEQ ID NO: 3033789 - DNA, 25 bp, Homo sapien
tgagccctgcggggccgttgcgcgg

SEQ ID NO: 3033790 - DNA, 25 bp, Homo sapien
ttgagccctgcggggccgttgcgcg

SEQ ID NO: 3033791 - DNA, 25 bp, Homo sapien
agccctgcggggccgttgcgcgggg

SEQ ID NO: 3033792 - DNA, 25 bp, Homo sapien
cttgagccctgcggggccgttgcgc

SEQ ID NO: 3033793 - DNA, 25 bp, Homo sapien
ggggcaggagtcagcccgcttccga

SEQ ID NO: 3033794 - DNA, 25 bp, Homo sapien
caggagtcagcccgcttccgaccgt

SEQ ID NO: 3033795 - DNA, 25 bp, Homo sapien
gagtcagcccgcttccgaccgtacc

SEQ ID NO: 3033796 - DNA, 25 bp, Homo sapien
gggcaggagtcagcccgcttccgac

SEQ ID NO: 3033797 - DNA, 25 bp, Homo sapien
aaatgacagcttgacccagtttgct

SEQ ID NO: 3033798 - DNA, 25 bp, Homo sapien
tagtacccacttgtggcaggaatcc

SEQ ID NO: 3033799 - DNA, 25 bp, Homo sapien
cctctttcaagattccaagggtggt

SEQ ID NO: 3033800 - DNA, 25 bp, Homo sapien
tgatggcggcttacaatggcggtac

SEQ ID NO: 3033801 - DNA, 25 bp, Homo sapien
ccaccaccaccaccctcaacaccat

SEQ ID NO: 3033802 - DNA, 25 bp, Homo sapien
caccaccaccctcaacaccatcttc

SEQ ID NO: 3033803 - DNA, 25 bp, Homo sapien
accaccaccaccctcaacaccatct

SEQ ID NO: 3033804 - DNA, 25 bp, Homo sapien
accaccaccaccaccctcaacacca

SEQ ID NO: 3033805 - DNA, 25 bp, Homo sapien
gacctattggatatggagcctttgg

SEQ ID NO: 3033806 - DNA, 25 bp, Homo sapien
ccgcagctgctacagttaaggcgca

SEQ ID NO: 3033807 - DNA, 25 bp, Homo sapien
cagttaaggcgcaccatcatcagca

SEQ ID NO: 3033808 - DNA, 25 bp, Homo sapien
agcagcagctggatattgagccgga

SEQ ID NO: 3033809 - DNA, 25 bp, Homo sapien
tgtcttcacaacttggagtgtcaga

SEQ ID NO: 3033810 - DNA, 25 bp, Homo sapien
cacaggcagctgtagatacaaaaag

SEQ ID NO: 3033811 - DNA, 25 bp, Homo sapien
aaaaagtcctctaatggagtactgg

SEQ ID NO: 3033812 - DNA, 25 bp, Homo sapien
gggcagatatagctccctttcatat

SEQ ID NO: 3033813 - DNA, 25 bp, Homo sapien
caaataattcctttgttaaactcat

SEQ ID NO: 3033814 - DNA, 25 bp, Homo sapien
aactcattttcagtaaatgagccat

SEQ ID NO: 3033815 - DNA, 25 bp, Homo sapien
tgttaaactcattttcagtaaatga

SEQ ID NO: 3033816 - DNA, 25 bp, Homo sapien
tcctttgttaaactcattttcagta

SEQ ID NO: 3033817 - DNA, 25 bp, Homo sapien
atgatgagagtttcgaagattcggg

SEQ ID NO: 3033818 - DNA, 25 bp, Homo sapien
tgagagtttcgaagattcgggtcat

SEQ ID NO: 3033819 - DNA, 25 bp, Homo sapien
taaaaatgatgagagtttcgaagat

SEQ ID NO: 3033820 - DNA, 25 bp, Homo sapien
aaatgatgagagtttcgaagattcg

SEQ ID NO: 3033821 - DNA, 25 bp, Homo sapien
tgactgaacaatcaagggaacttaa

SEQ ID NO: 3033822 - DNA, 25 bp, Homo sapien
gaacaatcaagggaacttaatatct

SEQ ID NO: 3033823 - DNA, 25 bp, Homo sapien
ctgaacaatcaagggaacttaatat

SEQ ID NO: 3033824 - DNA, 25 bp, Homo sapien
gactgaacaatcaagggaacttaat

SEQ ID NO: 3033825 - DNA, 25 bp, Homo sapien
gcaatcctgctgtatcctacgtgaa

SEQ ID NO: 3033826 - DNA, 25 bp, Homo sapien
caggtctggagagcctcaggtttta

SEQ ID NO: 3033827 - DNA, 25 bp, Homo sapien
cattgactagttgtaggcactcctg

SEQ ID NO: 3033828 - DNA, 25 bp, Homo sapien
caccatgttacttgagggcgatccc

SEQ ID NO: 3033829 - DNA, 25 bp, Homo sapien
ttgttgaagactttgtcgggggtca

SEQ ID NO: 3033830 - DNA, 25 bp, Homo sapien
ctgtggcaccagtaaattctgtcat

SEQ ID NO: 3033831 - DNA, 25 bp, Homo sapien
tgaagactttgtcgggggtcattcc

SEQ ID NO: 3033832 - DNA, 25 bp, Homo sapien
ttgtcgggggtcattccatctgtgg

SEQ ID NO: 3033833 - DNA, 25 bp, Homo sapien
catagttgtcatatgatcagcaggg

SEQ ID NO: 3033834 - DNA, 25 bp, Homo sapien
ccttagggtctattgattcctgcca

SEQ ID NO: 3033835 - DNA, 25 bp, Homo sapien
gagcccctgtaacgcaagtcttgga

SEQ ID NO: 3033836 - DNA, 25 bp, Homo sapien
gaaagctatgaatcctgtcagaaaa

SEQ ID NO: 3033837 - DNA, 25 bp, Homo sapien
tgagacataagttaacctccctgac

SEQ ID NO: 3033838 - DNA, 25 bp, Homo sapien
gctcctgggactgtgcatgaaaaaa

SEQ ID NO: 3033839 - DNA, 25 bp, Homo sapien
ctttaggcctatgactcagaatgga

SEQ ID NO: 3033840 - DNA, 25 bp, Homo sapien
taatgcatggtagtagctcctggga

SEQ ID NO: 3033841 - DNA, 25 bp, Homo sapien
cactgatcctttctccttatctctg

SEQ ID NO: 3033842 - DNA, 25 bp, Homo sapien
cataacaaggacctgactgttggag

SEQ ID NO: 3033843 - DNA, 25 bp, Homo sapien
gcaaagatgtaccagcaggtaatac

SEQ ID NO: 3033844 - DNA, 25 bp, Homo sapien
gcacactgaagcgtgattaaatgat

SEQ ID NO: 3033845 - DNA, 25 bp, Homo sapien
ttcccagatggtttttcatgatgct

SEQ ID NO: 3033846 - DNA, 25 bp, Homo sapien
tctgaatgcattaagagatcatcga

SEQ ID NO: 3033847 - DNA, 25 bp, Homo sapien
tgcattaagagatcatcgaagaatt

SEQ ID NO: 3033848 - DNA, 25 bp, Homo sapien
tgaatgcattaagagatcatcgaag

SEQ ID NO: 3033849 - DNA, 25 bp, Homo sapien
aatgcattaagagatcatcgaagaa

SEQ ID NO: 3033850 - DNA, 25 bp, Homo sapien
taagctgctttagttggcatggcaa

SEQ ID NO: 3033851 - DNA, 25 bp, Homo sapien
gacatctgggagacattatgctggg

SEQ ID NO: 3033852 - DNA, 25 bp, Homo sapien
tctgagtccctgtcaagagagcttt

SEQ ID NO: 3033853 - DNA, 25 bp, Homo sapien
aaacgtattctctgcaaagtggctg

SEQ ID NO: 3033854 - DNA, 25 bp, Homo sapien
tccagagcttttgttgtcacaggca

SEQ ID NO: 3033855 - DNA, 25 bp, Homo sapien
tccctttgcggttctctctttgtaa

SEQ ID NO: 3033856 - DNA, 25 bp, Homo sapien
ttgtaattctagtgtgactccagag

SEQ ID NO: 3033857 - DNA, 25 bp, Homo sapien
ctctttgtaattctagtgtgactcc

SEQ ID NO: 3033858 - DNA, 25 bp, Homo sapien
caaccacatgatgcatatcctgtgt

SEQ ID NO: 3033859 - DNA, 25 bp, Homo sapien
tcttgttggcctattagcagctgct

SEQ ID NO: 3033860 - DNA, 25 bp, Homo sapien
agctgcttgaaggtattgccattca

SEQ ID NO: 3033861 - DNA, 25 bp, Homo sapien
catgatgcatatcctgtgtgcctct

SEQ ID NO: 3033862 - DNA, 25 bp, Homo sapien
gcagtctactgccatcacatgtctg

SEQ ID NO: 3033863 - DNA, 25 bp, Homo sapien
tagtccatttagtctgaggtaacta

SEQ ID NO: 3033864 - DNA, 25 bp, Homo sapien
tccatgaagaacagaccattgacca

SEQ ID NO: 3033865 - DNA, 25 bp, Homo sapien
tttgttgatcttgggttaagcagtc

SEQ ID NO: 3033866 - DNA, 25 bp, Homo sapien
tattttacccagagttgcacatgtt

SEQ ID NO: 3033867 - DNA, 25 bp, Homo sapien
gatgtaatgtagctttccactggag

SEQ ID NO: 3033868 - DNA, 25 bp, Homo sapien
gttatggctcacctcagaacaaaag

SEQ ID NO: 3033869 - DNA, 25 bp, Homo sapien
tctggaggttaatcatgcttgtact

SEQ ID NO: 3033870 - DNA, 25 bp, Homo sapien
cagaggttggtcaattaccgtggca

SEQ ID NO: 3033871 - DNA, 25 bp, Homo sapien
tcctgagaatcaacccaactgaagc

SEQ ID NO: 3033872 - DNA, 25 bp, Homo sapien
tagtatcaaaagagcccaagaagac

SEQ ID NO: 3033873 - DNA, 25 bp, Homo sapien
tgaaaggtacaatctcagaggttgg

SEQ ID NO: 3033874 - DNA, 25 bp, Homo sapien
caaaggtactttcagctaaggaaga

SEQ ID NO: 3033875 - DNA, 25 bp, Homo sapien
aatcaaggcctgaaaccagactgcc

SEQ ID NO: 3033876 - DNA, 25 bp, Homo sapien
tcaaaatactttccctgaggctaga

SEQ ID NO: 3033877 - DNA, 25 bp, Homo sapien
gactggtaaagggacttgacacctc

SEQ ID NO: 3033878 - DNA, 25 bp, Homo sapien
cagagggagcttattcaggttggtt

SEQ ID NO: 3033879 - DNA, 25 bp, Homo sapien
tttggacatgcccacatgcccgaag

SEQ ID NO: 3033880 - DNA, 25 bp, Homo sapien
gctcattaagtccatctttggccag

SEQ ID NO: 3033881 - DNA, 25 bp, Homo sapien
ccttgcgtatttccggttccagagc

SEQ ID NO: 3033882 - DNA, 25 bp, Homo sapien
atttgtccattattcctgaataaag

SEQ ID NO: 3033883 - DNA, 25 bp, Homo sapien
ctgcacccagctgaatatatggaat

SEQ ID NO: 3033884 - DNA, 25 bp, Homo sapien
cccagctgaatatatggaattttta

SEQ ID NO: 3033885 - DNA, 25 bp, Homo sapien
tttatttgtccattattcctgaata

SEQ ID NO: 3033886 - DNA, 25 bp, Homo sapien
taaaccgacaactcaacccagagca

SEQ ID NO: 3033887 - DNA, 25 bp, Homo sapien
taaagacagttgtgaagcaatctga

SEQ ID NO: 3033888 - DNA, 25 bp, Homo sapien
aaagcatttaacgtcatttgcaagg

SEQ ID NO: 3033889 - DNA, 25 bp, Homo sapien
tacacctggcataaacaggctaggg

SEQ ID NO: 3033890 - DNA, 25 bp, Homo sapien
tttcccttcgatcccgcaggccgga

SEQ ID NO: 3033891 - DNA, 25 bp, Homo sapien
ccaggcttgcctccccggatcggat

SEQ ID NO: 3033892 - DNA, 25 bp, Homo sapien
tgcctccccggatcggattcctttc

SEQ ID NO: 3033893 - DNA, 25 bp, Homo sapien
cctttcccttcgatcccgcaggccg

SEQ ID NO: 3033894 - DNA, 25 bp, Homo sapien
tctgagtctctttgcgagatagagc

SEQ ID NO: 3033895 - DNA, 25 bp, Homo sapien
ctgagtctctttgcgagatagagcg

SEQ ID NO: 3033896 - DNA, 25 bp, Homo sapien
aggaatgtgactgtgggctacctac

SEQ ID NO: 3033897 - DNA, 25 bp, Homo sapien
tgtgactgtgggctacctacatcag

SEQ ID NO: 3033898 - DNA, 25 bp, Homo sapien
acctaggagctcacccgtttttatg

SEQ ID NO: 3033899 - DNA, 25 bp, Homo sapien
ctaggagctcacccgtttttatggg

SEQ ID NO: 3033900 - DNA, 25 bp, Homo sapien
tagtccagcgggagctgcccagtcc

SEQ ID NO: 3033901 - DNA, 25 bp, Homo sapien
cgggagctgcccagtcctgatgaga

SEQ ID NO: 3033902 - DNA, 25 bp, Homo sapien
cacatcaggtgggtcatttcccagg

SEQ ID NO: 3033903 - DNA, 25 bp, Homo sapien
caagatgtagaaataccggactaac

SEQ ID NO: 3033904 - DNA, 25 bp, Homo sapien
tggtcaggacgacagactacggtct

SEQ ID NO: 3033905 - DNA, 25 bp, Homo sapien
taaatcccaagtaatgtacgtgctg

SEQ ID NO: 3033906 - DNA, 25 bp, Homo sapien
aacaatttggagtggcaatgatagg

SEQ ID NO: 3033907 - DNA, 25 bp, Homo sapien
atgataggatttgctgttgcggaca

SEQ ID NO: 3033908 - DNA, 25 bp, Homo sapien
agcaagaaagaagccgtcctctttg

SEQ ID NO: 3033909 - DNA, 25 bp, Homo sapien
gaaagaagccgtcctctttgagaac

SEQ ID NO: 3033910 - DNA, 25 bp, Homo sapien
gactctgggtaagtgggctcagcct

SEQ ID NO: 3033911 - DNA, 25 bp, Homo sapien
cccagtagtggcgttgcgagtacca

SEQ ID NO: 3033912 - DNA, 25 bp, Homo sapien
ggactgaggactgaaaaagcggccc

SEQ ID NO: 3033913 - DNA, 25 bp, Homo sapien
gtgaccgtttactctggactctggg

SEQ ID NO: 3033914 - DNA, 25 bp, Homo sapien
ctaaacggctgggtagatgggccct

SEQ ID NO: 3033915 - DNA, 25 bp, Homo sapien
gggagccccgttggagccattgtac

SEQ ID NO: 3033916 - DNA, 25 bp, Homo sapien
ccagcacactgtctaggaggtggag

SEQ ID NO: 3033917 - DNA, 25 bp, Homo sapien
cacagctgagctccgtagatacatc

SEQ ID NO: 3033918 - DNA, 25 bp, Homo sapien
caagagggtgcctacaggcggatat

SEQ ID NO: 3033919 - DNA, 25 bp, Homo sapien
ctacaggcggatatgaaaccggtgg

SEQ ID NO: 3033920 - DNA, 25 bp, Homo sapien
gggaaacagagcatctgtgctgacc

SEQ ID NO: 3033921 - DNA, 25 bp, Homo sapien
agggtgcctacaggcggatatgaaa

SEQ ID NO: 3033922 - DNA, 25 bp, Homo sapien
gagttcgactccctaccctgtctgt

SEQ ID NO: 3033923 - DNA, 25 bp, Homo sapien
cacagtgcttccaggtatggagaaa

SEQ ID NO: 3033924 - DNA, 25 bp, Homo sapien
ttccaggtatggagaaagagacaaa

SEQ ID NO: 3033925 - DNA, 25 bp, Homo sapien
gccttctcagagtggggtcttccca

SEQ ID NO: 3033926 - DNA, 25 bp, Homo sapien
gactccacaattgtgtttcccctca

SEQ ID NO: 3033927 - DNA, 25 bp, Homo sapien
tcctgactcaatctggtgtgtgcaa

SEQ ID NO: 3033928 - DNA, 25 bp, Homo sapien
caagtcctgactcaatctggtgtgt

SEQ ID NO: 3033929 - DNA, 25 bp, Homo sapien
accccatggaagtgactccacaatt

SEQ ID NO: 3033930 - DNA, 25 bp, Homo sapien
tctgcgttggagtctcccctacgct

SEQ ID NO: 3033931 - DNA, 25 bp, Homo sapien
tagaaacttgggtgaggtgggactg

SEQ ID NO: 3033932 - DNA, 25 bp, Homo sapien
ggccccctatactctgcacggtaag

SEQ ID NO: 3033933 - DNA, 25 bp, Homo sapien
tcctttgaggttcccacttctctca

SEQ ID NO: 3033934 - DNA, 25 bp, Homo sapien
ggtgccgaccgtacaggctgtccta

SEQ ID NO: 3033935 - DNA, 25 bp, Homo sapien
gttcggtgccgaccgtacaggctgt

SEQ ID NO: 3033936 - DNA, 25 bp, Homo sapien
cagtcccgaggcccttagttcggtg

SEQ ID NO: 3033937 - DNA, 25 bp, Homo sapien
ccttagttcggtgccgaccgtacag

SEQ ID NO: 3033938 - DNA, 25 bp, Homo sapien
ggtgttcgtggcgtttgcaattttc

SEQ ID NO: 3033939 - DNA, 25 bp, Homo sapien
gttcgtggcgtttgcaattttcttg

SEQ ID NO: 3033940 - DNA, 25 bp, Homo sapien
gggaggtgttcgtggcgtttgcaat

SEQ ID NO: 3033941 - DNA, 25 bp, Homo sapien
tcgtggcgtttgcaattttcttgtg

SEQ ID NO: 3033942 - DNA, 25 bp, Homo sapien
ctccgccggatcacctgctgttgaa

SEQ ID NO: 3033943 - DNA, 25 bp, Homo sapien
ctttgcagcggtcatgaggctgctc

SEQ ID NO: 3033944 - DNA, 25 bp, Homo sapien
cagcttgggccgcgatgcgcgtggg

SEQ ID NO: 3033945 - DNA, 25 bp, Homo sapien
tgagaacacgtctttgcagcggtca

SEQ ID NO: 3033946 - DNA, 25 bp, Homo sapien
gaggccggccacgaccagagcgcat

SEQ ID NO: 3033947 - DNA, 25 bp, Homo sapien
agcagcacccacacgaggccggcca

SEQ ID NO: 3033948 - DNA, 25 bp, Homo sapien
accagagcgcatgagcagcgcagag

SEQ ID NO: 3033949 - DNA, 25 bp, Homo sapien
gccacgaccagagcgcatgagcagc

SEQ ID NO: 3033950 - DNA, 25 bp, Homo sapien
gcagggcggacagagccgcgggcgg

SEQ ID NO: 3033951 - DNA, 25 bp, Homo sapien
gggcagggcggacagagccgcgggc

SEQ ID NO: 3033952 - DNA, 25 bp, Homo sapien
gagggggcagggcggacagagccgc

SEQ ID NO: 3033953 - DNA, 25 bp, Homo sapien
acagagccgcgggcggtcacgtgac

SEQ ID NO: 3033954 - DNA, 25 bp, Homo sapien
tcggcgcgatccctgacggtagctt

SEQ ID NO: 3033955 - DNA, 25 bp, Homo sapien
cgatccctgacggtagcttgcgggt

SEQ ID NO: 3033956 - DNA, 25 bp, Homo sapien
cttgcgggtgttccgcgccgtgggc

SEQ ID NO: 3033957 - DNA, 25 bp, Homo sapien
cctgacggtagcttgcgggtgttcc

SEQ ID NO: 3033958 - DNA, 25 bp, Homo sapien
aggggcgctcagccgagggacgtgg

SEQ ID NO: 3033959 - DNA, 25 bp, Homo sapien
gctcagccgagggacgtggctattt

SEQ ID NO: 3033960 - DNA, 25 bp, Homo sapien
gcgctcagccgagggacgtggctat

SEQ ID NO: 3033961 - DNA, 25 bp, Homo sapien
gggcgctcagccgagggacgtggct

SEQ ID NO: 3033962 - DNA, 25 bp, Homo sapien
ttagctaggctgcagaccgtggaga

SEQ ID NO: 3033963 - DNA, 25 bp, Homo sapien
agagaggccattagctaggctgcag

SEQ ID NO: 3033964 - DNA, 25 bp, Homo sapien
gtgctggtgacatcccgagagagac

SEQ ID NO: 3033965 - DNA, 25 bp, Homo sapien
ggccattagctaggctgcagaccgt

SEQ ID NO: 3033966 - DNA, 25 bp, Homo sapien
gcttctgccgctgggaaaacttcag

SEQ ID NO: 3033967 - DNA, 25 bp, Homo sapien
gcgctcacgacggagctggaactca

SEQ ID NO: 3033968 - DNA, 25 bp, Homo sapien
aacttcagcatcagcaggtcacact

SEQ ID NO: 3033969 - DNA, 25 bp, Homo sapien
caatcctgggaatggcgtcaagacc

SEQ ID NO: 3033970 - DNA, 25 bp, Homo sapien
tgcaatatgctttactctccaacta

SEQ ID NO: 3033971 - DNA, 25 bp, Homo sapien
gatggtttaatgaggaggctgcaac

SEQ ID NO: 3033972 - DNA, 25 bp, Homo sapien
tcctgctaactggagtttccgaaat

SEQ ID NO: 3033973 - DNA, 25 bp, Homo sapien
tcccctttgtccagatatggaaatg

SEQ ID NO: 3033974 - DNA, 25 bp, Homo sapien
cataagttgaggatgcctgtcgcct

SEQ ID NO: 3033975 - DNA, 25 bp, Homo sapien
gcatttaaacaatatgaagtctgag

SEQ ID NO: 3033976 - DNA, 25 bp, Homo sapien
cctgtgatggtttcgttaactgcat

SEQ ID NO: 3033977 - DNA, 25 bp, Homo sapien
tatacagttgtgataagggatgaaa

SEQ ID NO: 3033978 - DNA, 25 bp, Homo sapien
aagagtggcgctgtaatttctatgg

SEQ ID NO: 3033979 - DNA, 25 bp, Homo sapien
gctcttcactcggattaaagccttc

SEQ ID NO: 3033980 - DNA, 25 bp, Homo sapien
ggctagtagtgcaaagggctcttca

SEQ ID NO: 3033981 - DNA, 25 bp, Homo sapien
tgtaatttctatggtaacggctgtg

SEQ ID NO: 3033982 - DNA, 25 bp, Homo sapien
aatgcaagactaggaccagaaccag

SEQ ID NO: 3033983 - DNA, 25 bp, Homo sapien
aacgtgagcccgctaaggcgtgtca

SEQ ID NO: 3033984 - DNA, 25 bp, Homo sapien
ctagtgtccatataagcctgctgca

SEQ ID NO: 3033985 - DNA, 25 bp, Homo sapien
catttgatctctcatggcgaggaca

SEQ ID NO: 3033986 - DNA, 25 bp, Homo sapien
gtcacctcacggcattttggagctg

SEQ ID NO: 3033987 - DNA, 25 bp, Homo sapien
ggcgtgatggtaagcccccgatcta

SEQ ID NO: 3033988 - DNA, 25 bp, Homo sapien
ctttgtagtggattcaggcgtgatg

SEQ ID NO: 3033989 - DNA, 25 bp, Homo sapien
ccccgatctaaaggttgaattgtga

SEQ ID NO: 3033990 - DNA, 25 bp, Homo sapien
tggagaagaaaatgtagtcgtcaga

SEQ ID NO: 3033991 - DNA, 25 bp, Homo sapien
gaaaatgtagtcgtcagagctgtag

SEQ ID NO: 3033992 - DNA, 25 bp, Homo sapien
ctggattctgggcttatggtaactc

SEQ ID NO: 3033993 - DNA, 25 bp, Homo sapien
ggcttatggtaactcccaggtgcat

SEQ ID NO: 3033994 - DNA, 25 bp, Homo sapien
tggctaatattgagtgctgagcttg

SEQ ID NO: 3033995 - DNA, 25 bp, Homo sapien
aactggctaatattgagtgctgagc

SEQ ID NO: 3033996 - DNA, 25 bp, Homo sapien
gaaactggctaatattgagtgctga

SEQ ID NO: 3033997 - DNA, 25 bp, Homo sapien
tgtgaaactggctaatattgagtgc

SEQ ID NO: 3033998 - DNA, 25 bp, Homo sapien
tgaactataatctcttgctggtgtt

SEQ ID NO: 3033999 - DNA, 25 bp, Homo sapien
tctgaagagagctcgactggaagct

SEQ ID NO: 3034000 - DNA, 25 bp, Homo sapien
gttaaaatttcaacctgattagtga

SEQ ID NO: 3034001 - DNA, 25 bp, Homo sapien
catcattttcgggatatttagctgc

SEQ ID NO: 3034002 - DNA, 25 bp, Homo sapien
taccctcttggtagactggagaagt

SEQ ID NO: 3034003 - DNA, 25 bp, Homo sapien
caacttcattaaggagctctggagt

SEQ ID NO: 3034004 - DNA, 25 bp, Homo sapien
ggtaaaggcccagcctcttccaatg

SEQ ID NO: 3034005 - DNA, 25 bp, Homo sapien
ttagagaagactcaacctcctcagg

SEQ ID NO: 3034006 - DNA, 25 bp, Homo sapien
ctggaggtgaaactgtaacttcata

SEQ ID NO: 3034007 - DNA, 25 bp, Homo sapien
gaggtgaaactgtaacttcataatg

SEQ ID NO: 3034008 - DNA, 25 bp, Homo sapien
aggtgaaactgtaacttcataatgt

SEQ ID NO: 3034009 - DNA, 25 bp, Homo sapien
tgtaacttcataatgttctggaggc

SEQ ID NO: 3034010 - DNA, 25 bp, Homo sapien
ctggagaagattcaacctccccaga

SEQ ID NO: 3034011 - DNA, 25 bp, Homo sapien
ggagaagattcaacctccccagaag

SEQ ID NO: 3034012 - DNA, 25 bp, Homo sapien
gagaagattcaacctccccagaaga

SEQ ID NO: 3034013 - DNA, 25 bp, Homo sapien
tggagaagattcaacctccccagaa

SEQ ID NO: 3034014 - DNA, 25 bp, Homo sapien
gagaagattcagtcttcttggcaga

SEQ ID NO: 3034015 - DNA, 25 bp, Homo sapien
tcttggcagactctgaagttatggc

SEQ ID NO: 3034016 - DNA, 25 bp, Homo sapien
ctctgaagttatggcaatatccaca

SEQ ID NO: 3034017 - DNA, 25 bp, Homo sapien
ctggaggatcagttgtggcctcctc

SEQ ID NO: 3034018 - DNA, 25 bp, Homo sapien
caagttataatgagcttgatcctcg

SEQ ID NO: 3034019 - DNA, 25 bp, Homo sapien
taacattgggcaagttataatgagc

SEQ ID NO: 3034020 - DNA, 25 bp, Homo sapien
aagttataatgagcttgatcctcgc

SEQ ID NO: 3034021 - DNA, 25 bp, Homo sapien
ctgtaacattgggcaagttataatg

SEQ ID NO: 3034022 - DNA, 25 bp, Homo sapien
cagtggagtttgaactgcaccctcc

SEQ ID NO: 3034023 - DNA, 25 bp, Homo sapien
ttcagtggagtttgaactgcaccct

SEQ ID NO: 3034024 - DNA, 25 bp, Homo sapien
gtggagtttgaactgcaccctccat

SEQ ID NO: 3034025 - DNA, 25 bp, Homo sapien
tcagtggagtttgaactgcaccctc

SEQ ID NO: 3034026 - DNA, 25 bp, Homo sapien
cagaaggtttcatctcctcagggaa

SEQ ID NO: 3034027 - DNA, 25 bp, Homo sapien
ggagtcccttgctgagttgcagaag

SEQ ID NO: 3034028 - DNA, 25 bp, Homo sapien
ctgagttgcagaaggtttcatctcc

SEQ ID NO: 3034029 - DNA, 25 bp, Homo sapien
gttgcagaaggtttcatctcctcag

SEQ ID NO: 3034030 - DNA, 25 bp, Homo sapien
ctgaggaagagttgacctccttggg

SEQ ID NO: 3034031 - DNA, 25 bp, Homo sapien
tgaggaagagttgacctccttgggg

SEQ ID NO: 3034032 - DNA, 25 bp, Homo sapien
gaagagttgacctccttggggtgct

SEQ ID NO: 3034033 - DNA, 25 bp, Homo sapien
aggaagagttgacctccttggggtg

SEQ ID NO: 3034034 - DNA, 25 bp, Homo sapien
gcaagcctggcttatgttagcagtg

SEQ ID NO: 3034035 - DNA, 25 bp, Homo sapien
cgcaagcctggcttatgttagcagt

SEQ ID NO: 3034036 - DNA, 25 bp, Homo sapien
caagcctggcttatgttagcagtga

SEQ ID NO: 3034037 - DNA, 25 bp, Homo sapien
agagcagtctgcagttgatagacat

SEQ ID NO: 3034038 - DNA, 25 bp, Homo sapien
cccttgcatagcactggtgctggaa

SEQ ID NO: 3034039 - DNA, 25 bp, Homo sapien
gatagacatcatactttaactgctc

SEQ ID NO: 3034040 - DNA, 25 bp, Homo sapien
ctgctcccttgcatagcactggtgc

SEQ ID NO: 3034041 - DNA, 25 bp, Homo sapien
tgagattctggcagcttgacttcag

SEQ ID NO: 3034042 - DNA, 25 bp, Homo sapien
taaggtgagatggtagcgcatgaga

SEQ ID NO: 3034043 - DNA, 25 bp, Homo sapien
tgaaagtaaagaagtagcctgtggt

SEQ ID NO: 3034044 - DNA, 25 bp, Homo sapien
aagtagcctgtggttaaggtgagat

SEQ ID NO: 3034045 - DNA, 25 bp, Homo sapien
ggcttaaggtatcagaactttggca

SEQ ID NO: 3034046 - DNA, 25 bp, Homo sapien
tccaatatccggcaggtggtagtct

SEQ ID NO: 3034047 - DNA, 25 bp, Homo sapien
caccaagattgaaagattgaagtcc

SEQ ID NO: 3034048 - DNA, 25 bp, Homo sapien
ggtatcagaactttggcatcactgg

SEQ ID NO: 3034049 - DNA, 25 bp, Homo sapien
cctctgcccgggtctgtgccagctc

SEQ ID NO: 3034050 - DNA, 25 bp, Homo sapien
tgcccgggtctgtgccagctctgac

SEQ ID NO: 3034051 - DNA, 25 bp, Homo sapien
tctgcccgggtctgtgccagctctg

SEQ ID NO: 3034052 - DNA, 25 bp, Homo sapien
ctagtgctgtccctctgcccgggtc

SEQ ID NO: 3034053 - DNA, 25 bp, Homo sapien
gtccgcagggtgtaacaggcctcca

SEQ ID NO: 3034054 - DNA, 25 bp, Homo sapien
tccgtccgcagggtgtaacaggcct

SEQ ID NO: 3034055 - DNA, 25 bp, Homo sapien
tgctccgtccgcagggtgtaacagg

SEQ ID NO: 3034056 - DNA, 25 bp, Homo sapien
gagctgctccgtccgcagggtgtaa

SEQ ID NO: 3034057 - DNA, 25 bp, Homo sapien
agtacttgcccagctcctctaagtt

SEQ ID NO: 3034058 - DNA, 25 bp, Homo sapien
ctgcggagaccagtacttgcccagc

SEQ ID NO: 3034059 - DNA, 25 bp, Homo sapien
ccagtacttgcccagctcctctaag

SEQ ID NO: 3034060 - DNA, 25 bp, Homo sapien
gaccagtacttgcccagctcctcta

SEQ ID NO: 3034061 - DNA, 25 bp, Homo sapien
attgggcccaatgtctgccaagatt

SEQ ID NO: 3034062 - DNA, 25 bp, Homo sapien
tccttgagagccttgatctctgctt

SEQ ID NO: 3034063 - DNA, 25 bp, Homo sapien
tgagagccttgatctctgcttccag

SEQ ID NO: 3034064 - DNA, 25 bp, Homo sapien
ctgcttccagctgcagccaagtgac

SEQ ID NO: 3034065 - DNA, 25 bp, Homo sapien
gcttctccttgagagccttgatctc

SEQ ID NO: 3034066 - DNA, 25 bp, Homo sapien
gatctgcagaacaatgtgggcactg

SEQ ID NO: 3034067 - DNA, 25 bp, Homo sapien
atcaccagcaagacaggcattgtcg

SEQ ID NO: 3034068 - DNA, 25 bp, Homo sapien
gtcgatctgcagaacaatgtgggca

SEQ ID NO: 3034069 - DNA, 25 bp, Homo sapien
tcaccagcaagacaggcattgtcga

SEQ ID NO: 3034070 - DNA, 25 bp, Homo sapien
agttcttggtatccaggctcctaac

SEQ ID NO: 3034071 - DNA, 25 bp, Homo sapien
ccagttcttggtatccaggctccta

SEQ ID NO: 3034072 - DNA, 25 bp, Homo sapien
tggtcgttgaggctttgcatggttt

SEQ ID NO: 3034073 - DNA, 25 bp, Homo sapien
tccaggtgctcctggctctccagct

SEQ ID NO: 3034074 - DNA, 25 bp, Homo sapien
atcactgcgggcaggcccctggacc

SEQ ID NO: 3034075 - DNA, 25 bp, Homo sapien
aggactcaggttttgacggccaatt

SEQ ID NO: 3034076 - DNA, 25 bp, Homo sapien
ccggccatcactgcgggcaggcccc

SEQ ID NO: 3034077 - DNA, 25 bp, Homo sapien
ggccatcactgcgggcaggcccctg

SEQ ID NO: 3034078 - DNA, 25 bp, Homo sapien
tggctaagacccgaaattaagcaat

SEQ ID NO: 3034079 - DNA, 25 bp, Homo sapien
gacccgaaattaagcaatgatccat

SEQ ID NO: 3034080 - DNA, 25 bp, Homo sapien
actggctaagacccgaaattaagca

SEQ ID NO: 3034081 - DNA, 25 bp, Homo sapien
taagacccgaaattaagcaatgatc

SEQ ID NO: 3034082 - DNA, 25 bp, Homo sapien
tccaagtgtccttcgtcatgttgat

SEQ ID NO: 3034083 - DNA, 25 bp, Homo sapien
gtgtccttcgtcatgttgatcaaag

SEQ ID NO: 3034084 - DNA, 25 bp, Homo sapien
ccttcgtcatgttgatcaaagtgat

SEQ ID NO: 3034085 - DNA, 25 bp, Homo sapien
atggattctgtaggcttgtcaagtg

SEQ ID NO: 3034086 - DNA, 25 bp, Homo sapien
ctcggctgcctggttaggcctcgga

SEQ ID NO: 3034087 - DNA, 25 bp, Homo sapien
tggctgagaccacctagtcctgacc

SEQ ID NO: 3034088 - DNA, 25 bp, Homo sapien
acgacgaccggtagaacagttagcg

SEQ ID NO: 3034089 - DNA, 25 bp, Homo sapien
tggcctagaaggagaacggagttcc

SEQ ID NO: 3034090 - DNA, 25 bp, Homo sapien
tcactgcttcgagatcaggttccag

SEQ ID NO: 3034091 - DNA, 25 bp, Homo sapien
tttacctgagggtcatgaactccca

SEQ ID NO: 3034092 - DNA, 25 bp, Homo sapien
taggcaggactgacttgtctacccg

SEQ ID NO: 3034093 - DNA, 25 bp, Homo sapien
gattccacctctggccggttgtcag

SEQ ID NO: 3034094 - DNA, 25 bp, Homo sapien
tgtgtgcctgagttccaccgcaaga

SEQ ID NO: 3034095 - DNA, 25 bp, Homo sapien
tgggatgaacagaccgatcggcttg

SEQ ID NO: 3034096 - DNA, 25 bp, Homo sapien
gaagtggtaccaaataactgtgtgc

SEQ ID NO: 3034097 - DNA, 25 bp, Homo sapien
gattactaaaagcaggaccagacca

SEQ ID NO: 3034098 - DNA, 25 bp, Homo sapien
tccactgtgtgcatagagggtctct

SEQ ID NO: 3034099 - DNA, 25 bp, Homo sapien
ggtctcttcacgttgatgcttggca

SEQ ID NO: 3034100 - DNA, 25 bp, Homo sapien
tctagcatctcaaggctgatctgga

SEQ ID NO: 3034101 - DNA, 25 bp, Homo sapien
tctggaagtgtgctagtatgctccc

SEQ ID NO: 3034102 - DNA, 25 bp, Homo sapien
ttgctcacaagccatattggcccga

SEQ ID NO: 3034103 - DNA, 25 bp, Homo sapien
gatgttagacaacaggtcccagtca

SEQ ID NO: 3034104 - DNA, 25 bp, Homo sapien
gattagtggtactgtctgactcacg

SEQ ID NO: 3034105 - DNA, 25 bp, Homo sapien
gactcacgtgtgtgatccaaataaa

SEQ ID NO: 3034106 - DNA, 25 bp, Homo sapien
ggtgagaacgtacactgcagggcca

SEQ ID NO: 3034107 - DNA, 25 bp, Homo sapien
gacataggtcattggtcaagccgct

SEQ ID NO: 3034108 - DNA, 25 bp, Homo sapien
tacacgccacctcttgtgacatagg

SEQ ID NO: 3034109 - DNA, 25 bp, Homo sapien
tgcactgatgttaaaactggctccc

SEQ ID NO: 3034110 - DNA, 25 bp, Homo sapien
ctgaaaaataaattggtcaataaat

SEQ ID NO: 3034111 - DNA, 25 bp, Homo sapien
ttttgttctgcttctactttacaca

SEQ ID NO: 3034112 - DNA, 25 bp, Homo sapien
ttgttctgcttctactttacacaaa

SEQ ID NO: 3034113 - DNA, 25 bp, Homo sapien
ttctgcttctactttacacaaagct

SEQ ID NO: 3034114 - DNA, 25 bp, Homo sapien
gatgaagtaaaccacagacctaatt

SEQ ID NO: 3034115 - DNA, 25 bp, Homo sapien
tcttcaaatcaggatgacaagtgag

SEQ ID NO: 3034116 - DNA, 25 bp, Homo sapien
acttcgtggaccctttcatgctcaa

SEQ ID NO: 3034117 - DNA, 25 bp, Homo sapien
ttcagagagccagccaacttcgtgg

SEQ ID NO: 3034118 - DNA, 25 bp, Homo sapien
tcatgctcaaactactagaggtggt

SEQ ID NO: 3034119 - DNA, 25 bp, Homo sapien
aggacaagaagtgatcattccagaa

SEQ ID NO: 3034120 - DNA, 25 bp, Homo sapien
gaacttgctttacatcatgacttct

SEQ ID NO: 3034121 - DNA, 25 bp, Homo sapien
taaagaacttgctttacatcatgac

SEQ ID NO: 3034122 - DNA, 25 bp, Homo sapien
agaataaggacaagaagtgatcatt

SEQ ID NO: 3034123 - DNA, 25 bp, Homo sapien
tgagcaagttccgagcaccgatggc

SEQ ID NO: 3034124 - DNA, 25 bp, Homo sapien
ctgctattagggcttgaagttgctg

SEQ ID NO: 3034125 - DNA, 25 bp, Homo sapien
gctattagggcttgaagttgctgct

SEQ ID NO: 3034126 - DNA, 25 bp, Homo sapien
agatttgagcaagttccgagcaccg

SEQ ID NO: 3034127 - DNA, 25 bp, Homo sapien
tatgaagatgaaacgaggccaggtg

SEQ ID NO: 3034128 - DNA, 25 bp, Homo sapien
tacagcatcaagtcctcaaagtggg

SEQ ID NO: 3034129 - DNA, 25 bp, Homo sapien
gaactagacggcagctttgaggcag

SEQ ID NO: 3034130 - DNA, 25 bp, Homo sapien
tacagtattgccagagaaggccatg

SEQ ID NO: 3034131 - DNA, 25 bp, Homo sapien
cctgggcaacgagagaaaactccgt

SEQ ID NO: 3034132 - DNA, 25 bp, Homo sapien
aatacaaaaacctcagctgggtgtg

SEQ ID NO: 3034133 - DNA, 25 bp, Homo sapien
agcctgggcaacgagagaaaactcc

SEQ ID NO: 3034134 - DNA, 25 bp, Homo sapien
aaaatacaaaaacctcagctgggtg

SEQ ID NO: 3034135 - DNA, 25 bp, Homo sapien
ctccagcctgggtgacacagcaaga

SEQ ID NO: 3034136 - DNA, 25 bp, Homo sapien
ccagcctgggtgacacagcaagact

SEQ ID NO: 3034137 - DNA, 25 bp, Homo sapien
cactccagcctgggtgacacagcaa

SEQ ID NO: 3034138 - DNA, 25 bp, Homo sapien
tcgcttgaatctgagaggcagagct

SEQ ID NO: 3034139 - DNA, 25 bp, Homo sapien
tcagtaggttaagtggaccagaagt

SEQ ID NO: 3034140 - DNA, 25 bp, Homo sapien
ggtagtgaactagggtcccaggcca

SEQ ID NO: 3034141 - DNA, 25 bp, Homo sapien
agtggaccagaagttattaaaatct

SEQ ID NO: 3034142 - DNA, 25 bp, Homo sapien
gatgtaggcggaagacatgctgatc

SEQ ID NO: 3034143 - DNA, 25 bp, Homo sapien
ttctgcttcttttgcaagttgatca

SEQ ID NO: 3034144 - DNA, 25 bp, Homo sapien
tctgcttcttttgcaagttgatcaa

SEQ ID NO: 3034145 - DNA, 25 bp, Homo sapien
ctgcttcttttgcaagttgatcaac

SEQ ID NO: 3034146 - DNA, 25 bp, Homo sapien
tatgaaagcactaggcccttgctgg

SEQ ID NO: 3034147 - DNA, 25 bp, Homo sapien
tggaccagggcatactcggaccttg

SEQ ID NO: 3034148 - DNA, 25 bp, Homo sapien
gtctgaacctagagaagggtggcca

SEQ ID NO: 3034149 - DNA, 25 bp, Homo sapien
gactagctacaggtatgacaccaga

SEQ ID NO: 3034150 - DNA, 25 bp, Homo sapien
taacagagaacctgcccctgagaag

SEQ ID NO: 3034151 - DNA, 25 bp, Homo sapien
gacttcagtaagtctgttgagctgc

SEQ ID NO: 3034152 - DNA, 25 bp, Homo sapien
catcccggtgtttggtttgactggt

SEQ ID NO: 3034153 - DNA, 25 bp, Homo sapien
gcttctagaaacttcacctatcact

SEQ ID NO: 3034154 - DNA, 25 bp, Homo sapien
acgccagattcaacctccagggagc

SEQ ID NO: 3034155 - DNA, 25 bp, Homo sapien
gacgccagattcaacctccagggag

SEQ ID NO: 3034156 - DNA, 25 bp, Homo sapien
agacgccagattcaacctccaggga

SEQ ID NO: 3034157 - DNA, 25 bp, Homo sapien
gccagattcaacctccagggagcca

SEQ ID NO: 3034158 - DNA, 25 bp, Homo sapien
tggcactgtatctccccaatactca

SEQ ID NO: 3034159 - DNA, 25 bp, Homo sapien
gagtggcactgtatctccccaatac

SEQ ID NO: 3034160 - DNA, 25 bp, Homo sapien
tgagtggcactgtatctccccaata

SEQ ID NO: 3034161 - DNA, 25 bp, Homo sapien
gctgagtggcactgtatctccccaa

SEQ ID NO: 3034162 - DNA, 25 bp, Homo sapien
actcttccttcagctctatggtctg

SEQ ID NO: 3034163 - DNA, 25 bp, Homo sapien
caacaccctcagcttgttcagttca

SEQ ID NO: 3034164 - DNA, 25 bp, Homo sapien
cctcagcttgttcagttcatcaaag

SEQ ID NO: 3034165 - DNA, 25 bp, Homo sapien
ggtccaacaccctcagcttgttcag

SEQ ID NO: 3034166 - DNA, 25 bp, Homo sapien
ctgtaaagaaacaggcccaattcct

SEQ ID NO: 3034167 - DNA, 25 bp, Homo sapien
cccatccaggttccctagaggagtt

SEQ ID NO: 3034168 - DNA, 25 bp, Homo sapien
tttcccatccaggttccctagagga

SEQ ID NO: 3034169 - DNA, 25 bp, Homo sapien
ccaggttccctagaggagttctgct

SEQ ID NO: 3034170 - DNA, 25 bp, Homo sapien
catccaggttccctagaggagttct

SEQ ID NO: 3034171 - DNA, 25 bp, Homo sapien
gcttgtcacaggcatcgttcattca

SEQ ID NO: 3034172 - DNA, 25 bp, Homo sapien
agatgaatgcaacacggtgcccgcc

SEQ ID NO: 3034173 - DNA, 25 bp, Homo sapien
caggaaagaataaagtccgcttgct

SEQ ID NO: 3034174 - DNA, 25 bp, Homo sapien
actacatgccaacactgctagatgc

SEQ ID NO: 3034175 - DNA, 25 bp, Homo sapien
gccacggccgctgccacggatacag

SEQ ID NO: 3034176 - DNA, 25 bp, Homo sapien
gcctgtttacctatgacgtcactac

SEQ ID NO: 3034177 - DNA, 25 bp, Homo sapien
tacagagcctgtttacctatgacgt

SEQ ID NO: 3034178 - DNA, 25 bp, Homo sapien
tatgacgtcactaccttcctgactc

SEQ ID NO: 3034179 - DNA, 25 bp, Homo sapien
ctcttctgagtacccaatgcctggc

SEQ ID NO: 3034180 - DNA, 25 bp, Homo sapien
taggcactcagtagtttaattgctg

SEQ ID NO: 3034181 - DNA, 25 bp, Homo sapien
gagctagtacatattaaatgccaag

SEQ ID NO: 3034182 - DNA, 25 bp, Homo sapien
cttgtttctaacaggaactttgcac

SEQ ID NO: 3034183 - DNA, 25 bp, Homo sapien
cggatcgcctgcgctcaggaattcg

SEQ ID NO: 3034184 - DNA, 25 bp, Homo sapien
cctgcgctcaggaattcgagaccag

SEQ ID NO: 3034185 - DNA, 25 bp, Homo sapien
ggcggatcgcctgcgctcaggaatt

SEQ ID NO: 3034186 - DNA, 25 bp, Homo sapien
cgcctgcgctcaggaattcgagacc

SEQ ID NO: 3034187 - DNA, 25 bp, Homo sapien
tgacagtcatcacaaactcaggtgg

SEQ ID NO: 3034188 - DNA, 25 bp, Homo sapien
taatcaacttagtgccaggtacaca

SEQ ID NO: 3034189 - DNA, 25 bp, Homo sapien
tcagttaccccagagagtagctgcc

SEQ ID NO: 3034190 - DNA, 25 bp, Homo sapien
cacaggaggcatttgataggtgaca

SEQ ID NO: 3034191 - DNA, 25 bp, Homo sapien
tctatgaggagacactcaacgtcct

SEQ ID NO: 3034192 - DNA, 25 bp, Homo sapien
tgaggagacctttgaactgcgggac

SEQ ID NO: 3034193 - DNA, 25 bp, Homo sapien
tacagcacttacgatgaccggcagc

SEQ ID NO: 3034194 - DNA, 25 bp, Homo sapien
agaggcatgacaggccctgctcaga

SEQ ID NO: 3034195 - DNA, 25 bp, Homo sapien
caaagagctgtcacatgggccagaa

SEQ ID NO: 3034196 - DNA, 25 bp, Homo sapien
caaggacctgaagtgacatgacggc

SEQ ID NO: 3034197 - DNA, 25 bp, Homo sapien
gactggaatgcgtcagcctgagacc

SEQ ID NO: 3034198 - DNA, 25 bp, Homo sapien
cagacccagggttagacacaaggac

SEQ ID NO: 3034199 - DNA, 25 bp, Homo sapien
tttttcaactccaagcagcccaggg

SEQ ID NO: 3034200 - DNA, 25 bp, Homo sapien
tgaaagtttccagccctattcagaa

SEQ ID NO: 3034201 - DNA, 25 bp, Homo sapien
cagaaagcaactcttggctgtgtgc

SEQ ID NO: 3034202 - DNA, 25 bp, Homo sapien
taaacaaagtatggatgaaggtcag

SEQ ID NO: 3034203 - DNA, 25 bp, Homo sapien
taagcgcgactgtactgttgccctg

SEQ ID NO: 3034204 - DNA, 25 bp, Homo sapien
tcggcctaaaggatggcgcaggtcc

SEQ ID NO: 3034205 - DNA, 25 bp, Homo sapien
gtgagcaggccttgaccagcttgcg

SEQ ID NO: 3034206 - DNA, 25 bp, Homo sapien
tgttctagccaggtcgtaagcgcga

SEQ ID NO: 3034207 - DNA, 25 bp, Homo sapien
caatggtcggtcagtgctaagagcc

SEQ ID NO: 3034208 - DNA, 25 bp, Homo sapien
cagaaggtaaagtgaacaagagtcc

SEQ ID NO: 3034209 - DNA, 25 bp, Homo sapien
gctgagagggaaacaggcacatgcc

SEQ ID NO: 3034210 - DNA, 25 bp, Homo sapien
tgaccctaggagatgtccagccagc

SEQ ID NO: 3034211 - DNA, 25 bp, Homo sapien
cagccttggaggtgtcccacatggg

SEQ ID NO: 3034212 - DNA, 25 bp, Homo sapien
caagcgtgcactggtttactgatca

SEQ ID NO: 3034213 - DNA, 25 bp, Homo sapien
tcaaattaagagacccactgtggcc

SEQ ID NO: 3034214 - DNA, 25 bp, Homo sapien
gatcaaacctcacgtgacaggccag

SEQ ID NO: 3034215 - DNA, 25 bp, Homo sapien
ccgaacatcaaagtgggagccatca

SEQ ID NO: 3034216 - DNA, 25 bp, Homo sapien
atcaaagtgggagccatcaggtctt

SEQ ID NO: 3034217 - DNA, 25 bp, Homo sapien
aagtgggagccatcaggtctttcaa

SEQ ID NO: 3034218 - DNA, 25 bp, Homo sapien
gaagggaggaatccgaacatcaaag

SEQ ID NO: 3034219 - DNA, 25 bp, Homo sapien
tatactggaacgcaggctgctcctt

SEQ ID NO: 3034220 - DNA, 25 bp, Homo sapien
aagcctgcagcgagacgtggctgct

SEQ ID NO: 3034221 - DNA, 25 bp, Homo sapien
gctgctatactggaacgcaggctgc

SEQ ID NO: 3034222 - DNA, 25 bp, Homo sapien
gcagcgagacgtggctgctatactg

SEQ ID NO: 3034223 - DNA, 25 bp, Homo sapien
gcctgggtgacacagcgagaccctg

SEQ ID NO: 3034224 - DNA, 25 bp, Homo sapien
tgggtgacacagcgagaccctgtct

SEQ ID NO: 3034225 - DNA, 25 bp, Homo sapien
ctccagcctgggtgacacagcgaga

SEQ ID NO: 3034226 - DNA, 25 bp, Homo sapien
agtaaactatggtcgcaccactgca

SEQ ID NO: 3034227 - DNA, 25 bp, Homo sapien
cacaggaccagaattactagaccaa

SEQ ID NO: 3034228 - DNA, 25 bp, Homo sapien
ggtttaaattgaggccctgccacta

SEQ ID NO: 3034229 - DNA, 25 bp, Homo sapien
caaagtgagcctctgtctataacaa

SEQ ID NO: 3034230 - DNA, 25 bp, Homo sapien
cacaagttttgacttcagactcact

SEQ ID NO: 3034231 - DNA, 25 bp, Homo sapien
cgcactgtctccaaggtgccagaga

SEQ ID NO: 3034232 - DNA, 25 bp, Homo sapien
gcccactacccctcggcctcgcact

SEQ ID NO: 3034233 - DNA, 25 bp, Homo sapien
gccagagagactgaatatcctccag

SEQ ID NO: 3034234 - DNA, 25 bp, Homo sapien
tgccgctcccggagctgtaccacat

SEQ ID NO: 3034235 - DNA, 25 bp, Homo sapien
aggttctccaaacggatacagtagc

SEQ ID NO: 3034236 - DNA, 25 bp, Homo sapien
tctccaaacggatacagtagcgcca

SEQ ID NO: 3034237 - DNA, 25 bp, Homo sapien
gttctccaaacggatacagtagcgc

SEQ ID NO: 3034238 - DNA, 25 bp, Homo sapien
caaggttctccaaacggatacagta

SEQ ID NO: 3034239 - DNA, 25 bp, Homo sapien
cagttgtttcccgatgaacatcgga

SEQ ID NO: 3034240 - DNA, 25 bp, Homo sapien
gtctcccgagccacaaaaggaggtg

SEQ ID NO: 3034241 - DNA, 25 bp, Homo sapien
ggatgacagtgacacgtatgttctc

SEQ ID NO: 3034242 - DNA, 25 bp, Homo sapien
tcttgccaggcccttagcgtctccc

SEQ ID NO: 3034243 - DNA, 25 bp, Homo sapien
taggggaggatgtcttcatggctga

SEQ ID NO: 3034244 - DNA, 25 bp, Homo sapien
gagttcatgttggatgggaacctga

SEQ ID NO: 3034245 - DNA, 25 bp, Homo sapien
ggatgggaacctgatcagtggaggt

SEQ ID NO: 3034246 - DNA, 25 bp, Homo sapien
gggaacctgatcagtggaggtgtag

SEQ ID NO: 3034247 - DNA, 25 bp, Homo sapien
ctgggatggcatagagggcccgact

SEQ ID NO: 3034248 - DNA, 25 bp, Homo sapien
gagggcccgactgtcatcatggtta

SEQ ID NO: 3034249 - DNA, 25 bp, Homo sapien
gtcatcatggttagccaagaaggtc

SEQ ID NO: 3034250 - DNA, 25 bp, Homo sapien
atcatggttagccaagaaggtcaca

SEQ ID NO: 3034251 - DNA, 25 bp, Homo sapien
acccccaagcccagccatcttgctt

SEQ ID NO: 3034252 - DNA, 25 bp, Homo sapien
ctttccatggagaggacccccaagc

SEQ ID NO: 3034253 - DNA, 25 bp, Homo sapien
gactttccatggagaggacccccaa

SEQ ID NO: 3034254 - DNA, 25 bp, Homo sapien
aagcccagccatcttgcttacttac

SEQ ID NO: 3034255 - DNA, 25 bp, Homo sapien
cagtcacgagcatcaatcagcacct

SEQ ID NO: 3034256 - DNA, 25 bp, Homo sapien
tcaatcagcacctgatagtaagtgt

SEQ ID NO: 3034257 - DNA, 25 bp, Homo sapien
cagcacctgatagtaagtgtgagtt

SEQ ID NO: 3034258 - DNA, 25 bp, Homo sapien
tatatgtgggcagtcacgagcatca

SEQ ID NO: 3034259 - DNA, 25 bp, Homo sapien
ccggtcatacagtctggcctgccag

SEQ ID NO: 3034260 - DNA, 25 bp, Homo sapien
gacgacacctcggtagccaaaaatg

SEQ ID NO: 3034261 - DNA, 25 bp, Homo sapien
gccagggaaacaggacgacacctcg

SEQ ID NO: 3034262 - DNA, 25 bp, Homo sapien
gccacatcccggtcatacagtctgg

SEQ ID NO: 3034263 - DNA, 25 bp, Homo sapien
cattctgttttggcacctcaaacac

SEQ ID NO: 3034264 - DNA, 25 bp, Homo sapien
ttctgttttggcacctcaaacacac

SEQ ID NO: 3034265 - DNA, 25 bp, Homo sapien
cctcaaacacaccaactgtctccaa

SEQ ID NO: 3034266 - DNA, 25 bp, Homo sapien
aaacacaccaactgtctccaacact

SEQ ID NO: 3034267 - DNA, 25 bp, Homo sapien
tgaactttatgcttcctcccactga

SEQ ID NO: 3034268 - DNA, 25 bp, Homo sapien
caatgttcagtgtctaatatcagcc

SEQ ID NO: 3034269 - DNA, 25 bp, Homo sapien
tgtcagtcaccactctgaacagggc

SEQ ID NO: 3034270 - DNA, 25 bp, Homo sapien
ggcacatcgctctctcaataccgtt

SEQ ID NO: 3034271 - DNA, 25 bp, Homo sapien
tgaggcagaccttcaccaaatccaa

SEQ ID NO: 3034272 - DNA, 25 bp, Homo sapien
caagagtctcgtttcccacctctag

SEQ ID NO: 3034273 - DNA, 25 bp, Homo sapien
ggcctacgagggtccacacccaaga

SEQ ID NO: 3034274 - DNA, 25 bp, Homo sapien
aggcagaccttcaccaaatccaaag

SEQ ID NO: 3034275 - DNA, 25 bp, Homo sapien
tgccctagggctgaattaaaaagct

SEQ ID NO: 3034276 - DNA, 25 bp, Homo sapien
gccaatgccctagggctgaattaaa

SEQ ID NO: 3034277 - DNA, 25 bp, Homo sapien
ggttcaagccaatgccctagggctg

SEQ ID NO: 3034278 - DNA, 25 bp, Homo sapien
ctgagggttcaagccaatgccctag

SEQ ID NO: 3034279 - DNA, 25 bp, Homo sapien
ggctctgggccgcgctggcttccct

SEQ ID NO: 3034280 - DNA, 25 bp, Homo sapien
tctgggccgcgctggcttccctgct

SEQ ID NO: 3034281 - DNA, 25 bp, Homo sapien
ctgggccgcgctggcttccctgctc

SEQ ID NO: 3034282 - DNA, 25 bp, Homo sapien
ccagggctctgggccgcgctggctt

SEQ ID NO: 3034283 - DNA, 25 bp, Homo sapien
tcgacgctggcgagaaggctccagc

SEQ ID NO: 3034284 - DNA, 25 bp, Homo sapien
gccgccgcacagagcggctttgcca

SEQ ID NO: 3034285 - DNA, 25 bp, Homo sapien
ggacgagaggtgcctccgcgtcgtc

SEQ ID NO: 3034286 - DNA, 25 bp, Homo sapien
ctccgcgtcgtcgtggtcgacgctg

SEQ ID NO: 3034287 - DNA, 25 bp, Homo sapien
caccagcggctgcccacggccaggg

SEQ ID NO: 3034288 - DNA, 25 bp, Homo sapien
gccgccgggctgtacaggctgccat

SEQ ID NO: 3034289 - DNA, 25 bp, Homo sapien
gggccgccgggctgtacaggctgcc

SEQ ID NO: 3034290 - DNA, 25 bp, Homo sapien
aggggccgccgggctgtacaggctg

SEQ ID NO: 3034291 - DNA, 25 bp, Homo sapien
tcccgcccgagcgcccgcccggctg

SEQ ID NO: 3034292 - DNA, 25 bp, Homo sapien
cagagcccgacccgcggccgggcgg

SEQ ID NO: 3034293 - DNA, 25 bp, Homo sapien
cccacactgccccgcgcggcgtccc

SEQ ID NO: 3034294 - DNA, 25 bp, Homo sapien
cacagagcccgacccgcggccgggc

SEQ ID NO: 3034295 - DNA, 25 bp, Homo sapien
gcgcggcgtcccggccctcttggcc

SEQ ID NO: 3034296 - DNA, 25 bp, Homo sapien
cttcacatccgtagttctgattaat

SEQ ID NO: 3034297 - DNA, 25 bp, Homo sapien
caggtggtcgatggtcaagagaggg

SEQ ID NO: 3034298 - DNA, 25 bp, Homo sapien
gttctgattaatttgtccaggtggt

SEQ ID NO: 3034299 - DNA, 25 bp, Homo sapien
gattaatttgtccaggtggtcgatg

SEQ ID NO: 3034300 - DNA, 25 bp, Homo sapien
tagctcgctctaaagaagggtggac

SEQ ID NO: 3034301 - DNA, 25 bp, Homo sapien
gccaaggcatagatgaggtcagaca

SEQ ID NO: 3034302 - DNA, 25 bp, Homo sapien
tggtccacattgacgacaatggcca

SEQ ID NO: 3034303 - DNA, 25 bp, Homo sapien
agacaggctgcctagtgaagtctgg

SEQ ID NO: 3034304 - DNA, 25 bp, Homo sapien
tcgacacactgaggtgcgctgaggt

SEQ ID NO: 3034305 - DNA, 25 bp, Homo sapien
gctggacaggagctatgtcgacaca

SEQ ID NO: 3034306 - DNA, 25 bp, Homo sapien
ggtgcgctgaggtgtgccgctggag

SEQ ID NO: 3034307 - DNA, 25 bp, Homo sapien
ggagctatgtcgacacactgaggtg

SEQ ID NO: 3034308 - DNA, 25 bp, Homo sapien
tcagacccagggcttagaattcctg

SEQ ID NO: 3034309 - DNA, 25 bp, Homo sapien
ctcagacccagggcttagaattcct

SEQ ID NO: 3034310 - DNA, 25 bp, Homo sapien
ttcctgttcttgattattttggccc

SEQ ID NO: 3034311 - DNA, 25 bp, Homo sapien
tcctgttcttgattattttggccca

SEQ ID NO: 3034312 - DNA, 25 bp, Homo sapien
cctgttcttgattattttggcccag

SEQ ID NO: 3034313 - DNA, 25 bp, Homo sapien
ctcaggaaggcaagtgacccaggcc

SEQ ID NO: 3034314 - DNA, 25 bp, Homo sapien
ggtgctcatgggtgctgatgttggg

SEQ ID NO: 3034315 - DNA, 25 bp, Homo sapien
gggtagggccatgctgcaaacgccc

SEQ ID NO: 3034316 - DNA, 25 bp, Homo sapien
tagggccatgctgcaaacgccctct

SEQ ID NO: 3034317 - DNA, 25 bp, Homo sapien
aggatgcatccacagggctgggcat

SEQ ID NO: 3034318 - DNA, 25 bp, Homo sapien
ctgctgaggatgcatccacagggct

SEQ ID NO: 3034319 - DNA, 25 bp, Homo sapien
gctgaggatgcatccacagggctgg

SEQ ID NO: 3034320 - DNA, 25 bp, Homo sapien
tgaggatgcatccacagggctgggc

SEQ ID NO: 3034321 - DNA, 25 bp, Homo sapien
ggagctggcaaagggtaaggtgcca

SEQ ID NO: 3034322 - DNA, 25 bp, Homo sapien
taaggtgccagagggccgtgccaga

SEQ ID NO: 3034323 - DNA, 25 bp, Homo sapien
agggtaaggtgccagagggccgtgc

SEQ ID NO: 3034324 - DNA, 25 bp, Homo sapien
ggtaaggtgccagagggccgtgcca

SEQ ID NO: 3034325 - DNA, 25 bp, Homo sapien
ctacagagggcccggccatgtgggc

SEQ ID NO: 3034326 - DNA, 25 bp, Homo sapien
cagagggcccggccatgtgggctct

SEQ ID NO: 3034327 - DNA, 25 bp, Homo sapien
tacagagggcccggccatgtgggct

SEQ ID NO: 3034328 - DNA, 25 bp, Homo sapien
agagggcccggccatgtgggctctg

SEQ ID NO: 3034329 - DNA, 25 bp, Homo sapien
agatggccaggagctgggcagccca

SEQ ID NO: 3034330 - DNA, 25 bp, Homo sapien
atggccaggagctgggcagcccagc

SEQ ID NO: 3034331 - DNA, 25 bp, Homo sapien
gatggccaggagctgggcagcccag

SEQ ID NO: 3034332 - DNA, 25 bp, Homo sapien
tggccaggagctgggcagcccagcc

SEQ ID NO: 3034333 - DNA, 25 bp, Homo sapien
ggagggtccacagtgtccactcgcc

SEQ ID NO: 3034334 - DNA, 25 bp, Homo sapien
tactgagcgatggagcgtgggtagg

SEQ ID NO: 3034335 - DNA, 25 bp, Homo sapien
cgaagattgactcggtagtacttgt

SEQ ID NO: 3034336 - DNA, 25 bp, Homo sapien
cactcgccgtgtgcgaagattgact

SEQ ID NO: 3034337 - DNA, 25 bp, Homo sapien
cctgagatgtagatgcggccagcca

SEQ ID NO: 3034338 - DNA, 25 bp, Homo sapien
gcctttgcggttgcgatgcctaaac

SEQ ID NO: 3034339 - DNA, 25 bp, Homo sapien
tcgttgtgaacggtagcctttgcgg

SEQ ID NO: 3034340 - DNA, 25 bp, Homo sapien
actctggatgggttcacaggtggca

SEQ ID NO: 3034341 - DNA, 25 bp, Homo sapien
gctgtgctaggcaaagtccaaggtg

SEQ ID NO: 3034342 - DNA, 25 bp, Homo sapien
gagctttccccaaaaggtcaacaga

SEQ ID NO: 3034343 - DNA, 25 bp, Homo sapien
aacagactttgatcgatagctccac

SEQ ID NO: 3034344 - DNA, 25 bp, Homo sapien
ggcctggctctaccaataccaaggg

SEQ ID NO: 3034345 - DNA, 25 bp, Homo sapien
aacacagccgacagggagctgcctt

SEQ ID NO: 3034346 - DNA, 25 bp, Homo sapien
gctggaactggtactcccagtactg

SEQ ID NO: 3034347 - DNA, 25 bp, Homo sapien
cccagaagagaagctcgaagatgtc

SEQ ID NO: 3034348 - DNA, 25 bp, Homo sapien
agtgttcaaacacagccgacaggga

SEQ ID NO: 3034349 - DNA, 25 bp, Homo sapien
gtgaaaggaatccaagactgctcca

SEQ ID NO: 3034350 - DNA, 25 bp, Homo sapien
gttgaagttaggatctcccagcatg

SEQ ID NO: 3034351 - DNA, 25 bp, Homo sapien
ggtggtgggcattaggagggctggg

SEQ ID NO: 3034352 - DNA, 25 bp, Homo sapien
ttaggatctcccagcatgaggtggg

SEQ ID NO: 3034353 - DNA, 25 bp, Homo sapien
gccatcgaagccgtcagagatattt

SEQ ID NO: 3034354 - DNA, 25 bp, Homo sapien
accatcctcaaagcgccagtactga

SEQ ID NO: 3034355 - DNA, 25 bp, Homo sapien
cacgttgtccgggatgccatcgaag

SEQ ID NO: 3034356 - DNA, 25 bp, Homo sapien
gctcccggccactgtagctatgggc

SEQ ID NO: 3034357 - DNA, 25 bp, Homo sapien
gtaggtcttcccctgacagttgatg

SEQ ID NO: 3034358 - DNA, 25 bp, Homo sapien
tcccctgacagttgatgcgggtgaa

SEQ ID NO: 3034359 - DNA, 25 bp, Homo sapien
gccccagacatctcggatgagcttg

SEQ ID NO: 3034360 - DNA, 25 bp, Homo sapien
gccttttcgtccagttcatagcagt

SEQ ID NO: 3034361 - DNA, 25 bp, Homo sapien
ggtgtgagagcagggacgctcctgg

SEQ ID NO: 3034362 - DNA, 25 bp, Homo sapien
tcctggggcagacccgcatccccag

SEQ ID NO: 3034363 - DNA, 25 bp, Homo sapien
tggggcagacccgcatccccagtac

SEQ ID NO: 3034364 - DNA, 25 bp, Homo sapien
gtgtgagagcagggacgctcctggg

SEQ ID NO: 3034365 - DNA, 25 bp, Homo sapien
cgttcttgaggtcggtgaaggcgtc

SEQ ID NO: 3034366 - DNA, 25 bp, Homo sapien
ggcgtcgaagggcttcccactgcac

SEQ ID NO: 3034367 - DNA, 25 bp, Homo sapien
gtgaaggcgtcgaagggcttcccac

SEQ ID NO: 3034368 - DNA, 25 bp, Homo sapien
aggcaaagagggaaccgttcttgag

SEQ ID NO: 3034369 - DNA, 25 bp, Homo sapien
agggtctcaggccttgagtctatcc

SEQ ID NO: 3034370 - DNA, 25 bp, Homo sapien
ctggatgaagggtctcaggccttga

SEQ ID NO: 3034371 - DNA, 25 bp, Homo sapien
gatgaagggtctcaggccttgagtc

SEQ ID NO: 3034372 - DNA, 25 bp, Homo sapien
gggtctcaggccttgagtctatccc

SEQ ID NO: 3034373 - DNA, 25 bp, Homo sapien
tagaggcgcccacctcaggcgcagg

SEQ ID NO: 3034374 - DNA, 25 bp, Homo sapien
cctcaggtttcagaacaggtgtctg

SEQ ID NO: 3034375 - DNA, 25 bp, Homo sapien
tcctcaggtttcagaacaggtgtct

SEQ ID NO: 3034376 - DNA, 25 bp, Homo sapien
gcttagaggcgcccacctcaggcgc

SEQ ID NO: 3034377 - DNA, 25 bp, Homo sapien
ggaggtcagaggtcagggaggggcc

SEQ ID NO: 3034378 - DNA, 25 bp, Homo sapien
gaggtcagaggtcagggaggggccc

SEQ ID NO: 3034379 - DNA, 25 bp, Homo sapien
tcagaggtcagggaggggcccccca

SEQ ID NO: 3034380 - DNA, 25 bp, Homo sapien
ctggaggtcagaggtcagggagggg

SEQ ID NO: 3034381 - DNA, 25 bp, Homo sapien
agtggcattgtttttctcctcgcca

SEQ ID NO: 3034382 - DNA, 25 bp, Homo sapien
tcatcctccggcatagtgaacacat

SEQ ID NO: 3034383 - DNA, 25 bp, Homo sapien
atagtgaacacatccccgcgagtca

SEQ ID NO: 3034384 - DNA, 25 bp, Homo sapien
tcgccatcgtcatagaccgtgtact

SEQ ID NO: 3034385 - DNA, 25 bp, Homo sapien
ttgtccacgttgaagccctcagtgc

SEQ ID NO: 3034386 - DNA, 25 bp, Homo sapien
gtcacactggcacttcttgtccacg

SEQ ID NO: 3034387 - DNA, 25 bp, Homo sapien
tctggtagtaagagcagagctcgtc

SEQ ID NO: 3034388 - DNA, 25 bp, Homo sapien
gcactcagccgtatagtctgtgcag

SEQ ID NO: 3034389 - DNA, 25 bp, Homo sapien
tgccagcagggccagtatgagaagg

SEQ ID NO: 3034390 - DNA, 25 bp, Homo sapien
gccagcagggccagtatgagaaggg

SEQ ID NO: 3034391 - DNA, 25 bp, Homo sapien
agggccagtatgagaaggggtctca

SEQ ID NO: 3034392 - DNA, 25 bp, Homo sapien
agcagggccagtatgagaaggggtc

SEQ ID NO: 3034393 - DNA, 25 bp, Homo sapien
aattagcaccgtggatctggagggc

SEQ ID NO: 3034394 - DNA, 25 bp, Homo sapien
gaagtctccgctctgatgcctgagg

SEQ ID NO: 3034395 - DNA, 25 bp, Homo sapien
cagaaagaaggctcattgggcaaca

SEQ ID NO: 3034396 - DNA, 25 bp, Homo sapien
gagattacatgaactggaccagaca

SEQ ID NO: 3034397 - DNA, 25 bp, Homo sapien
tccagcttctcaagcttagaagagt

SEQ ID NO: 3034398 - DNA, 25 bp, Homo sapien
tttcagctcatgcagctctcacaag

SEQ ID NO: 3034399 - DNA, 25 bp, Homo sapien
gagcagaccaagctgtcacactcca

SEQ ID NO: 3034400 - DNA, 25 bp, Homo sapien
tgattggtggaaagatacaactgtc

SEQ ID NO: 3034401 - DNA, 25 bp, Homo sapien
gacaagcgtggatgaggaaagacct

SEQ ID NO: 3034402 - DNA, 25 bp, Homo sapien
aatgtggagagtgaattagagaaga

SEQ ID NO: 3034403 - DNA, 25 bp, Homo sapien
taaggagtacaattggcagggcgca

SEQ ID NO: 3034404 - DNA, 25 bp, Homo sapien
agctacatgaaagggcaatgtggag

SEQ ID NO: 3034405 - DNA, 25 bp, Homo sapien
ccacccagtaagcattgactccaaa

SEQ ID NO: 3034406 - DNA, 25 bp, Homo sapien
tagccacccagtaagcattgactcc

SEQ ID NO: 3034407 - DNA, 25 bp, Homo sapien
catggggtgagcattccaaactgga

SEQ ID NO: 3034408 - DNA, 25 bp, Homo sapien
aagactaagtatagagtttctttga

SEQ ID NO: 3034409 - DNA, 25 bp, Homo sapien
caagaccagtgcgtatgttacagtg

SEQ ID NO: 3034410 - DNA, 25 bp, Homo sapien
gcagagaccaattcctgtcaaggct

SEQ ID NO: 3034411 - DNA, 25 bp, Homo sapien
taagggagtcttatctctggtgcca

SEQ ID NO: 3034412 - DNA, 25 bp, Homo sapien
cataggatctctacgtatggagggt

SEQ ID NO: 3034413 - DNA, 25 bp, Homo sapien
tagacatcaaggtggacatcaggac

SEQ ID NO: 3034414 - DNA, 25 bp, Homo sapien
gaaagtcaaaggtctcactccaggt

SEQ ID NO: 3034415 - DNA, 25 bp, Homo sapien
tcaacggtatcaagtgagccccagg

SEQ ID NO: 3034416 - DNA, 25 bp, Homo sapien
caaagggttgtcacttagggcagct

SEQ ID NO: 3034417 - DNA, 25 bp, Homo sapien
tctaacgtatggcaggcagactggg

SEQ ID NO: 3034418 - DNA, 25 bp, Homo sapien
gactgctacacgtgttgggaacctg

SEQ ID NO: 3034419 - DNA, 25 bp, Homo sapien
taagccaaggccagtgtgttcagag

SEQ ID NO: 3034420 - DNA, 25 bp, Homo sapien
tgcacagcgagtcagtagaagccct

SEQ ID NO: 3034421 - DNA, 25 bp, Homo sapien
gctggaactcgaggtgaggatcagc

SEQ ID NO: 3034422 - DNA, 25 bp, Homo sapien
actgctggaactcgaggtgaggatc

SEQ ID NO: 3034423 - DNA, 25 bp, Homo sapien
aactgctggaactcgaggtgaggat

SEQ ID NO: 3034424 - DNA, 25 bp, Homo sapien
ctgctggaactcgaggtgaggatca

SEQ ID NO: 3034425 - DNA, 25 bp, Homo sapien
tcatgtggggaaccctcaaggcctg

SEQ ID NO: 3034426 - DNA, 25 bp, Homo sapien
ttggatttcatgtggggaaccctca

SEQ ID NO: 3034427 - DNA, 25 bp, Homo sapien
gaccagagagagagtttggatttca

SEQ ID NO: 3034428 - DNA, 25 bp, Homo sapien
ccagagagagagtttggatttcatg

SEQ ID NO: 3034429 - DNA, 25 bp, Homo sapien
cagaacagccgggatgagcaggagg

SEQ ID NO: 3034430 - DNA, 25 bp, Homo sapien
gaagaatgccggaggccgtcagcat

SEQ ID NO: 3034431 - DNA, 25 bp, Homo sapien
tgaagaatgccggaggccgtcagca

SEQ ID NO: 3034432 - DNA, 25 bp, Homo sapien
ccaatcagaacagccgggatgagca

SEQ ID NO: 3034433 - DNA, 25 bp, Homo sapien
caggccacagcagaaaagagagcac

SEQ ID NO: 3034434 - DNA, 25 bp, Homo sapien
gattcagtaaggtcatatgtggaca

SEQ ID NO: 3034435 - DNA, 25 bp, Homo sapien
tgtgaccgggagtagtcacttaacc

SEQ ID NO: 3034436 - DNA, 25 bp, Homo sapien
catactctggagtccgaaagggcca

SEQ ID NO: 3034437 - DNA, 25 bp, Homo sapien
tatgtggacagtagctggcacagag

SEQ ID NO: 3034438 - DNA, 25 bp, Homo sapien
ccagggtgagaggggggaaggcaag

SEQ ID NO: 3034439 - DNA, 25 bp, Homo sapien
ctggacatgaggaaccagacacagg

SEQ ID NO: 3034440 - DNA, 25 bp, Homo sapien
catgaggaaccagacacaggtgggt

SEQ ID NO: 3034441 - DNA, 25 bp, Homo sapien
gacatgaggaaccagacacaggtgg

SEQ ID NO: 3034442 - DNA, 25 bp, Homo sapien
gaggaaccagacacaggtgggttct

SEQ ID NO: 3034443 - DNA, 25 bp, Homo sapien
tgactaatgacaggaaaagcaaccc

SEQ ID NO: 3034444 - DNA, 25 bp, Homo sapien
cagcttggagagtttagcccggatg

SEQ ID NO: 3034445 - DNA, 25 bp, Homo sapien
caggtgtgatgactaatgacaggaa

SEQ ID NO: 3034446 - DNA, 25 bp, Homo sapien
agtttagcccggatgacaggtgtga

SEQ ID NO: 3034447 - DNA, 25 bp, Homo sapien
gagcatggcatagggacacagcaaa

SEQ ID NO: 3034448 - DNA, 25 bp, Homo sapien
tatacgatgaggcatccagggaccc

SEQ ID NO: 3034449 - DNA, 25 bp, Homo sapien
tgactgcttccattcagcccggtgg

SEQ ID NO: 3034450 - DNA, 25 bp, Homo sapien
cataggaggctgaataatggtgccc

SEQ ID NO: 3034451 - DNA, 25 bp, Homo sapien
catagccgattagtttggagtccca

SEQ ID NO: 3034452 - DNA, 25 bp, Homo sapien
cacaaaaacggacactagggcctgg

SEQ ID NO: 3034453 - DNA, 25 bp, Homo sapien
cataaagggttaagatgtcctgggc

SEQ ID NO: 3034454 - DNA, 25 bp, Homo sapien
cacatagagctggacaatggatcgg

SEQ ID NO: 3034455 - DNA, 25 bp, Homo sapien
aatccccaaatcctcgccatcccgg

SEQ ID NO: 3034456 - DNA, 25 bp, Homo sapien
ccgggagctacagggatgaggactt

SEQ ID NO: 3034457 - DNA, 25 bp, Homo sapien
acaatgaccagggtgcggttcctca

SEQ ID NO: 3034458 - DNA, 25 bp, Homo sapien
gccatcccgggagctacagggatga

SEQ ID NO: 3034459 - DNA, 25 bp, Homo sapien
cccctttggcgggtgccattgtagc

SEQ ID NO: 3034460 - DNA, 25 bp, Homo sapien
cggtgccacagatactgcgtggtga

SEQ ID NO: 3034461 - DNA, 25 bp, Homo sapien
ggcgctgaagcggtgccacagatac

SEQ ID NO: 3034462 - DNA, 25 bp, Homo sapien
cattgtagccgaggtcggcgctgaa

SEQ ID NO: 3034463 - DNA, 25 bp, Homo sapien
gcaggaccaaggcaaagttggccag

SEQ ID NO: 3034464 - DNA, 25 bp, Homo sapien
gcaaagttggccaggaagaccagcg

SEQ ID NO: 3034465 - DNA, 25 bp, Homo sapien
cacagcacggcagccgcagggcggg

SEQ ID NO: 3034466 - DNA, 25 bp, Homo sapien
ccaggaagaccagcggctctaccgg

SEQ ID NO: 3034467 - DNA, 25 bp, Homo sapien
gcgagcgactcgctgcctgggacca

SEQ ID NO: 3034468 - DNA, 25 bp, Homo sapien
gacgcgtggcgtggggcttgcgctg

SEQ ID NO: 3034469 - DNA, 25 bp, Homo sapien
tgcctgggaccagcgacgcgtggcg

SEQ ID NO: 3034470 - DNA, 25 bp, Homo sapien
gggcgcgcgagcgactcgctgcctg

SEQ ID NO: 3034471 - DNA, 25 bp, Homo sapien
tgtgcgttggtctcccgataactct

SEQ ID NO: 3034472 - DNA, 25 bp, Homo sapien
tcatcgggtactcaaggcagagctg

SEQ ID NO: 3034473 - DNA, 25 bp, Homo sapien
gaagagcacatgactcctgatgctg

SEQ ID NO: 3034474 - DNA, 25 bp, Homo sapien
taccgctgaggaaacgaggtcatcg

SEQ ID NO: 3034475 - DNA, 25 bp, Homo sapien
aatggagttgctaacaaaacatgtc

SEQ ID NO: 3034476 - DNA, 25 bp, Homo sapien
aaaagttgtggaaaagcagtgtctg

SEQ ID NO: 3034477 - DNA, 25 bp, Homo sapien
taacaggctgtcacgtctgggagtg

SEQ ID NO: 3034478 - DNA, 25 bp, Homo sapien
caggcgtagtagcagatacctgtag

SEQ ID NO: 3034479 - DNA, 25 bp, Homo sapien
cagagcgagatgctgctatcgaaag

SEQ ID NO: 3034480 - DNA, 25 bp, Homo sapien
tacaggatgctgctatcacgaggca

SEQ ID NO: 3034481 - DNA, 25 bp, Homo sapien
gaggcatgcgctctaactctgttcc

SEQ ID NO: 3034482 - DNA, 25 bp, Homo sapien
gttgaacaaccaggacacaagtagg

SEQ ID NO: 3034483 - DNA, 25 bp, Homo sapien
ttaaagggaagaacacatcaatgaa

SEQ ID NO: 3034484 - DNA, 25 bp, Homo sapien
tcgagagaaagttgaggaaatccct

SEQ ID NO: 3034485 - DNA, 25 bp, Homo sapien
gaaaatgtctcagaattggaggatg

SEQ ID NO: 3034486 - DNA, 25 bp, Homo sapien
ggatgtagattgacagaacccacag

SEQ ID NO: 3034487 - DNA, 25 bp, Homo sapien
tatactacattatacagatctacag

SEQ ID NO: 3034488 - DNA, 25 bp, Homo sapien
cagttatccataaaagcagtaattt

SEQ ID NO: 3034489 - DNA, 25 bp, Homo sapien
tcagttatccataaaagcagtaatt

SEQ ID NO: 3034490 - DNA, 25 bp, Homo sapien
tacattatacagatctacagaaata

SEQ ID NO: 3034491 - DNA, 25 bp, Homo sapien
ctatttatctgtgaccaggtcacaa

SEQ ID NO: 3034492 - DNA, 25 bp, Homo sapien
gaccaggtcacaaaatagctcatta

SEQ ID NO: 3034493 - DNA, 25 bp, Homo sapien
ctcattaaagtttaactttgagccg

SEQ ID NO: 3034494 - DNA, 25 bp, Homo sapien
tttgcgtggctgaggcgggtaggtc

SEQ ID NO: 3034495 - DNA, 25 bp, Homo sapien
cacacaccctacagtttccctattt

SEQ ID NO: 3034496 - DNA, 25 bp, Homo sapien
ttcacacaccctacagtttccctat

SEQ ID NO: 3034497 - DNA, 25 bp, Homo sapien
tcacacaccctacagtttccctatt

SEQ ID NO: 3034498 - DNA, 25 bp, Homo sapien
tgcctaagccaactcgaaaaagccg

SEQ ID NO: 3034499 - DNA, 25 bp, Homo sapien
aaagccatgttcagttcgagcgcca

SEQ ID NO: 3034500 - DNA, 25 bp, Homo sapien
tgtgaagcccaatggcgagaagccg

SEQ ID NO: 3034501 - DNA, 25 bp, Homo sapien
gaaaatccaagtccggctagtacgc

SEQ ID NO: 3034502 - DNA, 25 bp, Homo sapien
gctctgcttgcccggtagccttctt

SEQ ID NO: 3034503 - DNA, 25 bp, Homo sapien
tagttcctcggatccgagggcggcg

SEQ ID NO: 3034504 - DNA, 25 bp, Homo sapien
ccaccgggcttggctcagaaccttt

SEQ ID NO: 3034505 - DNA, 25 bp, Homo sapien
cagaaccttttaccatcttgctcat

SEQ ID NO: 3034506 - DNA, 25 bp, Homo sapien
ccagagcccactgtgagtgcttgga

SEQ ID NO: 3034507 - DNA, 25 bp, Homo sapien
tgacccagagcccactgtgagtgct

SEQ ID NO: 3034508 - DNA, 25 bp, Homo sapien
tccccgaagcggtgatggtggccat

SEQ ID NO: 3034509 - DNA, 25 bp, Homo sapien
agagcccactgtgagtgcttggatt

SEQ ID NO: 3034510 - DNA, 25 bp, Homo sapien
taggtgaacatacttccacaagtgt

SEQ ID NO: 3034511 - DNA, 25 bp, Homo sapien
aaggtgtatacacttccacaggtga

SEQ ID NO: 3034512 - DNA, 25 bp, Homo sapien
cagggtacatacttccataggtgaa

SEQ ID NO: 3034513 - DNA, 25 bp, Homo sapien
ggtgaacacacttccacagggtaca

SEQ ID NO: 3034514 - DNA, 25 bp, Homo sapien
gaaaactatatacagttggtccagc

SEQ ID NO: 3034515 - DNA, 25 bp, Homo sapien
tgaaaactatatacagttggtccag

SEQ ID NO: 3034516 - DNA, 25 bp, Homo sapien
tttattgaaaactatatacagttgg

SEQ ID NO: 3034517 - DNA, 25 bp, Homo sapien
tattgaaaactatatacagttggtc

SEQ ID NO: 3034518 - DNA, 25 bp, Homo sapien
tagggcccagctaagttgtccggaa

SEQ ID NO: 3034519 - DNA, 25 bp, Homo sapien
gagcccaccgtggatctttgtaaat

SEQ ID NO: 3034520 - DNA, 25 bp, Homo sapien
tcctagacgtggaggcaaacagcct

SEQ ID NO: 3034521 - DNA, 25 bp, Homo sapien
caacattgactcagggtccggagct

SEQ ID NO: 3034522 - DNA, 25 bp, Homo sapien
cagccggtcatccacgaagtagaag

SEQ ID NO: 3034523 - DNA, 25 bp, Homo sapien
ggtctcatacgggtggcggatcatc

SEQ ID NO: 3034524 - DNA, 25 bp, Homo sapien
aagctgtcagactgggtctcatacg

SEQ ID NO: 3034525 - DNA, 25 bp, Homo sapien
tgtcccgctgtaggaatagtctgct

SEQ ID NO: 3034526 - DNA, 25 bp, Homo sapien
gtcaggagcttgagtcccgccactg

SEQ ID NO: 3034527 - DNA, 25 bp, Homo sapien
aggccgggcaaaggtcaggagcttg

SEQ ID NO: 3034528 - DNA, 25 bp, Homo sapien
caggccgggcaaaggtcaggagctt

SEQ ID NO: 3034529 - DNA, 25 bp, Homo sapien
agcctctttctctacggatgatatg

SEQ ID NO: 3034530 - DNA, 25 bp, Homo sapien
tgggatcagacccacaagtccctct

SEQ ID NO: 3034531 - DNA, 25 bp, Homo sapien
agaaatgggatcagacccacaagtc

SEQ ID NO: 3034532 - DNA, 25 bp, Homo sapien
tctctacggatgatatgggaatggt

SEQ ID NO: 3034533 - DNA, 25 bp, Homo sapien
tctagacgcccccacttccccactc

SEQ ID NO: 3034534 - DNA, 25 bp, Homo sapien
ctctagacgcccccacttccccact

SEQ ID NO: 3034535 - DNA, 25 bp, Homo sapien
agtgcctctcgatcatgcggaagtt

SEQ ID NO: 3034536 - DNA, 25 bp, Homo sapien
gaagtcgtaaatgtgctcgcaggtg

SEQ ID NO: 3034537 - DNA, 25 bp, Homo sapien
ccaaagtggaagtcgaagcttttga

SEQ ID NO: 3034538 - DNA, 25 bp, Homo sapien
aagcttttgagtagctggttgcgga

SEQ ID NO: 3034539 - DNA, 25 bp, Homo sapien
ccacccctacgagaggctgagaagg

SEQ ID NO: 3034540 - DNA, 25 bp, Homo sapien
tccttgaagtcaactagccagccag

SEQ ID NO: 3034541 - DNA, 25 bp, Homo sapien
gaggcagggctaagtctgtccttga

SEQ ID NO: 3034542 - DNA, 25 bp, Homo sapien
gacaggccacccctacgagaggctg

SEQ ID NO: 3034543 - DNA, 25 bp, Homo sapien
tgaactggtagcggacaaagcgccc

SEQ ID NO: 3034544 - DNA, 25 bp, Homo sapien
gtagcggacaaagcgcccagcattg

SEQ ID NO: 3034545 - DNA, 25 bp, Homo sapien
caggtcccgccggttgatgggcaac

SEQ ID NO: 3034546 - DNA, 25 bp, Homo sapien
aactggtagcggacaaagcgcccag

SEQ ID NO: 3034547 - DNA, 25 bp, Homo sapien
ggctcagtgggcttcaggctgggcc

SEQ ID NO: 3034548 - DNA, 25 bp, Homo sapien
agctggggctcagtgggcttcaggc

SEQ ID NO: 3034549 - DNA, 25 bp, Homo sapien
ctgcaatgtaccccagctggggctc

SEQ ID NO: 3034550 - DNA, 25 bp, Homo sapien
ctggggctcagtgggcttcaggctg

SEQ ID NO: 3034551 - DNA, 25 bp, Homo sapien
tagggctgacctcgcaagatgtcca

SEQ ID NO: 3034552 - DNA, 25 bp, Homo sapien
tgtccagcctcagaaacatatggga

SEQ ID NO: 3034553 - DNA, 25 bp, Homo sapien
cctgggacccgtaggactgcagttc

SEQ ID NO: 3034554 - DNA, 25 bp, Homo sapien
ggtctgcatgttcccaatcgccact

SEQ ID NO: 3034555 - DNA, 25 bp, Homo sapien
gatcttgtagatattctcctcaggg

SEQ ID NO: 3034556 - DNA, 25 bp, Homo sapien
taaacctgacaaagtcgatcttgta

SEQ ID NO: 3034557 - DNA, 25 bp, Homo sapien
aggacagtgcctgagtccatgtccc

SEQ ID NO: 3034558 - DNA, 25 bp, Homo sapien
gtccatgtcccgaatcttaaacctg

SEQ ID NO: 3034559 - DNA, 25 bp, Homo sapien
gctggaagctccctctagttgcaaa

SEQ ID NO: 3034560 - DNA, 25 bp, Homo sapien
ggaagagacataactccgccatggg

SEQ ID NO: 3034561 - DNA, 25 bp, Homo sapien
tagaggtcatttacgcagccctggc

SEQ ID NO: 3034562 - DNA, 25 bp, Homo sapien
gaaccaagaacagtgggaggccctg

SEQ ID NO: 3034563 - DNA, 25 bp, Homo sapien
gctccgactcggacccagattcgga

SEQ ID NO: 3034564 - DNA, 25 bp, Homo sapien
cagattcggattccgcaggcggctg

SEQ ID NO: 3034565 - DNA, 25 bp, Homo sapien
gacccagattcggattccgcaggcg

SEQ ID NO: 3034566 - DNA, 25 bp, Homo sapien
cggcccgatcggctgcttcctctgc

SEQ ID NO: 3034567 - DNA, 25 bp, Homo sapien
ggccttgcggggccgaggctcgcct

SEQ ID NO: 3034568 - DNA, 25 bp, Homo sapien
gcggggccgaggctcgcctgctgct

SEQ ID NO: 3034569 - DNA, 25 bp, Homo sapien
cttgcggggccgaggctcgcctgct

SEQ ID NO: 3034570 - DNA, 25 bp, Homo sapien
ttgcggggccgaggctcgcctgctg

SEQ ID NO: 3034571 - DNA, 25 bp, Homo sapien
gggggaagtgggagcatccgcagcc

SEQ ID NO: 3034572 - DNA, 25 bp, Homo sapien
cgggggaagtgggagcatccgcagc

SEQ ID NO: 3034573 - DNA, 25 bp, Homo sapien
gggaagtgggagcatccgcagcccc

SEQ ID NO: 3034574 - DNA, 25 bp, Homo sapien
gccgggggaagtgggagcatccgca

SEQ ID NO: 3034575 - DNA, 25 bp, Homo sapien
taagagcctactacacgccagacac

SEQ ID NO: 3034576 - DNA, 25 bp, Homo sapien
cactttacatgctgatcacatttac

SEQ ID NO: 3034577 - DNA, 25 bp, Homo sapien
accatcttgtaagggagacatcatc

SEQ ID NO: 3034578 - DNA, 25 bp, Homo sapien
caaagctctccagacaataagtgca

SEQ ID NO: 3034579 - DNA, 25 bp, Homo sapien
gacagacaaagccaactaggaggga

SEQ ID NO: 3034580 - DNA, 25 bp, Homo sapien
aaggcttcctatggaggtgctgccc

SEQ ID NO: 3034581 - DNA, 25 bp, Homo sapien
tatttaagtcattccggcaggcccc

SEQ ID NO: 3034582 - DNA, 25 bp, Homo sapien
cctcctctcagtgcacaagtgtgct

SEQ ID NO: 3034583 - DNA, 25 bp, Homo sapien
tctccaggacttgcgggtctccagg

SEQ ID NO: 3034584 - DNA, 25 bp, Homo sapien
ggctttctccaggacttgcgggtct

SEQ ID NO: 3034585 - DNA, 25 bp, Homo sapien
caggctttctccaggacttgcgggt

SEQ ID NO: 3034586 - DNA, 25 bp, Homo sapien
tttctccaggacttgcgggtctcca

SEQ ID NO: 3034587 - DNA, 25 bp, Homo sapien
ggcaagctcagaggatgtcacagct

SEQ ID NO: 3034588 - DNA, 25 bp, Homo sapien
aactcttctgccgacttctggacgg

SEQ ID NO: 3034589 - DNA, 25 bp, Homo sapien
cctggctggcgacaaaggcagatgc

SEQ ID NO: 3034590 - DNA, 25 bp, Homo sapien
gcagatgccaggtgcccagacgcca

SEQ ID NO: 3034591 - DNA, 25 bp, Homo sapien
ctcagatgccacgtcgtccttaatg

SEQ ID NO: 3034592 - DNA, 25 bp, Homo sapien
cttgcccagaagctgcgccagggag

SEQ ID NO: 3034593 - DNA, 25 bp, Homo sapien
gccggtctagctcccaggtcattag

SEQ ID NO: 3034594 - DNA, 25 bp, Homo sapien
aggtcattagcccttcactcgtagg

SEQ ID NO: 3034595 - DNA, 25 bp, Homo sapien
cacaaggcgggagatcatggctaag

SEQ ID NO: 3034596 - DNA, 25 bp, Homo sapien
tctacagccaaggagactatgtccc

SEQ ID NO: 3034597 - DNA, 25 bp, Homo sapien
tatgtccccaagtggatcatccagg

SEQ ID NO: 3034598 - DNA, 25 bp, Homo sapien
catcggagtaagatcaaggtggctg

SEQ ID NO: 3034599 - DNA, 25 bp, Homo sapien
gaacacctccatcactcgcaccatg

SEQ ID NO: 3034600 - DNA, 25 bp, Homo sapien
tccatcactcgcaccatgtccacct

SEQ ID NO: 3034601 - DNA, 25 bp, Homo sapien
acctccatcactcgcaccatgtcca

SEQ ID NO: 3034602 - DNA, 25 bp, Homo sapien
ggaacacctccatcactcgcaccat

SEQ ID NO: 3034603 - DNA, 25 bp, Homo sapien
agcactgaggcattataggttttgg

SEQ ID NO: 3034604 - DNA, 25 bp, Homo sapien
gcagcactgaggcattataggtttt

SEQ ID NO: 3034605 - DNA, 25 bp, Homo sapien
gcactgaggcattataggttttgga

SEQ ID NO: 3034606 - DNA, 25 bp, Homo sapien
cagcactgaggcattataggttttg

SEQ ID NO: 3034607 - DNA, 25 bp, Homo sapien
gagtacctactacggagagcattaa

SEQ ID NO: 3034608 - DNA, 25 bp, Homo sapien
gaaacttccagtctaacaagggaga

SEQ ID NO: 3034609 - DNA, 25 bp, Homo sapien
taagggcaaagggtcacagtataga

SEQ ID NO: 3034610 - DNA, 25 bp, Homo sapien
cacagaatgatcctaggtaagggca

SEQ ID NO: 3034611 - DNA, 25 bp, Homo sapien
ggggtctgcgtagtgtgactattac

SEQ ID NO: 3034612 - DNA, 25 bp, Homo sapien
tggggtctgcgtagtgtgactatta

SEQ ID NO: 3034613 - DNA, 25 bp, Homo sapien
ctggggtctgcgtagtgtgactatt

SEQ ID NO: 3034614 - DNA, 25 bp, Homo sapien
cacgtagagtagaaagttgagcaca

SEQ ID NO: 3034615 - DNA, 25 bp, Homo sapien
cccagcggggactatggaaggcatt

SEQ ID NO: 3034616 - DNA, 25 bp, Homo sapien
gtgagtgtgcaagctcaggcacgta

SEQ ID NO: 3034617 - DNA, 25 bp, Homo sapien
tgtcctgaatgtacagcggtgagtg

SEQ ID NO: 3034618 - DNA, 25 bp, Homo sapien
aaaacatgctggacctggaccttag

SEQ ID NO: 3034619 - DNA, 25 bp, Homo sapien
tgttctcccgagatgtgccataccg

SEQ ID NO: 3034620 - DNA, 25 bp, Homo sapien
aaaggccccttgactgtctacgaca

SEQ ID NO: 3034621 - DNA, 25 bp, Homo sapien
tccagggtgtctctagtaaagggct

SEQ ID NO: 3034622 - DNA, 25 bp, Homo sapien
ccagccgggactccactgggttgat

SEQ ID NO: 3034623 - DNA, 25 bp, Homo sapien
gactccactgggttgatgacatggg

SEQ ID NO: 3034624 - DNA, 25 bp, Homo sapien
gggattcacccccaacattgcatag

SEQ ID NO: 3034625 - DNA, 25 bp, Homo sapien
ggaggctgtgcatgtccaaatagta

SEQ ID NO: 3034626 - DNA, 25 bp, Homo sapien
cccagtagacatcatgggacttggg

SEQ ID NO: 3034627 - DNA, 25 bp, Homo sapien
agttgccagcggcaccgagggcatt

SEQ ID NO: 3034628 - DNA, 25 bp, Homo sapien
gcaccgagggcattcaggaaaggtt

SEQ ID NO: 3034629 - DNA, 25 bp, Homo sapien
aaggttgcacatagcgccggacagc

SEQ ID NO: 3034630 - DNA, 25 bp, Homo sapien
gaatggggctgctttccatcatgga

SEQ ID NO: 3034631 - DNA, 25 bp, Homo sapien
aatggggctgctttccatcatggaa

SEQ ID NO: 3034632 - DNA, 25 bp, Homo sapien
atggggctgctttccatcatggaac

SEQ ID NO: 3034633 - DNA, 25 bp, Homo sapien
cctgggccacctggactatgcggcg

SEQ ID NO: 3034634 - DNA, 25 bp, Homo sapien
tatgcggcggccaatgatgttaaag

SEQ ID NO: 3034635 - DNA, 25 bp, Homo sapien
tgttaaaggcctcccggtgcattat

SEQ ID NO: 3034636 - DNA, 25 bp, Homo sapien
agcagcaagcacatcctcagtcaaa

SEQ ID NO: 3034637 - DNA, 25 bp, Homo sapien
gttcagatatcacgtacacagtcag

SEQ ID NO: 3034638 - DNA, 25 bp, Homo sapien
aagaagtgaggagtgttcagatatc

SEQ ID NO: 3034639 - DNA, 25 bp, Homo sapien
agtcagggagccctccgcttgttcc

SEQ ID NO: 3034640 - DNA, 25 bp, Homo sapien
tgttcctgaggctcatctaacatgg

SEQ ID NO: 3034641 - DNA, 25 bp, Homo sapien
attcagctgacacagtggtcaggct

SEQ ID NO: 3034642 - DNA, 25 bp, Homo sapien
ctcatggtccaaagccctccgatag

SEQ ID NO: 3034643 - DNA, 25 bp, Homo sapien
tcatggtccaaagccctccgatagg

SEQ ID NO: 3034644 - DNA, 25 bp, Homo sapien
ctcctcatggtccaaagccctccga

SEQ ID NO: 3034645 - DNA, 25 bp, Homo sapien
tggtccaaagccctccgataggcct

SEQ ID NO: 3034646 - DNA, 25 bp, Homo sapien
ctggaaacggcatttgattttcatt

SEQ ID NO: 3034647 - DNA, 25 bp, Homo sapien
ggcagaataaggcttgaattccagc

SEQ ID NO: 3034648 - DNA, 25 bp, Homo sapien
tctagtaactagaactgtatctgac

SEQ ID NO: 3034649 - DNA, 25 bp, Homo sapien
tctgacatagctacaaagtaaatac

SEQ ID NO: 3034650 - DNA, 25 bp, Homo sapien
tactatttccgtctaacagatgagg

SEQ ID NO: 3034651 - DNA, 25 bp, Homo sapien
ctctctttcatgcacaacggtgaag

SEQ ID NO: 3034652 - DNA, 25 bp, Homo sapien
tcatgcacaacggtgaagggcagct

SEQ ID NO: 3034653 - DNA, 25 bp, Homo sapien
gactcccgcgtaaacacgacagtga

SEQ ID NO: 3034654 - DNA, 25 bp, Homo sapien
cgtaaacacgacagtgacaggcacc

SEQ ID NO: 3034655 - DNA, 25 bp, Homo sapien
ggtaggtctccgtggtcttccacca

SEQ ID NO: 3034656 - DNA, 25 bp, Homo sapien
atctgggagtaaggcaacgaggccc

SEQ ID NO: 3034657 - DNA, 25 bp, Homo sapien
cgatggccaccgcagcgaagaagag

SEQ ID NO: 3034658 - DNA, 25 bp, Homo sapien
agcggtagccccagcacgatggcca

SEQ ID NO: 3034659 - DNA, 25 bp, Homo sapien
ccgactgaggcgctggaaacgggct

SEQ ID NO: 3034660 - DNA, 25 bp, Homo sapien
ttgggatctccgtgcgaagggaccc

SEQ ID NO: 3034661 - DNA, 25 bp, Homo sapien
tattcctcccttgccatcagctagc

SEQ ID NO: 3034662 - DNA, 25 bp, Homo sapien
gcctgaagggaatctcgtctgaaga

SEQ ID NO: 3034663 - DNA, 25 bp, Homo sapien
ctaggtgtgtagccgcagccccggc

SEQ ID NO: 3034664 - DNA, 25 bp, Homo sapien
gctagcttccggctgctccggccac

SEQ ID NO: 3034665 - DNA, 25 bp, Homo sapien
ctagcttccggctgctccggccacc

SEQ ID NO: 3034666 - DNA, 25 bp, Homo sapien
ctgctccggccaccgtgggggcaga

SEQ ID NO: 3034667 - DNA, 25 bp, Homo sapien
tccggccaccgtgggggcagagctt

SEQ ID NO: 3034668 - DNA, 25 bp, Homo sapien
ggaaaactcagaatacttcacttaa

SEQ ID NO: 3034669 - DNA, 25 bp, Homo sapien
tcatgagcccagactctagatgctg

SEQ ID NO: 3034670 - DNA, 25 bp, Homo sapien
tgatcactgcggttcaaatcctggc

SEQ ID NO: 3034671 - DNA, 25 bp, Homo sapien
aaatcttgaaaagtcatgagcccag

SEQ ID NO: 3034672 - DNA, 25 bp, Homo sapien
gaaatgtgtcagtacatataaagtg

SEQ ID NO: 3034673 - DNA, 25 bp, Homo sapien
tcagtacatataaagtgattagaac

SEQ ID NO: 3034674 - DNA, 25 bp, Homo sapien
gcatttgtagcctccccagttgaca

SEQ ID NO: 3034675 - DNA, 25 bp, Homo sapien
cagggttggtgctatgtgcaagcta

SEQ ID NO: 3034676 - DNA, 25 bp, Homo sapien
ctctttgggcgggagtccaggtgct

SEQ ID NO: 3034677 - DNA, 25 bp, Homo sapien
ttgtgcccacttctaccccaaatga

SEQ ID NO: 3034678 - DNA, 25 bp, Homo sapien
gaccctccaattggctccctttgtg

SEQ ID NO: 3034679 - DNA, 25 bp, Homo sapien
tctgcttagacccaggttctcagcc

SEQ ID NO: 3034680 - DNA, 25 bp, Homo sapien
tgtggcagtccctagaagacttgca

SEQ ID NO: 3034681 - DNA, 25 bp, Homo sapien
acactgcgagatgggagagactccc

SEQ ID NO: 3034682 - DNA, 25 bp, Homo sapien
caaatctgccttcaggagttgccag

SEQ ID NO: 3034683 - DNA, 25 bp, Homo sapien
gagggcccagagatagaattagcag

SEQ ID NO: 3034684 - DNA, 25 bp, Homo sapien
gggagaagctacctcatcatgggaa

SEQ ID NO: 3034685 - DNA, 25 bp, Homo sapien
tctgcatagctatttggccctggcc

SEQ ID NO: 3034686 - DNA, 25 bp, Homo sapien
tatggtcccaggtgcagcaatgaga

SEQ ID NO: 3034687 - DNA, 25 bp, Homo sapien
gccctggccatgactacaagcaaaa

SEQ ID NO: 3034688 - DNA, 25 bp, Homo sapien
tggcaatgtagagtgactgtgctgc

SEQ ID NO: 3034689 - DNA, 25 bp, Homo sapien
tcagtaggcatggttggcaatgtag

SEQ ID NO: 3034690 - DNA, 25 bp, Homo sapien
caatgtagagtgactgtgctgctgc

SEQ ID NO: 3034691 - DNA, 25 bp, Homo sapien
gttggcaatgtagagtgactgtgct

SEQ ID NO: 3034692 - DNA, 25 bp, Homo sapien
cagggcacgcccataggagaaggta

SEQ ID NO: 3034693 - DNA, 25 bp, Homo sapien
ccctcgccaggcattgagtgcagag

SEQ ID NO: 3034694 - DNA, 25 bp, Homo sapien
gcagaggcttgcagggcacgcccat

SEQ ID NO: 3034695 - DNA, 25 bp, Homo sapien
cattgaggttgaatgatgcctcttc

SEQ ID NO: 3034696 - DNA, 25 bp, Homo sapien
agaagacaaactgactggtcactcc

SEQ ID NO: 3034697 - DNA, 25 bp, Homo sapien
gaagacaaactgactggtcactccc

SEQ ID NO: 3034698 - DNA, 25 bp, Homo sapien
ggtcccctccaggtatacatgatgg

SEQ ID NO: 3034699 - DNA, 25 bp, Homo sapien
catgttgggcttgagcagggtcccc

SEQ ID NO: 3034700 - DNA, 25 bp, Homo sapien
tatacttgatgggacaggcatggcc

SEQ ID NO: 3034701 - DNA, 25 bp, Homo sapien
acgcagggcagtgacagttgccatg

SEQ ID NO: 3034702 - DNA, 25 bp, Homo sapien
ggttccacaataggcacaatgccat

SEQ ID NO: 3034703 - DNA, 25 bp, Homo sapien
tgtaacatactgacaacgtttgagg

SEQ ID NO: 3034704 - DNA, 25 bp, Homo sapien
catcaggcaatatttcaggttccac

SEQ ID NO: 3034705 - DNA, 25 bp, Homo sapien
caacgtttgaggtcgtggtctccat

SEQ ID NO: 3034706 - DNA, 25 bp, Homo sapien
tgattttcagcacacagcgccactt

SEQ ID NO: 3034707 - DNA, 25 bp, Homo sapien
tcttgtattgggcacagcgttctga

SEQ ID NO: 3034708 - DNA, 25 bp, Homo sapien
caagtgcagagggtgtacgctcact

SEQ ID NO: 3034709 - DNA, 25 bp, Homo sapien
cataacgggccagcacgttggcgtt

SEQ ID NO: 3034710 - DNA, 25 bp, Homo sapien
cttgagtggtggtttctccatcagt

SEQ ID NO: 3034711 - DNA, 25 bp, Homo sapien
agtggtggtttctccatcagtccca

SEQ ID NO: 3034712 - DNA, 25 bp, Homo sapien
atcagtcccagctagaggcaccaca

SEQ ID NO: 3034713 - DNA, 25 bp, Homo sapien
ttctccatcagtcccagctagaggc

SEQ ID NO: 3034714 - DNA, 25 bp, Homo sapien
ccttatcctggatggttcggacgaa

SEQ ID NO: 3034715 - DNA, 25 bp, Homo sapien
ttgatgcccacgacgatgcccttat

SEQ ID NO: 3034716 - DNA, 25 bp, Homo sapien
tctcatggaagaaaatgacgcctcc

SEQ ID NO: 3034717 - DNA, 25 bp, Homo sapien
ttcggacgaagggaacaccattatc

SEQ ID NO: 3034718 - DNA, 25 bp, Homo sapien
gggcaatgtcagacaactccttctt

SEQ ID NO: 3034719 - DNA, 25 bp, Homo sapien
aaagggctgggtacgagtgaggcat

SEQ ID NO: 3034720 - DNA, 25 bp, Homo sapien
tcatccgcagccagaatgcctttgc

SEQ ID NO: 3034721 - DNA, 25 bp, Homo sapien
ggctacaatccgcagggcaatgtca

SEQ ID NO: 3034722 - DNA, 25 bp, Homo sapien
tgggcatcaagtggcaccagtcctt

SEQ ID NO: 3034723 - DNA, 25 bp, Homo sapien
cactgaacttggtcccttgttgagg

SEQ ID NO: 3034724 - DNA, 25 bp, Homo sapien
tctgacagctagcaagcttagggct

SEQ ID NO: 3034725 - DNA, 25 bp, Homo sapien
ggatgccaacccttctttcactgaa

SEQ ID NO: 3034726 - DNA, 25 bp, Homo sapien
caaaagtacttattgccaccctctt

SEQ ID NO: 3034727 - DNA, 25 bp, Homo sapien
ggcaaaagtacttattgccaccctc

SEQ ID NO: 3034728 - DNA, 25 bp, Homo sapien
gaggcaaaagtacttattgccaccc

SEQ ID NO: 3034729 - DNA, 25 bp, Homo sapien
agtacttattgccaccctcttctct

SEQ ID NO: 3034730 - DNA, 25 bp, Homo sapien
tcgggttctgatccgcaaacagatg

SEQ ID NO: 3034731 - DNA, 25 bp, Homo sapien
cagctcgggttctgatccgcaaaca

SEQ ID NO: 3034732 - DNA, 25 bp, Homo sapien
tctgatccgcaaacagatgaggctg

SEQ ID NO: 3034733 - DNA, 25 bp, Homo sapien
ggttctgatccgcaaacagatgagg

SEQ ID NO: 3034734 - DNA, 25 bp, Homo sapien
atagcatttatctcagttggctcta

SEQ ID NO: 3034735 - DNA, 25 bp, Homo sapien
taaatagcatttatctcagttggct

SEQ ID NO: 3034736 - DNA, 25 bp, Homo sapien
aaatagcatttatctcagttggctc

SEQ ID NO: 3034737 - DNA, 25 bp, Homo sapien
tttaaatagcatttatctcagttgg

SEQ ID NO: 3034738 - DNA, 25 bp, Homo sapien
tattgcaggtaaaaagaggtgaagc

SEQ ID NO: 3034739 - DNA, 25 bp, Homo sapien
caggtaaaaagaggtgaagcagatt

SEQ ID NO: 3034740 - DNA, 25 bp, Homo sapien
cagttggtcttggtattggggtaag

SEQ ID NO: 3034741 - DNA, 25 bp, Homo sapien
aggtaaaaagaggtgaagcagattc

SEQ ID NO: 3034742 - DNA, 25 bp, Homo sapien
gaaattccagcaatccctgtagttc

SEQ ID NO: 3034743 - DNA, 25 bp, Homo sapien
ccagcaatccctgtagttctttgca

SEQ ID NO: 3034744 - DNA, 25 bp, Homo sapien
gcaatccctgtagttctttgcatcc

SEQ ID NO: 3034745 - DNA, 25 bp, Homo sapien
aattccagcaatccctgtagttctt

SEQ ID NO: 3034746 - DNA, 25 bp, Homo sapien
ggaccacagacttaaggcccagggc

SEQ ID NO: 3034747 - DNA, 25 bp, Homo sapien
caatagtgattcaggcccagctctc

SEQ ID NO: 3034748 - DNA, 25 bp, Homo sapien
ggttcattagtgatatcacctccct

SEQ ID NO: 3034749 - DNA, 25 bp, Homo sapien
tctgtgctcattagtacctcctggg

SEQ ID NO: 3034750 - DNA, 25 bp, Homo sapien
tgtcagagcgccgaaggttctcctc

SEQ ID NO: 3034751 - DNA, 25 bp, Homo sapien
ttttctaactccttgtcagagcgcc

SEQ ID NO: 3034752 - DNA, 25 bp, Homo sapien
cgccgaaggttctcctctaggatat

SEQ ID NO: 3034753 - DNA, 25 bp, Homo sapien
aatatgctgaacaatgtcatctagt

SEQ ID NO: 3034754 - DNA, 25 bp, Homo sapien
ctagaaagcaaacagattttataag

SEQ ID NO: 3034755 - DNA, 25 bp, Homo sapien
agaaagcaaacagattttataagtc

SEQ ID NO: 3034756 - DNA, 25 bp, Homo sapien
tagaaagcaaacagattttataagt

SEQ ID NO: 3034757 - DNA, 25 bp, Homo sapien
taggacaggggaaacatggcggggc

SEQ ID NO: 3034758 - DNA, 25 bp, Homo sapien
gggcatttgttaacgatggtaggaa

SEQ ID NO: 3034759 - DNA, 25 bp, Homo sapien
aacatggcggggcatttgttaacga

SEQ ID NO: 3034760 - DNA, 25 bp, Homo sapien
gcatttgttaacgatggtaggaaat

SEQ ID NO: 3034761 - DNA, 25 bp, Homo sapien
catgagtttttccttctcatttttc

SEQ ID NO: 3034762 - DNA, 25 bp, Homo sapien
catttttcatctccaggaacatcac

SEQ ID NO: 3034763 - DNA, 25 bp, Homo sapien
tcatgagtttttccttctcattttt

SEQ ID NO: 3034764 - DNA, 25 bp, Homo sapien
tctcatttttcatctccaggaacat

SEQ ID NO: 3034765 - DNA, 25 bp, Homo sapien
gaaatatgtccagatcaacaggggt

SEQ ID NO: 3034766 - DNA, 25 bp, Homo sapien
tctctgtctccgcacgccgaagtga

SEQ ID NO: 3034767 - DNA, 25 bp, Homo sapien
gcagttggagtccagctggcctgcc

SEQ ID NO: 3034768 - DNA, 25 bp, Homo sapien
caattggtggccataggctggcagt

SEQ ID NO: 3034769 - DNA, 25 bp, Homo sapien
tgagcgggtaaggtgggtcacctcc

SEQ ID NO: 3034770 - DNA, 25 bp, Homo sapien
gaatggagaggtgtccaataggaca

SEQ ID NO: 3034771 - DNA, 25 bp, Homo sapien
tagacaacatgtggtgaacaaaagc

SEQ ID NO: 3034772 - DNA, 25 bp, Homo sapien
ggctgaccagtaacacagaaggcaa

SEQ ID NO: 3034773 - DNA, 25 bp, Homo sapien
aaaccatttctcatacttgggatcc

SEQ ID NO: 3034774 - DNA, 25 bp, Homo sapien
tatgagctcgccactcttgtctatc

SEQ ID NO: 3034775 - DNA, 25 bp, Homo sapien
ttcatcgccccacttctaggtccct

SEQ ID NO: 3034776 - DNA, 25 bp, Homo sapien
gccccacttctaggtccctccttca

SEQ ID NO: 3034777 - DNA, 25 bp, Homo sapien
cttcatcgccccacttctaggtccc

SEQ ID NO: 3034778 - DNA, 25 bp, Homo sapien
gcgcaagcacaaggcctggttcagc

SEQ ID NO: 3034779 - DNA, 25 bp, Homo sapien
gggcctgcagcctagcttgcagctc

SEQ ID NO: 3034780 - DNA, 25 bp, Homo sapien
cttgtagcgcaagcacaaggcctgg

SEQ ID NO: 3034781 - DNA, 25 bp, Homo sapien
ctgcagcctagcttgcagctcacaa

SEQ ID NO: 3034782 - DNA, 25 bp, Homo sapien
cagtagtcataatactcatttctgc

SEQ ID NO: 3034783 - DNA, 25 bp, Homo sapien
ttagactcttgtagcagggaacaaa

SEQ ID NO: 3034784 - DNA, 25 bp, Homo sapien
tagactcttgtagcagggaacaaag

SEQ ID NO: 3034785 - DNA, 25 bp, Homo sapien
ataatactcatttctgccaggctct

SEQ ID NO: 3034786 - DNA, 25 bp, Homo sapien
cccagatagaggtctagccttccag

SEQ ID NO: 3034787 - DNA, 25 bp, Homo sapien
agtcccagatagaggtctagccttc

SEQ ID NO: 3034788 - DNA, 25 bp, Homo sapien
gaaagagaaagtcccagatagaggt

SEQ ID NO: 3034789 - DNA, 25 bp, Homo sapien
gagaaagtcccagatagaggtctag

SEQ ID NO: 3034790 - DNA, 25 bp, Homo sapien
tgctttcgtctttactcatcaccac

SEQ ID NO: 3034791 - DNA, 25 bp, Homo sapien
aaaatgagcccaagtagaattgagg

SEQ ID NO: 3034792 - DNA, 25 bp, Homo sapien
tctcactgctttcgtctttactcat

SEQ ID NO: 3034793 - DNA, 25 bp, Homo sapien
tgtctggaacattacagatcccaga

SEQ ID NO: 3034794 - DNA, 25 bp, Homo sapien
gaagggaaaccattgatgctactcg

SEQ ID NO: 3034795 - DNA, 25 bp, Homo sapien
cgggctgaagggaaaccattgatgc

SEQ ID NO: 3034796 - DNA, 25 bp, Homo sapien
gggtgaaagcactcttgtcacttcc

SEQ ID NO: 3034797 - DNA, 25 bp, Homo sapien
cattgatgctactcgggtgaaagca

SEQ ID NO: 3034798 - DNA, 25 bp, Homo sapien
accaataatgggagagggcccctct

SEQ ID NO: 3034799 - DNA, 25 bp, Homo sapien
caggagcagcgtcacaactttccca

SEQ ID NO: 3034800 - DNA, 25 bp, Homo sapien
ccagggtaagatagacaagcccgct

SEQ ID NO: 3034801 - DNA, 25 bp, Homo sapien
ttcaacagcagaagatatcaggagc

SEQ ID NO: 3034802 - DNA, 25 bp, Homo sapien
tcccaggaaggtcctgtcattaggc

SEQ ID NO: 3034803 - DNA, 25 bp, Homo sapien
gtcctgtcattaggcagagggtgtt

SEQ ID NO: 3034804 - DNA, 25 bp, Homo sapien
aggaaggtcctgtcattaggcagag

SEQ ID NO: 3034805 - DNA, 25 bp, Homo sapien
aaggtcctgtcattaggcagagggt

SEQ ID NO: 3034806 - DNA, 25 bp, Homo sapien
gacaggctgtactcagcagaagggt

SEQ ID NO: 3034807 - DNA, 25 bp, Homo sapien
aggacaggctgtactcagcagaagg

SEQ ID NO: 3034808 - DNA, 25 bp, Homo sapien
ggacaggctgtactcagcagaaggg

SEQ ID NO: 3034809 - DNA, 25 bp, Homo sapien
aatgctgttccacctattatctcaa

SEQ ID NO: 3034810 - DNA, 25 bp, Homo sapien
catttggttcaccaatggcagcctt

SEQ ID NO: 3034811 - DNA, 25 bp, Homo sapien
tcttaagcctctccaacaaaaacag

SEQ ID NO: 3034812 - DNA, 25 bp, Homo sapien
gctgttcaggtctagtgaactcctg

SEQ ID NO: 3034813 - DNA, 25 bp, Homo sapien
cagacttgctgcattccatatgagc

SEQ ID NO: 3034814 - DNA, 25 bp, Homo sapien
tcagacttgctgcattccatatgag

SEQ ID NO: 3034815 - DNA, 25 bp, Homo sapien
ttattgtttagtgcacactgcaggg

SEQ ID NO: 3034816 - DNA, 25 bp, Homo sapien
atttattgtttagtgcacactgcag

SEQ ID NO: 3034817 - DNA, 25 bp, Homo sapien
tattgtttagtgcacactgcaggga

SEQ ID NO: 3034818 - DNA, 25 bp, Homo sapien
ttgtttagtgcacactgcagggagg

SEQ ID NO: 3034819 - DNA, 25 bp, Homo sapien
aagtgttcataatagggagatagga

SEQ ID NO: 3034820 - DNA, 25 bp, Homo sapien
gaaaggtttgagcaacaggctaatg

SEQ ID NO: 3034821 - DNA, 25 bp, Homo sapien
tgaggtcctgtaggtaactgaaatc

SEQ ID NO: 3034822 - DNA, 25 bp, Homo sapien
gtagcatacaggcagtctagctggg

SEQ ID NO: 3034823 - DNA, 25 bp, Homo sapien
tagttgctcagtcagcagccctagc

SEQ ID NO: 3034824 - DNA, 25 bp, Homo sapien
tgctatggtgctggccagtttagcc

SEQ ID NO: 3034825 - DNA, 25 bp, Homo sapien
gagagtcaggctctgtagttgctca

SEQ ID NO: 3034826 - DNA, 25 bp, Homo sapien
gccctagcttttgagagtactgccg

SEQ ID NO: 3034827 - DNA, 25 bp, Homo sapien
tgcaagctgcgctcccggagcactt

SEQ ID NO: 3034828 - DNA, 25 bp, Homo sapien
aggtgagcaacctgattctcctggt

SEQ ID NO: 3034829 - DNA, 25 bp, Homo sapien
taggttctctacagtgtccttgagg

SEQ ID NO: 3034830 - DNA, 25 bp, Homo sapien
ccagtgtggttttcaattgacactc

SEQ ID NO: 3034831 - DNA, 25 bp, Homo sapien
tgcatgtgttttagtgccatctctt

SEQ ID NO: 3034832 - DNA, 25 bp, Homo sapien
ttctgcctgcatgtgttttagtgcc

SEQ ID NO: 3034833 - DNA, 25 bp, Homo sapien
gtctctttcaggtcccgcacctctt

SEQ ID NO: 3034834 - DNA, 25 bp, Homo sapien
ttcaggtcccgcacctctttggcca

SEQ ID NO: 3034835 - DNA, 25 bp, Homo sapien
tctgggtaagctggcagagtaactc

SEQ ID NO: 3034836 - DNA, 25 bp, Homo sapien
gtagctcttttagctggctgtccat

SEQ ID NO: 3034837 - DNA, 25 bp, Homo sapien
caatgggtatgctgactctgtagct

SEQ ID NO: 3034838 - DNA, 25 bp, Homo sapien
caggtcctgggcacaatgggtatgc

SEQ ID NO: 3034839 - DNA, 25 bp, Homo sapien
taacagggctcaaatgcttacatgc

SEQ ID NO: 3034840 - DNA, 25 bp, Homo sapien
caagccttaacagggctcaaatgct

SEQ ID NO: 3034841 - DNA, 25 bp, Homo sapien
cactccaagccttaacagggctcaa

SEQ ID NO: 3034842 - DNA, 25 bp, Homo sapien
tgccacactccaagccttaacaggg

SEQ ID NO: 3034843 - DNA, 25 bp, Homo sapien
ctctaactgggcagagacttgttcc

SEQ ID NO: 3034844 - DNA, 25 bp, Homo sapien
gagacttgttccagcaccctagaaa

SEQ ID NO: 3034845 - DNA, 25 bp, Homo sapien
gggcagagacttgttccagcaccct

SEQ ID NO: 3034846 - DNA, 25 bp, Homo sapien
cctctaactgggcagagacttgttc

SEQ ID NO: 3034847 - DNA, 25 bp, Homo sapien
tctctgtgagttgtcgggaccgact

SEQ ID NO: 3034848 - DNA, 25 bp, Homo sapien
agggcttgctggctcttgactgtga

SEQ ID NO: 3034849 - DNA, 25 bp, Homo sapien
aattgccacatcacgttcctgcagg

SEQ ID NO: 3034850 - DNA, 25 bp, Homo sapien
tcagcaaagctgtccatgttgtata

SEQ ID NO: 3034851 - DNA, 25 bp, Homo sapien
agttatgatggtcccaaatactcac

SEQ ID NO: 3034852 - DNA, 25 bp, Homo sapien
gatgtgagtaaggaattagttatga

SEQ ID NO: 3034853 - DNA, 25 bp, Homo sapien
cacttgaggcaaagctcacaacagg

SEQ ID NO: 3034854 - DNA, 25 bp, Homo sapien
cacacttgaggcaaagctcacaaca

SEQ ID NO: 3034855 - DNA, 25 bp, Homo sapien
gcatggacctccagtcttgttgcaa

SEQ ID NO: 3034856 - DNA, 25 bp, Homo sapien
atccagttgcatggacctccagtct

SEQ ID NO: 3034857 - DNA, 25 bp, Homo sapien
cttgttgcaaggtagaagtaagact

SEQ ID NO: 3034858 - DNA, 25 bp, Homo sapien
tcttgttgcaaggtagaagtaagac

SEQ ID NO: 3034859 - DNA, 25 bp, Homo sapien
gctcttcttgcttggcatgaagccc

SEQ ID NO: 3034860 - DNA, 25 bp, Homo sapien
cttcttgcttggcatgaagccctac

SEQ ID NO: 3034861 - DNA, 25 bp, Homo sapien
tgtctgctgaaccagctcttcttgc

SEQ ID NO: 3034862 - DNA, 25 bp, Homo sapien
cagctcttcttgcttggcatgaagc

SEQ ID NO: 3034863 - DNA, 25 bp, Homo sapien
agaaagcctccaacactatctctgc

SEQ ID NO: 3034864 - DNA, 25 bp, Homo sapien
ctggctggcgtgtgcacagaaagcc

SEQ ID NO: 3034865 - DNA, 25 bp, Homo sapien
cgcatggatgctaggtcctgttcca

SEQ ID NO: 3034866 - DNA, 25 bp, Homo sapien
ttcagaaggcctctgaattcccgca

SEQ ID NO: 3034867 - DNA, 25 bp, Homo sapien
gacacctcaatagatcagttcttta

SEQ ID NO: 3034868 - DNA, 25 bp, Homo sapien
tcagttctttactgcccagggcagg

SEQ ID NO: 3034869 - DNA, 25 bp, Homo sapien
caaaaagatgtaaccatgacacctc

SEQ ID NO: 3034870 - DNA, 25 bp, Homo sapien
taaccatgacacctcaatagatcag

SEQ ID NO: 3034871 - DNA, 25 bp, Homo sapien
ccaagaacaaatgcctgtcacctta

SEQ ID NO: 3034872 - DNA, 25 bp, Homo sapien
accttgaggtggaaacctcccacat

SEQ ID NO: 3034873 - DNA, 25 bp, Homo sapien
cttgaggtggaaacctcccacatcc

SEQ ID NO: 3034874 - DNA, 25 bp, Homo sapien
aacctcccacatccaagaacaaatg

SEQ ID NO: 3034875 - DNA, 25 bp, Homo sapien
agaccaatgtttctgcacgccgaga

SEQ ID NO: 3034876 - DNA, 25 bp, Homo sapien
cagaccaatgtttctgcacgccgag

SEQ ID NO: 3034877 - DNA, 25 bp, Homo sapien
aagcaaggatatcagctctttagag

SEQ ID NO: 3034878 - DNA, 25 bp, Homo sapien
tgaagcaaggatatcagctctttag

SEQ ID NO: 3034879 - DNA, 25 bp, Homo sapien
gaagcaaggatatcagctctttaga

SEQ ID NO: 3034880 - DNA, 25 bp, Homo sapien
tctcatggctctccttaagatgctg

SEQ ID NO: 3034881 - DNA, 25 bp, Homo sapien
atctcatggctctccttaagatgct

SEQ ID NO: 3034882 - DNA, 25 bp, Homo sapien
tcatggctctccttaagatgctgaa

SEQ ID NO: 3034883 - DNA, 25 bp, Homo sapien
ccatctcatggctctccttaagatg

SEQ ID NO: 3034884 - DNA, 25 bp, Homo sapien
tataagcctgtgataggagtcccct

SEQ ID NO: 3034885 - DNA, 25 bp, Homo sapien
cttaaattccaaggatccccactgg

SEQ ID NO: 3034886 - DNA, 25 bp, Homo sapien
caagctttgagaggaaccttcttac

SEQ ID NO: 3034887 - DNA, 25 bp, Homo sapien
cactgggatccctcaagctttgaga

SEQ ID NO: 3034888 - DNA, 25 bp, Homo sapien
tcatgtcgagacaaggcagtcagat

SEQ ID NO: 3034889 - DNA, 25 bp, Homo sapien
cgaagctggcgggagagaacctcca

SEQ ID NO: 3034890 - DNA, 25 bp, Homo sapien
tcttccaagtcatgtcgagacaagg

SEQ ID NO: 3034891 - DNA, 25 bp, Homo sapien
cagctggctcttccagtcccgaagc

SEQ ID NO: 3034892 - DNA, 25 bp, Homo sapien
actcacgaggtgcaaggacataggg

SEQ ID NO: 3034893 - DNA, 25 bp, Homo sapien
ggaaggtccagggtaatggaactca

SEQ ID NO: 3034894 - DNA, 25 bp, Homo sapien
gagaagaacatgacgaaaagaaaag

SEQ ID NO: 3034895 - DNA, 25 bp, Homo sapien
cagggtaatggaactcacgaggtgc

SEQ ID NO: 3034896 - DNA, 25 bp, Homo sapien
tagtgccaattgcagcatcccgaag

SEQ ID NO: 3034897 - DNA, 25 bp, Homo sapien
taagctttggcggagattttccagc

SEQ ID NO: 3034898 - DNA, 25 bp, Homo sapien
tgctgaaggagtaaaccaagtcccc

SEQ ID NO: 3034899 - DNA, 25 bp, Homo sapien
ccagcatgacggaggtatttacacc

SEQ ID NO: 3034900 - DNA, 25 bp, Homo sapien
aacatcttctactgctgggcctgga

SEQ ID NO: 3034901 - DNA, 25 bp, Homo sapien
tgtatcagagccaagaatcctacca

SEQ ID NO: 3034902 - DNA, 25 bp, Homo sapien
tctgggtccacatgattgacacgga

SEQ ID NO: 3034903 - DNA, 25 bp, Homo sapien
gactccttaggatgtgtgggaaacc

SEQ ID NO: 3034904 - DNA, 25 bp, Homo sapien
tctaagagatgggacggagattcct

SEQ ID NO: 3034905 - DNA, 25 bp, Homo sapien
ccatggtatctaaacgggcctcaaa

SEQ ID NO: 3034906 - DNA, 25 bp, Homo sapien
gaaggtactaagtcctcacgcacag

SEQ ID NO: 3034907 - DNA, 25 bp, Homo sapien
gggaattggatctagaggctgctca

SEQ ID NO: 3034908 - DNA, 25 bp, Homo sapien
gatgtcaccgacgtagaagacttca

SEQ ID NO: 3034909 - DNA, 25 bp, Homo sapien
ttattaattattgtagccctggccc

SEQ ID NO: 3034910 - DNA, 25 bp, Homo sapien
ctctgttggcctgaatagctgtaaa

SEQ ID NO: 3034911 - DNA, 25 bp, Homo sapien
gcctgaatagctgtaaatggatgtc

SEQ ID NO: 3034912 - DNA, 25 bp, Homo sapien
gagaagctgtccaggcgaatctcac

SEQ ID NO: 3034913 - DNA, 25 bp, Homo sapien
caaacagcccagtcgagaagctgtc

SEQ ID NO: 3034914 - DNA, 25 bp, Homo sapien
aacagcccagtcgagaagctgtcca

SEQ ID NO: 3034915 - DNA, 25 bp, Homo sapien
gcaaacagcccagtcgagaagctgt

SEQ ID NO: 3034916 - DNA, 25 bp, Homo sapien
agcaagcgggggatctttttccaga

SEQ ID NO: 3034917 - DNA, 25 bp, Homo sapien
tgcagggtaagttcacggagaggag

SEQ ID NO: 3034918 - DNA, 25 bp, Homo sapien
tccagagttggtgagggcaccgggc

SEQ ID NO: 3034919 - DNA, 25 bp, Homo sapien
ccagcttgcacagtgatggggtcag

SEQ ID NO: 3034920 - DNA, 25 bp, Homo sapien
gaggctcagttttttcactcgccac

SEQ ID NO: 3034921 - DNA, 25 bp, Homo sapien
aaggcgacaggctgaggctcagttt

SEQ ID NO: 3034922 - DNA, 25 bp, Homo sapien
ggcgaaggcgacaggctgaggctca

SEQ ID NO: 3034923 - DNA, 25 bp, Homo sapien
ggctcagttttttcactcgccacat

SEQ ID NO: 3034924 - DNA, 25 bp, Homo sapien
acccgccgtctgtgtttgaacctgc

SEQ ID NO: 3034925 - DNA, 25 bp, Homo sapien
gagcgttttccgctgacggagccct

SEQ ID NO: 3034926 - DNA, 25 bp, Homo sapien
tcagaccaagtcgaggacgccatgt

SEQ ID NO: 3034927 - DNA, 25 bp, Homo sapien
accacgcaggtagctggagagtcca

SEQ ID NO: 3034928 - DNA, 25 bp, Homo sapien
tttgaaacatggtctggcgctgttg

SEQ ID NO: 3034929 - DNA, 25 bp, Homo sapien
ttgaaacatggtctggcgctgttgc

SEQ ID NO: 3034930 - DNA, 25 bp, Homo sapien
gagataagaaataatgagtagagct

SEQ ID NO: 3034931 - DNA, 25 bp, Homo sapien
caagtgaagtctatcagatttcttt

SEQ ID NO: 3034932 - DNA, 25 bp, Homo sapien
ggtgttgactaatcttaaattctta

SEQ ID NO: 3034933 - DNA, 25 bp, Homo sapien
tttctagaggagtataggattggtg

SEQ ID NO: 3034934 - DNA, 25 bp, Homo sapien
gactctcactgtcaccctggctgct

SEQ ID NO: 3034935 - DNA, 25 bp, Homo sapien
ctcactgtcaccctggctgctggag

SEQ ID NO: 3034936 - DNA, 25 bp, Homo sapien
gacggactctcactgtcaccctggc

SEQ ID NO: 3034937 - DNA, 25 bp, Homo sapien
cctccacctccctgggactacaggc

SEQ ID NO: 3034938 - DNA, 25 bp, Homo sapien
taagtcagtgactctgaatggaggt

SEQ ID NO: 3034939 - DNA, 25 bp, Homo sapien
tttcatgtgaatatgtaaaaggtat

SEQ ID NO: 3034940 - DNA, 25 bp, Homo sapien
cagagataatcacatcagaactgga

SEQ ID NO: 3034941 - DNA, 25 bp, Homo sapien
aactggatgaaagagtccgtgcttt

SEQ ID NO: 3034942 - DNA, 25 bp, Homo sapien
ttcctaggcagagtgtttgtgtccc

SEQ ID NO: 3034943 - DNA, 25 bp, Homo sapien
ccatgtctacctccctctacacaga

SEQ ID NO: 3034944 - DNA, 25 bp, Homo sapien
ttttcctaggcagagtgtttgtgtc

SEQ ID NO: 3034945 - DNA, 25 bp, Homo sapien
atgggaaaggacttcaatattttat

SEQ ID NO: 3034946 - DNA, 25 bp, Homo sapien
gttatgatcataacctggagcttct

SEQ ID NO: 3034947 - DNA, 25 bp, Homo sapien
cagtggccaaatcatagcttcaggt

SEQ ID NO: 3034948 - DNA, 25 bp, Homo sapien
catagcttcaggttatgatcataac

SEQ ID NO: 3034949 - DNA, 25 bp, Homo sapien
tgggtggtacaggaccaccacatct

SEQ ID NO: 3034950 - DNA, 25 bp, Homo sapien
taactgggtccagagaaaatttctc

SEQ ID NO: 3034951 - DNA, 25 bp, Homo sapien
caaattgggctctaaatggtctagt

SEQ ID NO: 3034952 - DNA, 25 bp, Homo sapien
actacagtgtgtgccctcatgacca

SEQ ID NO: 3034953 - DNA, 25 bp, Homo sapien
tgctgaaggtagaccacaaattggg

SEQ ID NO: 3034954 - DNA, 25 bp, Homo sapien
cccttcaagtctcaggacaaaaatg

SEQ ID NO: 3034955 - DNA, 25 bp, Homo sapien
taaatagaactaaagagtactctcc

SEQ ID NO: 3034956 - DNA, 25 bp, Homo sapien
cacacctggcgagcaattaaatttc

SEQ ID NO: 3034957 - DNA, 25 bp, Homo sapien
tatggattaccaaagtccaatccag

SEQ ID NO: 3034958 - DNA, 25 bp, Homo sapien
ttggaactctggtctaaagcctagg

SEQ ID NO: 3034959 - DNA, 25 bp, Homo sapien
tcaaggtggtcatactgagtaggca

SEQ ID NO: 3034960 - DNA, 25 bp, Homo sapien
aacacatcaatagcaccctgggagc

SEQ ID NO: 3034961 - DNA, 25 bp, Homo sapien
gccgggccccaatttacagtagaga

SEQ ID NO: 3034962 - DNA, 25 bp, Homo sapien
tccgtgacaaagttcactggctgct

SEQ ID NO: 3034963 - DNA, 25 bp, Homo sapien
tcaaagggcatggtctccgctgaac

SEQ ID NO: 3034964 - DNA, 25 bp, Homo sapien
gcttctgtaggagctctgggtcgaa

SEQ ID NO: 3034965 - DNA, 25 bp, Homo sapien
tcacagtcaaagtcgtcaaagggca

SEQ ID NO: 3034966 - DNA, 25 bp, Homo sapien
ggagctgtgcttgtgagttttcaga

SEQ ID NO: 3034967 - DNA, 25 bp, Homo sapien
gagtagatgatttgtaaaagaggga

SEQ ID NO: 3034968 - DNA, 25 bp, Homo sapien
tggagggtaggaataagaaccctga

SEQ ID NO: 3034969 - DNA, 25 bp, Homo sapien
gaagttcatggagctgtggagggta

SEQ ID NO: 3034970 - DNA, 25 bp, Homo sapien
gggtcacacttgccaacatggccac

SEQ ID NO: 3034971 - DNA, 25 bp, Homo sapien
gagtgagaggccctggttaagagaa

SEQ ID NO: 3034972 - DNA, 25 bp, Homo sapien
caggagtgagaggccctggttaaga

SEQ ID NO: 3034973 - DNA, 25 bp, Homo sapien
gtgagaggccctggttaagagaagc

SEQ ID NO: 3034974 - DNA, 25 bp, Homo sapien
taaggtcctccacttaggacctctg

SEQ ID NO: 3034975 - DNA, 25 bp, Homo sapien
tggttgtaaggtcctccacttagga

SEQ ID NO: 3034976 - DNA, 25 bp, Homo sapien
tgtaaggtcctccacttaggacctc

SEQ ID NO: 3034977 - DNA, 25 bp, Homo sapien
agcatggttgtaaggtcctccactt

SEQ ID NO: 3034978 - DNA, 25 bp, Homo sapien
ccatgtactgaagagtgccacagat

SEQ ID NO: 3034979 - DNA, 25 bp, Homo sapien
cacagatagtgtaggcttgagctcc

SEQ ID NO: 3034980 - DNA, 25 bp, Homo sapien
gcacgtggcgggacagaccaaagtc

SEQ ID NO: 3034981 - DNA, 25 bp, Homo sapien
cgggacagaccaaagtctgtcagtt

SEQ ID NO: 3034982 - DNA, 25 bp, Homo sapien
tcgttcatctagaagaatattctcc

SEQ ID NO: 3034983 - DNA, 25 bp, Homo sapien
cgttcatctagaagaatattctcca

SEQ ID NO: 3034984 - DNA, 25 bp, Homo sapien
ctcgttcatctagaagaatattctc

SEQ ID NO: 3034985 - DNA, 25 bp, Homo sapien
gttcatctagaagaatattctccat

SEQ ID NO: 3034986 - DNA, 25 bp, Homo sapien
tgcatgatgcccaagtcatggagat

SEQ ID NO: 3034987 - DNA, 25 bp, Homo sapien
cacatctcgatgcatgatgcccaag

SEQ ID NO: 3034988 - DNA, 25 bp, Homo sapien
atgatgcccaagtcatggagataac

SEQ ID NO: 3034989 - DNA, 25 bp, Homo sapien
tcgatgcatgatgcccaagtcatgg

SEQ ID NO: 3034990 - DNA, 25 bp, Homo sapien
tacagatctgtgctgcagtagctac

SEQ ID NO: 3034991 - DNA, 25 bp, Homo sapien
ctcggcagcaaagagacggatggaa

SEQ ID NO: 3034992 - DNA, 25 bp, Homo sapien
aacagccgaccaaagggagtacaga

SEQ ID NO: 3034993 - DNA, 25 bp, Homo sapien
agtaccagcaccaactcggcagcaa

SEQ ID NO: 3034994 - DNA, 25 bp, Homo sapien
caatgtttgggagctgcaatgcctg

SEQ ID NO: 3034995 - DNA, 25 bp, Homo sapien
agccaaagaggtaatctcaggtggg

SEQ ID NO: 3034996 - DNA, 25 bp, Homo sapien
cattgccagaagtctaggcaatgtt

SEQ ID NO: 3034997 - DNA, 25 bp, Homo sapien
cagtgtggagctacatacattgcca

SEQ ID NO: 3034998 - DNA, 25 bp, Homo sapien
gtgtacaaagggatggttgatctgt

SEQ ID NO: 3034999 - DNA, 25 bp, Homo sapien
cagctgtcccccaagctgtgtacaa

SEQ ID NO: 3035000 - DNA, 25 bp, Homo sapien
tgtcccccaagctgtgtacaaaggg

SEQ ID NO: 3035001 - DNA, 25 bp, Homo sapien
gtacaaagggatggttgatctgtcg

SEQ ID NO: 3035002 - DNA, 25 bp, Homo sapien
caatcctttccaggactctgtgcat

SEQ ID NO: 3035003 - DNA, 25 bp, Homo sapien
ccacaatcctttccaggactctgtg

SEQ ID NO: 3035004 - DNA, 25 bp, Homo sapien
acaatcctttccaggactctgtgca

SEQ ID NO: 3035005 - DNA, 25 bp, Homo sapien
atcctttccaggactctgtgcatac

SEQ ID NO: 3035006 - DNA, 25 bp, Homo sapien
actgcctcacggtatccctctgtag

SEQ ID NO: 3035007 - DNA, 25 bp, Homo sapien
tcctctttgcactgcctcacggtat

SEQ ID NO: 3035008 - DNA, 25 bp, Homo sapien
tgtaggacctttaccttgggcacca

SEQ ID NO: 3035009 - DNA, 25 bp, Homo sapien
tcacggtatccctctgtaggacctt

SEQ ID NO: 3035010 - DNA, 25 bp, Homo sapien
tttctgggtgcaatctagcaccttg

SEQ ID NO: 3035011 - DNA, 25 bp, Homo sapien
gctttctgggtgcaatctagcacct

SEQ ID NO: 3035012 - DNA, 25 bp, Homo sapien
ttccaaaggagcctttagccacgag

SEQ ID NO: 3035013 - DNA, 25 bp, Homo sapien
gagcctttagccacgaggcctaaaa

SEQ ID NO: 3035014 - DNA, 25 bp, Homo sapien
ccgtagttcccagagttcttccaga

SEQ ID NO: 3035015 - DNA, 25 bp, Homo sapien
ggctttagggattcctggtgcagat

SEQ ID NO: 3035016 - DNA, 25 bp, Homo sapien
cctaatgggcctaatgggaaactct

SEQ ID NO: 3035017 - DNA, 25 bp, Homo sapien
cagaggcttctctaccagtactggg

SEQ ID NO: 3035018 - DNA, 25 bp, Homo sapien
ggttccacccatcttactaggcact

SEQ ID NO: 3035019 - DNA, 25 bp, Homo sapien
aagggagccactctaaactttctgc

SEQ ID NO: 3035020 - DNA, 25 bp, Homo sapien
aagtctcaacccctagaggtacatt

SEQ ID NO: 3035021 - DNA, 25 bp, Homo sapien
tgaggcatagcaggttccacccatc

SEQ ID NO: 3035022 - DNA, 25 bp, Homo sapien
aggaacttcccaggactcaagccca

SEQ ID NO: 3035023 - DNA, 25 bp, Homo sapien
caggaacttcccaggactcaagccc

SEQ ID NO: 3035024 - DNA, 25 bp, Homo sapien
ggaacttcccaggactcaagcccat

SEQ ID NO: 3035025 - DNA, 25 bp, Homo sapien
cctgccgacagcttactgctcccat

SEQ ID NO: 3035026 - DNA, 25 bp, Homo sapien
cagccacccgggtgtgttccccctg

SEQ ID NO: 3035027 - DNA, 25 bp, Homo sapien
ccctgccgacagcttactgctccca

SEQ ID NO: 3035028 - DNA, 25 bp, Homo sapien
gcctctgcctcctctctctgctaaa

SEQ ID NO: 3035029 - DNA, 25 bp, Homo sapien
agcctctgcctcctctctctgctaa

SEQ ID NO: 3035030 - DNA, 25 bp, Homo sapien
cctctgcctcctctctctgctaaat

SEQ ID NO: 3035031 - DNA, 25 bp, Homo sapien
ctctgcctcctctctctgctaaatc

SEQ ID NO: 3035032 - DNA, 25 bp, Homo sapien
caaatcctcgtggataacgggaagc

SEQ ID NO: 3035033 - DNA, 25 bp, Homo sapien
gaccaggtgctgaagagtgatgcct

SEQ ID NO: 3035034 - DNA, 25 bp, Homo sapien
cattctccagggtatatcctacggg

SEQ ID NO: 3035035 - DNA, 25 bp, Homo sapien
caaacatgacagtggagtgaggatc

SEQ ID NO: 3035036 - DNA, 25 bp, Homo sapien
tcttgccagggttcttgtcgcccac

SEQ ID NO: 3035037 - DNA, 25 bp, Homo sapien
caaagatggacttcttgccagggtt

SEQ ID NO: 3035038 - DNA, 25 bp, Homo sapien
tcatttgcgcctgccaaagatggac

SEQ ID NO: 3035039 - DNA, 25 bp, Homo sapien
tgcgcctgccaaagatggacttctt

SEQ ID NO: 3035040 - DNA, 25 bp, Homo sapien
ttctagctttccccggacctcagag

SEQ ID NO: 3035041 - DNA, 25 bp, Homo sapien
tcagccttagcttctctttgattac

SEQ ID NO: 3035042 - DNA, 25 bp, Homo sapien
tgctgttgcatgttcaggtccgatt

SEQ ID NO: 3035043 - DNA, 25 bp, Homo sapien
caggtccgatttagtttctagcttt

SEQ ID NO: 3035044 - DNA, 25 bp, Homo sapien
gagagggtaggcatagaagccactc

SEQ ID NO: 3035045 - DNA, 25 bp, Homo sapien
aaaggctcctgaaaagaggatctgc

SEQ ID NO: 3035046 - DNA, 25 bp, Homo sapien
tcagttccctaaaatcaatggtgct

SEQ ID NO: 3035047 - DNA, 25 bp, Homo sapien
cattagccaaacagccatgagccct

SEQ ID NO: 3035048 - DNA, 25 bp, Homo sapien
agcaccaggttaaggtcaccccagt

SEQ ID NO: 3035049 - DNA, 25 bp, Homo sapien
tgtggtactccagacagggcagcac

SEQ ID NO: 3035050 - DNA, 25 bp, Homo sapien
caaccagggctttgcggctgtccct

SEQ ID NO: 3035051 - DNA, 25 bp, Homo sapien
tttgacagccatggcaaagtctagc

SEQ ID NO: 3035052 - DNA, 25 bp, Homo sapien
tacaatagtaacctacagatactga

SEQ ID NO: 3035053 - DNA, 25 bp, Homo sapien
cacttgagtgccaagtcctacaata

SEQ ID NO: 3035054 - DNA, 25 bp, Homo sapien
gctgccattttgagtcccagccagc

SEQ ID NO: 3035055 - DNA, 25 bp, Homo sapien
tacatcagctgccattttgagtccc

SEQ ID NO: 3035056 - DNA, 25 bp, Homo sapien
caaacaacctagctgtctccctgta

SEQ ID NO: 3035057 - DNA, 25 bp, Homo sapien
gcatcacaaacaacctagctgtctc

SEQ ID NO: 3035058 - DNA, 25 bp, Homo sapien
tcagcatcacaaacaacctagctgt

SEQ ID NO: 3035059 - DNA, 25 bp, Homo sapien
gctgtctccctgtatagaatctctg

SEQ ID NO: 3035060 - DNA, 25 bp, Homo sapien
tagatgaaggagttgttcatggcag

SEQ ID NO: 3035061 - DNA, 25 bp, Homo sapien
tatgtagatgaaggagttgttcatg

SEQ ID NO: 3035062 - DNA, 25 bp, Homo sapien
gttgttcatggcagctcgctctttc

SEQ ID NO: 3035063 - DNA, 25 bp, Homo sapien
tggcagctcgctctttcatcttgtc

SEQ ID NO: 3035064 - DNA, 25 bp, Homo sapien
cccatttttctatcatcaggggcat

SEQ ID NO: 3035065 - DNA, 25 bp, Homo sapien
ccatttttctatcatcaggggcatg

SEQ ID NO: 3035066 - DNA, 25 bp, Homo sapien
catttttctatcatcaggggcatgt

SEQ ID NO: 3035067 - DNA, 25 bp, Homo sapien
gaatggacttagaggaaaccgaaga

SEQ ID NO: 3035068 - DNA, 25 bp, Homo sapien
gcgaaatgaccttctgaccccagaa

SEQ ID NO: 3035069 - DNA, 25 bp, Homo sapien
cagggcccagtggtactgcatcatc

SEQ ID NO: 3035070 - DNA, 25 bp, Homo sapien
cagaactccgagtcaaaccctgtgc

SEQ ID NO: 3035071 - DNA, 25 bp, Homo sapien
ctctggcgatttgcgaaatgacctt

SEQ ID NO: 3035072 - DNA, 25 bp, Homo sapien
tcttccacacttcggccaggaaaga

SEQ ID NO: 3035073 - DNA, 25 bp, Homo sapien
aactggtgtgtcagctggatggtga

SEQ ID NO: 3035074 - DNA, 25 bp, Homo sapien
ttcatcatcttccacacttcggcca

SEQ ID NO: 3035075 - DNA, 25 bp, Homo sapien
tgtggaagaactggtgtgtcagctg

SEQ ID NO: 3035076 - DNA, 25 bp, Homo sapien
ctcaaaatgctccttaacagagata

SEQ ID NO: 3035077 - DNA, 25 bp, Homo sapien
gaggcggagagctagctgtcgccca

SEQ ID NO: 3035078 - DNA, 25 bp, Homo sapien
gggccgaactttgctgaagaggcgg

SEQ ID NO: 3035079 - DNA, 25 bp, Homo sapien
cttaacagagatacccccaacaggg

SEQ ID NO: 3035080 - DNA, 25 bp, Homo sapien
aggaggttgttcatggtaaaccagc

SEQ ID NO: 3035081 - DNA, 25 bp, Homo sapien
cttatagacagcattggggaggagg

SEQ ID NO: 3035082 - DNA, 25 bp, Homo sapien
ctgctgtgtcatcagacttattcac

SEQ ID NO: 3035083 - DNA, 25 bp, Homo sapien
tctgctgtgtcatcagacttattca

SEQ ID NO: 3035084 - DNA, 25 bp, Homo sapien
gtgcccggcctatcatatatgtttt

SEQ ID NO: 3035085 - DNA, 25 bp, Homo sapien
gcccggcctatcatatatgttttta

SEQ ID NO: 3035086 - DNA, 25 bp, Homo sapien
ccgtgcccggcctatcatatatgtt

SEQ ID NO: 3035087 - DNA, 25 bp, Homo sapien
tggtgtgatcacagctcactgcagg

SEQ ID NO: 3035088 - DNA, 25 bp, Homo sapien
gcctttgtgtgaccatataccccag

SEQ ID NO: 3035089 - DNA, 25 bp, Homo sapien
cctttgtgtgaccatataccccaga

SEQ ID NO: 3035090 - DNA, 25 bp, Homo sapien
gctgcctttgtgtgaccatataccc

SEQ ID NO: 3035091 - DNA, 25 bp, Homo sapien
ttgtgtgaccatataccccagatac

SEQ ID NO: 3035092 - DNA, 25 bp, Homo sapien
tcttgctgctttcgcagctccatct

SEQ ID NO: 3035093 - DNA, 25 bp, Homo sapien
tccatcttgttagcccgctgcagtt

SEQ ID NO: 3035094 - DNA, 25 bp, Homo sapien
gcagttctaattcagcaattcccag

SEQ ID NO: 3035095 - DNA, 25 bp, Homo sapien
aagtaaaactcagtgcgacggacca

SEQ ID NO: 3035096 - DNA, 25 bp, Homo sapien
gatgaggatattcagttcttcactt

SEQ ID NO: 3035097 - DNA, 25 bp, Homo sapien
ctgatgaggatattcagttcttcac

SEQ ID NO: 3035098 - DNA, 25 bp, Homo sapien
atgaggatattcagttcttcacttt

SEQ ID NO: 3035099 - DNA, 25 bp, Homo sapien
tgatgaggatattcagttcttcact

SEQ ID NO: 3035100 - DNA, 25 bp, Homo sapien
tggttcaggtcaagcagattctcat

SEQ ID NO: 3035101 - DNA, 25 bp, Homo sapien
cagctgtcgtatttgggccacatgc

SEQ ID NO: 3035102 - DNA, 25 bp, Homo sapien
gctgcgttgctcctctggattgcta

SEQ ID NO: 3035103 - DNA, 25 bp, Homo sapien
gctggaacctgacccgttgcttctt

SEQ ID NO: 3035104 - DNA, 25 bp, Homo sapien
tctggattgctagagatctcaagct

SEQ ID NO: 3035105 - DNA, 25 bp, Homo sapien
ccagctcatggtggataagggtgaa

SEQ ID NO: 3035106 - DNA, 25 bp, Homo sapien
aggttgttgacaatgtccaggatca

SEQ ID NO: 3035107 - DNA, 25 bp, Homo sapien
cttaggttctacatggagcagcagg

SEQ ID NO: 3035108 - DNA, 25 bp, Homo sapien
tgagctgggttggtggaaatttcca

SEQ ID NO: 3035109 - DNA, 25 bp, Homo sapien
agaacttcaggtggcttaatctgag

SEQ ID NO: 3035110 - DNA, 25 bp, Homo sapien
gctagttcaggatcaatgtcatggc

SEQ ID NO: 3035111 - DNA, 25 bp, Homo sapien
tgcaacgcgaaatgatccgctggac

SEQ ID NO: 3035112 - DNA, 25 bp, Homo sapien
tagtacattcggcagttgcaacgcg

SEQ ID NO: 3035113 - DNA, 25 bp, Homo sapien
tgccggtgctcctcgatattcttca

SEQ ID NO: 3035114 - DNA, 25 bp, Homo sapien
ctgtggttgtggtaaccatgccgcc

SEQ ID NO: 3035115 - DNA, 25 bp, Homo sapien
gttgtggtaaccatgccgcccactg

SEQ ID NO: 3035116 - DNA, 25 bp, Homo sapien
acagagtccagactacgctgccggt

SEQ ID NO: 3035117 - DNA, 25 bp, Homo sapien
tgcttcaatgtatcaccataccagg

SEQ ID NO: 3035118 - DNA, 25 bp, Homo sapien
gaggcaagtccaggatgtcttttgc

SEQ ID NO: 3035119 - DNA, 25 bp, Homo sapien
actgcatgccatccaagaggcaagt

SEQ ID NO: 3035120 - DNA, 25 bp, Homo sapien
tttggcagctgacacaatgacacag

SEQ ID NO: 3035121 - DNA, 25 bp, Homo sapien
tgtgaacactacaaacctatctgtc

SEQ ID NO: 3035122 - DNA, 25 bp, Homo sapien
gaccaattcaataaggcagtttcgg

SEQ ID NO: 3035123 - DNA, 25 bp, Homo sapien
ctggcaggcagcaatgccacacaac

SEQ ID NO: 3035124 - DNA, 25 bp, Homo sapien
gcagtttcggttgtatatgtcatcc

SEQ ID NO: 3035125 - DNA, 25 bp, Homo sapien
tcttctggccataggaccagaccat

SEQ ID NO: 3035126 - DNA, 25 bp, Homo sapien
actcatcttgttttggctccaacac

SEQ ID NO: 3035127 - DNA, 25 bp, Homo sapien
gatagaagcaccatgactcagtcct

SEQ ID NO: 3035128 - DNA, 25 bp, Homo sapien
gcccatatccatgttctaaacccaa

SEQ ID NO: 3035129 - DNA, 25 bp, Homo sapien
cactagttgggacaccccgctttgg

SEQ ID NO: 3035130 - DNA, 25 bp, Homo sapien
tatgaaaggtaggatccccatcacg

SEQ ID NO: 3035131 - DNA, 25 bp, Homo sapien
tcagggcctcagtagaaagattacg

SEQ ID NO: 3035132 - DNA, 25 bp, Homo sapien
gatcaatctttaaccccttcagggc

SEQ ID NO: 3035133 - DNA, 25 bp, Homo sapien
tgttaccaagggatcaagacagtga

SEQ ID NO: 3035134 - DNA, 25 bp, Homo sapien
tcagctgtgcgattgctatgccgtt

SEQ ID NO: 3035135 - DNA, 25 bp, Homo sapien
tgaggccatcaggtgaacggtcacc

SEQ ID NO: 3035136 - DNA, 25 bp, Homo sapien
caatcagagataaggcgccgcatca

SEQ ID NO: 3035137 - DNA, 25 bp, Homo sapien
gctgggcaaatgaggcccaataatg

SEQ ID NO: 3035138 - DNA, 25 bp, Homo sapien
gatgccccgttgctgggcaaatgag

SEQ ID NO: 3035139 - DNA, 25 bp, Homo sapien
cttgaggtataagccgctgagtccc

SEQ ID NO: 3035140 - DNA, 25 bp, Homo sapien
tgcactcaatctggatgccccgttg

SEQ ID NO: 3035141 - DNA, 25 bp, Homo sapien
gctttcccctgcagataggccttgt

SEQ ID NO: 3035142 - DNA, 25 bp, Homo sapien
gaagttttgcatccagcgcagggta

SEQ ID NO: 3035143 - DNA, 25 bp, Homo sapien
gctgggtttcaggttattgaagagc

SEQ ID NO: 3035144 - DNA, 25 bp, Homo sapien
ggaaagttgcttgtagtgctgacca

SEQ ID NO: 3035145 - DNA, 25 bp, Homo sapien
tgatggagagattgaggttctccga

SEQ ID NO: 3035146 - DNA, 25 bp, Homo sapien
ttgaggttctccgagcgaaaggccc

SEQ ID NO: 3035147 - DNA, 25 bp, Homo sapien
ggtaggagtcatgaagctggcccaa

SEQ ID NO: 3035148 - DNA, 25 bp, Homo sapien
cgaaaggcccggtaggagtcatgaa

SEQ ID NO: 3035149 - DNA, 25 bp, Homo sapien
gatcatgggggttcccatggcacag

SEQ ID NO: 3035150 - DNA, 25 bp, Homo sapien
ctatggtgatcatgggggttcccat

SEQ ID NO: 3035151 - DNA, 25 bp, Homo sapien
catgggggttcccatggcacagcca

SEQ ID NO: 3035152 - DNA, 25 bp, Homo sapien
tatggtgatcatgggggttcccatg

SEQ ID NO: 3035153 - DNA, 25 bp, Homo sapien
aggtccagtgtcatgcagaggtcag

SEQ ID NO: 3035154 - DNA, 25 bp, Homo sapien
caggtccagtgtcatgcagaggtca

SEQ ID NO: 3035155 - DNA, 25 bp, Homo sapien
gtccagtgtcatgcagaggtcaggc

SEQ ID NO: 3035156 - DNA, 25 bp, Homo sapien
tgcaggtccagtgtcatgcagaggt

SEQ ID NO: 3035157 - DNA, 25 bp, Homo sapien
cacgttgatatccaagtcacccttg

SEQ ID NO: 3035158 - DNA, 25 bp, Homo sapien
aggctgttctcacgttgatatccaa

SEQ ID NO: 3035159 - DNA, 25 bp, Homo sapien
tctcacgttgatatccaagtcaccc

SEQ ID NO: 3035160 - DNA, 25 bp, Homo sapien
tgttctcacgttgatatccaagtca

SEQ ID NO: 3035161 - DNA, 25 bp, Homo sapien
atgaaaagacaggtggctccactcc

SEQ ID NO: 3035162 - DNA, 25 bp, Homo sapien
cactcccagtgcatattttcagttg

SEQ ID NO: 3035163 - DNA, 25 bp, Homo sapien
tccactcccagtgcatattttcagt

SEQ ID NO: 3035164 - DNA, 25 bp, Homo sapien
ctccactcccagtgcatattttcag

SEQ ID NO: 3035165 - DNA, 25 bp, Homo sapien
catcctgataggataaaagtatcat

SEQ ID NO: 3035166 - DNA, 25 bp, Homo sapien
gataaaagtatcatgacacccctca

SEQ ID NO: 3035167 - DNA, 25 bp, Homo sapien
taggataaaagtatcatgacacccc

SEQ ID NO: 3035168 - DNA, 25 bp, Homo sapien
cctgataggataaaagtatcatgac

SEQ ID NO: 3035169 - DNA, 25 bp, Homo sapien
acagaagacggctcttgtcccacca

SEQ ID NO: 3035170 - DNA, 25 bp, Homo sapien
gcaggttcgcctgttcaatgtccat

SEQ ID NO: 3035171 - DNA, 25 bp, Homo sapien
cacactggccaattagtgtccaggc

SEQ ID NO: 3035172 - DNA, 25 bp, Homo sapien
tctccatggaacagaagacggctct

SEQ ID NO: 3035173 - DNA, 25 bp, Homo sapien
tagaggaacaaaggctataacttgt

SEQ ID NO: 3035174 - DNA, 25 bp, Homo sapien
tggggtagaggaacaaaggctataa

SEQ ID NO: 3035175 - DNA, 25 bp, Homo sapien
ttgttcacaacattacccctctctt

SEQ ID NO: 3035176 - DNA, 25 bp, Homo sapien
acaaaggctataacttgttcacaac

SEQ ID NO: 3035177 - DNA, 25 bp, Homo sapien
gaagccccaagtgcaagatctgacg

SEQ ID NO: 3035178 - DNA, 25 bp, Homo sapien
ggtgcccacaagtcgacccattagc

SEQ ID NO: 3035179 - DNA, 25 bp, Homo sapien
atctgacgccgacgggagcaaggct

SEQ ID NO: 3035180 - DNA, 25 bp, Homo sapien
cagtcacggatctcaaacaggtacc

SEQ ID NO: 3035181 - DNA, 25 bp, Homo sapien
tctggacagtatgcctgcagggaac

SEQ ID NO: 3035182 - DNA, 25 bp, Homo sapien
ttgccatagagacgacgggaacgct

SEQ ID NO: 3035183 - DNA, 25 bp, Homo sapien
cagtggctcttagtaggtctcggca

SEQ ID NO: 3035184 - DNA, 25 bp, Homo sapien
taaggaaactccaccgagactgagc

SEQ ID NO: 3035185 - DNA, 25 bp, Homo sapien
tcaccagcgctaacacaagtccttg

SEQ ID NO: 3035186 - DNA, 25 bp, Homo sapien
ccagagagcggatgctgctgtgata

SEQ ID NO: 3035187 - DNA, 25 bp, Homo sapien
gatagttagggtgtccagtcgtacc

SEQ ID NO: 3035188 - DNA, 25 bp, Homo sapien
aacagggttgcatcttctccgtgac

SEQ ID NO: 3035189 - DNA, 25 bp, Homo sapien
gctgacttcccagattgtggaccca

SEQ ID NO: 3035190 - DNA, 25 bp, Homo sapien
gatacgagacagacattgggcacag

SEQ ID NO: 3035191 - DNA, 25 bp, Homo sapien
gaaaaagggtatctgactgggtgct

SEQ ID NO: 3035192 - DNA, 25 bp, Homo sapien
gacccatcagggataagatacgaga

SEQ ID NO: 3035193 - DNA, 25 bp, Homo sapien
cccgctgaatgtgggagtcactgcc

SEQ ID NO: 3035194 - DNA, 25 bp, Homo sapien
ggtccacagttaggacgccccgctg

SEQ ID NO: 3035195 - DNA, 25 bp, Homo sapien
caaacatgcatattgggtgggtgtg

SEQ ID NO: 3035196 - DNA, 25 bp, Homo sapien
gaaggagtccagaacaagtgcctca

SEQ ID NO: 3035197 - DNA, 25 bp, Homo sapien
gagatagaattgaatcccaaggcaa

SEQ ID NO: 3035198 - DNA, 25 bp, Homo sapien
gagagatagaattgaatcccaaggc

SEQ ID NO: 3035199 - DNA, 25 bp, Homo sapien
agagagatagaattgaatcccaagg

SEQ ID NO: 3035200 - DNA, 25 bp, Homo sapien
gatagaattgaatcccaaggcaaaa

SEQ ID NO: 3035201 - DNA, 25 bp, Homo sapien
caggattgctgttgagactcggatt

SEQ ID NO: 3035202 - DNA, 25 bp, Homo sapien
actacactgagcaccgaggacataa

SEQ ID NO: 3035203 - DNA, 25 bp, Homo sapien
ttaacacaggatgccaatttggacc

SEQ ID NO: 3035204 - DNA, 25 bp, Homo sapien
gaatccaactgacaagaaggtggct

SEQ ID NO: 3035205 - DNA, 25 bp, Homo sapien
cctggtgccggtagtgaatgatgca

SEQ ID NO: 3035206 - DNA, 25 bp, Homo sapien
gaatgatgcaagtgttcagaactag

SEQ ID NO: 3035207 - DNA, 25 bp, Homo sapien
cctttgctttagaacaggtgaacta

SEQ ID NO: 3035208 - DNA, 25 bp, Homo sapien
tgggtttccagtgctagcaggtgca

SEQ ID NO: 3035209 - DNA, 25 bp, Homo sapien
agacaatgcgttggcgactctggga

SEQ ID NO: 3035210 - DNA, 25 bp, Homo sapien
cgactctgggacaacaacaacccat

SEQ ID NO: 3035211 - DNA, 25 bp, Homo sapien
gcacactagccttgagggagttgag

SEQ ID NO: 3035212 - DNA, 25 bp, Homo sapien
ttgaggcagacaatgcgttggcgac

SEQ ID NO: 3035213 - DNA, 25 bp, Homo sapien
ggcaaagggatcaacagactgtcat

SEQ ID NO: 3035214 - DNA, 25 bp, Homo sapien
aaagagagtatctagtcctcccatt

SEQ ID NO: 3035215 - DNA, 25 bp, Homo sapien
gactgtcatcaaaacttgtgagctg

SEQ ID NO: 3035216 - DNA, 25 bp, Homo sapien
attttctctcagtatgttccctcct

SEQ ID NO: 3035217 - DNA, 25 bp, Homo sapien
cagagtttgctgtgaagcttcgaag

SEQ ID NO: 3035218 - DNA, 25 bp, Homo sapien
cgaaggggcagctgatcctcatcac

SEQ ID NO: 3035219 - DNA, 25 bp, Homo sapien
tcatctgtgccatatcagagtttgc

SEQ ID NO: 3035220 - DNA, 25 bp, Homo sapien
gcagctgatcctcatcacggtggta

SEQ ID NO: 3035221 - DNA, 25 bp, Homo sapien
ttttcccacactacatggatgtaac

SEQ ID NO: 3035222 - DNA, 25 bp, Homo sapien
tcagcaaatactaggctggttacag

SEQ ID NO: 3035223 - DNA, 25 bp, Homo sapien
tggatgtaaccatttctacttcctt

SEQ ID NO: 3035224 - DNA, 25 bp, Homo sapien
agagataccaacatacagctcccac

SEQ ID NO: 3035225 - DNA, 25 bp, Homo sapien
aataccacgcttgtgttctccatct

SEQ ID NO: 3035226 - DNA, 25 bp, Homo sapien
tattcatggacaataccacgcttgt

SEQ ID NO: 3035227 - DNA, 25 bp, Homo sapien
gacaataccacgcttgtgttctcca

SEQ ID NO: 3035228 - DNA, 25 bp, Homo sapien
atggacaataccacgcttgtgttct

SEQ ID NO: 3035229 - DNA, 25 bp, Homo sapien
ggcagagttggctcaactaagtttt

SEQ ID NO: 3035230 - DNA, 25 bp, Homo sapien
cagagttggctcaactaagttttct

SEQ ID NO: 3035231 - DNA, 25 bp, Homo sapien
gagttggctcaactaagttttctgt

SEQ ID NO: 3035232 - DNA, 25 bp, Homo sapien
tggctcaactaagttttctgtcacc

SEQ ID NO: 3035233 - DNA, 25 bp, Homo sapien
gaacaggcttagatgctaggcttgg

SEQ ID NO: 3035234 - DNA, 25 bp, Homo sapien
tgaaagctccactaggcaggtgtcc

SEQ ID NO: 3035235 - DNA, 25 bp, Homo sapien
gtgagatgccgactgctaatgccca

SEQ ID NO: 3035236 - DNA, 25 bp, Homo sapien
atgcagttcagcatggagtgtccac

SEQ ID NO: 3035237 - DNA, 25 bp, Homo sapien
cctaggatgtaagccctaagctcct

SEQ ID NO: 3035238 - DNA, 25 bp, Homo sapien
cttcacactttacgcccaggaggaa

SEQ ID NO: 3035239 - DNA, 25 bp, Homo sapien
cactgggtactgacttgagggaacc

SEQ ID NO: 3035240 - DNA, 25 bp, Homo sapien
ccctaaggtcaaagaacctaggatg

SEQ ID NO: 3035241 - DNA, 25 bp, Homo sapien
gatcttacataagctcacctcacag

SEQ ID NO: 3035242 - DNA, 25 bp, Homo sapien
acataagctcacctcacagattagc

SEQ ID NO: 3035243 - DNA, 25 bp, Homo sapien
gctgttgatcttacataagctcacc

SEQ ID NO: 3035244 - DNA, 25 bp, Homo sapien
cttacataagctcacctcacagatt

SEQ ID NO: 3035245 - DNA, 25 bp, Homo sapien
gtttatagcatctacatgaatggag

SEQ ID NO: 3035246 - DNA, 25 bp, Homo sapien
ggtatccaccttgagaaccatgatg

SEQ ID NO: 3035247 - DNA, 25 bp, Homo sapien
gaaatctgcttctactgatctgaat

SEQ ID NO: 3035248 - DNA, 25 bp, Homo sapien
tgaatatgccataaggactcagagg

SEQ ID NO: 3035249 - DNA, 25 bp, Homo sapien
gaaggacagttccttttgatccacc

SEQ ID NO: 3035250 - DNA, 25 bp, Homo sapien
gatcttcaataaggatgggctgaag

SEQ ID NO: 3035251 - DNA, 25 bp, Homo sapien
tgggctgaaggacagttccttttga

SEQ ID NO: 3035252 - DNA, 25 bp, Homo sapien
agatcttcaataaggatgggctgaa

SEQ ID NO: 3035253 - DNA, 25 bp, Homo sapien
tctgtaggtccgttctgatacgcac

SEQ ID NO: 3035254 - DNA, 25 bp, Homo sapien
tccaaagcacaatgccacatagtgt

SEQ ID NO: 3035255 - DNA, 25 bp, Homo sapien
gttctgatacgcacttctccaaagc

SEQ ID NO: 3035256 - DNA, 25 bp, Homo sapien
gaatggggcagacaggtcagaaact

SEQ ID NO: 3035257 - DNA, 25 bp, Homo sapien
gtccatccctcccatagcagtctat

SEQ ID NO: 3035258 - DNA, 25 bp, Homo sapien
atagcagtctattccccaccctcac

SEQ ID NO: 3035259 - DNA, 25 bp, Homo sapien
tcccatagcagtctattccccaccc

SEQ ID NO: 3035260 - DNA, 25 bp, Homo sapien
ccaggtccatccctcccatagcagt

SEQ ID NO: 3035261 - DNA, 25 bp, Homo sapien
aaatatagctcaaatcacagagatt

SEQ ID NO: 3035262 - DNA, 25 bp, Homo sapien
cacagagattagtttcatagcagtt

SEQ ID NO: 3035263 - DNA, 25 bp, Homo sapien
catagcagttatcaatatcttcctc

SEQ ID NO: 3035264 - DNA, 25 bp, Homo sapien
ttcctccttggattgtgatgcctct

SEQ ID NO: 3035265 - DNA, 25 bp, Homo sapien
agaagtgagaatatagggtactcac

SEQ ID NO: 3035266 - DNA, 25 bp, Homo sapien
aggggagaagtgagaatatagggta

SEQ ID NO: 3035267 - DNA, 25 bp, Homo sapien
ggagaagtgagaatatagggtactc

SEQ ID NO: 3035268 - DNA, 25 bp, Homo sapien
gggagaagtgagaatatagggtact

SEQ ID NO: 3035269 - DNA, 25 bp, Homo sapien
ggaagatcatggctaaggagtttgc

SEQ ID NO: 3035270 - DNA, 25 bp, Homo sapien
agatcatggctaaggagtttgctgg

SEQ ID NO: 3035271 - DNA, 25 bp, Homo sapien
tcatggctaaggagtttgctggaaa

SEQ ID NO: 3035272 - DNA, 25 bp, Homo sapien
gaagatcatggctaaggagtttgct

SEQ ID NO: 3035273 - DNA, 25 bp, Homo sapien
tgaaacttaagactgacattctgga

SEQ ID NO: 3035274 - DNA, 25 bp, Homo sapien
cggaaggagccaatctttagctccg

SEQ ID NO: 3035275 - DNA, 25 bp, Homo sapien
agcttccgctgacaccacttggtgg

SEQ ID NO: 3035276 - DNA, 25 bp, Homo sapien
acttggtggccaaccggaccacaag

SEQ ID NO: 3035277 - DNA, 25 bp, Homo sapien
ccggcagctcgaatgctgttctccc

SEQ ID NO: 3035278 - DNA, 25 bp, Homo sapien
aatgctgttctccccagaccgatgc

SEQ ID NO: 3035279 - DNA, 25 bp, Homo sapien
ctgttctccccagaccgatgctgca

SEQ ID NO: 3035280 - DNA, 25 bp, Homo sapien
tgctgttctccccagaccgatgctg

SEQ ID NO: 3035281 - DNA, 25 bp, Homo sapien
ctaagcgcaactagcagcaagacca

SEQ ID NO: 3035282 - DNA, 25 bp, Homo sapien
cggcctagaaagagggcgctaagcg

SEQ ID NO: 3035283 - DNA, 25 bp, Homo sapien
gaaagagggcgctaagcgcaactag

SEQ ID NO: 3035284 - DNA, 25 bp, Homo sapien
cagcaagaccaacagcgcggagaag

SEQ ID NO: 3035285 - DNA, 25 bp, Homo sapien
cgacgccggatccgcgcagcaccgc

SEQ ID NO: 3035286 - DNA, 25 bp, Homo sapien
acgccggatccgcgcagcaccgccg

SEQ ID NO: 3035287 - DNA, 25 bp, Homo sapien
gccggatccgcgcagcaccgccgcg

SEQ ID NO: 3035288 - DNA, 25 bp, Homo sapien
ccgacgccggatccgcgcagcaccg

SEQ ID NO: 3035289 - DNA, 25 bp, Homo sapien
tgtatttgcgtcatcttcctcgtca

SEQ ID NO: 3035290 - DNA, 25 bp, Homo sapien
aagcactgtatttgcgtcatcttcc

SEQ ID NO: 3035291 - DNA, 25 bp, Homo sapien
tcccccagggtatgtcctccgaatg

SEQ ID NO: 3035292 - DNA, 25 bp, Homo sapien
ccccagggtatgtcctccgaatgct

SEQ ID NO: 3035293 - DNA, 25 bp, Homo sapien
ctctgagagtttttagctataatta

SEQ ID NO: 3035294 - DNA, 25 bp, Homo sapien
tctctgagagtttttagctataatt

SEQ ID NO: 3035295 - DNA, 25 bp, Homo sapien
ttctctgagagtttttagctataat

SEQ ID NO: 3035296 - DNA, 25 bp, Homo sapien
tctgagagtttttagctataattag

SEQ ID NO: 3035297 - DNA, 25 bp, Homo sapien
caaagatctattaaagatgagatgc

SEQ ID NO: 3035298 - DNA, 25 bp, Homo sapien
tcaaagatctattaaagatgagatg

SEQ ID NO: 3035299 - DNA, 25 bp, Homo sapien
tgactagttcaaatgtgcagggctg

SEQ ID NO: 3035300 - DNA, 25 bp, Homo sapien
ggcccacattggagcttcatagcgt

SEQ ID NO: 3035301 - DNA, 25 bp, Homo sapien
aaagaactgacccacgcaagtctgg

SEQ ID NO: 3035302 - DNA, 25 bp, Homo sapien
cattgtgcgttaacagtggctcaga

SEQ ID NO: 3035303 - DNA, 25 bp, Homo sapien
tgggcttctgccttcaacaactcac

SEQ ID NO: 3035304 - DNA, 25 bp, Homo sapien
tcacagctctgcatggtgggcttct

SEQ ID NO: 3035305 - DNA, 25 bp, Homo sapien
cagctctgcatggtgggcttctgcc

SEQ ID NO: 3035306 - DNA, 25 bp, Homo sapien
tggtgggcttctgccttcaacaact

SEQ ID NO: 3035307 - DNA, 25 bp, Homo sapien
tgcccactgataggtcgaccatatt

SEQ ID NO: 3035308 - DNA, 25 bp, Homo sapien
ctgataggtcgaccatattgttctc

SEQ ID NO: 3035309 - DNA, 25 bp, Homo sapien
gggccatgccatgcacctctttttg

SEQ ID NO: 3035310 - DNA, 25 bp, Homo sapien
ttggctgggccatgccatgcacctc

SEQ ID NO: 3035311 - DNA, 25 bp, Homo sapien
gaagagtgtttgaaccgcacctcac

SEQ ID NO: 3035312 - DNA, 25 bp, Homo sapien
acctcagtggaagagtgtttgaacc

SEQ ID NO: 3035313 - DNA, 25 bp, Homo sapien
tgtgacagacagcagtacctcagtg

SEQ ID NO: 3035314 - DNA, 25 bp, Homo sapien
cagcagtacctcagtggaagagtgt

SEQ ID NO: 3035315 - DNA, 25 bp, Homo sapien
tccattacagagcactgtccagtca

SEQ ID NO: 3035316 - DNA, 25 bp, Homo sapien
acccagtagggtccattacagagca

SEQ ID NO: 3035317 - DNA, 25 bp, Homo sapien
gagcactgtccagtcatccagataa

SEQ ID NO: 3035318 - DNA, 25 bp, Homo sapien
gtcatccagataatcaccttcacct

SEQ ID NO: 3035319 - DNA, 25 bp, Homo sapien
gaaggtagtaacatcagcatggctg

SEQ ID NO: 3035320 - DNA, 25 bp, Homo sapien
ctgacaagggcttgaaaaggggtgg

SEQ ID NO: 3035321 - DNA, 25 bp, Homo sapien
catggctgacaagggcttgaaaagg

SEQ ID NO: 3035322 - DNA, 25 bp, Homo sapien
tgaagtaaaaaatcagaggggccag

SEQ ID NO: 3035323 - DNA, 25 bp, Homo sapien
tcttctgtaaatcctttgagccttt

SEQ ID NO: 3035324 - DNA, 25 bp, Homo sapien
gaatctcaacttgatcccttcttct

SEQ ID NO: 3035325 - DNA, 25 bp, Homo sapien
tctgtaaatcctttgagcctttgtt

SEQ ID NO: 3035326 - DNA, 25 bp, Homo sapien
cttgaatctcaacttgatcccttct

SEQ ID NO: 3035327 - DNA, 25 bp, Homo sapien
taaaatgatcacaatatcaccttac

SEQ ID NO: 3035328 - DNA, 25 bp, Homo sapien
ctatggaggtttcggccagtgttga

SEQ ID NO: 3035329 - DNA, 25 bp, Homo sapien
cacagaggttacacctgtcactgac

SEQ ID NO: 3035330 - DNA, 25 bp, Homo sapien
gctgtcatccacagaggttacacct

SEQ ID NO: 3035331 - DNA, 25 bp, Homo sapien
aagtggtgactatggaggtttcggc

SEQ ID NO: 3035332 - DNA, 25 bp, Homo sapien
tgctctacaagagactgaagaccgc

SEQ ID NO: 3035333 - DNA, 25 bp, Homo sapien
tgtgtcacagtgaagggctacagca

SEQ ID NO: 3035334 - DNA, 25 bp, Homo sapien
gaatttcaggccaaggatgtgactg

SEQ ID NO: 3035335 - DNA, 25 bp, Homo sapien
ccatgaccaaggaagacacgctgct

SEQ ID NO: 3035336 - DNA, 25 bp, Homo sapien
gaagactgcacagcggccaggcaga

SEQ ID NO: 3035337 - DNA, 25 bp, Homo sapien
gggtacacctgcagaaaggctgtca

SEQ ID NO: 3035338 - DNA, 25 bp, Homo sapien
cacttcacacttggaagactgcaca

SEQ ID NO: 3035339 - DNA, 25 bp, Homo sapien
acttggaagactgcacagcggccag

SEQ ID NO: 3035340 - DNA, 25 bp, Homo sapien
tcactagctgaccttcattcttttt

SEQ ID NO: 3035341 - DNA, 25 bp, Homo sapien
caccgaatctcctgtatgtagtaca

SEQ ID NO: 3035342 - DNA, 25 bp, Homo sapien
tcttgactgattatcaccaccgaat

SEQ ID NO: 3035343 - DNA, 25 bp, Homo sapien
catgtagtaggaactcattaagacc

SEQ ID NO: 3035344 - DNA, 25 bp, Homo sapien
ggaaactgaggagcaagtgtaagat

SEQ ID NO: 3035345 - DNA, 25 bp, Homo sapien
gaagggggccaaagatggaaactga

SEQ ID NO: 3035346 - DNA, 25 bp, Homo sapien
agaagggggccaaagatggaaactg

SEQ ID NO: 3035347 - DNA, 25 bp, Homo sapien
gatggaaactgaggagcaagtgtaa

SEQ ID NO: 3035348 - DNA, 25 bp, Homo sapien
tggcctgtagctcaccaaatattag

SEQ ID NO: 3035349 - DNA, 25 bp, Homo sapien
tgtcagatattctataggccccgcc

SEQ ID NO: 3035350 - DNA, 25 bp, Homo sapien
tggtgttgcgattaagatgccttag

SEQ ID NO: 3035351 - DNA, 25 bp, Homo sapien
gttctccgactctctagacctgagg

SEQ ID NO: 3035352 - DNA, 25 bp, Homo sapien
tgacccatagcgcacgtcgtgtgag

SEQ ID NO: 3035353 - DNA, 25 bp, Homo sapien
cgttgtggcgcgtattgagtagctt

SEQ ID NO: 3035354 - DNA, 25 bp, Homo sapien
aacaacagcagaggtactacagcca

SEQ ID NO: 3035355 - DNA, 25 bp, Homo sapien
cttcaccacggagccgcaagtaacg

SEQ ID NO: 3035356 - DNA, 25 bp, Homo sapien
gcggagccccaaatcttcgaagaaa

SEQ ID NO: 3035357 - DNA, 25 bp, Homo sapien
tatggtttatttgactagagcggcc

SEQ ID NO: 3035358 - DNA, 25 bp, Homo sapien
gaaccggaagctaatggcgaaacca

SEQ ID NO: 3035359 - DNA, 25 bp, Homo sapien
gaaggaagtgaagaagcccgagtct

SEQ ID NO: 3035360 - DNA, 25 bp, Homo sapien
cttcctgagccgcttcggttacctt

SEQ ID NO: 3035361 - DNA, 25 bp, Homo sapien
ttacctttcgcacccacgagacgaa

SEQ ID NO: 3035362 - DNA, 25 bp, Homo sapien
ttccgagagcgggagagagaacaag

SEQ ID NO: 3035363 - DNA, 25 bp, Homo sapien
gatactctcgctctgttccaggggc

SEQ ID NO: 3035364 - DNA, 25 bp, Homo sapien
tgacgtagcacgttgacgcagcagc

SEQ ID NO: 3035365 - DNA, 25 bp, Homo sapien
acagggagccggaaatgacgtagca

SEQ ID NO: 3035366 - DNA, 25 bp, Homo sapien
gccggaaatgacgtagcacgttgac

SEQ ID NO: 3035367 - DNA, 25 bp, Homo sapien
aaatgacgtagcacgttgacgcagc

SEQ ID NO: 3035368 - DNA, 25 bp, Homo sapien
aatcgggtggcacgttgaatcaaca

SEQ ID NO: 3035369 - DNA, 25 bp, Homo sapien
aaagcgctgtagttgctcagagtcc

SEQ ID NO: 3035370 - DNA, 25 bp, Homo sapien
aactgggccacgcaaaaggattggg

SEQ ID NO: 3035371 - DNA, 25 bp, Homo sapien
tcctagggcctggtcacgtaaggga

SEQ ID NO: 3035372 - DNA, 25 bp, Homo sapien
cgagcgtctgacctgacctgaagtg

SEQ ID NO: 3035373 - DNA, 25 bp, Homo sapien
aacatcttgacttcatgtaattagg

SEQ ID NO: 3035374 - DNA, 25 bp, Homo sapien
gcgcccagccgaataaataatattt

SEQ ID NO: 3035375 - DNA, 25 bp, Homo sapien
atattcacttatggatacctttgga

SEQ ID NO: 3035376 - DNA, 25 bp, Homo sapien
tattgctaacctaggcgatgggaag

SEQ ID NO: 3035377 - DNA, 25 bp, Homo sapien
gagggcctcccttgtggcaatctga

SEQ ID NO: 3035378 - DNA, 25 bp, Homo sapien
tgagctagattggaggcattcccca

SEQ ID NO: 3035379 - DNA, 25 bp, Homo sapien
gggctgccgtactcaaatctgtttt

SEQ ID NO: 3035380 - DNA, 25 bp, Homo sapien
tatgctcctgagagaacagagggac

SEQ ID NO: 3035381 - DNA, 25 bp, Homo sapien
tagatgtggtactgtcaaccatgaa

SEQ ID NO: 3035382 - DNA, 25 bp, Homo sapien
tggaccacgccctgaaaactattga

SEQ ID NO: 3035383 - DNA, 25 bp, Homo sapien
gaagtgtgctgtaactcataggaca

SEQ ID NO: 3035384 - DNA, 25 bp, Homo sapien
tgaaaatgaacaatccggccaggcg

SEQ ID NO: 3035385 - DNA, 25 bp, Homo sapien
ccaagagagacccatattattttga

SEQ ID NO: 3035386 - DNA, 25 bp, Homo sapien
tttctatctctaggagacattcaac

SEQ ID NO: 3035387 - DNA, 25 bp, Homo sapien
tgtgtctattgtaatatataaaacg

SEQ ID NO: 3035388 - DNA, 25 bp, Homo sapien
tgaaagtacgtatgaggccgggtgc

SEQ ID NO: 3035389 - DNA, 25 bp, Homo sapien
caacgtgttgaaaccacatctcttc

SEQ ID NO: 3035390 - DNA, 25 bp, Homo sapien
ttctttttgaaagtacgtatgaggc

SEQ ID NO: 3035391 - DNA, 25 bp, Homo sapien
ctttttgaaagtacgtatgaggccg

SEQ ID NO: 3035392 - DNA, 25 bp, Homo sapien
cctgggtgagagagtgagacgccac

SEQ ID NO: 3035393 - DNA, 25 bp, Homo sapien
ctgattttgtggaaagcgaggctga

SEQ ID NO: 3035394 - DNA, 25 bp, Homo sapien
taagagccctctgtacaatcatgtg

SEQ ID NO: 3035395 - DNA, 25 bp, Homo sapien
cagtggcaggttgctaaaaggctgt

SEQ ID NO: 3035396 - DNA, 25 bp, Homo sapien
tttctttccctagttatcttcaggc

SEQ ID NO: 3035397 - DNA, 25 bp, Homo sapien
aaaagaaacttcttatggtcgctgg

SEQ ID NO: 3035398 - DNA, 25 bp, Homo sapien
cttagaaacttcttatggtcggccg

SEQ ID NO: 3035399 - DNA, 25 bp, Homo sapien
tggtcgctgggtcaaaacaaaatgg

SEQ ID NO: 3035400 - DNA, 25 bp, Homo sapien
tgacttagaaacttcttatggtcgg

SEQ ID NO: 3035401 - DNA, 25 bp, Homo sapien
tctctttggtggtcaacccggatgg

SEQ ID NO: 3035402 - DNA, 25 bp, Homo sapien
caacagccgggtggctgtccaagca

SEQ ID NO: 3035403 - DNA, 25 bp, Homo sapien
gaaagtatttctgaccctgatgcca

SEQ ID NO: 3035404 - DNA, 25 bp, Homo sapien
tatgctaggcaacaattctcccgct

SEQ ID NO: 3035405 - DNA, 25 bp, Homo sapien
atttcacacagaccagtctctcgca

SEQ ID NO: 3035406 - DNA, 25 bp, Homo sapien
tgggggtatcgctgcagacagtact

SEQ ID NO: 3035407 - DNA, 25 bp, Homo sapien
cagaccagtctctcgcagcagagag

SEQ ID NO: 3035408 - DNA, 25 bp, Homo sapien
ttattgggggtatcgctgcagacag

SEQ ID NO: 3035409 - DNA, 25 bp, Homo sapien
ctagcaggtaggaagaaatagggct

SEQ ID NO: 3035410 - DNA, 25 bp, Homo sapien
tgggcttcctttgtgaaagctggat

SEQ ID NO: 3035411 - DNA, 25 bp, Homo sapien
gtaggaagaaatagggctgtgcccc

SEQ ID NO: 3035412 - DNA, 25 bp, Homo sapien
gctggattgcctttgagaaacccct

SEQ ID NO: 3035413 - DNA, 25 bp, Homo sapien
catttattctgcaccctgaccaccc

SEQ ID NO: 3035414 - DNA, 25 bp, Homo sapien
atttattctgcaccctgaccaccct

SEQ ID NO: 3035415 - DNA, 25 bp, Homo sapien
actgaggttggggtttgatcctggg

SEQ ID NO: 3035416 - DNA, 25 bp, Homo sapien
tcaactgaggttggggtttgatcct

SEQ ID NO: 3035417 - DNA, 25 bp, Homo sapien
gtttgatcctgggggagattttctc

SEQ ID NO: 3035418 - DNA, 25 bp, Homo sapien
tgatcctgggggagattttctcttg

SEQ ID NO: 3035419 - DNA, 25 bp, Homo sapien
tttctgggctggactcggacatcct

SEQ ID NO: 3035420 - DNA, 25 bp, Homo sapien
tcctggcttgtgagggctttgcccc

SEQ ID NO: 3035421 - DNA, 25 bp, Homo sapien
ttaatgatcggctcacgtctggcgg

SEQ ID NO: 3035422 - DNA, 25 bp, Homo sapien
gatgattccacaatatcctcgctgg

SEQ ID NO: 3035423 - DNA, 25 bp, Homo sapien
cttttttcttcagctttgccttctc

SEQ ID NO: 3035424 - DNA, 25 bp, Homo sapien
ttttcttctttaccttcttgatcac

SEQ ID NO: 3035425 - DNA, 25 bp, Homo sapien
ttcagctttgccttctcatccatct

SEQ ID NO: 3035426 - DNA, 25 bp, Homo sapien
tttttcttcagctttgccttctcat

SEQ ID NO: 3035427 - DNA, 25 bp, Homo sapien
ggtaccagtggccatgctggtgcct

SEQ ID NO: 3035428 - DNA, 25 bp, Homo sapien
tggtgatgggcgctgtggagtcagg

SEQ ID NO: 3035429 - DNA, 25 bp, Homo sapien
taccagtggccatgctggtgcctag

SEQ ID NO: 3035430 - DNA, 25 bp, Homo sapien
ccctgtggggctctcagagcgccag

SEQ ID NO: 3035431 - DNA, 25 bp, Homo sapien
gagtggatggtggatcactgccaca

SEQ ID NO: 3035432 - DNA, 25 bp, Homo sapien
cagagacaggtctgtagcttttgca

SEQ ID NO: 3035433 - DNA, 25 bp, Homo sapien
ctcatggtagagtggatggtggatc

SEQ ID NO: 3035434 - DNA, 25 bp, Homo sapien
tcttcatttagatcatctgccccac

SEQ ID NO: 3035435 - DNA, 25 bp, Homo sapien
gacaacgggggaagtttgacagaga

SEQ ID NO: 3035436 - DNA, 25 bp, Homo sapien
gacagagagtggggggcagtgccct

SEQ ID NO: 3035437 - DNA, 25 bp, Homo sapien
cgggggaagtttgacagagagtggg

SEQ ID NO: 3035438 - DNA, 25 bp, Homo sapien
tgacagagagtggggggcagtgccc

SEQ ID NO: 3035439 - DNA, 25 bp, Homo sapien
tcaaagcaaggggactcgatgacat

SEQ ID NO: 3035440 - DNA, 25 bp, Homo sapien
agccataccggaatcgctccacatg

SEQ ID NO: 3035441 - DNA, 25 bp, Homo sapien
tcctccggtgtgagctcaaagcaag

SEQ ID NO: 3035442 - DNA, 25 bp, Homo sapien
acatgggagcaggttgggcccgcgc

SEQ ID NO: 3035443 - DNA, 25 bp, Homo sapien
acacatgggactctcagcctggctc

SEQ ID NO: 3035444 - DNA, 25 bp, Homo sapien
cacacatgggactctcagcctggct

SEQ ID NO: 3035445 - DNA, 25 bp, Homo sapien
gccacacatgggactctcagcctgg

SEQ ID NO: 3035446 - DNA, 25 bp, Homo sapien
tcagcctggctcccatcactccccc

SEQ ID NO: 3035447 - DNA, 25 bp, Homo sapien
ccccatttctcttagagcagagcaa

SEQ ID NO: 3035448 - DNA, 25 bp, Homo sapien
aattacagttgcagtggttgacaga

SEQ ID NO: 3035449 - DNA, 25 bp, Homo sapien
gttgacagagtgtaggtgcaggctg

SEQ ID NO: 3035450 - DNA, 25 bp, Homo sapien
tgtggcggacacagtcagaggcgaa

SEQ ID NO: 3035451 - DNA, 25 bp, Homo sapien
gatgatgtgcccagtgcactgcttg

SEQ ID NO: 3035452 - DNA, 25 bp, Homo sapien
taacttggccgcagagtaaccccat

SEQ ID NO: 3035453 - DNA, 25 bp, Homo sapien
tcactcacacgacaaaggacaaggg

SEQ ID NO: 3035454 - DNA, 25 bp, Homo sapien
tgggtcatcagtagcagccgcagac

SEQ ID NO: 3035455 - DNA, 25 bp, Homo sapien
aaccaggtgctgacaatgagtggca

SEQ ID NO: 3035456 - DNA, 25 bp, Homo sapien
gctgggttaccctcaaacaggccga

SEQ ID NO: 3035457 - DNA, 25 bp, Homo sapien
tgaggatcccctgggtcaaaggtct

SEQ ID NO: 3035458 - DNA, 25 bp, Homo sapien
tagtcaggcctaagcccaagtcgtg

SEQ ID NO: 3035459 - DNA, 25 bp, Homo sapien
ttccaccaggtgtcagctttcccag

SEQ ID NO: 3035460 - DNA, 25 bp, Homo sapien
cagagaaggtagacacatcagtgct

SEQ ID NO: 3035461 - DNA, 25 bp, Homo sapien
acatcagtgctggacgccacaccag

SEQ ID NO: 3035462 - DNA, 25 bp, Homo sapien
agagaaggtagacacatcagtgctg

SEQ ID NO: 3035463 - DNA, 25 bp, Homo sapien
acacatcagtgctggacgccacacc

SEQ ID NO: 3035464 - DNA, 25 bp, Homo sapien
ttagtgatgaataggagccagccag

SEQ ID NO: 3035465 - DNA, 25 bp, Homo sapien
cccttgaggcactggacttgaggtc

SEQ ID NO: 3035466 - DNA, 25 bp, Homo sapien
gagcctggacagaggatgaccctaa

SEQ ID NO: 3035467 - DNA, 25 bp, Homo sapien
ggacacgggaggttcatgacagtaa

SEQ ID NO: 3035468 - DNA, 25 bp, Homo sapien
cccgtgaggcgttaatcggcgcaca

SEQ ID NO: 3035469 - DNA, 25 bp, Homo sapien
taatcggcgcacaaaggcctaactc

SEQ ID NO: 3035470 - DNA, 25 bp, Homo sapien
acacaatgaatgaggagggtgatag

SEQ ID NO: 3035471 - DNA, 25 bp, Homo sapien
aagtgggaggcttatggcgtctttc

SEQ ID NO: 3035472 - DNA, 25 bp, Homo sapien
aagttatgctcatctgtacagaatc

SEQ ID NO: 3035473 - DNA, 25 bp, Homo sapien
ttatgctcatctgtacagaatcctc

SEQ ID NO: 3035474 - DNA, 25 bp, Homo sapien
gttatgctcatctgtacagaatcct

SEQ ID NO: 3035475 - DNA, 25 bp, Homo sapien
gtacagaatcctccccgtcctgcgg

SEQ ID NO: 3035476 - DNA, 25 bp, Homo sapien
ctttcaattgtgagcgtcgtcctga

SEQ ID NO: 3035477 - DNA, 25 bp, Homo sapien
ttgtgagcgtcgtcctgacccacat

SEQ ID NO: 3035478 - DNA, 25 bp, Homo sapien
tctcatcccacgagcgggccttggg

SEQ ID NO: 3035479 - DNA, 25 bp, Homo sapien
gtccatctttcaattgtgagcgtcg

SEQ ID NO: 3035480 - DNA, 25 bp, Homo sapien
ccaggtcttcgtctctacaggactc

SEQ ID NO: 3035481 - DNA, 25 bp, Homo sapien
gccgtgaactccagtctcggcttcg

SEQ ID NO: 3035482 - DNA, 25 bp, Homo sapien
gagccctcggcccagccgtgaactc

SEQ ID NO: 3035483 - DNA, 25 bp, Homo sapien
actcttgcgtgaagtccaaccctga

SEQ ID NO: 3035484 - DNA, 25 bp, Homo sapien
gactgtggtgctggcttcacacaca

SEQ ID NO: 3035485 - DNA, 25 bp, Homo sapien
tggactgtggtgctggcttcacaca

SEQ ID NO: 3035486 - DNA, 25 bp, Homo sapien
ctggactgtggtgctggcttcacac

SEQ ID NO: 3035487 - DNA, 25 bp, Homo sapien
actgtggtgctggcttcacacacat

SEQ ID NO: 3035488 - DNA, 25 bp, Homo sapien
caaggcaagggtgaggagcccagtg

SEQ ID NO: 3035489 - DNA, 25 bp, Homo sapien
ctgttaacaggcaaggcaagggtga

SEQ ID NO: 3035490 - DNA, 25 bp, Homo sapien
ggcaaggcaagggtgaggagcccag

SEQ ID NO: 3035491 - DNA, 25 bp, Homo sapien
caggcaaggcaagggtgaggagccc

SEQ ID NO: 3035492 - DNA, 25 bp, Homo sapien
tccagacccaagtccggagtgggta

SEQ ID NO: 3035493 - DNA, 25 bp, Homo sapien
caagtccggagtgggtagggctgct

SEQ ID NO: 3035494 - DNA, 25 bp, Homo sapien
cgtggtagctctagagagtctagga

SEQ ID NO: 3035495 - DNA, 25 bp, Homo sapien
cctccttcccgtggtagctctagag

SEQ ID NO: 3035496 - DNA, 25 bp, Homo sapien
gaaattttaatgcataaggcacagt

SEQ ID NO: 3035497 - DNA, 25 bp, Homo sapien
catccagtctttggcacggtgcctg

SEQ ID NO: 3035498 - DNA, 25 bp, Homo sapien
ggaatactgccaccaagaggcagct

SEQ ID NO: 3035499 - DNA, 25 bp, Homo sapien
ggtctggataaagtcagtgcaaatg

SEQ ID NO: 3035500 - DNA, 25 bp, Homo sapien
ggaagtgactagcatgatcccagct

SEQ ID NO: 3035501 - DNA, 25 bp, Homo sapien
gagggtggcacagtgccctagggct

SEQ ID NO: 3035502 - DNA, 25 bp, Homo sapien
cacagtgccctagggctgggcagtc

SEQ ID NO: 3035503 - DNA, 25 bp, Homo sapien
tggcacagtgccctagggctgggca

SEQ ID NO: 3035504 - DNA, 25 bp, Homo sapien
gggtggcacagtgccctagggctgg

SEQ ID NO: 3035505 - DNA, 25 bp, Homo sapien
cttgctggcagttaggtagaggttg

SEQ ID NO: 3035506 - DNA, 25 bp, Homo sapien
atgggcaacatgtgggcttcttctt

SEQ ID NO: 3035507 - DNA, 25 bp, Homo sapien
tgctggcagttaggtagaggttgct

SEQ ID NO: 3035508 - DNA, 25 bp, Homo sapien
tcatgggcaacatgtgggcttcttc

SEQ ID NO: 3035509 - DNA, 25 bp, Homo sapien
agggattggaggctcactgtgccct

SEQ ID NO: 3035510 - DNA, 25 bp, Homo sapien
aaatatgtgaagcagggattggagg

SEQ ID NO: 3035511 - DNA, 25 bp, Homo sapien
ctaaagaagggtggaaaatatgtga

SEQ ID NO: 3035512 - DNA, 25 bp, Homo sapien
tctgccaccctcaaccaggcaagca

SEQ ID NO: 3035513 - DNA, 25 bp, Homo sapien
gaagaagaattctcggacattctca

SEQ ID NO: 3035514 - DNA, 25 bp, Homo sapien
ggacaacatccccaatgcgtcgagc

SEQ ID NO: 3035515 - DNA, 25 bp, Homo sapien
ttggcctcaaaggtcagtgctgcca

SEQ ID NO: 3035516 - DNA, 25 bp, Homo sapien
tcagtgctgccacacggaagaagaa

SEQ ID NO: 3035517 - DNA, 25 bp, Homo sapien
cacagagagcagataggtgctcagg

SEQ ID NO: 3035518 - DNA, 25 bp, Homo sapien
ctgacacagagagcagataggtgct

SEQ ID NO: 3035519 - DNA, 25 bp, Homo sapien
gacacagagagcagataggtgctca

SEQ ID NO: 3035520 - DNA, 25 bp, Homo sapien
taggtgctcaggggcagtgctgggt

SEQ ID NO: 3035521 - DNA, 25 bp, Homo sapien
agagtgtcacagcagagccctaaag

SEQ ID NO: 3035522 - DNA, 25 bp, Homo sapien
gcagagccctaaagcctccaactca

SEQ ID NO: 3035523 - DNA, 25 bp, Homo sapien
agagccaggcaagagtgtcacagca

SEQ ID NO: 3035524 - DNA, 25 bp, Homo sapien
acagcagagccctaaagcctccaac

SEQ ID NO: 3035525 - DNA, 25 bp, Homo sapien
agtgagagatgagactgcccagtac

SEQ ID NO: 3035526 - DNA, 25 bp, Homo sapien
cagtgagagatgagactgcccagta

SEQ ID NO: 3035527 - DNA, 25 bp, Homo sapien
gagggcgtctttctccatcagcgca

SEQ ID NO: 3035528 - DNA, 25 bp, Homo sapien
ggccacctggagggcgtctttctcc

SEQ ID NO: 3035529 - DNA, 25 bp, Homo sapien
ctggagggcgtctttctccatcagc

SEQ ID NO: 3035530 - DNA, 25 bp, Homo sapien
gggcgtctttctccatcagcgcata

SEQ ID NO: 3035531 - DNA, 25 bp, Homo sapien
ctgagggaaggccagagtcagaggg

SEQ ID NO: 3035532 - DNA, 25 bp, Homo sapien
aggccagagtcagaggggggcattc

SEQ ID NO: 3035533 - DNA, 25 bp, Homo sapien
gagtcagaggggggcattccctcac

SEQ ID NO: 3035534 - DNA, 25 bp, Homo sapien
ccagagtcagaggggggcattccct

SEQ ID NO: 3035535 - DNA, 25 bp, Homo sapien
caagctgggaagtccccccactggc

SEQ ID NO: 3035536 - DNA, 25 bp, Homo sapien
tgggaagtccccccactggcacact

SEQ ID NO: 3035537 - DNA, 25 bp, Homo sapien
gaagtccccccactggcacactcac

SEQ ID NO: 3035538 - DNA, 25 bp, Homo sapien
aagctgggaagtccccccactggca

SEQ ID NO: 3035539 - DNA, 25 bp, Homo sapien
gcacactggaagggtcattctcctt

SEQ ID NO: 3035540 - DNA, 25 bp, Homo sapien
aagcacactggaagggtcattctcc

SEQ ID NO: 3035541 - DNA, 25 bp, Homo sapien
ctccttcagggcatcggccagccac

SEQ ID NO: 3035542 - DNA, 25 bp, Homo sapien
tccttcagggcatcggccagccact

SEQ ID NO: 3035543 - DNA, 25 bp, Homo sapien
tcattcaggttgaagacaatgatga

SEQ ID NO: 3035544 - DNA, 25 bp, Homo sapien
ggtatgttccagagatgccacatca

SEQ ID NO: 3035545 - DNA, 25 bp, Homo sapien
ttggtatgttccagagatgccacat

SEQ ID NO: 3035546 - DNA, 25 bp, Homo sapien
tgccacatcattcaggttgaagaca

SEQ ID NO: 3035547 - DNA, 25 bp, Homo sapien
cttgagctcctctatagtaggttga

SEQ ID NO: 3035548 - DNA, 25 bp, Homo sapien
tgagctcctctatagtaggttgatg

SEQ ID NO: 3035549 - DNA, 25 bp, Homo sapien
cctctcctgcccagcggtatcccaa

SEQ ID NO: 3035550 - DNA, 25 bp, Homo sapien
agctcctctatagtaggttgatgca

SEQ ID NO: 3035551 - DNA, 25 bp, Homo sapien
gagtgaagcacaggtatgtatcttg

SEQ ID NO: 3035552 - DNA, 25 bp, Homo sapien
atggtggccttgtaattcttatcaa

SEQ ID NO: 3035553 - DNA, 25 bp, Homo sapien
aatcgttccatctcgaagtccactc

SEQ ID NO: 3035554 - DNA, 25 bp, Homo sapien
gggaatgcccagcacctcaaatcgt

SEQ ID NO: 3035555 - DNA, 25 bp, Homo sapien
gcacctcaaatcgttccatctcgaa

SEQ ID NO: 3035556 - DNA, 25 bp, Homo sapien
agccagcccacctggctaggcttgg

SEQ ID NO: 3035557 - DNA, 25 bp, Homo sapien
tgagagggtaccagatgctgtgatc

SEQ ID NO: 3035558 - DNA, 25 bp, Homo sapien
atgctgtgatctggagccagcccac

SEQ ID NO: 3035559 - DNA, 25 bp, Homo sapien
ctgagagggtaccagatgctgtgat

SEQ ID NO: 3035560 - DNA, 25 bp, Homo sapien
cacaatgaccttggagatcttaaat

SEQ ID NO: 3035561 - DNA, 25 bp, Homo sapien
cccaccacaatgaccttggagatct

SEQ ID NO: 3035562 - DNA, 25 bp, Homo sapien
tgaggcaagtcttccccaccgacag

SEQ ID NO: 3035563 - DNA, 25 bp, Homo sapien
ctattaatgaggcaagtcttcccca

SEQ ID NO: 3035564 - DNA, 25 bp, Homo sapien
gactacagagtttcctgggacctcc

SEQ ID NO: 3035565 - DNA, 25 bp, Homo sapien
caggctgagggtattatagacacca

SEQ ID NO: 3035566 - DNA, 25 bp, Homo sapien
tgctcccgactaggtccagaaaggt

SEQ ID NO: 3035567 - DNA, 25 bp, Homo sapien
taaagatgatagtacccaacactgc

SEQ ID NO: 3035568 - DNA, 25 bp, Homo sapien
cacggtgcctgtccggtgctcctgg

SEQ ID NO: 3035569 - DNA, 25 bp, Homo sapien
tcctggcaggcgcaggtgacgcggg

SEQ ID NO: 3035570 - DNA, 25 bp, Homo sapien
ggtggaagtctttgtgcccgtgcaa

SEQ ID NO: 3035571 - DNA, 25 bp, Homo sapien
gtgcaaagcggcctccttcctcagg

SEQ ID NO: 3035572 - DNA, 25 bp, Homo sapien
ttgtcccgcagccaagcggcccggg

SEQ ID NO: 3035573 - DNA, 25 bp, Homo sapien
acaccccgggctgtagactgaagcc

SEQ ID NO: 3035574 - DNA, 25 bp, Homo sapien
gatggaagagaatggagcttcctac

SEQ ID NO: 3035575 - DNA, 25 bp, Homo sapien
tcctctaactggtctggtgccgcct

SEQ ID NO: 3035576 - DNA, 25 bp, Homo sapien
gatccctccgcacgggtgccagaat

SEQ ID NO: 3035577 - DNA, 25 bp, Homo sapien
ccctccgcacgggtgccagaatgtt

SEQ ID NO: 3035578 - DNA, 25 bp, Homo sapien
ggcagctccgccaggacgcgatccc

SEQ ID NO: 3035579 - DNA, 25 bp, Homo sapien
gccaggacgcgatccctccgcacgg

SEQ ID NO: 3035580 - DNA, 25 bp, Homo sapien
cctgcctgcggccttgcagggcgcc

SEQ ID NO: 3035581 - DNA, 25 bp, Homo sapien
gccggatccgcgtcagcgacccggg

SEQ ID NO: 3035582 - DNA, 25 bp, Homo sapien
ccgaggccggatccgcgtcagcgac

SEQ ID NO: 3035583 - DNA, 25 bp, Homo sapien
gcgccgaggccggatccgcgtcagc

SEQ ID NO: 3035584 - DNA, 25 bp, Homo sapien
atccgcgtcagcgacccgggcgcgt

SEQ ID NO: 3035585 - DNA, 25 bp, Homo sapien
tgtcccgactacaactcggggccac

SEQ ID NO: 3035586 - DNA, 25 bp, Homo sapien
acgggagtccgcggtctcggagacg

SEQ ID NO: 3035587 - DNA, 25 bp, Homo sapien
gtgtcccgactacaactcggggcca

SEQ ID NO: 3035588 - DNA, 25 bp, Homo sapien
cctacgggagtccgcggtctcggag

SEQ ID NO: 3035589 - DNA, 25 bp, Homo sapien
atgaaacaatcacccggggccgcgg

SEQ ID NO: 3035590 - DNA, 25 bp, Homo sapien
cctgggcgtcccgaagatgactctg

SEQ ID NO: 3035591 - DNA, 25 bp, Homo sapien
gaggagactcttcggccgccaattg

SEQ ID NO: 3035592 - DNA, 25 bp, Homo sapien
ccgcgggccacggagatgaaacaat

SEQ ID NO: 3035593 - DNA, 25 bp, Homo sapien
gcggggccggatggttcctacaata

SEQ ID NO: 3035594 - DNA, 25 bp, Homo sapien
ccggatagttcctacgattacgcgg

SEQ ID NO: 3035595 - DNA, 25 bp, Homo sapien
cgcggagacccgacgtcatctcggg

SEQ ID NO: 3035596 - DNA, 25 bp, Homo sapien
ctacgattacgcggggccggatagt

SEQ ID NO: 3035597 - DNA, 25 bp, Homo sapien
gggctccgccaacgctgtaacacga

SEQ ID NO: 3035598 - DNA, 25 bp, Homo sapien
agtccggctacagggcctcgagtcc

SEQ ID NO: 3035599 - DNA, 25 bp, Homo sapien
gaggctgccctaccattacagagcg

SEQ ID NO: 3035600 - DNA, 25 bp, Homo sapien
cacgatccccggaaattcctggaga

SEQ ID NO: 3035601 - DNA, 25 bp, Homo sapien
ggaatcggagactgctgcgcagcat

SEQ ID NO: 3035602 - DNA, 25 bp, Homo sapien
ggaggtgactcatagagtctgcccc

SEQ ID NO: 3035603 - DNA, 25 bp, Homo sapien
gccagggttagaatgaggtgcccac

SEQ ID NO: 3035604 - DNA, 25 bp, Homo sapien
gcctgggaggtgactcatagagtct

SEQ ID NO: 3035605 - DNA, 25 bp, Homo sapien
tgccagggttagaatgaggtgccca

SEQ ID NO: 3035606 - DNA, 25 bp, Homo sapien
ctgaagtctggcgtcttttccttca

SEQ ID NO: 3035607 - DNA, 25 bp, Homo sapien
agagagacgtctgaagtctggcgtc

SEQ ID NO: 3035608 - DNA, 25 bp, Homo sapien
cgtctgaagtctggcgtcttttcct

SEQ ID NO: 3035609 - DNA, 25 bp, Homo sapien
cgaggagagagacgtctgaagtctg

SEQ ID NO: 3035610 - DNA, 25 bp, Homo sapien
taactcccgagtcaatccaaatgtg

SEQ ID NO: 3035611 - DNA, 25 bp, Homo sapien
tcagttcgaccgagcaaatcctgct

SEQ ID NO: 3035612 - DNA, 25 bp, Homo sapien
ttgctcaagataggaagctcccggg

SEQ ID NO: 3035613 - DNA, 25 bp, Homo sapien
gcctgagcaaataaacgcgtgtctt

SEQ ID NO: 3035614 - DNA, 25 bp, Homo sapien
cgaacgaattgggaacacggctgct

SEQ ID NO: 3035615 - DNA, 25 bp, Homo sapien
cccgtgggaacgagcattggagacc

SEQ ID NO: 3035616 - DNA, 25 bp, Homo sapien
tctttggcgctataagcccgtggga

SEQ ID NO: 3035617 - DNA, 25 bp, Homo sapien
ttttcacaagatggcgccgaaagcg

SEQ ID NO: 3035618 - DNA, 25 bp, Homo sapien
tatttggcagttatggcctgctgcg

SEQ ID NO: 3035619 - DNA, 25 bp, Homo sapien
ccaccaagctggacctagaatcaag

SEQ ID NO: 3035620 - DNA, 25 bp, Homo sapien
cctgctgcggtgtatagaagcttct

SEQ ID NO: 3035621 - DNA, 25 bp, Homo sapien
cacagatttgagtagagccatggta

SEQ ID NO: 3035622 - DNA, 25 bp, Homo sapien
tcgttgtctgatgcacctaggctct

SEQ ID NO: 3035623 - DNA, 25 bp, Homo sapien
aatgcacaacgttctgcccctggga

SEQ ID NO: 3035624 - DNA, 25 bp, Homo sapien
tgatgacactgtaaagcgaccaaag

SEQ ID NO: 3035625 - DNA, 25 bp, Homo sapien
ctccaaaagaatgggcccaggccag

SEQ ID NO: 3035626 - DNA, 25 bp, Homo sapien
ccatggttgagtaacaagctgtaca

SEQ ID NO: 3035627 - DNA, 25 bp, Homo sapien
tttcaatagtgtgggcgcaggctca

SEQ ID NO: 3035628 - DNA, 25 bp, Homo sapien
ctgtttctggccttgtccgtttttg

SEQ ID NO: 3035629 - DNA, 25 bp, Homo sapien
gacttcagaggagtactttcattag

SEQ ID NO: 3035630 - DNA, 25 bp, Homo sapien
gaggaggcgggaaaagtagattatg

SEQ ID NO: 3035631 - DNA, 25 bp, Homo sapien
tcactcagtcaagaacttgtctttg

SEQ ID NO: 3035632 - DNA, 25 bp, Homo sapien
agtagattatgatcatcacgtccag

SEQ ID NO: 3035633 - DNA, 25 bp, Homo sapien
gatcatcacgtccagcatgagcagg

SEQ ID NO: 3035634 - DNA, 25 bp, Homo sapien
gaagaaatgggtgaggtaggcctga

SEQ ID NO: 3035635 - DNA, 25 bp, Homo sapien
ggaagagaaagtacatgaccaggtt

SEQ ID NO: 3035636 - DNA, 25 bp, Homo sapien
gaaagtacatgaccaggttcacata

SEQ ID NO: 3035637 - DNA, 25 bp, Homo sapien
gttcacataacgcaagaagaaatgg

SEQ ID NO: 3035638 - DNA, 25 bp, Homo sapien
tcatgcgaatggtgaggaagatgtt

SEQ ID NO: 3035639 - DNA, 25 bp, Homo sapien
tccaccagtagtgttaagacacccc

SEQ ID NO: 3035640 - DNA, 25 bp, Homo sapien
taacccggtagaggagatgatcctg

SEQ ID NO: 3035641 - DNA, 25 bp, Homo sapien
gctccaaaagatgccggagaagaag

SEQ ID NO: 3035642 - DNA, 25 bp, Homo sapien
tctaaagaggcagtgaaaccatggg

SEQ ID NO: 3035643 - DNA, 25 bp, Homo sapien
tgagactagattactgacaccaggc

SEQ ID NO: 3035644 - DNA, 25 bp, Homo sapien
cataagaagtagcacacaggtcggg

SEQ ID NO: 3035645 - DNA, 25 bp, Homo sapien
gaacaagtacagactgccaacctcc

SEQ ID NO: 3035646 - DNA, 25 bp, Homo sapien
caagaggctcgcgtctgtccgctag

SEQ ID NO: 3035647 - DNA, 25 bp, Homo sapien
tggacaaggtattcccaagaggctc

SEQ ID NO: 3035648 - DNA, 25 bp, Homo sapien
gctagccacgatgtccaccgtatcg

SEQ ID NO: 3035649 - DNA, 25 bp, Homo sapien
tccaccgtatcgtggatgaaatacc

SEQ ID NO: 3035650 - DNA, 25 bp, Homo sapien
tcaatctccactaacatgtcaggag

SEQ ID NO: 3035651 - DNA, 25 bp, Homo sapien
gaagcaaacgagcaaatagccagaa

SEQ ID NO: 3035652 - DNA, 25 bp, Homo sapien
ccgcagagaagcaaacgagcaaata

SEQ ID NO: 3035653 - DNA, 25 bp, Homo sapien
cagaaagtgaccacgccgtctcaat

SEQ ID NO: 3035654 - DNA, 25 bp, Homo sapien
gataccaaacgggatcaggtgagac

SEQ ID NO: 3035655 - DNA, 25 bp, Homo sapien
ccactgcggcttttggttggatagg

SEQ ID NO: 3035656 - DNA, 25 bp, Homo sapien
cctcagcccgccagtgagcgatggg

SEQ ID NO: 3035657 - DNA, 25 bp, Homo sapien
agtaacacaagagccggccccggct

SEQ ID NO: 3035658 - DNA, 25 bp, Homo sapien
ggaaggtcagcgtggcgcccaggag

SEQ ID NO: 3035659 - DNA, 25 bp, Homo sapien
acacaatggagtgagcgaaggagac

SEQ ID NO: 3035660 - DNA, 25 bp, Homo sapien
tcggcgcgcacgtgcacgggtaggg

SEQ ID NO: 3035661 - DNA, 25 bp, Homo sapien
agacgagcaggttgtgccagcgcca

SEQ ID NO: 3035662 - DNA, 25 bp, Homo sapien
aggccgcctcctaggtctgttctgg

SEQ ID NO: 3035663 - DNA, 25 bp, Homo sapien
cacacagttggcgaagccctctagg

SEQ ID NO: 3035664 - DNA, 25 bp, Homo sapien
tctgttctgggaaccgggatccctc

SEQ ID NO: 3035665 - DNA, 25 bp, Homo sapien
gggatccctctcgggccagtccagg

SEQ ID NO: 3035666 - DNA, 25 bp, Homo sapien
cgaggtgggcacttgggaactgctg

SEQ ID NO: 3035667 - DNA, 25 bp, Homo sapien
gctgagtaacccatcgccacctctt

SEQ ID NO: 3035668 - DNA, 25 bp, Homo sapien
cttcccgccggctcttaaactcctg

SEQ ID NO: 3035669 - DNA, 25 bp, Homo sapien
tgtcacagtcctccctcagacagtc

SEQ ID NO: 3035670 - DNA, 25 bp, Homo sapien
ctggagagtgcctctagaactgggc

SEQ ID NO: 3035671 - DNA, 25 bp, Homo sapien
ttcagtgcctgtggttgtattgtcc

SEQ ID NO: 3035672 - DNA, 25 bp, Homo sapien
taagcttctgcctgaagcctaggga

SEQ ID NO: 3035673 - DNA, 25 bp, Homo sapien
tgtgggcagacacaccccttcagtg

SEQ ID NO: 3035674 - DNA, 25 bp, Homo sapien
tctacacggactgaggtgcctgctc

SEQ ID NO: 3035675 - DNA, 25 bp, Homo sapien
gaaagggtagttcaaagagtctgtc

SEQ ID NO: 3035676 - DNA, 25 bp, Homo sapien
cctgctcaggtgctatgtcccaaga

SEQ ID NO: 3035677 - DNA, 25 bp, Homo sapien
ttggtgccggtcacactctacacgg

SEQ ID NO: 3035678 - DNA, 25 bp, Homo sapien
cctggctgcaatcacttagtgtttt

SEQ ID NO: 3035679 - DNA, 25 bp, Homo sapien
gcctggctgcaatcacttagtgttt

SEQ ID NO: 3035680 - DNA, 25 bp, Homo sapien
ttttcctctgcagacaaaaaaataa

SEQ ID NO: 3035681 - DNA, 25 bp, Homo sapien
tgcctggctgcaatcacttagtgtt

SEQ ID NO: 3035682 - DNA, 25 bp, Homo sapien
gaacatctcacaccaaaggcgaggg

SEQ ID NO: 3035683 - DNA, 25 bp, Homo sapien
gaggtaccagtgttcacagacggca

SEQ ID NO: 3035684 - DNA, 25 bp, Homo sapien
tcttgggtatgctcaaaggtcactg

SEQ ID NO: 3035685 - DNA, 25 bp, Homo sapien
taggcccagctccaggtgttagaac

SEQ ID NO: 3035686 - DNA, 25 bp, Homo sapien
ggaggacgagaggaccccttctgtc

SEQ ID NO: 3035687 - DNA, 25 bp, Homo sapien
tactacctcaactagggcattccgt

SEQ ID NO: 3035688 - DNA, 25 bp, Homo sapien
ccaaggtggagagactagctgacag

SEQ ID NO: 3035689 - DNA, 25 bp, Homo sapien
cacacctcagtcgtcctaagggaaa

SEQ ID NO: 3035690 - DNA, 25 bp, Homo sapien
gaagcaggcctgttggaaatcccca

SEQ ID NO: 3035691 - DNA, 25 bp, Homo sapien
caaaactggttgatctggtgcacga

SEQ ID NO: 3035692 - DNA, 25 bp, Homo sapien
ggtgcacgatgctactcaggtccgg

SEQ ID NO: 3035693 - DNA, 25 bp, Homo sapien
ttcagatggaaggactgcgccaggc

SEQ ID NO: 3035694 - DNA, 25 bp, Homo sapien
gggtttgggccatgggctgagggtg

SEQ ID NO: 3035695 - DNA, 25 bp, Homo sapien
ggccatgggctgagggtggcccagg

SEQ ID NO: 3035696 - DNA, 25 bp, Homo sapien
ctgggtttgggccatgggctgaggg

SEQ ID NO: 3035697 - DNA, 25 bp, Homo sapien
ttgggccatgggctgagggtggccc

SEQ ID NO: 3035698 - DNA, 25 bp, Homo sapien
gccagggtctgtgcatgctgcaggg

SEQ ID NO: 3035699 - DNA, 25 bp, Homo sapien
gcagggcctgctggcgggccagagc

SEQ ID NO: 3035700 - DNA, 25 bp, Homo sapien
tgaggtgctgcagcgtctggggagg

SEQ ID NO: 3035701 - DNA, 25 bp, Homo sapien
ggtgggctaaagtgctgggtgccac

SEQ ID NO: 3035702 - DNA, 25 bp, Homo sapien
gctcgggtgccgtcaaagtccttga

SEQ ID NO: 3035703 - DNA, 25 bp, Homo sapien
tttgacaatggcaagcaggcctgcc

SEQ ID NO: 3035704 - DNA, 25 bp, Homo sapien
ggctgatgtgtcgaggccgttcaca

SEQ ID NO: 3035705 - DNA, 25 bp, Homo sapien
tccttgagtatgcttttggctggca

SEQ ID NO: 3035706 - DNA, 25 bp, Homo sapien
tgggttgtttgcgaccttcttagca

SEQ ID NO: 3035707 - DNA, 25 bp, Homo sapien
ttttatagtcagtgggttgtttgcg

SEQ ID NO: 3035708 - DNA, 25 bp, Homo sapien
cttcttagcatacgcatccaattcg

SEQ ID NO: 3035709 - DNA, 25 bp, Homo sapien
tgtttgcgaccttcttagcatacgc

SEQ ID NO: 3035710 - DNA, 25 bp, Homo sapien
ggtaggatagtgagcagttctcatt

SEQ ID NO: 3035711 - DNA, 25 bp, Homo sapien
gttctcattttctgtgtagtgtccc

SEQ ID NO: 3035712 - DNA, 25 bp, Homo sapien
gggtaggatagtgagcagttctcat

SEQ ID NO: 3035713 - DNA, 25 bp, Homo sapien
ctggggtaggatagtgagcagttct

SEQ ID NO: 3035714 - DNA, 25 bp, Homo sapien
aaaggacaggtcacctggccctggt

SEQ ID NO: 3035715 - DNA, 25 bp, Homo sapien
ctggccctggtagacaggctagcat

SEQ ID NO: 3035716 - DNA, 25 bp, Homo sapien
gagaaagaagctgaaaggacaggtc

SEQ ID NO: 3035717 - DNA, 25 bp, Homo sapien
acctggccctggtagacaggctagc

SEQ ID NO: 3035718 - DNA, 25 bp, Homo sapien
ggcatcaacacaacatggggcagtg

SEQ ID NO: 3035719 - DNA, 25 bp, Homo sapien
tcaacacaacatggggcagtggctc

SEQ ID NO: 3035720 - DNA, 25 bp, Homo sapien
ggcagattggcatcaacacaacatg

SEQ ID NO: 3035721 - DNA, 25 bp, Homo sapien
catcaacacaacatggggcagtggc

SEQ ID NO: 3035722 - DNA, 25 bp, Homo sapien
tggaagccgatacacacctgtaagt

SEQ ID NO: 3035723 - DNA, 25 bp, Homo sapien
taaaataacaacactggctgggcgt

SEQ ID NO: 3035724 - DNA, 25 bp, Homo sapien
gcagttggcctcaatcatcggatct

SEQ ID NO: 3035725 - DNA, 25 bp, Homo sapien
caaggtcagacagcatatagaaggc

SEQ ID NO: 3035726 - DNA, 25 bp, Homo sapien
gatcgatcactttggcagagcctct

SEQ ID NO: 3035727 - DNA, 25 bp, Homo sapien
tgctacgttagctacccaaggcagg

SEQ ID NO: 3035728 - DNA, 25 bp, Homo sapien
gctagttttcctaacgccagctggt

SEQ ID NO: 3035729 - DNA, 25 bp, Homo sapien
aatcaagtagtaacctggagcaggc

SEQ ID NO: 3035730 - DNA, 25 bp, Homo sapien
tagtacatttcactatatgactgac

SEQ ID NO: 3035731 - DNA, 25 bp, Homo sapien
tcccaactagtacatttcactatat

SEQ ID NO: 3035732 - DNA, 25 bp, Homo sapien
aactagtacatttcactatatgact

SEQ ID NO: 3035733 - DNA, 25 bp, Homo sapien
cccaactagtacatttcactatatg

SEQ ID NO: 3035734 - DNA, 25 bp, Homo sapien
taatgtttagccattgctcaaaggc

SEQ ID NO: 3035735 - DNA, 25 bp, Homo sapien
gaataatgtttagccattgctcaaa

SEQ ID NO: 3035736 - DNA, 25 bp, Homo sapien
ctgaataatgtttagccattgctca

SEQ ID NO: 3035737 - DNA, 25 bp, Homo sapien
aatgtttagccattgctcaaaggcc

SEQ ID NO: 3035738 - DNA, 25 bp, Homo sapien
gggaccgtaaagtcacttgcaattg

SEQ ID NO: 3035739 - DNA, 25 bp, Homo sapien
taaagtcacttgcaattgtgacctc

SEQ ID NO: 3035740 - DNA, 25 bp, Homo sapien
ctcaataggggaccgtaaagtcact

SEQ ID NO: 3035741 - DNA, 25 bp, Homo sapien
gcaattgtgacctcacaactctagg

SEQ ID NO: 3035742 - DNA, 25 bp, Homo sapien
gatgggtatttactctagacttact

SEQ ID NO: 3035743 - DNA, 25 bp, Homo sapien
tatttactctagacttactctcctg

SEQ ID NO: 3035744 - DNA, 25 bp, Homo sapien
agaaatatatctgccacaaaccatc

SEQ ID NO: 3035745 - DNA, 25 bp, Homo sapien
gaacacatgtggctcaaggcatttg

SEQ ID NO: 3035746 - DNA, 25 bp, Homo sapien
tttaagtcccagatatgcattagta

SEQ ID NO: 3035747 - DNA, 25 bp, Homo sapien
cacccaccgacaggtcctggtatat

SEQ ID NO: 3035748 - DNA, 25 bp, Homo sapien
cccagatatgcattagtatttgtcc

SEQ ID NO: 3035749 - DNA, 25 bp, Homo sapien
cccaccgacaggtcctggtatatga

SEQ ID NO: 3035750 - DNA, 25 bp, Homo sapien
gaattctgccaaacacttaaggtaa

SEQ ID NO: 3035751 - DNA, 25 bp, Homo sapien
ggtttcaaagctctatcaggactgg

SEQ ID NO: 3035752 - DNA, 25 bp, Homo sapien
ccttagaaaggtagagtgaccactg

SEQ ID NO: 3035753 - DNA, 25 bp, Homo sapien
taacttgagctgaactaccttagaa

SEQ ID NO: 3035754 - DNA, 25 bp, Homo sapien
cagtgtgccatagtgacacctgtga

SEQ ID NO: 3035755 - DNA, 25 bp, Homo sapien
gcatgggcaacgcagtaaaattcca

SEQ ID NO: 3035756 - DNA, 25 bp, Homo sapien
ccagtgcttaggtgcctgatacaca

SEQ ID NO: 3035757 - DNA, 25 bp, Homo sapien
cacacctggccgagattattttgaa

SEQ ID NO: 3035758 - DNA, 25 bp, Homo sapien
tcatttggacacttgtgctgtgaca

SEQ ID NO: 3035759 - DNA, 25 bp, Homo sapien
ggctagcctaacactttgaaatcaa

SEQ ID NO: 3035760 - DNA, 25 bp, Homo sapien
tataagcaaggtaaatccgctggga

SEQ ID NO: 3035761 - DNA, 25 bp, Homo sapien
ctgaatgtaagaagtaaaccctgac

SEQ ID NO: 3035762 - DNA, 25 bp, Homo sapien
tcaaagtgtgtgactgcttctaacc

SEQ ID NO: 3035763 - DNA, 25 bp, Homo sapien
ttctaggcttaacggatcttcttgc

SEQ ID NO: 3035764 - DNA, 25 bp, Homo sapien
cctctaaagtgttgaaagtaccaca

SEQ ID NO: 3035765 - DNA, 25 bp, Homo sapien
gaattatttggctcccttctgtgga

SEQ ID NO: 3035766 - DNA, 25 bp, Homo sapien
cacagcgcccggccttgcctttctt

SEQ ID NO: 3035767 - DNA, 25 bp, Homo sapien
acagcgcccggccttgcctttcttt

SEQ ID NO: 3035768 - DNA, 25 bp, Homo sapien
ccacagcgcccggccttgcctttct

SEQ ID NO: 3035769 - DNA, 25 bp, Homo sapien
tggagtgtgcagtggcggaatctca

SEQ ID NO: 3035770 - DNA, 25 bp, Homo sapien
ggagtgtgcagtggcggaatctcag

SEQ ID NO: 3035771 - DNA, 25 bp, Homo sapien
aactctctgtctcagcctcatgagt

SEQ ID NO: 3035772 - DNA, 25 bp, Homo sapien
agcaactctctgtctcagcctcatg

SEQ ID NO: 3035773 - DNA, 25 bp, Homo sapien
tcttattgtgcaggaaaggaagtgc

SEQ ID NO: 3035774 - DNA, 25 bp, Homo sapien
tgagccccaacagggcctactcttg

SEQ ID NO: 3035775 - DNA, 25 bp, Homo sapien
taaagcaggcatgttaccagaatac

SEQ ID NO: 3035776 - DNA, 25 bp, Homo sapien
tagagaagacattgagtgggtacac

SEQ ID NO: 3035777 - DNA, 25 bp, Homo sapien
tgaaatcatgcagtgaagaacacag

SEQ ID NO: 3035778 - DNA, 25 bp, Homo sapien
tttgaaatcatgcagtgaagaacac

SEQ ID NO: 3035779 - DNA, 25 bp, Homo sapien
gaacacagcatcactcctgtgatat

SEQ ID NO: 3035780 - DNA, 25 bp, Homo sapien
cttttgaaatcatgcagtgaagaac

SEQ ID NO: 3035781 - DNA, 25 bp, Homo sapien
ctcctgagtagccggcgtagctggg

SEQ ID NO: 3035782 - DNA, 25 bp, Homo sapien
tcctgagtagccggcgtagctggga

SEQ ID NO: 3035783 - DNA, 25 bp, Homo sapien
cacctcggcctcccaaaagctggga

SEQ ID NO: 3035784 - DNA, 25 bp, Homo sapien
ccacctcggcctcccaaaagctggg

SEQ ID NO: 3035785 - DNA, 25 bp, Homo sapien
gatgagagtggtctgttagcaacta

SEQ ID NO: 3035786 - DNA, 25 bp, Homo sapien
ttcttgccacttggaataggtttcc

SEQ ID NO: 3035787 - DNA, 25 bp, Homo sapien
catctctaaattggtgagtgtgcca

SEQ ID NO: 3035788 - DNA, 25 bp, Homo sapien
tatcttaatggagaagacatctcta

SEQ ID NO: 3035789 - DNA, 25 bp, Homo sapien
gacattcaccaccatctctttaact

SEQ ID NO: 3035790 - DNA, 25 bp, Homo sapien
ttcaccaccatctctttaactgcca

SEQ ID NO: 3035791 - DNA, 25 bp, Homo sapien
cattcaccaccatctctttaactgc

SEQ ID NO: 3035792 - DNA, 25 bp, Homo sapien
tcaccaccatctctttaactgccat

SEQ ID NO: 3035793 - DNA, 25 bp, Homo sapien
gagtacacaacaacaaaggatacga

SEQ ID NO: 3035794 - DNA, 25 bp, Homo sapien
ccggctcaaccaaatttttatgcag

SEQ ID NO: 3035795 - DNA, 25 bp, Homo sapien
gaaactgatacacccttagaaagag

SEQ ID NO: 3035796 - DNA, 25 bp, Homo sapien
gatacgaaggcaggcaacatccaaa

SEQ ID NO: 3035797 - DNA, 25 bp, Homo sapien
tggactagaccactagaatcaactt

SEQ ID NO: 3035798 - DNA, 25 bp, Homo sapien
caagatgccctttgagataggttgg

SEQ ID NO: 3035799 - DNA, 25 bp, Homo sapien
gataggttgggtatgtatcatcagc

SEQ ID NO: 3035800 - DNA, 25 bp, Homo sapien
cagccatcacggatcatgcctgtaa

SEQ ID NO: 3035801 - DNA, 25 bp, Homo sapien
caccatgttgaccaggatagtgtcg

SEQ ID NO: 3035802 - DNA, 25 bp, Homo sapien
ttgaccaggatagtgtcgatctctt

SEQ ID NO: 3035803 - DNA, 25 bp, Homo sapien
tgaccaggatagtgtcgatctcttg

SEQ ID NO: 3035804 - DNA, 25 bp, Homo sapien
catgttgaccaggatagtgtcgatc

SEQ ID NO: 3035805 - DNA, 25 bp, Homo sapien
cagttgcaccactatagctcactgc

SEQ ID NO: 3035806 - DNA, 25 bp, Homo sapien
tgcagttgcaccactatagctcact

SEQ ID NO: 3035807 - DNA, 25 bp, Homo sapien
ttcagtgcagttgcaccactatagc

SEQ ID NO: 3035808 - DNA, 25 bp, Homo sapien
cagtgcagttgcaccactatagctc

SEQ ID NO: 3035809 - DNA, 25 bp, Homo sapien
aggttcgctccgcagcgctccgtgg

SEQ ID NO: 3035810 - DNA, 25 bp, Homo sapien
ctccgggtgccaggctcacggagcg

SEQ ID NO: 3035811 - DNA, 25 bp, Homo sapien
ctcacggagcgcaggactccgcggt

SEQ ID NO: 3035812 - DNA, 25 bp, Homo sapien
ctggaaaggtgaggttcgctccgca

SEQ ID NO: 3035813 - DNA, 25 bp, Homo sapien
tggctcttcgcgagccctctcctgt

SEQ ID NO: 3035814 - DNA, 25 bp, Homo sapien
tgcacagccaatggcgagccaggga

SEQ ID NO: 3035815 - DNA, 25 bp, Homo sapien
gagccagcagagcgactcgccaaac

SEQ ID NO: 3035816 - DNA, 25 bp, Homo sapien
caccctggctcttcgcgagccctct

SEQ ID NO: 3035817 - DNA, 25 bp, Homo sapien
agtggtgcaattaggccggagtgca

SEQ ID NO: 3035818 - DNA, 25 bp, Homo sapien
gtggtgcaattaggccggagtgcag

SEQ ID NO: 3035819 - DNA, 25 bp, Homo sapien
tgattcgtgcaaagagccttgttac

SEQ ID NO: 3035820 - DNA, 25 bp, Homo sapien
tgagccaccactgtccaagaatttt

SEQ ID NO: 3035821 - DNA, 25 bp, Homo sapien
tccaaaggtgtaacaatcccaaagc

SEQ ID NO: 3035822 - DNA, 25 bp, Homo sapien
cacagggtctctctatcttgccgag

SEQ ID NO: 3035823 - DNA, 25 bp, Homo sapien
aaaaactcttccatgactcctcagc

SEQ ID NO: 3035824 - DNA, 25 bp, Homo sapien
tccttcaagacccaactgactcttt

SEQ ID NO: 3035825 - DNA, 25 bp, Homo sapien
cagatctctattacagcacttattg

SEQ ID NO: 3035826 - DNA, 25 bp, Homo sapien
cctcccactacaaggcagaactaat

SEQ ID NO: 3035827 - DNA, 25 bp, Homo sapien
tcccatagcacttagtacagatctc

SEQ ID NO: 3035828 - DNA, 25 bp, Homo sapien
gcaatagcccgtttgaagcatgaca

SEQ ID NO: 3035829 - DNA, 25 bp, Homo sapien
aattacataggtgatgcttgcaata

SEQ ID NO: 3035830 - DNA, 25 bp, Homo sapien
tgatgcttgcaatagcccgtttgaa

SEQ ID NO: 3035831 - DNA, 25 bp, Homo sapien
gcataaacaatctcaattacatagg

SEQ ID NO: 3035832 - DNA, 25 bp, Homo sapien
atggctgctcctttgccgcccgccg

SEQ ID NO: 3035833 - DNA, 25 bp, Homo sapien
ccaccacttctccactgcccggccc

SEQ ID NO: 3035834 - DNA, 25 bp, Homo sapien
caccacttctccactgcccggcccc

SEQ ID NO: 3035835 - DNA, 25 bp, Homo sapien
tcaatcggtgttaagagtctggcag

SEQ ID NO: 3035836 - DNA, 25 bp, Homo sapien
tctgttcaatcgtaggagcgctcct

SEQ ID NO: 3035837 - DNA, 25 bp, Homo sapien
tgccttgcggctgtaatggctgccc

SEQ ID NO: 3035838 - DNA, 25 bp, Homo sapien
tcttaggcttccaacggaggtgcgt

SEQ ID NO: 3035839 - DNA, 25 bp, Homo sapien
ctccagctagctatgggcccagagt

SEQ ID NO: 3035840 - DNA, 25 bp, Homo sapien
gaagaaggaacctgccttagctcag

SEQ ID NO: 3035841 - DNA, 25 bp, Homo sapien
caggcactggtgagagacatgaaca

SEQ ID NO: 3035842 - DNA, 25 bp, Homo sapien
tgcctggcaccacagctacaaaggt

SEQ ID NO: 3035843 - DNA, 25 bp, Homo sapien
ctcttcctggcacgttttctgggta

SEQ ID NO: 3035844 - DNA, 25 bp, Homo sapien
ccacccctgccttgtttgagctgga

SEQ ID NO: 3035845 - DNA, 25 bp, Homo sapien
ttccagtagtctgcttcagggtcct

SEQ ID NO: 3035846 - DNA, 25 bp, Homo sapien
ctgggtatagcaagagaaccattac

SEQ ID NO: 3035847 - DNA, 25 bp, Homo sapien
atcgcaaacttacagtatatgatga

SEQ ID NO: 3035848 - DNA, 25 bp, Homo sapien
tacatcatctatactgtagtgtctc

SEQ ID NO: 3035849 - DNA, 25 bp, Homo sapien
gtagtgtctcatcgcaaacttacag

SEQ ID NO: 3035850 - DNA, 25 bp, Homo sapien
gggtgcccggactagtacatcatct

SEQ ID NO: 3035851 - DNA, 25 bp, Homo sapien
catggcttgaaaagcactgtgaggg

SEQ ID NO: 3035852 - DNA, 25 bp, Homo sapien
aggaagcatggcttgaaaagcactg

SEQ ID NO: 3035853 - DNA, 25 bp, Homo sapien
agcatggcttgaaaagcactgtgag

SEQ ID NO: 3035854 - DNA, 25 bp, Homo sapien
gaagcatggcttgaaaagcactgtg

SEQ ID NO: 3035855 - DNA, 25 bp, Homo sapien
gccagagatggcgtaatgatgcaga

SEQ ID NO: 3035856 - DNA, 25 bp, Homo sapien
ggagctagggtctgttaagatctca

SEQ ID NO: 3035857 - DNA, 25 bp, Homo sapien
agatctcatagggacccagggccag

SEQ ID NO: 3035858 - DNA, 25 bp, Homo sapien
cagggccagtgttaaacaagccaga

SEQ ID NO: 3035859 - DNA, 25 bp, Homo sapien
ctggagctggaactgcagactgagg

SEQ ID NO: 3035860 - DNA, 25 bp, Homo sapien
agctggaactgcagactgaggaggc

SEQ ID NO: 3035861 - DNA, 25 bp, Homo sapien
tggagctggaactgcagactgagga

SEQ ID NO: 3035862 - DNA, 25 bp, Homo sapien
ggagctggaactgcagactgaggag

SEQ ID NO: 3035863 - DNA, 25 bp, Homo sapien
ggatctgtccctcaagctgcttgcc

SEQ ID NO: 3035864 - DNA, 25 bp, Homo sapien
cagcacccgggatttatcctgggag

SEQ ID NO: 3035865 - DNA, 25 bp, Homo sapien
tcagagaacgccttacatggaacag

SEQ ID NO: 3035866 - DNA, 25 bp, Homo sapien
ttgagcactgtacccagatgcccct

SEQ ID NO: 3035867 - DNA, 25 bp, Homo sapien
tctttatgccgttcagccccatgag

SEQ ID NO: 3035868 - DNA, 25 bp, Homo sapien
cagtacagtgccctcagaacagtca

SEQ ID NO: 3035869 - DNA, 25 bp, Homo sapien
gaagttatgcatgctattcctgcca

SEQ ID NO: 3035870 - DNA, 25 bp, Homo sapien
tattccagcaaataaagcacaggct

SEQ ID NO: 3035871 - DNA, 25 bp, Homo sapien
tttctcttcatgtagccagggccca

SEQ ID NO: 3035872 - DNA, 25 bp, Homo sapien
tttattttaccagaagggacaggca

SEQ ID NO: 3035873 - DNA, 25 bp, Homo sapien
cagaccagacatgcagcatccacat

SEQ ID NO: 3035874 - DNA, 25 bp, Homo sapien
gtggggcagtgcaacatccaagccc

SEQ ID NO: 3035875 - DNA, 25 bp, Homo sapien
gaccagacatgcagcatccacatgc

SEQ ID NO: 3035876 - DNA, 25 bp, Homo sapien
cccagaccagacatgcagcatccac

SEQ ID NO: 3035877 - DNA, 25 bp, Homo sapien
agacagaggattgggttgcttcccc

SEQ ID NO: 3035878 - DNA, 25 bp, Homo sapien
gccctagcaggaagaaggtctacac

SEQ ID NO: 3035879 - DNA, 25 bp, Homo sapien
cactcgattctgtacagggttggca

SEQ ID NO: 3035880 - DNA, 25 bp, Homo sapien
gaagaaagatggcacaagggctctg

SEQ ID NO: 3035881 - DNA, 25 bp, Homo sapien
gaaaggacagggtatgagcgctggc

SEQ ID NO: 3035882 - DNA, 25 bp, Homo sapien
aaggacagggtatgagcgctggctg

SEQ ID NO: 3035883 - DNA, 25 bp, Homo sapien
aaaggacagggtatgagcgctggct

SEQ ID NO: 3035884 - DNA, 25 bp, Homo sapien
ggacagtgaccgtcctacccagaac

SEQ ID NO: 3035885 - DNA, 25 bp, Homo sapien
aacatcttcagcttaatctacatga

SEQ ID NO: 3035886 - DNA, 25 bp, Homo sapien
gacagatgcacagagaacttcaagg

SEQ ID NO: 3035887 - DNA, 25 bp, Homo sapien
ccccacagagagtgattgtaataaa

SEQ ID NO: 3035888 - DNA, 25 bp, Homo sapien
ggcctgaacacgcagcacttctggt

SEQ ID NO: 3035889 - DNA, 25 bp, Homo sapien
aggcaccagagtcagtaacgttccc

SEQ ID NO: 3035890 - DNA, 25 bp, Homo sapien
ggtcccttcgagataaggcaccaga

SEQ ID NO: 3035891 - DNA, 25 bp, Homo sapien
cttctggtcccttcgagataaggca

SEQ ID NO: 3035892 - DNA, 25 bp, Homo sapien
ctgtgggattaaaacgggtgctgga

SEQ ID NO: 3035893 - DNA, 25 bp, Homo sapien
tgtgggattaaaacgggtgctggag

SEQ ID NO: 3035894 - DNA, 25 bp, Homo sapien
agggagggccgggtggctgctgaag

SEQ ID NO: 3035895 - DNA, 25 bp, Homo sapien
ccagtggccttcttgatcaggggta

SEQ ID NO: 3035896 - DNA, 25 bp, Homo sapien
ctgcacaccagtggccttcttgatc

SEQ ID NO: 3035897 - DNA, 25 bp, Homo sapien
accagtggccttcttgatcaggggt

SEQ ID NO: 3035898 - DNA, 25 bp, Homo sapien
cacaccagtggccttcttgatcagg

SEQ ID NO: 3035899 - DNA, 25 bp, Homo sapien
gaggaccacaatctcatcgaccttg

SEQ ID NO: 3035900 - DNA, 25 bp, Homo sapien
ccagcagtcggttcacttctgatgt

SEQ ID NO: 3035901 - DNA, 25 bp, Homo sapien
aggtccacgcctgtgagggcatgca

SEQ ID NO: 3035902 - DNA, 25 bp, Homo sapien
agctcggccagcagtcggttcactt

SEQ ID NO: 3035903 - DNA, 25 bp, Homo sapien
gtggggcagcgattttggcagcaat

SEQ ID NO: 3035904 - DNA, 25 bp, Homo sapien
gcctccccgattttgcggatcttct

SEQ ID NO: 3035905 - DNA, 25 bp, Homo sapien
ttgagcttcatccgctcagcctctg

SEQ ID NO: 3035906 - DNA, 25 bp, Homo sapien
tgcatccccgtatttctggtaggct

SEQ ID NO: 3035907 - DNA, 25 bp, Homo sapien
ttgcccatcgcctcgatgactgccg

SEQ ID NO: 3035908 - DNA, 25 bp, Homo sapien
ccttccggctctggccagggaaagg

SEQ ID NO: 3035909 - DNA, 25 bp, Homo sapien
ccagcaaaccttcaaaccctctgct

SEQ ID NO: 3035910 - DNA, 25 bp, Homo sapien
tgggagacattggaacggagtgggg

SEQ ID NO: 3035911 - DNA, 25 bp, Homo sapien
gagtggggtggcctgaccttccggc

SEQ ID NO: 3035912 - DNA, 25 bp, Homo sapien
ggatcttctgctgttcacgggcccc

SEQ ID NO: 3035913 - DNA, 25 bp, Homo sapien
tttcaccctcggcaatctgctggat

SEQ ID NO: 3035914 - DNA, 25 bp, Homo sapien
cttgtccgtacgcaggatctcctgt

SEQ ID NO: 3035915 - DNA, 25 bp, Homo sapien
gtttcttgcgctgcacaacctcaat

SEQ ID NO: 3035916 - DNA, 25 bp, Homo sapien
tcgaaggctcgcttagagtcagcaa

SEQ ID NO: 3035917 - DNA, 25 bp, Homo sapien
cttagagtcagcaatcttggtgtct

SEQ ID NO: 3035918 - DNA, 25 bp, Homo sapien
gcagctcgaaggctcgcttagagtc

SEQ ID NO: 3035919 - DNA, 25 bp, Homo sapien
tagagtcagcaatcttggtgtctgc

SEQ ID NO: 3035920 - DNA, 25 bp, Homo sapien
gcagtctgcgtcttgcccagggagc

SEQ ID NO: 3035921 - DNA, 25 bp, Homo sapien
gatagtccactttgtcatacacgtc

SEQ ID NO: 3035922 - DNA, 25 bp, Homo sapien
cggccacgccaatgtcagcatctct

SEQ ID NO: 3035923 - DNA, 25 bp, Homo sapien
cggatgcctgcgtcccgttcagcct

SEQ ID NO: 3035924 - DNA, 25 bp, Homo sapien
ctgaggatctcaatgcccatgcggc

SEQ ID NO: 3035925 - DNA, 25 bp, Homo sapien
ggtcctgataaatctgctccactgt

SEQ ID NO: 3035926 - DNA, 25 bp, Homo sapien
ttggcaaactggtcccggtcctgat

SEQ ID NO: 3035927 - DNA, 25 bp, Homo sapien
gcaccagcttggcaaactggtcccg

SEQ ID NO: 3035928 - DNA, 25 bp, Homo sapien
ccccgtgaggctcctcaaaggctga

SEQ ID NO: 3035929 - DNA, 25 bp, Homo sapien
gttttagcttgaaactcctgtgaaa

SEQ ID NO: 3035930 - DNA, 25 bp, Homo sapien
ggccccgtgaggctcctcaaaggct

SEQ ID NO: 3035931 - DNA, 25 bp, Homo sapien
ccgtgaggctcctcaaaggctgaac

SEQ ID NO: 3035932 - DNA, 25 bp, Homo sapien
gatggagcgcagatgtccctccagg

SEQ ID NO: 3035933 - DNA, 25 bp, Homo sapien
aggatggagcgcagatgtccctcca

SEQ ID NO: 3035934 - DNA, 25 bp, Homo sapien
gggtctgcaggacgacgtttttgat

SEQ ID NO: 3035935 - DNA, 25 bp, Homo sapien
tgcaggacgacgtttttgatgtcct

SEQ ID NO: 3035936 - DNA, 25 bp, Homo sapien
tgctcacaagccacggccaggagtt

SEQ ID NO: 3035937 - DNA, 25 bp, Homo sapien
acaagccacggccaggagttccttc

SEQ ID NO: 3035938 - DNA, 25 bp, Homo sapien
aactgctcacaagccacggccagga

SEQ ID NO: 3035939 - DNA, 25 bp, Homo sapien
tcacaagccacggccaggagttcct

SEQ ID NO: 3035940 - DNA, 25 bp, Homo sapien
cagggaacaaggaaggcctggattc

SEQ ID NO: 3035941 - DNA, 25 bp, Homo sapien
ccagggaacaaggaaggcctggatt

SEQ ID NO: 3035942 - DNA, 25 bp, Homo sapien
agggaacaaggaaggcctggattct

SEQ ID NO: 3035943 - DNA, 25 bp, Homo sapien
ctcggccgtctctacgtcctcgcag

SEQ ID NO: 3035944 - DNA, 25 bp, Homo sapien
tacgtcctcgcagcggggctgcaac

SEQ ID NO: 3035945 - DNA, 25 bp, Homo sapien
gacacccgtcacagttaaagctacc

SEQ ID NO: 3035946 - DNA, 25 bp, Homo sapien
tgggcgacacccgtcacagttaaag

SEQ ID NO: 3035947 - DNA, 25 bp, Homo sapien
ccaagaaacgcaaaacaggggcatg

SEQ ID NO: 3035948 - DNA, 25 bp, Homo sapien
aagaaacgcaaaacaggggcatggg

SEQ ID NO: 3035949 - DNA, 25 bp, Homo sapien
ctgccaagaaacgcaaaacaggggc

SEQ ID NO: 3035950 - DNA, 25 bp, Homo sapien
gccaagaaacgcaaaacaggggcat

SEQ ID NO: 3035951 - DNA, 25 bp, Homo sapien
gaggactctccacggggctgagatg

SEQ ID NO: 3035952 - DNA, 25 bp, Homo sapien
aggtggagggaggactctccacggg

SEQ ID NO: 3035953 - DNA, 25 bp, Homo sapien
aaggtggagggaggactctccacgg

SEQ ID NO: 3035954 - DNA, 25 bp, Homo sapien
gagggaggactctccacggggctga

SEQ ID NO: 3035955 - DNA, 25 bp, Homo sapien
tgtttccccacttgcagtccaatag

SEQ ID NO: 3035956 - DNA, 25 bp, Homo sapien
ttgctgtttccccacttgcagtcca

SEQ ID NO: 3035957 - DNA, 25 bp, Homo sapien
cagtccaataggcaagggcaaggga

SEQ ID NO: 3035958 - DNA, 25 bp, Homo sapien
cacttgcagtccaataggcaagggc

SEQ ID NO: 3035959 - DNA, 25 bp, Homo sapien
gcaacccctgttacgaatagtggaa

SEQ ID NO: 3035960 - DNA, 25 bp, Homo sapien
ctccgacgtctcaatattctcacag

SEQ ID NO: 3035961 - DNA, 25 bp, Homo sapien
ggatggtcataacctccagagacag

SEQ ID NO: 3035962 - DNA, 25 bp, Homo sapien
tattctcacagcgacacaggatggt

SEQ ID NO: 3035963 - DNA, 25 bp, Homo sapien
cagccagggggtggggagaggtagg

SEQ ID NO: 3035964 - DNA, 25 bp, Homo sapien
ctgaggagcagccagggggtgggga

SEQ ID NO: 3035965 - DNA, 25 bp, Homo sapien
agcagccagggggtggggagaggta

SEQ ID NO: 3035966 - DNA, 25 bp, Homo sapien
gaggagcagccagggggtggggaga

SEQ ID NO: 3035967 - DNA, 25 bp, Homo sapien
gcccagccgccaaacacgtactgtt

SEQ ID NO: 3035968 - DNA, 25 bp, Homo sapien
agtgtcggagatacaccaccaggcc

SEQ ID NO: 3035969 - DNA, 25 bp, Homo sapien
tttatagtcggaaccacaacagccc

SEQ ID NO: 3035970 - DNA, 25 bp, Homo sapien
ctctgagtgtcggagatacaccacc

SEQ ID NO: 3035971 - DNA, 25 bp, Homo sapien
cacagtgtcttgtgtgtcaggccaa

SEQ ID NO: 3035972 - DNA, 25 bp, Homo sapien
cacacaccactttgcatgaggagga

SEQ ID NO: 3035973 - DNA, 25 bp, Homo sapien
gcactgctggagtacacggctcact

SEQ ID NO: 3035974 - DNA, 25 bp, Homo sapien
tgatactggcagacaacttctagag
